(19) United States
(12) Patent Application Publication
(10) Pub. No.: US 2022/0136013 A1
(43) Pub. Date: May 5, 2022

(54) DIFFERENTIAL KNOCKOUT OF A HETEROZYGOUS ALLELE OF STAT1

(71) Applicant: EMENDOBIO INC., Miami, FL (US)

(72) Inventors: David Baram, Tel Aviv (IL); Lior Izhar, Tel Aviv (IL); Asael Herman, Ness-Ziona (IL); Rafi Emmanuel, Ramla (IL); Michal Golan Mashiach, Ness-Ziona (IL); Joseph Georgeson, Rehovot (IL)

(73) Assignee: EmendoBio Inc., Miami, FL (US)

(21) Appl. No.: 17/433,977

(22) PCT Filed: Feb. 25, 2020
(86) PCT No.: PCT/US2020/019633

§ 371 Date: Aug. 25, 2021

Related U.S. Application Data
(60) Provisional application No. 62/810,879, filed on Feb. 26, 2019.

(51) Int. Cl. C12N 15/90; C12N 9/22; C12N 15/11; A61K 38/46; A61K 31/7105

(52) U.S. Cl. CPC C12N 15/907; C12N 9/22; C12N 15/11; C12N 2320/34; A61K 31/7105; C12N 2310/20; C12N 2800/80; A61K 38/465

(57) ABSTRACT

RNA molecules comprising a guide sequence portion having 17-25 contiguous nucleotides containing nucleotides in the sequence set forth in any one of SEQ NOs 1-37365 and compositions, methods, and uses thereof.

[0001] This application claims the benefit of U.S. Provisional Application No. 62/810,879, filed Feb. 26, 2019, the contents of which is hereby incorporated by reference.

[0002] Throughout this application, various publications are referenced, including referenced in parenthesis. The disclosures of all publications mentioned in this application in their entireties are hereby incorporated by reference into this application in order to provide additional description of the art to which this invention pertains and of the features in the art which can be employed with this invention.

### REFERENCE TO SEQUENCE LISTING

[0003] This application incorporates-by-reference nucleotide sequences which are present in the file named “200225_90868-A-PCT_Sequence_Listing_AWG.txt”, which is 6,847 kilobytes in size, and which was created on Feb. 13, 2020 in the IBM-PC machine format, having an operating system compatibility with MS-Windows, which is contained in the text file filed Feb. 25, 2020 as part of this application.

### BACKGROUND OF INVENTION

[0004] There are several classes of DNA variation in the human genome, including insertions and deletions, differences in the copy number of repeated sequences, and single nucleotide polymorphisms (SNPs). A SNP is a DNA sequence variation occurring when a single nucleotide (adenine (A), thymine (T), cytosine (C), or guanine (G)) in the genome differs between human subjects or paired chromosomes in an individual. Over the years, the different types of DNA variations have been the focus of the research community either as markers in studies to pinpoint traits or disease causation or as potential causes of genetic disorders.

[0005] A genetic disorder is caused by one or more abnormalities in the genome. Genetic disorders may be regarded as either “dominant” or “recessive.” Recessive genetic disorders are those which require two copies (i.e., two alleles) of the abnormal/defective gene to be present. In contrast, a dominant genetic disorder involves a gene or genes which exhibit(s) dominance over a normal (functional/healthy) gene or genes. As such, in dominant genetic disorders only a single copy (i.e., allele) of an abnormal gene is required to cause or contribute to the symptoms of a particular genetic disorder. Such mutations include, for example, gain-of-function mutations in which the altered gene product possesses a new molecular function or a new pattern of gene expression. Other examples include dominant negative mutations, which have a gene product that acts antagonistically to the wild-type allele.

### Chronic Mucocutaneous Candidiasis (CMC)

[0006] Autosomal dominant Chronic mucocutaneous candidiasis (CMC) is characterized by susceptibility to candida infection of skin, nails, and mucous membranes.

[0007] Signal transducer and activator of transcription 1 (STAT1) encodes a transcription factor belonging to the signal transducers and activator of transcription family shown to be involved in regulation of the development of various types of immune cells. Several gain-of-function mutations in the coiled coil domain or the DNA binding domain of STAT1 were shown to be associated with autosomal dominant chronic mucocutaneous candidiasis (CMC).

### SUMMARY OF THE INVENTION

[0008] Disclosed is an approach for knocking out the expression of a dominant-mutated allele by disrupting the dominant-mutated allele or degrading the resulting mRNA.

[0009] The present disclosure provides a method for utilizing at least one naturally occurring nucleotide difference or polymorphism (e.g., single nucleotide polymorphism (SNP)) for distinguishing/discriminating between two alleles of a gene, one allele bearing a mutation such that it encodes a mutated protein causing a disease phenotype (“mutated allele”) and a particular sequence in a SNP position (REF/SNP), and the other allele encoding for a functional protein (“functional allele”). In some embodiments, the SNP position is utilized for distinguishing/discriminating between two alleles of a gene bearing one or more disease associated mutations, such as to target one of the alleles bearing both the particular sequence in the SNP position (SNP/REF) and a disease associated mutation. In some embodiments, the disease-associated mutation is targeted. In some embodiments, the method further comprises the step of knocking out expression of the mutated protein and allowing expression of the functional protein.

[0010] The present disclosure also provides a method for modifying in a cell a mutant allele of the signal transducer and activator of transcription 1 (STAT1) gene having a mutation associated with chronic mucocutaneous candidiasis (CMC), the method comprising
[0011] introducing to the cell a composition comprising:
   [0012] a CRISPR nuclease or a sequence encoding the CRISPR nuclease; and
   [0013] a first RNA molecule comprising a guide sequence portion having 17-25 nucleotides or a nucleotide sequence encoding the same,
[0014] wherein a complex of the CRISPR nuclease and the first RNA molecule affects a double strand break in the mutant allele of the STAT1 gene.

[0015] According to embodiments of the present invention, there is provided a first RNA molecule comprising a guide sequence portion having 17-25 contiguous nucleotides containing nucleotides in the sequence set forth in any one of SEQ ID NOs 1-37365.

[0016] According to some embodiments of the present invention, there is provided a composition comprising an RNA molecule comprising a guide sequence portion having 17-25 contiguous nucleotides containing nucleotides in the sequence set forth in any one of SEQ ID NOs 1-37365 and a CRISPR nuclease.

[0017] According to some embodiments of the present invention, there is provided a method for inactivating a mutant STAT1 allele in a cell, the method comprising delivering to the cell a composition comprising an RNA molecule comprising a guide sequence portion having 17-25 contiguous nucleotides containing nucleotides in the sequence set forth in any one of SEQ ID NOs 1-37365 and a CRISPR nuclease. In some embodiments, the cell is a stem cell. In some embodiments, the stem cell is a hematopoietic stem/progenitor cell (HSC). In some embodiments, the delivering to the cell is performed in vitro, ex vivo, or in vivo. In some embodiments, the method is performed ex vivo and the cell is provided/explanted from an individual patient. In some embodiments, the method further comprises the step of introducing the resulting cell, with the modified/knocked out mutant STAT1 allele, into the individual patient (e.g. autologous transplantation).

[0018] According to some embodiments of the present invention, there is provided a method for treating CMC, the method comprising delivering to a cell of a subject having CMC a composition comprising an RNA molecule comprising a guide sequence portion having 17-25 contiguous nucleotides containing nucleotides in the sequence set forth in any one of SEQ ID NOs 1-37365 and a CRISPR nuclease.

[0019] According to some embodiments of the present invention, there is provided use of a composition comprising an RNA molecule comprising a guide sequence portion having 17-25 contiguous nucleotides containing nucleotides in the sequence set forth in any one of SEQ ID NOs 1-37365 and a CRISPR nuclease for inactivating a mutant STAT1 allele in a cell, comprising delivering to the cell the composition comprising an RNA molecule comprising a guide sequence portion having 17-25 contiguous nucleotides containing nucleotides in the sequence set forth in any one of SEQ ID NOs 1-37365 and a CRISPR nuclease.

[0020] According to embodiments of the present invention, there is provided a medicament comprising an RNA molecule comprising a guide sequence portion having 17-25 contiguous nucleotides containing nucleotides in the sequence set forth in any one of SEQ ID NOs 1-37365 and a CRISPR nuclease for use in inactivating a mutant STAT1 allele in a cell, wherein the medicament is administered by delivering to the cell the composition comprising an RNA molecule comprising a guide sequence portion having 17-25 contiguous nucleotides containing nucleotides in the sequence set forth in any one of SEQ ID NOs 1-37365 and a CRISPR nuclease.

[0021] According to some embodiments of the present invention, there is provided use of a composition comprising an RNA molecule comprising a guide sequence portion having 17-25 contiguous nucleotides containing nucleotides in the sequence set forth in any one of SEQ ID NOs 1-37365 and a CRISPR nuclease for treating ameliorating or preventing CMC, comprising delivering to a cell of a subject having or at risk of having CMC the composition of comprising an RNA molecule comprising a guide sequence portion having 17-25 contiguous nucleotides containing nucleotides in the sequence set forth in any one of SEQ ID NOs 1-37365 and a CRISPR nuclease. In some embodiments, the method is performed ex vivo and the cell is provided/explanted from the subject. In some embodiments, the method further comprises the step of introducing the resulting cell, with the modified/knocked out mutant STAT1 allele, into the subject (e.g. autologous transplantation).

[0022] According to some embodiments of the present invention, there is provided a medicament comprising the composition comprising an RNA molecule comprising a guide sequence portion having 17-25 contiguous nucleotides containing nucleotides in the sequence set forth in any one of SEQ ID NOs 1-37365 and a CRISPR nuclease for use in treating ameliorating or preventing CMC, wherein the medicament is administered by delivering to a cell of a subject having or at risk of having CMC the composition comprising an RNA molecule comprising a guide sequence portion having 17-25 contiguous nucleotides containing nucleotides in the sequence set forth in any one of SEQ ID NOs 1-37365 and a CRISPR nuclease.

[0023] According to some embodiments of the present invention, there is provided a kit for inactivating a mutant STAT1 allele in a cell, comprising an RNA molecule comprising a guide sequence portion having 17-25 contiguous nucleotides containing nucleotides in the sequence set forth in any one of SEQ ID NOs 1-37365, a CRISPR nuclease, and/or a tracrRNA molecule; and instructions for delivering the RNA molecule; CRISPR nuclease, and/or the tracrRNA to the cell.

[0024] According to some embodiments of the present invention, there is provided a kit for treating CMC in a subject, comprising an RNA molecule comprising a guide sequence portion having 17-25 contiguous nucleotides containing nucleotides in the sequence set forth in any one of SEQ ID NOs 1-37365, a CRISPR nuclease, and/or a tracrRNA molecule; and instructions for delivering the RNA molecule; CRISPR nuclease, and/or the tracrRNA to a cell of a subject having or at risk of having CMC.

### BRIEF DESCRIPTION OF THE DRAWINGS

[0025] FIG. 1A and FIG. 1B: SpCas9 guide activity screen with STAT1 guides in HeLa cells. FIG. 1A: Schematic representation of the editing strategies. Strategy a1—Excision of Exon 3; Strategy a2—Excision of Exon 4; and Strategy a3—Excision of Exon 4-5. In all Excision strategies two guides are used, one of which is discriminatory and the other of which is a non-discriminatory guide that directs editing in Intron 3 of the STAT1 gene. Strategy b—Creation of a frameshift in Exon 3. In Strategy b the frameshift is generated by the use of a single discriminatory guide. FIG. 1B: SpCas9 guide screen in HeLa cells. Genotyping of HeLa cells was determined by NGS, as indicated in Table 1 below. SpCas9 coding plasmid was co-transfected with each of the guide plasmids. Cells were harvested 72 h post DNA transfection. Genomic DNA was extracted and used for capillary electrophoreses upon using on-target primers which amplify the endogenous genomic regions. The graph represents the average of % editing ±STDV of three independent experiments.

TABLE 1
Genotyping of Hela cells

| | Intron 2 | Intron 2 | Intron 2 | Exon 3 | Intron 4 | Intron 5 | Intron 5 |
|---|---|---|---|---|---|---|---|
| SNP | rs13029532 | rs36077929 | rs16833172 | rs2066802 | rs10199181 | rs2030171 | rs10183196 |
| | A > C | C > T | G > A | A > G | A > T | G > A | G > A |
| HeLa | AA | CT | GA | AA | TT | AA | GA |

[0026] FIGS. 2A-2D: High editing and excision rates of STAT1 indication editing strategies. FIG. 2A: The editing levels using sg10 (SEQ ID NO: 24295), sg18 (SEQ ID NO: 25501), sg19alt (SEQ ID NO: 17213), sg22 (SEQ ID NO: 15340), and sg28 (SEQ ID NO: 35795) were measured by next-generation sequencing (NGS). The editing was conducted on HSCs from a healthy donor homozygous for the targeted SNPs. Therefore, the editing and excision activities are expected to be biallelic. FIG. 2B: For the droplet digital PCR (ddPCR), two regions in STAT1 (Exon3 and Exon 4) were amplified using probes labeled with FAM. In each ddPCR reaction, RPP30 amplified with a HEX probe was used for normalization. The ratio between the HEX and FAM signals was translated to excision efficiency. FIG. 2C: The level of STAT1 mRNA of all treatments was assessed by qRT-PCR using primer sets for Exon 3-4 and Exon 9-10. The level of the mRNA is quantified relative to untreated cells that were not edited. The graph represents the mean and error bars of two independent experiments.

[0027] FIGS. 3A-3E: Establishment of a U3A Cell-System for STAT1 Indication and Editing Validation—The U3A cell-system serves as a model for studying ectopic STAT1 WT and G274R mutated based editing and gene expression. FIG. 3A: Cartoon representing three viral based stable lines established in the U3A human fibrosarcoma cell line, which harbors an intrinsic genomic STAT1 mutation leading to lack of expression and unresponsiveness to interferon-gamma induction: WT-STAT1-mCherry; mutant R274G-STAT1-GFP encompassing rs066802 SNP for editing purposes; and WT and R274G-mutant biallelic for gain-of-function (GOF) evaluation of STAT1 mediated gene expression. FIG. 3B. STAT1 protein expression and phosphorylation was determined by western blot upon 100 ng/ml IFNg induction for one hour on each line and blotted against HA and Phospho-STAT1. All STAT1 alleles were expressed at equal strength, as shown by western blotting. Higher levels of STAT1 phosphorylation were observed for the R274G allele than for the WT allele after stimulation with IFN-g. FIG. 3C. FACS analysis validated homogeneous expression of WT-mCherry and R274G-mutant-GFP alleles compared to parental cells. FIG. 3D. mRNA was extracted from WT, mutant, and biallelic lines following IFNg induction and then subjected to NGS targeting exon 10 in order to determine WT/mutant transcriptional levels derived from the biallelic line. A 1:1 mRNA ratio was determined for WT and mutant alleles derived from the biallelic line. FIG. 3E. Quantitative RT-PCR was used to measure the induction of CXCL10, CXCL11, PDL1, GPB1, UBD & IRF1 in WT, R274G mutant, and heterozygote backgrounds following a 24 hour stimulation with 100 ng/ml IFN-g. The level of mRNA is quantified relative to WT. The graph displays the mean and error bars of triplicates. A 24 h of IFN-g induction revealed the most prominent GOF effect of mutant STAT1 mediated differential gene expression over WT allele.

[0028] FIGS. 4A-4D: Editing of mutant STAT1 restores WT gene expression. FIG. 4A. Cartoon depicting WT and R274G-mutant biallelic line for GOF evaluation of mutant STAT1 mediated gene expression. FIG. 4B. Graph representing % of the specific editing determined by NGS. g17Alt targets the alternative form of a SNP located in Exon 3 and linked to the mutant allele, discriminating from the WT allele (linked to the reference form of the SNP that is not targeted by g17Alt) and leading to 60% editing efficiency. FIG. 4C. Editing specificity is validated by FACS analysis depicting a reduction of GFP driven from a STAT1 mutant allele without abrogating the WT allele depicted by mCherry. FIG. 4D. Quantitative RT-PCR was used to measure the reduction of mutant STAT1 target genes following editing of a R274G mutant allele and stimulation with 100 ng/ml IFN-g. The level of the mRNA is quantified relative untreated cells. The graph represents the mean and error bars of triplicates. The graph shows a pronounced reduction of mutant STAT1 mediated GOF genes to levels of WT mediated gene expression.

### DETAILED DESCRIPTION

[0029] Unless otherwise defined, all technical and/or scientific terms used herein have the same meaning as commonly understood by one of ordinary skill in the art to which the invention pertains. Although methods and materials similar or equivalent to those described herein can be used in the practice or testing of embodiments of the invention, exemplary methods and/or materials are described below. In case of conflict, the patent specification, including definitions, will control. In addition, the materials, methods, and examples are illustrative only and are not intended to be necessarily limiting.

[0030] It should be understood that the terms “a” and “an” as used above and elsewhere herein refer to “one or more” of the enumerated components. It will be clear to one of ordinary skill in the art that the use of the singular includes the plural unless specifically stated otherwise. Therefore, the terms “a,” “an” and “at least one” are used interchangeably in this application.

[0031] For purposes of better understanding the present teachings and in no way limiting the scope of the teachings, unless otherwise indicated, all numbers expressing quantities, percentages or proportions, and other numerical values used in the specification and claims, are to be understood as being modified in all instances by the term “about.” Accordingly, unless indicated to the contrary, the numerical parameters set forth in the following specification and attached claims are approximations that may vary depending upon the desired properties sought to be obtained. At the very least, each numerical parameter should at least be construed in light of the number of reported significant digits and by applying ordinary rounding techniques.

[0032] Unless otherwise stated, adjectives such as “substantially” and “about” modifying a condition or relationship characteristic of a feature or features of an embodiment of the invention, are understood to mean that the condition or characteristic is defined to within tolerances that are acceptable for operation of the embodiment for an application for which it is intended. Unless otherwise indicated, the word “or” in the specification and claims is considered to be the inclusive “or” rather than the exclusive or, and indicates at least one of, or any combination of items it conjoins.

[0033] In the description and claims of the present application, each of the verbs, “comprise,” “include” and “have” and conjugates thereof, are used to indicate that the object or objects of the verb are not necessarily a complete listing of components, elements or parts of the subject or subjects of the verb. Other terms as used herein are meant to be defined by their well-known meanings in the art.

[0034] The terms “nucleic acid template” and “donor”, refer to a nucleotide sequence that is inserted or copied into a genome. The nucleic acid template comprises a nucleotide sequence, e.g., of one or more nucleotides, that will be added to or will template a change in the target nucleic acid or may be used to modify the target sequence. A nucleic acid template sequence may be of any length, for example between 2 and 10,000 nucleotides in length, preferably between about 100 and 1,000 nucleotides in length, more preferably between about 200 and 500 nucleotides in length. A nucleic acid template may be a single stranded nucleic acid, a double stranded nucleic acid. In some embodiments, the nucleic acid template comprises a nucleotide sequence, e.g., of one or more nucleotides, that corresponds to wild type sequence of the target nucleic acid, e.g., of the target position. In some embodiments, the nucleic acid template comprises a nucleotide sequence, e.g., of one or more ribonucleotides, that corresponds to wild type sequence of the target nucleic acid, e.g., of the target position. In some embodiments, the nucleic acid template comprises modified nucleotides.

[0035] In some embodiments of the present invention, a DNA nuclease is utilized to affect a DNA break at a target site to induce cellular repair mechanisms, for example, but not limited to, non-homologous end-joining (NHEJ) or homology-directed repair (HDR). During classical NHEJ, two ends of a double-strand break (DSB) site are ligated together in a fast but also inaccurate manner (i.e. frequently resulting in mutation of the DNA at the cleavage site in the form of small insertion or deletions) whereas during HDR, an intact homologous DNA donor is used to replace the DNA surrounding the cleavage site in an accurate manner. HDR can also mediate the precise insertion of exogenous DNA at the break site. Accordingly, the term “homology-directed repair” or “HDR” refers to a mechanism for repairing DNA damage in cells, for example, during repair of double-stranded and single-stranded breaks in DNA. HDR requires nucleotide sequence homology and uses a “nucleic acid template” (nucleic acid template or donor template used interchangeably herein) to repair the sequence where the double-stranded or single break occurred (e.g., DNA target sequence). This results in the transfer of genetic information from, for example, the nucleic acid template to the DNA target sequence. HDR may result in alteration of the DNA target sequence (e.g., insertion, deletion, mutation) if the nucleic acid template sequence differs from the DNA target sequence and part or all of the nucleic acid template polynucleotide or oligonucleotide is incorporated into the DNA target sequence. In some embodiments, an entire nucleic acid template polynucleotide, a portion of the nucleic acid template polynucleotide, or a copy of the nucleic acid template is integrated at the site of the DNA target sequence.

[0036] Insertion of an exogenous sequence (also called a “donor sequence,” donor template,” “donor molecule” or “donor”), for example, for correction of a mutant gene or for increased expression of a wild-type gene can also be carried out. It will be readily apparent that the donor sequence is typically not identical to the genomic sequence where it is placed. A donor sequence can contain a non-homologous sequence flanked by two regions of homology to allow for efficient HDR at the location of interest. Additionally, donor sequences can comprise a vector molecule containing sequences that are not homologous to the region of interest in cellular chromatin. A donor molecule can contain several, discontinuous regions of homology to cellular chromatin. For example, for targeted insertion of sequences not normally present in a region of interest, said sequences can be present in a donor nucleic acid molecule and flanked by regions of homology to sequence in the region of interest.

[0037] The donor polynucleotide can be DNA or RNA, single-stranded and/or double-stranded and can be introduced into a cell in linear or circular form. See, e.g., U.S. Patent Publication Nos. 20100047805; 20110281361; 20110207221; and 20190330620. If introduced in linear form, the ends of the donor sequence can be protected (e.g., from exonucleolytic degradation) by methods known to those of skill in the art. For example, one or more dideoxynucleotide residues are added to the 3′ terminus of a linear molecule and/or self-complementary oligonucleotides are ligated to one or both ends. See, for example, Chang et al. (1987) Proc. Natl. Acad. Sci. USA 84:4959-4963; Nehls et al. (1996) Science 272:886-889. Additional methods for protecting exogenous polynucleotides from degradation include, but are not limited to, addition of terminal amino group(s) and the use of modified internucleotide linkages such as, for example, phosphorothioates, phosphoramidates, and O-methyl ribose or deoxyribose residues.

[0038] Accordingly, embodiments of the present invention using a donor template for HDR may be DNA or RNA, single-stranded and/or double-stranded and can be introduced into a cell in linear or circular form. In embodiments of the present invention using: (1) a nuclease associated with an RNA molecule comprising a guide sequence to affect a double strand break in a gene prior to HDR and (2) a donor template for HDR.

[0039] A donor sequence may also be an oligonucleotide and be used for gene correction or targeted alteration of an endogenous sequence. The oligonucleotide may be introduced to the cell on a vector, may be electroporated into the cell, or may be introduced via other methods known in the art. The oligonucleotide can be used to ‘ correct’ a mutated sequence in an endogenous gene (e.g., the sickle mutation in beta globin), or may be used to insert sequences with a desired purpose into an endogenous locus (e.g. a splice acceptor sequence).

[0040] A polynucleotide can be introduced into a cell as part of a vector molecule having additional sequences such as, for example, replication origins, promoters and genes encoding antibiotic resistance. Moreover, donor polynucleotides can be introduced as naked nucleic acid, as nucleic acid complexed with an agent such as a liposome or poloxamer, or can be delivered by viruses (e.g., adenovirus, AAV, herpesvirus, retrovirus, lentivirus and integrase defective lentivirus (IDLV)).

[0041] The donor is may be inserted so that its expression is driven by the endogenous promoter at the integration site, namely the promoter that drives expression of the endogenous gene into which the donor is inserted. However, it will be apparent that the donor may comprise a promoter and/or enhancer, for example a constitutive promoter or an inducible or tissue specific promoter.

[0042] The donor molecule may be inserted into an endogenous gene such that all, some or none of the endogenous gene is expressed. For example, a transgene as described herein may be inserted into an endogenous locus such that some (N-terminal and/or C-terminal to the transgene) or none of the endogenous sequences are expressed, for example as a fusion with the transgene. In other embodiments, a transgene (e.g., with or without additional coding sequences such as for the endogenous gene) is integrated into any endogenous locus, for example a safe-harbor locus, for example a CCRS gene, a CXCR4 gene, a PPP1R12c (also known as AAVS1) gene, an albumin gene or a Rosa gene. See, e.g., U.S. Pat. Nos. 7,951,925 and 8,110,379; U.S. Publication Nos. 20080159996; 201000218264; 20100291048; 20120017290; 20110265198; 20130137104; 20130122591; 20130177983 and 20130177960 and U.S. Provisional Application No. 61/823,689).

[0043] When endogenous sequences (endogenous or part of the transgene) are expressed with the transgene, the endogenous sequences may be full-length sequences (wild-type or mutant) or partial sequences. Preferably the endogenous sequences are functional. Non-limiting examples of the function of these full length or partial sequences include increasing the serum half-life of the polypeptide expressed by the transgene (e.g., therapeutic gene) and/or acting as a carrier.

[0044] Furthermore, although not required for expression, exogenous sequences may also include transcriptional or translational regulatory sequences, for example, promoters, enhancers, insulators, internal ribosome entry sites, sequences encoding 2A peptides and/or polyadenylation signals.

[0045] In certain embodiments, the donor molecule comprises a sequence selected from the group consisting of a gene encoding a protein (e.g., a coding sequence encoding a protein that is lacking in the cell or in the individual or an alternate version of a gene encoding a protein), a regulatory sequence and/or a sequence that encodes a structural nucleic acid such as a microRNA or siRNA.

[0046] As used herein, the term “modified cells” refers to cells in which a double strand break is affected by a complex of an RNA molecule and the CRISPR nuclease as a result of hybridization with the target sequence, i.e. on-target hybridization. The term “modified cells” may further encompass cells in which a repair or correction of a mutation was affected following the double strand break.

[0047] This invention provides a modified cell or cells obtained by use of any of the methods described herein. In an embodiment these modified cell or cells are capable of giving rise to progeny cells. In an embodiment these modified cell or cells are capable of giving rise to progeny cells after engraftment. As a non-limiting example, the modified cells may be hematopoietic stem cell (HSC), or any cell suitable for an allogenic cell transplant or autologous cell transplant.

[0048] This invention also provides a composition comprising these modified cells and a pharmaceutically acceptable carrier. Also provided is an in vitro or ex vivo method of preparing this, comprising mixing the cells with the pharmaceutically acceptable carrier.

[0049] As used herein, the term “targeting sequence” or “targeting molecule” refers a nucleotide sequence or molecule comprising a nucleotide sequence that is capable of hybridizing to a specific target sequence, e.g., the targeting sequence has a nucleotide sequence which is at least partially complementary to the sequence being targeted along the length of the targeting sequence. The targeting sequence or targeting molecule may be part of an RNA molecule that can form a complex with a CRISPR nuclease with the targeting sequence serving as the targeting portion of the CRISPR complex. When the molecule having the targeting sequence is present contemporaneously with the CRISPR molecule the RNA molecule is capable of targeting the CRISPR nuclease to the specific target sequence. Each possibility represents a separate embodiment. An RNA molecule can be custom designed to target any desired sequence.

[0050] The term “targets” as used herein, refers to a targeting sequence or targeting molecule's preferential hybridization to a nucleic acid having a targeted nucleotide sequence. It is understood that the term “targets” encompasses variable hybridization efficiencies, such that there is preferential targeting of the nucleic acid having the targeted nucleotide sequence, but unintentional off-target hybridization in addition to on-target hybridization might also occur. It is understood that where an RNA molecule targets a sequence, a complex of the RNA molecule and a CRISPR nuclease molecule targets the sequence for nuclease activity.

[0051] The “guide sequence portion” of an RNA molecule refers to a nucleotide sequence that is capable of hybridizing to a specific target DNA sequence, e.g., the guide sequence portion has a nucleotide sequence which is fully complementary to the DNA sequence being targeted along the length of the guide sequence portion. In some embodiments, the guide sequence portion is 17, 18, 19, 20, 21, 22, 23, 24, or 25 nucleotides in length, or approximately 17-25, 17-24, 17-22, 17-21, 18-25, 18-24, 18-23, 18-22, 18-21, 19-25, 19-24, 19-23, 19-22, 19-21, 19-20, 20-22, 18-20, 20-21, 21-22, or 17-20 nucleotides in length. The entire length of the guide sequence portion is fully complementary to the DNA sequence being targeted along the length of the guide sequence portion. The guide sequence portion may be part of an RNA molecule that can form a complex with a CRISPR nuclease with the guide sequence portion serving as the DNA targeting portion of the CRISPR complex. When the DNA molecule having the guide sequence portion is present contemporaneously with the CRISPR molecule the RNA molecule is capable of targeting the CRISPR nuclease to the specific target DNA sequence. Each possibility represents a separate embodiment. An RNA molecule can be custom designed to target any desired sequence.

[0052] In embodiments of the present invention, an RNA molecule comprises a guide sequence portion having 17-25 contiguous nucleotides containing nucleotides in the sequence set forth in any one of SEQ ID NOs 1-37365.

[0053] The RNA molecule and or the guide sequence portion of the RNA molecule may contain modified nucleotides. Exemplary modifications to nucleotides/polynucleotides may be synthetic and encompass polynucleotides which contain nucleotides comprising bases other than the naturally occurring adenine, cytosine, thymine, uracil, or guanine bases. Modifications to polynucleotides include polynucleotides which contain synthetic, non-naturally occurring nucleosides e.g., locked nucleic acids. Modifications to polynucleotides may be utilized to increase or decrease stability of an RNA. An example of a modified polynucleotide is an mRNA containing 1-methyl pseudo-uridine. For examples of modified polynucleotides and their uses, see U.S. Pat. No. 8,278,036. PCT International Publication No. WO/2015/006747, and Weissman and Kariko, 2015, (9):1416-7, hereby incorporated by reference.

[0054] As used herein, “contiguous nucleotides” set forth in a SEQ ID NO refers to nucleotides in a sequence of nucleotides in the order set forth in the SEQ ID NO without any intervening nucleotides.

[0055] In embodiments of the present invention, the guide sequence portion may be 22 nucleotides in length in the sequence of 22 contiguous nucleotides set forth in any one of SEQ ID NOs: 1-37365. In embodiments of the present invention, the guide sequence portion may be less than 22 nucleotides in length. For example, in embodiments of the present invention the guide sequence portion may be 17, 18, 19, 20, or 21 nucleotides in length. In such embodiments the guide sequence portion may consist of 17, 18, 19, 20, or 21 nucleotides, respectively, in the sequence of 17-22 contiguous nucleotides set forth in any one of SEQ ID NOs: 1-37365. For example, a guide sequence portion having 17 nucleotides in the sequence of 17 contiguous nucleotides set forth in SEQ ID NO: 37383 may consist of any one of the following nucleotide sequences (nucleotides excluded from the contiguous sequence are marked in strike-through):

(SEQ ID NO: 37383)
AAAAAAAUGUACUUGGUUCC
17 nucleotide guide sequence 1:
(SEQ ID NO: 37384) [symbol]
AAAAUGUACUUGGUUCC
17 nucleotide guide sequence 2:
(SEQ ID NO: 37385) [symbol]
AAAAAUGUACUUGGUUC [symbol]
17 nucleotide guide sequence 3:
(SEQ ID NO: 37386) [symbol]
AAAAAAUGUACUUGGUU [symbol]
17 nucleotide guide sequence 4:
(SEQ ID NO: 37387)
AAAAAAAUGUACUUGGU

[symbol]

[0056] In embodiments of the present invention, the guide sequence portion may be greater than 20 nucleotides in length. For example, in embodiments of the present invention the guide sequence portion may be 21, 22, 23, 24 or 25 nucleotides in length. In such embodiments the guide sequence portion comprises 17-25 nucleotides containing the sequence of 20, 21 or 22 contiguous nucleotides set forth in any one of SEQ ID NOs: 1-37383 and additional nucleotides fully complimentary to a nucleotide or sequence of nucleotides adjacent to the 3′ end of the target sequence, 5′ end of the target sequence, or both.

[0057] In embodiments of the present invention a CRISPR nuclease and an RNA molecule comprising a guide sequence portion form a CRISPR complex that binds to a target DNA sequence to effect cleavage of the target DNA sequence. CRISPR nucleases, e.g. Cpfl, may form a CRISPR complex comprising a CRISPR nuclease and RNA molecule without a further tracrRNA molecule. Alternatively, CRISPR nucleases, e.g. Cas9, may form a CRISPR complex between the CRISPR nuclease, an RNA molecule, and a tracrRNA molecule.

[0058] In embodiments of the present invention, the RNA molecule may further comprise the sequence of a tracrRNA molecule. Such embodiments may be designed as a synthetic fusion of the guide portion of the RNA molecule and the trans-activating crRNA (tracrRNA). (See Jinek (2012) Science). Embodiments of the present invention may also form CRISPR complexes utilizing a separate tracrRNA molecule and a separate RNA molecule comprising a guide sequence portion. In such embodiments the tracrRNA molecule may hybridize with the RNA molecule via basepairing and may be advantageous in certain applications of the invention described herein.

[0059] The term “tracr mate sequence” refers to a sequence sufficiently complementary to a tracrRNA molecule so as to hybridize to the tracrRNA via basepairing and promote the formation of a CRISPR complex. (See U.S. Pat. No. 8,906,616). In embodiments of the present invention, the RNA molecule may further comprise a portion having a tracr mate sequence.

[0060] A “gene,” for the purposes of the present disclosure, includes a DNA region encoding a gene product, as well as all DNA regions which regulate the production of the gene product, whether or not such regulatory sequences are adjacent to coding and/or transcribed sequences. Accordingly, a gene includes, but is not necessarily limited to, promoter sequences, terminators, translational regulatory sequences such as ribosome binding sites and internal ribosome entry sites, enhancers, silencers, insulators, boundary elements, replication origins, matrix attachment sites and locus control regions.

[0061] “Eukaryotic” cells include, but are not limited to, fungal cells (such as yeast), plant cells, animal cells, mammalian cells and human cells.

[0062] The term “nuclease” as used herein refers to an enzyme capable of cleaving the phosphodiester bonds between the nucleotide subunits of nucleic acid. A nuclease may be isolated or derived from a natural source. The natural source may be any living organism. Alternatively, a nuclease may be a modified or a synthetic protein which retains the phosphodiester bond cleaving activity. Gene modification can be achieved using a nuclease, for example a CRISPR nuclease.

[0063] As used herein, the term “HSC” refers to both hematopoietic stem cells and hematopoietic stem progenitor cells. Non-limiting examples of stem cells include bone marrow cells, myeloid progenitor cells, a multipotent progenitor cells, a lineage restricted progenitor cells.

[0064] As used herein, “progenitor cell” refers to a lineage cell that is derived from stem cell and retains mitotic capacity and multipotency (e.g., can differentiate or develop into more than one but not all types of mature lineage of cell). As used herein “hematopoiesis” or “hemopoiesis” refers to the formation and development of various types of blood cells (e.g., red blood cells, megakaryocytes, myeloid cells (e.g., monocytes, macrophages and neutrophil), and lymphocytes) and other formed elements in the body (e.g., in the bone marrow).

[0065] The term “single nucleotide polymorphism (SNP) position”, as used herein, refers to a position in which a single nucleotide DNA sequence variation occurs between members of a species, or between paired chromosomes in an individual. In the case that a SNP position exists at paired chromosomes in an individual, a SNP on one of the chromosomes is a “heterozygous SNP.” The term SNP position refers to the particular nucleic acid position where a specific variation occurs and encompasses both a sequence including the variation from the most frequently occurring base at the particular nucleic acid position (also referred to as “SNP” or alternative “ALT”) and a sequence including the most frequently occurring base at the particular nucleic acid position (also referred to as reference, or “REF”). Accordingly, the sequence of a SNP position may reflect a SNP (i.e. an alternative sequence variant relative to a consensus reference sequence within a population), or the reference sequence itself.

[0066] According to embodiments of the present invention, there is provided a method for modifying in a cell a mutant allele of the signal transducer and activator of transcription 1 (STAT1) gene having a mutation associated with chronic mucocutaneous candidiasis (CMC), the method comprising
[0067] introducing to the cell a composition comprising:
   [0068] a CRISPR nuclease or a sequence encoding the CRISPR nuclease; and
   [0069] a first RNA molecule comprising a guide sequence portion having 17-25 nucleotides or a nucleotide sequence encoding the same,
[0070] wherein a complex of the CRISPR nuclease and the first RNA molecule affects a double strand break in the mutant allele of the STAT1 gene.

[0071] In some embodiments, the first RNA molecule targets the CRISPR nuclease to the mutation associated with CMC.

[0072] In some embodiments, the mutation associated with CMC is any one of 2:190969075_T_C, 2:190969230_G_A, 2:190969443_T_C, 2:190969771_T_G, 2:190969782_C_G, 2:190970341_A_G, 2:190975830_A_G, 2:190975860_G_T, 2:190976881_T_C, 2:190976971_G_T, 2:190976990_T_C, 2:190978930_A_G, 2:190978964_C_A, 2:190978967_GCT_G, 2:190978972_C_T, 2:190978985_T_C, 2:190979759_C_T, 2:190979816_G_A, 2:190979824_C_G, 2:190980614_C_T, 2:190980623_A_C, 2:190982415_T_C, 2:190983651_C_T, 2:190983657_C_T, 2:190983699_C_A, 2:190984307_T_C, 2:190984316_G_T, 2:190984360_G_C, 2:190985612_C_T, 2:190985626_G_C, 2:190985634_G_A, 2:190985634_G_C, 2:190985663_A_G, 2:190985665_A_G, 2:190986906_A_C, 2:190986907_T_C, 2:190986913_T_C, 2:190986913_T_G, 2:190986921_G_A, 2:190986924_C_T, 2:190986942_CT_TA, 2:190987035_G_A, 2:190987040_C_A, 2:190987045_AC_TA, 2:190989622_A_G, 2:190989649_T_C, 2:190989659_C_A, 2:190989660_A_C, 2:190991241_T_G, 2:190991258_T_A, 2:190991295_A_G, 2:190991307_C_G, 2:190991325_A_C, 2:190995071_G_A, 2:190995129_G_T, 2:190995139_T_C, 2:190995143_T_C, 2:190995148_T_A, 2:190995151_T_C, 2:190995173_T_C, 2:190995184_C_T, 2:190995185_G_A, 2:190995185_G_C, 2:190995193_T_G, 2:190995205_G_A, 2:190995209_C_T, 2:190997889_G_A, 2:190997890_G_GC, 2:190997919_C_T, 2:190997927_C_T, 2:190998244_C_T, 2:190998246_T_C, 2:190998247_C_A, 2:190999630_G_T, 2:190999647_A_G, 2:190999649_T_A, 2:190999659_A_T, 2:190999673_T_C, 2:190999674_C_G, 2:190999689_T_G, 2:191001113_CTCTT_C, 2:191001124_T_A, 2:191001129_A_T, 2:191001156_G_A, 2:191007651_T_A, 2:191007665_G_C, 2:191009043_C_T, 2:191009050_T_C, 2:191009915_AT_A, 2:191013689_A_T, 2:191014155_G_C, and 2:191014182_G_A.

[0073] In some embodiments, the guide sequence portion of the first RNA molecule comprises 17-25 contiguous nucleotides containing nucleotides in the sequence set forth in any one of SEQ ID NOs 1-37365 which targets a mutation associated with CMC.

[0074] In some embodiments, the method further comprising introduction of a donor DNA molecule for homology directed repair (HDR), alteration, or replacement of a desired sequence of the STAT1 allele.

[0075] In some embodiments, the first RNA molecule targets the CRISPR nuclease to a SNP position of the mutant allele.

[0076] In some embodiments, the SNP position is any one of rs10199181, rs11682932, rs11692579, rs12693590, rs1914408, rs2066795, rs2280235, rs41375144, rs41430444, rs62179911, rs73979324, 2:190961761_C_T, 2:190963870_A_G, 2:190977033_G_A, 2:190995803_C_T, 2:191017537_C_T, rs12693591, rs11386507, rs398105121, rs3215260, rs112292924, rs11889555, rs12693589, rs13029247, rs55658633, rs13005843, rs5837215, rs13029532, rs59420375, rs73064614, rs7562024, 2:191021099_T_C, 2:191021367_T_C, rs11688154, rs12693588, rs13010343, rs3088307, rs36234022, rs6752638, rs6755660, 2:190963477_A_T, 2:190963479_C_A, 2:190985840_T_C, rs1400657, rs6718902, 2:190971704_T_TTC, rs10437, rs11887698, rs2066802, rs34997637, rs7558921, 2:190961656_A_G, 2:190972045_T_C, 2:190973115_T_C, rs11885069, rs12987796, rs17817076, rs2030171, rs36116009, rs4853537, 2:191015776_C_G, rs41454245, rs760275441, rs1491049196, rs11677408, rs12464143, rs151232124, rs796493321, rs41474144, rs10173099, rs11693463, rs16833157, rs2280234, rs4853455, 2:190966079_A_C, rs7597768, rs36014758, 2:190964627_C_G, rs36077929, rs16833172, 2:190972908_C_T, rs3755312, 2:191018047_C_G, rs16833177, rs2280232, rs13395505, rs10208033, rs12468579, rs2066806, rs4327257, rs1168, rs6711082, rs1547550, rs16833146, rs3771300, rs7575823, rs10195683, rs34230248, rs45528632, rs45467700, 2:190989913_C_A, rs11904548, rs67960489, 2:191005594_G_A, rs6751855, 2:190974738_G_A, rs7576984, rs71403203, rs4853532, rs6745710, rs397814979, rs2066797, 2:190961689_G_GTTT, 2:190961689_G_GTTTT, 2:190961689_G_GT, rs113477796, rs7565237, rs1467198, rs762997161, rs10190333, rs1491128973, rs72330702, 2:190971836_C_G, 2:191015242_G_GTT, 2:191015242_G_GT, rs60976990, 2:190991701_G_T, and 2:190988561_G_A.

[0077] In some embodiments, the guide sequence portion of the first RNA molecule comprises 17-25 contiguous nucleotides containing nucleotides in the sequence set forth in any one of SEQ ID NOs 1-37365 which targets a SNP position of the mutant allele.

[0078] In some embodiments, the SNP position is in Exon 3 of STAT1.

[0079] In some embodiments, the SNP position is rs2066802.

[0080] In some embodiments, the SNP position contains a heterozygous SNP.

[0081] In some embodiments, the method further comprises introduction of a second RNA molecule comprising a guide sequence portion capable of complexing with a CRISPR nuclease, wherein the complex of the second RNA molecule and CRISPR nuclease affects a second double strand break in the STAT1 gene.

[0082] In some embodiments, the second RNA molecule is a non-discriminatory gRNA that targets both a functional STAT1 allele and the mutant STAT1 allele.

[0083] In some embodiments, the second RNA molecule targets a STAT1 intron.

[0084] In some embodiments, a STAT1 exon is excised by the first and second RNA molecules, and wherein the exon is selected from the group consisting of Exon 3, 4, 7, 8, 9, 14, 18, 19, 20, and 21.

[0085] In some embodiments, the guide sequence portion of the second RNA molecule comprises 17-25 contiguous nucleotides containing nucleotides in the sequence set forth in any one of SEQ ID NOs 1-37365 other than the sequence of the first RNA molecule.

[0086] According to embodiments of the present invention, there is provided a modified cell obtained by the method of any one of the embodiments presented herein.

[0087] According to embodiments of the present invention, there is provided a first RNA molecule comprising a guide sequence portion having 17-25 contiguous nucleotides containing nucleotides in the sequence set forth in any one of SEQ ID NOs 1-37365.

[0088] According to embodiments of the present invention, there is provided a composition comprising the first RNA molecule and a CRISPR nuclease.

[0089] In some embodiments, the composition further comprises a second RNA molecule comprising a guide sequence portion.

[0090] In some embodiments, the 17-25 nucleotides of the guide sequence portion of the second RNA molecule is a different sequence from the sequence of the guide sequence portion of the first RNA molecule.

[0091] In some embodiments, the guide sequence portion of the second RNA molecule comprises 17-25 contiguous nucleotides containing nucleotides in the sequence set forth in any one of SEQ ID NOs 1-37365 other than the sequence of the first RNA molecule.

[0092] According to embodiments of the present invention, there is provided a method for inactivating a mutant STAT1 allele in a cell, the method comprising delivering to the cell the composition of any one of the embodiments presented herein.

[0093] According to embodiments of the present invention, there is provided a method for treating CMC, the method comprising delivering to a cell of a subject having CMC the composition of any one of the embodiments presented herein.

[0094] According to embodiments of the present invention, there is provided use of any one of the compositions presented herein for inactivating a mutant STAT1 allele in a cell, comprising delivering to the cell the composition of any one of the embodiments presented herein.

[0095] According to embodiments of the present invention, there is provided a medicament comprising the composition of any one of the embodiments presented herein for use in inactivating a mutant STAT1 allele in a cell, wherein the medicament is administered by delivering to the cell the composition of any one of the embodiments presented herein.

[0096] According to embodiments of the present invention, there is provided use of the composition of any one of the embodiments presented herein for treating ameliorating or preventing CMC, comprising delivering to a cell of a subject having or at risk of having CMC the composition of any one of the embodiments presented herein.

[0097] According to embodiments of the present invention, there is provided a medicament comprising the composition of any one of the embodiments presented herein for use in treating ameliorating or preventing CMC, wherein the medicament is administered by delivering to a cell of a subject having or at risk of having CMC the composition of any one of the embodiments presented herein.

[0098] According to embodiments of the present invention, there is provided a kit for inactivating a mutant STAT1 allele in a cell, comprising the RNA molecule of any one of the embodiments presented herein, a CRISPR nuclease, and/or a tracrRNA molecule; and instructions for delivering the RNA molecule; CRISPR nuclease, and/or the tracrRNA to the cell.

[0099] According to embodiments of the present invention, there is provided a kit for treating CMC in a subject, comprising the RNA molecule of any one of the embodiments presented herein, a CRISPR nuclease, and/or a tracrRNA molecule; and instructions for delivering the RNA molecule; CRISPR nuclease, and/or the tracrRNA to a cell of a subject having or at risk of having CMC.

[0100] The present disclosure provides a method for utilizing at least one naturally occurring nucleotide difference or polymorphism (e.g., single nucleotide polymorphism (SNP)) for distinguishing/discriminating between two alleles of a gene, one allele bearing a mutation such that it encodes a mutated protein causing a disease phenotype (“mutated allele”) and a particular sequence in a SNP position (SNP/REF), and the other allele encoding for a functional protein (“functional allele”). The method further comprises the step of knocking out expression of the mutated protein and allowing expression of the functional protein. In some embodiments, the method is for treating, ameliorating, or preventing a dominant negative genetic disorder.

[0101] According to embodiments of the present invention, there is provided a first RNA molecule comprising a guide sequence portion having 17-25 contiguous nucleotides containing nucleotides in the sequence set forth in any one of SEQ ID NOs 1-37365.

[0102] According embodiments of the present invention, an RNA molecule may further comprise a portion having a sequence which binds to a CRISPR nuclease.

[0103] According to embodiments of the present invention, the sequence which binds to a CRISPR nuclease is a tracrRNA sequence.

[0104] According to embodiments of the present invention, an RNA molecule may further comprise a portion having a tracr mate sequence.

[0105] According to embodiments of the present invention, an RNA molecule may further comprise one or more linker portions.

[0106] According to embodiments of the present invention, an RNA molecule may be up to 300, 290, 280, 270, 260, 250, 240, 230, 220, 210, 200, 190, 180, 170, 160, 150, 140, 130, 120, 110, or 100 nucleotides in length. Each possibility represents a separate embodiment. In embodiments of the present invention, the RNA molecule may be 17 up to 300 nucleotides in length, 100 up to 300 nucleotides in length, 150 up to 300 nucleotides in length, 200 up to 300 nucleotides in length, 100 to 200 nucleotides in length, or 150 up to 250 nucleotides in length. Each possibility represents a separate embodiment.

[0107] According to some embodiments of the present invention, there is provided a composition comprising an RNA molecule comprising a guide sequence portion having 17-25 contiguous nucleotides containing nucleotides in the sequence set forth in any one of SEQ ID NOs 1-37365 and a CRISPR nuclease.

[0108] According to embodiments of the present invention, the composition may comprise a second RNA molecule comprising a guide sequence portion.

[0109] According to embodiments of the present invention, the guide sequence portion of the second RNA molecule comprises 17-25 contiguous nucleotides containing nucleotides in the sequence set forth in any one of SEQ ID NOs 1-37365.

[0110] According to embodiments of the present invention, the 17-25 nucleotides of the guide sequence portion of the second RNA molecule are in a different sequence from the sequence of the guide sequence portion of the first RNA molecule

[0111] Embodiments of the present invention may comprise a tracrRNA molecule.

[0112] According to some embodiments of the present invention, there is provided a method for inactivating a mutant STAT1 allele in a cell, the method comprising delivering to the cell a composition comprising an RNA molecule comprising a guide sequence portion having 17-25 contiguous nucleotides containing nucleotides in the sequence set forth in any one of SEQ ID NOs 1-37365 and a CRISPR nuclease.

[0113] According to some embodiments of the present invention, there is provided a method for treating CMC, the method comprising delivering to a cell of a subject having CMC a composition comprising an RNA molecule comprising a guide sequence portion having 17-25 contiguous nucleotides containing nucleotides in the sequence set forth in any one of SEQ ID NOs 1-37365 and a CRISPR nuclease.

[0114] According to embodiments of the present invention, the composition comprises a second RNA molecule comprising a guide sequence portion having 17-25 contiguous nucleotides containing nucleotides in the sequence set forth in any one of SEQ ID NOs 1-37365.

[0115] According to embodiments of the present invention, the 17-25 nucleotides of the guide sequence portion of the second RNA molecule are in a different sequence from the sequence of the guide sequence portion of the first RNA molecule

[0116] According to embodiments of the present invention, the CRISPR nuclease and the RNA molecule or RNA molecules are delivered to the subject and/or cells substantially at the same time or at different times.

[0117] According to embodiments of the present invention, the tracrRNA is delivered to the subject and/or cells substantially at the same time or at different times as the CRISPR nuclease and RNA molecule or RNA molecules.

[0118] According to embodiments of the present invention, the first RNA molecule targets a SNP or disease-causing mutation in an exon or promoter of a mutated allele, and wherein the second RNA molecule targets a SNP in the same or a different exon of the mutated allele, a SNP in an intron, or a sequence in an intron present in both the mutated or functional allele.

[0119] According to embodiments of the present invention, the first RNA molecule or the first and the second RNA molecules target a SNP in the promoter region, the start codon, or the untranslated region (UTR) of a mutated allele.

[0120] According to embodiments of the present invention, the first RNA molecule or the first and the second RNA molecules targets at least a portion of the promoter and/or the start codon and/or a portion of the UTR of a mutated allele.

[0121] According to embodiments of the present invention, the first RNA molecule targets a portion of the promoter, a first SNP in the promoter, or a SNP upstream to the promoter of a mutated allele and the second RNA molecule is targets a second SNP, which is downstream of the first SNP, and is in the promoter, in the UTR, or in an intron or in an exon of a mutated allele.

[0122] According to embodiments of the present invention, the first RNA molecule targets a SNP in the promoter, upstream of the promoter, or the UTR of a mutated allele and the second RNA molecule is designed to target a sequence which is present in an intron of both the mutated allele and the functional allele.

[0123] According to embodiments of the present invention, the first RNA molecule targets a SNP in an intron of a mutated allele, and wherein the second RNA molecule targets a SNP in an intron of the mutated allele, or a sequence in an intron present in both the mutated and functional allele.

[0124] According to embodiments of the present invention, the first RNA molecule targets a sequence upstream of the promotor which is present in both a mutated and functional allele and the second RNA molecule targets a SNP or disease-causing mutation in any location of the gene.

[0125] According to embodiments of the present invention, there is provided a method comprising removing an exon containing a disease-causing mutation from a mutated allele, wherein the first RNA molecule or the first and the second RNA molecules target regions flanking an entire exon or a portion of the exon.

[0126] According to embodiments of the present invention, there is provided a method comprising removing multiple exons, the entire open reading frame of a gene, or removing the entire gene.

[0127] According to embodiments of the present invention, the first RNA molecule targets a SNP or disease-causing mutation in an exon or promoter of a mutated allele, and wherein the second RNA molecule targets a SNP in the same or a different exon of the mutated allele, a SNP in an intron, or a sequence in an intron present in both the mutated or functional allele.

[0128] According to embodiments of the present invention, the first RNA molecule or the first and the second RNA molecules target an alternative splicing signal sequence between an exon and an intron of a mutant allele.

[0129] According to embodiments of the present invention, the second RNA molecule targets a sequence present in both a mutated allele and a functional allele.

[0130] According to embodiments of the present invention, the second RNA molecule targets an intron.

[0131] According to embodiments of the present invention, there is provided a method comprising subjecting the mutant allele to insertion or deletion by an error prone non-homologous end joining (NHEJ) mechanism, generating a frameshift in the mutated allele's sequence.

[0132] According to embodiments of the present invention, the frameshift results in inactivation or knockout of the mutated allele.

[0133] According to embodiments of the present invention, the frameshift creates an early stop codon in the mutated allele.

[0134] According to embodiments of the present invention, the frameshift results in nonsense-mediated mRNA decay of the transcript of the mutant allele.

[0135] According to embodiments of the present invention, the inactivating or treating results in a truncated protein encoded by the mutated allele and a functional protein encoded by the functional allele.

[0136] According to some embodiments of the present invention, there is provided use of a composition comprising an RNA molecule comprising a guide sequence portion having 17-25 contiguous nucleotides containing nucleotides in the sequence set forth in any one of SEQ ID NOs 1-37365 and a CRISPR nuclease inactivating a mutant STAT1 allele in a cell, comprising delivering to the cell the RNA molecule comprising a guide sequence portion having 17-25 contiguous nucleotides containing nucleotides in the sequence set forth in any one of SEQ ID NOs 1-37365 and the CRISPR nuclease.

[0137] According to embodiments of the present invention, there is provided a medicament comprising an RNA molecule comprising a guide sequence portion having 17-25 contiguous nucleotides containing nucleotides in the sequence set forth in any one of SEQ ID NOs 1-37365 and a CRISPR nuclease for use in inactivating a mutant STAT1 allele in a cell, wherein the medicament is administered by delivering to the cell the composition comprising an RNA molecule comprising a guide sequence portion having 17-25 contiguous nucleotides containing nucleotides in the sequence set forth in any one of SEQ ID NOs 1-37365 and a CRISPR nuclease.

[0138] According to some embodiments of the present invention, there is provided use of a composition comprising an RNA molecule comprising a guide sequence portion having 17-25 contiguous nucleotides containing nucleotides in the sequence set forth in any one of SEQ ID NOs 1-37365 and a CRISPR nuclease for treating ameliorating or preventing CMC, comprising delivering to a cell of a subject having or at risk of having CMC the composition of comprising an RNA molecule comprising a guide sequence portion having 17-25 contiguous nucleotides containing nucleotides in the sequence set forth in any one of SEQ ID NOs 1-37365 and a CRISPR nuclease.

[0139] According to some embodiments of the present invention, there is provided a medicament comprising the composition comprising an RNA molecule comprising a guide sequence portion having 17-25 contiguous nucleotides containing nucleotides in the sequence set forth in any one of SEQ ID NOs 1-37365 and a CRISPR nuclease for use in treating ameliorating or preventing CMC, wherein the medicament is administered by delivering to a cell of a subject having or at risk of having CMC: the composition comprising an RNA molecule comprising a guide sequence portion having 17-25 contiguous nucleotides containing nucleotides in the sequence set forth in any one of SEQ ID NOs 1-37365 and a CRISPR nuclease.

[0140] According to some embodiments of the present invention, there is provided a kit for inactivating a mutant STAT1 allele in a cell, comprising an RNA molecule comprising a guide sequence portion having 17-25 contiguous nucleotides containing nucleotides in the sequence set forth in any one of SEQ ID NOs 1-37365, a CRISPR nuclease, and/or a tracrRNA molecule; and instructions for delivering the RNA molecule; CRISPR nuclease, and/or the tracrRNA to the cell.

[0141] According to some embodiments of the present invention, there is provided a kit for treating CMC in a subject, comprising an RNA molecule comprising a guide sequence portion having 17-25 contiguous nucleotides containing nucleotides in the sequence set forth in any one of SEQ ID NOs 1-37365, a CRISPR nuclease, and/or a tracrRNA molecule; and instructions for delivering the RNA molecule; CRISPR nuclease, and/or the tracrRNA to a cell of a subject having or at risk of having CMC.

[0142] In embodiments of the present invention, the RNA molecule comprises a guide sequence portion having 17-25 contiguous nucleotides containing nucleotides in the sequence set forth in any one of SEQ ID NOs 1-37365.

[0143] The compositions and methods of the present disclosure may be utilized for treating, preventing, ameliorating, or slowing progression of an autosomal dominant genetic disorder, such as CMC.

[0144] In some embodiments, a mutated allele is deactivated by delivering to a cell an RNA molecule which targets a SNP in the promoter region, the start codon, or the untranslated region (UTR) of the mutated allele.

[0145] In some embodiments, a mutated allele is inactivated by removing at least a portion of the promoter and/or removing the start codon and/or a portion of the UTR. In some embodiments, the method of deactivating a mutated allele comprises removing at least a portion of the promoter. In such embodiments one RNA molecule may be designed for targeting a first SNP in the promoter or upstream to the promoter and another RNA molecule is designed to target a second SNP, which is downstream of the first SNP, and is in the promoter, in the UTR, or in an intron or in an exon.

[0146] Alternatively, one RNA molecule may be designed for targeting a SNP in the promoter, or upstream of the promoter, or the UTR and another RNA molecule is designed to target a sequence which is present in an intron of both the mutated allele and the functional allele. Alternatively, one RNA molecule may be designed for targeting a sequence upstream of the promotor which is present in both the mutated and functional allele and the other guide is designed to target a SNP or disease-causing mutation in any location of the gene e.g., in an exon, intron, UTR, or downstream of the promoter.

[0147] In some embodiments, the method of deactivating a mutated allele comprises an exon skipping step comprising removing an exon containing a disease-causing mutation from the mutated allele. Removing an exon containing a disease-causing mutation in the mutated allele requires two RNA molecules which target regions flanking the entire exon or a portion of the exon. Removal of an exon containing the disease-causing mutation may be designed to eliminate the disease-causing action of the protein while allowing for expression of the remaining protein product which retains some or all of the wild-type activity. As an alternative to single exon skipping, multiple exons, the entire open reading frame or the entire gene can be excised using two RNA molecules flanking the region desired to be excised.

[0148] In some embodiments, the method of deactivating a mutated allele comprises delivering two RNA molecules to a cell, wherein one RNA molecule targets a SNP or disease-causing mutation in an exon or promoter of the mutated allele, and wherein the other RNA molecule targets a SNP in the same or a different exon of the mutated allele, a SNP in an intron, or a sequence in an intron present in both the mutated or functional allele.

[0149] In some embodiments, an RNA molecule is used to target a CRISPR nuclease to an alternative splicing signal sequence between an exon and an intron of a mutant allele, thereby destroying the alternative splicing signal sequence in the mutant allele.

[0150] Any one of, or combination of, the above-mentioned strategies for deactivating a mutant allele may be used in the context of the invention.

[0151] Additional strategies may be used to deactivate a mutated allele. For example, in embodiments of the present invention, an RNA molecule is used to direct a CRISPR nuclease to an exon or a splice site of a mutated allele in order to create a double-stranded break (DSB), leading to insertion or deletion of nucleotides by an error-prone non-homologous end-joining (NHEJ) mechanism and formation of a frameshift mutation in the mutated allele. The frameshift mutation may result in: (1) inactivation or knockout of the mutated allele by generation of an early stop codon in the mutated allele, resulting in generation of a truncated protein; or (2) nonsense mediated mRNA decay of the transcript of the mutant allele. In further embodiments, one RNA molecule is used to direct a CRISPR nuclease to a promotor of a mutated allele.

[0152] In some embodiments, the method of deactivating a mutated allele further comprises enhancing activity of the functional protein such as by providing a protein/peptide, a nucleic acid encoding a protein/peptide, or a small molecule such as a chemical compound, capable of activating/enhancing activity of the functional protein.

[0153] According to some embodiments, the present disclosure provides an RNA sequence (also referred to as an ‘RNA molecule’) which binds to/associates with and/or directs the RNA guided DNA nuclease e.g., CRISPR nuclease to a sequence comprising at least one nucleotide which differs between a mutated allele and a functional allele (e.g., SNP) of a gene of interest (i.e., a sequence of the mutated allele which is not present in the functional allele).

[0154] In some embodiments, the method comprises the steps of: contacting a mutated allele of a gene of interest with an allele-specific RNA molecule and a CRISPR nuclease e.g., a Cas9 protein, wherein the allele-specific RNA molecule and the CRISPR nuclease e.g., Cas9 associate with a nucleotide sequence of the mutated allele of the gene of interest which differs by at least one nucleotide from a nucleotide sequence of a functional allele of the gene of interest, thereby modifying or knocking-out the mutated allele.

[0155] In some embodiments, the allele-specific RNA molecule and a CRISPR nuclease is introduced to a cell encoding the gene of interest. In some embodiments, the cell encoding the gene of interest is in a mammalian subject. In some embodiments, the cell encoding the gene of interest is in a plant.

[0156] In some embodiments, the cleaved mutated allele is further subjected to insertion or deletion (indel) by an error prone non-homologous end joining (NHEJ) mechanism, generating a frameshift in the mutated allele's sequence. In some embodiments, the generated frameshift results in inactivation or knockout of the mutated allele. In some embodiments, the generated frameshift creates an early stop codon in the mutated allele and results in generation of a truncated protein. In such embodiments, the method results in the generation of a truncated protein encoded by the mutated allele and a functional protein encoded by the functional allele. In some embodiments, a frameshift generated in a mutated allele using the methods of the invention results in nonsense-mediated mRNA decay of the transcript of the mutant allele.

[0157] In some embodiments, the mutated allele is an allele of STAT1 gene. In some embodiments, the RNA molecule targets a SNP which co-exists with/is genetically linked to the mutated sequence associated with CMC genetic disorder. In some embodiments, the RNA molecule targets a SNP which is highly prevalent in the population and exists in the mutated allele having the mutated sequence associated with CMC genetic disorder and not in the functional allele of an individual subject to be treated. In some embodiments, a disease-causing mutation within a mutated STAT1 allele is targeted.

[0158] In some embodiments, the SNP is within an exon of the gene of interest. In such embodiments, a guide sequence portion of an RNA molecule may be designed to associate with a sequence of the exon of the gene of interest.

[0159] In some embodiments, SNP is within an intron or an exon of the gene of interest. In some embodiments, SNP is in close proximity to a splice site between the intron and the exon. In some embodiments, the close proximity to a splice site is 1, 2, 3, 4, 5, 6, 7, 8, 9, 10, 11, 12, 13, 14, 15, 16, 17, 18, 19, or 20 nucleotides upstream or downstream to the splice site. Each possibility represents a separate embodiment of the present invention. In such embodiments, a guide sequence portion of an RNA molecule may be designed to associate with a sequence of the gene of interest which comprises the splice site.

[0160] In some embodiments, the method is utilized for treating a subject having a disease phenotype resulting from the heterozygote STAT1 gene. In such embodiments, the method results in improvement, amelioration or prevention of the disease phenotype.

[0161] Embodiments referred to above refer to a CRISPR nuclease, RNA molecule(s), and tracrRNA being effective in a subject or cells at the same time. The CRISPR, RNA molecule(s), and tracrRNA can be delivered substantially at the same time or can be delivered at different times but have effect at the same time. For example, this includes delivering the CRISPR nuclease to the subject or cells before the RNA molecule and/or tracr RNA is substantially extant in the subject or cells.

[0162] In one embodiment, the cell is a stem cell. In one embodiment, the cell is an embryonic stem cell. In some embodiment, the stem cell is a hematopoietic stem/progenitor cell (HSC).

### Dominant Genetic Disorders

[0163] One of skill in the art will appreciate that all subjects with any type of heterozygote genetic disorder (e.g., dominant genetic disorder) may be subjected to the methods described herein. In one embodiment, the present invention may be used to target a gene involved in, associated with, or causative of dominant genetic disorders such as, for example, CMC. In some embodiments, the dominant genetic disorder is CMC. In some embodiments, the target gene is the STAT1 gene (Entrez Gene, gene ID No: 6772). Non-limiting examples of mutation previously characterized as gain of function mutations associated with CMC phenotype include mutations in the following locations: rs387906759 (p.A267V, c.800C>T), rs387906758 (c.820C>T, p.R274W), rs387906760 (c.821G>A, p.R274Q), and rs587777630 (c.1154C>T, p.T385M).

[0164] STAT1 editing strategies include, but are not limited to, (1) truncation; (2) inhibiting expression of a mutated STAT1 allele; (3) inducing a frameshift in Exon 3 by targeting SNP rs2066802 and mediating single DSB, leading to nonsense-mediated decay (NMD); and (4) targeting a STAT1 mutation to induce a frameshift or correct the mutation using homology directed repair (HDR), preferably with a donor molecule or donor template.

[0165] Notably, STAT1 may be truncated until at least exon 21 without causing a pathogenic affect. Indeed, healthy individuals harbor frameshift mutations in exon 21 and may express a shorter splice variant that contains 22 exons. Truncation can be achieved by several approaches. For example, excision may be achieved by targeting STAT1 with two different sgRNA molecules. STAT1 exons that can be excised and lead to a frameshift are: Exons 3, 4, 7, 8, 9, 14, 18, 19, 20 and 21. The further upstream the excision is located, the more mutations it will cover. The excision is preferably done by mediating a DNA double-strand break (DSB) in the introns flanking the desired exon. One DSB is preferably allele specific. As a non-limiting example, excision of Exon 4 may be achieved by targeting SNPs in Intron 5 (e.g. rs2030171 and rs10183196) and a utilizing a second non-discriminating gRNA in Intron 3, thereby deleting a fragment of ˜3-5 kb. In another approach, truncation can be achieved by introducing a splice acceptor by HDR. A splice acceptor sequence can be introduced using, for example, a double-stranded donor oligonucleotide (dsODN) template. As in the case of excision, the further upstream this sequence is inserted, the more mutations it will cover.

[0166] In another editing strategy, expression of a mutated STAT1 allele may be inhibited. This can be achieved by excising the poly-A signal in the 3′UTR region, which would lead to unstable transcript. Notably, a shorter STAT1 transcript naturally exists (NM_139266). The poly-A signal of that transcript is located in Intron 22 and also needs to be excised in this specific example. The length of the excised fragment would be >6 kb.

### CRISPR Nucleases and PAM Recognition

[0167] In some embodiments, the sequence specific nuclease is selected from CRISPR nucleases, or a functional variant thereof. In some embodiments, the sequence specific nuclease is an RNA guided DNA nuclease. In such embodiments, the RNA sequence which guides the RNA guided DNA nuclease (e.g., Cpfl) binds to and/or directs the RNA guided DNA nuclease to the sequence comprising at least one nucleotide which differs between a mutated allele and its counterpart functional allele (e.g., SNP). In some embodiments, the CRISPR complex does not further comprise a tracrRNA. In a non-limiting example, in which the RNA guided DNA nuclease is a CRISPR protein, the at least one nucleotide which differs between the dominant mutated allele and the functional allele may be within the PAM site and/or proximal to the PAM site within the region that the RNA molecule is designed to hybridize to. A skilled artisan will appreciate that RNA molecules can be engineered to bind to a target of choice in a genome by commonly known methods in the art.

[0168] In embodiments of the present invention, a type II CRISPR system utilizes a mature crRNA:tracrRNA complex directs a CRISPR nuclease, e.g. Cas9, to the target DNA via Watson-Crick base-pairing between the crRNA and the protospacer on the target DNA next to the protospacer adjacent motif (PAM), an additional requirement for target recognition. The CRISPR nuclease then mediates cleavage of target DNA to create a double-stranded break within the protospacer. A skilled artisan will appreciate that each of the engineered RNA molecule of the present invention is further designed such as to associate with a target genomic DNA sequence of interest next to a protospacer adjacent motif (PAM), e.g., a PAM matching the sequence relevant for the type of CRISPR nuclease utilized, such as for a non-limiting example, NGG or NAG, wherein “N” is any nucleobase, for Streptococcus pyogenes Cas9 WT (SpCAS9); NNGRRT for Staphylococcus aureus (SaCas9); NNNVRYM for Jejuni Cas9 WT; NGAN or NGNG for SpCas9-VQR variant; NGCG for SpCas9-VRER variant; NGAG for SpCas9-EQR variant; NNNNGATT for Neisseria meningitidis (NmCas9); or TTTV for Cpfl. RNA molecules of the present invention are each designed to form complexes in conjunction with one or more different CRISPR nucleases and designed to target polynucleotide sequences of interest utilizing one or more different PAM sequences respective to the CRISPR nuclease utilized.

[0169] In some embodiments, an RNA-guided DNA nuclease e.g., a CRISPR nuclease, may be used to cause a DNA break at a desired location in the genome of a cell. The most commonly used RNA-guided DNA nucleases are derived from CRISPR systems, however, other RNA-guided DNA nucleases are also contemplated for use in the genome editing compositions and methods described herein. For instance, see U.S. Patent Publication No. 2015-0211023, incorporated herein by reference.

[0170] CRISPR systems that may be used in the practice of the invention vary greatly. CRISPR systems can be a type I, a type II, or a type III system. Non-limiting examples of suitable CRISPR proteins include Cas3, Cas4, Cas5, Cas5e (or CasD), Cas6, Cas6e, Cas6f, Cas7, Cas8al, Cas8a2, Cas8b, Cas8c, Cas9, Cas10, Casl Od, CasF, CasG, CasH, Csyl, Csy2, Csy3, Csel (or CasA), Cse2 (or CasB), Cse3 (or CasE), Cse4 (or CasC), Cscl, Csc2, Csa5, Csn2, Csm2, Csm3, Csm4, Csm5, Csm6, Cmrl, Cmr3, Cmr4, Cmr5, Cmr6, Csbl, Csb2, Csb3, Csxl7, Csxl4, Csxl0, Csxl6, CsaX, Csx3, Cszl, Csxl5, Csfl, Csf2, Csf3, Csf4, and Cul966.

[0171] In some embodiments, the RNA-guided DNA nuclease is a CRISPR nuclease derived from a type II CRISPR system (e.g., Cas9). The CRISPR nuclease may be derived from Streptococcus pyogenes, Streptococcus thermophilus, Streptococcus sp., Staphylococcus aureus, Neisseria meningitidis, Treponema denticola, Nocardiopsis dassonvillei, Streptomyces pristinaespiralis, Streptomyces viridochromogenes, Streptomyces viridochromogenes, Streptosporangiurn roseurn, Streptosporangiurn roseum, Alicyclobacillus acidocaldarius, Bacillus pseudomycoides, Bacillus selenitireducens, Exiguobacterium sibiricum, Lactobacillus delbrueckii, Lactobacillus salivarius, Microscilla marina, Burkholderiales bacterium, Polaromonas naphthalenivorans, Polaromonas sp., Crocosphaera watsonii, Cyanothece sp., Microcystis aeruginosa, Synechococcus sp., Acetohalobiurn arabaticum, Ammonifex degensii, Caldicelulosiruptor becscii, Candidatus Desulforudis, Clostridium botulinum, Clostridium difficile, Finegoldia magna, Natranaerobius thermophilus, Pelotomaculumthermopropionicum, Acidithiobacillus caldus, Acidithiobacillus ferrooxidans, Allochromatiurn vinosurn, Marinobacter sp., Nitrosococcus halophilus, Nitrosococcus watsoni, Pseudoalteromonas haloplanktis, Ktedonobacter racemifer, Methanohalobiurn evestigatum, Anabaena variabilis, Nodularia spumigena, Nostoc sp., Arthrospira maxima, Arthrospira platensis, Arthrospira sp., Lyngbya sp., Microcoleus chthonoplastes, Oscillatoria sp., Petrotoga mobilis, Thermosipho africanus, Acaryochloris marina, or any species which encodes a CRISPR nuclease with a known PAM sequence. CRISPR nucleases encoded by uncultured bacteria may also be used in the context of the invention. (See Burstein et al. Nature, 2017). Variants of CRIPSR proteins having known PAM sequences e.g., SpCas9 D1135E variant, SpCas9 VQR variant, SpCas9 EQR variant, or SpCas9 VRER variant may also be used in the context of the invention.

[0172] Thus, an RNA guided DNA nuclease of a CRISPR system, such as a Cas9 protein or modified Cas9 or homolog or ortholog of Cas9, or other RNA guided DNA nucleases belonging to other types of CRISPR systems, such as Cpfl and its homologs and orthologs, may be used in the compositions of the present invention.

[0173] In certain embodiments, the CRIPSR nuclease may be a “functional derivative” of a naturally occurring Cas protein. A “functional derivative” of a native sequence polypeptide is a compound having a qualitative biological property in common with a native sequence polypeptide. “Functional derivatives” include, but are not limited to, fragments of a native sequence and derivatives of a native sequence polypeptide and its fragments, provided that they have a biological activity in common with a corresponding native sequence polypeptide. A biological activity contemplated herein is the ability of the functional derivative to hydrolyze a DNA substrate into fragments. The term “derivative” encompasses both amino acid sequence variants of polypeptide, covalent modifications, and fusions thereof. Suitable derivatives of a Cas polypeptide or a fragment thereof include but are not limited to mutants, fusions, covalent modifications of Cas protein or a fragment thereof. Cas protein, which includes Cas protein or a fragment thereof, as well as derivatives of Cas protein or a fragment thereof, may be obtainable from a cell or synthesized chemically or by a combination of these two procedures. The cell may be a cell that naturally produces Cas protein, or a cell that naturally produces Cas protein and is genetically engineered to produce the endogenous Cas protein at a higher expression level or to produce a Cas protein from an exogenously introduced nucleic acid, which nucleic acid encodes a Cas that is same or different from the endogenous Cas. In some cases, the cell does not naturally produce Cas protein and is genetically engineered to produce a Cas protein.

[0174] In some embodiments, the CRISPR nuclease is Cpfl. Cpfl is a single RNA-guided endonuclease which utilizes a T-rich protospacer-adjacent motif. Cpfl cleaves DNA via a staggered DNA double-stranded break. Two Cpfl enzymes from Acidaminococcus and Lachnospiraceae have been shown to carry out efficient genome-editing activity in human cells. (See Zetsche et al. (2015) Cell.).

[0175] Thus, an RNA guided DNA nuclease of a Type II CRISPR System, such as a Cas9 protein or modified Cas9 or homologs, orthologues, or variants of Cas9, or other RNA guided DNA nucleases belonging to other types of CRISPR systems, such as Cpfl and its homologs, orthologues, or variants, may be used in the present invention.

[0176] In some embodiments, the guide molecule comprises one or more chemical modifications which imparts a new or improved property (e.g., improved stability from degradation, improved hybridization energetics, or improved binding properties with an RNA guided DNA nuclease). Suitable chemical modifications include, but are not limited to: modified bases, modified sugar moieties, or modified inter-nucleoside linkages. Non-limiting examples of suitable chemical modifications include: 4-acetylcytidine, 5-(carboxyhydroxymethyl)uridine, 2′-O-methylcytidine, 5-carboxymethylaminomethyl-2-thiouridine, 5-carboxymethylaminomethyluridine, dihydrouridine, 2′-O-methylpseudouridine, “beta, D-galactosylqueosine”, 2′-O-methylguanosine, inosine, N6-isopentenyladenosine, 1-methyladenosine, 1-methylpseudouridine, 1-methylguanosine, I-methylinosine, “2,2-dimethylguanosine”, 2-methyladenosine, 2-methylguanosine, 3-methylcytidine, 5-methylcytidine, N6-methyladenosine, 7-methylguanosine, 5-methylaminomethyluridine, 5-methoxyaminomethyl-2-thiouridine, “beta. D-mannosylqueuosine”, 5-methoxycarbonylmethyl-2-thiouridine, 5-methoxycarbonylmethyluridine, 5-methoxyuridine, 2-methylthio-N6-isopentenyladenosine, N-((9-beta-D-ribofuranosyl-2-methylthiopurine-6-yl)carbamoyl)threonine, N-((9-beta-D-ribofuranosylpurine-6-yl)N-methylcarbamoyl)threonine, uridine-5-oxyacetic acid-methylester, uridine-5-oxyacetic acid, wybutoxosine, queuosine, 2-thiocytidine, 5-methyl-2-thiouridine, 2-thiouridine, 4-thiouridine, 5-methyluridine, N-((9-beta-D-ribofuranosylpurine-6-yl)-carbamoyl)threonine, 2′-O-methyl-5-methyluridine, 2′-O-methyluridine, wybutosine, “3-(3-amino-3-carboxy-propyl)uridine, (acp3)u”, 2′-O-methyl (M), 3′-phosphorothioate (MS), 3′-thioPACE (MSP), pseudouridine, or 1-methyl pseudo-uridine. Each possibility represents a separate embodiment of the present invention.

Guide Sequences which Specifically Target a Mutant Allele

[0177] A given gene may contain thousands of SNPs. Utilizing a 25 base pair target window for targeting each SNP in a gene would require hundreds of thousands of guide sequences. Any given guide sequence when utilized to target a SNP may result in degradation of the guide sequence, limited activity, no activity, or off-target effects. Accordingly, suitable guide sequences are necessary for targeting a given gene. By the present invention, a novel set of guide sequences have been identified for knocking out expression of a mutated STAT1 protein, inactivating a mutant STAT1 gene allele, and treating CMC.

[0178] The present disclosure provides guide sequences capable of specifically targeting a mutated allele for inactivation while leaving the functional allele unmodified. The guide sequences of the present invention are designed to, and are most likely to, specifically differentiate between a mutated allele and a functional allele. Of all possible guide sequences which target a mutated allele desired to be inactivated, the specific guide sequences disclosed herein are specifically effective to function with the disclosed embodiments.

[0179] Briefly, the guide sequences may have properties as follows: (1) target SNP/insertion/deletion/indel with a high prevalence in the general population, in a specific ethnic population or in a patient population is above 1% and the SNP/insertion/deletion/indel heterozygosity rate in the same population is above 1%; (2) target a location of a SNP/insertion/deletion/indel proximal to a portion of the gene e.g., within 5 k bases of any portion of the gene, for example, a promoter, a UTR, an exon or an intron; and (3) target a mutant allele using an RNA molecule which targets a founder or common pathogenic mutations for the disease/gene. In some embodiments, the prevalence of the SNP/insertion/deletion/indel in the general population, in a specific ethnic population or in a patient population is above 1%, 2%, 3%, 4%, 5%, 6%, 7%, 8%, 9%, 10%, 11%, 12%, 13%, 14%, or 15% and the SNP/insertion/deletion/indel heterozygosity rate in the same population is above 1%, 2%, 3%, 4%, 5%, 6%, 7%, 8%, 9%, 10%, 11%, 12%, 13%, 14%, or 15%. Each possibility represents a separate embodiment and may be combined at will.

[0180] For each gene, according to SNP/insertion/deletion/indel any one of the following strategies may be used to deactivate the mutated allele: (1) Knockout strategy using one RNA molecule—one RNA molecule is utilized to direct a CRISPR nuclease to a mutated allele and create a double-strand break (DSB) leading to formation of a frameshift mutation in an exon or in a splice site region of the mutated allele; (2) Knockout strategy using two RNA molecules—two RNA molecules are utilized. A first RNA molecule targets a region in the promoter or an upstream region of a mutated allele and another RNA molecule targets downstream of the first RNA molecule in a promoter, exon, or intron of the mutated allele; (3) Exon(s) skipping strategy—one RNA molecule may be used to target a CRISPR nuclease to a splice site region, either at the 5′end of an intron (donor sequence) or the 3′ end of an intron (acceptor sequence), in order to destroy the splice site. Alternatively, two RNA molecules may be utilized such that a first RNA molecule targets an upstream region of an exon and a second RNA molecule targets a region downstream of the first RNA molecule, thereby excising the exon(s). Based on the locations of identified SNPs/insertions/deletions/indels for each mutant allele, any one of, or a combination of, the above-mentioned methods to deactivate the mutant allele may be utilized.

[0181] When only one RNA molecule is used is that the location of the SNP is in an exon or in close proximity (e.g., within 20 basepairs) to a splice site between the intron and the exon. When two RNA molecules are used, guide sequences may target two SNPs such that the first SNP is upstream of exon 1 e.g., within the 5′ untranslated region, or within the promoter or within the first 2 kilobases 5′ of the transcription start site, and the second SNP is downstream of the first SNP e.g., within the first 2 kilobases 5′ of the transcription start site, or within intron 1, 2 or 3, or within exon 1, exon 2, or exon 3.

[0182] Guide sequences of the present invention may target a SNP in the upstream portion of the targeted gene, preferably upstream of the last exon of the targeted gene. Guide sequences may target a SNP upstream to exon 1, for example within the 5′ untranslated region, or within the promoter or within the first 4-5 kilobases 5′ of the transcription start site.

[0183] Guide sequences of the present invention may also target a SNP within close proximity (e.g., within 50 basepairs, more preferably with 20 basepairs) to a known protospacer adjacent motif (PAM) site.

[0184] Guide sequences of the present invention also may target: (1) a heterozygous SNP for the targeted gene; (2) a heterozygous SNPs upstream and downstream of the gene; (3) a SNPs with a prevalence of the SNP/insertion/deletion/indel in the general population, in a specific ethnic population, or in a patient population above 1%; (4) have a guanine-cytosine content of greater than 30% and less than 85%; (5) have no repeat of 4 or more thymine/uracil or 8 or more guanine, cytosine, or adenine; (6) having no off-target identified by off-target analysis; and (7) preferably target Exons over Introns or be upstream of a SNP rather than downstream of a SNP.

[0185] In embodiments of the present invention, the SNP may be upstream or downstream of the gene. In embodiments of the present invention, the SNP is within 4,000 base pairs upstream or downstream of the gene.

[0186] The at least one nucleotide which differs between the mutated allele and the functional allele, may be upstream, downstream or within the sequence of the disease-causing mutation of the gene of interest. The at least one nucleotide which differs between the mutated allele and the functional allele, may be within an exon or within an intron of the gene of interest. In some embodiments, the at least one nucleotide which differs between the mutated allele and the functional allele is within an exon of the gene of interest. In some embodiments, the at least one nucleotide which differs between the mutated allele and the functional allele is within an intron or an exon of the gene of interest, in close proximity to a splice site between the intron and the exon e.g., 1, 2, 3, 4, 5, 6, 7, 8, 9, 10, 11, 12, 13, 14, 15, 16, 17, 18, 19, or 20 nucleotides upstream or downstream to the splice site.

[0187] In some embodiments, the at least one nucleotide is a single nucleotide polymorphisms (SNPs). In some embodiments, each of the nucleotide variants of the SNP may be expressed in the mutated allele. In some embodiments, the SNP may be a founder or common pathogenic mutation.

[0188] Guide sequences may target a SNP which has both (1) a high prevalence in the general population e.g., above 1% in the population; and (2) a high heterozygosity rate in the population, e.g., above 1%. Guide sequences may target a SNP that is globally distributed. A SNP may be a founder or common pathogenic mutation. In some embodiments, the prevalence in the general population is above 1%, 2%, 3%, 4%, 5%, 6%, 7%, 8%, 9%, 10%, 11%, 12%, 13%, 14%, or 15%. Each possibility represents a separate embodiment. In some embodiments, the heterozygosity rate in the population is above 1%, 2%, 3%, 4%, 5%, 6%, 7%, 8%, 9%, 10%, 11%, 12%, 13%, 14%, or 15%. Each possibility represents a separate embodiment.

[0189] In some embodiments, the at least one nucleotide which differs between the mutated allele and the functional allele is linked to/co-exists with the disease-causing mutation in high prevalence in a population. In such embodiments, “high prevalence” refers to at least 92%, 93%, 94%, 95%, 96%, 97%, 98%, 99%, or 100%. Each possibility represents a separate embodiment of the present invention. In one embodiment, the at least one nucleotide which differs between the mutated allele and the functional allele, is a disease-associated mutation. In some embodiments, the SNP is highly prevalent in the population. In such embodiments, “highly prevalent” refers to at least 10%, 11%, 12%, 13%, 14%, 15%, 20%, 30%, 40%, 50%, 60%, or 70% of a population. Each possibility represents a separate embodiment of the present invention.

[0190] Guide sequences of the present invention may satisfy any one of the above criteria and are most likely to differentiate between a mutated allele from its corresponding functional allele.

### Delivery to Cells

[0191] The RNA molecule compositions described herein may be delivered to a target cell by any suitable means. RNA molecule compositions of the present invention may be targeted to any cell which contains and/or expresses a mutated allele, including any mammalian or plant cell. For example, in one embodiment the RNA molecule specifically targets a mutated STAT1 allele and the target cell is an HSC. The delivery to the cell may be performed in-vitro, ex-vivo, or in-vivo. Further, the nucleic acid compositions described herein may be delivered as one or more of DNA molecules, RNA molecules, Ribonucleoproteins (RNP), nucleic acid vectors, or any combination thereof.

[0192] In some embodiments, the RNA molecule comprises a chemical modification, Non-limiting examples of suitable chemical modifications include 2′-0-methyl (M), 2′-0-methyl, 3′phosphorothioate (MS) or 2′-0-methyl, 3′thioPACE (MSP), pseudouridine, and 1-methyl pseudo-uridine. Each possibility represents a separate embodiment of the present invention.

[0193] Any suitable viral vector system may be used to deliver nucleic acid compositions e.g., the RNA molecule compositions of the subject invention. Conventional viral and non-viral based gene transfer methods can be used to introduce nucleic acids and target tissues. In certain embodiments, nucleic acids are administered for in vivo or ex vivo gene therapy uses. Non-viral vector delivery systems include naked nucleic acid, and nucleic acid complexed with a delivery vehicle such as a liposome or poloxamer. For a review of gene therapy procedures, see Anderson (1992) Science 256:808-813; Nabel & Felgner (1993) TIBTECH 11:211-217; Mitani & Caskey (1993) TIBTECH 11:162-166; Dillon (1993) TIBTECH 11:167-175; Miller (1992) Nature 357:455-460; Van Brunt (1988) Biotechnology 6(10):1149-1154; Vigne (1995) Restorative Neurology and Neuroscience 8:35-36; Kremer & Perricaudet (1995) British Medical Bulletin 51(1):31-44; Haddada et al. (1995) in Current Topics in Microbiology and Immunology Doerfler and Bohm (eds.); and Yu et al. (1994) Gene Therapy 1:13-26.

[0194] Methods of non-viral delivery of nucleic acids and/or proteins include electroporation, lipofection, microinjection, biolistics, particle gun acceleration, virosomes, liposomes, immunoliposomes, lipid nanoparticles (LNPs), polycation or lipid:nucleic acid conjugates, artificial virions, and agent-enhanced uptake of nucleic acids or can be delivered to plant cells by bacteria or viruses (e.g., Agrobacterium, Rhizobium sp. NGR234, Sinorhizoboiummeliloti, Mesorhizobium loti, tobacco mosaic virus, potato virus X, cauliflower mosaic virus and cassava vein mosaic virus). (See, e.g., Chung et al. (2006) Trends Plant Sci. 11(1):1-4). Sonoporation using, e.g., the Sonitron 2000 system (Rich-Mar), can also be used for delivery of nucleic acids. Cationic-lipid mediated delivery of proteins and/or nucleic acids is also contemplated as an in vivo, ex vivo, or in vitro delivery method. (See Zuris et al. (2015) Nat. Biotechnol. 33(1):73-80; see also Coelho et al. (2013) N. Engl. J. Med. 369, 819-829; Judge et al. (2006) Mol. Ther. 13, 494-505; and Basha et al. (2011) Mol. Ther. 19, 2186-2200).

[0195] Additional exemplary nucleic acid delivery systems include those provided by Amaxa® Biosystems (Cologne, Germany), Maxcyte, Inc. (Rockville, Md.), BTX Molecular Delivery Systems (Holliston, Mass.) and Copernicus Therapeutics Inc., (see, e.g., U.S. Pat. No. 6,008,336). Lipofection is described in e.g., U.S. Pat. Nos. 5,049,386, 4,946,787; and 4,897,355, and lipofection reagents are sold commercially (e.g., Transfectam™, Lipofectin™ and Lipofectamine™ RNAiMAX). Cationic and neutral lipids that are suitable for efficient receptor-recognition lipofection of polynucleotides include those of Felgner, WO 91/17424, WO 91/16024. Delivery can be to cells (ex vivo administration) or target tissues (in vivo administration).

[0196] The preparation of lipid:nucleic acid complexes, including targeted liposomes such as immunolipid complexes, is well known to one of skill in the art (See, e.g., Crystal (1995) Science 270:404-410; Blaese et al. (1995) Cancer Gene Ther. 2:291-297; Behr et al. (1994) Bioconjugate Chem. 5:382-389; Remy et al. (1994) Bioconjugate Chem. 5:647-654; Gao et al. (1995) Gene Therapy 2:710-722; Ahmad et al. (1992) Cancer Res. 52:4817-4820; U.S. Pat. Nos. 4,186,183, 4,217,344, 4,235,871, 4,261,975, 4,485,054, 4,501,728, 4,774,085, 4,837,028, and 4,946,787).

[0197] Additional methods of delivery include the use of packaging the nucleic acids to be delivered into EnGeneIC delivery vehicles (EDVs). These EDVs are specifically delivered to target tissues using bispecific antibodies where one arm of the antibody has specificity for the target tissue and the other has specificity for the EDV. The antibody brings the EDVs to the target cell surface and then the EDV is brought into the cell by endocytosis. Once in the cell, the contents are released (See MacDiarmid et al (2009) Nature Biotechnology 27(7):643).

[0198] The use of RNA or DNA viral based systems for viral mediated delivery of nucleic acids take advantage of highly evolved processes for targeting a virus to specific cells in the body and trafficking the viral payload to the nucleus. Viral vectors can be administered directly to patients (in vivo) or they can be used to treat cells in vitro and the modified cells are administered to patients (ex vivo). Conventional viral based systems for the delivery of nucleic acids include, but are not limited to, retroviral, lentivirus, adenoviral, adeno-associated, vaccinia and herpes simplex virus vectors for gene transfer.

[0199] The tropism of a retrovirus can be altered by incorporating foreign envelope proteins, expanding the potential target population of target cells. Lentiviral vectors are retroviral vectors that are able to transduce or infect non-dividing cells and typically produce high viral titers. Selection of a retroviral gene transfer system depends on the target tissue. Retroviral vectors are comprised of cis-acting long terminal repeats with packaging capacity for up to 6-10 kb of foreign sequence. The minimum cis-acting LTRs are sufficient for replication and packaging of the vectors, which are then used to integrate the therapeutic gene into the target cell to provide permanent transgene expression. Widely used retroviral vectors include those based upon murine leukemia virus (MuLV), gibbon ape leukemia virus (GaLV), Simian Immunodeficiency virus (SIV), human immunodeficiency virus (HIV), and combinations thereof (See, e.g., Buchschacher et al. (1992) J. Virol. 66:2731-2739; Johann et al. (1992) J. Virol. 66:1635-1640; Sommerfelt et al. (1990) Virol. 176:58-59; Wilson et al. (1989) J. Virol. 63:2374-2378; Miller et al. (1991) J. Virol. 65:2220-2224; PCT/US94/05700).

[0200] At least six viral vector approaches are currently available for gene transfer in clinical trials, which utilize approaches that involve complementation of defective vectors by genes inserted into helper cell lines to generate the transducing agent.

[0201] pLASN and MFG-S are examples of retroviral vectors that have been used in clinical trials (Dunbar et al. (1995) Blood 85:3048-305; Kohn et al. (1995) Nat. Med. 1:1017-102; Malech et al. (1997) PNAS 94:22 12133-12138). PA317/pLASN was the first therapeutic vector used in a gene therapy trial. (Blaese et al. (1995). Transduction efficiencies of 50% or greater have been observed for MFG-S packaged vectors. (Ellem et al. (1997) Immunol Immunother. 44(1):10-20; Dranoff et al. (1997) Hum. Gene Ther. 1:111-2).

[0202] Packaging cells are used to form virus particles that are capable of infecting a host cell. Such cells include 293 cells, which package adenovirus, AAV, and Psi-2 cells or PA317 cells, which package retrovirus. Viral vectors used in gene therapy are usually generated by a producer cell line that packages a nucleic acid vector into a viral particle. The vectors typically contain the minimal viral sequences required for packaging and subsequent integration into a host (if applicable), other viral sequences being replaced by an expression cassette encoding the protein to be expressed. The missing viral functions are supplied in trans by the packaging cell line. For example, AAV vectors used in gene therapy typically only possess inverted terminal repeat (ITR) sequences from the AAV genome which are required for packaging and integration into the host genome. Viral DNA is packaged in a cell line, which contains a helper plasmid encoding the other AAV genes, namely rep and cap, but lacking ITR sequences. The cell line is also infected with adenovirus as a helper. The helper virus promotes replication of the AAV vector and expression of AAV genes from the helper plasmid. The helper plasmid is not packaged in significant amounts due to a lack of ITR sequences. Contamination with adenovirus can be reduced by, e.g., heat treatment to which adenovirus is more sensitive than AAV. Additionally, AAV can be produced at clinical scale using baculovirus systems (see U.S. Pat. No. 7,479,554).

[0203] In many gene therapy applications, it is desirable that the gene therapy vector be delivered with a high degree of specificity to a particular tissue type. Accordingly, a viral vector can be modified to have specificity for a given cell type by expressing a ligand as a fusion protein with a viral coat protein on the outer surface of the virus. The ligand is chosen to have affinity for a receptor known to be present on the cell type of interest. For example, Han et al. (1995) Proc. Natl. Acad. Sci. USA 92:9747-9751, reported that Moloney murine leukemia virus can be modified to express human heregulin fused to gp70, and the recombinant virus infects certain human breast cancer cells expressing human epidermal growth factor receptor. This principle can be extended to other virus-target cell pairs, in which the target cell expresses a receptor and the virus expresses a fusion protein comprising a ligand for the cell-surface receptor. For example, filamentous phage can be engineered to display antibody fragments (e.g., FAB or Fv) having specific binding affinity for virtually any chosen cellular receptor. Although the above description applies primarily to viral vectors, the same principles can be applied to nonviral vectors. Such vectors can be engineered to contain specific uptake sequences which favor uptake by specific target cells.

[0204] Gene therapy vectors can be delivered in vivo by administration to an individual patient, typically by systemic administration (e.g., intravitreal, intravenous, intraperitoneal, intramuscular, subdermal, or intracranial infusion) or topical application, as described below. Alternatively, vectors can be delivered to cells ex vivo, such as cells explanted from an individual patient (e.g., lymphocytes, bone marrow aspirates, tissue biopsy) or universal donor hematopoietic stem cells, followed by reimplantation of the cells into a patient, optionally after selection for cells which have incorporated the vector. A non-limiting exemplary ex vivo approach may involve removal of tissue (e.g., peripheral blood, bone marrow, and spleen) from a patient for culture, nucleic acid transfer to the cultured cells (e.g., hematopoietic stem cells), followed by grafting the cells to a target tissue (e.g., bone marrow, and spleen) of the patient. In some embodiments, the stem cell or hematopoietic stem cell may be further treated with a viability enhancer.

[0205] Ex vivo cell transfection for diagnostics, research, or for gene therapy (e.g., via re-infusion of the transfected cells into the host organism) is well known to those of skill in the art. In a preferred embodiment, cells are isolated from the subject organism, transfected with a nucleic acid composition, and re-infused back into the subject organism (e.g., patient). Various cell types suitable for ex vivo transfection are well known to those of skill in the art (See, e.g., Freshney et al. (1994) Culture of Animal Cells, A Manual of Basic Technique, 3rd ed, and the references cited therein for a discussion of how to isolate and culture cells from patients).

[0206] Suitable cells include, but are not limited to, eukaryotic cells and/or cell lines. Non-limiting examples of such cells or cell lines generated from such cells include COS, CHO (e.g., CHO—S, CHO-K1, CHO-DG44, CHO-DUXB11, CHO-DUKX, CHOK1SV), VERO, MDCK, WI38, V79, B14AF28-G3, BHK, HaK, NSO, SP2/0-Ag14, HeLa, HEK293 (e.g., HEK293-F, HEK293-H, HEK293-T), perC6 cells, any plant cell (differentiated or undifferentiated), as well as insect cells such as Spodopterafugiperda (Sf), or fungal cells such as Saccharomyces, Pichia and Schizosaccharomyces. In certain embodiments, the cell line is a CHO-K1, MDCK or HEK293 cell line. Additionally, primary cells may be isolated and used ex vivo for reintroduction into the subject to be treated following treatment with a guided nuclease system (e.g. CRISPR/Cas). Suitable primary cells include peripheral blood mononuclear cells (PBMC), and other blood cell subsets such as, but not limited to, CD4+ T cells or CD8+ T cells. Suitable cells also include stem cells such as, by way of example, embryonic stem cells, induced pluripotent stem cells, hematopoietic stem cells (CD34+), neuronal stem cells and mesenchymal stem cells.

[0207] In one embodiment, stem cells are used in ex vivo procedures for cell transfection and gene therapy. The advantage to using stem cells is that they can be differentiated into other cell types in vitro, or can be introduced into a mammal (such as the donor of the cells) where they will engraft in the bone marrow. Methods for differentiating CD34+ cells in vitro into clinically important immune cell types using cytokines such a GM-CSF, IFN-gamma, and TNF-alpha are known (as a non-limiting example see, Inaba et al., J. Exp. Med. 176:1693-1702 (1992)).

[0208] Stem cells are isolated for transduction and differentiation using known methods. For example, stem cells are isolated from bone marrow cells by panning the bone marrow cells with antibodies which bind unwanted cells, such as CD4+ and CD8+ (T cells), CD45+ (panB cells), GR-1 (granulocytes), and Tad (differentiated antigen presenting cells) (as a non-limiting example see Inaba et al. (1992) J. Exp. Med. 176:1693-1702). Stem cells that have been modified may also be used in some embodiments.

[0209] Vectors (e.g., retroviruses, liposomes, etc.) containing therapeutic nucleic acid compositions can also be administered directly to an organism for transduction of cells in vivo. Administration is by any of the routes normally used for introducing a molecule into ultimate contact with blood or tissue cells including, but not limited to, injection, infusion, topical application (e.g., eye drops and cream) and electroporation. Suitable methods of administering such nucleic acids are available and well known to those of skill in the art, and, although more than one route can be used to administer a particular composition, a particular route can often provide a more immediate and more effective reaction than another route. According to some embodiments, the composition is delivered via IV injection.

[0210] Vectors suitable for introduction of transgenes into immune cells (e.g., T-cells) include non-integrating lentivirus vectors. See, e.g., U.S. Patent Publication No. 2009-0117617.

[0211] Pharmaceutically acceptable carriers are determined in part by the particular composition being administered, as well as by the particular method used to administer the composition. Accordingly, there is a wide variety of suitable formulations of pharmaceutical compositions available, as described below (See, e.g., Remington's Pharmaceutical Sciences, 17th ed., 1989).

[0212] In accordance with some embodiments, there is provided an RNA molecule which binds to/associates with and/or directs the RNA guided DNA nuclease to a sequence comprising at least one nucleotide which differs between a mutated allele and a functional allele (e.g., SNP) of a gene of interest (i.e., a sequence of the mutated allele which is not present in the functional allele). The sequence may be within the disease associated mutation. The sequence may be upstream or downstream to the disease associated mutation. Any sequence difference between the mutated allele and the functional allele may be targeted by an RNA molecule of the present invention to inactivate the mutant allele, or otherwise disable its dominant disease-causing effects, while preserving the activity of the functional allele.

[0213] The disclosed compositions and methods may also be used in the manufacture of a medicament for treating dominant genetic disorders in a patient.

### Mechanisms of Action for Several Embodiments Disclosed Herein

[0214] Without being bound by any theory or mechanism, the instant invention may be utilized to apply a CRISPR nuclease to process the mutated pathogenic STAT1 allele and not the functional STAT1 allele, such as to prevent expression of the mutated pathogenic allele or to produce a truncated non-pathogenic peptide from the mutated pathogenic allele, in order to prevent CMC. A specific guide sequence may be selected from Table 2 based on the targeted SNP and the type of CRISPR nuclease used (required PAM sequence).

[0215] The STAT1 gene is located in chromosome 2 and encodes the STAT1 protein. Two alternatively spliced transcript variants encoding distinct isoforms of STAT1 have been previously described Isoform alpha (NM_007315.3) that includes 25 exons and isoform beta (NM_139266) that includes 22 exons. Notably, healthy individuals that harbor frameshift mutations in exon 21 were previously identified.

[0216] One optional strategy is to truncate STAT1 upstream to exon 22 without causing a pathogenic effect. Truncation may be achieved by excision using 2 gRNAs, at least one of the gRNAs targets an allele specific sequence in a SNP position. The exons that can be excised and would lead to a frameshift or a knockout are: 3, 4, 7, 8, 9, 14, 18, 19, 20 and 21. The excision may be achieved by mediating a DSB in introns flanking the desired exon.

[0217] In a non-limiting example excision of exon 3, which would knockout the gene, may be achieved by utilizing a first gRNA that targets a particular sequence in a SNP position in intron 2 (e.g., rs36077929, rs13029532, rs16833172) which is specific for the mutated allele, and a second gRNA that targets a particular sequence in a SNP position in intron 3 such as rs41507345 which is specific for the mutated allele, wherein one of the gRNAs may target a sequence which is common for both the mutated allele and functional allele.

[0218] In a non-limiting example excision of exon 4 may be achieved by utilizing a first gRNA that targets a particular sequence in a SNP position in intron 3 such as rs41507345 which is specific for the mutated allele, and a second gRNA that targets a particular sequence in a SNP position in intron 4 (e.g., rs10199181 and rs201136414) which is specific for the mutated allele, wherein one of the gRNAs may target a sequence which is common for both the mutated allele and functional allele.

[0219] In a non-limiting example excision of exon 7 may be achieved by utilizing a first gRNA that targets a particular sequence in a SNP position in intron 6 such as rs41454245 which is specific for the mutated allele, and a second gRNA that targets a particular sequence in a SNP position in intron 7 such as rs36116009 which is specific for the mutated allele, wherein one of the gRNAs may target a sequence which is common for both the mutated allele and functional allele.

[0220] In a non-limiting example excision of exon 8 may be achieved by utilizing a first gRNA that targets a particular sequence in a SNP position in intron 7 such as rs36116009 which is specific for the mutated allele, and a second gRNA that targets a sequence in intron 8 which is common for both the mutated allele and functional allele.

[0221] In a non-limiting example excision of exon 9 may be achieved by utilizing a first gRNA that targets a particular sequence in a SNP position in intron 9 (e.g., rs12693591, rs10167514, rs41474144, and rs16833157) which is specific for the mutated allele, and a second gRNA that targets a particular sequence in a SNP position in intron 10 (e.g., rs34230248, rs45528632, rs12693590, rs34997637, rs11904548, rs10190333, rs45467700, and rs12464143) which is specific for the mutated allele, wherein one of the gRNAs may target a sequence which is common for both the mutated allele and functional allele.

[0222] In a non-limiting example excision of exon 14 may be achieved by utilizing a first gRNA that targets a particular sequence in a SNP position in intron 14 such as rs2280233 and rs2280232 which is specific for the mutated allele, and a second gRNA that targets a sequence in intron 13 which is common for both the mutated allele and functional allele.

[0223] In a non-limiting example excision of exon 18 may be achieved by utilizing a first gRNA that targets a particular sequence in a SNP position in intron 17 (e.g., rs16833146) which is specific for the mutated allele, and a second gRNA that targets a particular sequence in a SNP position in intron 18 (e.g., rs1547550, rs5837215, rs3755312, rs4327257) which is specific for the mutated allele, wherein one of the gRNAs may target a sequence which is common for both the mutated allele and functional allele.

[0224] In a non-limiting example excision of exon 19 may be achieved by utilizing a first gRNA that targets a particular sequence in a SNP position in intron 18 (e.g., rs1547550, rs5837215, rs3755312, and rs4327257) which is specific for the mutated allele, and a second gRNA that targets a sequence in intron 19 which is common for both the mutated allele and functional allele.

[0225] In a non-limiting example excision of exon 20 may be achieved by utilizing a first gRNA that targets a particular sequence in a SNP position in intron 20 such as rs2280235 which is specific for the mutated allele, and a second gRNA that targets a sequence in intron 19 which is common for both the mutated allele and functional allele.

[0226] In a non-limiting example excision of exon 21 may be achieved by utilizing a first gRNA that targets a particular sequence in a SNP position in intron 20 (e.g., rs2280235) which is specific for the mutated allele, and a second gRNA that targets a particular sequence in a SNP position in intron 21 (e.g., rs2066804, rs7597768, rs41375144, rs13010343) which is specific for the mutated allele, wherein one of the gRNAs may target a sequence which is common for both the mutated allele and functional allele.

[0227] Another optional strategy is to inhibit the expression of the mutated allele by excision of the PolyA-signal in the 3′UTR region of the mutated allele of both transcripts, that may lead to an unstable transcript. In a non-limiting example, excision of the PolyA-signal may be achieved by using a first gRNA to target a sequence in a downstream SNP position (e.g., rs1168, rs73064614, rs17748980, and rs12987796) which is specific for the mutated allele, and a second gRNA to target a sequence in intron 23 which is common for both the mutated allele and functional allele.

[0228] Another optional strategy is to introduce a frameshift in exon 3 by utilizing one gRNA to target a SNP position in exon 3, such as rs2066802 and mediate a single DSB.

### Examples of RNA Guide Sequences which Specifically Target Mutated Alleles of STAT1 Gene

[0229] Although a large number of guide sequences can be designed to target a mutated allele, the nucleotide sequences described in Tables 2 identified by SEQ ID NOs: 1-2426 below were specifically selected to effectively implement the methods set forth herein and to effectively discriminate between alleles.

[0230] Table 2 shows guide sequences designed for use as described in the embodiments above to associate with different SNPs within a sequence of a mutated STAT1 allele. Each engineered guide molecule is further designed such as to associate with a target genomic DNA sequence of interest that lies next to a protospacer adjacent motif (PAM), e.g., a PAM matching the sequence NGG or NAG, where “N” is any nucleobase. The guide sequences were designed to work in conjunction with one or more different CRISPR nucleases, including, but not limited to, e.g. SpCas9WT (PAM SEQ: NGG), SpCas9.VQR.1 (PAM SEQ: NGAN), SpCas9.VQR.2 (PAM SEQ: NGNG), SpCas9.EQR (PAM SEQ: NGAG), SpCas9.VRER (PAM SEQ: NGCG), SaCas9WT (PAM SEQ: NNGRRT), NmCas9WT (PAM SEQ: NNNNGATT), Cpfl (PAM SEQ: TTTV), or JeCas9WT (PAM SEQ: NNNVRYM). RNA molecules of the present invention are each designed to form complexes in conjunction with one or more different CRISPR nucleases and designed to target polynucleotide sequences of interest utilizing one or more different PAM sequences respective to the CRISPR nuclease utilized.

TABLE 2
Guide sequences designed to associate with specific STAT1 gene targets

| | SEQ ID NOs | SEQ ID NOs | SEQ ID NOs |
|---|---|---|---|
| Target | of 20 base guides | of 21 base guides | of 22 base guides |
| 2:190969075_T_C | 1-43 | 44-85 | 86-131 |
| 2:190969230_G_A | 132-167 | 168-197 | 198-235 |
| 2:190969443_T_C | 236-281 | 282-329 | 330-379 |
| 2:190969771_T_G | 380-425 | 426-473 | 474-523 |
| 2:190969782_C_G | 524-569 | 570-604 | 605-644 |
| 2:190970341_A_G | 645-690 | 691-738 | 739-788 |
| 2:190975830_A_G | 789-834 | 835-882 | 883-932 |
| 2:190975860_G_T | 933-978 | 979-1024 | 1025-1073 |
| 2:190976881_T_C | 1074-1118 | 1119-1162 | 1163-1209 |
| 2:190976971_G_T | 1210-1255 | 1256-1297 | 1298-1343 |
| 2:190976990_T_C | 1344-1389 | 1390-1437 | 1438-1487 |
| 2:190978930_A_G | 1488-1533 | 1534-1577 | 1578-1625 |
| 2:190978964_C_A | 1626-1671 | 1672-1719 | 1720-1769 |
| 2:190978967_GCT_G | 1645, 1770-1814 | 1702, 1815-1861 | 1756, 1862-1910 |
| 2:190978972_C_T | 1804-1806, | 1851-1852, 1858- | 1872, 1883, 1900, |
| | 1810, 1911-1952 | 1859, 1953-1996 | 1908, 1997-2042 |
| 2:190978985_T_C | 2043-2088 | 2089-2136 | 2137-2186 |
| 2:190979759_C_T | 2187-2221 | 2222-2256 | 2257-2293 |
| 2:190979816_G_A | 2294-2330 | 2331-2360 | 2361-2394 |
| 2:190979824_C_G | 2395-2440 | 2441-2488 | 2489-2538 |
| 2:190980614_C_T | 2539-2584 | 2585-2632 | 2633-2682 |
| 2:190980623_A_C | 2683-2728 | 2729-2776 | 2777-2826 |
| 2:190982415_T_C | 2827-2872 | 2873-2920 | 2921-2970 |
| 2:190983651_C_T | 2971-3016 | 3017-3064 | 3065-3114 |
| 2:190983657_C_T | 3115-3160 | 3161-3208 | 3209-3258 |
| 2:190983699_C_A | 3259-3304 | 3305-3352 | 3353-3402 |
| 2:190984307_T_C | 3403-3448 | 3449-3496 | 3497-3546 |
| 2:190984316_G_T | 3547-3592 | 3593-3640 | 3641-3690 |
| 2:190984360_G_C | 3691-3736 | 3737-3783 | 3784-3833 |
| 2:190985612_C_T | 3834-3879 | 3880-3927 | 3928-3977 |
| 2:190985626_G_C | 3978-4023 | 4024-4071 | 4072-4121 |
| 2:190985634_G_A | 4122-4167 | 4168-4213 | 4214-4261 |
| 2:190985634_G_C | 4124, 4131, | 4177, 4189, 4193, | 4223, 4235, 4241, |
| | 4141, 4143, | 4195, 4206, 4208, | 4243, 4255, 4261, |
| | 4147, 4159, | 4300-4339 | 4340-4381 |
| | 4161, 4167, | | |
| | 4262-4299 | | |
| 2:190985663_A_G | 4382-4396 | 4397-4403 | 4404-4414 |
| 2:190985665_A_G | 4395-4396, | 4426-4428 | 4429-4435 |
| | 4415-4425 | | |
| 2:190986906_A_C | 4436-4481 | 4482-4529 | 4530-4579 |
| 2:190986907_T_C | 4446, 4475- | 4492, 4498, 4526- | 4540-4541, 4547, |
| | 4476, 4479- | 4529, 4620-4661 | 4549, 4578-4579, |
| | 4481, 4580-4619 | | 4662-4705 |
| 2:190986913_T_C | 4706-4751 | 4752-4799 | 4800-4849 |
| 2:190986913_T_G | 4706, 4709, | 4752, 4757, 4763, | 4811, 4826, 4829, |
| | 4711, 4717, | 4778, 4781, 4785, | 4832-4833, 4835, |
| | 4730, 4732, | 4791, 4794, 4888- | 4841, 4844, 4928- |
| | 4735, 4739, | 4927 | 4969 |
| | 4850-4887 | | |
| 2:190986921_G_A | 4970-5015 | 5016-5063 | 5064-5113 |
| 2:190986924_C_T | 4999, 5007, | 5024, 5055, 5156- | 5079, 5109, 5199- |
| | 5114-5155 | 5198 | 5243 |
| 2:190986942_CT_TA | 5244-5252 | 5253-5261 | 5262-5272 |
| 2:190987035_G_A | 5273-5318 | 5319-5363 | 5364-5413 |
| 2:190987040_C_A | 5414-5454 | 5455-5488 | 5489-5531 |
| 2:190987045_AC_TA | 5532-5565 | 5566-5591 | 5592-5626 |
| 2:190989622_A_G | 5627-5649 | 5650-5655 | 5656-5665 |
| 2:190989649_T_C | 5666-5698 | 5699-5725 | 5726-5758 |
| 2:190989659_C_A | 5759-5789 | 5790-5818 | 5819-5849 |
| 2:190989660_A_C | 5770, 5786, | 5800, 5810, 5818, | 5830, 5840, 5846, |
| | 5789, 5850-5889 | 5890-5930 | 5931-5974 |
| 2:190991241_T_G | 5975-6020 | 6021-6068 | 6069-6118 |
| 2:190991258_T_A | 6119-6164 | 6165-6212 | 6213-6262 |
| 2:190991295_A_G | 6263-6308 | 6309-6356 | 6357-6406 |
| 2:190991307_C_G | 6407-6452 | 6453-6500 | 6501-6550 |
| 2:190991325_A_C | 6551-6596 | 6597-6644 | 6645-6694 |
| 2:190995071_G_A | 6695-6740 | 6741-6788 | 6789-6838 |
| 2:190995129_G_T | 6839-6879 | 6880-6910 | 6911-6948 |
| 2:190995139_T_C | 6949-6994 | 6995-7042 | 7043-7092 |
| 2:190995143_T_C | 7093-7138 | 7139-7186 | 7187-7236 |
| 2:190995148_T_A | 7237-7282 | 7283-7330 | 7331-7380 |
| 2:190995151_T_C | 7237, 7262, | 7283, 7309, 7425- | 7331, 7340, 7471- |
| | 7381-7424 | 7470 | 7518 |
| 2:190995173_T_C | 7519-7564 | 7565-7612 | 7613-7662 |
| 2:190995184_C_T | 7663-7708 | 7709-7756 | 7757-7806 |
| 2:190995185_G_A | 7676, 7678- | 7723, 7725, 7735, | 7771, 7773, 7790, |
| | 7679, 7689, | 7744, 7748, 7753, | 7794, 7797, 7803, |
| | 7698, 7701, | 7847-7888 | 7889-7932 |
| | 7807-7846 | | |
| 2:190995185_G_C | 7676, 7678- | 7723, 7725, 7735, | 7771, 7773, 7790, |
| | 7679, 7689, | 7744, 7748, 7753, | 7794, 7797, 7803, |
| | 7698, 7701, | 7861, 7876, 7971- | 7897, 7922, 8011- |
| | 7817, 7841, | 8010 | 8052 |
| | 7933-7970 | | |
| 2:190995193_T_G | 8053-8098 | 8099-8146 | 8147-8196 |
| 2:190995205_G_A | 8197-8242 | 8243-8290 | 8291-8340 |
| 2:190995209_C_T | 8341-8386 | 8387-8434 | 8435-8484 |
| 2:190997889_G_A | 8485-8530 | 8531-8578 | 8579-8628 |
| 2:190997890_G_GC | 8487, 8496, | 8533, 8535, 8544, | 8583, 8592-8593, |
| | 8505-8506, | 8550, 8556, 8573, | 8600, 8606, 8611, |
| | 8508, 8525, | 8671-8714 | 8715-8760 |
| | 8629-8670 | | |
| 2:190997919_C_T | 8761-8806 | 8807-8854 | 8855-8904 |
| 2:190997927_C_T | 8905-8950 | 8951-8995 | 8996-9043 |
| 2:190998244_C_T | 9044-9053 | 9054-9062 | 9063-9073 |
| 2:190998246_T_C | 9044, 9051, | 9056, 9060, 9114- | 9064, 9066, 9147- |
| | 9074-9113 | 9146 | 9185 |
| 2:190998247_C_A | 9051, 9075, | 9056, 9116, 9127, | 9064, 9153, 9164, |
| | 9084, 9186-9197 | 9198-9209 | 9210-9223 |
| 2:190999630_G_T | 9224-9269 | 9270-9317 | 9318-9367 |
| 2:190999647_A_G | 9368-9412 | 9413-9453 | 9454-9499 |
| 2:190999649_T_A | 9372, 9386, | 9426, 9428, 9532- | 9459, 9470, 9557- |
| | 9398, 9402, | 9556 | 9585 |
| | 9500-9531 | | |
| 2:190999659_A_T | 9586-9609 | 9610-9620 | 9621-9636 |
| 2:190999673_T_C | 9637-9678 | 9679-9715 | 9716-9758 |
| 2:190999674_C_G | 9648, 9653, | 9686, 9694, 9700, | 9723, 9741, 9743, |
| | 9659, 9661, | 9791-9820 | 9821-9852 |
| | 9759-9790 | | |
| 2:190999689_T_G | 9853-9898 | 9899-9946 | 9947-9996 |
| 2:191001113_CTCTT_C | 9997-10042 | 10043-10090 | 10091-10140 |
| 2:191001124_T_A | 10141-10186 | 10187-10234 | 10235-10284 |
| 2:191001129_A_T | 10285-10330 | 10331-10378 | 10379-10428 |
| 2:191001156_G_A | 10429-10474 | 10475-10522 | 10523-10572 |
| 2:191007651_T_A | 10573-10612 | 10613-10648 | 10649-10689 |
| 2:191007665_G_C | 10690-10725 | 10726-10753 | 10754-10787 |
| 2:191009043_C_T | 10788-10833 | 10834-10878 | 10879-10926 |
| 2:191009050_T_C | 10927-10972 | 10973-11020 | 11021-11070 |
| 2:191009915_AT_A | 11071-11116 | 11117-11164 | 11165-11214 |
| 2:191013689_A_T | 11215-11260 | 11261-11307 | 11308-11357 |
| 2:191014155_G_C | 11358-11403 | 11404-11451 | 11452-11501 |
| 2:191014182_G_A | 11502-11547 | 11548-11595 | 11596-11645 |
| 2:190961656_A_G | 11646-11729 | 11730-11817 | 11818-11909 |
| 2:190961689_G_GT | 11910-11935 | 11936-11956 | 11957-11981 |
| 2:190961689_G_GTTT | 11911, 11913, | 11937, 11942, | 11958, 11960, |
| | 11917, 11921, | 11946, 11949- | 11965, 11969, |
| | 11925-11926, | 11950, 11953- | 11972, 11975, |
| | 11928, 11931, | 11954, 11991- | 11978-11979, |
| | 11934, 11982- | 11997 | 11981, 11998- |
| | 11990 | | 12006 |
| 2:190961689_G_GTTTT | 11911, 11917, | 11942, 11946, | 11958, 11965, |
| | 11921, 11925, | 11949-11950, | 11969, 11972, |
| | 11928, 11931, | 11953, 12014- | 11975, 11978- |
| | 11934, 12007- | 12018 | 11979, 12019- |
| | 12013 | | 12025 |
| 2:190961761_C_T | 12026-12070 | 12071-12092 | 12093-12124 |
| 2:190963477_A_T | 12125-12208 | 12209-12295 | 12296-12387 |
| 2:190963479_C_A | 12125, 12127, | 12209, 12211, | 12296, 12298, |
| | 12130-12131, | 12214-12215, | 12301-12302, |
| | 12134, 12136, | 12218, 12220, | 12305-12306, |
| | 12138-12139, | 12222-12223, | 12308, 12310- |
| | 12141, 12143- | 12225, 12227- | 12311, 12313, |
| | 12144, 12146- | 12228, 12231- | 12315-12316, |
| | 12147, 12149, | 12232, 12234, | 12319-12320, |
| | 12151, 12153- | 12236, 12238- | 12322, 12324, |
| | 12154, 12156, | 12239, 12241, | 12326-12327, |
| | 12158, 12162, | 12243, 12247, | 12329, 12331, |
| | 12165, 12170- | 12249, 12251, | 12335, 12337, |
| | 12172, 12174- | 12256-12258, | 12339, 12344- |
| | 12175, 12179- | 12260-12261, | 12346, 12348- |
| | 12180, 12182, | 12264-12265, | 12349, 12352- |
| | 12185-12187, | 12267, 12269, | 12353, 12356, |
| | 12189-12190, | 12272-12274, | 12358, 12361, |
| | 12192, 12194, | 12276-12277, | 12363-12364, |
| | 12198-12199, | 12279, 12281, | 12366-12367, |
| | 12202-12203, | 12285-12286, | 12369, 12371, |
| | 12205, 12207, | 12289-12290, | 12375-12376, |
| | 12388-12429 | 12292, 12294, | 12378-12379, |
| | | 12430-12473 | 12381, 12383, |
| | | | 12386, 12474- |
| | | | 12519 |
| 2:190963870_A_G | 12520-12593 | 12594-12661 | 12662-12737 |
| 2:190964627_C_G | 12738-12821 | 12822-12909 | 12910-13001 |
| 2:190966079_A_C | 13002-13085 | 13086-13173 | 13174-13265 |
| 2:190971704_T_TTC | 13266-13272 | 13273 | 13274-13275 |
| 2:190971836_C_G | 13276-13277 | 13278-13281 | 13282-13291 |
| 2:190972045_T_C | 13292-13374 | 13375-13460 | 13461-13551 |
| 2:190972908_C_T | 13552-13635 | 13636-13719 | 13720-13808 |
| 2:190973115_T_C | 13809-13892 | 13893-13980 | 13981-14072 |
| 2:190974738_G_A | 14073-14154 | 14155-14229 | 14230-14313 |
| 2:190977033_G_A | 14314-14377 | 14378-14424 | 14425-14486 |
| 2:190985840_T_C | 14487-14570 | 14571-14658 | 14659-14750 |
| 2:190988561_G_A | | 14751-14754 | 14755-14762 |
| 2:190989913_C_A | 14763-14846 | 14847-14934 | 14935-15026 |
| 2:190991701_G_T | 15027-15036 | 15037-15043 | 15044-15053 |
| 2:190995803_C_T | 15054-15135 | 15136-15205 | 15206-15287 |
| 2:191005594_G_A | 15288-15371 | 15372-15457 | 15458-15549 |
| 2:191015242_G_GT | 15550-15577 | 15578-15599 | 15600-15623 |
| 2:191015242_G_GTT | 15550 15552 | 15581 15591 | 15602 15604 |
| | 15554 15556 | 15593-15594 | 15611 15613 |
| | 15562 15565 | 15597-15599 | 15616 15618 |
| | 15567 15569 | 15637-15647 | 15621-15623 |
| | 15571-15572 | | 15648-15660 |
| | 15574-15576 | | |
| | 15624-15636 | | |
| 2:191015776_C_G | 15661-15743 | 15744-15803 | 15804-15883 |
| 2:191017537_C_T | 15884-15955 | 15956-16025 | 16026-16101 |
| 2:191018047_C_G | 16102-16138 | 16139-16181 | 16182-16232 |
| 2:191021099_T_C | 16233-16316 | 16317-16403 | 16404-16495 |
| 2:191021367_T_C | 16496-16573 | 16574-16645 | 16646-16725 |
| rs10173099 | 16726-16783 | 16784-16837 | 16838-16899 |
| rs10190333 | 16900-16909 | 16910-16913 | 16914-16919 |
| rs10195683 | 16920-17003 | 17004-17091 | 17092-17183 |
| rs10199181 | 17184-17251 | 17252-17289 | 17290-17346 |
| rs10208033 | 17347-17430 | 17431-17518 | 17519-17610 |
| rs10437 | 17611-17690 | 17691-17768 | 17769-17856 |
| rs112292924 | 17857-17860 | 17861-17870 | 17871-17885 |
| rs113477796 | 13266 13270 | 13273 17894- | 13274-13275 |
| | 13272 17886- | 17896 | 17897-17903 |
| | 17893 | | |
| rs11386507 | 17904-17919 | 17920 | 17921-17923 |
| rs11677408 | 17924-18005 | 18006-18090 | 18091-18179 |
| rs1168 | 18180-18263 | 18264-18351 | 18352-18443 |
| rs11682932 | 18444-18526 | 18527-18610 | 18611-18701 |
| rs11688154 | 18702-18785 | 18786-18873 | 18874-18965 |
| rs11692579 | 18966-19041 | 19042-19111 | 19112-19194 |
| rs11693463 | 19195-19278 | 19279-19366 | 19367-19458 |
| rs11885069 | 19459-19542 | 19543-19630 | 19631-19722 |
| rs11887698 | 19723-19806 | 19807-19894 | 19895-19986 |
| rs11889555 | 19987-20070 | 20071-20158 | 20159-20250 |
| rs11904548 | 20251-20334 | 20335-20422 | 20423-20514 |
| rs12464143 | 15027-15032 | 15037-15043 | 15044-15049 |
| | 15034-15036 | 20532-20546 | 15051-15053 |
| | 20515-20531 | | 20547-20563 |
| rs12468579 | 20564-20632 | 20633-20687 | 20688-20755 |
| rs12693588 | 20756-20839 | 20840-20923 | 20924-21013 |
| rs12693589 | 21014-21096 | 21097-21177 | 21178-21265 |
| rs12693590 | 21266-21349 | 21350-21437 | 21438-21529 |
| rs12693591 | 21530-21605 | 21606-21669 | 21670-21745 |
| rs12987796 | 21746-21829 | 21830-21909 | 21910-21998 |
| rs13005843 | 21999-22077 | 22078-22151 | 22152-22232 |
| rs13010343 | 22233-22315 | 22316-22399 | 22400-22491 |
| rs13029247 | 22492-22515 | 22516-22539 | 22540-22565 |
| rs13029532 | 22566-22624 | 22625-22661 | 22662-22713 |
| rs13395505 | 22714-22797 | 22798-22882 | 22883-22974 |
| rs1400657 | 22975-23050 | 23051-23112 | 23113-23188 |
| rs1467198 | 23189-23234 | 23235-23272 | 23273-23312 |
| rs1491049196 | 23313-23347 | 23348-23384 | 23385-23423 |
| rs1491128973 | 16901-16909 | 16910-16913 | 16914-16919 |
| rs151232124 | 23424-23428 | 23429-23430 | 23431-23434 |
| rs1547550 | 23435-23518 | 23519-23606 | 23607-23698 |
| rs16833146 | 23699-23782 | 23783-23870 | 23871-23962 |
| rs16833157 | 23963-24046 | 24047-24134 | 24135-24226 |
| rs16833172 | 24227-24310 | 24311-24398 | 24399-24490 |
| rs16833177 | 24491-24550 | 24551-24591 | 24592-24649 |
| rs17817076 | 24650-24733 | 24734-24819 | 24820-24911 |
| rs1914408 | 24912-24995 | 24996-25083 | 25084-25175 |
| rs2030171 | 25176-25259 | 25260-25347 | 25348-25439 |
| rs2066795 | 25440-25457 | 25458-25467 | 25468-25480 |
| rs2066797 | 25481-25488 | 25489-25490 | 25491-25496 |
| rs2066802 | 25497-25580 | 25581-25668 | 25669-25760 |
| rs2066806 | 25761-25795 | 25796-25825 | 25826-25863 |
| rs2280232 | 25864-25947 | 25948-26035 | 26036-26127 |
| rs2280234 | 26128-26211 | 26212-26299 | 26300-26391 |
| rs2280235 | 26392-26444 | 26445-26495 | 26496-26552 |
| rs3088307 | 26553-26636 | 26637-26724 | 26725-26816 |
| rs3215260 | 26817-26887 | 26888-26960 | 26961-27037 |
| rs34230248 | 27038-27083 | 27084-27123 | 27124-27165 |
| rs34997637 | 27166-27245 | 27246-27320 | 27321-27406 |
| rs36014758 | 27407-27450 | 27451-27497 | 27498-27548 |
| rs36077929 | 27549-27632 | 27633-27720 | 27721-27812 |
| rs36116009 | 27813-27896 | 27897-27984 | 27985-28076 |
| rs36234022 | 28077-28156 | 28157-28230 | 28231-28316 |
| rs3755312 | 28317-28400 | 28401-28485 | 28486-28575 |
| rs3771300 | 28576-28659 | 28660-28743 | 28744-28833 |
| rs397814979 | 28834-28861 | 28862-28889 | 28890-28917 |
| rs398105121 | 28918-28939 | 28940-28955 | 28956-28975 |
| rs41375144 | 28976-29048 | 29049-29110 | 29111-29182 |
| rs41430444 | 29183-29248 | 29249-29312 | 29313-29382 |
| rs41454245 | 29383-29466 | 29467-29545 | 29546-29632 |
| rs41474144 | 29633-29690 | 29691-29736 | 29737-29796 |
| rs4327257 | 29797-29880 | 29881-29968 | 29969-30060 |
| rs45467700 | 15027-15032 | 15037-15043 | 15044-15049 |
| | 15034-15036 | 20532-20533 | 15051-15053 |
| | 20515 20517 | 20537 20539 | 20547 20549 |
| | 20522-20523 | 20541 20545 | 20552 20555 |
| | 20525 20530 | 30118-30170 | 20557 20559 |
| | 30061-30117 | | 30171-30227 |
| rs45528632 | 30228-30287 | 30288-30322 | 30323-30371 |
| rs4853455 | 30372-30448 | 30449-30529 | 30530-30614 |
| rs4853532 | 30615-30633 | 30634-30658 | 30659-30689 |
| rs4853537 | 30690-30773 | 30774-30861 | 30862-30953 |
| rs55658633 | 30954-31037 | 31038-31119 | 31120-31207 |
| rs5837215 | 31208-31291 | 31292-31377 | 31378-31469 |
| rs59420375 | 31470-31553 | 31554-31631 | 31632-31718 |
| rs60976990 | 15027-15036 | 15037-15043 | 15044-15053 |
| | 20522 20525 | 20539 20545 | 20555 20557 |
| | 31719 | | 31720 |
| rs62179911 | 31721-31734 | 31735-31740 | 31741-31750 |
| rs6711082 | 31751-31781 | 31782-31815 | 31816-31855 |
| rs6718902 | 31856-31934 | 31935-32010 | 32011-32097 |
| rs6745710 | 32098-32159 | 32160-32217 | 32218-32281 |
| rs6751855 | 32282-32293 | 32294-32299 | 32300-32308 |
| rs6752638 | 32309-32388 | 32389-32469 | 32470-32555 |
| rs6755660 | 32556-32639 | 32640-32727 | 32728-32819 |
| rs67960489 | 32820-32845 | 32846-32867 | 32868-32893 |
| rs71403203 | 32894-32977 | 32978-33065 | 33066-33157 |
| rs72330702 | 16901-16909 | 16910-16913 | 16914-16919 |
| rs73064614 | 33158-33241 | 33242-33329 | 33330-33421 |
| rs73979324 | 33422-33505 | 33506-33593 | 33594-33685 |
| rs7558921 | 33686-33769 | 33770-33857 | 33858-33949 |
| rs7562024 | 33950-34033 | 34034-34119 | 34120-34209 |
| rs7565237 | 30616 30618 | 30635-30636 | 30660-30661 |
| | 30620-30621 | 30639 30641 | 30665 30668 |
| | 30624-30626 | 30643 30647 | 30670-30671 |
| | 30630 34210- | 30649 30651 | 30674-30675 |
| | 34244 | 30655 30657 | 30677 30679 |
| | | 34245-34285 | 30685 30687 |
| | | | 34286-34332 |
| rs7575823 | 34333-34416 | 34417-34504 | 34505-34596 |
| rs7576984 | 34597-34680 | 34681-34768 | 34769-34860 |
| rs7597768 | 34861-34899 | 34900-34916 | 34917-34948 |
| rs760275441 | 23313-23319 | 23348-23355 | 23385-23392 |
| | 23321-23331 | 23357-23367 | 23394-23405 |
| | 23333 23335 | 23369-23371 | 23407-23411 |
| | 23337-23347 | 23373 23375- | 23413-23418 |
| | 34949-34977 | 23384 34978- | 23420-23423 |
| | | 35008 | 35009-35041 |
| rs762997161 | 35042-35043 | 35044 | 35045-35046 |
| rs796493321 | 35047-35104 | 35105-35133 | 35134-35178 |
| Upstream_Exon_4_1 | 23424-23428 | 23429-23430 | 23431-23434 |
| | 35179-36010 | 36011-36658 | 36659-37365 |

[0231] Examples are provided below to facilitate a more complete understanding of the invention. The following examples illustrate the exemplary modes of making and practicing the invention. However, the scope of the invention is not limited to specific embodiments disclosed in these Examples, which are for purposes of illustration only.

### EXPERIMENTAL DETAILS

### Example 1: STAT1 Correction Analysis

[0232] Guide sequences comprising 17-25 contiguous nucleotides containing nucleotides in the sequence set forth in any one of SEQ ID NOs 1-37365 are screened for high on target activity using SpCas9 in HeLa cells. On target activity is determined by DNA capillary electrophoresis analysis.

### Example 2: Guide Selection with SpCas9 in HeLa Cells

[0233] The STAT1 editing strategies include excision of either Exon 3, Exon 4 or Exon 4-5 of a mutated allele (See strategies a1, a2, and a3, FIG. 1A) or creation of a frameshift in Exon 3 of a STAT1 mutated allele (See strategy b, FIG. 1A). Excision is obtained by utilizing two guides, one of which is discriminatory and targets a heterozygous SNP and the other is non-discriminatory and targets Intron 3. To determine the optimal SpCas9 guide RNP composition for each of the strategies, a guide selection screen was performed in HeLa cells. 65 ng of SpCas9 coding plasmid was co-transfected with 20 ng of each of the gRNA expression plasmids in a 96 well plate format using JetOPTIMUS reagent (Polyplus). Cells were harvested 72 h post DNA transfection. Genomic DNA was extracted and used for capillary electrophoresis upon using on-target primers which amplify the endogenous genomic regions. The graph in FIG. 1B represents the average % editing ±STDV of three independent experiments. According to capillary electrophoreses analysis all guides show activity ranging between 5-65%.

[0234] The guides which were chosen for further experiments are sg10 (SEQ ID NO: 24295), sg18 (SEQ ID NO: 25501), sg19 (SEQ ID NO: 17213), sg22 (SEQ ID NO: 15340) and sg28 (SEQ ID NO: 35795) which are the most active guides for Intron 2 rs16833172, Exon 3 rs2066802, Intron 4 rs10199181, Intron 5 rs10183196, and Intron 3, respectively.

### Example 3: Assessing Editing Efficiency, Excision and NMD with Selected sgRNAs in HSCs

[0235] To support the validity of our editing strategies, HSCs from a healthy donor (Lonza Lot: 3017500) homozygous to reference or alternative forms of the SNPs were nucleofected with RNPs of WT-SpCas9 protein complexed with either, sg10ref (SEQ ID NO: 24295), sg18 ref (SEQ ID NO: 25501), sg19alt (SEQ ID NO: 17213), sg22ref (SEQ ID NO: 15340), sg28 (SEQ ID NO: 35795) or in combination of sg10ref (SEQ ID NO: 24295)+sg28 (SEQ ID NO: 35795), sg19alt (SEQ ID NO: 17213)+sg28 (SEQ ID NO: 35795) and sg22ref (SEQ ID NO: 15340)+sg28 (SEQ ID NO: 35795). Briefly, 2.50×10⁵ cells were mixed with preassembled RNPs composed of 105 pmole SpCas9 and 120 pmole sgRNA then mixed with 100 pmole of electroporation enhancer (IDT-1075916). The cells were then electroporated using P3 primary cell 4D-nucleofector X Kit S (V4XP-3032, Lonza) by applying the DZ100 program. Since the cells are homozygous, the editing and excision are expected to be biallelic. A fraction of cells was harvested 72 h post nucleofection and genomic DNA was extracted to measure on-target activity using NGS analysis. The analysis revealed that more than 85% of the cells were edited in each of the samples treated with an individual guide (FIG. 2A). The remaining cells were harvested for gDNA and total RNA extraction six days post nucleofection. Excision levels were measured using droplet digital PCR (ddPCR). Between 50-100 ng of gDNA of each sample were used to amplify Exon 3 and Exon 4 within STAT1 in two separated reactions since both regions were amplified with FAM labeled probes (Bio-Rad). A region within RPP30, which is not expected to be influenced by the editing, was amplified with a HEX probe and served to normalize the copy number in each ddPCR reaction. The ratio between the FAM and HEX signals was used to determine excision efficiency. According to the results, Exon 3 was excised in ˜50% of the cells treated with sg10ref (SEQ ID NO: 24295)+sg28 (SEQ ID NO: 35795). Exon 4 was excised in ˜40% and ˜25% of the cells treated with sg19alt (SEQ ID NO: 17213)+sg28 (SEQ ID NO: 35795) and sg22ref (SEQ ID NO: 15340)+sg28 (SEQ ID NO: 35795), respectively (FIG. 2B). To assess the effect of the editing on STAT1 mRNA, qRT-PCR was performed with two primer sets. One primer set amplifies STAT1 Exon 3 and 4 and another set amplifies STAT1 Exon 9 and 10. The results demonstrate a significant decrease in mRNA levels in sg18 (SEQ ID NO: 25501) treated samples which may be indicative of NMD. However, in the excision samples it appears that there is no NMD upon editing since there is a decrease in Exon 3 and 4 levels as expected upon treatment, while there is no significant decrease in STAT1 Exon 9 and 10 levels (FIG. 2C).

### Example 4: The U3A Cell-System Serves as a Model for Studying Ectopic STAT1 WT and G274R Mutated Based Editing and Gene Expression

[0236] Signal transducer and activator of transcription 1 (STAT1) is an essential mediator of the type I interferon-induced signaling that activates the immune response against various infectious pathogens. Upon IFNγ activation, STAT1 becomes phosphorylated by JAKs, dimerizes via a phosphorylation-dependent interaction and translocates to the nucleus where it drives downstream gene transcription encoding proteins for anti-viral and pro-inflammatory functions (Fujiki et al., 2017).

[0237] Monoallelic mutations in STAT1 have been identified in patients with a great diversity of clinical manifestations and immune lesions. Mutations have been predominately associated with chronic mucocutaneous candidiasis (CMC) with or without a variety of autoimmune manifestations. STAT1 mutations have been also associated with a gradual decline in cellular and humoral immunity leading to fatal viral infections. Increased STAT1 phosphorylation and DNA binding found in most CMC patients promoted the notion that a gain-of-function (GOF) mechanism underlies these disorders (Lieu et al., (2011); Ovadia et al., (2016); and Okada et al., (2018)). Due to the high diversity of STAT1 mutations in patients leading to a GOF mechanism driving CMC, inventors identified heterozygous SNP rs2066802 residing in exon 3, which has a ˜20% frequency in the population, as a target for a discriminatory editing strategy to eliminate the mutant allele by inserting indels leading to premature stop codons and abolishment of mutant transcript via nonsense mediated decay (NMD) as described in FIGS. 2A-2C.

[0238] To this end, we have established a cellular system harboring both a R274G mutation and a normal allele recapitulating patient cells to study the gene expression GOF effect of mutated STAT1 and validating gene editing strategies for restoration.

[0239] Inventors utilized a U3A cell system, which harbors an intrinsic genomic mutation of STAT1 leading to lack of expression and unresponsiveness to interferon-gamma induction, as a model for studying ectopic STAT1 WT and R274G mutated alleles. Three viral based stable lines were established: WT-STAT1-mCherry; Mutant R274G-STAT1-GFP encompassing the alternative form of rs066802 SNP for editing purposes; and WT and R274G-mutant biallelic for GOF evaluation of STAT1 mediated gene expression (FIG. 3A). WT or mutant U3A lines were functionally validated and characterized for protein expression, STAT1 phosphorylation and downstream gene expression following IFNγ stimulation for 0.5 and 24 h. Upon stimulation, higher levels of STAT1 phosphorylation was observed for the R274G allele than for the WT allele with no differences in STAT1 protein expression (FIG. 3B), strengthening the validity of the system and the biological notion that R274G mutation impairs dephosphorylation of STAT1 leading to a gain-of-function. The biallelic cell line depicted a homogeneous GFP and mCherry population derived from both a WT and a mutant allele. Accordingly, the levels of mRNA derived from the WT and mutant line was at the same ratio detected by NGS of cDNA from the biallelic line (FIG. 3C and FIG. 3D). Lastly, the transcriptional regulation in both mutant and biallelic lines following 24 h IFNγ treatment was aberrant, leading to GOF phenotype with increased gene expression of several genes in comparison to the WT line (FIG. 3E).

### Example 5: Editing of Mutant STAT1 Restores WT Gene Expression

[0240] To determine the validity of the inventors' strategy, biallelic U3A cells were electroporated with RNP complexed with a specific guide targeting a SNP located on exon 3 of mutant allele. Briefly, 2.5×10⁵ U3A cells were mixed with preassembled RNPs composed of 105 pmole Cas9-HiFi and 120 pmole sgRNA (See Table 2), then mixed with 100 pmole of electroporation enhancer (IDT-1075916). The cells are then electroporated using SF primary cell 4D-nucleofector X Kit S (V4XP-3032, Lonza) by applying the DS-137 program. Edited cells were cultured for 8 days to ensure degradation of pre-edited STAT1 protein, stimulated for 24 h with IFNγ and subjected to transcriptional restoration of downstream STAT1 mediated genes (FIG. 4A). A fraction of cells was harvested 72 h post nucleofection and genomic DNA was extracted to measure discriminatory on-target activity of the guide as tested by NGS of the mutant allele in comparison to WT. The specificity was determined by calculation of % editing of the on-target allele divided by % editing of the SNP containing allele (On/SNP ratio) and the same for a reference allele. 60% on target editing was demonstrated with full discrimination from WT allele, which was further validated by FACS analysis depicting a specific reduction of the mutant GFP allele in contrast to the WT allele (FIG. 4B and FIG. 4C).

[0241] Inventors next investigated the effect of editing the mutated allele on gene expression restoration by comparing STAT1 mediated genes between biallelic, WT, and edited biallelic cells following IFNγ stimulation. For these experiments, qRT-PCR was used to compare STAT1 mediated transcriptional responses to IFN-γ stimulation. As shown in FIG. 4D, prominent transcriptional restoration is depicted in edited cells with pronounced reduction in STAT1 mediated genes such as CXCL10 and CXCL11 relative to unedited biallelic cells, to levels comparable to those measured in WT cells.

[0242] These results demonstrate that a strategy utilizing SNP-based specific editing of mutant allele leads to transcriptional restoration of the mutant STAT1 GOF phenotype to a WT phenotype.

### REFERENCES

[0243] 1. Ahmad and Allen (1992) “Antibody-mediated Specific Binging and Cytotoxicity of Lipsome-entrapped Doxorubicin to Lung Cancer Cells in Vitro”, Cancer Research 52:4817-20.
[0244] 2. Anders (1992) “Human gene therapy”, Science 256:808-13.
[0245] 3. Basha et al. (2011) “Influence of Cationic Lipid Composition on Gene Silencing Properties of Lipid Nanoparticle Formulations of siRNA in Antigen-Presenting Cells”, Mol. Ther. 19(12):2186-200.
[0246] 4. Behr (1994) Gene transfer with synthetic cationic amphiphiles: Prospects for gene therapy”, Bioconjuage Chem 5:382-89.
[0247] 5. Blaese (1995) “Vectors in cancer therapy: how will they deliver”, Cancer Gene Ther. 2:291-97.
[0248] 6. Blaese et al. (1995) “T lympocyte-directed gene therapy for ADA-SCID: initial trial results after 4 years”, Science 270(5235):475-80.
[0249] 7. Buchschacher and Panganiban (1992) “Human immunodeficiency virus vectors for inducible expression of foreign genes”, J. Virol. 66:2731-39.
[0250] 8. Burstein et al. (2017) “New CRISPR-Cas systems from uncultivated microbes”, Nature 542:237-41.
[0251] 9. Chung et al. (2006) “Agrobacterium is not alone: gene transfer to plants by viruses and other bacteria”, Trends Plant Sci. 11(1):1-4.
[0252] 10. Crystal (1995) “Transfer of genes to humans: early lessons and obstacles to success”, Science 270(5235):404-10.
[0253] 11. Dillon (1993) “Regulation gene expression in gene therapy” Trends in Biotechnology 11(5):167-173.
[0254] 12. Dranoff et al. (1997) “A phase I study of vaccination with autologous, irradiated melanoma cells engineered to secrete human granulocyte macrophage colony stimulating factor”, Hum. Gene Ther. 8(1):111-23.
[0255] 13. Dunbar et al. (1995) “Retrovirally marked CD34-enriched peripheral blood and bone marrow cells contribute to long-term engraftment after autologous transplantation”, Blood 85:3048-57.
[0256] 14. Ellem et al. (1997) “A case report: immune responses and clinical course of the first human use of ganulocyte/macrophage-colony-stimulating-factor-tranduced autologous melanoma cells for immunotherapy”, Cancer Immunol Immunother 44:10-20.
[0257] 15. Fujiki et al. (2017) “Molecular mechanism and structural basis of gain-of function of STAT1 caused by pathogenic R274Q mutation”, J Biol Chem. 292(15):6240-6254.
[0258] 16. Gao and Huang (1995) “Cationic liposome-mediated gene transfer” Gene Ther. 2(10):710-22.
[0259] 17. Haddada et al. (1995) “Gene Therapy Using Adenovirus Vectors”, in: The Molecular Repertoire of Adenoviruses III: Biology and Pathogenesis, ed. Doerfler and Bohm, pp. 297-306.
[0260] 18. Han et al. (1995) “Ligand-directed retro-viral targeting of human breast cancer cells”, Proc Natl Acad Sci U.S.A. 92(21):9747-51.
[0261] 19. Inaba et al. (1992) “Generation of large numbers of dendritic cells from mouse bone marrow cultures supplemented with granulocyte/macrophage colony-stimulating factor”, J Exp Med. 176(6):1693-702.
[0262] 20. Liu et al. (2011) “Gain-of-function human STAT1 mutations impair IL-17 immunity and underlie chronic mucocutaneous candidiasis”, J. Exp Med. 208(8):1635-48.
[0263] 21. Jinek et al. (2012) “A programmable dual-RNA-guided DNA endonuclease in adaptive bacterial immunity,” Science 337(6096):816-21.
[0264] 22. Johan et al. (1992) “GLVR1, a receptor for gibbon ape leukemia virus, is homologous to a phosphate permease of Neurospora crassa and is expressed at high levels in the brain and thymus”, J Virol 66(3):1635-40.
[0265] 23. Judge et al. (2006) “Design of noninflammatory synthetic siRNA mediating potent gene silencing in vivo”, Mol Ther. 13(3):494-505.
[0266] 24. Kohn et al. (1995) “Engraftment of gene-modified umbilical cord blood cells in neonates with adnosine deaminase deficiency”, Nature Medicine 1:1017-23.
[0267] 25. Kremer and Perricaudet (1995) “Adenovirus and adeno-associated virus mediated gene transfer”, Br. Med. Bull. 51(1):31-44.
[0268] 26. Macdiarmid et al. (2009) “Sequential treatment of drug-resistant tumors with targeted minicells containing siRNA or a cytotoxic drug”, Nat Biotehcnol. 27(7):643-51.
[0269] 27. Malech et al. (1997) “Prolonged production of NADPH oxidase-corrected granulocyes after gene therapy of chronic granulomatous disease”, PNAS 94(22):12133-38.
[0270] 28. Miller et al. (1991) “Construction and properties of retrovirus packaging cells based on gibbon ape leukemia virus”, J Virol. 65(5):2220-24.
[0271] 29. Miller (1992) “Human gene therapy comes of age”, Nature 357:455-60.
[0272] 30. Mitani and Caskey (1993) “Delivering therapeutic genes—matching approach and application”, Trends in Biotechnology 11(5):162-66.
[0273] 31. Nabel and Felgner (1993) “Direct gene transfer for immunotherapy and immunization”, Trends in Biotechnology 11(5):211-15.
[0274] 32. Okada et al. (2016) “Chronic mucocutaneous candidiasis disease associated with inborn errors of IL-17 immunity”, Clin Transl Immunology 5(12):e114.
[0275] 33. Ovadia et al. (2018) “Two different STAT1 gain-of-function mutations lead to diverse IFN-γ-mediated gene expression”, NPJ Genom Med. 3:23.
[0276] 34. Remy et al. (1994) “Gene Transfer with a Series of Lipphilic DNA-Binding Molecules”, Bioconjugate Chem. 5(6):647-54.
[0277] 35. Sentmanat et al. (2018) “A Survey of Validation Strategies for CRISPR-Cas9 Editing”, Scientific Reports 8:888, doi:10.1038/s41598-018-19441-8.
[0278] 36. Sommerfelt et al. (1990) “Localization of the receptor gene for type D simian retroviruses on human chromosome 19”, J. Virol. 64(12):6214-20.
[0279] 37. Van Brunt (1988) “Molecular framing: transgenic animals as bioactors” Biotechnology 6:1149-54.
[0280] 38. Vigne et al. (1995) “Third-generation adenovectors for gene therapy”, Restorative Neurology and Neuroscience 8(1,2): 35-36.
[0281] 39. Wilson et al. (1989) “Formation of infectious hybrid virion with gibbon ape leukemia virus and human T-cell leukemia virus retroviral envelope glycoproteins and the gag and pol proteins of Moloney murine leukemia virus”, J. Virol. 63:2374-78.
[0282] 40. Yu et al. (1994) “Progress towards gene therapy for HIV infection”, Gene Ther. 1(1):13-26.
[0283] 41. Zetsche et al. (2015) “Cpfl is a single RNA-guided endonuclease of a class 2 CRIPSR-Cas system” Cell 163(3):759-71.
[0284] 42. Zuris et al. (2015) “Cationic lipid-mediated delivery of proteins enables efficient protein based genome editing in vitro and in vivo” Nat Biotechnol. 33(1):73-80.

The application's sequence listing, which the Patent Office published only in electronic form, follows.

SEQUENCE LISTING (37407 sequences)

SEQ ID NO: 1 - RNA, 20 nt, Artificial Sequence
  Guide RNA
aaaaguaaagucuccuggcu

SEQ ID NO: 2 - RNA, 20 nt, Artificial Sequence
  Guide RNA
aaaguaaagucuccuggcua

SEQ ID NO: 3 - RNA, 20 nt, Artificial Sequence
  Guide RNA
aaagucuccuggcuagugca

SEQ ID NO: 4 - RNA, 20 nt, Artificial Sequence
  Guide RNA
aaguaaagucuccuggcuag

SEQ ID NO: 5 - RNA, 20 nt, Artificial Sequence
  Guide RNA
aagucuccuggcuagugcag

SEQ ID NO: 6 - RNA, 20 nt, Artificial Sequence
  Guide RNA
acuagccaggagacuuuacu

SEQ ID NO: 7 - RNA, 20 nt, Artificial Sequence
  Guide RNA
acugcacuagccaggagacu

SEQ ID NO: 8 - RNA, 20 nt, Artificial Sequence
  Guide RNA
agccaggagacuuuacuuuu

SEQ ID NO: 9 - RNA, 20 nt, Artificial Sequence
  Guide RNA
aggagacuuuacuuuuaaga

SEQ ID NO: 10 - RNA, 20 nt, Artificial Sequence
  Guide RNA
aguaaagucuccuggcuagu

SEQ ID NO: 11 - RNA, 20 nt, Artificial Sequence
  Guide RNA
agucuccuggcuagugcagu

SEQ ID NO: 12 - RNA, 20 nt, Artificial Sequence
  Guide RNA
auuuuacugcacuagccagg

SEQ ID NO: 13 - RNA, 20 nt, Artificial Sequence
  Guide RNA
cacuagccaggagacuuuac

SEQ ID NO: 14 - RNA, 20 nt, Artificial Sequence
  Guide RNA
caggagacuuuacuuuuaag

SEQ ID NO: 15 - RNA, 20 nt, Artificial Sequence
  Guide RNA
cauuuuacugcacuagccag

SEQ ID NO: 16 - RNA, 20 nt, Artificial Sequence
  Guide RNA
ccaggagacuuuacuuuuaa

SEQ ID NO: 17 - RNA, 20 nt, Artificial Sequence
  Guide RNA
ccuggcuagugcaguaaaau

SEQ ID NO: 18 - RNA, 20 nt, Artificial Sequence
  Guide RNA
cuagccaggagacuuuacuu

SEQ ID NO: 19 - RNA, 20 nt, Artificial Sequence
  Guide RNA
cuccuggcuagugcaguaaa

SEQ ID NO: 20 - RNA, 20 nt, Artificial Sequence
  Guide RNA
cugcacuagccaggagacuu

SEQ ID NO: 21 - RNA, 20 nt, Artificial Sequence
  Guide RNA
cuuaaaaguaaagucuccug

SEQ ID NO: 22 - RNA, 20 nt, Artificial Sequence
  Guide RNA
cuucuuaaaaguaaagucuc

SEQ ID NO: 23 - RNA, 20 nt, Artificial Sequence
  Guide RNA
gcacuagccaggagacuuua

SEQ ID NO: 24 - RNA, 20 nt, Artificial Sequence
  Guide RNA
gccaggagacuuuacuuuua

SEQ ID NO: 25 - RNA, 20 nt, Artificial Sequence
  Guide RNA
guaaagucuccuggcuagug

SEQ ID NO: 26 - RNA, 20 nt, Artificial Sequence
  Guide RNA
gucuccuggcuagugcagua

SEQ ID NO: 27 - RNA, 20 nt, Artificial Sequence
  Guide RNA
guuucauuuuacugcacuag

SEQ ID NO: 28 - RNA, 20 nt, Artificial Sequence
  Guide RNA
uaaaaguaaagucuccuggc

SEQ ID NO: 29 - RNA, 20 nt, Artificial Sequence
  Guide RNA
uaaagucuccuggcuagugc

SEQ ID NO: 30 - RNA, 20 nt, Artificial Sequence
  Guide RNA
uacugcacuagccaggagac

SEQ ID NO: 31 - RNA, 20 nt, Artificial Sequence
  Guide RNA
uagccaggagacuuuacuuu

SEQ ID NO: 32 - RNA, 20 nt, Artificial Sequence
  Guide RNA
ucauuuuacugcacuagcca

SEQ ID NO: 33 - RNA, 20 nt, Artificial Sequence
  Guide RNA
uccuggcuagugcaguaaaa

SEQ ID NO: 34 - RNA, 20 nt, Artificial Sequence
  Guide RNA
ucuccuggcuagugcaguaa

SEQ ID NO: 35 - RNA, 20 nt, Artificial Sequence
  Guide RNA
ucuuaaaaguaaagucuccu

SEQ ID NO: 36 - RNA, 20 nt, Artificial Sequence
  Guide RNA
ugcacuagccaggagacuuu

SEQ ID NO: 37 - RNA, 20 nt, Artificial Sequence
  Guide RNA
uuaaaaguaaagucuccugg

SEQ ID NO: 38 - RNA, 20 nt, Artificial Sequence
  Guide RNA
uuacugcacuagccaggaga

SEQ ID NO: 39 - RNA, 20 nt, Artificial Sequence
  Guide RNA
uucauuuuacugcacuagcc

SEQ ID NO: 40 - RNA, 20 nt, Artificial Sequence
  Guide RNA
uucuuaaaaguaaagucucc

SEQ ID NO: 41 - RNA, 20 nt, Artificial Sequence
  Guide RNA
uuuacugcacuagccaggag

SEQ ID NO: 42 - RNA, 20 nt, Artificial Sequence
  Guide RNA
uuucauuuuacugcacuagc

SEQ ID NO: 43 - RNA, 20 nt, Artificial Sequence
  Guide RNA
uuuuacugcacuagccagga

SEQ ID NO: 44 - RNA, 21 nt, Artificial Sequence
  Guide RNA
aaaaguaaagucuccuggcua

SEQ ID NO: 45 - RNA, 21 nt, Artificial Sequence
  Guide RNA
aaaguaaagucuccuggcuag

SEQ ID NO: 46 - RNA, 21 nt, Artificial Sequence
  Guide RNA
aaagucuccuggcuagugcag

SEQ ID NO: 47 - RNA, 21 nt, Artificial Sequence
  Guide RNA
aaguaaagucuccuggcuagu

SEQ ID NO: 48 - RNA, 21 nt, Artificial Sequence
  Guide RNA
aagucuccuggcuagugcagu

SEQ ID NO: 49 - RNA, 21 nt, Artificial Sequence
  Guide RNA
acuagccaggagacuuuacuu

SEQ ID NO: 50 - RNA, 21 nt, Artificial Sequence
  Guide RNA
acugcacuagccaggagacuu

SEQ ID NO: 51 - RNA, 21 nt, Artificial Sequence
  Guide RNA
agccaggagacuuuacuuuua

SEQ ID NO: 52 - RNA, 21 nt, Artificial Sequence
  Guide RNA
aguaaagucuccuggcuagug

SEQ ID NO: 53 - RNA, 21 nt, Artificial Sequence
  Guide RNA
agucuccuggcuagugcagua

SEQ ID NO: 54 - RNA, 21 nt, Artificial Sequence
  Guide RNA
auuuuacugcacuagccagga

SEQ ID NO: 55 - RNA, 21 nt, Artificial Sequence
  Guide RNA
cacuagccaggagacuuuacu

SEQ ID NO: 56 - RNA, 21 nt, Artificial Sequence
  Guide RNA
caggagacuuuacuuuuaaga

SEQ ID NO: 57 - RNA, 21 nt, Artificial Sequence
  Guide RNA
cauuuuacugcacuagccagg

SEQ ID NO: 58 - RNA, 21 nt, Artificial Sequence
  Guide RNA
ccaggagacuuuacuuuuaag

SEQ ID NO: 59 - RNA, 21 nt, Artificial Sequence
  Guide RNA
ccuggcuagugcaguaaaaug

SEQ ID NO: 60 - RNA, 21 nt, Artificial Sequence
  Guide RNA
cuagccaggagacuuuacuuu

SEQ ID NO: 61 - RNA, 21 nt, Artificial Sequence
  Guide RNA
cuccuggcuagugcaguaaaa

SEQ ID NO: 62 - RNA, 21 nt, Artificial Sequence
  Guide RNA
cugcacuagccaggagacuuu

SEQ ID NO: 63 - RNA, 21 nt, Artificial Sequence
  Guide RNA
cuuaaaaguaaagucuccugg

SEQ ID NO: 64 - RNA, 21 nt, Artificial Sequence
  Guide RNA
cuucuuaaaaguaaagucucc

SEQ ID NO: 65 - RNA, 21 nt, Artificial Sequence
  Guide RNA
gcacuagccaggagacuuuac

SEQ ID NO: 66 - RNA, 21 nt, Artificial Sequence
  Guide RNA
gccaggagacuuuacuuuuaa

SEQ ID NO: 67 - RNA, 21 nt, Artificial Sequence
  Guide RNA
gguuucauuuuacugcacuag

SEQ ID NO: 68 - RNA, 21 nt, Artificial Sequence
  Guide RNA
guaaagucuccuggcuagugc

SEQ ID NO: 69 - RNA, 21 nt, Artificial Sequence
  Guide RNA
gucuccuggcuagugcaguaa

SEQ ID NO: 70 - RNA, 21 nt, Artificial Sequence
  Guide RNA
guuucauuuuacugcacuagc

SEQ ID NO: 71 - RNA, 21 nt, Artificial Sequence
  Guide RNA
uaaaaguaaagucuccuggcu

SEQ ID NO: 72 - RNA, 21 nt, Artificial Sequence
  Guide RNA
uaaagucuccuggcuagugca

SEQ ID NO: 73 - RNA, 21 nt, Artificial Sequence
  Guide RNA
uacugcacuagccaggagacu

SEQ ID NO: 74 - RNA, 21 nt, Artificial Sequence
  Guide RNA
uagccaggagacuuuacuuuu

SEQ ID NO: 75 - RNA, 21 nt, Artificial Sequence
  Guide RNA
ucauuuuacugcacuagccag

SEQ ID NO: 76 - RNA, 21 nt, Artificial Sequence
  Guide RNA
uccuggcuagugcaguaaaau

SEQ ID NO: 77 - RNA, 21 nt, Artificial Sequence
  Guide RNA
ucuccuggcuagugcaguaaa

SEQ ID NO: 78 - RNA, 21 nt, Artificial Sequence
  Guide RNA
ucuuaaaaguaaagucuccug

SEQ ID NO: 79 - RNA, 21 nt, Artificial Sequence
  Guide RNA
ugcacuagccaggagacuuua

SEQ ID NO: 80 - RNA, 21 nt, Artificial Sequence
  Guide RNA
uuaaaaguaaagucuccuggc

SEQ ID NO: 81 - RNA, 21 nt, Artificial Sequence
  Guide RNA
uuacugcacuagccaggagac

SEQ ID NO: 82 - RNA, 21 nt, Artificial Sequence
  Guide RNA
uucauuuuacugcacuagcca

SEQ ID NO: 83 - RNA, 21 nt, Artificial Sequence
  Guide RNA
uuuacugcacuagccaggaga

SEQ ID NO: 84 - RNA, 21 nt, Artificial Sequence
  Guide RNA
uuucauuuuacugcacuagcc

SEQ ID NO: 85 - RNA, 21 nt, Artificial Sequence
  Guide RNA
uuuuacugcacuagccaggag

SEQ ID NO: 86 - RNA, 22 nt, Artificial Sequence
  Guide RNA
aaaaguaaagucuccuggcuag

SEQ ID NO: 87 - RNA, 22 nt, Artificial Sequence
  Guide RNA
aaaguaaagucuccuggcuagu

SEQ ID NO: 88 - RNA, 22 nt, Artificial Sequence
  Guide RNA
aaagucuccuggcuagugcagu

SEQ ID NO: 89 - RNA, 22 nt, Artificial Sequence
  Guide RNA
aaguaaagucuccuggcuagug

SEQ ID NO: 90 - RNA, 22 nt, Artificial Sequence
  Guide RNA
aagucuccuggcuagugcagua

SEQ ID NO: 91 - RNA, 22 nt, Artificial Sequence
  Guide RNA
acuagccaggagacuuuacuuu

SEQ ID NO: 92 - RNA, 22 nt, Artificial Sequence
  Guide RNA
acugcacuagccaggagacuuu

SEQ ID NO: 93 - RNA, 22 nt, Artificial Sequence
  Guide RNA
acuucuuaaaaguaaagucucc

SEQ ID NO: 94 - RNA, 22 nt, Artificial Sequence
  Guide RNA
agccaggagacuuuacuuuuaa

SEQ ID NO: 95 - RNA, 22 nt, Artificial Sequence
  Guide RNA
aggagacuuuacuuuuaagaag

SEQ ID NO: 96 - RNA, 22 nt, Artificial Sequence
  Guide RNA
aguaaagucuccuggcuagugc

SEQ ID NO: 97 - RNA, 22 nt, Artificial Sequence
  Guide RNA
agucuccuggcuagugcaguaa

SEQ ID NO: 98 - RNA, 22 nt, Artificial Sequence
  Guide RNA
auuuuacugcacuagccaggag

SEQ ID NO: 99 - RNA, 22 nt, Artificial Sequence
  Guide RNA
cacuagccaggagacuuuacuu

SEQ ID NO: 100 - RNA, 22 nt, Artificial Sequence
  Guide RNA
caggagacuuuacuuuuaagaa

SEQ ID NO: 101 - RNA, 22 nt, Artificial Sequence
  Guide RNA
cauuuuacugcacuagccagga

SEQ ID NO: 102 - RNA, 22 nt, Artificial Sequence
  Guide RNA
ccaggagacuuuacuuuuaaga

SEQ ID NO: 103 - RNA, 22 nt, Artificial Sequence
  Guide RNA
ccuggcuagugcaguaaaauga

SEQ ID NO: 104 - RNA, 22 nt, Artificial Sequence
  Guide RNA
cuagccaggagacuuuacuuuu

SEQ ID NO: 105 - RNA, 22 nt, Artificial Sequence
  Guide RNA
cuccuggcuagugcaguaaaau

SEQ ID NO: 106 - RNA, 22 nt, Artificial Sequence
  Guide RNA
cugcacuagccaggagacuuua

SEQ ID NO: 107 - RNA, 22 nt, Artificial Sequence
  Guide RNA
cuuaaaaguaaagucuccuggc

SEQ ID NO: 108 - RNA, 22 nt, Artificial Sequence
  Guide RNA
cuucuuaaaaguaaagucuccu

SEQ ID NO: 109 - RNA, 22 nt, Artificial Sequence
  Guide RNA
gcacuagccaggagacuuuacu

SEQ ID NO: 110 - RNA, 22 nt, Artificial Sequence
  Guide RNA
gccaggagacuuuacuuuuaag

SEQ ID NO: 111 - RNA, 22 nt, Artificial Sequence
  Guide RNA
gguuucauuuuacugcacuagc

SEQ ID NO: 112 - RNA, 22 nt, Artificial Sequence
  Guide RNA
guaaagucuccuggcuagugca

SEQ ID NO: 113 - RNA, 22 nt, Artificial Sequence
  Guide RNA
gucuccuggcuagugcaguaaa

SEQ ID NO: 114 - RNA, 22 nt, Artificial Sequence
  Guide RNA
guuucauuuuacugcacuagcc

SEQ ID NO: 115 - RNA, 22 nt, Artificial Sequence
  Guide RNA
uaaaaguaaagucuccuggcua

SEQ ID NO: 116 - RNA, 22 nt, Artificial Sequence
  Guide RNA
uaaagucuccuggcuagugcag

SEQ ID NO: 117 - RNA, 22 nt, Artificial Sequence
  Guide RNA
uacugcacuagccaggagacuu

SEQ ID NO: 118 - RNA, 22 nt, Artificial Sequence
  Guide RNA
uagccaggagacuuuacuuuua

SEQ ID NO: 119 - RNA, 22 nt, Artificial Sequence
  Guide RNA
ucauuuuacugcacuagccagg

SEQ ID NO: 120 - RNA, 22 nt, Artificial Sequence
  Guide RNA
uccuggcuagugcaguaaaaug

SEQ ID NO: 121 - RNA, 22 nt, Artificial Sequence
  Guide RNA
ucuccuggcuagugcaguaaaa

SEQ ID NO: 122 - RNA, 22 nt, Artificial Sequence
  Guide RNA
ucuuaaaaguaaagucuccugg

SEQ ID NO: 123 - RNA, 22 nt, Artificial Sequence
  Guide RNA
ugcacuagccaggagacuuuac

SEQ ID NO: 124 - RNA, 22 nt, Artificial Sequence
  Guide RNA
ugguuucauuuuacugcacuag

SEQ ID NO: 125 - RNA, 22 nt, Artificial Sequence
  Guide RNA
uuaaaaguaaagucuccuggcu

SEQ ID NO: 126 - RNA, 22 nt, Artificial Sequence
  Guide RNA
uuacugcacuagccaggagacu

SEQ ID NO: 127 - RNA, 22 nt, Artificial Sequence
  Guide RNA
uucauuuuacugcacuagccag

SEQ ID NO: 128 - RNA, 22 nt, Artificial Sequence
  Guide RNA
uucuuaaaaguaaagucuccug

SEQ ID NO: 129 - RNA, 22 nt, Artificial Sequence
  Guide RNA
uuuacugcacuagccaggagac

SEQ ID NO: 130 - RNA, 22 nt, Artificial Sequence
  Guide RNA
uuucauuuuacugcacuagcca

SEQ ID NO: 131 - RNA, 22 nt, Artificial Sequence
  Guide RNA
uuuuacugcacuagccaggaga

SEQ ID NO: 132 - RNA, 20 nt, Artificial Sequence
  Guide RNA
aaacuuagguucucaccauc

SEQ ID NO: 133 - RNA, 20 nt, Artificial Sequence
  Guide RNA
aacugaaacuuagguucuca

SEQ ID NO: 134 - RNA, 20 nt, Artificial Sequence
  Guide RNA
aacuuagguucucaccaucu

SEQ ID NO: 135 - RNA, 20 nt, Artificial Sequence
  Guide RNA
aaucaacugaaacuuagguu

SEQ ID NO: 136 - RNA, 20 nt, Artificial Sequence
  Guide RNA
acugaaacuuagguucucac

SEQ ID NO: 137 - RNA, 20 nt, Artificial Sequence
  Guide RNA
acuuagguucucaccaucua

SEQ ID NO: 138 - RNA, 20 nt, Artificial Sequence
  Guide RNA
agauggugagaaccuaaguu

SEQ ID NO: 139 - RNA, 20 nt, Artificial Sequence
  Guide RNA
agguucucaccaucuauaua

SEQ ID NO: 140 - RNA, 20 nt, Artificial Sequence
  Guide RNA
auagauggugagaaccuaag

SEQ ID NO: 141 - RNA, 20 nt, Artificial Sequence
  Guide RNA
auauagauggugagaaccua

SEQ ID NO: 142 - RNA, 20 nt, Artificial Sequence
  Guide RNA
aucaacugaaacuuagguuc

SEQ ID NO: 143 - RNA, 20 nt, Artificial Sequence
  Guide RNA
auggugagaaccuaaguuuc

SEQ ID NO: 144 - RNA, 20 nt, Artificial Sequence
  Guide RNA
caacugaaacuuagguucuc

SEQ ID NO: 145 - RNA, 20 nt, Artificial Sequence
  Guide RNA
caccaucuauauaaaaacug

SEQ ID NO: 146 - RNA, 20 nt, Artificial Sequence
  Guide RNA
caguuuuuauauagauggug

SEQ ID NO: 147 - RNA, 20 nt, Artificial Sequence
  Guide RNA
cucaccaucuauauaaaaac

SEQ ID NO: 148 - RNA, 20 nt, Artificial Sequence
  Guide RNA
cucaguuuuuauauagaugg

SEQ ID NO: 149 - RNA, 20 nt, Artificial Sequence
  Guide RNA
cugaaacuuagguucucacc

SEQ ID NO: 150 - RNA, 20 nt, Artificial Sequence
  Guide RNA
cuuagguucucaccaucuau

SEQ ID NO: 151 - RNA, 20 nt, Artificial Sequence
  Guide RNA
gaaacuuagguucucaccau

SEQ ID NO: 152 - RNA, 20 nt, Artificial Sequence
  Guide RNA
gauggugagaaccuaaguuu

SEQ ID NO: 153 - RNA, 20 nt, Artificial Sequence
  Guide RNA
ggugagaaccuaaguuucag

SEQ ID NO: 154 - RNA, 20 nt, Artificial Sequence
  Guide RNA
gguucucaccaucuauauaa

SEQ ID NO: 155 - RNA, 20 nt, Artificial Sequence
  Guide RNA
gugagaaccuaaguuucagu

SEQ ID NO: 156 - RNA, 20 nt, Artificial Sequence
  Guide RNA
guucucaccaucuauauaaa

SEQ ID NO: 157 - RNA, 20 nt, Artificial Sequence
  Guide RNA
guuuuuauauagauggugag

SEQ ID NO: 158 - RNA, 20 nt, Artificial Sequence
  Guide RNA
uagauggugagaaccuaagu

SEQ ID NO: 159 - RNA, 20 nt, Artificial Sequence
  Guide RNA
uagguucucaccaucuauau

SEQ ID NO: 160 - RNA, 20 nt, Artificial Sequence
  Guide RNA
uauagauggugagaaccuaa

SEQ ID NO: 161 - RNA, 20 nt, Artificial Sequence
  Guide RNA
uauauagauggugagaaccu

SEQ ID NO: 162 - RNA, 20 nt, Artificial Sequence
  Guide RNA
ucaacugaaacuuagguucu

SEQ ID NO: 163 - RNA, 20 nt, Artificial Sequence
  Guide RNA
ugaaacuuagguucucacca

SEQ ID NO: 164 - RNA, 20 nt, Artificial Sequence
  Guide RNA
uggugagaaccuaaguuuca

SEQ ID NO: 165 - RNA, 20 nt, Artificial Sequence
  Guide RNA
uuagguucucaccaucuaua

SEQ ID NO: 166 - RNA, 20 nt, Artificial Sequence
  Guide RNA
uuauauagauggugagaacc

SEQ ID NO: 167 - RNA, 20 nt, Artificial Sequence
  Guide RNA
uuuauauagauggugagaac

SEQ ID NO: 168 - RNA, 21 nt, Artificial Sequence
  Guide RNA
aaacuuagguucucaccaucu

SEQ ID NO: 169 - RNA, 21 nt, Artificial Sequence
  Guide RNA
aacugaaacuuagguucucac

SEQ ID NO: 170 - RNA, 21 nt, Artificial Sequence
  Guide RNA
aacuuagguucucaccaucua

SEQ ID NO: 171 - RNA, 21 nt, Artificial Sequence
  Guide RNA
aaucaacugaaacuuagguuc

SEQ ID NO: 172 - RNA, 21 nt, Artificial Sequence
  Guide RNA
acugaaacuuagguucucacc

SEQ ID NO: 173 - RNA, 21 nt, Artificial Sequence
  Guide RNA
acuuagguucucaccaucuau

SEQ ID NO: 174 - RNA, 21 nt, Artificial Sequence
  Guide RNA
agauggugagaaccuaaguuu

SEQ ID NO: 175 - RNA, 21 nt, Artificial Sequence
  Guide RNA
agguucucaccaucuauauaa

SEQ ID NO: 176 - RNA, 21 nt, Artificial Sequence
  Guide RNA
auagauggugagaaccuaagu

SEQ ID NO: 177 - RNA, 21 nt, Artificial Sequence
  Guide RNA
auauagauggugagaaccuaa

SEQ ID NO: 178 - RNA, 21 nt, Artificial Sequence
  Guide RNA
aucaacugaaacuuagguucu

SEQ ID NO: 179 - RNA, 21 nt, Artificial Sequence
  Guide RNA
auggugagaaccuaaguuuca

SEQ ID NO: 180 - RNA, 21 nt, Artificial Sequence
  Guide RNA
caacugaaacuuagguucuca

SEQ ID NO: 181 - RNA, 21 nt, Artificial Sequence
  Guide RNA
cugaaacuuagguucucacca

SEQ ID NO: 182 - RNA, 21 nt, Artificial Sequence
  Guide RNA
cuuagguucucaccaucuaua

SEQ ID NO: 183 - RNA, 21 nt, Artificial Sequence
  Guide RNA
gaaacuuagguucucaccauc

SEQ ID NO: 184 - RNA, 21 nt, Artificial Sequence
  Guide RNA
gauggugagaaccuaaguuuc

SEQ ID NO: 185 - RNA, 21 nt, Artificial Sequence
  Guide RNA
ggugagaaccuaaguuucagu

SEQ ID NO: 186 - RNA, 21 nt, Artificial Sequence
  Guide RNA
gguucucaccaucuauauaaa

SEQ ID NO: 187 - RNA, 21 nt, Artificial Sequence
  Guide RNA
gugagaaccuaaguuucaguu

SEQ ID NO: 188 - RNA, 21 nt, Artificial Sequence
  Guide RNA
uagauggugagaaccuaaguu

SEQ ID NO: 189 - RNA, 21 nt, Artificial Sequence
  Guide RNA
uagguucucaccaucuauaua

SEQ ID NO: 190 - RNA, 21 nt, Artificial Sequence
  Guide RNA
uauagauggugagaaccuaag

SEQ ID NO: 191 - RNA, 21 nt, Artificial Sequence
  Guide RNA
uauauagauggugagaaccua

SEQ ID NO: 192 - RNA, 21 nt, Artificial Sequence
  Guide RNA
ucaacugaaacuuagguucuc

SEQ ID NO: 193 - RNA, 21 nt, Artificial Sequence
  Guide RNA
ugaaacuuagguucucaccau

SEQ ID NO: 194 - RNA, 21 nt, Artificial Sequence
  Guide RNA
uggugagaaccuaaguuucag

SEQ ID NO: 195 - RNA, 21 nt, Artificial Sequence
  Guide RNA
uuagguucucaccaucuauau

SEQ ID NO: 196 - RNA, 21 nt, Artificial Sequence
  Guide RNA
uuauauagauggugagaaccu

SEQ ID NO: 197 - RNA, 21 nt, Artificial Sequence
  Guide RNA
uuuauauagauggugagaacc

SEQ ID NO: 198 - RNA, 22 nt, Artificial Sequence
  Guide RNA
aaacuuagguucucaccaucua

SEQ ID NO: 199 - RNA, 22 nt, Artificial Sequence
  Guide RNA
aaaucaacugaaacuuagguuc

SEQ ID NO: 200 - RNA, 22 nt, Artificial Sequence
  Guide RNA
aacugaaacuuagguucucacc

SEQ ID NO: 201 - RNA, 22 nt, Artificial Sequence
  Guide RNA
aacuuagguucucaccaucuau

SEQ ID NO: 202 - RNA, 22 nt, Artificial Sequence
  Guide RNA
aaucaacugaaacuuagguucu

SEQ ID NO: 203 - RNA, 22 nt, Artificial Sequence
  Guide RNA
acugaaacuuagguucucacca

SEQ ID NO: 204 - RNA, 22 nt, Artificial Sequence
  Guide RNA
acuuagguucucaccaucuaua

SEQ ID NO: 205 - RNA, 22 nt, Artificial Sequence
  Guide RNA
agauggugagaaccuaaguuuc

SEQ ID NO: 206 - RNA, 22 nt, Artificial Sequence
  Guide RNA
agguucucaccaucuauauaaa

SEQ ID NO: 207 - RNA, 22 nt, Artificial Sequence
  Guide RNA
auagauggugagaaccuaaguu

SEQ ID NO: 208 - RNA, 22 nt, Artificial Sequence
  Guide RNA
auauagauggugagaaccuaag

SEQ ID NO: 209 - RNA, 22 nt, Artificial Sequence
  Guide RNA
aucaacugaaacuuagguucuc

SEQ ID NO: 210 - RNA, 22 nt, Artificial Sequence
  Guide RNA
auggugagaaccuaaguuucag

SEQ ID NO: 211 - RNA, 22 nt, Artificial Sequence
  Guide RNA
caacugaaacuuagguucucac

SEQ ID NO: 212 - RNA, 22 nt, Artificial Sequence
  Guide RNA
caccaucuauauaaaaacugag

SEQ ID NO: 213 - RNA, 22 nt, Artificial Sequence
  Guide RNA
caguuuuuauauagauggugag

SEQ ID NO: 214 - RNA, 22 nt, Artificial Sequence
  Guide RNA
ccucucucaguuuuuauauaga

SEQ ID NO: 215 - RNA, 22 nt, Artificial Sequence
  Guide RNA
cucaccaucuauauaaaaacug

SEQ ID NO: 216 - RNA, 22 nt, Artificial Sequence
  Guide RNA
cucaguuuuuauauagauggug

SEQ ID NO: 217 - RNA, 22 nt, Artificial Sequence
  Guide RNA
cucucaguuuuuauauagaugg

SEQ ID NO: 218 - RNA, 22 nt, Artificial Sequence
  Guide RNA
cugaaacuuagguucucaccau

SEQ ID NO: 219 - RNA, 22 nt, Artificial Sequence
  Guide RNA
cuuagguucucaccaucuauau

SEQ ID NO: 220 - RNA, 22 nt, Artificial Sequence
  Guide RNA
gaaacuuagguucucaccaucu

SEQ ID NO: 221 - RNA, 22 nt, Artificial Sequence
  Guide RNA
gauggugagaaccuaaguuuca

SEQ ID NO: 222 - RNA, 22 nt, Artificial Sequence
  Guide RNA
ggugagaaccuaaguuucaguu

SEQ ID NO: 223 - RNA, 22 nt, Artificial Sequence
  Guide RNA
gguucucaccaucuauauaaaa

SEQ ID NO: 224 - RNA, 22 nt, Artificial Sequence
  Guide RNA
gugagaaccuaaguuucaguug

SEQ ID NO: 225 - RNA, 22 nt, Artificial Sequence
  Guide RNA
uagauggugagaaccuaaguuu

SEQ ID NO: 226 - RNA, 22 nt, Artificial Sequence
  Guide RNA
uagguucucaccaucuauauaa

SEQ ID NO: 227 - RNA, 22 nt, Artificial Sequence
  Guide RNA
uauagauggugagaaccuaagu

SEQ ID NO: 228 - RNA, 22 nt, Artificial Sequence
  Guide RNA
uauauagauggugagaaccuaa

SEQ ID NO: 229 - RNA, 22 nt, Artificial Sequence
  Guide RNA
ucaacugaaacuuagguucuca

SEQ ID NO: 230 - RNA, 22 nt, Artificial Sequence
  Guide RNA
ugaaacuuagguucucaccauc

SEQ ID NO: 231 - RNA, 22 nt, Artificial Sequence
  Guide RNA
uggugagaaccuaaguuucagu

SEQ ID NO: 232 - RNA, 22 nt, Artificial Sequence
  Guide RNA
uuagguucucaccaucuauaua

SEQ ID NO: 233 - RNA, 22 nt, Artificial Sequence
  Guide RNA
uuauauagauggugagaaccua

SEQ ID NO: 234 - RNA, 22 nt, Artificial Sequence
  Guide RNA
uuuauauagauggugagaaccu

SEQ ID NO: 235 - RNA, 22 nt, Artificial Sequence
  Guide RNA
uuuuauauagauggugagaacc

SEQ ID NO: 236 - RNA, 20 nt, Artificial Sequence
  Guide RNA
aaaaacaagauacagccaca

SEQ ID NO: 237 - RNA, 20 nt, Artificial Sequence
  Guide RNA
aaaacaagauacagccacac

SEQ ID NO: 238 - RNA, 20 nt, Artificial Sequence
  Guide RNA
aaacaagauacagccacaca

SEQ ID NO: 239 - RNA, 20 nt, Artificial Sequence
  Guide RNA
aacaagauacagccacacag

SEQ ID NO: 240 - RNA, 20 nt, Artificial Sequence
  Guide RNA
aagauacagccacacagaca

SEQ ID NO: 241 - RNA, 20 nt, Artificial Sequence
  Guide RNA
acaagauacagccacacaga

SEQ ID NO: 242 - RNA, 20 nt, Artificial Sequence
  Guide RNA
acacagacagcaguauguaa

SEQ ID NO: 243 - RNA, 20 nt, Artificial Sequence
  Guide RNA
acagacagcaguauguaaaa

SEQ ID NO: 244 - RNA, 20 nt, Artificial Sequence
  Guide RNA
acagccacacagacagcagu

SEQ ID NO: 245 - RNA, 20 nt, Artificial Sequence
  Guide RNA
acauacugcugucugugugg

SEQ ID NO: 246 - RNA, 20 nt, Artificial Sequence
  Guide RNA
acugcugucuguguggcugu

SEQ ID NO: 247 - RNA, 20 nt, Artificial Sequence
  Guide RNA
agauacagccacacagacag

SEQ ID NO: 248 - RNA, 20 nt, Artificial Sequence
  Guide RNA
agccacacagacagcaguau

SEQ ID NO: 249 - RNA, 20 nt, Artificial Sequence
  Guide RNA
auacagccacacagacagca

SEQ ID NO: 250 - RNA, 20 nt, Artificial Sequence
  Guide RNA
auacugcugucuguguggcu

SEQ ID NO: 251 - RNA, 20 nt, Artificial Sequence
  Guide RNA
caagauacagccacacagac

SEQ ID NO: 252 - RNA, 20 nt, Artificial Sequence
  Guide RNA
cacacagacagcaguaugua

SEQ ID NO: 253 - RNA, 20 nt, Artificial Sequence
  Guide RNA
cacagacagcaguauguaaa

SEQ ID NO: 254 - RNA, 20 nt, Artificial Sequence
  Guide RNA
cagccacacagacagcagua

SEQ ID NO: 255 - RNA, 20 nt, Artificial Sequence
  Guide RNA
cauacugcugucuguguggc

SEQ ID NO: 256 - RNA, 20 nt, Artificial Sequence
  Guide RNA
ccacacagacagcaguaugu

SEQ ID NO: 257 - RNA, 20 nt, Artificial Sequence
  Guide RNA
cccuuuuacauacugcuguc

SEQ ID NO: 258 - RNA, 20 nt, Artificial Sequence
  Guide RNA
ccuuuuacauacugcugucu

SEQ ID NO: 259 - RNA, 20 nt, Artificial Sequence
  Guide RNA
cugcugucuguguggcugua

SEQ ID NO: 260 - RNA, 20 nt, Artificial Sequence
  Guide RNA
cugucuguguggcuguaucu

SEQ ID NO: 261 - RNA, 20 nt, Artificial Sequence
  Guide RNA
cuguguggcuguaucuuguu

SEQ ID NO: 262 - RNA, 20 nt, Artificial Sequence
  Guide RNA
cuuuuacauacugcugucug

SEQ ID NO: 263 - RNA, 20 nt, Artificial Sequence
  Guide RNA
gaaaaacaagauacagccac

SEQ ID NO: 264 - RNA, 20 nt, Artificial Sequence
  Guide RNA
gauacagccacacagacagc

SEQ ID NO: 265 - RNA, 20 nt, Artificial Sequence
  Guide RNA
gccacacagacagcaguaug

SEQ ID NO: 266 - RNA, 20 nt, Artificial Sequence
  Guide RNA
gcugucuguguggcuguauc

SEQ ID NO: 267 - RNA, 20 nt, Artificial Sequence
  Guide RNA
ggaaaaacaagauacagcca

SEQ ID NO: 268 - RNA, 20 nt, Artificial Sequence
  Guide RNA
gucuguguggcuguaucuug

SEQ ID NO: 269 - RNA, 20 nt, Artificial Sequence
  Guide RNA
uacagccacacagacagcag

SEQ ID NO: 270 - RNA, 20 nt, Artificial Sequence
  Guide RNA
uacauacugcugucugugug

SEQ ID NO: 271 - RNA, 20 nt, Artificial Sequence
  Guide RNA
uacugcugucuguguggcug

SEQ ID NO: 272 - RNA, 20 nt, Artificial Sequence
  Guide RNA
ucccuuuuacauacugcugu

SEQ ID NO: 273 - RNA, 20 nt, Artificial Sequence
  Guide RNA
ucuguguggcuguaucuugu

SEQ ID NO: 274 - RNA, 20 nt, Artificial Sequence
  Guide RNA
ugcugucuguguggcuguau

SEQ ID NO: 275 - RNA, 20 nt, Artificial Sequence
  Guide RNA
uggaaaaacaagauacagcc

SEQ ID NO: 276 - RNA, 20 nt, Artificial Sequence
  Guide RNA
ugucuguguggcuguaucuu

SEQ ID NO: 277 - RNA, 20 nt, Artificial Sequence
  Guide RNA
uguguggcuguaucuuguuu

SEQ ID NO: 278 - RNA, 20 nt, Artificial Sequence
  Guide RNA
uuacauacugcugucugugu

SEQ ID NO: 279 - RNA, 20 nt, Artificial Sequence
  Guide RNA
uucccuuuuacauacugcug

SEQ ID NO: 280 - RNA, 20 nt, Artificial Sequence
  Guide RNA
uuuacauacugcugucugug

SEQ ID NO: 281 - RNA, 20 nt, Artificial Sequence
  Guide RNA
uuuuacauacugcugucugu

SEQ ID NO: 282 - RNA, 21 nt, Artificial Sequence
  Guide RNA
aaaaacaagauacagccacac

SEQ ID NO: 283 - RNA, 21 nt, Artificial Sequence
  Guide RNA
aaaacaagauacagccacaca

SEQ ID NO: 284 - RNA, 21 nt, Artificial Sequence
  Guide RNA
aaacaagauacagccacacag

SEQ ID NO: 285 - RNA, 21 nt, Artificial Sequence
  Guide RNA
aacaagauacagccacacaga

SEQ ID NO: 286 - RNA, 21 nt, Artificial Sequence
  Guide RNA
aagauacagccacacagacag

SEQ ID NO: 287 - RNA, 21 nt, Artificial Sequence
  Guide RNA
acaagauacagccacacagac

SEQ ID NO: 288 - RNA, 21 nt, Artificial Sequence
  Guide RNA
acacagacagcaguauguaaa

SEQ ID NO: 289 - RNA, 21 nt, Artificial Sequence
  Guide RNA
acagacagcaguauguaaaag

SEQ ID NO: 290 - RNA, 21 nt, Artificial Sequence
  Guide RNA
acagccacacagacagcagua

SEQ ID NO: 291 - RNA, 21 nt, Artificial Sequence
  Guide RNA
acauacugcugucuguguggc

SEQ ID NO: 292 - RNA, 21 nt, Artificial Sequence
  Guide RNA
acugcugucuguguggcugua

SEQ ID NO: 293 - RNA, 21 nt, Artificial Sequence
  Guide RNA
agauacagccacacagacagc

SEQ ID NO: 294 - RNA, 21 nt, Artificial Sequence
  Guide RNA
agccacacagacagcaguaug

SEQ ID NO: 295 - RNA, 21 nt, Artificial Sequence
  Guide RNA
auacagccacacagacagcag

SEQ ID NO: 296 - RNA, 21 nt, Artificial Sequence
  Guide RNA
auacugcugucuguguggcug

SEQ ID NO: 297 - RNA, 21 nt, Artificial Sequence
  Guide RNA
caagauacagccacacagaca

SEQ ID NO: 298 - RNA, 21 nt, Artificial Sequence
  Guide RNA
cacacagacagcaguauguaa

SEQ ID NO: 299 - RNA, 21 nt, Artificial Sequence
  Guide RNA
cacagacagcaguauguaaaa

SEQ ID NO: 300 - RNA, 21 nt, Artificial Sequence
  Guide RNA
cagccacacagacagcaguau

SEQ ID NO: 301 - RNA, 21 nt, Artificial Sequence
  Guide RNA
cauacugcugucuguguggcu

SEQ ID NO: 302 - RNA, 21 nt, Artificial Sequence
  Guide RNA
ccacacagacagcaguaugua

SEQ ID NO: 303 - RNA, 21 nt, Artificial Sequence
  Guide RNA
cccuuuuacauacugcugucu

SEQ ID NO: 304 - RNA, 21 nt, Artificial Sequence
  Guide RNA
ccuuuuacauacugcugucug

SEQ ID NO: 305 - RNA, 21 nt, Artificial Sequence
  Guide RNA
cugcugucuguguggcuguau

SEQ ID NO: 306 - RNA, 21 nt, Artificial Sequence
  Guide RNA
cugucuguguggcuguaucuu

SEQ ID NO: 307 - RNA, 21 nt, Artificial Sequence
  Guide RNA
cuguguggcuguaucuuguuu

SEQ ID NO: 308 - RNA, 21 nt, Artificial Sequence
  Guide RNA
cuucccuuuuacauacugcug

SEQ ID NO: 309 - RNA, 21 nt, Artificial Sequence
  Guide RNA
cuuuuacauacugcugucugu

SEQ ID NO: 310 - RNA, 21 nt, Artificial Sequence
  Guide RNA
gaaaaacaagauacagccaca

SEQ ID NO: 311 - RNA, 21 nt, Artificial Sequence
  Guide RNA
gauacagccacacagacagca

SEQ ID NO: 312 - RNA, 21 nt, Artificial Sequence
  Guide RNA
gccacacagacagcaguaugu

SEQ ID NO: 313 - RNA, 21 nt, Artificial Sequence
  Guide RNA
gcugucuguguggcuguaucu

SEQ ID NO: 314 - RNA, 21 nt, Artificial Sequence
  Guide RNA
ggaaaaacaagauacagccac

SEQ ID NO: 315 - RNA, 21 nt, Artificial Sequence
  Guide RNA
gucuguguggcuguaucuugu

SEQ ID NO: 316 - RNA, 21 nt, Artificial Sequence
  Guide RNA
guggaaaaacaagauacagcc

SEQ ID NO: 317 - RNA, 21 nt, Artificial Sequence
  Guide RNA
uacagccacacagacagcagu

SEQ ID NO: 318 - RNA, 21 nt, Artificial Sequence
  Guide RNA
uacauacugcugucugugugg

SEQ ID NO: 319 - RNA, 21 nt, Artificial Sequence
  Guide RNA
uacugcugucuguguggcugu

SEQ ID NO: 320 - RNA, 21 nt, Artificial Sequence
  Guide RNA
ucccuuuuacauacugcuguc

SEQ ID NO: 321 - RNA, 21 nt, Artificial Sequence
  Guide RNA
ucuguguggcuguaucuuguu

SEQ ID NO: 322 - RNA, 21 nt, Artificial Sequence
  Guide RNA
ugcugucuguguggcuguauc

SEQ ID NO: 323 - RNA, 21 nt, Artificial Sequence
  Guide RNA
uggaaaaacaagauacagcca

SEQ ID NO: 324 - RNA, 21 nt, Artificial Sequence
  Guide RNA
ugucuguguggcuguaucuug

SEQ ID NO: 325 - RNA, 21 nt, Artificial Sequence
  Guide RNA
uguguggcuguaucuuguuuu

SEQ ID NO: 326 - RNA, 21 nt, Artificial Sequence
  Guide RNA
uuacauacugcugucugugug

SEQ ID NO: 327 - RNA, 21 nt, Artificial Sequence
  Guide RNA
uucccuuuuacauacugcugu

SEQ ID NO: 328 - RNA, 21 nt, Artificial Sequence
  Guide RNA
uuuacauacugcugucugugu

SEQ ID NO: 329 - RNA, 21 nt, Artificial Sequence
  Guide RNA
uuuuacauacugcugucugug

SEQ ID NO: 330 - RNA, 22 nt, Artificial Sequence
  Guide RNA
aaaaacaagauacagccacaca

SEQ ID NO: 331 - RNA, 22 nt, Artificial Sequence
  Guide RNA
aaaacaagauacagccacacag

SEQ ID NO: 332 - RNA, 22 nt, Artificial Sequence
  Guide RNA
aaacaagauacagccacacaga

SEQ ID NO: 333 - RNA, 22 nt, Artificial Sequence
  Guide RNA
aacaagauacagccacacagac

SEQ ID NO: 334 - RNA, 22 nt, Artificial Sequence
  Guide RNA
aagauacagccacacagacagc

SEQ ID NO: 335 - RNA, 22 nt, Artificial Sequence
  Guide RNA
acaagauacagccacacagaca

SEQ ID NO: 336 - RNA, 22 nt, Artificial Sequence
  Guide RNA
acacagacagcaguauguaaaa

SEQ ID NO: 337 - RNA, 22 nt, Artificial Sequence
  Guide RNA
acagacagcaguauguaaaagg

SEQ ID NO: 338 - RNA, 22 nt, Artificial Sequence
  Guide RNA
acagccacacagacagcaguau

SEQ ID NO: 339 - RNA, 22 nt, Artificial Sequence
  Guide RNA
acauacugcugucuguguggcu

SEQ ID NO: 340 - RNA, 22 nt, Artificial Sequence
  Guide RNA
acugcugucuguguggcuguau

SEQ ID NO: 341 - RNA, 22 nt, Artificial Sequence
  Guide RNA
agauacagccacacagacagca

SEQ ID NO: 342 - RNA, 22 nt, Artificial Sequence
  Guide RNA
agccacacagacagcaguaugu

SEQ ID NO: 343 - RNA, 22 nt, Artificial Sequence
  Guide RNA
aguggaaaaacaagauacagcc

SEQ ID NO: 344 - RNA, 22 nt, Artificial Sequence
  Guide RNA
auacagccacacagacagcagu

SEQ ID NO: 345 - RNA, 22 nt, Artificial Sequence
  Guide RNA
auacugcugucuguguggcugu

SEQ ID NO: 346 - RNA, 22 nt, Artificial Sequence
  Guide RNA
caagauacagccacacagacag

SEQ ID NO: 347 - RNA, 22 nt, Artificial Sequence
  Guide RNA
cacacagacagcaguauguaaa

SEQ ID NO: 348 - RNA, 22 nt, Artificial Sequence
  Guide RNA
cacagacagcaguauguaaaag

SEQ ID NO: 349 - RNA, 22 nt, Artificial Sequence
  Guide RNA
cagccacacagacagcaguaug

SEQ ID NO: 350 - RNA, 22 nt, Artificial Sequence
  Guide RNA
cauacugcugucuguguggcug

SEQ ID NO: 351 - RNA, 22 nt, Artificial Sequence
  Guide RNA
ccacacagacagcaguauguaa

SEQ ID NO: 352 - RNA, 22 nt, Artificial Sequence
  Guide RNA
cccuuuuacauacugcugucug

SEQ ID NO: 353 - RNA, 22 nt, Artificial Sequence
  Guide RNA
ccuuuuacauacugcugucugu

SEQ ID NO: 354 - RNA, 22 nt, Artificial Sequence
  Guide RNA
cugcugucuguguggcuguauc

SEQ ID NO: 355 - RNA, 22 nt, Artificial Sequence
  Guide RNA
cugucuguguggcuguaucuug

SEQ ID NO: 356 - RNA, 22 nt, Artificial Sequence
  Guide RNA
cuguguggcuguaucuuguuuu

SEQ ID NO: 357 - RNA, 22 nt, Artificial Sequence
  Guide RNA
cuucccuuuuacauacugcugu

SEQ ID NO: 358 - RNA, 22 nt, Artificial Sequence
  Guide RNA
cuuuuacauacugcugucugug

SEQ ID NO: 359 - RNA, 22 nt, Artificial Sequence
  Guide RNA
gaaaaacaagauacagccacac

SEQ ID NO: 360 - RNA, 22 nt, Artificial Sequence
  Guide RNA
gauacagccacacagacagcag

SEQ ID NO: 361 - RNA, 22 nt, Artificial Sequence
  Guide RNA
gccacacagacagcaguaugua

SEQ ID NO: 362 - RNA, 22 nt, Artificial Sequence
  Guide RNA
gcugucuguguggcuguaucuu

SEQ ID NO: 363 - RNA, 22 nt, Artificial Sequence
  Guide RNA
ggaaaaacaagauacagccaca

SEQ ID NO: 364 - RNA, 22 nt, Artificial Sequence
  Guide RNA
gucuguguggcuguaucuuguu

SEQ ID NO: 365 - RNA, 22 nt, Artificial Sequence
  Guide RNA
guggaaaaacaagauacagcca

SEQ ID NO: 366 - RNA, 22 nt, Artificial Sequence
  Guide RNA
uacagccacacagacagcagua

SEQ ID NO: 367 - RNA, 22 nt, Artificial Sequence
  Guide RNA
uacauacugcugucuguguggc

SEQ ID NO: 368 - RNA, 22 nt, Artificial Sequence
  Guide RNA
uacugcugucuguguggcugua

SEQ ID NO: 369 - RNA, 22 nt, Artificial Sequence
  Guide RNA
ucccuuuuacauacugcugucu

SEQ ID NO: 370 - RNA, 22 nt, Artificial Sequence
  Guide RNA
ucuguguggcuguaucuuguuu

SEQ ID NO: 371 - RNA, 22 nt, Artificial Sequence
  Guide RNA
ucuucccuuuuacauacugcug

SEQ ID NO: 372 - RNA, 22 nt, Artificial Sequence
  Guide RNA
ugcugucuguguggcuguaucu

SEQ ID NO: 373 - RNA, 22 nt, Artificial Sequence
  Guide RNA
uggaaaaacaagauacagccac

SEQ ID NO: 374 - RNA, 22 nt, Artificial Sequence
  Guide RNA
ugucuguguggcuguaucuugu

SEQ ID NO: 375 - RNA, 22 nt, Artificial Sequence
  Guide RNA
uguguggcuguaucuuguuuuu

SEQ ID NO: 376 - RNA, 22 nt, Artificial Sequence
  Guide RNA
uuacauacugcugucugugugg

SEQ ID NO: 377 - RNA, 22 nt, Artificial Sequence
  Guide RNA
uucccuuuuacauacugcuguc

SEQ ID NO: 378 - RNA, 22 nt, Artificial Sequence
  Guide RNA
uuuacauacugcugucugugug

SEQ ID NO: 379 - RNA, 22 nt, Artificial Sequence
  Guide RNA
uuuuacauacugcugucugugu

SEQ ID NO: 380 - RNA, 20 nt, Artificial Sequence
  Guide RNA
aagagacuaaauaccacccu

SEQ ID NO: 381 - RNA, 20 nt, Artificial Sequence
  Guide RNA
aauuuuguggcuaagagacu

SEQ ID NO: 382 - RNA, 20 nt, Artificial Sequence
  Guide RNA
agagacuaaauaccacccua

SEQ ID NO: 383 - RNA, 20 nt, Artificial Sequence
  Guide RNA
agggugguauuuagucucuu

SEQ ID NO: 384 - RNA, 20 nt, Artificial Sequence
  Guide RNA
agucucuuagccacaaaauu

SEQ ID NO: 385 - RNA, 20 nt, Artificial Sequence
  Guide RNA
auuagggugguauuuagucu

SEQ ID NO: 386 - RNA, 20 nt, Artificial Sequence
  Guide RNA
auuuagucucuuagccacaa

SEQ ID NO: 387 - RNA, 20 nt, Artificial Sequence
  Guide RNA
auuuuguggcuaagagacua

SEQ ID NO: 388 - RNA, 20 nt, Artificial Sequence
  Guide RNA
caauuuuguggcuaagagac

SEQ ID NO: 389 - RNA, 20 nt, Artificial Sequence
  Guide RNA
ccaauuuuguggcuaagaga

SEQ ID NO: 390 - RNA, 20 nt, Artificial Sequence
  Guide RNA
cccaauuuuguggcuaagag

SEQ ID NO: 391 - RNA, 20 nt, Artificial Sequence
  Guide RNA
ccuuucccaauuuuguggcu

SEQ ID NO: 392 - RNA, 20 nt, Artificial Sequence
  Guide RNA
cuaagagacuaaauaccacc

SEQ ID NO: 393 - RNA, 20 nt, Artificial Sequence
  Guide RNA
cucuuagccacaaaauuggg

SEQ ID NO: 394 - RNA, 20 nt, Artificial Sequence
  Guide RNA
cuuucccaauuuuguggcua

SEQ ID NO: 395 - RNA, 20 nt, Artificial Sequence
  Guide RNA
gcuaagagacuaaauaccac

SEQ ID NO: 396 - RNA, 20 nt, Artificial Sequence
  Guide RNA
ggcuaagagacuaaauacca

SEQ ID NO: 397 - RNA, 20 nt, Artificial Sequence
  Guide RNA
gggugguauuuagucucuua

SEQ ID NO: 398 - RNA, 20 nt, Artificial Sequence
  Guide RNA
gguauuuagucucuuagcca

SEQ ID NO: 399 - RNA, 20 nt, Artificial Sequence
  Guide RNA
ggugguauuuagucucuuag

SEQ ID NO: 400 - RNA, 20 nt, Artificial Sequence
  Guide RNA
guauuuagucucuuagccac

SEQ ID NO: 401 - RNA, 20 nt, Artificial Sequence
  Guide RNA
gucucuuagccacaaaauug

SEQ ID NO: 402 - RNA, 20 nt, Artificial Sequence
  Guide RNA
guggcuaagagacuaaauac

SEQ ID NO: 403 - RNA, 20 nt, Artificial Sequence
  Guide RNA
gugguauuuagucucuuagc

SEQ ID NO: 404 - RNA, 20 nt, Artificial Sequence
  Guide RNA
guuauuagggugguauuuag

SEQ ID NO: 405 - RNA, 20 nt, Artificial Sequence
  Guide RNA
uaagagacuaaauaccaccc

SEQ ID NO: 406 - RNA, 20 nt, Artificial Sequence
  Guide RNA
uagggugguauuuagucucu

SEQ ID NO: 407 - RNA, 20 nt, Artificial Sequence
  Guide RNA
uagucucuuagccacaaaau

SEQ ID NO: 408 - RNA, 20 nt, Artificial Sequence
  Guide RNA
uauuagggugguauuuaguc

SEQ ID NO: 409 - RNA, 20 nt, Artificial Sequence
  Guide RNA
uauuuagucucuuagccaca

SEQ ID NO: 410 - RNA, 20 nt, Artificial Sequence
  Guide RNA
ucccaauuuuguggcuaaga

SEQ ID NO: 411 - RNA, 20 nt, Artificial Sequence
  Guide RNA
uccuuucccaauuuuguggc

SEQ ID NO: 412 - RNA, 20 nt, Artificial Sequence
  Guide RNA
ucucuuagccacaaaauugg

SEQ ID NO: 413 - RNA, 20 nt, Artificial Sequence
  Guide RNA
ucuuagccacaaaauuggga

SEQ ID NO: 414 - RNA, 20 nt, Artificial Sequence
  Guide RNA
uggcuaagagacuaaauacc

SEQ ID NO: 415 - RNA, 20 nt, Artificial Sequence
  Guide RNA
ugguauuuagucucuuagcc

SEQ ID NO: 416 - RNA, 20 nt, Artificial Sequence
  Guide RNA
uguggcuaagagacuaaaua

SEQ ID NO: 417 - RNA, 20 nt, Artificial Sequence
  Guide RNA
uuagggugguauuuagucuc

SEQ ID NO: 418 - RNA, 20 nt, Artificial Sequence
  Guide RNA
uuagucucuuagccacaaaa

SEQ ID NO: 419 - RNA, 20 nt, Artificial Sequence
  Guide RNA
uuauuagggugguauuuagu

SEQ ID NO: 420 - RNA, 20 nt, Artificial Sequence
  Guide RNA
uucccaauuuuguggcuaag

SEQ ID NO: 421 - RNA, 20 nt, Artificial Sequence
  Guide RNA
uuguggcuaagagacuaaau

SEQ ID NO: 422 - RNA, 20 nt, Artificial Sequence
  Guide RNA
uuuagucucuuagccacaaa

SEQ ID NO: 423 - RNA, 20 nt, Artificial Sequence
  Guide RNA
uuucccaauuuuguggcuaa

SEQ ID NO: 424 - RNA, 20 nt, Artificial Sequence
  Guide RNA
uuuguggcuaagagacuaaa

SEQ ID NO: 425 - RNA, 20 nt, Artificial Sequence
  Guide RNA
uuuuguggcuaagagacuaa

SEQ ID NO: 426 - RNA, 21 nt, Artificial Sequence
  Guide RNA
aagagacuaaauaccacccua

SEQ ID NO: 427 - RNA, 21 nt, Artificial Sequence
  Guide RNA
aauuuuguggcuaagagacua

SEQ ID NO: 428 - RNA, 21 nt, Artificial Sequence
  Guide RNA
agagacuaaauaccacccuaa

SEQ ID NO: 429 - RNA, 21 nt, Artificial Sequence
  Guide RNA
agggugguauuuagucucuua

SEQ ID NO: 430 - RNA, 21 nt, Artificial Sequence
  Guide RNA
agucucuuagccacaaaauug

SEQ ID NO: 431 - RNA, 21 nt, Artificial Sequence
  Guide RNA
auuagggugguauuuagucuc

SEQ ID NO: 432 - RNA, 21 nt, Artificial Sequence
  Guide RNA
auuuagucucuuagccacaaa

SEQ ID NO: 433 - RNA, 21 nt, Artificial Sequence
  Guide RNA
auuuuguggcuaagagacuaa

SEQ ID NO: 434 - RNA, 21 nt, Artificial Sequence
  Guide RNA
caauuuuguggcuaagagacu

SEQ ID NO: 435 - RNA, 21 nt, Artificial Sequence
  Guide RNA
ccaauuuuguggcuaagagac

SEQ ID NO: 436 - RNA, 21 nt, Artificial Sequence
  Guide RNA
cccaauuuuguggcuaagaga

SEQ ID NO: 437 - RNA, 21 nt, Artificial Sequence
  Guide RNA
ccuuucccaauuuuguggcua

SEQ ID NO: 438 - RNA, 21 nt, Artificial Sequence
  Guide RNA
cuaagagacuaaauaccaccc

SEQ ID NO: 439 - RNA, 21 nt, Artificial Sequence
  Guide RNA
cuccuuucccaauuuuguggc

SEQ ID NO: 440 - RNA, 21 nt, Artificial Sequence
  Guide RNA
cucuuagccacaaaauuggga

SEQ ID NO: 441 - RNA, 21 nt, Artificial Sequence
  Guide RNA
cuuucccaauuuuguggcuaa

SEQ ID NO: 442 - RNA, 21 nt, Artificial Sequence
  Guide RNA
gcuaagagacuaaauaccacc

SEQ ID NO: 443 - RNA, 21 nt, Artificial Sequence
  Guide RNA
ggcuaagagacuaaauaccac

SEQ ID NO: 444 - RNA, 21 nt, Artificial Sequence
  Guide RNA
gggugguauuuagucucuuag

SEQ ID NO: 445 - RNA, 21 nt, Artificial Sequence
  Guide RNA
gguauuuagucucuuagccac

SEQ ID NO: 446 - RNA, 21 nt, Artificial Sequence
  Guide RNA
ggugguauuuagucucuuagc

SEQ ID NO: 447 - RNA, 21 nt, Artificial Sequence
  Guide RNA
guauuuagucucuuagccaca

SEQ ID NO: 448 - RNA, 21 nt, Artificial Sequence
  Guide RNA
gucucuuagccacaaaauugg

SEQ ID NO: 449 - RNA, 21 nt, Artificial Sequence
  Guide RNA
guggcuaagagacuaaauacc

SEQ ID NO: 450 - RNA, 21 nt, Artificial Sequence
  Guide RNA
gugguauuuagucucuuagcc

SEQ ID NO: 451 - RNA, 21 nt, Artificial Sequence
  Guide RNA
guuauuagggugguauuuagu

SEQ ID NO: 452 - RNA, 21 nt, Artificial Sequence
  Guide RNA
uaagagacuaaauaccacccu

SEQ ID NO: 453 - RNA, 21 nt, Artificial Sequence
  Guide RNA
uagggugguauuuagucucuu

SEQ ID NO: 454 - RNA, 21 nt, Artificial Sequence
  Guide RNA
uagucucuuagccacaaaauu

SEQ ID NO: 455 - RNA, 21 nt, Artificial Sequence
  Guide RNA
uauuagggugguauuuagucu

SEQ ID NO: 456 - RNA, 21 nt, Artificial Sequence
  Guide RNA
uauuuagucucuuagccacaa

SEQ ID NO: 457 - RNA, 21 nt, Artificial Sequence
  Guide RNA
ucccaauuuuguggcuaagag

SEQ ID NO: 458 - RNA, 21 nt, Artificial Sequence
  Guide RNA
uccuuucccaauuuuguggcu

SEQ ID NO: 459 - RNA, 21 nt, Artificial Sequence
  Guide RNA
ucucuuagccacaaaauuggg

SEQ ID NO: 460 - RNA, 21 nt, Artificial Sequence
  Guide RNA
ucuuagccacaaaauugggaa

SEQ ID NO: 461 - RNA, 21 nt, Artificial Sequence
  Guide RNA
uggcuaagagacuaaauacca

SEQ ID NO: 462 - RNA, 21 nt, Artificial Sequence
  Guide RNA
ugguauuuagucucuuagcca

SEQ ID NO: 463 - RNA, 21 nt, Artificial Sequence
  Guide RNA
uguggcuaagagacuaaauac

SEQ ID NO: 464 - RNA, 21 nt, Artificial Sequence
  Guide RNA
uguuauuagggugguauuuag

SEQ ID NO: 465 - RNA, 21 nt, Artificial Sequence
  Guide RNA
uuagggugguauuuagucucu

SEQ ID NO: 466 - RNA, 21 nt, Artificial Sequence
  Guide RNA
uuagucucuuagccacaaaau

SEQ ID NO: 467 - RNA, 21 nt, Artificial Sequence
  Guide RNA
uuauuagggugguauuuaguc

SEQ ID NO: 468 - RNA, 21 nt, Artificial Sequence
  Guide RNA
uucccaauuuuguggcuaaga

SEQ ID NO: 469 - RNA, 21 nt, Artificial Sequence
  Guide RNA
uuguggcuaagagacuaaaua

SEQ ID NO: 470 - RNA, 21 nt, Artificial Sequence
  Guide RNA
uuuagucucuuagccacaaaa

SEQ ID NO: 471 - RNA, 21 nt, Artificial Sequence
  Guide RNA
uuucccaauuuuguggcuaag

SEQ ID NO: 472 - RNA, 21 nt, Artificial Sequence
  Guide RNA
uuuguggcuaagagacuaaau

SEQ ID NO: 473 - RNA, 21 nt, Artificial Sequence
  Guide RNA
uuuuguggcuaagagacuaaa

SEQ ID NO: 474 - RNA, 22 nt, Artificial Sequence
  Guide RNA
aagagacuaaauaccacccuaa

SEQ ID NO: 475 - RNA, 22 nt, Artificial Sequence
  Guide RNA
aauuuuguggcuaagagacuaa

SEQ ID NO: 476 - RNA, 22 nt, Artificial Sequence
  Guide RNA
acuccuuucccaauuuuguggc

SEQ ID NO: 477 - RNA, 22 nt, Artificial Sequence
  Guide RNA
agagacuaaauaccacccuaau

SEQ ID NO: 478 - RNA, 22 nt, Artificial Sequence
  Guide RNA
agggugguauuuagucucuuag

SEQ ID NO: 479 - RNA, 22 nt, Artificial Sequence
  Guide RNA
agucucuuagccacaaaauugg

SEQ ID NO: 480 - RNA, 22 nt, Artificial Sequence
  Guide RNA
auuagggugguauuuagucucu

SEQ ID NO: 481 - RNA, 22 nt, Artificial Sequence
  Guide RNA
auuuagucucuuagccacaaaa

SEQ ID NO: 482 - RNA, 22 nt, Artificial Sequence
  Guide RNA
auuuuguggcuaagagacuaaa

SEQ ID NO: 483 - RNA, 22 nt, Artificial Sequence
  Guide RNA
caauuuuguggcuaagagacua

SEQ ID NO: 484 - RNA, 22 nt, Artificial Sequence
  Guide RNA
ccaauuuuguggcuaagagacu

SEQ ID NO: 485 - RNA, 22 nt, Artificial Sequence
  Guide RNA
cccaauuuuguggcuaagagac

SEQ ID NO: 486 - RNA, 22 nt, Artificial Sequence
  Guide RNA
ccuuucccaauuuuguggcuaa

SEQ ID NO: 487 - RNA, 22 nt, Artificial Sequence
  Guide RNA
cuaagagacuaaauaccacccu

SEQ ID NO: 488 - RNA, 22 nt, Artificial Sequence
  Guide RNA
cuccuuucccaauuuuguggcu

SEQ ID NO: 489 - RNA, 22 nt, Artificial Sequence
  Guide RNA
cucuuagccacaaaauugggaa

SEQ ID NO: 490 - RNA, 22 nt, Artificial Sequence
  Guide RNA
cuuucccaauuuuguggcuaag

SEQ ID NO: 491 - RNA, 22 nt, Artificial Sequence
  Guide RNA
gcuaagagacuaaauaccaccc

SEQ ID NO: 492 - RNA, 22 nt, Artificial Sequence
  Guide RNA
ggcuaagagacuaaauaccacc

SEQ ID NO: 493 - RNA, 22 nt, Artificial Sequence
  Guide RNA
gggugguauuuagucucuuagc

SEQ ID NO: 494 - RNA, 22 nt, Artificial Sequence
  Guide RNA
gguauuuagucucuuagccaca

SEQ ID NO: 495 - RNA, 22 nt, Artificial Sequence
  Guide RNA
ggugguauuuagucucuuagcc

SEQ ID NO: 496 - RNA, 22 nt, Artificial Sequence
  Guide RNA
guauuuagucucuuagccacaa

SEQ ID NO: 497 - RNA, 22 nt, Artificial Sequence
  Guide RNA
gucucuuagccacaaaauuggg

SEQ ID NO: 498 - RNA, 22 nt, Artificial Sequence
  Guide RNA
guggcuaagagacuaaauacca

SEQ ID NO: 499 - RNA, 22 nt, Artificial Sequence
  Guide RNA
gugguauuuagucucuuagcca

SEQ ID NO: 500 - RNA, 22 nt, Artificial Sequence
  Guide RNA
guuauuagggugguauuuaguc

SEQ ID NO: 501 - RNA, 22 nt, Artificial Sequence
  Guide RNA
uaagagacuaaauaccacccua

SEQ ID NO: 502 - RNA, 22 nt, Artificial Sequence
  Guide RNA
uagggugguauuuagucucuua

SEQ ID NO: 503 - RNA, 22 nt, Artificial Sequence
  Guide RNA
uagucucuuagccacaaaauug

SEQ ID NO: 504 - RNA, 22 nt, Artificial Sequence
  Guide RNA
uauuagggugguauuuagucuc

SEQ ID NO: 505 - RNA, 22 nt, Artificial Sequence
  Guide RNA
uauuuagucucuuagccacaaa

SEQ ID NO: 506 - RNA, 22 nt, Artificial Sequence
  Guide RNA
ucccaauuuuguggcuaagaga

SEQ ID NO: 507 - RNA, 22 nt, Artificial Sequence
  Guide RNA
uccuuucccaauuuuguggcua

SEQ ID NO: 508 - RNA, 22 nt, Artificial Sequence
  Guide RNA
ucucuuagccacaaaauuggga

SEQ ID NO: 509 - RNA, 22 nt, Artificial Sequence
  Guide RNA
ucuuagccacaaaauugggaaa

SEQ ID NO: 510 - RNA, 22 nt, Artificial Sequence
  Guide RNA
uggcuaagagacuaaauaccac

SEQ ID NO: 511 - RNA, 22 nt, Artificial Sequence
  Guide RNA
ugguauuuagucucuuagccac

SEQ ID NO: 512 - RNA, 22 nt, Artificial Sequence
  Guide RNA
uguggcuaagagacuaaauacc

SEQ ID NO: 513 - RNA, 22 nt, Artificial Sequence
  Guide RNA
uguuauuagggugguauuuagu

SEQ ID NO: 514 - RNA, 22 nt, Artificial Sequence
  Guide RNA
uuagggugguauuuagucucuu

SEQ ID NO: 515 - RNA, 22 nt, Artificial Sequence
  Guide RNA
uuagucucuuagccacaaaauu

SEQ ID NO: 516 - RNA, 22 nt, Artificial Sequence
  Guide RNA
uuauuagggugguauuuagucu

SEQ ID NO: 517 - RNA, 22 nt, Artificial Sequence
  Guide RNA
uucccaauuuuguggcuaagag

SEQ ID NO: 518 - RNA, 22 nt, Artificial Sequence
  Guide RNA
uuguggcuaagagacuaaauac

SEQ ID NO: 519 - RNA, 22 nt, Artificial Sequence
  Guide RNA
uuguuauuagggugguauuuag

SEQ ID NO: 520 - RNA, 22 nt, Artificial Sequence
  Guide RNA
uuuagucucuuagccacaaaau

SEQ ID NO: 521 - RNA, 22 nt, Artificial Sequence
  Guide RNA
uuucccaauuuuguggcuaaga

SEQ ID NO: 522 - RNA, 22 nt, Artificial Sequence
  Guide RNA
uuuguggcuaagagacuaaaua

SEQ ID NO: 523 - RNA, 22 nt, Artificial Sequence
  Guide RNA
uuuuguggcuaagagacuaaau

SEQ ID NO: 524 - RNA, 20 nt, Artificial Sequence
  Guide RNA
aaauagcacccuaauaacaa

SEQ ID NO: 525 - RNA, 20 nt, Artificial Sequence
  Guide RNA
aauagacuaaauagcacccu

SEQ ID NO: 526 - RNA, 20 nt, Artificial Sequence
  Guide RNA
aauagcacccuaauaacaaa

SEQ ID NO: 527 - RNA, 20 nt, Artificial Sequence
  Guide RNA
acuaaauagcacccuaauaa

SEQ ID NO: 528 - RNA, 20 nt, Artificial Sequence
  Guide RNA
agacuaaauagcacccuaau

SEQ ID NO: 529 - RNA, 20 nt, Artificial Sequence
  Guide RNA
agcacccuaauaacaaaaag

SEQ ID NO: 530 - RNA, 20 nt, Artificial Sequence
  Guide RNA
agggugcuauuuagucuauu

SEQ ID NO: 531 - RNA, 20 nt, Artificial Sequence
  Guide RNA
auagacuaaauagcacccua

SEQ ID NO: 532 - RNA, 20 nt, Artificial Sequence
  Guide RNA
auagcacccuaauaacaaaa

SEQ ID NO: 533 - RNA, 20 nt, Artificial Sequence
  Guide RNA
auuagggugcuauuuagucu

SEQ ID NO: 534 - RNA, 20 nt, Artificial Sequence
  Guide RNA
ccuuuuuguuauuagggugc

SEQ ID NO: 535 - RNA, 20 nt, Artificial Sequence
  Guide RNA
cuaaauagcacccuaauaac

SEQ ID NO: 536 - RNA, 20 nt, Artificial Sequence
  Guide RNA
cuaauagacuaaauagcacc

SEQ ID NO: 537 - RNA, 20 nt, Artificial Sequence
  Guide RNA
cuuuuuguuauuagggugcu

SEQ ID NO: 538 - RNA, 20 nt, Artificial Sequence
  Guide RNA
gacuaaauagcacccuaaua

SEQ ID NO: 539 - RNA, 20 nt, Artificial Sequence
  Guide RNA
gcuaauagacuaaauagcac

SEQ ID NO: 540 - RNA, 20 nt, Artificial Sequence
  Guide RNA
gcuauuuagucuauuagcca

SEQ ID NO: 541 - RNA, 20 nt, Artificial Sequence
  Guide RNA
ggcuaauagacuaaauagca

SEQ ID NO: 542 - RNA, 20 nt, Artificial Sequence
  Guide RNA
gggugcuauuuagucuauua

SEQ ID NO: 543 - RNA, 20 nt, Artificial Sequence
  Guide RNA
ggugcuauuuagucuauuag

SEQ ID NO: 544 - RNA, 20 nt, Artificial Sequence
  Guide RNA
guccuuuuuguuauuagggu

SEQ ID NO: 545 - RNA, 20 nt, Artificial Sequence
  Guide RNA
gugcuauuuagucuauuagc

SEQ ID NO: 546 - RNA, 20 nt, Artificial Sequence
  Guide RNA
guggcuaauagacuaaauag

SEQ ID NO: 547 - RNA, 20 nt, Artificial Sequence
  Guide RNA
guuauuagggugcuauuuag

SEQ ID NO: 548 - RNA, 20 nt, Artificial Sequence
  Guide RNA
uaaauagcacccuaauaaca

SEQ ID NO: 549 - RNA, 20 nt, Artificial Sequence
  Guide RNA
uaauagacuaaauagcaccc

SEQ ID NO: 550 - RNA, 20 nt, Artificial Sequence
  Guide RNA
uagacuaaauagcacccuaa

SEQ ID NO: 551 - RNA, 20 nt, Artificial Sequence
  Guide RNA
uagcacccuaauaacaaaaa

SEQ ID NO: 552 - RNA, 20 nt, Artificial Sequence
  Guide RNA
uagggugcuauuuagucuau

SEQ ID NO: 553 - RNA, 20 nt, Artificial Sequence
  Guide RNA
uauuagggugcuauuuaguc

SEQ ID NO: 554 - RNA, 20 nt, Artificial Sequence
  Guide RNA
uccuuuuuguuauuagggug

SEQ ID NO: 555 - RNA, 20 nt, Artificial Sequence
  Guide RNA
ugcuauuuagucuauuagcc

SEQ ID NO: 556 - RNA, 20 nt, Artificial Sequence
  Guide RNA
uggcuaauagacuaaauagc

SEQ ID NO: 557 - RNA, 20 nt, Artificial Sequence
  Guide RNA
uguccuuuuuguuauuaggg

SEQ ID NO: 558 - RNA, 20 nt, Artificial Sequence
  Guide RNA
uguggcuaauagacuaaaua

SEQ ID NO: 559 - RNA, 20 nt, Artificial Sequence
  Guide RNA
uguuauuagggugcuauuua

SEQ ID NO: 560 - RNA, 20 nt, Artificial Sequence
  Guide RNA
uuagggugcuauuuagucua

SEQ ID NO: 561 - RNA, 20 nt, Artificial Sequence
  Guide RNA
uuauuagggugcuauuuagu

SEQ ID NO: 562 - RNA, 20 nt, Artificial Sequence
  Guide RNA
uuguccuuuuuguuauuagg

SEQ ID NO: 563 - RNA, 20 nt, Artificial Sequence
  Guide RNA
uuguggcuaauagacuaaau

SEQ ID NO: 564 - RNA, 20 nt, Artificial Sequence
  Guide RNA
uuguuauuagggugcuauuu

SEQ ID NO: 565 - RNA, 20 nt, Artificial Sequence
  Guide RNA
uuuguggcuaauagacuaaa

SEQ ID NO: 566 - RNA, 20 nt, Artificial Sequence
  Guide RNA
uuuguuauuagggugcuauu

SEQ ID NO: 567 - RNA, 20 nt, Artificial Sequence
  Guide RNA
uuuuguggcuaauagacuaa

SEQ ID NO: 568 - RNA, 20 nt, Artificial Sequence
  Guide RNA
uuuuguuauuagggugcuau

SEQ ID NO: 569 - RNA, 20 nt, Artificial Sequence
  Guide RNA
uuuuuguuauuagggugcua

SEQ ID NO: 570 - RNA, 21 nt, Artificial Sequence
  Guide RNA
aauagacuaaauagcacccua

SEQ ID NO: 571 - RNA, 21 nt, Artificial Sequence
  Guide RNA
acuaaauagcacccuaauaac

SEQ ID NO: 572 - RNA, 21 nt, Artificial Sequence
  Guide RNA
agacuaaauagcacccuaaua

SEQ ID NO: 573 - RNA, 21 nt, Artificial Sequence
  Guide RNA
agcacccuaauaacaaaaagg

SEQ ID NO: 574 - RNA, 21 nt, Artificial Sequence
  Guide RNA
agggugcuauuuagucuauua

SEQ ID NO: 575 - RNA, 21 nt, Artificial Sequence
  Guide RNA
auagacuaaauagcacccuaa

SEQ ID NO: 576 - RNA, 21 nt, Artificial Sequence
  Guide RNA
auuagggugcuauuuagucua

SEQ ID NO: 577 - RNA, 21 nt, Artificial Sequence
  Guide RNA
ccuuuuuguuauuagggugcu

SEQ ID NO: 578 - RNA, 21 nt, Artificial Sequence
  Guide RNA
cuaaauagcacccuaauaaca

SEQ ID NO: 579 - RNA, 21 nt, Artificial Sequence
  Guide RNA
cuaauagacuaaauagcaccc

SEQ ID NO: 580 - RNA, 21 nt, Artificial Sequence
  Guide RNA
cuuuuuguuauuagggugcua

SEQ ID NO: 581 - RNA, 21 nt, Artificial Sequence
  Guide RNA
gacuaaauagcacccuaauaa

SEQ ID NO: 582 - RNA, 21 nt, Artificial Sequence
  Guide RNA
gcuaauagacuaaauagcacc

SEQ ID NO: 583 - RNA, 21 nt, Artificial Sequence
  Guide RNA
gcuauuuagucuauuagccac

SEQ ID NO: 584 - RNA, 21 nt, Artificial Sequence
  Guide RNA
ggcuaauagacuaaauagcac

SEQ ID NO: 585 - RNA, 21 nt, Artificial Sequence
  Guide RNA
gggugcuauuuagucuauuag

SEQ ID NO: 586 - RNA, 21 nt, Artificial Sequence
  Guide RNA
ggugcuauuuagucuauuagc

SEQ ID NO: 587 - RNA, 21 nt, Artificial Sequence
  Guide RNA
guccuuuuuguuauuagggug

SEQ ID NO: 588 - RNA, 21 nt, Artificial Sequence
  Guide RNA
gugcuauuuagucuauuagcc

SEQ ID NO: 589 - RNA, 21 nt, Artificial Sequence
  Guide RNA
guggcuaauagacuaaauagc

SEQ ID NO: 590 - RNA, 21 nt, Artificial Sequence
  Guide RNA
guuauuagggugcuauuuagu

SEQ ID NO: 591 - RNA, 21 nt, Artificial Sequence
  Guide RNA
uaauagacuaaauagcacccu

SEQ ID NO: 592 - RNA, 21 nt, Artificial Sequence
  Guide RNA
uagacuaaauagcacccuaau

SEQ ID NO: 593 - RNA, 21 nt, Artificial Sequence
  Guide RNA
uagcacccuaauaacaaaaag

SEQ ID NO: 594 - RNA, 21 nt, Artificial Sequence
  Guide RNA
uagggugcuauuuagucuauu

SEQ ID NO: 595 - RNA, 21 nt, Artificial Sequence
  Guide RNA
uauuagggugcuauuuagucu

SEQ ID NO: 596 - RNA, 21 nt, Artificial Sequence
  Guide RNA
uccuuuuuguuauuagggugc

SEQ ID NO: 597 - RNA, 21 nt, Artificial Sequence
  Guide RNA
ugcuauuuagucuauuagcca

SEQ ID NO: 598 - RNA, 21 nt, Artificial Sequence
  Guide RNA
uggcuaauagacuaaauagca

SEQ ID NO: 599 - RNA, 21 nt, Artificial Sequence
  Guide RNA
uguccuuuuuguuauuagggu

SEQ ID NO: 600 - RNA, 21 nt, Artificial Sequence
  Guide RNA
uguggcuaauagacuaaauag

SEQ ID NO: 601 - RNA, 21 nt, Artificial Sequence
  Guide RNA
uguuauuagggugcuauuuag

SEQ ID NO: 602 - RNA, 21 nt, Artificial Sequence
  Guide RNA
uuagggugcuauuuagucuau

SEQ ID NO: 603 - RNA, 21 nt, Artificial Sequence
  Guide RNA
uuauuagggugcuauuuaguc

SEQ ID NO: 604 - RNA, 21 nt, Artificial Sequence
  Guide RNA
uuguccuuuuuguuauuaggg

SEQ ID NO: 605 - RNA, 22 nt, Artificial Sequence
  Guide RNA
aauagacuaaauagcacccuaa

SEQ ID NO: 606 - RNA, 22 nt, Artificial Sequence
  Guide RNA
acuaaauagcacccuaauaaca

SEQ ID NO: 607 - RNA, 22 nt, Artificial Sequence
  Guide RNA
agacuaaauagcacccuaauaa

SEQ ID NO: 608 - RNA, 22 nt, Artificial Sequence
  Guide RNA
agcacccuaauaacaaaaagga

SEQ ID NO: 609 - RNA, 22 nt, Artificial Sequence
  Guide RNA
agggugcuauuuagucuauuag

SEQ ID NO: 610 - RNA, 22 nt, Artificial Sequence
  Guide RNA
auagacuaaauagcacccuaau

SEQ ID NO: 611 - RNA, 22 nt, Artificial Sequence
  Guide RNA
auagcacccuaauaacaaaaag

SEQ ID NO: 612 - RNA, 22 nt, Artificial Sequence
  Guide RNA
auuagggugcuauuuagucuau

SEQ ID NO: 613 - RNA, 22 nt, Artificial Sequence
  Guide RNA
ccuuuuuguuauuagggugcua

SEQ ID NO: 614 - RNA, 22 nt, Artificial Sequence
  Guide RNA
cuaaauagcacccuaauaacaa

SEQ ID NO: 615 - RNA, 22 nt, Artificial Sequence
  Guide RNA
cuaauagacuaaauagcacccu

SEQ ID NO: 616 - RNA, 22 nt, Artificial Sequence
  Guide RNA
cuuuguccuuuuuguuauuagg

SEQ ID NO: 617 - RNA, 22 nt, Artificial Sequence
  Guide RNA
cuuuuuguuauuagggugcuau

SEQ ID NO: 618 - RNA, 22 nt, Artificial Sequence
  Guide RNA
gacuaaauagcacccuaauaac

SEQ ID NO: 619 - RNA, 22 nt, Artificial Sequence
  Guide RNA
gcuaauagacuaaauagcaccc

SEQ ID NO: 620 - RNA, 22 nt, Artificial Sequence
  Guide RNA
gcuauuuagucuauuagccaca

SEQ ID NO: 621 - RNA, 22 nt, Artificial Sequence
  Guide RNA
ggcuaauagacuaaauagcacc

SEQ ID NO: 622 - RNA, 22 nt, Artificial Sequence
  Guide RNA
gggugcuauuuagucuauuagc

SEQ ID NO: 623 - RNA, 22 nt, Artificial Sequence
  Guide RNA
ggugcuauuuagucuauuagcc

SEQ ID NO: 624 - RNA, 22 nt, Artificial Sequence
  Guide RNA
guccuuuuuguuauuagggugc

SEQ ID NO: 625 - RNA, 22 nt, Artificial Sequence
  Guide RNA
gugcuauuuagucuauuagcca

SEQ ID NO: 626 - RNA, 22 nt, Artificial Sequence
  Guide RNA
guggcuaauagacuaaauagca

SEQ ID NO: 627 - RNA, 22 nt, Artificial Sequence
  Guide RNA
guuauuagggugcuauuuaguc

SEQ ID NO: 628 - RNA, 22 nt, Artificial Sequence
  Guide RNA
uaauagacuaaauagcacccua

SEQ ID NO: 629 - RNA, 22 nt, Artificial Sequence
  Guide RNA
uagacuaaauagcacccuaaua

SEQ ID NO: 630 - RNA, 22 nt, Artificial Sequence
  Guide RNA
uagcacccuaauaacaaaaagg

SEQ ID NO: 631 - RNA, 22 nt, Artificial Sequence
  Guide RNA
uagggugcuauuuagucuauua

SEQ ID NO: 632 - RNA, 22 nt, Artificial Sequence
  Guide RNA
uauuagggugcuauuuagucua

SEQ ID NO: 633 - RNA, 22 nt, Artificial Sequence
  Guide RNA
uccuuuuuguuauuagggugcu

SEQ ID NO: 634 - RNA, 22 nt, Artificial Sequence
  Guide RNA
ugcuauuuagucuauuagccac

SEQ ID NO: 635 - RNA, 22 nt, Artificial Sequence
  Guide RNA
uggcuaauagacuaaauagcac

SEQ ID NO: 636 - RNA, 22 nt, Artificial Sequence
  Guide RNA
uguccuuuuuguuauuagggug

SEQ ID NO: 637 - RNA, 22 nt, Artificial Sequence
  Guide RNA
uguggcuaauagacuaaauagc

SEQ ID NO: 638 - RNA, 22 nt, Artificial Sequence
  Guide RNA
uguuauuagggugcuauuuagu

SEQ ID NO: 639 - RNA, 22 nt, Artificial Sequence
  Guide RNA
uuagggugcuauuuagucuauu

SEQ ID NO: 640 - RNA, 22 nt, Artificial Sequence
  Guide RNA
uuauuagggugcuauuuagucu

SEQ ID NO: 641 - RNA, 22 nt, Artificial Sequence
  Guide RNA
uuguccuuuuuguuauuagggu

SEQ ID NO: 642 - RNA, 22 nt, Artificial Sequence
  Guide RNA
uuguggcuaauagacuaaauag

SEQ ID NO: 643 - RNA, 22 nt, Artificial Sequence
  Guide RNA
uuguuauuagggugcuauuuag

SEQ ID NO: 644 - RNA, 22 nt, Artificial Sequence
  Guide RNA
uuuguccuuuuuguuauuaggg

SEQ ID NO: 645 - RNA, 20 nt, Artificial Sequence
  Guide RNA
aaagucagugcccaacuguu

SEQ ID NO: 646 - RNA, 20 nt, Artificial Sequence
  Guide RNA
aacaaccuguaacaguuggg

SEQ ID NO: 647 - RNA, 20 nt, Artificial Sequence
  Guide RNA
aaccuguaacaguugggcac

SEQ ID NO: 648 - RNA, 20 nt, Artificial Sequence
  Guide RNA
aacuguuacagguuguugga

SEQ ID NO: 649 - RNA, 20 nt, Artificial Sequence
  Guide RNA
aagucagugcccaacuguua

SEQ ID NO: 650 - RNA, 20 nt, Artificial Sequence
  Guide RNA
acaaccuguaacaguugggc

SEQ ID NO: 651 - RNA, 20 nt, Artificial Sequence
  Guide RNA
acagguuguuggauaaauca

SEQ ID NO: 652 - RNA, 20 nt, Artificial Sequence
  Guide RNA
accacugauuuauccaacaa

SEQ ID NO: 653 - RNA, 20 nt, Artificial Sequence
  Guide RNA
accuguaacaguugggcacu

SEQ ID NO: 654 - RNA, 20 nt, Artificial Sequence
  Guide RNA
acugauuuauccaacaaccu

SEQ ID NO: 655 - RNA, 20 nt, Artificial Sequence
  Guide RNA
acuguuacagguuguuggau

SEQ ID NO: 656 - RNA, 20 nt, Artificial Sequence
  Guide RNA
agucagugcccaacuguuac

SEQ ID NO: 657 - RNA, 20 nt, Artificial Sequence
  Guide RNA
agugcccaacuguuacaggu

SEQ ID NO: 658 - RNA, 20 nt, Artificial Sequence
  Guide RNA
auaaagucagugcccaacug

SEQ ID NO: 659 - RNA, 20 nt, Artificial Sequence
  Guide RNA
auccaacaaccuguaacagu

SEQ ID NO: 660 - RNA, 20 nt, Artificial Sequence
  Guide RNA
auuuauccaacaaccuguaa

SEQ ID NO: 661 - RNA, 20 nt, Artificial Sequence
  Guide RNA
caacaaccuguaacaguugg

SEQ ID NO: 662 - RNA, 20 nt, Artificial Sequence
  Guide RNA
caaccuguaacaguugggca

SEQ ID NO: 663 - RNA, 20 nt, Artificial Sequence
  Guide RNA
caacuguuacagguuguugg

SEQ ID NO: 664 - RNA, 20 nt, Artificial Sequence
  Guide RNA
cacugauuuauccaacaacc

SEQ ID NO: 665 - RNA, 20 nt, Artificial Sequence
  Guide RNA
cagugcccaacuguuacagg

SEQ ID NO: 666 - RNA, 20 nt, Artificial Sequence
  Guide RNA
ccaacaaccuguaacaguug

SEQ ID NO: 667 - RNA, 20 nt, Artificial Sequence
  Guide RNA
ccaacuguuacagguuguug

SEQ ID NO: 668 - RNA, 20 nt, Artificial Sequence
  Guide RNA
ccacugauuuauccaacaac

SEQ ID NO: 669 - RNA, 20 nt, Artificial Sequence
  Guide RNA
cccaacuguuacagguuguu

SEQ ID NO: 670 - RNA, 20 nt, Artificial Sequence
  Guide RNA
ccuguaacaguugggcacug

SEQ ID NO: 671 - RNA, 20 nt, Artificial Sequence
  Guide RNA
cugauuuauccaacaaccug

SEQ ID NO: 672 - RNA, 20 nt, Artificial Sequence
  Guide RNA
cuguaacaguugggcacuga

SEQ ID NO: 673 - RNA, 20 nt, Artificial Sequence
  Guide RNA
cuguuacagguuguuggaua

SEQ ID NO: 674 - RNA, 20 nt, Artificial Sequence
  Guide RNA
gauuuauccaacaaccugua

SEQ ID NO: 675 - RNA, 20 nt, Artificial Sequence
  Guide RNA
gcccaacuguuacagguugu

SEQ ID NO: 676 - RNA, 20 nt, Artificial Sequence
  Guide RNA
gucagugcccaacuguuaca

SEQ ID NO: 677 - RNA, 20 nt, Artificial Sequence
  Guide RNA
gugcccaacuguuacagguu

SEQ ID NO: 678 - RNA, 20 nt, Artificial Sequence
  Guide RNA
guuacagguuguuggauaaa

SEQ ID NO: 679 - RNA, 20 nt, Artificial Sequence
  Guide RNA
uaaagucagugcccaacugu

SEQ ID NO: 680 - RNA, 20 nt, Artificial Sequence
  Guide RNA
uacagguuguuggauaaauc

SEQ ID NO: 681 - RNA, 20 nt, Artificial Sequence
  Guide RNA
uauccaacaaccuguaacag

SEQ ID NO: 682 - RNA, 20 nt, Artificial Sequence
  Guide RNA
ucagugcccaacuguuacag

SEQ ID NO: 683 - RNA, 20 nt, Artificial Sequence
  Guide RNA
uccaacaaccuguaacaguu

SEQ ID NO: 684 - RNA, 20 nt, Artificial Sequence
  Guide RNA
ugauuuauccaacaaccugu

SEQ ID NO: 685 - RNA, 20 nt, Artificial Sequence
  Guide RNA
ugcccaacuguuacagguug

SEQ ID NO: 686 - RNA, 20 nt, Artificial Sequence
  Guide RNA
uguaacaguugggcacugac

SEQ ID NO: 687 - RNA, 20 nt, Artificial Sequence
  Guide RNA
uguuacagguuguuggauaa

SEQ ID NO: 688 - RNA, 20 nt, Artificial Sequence
  Guide RNA
uuacagguuguuggauaaau

SEQ ID NO: 689 - RNA, 20 nt, Artificial Sequence
  Guide RNA
uuauccaacaaccuguaaca

SEQ ID NO: 690 - RNA, 20 nt, Artificial Sequence
  Guide RNA
uuuauccaacaaccuguaac

SEQ ID NO: 691 - RNA, 21 nt, Artificial Sequence
  Guide RNA
aaagucagugcccaacuguua

SEQ ID NO: 692 - RNA, 21 nt, Artificial Sequence
  Guide RNA
aacaaccuguaacaguugggc

SEQ ID NO: 693 - RNA, 21 nt, Artificial Sequence
  Guide RNA
aaccacugauuuauccaacaa

SEQ ID NO: 694 - RNA, 21 nt, Artificial Sequence
  Guide RNA
aaccuguaacaguugggcacu

SEQ ID NO: 695 - RNA, 21 nt, Artificial Sequence
  Guide RNA
aacuguuacagguuguuggau

SEQ ID NO: 696 - RNA, 21 nt, Artificial Sequence
  Guide RNA
aagucagugcccaacuguuac

SEQ ID NO: 697 - RNA, 21 nt, Artificial Sequence
  Guide RNA
acaaccuguaacaguugggca

SEQ ID NO: 698 - RNA, 21 nt, Artificial Sequence
  Guide RNA
acagguuguuggauaaaucag

SEQ ID NO: 699 - RNA, 21 nt, Artificial Sequence
  Guide RNA
accacugauuuauccaacaac

SEQ ID NO: 700 - RNA, 21 nt, Artificial Sequence
  Guide RNA
accuguaacaguugggcacug

SEQ ID NO: 701 - RNA, 21 nt, Artificial Sequence
  Guide RNA
acugauuuauccaacaaccug

SEQ ID NO: 702 - RNA, 21 nt, Artificial Sequence
  Guide RNA
acuguuacagguuguuggaua

SEQ ID NO: 703 - RNA, 21 nt, Artificial Sequence
  Guide RNA
agucagugcccaacuguuaca

SEQ ID NO: 704 - RNA, 21 nt, Artificial Sequence
  Guide RNA
agugcccaacuguuacagguu

SEQ ID NO: 705 - RNA, 21 nt, Artificial Sequence
  Guide RNA
auaaagucagugcccaacugu

SEQ ID NO: 706 - RNA, 21 nt, Artificial Sequence
  Guide RNA
auccaacaaccuguaacaguu

SEQ ID NO: 707 - RNA, 21 nt, Artificial Sequence
  Guide RNA
auuuauccaacaaccuguaac

SEQ ID NO: 708 - RNA, 21 nt, Artificial Sequence
  Guide RNA
caacaaccuguaacaguuggg

SEQ ID NO: 709 - RNA, 21 nt, Artificial Sequence
  Guide RNA
caaccuguaacaguugggcac

SEQ ID NO: 710 - RNA, 21 nt, Artificial Sequence
  Guide RNA
caacuguuacagguuguugga

SEQ ID NO: 711 - RNA, 21 nt, Artificial Sequence
  Guide RNA
cacugauuuauccaacaaccu

SEQ ID NO: 712 - RNA, 21 nt, Artificial Sequence
  Guide RNA
cagugcccaacuguuacaggu

SEQ ID NO: 713 - RNA, 21 nt, Artificial Sequence
  Guide RNA
cauaaagucagugcccaacug

SEQ ID NO: 714 - RNA, 21 nt, Artificial Sequence
  Guide RNA
ccaacaaccuguaacaguugg

SEQ ID NO: 715 - RNA, 21 nt, Artificial Sequence
  Guide RNA
ccaacuguuacagguuguugg

SEQ ID NO: 716 - RNA, 21 nt, Artificial Sequence
  Guide RNA
ccacugauuuauccaacaacc

SEQ ID NO: 717 - RNA, 21 nt, Artificial Sequence
  Guide RNA
cccaacuguuacagguuguug

SEQ ID NO: 718 - RNA, 21 nt, Artificial Sequence
  Guide RNA
ccuguaacaguugggcacuga

SEQ ID NO: 719 - RNA, 21 nt, Artificial Sequence
  Guide RNA
cugauuuauccaacaaccugu

SEQ ID NO: 720 - RNA, 21 nt, Artificial Sequence
  Guide RNA
cuguaacaguugggcacugac

SEQ ID NO: 721 - RNA, 21 nt, Artificial Sequence
  Guide RNA
cuguuacagguuguuggauaa

SEQ ID NO: 722 - RNA, 21 nt, Artificial Sequence
  Guide RNA
gauuuauccaacaaccuguaa

SEQ ID NO: 723 - RNA, 21 nt, Artificial Sequence
  Guide RNA
gcccaacuguuacagguuguu

SEQ ID NO: 724 - RNA, 21 nt, Artificial Sequence
  Guide RNA
gucagugcccaacuguuacag

SEQ ID NO: 725 - RNA, 21 nt, Artificial Sequence
  Guide RNA
gugcccaacuguuacagguug

SEQ ID NO: 726 - RNA, 21 nt, Artificial Sequence
  Guide RNA
guuacagguuguuggauaaau

SEQ ID NO: 727 - RNA, 21 nt, Artificial Sequence
  Guide RNA
uaaagucagugcccaacuguu

SEQ ID NO: 728 - RNA, 21 nt, Artificial Sequence
  Guide RNA
uacagguuguuggauaaauca

SEQ ID NO: 729 - RNA, 21 nt, Artificial Sequence
  Guide RNA
uauccaacaaccuguaacagu

SEQ ID NO: 730 - RNA, 21 nt, Artificial Sequence
  Guide RNA
ucagugcccaacuguuacagg

SEQ ID NO: 731 - RNA, 21 nt, Artificial Sequence
  Guide RNA
uccaacaaccuguaacaguug

SEQ ID NO: 732 - RNA, 21 nt, Artificial Sequence
  Guide RNA
ugauuuauccaacaaccugua

SEQ ID NO: 733 - RNA, 21 nt, Artificial Sequence
  Guide RNA
ugcccaacuguuacagguugu

SEQ ID NO: 734 - RNA, 21 nt, Artificial Sequence
  Guide RNA
uguaacaguugggcacugacu

SEQ ID NO: 735 - RNA, 21 nt, Artificial Sequence
  Guide RNA
uguuacagguuguuggauaaa

SEQ ID NO: 736 - RNA, 21 nt, Artificial Sequence
  Guide RNA
uuacagguuguuggauaaauc

SEQ ID NO: 737 - RNA, 21 nt, Artificial Sequence
  Guide RNA
uuauccaacaaccuguaacag

SEQ ID NO: 738 - RNA, 21 nt, Artificial Sequence
  Guide RNA
uuuauccaacaaccuguaaca

SEQ ID NO: 739 - RNA, 22 nt, Artificial Sequence
  Guide RNA
aaagucagugcccaacuguuac

SEQ ID NO: 740 - RNA, 22 nt, Artificial Sequence
  Guide RNA
aacaaccuguaacaguugggca

SEQ ID NO: 741 - RNA, 22 nt, Artificial Sequence
  Guide RNA
aaccacugauuuauccaacaac

SEQ ID NO: 742 - RNA, 22 nt, Artificial Sequence
  Guide RNA
aaccuguaacaguugggcacug

SEQ ID NO: 743 - RNA, 22 nt, Artificial Sequence
  Guide RNA
aacuguuacagguuguuggaua

SEQ ID NO: 744 - RNA, 22 nt, Artificial Sequence
  Guide RNA
aagucagugcccaacuguuaca

SEQ ID NO: 745 - RNA, 22 nt, Artificial Sequence
  Guide RNA
acaaccuguaacaguugggcac

SEQ ID NO: 746 - RNA, 22 nt, Artificial Sequence
  Guide RNA
acagguuguuggauaaaucagu

SEQ ID NO: 747 - RNA, 22 nt, Artificial Sequence
  Guide RNA
accacugauuuauccaacaacc

SEQ ID NO: 748 - RNA, 22 nt, Artificial Sequence
  Guide RNA
accuguaacaguugggcacuga

SEQ ID NO: 749 - RNA, 22 nt, Artificial Sequence
  Guide RNA
acugauuuauccaacaaccugu

SEQ ID NO: 750 - RNA, 22 nt, Artificial Sequence
  Guide RNA
acuguuacagguuguuggauaa

SEQ ID NO: 751 - RNA, 22 nt, Artificial Sequence
  Guide RNA
agucagugcccaacuguuacag

SEQ ID NO: 752 - RNA, 22 nt, Artificial Sequence
  Guide RNA
agugcccaacuguuacagguug

SEQ ID NO: 753 - RNA, 22 nt, Artificial Sequence
  Guide RNA
auaaagucagugcccaacuguu

SEQ ID NO: 754 - RNA, 22 nt, Artificial Sequence
  Guide RNA
auccaacaaccuguaacaguug

SEQ ID NO: 755 - RNA, 22 nt, Artificial Sequence
  Guide RNA
auuuauccaacaaccuguaaca

SEQ ID NO: 756 - RNA, 22 nt, Artificial Sequence
  Guide RNA
caacaaccuguaacaguugggc

SEQ ID NO: 757 - RNA, 22 nt, Artificial Sequence
  Guide RNA
caaccuguaacaguugggcacu

SEQ ID NO: 758 - RNA, 22 nt, Artificial Sequence
  Guide RNA
caacuguuacagguuguuggau

SEQ ID NO: 759 - RNA, 22 nt, Artificial Sequence
  Guide RNA
cacugauuuauccaacaaccug

SEQ ID NO: 760 - RNA, 22 nt, Artificial Sequence
  Guide RNA
cagugcccaacuguuacagguu

SEQ ID NO: 761 - RNA, 22 nt, Artificial Sequence
  Guide RNA
cauaaagucagugcccaacugu

SEQ ID NO: 762 - RNA, 22 nt, Artificial Sequence
  Guide RNA
ccaacaaccuguaacaguuggg

SEQ ID NO: 763 - RNA, 22 nt, Artificial Sequence
  Guide RNA
ccaacuguuacagguuguugga

SEQ ID NO: 764 - RNA, 22 nt, Artificial Sequence
  Guide RNA
ccacugauuuauccaacaaccu

SEQ ID NO: 765 - RNA, 22 nt, Artificial Sequence
  Guide RNA
cccaacuguuacagguuguugg

SEQ ID NO: 766 - RNA, 22 nt, Artificial Sequence
  Guide RNA
ccuguaacaguugggcacugac

SEQ ID NO: 767 - RNA, 22 nt, Artificial Sequence
  Guide RNA
cugauuuauccaacaaccugua

SEQ ID NO: 768 - RNA, 22 nt, Artificial Sequence
  Guide RNA
cuguaacaguugggcacugacu

SEQ ID NO: 769 - RNA, 22 nt, Artificial Sequence
  Guide RNA
cuguuacagguuguuggauaaa

SEQ ID NO: 770 - RNA, 22 nt, Artificial Sequence
  Guide RNA
gauuuauccaacaaccuguaac

SEQ ID NO: 771 - RNA, 22 nt, Artificial Sequence
  Guide RNA
gcauaaagucagugcccaacug

SEQ ID NO: 772 - RNA, 22 nt, Artificial Sequence
  Guide RNA
gcccaacuguuacagguuguug

SEQ ID NO: 773 - RNA, 22 nt, Artificial Sequence
  Guide RNA
gucagugcccaacuguuacagg

SEQ ID NO: 774 - RNA, 22 nt, Artificial Sequence
  Guide RNA
gugcccaacuguuacagguugu

SEQ ID NO: 775 - RNA, 22 nt, Artificial Sequence
  Guide RNA
guuacagguuguuggauaaauc

SEQ ID NO: 776 - RNA, 22 nt, Artificial Sequence
  Guide RNA
uaaagucagugcccaacuguua

SEQ ID NO: 777 - RNA, 22 nt, Artificial Sequence
  Guide RNA
uaaccacugauuuauccaacaa

SEQ ID NO: 778 - RNA, 22 nt, Artificial Sequence
  Guide RNA
uacagguuguuggauaaaucag

SEQ ID NO: 779 - RNA, 22 nt, Artificial Sequence
  Guide RNA
uauccaacaaccuguaacaguu

SEQ ID NO: 780 - RNA, 22 nt, Artificial Sequence
  Guide RNA
ucagugcccaacuguuacaggu

SEQ ID NO: 781 - RNA, 22 nt, Artificial Sequence
  Guide RNA
uccaacaaccuguaacaguugg

SEQ ID NO: 782 - RNA, 22 nt, Artificial Sequence
  Guide RNA
ugauuuauccaacaaccuguaa

SEQ ID NO: 783 - RNA, 22 nt, Artificial Sequence
  Guide RNA
ugcccaacuguuacagguuguu

SEQ ID NO: 784 - RNA, 22 nt, Artificial Sequence
  Guide RNA
uguaacaguugggcacugacuu

SEQ ID NO: 785 - RNA, 22 nt, Artificial Sequence
  Guide RNA
uguuacagguuguuggauaaau

SEQ ID NO: 786 - RNA, 22 nt, Artificial Sequence
  Guide RNA
uuacagguuguuggauaaauca

SEQ ID NO: 787 - RNA, 22 nt, Artificial Sequence
  Guide RNA
uuauccaacaaccuguaacagu

SEQ ID NO: 788 - RNA, 22 nt, Artificial Sequence
  Guide RNA
uuuauccaacaaccuguaacag

SEQ ID NO: 789 - RNA, 20 nt, Artificial Sequence
  Guide RNA
aaaucgacucagucuugaua

SEQ ID NO: 790 - RNA, 20 nt, Artificial Sequence
  Guide RNA
aacuggauauaucaagacug

SEQ ID NO: 791 - RNA, 20 nt, Artificial Sequence
  Guide RNA
aagacugagucgauuucugu

SEQ ID NO: 792 - RNA, 20 nt, Artificial Sequence
  Guide RNA
aaucgacucagucuugauau

SEQ ID NO: 793 - RNA, 20 nt, Artificial Sequence
  Guide RNA
acacagaaaucgacucaguc

SEQ ID NO: 794 - RNA, 20 nt, Artificial Sequence
  Guide RNA
acacuucagacacagaaauc

SEQ ID NO: 795 - RNA, 20 nt, Artificial Sequence
  Guide RNA
acagaaaucgacucagucuu

SEQ ID NO: 796 - RNA, 20 nt, Artificial Sequence
  Guide RNA
acugagucgauuucuguguc

SEQ ID NO: 797 - RNA, 20 nt, Artificial Sequence
  Guide RNA
acuggauauaucaagacuga

SEQ ID NO: 798 - RNA, 20 nt, Artificial Sequence
  Guide RNA
acuucagacacagaaaucga

SEQ ID NO: 799 - RNA, 20 nt, Artificial Sequence
  Guide RNA
agaaaucgacucagucuuga

SEQ ID NO: 800 - RNA, 20 nt, Artificial Sequence
  Guide RNA
agacacagaaaucgacucag

SEQ ID NO: 801 - RNA, 20 nt, Artificial Sequence
  Guide RNA
agacugagucgauuucugug

SEQ ID NO: 802 - RNA, 20 nt, Artificial Sequence
  Guide RNA
agucgauuucugugucugaa

SEQ ID NO: 803 - RNA, 20 nt, Artificial Sequence
  Guide RNA
auauaucaagacugagucga

SEQ ID NO: 804 - RNA, 20 nt, Artificial Sequence
  Guide RNA
auaucaagacugagucgauu

SEQ ID NO: 805 - RNA, 20 nt, Artificial Sequence
  Guide RNA
aucaagacugagucgauuuc

SEQ ID NO: 806 - RNA, 20 nt, Artificial Sequence
  Guide RNA
aucgacucagucuugauaua

SEQ ID NO: 807 - RNA, 20 nt, Artificial Sequence
  Guide RNA
caagacugagucgauuucug

SEQ ID NO: 808 - RNA, 20 nt, Artificial Sequence
  Guide RNA
cacagaaaucgacucagucu

SEQ ID NO: 809 - RNA, 20 nt, Artificial Sequence
  Guide RNA
cacuucagacacagaaaucg

SEQ ID NO: 810 - RNA, 20 nt, Artificial Sequence
  Guide RNA
cagaaaucgacucagucuug

SEQ ID NO: 811 - RNA, 20 nt, Artificial Sequence
  Guide RNA
cagacacagaaaucgacuca

SEQ ID NO: 812 - RNA, 20 nt, Artificial Sequence
  Guide RNA
cgacucagucuugauauauc

SEQ ID NO: 813 - RNA, 20 nt, Artificial Sequence
  Guide RNA
cugagucgauuucugugucu

SEQ ID NO: 814 - RNA, 20 nt, Artificial Sequence
  Guide RNA
cuggauauaucaagacugag

SEQ ID NO: 815 - RNA, 20 nt, Artificial Sequence
  Guide RNA
cuuacacuucagacacagaa

SEQ ID NO: 816 - RNA, 20 nt, Artificial Sequence
  Guide RNA
cuucagacacagaaaucgac

SEQ ID NO: 817 - RNA, 20 nt, Artificial Sequence
  Guide RNA
gaaaucgacucagucuugau

SEQ ID NO: 818 - RNA, 20 nt, Artificial Sequence
  Guide RNA
gacacagaaaucgacucagu

SEQ ID NO: 819 - RNA, 20 nt, Artificial Sequence
  Guide RNA
gacugagucgauuucugugu

SEQ ID NO: 820 - RNA, 20 nt, Artificial Sequence
  Guide RNA
gagucgauuucugugucuga

SEQ ID NO: 821 - RNA, 20 nt, Artificial Sequence
  Guide RNA
gauauaucaagacugagucg

SEQ ID NO: 822 - RNA, 20 nt, Artificial Sequence
  Guide RNA
ggauauaucaagacugaguc

SEQ ID NO: 823 - RNA, 20 nt, Artificial Sequence
  Guide RNA
gucgauuucugugucugaag

SEQ ID NO: 824 - RNA, 20 nt, Artificial Sequence
  Guide RNA
uacacuucagacacagaaau

SEQ ID NO: 825 - RNA, 20 nt, Artificial Sequence
  Guide RNA
uauaucaagacugagucgau

SEQ ID NO: 826 - RNA, 20 nt, Artificial Sequence
  Guide RNA
uaucaagacugagucgauuu

SEQ ID NO: 827 - RNA, 20 nt, Artificial Sequence
  Guide RNA
ucaagacugagucgauuucu

SEQ ID NO: 828 - RNA, 20 nt, Artificial Sequence
  Guide RNA
ucagacacagaaaucgacuc

SEQ ID NO: 829 - RNA, 20 nt, Artificial Sequence
  Guide RNA
ucgacucagucuugauauau

SEQ ID NO: 830 - RNA, 20 nt, Artificial Sequence
  Guide RNA
ucgauuucugugucugaagu

SEQ ID NO: 831 - RNA, 20 nt, Artificial Sequence
  Guide RNA
ugagucgauuucugugucug

SEQ ID NO: 832 - RNA, 20 nt, Artificial Sequence
  Guide RNA
uggauauaucaagacugagu

SEQ ID NO: 833 - RNA, 20 nt, Artificial Sequence
  Guide RNA
uuacacuucagacacagaaa

SEQ ID NO: 834 - RNA, 20 nt, Artificial Sequence
  Guide RNA
uucagacacagaaaucgacu

SEQ ID NO: 835 - RNA, 21 nt, Artificial Sequence
  Guide RNA
aaaucgacucagucuugauau

SEQ ID NO: 836 - RNA, 21 nt, Artificial Sequence
  Guide RNA
aacuggauauaucaagacuga

SEQ ID NO: 837 - RNA, 21 nt, Artificial Sequence
  Guide RNA
aagacugagucgauuucugug

SEQ ID NO: 838 - RNA, 21 nt, Artificial Sequence
  Guide RNA
aaucgacucagucuugauaua

SEQ ID NO: 839 - RNA, 21 nt, Artificial Sequence
  Guide RNA
acacagaaaucgacucagucu

SEQ ID NO: 840 - RNA, 21 nt, Artificial Sequence
  Guide RNA
acacuucagacacagaaaucg

SEQ ID NO: 841 - RNA, 21 nt, Artificial Sequence
  Guide RNA
acagaaaucgacucagucuug

SEQ ID NO: 842 - RNA, 21 nt, Artificial Sequence
  Guide RNA
acugagucgauuucugugucu

SEQ ID NO: 843 - RNA, 21 nt, Artificial Sequence
  Guide RNA
acuggauauaucaagacugag

SEQ ID NO: 844 - RNA, 21 nt, Artificial Sequence
  Guide RNA
acuuacacuucagacacagaa

SEQ ID NO: 845 - RNA, 21 nt, Artificial Sequence
  Guide RNA
acuucagacacagaaaucgac

SEQ ID NO: 846 - RNA, 21 nt, Artificial Sequence
  Guide RNA
agaaaucgacucagucuugau

SEQ ID NO: 847 - RNA, 21 nt, Artificial Sequence
  Guide RNA
agacacagaaaucgacucagu

SEQ ID NO: 848 - RNA, 21 nt, Artificial Sequence
  Guide RNA
agacugagucgauuucugugu

SEQ ID NO: 849 - RNA, 21 nt, Artificial Sequence
  Guide RNA
agucgauuucugugucugaag

SEQ ID NO: 850 - RNA, 21 nt, Artificial Sequence
  Guide RNA
auauaucaagacugagucgau

SEQ ID NO: 851 - RNA, 21 nt, Artificial Sequence
  Guide RNA
auaucaagacugagucgauuu

SEQ ID NO: 852 - RNA, 21 nt, Artificial Sequence
  Guide RNA
aucaagacugagucgauuucu

SEQ ID NO: 853 - RNA, 21 nt, Artificial Sequence
  Guide RNA
aucgacucagucuugauauau

SEQ ID NO: 854 - RNA, 21 nt, Artificial Sequence
  Guide RNA
caagacugagucgauuucugu

SEQ ID NO: 855 - RNA, 21 nt, Artificial Sequence
  Guide RNA
cacagaaaucgacucagucuu

SEQ ID NO: 856 - RNA, 21 nt, Artificial Sequence
  Guide RNA
cacuucagacacagaaaucga

SEQ ID NO: 857 - RNA, 21 nt, Artificial Sequence
  Guide RNA
cagaaaucgacucagucuuga

SEQ ID NO: 858 - RNA, 21 nt, Artificial Sequence
  Guide RNA
cagacacagaaaucgacucag

SEQ ID NO: 859 - RNA, 21 nt, Artificial Sequence
  Guide RNA
cgacucagucuugauauaucc

SEQ ID NO: 860 - RNA, 21 nt, Artificial Sequence
  Guide RNA
cugagucgauuucugugucug

SEQ ID NO: 861 - RNA, 21 nt, Artificial Sequence
  Guide RNA
cuggauauaucaagacugagu

SEQ ID NO: 862 - RNA, 21 nt, Artificial Sequence
  Guide RNA
cuuacacuucagacacagaaa

SEQ ID NO: 863 - RNA, 21 nt, Artificial Sequence
  Guide RNA
cuucagacacagaaaucgacu

SEQ ID NO: 864 - RNA, 21 nt, Artificial Sequence
  Guide RNA
gaaaucgacucagucuugaua

SEQ ID NO: 865 - RNA, 21 nt, Artificial Sequence
  Guide RNA
gaacuggauauaucaagacug

SEQ ID NO: 866 - RNA, 21 nt, Artificial Sequence
  Guide RNA
gacacagaaaucgacucaguc

SEQ ID NO: 867 - RNA, 21 nt, Artificial Sequence
  Guide RNA
gacugagucgauuucuguguc

SEQ ID NO: 868 - RNA, 21 nt, Artificial Sequence
  Guide RNA
gagucgauuucugugucugaa

SEQ ID NO: 869 - RNA, 21 nt, Artificial Sequence
  Guide RNA
gauauaucaagacugagucga

SEQ ID NO: 870 - RNA, 21 nt, Artificial Sequence
  Guide RNA
ggauauaucaagacugagucg

SEQ ID NO: 871 - RNA, 21 nt, Artificial Sequence
  Guide RNA
gucgauuucugugucugaagu

SEQ ID NO: 872 - RNA, 21 nt, Artificial Sequence
  Guide RNA
uacacuucagacacagaaauc

SEQ ID NO: 873 - RNA, 21 nt, Artificial Sequence
  Guide RNA
uauaucaagacugagucgauu

SEQ ID NO: 874 - RNA, 21 nt, Artificial Sequence
  Guide RNA
uaucaagacugagucgauuuc

SEQ ID NO: 875 - RNA, 21 nt, Artificial Sequence
  Guide RNA
ucaagacugagucgauuucug

SEQ ID NO: 876 - RNA, 21 nt, Artificial Sequence
  Guide RNA
ucagacacagaaaucgacuca

SEQ ID NO: 877 - RNA, 21 nt, Artificial Sequence
  Guide RNA
ucgacucagucuugauauauc

SEQ ID NO: 878 - RNA, 21 nt, Artificial Sequence
  Guide RNA
ucgauuucugugucugaagug

SEQ ID NO: 879 - RNA, 21 nt, Artificial Sequence
  Guide RNA
ugagucgauuucugugucuga

SEQ ID NO: 880 - RNA, 21 nt, Artificial Sequence
  Guide RNA
uggauauaucaagacugaguc

SEQ ID NO: 881 - RNA, 21 nt, Artificial Sequence
  Guide RNA
uuacacuucagacacagaaau

SEQ ID NO: 882 - RNA, 21 nt, Artificial Sequence
  Guide RNA
uucagacacagaaaucgacuc

SEQ ID NO: 883 - RNA, 22 nt, Artificial Sequence
  Guide RNA
aaaucgacucagucuugauaua

SEQ ID NO: 884 - RNA, 22 nt, Artificial Sequence
  Guide RNA
aacuggauauaucaagacugag

SEQ ID NO: 885 - RNA, 22 nt, Artificial Sequence
  Guide RNA
aagacugagucgauuucugugu

SEQ ID NO: 886 - RNA, 22 nt, Artificial Sequence
  Guide RNA
aaucgacucagucuugauauau

SEQ ID NO: 887 - RNA, 22 nt, Artificial Sequence
  Guide RNA
acacagaaaucgacucagucuu

SEQ ID NO: 888 - RNA, 22 nt, Artificial Sequence
  Guide RNA
acacuucagacacagaaaucga

SEQ ID NO: 889 - RNA, 22 nt, Artificial Sequence
  Guide RNA
acagaaaucgacucagucuuga

SEQ ID NO: 890 - RNA, 22 nt, Artificial Sequence
  Guide RNA
acugagucgauuucugugucug

SEQ ID NO: 891 - RNA, 22 nt, Artificial Sequence
  Guide RNA
acuggauauaucaagacugagu

SEQ ID NO: 892 - RNA, 22 nt, Artificial Sequence
  Guide RNA
acuuacacuucagacacagaaa

SEQ ID NO: 893 - RNA, 22 nt, Artificial Sequence
  Guide RNA
acuucagacacagaaaucgacu

SEQ ID NO: 894 - RNA, 22 nt, Artificial Sequence
  Guide RNA
agaaaucgacucagucuugaua

SEQ ID NO: 895 - RNA, 22 nt, Artificial Sequence
  Guide RNA
agacacagaaaucgacucaguc

SEQ ID NO: 896 - RNA, 22 nt, Artificial Sequence
  Guide RNA
agacugagucgauuucuguguc

SEQ ID NO: 897 - RNA, 22 nt, Artificial Sequence
  Guide RNA
agucgauuucugugucugaagu

SEQ ID NO: 898 - RNA, 22 nt, Artificial Sequence
  Guide RNA
auauaucaagacugagucgauu

SEQ ID NO: 899 - RNA, 22 nt, Artificial Sequence
  Guide RNA
auaucaagacugagucgauuuc

SEQ ID NO: 900 - RNA, 22 nt, Artificial Sequence
  Guide RNA
aucaagacugagucgauuucug

SEQ ID NO: 901 - RNA, 22 nt, Artificial Sequence
  Guide RNA
aucgacucagucuugauauauc

SEQ ID NO: 902 - RNA, 22 nt, Artificial Sequence
  Guide RNA
caagacugagucgauuucugug

SEQ ID NO: 903 - RNA, 22 nt, Artificial Sequence
  Guide RNA
cacagaaaucgacucagucuug

SEQ ID NO: 904 - RNA, 22 nt, Artificial Sequence
  Guide RNA
cacuuacacuucagacacagaa

SEQ ID NO: 905 - RNA, 22 nt, Artificial Sequence
  Guide RNA
cacuucagacacagaaaucgac

SEQ ID NO: 906 - RNA, 22 nt, Artificial Sequence
  Guide RNA
cagaaaucgacucagucuugau

SEQ ID NO: 907 - RNA, 22 nt, Artificial Sequence
  Guide RNA
cagacacagaaaucgacucagu

SEQ ID NO: 908 - RNA, 22 nt, Artificial Sequence
  Guide RNA
cgacucagucuugauauaucca

SEQ ID NO: 909 - RNA, 22 nt, Artificial Sequence
  Guide RNA
cugagucgauuucugugucuga

SEQ ID NO: 910 - RNA, 22 nt, Artificial Sequence
  Guide RNA
cuggauauaucaagacugaguc

SEQ ID NO: 911 - RNA, 22 nt, Artificial Sequence
  Guide RNA
cuuacacuucagacacagaaau

SEQ ID NO: 912 - RNA, 22 nt, Artificial Sequence
  Guide RNA
cuucagacacagaaaucgacuc

SEQ ID NO: 913 - RNA, 22 nt, Artificial Sequence
  Guide RNA
gaaaucgacucagucuugauau

SEQ ID NO: 914 - RNA, 22 nt, Artificial Sequence
  Guide RNA
gaacuggauauaucaagacuga

SEQ ID NO: 915 - RNA, 22 nt, Artificial Sequence
  Guide RNA
gacacagaaaucgacucagucu

SEQ ID NO: 916 - RNA, 22 nt, Artificial Sequence
  Guide RNA
gacugagucgauuucugugucu

SEQ ID NO: 917 - RNA, 22 nt, Artificial Sequence
  Guide RNA
gagucgauuucugugucugaag

SEQ ID NO: 918 - RNA, 22 nt, Artificial Sequence
  Guide RNA
gauauaucaagacugagucgau

SEQ ID NO: 919 - RNA, 22 nt, Artificial Sequence
  Guide RNA
ggaacuggauauaucaagacug

SEQ ID NO: 920 - RNA, 22 nt, Artificial Sequence
  Guide RNA
ggauauaucaagacugagucga

SEQ ID NO: 921 - RNA, 22 nt, Artificial Sequence
  Guide RNA
gucgauuucugugucugaagug

SEQ ID NO: 922 - RNA, 22 nt, Artificial Sequence
  Guide RNA
uacacuucagacacagaaaucg

SEQ ID NO: 923 - RNA, 22 nt, Artificial Sequence
  Guide RNA
uauaucaagacugagucgauuu

SEQ ID NO: 924 - RNA, 22 nt, Artificial Sequence
  Guide RNA
uaucaagacugagucgauuucu

SEQ ID NO: 925 - RNA, 22 nt, Artificial Sequence
  Guide RNA
ucaagacugagucgauuucugu

SEQ ID NO: 926 - RNA, 22 nt, Artificial Sequence
  Guide RNA
ucagacacagaaaucgacucag

SEQ ID NO: 927 - RNA, 22 nt, Artificial Sequence
  Guide RNA
ucgacucagucuugauauaucc

SEQ ID NO: 928 - RNA, 22 nt, Artificial Sequence
  Guide RNA
ucgauuucugugucugaagugu

SEQ ID NO: 929 - RNA, 22 nt, Artificial Sequence
  Guide RNA
ugagucgauuucugugucugaa

SEQ ID NO: 930 - RNA, 22 nt, Artificial Sequence
  Guide RNA
uggauauaucaagacugagucg

SEQ ID NO: 931 - RNA, 22 nt, Artificial Sequence
  Guide RNA
uuacacuucagacacagaaauc

SEQ ID NO: 932 - RNA, 22 nt, Artificial Sequence
  Guide RNA
uucagacacagaaaucgacuca

SEQ ID NO: 933 - RNA, 20 nt, Artificial Sequence
  Guide RNA
aacuugauggccauaaagga

SEQ ID NO: 934 - RNA, 20 nt, Artificial Sequence
  Guide RNA
aauggaacuugauggccaua

SEQ ID NO: 935 - RNA, 20 nt, Artificial Sequence
  Guide RNA
acuugauggccauaaaggaa

SEQ ID NO: 936 - RNA, 20 nt, Artificial Sequence
  Guide RNA
agagccaauggaacuugaug

SEQ ID NO: 937 - RNA, 20 nt, Artificial Sequence
  Guide RNA
agccaauggaacuugauggc

SEQ ID NO: 938 - RNA, 20 nt, Artificial Sequence
  Guide RNA
aguuccuuuauggccaucaa

SEQ ID NO: 939 - RNA, 20 nt, Artificial Sequence
  Guide RNA
auauauccaguuccuuuaug

SEQ ID NO: 940 - RNA, 20 nt, Artificial Sequence
  Guide RNA
auauccaguuccuuuauggc

SEQ ID NO: 941 - RNA, 20 nt, Artificial Sequence
  Guide RNA
auccaguuccuuuauggcca

SEQ ID NO: 942 - RNA, 20 nt, Artificial Sequence
  Guide RNA
auggaacuugauggccauaa

SEQ ID NO: 943 - RNA, 20 nt, Artificial Sequence
  Guide RNA
auggccauaaaggaacugga

SEQ ID NO: 944 - RNA, 20 nt, Artificial Sequence
  Guide RNA
auggccaucaaguuccauug

SEQ ID NO: 945 - RNA, 20 nt, Artificial Sequence
  Guide RNA
caauggaacuugauggccau

SEQ ID NO: 946 - RNA, 20 nt, Artificial Sequence
  Guide RNA
caguuccuuuauggccauca

SEQ ID NO: 947 - RNA, 20 nt, Artificial Sequence
  Guide RNA
cauaaaggaacuggauauau

SEQ ID NO: 948 - RNA, 20 nt, Artificial Sequence
  Guide RNA
ccaauggaacuugauggcca

SEQ ID NO: 949 - RNA, 20 nt, Artificial Sequence
  Guide RNA
ccaguuccuuuauggccauc

SEQ ID NO: 950 - RNA, 20 nt, Artificial Sequence
  Guide RNA
ccauaaaggaacuggauaua

SEQ ID NO: 951 - RNA, 20 nt, Artificial Sequence
  Guide RNA
ccuuuauggccaucaaguuc

SEQ ID NO: 952 - RNA, 20 nt, Artificial Sequence
  Guide RNA
cuugauauauccaguuccuu

SEQ ID NO: 953 - RNA, 20 nt, Artificial Sequence
  Guide RNA
cuugauggccauaaaggaac

SEQ ID NO: 954 - RNA, 20 nt, Artificial Sequence
  Guide RNA
cuuuauggccaucaaguucc

SEQ ID NO: 955 - RNA, 20 nt, Artificial Sequence
  Guide RNA
gaacuugauggccauaaagg

SEQ ID NO: 956 - RNA, 20 nt, Artificial Sequence
  Guide RNA
gagccaauggaacuugaugg

SEQ ID NO: 957 - RNA, 20 nt, Artificial Sequence
  Guide RNA
gauauauccaguuccuuuau

SEQ ID NO: 958 - RNA, 20 nt, Artificial Sequence
  Guide RNA
gauggccauaaaggaacugg

SEQ ID NO: 959 - RNA, 20 nt, Artificial Sequence
  Guide RNA
gccaauggaacuugauggcc

SEQ ID NO: 960 - RNA, 20 nt, Artificial Sequence
  Guide RNA
gccauaaaggaacuggauau

SEQ ID NO: 961 - RNA, 20 nt, Artificial Sequence
  Guide RNA
ggaacuugauggccauaaag

SEQ ID NO: 962 - RNA, 20 nt, Artificial Sequence
  Guide RNA
ggccauaaaggaacuggaua

SEQ ID NO: 963 - RNA, 20 nt, Artificial Sequence
  Guide RNA
guuccuuuauggccaucaag

SEQ ID NO: 964 - RNA, 20 nt, Artificial Sequence
  Guide RNA
uauauccaguuccuuuaugg

SEQ ID NO: 965 - RNA, 20 nt, Artificial Sequence
  Guide RNA
uauccaguuccuuuauggcc

SEQ ID NO: 966 - RNA, 20 nt, Artificial Sequence
  Guide RNA
uauggccaucaaguuccauu

SEQ ID NO: 967 - RNA, 20 nt, Artificial Sequence
  Guide RNA
uccaguuccuuuauggccau

SEQ ID NO: 968 - RNA, 20 nt, Artificial Sequence
  Guide RNA
uccuuuauggccaucaaguu

SEQ ID NO: 969 - RNA, 20 nt, Artificial Sequence
  Guide RNA
ucuugauauauccaguuccu

SEQ ID NO: 970 - RNA, 20 nt, Artificial Sequence
  Guide RNA
ugauauauccaguuccuuua

SEQ ID NO: 971 - RNA, 20 nt, Artificial Sequence
  Guide RNA
ugauggccauaaaggaacug

SEQ ID NO: 972 - RNA, 20 nt, Artificial Sequence
  Guide RNA
uggaacuugauggccauaaa

SEQ ID NO: 973 - RNA, 20 nt, Artificial Sequence
  Guide RNA
uggccauaaaggaacuggau

SEQ ID NO: 974 - RNA, 20 nt, Artificial Sequence
  Guide RNA
uuauggccaucaaguuccau

SEQ ID NO: 975 - RNA, 20 nt, Artificial Sequence
  Guide RNA
uuccuuuauggccaucaagu

SEQ ID NO: 976 - RNA, 20 nt, Artificial Sequence
  Guide RNA
uugauauauccaguuccuuu

SEQ ID NO: 977 - RNA, 20 nt, Artificial Sequence
  Guide RNA
uugauggccauaaaggaacu

SEQ ID NO: 978 - RNA, 20 nt, Artificial Sequence
  Guide RNA
uuuauggccaucaaguucca

SEQ ID NO: 979 - RNA, 21 nt, Artificial Sequence
  Guide RNA
aacuugauggccauaaaggaa

SEQ ID NO: 980 - RNA, 21 nt, Artificial Sequence
  Guide RNA
aauggaacuugauggccauaa

SEQ ID NO: 981 - RNA, 21 nt, Artificial Sequence
  Guide RNA
acuugauggccauaaaggaac

SEQ ID NO: 982 - RNA, 21 nt, Artificial Sequence
  Guide RNA
agagccaauggaacuugaugg

SEQ ID NO: 983 - RNA, 21 nt, Artificial Sequence
  Guide RNA
agccaauggaacuugauggcc

SEQ ID NO: 984 - RNA, 21 nt, Artificial Sequence
  Guide RNA
aguuccuuuauggccaucaag

SEQ ID NO: 985 - RNA, 21 nt, Artificial Sequence
  Guide RNA
auauauccaguuccuuuaugg

SEQ ID NO: 986 - RNA, 21 nt, Artificial Sequence
  Guide RNA
auauccaguuccuuuauggcc

SEQ ID NO: 987 - RNA, 21 nt, Artificial Sequence
  Guide RNA
auccaguuccuuuauggccau

SEQ ID NO: 988 - RNA, 21 nt, Artificial Sequence
  Guide RNA
auggaacuugauggccauaaa

SEQ ID NO: 989 - RNA, 21 nt, Artificial Sequence
  Guide RNA
auggccauaaaggaacuggau

SEQ ID NO: 990 - RNA, 21 nt, Artificial Sequence
  Guide RNA
auggccaucaaguuccauugg

SEQ ID NO: 991 - RNA, 21 nt, Artificial Sequence
  Guide RNA
caauggaacuugauggccaua

SEQ ID NO: 992 - RNA, 21 nt, Artificial Sequence
  Guide RNA
cagagccaauggaacuugaug

SEQ ID NO: 993 - RNA, 21 nt, Artificial Sequence
  Guide RNA
caguuccuuuauggccaucaa

SEQ ID NO: 994 - RNA, 21 nt, Artificial Sequence
  Guide RNA
cauaaaggaacuggauauauc

SEQ ID NO: 995 - RNA, 21 nt, Artificial Sequence
  Guide RNA
ccaauggaacuugauggccau

SEQ ID NO: 996 - RNA, 21 nt, Artificial Sequence
  Guide RNA
ccaguuccuuuauggccauca

SEQ ID NO: 997 - RNA, 21 nt, Artificial Sequence
  Guide RNA
ccauaaaggaacuggauauau

SEQ ID NO: 998 - RNA, 21 nt, Artificial Sequence
  Guide RNA
ccuuuauggccaucaaguucc

SEQ ID NO: 999 - RNA, 21 nt, Artificial Sequence
  Guide RNA
cuugauauauccaguuccuuu

SEQ ID NO: 1000 - RNA, 21 nt, Artificial Sequence
  Guide RNA
cuugauggccauaaaggaacu

SEQ ID NO: 1001 - RNA, 21 nt, Artificial Sequence
  Guide RNA
cuuuauggccaucaaguucca

SEQ ID NO: 1002 - RNA, 21 nt, Artificial Sequence
  Guide RNA
gaacuugauggccauaaagga

SEQ ID NO: 1003 - RNA, 21 nt, Artificial Sequence
  Guide RNA
gagccaauggaacuugauggc

SEQ ID NO: 1004 - RNA, 21 nt, Artificial Sequence
  Guide RNA
gauauauccaguuccuuuaug

SEQ ID NO: 1005 - RNA, 21 nt, Artificial Sequence
  Guide RNA
gauggccauaaaggaacugga

SEQ ID NO: 1006 - RNA, 21 nt, Artificial Sequence
  Guide RNA
gccaauggaacuugauggcca

SEQ ID NO: 1007 - RNA, 21 nt, Artificial Sequence
  Guide RNA
gccauaaaggaacuggauaua

SEQ ID NO: 1008 - RNA, 21 nt, Artificial Sequence
  Guide RNA
ggaacuugauggccauaaagg

SEQ ID NO: 1009 - RNA, 21 nt, Artificial Sequence
  Guide RNA
ggccauaaaggaacuggauau

SEQ ID NO: 1010 - RNA, 21 nt, Artificial Sequence
  Guide RNA
gucuugauauauccaguuccu

SEQ ID NO: 1011 - RNA, 21 nt, Artificial Sequence
  Guide RNA
guuccuuuauggccaucaagu

SEQ ID NO: 1012 - RNA, 21 nt, Artificial Sequence
  Guide RNA
uauauccaguuccuuuauggc

SEQ ID NO: 1013 - RNA, 21 nt, Artificial Sequence
  Guide RNA
uauccaguuccuuuauggcca

SEQ ID NO: 1014 - RNA, 21 nt, Artificial Sequence
  Guide RNA
uauggccaucaaguuccauug

SEQ ID NO: 1015 - RNA, 21 nt, Artificial Sequence
  Guide RNA
uccaguuccuuuauggccauc

SEQ ID NO: 1016 - RNA, 21 nt, Artificial Sequence
  Guide RNA
uccuuuauggccaucaaguuc

SEQ ID NO: 1017 - RNA, 21 nt, Artificial Sequence
  Guide RNA
ucuugauauauccaguuccuu

SEQ ID NO: 1018 - RNA, 21 nt, Artificial Sequence
  Guide RNA
ugauggccauaaaggaacugg

SEQ ID NO: 1019 - RNA, 21 nt, Artificial Sequence
  Guide RNA
uggaacuugauggccauaaag

SEQ ID NO: 1020 - RNA, 21 nt, Artificial Sequence
  Guide RNA
uggccauaaaggaacuggaua

SEQ ID NO: 1021 - RNA, 21 nt, Artificial Sequence
  Guide RNA
uuauggccaucaaguuccauu

SEQ ID NO: 1022 - RNA, 21 nt, Artificial Sequence
  Guide RNA
uuccuuuauggccaucaaguu

SEQ ID NO: 1023 - RNA, 21 nt, Artificial Sequence
  Guide RNA
uugauggccauaaaggaacug

SEQ ID NO: 1024 - RNA, 21 nt, Artificial Sequence
  Guide RNA
uuuauggccaucaaguuccau

SEQ ID NO: 1025 - RNA, 22 nt, Artificial Sequence
  Guide RNA
aacuugauggccauaaaggaac

SEQ ID NO: 1026 - RNA, 22 nt, Artificial Sequence
  Guide RNA
aauggaacuugauggccauaaa

SEQ ID NO: 1027 - RNA, 22 nt, Artificial Sequence
  Guide RNA
acuugauggccauaaaggaacu

SEQ ID NO: 1028 - RNA, 22 nt, Artificial Sequence
  Guide RNA
agagccaauggaacuugauggc

SEQ ID NO: 1029 - RNA, 22 nt, Artificial Sequence
  Guide RNA
agccaauggaacuugauggcca

SEQ ID NO: 1030 - RNA, 22 nt, Artificial Sequence
  Guide RNA
agucuugauauauccaguuccu

SEQ ID NO: 1031 - RNA, 22 nt, Artificial Sequence
  Guide RNA
aguuccuuuauggccaucaagu

SEQ ID NO: 1032 - RNA, 22 nt, Artificial Sequence
  Guide RNA
auauauccaguuccuuuauggc

SEQ ID NO: 1033 - RNA, 22 nt, Artificial Sequence
  Guide RNA
auauccaguuccuuuauggcca

SEQ ID NO: 1034 - RNA, 22 nt, Artificial Sequence
  Guide RNA
auccaguuccuuuauggccauc

SEQ ID NO: 1035 - RNA, 22 nt, Artificial Sequence
  Guide RNA
auggaacuugauggccauaaag

SEQ ID NO: 1036 - RNA, 22 nt, Artificial Sequence
  Guide RNA
auggccauaaaggaacuggaua

SEQ ID NO: 1037 - RNA, 22 nt, Artificial Sequence
  Guide RNA
auggccaucaaguuccauuggc

SEQ ID NO: 1038 - RNA, 22 nt, Artificial Sequence
  Guide RNA
caauggaacuugauggccauaa

SEQ ID NO: 1039 - RNA, 22 nt, Artificial Sequence
  Guide RNA
cagagccaauggaacuugaugg

SEQ ID NO: 1040 - RNA, 22 nt, Artificial Sequence
  Guide RNA
caguuccuuuauggccaucaag

SEQ ID NO: 1041 - RNA, 22 nt, Artificial Sequence
  Guide RNA
cauaaaggaacuggauauauca

SEQ ID NO: 1042 - RNA, 22 nt, Artificial Sequence
  Guide RNA
ccaauggaacuugauggccaua

SEQ ID NO: 1043 - RNA, 22 nt, Artificial Sequence
  Guide RNA
ccagagccaauggaacuugaug

SEQ ID NO: 1044 - RNA, 22 nt, Artificial Sequence
  Guide RNA
ccaguuccuuuauggccaucaa

SEQ ID NO: 1045 - RNA, 22 nt, Artificial Sequence
  Guide RNA
ccauaaaggaacuggauauauc

SEQ ID NO: 1046 - RNA, 22 nt, Artificial Sequence
  Guide RNA
ccuuuauggccaucaaguucca

SEQ ID NO: 1047 - RNA, 22 nt, Artificial Sequence
  Guide RNA
cuugauauauccaguuccuuua

SEQ ID NO: 1048 - RNA, 22 nt, Artificial Sequence
  Guide RNA
cuugauggccauaaaggaacug

SEQ ID NO: 1049 - RNA, 22 nt, Artificial Sequence
  Guide RNA
cuuuauggccaucaaguuccau

SEQ ID NO: 1050 - RNA, 22 nt, Artificial Sequence
  Guide RNA
gaacuugauggccauaaaggaa

SEQ ID NO: 1051 - RNA, 22 nt, Artificial Sequence
  Guide RNA
gagccaauggaacuugauggcc

SEQ ID NO: 1052 - RNA, 22 nt, Artificial Sequence
  Guide RNA
gauauauccaguuccuuuaugg

SEQ ID NO: 1053 - RNA, 22 nt, Artificial Sequence
  Guide RNA
gauggccauaaaggaacuggau

SEQ ID NO: 1054 - RNA, 22 nt, Artificial Sequence
  Guide RNA
gccaauggaacuugauggccau

SEQ ID NO: 1055 - RNA, 22 nt, Artificial Sequence
  Guide RNA
gccauaaaggaacuggauauau

SEQ ID NO: 1056 - RNA, 22 nt, Artificial Sequence
  Guide RNA
ggaacuugauggccauaaagga

SEQ ID NO: 1057 - RNA, 22 nt, Artificial Sequence
  Guide RNA
ggccauaaaggaacuggauaua

SEQ ID NO: 1058 - RNA, 22 nt, Artificial Sequence
  Guide RNA
gucuugauauauccaguuccuu

SEQ ID NO: 1059 - RNA, 22 nt, Artificial Sequence
  Guide RNA
guuccuuuauggccaucaaguu

SEQ ID NO: 1060 - RNA, 22 nt, Artificial Sequence
  Guide RNA
uauauccaguuccuuuauggcc

SEQ ID NO: 1061 - RNA, 22 nt, Artificial Sequence
  Guide RNA
uauccaguuccuuuauggccau

SEQ ID NO: 1062 - RNA, 22 nt, Artificial Sequence
  Guide RNA
uauggccaucaaguuccauugg

SEQ ID NO: 1063 - RNA, 22 nt, Artificial Sequence
  Guide RNA
uccaguuccuuuauggccauca

SEQ ID NO: 1064 - RNA, 22 nt, Artificial Sequence
  Guide RNA
uccuuuauggccaucaaguucc

SEQ ID NO: 1065 - RNA, 22 nt, Artificial Sequence
  Guide RNA
ucuugauauauccaguuccuuu

SEQ ID NO: 1066 - RNA, 22 nt, Artificial Sequence
  Guide RNA
ugauauauccaguuccuuuaug

SEQ ID NO: 1067 - RNA, 22 nt, Artificial Sequence
  Guide RNA
ugauggccauaaaggaacugga

SEQ ID NO: 1068 - RNA, 22 nt, Artificial Sequence
  Guide RNA
uggaacuugauggccauaaagg

SEQ ID NO: 1069 - RNA, 22 nt, Artificial Sequence
  Guide RNA
uggccauaaaggaacuggauau

SEQ ID NO: 1070 - RNA, 22 nt, Artificial Sequence
  Guide RNA
uuauggccaucaaguuccauug

SEQ ID NO: 1071 - RNA, 22 nt, Artificial Sequence
  Guide RNA
uuccuuuauggccaucaaguuc

SEQ ID NO: 1072 - RNA, 22 nt, Artificial Sequence
  Guide RNA
uugauggccauaaaggaacugg

SEQ ID NO: 1073 - RNA, 22 nt, Artificial Sequence
  Guide RNA
uuuauggccaucaaguuccauu

SEQ ID NO: 1074 - RNA, 20 nt, Artificial Sequence
  Guide RNA
aaaggcauggucucugucaa

SEQ ID NO: 1075 - RNA, 20 nt, Artificial Sequence
  Guide RNA
aaauauugacagagaccaug

SEQ ID NO: 1076 - RNA, 20 nt, Artificial Sequence
  Guide RNA
aaggcauggucucugucaau

SEQ ID NO: 1077 - RNA, 20 nt, Artificial Sequence
  Guide RNA
aauacuuuccaaaggcaugg

SEQ ID NO: 1078 - RNA, 20 nt, Artificial Sequence
  Guide RNA
aauauugacagagaccaugc

SEQ ID NO: 1079 - RNA, 20 nt, Artificial Sequence
  Guide RNA
acagagaccaugccuuugga

SEQ ID NO: 1080 - RNA, 20 nt, Artificial Sequence
  Guide RNA
acuuuccaaaggcauggucu

SEQ ID NO: 1081 - RNA, 20 nt, Artificial Sequence
  Guide RNA
agagaccaugccuuuggaaa

SEQ ID NO: 1082 - RNA, 20 nt, Artificial Sequence
  Guide RNA
aggcauggucucugucaaua

SEQ ID NO: 1083 - RNA, 20 nt, Artificial Sequence
  Guide RNA
auacuuuccaaaggcauggu

SEQ ID NO: 1084 - RNA, 20 nt, Artificial Sequence
  Guide RNA
auauugacagagaccaugcc

SEQ ID NO: 1085 - RNA, 20 nt, Artificial Sequence
  Guide RNA
auccaaauauugacagagac

SEQ ID NO: 1086 - RNA, 20 nt, Artificial Sequence
  Guide RNA
aucuguauccaaauauugac

SEQ ID NO: 1087 - RNA, 20 nt, Artificial Sequence
  Guide RNA
auggucucugucaauauuug

SEQ ID NO: 1088 - RNA, 20 nt, Artificial Sequence
  Guide RNA
auugacagagaccaugccuu

SEQ ID NO: 1089 - RNA, 20 nt, Artificial Sequence
  Guide RNA
caaaggcauggucucuguca

SEQ ID NO: 1090 - RNA, 20 nt, Artificial Sequence
  Guide RNA
caaauauugacagagaccau

SEQ ID NO: 1091 - RNA, 20 nt, Artificial Sequence
  Guide RNA
cagagaccaugccuuuggaa

SEQ ID NO: 1092 - RNA, 20 nt, Artificial Sequence
  Guide RNA
cauggucucugucaauauuu

SEQ ID NO: 1093 - RNA, 20 nt, Artificial Sequence
  Guide RNA
ccaaaggcauggucucuguc

SEQ ID NO: 1094 - RNA, 20 nt, Artificial Sequence
  Guide RNA
ccaaauauugacagagacca

SEQ ID NO: 1095 - RNA, 20 nt, Artificial Sequence
  Guide RNA
cucugucaauauuuggauac

SEQ ID NO: 1096 - RNA, 20 nt, Artificial Sequence
  Guide RNA
cuguauccaaauauugacag

SEQ ID NO: 1097 - RNA, 20 nt, Artificial Sequence
  Guide RNA
cuuuccaaaggcauggucuc

SEQ ID NO: 1098 - RNA, 20 nt, Artificial Sequence
  Guide RNA
gacagagaccaugccuuugg

SEQ ID NO: 1099 - RNA, 20 nt, Artificial Sequence
  Guide RNA
gcauggucucugucaauauu

SEQ ID NO: 1100 - RNA, 20 nt, Artificial Sequence
  Guide RNA
ggcauggucucugucaauau

SEQ ID NO: 1101 - RNA, 20 nt, Artificial Sequence
  Guide RNA
ggucucugucaauauuugga

SEQ ID NO: 1102 - RNA, 20 nt, Artificial Sequence
  Guide RNA
guauccaaauauugacagag

SEQ ID NO: 1103 - RNA, 20 nt, Artificial Sequence
  Guide RNA
guaucuguauccaaauauug

SEQ ID NO: 1104 - RNA, 20 nt, Artificial Sequence
  Guide RNA
gucucugucaauauuuggau

SEQ ID NO: 1105 - RNA, 20 nt, Artificial Sequence
  Guide RNA
uacuuuccaaaggcaugguc

SEQ ID NO: 1106 - RNA, 20 nt, Artificial Sequence
  Guide RNA
uauccaaauauugacagaga

SEQ ID NO: 1107 - RNA, 20 nt, Artificial Sequence
  Guide RNA
uauugacagagaccaugccu

SEQ ID NO: 1108 - RNA, 20 nt, Artificial Sequence
  Guide RNA
uccaaaggcauggucucugu

SEQ ID NO: 1109 - RNA, 20 nt, Artificial Sequence
  Guide RNA
uccaaauauugacagagacc

SEQ ID NO: 1110 - RNA, 20 nt, Artificial Sequence
  Guide RNA
ucucugucaauauuuggaua

SEQ ID NO: 1111 - RNA, 20 nt, Artificial Sequence
  Guide RNA
ucuguauccaaauauugaca

SEQ ID NO: 1112 - RNA, 20 nt, Artificial Sequence
  Guide RNA
ucugucaauauuuggauaca

SEQ ID NO: 1113 - RNA, 20 nt, Artificial Sequence
  Guide RNA
ugacagagaccaugccuuug

SEQ ID NO: 1114 - RNA, 20 nt, Artificial Sequence
  Guide RNA
uggucucugucaauauuugg

SEQ ID NO: 1115 - RNA, 20 nt, Artificial Sequence
  Guide RNA
uguauccaaauauugacaga

SEQ ID NO: 1116 - RNA, 20 nt, Artificial Sequence
  Guide RNA
uuccaaaggcauggucucug

SEQ ID NO: 1117 - RNA, 20 nt, Artificial Sequence
  Guide RNA
uugacagagaccaugccuuu

SEQ ID NO: 1118 - RNA, 20 nt, Artificial Sequence
  Guide RNA
uuuccaaaggcauggucucu

SEQ ID NO: 1119 - RNA, 21 nt, Artificial Sequence
  Guide RNA
aaaggcauggucucugucaau

SEQ ID NO: 1120 - RNA, 21 nt, Artificial Sequence
  Guide RNA
aaauauugacagagaccaugc

SEQ ID NO: 1121 - RNA, 21 nt, Artificial Sequence
  Guide RNA
aaggcauggucucugucaaua

SEQ ID NO: 1122 - RNA, 21 nt, Artificial Sequence
  Guide RNA
aauacuuuccaaaggcauggu

SEQ ID NO: 1123 - RNA, 21 nt, Artificial Sequence
  Guide RNA
aauauugacagagaccaugcc

SEQ ID NO: 1124 - RNA, 21 nt, Artificial Sequence
  Guide RNA
acagagaccaugccuuuggaa

SEQ ID NO: 1125 - RNA, 21 nt, Artificial Sequence
  Guide RNA
acuuuccaaaggcauggucuc

SEQ ID NO: 1126 - RNA, 21 nt, Artificial Sequence
  Guide RNA
agagaccaugccuuuggaaag

SEQ ID NO: 1127 - RNA, 21 nt, Artificial Sequence
  Guide RNA
aggcauggucucugucaauau

SEQ ID NO: 1128 - RNA, 21 nt, Artificial Sequence
  Guide RNA
auacuuuccaaaggcaugguc

SEQ ID NO: 1129 - RNA, 21 nt, Artificial Sequence
  Guide RNA
auauugacagagaccaugccu

SEQ ID NO: 1130 - RNA, 21 nt, Artificial Sequence
  Guide RNA
auccaaauauugacagagacc

SEQ ID NO: 1131 - RNA, 21 nt, Artificial Sequence
  Guide RNA
auggucucugucaauauuugg

SEQ ID NO: 1132 - RNA, 21 nt, Artificial Sequence
  Guide RNA
auugacagagaccaugccuuu

SEQ ID NO: 1133 - RNA, 21 nt, Artificial Sequence
  Guide RNA
caaaggcauggucucugucaa

SEQ ID NO: 1134 - RNA, 21 nt, Artificial Sequence
  Guide RNA
caaauauugacagagaccaug

SEQ ID NO: 1135 - RNA, 21 nt, Artificial Sequence
  Guide RNA
cagagaccaugccuuuggaaa

SEQ ID NO: 1136 - RNA, 21 nt, Artificial Sequence
  Guide RNA
cauggucucugucaauauuug

SEQ ID NO: 1137 - RNA, 21 nt, Artificial Sequence
  Guide RNA
ccaaaggcauggucucuguca

SEQ ID NO: 1138 - RNA, 21 nt, Artificial Sequence
  Guide RNA
ccaaauauugacagagaccau

SEQ ID NO: 1139 - RNA, 21 nt, Artificial Sequence
  Guide RNA
cucugucaauauuuggauaca

SEQ ID NO: 1140 - RNA, 21 nt, Artificial Sequence
  Guide RNA
cuguauccaaauauugacaga

SEQ ID NO: 1141 - RNA, 21 nt, Artificial Sequence
  Guide RNA
cuuuccaaaggcauggucucu

SEQ ID NO: 1142 - RNA, 21 nt, Artificial Sequence
  Guide RNA
gacagagaccaugccuuugga

SEQ ID NO: 1143 - RNA, 21 nt, Artificial Sequence
  Guide RNA
gcauggucucugucaauauuu

SEQ ID NO: 1144 - RNA, 21 nt, Artificial Sequence
  Guide RNA
ggcauggucucugucaauauu

SEQ ID NO: 1145 - RNA, 21 nt, Artificial Sequence
  Guide RNA
ggucucugucaauauuuggau

SEQ ID NO: 1146 - RNA, 21 nt, Artificial Sequence
  Guide RNA
guauccaaauauugacagaga

SEQ ID NO: 1147 - RNA, 21 nt, Artificial Sequence
  Guide RNA
gucucugucaauauuuggaua

SEQ ID NO: 1148 - RNA, 21 nt, Artificial Sequence
  Guide RNA
uaauacuuuccaaaggcaugg

SEQ ID NO: 1149 - RNA, 21 nt, Artificial Sequence
  Guide RNA
uacuuuccaaaggcauggucu

SEQ ID NO: 1150 - RNA, 21 nt, Artificial Sequence
  Guide RNA
uauccaaauauugacagagac

SEQ ID NO: 1151 - RNA, 21 nt, Artificial Sequence
  Guide RNA
uauugacagagaccaugccuu

SEQ ID NO: 1152 - RNA, 21 nt, Artificial Sequence
  Guide RNA
uccaaaggcauggucucuguc

SEQ ID NO: 1153 - RNA, 21 nt, Artificial Sequence
  Guide RNA
uccaaauauugacagagacca

SEQ ID NO: 1154 - RNA, 21 nt, Artificial Sequence
  Guide RNA
ucucugucaauauuuggauac

SEQ ID NO: 1155 - RNA, 21 nt, Artificial Sequence
  Guide RNA
ucuguauccaaauauugacag

SEQ ID NO: 1156 - RNA, 21 nt, Artificial Sequence
  Guide RNA
ucugucaauauuuggauacag

SEQ ID NO: 1157 - RNA, 21 nt, Artificial Sequence
  Guide RNA
ugacagagaccaugccuuugg

SEQ ID NO: 1158 - RNA, 21 nt, Artificial Sequence
  Guide RNA
uggucucugucaauauuugga

SEQ ID NO: 1159 - RNA, 21 nt, Artificial Sequence
  Guide RNA
uguauccaaauauugacagag

SEQ ID NO: 1160 - RNA, 21 nt, Artificial Sequence
  Guide RNA
uuccaaaggcauggucucugu

SEQ ID NO: 1161 - RNA, 21 nt, Artificial Sequence
  Guide RNA
uugacagagaccaugccuuug

SEQ ID NO: 1162 - RNA, 21 nt, Artificial Sequence
  Guide RNA
uuuccaaaggcauggucucug

SEQ ID NO: 1163 - RNA, 22 nt, Artificial Sequence
  Guide RNA
aaaggcauggucucugucaaua

SEQ ID NO: 1164 - RNA, 22 nt, Artificial Sequence
  Guide RNA
aaauauugacagagaccaugcc

SEQ ID NO: 1165 - RNA, 22 nt, Artificial Sequence
  Guide RNA
aaggcauggucucugucaauau

SEQ ID NO: 1166 - RNA, 22 nt, Artificial Sequence
  Guide RNA
aauacuuuccaaaggcaugguc

SEQ ID NO: 1167 - RNA, 22 nt, Artificial Sequence
  Guide RNA
aauauugacagagaccaugccu

SEQ ID NO: 1168 - RNA, 22 nt, Artificial Sequence
  Guide RNA
acagagaccaugccuuuggaaa

SEQ ID NO: 1169 - RNA, 22 nt, Artificial Sequence
  Guide RNA
acuuuccaaaggcauggucucu

SEQ ID NO: 1170 - RNA, 22 nt, Artificial Sequence
  Guide RNA
agagaccaugccuuuggaaagu

SEQ ID NO: 1171 - RNA, 22 nt, Artificial Sequence
  Guide RNA
aggcauggucucugucaauauu

SEQ ID NO: 1172 - RNA, 22 nt, Artificial Sequence
  Guide RNA
auacuuuccaaaggcauggucu

SEQ ID NO: 1173 - RNA, 22 nt, Artificial Sequence
  Guide RNA
auauugacagagaccaugccuu

SEQ ID NO: 1174 - RNA, 22 nt, Artificial Sequence
  Guide RNA
auccaaauauugacagagacca

SEQ ID NO: 1175 - RNA, 22 nt, Artificial Sequence
  Guide RNA
aucuguauccaaauauugacag

SEQ ID NO: 1176 - RNA, 22 nt, Artificial Sequence
  Guide RNA
auggucucugucaauauuugga

SEQ ID NO: 1177 - RNA, 22 nt, Artificial Sequence
  Guide RNA
auugacagagaccaugccuuug

SEQ ID NO: 1178 - RNA, 22 nt, Artificial Sequence
  Guide RNA
caaaggcauggucucugucaau

SEQ ID NO: 1179 - RNA, 22 nt, Artificial Sequence
  Guide RNA
caaauauugacagagaccaugc

SEQ ID NO: 1180 - RNA, 22 nt, Artificial Sequence
  Guide RNA
cagagaccaugccuuuggaaag

SEQ ID NO: 1181 - RNA, 22 nt, Artificial Sequence
  Guide RNA
cauggucucugucaauauuugg

SEQ ID NO: 1182 - RNA, 22 nt, Artificial Sequence
  Guide RNA
ccaaaggcauggucucugucaa

SEQ ID NO: 1183 - RNA, 22 nt, Artificial Sequence
  Guide RNA
ccaaauauugacagagaccaug

SEQ ID NO: 1184 - RNA, 22 nt, Artificial Sequence
  Guide RNA
cucugucaauauuuggauacag

SEQ ID NO: 1185 - RNA, 22 nt, Artificial Sequence
  Guide RNA
cuguauccaaauauugacagag

SEQ ID NO: 1186 - RNA, 22 nt, Artificial Sequence
  Guide RNA
cuuuccaaaggcauggucucug

SEQ ID NO: 1187 - RNA, 22 nt, Artificial Sequence
  Guide RNA
gacagagaccaugccuuuggaa

SEQ ID NO: 1188 - RNA, 22 nt, Artificial Sequence
  Guide RNA
gcauggucucugucaauauuug

SEQ ID NO: 1189 - RNA, 22 nt, Artificial Sequence
  Guide RNA
ggcauggucucugucaauauuu

SEQ ID NO: 1190 - RNA, 22 nt, Artificial Sequence
  Guide RNA
ggucucugucaauauuuggaua

SEQ ID NO: 1191 - RNA, 22 nt, Artificial Sequence
  Guide RNA
guaauacuuuccaaaggcaugg

SEQ ID NO: 1192 - RNA, 22 nt, Artificial Sequence
  Guide RNA
guauccaaauauugacagagac

SEQ ID NO: 1193 - RNA, 22 nt, Artificial Sequence
  Guide RNA
guaucuguauccaaauauugac

SEQ ID NO: 1194 - RNA, 22 nt, Artificial Sequence
  Guide RNA
gucucugucaauauuuggauac

SEQ ID NO: 1195 - RNA, 22 nt, Artificial Sequence
  Guide RNA
uaauacuuuccaaaggcauggu

SEQ ID NO: 1196 - RNA, 22 nt, Artificial Sequence
  Guide RNA
uacuuuccaaaggcauggucuc

SEQ ID NO: 1197 - RNA, 22 nt, Artificial Sequence
  Guide RNA
uauccaaauauugacagagacc

SEQ ID NO: 1198 - RNA, 22 nt, Artificial Sequence
  Guide RNA
uauugacagagaccaugccuuu

SEQ ID NO: 1199 - RNA, 22 nt, Artificial Sequence
  Guide RNA
uccaaaggcauggucucuguca

SEQ ID NO: 1200 - RNA, 22 nt, Artificial Sequence
  Guide RNA
uccaaauauugacagagaccau

SEQ ID NO: 1201 - RNA, 22 nt, Artificial Sequence
  Guide RNA
ucucugucaauauuuggauaca

SEQ ID NO: 1202 - RNA, 22 nt, Artificial Sequence
  Guide RNA
ucuguauccaaauauugacaga

SEQ ID NO: 1203 - RNA, 22 nt, Artificial Sequence
  Guide RNA
ucugucaauauuuggauacaga

SEQ ID NO: 1204 - RNA, 22 nt, Artificial Sequence
  Guide RNA
ugacagagaccaugccuuugga

SEQ ID NO: 1205 - RNA, 22 nt, Artificial Sequence
  Guide RNA
uggucucugucaauauuuggau

SEQ ID NO: 1206 - RNA, 22 nt, Artificial Sequence
  Guide RNA
uguauccaaauauugacagaga

SEQ ID NO: 1207 - RNA, 22 nt, Artificial Sequence
  Guide RNA
uuccaaaggcauggucucuguc

SEQ ID NO: 1208 - RNA, 22 nt, Artificial Sequence
  Guide RNA
uugacagagaccaugccuuugg

SEQ ID NO: 1209 - RNA, 22 nt, Artificial Sequence
  Guide RNA
uuuccaaaggcauggucucugu

SEQ ID NO: 1210 - RNA, 20 nt, Artificial Sequence
  Guide RNA
aaagaacuuucugcuguuaa

SEQ ID NO: 1211 - RNA, 20 nt, Artificial Sequence
  Guide RNA
aaauuaacagcagaaaguuc

SEQ ID NO: 1212 - RNA, 20 nt, Artificial Sequence
  Guide RNA
aacuuucugcuguuaauuuc

SEQ ID NO: 1213 - RNA, 20 nt, Artificial Sequence
  Guide RNA
aagaaagaacuuucugcugu

SEQ ID NO: 1214 - RNA, 20 nt, Artificial Sequence
  Guide RNA
aagaacuuucugcuguuaau

SEQ ID NO: 1215 - RNA, 20 nt, Artificial Sequence
  Guide RNA
aaugaugucagggaaauuaa

SEQ ID NO: 1216 - RNA, 20 nt, Artificial Sequence
  Guide RNA
aauuaacagcagaaaguucu

SEQ ID NO: 1217 - RNA, 20 nt, Artificial Sequence
  Guide RNA
aauugcgaaugaugucaggg

SEQ ID NO: 1218 - RNA, 20 nt, Artificial Sequence
  Guide RNA
aauuucccugacaucauucg

SEQ ID NO: 1219 - RNA, 20 nt, Artificial Sequence
  Guide RNA
acuuucugcuguuaauuucc

SEQ ID NO: 1220 - RNA, 20 nt, Artificial Sequence
  Guide RNA
agaaagaacuuucugcuguu

SEQ ID NO: 1221 - RNA, 20 nt, Artificial Sequence
  Guide RNA
agaacuuucugcuguuaauu

SEQ ID NO: 1222 - RNA, 20 nt, Artificial Sequence
  Guide RNA
agggaaauuaacagcagaaa

SEQ ID NO: 1223 - RNA, 20 nt, Artificial Sequence
  Guide RNA
augaugucagggaaauuaac

SEQ ID NO: 1224 - RNA, 20 nt, Artificial Sequence
  Guide RNA
augucagggaaauuaacagc

SEQ ID NO: 1225 - RNA, 20 nt, Artificial Sequence
  Guide RNA
auuaacagcagaaaguucuu

SEQ ID NO: 1226 - RNA, 20 nt, Artificial Sequence
  Guide RNA
auugcgaaugaugucaggga

SEQ ID NO: 1227 - RNA, 20 nt, Artificial Sequence
  Guide RNA
cagggaaauuaacagcagaa

SEQ ID NO: 1228 - RNA, 20 nt, Artificial Sequence
  Guide RNA
cgaaugaugucagggaaauu

SEQ ID NO: 1229 - RNA, 20 nt, Artificial Sequence
  Guide RNA
cugcuguuaauuucccugac

SEQ ID NO: 1230 - RNA, 20 nt, Artificial Sequence
  Guide RNA
cuguuaauuucccugacauc

SEQ ID NO: 1231 - RNA, 20 nt, Artificial Sequence
  Guide RNA
cuuucugcuguuaauuuccc

SEQ ID NO: 1232 - RNA, 20 nt, Artificial Sequence
  Guide RNA
gaaagaacuuucugcuguua

SEQ ID NO: 1233 - RNA, 20 nt, Artificial Sequence
  Guide RNA
gaaauuaacagcagaaaguu

SEQ ID NO: 1234 - RNA, 20 nt, Artificial Sequence
  Guide RNA
gaacuuucugcuguuaauuu

SEQ ID NO: 1235 - RNA, 20 nt, Artificial Sequence
  Guide RNA
gaagaaagaacuuucugcug

SEQ ID NO: 1236 - RNA, 20 nt, Artificial Sequence
  Guide RNA
gaaugaugucagggaaauua

SEQ ID NO: 1237 - RNA, 20 nt, Artificial Sequence
  Guide RNA
gaugucagggaaauuaacag

SEQ ID NO: 1238 - RNA, 20 nt, Artificial Sequence
  Guide RNA
gcgaaugaugucagggaaau

SEQ ID NO: 1239 - RNA, 20 nt, Artificial Sequence
  Guide RNA
gcuguuaauuucccugacau

SEQ ID NO: 1240 - RNA, 20 nt, Artificial Sequence
  Guide RNA
ggaaauuaacagcagaaagu

SEQ ID NO: 1241 - RNA, 20 nt, Artificial Sequence
  Guide RNA
gggaaauuaacagcagaaag

SEQ ID NO: 1242 - RNA, 20 nt, Artificial Sequence
  Guide RNA
gucagggaaauuaacagcag

SEQ ID NO: 1243 - RNA, 20 nt, Artificial Sequence
  Guide RNA
guuaauuucccugacaucau

SEQ ID NO: 1244 - RNA, 20 nt, Artificial Sequence
  Guide RNA
uaauuucccugacaucauuc

SEQ ID NO: 1245 - RNA, 20 nt, Artificial Sequence
  Guide RNA
ucagggaaauuaacagcaga

SEQ ID NO: 1246 - RNA, 20 nt, Artificial Sequence
  Guide RNA
ucugcuguuaauuucccuga

SEQ ID NO: 1247 - RNA, 20 nt, Artificial Sequence
  Guide RNA
ugaugucagggaaauuaaca

SEQ ID NO: 1248 - RNA, 20 nt, Artificial Sequence
  Guide RNA
ugcgaaugaugucagggaaa

SEQ ID NO: 1249 - RNA, 20 nt, Artificial Sequence
  Guide RNA
ugcuguuaauuucccugaca

SEQ ID NO: 1250 - RNA, 20 nt, Artificial Sequence
  Guide RNA
ugucagggaaauuaacagca

SEQ ID NO: 1251 - RNA, 20 nt, Artificial Sequence
  Guide RNA
uguuaauuucccugacauca

SEQ ID NO: 1252 - RNA, 20 nt, Artificial Sequence
  Guide RNA
uuaauuucccugacaucauu

SEQ ID NO: 1253 - RNA, 20 nt, Artificial Sequence
  Guide RNA
uucugcuguuaauuucccug

SEQ ID NO: 1254 - RNA, 20 nt, Artificial Sequence
  Guide RNA
uugcgaaugaugucagggaa

SEQ ID NO: 1255 - RNA, 20 nt, Artificial Sequence
  Guide RNA
uuucugcuguuaauuucccu

SEQ ID NO: 1256 - RNA, 21 nt, Artificial Sequence
  Guide RNA
aacuuucugcuguuaauuucc

SEQ ID NO: 1257 - RNA, 21 nt, Artificial Sequence
  Guide RNA
aagaaagaacuuucugcuguu

SEQ ID NO: 1258 - RNA, 21 nt, Artificial Sequence
  Guide RNA
aaugaugucagggaaauuaac

SEQ ID NO: 1259 - RNA, 21 nt, Artificial Sequence
  Guide RNA
aauugcgaaugaugucaggga

SEQ ID NO: 1260 - RNA, 21 nt, Artificial Sequence
  Guide RNA
aauuucccugacaucauucgc

SEQ ID NO: 1261 - RNA, 21 nt, Artificial Sequence
  Guide RNA
acuuucugcuguuaauuuccc

SEQ ID NO: 1262 - RNA, 21 nt, Artificial Sequence
  Guide RNA
agaaagaacuuucugcuguua

SEQ ID NO: 1263 - RNA, 21 nt, Artificial Sequence
  Guide RNA
agggaaauuaacagcagaaag

SEQ ID NO: 1264 - RNA, 21 nt, Artificial Sequence
  Guide RNA
augaugucagggaaauuaaca

SEQ ID NO: 1265 - RNA, 21 nt, Artificial Sequence
  Guide RNA
augucagggaaauuaacagca

SEQ ID NO: 1266 - RNA, 21 nt, Artificial Sequence
  Guide RNA
auugcgaaugaugucagggaa

SEQ ID NO: 1267 - RNA, 21 nt, Artificial Sequence
  Guide RNA
cagggaaauuaacagcagaaa

SEQ ID NO: 1268 - RNA, 21 nt, Artificial Sequence
  Guide RNA
cgaagaaagaacuuucugcug

SEQ ID NO: 1269 - RNA, 21 nt, Artificial Sequence
  Guide RNA
cgaaugaugucagggaaauua

SEQ ID NO: 1270 - RNA, 21 nt, Artificial Sequence
  Guide RNA
cugcuguuaauuucccugaca

SEQ ID NO: 1271 - RNA, 21 nt, Artificial Sequence
  Guide RNA
cuguuaauuucccugacauca

SEQ ID NO: 1272 - RNA, 21 nt, Artificial Sequence
  Guide RNA
cuuucugcuguuaauuucccu

SEQ ID NO: 1273 - RNA, 21 nt, Artificial Sequence
  Guide RNA
gaaagaacuuucugcuguuaa

SEQ ID NO: 1274 - RNA, 21 nt, Artificial Sequence
  Guide RNA
gaaauuaacagcagaaaguuc

SEQ ID NO: 1275 - RNA, 21 nt, Artificial Sequence
  Guide RNA
gaacuuucugcuguuaauuuc

SEQ ID NO: 1276 - RNA, 21 nt, Artificial Sequence
  Guide RNA
gaagaaagaacuuucugcugu

SEQ ID NO: 1277 - RNA, 21 nt, Artificial Sequence
  Guide RNA
gaaugaugucagggaaauuaa

SEQ ID NO: 1278 - RNA, 21 nt, Artificial Sequence
  Guide RNA
gaugucagggaaauuaacagc

SEQ ID NO: 1279 - RNA, 21 nt, Artificial Sequence
  Guide RNA
gcgaaugaugucagggaaauu

SEQ ID NO: 1280 - RNA, 21 nt, Artificial Sequence
  Guide RNA
gcuguuaauuucccugacauc

SEQ ID NO: 1281 - RNA, 21 nt, Artificial Sequence
  Guide RNA
ggaaauuaacagcagaaaguu

SEQ ID NO: 1282 - RNA, 21 nt, Artificial Sequence
  Guide RNA
gggaaauuaacagcagaaagu

SEQ ID NO: 1283 - RNA, 21 nt, Artificial Sequence
  Guide RNA
gucagggaaauuaacagcaga

SEQ ID NO: 1284 - RNA, 21 nt, Artificial Sequence
  Guide RNA
guuaauuucccugacaucauu

SEQ ID NO: 1285 - RNA, 21 nt, Artificial Sequence
  Guide RNA
uaauugcgaaugaugucaggg

SEQ ID NO: 1286 - RNA, 21 nt, Artificial Sequence
  Guide RNA
uaauuucccugacaucauucg

SEQ ID NO: 1287 - RNA, 21 nt, Artificial Sequence
  Guide RNA
ucagggaaauuaacagcagaa

SEQ ID NO: 1288 - RNA, 21 nt, Artificial Sequence
  Guide RNA
ucugcuguuaauuucccugac

SEQ ID NO: 1289 - RNA, 21 nt, Artificial Sequence
  Guide RNA
ugaugucagggaaauuaacag

SEQ ID NO: 1290 - RNA, 21 nt, Artificial Sequence
  Guide RNA
ugcgaaugaugucagggaaau

SEQ ID NO: 1291 - RNA, 21 nt, Artificial Sequence
  Guide RNA
ugcuguuaauuucccugacau

SEQ ID NO: 1292 - RNA, 21 nt, Artificial Sequence
  Guide RNA
ugucagggaaauuaacagcag

SEQ ID NO: 1293 - RNA, 21 nt, Artificial Sequence
  Guide RNA
uguuaauuucccugacaucau

SEQ ID NO: 1294 - RNA, 21 nt, Artificial Sequence
  Guide RNA
uuaauuucccugacaucauuc

SEQ ID NO: 1295 - RNA, 21 nt, Artificial Sequence
  Guide RNA
uucugcuguuaauuucccuga

SEQ ID NO: 1296 - RNA, 21 nt, Artificial Sequence
  Guide RNA
uugcgaaugaugucagggaaa

SEQ ID NO: 1297 - RNA, 21 nt, Artificial Sequence
  Guide RNA
uuucugcuguuaauuucccug

SEQ ID NO: 1298 - RNA, 22 nt, Artificial Sequence
  Guide RNA
aacuuucugcuguuaauuuccc

SEQ ID NO: 1299 - RNA, 22 nt, Artificial Sequence
  Guide RNA
aagaaagaacuuucugcuguua

SEQ ID NO: 1300 - RNA, 22 nt, Artificial Sequence
  Guide RNA
aaugaugucagggaaauuaaca

SEQ ID NO: 1301 - RNA, 22 nt, Artificial Sequence
  Guide RNA
aauugcgaaugaugucagggaa

SEQ ID NO: 1302 - RNA, 22 nt, Artificial Sequence
  Guide RNA
aauuucccugacaucauucgca

SEQ ID NO: 1303 - RNA, 22 nt, Artificial Sequence
  Guide RNA
acgaagaaagaacuuucugcug

SEQ ID NO: 1304 - RNA, 22 nt, Artificial Sequence
  Guide RNA
acuuucugcuguuaauuucccu

SEQ ID NO: 1305 - RNA, 22 nt, Artificial Sequence
  Guide RNA
agaaagaacuuucugcuguuaa

SEQ ID NO: 1306 - RNA, 22 nt, Artificial Sequence
  Guide RNA
agaacuuucugcuguuaauuuc

SEQ ID NO: 1307 - RNA, 22 nt, Artificial Sequence
  Guide RNA
agggaaauuaacagcagaaagu

SEQ ID NO: 1308 - RNA, 22 nt, Artificial Sequence
  Guide RNA
augaugucagggaaauuaacag

SEQ ID NO: 1309 - RNA, 22 nt, Artificial Sequence
  Guide RNA
augucagggaaauuaacagcag

SEQ ID NO: 1310 - RNA, 22 nt, Artificial Sequence
  Guide RNA
auuaacagcagaaaguucuuuc

SEQ ID NO: 1311 - RNA, 22 nt, Artificial Sequence
  Guide RNA
auugcgaaugaugucagggaaa

SEQ ID NO: 1312 - RNA, 22 nt, Artificial Sequence
  Guide RNA
cagggaaauuaacagcagaaag

SEQ ID NO: 1313 - RNA, 22 nt, Artificial Sequence
  Guide RNA
cgaagaaagaacuuucugcugu

SEQ ID NO: 1314 - RNA, 22 nt, Artificial Sequence
  Guide RNA
cgaaugaugucagggaaauuaa

SEQ ID NO: 1315 - RNA, 22 nt, Artificial Sequence
  Guide RNA
cugcuguuaauuucccugacau

SEQ ID NO: 1316 - RNA, 22 nt, Artificial Sequence
  Guide RNA
cuguuaauuucccugacaucau

SEQ ID NO: 1317 - RNA, 22 nt, Artificial Sequence
  Guide RNA
cuuucugcuguuaauuucccug

SEQ ID NO: 1318 - RNA, 22 nt, Artificial Sequence
  Guide RNA
gaaagaacuuucugcuguuaau

SEQ ID NO: 1319 - RNA, 22 nt, Artificial Sequence
  Guide RNA
gaaauuaacagcagaaaguucu

SEQ ID NO: 1320 - RNA, 22 nt, Artificial Sequence
  Guide RNA
gaacuuucugcuguuaauuucc

SEQ ID NO: 1321 - RNA, 22 nt, Artificial Sequence
  Guide RNA
gaagaaagaacuuucugcuguu

SEQ ID NO: 1322 - RNA, 22 nt, Artificial Sequence
  Guide RNA
gaaugaugucagggaaauuaac

SEQ ID NO: 1323 - RNA, 22 nt, Artificial Sequence
  Guide RNA
gaugucagggaaauuaacagca

SEQ ID NO: 1324 - RNA, 22 nt, Artificial Sequence
  Guide RNA
gcgaaugaugucagggaaauua

SEQ ID NO: 1325 - RNA, 22 nt, Artificial Sequence
  Guide RNA
gcuguuaauuucccugacauca

SEQ ID NO: 1326 - RNA, 22 nt, Artificial Sequence
  Guide RNA
ggaaauuaacagcagaaaguuc

SEQ ID NO: 1327 - RNA, 22 nt, Artificial Sequence
  Guide RNA
gggaaauuaacagcagaaaguu

SEQ ID NO: 1328 - RNA, 22 nt, Artificial Sequence
  Guide RNA
guaauugcgaaugaugucaggg

SEQ ID NO: 1329 - RNA, 22 nt, Artificial Sequence
  Guide RNA
gucagggaaauuaacagcagaa

SEQ ID NO: 1330 - RNA, 22 nt, Artificial Sequence
  Guide RNA
guuaauuucccugacaucauuc

SEQ ID NO: 1331 - RNA, 22 nt, Artificial Sequence
  Guide RNA
uaauugcgaaugaugucaggga

SEQ ID NO: 1332 - RNA, 22 nt, Artificial Sequence
  Guide RNA
uaauuucccugacaucauucgc

SEQ ID NO: 1333 - RNA, 22 nt, Artificial Sequence
  Guide RNA
ucagggaaauuaacagcagaaa

SEQ ID NO: 1334 - RNA, 22 nt, Artificial Sequence
  Guide RNA
ucugcuguuaauuucccugaca

SEQ ID NO: 1335 - RNA, 22 nt, Artificial Sequence
  Guide RNA
ugaugucagggaaauuaacagc

SEQ ID NO: 1336 - RNA, 22 nt, Artificial Sequence
  Guide RNA
ugcgaaugaugucagggaaauu

SEQ ID NO: 1337 - RNA, 22 nt, Artificial Sequence
  Guide RNA
ugcuguuaauuucccugacauc

SEQ ID NO: 1338 - RNA, 22 nt, Artificial Sequence
  Guide RNA
ugucagggaaauuaacagcaga

SEQ ID NO: 1339 - RNA, 22 nt, Artificial Sequence
  Guide RNA
uguuaauuucccugacaucauu

SEQ ID NO: 1340 - RNA, 22 nt, Artificial Sequence
  Guide RNA
uuaauuucccugacaucauucg

SEQ ID NO: 1341 - RNA, 22 nt, Artificial Sequence
  Guide RNA
uucugcuguuaauuucccugac

SEQ ID NO: 1342 - RNA, 22 nt, Artificial Sequence
  Guide RNA
uugcgaaugaugucagggaaau

SEQ ID NO: 1343 - RNA, 22 nt, Artificial Sequence
  Guide RNA
uuucugcuguuaauuucccuga

SEQ ID NO: 1344 - RNA, 20 nt, Artificial Sequence
  Guide RNA
aaaguaacagcagaaaguuc

SEQ ID NO: 1345 - RNA, 20 nt, Artificial Sequence
  Guide RNA
aaaguucuuccuucguguag

SEQ ID NO: 1346 - RNA, 20 nt, Artificial Sequence
  Guide RNA
aacagcagaaaguucuuccu

SEQ ID NO: 1347 - RNA, 20 nt, Artificial Sequence
  Guide RNA
aacccuacacgaaggaagaa

SEQ ID NO: 1348 - RNA, 20 nt, Artificial Sequence
  Guide RNA
aaggaagaacuuucugcugu

SEQ ID NO: 1349 - RNA, 20 nt, Artificial Sequence
  Guide RNA
aaguaacagcagaaaguucu

SEQ ID NO: 1350 - RNA, 20 nt, Artificial Sequence
  Guide RNA
aaguucuuccuucguguagg

SEQ ID NO: 1351 - RNA, 20 nt, Artificial Sequence
  Guide RNA
acacgaaggaagaacuuucu

SEQ ID NO: 1352 - RNA, 20 nt, Artificial Sequence
  Guide RNA
acagcagaaaguucuuccuu

SEQ ID NO: 1353 - RNA, 20 nt, Artificial Sequence
  Guide RNA
acccuacacgaaggaagaac

SEQ ID NO: 1354 - RNA, 20 nt, Artificial Sequence
  Guide RNA
acgaaggaagaacuuucugc

SEQ ID NO: 1355 - RNA, 20 nt, Artificial Sequence
  Guide RNA
agaaaguucuuccuucgugu

SEQ ID NO: 1356 - RNA, 20 nt, Artificial Sequence
  Guide RNA
agcagaaaguucuuccuucg

SEQ ID NO: 1357 - RNA, 20 nt, Artificial Sequence
  Guide RNA
aggaagaacuuucugcuguu

SEQ ID NO: 1358 - RNA, 20 nt, Artificial Sequence
  Guide RNA
aguaacagcagaaaguucuu

SEQ ID NO: 1359 - RNA, 20 nt, Artificial Sequence
  Guide RNA
aguucuuccuucguguaggg

SEQ ID NO: 1360 - RNA, 20 nt, Artificial Sequence
  Guide RNA
augcgguugaacccuacacg

SEQ ID NO: 1361 - RNA, 20 nt, Artificial Sequence
  Guide RNA
cacgaaggaagaacuuucug

SEQ ID NO: 1362 - RNA, 20 nt, Artificial Sequence
  Guide RNA
cagaaaguucuuccuucgug

SEQ ID NO: 1363 - RNA, 20 nt, Artificial Sequence
  Guide RNA
cagcagaaaguucuuccuuc

SEQ ID NO: 1364 - RNA, 20 nt, Artificial Sequence
  Guide RNA
cccuacacgaaggaagaacu

SEQ ID NO: 1365 - RNA, 20 nt, Artificial Sequence
  Guide RNA
ccuacacgaaggaagaacuu

SEQ ID NO: 1366 - RNA, 20 nt, Artificial Sequence
  Guide RNA
cgaaggaagaacuuucugcu

SEQ ID NO: 1367 - RNA, 20 nt, Artificial Sequence
  Guide RNA
cgguugaacccuacacgaag

SEQ ID NO: 1368 - RNA, 20 nt, Artificial Sequence
  Guide RNA
cuacacgaaggaagaacuuu

SEQ ID NO: 1369 - RNA, 20 nt, Artificial Sequence
  Guide RNA
cuuccuucguguaggguuca

SEQ ID NO: 1370 - RNA, 20 nt, Artificial Sequence
  Guide RNA
gaaaguaacagcagaaaguu

SEQ ID NO: 1371 - RNA, 20 nt, Artificial Sequence
  Guide RNA
gaaaguucuuccuucgugua

SEQ ID NO: 1372 - RNA, 20 nt, Artificial Sequence
  Guide RNA
gaacccuacacgaaggaaga

SEQ ID NO: 1373 - RNA, 20 nt, Artificial Sequence
  Guide RNA
gaaggaagaacuuucugcug

SEQ ID NO: 1374 - RNA, 20 nt, Artificial Sequence
  Guide RNA
gcagaaaguucuuccuucgu

SEQ ID NO: 1375 - RNA, 20 nt, Artificial Sequence
  Guide RNA
gcgguugaacccuacacgaa

SEQ ID NO: 1376 - RNA, 20 nt, Artificial Sequence
  Guide RNA
ggaagaacuuucugcuguua

SEQ ID NO: 1377 - RNA, 20 nt, Artificial Sequence
  Guide RNA
gguugaacccuacacgaagg

SEQ ID NO: 1378 - RNA, 20 nt, Artificial Sequence
  Guide RNA
guaacagcagaaaguucuuc

SEQ ID NO: 1379 - RNA, 20 nt, Artificial Sequence
  Guide RNA
guucuuccuucguguagggu

SEQ ID NO: 1380 - RNA, 20 nt, Artificial Sequence
  Guide RNA
guugaacccuacacgaagga

SEQ ID NO: 1381 - RNA, 20 nt, Artificial Sequence
  Guide RNA
uaacagcagaaaguucuucc

SEQ ID NO: 1382 - RNA, 20 nt, Artificial Sequence
  Guide RNA
uacacgaaggaagaacuuuc

SEQ ID NO: 1383 - RNA, 20 nt, Artificial Sequence
  Guide RNA
uccuucguguaggguucaac

SEQ ID NO: 1384 - RNA, 20 nt, Artificial Sequence
  Guide RNA
ucuuccuucguguaggguuc

SEQ ID NO: 1385 - RNA, 20 nt, Artificial Sequence
  Guide RNA
ugaacccuacacgaaggaag

SEQ ID NO: 1386 - RNA, 20 nt, Artificial Sequence
  Guide RNA
ugcgguugaacccuacacga

SEQ ID NO: 1387 - RNA, 20 nt, Artificial Sequence
  Guide RNA
uuccuucguguaggguucaa

SEQ ID NO: 1388 - RNA, 20 nt, Artificial Sequence
  Guide RNA
uucuuccuucguguaggguu

SEQ ID NO: 1389 - RNA, 20 nt, Artificial Sequence
  Guide RNA
uugaacccuacacgaaggaa

SEQ ID NO: 1390 - RNA, 21 nt, Artificial Sequence
  Guide RNA
aaaguaacagcagaaaguucu

SEQ ID NO: 1391 - RNA, 21 nt, Artificial Sequence
  Guide RNA
aaaguucuuccuucguguagg

SEQ ID NO: 1392 - RNA, 21 nt, Artificial Sequence
  Guide RNA
aacagcagaaaguucuuccuu

SEQ ID NO: 1393 - RNA, 21 nt, Artificial Sequence
  Guide RNA
aacccuacacgaaggaagaac

SEQ ID NO: 1394 - RNA, 21 nt, Artificial Sequence
  Guide RNA
aaggaagaacuuucugcuguu

SEQ ID NO: 1395 - RNA, 21 nt, Artificial Sequence
  Guide RNA
aaguaacagcagaaaguucuu

SEQ ID NO: 1396 - RNA, 21 nt, Artificial Sequence
  Guide RNA
aaguucuuccuucguguaggg

SEQ ID NO: 1397 - RNA, 21 nt, Artificial Sequence
  Guide RNA
acacgaaggaagaacuuucug

SEQ ID NO: 1398 - RNA, 21 nt, Artificial Sequence
  Guide RNA
acagcagaaaguucuuccuuc

SEQ ID NO: 1399 - RNA, 21 nt, Artificial Sequence
  Guide RNA
acccuacacgaaggaagaacu

SEQ ID NO: 1400 - RNA, 21 nt, Artificial Sequence
  Guide RNA
acgaaggaagaacuuucugcu

SEQ ID NO: 1401 - RNA, 21 nt, Artificial Sequence
  Guide RNA
agaaaguucuuccuucgugua

SEQ ID NO: 1402 - RNA, 21 nt, Artificial Sequence
  Guide RNA
agcagaaaguucuuccuucgu

SEQ ID NO: 1403 - RNA, 21 nt, Artificial Sequence
  Guide RNA
aggaagaacuuucugcuguua

SEQ ID NO: 1404 - RNA, 21 nt, Artificial Sequence
  Guide RNA
aguaacagcagaaaguucuuc

SEQ ID NO: 1405 - RNA, 21 nt, Artificial Sequence
  Guide RNA
aguucuuccuucguguagggu

SEQ ID NO: 1406 - RNA, 21 nt, Artificial Sequence
  Guide RNA
augcgguugaacccuacacga

SEQ ID NO: 1407 - RNA, 21 nt, Artificial Sequence
  Guide RNA
cacgaaggaagaacuuucugc

SEQ ID NO: 1408 - RNA, 21 nt, Artificial Sequence
  Guide RNA
cagaaaguucuuccuucgugu

SEQ ID NO: 1409 - RNA, 21 nt, Artificial Sequence
  Guide RNA
cagcagaaaguucuuccuucg

SEQ ID NO: 1410 - RNA, 21 nt, Artificial Sequence
  Guide RNA
caugcgguugaacccuacacg

SEQ ID NO: 1411 - RNA, 21 nt, Artificial Sequence
  Guide RNA
cccuacacgaaggaagaacuu

SEQ ID NO: 1412 - RNA, 21 nt, Artificial Sequence
  Guide RNA
ccuacacgaaggaagaacuuu

SEQ ID NO: 1413 - RNA, 21 nt, Artificial Sequence
  Guide RNA
cgaaggaagaacuuucugcug

SEQ ID NO: 1414 - RNA, 21 nt, Artificial Sequence
  Guide RNA
cgguugaacccuacacgaagg

SEQ ID NO: 1415 - RNA, 21 nt, Artificial Sequence
  Guide RNA
cuacacgaaggaagaacuuuc

SEQ ID NO: 1416 - RNA, 21 nt, Artificial Sequence
  Guide RNA
cuuccuucguguaggguucaa

SEQ ID NO: 1417 - RNA, 21 nt, Artificial Sequence
  Guide RNA
gaaaguaacagcagaaaguuc

SEQ ID NO: 1418 - RNA, 21 nt, Artificial Sequence
  Guide RNA
gaaaguucuuccuucguguag

SEQ ID NO: 1419 - RNA, 21 nt, Artificial Sequence
  Guide RNA
gaacccuacacgaaggaagaa

SEQ ID NO: 1420 - RNA, 21 nt, Artificial Sequence
  Guide RNA
gaaggaagaacuuucugcugu

SEQ ID NO: 1421 - RNA, 21 nt, Artificial Sequence
  Guide RNA
gcagaaaguucuuccuucgug

SEQ ID NO: 1422 - RNA, 21 nt, Artificial Sequence
  Guide RNA
gcgguugaacccuacacgaag

SEQ ID NO: 1423 - RNA, 21 nt, Artificial Sequence
  Guide RNA
ggaaaguaacagcagaaaguu

SEQ ID NO: 1424 - RNA, 21 nt, Artificial Sequence
  Guide RNA
ggaagaacuuucugcuguuac

SEQ ID NO: 1425 - RNA, 21 nt, Artificial Sequence
  Guide RNA
gguugaacccuacacgaagga

SEQ ID NO: 1426 - RNA, 21 nt, Artificial Sequence
  Guide RNA
guaacagcagaaaguucuucc

SEQ ID NO: 1427 - RNA, 21 nt, Artificial Sequence
  Guide RNA
guucuuccuucguguaggguu

SEQ ID NO: 1428 - RNA, 21 nt, Artificial Sequence
  Guide RNA
guugaacccuacacgaaggaa

SEQ ID NO: 1429 - RNA, 21 nt, Artificial Sequence
  Guide RNA
uaacagcagaaaguucuuccu

SEQ ID NO: 1430 - RNA, 21 nt, Artificial Sequence
  Guide RNA
uacacgaaggaagaacuuucu

SEQ ID NO: 1431 - RNA, 21 nt, Artificial Sequence
  Guide RNA
uccuucguguaggguucaacc

SEQ ID NO: 1432 - RNA, 21 nt, Artificial Sequence
  Guide RNA
ucuuccuucguguaggguuca

SEQ ID NO: 1433 - RNA, 21 nt, Artificial Sequence
  Guide RNA
ugaacccuacacgaaggaaga

SEQ ID NO: 1434 - RNA, 21 nt, Artificial Sequence
  Guide RNA
ugcgguugaacccuacacgaa

SEQ ID NO: 1435 - RNA, 21 nt, Artificial Sequence
  Guide RNA
uuccuucguguaggguucaac

SEQ ID NO: 1436 - RNA, 21 nt, Artificial Sequence
  Guide RNA
uucuuccuucguguaggguuc

SEQ ID NO: 1437 - RNA, 21 nt, Artificial Sequence
  Guide RNA
uugaacccuacacgaaggaag

SEQ ID NO: 1438 - RNA, 22 nt, Artificial Sequence
  Guide RNA
aaaguaacagcagaaaguucuu

SEQ ID NO: 1439 - RNA, 22 nt, Artificial Sequence
  Guide RNA
aaaguucuuccuucguguaggg

SEQ ID NO: 1440 - RNA, 22 nt, Artificial Sequence
  Guide RNA
aacagcagaaaguucuuccuuc

SEQ ID NO: 1441 - RNA, 22 nt, Artificial Sequence
  Guide RNA
aacccuacacgaaggaagaacu

SEQ ID NO: 1442 - RNA, 22 nt, Artificial Sequence
  Guide RNA
aaggaagaacuuucugcuguua

SEQ ID NO: 1443 - RNA, 22 nt, Artificial Sequence
  Guide RNA
aaguaacagcagaaaguucuuc

SEQ ID NO: 1444 - RNA, 22 nt, Artificial Sequence
  Guide RNA
aaguucuuccuucguguagggu

SEQ ID NO: 1445 - RNA, 22 nt, Artificial Sequence
  Guide RNA
acacgaaggaagaacuuucugc

SEQ ID NO: 1446 - RNA, 22 nt, Artificial Sequence
  Guide RNA
acagcagaaaguucuuccuucg

SEQ ID NO: 1447 - RNA, 22 nt, Artificial Sequence
  Guide RNA
acccuacacgaaggaagaacuu

SEQ ID NO: 1448 - RNA, 22 nt, Artificial Sequence
  Guide RNA
acgaaggaagaacuuucugcug

SEQ ID NO: 1449 - RNA, 22 nt, Artificial Sequence
  Guide RNA
agaaaguucuuccuucguguag

SEQ ID NO: 1450 - RNA, 22 nt, Artificial Sequence
  Guide RNA
agcagaaaguucuuccuucgug

SEQ ID NO: 1451 - RNA, 22 nt, Artificial Sequence
  Guide RNA
aggaagaacuuucugcuguuac

SEQ ID NO: 1452 - RNA, 22 nt, Artificial Sequence
  Guide RNA
aguaacagcagaaaguucuucc

SEQ ID NO: 1453 - RNA, 22 nt, Artificial Sequence
  Guide RNA
aguucuuccuucguguaggguu

SEQ ID NO: 1454 - RNA, 22 nt, Artificial Sequence
  Guide RNA
augcgguugaacccuacacgaa

SEQ ID NO: 1455 - RNA, 22 nt, Artificial Sequence
  Guide RNA
cacgaaggaagaacuuucugcu

SEQ ID NO: 1456 - RNA, 22 nt, Artificial Sequence
  Guide RNA
cagaaaguucuuccuucgugua

SEQ ID NO: 1457 - RNA, 22 nt, Artificial Sequence
  Guide RNA
cagcagaaaguucuuccuucgu

SEQ ID NO: 1458 - RNA, 22 nt, Artificial Sequence
  Guide RNA
caugcgguugaacccuacacga

SEQ ID NO: 1459 - RNA, 22 nt, Artificial Sequence
  Guide RNA
ccaugcgguugaacccuacacg

SEQ ID NO: 1460 - RNA, 22 nt, Artificial Sequence
  Guide RNA
cccuacacgaaggaagaacuuu

SEQ ID NO: 1461 - RNA, 22 nt, Artificial Sequence
  Guide RNA
ccuacacgaaggaagaacuuuc

SEQ ID NO: 1462 - RNA, 22 nt, Artificial Sequence
  Guide RNA
cgaaggaagaacuuucugcugu

SEQ ID NO: 1463 - RNA, 22 nt, Artificial Sequence
  Guide RNA
cgguugaacccuacacgaagga

SEQ ID NO: 1464 - RNA, 22 nt, Artificial Sequence
  Guide RNA
cuacacgaaggaagaacuuucu

SEQ ID NO: 1465 - RNA, 22 nt, Artificial Sequence
  Guide RNA
cuuccuucguguaggguucaac

SEQ ID NO: 1466 - RNA, 22 nt, Artificial Sequence
  Guide RNA
gaaaguaacagcagaaaguucu

SEQ ID NO: 1467 - RNA, 22 nt, Artificial Sequence
  Guide RNA
gaaaguucuuccuucguguagg

SEQ ID NO: 1468 - RNA, 22 nt, Artificial Sequence
  Guide RNA
gaacccuacacgaaggaagaac

SEQ ID NO: 1469 - RNA, 22 nt, Artificial Sequence
  Guide RNA
gaaggaagaacuuucugcuguu

SEQ ID NO: 1470 - RNA, 22 nt, Artificial Sequence
  Guide RNA
gcagaaaguucuuccuucgugu

SEQ ID NO: 1471 - RNA, 22 nt, Artificial Sequence
  Guide RNA
gcgguugaacccuacacgaagg

SEQ ID NO: 1472 - RNA, 22 nt, Artificial Sequence
  Guide RNA
ggaaaguaacagcagaaaguuc

SEQ ID NO: 1473 - RNA, 22 nt, Artificial Sequence
  Guide RNA
ggaagaacuuucugcuguuacu

SEQ ID NO: 1474 - RNA, 22 nt, Artificial Sequence
  Guide RNA
gggaaaguaacagcagaaaguu

SEQ ID NO: 1475 - RNA, 22 nt, Artificial Sequence
  Guide RNA
gguugaacccuacacgaaggaa

SEQ ID NO: 1476 - RNA, 22 nt, Artificial Sequence
  Guide RNA
guaacagcagaaaguucuuccu

SEQ ID NO: 1477 - RNA, 22 nt, Artificial Sequence
  Guide RNA
guucuuccuucguguaggguuc

SEQ ID NO: 1478 - RNA, 22 nt, Artificial Sequence
  Guide RNA
guugaacccuacacgaaggaag

SEQ ID NO: 1479 - RNA, 22 nt, Artificial Sequence
  Guide RNA
uaacagcagaaaguucuuccuu

SEQ ID NO: 1480 - RNA, 22 nt, Artificial Sequence
  Guide RNA
uacacgaaggaagaacuuucug

SEQ ID NO: 1481 - RNA, 22 nt, Artificial Sequence
  Guide RNA
uccuucguguaggguucaaccg

SEQ ID NO: 1482 - RNA, 22 nt, Artificial Sequence
  Guide RNA
ucuuccuucguguaggguucaa

SEQ ID NO: 1483 - RNA, 22 nt, Artificial Sequence
  Guide RNA
ugaacccuacacgaaggaagaa

SEQ ID NO: 1484 - RNA, 22 nt, Artificial Sequence
  Guide RNA
ugcgguugaacccuacacgaag

SEQ ID NO: 1485 - RNA, 22 nt, Artificial Sequence
  Guide RNA
uuccuucguguaggguucaacc

SEQ ID NO: 1486 - RNA, 22 nt, Artificial Sequence
  Guide RNA
uucuuccuucguguaggguuca

SEQ ID NO: 1487 - RNA, 22 nt, Artificial Sequence
  Guide RNA
uugaacccuacacgaaggaaga

SEQ ID NO: 1488 - RNA, 20 nt, Artificial Sequence
  Guide RNA
aaccgcagcgggaagguccc

SEQ ID NO: 1489 - RNA, 20 nt, Artificial Sequence
  Guide RNA
accagcagccggggaccuuc

SEQ ID NO: 1490 - RNA, 20 nt, Artificial Sequence
  Guide RNA
accgcagcgggaaggucccc

SEQ ID NO: 1491 - RNA, 20 nt, Artificial Sequence
  Guide RNA
accuucccgcugcgguucag

SEQ ID NO: 1492 - RNA, 20 nt, Artificial Sequence
  Guide RNA
acugaaccgcagcgggaagg

SEQ ID NO: 1493 - RNA, 20 nt, Artificial Sequence
  Guide RNA
agcagccggggaccuucccg

SEQ ID NO: 1494 - RNA, 20 nt, Artificial Sequence
  Guide RNA
agccggggaccuucccgcug

SEQ ID NO: 1495 - RNA, 20 nt, Artificial Sequence
  Guide RNA
agcgggaagguccccggcug

SEQ ID NO: 1496 - RNA, 20 nt, Artificial Sequence
  Guide RNA
agcucucacugaaccgcagc

SEQ ID NO: 1497 - RNA, 20 nt, Artificial Sequence
  Guide RNA
cacugaaccgcagcgggaag

SEQ ID NO: 1498 - RNA, 20 nt, Artificial Sequence
  Guide RNA
cagcagccggggaccuuccc

SEQ ID NO: 1499 - RNA, 20 nt, Artificial Sequence
  Guide RNA
cagccggggaccuucccgcu

SEQ ID NO: 1500 - RNA, 20 nt, Artificial Sequence
  Guide RNA
cagcgggaagguccccggcu

SEQ ID NO: 1501 - RNA, 20 nt, Artificial Sequence
  Guide RNA
ccagcagccggggaccuucc

SEQ ID NO: 1502 - RNA, 20 nt, Artificial Sequence
  Guide RNA
cccgcugcgguucagugaga

SEQ ID NO: 1503 - RNA, 20 nt, Artificial Sequence
  Guide RNA
ccgcagcgggaagguccccg

SEQ ID NO: 1504 - RNA, 20 nt, Artificial Sequence
  Guide RNA
ccgcugcgguucagugagag

SEQ ID NO: 1505 - RNA, 20 nt, Artificial Sequence
  Guide RNA
ccggggaccuucccgcugcg

SEQ ID NO: 1506 - RNA, 20 nt, Artificial Sequence
  Guide RNA
ccuucccgcugcgguucagu

SEQ ID NO: 1507 - RNA, 20 nt, Artificial Sequence
  Guide RNA
cgcagcgggaagguccccgg

SEQ ID NO: 1508 - RNA, 20 nt, Artificial Sequence
  Guide RNA
cgggaagguccccggcugcu

SEQ ID NO: 1509 - RNA, 20 nt, Artificial Sequence
  Guide RNA
cggggaccuucccgcugcgg

SEQ ID NO: 1510 - RNA, 20 nt, Artificial Sequence
  Guide RNA
cucacugaaccgcagcggga

SEQ ID NO: 1511 - RNA, 20 nt, Artificial Sequence
  Guide RNA
cucucacugaaccgcagcgg

SEQ ID NO: 1512 - RNA, 20 nt, Artificial Sequence
  Guide RNA
cugaaccgcagcgggaaggu

SEQ ID NO: 1513 - RNA, 20 nt, Artificial Sequence
  Guide RNA
cuucccgcugcgguucagug

SEQ ID NO: 1514 - RNA, 20 nt, Artificial Sequence
  Guide RNA
gaaccgcagcgggaaggucc

SEQ ID NO: 1515 - RNA, 20 nt, Artificial Sequence
  Guide RNA
gaccagcagccggggaccuu

SEQ ID NO: 1516 - RNA, 20 nt, Artificial Sequence
  Guide RNA
gaccuucccgcugcgguuca

SEQ ID NO: 1517 - RNA, 20 nt, Artificial Sequence
  Guide RNA
gagcucucacugaaccgcag

SEQ ID NO: 1518 - RNA, 20 nt, Artificial Sequence
  Guide RNA
gcagccggggaccuucccgc

SEQ ID NO: 1519 - RNA, 20 nt, Artificial Sequence
  Guide RNA
gcagcgggaagguccccggc

SEQ ID NO: 1520 - RNA, 20 nt, Artificial Sequence
  Guide RNA
gccggggaccuucccgcugc

SEQ ID NO: 1521 - RNA, 20 nt, Artificial Sequence
  Guide RNA
gcgggaagguccccggcugc

SEQ ID NO: 1522 - RNA, 20 nt, Artificial Sequence
  Guide RNA
gcucucacugaaccgcagcg

SEQ ID NO: 1523 - RNA, 20 nt, Artificial Sequence
  Guide RNA
ggaccagcagccggggaccu

SEQ ID NO: 1524 - RNA, 20 nt, Artificial Sequence
  Guide RNA
ggaccuucccgcugcgguuc

SEQ ID NO: 1525 - RNA, 20 nt, Artificial Sequence
  Guide RNA
ggagcucucacugaaccgca

SEQ ID NO: 1526 - RNA, 20 nt, Artificial Sequence
  Guide RNA
gggaccuucccgcugcgguu

SEQ ID NO: 1527 - RNA, 20 nt, Artificial Sequence
  Guide RNA
gggagcucucacugaaccgc

SEQ ID NO: 1528 - RNA, 20 nt, Artificial Sequence
  Guide RNA
ggggaccuucccgcugcggu

SEQ ID NO: 1529 - RNA, 20 nt, Artificial Sequence
  Guide RNA
ucacugaaccgcagcgggaa

SEQ ID NO: 1530 - RNA, 20 nt, Artificial Sequence
  Guide RNA
ucccgcugcgguucagugag

SEQ ID NO: 1531 - RNA, 20 nt, Artificial Sequence
  Guide RNA
ucucacugaaccgcagcggg

SEQ ID NO: 1532 - RNA, 20 nt, Artificial Sequence
  Guide RNA
ugaaccgcagcgggaagguc

SEQ ID NO: 1533 - RNA, 20 nt, Artificial Sequence
  Guide RNA
uucccgcugcgguucaguga

SEQ ID NO: 1534 - RNA, 21 nt, Artificial Sequence
  Guide RNA
aaccgcagcgggaaggucccc

SEQ ID NO: 1535 - RNA, 21 nt, Artificial Sequence
  Guide RNA
accagcagccggggaccuucc

SEQ ID NO: 1536 - RNA, 21 nt, Artificial Sequence
  Guide RNA
accgcagcgggaagguccccg

SEQ ID NO: 1537 - RNA, 21 nt, Artificial Sequence
  Guide RNA
accuucccgcugcgguucagu

SEQ ID NO: 1538 - RNA, 21 nt, Artificial Sequence
  Guide RNA
acugaaccgcagcgggaaggu

SEQ ID NO: 1539 - RNA, 21 nt, Artificial Sequence
  Guide RNA
agcagccggggaccuucccgc

SEQ ID NO: 1540 - RNA, 21 nt, Artificial Sequence
  Guide RNA
agccggggaccuucccgcugc

SEQ ID NO: 1541 - RNA, 21 nt, Artificial Sequence
  Guide RNA
agcgggaagguccccggcugc

SEQ ID NO: 1542 - RNA, 21 nt, Artificial Sequence
  Guide RNA
agcucucacugaaccgcagcg

SEQ ID NO: 1543 - RNA, 21 nt, Artificial Sequence
  Guide RNA
aggaccagcagccggggaccu

SEQ ID NO: 1544 - RNA, 21 nt, Artificial Sequence
  Guide RNA
cacugaaccgcagcgggaagg

SEQ ID NO: 1545 - RNA, 21 nt, Artificial Sequence
  Guide RNA
cagcagccggggaccuucccg

SEQ ID NO: 1546 - RNA, 21 nt, Artificial Sequence
  Guide RNA
cagccggggaccuucccgcug

SEQ ID NO: 1547 - RNA, 21 nt, Artificial Sequence
  Guide RNA
cagcgggaagguccccggcug

SEQ ID NO: 1548 - RNA, 21 nt, Artificial Sequence
  Guide RNA
ccagcagccggggaccuuccc

SEQ ID NO: 1549 - RNA, 21 nt, Artificial Sequence
  Guide RNA
cccgcugcgguucagugagag

SEQ ID NO: 1550 - RNA, 21 nt, Artificial Sequence
  Guide RNA
ccgcugcgguucagugagagc

SEQ ID NO: 1551 - RNA, 21 nt, Artificial Sequence
  Guide RNA
ccuucccgcugcgguucagug

SEQ ID NO: 1552 - RNA, 21 nt, Artificial Sequence
  Guide RNA
cgggaagguccccggcugcug

SEQ ID NO: 1553 - RNA, 21 nt, Artificial Sequence
  Guide RNA
cgggagcucucacugaaccgc

SEQ ID NO: 1554 - RNA, 21 nt, Artificial Sequence
  Guide RNA
cggggaccuucccgcugcggu

SEQ ID NO: 1555 - RNA, 21 nt, Artificial Sequence
  Guide RNA
cucacugaaccgcagcgggaa

SEQ ID NO: 1556 - RNA, 21 nt, Artificial Sequence
  Guide RNA
cucucacugaaccgcagcggg

SEQ ID NO: 1557 - RNA, 21 nt, Artificial Sequence
  Guide RNA
cugaaccgcagcgggaagguc

SEQ ID NO: 1558 - RNA, 21 nt, Artificial Sequence
  Guide RNA
cuucccgcugcgguucaguga

SEQ ID NO: 1559 - RNA, 21 nt, Artificial Sequence
  Guide RNA
gaaccgcagcgggaagguccc

SEQ ID NO: 1560 - RNA, 21 nt, Artificial Sequence
  Guide RNA
gaccagcagccggggaccuuc

SEQ ID NO: 1561 - RNA, 21 nt, Artificial Sequence
  Guide RNA
gaccuucccgcugcgguucag

SEQ ID NO: 1562 - RNA, 21 nt, Artificial Sequence
  Guide RNA
gagcucucacugaaccgcagc

SEQ ID NO: 1563 - RNA, 21 nt, Artificial Sequence
  Guide RNA
gcagccggggaccuucccgcu

SEQ ID NO: 1564 - RNA, 21 nt, Artificial Sequence
  Guide RNA
gcagcgggaagguccccggcu

SEQ ID NO: 1565 - RNA, 21 nt, Artificial Sequence
  Guide RNA
gcgggaagguccccggcugcu

SEQ ID NO: 1566 - RNA, 21 nt, Artificial Sequence
  Guide RNA
gcucucacugaaccgcagcgg

SEQ ID NO: 1567 - RNA, 21 nt, Artificial Sequence
  Guide RNA
ggaccagcagccggggaccuu

SEQ ID NO: 1568 - RNA, 21 nt, Artificial Sequence
  Guide RNA
ggaccuucccgcugcgguuca

SEQ ID NO: 1569 - RNA, 21 nt, Artificial Sequence
  Guide RNA
ggagcucucacugaaccgcag

SEQ ID NO: 1570 - RNA, 21 nt, Artificial Sequence
  Guide RNA
gggaccuucccgcugcgguuc

SEQ ID NO: 1571 - RNA, 21 nt, Artificial Sequence
  Guide RNA
gggagcucucacugaaccgca

SEQ ID NO: 1572 - RNA, 21 nt, Artificial Sequence
  Guide RNA
ggggaccuucccgcugcgguu

SEQ ID NO: 1573 - RNA, 21 nt, Artificial Sequence
  Guide RNA
ucacugaaccgcagcgggaag

SEQ ID NO: 1574 - RNA, 21 nt, Artificial Sequence
  Guide RNA
ucccgcugcgguucagugaga

SEQ ID NO: 1575 - RNA, 21 nt, Artificial Sequence
  Guide RNA
ucucacugaaccgcagcggga

SEQ ID NO: 1576 - RNA, 21 nt, Artificial Sequence
  Guide RNA
ugaaccgcagcgggaaggucc

SEQ ID NO: 1577 - RNA, 21 nt, Artificial Sequence
  Guide RNA
uucccgcugcgguucagugag

SEQ ID NO: 1578 - RNA, 22 nt, Artificial Sequence
  Guide RNA
aaccgcagcgggaagguccccg

SEQ ID NO: 1579 - RNA, 22 nt, Artificial Sequence
  Guide RNA
aaggaccagcagccggggaccu

SEQ ID NO: 1580 - RNA, 22 nt, Artificial Sequence
  Guide RNA
accagcagccggggaccuuccc

SEQ ID NO: 1581 - RNA, 22 nt, Artificial Sequence
  Guide RNA
accgcagcgggaagguccccgg

SEQ ID NO: 1582 - RNA, 22 nt, Artificial Sequence
  Guide RNA
accuucccgcugcgguucagug

SEQ ID NO: 1583 - RNA, 22 nt, Artificial Sequence
  Guide RNA
acugaaccgcagcgggaagguc

SEQ ID NO: 1584 - RNA, 22 nt, Artificial Sequence
  Guide RNA
agcagccggggaccuucccgcu

SEQ ID NO: 1585 - RNA, 22 nt, Artificial Sequence
  Guide RNA
agccggggaccuucccgcugcg

SEQ ID NO: 1586 - RNA, 22 nt, Artificial Sequence
  Guide RNA
agcgggaagguccccggcugcu

SEQ ID NO: 1587 - RNA, 22 nt, Artificial Sequence
  Guide RNA
agcucucacugaaccgcagcgg

SEQ ID NO: 1588 - RNA, 22 nt, Artificial Sequence
  Guide RNA
aggaccagcagccggggaccuu

SEQ ID NO: 1589 - RNA, 22 nt, Artificial Sequence
  Guide RNA
cacugaaccgcagcgggaaggu

SEQ ID NO: 1590 - RNA, 22 nt, Artificial Sequence
  Guide RNA
cagcagccggggaccuucccgc

SEQ ID NO: 1591 - RNA, 22 nt, Artificial Sequence
  Guide RNA
cagccggggaccuucccgcugc

SEQ ID NO: 1592 - RNA, 22 nt, Artificial Sequence
  Guide RNA
cagcgggaagguccccggcugc

SEQ ID NO: 1593 - RNA, 22 nt, Artificial Sequence
  Guide RNA
ccagcagccggggaccuucccg

SEQ ID NO: 1594 - RNA, 22 nt, Artificial Sequence
  Guide RNA
cccgcugcgguucagugagagc

SEQ ID NO: 1595 - RNA, 22 nt, Artificial Sequence
  Guide RNA
ccgcugcgguucagugagagcu

SEQ ID NO: 1596 - RNA, 22 nt, Artificial Sequence
  Guide RNA
ccgggagcucucacugaaccgc

SEQ ID NO: 1597 - RNA, 22 nt, Artificial Sequence
  Guide RNA
ccggggaccuucccgcugcggu

SEQ ID NO: 1598 - RNA, 22 nt, Artificial Sequence
  Guide RNA
ccuucccgcugcgguucaguga

SEQ ID NO: 1599 - RNA, 22 nt, Artificial Sequence
  Guide RNA
cgcagcgggaagguccccggcu

SEQ ID NO: 1600 - RNA, 22 nt, Artificial Sequence
  Guide RNA
cgggaagguccccggcugcugg

SEQ ID NO: 1601 - RNA, 22 nt, Artificial Sequence
  Guide RNA
cgggagcucucacugaaccgca

SEQ ID NO: 1602 - RNA, 22 nt, Artificial Sequence
  Guide RNA
cggggaccuucccgcugcgguu

SEQ ID NO: 1603 - RNA, 22 nt, Artificial Sequence
  Guide RNA
cucacugaaccgcagcgggaag

SEQ ID NO: 1604 - RNA, 22 nt, Artificial Sequence
  Guide RNA
cucucacugaaccgcagcggga

SEQ ID NO: 1605 - RNA, 22 nt, Artificial Sequence
  Guide RNA
cugaaccgcagcgggaaggucc

SEQ ID NO: 1606 - RNA, 22 nt, Artificial Sequence
  Guide RNA
cuucccgcugcgguucagugag

SEQ ID NO: 1607 - RNA, 22 nt, Artificial Sequence
  Guide RNA
gaaccgcagcgggaaggucccc

SEQ ID NO: 1608 - RNA, 22 nt, Artificial Sequence
  Guide RNA
gaccagcagccggggaccuucc

SEQ ID NO: 1609 - RNA, 22 nt, Artificial Sequence
  Guide RNA
gaccuucccgcugcgguucagu

SEQ ID NO: 1610 - RNA, 22 nt, Artificial Sequence
  Guide RNA
gagcucucacugaaccgcagcg

SEQ ID NO: 1611 - RNA, 22 nt, Artificial Sequence
  Guide RNA
gcagccggggaccuucccgcug

SEQ ID NO: 1612 - RNA, 22 nt, Artificial Sequence
  Guide RNA
gcagcgggaagguccccggcug

SEQ ID NO: 1613 - RNA, 22 nt, Artificial Sequence
  Guide RNA
gcgggaagguccccggcugcug

SEQ ID NO: 1614 - RNA, 22 nt, Artificial Sequence
  Guide RNA
gcucucacugaaccgcagcggg

SEQ ID NO: 1615 - RNA, 22 nt, Artificial Sequence
  Guide RNA
ggaccagcagccggggaccuuc

SEQ ID NO: 1616 - RNA, 22 nt, Artificial Sequence
  Guide RNA
ggaccuucccgcugcgguucag

SEQ ID NO: 1617 - RNA, 22 nt, Artificial Sequence
  Guide RNA
ggagcucucacugaaccgcagc

SEQ ID NO: 1618 - RNA, 22 nt, Artificial Sequence
  Guide RNA
gggaccuucccgcugcgguuca

SEQ ID NO: 1619 - RNA, 22 nt, Artificial Sequence
  Guide RNA
gggagcucucacugaaccgcag

SEQ ID NO: 1620 - RNA, 22 nt, Artificial Sequence
  Guide RNA
ggggaccuucccgcugcgguuc

SEQ ID NO: 1621 - RNA, 22 nt, Artificial Sequence
  Guide RNA
ucacugaaccgcagcgggaagg

SEQ ID NO: 1622 - RNA, 22 nt, Artificial Sequence
  Guide RNA
ucccgcugcgguucagugagag

SEQ ID NO: 1623 - RNA, 22 nt, Artificial Sequence
  Guide RNA
ucucacugaaccgcagcgggaa

SEQ ID NO: 1624 - RNA, 22 nt, Artificial Sequence
  Guide RNA
ugaaccgcagcgggaagguccc

SEQ ID NO: 1625 - RNA, 22 nt, Artificial Sequence
  Guide RNA
uucccgcugcgguucagugaga

SEQ ID NO: 1626 - RNA, 20 nt, Artificial Sequence
  Guide RNA
aacagggaacgcucucgcuc

SEQ ID NO: 1627 - RNA, 20 nt, Artificial Sequence
  Guide RNA
aaggagcgagagcguucccu

SEQ ID NO: 1628 - RNA, 20 nt, Artificial Sequence
  Guide RNA
acagggaacgcucucgcucc

SEQ ID NO: 1629 - RNA, 20 nt, Artificial Sequence
  Guide RNA
agagcguucccuguugaagg

SEQ ID NO: 1630 - RNA, 20 nt, Artificial Sequence
  Guide RNA
agcaaggagcgagagcguuc

SEQ ID NO: 1631 - RNA, 20 nt, Artificial Sequence
  Guide RNA
agcgagagcguucccuguug

SEQ ID NO: 1632 - RNA, 20 nt, Artificial Sequence
  Guide RNA
agcguucccuguugaaggac

SEQ ID NO: 1633 - RNA, 20 nt, Artificial Sequence
  Guide RNA
aggagcgagagcguucccug

SEQ ID NO: 1634 - RNA, 20 nt, Artificial Sequence
  Guide RNA
agggaacgcucucgcuccuu

SEQ ID NO: 1635 - RNA, 20 nt, Artificial Sequence
  Guide RNA
aucagcaaggagcgagagcg

SEQ ID NO: 1636 - RNA, 20 nt, Artificial Sequence
  Guide RNA
caacagggaacgcucucgcu

SEQ ID NO: 1637 - RNA, 20 nt, Artificial Sequence
  Guide RNA
caaggagcgagagcguuccc

SEQ ID NO: 1638 - RNA, 20 nt, Artificial Sequence
  Guide RNA
cagcaaggagcgagagcguu

SEQ ID NO: 1639 - RNA, 20 nt, Artificial Sequence
  Guide RNA
cagggaacgcucucgcuccu

SEQ ID NO: 1640 - RNA, 20 nt, Artificial Sequence
  Guide RNA
caucagcaaggagcgagagc

SEQ ID NO: 1641 - RNA, 20 nt, Artificial Sequence
  Guide RNA
ccuucaacagggaacgcucu

SEQ ID NO: 1642 - RNA, 20 nt, Artificial Sequence
  Guide RNA
cgagagcguucccuguugaa

SEQ ID NO: 1643 - RNA, 20 nt, Artificial Sequence
  Guide RNA
cggcugcugguccuucaaca

SEQ ID NO: 1644 - RNA, 20 nt, Artificial Sequence
  Guide RNA
cguucccuguugaaggacca

SEQ ID NO: 1645 - RNA, 20 nt, Artificial Sequence
  Guide RNA
cugcugguccuucaacaggg

SEQ ID NO: 1646 - RNA, 20 nt, Artificial Sequence
  Guide RNA
cugguccuucaacagggaac

SEQ ID NO: 1647 - RNA, 20 nt, Artificial Sequence
  Guide RNA
cuucaacagggaacgcucuc

SEQ ID NO: 1648 - RNA, 20 nt, Artificial Sequence
  Guide RNA
gaacgcucucgcuccuugcu

SEQ ID NO: 1649 - RNA, 20 nt, Artificial Sequence
  Guide RNA
gagagcguucccuguugaag

SEQ ID NO: 1650 - RNA, 20 nt, Artificial Sequence
  Guide RNA
gagcgagagcguucccuguu

SEQ ID NO: 1651 - RNA, 20 nt, Artificial Sequence
  Guide RNA
gagcguucccuguugaagga

SEQ ID NO: 1652 - RNA, 20 nt, Artificial Sequence
  Guide RNA
gcaaggagcgagagcguucc

SEQ ID NO: 1653 - RNA, 20 nt, Artificial Sequence
  Guide RNA
gcgagagcguucccuguuga

SEQ ID NO: 1654 - RNA, 20 nt, Artificial Sequence
  Guide RNA
gcguucccuguugaaggacc

SEQ ID NO: 1655 - RNA, 20 nt, Artificial Sequence
  Guide RNA
gcugcugguccuucaacagg

SEQ ID NO: 1656 - RNA, 20 nt, Artificial Sequence
  Guide RNA
gcugguccuucaacagggaa

SEQ ID NO: 1657 - RNA, 20 nt, Artificial Sequence
  Guide RNA
ggaacgcucucgcuccuugc

SEQ ID NO: 1658 - RNA, 20 nt, Artificial Sequence
  Guide RNA
ggagcgagagcguucccugu

SEQ ID NO: 1659 - RNA, 20 nt, Artificial Sequence
  Guide RNA
ggcugcugguccuucaacag

SEQ ID NO: 1660 - RNA, 20 nt, Artificial Sequence
  Guide RNA
gggaacgcucucgcuccuug

SEQ ID NO: 1661 - RNA, 20 nt, Artificial Sequence
  Guide RNA
gguccuucaacagggaacgc

SEQ ID NO: 1662 - RNA, 20 nt, Artificial Sequence
  Guide RNA
guccuucaacagggaacgcu

SEQ ID NO: 1663 - RNA, 20 nt, Artificial Sequence
  Guide RNA
guucccuguugaaggaccag

SEQ ID NO: 1664 - RNA, 20 nt, Artificial Sequence
  Guide RNA
ucaacagggaacgcucucgc

SEQ ID NO: 1665 - RNA, 20 nt, Artificial Sequence
  Guide RNA
ucagcaaggagcgagagcgu

SEQ ID NO: 1666 - RNA, 20 nt, Artificial Sequence
  Guide RNA
ucaucagcaaggagcgagag

SEQ ID NO: 1667 - RNA, 20 nt, Artificial Sequence
  Guide RNA
uccuucaacagggaacgcuc

SEQ ID NO: 1668 - RNA, 20 nt, Artificial Sequence
  Guide RNA
ugcugguccuucaacaggga

SEQ ID NO: 1669 - RNA, 20 nt, Artificial Sequence
  Guide RNA
ugguccuucaacagggaacg

SEQ ID NO: 1670 - RNA, 20 nt, Artificial Sequence
  Guide RNA
uucaacagggaacgcucucg

SEQ ID NO: 1671 - RNA, 20 nt, Artificial Sequence
  Guide RNA
uucccuguugaaggaccagc

SEQ ID NO: 1672 - RNA, 21 nt, Artificial Sequence
  Guide RNA
aacagggaacgcucucgcucc

SEQ ID NO: 1673 - RNA, 21 nt, Artificial Sequence
  Guide RNA
aaggagcgagagcguucccug

SEQ ID NO: 1674 - RNA, 21 nt, Artificial Sequence
  Guide RNA
acagggaacgcucucgcuccu

SEQ ID NO: 1675 - RNA, 21 nt, Artificial Sequence
  Guide RNA
agagcguucccuguugaagga

SEQ ID NO: 1676 - RNA, 21 nt, Artificial Sequence
  Guide RNA
agcaaggagcgagagcguucc

SEQ ID NO: 1677 - RNA, 21 nt, Artificial Sequence
  Guide RNA
agcgagagcguucccuguuga

SEQ ID NO: 1678 - RNA, 21 nt, Artificial Sequence
  Guide RNA
agcguucccuguugaaggacc

SEQ ID NO: 1679 - RNA, 21 nt, Artificial Sequence
  Guide RNA
aggagcgagagcguucccugu

SEQ ID NO: 1680 - RNA, 21 nt, Artificial Sequence
  Guide RNA
agggaacgcucucgcuccuug

SEQ ID NO: 1681 - RNA, 21 nt, Artificial Sequence
  Guide RNA
aucagcaaggagcgagagcgu

SEQ ID NO: 1682 - RNA, 21 nt, Artificial Sequence
  Guide RNA
caacagggaacgcucucgcuc

SEQ ID NO: 1683 - RNA, 21 nt, Artificial Sequence
  Guide RNA
caaggagcgagagcguucccu

SEQ ID NO: 1684 - RNA, 21 nt, Artificial Sequence
  Guide RNA
cagcaaggagcgagagcguuc

SEQ ID NO: 1685 - RNA, 21 nt, Artificial Sequence
  Guide RNA
cagggaacgcucucgcuccuu

SEQ ID NO: 1686 - RNA, 21 nt, Artificial Sequence
  Guide RNA
caucagcaaggagcgagagcg

SEQ ID NO: 1687 - RNA, 21 nt, Artificial Sequence
  Guide RNA
ccggcugcugguccuucaaca

SEQ ID NO: 1688 - RNA, 21 nt, Artificial Sequence
  Guide RNA
ccuucaacagggaacgcucuc

SEQ ID NO: 1689 - RNA, 21 nt, Artificial Sequence
  Guide RNA
cgagagcguucccuguugaag

SEQ ID NO: 1690 - RNA, 21 nt, Artificial Sequence
  Guide RNA
cggcugcugguccuucaacag

SEQ ID NO: 1691 - RNA, 21 nt, Artificial Sequence
  Guide RNA
cguucccuguugaaggaccag

SEQ ID NO: 1692 - RNA, 21 nt, Artificial Sequence
  Guide RNA
cugcugguccuucaacaggga

SEQ ID NO: 1693 - RNA, 21 nt, Artificial Sequence
  Guide RNA
cugguccuucaacagggaacg

SEQ ID NO: 1694 - RNA, 21 nt, Artificial Sequence
  Guide RNA
cuucaacagggaacgcucucg

SEQ ID NO: 1695 - RNA, 21 nt, Artificial Sequence
  Guide RNA
gaacgcucucgcuccuugcug

SEQ ID NO: 1696 - RNA, 21 nt, Artificial Sequence
  Guide RNA
gagagcguucccuguugaagg

SEQ ID NO: 1697 - RNA, 21 nt, Artificial Sequence
  Guide RNA
gagcgagagcguucccuguug

SEQ ID NO: 1698 - RNA, 21 nt, Artificial Sequence
  Guide RNA
gagcguucccuguugaaggac

SEQ ID NO: 1699 - RNA, 21 nt, Artificial Sequence
  Guide RNA
gcaaggagcgagagcguuccc

SEQ ID NO: 1700 - RNA, 21 nt, Artificial Sequence
  Guide RNA
gcgagagcguucccuguugaa

SEQ ID NO: 1701 - RNA, 21 nt, Artificial Sequence
  Guide RNA
gcguucccuguugaaggacca

SEQ ID NO: 1702 - RNA, 21 nt, Artificial Sequence
  Guide RNA
gcugcugguccuucaacaggg

SEQ ID NO: 1703 - RNA, 21 nt, Artificial Sequence
  Guide RNA
gcugguccuucaacagggaac

SEQ ID NO: 1704 - RNA, 21 nt, Artificial Sequence
  Guide RNA
ggaacgcucucgcuccuugcu

SEQ ID NO: 1705 - RNA, 21 nt, Artificial Sequence
  Guide RNA
ggagcgagagcguucccuguu

SEQ ID NO: 1706 - RNA, 21 nt, Artificial Sequence
  Guide RNA
ggcugcugguccuucaacagg

SEQ ID NO: 1707 - RNA, 21 nt, Artificial Sequence
  Guide RNA
gggaacgcucucgcuccuugc

SEQ ID NO: 1708 - RNA, 21 nt, Artificial Sequence
  Guide RNA
gguccuucaacagggaacgcu

SEQ ID NO: 1709 - RNA, 21 nt, Artificial Sequence
  Guide RNA
guccuucaacagggaacgcuc

SEQ ID NO: 1710 - RNA, 21 nt, Artificial Sequence
  Guide RNA
guucccuguugaaggaccagc

SEQ ID NO: 1711 - RNA, 21 nt, Artificial Sequence
  Guide RNA
ucaacagggaacgcucucgcu

SEQ ID NO: 1712 - RNA, 21 nt, Artificial Sequence
  Guide RNA
ucagcaaggagcgagagcguu

SEQ ID NO: 1713 - RNA, 21 nt, Artificial Sequence
  Guide RNA
ucaucagcaaggagcgagagc

SEQ ID NO: 1714 - RNA, 21 nt, Artificial Sequence
  Guide RNA
uccuucaacagggaacgcucu

SEQ ID NO: 1715 - RNA, 21 nt, Artificial Sequence
  Guide RNA
ugcugguccuucaacagggaa

SEQ ID NO: 1716 - RNA, 21 nt, Artificial Sequence
  Guide RNA
ugguccuucaacagggaacgc

SEQ ID NO: 1717 - RNA, 21 nt, Artificial Sequence
  Guide RNA
uucaacagggaacgcucucgc

SEQ ID NO: 1718 - RNA, 21 nt, Artificial Sequence
  Guide RNA
uucaucagcaaggagcgagag

SEQ ID NO: 1719 - RNA, 21 nt, Artificial Sequence
  Guide RNA
uucccuguugaaggaccagca

SEQ ID NO: 1720 - RNA, 22 nt, Artificial Sequence
  Guide RNA
aacagggaacgcucucgcuccu

SEQ ID NO: 1721 - RNA, 22 nt, Artificial Sequence
  Guide RNA
aaggagcgagagcguucccugu

SEQ ID NO: 1722 - RNA, 22 nt, Artificial Sequence
  Guide RNA
acagggaacgcucucgcuccuu

SEQ ID NO: 1723 - RNA, 22 nt, Artificial Sequence
  Guide RNA
agagcguucccuguugaaggac

SEQ ID NO: 1724 - RNA, 22 nt, Artificial Sequence
  Guide RNA
agcaaggagcgagagcguuccc

SEQ ID NO: 1725 - RNA, 22 nt, Artificial Sequence
  Guide RNA
agcgagagcguucccuguugaa

SEQ ID NO: 1726 - RNA, 22 nt, Artificial Sequence
  Guide RNA
agcguucccuguugaaggacca

SEQ ID NO: 1727 - RNA, 22 nt, Artificial Sequence
  Guide RNA
aggagcgagagcguucccuguu

SEQ ID NO: 1728 - RNA, 22 nt, Artificial Sequence
  Guide RNA
agggaacgcucucgcuccuugc

SEQ ID NO: 1729 - RNA, 22 nt, Artificial Sequence
  Guide RNA
aucagcaaggagcgagagcguu

SEQ ID NO: 1730 - RNA, 22 nt, Artificial Sequence
  Guide RNA
caacagggaacgcucucgcucc

SEQ ID NO: 1731 - RNA, 22 nt, Artificial Sequence
  Guide RNA
caaggagcgagagcguucccug

SEQ ID NO: 1732 - RNA, 22 nt, Artificial Sequence
  Guide RNA
cagcaaggagcgagagcguucc

SEQ ID NO: 1733 - RNA, 22 nt, Artificial Sequence
  Guide RNA
cagggaacgcucucgcuccuug

SEQ ID NO: 1734 - RNA, 22 nt, Artificial Sequence
  Guide RNA
caucagcaaggagcgagagcgu

SEQ ID NO: 1735 - RNA, 22 nt, Artificial Sequence
  Guide RNA
cccggcugcugguccuucaaca

SEQ ID NO: 1736 - RNA, 22 nt, Artificial Sequence
  Guide RNA
ccggcugcugguccuucaacag

SEQ ID NO: 1737 - RNA, 22 nt, Artificial Sequence
  Guide RNA
ccuucaacagggaacgcucucg

SEQ ID NO: 1738 - RNA, 22 nt, Artificial Sequence
  Guide RNA
cgagagcguucccuguugaagg

SEQ ID NO: 1739 - RNA, 22 nt, Artificial Sequence
  Guide RNA
cggcugcugguccuucaacagg

SEQ ID NO: 1740 - RNA, 22 nt, Artificial Sequence
  Guide RNA
cguucccuguugaaggaccagc

SEQ ID NO: 1741 - RNA, 22 nt, Artificial Sequence
  Guide RNA
cugcugguccuucaacagggaa

SEQ ID NO: 1742 - RNA, 22 nt, Artificial Sequence
  Guide RNA
cugguccuucaacagggaacgc

SEQ ID NO: 1743 - RNA, 22 nt, Artificial Sequence
  Guide RNA
cuucaacagggaacgcucucgc

SEQ ID NO: 1744 - RNA, 22 nt, Artificial Sequence
  Guide RNA
cuucaucagcaaggagcgagag

SEQ ID NO: 1745 - RNA, 22 nt, Artificial Sequence
  Guide RNA
gaacgcucucgcuccuugcuga

SEQ ID NO: 1746 - RNA, 22 nt, Artificial Sequence
  Guide RNA
gagagcguucccuguugaagga

SEQ ID NO: 1747 - RNA, 22 nt, Artificial Sequence
  Guide RNA
gagcgagagcguucccuguuga

SEQ ID NO: 1748 - RNA, 22 nt, Artificial Sequence
  Guide RNA
gagcguucccuguugaaggacc

SEQ ID NO: 1749 - RNA, 22 nt, Artificial Sequence
  Guide RNA
gcaaggagcgagagcguucccu

SEQ ID NO: 1750 - RNA, 22 nt, Artificial Sequence
  Guide RNA
gcgagagcguucccuguugaag

SEQ ID NO: 1751 - RNA, 22 nt, Artificial Sequence
  Guide RNA
gcguucccuguugaaggaccag

SEQ ID NO: 1752 - RNA, 22 nt, Artificial Sequence
  Guide RNA
gcugcugguccuucaacaggga

SEQ ID NO: 1753 - RNA, 22 nt, Artificial Sequence
  Guide RNA
gcugguccuucaacagggaacg

SEQ ID NO: 1754 - RNA, 22 nt, Artificial Sequence
  Guide RNA
ggaacgcucucgcuccuugcug

SEQ ID NO: 1755 - RNA, 22 nt, Artificial Sequence
  Guide RNA
ggagcgagagcguucccuguug

SEQ ID NO: 1756 - RNA, 22 nt, Artificial Sequence
  Guide RNA
ggcugcugguccuucaacaggg

SEQ ID NO: 1757 - RNA, 22 nt, Artificial Sequence
  Guide RNA
gggaacgcucucgcuccuugcu

SEQ ID NO: 1758 - RNA, 22 nt, Artificial Sequence
  Guide RNA
gguccuucaacagggaacgcuc

SEQ ID NO: 1759 - RNA, 22 nt, Artificial Sequence
  Guide RNA
guccuucaacagggaacgcucu

SEQ ID NO: 1760 - RNA, 22 nt, Artificial Sequence
  Guide RNA
guucccuguugaaggaccagca

SEQ ID NO: 1761 - RNA, 22 nt, Artificial Sequence
  Guide RNA
ucaacagggaacgcucucgcuc

SEQ ID NO: 1762 - RNA, 22 nt, Artificial Sequence
  Guide RNA
ucagcaaggagcgagagcguuc

SEQ ID NO: 1763 - RNA, 22 nt, Artificial Sequence
  Guide RNA
ucaucagcaaggagcgagagcg

SEQ ID NO: 1764 - RNA, 22 nt, Artificial Sequence
  Guide RNA
uccuucaacagggaacgcucuc

SEQ ID NO: 1765 - RNA, 22 nt, Artificial Sequence
  Guide RNA
ugcugguccuucaacagggaac

SEQ ID NO: 1766 - RNA, 22 nt, Artificial Sequence
  Guide RNA
ugguccuucaacagggaacgcu

SEQ ID NO: 1767 - RNA, 22 nt, Artificial Sequence
  Guide RNA
uucaacagggaacgcucucgcu

SEQ ID NO: 1768 - RNA, 22 nt, Artificial Sequence
  Guide RNA
uucaucagcaaggagcgagagc

SEQ ID NO: 1769 - RNA, 22 nt, Artificial Sequence
  Guide RNA
uucccuguugaaggaccagcag

SEQ ID NO: 1770 - RNA, 20 nt, Artificial Sequence
  Guide RNA
aacagggcacgcucgcuccu

SEQ ID NO: 1771 - RNA, 20 nt, Artificial Sequence
  Guide RNA
aaggagcgagcgugcccugu

SEQ ID NO: 1772 - RNA, 20 nt, Artificial Sequence
  Guide RNA
acagggcacgcucgcuccuu

SEQ ID NO: 1773 - RNA, 20 nt, Artificial Sequence
  Guide RNA
acgcucgcuccuugcugaug

SEQ ID NO: 1774 - RNA, 20 nt, Artificial Sequence
  Guide RNA
agcaaggagcgagcgugccc

SEQ ID NO: 1775 - RNA, 20 nt, Artificial Sequence
  Guide RNA
agcgagcgugcccuguugaa

SEQ ID NO: 1776 - RNA, 20 nt, Artificial Sequence
  Guide RNA
agcgugcccuguugaaggac

SEQ ID NO: 1777 - RNA, 20 nt, Artificial Sequence
  Guide RNA
aggagcgagcgugcccuguu

SEQ ID NO: 1778 - RNA, 20 nt, Artificial Sequence
  Guide RNA
agggcacgcucgcuccuugc

SEQ ID NO: 1779 - RNA, 20 nt, Artificial Sequence
  Guide RNA
aucagcaaggagcgagcgug

SEQ ID NO: 1780 - RNA, 20 nt, Artificial Sequence
  Guide RNA
caacagggcacgcucgcucc

SEQ ID NO: 1781 - RNA, 20 nt, Artificial Sequence
  Guide RNA
caaggagcgagcgugcccug

SEQ ID NO: 1782 - RNA, 20 nt, Artificial Sequence
  Guide RNA
cacgcucgcuccuugcugau

SEQ ID NO: 1783 - RNA, 20 nt, Artificial Sequence
  Guide RNA
cagcaaggagcgagcgugcc

SEQ ID NO: 1784 - RNA, 20 nt, Artificial Sequence
  Guide RNA
cagggcacgcucgcuccuug

SEQ ID NO: 1785 - RNA, 20 nt, Artificial Sequence
  Guide RNA
caucagcaaggagcgagcgu

SEQ ID NO: 1786 - RNA, 20 nt, Artificial Sequence
  Guide RNA
ccuucaacagggcacgcucg

SEQ ID NO: 1787 - RNA, 20 nt, Artificial Sequence
  Guide RNA
cgagcgugcccuguugaagg

SEQ ID NO: 1788 - RNA, 20 nt, Artificial Sequence
  Guide RNA
cgcucgcuccuugcugauga

SEQ ID NO: 1789 - RNA, 20 nt, Artificial Sequence
  Guide RNA
cugguccuucaacagggcac

SEQ ID NO: 1790 - RNA, 20 nt, Artificial Sequence
  Guide RNA
cuucaacagggcacgcucgc

SEQ ID NO: 1791 - RNA, 20 nt, Artificial Sequence
  Guide RNA
cuucaucagcaaggagcgag

SEQ ID NO: 1792 - RNA, 20 nt, Artificial Sequence
  Guide RNA
gagcgagcgugcccuguuga

SEQ ID NO: 1793 - RNA, 20 nt, Artificial Sequence
  Guide RNA
gagcgugcccuguugaagga

SEQ ID NO: 1794 - RNA, 20 nt, Artificial Sequence
  Guide RNA
gcaaggagcgagcgugcccu

SEQ ID NO: 1795 - RNA, 20 nt, Artificial Sequence
  Guide RNA
gcacgcucgcuccuugcuga

SEQ ID NO: 1796 - RNA, 20 nt, Artificial Sequence
  Guide RNA
gcgagcgugcccuguugaag

SEQ ID NO: 1797 - RNA, 20 nt, Artificial Sequence
  Guide RNA
gcgugcccuguugaaggacc

SEQ ID NO: 1798 - RNA, 20 nt, Artificial Sequence
  Guide RNA
gcugguccuucaacagggca

SEQ ID NO: 1799 - RNA, 20 nt, Artificial Sequence
  Guide RNA
gcuucaucagcaaggagcga

SEQ ID NO: 1800 - RNA, 20 nt, Artificial Sequence
  Guide RNA
ggagcgagcgugcccuguug

SEQ ID NO: 1801 - RNA, 20 nt, Artificial Sequence
  Guide RNA
ggcacgcucgcuccuugcug

SEQ ID NO: 1802 - RNA, 20 nt, Artificial Sequence
  Guide RNA
ggcuucaucagcaaggagcg

SEQ ID NO: 1803 - RNA, 20 nt, Artificial Sequence
  Guide RNA
gggcacgcucgcuccuugcu

SEQ ID NO: 1804 - RNA, 20 nt, Artificial Sequence
  Guide RNA
gggcuucaucagcaaggagc

SEQ ID NO: 1805 - RNA, 20 nt, Artificial Sequence
  Guide RNA
gguccuucaacagggcacgc

SEQ ID NO: 1806 - RNA, 20 nt, Artificial Sequence
  Guide RNA
guccuucaacagggcacgcu

SEQ ID NO: 1807 - RNA, 20 nt, Artificial Sequence
  Guide RNA
ucaacagggcacgcucgcuc

SEQ ID NO: 1808 - RNA, 20 nt, Artificial Sequence
  Guide RNA
ucagcaaggagcgagcgugc

SEQ ID NO: 1809 - RNA, 20 nt, Artificial Sequence
  Guide RNA
ucaucagcaaggagcgagcg

SEQ ID NO: 1810 - RNA, 20 nt, Artificial Sequence
  Guide RNA
uccuucaacagggcacgcuc

SEQ ID NO: 1811 - RNA, 20 nt, Artificial Sequence
  Guide RNA
ugcugguccuucaacagggc

SEQ ID NO: 1812 - RNA, 20 nt, Artificial Sequence
  Guide RNA
ugguccuucaacagggcacg

SEQ ID NO: 1813 - RNA, 20 nt, Artificial Sequence
  Guide RNA
uucaacagggcacgcucgcu

SEQ ID NO: 1814 - RNA, 20 nt, Artificial Sequence
  Guide RNA
uucaucagcaaggagcgagc

SEQ ID NO: 1815 - RNA, 21 nt, Artificial Sequence
  Guide RNA
aacagggcacgcucgcuccuu

SEQ ID NO: 1816 - RNA, 21 nt, Artificial Sequence
  Guide RNA
aaggagcgagcgugcccuguu

SEQ ID NO: 1817 - RNA, 21 nt, Artificial Sequence
  Guide RNA
acagggcacgcucgcuccuug

SEQ ID NO: 1818 - RNA, 21 nt, Artificial Sequence
  Guide RNA
acgcucgcuccuugcugauga

SEQ ID NO: 1819 - RNA, 21 nt, Artificial Sequence
  Guide RNA
agcaaggagcgagcgugcccu

SEQ ID NO: 1820 - RNA, 21 nt, Artificial Sequence
  Guide RNA
agcgagcgugcccuguugaag

SEQ ID NO: 1821 - RNA, 21 nt, Artificial Sequence
  Guide RNA
agcgugcccuguugaaggacc

SEQ ID NO: 1822 - RNA, 21 nt, Artificial Sequence
  Guide RNA
aggagcgagcgugcccuguug

SEQ ID NO: 1823 - RNA, 21 nt, Artificial Sequence
  Guide RNA
agggcacgcucgcuccuugcu

SEQ ID NO: 1824 - RNA, 21 nt, Artificial Sequence
  Guide RNA
aucagcaaggagcgagcgugc

SEQ ID NO: 1825 - RNA, 21 nt, Artificial Sequence
  Guide RNA
caacagggcacgcucgcuccu

SEQ ID NO: 1826 - RNA, 21 nt, Artificial Sequence
  Guide RNA
caaggagcgagcgugcccugu

SEQ ID NO: 1827 - RNA, 21 nt, Artificial Sequence
  Guide RNA
cacgcucgcuccuugcugaug

SEQ ID NO: 1828 - RNA, 21 nt, Artificial Sequence
  Guide RNA
cagcaaggagcgagcgugccc

SEQ ID NO: 1829 - RNA, 21 nt, Artificial Sequence
  Guide RNA
cagggcacgcucgcuccuugc

SEQ ID NO: 1830 - RNA, 21 nt, Artificial Sequence
  Guide RNA
caucagcaaggagcgagcgug

SEQ ID NO: 1831 - RNA, 21 nt, Artificial Sequence
  Guide RNA
ccuucaacagggcacgcucgc

SEQ ID NO: 1832 - RNA, 21 nt, Artificial Sequence
  Guide RNA
cgagcgugcccuguugaagga

SEQ ID NO: 1833 - RNA, 21 nt, Artificial Sequence
  Guide RNA
cgcucgcuccuugcugaugaa

SEQ ID NO: 1834 - RNA, 21 nt, Artificial Sequence
  Guide RNA
cugcugguccuucaacagggc

SEQ ID NO: 1835 - RNA, 21 nt, Artificial Sequence
  Guide RNA
cugguccuucaacagggcacg

SEQ ID NO: 1836 - RNA, 21 nt, Artificial Sequence
  Guide RNA
cuucaacagggcacgcucgcu

SEQ ID NO: 1837 - RNA, 21 nt, Artificial Sequence
  Guide RNA
cuucaucagcaaggagcgagc

SEQ ID NO: 1838 - RNA, 21 nt, Artificial Sequence
  Guide RNA
gagcgagcgugcccuguugaa

SEQ ID NO: 1839 - RNA, 21 nt, Artificial Sequence
  Guide RNA
gagcgugcccuguugaaggac

SEQ ID NO: 1840 - RNA, 21 nt, Artificial Sequence
  Guide RNA
gcaaggagcgagcgugcccug

SEQ ID NO: 1841 - RNA, 21 nt, Artificial Sequence
  Guide RNA
gcacgcucgcuccuugcugau

SEQ ID NO: 1842 - RNA, 21 nt, Artificial Sequence
  Guide RNA
gcgagcgugcccuguugaagg

SEQ ID NO: 1843 - RNA, 21 nt, Artificial Sequence
  Guide RNA
gcgugcccuguugaaggacca

SEQ ID NO: 1844 - RNA, 21 nt, Artificial Sequence
  Guide RNA
gcugguccuucaacagggcac

SEQ ID NO: 1845 - RNA, 21 nt, Artificial Sequence
  Guide RNA
gcuucaucagcaaggagcgag

SEQ ID NO: 1846 - RNA, 21 nt, Artificial Sequence
  Guide RNA
ggagcgagcgugcccuguuga

SEQ ID NO: 1847 - RNA, 21 nt, Artificial Sequence
  Guide RNA
ggcacgcucgcuccuugcuga

SEQ ID NO: 1848 - RNA, 21 nt, Artificial Sequence
  Guide RNA
ggcuucaucagcaaggagcga

SEQ ID NO: 1849 - RNA, 21 nt, Artificial Sequence
  Guide RNA
gggcacgcucgcuccuugcug

SEQ ID NO: 1850 - RNA, 21 nt, Artificial Sequence
  Guide RNA
gggcuucaucagcaaggagcg

SEQ ID NO: 1851 - RNA, 21 nt, Artificial Sequence
  Guide RNA
gguccuucaacagggcacgcu

SEQ ID NO: 1852 - RNA, 21 nt, Artificial Sequence
  Guide RNA
guccuucaacagggcacgcuc

SEQ ID NO: 1853 - RNA, 21 nt, Artificial Sequence
  Guide RNA
ucaacagggcacgcucgcucc

SEQ ID NO: 1854 - RNA, 21 nt, Artificial Sequence
  Guide RNA
ucagcaaggagcgagcgugcc

SEQ ID NO: 1855 - RNA, 21 nt, Artificial Sequence
  Guide RNA
ucaucagcaaggagcgagcgu

SEQ ID NO: 1856 - RNA, 21 nt, Artificial Sequence
  Guide RNA
uccuucaacagggcacgcucg

SEQ ID NO: 1857 - RNA, 21 nt, Artificial Sequence
  Guide RNA
ugcugguccuucaacagggca

SEQ ID NO: 1858 - RNA, 21 nt, Artificial Sequence
  Guide RNA
ugggcuucaucagcaaggagc

SEQ ID NO: 1859 - RNA, 21 nt, Artificial Sequence
  Guide RNA
ugguccuucaacagggcacgc

SEQ ID NO: 1860 - RNA, 21 nt, Artificial Sequence
  Guide RNA
uucaacagggcacgcucgcuc

SEQ ID NO: 1861 - RNA, 21 nt, Artificial Sequence
  Guide RNA
uucaucagcaaggagcgagcg

SEQ ID NO: 1862 - RNA, 22 nt, Artificial Sequence
  Guide RNA
aacagggcacgcucgcuccuug

SEQ ID NO: 1863 - RNA, 22 nt, Artificial Sequence
  Guide RNA
aaggagcgagcgugcccuguug

SEQ ID NO: 1864 - RNA, 22 nt, Artificial Sequence
  Guide RNA
acagggcacgcucgcuccuugc

SEQ ID NO: 1865 - RNA, 22 nt, Artificial Sequence
  Guide RNA
acgcucgcuccuugcugaugaa

SEQ ID NO: 1866 - RNA, 22 nt, Artificial Sequence
  Guide RNA
agcaaggagcgagcgugcccug

SEQ ID NO: 1867 - RNA, 22 nt, Artificial Sequence
  Guide RNA
agcgagcgugcccuguugaagg

SEQ ID NO: 1868 - RNA, 22 nt, Artificial Sequence
  Guide RNA
agcgugcccuguugaaggacca

SEQ ID NO: 1869 - RNA, 22 nt, Artificial Sequence
  Guide RNA
aggagcgagcgugcccuguuga

SEQ ID NO: 1870 - RNA, 22 nt, Artificial Sequence
  Guide RNA
agggcacgcucgcuccuugcug

SEQ ID NO: 1871 - RNA, 22 nt, Artificial Sequence
  Guide RNA
aucagcaaggagcgagcgugcc

SEQ ID NO: 1872 - RNA, 22 nt, Artificial Sequence
  Guide RNA
augggcuucaucagcaaggagc

SEQ ID NO: 1873 - RNA, 22 nt, Artificial Sequence
  Guide RNA
caacagggcacgcucgcuccuu

SEQ ID NO: 1874 - RNA, 22 nt, Artificial Sequence
  Guide RNA
caaggagcgagcgugcccuguu

SEQ ID NO: 1875 - RNA, 22 nt, Artificial Sequence
  Guide RNA
cacgcucgcuccuugcugauga

SEQ ID NO: 1876 - RNA, 22 nt, Artificial Sequence
  Guide RNA
cagcaaggagcgagcgugcccu

SEQ ID NO: 1877 - RNA, 22 nt, Artificial Sequence
  Guide RNA
cagggcacgcucgcuccuugcu

SEQ ID NO: 1878 - RNA, 22 nt, Artificial Sequence
  Guide RNA
caucagcaaggagcgagcgugc

SEQ ID NO: 1879 - RNA, 22 nt, Artificial Sequence
  Guide RNA
ccuucaacagggcacgcucgcu

SEQ ID NO: 1880 - RNA, 22 nt, Artificial Sequence
  Guide RNA
cgagcgugcccuguugaaggac

SEQ ID NO: 1881 - RNA, 22 nt, Artificial Sequence
  Guide RNA
cgcucgcuccuugcugaugaag

SEQ ID NO: 1882 - RNA, 22 nt, Artificial Sequence
  Guide RNA
cugcugguccuucaacagggca

SEQ ID NO: 1883 - RNA, 22 nt, Artificial Sequence
  Guide RNA
cugguccuucaacagggcacgc

SEQ ID NO: 1884 - RNA, 22 nt, Artificial Sequence
  Guide RNA
cuucaacagggcacgcucgcuc

SEQ ID NO: 1885 - RNA, 22 nt, Artificial Sequence
  Guide RNA
cuucaucagcaaggagcgagcg

SEQ ID NO: 1886 - RNA, 22 nt, Artificial Sequence
  Guide RNA
gagcgagcgugcccuguugaag

SEQ ID NO: 1887 - RNA, 22 nt, Artificial Sequence
  Guide RNA
gagcgugcccuguugaaggacc

SEQ ID NO: 1888 - RNA, 22 nt, Artificial Sequence
  Guide RNA
gcaaggagcgagcgugcccugu

SEQ ID NO: 1889 - RNA, 22 nt, Artificial Sequence
  Guide RNA
gcacgcucgcuccuugcugaug

SEQ ID NO: 1890 - RNA, 22 nt, Artificial Sequence
  Guide RNA
gcgagcgugcccuguugaagga

SEQ ID NO: 1891 - RNA, 22 nt, Artificial Sequence
  Guide RNA
gcgugcccuguugaaggaccag

SEQ ID NO: 1892 - RNA, 22 nt, Artificial Sequence
  Guide RNA
gcugcugguccuucaacagggc

SEQ ID NO: 1893 - RNA, 22 nt, Artificial Sequence
  Guide RNA
gcugguccuucaacagggcacg

SEQ ID NO: 1894 - RNA, 22 nt, Artificial Sequence
  Guide RNA
gcuucaucagcaaggagcgagc

SEQ ID NO: 1895 - RNA, 22 nt, Artificial Sequence
  Guide RNA
ggagcgagcgugcccuguugaa

SEQ ID NO: 1896 - RNA, 22 nt, Artificial Sequence
  Guide RNA
ggcacgcucgcuccuugcugau

SEQ ID NO: 1897 - RNA, 22 nt, Artificial Sequence
  Guide RNA
ggcuucaucagcaaggagcgag

SEQ ID NO: 1898 - RNA, 22 nt, Artificial Sequence
  Guide RNA
gggcacgcucgcuccuugcuga

SEQ ID NO: 1899 - RNA, 22 nt, Artificial Sequence
  Guide RNA
gggcuucaucagcaaggagcga

SEQ ID NO: 1900 - RNA, 22 nt, Artificial Sequence
  Guide RNA
gguccuucaacagggcacgcuc

SEQ ID NO: 1901 - RNA, 22 nt, Artificial Sequence
  Guide RNA
guccuucaacagggcacgcucg

SEQ ID NO: 1902 - RNA, 22 nt, Artificial Sequence
  Guide RNA
ucaacagggcacgcucgcuccu

SEQ ID NO: 1903 - RNA, 22 nt, Artificial Sequence
  Guide RNA
ucagcaaggagcgagcgugccc

SEQ ID NO: 1904 - RNA, 22 nt, Artificial Sequence
  Guide RNA
ucaucagcaaggagcgagcgug

SEQ ID NO: 1905 - RNA, 22 nt, Artificial Sequence
  Guide RNA
uccuucaacagggcacgcucgc

SEQ ID NO: 1906 - RNA, 22 nt, Artificial Sequence
  Guide RNA
ugcugguccuucaacagggcac

SEQ ID NO: 1907 - RNA, 22 nt, Artificial Sequence
  Guide RNA
ugggcuucaucagcaaggagcg

SEQ ID NO: 1908 - RNA, 22 nt, Artificial Sequence
  Guide RNA
ugguccuucaacagggcacgcu

SEQ ID NO: 1909 - RNA, 22 nt, Artificial Sequence
  Guide RNA
uucaacagggcacgcucgcucc

SEQ ID NO: 1910 - RNA, 22 nt, Artificial Sequence
  Guide RNA
uucaucagcaaggagcgagcgu

SEQ ID NO: 1911 - RNA, 20 nt, Artificial Sequence
  Guide RNA
aacagggcacgcucuugcuc

SEQ ID NO: 1912 - RNA, 20 nt, Artificial Sequence
  Guide RNA
aaggagcaagagcgugcccu

SEQ ID NO: 1913 - RNA, 20 nt, Artificial Sequence
  Guide RNA
acagggcacgcucuugcucc

SEQ ID NO: 1914 - RNA, 20 nt, Artificial Sequence
  Guide RNA
acgcucuugcuccuugcuga

SEQ ID NO: 1915 - RNA, 20 nt, Artificial Sequence
  Guide RNA
agcaagagcgugcccuguug

SEQ ID NO: 1916 - RNA, 20 nt, Artificial Sequence
  Guide RNA
agcaaggagcaagagcgugc

SEQ ID NO: 1917 - RNA, 20 nt, Artificial Sequence
  Guide RNA
aggagcaagagcgugcccug

SEQ ID NO: 1918 - RNA, 20 nt, Artificial Sequence
  Guide RNA
agggcacgcucuugcuccuu

SEQ ID NO: 1919 - RNA, 20 nt, Artificial Sequence
  Guide RNA
aucagcaaggagcaagagcg

SEQ ID NO: 1920 - RNA, 20 nt, Artificial Sequence
  Guide RNA
augggcuucaucagcaagga

SEQ ID NO: 1921 - RNA, 20 nt, Artificial Sequence
  Guide RNA
caacagggcacgcucuugcu

SEQ ID NO: 1922 - RNA, 20 nt, Artificial Sequence
  Guide RNA
caagagcgugcccuguugaa

SEQ ID NO: 1923 - RNA, 20 nt, Artificial Sequence
  Guide RNA
caaggagcaagagcgugccc

SEQ ID NO: 1924 - RNA, 20 nt, Artificial Sequence
  Guide RNA
cacgcucuugcuccuugcug

SEQ ID NO: 1925 - RNA, 20 nt, Artificial Sequence
  Guide RNA
cagcaaggagcaagagcgug

SEQ ID NO: 1926 - RNA, 20 nt, Artificial Sequence
  Guide RNA
cagggcacgcucuugcuccu

SEQ ID NO: 1927 - RNA, 20 nt, Artificial Sequence
  Guide RNA
caucagcaaggagcaagagc

SEQ ID NO: 1928 - RNA, 20 nt, Artificial Sequence
  Guide RNA
caugggcuucaucagcaagg

SEQ ID NO: 1929 - RNA, 20 nt, Artificial Sequence
  Guide RNA
ccuucaacagggcacgcucu

SEQ ID NO: 1930 - RNA, 20 nt, Artificial Sequence
  Guide RNA
cgcucuugcuccuugcugau

SEQ ID NO: 1931 - RNA, 20 nt, Artificial Sequence
  Guide RNA
cucuugcuccuugcugauga

SEQ ID NO: 1932 - RNA, 20 nt, Artificial Sequence
  Guide RNA
cuucaacagggcacgcucuu

SEQ ID NO: 1933 - RNA, 20 nt, Artificial Sequence
  Guide RNA
cuucaucagcaaggagcaag

SEQ ID NO: 1934 - RNA, 20 nt, Artificial Sequence
  Guide RNA
cuugcuccuugcugaugaag

SEQ ID NO: 1935 - RNA, 20 nt, Artificial Sequence
  Guide RNA
gagcaagagcgugcccuguu

SEQ ID NO: 1936 - RNA, 20 nt, Artificial Sequence
  Guide RNA
gcaagagcgugcccuguuga

SEQ ID NO: 1937 - RNA, 20 nt, Artificial Sequence
  Guide RNA
gcaaggagcaagagcgugcc

SEQ ID NO: 1938 - RNA, 20 nt, Artificial Sequence
  Guide RNA
gcacgcucuugcuccuugcu

SEQ ID NO: 1939 - RNA, 20 nt, Artificial Sequence
  Guide RNA
gcucuugcuccuugcugaug

SEQ ID NO: 1940 - RNA, 20 nt, Artificial Sequence
  Guide RNA
gcuucaucagcaaggagcaa

SEQ ID NO: 1941 - RNA, 20 nt, Artificial Sequence
  Guide RNA
ggagcaagagcgugcccugu

SEQ ID NO: 1942 - RNA, 20 nt, Artificial Sequence
  Guide RNA
ggcacgcucuugcuccuugc

SEQ ID NO: 1943 - RNA, 20 nt, Artificial Sequence
  Guide RNA
ggcuucaucagcaaggagca

SEQ ID NO: 1944 - RNA, 20 nt, Artificial Sequence
  Guide RNA
gggcacgcucuugcuccuug

SEQ ID NO: 1945 - RNA, 20 nt, Artificial Sequence
  Guide RNA
ucaacagggcacgcucuugc

SEQ ID NO: 1946 - RNA, 20 nt, Artificial Sequence
  Guide RNA
ucagcaaggagcaagagcgu

SEQ ID NO: 1947 - RNA, 20 nt, Artificial Sequence
  Guide RNA
ucaucagcaaggagcaagag

SEQ ID NO: 1948 - RNA, 20 nt, Artificial Sequence
  Guide RNA
ucuugcuccuugcugaugaa

SEQ ID NO: 1949 - RNA, 20 nt, Artificial Sequence
  Guide RNA
ugggcuucaucagcaaggag

SEQ ID NO: 1950 - RNA, 20 nt, Artificial Sequence
  Guide RNA
uucaacagggcacgcucuug

SEQ ID NO: 1951 - RNA, 20 nt, Artificial Sequence
  Guide RNA
uucaucagcaaggagcaaga

SEQ ID NO: 1952 - RNA, 20 nt, Artificial Sequence
  Guide RNA
uugcuccuugcugaugaagc

SEQ ID NO: 1953 - RNA, 21 nt, Artificial Sequence
  Guide RNA
aacagggcacgcucuugcucc

SEQ ID NO: 1954 - RNA, 21 nt, Artificial Sequence
  Guide RNA
aaggagcaagagcgugcccug

SEQ ID NO: 1955 - RNA, 21 nt, Artificial Sequence
  Guide RNA
acagggcacgcucuugcuccu

SEQ ID NO: 1956 - RNA, 21 nt, Artificial Sequence
  Guide RNA
acgcucuugcuccuugcugau

SEQ ID NO: 1957 - RNA, 21 nt, Artificial Sequence
  Guide RNA
agcaagagcgugcccuguuga

SEQ ID NO: 1958 - RNA, 21 nt, Artificial Sequence
  Guide RNA
agcaaggagcaagagcgugcc

SEQ ID NO: 1959 - RNA, 21 nt, Artificial Sequence
  Guide RNA
aggagcaagagcgugcccugu

SEQ ID NO: 1960 - RNA, 21 nt, Artificial Sequence
  Guide RNA
agggcacgcucuugcuccuug

SEQ ID NO: 1961 - RNA, 21 nt, Artificial Sequence
  Guide RNA
aucagcaaggagcaagagcgu

SEQ ID NO: 1962 - RNA, 21 nt, Artificial Sequence
  Guide RNA
augggcuucaucagcaaggag

SEQ ID NO: 1963 - RNA, 21 nt, Artificial Sequence
  Guide RNA
caacagggcacgcucuugcuc

SEQ ID NO: 1964 - RNA, 21 nt, Artificial Sequence
  Guide RNA
caagagcgugcccuguugaag

SEQ ID NO: 1965 - RNA, 21 nt, Artificial Sequence
  Guide RNA
caaggagcaagagcgugcccu

SEQ ID NO: 1966 - RNA, 21 nt, Artificial Sequence
  Guide RNA
cacgcucuugcuccuugcuga

SEQ ID NO: 1967 - RNA, 21 nt, Artificial Sequence
  Guide RNA
cagcaaggagcaagagcgugc

SEQ ID NO: 1968 - RNA, 21 nt, Artificial Sequence
  Guide RNA
cagggcacgcucuugcuccuu

SEQ ID NO: 1969 - RNA, 21 nt, Artificial Sequence
  Guide RNA
caucagcaaggagcaagagcg

SEQ ID NO: 1970 - RNA, 21 nt, Artificial Sequence
  Guide RNA
caugggcuucaucagcaagga

SEQ ID NO: 1971 - RNA, 21 nt, Artificial Sequence
  Guide RNA
ccuucaacagggcacgcucuu

SEQ ID NO: 1972 - RNA, 21 nt, Artificial Sequence
  Guide RNA
cgcucuugcuccuugcugaug

SEQ ID NO: 1973 - RNA, 21 nt, Artificial Sequence
  Guide RNA
cucuugcuccuugcugaugaa

SEQ ID NO: 1974 - RNA, 21 nt, Artificial Sequence
  Guide RNA
cuucaacagggcacgcucuug

SEQ ID NO: 1975 - RNA, 21 nt, Artificial Sequence
  Guide RNA
cuucaucagcaaggagcaaga

SEQ ID NO: 1976 - RNA, 21 nt, Artificial Sequence
  Guide RNA
cuugcuccuugcugaugaagc

SEQ ID NO: 1977 - RNA, 21 nt, Artificial Sequence
  Guide RNA
gagcaagagcgugcccuguug

SEQ ID NO: 1978 - RNA, 21 nt, Artificial Sequence
  Guide RNA
gcaagagcgugcccuguugaa

SEQ ID NO: 1979 - RNA, 21 nt, Artificial Sequence
  Guide RNA
gcaaggagcaagagcgugccc

SEQ ID NO: 1980 - RNA, 21 nt, Artificial Sequence
  Guide RNA
gcacgcucuugcuccuugcug

SEQ ID NO: 1981 - RNA, 21 nt, Artificial Sequence
  Guide RNA
gcucuugcuccuugcugauga

SEQ ID NO: 1982 - RNA, 21 nt, Artificial Sequence
  Guide RNA
gcuucaucagcaaggagcaag

SEQ ID NO: 1983 - RNA, 21 nt, Artificial Sequence
  Guide RNA
ggagcaagagcgugcccuguu

SEQ ID NO: 1984 - RNA, 21 nt, Artificial Sequence
  Guide RNA
ggcacgcucuugcuccuugcu

SEQ ID NO: 1985 - RNA, 21 nt, Artificial Sequence
  Guide RNA
ggcuucaucagcaaggagcaa

SEQ ID NO: 1986 - RNA, 21 nt, Artificial Sequence
  Guide RNA
gggcacgcucuugcuccuugc

SEQ ID NO: 1987 - RNA, 21 nt, Artificial Sequence
  Guide RNA
gggcuucaucagcaaggagca

SEQ ID NO: 1988 - RNA, 21 nt, Artificial Sequence
  Guide RNA
ucaacagggcacgcucuugcu

SEQ ID NO: 1989 - RNA, 21 nt, Artificial Sequence
  Guide RNA
ucagcaaggagcaagagcgug

SEQ ID NO: 1990 - RNA, 21 nt, Artificial Sequence
  Guide RNA
ucaucagcaaggagcaagagc

SEQ ID NO: 1991 - RNA, 21 nt, Artificial Sequence
  Guide RNA
ucaugggcuucaucagcaagg

SEQ ID NO: 1992 - RNA, 21 nt, Artificial Sequence
  Guide RNA
uccuucaacagggcacgcucu

SEQ ID NO: 1993 - RNA, 21 nt, Artificial Sequence
  Guide RNA
ucuugcuccuugcugaugaag

SEQ ID NO: 1994 - RNA, 21 nt, Artificial Sequence
  Guide RNA
uucaacagggcacgcucuugc

SEQ ID NO: 1995 - RNA, 21 nt, Artificial Sequence
  Guide RNA
uucaucagcaaggagcaagag

SEQ ID NO: 1996 - RNA, 21 nt, Artificial Sequence
  Guide RNA
uugcuccuugcugaugaagcc

SEQ ID NO: 1997 - RNA, 22 nt, Artificial Sequence
  Guide RNA
aacagggcacgcucuugcuccu

SEQ ID NO: 1998 - RNA, 22 nt, Artificial Sequence
  Guide RNA
aaggagcaagagcgugcccugu

SEQ ID NO: 1999 - RNA, 22 nt, Artificial Sequence
  Guide RNA
acagggcacgcucuugcuccuu

SEQ ID NO: 2000 - RNA, 22 nt, Artificial Sequence
  Guide RNA
acgcucuugcuccuugcugaug

SEQ ID NO: 2001 - RNA, 22 nt, Artificial Sequence
  Guide RNA
agcaagagcgugcccuguugaa

SEQ ID NO: 2002 - RNA, 22 nt, Artificial Sequence
  Guide RNA
agcaaggagcaagagcgugccc

SEQ ID NO: 2003 - RNA, 22 nt, Artificial Sequence
  Guide RNA
aggagcaagagcgugcccuguu

SEQ ID NO: 2004 - RNA, 22 nt, Artificial Sequence
  Guide RNA
agggcacgcucuugcuccuugc

SEQ ID NO: 2005 - RNA, 22 nt, Artificial Sequence
  Guide RNA
aucagcaaggagcaagagcgug

SEQ ID NO: 2006 - RNA, 22 nt, Artificial Sequence
  Guide RNA
aucaugggcuucaucagcaagg

SEQ ID NO: 2007 - RNA, 22 nt, Artificial Sequence
  Guide RNA
caacagggcacgcucuugcucc

SEQ ID NO: 2008 - RNA, 22 nt, Artificial Sequence
  Guide RNA
caagagcgugcccuguugaagg

SEQ ID NO: 2009 - RNA, 22 nt, Artificial Sequence
  Guide RNA
caaggagcaagagcgugcccug

SEQ ID NO: 2010 - RNA, 22 nt, Artificial Sequence
  Guide RNA
cacgcucuugcuccuugcugau

SEQ ID NO: 2011 - RNA, 22 nt, Artificial Sequence
  Guide RNA
cagcaaggagcaagagcgugcc

SEQ ID NO: 2012 - RNA, 22 nt, Artificial Sequence
  Guide RNA
cagggcacgcucuugcuccuug

SEQ ID NO: 2013 - RNA, 22 nt, Artificial Sequence
  Guide RNA
caucagcaaggagcaagagcgu

SEQ ID NO: 2014 - RNA, 22 nt, Artificial Sequence
  Guide RNA
caugggcuucaucagcaaggag

SEQ ID NO: 2015 - RNA, 22 nt, Artificial Sequence
  Guide RNA
ccuucaacagggcacgcucuug

SEQ ID NO: 2016 - RNA, 22 nt, Artificial Sequence
  Guide RNA
cgcucuugcuccuugcugauga

SEQ ID NO: 2017 - RNA, 22 nt, Artificial Sequence
  Guide RNA
cucuugcuccuugcugaugaag

SEQ ID NO: 2018 - RNA, 22 nt, Artificial Sequence
  Guide RNA
cuucaacagggcacgcucuugc

SEQ ID NO: 2019 - RNA, 22 nt, Artificial Sequence
  Guide RNA
cuucaucagcaaggagcaagag

SEQ ID NO: 2020 - RNA, 22 nt, Artificial Sequence
  Guide RNA
cuugcuccuugcugaugaagcc

SEQ ID NO: 2021 - RNA, 22 nt, Artificial Sequence
  Guide RNA
gagcaagagcgugcccuguuga

SEQ ID NO: 2022 - RNA, 22 nt, Artificial Sequence
  Guide RNA
gcaagagcgugcccuguugaag

SEQ ID NO: 2023 - RNA, 22 nt, Artificial Sequence
  Guide RNA
gcaaggagcaagagcgugcccu

SEQ ID NO: 2024 - RNA, 22 nt, Artificial Sequence
  Guide RNA
gcacgcucuugcuccuugcuga

SEQ ID NO: 2025 - RNA, 22 nt, Artificial Sequence
  Guide RNA
gcucuugcuccuugcugaugaa

SEQ ID NO: 2026 - RNA, 22 nt, Artificial Sequence
  Guide RNA
gcuucaucagcaaggagcaaga

SEQ ID NO: 2027 - RNA, 22 nt, Artificial Sequence
  Guide RNA
ggagcaagagcgugcccuguug

SEQ ID NO: 2028 - RNA, 22 nt, Artificial Sequence
  Guide RNA
ggcacgcucuugcuccuugcug

SEQ ID NO: 2029 - RNA, 22 nt, Artificial Sequence
  Guide RNA
ggcuucaucagcaaggagcaag

SEQ ID NO: 2030 - RNA, 22 nt, Artificial Sequence
  Guide RNA
gggcacgcucuugcuccuugcu

SEQ ID NO: 2031 - RNA, 22 nt, Artificial Sequence
  Guide RNA
gggcuucaucagcaaggagcaa

SEQ ID NO: 2032 - RNA, 22 nt, Artificial Sequence
  Guide RNA
guccuucaacagggcacgcucu

SEQ ID NO: 2033 - RNA, 22 nt, Artificial Sequence
  Guide RNA
ucaacagggcacgcucuugcuc

SEQ ID NO: 2034 - RNA, 22 nt, Artificial Sequence
  Guide RNA
ucagcaaggagcaagagcgugc

SEQ ID NO: 2035 - RNA, 22 nt, Artificial Sequence
  Guide RNA
ucaucagcaaggagcaagagcg

SEQ ID NO: 2036 - RNA, 22 nt, Artificial Sequence
  Guide RNA
ucaugggcuucaucagcaagga

SEQ ID NO: 2037 - RNA, 22 nt, Artificial Sequence
  Guide RNA
uccuucaacagggcacgcucuu

SEQ ID NO: 2038 - RNA, 22 nt, Artificial Sequence
  Guide RNA
ucuugcuccuugcugaugaagc

SEQ ID NO: 2039 - RNA, 22 nt, Artificial Sequence
  Guide RNA
ugggcuucaucagcaaggagca

SEQ ID NO: 2040 - RNA, 22 nt, Artificial Sequence
  Guide RNA
uucaacagggcacgcucuugcu

SEQ ID NO: 2041 - RNA, 22 nt, Artificial Sequence
  Guide RNA
uucaucagcaaggagcaagagc

SEQ ID NO: 2042 - RNA, 22 nt, Artificial Sequence
  Guide RNA
uugcuccuugcugaugaagccc

SEQ ID NO: 2043 - RNA, 20 nt, Artificial Sequence
  Guide RNA
acgaagcccaugaugcaccu

SEQ ID NO: 2044 - RNA, 20 nt, Artificial Sequence
  Guide RNA
acgcucucgcuccuugcuga

SEQ ID NO: 2045 - RNA, 20 nt, Artificial Sequence
  Guide RNA
aggugcaucaugggcuucgu

SEQ ID NO: 2046 - RNA, 20 nt, Artificial Sequence
  Guide RNA
aucaugggcuucgucagcaa

SEQ ID NO: 2047 - RNA, 20 nt, Artificial Sequence
  Guide RNA
auccaggugcaucaugggcu

SEQ ID NO: 2048 - RNA, 20 nt, Artificial Sequence
  Guide RNA
augggcuucgucagcaagga

SEQ ID NO: 2049 - RNA, 20 nt, Artificial Sequence
  Guide RNA
cacgcucucgcuccuugcug

SEQ ID NO: 2050 - RNA, 20 nt, Artificial Sequence
  Guide RNA
caggugcaucaugggcuucg

SEQ ID NO: 2051 - RNA, 20 nt, Artificial Sequence
  Guide RNA
caucaugggcuucgucagca

SEQ ID NO: 2052 - RNA, 20 nt, Artificial Sequence
  Guide RNA
caugggcuucgucagcaagg

SEQ ID NO: 2053 - RNA, 20 nt, Artificial Sequence
  Guide RNA
ccaggugcaucaugggcuuc

SEQ ID NO: 2054 - RNA, 20 nt, Artificial Sequence
  Guide RNA
ccuugcugacgaagcccaug

SEQ ID NO: 2055 - RNA, 20 nt, Artificial Sequence
  Guide RNA
cgcuccuugcugacgaagcc

SEQ ID NO: 2056 - RNA, 20 nt, Artificial Sequence
  Guide RNA
cgcucucgcuccuugcugac

SEQ ID NO: 2057 - RNA, 20 nt, Artificial Sequence
  Guide RNA
cgucagcaaggagcgagagc

SEQ ID NO: 2058 - RNA, 20 nt, Artificial Sequence
  Guide RNA
cuccuugcugacgaagccca

SEQ ID NO: 2059 - RNA, 20 nt, Artificial Sequence
  Guide RNA
cucgcuccuugcugacgaag

SEQ ID NO: 2060 - RNA, 20 nt, Artificial Sequence
  Guide RNA
cucucgcuccuugcugacga

SEQ ID NO: 2061 - RNA, 20 nt, Artificial Sequence
  Guide RNA
cugacgaagcccaugaugca

SEQ ID NO: 2062 - RNA, 20 nt, Artificial Sequence
  Guide RNA
cuucgucagcaaggagcgag

SEQ ID NO: 2063 - RNA, 20 nt, Artificial Sequence
  Guide RNA
cuugcugacgaagcccauga

SEQ ID NO: 2064 - RNA, 20 nt, Artificial Sequence
  Guide RNA
gacgaagcccaugaugcacc

SEQ ID NO: 2065 - RNA, 20 nt, Artificial Sequence
  Guide RNA
gcacgcucucgcuccuugcu

SEQ ID NO: 2066 - RNA, 20 nt, Artificial Sequence
  Guide RNA
gcaucaugggcuucgucagc

SEQ ID NO: 2067 - RNA, 20 nt, Artificial Sequence
  Guide RNA
gcuccuugcugacgaagccc

SEQ ID NO: 2068 - RNA, 20 nt, Artificial Sequence
  Guide RNA
gcucucgcuccuugcugacg

SEQ ID NO: 2069 - RNA, 20 nt, Artificial Sequence
  Guide RNA
gcugacgaagcccaugaugc

SEQ ID NO: 2070 - RNA, 20 nt, Artificial Sequence
  Guide RNA
gcuucgucagcaaggagcga

SEQ ID NO: 2071 - RNA, 20 nt, Artificial Sequence
  Guide RNA
ggcacgcucucgcuccuugc

SEQ ID NO: 2072 - RNA, 20 nt, Artificial Sequence
  Guide RNA
ggcuucgucagcaaggagcg

SEQ ID NO: 2073 - RNA, 20 nt, Artificial Sequence
  Guide RNA
gggcuucgucagcaaggagc

SEQ ID NO: 2074 - RNA, 20 nt, Artificial Sequence
  Guide RNA
ggugcaucaugggcuucguc

SEQ ID NO: 2075 - RNA, 20 nt, Artificial Sequence
  Guide RNA
gugcaucaugggcuucguca

SEQ ID NO: 2076 - RNA, 20 nt, Artificial Sequence
  Guide RNA
uauccaggugcaucaugggc

SEQ ID NO: 2077 - RNA, 20 nt, Artificial Sequence
  Guide RNA
ucaugggcuucgucagcaag

SEQ ID NO: 2078 - RNA, 20 nt, Artificial Sequence
  Guide RNA
uccaggugcaucaugggcuu

SEQ ID NO: 2079 - RNA, 20 nt, Artificial Sequence
  Guide RNA
uccuugcugacgaagcccau

SEQ ID NO: 2080 - RNA, 20 nt, Artificial Sequence
  Guide RNA
ucgcuccuugcugacgaagc

SEQ ID NO: 2081 - RNA, 20 nt, Artificial Sequence
  Guide RNA
ucgucagcaaggagcgagag

SEQ ID NO: 2082 - RNA, 20 nt, Artificial Sequence
  Guide RNA
ucucgcuccuugcugacgaa

SEQ ID NO: 2083 - RNA, 20 nt, Artificial Sequence
  Guide RNA
ugacgaagcccaugaugcac

SEQ ID NO: 2084 - RNA, 20 nt, Artificial Sequence
  Guide RNA
ugcaucaugggcuucgucag

SEQ ID NO: 2085 - RNA, 20 nt, Artificial Sequence
  Guide RNA
ugcugacgaagcccaugaug

SEQ ID NO: 2086 - RNA, 20 nt, Artificial Sequence
  Guide RNA
ugggcuucgucagcaaggag

SEQ ID NO: 2087 - RNA, 20 nt, Artificial Sequence
  Guide RNA
uucgucagcaaggagcgaga

SEQ ID NO: 2088 - RNA, 20 nt, Artificial Sequence
  Guide RNA
uugcugacgaagcccaugau

SEQ ID NO: 2089 - RNA, 21 nt, Artificial Sequence
  Guide RNA
acgaagcccaugaugcaccug

SEQ ID NO: 2090 - RNA, 21 nt, Artificial Sequence
  Guide RNA
acgcucucgcuccuugcugac

SEQ ID NO: 2091 - RNA, 21 nt, Artificial Sequence
  Guide RNA
aggugcaucaugggcuucguc

SEQ ID NO: 2092 - RNA, 21 nt, Artificial Sequence
  Guide RNA
auauccaggugcaucaugggc

SEQ ID NO: 2093 - RNA, 21 nt, Artificial Sequence
  Guide RNA
aucaugggcuucgucagcaag

SEQ ID NO: 2094 - RNA, 21 nt, Artificial Sequence
  Guide RNA
auccaggugcaucaugggcuu

SEQ ID NO: 2095 - RNA, 21 nt, Artificial Sequence
  Guide RNA
augggcuucgucagcaaggag

SEQ ID NO: 2096 - RNA, 21 nt, Artificial Sequence
  Guide RNA
cacgcucucgcuccuugcuga

SEQ ID NO: 2097 - RNA, 21 nt, Artificial Sequence
  Guide RNA
caggugcaucaugggcuucgu

SEQ ID NO: 2098 - RNA, 21 nt, Artificial Sequence
  Guide RNA
caucaugggcuucgucagcaa

SEQ ID NO: 2099 - RNA, 21 nt, Artificial Sequence
  Guide RNA
caugggcuucgucagcaagga

SEQ ID NO: 2100 - RNA, 21 nt, Artificial Sequence
  Guide RNA
ccaggugcaucaugggcuucg

SEQ ID NO: 2101 - RNA, 21 nt, Artificial Sequence
  Guide RNA
ccuugcugacgaagcccauga

SEQ ID NO: 2102 - RNA, 21 nt, Artificial Sequence
  Guide RNA
cgcuccuugcugacgaagccc

SEQ ID NO: 2103 - RNA, 21 nt, Artificial Sequence
  Guide RNA
cgcucucgcuccuugcugacg

SEQ ID NO: 2104 - RNA, 21 nt, Artificial Sequence
  Guide RNA
cgucagcaaggagcgagagcg

SEQ ID NO: 2105 - RNA, 21 nt, Artificial Sequence
  Guide RNA
cuccuugcugacgaagcccau

SEQ ID NO: 2106 - RNA, 21 nt, Artificial Sequence
  Guide RNA
cucgcuccuugcugacgaagc

SEQ ID NO: 2107 - RNA, 21 nt, Artificial Sequence
  Guide RNA
cucucgcuccuugcugacgaa

SEQ ID NO: 2108 - RNA, 21 nt, Artificial Sequence
  Guide RNA
cugacgaagcccaugaugcac

SEQ ID NO: 2109 - RNA, 21 nt, Artificial Sequence
  Guide RNA
cuucgucagcaaggagcgaga

SEQ ID NO: 2110 - RNA, 21 nt, Artificial Sequence
  Guide RNA
cuugcugacgaagcccaugau

SEQ ID NO: 2111 - RNA, 21 nt, Artificial Sequence
  Guide RNA
gacgaagcccaugaugcaccu

SEQ ID NO: 2112 - RNA, 21 nt, Artificial Sequence
  Guide RNA
gcacgcucucgcuccuugcug

SEQ ID NO: 2113 - RNA, 21 nt, Artificial Sequence
  Guide RNA
gcaucaugggcuucgucagca

SEQ ID NO: 2114 - RNA, 21 nt, Artificial Sequence
  Guide RNA
gcuccuugcugacgaagccca

SEQ ID NO: 2115 - RNA, 21 nt, Artificial Sequence
  Guide RNA
gcucucgcuccuugcugacga

SEQ ID NO: 2116 - RNA, 21 nt, Artificial Sequence
  Guide RNA
gcugacgaagcccaugaugca

SEQ ID NO: 2117 - RNA, 21 nt, Artificial Sequence
  Guide RNA
gcuucgucagcaaggagcgag

SEQ ID NO: 2118 - RNA, 21 nt, Artificial Sequence
  Guide RNA
ggcacgcucucgcuccuugcu

SEQ ID NO: 2119 - RNA, 21 nt, Artificial Sequence
  Guide RNA
ggcuucgucagcaaggagcga

SEQ ID NO: 2120 - RNA, 21 nt, Artificial Sequence
  Guide RNA
gggcacgcucucgcuccuugc

SEQ ID NO: 2121 - RNA, 21 nt, Artificial Sequence
  Guide RNA
gggcuucgucagcaaggagcg

SEQ ID NO: 2122 - RNA, 21 nt, Artificial Sequence
  Guide RNA
ggugcaucaugggcuucguca

SEQ ID NO: 2123 - RNA, 21 nt, Artificial Sequence
  Guide RNA
gugcaucaugggcuucgucag

SEQ ID NO: 2124 - RNA, 21 nt, Artificial Sequence
  Guide RNA
uauccaggugcaucaugggcu

SEQ ID NO: 2125 - RNA, 21 nt, Artificial Sequence
  Guide RNA
ucaugggcuucgucagcaagg

SEQ ID NO: 2126 - RNA, 21 nt, Artificial Sequence
  Guide RNA
uccaggugcaucaugggcuuc

SEQ ID NO: 2127 - RNA, 21 nt, Artificial Sequence
  Guide RNA
uccuugcugacgaagcccaug

SEQ ID NO: 2128 - RNA, 21 nt, Artificial Sequence
  Guide RNA
ucgcuccuugcugacgaagcc

SEQ ID NO: 2129 - RNA, 21 nt, Artificial Sequence
  Guide RNA
ucgucagcaaggagcgagagc

SEQ ID NO: 2130 - RNA, 21 nt, Artificial Sequence
  Guide RNA
ucucgcuccuugcugacgaag

SEQ ID NO: 2131 - RNA, 21 nt, Artificial Sequence
  Guide RNA
ugacgaagcccaugaugcacc

SEQ ID NO: 2132 - RNA, 21 nt, Artificial Sequence
  Guide RNA
ugcaucaugggcuucgucagc

SEQ ID NO: 2133 - RNA, 21 nt, Artificial Sequence
  Guide RNA
ugcugacgaagcccaugaugc

SEQ ID NO: 2134 - RNA, 21 nt, Artificial Sequence
  Guide RNA
ugggcuucgucagcaaggagc

SEQ ID NO: 2135 - RNA, 21 nt, Artificial Sequence
  Guide RNA
uucgucagcaaggagcgagag

SEQ ID NO: 2136 - RNA, 21 nt, Artificial Sequence
  Guide RNA
uugcugacgaagcccaugaug

SEQ ID NO: 2137 - RNA, 22 nt, Artificial Sequence
  Guide RNA
acgaagcccaugaugcaccugg

SEQ ID NO: 2138 - RNA, 22 nt, Artificial Sequence
  Guide RNA
acgcucucgcuccuugcugacg

SEQ ID NO: 2139 - RNA, 22 nt, Artificial Sequence
  Guide RNA
agggcacgcucucgcuccuugc

SEQ ID NO: 2140 - RNA, 22 nt, Artificial Sequence
  Guide RNA
aggugcaucaugggcuucguca

SEQ ID NO: 2141 - RNA, 22 nt, Artificial Sequence
  Guide RNA
auauccaggugcaucaugggcu

SEQ ID NO: 2142 - RNA, 22 nt, Artificial Sequence
  Guide RNA
aucaugggcuucgucagcaagg

SEQ ID NO: 2143 - RNA, 22 nt, Artificial Sequence
  Guide RNA
auccaggugcaucaugggcuuc

SEQ ID NO: 2144 - RNA, 22 nt, Artificial Sequence
  Guide RNA
augggcuucgucagcaaggagc

SEQ ID NO: 2145 - RNA, 22 nt, Artificial Sequence
  Guide RNA
cacgcucucgcuccuugcugac

SEQ ID NO: 2146 - RNA, 22 nt, Artificial Sequence
  Guide RNA
caggugcaucaugggcuucguc

SEQ ID NO: 2147 - RNA, 22 nt, Artificial Sequence
  Guide RNA
caucaugggcuucgucagcaag

SEQ ID NO: 2148 - RNA, 22 nt, Artificial Sequence
  Guide RNA
caugggcuucgucagcaaggag

SEQ ID NO: 2149 - RNA, 22 nt, Artificial Sequence
  Guide RNA
ccaggugcaucaugggcuucgu

SEQ ID NO: 2150 - RNA, 22 nt, Artificial Sequence
  Guide RNA
ccuugcugacgaagcccaugau

SEQ ID NO: 2151 - RNA, 22 nt, Artificial Sequence
  Guide RNA
cgcuccuugcugacgaagccca

SEQ ID NO: 2152 - RNA, 22 nt, Artificial Sequence
  Guide RNA
cgcucucgcuccuugcugacga

SEQ ID NO: 2153 - RNA, 22 nt, Artificial Sequence
  Guide RNA
cgucagcaaggagcgagagcgu

SEQ ID NO: 2154 - RNA, 22 nt, Artificial Sequence
  Guide RNA
cuccuugcugacgaagcccaug

SEQ ID NO: 2155 - RNA, 22 nt, Artificial Sequence
  Guide RNA
cucgcuccuugcugacgaagcc

SEQ ID NO: 2156 - RNA, 22 nt, Artificial Sequence
  Guide RNA
cucucgcuccuugcugacgaag

SEQ ID NO: 2157 - RNA, 22 nt, Artificial Sequence
  Guide RNA
cugacgaagcccaugaugcacc

SEQ ID NO: 2158 - RNA, 22 nt, Artificial Sequence
  Guide RNA
cuucgucagcaaggagcgagag

SEQ ID NO: 2159 - RNA, 22 nt, Artificial Sequence
  Guide RNA
cuugcugacgaagcccaugaug

SEQ ID NO: 2160 - RNA, 22 nt, Artificial Sequence
  Guide RNA
gacgaagcccaugaugcaccug

SEQ ID NO: 2161 - RNA, 22 nt, Artificial Sequence
  Guide RNA
gauauccaggugcaucaugggc

SEQ ID NO: 2162 - RNA, 22 nt, Artificial Sequence
  Guide RNA
gcacgcucucgcuccuugcuga

SEQ ID NO: 2163 - RNA, 22 nt, Artificial Sequence
  Guide RNA
gcaucaugggcuucgucagcaa

SEQ ID NO: 2164 - RNA, 22 nt, Artificial Sequence
  Guide RNA
gcuccuugcugacgaagcccau

SEQ ID NO: 2165 - RNA, 22 nt, Artificial Sequence
  Guide RNA
gcucucgcuccuugcugacgaa

SEQ ID NO: 2166 - RNA, 22 nt, Artificial Sequence
  Guide RNA
gcugacgaagcccaugaugcac

SEQ ID NO: 2167 - RNA, 22 nt, Artificial Sequence
  Guide RNA
gcuucgucagcaaggagcgaga

SEQ ID NO: 2168 - RNA, 22 nt, Artificial Sequence
  Guide RNA
ggcacgcucucgcuccuugcug

SEQ ID NO: 2169 - RNA, 22 nt, Artificial Sequence
  Guide RNA
ggcuucgucagcaaggagcgag

SEQ ID NO: 2170 - RNA, 22 nt, Artificial Sequence
  Guide RNA
gggcacgcucucgcuccuugcu

SEQ ID NO: 2171 - RNA, 22 nt, Artificial Sequence
  Guide RNA
gggcuucgucagcaaggagcga

SEQ ID NO: 2172 - RNA, 22 nt, Artificial Sequence
  Guide RNA
ggugcaucaugggcuucgucag

SEQ ID NO: 2173 - RNA, 22 nt, Artificial Sequence
  Guide RNA
gugcaucaugggcuucgucagc

SEQ ID NO: 2174 - RNA, 22 nt, Artificial Sequence
  Guide RNA
uauccaggugcaucaugggcuu

SEQ ID NO: 2175 - RNA, 22 nt, Artificial Sequence
  Guide RNA
ucaugggcuucgucagcaagga

SEQ ID NO: 2176 - RNA, 22 nt, Artificial Sequence
  Guide RNA
uccaggugcaucaugggcuucg

SEQ ID NO: 2177 - RNA, 22 nt, Artificial Sequence
  Guide RNA
uccuugcugacgaagcccauga

SEQ ID NO: 2178 - RNA, 22 nt, Artificial Sequence
  Guide RNA
ucgcuccuugcugacgaagccc

SEQ ID NO: 2179 - RNA, 22 nt, Artificial Sequence
  Guide RNA
ucgucagcaaggagcgagagcg

SEQ ID NO: 2180 - RNA, 22 nt, Artificial Sequence
  Guide RNA
ucucgcuccuugcugacgaagc

SEQ ID NO: 2181 - RNA, 22 nt, Artificial Sequence
  Guide RNA
ugacgaagcccaugaugcaccu

SEQ ID NO: 2182 - RNA, 22 nt, Artificial Sequence
  Guide RNA
ugcaucaugggcuucgucagca

SEQ ID NO: 2183 - RNA, 22 nt, Artificial Sequence
  Guide RNA
ugcugacgaagcccaugaugca

SEQ ID NO: 2184 - RNA, 22 nt, Artificial Sequence
  Guide RNA
ugggcuucgucagcaaggagcg

SEQ ID NO: 2185 - RNA, 22 nt, Artificial Sequence
  Guide RNA
uucgucagcaaggagcgagagc

SEQ ID NO: 2186 - RNA, 22 nt, Artificial Sequence
  Guide RNA
uugcugacgaagcccaugaugc

SEQ ID NO: 2187 - RNA, 20 nt, Artificial Sequence
  Guide RNA
aaaauacaucuauugguggc

SEQ ID NO: 2188 - RNA, 20 nt, Artificial Sequence
  Guide RNA
aaauacaucuauugguggcc

SEQ ID NO: 2189 - RNA, 20 nt, Artificial Sequence
  Guide RNA
aagggccaccaauagaugua

SEQ ID NO: 2190 - RNA, 20 nt, Artificial Sequence
  Guide RNA
aauacaucuauugguggccc

SEQ ID NO: 2191 - RNA, 20 nt, Artificial Sequence
  Guide RNA
aaugauggguaagggccacc

SEQ ID NO: 2192 - RNA, 20 nt, Artificial Sequence
  Guide RNA
acaucuauugguggcccuua

SEQ ID NO: 2193 - RNA, 20 nt, Artificial Sequence
  Guide RNA
agggccaccaauagauguau

SEQ ID NO: 2194 - RNA, 20 nt, Artificial Sequence
  Guide RNA
auacaucuauugguggcccu

SEQ ID NO: 2195 - RNA, 20 nt, Artificial Sequence
  Guide RNA
aucuauugguggcccuuacc

SEQ ID NO: 2196 - RNA, 20 nt, Artificial Sequence
  Guide RNA
augauggguaagggccacca

SEQ ID NO: 2197 - RNA, 20 nt, Artificial Sequence
  Guide RNA
auggguaagggccaccaaua

SEQ ID NO: 2198 - RNA, 20 nt, Artificial Sequence
  Guide RNA
auugguggcccuuacccauc

SEQ ID NO: 2199 - RNA, 20 nt, Artificial Sequence
  Guide RNA
caaaauacaucuauuggugg

SEQ ID NO: 2200 - RNA, 20 nt, Artificial Sequence
  Guide RNA
caccaauagauguauuuuga

SEQ ID NO: 2201 - RNA, 20 nt, Artificial Sequence
  Guide RNA
caucuauugguggcccuuac

SEQ ID NO: 2202 - RNA, 20 nt, Artificial Sequence
  Guide RNA
ccaccaauagauguauuuug

SEQ ID NO: 2203 - RNA, 20 nt, Artificial Sequence
  Guide RNA
cuauugguggcccuuaccca

SEQ ID NO: 2204 - RNA, 20 nt, Artificial Sequence
  Guide RNA
gaaugauggguaagggccac

SEQ ID NO: 2205 - RNA, 20 nt, Artificial Sequence
  Guide RNA
gauggguaagggccaccaau

SEQ ID NO: 2206 - RNA, 20 nt, Artificial Sequence
  Guide RNA
gccaccaauagauguauuuu

SEQ ID NO: 2207 - RNA, 20 nt, Artificial Sequence
  Guide RNA
ggaaugauggguaagggcca

SEQ ID NO: 2208 - RNA, 20 nt, Artificial Sequence
  Guide RNA
ggccaccaauagauguauuu

SEQ ID NO: 2209 - RNA, 20 nt, Artificial Sequence
  Guide RNA
gggccaccaauagauguauu

SEQ ID NO: 2210 - RNA, 20 nt, Artificial Sequence
  Guide RNA
ggguaagggccaccaauaga

SEQ ID NO: 2211 - RNA, 20 nt, Artificial Sequence
  Guide RNA
gguaagggccaccaauagau

SEQ ID NO: 2212 - RNA, 20 nt, Artificial Sequence
  Guide RNA
guaagggccaccaauagaug

SEQ ID NO: 2213 - RNA, 20 nt, Artificial Sequence
  Guide RNA
uaagggccaccaauagaugu

SEQ ID NO: 2214 - RNA, 20 nt, Artificial Sequence
  Guide RNA
uacaucuauugguggcccuu

SEQ ID NO: 2215 - RNA, 20 nt, Artificial Sequence
  Guide RNA
uauugguggcccuuacccau

SEQ ID NO: 2216 - RNA, 20 nt, Artificial Sequence
  Guide RNA
ucaaaauacaucuauuggug

SEQ ID NO: 2217 - RNA, 20 nt, Artificial Sequence
  Guide RNA
ucuauugguggcccuuaccc

SEQ ID NO: 2218 - RNA, 20 nt, Artificial Sequence
  Guide RNA
ugauggguaagggccaccaa

SEQ ID NO: 2219 - RNA, 20 nt, Artificial Sequence
  Guide RNA
uggaaugauggguaagggcc

SEQ ID NO: 2220 - RNA, 20 nt, Artificial Sequence
  Guide RNA
uggguaagggccaccaauag

SEQ ID NO: 2221 - RNA, 20 nt, Artificial Sequence
  Guide RNA
uugguggcccuuacccauca

SEQ ID NO: 2222 - RNA, 21 nt, Artificial Sequence
  Guide RNA
aaaauacaucuauugguggcc

SEQ ID NO: 2223 - RNA, 21 nt, Artificial Sequence
  Guide RNA
aaauacaucuauugguggccc

SEQ ID NO: 2224 - RNA, 21 nt, Artificial Sequence
  Guide RNA
aagggccaccaauagauguau

SEQ ID NO: 2225 - RNA, 21 nt, Artificial Sequence
  Guide RNA
aauacaucuauugguggcccu

SEQ ID NO: 2226 - RNA, 21 nt, Artificial Sequence
  Guide RNA
aaugauggguaagggccacca

SEQ ID NO: 2227 - RNA, 21 nt, Artificial Sequence
  Guide RNA
acaucuauugguggcccuuac

SEQ ID NO: 2228 - RNA, 21 nt, Artificial Sequence
  Guide RNA
agggccaccaauagauguauu

SEQ ID NO: 2229 - RNA, 21 nt, Artificial Sequence
  Guide RNA
auacaucuauugguggcccuu

SEQ ID NO: 2230 - RNA, 21 nt, Artificial Sequence
  Guide RNA
aucuauugguggcccuuaccc

SEQ ID NO: 2231 - RNA, 21 nt, Artificial Sequence
  Guide RNA
augauggguaagggccaccaa

SEQ ID NO: 2232 - RNA, 21 nt, Artificial Sequence
  Guide RNA
auggguaagggccaccaauag

SEQ ID NO: 2233 - RNA, 21 nt, Artificial Sequence
  Guide RNA
auugguggcccuuacccauca

SEQ ID NO: 2234 - RNA, 21 nt, Artificial Sequence
  Guide RNA
caaaauacaucuauugguggc

SEQ ID NO: 2235 - RNA, 21 nt, Artificial Sequence
  Guide RNA
caucuauugguggcccuuacc

SEQ ID NO: 2236 - RNA, 21 nt, Artificial Sequence
  Guide RNA
ccaccaauagauguauuuuga

SEQ ID NO: 2237 - RNA, 21 nt, Artificial Sequence
  Guide RNA
cuauugguggcccuuacccau

SEQ ID NO: 2238 - RNA, 21 nt, Artificial Sequence
  Guide RNA
cuggaaugauggguaagggcc

SEQ ID NO: 2239 - RNA, 21 nt, Artificial Sequence
  Guide RNA
gaaugauggguaagggccacc

SEQ ID NO: 2240 - RNA, 21 nt, Artificial Sequence
  Guide RNA
gauggguaagggccaccaaua

SEQ ID NO: 2241 - RNA, 21 nt, Artificial Sequence
  Guide RNA
gccaccaauagauguauuuug

SEQ ID NO: 2242 - RNA, 21 nt, Artificial Sequence
  Guide RNA
ggaaugauggguaagggccac

SEQ ID NO: 2243 - RNA, 21 nt, Artificial Sequence
  Guide RNA
ggccaccaauagauguauuuu

SEQ ID NO: 2244 - RNA, 21 nt, Artificial Sequence
  Guide RNA
gggccaccaauagauguauuu

SEQ ID NO: 2245 - RNA, 21 nt, Artificial Sequence
  Guide RNA
ggguaagggccaccaauagau

SEQ ID NO: 2246 - RNA, 21 nt, Artificial Sequence
  Guide RNA
gguaagggccaccaauagaug

SEQ ID NO: 2247 - RNA, 21 nt, Artificial Sequence
  Guide RNA
guaagggccaccaauagaugu

SEQ ID NO: 2248 - RNA, 21 nt, Artificial Sequence
  Guide RNA
uaagggccaccaauagaugua

SEQ ID NO: 2249 - RNA, 21 nt, Artificial Sequence
  Guide RNA
uacaucuauugguggcccuua

SEQ ID NO: 2250 - RNA, 21 nt, Artificial Sequence
  Guide RNA
uauugguggcccuuacccauc

SEQ ID NO: 2251 - RNA, 21 nt, Artificial Sequence
  Guide RNA
ucaaaauacaucuauuggugg

SEQ ID NO: 2252 - RNA, 21 nt, Artificial Sequence
  Guide RNA
ucuauugguggcccuuaccca

SEQ ID NO: 2253 - RNA, 21 nt, Artificial Sequence
  Guide RNA
ugauggguaagggccaccaau

SEQ ID NO: 2254 - RNA, 21 nt, Artificial Sequence
  Guide RNA
uggaaugauggguaagggcca

SEQ ID NO: 2255 - RNA, 21 nt, Artificial Sequence
  Guide RNA
uggguaagggccaccaauaga

SEQ ID NO: 2256 - RNA, 21 nt, Artificial Sequence
  Guide RNA
uugguggcccuuacccaucau

SEQ ID NO: 2257 - RNA, 22 nt, Artificial Sequence
  Guide RNA
aaaauacaucuauugguggccc

SEQ ID NO: 2258 - RNA, 22 nt, Artificial Sequence
  Guide RNA
aaauacaucuauugguggcccu

SEQ ID NO: 2259 - RNA, 22 nt, Artificial Sequence
  Guide RNA
aagggccaccaauagauguauu

SEQ ID NO: 2260 - RNA, 22 nt, Artificial Sequence
  Guide RNA
aauacaucuauugguggcccuu

SEQ ID NO: 2261 - RNA, 22 nt, Artificial Sequence
  Guide RNA
aaugauggguaagggccaccaa

SEQ ID NO: 2262 - RNA, 22 nt, Artificial Sequence
  Guide RNA
acaucuauugguggcccuuacc

SEQ ID NO: 2263 - RNA, 22 nt, Artificial Sequence
  Guide RNA
agggccaccaauagauguauuu

SEQ ID NO: 2264 - RNA, 22 nt, Artificial Sequence
  Guide RNA
auacaucuauugguggcccuua

SEQ ID NO: 2265 - RNA, 22 nt, Artificial Sequence
  Guide RNA
aucuauugguggcccuuaccca

SEQ ID NO: 2266 - RNA, 22 nt, Artificial Sequence
  Guide RNA
augauggguaagggccaccaau

SEQ ID NO: 2267 - RNA, 22 nt, Artificial Sequence
  Guide RNA
auggguaagggccaccaauaga

SEQ ID NO: 2268 - RNA, 22 nt, Artificial Sequence
  Guide RNA
auugguggcccuuacccaucau

SEQ ID NO: 2269 - RNA, 22 nt, Artificial Sequence
  Guide RNA
caaaauacaucuauugguggcc

SEQ ID NO: 2270 - RNA, 22 nt, Artificial Sequence
  Guide RNA
caucuauugguggcccuuaccc

SEQ ID NO: 2271 - RNA, 22 nt, Artificial Sequence
  Guide RNA
ccaccaauagauguauuuugaa

SEQ ID NO: 2272 - RNA, 22 nt, Artificial Sequence
  Guide RNA
cuauugguggcccuuacccauc

SEQ ID NO: 2273 - RNA, 22 nt, Artificial Sequence
  Guide RNA
cuggaaugauggguaagggcca

SEQ ID NO: 2274 - RNA, 22 nt, Artificial Sequence
  Guide RNA
gaaugauggguaagggccacca

SEQ ID NO: 2275 - RNA, 22 nt, Artificial Sequence
  Guide RNA
gauggguaagggccaccaauag

SEQ ID NO: 2276 - RNA, 22 nt, Artificial Sequence
  Guide RNA
gccaccaauagauguauuuuga

SEQ ID NO: 2277 - RNA, 22 nt, Artificial Sequence
  Guide RNA
ggaaugauggguaagggccacc

SEQ ID NO: 2278 - RNA, 22 nt, Artificial Sequence
  Guide RNA
ggccaccaauagauguauuuug

SEQ ID NO: 2279 - RNA, 22 nt, Artificial Sequence
  Guide RNA
gggccaccaauagauguauuuu

SEQ ID NO: 2280 - RNA, 22 nt, Artificial Sequence
  Guide RNA
ggguaagggccaccaauagaug

SEQ ID NO: 2281 - RNA, 22 nt, Artificial Sequence
  Guide RNA
gguaagggccaccaauagaugu

SEQ ID NO: 2282 - RNA, 22 nt, Artificial Sequence
  Guide RNA
guaagggccaccaauagaugua

SEQ ID NO: 2283 - RNA, 22 nt, Artificial Sequence
  Guide RNA
uaagggccaccaauagauguau

SEQ ID NO: 2284 - RNA, 22 nt, Artificial Sequence
  Guide RNA
uacaucuauugguggcccuuac

SEQ ID NO: 2285 - RNA, 22 nt, Artificial Sequence
  Guide RNA
uauugguggcccuuacccauca

SEQ ID NO: 2286 - RNA, 22 nt, Artificial Sequence
  Guide RNA
ucaaaauacaucuauugguggc

SEQ ID NO: 2287 - RNA, 22 nt, Artificial Sequence
  Guide RNA
ucuauugguggcccuuacccau

SEQ ID NO: 2288 - RNA, 22 nt, Artificial Sequence
  Guide RNA
ucuggaaugauggguaagggcc

SEQ ID NO: 2289 - RNA, 22 nt, Artificial Sequence
  Guide RNA
ugauggguaagggccaccaaua

SEQ ID NO: 2290 - RNA, 22 nt, Artificial Sequence
  Guide RNA
uggaaugauggguaagggccac

SEQ ID NO: 2291 - RNA, 22 nt, Artificial Sequence
  Guide RNA
uggguaagggccaccaauagau

SEQ ID NO: 2292 - RNA, 22 nt, Artificial Sequence
  Guide RNA
uucaaaauacaucuauuggugg

SEQ ID NO: 2293 - RNA, 22 nt, Artificial Sequence
  Guide RNA
uugguggcccuuacccaucauu

SEQ ID NO: 2294 - RNA, 20 nt, Artificial Sequence
  Guide RNA
aaagcauucuagaacucauu

SEQ ID NO: 2295 - RNA, 20 nt, Artificial Sequence
  Guide RNA
aagcauucuagaacucauua

SEQ ID NO: 2296 - RNA, 20 nt, Artificial Sequence
  Guide RNA
aaugaguucuagaaugcuuu

SEQ ID NO: 2297 - RNA, 20 nt, Artificial Sequence
  Guide RNA
agaaugcuuucaauccaaag

SEQ ID NO: 2298 - RNA, 20 nt, Artificial Sequence
  Guide RNA
agcauucuagaacucauuaa

SEQ ID NO: 2299 - RNA, 20 nt, Artificial Sequence
  Guide RNA
agguguuuuuuaaugaguuc

SEQ ID NO: 2300 - RNA, 20 nt, Artificial Sequence
  Guide RNA
aguucuagaaugcuuucaau

SEQ ID NO: 2301 - RNA, 20 nt, Artificial Sequence
  Guide RNA
augaguucuagaaugcuuuc

SEQ ID NO: 2302 - RNA, 20 nt, Artificial Sequence
  Guide RNA
auugaaagcauucuagaacu

SEQ ID NO: 2303 - RNA, 20 nt, Artificial Sequence
  Guide RNA
cuagaaugcuuucaauccaa

SEQ ID NO: 2304 - RNA, 20 nt, Artificial Sequence
  Guide RNA
cuggcuuuggauugaaagca

SEQ ID NO: 2305 - RNA, 20 nt, Artificial Sequence
  Guide RNA
cuuuggauugaaagcauucu

SEQ ID NO: 2306 - RNA, 20 nt, Artificial Sequence
  Guide RNA
gaaagcauucuagaacucau

SEQ ID NO: 2307 - RNA, 20 nt, Artificial Sequence
  Guide RNA
gaaugcuuucaauccaaagc

SEQ ID NO: 2308 - RNA, 20 nt, Artificial Sequence
  Guide RNA
gaguucuagaaugcuuucaa

SEQ ID NO: 2309 - RNA, 20 nt, Artificial Sequence
  Guide RNA
gauugaaagcauucuagaac

SEQ ID NO: 2310 - RNA, 20 nt, Artificial Sequence
  Guide RNA
gcauucuagaacucauuaaa

SEQ ID NO: 2311 - RNA, 20 nt, Artificial Sequence
  Guide RNA
gcuuuggauugaaagcauuc

SEQ ID NO: 2312 - RNA, 20 nt, Artificial Sequence
  Guide RNA
ggauugaaagcauucuagaa

SEQ ID NO: 2313 - RNA, 20 nt, Artificial Sequence
  Guide RNA
ggcuuuggauugaaagcauu

SEQ ID NO: 2314 - RNA, 20 nt, Artificial Sequence
  Guide RNA
gguguuuuuuaaugaguucu

SEQ ID NO: 2315 - RNA, 20 nt, Artificial Sequence
  Guide RNA
guucuagaaugcuuucaauc

SEQ ID NO: 2316 - RNA, 20 nt, Artificial Sequence
  Guide RNA
uaaugaguucuagaaugcuu

SEQ ID NO: 2317 - RNA, 20 nt, Artificial Sequence
  Guide RNA
uagaaugcuuucaauccaaa

SEQ ID NO: 2318 - RNA, 20 nt, Artificial Sequence
  Guide RNA
ucuagaaugcuuucaaucca

SEQ ID NO: 2319 - RNA, 20 nt, Artificial Sequence
  Guide RNA
ucuggcuuuggauugaaagc

SEQ ID NO: 2320 - RNA, 20 nt, Artificial Sequence
  Guide RNA
ugaaagcauucuagaacuca

SEQ ID NO: 2321 - RNA, 20 nt, Artificial Sequence
  Guide RNA
ugaguucuagaaugcuuuca

SEQ ID NO: 2322 - RNA, 20 nt, Artificial Sequence
  Guide RNA
uggauugaaagcauucuaga

SEQ ID NO: 2323 - RNA, 20 nt, Artificial Sequence
  Guide RNA
uggcuuuggauugaaagcau

SEQ ID NO: 2324 - RNA, 20 nt, Artificial Sequence
  Guide RNA
uuaaugaguucuagaaugcu

SEQ ID NO: 2325 - RNA, 20 nt, Artificial Sequence
  Guide RNA
uucuagaaugcuuucaaucc

SEQ ID NO: 2326 - RNA, 20 nt, Artificial Sequence
  Guide RNA
uucuggcuuuggauugaaag

SEQ ID NO: 2327 - RNA, 20 nt, Artificial Sequence
  Guide RNA
uugaaagcauucuagaacuc

SEQ ID NO: 2328 - RNA, 20 nt, Artificial Sequence
  Guide RNA
uuggauugaaagcauucuag

SEQ ID NO: 2329 - RNA, 20 nt, Artificial Sequence
  Guide RNA
uuuaaugaguucuagaaugc

SEQ ID NO: 2330 - RNA, 20 nt, Artificial Sequence
  Guide RNA
uuuggauugaaagcauucua

SEQ ID NO: 2331 - RNA, 21 nt, Artificial Sequence
  Guide RNA
aaugaguucuagaaugcuuuc

SEQ ID NO: 2332 - RNA, 21 nt, Artificial Sequence
  Guide RNA
agaaugcuuucaauccaaagc

SEQ ID NO: 2333 - RNA, 21 nt, Artificial Sequence
  Guide RNA
aguucuagaaugcuuucaauc

SEQ ID NO: 2334 - RNA, 21 nt, Artificial Sequence
  Guide RNA
augaguucuagaaugcuuuca

SEQ ID NO: 2335 - RNA, 21 nt, Artificial Sequence
  Guide RNA
auugaaagcauucuagaacuc

SEQ ID NO: 2336 - RNA, 21 nt, Artificial Sequence
  Guide RNA
cagguguuuuuuaaugaguuc

SEQ ID NO: 2337 - RNA, 21 nt, Artificial Sequence
  Guide RNA
cuagaaugcuuucaauccaaa

SEQ ID NO: 2338 - RNA, 21 nt, Artificial Sequence
  Guide RNA
cuggcuuuggauugaaagcau

SEQ ID NO: 2339 - RNA, 21 nt, Artificial Sequence
  Guide RNA
cuucuggcuuuggauugaaag

SEQ ID NO: 2340 - RNA, 21 nt, Artificial Sequence
  Guide RNA
cuuuggauugaaagcauucua

SEQ ID NO: 2341 - RNA, 21 nt, Artificial Sequence
  Guide RNA
gaaagcauucuagaacucauu

SEQ ID NO: 2342 - RNA, 21 nt, Artificial Sequence
  Guide RNA
gaaugcuuucaauccaaagcc

SEQ ID NO: 2343 - RNA, 21 nt, Artificial Sequence
  Guide RNA
gaguucuagaaugcuuucaau

SEQ ID NO: 2344 - RNA, 21 nt, Artificial Sequence
  Guide RNA
gauugaaagcauucuagaacu

SEQ ID NO: 2345 - RNA, 21 nt, Artificial Sequence
  Guide RNA
gcuuuggauugaaagcauucu

SEQ ID NO: 2346 - RNA, 21 nt, Artificial Sequence
  Guide RNA
ggauugaaagcauucuagaac

SEQ ID NO: 2347 - RNA, 21 nt, Artificial Sequence
  Guide RNA
ggcuuuggauugaaagcauuc

SEQ ID NO: 2348 - RNA, 21 nt, Artificial Sequence
  Guide RNA
guucuagaaugcuuucaaucc

SEQ ID NO: 2349 - RNA, 21 nt, Artificial Sequence
  Guide RNA
uagaaugcuuucaauccaaag

SEQ ID NO: 2350 - RNA, 21 nt, Artificial Sequence
  Guide RNA
ucuagaaugcuuucaauccaa

SEQ ID NO: 2351 - RNA, 21 nt, Artificial Sequence
  Guide RNA
ucuggcuuuggauugaaagca

SEQ ID NO: 2352 - RNA, 21 nt, Artificial Sequence
  Guide RNA
ugaaagcauucuagaacucau

SEQ ID NO: 2353 - RNA, 21 nt, Artificial Sequence
  Guide RNA
ugaguucuagaaugcuuucaa

SEQ ID NO: 2354 - RNA, 21 nt, Artificial Sequence
  Guide RNA
uggauugaaagcauucuagaa

SEQ ID NO: 2355 - RNA, 21 nt, Artificial Sequence
  Guide RNA
uggcuuuggauugaaagcauu

SEQ ID NO: 2356 - RNA, 21 nt, Artificial Sequence
  Guide RNA
uucuagaaugcuuucaaucca

SEQ ID NO: 2357 - RNA, 21 nt, Artificial Sequence
  Guide RNA
uucuggcuuuggauugaaagc

SEQ ID NO: 2358 - RNA, 21 nt, Artificial Sequence
  Guide RNA
uugaaagcauucuagaacuca

SEQ ID NO: 2359 - RNA, 21 nt, Artificial Sequence
  Guide RNA
uuggauugaaagcauucuaga

SEQ ID NO: 2360 - RNA, 21 nt, Artificial Sequence
  Guide RNA
uuuggauugaaagcauucuag

SEQ ID NO: 2361 - RNA, 22 nt, Artificial Sequence
  Guide RNA
aaugaguucuagaaugcuuuca

SEQ ID NO: 2362 - RNA, 22 nt, Artificial Sequence
  Guide RNA
agaaugcuuucaauccaaagcc

SEQ ID NO: 2363 - RNA, 22 nt, Artificial Sequence
  Guide RNA
aguucuagaaugcuuucaaucc

SEQ ID NO: 2364 - RNA, 22 nt, Artificial Sequence
  Guide RNA
augaguucuagaaugcuuucaa

SEQ ID NO: 2365 - RNA, 22 nt, Artificial Sequence
  Guide RNA
auugaaagcauucuagaacuca

SEQ ID NO: 2366 - RNA, 22 nt, Artificial Sequence
  Guide RNA
cagguguuuuuuaaugaguucu

SEQ ID NO: 2367 - RNA, 22 nt, Artificial Sequence
  Guide RNA
ccuucuggcuuuggauugaaag

SEQ ID NO: 2368 - RNA, 22 nt, Artificial Sequence
  Guide RNA
cuagaaugcuuucaauccaaag

SEQ ID NO: 2369 - RNA, 22 nt, Artificial Sequence
  Guide RNA
cuggcuuuggauugaaagcauu

SEQ ID NO: 2370 - RNA, 22 nt, Artificial Sequence
  Guide RNA
cuucuggcuuuggauugaaagc

SEQ ID NO: 2371 - RNA, 22 nt, Artificial Sequence
  Guide RNA
cuuuggauugaaagcauucuag

SEQ ID NO: 2372 - RNA, 22 nt, Artificial Sequence
  Guide RNA
gaaagcauucuagaacucauua

SEQ ID NO: 2373 - RNA, 22 nt, Artificial Sequence
  Guide RNA
gaaugcuuucaauccaaagcca

SEQ ID NO: 2374 - RNA, 22 nt, Artificial Sequence
  Guide RNA
gaguucuagaaugcuuucaauc

SEQ ID NO: 2375 - RNA, 22 nt, Artificial Sequence
  Guide RNA
gauugaaagcauucuagaacuc

SEQ ID NO: 2376 - RNA, 22 nt, Artificial Sequence
  Guide RNA
gcagguguuuuuuaaugaguuc

SEQ ID NO: 2377 - RNA, 22 nt, Artificial Sequence
  Guide RNA
gcuuuggauugaaagcauucua

SEQ ID NO: 2378 - RNA, 22 nt, Artificial Sequence
  Guide RNA
ggauugaaagcauucuagaacu

SEQ ID NO: 2379 - RNA, 22 nt, Artificial Sequence
  Guide RNA
ggcuuuggauugaaagcauucu

SEQ ID NO: 2380 - RNA, 22 nt, Artificial Sequence
  Guide RNA
gguguuuuuuaaugaguucuag

SEQ ID NO: 2381 - RNA, 22 nt, Artificial Sequence
  Guide RNA
guucuagaaugcuuucaaucca

SEQ ID NO: 2382 - RNA, 22 nt, Artificial Sequence
  Guide RNA
uaaugaguucuagaaugcuuuc

SEQ ID NO: 2383 - RNA, 22 nt, Artificial Sequence
  Guide RNA
uagaaugcuuucaauccaaagc

SEQ ID NO: 2384 - RNA, 22 nt, Artificial Sequence
  Guide RNA
ucuagaaugcuuucaauccaaa

SEQ ID NO: 2385 - RNA, 22 nt, Artificial Sequence
  Guide RNA
ucuggcuuuggauugaaagcau

SEQ ID NO: 2386 - RNA, 22 nt, Artificial Sequence
  Guide RNA
ugaaagcauucuagaacucauu

SEQ ID NO: 2387 - RNA, 22 nt, Artificial Sequence
  Guide RNA
ugaguucuagaaugcuuucaau

SEQ ID NO: 2388 - RNA, 22 nt, Artificial Sequence
  Guide RNA
uggauugaaagcauucuagaac

SEQ ID NO: 2389 - RNA, 22 nt, Artificial Sequence
  Guide RNA
uggcuuuggauugaaagcauuc

SEQ ID NO: 2390 - RNA, 22 nt, Artificial Sequence
  Guide RNA
uucuagaaugcuuucaauccaa

SEQ ID NO: 2391 - RNA, 22 nt, Artificial Sequence
  Guide RNA
uucuggcuuuggauugaaagca

SEQ ID NO: 2392 - RNA, 22 nt, Artificial Sequence
  Guide RNA
uugaaagcauucuagaacucau

SEQ ID NO: 2393 - RNA, 22 nt, Artificial Sequence
  Guide RNA
uuggauugaaagcauucuagaa

SEQ ID NO: 2394 - RNA, 22 nt, Artificial Sequence
  Guide RNA
uuuggauugaaagcauucuaga

SEQ ID NO: 2395 - RNA, 20 nt, Artificial Sequence
  Guide RNA
aaugaguucuaggaugcuuu

SEQ ID NO: 2396 - RNA, 20 nt, Artificial Sequence
  Guide RNA
aggaugcuuugaauccaaag

SEQ ID NO: 2397 - RNA, 20 nt, Artificial Sequence
  Guide RNA
aguucuaggaugcuuugaau

SEQ ID NO: 2398 - RNA, 20 nt, Artificial Sequence
  Guide RNA
augaguucuaggaugcuuug

SEQ ID NO: 2399 - RNA, 20 nt, Artificial Sequence
  Guide RNA
augcuuugaauccaaagcca

SEQ ID NO: 2400 - RNA, 20 nt, Artificial Sequence
  Guide RNA
auucaaagcauccuagaacu

SEQ ID NO: 2401 - RNA, 20 nt, Artificial Sequence
  Guide RNA
auuuucccuucuggcuuugg

SEQ ID NO: 2402 - RNA, 20 nt, Artificial Sequence
  Guide RNA
cccuucuggcuuuggauuca

SEQ ID NO: 2403 - RNA, 20 nt, Artificial Sequence
  Guide RNA
ccuucuggcuuuggauucaa

SEQ ID NO: 2404 - RNA, 20 nt, Artificial Sequence
  Guide RNA
cuaggaugcuuugaauccaa

SEQ ID NO: 2405 - RNA, 20 nt, Artificial Sequence
  Guide RNA
cuggcuuuggauucaaagca

SEQ ID NO: 2406 - RNA, 20 nt, Artificial Sequence
  Guide RNA
cuucuggcuuuggauucaaa

SEQ ID NO: 2407 - RNA, 20 nt, Artificial Sequence
  Guide RNA
cuuugaauccaaagccagaa

SEQ ID NO: 2408 - RNA, 20 nt, Artificial Sequence
  Guide RNA
cuuuggauucaaagcauccu

SEQ ID NO: 2409 - RNA, 20 nt, Artificial Sequence
  Guide RNA
gaguucuaggaugcuuugaa

SEQ ID NO: 2410 - RNA, 20 nt, Artificial Sequence
  Guide RNA
gaugcuuugaauccaaagcc

SEQ ID NO: 2411 - RNA, 20 nt, Artificial Sequence
  Guide RNA
gauucaaagcauccuagaac

SEQ ID NO: 2412 - RNA, 20 nt, Artificial Sequence
  Guide RNA
gcuuugaauccaaagccaga

SEQ ID NO: 2413 - RNA, 20 nt, Artificial Sequence
  Guide RNA
gcuuuggauucaaagcaucc

SEQ ID NO: 2414 - RNA, 20 nt, Artificial Sequence
  Guide RNA
ggaugcuuugaauccaaagc

SEQ ID NO: 2415 - RNA, 20 nt, Artificial Sequence
  Guide RNA
ggauucaaagcauccuagaa

SEQ ID NO: 2416 - RNA, 20 nt, Artificial Sequence
  Guide RNA
ggcuuuggauucaaagcauc

SEQ ID NO: 2417 - RNA, 20 nt, Artificial Sequence
  Guide RNA
guucuaggaugcuuugaauc

SEQ ID NO: 2418 - RNA, 20 nt, Artificial Sequence
  Guide RNA
uaaugaguucuaggaugcuu

SEQ ID NO: 2419 - RNA, 20 nt, Artificial Sequence
  Guide RNA
uaggaugcuuugaauccaaa

SEQ ID NO: 2420 - RNA, 20 nt, Artificial Sequence
  Guide RNA
ucaaagcauccuagaacuca

SEQ ID NO: 2421 - RNA, 20 nt, Artificial Sequence
  Guide RNA
ucccuucuggcuuuggauuc

SEQ ID NO: 2422 - RNA, 20 nt, Artificial Sequence
  Guide RNA
ucuaggaugcuuugaaucca

SEQ ID NO: 2423 - RNA, 20 nt, Artificial Sequence
  Guide RNA
ucuggcuuuggauucaaagc

SEQ ID NO: 2424 - RNA, 20 nt, Artificial Sequence
  Guide RNA
ugaauccaaagccagaaggg

SEQ ID NO: 2425 - RNA, 20 nt, Artificial Sequence
  Guide RNA
ugaguucuaggaugcuuuga

SEQ ID NO: 2426 - RNA, 20 nt, Artificial Sequence
  Guide RNA
ugcuuugaauccaaagccag

SEQ ID NO: 2427 - RNA, 20 nt, Artificial Sequence
  Guide RNA
uggauucaaagcauccuaga

SEQ ID NO: 2428 - RNA, 20 nt, Artificial Sequence
  Guide RNA
uggcuuuggauucaaagcau

SEQ ID NO: 2429 - RNA, 20 nt, Artificial Sequence
  Guide RNA
uuaaugaguucuaggaugcu

SEQ ID NO: 2430 - RNA, 20 nt, Artificial Sequence
  Guide RNA
uucaaagcauccuagaacuc

SEQ ID NO: 2431 - RNA, 20 nt, Artificial Sequence
  Guide RNA
uucccuucuggcuuuggauu

SEQ ID NO: 2432 - RNA, 20 nt, Artificial Sequence
  Guide RNA
uucuaggaugcuuugaaucc

SEQ ID NO: 2433 - RNA, 20 nt, Artificial Sequence
  Guide RNA
uucuggcuuuggauucaaag

SEQ ID NO: 2434 - RNA, 20 nt, Artificial Sequence
  Guide RNA
uugaauccaaagccagaagg

SEQ ID NO: 2435 - RNA, 20 nt, Artificial Sequence
  Guide RNA
uuggauucaaagcauccuag

SEQ ID NO: 2436 - RNA, 20 nt, Artificial Sequence
  Guide RNA
uuuaaugaguucuaggaugc

SEQ ID NO: 2437 - RNA, 20 nt, Artificial Sequence
  Guide RNA
uuucccuucuggcuuuggau

SEQ ID NO: 2438 - RNA, 20 nt, Artificial Sequence
  Guide RNA
uuugaauccaaagccagaag

SEQ ID NO: 2439 - RNA, 20 nt, Artificial Sequence
  Guide RNA
uuuggauucaaagcauccua

SEQ ID NO: 2440 - RNA, 20 nt, Artificial Sequence
  Guide RNA
uuuucccuucuggcuuugga

SEQ ID NO: 2441 - RNA, 21 nt, Artificial Sequence
  Guide RNA
aaugaguucuaggaugcuuug

SEQ ID NO: 2442 - RNA, 21 nt, Artificial Sequence
  Guide RNA
aauuuucccuucuggcuuugg

SEQ ID NO: 2443 - RNA, 21 nt, Artificial Sequence
  Guide RNA
aggaugcuuugaauccaaagc

SEQ ID NO: 2444 - RNA, 21 nt, Artificial Sequence
  Guide RNA
aguucuaggaugcuuugaauc

SEQ ID NO: 2445 - RNA, 21 nt, Artificial Sequence
  Guide RNA
augaguucuaggaugcuuuga

SEQ ID NO: 2446 - RNA, 21 nt, Artificial Sequence
  Guide RNA
augcuuugaauccaaagccag

SEQ ID NO: 2447 - RNA, 21 nt, Artificial Sequence
  Guide RNA
auucaaagcauccuagaacuc

SEQ ID NO: 2448 - RNA, 21 nt, Artificial Sequence
  Guide RNA
auuuucccuucuggcuuugga

SEQ ID NO: 2449 - RNA, 21 nt, Artificial Sequence
  Guide RNA
cccuucuggcuuuggauucaa

SEQ ID NO: 2450 - RNA, 21 nt, Artificial Sequence
  Guide RNA
ccuucuggcuuuggauucaaa

SEQ ID NO: 2451 - RNA, 21 nt, Artificial Sequence
  Guide RNA
cuaggaugcuuugaauccaaa

SEQ ID NO: 2452 - RNA, 21 nt, Artificial Sequence
  Guide RNA
cuggcuuuggauucaaagcau

SEQ ID NO: 2453 - RNA, 21 nt, Artificial Sequence
  Guide RNA
cuucuggcuuuggauucaaag

SEQ ID NO: 2454 - RNA, 21 nt, Artificial Sequence
  Guide RNA
cuuugaauccaaagccagaag

SEQ ID NO: 2455 - RNA, 21 nt, Artificial Sequence
  Guide RNA
cuuuggauucaaagcauccua

SEQ ID NO: 2456 - RNA, 21 nt, Artificial Sequence
  Guide RNA
gaguucuaggaugcuuugaau

SEQ ID NO: 2457 - RNA, 21 nt, Artificial Sequence
  Guide RNA
gaugcuuugaauccaaagcca

SEQ ID NO: 2458 - RNA, 21 nt, Artificial Sequence
  Guide RNA
gauucaaagcauccuagaacu

SEQ ID NO: 2459 - RNA, 21 nt, Artificial Sequence
  Guide RNA
gcuuugaauccaaagccagaa

SEQ ID NO: 2460 - RNA, 21 nt, Artificial Sequence
  Guide RNA
gcuuuggauucaaagcauccu

SEQ ID NO: 2461 - RNA, 21 nt, Artificial Sequence
  Guide RNA
ggaugcuuugaauccaaagcc

SEQ ID NO: 2462 - RNA, 21 nt, Artificial Sequence
  Guide RNA
ggauucaaagcauccuagaac

SEQ ID NO: 2463 - RNA, 21 nt, Artificial Sequence
  Guide RNA
ggcuuuggauucaaagcaucc

SEQ ID NO: 2464 - RNA, 21 nt, Artificial Sequence
  Guide RNA
guucuaggaugcuuugaaucc

SEQ ID NO: 2465 - RNA, 21 nt, Artificial Sequence
  Guide RNA
uaaugaguucuaggaugcuuu

SEQ ID NO: 2466 - RNA, 21 nt, Artificial Sequence
  Guide RNA
uaggaugcuuugaauccaaag

SEQ ID NO: 2467 - RNA, 21 nt, Artificial Sequence
  Guide RNA
ucaaagcauccuagaacucau

SEQ ID NO: 2468 - RNA, 21 nt, Artificial Sequence
  Guide RNA
ucccuucuggcuuuggauuca

SEQ ID NO: 2469 - RNA, 21 nt, Artificial Sequence
  Guide RNA
ucuaggaugcuuugaauccaa

SEQ ID NO: 2470 - RNA, 21 nt, Artificial Sequence
  Guide RNA
ucuggcuuuggauucaaagca

SEQ ID NO: 2471 - RNA, 21 nt, Artificial Sequence
  Guide RNA
ugaauccaaagccagaaggga

SEQ ID NO: 2472 - RNA, 21 nt, Artificial Sequence
  Guide RNA
ugaguucuaggaugcuuugaa

SEQ ID NO: 2473 - RNA, 21 nt, Artificial Sequence
  Guide RNA
ugcuuugaauccaaagccaga

SEQ ID NO: 2474 - RNA, 21 nt, Artificial Sequence
  Guide RNA
uggauucaaagcauccuagaa

SEQ ID NO: 2475 - RNA, 21 nt, Artificial Sequence
  Guide RNA
uggcuuuggauucaaagcauc

SEQ ID NO: 2476 - RNA, 21 nt, Artificial Sequence
  Guide RNA
uuaaugaguucuaggaugcuu

SEQ ID NO: 2477 - RNA, 21 nt, Artificial Sequence
  Guide RNA
uucaaagcauccuagaacuca

SEQ ID NO: 2478 - RNA, 21 nt, Artificial Sequence
  Guide RNA
uucccuucuggcuuuggauuc

SEQ ID NO: 2479 - RNA, 21 nt, Artificial Sequence
  Guide RNA
uucuaggaugcuuugaaucca

SEQ ID NO: 2480 - RNA, 21 nt, Artificial Sequence
  Guide RNA
uucuggcuuuggauucaaagc

SEQ ID NO: 2481 - RNA, 21 nt, Artificial Sequence
  Guide RNA
uugaauccaaagccagaaggg

SEQ ID NO: 2482 - RNA, 21 nt, Artificial Sequence
  Guide RNA
uuggauucaaagcauccuaga

SEQ ID NO: 2483 - RNA, 21 nt, Artificial Sequence
  Guide RNA
uuuaaugaguucuaggaugcu

SEQ ID NO: 2484 - RNA, 21 nt, Artificial Sequence
  Guide RNA
uuucccuucuggcuuuggauu

SEQ ID NO: 2485 - RNA, 21 nt, Artificial Sequence
  Guide RNA
uuugaauccaaagccagaagg

SEQ ID NO: 2486 - RNA, 21 nt, Artificial Sequence
  Guide RNA
uuuggauucaaagcauccuag

SEQ ID NO: 2487 - RNA, 21 nt, Artificial Sequence
  Guide RNA
uuuuaaugaguucuaggaugc

SEQ ID NO: 2488 - RNA, 21 nt, Artificial Sequence
  Guide RNA
uuuucccuucuggcuuuggau

SEQ ID NO: 2489 - RNA, 22 nt, Artificial Sequence
  Guide RNA
aaauuuucccuucuggcuuugg

SEQ ID NO: 2490 - RNA, 22 nt, Artificial Sequence
  Guide RNA
aaugaguucuaggaugcuuuga

SEQ ID NO: 2491 - RNA, 22 nt, Artificial Sequence
  Guide RNA
aauuuucccuucuggcuuugga

SEQ ID NO: 2492 - RNA, 22 nt, Artificial Sequence
  Guide RNA
aggaugcuuugaauccaaagcc

SEQ ID NO: 2493 - RNA, 22 nt, Artificial Sequence
  Guide RNA
aguucuaggaugcuuugaaucc

SEQ ID NO: 2494 - RNA, 22 nt, Artificial Sequence
  Guide RNA
augaguucuaggaugcuuugaa

SEQ ID NO: 2495 - RNA, 22 nt, Artificial Sequence
  Guide RNA
augcuuugaauccaaagccaga

SEQ ID NO: 2496 - RNA, 22 nt, Artificial Sequence
  Guide RNA
auucaaagcauccuagaacuca

SEQ ID NO: 2497 - RNA, 22 nt, Artificial Sequence
  Guide RNA
auuuucccuucuggcuuuggau

SEQ ID NO: 2498 - RNA, 22 nt, Artificial Sequence
  Guide RNA
cccuucuggcuuuggauucaaa

SEQ ID NO: 2499 - RNA, 22 nt, Artificial Sequence
  Guide RNA
ccuucuggcuuuggauucaaag

SEQ ID NO: 2500 - RNA, 22 nt, Artificial Sequence
  Guide RNA
cuaggaugcuuugaauccaaag

SEQ ID NO: 2501 - RNA, 22 nt, Artificial Sequence
  Guide RNA
cuggcuuuggauucaaagcauc

SEQ ID NO: 2502 - RNA, 22 nt, Artificial Sequence
  Guide RNA
cuucuggcuuuggauucaaagc

SEQ ID NO: 2503 - RNA, 22 nt, Artificial Sequence
  Guide RNA
cuuugaauccaaagccagaagg

SEQ ID NO: 2504 - RNA, 22 nt, Artificial Sequence
  Guide RNA
cuuuggauucaaagcauccuag

SEQ ID NO: 2505 - RNA, 22 nt, Artificial Sequence
  Guide RNA
gaguucuaggaugcuuugaauc

SEQ ID NO: 2506 - RNA, 22 nt, Artificial Sequence
  Guide RNA
gaugcuuugaauccaaagccag

SEQ ID NO: 2507 - RNA, 22 nt, Artificial Sequence
  Guide RNA
gauucaaagcauccuagaacuc

SEQ ID NO: 2508 - RNA, 22 nt, Artificial Sequence
  Guide RNA
gcuuugaauccaaagccagaag

SEQ ID NO: 2509 - RNA, 22 nt, Artificial Sequence
  Guide RNA
gcuuuggauucaaagcauccua

SEQ ID NO: 2510 - RNA, 22 nt, Artificial Sequence
  Guide RNA
ggaugcuuugaauccaaagcca

SEQ ID NO: 2511 - RNA, 22 nt, Artificial Sequence
  Guide RNA
ggauucaaagcauccuagaacu

SEQ ID NO: 2512 - RNA, 22 nt, Artificial Sequence
  Guide RNA
ggcuuuggauucaaagcauccu

SEQ ID NO: 2513 - RNA, 22 nt, Artificial Sequence
  Guide RNA
guucuaggaugcuuugaaucca

SEQ ID NO: 2514 - RNA, 22 nt, Artificial Sequence
  Guide RNA
uaaugaguucuaggaugcuuug

SEQ ID NO: 2515 - RNA, 22 nt, Artificial Sequence
  Guide RNA
uaggaugcuuugaauccaaagc

SEQ ID NO: 2516 - RNA, 22 nt, Artificial Sequence
  Guide RNA
ucaaagcauccuagaacucauu

SEQ ID NO: 2517 - RNA, 22 nt, Artificial Sequence
  Guide RNA
ucccuucuggcuuuggauucaa

SEQ ID NO: 2518 - RNA, 22 nt, Artificial Sequence
  Guide RNA
ucuaggaugcuuugaauccaaa

SEQ ID NO: 2519 - RNA, 22 nt, Artificial Sequence
  Guide RNA
ucuggcuuuggauucaaagcau

SEQ ID NO: 2520 - RNA, 22 nt, Artificial Sequence
  Guide RNA
ugaauccaaagccagaagggaa

SEQ ID NO: 2521 - RNA, 22 nt, Artificial Sequence
  Guide RNA
ugaguucuaggaugcuuugaau

SEQ ID NO: 2522 - RNA, 22 nt, Artificial Sequence
  Guide RNA
ugcuuugaauccaaagccagaa

SEQ ID NO: 2523 - RNA, 22 nt, Artificial Sequence
  Guide RNA
uggauucaaagcauccuagaac

SEQ ID NO: 2524 - RNA, 22 nt, Artificial Sequence
  Guide RNA
uggcuuuggauucaaagcaucc

SEQ ID NO: 2525 - RNA, 22 nt, Artificial Sequence
  Guide RNA
uuaaugaguucuaggaugcuuu

SEQ ID NO: 2526 - RNA, 22 nt, Artificial Sequence
  Guide RNA
uucaaagcauccuagaacucau

SEQ ID NO: 2527 - RNA, 22 nt, Artificial Sequence
  Guide RNA
uucccuucuggcuuuggauuca

SEQ ID NO: 2528 - RNA, 22 nt, Artificial Sequence
  Guide RNA
uucuaggaugcuuugaauccaa

SEQ ID NO: 2529 - RNA, 22 nt, Artificial Sequence
  Guide RNA
uucuggcuuuggauucaaagca

SEQ ID NO: 2530 - RNA, 22 nt, Artificial Sequence
  Guide RNA
uugaauccaaagccagaaggga

SEQ ID NO: 2531 - RNA, 22 nt, Artificial Sequence
  Guide RNA
uuggauucaaagcauccuagaa

SEQ ID NO: 2532 - RNA, 22 nt, Artificial Sequence
  Guide RNA
uuuaaugaguucuaggaugcuu

SEQ ID NO: 2533 - RNA, 22 nt, Artificial Sequence
  Guide RNA
uuucccuucuggcuuuggauuc

SEQ ID NO: 2534 - RNA, 22 nt, Artificial Sequence
  Guide RNA
uuugaauccaaagccagaaggg

SEQ ID NO: 2535 - RNA, 22 nt, Artificial Sequence
  Guide RNA
uuuggauucaaagcauccuaga

SEQ ID NO: 2536 - RNA, 22 nt, Artificial Sequence
  Guide RNA
uuuuaaugaguucuaggaugcu

SEQ ID NO: 2537 - RNA, 22 nt, Artificial Sequence
  Guide RNA
uuuucccuucuggcuuuggauu

SEQ ID NO: 2538 - RNA, 22 nt, Artificial Sequence
  Guide RNA
uuuuuaaugaguucuaggaugc

SEQ ID NO: 2539 - RNA, 20 nt, Artificial Sequence
  Guide RNA
aaaacccagacaguucucac

SEQ ID NO: 2540 - RNA, 20 nt, Artificial Sequence
  Guide RNA
aaacccagacaguucucacc

SEQ ID NO: 2541 - RNA, 20 nt, Artificial Sequence
  Guide RNA
aacccagacaguucucaccu

SEQ ID NO: 2542 - RNA, 20 nt, Artificial Sequence
  Guide RNA
aaggugagaacugucugggu

SEQ ID NO: 2543 - RNA, 20 nt, Artificial Sequence
  Guide RNA
acaguucucaccuuacaaaa

SEQ ID NO: 2544 - RNA, 20 nt, Artificial Sequence
  Guide RNA
acccagacaguucucaccuu

SEQ ID NO: 2545 - RNA, 20 nt, Artificial Sequence
  Guide RNA
acgagguuuuguaaggugag

SEQ ID NO: 2546 - RNA, 20 nt, Artificial Sequence
  Guide RNA
agaacugucuggguuuuaug

SEQ ID NO: 2547 - RNA, 20 nt, Artificial Sequence
  Guide RNA
agacaguucucaccuuacaa

SEQ ID NO: 2548 - RNA, 20 nt, Artificial Sequence
  Guide RNA
agagagcauaaaacccagac

SEQ ID NO: 2549 - RNA, 20 nt, Artificial Sequence
  Guide RNA
agagcauaaaacccagacag

SEQ ID NO: 2550 - RNA, 20 nt, Artificial Sequence
  Guide RNA
agcauaaaacccagacaguu

SEQ ID NO: 2551 - RNA, 20 nt, Artificial Sequence
  Guide RNA
aggugagaacugucuggguu

SEQ ID NO: 2552 - RNA, 20 nt, Artificial Sequence
  Guide RNA
agguuuuguaaggugagaac

SEQ ID NO: 2553 - RNA, 20 nt, Artificial Sequence
  Guide RNA
aguucucaccuuacaaaacc

SEQ ID NO: 2554 - RNA, 20 nt, Artificial Sequence
  Guide RNA
auaaaacccagacaguucuc

SEQ ID NO: 2555 - RNA, 20 nt, Artificial Sequence
  Guide RNA
cagacaguucucaccuuaca

SEQ ID NO: 2556 - RNA, 20 nt, Artificial Sequence
  Guide RNA
caguucucaccuuacaaaac

SEQ ID NO: 2557 - RNA, 20 nt, Artificial Sequence
  Guide RNA
cauaaaacccagacaguucu

SEQ ID NO: 2558 - RNA, 20 nt, Artificial Sequence
  Guide RNA
ccagacaguucucaccuuac

SEQ ID NO: 2559 - RNA, 20 nt, Artificial Sequence
  Guide RNA
cccagacaguucucaccuua

SEQ ID NO: 2560 - RNA, 20 nt, Artificial Sequence
  Guide RNA
cgagguuuuguaaggugaga

SEQ ID NO: 2561 - RNA, 20 nt, Artificial Sequence
  Guide RNA
gaacugucuggguuuuaugc

SEQ ID NO: 2562 - RNA, 20 nt, Artificial Sequence
  Guide RNA
gacaguucucaccuuacaaa

SEQ ID NO: 2563 - RNA, 20 nt, Artificial Sequence
  Guide RNA
gacgagguuuuguaagguga

SEQ ID NO: 2564 - RNA, 20 nt, Artificial Sequence
  Guide RNA
gagaacugucuggguuuuau

SEQ ID NO: 2565 - RNA, 20 nt, Artificial Sequence
  Guide RNA
gagagcauaaaacccagaca

SEQ ID NO: 2566 - RNA, 20 nt, Artificial Sequence
  Guide RNA
gagcauaaaacccagacagu

SEQ ID NO: 2567 - RNA, 20 nt, Artificial Sequence
  Guide RNA
gagguuuuguaaggugagaa

SEQ ID NO: 2568 - RNA, 20 nt, Artificial Sequence
  Guide RNA
gcauaaaacccagacaguuc

SEQ ID NO: 2569 - RNA, 20 nt, Artificial Sequence
  Guide RNA
ggacgagguuuuguaaggug

SEQ ID NO: 2570 - RNA, 20 nt, Artificial Sequence
  Guide RNA
ggugagaacugucuggguuu

SEQ ID NO: 2571 - RNA, 20 nt, Artificial Sequence
  Guide RNA
gguuuuguaaggugagaacu

SEQ ID NO: 2572 - RNA, 20 nt, Artificial Sequence
  Guide RNA
guaaggugagaacugucugg

SEQ ID NO: 2573 - RNA, 20 nt, Artificial Sequence
  Guide RNA
gugagaacugucuggguuuu

SEQ ID NO: 2574 - RNA, 20 nt, Artificial Sequence
  Guide RNA
guucucaccuuacaaaaccu

SEQ ID NO: 2575 - RNA, 20 nt, Artificial Sequence
  Guide RNA
guuuuguaaggugagaacug

SEQ ID NO: 2576 - RNA, 20 nt, Artificial Sequence
  Guide RNA
uaaaacccagacaguucuca

SEQ ID NO: 2577 - RNA, 20 nt, Artificial Sequence
  Guide RNA
uaaggugagaacugucuggg

SEQ ID NO: 2578 - RNA, 20 nt, Artificial Sequence
  Guide RNA
ugagaacugucuggguuuua

SEQ ID NO: 2579 - RNA, 20 nt, Artificial Sequence
  Guide RNA
uggacgagguuuuguaaggu

SEQ ID NO: 2580 - RNA, 20 nt, Artificial Sequence
  Guide RNA
uguaaggugagaacugucug

SEQ ID NO: 2581 - RNA, 20 nt, Artificial Sequence
  Guide RNA
uucucaccuuacaaaaccuc

SEQ ID NO: 2582 - RNA, 20 nt, Artificial Sequence
  Guide RNA
uuguaaggugagaacugucu

SEQ ID NO: 2583 - RNA, 20 nt, Artificial Sequence
  Guide RNA
uuuguaaggugagaacuguc

SEQ ID NO: 2584 - RNA, 20 nt, Artificial Sequence
  Guide RNA
uuuuguaaggugagaacugu

SEQ ID NO: 2585 - RNA, 21 nt, Artificial Sequence
  Guide RNA
aaaacccagacaguucucacc

SEQ ID NO: 2586 - RNA, 21 nt, Artificial Sequence
  Guide RNA
aaacccagacaguucucaccu

SEQ ID NO: 2587 - RNA, 21 nt, Artificial Sequence
  Guide RNA
aacccagacaguucucaccuu

SEQ ID NO: 2588 - RNA, 21 nt, Artificial Sequence
  Guide RNA
aaggugagaacugucuggguu

SEQ ID NO: 2589 - RNA, 21 nt, Artificial Sequence
  Guide RNA
acaguucucaccuuacaaaac

SEQ ID NO: 2590 - RNA, 21 nt, Artificial Sequence
  Guide RNA
acccagacaguucucaccuua

SEQ ID NO: 2591 - RNA, 21 nt, Artificial Sequence
  Guide RNA
acgagguuuuguaaggugaga

SEQ ID NO: 2592 - RNA, 21 nt, Artificial Sequence
  Guide RNA
agaacugucuggguuuuaugc

SEQ ID NO: 2593 - RNA, 21 nt, Artificial Sequence
  Guide RNA
agacaguucucaccuuacaaa

SEQ ID NO: 2594 - RNA, 21 nt, Artificial Sequence
  Guide RNA
agagagcauaaaacccagaca

SEQ ID NO: 2595 - RNA, 21 nt, Artificial Sequence
  Guide RNA
agagcauaaaacccagacagu

SEQ ID NO: 2596 - RNA, 21 nt, Artificial Sequence
  Guide RNA
agcauaaaacccagacaguuc

SEQ ID NO: 2597 - RNA, 21 nt, Artificial Sequence
  Guide RNA
aggugagaacugucuggguuu

SEQ ID NO: 2598 - RNA, 21 nt, Artificial Sequence
  Guide RNA
agguuuuguaaggugagaacu

SEQ ID NO: 2599 - RNA, 21 nt, Artificial Sequence
  Guide RNA
aguucucaccuuacaaaaccu

SEQ ID NO: 2600 - RNA, 21 nt, Artificial Sequence
  Guide RNA
auaaaacccagacaguucuca

SEQ ID NO: 2601 - RNA, 21 nt, Artificial Sequence
  Guide RNA
cagacaguucucaccuuacaa

SEQ ID NO: 2602 - RNA, 21 nt, Artificial Sequence
  Guide RNA
caguucucaccuuacaaaacc

SEQ ID NO: 2603 - RNA, 21 nt, Artificial Sequence
  Guide RNA
cauaaaacccagacaguucuc

SEQ ID NO: 2604 - RNA, 21 nt, Artificial Sequence
  Guide RNA
ccagacaguucucaccuuaca

SEQ ID NO: 2605 - RNA, 21 nt, Artificial Sequence
  Guide RNA
cccagacaguucucaccuuac

SEQ ID NO: 2606 - RNA, 21 nt, Artificial Sequence
  Guide RNA
cgagguuuuguaaggugagaa

SEQ ID NO: 2607 - RNA, 21 nt, Artificial Sequence
  Guide RNA
gaacugucuggguuuuaugcu

SEQ ID NO: 2608 - RNA, 21 nt, Artificial Sequence
  Guide RNA
gacaguucucaccuuacaaaa

SEQ ID NO: 2609 - RNA, 21 nt, Artificial Sequence
  Guide RNA
gacgagguuuuguaaggugag

SEQ ID NO: 2610 - RNA, 21 nt, Artificial Sequence
  Guide RNA
gagaacugucuggguuuuaug

SEQ ID NO: 2611 - RNA, 21 nt, Artificial Sequence
  Guide RNA
gagagcauaaaacccagacag

SEQ ID NO: 2612 - RNA, 21 nt, Artificial Sequence
  Guide RNA
gagcauaaaacccagacaguu

SEQ ID NO: 2613 - RNA, 21 nt, Artificial Sequence
  Guide RNA
gagguuuuguaaggugagaac

SEQ ID NO: 2614 - RNA, 21 nt, Artificial Sequence
  Guide RNA
gcauaaaacccagacaguucu

SEQ ID NO: 2615 - RNA, 21 nt, Artificial Sequence
  Guide RNA
ggacgagguuuuguaagguga

SEQ ID NO: 2616 - RNA, 21 nt, Artificial Sequence
  Guide RNA
ggugagaacugucuggguuuu

SEQ ID NO: 2617 - RNA, 21 nt, Artificial Sequence
  Guide RNA
gguuuuguaaggugagaacug

SEQ ID NO: 2618 - RNA, 21 nt, Artificial Sequence
  Guide RNA
guaaggugagaacugucuggg

SEQ ID NO: 2619 - RNA, 21 nt, Artificial Sequence
  Guide RNA
gugagaacugucuggguuuua

SEQ ID NO: 2620 - RNA, 21 nt, Artificial Sequence
  Guide RNA
guggacgagguuuuguaaggu

SEQ ID NO: 2621 - RNA, 21 nt, Artificial Sequence
  Guide RNA
guucucaccuuacaaaaccuc

SEQ ID NO: 2622 - RNA, 21 nt, Artificial Sequence
  Guide RNA
guuuuguaaggugagaacugu

SEQ ID NO: 2623 - RNA, 21 nt, Artificial Sequence
  Guide RNA
uaaaacccagacaguucucac

SEQ ID NO: 2624 - RNA, 21 nt, Artificial Sequence
  Guide RNA
uaaggugagaacugucugggu

SEQ ID NO: 2625 - RNA, 21 nt, Artificial Sequence
  Guide RNA
uagagagcauaaaacccagac

SEQ ID NO: 2626 - RNA, 21 nt, Artificial Sequence
  Guide RNA
ugagaacugucuggguuuuau

SEQ ID NO: 2627 - RNA, 21 nt, Artificial Sequence
  Guide RNA
uggacgagguuuuguaaggug

SEQ ID NO: 2628 - RNA, 21 nt, Artificial Sequence
  Guide RNA
uguaaggugagaacugucugg

SEQ ID NO: 2629 - RNA, 21 nt, Artificial Sequence
  Guide RNA
uucucaccuuacaaaaccucg

SEQ ID NO: 2630 - RNA, 21 nt, Artificial Sequence
  Guide RNA
uuguaaggugagaacugucug

SEQ ID NO: 2631 - RNA, 21 nt, Artificial Sequence
  Guide RNA
uuuguaaggugagaacugucu

SEQ ID NO: 2632 - RNA, 21 nt, Artificial Sequence
  Guide RNA
uuuuguaaggugagaacuguc

SEQ ID NO: 2633 - RNA, 22 nt, Artificial Sequence
  Guide RNA
aaaacccagacaguucucaccu

SEQ ID NO: 2634 - RNA, 22 nt, Artificial Sequence
  Guide RNA
aaacccagacaguucucaccuu

SEQ ID NO: 2635 - RNA, 22 nt, Artificial Sequence
  Guide RNA
aacccagacaguucucaccuua

SEQ ID NO: 2636 - RNA, 22 nt, Artificial Sequence
  Guide RNA
aaggugagaacugucuggguuu

SEQ ID NO: 2637 - RNA, 22 nt, Artificial Sequence
  Guide RNA
acaguucucaccuuacaaaacc

SEQ ID NO: 2638 - RNA, 22 nt, Artificial Sequence
  Guide RNA
acccagacaguucucaccuuac

SEQ ID NO: 2639 - RNA, 22 nt, Artificial Sequence
  Guide RNA
acgagguuuuguaaggugagaa

SEQ ID NO: 2640 - RNA, 22 nt, Artificial Sequence
  Guide RNA
agaacugucuggguuuuaugcu

SEQ ID NO: 2641 - RNA, 22 nt, Artificial Sequence
  Guide RNA
agacaguucucaccuuacaaaa

SEQ ID NO: 2642 - RNA, 22 nt, Artificial Sequence
  Guide RNA
agagagcauaaaacccagacag

SEQ ID NO: 2643 - RNA, 22 nt, Artificial Sequence
  Guide RNA
agagcauaaaacccagacaguu

SEQ ID NO: 2644 - RNA, 22 nt, Artificial Sequence
  Guide RNA
agcauaaaacccagacaguucu

SEQ ID NO: 2645 - RNA, 22 nt, Artificial Sequence
  Guide RNA
aggugagaacugucuggguuuu

SEQ ID NO: 2646 - RNA, 22 nt, Artificial Sequence
  Guide RNA
agguuuuguaaggugagaacug

SEQ ID NO: 2647 - RNA, 22 nt, Artificial Sequence
  Guide RNA
aguucucaccuuacaaaaccuc

SEQ ID NO: 2648 - RNA, 22 nt, Artificial Sequence
  Guide RNA
auaaaacccagacaguucucac

SEQ ID NO: 2649 - RNA, 22 nt, Artificial Sequence
  Guide RNA
cagacaguucucaccuuacaaa

SEQ ID NO: 2650 - RNA, 22 nt, Artificial Sequence
  Guide RNA
caguucucaccuuacaaaaccu

SEQ ID NO: 2651 - RNA, 22 nt, Artificial Sequence
  Guide RNA
cauaaaacccagacaguucuca

SEQ ID NO: 2652 - RNA, 22 nt, Artificial Sequence
  Guide RNA
ccagacaguucucaccuuacaa

SEQ ID NO: 2653 - RNA, 22 nt, Artificial Sequence
  Guide RNA
cccagacaguucucaccuuaca

SEQ ID NO: 2654 - RNA, 22 nt, Artificial Sequence
  Guide RNA
cgagguuuuguaaggugagaac

SEQ ID NO: 2655 - RNA, 22 nt, Artificial Sequence
  Guide RNA
cguggacgagguuuuguaaggu

SEQ ID NO: 2656 - RNA, 22 nt, Artificial Sequence
  Guide RNA
gaacugucuggguuuuaugcuc

SEQ ID NO: 2657 - RNA, 22 nt, Artificial Sequence
  Guide RNA
gacaguucucaccuuacaaaac

SEQ ID NO: 2658 - RNA, 22 nt, Artificial Sequence
  Guide RNA
gacgagguuuuguaaggugaga

SEQ ID NO: 2659 - RNA, 22 nt, Artificial Sequence
  Guide RNA
gagaacugucuggguuuuaugc

SEQ ID NO: 2660 - RNA, 22 nt, Artificial Sequence
  Guide RNA
gagagcauaaaacccagacagu

SEQ ID NO: 2661 - RNA, 22 nt, Artificial Sequence
  Guide RNA
gagcauaaaacccagacaguuc

SEQ ID NO: 2662 - RNA, 22 nt, Artificial Sequence
  Guide RNA
gagguuuuguaaggugagaacu

SEQ ID NO: 2663 - RNA, 22 nt, Artificial Sequence
  Guide RNA
gcauaaaacccagacaguucuc

SEQ ID NO: 2664 - RNA, 22 nt, Artificial Sequence
  Guide RNA
ggacgagguuuuguaaggugag

SEQ ID NO: 2665 - RNA, 22 nt, Artificial Sequence
  Guide RNA
ggugagaacugucuggguuuua

SEQ ID NO: 2666 - RNA, 22 nt, Artificial Sequence
  Guide RNA
gguuuuguaaggugagaacugu

SEQ ID NO: 2667 - RNA, 22 nt, Artificial Sequence
  Guide RNA
guaaggugagaacugucugggu

SEQ ID NO: 2668 - RNA, 22 nt, Artificial Sequence
  Guide RNA
gugagaacugucuggguuuuau

SEQ ID NO: 2669 - RNA, 22 nt, Artificial Sequence
  Guide RNA
guggacgagguuuuguaaggug

SEQ ID NO: 2670 - RNA, 22 nt, Artificial Sequence
  Guide RNA
guucucaccuuacaaaaccucg

SEQ ID NO: 2671 - RNA, 22 nt, Artificial Sequence
  Guide RNA
guuuuguaaggugagaacuguc

SEQ ID NO: 2672 - RNA, 22 nt, Artificial Sequence
  Guide RNA
uaaaacccagacaguucucacc

SEQ ID NO: 2673 - RNA, 22 nt, Artificial Sequence
  Guide RNA
uaaggugagaacugucuggguu

SEQ ID NO: 2674 - RNA, 22 nt, Artificial Sequence
  Guide RNA
uagagagcauaaaacccagaca

SEQ ID NO: 2675 - RNA, 22 nt, Artificial Sequence
  Guide RNA
ugagaacugucuggguuuuaug

SEQ ID NO: 2676 - RNA, 22 nt, Artificial Sequence
  Guide RNA
uggacgagguuuuguaagguga

SEQ ID NO: 2677 - RNA, 22 nt, Artificial Sequence
  Guide RNA
uguaaggugagaacugucuggg

SEQ ID NO: 2678 - RNA, 22 nt, Artificial Sequence
  Guide RNA
uuagagagcauaaaacccagac

SEQ ID NO: 2679 - RNA, 22 nt, Artificial Sequence
  Guide RNA
uucucaccuuacaaaaccucgu

SEQ ID NO: 2680 - RNA, 22 nt, Artificial Sequence
  Guide RNA
uuguaaggugagaacugucugg

SEQ ID NO: 2681 - RNA, 22 nt, Artificial Sequence
  Guide RNA
uuuguaaggugagaacugucug

SEQ ID NO: 2682 - RNA, 22 nt, Artificial Sequence
  Guide RNA
uuuuguaaggugagaacugucu

SEQ ID NO: 2683 - RNA, 20 nt, Artificial Sequence
  Guide RNA
aaaacccagacaguccucac

SEQ ID NO: 2684 - RNA, 20 nt, Artificial Sequence
  Guide RNA
aaacccagacaguccucacc

SEQ ID NO: 2685 - RNA, 20 nt, Artificial Sequence
  Guide RNA
aacccagacaguccucaccu

SEQ ID NO: 2686 - RNA, 20 nt, Artificial Sequence
  Guide RNA
acaguccucaccuuccaaaa

SEQ ID NO: 2687 - RNA, 20 nt, Artificial Sequence
  Guide RNA
acccagacaguccucaccuu

SEQ ID NO: 2688 - RNA, 20 nt, Artificial Sequence
  Guide RNA
accuuccaaaaccucgucca

SEQ ID NO: 2689 - RNA, 20 nt, Artificial Sequence
  Guide RNA
acgagguuuuggaaggugag

SEQ ID NO: 2690 - RNA, 20 nt, Artificial Sequence
  Guide RNA
agacaguccucaccuuccaa

SEQ ID NO: 2691 - RNA, 20 nt, Artificial Sequence
  Guide RNA
agguuuuggaaggugaggac

SEQ ID NO: 2692 - RNA, 20 nt, Artificial Sequence
  Guide RNA
aguccucaccuuccaaaacc

SEQ ID NO: 2693 - RNA, 20 nt, Artificial Sequence
  Guide RNA
auuccguggacgagguuuug

SEQ ID NO: 2694 - RNA, 20 nt, Artificial Sequence
  Guide RNA
caccuuccaaaaccucgucc

SEQ ID NO: 2695 - RNA, 20 nt, Artificial Sequence
  Guide RNA
cagacaguccucaccuucca

SEQ ID NO: 2696 - RNA, 20 nt, Artificial Sequence
  Guide RNA
caguccucaccuuccaaaac

SEQ ID NO: 2697 - RNA, 20 nt, Artificial Sequence
  Guide RNA
cauuccguggacgagguuuu

SEQ ID NO: 2698 - RNA, 20 nt, Artificial Sequence
  Guide RNA
ccagacaguccucaccuucc

SEQ ID NO: 2699 - RNA, 20 nt, Artificial Sequence
  Guide RNA
cccagacaguccucaccuuc

SEQ ID NO: 2700 - RNA, 20 nt, Artificial Sequence
  Guide RNA
ccguggacgagguuuuggaa

SEQ ID NO: 2701 - RNA, 20 nt, Artificial Sequence
  Guide RNA
ccucaccuuccaaaaccucg

SEQ ID NO: 2702 - RNA, 20 nt, Artificial Sequence
  Guide RNA
ccuuccaaaaccucguccac

SEQ ID NO: 2703 - RNA, 20 nt, Artificial Sequence
  Guide RNA
cgagguuuuggaaggugagg

SEQ ID NO: 2704 - RNA, 20 nt, Artificial Sequence
  Guide RNA
cguggacgagguuuuggaag

SEQ ID NO: 2705 - RNA, 20 nt, Artificial Sequence
  Guide RNA
cucaccuuccaaaaccucgu

SEQ ID NO: 2706 - RNA, 20 nt, Artificial Sequence
  Guide RNA
cucauuccguggacgagguu

SEQ ID NO: 2707 - RNA, 20 nt, Artificial Sequence
  Guide RNA
cuuccaaaaccucguccacg

SEQ ID NO: 2708 - RNA, 20 nt, Artificial Sequence
  Guide RNA
gacaguccucaccuuccaaa

SEQ ID NO: 2709 - RNA, 20 nt, Artificial Sequence
  Guide RNA
gacgagguuuuggaagguga

SEQ ID NO: 2710 - RNA, 20 nt, Artificial Sequence
  Guide RNA
gagguuuuggaaggugagga

SEQ ID NO: 2711 - RNA, 20 nt, Artificial Sequence
  Guide RNA
ggaaggugaggacugucugg

SEQ ID NO: 2712 - RNA, 20 nt, Artificial Sequence
  Guide RNA
ggacgagguuuuggaaggug

SEQ ID NO: 2713 - RNA, 20 nt, Artificial Sequence
  Guide RNA
gguuuuggaaggugaggacu

SEQ ID NO: 2714 - RNA, 20 nt, Artificial Sequence
  Guide RNA
guccucaccuuccaaaaccu

SEQ ID NO: 2715 - RNA, 20 nt, Artificial Sequence
  Guide RNA
guggacgagguuuuggaagg

SEQ ID NO: 2716 - RNA, 20 nt, Artificial Sequence
  Guide RNA
guuuuggaaggugaggacug

SEQ ID NO: 2717 - RNA, 20 nt, Artificial Sequence
  Guide RNA
ucaccuuccaaaaccucguc

SEQ ID NO: 2718 - RNA, 20 nt, Artificial Sequence
  Guide RNA
ucauuccguggacgagguuu

SEQ ID NO: 2719 - RNA, 20 nt, Artificial Sequence
  Guide RNA
uccaaaaccucguccacgga

SEQ ID NO: 2720 - RNA, 20 nt, Artificial Sequence
  Guide RNA
uccguggacgagguuuugga

SEQ ID NO: 2721 - RNA, 20 nt, Artificial Sequence
  Guide RNA
uccucaccuuccaaaaccuc

SEQ ID NO: 2722 - RNA, 20 nt, Artificial Sequence
  Guide RNA
uggaaggugaggacugucug

SEQ ID NO: 2723 - RNA, 20 nt, Artificial Sequence
  Guide RNA
uggacgagguuuuggaaggu

SEQ ID NO: 2724 - RNA, 20 nt, Artificial Sequence
  Guide RNA
uuccaaaaccucguccacgg

SEQ ID NO: 2725 - RNA, 20 nt, Artificial Sequence
  Guide RNA
uuccguggacgagguuuugg

SEQ ID NO: 2726 - RNA, 20 nt, Artificial Sequence
  Guide RNA
uuggaaggugaggacugucu

SEQ ID NO: 2727 - RNA, 20 nt, Artificial Sequence
  Guide RNA
uuuggaaggugaggacuguc

SEQ ID NO: 2728 - RNA, 20 nt, Artificial Sequence
  Guide RNA
uuuuggaaggugaggacugu

SEQ ID NO: 2729 - RNA, 21 nt, Artificial Sequence
  Guide RNA
aaaacccagacaguccucacc

SEQ ID NO: 2730 - RNA, 21 nt, Artificial Sequence
  Guide RNA
aaacccagacaguccucaccu

SEQ ID NO: 2731 - RNA, 21 nt, Artificial Sequence
  Guide RNA
aacccagacaguccucaccuu

SEQ ID NO: 2732 - RNA, 21 nt, Artificial Sequence
  Guide RNA
acaguccucaccuuccaaaac

SEQ ID NO: 2733 - RNA, 21 nt, Artificial Sequence
  Guide RNA
acccagacaguccucaccuuc

SEQ ID NO: 2734 - RNA, 21 nt, Artificial Sequence
  Guide RNA
accuuccaaaaccucguccac

SEQ ID NO: 2735 - RNA, 21 nt, Artificial Sequence
  Guide RNA
acgagguuuuggaaggugagg

SEQ ID NO: 2736 - RNA, 21 nt, Artificial Sequence
  Guide RNA
agacaguccucaccuuccaaa

SEQ ID NO: 2737 - RNA, 21 nt, Artificial Sequence
  Guide RNA
agguuuuggaaggugaggacu

SEQ ID NO: 2738 - RNA, 21 nt, Artificial Sequence
  Guide RNA
aguccucaccuuccaaaaccu

SEQ ID NO: 2739 - RNA, 21 nt, Artificial Sequence
  Guide RNA
auuccguggacgagguuuugg

SEQ ID NO: 2740 - RNA, 21 nt, Artificial Sequence
  Guide RNA
caccuuccaaaaccucgucca

SEQ ID NO: 2741 - RNA, 21 nt, Artificial Sequence
  Guide RNA
cagacaguccucaccuuccaa

SEQ ID NO: 2742 - RNA, 21 nt, Artificial Sequence
  Guide RNA
caguccucaccuuccaaaacc

SEQ ID NO: 2743 - RNA, 21 nt, Artificial Sequence
  Guide RNA
cauuccguggacgagguuuug

SEQ ID NO: 2744 - RNA, 21 nt, Artificial Sequence
  Guide RNA
ccagacaguccucaccuucca

SEQ ID NO: 2745 - RNA, 21 nt, Artificial Sequence
  Guide RNA
cccagacaguccucaccuucc

SEQ ID NO: 2746 - RNA, 21 nt, Artificial Sequence
  Guide RNA
ccguggacgagguuuuggaag

SEQ ID NO: 2747 - RNA, 21 nt, Artificial Sequence
  Guide RNA
ccucaccuuccaaaaccucgu

SEQ ID NO: 2748 - RNA, 21 nt, Artificial Sequence
  Guide RNA
ccuuccaaaaccucguccacg

SEQ ID NO: 2749 - RNA, 21 nt, Artificial Sequence
  Guide RNA
cgagguuuuggaaggugagga

SEQ ID NO: 2750 - RNA, 21 nt, Artificial Sequence
  Guide RNA
cguggacgagguuuuggaagg

SEQ ID NO: 2751 - RNA, 21 nt, Artificial Sequence
  Guide RNA
cucaccuuccaaaaccucguc

SEQ ID NO: 2752 - RNA, 21 nt, Artificial Sequence
  Guide RNA
cucauuccguggacgagguuu

SEQ ID NO: 2753 - RNA, 21 nt, Artificial Sequence
  Guide RNA
cuuccaaaaccucguccacgg

SEQ ID NO: 2754 - RNA, 21 nt, Artificial Sequence
  Guide RNA
gacaguccucaccuuccaaaa

SEQ ID NO: 2755 - RNA, 21 nt, Artificial Sequence
  Guide RNA
gacgagguuuuggaaggugag

SEQ ID NO: 2756 - RNA, 21 nt, Artificial Sequence
  Guide RNA
gagguuuuggaaggugaggac

SEQ ID NO: 2757 - RNA, 21 nt, Artificial Sequence
  Guide RNA
ggaaggugaggacugucuggg

SEQ ID NO: 2758 - RNA, 21 nt, Artificial Sequence
  Guide RNA
ggacgagguuuuggaagguga

SEQ ID NO: 2759 - RNA, 21 nt, Artificial Sequence
  Guide RNA
gguuuuggaaggugaggacug

SEQ ID NO: 2760 - RNA, 21 nt, Artificial Sequence
  Guide RNA
guccucaccuuccaaaaccuc

SEQ ID NO: 2761 - RNA, 21 nt, Artificial Sequence
  Guide RNA
guggacgagguuuuggaaggu

SEQ ID NO: 2762 - RNA, 21 nt, Artificial Sequence
  Guide RNA
guuuuggaaggugaggacugu

SEQ ID NO: 2763 - RNA, 21 nt, Artificial Sequence
  Guide RNA
uaaaacccagacaguccucac

SEQ ID NO: 2764 - RNA, 21 nt, Artificial Sequence
  Guide RNA
ucaccuuccaaaaccucgucc

SEQ ID NO: 2765 - RNA, 21 nt, Artificial Sequence
  Guide RNA
ucauuccguggacgagguuuu

SEQ ID NO: 2766 - RNA, 21 nt, Artificial Sequence
  Guide RNA
uccaaaaccucguccacggaa

SEQ ID NO: 2767 - RNA, 21 nt, Artificial Sequence
  Guide RNA
uccguggacgagguuuuggaa

SEQ ID NO: 2768 - RNA, 21 nt, Artificial Sequence
  Guide RNA
uccucaccuuccaaaaccucg

SEQ ID NO: 2769 - RNA, 21 nt, Artificial Sequence
  Guide RNA
ucucauuccguggacgagguu

SEQ ID NO: 2770 - RNA, 21 nt, Artificial Sequence
  Guide RNA
uggaaggugaggacugucugg

SEQ ID NO: 2771 - RNA, 21 nt, Artificial Sequence
  Guide RNA
uggacgagguuuuggaaggug

SEQ ID NO: 2772 - RNA, 21 nt, Artificial Sequence
  Guide RNA
uuccaaaaccucguccacgga

SEQ ID NO: 2773 - RNA, 21 nt, Artificial Sequence
  Guide RNA
uuccguggacgagguuuugga

SEQ ID NO: 2774 - RNA, 21 nt, Artificial Sequence
  Guide RNA
uuggaaggugaggacugucug

SEQ ID NO: 2775 - RNA, 21 nt, Artificial Sequence
  Guide RNA
uuuggaaggugaggacugucu

SEQ ID NO: 2776 - RNA, 21 nt, Artificial Sequence
  Guide RNA
uuuuggaaggugaggacuguc

SEQ ID NO: 2777 - RNA, 22 nt, Artificial Sequence
  Guide RNA
aaaacccagacaguccucaccu

SEQ ID NO: 2778 - RNA, 22 nt, Artificial Sequence
  Guide RNA
aaacccagacaguccucaccuu

SEQ ID NO: 2779 - RNA, 22 nt, Artificial Sequence
  Guide RNA
aacccagacaguccucaccuuc

SEQ ID NO: 2780 - RNA, 22 nt, Artificial Sequence
  Guide RNA
acaguccucaccuuccaaaacc

SEQ ID NO: 2781 - RNA, 22 nt, Artificial Sequence
  Guide RNA
acccagacaguccucaccuucc

SEQ ID NO: 2782 - RNA, 22 nt, Artificial Sequence
  Guide RNA
accuuccaaaaccucguccacg

SEQ ID NO: 2783 - RNA, 22 nt, Artificial Sequence
  Guide RNA
acgagguuuuggaaggugagga

SEQ ID NO: 2784 - RNA, 22 nt, Artificial Sequence
  Guide RNA
agacaguccucaccuuccaaaa

SEQ ID NO: 2785 - RNA, 22 nt, Artificial Sequence
  Guide RNA
agguuuuggaaggugaggacug

SEQ ID NO: 2786 - RNA, 22 nt, Artificial Sequence
  Guide RNA
aguccucaccuuccaaaaccuc

SEQ ID NO: 2787 - RNA, 22 nt, Artificial Sequence
  Guide RNA
auaaaacccagacaguccucac

SEQ ID NO: 2788 - RNA, 22 nt, Artificial Sequence
  Guide RNA
auuccguggacgagguuuugga

SEQ ID NO: 2789 - RNA, 22 nt, Artificial Sequence
  Guide RNA
caccuuccaaaaccucguccac

SEQ ID NO: 2790 - RNA, 22 nt, Artificial Sequence
  Guide RNA
cagacaguccucaccuuccaaa

SEQ ID NO: 2791 - RNA, 22 nt, Artificial Sequence
  Guide RNA
caguccucaccuuccaaaaccu

SEQ ID NO: 2792 - RNA, 22 nt, Artificial Sequence
  Guide RNA
cauuccguggacgagguuuugg

SEQ ID NO: 2793 - RNA, 22 nt, Artificial Sequence
  Guide RNA
ccagacaguccucaccuuccaa

SEQ ID NO: 2794 - RNA, 22 nt, Artificial Sequence
  Guide RNA
cccagacaguccucaccuucca

SEQ ID NO: 2795 - RNA, 22 nt, Artificial Sequence
  Guide RNA
ccguggacgagguuuuggaagg

SEQ ID NO: 2796 - RNA, 22 nt, Artificial Sequence
  Guide RNA
ccucaccuuccaaaaccucguc

SEQ ID NO: 2797 - RNA, 22 nt, Artificial Sequence
  Guide RNA
ccuuccaaaaccucguccacgg

SEQ ID NO: 2798 - RNA, 22 nt, Artificial Sequence
  Guide RNA
cgagguuuuggaaggugaggac

SEQ ID NO: 2799 - RNA, 22 nt, Artificial Sequence
  Guide RNA
cguggacgagguuuuggaaggu

SEQ ID NO: 2800 - RNA, 22 nt, Artificial Sequence
  Guide RNA
cucaccuuccaaaaccucgucc

SEQ ID NO: 2801 - RNA, 22 nt, Artificial Sequence
  Guide RNA
cucauuccguggacgagguuuu

SEQ ID NO: 2802 - RNA, 22 nt, Artificial Sequence
  Guide RNA
cuuccaaaaccucguccacgga

SEQ ID NO: 2803 - RNA, 22 nt, Artificial Sequence
  Guide RNA
gacaguccucaccuuccaaaac

SEQ ID NO: 2804 - RNA, 22 nt, Artificial Sequence
  Guide RNA
gacgagguuuuggaaggugagg

SEQ ID NO: 2805 - RNA, 22 nt, Artificial Sequence
  Guide RNA
gagguuuuggaaggugaggacu

SEQ ID NO: 2806 - RNA, 22 nt, Artificial Sequence
  Guide RNA
ggaaggugaggacugucugggu

SEQ ID NO: 2807 - RNA, 22 nt, Artificial Sequence
  Guide RNA
ggacgagguuuuggaaggugag

SEQ ID NO: 2808 - RNA, 22 nt, Artificial Sequence
  Guide RNA
gguuuuggaaggugaggacugu

SEQ ID NO: 2809 - RNA, 22 nt, Artificial Sequence
  Guide RNA
guccucaccuuccaaaaccucg

SEQ ID NO: 2810 - RNA, 22 nt, Artificial Sequence
  Guide RNA
gucucauuccguggacgagguu

SEQ ID NO: 2811 - RNA, 22 nt, Artificial Sequence
  Guide RNA
guggacgagguuuuggaaggug

SEQ ID NO: 2812 - RNA, 22 nt, Artificial Sequence
  Guide RNA
guuuuggaaggugaggacuguc

SEQ ID NO: 2813 - RNA, 22 nt, Artificial Sequence
  Guide RNA
uaaaacccagacaguccucacc

SEQ ID NO: 2814 - RNA, 22 nt, Artificial Sequence
  Guide RNA
ucaccuuccaaaaccucgucca

SEQ ID NO: 2815 - RNA, 22 nt, Artificial Sequence
  Guide RNA
ucauuccguggacgagguuuug

SEQ ID NO: 2816 - RNA, 22 nt, Artificial Sequence
  Guide RNA
uccaaaaccucguccacggaau

SEQ ID NO: 2817 - RNA, 22 nt, Artificial Sequence
  Guide RNA
uccguggacgagguuuuggaag

SEQ ID NO: 2818 - RNA, 22 nt, Artificial Sequence
  Guide RNA
uccucaccuuccaaaaccucgu

SEQ ID NO: 2819 - RNA, 22 nt, Artificial Sequence
  Guide RNA
ucucauuccguggacgagguuu

SEQ ID NO: 2820 - RNA, 22 nt, Artificial Sequence
  Guide RNA
uggaaggugaggacugucuggg

SEQ ID NO: 2821 - RNA, 22 nt, Artificial Sequence
  Guide RNA
uggacgagguuuuggaagguga

SEQ ID NO: 2822 - RNA, 22 nt, Artificial Sequence
  Guide RNA
uuccaaaaccucguccacggaa

SEQ ID NO: 2823 - RNA, 22 nt, Artificial Sequence
  Guide RNA
uuccguggacgagguuuuggaa

SEQ ID NO: 2824 - RNA, 22 nt, Artificial Sequence
  Guide RNA
uuggaaggugaggacugucugg

SEQ ID NO: 2825 - RNA, 22 nt, Artificial Sequence
  Guide RNA
uuuggaaggugaggacugucug

SEQ ID NO: 2826 - RNA, 22 nt, Artificial Sequence
  Guide RNA
uuuuggaaggugaggacugucu

SEQ ID NO: 2827 - RNA, 20 nt, Artificial Sequence
  Guide RNA
aaaagaggucucaauguggg

SEQ ID NO: 2828 - RNA, 20 nt, Artificial Sequence
  Guide RNA
aaagaggucucaaugugggc

SEQ ID NO: 2829 - RNA, 20 nt, Artificial Sequence
  Guide RNA
aacauguucagcuggcccac

SEQ ID NO: 2830 - RNA, 20 nt, Artificial Sequence
  Guide RNA
aagaggucucaaugugggcc

SEQ ID NO: 2831 - RNA, 20 nt, Artificial Sequence
  Guide RNA
aaugugggccagcugaacau

SEQ ID NO: 2832 - RNA, 20 nt, Artificial Sequence
  Guide RNA
acauguucagcuggcccaca

SEQ ID NO: 2833 - RNA, 20 nt, Artificial Sequence
  Guide RNA
accaaaagaggucucaaugu

SEQ ID NO: 2834 - RNA, 20 nt, Artificial Sequence
  Guide RNA
agaggucucaaugugggcca

SEQ ID NO: 2835 - RNA, 20 nt, Artificial Sequence
  Guide RNA
agcuggcccacauugagacc

SEQ ID NO: 2836 - RNA, 20 nt, Artificial Sequence
  Guide RNA
aggucucaaugugggccagc

SEQ ID NO: 2837 - RNA, 20 nt, Artificial Sequence
  Guide RNA
augugggccagcugaacaug

SEQ ID NO: 2838 - RNA, 20 nt, Artificial Sequence
  Guide RNA
auguucagcuggcccacauu

SEQ ID NO: 2839 - RNA, 20 nt, Artificial Sequence
  Guide RNA
caaaagaggucucaaugugg

SEQ ID NO: 2840 - RNA, 20 nt, Artificial Sequence
  Guide RNA
caacauguucagcuggccca

SEQ ID NO: 2841 - RNA, 20 nt, Artificial Sequence
  Guide RNA
caaugugggccagcugaaca

SEQ ID NO: 2842 - RNA, 20 nt, Artificial Sequence
  Guide RNA
caccaaaagaggucucaaug

SEQ ID NO: 2843 - RNA, 20 nt, Artificial Sequence
  Guide RNA
cagcuggcccacauugagac

SEQ ID NO: 2844 - RNA, 20 nt, Artificial Sequence
  Guide RNA
cauguucagcuggcccacau

SEQ ID NO: 2845 - RNA, 20 nt, Artificial Sequence
  Guide RNA
ccaaaagaggucucaaugug

SEQ ID NO: 2846 - RNA, 20 nt, Artificial Sequence
  Guide RNA
ccaacauguucagcuggccc

SEQ ID NO: 2847 - RNA, 20 nt, Artificial Sequence
  Guide RNA
cccaacauguucagcuggcc

SEQ ID NO: 2848 - RNA, 20 nt, Artificial Sequence
  Guide RNA
cucaaugugggccagcugaa

SEQ ID NO: 2849 - RNA, 20 nt, Artificial Sequence
  Guide RNA
cucccaacauguucagcugg

SEQ ID NO: 2850 - RNA, 20 nt, Artificial Sequence
  Guide RNA
cucucccaacauguucagcu

SEQ ID NO: 2851 - RNA, 20 nt, Artificial Sequence
  Guide RNA
cuggcccacauugagaccuc

SEQ ID NO: 2852 - RNA, 20 nt, Artificial Sequence
  Guide RNA
gaggucucaaugugggccag

SEQ ID NO: 2853 - RNA, 20 nt, Artificial Sequence
  Guide RNA
gcccacauugagaccucuuu

SEQ ID NO: 2854 - RNA, 20 nt, Artificial Sequence
  Guide RNA
gcuggcccacauugagaccu

SEQ ID NO: 2855 - RNA, 20 nt, Artificial Sequence
  Guide RNA
ggccagcugaacauguuggg

SEQ ID NO: 2856 - RNA, 20 nt, Artificial Sequence
  Guide RNA
ggcccacauugagaccucuu

SEQ ID NO: 2857 - RNA, 20 nt, Artificial Sequence
  Guide RNA
gggccagcugaacauguugg

SEQ ID NO: 2858 - RNA, 20 nt, Artificial Sequence
  Guide RNA
ggucucaaugugggccagcu

SEQ ID NO: 2859 - RNA, 20 nt, Artificial Sequence
  Guide RNA
gucucaaugugggccagcug

SEQ ID NO: 2860 - RNA, 20 nt, Artificial Sequence
  Guide RNA
gugggccagcugaacauguu

SEQ ID NO: 2861 - RNA, 20 nt, Artificial Sequence
  Guide RNA
guucagcuggcccacauuga

SEQ ID NO: 2862 - RNA, 20 nt, Artificial Sequence
  Guide RNA
ucaaugugggccagcugaac

SEQ ID NO: 2863 - RNA, 20 nt, Artificial Sequence
  Guide RNA
ucagcuggcccacauugaga

SEQ ID NO: 2864 - RNA, 20 nt, Artificial Sequence
  Guide RNA
ucccaacauguucagcuggc

SEQ ID NO: 2865 - RNA, 20 nt, Artificial Sequence
  Guide RNA
ucucaaugugggccagcuga

SEQ ID NO: 2866 - RNA, 20 nt, Artificial Sequence
  Guide RNA
ucucccaacauguucagcug

SEQ ID NO: 2867 - RNA, 20 nt, Artificial Sequence
  Guide RNA
ucucucccaacauguucagc

SEQ ID NO: 2868 - RNA, 20 nt, Artificial Sequence
  Guide RNA
uggcccacauugagaccucu

SEQ ID NO: 2869 - RNA, 20 nt, Artificial Sequence
  Guide RNA
ugggccagcugaacauguug

SEQ ID NO: 2870 - RNA, 20 nt, Artificial Sequence
  Guide RNA
ugugggccagcugaacaugu

SEQ ID NO: 2871 - RNA, 20 nt, Artificial Sequence
  Guide RNA
uguucagcuggcccacauug

SEQ ID NO: 2872 - RNA, 20 nt, Artificial Sequence
  Guide RNA
uucagcuggcccacauugag

SEQ ID NO: 2873 - RNA, 21 nt, Artificial Sequence
  Guide RNA
aaaagaggucucaaugugggc

SEQ ID NO: 2874 - RNA, 21 nt, Artificial Sequence
  Guide RNA
aaagaggucucaaugugggcc

SEQ ID NO: 2875 - RNA, 21 nt, Artificial Sequence
  Guide RNA
aacauguucagcuggcccaca

SEQ ID NO: 2876 - RNA, 21 nt, Artificial Sequence
  Guide RNA
aagaggucucaaugugggcca

SEQ ID NO: 2877 - RNA, 21 nt, Artificial Sequence
  Guide RNA
aaugugggccagcugaacaug

SEQ ID NO: 2878 - RNA, 21 nt, Artificial Sequence
  Guide RNA
acauguucagcuggcccacau

SEQ ID NO: 2879 - RNA, 21 nt, Artificial Sequence
  Guide RNA
accaaaagaggucucaaugug

SEQ ID NO: 2880 - RNA, 21 nt, Artificial Sequence
  Guide RNA
agaggucucaaugugggccag

SEQ ID NO: 2881 - RNA, 21 nt, Artificial Sequence
  Guide RNA
agcuggcccacauugagaccu

SEQ ID NO: 2882 - RNA, 21 nt, Artificial Sequence
  Guide RNA
aggucucaaugugggccagcu

SEQ ID NO: 2883 - RNA, 21 nt, Artificial Sequence
  Guide RNA
augugggccagcugaacaugu

SEQ ID NO: 2884 - RNA, 21 nt, Artificial Sequence
  Guide RNA
auguucagcuggcccacauug

SEQ ID NO: 2885 - RNA, 21 nt, Artificial Sequence
  Guide RNA
caaaagaggucucaauguggg

SEQ ID NO: 2886 - RNA, 21 nt, Artificial Sequence
  Guide RNA
caacauguucagcuggcccac

SEQ ID NO: 2887 - RNA, 21 nt, Artificial Sequence
  Guide RNA
caaugugggccagcugaacau

SEQ ID NO: 2888 - RNA, 21 nt, Artificial Sequence
  Guide RNA
caccaaaagaggucucaaugu

SEQ ID NO: 2889 - RNA, 21 nt, Artificial Sequence
  Guide RNA
cagcuggcccacauugagacc

SEQ ID NO: 2890 - RNA, 21 nt, Artificial Sequence
  Guide RNA
cauguucagcuggcccacauu

SEQ ID NO: 2891 - RNA, 21 nt, Artificial Sequence
  Guide RNA
ccaaaagaggucucaaugugg

SEQ ID NO: 2892 - RNA, 21 nt, Artificial Sequence
  Guide RNA
ccaacauguucagcuggccca

SEQ ID NO: 2893 - RNA, 21 nt, Artificial Sequence
  Guide RNA
cccaacauguucagcuggccc

SEQ ID NO: 2894 - RNA, 21 nt, Artificial Sequence
  Guide RNA
cucaaugugggccagcugaac

SEQ ID NO: 2895 - RNA, 21 nt, Artificial Sequence
  Guide RNA
cucccaacauguucagcuggc

SEQ ID NO: 2896 - RNA, 21 nt, Artificial Sequence
  Guide RNA
cucucccaacauguucagcug

SEQ ID NO: 2897 - RNA, 21 nt, Artificial Sequence
  Guide RNA
cuggcccacauugagaccucu

SEQ ID NO: 2898 - RNA, 21 nt, Artificial Sequence
  Guide RNA
gaggucucaaugugggccagc

SEQ ID NO: 2899 - RNA, 21 nt, Artificial Sequence
  Guide RNA
gcccacauugagaccucuuuu

SEQ ID NO: 2900 - RNA, 21 nt, Artificial Sequence
  Guide RNA
gcuggcccacauugagaccuc

SEQ ID NO: 2901 - RNA, 21 nt, Artificial Sequence
  Guide RNA
ggccagcugaacauguuggga

SEQ ID NO: 2902 - RNA, 21 nt, Artificial Sequence
  Guide RNA
ggcccacauugagaccucuuu

SEQ ID NO: 2903 - RNA, 21 nt, Artificial Sequence
  Guide RNA
gggccagcugaacauguuggg

SEQ ID NO: 2904 - RNA, 21 nt, Artificial Sequence
  Guide RNA
ggucucaaugugggccagcug

SEQ ID NO: 2905 - RNA, 21 nt, Artificial Sequence
  Guide RNA
gucucaaugugggccagcuga

SEQ ID NO: 2906 - RNA, 21 nt, Artificial Sequence
  Guide RNA
gugggccagcugaacauguug

SEQ ID NO: 2907 - RNA, 21 nt, Artificial Sequence
  Guide RNA
guucagcuggcccacauugag

SEQ ID NO: 2908 - RNA, 21 nt, Artificial Sequence
  Guide RNA
ucaaugugggccagcugaaca

SEQ ID NO: 2909 - RNA, 21 nt, Artificial Sequence
  Guide RNA
ucaccaaaagaggucucaaug

SEQ ID NO: 2910 - RNA, 21 nt, Artificial Sequence
  Guide RNA
ucagcuggcccacauugagac

SEQ ID NO: 2911 - RNA, 21 nt, Artificial Sequence
  Guide RNA
ucccaacauguucagcuggcc

SEQ ID NO: 2912 - RNA, 21 nt, Artificial Sequence
  Guide RNA
ucucaaugugggccagcugaa

SEQ ID NO: 2913 - RNA, 21 nt, Artificial Sequence
  Guide RNA
ucucccaacauguucagcugg

SEQ ID NO: 2914 - RNA, 21 nt, Artificial Sequence
  Guide RNA
ucucucccaacauguucagcu

SEQ ID NO: 2915 - RNA, 21 nt, Artificial Sequence
  Guide RNA
uggcccacauugagaccucuu

SEQ ID NO: 2916 - RNA, 21 nt, Artificial Sequence
  Guide RNA
ugggccagcugaacauguugg

SEQ ID NO: 2917 - RNA, 21 nt, Artificial Sequence
  Guide RNA
ugugggccagcugaacauguu

SEQ ID NO: 2918 - RNA, 21 nt, Artificial Sequence
  Guide RNA
uguucagcuggcccacauuga

SEQ ID NO: 2919 - RNA, 21 nt, Artificial Sequence
  Guide RNA
uucagcuggcccacauugaga

SEQ ID NO: 2920 - RNA, 21 nt, Artificial Sequence
  Guide RNA
uucucucccaacauguucagc

SEQ ID NO: 2921 - RNA, 22 nt, Artificial Sequence
  Guide RNA
aaaagaggucucaaugugggcc

SEQ ID NO: 2922 - RNA, 22 nt, Artificial Sequence
  Guide RNA
aaagaggucucaaugugggcca

SEQ ID NO: 2923 - RNA, 22 nt, Artificial Sequence
  Guide RNA
aacauguucagcuggcccacau

SEQ ID NO: 2924 - RNA, 22 nt, Artificial Sequence
  Guide RNA
aagaggucucaaugugggccag

SEQ ID NO: 2925 - RNA, 22 nt, Artificial Sequence
  Guide RNA
aaugugggccagcugaacaugu

SEQ ID NO: 2926 - RNA, 22 nt, Artificial Sequence
  Guide RNA
acauguucagcuggcccacauu

SEQ ID NO: 2927 - RNA, 22 nt, Artificial Sequence
  Guide RNA
accaaaagaggucucaaugugg

SEQ ID NO: 2928 - RNA, 22 nt, Artificial Sequence
  Guide RNA
agaggucucaaugugggccagc

SEQ ID NO: 2929 - RNA, 22 nt, Artificial Sequence
  Guide RNA
agcuggcccacauugagaccuc

SEQ ID NO: 2930 - RNA, 22 nt, Artificial Sequence
  Guide RNA
aggucucaaugugggccagcug

SEQ ID NO: 2931 - RNA, 22 nt, Artificial Sequence
  Guide RNA
augugggccagcugaacauguu

SEQ ID NO: 2932 - RNA, 22 nt, Artificial Sequence
  Guide RNA
auguucagcuggcccacauuga

SEQ ID NO: 2933 - RNA, 22 nt, Artificial Sequence
  Guide RNA
caaaagaggucucaaugugggc

SEQ ID NO: 2934 - RNA, 22 nt, Artificial Sequence
  Guide RNA
caacauguucagcuggcccaca

SEQ ID NO: 2935 - RNA, 22 nt, Artificial Sequence
  Guide RNA
caaugugggccagcugaacaug

SEQ ID NO: 2936 - RNA, 22 nt, Artificial Sequence
  Guide RNA
caccaaaagaggucucaaugug

SEQ ID NO: 2937 - RNA, 22 nt, Artificial Sequence
  Guide RNA
cagcuggcccacauugagaccu

SEQ ID NO: 2938 - RNA, 22 nt, Artificial Sequence
  Guide RNA
cauguucagcuggcccacauug

SEQ ID NO: 2939 - RNA, 22 nt, Artificial Sequence
  Guide RNA
ccaaaagaggucucaauguggg

SEQ ID NO: 2940 - RNA, 22 nt, Artificial Sequence
  Guide RNA
ccaacauguucagcuggcccac

SEQ ID NO: 2941 - RNA, 22 nt, Artificial Sequence
  Guide RNA
cccaacauguucagcuggccca

SEQ ID NO: 2942 - RNA, 22 nt, Artificial Sequence
  Guide RNA
cucaaugugggccagcugaaca

SEQ ID NO: 2943 - RNA, 22 nt, Artificial Sequence
  Guide RNA
cucccaacauguucagcuggcc

SEQ ID NO: 2944 - RNA, 22 nt, Artificial Sequence
  Guide RNA
cucucccaacauguucagcugg

SEQ ID NO: 2945 - RNA, 22 nt, Artificial Sequence
  Guide RNA
cuggcccacauugagaccucuu

SEQ ID NO: 2946 - RNA, 22 nt, Artificial Sequence
  Guide RNA
cuucucucccaacauguucagc

SEQ ID NO: 2947 - RNA, 22 nt, Artificial Sequence
  Guide RNA
gaggucucaaugugggccagcu

SEQ ID NO: 2948 - RNA, 22 nt, Artificial Sequence
  Guide RNA
gcccacauugagaccucuuuug

SEQ ID NO: 2949 - RNA, 22 nt, Artificial Sequence
  Guide RNA
gcuggcccacauugagaccucu

SEQ ID NO: 2950 - RNA, 22 nt, Artificial Sequence
  Guide RNA
ggccagcugaacauguugggag

SEQ ID NO: 2951 - RNA, 22 nt, Artificial Sequence
  Guide RNA
ggcccacauugagaccucuuuu

SEQ ID NO: 2952 - RNA, 22 nt, Artificial Sequence
  Guide RNA
gggccagcugaacauguuggga

SEQ ID NO: 2953 - RNA, 22 nt, Artificial Sequence
  Guide RNA
ggucucaaugugggccagcuga

SEQ ID NO: 2954 - RNA, 22 nt, Artificial Sequence
  Guide RNA
gucaccaaaagaggucucaaug

SEQ ID NO: 2955 - RNA, 22 nt, Artificial Sequence
  Guide RNA
gucucaaugugggccagcugaa

SEQ ID NO: 2956 - RNA, 22 nt, Artificial Sequence
  Guide RNA
gugggccagcugaacauguugg

SEQ ID NO: 2957 - RNA, 22 nt, Artificial Sequence
  Guide RNA
guucagcuggcccacauugaga

SEQ ID NO: 2958 - RNA, 22 nt, Artificial Sequence
  Guide RNA
ucaaugugggccagcugaacau

SEQ ID NO: 2959 - RNA, 22 nt, Artificial Sequence
  Guide RNA
ucaccaaaagaggucucaaugu

SEQ ID NO: 2960 - RNA, 22 nt, Artificial Sequence
  Guide RNA
ucagcuggcccacauugagacc

SEQ ID NO: 2961 - RNA, 22 nt, Artificial Sequence
  Guide RNA
ucccaacauguucagcuggccc

SEQ ID NO: 2962 - RNA, 22 nt, Artificial Sequence
  Guide RNA
ucucaaugugggccagcugaac

SEQ ID NO: 2963 - RNA, 22 nt, Artificial Sequence
  Guide RNA
ucucccaacauguucagcuggc

SEQ ID NO: 2964 - RNA, 22 nt, Artificial Sequence
  Guide RNA
ucucucccaacauguucagcug

SEQ ID NO: 2965 - RNA, 22 nt, Artificial Sequence
  Guide RNA
uggcccacauugagaccucuuu

SEQ ID NO: 2966 - RNA, 22 nt, Artificial Sequence
  Guide RNA
ugggccagcugaacauguuggg

SEQ ID NO: 2967 - RNA, 22 nt, Artificial Sequence
  Guide RNA
ugugggccagcugaacauguug

SEQ ID NO: 2968 - RNA, 22 nt, Artificial Sequence
  Guide RNA
uguucagcuggcccacauugag

SEQ ID NO: 2969 - RNA, 22 nt, Artificial Sequence
  Guide RNA
uucagcuggcccacauugagac

SEQ ID NO: 2970 - RNA, 22 nt, Artificial Sequence
  Guide RNA
uucucucccaacauguucagcu

SEQ ID NO: 2971 - RNA, 20 nt, Artificial Sequence
  Guide RNA
aacaugcugguggcagaacc

SEQ ID NO: 2972 - RNA, 20 nt, Artificial Sequence
  Guide RNA
acaacaugcugguggcagaa

SEQ ID NO: 2973 - RNA, 20 nt, Artificial Sequence
  Guide RNA
acaugcugguggcagaaccc

SEQ ID NO: 2974 - RNA, 20 nt, Artificial Sequence
  Guide RNA
acccuggguucugccaccag

SEQ ID NO: 2975 - RNA, 20 nt, Artificial Sequence
  Guide RNA
auacccuggguucugccacc

SEQ ID NO: 2976 - RNA, 20 nt, Artificial Sequence
  Guide RNA
augcugguggcagaacccag

SEQ ID NO: 2977 - RNA, 20 nt, Artificial Sequence
  Guide RNA
caacaugcugguggcagaac

SEQ ID NO: 2978 - RNA, 20 nt, Artificial Sequence
  Guide RNA
cagaacccaggguauggaaa

SEQ ID NO: 2979 - RNA, 20 nt, Artificial Sequence
  Guide RNA
cauacccuggguucugccac

SEQ ID NO: 2980 - RNA, 20 nt, Artificial Sequence
  Guide RNA
caugcugguggcagaaccca

SEQ ID NO: 2981 - RNA, 20 nt, Artificial Sequence
  Guide RNA
ccauacccuggguucugcca

SEQ ID NO: 2982 - RNA, 20 nt, Artificial Sequence
  Guide RNA
cccuggguucugccaccagc

SEQ ID NO: 2983 - RNA, 20 nt, Artificial Sequence
  Guide RNA
ccuggguucugccaccagca

SEQ ID NO: 2984 - RNA, 20 nt, Artificial Sequence
  Guide RNA
cugccaccagcauguuguac

SEQ ID NO: 2985 - RNA, 20 nt, Artificial Sequence
  Guide RNA
cuggguucugccaccagcau

SEQ ID NO: 2986 - RNA, 20 nt, Artificial Sequence
  Guide RNA
cugguggcagaacccagggu

SEQ ID NO: 2987 - RNA, 20 nt, Artificial Sequence
  Guide RNA
cuuugguacaacaugcuggu

SEQ ID NO: 2988 - RNA, 20 nt, Artificial Sequence
  Guide RNA
gcagaacccaggguauggaa

SEQ ID NO: 2989 - RNA, 20 nt, Artificial Sequence
  Guide RNA
gcugguggcagaacccaggg

SEQ ID NO: 2990 - RNA, 20 nt, Artificial Sequence
  Guide RNA
ggcagaacccaggguaugga

SEQ ID NO: 2991 - RNA, 20 nt, Artificial Sequence
  Guide RNA
ggguucugccaccagcaugu

SEQ ID NO: 2992 - RNA, 20 nt, Artificial Sequence
  Guide RNA
gguacaacaugcugguggca

SEQ ID NO: 2993 - RNA, 20 nt, Artificial Sequence
  Guide RNA
gguggcagaacccaggguau

SEQ ID NO: 2994 - RNA, 20 nt, Artificial Sequence
  Guide RNA
gguucugccaccagcauguu

SEQ ID NO: 2995 - RNA, 20 nt, Artificial Sequence
  Guide RNA
guacaacaugcugguggcag

SEQ ID NO: 2996 - RNA, 20 nt, Artificial Sequence
  Guide RNA
guggcagaacccaggguaug

SEQ ID NO: 2997 - RNA, 20 nt, Artificial Sequence
  Guide RNA
guguuuuccauacccugggu

SEQ ID NO: 2998 - RNA, 20 nt, Artificial Sequence
  Guide RNA
guucugccaccagcauguug

SEQ ID NO: 2999 - RNA, 20 nt, Artificial Sequence
  Guide RNA
guuuuccauacccuggguuc

SEQ ID NO: 3000 - RNA, 20 nt, Artificial Sequence
  Guide RNA
uacaacaugcugguggcaga

SEQ ID NO: 3001 - RNA, 20 nt, Artificial Sequence
  Guide RNA
uacccuggguucugccacca

SEQ ID NO: 3002 - RNA, 20 nt, Artificial Sequence
  Guide RNA
uccauacccuggguucugcc

SEQ ID NO: 3003 - RNA, 20 nt, Artificial Sequence
  Guide RNA
ucugccaccagcauguugua

SEQ ID NO: 3004 - RNA, 20 nt, Artificial Sequence
  Guide RNA
ugcugguggcagaacccagg

SEQ ID NO: 3005 - RNA, 20 nt, Artificial Sequence
  Guide RNA
uggcagaacccaggguaugg

SEQ ID NO: 3006 - RNA, 20 nt, Artificial Sequence
  Guide RNA
uggguucugccaccagcaug

SEQ ID NO: 3007 - RNA, 20 nt, Artificial Sequence
  Guide RNA
ugguacaacaugcugguggc

SEQ ID NO: 3008 - RNA, 20 nt, Artificial Sequence
  Guide RNA
ugguggcagaacccagggua

SEQ ID NO: 3009 - RNA, 20 nt, Artificial Sequence
  Guide RNA
uguguuuuccauacccuggg

SEQ ID NO: 3010 - RNA, 20 nt, Artificial Sequence
  Guide RNA
uguuuuccauacccuggguu

SEQ ID NO: 3011 - RNA, 20 nt, Artificial Sequence
  Guide RNA
uuccauacccuggguucugc

SEQ ID NO: 3012 - RNA, 20 nt, Artificial Sequence
  Guide RNA
uucugccaccagcauguugu

SEQ ID NO: 3013 - RNA, 20 nt, Artificial Sequence
  Guide RNA
uugguacaacaugcuggugg

SEQ ID NO: 3014 - RNA, 20 nt, Artificial Sequence
  Guide RNA
uuuccauacccuggguucug

SEQ ID NO: 3015 - RNA, 20 nt, Artificial Sequence
  Guide RNA
uuugguacaacaugcuggug

SEQ ID NO: 3016 - RNA, 20 nt, Artificial Sequence
  Guide RNA
uuuuccauacccuggguucu

SEQ ID NO: 3017 - RNA, 21 nt, Artificial Sequence
  Guide RNA
aacaugcugguggcagaaccc

SEQ ID NO: 3018 - RNA, 21 nt, Artificial Sequence
  Guide RNA
acaacaugcugguggcagaac

SEQ ID NO: 3019 - RNA, 21 nt, Artificial Sequence
  Guide RNA
acaugcugguggcagaaccca

SEQ ID NO: 3020 - RNA, 21 nt, Artificial Sequence
  Guide RNA
acccuggguucugccaccagc

SEQ ID NO: 3021 - RNA, 21 nt, Artificial Sequence
  Guide RNA
auacccuggguucugccacca

SEQ ID NO: 3022 - RNA, 21 nt, Artificial Sequence
  Guide RNA
augcugguggcagaacccagg

SEQ ID NO: 3023 - RNA, 21 nt, Artificial Sequence
  Guide RNA
auguguuuuccauacccuggg

SEQ ID NO: 3024 - RNA, 21 nt, Artificial Sequence
  Guide RNA
caacaugcugguggcagaacc

SEQ ID NO: 3025 - RNA, 21 nt, Artificial Sequence
  Guide RNA
cagaacccaggguauggaaaa

SEQ ID NO: 3026 - RNA, 21 nt, Artificial Sequence
  Guide RNA
cauacccuggguucugccacc

SEQ ID NO: 3027 - RNA, 21 nt, Artificial Sequence
  Guide RNA
caugcugguggcagaacccag

SEQ ID NO: 3028 - RNA, 21 nt, Artificial Sequence
  Guide RNA
ccauacccuggguucugccac

SEQ ID NO: 3029 - RNA, 21 nt, Artificial Sequence
  Guide RNA
cccuggguucugccaccagca

SEQ ID NO: 3030 - RNA, 21 nt, Artificial Sequence
  Guide RNA
ccuggguucugccaccagcau

SEQ ID NO: 3031 - RNA, 21 nt, Artificial Sequence
  Guide RNA
ccuuugguacaacaugcuggu

SEQ ID NO: 3032 - RNA, 21 nt, Artificial Sequence
  Guide RNA
cugccaccagcauguuguacc

SEQ ID NO: 3033 - RNA, 21 nt, Artificial Sequence
  Guide RNA
cuggguucugccaccagcaug

SEQ ID NO: 3034 - RNA, 21 nt, Artificial Sequence
  Guide RNA
cugguggcagaacccagggua

SEQ ID NO: 3035 - RNA, 21 nt, Artificial Sequence
  Guide RNA
cuuugguacaacaugcuggug

SEQ ID NO: 3036 - RNA, 21 nt, Artificial Sequence
  Guide RNA
gcagaacccaggguauggaaa

SEQ ID NO: 3037 - RNA, 21 nt, Artificial Sequence
  Guide RNA
gcugguggcagaacccagggu

SEQ ID NO: 3038 - RNA, 21 nt, Artificial Sequence
  Guide RNA
ggcagaacccaggguauggaa

SEQ ID NO: 3039 - RNA, 21 nt, Artificial Sequence
  Guide RNA
ggguucugccaccagcauguu

SEQ ID NO: 3040 - RNA, 21 nt, Artificial Sequence
  Guide RNA
gguacaacaugcugguggcag

SEQ ID NO: 3041 - RNA, 21 nt, Artificial Sequence
  Guide RNA
gguggcagaacccaggguaug

SEQ ID NO: 3042 - RNA, 21 nt, Artificial Sequence
  Guide RNA
gguucugccaccagcauguug

SEQ ID NO: 3043 - RNA, 21 nt, Artificial Sequence
  Guide RNA
guacaacaugcugguggcaga

SEQ ID NO: 3044 - RNA, 21 nt, Artificial Sequence
  Guide RNA
guggcagaacccaggguaugg

SEQ ID NO: 3045 - RNA, 21 nt, Artificial Sequence
  Guide RNA
guguuuuccauacccuggguu

SEQ ID NO: 3046 - RNA, 21 nt, Artificial Sequence
  Guide RNA
guucugccaccagcauguugu

SEQ ID NO: 3047 - RNA, 21 nt, Artificial Sequence
  Guide RNA
guuuuccauacccuggguucu

SEQ ID NO: 3048 - RNA, 21 nt, Artificial Sequence
  Guide RNA
uacaacaugcugguggcagaa

SEQ ID NO: 3049 - RNA, 21 nt, Artificial Sequence
  Guide RNA
uacccuggguucugccaccag

SEQ ID NO: 3050 - RNA, 21 nt, Artificial Sequence
  Guide RNA
uccauacccuggguucugcca

SEQ ID NO: 3051 - RNA, 21 nt, Artificial Sequence
  Guide RNA
ucugccaccagcauguuguac

SEQ ID NO: 3052 - RNA, 21 nt, Artificial Sequence
  Guide RNA
ugcugguggcagaacccaggg

SEQ ID NO: 3053 - RNA, 21 nt, Artificial Sequence
  Guide RNA
uggcagaacccaggguaugga

SEQ ID NO: 3054 - RNA, 21 nt, Artificial Sequence
  Guide RNA
uggguucugccaccagcaugu

SEQ ID NO: 3055 - RNA, 21 nt, Artificial Sequence
  Guide RNA
ugguacaacaugcugguggca

SEQ ID NO: 3056 - RNA, 21 nt, Artificial Sequence
  Guide RNA
ugguggcagaacccaggguau

SEQ ID NO: 3057 - RNA, 21 nt, Artificial Sequence
  Guide RNA
uguguuuuccauacccugggu

SEQ ID NO: 3058 - RNA, 21 nt, Artificial Sequence
  Guide RNA
uguuuuccauacccuggguuc

SEQ ID NO: 3059 - RNA, 21 nt, Artificial Sequence
  Guide RNA
uuccauacccuggguucugcc

SEQ ID NO: 3060 - RNA, 21 nt, Artificial Sequence
  Guide RNA
uucugccaccagcauguugua

SEQ ID NO: 3061 - RNA, 21 nt, Artificial Sequence
  Guide RNA
uugguacaacaugcugguggc

SEQ ID NO: 3062 - RNA, 21 nt, Artificial Sequence
  Guide RNA
uuuccauacccuggguucugc

SEQ ID NO: 3063 - RNA, 21 nt, Artificial Sequence
  Guide RNA
uuugguacaacaugcuggugg

SEQ ID NO: 3064 - RNA, 21 nt, Artificial Sequence
  Guide RNA
uuuuccauacccuggguucug

SEQ ID NO: 3065 - RNA, 22 nt, Artificial Sequence
  Guide RNA
aacaugcugguggcagaaccca

SEQ ID NO: 3066 - RNA, 22 nt, Artificial Sequence
  Guide RNA
aauguguuuuccauacccuggg

SEQ ID NO: 3067 - RNA, 22 nt, Artificial Sequence
  Guide RNA
acaacaugcugguggcagaacc

SEQ ID NO: 3068 - RNA, 22 nt, Artificial Sequence
  Guide RNA
acaugcugguggcagaacccag

SEQ ID NO: 3069 - RNA, 22 nt, Artificial Sequence
  Guide RNA
acccuggguucugccaccagca

SEQ ID NO: 3070 - RNA, 22 nt, Artificial Sequence
  Guide RNA
auacccuggguucugccaccag

SEQ ID NO: 3071 - RNA, 22 nt, Artificial Sequence
  Guide RNA
augcugguggcagaacccaggg

SEQ ID NO: 3072 - RNA, 22 nt, Artificial Sequence
  Guide RNA
auguguuuuccauacccugggu

SEQ ID NO: 3073 - RNA, 22 nt, Artificial Sequence
  Guide RNA
caacaugcugguggcagaaccc

SEQ ID NO: 3074 - RNA, 22 nt, Artificial Sequence
  Guide RNA
cagaacccaggguauggaaaac

SEQ ID NO: 3075 - RNA, 22 nt, Artificial Sequence
  Guide RNA
cauacccuggguucugccacca

SEQ ID NO: 3076 - RNA, 22 nt, Artificial Sequence
  Guide RNA
caugcugguggcagaacccagg

SEQ ID NO: 3077 - RNA, 22 nt, Artificial Sequence
  Guide RNA
ccauacccuggguucugccacc

SEQ ID NO: 3078 - RNA, 22 nt, Artificial Sequence
  Guide RNA
cccuggguucugccaccagcau

SEQ ID NO: 3079 - RNA, 22 nt, Artificial Sequence
  Guide RNA
ccuggguucugccaccagcaug

SEQ ID NO: 3080 - RNA, 22 nt, Artificial Sequence
  Guide RNA
ccuuugguacaacaugcuggug

SEQ ID NO: 3081 - RNA, 22 nt, Artificial Sequence
  Guide RNA
cugccaccagcauguuguacca

SEQ ID NO: 3082 - RNA, 22 nt, Artificial Sequence
  Guide RNA
cuggguucugccaccagcaugu

SEQ ID NO: 3083 - RNA, 22 nt, Artificial Sequence
  Guide RNA
cugguggcagaacccaggguau

SEQ ID NO: 3084 - RNA, 22 nt, Artificial Sequence
  Guide RNA
cuuugguacaacaugcuggugg

SEQ ID NO: 3085 - RNA, 22 nt, Artificial Sequence
  Guide RNA
gcagaacccaggguauggaaaa

SEQ ID NO: 3086 - RNA, 22 nt, Artificial Sequence
  Guide RNA
gcugguggcagaacccagggua

SEQ ID NO: 3087 - RNA, 22 nt, Artificial Sequence
  Guide RNA
ggcagaacccaggguauggaaa

SEQ ID NO: 3088 - RNA, 22 nt, Artificial Sequence
  Guide RNA
ggguucugccaccagcauguug

SEQ ID NO: 3089 - RNA, 22 nt, Artificial Sequence
  Guide RNA
gguacaacaugcugguggcaga

SEQ ID NO: 3090 - RNA, 22 nt, Artificial Sequence
  Guide RNA
gguggcagaacccaggguaugg

SEQ ID NO: 3091 - RNA, 22 nt, Artificial Sequence
  Guide RNA
gguucugccaccagcauguugu

SEQ ID NO: 3092 - RNA, 22 nt, Artificial Sequence
  Guide RNA
guacaacaugcugguggcagaa

SEQ ID NO: 3093 - RNA, 22 nt, Artificial Sequence
  Guide RNA
guggcagaacccaggguaugga

SEQ ID NO: 3094 - RNA, 22 nt, Artificial Sequence
  Guide RNA
guguuuuccauacccuggguuc

SEQ ID NO: 3095 - RNA, 22 nt, Artificial Sequence
  Guide RNA
guucugccaccagcauguugua

SEQ ID NO: 3096 - RNA, 22 nt, Artificial Sequence
  Guide RNA
guuuuccauacccuggguucug

SEQ ID NO: 3097 - RNA, 22 nt, Artificial Sequence
  Guide RNA
uacaacaugcugguggcagaac

SEQ ID NO: 3098 - RNA, 22 nt, Artificial Sequence
  Guide RNA
uacccuggguucugccaccagc

SEQ ID NO: 3099 - RNA, 22 nt, Artificial Sequence
  Guide RNA
uccauacccuggguucugccac

SEQ ID NO: 3100 - RNA, 22 nt, Artificial Sequence
  Guide RNA
uccuuugguacaacaugcuggu

SEQ ID NO: 3101 - RNA, 22 nt, Artificial Sequence
  Guide RNA
ucugccaccagcauguuguacc

SEQ ID NO: 3102 - RNA, 22 nt, Artificial Sequence
  Guide RNA
ugcugguggcagaacccagggu

SEQ ID NO: 3103 - RNA, 22 nt, Artificial Sequence
  Guide RNA
uggcagaacccaggguauggaa

SEQ ID NO: 3104 - RNA, 22 nt, Artificial Sequence
  Guide RNA
uggguucugccaccagcauguu

SEQ ID NO: 3105 - RNA, 22 nt, Artificial Sequence
  Guide RNA
ugguacaacaugcugguggcag

SEQ ID NO: 3106 - RNA, 22 nt, Artificial Sequence
  Guide RNA
ugguggcagaacccaggguaug

SEQ ID NO: 3107 - RNA, 22 nt, Artificial Sequence
  Guide RNA
uguguuuuccauacccuggguu

SEQ ID NO: 3108 - RNA, 22 nt, Artificial Sequence
  Guide RNA
uguuuuccauacccuggguucu

SEQ ID NO: 3109 - RNA, 22 nt, Artificial Sequence
  Guide RNA
uuccauacccuggguucugcca

SEQ ID NO: 3110 - RNA, 22 nt, Artificial Sequence
  Guide RNA
uucugccaccagcauguuguac

SEQ ID NO: 3111 - RNA, 22 nt, Artificial Sequence
  Guide RNA
uugguacaacaugcugguggca

SEQ ID NO: 3112 - RNA, 22 nt, Artificial Sequence
  Guide RNA
uuuccauacccuggguucugcc

SEQ ID NO: 3113 - RNA, 22 nt, Artificial Sequence
  Guide RNA
uuugguacaacaugcugguggc

SEQ ID NO: 3114 - RNA, 22 nt, Artificial Sequence
  Guide RNA
uuuuccauacccuggguucugc

SEQ ID NO: 3115 - RNA, 20 nt, Artificial Sequence
  Guide RNA
aacaugcuaguggcggaacc

SEQ ID NO: 3116 - RNA, 20 nt, Artificial Sequence
  Guide RNA
acaacaugcuaguggcggaa

SEQ ID NO: 3117 - RNA, 20 nt, Artificial Sequence
  Guide RNA
acaugcuaguggcggaaccc

SEQ ID NO: 3118 - RNA, 20 nt, Artificial Sequence
  Guide RNA
acccuggguuccgccacuag

SEQ ID NO: 3119 - RNA, 20 nt, Artificial Sequence
  Guide RNA
acuagcauguuguaccaaag

SEQ ID NO: 3120 - RNA, 20 nt, Artificial Sequence
  Guide RNA
auacccuggguuccgccacu

SEQ ID NO: 3121 - RNA, 20 nt, Artificial Sequence
  Guide RNA
auccuuugguacaacaugcu

SEQ ID NO: 3122 - RNA, 20 nt, Artificial Sequence
  Guide RNA
augcuaguggcggaacccag

SEQ ID NO: 3123 - RNA, 20 nt, Artificial Sequence
  Guide RNA
caacaugcuaguggcggaac

SEQ ID NO: 3124 - RNA, 20 nt, Artificial Sequence
  Guide RNA
cacuagcauguuguaccaaa

SEQ ID NO: 3125 - RNA, 20 nt, Artificial Sequence
  Guide RNA
cauacccuggguuccgccac

SEQ ID NO: 3126 - RNA, 20 nt, Artificial Sequence
  Guide RNA
cauccuuugguacaacaugc

SEQ ID NO: 3127 - RNA, 20 nt, Artificial Sequence
  Guide RNA
caugcuaguggcggaaccca

SEQ ID NO: 3128 - RNA, 20 nt, Artificial Sequence
  Guide RNA
ccacuagcauguuguaccaa

SEQ ID NO: 3129 - RNA, 20 nt, Artificial Sequence
  Guide RNA
ccauacccuggguuccgcca

SEQ ID NO: 3130 - RNA, 20 nt, Artificial Sequence
  Guide RNA
ccauccuuugguacaacaug

SEQ ID NO: 3131 - RNA, 20 nt, Artificial Sequence
  Guide RNA
cccuggguuccgccacuagc

SEQ ID NO: 3132 - RNA, 20 nt, Artificial Sequence
  Guide RNA
ccgccacuagcauguuguac

SEQ ID NO: 3133 - RNA, 20 nt, Artificial Sequence
  Guide RNA
ccuggguuccgccacuagca

SEQ ID NO: 3134 - RNA, 20 nt, Artificial Sequence
  Guide RNA
ccuuugguacaacaugcuag

SEQ ID NO: 3135 - RNA, 20 nt, Artificial Sequence
  Guide RNA
cgccacuagcauguuguacc

SEQ ID NO: 3136 - RNA, 20 nt, Artificial Sequence
  Guide RNA
cuagcauguuguaccaaagg

SEQ ID NO: 3137 - RNA, 20 nt, Artificial Sequence
  Guide RNA
cuaguggcggaacccagggu

SEQ ID NO: 3138 - RNA, 20 nt, Artificial Sequence
  Guide RNA
cuggguuccgccacuagcau

SEQ ID NO: 3139 - RNA, 20 nt, Artificial Sequence
  Guide RNA
cuuugguacaacaugcuagu

SEQ ID NO: 3140 - RNA, 20 nt, Artificial Sequence
  Guide RNA
gccacuagcauguuguacca

SEQ ID NO: 3141 - RNA, 20 nt, Artificial Sequence
  Guide RNA
gcuaguggcggaacccaggg

SEQ ID NO: 3142 - RNA, 20 nt, Artificial Sequence
  Guide RNA
ggguuccgccacuagcaugu

SEQ ID NO: 3143 - RNA, 20 nt, Artificial Sequence
  Guide RNA
gguacaacaugcuaguggcg

SEQ ID NO: 3144 - RNA, 20 nt, Artificial Sequence
  Guide RNA
gguuccgccacuagcauguu

SEQ ID NO: 3145 - RNA, 20 nt, Artificial Sequence
  Guide RNA
guacaacaugcuaguggcgg

SEQ ID NO: 3146 - RNA, 20 nt, Artificial Sequence
  Guide RNA
guuccgccacuagcauguug

SEQ ID NO: 3147 - RNA, 20 nt, Artificial Sequence
  Guide RNA
uacaacaugcuaguggcgga

SEQ ID NO: 3148 - RNA, 20 nt, Artificial Sequence
  Guide RNA
uacccuggguuccgccacua

SEQ ID NO: 3149 - RNA, 20 nt, Artificial Sequence
  Guide RNA
uaguggcggaacccagggua

SEQ ID NO: 3150 - RNA, 20 nt, Artificial Sequence
  Guide RNA
uccauacccuggguuccgcc

SEQ ID NO: 3151 - RNA, 20 nt, Artificial Sequence
  Guide RNA
uccauccuuugguacaacau

SEQ ID NO: 3152 - RNA, 20 nt, Artificial Sequence
  Guide RNA
uccgccacuagcauguugua

SEQ ID NO: 3153 - RNA, 20 nt, Artificial Sequence
  Guide RNA
uccuuugguacaacaugcua

SEQ ID NO: 3154 - RNA, 20 nt, Artificial Sequence
  Guide RNA
ugcuaguggcggaacccagg

SEQ ID NO: 3155 - RNA, 20 nt, Artificial Sequence
  Guide RNA
uggguuccgccacuagcaug

SEQ ID NO: 3156 - RNA, 20 nt, Artificial Sequence
  Guide RNA
ugguacaacaugcuaguggc

SEQ ID NO: 3157 - RNA, 20 nt, Artificial Sequence
  Guide RNA
uuccauacccuggguuccgc

SEQ ID NO: 3158 - RNA, 20 nt, Artificial Sequence
  Guide RNA
uuccgccacuagcauguugu

SEQ ID NO: 3159 - RNA, 20 nt, Artificial Sequence
  Guide RNA
uugguacaacaugcuagugg

SEQ ID NO: 3160 - RNA, 20 nt, Artificial Sequence
  Guide RNA
uuugguacaacaugcuagug

SEQ ID NO: 3161 - RNA, 21 nt, Artificial Sequence
  Guide RNA
aacaugcuaguggcggaaccc

SEQ ID NO: 3162 - RNA, 21 nt, Artificial Sequence
  Guide RNA
acaacaugcuaguggcggaac

SEQ ID NO: 3163 - RNA, 21 nt, Artificial Sequence
  Guide RNA
acaugcuaguggcggaaccca

SEQ ID NO: 3164 - RNA, 21 nt, Artificial Sequence
  Guide RNA
acccuggguuccgccacuagc

SEQ ID NO: 3165 - RNA, 21 nt, Artificial Sequence
  Guide RNA
acuagcauguuguaccaaagg

SEQ ID NO: 3166 - RNA, 21 nt, Artificial Sequence
  Guide RNA
auacccuggguuccgccacua

SEQ ID NO: 3167 - RNA, 21 nt, Artificial Sequence
  Guide RNA
auccuuugguacaacaugcua

SEQ ID NO: 3168 - RNA, 21 nt, Artificial Sequence
  Guide RNA
augcuaguggcggaacccagg

SEQ ID NO: 3169 - RNA, 21 nt, Artificial Sequence
  Guide RNA
caacaugcuaguggcggaacc

SEQ ID NO: 3170 - RNA, 21 nt, Artificial Sequence
  Guide RNA
cacuagcauguuguaccaaag

SEQ ID NO: 3171 - RNA, 21 nt, Artificial Sequence
  Guide RNA
cauacccuggguuccgccacu

SEQ ID NO: 3172 - RNA, 21 nt, Artificial Sequence
  Guide RNA
cauccuuugguacaacaugcu

SEQ ID NO: 3173 - RNA, 21 nt, Artificial Sequence
  Guide RNA
caugcuaguggcggaacccag

SEQ ID NO: 3174 - RNA, 21 nt, Artificial Sequence
  Guide RNA
ccacuagcauguuguaccaaa

SEQ ID NO: 3175 - RNA, 21 nt, Artificial Sequence
  Guide RNA
ccauacccuggguuccgccac

SEQ ID NO: 3176 - RNA, 21 nt, Artificial Sequence
  Guide RNA
ccauccuuugguacaacaugc

SEQ ID NO: 3177 - RNA, 21 nt, Artificial Sequence
  Guide RNA
cccuggguuccgccacuagca

SEQ ID NO: 3178 - RNA, 21 nt, Artificial Sequence
  Guide RNA
ccgccacuagcauguuguacc

SEQ ID NO: 3179 - RNA, 21 nt, Artificial Sequence
  Guide RNA
ccuggguuccgccacuagcau

SEQ ID NO: 3180 - RNA, 21 nt, Artificial Sequence
  Guide RNA
ccuuugguacaacaugcuagu

SEQ ID NO: 3181 - RNA, 21 nt, Artificial Sequence
  Guide RNA
cgccacuagcauguuguacca

SEQ ID NO: 3182 - RNA, 21 nt, Artificial Sequence
  Guide RNA
cuagcauguuguaccaaagga

SEQ ID NO: 3183 - RNA, 21 nt, Artificial Sequence
  Guide RNA
cuaguggcggaacccagggua

SEQ ID NO: 3184 - RNA, 21 nt, Artificial Sequence
  Guide RNA
cuccauccuuugguacaacau

SEQ ID NO: 3185 - RNA, 21 nt, Artificial Sequence
  Guide RNA
cuggguuccgccacuagcaug

SEQ ID NO: 3186 - RNA, 21 nt, Artificial Sequence
  Guide RNA
cuuugguacaacaugcuagug

SEQ ID NO: 3187 - RNA, 21 nt, Artificial Sequence
  Guide RNA
gccacuagcauguuguaccaa

SEQ ID NO: 3188 - RNA, 21 nt, Artificial Sequence
  Guide RNA
gcuaguggcggaacccagggu

SEQ ID NO: 3189 - RNA, 21 nt, Artificial Sequence
  Guide RNA
ggguuccgccacuagcauguu

SEQ ID NO: 3190 - RNA, 21 nt, Artificial Sequence
  Guide RNA
gguacaacaugcuaguggcgg

SEQ ID NO: 3191 - RNA, 21 nt, Artificial Sequence
  Guide RNA
gguuccgccacuagcauguug

SEQ ID NO: 3192 - RNA, 21 nt, Artificial Sequence
  Guide RNA
guacaacaugcuaguggcgga

SEQ ID NO: 3193 - RNA, 21 nt, Artificial Sequence
  Guide RNA
guuccgccacuagcauguugu

SEQ ID NO: 3194 - RNA, 21 nt, Artificial Sequence
  Guide RNA
uacaacaugcuaguggcggaa

SEQ ID NO: 3195 - RNA, 21 nt, Artificial Sequence
  Guide RNA
uacccuggguuccgccacuag

SEQ ID NO: 3196 - RNA, 21 nt, Artificial Sequence
  Guide RNA
uaguggcggaacccaggguau

SEQ ID NO: 3197 - RNA, 21 nt, Artificial Sequence
  Guide RNA
uccauacccuggguuccgcca

SEQ ID NO: 3198 - RNA, 21 nt, Artificial Sequence
  Guide RNA
uccauccuuugguacaacaug

SEQ ID NO: 3199 - RNA, 21 nt, Artificial Sequence
  Guide RNA
uccgccacuagcauguuguac

SEQ ID NO: 3200 - RNA, 21 nt, Artificial Sequence
  Guide RNA
uccuuugguacaacaugcuag

SEQ ID NO: 3201 - RNA, 21 nt, Artificial Sequence
  Guide RNA
ugcuaguggcggaacccaggg

SEQ ID NO: 3202 - RNA, 21 nt, Artificial Sequence
  Guide RNA
uggguuccgccacuagcaugu

SEQ ID NO: 3203 - RNA, 21 nt, Artificial Sequence
  Guide RNA
ugguacaacaugcuaguggcg

SEQ ID NO: 3204 - RNA, 21 nt, Artificial Sequence
  Guide RNA
uuccauacccuggguuccgcc

SEQ ID NO: 3205 - RNA, 21 nt, Artificial Sequence
  Guide RNA
uuccgccacuagcauguugua

SEQ ID NO: 3206 - RNA, 21 nt, Artificial Sequence
  Guide RNA
uugguacaacaugcuaguggc

SEQ ID NO: 3207 - RNA, 21 nt, Artificial Sequence
  Guide RNA
uuuccauacccuggguuccgc

SEQ ID NO: 3208 - RNA, 21 nt, Artificial Sequence
  Guide RNA
uuugguacaacaugcuagugg

SEQ ID NO: 3209 - RNA, 22 nt, Artificial Sequence
  Guide RNA
aacaugcuaguggcggaaccca

SEQ ID NO: 3210 - RNA, 22 nt, Artificial Sequence
  Guide RNA
acaacaugcuaguggcggaacc

SEQ ID NO: 3211 - RNA, 22 nt, Artificial Sequence
  Guide RNA
acaugcuaguggcggaacccag

SEQ ID NO: 3212 - RNA, 22 nt, Artificial Sequence
  Guide RNA
acccuggguuccgccacuagca

SEQ ID NO: 3213 - RNA, 22 nt, Artificial Sequence
  Guide RNA
acuagcauguuguaccaaagga

SEQ ID NO: 3214 - RNA, 22 nt, Artificial Sequence
  Guide RNA
auacccuggguuccgccacuag

SEQ ID NO: 3215 - RNA, 22 nt, Artificial Sequence
  Guide RNA
auccuuugguacaacaugcuag

SEQ ID NO: 3216 - RNA, 22 nt, Artificial Sequence
  Guide RNA
augcuaguggcggaacccaggg

SEQ ID NO: 3217 - RNA, 22 nt, Artificial Sequence
  Guide RNA
caacaugcuaguggcggaaccc

SEQ ID NO: 3218 - RNA, 22 nt, Artificial Sequence
  Guide RNA
cacuagcauguuguaccaaagg

SEQ ID NO: 3219 - RNA, 22 nt, Artificial Sequence
  Guide RNA
cauacccuggguuccgccacua

SEQ ID NO: 3220 - RNA, 22 nt, Artificial Sequence
  Guide RNA
cauccuuugguacaacaugcua

SEQ ID NO: 3221 - RNA, 22 nt, Artificial Sequence
  Guide RNA
caugcuaguggcggaacccagg

SEQ ID NO: 3222 - RNA, 22 nt, Artificial Sequence
  Guide RNA
ccacuagcauguuguaccaaag

SEQ ID NO: 3223 - RNA, 22 nt, Artificial Sequence
  Guide RNA
ccauacccuggguuccgccacu

SEQ ID NO: 3224 - RNA, 22 nt, Artificial Sequence
  Guide RNA
ccauccuuugguacaacaugcu

SEQ ID NO: 3225 - RNA, 22 nt, Artificial Sequence
  Guide RNA
cccuggguuccgccacuagcau

SEQ ID NO: 3226 - RNA, 22 nt, Artificial Sequence
  Guide RNA
ccgccacuagcauguuguacca

SEQ ID NO: 3227 - RNA, 22 nt, Artificial Sequence
  Guide RNA
ccuccauccuuugguacaacau

SEQ ID NO: 3228 - RNA, 22 nt, Artificial Sequence
  Guide RNA
ccuggguuccgccacuagcaug

SEQ ID NO: 3229 - RNA, 22 nt, Artificial Sequence
  Guide RNA
ccuuugguacaacaugcuagug

SEQ ID NO: 3230 - RNA, 22 nt, Artificial Sequence
  Guide RNA
cgccacuagcauguuguaccaa

SEQ ID NO: 3231 - RNA, 22 nt, Artificial Sequence
  Guide RNA
cuagcauguuguaccaaaggau

SEQ ID NO: 3232 - RNA, 22 nt, Artificial Sequence
  Guide RNA
cuaguggcggaacccaggguau

SEQ ID NO: 3233 - RNA, 22 nt, Artificial Sequence
  Guide RNA
cuccauccuuugguacaacaug

SEQ ID NO: 3234 - RNA, 22 nt, Artificial Sequence
  Guide RNA
cuggguuccgccacuagcaugu

SEQ ID NO: 3235 - RNA, 22 nt, Artificial Sequence
  Guide RNA
cuuugguacaacaugcuagugg

SEQ ID NO: 3236 - RNA, 22 nt, Artificial Sequence
  Guide RNA
gccacuagcauguuguaccaaa

SEQ ID NO: 3237 - RNA, 22 nt, Artificial Sequence
  Guide RNA
gcuaguggcggaacccagggua

SEQ ID NO: 3238 - RNA, 22 nt, Artificial Sequence
  Guide RNA
ggguuccgccacuagcauguug

SEQ ID NO: 3239 - RNA, 22 nt, Artificial Sequence
  Guide RNA
gguacaacaugcuaguggcgga

SEQ ID NO: 3240 - RNA, 22 nt, Artificial Sequence
  Guide RNA
gguuccgccacuagcauguugu

SEQ ID NO: 3241 - RNA, 22 nt, Artificial Sequence
  Guide RNA
guacaacaugcuaguggcggaa

SEQ ID NO: 3242 - RNA, 22 nt, Artificial Sequence
  Guide RNA
guuccgccacuagcauguugua

SEQ ID NO: 3243 - RNA, 22 nt, Artificial Sequence
  Guide RNA
uacaacaugcuaguggcggaac

SEQ ID NO: 3244 - RNA, 22 nt, Artificial Sequence
  Guide RNA
uacccuggguuccgccacuagc

SEQ ID NO: 3245 - RNA, 22 nt, Artificial Sequence
  Guide RNA
uaguggcggaacccaggguaug

SEQ ID NO: 3246 - RNA, 22 nt, Artificial Sequence
  Guide RNA
uccauacccuggguuccgccac

SEQ ID NO: 3247 - RNA, 22 nt, Artificial Sequence
  Guide RNA
uccauccuuugguacaacaugc

SEQ ID NO: 3248 - RNA, 22 nt, Artificial Sequence
  Guide RNA
uccgccacuagcauguuguacc

SEQ ID NO: 3249 - RNA, 22 nt, Artificial Sequence
  Guide RNA
uccuuugguacaacaugcuagu

SEQ ID NO: 3250 - RNA, 22 nt, Artificial Sequence
  Guide RNA
ugcuaguggcggaacccagggu

SEQ ID NO: 3251 - RNA, 22 nt, Artificial Sequence
  Guide RNA
uggguuccgccacuagcauguu

SEQ ID NO: 3252 - RNA, 22 nt, Artificial Sequence
  Guide RNA
ugguacaacaugcuaguggcgg

SEQ ID NO: 3253 - RNA, 22 nt, Artificial Sequence
  Guide RNA
uuccauacccuggguuccgcca

SEQ ID NO: 3254 - RNA, 22 nt, Artificial Sequence
  Guide RNA
uuccgccacuagcauguuguac

SEQ ID NO: 3255 - RNA, 22 nt, Artificial Sequence
  Guide RNA
uugguacaacaugcuaguggcg

SEQ ID NO: 3256 - RNA, 22 nt, Artificial Sequence
  Guide RNA
uuuccauacccuggguuccgcc

SEQ ID NO: 3257 - RNA, 22 nt, Artificial Sequence
  Guide RNA
uuugguacaacaugcuaguggc

SEQ ID NO: 3258 - RNA, 22 nt, Artificial Sequence
  Guide RNA
uuuuccauacccuggguuccgc

SEQ ID NO: 3259 - RNA, 20 nt, Artificial Sequence
  Guide RNA
aaccgcucgggagauggcug

SEQ ID NO: 3260 - RNA, 20 nt, Artificial Sequence
  Guide RNA
aacgucagccaucucccgag

SEQ ID NO: 3261 - RNA, 20 nt, Artificial Sequence
  Guide RNA
accgcucgggagauggcuga

SEQ ID NO: 3262 - RNA, 20 nt, Artificial Sequence
  Guide RNA
acgucagccaucucccgagc

SEQ ID NO: 3263 - RNA, 20 nt, Artificial Sequence
  Guide RNA
agauggcugacguuggagau

SEQ ID NO: 3264 - RNA, 20 nt, Artificial Sequence
  Guide RNA
agccaucucccgagcgguug

SEQ ID NO: 3265 - RNA, 20 nt, Artificial Sequence
  Guide RNA
aggcccaaccgcucgggaga

SEQ ID NO: 3266 - RNA, 20 nt, Artificial Sequence
  Guide RNA
aucuccaacgucagccaucu

SEQ ID NO: 3267 - RNA, 20 nt, Artificial Sequence
  Guide RNA
aucucccgagcgguugggcc

SEQ ID NO: 3268 - RNA, 20 nt, Artificial Sequence
  Guide RNA
auggaggcccaaccgcucgg

SEQ ID NO: 3269 - RNA, 20 nt, Artificial Sequence
  Guide RNA
caaccgcucgggagauggcu

SEQ ID NO: 3270 - RNA, 20 nt, Artificial Sequence
  Guide RNA
caacgucagccaucucccga

SEQ ID NO: 3271 - RNA, 20 nt, Artificial Sequence
  Guide RNA
cagccaucucccgagcgguu

SEQ ID NO: 3272 - RNA, 20 nt, Artificial Sequence
  Guide RNA
caucucccgagcgguugggc

SEQ ID NO: 3273 - RNA, 20 nt, Artificial Sequence
  Guide RNA
ccaaccgcucgggagauggc

SEQ ID NO: 3274 - RNA, 20 nt, Artificial Sequence
  Guide RNA
ccaacgucagccaucucccg

SEQ ID NO: 3275 - RNA, 20 nt, Artificial Sequence
  Guide RNA
ccaucucccgagcgguuggg

SEQ ID NO: 3276 - RNA, 20 nt, Artificial Sequence
  Guide RNA
cccaaccgcucgggagaugg

SEQ ID NO: 3277 - RNA, 20 nt, Artificial Sequence
  Guide RNA
ccgcucgggagauggcugac

SEQ ID NO: 3278 - RNA, 20 nt, Artificial Sequence
  Guide RNA
cgcucgggagauggcugacg

SEQ ID NO: 3279 - RNA, 20 nt, Artificial Sequence
  Guide RNA
cgggagauggcugacguugg

SEQ ID NO: 3280 - RNA, 20 nt, Artificial Sequence
  Guide RNA
cgucagccaucucccgagcg

SEQ ID NO: 3281 - RNA, 20 nt, Artificial Sequence
  Guide RNA
cuccaacgucagccaucucc

SEQ ID NO: 3282 - RNA, 20 nt, Artificial Sequence
  Guide RNA
cucgggagauggcugacguu

SEQ ID NO: 3283 - RNA, 20 nt, Artificial Sequence
  Guide RNA
gagauggcugacguuggaga

SEQ ID NO: 3284 - RNA, 20 nt, Artificial Sequence
  Guide RNA
gaggcccaaccgcucgggag

SEQ ID NO: 3285 - RNA, 20 nt, Artificial Sequence
  Guide RNA
gaucuccaacgucagccauc

SEQ ID NO: 3286 - RNA, 20 nt, Artificial Sequence
  Guide RNA
gauggcugacguuggagauc

SEQ ID NO: 3287 - RNA, 20 nt, Artificial Sequence
  Guide RNA
gccaucucccgagcgguugg

SEQ ID NO: 3288 - RNA, 20 nt, Artificial Sequence
  Guide RNA
gcccaaccgcucgggagaug

SEQ ID NO: 3289 - RNA, 20 nt, Artificial Sequence
  Guide RNA
gcucgggagauggcugacgu

SEQ ID NO: 3290 - RNA, 20 nt, Artificial Sequence
  Guide RNA
ggagauggcugacguuggag

SEQ ID NO: 3291 - RNA, 20 nt, Artificial Sequence
  Guide RNA
ggaggcccaaccgcucggga

SEQ ID NO: 3292 - RNA, 20 nt, Artificial Sequence
  Guide RNA
ggcccaaccgcucgggagau

SEQ ID NO: 3293 - RNA, 20 nt, Artificial Sequence
  Guide RNA
gggagauggcugacguugga

SEQ ID NO: 3294 - RNA, 20 nt, Artificial Sequence
  Guide RNA
ggugaucuccaacgucagcc

SEQ ID NO: 3295 - RNA, 20 nt, Artificial Sequence
  Guide RNA
gucagccaucucccgagcgg

SEQ ID NO: 3296 - RNA, 20 nt, Artificial Sequence
  Guide RNA
gugaucuccaacgucagcca

SEQ ID NO: 3297 - RNA, 20 nt, Artificial Sequence
  Guide RNA
guggugaucuccaacgucag

SEQ ID NO: 3298 - RNA, 20 nt, Artificial Sequence
  Guide RNA
ucagccaucucccgagcggu

SEQ ID NO: 3299 - RNA, 20 nt, Artificial Sequence
  Guide RNA
uccaacgucagccaucuccc

SEQ ID NO: 3300 - RNA, 20 nt, Artificial Sequence
  Guide RNA
ucgggagauggcugacguug

SEQ ID NO: 3301 - RNA, 20 nt, Artificial Sequence
  Guide RNA
ucuccaacgucagccaucuc

SEQ ID NO: 3302 - RNA, 20 nt, Artificial Sequence
  Guide RNA
ugaucuccaacgucagccau

SEQ ID NO: 3303 - RNA, 20 nt, Artificial Sequence
  Guide RNA
uggaggcccaaccgcucggg

SEQ ID NO: 3304 - RNA, 20 nt, Artificial Sequence
  Guide RNA
uggugaucuccaacgucagc

SEQ ID NO: 3305 - RNA, 21 nt, Artificial Sequence
  Guide RNA
aaccgcucgggagauggcuga

SEQ ID NO: 3306 - RNA, 21 nt, Artificial Sequence
  Guide RNA
aacgucagccaucucccgagc

SEQ ID NO: 3307 - RNA, 21 nt, Artificial Sequence
  Guide RNA
accgcucgggagauggcugac

SEQ ID NO: 3308 - RNA, 21 nt, Artificial Sequence
  Guide RNA
acgucagccaucucccgagcg

SEQ ID NO: 3309 - RNA, 21 nt, Artificial Sequence
  Guide RNA
agauggcugacguuggagauc

SEQ ID NO: 3310 - RNA, 21 nt, Artificial Sequence
  Guide RNA
agccaucucccgagcgguugg

SEQ ID NO: 3311 - RNA, 21 nt, Artificial Sequence
  Guide RNA
aggcccaaccgcucgggagau

SEQ ID NO: 3312 - RNA, 21 nt, Artificial Sequence
  Guide RNA
aucuccaacgucagccaucuc

SEQ ID NO: 3313 - RNA, 21 nt, Artificial Sequence
  Guide RNA
aucucccgagcgguugggccu

SEQ ID NO: 3314 - RNA, 21 nt, Artificial Sequence
  Guide RNA
auggaggcccaaccgcucggg

SEQ ID NO: 3315 - RNA, 21 nt, Artificial Sequence
  Guide RNA
caaccgcucgggagauggcug

SEQ ID NO: 3316 - RNA, 21 nt, Artificial Sequence
  Guide RNA
caacgucagccaucucccgag

SEQ ID NO: 3317 - RNA, 21 nt, Artificial Sequence
  Guide RNA
cagccaucucccgagcgguug

SEQ ID NO: 3318 - RNA, 21 nt, Artificial Sequence
  Guide RNA
caucucccgagcgguugggcc

SEQ ID NO: 3319 - RNA, 21 nt, Artificial Sequence
  Guide RNA
ccaaccgcucgggagauggcu

SEQ ID NO: 3320 - RNA, 21 nt, Artificial Sequence
  Guide RNA
ccaacgucagccaucucccga

SEQ ID NO: 3321 - RNA, 21 nt, Artificial Sequence
  Guide RNA
ccaucucccgagcgguugggc

SEQ ID NO: 3322 - RNA, 21 nt, Artificial Sequence
  Guide RNA
cccaaccgcucgggagauggc

SEQ ID NO: 3323 - RNA, 21 nt, Artificial Sequence
  Guide RNA
ccgcucgggagauggcugacg

SEQ ID NO: 3324 - RNA, 21 nt, Artificial Sequence
  Guide RNA
cgcucgggagauggcugacgu

SEQ ID NO: 3325 - RNA, 21 nt, Artificial Sequence
  Guide RNA
cgggagauggcugacguugga

SEQ ID NO: 3326 - RNA, 21 nt, Artificial Sequence
  Guide RNA
cgucagccaucucccgagcgg

SEQ ID NO: 3327 - RNA, 21 nt, Artificial Sequence
  Guide RNA
cuccaacgucagccaucuccc

SEQ ID NO: 3328 - RNA, 21 nt, Artificial Sequence
  Guide RNA
cucgggagauggcugacguug

SEQ ID NO: 3329 - RNA, 21 nt, Artificial Sequence
  Guide RNA
gagauggcugacguuggagau

SEQ ID NO: 3330 - RNA, 21 nt, Artificial Sequence
  Guide RNA
gaggcccaaccgcucgggaga

SEQ ID NO: 3331 - RNA, 21 nt, Artificial Sequence
  Guide RNA
gaucuccaacgucagccaucu

SEQ ID NO: 3332 - RNA, 21 nt, Artificial Sequence
  Guide RNA
gauggaggcccaaccgcucgg

SEQ ID NO: 3333 - RNA, 21 nt, Artificial Sequence
  Guide RNA
gauggcugacguuggagauca

SEQ ID NO: 3334 - RNA, 21 nt, Artificial Sequence
  Guide RNA
gccaucucccgagcgguuggg

SEQ ID NO: 3335 - RNA, 21 nt, Artificial Sequence
  Guide RNA
gcccaaccgcucgggagaugg

SEQ ID NO: 3336 - RNA, 21 nt, Artificial Sequence
  Guide RNA
gcucgggagauggcugacguu

SEQ ID NO: 3337 - RNA, 21 nt, Artificial Sequence
  Guide RNA
ggagauggcugacguuggaga

SEQ ID NO: 3338 - RNA, 21 nt, Artificial Sequence
  Guide RNA
ggaggcccaaccgcucgggag

SEQ ID NO: 3339 - RNA, 21 nt, Artificial Sequence
  Guide RNA
ggcccaaccgcucgggagaug

SEQ ID NO: 3340 - RNA, 21 nt, Artificial Sequence
  Guide RNA
gggagauggcugacguuggag

SEQ ID NO: 3341 - RNA, 21 nt, Artificial Sequence
  Guide RNA
ggugaucuccaacgucagcca

SEQ ID NO: 3342 - RNA, 21 nt, Artificial Sequence
  Guide RNA
gucagccaucucccgagcggu

SEQ ID NO: 3343 - RNA, 21 nt, Artificial Sequence
  Guide RNA
gugaucuccaacgucagccau

SEQ ID NO: 3344 - RNA, 21 nt, Artificial Sequence
  Guide RNA
guggugaucuccaacgucagc

SEQ ID NO: 3345 - RNA, 21 nt, Artificial Sequence
  Guide RNA
ucagccaucucccgagcgguu

SEQ ID NO: 3346 - RNA, 21 nt, Artificial Sequence
  Guide RNA
uccaacgucagccaucucccg

SEQ ID NO: 3347 - RNA, 21 nt, Artificial Sequence
  Guide RNA
ucgggagauggcugacguugg

SEQ ID NO: 3348 - RNA, 21 nt, Artificial Sequence
  Guide RNA
ucuccaacgucagccaucucc

SEQ ID NO: 3349 - RNA, 21 nt, Artificial Sequence
  Guide RNA
ugaucuccaacgucagccauc

SEQ ID NO: 3350 - RNA, 21 nt, Artificial Sequence
  Guide RNA
uggaggcccaaccgcucggga

SEQ ID NO: 3351 - RNA, 21 nt, Artificial Sequence
  Guide RNA
uggugaucuccaacgucagcc

SEQ ID NO: 3352 - RNA, 21 nt, Artificial Sequence
  Guide RNA
uguggugaucuccaacgucag

SEQ ID NO: 3353 - RNA, 22 nt, Artificial Sequence
  Guide RNA
aaccgcucgggagauggcugac

SEQ ID NO: 3354 - RNA, 22 nt, Artificial Sequence
  Guide RNA
aacgucagccaucucccgagcg

SEQ ID NO: 3355 - RNA, 22 nt, Artificial Sequence
  Guide RNA
accgcucgggagauggcugacg

SEQ ID NO: 3356 - RNA, 22 nt, Artificial Sequence
  Guide RNA
acgucagccaucucccgagcgg

SEQ ID NO: 3357 - RNA, 22 nt, Artificial Sequence
  Guide RNA
agauggcugacguuggagauca

SEQ ID NO: 3358 - RNA, 22 nt, Artificial Sequence
  Guide RNA
agccaucucccgagcgguuggg

SEQ ID NO: 3359 - RNA, 22 nt, Artificial Sequence
  Guide RNA
aggcccaaccgcucgggagaug

SEQ ID NO: 3360 - RNA, 22 nt, Artificial Sequence
  Guide RNA
aucuccaacgucagccaucucc

SEQ ID NO: 3361 - RNA, 22 nt, Artificial Sequence
  Guide RNA
aucucccgagcgguugggccuc

SEQ ID NO: 3362 - RNA, 22 nt, Artificial Sequence
  Guide RNA
auggaggcccaaccgcucggga

SEQ ID NO: 3363 - RNA, 22 nt, Artificial Sequence
  Guide RNA
caaccgcucgggagauggcuga

SEQ ID NO: 3364 - RNA, 22 nt, Artificial Sequence
  Guide RNA
caacgucagccaucucccgagc

SEQ ID NO: 3365 - RNA, 22 nt, Artificial Sequence
  Guide RNA
cagccaucucccgagcgguugg

SEQ ID NO: 3366 - RNA, 22 nt, Artificial Sequence
  Guide RNA
caucucccgagcgguugggccu

SEQ ID NO: 3367 - RNA, 22 nt, Artificial Sequence
  Guide RNA
ccaaccgcucgggagauggcug

SEQ ID NO: 3368 - RNA, 22 nt, Artificial Sequence
  Guide RNA
ccaacgucagccaucucccgag

SEQ ID NO: 3369 - RNA, 22 nt, Artificial Sequence
  Guide RNA
ccaucucccgagcgguugggcc

SEQ ID NO: 3370 - RNA, 22 nt, Artificial Sequence
  Guide RNA
cccaaccgcucgggagauggcu

SEQ ID NO: 3371 - RNA, 22 nt, Artificial Sequence
  Guide RNA
ccgcucgggagauggcugacgu

SEQ ID NO: 3372 - RNA, 22 nt, Artificial Sequence
  Guide RNA
cgcucgggagauggcugacguu

SEQ ID NO: 3373 - RNA, 22 nt, Artificial Sequence
  Guide RNA
cgggagauggcugacguuggag

SEQ ID NO: 3374 - RNA, 22 nt, Artificial Sequence
  Guide RNA
cgucagccaucucccgagcggu

SEQ ID NO: 3375 - RNA, 22 nt, Artificial Sequence
  Guide RNA
cuccaacgucagccaucucccg

SEQ ID NO: 3376 - RNA, 22 nt, Artificial Sequence
  Guide RNA
cucgggagauggcugacguugg

SEQ ID NO: 3377 - RNA, 22 nt, Artificial Sequence
  Guide RNA
gagauggcugacguuggagauc

SEQ ID NO: 3378 - RNA, 22 nt, Artificial Sequence
  Guide RNA
gaggcccaaccgcucgggagau

SEQ ID NO: 3379 - RNA, 22 nt, Artificial Sequence
  Guide RNA
gaucuccaacgucagccaucuc

SEQ ID NO: 3380 - RNA, 22 nt, Artificial Sequence
  Guide RNA
gauggaggcccaaccgcucggg

SEQ ID NO: 3381 - RNA, 22 nt, Artificial Sequence
  Guide RNA
gauggcugacguuggagaucac

SEQ ID NO: 3382 - RNA, 22 nt, Artificial Sequence
  Guide RNA
gccaucucccgagcgguugggc

SEQ ID NO: 3383 - RNA, 22 nt, Artificial Sequence
  Guide RNA
gcccaaccgcucgggagauggc

SEQ ID NO: 3384 - RNA, 22 nt, Artificial Sequence
  Guide RNA
gcucgggagauggcugacguug

SEQ ID NO: 3385 - RNA, 22 nt, Artificial Sequence
  Guide RNA
ggagauggcugacguuggagau

SEQ ID NO: 3386 - RNA, 22 nt, Artificial Sequence
  Guide RNA
ggaggcccaaccgcucgggaga

SEQ ID NO: 3387 - RNA, 22 nt, Artificial Sequence
  Guide RNA
ggauggaggcccaaccgcucgg

SEQ ID NO: 3388 - RNA, 22 nt, Artificial Sequence
  Guide RNA
ggcccaaccgcucgggagaugg

SEQ ID NO: 3389 - RNA, 22 nt, Artificial Sequence
  Guide RNA
gggagauggcugacguuggaga

SEQ ID NO: 3390 - RNA, 22 nt, Artificial Sequence
  Guide RNA
ggugaucuccaacgucagccau

SEQ ID NO: 3391 - RNA, 22 nt, Artificial Sequence
  Guide RNA
gucagccaucucccgagcgguu

SEQ ID NO: 3392 - RNA, 22 nt, Artificial Sequence
  Guide RNA
gugaucuccaacgucagccauc

SEQ ID NO: 3393 - RNA, 22 nt, Artificial Sequence
  Guide RNA
guggugaucuccaacgucagcc

SEQ ID NO: 3394 - RNA, 22 nt, Artificial Sequence
  Guide RNA
ucagccaucucccgagcgguug

SEQ ID NO: 3395 - RNA, 22 nt, Artificial Sequence
  Guide RNA
uccaacgucagccaucucccga

SEQ ID NO: 3396 - RNA, 22 nt, Artificial Sequence
  Guide RNA
ucgggagauggcugacguugga

SEQ ID NO: 3397 - RNA, 22 nt, Artificial Sequence
  Guide RNA
ucuccaacgucagccaucuccc

SEQ ID NO: 3398 - RNA, 22 nt, Artificial Sequence
  Guide RNA
ugaucuccaacgucagccaucu

SEQ ID NO: 3399 - RNA, 22 nt, Artificial Sequence
  Guide RNA
uggaggcccaaccgcucgggag

SEQ ID NO: 3400 - RNA, 22 nt, Artificial Sequence
  Guide RNA
uggugaucuccaacgucagcca

SEQ ID NO: 3401 - RNA, 22 nt, Artificial Sequence
  Guide RNA
uguggugaucuccaacgucagc

SEQ ID NO: 3402 - RNA, 22 nt, Artificial Sequence
  Guide RNA
uuguggugaucuccaacgucag

SEQ ID NO: 3403 - RNA, 20 nt, Artificial Sequence
  Guide RNA
aaaagucucaccucgagguc

SEQ ID NO: 3404 - RNA, 20 nt, Artificial Sequence
  Guide RNA
aaagucucaccucgagguca

SEQ ID NO: 3405 - RNA, 20 nt, Artificial Sequence
  Guide RNA
aacucgggaccauaaaaguc

SEQ ID NO: 3406 - RNA, 20 nt, Artificial Sequence
  Guide RNA
aagucucaccucgaggucaa

SEQ ID NO: 3407 - RNA, 20 nt, Artificial Sequence
  Guide RNA
aauugaccucgaggugagac

SEQ ID NO: 3408 - RNA, 20 nt, Artificial Sequence
  Guide RNA
accauaaaagucucaccucg

SEQ ID NO: 3409 - RNA, 20 nt, Artificial Sequence
  Guide RNA
accucgaggugagacuuuua

SEQ ID NO: 3410 - RNA, 20 nt, Artificial Sequence
  Guide RNA
acucgggaccauaaaagucu

SEQ ID NO: 3411 - RNA, 20 nt, Artificial Sequence
  Guide RNA
aggugagacuuuuauggucc

SEQ ID NO: 3412 - RNA, 20 nt, Artificial Sequence
  Guide RNA
agucucaccucgaggucaau

SEQ ID NO: 3413 - RNA, 20 nt, Artificial Sequence
  Guide RNA
auaaaagucucaccucgagg

SEQ ID NO: 3414 - RNA, 20 nt, Artificial Sequence
  Guide RNA
auugaccucgaggugagacu

SEQ ID NO: 3415 - RNA, 20 nt, Artificial Sequence
  Guide RNA
caacucgggaccauaaaagu

SEQ ID NO: 3416 - RNA, 20 nt, Artificial Sequence
  Guide RNA
cauaaaagucucaccucgag

SEQ ID NO: 3417 - RNA, 20 nt, Artificial Sequence
  Guide RNA
ccaacucgggaccauaaaag

SEQ ID NO: 3418 - RNA, 20 nt, Artificial Sequence
  Guide RNA
ccauaaaagucucaccucga

SEQ ID NO: 3419 - RNA, 20 nt, Artificial Sequence
  Guide RNA
ccucgaggugagacuuuuau

SEQ ID NO: 3420 - RNA, 20 nt, Artificial Sequence
  Guide RNA
cgaggugagacuuuuauggu

SEQ ID NO: 3421 - RNA, 20 nt, Artificial Sequence
  Guide RNA
cgggaccauaaaagucucac

SEQ ID NO: 3422 - RNA, 20 nt, Artificial Sequence
  Guide RNA
cucaccucgaggucaauuac

SEQ ID NO: 3423 - RNA, 20 nt, Artificial Sequence
  Guide RNA
cucgaggugagacuuuuaug

SEQ ID NO: 3424 - RNA, 20 nt, Artificial Sequence
  Guide RNA
cucgggaccauaaaagucuc

SEQ ID NO: 3425 - RNA, 20 nt, Artificial Sequence
  Guide RNA
gaccauaaaagucucaccuc

SEQ ID NO: 3426 - RNA, 20 nt, Artificial Sequence
  Guide RNA
gaccucgaggugagacuuuu

SEQ ID NO: 3427 - RNA, 20 nt, Artificial Sequence
  Guide RNA
gaggugagacuuuuaugguc

SEQ ID NO: 3428 - RNA, 20 nt, Artificial Sequence
  Guide RNA
ggaccauaaaagucucaccu

SEQ ID NO: 3429 - RNA, 20 nt, Artificial Sequence
  Guide RNA
gggaccauaaaagucucacc

SEQ ID NO: 3430 - RNA, 20 nt, Artificial Sequence
  Guide RNA
gguaauugaccucgagguga

SEQ ID NO: 3431 - RNA, 20 nt, Artificial Sequence
  Guide RNA
ggugagacuuuuaugguccc

SEQ ID NO: 3432 - RNA, 20 nt, Artificial Sequence
  Guide RNA
gguuugguaauugaccucga

SEQ ID NO: 3433 - RNA, 20 nt, Artificial Sequence
  Guide RNA
guaauugaccucgaggugag

SEQ ID NO: 3434 - RNA, 20 nt, Artificial Sequence
  Guide RNA
gucucaccucgaggucaauu

SEQ ID NO: 3435 - RNA, 20 nt, Artificial Sequence
  Guide RNA
gugagacuuuuauggucccg

SEQ ID NO: 3436 - RNA, 20 nt, Artificial Sequence
  Guide RNA
guuugguaauugaccucgag

SEQ ID NO: 3437 - RNA, 20 nt, Artificial Sequence
  Guide RNA
uaaaagucucaccucgaggu

SEQ ID NO: 3438 - RNA, 20 nt, Artificial Sequence
  Guide RNA
uaauugaccucgaggugaga

SEQ ID NO: 3439 - RNA, 20 nt, Artificial Sequence
  Guide RNA
ucaccucgaggucaauuacc

SEQ ID NO: 3440 - RNA, 20 nt, Artificial Sequence
  Guide RNA
ucgaggugagacuuuuaugg

SEQ ID NO: 3441 - RNA, 20 nt, Artificial Sequence
  Guide RNA
ucgggaccauaaaagucuca

SEQ ID NO: 3442 - RNA, 20 nt, Artificial Sequence
  Guide RNA
ucucaccucgaggucaauua

SEQ ID NO: 3443 - RNA, 20 nt, Artificial Sequence
  Guide RNA
ugaccucgaggugagacuuu

SEQ ID NO: 3444 - RNA, 20 nt, Artificial Sequence
  Guide RNA
ugagacuuuuauggucccga

SEQ ID NO: 3445 - RNA, 20 nt, Artificial Sequence
  Guide RNA
ugguaauugaccucgaggug

SEQ ID NO: 3446 - RNA, 20 nt, Artificial Sequence
  Guide RNA
uugaccucgaggugagacuu

SEQ ID NO: 3447 - RNA, 20 nt, Artificial Sequence
  Guide RNA
uugguaauugaccucgaggu

SEQ ID NO: 3448 - RNA, 20 nt, Artificial Sequence
  Guide RNA
uuugguaauugaccucgagg

SEQ ID NO: 3449 - RNA, 21 nt, Artificial Sequence
  Guide RNA
aaaagucucaccucgagguca

SEQ ID NO: 3450 - RNA, 21 nt, Artificial Sequence
  Guide RNA
aaagucucaccucgaggucaa

SEQ ID NO: 3451 - RNA, 21 nt, Artificial Sequence
  Guide RNA
aacucgggaccauaaaagucu

SEQ ID NO: 3452 - RNA, 21 nt, Artificial Sequence
  Guide RNA
aagucucaccucgaggucaau

SEQ ID NO: 3453 - RNA, 21 nt, Artificial Sequence
  Guide RNA
aauugaccucgaggugagacu

SEQ ID NO: 3454 - RNA, 21 nt, Artificial Sequence
  Guide RNA
accauaaaagucucaccucga

SEQ ID NO: 3455 - RNA, 21 nt, Artificial Sequence
  Guide RNA
accucgaggugagacuuuuau

SEQ ID NO: 3456 - RNA, 21 nt, Artificial Sequence
  Guide RNA
acucgggaccauaaaagucuc

SEQ ID NO: 3457 - RNA, 21 nt, Artificial Sequence
  Guide RNA
aggugagacuuuuaugguccc

SEQ ID NO: 3458 - RNA, 21 nt, Artificial Sequence
  Guide RNA
agucucaccucgaggucaauu

SEQ ID NO: 3459 - RNA, 21 nt, Artificial Sequence
  Guide RNA
auaaaagucucaccucgaggu

SEQ ID NO: 3460 - RNA, 21 nt, Artificial Sequence
  Guide RNA
auugaccucgaggugagacuu

SEQ ID NO: 3461 - RNA, 21 nt, Artificial Sequence
  Guide RNA
caacucgggaccauaaaaguc

SEQ ID NO: 3462 - RNA, 21 nt, Artificial Sequence
  Guide RNA
cauaaaagucucaccucgagg

SEQ ID NO: 3463 - RNA, 21 nt, Artificial Sequence
  Guide RNA
ccaacucgggaccauaaaagu

SEQ ID NO: 3464 - RNA, 21 nt, Artificial Sequence
  Guide RNA
ccauaaaagucucaccucgag

SEQ ID NO: 3465 - RNA, 21 nt, Artificial Sequence
  Guide RNA
ccucgaggugagacuuuuaug

SEQ ID NO: 3466 - RNA, 21 nt, Artificial Sequence
  Guide RNA
cgaggugagacuuuuaugguc

SEQ ID NO: 3467 - RNA, 21 nt, Artificial Sequence
  Guide RNA
cgggaccauaaaagucucacc

SEQ ID NO: 3468 - RNA, 21 nt, Artificial Sequence
  Guide RNA
cucaccucgaggucaauuacc

SEQ ID NO: 3469 - RNA, 21 nt, Artificial Sequence
  Guide RNA
cucgaggugagacuuuuaugg

SEQ ID NO: 3470 - RNA, 21 nt, Artificial Sequence
  Guide RNA
cucgggaccauaaaagucuca

SEQ ID NO: 3471 - RNA, 21 nt, Artificial Sequence
  Guide RNA
gaccauaaaagucucaccucg

SEQ ID NO: 3472 - RNA, 21 nt, Artificial Sequence
  Guide RNA
gaccucgaggugagacuuuua

SEQ ID NO: 3473 - RNA, 21 nt, Artificial Sequence
  Guide RNA
gaggugagacuuuuauggucc

SEQ ID NO: 3474 - RNA, 21 nt, Artificial Sequence
  Guide RNA
ggaccauaaaagucucaccuc

SEQ ID NO: 3475 - RNA, 21 nt, Artificial Sequence
  Guide RNA
gggaccauaaaagucucaccu

SEQ ID NO: 3476 - RNA, 21 nt, Artificial Sequence
  Guide RNA
gguaauugaccucgaggugag

SEQ ID NO: 3477 - RNA, 21 nt, Artificial Sequence
  Guide RNA
ggugagacuuuuauggucccg

SEQ ID NO: 3478 - RNA, 21 nt, Artificial Sequence
  Guide RNA
gguuugguaauugaccucgag

SEQ ID NO: 3479 - RNA, 21 nt, Artificial Sequence
  Guide RNA
guaauugaccucgaggugaga

SEQ ID NO: 3480 - RNA, 21 nt, Artificial Sequence
  Guide RNA
gucucaccucgaggucaauua

SEQ ID NO: 3481 - RNA, 21 nt, Artificial Sequence
  Guide RNA
gugagacuuuuauggucccga

SEQ ID NO: 3482 - RNA, 21 nt, Artificial Sequence
  Guide RNA
guuugguaauugaccucgagg

SEQ ID NO: 3483 - RNA, 21 nt, Artificial Sequence
  Guide RNA
uaaaagucucaccucgagguc

SEQ ID NO: 3484 - RNA, 21 nt, Artificial Sequence
  Guide RNA
uaauugaccucgaggugagac

SEQ ID NO: 3485 - RNA, 21 nt, Artificial Sequence
  Guide RNA
ucaccucgaggucaauuacca

SEQ ID NO: 3486 - RNA, 21 nt, Artificial Sequence
  Guide RNA
uccaacucgggaccauaaaag

SEQ ID NO: 3487 - RNA, 21 nt, Artificial Sequence
  Guide RNA
ucgaggugagacuuuuauggu

SEQ ID NO: 3488 - RNA, 21 nt, Artificial Sequence
  Guide RNA
ucgggaccauaaaagucucac

SEQ ID NO: 3489 - RNA, 21 nt, Artificial Sequence
  Guide RNA
ucucaccucgaggucaauuac

SEQ ID NO: 3490 - RNA, 21 nt, Artificial Sequence
  Guide RNA
ugaccucgaggugagacuuuu

SEQ ID NO: 3491 - RNA, 21 nt, Artificial Sequence
  Guide RNA
ugagacuuuuauggucccgag

SEQ ID NO: 3492 - RNA, 21 nt, Artificial Sequence
  Guide RNA
ugguaauugaccucgagguga

SEQ ID NO: 3493 - RNA, 21 nt, Artificial Sequence
  Guide RNA
ugguuugguaauugaccucga

SEQ ID NO: 3494 - RNA, 21 nt, Artificial Sequence
  Guide RNA
uugaccucgaggugagacuuu

SEQ ID NO: 3495 - RNA, 21 nt, Artificial Sequence
  Guide RNA
uugguaauugaccucgaggug

SEQ ID NO: 3496 - RNA, 21 nt, Artificial Sequence
  Guide RNA
uuugguaauugaccucgaggu

SEQ ID NO: 3497 - RNA, 22 nt, Artificial Sequence
  Guide RNA
aaaagucucaccucgaggucaa

SEQ ID NO: 3498 - RNA, 22 nt, Artificial Sequence
  Guide RNA
aaagucucaccucgaggucaau

SEQ ID NO: 3499 - RNA, 22 nt, Artificial Sequence
  Guide RNA
aacucgggaccauaaaagucuc

SEQ ID NO: 3500 - RNA, 22 nt, Artificial Sequence
  Guide RNA
aagucucaccucgaggucaauu

SEQ ID NO: 3501 - RNA, 22 nt, Artificial Sequence
  Guide RNA
aauugaccucgaggugagacuu

SEQ ID NO: 3502 - RNA, 22 nt, Artificial Sequence
  Guide RNA
accauaaaagucucaccucgag

SEQ ID NO: 3503 - RNA, 22 nt, Artificial Sequence
  Guide RNA
accucgaggugagacuuuuaug

SEQ ID NO: 3504 - RNA, 22 nt, Artificial Sequence
  Guide RNA
acucgggaccauaaaagucuca

SEQ ID NO: 3505 - RNA, 22 nt, Artificial Sequence
  Guide RNA
aggugagacuuuuauggucccg

SEQ ID NO: 3506 - RNA, 22 nt, Artificial Sequence
  Guide RNA
agucucaccucgaggucaauua

SEQ ID NO: 3507 - RNA, 22 nt, Artificial Sequence
  Guide RNA
auaaaagucucaccucgagguc

SEQ ID NO: 3508 - RNA, 22 nt, Artificial Sequence
  Guide RNA
auugaccucgaggugagacuuu

SEQ ID NO: 3509 - RNA, 22 nt, Artificial Sequence
  Guide RNA
caacucgggaccauaaaagucu

SEQ ID NO: 3510 - RNA, 22 nt, Artificial Sequence
  Guide RNA
cauaaaagucucaccucgaggu

SEQ ID NO: 3511 - RNA, 22 nt, Artificial Sequence
  Guide RNA
ccaacucgggaccauaaaaguc

SEQ ID NO: 3512 - RNA, 22 nt, Artificial Sequence
  Guide RNA
ccauaaaagucucaccucgagg

SEQ ID NO: 3513 - RNA, 22 nt, Artificial Sequence
  Guide RNA
ccucgaggugagacuuuuaugg

SEQ ID NO: 3514 - RNA, 22 nt, Artificial Sequence
  Guide RNA
cgaggugagacuuuuauggucc

SEQ ID NO: 3515 - RNA, 22 nt, Artificial Sequence
  Guide RNA
cgggaccauaaaagucucaccu

SEQ ID NO: 3516 - RNA, 22 nt, Artificial Sequence
  Guide RNA
cucaccucgaggucaauuacca

SEQ ID NO: 3517 - RNA, 22 nt, Artificial Sequence
  Guide RNA
cucgaggugagacuuuuauggu

SEQ ID NO: 3518 - RNA, 22 nt, Artificial Sequence
  Guide RNA
cucgggaccauaaaagucucac

SEQ ID NO: 3519 - RNA, 22 nt, Artificial Sequence
  Guide RNA
cugguuugguaauugaccucga

SEQ ID NO: 3520 - RNA, 22 nt, Artificial Sequence
  Guide RNA
gaccauaaaagucucaccucga

SEQ ID NO: 3521 - RNA, 22 nt, Artificial Sequence
  Guide RNA
gaccucgaggugagacuuuuau

SEQ ID NO: 3522 - RNA, 22 nt, Artificial Sequence
  Guide RNA
gaggugagacuuuuaugguccc

SEQ ID NO: 3523 - RNA, 22 nt, Artificial Sequence
  Guide RNA
ggaccauaaaagucucaccucg

SEQ ID NO: 3524 - RNA, 22 nt, Artificial Sequence
  Guide RNA
gggaccauaaaagucucaccuc

SEQ ID NO: 3525 - RNA, 22 nt, Artificial Sequence
  Guide RNA
gguaauugaccucgaggugaga

SEQ ID NO: 3526 - RNA, 22 nt, Artificial Sequence
  Guide RNA
ggugagacuuuuauggucccga

SEQ ID NO: 3527 - RNA, 22 nt, Artificial Sequence
  Guide RNA
gguuugguaauugaccucgagg

SEQ ID NO: 3528 - RNA, 22 nt, Artificial Sequence
  Guide RNA
guaauugaccucgaggugagac

SEQ ID NO: 3529 - RNA, 22 nt, Artificial Sequence
  Guide RNA
gucucaccucgaggucaauuac

SEQ ID NO: 3530 - RNA, 22 nt, Artificial Sequence
  Guide RNA
gugagacuuuuauggucccgag

SEQ ID NO: 3531 - RNA, 22 nt, Artificial Sequence
  Guide RNA
guuugguaauugaccucgaggu

SEQ ID NO: 3532 - RNA, 22 nt, Artificial Sequence
  Guide RNA
uaaaagucucaccucgagguca

SEQ ID NO: 3533 - RNA, 22 nt, Artificial Sequence
  Guide RNA
uaauugaccucgaggugagacu

SEQ ID NO: 3534 - RNA, 22 nt, Artificial Sequence
  Guide RNA
ucaccucgaggucaauuaccaa

SEQ ID NO: 3535 - RNA, 22 nt, Artificial Sequence
  Guide RNA
uccaacucgggaccauaaaagu

SEQ ID NO: 3536 - RNA, 22 nt, Artificial Sequence
  Guide RNA
ucgaggugagacuuuuaugguc

SEQ ID NO: 3537 - RNA, 22 nt, Artificial Sequence
  Guide RNA
ucgggaccauaaaagucucacc

SEQ ID NO: 3538 - RNA, 22 nt, Artificial Sequence
  Guide RNA
ucucaccucgaggucaauuacc

SEQ ID NO: 3539 - RNA, 22 nt, Artificial Sequence
  Guide RNA
ugaccucgaggugagacuuuua

SEQ ID NO: 3540 - RNA, 22 nt, Artificial Sequence
  Guide RNA
ugagacuuuuauggucccgagu

SEQ ID NO: 3541 - RNA, 22 nt, Artificial Sequence
  Guide RNA
ugguaauugaccucgaggugag

SEQ ID NO: 3542 - RNA, 22 nt, Artificial Sequence
  Guide RNA
ugguuugguaauugaccucgag

SEQ ID NO: 3543 - RNA, 22 nt, Artificial Sequence
  Guide RNA
uuccaacucgggaccauaaaag

SEQ ID NO: 3544 - RNA, 22 nt, Artificial Sequence
  Guide RNA
uugaccucgaggugagacuuuu

SEQ ID NO: 3545 - RNA, 22 nt, Artificial Sequence
  Guide RNA
uugguaauugaccucgagguga

SEQ ID NO: 3546 - RNA, 22 nt, Artificial Sequence
  Guide RNA
uuugguaauugaccucgaggug

SEQ ID NO: 3547 - RNA, 20 nt, Artificial Sequence
  Guide RNA
aaaagucuuaccucgaguuc

SEQ ID NO: 3548 - RNA, 20 nt, Artificial Sequence
  Guide RNA
aaagucuuaccucgaguuca

SEQ ID NO: 3549 - RNA, 20 nt, Artificial Sequence
  Guide RNA
aacucgagguaagacuuuua

SEQ ID NO: 3550 - RNA, 20 nt, Artificial Sequence
  Guide RNA
aagucuuaccucgaguucaa

SEQ ID NO: 3551 - RNA, 20 nt, Artificial Sequence
  Guide RNA
aauugaacucgagguaagac

SEQ ID NO: 3552 - RNA, 20 nt, Artificial Sequence
  Guide RNA
accauaaaagucuuaccucg

SEQ ID NO: 3553 - RNA, 20 nt, Artificial Sequence
  Guide RNA
accucgaguucaauuaccaa

SEQ ID NO: 3554 - RNA, 20 nt, Artificial Sequence
  Guide RNA
agccugguuugguaauugaa

SEQ ID NO: 3555 - RNA, 20 nt, Artificial Sequence
  Guide RNA
agucuuaccucgaguucaau

SEQ ID NO: 3556 - RNA, 20 nt, Artificial Sequence
  Guide RNA
aguucaauuaccaaaccagg

SEQ ID NO: 3557 - RNA, 20 nt, Artificial Sequence
  Guide RNA
auaaaagucuuaccucgagu

SEQ ID NO: 3558 - RNA, 20 nt, Artificial Sequence
  Guide RNA
auugaacucgagguaagacu

SEQ ID NO: 3559 - RNA, 20 nt, Artificial Sequence
  Guide RNA
cagccugguuugguaauuga

SEQ ID NO: 3560 - RNA, 20 nt, Artificial Sequence
  Guide RNA
cauaaaagucuuaccucgag

SEQ ID NO: 3561 - RNA, 20 nt, Artificial Sequence
  Guide RNA
ccagccugguuugguaauug

SEQ ID NO: 3562 - RNA, 20 nt, Artificial Sequence
  Guide RNA
ccauaaaagucuuaccucga

SEQ ID NO: 3563 - RNA, 20 nt, Artificial Sequence
  Guide RNA
ccucgaguucaauuaccaaa

SEQ ID NO: 3564 - RNA, 20 nt, Artificial Sequence
  Guide RNA
ccugguuugguaauugaacu

SEQ ID NO: 3565 - RNA, 20 nt, Artificial Sequence
  Guide RNA
cgaguucaauuaccaaacca

SEQ ID NO: 3566 - RNA, 20 nt, Artificial Sequence
  Guide RNA
cucgaguucaauuaccaaac

SEQ ID NO: 3567 - RNA, 20 nt, Artificial Sequence
  Guide RNA
cugguuugguaauugaacuc

SEQ ID NO: 3568 - RNA, 20 nt, Artificial Sequence
  Guide RNA
cuuaccucgaguucaauuac

SEQ ID NO: 3569 - RNA, 20 nt, Artificial Sequence
  Guide RNA
gaacucgagguaagacuuuu

SEQ ID NO: 3570 - RNA, 20 nt, Artificial Sequence
  Guide RNA
gaccauaaaagucuuaccuc

SEQ ID NO: 3571 - RNA, 20 nt, Artificial Sequence
  Guide RNA
gaguucaauuaccaaaccag

SEQ ID NO: 3572 - RNA, 20 nt, Artificial Sequence
  Guide RNA
gccagccugguuugguaauu

SEQ ID NO: 3573 - RNA, 20 nt, Artificial Sequence
  Guide RNA
gccugguuugguaauugaac

SEQ ID NO: 3574 - RNA, 20 nt, Artificial Sequence
  Guide RNA
gguaauugaacucgagguaa

SEQ ID NO: 3575 - RNA, 20 nt, Artificial Sequence
  Guide RNA
gguuugguaauugaacucga

SEQ ID NO: 3576 - RNA, 20 nt, Artificial Sequence
  Guide RNA
guaauugaacucgagguaag

SEQ ID NO: 3577 - RNA, 20 nt, Artificial Sequence
  Guide RNA
gucuuaccucgaguucaauu

SEQ ID NO: 3578 - RNA, 20 nt, Artificial Sequence
  Guide RNA
guucaauuaccaaaccaggc

SEQ ID NO: 3579 - RNA, 20 nt, Artificial Sequence
  Guide RNA
guuugguaauugaacucgag

SEQ ID NO: 3580 - RNA, 20 nt, Artificial Sequence
  Guide RNA
uaaaagucuuaccucgaguu

SEQ ID NO: 3581 - RNA, 20 nt, Artificial Sequence
  Guide RNA
uaauugaacucgagguaaga

SEQ ID NO: 3582 - RNA, 20 nt, Artificial Sequence
  Guide RNA
uaccucgaguucaauuacca

SEQ ID NO: 3583 - RNA, 20 nt, Artificial Sequence
  Guide RNA
ucgaguucaauuaccaaacc

SEQ ID NO: 3584 - RNA, 20 nt, Artificial Sequence
  Guide RNA
ucuuaccucgaguucaauua

SEQ ID NO: 3585 - RNA, 20 nt, Artificial Sequence
  Guide RNA
ugaacucgagguaagacuuu

SEQ ID NO: 3586 - RNA, 20 nt, Artificial Sequence
  Guide RNA
ugccagccugguuugguaau

SEQ ID NO: 3587 - RNA, 20 nt, Artificial Sequence
  Guide RNA
ugguaauugaacucgaggua

SEQ ID NO: 3588 - RNA, 20 nt, Artificial Sequence
  Guide RNA
ugguuugguaauugaacucg

SEQ ID NO: 3589 - RNA, 20 nt, Artificial Sequence
  Guide RNA
uuaccucgaguucaauuacc

SEQ ID NO: 3590 - RNA, 20 nt, Artificial Sequence
  Guide RNA
uugaacucgagguaagacuu

SEQ ID NO: 3591 - RNA, 20 nt, Artificial Sequence
  Guide RNA
uugguaauugaacucgaggu

SEQ ID NO: 3592 - RNA, 20 nt, Artificial Sequence
  Guide RNA
uuugguaauugaacucgagg

SEQ ID NO: 3593 - RNA, 21 nt, Artificial Sequence
  Guide RNA
aaaagucuuaccucgaguuca

SEQ ID NO: 3594 - RNA, 21 nt, Artificial Sequence
  Guide RNA
aaagucuuaccucgaguucaa

SEQ ID NO: 3595 - RNA, 21 nt, Artificial Sequence
  Guide RNA
aacucgagguaagacuuuuau

SEQ ID NO: 3596 - RNA, 21 nt, Artificial Sequence
  Guide RNA
aagucuuaccucgaguucaau

SEQ ID NO: 3597 - RNA, 21 nt, Artificial Sequence
  Guide RNA
aauugaacucgagguaagacu

SEQ ID NO: 3598 - RNA, 21 nt, Artificial Sequence
  Guide RNA
accauaaaagucuuaccucga

SEQ ID NO: 3599 - RNA, 21 nt, Artificial Sequence
  Guide RNA
accucgaguucaauuaccaaa

SEQ ID NO: 3600 - RNA, 21 nt, Artificial Sequence
  Guide RNA
agccugguuugguaauugaac

SEQ ID NO: 3601 - RNA, 21 nt, Artificial Sequence
  Guide RNA
agucuuaccucgaguucaauu

SEQ ID NO: 3602 - RNA, 21 nt, Artificial Sequence
  Guide RNA
aguucaauuaccaaaccaggc

SEQ ID NO: 3603 - RNA, 21 nt, Artificial Sequence
  Guide RNA
auaaaagucuuaccucgaguu

SEQ ID NO: 3604 - RNA, 21 nt, Artificial Sequence
  Guide RNA
auugaacucgagguaagacuu

SEQ ID NO: 3605 - RNA, 21 nt, Artificial Sequence
  Guide RNA
cagccugguuugguaauugaa

SEQ ID NO: 3606 - RNA, 21 nt, Artificial Sequence
  Guide RNA
cauaaaagucuuaccucgagu

SEQ ID NO: 3607 - RNA, 21 nt, Artificial Sequence
  Guide RNA
ccagccugguuugguaauuga

SEQ ID NO: 3608 - RNA, 21 nt, Artificial Sequence
  Guide RNA
ccauaaaagucuuaccucgag

SEQ ID NO: 3609 - RNA, 21 nt, Artificial Sequence
  Guide RNA
ccucgaguucaauuaccaaac

SEQ ID NO: 3610 - RNA, 21 nt, Artificial Sequence
  Guide RNA
ccugguuugguaauugaacuc

SEQ ID NO: 3611 - RNA, 21 nt, Artificial Sequence
  Guide RNA
cgaguucaauuaccaaaccag

SEQ ID NO: 3612 - RNA, 21 nt, Artificial Sequence
  Guide RNA
cucgaguucaauuaccaaacc

SEQ ID NO: 3613 - RNA, 21 nt, Artificial Sequence
  Guide RNA
cugguuugguaauugaacucg

SEQ ID NO: 3614 - RNA, 21 nt, Artificial Sequence
  Guide RNA
cuuaccucgaguucaauuacc

SEQ ID NO: 3615 - RNA, 21 nt, Artificial Sequence
  Guide RNA
gaacucgagguaagacuuuua

SEQ ID NO: 3616 - RNA, 21 nt, Artificial Sequence
  Guide RNA
gaccauaaaagucuuaccucg

SEQ ID NO: 3617 - RNA, 21 nt, Artificial Sequence
  Guide RNA
gaguucaauuaccaaaccagg

SEQ ID NO: 3618 - RNA, 21 nt, Artificial Sequence
  Guide RNA
gccagccugguuugguaauug

SEQ ID NO: 3619 - RNA, 21 nt, Artificial Sequence
  Guide RNA
gccugguuugguaauugaacu

SEQ ID NO: 3620 - RNA, 21 nt, Artificial Sequence
  Guide RNA
ggaccauaaaagucuuaccuc

SEQ ID NO: 3621 - RNA, 21 nt, Artificial Sequence
  Guide RNA
gguaauugaacucgagguaag

SEQ ID NO: 3622 - RNA, 21 nt, Artificial Sequence
  Guide RNA
gguuugguaauugaacucgag

SEQ ID NO: 3623 - RNA, 21 nt, Artificial Sequence
  Guide RNA
guaauugaacucgagguaaga

SEQ ID NO: 3624 - RNA, 21 nt, Artificial Sequence
  Guide RNA
gucuuaccucgaguucaauua

SEQ ID NO: 3625 - RNA, 21 nt, Artificial Sequence
  Guide RNA
gugccagccugguuugguaau

SEQ ID NO: 3626 - RNA, 21 nt, Artificial Sequence
  Guide RNA
guucaauuaccaaaccaggcu

SEQ ID NO: 3627 - RNA, 21 nt, Artificial Sequence
  Guide RNA
guuugguaauugaacucgagg

SEQ ID NO: 3628 - RNA, 21 nt, Artificial Sequence
  Guide RNA
uaaaagucuuaccucgaguuc

SEQ ID NO: 3629 - RNA, 21 nt, Artificial Sequence
  Guide RNA
uaauugaacucgagguaagac

SEQ ID NO: 3630 - RNA, 21 nt, Artificial Sequence
  Guide RNA
uaccucgaguucaauuaccaa

SEQ ID NO: 3631 - RNA, 21 nt, Artificial Sequence
  Guide RNA
ucgaguucaauuaccaaacca

SEQ ID NO: 3632 - RNA, 21 nt, Artificial Sequence
  Guide RNA
ucuuaccucgaguucaauuac

SEQ ID NO: 3633 - RNA, 21 nt, Artificial Sequence
  Guide RNA
ugaacucgagguaagacuuuu

SEQ ID NO: 3634 - RNA, 21 nt, Artificial Sequence
  Guide RNA
ugccagccugguuugguaauu

SEQ ID NO: 3635 - RNA, 21 nt, Artificial Sequence
  Guide RNA
ugguaauugaacucgagguaa

SEQ ID NO: 3636 - RNA, 21 nt, Artificial Sequence
  Guide RNA
ugguuugguaauugaacucga

SEQ ID NO: 3637 - RNA, 21 nt, Artificial Sequence
  Guide RNA
uuaccucgaguucaauuacca

SEQ ID NO: 3638 - RNA, 21 nt, Artificial Sequence
  Guide RNA
uugaacucgagguaagacuuu

SEQ ID NO: 3639 - RNA, 21 nt, Artificial Sequence
  Guide RNA
uugguaauugaacucgaggua

SEQ ID NO: 3640 - RNA, 21 nt, Artificial Sequence
  Guide RNA
uuugguaauugaacucgaggu

SEQ ID NO: 3641 - RNA, 22 nt, Artificial Sequence
  Guide RNA
aaaagucuuaccucgaguucaa

SEQ ID NO: 3642 - RNA, 22 nt, Artificial Sequence
  Guide RNA
aaagucuuaccucgaguucaau

SEQ ID NO: 3643 - RNA, 22 nt, Artificial Sequence
  Guide RNA
aacucgagguaagacuuuuaug

SEQ ID NO: 3644 - RNA, 22 nt, Artificial Sequence
  Guide RNA
aagucuuaccucgaguucaauu

SEQ ID NO: 3645 - RNA, 22 nt, Artificial Sequence
  Guide RNA
aauugaacucgagguaagacuu

SEQ ID NO: 3646 - RNA, 22 nt, Artificial Sequence
  Guide RNA
accauaaaagucuuaccucgag

SEQ ID NO: 3647 - RNA, 22 nt, Artificial Sequence
  Guide RNA
accucgaguucaauuaccaaac

SEQ ID NO: 3648 - RNA, 22 nt, Artificial Sequence
  Guide RNA
agccugguuugguaauugaacu

SEQ ID NO: 3649 - RNA, 22 nt, Artificial Sequence
  Guide RNA
agucuuaccucgaguucaauua

SEQ ID NO: 3650 - RNA, 22 nt, Artificial Sequence
  Guide RNA
aguucaauuaccaaaccaggcu

SEQ ID NO: 3651 - RNA, 22 nt, Artificial Sequence
  Guide RNA
auaaaagucuuaccucgaguuc

SEQ ID NO: 3652 - RNA, 22 nt, Artificial Sequence
  Guide RNA
auugaacucgagguaagacuuu

SEQ ID NO: 3653 - RNA, 22 nt, Artificial Sequence
  Guide RNA
cagccugguuugguaauugaac

SEQ ID NO: 3654 - RNA, 22 nt, Artificial Sequence
  Guide RNA
cauaaaagucuuaccucgaguu

SEQ ID NO: 3655 - RNA, 22 nt, Artificial Sequence
  Guide RNA
ccagccugguuugguaauugaa

SEQ ID NO: 3656 - RNA, 22 nt, Artificial Sequence
  Guide RNA
ccauaaaagucuuaccucgagu

SEQ ID NO: 3657 - RNA, 22 nt, Artificial Sequence
  Guide RNA
ccucgaguucaauuaccaaacc

SEQ ID NO: 3658 - RNA, 22 nt, Artificial Sequence
  Guide RNA
ccugguuugguaauugaacucg

SEQ ID NO: 3659 - RNA, 22 nt, Artificial Sequence
  Guide RNA
cgaguucaauuaccaaaccagg

SEQ ID NO: 3660 - RNA, 22 nt, Artificial Sequence
  Guide RNA
cucgaguucaauuaccaaacca

SEQ ID NO: 3661 - RNA, 22 nt, Artificial Sequence
  Guide RNA
cugguuugguaauugaacucga

SEQ ID NO: 3662 - RNA, 22 nt, Artificial Sequence
  Guide RNA
cuuaccucgaguucaauuacca

SEQ ID NO: 3663 - RNA, 22 nt, Artificial Sequence
  Guide RNA
gaacucgagguaagacuuuuau

SEQ ID NO: 3664 - RNA, 22 nt, Artificial Sequence
  Guide RNA
gaccauaaaagucuuaccucga

SEQ ID NO: 3665 - RNA, 22 nt, Artificial Sequence
  Guide RNA
gaguucaauuaccaaaccaggc

SEQ ID NO: 3666 - RNA, 22 nt, Artificial Sequence
  Guide RNA
gccagccugguuugguaauuga

SEQ ID NO: 3667 - RNA, 22 nt, Artificial Sequence
  Guide RNA
gccugguuugguaauugaacuc

SEQ ID NO: 3668 - RNA, 22 nt, Artificial Sequence
  Guide RNA
ggaccauaaaagucuuaccucg

SEQ ID NO: 3669 - RNA, 22 nt, Artificial Sequence
  Guide RNA
gggaccauaaaagucuuaccuc

SEQ ID NO: 3670 - RNA, 22 nt, Artificial Sequence
  Guide RNA
gguaauugaacucgagguaaga

SEQ ID NO: 3671 - RNA, 22 nt, Artificial Sequence
  Guide RNA
gguuugguaauugaacucgagg

SEQ ID NO: 3672 - RNA, 22 nt, Artificial Sequence
  Guide RNA
guaauugaacucgagguaagac

SEQ ID NO: 3673 - RNA, 22 nt, Artificial Sequence
  Guide RNA
gucuuaccucgaguucaauuac

SEQ ID NO: 3674 - RNA, 22 nt, Artificial Sequence
  Guide RNA
gugccagccugguuugguaauu

SEQ ID NO: 3675 - RNA, 22 nt, Artificial Sequence
  Guide RNA
guucaauuaccaaaccaggcug

SEQ ID NO: 3676 - RNA, 22 nt, Artificial Sequence
  Guide RNA
guuugguaauugaacucgaggu

SEQ ID NO: 3677 - RNA, 22 nt, Artificial Sequence
  Guide RNA
uaaaagucuuaccucgaguuca

SEQ ID NO: 3678 - RNA, 22 nt, Artificial Sequence
  Guide RNA
uaauugaacucgagguaagacu

SEQ ID NO: 3679 - RNA, 22 nt, Artificial Sequence
  Guide RNA
uaccucgaguucaauuaccaaa

SEQ ID NO: 3680 - RNA, 22 nt, Artificial Sequence
  Guide RNA
ucgaguucaauuaccaaaccag

SEQ ID NO: 3681 - RNA, 22 nt, Artificial Sequence
  Guide RNA
ucuuaccucgaguucaauuacc

SEQ ID NO: 3682 - RNA, 22 nt, Artificial Sequence
  Guide RNA
ugaacucgagguaagacuuuua

SEQ ID NO: 3683 - RNA, 22 nt, Artificial Sequence
  Guide RNA
ugccagccugguuugguaauug

SEQ ID NO: 3684 - RNA, 22 nt, Artificial Sequence
  Guide RNA
ugguaauugaacucgagguaag

SEQ ID NO: 3685 - RNA, 22 nt, Artificial Sequence
  Guide RNA
ugguuugguaauugaacucgag

SEQ ID NO: 3686 - RNA, 22 nt, Artificial Sequence
  Guide RNA
ugugccagccugguuugguaau

SEQ ID NO: 3687 - RNA, 22 nt, Artificial Sequence
  Guide RNA
uuaccucgaguucaauuaccaa

SEQ ID NO: 3688 - RNA, 22 nt, Artificial Sequence
  Guide RNA
uugaacucgagguaagacuuuu

SEQ ID NO: 3689 - RNA, 22 nt, Artificial Sequence
  Guide RNA
uugguaauugaacucgagguaa

SEQ ID NO: 3690 - RNA, 22 nt, Artificial Sequence
  Guide RNA
uuugguaauugaacucgaggua

SEQ ID NO: 3691 - RNA, 20 nt, Artificial Sequence
  Guide RNA
aaaacuaacggagugaagcu

SEQ ID NO: 3692 - RNA, 20 nt, Artificial Sequence
  Guide RNA
aaacuaacggagugaagcuc

SEQ ID NO: 3693 - RNA, 20 nt, Artificial Sequence
  Guide RNA
aacggagugaagcucuucag

SEQ ID NO: 3694 - RNA, 20 nt, Artificial Sequence
  Guide RNA
aacuaacggagugaagcucu

SEQ ID NO: 3695 - RNA, 20 nt, Artificial Sequence
  Guide RNA
aagagcuucacuccguuagu

SEQ ID NO: 3696 - RNA, 20 nt, Artificial Sequence
  Guide RNA
aauuggguuucaaaacuaac

SEQ ID NO: 3697 - RNA, 20 nt, Artificial Sequence
  Guide RNA
acaauuggguuucaaaacua

SEQ ID NO: 3698 - RNA, 20 nt, Artificial Sequence
  Guide RNA
acggagugaagcucuucagu

SEQ ID NO: 3699 - RNA, 20 nt, Artificial Sequence
  Guide RNA
acuaacggagugaagcucuu

SEQ ID NO: 3700 - RNA, 20 nt, Artificial Sequence
  Guide RNA
acuccguuaguuuugaaacc

SEQ ID NO: 3701 - RNA, 20 nt, Artificial Sequence
  Guide RNA
acugaagagcuucacuccgu

SEQ ID NO: 3702 - RNA, 20 nt, Artificial Sequence
  Guide RNA
agagcuucacuccguuaguu

SEQ ID NO: 3703 - RNA, 20 nt, Artificial Sequence
  Guide RNA
agcuucacuccguuaguuuu

SEQ ID NO: 3704 - RNA, 20 nt, Artificial Sequence
  Guide RNA
auuggguuucaaaacuaacg

SEQ ID NO: 3705 - RNA, 20 nt, Artificial Sequence
  Guide RNA
caaaacuaacggagugaagc

SEQ ID NO: 3706 - RNA, 20 nt, Artificial Sequence
  Guide RNA
caauuggguuucaaaacuaa

SEQ ID NO: 3707 - RNA, 20 nt, Artificial Sequence
  Guide RNA
cacaauuggguuucaaaacu

SEQ ID NO: 3708 - RNA, 20 nt, Artificial Sequence
  Guide RNA
cacuccguuaguuuugaaac

SEQ ID NO: 3709 - RNA, 20 nt, Artificial Sequence
  Guide RNA
ccguuaguuuugaaacccaa

SEQ ID NO: 3710 - RNA, 20 nt, Artificial Sequence
  Guide RNA
cguuacugaagagcuucacu

SEQ ID NO: 3711 - RNA, 20 nt, Artificial Sequence
  Guide RNA
cguuaguuuugaaacccaau

SEQ ID NO: 3712 - RNA, 20 nt, Artificial Sequence
  Guide RNA
cuaacggagugaagcucuuc

SEQ ID NO: 3713 - RNA, 20 nt, Artificial Sequence
  Guide RNA
cuccguuaguuuugaaaccc

SEQ ID NO: 3714 - RNA, 20 nt, Artificial Sequence
  Guide RNA
cugaagagcuucacuccguu

SEQ ID NO: 3715 - RNA, 20 nt, Artificial Sequence
  Guide RNA
cuucacuccguuaguuuuga

SEQ ID NO: 3716 - RNA, 20 nt, Artificial Sequence
  Guide RNA
gaagagcuucacuccguuag

SEQ ID NO: 3717 - RNA, 20 nt, Artificial Sequence
  Guide RNA
gagcuucacuccguuaguuu

SEQ ID NO: 3718 - RNA, 20 nt, Artificial Sequence
  Guide RNA
gcacaauuggguuucaaaac

SEQ ID NO: 3719 - RNA, 20 nt, Artificial Sequence
  Guide RNA
gcuucacuccguuaguuuug

SEQ ID NO: 3720 - RNA, 20 nt, Artificial Sequence
  Guide RNA
ggguuucaaaacuaacggag

SEQ ID NO: 3721 - RNA, 20 nt, Artificial Sequence
  Guide RNA
gguuucaaaacuaacggagu

SEQ ID NO: 3722 - RNA, 20 nt, Artificial Sequence
  Guide RNA
guuacugaagagcuucacuc

SEQ ID NO: 3723 - RNA, 20 nt, Artificial Sequence
  Guide RNA
guuucaaaacuaacggagug

SEQ ID NO: 3724 - RNA, 20 nt, Artificial Sequence
  Guide RNA
uaacggagugaagcucuuca

SEQ ID NO: 3725 - RNA, 20 nt, Artificial Sequence
  Guide RNA
uacugaagagcuucacuccg

SEQ ID NO: 3726 - RNA, 20 nt, Artificial Sequence
  Guide RNA
ucaaaacuaacggagugaag

SEQ ID NO: 3727 - RNA, 20 nt, Artificial Sequence
  Guide RNA
ucacuccguuaguuuugaaa

SEQ ID NO: 3728 - RNA, 20 nt, Artificial Sequence
  Guide RNA
uccguuaguuuugaaaccca

SEQ ID NO: 3729 - RNA, 20 nt, Artificial Sequence
  Guide RNA
ucguuacugaagagcuucac

SEQ ID NO: 3730 - RNA, 20 nt, Artificial Sequence
  Guide RNA
ugaagagcuucacuccguua

SEQ ID NO: 3731 - RNA, 20 nt, Artificial Sequence
  Guide RNA
uggguuucaaaacuaacgga

SEQ ID NO: 3732 - RNA, 20 nt, Artificial Sequence
  Guide RNA
uuacugaagagcuucacucc

SEQ ID NO: 3733 - RNA, 20 nt, Artificial Sequence
  Guide RNA
uucaaaacuaacggagugaa

SEQ ID NO: 3734 - RNA, 20 nt, Artificial Sequence
  Guide RNA
uucacuccguuaguuuugaa

SEQ ID NO: 3735 - RNA, 20 nt, Artificial Sequence
  Guide RNA
uuggguuucaaaacuaacgg

SEQ ID NO: 3736 - RNA, 20 nt, Artificial Sequence
  Guide RNA
uuucaaaacuaacggaguga

SEQ ID NO: 3737 - RNA, 21 nt, Artificial Sequence
  Guide RNA
aaaacuaacggagugaagcuc

SEQ ID NO: 3738 - RNA, 21 nt, Artificial Sequence
  Guide RNA
aaacuaacggagugaagcucu

SEQ ID NO: 3739 - RNA, 21 nt, Artificial Sequence
  Guide RNA
aacggagugaagcucuucagu

SEQ ID NO: 3740 - RNA, 21 nt, Artificial Sequence
  Guide RNA
aacuaacggagugaagcucuu

SEQ ID NO: 3741 - RNA, 21 nt, Artificial Sequence
  Guide RNA
aagagcuucacuccguuaguu

SEQ ID NO: 3742 - RNA, 21 nt, Artificial Sequence
  Guide RNA
aauuggguuucaaaacuaacg

SEQ ID NO: 3743 - RNA, 21 nt, Artificial Sequence
  Guide RNA
acggagugaagcucuucagua

SEQ ID NO: 3744 - RNA, 21 nt, Artificial Sequence
  Guide RNA
acuaacggagugaagcucuuc

SEQ ID NO: 3745 - RNA, 21 nt, Artificial Sequence
  Guide RNA
acuccguuaguuuugaaaccc

SEQ ID NO: 3746 - RNA, 21 nt, Artificial Sequence
  Guide RNA
acugaagagcuucacuccguu

SEQ ID NO: 3747 - RNA, 21 nt, Artificial Sequence
  Guide RNA
agagcuucacuccguuaguuu

SEQ ID NO: 3748 - RNA, 21 nt, Artificial Sequence
  Guide RNA
agcuucacuccguuaguuuug

SEQ ID NO: 3749 - RNA, 21 nt, Artificial Sequence
  Guide RNA
aucguuacugaagagcuucac

SEQ ID NO: 3750 - RNA, 21 nt, Artificial Sequence
  Guide RNA
auuggguuucaaaacuaacgg

SEQ ID NO: 3751 - RNA, 21 nt, Artificial Sequence
  Guide RNA
caaaacuaacggagugaagcu

SEQ ID NO: 3752 - RNA, 21 nt, Artificial Sequence
  Guide RNA
caauuggguuucaaaacuaac

SEQ ID NO: 3753 - RNA, 21 nt, Artificial Sequence
  Guide RNA
cacaauuggguuucaaaacua

SEQ ID NO: 3754 - RNA, 21 nt, Artificial Sequence
  Guide RNA
cacuccguuaguuuugaaacc

SEQ ID NO: 3755 - RNA, 21 nt, Artificial Sequence
  Guide RNA
ccguuaguuuugaaacccaau

SEQ ID NO: 3756 - RNA, 21 nt, Artificial Sequence
  Guide RNA
cguuacugaagagcuucacuc

SEQ ID NO: 3757 - RNA, 21 nt, Artificial Sequence
  Guide RNA
cguuaguuuugaaacccaauu

SEQ ID NO: 3758 - RNA, 21 nt, Artificial Sequence
  Guide RNA
cuaacggagugaagcucuuca

SEQ ID NO: 3759 - RNA, 21 nt, Artificial Sequence
  Guide RNA
cuccguuaguuuugaaaccca

SEQ ID NO: 3760 - RNA, 21 nt, Artificial Sequence
  Guide RNA
cugaagagcuucacuccguua

SEQ ID NO: 3761 - RNA, 21 nt, Artificial Sequence
  Guide RNA
cuucacuccguuaguuuugaa

SEQ ID NO: 3762 - RNA, 21 nt, Artificial Sequence
  Guide RNA
gaagagcuucacuccguuagu

SEQ ID NO: 3763 - RNA, 21 nt, Artificial Sequence
  Guide RNA
gagcuucacuccguuaguuuu

SEQ ID NO: 3764 - RNA, 21 nt, Artificial Sequence
  Guide RNA
gcacaauuggguuucaaaacu

SEQ ID NO: 3765 - RNA, 21 nt, Artificial Sequence
  Guide RNA
gcuucacuccguuaguuuuga

SEQ ID NO: 3766 - RNA, 21 nt, Artificial Sequence
  Guide RNA
ggcacaauuggguuucaaaac

SEQ ID NO: 3767 - RNA, 21 nt, Artificial Sequence
  Guide RNA
ggguuucaaaacuaacggagu

SEQ ID NO: 3768 - RNA, 21 nt, Artificial Sequence
  Guide RNA
gguuucaaaacuaacggagug

SEQ ID NO: 3769 - RNA, 21 nt, Artificial Sequence
  Guide RNA
guuacugaagagcuucacucc

SEQ ID NO: 3770 - RNA, 21 nt, Artificial Sequence
  Guide RNA
guuucaaaacuaacggaguga

SEQ ID NO: 3771 - RNA, 21 nt, Artificial Sequence
  Guide RNA
uaacggagugaagcucuucag

SEQ ID NO: 3772 - RNA, 21 nt, Artificial Sequence
  Guide RNA
uacugaagagcuucacuccgu

SEQ ID NO: 3773 - RNA, 21 nt, Artificial Sequence
  Guide RNA
ucaaaacuaacggagugaagc

SEQ ID NO: 3774 - RNA, 21 nt, Artificial Sequence
  Guide RNA
ucacuccguuaguuuugaaac

SEQ ID NO: 3775 - RNA, 21 nt, Artificial Sequence
  Guide RNA
uccguuaguuuugaaacccaa

SEQ ID NO: 3776 - RNA, 21 nt, Artificial Sequence
  Guide RNA
ucguuacugaagagcuucacu

SEQ ID NO: 3777 - RNA, 21 nt, Artificial Sequence
  Guide RNA
ugaagagcuucacuccguuag

SEQ ID NO: 3778 - RNA, 21 nt, Artificial Sequence
  Guide RNA
uggguuucaaaacuaacggag

SEQ ID NO: 3779 - RNA, 21 nt, Artificial Sequence
  Guide RNA
uuacugaagagcuucacuccg

SEQ ID NO: 3780 - RNA, 21 nt, Artificial Sequence
  Guide RNA
uucaaaacuaacggagugaag

SEQ ID NO: 3781 - RNA, 21 nt, Artificial Sequence
  Guide RNA
uucacuccguuaguuuugaaa

SEQ ID NO: 3782 - RNA, 21 nt, Artificial Sequence
  Guide RNA
uuggguuucaaaacuaacgga

SEQ ID NO: 3783 - RNA, 21 nt, Artificial Sequence
  Guide RNA
uuucaaaacuaacggagugaa

SEQ ID NO: 3784 - RNA, 22 nt, Artificial Sequence
  Guide RNA
aaaacuaacggagugaagcucu

SEQ ID NO: 3785 - RNA, 22 nt, Artificial Sequence
  Guide RNA
aaacuaacggagugaagcucuu

SEQ ID NO: 3786 - RNA, 22 nt, Artificial Sequence
  Guide RNA
aacggagugaagcucuucagua

SEQ ID NO: 3787 - RNA, 22 nt, Artificial Sequence
  Guide RNA
aacuaacggagugaagcucuuc

SEQ ID NO: 3788 - RNA, 22 nt, Artificial Sequence
  Guide RNA
aagagcuucacuccguuaguuu

SEQ ID NO: 3789 - RNA, 22 nt, Artificial Sequence
  Guide RNA
aauuggguuucaaaacuaacgg

SEQ ID NO: 3790 - RNA, 22 nt, Artificial Sequence
  Guide RNA
acaauuggguuucaaaacuaac

SEQ ID NO: 3791 - RNA, 22 nt, Artificial Sequence
  Guide RNA
acggagugaagcucuucaguaa

SEQ ID NO: 3792 - RNA, 22 nt, Artificial Sequence
  Guide RNA
acuaacggagugaagcucuuca

SEQ ID NO: 3793 - RNA, 22 nt, Artificial Sequence
  Guide RNA
acuccguuaguuuugaaaccca

SEQ ID NO: 3794 - RNA, 22 nt, Artificial Sequence
  Guide RNA
acugaagagcuucacuccguua

SEQ ID NO: 3795 - RNA, 22 nt, Artificial Sequence
  Guide RNA
agagcuucacuccguuaguuuu

SEQ ID NO: 3796 - RNA, 22 nt, Artificial Sequence
  Guide RNA
agcuucacuccguuaguuuuga

SEQ ID NO: 3797 - RNA, 22 nt, Artificial Sequence
  Guide RNA
aucguuacugaagagcuucacu

SEQ ID NO: 3798 - RNA, 22 nt, Artificial Sequence
  Guide RNA
auuggguuucaaaacuaacgga

SEQ ID NO: 3799 - RNA, 22 nt, Artificial Sequence
  Guide RNA
caaaacuaacggagugaagcuc

SEQ ID NO: 3800 - RNA, 22 nt, Artificial Sequence
  Guide RNA
caauuggguuucaaaacuaacg

SEQ ID NO: 3801 - RNA, 22 nt, Artificial Sequence
  Guide RNA
cacaauuggguuucaaaacuaa

SEQ ID NO: 3802 - RNA, 22 nt, Artificial Sequence
  Guide RNA
cacuccguuaguuuugaaaccc

SEQ ID NO: 3803 - RNA, 22 nt, Artificial Sequence
  Guide RNA
caucguuacugaagagcuucac

SEQ ID NO: 3804 - RNA, 22 nt, Artificial Sequence
  Guide RNA
ccguuaguuuugaaacccaauu

SEQ ID NO: 3805 - RNA, 22 nt, Artificial Sequence
  Guide RNA
cguuacugaagagcuucacucc

SEQ ID NO: 3806 - RNA, 22 nt, Artificial Sequence
  Guide RNA
cguuaguuuugaaacccaauug

SEQ ID NO: 3807 - RNA, 22 nt, Artificial Sequence
  Guide RNA
cuaacggagugaagcucuucag

SEQ ID NO: 3808 - RNA, 22 nt, Artificial Sequence
  Guide RNA
cuccguuaguuuugaaacccaa

SEQ ID NO: 3809 - RNA, 22 nt, Artificial Sequence
  Guide RNA
cugaagagcuucacuccguuag

SEQ ID NO: 3810 - RNA, 22 nt, Artificial Sequence
  Guide RNA
cuucacuccguuaguuuugaaa

SEQ ID NO: 3811 - RNA, 22 nt, Artificial Sequence
  Guide RNA
gaagagcuucacuccguuaguu

SEQ ID NO: 3812 - RNA, 22 nt, Artificial Sequence
  Guide RNA
gagcuucacuccguuaguuuug

SEQ ID NO: 3813 - RNA, 22 nt, Artificial Sequence
  Guide RNA
gcacaauuggguuucaaaacua

SEQ ID NO: 3814 - RNA, 22 nt, Artificial Sequence
  Guide RNA
gcuucacuccguuaguuuugaa

SEQ ID NO: 3815 - RNA, 22 nt, Artificial Sequence
  Guide RNA
ggcacaauuggguuucaaaacu

SEQ ID NO: 3816 - RNA, 22 nt, Artificial Sequence
  Guide RNA
ggguuucaaaacuaacggagug

SEQ ID NO: 3817 - RNA, 22 nt, Artificial Sequence
  Guide RNA
gguuucaaaacuaacggaguga

SEQ ID NO: 3818 - RNA, 22 nt, Artificial Sequence
  Guide RNA
guuacugaagagcuucacuccg

SEQ ID NO: 3819 - RNA, 22 nt, Artificial Sequence
  Guide RNA
guuucaaaacuaacggagugaa

SEQ ID NO: 3820 - RNA, 22 nt, Artificial Sequence
  Guide RNA
uaacggagugaagcucuucagu

SEQ ID NO: 3821 - RNA, 22 nt, Artificial Sequence
  Guide RNA
uacugaagagcuucacuccguu

SEQ ID NO: 3822 - RNA, 22 nt, Artificial Sequence
  Guide RNA
ucaaaacuaacggagugaagcu

SEQ ID NO: 3823 - RNA, 22 nt, Artificial Sequence
  Guide RNA
ucacuccguuaguuuugaaacc

SEQ ID NO: 3824 - RNA, 22 nt, Artificial Sequence
  Guide RNA
uccguuaguuuugaaacccaau

SEQ ID NO: 3825 - RNA, 22 nt, Artificial Sequence
  Guide RNA
ucguuacugaagagcuucacuc

SEQ ID NO: 3826 - RNA, 22 nt, Artificial Sequence
  Guide RNA
ugaagagcuucacuccguuagu

SEQ ID NO: 3827 - RNA, 22 nt, Artificial Sequence
  Guide RNA
uggcacaauuggguuucaaaac

SEQ ID NO: 3828 - RNA, 22 nt, Artificial Sequence
  Guide RNA
uggguuucaaaacuaacggagu

SEQ ID NO: 3829 - RNA, 22 nt, Artificial Sequence
  Guide RNA
uuacugaagagcuucacuccgu

SEQ ID NO: 3830 - RNA, 22 nt, Artificial Sequence
  Guide RNA
uucaaaacuaacggagugaagc

SEQ ID NO: 3831 - RNA, 22 nt, Artificial Sequence
  Guide RNA
uucacuccguuaguuuugaaac

SEQ ID NO: 3832 - RNA, 22 nt, Artificial Sequence
  Guide RNA
uuggguuucaaaacuaacggag

SEQ ID NO: 3833 - RNA, 22 nt, Artificial Sequence
  Guide RNA
uuucaaaacuaacggagugaag

SEQ ID NO: 3834 - RNA, 20 nt, Artificial Sequence
  Guide RNA
aaagggauucucaccucauu

SEQ ID NO: 3835 - RNA, 20 nt, Artificial Sequence
  Guide RNA
aacauaaagggauucucacc

SEQ ID NO: 3836 - RNA, 20 nt, Artificial Sequence
  Guide RNA
aacgaaugaggugagaaucc

SEQ ID NO: 3837 - RNA, 20 nt, Artificial Sequence
  Guide RNA
aagggauucucaccucauuc

SEQ ID NO: 3838 - RNA, 20 nt, Artificial Sequence
  Guide RNA
aaucccuuuauguugugaau

SEQ ID NO: 3839 - RNA, 20 nt, Artificial Sequence
  Guide RNA
aaugaggugagaaucccuuu

SEQ ID NO: 3840 - RNA, 20 nt, Artificial Sequence
  Guide RNA
acaacauaaagggauucuca

SEQ ID NO: 3841 - RNA, 20 nt, Artificial Sequence
  Guide RNA
acauaaagggauucucaccu

SEQ ID NO: 3842 - RNA, 20 nt, Artificial Sequence
  Guide RNA
accagaacgaaugaggugag

SEQ ID NO: 3843 - RNA, 20 nt, Artificial Sequence
  Guide RNA
acgaaugaggugagaauccc

SEQ ID NO: 3844 - RNA, 20 nt, Artificial Sequence
  Guide RNA
agaacgaaugaggugagaau

SEQ ID NO: 3845 - RNA, 20 nt, Artificial Sequence
  Guide RNA
agaaucccuuuauguuguga

SEQ ID NO: 3846 - RNA, 20 nt, Artificial Sequence
  Guide RNA
agggauucucaccucauucg

SEQ ID NO: 3847 - RNA, 20 nt, Artificial Sequence
  Guide RNA
aggugagaaucccuuuaugu

SEQ ID NO: 3848 - RNA, 20 nt, Artificial Sequence
  Guide RNA
auaaagggauucucaccuca

SEQ ID NO: 3849 - RNA, 20 nt, Artificial Sequence
  Guide RNA
augaggugagaaucccuuua

SEQ ID NO: 3850 - RNA, 20 nt, Artificial Sequence
  Guide RNA
auucacaacauaaagggauu

SEQ ID NO: 3851 - RNA, 20 nt, Artificial Sequence
  Guide RNA
auucucaccucauucguucu

SEQ ID NO: 3852 - RNA, 20 nt, Artificial Sequence
  Guide RNA
caacauaaagggauucucac

SEQ ID NO: 3853 - RNA, 20 nt, Artificial Sequence
  Guide RNA
cacaacauaaagggauucuc

SEQ ID NO: 3854 - RNA, 20 nt, Artificial Sequence
  Guide RNA
caccagaacgaaugagguga

SEQ ID NO: 3855 - RNA, 20 nt, Artificial Sequence
  Guide RNA
cagaacgaaugaggugagaa

SEQ ID NO: 3856 - RNA, 20 nt, Artificial Sequence
  Guide RNA
cauaaagggauucucaccuc

SEQ ID NO: 3857 - RNA, 20 nt, Artificial Sequence
  Guide RNA
cauucacaacauaaagggau

SEQ ID NO: 3858 - RNA, 20 nt, Artificial Sequence
  Guide RNA
ccagaacgaaugaggugaga

SEQ ID NO: 3859 - RNA, 20 nt, Artificial Sequence
  Guide RNA
ccauucacaacauaaaggga

SEQ ID NO: 3860 - RNA, 20 nt, Artificial Sequence
  Guide RNA
cccauucacaacauaaaggg

SEQ ID NO: 3861 - RNA, 20 nt, Artificial Sequence
  Guide RNA
cgaaugaggugagaaucccu

SEQ ID NO: 3862 - RNA, 20 nt, Artificial Sequence
  Guide RNA
gaacgaaugaggugagaauc

SEQ ID NO: 3863 - RNA, 20 nt, Artificial Sequence
  Guide RNA
gaaucccuuuauguugugaa

SEQ ID NO: 3864 - RNA, 20 nt, Artificial Sequence
  Guide RNA
gaaugaggugagaaucccuu

SEQ ID NO: 3865 - RNA, 20 nt, Artificial Sequence
  Guide RNA
gagaaucccuuuauguugug

SEQ ID NO: 3866 - RNA, 20 nt, Artificial Sequence
  Guide RNA
gaggugagaaucccuuuaug

SEQ ID NO: 3867 - RNA, 20 nt, Artificial Sequence
  Guide RNA
gauucucaccucauucguuc

SEQ ID NO: 3868 - RNA, 20 nt, Artificial Sequence
  Guide RNA
gcaccagaacgaaugaggug

SEQ ID NO: 3869 - RNA, 20 nt, Artificial Sequence
  Guide RNA
gcccauucacaacauaaagg

SEQ ID NO: 3870 - RNA, 20 nt, Artificial Sequence
  Guide RNA
ggauucucaccucauucguu

SEQ ID NO: 3871 - RNA, 20 nt, Artificial Sequence
  Guide RNA
ggcccauucacaacauaaag

SEQ ID NO: 3872 - RNA, 20 nt, Artificial Sequence
  Guide RNA
gggauucucaccucauucgu

SEQ ID NO: 3873 - RNA, 20 nt, Artificial Sequence
  Guide RNA
ggugagaaucccuuuauguu

SEQ ID NO: 3874 - RNA, 20 nt, Artificial Sequence
  Guide RNA
gugagaaucccuuuauguug

SEQ ID NO: 3875 - RNA, 20 nt, Artificial Sequence
  Guide RNA
uaaagggauucucaccucau

SEQ ID NO: 3876 - RNA, 20 nt, Artificial Sequence
  Guide RNA
ucacaacauaaagggauucu

SEQ ID NO: 3877 - RNA, 20 nt, Artificial Sequence
  Guide RNA
ugagaaucccuuuauguugu

SEQ ID NO: 3878 - RNA, 20 nt, Artificial Sequence
  Guide RNA
ugaggugagaaucccuuuau

SEQ ID NO: 3879 - RNA, 20 nt, Artificial Sequence
  Guide RNA
uucacaacauaaagggauuc

SEQ ID NO: 3880 - RNA, 21 nt, Artificial Sequence
  Guide RNA
aaagggauucucaccucauuc

SEQ ID NO: 3881 - RNA, 21 nt, Artificial Sequence
  Guide RNA
aacauaaagggauucucaccu

SEQ ID NO: 3882 - RNA, 21 nt, Artificial Sequence
  Guide RNA
aacgaaugaggugagaauccc

SEQ ID NO: 3883 - RNA, 21 nt, Artificial Sequence
  Guide RNA
aagggauucucaccucauucg

SEQ ID NO: 3884 - RNA, 21 nt, Artificial Sequence
  Guide RNA
aaucccuuuauguugugaaug

SEQ ID NO: 3885 - RNA, 21 nt, Artificial Sequence
  Guide RNA
aaugaggugagaaucccuuua

SEQ ID NO: 3886 - RNA, 21 nt, Artificial Sequence
  Guide RNA
acaacauaaagggauucucac

SEQ ID NO: 3887 - RNA, 21 nt, Artificial Sequence
  Guide RNA
acauaaagggauucucaccuc

SEQ ID NO: 3888 - RNA, 21 nt, Artificial Sequence
  Guide RNA
accagaacgaaugaggugaga

SEQ ID NO: 3889 - RNA, 21 nt, Artificial Sequence
  Guide RNA
acgaaugaggugagaaucccu

SEQ ID NO: 3890 - RNA, 21 nt, Artificial Sequence
  Guide RNA
agaacgaaugaggugagaauc

SEQ ID NO: 3891 - RNA, 21 nt, Artificial Sequence
  Guide RNA
agaaucccuuuauguugugaa

SEQ ID NO: 3892 - RNA, 21 nt, Artificial Sequence
  Guide RNA
agggauucucaccucauucgu

SEQ ID NO: 3893 - RNA, 21 nt, Artificial Sequence
  Guide RNA
aggugagaaucccuuuauguu

SEQ ID NO: 3894 - RNA, 21 nt, Artificial Sequence
  Guide RNA
auaaagggauucucaccucau

SEQ ID NO: 3895 - RNA, 21 nt, Artificial Sequence
  Guide RNA
augaggugagaaucccuuuau

SEQ ID NO: 3896 - RNA, 21 nt, Artificial Sequence
  Guide RNA
auucacaacauaaagggauuc

SEQ ID NO: 3897 - RNA, 21 nt, Artificial Sequence
  Guide RNA
auucucaccucauucguucug

SEQ ID NO: 3898 - RNA, 21 nt, Artificial Sequence
  Guide RNA
caacauaaagggauucucacc

SEQ ID NO: 3899 - RNA, 21 nt, Artificial Sequence
  Guide RNA
cacaacauaaagggauucuca

SEQ ID NO: 3900 - RNA, 21 nt, Artificial Sequence
  Guide RNA
caccagaacgaaugaggugag

SEQ ID NO: 3901 - RNA, 21 nt, Artificial Sequence
  Guide RNA
cagaacgaaugaggugagaau

SEQ ID NO: 3902 - RNA, 21 nt, Artificial Sequence
  Guide RNA
cauaaagggauucucaccuca

SEQ ID NO: 3903 - RNA, 21 nt, Artificial Sequence
  Guide RNA
cauucacaacauaaagggauu

SEQ ID NO: 3904 - RNA, 21 nt, Artificial Sequence
  Guide RNA
ccagaacgaaugaggugagaa

SEQ ID NO: 3905 - RNA, 21 nt, Artificial Sequence
  Guide RNA
ccauucacaacauaaagggau

SEQ ID NO: 3906 - RNA, 21 nt, Artificial Sequence
  Guide RNA
cccauucacaacauaaaggga

SEQ ID NO: 3907 - RNA, 21 nt, Artificial Sequence
  Guide RNA
cgaaugaggugagaaucccuu

SEQ ID NO: 3908 - RNA, 21 nt, Artificial Sequence
  Guide RNA
gaacgaaugaggugagaaucc

SEQ ID NO: 3909 - RNA, 21 nt, Artificial Sequence
  Guide RNA
gaaucccuuuauguugugaau

SEQ ID NO: 3910 - RNA, 21 nt, Artificial Sequence
  Guide RNA
gaaugaggugagaaucccuuu

SEQ ID NO: 3911 - RNA, 21 nt, Artificial Sequence
  Guide RNA
gagaaucccuuuauguuguga

SEQ ID NO: 3912 - RNA, 21 nt, Artificial Sequence
  Guide RNA
gaggugagaaucccuuuaugu

SEQ ID NO: 3913 - RNA, 21 nt, Artificial Sequence
  Guide RNA
gauucucaccucauucguucu

SEQ ID NO: 3914 - RNA, 21 nt, Artificial Sequence
  Guide RNA
gcaccagaacgaaugagguga

SEQ ID NO: 3915 - RNA, 21 nt, Artificial Sequence
  Guide RNA
gcccauucacaacauaaaggg

SEQ ID NO: 3916 - RNA, 21 nt, Artificial Sequence
  Guide RNA
ggauucucaccucauucguuc

SEQ ID NO: 3917 - RNA, 21 nt, Artificial Sequence
  Guide RNA
ggcaccagaacgaaugaggug

SEQ ID NO: 3918 - RNA, 21 nt, Artificial Sequence
  Guide RNA
ggcccauucacaacauaaagg

SEQ ID NO: 3919 - RNA, 21 nt, Artificial Sequence
  Guide RNA
gggauucucaccucauucguu

SEQ ID NO: 3920 - RNA, 21 nt, Artificial Sequence
  Guide RNA
gggcccauucacaacauaaag

SEQ ID NO: 3921 - RNA, 21 nt, Artificial Sequence
  Guide RNA
ggugagaaucccuuuauguug

SEQ ID NO: 3922 - RNA, 21 nt, Artificial Sequence
  Guide RNA
gugagaaucccuuuauguugu

SEQ ID NO: 3923 - RNA, 21 nt, Artificial Sequence
  Guide RNA
uaaagggauucucaccucauu

SEQ ID NO: 3924 - RNA, 21 nt, Artificial Sequence
  Guide RNA
ucacaacauaaagggauucuc

SEQ ID NO: 3925 - RNA, 21 nt, Artificial Sequence
  Guide RNA
ugagaaucccuuuauguugug

SEQ ID NO: 3926 - RNA, 21 nt, Artificial Sequence
  Guide RNA
ugaggugagaaucccuuuaug

SEQ ID NO: 3927 - RNA, 21 nt, Artificial Sequence
  Guide RNA
uucacaacauaaagggauucu

SEQ ID NO: 3928 - RNA, 22 nt, Artificial Sequence
  Guide RNA
aaagggauucucaccucauucg

SEQ ID NO: 3929 - RNA, 22 nt, Artificial Sequence
  Guide RNA
aacauaaagggauucucaccuc

SEQ ID NO: 3930 - RNA, 22 nt, Artificial Sequence
  Guide RNA
aacgaaugaggugagaaucccu

SEQ ID NO: 3931 - RNA, 22 nt, Artificial Sequence
  Guide RNA
aagggauucucaccucauucgu

SEQ ID NO: 3932 - RNA, 22 nt, Artificial Sequence
  Guide RNA
aaucccuuuauguugugaaugg

SEQ ID NO: 3933 - RNA, 22 nt, Artificial Sequence
  Guide RNA
aaugaggugagaaucccuuuau

SEQ ID NO: 3934 - RNA, 22 nt, Artificial Sequence
  Guide RNA
acaacauaaagggauucucacc

SEQ ID NO: 3935 - RNA, 22 nt, Artificial Sequence
  Guide RNA
acauaaagggauucucaccuca

SEQ ID NO: 3936 - RNA, 22 nt, Artificial Sequence
  Guide RNA
accagaacgaaugaggugagaa

SEQ ID NO: 3937 - RNA, 22 nt, Artificial Sequence
  Guide RNA
acgaaugaggugagaaucccuu

SEQ ID NO: 3938 - RNA, 22 nt, Artificial Sequence
  Guide RNA
agaacgaaugaggugagaaucc

SEQ ID NO: 3939 - RNA, 22 nt, Artificial Sequence
  Guide RNA
agaaucccuuuauguugugaau

SEQ ID NO: 3940 - RNA, 22 nt, Artificial Sequence
  Guide RNA
agggauucucaccucauucguu

SEQ ID NO: 3941 - RNA, 22 nt, Artificial Sequence
  Guide RNA
aggugagaaucccuuuauguug

SEQ ID NO: 3942 - RNA, 22 nt, Artificial Sequence
  Guide RNA
auaaagggauucucaccucauu

SEQ ID NO: 3943 - RNA, 22 nt, Artificial Sequence
  Guide RNA
augaggugagaaucccuuuaug

SEQ ID NO: 3944 - RNA, 22 nt, Artificial Sequence
  Guide RNA
auucacaacauaaagggauucu

SEQ ID NO: 3945 - RNA, 22 nt, Artificial Sequence
  Guide RNA
auucucaccucauucguucugg

SEQ ID NO: 3946 - RNA, 22 nt, Artificial Sequence
  Guide RNA
caacauaaagggauucucaccu

SEQ ID NO: 3947 - RNA, 22 nt, Artificial Sequence
  Guide RNA
cacaacauaaagggauucucac

SEQ ID NO: 3948 - RNA, 22 nt, Artificial Sequence
  Guide RNA
caccagaacgaaugaggugaga

SEQ ID NO: 3949 - RNA, 22 nt, Artificial Sequence
  Guide RNA
cagaacgaaugaggugagaauc

SEQ ID NO: 3950 - RNA, 22 nt, Artificial Sequence
  Guide RNA
cauaaagggauucucaccucau

SEQ ID NO: 3951 - RNA, 22 nt, Artificial Sequence
  Guide RNA
cauucacaacauaaagggauuc

SEQ ID NO: 3952 - RNA, 22 nt, Artificial Sequence
  Guide RNA
ccagaacgaaugaggugagaau

SEQ ID NO: 3953 - RNA, 22 nt, Artificial Sequence
  Guide RNA
ccauucacaacauaaagggauu

SEQ ID NO: 3954 - RNA, 22 nt, Artificial Sequence
  Guide RNA
cccauucacaacauaaagggau

SEQ ID NO: 3955 - RNA, 22 nt, Artificial Sequence
  Guide RNA
cgaaugaggugagaaucccuuu

SEQ ID NO: 3956 - RNA, 22 nt, Artificial Sequence
  Guide RNA
gaacgaaugaggugagaauccc

SEQ ID NO: 3957 - RNA, 22 nt, Artificial Sequence
  Guide RNA
gaaucccuuuauguugugaaug

SEQ ID NO: 3958 - RNA, 22 nt, Artificial Sequence
  Guide RNA
gaaugaggugagaaucccuuua

SEQ ID NO: 3959 - RNA, 22 nt, Artificial Sequence
  Guide RNA
gagaaucccuuuauguugugaa

SEQ ID NO: 3960 - RNA, 22 nt, Artificial Sequence
  Guide RNA
gaggugagaaucccuuuauguu

SEQ ID NO: 3961 - RNA, 22 nt, Artificial Sequence
  Guide RNA
gauucucaccucauucguucug

SEQ ID NO: 3962 - RNA, 22 nt, Artificial Sequence
  Guide RNA
gcaccagaacgaaugaggugag

SEQ ID NO: 3963 - RNA, 22 nt, Artificial Sequence
  Guide RNA
gcccauucacaacauaaaggga

SEQ ID NO: 3964 - RNA, 22 nt, Artificial Sequence
  Guide RNA
ggauucucaccucauucguucu

SEQ ID NO: 3965 - RNA, 22 nt, Artificial Sequence
  Guide RNA
ggcaccagaacgaaugagguga

SEQ ID NO: 3966 - RNA, 22 nt, Artificial Sequence
  Guide RNA
ggcccauucacaacauaaaggg

SEQ ID NO: 3967 - RNA, 22 nt, Artificial Sequence
  Guide RNA
gggauucucaccucauucguuc

SEQ ID NO: 3968 - RNA, 22 nt, Artificial Sequence
  Guide RNA
gggcccauucacaacauaaagg

SEQ ID NO: 3969 - RNA, 22 nt, Artificial Sequence
  Guide RNA
ggugagaaucccuuuauguugu

SEQ ID NO: 3970 - RNA, 22 nt, Artificial Sequence
  Guide RNA
gugagaaucccuuuauguugug

SEQ ID NO: 3971 - RNA, 22 nt, Artificial Sequence
  Guide RNA
uaaagggauucucaccucauuc

SEQ ID NO: 3972 - RNA, 22 nt, Artificial Sequence
  Guide RNA
ucacaacauaaagggauucuca

SEQ ID NO: 3973 - RNA, 22 nt, Artificial Sequence
  Guide RNA
ugagaaucccuuuauguuguga

SEQ ID NO: 3974 - RNA, 22 nt, Artificial Sequence
  Guide RNA
ugaggugagaaucccuuuaugu

SEQ ID NO: 3975 - RNA, 22 nt, Artificial Sequence
  Guide RNA
uggcaccagaacgaaugaggug

SEQ ID NO: 3976 - RNA, 22 nt, Artificial Sequence
  Guide RNA
ugggcccauucacaacauaaag

SEQ ID NO: 3977 - RNA, 22 nt, Artificial Sequence
  Guide RNA
uucacaacauaaagggauucuc

SEQ ID NO: 3978 - RNA, 20 nt, Artificial Sequence
  Guide RNA
aaaaaugcuggcaccagaag

SEQ ID NO: 3979 - RNA, 20 nt, Artificial Sequence
  Guide RNA
aaaaugcuggcaccagaagg

SEQ ID NO: 3980 - RNA, 20 nt, Artificial Sequence
  Guide RNA
aaagggacucucaccucauu

SEQ ID NO: 3981 - RNA, 20 nt, Artificial Sequence
  Guide RNA
aaaugcuggcaccagaagga

SEQ ID NO: 3982 - RNA, 20 nt, Artificial Sequence
  Guide RNA
aaggaaugaggugagagucc

SEQ ID NO: 3983 - RNA, 20 nt, Artificial Sequence
  Guide RNA
aagggacucucaccucauuc

SEQ ID NO: 3984 - RNA, 20 nt, Artificial Sequence
  Guide RNA
aaugcuggcaccagaaggaa

SEQ ID NO: 3985 - RNA, 20 nt, Artificial Sequence
  Guide RNA
acagaaaaaugcuggcacca

SEQ ID NO: 3986 - RNA, 20 nt, Artificial Sequence
  Guide RNA
accagaaggaaugaggugag

SEQ ID NO: 3987 - RNA, 20 nt, Artificial Sequence
  Guide RNA
accucauuccuucuggugcc

SEQ ID NO: 3988 - RNA, 20 nt, Artificial Sequence
  Guide RNA
acucucaccucauuccuucu

SEQ ID NO: 3989 - RNA, 20 nt, Artificial Sequence
  Guide RNA
agaaaaaugcuggcaccaga

SEQ ID NO: 3990 - RNA, 20 nt, Artificial Sequence
  Guide RNA
agaaggaaugaggugagagu

SEQ ID NO: 3991 - RNA, 20 nt, Artificial Sequence
  Guide RNA
aggaaugaggugagaguccc

SEQ ID NO: 3992 - RNA, 20 nt, Artificial Sequence
  Guide RNA
agggacucucaccucauucc

SEQ ID NO: 3993 - RNA, 20 nt, Artificial Sequence
  Guide RNA
auaaagggacucucaccuca

SEQ ID NO: 3994 - RNA, 20 nt, Artificial Sequence
  Guide RNA
augcuggcaccagaaggaau

SEQ ID NO: 3995 - RNA, 20 nt, Artificial Sequence
  Guide RNA
auuccuucuggugccagcau

SEQ ID NO: 3996 - RNA, 20 nt, Artificial Sequence
  Guide RNA
caccagaaggaaugagguga

SEQ ID NO: 3997 - RNA, 20 nt, Artificial Sequence
  Guide RNA
caccucauuccuucuggugc

SEQ ID NO: 3998 - RNA, 20 nt, Artificial Sequence
  Guide RNA
cagaaaaaugcuggcaccag

SEQ ID NO: 3999 - RNA, 20 nt, Artificial Sequence
  Guide RNA
cagaaggaaugaggugagag

SEQ ID NO: 4000 - RNA, 20 nt, Artificial Sequence
  Guide RNA
cauuccuucuggugccagca

SEQ ID NO: 4001 - RNA, 20 nt, Artificial Sequence
  Guide RNA
ccagaaggaaugaggugaga

SEQ ID NO: 4002 - RNA, 20 nt, Artificial Sequence
  Guide RNA
ccucauuccuucuggugcca

SEQ ID NO: 4003 - RNA, 20 nt, Artificial Sequence
  Guide RNA
ccuucuggugccagcauuuu

SEQ ID NO: 4004 - RNA, 20 nt, Artificial Sequence
  Guide RNA
cucaccucauuccuucuggu

SEQ ID NO: 4005 - RNA, 20 nt, Artificial Sequence
  Guide RNA
cucauuccuucuggugccag

SEQ ID NO: 4006 - RNA, 20 nt, Artificial Sequence
  Guide RNA
cucucaccucauuccuucug

SEQ ID NO: 4007 - RNA, 20 nt, Artificial Sequence
  Guide RNA
cuggcaccagaaggaaugag

SEQ ID NO: 4008 - RNA, 20 nt, Artificial Sequence
  Guide RNA
gaaaaaugcuggcaccagaa

SEQ ID NO: 4009 - RNA, 20 nt, Artificial Sequence
  Guide RNA
gaaggaaugaggugagaguc

SEQ ID NO: 4010 - RNA, 20 nt, Artificial Sequence
  Guide RNA
gacucucaccucauuccuuc

SEQ ID NO: 4011 - RNA, 20 nt, Artificial Sequence
  Guide RNA
gcaccagaaggaaugaggug

SEQ ID NO: 4012 - RNA, 20 nt, Artificial Sequence
  Guide RNA
gcuggcaccagaaggaauga

SEQ ID NO: 4013 - RNA, 20 nt, Artificial Sequence
  Guide RNA
ggacucucaccucauuccuu

SEQ ID NO: 4014 - RNA, 20 nt, Artificial Sequence
  Guide RNA
ggcaccagaaggaaugaggu

SEQ ID NO: 4015 - RNA, 20 nt, Artificial Sequence
  Guide RNA
gggacucucaccucauuccu

SEQ ID NO: 4016 - RNA, 20 nt, Artificial Sequence
  Guide RNA
uaaagggacucucaccucau

SEQ ID NO: 4017 - RNA, 20 nt, Artificial Sequence
  Guide RNA
ucaccucauuccuucuggug

SEQ ID NO: 4018 - RNA, 20 nt, Artificial Sequence
  Guide RNA
ucauuccuucuggugccagc

SEQ ID NO: 4019 - RNA, 20 nt, Artificial Sequence
  Guide RNA
uccuucuggugccagcauuu

SEQ ID NO: 4020 - RNA, 20 nt, Artificial Sequence
  Guide RNA
ucucaccucauuccuucugg

SEQ ID NO: 4021 - RNA, 20 nt, Artificial Sequence
  Guide RNA
ugcuggcaccagaaggaaug

SEQ ID NO: 4022 - RNA, 20 nt, Artificial Sequence
  Guide RNA
uggcaccagaaggaaugagg

SEQ ID NO: 4023 - RNA, 20 nt, Artificial Sequence
  Guide RNA
uuccuucuggugccagcauu

SEQ ID NO: 4024 - RNA, 21 nt, Artificial Sequence
  Guide RNA
aaaaaugcuggcaccagaagg

SEQ ID NO: 4025 - RNA, 21 nt, Artificial Sequence
  Guide RNA
aaaaugcuggcaccagaagga

SEQ ID NO: 4026 - RNA, 21 nt, Artificial Sequence
  Guide RNA
aaagggacucucaccucauuc

SEQ ID NO: 4027 - RNA, 21 nt, Artificial Sequence
  Guide RNA
aaaugcuggcaccagaaggaa

SEQ ID NO: 4028 - RNA, 21 nt, Artificial Sequence
  Guide RNA
aacagaaaaaugcuggcacca

SEQ ID NO: 4029 - RNA, 21 nt, Artificial Sequence
  Guide RNA
aaggaaugaggugagaguccc

SEQ ID NO: 4030 - RNA, 21 nt, Artificial Sequence
  Guide RNA
aagggacucucaccucauucc

SEQ ID NO: 4031 - RNA, 21 nt, Artificial Sequence
  Guide RNA
aaugcuggcaccagaaggaau

SEQ ID NO: 4032 - RNA, 21 nt, Artificial Sequence
  Guide RNA
acagaaaaaugcuggcaccag

SEQ ID NO: 4033 - RNA, 21 nt, Artificial Sequence
  Guide RNA
accagaaggaaugaggugaga

SEQ ID NO: 4034 - RNA, 21 nt, Artificial Sequence
  Guide RNA
accucauuccuucuggugcca

SEQ ID NO: 4035 - RNA, 21 nt, Artificial Sequence
  Guide RNA
acucucaccucauuccuucug

SEQ ID NO: 4036 - RNA, 21 nt, Artificial Sequence
  Guide RNA
agaaaaaugcuggcaccagaa

SEQ ID NO: 4037 - RNA, 21 nt, Artificial Sequence
  Guide RNA
agaaggaaugaggugagaguc

SEQ ID NO: 4038 - RNA, 21 nt, Artificial Sequence
  Guide RNA
aggaaugaggugagagucccu

SEQ ID NO: 4039 - RNA, 21 nt, Artificial Sequence
  Guide RNA
agggacucucaccucauuccu

SEQ ID NO: 4040 - RNA, 21 nt, Artificial Sequence
  Guide RNA
auaaagggacucucaccucau

SEQ ID NO: 4041 - RNA, 21 nt, Artificial Sequence
  Guide RNA
augcuggcaccagaaggaaug

SEQ ID NO: 4042 - RNA, 21 nt, Artificial Sequence
  Guide RNA
auuccuucuggugccagcauu

SEQ ID NO: 4043 - RNA, 21 nt, Artificial Sequence
  Guide RNA
caccagaaggaaugaggugag

SEQ ID NO: 4044 - RNA, 21 nt, Artificial Sequence
  Guide RNA
caccucauuccuucuggugcc

SEQ ID NO: 4045 - RNA, 21 nt, Artificial Sequence
  Guide RNA
cagaaaaaugcuggcaccaga

SEQ ID NO: 4046 - RNA, 21 nt, Artificial Sequence
  Guide RNA
cagaaggaaugaggugagagu

SEQ ID NO: 4047 - RNA, 21 nt, Artificial Sequence
  Guide RNA
cauaaagggacucucaccuca

SEQ ID NO: 4048 - RNA, 21 nt, Artificial Sequence
  Guide RNA
cauuccuucuggugccagcau

SEQ ID NO: 4049 - RNA, 21 nt, Artificial Sequence
  Guide RNA
ccagaaggaaugaggugagag

SEQ ID NO: 4050 - RNA, 21 nt, Artificial Sequence
  Guide RNA
ccucauuccuucuggugccag

SEQ ID NO: 4051 - RNA, 21 nt, Artificial Sequence
  Guide RNA
ccuucuggugccagcauuuuu

SEQ ID NO: 4052 - RNA, 21 nt, Artificial Sequence
  Guide RNA
cucaccucauuccuucuggug

SEQ ID NO: 4053 - RNA, 21 nt, Artificial Sequence
  Guide RNA
cucauuccuucuggugccagc

SEQ ID NO: 4054 - RNA, 21 nt, Artificial Sequence
  Guide RNA
cucucaccucauuccuucugg

SEQ ID NO: 4055 - RNA, 21 nt, Artificial Sequence
  Guide RNA
cuggcaccagaaggaaugagg

SEQ ID NO: 4056 - RNA, 21 nt, Artificial Sequence
  Guide RNA
gaaaaaugcuggcaccagaag

SEQ ID NO: 4057 - RNA, 21 nt, Artificial Sequence
  Guide RNA
gaaggaaugaggugagagucc

SEQ ID NO: 4058 - RNA, 21 nt, Artificial Sequence
  Guide RNA
gacucucaccucauuccuucu

SEQ ID NO: 4059 - RNA, 21 nt, Artificial Sequence
  Guide RNA
gcaccagaaggaaugagguga

SEQ ID NO: 4060 - RNA, 21 nt, Artificial Sequence
  Guide RNA
gcuggcaccagaaggaaugag

SEQ ID NO: 4061 - RNA, 21 nt, Artificial Sequence
  Guide RNA
ggacucucaccucauuccuuc

SEQ ID NO: 4062 - RNA, 21 nt, Artificial Sequence
  Guide RNA
ggcaccagaaggaaugaggug

SEQ ID NO: 4063 - RNA, 21 nt, Artificial Sequence
  Guide RNA
gggacucucaccucauuccuu

SEQ ID NO: 4064 - RNA, 21 nt, Artificial Sequence
  Guide RNA
uaaagggacucucaccucauu

SEQ ID NO: 4065 - RNA, 21 nt, Artificial Sequence
  Guide RNA
ucaccucauuccuucuggugc

SEQ ID NO: 4066 - RNA, 21 nt, Artificial Sequence
  Guide RNA
ucauuccuucuggugccagca

SEQ ID NO: 4067 - RNA, 21 nt, Artificial Sequence
  Guide RNA
uccuucuggugccagcauuuu

SEQ ID NO: 4068 - RNA, 21 nt, Artificial Sequence
  Guide RNA
ucucaccucauuccuucuggu

SEQ ID NO: 4069 - RNA, 21 nt, Artificial Sequence
  Guide RNA
ugcuggcaccagaaggaauga

SEQ ID NO: 4070 - RNA, 21 nt, Artificial Sequence
  Guide RNA
uggcaccagaaggaaugaggu

SEQ ID NO: 4071 - RNA, 21 nt, Artificial Sequence
  Guide RNA
uuccuucuggugccagcauuu

SEQ ID NO: 4072 - RNA, 22 nt, Artificial Sequence
  Guide RNA
aaaaaugcuggcaccagaagga

SEQ ID NO: 4073 - RNA, 22 nt, Artificial Sequence
  Guide RNA
aaaaugcuggcaccagaaggaa

SEQ ID NO: 4074 - RNA, 22 nt, Artificial Sequence
  Guide RNA
aaagggacucucaccucauucc

SEQ ID NO: 4075 - RNA, 22 nt, Artificial Sequence
  Guide RNA
aaaugcuggcaccagaaggaau

SEQ ID NO: 4076 - RNA, 22 nt, Artificial Sequence
  Guide RNA
aacagaaaaaugcuggcaccag

SEQ ID NO: 4077 - RNA, 22 nt, Artificial Sequence
  Guide RNA
aaggaaugaggugagagucccu

SEQ ID NO: 4078 - RNA, 22 nt, Artificial Sequence
  Guide RNA
aagggacucucaccucauuccu

SEQ ID NO: 4079 - RNA, 22 nt, Artificial Sequence
  Guide RNA
aaugcuggcaccagaaggaaug

SEQ ID NO: 4080 - RNA, 22 nt, Artificial Sequence
  Guide RNA
acagaaaaaugcuggcaccaga

SEQ ID NO: 4081 - RNA, 22 nt, Artificial Sequence
  Guide RNA
acauaaagggacucucaccuca

SEQ ID NO: 4082 - RNA, 22 nt, Artificial Sequence
  Guide RNA
accagaaggaaugaggugagag

SEQ ID NO: 4083 - RNA, 22 nt, Artificial Sequence
  Guide RNA
accucauuccuucuggugccag

SEQ ID NO: 4084 - RNA, 22 nt, Artificial Sequence
  Guide RNA
acucucaccucauuccuucugg

SEQ ID NO: 4085 - RNA, 22 nt, Artificial Sequence
  Guide RNA
agaaaaaugcuggcaccagaag

SEQ ID NO: 4086 - RNA, 22 nt, Artificial Sequence
  Guide RNA
agaaggaaugaggugagagucc

SEQ ID NO: 4087 - RNA, 22 nt, Artificial Sequence
  Guide RNA
aggaaugaggugagagucccuu

SEQ ID NO: 4088 - RNA, 22 nt, Artificial Sequence
  Guide RNA
agggacucucaccucauuccuu

SEQ ID NO: 4089 - RNA, 22 nt, Artificial Sequence
  Guide RNA
auaaagggacucucaccucauu

SEQ ID NO: 4090 - RNA, 22 nt, Artificial Sequence
  Guide RNA
augcuggcaccagaaggaauga

SEQ ID NO: 4091 - RNA, 22 nt, Artificial Sequence
  Guide RNA
auuccuucuggugccagcauuu

SEQ ID NO: 4092 - RNA, 22 nt, Artificial Sequence
  Guide RNA
caccagaaggaaugaggugaga

SEQ ID NO: 4093 - RNA, 22 nt, Artificial Sequence
  Guide RNA
caccucauuccuucuggugcca

SEQ ID NO: 4094 - RNA, 22 nt, Artificial Sequence
  Guide RNA
cagaaaaaugcuggcaccagaa

SEQ ID NO: 4095 - RNA, 22 nt, Artificial Sequence
  Guide RNA
cagaaggaaugaggugagaguc

SEQ ID NO: 4096 - RNA, 22 nt, Artificial Sequence
  Guide RNA
cauaaagggacucucaccucau

SEQ ID NO: 4097 - RNA, 22 nt, Artificial Sequence
  Guide RNA
cauuccuucuggugccagcauu

SEQ ID NO: 4098 - RNA, 22 nt, Artificial Sequence
  Guide RNA
ccagaaggaaugaggugagagu

SEQ ID NO: 4099 - RNA, 22 nt, Artificial Sequence
  Guide RNA
ccucauuccuucuggugccagc

SEQ ID NO: 4100 - RNA, 22 nt, Artificial Sequence
  Guide RNA
ccuucuggugccagcauuuuuc

SEQ ID NO: 4101 - RNA, 22 nt, Artificial Sequence
  Guide RNA
cucaccucauuccuucuggugc

SEQ ID NO: 4102 - RNA, 22 nt, Artificial Sequence
  Guide RNA
cucauuccuucuggugccagca

SEQ ID NO: 4103 - RNA, 22 nt, Artificial Sequence
  Guide RNA
cucucaccucauuccuucuggu

SEQ ID NO: 4104 - RNA, 22 nt, Artificial Sequence
  Guide RNA
cuggcaccagaaggaaugaggu

SEQ ID NO: 4105 - RNA, 22 nt, Artificial Sequence
  Guide RNA
gaaaaaugcuggcaccagaagg

SEQ ID NO: 4106 - RNA, 22 nt, Artificial Sequence
  Guide RNA
gaacagaaaaaugcuggcacca

SEQ ID NO: 4107 - RNA, 22 nt, Artificial Sequence
  Guide RNA
gaaggaaugaggugagaguccc

SEQ ID NO: 4108 - RNA, 22 nt, Artificial Sequence
  Guide RNA
gacucucaccucauuccuucug

SEQ ID NO: 4109 - RNA, 22 nt, Artificial Sequence
  Guide RNA
gcaccagaaggaaugaggugag

SEQ ID NO: 4110 - RNA, 22 nt, Artificial Sequence
  Guide RNA
gcuggcaccagaaggaaugagg

SEQ ID NO: 4111 - RNA, 22 nt, Artificial Sequence
  Guide RNA
ggacucucaccucauuccuucu

SEQ ID NO: 4112 - RNA, 22 nt, Artificial Sequence
  Guide RNA
ggcaccagaaggaaugagguga

SEQ ID NO: 4113 - RNA, 22 nt, Artificial Sequence
  Guide RNA
gggacucucaccucauuccuuc

SEQ ID NO: 4114 - RNA, 22 nt, Artificial Sequence
  Guide RNA
uaaagggacucucaccucauuc

SEQ ID NO: 4115 - RNA, 22 nt, Artificial Sequence
  Guide RNA
ucaccucauuccuucuggugcc

SEQ ID NO: 4116 - RNA, 22 nt, Artificial Sequence
  Guide RNA
ucauuccuucuggugccagcau

SEQ ID NO: 4117 - RNA, 22 nt, Artificial Sequence
  Guide RNA
uccuucuggugccagcauuuuu

SEQ ID NO: 4118 - RNA, 22 nt, Artificial Sequence
  Guide RNA
ucucaccucauuccuucuggug

SEQ ID NO: 4119 - RNA, 22 nt, Artificial Sequence
  Guide RNA
ugcuggcaccagaaggaaugag

SEQ ID NO: 4120 - RNA, 22 nt, Artificial Sequence
  Guide RNA
uggcaccagaaggaaugaggug

SEQ ID NO: 4121 - RNA, 22 nt, Artificial Sequence
  Guide RNA
uuccuucuggugccagcauuuu

SEQ ID NO: 4122 - RNA, 20 nt, Artificial Sequence
  Guide RNA
aaaaaugcugguaccagaac

SEQ ID NO: 4123 - RNA, 20 nt, Artificial Sequence
  Guide RNA
aaaaugcugguaccagaacg

SEQ ID NO: 4124 - RNA, 20 nt, Artificial Sequence
  Guide RNA
aaagaacagaaaaaugcugg

SEQ ID NO: 4125 - RNA, 20 nt, Artificial Sequence
  Guide RNA
aaaugcugguaccagaacga

SEQ ID NO: 4126 - RNA, 20 nt, Artificial Sequence
  Guide RNA
aacagaaaaaugcugguacc

SEQ ID NO: 4127 - RNA, 20 nt, Artificial Sequence
  Guide RNA
aagaacagaaaaaugcuggu

SEQ ID NO: 4128 - RNA, 20 nt, Artificial Sequence
  Guide RNA
aaugcugguaccagaacgaa

SEQ ID NO: 4129 - RNA, 20 nt, Artificial Sequence
  Guide RNA
acagaaaaaugcugguacca

SEQ ID NO: 4130 - RNA, 20 nt, Artificial Sequence
  Guide RNA
accucauucguucugguacc

SEQ ID NO: 4131 - RNA, 20 nt, Artificial Sequence
  Guide RNA
acucucaccucauucguucu

SEQ ID NO: 4132 - RNA, 20 nt, Artificial Sequence
  Guide RNA
agaaaaaugcugguaccaga

SEQ ID NO: 4133 - RNA, 20 nt, Artificial Sequence
  Guide RNA
agaacagaaaaaugcuggua

SEQ ID NO: 4134 - RNA, 20 nt, Artificial Sequence
  Guide RNA
augcugguaccagaacgaau

SEQ ID NO: 4135 - RNA, 20 nt, Artificial Sequence
  Guide RNA
auucguucugguaccagcau

SEQ ID NO: 4136 - RNA, 20 nt, Artificial Sequence
  Guide RNA
caccucauucguucugguac

SEQ ID NO: 4137 - RNA, 20 nt, Artificial Sequence
  Guide RNA
cagaaaaaugcugguaccag

SEQ ID NO: 4138 - RNA, 20 nt, Artificial Sequence
  Guide RNA
cauucguucugguaccagca

SEQ ID NO: 4139 - RNA, 20 nt, Artificial Sequence
  Guide RNA
ccucauucguucugguacca

SEQ ID NO: 4140 - RNA, 20 nt, Artificial Sequence
  Guide RNA
cguucugguaccagcauuuu

SEQ ID NO: 4141 - RNA, 20 nt, Artificial Sequence
  Guide RNA
cucaccucauucguucuggu

SEQ ID NO: 4142 - RNA, 20 nt, Artificial Sequence
  Guide RNA
cucauucguucugguaccag

SEQ ID NO: 4143 - RNA, 20 nt, Artificial Sequence
  Guide RNA
cucucaccucauucguucug

SEQ ID NO: 4144 - RNA, 20 nt, Artificial Sequence
  Guide RNA
cugguaccagaacgaaugag

SEQ ID NO: 4145 - RNA, 20 nt, Artificial Sequence
  Guide RNA
cugguaccagcauuuuucug

SEQ ID NO: 4146 - RNA, 20 nt, Artificial Sequence
  Guide RNA
gaaaaaugcugguaccagaa

SEQ ID NO: 4147 - RNA, 20 nt, Artificial Sequence
  Guide RNA
gaaagaacagaaaaaugcug

SEQ ID NO: 4148 - RNA, 20 nt, Artificial Sequence
  Guide RNA
gaacagaaaaaugcugguac

SEQ ID NO: 4149 - RNA, 20 nt, Artificial Sequence
  Guide RNA
gcugguaccagaacgaauga

SEQ ID NO: 4150 - RNA, 20 nt, Artificial Sequence
  Guide RNA
gguaccagaacgaaugaggu

SEQ ID NO: 4151 - RNA, 20 nt, Artificial Sequence
  Guide RNA
gguaccagcauuuuucuguu

SEQ ID NO: 4152 - RNA, 20 nt, Artificial Sequence
  Guide RNA
guaccagaacgaaugaggug

SEQ ID NO: 4153 - RNA, 20 nt, Artificial Sequence
  Guide RNA
guaccagcauuuuucuguuc

SEQ ID NO: 4154 - RNA, 20 nt, Artificial Sequence
  Guide RNA
guucugguaccagcauuuuu

SEQ ID NO: 4155 - RNA, 20 nt, Artificial Sequence
  Guide RNA
uaccagcauuuuucuguucu

SEQ ID NO: 4156 - RNA, 20 nt, Artificial Sequence
  Guide RNA
ucaccucauucguucuggua

SEQ ID NO: 4157 - RNA, 20 nt, Artificial Sequence
  Guide RNA
ucauucguucugguaccagc

SEQ ID NO: 4158 - RNA, 20 nt, Artificial Sequence
  Guide RNA
ucguucugguaccagcauuu

SEQ ID NO: 4159 - RNA, 20 nt, Artificial Sequence
  Guide RNA
ucucaccucauucguucugg

SEQ ID NO: 4160 - RNA, 20 nt, Artificial Sequence
  Guide RNA
ucugguaccagcauuuuucu

SEQ ID NO: 4161 - RNA, 20 nt, Artificial Sequence
  Guide RNA
ugaaagaacagaaaaaugcu

SEQ ID NO: 4162 - RNA, 20 nt, Artificial Sequence
  Guide RNA
ugcugguaccagaacgaaug

SEQ ID NO: 4163 - RNA, 20 nt, Artificial Sequence
  Guide RNA
ugguaccagaacgaaugagg

SEQ ID NO: 4164 - RNA, 20 nt, Artificial Sequence
  Guide RNA
ugguaccagcauuuuucugu

SEQ ID NO: 4165 - RNA, 20 nt, Artificial Sequence
  Guide RNA
uucguucugguaccagcauu

SEQ ID NO: 4166 - RNA, 20 nt, Artificial Sequence
  Guide RNA
uucugguaccagcauuuuuc

SEQ ID NO: 4167 - RNA, 20 nt, Artificial Sequence
  Guide RNA
uugaaagaacagaaaaaugc

SEQ ID NO: 4168 - RNA, 21 nt, Artificial Sequence
  Guide RNA
aaaaaugcugguaccagaacg

SEQ ID NO: 4169 - RNA, 21 nt, Artificial Sequence
  Guide RNA
aaaaugcugguaccagaacga

SEQ ID NO: 4170 - RNA, 21 nt, Artificial Sequence
  Guide RNA
aaagaacagaaaaaugcuggu

SEQ ID NO: 4171 - RNA, 21 nt, Artificial Sequence
  Guide RNA
aaaugcugguaccagaacgaa

SEQ ID NO: 4172 - RNA, 21 nt, Artificial Sequence
  Guide RNA
aacagaaaaaugcugguacca

SEQ ID NO: 4173 - RNA, 21 nt, Artificial Sequence
  Guide RNA
aagaacagaaaaaugcuggua

SEQ ID NO: 4174 - RNA, 21 nt, Artificial Sequence
  Guide RNA
aaugcugguaccagaacgaau

SEQ ID NO: 4175 - RNA, 21 nt, Artificial Sequence
  Guide RNA
acagaaaaaugcugguaccag

SEQ ID NO: 4176 - RNA, 21 nt, Artificial Sequence
  Guide RNA
accucauucguucugguacca

SEQ ID NO: 4177 - RNA, 21 nt, Artificial Sequence
  Guide RNA
acucucaccucauucguucug

SEQ ID NO: 4178 - RNA, 21 nt, Artificial Sequence
  Guide RNA
agaaaaaugcugguaccagaa

SEQ ID NO: 4179 - RNA, 21 nt, Artificial Sequence
  Guide RNA
agaacagaaaaaugcugguac

SEQ ID NO: 4180 - RNA, 21 nt, Artificial Sequence
  Guide RNA
augcugguaccagaacgaaug

SEQ ID NO: 4181 - RNA, 21 nt, Artificial Sequence
  Guide RNA
auucguucugguaccagcauu

SEQ ID NO: 4182 - RNA, 21 nt, Artificial Sequence
  Guide RNA
caccucauucguucugguacc

SEQ ID NO: 4183 - RNA, 21 nt, Artificial Sequence
  Guide RNA
cagaaaaaugcugguaccaga

SEQ ID NO: 4184 - RNA, 21 nt, Artificial Sequence
  Guide RNA
cauucguucugguaccagcau

SEQ ID NO: 4185 - RNA, 21 nt, Artificial Sequence
  Guide RNA
ccucauucguucugguaccag

SEQ ID NO: 4186 - RNA, 21 nt, Artificial Sequence
  Guide RNA
cguucugguaccagcauuuuu

SEQ ID NO: 4187 - RNA, 21 nt, Artificial Sequence
  Guide RNA
cucaccucauucguucuggua

SEQ ID NO: 4188 - RNA, 21 nt, Artificial Sequence
  Guide RNA
cucauucguucugguaccagc

SEQ ID NO: 4189 - RNA, 21 nt, Artificial Sequence
  Guide RNA
cucucaccucauucguucugg

SEQ ID NO: 4190 - RNA, 21 nt, Artificial Sequence
  Guide RNA
cugguaccagaacgaaugagg

SEQ ID NO: 4191 - RNA, 21 nt, Artificial Sequence
  Guide RNA
cugguaccagcauuuuucugu

SEQ ID NO: 4192 - RNA, 21 nt, Artificial Sequence
  Guide RNA
gaaaaaugcugguaccagaac

SEQ ID NO: 4193 - RNA, 21 nt, Artificial Sequence
  Guide RNA
gaaagaacagaaaaaugcugg

SEQ ID NO: 4194 - RNA, 21 nt, Artificial Sequence
  Guide RNA
gaacagaaaaaugcugguacc

SEQ ID NO: 4195 - RNA, 21 nt, Artificial Sequence
  Guide RNA
gacucucaccucauucguucu

SEQ ID NO: 4196 - RNA, 21 nt, Artificial Sequence
  Guide RNA
gcugguaccagaacgaaugag

SEQ ID NO: 4197 - RNA, 21 nt, Artificial Sequence
  Guide RNA
gguaccagaacgaaugaggug

SEQ ID NO: 4198 - RNA, 21 nt, Artificial Sequence
  Guide RNA
gguaccagcauuuuucuguuc

SEQ ID NO: 4199 - RNA, 21 nt, Artificial Sequence
  Guide RNA
guaccagaacgaaugagguga

SEQ ID NO: 4200 - RNA, 21 nt, Artificial Sequence
  Guide RNA
guaccagcauuuuucuguucu

SEQ ID NO: 4201 - RNA, 21 nt, Artificial Sequence
  Guide RNA
guucugguaccagcauuuuuc

SEQ ID NO: 4202 - RNA, 21 nt, Artificial Sequence
  Guide RNA
uaccagcauuuuucuguucuu

SEQ ID NO: 4203 - RNA, 21 nt, Artificial Sequence
  Guide RNA
ucaccucauucguucugguac

SEQ ID NO: 4204 - RNA, 21 nt, Artificial Sequence
  Guide RNA
ucauucguucugguaccagca

SEQ ID NO: 4205 - RNA, 21 nt, Artificial Sequence
  Guide RNA
ucguucugguaccagcauuuu

SEQ ID NO: 4206 - RNA, 21 nt, Artificial Sequence
  Guide RNA
ucucaccucauucguucuggu

SEQ ID NO: 4207 - RNA, 21 nt, Artificial Sequence
  Guide RNA
ucugguaccagcauuuuucug

SEQ ID NO: 4208 - RNA, 21 nt, Artificial Sequence
  Guide RNA
ugaaagaacagaaaaaugcug

SEQ ID NO: 4209 - RNA, 21 nt, Artificial Sequence
  Guide RNA
ugcugguaccagaacgaauga

SEQ ID NO: 4210 - RNA, 21 nt, Artificial Sequence
  Guide RNA
ugguaccagaacgaaugaggu

SEQ ID NO: 4211 - RNA, 21 nt, Artificial Sequence
  Guide RNA
ugguaccagcauuuuucuguu

SEQ ID NO: 4212 - RNA, 21 nt, Artificial Sequence
  Guide RNA
uucguucugguaccagcauuu

SEQ ID NO: 4213 - RNA, 21 nt, Artificial Sequence
  Guide RNA
uucugguaccagcauuuuucu

SEQ ID NO: 4214 - RNA, 22 nt, Artificial Sequence
  Guide RNA
aaaaaugcugguaccagaacga

SEQ ID NO: 4215 - RNA, 22 nt, Artificial Sequence
  Guide RNA
aaaaugcugguaccagaacgaa

SEQ ID NO: 4216 - RNA, 22 nt, Artificial Sequence
  Guide RNA
aaagaacagaaaaaugcuggua

SEQ ID NO: 4217 - RNA, 22 nt, Artificial Sequence
  Guide RNA
aaaugcugguaccagaacgaau

SEQ ID NO: 4218 - RNA, 22 nt, Artificial Sequence
  Guide RNA
aacagaaaaaugcugguaccag

SEQ ID NO: 4219 - RNA, 22 nt, Artificial Sequence
  Guide RNA
aagaacagaaaaaugcugguac

SEQ ID NO: 4220 - RNA, 22 nt, Artificial Sequence
  Guide RNA
aaugcugguaccagaacgaaug

SEQ ID NO: 4221 - RNA, 22 nt, Artificial Sequence
  Guide RNA
acagaaaaaugcugguaccaga

SEQ ID NO: 4222 - RNA, 22 nt, Artificial Sequence
  Guide RNA
accucauucguucugguaccag

SEQ ID NO: 4223 - RNA, 22 nt, Artificial Sequence
  Guide RNA
acucucaccucauucguucugg

SEQ ID NO: 4224 - RNA, 22 nt, Artificial Sequence
  Guide RNA
agaaaaaugcugguaccagaac

SEQ ID NO: 4225 - RNA, 22 nt, Artificial Sequence
  Guide RNA
agaacagaaaaaugcugguacc

SEQ ID NO: 4226 - RNA, 22 nt, Artificial Sequence
  Guide RNA
augcugguaccagaacgaauga

SEQ ID NO: 4227 - RNA, 22 nt, Artificial Sequence
  Guide RNA
auucguucugguaccagcauuu

SEQ ID NO: 4228 - RNA, 22 nt, Artificial Sequence
  Guide RNA
caccucauucguucugguacca

SEQ ID NO: 4229 - RNA, 22 nt, Artificial Sequence
  Guide RNA
cagaaaaaugcugguaccagaa

SEQ ID NO: 4230 - RNA, 22 nt, Artificial Sequence
  Guide RNA
cauucguucugguaccagcauu

SEQ ID NO: 4231 - RNA, 22 nt, Artificial Sequence
  Guide RNA
ccucauucguucugguaccagc

SEQ ID NO: 4232 - RNA, 22 nt, Artificial Sequence
  Guide RNA
cguucugguaccagcauuuuuc

SEQ ID NO: 4233 - RNA, 22 nt, Artificial Sequence
  Guide RNA
cucaccucauucguucugguac

SEQ ID NO: 4234 - RNA, 22 nt, Artificial Sequence
  Guide RNA
cucauucguucugguaccagca

SEQ ID NO: 4235 - RNA, 22 nt, Artificial Sequence
  Guide RNA
cucucaccucauucguucuggu

SEQ ID NO: 4236 - RNA, 22 nt, Artificial Sequence
  Guide RNA
cugguaccagaacgaaugaggu

SEQ ID NO: 4237 - RNA, 22 nt, Artificial Sequence
  Guide RNA
cugguaccagcauuuuucuguu

SEQ ID NO: 4238 - RNA, 22 nt, Artificial Sequence
  Guide RNA
gaaaaaugcugguaccagaacg

SEQ ID NO: 4239 - RNA, 22 nt, Artificial Sequence
  Guide RNA
gaaagaacagaaaaaugcuggu

SEQ ID NO: 4240 - RNA, 22 nt, Artificial Sequence
  Guide RNA
gaacagaaaaaugcugguacca

SEQ ID NO: 4241 - RNA, 22 nt, Artificial Sequence
  Guide RNA
gacucucaccucauucguucug

SEQ ID NO: 4242 - RNA, 22 nt, Artificial Sequence
  Guide RNA
gcugguaccagaacgaaugagg

SEQ ID NO: 4243 - RNA, 22 nt, Artificial Sequence
  Guide RNA
ggacucucaccucauucguucu

SEQ ID NO: 4244 - RNA, 22 nt, Artificial Sequence
  Guide RNA
gguaccagaacgaaugagguga

SEQ ID NO: 4245 - RNA, 22 nt, Artificial Sequence
  Guide RNA
gguaccagcauuuuucuguucu

SEQ ID NO: 4246 - RNA, 22 nt, Artificial Sequence
  Guide RNA
guaccagaacgaaugaggugag

SEQ ID NO: 4247 - RNA, 22 nt, Artificial Sequence
  Guide RNA
guaccagcauuuuucuguucuu

SEQ ID NO: 4248 - RNA, 22 nt, Artificial Sequence
  Guide RNA
guucugguaccagcauuuuucu

SEQ ID NO: 4249 - RNA, 22 nt, Artificial Sequence
  Guide RNA
uaccagcauuuuucuguucuuu

SEQ ID NO: 4250 - RNA, 22 nt, Artificial Sequence
  Guide RNA
ucaccucauucguucugguacc

SEQ ID NO: 4251 - RNA, 22 nt, Artificial Sequence
  Guide RNA
ucauucguucugguaccagcau

SEQ ID NO: 4252 - RNA, 22 nt, Artificial Sequence
  Guide RNA
ucguucugguaccagcauuuuu

SEQ ID NO: 4253 - RNA, 22 nt, Artificial Sequence
  Guide RNA
ucucaccucauucguucuggua

SEQ ID NO: 4254 - RNA, 22 nt, Artificial Sequence
  Guide RNA
ucugguaccagcauuuuucugu

SEQ ID NO: 4255 - RNA, 22 nt, Artificial Sequence
  Guide RNA
ugaaagaacagaaaaaugcugg

SEQ ID NO: 4256 - RNA, 22 nt, Artificial Sequence
  Guide RNA
ugcugguaccagaacgaaugag

SEQ ID NO: 4257 - RNA, 22 nt, Artificial Sequence
  Guide RNA
ugguaccagaacgaaugaggug

SEQ ID NO: 4258 - RNA, 22 nt, Artificial Sequence
  Guide RNA
ugguaccagcauuuuucuguuc

SEQ ID NO: 4259 - RNA, 22 nt, Artificial Sequence
  Guide RNA
uucguucugguaccagcauuuu

SEQ ID NO: 4260 - RNA, 22 nt, Artificial Sequence
  Guide RNA
uucugguaccagcauuuuucug

SEQ ID NO: 4261 - RNA, 22 nt, Artificial Sequence
  Guide RNA
uugaaagaacagaaaaaugcug

SEQ ID NO: 4262 - RNA, 20 nt, Artificial Sequence
  Guide RNA
aaaaaugcugggaccagaac

SEQ ID NO: 4263 - RNA, 20 nt, Artificial Sequence
  Guide RNA
aaaaugcugggaccagaacg

SEQ ID NO: 4264 - RNA, 20 nt, Artificial Sequence
  Guide RNA
aaaugcugggaccagaacga

SEQ ID NO: 4265 - RNA, 20 nt, Artificial Sequence
  Guide RNA
aacagaaaaaugcugggacc

SEQ ID NO: 4266 - RNA, 20 nt, Artificial Sequence
  Guide RNA
aagaacagaaaaaugcuggg

SEQ ID NO: 4267 - RNA, 20 nt, Artificial Sequence
  Guide RNA
aaugcugggaccagaacgaa

SEQ ID NO: 4268 - RNA, 20 nt, Artificial Sequence
  Guide RNA
acagaaaaaugcugggacca

SEQ ID NO: 4269 - RNA, 20 nt, Artificial Sequence
  Guide RNA
accucauucguucugguccc

SEQ ID NO: 4270 - RNA, 20 nt, Artificial Sequence
  Guide RNA
agaaaaaugcugggaccaga

SEQ ID NO: 4271 - RNA, 20 nt, Artificial Sequence
  Guide RNA
agaacagaaaaaugcuggga

SEQ ID NO: 4272 - RNA, 20 nt, Artificial Sequence
  Guide RNA
augcugggaccagaacgaau

SEQ ID NO: 4273 - RNA, 20 nt, Artificial Sequence
  Guide RNA
auucguucuggucccagcau

SEQ ID NO: 4274 - RNA, 20 nt, Artificial Sequence
  Guide RNA
caccucauucguucuggucc

SEQ ID NO: 4275 - RNA, 20 nt, Artificial Sequence
  Guide RNA
cagaaaaaugcugggaccag

SEQ ID NO: 4276 - RNA, 20 nt, Artificial Sequence
  Guide RNA
cauucguucuggucccagca

SEQ ID NO: 4277 - RNA, 20 nt, Artificial Sequence
  Guide RNA
ccucauucguucugguccca

SEQ ID NO: 4278 - RNA, 20 nt, Artificial Sequence
  Guide RNA
cguucuggucccagcauuuu

SEQ ID NO: 4279 - RNA, 20 nt, Artificial Sequence
  Guide RNA
cucauucguucuggucccag

SEQ ID NO: 4280 - RNA, 20 nt, Artificial Sequence
  Guide RNA
cugggaccagaacgaaugag

SEQ ID NO: 4281 - RNA, 20 nt, Artificial Sequence
  Guide RNA
cuggucccagcauuuuucug

SEQ ID NO: 4282 - RNA, 20 nt, Artificial Sequence
  Guide RNA
gaaaaaugcugggaccagaa

SEQ ID NO: 4283 - RNA, 20 nt, Artificial Sequence
  Guide RNA
gaacagaaaaaugcugggac

SEQ ID NO: 4284 - RNA, 20 nt, Artificial Sequence
  Guide RNA
gcugggaccagaacgaauga

SEQ ID NO: 4285 - RNA, 20 nt, Artificial Sequence
  Guide RNA
ggaccagaacgaaugaggug

SEQ ID NO: 4286 - RNA, 20 nt, Artificial Sequence
  Guide RNA
gggaccagaacgaaugaggu

SEQ ID NO: 4287 - RNA, 20 nt, Artificial Sequence
  Guide RNA
ggucccagcauuuuucuguu

SEQ ID NO: 4288 - RNA, 20 nt, Artificial Sequence
  Guide RNA
gucccagcauuuuucuguuc

SEQ ID NO: 4289 - RNA, 20 nt, Artificial Sequence
  Guide RNA
guucuggucccagcauuuuu

SEQ ID NO: 4290 - RNA, 20 nt, Artificial Sequence
  Guide RNA
ucaccucauucguucugguc

SEQ ID NO: 4291 - RNA, 20 nt, Artificial Sequence
  Guide RNA
ucauucguucuggucccagc

SEQ ID NO: 4292 - RNA, 20 nt, Artificial Sequence
  Guide RNA
ucccagcauuuuucuguucu

SEQ ID NO: 4293 - RNA, 20 nt, Artificial Sequence
  Guide RNA
ucguucuggucccagcauuu

SEQ ID NO: 4294 - RNA, 20 nt, Artificial Sequence
  Guide RNA
ucuggucccagcauuuuucu

SEQ ID NO: 4295 - RNA, 20 nt, Artificial Sequence
  Guide RNA
ugcugggaccagaacgaaug

SEQ ID NO: 4296 - RNA, 20 nt, Artificial Sequence
  Guide RNA
ugggaccagaacgaaugagg

SEQ ID NO: 4297 - RNA, 20 nt, Artificial Sequence
  Guide RNA
uggucccagcauuuuucugu

SEQ ID NO: 4298 - RNA, 20 nt, Artificial Sequence
  Guide RNA
uucguucuggucccagcauu

SEQ ID NO: 4299 - RNA, 20 nt, Artificial Sequence
  Guide RNA
uucuggucccagcauuuuuc

SEQ ID NO: 4300 - RNA, 21 nt, Artificial Sequence
  Guide RNA
aaaaaugcugggaccagaacg

SEQ ID NO: 4301 - RNA, 21 nt, Artificial Sequence
  Guide RNA
aaaaugcugggaccagaacga

SEQ ID NO: 4302 - RNA, 21 nt, Artificial Sequence
  Guide RNA
aaagaacagaaaaaugcuggg

SEQ ID NO: 4303 - RNA, 21 nt, Artificial Sequence
  Guide RNA
aaaugcugggaccagaacgaa

SEQ ID NO: 4304 - RNA, 21 nt, Artificial Sequence
  Guide RNA
aacagaaaaaugcugggacca

SEQ ID NO: 4305 - RNA, 21 nt, Artificial Sequence
  Guide RNA
aagaacagaaaaaugcuggga

SEQ ID NO: 4306 - RNA, 21 nt, Artificial Sequence
  Guide RNA
aaugcugggaccagaacgaau

SEQ ID NO: 4307 - RNA, 21 nt, Artificial Sequence
  Guide RNA
acagaaaaaugcugggaccag

SEQ ID NO: 4308 - RNA, 21 nt, Artificial Sequence
  Guide RNA
accucauucguucugguccca

SEQ ID NO: 4309 - RNA, 21 nt, Artificial Sequence
  Guide RNA
agaaaaaugcugggaccagaa

SEQ ID NO: 4310 - RNA, 21 nt, Artificial Sequence
  Guide RNA
agaacagaaaaaugcugggac

SEQ ID NO: 4311 - RNA, 21 nt, Artificial Sequence
  Guide RNA
augcugggaccagaacgaaug

SEQ ID NO: 4312 - RNA, 21 nt, Artificial Sequence
  Guide RNA
auucguucuggucccagcauu

SEQ ID NO: 4313 - RNA, 21 nt, Artificial Sequence
  Guide RNA
caccucauucguucugguccc

SEQ ID NO: 4314 - RNA, 21 nt, Artificial Sequence
  Guide RNA
cagaaaaaugcugggaccaga

SEQ ID NO: 4315 - RNA, 21 nt, Artificial Sequence
  Guide RNA
cauucguucuggucccagcau

SEQ ID NO: 4316 - RNA, 21 nt, Artificial Sequence
  Guide RNA
ccucauucguucuggucccag

SEQ ID NO: 4317 - RNA, 21 nt, Artificial Sequence
  Guide RNA
cguucuggucccagcauuuuu

SEQ ID NO: 4318 - RNA, 21 nt, Artificial Sequence
  Guide RNA
cucaccucauucguucugguc

SEQ ID NO: 4319 - RNA, 21 nt, Artificial Sequence
  Guide RNA
cucauucguucuggucccagc

SEQ ID NO: 4320 - RNA, 21 nt, Artificial Sequence
  Guide RNA
cugggaccagaacgaaugagg

SEQ ID NO: 4321 - RNA, 21 nt, Artificial Sequence
  Guide RNA
cuggucccagcauuuuucugu

SEQ ID NO: 4322 - RNA, 21 nt, Artificial Sequence
  Guide RNA
gaaaaaugcugggaccagaac

SEQ ID NO: 4323 - RNA, 21 nt, Artificial Sequence
  Guide RNA
gaacagaaaaaugcugggacc

SEQ ID NO: 4324 - RNA, 21 nt, Artificial Sequence
  Guide RNA
gcugggaccagaacgaaugag

SEQ ID NO: 4325 - RNA, 21 nt, Artificial Sequence
  Guide RNA
ggaccagaacgaaugagguga

SEQ ID NO: 4326 - RNA, 21 nt, Artificial Sequence
  Guide RNA
gggaccagaacgaaugaggug

SEQ ID NO: 4327 - RNA, 21 nt, Artificial Sequence
  Guide RNA
ggucccagcauuuuucuguuc

SEQ ID NO: 4328 - RNA, 21 nt, Artificial Sequence
  Guide RNA
gucccagcauuuuucuguucu

SEQ ID NO: 4329 - RNA, 21 nt, Artificial Sequence
  Guide RNA
guucuggucccagcauuuuuc

SEQ ID NO: 4330 - RNA, 21 nt, Artificial Sequence
  Guide RNA
ucaccucauucguucuggucc

SEQ ID NO: 4331 - RNA, 21 nt, Artificial Sequence
  Guide RNA
ucauucguucuggucccagca

SEQ ID NO: 4332 - RNA, 21 nt, Artificial Sequence
  Guide RNA
ucccagcauuuuucuguucuu

SEQ ID NO: 4333 - RNA, 21 nt, Artificial Sequence
  Guide RNA
ucguucuggucccagcauuuu

SEQ ID NO: 4334 - RNA, 21 nt, Artificial Sequence
  Guide RNA
ucuggucccagcauuuuucug

SEQ ID NO: 4335 - RNA, 21 nt, Artificial Sequence
  Guide RNA
ugcugggaccagaacgaauga

SEQ ID NO: 4336 - RNA, 21 nt, Artificial Sequence
  Guide RNA
ugggaccagaacgaaugaggu

SEQ ID NO: 4337 - RNA, 21 nt, Artificial Sequence
  Guide RNA
uggucccagcauuuuucuguu

SEQ ID NO: 4338 - RNA, 21 nt, Artificial Sequence
  Guide RNA
uucguucuggucccagcauuu

SEQ ID NO: 4339 - RNA, 21 nt, Artificial Sequence
  Guide RNA
uucuggucccagcauuuuucu

SEQ ID NO: 4340 - RNA, 22 nt, Artificial Sequence
  Guide RNA
aaaaaugcugggaccagaacga

SEQ ID NO: 4341 - RNA, 22 nt, Artificial Sequence
  Guide RNA
aaaaugcugggaccagaacgaa

SEQ ID NO: 4342 - RNA, 22 nt, Artificial Sequence
  Guide RNA
aaagaacagaaaaaugcuggga

SEQ ID NO: 4343 - RNA, 22 nt, Artificial Sequence
  Guide RNA
aaaugcugggaccagaacgaau

SEQ ID NO: 4344 - RNA, 22 nt, Artificial Sequence
  Guide RNA
aacagaaaaaugcugggaccag

SEQ ID NO: 4345 - RNA, 22 nt, Artificial Sequence
  Guide RNA
aagaacagaaaaaugcugggac

SEQ ID NO: 4346 - RNA, 22 nt, Artificial Sequence
  Guide RNA
aaugcugggaccagaacgaaug

SEQ ID NO: 4347 - RNA, 22 nt, Artificial Sequence
  Guide RNA
acagaaaaaugcugggaccaga

SEQ ID NO: 4348 - RNA, 22 nt, Artificial Sequence
  Guide RNA
accucauucguucuggucccag

SEQ ID NO: 4349 - RNA, 22 nt, Artificial Sequence
  Guide RNA
agaaaaaugcugggaccagaac

SEQ ID NO: 4350 - RNA, 22 nt, Artificial Sequence
  Guide RNA
agaacagaaaaaugcugggacc

SEQ ID NO: 4351 - RNA, 22 nt, Artificial Sequence
  Guide RNA
augcugggaccagaacgaauga

SEQ ID NO: 4352 - RNA, 22 nt, Artificial Sequence
  Guide RNA
auucguucuggucccagcauuu

SEQ ID NO: 4353 - RNA, 22 nt, Artificial Sequence
  Guide RNA
caccucauucguucugguccca

SEQ ID NO: 4354 - RNA, 22 nt, Artificial Sequence
  Guide RNA
cagaaaaaugcugggaccagaa

SEQ ID NO: 4355 - RNA, 22 nt, Artificial Sequence
  Guide RNA
cauucguucuggucccagcauu

SEQ ID NO: 4356 - RNA, 22 nt, Artificial Sequence
  Guide RNA
ccucauucguucuggucccagc

SEQ ID NO: 4357 - RNA, 22 nt, Artificial Sequence
  Guide RNA
cguucuggucccagcauuuuuc

SEQ ID NO: 4358 - RNA, 22 nt, Artificial Sequence
  Guide RNA
cucaccucauucguucuggucc

SEQ ID NO: 4359 - RNA, 22 nt, Artificial Sequence
  Guide RNA
cucauucguucuggucccagca

SEQ ID NO: 4360 - RNA, 22 nt, Artificial Sequence
  Guide RNA
cugggaccagaacgaaugaggu

SEQ ID NO: 4361 - RNA, 22 nt, Artificial Sequence
  Guide RNA
cuggucccagcauuuuucuguu

SEQ ID NO: 4362 - RNA, 22 nt, Artificial Sequence
  Guide RNA
gaaaaaugcugggaccagaacg

SEQ ID NO: 4363 - RNA, 22 nt, Artificial Sequence
  Guide RNA
gaaagaacagaaaaaugcuggg

SEQ ID NO: 4364 - RNA, 22 nt, Artificial Sequence
  Guide RNA
gaacagaaaaaugcugggacca

SEQ ID NO: 4365 - RNA, 22 nt, Artificial Sequence
  Guide RNA
gcugggaccagaacgaaugagg

SEQ ID NO: 4366 - RNA, 22 nt, Artificial Sequence
  Guide RNA
ggaccagaacgaaugaggugag

SEQ ID NO: 4367 - RNA, 22 nt, Artificial Sequence
  Guide RNA
gggaccagaacgaaugagguga

SEQ ID NO: 4368 - RNA, 22 nt, Artificial Sequence
  Guide RNA
ggucccagcauuuuucuguucu

SEQ ID NO: 4369 - RNA, 22 nt, Artificial Sequence
  Guide RNA
gucccagcauuuuucuguucuu

SEQ ID NO: 4370 - RNA, 22 nt, Artificial Sequence
  Guide RNA
guucuggucccagcauuuuucu

SEQ ID NO: 4371 - RNA, 22 nt, Artificial Sequence
  Guide RNA
ucaccucauucguucugguccc

SEQ ID NO: 4372 - RNA, 22 nt, Artificial Sequence
  Guide RNA
ucauucguucuggucccagcau

SEQ ID NO: 4373 - RNA, 22 nt, Artificial Sequence
  Guide RNA
ucccagcauuuuucuguucuuu

SEQ ID NO: 4374 - RNA, 22 nt, Artificial Sequence
  Guide RNA
ucguucuggucccagcauuuuu

SEQ ID NO: 4375 - RNA, 22 nt, Artificial Sequence
  Guide RNA
ucucaccucauucguucugguc

SEQ ID NO: 4376 - RNA, 22 nt, Artificial Sequence
  Guide RNA
ucuggucccagcauuuuucugu

SEQ ID NO: 4377 - RNA, 22 nt, Artificial Sequence
  Guide RNA
ugcugggaccagaacgaaugag

SEQ ID NO: 4378 - RNA, 22 nt, Artificial Sequence
  Guide RNA
ugggaccagaacgaaugaggug

SEQ ID NO: 4379 - RNA, 22 nt, Artificial Sequence
  Guide RNA
uggucccagcauuuuucuguuc

SEQ ID NO: 4380 - RNA, 22 nt, Artificial Sequence
  Guide RNA
uucguucuggucccagcauuuu

SEQ ID NO: 4381 - RNA, 22 nt, Artificial Sequence
  Guide RNA
uucuggucccagcauuuuucug

SEQ ID NO: 4382 - RNA, 20 nt, Artificial Sequence
  Guide RNA
acagcaauugaaagaacaga

SEQ ID NO: 4383 - RNA, 20 nt, Artificial Sequence
  Guide RNA
cuguucuuucaauugcugua

SEQ ID NO: 4384 - RNA, 20 nt, Artificial Sequence
  Guide RNA
cuuucaauugcuguaaaaca

SEQ ID NO: 4385 - RNA, 20 nt, Artificial Sequence
  Guide RNA
guucuuucaauugcuguaaa

SEQ ID NO: 4386 - RNA, 20 nt, Artificial Sequence
  Guide RNA
guuuuacagcaauugaaaga

SEQ ID NO: 4387 - RNA, 20 nt, Artificial Sequence
  Guide RNA
uacagcaauugaaagaacag

SEQ ID NO: 4388 - RNA, 20 nt, Artificial Sequence
  Guide RNA
ucuguucuuucaauugcugu

SEQ ID NO: 4389 - RNA, 20 nt, Artificial Sequence
  Guide RNA
ucuuucaauugcuguaaaac

SEQ ID NO: 4390 - RNA, 20 nt, Artificial Sequence
  Guide RNA
uguucuuucaauugcuguaa

SEQ ID NO: 4391 - RNA, 20 nt, Artificial Sequence
  Guide RNA
uguuuuacagcaauugaaag

SEQ ID NO: 4392 - RNA, 20 nt, Artificial Sequence
  Guide RNA
uuacagcaauugaaagaaca

SEQ ID NO: 4393 - RNA, 20 nt, Artificial Sequence
  Guide RNA
uucuguucuuucaauugcug

SEQ ID NO: 4394 - RNA, 20 nt, Artificial Sequence
  Guide RNA
uuuacagcaauugaaagaac

SEQ ID NO: 4395 - RNA, 20 nt, Artificial Sequence
  Guide RNA
uuucuguucuuucaauugcu

SEQ ID NO: 4396 - RNA, 20 nt, Artificial Sequence
  Guide RNA
uuuucuguucuuucaauugc

SEQ ID NO: 4397 - RNA, 21 nt, Artificial Sequence
  Guide RNA
acagcaauugaaagaacagaa

SEQ ID NO: 4398 - RNA, 21 nt, Artificial Sequence
  Guide RNA
cuguucuuucaauugcuguaa

SEQ ID NO: 4399 - RNA, 21 nt, Artificial Sequence
  Guide RNA
uacagcaauugaaagaacaga

SEQ ID NO: 4400 - RNA, 21 nt, Artificial Sequence
  Guide RNA
ucuguucuuucaauugcugua

SEQ ID NO: 4401 - RNA, 21 nt, Artificial Sequence
  Guide RNA
uuacagcaauugaaagaacag

SEQ ID NO: 4402 - RNA, 21 nt, Artificial Sequence
  Guide RNA
uucuguucuuucaauugcugu

SEQ ID NO: 4403 - RNA, 21 nt, Artificial Sequence
  Guide RNA
uuucuguucuuucaauugcug

SEQ ID NO: 4404 - RNA, 22 nt, Artificial Sequence
  Guide RNA
acagcaauugaaagaacagaaa

SEQ ID NO: 4405 - RNA, 22 nt, Artificial Sequence
  Guide RNA
cuguucuuucaauugcuguaaa

SEQ ID NO: 4406 - RNA, 22 nt, Artificial Sequence
  Guide RNA
guucuuucaauugcuguaaaac

SEQ ID NO: 4407 - RNA, 22 nt, Artificial Sequence
  Guide RNA
guuuuacagcaauugaaagaac

SEQ ID NO: 4408 - RNA, 22 nt, Artificial Sequence
  Guide RNA
uacagcaauugaaagaacagaa

SEQ ID NO: 4409 - RNA, 22 nt, Artificial Sequence
  Guide RNA
ucuguucuuucaauugcuguaa

SEQ ID NO: 4410 - RNA, 22 nt, Artificial Sequence
  Guide RNA
uuacagcaauugaaagaacaga

SEQ ID NO: 4411 - RNA, 22 nt, Artificial Sequence
  Guide RNA
uucuguucuuucaauugcugua

SEQ ID NO: 4412 - RNA, 22 nt, Artificial Sequence
  Guide RNA
uuuacagcaauugaaagaacag

SEQ ID NO: 4413 - RNA, 22 nt, Artificial Sequence
  Guide RNA
uuucuguucuuucaauugcugu

SEQ ID NO: 4414 - RNA, 22 nt, Artificial Sequence
  Guide RNA
uuuucuguucuuucaauugcug

SEQ ID NO: 4415 - RNA, 20 nt, Artificial Sequence
  Guide RNA
cuguucuuucaauugcuaug

SEQ ID NO: 4416 - RNA, 20 nt, Artificial Sequence
  Guide RNA
cuuucaauugcuaugaaaca

SEQ ID NO: 4417 - RNA, 20 nt, Artificial Sequence
  Guide RNA
guucuuucaauugcuaugaa

SEQ ID NO: 4418 - RNA, 20 nt, Artificial Sequence
  Guide RNA
guuucauagcaauugaaaga

SEQ ID NO: 4419 - RNA, 20 nt, Artificial Sequence
  Guide RNA
ucauagcaauugaaagaaca

SEQ ID NO: 4420 - RNA, 20 nt, Artificial Sequence
  Guide RNA
ucuguucuuucaauugcuau

SEQ ID NO: 4421 - RNA, 20 nt, Artificial Sequence
  Guide RNA
ucuuucaauugcuaugaaac

SEQ ID NO: 4422 - RNA, 20 nt, Artificial Sequence
  Guide RNA
uguucuuucaauugcuauga

SEQ ID NO: 4423 - RNA, 20 nt, Artificial Sequence
  Guide RNA
uguuucauagcaauugaaag

SEQ ID NO: 4424 - RNA, 20 nt, Artificial Sequence
  Guide RNA
uucauagcaauugaaagaac

SEQ ID NO: 4425 - RNA, 20 nt, Artificial Sequence
  Guide RNA
uucuguucuuucaauugcua

SEQ ID NO: 4426 - RNA, 21 nt, Artificial Sequence
  Guide RNA
cuguucuuucaauugcuauga

SEQ ID NO: 4427 - RNA, 21 nt, Artificial Sequence
  Guide RNA
ucauagcaauugaaagaacag

SEQ ID NO: 4428 - RNA, 21 nt, Artificial Sequence
  Guide RNA
ucuguucuuucaauugcuaug

SEQ ID NO: 4429 - RNA, 22 nt, Artificial Sequence
  Guide RNA
cuguucuuucaauugcuaugaa

SEQ ID NO: 4430 - RNA, 22 nt, Artificial Sequence
  Guide RNA
guucuuucaauugcuaugaaac

SEQ ID NO: 4431 - RNA, 22 nt, Artificial Sequence
  Guide RNA
guuucauagcaauugaaagaac

SEQ ID NO: 4432 - RNA, 22 nt, Artificial Sequence
  Guide RNA
ucauagcaauugaaagaacaga

SEQ ID NO: 4433 - RNA, 22 nt, Artificial Sequence
  Guide RNA
ucuguucuuucaauugcuauga

SEQ ID NO: 4434 - RNA, 22 nt, Artificial Sequence
  Guide RNA
uucauagcaauugaaagaacag

SEQ ID NO: 4435 - RNA, 22 nt, Artificial Sequence
  Guide RNA
uucuguucuuucaauugcuaug

SEQ ID NO: 4436 - RNA, 20 nt, Artificial Sequence
  Guide RNA
aaaagugaggaacauggagg

SEQ ID NO: 4437 - RNA, 20 nt, Artificial Sequence
  Guide RNA
aaagugaggaacauggagga

SEQ ID NO: 4438 - RNA, 20 nt, Artificial Sequence
  Guide RNA
aagugaggaacauggaggag

SEQ ID NO: 4439 - RNA, 20 nt, Artificial Sequence
  Guide RNA
acaaaagugaggaacaugga

SEQ ID NO: 4440 - RNA, 20 nt, Artificial Sequence
  Guide RNA
acacaaaagugaggaacaug

SEQ ID NO: 4441 - RNA, 20 nt, Artificial Sequence
  Guide RNA
acgcacacaaaagugaggaa

SEQ ID NO: 4442 - RNA, 20 nt, Artificial Sequence
  Guide RNA
acuccuccauguuccucacu

SEQ ID NO: 4443 - RNA, 20 nt, Artificial Sequence
  Guide RNA
aggaacauggaggaguccac

SEQ ID NO: 4444 - RNA, 20 nt, Artificial Sequence
  Guide RNA
agugaggaacauggaggagu

SEQ ID NO: 4445 - RNA, 20 nt, Artificial Sequence
  Guide RNA
auguuccucacuuuugugug

SEQ ID NO: 4446 - RNA, 20 nt, Artificial Sequence
  Guide RNA
auugguggacuccuccaugu

SEQ ID NO: 4447 - RNA, 20 nt, Artificial Sequence
  Guide RNA
caaaagugaggaacauggag

SEQ ID NO: 4448 - RNA, 20 nt, Artificial Sequence
  Guide RNA
cacaaaagugaggaacaugg

SEQ ID NO: 4449 - RNA, 20 nt, Artificial Sequence
  Guide RNA
cacacaaaagugaggaacau

SEQ ID NO: 4450 - RNA, 20 nt, Artificial Sequence
  Guide RNA
cacgcacacaaaagugagga

SEQ ID NO: 4451 - RNA, 20 nt, Artificial Sequence
  Guide RNA
cauguuccucacuuuugugu

SEQ ID NO: 4452 - RNA, 20 nt, Artificial Sequence
  Guide RNA
cauugguggacuccuccaug

SEQ ID NO: 4453 - RNA, 20 nt, Artificial Sequence
  Guide RNA
ccauguuccucacuuuugug

SEQ ID NO: 4454 - RNA, 20 nt, Artificial Sequence
  Guide RNA
ccucacuuuugugugcgugc

SEQ ID NO: 4455 - RNA, 20 nt, Artificial Sequence
  Guide RNA
ccuccauguuccucacuuuu

SEQ ID NO: 4456 - RNA, 20 nt, Artificial Sequence
  Guide RNA
cgcacacaaaagugaggaac

SEQ ID NO: 4457 - RNA, 20 nt, Artificial Sequence
  Guide RNA
cuccauguuccucacuuuug

SEQ ID NO: 4458 - RNA, 20 nt, Artificial Sequence
  Guide RNA
cuccuccauguuccucacuu

SEQ ID NO: 4459 - RNA, 20 nt, Artificial Sequence
  Guide RNA
gacuccuccauguuccucac

SEQ ID NO: 4460 - RNA, 20 nt, Artificial Sequence
  Guide RNA
gaggaacauggaggagucca

SEQ ID NO: 4461 - RNA, 20 nt, Artificial Sequence
  Guide RNA
gcacacaaaagugaggaaca

SEQ ID NO: 4462 - RNA, 20 nt, Artificial Sequence
  Guide RNA
gcacgcacacaaaagugagg

SEQ ID NO: 4463 - RNA, 20 nt, Artificial Sequence
  Guide RNA
ggacuccuccauguuccuca

SEQ ID NO: 4464 - RNA, 20 nt, Artificial Sequence
  Guide RNA
ggcacgcacacaaaagugag

SEQ ID NO: 4465 - RNA, 20 nt, Artificial Sequence
  Guide RNA
gggcacgcacacaaaaguga

SEQ ID NO: 4466 - RNA, 20 nt, Artificial Sequence
  Guide RNA
gguggacuccuccauguucc

SEQ ID NO: 4467 - RNA, 20 nt, Artificial Sequence
  Guide RNA
gugaggaacauggaggaguc

SEQ ID NO: 4468 - RNA, 20 nt, Artificial Sequence
  Guide RNA
guggacuccuccauguuccu

SEQ ID NO: 4469 - RNA, 20 nt, Artificial Sequence
  Guide RNA
guuccucacuuuugugugcg

SEQ ID NO: 4470 - RNA, 20 nt, Artificial Sequence
  Guide RNA
uccauguuccucacuuuugu

SEQ ID NO: 4471 - RNA, 20 nt, Artificial Sequence
  Guide RNA
uccucacuuuugugugcgug

SEQ ID NO: 4472 - RNA, 20 nt, Artificial Sequence
  Guide RNA
uccuccauguuccucacuuu

SEQ ID NO: 4473 - RNA, 20 nt, Artificial Sequence
  Guide RNA
ugaggaacauggaggagucc

SEQ ID NO: 4474 - RNA, 20 nt, Artificial Sequence
  Guide RNA
uggacuccuccauguuccuc

SEQ ID NO: 4475 - RNA, 20 nt, Artificial Sequence
  Guide RNA
ugggcacgcacacaaaagug

SEQ ID NO: 4476 - RNA, 20 nt, Artificial Sequence
  Guide RNA
ugguggacuccuccauguuc

SEQ ID NO: 4477 - RNA, 20 nt, Artificial Sequence
  Guide RNA
uguuccucacuuuugugugc

SEQ ID NO: 4478 - RNA, 20 nt, Artificial Sequence
  Guide RNA
uuccucacuuuugugugcgu

SEQ ID NO: 4479 - RNA, 20 nt, Artificial Sequence
  Guide RNA
uugggcacgcacacaaaagu

SEQ ID NO: 4480 - RNA, 20 nt, Artificial Sequence
  Guide RNA
uugguggacuccuccauguu

SEQ ID NO: 4481 - RNA, 20 nt, Artificial Sequence
  Guide RNA
uuugggcacgcacacaaaag

SEQ ID NO: 4482 - RNA, 21 nt, Artificial Sequence
  Guide RNA
aaaagugaggaacauggagga

SEQ ID NO: 4483 - RNA, 21 nt, Artificial Sequence
  Guide RNA
aaagugaggaacauggaggag

SEQ ID NO: 4484 - RNA, 21 nt, Artificial Sequence
  Guide RNA
aagugaggaacauggaggagu

SEQ ID NO: 4485 - RNA, 21 nt, Artificial Sequence
  Guide RNA
acaaaagugaggaacauggag

SEQ ID NO: 4486 - RNA, 21 nt, Artificial Sequence
  Guide RNA
acacaaaagugaggaacaugg

SEQ ID NO: 4487 - RNA, 21 nt, Artificial Sequence
  Guide RNA
acgcacacaaaagugaggaac

SEQ ID NO: 4488 - RNA, 21 nt, Artificial Sequence
  Guide RNA
acuccuccauguuccucacuu

SEQ ID NO: 4489 - RNA, 21 nt, Artificial Sequence
  Guide RNA
aggaacauggaggaguccacc

SEQ ID NO: 4490 - RNA, 21 nt, Artificial Sequence
  Guide RNA
agugaggaacauggaggaguc

SEQ ID NO: 4491 - RNA, 21 nt, Artificial Sequence
  Guide RNA
auguuccucacuuuugugugc

SEQ ID NO: 4492 - RNA, 21 nt, Artificial Sequence
  Guide RNA
auugguggacuccuccauguu

SEQ ID NO: 4493 - RNA, 21 nt, Artificial Sequence
  Guide RNA
caaaagugaggaacauggagg

SEQ ID NO: 4494 - RNA, 21 nt, Artificial Sequence
  Guide RNA
cacaaaagugaggaacaugga

SEQ ID NO: 4495 - RNA, 21 nt, Artificial Sequence
  Guide RNA
cacacaaaagugaggaacaug

SEQ ID NO: 4496 - RNA, 21 nt, Artificial Sequence
  Guide RNA
cacgcacacaaaagugaggaa

SEQ ID NO: 4497 - RNA, 21 nt, Artificial Sequence
  Guide RNA
cauguuccucacuuuugugug

SEQ ID NO: 4498 - RNA, 21 nt, Artificial Sequence
  Guide RNA
cauugguggacuccuccaugu

SEQ ID NO: 4499 - RNA, 21 nt, Artificial Sequence
  Guide RNA
ccauguuccucacuuuugugu

SEQ ID NO: 4500 - RNA, 21 nt, Artificial Sequence
  Guide RNA
ccauugguggacuccuccaug

SEQ ID NO: 4501 - RNA, 21 nt, Artificial Sequence
  Guide RNA
ccucacuuuugugugcgugcc

SEQ ID NO: 4502 - RNA, 21 nt, Artificial Sequence
  Guide RNA
ccuccauguuccucacuuuug

SEQ ID NO: 4503 - RNA, 21 nt, Artificial Sequence
  Guide RNA
cgcacacaaaagugaggaaca

SEQ ID NO: 4504 - RNA, 21 nt, Artificial Sequence
  Guide RNA
cuccauguuccucacuuuugu

SEQ ID NO: 4505 - RNA, 21 nt, Artificial Sequence
  Guide RNA
cuccuccauguuccucacuuu

SEQ ID NO: 4506 - RNA, 21 nt, Artificial Sequence
  Guide RNA
gacuccuccauguuccucacu

SEQ ID NO: 4507 - RNA, 21 nt, Artificial Sequence
  Guide RNA
gaggaacauggaggaguccac

SEQ ID NO: 4508 - RNA, 21 nt, Artificial Sequence
  Guide RNA
gcacacaaaagugaggaacau

SEQ ID NO: 4509 - RNA, 21 nt, Artificial Sequence
  Guide RNA
gcacgcacacaaaagugagga

SEQ ID NO: 4510 - RNA, 21 nt, Artificial Sequence
  Guide RNA
ggacuccuccauguuccucac

SEQ ID NO: 4511 - RNA, 21 nt, Artificial Sequence
  Guide RNA
ggcacgcacacaaaagugagg

SEQ ID NO: 4512 - RNA, 21 nt, Artificial Sequence
  Guide RNA
gggcacgcacacaaaagugag

SEQ ID NO: 4513 - RNA, 21 nt, Artificial Sequence
  Guide RNA
gguggacuccuccauguuccu

SEQ ID NO: 4514 - RNA, 21 nt, Artificial Sequence
  Guide RNA
gugaggaacauggaggagucc

SEQ ID NO: 4515 - RNA, 21 nt, Artificial Sequence
  Guide RNA
guggacuccuccauguuccuc

SEQ ID NO: 4516 - RNA, 21 nt, Artificial Sequence
  Guide RNA
guuccucacuuuugugugcgu

SEQ ID NO: 4517 - RNA, 21 nt, Artificial Sequence
  Guide RNA
uccauguuccucacuuuugug

SEQ ID NO: 4518 - RNA, 21 nt, Artificial Sequence
  Guide RNA
uccucacuuuugugugcgugc

SEQ ID NO: 4519 - RNA, 21 nt, Artificial Sequence
  Guide RNA
uccuccauguuccucacuuuu

SEQ ID NO: 4520 - RNA, 21 nt, Artificial Sequence
  Guide RNA
ugaggaacauggaggagucca

SEQ ID NO: 4521 - RNA, 21 nt, Artificial Sequence
  Guide RNA
uggacuccuccauguuccuca

SEQ ID NO: 4522 - RNA, 21 nt, Artificial Sequence
  Guide RNA
ugggcacgcacacaaaaguga

SEQ ID NO: 4523 - RNA, 21 nt, Artificial Sequence
  Guide RNA
ugguggacuccuccauguucc

SEQ ID NO: 4524 - RNA, 21 nt, Artificial Sequence
  Guide RNA
uguuccucacuuuugugugcg

SEQ ID NO: 4525 - RNA, 21 nt, Artificial Sequence
  Guide RNA
uuccucacuuuugugugcgug

SEQ ID NO: 4526 - RNA, 21 nt, Artificial Sequence
  Guide RNA
uugggcacgcacacaaaagug

SEQ ID NO: 4527 - RNA, 21 nt, Artificial Sequence
  Guide RNA
uugguggacuccuccauguuc

SEQ ID NO: 4528 - RNA, 21 nt, Artificial Sequence
  Guide RNA
uuugggcacgcacacaaaagu

SEQ ID NO: 4529 - RNA, 21 nt, Artificial Sequence
  Guide RNA
uuuugggcacgcacacaaaag

SEQ ID NO: 4530 - RNA, 22 nt, Artificial Sequence
  Guide RNA
aaaagugaggaacauggaggag

SEQ ID NO: 4531 - RNA, 22 nt, Artificial Sequence
  Guide RNA
aaagugaggaacauggaggagu

SEQ ID NO: 4532 - RNA, 22 nt, Artificial Sequence
  Guide RNA
aagugaggaacauggaggaguc

SEQ ID NO: 4533 - RNA, 22 nt, Artificial Sequence
  Guide RNA
acaaaagugaggaacauggagg

SEQ ID NO: 4534 - RNA, 22 nt, Artificial Sequence
  Guide RNA
acacaaaagugaggaacaugga

SEQ ID NO: 4535 - RNA, 22 nt, Artificial Sequence
  Guide RNA
acgcacacaaaagugaggaaca

SEQ ID NO: 4536 - RNA, 22 nt, Artificial Sequence
  Guide RNA
acuccuccauguuccucacuuu

SEQ ID NO: 4537 - RNA, 22 nt, Artificial Sequence
  Guide RNA
aggaacauggaggaguccacca

SEQ ID NO: 4538 - RNA, 22 nt, Artificial Sequence
  Guide RNA
agugaggaacauggaggagucc

SEQ ID NO: 4539 - RNA, 22 nt, Artificial Sequence
  Guide RNA
auguuccucacuuuugugugcg

SEQ ID NO: 4540 - RNA, 22 nt, Artificial Sequence
  Guide RNA
auugguggacuccuccauguuc

SEQ ID NO: 4541 - RNA, 22 nt, Artificial Sequence
  Guide RNA
auuuugggcacgcacacaaaag

SEQ ID NO: 4542 - RNA, 22 nt, Artificial Sequence
  Guide RNA
caaaagugaggaacauggagga

SEQ ID NO: 4543 - RNA, 22 nt, Artificial Sequence
  Guide RNA
cacaaaagugaggaacauggag

SEQ ID NO: 4544 - RNA, 22 nt, Artificial Sequence
  Guide RNA
cacacaaaagugaggaacaugg

SEQ ID NO: 4545 - RNA, 22 nt, Artificial Sequence
  Guide RNA
cacgcacacaaaagugaggaac

SEQ ID NO: 4546 - RNA, 22 nt, Artificial Sequence
  Guide RNA
cauguuccucacuuuugugugc

SEQ ID NO: 4547 - RNA, 22 nt, Artificial Sequence
  Guide RNA
cauugguggacuccuccauguu

SEQ ID NO: 4548 - RNA, 22 nt, Artificial Sequence
  Guide RNA
ccauguuccucacuuuugugug

SEQ ID NO: 4549 - RNA, 22 nt, Artificial Sequence
  Guide RNA
ccauugguggacuccuccaugu

SEQ ID NO: 4550 - RNA, 22 nt, Artificial Sequence
  Guide RNA
ccucacuuuugugugcgugccc

SEQ ID NO: 4551 - RNA, 22 nt, Artificial Sequence
  Guide RNA
ccuccauguuccucacuuuugu

SEQ ID NO: 4552 - RNA, 22 nt, Artificial Sequence
  Guide RNA
cgcacacaaaagugaggaacau

SEQ ID NO: 4553 - RNA, 22 nt, Artificial Sequence
  Guide RNA
cuccauguuccucacuuuugug

SEQ ID NO: 4554 - RNA, 22 nt, Artificial Sequence
  Guide RNA
cuccuccauguuccucacuuuu

SEQ ID NO: 4555 - RNA, 22 nt, Artificial Sequence
  Guide RNA
gacuccuccauguuccucacuu

SEQ ID NO: 4556 - RNA, 22 nt, Artificial Sequence
  Guide RNA
gaggaacauggaggaguccacc

SEQ ID NO: 4557 - RNA, 22 nt, Artificial Sequence
  Guide RNA
gcacacaaaagugaggaacaug

SEQ ID NO: 4558 - RNA, 22 nt, Artificial Sequence
  Guide RNA
gcacgcacacaaaagugaggaa

SEQ ID NO: 4559 - RNA, 22 nt, Artificial Sequence
  Guide RNA
gccauugguggacuccuccaug

SEQ ID NO: 4560 - RNA, 22 nt, Artificial Sequence
  Guide RNA
ggacuccuccauguuccucacu

SEQ ID NO: 4561 - RNA, 22 nt, Artificial Sequence
  Guide RNA
ggcacgcacacaaaagugagga

SEQ ID NO: 4562 - RNA, 22 nt, Artificial Sequence
  Guide RNA
gggcacgcacacaaaagugagg

SEQ ID NO: 4563 - RNA, 22 nt, Artificial Sequence
  Guide RNA
gguggacuccuccauguuccuc

SEQ ID NO: 4564 - RNA, 22 nt, Artificial Sequence
  Guide RNA
gugaggaacauggaggagucca

SEQ ID NO: 4565 - RNA, 22 nt, Artificial Sequence
  Guide RNA
guggacuccuccauguuccuca

SEQ ID NO: 4566 - RNA, 22 nt, Artificial Sequence
  Guide RNA
guuccucacuuuugugugcgug

SEQ ID NO: 4567 - RNA, 22 nt, Artificial Sequence
  Guide RNA
uccauguuccucacuuuugugu

SEQ ID NO: 4568 - RNA, 22 nt, Artificial Sequence
  Guide RNA
uccucacuuuugugugcgugcc

SEQ ID NO: 4569 - RNA, 22 nt, Artificial Sequence
  Guide RNA
uccuccauguuccucacuuuug

SEQ ID NO: 4570 - RNA, 22 nt, Artificial Sequence
  Guide RNA
ugaggaacauggaggaguccac

SEQ ID NO: 4571 - RNA, 22 nt, Artificial Sequence
  Guide RNA
uggacuccuccauguuccucac

SEQ ID NO: 4572 - RNA, 22 nt, Artificial Sequence
  Guide RNA
ugggcacgcacacaaaagugag

SEQ ID NO: 4573 - RNA, 22 nt, Artificial Sequence
  Guide RNA
ugguggacuccuccauguuccu

SEQ ID NO: 4574 - RNA, 22 nt, Artificial Sequence
  Guide RNA
uguuccucacuuuugugugcgu

SEQ ID NO: 4575 - RNA, 22 nt, Artificial Sequence
  Guide RNA
uuccucacuuuugugugcgugc

SEQ ID NO: 4576 - RNA, 22 nt, Artificial Sequence
  Guide RNA
uugggcacgcacacaaaaguga

SEQ ID NO: 4577 - RNA, 22 nt, Artificial Sequence
  Guide RNA
uugguggacuccuccauguucc

SEQ ID NO: 4578 - RNA, 22 nt, Artificial Sequence
  Guide RNA
uuugggcacgcacacaaaagug

SEQ ID NO: 4579 - RNA, 22 nt, Artificial Sequence
  Guide RNA
uuuugggcacgcacacaaaagu

SEQ ID NO: 4580 - RNA, 20 nt, Artificial Sequence
  Guide RNA
aaaaguggugaacauggagg

SEQ ID NO: 4581 - RNA, 20 nt, Artificial Sequence
  Guide RNA
aaaguggugaacauggagga

SEQ ID NO: 4582 - RNA, 20 nt, Artificial Sequence
  Guide RNA
aaguggugaacauggaggag

SEQ ID NO: 4583 - RNA, 20 nt, Artificial Sequence
  Guide RNA
acaaaaguggugaacaugga

SEQ ID NO: 4584 - RNA, 20 nt, Artificial Sequence
  Guide RNA
acacaaaaguggugaacaug

SEQ ID NO: 4585 - RNA, 20 nt, Artificial Sequence
  Guide RNA
accacuuuugugugcgugcc

SEQ ID NO: 4586 - RNA, 20 nt, Artificial Sequence
  Guide RNA
acgcacacaaaaguggugaa

SEQ ID NO: 4587 - RNA, 20 nt, Artificial Sequence
  Guide RNA
acuccuccauguucaccacu

SEQ ID NO: 4588 - RNA, 20 nt, Artificial Sequence
  Guide RNA
aguggugaacauggaggagu

SEQ ID NO: 4589 - RNA, 20 nt, Artificial Sequence
  Guide RNA
auguucaccacuuuugugug

SEQ ID NO: 4590 - RNA, 20 nt, Artificial Sequence
  Guide RNA
caaaaguggugaacauggag

SEQ ID NO: 4591 - RNA, 20 nt, Artificial Sequence
  Guide RNA
cacaaaaguggugaacaugg

SEQ ID NO: 4592 - RNA, 20 nt, Artificial Sequence
  Guide RNA
cacacaaaaguggugaacau

SEQ ID NO: 4593 - RNA, 20 nt, Artificial Sequence
  Guide RNA
caccacuuuugugugcgugc

SEQ ID NO: 4594 - RNA, 20 nt, Artificial Sequence
  Guide RNA
cacgcacacaaaagugguga

SEQ ID NO: 4595 - RNA, 20 nt, Artificial Sequence
  Guide RNA
cauguucaccacuuuugugu

SEQ ID NO: 4596 - RNA, 20 nt, Artificial Sequence
  Guide RNA
ccauguucaccacuuuugug

SEQ ID NO: 4597 - RNA, 20 nt, Artificial Sequence
  Guide RNA
ccuccauguucaccacuuuu

SEQ ID NO: 4598 - RNA, 20 nt, Artificial Sequence
  Guide RNA
cgcacacaaaaguggugaac

SEQ ID NO: 4599 - RNA, 20 nt, Artificial Sequence
  Guide RNA
cuccauguucaccacuuuug

SEQ ID NO: 4600 - RNA, 20 nt, Artificial Sequence
  Guide RNA
cuccuccauguucaccacuu

SEQ ID NO: 4601 - RNA, 20 nt, Artificial Sequence
  Guide RNA
gacuccuccauguucaccac

SEQ ID NO: 4602 - RNA, 20 nt, Artificial Sequence
  Guide RNA
gcacacaaaaguggugaaca

SEQ ID NO: 4603 - RNA, 20 nt, Artificial Sequence
  Guide RNA
gcacgcacacaaaaguggug

SEQ ID NO: 4604 - RNA, 20 nt, Artificial Sequence
  Guide RNA
ggacuccuccauguucacca

SEQ ID NO: 4605 - RNA, 20 nt, Artificial Sequence
  Guide RNA
ggcacgcacacaaaaguggu

SEQ ID NO: 4606 - RNA, 20 nt, Artificial Sequence
  Guide RNA
gggcacgcacacaaaagugg

SEQ ID NO: 4607 - RNA, 20 nt, Artificial Sequence
  Guide RNA
ggugaacauggaggagucca

SEQ ID NO: 4608 - RNA, 20 nt, Artificial Sequence
  Guide RNA
gguggacuccuccauguuca

SEQ ID NO: 4609 - RNA, 20 nt, Artificial Sequence
  Guide RNA
guggacuccuccauguucac

SEQ ID NO: 4610 - RNA, 20 nt, Artificial Sequence
  Guide RNA
guggugaacauggaggaguc

SEQ ID NO: 4611 - RNA, 20 nt, Artificial Sequence
  Guide RNA
guucaccacuuuugugugcg

SEQ ID NO: 4612 - RNA, 20 nt, Artificial Sequence
  Guide RNA
ucaccacuuuugugugcgug

SEQ ID NO: 4613 - RNA, 20 nt, Artificial Sequence
  Guide RNA
uccauguucaccacuuuugu

SEQ ID NO: 4614 - RNA, 20 nt, Artificial Sequence
  Guide RNA
uccuccauguucaccacuuu

SEQ ID NO: 4615 - RNA, 20 nt, Artificial Sequence
  Guide RNA
uggacuccuccauguucacc

SEQ ID NO: 4616 - RNA, 20 nt, Artificial Sequence
  Guide RNA
uggugaacauggaggagucc

SEQ ID NO: 4617 - RNA, 20 nt, Artificial Sequence
  Guide RNA
uguucaccacuuuugugugc

SEQ ID NO: 4618 - RNA, 20 nt, Artificial Sequence
  Guide RNA
uucaccacuuuugugugcgu

SEQ ID NO: 4619 - RNA, 20 nt, Artificial Sequence
  Guide RNA
uuuugggcacgcacacaaaa

SEQ ID NO: 4620 - RNA, 21 nt, Artificial Sequence
  Guide RNA
aaaaguggugaacauggagga

SEQ ID NO: 4621 - RNA, 21 nt, Artificial Sequence
  Guide RNA
aaaguggugaacauggaggag

SEQ ID NO: 4622 - RNA, 21 nt, Artificial Sequence
  Guide RNA
aaguggugaacauggaggagu

SEQ ID NO: 4623 - RNA, 21 nt, Artificial Sequence
  Guide RNA
acaaaaguggugaacauggag

SEQ ID NO: 4624 - RNA, 21 nt, Artificial Sequence
  Guide RNA
acacaaaaguggugaacaugg

SEQ ID NO: 4625 - RNA, 21 nt, Artificial Sequence
  Guide RNA
accacuuuugugugcgugccc

SEQ ID NO: 4626 - RNA, 21 nt, Artificial Sequence
  Guide RNA
acgcacacaaaaguggugaac

SEQ ID NO: 4627 - RNA, 21 nt, Artificial Sequence
  Guide RNA
acuccuccauguucaccacuu

SEQ ID NO: 4628 - RNA, 21 nt, Artificial Sequence
  Guide RNA
aguggugaacauggaggaguc

SEQ ID NO: 4629 - RNA, 21 nt, Artificial Sequence
  Guide RNA
auguucaccacuuuugugugc

SEQ ID NO: 4630 - RNA, 21 nt, Artificial Sequence
  Guide RNA
auuuugggcacgcacacaaaa

SEQ ID NO: 4631 - RNA, 21 nt, Artificial Sequence
  Guide RNA
caaaaguggugaacauggagg

SEQ ID NO: 4632 - RNA, 21 nt, Artificial Sequence
  Guide RNA
cacaaaaguggugaacaugga

SEQ ID NO: 4633 - RNA, 21 nt, Artificial Sequence
  Guide RNA
cacacaaaaguggugaacaug

SEQ ID NO: 4634 - RNA, 21 nt, Artificial Sequence
  Guide RNA
caccacuuuugugugcgugcc

SEQ ID NO: 4635 - RNA, 21 nt, Artificial Sequence
  Guide RNA
cacgcacacaaaaguggugaa

SEQ ID NO: 4636 - RNA, 21 nt, Artificial Sequence
  Guide RNA
cauguucaccacuuuugugug

SEQ ID NO: 4637 - RNA, 21 nt, Artificial Sequence
  Guide RNA
ccauguucaccacuuuugugu

SEQ ID NO: 4638 - RNA, 21 nt, Artificial Sequence
  Guide RNA
ccuccauguucaccacuuuug

SEQ ID NO: 4639 - RNA, 21 nt, Artificial Sequence
  Guide RNA
cgcacacaaaaguggugaaca

SEQ ID NO: 4640 - RNA, 21 nt, Artificial Sequence
  Guide RNA
cuccauguucaccacuuuugu

SEQ ID NO: 4641 - RNA, 21 nt, Artificial Sequence
  Guide RNA
cuccuccauguucaccacuuu

SEQ ID NO: 4642 - RNA, 21 nt, Artificial Sequence
  Guide RNA
gacuccuccauguucaccacu

SEQ ID NO: 4643 - RNA, 21 nt, Artificial Sequence
  Guide RNA
gcacacaaaaguggugaacau

SEQ ID NO: 4644 - RNA, 21 nt, Artificial Sequence
  Guide RNA
gcacgcacacaaaagugguga

SEQ ID NO: 4645 - RNA, 21 nt, Artificial Sequence
  Guide RNA
ggacuccuccauguucaccac

SEQ ID NO: 4646 - RNA, 21 nt, Artificial Sequence
  Guide RNA
ggcacgcacacaaaaguggug

SEQ ID NO: 4647 - RNA, 21 nt, Artificial Sequence
  Guide RNA
gggcacgcacacaaaaguggu

SEQ ID NO: 4648 - RNA, 21 nt, Artificial Sequence
  Guide RNA
ggugaacauggaggaguccac

SEQ ID NO: 4649 - RNA, 21 nt, Artificial Sequence
  Guide RNA
gguggacuccuccauguucac

SEQ ID NO: 4650 - RNA, 21 nt, Artificial Sequence
  Guide RNA
guggacuccuccauguucacc

SEQ ID NO: 4651 - RNA, 21 nt, Artificial Sequence
  Guide RNA
guggugaacauggaggagucc

SEQ ID NO: 4652 - RNA, 21 nt, Artificial Sequence
  Guide RNA
guucaccacuuuugugugcgu

SEQ ID NO: 4653 - RNA, 21 nt, Artificial Sequence
  Guide RNA
ucaccacuuuugugugcgugc

SEQ ID NO: 4654 - RNA, 21 nt, Artificial Sequence
  Guide RNA
uccauguucaccacuuuugug

SEQ ID NO: 4655 - RNA, 21 nt, Artificial Sequence
  Guide RNA
uccuccauguucaccacuuuu

SEQ ID NO: 4656 - RNA, 21 nt, Artificial Sequence
  Guide RNA
uggacuccuccauguucacca

SEQ ID NO: 4657 - RNA, 21 nt, Artificial Sequence
  Guide RNA
ugggcacgcacacaaaagugg

SEQ ID NO: 4658 - RNA, 21 nt, Artificial Sequence
  Guide RNA
uggugaacauggaggagucca

SEQ ID NO: 4659 - RNA, 21 nt, Artificial Sequence
  Guide RNA
ugguggacuccuccauguuca

SEQ ID NO: 4660 - RNA, 21 nt, Artificial Sequence
  Guide RNA
uguucaccacuuuugugugcg

SEQ ID NO: 4661 - RNA, 21 nt, Artificial Sequence
  Guide RNA
uucaccacuuuugugugcgug

SEQ ID NO: 4662 - RNA, 22 nt, Artificial Sequence
  Guide RNA
aaaaguggugaacauggaggag

SEQ ID NO: 4663 - RNA, 22 nt, Artificial Sequence
  Guide RNA
aaaguggugaacauggaggagu

SEQ ID NO: 4664 - RNA, 22 nt, Artificial Sequence
  Guide RNA
aaguggugaacauggaggaguc

SEQ ID NO: 4665 - RNA, 22 nt, Artificial Sequence
  Guide RNA
acaaaaguggugaacauggagg

SEQ ID NO: 4666 - RNA, 22 nt, Artificial Sequence
  Guide RNA
acacaaaaguggugaacaugga

SEQ ID NO: 4667 - RNA, 22 nt, Artificial Sequence
  Guide RNA
accacuuuugugugcgugccca

SEQ ID NO: 4668 - RNA, 22 nt, Artificial Sequence
  Guide RNA
acgcacacaaaaguggugaaca

SEQ ID NO: 4669 - RNA, 22 nt, Artificial Sequence
  Guide RNA
acuccuccauguucaccacuuu

SEQ ID NO: 4670 - RNA, 22 nt, Artificial Sequence
  Guide RNA
aguggugaacauggaggagucc

SEQ ID NO: 4671 - RNA, 22 nt, Artificial Sequence
  Guide RNA
auguucaccacuuuugugugcg

SEQ ID NO: 4672 - RNA, 22 nt, Artificial Sequence
  Guide RNA
caaaaguggugaacauggagga

SEQ ID NO: 4673 - RNA, 22 nt, Artificial Sequence
  Guide RNA
cacaaaaguggugaacauggag

SEQ ID NO: 4674 - RNA, 22 nt, Artificial Sequence
  Guide RNA
cacacaaaaguggugaacaugg

SEQ ID NO: 4675 - RNA, 22 nt, Artificial Sequence
  Guide RNA
caccacuuuugugugcgugccc

SEQ ID NO: 4676 - RNA, 22 nt, Artificial Sequence
  Guide RNA
cacgcacacaaaaguggugaac

SEQ ID NO: 4677 - RNA, 22 nt, Artificial Sequence
  Guide RNA
cauguucaccacuuuugugugc

SEQ ID NO: 4678 - RNA, 22 nt, Artificial Sequence
  Guide RNA
cauuuugggcacgcacacaaaa

SEQ ID NO: 4679 - RNA, 22 nt, Artificial Sequence
  Guide RNA
ccauguucaccacuuuugugug

SEQ ID NO: 4680 - RNA, 22 nt, Artificial Sequence
  Guide RNA
ccuccauguucaccacuuuugu

SEQ ID NO: 4681 - RNA, 22 nt, Artificial Sequence
  Guide RNA
cgcacacaaaaguggugaacau

SEQ ID NO: 4682 - RNA, 22 nt, Artificial Sequence
  Guide RNA
cuccauguucaccacuuuugug

SEQ ID NO: 4683 - RNA, 22 nt, Artificial Sequence
  Guide RNA
cuccuccauguucaccacuuuu

SEQ ID NO: 4684 - RNA, 22 nt, Artificial Sequence
  Guide RNA
gacuccuccauguucaccacuu

SEQ ID NO: 4685 - RNA, 22 nt, Artificial Sequence
  Guide RNA
gcacacaaaaguggugaacaug

SEQ ID NO: 4686 - RNA, 22 nt, Artificial Sequence
  Guide RNA
gcacgcacacaaaaguggugaa

SEQ ID NO: 4687 - RNA, 22 nt, Artificial Sequence
  Guide RNA
ggacuccuccauguucaccacu

SEQ ID NO: 4688 - RNA, 22 nt, Artificial Sequence
  Guide RNA
ggcacgcacacaaaagugguga

SEQ ID NO: 4689 - RNA, 22 nt, Artificial Sequence
  Guide RNA
gggcacgcacacaaaaguggug

SEQ ID NO: 4690 - RNA, 22 nt, Artificial Sequence
  Guide RNA
ggugaacauggaggaguccacc

SEQ ID NO: 4691 - RNA, 22 nt, Artificial Sequence
  Guide RNA
gguggacuccuccauguucacc

SEQ ID NO: 4692 - RNA, 22 nt, Artificial Sequence
  Guide RNA
guggacuccuccauguucacca

SEQ ID NO: 4693 - RNA, 22 nt, Artificial Sequence
  Guide RNA
guggugaacauggaggagucca

SEQ ID NO: 4694 - RNA, 22 nt, Artificial Sequence
  Guide RNA
guucaccacuuuugugugcgug

SEQ ID NO: 4695 - RNA, 22 nt, Artificial Sequence
  Guide RNA
ucaccacuuuugugugcgugcc

SEQ ID NO: 4696 - RNA, 22 nt, Artificial Sequence
  Guide RNA
uccauguucaccacuuuugugu

SEQ ID NO: 4697 - RNA, 22 nt, Artificial Sequence
  Guide RNA
uccuccauguucaccacuuuug

SEQ ID NO: 4698 - RNA, 22 nt, Artificial Sequence
  Guide RNA
uggacuccuccauguucaccac

SEQ ID NO: 4699 - RNA, 22 nt, Artificial Sequence
  Guide RNA
ugggcacgcacacaaaaguggu

SEQ ID NO: 4700 - RNA, 22 nt, Artificial Sequence
  Guide RNA
uggugaacauggaggaguccac

SEQ ID NO: 4701 - RNA, 22 nt, Artificial Sequence
  Guide RNA
ugguggacuccuccauguucac

SEQ ID NO: 4702 - RNA, 22 nt, Artificial Sequence
  Guide RNA
uguucaccacuuuugugugcgu

SEQ ID NO: 4703 - RNA, 22 nt, Artificial Sequence
  Guide RNA
uucaccacuuuugugugcgugc

SEQ ID NO: 4704 - RNA, 22 nt, Artificial Sequence
  Guide RNA
uugggcacgcacacaaaagugg

SEQ ID NO: 4705 - RNA, 22 nt, Artificial Sequence
  Guide RNA
uugguggacuccuccauguuca

SEQ ID NO: 4706 - RNA, 20 nt, Artificial Sequence
  Guide RNA
aacauuuugggcacgcacac

SEQ ID NO: 4707 - RNA, 20 nt, Artificial Sequence
  Guide RNA
acacagaagugaugaacaug

SEQ ID NO: 4708 - RNA, 20 nt, Artificial Sequence
  Guide RNA
acagaagugaugaacaugga

SEQ ID NO: 4709 - RNA, 20 nt, Artificial Sequence
  Guide RNA
acauuuugggcacgcacaca

SEQ ID NO: 4710 - RNA, 20 nt, Artificial Sequence
  Guide RNA
acgcacacagaagugaugaa

SEQ ID NO: 4711 - RNA, 20 nt, Artificial Sequence
  Guide RNA
acuccuccauguucaucacu

SEQ ID NO: 4712 - RNA, 20 nt, Artificial Sequence
  Guide RNA
acuucugugugcgugcccaa

SEQ ID NO: 4713 - RNA, 20 nt, Artificial Sequence
  Guide RNA
agaagugaugaacauggagg

SEQ ID NO: 4714 - RNA, 20 nt, Artificial Sequence
  Guide RNA
aucacuucugugugcgugcc

SEQ ID NO: 4715 - RNA, 20 nt, Artificial Sequence
  Guide RNA
auguucaucacuucugugug

SEQ ID NO: 4716 - RNA, 20 nt, Artificial Sequence
  Guide RNA
auuuugggcacgcacacaga

SEQ ID NO: 4717 - RNA, 20 nt, Artificial Sequence
  Guide RNA
caacauuuugggcacgcaca

SEQ ID NO: 4718 - RNA, 20 nt, Artificial Sequence
  Guide RNA
cacacagaagugaugaacau

SEQ ID NO: 4719 - RNA, 20 nt, Artificial Sequence
  Guide RNA
cacagaagugaugaacaugg

SEQ ID NO: 4720 - RNA, 20 nt, Artificial Sequence
  Guide RNA
cacgcacacagaagugauga

SEQ ID NO: 4721 - RNA, 20 nt, Artificial Sequence
  Guide RNA
cacuucugugugcgugccca

SEQ ID NO: 4722 - RNA, 20 nt, Artificial Sequence
  Guide RNA
cagaagugaugaacauggag

SEQ ID NO: 4723 - RNA, 20 nt, Artificial Sequence
  Guide RNA
caucacuucugugugcgugc

SEQ ID NO: 4724 - RNA, 20 nt, Artificial Sequence
  Guide RNA
cauguucaucacuucugugu

SEQ ID NO: 4725 - RNA, 20 nt, Artificial Sequence
  Guide RNA
cauuuugggcacgcacacag

SEQ ID NO: 4726 - RNA, 20 nt, Artificial Sequence
  Guide RNA
ccauguucaucacuucugug

SEQ ID NO: 4727 - RNA, 20 nt, Artificial Sequence
  Guide RNA
ccuccauguucaucacuucu

SEQ ID NO: 4728 - RNA, 20 nt, Artificial Sequence
  Guide RNA
cgcacacagaagugaugaac

SEQ ID NO: 4729 - RNA, 20 nt, Artificial Sequence
  Guide RNA
cuccauguucaucacuucug

SEQ ID NO: 4730 - RNA, 20 nt, Artificial Sequence
  Guide RNA
cuccuccauguucaucacuu

SEQ ID NO: 4731 - RNA, 20 nt, Artificial Sequence
  Guide RNA
cuucugugugcgugcccaaa

SEQ ID NO: 4732 - RNA, 20 nt, Artificial Sequence
  Guide RNA
gacuccuccauguucaucac

SEQ ID NO: 4733 - RNA, 20 nt, Artificial Sequence
  Guide RNA
gcacacagaagugaugaaca

SEQ ID NO: 4734 - RNA, 20 nt, Artificial Sequence
  Guide RNA
gcacgcacacagaagugaug

SEQ ID NO: 4735 - RNA, 20 nt, Artificial Sequence
  Guide RNA
ggacuccuccauguucauca

SEQ ID NO: 4736 - RNA, 20 nt, Artificial Sequence
  Guide RNA
ggcacgcacacagaagugau

SEQ ID NO: 4737 - RNA, 20 nt, Artificial Sequence
  Guide RNA
gggcacgcacacagaaguga

SEQ ID NO: 4738 - RNA, 20 nt, Artificial Sequence
  Guide RNA
guucaucacuucugugugcg

SEQ ID NO: 4739 - RNA, 20 nt, Artificial Sequence
  Guide RNA
ucaacauuuugggcacgcac

SEQ ID NO: 4740 - RNA, 20 nt, Artificial Sequence
  Guide RNA
ucacuucugugugcgugccc

SEQ ID NO: 4741 - RNA, 20 nt, Artificial Sequence
  Guide RNA
ucaucacuucugugugcgug

SEQ ID NO: 4742 - RNA, 20 nt, Artificial Sequence
  Guide RNA
uccauguucaucacuucugu

SEQ ID NO: 4743 - RNA, 20 nt, Artificial Sequence
  Guide RNA
uccuccauguucaucacuuc

SEQ ID NO: 4744 - RNA, 20 nt, Artificial Sequence
  Guide RNA
ucugugugcgugcccaaaau

SEQ ID NO: 4745 - RNA, 20 nt, Artificial Sequence
  Guide RNA
ugggcacgcacacagaagug

SEQ ID NO: 4746 - RNA, 20 nt, Artificial Sequence
  Guide RNA
uguucaucacuucugugugc

SEQ ID NO: 4747 - RNA, 20 nt, Artificial Sequence
  Guide RNA
uucaucacuucugugugcgu

SEQ ID NO: 4748 - RNA, 20 nt, Artificial Sequence
  Guide RNA
uucugugugcgugcccaaaa

SEQ ID NO: 4749 - RNA, 20 nt, Artificial Sequence
  Guide RNA
uugggcacgcacacagaagu

SEQ ID NO: 4750 - RNA, 20 nt, Artificial Sequence
  Guide RNA
uuugggcacgcacacagaag

SEQ ID NO: 4751 - RNA, 20 nt, Artificial Sequence
  Guide RNA
uuuugggcacgcacacagaa

SEQ ID NO: 4752 - RNA, 21 nt, Artificial Sequence
  Guide RNA
aacauuuugggcacgcacaca

SEQ ID NO: 4753 - RNA, 21 nt, Artificial Sequence
  Guide RNA
acacagaagugaugaacaugg

SEQ ID NO: 4754 - RNA, 21 nt, Artificial Sequence
  Guide RNA
acagaagugaugaacauggag

SEQ ID NO: 4755 - RNA, 21 nt, Artificial Sequence
  Guide RNA
acauuuugggcacgcacacag

SEQ ID NO: 4756 - RNA, 21 nt, Artificial Sequence
  Guide RNA
acgcacacagaagugaugaac

SEQ ID NO: 4757 - RNA, 21 nt, Artificial Sequence
  Guide RNA
acuccuccauguucaucacuu

SEQ ID NO: 4758 - RNA, 21 nt, Artificial Sequence
  Guide RNA
acuucugugugcgugcccaaa

SEQ ID NO: 4759 - RNA, 21 nt, Artificial Sequence
  Guide RNA
agaagugaugaacauggagga

SEQ ID NO: 4760 - RNA, 21 nt, Artificial Sequence
  Guide RNA
aucacuucugugugcgugccc

SEQ ID NO: 4761 - RNA, 21 nt, Artificial Sequence
  Guide RNA
auguucaucacuucugugugc

SEQ ID NO: 4762 - RNA, 21 nt, Artificial Sequence
  Guide RNA
auuuugggcacgcacacagaa

SEQ ID NO: 4763 - RNA, 21 nt, Artificial Sequence
  Guide RNA
caacauuuugggcacgcacac

SEQ ID NO: 4764 - RNA, 21 nt, Artificial Sequence
  Guide RNA
cacacagaagugaugaacaug

SEQ ID NO: 4765 - RNA, 21 nt, Artificial Sequence
  Guide RNA
cacagaagugaugaacaugga

SEQ ID NO: 4766 - RNA, 21 nt, Artificial Sequence
  Guide RNA
cacgcacacagaagugaugaa

SEQ ID NO: 4767 - RNA, 21 nt, Artificial Sequence
  Guide RNA
cacuucugugugcgugcccaa

SEQ ID NO: 4768 - RNA, 21 nt, Artificial Sequence
  Guide RNA
cagaagugaugaacauggagg

SEQ ID NO: 4769 - RNA, 21 nt, Artificial Sequence
  Guide RNA
caucacuucugugugcgugcc

SEQ ID NO: 4770 - RNA, 21 nt, Artificial Sequence
  Guide RNA
cauguucaucacuucugugug

SEQ ID NO: 4771 - RNA, 21 nt, Artificial Sequence
  Guide RNA
cauuuugggcacgcacacaga

SEQ ID NO: 4772 - RNA, 21 nt, Artificial Sequence
  Guide RNA
ccauguucaucacuucugugu

SEQ ID NO: 4773 - RNA, 21 nt, Artificial Sequence
  Guide RNA
ccuccauguucaucacuucug

SEQ ID NO: 4774 - RNA, 21 nt, Artificial Sequence
  Guide RNA
cgcacacagaagugaugaaca

SEQ ID NO: 4775 - RNA, 21 nt, Artificial Sequence
  Guide RNA
cuccauguucaucacuucugu

SEQ ID NO: 4776 - RNA, 21 nt, Artificial Sequence
  Guide RNA
cuccuccauguucaucacuuc

SEQ ID NO: 4777 - RNA, 21 nt, Artificial Sequence
  Guide RNA
cuucugugugcgugcccaaaa

SEQ ID NO: 4778 - RNA, 21 nt, Artificial Sequence
  Guide RNA
gacuccuccauguucaucacu

SEQ ID NO: 4779 - RNA, 21 nt, Artificial Sequence
  Guide RNA
gcacacagaagugaugaacau

SEQ ID NO: 4780 - RNA, 21 nt, Artificial Sequence
  Guide RNA
gcacgcacacagaagugauga

SEQ ID NO: 4781 - RNA, 21 nt, Artificial Sequence
  Guide RNA
ggacuccuccauguucaucac

SEQ ID NO: 4782 - RNA, 21 nt, Artificial Sequence
  Guide RNA
ggcacgcacacagaagugaug

SEQ ID NO: 4783 - RNA, 21 nt, Artificial Sequence
  Guide RNA
gggcacgcacacagaagugau

SEQ ID NO: 4784 - RNA, 21 nt, Artificial Sequence
  Guide RNA
guucaucacuucugugugcgu

SEQ ID NO: 4785 - RNA, 21 nt, Artificial Sequence
  Guide RNA
ucaacauuuugggcacgcaca

SEQ ID NO: 4786 - RNA, 21 nt, Artificial Sequence
  Guide RNA
ucacuucugugugcgugccca

SEQ ID NO: 4787 - RNA, 21 nt, Artificial Sequence
  Guide RNA
ucaucacuucugugugcgugc

SEQ ID NO: 4788 - RNA, 21 nt, Artificial Sequence
  Guide RNA
uccauguucaucacuucugug

SEQ ID NO: 4789 - RNA, 21 nt, Artificial Sequence
  Guide RNA
uccuccauguucaucacuucu

SEQ ID NO: 4790 - RNA, 21 nt, Artificial Sequence
  Guide RNA
ucugugugcgugcccaaaaug

SEQ ID NO: 4791 - RNA, 21 nt, Artificial Sequence
  Guide RNA
uggacuccuccauguucauca

SEQ ID NO: 4792 - RNA, 21 nt, Artificial Sequence
  Guide RNA
ugggcacgcacacagaaguga

SEQ ID NO: 4793 - RNA, 21 nt, Artificial Sequence
  Guide RNA
uguucaucacuucugugugcg

SEQ ID NO: 4794 - RNA, 21 nt, Artificial Sequence
  Guide RNA
uucaacauuuugggcacgcac

SEQ ID NO: 4795 - RNA, 21 nt, Artificial Sequence
  Guide RNA
uucaucacuucugugugcgug

SEQ ID NO: 4796 - RNA, 21 nt, Artificial Sequence
  Guide RNA
uucugugugcgugcccaaaau

SEQ ID NO: 4797 - RNA, 21 nt, Artificial Sequence
  Guide RNA
uugggcacgcacacagaagug

SEQ ID NO: 4798 - RNA, 21 nt, Artificial Sequence
  Guide RNA
uuugggcacgcacacagaagu

SEQ ID NO: 4799 - RNA, 21 nt, Artificial Sequence
  Guide RNA
uuuugggcacgcacacagaag

SEQ ID NO: 4800 - RNA, 22 nt, Artificial Sequence
  Guide RNA
aacauuuugggcacgcacacag

SEQ ID NO: 4801 - RNA, 22 nt, Artificial Sequence
  Guide RNA
acacagaagugaugaacaugga

SEQ ID NO: 4802 - RNA, 22 nt, Artificial Sequence
  Guide RNA
acagaagugaugaacauggagg

SEQ ID NO: 4803 - RNA, 22 nt, Artificial Sequence
  Guide RNA
acauuuugggcacgcacacaga

SEQ ID NO: 4804 - RNA, 22 nt, Artificial Sequence
  Guide RNA
acgcacacagaagugaugaaca

SEQ ID NO: 4805 - RNA, 22 nt, Artificial Sequence
  Guide RNA
acuccuccauguucaucacuuc

SEQ ID NO: 4806 - RNA, 22 nt, Artificial Sequence
  Guide RNA
acuucugugugcgugcccaaaa

SEQ ID NO: 4807 - RNA, 22 nt, Artificial Sequence
  Guide RNA
agaagugaugaacauggaggag

SEQ ID NO: 4808 - RNA, 22 nt, Artificial Sequence
  Guide RNA
aucacuucugugugcgugccca

SEQ ID NO: 4809 - RNA, 22 nt, Artificial Sequence
  Guide RNA
auguucaucacuucugugugcg

SEQ ID NO: 4810 - RNA, 22 nt, Artificial Sequence
  Guide RNA
auuuugggcacgcacacagaag

SEQ ID NO: 4811 - RNA, 22 nt, Artificial Sequence
  Guide RNA
caacauuuugggcacgcacaca

SEQ ID NO: 4812 - RNA, 22 nt, Artificial Sequence
  Guide RNA
cacacagaagugaugaacaugg

SEQ ID NO: 4813 - RNA, 22 nt, Artificial Sequence
  Guide RNA
cacagaagugaugaacauggag

SEQ ID NO: 4814 - RNA, 22 nt, Artificial Sequence
  Guide RNA
cacgcacacagaagugaugaac

SEQ ID NO: 4815 - RNA, 22 nt, Artificial Sequence
  Guide RNA
cacuucugugugcgugcccaaa

SEQ ID NO: 4816 - RNA, 22 nt, Artificial Sequence
  Guide RNA
cagaagugaugaacauggagga

SEQ ID NO: 4817 - RNA, 22 nt, Artificial Sequence
  Guide RNA
caucacuucugugugcgugccc

SEQ ID NO: 4818 - RNA, 22 nt, Artificial Sequence
  Guide RNA
cauguucaucacuucugugugc

SEQ ID NO: 4819 - RNA, 22 nt, Artificial Sequence
  Guide RNA
cauuuugggcacgcacacagaa

SEQ ID NO: 4820 - RNA, 22 nt, Artificial Sequence
  Guide RNA
ccauguucaucacuucugugug

SEQ ID NO: 4821 - RNA, 22 nt, Artificial Sequence
  Guide RNA
ccuccauguucaucacuucugu

SEQ ID NO: 4822 - RNA, 22 nt, Artificial Sequence
  Guide RNA
cgcacacagaagugaugaacau

SEQ ID NO: 4823 - RNA, 22 nt, Artificial Sequence
  Guide RNA
cuccauguucaucacuucugug

SEQ ID NO: 4824 - RNA, 22 nt, Artificial Sequence
  Guide RNA
cuccuccauguucaucacuucu

SEQ ID NO: 4825 - RNA, 22 nt, Artificial Sequence
  Guide RNA
cuucugugugcgugcccaaaau

SEQ ID NO: 4826 - RNA, 22 nt, Artificial Sequence
  Guide RNA
gacuccuccauguucaucacuu

SEQ ID NO: 4827 - RNA, 22 nt, Artificial Sequence
  Guide RNA
gcacacagaagugaugaacaug

SEQ ID NO: 4828 - RNA, 22 nt, Artificial Sequence
  Guide RNA
gcacgcacacagaagugaugaa

SEQ ID NO: 4829 - RNA, 22 nt, Artificial Sequence
  Guide RNA
ggacuccuccauguucaucacu

SEQ ID NO: 4830 - RNA, 22 nt, Artificial Sequence
  Guide RNA
ggcacgcacacagaagugauga

SEQ ID NO: 4831 - RNA, 22 nt, Artificial Sequence
  Guide RNA
gggcacgcacacagaagugaug

SEQ ID NO: 4832 - RNA, 22 nt, Artificial Sequence
  Guide RNA
guggacuccuccauguucauca

SEQ ID NO: 4833 - RNA, 22 nt, Artificial Sequence
  Guide RNA
guucaacauuuugggcacgcac

SEQ ID NO: 4834 - RNA, 22 nt, Artificial Sequence
  Guide RNA
guucaucacuucugugugcgug

SEQ ID NO: 4835 - RNA, 22 nt, Artificial Sequence
  Guide RNA
ucaacauuuugggcacgcacac

SEQ ID NO: 4836 - RNA, 22 nt, Artificial Sequence
  Guide RNA
ucacuucugugugcgugcccaa

SEQ ID NO: 4837 - RNA, 22 nt, Artificial Sequence
  Guide RNA
ucaucacuucugugugcgugcc

SEQ ID NO: 4838 - RNA, 22 nt, Artificial Sequence
  Guide RNA
uccauguucaucacuucugugu

SEQ ID NO: 4839 - RNA, 22 nt, Artificial Sequence
  Guide RNA
uccuccauguucaucacuucug

SEQ ID NO: 4840 - RNA, 22 nt, Artificial Sequence
  Guide RNA
ucugugugcgugcccaaaaugu

SEQ ID NO: 4841 - RNA, 22 nt, Artificial Sequence
  Guide RNA
uggacuccuccauguucaucac

SEQ ID NO: 4842 - RNA, 22 nt, Artificial Sequence
  Guide RNA
ugggcacgcacacagaagugau

SEQ ID NO: 4843 - RNA, 22 nt, Artificial Sequence
  Guide RNA
uguucaucacuucugugugcgu

SEQ ID NO: 4844 - RNA, 22 nt, Artificial Sequence
  Guide RNA
uucaacauuuugggcacgcaca

SEQ ID NO: 4845 - RNA, 22 nt, Artificial Sequence
  Guide RNA
uucaucacuucugugugcgugc

SEQ ID NO: 4846 - RNA, 22 nt, Artificial Sequence
  Guide RNA
uucugugugcgugcccaaaaug

SEQ ID NO: 4847 - RNA, 22 nt, Artificial Sequence
  Guide RNA
uugggcacgcacacagaaguga

SEQ ID NO: 4848 - RNA, 22 nt, Artificial Sequence
  Guide RNA
uuugggcacgcacacagaagug

SEQ ID NO: 4849 - RNA, 22 nt, Artificial Sequence
  Guide RNA
uuuugggcacgcacacagaagu

SEQ ID NO: 4850 - RNA, 20 nt, Artificial Sequence
  Guide RNA
acaagugaugaacauggagg

SEQ ID NO: 4851 - RNA, 20 nt, Artificial Sequence
  Guide RNA
acacaagugaugaacaugga

SEQ ID NO: 4852 - RNA, 20 nt, Artificial Sequence
  Guide RNA
acacacaagugaugaacaug

SEQ ID NO: 4853 - RNA, 20 nt, Artificial Sequence
  Guide RNA
acgcacacacaagugaugaa

SEQ ID NO: 4854 - RNA, 20 nt, Artificial Sequence
  Guide RNA
acuugugugugcgugcccaa

SEQ ID NO: 4855 - RNA, 20 nt, Artificial Sequence
  Guide RNA
aucacuugugugugcgugcc

SEQ ID NO: 4856 - RNA, 20 nt, Artificial Sequence
  Guide RNA
auguucaucacuugugugug

SEQ ID NO: 4857 - RNA, 20 nt, Artificial Sequence
  Guide RNA
auuuugggcacgcacacaca

SEQ ID NO: 4858 - RNA, 20 nt, Artificial Sequence
  Guide RNA
cacaagugaugaacauggag

SEQ ID NO: 4859 - RNA, 20 nt, Artificial Sequence
  Guide RNA
cacacaagugaugaacaugg

SEQ ID NO: 4860 - RNA, 20 nt, Artificial Sequence
  Guide RNA
cacacacaagugaugaacau

SEQ ID NO: 4861 - RNA, 20 nt, Artificial Sequence
  Guide RNA
cacgcacacacaagugauga

SEQ ID NO: 4862 - RNA, 20 nt, Artificial Sequence
  Guide RNA
cacuugugugugcgugccca

SEQ ID NO: 4863 - RNA, 20 nt, Artificial Sequence
  Guide RNA
caucacuugugugugcgugc

SEQ ID NO: 4864 - RNA, 20 nt, Artificial Sequence
  Guide RNA
cauguucaucacuugugugu

SEQ ID NO: 4865 - RNA, 20 nt, Artificial Sequence
  Guide RNA
cauuuugggcacgcacacac

SEQ ID NO: 4866 - RNA, 20 nt, Artificial Sequence
  Guide RNA
ccauguucaucacuugugug

SEQ ID NO: 4867 - RNA, 20 nt, Artificial Sequence
  Guide RNA
ccuccauguucaucacuugu

SEQ ID NO: 4868 - RNA, 20 nt, Artificial Sequence
  Guide RNA
cgcacacacaagugaugaac

SEQ ID NO: 4869 - RNA, 20 nt, Artificial Sequence
  Guide RNA
cuccauguucaucacuugug

SEQ ID NO: 4870 - RNA, 20 nt, Artificial Sequence
  Guide RNA
cuugugugugcgugcccaaa

SEQ ID NO: 4871 - RNA, 20 nt, Artificial Sequence
  Guide RNA
gcacacacaagugaugaaca

SEQ ID NO: 4872 - RNA, 20 nt, Artificial Sequence
  Guide RNA
gcacgcacacacaagugaug

SEQ ID NO: 4873 - RNA, 20 nt, Artificial Sequence
  Guide RNA
ggcacgcacacacaagugau

SEQ ID NO: 4874 - RNA, 20 nt, Artificial Sequence
  Guide RNA
gggcacgcacacacaaguga

SEQ ID NO: 4875 - RNA, 20 nt, Artificial Sequence
  Guide RNA
guucaucacuugugugugcg

SEQ ID NO: 4876 - RNA, 20 nt, Artificial Sequence
  Guide RNA
ucacuugugugugcgugccc

SEQ ID NO: 4877 - RNA, 20 nt, Artificial Sequence
  Guide RNA
ucaucacuugugugugcgug

SEQ ID NO: 4878 - RNA, 20 nt, Artificial Sequence
  Guide RNA
uccauguucaucacuugugu

SEQ ID NO: 4879 - RNA, 20 nt, Artificial Sequence
  Guide RNA
uccuccauguucaucacuug

SEQ ID NO: 4880 - RNA, 20 nt, Artificial Sequence
  Guide RNA
ugggcacgcacacacaagug

SEQ ID NO: 4881 - RNA, 20 nt, Artificial Sequence
  Guide RNA
ugugugugcgugcccaaaau

SEQ ID NO: 4882 - RNA, 20 nt, Artificial Sequence
  Guide RNA
uguucaucacuugugugugc

SEQ ID NO: 4883 - RNA, 20 nt, Artificial Sequence
  Guide RNA
uucaucacuugugugugcgu

SEQ ID NO: 4884 - RNA, 20 nt, Artificial Sequence
  Guide RNA
uugggcacgcacacacaagu

SEQ ID NO: 4885 - RNA, 20 nt, Artificial Sequence
  Guide RNA
uugugugugcgugcccaaaa

SEQ ID NO: 4886 - RNA, 20 nt, Artificial Sequence
  Guide RNA
uuugggcacgcacacacaag

SEQ ID NO: 4887 - RNA, 20 nt, Artificial Sequence
  Guide RNA
uuuugggcacgcacacacaa

SEQ ID NO: 4888 - RNA, 21 nt, Artificial Sequence
  Guide RNA
acaagugaugaacauggagga

SEQ ID NO: 4889 - RNA, 21 nt, Artificial Sequence
  Guide RNA
acacaagugaugaacauggag

SEQ ID NO: 4890 - RNA, 21 nt, Artificial Sequence
  Guide RNA
acacacaagugaugaacaugg

SEQ ID NO: 4891 - RNA, 21 nt, Artificial Sequence
  Guide RNA
acauuuugggcacgcacacac

SEQ ID NO: 4892 - RNA, 21 nt, Artificial Sequence
  Guide RNA
acgcacacacaagugaugaac

SEQ ID NO: 4893 - RNA, 21 nt, Artificial Sequence
  Guide RNA
acuugugugugcgugcccaaa

SEQ ID NO: 4894 - RNA, 21 nt, Artificial Sequence
  Guide RNA
aucacuugugugugcgugccc

SEQ ID NO: 4895 - RNA, 21 nt, Artificial Sequence
  Guide RNA
auguucaucacuugugugugc

SEQ ID NO: 4896 - RNA, 21 nt, Artificial Sequence
  Guide RNA
auuuugggcacgcacacacaa

SEQ ID NO: 4897 - RNA, 21 nt, Artificial Sequence
  Guide RNA
cacaagugaugaacauggagg

SEQ ID NO: 4898 - RNA, 21 nt, Artificial Sequence
  Guide RNA
cacacaagugaugaacaugga

SEQ ID NO: 4899 - RNA, 21 nt, Artificial Sequence
  Guide RNA
cacacacaagugaugaacaug

SEQ ID NO: 4900 - RNA, 21 nt, Artificial Sequence
  Guide RNA
cacgcacacacaagugaugaa

SEQ ID NO: 4901 - RNA, 21 nt, Artificial Sequence
  Guide RNA
cacuugugugugcgugcccaa

SEQ ID NO: 4902 - RNA, 21 nt, Artificial Sequence
  Guide RNA
caucacuugugugugcgugcc

SEQ ID NO: 4903 - RNA, 21 nt, Artificial Sequence
  Guide RNA
cauguucaucacuugugugug

SEQ ID NO: 4904 - RNA, 21 nt, Artificial Sequence
  Guide RNA
cauuuugggcacgcacacaca

SEQ ID NO: 4905 - RNA, 21 nt, Artificial Sequence
  Guide RNA
ccauguucaucacuugugugu

SEQ ID NO: 4906 - RNA, 21 nt, Artificial Sequence
  Guide RNA
ccuccauguucaucacuugug

SEQ ID NO: 4907 - RNA, 21 nt, Artificial Sequence
  Guide RNA
cgcacacacaagugaugaaca

SEQ ID NO: 4908 - RNA, 21 nt, Artificial Sequence
  Guide RNA
cuccauguucaucacuugugu

SEQ ID NO: 4909 - RNA, 21 nt, Artificial Sequence
  Guide RNA
cuccuccauguucaucacuug

SEQ ID NO: 4910 - RNA, 21 nt, Artificial Sequence
  Guide RNA
cuugugugugcgugcccaaaa

SEQ ID NO: 4911 - RNA, 21 nt, Artificial Sequence
  Guide RNA
gcacacacaagugaugaacau

SEQ ID NO: 4912 - RNA, 21 nt, Artificial Sequence
  Guide RNA
gcacgcacacacaagugauga

SEQ ID NO: 4913 - RNA, 21 nt, Artificial Sequence
  Guide RNA
ggcacgcacacacaagugaug

SEQ ID NO: 4914 - RNA, 21 nt, Artificial Sequence
  Guide RNA
gggcacgcacacacaagugau

SEQ ID NO: 4915 - RNA, 21 nt, Artificial Sequence
  Guide RNA
guucaucacuugugugugcgu

SEQ ID NO: 4916 - RNA, 21 nt, Artificial Sequence
  Guide RNA
ucacuugugugugcgugccca

SEQ ID NO: 4917 - RNA, 21 nt, Artificial Sequence
  Guide RNA
ucaucacuugugugugcgugc

SEQ ID NO: 4918 - RNA, 21 nt, Artificial Sequence
  Guide RNA
uccauguucaucacuugugug

SEQ ID NO: 4919 - RNA, 21 nt, Artificial Sequence
  Guide RNA
uccuccauguucaucacuugu

SEQ ID NO: 4920 - RNA, 21 nt, Artificial Sequence
  Guide RNA
ugggcacgcacacacaaguga

SEQ ID NO: 4921 - RNA, 21 nt, Artificial Sequence
  Guide RNA
ugugugugcgugcccaaaaug

SEQ ID NO: 4922 - RNA, 21 nt, Artificial Sequence
  Guide RNA
uguucaucacuugugugugcg

SEQ ID NO: 4923 - RNA, 21 nt, Artificial Sequence
  Guide RNA
uucaucacuugugugugcgug

SEQ ID NO: 4924 - RNA, 21 nt, Artificial Sequence
  Guide RNA
uugggcacgcacacacaagug

SEQ ID NO: 4925 - RNA, 21 nt, Artificial Sequence
  Guide RNA
uugugugugcgugcccaaaau

SEQ ID NO: 4926 - RNA, 21 nt, Artificial Sequence
  Guide RNA
uuugggcacgcacacacaagu

SEQ ID NO: 4927 - RNA, 21 nt, Artificial Sequence
  Guide RNA
uuuugggcacgcacacacaag

SEQ ID NO: 4928 - RNA, 22 nt, Artificial Sequence
  Guide RNA
aacauuuugggcacgcacacac

SEQ ID NO: 4929 - RNA, 22 nt, Artificial Sequence
  Guide RNA
acaagugaugaacauggaggag

SEQ ID NO: 4930 - RNA, 22 nt, Artificial Sequence
  Guide RNA
acacaagugaugaacauggagg

SEQ ID NO: 4931 - RNA, 22 nt, Artificial Sequence
  Guide RNA
acacacaagugaugaacaugga

SEQ ID NO: 4932 - RNA, 22 nt, Artificial Sequence
  Guide RNA
acauuuugggcacgcacacaca

SEQ ID NO: 4933 - RNA, 22 nt, Artificial Sequence
  Guide RNA
acgcacacacaagugaugaaca

SEQ ID NO: 4934 - RNA, 22 nt, Artificial Sequence
  Guide RNA
acuccuccauguucaucacuug

SEQ ID NO: 4935 - RNA, 22 nt, Artificial Sequence
  Guide RNA
acuugugugugcgugcccaaaa

SEQ ID NO: 4936 - RNA, 22 nt, Artificial Sequence
  Guide RNA
aucacuugugugugcgugccca

SEQ ID NO: 4937 - RNA, 22 nt, Artificial Sequence
  Guide RNA
auguucaucacuugugugugcg

SEQ ID NO: 4938 - RNA, 22 nt, Artificial Sequence
  Guide RNA
auuuugggcacgcacacacaag

SEQ ID NO: 4939 - RNA, 22 nt, Artificial Sequence
  Guide RNA
cacaagugaugaacauggagga

SEQ ID NO: 4940 - RNA, 22 nt, Artificial Sequence
  Guide RNA
cacacaagugaugaacauggag

SEQ ID NO: 4941 - RNA, 22 nt, Artificial Sequence
  Guide RNA
cacacacaagugaugaacaugg

SEQ ID NO: 4942 - RNA, 22 nt, Artificial Sequence
  Guide RNA
cacgcacacacaagugaugaac

SEQ ID NO: 4943 - RNA, 22 nt, Artificial Sequence
  Guide RNA
cacuugugugugcgugcccaaa

SEQ ID NO: 4944 - RNA, 22 nt, Artificial Sequence
  Guide RNA
caucacuugugugugcgugccc

SEQ ID NO: 4945 - RNA, 22 nt, Artificial Sequence
  Guide RNA
cauguucaucacuugugugugc

SEQ ID NO: 4946 - RNA, 22 nt, Artificial Sequence
  Guide RNA
cauuuugggcacgcacacacaa

SEQ ID NO: 4947 - RNA, 22 nt, Artificial Sequence
  Guide RNA
ccauguucaucacuugugugug

SEQ ID NO: 4948 - RNA, 22 nt, Artificial Sequence
  Guide RNA
ccuccauguucaucacuugugu

SEQ ID NO: 4949 - RNA, 22 nt, Artificial Sequence
  Guide RNA
cgcacacacaagugaugaacau

SEQ ID NO: 4950 - RNA, 22 nt, Artificial Sequence
  Guide RNA
cuccauguucaucacuugugug

SEQ ID NO: 4951 - RNA, 22 nt, Artificial Sequence
  Guide RNA
cuccuccauguucaucacuugu

SEQ ID NO: 4952 - RNA, 22 nt, Artificial Sequence
  Guide RNA
cuugugugugcgugcccaaaau

SEQ ID NO: 4953 - RNA, 22 nt, Artificial Sequence
  Guide RNA
gcacacacaagugaugaacaug

SEQ ID NO: 4954 - RNA, 22 nt, Artificial Sequence
  Guide RNA
gcacgcacacacaagugaugaa

SEQ ID NO: 4955 - RNA, 22 nt, Artificial Sequence
  Guide RNA
ggcacgcacacacaagugauga

SEQ ID NO: 4956 - RNA, 22 nt, Artificial Sequence
  Guide RNA
gggcacgcacacacaagugaug

SEQ ID NO: 4957 - RNA, 22 nt, Artificial Sequence
  Guide RNA
guucaucacuugugugugcgug

SEQ ID NO: 4958 - RNA, 22 nt, Artificial Sequence
  Guide RNA
ucacuugugugugcgugcccaa

SEQ ID NO: 4959 - RNA, 22 nt, Artificial Sequence
  Guide RNA
ucaucacuugugugugcgugcc

SEQ ID NO: 4960 - RNA, 22 nt, Artificial Sequence
  Guide RNA
uccauguucaucacuugugugu

SEQ ID NO: 4961 - RNA, 22 nt, Artificial Sequence
  Guide RNA
uccuccauguucaucacuugug

SEQ ID NO: 4962 - RNA, 22 nt, Artificial Sequence
  Guide RNA
ugggcacgcacacacaagugau

SEQ ID NO: 4963 - RNA, 22 nt, Artificial Sequence
  Guide RNA
ugugugugcgugcccaaaaugu

SEQ ID NO: 4964 - RNA, 22 nt, Artificial Sequence
  Guide RNA
uguucaucacuugugugugcgu

SEQ ID NO: 4965 - RNA, 22 nt, Artificial Sequence
  Guide RNA
uucaucacuugugugugcgugc

SEQ ID NO: 4966 - RNA, 22 nt, Artificial Sequence
  Guide RNA
uugggcacgcacacacaaguga

SEQ ID NO: 4967 - RNA, 22 nt, Artificial Sequence
  Guide RNA
uugugugugcgugcccaaaaug

SEQ ID NO: 4968 - RNA, 22 nt, Artificial Sequence
  Guide RNA
uuugggcacgcacacacaagug

SEQ ID NO: 4969 - RNA, 22 nt, Artificial Sequence
  Guide RNA
uuuugggcacgcacacacaagu

SEQ ID NO: 4970 - RNA, 20 nt, Artificial Sequence
  Guide RNA
aacauuuugggcaugcacac

SEQ ID NO: 4971 - RNA, 20 nt, Artificial Sequence
  Guide RNA
aaguucaacauuuugggcau

SEQ ID NO: 4972 - RNA, 20 nt, Artificial Sequence
  Guide RNA
acauuuugggcaugcacaca

SEQ ID NO: 4973 - RNA, 20 nt, Artificial Sequence
  Guide RNA
acuuuugugugcaugcccaa

SEQ ID NO: 4974 - RNA, 20 nt, Artificial Sequence
  Guide RNA
aggaaguucaacauuuuggg

SEQ ID NO: 4975 - RNA, 20 nt, Artificial Sequence
  Guide RNA
aguucaacauuuugggcaug

SEQ ID NO: 4976 - RNA, 20 nt, Artificial Sequence
  Guide RNA
aucacuuuugugugcaugcc

SEQ ID NO: 4977 - RNA, 20 nt, Artificial Sequence
  Guide RNA
augcacacaaaagugaugaa

SEQ ID NO: 4978 - RNA, 20 nt, Artificial Sequence
  Guide RNA
auguucaucacuuuugugug

SEQ ID NO: 4979 - RNA, 20 nt, Artificial Sequence
  Guide RNA
auuuugggcaugcacacaaa

SEQ ID NO: 4980 - RNA, 20 nt, Artificial Sequence
  Guide RNA
caacauuuugggcaugcaca

SEQ ID NO: 4981 - RNA, 20 nt, Artificial Sequence
  Guide RNA
cacuuuugugugcaugccca

SEQ ID NO: 4982 - RNA, 20 nt, Artificial Sequence
  Guide RNA
caucacuuuugugugcaugc

SEQ ID NO: 4983 - RNA, 20 nt, Artificial Sequence
  Guide RNA
caugcacacaaaagugauga

SEQ ID NO: 4984 - RNA, 20 nt, Artificial Sequence
  Guide RNA
caugcccaaaauguugaacu

SEQ ID NO: 4985 - RNA, 20 nt, Artificial Sequence
  Guide RNA
cauguucaucacuuuugugu

SEQ ID NO: 4986 - RNA, 20 nt, Artificial Sequence
  Guide RNA
cauuuugggcaugcacacaa

SEQ ID NO: 4987 - RNA, 20 nt, Artificial Sequence
  Guide RNA
ccauguucaucacuuuugug

SEQ ID NO: 4988 - RNA, 20 nt, Artificial Sequence
  Guide RNA
cuuuugugugcaugcccaaa

SEQ ID NO: 4989 - RNA, 20 nt, Artificial Sequence
  Guide RNA
gaaguucaacauuuugggca

SEQ ID NO: 4990 - RNA, 20 nt, Artificial Sequence
  Guide RNA
gcaugcacacaaaagugaug

SEQ ID NO: 4991 - RNA, 20 nt, Artificial Sequence
  Guide RNA
gcaugcccaaaauguugaac

SEQ ID NO: 4992 - RNA, 20 nt, Artificial Sequence
  Guide RNA
ggaaguucaacauuuugggc

SEQ ID NO: 4993 - RNA, 20 nt, Artificial Sequence
  Guide RNA
ggcaugcacacaaaagugau

SEQ ID NO: 4994 - RNA, 20 nt, Artificial Sequence
  Guide RNA
gggcaugcacacaaaaguga

SEQ ID NO: 4995 - RNA, 20 nt, Artificial Sequence
  Guide RNA
gugcaugcccaaaauguuga

SEQ ID NO: 4996 - RNA, 20 nt, Artificial Sequence
  Guide RNA
gugugcaugcccaaaauguu

SEQ ID NO: 4997 - RNA, 20 nt, Artificial Sequence
  Guide RNA
guucaacauuuugggcaugc

SEQ ID NO: 4998 - RNA, 20 nt, Artificial Sequence
  Guide RNA
guucaucacuuuugugugca

SEQ ID NO: 4999 - RNA, 20 nt, Artificial Sequence
  Guide RNA
uaggaaguucaacauuuugg

SEQ ID NO: 5000 - RNA, 20 nt, Artificial Sequence
  Guide RNA
ucaacauuuugggcaugcac

SEQ ID NO: 5001 - RNA, 20 nt, Artificial Sequence
  Guide RNA
ucacuuuugugugcaugccc

SEQ ID NO: 5002 - RNA, 20 nt, Artificial Sequence
  Guide RNA
ucaucacuuuugugugcaug

SEQ ID NO: 5003 - RNA, 20 nt, Artificial Sequence
  Guide RNA
ugcaugcccaaaauguugaa

SEQ ID NO: 5004 - RNA, 20 nt, Artificial Sequence
  Guide RNA
ugggcaugcacacaaaagug

SEQ ID NO: 5005 - RNA, 20 nt, Artificial Sequence
  Guide RNA
ugugcaugcccaaaauguug

SEQ ID NO: 5006 - RNA, 20 nt, Artificial Sequence
  Guide RNA
ugugugcaugcccaaaaugu

SEQ ID NO: 5007 - RNA, 20 nt, Artificial Sequence
  Guide RNA
uguucaucacuuuugugugc

SEQ ID NO: 5008 - RNA, 20 nt, Artificial Sequence
  Guide RNA
uucaacauuuugggcaugca

SEQ ID NO: 5009 - RNA, 20 nt, Artificial Sequence
  Guide RNA
uucaucacuuuugugugcau

SEQ ID NO: 5010 - RNA, 20 nt, Artificial Sequence
  Guide RNA
uugggcaugcacacaaaagu

SEQ ID NO: 5011 - RNA, 20 nt, Artificial Sequence
  Guide RNA
uugugugcaugcccaaaaug

SEQ ID NO: 5012 - RNA, 20 nt, Artificial Sequence
  Guide RNA
uuugggcaugcacacaaaag

SEQ ID NO: 5013 - RNA, 20 nt, Artificial Sequence
  Guide RNA
uuugugugcaugcccaaaau

SEQ ID NO: 5014 - RNA, 20 nt, Artificial Sequence
  Guide RNA
uuuugggcaugcacacaaaa

SEQ ID NO: 5015 - RNA, 20 nt, Artificial Sequence
  Guide RNA
uuuugugugcaugcccaaaa

SEQ ID NO: 5016 - RNA, 21 nt, Artificial Sequence
  Guide RNA
aacauuuugggcaugcacaca

SEQ ID NO: 5017 - RNA, 21 nt, Artificial Sequence
  Guide RNA
aaguucaacauuuugggcaug

SEQ ID NO: 5018 - RNA, 21 nt, Artificial Sequence
  Guide RNA
acauuuugggcaugcacacaa

SEQ ID NO: 5019 - RNA, 21 nt, Artificial Sequence
  Guide RNA
acuuuugugugcaugcccaaa

SEQ ID NO: 5020 - RNA, 21 nt, Artificial Sequence
  Guide RNA
aggaaguucaacauuuugggc

SEQ ID NO: 5021 - RNA, 21 nt, Artificial Sequence
  Guide RNA
aguucaacauuuugggcaugc

SEQ ID NO: 5022 - RNA, 21 nt, Artificial Sequence
  Guide RNA
aucacuuuugugugcaugccc

SEQ ID NO: 5023 - RNA, 21 nt, Artificial Sequence
  Guide RNA
augcacacaaaagugaugaac

SEQ ID NO: 5024 - RNA, 21 nt, Artificial Sequence
  Guide RNA
auguucaucacuuuugugugc

SEQ ID NO: 5025 - RNA, 21 nt, Artificial Sequence
  Guide RNA
auuuugggcaugcacacaaaa

SEQ ID NO: 5026 - RNA, 21 nt, Artificial Sequence
  Guide RNA
caacauuuugggcaugcacac

SEQ ID NO: 5027 - RNA, 21 nt, Artificial Sequence
  Guide RNA
cacuuuugugugcaugcccaa

SEQ ID NO: 5028 - RNA, 21 nt, Artificial Sequence
  Guide RNA
caucacuuuugugugcaugcc

SEQ ID NO: 5029 - RNA, 21 nt, Artificial Sequence
  Guide RNA
caugcacacaaaagugaugaa

SEQ ID NO: 5030 - RNA, 21 nt, Artificial Sequence
  Guide RNA
caugcccaaaauguugaacuu

SEQ ID NO: 5031 - RNA, 21 nt, Artificial Sequence
  Guide RNA
cauguucaucacuuuugugug

SEQ ID NO: 5032 - RNA, 21 nt, Artificial Sequence
  Guide RNA
cauuuugggcaugcacacaaa

SEQ ID NO: 5033 - RNA, 21 nt, Artificial Sequence
  Guide RNA
ccauguucaucacuuuugugu

SEQ ID NO: 5034 - RNA, 21 nt, Artificial Sequence
  Guide RNA
cuuuugugugcaugcccaaaa

SEQ ID NO: 5035 - RNA, 21 nt, Artificial Sequence
  Guide RNA
gaaguucaacauuuugggcau

SEQ ID NO: 5036 - RNA, 21 nt, Artificial Sequence
  Guide RNA
gcaugcacacaaaagugauga

SEQ ID NO: 5037 - RNA, 21 nt, Artificial Sequence
  Guide RNA
gcaugcccaaaauguugaacu

SEQ ID NO: 5038 - RNA, 21 nt, Artificial Sequence
  Guide RNA
ggaaguucaacauuuugggca

SEQ ID NO: 5039 - RNA, 21 nt, Artificial Sequence
  Guide RNA
ggcaugcacacaaaagugaug

SEQ ID NO: 5040 - RNA, 21 nt, Artificial Sequence
  Guide RNA
gggcaugcacacaaaagugau

SEQ ID NO: 5041 - RNA, 21 nt, Artificial Sequence
  Guide RNA
gugcaugcccaaaauguugaa

SEQ ID NO: 5042 - RNA, 21 nt, Artificial Sequence
  Guide RNA
gugugcaugcccaaaauguug

SEQ ID NO: 5043 - RNA, 21 nt, Artificial Sequence
  Guide RNA
guucaacauuuugggcaugca

SEQ ID NO: 5044 - RNA, 21 nt, Artificial Sequence
  Guide RNA
guucaucacuuuugugugcau

SEQ ID NO: 5045 - RNA, 21 nt, Artificial Sequence
  Guide RNA
uaggaaguucaacauuuuggg

SEQ ID NO: 5046 - RNA, 21 nt, Artificial Sequence
  Guide RNA
ucaacauuuugggcaugcaca

SEQ ID NO: 5047 - RNA, 21 nt, Artificial Sequence
  Guide RNA
ucacuuuugugugcaugccca

SEQ ID NO: 5048 - RNA, 21 nt, Artificial Sequence
  Guide RNA
ucaucacuuuugugugcaugc

SEQ ID NO: 5049 - RNA, 21 nt, Artificial Sequence
  Guide RNA
uccauguucaucacuuuugug

SEQ ID NO: 5050 - RNA, 21 nt, Artificial Sequence
  Guide RNA
ugcaugcccaaaauguugaac

SEQ ID NO: 5051 - RNA, 21 nt, Artificial Sequence
  Guide RNA
ugggcaugcacacaaaaguga

SEQ ID NO: 5052 - RNA, 21 nt, Artificial Sequence
  Guide RNA
ugugcaugcccaaaauguuga

SEQ ID NO: 5053 - RNA, 21 nt, Artificial Sequence
  Guide RNA
ugugugcaugcccaaaauguu

SEQ ID NO: 5054 - RNA, 21 nt, Artificial Sequence
  Guide RNA
uguucaucacuuuugugugca

SEQ ID NO: 5055 - RNA, 21 nt, Artificial Sequence
  Guide RNA
uuaggaaguucaacauuuugg

SEQ ID NO: 5056 - RNA, 21 nt, Artificial Sequence
  Guide RNA
uucaacauuuugggcaugcac

SEQ ID NO: 5057 - RNA, 21 nt, Artificial Sequence
  Guide RNA
uucaucacuuuugugugcaug

SEQ ID NO: 5058 - RNA, 21 nt, Artificial Sequence
  Guide RNA
uugggcaugcacacaaaagug

SEQ ID NO: 5059 - RNA, 21 nt, Artificial Sequence
  Guide RNA
uugugugcaugcccaaaaugu

SEQ ID NO: 5060 - RNA, 21 nt, Artificial Sequence
  Guide RNA
uuugggcaugcacacaaaagu

SEQ ID NO: 5061 - RNA, 21 nt, Artificial Sequence
  Guide RNA
uuugugugcaugcccaaaaug

SEQ ID NO: 5062 - RNA, 21 nt, Artificial Sequence
  Guide RNA
uuuugggcaugcacacaaaag

SEQ ID NO: 5063 - RNA, 21 nt, Artificial Sequence
  Guide RNA
uuuugugugcaugcccaaaau

SEQ ID NO: 5064 - RNA, 22 nt, Artificial Sequence
  Guide RNA
aacauuuugggcaugcacacaa

SEQ ID NO: 5065 - RNA, 22 nt, Artificial Sequence
  Guide RNA
aaguucaacauuuugggcaugc

SEQ ID NO: 5066 - RNA, 22 nt, Artificial Sequence
  Guide RNA
acauuuugggcaugcacacaaa

SEQ ID NO: 5067 - RNA, 22 nt, Artificial Sequence
  Guide RNA
acuuuugugugcaugcccaaaa

SEQ ID NO: 5068 - RNA, 22 nt, Artificial Sequence
  Guide RNA
aggaaguucaacauuuugggca

SEQ ID NO: 5069 - RNA, 22 nt, Artificial Sequence
  Guide RNA
aguucaacauuuugggcaugca

SEQ ID NO: 5070 - RNA, 22 nt, Artificial Sequence
  Guide RNA
aucacuuuugugugcaugccca

SEQ ID NO: 5071 - RNA, 22 nt, Artificial Sequence
  Guide RNA
augcacacaaaagugaugaaca

SEQ ID NO: 5072 - RNA, 22 nt, Artificial Sequence
  Guide RNA
auguucaucacuuuugugugca

SEQ ID NO: 5073 - RNA, 22 nt, Artificial Sequence
  Guide RNA
auuuugggcaugcacacaaaag

SEQ ID NO: 5074 - RNA, 22 nt, Artificial Sequence
  Guide RNA
caacauuuugggcaugcacaca

SEQ ID NO: 5075 - RNA, 22 nt, Artificial Sequence
  Guide RNA
cacuuuugugugcaugcccaaa

SEQ ID NO: 5076 - RNA, 22 nt, Artificial Sequence
  Guide RNA
caucacuuuugugugcaugccc

SEQ ID NO: 5077 - RNA, 22 nt, Artificial Sequence
  Guide RNA
caugcacacaaaagugaugaac

SEQ ID NO: 5078 - RNA, 22 nt, Artificial Sequence
  Guide RNA
caugcccaaaauguugaacuuc

SEQ ID NO: 5079 - RNA, 22 nt, Artificial Sequence
  Guide RNA
cauguucaucacuuuugugugc

SEQ ID NO: 5080 - RNA, 22 nt, Artificial Sequence
  Guide RNA
cauuuugggcaugcacacaaaa

SEQ ID NO: 5081 - RNA, 22 nt, Artificial Sequence
  Guide RNA
ccauguucaucacuuuugugug

SEQ ID NO: 5082 - RNA, 22 nt, Artificial Sequence
  Guide RNA
cuccauguucaucacuuuugug

SEQ ID NO: 5083 - RNA, 22 nt, Artificial Sequence
  Guide RNA
cuuuugugugcaugcccaaaau

SEQ ID NO: 5084 - RNA, 22 nt, Artificial Sequence
  Guide RNA
gaaguucaacauuuugggcaug

SEQ ID NO: 5085 - RNA, 22 nt, Artificial Sequence
  Guide RNA
gcaugcacacaaaagugaugaa

SEQ ID NO: 5086 - RNA, 22 nt, Artificial Sequence
  Guide RNA
gcaugcccaaaauguugaacuu

SEQ ID NO: 5087 - RNA, 22 nt, Artificial Sequence
  Guide RNA
ggaaguucaacauuuugggcau

SEQ ID NO: 5088 - RNA, 22 nt, Artificial Sequence
  Guide RNA
ggcaugcacacaaaagugauga

SEQ ID NO: 5089 - RNA, 22 nt, Artificial Sequence
  Guide RNA
gggcaugcacacaaaagugaug

SEQ ID NO: 5090 - RNA, 22 nt, Artificial Sequence
  Guide RNA
gugcaugcccaaaauguugaac

SEQ ID NO: 5091 - RNA, 22 nt, Artificial Sequence
  Guide RNA
gugugcaugcccaaaauguuga

SEQ ID NO: 5092 - RNA, 22 nt, Artificial Sequence
  Guide RNA
guucaacauuuugggcaugcac

SEQ ID NO: 5093 - RNA, 22 nt, Artificial Sequence
  Guide RNA
guucaucacuuuugugugcaug

SEQ ID NO: 5094 - RNA, 22 nt, Artificial Sequence
  Guide RNA
uaggaaguucaacauuuugggc

SEQ ID NO: 5095 - RNA, 22 nt, Artificial Sequence
  Guide RNA
ucaacauuuugggcaugcacac

SEQ ID NO: 5096 - RNA, 22 nt, Artificial Sequence
  Guide RNA
ucacuuuugugugcaugcccaa

SEQ ID NO: 5097 - RNA, 22 nt, Artificial Sequence
  Guide RNA
ucaucacuuuugugugcaugcc

SEQ ID NO: 5098 - RNA, 22 nt, Artificial Sequence
  Guide RNA
uccauguucaucacuuuugugu

SEQ ID NO: 5099 - RNA, 22 nt, Artificial Sequence
  Guide RNA
ugcaugcccaaaauguugaacu

SEQ ID NO: 5100 - RNA, 22 nt, Artificial Sequence
  Guide RNA
ugggcaugcacacaaaagugau

SEQ ID NO: 5101 - RNA, 22 nt, Artificial Sequence
  Guide RNA
ugugcaugcccaaaauguugaa

SEQ ID NO: 5102 - RNA, 22 nt, Artificial Sequence
  Guide RNA
ugugugcaugcccaaaauguug

SEQ ID NO: 5103 - RNA, 22 nt, Artificial Sequence
  Guide RNA
uguucaucacuuuugugugcau

SEQ ID NO: 5104 - RNA, 22 nt, Artificial Sequence
  Guide RNA
uuaggaaguucaacauuuuggg

SEQ ID NO: 5105 - RNA, 22 nt, Artificial Sequence
  Guide RNA
uucaacauuuugggcaugcaca

SEQ ID NO: 5106 - RNA, 22 nt, Artificial Sequence
  Guide RNA
uucaucacuuuugugugcaugc

SEQ ID NO: 5107 - RNA, 22 nt, Artificial Sequence
  Guide RNA
uugggcaugcacacaaaaguga

SEQ ID NO: 5108 - RNA, 22 nt, Artificial Sequence
  Guide RNA
uugugugcaugcccaaaauguu

SEQ ID NO: 5109 - RNA, 22 nt, Artificial Sequence
  Guide RNA
uuuaggaaguucaacauuuugg

SEQ ID NO: 5110 - RNA, 22 nt, Artificial Sequence
  Guide RNA
uuugggcaugcacacaaaagug

SEQ ID NO: 5111 - RNA, 22 nt, Artificial Sequence
  Guide RNA
uuugugugcaugcccaaaaugu

SEQ ID NO: 5112 - RNA, 22 nt, Artificial Sequence
  Guide RNA
uuuugggcaugcacacaaaagu

SEQ ID NO: 5113 - RNA, 22 nt, Artificial Sequence
  Guide RNA
uuuugugugcaugcccaaaaug

SEQ ID NO: 5114 - RNA, 20 nt, Artificial Sequence
  Guide RNA
aacauuuuggacacgcacac

SEQ ID NO: 5115 - RNA, 20 nt, Artificial Sequence
  Guide RNA
aaguucaacauuuuggacac

SEQ ID NO: 5116 - RNA, 20 nt, Artificial Sequence
  Guide RNA
acauuuuggacacgcacaca

SEQ ID NO: 5117 - RNA, 20 nt, Artificial Sequence
  Guide RNA
acuuuugugugcguguccaa

SEQ ID NO: 5118 - RNA, 20 nt, Artificial Sequence
  Guide RNA
aggaaguucaacauuuugga

SEQ ID NO: 5119 - RNA, 20 nt, Artificial Sequence
  Guide RNA
aguucaacauuuuggacacg

SEQ ID NO: 5120 - RNA, 20 nt, Artificial Sequence
  Guide RNA
aucacuuuugugugcguguc

SEQ ID NO: 5121 - RNA, 20 nt, Artificial Sequence
  Guide RNA
auuuuggacacgcacacaaa

SEQ ID NO: 5122 - RNA, 20 nt, Artificial Sequence
  Guide RNA
caacauuuuggacacgcaca

SEQ ID NO: 5123 - RNA, 20 nt, Artificial Sequence
  Guide RNA
cacuuuugugugcgugucca

SEQ ID NO: 5124 - RNA, 20 nt, Artificial Sequence
  Guide RNA
caucacuuuugugugcgugu

SEQ ID NO: 5125 - RNA, 20 nt, Artificial Sequence
  Guide RNA
cauuuuggacacgcacacaa

SEQ ID NO: 5126 - RNA, 20 nt, Artificial Sequence
  Guide RNA
cguguccaaaauguugaacu

SEQ ID NO: 5127 - RNA, 20 nt, Artificial Sequence
  Guide RNA
cuuuugugugcguguccaaa

SEQ ID NO: 5128 - RNA, 20 nt, Artificial Sequence
  Guide RNA
gaaguucaacauuuuggaca

SEQ ID NO: 5129 - RNA, 20 nt, Artificial Sequence
  Guide RNA
gacacgcacacaaaagugau

SEQ ID NO: 5130 - RNA, 20 nt, Artificial Sequence
  Guide RNA
gcguguccaaaauguugaac

SEQ ID NO: 5131 - RNA, 20 nt, Artificial Sequence
  Guide RNA
ggaaguucaacauuuuggac

SEQ ID NO: 5132 - RNA, 20 nt, Artificial Sequence
  Guide RNA
ggacacgcacacaaaaguga

SEQ ID NO: 5133 - RNA, 20 nt, Artificial Sequence
  Guide RNA
guccaaaauguugaacuucc

SEQ ID NO: 5134 - RNA, 20 nt, Artificial Sequence
  Guide RNA
gugcguguccaaaauguuga

SEQ ID NO: 5135 - RNA, 20 nt, Artificial Sequence
  Guide RNA
guguccaaaauguugaacuu

SEQ ID NO: 5136 - RNA, 20 nt, Artificial Sequence
  Guide RNA
gugugcguguccaaaauguu

SEQ ID NO: 5137 - RNA, 20 nt, Artificial Sequence
  Guide RNA
guucaacauuuuggacacgc

SEQ ID NO: 5138 - RNA, 20 nt, Artificial Sequence
  Guide RNA
guucaucacuuuugugugcg

SEQ ID NO: 5139 - RNA, 20 nt, Artificial Sequence
  Guide RNA
ucaacauuuuggacacgcac

SEQ ID NO: 5140 - RNA, 20 nt, Artificial Sequence
  Guide RNA
ucacuuuugugugcgugucc

SEQ ID NO: 5141 - RNA, 20 nt, Artificial Sequence
  Guide RNA
ucaucacuuuugugugcgug

SEQ ID NO: 5142 - RNA, 20 nt, Artificial Sequence
  Guide RNA
ugcguguccaaaauguugaa

SEQ ID NO: 5143 - RNA, 20 nt, Artificial Sequence
  Guide RNA
uggacacgcacacaaaagug

SEQ ID NO: 5144 - RNA, 20 nt, Artificial Sequence
  Guide RNA
uguccaaaauguugaacuuc

SEQ ID NO: 5145 - RNA, 20 nt, Artificial Sequence
  Guide RNA
ugugcguguccaaaauguug

SEQ ID NO: 5146 - RNA, 20 nt, Artificial Sequence
  Guide RNA
ugugugcguguccaaaaugu

SEQ ID NO: 5147 - RNA, 20 nt, Artificial Sequence
  Guide RNA
uuaggaaguucaacauuuug

SEQ ID NO: 5148 - RNA, 20 nt, Artificial Sequence
  Guide RNA
uucaacauuuuggacacgca

SEQ ID NO: 5149 - RNA, 20 nt, Artificial Sequence
  Guide RNA
uucaucacuuuugugugcgu

SEQ ID NO: 5150 - RNA, 20 nt, Artificial Sequence
  Guide RNA
uuggacacgcacacaaaagu

SEQ ID NO: 5151 - RNA, 20 nt, Artificial Sequence
  Guide RNA
uugugugcguguccaaaaug

SEQ ID NO: 5152 - RNA, 20 nt, Artificial Sequence
  Guide RNA
uuuggacacgcacacaaaag

SEQ ID NO: 5153 - RNA, 20 nt, Artificial Sequence
  Guide RNA
uuugugugcguguccaaaau

SEQ ID NO: 5154 - RNA, 20 nt, Artificial Sequence
  Guide RNA
uuuuggacacgcacacaaaa

SEQ ID NO: 5155 - RNA, 20 nt, Artificial Sequence
  Guide RNA
uuuugugugcguguccaaaa

SEQ ID NO: 5156 - RNA, 21 nt, Artificial Sequence
  Guide RNA
aacauuuuggacacgcacaca

SEQ ID NO: 5157 - RNA, 21 nt, Artificial Sequence
  Guide RNA
aaguucaacauuuuggacacg

SEQ ID NO: 5158 - RNA, 21 nt, Artificial Sequence
  Guide RNA
acauuuuggacacgcacacaa

SEQ ID NO: 5159 - RNA, 21 nt, Artificial Sequence
  Guide RNA
acuuuugugugcguguccaaa

SEQ ID NO: 5160 - RNA, 21 nt, Artificial Sequence
  Guide RNA
aggaaguucaacauuuuggac

SEQ ID NO: 5161 - RNA, 21 nt, Artificial Sequence
  Guide RNA
aguucaacauuuuggacacgc

SEQ ID NO: 5162 - RNA, 21 nt, Artificial Sequence
  Guide RNA
aucacuuuugugugcgugucc

SEQ ID NO: 5163 - RNA, 21 nt, Artificial Sequence
  Guide RNA
auuuuggacacgcacacaaaa

SEQ ID NO: 5164 - RNA, 21 nt, Artificial Sequence
  Guide RNA
caacauuuuggacacgcacac

SEQ ID NO: 5165 - RNA, 21 nt, Artificial Sequence
  Guide RNA
cacuuuugugugcguguccaa

SEQ ID NO: 5166 - RNA, 21 nt, Artificial Sequence
  Guide RNA
caucacuuuugugugcguguc

SEQ ID NO: 5167 - RNA, 21 nt, Artificial Sequence
  Guide RNA
cauuuuggacacgcacacaaa

SEQ ID NO: 5168 - RNA, 21 nt, Artificial Sequence
  Guide RNA
cguguccaaaauguugaacuu

SEQ ID NO: 5169 - RNA, 21 nt, Artificial Sequence
  Guide RNA
cuuuugugugcguguccaaaa

SEQ ID NO: 5170 - RNA, 21 nt, Artificial Sequence
  Guide RNA
gaaguucaacauuuuggacac

SEQ ID NO: 5171 - RNA, 21 nt, Artificial Sequence
  Guide RNA
gacacgcacacaaaagugaug

SEQ ID NO: 5172 - RNA, 21 nt, Artificial Sequence
  Guide RNA
gcguguccaaaauguugaacu

SEQ ID NO: 5173 - RNA, 21 nt, Artificial Sequence
  Guide RNA
ggaaguucaacauuuuggaca

SEQ ID NO: 5174 - RNA, 21 nt, Artificial Sequence
  Guide RNA
ggacacgcacacaaaagugau

SEQ ID NO: 5175 - RNA, 21 nt, Artificial Sequence
  Guide RNA
guccaaaauguugaacuuccu

SEQ ID NO: 5176 - RNA, 21 nt, Artificial Sequence
  Guide RNA
gugcguguccaaaauguugaa

SEQ ID NO: 5177 - RNA, 21 nt, Artificial Sequence
  Guide RNA
guguccaaaauguugaacuuc

SEQ ID NO: 5178 - RNA, 21 nt, Artificial Sequence
  Guide RNA
gugugcguguccaaaauguug

SEQ ID NO: 5179 - RNA, 21 nt, Artificial Sequence
  Guide RNA
guucaacauuuuggacacgca

SEQ ID NO: 5180 - RNA, 21 nt, Artificial Sequence
  Guide RNA
guucaucacuuuugugugcgu

SEQ ID NO: 5181 - RNA, 21 nt, Artificial Sequence
  Guide RNA
uaggaaguucaacauuuugga

SEQ ID NO: 5182 - RNA, 21 nt, Artificial Sequence
  Guide RNA
ucaacauuuuggacacgcaca

SEQ ID NO: 5183 - RNA, 21 nt, Artificial Sequence
  Guide RNA
ucacuuuugugugcgugucca

SEQ ID NO: 5184 - RNA, 21 nt, Artificial Sequence
  Guide RNA
ucaucacuuuugugugcgugu

SEQ ID NO: 5185 - RNA, 21 nt, Artificial Sequence
  Guide RNA
ugcguguccaaaauguugaac

SEQ ID NO: 5186 - RNA, 21 nt, Artificial Sequence
  Guide RNA
uggacacgcacacaaaaguga

SEQ ID NO: 5187 - RNA, 21 nt, Artificial Sequence
  Guide RNA
uguccaaaauguugaacuucc

SEQ ID NO: 5188 - RNA, 21 nt, Artificial Sequence
  Guide RNA
ugugcguguccaaaauguuga

SEQ ID NO: 5189 - RNA, 21 nt, Artificial Sequence
  Guide RNA
ugugugcguguccaaaauguu

SEQ ID NO: 5190 - RNA, 21 nt, Artificial Sequence
  Guide RNA
uguucaucacuuuugugugcg

SEQ ID NO: 5191 - RNA, 21 nt, Artificial Sequence
  Guide RNA
uucaacauuuuggacacgcac

SEQ ID NO: 5192 - RNA, 21 nt, Artificial Sequence
  Guide RNA
uucaucacuuuugugugcgug

SEQ ID NO: 5193 - RNA, 21 nt, Artificial Sequence
  Guide RNA
uuggacacgcacacaaaagug

SEQ ID NO: 5194 - RNA, 21 nt, Artificial Sequence
  Guide RNA
uugugugcguguccaaaaugu

SEQ ID NO: 5195 - RNA, 21 nt, Artificial Sequence
  Guide RNA
uuuggacacgcacacaaaagu

SEQ ID NO: 5196 - RNA, 21 nt, Artificial Sequence
  Guide RNA
uuugugugcguguccaaaaug

SEQ ID NO: 5197 - RNA, 21 nt, Artificial Sequence
  Guide RNA
uuuuggacacgcacacaaaag

SEQ ID NO: 5198 - RNA, 21 nt, Artificial Sequence
  Guide RNA
uuuugugugcguguccaaaau

SEQ ID NO: 5199 - RNA, 22 nt, Artificial Sequence
  Guide RNA
aacauuuuggacacgcacacaa

SEQ ID NO: 5200 - RNA, 22 nt, Artificial Sequence
  Guide RNA
aaguucaacauuuuggacacgc

SEQ ID NO: 5201 - RNA, 22 nt, Artificial Sequence
  Guide RNA
acauuuuggacacgcacacaaa

SEQ ID NO: 5202 - RNA, 22 nt, Artificial Sequence
  Guide RNA
acuuuugugugcguguccaaaa

SEQ ID NO: 5203 - RNA, 22 nt, Artificial Sequence
  Guide RNA
aggaaguucaacauuuuggaca

SEQ ID NO: 5204 - RNA, 22 nt, Artificial Sequence
  Guide RNA
aguucaacauuuuggacacgca

SEQ ID NO: 5205 - RNA, 22 nt, Artificial Sequence
  Guide RNA
aucacuuuugugugcgugucca

SEQ ID NO: 5206 - RNA, 22 nt, Artificial Sequence
  Guide RNA
auguucaucacuuuugugugcg

SEQ ID NO: 5207 - RNA, 22 nt, Artificial Sequence
  Guide RNA
auuuuggacacgcacacaaaag

SEQ ID NO: 5208 - RNA, 22 nt, Artificial Sequence
  Guide RNA
caacauuuuggacacgcacaca

SEQ ID NO: 5209 - RNA, 22 nt, Artificial Sequence
  Guide RNA
cacuuuugugugcguguccaaa

SEQ ID NO: 5210 - RNA, 22 nt, Artificial Sequence
  Guide RNA
caucacuuuugugugcgugucc

SEQ ID NO: 5211 - RNA, 22 nt, Artificial Sequence
  Guide RNA
cauuuuggacacgcacacaaaa

SEQ ID NO: 5212 - RNA, 22 nt, Artificial Sequence
  Guide RNA
cguguccaaaauguugaacuuc

SEQ ID NO: 5213 - RNA, 22 nt, Artificial Sequence
  Guide RNA
cuuuugugugcguguccaaaau

SEQ ID NO: 5214 - RNA, 22 nt, Artificial Sequence
  Guide RNA
gaaguucaacauuuuggacacg

SEQ ID NO: 5215 - RNA, 22 nt, Artificial Sequence
  Guide RNA
gacacgcacacaaaagugauga

SEQ ID NO: 5216 - RNA, 22 nt, Artificial Sequence
  Guide RNA
gcguguccaaaauguugaacuu

SEQ ID NO: 5217 - RNA, 22 nt, Artificial Sequence
  Guide RNA
ggaaguucaacauuuuggacac

SEQ ID NO: 5218 - RNA, 22 nt, Artificial Sequence
  Guide RNA
ggacacgcacacaaaagugaug

SEQ ID NO: 5219 - RNA, 22 nt, Artificial Sequence
  Guide RNA
guccaaaauguugaacuuccua

SEQ ID NO: 5220 - RNA, 22 nt, Artificial Sequence
  Guide RNA
gugcguguccaaaauguugaac

SEQ ID NO: 5221 - RNA, 22 nt, Artificial Sequence
  Guide RNA
guguccaaaauguugaacuucc

SEQ ID NO: 5222 - RNA, 22 nt, Artificial Sequence
  Guide RNA
gugugcguguccaaaauguuga

SEQ ID NO: 5223 - RNA, 22 nt, Artificial Sequence
  Guide RNA
guucaacauuuuggacacgcac

SEQ ID NO: 5224 - RNA, 22 nt, Artificial Sequence
  Guide RNA
guucaucacuuuugugugcgug

SEQ ID NO: 5225 - RNA, 22 nt, Artificial Sequence
  Guide RNA
uaggaaguucaacauuuuggac

SEQ ID NO: 5226 - RNA, 22 nt, Artificial Sequence
  Guide RNA
ucaacauuuuggacacgcacac

SEQ ID NO: 5227 - RNA, 22 nt, Artificial Sequence
  Guide RNA
ucacuuuugugugcguguccaa

SEQ ID NO: 5228 - RNA, 22 nt, Artificial Sequence
  Guide RNA
ucaucacuuuugugugcguguc

SEQ ID NO: 5229 - RNA, 22 nt, Artificial Sequence
  Guide RNA
ugcguguccaaaauguugaacu

SEQ ID NO: 5230 - RNA, 22 nt, Artificial Sequence
  Guide RNA
uggacacgcacacaaaagugau

SEQ ID NO: 5231 - RNA, 22 nt, Artificial Sequence
  Guide RNA
uguccaaaauguugaacuuccu

SEQ ID NO: 5232 - RNA, 22 nt, Artificial Sequence
  Guide RNA
ugugcguguccaaaauguugaa

SEQ ID NO: 5233 - RNA, 22 nt, Artificial Sequence
  Guide RNA
ugugugcguguccaaaauguug

SEQ ID NO: 5234 - RNA, 22 nt, Artificial Sequence
  Guide RNA
uguucaucacuuuugugugcgu

SEQ ID NO: 5235 - RNA, 22 nt, Artificial Sequence
  Guide RNA
uuaggaaguucaacauuuugga

SEQ ID NO: 5236 - RNA, 22 nt, Artificial Sequence
  Guide RNA
uucaacauuuuggacacgcaca

SEQ ID NO: 5237 - RNA, 22 nt, Artificial Sequence
  Guide RNA
uucaucacuuuugugugcgugu

SEQ ID NO: 5238 - RNA, 22 nt, Artificial Sequence
  Guide RNA
uuggacacgcacacaaaaguga

SEQ ID NO: 5239 - RNA, 22 nt, Artificial Sequence
  Guide RNA
uugugugcguguccaaaauguu

SEQ ID NO: 5240 - RNA, 22 nt, Artificial Sequence
  Guide RNA
uuuggacacgcacacaaaagug

SEQ ID NO: 5241 - RNA, 22 nt, Artificial Sequence
  Guide RNA
uuugugugcguguccaaaaugu

SEQ ID NO: 5242 - RNA, 22 nt, Artificial Sequence
  Guide RNA
uuuuggacacgcacacaaaagu

SEQ ID NO: 5243 - RNA, 22 nt, Artificial Sequence
  Guide RNA
uuuugugugcguguccaaaaug

SEQ ID NO: 5244 - RNA, 20 nt, Artificial Sequence
  Guide RNA
ccaaaauguugaacuucuaa

SEQ ID NO: 5245 - RNA, 20 nt, Artificial Sequence
  Guide RNA
cccaaaauguugaacuucua

SEQ ID NO: 5246 - RNA, 20 nt, Artificial Sequence
  Guide RNA
cgugcccaaaauguugaacu

SEQ ID NO: 5247 - RNA, 20 nt, Artificial Sequence
  Guide RNA
gcccaaaauguugaacuucu

SEQ ID NO: 5248 - RNA, 20 nt, Artificial Sequence
  Guide RNA
gcgugcccaaaauguugaac

SEQ ID NO: 5249 - RNA, 20 nt, Artificial Sequence
  Guide RNA
gugcccaaaauguugaacuu

SEQ ID NO: 5250 - RNA, 20 nt, Artificial Sequence
  Guide RNA
uagaaguucaacauuuuggg

SEQ ID NO: 5251 - RNA, 20 nt, Artificial Sequence
  Guide RNA
ugcccaaaauguugaacuuc

SEQ ID NO: 5252 - RNA, 20 nt, Artificial Sequence
  Guide RNA
uuagaaguucaacauuuugg

SEQ ID NO: 5253 - RNA, 21 nt, Artificial Sequence
  Guide RNA
cccaaaauguugaacuucuaa

SEQ ID NO: 5254 - RNA, 21 nt, Artificial Sequence
  Guide RNA
cgugcccaaaauguugaacuu

SEQ ID NO: 5255 - RNA, 21 nt, Artificial Sequence
  Guide RNA
gcccaaaauguugaacuucua

SEQ ID NO: 5256 - RNA, 21 nt, Artificial Sequence
  Guide RNA
gcgugcccaaaauguugaacu

SEQ ID NO: 5257 - RNA, 21 nt, Artificial Sequence
  Guide RNA
gugcccaaaauguugaacuuc

SEQ ID NO: 5258 - RNA, 21 nt, Artificial Sequence
  Guide RNA
uagaaguucaacauuuugggc

SEQ ID NO: 5259 - RNA, 21 nt, Artificial Sequence
  Guide RNA
ugcccaaaauguugaacuucu

SEQ ID NO: 5260 - RNA, 21 nt, Artificial Sequence
  Guide RNA
ugcgugcccaaaauguugaac

SEQ ID NO: 5261 - RNA, 21 nt, Artificial Sequence
  Guide RNA
uuagaaguucaacauuuuggg

SEQ ID NO: 5262 - RNA, 22 nt, Artificial Sequence
  Guide RNA
cccaaaauguugaacuucuaaa

SEQ ID NO: 5263 - RNA, 22 nt, Artificial Sequence
  Guide RNA
cgugcccaaaauguugaacuuc

SEQ ID NO: 5264 - RNA, 22 nt, Artificial Sequence
  Guide RNA
gcccaaaauguugaacuucuaa

SEQ ID NO: 5265 - RNA, 22 nt, Artificial Sequence
  Guide RNA
gcgugcccaaaauguugaacuu

SEQ ID NO: 5266 - RNA, 22 nt, Artificial Sequence
  Guide RNA
gugcccaaaauguugaacuucu

SEQ ID NO: 5267 - RNA, 22 nt, Artificial Sequence
  Guide RNA
gugcgugcccaaaauguugaac

SEQ ID NO: 5268 - RNA, 22 nt, Artificial Sequence
  Guide RNA
uagaaguucaacauuuugggca

SEQ ID NO: 5269 - RNA, 22 nt, Artificial Sequence
  Guide RNA
ugcccaaaauguugaacuucua

SEQ ID NO: 5270 - RNA, 22 nt, Artificial Sequence
  Guide RNA
ugcgugcccaaaauguugaacu

SEQ ID NO: 5271 - RNA, 22 nt, Artificial Sequence
  Guide RNA
uuagaaguucaacauuuugggc

SEQ ID NO: 5272 - RNA, 22 nt, Artificial Sequence
  Guide RNA
uuuagaaguucaacauuuuggg

SEQ ID NO: 5273 - RNA, 20 nt, Artificial Sequence
  Guide RNA
aaaaggguaugugacguacu

SEQ ID NO: 5274 - RNA, 20 nt, Artificial Sequence
  Guide RNA
aaaggguaugugacguacuu

SEQ ID NO: 5275 - RNA, 20 nt, Artificial Sequence
  Guide RNA
aaaguacgucacauacccuu

SEQ ID NO: 5276 - RNA, 20 nt, Artificial Sequence
  Guide RNA
aaauacaguaaaaggguaug

SEQ ID NO: 5277 - RNA, 20 nt, Artificial Sequence
  Guide RNA
aaggguaugugacguacuuu

SEQ ID NO: 5278 - RNA, 20 nt, Artificial Sequence
  Guide RNA
aaguacgucacauacccuuu

SEQ ID NO: 5279 - RNA, 20 nt, Artificial Sequence
  Guide RNA
aauacaguaaaaggguaugu

SEQ ID NO: 5280 - RNA, 20 nt, Artificial Sequence
  Guide RNA
acaguaaaaggguaugugac

SEQ ID NO: 5281 - RNA, 20 nt, Artificial Sequence
  Guide RNA
acauacccuuuuacuguauu

SEQ ID NO: 5282 - RNA, 20 nt, Artificial Sequence
  Guide RNA
acgucacauacccuuuuacu

SEQ ID NO: 5283 - RNA, 20 nt, Artificial Sequence
  Guide RNA
agaaauacaguaaaagggua

SEQ ID NO: 5284 - RNA, 20 nt, Artificial Sequence
  Guide RNA
agagaaauacaguaaaaggg

SEQ ID NO: 5285 - RNA, 20 nt, Artificial Sequence
  Guide RNA
agcguaaaguacgucacaua

SEQ ID NO: 5286 - RNA, 20 nt, Artificial Sequence
  Guide RNA
aggguaugugacguacuuua

SEQ ID NO: 5287 - RNA, 20 nt, Artificial Sequence
  Guide RNA
aguaaaaggguaugugacgu

SEQ ID NO: 5288 - RNA, 20 nt, Artificial Sequence
  Guide RNA
aguacgucacauacccuuuu

SEQ ID NO: 5289 - RNA, 20 nt, Artificial Sequence
  Guide RNA
aguauagcguaaaguacguc

SEQ ID NO: 5290 - RNA, 20 nt, Artificial Sequence
  Guide RNA
auacaguaaaaggguaugug

SEQ ID NO: 5291 - RNA, 20 nt, Artificial Sequence
  Guide RNA
auagcguaaaguacgucaca

SEQ ID NO: 5292 - RNA, 20 nt, Artificial Sequence
  Guide RNA
augugacguacuuuacgcua

SEQ ID NO: 5293 - RNA, 20 nt, Artificial Sequence
  Guide RNA
cacauacccuuuuacuguau

SEQ ID NO: 5294 - RNA, 20 nt, Artificial Sequence
  Guide RNA
caguaaaaggguaugugacg

SEQ ID NO: 5295 - RNA, 20 nt, Artificial Sequence
  Guide RNA
caguauagcguaaaguacgu

SEQ ID NO: 5296 - RNA, 20 nt, Artificial Sequence
  Guide RNA
cauacccuuuuacuguauuu

SEQ ID NO: 5297 - RNA, 20 nt, Artificial Sequence
  Guide RNA
cguaaaguacgucacauacc

SEQ ID NO: 5298 - RNA, 20 nt, Artificial Sequence
  Guide RNA
cgucacauacccuuuuacug

SEQ ID NO: 5299 - RNA, 20 nt, Artificial Sequence
  Guide RNA
gaaauacaguaaaaggguau

SEQ ID NO: 5300 - RNA, 20 nt, Artificial Sequence
  Guide RNA
gagaaauacaguaaaagggu

SEQ ID NO: 5301 - RNA, 20 nt, Artificial Sequence
  Guide RNA
gagagaaauacaguaaaagg

SEQ ID NO: 5302 - RNA, 20 nt, Artificial Sequence
  Guide RNA
gcguaaaguacgucacauac

SEQ ID NO: 5303 - RNA, 20 nt, Artificial Sequence
  Guide RNA
ggguaugugacguacuuuac

SEQ ID NO: 5304 - RNA, 20 nt, Artificial Sequence
  Guide RNA
gguaugugacguacuuuacg

SEQ ID NO: 5305 - RNA, 20 nt, Artificial Sequence
  Guide RNA
guaaaaggguaugugacgua

SEQ ID NO: 5306 - RNA, 20 nt, Artificial Sequence
  Guide RNA
guaaaguacgucacauaccc

SEQ ID NO: 5307 - RNA, 20 nt, Artificial Sequence
  Guide RNA
guacgucacauacccuuuua

SEQ ID NO: 5308 - RNA, 20 nt, Artificial Sequence
  Guide RNA
guauagcguaaaguacguca

SEQ ID NO: 5309 - RNA, 20 nt, Artificial Sequence
  Guide RNA
guaugugacguacuuuacgc

SEQ ID NO: 5310 - RNA, 20 nt, Artificial Sequence
  Guide RNA
gucacauacccuuuuacugu

SEQ ID NO: 5311 - RNA, 20 nt, Artificial Sequence
  Guide RNA
uaaaaggguaugugacguac

SEQ ID NO: 5312 - RNA, 20 nt, Artificial Sequence
  Guide RNA
uaaaguacgucacauacccu

SEQ ID NO: 5313 - RNA, 20 nt, Artificial Sequence
  Guide RNA
uacaguaaaaggguauguga

SEQ ID NO: 5314 - RNA, 20 nt, Artificial Sequence
  Guide RNA
uacgucacauacccuuuuac

SEQ ID NO: 5315 - RNA, 20 nt, Artificial Sequence
  Guide RNA
uagcguaaaguacgucacau

SEQ ID NO: 5316 - RNA, 20 nt, Artificial Sequence
  Guide RNA
uauagcguaaaguacgucac

SEQ ID NO: 5317 - RNA, 20 nt, Artificial Sequence
  Guide RNA
uaugugacguacuuuacgcu

SEQ ID NO: 5318 - RNA, 20 nt, Artificial Sequence
  Guide RNA
ucacauacccuuuuacugua

SEQ ID NO: 5319 - RNA, 21 nt, Artificial Sequence
  Guide RNA
aaaaggguaugugacguacuu

SEQ ID NO: 5320 - RNA, 21 nt, Artificial Sequence
  Guide RNA
aaaggguaugugacguacuuu

SEQ ID NO: 5321 - RNA, 21 nt, Artificial Sequence
  Guide RNA
aaaguacgucacauacccuuu

SEQ ID NO: 5322 - RNA, 21 nt, Artificial Sequence
  Guide RNA
aaggguaugugacguacuuua

SEQ ID NO: 5323 - RNA, 21 nt, Artificial Sequence
  Guide RNA
aaguacgucacauacccuuuu

SEQ ID NO: 5324 - RNA, 21 nt, Artificial Sequence
  Guide RNA
aauacaguaaaaggguaugug

SEQ ID NO: 5325 - RNA, 21 nt, Artificial Sequence
  Guide RNA
acaguaaaaggguaugugacg

SEQ ID NO: 5326 - RNA, 21 nt, Artificial Sequence
  Guide RNA
acaguauagcguaaaguacgu

SEQ ID NO: 5327 - RNA, 21 nt, Artificial Sequence
  Guide RNA
acgucacauacccuuuuacug

SEQ ID NO: 5328 - RNA, 21 nt, Artificial Sequence
  Guide RNA
agagaaauacaguaaaagggu

SEQ ID NO: 5329 - RNA, 21 nt, Artificial Sequence
  Guide RNA
agcguaaaguacgucacauac

SEQ ID NO: 5330 - RNA, 21 nt, Artificial Sequence
  Guide RNA
aggguaugugacguacuuuac

SEQ ID NO: 5331 - RNA, 21 nt, Artificial Sequence
  Guide RNA
aguaaaaggguaugugacgua

SEQ ID NO: 5332 - RNA, 21 nt, Artificial Sequence
  Guide RNA
aguacgucacauacccuuuua

SEQ ID NO: 5333 - RNA, 21 nt, Artificial Sequence
  Guide RNA
aguauagcguaaaguacguca

SEQ ID NO: 5334 - RNA, 21 nt, Artificial Sequence
  Guide RNA
auacaguaaaaggguauguga

SEQ ID NO: 5335 - RNA, 21 nt, Artificial Sequence
  Guide RNA
auagcguaaaguacgucacau

SEQ ID NO: 5336 - RNA, 21 nt, Artificial Sequence
  Guide RNA
augugacguacuuuacgcuau

SEQ ID NO: 5337 - RNA, 21 nt, Artificial Sequence
  Guide RNA
cacauacccuuuuacuguauu

SEQ ID NO: 5338 - RNA, 21 nt, Artificial Sequence
  Guide RNA
caguaaaaggguaugugacgu

SEQ ID NO: 5339 - RNA, 21 nt, Artificial Sequence
  Guide RNA
caguauagcguaaaguacguc

SEQ ID NO: 5340 - RNA, 21 nt, Artificial Sequence
  Guide RNA
cauacccuuuuacuguauuuc

SEQ ID NO: 5341 - RNA, 21 nt, Artificial Sequence
  Guide RNA
cguaaaguacgucacauaccc

SEQ ID NO: 5342 - RNA, 21 nt, Artificial Sequence
  Guide RNA
cgucacauacccuuuuacugu

SEQ ID NO: 5343 - RNA, 21 nt, Artificial Sequence
  Guide RNA
gaaauacaguaaaaggguaug

SEQ ID NO: 5344 - RNA, 21 nt, Artificial Sequence
  Guide RNA
gagaaauacaguaaaagggua

SEQ ID NO: 5345 - RNA, 21 nt, Artificial Sequence
  Guide RNA
gagagaaauacaguaaaaggg

SEQ ID NO: 5346 - RNA, 21 nt, Artificial Sequence
  Guide RNA
gcguaaaguacgucacauacc

SEQ ID NO: 5347 - RNA, 21 nt, Artificial Sequence
  Guide RNA
ggguaugugacguacuuuacg

SEQ ID NO: 5348 - RNA, 21 nt, Artificial Sequence
  Guide RNA
gguaugugacguacuuuacgc

SEQ ID NO: 5349 - RNA, 21 nt, Artificial Sequence
  Guide RNA
guaaaaggguaugugacguac

SEQ ID NO: 5350 - RNA, 21 nt, Artificial Sequence
  Guide RNA
guaaaguacgucacauacccu

SEQ ID NO: 5351 - RNA, 21 nt, Artificial Sequence
  Guide RNA
guacgucacauacccuuuuac

SEQ ID NO: 5352 - RNA, 21 nt, Artificial Sequence
  Guide RNA
guauagcguaaaguacgucac

SEQ ID NO: 5353 - RNA, 21 nt, Artificial Sequence
  Guide RNA
guaugugacguacuuuacgcu

SEQ ID NO: 5354 - RNA, 21 nt, Artificial Sequence
  Guide RNA
gucacauacccuuuuacugua

SEQ ID NO: 5355 - RNA, 21 nt, Artificial Sequence
  Guide RNA
uaaaaggguaugugacguacu

SEQ ID NO: 5356 - RNA, 21 nt, Artificial Sequence
  Guide RNA
uaaaguacgucacauacccuu

SEQ ID NO: 5357 - RNA, 21 nt, Artificial Sequence
  Guide RNA
uacaguaaaaggguaugugac

SEQ ID NO: 5358 - RNA, 21 nt, Artificial Sequence
  Guide RNA
uacgucacauacccuuuuacu

SEQ ID NO: 5359 - RNA, 21 nt, Artificial Sequence
  Guide RNA
uagcguaaaguacgucacaua

SEQ ID NO: 5360 - RNA, 21 nt, Artificial Sequence
  Guide RNA
uauagcguaaaguacgucaca

SEQ ID NO: 5361 - RNA, 21 nt, Artificial Sequence
  Guide RNA
uaugugacguacuuuacgcua

SEQ ID NO: 5362 - RNA, 21 nt, Artificial Sequence
  Guide RNA
ucacauacccuuuuacuguau

SEQ ID NO: 5363 - RNA, 21 nt, Artificial Sequence
  Guide RNA
ugagagaaauacaguaaaagg

SEQ ID NO: 5364 - RNA, 22 nt, Artificial Sequence
  Guide RNA
aaaaggguaugugacguacuuu

SEQ ID NO: 5365 - RNA, 22 nt, Artificial Sequence
  Guide RNA
aaaggguaugugacguacuuua

SEQ ID NO: 5366 - RNA, 22 nt, Artificial Sequence
  Guide RNA
aaaguacgucacauacccuuuu

SEQ ID NO: 5367 - RNA, 22 nt, Artificial Sequence
  Guide RNA
aaauacaguaaaaggguaugug

SEQ ID NO: 5368 - RNA, 22 nt, Artificial Sequence
  Guide RNA
aaggguaugugacguacuuuac

SEQ ID NO: 5369 - RNA, 22 nt, Artificial Sequence
  Guide RNA
aaguacgucacauacccuuuua

SEQ ID NO: 5370 - RNA, 22 nt, Artificial Sequence
  Guide RNA
aauacaguaaaaggguauguga

SEQ ID NO: 5371 - RNA, 22 nt, Artificial Sequence
  Guide RNA
acaguaaaaggguaugugacgu

SEQ ID NO: 5372 - RNA, 22 nt, Artificial Sequence
  Guide RNA
acaguauagcguaaaguacguc

SEQ ID NO: 5373 - RNA, 22 nt, Artificial Sequence
  Guide RNA
acauacccuuuuacuguauuuc

SEQ ID NO: 5374 - RNA, 22 nt, Artificial Sequence
  Guide RNA
acgucacauacccuuuuacugu

SEQ ID NO: 5375 - RNA, 22 nt, Artificial Sequence
  Guide RNA
agaaauacaguaaaaggguaug

SEQ ID NO: 5376 - RNA, 22 nt, Artificial Sequence
  Guide RNA
agagaaauacaguaaaagggua

SEQ ID NO: 5377 - RNA, 22 nt, Artificial Sequence
  Guide RNA
agcguaaaguacgucacauacc

SEQ ID NO: 5378 - RNA, 22 nt, Artificial Sequence
  Guide RNA
aggguaugugacguacuuuacg

SEQ ID NO: 5379 - RNA, 22 nt, Artificial Sequence
  Guide RNA
aguaaaaggguaugugacguac

SEQ ID NO: 5380 - RNA, 22 nt, Artificial Sequence
  Guide RNA
aguacgucacauacccuuuuac

SEQ ID NO: 5381 - RNA, 22 nt, Artificial Sequence
  Guide RNA
aguauagcguaaaguacgucac

SEQ ID NO: 5382 - RNA, 22 nt, Artificial Sequence
  Guide RNA
auacaguaaaaggguaugugac

SEQ ID NO: 5383 - RNA, 22 nt, Artificial Sequence
  Guide RNA
auagcguaaaguacgucacaua

SEQ ID NO: 5384 - RNA, 22 nt, Artificial Sequence
  Guide RNA
augagagaaauacaguaaaagg

SEQ ID NO: 5385 - RNA, 22 nt, Artificial Sequence
  Guide RNA
augugacguacuuuacgcuaua

SEQ ID NO: 5386 - RNA, 22 nt, Artificial Sequence
  Guide RNA
cacaguauagcguaaaguacgu

SEQ ID NO: 5387 - RNA, 22 nt, Artificial Sequence
  Guide RNA
cacauacccuuuuacuguauuu

SEQ ID NO: 5388 - RNA, 22 nt, Artificial Sequence
  Guide RNA
caguaaaaggguaugugacgua

SEQ ID NO: 5389 - RNA, 22 nt, Artificial Sequence
  Guide RNA
caguauagcguaaaguacguca

SEQ ID NO: 5390 - RNA, 22 nt, Artificial Sequence
  Guide RNA
cauacccuuuuacuguauuucu

SEQ ID NO: 5391 - RNA, 22 nt, Artificial Sequence
  Guide RNA
cguaaaguacgucacauacccu

SEQ ID NO: 5392 - RNA, 22 nt, Artificial Sequence
  Guide RNA
cgucacauacccuuuuacugua

SEQ ID NO: 5393 - RNA, 22 nt, Artificial Sequence
  Guide RNA
gaaauacaguaaaaggguaugu

SEQ ID NO: 5394 - RNA, 22 nt, Artificial Sequence
  Guide RNA
gagaaauacaguaaaaggguau

SEQ ID NO: 5395 - RNA, 22 nt, Artificial Sequence
  Guide RNA
gagagaaauacaguaaaagggu

SEQ ID NO: 5396 - RNA, 22 nt, Artificial Sequence
  Guide RNA
gcguaaaguacgucacauaccc

SEQ ID NO: 5397 - RNA, 22 nt, Artificial Sequence
  Guide RNA
ggguaugugacguacuuuacgc

SEQ ID NO: 5398 - RNA, 22 nt, Artificial Sequence
  Guide RNA
gguaugugacguacuuuacgcu

SEQ ID NO: 5399 - RNA, 22 nt, Artificial Sequence
  Guide RNA
guaaaaggguaugugacguacu

SEQ ID NO: 5400 - RNA, 22 nt, Artificial Sequence
  Guide RNA
guaaaguacgucacauacccuu

SEQ ID NO: 5401 - RNA, 22 nt, Artificial Sequence
  Guide RNA
guacgucacauacccuuuuacu

SEQ ID NO: 5402 - RNA, 22 nt, Artificial Sequence
  Guide RNA
guauagcguaaaguacgucaca

SEQ ID NO: 5403 - RNA, 22 nt, Artificial Sequence
  Guide RNA
guaugugacguacuuuacgcua

SEQ ID NO: 5404 - RNA, 22 nt, Artificial Sequence
  Guide RNA
gucacauacccuuuuacuguau

SEQ ID NO: 5405 - RNA, 22 nt, Artificial Sequence
  Guide RNA
uaaaaggguaugugacguacuu

SEQ ID NO: 5406 - RNA, 22 nt, Artificial Sequence
  Guide RNA
uaaaguacgucacauacccuuu

SEQ ID NO: 5407 - RNA, 22 nt, Artificial Sequence
  Guide RNA
uacaguaaaaggguaugugacg

SEQ ID NO: 5408 - RNA, 22 nt, Artificial Sequence
  Guide RNA
uacgucacauacccuuuuacug

SEQ ID NO: 5409 - RNA, 22 nt, Artificial Sequence
  Guide RNA
uagcguaaaguacgucacauac

SEQ ID NO: 5410 - RNA, 22 nt, Artificial Sequence
  Guide RNA
uauagcguaaaguacgucacau

SEQ ID NO: 5411 - RNA, 22 nt, Artificial Sequence
  Guide RNA
uaugugacguacuuuacgcuau

SEQ ID NO: 5412 - RNA, 22 nt, Artificial Sequence
  Guide RNA
ucacauacccuuuuacuguauu

SEQ ID NO: 5413 - RNA, 22 nt, Artificial Sequence
  Guide RNA
ugagagaaauacaguaaaaggg

SEQ ID NO: 5414 - RNA, 20 nt, Artificial Sequence
  Guide RNA
aaaaugguacgugacguacu

SEQ ID NO: 5415 - RNA, 20 nt, Artificial Sequence
  Guide RNA
aaaguacgucacguaccauu

SEQ ID NO: 5416 - RNA, 20 nt, Artificial Sequence
  Guide RNA
aaauacaguaaaaugguacg

SEQ ID NO: 5417 - RNA, 20 nt, Artificial Sequence
  Guide RNA
aaaugguacgugacguacuu

SEQ ID NO: 5418 - RNA, 20 nt, Artificial Sequence
  Guide RNA
aaguacgucacguaccauuu

SEQ ID NO: 5419 - RNA, 20 nt, Artificial Sequence
  Guide RNA
aauacaguaaaaugguacgu

SEQ ID NO: 5420 - RNA, 20 nt, Artificial Sequence
  Guide RNA
aaugguacgugacguacuuu

SEQ ID NO: 5421 - RNA, 20 nt, Artificial Sequence
  Guide RNA
acaguaaaaugguacgugac

SEQ ID NO: 5422 - RNA, 20 nt, Artificial Sequence
  Guide RNA
accauuuuacuguauuucuc

SEQ ID NO: 5423 - RNA, 20 nt, Artificial Sequence
  Guide RNA
acguaccauuuuacuguauu

SEQ ID NO: 5424 - RNA, 20 nt, Artificial Sequence
  Guide RNA
acgucacguaccauuuuacu

SEQ ID NO: 5425 - RNA, 20 nt, Artificial Sequence
  Guide RNA
agagaaauacaguaaaaugg

SEQ ID NO: 5426 - RNA, 20 nt, Artificial Sequence
  Guide RNA
agcguaaaguacgucacgua

SEQ ID NO: 5427 - RNA, 20 nt, Artificial Sequence
  Guide RNA
aguaaaaugguacgugacgu

SEQ ID NO: 5428 - RNA, 20 nt, Artificial Sequence
  Guide RNA
aguacgucacguaccauuuu

SEQ ID NO: 5429 - RNA, 20 nt, Artificial Sequence
  Guide RNA
auacaguaaaaugguacgug

SEQ ID NO: 5430 - RNA, 20 nt, Artificial Sequence
  Guide RNA
augguacgugacguacuuua

SEQ ID NO: 5431 - RNA, 20 nt, Artificial Sequence
  Guide RNA
cacguaccauuuuacuguau

SEQ ID NO: 5432 - RNA, 20 nt, Artificial Sequence
  Guide RNA
caguaaaaugguacgugacg

SEQ ID NO: 5433 - RNA, 20 nt, Artificial Sequence
  Guide RNA
cauuuuacuguauuucucuc

SEQ ID NO: 5434 - RNA, 20 nt, Artificial Sequence
  Guide RNA
ccauuuuacuguauuucucu

SEQ ID NO: 5435 - RNA, 20 nt, Artificial Sequence
  Guide RNA
cguaaaguacgucacguacc

SEQ ID NO: 5436 - RNA, 20 nt, Artificial Sequence
  Guide RNA
cguaccauuuuacuguauuu

SEQ ID NO: 5437 - RNA, 20 nt, Artificial Sequence
  Guide RNA
cgucacguaccauuuuacug

SEQ ID NO: 5438 - RNA, 20 nt, Artificial Sequence
  Guide RNA
gaaauacaguaaaaugguac

SEQ ID NO: 5439 - RNA, 20 nt, Artificial Sequence
  Guide RNA
gaaugagagaaauacaguaa

SEQ ID NO: 5440 - RNA, 20 nt, Artificial Sequence
  Guide RNA
gagaaauacaguaaaauggu

SEQ ID NO: 5441 - RNA, 20 nt, Artificial Sequence
  Guide RNA
gagagaaauacaguaaaaug

SEQ ID NO: 5442 - RNA, 20 nt, Artificial Sequence
  Guide RNA
gcguaaaguacgucacguac

SEQ ID NO: 5443 - RNA, 20 nt, Artificial Sequence
  Guide RNA
guaaaaugguacgugacgua

SEQ ID NO: 5444 - RNA, 20 nt, Artificial Sequence
  Guide RNA
guaaaguacgucacguacca

SEQ ID NO: 5445 - RNA, 20 nt, Artificial Sequence
  Guide RNA
guaccauuuuacuguauuuc

SEQ ID NO: 5446 - RNA, 20 nt, Artificial Sequence
  Guide RNA
guacgucacguaccauuuua

SEQ ID NO: 5447 - RNA, 20 nt, Artificial Sequence
  Guide RNA
gucacguaccauuuuacugu

SEQ ID NO: 5448 - RNA, 20 nt, Artificial Sequence
  Guide RNA
uaaaaugguacgugacguac

SEQ ID NO: 5449 - RNA, 20 nt, Artificial Sequence
  Guide RNA
uaaaguacgucacguaccau

SEQ ID NO: 5450 - RNA, 20 nt, Artificial Sequence
  Guide RNA
uacaguaaaaugguacguga

SEQ ID NO: 5451 - RNA, 20 nt, Artificial Sequence
  Guide RNA
uacgucacguaccauuuuac

SEQ ID NO: 5452 - RNA, 20 nt, Artificial Sequence
  Guide RNA
uagcguaaaguacgucacgu

SEQ ID NO: 5453 - RNA, 20 nt, Artificial Sequence
  Guide RNA
ucacguaccauuuuacugua

SEQ ID NO: 5454 - RNA, 20 nt, Artificial Sequence
  Guide RNA
ugaaugagagaaauacagua

SEQ ID NO: 5455 - RNA, 21 nt, Artificial Sequence
  Guide RNA
aaaaugguacgugacguacuu

SEQ ID NO: 5456 - RNA, 21 nt, Artificial Sequence
  Guide RNA
aaaguacgucacguaccauuu

SEQ ID NO: 5457 - RNA, 21 nt, Artificial Sequence
  Guide RNA
aaaugguacgugacguacuuu

SEQ ID NO: 5458 - RNA, 21 nt, Artificial Sequence
  Guide RNA
aaguacgucacguaccauuuu

SEQ ID NO: 5459 - RNA, 21 nt, Artificial Sequence
  Guide RNA
aauacaguaaaaugguacgug

SEQ ID NO: 5460 - RNA, 21 nt, Artificial Sequence
  Guide RNA
aaugguacgugacguacuuua

SEQ ID NO: 5461 - RNA, 21 nt, Artificial Sequence
  Guide RNA
acaguaaaaugguacgugacg

SEQ ID NO: 5462 - RNA, 21 nt, Artificial Sequence
  Guide RNA
acgucacguaccauuuuacug

SEQ ID NO: 5463 - RNA, 21 nt, Artificial Sequence
  Guide RNA
agcguaaaguacgucacguac

SEQ ID NO: 5464 - RNA, 21 nt, Artificial Sequence
  Guide RNA
aguaaaaugguacgugacgua

SEQ ID NO: 5465 - RNA, 21 nt, Artificial Sequence
  Guide RNA
aguacgucacguaccauuuua

SEQ ID NO: 5466 - RNA, 21 nt, Artificial Sequence
  Guide RNA
auacaguaaaaugguacguga

SEQ ID NO: 5467 - RNA, 21 nt, Artificial Sequence
  Guide RNA
auagcguaaaguacgucacgu

SEQ ID NO: 5468 - RNA, 21 nt, Artificial Sequence
  Guide RNA
augguacgugacguacuuuac

SEQ ID NO: 5469 - RNA, 21 nt, Artificial Sequence
  Guide RNA
cacguaccauuuuacuguauu

SEQ ID NO: 5470 - RNA, 21 nt, Artificial Sequence
  Guide RNA
caguaaaaugguacgugacgu

SEQ ID NO: 5471 - RNA, 21 nt, Artificial Sequence
  Guide RNA
ccauuuuacuguauuucucuc

SEQ ID NO: 5472 - RNA, 21 nt, Artificial Sequence
  Guide RNA
cguaaaguacgucacguacca

SEQ ID NO: 5473 - RNA, 21 nt, Artificial Sequence
  Guide RNA
cguaccauuuuacuguauuuc

SEQ ID NO: 5474 - RNA, 21 nt, Artificial Sequence
  Guide RNA
cgucacguaccauuuuacugu

SEQ ID NO: 5475 - RNA, 21 nt, Artificial Sequence
  Guide RNA
gaaauacaguaaaaugguacg

SEQ ID NO: 5476 - RNA, 21 nt, Artificial Sequence
  Guide RNA
gagagaaauacaguaaaaugg

SEQ ID NO: 5477 - RNA, 21 nt, Artificial Sequence
  Guide RNA
gcguaaaguacgucacguacc

SEQ ID NO: 5478 - RNA, 21 nt, Artificial Sequence
  Guide RNA
guaaaaugguacgugacguac

SEQ ID NO: 5479 - RNA, 21 nt, Artificial Sequence
  Guide RNA
guaaaguacgucacguaccau

SEQ ID NO: 5480 - RNA, 21 nt, Artificial Sequence
  Guide RNA
guacgucacguaccauuuuac

SEQ ID NO: 5481 - RNA, 21 nt, Artificial Sequence
  Guide RNA
gucacguaccauuuuacugua

SEQ ID NO: 5482 - RNA, 21 nt, Artificial Sequence
  Guide RNA
gugaaugagagaaauacagua

SEQ ID NO: 5483 - RNA, 21 nt, Artificial Sequence
  Guide RNA
uaaaaugguacgugacguacu

SEQ ID NO: 5484 - RNA, 21 nt, Artificial Sequence
  Guide RNA
uaaaguacgucacguaccauu

SEQ ID NO: 5485 - RNA, 21 nt, Artificial Sequence
  Guide RNA
uacaguaaaaugguacgugac

SEQ ID NO: 5486 - RNA, 21 nt, Artificial Sequence
  Guide RNA
uacgucacguaccauuuuacu

SEQ ID NO: 5487 - RNA, 21 nt, Artificial Sequence
  Guide RNA
uagcguaaaguacgucacgua

SEQ ID NO: 5488 - RNA, 21 nt, Artificial Sequence
  Guide RNA
ucacguaccauuuuacuguau

SEQ ID NO: 5489 - RNA, 22 nt, Artificial Sequence
  Guide RNA
aaaaugguacgugacguacuuu

SEQ ID NO: 5490 - RNA, 22 nt, Artificial Sequence
  Guide RNA
aaaguacgucacguaccauuuu

SEQ ID NO: 5491 - RNA, 22 nt, Artificial Sequence
  Guide RNA
aaauacaguaaaaugguacgug

SEQ ID NO: 5492 - RNA, 22 nt, Artificial Sequence
  Guide RNA
aaaugguacgugacguacuuua

SEQ ID NO: 5493 - RNA, 22 nt, Artificial Sequence
  Guide RNA
aaguacgucacguaccauuuua

SEQ ID NO: 5494 - RNA, 22 nt, Artificial Sequence
  Guide RNA
aauacaguaaaaugguacguga

SEQ ID NO: 5495 - RNA, 22 nt, Artificial Sequence
  Guide RNA
aaugguacgugacguacuuuac

SEQ ID NO: 5496 - RNA, 22 nt, Artificial Sequence
  Guide RNA
acaguaaaaugguacgugacgu

SEQ ID NO: 5497 - RNA, 22 nt, Artificial Sequence
  Guide RNA
accauuuuacuguauuucucuc

SEQ ID NO: 5498 - RNA, 22 nt, Artificial Sequence
  Guide RNA
acguaccauuuuacuguauuuc

SEQ ID NO: 5499 - RNA, 22 nt, Artificial Sequence
  Guide RNA
acgucacguaccauuuuacugu

SEQ ID NO: 5500 - RNA, 22 nt, Artificial Sequence
  Guide RNA
agaaauacaguaaaaugguacg

SEQ ID NO: 5501 - RNA, 22 nt, Artificial Sequence
  Guide RNA
agcguaaaguacgucacguacc

SEQ ID NO: 5502 - RNA, 22 nt, Artificial Sequence
  Guide RNA
aguaaaaugguacgugacguac

SEQ ID NO: 5503 - RNA, 22 nt, Artificial Sequence
  Guide RNA
aguacgucacguaccauuuuac

SEQ ID NO: 5504 - RNA, 22 nt, Artificial Sequence
  Guide RNA
auacaguaaaaugguacgugac

SEQ ID NO: 5505 - RNA, 22 nt, Artificial Sequence
  Guide RNA
auagcguaaaguacgucacgua

SEQ ID NO: 5506 - RNA, 22 nt, Artificial Sequence
  Guide RNA
augguacgugacguacuuuacg

SEQ ID NO: 5507 - RNA, 22 nt, Artificial Sequence
  Guide RNA
cacguaccauuuuacuguauuu

SEQ ID NO: 5508 - RNA, 22 nt, Artificial Sequence
  Guide RNA
caguaaaaugguacgugacgua

SEQ ID NO: 5509 - RNA, 22 nt, Artificial Sequence
  Guide RNA
ccauuuuacuguauuucucuca

SEQ ID NO: 5510 - RNA, 22 nt, Artificial Sequence
  Guide RNA
cguaaaguacgucacguaccau

SEQ ID NO: 5511 - RNA, 22 nt, Artificial Sequence
  Guide RNA
cguaccauuuuacuguauuucu

SEQ ID NO: 5512 - RNA, 22 nt, Artificial Sequence
  Guide RNA
cgucacguaccauuuuacugua

SEQ ID NO: 5513 - RNA, 22 nt, Artificial Sequence
  Guide RNA
gaaauacaguaaaaugguacgu

SEQ ID NO: 5514 - RNA, 22 nt, Artificial Sequence
  Guide RNA
gagaaauacaguaaaaugguac

SEQ ID NO: 5515 - RNA, 22 nt, Artificial Sequence
  Guide RNA
gagagaaauacaguaaaauggu

SEQ ID NO: 5516 - RNA, 22 nt, Artificial Sequence
  Guide RNA
gcguaaaguacgucacguacca

SEQ ID NO: 5517 - RNA, 22 nt, Artificial Sequence
  Guide RNA
guaaaaugguacgugacguacu

SEQ ID NO: 5518 - RNA, 22 nt, Artificial Sequence
  Guide RNA
guaaaguacgucacguaccauu

SEQ ID NO: 5519 - RNA, 22 nt, Artificial Sequence
  Guide RNA
guaccauuuuacuguauuucuc

SEQ ID NO: 5520 - RNA, 22 nt, Artificial Sequence
  Guide RNA
guacgucacguaccauuuuacu

SEQ ID NO: 5521 - RNA, 22 nt, Artificial Sequence
  Guide RNA
gucacguaccauuuuacuguau

SEQ ID NO: 5522 - RNA, 22 nt, Artificial Sequence
  Guide RNA
gugaaugagagaaauacaguaa

SEQ ID NO: 5523 - RNA, 22 nt, Artificial Sequence
  Guide RNA
uaaaaugguacgugacguacuu

SEQ ID NO: 5524 - RNA, 22 nt, Artificial Sequence
  Guide RNA
uaaaguacgucacguaccauuu

SEQ ID NO: 5525 - RNA, 22 nt, Artificial Sequence
  Guide RNA
uacaguaaaaugguacgugacg

SEQ ID NO: 5526 - RNA, 22 nt, Artificial Sequence
  Guide RNA
uacgucacguaccauuuuacug

SEQ ID NO: 5527 - RNA, 22 nt, Artificial Sequence
  Guide RNA
uagcguaaaguacgucacguac

SEQ ID NO: 5528 - RNA, 22 nt, Artificial Sequence
  Guide RNA
uauagcguaaaguacgucacgu

SEQ ID NO: 5529 - RNA, 22 nt, Artificial Sequence
  Guide RNA
ucacguaccauuuuacuguauu

SEQ ID NO: 5530 - RNA, 22 nt, Artificial Sequence
  Guide RNA
ugagagaaauacaguaaaaugg

SEQ ID NO: 5531 - RNA, 22 nt, Artificial Sequence
  Guide RNA
ugugaaugagagaaauacagua

SEQ ID NO: 5532 - RNA, 20 nt, Artificial Sequence
  Guide RNA
aaaguacgucacguacccuu

SEQ ID NO: 5533 - RNA, 20 nt, Artificial Sequence
  Guide RNA
aaauacauaaaaaggguacg

SEQ ID NO: 5534 - RNA, 20 nt, Artificial Sequence
  Guide RNA
aaguacgucacguacccuuu

SEQ ID NO: 5535 - RNA, 20 nt, Artificial Sequence
  Guide RNA
aauacauaaaaaggguacgu

SEQ ID NO: 5536 - RNA, 20 nt, Artificial Sequence
  Guide RNA
acauaaaaaggguacgugac

SEQ ID NO: 5537 - RNA, 20 nt, Artificial Sequence
  Guide RNA
acccuuuuuauguauuucuc

SEQ ID NO: 5538 - RNA, 20 nt, Artificial Sequence
  Guide RNA
acguacccuuuuuauguauu

SEQ ID NO: 5539 - RNA, 20 nt, Artificial Sequence
  Guide RNA
acgucacguacccuuuuuau

SEQ ID NO: 5540 - RNA, 20 nt, Artificial Sequence
  Guide RNA
agagaaauacauaaaaaggg

SEQ ID NO: 5541 - RNA, 20 nt, Artificial Sequence
  Guide RNA
agaugugaaugagagaaaua

SEQ ID NO: 5542 - RNA, 20 nt, Artificial Sequence
  Guide RNA
aguacgucacguacccuuuu

SEQ ID NO: 5543 - RNA, 20 nt, Artificial Sequence
  Guide RNA
auaaaaaggguacgugacgu

SEQ ID NO: 5544 - RNA, 20 nt, Artificial Sequence
  Guide RNA
auacauaaaaaggguacgug

SEQ ID NO: 5545 - RNA, 20 nt, Artificial Sequence
  Guide RNA
augugaaugagagaaauaca

SEQ ID NO: 5546 - RNA, 20 nt, Artificial Sequence
  Guide RNA
cacguacccuuuuuauguau

SEQ ID NO: 5547 - RNA, 20 nt, Artificial Sequence
  Guide RNA
cauaaaaaggguacgugacg

SEQ ID NO: 5548 - RNA, 20 nt, Artificial Sequence
  Guide RNA
cccuuuuuauguauuucucu

SEQ ID NO: 5549 - RNA, 20 nt, Artificial Sequence
  Guide RNA
ccuuuuuauguauuucucuc

SEQ ID NO: 5550 - RNA, 20 nt, Artificial Sequence
  Guide RNA
cguacccuuuuuauguauuu

SEQ ID NO: 5551 - RNA, 20 nt, Artificial Sequence
  Guide RNA
cgucacguacccuuuuuaug

SEQ ID NO: 5552 - RNA, 20 nt, Artificial Sequence
  Guide RNA
gaaauacauaaaaaggguac

SEQ ID NO: 5553 - RNA, 20 nt, Artificial Sequence
  Guide RNA
gagaaauacauaaaaagggu

SEQ ID NO: 5554 - RNA, 20 nt, Artificial Sequence
  Guide RNA
gagagaaauacauaaaaagg

SEQ ID NO: 5555 - RNA, 20 nt, Artificial Sequence
  Guide RNA
gaugugaaugagagaaauac

SEQ ID NO: 5556 - RNA, 20 nt, Artificial Sequence
  Guide RNA
guacccuuuuuauguauuuc

SEQ ID NO: 5557 - RNA, 20 nt, Artificial Sequence
  Guide RNA
guacgucacguacccuuuuu

SEQ ID NO: 5558 - RNA, 20 nt, Artificial Sequence
  Guide RNA
gucacguacccuuuuuaugu

SEQ ID NO: 5559 - RNA, 20 nt, Artificial Sequence
  Guide RNA
gugaaugagagaaauacaua

SEQ ID NO: 5560 - RNA, 20 nt, Artificial Sequence
  Guide RNA
uaaaaaggguacgugacgua

SEQ ID NO: 5561 - RNA, 20 nt, Artificial Sequence
  Guide RNA
uaaaguacgucacguacccu

SEQ ID NO: 5562 - RNA, 20 nt, Artificial Sequence
  Guide RNA
uacauaaaaaggguacguga

SEQ ID NO: 5563 - RNA, 20 nt, Artificial Sequence
  Guide RNA
uacgucacguacccuuuuua

SEQ ID NO: 5564 - RNA, 20 nt, Artificial Sequence
  Guide RNA
ucacguacccuuuuuaugua

SEQ ID NO: 5565 - RNA, 20 nt, Artificial Sequence
  Guide RNA
ugugaaugagagaaauacau

SEQ ID NO: 5566 - RNA, 21 nt, Artificial Sequence
  Guide RNA
aaaguacgucacguacccuuu

SEQ ID NO: 5567 - RNA, 21 nt, Artificial Sequence
  Guide RNA
aaguacgucacguacccuuuu

SEQ ID NO: 5568 - RNA, 21 nt, Artificial Sequence
  Guide RNA
aauacauaaaaaggguacgug

SEQ ID NO: 5569 - RNA, 21 nt, Artificial Sequence
  Guide RNA
acauaaaaaggguacgugacg

SEQ ID NO: 5570 - RNA, 21 nt, Artificial Sequence
  Guide RNA
acgucacguacccuuuuuaug

SEQ ID NO: 5571 - RNA, 21 nt, Artificial Sequence
  Guide RNA
agaugugaaugagagaaauac

SEQ ID NO: 5572 - RNA, 21 nt, Artificial Sequence
  Guide RNA
aguacgucacguacccuuuuu

SEQ ID NO: 5573 - RNA, 21 nt, Artificial Sequence
  Guide RNA
auaaaaaggguacgugacgua

SEQ ID NO: 5574 - RNA, 21 nt, Artificial Sequence
  Guide RNA
auacauaaaaaggguacguga

SEQ ID NO: 5575 - RNA, 21 nt, Artificial Sequence
  Guide RNA
cacguacccuuuuuauguauu

SEQ ID NO: 5576 - RNA, 21 nt, Artificial Sequence
  Guide RNA
cauaaaaaggguacgugacgu

SEQ ID NO: 5577 - RNA, 21 nt, Artificial Sequence
  Guide RNA
cccuuuuuauguauuucucuc

SEQ ID NO: 5578 - RNA, 21 nt, Artificial Sequence
  Guide RNA
cguacccuuuuuauguauuuc

SEQ ID NO: 5579 - RNA, 21 nt, Artificial Sequence
  Guide RNA
cgucacguacccuuuuuaugu

SEQ ID NO: 5580 - RNA, 21 nt, Artificial Sequence
  Guide RNA
gaaauacauaaaaaggguacg

SEQ ID NO: 5581 - RNA, 21 nt, Artificial Sequence
  Guide RNA
gagagaaauacauaaaaaggg

SEQ ID NO: 5582 - RNA, 21 nt, Artificial Sequence
  Guide RNA
gagaugugaaugagagaaaua

SEQ ID NO: 5583 - RNA, 21 nt, Artificial Sequence
  Guide RNA
gaugugaaugagagaaauaca

SEQ ID NO: 5584 - RNA, 21 nt, Artificial Sequence
  Guide RNA
guaaaguacgucacguacccu

SEQ ID NO: 5585 - RNA, 21 nt, Artificial Sequence
  Guide RNA
guacgucacguacccuuuuua

SEQ ID NO: 5586 - RNA, 21 nt, Artificial Sequence
  Guide RNA
gucacguacccuuuuuaugua

SEQ ID NO: 5587 - RNA, 21 nt, Artificial Sequence
  Guide RNA
uaaaaaggguacgugacguac

SEQ ID NO: 5588 - RNA, 21 nt, Artificial Sequence
  Guide RNA
uaaaguacgucacguacccuu

SEQ ID NO: 5589 - RNA, 21 nt, Artificial Sequence
  Guide RNA
uacauaaaaaggguacgugac

SEQ ID NO: 5590 - RNA, 21 nt, Artificial Sequence
  Guide RNA
uacgucacguacccuuuuuau

SEQ ID NO: 5591 - RNA, 21 nt, Artificial Sequence
  Guide RNA
ucacguacccuuuuuauguau

SEQ ID NO: 5592 - RNA, 22 nt, Artificial Sequence
  Guide RNA
aaaguacgucacguacccuuuu

SEQ ID NO: 5593 - RNA, 22 nt, Artificial Sequence
  Guide RNA
aaauacauaaaaaggguacgug

SEQ ID NO: 5594 - RNA, 22 nt, Artificial Sequence
  Guide RNA
aaguacgucacguacccuuuuu

SEQ ID NO: 5595 - RNA, 22 nt, Artificial Sequence
  Guide RNA
aauacauaaaaaggguacguga

SEQ ID NO: 5596 - RNA, 22 nt, Artificial Sequence
  Guide RNA
acauaaaaaggguacgugacgu

SEQ ID NO: 5597 - RNA, 22 nt, Artificial Sequence
  Guide RNA
acccuuuuuauguauuucucuc

SEQ ID NO: 5598 - RNA, 22 nt, Artificial Sequence
  Guide RNA
acguacccuuuuuauguauuuc

SEQ ID NO: 5599 - RNA, 22 nt, Artificial Sequence
  Guide RNA
acgucacguacccuuuuuaugu

SEQ ID NO: 5600 - RNA, 22 nt, Artificial Sequence
  Guide RNA
agaaauacauaaaaaggguacg

SEQ ID NO: 5601 - RNA, 22 nt, Artificial Sequence
  Guide RNA
agagaugugaaugagagaaaua

SEQ ID NO: 5602 - RNA, 22 nt, Artificial Sequence
  Guide RNA
agaugugaaugagagaaauaca

SEQ ID NO: 5603 - RNA, 22 nt, Artificial Sequence
  Guide RNA
aguacgucacguacccuuuuua

SEQ ID NO: 5604 - RNA, 22 nt, Artificial Sequence
  Guide RNA
auaaaaaggguacgugacguac

SEQ ID NO: 5605 - RNA, 22 nt, Artificial Sequence
  Guide RNA
auacauaaaaaggguacgugac

SEQ ID NO: 5606 - RNA, 22 nt, Artificial Sequence
  Guide RNA
cacguacccuuuuuauguauuu

SEQ ID NO: 5607 - RNA, 22 nt, Artificial Sequence
  Guide RNA
cauaaaaaggguacgugacgua

SEQ ID NO: 5608 - RNA, 22 nt, Artificial Sequence
  Guide RNA
cccuuuuuauguauuucucuca

SEQ ID NO: 5609 - RNA, 22 nt, Artificial Sequence
  Guide RNA
cguaaaguacgucacguacccu

SEQ ID NO: 5610 - RNA, 22 nt, Artificial Sequence
  Guide RNA
cguacccuuuuuauguauuucu

SEQ ID NO: 5611 - RNA, 22 nt, Artificial Sequence
  Guide RNA
cgucacguacccuuuuuaugua

SEQ ID NO: 5612 - RNA, 22 nt, Artificial Sequence
  Guide RNA
gaaauacauaaaaaggguacgu

SEQ ID NO: 5613 - RNA, 22 nt, Artificial Sequence
  Guide RNA
gagaaauacauaaaaaggguac

SEQ ID NO: 5614 - RNA, 22 nt, Artificial Sequence
  Guide RNA
gagagaaauacauaaaaagggu

SEQ ID NO: 5615 - RNA, 22 nt, Artificial Sequence
  Guide RNA
gagaugugaaugagagaaauac

SEQ ID NO: 5616 - RNA, 22 nt, Artificial Sequence
  Guide RNA
gaugugaaugagagaaauacau

SEQ ID NO: 5617 - RNA, 22 nt, Artificial Sequence
  Guide RNA
guaaaguacgucacguacccuu

SEQ ID NO: 5618 - RNA, 22 nt, Artificial Sequence
  Guide RNA
guacccuuuuuauguauuucuc

SEQ ID NO: 5619 - RNA, 22 nt, Artificial Sequence
  Guide RNA
guacgucacguacccuuuuuau

SEQ ID NO: 5620 - RNA, 22 nt, Artificial Sequence
  Guide RNA
gucacguacccuuuuuauguau

SEQ ID NO: 5621 - RNA, 22 nt, Artificial Sequence
  Guide RNA
uaaaaaggguacgugacguacu

SEQ ID NO: 5622 - RNA, 22 nt, Artificial Sequence
  Guide RNA
uaaaguacgucacguacccuuu

SEQ ID NO: 5623 - RNA, 22 nt, Artificial Sequence
  Guide RNA
uacauaaaaaggguacgugacg

SEQ ID NO: 5624 - RNA, 22 nt, Artificial Sequence
  Guide RNA
uacgucacguacccuuuuuaug

SEQ ID NO: 5625 - RNA, 22 nt, Artificial Sequence
  Guide RNA
ucacguacccuuuuuauguauu

SEQ ID NO: 5626 - RNA, 22 nt, Artificial Sequence
  Guide RNA
ugagagaaauacauaaaaaggg

SEQ ID NO: 5627 - RNA, 20 nt, Artificial Sequence
  Guide RNA
aaagucaaagucuuacuuga

SEQ ID NO: 5628 - RNA, 20 nt, Artificial Sequence
  Guide RNA
aaguaagacuuugacuuuca

SEQ ID NO: 5629 - RNA, 20 nt, Artificial Sequence
  Guide RNA
aagucaaagucuuacuugau

SEQ ID NO: 5630 - RNA, 20 nt, Artificial Sequence
  Guide RNA
acuuaucaaguaagacuuug

SEQ ID NO: 5631 - RNA, 20 nt, Artificial Sequence
  Guide RNA
aguaagacuuugacuuucaa

SEQ ID NO: 5632 - RNA, 20 nt, Artificial Sequence
  Guide RNA
agucaaagucuuacuugaua

SEQ ID NO: 5633 - RNA, 20 nt, Artificial Sequence
  Guide RNA
agucuuacuugauaaguaag

SEQ ID NO: 5634 - RNA, 20 nt, Artificial Sequence
  Guide RNA
aucaaguaagacuuugacuu

SEQ ID NO: 5635 - RNA, 20 nt, Artificial Sequence
  Guide RNA
caaagucuuacuugauaagu

SEQ ID NO: 5636 - RNA, 20 nt, Artificial Sequence
  Guide RNA
caaguaagacuuugacuuuc

SEQ ID NO: 5637 - RNA, 20 nt, Artificial Sequence
  Guide RNA
cuuacuuaucaaguaagacu

SEQ ID NO: 5638 - RNA, 20 nt, Artificial Sequence
  Guide RNA
cuuaucaaguaagacuuuga

SEQ ID NO: 5639 - RNA, 20 nt, Artificial Sequence
  Guide RNA
gaaagucaaagucuuacuug

SEQ ID NO: 5640 - RNA, 20 nt, Artificial Sequence
  Guide RNA
gucaaagucuuacuugauaa

SEQ ID NO: 5641 - RNA, 20 nt, Artificial Sequence
  Guide RNA
gucuuacuugauaaguaaga

SEQ ID NO: 5642 - RNA, 20 nt, Artificial Sequence
  Guide RNA
uaucaaguaagacuuugacu

SEQ ID NO: 5643 - RNA, 20 nt, Artificial Sequence
  Guide RNA
ucaaagucuuacuugauaag

SEQ ID NO: 5644 - RNA, 20 nt, Artificial Sequence
  Guide RNA
ucaaguaagacuuugacuuu

SEQ ID NO: 5645 - RNA, 20 nt, Artificial Sequence
  Guide RNA
ucuuacuuaucaaguaagac

SEQ ID NO: 5646 - RNA, 20 nt, Artificial Sequence
  Guide RNA
ugaaagucaaagucuuacuu

SEQ ID NO: 5647 - RNA, 20 nt, Artificial Sequence
  Guide RNA
uuaucaaguaagacuuugac

SEQ ID NO: 5648 - RNA, 20 nt, Artificial Sequence
  Guide RNA
uugaaagucaaagucuuacu

SEQ ID NO: 5649 - RNA, 20 nt, Artificial Sequence
  Guide RNA
uuugaaagucaaagucuuac

SEQ ID NO: 5650 - RNA, 21 nt, Artificial Sequence
  Guide RNA
caaguaagacuuugacuuuca

SEQ ID NO: 5651 - RNA, 21 nt, Artificial Sequence
  Guide RNA
cuuaucaaguaagacuuugac

SEQ ID NO: 5652 - RNA, 21 nt, Artificial Sequence
  Guide RNA
gaaagucaaagucuuacuuga

SEQ ID NO: 5653 - RNA, 21 nt, Artificial Sequence
  Guide RNA
gucaaagucuuacuugauaag

SEQ ID NO: 5654 - RNA, 21 nt, Artificial Sequence
  Guide RNA
ucaaguaagacuuugacuuuc

SEQ ID NO: 5655 - RNA, 21 nt, Artificial Sequence
  Guide RNA
ugaaagucaaagucuuacuug

SEQ ID NO: 5656 - RNA, 22 nt, Artificial Sequence
  Guide RNA
acuuaucaaguaagacuuugac

SEQ ID NO: 5657 - RNA, 22 nt, Artificial Sequence
  Guide RNA
agucaaagucuuacuugauaag

SEQ ID NO: 5658 - RNA, 22 nt, Artificial Sequence
  Guide RNA
aucaaguaagacuuugacuuuc

SEQ ID NO: 5659 - RNA, 22 nt, Artificial Sequence
  Guide RNA
caaguaagacuuugacuuucaa

SEQ ID NO: 5660 - RNA, 22 nt, Artificial Sequence
  Guide RNA
cuuaucaaguaagacuuugacu

SEQ ID NO: 5661 - RNA, 22 nt, Artificial Sequence
  Guide RNA
gaaagucaaagucuuacuugau

SEQ ID NO: 5662 - RNA, 22 nt, Artificial Sequence
  Guide RNA
gucaaagucuuacuugauaagu

SEQ ID NO: 5663 - RNA, 22 nt, Artificial Sequence
  Guide RNA
ucaaguaagacuuugacuuuca

SEQ ID NO: 5664 - RNA, 22 nt, Artificial Sequence
  Guide RNA
ugaaagucaaagucuuacuuga

SEQ ID NO: 5665 - RNA, 22 nt, Artificial Sequence
  Guide RNA
uugaaagucaaagucuuacuug

SEQ ID NO: 5666 - RNA, 20 nt, Artificial Sequence
  Guide RNA
aaauuauaauccagcucuug

SEQ ID NO: 5667 - RNA, 20 nt, Artificial Sequence
  Guide RNA
aaauugcaagagcuggauua

SEQ ID NO: 5668 - RNA, 20 nt, Artificial Sequence
  Guide RNA
aagagcuggauuauaauuug

SEQ ID NO: 5669 - RNA, 20 nt, Artificial Sequence
  Guide RNA
aauccagcucuugcaauuuc

SEQ ID NO: 5670 - RNA, 20 nt, Artificial Sequence
  Guide RNA
aauuauaauccagcucuugc

SEQ ID NO: 5671 - RNA, 20 nt, Artificial Sequence
  Guide RNA
aauugcaagagcuggauuau

SEQ ID NO: 5672 - RNA, 20 nt, Artificial Sequence
  Guide RNA
agagcuggauuauaauuuga

SEQ ID NO: 5673 - RNA, 20 nt, Artificial Sequence
  Guide RNA
auaauccagcucuugcaauu

SEQ ID NO: 5674 - RNA, 20 nt, Artificial Sequence
  Guide RNA
auccagcucuugcaauuuca

SEQ ID NO: 5675 - RNA, 20 nt, Artificial Sequence
  Guide RNA
auuauaauccagcucuugca

SEQ ID NO: 5676 - RNA, 20 nt, Artificial Sequence
  Guide RNA
auugcaagagcuggauuaua

SEQ ID NO: 5677 - RNA, 20 nt, Artificial Sequence
  Guide RNA
caaauuauaauccagcucuu

SEQ ID NO: 5678 - RNA, 20 nt, Artificial Sequence
  Guide RNA
caagagcuggauuauaauuu

SEQ ID NO: 5679 - RNA, 20 nt, Artificial Sequence
  Guide RNA
cuuucaaauuauaauccagc

SEQ ID NO: 5680 - RNA, 20 nt, Artificial Sequence
  Guide RNA
gaaauugcaagagcuggauu

SEQ ID NO: 5681 - RNA, 20 nt, Artificial Sequence
  Guide RNA
gagcuggauuauaauuugaa

SEQ ID NO: 5682 - RNA, 20 nt, Artificial Sequence
  Guide RNA
gcaagagcuggauuauaauu

SEQ ID NO: 5683 - RNA, 20 nt, Artificial Sequence
  Guide RNA
gcuggauuauaauuugaaag

SEQ ID NO: 5684 - RNA, 20 nt, Artificial Sequence
  Guide RNA
ggugaaauugcaagagcugg

SEQ ID NO: 5685 - RNA, 20 nt, Artificial Sequence
  Guide RNA
gugaaauugcaagagcugga

SEQ ID NO: 5686 - RNA, 20 nt, Artificial Sequence
  Guide RNA
guuggugaaauugcaagagc

SEQ ID NO: 5687 - RNA, 20 nt, Artificial Sequence
  Guide RNA
uaauccagcucuugcaauuu

SEQ ID NO: 5688 - RNA, 20 nt, Artificial Sequence
  Guide RNA
uauaauccagcucuugcaau

SEQ ID NO: 5689 - RNA, 20 nt, Artificial Sequence
  Guide RNA
ucaaauuauaauccagcucu

SEQ ID NO: 5690 - RNA, 20 nt, Artificial Sequence
  Guide RNA
uccagcucuugcaauuucac

SEQ ID NO: 5691 - RNA, 20 nt, Artificial Sequence
  Guide RNA
ugaaauugcaagagcuggau

SEQ ID NO: 5692 - RNA, 20 nt, Artificial Sequence
  Guide RNA
ugcaagagcuggauuauaau

SEQ ID NO: 5693 - RNA, 20 nt, Artificial Sequence
  Guide RNA
uggugaaauugcaagagcug

SEQ ID NO: 5694 - RNA, 20 nt, Artificial Sequence
  Guide RNA
uguuggugaaauugcaagag

SEQ ID NO: 5695 - RNA, 20 nt, Artificial Sequence
  Guide RNA
uuauaauccagcucuugcaa

SEQ ID NO: 5696 - RNA, 20 nt, Artificial Sequence
  Guide RNA
uucaaauuauaauccagcuc

SEQ ID NO: 5697 - RNA, 20 nt, Artificial Sequence
  Guide RNA
uugcaagagcuggauuauaa

SEQ ID NO: 5698 - RNA, 20 nt, Artificial Sequence
  Guide RNA
uuggugaaauugcaagagcu

SEQ ID NO: 5699 - RNA, 21 nt, Artificial Sequence
  Guide RNA
aaauuauaauccagcucuugc

SEQ ID NO: 5700 - RNA, 21 nt, Artificial Sequence
  Guide RNA
aaauugcaagagcuggauuau

SEQ ID NO: 5701 - RNA, 21 nt, Artificial Sequence
  Guide RNA
aauccagcucuugcaauuuca

SEQ ID NO: 5702 - RNA, 21 nt, Artificial Sequence
  Guide RNA
aauuauaauccagcucuugca

SEQ ID NO: 5703 - RNA, 21 nt, Artificial Sequence
  Guide RNA
aauugcaagagcuggauuaua

SEQ ID NO: 5704 - RNA, 21 nt, Artificial Sequence
  Guide RNA
auaauccagcucuugcaauuu

SEQ ID NO: 5705 - RNA, 21 nt, Artificial Sequence
  Guide RNA
auccagcucuugcaauuucac

SEQ ID NO: 5706 - RNA, 21 nt, Artificial Sequence
  Guide RNA
auuauaauccagcucuugcaa

SEQ ID NO: 5707 - RNA, 21 nt, Artificial Sequence
  Guide RNA
auugcaagagcuggauuauaa

SEQ ID NO: 5708 - RNA, 21 nt, Artificial Sequence
  Guide RNA
caaauuauaauccagcucuug

SEQ ID NO: 5709 - RNA, 21 nt, Artificial Sequence
  Guide RNA
caagagcuggauuauaauuug

SEQ ID NO: 5710 - RNA, 21 nt, Artificial Sequence
  Guide RNA
cuguuggugaaauugcaagag

SEQ ID NO: 5711 - RNA, 21 nt, Artificial Sequence
  Guide RNA
gaaauugcaagagcuggauua

SEQ ID NO: 5712 - RNA, 21 nt, Artificial Sequence
  Guide RNA
gcaagagcuggauuauaauuu

SEQ ID NO: 5713 - RNA, 21 nt, Artificial Sequence
  Guide RNA
ggugaaauugcaagagcugga

SEQ ID NO: 5714 - RNA, 21 nt, Artificial Sequence
  Guide RNA
gugaaauugcaagagcuggau

SEQ ID NO: 5715 - RNA, 21 nt, Artificial Sequence
  Guide RNA
guuggugaaauugcaagagcu

SEQ ID NO: 5716 - RNA, 21 nt, Artificial Sequence
  Guide RNA
uaauccagcucuugcaauuuc

SEQ ID NO: 5717 - RNA, 21 nt, Artificial Sequence
  Guide RNA
uauaauccagcucuugcaauu

SEQ ID NO: 5718 - RNA, 21 nt, Artificial Sequence
  Guide RNA
uccagcucuugcaauuucacc

SEQ ID NO: 5719 - RNA, 21 nt, Artificial Sequence
  Guide RNA
ugaaauugcaagagcuggauu

SEQ ID NO: 5720 - RNA, 21 nt, Artificial Sequence
  Guide RNA
ugcaagagcuggauuauaauu

SEQ ID NO: 5721 - RNA, 21 nt, Artificial Sequence
  Guide RNA
uggugaaauugcaagagcugg

SEQ ID NO: 5722 - RNA, 21 nt, Artificial Sequence
  Guide RNA
uguuggugaaauugcaagagc

SEQ ID NO: 5723 - RNA, 21 nt, Artificial Sequence
  Guide RNA
uuauaauccagcucuugcaau

SEQ ID NO: 5724 - RNA, 21 nt, Artificial Sequence
  Guide RNA
uugcaagagcuggauuauaau

SEQ ID NO: 5725 - RNA, 21 nt, Artificial Sequence
  Guide RNA
uuggugaaauugcaagagcug

SEQ ID NO: 5726 - RNA, 22 nt, Artificial Sequence
  Guide RNA
aaauuauaauccagcucuugca

SEQ ID NO: 5727 - RNA, 22 nt, Artificial Sequence
  Guide RNA
aaauugcaagagcuggauuaua

SEQ ID NO: 5728 - RNA, 22 nt, Artificial Sequence
  Guide RNA
aauccagcucuugcaauuucac

SEQ ID NO: 5729 - RNA, 22 nt, Artificial Sequence
  Guide RNA
aauuauaauccagcucuugcaa

SEQ ID NO: 5730 - RNA, 22 nt, Artificial Sequence
  Guide RNA
aauugcaagagcuggauuauaa

SEQ ID NO: 5731 - RNA, 22 nt, Artificial Sequence
  Guide RNA
acuguuggugaaauugcaagag

SEQ ID NO: 5732 - RNA, 22 nt, Artificial Sequence
  Guide RNA
auaauccagcucuugcaauuuc

SEQ ID NO: 5733 - RNA, 22 nt, Artificial Sequence
  Guide RNA
auccagcucuugcaauuucacc

SEQ ID NO: 5734 - RNA, 22 nt, Artificial Sequence
  Guide RNA
auuauaauccagcucuugcaau

SEQ ID NO: 5735 - RNA, 22 nt, Artificial Sequence
  Guide RNA
auugcaagagcuggauuauaau

SEQ ID NO: 5736 - RNA, 22 nt, Artificial Sequence
  Guide RNA
caaauuauaauccagcucuugc

SEQ ID NO: 5737 - RNA, 22 nt, Artificial Sequence
  Guide RNA
caagagcuggauuauaauuuga

SEQ ID NO: 5738 - RNA, 22 nt, Artificial Sequence
  Guide RNA
cuguuggugaaauugcaagagc

SEQ ID NO: 5739 - RNA, 22 nt, Artificial Sequence
  Guide RNA
cuuucaaauuauaauccagcuc

SEQ ID NO: 5740 - RNA, 22 nt, Artificial Sequence
  Guide RNA
gaaauugcaagagcuggauuau

SEQ ID NO: 5741 - RNA, 22 nt, Artificial Sequence
  Guide RNA
gacuuucaaauuauaauccagc

SEQ ID NO: 5742 - RNA, 22 nt, Artificial Sequence
  Guide RNA
gagcuggauuauaauuugaaag

SEQ ID NO: 5743 - RNA, 22 nt, Artificial Sequence
  Guide RNA
gcaagagcuggauuauaauuug

SEQ ID NO: 5744 - RNA, 22 nt, Artificial Sequence
  Guide RNA
gcuggauuauaauuugaaaguc

SEQ ID NO: 5745 - RNA, 22 nt, Artificial Sequence
  Guide RNA
ggugaaauugcaagagcuggau

SEQ ID NO: 5746 - RNA, 22 nt, Artificial Sequence
  Guide RNA
gugaaauugcaagagcuggauu

SEQ ID NO: 5747 - RNA, 22 nt, Artificial Sequence
  Guide RNA
guuggugaaauugcaagagcug

SEQ ID NO: 5748 - RNA, 22 nt, Artificial Sequence
  Guide RNA
uaauccagcucuugcaauuuca

SEQ ID NO: 5749 - RNA, 22 nt, Artificial Sequence
  Guide RNA
uauaauccagcucuugcaauuu

SEQ ID NO: 5750 - RNA, 22 nt, Artificial Sequence
  Guide RNA
ucaaauuauaauccagcucuug

SEQ ID NO: 5751 - RNA, 22 nt, Artificial Sequence
  Guide RNA
uccagcucuugcaauuucacca

SEQ ID NO: 5752 - RNA, 22 nt, Artificial Sequence
  Guide RNA
ugaaauugcaagagcuggauua

SEQ ID NO: 5753 - RNA, 22 nt, Artificial Sequence
  Guide RNA
ugcaagagcuggauuauaauuu

SEQ ID NO: 5754 - RNA, 22 nt, Artificial Sequence
  Guide RNA
uggugaaauugcaagagcugga

SEQ ID NO: 5755 - RNA, 22 nt, Artificial Sequence
  Guide RNA
uguuggugaaauugcaagagcu

SEQ ID NO: 5756 - RNA, 22 nt, Artificial Sequence
  Guide RNA
uuauaauccagcucuugcaauu

SEQ ID NO: 5757 - RNA, 22 nt, Artificial Sequence
  Guide RNA
uugcaagagcuggauuauaauu

SEQ ID NO: 5758 - RNA, 22 nt, Artificial Sequence
  Guide RNA
uuggugaaauugcaagagcugg

SEQ ID NO: 5759 - RNA, 20 nt, Artificial Sequence
  Guide RNA
aauucagcucuugaaauuuc

SEQ ID NO: 5760 - RNA, 20 nt, Artificial Sequence
  Guide RNA
acuguuggugaaauuucaag

SEQ ID NO: 5761 - RNA, 20 nt, Artificial Sequence
  Guide RNA
agacuguuggugaaauuuca

SEQ ID NO: 5762 - RNA, 20 nt, Artificial Sequence
  Guide RNA
agcucuugaaauuucaccaa

SEQ ID NO: 5763 - RNA, 20 nt, Artificial Sequence
  Guide RNA
auucagcucuugaaauuuca

SEQ ID NO: 5764 - RNA, 20 nt, Artificial Sequence
  Guide RNA
cagacuguuggugaaauuuc

SEQ ID NO: 5765 - RNA, 20 nt, Artificial Sequence
  Guide RNA
cagcucuugaaauuucacca

SEQ ID NO: 5766 - RNA, 20 nt, Artificial Sequence
  Guide RNA
ccagacuguuggugaaauuu

SEQ ID NO: 5767 - RNA, 20 nt, Artificial Sequence
  Guide RNA
cucuugaaauuucaccaaca

SEQ ID NO: 5768 - RNA, 20 nt, Artificial Sequence
  Guide RNA
cuguuggugaaauuucaaga

SEQ ID NO: 5769 - RNA, 20 nt, Artificial Sequence
  Guide RNA
cuugaaauuucaccaacagu

SEQ ID NO: 5770 - RNA, 20 nt, Artificial Sequence
  Guide RNA
cuuuccagacuguuggugaa

SEQ ID NO: 5771 - RNA, 20 nt, Artificial Sequence
  Guide RNA
gaaauuucaagagcugaauu

SEQ ID NO: 5772 - RNA, 20 nt, Artificial Sequence
  Guide RNA
gaaauuucaccaacagucug

SEQ ID NO: 5773 - RNA, 20 nt, Artificial Sequence
  Guide RNA
gacuguuggugaaauuucaa

SEQ ID NO: 5774 - RNA, 20 nt, Artificial Sequence
  Guide RNA
gcucuugaaauuucaccaac

SEQ ID NO: 5775 - RNA, 20 nt, Artificial Sequence
  Guide RNA
ggugaaauuucaagagcuga

SEQ ID NO: 5776 - RNA, 20 nt, Artificial Sequence
  Guide RNA
gugaaauuucaagagcugaa

SEQ ID NO: 5777 - RNA, 20 nt, Artificial Sequence
  Guide RNA
guuggugaaauuucaagagc

SEQ ID NO: 5778 - RNA, 20 nt, Artificial Sequence
  Guide RNA
ucagcucuugaaauuucacc

SEQ ID NO: 5779 - RNA, 20 nt, Artificial Sequence
  Guide RNA
uccagacuguuggugaaauu

SEQ ID NO: 5780 - RNA, 20 nt, Artificial Sequence
  Guide RNA
ucuugaaauuucaccaacag

SEQ ID NO: 5781 - RNA, 20 nt, Artificial Sequence
  Guide RNA
ugaaauuucaagagcugaau

SEQ ID NO: 5782 - RNA, 20 nt, Artificial Sequence
  Guide RNA
ugaaauuucaccaacagucu

SEQ ID NO: 5783 - RNA, 20 nt, Artificial Sequence
  Guide RNA
uggugaaauuucaagagcug

SEQ ID NO: 5784 - RNA, 20 nt, Artificial Sequence
  Guide RNA
uguuggugaaauuucaagag

SEQ ID NO: 5785 - RNA, 20 nt, Artificial Sequence
  Guide RNA
uucagcucuugaaauuucac

SEQ ID NO: 5786 - RNA, 20 nt, Artificial Sequence
  Guide RNA
uuccagacuguuggugaaau

SEQ ID NO: 5787 - RNA, 20 nt, Artificial Sequence
  Guide RNA
uugaaauuucaccaacaguc

SEQ ID NO: 5788 - RNA, 20 nt, Artificial Sequence
  Guide RNA
uuggugaaauuucaagagcu

SEQ ID NO: 5789 - RNA, 20 nt, Artificial Sequence
  Guide RNA
uuuccagacuguuggugaaa

SEQ ID NO: 5790 - RNA, 21 nt, Artificial Sequence
  Guide RNA
acuguuggugaaauuucaaga

SEQ ID NO: 5791 - RNA, 21 nt, Artificial Sequence
  Guide RNA
agacuguuggugaaauuucaa

SEQ ID NO: 5792 - RNA, 21 nt, Artificial Sequence
  Guide RNA
agcucuugaaauuucaccaac

SEQ ID NO: 5793 - RNA, 21 nt, Artificial Sequence
  Guide RNA
auucagcucuugaaauuucac

SEQ ID NO: 5794 - RNA, 21 nt, Artificial Sequence
  Guide RNA
cagacuguuggugaaauuuca

SEQ ID NO: 5795 - RNA, 21 nt, Artificial Sequence
  Guide RNA
cagcucuugaaauuucaccaa

SEQ ID NO: 5796 - RNA, 21 nt, Artificial Sequence
  Guide RNA
ccagacuguuggugaaauuuc

SEQ ID NO: 5797 - RNA, 21 nt, Artificial Sequence
  Guide RNA
cucuugaaauuucaccaacag

SEQ ID NO: 5798 - RNA, 21 nt, Artificial Sequence
  Guide RNA
cuguuggugaaauuucaagag

SEQ ID NO: 5799 - RNA, 21 nt, Artificial Sequence
  Guide RNA
cuugaaauuucaccaacaguc

SEQ ID NO: 5800 - RNA, 21 nt, Artificial Sequence
  Guide RNA
cuuuccagacuguuggugaaa

SEQ ID NO: 5801 - RNA, 21 nt, Artificial Sequence
  Guide RNA
gaaauuucaccaacagucugg

SEQ ID NO: 5802 - RNA, 21 nt, Artificial Sequence
  Guide RNA
gacuguuggugaaauuucaag

SEQ ID NO: 5803 - RNA, 21 nt, Artificial Sequence
  Guide RNA
gcucuugaaauuucaccaaca

SEQ ID NO: 5804 - RNA, 21 nt, Artificial Sequence
  Guide RNA
ggugaaauuucaagagcugaa

SEQ ID NO: 5805 - RNA, 21 nt, Artificial Sequence
  Guide RNA
gugaaauuucaagagcugaau

SEQ ID NO: 5806 - RNA, 21 nt, Artificial Sequence
  Guide RNA
guuggugaaauuucaagagcu

SEQ ID NO: 5807 - RNA, 21 nt, Artificial Sequence
  Guide RNA
ucagcucuugaaauuucacca

SEQ ID NO: 5808 - RNA, 21 nt, Artificial Sequence
  Guide RNA
uccagacuguuggugaaauuu

SEQ ID NO: 5809 - RNA, 21 nt, Artificial Sequence
  Guide RNA
ucuugaaauuucaccaacagu

SEQ ID NO: 5810 - RNA, 21 nt, Artificial Sequence
  Guide RNA
ucuuuccagacuguuggugaa

SEQ ID NO: 5811 - RNA, 21 nt, Artificial Sequence
  Guide RNA
ugaaauuucaccaacagucug

SEQ ID NO: 5812 - RNA, 21 nt, Artificial Sequence
  Guide RNA
uggugaaauuucaagagcuga

SEQ ID NO: 5813 - RNA, 21 nt, Artificial Sequence
  Guide RNA
uguuggugaaauuucaagagc

SEQ ID NO: 5814 - RNA, 21 nt, Artificial Sequence
  Guide RNA
uucagcucuugaaauuucacc

SEQ ID NO: 5815 - RNA, 21 nt, Artificial Sequence
  Guide RNA
uuccagacuguuggugaaauu

SEQ ID NO: 5816 - RNA, 21 nt, Artificial Sequence
  Guide RNA
uugaaauuucaccaacagucu

SEQ ID NO: 5817 - RNA, 21 nt, Artificial Sequence
  Guide RNA
uuggugaaauuucaagagcug

SEQ ID NO: 5818 - RNA, 21 nt, Artificial Sequence
  Guide RNA
uuuccagacuguuggugaaau

SEQ ID NO: 5819 - RNA, 22 nt, Artificial Sequence
  Guide RNA
aauucagcucuugaaauuucac

SEQ ID NO: 5820 - RNA, 22 nt, Artificial Sequence
  Guide RNA
acuguuggugaaauuucaagag

SEQ ID NO: 5821 - RNA, 22 nt, Artificial Sequence
  Guide RNA
agacuguuggugaaauuucaag

SEQ ID NO: 5822 - RNA, 22 nt, Artificial Sequence
  Guide RNA
agcucuugaaauuucaccaaca

SEQ ID NO: 5823 - RNA, 22 nt, Artificial Sequence
  Guide RNA
auucagcucuugaaauuucacc

SEQ ID NO: 5824 - RNA, 22 nt, Artificial Sequence
  Guide RNA
cagacuguuggugaaauuucaa

SEQ ID NO: 5825 - RNA, 22 nt, Artificial Sequence
  Guide RNA
cagcucuugaaauuucaccaac

SEQ ID NO: 5826 - RNA, 22 nt, Artificial Sequence
  Guide RNA
ccagacuguuggugaaauuuca

SEQ ID NO: 5827 - RNA, 22 nt, Artificial Sequence
  Guide RNA
cucuugaaauuucaccaacagu

SEQ ID NO: 5828 - RNA, 22 nt, Artificial Sequence
  Guide RNA
cuguuggugaaauuucaagagc

SEQ ID NO: 5829 - RNA, 22 nt, Artificial Sequence
  Guide RNA
cuugaaauuucaccaacagucu

SEQ ID NO: 5830 - RNA, 22 nt, Artificial Sequence
  Guide RNA
cuuuccagacuguuggugaaau

SEQ ID NO: 5831 - RNA, 22 nt, Artificial Sequence
  Guide RNA
gaaauuucaccaacagucugga

SEQ ID NO: 5832 - RNA, 22 nt, Artificial Sequence
  Guide RNA
gacuguuggugaaauuucaaga

SEQ ID NO: 5833 - RNA, 22 nt, Artificial Sequence
  Guide RNA
gcucuugaaauuucaccaacag

SEQ ID NO: 5834 - RNA, 22 nt, Artificial Sequence
  Guide RNA
ggugaaauuucaagagcugaau

SEQ ID NO: 5835 - RNA, 22 nt, Artificial Sequence
  Guide RNA
gugaaauuucaagagcugaauu

SEQ ID NO: 5836 - RNA, 22 nt, Artificial Sequence
  Guide RNA
guuggugaaauuucaagagcug

SEQ ID NO: 5837 - RNA, 22 nt, Artificial Sequence
  Guide RNA
ucagcucuugaaauuucaccaa

SEQ ID NO: 5838 - RNA, 22 nt, Artificial Sequence
  Guide RNA
uccagacuguuggugaaauuuc

SEQ ID NO: 5839 - RNA, 22 nt, Artificial Sequence
  Guide RNA
ucuugaaauuucaccaacaguc

SEQ ID NO: 5840 - RNA, 22 nt, Artificial Sequence
  Guide RNA
ucuuuccagacuguuggugaaa

SEQ ID NO: 5841 - RNA, 22 nt, Artificial Sequence
  Guide RNA
ugaaauuucaccaacagucugg

SEQ ID NO: 5842 - RNA, 22 nt, Artificial Sequence
  Guide RNA
uggugaaauuucaagagcugaa

SEQ ID NO: 5843 - RNA, 22 nt, Artificial Sequence
  Guide RNA
uguuggugaaauuucaagagcu

SEQ ID NO: 5844 - RNA, 22 nt, Artificial Sequence
  Guide RNA
uucagcucuugaaauuucacca

SEQ ID NO: 5845 - RNA, 22 nt, Artificial Sequence
  Guide RNA
uuccagacuguuggugaaauuu

SEQ ID NO: 5846 - RNA, 22 nt, Artificial Sequence
  Guide RNA
uucuuuccagacuguuggugaa

SEQ ID NO: 5847 - RNA, 22 nt, Artificial Sequence
  Guide RNA
uugaaauuucaccaacagucug

SEQ ID NO: 5848 - RNA, 22 nt, Artificial Sequence
  Guide RNA
uuggugaaauuucaagagcuga

SEQ ID NO: 5849 - RNA, 22 nt, Artificial Sequence
  Guide RNA
uuuccagacuguuggugaaauu

SEQ ID NO: 5850 - RNA, 20 nt, Artificial Sequence
  Guide RNA
aaauggcaagagcugaauua

SEQ ID NO: 5851 - RNA, 20 nt, Artificial Sequence
  Guide RNA
aauggcaagagcugaauuau

SEQ ID NO: 5852 - RNA, 20 nt, Artificial Sequence
  Guide RNA
aauuauaauucagcucuugc

SEQ ID NO: 5853 - RNA, 20 nt, Artificial Sequence
  Guide RNA
aauucagcucuugccauuuc

SEQ ID NO: 5854 - RNA, 20 nt, Artificial Sequence
  Guide RNA
acuguuggugaaauggcaag

SEQ ID NO: 5855 - RNA, 20 nt, Artificial Sequence
  Guide RNA
agacuguuggugaaauggca

SEQ ID NO: 5856 - RNA, 20 nt, Artificial Sequence
  Guide RNA
agcucuugccauuucaccaa

SEQ ID NO: 5857 - RNA, 20 nt, Artificial Sequence
  Guide RNA
auaauucagcucuugccauu

SEQ ID NO: 5858 - RNA, 20 nt, Artificial Sequence
  Guide RNA
auggcaagagcugaauuaua

SEQ ID NO: 5859 - RNA, 20 nt, Artificial Sequence
  Guide RNA
auuauaauucagcucuugcc

SEQ ID NO: 5860 - RNA, 20 nt, Artificial Sequence
  Guide RNA
auucagcucuugccauuuca

SEQ ID NO: 5861 - RNA, 20 nt, Artificial Sequence
  Guide RNA
cagacuguuggugaaauggc

SEQ ID NO: 5862 - RNA, 20 nt, Artificial Sequence
  Guide RNA
cagcucuugccauuucacca

SEQ ID NO: 5863 - RNA, 20 nt, Artificial Sequence
  Guide RNA
ccagacuguuggugaaaugg

SEQ ID NO: 5864 - RNA, 20 nt, Artificial Sequence
  Guide RNA
ccauuucaccaacagucugg

SEQ ID NO: 5865 - RNA, 20 nt, Artificial Sequence
  Guide RNA
cucuugccauuucaccaaca

SEQ ID NO: 5866 - RNA, 20 nt, Artificial Sequence
  Guide RNA
cuguuggugaaauggcaaga

SEQ ID NO: 5867 - RNA, 20 nt, Artificial Sequence
  Guide RNA
cuugccauuucaccaacagu

SEQ ID NO: 5868 - RNA, 20 nt, Artificial Sequence
  Guide RNA
gaaauggcaagagcugaauu

SEQ ID NO: 5869 - RNA, 20 nt, Artificial Sequence
  Guide RNA
gacuguuggugaaauggcaa

SEQ ID NO: 5870 - RNA, 20 nt, Artificial Sequence
  Guide RNA
gccauuucaccaacagucug

SEQ ID NO: 5871 - RNA, 20 nt, Artificial Sequence
  Guide RNA
gcucuugccauuucaccaac

SEQ ID NO: 5872 - RNA, 20 nt, Artificial Sequence
  Guide RNA
ggugaaauggcaagagcuga

SEQ ID NO: 5873 - RNA, 20 nt, Artificial Sequence
  Guide RNA
gugaaauggcaagagcugaa

SEQ ID NO: 5874 - RNA, 20 nt, Artificial Sequence
  Guide RNA
guuggugaaauggcaagagc

SEQ ID NO: 5875 - RNA, 20 nt, Artificial Sequence
  Guide RNA
uaauucagcucuugccauuu

SEQ ID NO: 5876 - RNA, 20 nt, Artificial Sequence
  Guide RNA
uauaauucagcucuugccau

SEQ ID NO: 5877 - RNA, 20 nt, Artificial Sequence
  Guide RNA
ucagcucuugccauuucacc

SEQ ID NO: 5878 - RNA, 20 nt, Artificial Sequence
  Guide RNA
uccagacuguuggugaaaug

SEQ ID NO: 5879 - RNA, 20 nt, Artificial Sequence
  Guide RNA
ucuugccauuucaccaacag

SEQ ID NO: 5880 - RNA, 20 nt, Artificial Sequence
  Guide RNA
ucuuuccagacuguugguga

SEQ ID NO: 5881 - RNA, 20 nt, Artificial Sequence
  Guide RNA
ugaaauggcaagagcugaau

SEQ ID NO: 5882 - RNA, 20 nt, Artificial Sequence
  Guide RNA
ugccauuucaccaacagucu

SEQ ID NO: 5883 - RNA, 20 nt, Artificial Sequence
  Guide RNA
uggcaagagcugaauuauaa

SEQ ID NO: 5884 - RNA, 20 nt, Artificial Sequence
  Guide RNA
uggugaaauggcaagagcug

SEQ ID NO: 5885 - RNA, 20 nt, Artificial Sequence
  Guide RNA
uguuggugaaauggcaagag

SEQ ID NO: 5886 - RNA, 20 nt, Artificial Sequence
  Guide RNA
uuauaauucagcucuugcca

SEQ ID NO: 5887 - RNA, 20 nt, Artificial Sequence
  Guide RNA
uucagcucuugccauuucac

SEQ ID NO: 5888 - RNA, 20 nt, Artificial Sequence
  Guide RNA
uugccauuucaccaacaguc

SEQ ID NO: 5889 - RNA, 20 nt, Artificial Sequence
  Guide RNA
uuggugaaauggcaagagcu

SEQ ID NO: 5890 - RNA, 21 nt, Artificial Sequence
  Guide RNA
aaauggcaagagcugaauuau

SEQ ID NO: 5891 - RNA, 21 nt, Artificial Sequence
  Guide RNA
aauggcaagagcugaauuaua

SEQ ID NO: 5892 - RNA, 21 nt, Artificial Sequence
  Guide RNA
aauuauaauucagcucuugcc

SEQ ID NO: 5893 - RNA, 21 nt, Artificial Sequence
  Guide RNA
aauucagcucuugccauuuca

SEQ ID NO: 5894 - RNA, 21 nt, Artificial Sequence
  Guide RNA
acuguuggugaaauggcaaga

SEQ ID NO: 5895 - RNA, 21 nt, Artificial Sequence
  Guide RNA
agacuguuggugaaauggcaa

SEQ ID NO: 5896 - RNA, 21 nt, Artificial Sequence
  Guide RNA
agcucuugccauuucaccaac

SEQ ID NO: 5897 - RNA, 21 nt, Artificial Sequence
  Guide RNA
auaauucagcucuugccauuu

SEQ ID NO: 5898 - RNA, 21 nt, Artificial Sequence
  Guide RNA
auggcaagagcugaauuauaa

SEQ ID NO: 5899 - RNA, 21 nt, Artificial Sequence
  Guide RNA
auuauaauucagcucuugcca

SEQ ID NO: 5900 - RNA, 21 nt, Artificial Sequence
  Guide RNA
auucagcucuugccauuucac

SEQ ID NO: 5901 - RNA, 21 nt, Artificial Sequence
  Guide RNA
cagacuguuggugaaauggca

SEQ ID NO: 5902 - RNA, 21 nt, Artificial Sequence
  Guide RNA
cagcucuugccauuucaccaa

SEQ ID NO: 5903 - RNA, 21 nt, Artificial Sequence
  Guide RNA
ccagacuguuggugaaauggc

SEQ ID NO: 5904 - RNA, 21 nt, Artificial Sequence
  Guide RNA
ccauuucaccaacagucugga

SEQ ID NO: 5905 - RNA, 21 nt, Artificial Sequence
  Guide RNA
cucuugccauuucaccaacag

SEQ ID NO: 5906 - RNA, 21 nt, Artificial Sequence
  Guide RNA
cuguuggugaaauggcaagag

SEQ ID NO: 5907 - RNA, 21 nt, Artificial Sequence
  Guide RNA
cuugccauuucaccaacaguc

SEQ ID NO: 5908 - RNA, 21 nt, Artificial Sequence
  Guide RNA
gaaauggcaagagcugaauua

SEQ ID NO: 5909 - RNA, 21 nt, Artificial Sequence
  Guide RNA
gacuguuggugaaauggcaag

SEQ ID NO: 5910 - RNA, 21 nt, Artificial Sequence
  Guide RNA
gccauuucaccaacagucugg

SEQ ID NO: 5911 - RNA, 21 nt, Artificial Sequence
  Guide RNA
gcucuugccauuucaccaaca

SEQ ID NO: 5912 - RNA, 21 nt, Artificial Sequence
  Guide RNA
ggugaaauggcaagagcugaa

SEQ ID NO: 5913 - RNA, 21 nt, Artificial Sequence
  Guide RNA
gugaaauggcaagagcugaau

SEQ ID NO: 5914 - RNA, 21 nt, Artificial Sequence
  Guide RNA
guuggugaaauggcaagagcu

SEQ ID NO: 5915 - RNA, 21 nt, Artificial Sequence
  Guide RNA
uaauucagcucuugccauuuc

SEQ ID NO: 5916 - RNA, 21 nt, Artificial Sequence
  Guide RNA
uauaauucagcucuugccauu

SEQ ID NO: 5917 - RNA, 21 nt, Artificial Sequence
  Guide RNA
ucagcucuugccauuucacca

SEQ ID NO: 5918 - RNA, 21 nt, Artificial Sequence
  Guide RNA
uccagacuguuggugaaaugg

SEQ ID NO: 5919 - RNA, 21 nt, Artificial Sequence
  Guide RNA
ucuugccauuucaccaacagu

SEQ ID NO: 5920 - RNA, 21 nt, Artificial Sequence
  Guide RNA
ugaaauggcaagagcugaauu

SEQ ID NO: 5921 - RNA, 21 nt, Artificial Sequence
  Guide RNA
ugccauuucaccaacagucug

SEQ ID NO: 5922 - RNA, 21 nt, Artificial Sequence
  Guide RNA
uggcaagagcugaauuauaau

SEQ ID NO: 5923 - RNA, 21 nt, Artificial Sequence
  Guide RNA
uggugaaauggcaagagcuga

SEQ ID NO: 5924 - RNA, 21 nt, Artificial Sequence
  Guide RNA
uguuggugaaauggcaagagc

SEQ ID NO: 5925 - RNA, 21 nt, Artificial Sequence
  Guide RNA
uuauaauucagcucuugccau

SEQ ID NO: 5926 - RNA, 21 nt, Artificial Sequence
  Guide RNA
uucagcucuugccauuucacc

SEQ ID NO: 5927 - RNA, 21 nt, Artificial Sequence
  Guide RNA
uuccagacuguuggugaaaug

SEQ ID NO: 5928 - RNA, 21 nt, Artificial Sequence
  Guide RNA
uucuuuccagacuguugguga

SEQ ID NO: 5929 - RNA, 21 nt, Artificial Sequence
  Guide RNA
uugccauuucaccaacagucu

SEQ ID NO: 5930 - RNA, 21 nt, Artificial Sequence
  Guide RNA
uuggugaaauggcaagagcug

SEQ ID NO: 5931 - RNA, 22 nt, Artificial Sequence
  Guide RNA
aaauggcaagagcugaauuaua

SEQ ID NO: 5932 - RNA, 22 nt, Artificial Sequence
  Guide RNA
aaauuauaauucagcucuugcc

SEQ ID NO: 5933 - RNA, 22 nt, Artificial Sequence
  Guide RNA
aauggcaagagcugaauuauaa

SEQ ID NO: 5934 - RNA, 22 nt, Artificial Sequence
  Guide RNA
aauuauaauucagcucuugcca

SEQ ID NO: 5935 - RNA, 22 nt, Artificial Sequence
  Guide RNA
aauucagcucuugccauuucac

SEQ ID NO: 5936 - RNA, 22 nt, Artificial Sequence
  Guide RNA
acuguuggugaaauggcaagag

SEQ ID NO: 5937 - RNA, 22 nt, Artificial Sequence
  Guide RNA
agacuguuggugaaauggcaag

SEQ ID NO: 5938 - RNA, 22 nt, Artificial Sequence
  Guide RNA
agcucuugccauuucaccaaca

SEQ ID NO: 5939 - RNA, 22 nt, Artificial Sequence
  Guide RNA
auaauucagcucuugccauuuc

SEQ ID NO: 5940 - RNA, 22 nt, Artificial Sequence
  Guide RNA
auggcaagagcugaauuauaau

SEQ ID NO: 5941 - RNA, 22 nt, Artificial Sequence
  Guide RNA
auuauaauucagcucuugccau

SEQ ID NO: 5942 - RNA, 22 nt, Artificial Sequence
  Guide RNA
auucagcucuugccauuucacc

SEQ ID NO: 5943 - RNA, 22 nt, Artificial Sequence
  Guide RNA
caaauuauaauucagcucuugc

SEQ ID NO: 5944 - RNA, 22 nt, Artificial Sequence
  Guide RNA
cagacuguuggugaaauggcaa

SEQ ID NO: 5945 - RNA, 22 nt, Artificial Sequence
  Guide RNA
cagcucuugccauuucaccaac

SEQ ID NO: 5946 - RNA, 22 nt, Artificial Sequence
  Guide RNA
ccagacuguuggugaaauggca

SEQ ID NO: 5947 - RNA, 22 nt, Artificial Sequence
  Guide RNA
ccauuucaccaacagucuggaa

SEQ ID NO: 5948 - RNA, 22 nt, Artificial Sequence
  Guide RNA
cucuugccauuucaccaacagu

SEQ ID NO: 5949 - RNA, 22 nt, Artificial Sequence
  Guide RNA
cuguuggugaaauggcaagagc

SEQ ID NO: 5950 - RNA, 22 nt, Artificial Sequence
  Guide RNA
cuugccauuucaccaacagucu

SEQ ID NO: 5951 - RNA, 22 nt, Artificial Sequence
  Guide RNA
gaaauggcaagagcugaauuau

SEQ ID NO: 5952 - RNA, 22 nt, Artificial Sequence
  Guide RNA
gacuguuggugaaauggcaaga

SEQ ID NO: 5953 - RNA, 22 nt, Artificial Sequence
  Guide RNA
gccauuucaccaacagucugga

SEQ ID NO: 5954 - RNA, 22 nt, Artificial Sequence
  Guide RNA
gcucuugccauuucaccaacag

SEQ ID NO: 5955 - RNA, 22 nt, Artificial Sequence
  Guide RNA
ggugaaauggcaagagcugaau

SEQ ID NO: 5956 - RNA, 22 nt, Artificial Sequence
  Guide RNA
gugaaauggcaagagcugaauu

SEQ ID NO: 5957 - RNA, 22 nt, Artificial Sequence
  Guide RNA
guuggugaaauggcaagagcug

SEQ ID NO: 5958 - RNA, 22 nt, Artificial Sequence
  Guide RNA
uaauucagcucuugccauuuca

SEQ ID NO: 5959 - RNA, 22 nt, Artificial Sequence
  Guide RNA
uauaauucagcucuugccauuu

SEQ ID NO: 5960 - RNA, 22 nt, Artificial Sequence
  Guide RNA
ucagcucuugccauuucaccaa

SEQ ID NO: 5961 - RNA, 22 nt, Artificial Sequence
  Guide RNA
uccagacuguuggugaaauggc

SEQ ID NO: 5962 - RNA, 22 nt, Artificial Sequence
  Guide RNA
ucuugccauuucaccaacaguc

SEQ ID NO: 5963 - RNA, 22 nt, Artificial Sequence
  Guide RNA
ugaaauggcaagagcugaauua

SEQ ID NO: 5964 - RNA, 22 nt, Artificial Sequence
  Guide RNA
ugccauuucaccaacagucugg

SEQ ID NO: 5965 - RNA, 22 nt, Artificial Sequence
  Guide RNA
uggcaagagcugaauuauaauu

SEQ ID NO: 5966 - RNA, 22 nt, Artificial Sequence
  Guide RNA
uggugaaauggcaagagcugaa

SEQ ID NO: 5967 - RNA, 22 nt, Artificial Sequence
  Guide RNA
uguuggugaaauggcaagagcu

SEQ ID NO: 5968 - RNA, 22 nt, Artificial Sequence
  Guide RNA
uuauaauucagcucuugccauu

SEQ ID NO: 5969 - RNA, 22 nt, Artificial Sequence
  Guide RNA
uucagcucuugccauuucacca

SEQ ID NO: 5970 - RNA, 22 nt, Artificial Sequence
  Guide RNA
uuccagacuguuggugaaaugg

SEQ ID NO: 5971 - RNA, 22 nt, Artificial Sequence
  Guide RNA
uugccauuucaccaacagucug

SEQ ID NO: 5972 - RNA, 22 nt, Artificial Sequence
  Guide RNA
uuggugaaauggcaagagcuga

SEQ ID NO: 5973 - RNA, 22 nt, Artificial Sequence
  Guide RNA
uuuccagacuguuggugaaaug

SEQ ID NO: 5974 - RNA, 22 nt, Artificial Sequence
  Guide RNA
uuucuuuccagacuguugguga

SEQ ID NO: 5975 - RNA, 20 nt, Artificial Sequence
  Guide RNA
aacuucacagggaacuggac

SEQ ID NO: 5976 - RNA, 20 nt, Artificial Sequence
  Guide RNA
aagacagggguccaguuccc

SEQ ID NO: 5977 - RNA, 20 nt, Artificial Sequence
  Guide RNA
acagggaacuggaccccugu

SEQ ID NO: 5978 - RNA, 20 nt, Artificial Sequence
  Guide RNA
acagggguccaguucccugu

SEQ ID NO: 5979 - RNA, 20 nt, Artificial Sequence
  Guide RNA
accucaacuucacagggaac

SEQ ID NO: 5980 - RNA, 20 nt, Artificial Sequence
  Guide RNA
acuucacagggaacuggacc

SEQ ID NO: 5981 - RNA, 20 nt, Artificial Sequence
  Guide RNA
agacagggguccaguucccu

SEQ ID NO: 5982 - RNA, 20 nt, Artificial Sequence
  Guide RNA
agggaacuggaccccugucu

SEQ ID NO: 5983 - RNA, 20 nt, Artificial Sequence
  Guide RNA
agggguccaguucccuguga

SEQ ID NO: 5984 - RNA, 20 nt, Artificial Sequence
  Guide RNA
aguucccugugaaguugagg

SEQ ID NO: 5985 - RNA, 20 nt, Artificial Sequence
  Guide RNA
caacuucacagggaacugga

SEQ ID NO: 5986 - RNA, 20 nt, Artificial Sequence
  Guide RNA
cacagggaacuggaccccug

SEQ ID NO: 5987 - RNA, 20 nt, Artificial Sequence
  Guide RNA
cagggaacuggaccccuguc

SEQ ID NO: 5988 - RNA, 20 nt, Artificial Sequence
  Guide RNA
cagggguccaguucccugug

SEQ ID NO: 5989 - RNA, 20 nt, Artificial Sequence
  Guide RNA
caguucccugugaaguugag

SEQ ID NO: 5990 - RNA, 20 nt, Artificial Sequence
  Guide RNA
ccaguucccugugaaguuga

SEQ ID NO: 5991 - RNA, 20 nt, Artificial Sequence
  Guide RNA
cccugugaaguugagguaac

SEQ ID NO: 5992 - RNA, 20 nt, Artificial Sequence
  Guide RNA
cccuuguuaccucaacuuca

SEQ ID NO: 5993 - RNA, 20 nt, Artificial Sequence
  Guide RNA
ccucaacuucacagggaacu

SEQ ID NO: 5994 - RNA, 20 nt, Artificial Sequence
  Guide RNA
ccuuguuaccucaacuucac

SEQ ID NO: 5995 - RNA, 20 nt, Artificial Sequence
  Guide RNA
cucaacuucacagggaacug

SEQ ID NO: 5996 - RNA, 20 nt, Artificial Sequence
  Guide RNA
cuucacagggaacuggaccc

SEQ ID NO: 5997 - RNA, 20 nt, Artificial Sequence
  Guide RNA
cuugaagacagggguccagu

SEQ ID NO: 5998 - RNA, 20 nt, Artificial Sequence
  Guide RNA
cuuguuaccucaacuucaca

SEQ ID NO: 5999 - RNA, 20 nt, Artificial Sequence
  Guide RNA
gaagacagggguccaguucc

SEQ ID NO: 6000 - RNA, 20 nt, Artificial Sequence
  Guide RNA
gacagggguccaguucccug

SEQ ID NO: 6001 - RNA, 20 nt, Artificial Sequence
  Guide RNA
gggaacuggaccccugucuu

SEQ ID NO: 6002 - RNA, 20 nt, Artificial Sequence
  Guide RNA
gggguccaguucccugugaa

SEQ ID NO: 6003 - RNA, 20 nt, Artificial Sequence
  Guide RNA
ggguccaguucccugugaag

SEQ ID NO: 6004 - RNA, 20 nt, Artificial Sequence
  Guide RNA
gguccaguucccugugaagu

SEQ ID NO: 6005 - RNA, 20 nt, Artificial Sequence
  Guide RNA
guccaguucccugugaaguu

SEQ ID NO: 6006 - RNA, 20 nt, Artificial Sequence
  Guide RNA
guuaccucaacuucacaggg

SEQ ID NO: 6007 - RNA, 20 nt, Artificial Sequence
  Guide RNA
guucccugugaaguugaggu

SEQ ID NO: 6008 - RNA, 20 nt, Artificial Sequence
  Guide RNA
uaccucaacuucacagggaa

SEQ ID NO: 6009 - RNA, 20 nt, Artificial Sequence
  Guide RNA
ucaacuucacagggaacugg

SEQ ID NO: 6010 - RNA, 20 nt, Artificial Sequence
  Guide RNA
ucacagggaacuggaccccu

SEQ ID NO: 6011 - RNA, 20 nt, Artificial Sequence
  Guide RNA
uccaguucccugugaaguug

SEQ ID NO: 6012 - RNA, 20 nt, Artificial Sequence
  Guide RNA
ucccugugaaguugagguaa

SEQ ID NO: 6013 - RNA, 20 nt, Artificial Sequence
  Guide RNA
ucuugaagacagggguccag

SEQ ID NO: 6014 - RNA, 20 nt, Artificial Sequence
  Guide RNA
ugaagacagggguccaguuc

SEQ ID NO: 6015 - RNA, 20 nt, Artificial Sequence
  Guide RNA
uguuaccucaacuucacagg

SEQ ID NO: 6016 - RNA, 20 nt, Artificial Sequence
  Guide RNA
uuaccucaacuucacaggga

SEQ ID NO: 6017 - RNA, 20 nt, Artificial Sequence
  Guide RNA
uucacagggaacuggacccc

SEQ ID NO: 6018 - RNA, 20 nt, Artificial Sequence
  Guide RNA
uucccugugaaguugaggua

SEQ ID NO: 6019 - RNA, 20 nt, Artificial Sequence
  Guide RNA
uugaagacagggguccaguu

SEQ ID NO: 6020 - RNA, 20 nt, Artificial Sequence
  Guide RNA
uuguuaccucaacuucacag

SEQ ID NO: 6021 - RNA, 21 nt, Artificial Sequence
  Guide RNA
aacuucacagggaacuggacc

SEQ ID NO: 6022 - RNA, 21 nt, Artificial Sequence
  Guide RNA
aagacagggguccaguucccu

SEQ ID NO: 6023 - RNA, 21 nt, Artificial Sequence
  Guide RNA
acagggaacuggaccccuguc

SEQ ID NO: 6024 - RNA, 21 nt, Artificial Sequence
  Guide RNA
acagggguccaguucccugug

SEQ ID NO: 6025 - RNA, 21 nt, Artificial Sequence
  Guide RNA
accucaacuucacagggaacu

SEQ ID NO: 6026 - RNA, 21 nt, Artificial Sequence
  Guide RNA
acuucacagggaacuggaccc

SEQ ID NO: 6027 - RNA, 21 nt, Artificial Sequence
  Guide RNA
agacagggguccaguucccug

SEQ ID NO: 6028 - RNA, 21 nt, Artificial Sequence
  Guide RNA
agggaacuggaccccugucuu

SEQ ID NO: 6029 - RNA, 21 nt, Artificial Sequence
  Guide RNA
agggguccaguucccugugaa

SEQ ID NO: 6030 - RNA, 21 nt, Artificial Sequence
  Guide RNA
aguucccugugaaguugaggu

SEQ ID NO: 6031 - RNA, 21 nt, Artificial Sequence
  Guide RNA
caacuucacagggaacuggac

SEQ ID NO: 6032 - RNA, 21 nt, Artificial Sequence
  Guide RNA
cacagggaacuggaccccugu

SEQ ID NO: 6033 - RNA, 21 nt, Artificial Sequence
  Guide RNA
cagggaacuggaccccugucu

SEQ ID NO: 6034 - RNA, 21 nt, Artificial Sequence
  Guide RNA
cagggguccaguucccuguga

SEQ ID NO: 6035 - RNA, 21 nt, Artificial Sequence
  Guide RNA
caguucccugugaaguugagg

SEQ ID NO: 6036 - RNA, 21 nt, Artificial Sequence
  Guide RNA
ccaguucccugugaaguugag

SEQ ID NO: 6037 - RNA, 21 nt, Artificial Sequence
  Guide RNA
cccugugaaguugagguaaca

SEQ ID NO: 6038 - RNA, 21 nt, Artificial Sequence
  Guide RNA
cccuuguuaccucaacuucac

SEQ ID NO: 6039 - RNA, 21 nt, Artificial Sequence
  Guide RNA
ccucaacuucacagggaacug

SEQ ID NO: 6040 - RNA, 21 nt, Artificial Sequence
  Guide RNA
ccuuguuaccucaacuucaca

SEQ ID NO: 6041 - RNA, 21 nt, Artificial Sequence
  Guide RNA
cucaacuucacagggaacugg

SEQ ID NO: 6042 - RNA, 21 nt, Artificial Sequence
  Guide RNA
cuucacagggaacuggacccc

SEQ ID NO: 6043 - RNA, 21 nt, Artificial Sequence
  Guide RNA
cuugaagacagggguccaguu

SEQ ID NO: 6044 - RNA, 21 nt, Artificial Sequence
  Guide RNA
cuuguuaccucaacuucacag

SEQ ID NO: 6045 - RNA, 21 nt, Artificial Sequence
  Guide RNA
gaagacagggguccaguuccc

SEQ ID NO: 6046 - RNA, 21 nt, Artificial Sequence
  Guide RNA
gacagggguccaguucccugu

SEQ ID NO: 6047 - RNA, 21 nt, Artificial Sequence
  Guide RNA
gggaacuggaccccugucuuc

SEQ ID NO: 6048 - RNA, 21 nt, Artificial Sequence
  Guide RNA
gggguccaguucccugugaag

SEQ ID NO: 6049 - RNA, 21 nt, Artificial Sequence
  Guide RNA
ggguccaguucccugugaagu

SEQ ID NO: 6050 - RNA, 21 nt, Artificial Sequence
  Guide RNA
gguccaguucccugugaaguu

SEQ ID NO: 6051 - RNA, 21 nt, Artificial Sequence
  Guide RNA
guccaguucccugugaaguug

SEQ ID NO: 6052 - RNA, 21 nt, Artificial Sequence
  Guide RNA
gucuugaagacagggguccag

SEQ ID NO: 6053 - RNA, 21 nt, Artificial Sequence
  Guide RNA
guuaccucaacuucacaggga

SEQ ID NO: 6054 - RNA, 21 nt, Artificial Sequence
  Guide RNA
guucccugugaaguugaggua

SEQ ID NO: 6055 - RNA, 21 nt, Artificial Sequence
  Guide RNA
uaccucaacuucacagggaac

SEQ ID NO: 6056 - RNA, 21 nt, Artificial Sequence
  Guide RNA
ucaacuucacagggaacugga

SEQ ID NO: 6057 - RNA, 21 nt, Artificial Sequence
  Guide RNA
ucacagggaacuggaccccug

SEQ ID NO: 6058 - RNA, 21 nt, Artificial Sequence
  Guide RNA
uccaguucccugugaaguuga

SEQ ID NO: 6059 - RNA, 21 nt, Artificial Sequence
  Guide RNA
ucccugugaaguugagguaac

SEQ ID NO: 6060 - RNA, 21 nt, Artificial Sequence
  Guide RNA
ucccuuguuaccucaacuuca

SEQ ID NO: 6061 - RNA, 21 nt, Artificial Sequence
  Guide RNA
ucuugaagacagggguccagu

SEQ ID NO: 6062 - RNA, 21 nt, Artificial Sequence
  Guide RNA
ugaagacagggguccaguucc

SEQ ID NO: 6063 - RNA, 21 nt, Artificial Sequence
  Guide RNA
uguuaccucaacuucacaggg

SEQ ID NO: 6064 - RNA, 21 nt, Artificial Sequence
  Guide RNA
uuaccucaacuucacagggaa

SEQ ID NO: 6065 - RNA, 21 nt, Artificial Sequence
  Guide RNA
uucacagggaacuggaccccu

SEQ ID NO: 6066 - RNA, 21 nt, Artificial Sequence
  Guide RNA
uucccugugaaguugagguaa

SEQ ID NO: 6067 - RNA, 21 nt, Artificial Sequence
  Guide RNA
uugaagacagggguccaguuc

SEQ ID NO: 6068 - RNA, 21 nt, Artificial Sequence
  Guide RNA
uuguuaccucaacuucacagg

SEQ ID NO: 6069 - RNA, 22 nt, Artificial Sequence
  Guide RNA
aacuucacagggaacuggaccc

SEQ ID NO: 6070 - RNA, 22 nt, Artificial Sequence
  Guide RNA
aagacagggguccaguucccug

SEQ ID NO: 6071 - RNA, 22 nt, Artificial Sequence
  Guide RNA
acagggaacuggaccccugucu

SEQ ID NO: 6072 - RNA, 22 nt, Artificial Sequence
  Guide RNA
acagggguccaguucccuguga

SEQ ID NO: 6073 - RNA, 22 nt, Artificial Sequence
  Guide RNA
accucaacuucacagggaacug

SEQ ID NO: 6074 - RNA, 22 nt, Artificial Sequence
  Guide RNA
acuucacagggaacuggacccc

SEQ ID NO: 6075 - RNA, 22 nt, Artificial Sequence
  Guide RNA
agacagggguccaguucccugu

SEQ ID NO: 6076 - RNA, 22 nt, Artificial Sequence
  Guide RNA
agggaacuggaccccugucuuc

SEQ ID NO: 6077 - RNA, 22 nt, Artificial Sequence
  Guide RNA
agggguccaguucccugugaag

SEQ ID NO: 6078 - RNA, 22 nt, Artificial Sequence
  Guide RNA
aguucccugugaaguugaggua

SEQ ID NO: 6079 - RNA, 22 nt, Artificial Sequence
  Guide RNA
caacuucacagggaacuggacc

SEQ ID NO: 6080 - RNA, 22 nt, Artificial Sequence
  Guide RNA
cacagggaacuggaccccuguc

SEQ ID NO: 6081 - RNA, 22 nt, Artificial Sequence
  Guide RNA
cagggaacuggaccccugucuu

SEQ ID NO: 6082 - RNA, 22 nt, Artificial Sequence
  Guide RNA
cagggguccaguucccugugaa

SEQ ID NO: 6083 - RNA, 22 nt, Artificial Sequence
  Guide RNA
caguucccugugaaguugaggu

SEQ ID NO: 6084 - RNA, 22 nt, Artificial Sequence
  Guide RNA
ccaguucccugugaaguugagg

SEQ ID NO: 6085 - RNA, 22 nt, Artificial Sequence
  Guide RNA
cccugugaaguugagguaacaa

SEQ ID NO: 6086 - RNA, 22 nt, Artificial Sequence
  Guide RNA
cccuuguuaccucaacuucaca

SEQ ID NO: 6087 - RNA, 22 nt, Artificial Sequence
  Guide RNA
ccucaacuucacagggaacugg

SEQ ID NO: 6088 - RNA, 22 nt, Artificial Sequence
  Guide RNA
ccuuguuaccucaacuucacag

SEQ ID NO: 6089 - RNA, 22 nt, Artificial Sequence
  Guide RNA
cucaacuucacagggaacugga

SEQ ID NO: 6090 - RNA, 22 nt, Artificial Sequence
  Guide RNA
cuucacagggaacuggaccccu

SEQ ID NO: 6091 - RNA, 22 nt, Artificial Sequence
  Guide RNA
cuugaagacagggguccaguuc

SEQ ID NO: 6092 - RNA, 22 nt, Artificial Sequence
  Guide RNA
cuuguuaccucaacuucacagg

SEQ ID NO: 6093 - RNA, 22 nt, Artificial Sequence
  Guide RNA
gaagacagggguccaguucccu

SEQ ID NO: 6094 - RNA, 22 nt, Artificial Sequence
  Guide RNA
gacagggguccaguucccugug

SEQ ID NO: 6095 - RNA, 22 nt, Artificial Sequence
  Guide RNA
gggaacuggaccccugucuuca

SEQ ID NO: 6096 - RNA, 22 nt, Artificial Sequence
  Guide RNA
gggguccaguucccugugaagu

SEQ ID NO: 6097 - RNA, 22 nt, Artificial Sequence
  Guide RNA
ggguccaguucccugugaaguu

SEQ ID NO: 6098 - RNA, 22 nt, Artificial Sequence
  Guide RNA
gguccaguucccugugaaguug

SEQ ID NO: 6099 - RNA, 22 nt, Artificial Sequence
  Guide RNA
ggucuugaagacagggguccag

SEQ ID NO: 6100 - RNA, 22 nt, Artificial Sequence
  Guide RNA
guccaguucccugugaaguuga

SEQ ID NO: 6101 - RNA, 22 nt, Artificial Sequence
  Guide RNA
gucuugaagacagggguccagu

SEQ ID NO: 6102 - RNA, 22 nt, Artificial Sequence
  Guide RNA
guuaccucaacuucacagggaa

SEQ ID NO: 6103 - RNA, 22 nt, Artificial Sequence
  Guide RNA
guucccugugaaguugagguaa

SEQ ID NO: 6104 - RNA, 22 nt, Artificial Sequence
  Guide RNA
uaccucaacuucacagggaacu

SEQ ID NO: 6105 - RNA, 22 nt, Artificial Sequence
  Guide RNA
ucaacuucacagggaacuggac

SEQ ID NO: 6106 - RNA, 22 nt, Artificial Sequence
  Guide RNA
ucacagggaacuggaccccugu

SEQ ID NO: 6107 - RNA, 22 nt, Artificial Sequence
  Guide RNA
uccaguucccugugaaguugag

SEQ ID NO: 6108 - RNA, 22 nt, Artificial Sequence
  Guide RNA
ucccugugaaguugagguaaca

SEQ ID NO: 6109 - RNA, 22 nt, Artificial Sequence
  Guide RNA
ucccuuguuaccucaacuucac

SEQ ID NO: 6110 - RNA, 22 nt, Artificial Sequence
  Guide RNA
ucuugaagacagggguccaguu

SEQ ID NO: 6111 - RNA, 22 nt, Artificial Sequence
  Guide RNA
ugaagacagggguccaguuccc

SEQ ID NO: 6112 - RNA, 22 nt, Artificial Sequence
  Guide RNA
uguuaccucaacuucacaggga

SEQ ID NO: 6113 - RNA, 22 nt, Artificial Sequence
  Guide RNA
uuaccucaacuucacagggaac

SEQ ID NO: 6114 - RNA, 22 nt, Artificial Sequence
  Guide RNA
uucacagggaacuggaccccug

SEQ ID NO: 6115 - RNA, 22 nt, Artificial Sequence
  Guide RNA
uucccugugaaguugagguaac

SEQ ID NO: 6116 - RNA, 22 nt, Artificial Sequence
  Guide RNA
uucccuuguuaccucaacuuca

SEQ ID NO: 6117 - RNA, 22 nt, Artificial Sequence
  Guide RNA
uugaagacagggguccaguucc

SEQ ID NO: 6118 - RNA, 22 nt, Artificial Sequence
  Guide RNA
uuguuaccucaacuucacaggg

SEQ ID NO: 6119 - RNA, 20 nt, Artificial Sequence
  Guide RNA
aacuggaccccugucaucaa

SEQ ID NO: 6120 - RNA, 20 nt, Artificial Sequence
  Guide RNA
acagugaacuggaccccugu

SEQ ID NO: 6121 - RNA, 20 nt, Artificial Sequence
  Guide RNA
accccugucaucaagaccag

SEQ ID NO: 6122 - RNA, 20 nt, Artificial Sequence
  Guide RNA
acuggaccccugucaucaag

SEQ ID NO: 6123 - RNA, 20 nt, Artificial Sequence
  Guide RNA
agaggccgcuggucuugaug

SEQ ID NO: 6124 - RNA, 20 nt, Artificial Sequence
  Guide RNA
aggccgcuggucuugaugac

SEQ ID NO: 6125 - RNA, 20 nt, Artificial Sequence
  Guide RNA
agugaacuggaccccuguca

SEQ ID NO: 6126 - RNA, 20 nt, Artificial Sequence
  Guide RNA
augacagggguccaguucac

SEQ ID NO: 6127 - RNA, 20 nt, Artificial Sequence
  Guide RNA
cacagugaacuggaccccug

SEQ ID NO: 6128 - RNA, 20 nt, Artificial Sequence
  Guide RNA
cagaggccgcuggucuugau

SEQ ID NO: 6129 - RNA, 20 nt, Artificial Sequence
  Guide RNA
cagugaacuggaccccuguc

SEQ ID NO: 6130 - RNA, 20 nt, Artificial Sequence
  Guide RNA
caucaagaccagcggccucu

SEQ ID NO: 6131 - RNA, 20 nt, Artificial Sequence
  Guide RNA
ccccugucaucaagaccagc

SEQ ID NO: 6132 - RNA, 20 nt, Artificial Sequence
  Guide RNA
cccucagaggccgcuggucu

SEQ ID NO: 6133 - RNA, 20 nt, Artificial Sequence
  Guide RNA
cccugucaucaagaccagcg

SEQ ID NO: 6134 - RNA, 20 nt, Artificial Sequence
  Guide RNA
ccgcuggucuugaugacagg

SEQ ID NO: 6135 - RNA, 20 nt, Artificial Sequence
  Guide RNA
ccucagaggccgcuggucuu

SEQ ID NO: 6136 - RNA, 20 nt, Artificial Sequence
  Guide RNA
ccugucaucaagaccagcgg

SEQ ID NO: 6137 - RNA, 20 nt, Artificial Sequence
  Guide RNA
cgcuggucuugaugacaggg

SEQ ID NO: 6138 - RNA, 20 nt, Artificial Sequence
  Guide RNA
cucagaggccgcuggucuug

SEQ ID NO: 6139 - RNA, 20 nt, Artificial Sequence
  Guide RNA
cuggaccccugucaucaaga

SEQ ID NO: 6140 - RNA, 20 nt, Artificial Sequence
  Guide RNA
cuggucuugaugacaggggu

SEQ ID NO: 6141 - RNA, 20 nt, Artificial Sequence
  Guide RNA
cugucaucaagaccagcggc

SEQ ID NO: 6142 - RNA, 20 nt, Artificial Sequence
  Guide RNA
cuugaugacagggguccagu

SEQ ID NO: 6143 - RNA, 20 nt, Artificial Sequence
  Guide RNA
gaacuggaccccugucauca

SEQ ID NO: 6144 - RNA, 20 nt, Artificial Sequence
  Guide RNA
gaccccugucaucaagacca

SEQ ID NO: 6145 - RNA, 20 nt, Artificial Sequence
  Guide RNA
gaggccgcuggucuugauga

SEQ ID NO: 6146 - RNA, 20 nt, Artificial Sequence
  Guide RNA
gaugacagggguccaguuca

SEQ ID NO: 6147 - RNA, 20 nt, Artificial Sequence
  Guide RNA
gccgcuggucuugaugacag

SEQ ID NO: 6148 - RNA, 20 nt, Artificial Sequence
  Guide RNA
gcuggucuugaugacagggg

SEQ ID NO: 6149 - RNA, 20 nt, Artificial Sequence
  Guide RNA
ggaccccugucaucaagacc

SEQ ID NO: 6150 - RNA, 20 nt, Artificial Sequence
  Guide RNA
ggccgcuggucuugaugaca

SEQ ID NO: 6151 - RNA, 20 nt, Artificial Sequence
  Guide RNA
ggucuugaugacaggggucc

SEQ ID NO: 6152 - RNA, 20 nt, Artificial Sequence
  Guide RNA
gucaucaagaccagcggccu

SEQ ID NO: 6153 - RNA, 20 nt, Artificial Sequence
  Guide RNA
gucuugaugacaggggucca

SEQ ID NO: 6154 - RNA, 20 nt, Artificial Sequence
  Guide RNA
gugaacuggaccccugucau

SEQ ID NO: 6155 - RNA, 20 nt, Artificial Sequence
  Guide RNA
ucacagugaacuggaccccu

SEQ ID NO: 6156 - RNA, 20 nt, Artificial Sequence
  Guide RNA
ucagaggccgcuggucuuga

SEQ ID NO: 6157 - RNA, 20 nt, Artificial Sequence
  Guide RNA
ucaucaagaccagcggccuc

SEQ ID NO: 6158 - RNA, 20 nt, Artificial Sequence
  Guide RNA
ucuugaugacagggguccag

SEQ ID NO: 6159 - RNA, 20 nt, Artificial Sequence
  Guide RNA
ugaacuggaccccugucauc

SEQ ID NO: 6160 - RNA, 20 nt, Artificial Sequence
  Guide RNA
ugaugacagggguccaguuc

SEQ ID NO: 6161 - RNA, 20 nt, Artificial Sequence
  Guide RNA
uggaccccugucaucaagac

SEQ ID NO: 6162 - RNA, 20 nt, Artificial Sequence
  Guide RNA
uggucuugaugacagggguc

SEQ ID NO: 6163 - RNA, 20 nt, Artificial Sequence
  Guide RNA
ugucaucaagaccagcggcc

SEQ ID NO: 6164 - RNA, 20 nt, Artificial Sequence
  Guide RNA
uugaugacagggguccaguu

SEQ ID NO: 6165 - RNA, 21 nt, Artificial Sequence
  Guide RNA
aacuggaccccugucaucaag

SEQ ID NO: 6166 - RNA, 21 nt, Artificial Sequence
  Guide RNA
acagugaacuggaccccuguc

SEQ ID NO: 6167 - RNA, 21 nt, Artificial Sequence
  Guide RNA
accccugucaucaagaccagc

SEQ ID NO: 6168 - RNA, 21 nt, Artificial Sequence
  Guide RNA
acccucagaggccgcuggucu

SEQ ID NO: 6169 - RNA, 21 nt, Artificial Sequence
  Guide RNA
acuggaccccugucaucaaga

SEQ ID NO: 6170 - RNA, 21 nt, Artificial Sequence
  Guide RNA
agaggccgcuggucuugauga

SEQ ID NO: 6171 - RNA, 21 nt, Artificial Sequence
  Guide RNA
aggccgcuggucuugaugaca

SEQ ID NO: 6172 - RNA, 21 nt, Artificial Sequence
  Guide RNA
agugaacuggaccccugucau

SEQ ID NO: 6173 - RNA, 21 nt, Artificial Sequence
  Guide RNA
augacagggguccaguucacu

SEQ ID NO: 6174 - RNA, 21 nt, Artificial Sequence
  Guide RNA
cacagugaacuggaccccugu

SEQ ID NO: 6175 - RNA, 21 nt, Artificial Sequence
  Guide RNA
cagaggccgcuggucuugaug

SEQ ID NO: 6176 - RNA, 21 nt, Artificial Sequence
  Guide RNA
cagugaacuggaccccuguca

SEQ ID NO: 6177 - RNA, 21 nt, Artificial Sequence
  Guide RNA
caucaagaccagcggccucug

SEQ ID NO: 6178 - RNA, 21 nt, Artificial Sequence
  Guide RNA
ccccugucaucaagaccagcg

SEQ ID NO: 6179 - RNA, 21 nt, Artificial Sequence
  Guide RNA
cccucagaggccgcuggucuu

SEQ ID NO: 6180 - RNA, 21 nt, Artificial Sequence
  Guide RNA
cccugucaucaagaccagcgg

SEQ ID NO: 6181 - RNA, 21 nt, Artificial Sequence
  Guide RNA
ccgcuggucuugaugacaggg

SEQ ID NO: 6182 - RNA, 21 nt, Artificial Sequence
  Guide RNA
ccucagaggccgcuggucuug

SEQ ID NO: 6183 - RNA, 21 nt, Artificial Sequence
  Guide RNA
ccugucaucaagaccagcggc

SEQ ID NO: 6184 - RNA, 21 nt, Artificial Sequence
  Guide RNA
cgcuggucuugaugacagggg

SEQ ID NO: 6185 - RNA, 21 nt, Artificial Sequence
  Guide RNA
cucagaggccgcuggucuuga

SEQ ID NO: 6186 - RNA, 21 nt, Artificial Sequence
  Guide RNA
cuggaccccugucaucaagac

SEQ ID NO: 6187 - RNA, 21 nt, Artificial Sequence
  Guide RNA
cuggucuugaugacagggguc

SEQ ID NO: 6188 - RNA, 21 nt, Artificial Sequence
  Guide RNA
cugucaucaagaccagcggcc

SEQ ID NO: 6189 - RNA, 21 nt, Artificial Sequence
  Guide RNA
cuugaugacagggguccaguu

SEQ ID NO: 6190 - RNA, 21 nt, Artificial Sequence
  Guide RNA
gaacuggaccccugucaucaa

SEQ ID NO: 6191 - RNA, 21 nt, Artificial Sequence
  Guide RNA
gaccccugucaucaagaccag

SEQ ID NO: 6192 - RNA, 21 nt, Artificial Sequence
  Guide RNA
gaggccgcuggucuugaugac

SEQ ID NO: 6193 - RNA, 21 nt, Artificial Sequence
  Guide RNA
gaugacagggguccaguucac

SEQ ID NO: 6194 - RNA, 21 nt, Artificial Sequence
  Guide RNA
gccgcuggucuugaugacagg

SEQ ID NO: 6195 - RNA, 21 nt, Artificial Sequence
  Guide RNA
gcuggucuugaugacaggggu

SEQ ID NO: 6196 - RNA, 21 nt, Artificial Sequence
  Guide RNA
ggaccccugucaucaagacca

SEQ ID NO: 6197 - RNA, 21 nt, Artificial Sequence
  Guide RNA
ggccgcuggucuugaugacag

SEQ ID NO: 6198 - RNA, 21 nt, Artificial Sequence
  Guide RNA
ggucuugaugacaggggucca

SEQ ID NO: 6199 - RNA, 21 nt, Artificial Sequence
  Guide RNA
gucaucaagaccagcggccuc

SEQ ID NO: 6200 - RNA, 21 nt, Artificial Sequence
  Guide RNA
gucuugaugacagggguccag

SEQ ID NO: 6201 - RNA, 21 nt, Artificial Sequence
  Guide RNA
gugaacuggaccccugucauc

SEQ ID NO: 6202 - RNA, 21 nt, Artificial Sequence
  Guide RNA
ucacagugaacuggaccccug

SEQ ID NO: 6203 - RNA, 21 nt, Artificial Sequence
  Guide RNA
ucagaggccgcuggucuugau

SEQ ID NO: 6204 - RNA, 21 nt, Artificial Sequence
  Guide RNA
ucaucaagaccagcggccucu

SEQ ID NO: 6205 - RNA, 21 nt, Artificial Sequence
  Guide RNA
ucuugaugacagggguccagu

SEQ ID NO: 6206 - RNA, 21 nt, Artificial Sequence
  Guide RNA
ugaacuggaccccugucauca

SEQ ID NO: 6207 - RNA, 21 nt, Artificial Sequence
  Guide RNA
ugaugacagggguccaguuca

SEQ ID NO: 6208 - RNA, 21 nt, Artificial Sequence
  Guide RNA
uggaccccugucaucaagacc

SEQ ID NO: 6209 - RNA, 21 nt, Artificial Sequence
  Guide RNA
uggucuugaugacaggggucc

SEQ ID NO: 6210 - RNA, 21 nt, Artificial Sequence
  Guide RNA
ugucaucaagaccagcggccu

SEQ ID NO: 6211 - RNA, 21 nt, Artificial Sequence
  Guide RNA
uucacagugaacuggaccccu

SEQ ID NO: 6212 - RNA, 21 nt, Artificial Sequence
  Guide RNA
uugaugacagggguccaguuc

SEQ ID NO: 6213 - RNA, 22 nt, Artificial Sequence
  Guide RNA
aacuggaccccugucaucaaga

SEQ ID NO: 6214 - RNA, 22 nt, Artificial Sequence
  Guide RNA
acagugaacuggaccccuguca

SEQ ID NO: 6215 - RNA, 22 nt, Artificial Sequence
  Guide RNA
accccugucaucaagaccagcg

SEQ ID NO: 6216 - RNA, 22 nt, Artificial Sequence
  Guide RNA
acccucagaggccgcuggucuu

SEQ ID NO: 6217 - RNA, 22 nt, Artificial Sequence
  Guide RNA
acuggaccccugucaucaagac

SEQ ID NO: 6218 - RNA, 22 nt, Artificial Sequence
  Guide RNA
agaggccgcuggucuugaugac

SEQ ID NO: 6219 - RNA, 22 nt, Artificial Sequence
  Guide RNA
aggccgcuggucuugaugacag

SEQ ID NO: 6220 - RNA, 22 nt, Artificial Sequence
  Guide RNA
agugaacuggaccccugucauc

SEQ ID NO: 6221 - RNA, 22 nt, Artificial Sequence
  Guide RNA
augacagggguccaguucacug

SEQ ID NO: 6222 - RNA, 22 nt, Artificial Sequence
  Guide RNA
cacagugaacuggaccccuguc

SEQ ID NO: 6223 - RNA, 22 nt, Artificial Sequence
  Guide RNA
cacccucagaggccgcuggucu

SEQ ID NO: 6224 - RNA, 22 nt, Artificial Sequence
  Guide RNA
cagaggccgcuggucuugauga

SEQ ID NO: 6225 - RNA, 22 nt, Artificial Sequence
  Guide RNA
cagugaacuggaccccugucau

SEQ ID NO: 6226 - RNA, 22 nt, Artificial Sequence
  Guide RNA
caucaagaccagcggccucuga

SEQ ID NO: 6227 - RNA, 22 nt, Artificial Sequence
  Guide RNA
ccccugucaucaagaccagcgg

SEQ ID NO: 6228 - RNA, 22 nt, Artificial Sequence
  Guide RNA
cccucagaggccgcuggucuug

SEQ ID NO: 6229 - RNA, 22 nt, Artificial Sequence
  Guide RNA
cccugucaucaagaccagcggc

SEQ ID NO: 6230 - RNA, 22 nt, Artificial Sequence
  Guide RNA
ccgcuggucuugaugacagggg

SEQ ID NO: 6231 - RNA, 22 nt, Artificial Sequence
  Guide RNA
ccucagaggccgcuggucuuga

SEQ ID NO: 6232 - RNA, 22 nt, Artificial Sequence
  Guide RNA
ccugucaucaagaccagcggcc

SEQ ID NO: 6233 - RNA, 22 nt, Artificial Sequence
  Guide RNA
cgcuggucuugaugacaggggu

SEQ ID NO: 6234 - RNA, 22 nt, Artificial Sequence
  Guide RNA
cucagaggccgcuggucuugau

SEQ ID NO: 6235 - RNA, 22 nt, Artificial Sequence
  Guide RNA
cuggaccccugucaucaagacc

SEQ ID NO: 6236 - RNA, 22 nt, Artificial Sequence
  Guide RNA
cuggucuugaugacaggggucc

SEQ ID NO: 6237 - RNA, 22 nt, Artificial Sequence
  Guide RNA
cugucaucaagaccagcggccu

SEQ ID NO: 6238 - RNA, 22 nt, Artificial Sequence
  Guide RNA
cuucacagugaacuggaccccu

SEQ ID NO: 6239 - RNA, 22 nt, Artificial Sequence
  Guide RNA
cuugaugacagggguccaguuc

SEQ ID NO: 6240 - RNA, 22 nt, Artificial Sequence
  Guide RNA
gaacuggaccccugucaucaag

SEQ ID NO: 6241 - RNA, 22 nt, Artificial Sequence
  Guide RNA
gaccccugucaucaagaccagc

SEQ ID NO: 6242 - RNA, 22 nt, Artificial Sequence
  Guide RNA
gaggccgcuggucuugaugaca

SEQ ID NO: 6243 - RNA, 22 nt, Artificial Sequence
  Guide RNA
gaugacagggguccaguucacu

SEQ ID NO: 6244 - RNA, 22 nt, Artificial Sequence
  Guide RNA
gccgcuggucuugaugacaggg

SEQ ID NO: 6245 - RNA, 22 nt, Artificial Sequence
  Guide RNA
gcuggucuugaugacagggguc

SEQ ID NO: 6246 - RNA, 22 nt, Artificial Sequence
  Guide RNA
ggaccccugucaucaagaccag

SEQ ID NO: 6247 - RNA, 22 nt, Artificial Sequence
  Guide RNA
ggccgcuggucuugaugacagg

SEQ ID NO: 6248 - RNA, 22 nt, Artificial Sequence
  Guide RNA
ggucuugaugacagggguccag

SEQ ID NO: 6249 - RNA, 22 nt, Artificial Sequence
  Guide RNA
gucaucaagaccagcggccucu

SEQ ID NO: 6250 - RNA, 22 nt, Artificial Sequence
  Guide RNA
gucuugaugacagggguccagu

SEQ ID NO: 6251 - RNA, 22 nt, Artificial Sequence
  Guide RNA
gugaacuggaccccugucauca

SEQ ID NO: 6252 - RNA, 22 nt, Artificial Sequence
  Guide RNA
ucacagugaacuggaccccugu

SEQ ID NO: 6253 - RNA, 22 nt, Artificial Sequence
  Guide RNA
ucagaggccgcuggucuugaug

SEQ ID NO: 6254 - RNA, 22 nt, Artificial Sequence
  Guide RNA
ucaucaagaccagcggccucug

SEQ ID NO: 6255 - RNA, 22 nt, Artificial Sequence
  Guide RNA
ucuugaugacagggguccaguu

SEQ ID NO: 6256 - RNA, 22 nt, Artificial Sequence
  Guide RNA
ugaacuggaccccugucaucaa

SEQ ID NO: 6257 - RNA, 22 nt, Artificial Sequence
  Guide RNA
ugaugacagggguccaguucac

SEQ ID NO: 6258 - RNA, 22 nt, Artificial Sequence
  Guide RNA
uggaccccugucaucaagacca

SEQ ID NO: 6259 - RNA, 22 nt, Artificial Sequence
  Guide RNA
uggucuugaugacaggggucca

SEQ ID NO: 6260 - RNA, 22 nt, Artificial Sequence
  Guide RNA
ugucaucaagaccagcggccuc

SEQ ID NO: 6261 - RNA, 22 nt, Artificial Sequence
  Guide RNA
uucacagugaacuggaccccug

SEQ ID NO: 6262 - RNA, 22 nt, Artificial Sequence
  Guide RNA
uugaugacagggguccaguuca

SEQ ID NO: 6263 - RNA, 20 nt, Artificial Sequence
  Guide RNA
aaagacagccccgcaugcca

SEQ ID NO: 6264 - RNA, 20 nt, Artificial Sequence
  Guide RNA
aagacagccccgcaugccaa

SEQ ID NO: 6265 - RNA, 20 nt, Artificial Sequence
  Guide RNA
acagccccgcaugccaacgc

SEQ ID NO: 6266 - RNA, 20 nt, Artificial Sequence
  Guide RNA
agacagccccgcaugccaac

SEQ ID NO: 6267 - RNA, 20 nt, Artificial Sequence
  Guide RNA
agccccgcaugccaacgcac

SEQ ID NO: 6268 - RNA, 20 nt, Artificial Sequence
  Guide RNA
agggugcguuggcaugcggg

SEQ ID NO: 6269 - RNA, 20 nt, Artificial Sequence
  Guide RNA
augcggggcugucuuuccac

SEQ ID NO: 6270 - RNA, 20 nt, Artificial Sequence
  Guide RNA
cagccccgcaugccaacgca

SEQ ID NO: 6271 - RNA, 20 nt, Artificial Sequence
  Guide RNA
caugcggggcugucuuucca

SEQ ID NO: 6272 - RNA, 20 nt, Artificial Sequence
  Guide RNA
ccccgcaugccaacgcaccc

SEQ ID NO: 6273 - RNA, 20 nt, Artificial Sequence
  Guide RNA
cccgcaugccaacgcacccu

SEQ ID NO: 6274 - RNA, 20 nt, Artificial Sequence
  Guide RNA
ccgcaugccaacgcacccuc

SEQ ID NO: 6275 - RNA, 20 nt, Artificial Sequence
  Guide RNA
ccucugagggugcguuggca

SEQ ID NO: 6276 - RNA, 20 nt, Artificial Sequence
  Guide RNA
cggggcugucuuuccaccac

SEQ ID NO: 6277 - RNA, 20 nt, Artificial Sequence
  Guide RNA
cguuggcaugcggggcuguc

SEQ ID NO: 6278 - RNA, 20 nt, Artificial Sequence
  Guide RNA
cguuugugguggaaagacag

SEQ ID NO: 6279 - RNA, 20 nt, Artificial Sequence
  Guide RNA
cucugagggugcguuggcau

SEQ ID NO: 6280 - RNA, 20 nt, Artificial Sequence
  Guide RNA
cugagggugcguuggcaugc

SEQ ID NO: 6281 - RNA, 20 nt, Artificial Sequence
  Guide RNA
gaaagacagccccgcaugcc

SEQ ID NO: 6282 - RNA, 20 nt, Artificial Sequence
  Guide RNA
gacagccccgcaugccaacg

SEQ ID NO: 6283 - RNA, 20 nt, Artificial Sequence
  Guide RNA
gagggugcguuggcaugcgg

SEQ ID NO: 6284 - RNA, 20 nt, Artificial Sequence
  Guide RNA
gcaugcggggcugucuuucc

SEQ ID NO: 6285 - RNA, 20 nt, Artificial Sequence
  Guide RNA
gccccgcaugccaacgcacc

SEQ ID NO: 6286 - RNA, 20 nt, Artificial Sequence
  Guide RNA
gcggggcugucuuuccacca

SEQ ID NO: 6287 - RNA, 20 nt, Artificial Sequence
  Guide RNA
gcguuggcaugcggggcugu

SEQ ID NO: 6288 - RNA, 20 nt, Artificial Sequence
  Guide RNA
ggaaagacagccccgcaugc

SEQ ID NO: 6289 - RNA, 20 nt, Artificial Sequence
  Guide RNA
ggcaugcggggcugucuuuc

SEQ ID NO: 6290 - RNA, 20 nt, Artificial Sequence
  Guide RNA
gggugcguuggcaugcgggg

SEQ ID NO: 6291 - RNA, 20 nt, Artificial Sequence
  Guide RNA
ggugcguuggcaugcggggc

SEQ ID NO: 6292 - RNA, 20 nt, Artificial Sequence
  Guide RNA
gguggaaagacagccccgca

SEQ ID NO: 6293 - RNA, 20 nt, Artificial Sequence
  Guide RNA
gugcguuggcaugcggggcu

SEQ ID NO: 6294 - RNA, 20 nt, Artificial Sequence
  Guide RNA
guggaaagacagccccgcau

SEQ ID NO: 6295 - RNA, 20 nt, Artificial Sequence
  Guide RNA
gugguggaaagacagccccg

SEQ ID NO: 6296 - RNA, 20 nt, Artificial Sequence
  Guide RNA
guuggcaugcggggcugucu

SEQ ID NO: 6297 - RNA, 20 nt, Artificial Sequence
  Guide RNA
guuugugguggaaagacagc

SEQ ID NO: 6298 - RNA, 20 nt, Artificial Sequence
  Guide RNA
ucugagggugcguuggcaug

SEQ ID NO: 6299 - RNA, 20 nt, Artificial Sequence
  Guide RNA
ugagggugcguuggcaugcg

SEQ ID NO: 6300 - RNA, 20 nt, Artificial Sequence
  Guide RNA
ugcggggcugucuuuccacc

SEQ ID NO: 6301 - RNA, 20 nt, Artificial Sequence
  Guide RNA
ugcguuggcaugcggggcug

SEQ ID NO: 6302 - RNA, 20 nt, Artificial Sequence
  Guide RNA
uggaaagacagccccgcaug

SEQ ID NO: 6303 - RNA, 20 nt, Artificial Sequence
  Guide RNA
uggcaugcggggcugucuuu

SEQ ID NO: 6304 - RNA, 20 nt, Artificial Sequence
  Guide RNA
ugguggaaagacagccccgc

SEQ ID NO: 6305 - RNA, 20 nt, Artificial Sequence
  Guide RNA
ugugguggaaagacagcccc

SEQ ID NO: 6306 - RNA, 20 nt, Artificial Sequence
  Guide RNA
uuggcaugcggggcugucuu

SEQ ID NO: 6307 - RNA, 20 nt, Artificial Sequence
  Guide RNA
uugugguggaaagacagccc

SEQ ID NO: 6308 - RNA, 20 nt, Artificial Sequence
  Guide RNA
uuugugguggaaagacagcc

SEQ ID NO: 6309 - RNA, 21 nt, Artificial Sequence
  Guide RNA
aaagacagccccgcaugccaa

SEQ ID NO: 6310 - RNA, 21 nt, Artificial Sequence
  Guide RNA
aagacagccccgcaugccaac

SEQ ID NO: 6311 - RNA, 21 nt, Artificial Sequence
  Guide RNA
acagccccgcaugccaacgca

SEQ ID NO: 6312 - RNA, 21 nt, Artificial Sequence
  Guide RNA
agacagccccgcaugccaacg

SEQ ID NO: 6313 - RNA, 21 nt, Artificial Sequence
  Guide RNA
agccccgcaugccaacgcacc

SEQ ID NO: 6314 - RNA, 21 nt, Artificial Sequence
  Guide RNA
agggugcguuggcaugcgggg

SEQ ID NO: 6315 - RNA, 21 nt, Artificial Sequence
  Guide RNA
augcggggcugucuuuccacc

SEQ ID NO: 6316 - RNA, 21 nt, Artificial Sequence
  Guide RNA
cagccccgcaugccaacgcac

SEQ ID NO: 6317 - RNA, 21 nt, Artificial Sequence
  Guide RNA
caugcggggcugucuuuccac

SEQ ID NO: 6318 - RNA, 21 nt, Artificial Sequence
  Guide RNA
ccccgcaugccaacgcacccu

SEQ ID NO: 6319 - RNA, 21 nt, Artificial Sequence
  Guide RNA
cccgcaugccaacgcacccuc

SEQ ID NO: 6320 - RNA, 21 nt, Artificial Sequence
  Guide RNA
ccgcaugccaacgcacccuca

SEQ ID NO: 6321 - RNA, 21 nt, Artificial Sequence
  Guide RNA
ccucugagggugcguuggcau

SEQ ID NO: 6322 - RNA, 21 nt, Artificial Sequence
  Guide RNA
cggggcugucuuuccaccaca

SEQ ID NO: 6323 - RNA, 21 nt, Artificial Sequence
  Guide RNA
cguuggcaugcggggcugucu

SEQ ID NO: 6324 - RNA, 21 nt, Artificial Sequence
  Guide RNA
cguuugugguggaaagacagc

SEQ ID NO: 6325 - RNA, 21 nt, Artificial Sequence
  Guide RNA
cucugagggugcguuggcaug

SEQ ID NO: 6326 - RNA, 21 nt, Artificial Sequence
  Guide RNA
cugagggugcguuggcaugcg

SEQ ID NO: 6327 - RNA, 21 nt, Artificial Sequence
  Guide RNA
gaaagacagccccgcaugcca

SEQ ID NO: 6328 - RNA, 21 nt, Artificial Sequence
  Guide RNA
gacagccccgcaugccaacgc

SEQ ID NO: 6329 - RNA, 21 nt, Artificial Sequence
  Guide RNA
gagggugcguuggcaugcggg

SEQ ID NO: 6330 - RNA, 21 nt, Artificial Sequence
  Guide RNA
gcaugcggggcugucuuucca

SEQ ID NO: 6331 - RNA, 21 nt, Artificial Sequence
  Guide RNA
gccccgcaugccaacgcaccc

SEQ ID NO: 6332 - RNA, 21 nt, Artificial Sequence
  Guide RNA
gccucugagggugcguuggca

SEQ ID NO: 6333 - RNA, 21 nt, Artificial Sequence
  Guide RNA
gcggggcugucuuuccaccac

SEQ ID NO: 6334 - RNA, 21 nt, Artificial Sequence
  Guide RNA
gcguuggcaugcggggcuguc

SEQ ID NO: 6335 - RNA, 21 nt, Artificial Sequence
  Guide RNA
ggaaagacagccccgcaugcc

SEQ ID NO: 6336 - RNA, 21 nt, Artificial Sequence
  Guide RNA
ggcaugcggggcugucuuucc

SEQ ID NO: 6337 - RNA, 21 nt, Artificial Sequence
  Guide RNA
gggugcguuggcaugcggggc

SEQ ID NO: 6338 - RNA, 21 nt, Artificial Sequence
  Guide RNA
ggugcguuggcaugcggggcu

SEQ ID NO: 6339 - RNA, 21 nt, Artificial Sequence
  Guide RNA
gguggaaagacagccccgcau

SEQ ID NO: 6340 - RNA, 21 nt, Artificial Sequence
  Guide RNA
gugcguuggcaugcggggcug

SEQ ID NO: 6341 - RNA, 21 nt, Artificial Sequence
  Guide RNA
guggaaagacagccccgcaug

SEQ ID NO: 6342 - RNA, 21 nt, Artificial Sequence
  Guide RNA
gugguggaaagacagccccgc

SEQ ID NO: 6343 - RNA, 21 nt, Artificial Sequence
  Guide RNA
guuggcaugcggggcugucuu

SEQ ID NO: 6344 - RNA, 21 nt, Artificial Sequence
  Guide RNA
guuugugguggaaagacagcc

SEQ ID NO: 6345 - RNA, 21 nt, Artificial Sequence
  Guide RNA
ucguuugugguggaaagacag

SEQ ID NO: 6346 - RNA, 21 nt, Artificial Sequence
  Guide RNA
ucugagggugcguuggcaugc

SEQ ID NO: 6347 - RNA, 21 nt, Artificial Sequence
  Guide RNA
ugagggugcguuggcaugcgg

SEQ ID NO: 6348 - RNA, 21 nt, Artificial Sequence
  Guide RNA
ugcggggcugucuuuccacca

SEQ ID NO: 6349 - RNA, 21 nt, Artificial Sequence
  Guide RNA
ugcguuggcaugcggggcugu

SEQ ID NO: 6350 - RNA, 21 nt, Artificial Sequence
  Guide RNA
uggaaagacagccccgcaugc

SEQ ID NO: 6351 - RNA, 21 nt, Artificial Sequence
  Guide RNA
uggcaugcggggcugucuuuc

SEQ ID NO: 6352 - RNA, 21 nt, Artificial Sequence
  Guide RNA
ugguggaaagacagccccgca

SEQ ID NO: 6353 - RNA, 21 nt, Artificial Sequence
  Guide RNA
ugugguggaaagacagccccg

SEQ ID NO: 6354 - RNA, 21 nt, Artificial Sequence
  Guide RNA
uuggcaugcggggcugucuuu

SEQ ID NO: 6355 - RNA, 21 nt, Artificial Sequence
  Guide RNA
uugugguggaaagacagcccc

SEQ ID NO: 6356 - RNA, 21 nt, Artificial Sequence
  Guide RNA
uuugugguggaaagacagccc

SEQ ID NO: 6357 - RNA, 22 nt, Artificial Sequence
  Guide RNA
aaagacagccccgcaugccaac

SEQ ID NO: 6358 - RNA, 22 nt, Artificial Sequence
  Guide RNA
aagacagccccgcaugccaacg

SEQ ID NO: 6359 - RNA, 22 nt, Artificial Sequence
  Guide RNA
acagccccgcaugccaacgcac

SEQ ID NO: 6360 - RNA, 22 nt, Artificial Sequence
  Guide RNA
agacagccccgcaugccaacgc

SEQ ID NO: 6361 - RNA, 22 nt, Artificial Sequence
  Guide RNA
agccccgcaugccaacgcaccc

SEQ ID NO: 6362 - RNA, 22 nt, Artificial Sequence
  Guide RNA
agggugcguuggcaugcggggc

SEQ ID NO: 6363 - RNA, 22 nt, Artificial Sequence
  Guide RNA
augcggggcugucuuuccacca

SEQ ID NO: 6364 - RNA, 22 nt, Artificial Sequence
  Guide RNA
cagccccgcaugccaacgcacc

SEQ ID NO: 6365 - RNA, 22 nt, Artificial Sequence
  Guide RNA
caugcggggcugucuuuccacc

SEQ ID NO: 6366 - RNA, 22 nt, Artificial Sequence
  Guide RNA
ccccgcaugccaacgcacccuc

SEQ ID NO: 6367 - RNA, 22 nt, Artificial Sequence
  Guide RNA
cccgcaugccaacgcacccuca

SEQ ID NO: 6368 - RNA, 22 nt, Artificial Sequence
  Guide RNA
ccgcaugccaacgcacccucag

SEQ ID NO: 6369 - RNA, 22 nt, Artificial Sequence
  Guide RNA
ccucugagggugcguuggcaug

SEQ ID NO: 6370 - RNA, 22 nt, Artificial Sequence
  Guide RNA
cggggcugucuuuccaccacaa

SEQ ID NO: 6371 - RNA, 22 nt, Artificial Sequence
  Guide RNA
cguuggcaugcggggcugucuu

SEQ ID NO: 6372 - RNA, 22 nt, Artificial Sequence
  Guide RNA
cguuugugguggaaagacagcc

SEQ ID NO: 6373 - RNA, 22 nt, Artificial Sequence
  Guide RNA
cucguuugugguggaaagacag

SEQ ID NO: 6374 - RNA, 22 nt, Artificial Sequence
  Guide RNA
cucugagggugcguuggcaugc

SEQ ID NO: 6375 - RNA, 22 nt, Artificial Sequence
  Guide RNA
cugagggugcguuggcaugcgg

SEQ ID NO: 6376 - RNA, 22 nt, Artificial Sequence
  Guide RNA
gaaagacagccccgcaugccaa

SEQ ID NO: 6377 - RNA, 22 nt, Artificial Sequence
  Guide RNA
gacagccccgcaugccaacgca

SEQ ID NO: 6378 - RNA, 22 nt, Artificial Sequence
  Guide RNA
gagggugcguuggcaugcgggg

SEQ ID NO: 6379 - RNA, 22 nt, Artificial Sequence
  Guide RNA
gcaugcggggcugucuuuccac

SEQ ID NO: 6380 - RNA, 22 nt, Artificial Sequence
  Guide RNA
gccccgcaugccaacgcacccu

SEQ ID NO: 6381 - RNA, 22 nt, Artificial Sequence
  Guide RNA
gccucugagggugcguuggcau

SEQ ID NO: 6382 - RNA, 22 nt, Artificial Sequence
  Guide RNA
gcggggcugucuuuccaccaca

SEQ ID NO: 6383 - RNA, 22 nt, Artificial Sequence
  Guide RNA
gcguuggcaugcggggcugucu

SEQ ID NO: 6384 - RNA, 22 nt, Artificial Sequence
  Guide RNA
ggaaagacagccccgcaugcca

SEQ ID NO: 6385 - RNA, 22 nt, Artificial Sequence
  Guide RNA
ggcaugcggggcugucuuucca

SEQ ID NO: 6386 - RNA, 22 nt, Artificial Sequence
  Guide RNA
ggccucugagggugcguuggca

SEQ ID NO: 6387 - RNA, 22 nt, Artificial Sequence
  Guide RNA
gggugcguuggcaugcggggcu

SEQ ID NO: 6388 - RNA, 22 nt, Artificial Sequence
  Guide RNA
ggugcguuggcaugcggggcug

SEQ ID NO: 6389 - RNA, 22 nt, Artificial Sequence
  Guide RNA
gguggaaagacagccccgcaug

SEQ ID NO: 6390 - RNA, 22 nt, Artificial Sequence
  Guide RNA
gugcguuggcaugcggggcugu

SEQ ID NO: 6391 - RNA, 22 nt, Artificial Sequence
  Guide RNA
guggaaagacagccccgcaugc

SEQ ID NO: 6392 - RNA, 22 nt, Artificial Sequence
  Guide RNA
gugguggaaagacagccccgca

SEQ ID NO: 6393 - RNA, 22 nt, Artificial Sequence
  Guide RNA
guuggcaugcggggcugucuuu

SEQ ID NO: 6394 - RNA, 22 nt, Artificial Sequence
  Guide RNA
guuugugguggaaagacagccc

SEQ ID NO: 6395 - RNA, 22 nt, Artificial Sequence
  Guide RNA
ucguuugugguggaaagacagc

SEQ ID NO: 6396 - RNA, 22 nt, Artificial Sequence
  Guide RNA
ucugagggugcguuggcaugcg

SEQ ID NO: 6397 - RNA, 22 nt, Artificial Sequence
  Guide RNA
ugagggugcguuggcaugcggg

SEQ ID NO: 6398 - RNA, 22 nt, Artificial Sequence
  Guide RNA
ugcggggcugucuuuccaccac

SEQ ID NO: 6399 - RNA, 22 nt, Artificial Sequence
  Guide RNA
ugcguuggcaugcggggcuguc

SEQ ID NO: 6400 - RNA, 22 nt, Artificial Sequence
  Guide RNA
uggaaagacagccccgcaugcc

SEQ ID NO: 6401 - RNA, 22 nt, Artificial Sequence
  Guide RNA
uggcaugcggggcugucuuucc

SEQ ID NO: 6402 - RNA, 22 nt, Artificial Sequence
  Guide RNA
ugguggaaagacagccccgcau

SEQ ID NO: 6403 - RNA, 22 nt, Artificial Sequence
  Guide RNA
ugugguggaaagacagccccgc

SEQ ID NO: 6404 - RNA, 22 nt, Artificial Sequence
  Guide RNA
uuggcaugcggggcugucuuuc

SEQ ID NO: 6405 - RNA, 22 nt, Artificial Sequence
  Guide RNA
uugugguggaaagacagccccg

SEQ ID NO: 6406 - RNA, 22 nt, Artificial Sequence
  Guide RNA
uuugugguggaaagacagcccc

SEQ ID NO: 6407 - RNA, 20 nt, Artificial Sequence
  Guide RNA
agcucguuuguggugcaaag

SEQ ID NO: 6408 - RNA, 20 nt, Artificial Sequence
  Guide RNA
agggcugucuuugcaccaca

SEQ ID NO: 6409 - RNA, 20 nt, Artificial Sequence
  Guide RNA
augcagggcugucuuugcac

SEQ ID NO: 6410 - RNA, 20 nt, Artificial Sequence
  Guide RNA
auuugcagcucguuuguggu

SEQ ID NO: 6411 - RNA, 20 nt, Artificial Sequence
  Guide RNA
cagcucguuuguggugcaaa

SEQ ID NO: 6412 - RNA, 20 nt, Artificial Sequence
  Guide RNA
cagggcugucuuugcaccac

SEQ ID NO: 6413 - RNA, 20 nt, Artificial Sequence
  Guide RNA
caugcagggcugucuuugca

SEQ ID NO: 6414 - RNA, 20 nt, Artificial Sequence
  Guide RNA
cguuggcaugcagggcuguc

SEQ ID NO: 6415 - RNA, 20 nt, Artificial Sequence
  Guide RNA
cguuuguggugcaaagacag

SEQ ID NO: 6416 - RNA, 20 nt, Artificial Sequence
  Guide RNA
cucguuuguggugcaaagac

SEQ ID NO: 6417 - RNA, 20 nt, Artificial Sequence
  Guide RNA
cugucuuugcaccacaaacg

SEQ ID NO: 6418 - RNA, 20 nt, Artificial Sequence
  Guide RNA
cuuugcaccacaaacgagcu

SEQ ID NO: 6419 - RNA, 20 nt, Artificial Sequence
  Guide RNA
gcaaagacagcccugcaugc

SEQ ID NO: 6420 - RNA, 20 nt, Artificial Sequence
  Guide RNA
gcagcucguuuguggugcaa

SEQ ID NO: 6421 - RNA, 20 nt, Artificial Sequence
  Guide RNA
gcagggcugucuuugcacca

SEQ ID NO: 6422 - RNA, 20 nt, Artificial Sequence
  Guide RNA
gcaugcagggcugucuuugc

SEQ ID NO: 6423 - RNA, 20 nt, Artificial Sequence
  Guide RNA
gcucguuuguggugcaaaga

SEQ ID NO: 6424 - RNA, 20 nt, Artificial Sequence
  Guide RNA
gcugucuuugcaccacaaac

SEQ ID NO: 6425 - RNA, 20 nt, Artificial Sequence
  Guide RNA
ggcaugcagggcugucuuug

SEQ ID NO: 6426 - RNA, 20 nt, Artificial Sequence
  Guide RNA
ggcugucuuugcaccacaaa

SEQ ID NO: 6427 - RNA, 20 nt, Artificial Sequence
  Guide RNA
gggcugucuuugcaccacaa

SEQ ID NO: 6428 - RNA, 20 nt, Artificial Sequence
  Guide RNA
ggugcaaagacagcccugca

SEQ ID NO: 6429 - RNA, 20 nt, Artificial Sequence
  Guide RNA
guauuugcagcucguuugug

SEQ ID NO: 6430 - RNA, 20 nt, Artificial Sequence
  Guide RNA
gucuuugcaccacaaacgag

SEQ ID NO: 6431 - RNA, 20 nt, Artificial Sequence
  Guide RNA
gugcaaagacagcccugcau

SEQ ID NO: 6432 - RNA, 20 nt, Artificial Sequence
  Guide RNA
guggugcaaagacagcccug

SEQ ID NO: 6433 - RNA, 20 nt, Artificial Sequence
  Guide RNA
guuggcaugcagggcugucu

SEQ ID NO: 6434 - RNA, 20 nt, Artificial Sequence
  Guide RNA
guuuguggugcaaagacagc

SEQ ID NO: 6435 - RNA, 20 nt, Artificial Sequence
  Guide RNA
uauuugcagcucguuugugg

SEQ ID NO: 6436 - RNA, 20 nt, Artificial Sequence
  Guide RNA
ucguuuguggugcaaagaca

SEQ ID NO: 6437 - RNA, 20 nt, Artificial Sequence
  Guide RNA
ucuuugcaccacaaacgagc

SEQ ID NO: 6438 - RNA, 20 nt, Artificial Sequence
  Guide RNA
ugcaaagacagcccugcaug

SEQ ID NO: 6439 - RNA, 20 nt, Artificial Sequence
  Guide RNA
ugcaccacaaacgagcugca

SEQ ID NO: 6440 - RNA, 20 nt, Artificial Sequence
  Guide RNA
ugcagcucguuuguggugca

SEQ ID NO: 6441 - RNA, 20 nt, Artificial Sequence
  Guide RNA
ugcagggcugucuuugcacc

SEQ ID NO: 6442 - RNA, 20 nt, Artificial Sequence
  Guide RNA
uggcaugcagggcugucuuu

SEQ ID NO: 6443 - RNA, 20 nt, Artificial Sequence
  Guide RNA
uggugcaaagacagcccugc

SEQ ID NO: 6444 - RNA, 20 nt, Artificial Sequence
  Guide RNA
ugucuuugcaccacaaacga

SEQ ID NO: 6445 - RNA, 20 nt, Artificial Sequence
  Guide RNA
uguggugcaaagacagcccu

SEQ ID NO: 6446 - RNA, 20 nt, Artificial Sequence
  Guide RNA
uugcaccacaaacgagcugc

SEQ ID NO: 6447 - RNA, 20 nt, Artificial Sequence
  Guide RNA
uugcagcucguuuguggugc

SEQ ID NO: 6448 - RNA, 20 nt, Artificial Sequence
  Guide RNA
uuggcaugcagggcugucuu

SEQ ID NO: 6449 - RNA, 20 nt, Artificial Sequence
  Guide RNA
uuguggugcaaagacagccc

SEQ ID NO: 6450 - RNA, 20 nt, Artificial Sequence
  Guide RNA
uuugcaccacaaacgagcug

SEQ ID NO: 6451 - RNA, 20 nt, Artificial Sequence
  Guide RNA
uuugcagcucguuuguggug

SEQ ID NO: 6452 - RNA, 20 nt, Artificial Sequence
  Guide RNA
uuuguggugcaaagacagcc

SEQ ID NO: 6453 - RNA, 21 nt, Artificial Sequence
  Guide RNA
agcucguuuguggugcaaaga

SEQ ID NO: 6454 - RNA, 21 nt, Artificial Sequence
  Guide RNA
agggcugucuuugcaccacaa

SEQ ID NO: 6455 - RNA, 21 nt, Artificial Sequence
  Guide RNA
augcagggcugucuuugcacc

SEQ ID NO: 6456 - RNA, 21 nt, Artificial Sequence
  Guide RNA
auuugcagcucguuuguggug

SEQ ID NO: 6457 - RNA, 21 nt, Artificial Sequence
  Guide RNA
cagcucguuuguggugcaaag

SEQ ID NO: 6458 - RNA, 21 nt, Artificial Sequence
  Guide RNA
cagggcugucuuugcaccaca

SEQ ID NO: 6459 - RNA, 21 nt, Artificial Sequence
  Guide RNA
caugcagggcugucuuugcac

SEQ ID NO: 6460 - RNA, 21 nt, Artificial Sequence
  Guide RNA
cguuggcaugcagggcugucu

SEQ ID NO: 6461 - RNA, 21 nt, Artificial Sequence
  Guide RNA
cguuuguggugcaaagacagc

SEQ ID NO: 6462 - RNA, 21 nt, Artificial Sequence
  Guide RNA
cucguuuguggugcaaagaca

SEQ ID NO: 6463 - RNA, 21 nt, Artificial Sequence
  Guide RNA
cugucuuugcaccacaaacga

SEQ ID NO: 6464 - RNA, 21 nt, Artificial Sequence
  Guide RNA
cuuugcaccacaaacgagcug

SEQ ID NO: 6465 - RNA, 21 nt, Artificial Sequence
  Guide RNA
gcaaagacagcccugcaugcc

SEQ ID NO: 6466 - RNA, 21 nt, Artificial Sequence
  Guide RNA
gcagcucguuuguggugcaaa

SEQ ID NO: 6467 - RNA, 21 nt, Artificial Sequence
  Guide RNA
gcagggcugucuuugcaccac

SEQ ID NO: 6468 - RNA, 21 nt, Artificial Sequence
  Guide RNA
gcaugcagggcugucuuugca

SEQ ID NO: 6469 - RNA, 21 nt, Artificial Sequence
  Guide RNA
gcguuggcaugcagggcuguc

SEQ ID NO: 6470 - RNA, 21 nt, Artificial Sequence
  Guide RNA
gcucguuuguggugcaaagac

SEQ ID NO: 6471 - RNA, 21 nt, Artificial Sequence
  Guide RNA
gcugucuuugcaccacaaacg

SEQ ID NO: 6472 - RNA, 21 nt, Artificial Sequence
  Guide RNA
ggcaugcagggcugucuuugc

SEQ ID NO: 6473 - RNA, 21 nt, Artificial Sequence
  Guide RNA
ggcugucuuugcaccacaaac

SEQ ID NO: 6474 - RNA, 21 nt, Artificial Sequence
  Guide RNA
gggcugucuuugcaccacaaa

SEQ ID NO: 6475 - RNA, 21 nt, Artificial Sequence
  Guide RNA
gguauuugcagcucguuugug

SEQ ID NO: 6476 - RNA, 21 nt, Artificial Sequence
  Guide RNA
ggugcaaagacagcccugcau

SEQ ID NO: 6477 - RNA, 21 nt, Artificial Sequence
  Guide RNA
guauuugcagcucguuugugg

SEQ ID NO: 6478 - RNA, 21 nt, Artificial Sequence
  Guide RNA
gucuuugcaccacaaacgagc

SEQ ID NO: 6479 - RNA, 21 nt, Artificial Sequence
  Guide RNA
gugcaaagacagcccugcaug

SEQ ID NO: 6480 - RNA, 21 nt, Artificial Sequence
  Guide RNA
guggugcaaagacagcccugc

SEQ ID NO: 6481 - RNA, 21 nt, Artificial Sequence
  Guide RNA
guuggcaugcagggcugucuu

SEQ ID NO: 6482 - RNA, 21 nt, Artificial Sequence
  Guide RNA
guuuguggugcaaagacagcc

SEQ ID NO: 6483 - RNA, 21 nt, Artificial Sequence
  Guide RNA
uauuugcagcucguuuguggu

SEQ ID NO: 6484 - RNA, 21 nt, Artificial Sequence
  Guide RNA
ucguuuguggugcaaagacag

SEQ ID NO: 6485 - RNA, 21 nt, Artificial Sequence
  Guide RNA
ucuuugcaccacaaacgagcu

SEQ ID NO: 6486 - RNA, 21 nt, Artificial Sequence
  Guide RNA
ugcaaagacagcccugcaugc

SEQ ID NO: 6487 - RNA, 21 nt, Artificial Sequence
  Guide RNA
ugcaccacaaacgagcugcaa

SEQ ID NO: 6488 - RNA, 21 nt, Artificial Sequence
  Guide RNA
ugcagcucguuuguggugcaa

SEQ ID NO: 6489 - RNA, 21 nt, Artificial Sequence
  Guide RNA
ugcagggcugucuuugcacca

SEQ ID NO: 6490 - RNA, 21 nt, Artificial Sequence
  Guide RNA
uggcaugcagggcugucuuug

SEQ ID NO: 6491 - RNA, 21 nt, Artificial Sequence
  Guide RNA
uggugcaaagacagcccugca

SEQ ID NO: 6492 - RNA, 21 nt, Artificial Sequence
  Guide RNA
ugucuuugcaccacaaacgag

SEQ ID NO: 6493 - RNA, 21 nt, Artificial Sequence
  Guide RNA
uguggugcaaagacagcccug

SEQ ID NO: 6494 - RNA, 21 nt, Artificial Sequence
  Guide RNA
uugcaccacaaacgagcugca

SEQ ID NO: 6495 - RNA, 21 nt, Artificial Sequence
  Guide RNA
uugcagcucguuuguggugca

SEQ ID NO: 6496 - RNA, 21 nt, Artificial Sequence
  Guide RNA
uuggcaugcagggcugucuuu

SEQ ID NO: 6497 - RNA, 21 nt, Artificial Sequence
  Guide RNA
uuguggugcaaagacagcccu

SEQ ID NO: 6498 - RNA, 21 nt, Artificial Sequence
  Guide RNA
uuugcaccacaaacgagcugc

SEQ ID NO: 6499 - RNA, 21 nt, Artificial Sequence
  Guide RNA
uuugcagcucguuuguggugc

SEQ ID NO: 6500 - RNA, 21 nt, Artificial Sequence
  Guide RNA
uuuguggugcaaagacagccc

SEQ ID NO: 6501 - RNA, 22 nt, Artificial Sequence
  Guide RNA
agcucguuuguggugcaaagac

SEQ ID NO: 6502 - RNA, 22 nt, Artificial Sequence
  Guide RNA
agggcugucuuugcaccacaaa

SEQ ID NO: 6503 - RNA, 22 nt, Artificial Sequence
  Guide RNA
augcagggcugucuuugcacca

SEQ ID NO: 6504 - RNA, 22 nt, Artificial Sequence
  Guide RNA
auuugcagcucguuuguggugc

SEQ ID NO: 6505 - RNA, 22 nt, Artificial Sequence
  Guide RNA
cagcucguuuguggugcaaaga

SEQ ID NO: 6506 - RNA, 22 nt, Artificial Sequence
  Guide RNA
cagggcugucuuugcaccacaa

SEQ ID NO: 6507 - RNA, 22 nt, Artificial Sequence
  Guide RNA
caugcagggcugucuuugcacc

SEQ ID NO: 6508 - RNA, 22 nt, Artificial Sequence
  Guide RNA
cguuggcaugcagggcugucuu

SEQ ID NO: 6509 - RNA, 22 nt, Artificial Sequence
  Guide RNA
cguuuguggugcaaagacagcc

SEQ ID NO: 6510 - RNA, 22 nt, Artificial Sequence
  Guide RNA
cucguuuguggugcaaagacag

SEQ ID NO: 6511 - RNA, 22 nt, Artificial Sequence
  Guide RNA
cugucuuugcaccacaaacgag

SEQ ID NO: 6512 - RNA, 22 nt, Artificial Sequence
  Guide RNA
cuuugcaccacaaacgagcugc

SEQ ID NO: 6513 - RNA, 22 nt, Artificial Sequence
  Guide RNA
gcaaagacagcccugcaugcca

SEQ ID NO: 6514 - RNA, 22 nt, Artificial Sequence
  Guide RNA
gcagcucguuuguggugcaaag

SEQ ID NO: 6515 - RNA, 22 nt, Artificial Sequence
  Guide RNA
gcagggcugucuuugcaccaca

SEQ ID NO: 6516 - RNA, 22 nt, Artificial Sequence
  Guide RNA
gcaugcagggcugucuuugcac

SEQ ID NO: 6517 - RNA, 22 nt, Artificial Sequence
  Guide RNA
gcguuggcaugcagggcugucu

SEQ ID NO: 6518 - RNA, 22 nt, Artificial Sequence
  Guide RNA
gcucguuuguggugcaaagaca

SEQ ID NO: 6519 - RNA, 22 nt, Artificial Sequence
  Guide RNA
gcugucuuugcaccacaaacga

SEQ ID NO: 6520 - RNA, 22 nt, Artificial Sequence
  Guide RNA
ggcaugcagggcugucuuugca

SEQ ID NO: 6521 - RNA, 22 nt, Artificial Sequence
  Guide RNA
ggcugucuuugcaccacaaacg

SEQ ID NO: 6522 - RNA, 22 nt, Artificial Sequence
  Guide RNA
gggcugucuuugcaccacaaac

SEQ ID NO: 6523 - RNA, 22 nt, Artificial Sequence
  Guide RNA
ggguauuugcagcucguuugug

SEQ ID NO: 6524 - RNA, 22 nt, Artificial Sequence
  Guide RNA
gguauuugcagcucguuugugg

SEQ ID NO: 6525 - RNA, 22 nt, Artificial Sequence
  Guide RNA
ggugcaaagacagcccugcaug

SEQ ID NO: 6526 - RNA, 22 nt, Artificial Sequence
  Guide RNA
guauuugcagcucguuuguggu

SEQ ID NO: 6527 - RNA, 22 nt, Artificial Sequence
  Guide RNA
gucuuugcaccacaaacgagcu

SEQ ID NO: 6528 - RNA, 22 nt, Artificial Sequence
  Guide RNA
gugcaaagacagcccugcaugc

SEQ ID NO: 6529 - RNA, 22 nt, Artificial Sequence
  Guide RNA
guggugcaaagacagcccugca

SEQ ID NO: 6530 - RNA, 22 nt, Artificial Sequence
  Guide RNA
guuggcaugcagggcugucuuu

SEQ ID NO: 6531 - RNA, 22 nt, Artificial Sequence
  Guide RNA
guuuguggugcaaagacagccc

SEQ ID NO: 6532 - RNA, 22 nt, Artificial Sequence
  Guide RNA
uauuugcagcucguuuguggug

SEQ ID NO: 6533 - RNA, 22 nt, Artificial Sequence
  Guide RNA
ucguuuguggugcaaagacagc

SEQ ID NO: 6534 - RNA, 22 nt, Artificial Sequence
  Guide RNA
ucuuugcaccacaaacgagcug

SEQ ID NO: 6535 - RNA, 22 nt, Artificial Sequence
  Guide RNA
ugcaaagacagcccugcaugcc

SEQ ID NO: 6536 - RNA, 22 nt, Artificial Sequence
  Guide RNA
ugcaccacaaacgagcugcaaa

SEQ ID NO: 6537 - RNA, 22 nt, Artificial Sequence
  Guide RNA
ugcagcucguuuguggugcaaa

SEQ ID NO: 6538 - RNA, 22 nt, Artificial Sequence
  Guide RNA
ugcagggcugucuuugcaccac

SEQ ID NO: 6539 - RNA, 22 nt, Artificial Sequence
  Guide RNA
ugcguuggcaugcagggcuguc

SEQ ID NO: 6540 - RNA, 22 nt, Artificial Sequence
  Guide RNA
uggcaugcagggcugucuuugc

SEQ ID NO: 6541 - RNA, 22 nt, Artificial Sequence
  Guide RNA
uggugcaaagacagcccugcau

SEQ ID NO: 6542 - RNA, 22 nt, Artificial Sequence
  Guide RNA
ugucuuugcaccacaaacgagc

SEQ ID NO: 6543 - RNA, 22 nt, Artificial Sequence
  Guide RNA
uguggugcaaagacagcccugc

SEQ ID NO: 6544 - RNA, 22 nt, Artificial Sequence
  Guide RNA
uugcaccacaaacgagcugcaa

SEQ ID NO: 6545 - RNA, 22 nt, Artificial Sequence
  Guide RNA
uugcagcucguuuguggugcaa

SEQ ID NO: 6546 - RNA, 22 nt, Artificial Sequence
  Guide RNA
uuggcaugcagggcugucuuug

SEQ ID NO: 6547 - RNA, 22 nt, Artificial Sequence
  Guide RNA
uuguggugcaaagacagcccug

SEQ ID NO: 6548 - RNA, 22 nt, Artificial Sequence
  Guide RNA
uuugcaccacaaacgagcugca

SEQ ID NO: 6549 - RNA, 22 nt, Artificial Sequence
  Guide RNA
uuugcagcucguuuguggugca

SEQ ID NO: 6550 - RNA, 22 nt, Artificial Sequence
  Guide RNA
uuuguggugcaaagacagcccu

SEQ ID NO: 6551 - RNA, 20 nt, Artificial Sequence
  Guide RNA
aaacgagcugccaauaccca

SEQ ID NO: 6552 - RNA, 20 nt, Artificial Sequence
  Guide RNA
aacgagcugccaauacccag

SEQ ID NO: 6553 - RNA, 20 nt, Artificial Sequence
  Guide RNA
acaaacgagcugccaauacc

SEQ ID NO: 6554 - RNA, 20 nt, Artificial Sequence
  Guide RNA
accacaaacgagcugccaau

SEQ ID NO: 6555 - RNA, 20 nt, Artificial Sequence
  Guide RNA
acgagcugccaauacccagc

SEQ ID NO: 6556 - RNA, 20 nt, Artificial Sequence
  Guide RNA
agcugccaauacccagcaaa

SEQ ID NO: 6557 - RNA, 20 nt, Artificial Sequence
  Guide RNA
auccuuugcuggguauuggc

SEQ ID NO: 6558 - RNA, 20 nt, Artificial Sequence
  Guide RNA
aucuauccuuugcuggguau

SEQ ID NO: 6559 - RNA, 20 nt, Artificial Sequence
  Guide RNA
auuggcagcucguuuguggu

SEQ ID NO: 6560 - RNA, 20 nt, Artificial Sequence
  Guide RNA
caaacgagcugccaauaccc

SEQ ID NO: 6561 - RNA, 20 nt, Artificial Sequence
  Guide RNA
cacaaacgagcugccaauac

SEQ ID NO: 6562 - RNA, 20 nt, Artificial Sequence
  Guide RNA
caccacaaacgagcugccaa

SEQ ID NO: 6563 - RNA, 20 nt, Artificial Sequence
  Guide RNA
ccaauacccagcaaaggaua

SEQ ID NO: 6564 - RNA, 20 nt, Artificial Sequence
  Guide RNA
ccacaaacgagcugccaaua

SEQ ID NO: 6565 - RNA, 20 nt, Artificial Sequence
  Guide RNA
ccaccacaaacgagcugcca

SEQ ID NO: 6566 - RNA, 20 nt, Artificial Sequence
  Guide RNA
ccuuugcuggguauuggcag

SEQ ID NO: 6567 - RNA, 20 nt, Artificial Sequence
  Guide RNA
cgagcugccaauacccagca

SEQ ID NO: 6568 - RNA, 20 nt, Artificial Sequence
  Guide RNA
cuauccuuugcuggguauug

SEQ ID NO: 6569 - RNA, 20 nt, Artificial Sequence
  Guide RNA
cugccaauacccagcaaagg

SEQ ID NO: 6570 - RNA, 20 nt, Artificial Sequence
  Guide RNA
cuggguauuggcagcucguu

SEQ ID NO: 6571 - RNA, 20 nt, Artificial Sequence
  Guide RNA
cuuuccaccacaaacgagcu

SEQ ID NO: 6572 - RNA, 20 nt, Artificial Sequence
  Guide RNA
cuuugcuggguauuggcagc

SEQ ID NO: 6573 - RNA, 20 nt, Artificial Sequence
  Guide RNA
gagcugccaauacccagcaa

SEQ ID NO: 6574 - RNA, 20 nt, Artificial Sequence
  Guide RNA
gccaauacccagcaaaggau

SEQ ID NO: 6575 - RNA, 20 nt, Artificial Sequence
  Guide RNA
gcugccaauacccagcaaag

SEQ ID NO: 6576 - RNA, 20 nt, Artificial Sequence
  Guide RNA
gcuggguauuggcagcucgu

SEQ ID NO: 6577 - RNA, 20 nt, Artificial Sequence
  Guide RNA
ggguauuggcagcucguuug

SEQ ID NO: 6578 - RNA, 20 nt, Artificial Sequence
  Guide RNA
gguauuggcagcucguuugu

SEQ ID NO: 6579 - RNA, 20 nt, Artificial Sequence
  Guide RNA
guauuggcagcucguuugug

SEQ ID NO: 6580 - RNA, 20 nt, Artificial Sequence
  Guide RNA
uauccuuugcuggguauugg

SEQ ID NO: 6581 - RNA, 20 nt, Artificial Sequence
  Guide RNA
uaucuauccuuugcugggua

SEQ ID NO: 6582 - RNA, 20 nt, Artificial Sequence
  Guide RNA
uauuggcagcucguuugugg

SEQ ID NO: 6583 - RNA, 20 nt, Artificial Sequence
  Guide RNA
uccaccacaaacgagcugcc

SEQ ID NO: 6584 - RNA, 20 nt, Artificial Sequence
  Guide RNA
uccuuugcuggguauuggca

SEQ ID NO: 6585 - RNA, 20 nt, Artificial Sequence
  Guide RNA
ucuauccuuugcuggguauu

SEQ ID NO: 6586 - RNA, 20 nt, Artificial Sequence
  Guide RNA
ucuuuccaccacaaacgagc

SEQ ID NO: 6587 - RNA, 20 nt, Artificial Sequence
  Guide RNA
ugccaauacccagcaaagga

SEQ ID NO: 6588 - RNA, 20 nt, Artificial Sequence
  Guide RNA
ugcuggguauuggcagcucg

SEQ ID NO: 6589 - RNA, 20 nt, Artificial Sequence
  Guide RNA
uggcagcucguuuguggugg

SEQ ID NO: 6590 - RNA, 20 nt, Artificial Sequence
  Guide RNA
uggguauuggcagcucguuu

SEQ ID NO: 6591 - RNA, 20 nt, Artificial Sequence
  Guide RNA
uuaucuauccuuugcugggu

SEQ ID NO: 6592 - RNA, 20 nt, Artificial Sequence
  Guide RNA
uuccaccacaaacgagcugc

SEQ ID NO: 6593 - RNA, 20 nt, Artificial Sequence
  Guide RNA
uugcuggguauuggcagcuc

SEQ ID NO: 6594 - RNA, 20 nt, Artificial Sequence
  Guide RNA
uuggcagcucguuuguggug

SEQ ID NO: 6595 - RNA, 20 nt, Artificial Sequence
  Guide RNA
uuuccaccacaaacgagcug

SEQ ID NO: 6596 - RNA, 20 nt, Artificial Sequence
  Guide RNA
uuugcuggguauuggcagcu

SEQ ID NO: 6597 - RNA, 21 nt, Artificial Sequence
  Guide RNA
aaacgagcugccaauacccag

SEQ ID NO: 6598 - RNA, 21 nt, Artificial Sequence
  Guide RNA
aacgagcugccaauacccagc

SEQ ID NO: 6599 - RNA, 21 nt, Artificial Sequence
  Guide RNA
acaaacgagcugccaauaccc

SEQ ID NO: 6600 - RNA, 21 nt, Artificial Sequence
  Guide RNA
accacaaacgagcugccaaua

SEQ ID NO: 6601 - RNA, 21 nt, Artificial Sequence
  Guide RNA
acgagcugccaauacccagca

SEQ ID NO: 6602 - RNA, 21 nt, Artificial Sequence
  Guide RNA
agcugccaauacccagcaaag

SEQ ID NO: 6603 - RNA, 21 nt, Artificial Sequence
  Guide RNA
auccuuugcuggguauuggca

SEQ ID NO: 6604 - RNA, 21 nt, Artificial Sequence
  Guide RNA
aucuauccuuugcuggguauu

SEQ ID NO: 6605 - RNA, 21 nt, Artificial Sequence
  Guide RNA
auuggcagcucguuuguggug

SEQ ID NO: 6606 - RNA, 21 nt, Artificial Sequence
  Guide RNA
caaacgagcugccaauaccca

SEQ ID NO: 6607 - RNA, 21 nt, Artificial Sequence
  Guide RNA
cacaaacgagcugccaauacc

SEQ ID NO: 6608 - RNA, 21 nt, Artificial Sequence
  Guide RNA
caccacaaacgagcugccaau

SEQ ID NO: 6609 - RNA, 21 nt, Artificial Sequence
  Guide RNA
ccaauacccagcaaaggauag

SEQ ID NO: 6610 - RNA, 21 nt, Artificial Sequence
  Guide RNA
ccacaaacgagcugccaauac

SEQ ID NO: 6611 - RNA, 21 nt, Artificial Sequence
  Guide RNA
ccaccacaaacgagcugccaa

SEQ ID NO: 6612 - RNA, 21 nt, Artificial Sequence
  Guide RNA
ccuuugcuggguauuggcagc

SEQ ID NO: 6613 - RNA, 21 nt, Artificial Sequence
  Guide RNA
cgagcugccaauacccagcaa

SEQ ID NO: 6614 - RNA, 21 nt, Artificial Sequence
  Guide RNA
cuauccuuugcuggguauugg

SEQ ID NO: 6615 - RNA, 21 nt, Artificial Sequence
  Guide RNA
cugccaauacccagcaaagga

SEQ ID NO: 6616 - RNA, 21 nt, Artificial Sequence
  Guide RNA
cuggguauuggcagcucguuu

SEQ ID NO: 6617 - RNA, 21 nt, Artificial Sequence
  Guide RNA
cuuaucuauccuuugcugggu

SEQ ID NO: 6618 - RNA, 21 nt, Artificial Sequence
  Guide RNA
cuuuccaccacaaacgagcug

SEQ ID NO: 6619 - RNA, 21 nt, Artificial Sequence
  Guide RNA
cuuugcuggguauuggcagcu

SEQ ID NO: 6620 - RNA, 21 nt, Artificial Sequence
  Guide RNA
gagcugccaauacccagcaaa

SEQ ID NO: 6621 - RNA, 21 nt, Artificial Sequence
  Guide RNA
gccaauacccagcaaaggaua

SEQ ID NO: 6622 - RNA, 21 nt, Artificial Sequence
  Guide RNA
gcugccaauacccagcaaagg

SEQ ID NO: 6623 - RNA, 21 nt, Artificial Sequence
  Guide RNA
gcuggguauuggcagcucguu

SEQ ID NO: 6624 - RNA, 21 nt, Artificial Sequence
  Guide RNA
ggguauuggcagcucguuugu

SEQ ID NO: 6625 - RNA, 21 nt, Artificial Sequence
  Guide RNA
gguauuggcagcucguuugug

SEQ ID NO: 6626 - RNA, 21 nt, Artificial Sequence
  Guide RNA
guauuggcagcucguuugugg

SEQ ID NO: 6627 - RNA, 21 nt, Artificial Sequence
  Guide RNA
gucuuuccaccacaaacgagc

SEQ ID NO: 6628 - RNA, 21 nt, Artificial Sequence
  Guide RNA
uauccuuugcuggguauuggc

SEQ ID NO: 6629 - RNA, 21 nt, Artificial Sequence
  Guide RNA
uaucuauccuuugcuggguau

SEQ ID NO: 6630 - RNA, 21 nt, Artificial Sequence
  Guide RNA
uauuggcagcucguuuguggu

SEQ ID NO: 6631 - RNA, 21 nt, Artificial Sequence
  Guide RNA
uccaccacaaacgagcugcca

SEQ ID NO: 6632 - RNA, 21 nt, Artificial Sequence
  Guide RNA
uccuuugcuggguauuggcag

SEQ ID NO: 6633 - RNA, 21 nt, Artificial Sequence
  Guide RNA
ucuauccuuugcuggguauug

SEQ ID NO: 6634 - RNA, 21 nt, Artificial Sequence
  Guide RNA
ucuuuccaccacaaacgagcu

SEQ ID NO: 6635 - RNA, 21 nt, Artificial Sequence
  Guide RNA
ugccaauacccagcaaaggau

SEQ ID NO: 6636 - RNA, 21 nt, Artificial Sequence
  Guide RNA
ugcuggguauuggcagcucgu

SEQ ID NO: 6637 - RNA, 21 nt, Artificial Sequence
  Guide RNA
uggcagcucguuuguggugga

SEQ ID NO: 6638 - RNA, 21 nt, Artificial Sequence
  Guide RNA
uggguauuggcagcucguuug

SEQ ID NO: 6639 - RNA, 21 nt, Artificial Sequence
  Guide RNA
uuaucuauccuuugcugggua

SEQ ID NO: 6640 - RNA, 21 nt, Artificial Sequence
  Guide RNA
uuccaccacaaacgagcugcc

SEQ ID NO: 6641 - RNA, 21 nt, Artificial Sequence
  Guide RNA
uugcuggguauuggcagcucg

SEQ ID NO: 6642 - RNA, 21 nt, Artificial Sequence
  Guide RNA
uuggcagcucguuuguggugg

SEQ ID NO: 6643 - RNA, 21 nt, Artificial Sequence
  Guide RNA
uuuccaccacaaacgagcugc

SEQ ID NO: 6644 - RNA, 21 nt, Artificial Sequence
  Guide RNA
uuugcuggguauuggcagcuc

SEQ ID NO: 6645 - RNA, 22 nt, Artificial Sequence
  Guide RNA
aaacgagcugccaauacccagc

SEQ ID NO: 6646 - RNA, 22 nt, Artificial Sequence
  Guide RNA
aacgagcugccaauacccagca

SEQ ID NO: 6647 - RNA, 22 nt, Artificial Sequence
  Guide RNA
acaaacgagcugccaauaccca

SEQ ID NO: 6648 - RNA, 22 nt, Artificial Sequence
  Guide RNA
accacaaacgagcugccaauac

SEQ ID NO: 6649 - RNA, 22 nt, Artificial Sequence
  Guide RNA
acgagcugccaauacccagcaa

SEQ ID NO: 6650 - RNA, 22 nt, Artificial Sequence
  Guide RNA
acuuaucuauccuuugcugggu

SEQ ID NO: 6651 - RNA, 22 nt, Artificial Sequence
  Guide RNA
agcugccaauacccagcaaagg

SEQ ID NO: 6652 - RNA, 22 nt, Artificial Sequence
  Guide RNA
auccuuugcuggguauuggcag

SEQ ID NO: 6653 - RNA, 22 nt, Artificial Sequence
  Guide RNA
aucuauccuuugcuggguauug

SEQ ID NO: 6654 - RNA, 22 nt, Artificial Sequence
  Guide RNA
auuggcagcucguuuguggugg

SEQ ID NO: 6655 - RNA, 22 nt, Artificial Sequence
  Guide RNA
caaacgagcugccaauacccag

SEQ ID NO: 6656 - RNA, 22 nt, Artificial Sequence
  Guide RNA
cacaaacgagcugccaauaccc

SEQ ID NO: 6657 - RNA, 22 nt, Artificial Sequence
  Guide RNA
caccacaaacgagcugccaaua

SEQ ID NO: 6658 - RNA, 22 nt, Artificial Sequence
  Guide RNA
ccaauacccagcaaaggauaga

SEQ ID NO: 6659 - RNA, 22 nt, Artificial Sequence
  Guide RNA
ccacaaacgagcugccaauacc

SEQ ID NO: 6660 - RNA, 22 nt, Artificial Sequence
  Guide RNA
ccaccacaaacgagcugccaau

SEQ ID NO: 6661 - RNA, 22 nt, Artificial Sequence
  Guide RNA
ccuuugcuggguauuggcagcu

SEQ ID NO: 6662 - RNA, 22 nt, Artificial Sequence
  Guide RNA
cgagcugccaauacccagcaaa

SEQ ID NO: 6663 - RNA, 22 nt, Artificial Sequence
  Guide RNA
cuauccuuugcuggguauuggc

SEQ ID NO: 6664 - RNA, 22 nt, Artificial Sequence
  Guide RNA
cugccaauacccagcaaaggau

SEQ ID NO: 6665 - RNA, 22 nt, Artificial Sequence
  Guide RNA
cuggguauuggcagcucguuug

SEQ ID NO: 6666 - RNA, 22 nt, Artificial Sequence
  Guide RNA
cuuaucuauccuuugcugggua

SEQ ID NO: 6667 - RNA, 22 nt, Artificial Sequence
  Guide RNA
cuuuccaccacaaacgagcugc

SEQ ID NO: 6668 - RNA, 22 nt, Artificial Sequence
  Guide RNA
cuuugcuggguauuggcagcuc

SEQ ID NO: 6669 - RNA, 22 nt, Artificial Sequence
  Guide RNA
gagcugccaauacccagcaaag

SEQ ID NO: 6670 - RNA, 22 nt, Artificial Sequence
  Guide RNA
gccaauacccagcaaaggauag

SEQ ID NO: 6671 - RNA, 22 nt, Artificial Sequence
  Guide RNA
gcugccaauacccagcaaagga

SEQ ID NO: 6672 - RNA, 22 nt, Artificial Sequence
  Guide RNA
gcuggguauuggcagcucguuu

SEQ ID NO: 6673 - RNA, 22 nt, Artificial Sequence
  Guide RNA
ggguauuggcagcucguuugug

SEQ ID NO: 6674 - RNA, 22 nt, Artificial Sequence
  Guide RNA
gguauuggcagcucguuugugg

SEQ ID NO: 6675 - RNA, 22 nt, Artificial Sequence
  Guide RNA
guauuggcagcucguuuguggu

SEQ ID NO: 6676 - RNA, 22 nt, Artificial Sequence
  Guide RNA
gucuuuccaccacaaacgagcu

SEQ ID NO: 6677 - RNA, 22 nt, Artificial Sequence
  Guide RNA
uauccuuugcuggguauuggca

SEQ ID NO: 6678 - RNA, 22 nt, Artificial Sequence
  Guide RNA
uaucuauccuuugcuggguauu

SEQ ID NO: 6679 - RNA, 22 nt, Artificial Sequence
  Guide RNA
uauuggcagcucguuuguggug

SEQ ID NO: 6680 - RNA, 22 nt, Artificial Sequence
  Guide RNA
uccaccacaaacgagcugccaa

SEQ ID NO: 6681 - RNA, 22 nt, Artificial Sequence
  Guide RNA
uccuuugcuggguauuggcagc

SEQ ID NO: 6682 - RNA, 22 nt, Artificial Sequence
  Guide RNA
ucuauccuuugcuggguauugg

SEQ ID NO: 6683 - RNA, 22 nt, Artificial Sequence
  Guide RNA
ucuuuccaccacaaacgagcug

SEQ ID NO: 6684 - RNA, 22 nt, Artificial Sequence
  Guide RNA
ugccaauacccagcaaaggaua

SEQ ID NO: 6685 - RNA, 22 nt, Artificial Sequence
  Guide RNA
ugcuggguauuggcagcucguu

SEQ ID NO: 6686 - RNA, 22 nt, Artificial Sequence
  Guide RNA
uggcagcucguuugugguggaa

SEQ ID NO: 6687 - RNA, 22 nt, Artificial Sequence
  Guide RNA
uggguauuggcagcucguuugu

SEQ ID NO: 6688 - RNA, 22 nt, Artificial Sequence
  Guide RNA
ugucuuuccaccacaaacgagc

SEQ ID NO: 6689 - RNA, 22 nt, Artificial Sequence
  Guide RNA
uuaucuauccuuugcuggguau

SEQ ID NO: 6690 - RNA, 22 nt, Artificial Sequence
  Guide RNA
uuccaccacaaacgagcugcca

SEQ ID NO: 6691 - RNA, 22 nt, Artificial Sequence
  Guide RNA
uugcuggguauuggcagcucgu

SEQ ID NO: 6692 - RNA, 22 nt, Artificial Sequence
  Guide RNA
uuggcagcucguuuguggugga

SEQ ID NO: 6693 - RNA, 22 nt, Artificial Sequence
  Guide RNA
uuuccaccacaaacgagcugcc

SEQ ID NO: 6694 - RNA, 22 nt, Artificial Sequence
  Guide RNA
uuugcuggguauuggcagcucg

SEQ ID NO: 6695 - RNA, 20 nt, Artificial Sequence
  Guide RNA
aacugcuggaaaagacugaa

SEQ ID NO: 6696 - RNA, 20 nt, Artificial Sequence
  Guide RNA
aaugaacugcuggaaaagac

SEQ ID NO: 6697 - RNA, 20 nt, Artificial Sequence
  Guide RNA
accucugaaugaacugcugg

SEQ ID NO: 6698 - RNA, 20 nt, Artificial Sequence
  Guide RNA
accuucagucuuuuccagca

SEQ ID NO: 6699 - RNA, 20 nt, Artificial Sequence
  Guide RNA
agcaguucauucagagguaa

SEQ ID NO: 6700 - RNA, 20 nt, Artificial Sequence
  Guide RNA
agucuuuuccagcaguucau

SEQ ID NO: 6701 - RNA, 20 nt, Artificial Sequence
  Guide RNA
aguuaccucugaaugaacug

SEQ ID NO: 6702 - RNA, 20 nt, Artificial Sequence
  Guide RNA
aguucauucagagguaacuc

SEQ ID NO: 6703 - RNA, 20 nt, Artificial Sequence
  Guide RNA
augaacugcuggaaaagacu

SEQ ID NO: 6704 - RNA, 20 nt, Artificial Sequence
  Guide RNA
caccuucagucuuuuccagc

SEQ ID NO: 6705 - RNA, 20 nt, Artificial Sequence
  Guide RNA
cagcaguucauucagaggua

SEQ ID NO: 6706 - RNA, 20 nt, Artificial Sequence
  Guide RNA
cagucuuuuccagcaguuca

SEQ ID NO: 6707 - RNA, 20 nt, Artificial Sequence
  Guide RNA
caguucauucagagguaacu

SEQ ID NO: 6708 - RNA, 20 nt, Artificial Sequence
  Guide RNA
ccagcaguucauucagaggu

SEQ ID NO: 6709 - RNA, 20 nt, Artificial Sequence
  Guide RNA
cccuugaguuaccucugaau

SEQ ID NO: 6710 - RNA, 20 nt, Artificial Sequence
  Guide RNA
ccucugaaugaacugcugga

SEQ ID NO: 6711 - RNA, 20 nt, Artificial Sequence
  Guide RNA
ccuucagucuuuuccagcag

SEQ ID NO: 6712 - RNA, 20 nt, Artificial Sequence
  Guide RNA
ccuugaguuaccucugaaug

SEQ ID NO: 6713 - RNA, 20 nt, Artificial Sequence
  Guide RNA
cucugaaugaacugcuggaa

SEQ ID NO: 6714 - RNA, 20 nt, Artificial Sequence
  Guide RNA
cugaaugaacugcuggaaaa

SEQ ID NO: 6715 - RNA, 20 nt, Artificial Sequence
  Guide RNA
cuucagucuuuuccagcagu

SEQ ID NO: 6716 - RNA, 20 nt, Artificial Sequence
  Guide RNA
cuugaguuaccucugaauga

SEQ ID NO: 6717 - RNA, 20 nt, Artificial Sequence
  Guide RNA
cuuuuccagcaguucauuca

SEQ ID NO: 6718 - RNA, 20 nt, Artificial Sequence
  Guide RNA
gaacugcuggaaaagacuga

SEQ ID NO: 6719 - RNA, 20 nt, Artificial Sequence
  Guide RNA
gaaugaacugcuggaaaaga

SEQ ID NO: 6720 - RNA, 20 nt, Artificial Sequence
  Guide RNA
gaguuaccucugaaugaacu

SEQ ID NO: 6721 - RNA, 20 nt, Artificial Sequence
  Guide RNA
gcaccuucagucuuuuccag

SEQ ID NO: 6722 - RNA, 20 nt, Artificial Sequence
  Guide RNA
gcaguucauucagagguaac

SEQ ID NO: 6723 - RNA, 20 nt, Artificial Sequence
  Guide RNA
gucuuuuccagcaguucauu

SEQ ID NO: 6724 - RNA, 20 nt, Artificial Sequence
  Guide RNA
guuaccucugaaugaacugc

SEQ ID NO: 6725 - RNA, 20 nt, Artificial Sequence
  Guide RNA
guucauucagagguaacuca

SEQ ID NO: 6726 - RNA, 20 nt, Artificial Sequence
  Guide RNA
uaccucugaaugaacugcug

SEQ ID NO: 6727 - RNA, 20 nt, Artificial Sequence
  Guide RNA
ucagucuuuuccagcaguuc

SEQ ID NO: 6728 - RNA, 20 nt, Artificial Sequence
  Guide RNA
uccagcaguucauucagagg

SEQ ID NO: 6729 - RNA, 20 nt, Artificial Sequence
  Guide RNA
ucccuugaguuaccucugaa

SEQ ID NO: 6730 - RNA, 20 nt, Artificial Sequence
  Guide RNA
ucugaaugaacugcuggaaa

SEQ ID NO: 6731 - RNA, 20 nt, Artificial Sequence
  Guide RNA
ucuuuuccagcaguucauuc

SEQ ID NO: 6732 - RNA, 20 nt, Artificial Sequence
  Guide RNA
ugaacugcuggaaaagacug

SEQ ID NO: 6733 - RNA, 20 nt, Artificial Sequence
  Guide RNA
ugaaugaacugcuggaaaag

SEQ ID NO: 6734 - RNA, 20 nt, Artificial Sequence
  Guide RNA
ugaguuaccucugaaugaac

SEQ ID NO: 6735 - RNA, 20 nt, Artificial Sequence
  Guide RNA
uuaccucugaaugaacugcu

SEQ ID NO: 6736 - RNA, 20 nt, Artificial Sequence
  Guide RNA
uucagucuuuuccagcaguu

SEQ ID NO: 6737 - RNA, 20 nt, Artificial Sequence
  Guide RNA
uuccagcaguucauucagag

SEQ ID NO: 6738 - RNA, 20 nt, Artificial Sequence
  Guide RNA
uugaguuaccucugaaugaa

SEQ ID NO: 6739 - RNA, 20 nt, Artificial Sequence
  Guide RNA
uuuccagcaguucauucaga

SEQ ID NO: 6740 - RNA, 20 nt, Artificial Sequence
  Guide RNA
uuuuccagcaguucauucag

SEQ ID NO: 6741 - RNA, 21 nt, Artificial Sequence
  Guide RNA
aacugcuggaaaagacugaag

SEQ ID NO: 6742 - RNA, 21 nt, Artificial Sequence
  Guide RNA
aaugaacugcuggaaaagacu

SEQ ID NO: 6743 - RNA, 21 nt, Artificial Sequence
  Guide RNA
accucugaaugaacugcugga

SEQ ID NO: 6744 - RNA, 21 nt, Artificial Sequence
  Guide RNA
accuucagucuuuuccagcag

SEQ ID NO: 6745 - RNA, 21 nt, Artificial Sequence
  Guide RNA
agcaguucauucagagguaac

SEQ ID NO: 6746 - RNA, 21 nt, Artificial Sequence
  Guide RNA
agucuuuuccagcaguucauu

SEQ ID NO: 6747 - RNA, 21 nt, Artificial Sequence
  Guide RNA
aguuaccucugaaugaacugc

SEQ ID NO: 6748 - RNA, 21 nt, Artificial Sequence
  Guide RNA
aguucauucagagguaacuca

SEQ ID NO: 6749 - RNA, 21 nt, Artificial Sequence
  Guide RNA
augaacugcuggaaaagacug

SEQ ID NO: 6750 - RNA, 21 nt, Artificial Sequence
  Guide RNA
caccuucagucuuuuccagca

SEQ ID NO: 6751 - RNA, 21 nt, Artificial Sequence
  Guide RNA
cagcaguucauucagagguaa

SEQ ID NO: 6752 - RNA, 21 nt, Artificial Sequence
  Guide RNA
cagucuuuuccagcaguucau

SEQ ID NO: 6753 - RNA, 21 nt, Artificial Sequence
  Guide RNA
caguucauucagagguaacuc

SEQ ID NO: 6754 - RNA, 21 nt, Artificial Sequence
  Guide RNA
ccagcaguucauucagaggua

SEQ ID NO: 6755 - RNA, 21 nt, Artificial Sequence
  Guide RNA
cccuugaguuaccucugaaug

SEQ ID NO: 6756 - RNA, 21 nt, Artificial Sequence
  Guide RNA
ccucugaaugaacugcuggaa

SEQ ID NO: 6757 - RNA, 21 nt, Artificial Sequence
  Guide RNA
ccuucagucuuuuccagcagu

SEQ ID NO: 6758 - RNA, 21 nt, Artificial Sequence
  Guide RNA
ccuugaguuaccucugaauga

SEQ ID NO: 6759 - RNA, 21 nt, Artificial Sequence
  Guide RNA
cgcaccuucagucuuuuccag

SEQ ID NO: 6760 - RNA, 21 nt, Artificial Sequence
  Guide RNA
cucugaaugaacugcuggaaa

SEQ ID NO: 6761 - RNA, 21 nt, Artificial Sequence
  Guide RNA
cugaaugaacugcuggaaaag

SEQ ID NO: 6762 - RNA, 21 nt, Artificial Sequence
  Guide RNA
cuucagucuuuuccagcaguu

SEQ ID NO: 6763 - RNA, 21 nt, Artificial Sequence
  Guide RNA
cuugaguuaccucugaaugaa

SEQ ID NO: 6764 - RNA, 21 nt, Artificial Sequence
  Guide RNA
cuuuuccagcaguucauucag

SEQ ID NO: 6765 - RNA, 21 nt, Artificial Sequence
  Guide RNA
gaacugcuggaaaagacugaa

SEQ ID NO: 6766 - RNA, 21 nt, Artificial Sequence
  Guide RNA
gaaugaacugcuggaaaagac

SEQ ID NO: 6767 - RNA, 21 nt, Artificial Sequence
  Guide RNA
gaguuaccucugaaugaacug

SEQ ID NO: 6768 - RNA, 21 nt, Artificial Sequence
  Guide RNA
gcaccuucagucuuuuccagc

SEQ ID NO: 6769 - RNA, 21 nt, Artificial Sequence
  Guide RNA
gcaguucauucagagguaacu

SEQ ID NO: 6770 - RNA, 21 nt, Artificial Sequence
  Guide RNA
gucccuugaguuaccucugaa

SEQ ID NO: 6771 - RNA, 21 nt, Artificial Sequence
  Guide RNA
gucuuuuccagcaguucauuc

SEQ ID NO: 6772 - RNA, 21 nt, Artificial Sequence
  Guide RNA
guuaccucugaaugaacugcu

SEQ ID NO: 6773 - RNA, 21 nt, Artificial Sequence
  Guide RNA
guucauucagagguaacucaa

SEQ ID NO: 6774 - RNA, 21 nt, Artificial Sequence
  Guide RNA
uaccucugaaugaacugcugg

SEQ ID NO: 6775 - RNA, 21 nt, Artificial Sequence
  Guide RNA
ucagucuuuuccagcaguuca

SEQ ID NO: 6776 - RNA, 21 nt, Artificial Sequence
  Guide RNA
uccagcaguucauucagaggu

SEQ ID NO: 6777 - RNA, 21 nt, Artificial Sequence
  Guide RNA
ucccuugaguuaccucugaau

SEQ ID NO: 6778 - RNA, 21 nt, Artificial Sequence
  Guide RNA
ucugaaugaacugcuggaaaa

SEQ ID NO: 6779 - RNA, 21 nt, Artificial Sequence
  Guide RNA
ucuuuuccagcaguucauuca

SEQ ID NO: 6780 - RNA, 21 nt, Artificial Sequence
  Guide RNA
ugaacugcuggaaaagacuga

SEQ ID NO: 6781 - RNA, 21 nt, Artificial Sequence
  Guide RNA
ugaaugaacugcuggaaaaga

SEQ ID NO: 6782 - RNA, 21 nt, Artificial Sequence
  Guide RNA
ugaguuaccucugaaugaacu

SEQ ID NO: 6783 - RNA, 21 nt, Artificial Sequence
  Guide RNA
uuaccucugaaugaacugcug

SEQ ID NO: 6784 - RNA, 21 nt, Artificial Sequence
  Guide RNA
uucagucuuuuccagcaguuc

SEQ ID NO: 6785 - RNA, 21 nt, Artificial Sequence
  Guide RNA
uuccagcaguucauucagagg

SEQ ID NO: 6786 - RNA, 21 nt, Artificial Sequence
  Guide RNA
uugaguuaccucugaaugaac

SEQ ID NO: 6787 - RNA, 21 nt, Artificial Sequence
  Guide RNA
uuuccagcaguucauucagag

SEQ ID NO: 6788 - RNA, 21 nt, Artificial Sequence
  Guide RNA
uuuuccagcaguucauucaga

SEQ ID NO: 6789 - RNA, 22 nt, Artificial Sequence
  Guide RNA
aacugcuggaaaagacugaagg

SEQ ID NO: 6790 - RNA, 22 nt, Artificial Sequence
  Guide RNA
aaugaacugcuggaaaagacug

SEQ ID NO: 6791 - RNA, 22 nt, Artificial Sequence
  Guide RNA
accucugaaugaacugcuggaa

SEQ ID NO: 6792 - RNA, 22 nt, Artificial Sequence
  Guide RNA
accuucagucuuuuccagcagu

SEQ ID NO: 6793 - RNA, 22 nt, Artificial Sequence
  Guide RNA
agcaguucauucagagguaacu

SEQ ID NO: 6794 - RNA, 22 nt, Artificial Sequence
  Guide RNA
agucuuuuccagcaguucauuc

SEQ ID NO: 6795 - RNA, 22 nt, Artificial Sequence
  Guide RNA
aguuaccucugaaugaacugcu

SEQ ID NO: 6796 - RNA, 22 nt, Artificial Sequence
  Guide RNA
aguucauucagagguaacucaa

SEQ ID NO: 6797 - RNA, 22 nt, Artificial Sequence
  Guide RNA
augaacugcuggaaaagacuga

SEQ ID NO: 6798 - RNA, 22 nt, Artificial Sequence
  Guide RNA
caccuucagucuuuuccagcag

SEQ ID NO: 6799 - RNA, 22 nt, Artificial Sequence
  Guide RNA
cagcaguucauucagagguaac

SEQ ID NO: 6800 - RNA, 22 nt, Artificial Sequence
  Guide RNA
cagucuuuuccagcaguucauu

SEQ ID NO: 6801 - RNA, 22 nt, Artificial Sequence
  Guide RNA
caguucauucagagguaacuca

SEQ ID NO: 6802 - RNA, 22 nt, Artificial Sequence
  Guide RNA
ccagcaguucauucagagguaa

SEQ ID NO: 6803 - RNA, 22 nt, Artificial Sequence
  Guide RNA
cccuugaguuaccucugaauga

SEQ ID NO: 6804 - RNA, 22 nt, Artificial Sequence
  Guide RNA
ccgcaccuucagucuuuuccag

SEQ ID NO: 6805 - RNA, 22 nt, Artificial Sequence
  Guide RNA
ccucugaaugaacugcuggaaa

SEQ ID NO: 6806 - RNA, 22 nt, Artificial Sequence
  Guide RNA
ccuucagucuuuuccagcaguu

SEQ ID NO: 6807 - RNA, 22 nt, Artificial Sequence
  Guide RNA
ccuugaguuaccucugaaugaa

SEQ ID NO: 6808 - RNA, 22 nt, Artificial Sequence
  Guide RNA
cgcaccuucagucuuuuccagc

SEQ ID NO: 6809 - RNA, 22 nt, Artificial Sequence
  Guide RNA
cucugaaugaacugcuggaaaa

SEQ ID NO: 6810 - RNA, 22 nt, Artificial Sequence
  Guide RNA
cugaaugaacugcuggaaaaga

SEQ ID NO: 6811 - RNA, 22 nt, Artificial Sequence
  Guide RNA
cuucagucuuuuccagcaguuc

SEQ ID NO: 6812 - RNA, 22 nt, Artificial Sequence
  Guide RNA
cuugaguuaccucugaaugaac

SEQ ID NO: 6813 - RNA, 22 nt, Artificial Sequence
  Guide RNA
cuuuuccagcaguucauucaga

SEQ ID NO: 6814 - RNA, 22 nt, Artificial Sequence
  Guide RNA
gaacugcuggaaaagacugaag

SEQ ID NO: 6815 - RNA, 22 nt, Artificial Sequence
  Guide RNA
gaaugaacugcuggaaaagacu

SEQ ID NO: 6816 - RNA, 22 nt, Artificial Sequence
  Guide RNA
gaguuaccucugaaugaacugc

SEQ ID NO: 6817 - RNA, 22 nt, Artificial Sequence
  Guide RNA
gcaccuucagucuuuuccagca

SEQ ID NO: 6818 - RNA, 22 nt, Artificial Sequence
  Guide RNA
gcaguucauucagagguaacuc

SEQ ID NO: 6819 - RNA, 22 nt, Artificial Sequence
  Guide RNA
gucccuugaguuaccucugaau

SEQ ID NO: 6820 - RNA, 22 nt, Artificial Sequence
  Guide RNA
gucuuuuccagcaguucauuca

SEQ ID NO: 6821 - RNA, 22 nt, Artificial Sequence
  Guide RNA
guuaccucugaaugaacugcug

SEQ ID NO: 6822 - RNA, 22 nt, Artificial Sequence
  Guide RNA
guucauucagagguaacucaag

SEQ ID NO: 6823 - RNA, 22 nt, Artificial Sequence
  Guide RNA
uaccucugaaugaacugcugga

SEQ ID NO: 6824 - RNA, 22 nt, Artificial Sequence
  Guide RNA
ucagucuuuuccagcaguucau

SEQ ID NO: 6825 - RNA, 22 nt, Artificial Sequence
  Guide RNA
uccagcaguucauucagaggua

SEQ ID NO: 6826 - RNA, 22 nt, Artificial Sequence
  Guide RNA
ucccuugaguuaccucugaaug

SEQ ID NO: 6827 - RNA, 22 nt, Artificial Sequence
  Guide RNA
ucugaaugaacugcuggaaaag

SEQ ID NO: 6828 - RNA, 22 nt, Artificial Sequence
  Guide RNA
ucuuuuccagcaguucauucag

SEQ ID NO: 6829 - RNA, 22 nt, Artificial Sequence
  Guide RNA
ugaacugcuggaaaagacugaa

SEQ ID NO: 6830 - RNA, 22 nt, Artificial Sequence
  Guide RNA
ugaaugaacugcuggaaaagac

SEQ ID NO: 6831 - RNA, 22 nt, Artificial Sequence
  Guide RNA
ugaguuaccucugaaugaacug

SEQ ID NO: 6832 - RNA, 22 nt, Artificial Sequence
  Guide RNA
ugucccuugaguuaccucugaa

SEQ ID NO: 6833 - RNA, 22 nt, Artificial Sequence
  Guide RNA
uuaccucugaaugaacugcugg

SEQ ID NO: 6834 - RNA, 22 nt, Artificial Sequence
  Guide RNA
uucagucuuuuccagcaguuca

SEQ ID NO: 6835 - RNA, 22 nt, Artificial Sequence
  Guide RNA
uuccagcaguucauucagaggu

SEQ ID NO: 6836 - RNA, 22 nt, Artificial Sequence
  Guide RNA
uugaguuaccucugaaugaacu

SEQ ID NO: 6837 - RNA, 22 nt, Artificial Sequence
  Guide RNA
uuuccagcaguucauucagagg

SEQ ID NO: 6838 - RNA, 22 nt, Artificial Sequence
  Guide RNA
uuuuccagcaguucauucagag

SEQ ID NO: 6839 - RNA, 20 nt, Artificial Sequence
  Guide RNA
aaauacaccuacgaacauga

SEQ ID NO: 6840 - RNA, 20 nt, Artificial Sequence
  Guide RNA
aacaugaaccuaucacaaaa

SEQ ID NO: 6841 - RNA, 20 nt, Artificial Sequence
  Guide RNA
aauacaccuacgaacaugaa

SEQ ID NO: 6842 - RNA, 20 nt, Artificial Sequence
  Guide RNA
acaccuacgaacaugaaccu

SEQ ID NO: 6843 - RNA, 20 nt, Artificial Sequence
  Guide RNA
acaugaaccuaucacaaaaa

SEQ ID NO: 6844 - RNA, 20 nt, Artificial Sequence
  Guide RNA
accuacgaacaugaaccuau

SEQ ID NO: 6845 - RNA, 20 nt, Artificial Sequence
  Guide RNA
acgaacaugaaccuaucaca

SEQ ID NO: 6846 - RNA, 20 nt, Artificial Sequence
  Guide RNA
agaaauacaccuacgaacau

SEQ ID NO: 6847 - RNA, 20 nt, Artificial Sequence
  Guide RNA
agguucauguucguaggugu

SEQ ID NO: 6848 - RNA, 20 nt, Artificial Sequence
  Guide RNA
auacaccuacgaacaugaac

SEQ ID NO: 6849 - RNA, 20 nt, Artificial Sequence
  Guide RNA
auagguucauguucguaggu

SEQ ID NO: 6850 - RNA, 20 nt, Artificial Sequence
  Guide RNA
augaaccuaucacaaaaaac

SEQ ID NO: 6851 - RNA, 20 nt, Artificial Sequence
  Guide RNA
caccuacgaacaugaaccua

SEQ ID NO: 6852 - RNA, 20 nt, Artificial Sequence
  Guide RNA
cagaaauacaccuacgaaca

SEQ ID NO: 6853 - RNA, 20 nt, Artificial Sequence
  Guide RNA
caugaaccuaucacaaaaaa

SEQ ID NO: 6854 - RNA, 20 nt, Artificial Sequence
  Guide RNA
ccuacgaacaugaaccuauc

SEQ ID NO: 6855 - RNA, 20 nt, Artificial Sequence
  Guide RNA
cgaacaugaaccuaucacaa

SEQ ID NO: 6856 - RNA, 20 nt, Artificial Sequence
  Guide RNA
cuacgaacaugaaccuauca

SEQ ID NO: 6857 - RNA, 20 nt, Artificial Sequence
  Guide RNA
gaaauacaccuacgaacaug

SEQ ID NO: 6858 - RNA, 20 nt, Artificial Sequence
  Guide RNA
gaacaugaaccuaucacaaa

SEQ ID NO: 6859 - RNA, 20 nt, Artificial Sequence
  Guide RNA
gaaccuaucacaaaaaacaa

SEQ ID NO: 6860 - RNA, 20 nt, Artificial Sequence
  Guide RNA
gauagguucauguucguagg

SEQ ID NO: 6861 - RNA, 20 nt, Artificial Sequence
  Guide RNA
gguucauguucguaggugua

SEQ ID NO: 6862 - RNA, 20 nt, Artificial Sequence
  Guide RNA
gugauagguucauguucgua

SEQ ID NO: 6863 - RNA, 20 nt, Artificial Sequence
  Guide RNA
guucauguucguagguguau

SEQ ID NO: 6864 - RNA, 20 nt, Artificial Sequence
  Guide RNA
guuuguuuuuugugauaggu

SEQ ID NO: 6865 - RNA, 20 nt, Artificial Sequence
  Guide RNA
guuuuuugugauagguucau

SEQ ID NO: 6866 - RNA, 20 nt, Artificial Sequence
  Guide RNA
uacaccuacgaacaugaacc

SEQ ID NO: 6867 - RNA, 20 nt, Artificial Sequence
  Guide RNA
uacgaacaugaaccuaucac

SEQ ID NO: 6868 - RNA, 20 nt, Artificial Sequence
  Guide RNA
uagguucauguucguaggug

SEQ ID NO: 6869 - RNA, 20 nt, Artificial Sequence
  Guide RNA
ugaaccuaucacaaaaaaca

SEQ ID NO: 6870 - RNA, 20 nt, Artificial Sequence
  Guide RNA
ugauagguucauguucguag

SEQ ID NO: 6871 - RNA, 20 nt, Artificial Sequence
  Guide RNA
ugugauagguucauguucgu

SEQ ID NO: 6872 - RNA, 20 nt, Artificial Sequence
  Guide RNA
uguuuguuuuuugugauagg

SEQ ID NO: 6873 - RNA, 20 nt, Artificial Sequence
  Guide RNA
uguuuuuugugauagguuca

SEQ ID NO: 6874 - RNA, 20 nt, Artificial Sequence
  Guide RNA
uugugauagguucauguucg

SEQ ID NO: 6875 - RNA, 20 nt, Artificial Sequence
  Guide RNA
uuguuuuuugugauagguuc

SEQ ID NO: 6876 - RNA, 20 nt, Artificial Sequence
  Guide RNA
uuugugauagguucauguuc

SEQ ID NO: 6877 - RNA, 20 nt, Artificial Sequence
  Guide RNA
uuuugugauagguucauguu

SEQ ID NO: 6878 - RNA, 20 nt, Artificial Sequence
  Guide RNA
uuuuugugauagguucaugu

SEQ ID NO: 6879 - RNA, 20 nt, Artificial Sequence
  Guide RNA
uuuuuugugauagguucaug

SEQ ID NO: 6880 - RNA, 21 nt, Artificial Sequence
  Guide RNA
aaauacaccuacgaacaugaa

SEQ ID NO: 6881 - RNA, 21 nt, Artificial Sequence
  Guide RNA
aauacaccuacgaacaugaac

SEQ ID NO: 6882 - RNA, 21 nt, Artificial Sequence
  Guide RNA
acaccuacgaacaugaaccua

SEQ ID NO: 6883 - RNA, 21 nt, Artificial Sequence
  Guide RNA
acagaaauacaccuacgaaca

SEQ ID NO: 6884 - RNA, 21 nt, Artificial Sequence
  Guide RNA
accuacgaacaugaaccuauc

SEQ ID NO: 6885 - RNA, 21 nt, Artificial Sequence
  Guide RNA
acgaacaugaaccuaucacaa

SEQ ID NO: 6886 - RNA, 21 nt, Artificial Sequence
  Guide RNA
agaaauacaccuacgaacaug

SEQ ID NO: 6887 - RNA, 21 nt, Artificial Sequence
  Guide RNA
agguucauguucguaggugua

SEQ ID NO: 6888 - RNA, 21 nt, Artificial Sequence
  Guide RNA
auacaccuacgaacaugaacc

SEQ ID NO: 6889 - RNA, 21 nt, Artificial Sequence
  Guide RNA
auagguucauguucguaggug

SEQ ID NO: 6890 - RNA, 21 nt, Artificial Sequence
  Guide RNA
caccuacgaacaugaaccuau

SEQ ID NO: 6891 - RNA, 21 nt, Artificial Sequence
  Guide RNA
cagaaauacaccuacgaacau

SEQ ID NO: 6892 - RNA, 21 nt, Artificial Sequence
  Guide RNA
caugaaccuaucacaaaaaac

SEQ ID NO: 6893 - RNA, 21 nt, Artificial Sequence
  Guide RNA
ccuacgaacaugaaccuauca

SEQ ID NO: 6894 - RNA, 21 nt, Artificial Sequence
  Guide RNA
cgaacaugaaccuaucacaaa

SEQ ID NO: 6895 - RNA, 21 nt, Artificial Sequence
  Guide RNA
cuacgaacaugaaccuaucac

SEQ ID NO: 6896 - RNA, 21 nt, Artificial Sequence
  Guide RNA
gaaauacaccuacgaacauga

SEQ ID NO: 6897 - RNA, 21 nt, Artificial Sequence
  Guide RNA
gaacaugaaccuaucacaaaa

SEQ ID NO: 6898 - RNA, 21 nt, Artificial Sequence
  Guide RNA
gauagguucauguucguaggu

SEQ ID NO: 6899 - RNA, 21 nt, Artificial Sequence
  Guide RNA
gguucauguucguagguguau

SEQ ID NO: 6900 - RNA, 21 nt, Artificial Sequence
  Guide RNA
gugauagguucauguucguag

SEQ ID NO: 6901 - RNA, 21 nt, Artificial Sequence
  Guide RNA
guucauguucguagguguauu

SEQ ID NO: 6902 - RNA, 21 nt, Artificial Sequence
  Guide RNA
guuuuuugugauagguucaug

SEQ ID NO: 6903 - RNA, 21 nt, Artificial Sequence
  Guide RNA
uacaccuacgaacaugaaccu

SEQ ID NO: 6904 - RNA, 21 nt, Artificial Sequence
  Guide RNA
uacgaacaugaaccuaucaca

SEQ ID NO: 6905 - RNA, 21 nt, Artificial Sequence
  Guide RNA
uagguucauguucguaggugu

SEQ ID NO: 6906 - RNA, 21 nt, Artificial Sequence
  Guide RNA
ugauagguucauguucguagg

SEQ ID NO: 6907 - RNA, 21 nt, Artificial Sequence
  Guide RNA
ugugauagguucauguucgua

SEQ ID NO: 6908 - RNA, 21 nt, Artificial Sequence
  Guide RNA
uugugauagguucauguucgu

SEQ ID NO: 6909 - RNA, 21 nt, Artificial Sequence
  Guide RNA
uuugugauagguucauguucg

SEQ ID NO: 6910 - RNA, 21 nt, Artificial Sequence
  Guide RNA
uuuugugauagguucauguuc

SEQ ID NO: 6911 - RNA, 22 nt, Artificial Sequence
  Guide RNA
aaauacaccuacgaacaugaac

SEQ ID NO: 6912 - RNA, 22 nt, Artificial Sequence
  Guide RNA
aacagaaauacaccuacgaaca

SEQ ID NO: 6913 - RNA, 22 nt, Artificial Sequence
  Guide RNA
aauacaccuacgaacaugaacc

SEQ ID NO: 6914 - RNA, 22 nt, Artificial Sequence
  Guide RNA
acaccuacgaacaugaaccuau

SEQ ID NO: 6915 - RNA, 22 nt, Artificial Sequence
  Guide RNA
acagaaauacaccuacgaacau

SEQ ID NO: 6916 - RNA, 22 nt, Artificial Sequence
  Guide RNA
acaugaaccuaucacaaaaaac

SEQ ID NO: 6917 - RNA, 22 nt, Artificial Sequence
  Guide RNA
accuacgaacaugaaccuauca

SEQ ID NO: 6918 - RNA, 22 nt, Artificial Sequence
  Guide RNA
acgaacaugaaccuaucacaaa

SEQ ID NO: 6919 - RNA, 22 nt, Artificial Sequence
  Guide RNA
agaaauacaccuacgaacauga

SEQ ID NO: 6920 - RNA, 22 nt, Artificial Sequence
  Guide RNA
agguucauguucguagguguau

SEQ ID NO: 6921 - RNA, 22 nt, Artificial Sequence
  Guide RNA
auacaccuacgaacaugaaccu

SEQ ID NO: 6922 - RNA, 22 nt, Artificial Sequence
  Guide RNA
auagguucauguucguaggugu

SEQ ID NO: 6923 - RNA, 22 nt, Artificial Sequence
  Guide RNA
caccuacgaacaugaaccuauc

SEQ ID NO: 6924 - RNA, 22 nt, Artificial Sequence
  Guide RNA
cagaaauacaccuacgaacaug

SEQ ID NO: 6925 - RNA, 22 nt, Artificial Sequence
  Guide RNA
caugaaccuaucacaaaaaaca

SEQ ID NO: 6926 - RNA, 22 nt, Artificial Sequence
  Guide RNA
ccuacgaacaugaaccuaucac

SEQ ID NO: 6927 - RNA, 22 nt, Artificial Sequence
  Guide RNA
cgaacaugaaccuaucacaaaa

SEQ ID NO: 6928 - RNA, 22 nt, Artificial Sequence
  Guide RNA
cuacgaacaugaaccuaucaca

SEQ ID NO: 6929 - RNA, 22 nt, Artificial Sequence
  Guide RNA
cuuguuuguuuuuugugauagg

SEQ ID NO: 6930 - RNA, 22 nt, Artificial Sequence
  Guide RNA
gaaauacaccuacgaacaugaa

SEQ ID NO: 6931 - RNA, 22 nt, Artificial Sequence
  Guide RNA
gaacaugaaccuaucacaaaaa

SEQ ID NO: 6932 - RNA, 22 nt, Artificial Sequence
  Guide RNA
gaaccuaucacaaaaaacaaac

SEQ ID NO: 6933 - RNA, 22 nt, Artificial Sequence
  Guide RNA
gauagguucauguucguaggug

SEQ ID NO: 6934 - RNA, 22 nt, Artificial Sequence
  Guide RNA
gguucauguucguagguguauu

SEQ ID NO: 6935 - RNA, 22 nt, Artificial Sequence
  Guide RNA
gugauagguucauguucguagg

SEQ ID NO: 6936 - RNA, 22 nt, Artificial Sequence
  Guide RNA
guucauguucguagguguauuu

SEQ ID NO: 6937 - RNA, 22 nt, Artificial Sequence
  Guide RNA
guuuguuuuuugugauagguuc

SEQ ID NO: 6938 - RNA, 22 nt, Artificial Sequence
  Guide RNA
guuuuuugugauagguucaugu

SEQ ID NO: 6939 - RNA, 22 nt, Artificial Sequence
  Guide RNA
uacaccuacgaacaugaaccua

SEQ ID NO: 6940 - RNA, 22 nt, Artificial Sequence
  Guide RNA
uacgaacaugaaccuaucacaa

SEQ ID NO: 6941 - RNA, 22 nt, Artificial Sequence
  Guide RNA
uagguucauguucguaggugua

SEQ ID NO: 6942 - RNA, 22 nt, Artificial Sequence
  Guide RNA
ugauagguucauguucguaggu

SEQ ID NO: 6943 - RNA, 22 nt, Artificial Sequence
  Guide RNA
ugugauagguucauguucguag

SEQ ID NO: 6944 - RNA, 22 nt, Artificial Sequence
  Guide RNA
uguuuuuugugauagguucaug

SEQ ID NO: 6945 - RNA, 22 nt, Artificial Sequence
  Guide RNA
uugugauagguucauguucgua

SEQ ID NO: 6946 - RNA, 22 nt, Artificial Sequence
  Guide RNA
uuugugauagguucauguucgu

SEQ ID NO: 6947 - RNA, 22 nt, Artificial Sequence
  Guide RNA
uuuugugauagguucauguucg

SEQ ID NO: 6948 - RNA, 22 nt, Artificial Sequence
  Guide RNA
uuuuugugauagguucauguuc

SEQ ID NO: 6949 - RNA, 20 nt, Artificial Sequence
  Guide RNA
aaauacaccugcgaacauga

SEQ ID NO: 6950 - RNA, 20 nt, Artificial Sequence
  Guide RNA
aacagaaauacaccugcgaa

SEQ ID NO: 6951 - RNA, 20 nt, Artificial Sequence
  Guide RNA
aauacaccugcgaacaugac

SEQ ID NO: 6952 - RNA, 20 nt, Artificial Sequence
  Guide RNA
aauuggaacagaaauacacc

SEQ ID NO: 6953 - RNA, 20 nt, Artificial Sequence
  Guide RNA
acaccugcgaacaugacccu

SEQ ID NO: 6954 - RNA, 20 nt, Artificial Sequence
  Guide RNA
acagaaauacaccugcgaac

SEQ ID NO: 6955 - RNA, 20 nt, Artificial Sequence
  Guide RNA
accugcgaacaugacccuau

SEQ ID NO: 6956 - RNA, 20 nt, Artificial Sequence
  Guide RNA
agaaauacaccugcgaacau

SEQ ID NO: 6957 - RNA, 20 nt, Artificial Sequence
  Guide RNA
agggucauguucgcaggugu

SEQ ID NO: 6958 - RNA, 20 nt, Artificial Sequence
  Guide RNA
auacaccugcgaacaugacc

SEQ ID NO: 6959 - RNA, 20 nt, Artificial Sequence
  Guide RNA
auagggucauguucgcaggu

SEQ ID NO: 6960 - RNA, 20 nt, Artificial Sequence
  Guide RNA
auguucgcagguguauuucu

SEQ ID NO: 6961 - RNA, 20 nt, Artificial Sequence
  Guide RNA
auuggaacagaaauacaccu

SEQ ID NO: 6962 - RNA, 20 nt, Artificial Sequence
  Guide RNA
caccugcgaacaugacccua

SEQ ID NO: 6963 - RNA, 20 nt, Artificial Sequence
  Guide RNA
cagaaauacaccugcgaaca

SEQ ID NO: 6964 - RNA, 20 nt, Artificial Sequence
  Guide RNA
cauguucgcagguguauuuc

SEQ ID NO: 6965 - RNA, 20 nt, Artificial Sequence
  Guide RNA
ccugcgaacaugacccuauc

SEQ ID NO: 6966 - RNA, 20 nt, Artificial Sequence
  Guide RNA
cgcagguguauuucuguucc

SEQ ID NO: 6967 - RNA, 20 nt, Artificial Sequence
  Guide RNA
cugcgaacaugacccuauca

SEQ ID NO: 6968 - RNA, 20 nt, Artificial Sequence
  Guide RNA
gaaauacaccugcgaacaug

SEQ ID NO: 6969 - RNA, 20 nt, Artificial Sequence
  Guide RNA
gaacagaaauacaccugcga

SEQ ID NO: 6970 - RNA, 20 nt, Artificial Sequence
  Guide RNA
gaauuggaacagaaauacac

SEQ ID NO: 6971 - RNA, 20 nt, Artificial Sequence
  Guide RNA
gauagggucauguucgcagg

SEQ ID NO: 6972 - RNA, 20 nt, Artificial Sequence
  Guide RNA
gcagguguauuucuguucca

SEQ ID NO: 6973 - RNA, 20 nt, Artificial Sequence
  Guide RNA
ggaacagaaauacaccugcg

SEQ ID NO: 6974 - RNA, 20 nt, Artificial Sequence
  Guide RNA
ggaauuggaacagaaauaca

SEQ ID NO: 6975 - RNA, 20 nt, Artificial Sequence
  Guide RNA
gggucauguucgcaggugua

SEQ ID NO: 6976 - RNA, 20 nt, Artificial Sequence
  Guide RNA
ggucauguucgcagguguau

SEQ ID NO: 6977 - RNA, 20 nt, Artificial Sequence
  Guide RNA
gucauguucgcagguguauu

SEQ ID NO: 6978 - RNA, 20 nt, Artificial Sequence
  Guide RNA
gugauagggucauguucgca

SEQ ID NO: 6979 - RNA, 20 nt, Artificial Sequence
  Guide RNA
guucgcagguguauuucugu

SEQ ID NO: 6980 - RNA, 20 nt, Artificial Sequence
  Guide RNA
uacaccugcgaacaugaccc

SEQ ID NO: 6981 - RNA, 20 nt, Artificial Sequence
  Guide RNA
uagggucauguucgcaggug

SEQ ID NO: 6982 - RNA, 20 nt, Artificial Sequence
  Guide RNA
ucauguucgcagguguauuu

SEQ ID NO: 6983 - RNA, 20 nt, Artificial Sequence
  Guide RNA
ucgcagguguauuucuguuc

SEQ ID NO: 6984 - RNA, 20 nt, Artificial Sequence
  Guide RNA
ugauagggucauguucgcag

SEQ ID NO: 6985 - RNA, 20 nt, Artificial Sequence
  Guide RNA
ugcgaacaugacccuaucac

SEQ ID NO: 6986 - RNA, 20 nt, Artificial Sequence
  Guide RNA
uggaacagaaauacaccugc

SEQ ID NO: 6987 - RNA, 20 nt, Artificial Sequence
  Guide RNA
ugugauagggucauguucgc

SEQ ID NO: 6988 - RNA, 20 nt, Artificial Sequence
  Guide RNA
uguucgcagguguauuucug

SEQ ID NO: 6989 - RNA, 20 nt, Artificial Sequence
  Guide RNA
uucgcagguguauuucuguu

SEQ ID NO: 6990 - RNA, 20 nt, Artificial Sequence
  Guide RNA
uuggaacagaaauacaccug

SEQ ID NO: 6991 - RNA, 20 nt, Artificial Sequence
  Guide RNA
uugugauagggucauguucg

SEQ ID NO: 6992 - RNA, 20 nt, Artificial Sequence
  Guide RNA
uuugugauagggucauguuc

SEQ ID NO: 6993 - RNA, 20 nt, Artificial Sequence
  Guide RNA
uuuugugauagggucauguu

SEQ ID NO: 6994 - RNA, 20 nt, Artificial Sequence
  Guide RNA
uuuuugugauagggucaugu

SEQ ID NO: 6995 - RNA, 21 nt, Artificial Sequence
  Guide RNA
aaauacaccugcgaacaugac

SEQ ID NO: 6996 - RNA, 21 nt, Artificial Sequence
  Guide RNA
aacagaaauacaccugcgaac

SEQ ID NO: 6997 - RNA, 21 nt, Artificial Sequence
  Guide RNA
aauacaccugcgaacaugacc

SEQ ID NO: 6998 - RNA, 21 nt, Artificial Sequence
  Guide RNA
aauuggaacagaaauacaccu

SEQ ID NO: 6999 - RNA, 21 nt, Artificial Sequence
  Guide RNA
acaccugcgaacaugacccua

SEQ ID NO: 7000 - RNA, 21 nt, Artificial Sequence
  Guide RNA
acagaaauacaccugcgaaca

SEQ ID NO: 7001 - RNA, 21 nt, Artificial Sequence
  Guide RNA
accugcgaacaugacccuauc

SEQ ID NO: 7002 - RNA, 21 nt, Artificial Sequence
  Guide RNA
agaaauacaccugcgaacaug

SEQ ID NO: 7003 - RNA, 21 nt, Artificial Sequence
  Guide RNA
aggaauuggaacagaaauaca

SEQ ID NO: 7004 - RNA, 21 nt, Artificial Sequence
  Guide RNA
agggucauguucgcaggugua

SEQ ID NO: 7005 - RNA, 21 nt, Artificial Sequence
  Guide RNA
auacaccugcgaacaugaccc

SEQ ID NO: 7006 - RNA, 21 nt, Artificial Sequence
  Guide RNA
auagggucauguucgcaggug

SEQ ID NO: 7007 - RNA, 21 nt, Artificial Sequence
  Guide RNA
auguucgcagguguauuucug

SEQ ID NO: 7008 - RNA, 21 nt, Artificial Sequence
  Guide RNA
auuggaacagaaauacaccug

SEQ ID NO: 7009 - RNA, 21 nt, Artificial Sequence
  Guide RNA
caccugcgaacaugacccuau

SEQ ID NO: 7010 - RNA, 21 nt, Artificial Sequence
  Guide RNA
cagaaauacaccugcgaacau

SEQ ID NO: 7011 - RNA, 21 nt, Artificial Sequence
  Guide RNA
cauguucgcagguguauuucu

SEQ ID NO: 7012 - RNA, 21 nt, Artificial Sequence
  Guide RNA
ccugcgaacaugacccuauca

SEQ ID NO: 7013 - RNA, 21 nt, Artificial Sequence
  Guide RNA
cgcagguguauuucuguucca

SEQ ID NO: 7014 - RNA, 21 nt, Artificial Sequence
  Guide RNA
cugcgaacaugacccuaucac

SEQ ID NO: 7015 - RNA, 21 nt, Artificial Sequence
  Guide RNA
gaaauacaccugcgaacauga

SEQ ID NO: 7016 - RNA, 21 nt, Artificial Sequence
  Guide RNA
gaacagaaauacaccugcgaa

SEQ ID NO: 7017 - RNA, 21 nt, Artificial Sequence
  Guide RNA
gaauuggaacagaaauacacc

SEQ ID NO: 7018 - RNA, 21 nt, Artificial Sequence
  Guide RNA
gauagggucauguucgcaggu

SEQ ID NO: 7019 - RNA, 21 nt, Artificial Sequence
  Guide RNA
gcagguguauuucuguuccaa

SEQ ID NO: 7020 - RNA, 21 nt, Artificial Sequence
  Guide RNA
ggaacagaaauacaccugcga

SEQ ID NO: 7021 - RNA, 21 nt, Artificial Sequence
  Guide RNA
ggaauuggaacagaaauacac

SEQ ID NO: 7022 - RNA, 21 nt, Artificial Sequence
  Guide RNA
gggucauguucgcagguguau

SEQ ID NO: 7023 - RNA, 21 nt, Artificial Sequence
  Guide RNA
ggucauguucgcagguguauu

SEQ ID NO: 7024 - RNA, 21 nt, Artificial Sequence
  Guide RNA
gucauguucgcagguguauuu

SEQ ID NO: 7025 - RNA, 21 nt, Artificial Sequence
  Guide RNA
gugauagggucauguucgcag

SEQ ID NO: 7026 - RNA, 21 nt, Artificial Sequence
  Guide RNA
guucgcagguguauuucuguu

SEQ ID NO: 7027 - RNA, 21 nt, Artificial Sequence
  Guide RNA
uacaccugcgaacaugacccu

SEQ ID NO: 7028 - RNA, 21 nt, Artificial Sequence
  Guide RNA
uagggucauguucgcaggugu

SEQ ID NO: 7029 - RNA, 21 nt, Artificial Sequence
  Guide RNA
ucauguucgcagguguauuuc

SEQ ID NO: 7030 - RNA, 21 nt, Artificial Sequence
  Guide RNA
ucgcagguguauuucuguucc

SEQ ID NO: 7031 - RNA, 21 nt, Artificial Sequence
  Guide RNA
ugauagggucauguucgcagg

SEQ ID NO: 7032 - RNA, 21 nt, Artificial Sequence
  Guide RNA
ugcgaacaugacccuaucaca

SEQ ID NO: 7033 - RNA, 21 nt, Artificial Sequence
  Guide RNA
uggaacagaaauacaccugcg

SEQ ID NO: 7034 - RNA, 21 nt, Artificial Sequence
  Guide RNA
ugugauagggucauguucgca

SEQ ID NO: 7035 - RNA, 21 nt, Artificial Sequence
  Guide RNA
uguucgcagguguauuucugu

SEQ ID NO: 7036 - RNA, 21 nt, Artificial Sequence
  Guide RNA
uucgcagguguauuucuguuc

SEQ ID NO: 7037 - RNA, 21 nt, Artificial Sequence
  Guide RNA
uuggaacagaaauacaccugc

SEQ ID NO: 7038 - RNA, 21 nt, Artificial Sequence
  Guide RNA
uugugauagggucauguucgc

SEQ ID NO: 7039 - RNA, 21 nt, Artificial Sequence
  Guide RNA
uuugugauagggucauguucg

SEQ ID NO: 7040 - RNA, 21 nt, Artificial Sequence
  Guide RNA
uuuugugauagggucauguuc

SEQ ID NO: 7041 - RNA, 21 nt, Artificial Sequence
  Guide RNA
uuuuugugauagggucauguu

SEQ ID NO: 7042 - RNA, 21 nt, Artificial Sequence
  Guide RNA
uuuuuugugauagggucaugu

SEQ ID NO: 7043 - RNA, 22 nt, Artificial Sequence
  Guide RNA
aaauacaccugcgaacaugacc

SEQ ID NO: 7044 - RNA, 22 nt, Artificial Sequence
  Guide RNA
aacagaaauacaccugcgaaca

SEQ ID NO: 7045 - RNA, 22 nt, Artificial Sequence
  Guide RNA
aauacaccugcgaacaugaccc

SEQ ID NO: 7046 - RNA, 22 nt, Artificial Sequence
  Guide RNA
aauuggaacagaaauacaccug

SEQ ID NO: 7047 - RNA, 22 nt, Artificial Sequence
  Guide RNA
acaccugcgaacaugacccuau

SEQ ID NO: 7048 - RNA, 22 nt, Artificial Sequence
  Guide RNA
acagaaauacaccugcgaacau

SEQ ID NO: 7049 - RNA, 22 nt, Artificial Sequence
  Guide RNA
accugcgaacaugacccuauca

SEQ ID NO: 7050 - RNA, 22 nt, Artificial Sequence
  Guide RNA
agaaauacaccugcgaacauga

SEQ ID NO: 7051 - RNA, 22 nt, Artificial Sequence
  Guide RNA
aggaauuggaacagaaauacac

SEQ ID NO: 7052 - RNA, 22 nt, Artificial Sequence
  Guide RNA
agggucauguucgcagguguau

SEQ ID NO: 7053 - RNA, 22 nt, Artificial Sequence
  Guide RNA
auacaccugcgaacaugacccu

SEQ ID NO: 7054 - RNA, 22 nt, Artificial Sequence
  Guide RNA
auagggucauguucgcaggugu

SEQ ID NO: 7055 - RNA, 22 nt, Artificial Sequence
  Guide RNA
auguucgcagguguauuucugu

SEQ ID NO: 7056 - RNA, 22 nt, Artificial Sequence
  Guide RNA
auuggaacagaaauacaccugc

SEQ ID NO: 7057 - RNA, 22 nt, Artificial Sequence
  Guide RNA
caccugcgaacaugacccuauc

SEQ ID NO: 7058 - RNA, 22 nt, Artificial Sequence
  Guide RNA
cagaaauacaccugcgaacaug

SEQ ID NO: 7059 - RNA, 22 nt, Artificial Sequence
  Guide RNA
cauguucgcagguguauuucug

SEQ ID NO: 7060 - RNA, 22 nt, Artificial Sequence
  Guide RNA
ccugcgaacaugacccuaucac

SEQ ID NO: 7061 - RNA, 22 nt, Artificial Sequence
  Guide RNA
cgcagguguauuucuguuccaa

SEQ ID NO: 7062 - RNA, 22 nt, Artificial Sequence
  Guide RNA
cugcgaacaugacccuaucaca

SEQ ID NO: 7063 - RNA, 22 nt, Artificial Sequence
  Guide RNA
gaaauacaccugcgaacaugac

SEQ ID NO: 7064 - RNA, 22 nt, Artificial Sequence
  Guide RNA
gaacagaaauacaccugcgaac

SEQ ID NO: 7065 - RNA, 22 nt, Artificial Sequence
  Guide RNA
gaauuggaacagaaauacaccu

SEQ ID NO: 7066 - RNA, 22 nt, Artificial Sequence
  Guide RNA
gaggaauuggaacagaaauaca

SEQ ID NO: 7067 - RNA, 22 nt, Artificial Sequence
  Guide RNA
gauagggucauguucgcaggug

SEQ ID NO: 7068 - RNA, 22 nt, Artificial Sequence
  Guide RNA
gcagguguauuucuguuccaau

SEQ ID NO: 7069 - RNA, 22 nt, Artificial Sequence
  Guide RNA
ggaacagaaauacaccugcgaa

SEQ ID NO: 7070 - RNA, 22 nt, Artificial Sequence
  Guide RNA
ggaauuggaacagaaauacacc

SEQ ID NO: 7071 - RNA, 22 nt, Artificial Sequence
  Guide RNA
gggucauguucgcagguguauu

SEQ ID NO: 7072 - RNA, 22 nt, Artificial Sequence
  Guide RNA
ggucauguucgcagguguauuu

SEQ ID NO: 7073 - RNA, 22 nt, Artificial Sequence
  Guide RNA
gucauguucgcagguguauuuc

SEQ ID NO: 7074 - RNA, 22 nt, Artificial Sequence
  Guide RNA
gugauagggucauguucgcagg

SEQ ID NO: 7075 - RNA, 22 nt, Artificial Sequence
  Guide RNA
guucgcagguguauuucuguuc

SEQ ID NO: 7076 - RNA, 22 nt, Artificial Sequence
  Guide RNA
guuuuuugugauagggucaugu

SEQ ID NO: 7077 - RNA, 22 nt, Artificial Sequence
  Guide RNA
uacaccugcgaacaugacccua

SEQ ID NO: 7078 - RNA, 22 nt, Artificial Sequence
  Guide RNA
uagggucauguucgcaggugua

SEQ ID NO: 7079 - RNA, 22 nt, Artificial Sequence
  Guide RNA
ucauguucgcagguguauuucu

SEQ ID NO: 7080 - RNA, 22 nt, Artificial Sequence
  Guide RNA
ucgcagguguauuucuguucca

SEQ ID NO: 7081 - RNA, 22 nt, Artificial Sequence
  Guide RNA
ugauagggucauguucgcaggu

SEQ ID NO: 7082 - RNA, 22 nt, Artificial Sequence
  Guide RNA
ugcgaacaugacccuaucacaa

SEQ ID NO: 7083 - RNA, 22 nt, Artificial Sequence
  Guide RNA
uggaacagaaauacaccugcga

SEQ ID NO: 7084 - RNA, 22 nt, Artificial Sequence
  Guide RNA
ugugauagggucauguucgcag

SEQ ID NO: 7085 - RNA, 22 nt, Artificial Sequence
  Guide RNA
uguucgcagguguauuucuguu

SEQ ID NO: 7086 - RNA, 22 nt, Artificial Sequence
  Guide RNA
uucgcagguguauuucuguucc

SEQ ID NO: 7087 - RNA, 22 nt, Artificial Sequence
  Guide RNA
uuggaacagaaauacaccugcg

SEQ ID NO: 7088 - RNA, 22 nt, Artificial Sequence
  Guide RNA
uugugauagggucauguucgca

SEQ ID NO: 7089 - RNA, 22 nt, Artificial Sequence
  Guide RNA
uuugugauagggucauguucgc

SEQ ID NO: 7090 - RNA, 22 nt, Artificial Sequence
  Guide RNA
uuuugugauagggucauguucg

SEQ ID NO: 7091 - RNA, 22 nt, Artificial Sequence
  Guide RNA
uuuuugugauagggucauguuc

SEQ ID NO: 7092 - RNA, 22 nt, Artificial Sequence
  Guide RNA
uuuuuugugauagggucauguu

SEQ ID NO: 7093 - RNA, 20 nt, Artificial Sequence
  Guide RNA
aaauacgccuacgaacauga

SEQ ID NO: 7094 - RNA, 20 nt, Artificial Sequence
  Guide RNA
aacagaaauacgccuacgaa

SEQ ID NO: 7095 - RNA, 20 nt, Artificial Sequence
  Guide RNA
aauacgccuacgaacaugac

SEQ ID NO: 7096 - RNA, 20 nt, Artificial Sequence
  Guide RNA
aauuggaacagaaauacgcc

SEQ ID NO: 7097 - RNA, 20 nt, Artificial Sequence
  Guide RNA
acagaaauacgccuacgaac

SEQ ID NO: 7098 - RNA, 20 nt, Artificial Sequence
  Guide RNA
acgccuacgaacaugacccu

SEQ ID NO: 7099 - RNA, 20 nt, Artificial Sequence
  Guide RNA
agaaauacgccuacgaacau

SEQ ID NO: 7100 - RNA, 20 nt, Artificial Sequence
  Guide RNA
aggaauuggaacagaaauac

SEQ ID NO: 7101 - RNA, 20 nt, Artificial Sequence
  Guide RNA
aggcguauuucuguuccaau

SEQ ID NO: 7102 - RNA, 20 nt, Artificial Sequence
  Guide RNA
agggucauguucguaggcgu

SEQ ID NO: 7103 - RNA, 20 nt, Artificial Sequence
  Guide RNA
auacgccuacgaacaugacc

SEQ ID NO: 7104 - RNA, 20 nt, Artificial Sequence
  Guide RNA
auagggucauguucguaggc

SEQ ID NO: 7105 - RNA, 20 nt, Artificial Sequence
  Guide RNA
auguucguaggcguauuucu

SEQ ID NO: 7106 - RNA, 20 nt, Artificial Sequence
  Guide RNA
auuggaacagaaauacgccu

SEQ ID NO: 7107 - RNA, 20 nt, Artificial Sequence
  Guide RNA
cagaaauacgccuacgaaca

SEQ ID NO: 7108 - RNA, 20 nt, Artificial Sequence
  Guide RNA
cauguucguaggcguauuuc

SEQ ID NO: 7109 - RNA, 20 nt, Artificial Sequence
  Guide RNA
cgccuacgaacaugacccua

SEQ ID NO: 7110 - RNA, 20 nt, Artificial Sequence
  Guide RNA
cguaggcguauuucuguucc

SEQ ID NO: 7111 - RNA, 20 nt, Artificial Sequence
  Guide RNA
gaaauacgccuacgaacaug

SEQ ID NO: 7112 - RNA, 20 nt, Artificial Sequence
  Guide RNA
gaacagaaauacgccuacga

SEQ ID NO: 7113 - RNA, 20 nt, Artificial Sequence
  Guide RNA
gaauuggaacagaaauacgc

SEQ ID NO: 7114 - RNA, 20 nt, Artificial Sequence
  Guide RNA
gaggaauuggaacagaaaua

SEQ ID NO: 7115 - RNA, 20 nt, Artificial Sequence
  Guide RNA
gauagggucauguucguagg

SEQ ID NO: 7116 - RNA, 20 nt, Artificial Sequence
  Guide RNA
gcguauuucuguuccaauuc

SEQ ID NO: 7117 - RNA, 20 nt, Artificial Sequence
  Guide RNA
ggaacagaaauacgccuacg

SEQ ID NO: 7118 - RNA, 20 nt, Artificial Sequence
  Guide RNA
ggaauuggaacagaaauacg

SEQ ID NO: 7119 - RNA, 20 nt, Artificial Sequence
  Guide RNA
ggaggaauuggaacagaaau

SEQ ID NO: 7120 - RNA, 20 nt, Artificial Sequence
  Guide RNA
ggcguauuucuguuccaauu

SEQ ID NO: 7121 - RNA, 20 nt, Artificial Sequence
  Guide RNA
gggucauguucguaggcgua

SEQ ID NO: 7122 - RNA, 20 nt, Artificial Sequence
  Guide RNA
ggucauguucguaggcguau

SEQ ID NO: 7123 - RNA, 20 nt, Artificial Sequence
  Guide RNA
guaggcguauuucuguucca

SEQ ID NO: 7124 - RNA, 20 nt, Artificial Sequence
  Guide RNA
gucauguucguaggcguauu

SEQ ID NO: 7125 - RNA, 20 nt, Artificial Sequence
  Guide RNA
gugauagggucauguucgua

SEQ ID NO: 7126 - RNA, 20 nt, Artificial Sequence
  Guide RNA
guucguaggcguauuucugu

SEQ ID NO: 7127 - RNA, 20 nt, Artificial Sequence
  Guide RNA
uacgccuacgaacaugaccc

SEQ ID NO: 7128 - RNA, 20 nt, Artificial Sequence
  Guide RNA
uaggcguauuucuguuccaa

SEQ ID NO: 7129 - RNA, 20 nt, Artificial Sequence
  Guide RNA
uagggucauguucguaggcg

SEQ ID NO: 7130 - RNA, 20 nt, Artificial Sequence
  Guide RNA
ucauguucguaggcguauuu

SEQ ID NO: 7131 - RNA, 20 nt, Artificial Sequence
  Guide RNA
ucguaggcguauuucuguuc

SEQ ID NO: 7132 - RNA, 20 nt, Artificial Sequence
  Guide RNA
ugauagggucauguucguag

SEQ ID NO: 7133 - RNA, 20 nt, Artificial Sequence
  Guide RNA
uggaacagaaauacgccuac

SEQ ID NO: 7134 - RNA, 20 nt, Artificial Sequence
  Guide RNA
uggaggaauuggaacagaaa

SEQ ID NO: 7135 - RNA, 20 nt, Artificial Sequence
  Guide RNA
ugugauagggucauguucgu

SEQ ID NO: 7136 - RNA, 20 nt, Artificial Sequence
  Guide RNA
uguucguaggcguauuucug

SEQ ID NO: 7137 - RNA, 20 nt, Artificial Sequence
  Guide RNA
uucguaggcguauuucuguu

SEQ ID NO: 7138 - RNA, 20 nt, Artificial Sequence
  Guide RNA
uuggaacagaaauacgccua

SEQ ID NO: 7139 - RNA, 21 nt, Artificial Sequence
  Guide RNA
aaauacgccuacgaacaugac

SEQ ID NO: 7140 - RNA, 21 nt, Artificial Sequence
  Guide RNA
aacagaaauacgccuacgaac

SEQ ID NO: 7141 - RNA, 21 nt, Artificial Sequence
  Guide RNA
aauacgccuacgaacaugacc

SEQ ID NO: 7142 - RNA, 21 nt, Artificial Sequence
  Guide RNA
aauuggaacagaaauacgccu

SEQ ID NO: 7143 - RNA, 21 nt, Artificial Sequence
  Guide RNA
acagaaauacgccuacgaaca

SEQ ID NO: 7144 - RNA, 21 nt, Artificial Sequence
  Guide RNA
acgccuacgaacaugacccua

SEQ ID NO: 7145 - RNA, 21 nt, Artificial Sequence
  Guide RNA
agaaauacgccuacgaacaug

SEQ ID NO: 7146 - RNA, 21 nt, Artificial Sequence
  Guide RNA
aggaauuggaacagaaauacg

SEQ ID NO: 7147 - RNA, 21 nt, Artificial Sequence
  Guide RNA
aggcguauuucuguuccaauu

SEQ ID NO: 7148 - RNA, 21 nt, Artificial Sequence
  Guide RNA
agggucauguucguaggcgua

SEQ ID NO: 7149 - RNA, 21 nt, Artificial Sequence
  Guide RNA
auacgccuacgaacaugaccc

SEQ ID NO: 7150 - RNA, 21 nt, Artificial Sequence
  Guide RNA
auagggucauguucguaggcg

SEQ ID NO: 7151 - RNA, 21 nt, Artificial Sequence
  Guide RNA
auguucguaggcguauuucug

SEQ ID NO: 7152 - RNA, 21 nt, Artificial Sequence
  Guide RNA
auuggaacagaaauacgccua

SEQ ID NO: 7153 - RNA, 21 nt, Artificial Sequence
  Guide RNA
cagaaauacgccuacgaacau

SEQ ID NO: 7154 - RNA, 21 nt, Artificial Sequence
  Guide RNA
cauguucguaggcguauuucu

SEQ ID NO: 7155 - RNA, 21 nt, Artificial Sequence
  Guide RNA
cgccuacgaacaugacccuau

SEQ ID NO: 7156 - RNA, 21 nt, Artificial Sequence
  Guide RNA
cguaggcguauuucuguucca

SEQ ID NO: 7157 - RNA, 21 nt, Artificial Sequence
  Guide RNA
gaaauacgccuacgaacauga

SEQ ID NO: 7158 - RNA, 21 nt, Artificial Sequence
  Guide RNA
gaacagaaauacgccuacgaa

SEQ ID NO: 7159 - RNA, 21 nt, Artificial Sequence
  Guide RNA
gaauuggaacagaaauacgcc

SEQ ID NO: 7160 - RNA, 21 nt, Artificial Sequence
  Guide RNA
gaggaauuggaacagaaauac

SEQ ID NO: 7161 - RNA, 21 nt, Artificial Sequence
  Guide RNA
gauagggucauguucguaggc

SEQ ID NO: 7162 - RNA, 21 nt, Artificial Sequence
  Guide RNA
gcguauuucuguuccaauucc

SEQ ID NO: 7163 - RNA, 21 nt, Artificial Sequence
  Guide RNA
ggaacagaaauacgccuacga

SEQ ID NO: 7164 - RNA, 21 nt, Artificial Sequence
  Guide RNA
ggaauuggaacagaaauacgc

SEQ ID NO: 7165 - RNA, 21 nt, Artificial Sequence
  Guide RNA
ggaggaauuggaacagaaaua

SEQ ID NO: 7166 - RNA, 21 nt, Artificial Sequence
  Guide RNA
ggcguauuucuguuccaauuc

SEQ ID NO: 7167 - RNA, 21 nt, Artificial Sequence
  Guide RNA
gggucauguucguaggcguau

SEQ ID NO: 7168 - RNA, 21 nt, Artificial Sequence
  Guide RNA
ggucauguucguaggcguauu

SEQ ID NO: 7169 - RNA, 21 nt, Artificial Sequence
  Guide RNA
guaggcguauuucuguuccaa

SEQ ID NO: 7170 - RNA, 21 nt, Artificial Sequence
  Guide RNA
gucauguucguaggcguauuu

SEQ ID NO: 7171 - RNA, 21 nt, Artificial Sequence
  Guide RNA
gugauagggucauguucguag

SEQ ID NO: 7172 - RNA, 21 nt, Artificial Sequence
  Guide RNA
guucguaggcguauuucuguu

SEQ ID NO: 7173 - RNA, 21 nt, Artificial Sequence
  Guide RNA
uacgccuacgaacaugacccu

SEQ ID NO: 7174 - RNA, 21 nt, Artificial Sequence
  Guide RNA
uaggcguauuucuguuccaau

SEQ ID NO: 7175 - RNA, 21 nt, Artificial Sequence
  Guide RNA
uagggucauguucguaggcgu

SEQ ID NO: 7176 - RNA, 21 nt, Artificial Sequence
  Guide RNA
ucauguucguaggcguauuuc

SEQ ID NO: 7177 - RNA, 21 nt, Artificial Sequence
  Guide RNA
ucguaggcguauuucuguucc

SEQ ID NO: 7178 - RNA, 21 nt, Artificial Sequence
  Guide RNA
ugauagggucauguucguagg

SEQ ID NO: 7179 - RNA, 21 nt, Artificial Sequence
  Guide RNA
uggaacagaaauacgccuacg

SEQ ID NO: 7180 - RNA, 21 nt, Artificial Sequence
  Guide RNA
uggaggaauuggaacagaaau

SEQ ID NO: 7181 - RNA, 21 nt, Artificial Sequence
  Guide RNA
ugugauagggucauguucgua

SEQ ID NO: 7182 - RNA, 21 nt, Artificial Sequence
  Guide RNA
uguucguaggcguauuucugu

SEQ ID NO: 7183 - RNA, 21 nt, Artificial Sequence
  Guide RNA
uucguaggcguauuucuguuc

SEQ ID NO: 7184 - RNA, 21 nt, Artificial Sequence
  Guide RNA
uuggaacagaaauacgccuac

SEQ ID NO: 7185 - RNA, 21 nt, Artificial Sequence
  Guide RNA
uuggaggaauuggaacagaaa

SEQ ID NO: 7186 - RNA, 21 nt, Artificial Sequence
  Guide RNA
uugugauagggucauguucgu

SEQ ID NO: 7187 - RNA, 22 nt, Artificial Sequence
  Guide RNA
aaauacgccuacgaacaugacc

SEQ ID NO: 7188 - RNA, 22 nt, Artificial Sequence
  Guide RNA
aacagaaauacgccuacgaaca

SEQ ID NO: 7189 - RNA, 22 nt, Artificial Sequence
  Guide RNA
aauacgccuacgaacaugaccc

SEQ ID NO: 7190 - RNA, 22 nt, Artificial Sequence
  Guide RNA
aauuggaacagaaauacgccua

SEQ ID NO: 7191 - RNA, 22 nt, Artificial Sequence
  Guide RNA
acagaaauacgccuacgaacau

SEQ ID NO: 7192 - RNA, 22 nt, Artificial Sequence
  Guide RNA
acgccuacgaacaugacccuau

SEQ ID NO: 7193 - RNA, 22 nt, Artificial Sequence
  Guide RNA
agaaauacgccuacgaacauga

SEQ ID NO: 7194 - RNA, 22 nt, Artificial Sequence
  Guide RNA
aggaauuggaacagaaauacgc

SEQ ID NO: 7195 - RNA, 22 nt, Artificial Sequence
  Guide RNA
aggcguauuucuguuccaauuc

SEQ ID NO: 7196 - RNA, 22 nt, Artificial Sequence
  Guide RNA
agggucauguucguaggcguau

SEQ ID NO: 7197 - RNA, 22 nt, Artificial Sequence
  Guide RNA
auacgccuacgaacaugacccu

SEQ ID NO: 7198 - RNA, 22 nt, Artificial Sequence
  Guide RNA
auagggucauguucguaggcgu

SEQ ID NO: 7199 - RNA, 22 nt, Artificial Sequence
  Guide RNA
auguucguaggcguauuucugu

SEQ ID NO: 7200 - RNA, 22 nt, Artificial Sequence
  Guide RNA
auuggaacagaaauacgccuac

SEQ ID NO: 7201 - RNA, 22 nt, Artificial Sequence
  Guide RNA
cagaaauacgccuacgaacaug

SEQ ID NO: 7202 - RNA, 22 nt, Artificial Sequence
  Guide RNA
cauguucguaggcguauuucug

SEQ ID NO: 7203 - RNA, 22 nt, Artificial Sequence
  Guide RNA
cgccuacgaacaugacccuauc

SEQ ID NO: 7204 - RNA, 22 nt, Artificial Sequence
  Guide RNA
cguaggcguauuucuguuccaa

SEQ ID NO: 7205 - RNA, 22 nt, Artificial Sequence
  Guide RNA
gaaauacgccuacgaacaugac

SEQ ID NO: 7206 - RNA, 22 nt, Artificial Sequence
  Guide RNA
gaacagaaauacgccuacgaac

SEQ ID NO: 7207 - RNA, 22 nt, Artificial Sequence
  Guide RNA
gaauuggaacagaaauacgccu

SEQ ID NO: 7208 - RNA, 22 nt, Artificial Sequence
  Guide RNA
gaggaauuggaacagaaauacg

SEQ ID NO: 7209 - RNA, 22 nt, Artificial Sequence
  Guide RNA
gauagggucauguucguaggcg

SEQ ID NO: 7210 - RNA, 22 nt, Artificial Sequence
  Guide RNA
gcguauuucuguuccaauuccu

SEQ ID NO: 7211 - RNA, 22 nt, Artificial Sequence
  Guide RNA
ggaacagaaauacgccuacgaa

SEQ ID NO: 7212 - RNA, 22 nt, Artificial Sequence
  Guide RNA
ggaauuggaacagaaauacgcc

SEQ ID NO: 7213 - RNA, 22 nt, Artificial Sequence
  Guide RNA
ggaggaauuggaacagaaauac

SEQ ID NO: 7214 - RNA, 22 nt, Artificial Sequence
  Guide RNA
ggcguauuucuguuccaauucc

SEQ ID NO: 7215 - RNA, 22 nt, Artificial Sequence
  Guide RNA
gggucauguucguaggcguauu

SEQ ID NO: 7216 - RNA, 22 nt, Artificial Sequence
  Guide RNA
ggucauguucguaggcguauuu

SEQ ID NO: 7217 - RNA, 22 nt, Artificial Sequence
  Guide RNA
guaggcguauuucuguuccaau

SEQ ID NO: 7218 - RNA, 22 nt, Artificial Sequence
  Guide RNA
gucauguucguaggcguauuuc

SEQ ID NO: 7219 - RNA, 22 nt, Artificial Sequence
  Guide RNA
gugauagggucauguucguagg

SEQ ID NO: 7220 - RNA, 22 nt, Artificial Sequence
  Guide RNA
guucguaggcguauuucuguuc

SEQ ID NO: 7221 - RNA, 22 nt, Artificial Sequence
  Guide RNA
guuggaggaauuggaacagaaa

SEQ ID NO: 7222 - RNA, 22 nt, Artificial Sequence
  Guide RNA
uacgccuacgaacaugacccua

SEQ ID NO: 7223 - RNA, 22 nt, Artificial Sequence
  Guide RNA
uaggcguauuucuguuccaauu

SEQ ID NO: 7224 - RNA, 22 nt, Artificial Sequence
  Guide RNA
uagggucauguucguaggcgua

SEQ ID NO: 7225 - RNA, 22 nt, Artificial Sequence
  Guide RNA
ucauguucguaggcguauuucu

SEQ ID NO: 7226 - RNA, 22 nt, Artificial Sequence
  Guide RNA
ucguaggcguauuucuguucca

SEQ ID NO: 7227 - RNA, 22 nt, Artificial Sequence
  Guide RNA
ugauagggucauguucguaggc

SEQ ID NO: 7228 - RNA, 22 nt, Artificial Sequence
  Guide RNA
uggaacagaaauacgccuacga

SEQ ID NO: 7229 - RNA, 22 nt, Artificial Sequence
  Guide RNA
uggaggaauuggaacagaaaua

SEQ ID NO: 7230 - RNA, 22 nt, Artificial Sequence
  Guide RNA
ugugauagggucauguucguag

SEQ ID NO: 7231 - RNA, 22 nt, Artificial Sequence
  Guide RNA
uguucguaggcguauuucuguu

SEQ ID NO: 7232 - RNA, 22 nt, Artificial Sequence
  Guide RNA
uucguaggcguauuucuguucc

SEQ ID NO: 7233 - RNA, 22 nt, Artificial Sequence
  Guide RNA
uuggaacagaaauacgccuacg

SEQ ID NO: 7234 - RNA, 22 nt, Artificial Sequence
  Guide RNA
uuggaggaauuggaacagaaau

SEQ ID NO: 7235 - RNA, 22 nt, Artificial Sequence
  Guide RNA
uugugauagggucauguucgua

SEQ ID NO: 7236 - RNA, 22 nt, Artificial Sequence
  Guide RNA
uuugugauagggucauguucgu

SEQ ID NO: 7237 - RNA, 20 nt, Artificial Sequence
  Guide RNA
aaaguuggaggaauuggaac

SEQ ID NO: 7238 - RNA, 20 nt, Artificial Sequence
  Guide RNA
aacagauauacaccuacgaa

SEQ ID NO: 7239 - RNA, 20 nt, Artificial Sequence
  Guide RNA
aaguuggaggaauuggaaca

SEQ ID NO: 7240 - RNA, 20 nt, Artificial Sequence
  Guide RNA
aauuggaacagauauacacc

SEQ ID NO: 7241 - RNA, 20 nt, Artificial Sequence
  Guide RNA
acagauauacaccuacgaac

SEQ ID NO: 7242 - RNA, 20 nt, Artificial Sequence
  Guide RNA
agauauacaccuacgaacau

SEQ ID NO: 7243 - RNA, 20 nt, Artificial Sequence
  Guide RNA
aggaauuggaacagauauac

SEQ ID NO: 7244 - RNA, 20 nt, Artificial Sequence
  Guide RNA
agggucauguucguaggugu

SEQ ID NO: 7245 - RNA, 20 nt, Artificial Sequence
  Guide RNA
agguguauaucuguuccaau

SEQ ID NO: 7246 - RNA, 20 nt, Artificial Sequence
  Guide RNA
aguuggaggaauuggaacag

SEQ ID NO: 7247 - RNA, 20 nt, Artificial Sequence
  Guide RNA
auauacaccuacgaacauga

SEQ ID NO: 7248 - RNA, 20 nt, Artificial Sequence
  Guide RNA
auaucuguuccaauuccucc

SEQ ID NO: 7249 - RNA, 20 nt, Artificial Sequence
  Guide RNA
auguucguagguguauaucu

SEQ ID NO: 7250 - RNA, 20 nt, Artificial Sequence
  Guide RNA
auuggaacagauauacaccu

SEQ ID NO: 7251 - RNA, 20 nt, Artificial Sequence
  Guide RNA
cagauauacaccuacgaaca

SEQ ID NO: 7252 - RNA, 20 nt, Artificial Sequence
  Guide RNA
cauguucguagguguauauc

SEQ ID NO: 7253 - RNA, 20 nt, Artificial Sequence
  Guide RNA
cguagguguauaucuguucc

SEQ ID NO: 7254 - RNA, 20 nt, Artificial Sequence
  Guide RNA
gaacagauauacaccuacga

SEQ ID NO: 7255 - RNA, 20 nt, Artificial Sequence
  Guide RNA
gaauuggaacagauauacac

SEQ ID NO: 7256 - RNA, 20 nt, Artificial Sequence
  Guide RNA
gaggaauuggaacagauaua

SEQ ID NO: 7257 - RNA, 20 nt, Artificial Sequence
  Guide RNA
gauauacaccuacgaacaug

SEQ ID NO: 7258 - RNA, 20 nt, Artificial Sequence
  Guide RNA
ggaacagauauacaccuacg

SEQ ID NO: 7259 - RNA, 20 nt, Artificial Sequence
  Guide RNA
ggaauuggaacagauauaca

SEQ ID NO: 7260 - RNA, 20 nt, Artificial Sequence
  Guide RNA
ggaggaauuggaacagauau

SEQ ID NO: 7261 - RNA, 20 nt, Artificial Sequence
  Guide RNA
gggucauguucguaggugua

SEQ ID NO: 7262 - RNA, 20 nt, Artificial Sequence
  Guide RNA
ggucauguucguagguguau

SEQ ID NO: 7263 - RNA, 20 nt, Artificial Sequence
  Guide RNA
gguguauaucuguuccaauu

SEQ ID NO: 7264 - RNA, 20 nt, Artificial Sequence
  Guide RNA
guagguguauaucuguucca

SEQ ID NO: 7265 - RNA, 20 nt, Artificial Sequence
  Guide RNA
guauaucuguuccaauuccu

SEQ ID NO: 7266 - RNA, 20 nt, Artificial Sequence
  Guide RNA
gucauguucguagguguaua

SEQ ID NO: 7267 - RNA, 20 nt, Artificial Sequence
  Guide RNA
guguauaucuguuccaauuc

SEQ ID NO: 7268 - RNA, 20 nt, Artificial Sequence
  Guide RNA
guucguagguguauaucugu

SEQ ID NO: 7269 - RNA, 20 nt, Artificial Sequence
  Guide RNA
guuggaggaauuggaacaga

SEQ ID NO: 7270 - RNA, 20 nt, Artificial Sequence
  Guide RNA
uagggucauguucguaggug

SEQ ID NO: 7271 - RNA, 20 nt, Artificial Sequence
  Guide RNA
uagguguauaucuguuccaa

SEQ ID NO: 7272 - RNA, 20 nt, Artificial Sequence
  Guide RNA
uauaucuguuccaauuccuc

SEQ ID NO: 7273 - RNA, 20 nt, Artificial Sequence
  Guide RNA
uaucuguuccaauuccucca

SEQ ID NO: 7274 - RNA, 20 nt, Artificial Sequence
  Guide RNA
ucauguucguagguguauau

SEQ ID NO: 7275 - RNA, 20 nt, Artificial Sequence
  Guide RNA
ucguagguguauaucuguuc

SEQ ID NO: 7276 - RNA, 20 nt, Artificial Sequence
  Guide RNA
uggaacagauauacaccuac

SEQ ID NO: 7277 - RNA, 20 nt, Artificial Sequence
  Guide RNA
uggaggaauuggaacagaua

SEQ ID NO: 7278 - RNA, 20 nt, Artificial Sequence
  Guide RNA
uguauaucuguuccaauucc

SEQ ID NO: 7279 - RNA, 20 nt, Artificial Sequence
  Guide RNA
uguucguagguguauaucug

SEQ ID NO: 7280 - RNA, 20 nt, Artificial Sequence
  Guide RNA
uucguagguguauaucuguu

SEQ ID NO: 7281 - RNA, 20 nt, Artificial Sequence
  Guide RNA
uuggaacagauauacaccua

SEQ ID NO: 7282 - RNA, 20 nt, Artificial Sequence
  Guide RNA
uuggaggaauuggaacagau

SEQ ID NO: 7283 - RNA, 21 nt, Artificial Sequence
  Guide RNA
aaaaguuggaggaauuggaac

SEQ ID NO: 7284 - RNA, 21 nt, Artificial Sequence
  Guide RNA
aaaguuggaggaauuggaaca

SEQ ID NO: 7285 - RNA, 21 nt, Artificial Sequence
  Guide RNA
aacagauauacaccuacgaac

SEQ ID NO: 7286 - RNA, 21 nt, Artificial Sequence
  Guide RNA
aaguuggaggaauuggaacag

SEQ ID NO: 7287 - RNA, 21 nt, Artificial Sequence
  Guide RNA
aauuggaacagauauacaccu

SEQ ID NO: 7288 - RNA, 21 nt, Artificial Sequence
  Guide RNA
acagauauacaccuacgaaca

SEQ ID NO: 7289 - RNA, 21 nt, Artificial Sequence
  Guide RNA
agauauacaccuacgaacaug

SEQ ID NO: 7290 - RNA, 21 nt, Artificial Sequence
  Guide RNA
aggaauuggaacagauauaca

SEQ ID NO: 7291 - RNA, 21 nt, Artificial Sequence
  Guide RNA
agggucauguucguaggugua

SEQ ID NO: 7292 - RNA, 21 nt, Artificial Sequence
  Guide RNA
agguguauaucuguuccaauu

SEQ ID NO: 7293 - RNA, 21 nt, Artificial Sequence
  Guide RNA
aguuggaggaauuggaacaga

SEQ ID NO: 7294 - RNA, 21 nt, Artificial Sequence
  Guide RNA
auagggucauguucguaggug

SEQ ID NO: 7295 - RNA, 21 nt, Artificial Sequence
  Guide RNA
auauacaccuacgaacaugac

SEQ ID NO: 7296 - RNA, 21 nt, Artificial Sequence
  Guide RNA
auaucuguuccaauuccucca

SEQ ID NO: 7297 - RNA, 21 nt, Artificial Sequence
  Guide RNA
auguucguagguguauaucug

SEQ ID NO: 7298 - RNA, 21 nt, Artificial Sequence
  Guide RNA
auuggaacagauauacaccua

SEQ ID NO: 7299 - RNA, 21 nt, Artificial Sequence
  Guide RNA
cagauauacaccuacgaacau

SEQ ID NO: 7300 - RNA, 21 nt, Artificial Sequence
  Guide RNA
cauguucguagguguauaucu

SEQ ID NO: 7301 - RNA, 21 nt, Artificial Sequence
  Guide RNA
cguagguguauaucuguucca

SEQ ID NO: 7302 - RNA, 21 nt, Artificial Sequence
  Guide RNA
gaacagauauacaccuacgaa

SEQ ID NO: 7303 - RNA, 21 nt, Artificial Sequence
  Guide RNA
gaauuggaacagauauacacc

SEQ ID NO: 7304 - RNA, 21 nt, Artificial Sequence
  Guide RNA
gaggaauuggaacagauauac

SEQ ID NO: 7305 - RNA, 21 nt, Artificial Sequence
  Guide RNA
gauauacaccuacgaacauga

SEQ ID NO: 7306 - RNA, 21 nt, Artificial Sequence
  Guide RNA
ggaacagauauacaccuacga

SEQ ID NO: 7307 - RNA, 21 nt, Artificial Sequence
  Guide RNA
ggaauuggaacagauauacac

SEQ ID NO: 7308 - RNA, 21 nt, Artificial Sequence
  Guide RNA
ggaggaauuggaacagauaua

SEQ ID NO: 7309 - RNA, 21 nt, Artificial Sequence
  Guide RNA
gggucauguucguagguguau

SEQ ID NO: 7310 - RNA, 21 nt, Artificial Sequence
  Guide RNA
ggucauguucguagguguaua

SEQ ID NO: 7311 - RNA, 21 nt, Artificial Sequence
  Guide RNA
gguguauaucuguuccaauuc

SEQ ID NO: 7312 - RNA, 21 nt, Artificial Sequence
  Guide RNA
guagguguauaucuguuccaa

SEQ ID NO: 7313 - RNA, 21 nt, Artificial Sequence
  Guide RNA
guauaucuguuccaauuccuc

SEQ ID NO: 7314 - RNA, 21 nt, Artificial Sequence
  Guide RNA
gucauguucguagguguauau

SEQ ID NO: 7315 - RNA, 21 nt, Artificial Sequence
  Guide RNA
guguauaucuguuccaauucc

SEQ ID NO: 7316 - RNA, 21 nt, Artificial Sequence
  Guide RNA
guucguagguguauaucuguu

SEQ ID NO: 7317 - RNA, 21 nt, Artificial Sequence
  Guide RNA
guuggaggaauuggaacagau

SEQ ID NO: 7318 - RNA, 21 nt, Artificial Sequence
  Guide RNA
uagggucauguucguaggugu

SEQ ID NO: 7319 - RNA, 21 nt, Artificial Sequence
  Guide RNA
uagguguauaucuguuccaau

SEQ ID NO: 7320 - RNA, 21 nt, Artificial Sequence
  Guide RNA
uauaucuguuccaauuccucc

SEQ ID NO: 7321 - RNA, 21 nt, Artificial Sequence
  Guide RNA
uaucuguuccaauuccuccaa

SEQ ID NO: 7322 - RNA, 21 nt, Artificial Sequence
  Guide RNA
ucauguucguagguguauauc

SEQ ID NO: 7323 - RNA, 21 nt, Artificial Sequence
  Guide RNA
ucguagguguauaucuguucc

SEQ ID NO: 7324 - RNA, 21 nt, Artificial Sequence
  Guide RNA
uggaacagauauacaccuacg

SEQ ID NO: 7325 - RNA, 21 nt, Artificial Sequence
  Guide RNA
uggaggaauuggaacagauau

SEQ ID NO: 7326 - RNA, 21 nt, Artificial Sequence
  Guide RNA
uguauaucuguuccaauuccu

SEQ ID NO: 7327 - RNA, 21 nt, Artificial Sequence
  Guide RNA
uguucguagguguauaucugu

SEQ ID NO: 7328 - RNA, 21 nt, Artificial Sequence
  Guide RNA
uucguagguguauaucuguuc

SEQ ID NO: 7329 - RNA, 21 nt, Artificial Sequence
  Guide RNA
uuggaacagauauacaccuac

SEQ ID NO: 7330 - RNA, 21 nt, Artificial Sequence
  Guide RNA
uuggaggaauuggaacagaua

SEQ ID NO: 7331 - RNA, 22 nt, Artificial Sequence
  Guide RNA
aaaaaguuggaggaauuggaac

SEQ ID NO: 7332 - RNA, 22 nt, Artificial Sequence
  Guide RNA
aaaaguuggaggaauuggaaca

SEQ ID NO: 7333 - RNA, 22 nt, Artificial Sequence
  Guide RNA
aaaguuggaggaauuggaacag

SEQ ID NO: 7334 - RNA, 22 nt, Artificial Sequence
  Guide RNA
aacagauauacaccuacgaaca

SEQ ID NO: 7335 - RNA, 22 nt, Artificial Sequence
  Guide RNA
aaguuggaggaauuggaacaga

SEQ ID NO: 7336 - RNA, 22 nt, Artificial Sequence
  Guide RNA
aauuggaacagauauacaccua

SEQ ID NO: 7337 - RNA, 22 nt, Artificial Sequence
  Guide RNA
acagauauacaccuacgaacau

SEQ ID NO: 7338 - RNA, 22 nt, Artificial Sequence
  Guide RNA
agauauacaccuacgaacauga

SEQ ID NO: 7339 - RNA, 22 nt, Artificial Sequence
  Guide RNA
aggaauuggaacagauauacac

SEQ ID NO: 7340 - RNA, 22 nt, Artificial Sequence
  Guide RNA
agggucauguucguagguguau

SEQ ID NO: 7341 - RNA, 22 nt, Artificial Sequence
  Guide RNA
agguguauaucuguuccaauuc

SEQ ID NO: 7342 - RNA, 22 nt, Artificial Sequence
  Guide RNA
aguuggaggaauuggaacagau

SEQ ID NO: 7343 - RNA, 22 nt, Artificial Sequence
  Guide RNA
auagggucauguucguaggugu

SEQ ID NO: 7344 - RNA, 22 nt, Artificial Sequence
  Guide RNA
auauacaccuacgaacaugacc

SEQ ID NO: 7345 - RNA, 22 nt, Artificial Sequence
  Guide RNA
auaucuguuccaauuccuccaa

SEQ ID NO: 7346 - RNA, 22 nt, Artificial Sequence
  Guide RNA
auguucguagguguauaucugu

SEQ ID NO: 7347 - RNA, 22 nt, Artificial Sequence
  Guide RNA
auuggaacagauauacaccuac

SEQ ID NO: 7348 - RNA, 22 nt, Artificial Sequence
  Guide RNA
cagauauacaccuacgaacaug

SEQ ID NO: 7349 - RNA, 22 nt, Artificial Sequence
  Guide RNA
cauguucguagguguauaucug

SEQ ID NO: 7350 - RNA, 22 nt, Artificial Sequence
  Guide RNA
cguagguguauaucuguuccaa

SEQ ID NO: 7351 - RNA, 22 nt, Artificial Sequence
  Guide RNA
gaacagauauacaccuacgaac

SEQ ID NO: 7352 - RNA, 22 nt, Artificial Sequence
  Guide RNA
gaauuggaacagauauacaccu

SEQ ID NO: 7353 - RNA, 22 nt, Artificial Sequence
  Guide RNA
gaggaauuggaacagauauaca

SEQ ID NO: 7354 - RNA, 22 nt, Artificial Sequence
  Guide RNA
gauagggucauguucguaggug

SEQ ID NO: 7355 - RNA, 22 nt, Artificial Sequence
  Guide RNA
gauauacaccuacgaacaugac

SEQ ID NO: 7356 - RNA, 22 nt, Artificial Sequence
  Guide RNA
ggaacagauauacaccuacgaa

SEQ ID NO: 7357 - RNA, 22 nt, Artificial Sequence
  Guide RNA
ggaauuggaacagauauacacc

SEQ ID NO: 7358 - RNA, 22 nt, Artificial Sequence
  Guide RNA
ggaggaauuggaacagauauac

SEQ ID NO: 7359 - RNA, 22 nt, Artificial Sequence
  Guide RNA
gggucauguucguagguguaua

SEQ ID NO: 7360 - RNA, 22 nt, Artificial Sequence
  Guide RNA
ggucauguucguagguguauau

SEQ ID NO: 7361 - RNA, 22 nt, Artificial Sequence
  Guide RNA
gguguauaucuguuccaauucc

SEQ ID NO: 7362 - RNA, 22 nt, Artificial Sequence
  Guide RNA
guagguguauaucuguuccaau

SEQ ID NO: 7363 - RNA, 22 nt, Artificial Sequence
  Guide RNA
guauaucuguuccaauuccucc

SEQ ID NO: 7364 - RNA, 22 nt, Artificial Sequence
  Guide RNA
gucauguucguagguguauauc

SEQ ID NO: 7365 - RNA, 22 nt, Artificial Sequence
  Guide RNA
guguauaucuguuccaauuccu

SEQ ID NO: 7366 - RNA, 22 nt, Artificial Sequence
  Guide RNA
guucguagguguauaucuguuc

SEQ ID NO: 7367 - RNA, 22 nt, Artificial Sequence
  Guide RNA
guuggaggaauuggaacagaua

SEQ ID NO: 7368 - RNA, 22 nt, Artificial Sequence
  Guide RNA
uagggucauguucguaggugua

SEQ ID NO: 7369 - RNA, 22 nt, Artificial Sequence
  Guide RNA
uagguguauaucuguuccaauu

SEQ ID NO: 7370 - RNA, 22 nt, Artificial Sequence
  Guide RNA
uauaucuguuccaauuccucca

SEQ ID NO: 7371 - RNA, 22 nt, Artificial Sequence
  Guide RNA
uaucuguuccaauuccuccaac

SEQ ID NO: 7372 - RNA, 22 nt, Artificial Sequence
  Guide RNA
ucauguucguagguguauaucu

SEQ ID NO: 7373 - RNA, 22 nt, Artificial Sequence
  Guide RNA
ucguagguguauaucuguucca

SEQ ID NO: 7374 - RNA, 22 nt, Artificial Sequence
  Guide RNA
uggaacagauauacaccuacga

SEQ ID NO: 7375 - RNA, 22 nt, Artificial Sequence
  Guide RNA
uggaggaauuggaacagauaua

SEQ ID NO: 7376 - RNA, 22 nt, Artificial Sequence
  Guide RNA
uguauaucuguuccaauuccuc

SEQ ID NO: 7377 - RNA, 22 nt, Artificial Sequence
  Guide RNA
uguucguagguguauaucuguu

SEQ ID NO: 7378 - RNA, 22 nt, Artificial Sequence
  Guide RNA
uucguagguguauaucuguucc

SEQ ID NO: 7379 - RNA, 22 nt, Artificial Sequence
  Guide RNA
uuggaacagauauacaccuacg

SEQ ID NO: 7380 - RNA, 22 nt, Artificial Sequence
  Guide RNA
uuggaggaauuggaacagauau

SEQ ID NO: 7381 - RNA, 20 nt, Artificial Sequence
  Guide RNA
aaaaaguuggaggaauugga

SEQ ID NO: 7382 - RNA, 20 nt, Artificial Sequence
  Guide RNA
aaaaguuggaggaauuggaa

SEQ ID NO: 7383 - RNA, 20 nt, Artificial Sequence
  Guide RNA
aacggaaauacaccuacgaa

SEQ ID NO: 7384 - RNA, 20 nt, Artificial Sequence
  Guide RNA
aaguuggaggaauuggaacg

SEQ ID NO: 7385 - RNA, 20 nt, Artificial Sequence
  Guide RNA
aauuggaacggaaauacacc

SEQ ID NO: 7386 - RNA, 20 nt, Artificial Sequence
  Guide RNA
acggaaauacaccuacgaac

SEQ ID NO: 7387 - RNA, 20 nt, Artificial Sequence
  Guide RNA
aggaauuggaacggaaauac

SEQ ID NO: 7388 - RNA, 20 nt, Artificial Sequence
  Guide RNA
agguguauuuccguuccaau

SEQ ID NO: 7389 - RNA, 20 nt, Artificial Sequence
  Guide RNA
aguuggaggaauuggaacgg

SEQ ID NO: 7390 - RNA, 20 nt, Artificial Sequence
  Guide RNA
auguucguagguguauuucc

SEQ ID NO: 7391 - RNA, 20 nt, Artificial Sequence
  Guide RNA
auuggaacggaaauacaccu

SEQ ID NO: 7392 - RNA, 20 nt, Artificial Sequence
  Guide RNA
auuuccguuccaauuccucc

SEQ ID NO: 7393 - RNA, 20 nt, Artificial Sequence
  Guide RNA
cauguucguagguguauuuc

SEQ ID NO: 7394 - RNA, 20 nt, Artificial Sequence
  Guide RNA
ccguuccaauuccuccaacu

SEQ ID NO: 7395 - RNA, 20 nt, Artificial Sequence
  Guide RNA
cggaaauacaccuacgaaca

SEQ ID NO: 7396 - RNA, 20 nt, Artificial Sequence
  Guide RNA
cguagguguauuuccguucc

SEQ ID NO: 7397 - RNA, 20 nt, Artificial Sequence
  Guide RNA
gaacggaaauacaccuacga

SEQ ID NO: 7398 - RNA, 20 nt, Artificial Sequence
  Guide RNA
gaauuggaacggaaauacac

SEQ ID NO: 7399 - RNA, 20 nt, Artificial Sequence
  Guide RNA
gaggaauuggaacggaaaua

SEQ ID NO: 7400 - RNA, 20 nt, Artificial Sequence
  Guide RNA
ggaacggaaauacaccuacg

SEQ ID NO: 7401 - RNA, 20 nt, Artificial Sequence
  Guide RNA
ggaauuggaacggaaauaca

SEQ ID NO: 7402 - RNA, 20 nt, Artificial Sequence
  Guide RNA
ggaggaauuggaacggaaau

SEQ ID NO: 7403 - RNA, 20 nt, Artificial Sequence
  Guide RNA
gguguauuuccguuccaauu

SEQ ID NO: 7404 - RNA, 20 nt, Artificial Sequence
  Guide RNA
guagguguauuuccguucca

SEQ ID NO: 7405 - RNA, 20 nt, Artificial Sequence
  Guide RNA
guauuuccguuccaauuccu

SEQ ID NO: 7406 - RNA, 20 nt, Artificial Sequence
  Guide RNA
gucauguucguagguguauu

SEQ ID NO: 7407 - RNA, 20 nt, Artificial Sequence
  Guide RNA
guguauuuccguuccaauuc

SEQ ID NO: 7408 - RNA, 20 nt, Artificial Sequence
  Guide RNA
guucguagguguauuuccgu

SEQ ID NO: 7409 - RNA, 20 nt, Artificial Sequence
  Guide RNA
guuggaggaauuggaacgga

SEQ ID NO: 7410 - RNA, 20 nt, Artificial Sequence
  Guide RNA
uaaaaaguuggaggaauugg

SEQ ID NO: 7411 - RNA, 20 nt, Artificial Sequence
  Guide RNA
uagguguauuuccguuccaa

SEQ ID NO: 7412 - RNA, 20 nt, Artificial Sequence
  Guide RNA
uauuuccguuccaauuccuc

SEQ ID NO: 7413 - RNA, 20 nt, Artificial Sequence
  Guide RNA
ucauguucguagguguauuu

SEQ ID NO: 7414 - RNA, 20 nt, Artificial Sequence
  Guide RNA
uccguuccaauuccuccaac

SEQ ID NO: 7415 - RNA, 20 nt, Artificial Sequence
  Guide RNA
ucguagguguauuuccguuc

SEQ ID NO: 7416 - RNA, 20 nt, Artificial Sequence
  Guide RNA
uggaacggaaauacaccuac

SEQ ID NO: 7417 - RNA, 20 nt, Artificial Sequence
  Guide RNA
uggaggaauuggaacggaaa

SEQ ID NO: 7418 - RNA, 20 nt, Artificial Sequence
  Guide RNA
uguauuuccguuccaauucc

SEQ ID NO: 7419 - RNA, 20 nt, Artificial Sequence
  Guide RNA
uguucguagguguauuuccg

SEQ ID NO: 7420 - RNA, 20 nt, Artificial Sequence
  Guide RNA
uuccguuccaauuccuccaa

SEQ ID NO: 7421 - RNA, 20 nt, Artificial Sequence
  Guide RNA
uucguagguguauuuccguu

SEQ ID NO: 7422 - RNA, 20 nt, Artificial Sequence
  Guide RNA
uuggaacggaaauacaccua

SEQ ID NO: 7423 - RNA, 20 nt, Artificial Sequence
  Guide RNA
uuggaggaauuggaacggaa

SEQ ID NO: 7424 - RNA, 20 nt, Artificial Sequence
  Guide RNA
uuuccguuccaauuccucca

SEQ ID NO: 7425 - RNA, 21 nt, Artificial Sequence
  Guide RNA
aaaaaguuggaggaauuggaa

SEQ ID NO: 7426 - RNA, 21 nt, Artificial Sequence
  Guide RNA
aaaguuggaggaauuggaacg

SEQ ID NO: 7427 - RNA, 21 nt, Artificial Sequence
  Guide RNA
aacggaaauacaccuacgaac

SEQ ID NO: 7428 - RNA, 21 nt, Artificial Sequence
  Guide RNA
aaguuggaggaauuggaacgg

SEQ ID NO: 7429 - RNA, 21 nt, Artificial Sequence
  Guide RNA
aauuggaacggaaauacaccu

SEQ ID NO: 7430 - RNA, 21 nt, Artificial Sequence
  Guide RNA
acggaaauacaccuacgaaca

SEQ ID NO: 7431 - RNA, 21 nt, Artificial Sequence
  Guide RNA
aggaauuggaacggaaauaca

SEQ ID NO: 7432 - RNA, 21 nt, Artificial Sequence
  Guide RNA
agguguauuuccguuccaauu

SEQ ID NO: 7433 - RNA, 21 nt, Artificial Sequence
  Guide RNA
aguuggaggaauuggaacgga

SEQ ID NO: 7434 - RNA, 21 nt, Artificial Sequence
  Guide RNA
auguucguagguguauuuccg

SEQ ID NO: 7435 - RNA, 21 nt, Artificial Sequence
  Guide RNA
auuggaacggaaauacaccua

SEQ ID NO: 7436 - RNA, 21 nt, Artificial Sequence
  Guide RNA
auuuccguuccaauuccucca

SEQ ID NO: 7437 - RNA, 21 nt, Artificial Sequence
  Guide RNA
cauguucguagguguauuucc

SEQ ID NO: 7438 - RNA, 21 nt, Artificial Sequence
  Guide RNA
ccguuccaauuccuccaacuu

SEQ ID NO: 7439 - RNA, 21 nt, Artificial Sequence
  Guide RNA
cggaaauacaccuacgaacau

SEQ ID NO: 7440 - RNA, 21 nt, Artificial Sequence
  Guide RNA
cguagguguauuuccguucca

SEQ ID NO: 7441 - RNA, 21 nt, Artificial Sequence
  Guide RNA
gaacggaaauacaccuacgaa

SEQ ID NO: 7442 - RNA, 21 nt, Artificial Sequence
  Guide RNA
gaauuggaacggaaauacacc

SEQ ID NO: 7443 - RNA, 21 nt, Artificial Sequence
  Guide RNA
gaggaauuggaacggaaauac

SEQ ID NO: 7444 - RNA, 21 nt, Artificial Sequence
  Guide RNA
ggaacggaaauacaccuacga

SEQ ID NO: 7445 - RNA, 21 nt, Artificial Sequence
  Guide RNA
ggaauuggaacggaaauacac

SEQ ID NO: 7446 - RNA, 21 nt, Artificial Sequence
  Guide RNA
ggaggaauuggaacggaaaua

SEQ ID NO: 7447 - RNA, 21 nt, Artificial Sequence
  Guide RNA
ggucauguucguagguguauu

SEQ ID NO: 7448 - RNA, 21 nt, Artificial Sequence
  Guide RNA
gguguauuuccguuccaauuc

SEQ ID NO: 7449 - RNA, 21 nt, Artificial Sequence
  Guide RNA
guagguguauuuccguuccaa

SEQ ID NO: 7450 - RNA, 21 nt, Artificial Sequence
  Guide RNA
guauuuccguuccaauuccuc

SEQ ID NO: 7451 - RNA, 21 nt, Artificial Sequence
  Guide RNA
gucauguucguagguguauuu

SEQ ID NO: 7452 - RNA, 21 nt, Artificial Sequence
  Guide RNA
guguauuuccguuccaauucc

SEQ ID NO: 7453 - RNA, 21 nt, Artificial Sequence
  Guide RNA
guucguagguguauuuccguu

SEQ ID NO: 7454 - RNA, 21 nt, Artificial Sequence
  Guide RNA
guuggaggaauuggaacggaa

SEQ ID NO: 7455 - RNA, 21 nt, Artificial Sequence
  Guide RNA
uaaaaaguuggaggaauugga

SEQ ID NO: 7456 - RNA, 21 nt, Artificial Sequence
  Guide RNA
uagguguauuuccguuccaau

SEQ ID NO: 7457 - RNA, 21 nt, Artificial Sequence
  Guide RNA
uauuuccguuccaauuccucc

SEQ ID NO: 7458 - RNA, 21 nt, Artificial Sequence
  Guide RNA
ucauguucguagguguauuuc

SEQ ID NO: 7459 - RNA, 21 nt, Artificial Sequence
  Guide RNA
uccguuccaauuccuccaacu

SEQ ID NO: 7460 - RNA, 21 nt, Artificial Sequence
  Guide RNA
ucguagguguauuuccguucc

SEQ ID NO: 7461 - RNA, 21 nt, Artificial Sequence
  Guide RNA
uggaacggaaauacaccuacg

SEQ ID NO: 7462 - RNA, 21 nt, Artificial Sequence
  Guide RNA
uggaggaauuggaacggaaau

SEQ ID NO: 7463 - RNA, 21 nt, Artificial Sequence
  Guide RNA
uguauuuccguuccaauuccu

SEQ ID NO: 7464 - RNA, 21 nt, Artificial Sequence
  Guide RNA
uguucguagguguauuuccgu

SEQ ID NO: 7465 - RNA, 21 nt, Artificial Sequence
  Guide RNA
uuaaaaaguuggaggaauugg

SEQ ID NO: 7466 - RNA, 21 nt, Artificial Sequence
  Guide RNA
uuccguuccaauuccuccaac

SEQ ID NO: 7467 - RNA, 21 nt, Artificial Sequence
  Guide RNA
uucguagguguauuuccguuc

SEQ ID NO: 7468 - RNA, 21 nt, Artificial Sequence
  Guide RNA
uuggaacggaaauacaccuac

SEQ ID NO: 7469 - RNA, 21 nt, Artificial Sequence
  Guide RNA
uuggaggaauuggaacggaaa

SEQ ID NO: 7470 - RNA, 21 nt, Artificial Sequence
  Guide RNA
uuuccguuccaauuccuccaa

SEQ ID NO: 7471 - RNA, 22 nt, Artificial Sequence
  Guide RNA
aaaaguuggaggaauuggaacg

SEQ ID NO: 7472 - RNA, 22 nt, Artificial Sequence
  Guide RNA
aaaguuggaggaauuggaacgg

SEQ ID NO: 7473 - RNA, 22 nt, Artificial Sequence
  Guide RNA
aacggaaauacaccuacgaaca

SEQ ID NO: 7474 - RNA, 22 nt, Artificial Sequence
  Guide RNA
aaguuggaggaauuggaacgga

SEQ ID NO: 7475 - RNA, 22 nt, Artificial Sequence
  Guide RNA
aauuggaacggaaauacaccua

SEQ ID NO: 7476 - RNA, 22 nt, Artificial Sequence
  Guide RNA
acggaaauacaccuacgaacau

SEQ ID NO: 7477 - RNA, 22 nt, Artificial Sequence
  Guide RNA
aggaauuggaacggaaauacac

SEQ ID NO: 7478 - RNA, 22 nt, Artificial Sequence
  Guide RNA
agguguauuuccguuccaauuc

SEQ ID NO: 7479 - RNA, 22 nt, Artificial Sequence
  Guide RNA
aguuggaggaauuggaacggaa

SEQ ID NO: 7480 - RNA, 22 nt, Artificial Sequence
  Guide RNA
auguucguagguguauuuccgu

SEQ ID NO: 7481 - RNA, 22 nt, Artificial Sequence
  Guide RNA
auuggaacggaaauacaccuac

SEQ ID NO: 7482 - RNA, 22 nt, Artificial Sequence
  Guide RNA
auuuccguuccaauuccuccaa

SEQ ID NO: 7483 - RNA, 22 nt, Artificial Sequence
  Guide RNA
cauguucguagguguauuuccg

SEQ ID NO: 7484 - RNA, 22 nt, Artificial Sequence
  Guide RNA
ccguuccaauuccuccaacuuu

SEQ ID NO: 7485 - RNA, 22 nt, Artificial Sequence
  Guide RNA
cggaaauacaccuacgaacaug

SEQ ID NO: 7486 - RNA, 22 nt, Artificial Sequence
  Guide RNA
cguagguguauuuccguuccaa

SEQ ID NO: 7487 - RNA, 22 nt, Artificial Sequence
  Guide RNA
cuuaaaaaguuggaggaauugg

SEQ ID NO: 7488 - RNA, 22 nt, Artificial Sequence
  Guide RNA
gaacggaaauacaccuacgaac

SEQ ID NO: 7489 - RNA, 22 nt, Artificial Sequence
  Guide RNA
gaauuggaacggaaauacaccu

SEQ ID NO: 7490 - RNA, 22 nt, Artificial Sequence
  Guide RNA
gaggaauuggaacggaaauaca

SEQ ID NO: 7491 - RNA, 22 nt, Artificial Sequence
  Guide RNA
ggaacggaaauacaccuacgaa

SEQ ID NO: 7492 - RNA, 22 nt, Artificial Sequence
  Guide RNA
ggaauuggaacggaaauacacc

SEQ ID NO: 7493 - RNA, 22 nt, Artificial Sequence
  Guide RNA
ggaggaauuggaacggaaauac

SEQ ID NO: 7494 - RNA, 22 nt, Artificial Sequence
  Guide RNA
gggucauguucguagguguauu

SEQ ID NO: 7495 - RNA, 22 nt, Artificial Sequence
  Guide RNA
ggucauguucguagguguauuu

SEQ ID NO: 7496 - RNA, 22 nt, Artificial Sequence
  Guide RNA
gguguauuuccguuccaauucc

SEQ ID NO: 7497 - RNA, 22 nt, Artificial Sequence
  Guide RNA
guagguguauuuccguuccaau

SEQ ID NO: 7498 - RNA, 22 nt, Artificial Sequence
  Guide RNA
guauuuccguuccaauuccucc

SEQ ID NO: 7499 - RNA, 22 nt, Artificial Sequence
  Guide RNA
gucauguucguagguguauuuc

SEQ ID NO: 7500 - RNA, 22 nt, Artificial Sequence
  Guide RNA
guguauuuccguuccaauuccu

SEQ ID NO: 7501 - RNA, 22 nt, Artificial Sequence
  Guide RNA
guucguagguguauuuccguuc

SEQ ID NO: 7502 - RNA, 22 nt, Artificial Sequence
  Guide RNA
guuggaggaauuggaacggaaa

SEQ ID NO: 7503 - RNA, 22 nt, Artificial Sequence
  Guide RNA
uaaaaaguuggaggaauuggaa

SEQ ID NO: 7504 - RNA, 22 nt, Artificial Sequence
  Guide RNA
uagguguauuuccguuccaauu

SEQ ID NO: 7505 - RNA, 22 nt, Artificial Sequence
  Guide RNA
uauuuccguuccaauuccucca

SEQ ID NO: 7506 - RNA, 22 nt, Artificial Sequence
  Guide RNA
ucauguucguagguguauuucc

SEQ ID NO: 7507 - RNA, 22 nt, Artificial Sequence
  Guide RNA
uccguuccaauuccuccaacuu

SEQ ID NO: 7508 - RNA, 22 nt, Artificial Sequence
  Guide RNA
ucguagguguauuuccguucca

SEQ ID NO: 7509 - RNA, 22 nt, Artificial Sequence
  Guide RNA
uggaacggaaauacaccuacga

SEQ ID NO: 7510 - RNA, 22 nt, Artificial Sequence
  Guide RNA
uggaggaauuggaacggaaaua

SEQ ID NO: 7511 - RNA, 22 nt, Artificial Sequence
  Guide RNA
uguauuuccguuccaauuccuc

SEQ ID NO: 7512 - RNA, 22 nt, Artificial Sequence
  Guide RNA
uguucguagguguauuuccguu

SEQ ID NO: 7513 - RNA, 22 nt, Artificial Sequence
  Guide RNA
uuaaaaaguuggaggaauugga

SEQ ID NO: 7514 - RNA, 22 nt, Artificial Sequence
  Guide RNA
uuccguuccaauuccuccaacu

SEQ ID NO: 7515 - RNA, 22 nt, Artificial Sequence
  Guide RNA
uucguagguguauuuccguucc

SEQ ID NO: 7516 - RNA, 22 nt, Artificial Sequence
  Guide RNA
uuggaacggaaauacaccuacg

SEQ ID NO: 7517 - RNA, 22 nt, Artificial Sequence
  Guide RNA
uuggaggaauuggaacggaaau

SEQ ID NO: 7518 - RNA, 22 nt, Artificial Sequence
  Guide RNA
uuuccguuccaauuccuccaac

SEQ ID NO: 7519 - RNA, 20 nt, Artificial Sequence
  Guide RNA
aacuuuucaagcugcugccg

SEQ ID NO: 7520 - RNA, 20 nt, Artificial Sequence
  Guide RNA
aaguucggcagcagcuugaa

SEQ ID NO: 7521 - RNA, 20 nt, Artificial Sequence
  Guide RNA
aauuccuccaacuuuucaag

SEQ ID NO: 7522 - RNA, 20 nt, Artificial Sequence
  Guide RNA
acuuuucaagcugcugccga

SEQ ID NO: 7523 - RNA, 20 nt, Artificial Sequence
  Guide RNA
agcaaguucggcagcagcuu

SEQ ID NO: 7524 - RNA, 20 nt, Artificial Sequence
  Guide RNA
agcagcuugaaaaguuggag

SEQ ID NO: 7525 - RNA, 20 nt, Artificial Sequence
  Guide RNA
agcuugaaaaguuggaggaa

SEQ ID NO: 7526 - RNA, 20 nt, Artificial Sequence
  Guide RNA
aguucggcagcagcuugaaa

SEQ ID NO: 7527 - RNA, 20 nt, Artificial Sequence
  Guide RNA
auuccuccaacuuuucaagc

SEQ ID NO: 7528 - RNA, 20 nt, Artificial Sequence
  Guide RNA
caacuuuucaagcugcugcc

SEQ ID NO: 7529 - RNA, 20 nt, Artificial Sequence
  Guide RNA
caaguucggcagcagcuuga

SEQ ID NO: 7530 - RNA, 20 nt, Artificial Sequence
  Guide RNA
caauuccuccaacuuuucaa

SEQ ID NO: 7531 - RNA, 20 nt, Artificial Sequence
  Guide RNA
cagcaaguucggcagcagcu

SEQ ID NO: 7532 - RNA, 20 nt, Artificial Sequence
  Guide RNA
cagcagcuugaaaaguugga

SEQ ID NO: 7533 - RNA, 20 nt, Artificial Sequence
  Guide RNA
cagcuugaaaaguuggagga

SEQ ID NO: 7534 - RNA, 20 nt, Artificial Sequence
  Guide RNA
ccaacuuuucaagcugcugc

SEQ ID NO: 7535 - RNA, 20 nt, Artificial Sequence
  Guide RNA
ccaauuccuccaacuuuuca

SEQ ID NO: 7536 - RNA, 20 nt, Artificial Sequence
  Guide RNA
ccuccaacuuuucaagcugc

SEQ ID NO: 7537 - RNA, 20 nt, Artificial Sequence
  Guide RNA
cggcagcagcuugaaaaguu

SEQ ID NO: 7538 - RNA, 20 nt, Artificial Sequence
  Guide RNA
cuccaacuuuucaagcugcu

SEQ ID NO: 7539 - RNA, 20 nt, Artificial Sequence
  Guide RNA
cuguuccaauuccuccaacu

SEQ ID NO: 7540 - RNA, 20 nt, Artificial Sequence
  Guide RNA
cuugaaaaguuggaggaauu

SEQ ID NO: 7541 - RNA, 20 nt, Artificial Sequence
  Guide RNA
cuuuucaagcugcugccgaa

SEQ ID NO: 7542 - RNA, 20 nt, Artificial Sequence
  Guide RNA
gcaaguucggcagcagcuug

SEQ ID NO: 7543 - RNA, 20 nt, Artificial Sequence
  Guide RNA
gcagcaaguucggcagcagc

SEQ ID NO: 7544 - RNA, 20 nt, Artificial Sequence
  Guide RNA
gcagcagcuugaaaaguugg

SEQ ID NO: 7545 - RNA, 20 nt, Artificial Sequence
  Guide RNA
gcagcuugaaaaguuggagg

SEQ ID NO: 7546 - RNA, 20 nt, Artificial Sequence
  Guide RNA
gcuugaaaaguuggaggaau

SEQ ID NO: 7547 - RNA, 20 nt, Artificial Sequence
  Guide RNA
ggcagcagcuugaaaaguug

SEQ ID NO: 7548 - RNA, 20 nt, Artificial Sequence
  Guide RNA
guuccaauuccuccaacuuu

SEQ ID NO: 7549 - RNA, 20 nt, Artificial Sequence
  Guide RNA
guucggcagcagcuugaaaa

SEQ ID NO: 7550 - RNA, 20 nt, Artificial Sequence
  Guide RNA
ucaagcugcugccgaacuug

SEQ ID NO: 7551 - RNA, 20 nt, Artificial Sequence
  Guide RNA
uccaacuuuucaagcugcug

SEQ ID NO: 7552 - RNA, 20 nt, Artificial Sequence
  Guide RNA
uccaauuccuccaacuuuuc

SEQ ID NO: 7553 - RNA, 20 nt, Artificial Sequence
  Guide RNA
uccuccaacuuuucaagcug

SEQ ID NO: 7554 - RNA, 20 nt, Artificial Sequence
  Guide RNA
ucggcagcagcuugaaaagu

SEQ ID NO: 7555 - RNA, 20 nt, Artificial Sequence
  Guide RNA
ugaaaaguuggaggaauugg

SEQ ID NO: 7556 - RNA, 20 nt, Artificial Sequence
  Guide RNA
ugcagcaaguucggcagcag

SEQ ID NO: 7557 - RNA, 20 nt, Artificial Sequence
  Guide RNA
uguuccaauuccuccaacuu

SEQ ID NO: 7558 - RNA, 20 nt, Artificial Sequence
  Guide RNA
uucaagcugcugccgaacuu

SEQ ID NO: 7559 - RNA, 20 nt, Artificial Sequence
  Guide RNA
uuccaauuccuccaacuuuu

SEQ ID NO: 7560 - RNA, 20 nt, Artificial Sequence
  Guide RNA
uuccuccaacuuuucaagcu

SEQ ID NO: 7561 - RNA, 20 nt, Artificial Sequence
  Guide RNA
uucggcagcagcuugaaaag

SEQ ID NO: 7562 - RNA, 20 nt, Artificial Sequence
  Guide RNA
uugaaaaguuggaggaauug

SEQ ID NO: 7563 - RNA, 20 nt, Artificial Sequence
  Guide RNA
uuucaagcugcugccgaacu

SEQ ID NO: 7564 - RNA, 20 nt, Artificial Sequence
  Guide RNA
uuuucaagcugcugccgaac

SEQ ID NO: 7565 - RNA, 21 nt, Artificial Sequence
  Guide RNA
aacuuuucaagcugcugccga

SEQ ID NO: 7566 - RNA, 21 nt, Artificial Sequence
  Guide RNA
aaguucggcagcagcuugaaa

SEQ ID NO: 7567 - RNA, 21 nt, Artificial Sequence
  Guide RNA
aauuccuccaacuuuucaagc

SEQ ID NO: 7568 - RNA, 21 nt, Artificial Sequence
  Guide RNA
acuuuucaagcugcugccgaa

SEQ ID NO: 7569 - RNA, 21 nt, Artificial Sequence
  Guide RNA
agcaaguucggcagcagcuug

SEQ ID NO: 7570 - RNA, 21 nt, Artificial Sequence
  Guide RNA
agcagcuugaaaaguuggagg

SEQ ID NO: 7571 - RNA, 21 nt, Artificial Sequence
  Guide RNA
agcuugaaaaguuggaggaau

SEQ ID NO: 7572 - RNA, 21 nt, Artificial Sequence
  Guide RNA
aguucggcagcagcuugaaaa

SEQ ID NO: 7573 - RNA, 21 nt, Artificial Sequence
  Guide RNA
auuccuccaacuuuucaagcu

SEQ ID NO: 7574 - RNA, 21 nt, Artificial Sequence
  Guide RNA
caacuuuucaagcugcugccg

SEQ ID NO: 7575 - RNA, 21 nt, Artificial Sequence
  Guide RNA
caaguucggcagcagcuugaa

SEQ ID NO: 7576 - RNA, 21 nt, Artificial Sequence
  Guide RNA
caauuccuccaacuuuucaag

SEQ ID NO: 7577 - RNA, 21 nt, Artificial Sequence
  Guide RNA
cagcaaguucggcagcagcuu

SEQ ID NO: 7578 - RNA, 21 nt, Artificial Sequence
  Guide RNA
cagcagcuugaaaaguuggag

SEQ ID NO: 7579 - RNA, 21 nt, Artificial Sequence
  Guide RNA
cagcuugaaaaguuggaggaa

SEQ ID NO: 7580 - RNA, 21 nt, Artificial Sequence
  Guide RNA
ccaacuuuucaagcugcugcc

SEQ ID NO: 7581 - RNA, 21 nt, Artificial Sequence
  Guide RNA
ccaauuccuccaacuuuucaa

SEQ ID NO: 7582 - RNA, 21 nt, Artificial Sequence
  Guide RNA
ccuccaacuuuucaagcugcu

SEQ ID NO: 7583 - RNA, 21 nt, Artificial Sequence
  Guide RNA
cggcagcagcuugaaaaguug

SEQ ID NO: 7584 - RNA, 21 nt, Artificial Sequence
  Guide RNA
cuccaacuuuucaagcugcug

SEQ ID NO: 7585 - RNA, 21 nt, Artificial Sequence
  Guide RNA
cugcagcaaguucggcagcag

SEQ ID NO: 7586 - RNA, 21 nt, Artificial Sequence
  Guide RNA
cuguuccaauuccuccaacuu

SEQ ID NO: 7587 - RNA, 21 nt, Artificial Sequence
  Guide RNA
cuugaaaaguuggaggaauug

SEQ ID NO: 7588 - RNA, 21 nt, Artificial Sequence
  Guide RNA
cuuuucaagcugcugccgaac

SEQ ID NO: 7589 - RNA, 21 nt, Artificial Sequence
  Guide RNA
gcaaguucggcagcagcuuga

SEQ ID NO: 7590 - RNA, 21 nt, Artificial Sequence
  Guide RNA
gcagcaaguucggcagcagcu

SEQ ID NO: 7591 - RNA, 21 nt, Artificial Sequence
  Guide RNA
gcagcagcuugaaaaguugga

SEQ ID NO: 7592 - RNA, 21 nt, Artificial Sequence
  Guide RNA
gcagcuugaaaaguuggagga

SEQ ID NO: 7593 - RNA, 21 nt, Artificial Sequence
  Guide RNA
gcuugaaaaguuggaggaauu

SEQ ID NO: 7594 - RNA, 21 nt, Artificial Sequence
  Guide RNA
ggcagcagcuugaaaaguugg

SEQ ID NO: 7595 - RNA, 21 nt, Artificial Sequence
  Guide RNA
guuccaauuccuccaacuuuu

SEQ ID NO: 7596 - RNA, 21 nt, Artificial Sequence
  Guide RNA
guucggcagcagcuugaaaag

SEQ ID NO: 7597 - RNA, 21 nt, Artificial Sequence
  Guide RNA
ucaagcugcugccgaacuugc

SEQ ID NO: 7598 - RNA, 21 nt, Artificial Sequence
  Guide RNA
uccaacuuuucaagcugcugc

SEQ ID NO: 7599 - RNA, 21 nt, Artificial Sequence
  Guide RNA
uccaauuccuccaacuuuuca

SEQ ID NO: 7600 - RNA, 21 nt, Artificial Sequence
  Guide RNA
uccuccaacuuuucaagcugc

SEQ ID NO: 7601 - RNA, 21 nt, Artificial Sequence
  Guide RNA
ucggcagcagcuugaaaaguu

SEQ ID NO: 7602 - RNA, 21 nt, Artificial Sequence
  Guide RNA
ucuguuccaauuccuccaacu

SEQ ID NO: 7603 - RNA, 21 nt, Artificial Sequence
  Guide RNA
ugaaaaguuggaggaauugga

SEQ ID NO: 7604 - RNA, 21 nt, Artificial Sequence
  Guide RNA
ugcagcaaguucggcagcagc

SEQ ID NO: 7605 - RNA, 21 nt, Artificial Sequence
  Guide RNA
uguuccaauuccuccaacuuu

SEQ ID NO: 7606 - RNA, 21 nt, Artificial Sequence
  Guide RNA
uucaagcugcugccgaacuug

SEQ ID NO: 7607 - RNA, 21 nt, Artificial Sequence
  Guide RNA
uuccaauuccuccaacuuuuc

SEQ ID NO: 7608 - RNA, 21 nt, Artificial Sequence
  Guide RNA
uuccuccaacuuuucaagcug

SEQ ID NO: 7609 - RNA, 21 nt, Artificial Sequence
  Guide RNA
uucggcagcagcuugaaaagu

SEQ ID NO: 7610 - RNA, 21 nt, Artificial Sequence
  Guide RNA
uugaaaaguuggaggaauugg

SEQ ID NO: 7611 - RNA, 21 nt, Artificial Sequence
  Guide RNA
uuucaagcugcugccgaacuu

SEQ ID NO: 7612 - RNA, 21 nt, Artificial Sequence
  Guide RNA
uuuucaagcugcugccgaacu

SEQ ID NO: 7613 - RNA, 22 nt, Artificial Sequence
  Guide RNA
aacuuuucaagcugcugccgaa

SEQ ID NO: 7614 - RNA, 22 nt, Artificial Sequence
  Guide RNA
aaguucggcagcagcuugaaaa

SEQ ID NO: 7615 - RNA, 22 nt, Artificial Sequence
  Guide RNA
aauuccuccaacuuuucaagcu

SEQ ID NO: 7616 - RNA, 22 nt, Artificial Sequence
  Guide RNA
acuuuucaagcugcugccgaac

SEQ ID NO: 7617 - RNA, 22 nt, Artificial Sequence
  Guide RNA
agcaaguucggcagcagcuuga

SEQ ID NO: 7618 - RNA, 22 nt, Artificial Sequence
  Guide RNA
agcagcuugaaaaguuggagga

SEQ ID NO: 7619 - RNA, 22 nt, Artificial Sequence
  Guide RNA
agcuugaaaaguuggaggaauu

SEQ ID NO: 7620 - RNA, 22 nt, Artificial Sequence
  Guide RNA
aguucggcagcagcuugaaaag

SEQ ID NO: 7621 - RNA, 22 nt, Artificial Sequence
  Guide RNA
auuccuccaacuuuucaagcug

SEQ ID NO: 7622 - RNA, 22 nt, Artificial Sequence
  Guide RNA
caacuuuucaagcugcugccga

SEQ ID NO: 7623 - RNA, 22 nt, Artificial Sequence
  Guide RNA
caaguucggcagcagcuugaaa

SEQ ID NO: 7624 - RNA, 22 nt, Artificial Sequence
  Guide RNA
caauuccuccaacuuuucaagc

SEQ ID NO: 7625 - RNA, 22 nt, Artificial Sequence
  Guide RNA
cagcaaguucggcagcagcuug

SEQ ID NO: 7626 - RNA, 22 nt, Artificial Sequence
  Guide RNA
cagcagcuugaaaaguuggagg

SEQ ID NO: 7627 - RNA, 22 nt, Artificial Sequence
  Guide RNA
cagcuugaaaaguuggaggaau

SEQ ID NO: 7628 - RNA, 22 nt, Artificial Sequence
  Guide RNA
ccaacuuuucaagcugcugccg

SEQ ID NO: 7629 - RNA, 22 nt, Artificial Sequence
  Guide RNA
ccaauuccuccaacuuuucaag

SEQ ID NO: 7630 - RNA, 22 nt, Artificial Sequence
  Guide RNA
ccuccaacuuuucaagcugcug

SEQ ID NO: 7631 - RNA, 22 nt, Artificial Sequence
  Guide RNA
cggcagcagcuugaaaaguugg

SEQ ID NO: 7632 - RNA, 22 nt, Artificial Sequence
  Guide RNA
cuccaacuuuucaagcugcugc

SEQ ID NO: 7633 - RNA, 22 nt, Artificial Sequence
  Guide RNA
cugcagcaaguucggcagcagc

SEQ ID NO: 7634 - RNA, 22 nt, Artificial Sequence
  Guide RNA
cuguuccaauuccuccaacuuu

SEQ ID NO: 7635 - RNA, 22 nt, Artificial Sequence
  Guide RNA
cuugaaaaguuggaggaauugg

SEQ ID NO: 7636 - RNA, 22 nt, Artificial Sequence
  Guide RNA
cuuuucaagcugcugccgaacu

SEQ ID NO: 7637 - RNA, 22 nt, Artificial Sequence
  Guide RNA
gcaaguucggcagcagcuugaa

SEQ ID NO: 7638 - RNA, 22 nt, Artificial Sequence
  Guide RNA
gcagcaaguucggcagcagcuu

SEQ ID NO: 7639 - RNA, 22 nt, Artificial Sequence
  Guide RNA
gcagcagcuugaaaaguuggag

SEQ ID NO: 7640 - RNA, 22 nt, Artificial Sequence
  Guide RNA
gcagcuugaaaaguuggaggaa

SEQ ID NO: 7641 - RNA, 22 nt, Artificial Sequence
  Guide RNA
gcuugaaaaguuggaggaauug

SEQ ID NO: 7642 - RNA, 22 nt, Artificial Sequence
  Guide RNA
ggcagcagcuugaaaaguugga

SEQ ID NO: 7643 - RNA, 22 nt, Artificial Sequence
  Guide RNA
guuccaauuccuccaacuuuuc

SEQ ID NO: 7644 - RNA, 22 nt, Artificial Sequence
  Guide RNA
guucggcagcagcuugaaaagu

SEQ ID NO: 7645 - RNA, 22 nt, Artificial Sequence
  Guide RNA
ucaagcugcugccgaacuugcu

SEQ ID NO: 7646 - RNA, 22 nt, Artificial Sequence
  Guide RNA
uccaacuuuucaagcugcugcc

SEQ ID NO: 7647 - RNA, 22 nt, Artificial Sequence
  Guide RNA
uccaauuccuccaacuuuucaa

SEQ ID NO: 7648 - RNA, 22 nt, Artificial Sequence
  Guide RNA
uccuccaacuuuucaagcugcu

SEQ ID NO: 7649 - RNA, 22 nt, Artificial Sequence
  Guide RNA
ucggcagcagcuugaaaaguug

SEQ ID NO: 7650 - RNA, 22 nt, Artificial Sequence
  Guide RNA
ucugcagcaaguucggcagcag

SEQ ID NO: 7651 - RNA, 22 nt, Artificial Sequence
  Guide RNA
ucuguuccaauuccuccaacuu

SEQ ID NO: 7652 - RNA, 22 nt, Artificial Sequence
  Guide RNA
ugaaaaguuggaggaauuggaa

SEQ ID NO: 7653 - RNA, 22 nt, Artificial Sequence
  Guide RNA
ugcagcaaguucggcagcagcu

SEQ ID NO: 7654 - RNA, 22 nt, Artificial Sequence
  Guide RNA
uguuccaauuccuccaacuuuu

SEQ ID NO: 7655 - RNA, 22 nt, Artificial Sequence
  Guide RNA
uucaagcugcugccgaacuugc

SEQ ID NO: 7656 - RNA, 22 nt, Artificial Sequence
  Guide RNA
uuccaauuccuccaacuuuuca

SEQ ID NO: 7657 - RNA, 22 nt, Artificial Sequence
  Guide RNA
uuccuccaacuuuucaagcugc

SEQ ID NO: 7658 - RNA, 22 nt, Artificial Sequence
  Guide RNA
uucggcagcagcuugaaaaguu

SEQ ID NO: 7659 - RNA, 22 nt, Artificial Sequence
  Guide RNA
uucuguuccaauuccuccaacu

SEQ ID NO: 7660 - RNA, 22 nt, Artificial Sequence
  Guide RNA
uugaaaaguuggaggaauugga

SEQ ID NO: 7661 - RNA, 22 nt, Artificial Sequence
  Guide RNA
uuucaagcugcugccgaacuug

SEQ ID NO: 7662 - RNA, 22 nt, Artificial Sequence
  Guide RNA
uuuucaagcugcugccgaacuu

SEQ ID NO: 7663 - RNA, 20 nt, Artificial Sequence
  Guide RNA
aacuuuuuaagcugcugcug

SEQ ID NO: 7664 - RNA, 20 nt, Artificial Sequence
  Guide RNA
aagcugcugcugaacuugcu

SEQ ID NO: 7665 - RNA, 20 nt, Artificial Sequence
  Guide RNA
aaguucagcagcagcuuaaa

SEQ ID NO: 7666 - RNA, 20 nt, Artificial Sequence
  Guide RNA
acuuuuuaagcugcugcuga

SEQ ID NO: 7667 - RNA, 20 nt, Artificial Sequence
  Guide RNA
agagucugcagcaaguucag

SEQ ID NO: 7668 - RNA, 20 nt, Artificial Sequence
  Guide RNA
agcaaguucagcagcagcuu

SEQ ID NO: 7669 - RNA, 20 nt, Artificial Sequence
  Guide RNA
agcugcugcugaacuugcug

SEQ ID NO: 7670 - RNA, 20 nt, Artificial Sequence
  Guide RNA
agucugcagcaaguucagca

SEQ ID NO: 7671 - RNA, 20 nt, Artificial Sequence
  Guide RNA
aguucagcagcagcuuaaaa

SEQ ID NO: 7672 - RNA, 20 nt, Artificial Sequence
  Guide RNA
caacuuuuuaagcugcugcu

SEQ ID NO: 7673 - RNA, 20 nt, Artificial Sequence
  Guide RNA
caaguucagcagcagcuuaa

SEQ ID NO: 7674 - RNA, 20 nt, Artificial Sequence
  Guide RNA
cagcaaguucagcagcagcu

SEQ ID NO: 7675 - RNA, 20 nt, Artificial Sequence
  Guide RNA
cagcagcagcuuaaaaaguu

SEQ ID NO: 7676 - RNA, 20 nt, Artificial Sequence
  Guide RNA
ccaacuuuuuaagcugcugc

SEQ ID NO: 7677 - RNA, 20 nt, Artificial Sequence
  Guide RNA
ccuccaacuuuuuaagcugc

SEQ ID NO: 7678 - RNA, 20 nt, Artificial Sequence
  Guide RNA
cggagagucugcagcaaguu

SEQ ID NO: 7679 - RNA, 20 nt, Artificial Sequence
  Guide RNA
cuccaacuuuuuaagcugcu

SEQ ID NO: 7680 - RNA, 20 nt, Artificial Sequence
  Guide RNA
cugaacuugcugcagacucu

SEQ ID NO: 7681 - RNA, 20 nt, Artificial Sequence
  Guide RNA
cugcagcaaguucagcagca

SEQ ID NO: 7682 - RNA, 20 nt, Artificial Sequence
  Guide RNA
cugcugaacuugcugcagac

SEQ ID NO: 7683 - RNA, 20 nt, Artificial Sequence
  Guide RNA
cugcugcugaacuugcugca

SEQ ID NO: 7684 - RNA, 20 nt, Artificial Sequence
  Guide RNA
cuuuuuaagcugcugcugaa

SEQ ID NO: 7685 - RNA, 20 nt, Artificial Sequence
  Guide RNA
gagagucugcagcaaguuca

SEQ ID NO: 7686 - RNA, 20 nt, Artificial Sequence
  Guide RNA
gagucugcagcaaguucagc

SEQ ID NO: 7687 - RNA, 20 nt, Artificial Sequence
  Guide RNA
gcaaguucagcagcagcuua

SEQ ID NO: 7688 - RNA, 20 nt, Artificial Sequence
  Guide RNA
gcagcaaguucagcagcagc

SEQ ID NO: 7689 - RNA, 20 nt, Artificial Sequence
  Guide RNA
gcggagagucugcagcaagu

SEQ ID NO: 7690 - RNA, 20 nt, Artificial Sequence
  Guide RNA
gcugaacuugcugcagacuc

SEQ ID NO: 7691 - RNA, 20 nt, Artificial Sequence
  Guide RNA
gcugcugaacuugcugcaga

SEQ ID NO: 7692 - RNA, 20 nt, Artificial Sequence
  Guide RNA
gcugcugcugaacuugcugc

SEQ ID NO: 7693 - RNA, 20 nt, Artificial Sequence
  Guide RNA
ggagagucugcagcaaguuc

SEQ ID NO: 7694 - RNA, 20 nt, Artificial Sequence
  Guide RNA
gucugcagcaaguucagcag

SEQ ID NO: 7695 - RNA, 20 nt, Artificial Sequence
  Guide RNA
guucagcagcagcuuaaaaa

SEQ ID NO: 7696 - RNA, 20 nt, Artificial Sequence
  Guide RNA
uaagcugcugcugaacuugc

SEQ ID NO: 7697 - RNA, 20 nt, Artificial Sequence
  Guide RNA
ucagcagcagcuuaaaaagu

SEQ ID NO: 7698 - RNA, 20 nt, Artificial Sequence
  Guide RNA
uccaacuuuuuaagcugcug

SEQ ID NO: 7699 - RNA, 20 nt, Artificial Sequence
  Guide RNA
ucugcagcaaguucagcagc

SEQ ID NO: 7700 - RNA, 20 nt, Artificial Sequence
  Guide RNA
ugcagcaaguucagcagcag

SEQ ID NO: 7701 - RNA, 20 nt, Artificial Sequence
  Guide RNA
ugcggagagucugcagcaag

SEQ ID NO: 7702 - RNA, 20 nt, Artificial Sequence
  Guide RNA
ugcugaacuugcugcagacu

SEQ ID NO: 7703 - RNA, 20 nt, Artificial Sequence
  Guide RNA
ugcugcugaacuugcugcag

SEQ ID NO: 7704 - RNA, 20 nt, Artificial Sequence
  Guide RNA
uuaagcugcugcugaacuug

SEQ ID NO: 7705 - RNA, 20 nt, Artificial Sequence
  Guide RNA
uucagcagcagcuuaaaaag

SEQ ID NO: 7706 - RNA, 20 nt, Artificial Sequence
  Guide RNA
uuuaagcugcugcugaacuu

SEQ ID NO: 7707 - RNA, 20 nt, Artificial Sequence
  Guide RNA
uuuuaagcugcugcugaacu

SEQ ID NO: 7708 - RNA, 20 nt, Artificial Sequence
  Guide RNA
uuuuuaagcugcugcugaac

SEQ ID NO: 7709 - RNA, 21 nt, Artificial Sequence
  Guide RNA
aacuuuuuaagcugcugcuga

SEQ ID NO: 7710 - RNA, 21 nt, Artificial Sequence
  Guide RNA
aagcugcugcugaacuugcug

SEQ ID NO: 7711 - RNA, 21 nt, Artificial Sequence
  Guide RNA
aaguucagcagcagcuuaaaa

SEQ ID NO: 7712 - RNA, 21 nt, Artificial Sequence
  Guide RNA
acuuuuuaagcugcugcugaa

SEQ ID NO: 7713 - RNA, 21 nt, Artificial Sequence
  Guide RNA
agagucugcagcaaguucagc

SEQ ID NO: 7714 - RNA, 21 nt, Artificial Sequence
  Guide RNA
agcaaguucagcagcagcuua

SEQ ID NO: 7715 - RNA, 21 nt, Artificial Sequence
  Guide RNA
agcugcugcugaacuugcugc

SEQ ID NO: 7716 - RNA, 21 nt, Artificial Sequence
  Guide RNA
agucugcagcaaguucagcag

SEQ ID NO: 7717 - RNA, 21 nt, Artificial Sequence
  Guide RNA
aguucagcagcagcuuaaaaa

SEQ ID NO: 7718 - RNA, 21 nt, Artificial Sequence
  Guide RNA
caacuuuuuaagcugcugcug

SEQ ID NO: 7719 - RNA, 21 nt, Artificial Sequence
  Guide RNA
caaguucagcagcagcuuaaa

SEQ ID NO: 7720 - RNA, 21 nt, Artificial Sequence
  Guide RNA
cagcaaguucagcagcagcuu

SEQ ID NO: 7721 - RNA, 21 nt, Artificial Sequence
  Guide RNA
cagcagcagcuuaaaaaguug

SEQ ID NO: 7722 - RNA, 21 nt, Artificial Sequence
  Guide RNA
ccaacuuuuuaagcugcugcu

SEQ ID NO: 7723 - RNA, 21 nt, Artificial Sequence
  Guide RNA
ccuccaacuuuuuaagcugcu

SEQ ID NO: 7724 - RNA, 21 nt, Artificial Sequence
  Guide RNA
cggagagucugcagcaaguuc

SEQ ID NO: 7725 - RNA, 21 nt, Artificial Sequence
  Guide RNA
cuccaacuuuuuaagcugcug

SEQ ID NO: 7726 - RNA, 21 nt, Artificial Sequence
  Guide RNA
cugaacuugcugcagacucuc

SEQ ID NO: 7727 - RNA, 21 nt, Artificial Sequence
  Guide RNA
cugcagcaaguucagcagcag

SEQ ID NO: 7728 - RNA, 21 nt, Artificial Sequence
  Guide RNA
cugcugaacuugcugcagacu

SEQ ID NO: 7729 - RNA, 21 nt, Artificial Sequence
  Guide RNA
cugcugcugaacuugcugcag

SEQ ID NO: 7730 - RNA, 21 nt, Artificial Sequence
  Guide RNA
cuuuuuaagcugcugcugaac

SEQ ID NO: 7731 - RNA, 21 nt, Artificial Sequence
  Guide RNA
gagagucugcagcaaguucag

SEQ ID NO: 7732 - RNA, 21 nt, Artificial Sequence
  Guide RNA
gagucugcagcaaguucagca

SEQ ID NO: 7733 - RNA, 21 nt, Artificial Sequence
  Guide RNA
gcaaguucagcagcagcuuaa

SEQ ID NO: 7734 - RNA, 21 nt, Artificial Sequence
  Guide RNA
gcagcaaguucagcagcagcu

SEQ ID NO: 7735 - RNA, 21 nt, Artificial Sequence
  Guide RNA
gcggagagucugcagcaaguu

SEQ ID NO: 7736 - RNA, 21 nt, Artificial Sequence
  Guide RNA
gcugaacuugcugcagacucu

SEQ ID NO: 7737 - RNA, 21 nt, Artificial Sequence
  Guide RNA
gcugcugaacuugcugcagac

SEQ ID NO: 7738 - RNA, 21 nt, Artificial Sequence
  Guide RNA
gcugcugcugaacuugcugca

SEQ ID NO: 7739 - RNA, 21 nt, Artificial Sequence
  Guide RNA
ggagagucugcagcaaguuca

SEQ ID NO: 7740 - RNA, 21 nt, Artificial Sequence
  Guide RNA
gucugcagcaaguucagcagc

SEQ ID NO: 7741 - RNA, 21 nt, Artificial Sequence
  Guide RNA
guucagcagcagcuuaaaaag

SEQ ID NO: 7742 - RNA, 21 nt, Artificial Sequence
  Guide RNA
uaagcugcugcugaacuugcu

SEQ ID NO: 7743 - RNA, 21 nt, Artificial Sequence
  Guide RNA
ucagcagcagcuuaaaaaguu

SEQ ID NO: 7744 - RNA, 21 nt, Artificial Sequence
  Guide RNA
uccaacuuuuuaagcugcugc

SEQ ID NO: 7745 - RNA, 21 nt, Artificial Sequence
  Guide RNA
uccuccaacuuuuuaagcugc

SEQ ID NO: 7746 - RNA, 21 nt, Artificial Sequence
  Guide RNA
ucugcagcaaguucagcagca

SEQ ID NO: 7747 - RNA, 21 nt, Artificial Sequence
  Guide RNA
ugcagcaaguucagcagcagc

SEQ ID NO: 7748 - RNA, 21 nt, Artificial Sequence
  Guide RNA
ugcggagagucugcagcaagu

SEQ ID NO: 7749 - RNA, 21 nt, Artificial Sequence
  Guide RNA
ugcugaacuugcugcagacuc

SEQ ID NO: 7750 - RNA, 21 nt, Artificial Sequence
  Guide RNA
ugcugcugaacuugcugcaga

SEQ ID NO: 7751 - RNA, 21 nt, Artificial Sequence
  Guide RNA
uuaagcugcugcugaacuugc

SEQ ID NO: 7752 - RNA, 21 nt, Artificial Sequence
  Guide RNA
uucagcagcagcuuaaaaagu

SEQ ID NO: 7753 - RNA, 21 nt, Artificial Sequence
  Guide RNA
uugcggagagucugcagcaag

SEQ ID NO: 7754 - RNA, 21 nt, Artificial Sequence
  Guide RNA
uuuaagcugcugcugaacuug

SEQ ID NO: 7755 - RNA, 21 nt, Artificial Sequence
  Guide RNA
uuuuaagcugcugcugaacuu

SEQ ID NO: 7756 - RNA, 21 nt, Artificial Sequence
  Guide RNA
uuuuuaagcugcugcugaacu

SEQ ID NO: 7757 - RNA, 22 nt, Artificial Sequence
  Guide RNA
aacuuuuuaagcugcugcugaa

SEQ ID NO: 7758 - RNA, 22 nt, Artificial Sequence
  Guide RNA
aagcugcugcugaacuugcugc

SEQ ID NO: 7759 - RNA, 22 nt, Artificial Sequence
  Guide RNA
aaguucagcagcagcuuaaaaa

SEQ ID NO: 7760 - RNA, 22 nt, Artificial Sequence
  Guide RNA
acuuuuuaagcugcugcugaac

SEQ ID NO: 7761 - RNA, 22 nt, Artificial Sequence
  Guide RNA
agagucugcagcaaguucagca

SEQ ID NO: 7762 - RNA, 22 nt, Artificial Sequence
  Guide RNA
agcaaguucagcagcagcuuaa

SEQ ID NO: 7763 - RNA, 22 nt, Artificial Sequence
  Guide RNA
agcugcugcugaacuugcugca

SEQ ID NO: 7764 - RNA, 22 nt, Artificial Sequence
  Guide RNA
agucugcagcaaguucagcagc

SEQ ID NO: 7765 - RNA, 22 nt, Artificial Sequence
  Guide RNA
aguucagcagcagcuuaaaaag

SEQ ID NO: 7766 - RNA, 22 nt, Artificial Sequence
  Guide RNA
caacuuuuuaagcugcugcuga

SEQ ID NO: 7767 - RNA, 22 nt, Artificial Sequence
  Guide RNA
caaguucagcagcagcuuaaaa

SEQ ID NO: 7768 - RNA, 22 nt, Artificial Sequence
  Guide RNA
cagcaaguucagcagcagcuua

SEQ ID NO: 7769 - RNA, 22 nt, Artificial Sequence
  Guide RNA
cagcagcagcuuaaaaaguugg

SEQ ID NO: 7770 - RNA, 22 nt, Artificial Sequence
  Guide RNA
ccaacuuuuuaagcugcugcug

SEQ ID NO: 7771 - RNA, 22 nt, Artificial Sequence
  Guide RNA
ccuccaacuuuuuaagcugcug

SEQ ID NO: 7772 - RNA, 22 nt, Artificial Sequence
  Guide RNA
cggagagucugcagcaaguuca

SEQ ID NO: 7773 - RNA, 22 nt, Artificial Sequence
  Guide RNA
cuccaacuuuuuaagcugcugc

SEQ ID NO: 7774 - RNA, 22 nt, Artificial Sequence
  Guide RNA
cugaacuugcugcagacucucc

SEQ ID NO: 7775 - RNA, 22 nt, Artificial Sequence
  Guide RNA
cugcagcaaguucagcagcagc

SEQ ID NO: 7776 - RNA, 22 nt, Artificial Sequence
  Guide RNA
cugcugaacuugcugcagacuc

SEQ ID NO: 7777 - RNA, 22 nt, Artificial Sequence
  Guide RNA
cugcugcugaacuugcugcaga

SEQ ID NO: 7778 - RNA, 22 nt, Artificial Sequence
  Guide RNA
cuuuuuaagcugcugcugaacu

SEQ ID NO: 7779 - RNA, 22 nt, Artificial Sequence
  Guide RNA
gagagucugcagcaaguucagc

SEQ ID NO: 7780 - RNA, 22 nt, Artificial Sequence
  Guide RNA
gagucugcagcaaguucagcag

SEQ ID NO: 7781 - RNA, 22 nt, Artificial Sequence
  Guide RNA
gcaaguucagcagcagcuuaaa

SEQ ID NO: 7782 - RNA, 22 nt, Artificial Sequence
  Guide RNA
gcagcaaguucagcagcagcuu

SEQ ID NO: 7783 - RNA, 22 nt, Artificial Sequence
  Guide RNA
gcggagagucugcagcaaguuc

SEQ ID NO: 7784 - RNA, 22 nt, Artificial Sequence
  Guide RNA
gcugaacuugcugcagacucuc

SEQ ID NO: 7785 - RNA, 22 nt, Artificial Sequence
  Guide RNA
gcugcugaacuugcugcagacu

SEQ ID NO: 7786 - RNA, 22 nt, Artificial Sequence
  Guide RNA
gcugcugcugaacuugcugcag

SEQ ID NO: 7787 - RNA, 22 nt, Artificial Sequence
  Guide RNA
ggagagucugcagcaaguucag

SEQ ID NO: 7788 - RNA, 22 nt, Artificial Sequence
  Guide RNA
gucugcagcaaguucagcagca

SEQ ID NO: 7789 - RNA, 22 nt, Artificial Sequence
  Guide RNA
guucagcagcagcuuaaaaagu

SEQ ID NO: 7790 - RNA, 22 nt, Artificial Sequence
  Guide RNA
guugcggagagucugcagcaag

SEQ ID NO: 7791 - RNA, 22 nt, Artificial Sequence
  Guide RNA
uaagcugcugcugaacuugcug

SEQ ID NO: 7792 - RNA, 22 nt, Artificial Sequence
  Guide RNA
ucagcagcagcuuaaaaaguug

SEQ ID NO: 7793 - RNA, 22 nt, Artificial Sequence
  Guide RNA
uccaacuuuuuaagcugcugcu

SEQ ID NO: 7794 - RNA, 22 nt, Artificial Sequence
  Guide RNA
uccuccaacuuuuuaagcugcu

SEQ ID NO: 7795 - RNA, 22 nt, Artificial Sequence
  Guide RNA
ucugcagcaaguucagcagcag

SEQ ID NO: 7796 - RNA, 22 nt, Artificial Sequence
  Guide RNA
ugcagcaaguucagcagcagcu

SEQ ID NO: 7797 - RNA, 22 nt, Artificial Sequence
  Guide RNA
ugcggagagucugcagcaaguu

SEQ ID NO: 7798 - RNA, 22 nt, Artificial Sequence
  Guide RNA
ugcugaacuugcugcagacucu

SEQ ID NO: 7799 - RNA, 22 nt, Artificial Sequence
  Guide RNA
ugcugcugaacuugcugcagac

SEQ ID NO: 7800 - RNA, 22 nt, Artificial Sequence
  Guide RNA
uuaagcugcugcugaacuugcu

SEQ ID NO: 7801 - RNA, 22 nt, Artificial Sequence
  Guide RNA
uucagcagcagcuuaaaaaguu

SEQ ID NO: 7802 - RNA, 22 nt, Artificial Sequence
  Guide RNA
uuccuccaacuuuuuaagcugc

SEQ ID NO: 7803 - RNA, 22 nt, Artificial Sequence
  Guide RNA
uugcggagagucugcagcaagu

SEQ ID NO: 7804 - RNA, 22 nt, Artificial Sequence
  Guide RNA
uuuaagcugcugcugaacuugc

SEQ ID NO: 7805 - RNA, 22 nt, Artificial Sequence
  Guide RNA
uuuuaagcugcugcugaacuug

SEQ ID NO: 7806 - RNA, 22 nt, Artificial Sequence
  Guide RNA
uuuuuaagcugcugcugaacuu

SEQ ID NO: 7807 - RNA, 20 nt, Artificial Sequence
  Guide RNA
aacuuuuuaagcugcugcca

SEQ ID NO: 7808 - RNA, 20 nt, Artificial Sequence
  Guide RNA
aagcugcugccaaacuugcu

SEQ ID NO: 7809 - RNA, 20 nt, Artificial Sequence
  Guide RNA
aaguuuggcagcagcuuaaa

SEQ ID NO: 7810 - RNA, 20 nt, Artificial Sequence
  Guide RNA
acuuuuuaagcugcugccaa

SEQ ID NO: 7811 - RNA, 20 nt, Artificial Sequence
  Guide RNA
agagucugcagcaaguuugg

SEQ ID NO: 7812 - RNA, 20 nt, Artificial Sequence
  Guide RNA
agcaaguuuggcagcagcuu

SEQ ID NO: 7813 - RNA, 20 nt, Artificial Sequence
  Guide RNA
agcugcugccaaacuugcug

SEQ ID NO: 7814 - RNA, 20 nt, Artificial Sequence
  Guide RNA
agucugcagcaaguuuggca

SEQ ID NO: 7815 - RNA, 20 nt, Artificial Sequence
  Guide RNA
aguuuggcagcagcuuaaaa

SEQ ID NO: 7816 - RNA, 20 nt, Artificial Sequence
  Guide RNA
caaacuugcugcagacucuc

SEQ ID NO: 7817 - RNA, 20 nt, Artificial Sequence
  Guide RNA
caacuuuuuaagcugcugcc

SEQ ID NO: 7818 - RNA, 20 nt, Artificial Sequence
  Guide RNA
caaguuuggcagcagcuuaa

SEQ ID NO: 7819 - RNA, 20 nt, Artificial Sequence
  Guide RNA
cagcaaguuuggcagcagcu

SEQ ID NO: 7820 - RNA, 20 nt, Artificial Sequence
  Guide RNA
ccaaacuugcugcagacucu

SEQ ID NO: 7821 - RNA, 20 nt, Artificial Sequence
  Guide RNA
cugcagcaaguuuggcagca

SEQ ID NO: 7822 - RNA, 20 nt, Artificial Sequence
  Guide RNA
cugccaaacuugcugcagac

SEQ ID NO: 7823 - RNA, 20 nt, Artificial Sequence
  Guide RNA
cugcugccaaacuugcugca

SEQ ID NO: 7824 - RNA, 20 nt, Artificial Sequence
  Guide RNA
cuuuuuaagcugcugccaaa

SEQ ID NO: 7825 - RNA, 20 nt, Artificial Sequence
  Guide RNA
gagagucugcagcaaguuug

SEQ ID NO: 7826 - RNA, 20 nt, Artificial Sequence
  Guide RNA
gagucugcagcaaguuuggc

SEQ ID NO: 7827 - RNA, 20 nt, Artificial Sequence
  Guide RNA
gcaaguuuggcagcagcuua

SEQ ID NO: 7828 - RNA, 20 nt, Artificial Sequence
  Guide RNA
gcagcaaguuuggcagcagc

SEQ ID NO: 7829 - RNA, 20 nt, Artificial Sequence
  Guide RNA
gccaaacuugcugcagacuc

SEQ ID NO: 7830 - RNA, 20 nt, Artificial Sequence
  Guide RNA
gcugccaaacuugcugcaga

SEQ ID NO: 7831 - RNA, 20 nt, Artificial Sequence
  Guide RNA
gcugcugccaaacuugcugc

SEQ ID NO: 7832 - RNA, 20 nt, Artificial Sequence
  Guide RNA
ggagagucugcagcaaguuu

SEQ ID NO: 7833 - RNA, 20 nt, Artificial Sequence
  Guide RNA
gucugcagcaaguuuggcag

SEQ ID NO: 7834 - RNA, 20 nt, Artificial Sequence
  Guide RNA
guuuggcagcagcuuaaaaa

SEQ ID NO: 7835 - RNA, 20 nt, Artificial Sequence
  Guide RNA
uaagcugcugccaaacuugc

SEQ ID NO: 7836 - RNA, 20 nt, Artificial Sequence
  Guide RNA
ucugcagcaaguuuggcagc

SEQ ID NO: 7837 - RNA, 20 nt, Artificial Sequence
  Guide RNA
ugcagcaaguuuggcagcag

SEQ ID NO: 7838 - RNA, 20 nt, Artificial Sequence
  Guide RNA
ugccaaacuugcugcagacu

SEQ ID NO: 7839 - RNA, 20 nt, Artificial Sequence
  Guide RNA
ugcugccaaacuugcugcag

SEQ ID NO: 7840 - RNA, 20 nt, Artificial Sequence
  Guide RNA
uuaagcugcugccaaacuug

SEQ ID NO: 7841 - RNA, 20 nt, Artificial Sequence
  Guide RNA
uugcggagagucugcagcaa

SEQ ID NO: 7842 - RNA, 20 nt, Artificial Sequence
  Guide RNA
uuggcagcagcuuaaaaagu

SEQ ID NO: 7843 - RNA, 20 nt, Artificial Sequence
  Guide RNA
uuuaagcugcugccaaacuu

SEQ ID NO: 7844 - RNA, 20 nt, Artificial Sequence
  Guide RNA
uuuggcagcagcuuaaaaag

SEQ ID NO: 7845 - RNA, 20 nt, Artificial Sequence
  Guide RNA
uuuuaagcugcugccaaacu

SEQ ID NO: 7846 - RNA, 20 nt, Artificial Sequence
  Guide RNA
uuuuuaagcugcugccaaac

SEQ ID NO: 7847 - RNA, 21 nt, Artificial Sequence
  Guide RNA
aacuuuuuaagcugcugccaa

SEQ ID NO: 7848 - RNA, 21 nt, Artificial Sequence
  Guide RNA
aagcugcugccaaacuugcug

SEQ ID NO: 7849 - RNA, 21 nt, Artificial Sequence
  Guide RNA
aaguuuggcagcagcuuaaaa

SEQ ID NO: 7850 - RNA, 21 nt, Artificial Sequence
  Guide RNA
acuuuuuaagcugcugccaaa

SEQ ID NO: 7851 - RNA, 21 nt, Artificial Sequence
  Guide RNA
agagucugcagcaaguuuggc

SEQ ID NO: 7852 - RNA, 21 nt, Artificial Sequence
  Guide RNA
agcaaguuuggcagcagcuua

SEQ ID NO: 7853 - RNA, 21 nt, Artificial Sequence
  Guide RNA
agcugcugccaaacuugcugc

SEQ ID NO: 7854 - RNA, 21 nt, Artificial Sequence
  Guide RNA
agucugcagcaaguuuggcag

SEQ ID NO: 7855 - RNA, 21 nt, Artificial Sequence
  Guide RNA
aguuuggcagcagcuuaaaaa

SEQ ID NO: 7856 - RNA, 21 nt, Artificial Sequence
  Guide RNA
caaacuugcugcagacucucc

SEQ ID NO: 7857 - RNA, 21 nt, Artificial Sequence
  Guide RNA
caacuuuuuaagcugcugcca

SEQ ID NO: 7858 - RNA, 21 nt, Artificial Sequence
  Guide RNA
caaguuuggcagcagcuuaaa

SEQ ID NO: 7859 - RNA, 21 nt, Artificial Sequence
  Guide RNA
cagcaaguuuggcagcagcuu

SEQ ID NO: 7860 - RNA, 21 nt, Artificial Sequence
  Guide RNA
ccaaacuugcugcagacucuc

SEQ ID NO: 7861 - RNA, 21 nt, Artificial Sequence
  Guide RNA
ccaacuuuuuaagcugcugcc

SEQ ID NO: 7862 - RNA, 21 nt, Artificial Sequence
  Guide RNA
cggagagucugcagcaaguuu

SEQ ID NO: 7863 - RNA, 21 nt, Artificial Sequence
  Guide RNA
cugcagcaaguuuggcagcag

SEQ ID NO: 7864 - RNA, 21 nt, Artificial Sequence
  Guide RNA
cugccaaacuugcugcagacu

SEQ ID NO: 7865 - RNA, 21 nt, Artificial Sequence
  Guide RNA
cugcugccaaacuugcugcag

SEQ ID NO: 7866 - RNA, 21 nt, Artificial Sequence
  Guide RNA
cuuuuuaagcugcugccaaac

SEQ ID NO: 7867 - RNA, 21 nt, Artificial Sequence
  Guide RNA
gagagucugcagcaaguuugg

SEQ ID NO: 7868 - RNA, 21 nt, Artificial Sequence
  Guide RNA
gagucugcagcaaguuuggca

SEQ ID NO: 7869 - RNA, 21 nt, Artificial Sequence
  Guide RNA
gcaaguuuggcagcagcuuaa

SEQ ID NO: 7870 - RNA, 21 nt, Artificial Sequence
  Guide RNA
gcagcaaguuuggcagcagcu

SEQ ID NO: 7871 - RNA, 21 nt, Artificial Sequence
  Guide RNA
gccaaacuugcugcagacucu

SEQ ID NO: 7872 - RNA, 21 nt, Artificial Sequence
  Guide RNA
gcugccaaacuugcugcagac

SEQ ID NO: 7873 - RNA, 21 nt, Artificial Sequence
  Guide RNA
gcugcugccaaacuugcugca

SEQ ID NO: 7874 - RNA, 21 nt, Artificial Sequence
  Guide RNA
ggagagucugcagcaaguuug

SEQ ID NO: 7875 - RNA, 21 nt, Artificial Sequence
  Guide RNA
gucugcagcaaguuuggcagc

SEQ ID NO: 7876 - RNA, 21 nt, Artificial Sequence
  Guide RNA
guugcggagagucugcagcaa

SEQ ID NO: 7877 - RNA, 21 nt, Artificial Sequence
  Guide RNA
guuuggcagcagcuuaaaaag

SEQ ID NO: 7878 - RNA, 21 nt, Artificial Sequence
  Guide RNA
uaagcugcugccaaacuugcu

SEQ ID NO: 7879 - RNA, 21 nt, Artificial Sequence
  Guide RNA
ucugcagcaaguuuggcagca

SEQ ID NO: 7880 - RNA, 21 nt, Artificial Sequence
  Guide RNA
ugcagcaaguuuggcagcagc

SEQ ID NO: 7881 - RNA, 21 nt, Artificial Sequence
  Guide RNA
ugccaaacuugcugcagacuc

SEQ ID NO: 7882 - RNA, 21 nt, Artificial Sequence
  Guide RNA
ugcugccaaacuugcugcaga

SEQ ID NO: 7883 - RNA, 21 nt, Artificial Sequence
  Guide RNA
uuaagcugcugccaaacuugc

SEQ ID NO: 7884 - RNA, 21 nt, Artificial Sequence
  Guide RNA
uuggcagcagcuuaaaaaguu

SEQ ID NO: 7885 - RNA, 21 nt, Artificial Sequence
  Guide RNA
uuuaagcugcugccaaacuug

SEQ ID NO: 7886 - RNA, 21 nt, Artificial Sequence
  Guide RNA
uuuggcagcagcuuaaaaagu

SEQ ID NO: 7887 - RNA, 21 nt, Artificial Sequence
  Guide RNA
uuuuaagcugcugccaaacuu

SEQ ID NO: 7888 - RNA, 21 nt, Artificial Sequence
  Guide RNA
uuuuuaagcugcugccaaacu

SEQ ID NO: 7889 - RNA, 22 nt, Artificial Sequence
  Guide RNA
aacuuuuuaagcugcugccaaa

SEQ ID NO: 7890 - RNA, 22 nt, Artificial Sequence
  Guide RNA
aagcugcugccaaacuugcugc

SEQ ID NO: 7891 - RNA, 22 nt, Artificial Sequence
  Guide RNA
aaguuuggcagcagcuuaaaaa

SEQ ID NO: 7892 - RNA, 22 nt, Artificial Sequence
  Guide RNA
acuuuuuaagcugcugccaaac

SEQ ID NO: 7893 - RNA, 22 nt, Artificial Sequence
  Guide RNA
agagucugcagcaaguuuggca

SEQ ID NO: 7894 - RNA, 22 nt, Artificial Sequence
  Guide RNA
agcaaguuuggcagcagcuuaa

SEQ ID NO: 7895 - RNA, 22 nt, Artificial Sequence
  Guide RNA
agcugcugccaaacuugcugca

SEQ ID NO: 7896 - RNA, 22 nt, Artificial Sequence
  Guide RNA
agucugcagcaaguuuggcagc

SEQ ID NO: 7897 - RNA, 22 nt, Artificial Sequence
  Guide RNA
aguugcggagagucugcagcaa

SEQ ID NO: 7898 - RNA, 22 nt, Artificial Sequence
  Guide RNA
aguuuggcagcagcuuaaaaag

SEQ ID NO: 7899 - RNA, 22 nt, Artificial Sequence
  Guide RNA
caaacuugcugcagacucuccg

SEQ ID NO: 7900 - RNA, 22 nt, Artificial Sequence
  Guide RNA
caacuuuuuaagcugcugccaa

SEQ ID NO: 7901 - RNA, 22 nt, Artificial Sequence
  Guide RNA
caaguuuggcagcagcuuaaaa

SEQ ID NO: 7902 - RNA, 22 nt, Artificial Sequence
  Guide RNA
cagcaaguuuggcagcagcuua

SEQ ID NO: 7903 - RNA, 22 nt, Artificial Sequence
  Guide RNA
ccaaacuugcugcagacucucc

SEQ ID NO: 7904 - RNA, 22 nt, Artificial Sequence
  Guide RNA
ccaacuuuuuaagcugcugcca

SEQ ID NO: 7905 - RNA, 22 nt, Artificial Sequence
  Guide RNA
cggagagucugcagcaaguuug

SEQ ID NO: 7906 - RNA, 22 nt, Artificial Sequence
  Guide RNA
cugcagcaaguuuggcagcagc

SEQ ID NO: 7907 - RNA, 22 nt, Artificial Sequence
  Guide RNA
cugccaaacuugcugcagacuc

SEQ ID NO: 7908 - RNA, 22 nt, Artificial Sequence
  Guide RNA
cugcugccaaacuugcugcaga

SEQ ID NO: 7909 - RNA, 22 nt, Artificial Sequence
  Guide RNA
cuuuuuaagcugcugccaaacu

SEQ ID NO: 7910 - RNA, 22 nt, Artificial Sequence
  Guide RNA
gagagucugcagcaaguuuggc

SEQ ID NO: 7911 - RNA, 22 nt, Artificial Sequence
  Guide RNA
gagucugcagcaaguuuggcag

SEQ ID NO: 7912 - RNA, 22 nt, Artificial Sequence
  Guide RNA
gcaaguuuggcagcagcuuaaa

SEQ ID NO: 7913 - RNA, 22 nt, Artificial Sequence
  Guide RNA
gcagcaaguuuggcagcagcuu

SEQ ID NO: 7914 - RNA, 22 nt, Artificial Sequence
  Guide RNA
gccaaacuugcugcagacucuc

SEQ ID NO: 7915 - RNA, 22 nt, Artificial Sequence
  Guide RNA
gcggagagucugcagcaaguuu

SEQ ID NO: 7916 - RNA, 22 nt, Artificial Sequence
  Guide RNA
gcugccaaacuugcugcagacu

SEQ ID NO: 7917 - RNA, 22 nt, Artificial Sequence
  Guide RNA
gcugcugccaaacuugcugcag

SEQ ID NO: 7918 - RNA, 22 nt, Artificial Sequence
  Guide RNA
ggagagucugcagcaaguuugg

SEQ ID NO: 7919 - RNA, 22 nt, Artificial Sequence
  Guide RNA
gucugcagcaaguuuggcagca

SEQ ID NO: 7920 - RNA, 22 nt, Artificial Sequence
  Guide RNA
guuuggcagcagcuuaaaaagu

SEQ ID NO: 7921 - RNA, 22 nt, Artificial Sequence
  Guide RNA
uaagcugcugccaaacuugcug

SEQ ID NO: 7922 - RNA, 22 nt, Artificial Sequence
  Guide RNA
uccaacuuuuuaagcugcugcc

SEQ ID NO: 7923 - RNA, 22 nt, Artificial Sequence
  Guide RNA
ucugcagcaaguuuggcagcag

SEQ ID NO: 7924 - RNA, 22 nt, Artificial Sequence
  Guide RNA
ugcagcaaguuuggcagcagcu

SEQ ID NO: 7925 - RNA, 22 nt, Artificial Sequence
  Guide RNA
ugccaaacuugcugcagacucu

SEQ ID NO: 7926 - RNA, 22 nt, Artificial Sequence
  Guide RNA
ugcugccaaacuugcugcagac

SEQ ID NO: 7927 - RNA, 22 nt, Artificial Sequence
  Guide RNA
uuaagcugcugccaaacuugcu

SEQ ID NO: 7928 - RNA, 22 nt, Artificial Sequence
  Guide RNA
uuggcagcagcuuaaaaaguug

SEQ ID NO: 7929 - RNA, 22 nt, Artificial Sequence
  Guide RNA
uuuaagcugcugccaaacuugc

SEQ ID NO: 7930 - RNA, 22 nt, Artificial Sequence
  Guide RNA
uuuggcagcagcuuaaaaaguu

SEQ ID NO: 7931 - RNA, 22 nt, Artificial Sequence
  Guide RNA
uuuuaagcugcugccaaacuug

SEQ ID NO: 7932 - RNA, 22 nt, Artificial Sequence
  Guide RNA
uuuuuaagcugcugccaaacuu

SEQ ID NO: 7933 - RNA, 20 nt, Artificial Sequence
  Guide RNA
aacuuuuuaagcugcugccc

SEQ ID NO: 7934 - RNA, 20 nt, Artificial Sequence
  Guide RNA
aagcugcugcccaacuugcu

SEQ ID NO: 7935 - RNA, 20 nt, Artificial Sequence
  Guide RNA
aaguugggcagcagcuuaaa

SEQ ID NO: 7936 - RNA, 20 nt, Artificial Sequence
  Guide RNA
acuuuuuaagcugcugccca

SEQ ID NO: 7937 - RNA, 20 nt, Artificial Sequence
  Guide RNA
agagucugcagcaaguuggg

SEQ ID NO: 7938 - RNA, 20 nt, Artificial Sequence
  Guide RNA
agcaaguugggcagcagcuu

SEQ ID NO: 7939 - RNA, 20 nt, Artificial Sequence
  Guide RNA
agcugcugcccaacuugcug

SEQ ID NO: 7940 - RNA, 20 nt, Artificial Sequence
  Guide RNA
agucugcagcaaguugggca

SEQ ID NO: 7941 - RNA, 20 nt, Artificial Sequence
  Guide RNA
aguugggcagcagcuuaaaa

SEQ ID NO: 7942 - RNA, 20 nt, Artificial Sequence
  Guide RNA
caaguugggcagcagcuuaa

SEQ ID NO: 7943 - RNA, 20 nt, Artificial Sequence
  Guide RNA
cagcaaguugggcagcagcu

SEQ ID NO: 7944 - RNA, 20 nt, Artificial Sequence
  Guide RNA
ccaacuugcugcagacucuc

SEQ ID NO: 7945 - RNA, 20 nt, Artificial Sequence
  Guide RNA
cccaacuugcugcagacucu

SEQ ID NO: 7946 - RNA, 20 nt, Artificial Sequence
  Guide RNA
cugcagcaaguugggcagca

SEQ ID NO: 7947 - RNA, 20 nt, Artificial Sequence
  Guide RNA
cugcccaacuugcugcagac

SEQ ID NO: 7948 - RNA, 20 nt, Artificial Sequence
  Guide RNA
cugcugcccaacuugcugca

SEQ ID NO: 7949 - RNA, 20 nt, Artificial Sequence
  Guide RNA
cuuuuuaagcugcugcccaa

SEQ ID NO: 7950 - RNA, 20 nt, Artificial Sequence
  Guide RNA
gagagucugcagcaaguugg

SEQ ID NO: 7951 - RNA, 20 nt, Artificial Sequence
  Guide RNA
gagucugcagcaaguugggc

SEQ ID NO: 7952 - RNA, 20 nt, Artificial Sequence
  Guide RNA
gcaaguugggcagcagcuua

SEQ ID NO: 7953 - RNA, 20 nt, Artificial Sequence
  Guide RNA
gcagcaaguugggcagcagc

SEQ ID NO: 7954 - RNA, 20 nt, Artificial Sequence
  Guide RNA
gcccaacuugcugcagacuc

SEQ ID NO: 7955 - RNA, 20 nt, Artificial Sequence
  Guide RNA
gcugcccaacuugcugcaga

SEQ ID NO: 7956 - RNA, 20 nt, Artificial Sequence
  Guide RNA
gcugcugcccaacuugcugc

SEQ ID NO: 7957 - RNA, 20 nt, Artificial Sequence
  Guide RNA
ggagagucugcagcaaguug

SEQ ID NO: 7958 - RNA, 20 nt, Artificial Sequence
  Guide RNA
gucugcagcaaguugggcag

SEQ ID NO: 7959 - RNA, 20 nt, Artificial Sequence
  Guide RNA
guugggcagcagcuuaaaaa

SEQ ID NO: 7960 - RNA, 20 nt, Artificial Sequence
  Guide RNA
uaagcugcugcccaacuugc

SEQ ID NO: 7961 - RNA, 20 nt, Artificial Sequence
  Guide RNA
ucugcagcaaguugggcagc

SEQ ID NO: 7962 - RNA, 20 nt, Artificial Sequence
  Guide RNA
ugcagcaaguugggcagcag

SEQ ID NO: 7963 - RNA, 20 nt, Artificial Sequence
  Guide RNA
ugcccaacuugcugcagacu

SEQ ID NO: 7964 - RNA, 20 nt, Artificial Sequence
  Guide RNA
ugcugcccaacuugcugcag

SEQ ID NO: 7965 - RNA, 20 nt, Artificial Sequence
  Guide RNA
ugggcagcagcuuaaaaagu

SEQ ID NO: 7966 - RNA, 20 nt, Artificial Sequence
  Guide RNA
uuaagcugcugcccaacuug

SEQ ID NO: 7967 - RNA, 20 nt, Artificial Sequence
  Guide RNA
uugggcagcagcuuaaaaag

SEQ ID NO: 7968 - RNA, 20 nt, Artificial Sequence
  Guide RNA
uuuaagcugcugcccaacuu

SEQ ID NO: 7969 - RNA, 20 nt, Artificial Sequence
  Guide RNA
uuuuaagcugcugcccaacu

SEQ ID NO: 7970 - RNA, 20 nt, Artificial Sequence
  Guide RNA
uuuuuaagcugcugcccaac

SEQ ID NO: 7971 - RNA, 21 nt, Artificial Sequence
  Guide RNA
aacuuuuuaagcugcugccca

SEQ ID NO: 7972 - RNA, 21 nt, Artificial Sequence
  Guide RNA
aagcugcugcccaacuugcug

SEQ ID NO: 7973 - RNA, 21 nt, Artificial Sequence
  Guide RNA
aaguugggcagcagcuuaaaa

SEQ ID NO: 7974 - RNA, 21 nt, Artificial Sequence
  Guide RNA
acuuuuuaagcugcugcccaa

SEQ ID NO: 7975 - RNA, 21 nt, Artificial Sequence
  Guide RNA
agagucugcagcaaguugggc

SEQ ID NO: 7976 - RNA, 21 nt, Artificial Sequence
  Guide RNA
agcaaguugggcagcagcuua

SEQ ID NO: 7977 - RNA, 21 nt, Artificial Sequence
  Guide RNA
agcugcugcccaacuugcugc

SEQ ID NO: 7978 - RNA, 21 nt, Artificial Sequence
  Guide RNA
agucugcagcaaguugggcag

SEQ ID NO: 7979 - RNA, 21 nt, Artificial Sequence
  Guide RNA
aguugggcagcagcuuaaaaa

SEQ ID NO: 7980 - RNA, 21 nt, Artificial Sequence
  Guide RNA
caacuuuuuaagcugcugccc

SEQ ID NO: 7981 - RNA, 21 nt, Artificial Sequence
  Guide RNA
caaguugggcagcagcuuaaa

SEQ ID NO: 7982 - RNA, 21 nt, Artificial Sequence
  Guide RNA
cagcaaguugggcagcagcuu

SEQ ID NO: 7983 - RNA, 21 nt, Artificial Sequence
  Guide RNA
ccaacuugcugcagacucucc

SEQ ID NO: 7984 - RNA, 21 nt, Artificial Sequence
  Guide RNA
cccaacuugcugcagacucuc

SEQ ID NO: 7985 - RNA, 21 nt, Artificial Sequence
  Guide RNA
cggagagucugcagcaaguug

SEQ ID NO: 7986 - RNA, 21 nt, Artificial Sequence
  Guide RNA
cugcagcaaguugggcagcag

SEQ ID NO: 7987 - RNA, 21 nt, Artificial Sequence
  Guide RNA
cugcccaacuugcugcagacu

SEQ ID NO: 7988 - RNA, 21 nt, Artificial Sequence
  Guide RNA
cugcugcccaacuugcugcag

SEQ ID NO: 7989 - RNA, 21 nt, Artificial Sequence
  Guide RNA
cuuuuuaagcugcugcccaac

SEQ ID NO: 7990 - RNA, 21 nt, Artificial Sequence
  Guide RNA
gagagucugcagcaaguuggg

SEQ ID NO: 7991 - RNA, 21 nt, Artificial Sequence
  Guide RNA
gagucugcagcaaguugggca

SEQ ID NO: 7992 - RNA, 21 nt, Artificial Sequence
  Guide RNA
gcaaguugggcagcagcuuaa

SEQ ID NO: 7993 - RNA, 21 nt, Artificial Sequence
  Guide RNA
gcagcaaguugggcagcagcu

SEQ ID NO: 7994 - RNA, 21 nt, Artificial Sequence
  Guide RNA
gcccaacuugcugcagacucu

SEQ ID NO: 7995 - RNA, 21 nt, Artificial Sequence
  Guide RNA
gcugcccaacuugcugcagac

SEQ ID NO: 7996 - RNA, 21 nt, Artificial Sequence
  Guide RNA
gcugcugcccaacuugcugca

SEQ ID NO: 7997 - RNA, 21 nt, Artificial Sequence
  Guide RNA
ggagagucugcagcaaguugg

SEQ ID NO: 7998 - RNA, 21 nt, Artificial Sequence
  Guide RNA
gucugcagcaaguugggcagc

SEQ ID NO: 7999 - RNA, 21 nt, Artificial Sequence
  Guide RNA
guugggcagcagcuuaaaaag

SEQ ID NO: 8000 - RNA, 21 nt, Artificial Sequence
  Guide RNA
uaagcugcugcccaacuugcu

SEQ ID NO: 8001 - RNA, 21 nt, Artificial Sequence
  Guide RNA
ucugcagcaaguugggcagca

SEQ ID NO: 8002 - RNA, 21 nt, Artificial Sequence
  Guide RNA
ugcagcaaguugggcagcagc

SEQ ID NO: 8003 - RNA, 21 nt, Artificial Sequence
  Guide RNA
ugcccaacuugcugcagacuc

SEQ ID NO: 8004 - RNA, 21 nt, Artificial Sequence
  Guide RNA
ugcugcccaacuugcugcaga

SEQ ID NO: 8005 - RNA, 21 nt, Artificial Sequence
  Guide RNA
ugggcagcagcuuaaaaaguu

SEQ ID NO: 8006 - RNA, 21 nt, Artificial Sequence
  Guide RNA
uuaagcugcugcccaacuugc

SEQ ID NO: 8007 - RNA, 21 nt, Artificial Sequence
  Guide RNA
uugggcagcagcuuaaaaagu

SEQ ID NO: 8008 - RNA, 21 nt, Artificial Sequence
  Guide RNA
uuuaagcugcugcccaacuug

SEQ ID NO: 8009 - RNA, 21 nt, Artificial Sequence
  Guide RNA
uuuuaagcugcugcccaacuu

SEQ ID NO: 8010 - RNA, 21 nt, Artificial Sequence
  Guide RNA
uuuuuaagcugcugcccaacu

SEQ ID NO: 8011 - RNA, 22 nt, Artificial Sequence
  Guide RNA
aacuuuuuaagcugcugcccaa

SEQ ID NO: 8012 - RNA, 22 nt, Artificial Sequence
  Guide RNA
aagcugcugcccaacuugcugc

SEQ ID NO: 8013 - RNA, 22 nt, Artificial Sequence
  Guide RNA
aaguugggcagcagcuuaaaaa

SEQ ID NO: 8014 - RNA, 22 nt, Artificial Sequence
  Guide RNA
acuuuuuaagcugcugcccaac

SEQ ID NO: 8015 - RNA, 22 nt, Artificial Sequence
  Guide RNA
agagucugcagcaaguugggca

SEQ ID NO: 8016 - RNA, 22 nt, Artificial Sequence
  Guide RNA
agcaaguugggcagcagcuuaa

SEQ ID NO: 8017 - RNA, 22 nt, Artificial Sequence
  Guide RNA
agcugcugcccaacuugcugca

SEQ ID NO: 8018 - RNA, 22 nt, Artificial Sequence
  Guide RNA
agucugcagcaaguugggcagc

SEQ ID NO: 8019 - RNA, 22 nt, Artificial Sequence
  Guide RNA
aguugggcagcagcuuaaaaag

SEQ ID NO: 8020 - RNA, 22 nt, Artificial Sequence
  Guide RNA
caacuuuuuaagcugcugccca

SEQ ID NO: 8021 - RNA, 22 nt, Artificial Sequence
  Guide RNA
caaguugggcagcagcuuaaaa

SEQ ID NO: 8022 - RNA, 22 nt, Artificial Sequence
  Guide RNA
cagcaaguugggcagcagcuua

SEQ ID NO: 8023 - RNA, 22 nt, Artificial Sequence
  Guide RNA
ccaacuugcugcagacucuccg

SEQ ID NO: 8024 - RNA, 22 nt, Artificial Sequence
  Guide RNA
ccaacuuuuuaagcugcugccc

SEQ ID NO: 8025 - RNA, 22 nt, Artificial Sequence
  Guide RNA
cccaacuugcugcagacucucc

SEQ ID NO: 8026 - RNA, 22 nt, Artificial Sequence
  Guide RNA
cggagagucugcagcaaguugg

SEQ ID NO: 8027 - RNA, 22 nt, Artificial Sequence
  Guide RNA
cugcagcaaguugggcagcagc

SEQ ID NO: 8028 - RNA, 22 nt, Artificial Sequence
  Guide RNA
cugcccaacuugcugcagacuc

SEQ ID NO: 8029 - RNA, 22 nt, Artificial Sequence
  Guide RNA
cugcugcccaacuugcugcaga

SEQ ID NO: 8030 - RNA, 22 nt, Artificial Sequence
  Guide RNA
cuuuuuaagcugcugcccaacu

SEQ ID NO: 8031 - RNA, 22 nt, Artificial Sequence
  Guide RNA
gagagucugcagcaaguugggc

SEQ ID NO: 8032 - RNA, 22 nt, Artificial Sequence
  Guide RNA
gagucugcagcaaguugggcag

SEQ ID NO: 8033 - RNA, 22 nt, Artificial Sequence
  Guide RNA
gcaaguugggcagcagcuuaaa

SEQ ID NO: 8034 - RNA, 22 nt, Artificial Sequence
  Guide RNA
gcagcaaguugggcagcagcuu

SEQ ID NO: 8035 - RNA, 22 nt, Artificial Sequence
  Guide RNA
gcccaacuugcugcagacucuc

SEQ ID NO: 8036 - RNA, 22 nt, Artificial Sequence
  Guide RNA
gcggagagucugcagcaaguug

SEQ ID NO: 8037 - RNA, 22 nt, Artificial Sequence
  Guide RNA
gcugcccaacuugcugcagacu

SEQ ID NO: 8038 - RNA, 22 nt, Artificial Sequence
  Guide RNA
gcugcugcccaacuugcugcag

SEQ ID NO: 8039 - RNA, 22 nt, Artificial Sequence
  Guide RNA
ggagagucugcagcaaguuggg

SEQ ID NO: 8040 - RNA, 22 nt, Artificial Sequence
  Guide RNA
gucugcagcaaguugggcagca

SEQ ID NO: 8041 - RNA, 22 nt, Artificial Sequence
  Guide RNA
guugggcagcagcuuaaaaagu

SEQ ID NO: 8042 - RNA, 22 nt, Artificial Sequence
  Guide RNA
uaagcugcugcccaacuugcug

SEQ ID NO: 8043 - RNA, 22 nt, Artificial Sequence
  Guide RNA
ucugcagcaaguugggcagcag

SEQ ID NO: 8044 - RNA, 22 nt, Artificial Sequence
  Guide RNA
ugcagcaaguugggcagcagcu

SEQ ID NO: 8045 - RNA, 22 nt, Artificial Sequence
  Guide RNA
ugcccaacuugcugcagacucu

SEQ ID NO: 8046 - RNA, 22 nt, Artificial Sequence
  Guide RNA
ugcugcccaacuugcugcagac

SEQ ID NO: 8047 - RNA, 22 nt, Artificial Sequence
  Guide RNA
ugggcagcagcuuaaaaaguug

SEQ ID NO: 8048 - RNA, 22 nt, Artificial Sequence
  Guide RNA
uuaagcugcugcccaacuugcu

SEQ ID NO: 8049 - RNA, 22 nt, Artificial Sequence
  Guide RNA
uugggcagcagcuuaaaaaguu

SEQ ID NO: 8050 - RNA, 22 nt, Artificial Sequence
  Guide RNA
uuuaagcugcugcccaacuugc

SEQ ID NO: 8051 - RNA, 22 nt, Artificial Sequence
  Guide RNA
uuuuaagcugcugcccaacuug

SEQ ID NO: 8052 - RNA, 22 nt, Artificial Sequence
  Guide RNA
uuuuuaagcugcugcccaacuu

SEQ ID NO: 8053 - RNA, 20 nt, Artificial Sequence
  Guide RNA
aacuugcggcagacucuccg

SEQ ID NO: 8054 - RNA, 20 nt, Artificial Sequence
  Guide RNA
aagcugcugccgaacuugcg

SEQ ID NO: 8055 - RNA, 20 nt, Artificial Sequence
  Guide RNA
acuauaguugcggagagucu

SEQ ID NO: 8056 - RNA, 20 nt, Artificial Sequence
  Guide RNA
acuugcggcagacucuccgc

SEQ ID NO: 8057 - RNA, 20 nt, Artificial Sequence
  Guide RNA
agagucugccgcaaguucgg

SEQ ID NO: 8058 - RNA, 20 nt, Artificial Sequence
  Guide RNA
agcugcugccgaacuugcgg

SEQ ID NO: 8059 - RNA, 20 nt, Artificial Sequence
  Guide RNA
agucugccgcaaguucggca

SEQ ID NO: 8060 - RNA, 20 nt, Artificial Sequence
  Guide RNA
aguugcggagagucugccgc

SEQ ID NO: 8061 - RNA, 20 nt, Artificial Sequence
  Guide RNA
auaguugcggagagucugcc

SEQ ID NO: 8062 - RNA, 20 nt, Artificial Sequence
  Guide RNA
cacuauaguugcggagaguc

SEQ ID NO: 8063 - RNA, 20 nt, Artificial Sequence
  Guide RNA
ccgaacuugcggcagacucu

SEQ ID NO: 8064 - RNA, 20 nt, Artificial Sequence
  Guide RNA
ccgcaaguucggcagcagcu

SEQ ID NO: 8065 - RNA, 20 nt, Artificial Sequence
  Guide RNA
cgaacuugcggcagacucuc

SEQ ID NO: 8066 - RNA, 20 nt, Artificial Sequence
  Guide RNA
cggagagucugccgcaaguu

SEQ ID NO: 8067 - RNA, 20 nt, Artificial Sequence
  Guide RNA
cggcagacucuccgcaacua

SEQ ID NO: 8068 - RNA, 20 nt, Artificial Sequence
  Guide RNA
cuauaguugcggagagucug

SEQ ID NO: 8069 - RNA, 20 nt, Artificial Sequence
  Guide RNA
cugccgaacuugcggcagac

SEQ ID NO: 8070 - RNA, 20 nt, Artificial Sequence
  Guide RNA
cugccgcaaguucggcagca

SEQ ID NO: 8071 - RNA, 20 nt, Artificial Sequence
  Guide RNA
cugcugccgaacuugcggca

SEQ ID NO: 8072 - RNA, 20 nt, Artificial Sequence
  Guide RNA
cuugcggcagacucuccgca

SEQ ID NO: 8073 - RNA, 20 nt, Artificial Sequence
  Guide RNA
gaacuugcggcagacucucc

SEQ ID NO: 8074 - RNA, 20 nt, Artificial Sequence
  Guide RNA
gagagucugccgcaaguucg

SEQ ID NO: 8075 - RNA, 20 nt, Artificial Sequence
  Guide RNA
gagucugccgcaaguucggc

SEQ ID NO: 8076 - RNA, 20 nt, Artificial Sequence
  Guide RNA
gccgaacuugcggcagacuc

SEQ ID NO: 8077 - RNA, 20 nt, Artificial Sequence
  Guide RNA
gccgcaaguucggcagcagc

SEQ ID NO: 8078 - RNA, 20 nt, Artificial Sequence
  Guide RNA
gcggagagucugccgcaagu

SEQ ID NO: 8079 - RNA, 20 nt, Artificial Sequence
  Guide RNA
gcggcagacucuccgcaacu

SEQ ID NO: 8080 - RNA, 20 nt, Artificial Sequence
  Guide RNA
gcugccgaacuugcggcaga

SEQ ID NO: 8081 - RNA, 20 nt, Artificial Sequence
  Guide RNA
gcugcugccgaacuugcggc

SEQ ID NO: 8082 - RNA, 20 nt, Artificial Sequence
  Guide RNA
ggagagucugccgcaaguuc

SEQ ID NO: 8083 - RNA, 20 nt, Artificial Sequence
  Guide RNA
gucugccgcaaguucggcag

SEQ ID NO: 8084 - RNA, 20 nt, Artificial Sequence
  Guide RNA
guugcggagagucugccgca

SEQ ID NO: 8085 - RNA, 20 nt, Artificial Sequence
  Guide RNA
uaagcugcugccgaacuugc

SEQ ID NO: 8086 - RNA, 20 nt, Artificial Sequence
  Guide RNA
uaguugcggagagucugccg

SEQ ID NO: 8087 - RNA, 20 nt, Artificial Sequence
  Guide RNA
uauaguugcggagagucugc

SEQ ID NO: 8088 - RNA, 20 nt, Artificial Sequence
  Guide RNA
ucugccgcaaguucggcagc

SEQ ID NO: 8089 - RNA, 20 nt, Artificial Sequence
  Guide RNA
ugccgaacuugcggcagacu

SEQ ID NO: 8090 - RNA, 20 nt, Artificial Sequence
  Guide RNA
ugccgcaaguucggcagcag

SEQ ID NO: 8091 - RNA, 20 nt, Artificial Sequence
  Guide RNA
ugcggagagucugccgcaag

SEQ ID NO: 8092 - RNA, 20 nt, Artificial Sequence
  Guide RNA
ugcggcagacucuccgcaac

SEQ ID NO: 8093 - RNA, 20 nt, Artificial Sequence
  Guide RNA
ugcugccgaacuugcggcag

SEQ ID NO: 8094 - RNA, 20 nt, Artificial Sequence
  Guide RNA
uuaagcugcugccgaacuug

SEQ ID NO: 8095 - RNA, 20 nt, Artificial Sequence
  Guide RNA
uugcggagagucugccgcaa

SEQ ID NO: 8096 - RNA, 20 nt, Artificial Sequence
  Guide RNA
uugcggcagacucuccgcaa

SEQ ID NO: 8097 - RNA, 20 nt, Artificial Sequence
  Guide RNA
uuuaagcugcugccgaacuu

SEQ ID NO: 8098 - RNA, 20 nt, Artificial Sequence
  Guide RNA
uuuuaagcugcugccgaacu

SEQ ID NO: 8099 - RNA, 21 nt, Artificial Sequence
  Guide RNA
aacuugcggcagacucuccgc

SEQ ID NO: 8100 - RNA, 21 nt, Artificial Sequence
  Guide RNA
aagcugcugccgaacuugcgg

SEQ ID NO: 8101 - RNA, 21 nt, Artificial Sequence
  Guide RNA
acuauaguugcggagagucug

SEQ ID NO: 8102 - RNA, 21 nt, Artificial Sequence
  Guide RNA
acuugcggcagacucuccgca

SEQ ID NO: 8103 - RNA, 21 nt, Artificial Sequence
  Guide RNA
agagucugccgcaaguucggc

SEQ ID NO: 8104 - RNA, 21 nt, Artificial Sequence
  Guide RNA
agcugcugccgaacuugcggc

SEQ ID NO: 8105 - RNA, 21 nt, Artificial Sequence
  Guide RNA
agucugccgcaaguucggcag

SEQ ID NO: 8106 - RNA, 21 nt, Artificial Sequence
  Guide RNA
aguugcggagagucugccgca

SEQ ID NO: 8107 - RNA, 21 nt, Artificial Sequence
  Guide RNA
auaguugcggagagucugccg

SEQ ID NO: 8108 - RNA, 21 nt, Artificial Sequence
  Guide RNA
cacuauaguugcggagagucu

SEQ ID NO: 8109 - RNA, 21 nt, Artificial Sequence
  Guide RNA
ccgaacuugcggcagacucuc

SEQ ID NO: 8110 - RNA, 21 nt, Artificial Sequence
  Guide RNA
ccgcaaguucggcagcagcuu

SEQ ID NO: 8111 - RNA, 21 nt, Artificial Sequence
  Guide RNA
cgaacuugcggcagacucucc

SEQ ID NO: 8112 - RNA, 21 nt, Artificial Sequence
  Guide RNA
cggagagucugccgcaaguuc

SEQ ID NO: 8113 - RNA, 21 nt, Artificial Sequence
  Guide RNA
cggcagacucuccgcaacuau

SEQ ID NO: 8114 - RNA, 21 nt, Artificial Sequence
  Guide RNA
cuauaguugcggagagucugc

SEQ ID NO: 8115 - RNA, 21 nt, Artificial Sequence
  Guide RNA
cugccgaacuugcggcagacu

SEQ ID NO: 8116 - RNA, 21 nt, Artificial Sequence
  Guide RNA
cugccgcaaguucggcagcag

SEQ ID NO: 8117 - RNA, 21 nt, Artificial Sequence
  Guide RNA
cugcugccgaacuugcggcag

SEQ ID NO: 8118 - RNA, 21 nt, Artificial Sequence
  Guide RNA
cuugcggcagacucuccgcaa

SEQ ID NO: 8119 - RNA, 21 nt, Artificial Sequence
  Guide RNA
gaacuugcggcagacucuccg

SEQ ID NO: 8120 - RNA, 21 nt, Artificial Sequence
  Guide RNA
gagagucugccgcaaguucgg

SEQ ID NO: 8121 - RNA, 21 nt, Artificial Sequence
  Guide RNA
gagucugccgcaaguucggca

SEQ ID NO: 8122 - RNA, 21 nt, Artificial Sequence
  Guide RNA
gccgaacuugcggcagacucu

SEQ ID NO: 8123 - RNA, 21 nt, Artificial Sequence
  Guide RNA
gccgcaaguucggcagcagcu

SEQ ID NO: 8124 - RNA, 21 nt, Artificial Sequence
  Guide RNA
gcggagagucugccgcaaguu

SEQ ID NO: 8125 - RNA, 21 nt, Artificial Sequence
  Guide RNA
gcggcagacucuccgcaacua

SEQ ID NO: 8126 - RNA, 21 nt, Artificial Sequence
  Guide RNA
gcugccgaacuugcggcagac

SEQ ID NO: 8127 - RNA, 21 nt, Artificial Sequence
  Guide RNA
gcugcugccgaacuugcggca

SEQ ID NO: 8128 - RNA, 21 nt, Artificial Sequence
  Guide RNA
ggagagucugccgcaaguucg

SEQ ID NO: 8129 - RNA, 21 nt, Artificial Sequence
  Guide RNA
gucugccgcaaguucggcagc

SEQ ID NO: 8130 - RNA, 21 nt, Artificial Sequence
  Guide RNA
guugcggagagucugccgcaa

SEQ ID NO: 8131 - RNA, 21 nt, Artificial Sequence
  Guide RNA
uaagcugcugccgaacuugcg

SEQ ID NO: 8132 - RNA, 21 nt, Artificial Sequence
  Guide RNA
uaguugcggagagucugccgc

SEQ ID NO: 8133 - RNA, 21 nt, Artificial Sequence
  Guide RNA
uauaguugcggagagucugcc

SEQ ID NO: 8134 - RNA, 21 nt, Artificial Sequence
  Guide RNA
ucacuauaguugcggagaguc

SEQ ID NO: 8135 - RNA, 21 nt, Artificial Sequence
  Guide RNA
ucugccgcaaguucggcagca

SEQ ID NO: 8136 - RNA, 21 nt, Artificial Sequence
  Guide RNA
ugccgaacuugcggcagacuc

SEQ ID NO: 8137 - RNA, 21 nt, Artificial Sequence
  Guide RNA
ugccgcaaguucggcagcagc

SEQ ID NO: 8138 - RNA, 21 nt, Artificial Sequence
  Guide RNA
ugcggagagucugccgcaagu

SEQ ID NO: 8139 - RNA, 21 nt, Artificial Sequence
  Guide RNA
ugcggcagacucuccgcaacu

SEQ ID NO: 8140 - RNA, 21 nt, Artificial Sequence
  Guide RNA
ugcugccgaacuugcggcaga

SEQ ID NO: 8141 - RNA, 21 nt, Artificial Sequence
  Guide RNA
uuaagcugcugccgaacuugc

SEQ ID NO: 8142 - RNA, 21 nt, Artificial Sequence
  Guide RNA
uugcggagagucugccgcaag

SEQ ID NO: 8143 - RNA, 21 nt, Artificial Sequence
  Guide RNA
uugcggcagacucuccgcaac

SEQ ID NO: 8144 - RNA, 21 nt, Artificial Sequence
  Guide RNA
uuuaagcugcugccgaacuug

SEQ ID NO: 8145 - RNA, 21 nt, Artificial Sequence
  Guide RNA
uuuuaagcugcugccgaacuu

SEQ ID NO: 8146 - RNA, 21 nt, Artificial Sequence
  Guide RNA
uuuuuaagcugcugccgaacu

SEQ ID NO: 8147 - RNA, 22 nt, Artificial Sequence
  Guide RNA
aacuugcggcagacucuccgca

SEQ ID NO: 8148 - RNA, 22 nt, Artificial Sequence
  Guide RNA
aagcugcugccgaacuugcggc

SEQ ID NO: 8149 - RNA, 22 nt, Artificial Sequence
  Guide RNA
acuauaguugcggagagucugc

SEQ ID NO: 8150 - RNA, 22 nt, Artificial Sequence
  Guide RNA
acuugcggcagacucuccgcaa

SEQ ID NO: 8151 - RNA, 22 nt, Artificial Sequence
  Guide RNA
agagucugccgcaaguucggca

SEQ ID NO: 8152 - RNA, 22 nt, Artificial Sequence
  Guide RNA
agcugcugccgaacuugcggca

SEQ ID NO: 8153 - RNA, 22 nt, Artificial Sequence
  Guide RNA
agucugccgcaaguucggcagc

SEQ ID NO: 8154 - RNA, 22 nt, Artificial Sequence
  Guide RNA
aguugcggagagucugccgcaa

SEQ ID NO: 8155 - RNA, 22 nt, Artificial Sequence
  Guide RNA
auaguugcggagagucugccgc

SEQ ID NO: 8156 - RNA, 22 nt, Artificial Sequence
  Guide RNA
cacuauaguugcggagagucug

SEQ ID NO: 8157 - RNA, 22 nt, Artificial Sequence
  Guide RNA
ccgaacuugcggcagacucucc

SEQ ID NO: 8158 - RNA, 22 nt, Artificial Sequence
  Guide RNA
ccgcaaguucggcagcagcuua

SEQ ID NO: 8159 - RNA, 22 nt, Artificial Sequence
  Guide RNA
cgaacuugcggcagacucuccg

SEQ ID NO: 8160 - RNA, 22 nt, Artificial Sequence
  Guide RNA
cggagagucugccgcaaguucg

SEQ ID NO: 8161 - RNA, 22 nt, Artificial Sequence
  Guide RNA
cggcagacucuccgcaacuaua

SEQ ID NO: 8162 - RNA, 22 nt, Artificial Sequence
  Guide RNA
cuauaguugcggagagucugcc

SEQ ID NO: 8163 - RNA, 22 nt, Artificial Sequence
  Guide RNA
cugccgaacuugcggcagacuc

SEQ ID NO: 8164 - RNA, 22 nt, Artificial Sequence
  Guide RNA
cugccgcaaguucggcagcagc

SEQ ID NO: 8165 - RNA, 22 nt, Artificial Sequence
  Guide RNA
cugcugccgaacuugcggcaga

SEQ ID NO: 8166 - RNA, 22 nt, Artificial Sequence
  Guide RNA
cuugcggcagacucuccgcaac

SEQ ID NO: 8167 - RNA, 22 nt, Artificial Sequence
  Guide RNA
cuuuuuaagcugcugccgaacu

SEQ ID NO: 8168 - RNA, 22 nt, Artificial Sequence
  Guide RNA
gaacuugcggcagacucuccgc

SEQ ID NO: 8169 - RNA, 22 nt, Artificial Sequence
  Guide RNA
gagagucugccgcaaguucggc

SEQ ID NO: 8170 - RNA, 22 nt, Artificial Sequence
  Guide RNA
gagucugccgcaaguucggcag

SEQ ID NO: 8171 - RNA, 22 nt, Artificial Sequence
  Guide RNA
gccgaacuugcggcagacucuc

SEQ ID NO: 8172 - RNA, 22 nt, Artificial Sequence
  Guide RNA
gccgcaaguucggcagcagcuu

SEQ ID NO: 8173 - RNA, 22 nt, Artificial Sequence
  Guide RNA
gcggagagucugccgcaaguuc

SEQ ID NO: 8174 - RNA, 22 nt, Artificial Sequence
  Guide RNA
gcggcagacucuccgcaacuau

SEQ ID NO: 8175 - RNA, 22 nt, Artificial Sequence
  Guide RNA
gcugccgaacuugcggcagacu

SEQ ID NO: 8176 - RNA, 22 nt, Artificial Sequence
  Guide RNA
gcugcugccgaacuugcggcag

SEQ ID NO: 8177 - RNA, 22 nt, Artificial Sequence
  Guide RNA
ggagagucugccgcaaguucgg

SEQ ID NO: 8178 - RNA, 22 nt, Artificial Sequence
  Guide RNA
gucugccgcaaguucggcagca

SEQ ID NO: 8179 - RNA, 22 nt, Artificial Sequence
  Guide RNA
guugcggagagucugccgcaag

SEQ ID NO: 8180 - RNA, 22 nt, Artificial Sequence
  Guide RNA
uaagcugcugccgaacuugcgg

SEQ ID NO: 8181 - RNA, 22 nt, Artificial Sequence
  Guide RNA
uaguugcggagagucugccgca

SEQ ID NO: 8182 - RNA, 22 nt, Artificial Sequence
  Guide RNA
uauaguugcggagagucugccg

SEQ ID NO: 8183 - RNA, 22 nt, Artificial Sequence
  Guide RNA
ucacuauaguugcggagagucu

SEQ ID NO: 8184 - RNA, 22 nt, Artificial Sequence
  Guide RNA
ucugccgcaaguucggcagcag

SEQ ID NO: 8185 - RNA, 22 nt, Artificial Sequence
  Guide RNA
ugccgaacuugcggcagacucu

SEQ ID NO: 8186 - RNA, 22 nt, Artificial Sequence
  Guide RNA
ugccgcaaguucggcagcagcu

SEQ ID NO: 8187 - RNA, 22 nt, Artificial Sequence
  Guide RNA
ugcggagagucugccgcaaguu

SEQ ID NO: 8188 - RNA, 22 nt, Artificial Sequence
  Guide RNA
ugcggcagacucuccgcaacua

SEQ ID NO: 8189 - RNA, 22 nt, Artificial Sequence
  Guide RNA
ugcugccgaacuugcggcagac

SEQ ID NO: 8190 - RNA, 22 nt, Artificial Sequence
  Guide RNA
uuaagcugcugccgaacuugcg

SEQ ID NO: 8191 - RNA, 22 nt, Artificial Sequence
  Guide RNA
uucacuauaguugcggagaguc

SEQ ID NO: 8192 - RNA, 22 nt, Artificial Sequence
  Guide RNA
uugcggagagucugccgcaagu

SEQ ID NO: 8193 - RNA, 22 nt, Artificial Sequence
  Guide RNA
uugcggcagacucuccgcaacu

SEQ ID NO: 8194 - RNA, 22 nt, Artificial Sequence
  Guide RNA
uuuaagcugcugccgaacuugc

SEQ ID NO: 8195 - RNA, 22 nt, Artificial Sequence
  Guide RNA
uuuuaagcugcugccgaacuug

SEQ ID NO: 8196 - RNA, 22 nt, Artificial Sequence
  Guide RNA
uuuuuaagcugcugccgaacuu

SEQ ID NO: 8197 - RNA, 20 nt, Artificial Sequence
  Guide RNA
aacuugcugcagacucucca

SEQ ID NO: 8198 - RNA, 20 nt, Artificial Sequence
  Guide RNA
acuauaguuguggagagucu

SEQ ID NO: 8199 - RNA, 20 nt, Artificial Sequence
  Guide RNA
acucuccacaacuauaguga

SEQ ID NO: 8200 - RNA, 20 nt, Artificial Sequence
  Guide RNA
acuugcugcagacucuccac

SEQ ID NO: 8201 - RNA, 20 nt, Artificial Sequence
  Guide RNA
agacucuccacaacuauagu

SEQ ID NO: 8202 - RNA, 20 nt, Artificial Sequence
  Guide RNA
agguucacuauaguugugga

SEQ ID NO: 8203 - RNA, 20 nt, Artificial Sequence
  Guide RNA
aguuguggagagucugcagc

SEQ ID NO: 8204 - RNA, 20 nt, Artificial Sequence
  Guide RNA
auaguuguggagagucugca

SEQ ID NO: 8205 - RNA, 20 nt, Artificial Sequence
  Guide RNA
cacaacuauagugaaccugg

SEQ ID NO: 8206 - RNA, 20 nt, Artificial Sequence
  Guide RNA
cacuauaguuguggagaguc

SEQ ID NO: 8207 - RNA, 20 nt, Artificial Sequence
  Guide RNA
cagacucuccacaacuauag

SEQ ID NO: 8208 - RNA, 20 nt, Artificial Sequence
  Guide RNA
cagguucacuauaguugugg

SEQ ID NO: 8209 - RNA, 20 nt, Artificial Sequence
  Guide RNA
ccacaacuauagugaaccug

SEQ ID NO: 8210 - RNA, 20 nt, Artificial Sequence
  Guide RNA
ccagguucacuauaguugug

SEQ ID NO: 8211 - RNA, 20 nt, Artificial Sequence
  Guide RNA
cccagguucacuauaguugu

SEQ ID NO: 8212 - RNA, 20 nt, Artificial Sequence
  Guide RNA
ccgaacuugcugcagacucu

SEQ ID NO: 8213 - RNA, 20 nt, Artificial Sequence
  Guide RNA
cgaacuugcugcagacucuc

SEQ ID NO: 8214 - RNA, 20 nt, Artificial Sequence
  Guide RNA
cuauaguuguggagagucug

SEQ ID NO: 8215 - RNA, 20 nt, Artificial Sequence
  Guide RNA
cuccacaacuauagugaacc

SEQ ID NO: 8216 - RNA, 20 nt, Artificial Sequence
  Guide RNA
cucuccacaacuauagugaa

SEQ ID NO: 8217 - RNA, 20 nt, Artificial Sequence
  Guide RNA
cugcagacucuccacaacua

SEQ ID NO: 8218 - RNA, 20 nt, Artificial Sequence
  Guide RNA
cuucccagguucacuauagu

SEQ ID NO: 8219 - RNA, 20 nt, Artificial Sequence
  Guide RNA
cuugcugcagacucuccaca

SEQ ID NO: 8220 - RNA, 20 nt, Artificial Sequence
  Guide RNA
gaacuugcugcagacucucc

SEQ ID NO: 8221 - RNA, 20 nt, Artificial Sequence
  Guide RNA
gacucuccacaacuauagug

SEQ ID NO: 8222 - RNA, 20 nt, Artificial Sequence
  Guide RNA
gcagacucuccacaacuaua

SEQ ID NO: 8223 - RNA, 20 nt, Artificial Sequence
  Guide RNA
gccgaacuugcugcagacuc

SEQ ID NO: 8224 - RNA, 20 nt, Artificial Sequence
  Guide RNA
gcugcagacucuccacaacu

SEQ ID NO: 8225 - RNA, 20 nt, Artificial Sequence
  Guide RNA
gguucacuauaguuguggag

SEQ ID NO: 8226 - RNA, 20 nt, Artificial Sequence
  Guide RNA
guggagagucugcagcaagu

SEQ ID NO: 8227 - RNA, 20 nt, Artificial Sequence
  Guide RNA
guucacuauaguuguggaga

SEQ ID NO: 8228 - RNA, 20 nt, Artificial Sequence
  Guide RNA
guuguggagagucugcagca

SEQ ID NO: 8229 - RNA, 20 nt, Artificial Sequence
  Guide RNA
uaguuguggagagucugcag

SEQ ID NO: 8230 - RNA, 20 nt, Artificial Sequence
  Guide RNA
uauaguuguggagagucugc

SEQ ID NO: 8231 - RNA, 20 nt, Artificial Sequence
  Guide RNA
ucacuauaguuguggagagu

SEQ ID NO: 8232 - RNA, 20 nt, Artificial Sequence
  Guide RNA
uccacaacuauagugaaccu

SEQ ID NO: 8233 - RNA, 20 nt, Artificial Sequence
  Guide RNA
ucccagguucacuauaguug

SEQ ID NO: 8234 - RNA, 20 nt, Artificial Sequence
  Guide RNA
ucuccacaacuauagugaac

SEQ ID NO: 8235 - RNA, 20 nt, Artificial Sequence
  Guide RNA
ucuucccagguucacuauag

SEQ ID NO: 8236 - RNA, 20 nt, Artificial Sequence
  Guide RNA
ugcagacucuccacaacuau

SEQ ID NO: 8237 - RNA, 20 nt, Artificial Sequence
  Guide RNA
ugcugcagacucuccacaac

SEQ ID NO: 8238 - RNA, 20 nt, Artificial Sequence
  Guide RNA
uguggagagucugcagcaag

SEQ ID NO: 8239 - RNA, 20 nt, Artificial Sequence
  Guide RNA
uucacuauaguuguggagag

SEQ ID NO: 8240 - RNA, 20 nt, Artificial Sequence
  Guide RNA
uucccagguucacuauaguu

SEQ ID NO: 8241 - RNA, 20 nt, Artificial Sequence
  Guide RNA
uugcugcagacucuccacaa

SEQ ID NO: 8242 - RNA, 20 nt, Artificial Sequence
  Guide RNA
uuguggagagucugcagcaa

SEQ ID NO: 8243 - RNA, 21 nt, Artificial Sequence
  Guide RNA
aacuugcugcagacucuccac

SEQ ID NO: 8244 - RNA, 21 nt, Artificial Sequence
  Guide RNA
acuauaguuguggagagucug

SEQ ID NO: 8245 - RNA, 21 nt, Artificial Sequence
  Guide RNA
acucuccacaacuauagugaa

SEQ ID NO: 8246 - RNA, 21 nt, Artificial Sequence
  Guide RNA
acuugcugcagacucuccaca

SEQ ID NO: 8247 - RNA, 21 nt, Artificial Sequence
  Guide RNA
agacucuccacaacuauagug

SEQ ID NO: 8248 - RNA, 21 nt, Artificial Sequence
  Guide RNA
agguucacuauaguuguggag

SEQ ID NO: 8249 - RNA, 21 nt, Artificial Sequence
  Guide RNA
aguuguggagagucugcagca

SEQ ID NO: 8250 - RNA, 21 nt, Artificial Sequence
  Guide RNA
auaguuguggagagucugcag

SEQ ID NO: 8251 - RNA, 21 nt, Artificial Sequence
  Guide RNA
cacaacuauagugaaccuggg

SEQ ID NO: 8252 - RNA, 21 nt, Artificial Sequence
  Guide RNA
cacuauaguuguggagagucu

SEQ ID NO: 8253 - RNA, 21 nt, Artificial Sequence
  Guide RNA
cagacucuccacaacuauagu

SEQ ID NO: 8254 - RNA, 21 nt, Artificial Sequence
  Guide RNA
cagguucacuauaguugugga

SEQ ID NO: 8255 - RNA, 21 nt, Artificial Sequence
  Guide RNA
ccacaacuauagugaaccugg

SEQ ID NO: 8256 - RNA, 21 nt, Artificial Sequence
  Guide RNA
ccagguucacuauaguugugg

SEQ ID NO: 8257 - RNA, 21 nt, Artificial Sequence
  Guide RNA
cccagguucacuauaguugug

SEQ ID NO: 8258 - RNA, 21 nt, Artificial Sequence
  Guide RNA
ccgaacuugcugcagacucuc

SEQ ID NO: 8259 - RNA, 21 nt, Artificial Sequence
  Guide RNA
cgaacuugcugcagacucucc

SEQ ID NO: 8260 - RNA, 21 nt, Artificial Sequence
  Guide RNA
cuauaguuguggagagucugc

SEQ ID NO: 8261 - RNA, 21 nt, Artificial Sequence
  Guide RNA
cuccacaacuauagugaaccu

SEQ ID NO: 8262 - RNA, 21 nt, Artificial Sequence
  Guide RNA
cucuccacaacuauagugaac

SEQ ID NO: 8263 - RNA, 21 nt, Artificial Sequence
  Guide RNA
cugcagacucuccacaacuau

SEQ ID NO: 8264 - RNA, 21 nt, Artificial Sequence
  Guide RNA
cuucccagguucacuauaguu

SEQ ID NO: 8265 - RNA, 21 nt, Artificial Sequence
  Guide RNA
cuugcugcagacucuccacaa

SEQ ID NO: 8266 - RNA, 21 nt, Artificial Sequence
  Guide RNA
gaacuugcugcagacucucca

SEQ ID NO: 8267 - RNA, 21 nt, Artificial Sequence
  Guide RNA
gacucuccacaacuauaguga

SEQ ID NO: 8268 - RNA, 21 nt, Artificial Sequence
  Guide RNA
gcagacucuccacaacuauag

SEQ ID NO: 8269 - RNA, 21 nt, Artificial Sequence
  Guide RNA
gccgaacuugcugcagacucu

SEQ ID NO: 8270 - RNA, 21 nt, Artificial Sequence
  Guide RNA
gcugcagacucuccacaacua

SEQ ID NO: 8271 - RNA, 21 nt, Artificial Sequence
  Guide RNA
gguucacuauaguuguggaga

SEQ ID NO: 8272 - RNA, 21 nt, Artificial Sequence
  Guide RNA
gucuucccagguucacuauag

SEQ ID NO: 8273 - RNA, 21 nt, Artificial Sequence
  Guide RNA
guggagagucugcagcaaguu

SEQ ID NO: 8274 - RNA, 21 nt, Artificial Sequence
  Guide RNA
guucacuauaguuguggagag

SEQ ID NO: 8275 - RNA, 21 nt, Artificial Sequence
  Guide RNA
guuguggagagucugcagcaa

SEQ ID NO: 8276 - RNA, 21 nt, Artificial Sequence
  Guide RNA
uaguuguggagagucugcagc

SEQ ID NO: 8277 - RNA, 21 nt, Artificial Sequence
  Guide RNA
uauaguuguggagagucugca

SEQ ID NO: 8278 - RNA, 21 nt, Artificial Sequence
  Guide RNA
ucacuauaguuguggagaguc

SEQ ID NO: 8279 - RNA, 21 nt, Artificial Sequence
  Guide RNA
uccacaacuauagugaaccug

SEQ ID NO: 8280 - RNA, 21 nt, Artificial Sequence
  Guide RNA
ucccagguucacuauaguugu

SEQ ID NO: 8281 - RNA, 21 nt, Artificial Sequence
  Guide RNA
ucuccacaacuauagugaacc

SEQ ID NO: 8282 - RNA, 21 nt, Artificial Sequence
  Guide RNA
ucuucccagguucacuauagu

SEQ ID NO: 8283 - RNA, 21 nt, Artificial Sequence
  Guide RNA
ugcagacucuccacaacuaua

SEQ ID NO: 8284 - RNA, 21 nt, Artificial Sequence
  Guide RNA
ugccgaacuugcugcagacuc

SEQ ID NO: 8285 - RNA, 21 nt, Artificial Sequence
  Guide RNA
ugcugcagacucuccacaacu

SEQ ID NO: 8286 - RNA, 21 nt, Artificial Sequence
  Guide RNA
uguggagagucugcagcaagu

SEQ ID NO: 8287 - RNA, 21 nt, Artificial Sequence
  Guide RNA
uucacuauaguuguggagagu

SEQ ID NO: 8288 - RNA, 21 nt, Artificial Sequence
  Guide RNA
uucccagguucacuauaguug

SEQ ID NO: 8289 - RNA, 21 nt, Artificial Sequence
  Guide RNA
uugcugcagacucuccacaac

SEQ ID NO: 8290 - RNA, 21 nt, Artificial Sequence
  Guide RNA
uuguggagagucugcagcaag

SEQ ID NO: 8291 - RNA, 22 nt, Artificial Sequence
  Guide RNA
aacuugcugcagacucuccaca

SEQ ID NO: 8292 - RNA, 22 nt, Artificial Sequence
  Guide RNA
acuauaguuguggagagucugc

SEQ ID NO: 8293 - RNA, 22 nt, Artificial Sequence
  Guide RNA
acucuccacaacuauagugaac

SEQ ID NO: 8294 - RNA, 22 nt, Artificial Sequence
  Guide RNA
acuugcugcagacucuccacaa

SEQ ID NO: 8295 - RNA, 22 nt, Artificial Sequence
  Guide RNA
agacucuccacaacuauaguga

SEQ ID NO: 8296 - RNA, 22 nt, Artificial Sequence
  Guide RNA
agguucacuauaguuguggaga

SEQ ID NO: 8297 - RNA, 22 nt, Artificial Sequence
  Guide RNA
aguuguggagagucugcagcaa

SEQ ID NO: 8298 - RNA, 22 nt, Artificial Sequence
  Guide RNA
auaguuguggagagucugcagc

SEQ ID NO: 8299 - RNA, 22 nt, Artificial Sequence
  Guide RNA
cacaacuauagugaaccuggga

SEQ ID NO: 8300 - RNA, 22 nt, Artificial Sequence
  Guide RNA
cacuauaguuguggagagucug

SEQ ID NO: 8301 - RNA, 22 nt, Artificial Sequence
  Guide RNA
cagacucuccacaacuauagug

SEQ ID NO: 8302 - RNA, 22 nt, Artificial Sequence
  Guide RNA
cagguucacuauaguuguggag

SEQ ID NO: 8303 - RNA, 22 nt, Artificial Sequence
  Guide RNA
ccacaacuauagugaaccuggg

SEQ ID NO: 8304 - RNA, 22 nt, Artificial Sequence
  Guide RNA
ccagguucacuauaguugugga

SEQ ID NO: 8305 - RNA, 22 nt, Artificial Sequence
  Guide RNA
cccagguucacuauaguugugg

SEQ ID NO: 8306 - RNA, 22 nt, Artificial Sequence
  Guide RNA
ccgaacuugcugcagacucucc

SEQ ID NO: 8307 - RNA, 22 nt, Artificial Sequence
  Guide RNA
cgaacuugcugcagacucucca

SEQ ID NO: 8308 - RNA, 22 nt, Artificial Sequence
  Guide RNA
cuauaguuguggagagucugca

SEQ ID NO: 8309 - RNA, 22 nt, Artificial Sequence
  Guide RNA
cuccacaacuauagugaaccug

SEQ ID NO: 8310 - RNA, 22 nt, Artificial Sequence
  Guide RNA
cucuccacaacuauagugaacc

SEQ ID NO: 8311 - RNA, 22 nt, Artificial Sequence
  Guide RNA
cugcagacucuccacaacuaua

SEQ ID NO: 8312 - RNA, 22 nt, Artificial Sequence
  Guide RNA
cugccgaacuugcugcagacuc

SEQ ID NO: 8313 - RNA, 22 nt, Artificial Sequence
  Guide RNA
cuucccagguucacuauaguug

SEQ ID NO: 8314 - RNA, 22 nt, Artificial Sequence
  Guide RNA
cuugcugcagacucuccacaac

SEQ ID NO: 8315 - RNA, 22 nt, Artificial Sequence
  Guide RNA
gaacuugcugcagacucuccac

SEQ ID NO: 8316 - RNA, 22 nt, Artificial Sequence
  Guide RNA
gacucuccacaacuauagugaa

SEQ ID NO: 8317 - RNA, 22 nt, Artificial Sequence
  Guide RNA
gcagacucuccacaacuauagu

SEQ ID NO: 8318 - RNA, 22 nt, Artificial Sequence
  Guide RNA
gccgaacuugcugcagacucuc

SEQ ID NO: 8319 - RNA, 22 nt, Artificial Sequence
  Guide RNA
gcugcagacucuccacaacuau

SEQ ID NO: 8320 - RNA, 22 nt, Artificial Sequence
  Guide RNA
gguucacuauaguuguggagag

SEQ ID NO: 8321 - RNA, 22 nt, Artificial Sequence
  Guide RNA
gucuucccagguucacuauagu

SEQ ID NO: 8322 - RNA, 22 nt, Artificial Sequence
  Guide RNA
guggagagucugcagcaaguuc

SEQ ID NO: 8323 - RNA, 22 nt, Artificial Sequence
  Guide RNA
guucacuauaguuguggagagu

SEQ ID NO: 8324 - RNA, 22 nt, Artificial Sequence
  Guide RNA
guuguggagagucugcagcaag

SEQ ID NO: 8325 - RNA, 22 nt, Artificial Sequence
  Guide RNA
uaguuguggagagucugcagca

SEQ ID NO: 8326 - RNA, 22 nt, Artificial Sequence
  Guide RNA
uauaguuguggagagucugcag

SEQ ID NO: 8327 - RNA, 22 nt, Artificial Sequence
  Guide RNA
ucacuauaguuguggagagucu

SEQ ID NO: 8328 - RNA, 22 nt, Artificial Sequence
  Guide RNA
uccacaacuauagugaaccugg

SEQ ID NO: 8329 - RNA, 22 nt, Artificial Sequence
  Guide RNA
ucccagguucacuauaguugug

SEQ ID NO: 8330 - RNA, 22 nt, Artificial Sequence
  Guide RNA
ucuccacaacuauagugaaccu

SEQ ID NO: 8331 - RNA, 22 nt, Artificial Sequence
  Guide RNA
ucuucccagguucacuauaguu

SEQ ID NO: 8332 - RNA, 22 nt, Artificial Sequence
  Guide RNA
ugcagacucuccacaacuauag

SEQ ID NO: 8333 - RNA, 22 nt, Artificial Sequence
  Guide RNA
ugccgaacuugcugcagacucu

SEQ ID NO: 8334 - RNA, 22 nt, Artificial Sequence
  Guide RNA
ugcugcagacucuccacaacua

SEQ ID NO: 8335 - RNA, 22 nt, Artificial Sequence
  Guide RNA
ugucuucccagguucacuauag

SEQ ID NO: 8336 - RNA, 22 nt, Artificial Sequence
  Guide RNA
uguggagagucugcagcaaguu

SEQ ID NO: 8337 - RNA, 22 nt, Artificial Sequence
  Guide RNA
uucacuauaguuguggagaguc

SEQ ID NO: 8338 - RNA, 22 nt, Artificial Sequence
  Guide RNA
uucccagguucacuauaguugu

SEQ ID NO: 8339 - RNA, 22 nt, Artificial Sequence
  Guide RNA
uugcugcagacucuccacaacu

SEQ ID NO: 8340 - RNA, 22 nt, Artificial Sequence
  Guide RNA
uuguggagagucugcagcaagu

SEQ ID NO: 8341 - RNA, 20 nt, Artificial Sequence
  Guide RNA
aacuugcugcagacucuccg

SEQ ID NO: 8342 - RNA, 20 nt, Artificial Sequence
  Guide RNA
aauuauagugaaccugggaa

SEQ ID NO: 8343 - RNA, 20 nt, Artificial Sequence
  Guide RNA
aauugcggagagucugcagc

SEQ ID NO: 8344 - RNA, 20 nt, Artificial Sequence
  Guide RNA
acuauaauugcggagagucu

SEQ ID NO: 8345 - RNA, 20 nt, Artificial Sequence
  Guide RNA
acucuccgcaauuauaguga

SEQ ID NO: 8346 - RNA, 20 nt, Artificial Sequence
  Guide RNA
acuugcugcagacucuccgc

SEQ ID NO: 8347 - RNA, 20 nt, Artificial Sequence
  Guide RNA
agacucuccgcaauuauagu

SEQ ID NO: 8348 - RNA, 20 nt, Artificial Sequence
  Guide RNA
agguucacuauaauugcgga

SEQ ID NO: 8349 - RNA, 20 nt, Artificial Sequence
  Guide RNA
auaauugcggagagucugca

SEQ ID NO: 8350 - RNA, 20 nt, Artificial Sequence
  Guide RNA
auuauagugaaccugggaag

SEQ ID NO: 8351 - RNA, 20 nt, Artificial Sequence
  Guide RNA
caauuauagugaaccuggga

SEQ ID NO: 8352 - RNA, 20 nt, Artificial Sequence
  Guide RNA
cacuauaauugcggagaguc

SEQ ID NO: 8353 - RNA, 20 nt, Artificial Sequence
  Guide RNA
cagacucuccgcaauuauag

SEQ ID NO: 8354 - RNA, 20 nt, Artificial Sequence
  Guide RNA
cagguucacuauaauugcgg

SEQ ID NO: 8355 - RNA, 20 nt, Artificial Sequence
  Guide RNA
ccagguucacuauaauugcg

SEQ ID NO: 8356 - RNA, 20 nt, Artificial Sequence
  Guide RNA
cccagguucacuauaauugc

SEQ ID NO: 8357 - RNA, 20 nt, Artificial Sequence
  Guide RNA
ccgcaauuauagugaaccug

SEQ ID NO: 8358 - RNA, 20 nt, Artificial Sequence
  Guide RNA
cgcaauuauagugaaccugg

SEQ ID NO: 8359 - RNA, 20 nt, Artificial Sequence
  Guide RNA
cuauaauugcggagagucug

SEQ ID NO: 8360 - RNA, 20 nt, Artificial Sequence
  Guide RNA
cuccgcaauuauagugaacc

SEQ ID NO: 8361 - RNA, 20 nt, Artificial Sequence
  Guide RNA
cucuccgcaauuauagugaa

SEQ ID NO: 8362 - RNA, 20 nt, Artificial Sequence
  Guide RNA
cugcagacucuccgcaauua

SEQ ID NO: 8363 - RNA, 20 nt, Artificial Sequence
  Guide RNA
cuucccagguucacuauaau

SEQ ID NO: 8364 - RNA, 20 nt, Artificial Sequence
  Guide RNA
cuugcugcagacucuccgca

SEQ ID NO: 8365 - RNA, 20 nt, Artificial Sequence
  Guide RNA
gacucuccgcaauuauagug

SEQ ID NO: 8366 - RNA, 20 nt, Artificial Sequence
  Guide RNA
gcaauuauagugaaccuggg

SEQ ID NO: 8367 - RNA, 20 nt, Artificial Sequence
  Guide RNA
gcagacucuccgcaauuaua

SEQ ID NO: 8368 - RNA, 20 nt, Artificial Sequence
  Guide RNA
gcugcagacucuccgcaauu

SEQ ID NO: 8369 - RNA, 20 nt, Artificial Sequence
  Guide RNA
gguucacuauaauugcggag

SEQ ID NO: 8370 - RNA, 20 nt, Artificial Sequence
  Guide RNA
gucuucccagguucacuaua

SEQ ID NO: 8371 - RNA, 20 nt, Artificial Sequence
  Guide RNA
gugucuucccagguucacua

SEQ ID NO: 8372 - RNA, 20 nt, Artificial Sequence
  Guide RNA
guucacuauaauugcggaga

SEQ ID NO: 8373 - RNA, 20 nt, Artificial Sequence
  Guide RNA
uaauugcggagagucugcag

SEQ ID NO: 8374 - RNA, 20 nt, Artificial Sequence
  Guide RNA
uauaauugcggagagucugc

SEQ ID NO: 8375 - RNA, 20 nt, Artificial Sequence
  Guide RNA
ucacuauaauugcggagagu

SEQ ID NO: 8376 - RNA, 20 nt, Artificial Sequence
  Guide RNA
ucccagguucacuauaauug

SEQ ID NO: 8377 - RNA, 20 nt, Artificial Sequence
  Guide RNA
uccgcaauuauagugaaccu

SEQ ID NO: 8378 - RNA, 20 nt, Artificial Sequence
  Guide RNA
ucuccgcaauuauagugaac

SEQ ID NO: 8379 - RNA, 20 nt, Artificial Sequence
  Guide RNA
ucuucccagguucacuauaa

SEQ ID NO: 8380 - RNA, 20 nt, Artificial Sequence
  Guide RNA
ugcagacucuccgcaauuau

SEQ ID NO: 8381 - RNA, 20 nt, Artificial Sequence
  Guide RNA
ugcugcagacucuccgcaau

SEQ ID NO: 8382 - RNA, 20 nt, Artificial Sequence
  Guide RNA
ugucuucccagguucacuau

SEQ ID NO: 8383 - RNA, 20 nt, Artificial Sequence
  Guide RNA
ugugucuucccagguucacu

SEQ ID NO: 8384 - RNA, 20 nt, Artificial Sequence
  Guide RNA
uucacuauaauugcggagag

SEQ ID NO: 8385 - RNA, 20 nt, Artificial Sequence
  Guide RNA
uucccagguucacuauaauu

SEQ ID NO: 8386 - RNA, 20 nt, Artificial Sequence
  Guide RNA
uugcugcagacucuccgcaa

SEQ ID NO: 8387 - RNA, 21 nt, Artificial Sequence
  Guide RNA
aacuugcugcagacucuccgc

SEQ ID NO: 8388 - RNA, 21 nt, Artificial Sequence
  Guide RNA
aauuauagugaaccugggaag

SEQ ID NO: 8389 - RNA, 21 nt, Artificial Sequence
  Guide RNA
aauugcggagagucugcagca

SEQ ID NO: 8390 - RNA, 21 nt, Artificial Sequence
  Guide RNA
acuauaauugcggagagucug

SEQ ID NO: 8391 - RNA, 21 nt, Artificial Sequence
  Guide RNA
acucuccgcaauuauagugaa

SEQ ID NO: 8392 - RNA, 21 nt, Artificial Sequence
  Guide RNA
acuugcugcagacucuccgca

SEQ ID NO: 8393 - RNA, 21 nt, Artificial Sequence
  Guide RNA
agacucuccgcaauuauagug

SEQ ID NO: 8394 - RNA, 21 nt, Artificial Sequence
  Guide RNA
agguucacuauaauugcggag

SEQ ID NO: 8395 - RNA, 21 nt, Artificial Sequence
  Guide RNA
auaauugcggagagucugcag

SEQ ID NO: 8396 - RNA, 21 nt, Artificial Sequence
  Guide RNA
auuauagugaaccugggaaga

SEQ ID NO: 8397 - RNA, 21 nt, Artificial Sequence
  Guide RNA
caauuauagugaaccugggaa

SEQ ID NO: 8398 - RNA, 21 nt, Artificial Sequence
  Guide RNA
cacuauaauugcggagagucu

SEQ ID NO: 8399 - RNA, 21 nt, Artificial Sequence
  Guide RNA
cagacucuccgcaauuauagu

SEQ ID NO: 8400 - RNA, 21 nt, Artificial Sequence
  Guide RNA
cagguucacuauaauugcgga

SEQ ID NO: 8401 - RNA, 21 nt, Artificial Sequence
  Guide RNA
ccagguucacuauaauugcgg

SEQ ID NO: 8402 - RNA, 21 nt, Artificial Sequence
  Guide RNA
cccagguucacuauaauugcg

SEQ ID NO: 8403 - RNA, 21 nt, Artificial Sequence
  Guide RNA
ccgcaauuauagugaaccugg

SEQ ID NO: 8404 - RNA, 21 nt, Artificial Sequence
  Guide RNA
cgcaauuauagugaaccuggg

SEQ ID NO: 8405 - RNA, 21 nt, Artificial Sequence
  Guide RNA
cuauaauugcggagagucugc

SEQ ID NO: 8406 - RNA, 21 nt, Artificial Sequence
  Guide RNA
cuccgcaauuauagugaaccu

SEQ ID NO: 8407 - RNA, 21 nt, Artificial Sequence
  Guide RNA
cucuccgcaauuauagugaac

SEQ ID NO: 8408 - RNA, 21 nt, Artificial Sequence
  Guide RNA
cugcagacucuccgcaauuau

SEQ ID NO: 8409 - RNA, 21 nt, Artificial Sequence
  Guide RNA
cuucccagguucacuauaauu

SEQ ID NO: 8410 - RNA, 21 nt, Artificial Sequence
  Guide RNA
cuugcugcagacucuccgcaa

SEQ ID NO: 8411 - RNA, 21 nt, Artificial Sequence
  Guide RNA
gaacuugcugcagacucuccg

SEQ ID NO: 8412 - RNA, 21 nt, Artificial Sequence
  Guide RNA
gacucuccgcaauuauaguga

SEQ ID NO: 8413 - RNA, 21 nt, Artificial Sequence
  Guide RNA
gcaauuauagugaaccuggga

SEQ ID NO: 8414 - RNA, 21 nt, Artificial Sequence
  Guide RNA
gcagacucuccgcaauuauag

SEQ ID NO: 8415 - RNA, 21 nt, Artificial Sequence
  Guide RNA
gcugcagacucuccgcaauua

SEQ ID NO: 8416 - RNA, 21 nt, Artificial Sequence
  Guide RNA
gguucacuauaauugcggaga

SEQ ID NO: 8417 - RNA, 21 nt, Artificial Sequence
  Guide RNA
gucuucccagguucacuauaa

SEQ ID NO: 8418 - RNA, 21 nt, Artificial Sequence
  Guide RNA
gugucuucccagguucacuau

SEQ ID NO: 8419 - RNA, 21 nt, Artificial Sequence
  Guide RNA
guucacuauaauugcggagag

SEQ ID NO: 8420 - RNA, 21 nt, Artificial Sequence
  Guide RNA
uaauugcggagagucugcagc

SEQ ID NO: 8421 - RNA, 21 nt, Artificial Sequence
  Guide RNA
uauaauugcggagagucugca

SEQ ID NO: 8422 - RNA, 21 nt, Artificial Sequence
  Guide RNA
ucacuauaauugcggagaguc

SEQ ID NO: 8423 - RNA, 21 nt, Artificial Sequence
  Guide RNA
ucccagguucacuauaauugc

SEQ ID NO: 8424 - RNA, 21 nt, Artificial Sequence
  Guide RNA
uccgcaauuauagugaaccug

SEQ ID NO: 8425 - RNA, 21 nt, Artificial Sequence
  Guide RNA
ucuccgcaauuauagugaacc

SEQ ID NO: 8426 - RNA, 21 nt, Artificial Sequence
  Guide RNA
ucuucccagguucacuauaau

SEQ ID NO: 8427 - RNA, 21 nt, Artificial Sequence
  Guide RNA
ugcagacucuccgcaauuaua

SEQ ID NO: 8428 - RNA, 21 nt, Artificial Sequence
  Guide RNA
ugcugcagacucuccgcaauu

SEQ ID NO: 8429 - RNA, 21 nt, Artificial Sequence
  Guide RNA
ugucuucccagguucacuaua

SEQ ID NO: 8430 - RNA, 21 nt, Artificial Sequence
  Guide RNA
ugugucuucccagguucacua

SEQ ID NO: 8431 - RNA, 21 nt, Artificial Sequence
  Guide RNA
uucacuauaauugcggagagu

SEQ ID NO: 8432 - RNA, 21 nt, Artificial Sequence
  Guide RNA
uucccagguucacuauaauug

SEQ ID NO: 8433 - RNA, 21 nt, Artificial Sequence
  Guide RNA
uugcugcagacucuccgcaau

SEQ ID NO: 8434 - RNA, 21 nt, Artificial Sequence
  Guide RNA
uugugucuucccagguucacu

SEQ ID NO: 8435 - RNA, 22 nt, Artificial Sequence
  Guide RNA
aacuugcugcagacucuccgca

SEQ ID NO: 8436 - RNA, 22 nt, Artificial Sequence
  Guide RNA
aauuauagugaaccugggaaga

SEQ ID NO: 8437 - RNA, 22 nt, Artificial Sequence
  Guide RNA
aauugcggagagucugcagcaa

SEQ ID NO: 8438 - RNA, 22 nt, Artificial Sequence
  Guide RNA
acuauaauugcggagagucugc

SEQ ID NO: 8439 - RNA, 22 nt, Artificial Sequence
  Guide RNA
acucuccgcaauuauagugaac

SEQ ID NO: 8440 - RNA, 22 nt, Artificial Sequence
  Guide RNA
acuugcugcagacucuccgcaa

SEQ ID NO: 8441 - RNA, 22 nt, Artificial Sequence
  Guide RNA
agacucuccgcaauuauaguga

SEQ ID NO: 8442 - RNA, 22 nt, Artificial Sequence
  Guide RNA
agguucacuauaauugcggaga

SEQ ID NO: 8443 - RNA, 22 nt, Artificial Sequence
  Guide RNA
auaauugcggagagucugcagc

SEQ ID NO: 8444 - RNA, 22 nt, Artificial Sequence
  Guide RNA
auuauagugaaccugggaagac

SEQ ID NO: 8445 - RNA, 22 nt, Artificial Sequence
  Guide RNA
caauuauagugaaccugggaag

SEQ ID NO: 8446 - RNA, 22 nt, Artificial Sequence
  Guide RNA
cacuauaauugcggagagucug

SEQ ID NO: 8447 - RNA, 22 nt, Artificial Sequence
  Guide RNA
cagacucuccgcaauuauagug

SEQ ID NO: 8448 - RNA, 22 nt, Artificial Sequence
  Guide RNA
cagguucacuauaauugcggag

SEQ ID NO: 8449 - RNA, 22 nt, Artificial Sequence
  Guide RNA
ccagguucacuauaauugcgga

SEQ ID NO: 8450 - RNA, 22 nt, Artificial Sequence
  Guide RNA
cccagguucacuauaauugcgg

SEQ ID NO: 8451 - RNA, 22 nt, Artificial Sequence
  Guide RNA
ccgcaauuauagugaaccuggg

SEQ ID NO: 8452 - RNA, 22 nt, Artificial Sequence
  Guide RNA
cgaacuugcugcagacucuccg

SEQ ID NO: 8453 - RNA, 22 nt, Artificial Sequence
  Guide RNA
cgcaauuauagugaaccuggga

SEQ ID NO: 8454 - RNA, 22 nt, Artificial Sequence
  Guide RNA
cuauaauugcggagagucugca

SEQ ID NO: 8455 - RNA, 22 nt, Artificial Sequence
  Guide RNA
cuccgcaauuauagugaaccug

SEQ ID NO: 8456 - RNA, 22 nt, Artificial Sequence
  Guide RNA
cucuccgcaauuauagugaacc

SEQ ID NO: 8457 - RNA, 22 nt, Artificial Sequence
  Guide RNA
cugcagacucuccgcaauuaua

SEQ ID NO: 8458 - RNA, 22 nt, Artificial Sequence
  Guide RNA
cuucccagguucacuauaauug

SEQ ID NO: 8459 - RNA, 22 nt, Artificial Sequence
  Guide RNA
cuugcugcagacucuccgcaau

SEQ ID NO: 8460 - RNA, 22 nt, Artificial Sequence
  Guide RNA
cuugugucuucccagguucacu

SEQ ID NO: 8461 - RNA, 22 nt, Artificial Sequence
  Guide RNA
gaacuugcugcagacucuccgc

SEQ ID NO: 8462 - RNA, 22 nt, Artificial Sequence
  Guide RNA
gacucuccgcaauuauagugaa

SEQ ID NO: 8463 - RNA, 22 nt, Artificial Sequence
  Guide RNA
gcaauuauagugaaccugggaa

SEQ ID NO: 8464 - RNA, 22 nt, Artificial Sequence
  Guide RNA
gcagacucuccgcaauuauagu

SEQ ID NO: 8465 - RNA, 22 nt, Artificial Sequence
  Guide RNA
gcugcagacucuccgcaauuau

SEQ ID NO: 8466 - RNA, 22 nt, Artificial Sequence
  Guide RNA
gguucacuauaauugcggagag

SEQ ID NO: 8467 - RNA, 22 nt, Artificial Sequence
  Guide RNA
gucuucccagguucacuauaau

SEQ ID NO: 8468 - RNA, 22 nt, Artificial Sequence
  Guide RNA
gugucuucccagguucacuaua

SEQ ID NO: 8469 - RNA, 22 nt, Artificial Sequence
  Guide RNA
guucacuauaauugcggagagu

SEQ ID NO: 8470 - RNA, 22 nt, Artificial Sequence
  Guide RNA
uaauugcggagagucugcagca

SEQ ID NO: 8471 - RNA, 22 nt, Artificial Sequence
  Guide RNA
uauaauugcggagagucugcag

SEQ ID NO: 8472 - RNA, 22 nt, Artificial Sequence
  Guide RNA
ucacuauaauugcggagagucu

SEQ ID NO: 8473 - RNA, 22 nt, Artificial Sequence
  Guide RNA
ucccagguucacuauaauugcg

SEQ ID NO: 8474 - RNA, 22 nt, Artificial Sequence
  Guide RNA
uccgcaauuauagugaaccugg

SEQ ID NO: 8475 - RNA, 22 nt, Artificial Sequence
  Guide RNA
ucuccgcaauuauagugaaccu

SEQ ID NO: 8476 - RNA, 22 nt, Artificial Sequence
  Guide RNA
ucuucccagguucacuauaauu

SEQ ID NO: 8477 - RNA, 22 nt, Artificial Sequence
  Guide RNA
ugcagacucuccgcaauuauag

SEQ ID NO: 8478 - RNA, 22 nt, Artificial Sequence
  Guide RNA
ugcugcagacucuccgcaauua

SEQ ID NO: 8479 - RNA, 22 nt, Artificial Sequence
  Guide RNA
ugucuucccagguucacuauaa

SEQ ID NO: 8480 - RNA, 22 nt, Artificial Sequence
  Guide RNA
ugugucuucccagguucacuau

SEQ ID NO: 8481 - RNA, 22 nt, Artificial Sequence
  Guide RNA
uucacuauaauugcggagaguc

SEQ ID NO: 8482 - RNA, 22 nt, Artificial Sequence
  Guide RNA
uucccagguucacuauaauugc

SEQ ID NO: 8483 - RNA, 22 nt, Artificial Sequence
  Guide RNA
uugcugcagacucuccgcaauu

SEQ ID NO: 8484 - RNA, 22 nt, Artificial Sequence
  Guide RNA
uugugucuucccagguucacua

SEQ ID NO: 8485 - RNA, 20 nt, Artificial Sequence
  Guide RNA
aagcaagcauugggcagccc

SEQ ID NO: 8486 - RNA, 20 nt, Artificial Sequence
  Guide RNA
aagcauugggcagcccccca

SEQ ID NO: 8487 - RNA, 20 nt, Artificial Sequence
  Guide RNA
agagcgccuguauugggggg

SEQ ID NO: 8488 - RNA, 20 nt, Artificial Sequence
  Guide RNA
agcaagcauugggcagcccc

SEQ ID NO: 8489 - RNA, 20 nt, Artificial Sequence
  Guide RNA
agcauugggcagccccccaa

SEQ ID NO: 8490 - RNA, 20 nt, Artificial Sequence
  Guide RNA
agcgccuguauuggggggcu

SEQ ID NO: 8491 - RNA, 20 nt, Artificial Sequence
  Guide RNA
auccaagcaagcauugggca

SEQ ID NO: 8492 - RNA, 20 nt, Artificial Sequence
  Guide RNA
auugggcagccccccaauac

SEQ ID NO: 8493 - RNA, 20 nt, Artificial Sequence
  Guide RNA
auuggggggcugcccaaugc

SEQ ID NO: 8494 - RNA, 20 nt, Artificial Sequence
  Guide RNA
caagcaagcauugggcagcc

SEQ ID NO: 8495 - RNA, 20 nt, Artificial Sequence
  Guide RNA
caagcauugggcagcccccc

SEQ ID NO: 8496 - RNA, 20 nt, Artificial Sequence
  Guide RNA
cagagcgccuguauuggggg

SEQ ID NO: 8497 - RNA, 20 nt, Artificial Sequence
  Guide RNA
cagccccccaauacaggcgc

SEQ ID NO: 8498 - RNA, 20 nt, Artificial Sequence
  Guide RNA
cauugggcagccccccaaua

SEQ ID NO: 8499 - RNA, 20 nt, Artificial Sequence
  Guide RNA
ccaagcaagcauugggcagc

SEQ ID NO: 8500 - RNA, 20 nt, Artificial Sequence
  Guide RNA
ccuguauuggggggcugccc

SEQ ID NO: 8501 - RNA, 20 nt, Artificial Sequence
  Guide RNA
cgccuguauuggggggcugc

SEQ ID NO: 8502 - RNA, 20 nt, Artificial Sequence
  Guide RNA
cugauccaagcaagcauugg

SEQ ID NO: 8503 - RNA, 20 nt, Artificial Sequence
  Guide RNA
cugcccaaugcuugcuugga

SEQ ID NO: 8504 - RNA, 20 nt, Artificial Sequence
  Guide RNA
cuguauuggggggcugccca

SEQ ID NO: 8505 - RNA, 20 nt, Artificial Sequence
  Guide RNA
gagcgccuguauuggggggc

SEQ ID NO: 8506 - RNA, 20 nt, Artificial Sequence
  Guide RNA
gauccaagcaagcauugggc

SEQ ID NO: 8507 - RNA, 20 nt, Artificial Sequence
  Guide RNA
gcaagcauugggcagccccc

SEQ ID NO: 8508 - RNA, 20 nt, Artificial Sequence
  Guide RNA
gcagagcgccuguauugggg

SEQ ID NO: 8509 - RNA, 20 nt, Artificial Sequence
  Guide RNA
gcagccccccaauacaggcg

SEQ ID NO: 8510 - RNA, 20 nt, Artificial Sequence
  Guide RNA
gcauugggcagccccccaau

SEQ ID NO: 8511 - RNA, 20 nt, Artificial Sequence
  Guide RNA
gccuguauuggggggcugcc

SEQ ID NO: 8512 - RNA, 20 nt, Artificial Sequence
  Guide RNA
gcgccuguauuggggggcug

SEQ ID NO: 8513 - RNA, 20 nt, Artificial Sequence
  Guide RNA
gcugauccaagcaagcauug

SEQ ID NO: 8514 - RNA, 20 nt, Artificial Sequence
  Guide RNA
gcugcccaaugcuugcuugg

SEQ ID NO: 8515 - RNA, 20 nt, Artificial Sequence
  Guide RNA
ggcagccccccaauacaggc

SEQ ID NO: 8516 - RNA, 20 nt, Artificial Sequence
  Guide RNA
ggcugcccaaugcuugcuug

SEQ ID NO: 8517 - RNA, 20 nt, Artificial Sequence
  Guide RNA
gggcagccccccaauacagg

SEQ ID NO: 8518 - RNA, 20 nt, Artificial Sequence
  Guide RNA
gggcugcccaaugcuugcuu

SEQ ID NO: 8519 - RNA, 20 nt, Artificial Sequence
  Guide RNA
ggggcugcccaaugcuugcu

SEQ ID NO: 8520 - RNA, 20 nt, Artificial Sequence
  Guide RNA
gggggcugcccaaugcuugc

SEQ ID NO: 8521 - RNA, 20 nt, Artificial Sequence
  Guide RNA
ggggggcugcccaaugcuug

SEQ ID NO: 8522 - RNA, 20 nt, Artificial Sequence
  Guide RNA
guauuggggggcugcccaau

SEQ ID NO: 8523 - RNA, 20 nt, Artificial Sequence
  Guide RNA
uauuggggggcugcccaaug

SEQ ID NO: 8524 - RNA, 20 nt, Artificial Sequence
  Guide RNA
uccaagcaagcauugggcag

SEQ ID NO: 8525 - RNA, 20 nt, Artificial Sequence
  Guide RNA
ugauccaagcaagcauuggg

SEQ ID NO: 8526 - RNA, 20 nt, Artificial Sequence
  Guide RNA
ugggcagccccccaauacag

SEQ ID NO: 8527 - RNA, 20 nt, Artificial Sequence
  Guide RNA
uggggggcugcccaaugcuu

SEQ ID NO: 8528 - RNA, 20 nt, Artificial Sequence
  Guide RNA
uguauuggggggcugcccaa

SEQ ID NO: 8529 - RNA, 20 nt, Artificial Sequence
  Guide RNA
uugggcagccccccaauaca

SEQ ID NO: 8530 - RNA, 20 nt, Artificial Sequence
  Guide RNA
uuggggggcugcccaaugcu

SEQ ID NO: 8531 - RNA, 21 nt, Artificial Sequence
  Guide RNA
aagcaagcauugggcagcccc

SEQ ID NO: 8532 - RNA, 21 nt, Artificial Sequence
  Guide RNA
aagcauugggcagccccccaa

SEQ ID NO: 8533 - RNA, 21 nt, Artificial Sequence
  Guide RNA
agagcgccuguauuggggggc

SEQ ID NO: 8534 - RNA, 21 nt, Artificial Sequence
  Guide RNA
agcaagcauugggcagccccc

SEQ ID NO: 8535 - RNA, 21 nt, Artificial Sequence
  Guide RNA
agcagagcgccuguauugggg

SEQ ID NO: 8536 - RNA, 21 nt, Artificial Sequence
  Guide RNA
agcauugggcagccccccaau

SEQ ID NO: 8537 - RNA, 21 nt, Artificial Sequence
  Guide RNA
agcgccuguauuggggggcug

SEQ ID NO: 8538 - RNA, 21 nt, Artificial Sequence
  Guide RNA
agcugauccaagcaagcauug

SEQ ID NO: 8539 - RNA, 21 nt, Artificial Sequence
  Guide RNA
auccaagcaagcauugggcag

SEQ ID NO: 8540 - RNA, 21 nt, Artificial Sequence
  Guide RNA
auugggcagccccccaauaca

SEQ ID NO: 8541 - RNA, 21 nt, Artificial Sequence
  Guide RNA
auuggggggcugcccaaugcu

SEQ ID NO: 8542 - RNA, 21 nt, Artificial Sequence
  Guide RNA
caagcaagcauugggcagccc

SEQ ID NO: 8543 - RNA, 21 nt, Artificial Sequence
  Guide RNA
caagcauugggcagcccccca

SEQ ID NO: 8544 - RNA, 21 nt, Artificial Sequence
  Guide RNA
cagagcgccuguauugggggg

SEQ ID NO: 8545 - RNA, 21 nt, Artificial Sequence
  Guide RNA
cagccccccaauacaggcgcu

SEQ ID NO: 8546 - RNA, 21 nt, Artificial Sequence
  Guide RNA
cauugggcagccccccaauac

SEQ ID NO: 8547 - RNA, 21 nt, Artificial Sequence
  Guide RNA
ccaagcaagcauugggcagcc

SEQ ID NO: 8548 - RNA, 21 nt, Artificial Sequence
  Guide RNA
ccuguauuggggggcugccca

SEQ ID NO: 8549 - RNA, 21 nt, Artificial Sequence
  Guide RNA
cgccuguauuggggggcugcc

SEQ ID NO: 8550 - RNA, 21 nt, Artificial Sequence
  Guide RNA
cugauccaagcaagcauuggg

SEQ ID NO: 8551 - RNA, 21 nt, Artificial Sequence
  Guide RNA
cugcccaaugcuugcuuggau

SEQ ID NO: 8552 - RNA, 21 nt, Artificial Sequence
  Guide RNA
cuguauuggggggcugcccaa

SEQ ID NO: 8553 - RNA, 21 nt, Artificial Sequence
  Guide RNA
gagcgccuguauuggggggcu

SEQ ID NO: 8554 - RNA, 21 nt, Artificial Sequence
  Guide RNA
gauccaagcaagcauugggca

SEQ ID NO: 8555 - RNA, 21 nt, Artificial Sequence
  Guide RNA
gcaagcauugggcagcccccc

SEQ ID NO: 8556 - RNA, 21 nt, Artificial Sequence
  Guide RNA
gcagagcgccuguauuggggg

SEQ ID NO: 8557 - RNA, 21 nt, Artificial Sequence
  Guide RNA
gcagccccccaauacaggcgc

SEQ ID NO: 8558 - RNA, 21 nt, Artificial Sequence
  Guide RNA
gcauugggcagccccccaaua

SEQ ID NO: 8559 - RNA, 21 nt, Artificial Sequence
  Guide RNA
gccuguauuggggggcugccc

SEQ ID NO: 8560 - RNA, 21 nt, Artificial Sequence
  Guide RNA
gcgccuguauuggggggcugc

SEQ ID NO: 8561 - RNA, 21 nt, Artificial Sequence
  Guide RNA
gcugauccaagcaagcauugg

SEQ ID NO: 8562 - RNA, 21 nt, Artificial Sequence
  Guide RNA
gcugcccaaugcuugcuugga

SEQ ID NO: 8563 - RNA, 21 nt, Artificial Sequence
  Guide RNA
ggcagccccccaauacaggcg

SEQ ID NO: 8564 - RNA, 21 nt, Artificial Sequence
  Guide RNA
ggcugcccaaugcuugcuugg

SEQ ID NO: 8565 - RNA, 21 nt, Artificial Sequence
  Guide RNA
gggcagccccccaauacaggc

SEQ ID NO: 8566 - RNA, 21 nt, Artificial Sequence
  Guide RNA
gggcugcccaaugcuugcuug

SEQ ID NO: 8567 - RNA, 21 nt, Artificial Sequence
  Guide RNA
ggggcugcccaaugcuugcuu

SEQ ID NO: 8568 - RNA, 21 nt, Artificial Sequence
  Guide RNA
gggggcugcccaaugcuugcu

SEQ ID NO: 8569 - RNA, 21 nt, Artificial Sequence
  Guide RNA
ggggggcugcccaaugcuugc

SEQ ID NO: 8570 - RNA, 21 nt, Artificial Sequence
  Guide RNA
guauuggggggcugcccaaug

SEQ ID NO: 8571 - RNA, 21 nt, Artificial Sequence
  Guide RNA
uauuggggggcugcccaaugc

SEQ ID NO: 8572 - RNA, 21 nt, Artificial Sequence
  Guide RNA
uccaagcaagcauugggcagc

SEQ ID NO: 8573 - RNA, 21 nt, Artificial Sequence
  Guide RNA
ugauccaagcaagcauugggc

SEQ ID NO: 8574 - RNA, 21 nt, Artificial Sequence
  Guide RNA
ugggcagccccccaauacagg

SEQ ID NO: 8575 - RNA, 21 nt, Artificial Sequence
  Guide RNA
uggggggcugcccaaugcuug

SEQ ID NO: 8576 - RNA, 21 nt, Artificial Sequence
  Guide RNA
uguauuggggggcugcccaau

SEQ ID NO: 8577 - RNA, 21 nt, Artificial Sequence
  Guide RNA
uugggcagccccccaauacag

SEQ ID NO: 8578 - RNA, 21 nt, Artificial Sequence
  Guide RNA
uuggggggcugcccaaugcuu

SEQ ID NO: 8579 - RNA, 22 nt, Artificial Sequence
  Guide RNA
aagcaagcauugggcagccccc

SEQ ID NO: 8580 - RNA, 22 nt, Artificial Sequence
  Guide RNA
aagcauugggcagccccccaau

SEQ ID NO: 8581 - RNA, 22 nt, Artificial Sequence
  Guide RNA
agagcgccuguauuggggggcu

SEQ ID NO: 8582 - RNA, 22 nt, Artificial Sequence
  Guide RNA
agcaagcauugggcagcccccc

SEQ ID NO: 8583 - RNA, 22 nt, Artificial Sequence
  Guide RNA
agcagagcgccuguauuggggg

SEQ ID NO: 8584 - RNA, 22 nt, Artificial Sequence
  Guide RNA
agcauugggcagccccccaaua

SEQ ID NO: 8585 - RNA, 22 nt, Artificial Sequence
  Guide RNA
agcgccuguauuggggggcugc

SEQ ID NO: 8586 - RNA, 22 nt, Artificial Sequence
  Guide RNA
agcugauccaagcaagcauugg

SEQ ID NO: 8587 - RNA, 22 nt, Artificial Sequence
  Guide RNA
auccaagcaagcauugggcagc

SEQ ID NO: 8588 - RNA, 22 nt, Artificial Sequence
  Guide RNA
auugggcagccccccaauacag

SEQ ID NO: 8589 - RNA, 22 nt, Artificial Sequence
  Guide RNA
auuggggggcugcccaaugcuu

SEQ ID NO: 8590 - RNA, 22 nt, Artificial Sequence
  Guide RNA
caagcaagcauugggcagcccc

SEQ ID NO: 8591 - RNA, 22 nt, Artificial Sequence
  Guide RNA
caagcauugggcagccccccaa

SEQ ID NO: 8592 - RNA, 22 nt, Artificial Sequence
  Guide RNA
cagagcgccuguauuggggggc

SEQ ID NO: 8593 - RNA, 22 nt, Artificial Sequence
  Guide RNA
cagcagagcgccuguauugggg

SEQ ID NO: 8594 - RNA, 22 nt, Artificial Sequence
  Guide RNA
cagccccccaauacaggcgcuc

SEQ ID NO: 8595 - RNA, 22 nt, Artificial Sequence
  Guide RNA
cagcugauccaagcaagcauug

SEQ ID NO: 8596 - RNA, 22 nt, Artificial Sequence
  Guide RNA
cauugggcagccccccaauaca

SEQ ID NO: 8597 - RNA, 22 nt, Artificial Sequence
  Guide RNA
ccaagcaagcauugggcagccc

SEQ ID NO: 8598 - RNA, 22 nt, Artificial Sequence
  Guide RNA
ccuguauuggggggcugcccaa

SEQ ID NO: 8599 - RNA, 22 nt, Artificial Sequence
  Guide RNA
cgccuguauuggggggcugccc

SEQ ID NO: 8600 - RNA, 22 nt, Artificial Sequence
  Guide RNA
cugauccaagcaagcauugggc

SEQ ID NO: 8601 - RNA, 22 nt, Artificial Sequence
  Guide RNA
cugcccaaugcuugcuuggauc

SEQ ID NO: 8602 - RNA, 22 nt, Artificial Sequence
  Guide RNA
cuguauuggggggcugcccaau

SEQ ID NO: 8603 - RNA, 22 nt, Artificial Sequence
  Guide RNA
gagcgccuguauuggggggcug

SEQ ID NO: 8604 - RNA, 22 nt, Artificial Sequence
  Guide RNA
gauccaagcaagcauugggcag

SEQ ID NO: 8605 - RNA, 22 nt, Artificial Sequence
  Guide RNA
gcaagcauugggcagcccccca

SEQ ID NO: 8606 - RNA, 22 nt, Artificial Sequence
  Guide RNA
gcagagcgccuguauugggggg

SEQ ID NO: 8607 - RNA, 22 nt, Artificial Sequence
  Guide RNA
gcagccccccaauacaggcgcu

SEQ ID NO: 8608 - RNA, 22 nt, Artificial Sequence
  Guide RNA
gcauugggcagccccccaauac

SEQ ID NO: 8609 - RNA, 22 nt, Artificial Sequence
  Guide RNA
gccuguauuggggggcugccca

SEQ ID NO: 8610 - RNA, 22 nt, Artificial Sequence
  Guide RNA
gcgccuguauuggggggcugcc

SEQ ID NO: 8611 - RNA, 22 nt, Artificial Sequence
  Guide RNA
gcugauccaagcaagcauuggg

SEQ ID NO: 8612 - RNA, 22 nt, Artificial Sequence
  Guide RNA
gcugcccaaugcuugcuuggau

SEQ ID NO: 8613 - RNA, 22 nt, Artificial Sequence
  Guide RNA
ggcagccccccaauacaggcgc

SEQ ID NO: 8614 - RNA, 22 nt, Artificial Sequence
  Guide RNA
ggcugcccaaugcuugcuugga

SEQ ID NO: 8615 - RNA, 22 nt, Artificial Sequence
  Guide RNA
gggcagccccccaauacaggcg

SEQ ID NO: 8616 - RNA, 22 nt, Artificial Sequence
  Guide RNA
gggcugcccaaugcuugcuugg

SEQ ID NO: 8617 - RNA, 22 nt, Artificial Sequence
  Guide RNA
ggggcugcccaaugcuugcuug

SEQ ID NO: 8618 - RNA, 22 nt, Artificial Sequence
  Guide RNA
gggggcugcccaaugcuugcuu

SEQ ID NO: 8619 - RNA, 22 nt, Artificial Sequence
  Guide RNA
ggggggcugcccaaugcuugcu

SEQ ID NO: 8620 - RNA, 22 nt, Artificial Sequence
  Guide RNA
guauuggggggcugcccaaugc

SEQ ID NO: 8621 - RNA, 22 nt, Artificial Sequence
  Guide RNA
uauuggggggcugcccaaugcu

SEQ ID NO: 8622 - RNA, 22 nt, Artificial Sequence
  Guide RNA
uccaagcaagcauugggcagcc

SEQ ID NO: 8623 - RNA, 22 nt, Artificial Sequence
  Guide RNA
ugauccaagcaagcauugggca

SEQ ID NO: 8624 - RNA, 22 nt, Artificial Sequence
  Guide RNA
ugggcagccccccaauacaggc

SEQ ID NO: 8625 - RNA, 22 nt, Artificial Sequence
  Guide RNA
uggggggcugcccaaugcuugc

SEQ ID NO: 8626 - RNA, 22 nt, Artificial Sequence
  Guide RNA
uguauuggggggcugcccaaug

SEQ ID NO: 8627 - RNA, 22 nt, Artificial Sequence
  Guide RNA
uugggcagccccccaauacagg

SEQ ID NO: 8628 - RNA, 22 nt, Artificial Sequence
  Guide RNA
uuggggggcugcccaaugcuug

SEQ ID NO: 8629 - RNA, 20 nt, Artificial Sequence
  Guide RNA
aagcaagcauugggcgggcc

SEQ ID NO: 8630 - RNA, 20 nt, Artificial Sequence
  Guide RNA
aagcauugggcgggcccccc

SEQ ID NO: 8631 - RNA, 20 nt, Artificial Sequence
  Guide RNA
agcaagcauugggcgggccc

SEQ ID NO: 8632 - RNA, 20 nt, Artificial Sequence
  Guide RNA
agcagagcgccuguauuggg

SEQ ID NO: 8633 - RNA, 20 nt, Artificial Sequence
  Guide RNA
agcauugggcgggcccccca

SEQ ID NO: 8634 - RNA, 20 nt, Artificial Sequence
  Guide RNA
agcgccuguauuggggggcc

SEQ ID NO: 8635 - RNA, 20 nt, Artificial Sequence
  Guide RNA
auccaagcaagcauugggcg

SEQ ID NO: 8636 - RNA, 20 nt, Artificial Sequence
  Guide RNA
auugggcgggccccccaaua

SEQ ID NO: 8637 - RNA, 20 nt, Artificial Sequence
  Guide RNA
auuggggggcccgcccaaug

SEQ ID NO: 8638 - RNA, 20 nt, Artificial Sequence
  Guide RNA
caagcaagcauugggcgggc

SEQ ID NO: 8639 - RNA, 20 nt, Artificial Sequence
  Guide RNA
caagcauugggcgggccccc

SEQ ID NO: 8640 - RNA, 20 nt, Artificial Sequence
  Guide RNA
cagcagagcgccuguauugg

SEQ ID NO: 8641 - RNA, 20 nt, Artificial Sequence
  Guide RNA
cauugggcgggccccccaau

SEQ ID NO: 8642 - RNA, 20 nt, Artificial Sequence
  Guide RNA
ccaagcaagcauugggcggg

SEQ ID NO: 8643 - RNA, 20 nt, Artificial Sequence
  Guide RNA
ccccccaauacaggcgcucu

SEQ ID NO: 8644 - RNA, 20 nt, Artificial Sequence
  Guide RNA
ccuguauuggggggcccgcc

SEQ ID NO: 8645 - RNA, 20 nt, Artificial Sequence
  Guide RNA
cgccuguauuggggggcccg

SEQ ID NO: 8646 - RNA, 20 nt, Artificial Sequence
  Guide RNA
cgggccccccaauacaggcg

SEQ ID NO: 8647 - RNA, 20 nt, Artificial Sequence
  Guide RNA
cuguauuggggggcccgccc

SEQ ID NO: 8648 - RNA, 20 nt, Artificial Sequence
  Guide RNA
gcaagcauugggcgggcccc

SEQ ID NO: 8649 - RNA, 20 nt, Artificial Sequence
  Guide RNA
gcauugggcgggccccccaa

SEQ ID NO: 8650 - RNA, 20 nt, Artificial Sequence
  Guide RNA
gcccgcccaaugcuugcuug

SEQ ID NO: 8651 - RNA, 20 nt, Artificial Sequence
  Guide RNA
gccuguauuggggggcccgc

SEQ ID NO: 8652 - RNA, 20 nt, Artificial Sequence
  Guide RNA
gcgccuguauuggggggccc

SEQ ID NO: 8653 - RNA, 20 nt, Artificial Sequence
  Guide RNA
gcgggccccccaauacaggc

SEQ ID NO: 8654 - RNA, 20 nt, Artificial Sequence
  Guide RNA
ggccccccaauacaggcgcu

SEQ ID NO: 8655 - RNA, 20 nt, Artificial Sequence
  Guide RNA
ggcccgcccaaugcuugcuu

SEQ ID NO: 8656 - RNA, 20 nt, Artificial Sequence
  Guide RNA
ggcgggccccccaauacagg

SEQ ID NO: 8657 - RNA, 20 nt, Artificial Sequence
  Guide RNA
gggccccccaauacaggcgc

SEQ ID NO: 8658 - RNA, 20 nt, Artificial Sequence
  Guide RNA
gggcccgcccaaugcuugcu

SEQ ID NO: 8659 - RNA, 20 nt, Artificial Sequence
  Guide RNA
gggcgggccccccaauacag

SEQ ID NO: 8660 - RNA, 20 nt, Artificial Sequence
  Guide RNA
ggggcccgcccaaugcuugc

SEQ ID NO: 8661 - RNA, 20 nt, Artificial Sequence
  Guide RNA
gggggcccgcccaaugcuug

SEQ ID NO: 8662 - RNA, 20 nt, Artificial Sequence
  Guide RNA
ggggggcccgcccaaugcuu

SEQ ID NO: 8663 - RNA, 20 nt, Artificial Sequence
  Guide RNA
guauuggggggcccgcccaa

SEQ ID NO: 8664 - RNA, 20 nt, Artificial Sequence
  Guide RNA
uauuggggggcccgcccaau

SEQ ID NO: 8665 - RNA, 20 nt, Artificial Sequence
  Guide RNA
uccaagcaagcauugggcgg

SEQ ID NO: 8666 - RNA, 20 nt, Artificial Sequence
  Guide RNA
ugggcgggccccccaauaca

SEQ ID NO: 8667 - RNA, 20 nt, Artificial Sequence
  Guide RNA
uggggggcccgcccaaugcu

SEQ ID NO: 8668 - RNA, 20 nt, Artificial Sequence
  Guide RNA
uguauuggggggcccgccca

SEQ ID NO: 8669 - RNA, 20 nt, Artificial Sequence
  Guide RNA
uugggcgggccccccaauac

SEQ ID NO: 8670 - RNA, 20 nt, Artificial Sequence
  Guide RNA
uuggggggcccgcccaaugc

SEQ ID NO: 8671 - RNA, 21 nt, Artificial Sequence
  Guide RNA
aagcaagcauugggcgggccc

SEQ ID NO: 8672 - RNA, 21 nt, Artificial Sequence
  Guide RNA
aagcauugggcgggcccccca

SEQ ID NO: 8673 - RNA, 21 nt, Artificial Sequence
  Guide RNA
acagcagagcgccuguauugg

SEQ ID NO: 8674 - RNA, 21 nt, Artificial Sequence
  Guide RNA
agcaagcauugggcgggcccc

SEQ ID NO: 8675 - RNA, 21 nt, Artificial Sequence
  Guide RNA
agcauugggcgggccccccaa

SEQ ID NO: 8676 - RNA, 21 nt, Artificial Sequence
  Guide RNA
agcgccuguauuggggggccc

SEQ ID NO: 8677 - RNA, 21 nt, Artificial Sequence
  Guide RNA
auccaagcaagcauugggcgg

SEQ ID NO: 8678 - RNA, 21 nt, Artificial Sequence
  Guide RNA
auugggcgggccccccaauac

SEQ ID NO: 8679 - RNA, 21 nt, Artificial Sequence
  Guide RNA
auuggggggcccgcccaaugc

SEQ ID NO: 8680 - RNA, 21 nt, Artificial Sequence
  Guide RNA
caagcaagcauugggcgggcc

SEQ ID NO: 8681 - RNA, 21 nt, Artificial Sequence
  Guide RNA
caagcauugggcgggcccccc

SEQ ID NO: 8682 - RNA, 21 nt, Artificial Sequence
  Guide RNA
cagcagagcgccuguauuggg

SEQ ID NO: 8683 - RNA, 21 nt, Artificial Sequence
  Guide RNA
cauugggcgggccccccaaua

SEQ ID NO: 8684 - RNA, 21 nt, Artificial Sequence
  Guide RNA
ccaagcaagcauugggcgggc

SEQ ID NO: 8685 - RNA, 21 nt, Artificial Sequence
  Guide RNA
ccccccaauacaggcgcucug

SEQ ID NO: 8686 - RNA, 21 nt, Artificial Sequence
  Guide RNA
ccuguauuggggggcccgccc

SEQ ID NO: 8687 - RNA, 21 nt, Artificial Sequence
  Guide RNA
cgccuguauuggggggcccgc

SEQ ID NO: 8688 - RNA, 21 nt, Artificial Sequence
  Guide RNA
cgggccccccaauacaggcgc

SEQ ID NO: 8689 - RNA, 21 nt, Artificial Sequence
  Guide RNA
cuguauuggggggcccgccca

SEQ ID NO: 8690 - RNA, 21 nt, Artificial Sequence
  Guide RNA
gagcgccuguauuggggggcc

SEQ ID NO: 8691 - RNA, 21 nt, Artificial Sequence
  Guide RNA
gauccaagcaagcauugggcg

SEQ ID NO: 8692 - RNA, 21 nt, Artificial Sequence
  Guide RNA
gcaagcauugggcgggccccc

SEQ ID NO: 8693 - RNA, 21 nt, Artificial Sequence
  Guide RNA
gcauugggcgggccccccaau

SEQ ID NO: 8694 - RNA, 21 nt, Artificial Sequence
  Guide RNA
gcccgcccaaugcuugcuugg

SEQ ID NO: 8695 - RNA, 21 nt, Artificial Sequence
  Guide RNA
gccuguauuggggggcccgcc

SEQ ID NO: 8696 - RNA, 21 nt, Artificial Sequence
  Guide RNA
gcgccuguauuggggggcccg

SEQ ID NO: 8697 - RNA, 21 nt, Artificial Sequence
  Guide RNA
gcgggccccccaauacaggcg

SEQ ID NO: 8698 - RNA, 21 nt, Artificial Sequence
  Guide RNA
ggccccccaauacaggcgcuc

SEQ ID NO: 8699 - RNA, 21 nt, Artificial Sequence
  Guide RNA
ggcccgcccaaugcuugcuug

SEQ ID NO: 8700 - RNA, 21 nt, Artificial Sequence
  Guide RNA
ggcgggccccccaauacaggc

SEQ ID NO: 8701 - RNA, 21 nt, Artificial Sequence
  Guide RNA
gggccccccaauacaggcgcu

SEQ ID NO: 8702 - RNA, 21 nt, Artificial Sequence
  Guide RNA
gggcccgcccaaugcuugcuu

SEQ ID NO: 8703 - RNA, 21 nt, Artificial Sequence
  Guide RNA
gggcgggccccccaauacagg

SEQ ID NO: 8704 - RNA, 21 nt, Artificial Sequence
  Guide RNA
ggggcccgcccaaugcuugcu

SEQ ID NO: 8705 - RNA, 21 nt, Artificial Sequence
  Guide RNA
gggggcccgcccaaugcuugc

SEQ ID NO: 8706 - RNA, 21 nt, Artificial Sequence
  Guide RNA
ggggggcccgcccaaugcuug

SEQ ID NO: 8707 - RNA, 21 nt, Artificial Sequence
  Guide RNA
guauuggggggcccgcccaau

SEQ ID NO: 8708 - RNA, 21 nt, Artificial Sequence
  Guide RNA
uauuggggggcccgcccaaug

SEQ ID NO: 8709 - RNA, 21 nt, Artificial Sequence
  Guide RNA
uccaagcaagcauugggcggg

SEQ ID NO: 8710 - RNA, 21 nt, Artificial Sequence
  Guide RNA
ugggcgggccccccaauacag

SEQ ID NO: 8711 - RNA, 21 nt, Artificial Sequence
  Guide RNA
uggggggcccgcccaaugcuu

SEQ ID NO: 8712 - RNA, 21 nt, Artificial Sequence
  Guide RNA
uguauuggggggcccgcccaa

SEQ ID NO: 8713 - RNA, 21 nt, Artificial Sequence
  Guide RNA
uugggcgggccccccaauaca

SEQ ID NO: 8714 - RNA, 21 nt, Artificial Sequence
  Guide RNA
uuggggggcccgcccaaugcu

SEQ ID NO: 8715 - RNA, 22 nt, Artificial Sequence
  Guide RNA
aagcaagcauugggcgggcccc

SEQ ID NO: 8716 - RNA, 22 nt, Artificial Sequence
  Guide RNA
aagcauugggcgggccccccaa

SEQ ID NO: 8717 - RNA, 22 nt, Artificial Sequence
  Guide RNA
acagcagagcgccuguauuggg

SEQ ID NO: 8718 - RNA, 22 nt, Artificial Sequence
  Guide RNA
agagcgccuguauuggggggcc

SEQ ID NO: 8719 - RNA, 22 nt, Artificial Sequence
  Guide RNA
agcaagcauugggcgggccccc

SEQ ID NO: 8720 - RNA, 22 nt, Artificial Sequence
  Guide RNA
agcauugggcgggccccccaau

SEQ ID NO: 8721 - RNA, 22 nt, Artificial Sequence
  Guide RNA
agcgccuguauuggggggcccg

SEQ ID NO: 8722 - RNA, 22 nt, Artificial Sequence
  Guide RNA
auccaagcaagcauugggcggg

SEQ ID NO: 8723 - RNA, 22 nt, Artificial Sequence
  Guide RNA
auugggcgggccccccaauaca

SEQ ID NO: 8724 - RNA, 22 nt, Artificial Sequence
  Guide RNA
auuggggggcccgcccaaugcu

SEQ ID NO: 8725 - RNA, 22 nt, Artificial Sequence
  Guide RNA
caagcaagcauugggcgggccc

SEQ ID NO: 8726 - RNA, 22 nt, Artificial Sequence
  Guide RNA
caagcauugggcgggcccccca

SEQ ID NO: 8727 - RNA, 22 nt, Artificial Sequence
  Guide RNA
cauugggcgggccccccaauac

SEQ ID NO: 8728 - RNA, 22 nt, Artificial Sequence
  Guide RNA
ccaagcaagcauugggcgggcc

SEQ ID NO: 8729 - RNA, 22 nt, Artificial Sequence
  Guide RNA
ccccccaauacaggcgcucugc

SEQ ID NO: 8730 - RNA, 22 nt, Artificial Sequence
  Guide RNA
ccuguauuggggggcccgccca

SEQ ID NO: 8731 - RNA, 22 nt, Artificial Sequence
  Guide RNA
cgccuguauuggggggcccgcc

SEQ ID NO: 8732 - RNA, 22 nt, Artificial Sequence
  Guide RNA
cgggccccccaauacaggcgcu

SEQ ID NO: 8733 - RNA, 22 nt, Artificial Sequence
  Guide RNA
cuguauuggggggcccgcccaa

SEQ ID NO: 8734 - RNA, 22 nt, Artificial Sequence
  Guide RNA
gacagcagagcgccuguauugg

SEQ ID NO: 8735 - RNA, 22 nt, Artificial Sequence
  Guide RNA
gagcgccuguauuggggggccc

SEQ ID NO: 8736 - RNA, 22 nt, Artificial Sequence
  Guide RNA
gauccaagcaagcauugggcgg

SEQ ID NO: 8737 - RNA, 22 nt, Artificial Sequence
  Guide RNA
gcaagcauugggcgggcccccc

SEQ ID NO: 8738 - RNA, 22 nt, Artificial Sequence
  Guide RNA
gcauugggcgggccccccaaua

SEQ ID NO: 8739 - RNA, 22 nt, Artificial Sequence
  Guide RNA
gcccgcccaaugcuugcuugga

SEQ ID NO: 8740 - RNA, 22 nt, Artificial Sequence
  Guide RNA
gccuguauuggggggcccgccc

SEQ ID NO: 8741 - RNA, 22 nt, Artificial Sequence
  Guide RNA
gcgccuguauuggggggcccgc

SEQ ID NO: 8742 - RNA, 22 nt, Artificial Sequence
  Guide RNA
gcgggccccccaauacaggcgc

SEQ ID NO: 8743 - RNA, 22 nt, Artificial Sequence
  Guide RNA
ggccccccaauacaggcgcucu

SEQ ID NO: 8744 - RNA, 22 nt, Artificial Sequence
  Guide RNA
ggcccgcccaaugcuugcuugg

SEQ ID NO: 8745 - RNA, 22 nt, Artificial Sequence
  Guide RNA
ggcgggccccccaauacaggcg

SEQ ID NO: 8746 - RNA, 22 nt, Artificial Sequence
  Guide RNA
gggccccccaauacaggcgcuc

SEQ ID NO: 8747 - RNA, 22 nt, Artificial Sequence
  Guide RNA
gggcccgcccaaugcuugcuug

SEQ ID NO: 8748 - RNA, 22 nt, Artificial Sequence
  Guide RNA
gggcgggccccccaauacaggc

SEQ ID NO: 8749 - RNA, 22 nt, Artificial Sequence
  Guide RNA
ggggcccgcccaaugcuugcuu

SEQ ID NO: 8750 - RNA, 22 nt, Artificial Sequence
  Guide RNA
gggggcccgcccaaugcuugcu

SEQ ID NO: 8751 - RNA, 22 nt, Artificial Sequence
  Guide RNA
ggggggcccgcccaaugcuugc

SEQ ID NO: 8752 - RNA, 22 nt, Artificial Sequence
  Guide RNA
guauuggggggcccgcccaaug

SEQ ID NO: 8753 - RNA, 22 nt, Artificial Sequence
  Guide RNA
uauuggggggcccgcccaaugc

SEQ ID NO: 8754 - RNA, 22 nt, Artificial Sequence
  Guide RNA
uccaagcaagcauugggcgggc

SEQ ID NO: 8755 - RNA, 22 nt, Artificial Sequence
  Guide RNA
ugauccaagcaagcauugggcg

SEQ ID NO: 8756 - RNA, 22 nt, Artificial Sequence
  Guide RNA
ugggcgggccccccaauacagg

SEQ ID NO: 8757 - RNA, 22 nt, Artificial Sequence
  Guide RNA
uggggggcccgcccaaugcuug

SEQ ID NO: 8758 - RNA, 22 nt, Artificial Sequence
  Guide RNA
uguauuggggggcccgcccaau

SEQ ID NO: 8759 - RNA, 22 nt, Artificial Sequence
  Guide RNA
uugggcgggccccccaauacag

SEQ ID NO: 8760 - RNA, 22 nt, Artificial Sequence
  Guide RNA
uuggggggcccgcccaaugcuu

SEQ ID NO: 8761 - RNA, 20 nt, Artificial Sequence
  Guide RNA
aacuaguggaguggaagcag

SEQ ID NO: 8762 - RNA, 20 nt, Artificial Sequence
  Guide RNA
aagcagagacagcagagcgc

SEQ ID NO: 8763 - RNA, 20 nt, Artificial Sequence
  Guide RNA
aauacaggcgcucugcuguc

SEQ ID NO: 8764 - RNA, 20 nt, Artificial Sequence
  Guide RNA
acaggcgcucugcugucucu

SEQ ID NO: 8765 - RNA, 20 nt, Artificial Sequence
  Guide RNA
acuaguggaguggaagcaga

SEQ ID NO: 8766 - RNA, 20 nt, Artificial Sequence
  Guide RNA
agcagagacagcagagcgcc

SEQ ID NO: 8767 - RNA, 20 nt, Artificial Sequence
  Guide RNA
aggcgcucugcugucucugc

SEQ ID NO: 8768 - RNA, 20 nt, Artificial Sequence
  Guide RNA
aguggaagcagagacagcag

SEQ ID NO: 8769 - RNA, 20 nt, Artificial Sequence
  Guide RNA
aguggaguggaagcagagac

SEQ ID NO: 8770 - RNA, 20 nt, Artificial Sequence
  Guide RNA
auacaggcgcucugcugucu

SEQ ID NO: 8771 - RNA, 20 nt, Artificial Sequence
  Guide RNA
augaacuaguggaguggaag

SEQ ID NO: 8772 - RNA, 20 nt, Artificial Sequence
  Guide RNA
caauacaggcgcucugcugu

SEQ ID NO: 8773 - RNA, 20 nt, Artificial Sequence
  Guide RNA
cagagacagcagagcgccug

SEQ ID NO: 8774 - RNA, 20 nt, Artificial Sequence
  Guide RNA
caggcgcucugcugucucug

SEQ ID NO: 8775 - RNA, 20 nt, Artificial Sequence
  Guide RNA
cgcucugcugucucugcuuc

SEQ ID NO: 8776 - RNA, 20 nt, Artificial Sequence
  Guide RNA
cuaguggaguggaagcagag

SEQ ID NO: 8777 - RNA, 20 nt, Artificial Sequence
  Guide RNA
cucugcugucucugcuucca

SEQ ID NO: 8778 - RNA, 20 nt, Artificial Sequence
  Guide RNA
cucugcuuccacuccacuag

SEQ ID NO: 8779 - RNA, 20 nt, Artificial Sequence
  Guide RNA
cugcugucucugcuuccacu

SEQ ID NO: 8780 - RNA, 20 nt, Artificial Sequence
  Guide RNA
cugcuuccacuccacuaguu

SEQ ID NO: 8781 - RNA, 20 nt, Artificial Sequence
  Guide RNA
cugucucugcuuccacucca

SEQ ID NO: 8782 - RNA, 20 nt, Artificial Sequence
  Guide RNA
gaacuaguggaguggaagca

SEQ ID NO: 8783 - RNA, 20 nt, Artificial Sequence
  Guide RNA
gaagcagagacagcagagcg

SEQ ID NO: 8784 - RNA, 20 nt, Artificial Sequence
  Guide RNA
gaguggaagcagagacagca

SEQ ID NO: 8785 - RNA, 20 nt, Artificial Sequence
  Guide RNA
gaugaacuaguggaguggaa

SEQ ID NO: 8786 - RNA, 20 nt, Artificial Sequence
  Guide RNA
gcagagacagcagagcgccu

SEQ ID NO: 8787 - RNA, 20 nt, Artificial Sequence
  Guide RNA
gcgcucugcugucucugcuu

SEQ ID NO: 8788 - RNA, 20 nt, Artificial Sequence
  Guide RNA
gcucugcugucucugcuucc

SEQ ID NO: 8789 - RNA, 20 nt, Artificial Sequence
  Guide RNA
gcugucucugcuuccacucc

SEQ ID NO: 8790 - RNA, 20 nt, Artificial Sequence
  Guide RNA
ggaagcagagacagcagagc

SEQ ID NO: 8791 - RNA, 20 nt, Artificial Sequence
  Guide RNA
ggaguggaagcagagacagc

SEQ ID NO: 8792 - RNA, 20 nt, Artificial Sequence
  Guide RNA
ggcgcucugcugucucugcu

SEQ ID NO: 8793 - RNA, 20 nt, Artificial Sequence
  Guide RNA
gucucugcuuccacuccacu

SEQ ID NO: 8794 - RNA, 20 nt, Artificial Sequence
  Guide RNA
guggaagcagagacagcaga

SEQ ID NO: 8795 - RNA, 20 nt, Artificial Sequence
  Guide RNA
guggaguggaagcagagaca

SEQ ID NO: 8796 - RNA, 20 nt, Artificial Sequence
  Guide RNA
uacaggcgcucugcugucuc

SEQ ID NO: 8797 - RNA, 20 nt, Artificial Sequence
  Guide RNA
uaguggaguggaagcagaga

SEQ ID NO: 8798 - RNA, 20 nt, Artificial Sequence
  Guide RNA
ucucugcuuccacuccacua

SEQ ID NO: 8799 - RNA, 20 nt, Artificial Sequence
  Guide RNA
ucugcugucucugcuuccac

SEQ ID NO: 8800 - RNA, 20 nt, Artificial Sequence
  Guide RNA
ucugcuuccacuccacuagu

SEQ ID NO: 8801 - RNA, 20 nt, Artificial Sequence
  Guide RNA
ugaacuaguggaguggaagc

SEQ ID NO: 8802 - RNA, 20 nt, Artificial Sequence
  Guide RNA
ugaugaacuaguggagugga

SEQ ID NO: 8803 - RNA, 20 nt, Artificial Sequence
  Guide RNA
ugcugucucugcuuccacuc

SEQ ID NO: 8804 - RNA, 20 nt, Artificial Sequence
  Guide RNA
uggaagcagagacagcagag

SEQ ID NO: 8805 - RNA, 20 nt, Artificial Sequence
  Guide RNA
uggaguggaagcagagacag

SEQ ID NO: 8806 - RNA, 20 nt, Artificial Sequence
  Guide RNA
ugucucugcuuccacuccac

SEQ ID NO: 8807 - RNA, 21 nt, Artificial Sequence
  Guide RNA
aacuaguggaguggaagcaga

SEQ ID NO: 8808 - RNA, 21 nt, Artificial Sequence
  Guide RNA
aagcagagacagcagagcgcc

SEQ ID NO: 8809 - RNA, 21 nt, Artificial Sequence
  Guide RNA
aauacaggcgcucugcugucu

SEQ ID NO: 8810 - RNA, 21 nt, Artificial Sequence
  Guide RNA
acaggcgcucugcugucucug

SEQ ID NO: 8811 - RNA, 21 nt, Artificial Sequence
  Guide RNA
acuaguggaguggaagcagag

SEQ ID NO: 8812 - RNA, 21 nt, Artificial Sequence
  Guide RNA
agcagagacagcagagcgccu

SEQ ID NO: 8813 - RNA, 21 nt, Artificial Sequence
  Guide RNA
aggcgcucugcugucucugcu

SEQ ID NO: 8814 - RNA, 21 nt, Artificial Sequence
  Guide RNA
aguggaagcagagacagcaga

SEQ ID NO: 8815 - RNA, 21 nt, Artificial Sequence
  Guide RNA
aguggaguggaagcagagaca

SEQ ID NO: 8816 - RNA, 21 nt, Artificial Sequence
  Guide RNA
auacaggcgcucugcugucuc

SEQ ID NO: 8817 - RNA, 21 nt, Artificial Sequence
  Guide RNA
augaacuaguggaguggaagc

SEQ ID NO: 8818 - RNA, 21 nt, Artificial Sequence
  Guide RNA
augaugaacuaguggagugga

SEQ ID NO: 8819 - RNA, 21 nt, Artificial Sequence
  Guide RNA
caauacaggcgcucugcuguc

SEQ ID NO: 8820 - RNA, 21 nt, Artificial Sequence
  Guide RNA
cagagacagcagagcgccugu

SEQ ID NO: 8821 - RNA, 21 nt, Artificial Sequence
  Guide RNA
caggcgcucugcugucucugc

SEQ ID NO: 8822 - RNA, 21 nt, Artificial Sequence
  Guide RNA
ccaauacaggcgcucugcugu

SEQ ID NO: 8823 - RNA, 21 nt, Artificial Sequence
  Guide RNA
cgcucugcugucucugcuucc

SEQ ID NO: 8824 - RNA, 21 nt, Artificial Sequence
  Guide RNA
cuaguggaguggaagcagaga

SEQ ID NO: 8825 - RNA, 21 nt, Artificial Sequence
  Guide RNA
cucugcugucucugcuuccac

SEQ ID NO: 8826 - RNA, 21 nt, Artificial Sequence
  Guide RNA
cucugcuuccacuccacuagu

SEQ ID NO: 8827 - RNA, 21 nt, Artificial Sequence
  Guide RNA
cugcugucucugcuuccacuc

SEQ ID NO: 8828 - RNA, 21 nt, Artificial Sequence
  Guide RNA
cugcuuccacuccacuaguuc

SEQ ID NO: 8829 - RNA, 21 nt, Artificial Sequence
  Guide RNA
cugucucugcuuccacuccac

SEQ ID NO: 8830 - RNA, 21 nt, Artificial Sequence
  Guide RNA
gaacuaguggaguggaagcag

SEQ ID NO: 8831 - RNA, 21 nt, Artificial Sequence
  Guide RNA
gaagcagagacagcagagcgc

SEQ ID NO: 8832 - RNA, 21 nt, Artificial Sequence
  Guide RNA
gaguggaagcagagacagcag

SEQ ID NO: 8833 - RNA, 21 nt, Artificial Sequence
  Guide RNA
gaugaacuaguggaguggaag

SEQ ID NO: 8834 - RNA, 21 nt, Artificial Sequence
  Guide RNA
gcagagacagcagagcgccug

SEQ ID NO: 8835 - RNA, 21 nt, Artificial Sequence
  Guide RNA
gcgcucugcugucucugcuuc

SEQ ID NO: 8836 - RNA, 21 nt, Artificial Sequence
  Guide RNA
gcucugcugucucugcuucca

SEQ ID NO: 8837 - RNA, 21 nt, Artificial Sequence
  Guide RNA
gcugucucugcuuccacucca

SEQ ID NO: 8838 - RNA, 21 nt, Artificial Sequence
  Guide RNA
ggaagcagagacagcagagcg

SEQ ID NO: 8839 - RNA, 21 nt, Artificial Sequence
  Guide RNA
ggaguggaagcagagacagca

SEQ ID NO: 8840 - RNA, 21 nt, Artificial Sequence
  Guide RNA
ggcgcucugcugucucugcuu

SEQ ID NO: 8841 - RNA, 21 nt, Artificial Sequence
  Guide RNA
gucucugcuuccacuccacua

SEQ ID NO: 8842 - RNA, 21 nt, Artificial Sequence
  Guide RNA
guggaagcagagacagcagag

SEQ ID NO: 8843 - RNA, 21 nt, Artificial Sequence
  Guide RNA
guggaguggaagcagagacag

SEQ ID NO: 8844 - RNA, 21 nt, Artificial Sequence
  Guide RNA
uacaggcgcucugcugucucu

SEQ ID NO: 8845 - RNA, 21 nt, Artificial Sequence
  Guide RNA
uaguggaguggaagcagagac

SEQ ID NO: 8846 - RNA, 21 nt, Artificial Sequence
  Guide RNA
ucucugcuuccacuccacuag

SEQ ID NO: 8847 - RNA, 21 nt, Artificial Sequence
  Guide RNA
ucugcugucucugcuuccacu

SEQ ID NO: 8848 - RNA, 21 nt, Artificial Sequence
  Guide RNA
ucugcuuccacuccacuaguu

SEQ ID NO: 8849 - RNA, 21 nt, Artificial Sequence
  Guide RNA
ugaacuaguggaguggaagca

SEQ ID NO: 8850 - RNA, 21 nt, Artificial Sequence
  Guide RNA
ugaugaacuaguggaguggaa

SEQ ID NO: 8851 - RNA, 21 nt, Artificial Sequence
  Guide RNA
ugcugucucugcuuccacucc

SEQ ID NO: 8852 - RNA, 21 nt, Artificial Sequence
  Guide RNA
uggaagcagagacagcagagc

SEQ ID NO: 8853 - RNA, 21 nt, Artificial Sequence
  Guide RNA
uggaguggaagcagagacagc

SEQ ID NO: 8854 - RNA, 21 nt, Artificial Sequence
  Guide RNA
ugucucugcuuccacuccacu

SEQ ID NO: 8855 - RNA, 22 nt, Artificial Sequence
  Guide RNA
aacuaguggaguggaagcagag

SEQ ID NO: 8856 - RNA, 22 nt, Artificial Sequence
  Guide RNA
aagcagagacagcagagcgccu

SEQ ID NO: 8857 - RNA, 22 nt, Artificial Sequence
  Guide RNA
aauacaggcgcucugcugucuc

SEQ ID NO: 8858 - RNA, 22 nt, Artificial Sequence
  Guide RNA
aaugaugaacuaguggagugga

SEQ ID NO: 8859 - RNA, 22 nt, Artificial Sequence
  Guide RNA
acaggcgcucugcugucucugc

SEQ ID NO: 8860 - RNA, 22 nt, Artificial Sequence
  Guide RNA
acuaguggaguggaagcagaga

SEQ ID NO: 8861 - RNA, 22 nt, Artificial Sequence
  Guide RNA
agcagagacagcagagcgccug

SEQ ID NO: 8862 - RNA, 22 nt, Artificial Sequence
  Guide RNA
aggcgcucugcugucucugcuu

SEQ ID NO: 8863 - RNA, 22 nt, Artificial Sequence
  Guide RNA
aguggaagcagagacagcagag

SEQ ID NO: 8864 - RNA, 22 nt, Artificial Sequence
  Guide RNA
aguggaguggaagcagagacag

SEQ ID NO: 8865 - RNA, 22 nt, Artificial Sequence
  Guide RNA
auacaggcgcucugcugucucu

SEQ ID NO: 8866 - RNA, 22 nt, Artificial Sequence
  Guide RNA
augaacuaguggaguggaagca

SEQ ID NO: 8867 - RNA, 22 nt, Artificial Sequence
  Guide RNA
augaugaacuaguggaguggaa

SEQ ID NO: 8868 - RNA, 22 nt, Artificial Sequence
  Guide RNA
caauacaggcgcucugcugucu

SEQ ID NO: 8869 - RNA, 22 nt, Artificial Sequence
  Guide RNA
cagagacagcagagcgccugua

SEQ ID NO: 8870 - RNA, 22 nt, Artificial Sequence
  Guide RNA
caggcgcucugcugucucugcu

SEQ ID NO: 8871 - RNA, 22 nt, Artificial Sequence
  Guide RNA
ccaauacaggcgcucugcuguc

SEQ ID NO: 8872 - RNA, 22 nt, Artificial Sequence
  Guide RNA
cccaauacaggcgcucugcugu

SEQ ID NO: 8873 - RNA, 22 nt, Artificial Sequence
  Guide RNA
cgcucugcugucucugcuucca

SEQ ID NO: 8874 - RNA, 22 nt, Artificial Sequence
  Guide RNA
cuaguggaguggaagcagagac

SEQ ID NO: 8875 - RNA, 22 nt, Artificial Sequence
  Guide RNA
cucugcugucucugcuuccacu

SEQ ID NO: 8876 - RNA, 22 nt, Artificial Sequence
  Guide RNA
cucugcuuccacuccacuaguu

SEQ ID NO: 8877 - RNA, 22 nt, Artificial Sequence
  Guide RNA
cugcugucucugcuuccacucc

SEQ ID NO: 8878 - RNA, 22 nt, Artificial Sequence
  Guide RNA
cugcuuccacuccacuaguuca

SEQ ID NO: 8879 - RNA, 22 nt, Artificial Sequence
  Guide RNA
cugucucugcuuccacuccacu

SEQ ID NO: 8880 - RNA, 22 nt, Artificial Sequence
  Guide RNA
gaacuaguggaguggaagcaga

SEQ ID NO: 8881 - RNA, 22 nt, Artificial Sequence
  Guide RNA
gaagcagagacagcagagcgcc

SEQ ID NO: 8882 - RNA, 22 nt, Artificial Sequence
  Guide RNA
gaguggaagcagagacagcaga

SEQ ID NO: 8883 - RNA, 22 nt, Artificial Sequence
  Guide RNA
gaugaacuaguggaguggaagc

SEQ ID NO: 8884 - RNA, 22 nt, Artificial Sequence
  Guide RNA
gcagagacagcagagcgccugu

SEQ ID NO: 8885 - RNA, 22 nt, Artificial Sequence
  Guide RNA
gcgcucugcugucucugcuucc

SEQ ID NO: 8886 - RNA, 22 nt, Artificial Sequence
  Guide RNA
gcucugcugucucugcuuccac

SEQ ID NO: 8887 - RNA, 22 nt, Artificial Sequence
  Guide RNA
gcugucucugcuuccacuccac

SEQ ID NO: 8888 - RNA, 22 nt, Artificial Sequence
  Guide RNA
ggaagcagagacagcagagcgc

SEQ ID NO: 8889 - RNA, 22 nt, Artificial Sequence
  Guide RNA
ggaguggaagcagagacagcag

SEQ ID NO: 8890 - RNA, 22 nt, Artificial Sequence
  Guide RNA
ggcgcucugcugucucugcuuc

SEQ ID NO: 8891 - RNA, 22 nt, Artificial Sequence
  Guide RNA
gucucugcuuccacuccacuag

SEQ ID NO: 8892 - RNA, 22 nt, Artificial Sequence
  Guide RNA
guggaagcagagacagcagagc

SEQ ID NO: 8893 - RNA, 22 nt, Artificial Sequence
  Guide RNA
guggaguggaagcagagacagc

SEQ ID NO: 8894 - RNA, 22 nt, Artificial Sequence
  Guide RNA
uacaggcgcucugcugucucug

SEQ ID NO: 8895 - RNA, 22 nt, Artificial Sequence
  Guide RNA
uaguggaguggaagcagagaca

SEQ ID NO: 8896 - RNA, 22 nt, Artificial Sequence
  Guide RNA
ucucugcuuccacuccacuagu

SEQ ID NO: 8897 - RNA, 22 nt, Artificial Sequence
  Guide RNA
ucugcugucucugcuuccacuc

SEQ ID NO: 8898 - RNA, 22 nt, Artificial Sequence
  Guide RNA
ucugcuuccacuccacuaguuc

SEQ ID NO: 8899 - RNA, 22 nt, Artificial Sequence
  Guide RNA
ugaacuaguggaguggaagcag

SEQ ID NO: 8900 - RNA, 22 nt, Artificial Sequence
  Guide RNA
ugaugaacuaguggaguggaag

SEQ ID NO: 8901 - RNA, 22 nt, Artificial Sequence
  Guide RNA
ugcugucucugcuuccacucca

SEQ ID NO: 8902 - RNA, 22 nt, Artificial Sequence
  Guide RNA
uggaagcagagacagcagagcg

SEQ ID NO: 8903 - RNA, 22 nt, Artificial Sequence
  Guide RNA
uggaguggaagcagagacagca

SEQ ID NO: 8904 - RNA, 22 nt, Artificial Sequence
  Guide RNA
ugucucugcuuccacuccacua

SEQ ID NO: 8905 - RNA, 20 nt, Artificial Sequence
  Guide RNA
aacuaguggaauggaagcgg

SEQ ID NO: 8906 - RNA, 20 nt, Artificial Sequence
  Guide RNA
aaugaugaacuaguggaaug

SEQ ID NO: 8907 - RNA, 20 nt, Artificial Sequence
  Guide RNA
aauggaagcggagacagcag

SEQ ID NO: 8908 - RNA, 20 nt, Artificial Sequence
  Guide RNA
acuaguggaauggaagcgga

SEQ ID NO: 8909 - RNA, 20 nt, Artificial Sequence
  Guide RNA
aguggaauggaagcggagac

SEQ ID NO: 8910 - RNA, 20 nt, Artificial Sequence
  Guide RNA
augaacuaguggaauggaag

SEQ ID NO: 8911 - RNA, 20 nt, Artificial Sequence
  Guide RNA
augaugaacuaguggaaugg

SEQ ID NO: 8912 - RNA, 20 nt, Artificial Sequence
  Guide RNA
auuaaugaugaacuagugga

SEQ ID NO: 8913 - RNA, 20 nt, Artificial Sequence
  Guide RNA
auuccacuaguucaucauua

SEQ ID NO: 8914 - RNA, 20 nt, Artificial Sequence
  Guide RNA
cauuccacuaguucaucauu

SEQ ID NO: 8915 - RNA, 20 nt, Artificial Sequence
  Guide RNA
ccauuccacuaguucaucau

SEQ ID NO: 8916 - RNA, 20 nt, Artificial Sequence
  Guide RNA
ccgcuuccauuccacuaguu

SEQ ID NO: 8917 - RNA, 20 nt, Artificial Sequence
  Guide RNA
cgcucugcugucuccgcuuc

SEQ ID NO: 8918 - RNA, 20 nt, Artificial Sequence
  Guide RNA
cgcuuccauuccacuaguuc

SEQ ID NO: 8919 - RNA, 20 nt, Artificial Sequence
  Guide RNA
cuaguggaauggaagcggag

SEQ ID NO: 8920 - RNA, 20 nt, Artificial Sequence
  Guide RNA
cuccgcuuccauuccacuag

SEQ ID NO: 8921 - RNA, 20 nt, Artificial Sequence
  Guide RNA
cucugcugucuccgcuucca

SEQ ID NO: 8922 - RNA, 20 nt, Artificial Sequence
  Guide RNA
cugauuaaugaugaacuagu

SEQ ID NO: 8923 - RNA, 20 nt, Artificial Sequence
  Guide RNA
cugcugucuccgcuuccauu

SEQ ID NO: 8924 - RNA, 20 nt, Artificial Sequence
  Guide RNA
cugucuccgcuuccauucca

SEQ ID NO: 8925 - RNA, 20 nt, Artificial Sequence
  Guide RNA
cuuccauuccacuaguucau

SEQ ID NO: 8926 - RNA, 20 nt, Artificial Sequence
  Guide RNA
gaacuaguggaauggaagcg

SEQ ID NO: 8927 - RNA, 20 nt, Artificial Sequence
  Guide RNA
gaauggaagcggagacagca

SEQ ID NO: 8928 - RNA, 20 nt, Artificial Sequence
  Guide RNA
gaugaacuaguggaauggaa

SEQ ID NO: 8929 - RNA, 20 nt, Artificial Sequence
  Guide RNA
gauuaaugaugaacuagugg

SEQ ID NO: 8930 - RNA, 20 nt, Artificial Sequence
  Guide RNA
gcgcucugcugucuccgcuu

SEQ ID NO: 8931 - RNA, 20 nt, Artificial Sequence
  Guide RNA
gcucugcugucuccgcuucc

SEQ ID NO: 8932 - RNA, 20 nt, Artificial Sequence
  Guide RNA
gcugucuccgcuuccauucc

SEQ ID NO: 8933 - RNA, 20 nt, Artificial Sequence
  Guide RNA
gcuuccauuccacuaguuca

SEQ ID NO: 8934 - RNA, 20 nt, Artificial Sequence
  Guide RNA
ggaauggaagcggagacagc

SEQ ID NO: 8935 - RNA, 20 nt, Artificial Sequence
  Guide RNA
gucuccgcuuccauuccacu

SEQ ID NO: 8936 - RNA, 20 nt, Artificial Sequence
  Guide RNA
guggaauggaagcggagaca

SEQ ID NO: 8937 - RNA, 20 nt, Artificial Sequence
  Guide RNA
uaaugaugaacuaguggaau

SEQ ID NO: 8938 - RNA, 20 nt, Artificial Sequence
  Guide RNA
uaguggaauggaagcggaga

SEQ ID NO: 8939 - RNA, 20 nt, Artificial Sequence
  Guide RNA
uccauuccacuaguucauca

SEQ ID NO: 8940 - RNA, 20 nt, Artificial Sequence
  Guide RNA
uccgcuuccauuccacuagu

SEQ ID NO: 8941 - RNA, 20 nt, Artificial Sequence
  Guide RNA
ucuccgcuuccauuccacua

SEQ ID NO: 8942 - RNA, 20 nt, Artificial Sequence
  Guide RNA
ucugcugucuccgcuuccau

SEQ ID NO: 8943 - RNA, 20 nt, Artificial Sequence
  Guide RNA
ugaacuaguggaauggaagc

SEQ ID NO: 8944 - RNA, 20 nt, Artificial Sequence
  Guide RNA
ugaugaacuaguggaaugga

SEQ ID NO: 8945 - RNA, 20 nt, Artificial Sequence
  Guide RNA
ugauuaaugaugaacuagug

SEQ ID NO: 8946 - RNA, 20 nt, Artificial Sequence
  Guide RNA
ugcugucuccgcuuccauuc

SEQ ID NO: 8947 - RNA, 20 nt, Artificial Sequence
  Guide RNA
uggaauggaagcggagacag

SEQ ID NO: 8948 - RNA, 20 nt, Artificial Sequence
  Guide RNA
ugucuccgcuuccauuccac

SEQ ID NO: 8949 - RNA, 20 nt, Artificial Sequence
  Guide RNA
uuaaugaugaacuaguggaa

SEQ ID NO: 8950 - RNA, 20 nt, Artificial Sequence
  Guide RNA
uuccauuccacuaguucauc

SEQ ID NO: 8951 - RNA, 21 nt, Artificial Sequence
  Guide RNA
aacuaguggaauggaagcgga

SEQ ID NO: 8952 - RNA, 21 nt, Artificial Sequence
  Guide RNA
aaugaugaacuaguggaaugg

SEQ ID NO: 8953 - RNA, 21 nt, Artificial Sequence
  Guide RNA
aauggaagcggagacagcaga

SEQ ID NO: 8954 - RNA, 21 nt, Artificial Sequence
  Guide RNA
acuaguggaauggaagcggag

SEQ ID NO: 8955 - RNA, 21 nt, Artificial Sequence
  Guide RNA
aguggaauggaagcggagaca

SEQ ID NO: 8956 - RNA, 21 nt, Artificial Sequence
  Guide RNA
augaacuaguggaauggaagc

SEQ ID NO: 8957 - RNA, 21 nt, Artificial Sequence
  Guide RNA
augaugaacuaguggaaugga

SEQ ID NO: 8958 - RNA, 21 nt, Artificial Sequence
  Guide RNA
cauuccacuaguucaucauua

SEQ ID NO: 8959 - RNA, 21 nt, Artificial Sequence
  Guide RNA
ccauuccacuaguucaucauu

SEQ ID NO: 8960 - RNA, 21 nt, Artificial Sequence
  Guide RNA
ccgcuuccauuccacuaguuc

SEQ ID NO: 8961 - RNA, 21 nt, Artificial Sequence
  Guide RNA
ccugauuaaugaugaacuagu

SEQ ID NO: 8962 - RNA, 21 nt, Artificial Sequence
  Guide RNA
cgcucugcugucuccgcuucc

SEQ ID NO: 8963 - RNA, 21 nt, Artificial Sequence
  Guide RNA
cgcuuccauuccacuaguuca

SEQ ID NO: 8964 - RNA, 21 nt, Artificial Sequence
  Guide RNA
cuaguggaauggaagcggaga

SEQ ID NO: 8965 - RNA, 21 nt, Artificial Sequence
  Guide RNA
cuccgcuuccauuccacuagu

SEQ ID NO: 8966 - RNA, 21 nt, Artificial Sequence
  Guide RNA
cucugcugucuccgcuuccau

SEQ ID NO: 8967 - RNA, 21 nt, Artificial Sequence
  Guide RNA
cugauuaaugaugaacuagug

SEQ ID NO: 8968 - RNA, 21 nt, Artificial Sequence
  Guide RNA
cugcugucuccgcuuccauuc

SEQ ID NO: 8969 - RNA, 21 nt, Artificial Sequence
  Guide RNA
cugucuccgcuuccauuccac

SEQ ID NO: 8970 - RNA, 21 nt, Artificial Sequence
  Guide RNA
cuuccauuccacuaguucauc

SEQ ID NO: 8971 - RNA, 21 nt, Artificial Sequence
  Guide RNA
gaacuaguggaauggaagcgg

SEQ ID NO: 8972 - RNA, 21 nt, Artificial Sequence
  Guide RNA
gaauggaagcggagacagcag

SEQ ID NO: 8973 - RNA, 21 nt, Artificial Sequence
  Guide RNA
gaugaacuaguggaauggaag

SEQ ID NO: 8974 - RNA, 21 nt, Artificial Sequence
  Guide RNA
gauuaaugaugaacuagugga

SEQ ID NO: 8975 - RNA, 21 nt, Artificial Sequence
  Guide RNA
gcgcucugcugucuccgcuuc

SEQ ID NO: 8976 - RNA, 21 nt, Artificial Sequence
  Guide RNA
gcucugcugucuccgcuucca

SEQ ID NO: 8977 - RNA, 21 nt, Artificial Sequence
  Guide RNA
gcugucuccgcuuccauucca

SEQ ID NO: 8978 - RNA, 21 nt, Artificial Sequence
  Guide RNA
gcuuccauuccacuaguucau

SEQ ID NO: 8979 - RNA, 21 nt, Artificial Sequence
  Guide RNA
ggaauggaagcggagacagca

SEQ ID NO: 8980 - RNA, 21 nt, Artificial Sequence
  Guide RNA
ggcgcucugcugucuccgcuu

SEQ ID NO: 8981 - RNA, 21 nt, Artificial Sequence
  Guide RNA
gucuccgcuuccauuccacua

SEQ ID NO: 8982 - RNA, 21 nt, Artificial Sequence
  Guide RNA
guggaauggaagcggagacag

SEQ ID NO: 8983 - RNA, 21 nt, Artificial Sequence
  Guide RNA
uaaugaugaacuaguggaaug

SEQ ID NO: 8984 - RNA, 21 nt, Artificial Sequence
  Guide RNA
uaguggaauggaagcggagac

SEQ ID NO: 8985 - RNA, 21 nt, Artificial Sequence
  Guide RNA
uccauuccacuaguucaucau

SEQ ID NO: 8986 - RNA, 21 nt, Artificial Sequence
  Guide RNA
uccgcuuccauuccacuaguu

SEQ ID NO: 8987 - RNA, 21 nt, Artificial Sequence
  Guide RNA
ucuccgcuuccauuccacuag

SEQ ID NO: 8988 - RNA, 21 nt, Artificial Sequence
  Guide RNA
ucugcugucuccgcuuccauu

SEQ ID NO: 8989 - RNA, 21 nt, Artificial Sequence
  Guide RNA
ugaacuaguggaauggaagcg

SEQ ID NO: 8990 - RNA, 21 nt, Artificial Sequence
  Guide RNA
ugaugaacuaguggaauggaa

SEQ ID NO: 8991 - RNA, 21 nt, Artificial Sequence
  Guide RNA
ugauuaaugaugaacuagugg

SEQ ID NO: 8992 - RNA, 21 nt, Artificial Sequence
  Guide RNA
ugcugucuccgcuuccauucc

SEQ ID NO: 8993 - RNA, 21 nt, Artificial Sequence
  Guide RNA
uggaauggaagcggagacagc

SEQ ID NO: 8994 - RNA, 21 nt, Artificial Sequence
  Guide RNA
ugucuccgcuuccauuccacu

SEQ ID NO: 8995 - RNA, 21 nt, Artificial Sequence
  Guide RNA
uuccauuccacuaguucauca

SEQ ID NO: 8996 - RNA, 22 nt, Artificial Sequence
  Guide RNA
aacuaguggaauggaagcggag

SEQ ID NO: 8997 - RNA, 22 nt, Artificial Sequence
  Guide RNA
aaugaugaacuaguggaaugga

SEQ ID NO: 8998 - RNA, 22 nt, Artificial Sequence
  Guide RNA
aauggaagcggagacagcagag

SEQ ID NO: 8999 - RNA, 22 nt, Artificial Sequence
  Guide RNA
acuaguggaauggaagcggaga

SEQ ID NO: 9000 - RNA, 22 nt, Artificial Sequence
  Guide RNA
aggcgcucugcugucuccgcuu

SEQ ID NO: 9001 - RNA, 22 nt, Artificial Sequence
  Guide RNA
aguggaauggaagcggagacag

SEQ ID NO: 9002 - RNA, 22 nt, Artificial Sequence
  Guide RNA
augaacuaguggaauggaagcg

SEQ ID NO: 9003 - RNA, 22 nt, Artificial Sequence
  Guide RNA
augaugaacuaguggaauggaa

SEQ ID NO: 9004 - RNA, 22 nt, Artificial Sequence
  Guide RNA
cauuccacuaguucaucauuaa

SEQ ID NO: 9005 - RNA, 22 nt, Artificial Sequence
  Guide RNA
ccauuccacuaguucaucauua

SEQ ID NO: 9006 - RNA, 22 nt, Artificial Sequence
  Guide RNA
cccugauuaaugaugaacuagu

SEQ ID NO: 9007 - RNA, 22 nt, Artificial Sequence
  Guide RNA
ccgcuuccauuccacuaguuca

SEQ ID NO: 9008 - RNA, 22 nt, Artificial Sequence
  Guide RNA
ccugauuaaugaugaacuagug

SEQ ID NO: 9009 - RNA, 22 nt, Artificial Sequence
  Guide RNA
cgcucugcugucuccgcuucca

SEQ ID NO: 9010 - RNA, 22 nt, Artificial Sequence
  Guide RNA
cgcuuccauuccacuaguucau

SEQ ID NO: 9011 - RNA, 22 nt, Artificial Sequence
  Guide RNA
cuaguggaauggaagcggagac

SEQ ID NO: 9012 - RNA, 22 nt, Artificial Sequence
  Guide RNA
cuccgcuuccauuccacuaguu

SEQ ID NO: 9013 - RNA, 22 nt, Artificial Sequence
  Guide RNA
cucugcugucuccgcuuccauu

SEQ ID NO: 9014 - RNA, 22 nt, Artificial Sequence
  Guide RNA
cugauuaaugaugaacuagugg

SEQ ID NO: 9015 - RNA, 22 nt, Artificial Sequence
  Guide RNA
cugcugucuccgcuuccauucc

SEQ ID NO: 9016 - RNA, 22 nt, Artificial Sequence
  Guide RNA
cugucuccgcuuccauuccacu

SEQ ID NO: 9017 - RNA, 22 nt, Artificial Sequence
  Guide RNA
cuuccauuccacuaguucauca

SEQ ID NO: 9018 - RNA, 22 nt, Artificial Sequence
  Guide RNA
gaacuaguggaauggaagcgga

SEQ ID NO: 9019 - RNA, 22 nt, Artificial Sequence
  Guide RNA
gaauggaagcggagacagcaga

SEQ ID NO: 9020 - RNA, 22 nt, Artificial Sequence
  Guide RNA
gaugaacuaguggaauggaagc

SEQ ID NO: 9021 - RNA, 22 nt, Artificial Sequence
  Guide RNA
gauuaaugaugaacuaguggaa

SEQ ID NO: 9022 - RNA, 22 nt, Artificial Sequence
  Guide RNA
gcgcucugcugucuccgcuucc

SEQ ID NO: 9023 - RNA, 22 nt, Artificial Sequence
  Guide RNA
gcucugcugucuccgcuuccau

SEQ ID NO: 9024 - RNA, 22 nt, Artificial Sequence
  Guide RNA
gcugucuccgcuuccauuccac

SEQ ID NO: 9025 - RNA, 22 nt, Artificial Sequence
  Guide RNA
gcuuccauuccacuaguucauc

SEQ ID NO: 9026 - RNA, 22 nt, Artificial Sequence
  Guide RNA
ggaauggaagcggagacagcag

SEQ ID NO: 9027 - RNA, 22 nt, Artificial Sequence
  Guide RNA
ggcgcucugcugucuccgcuuc

SEQ ID NO: 9028 - RNA, 22 nt, Artificial Sequence
  Guide RNA
gucuccgcuuccauuccacuag

SEQ ID NO: 9029 - RNA, 22 nt, Artificial Sequence
  Guide RNA
guggaauggaagcggagacagc

SEQ ID NO: 9030 - RNA, 22 nt, Artificial Sequence
  Guide RNA
uaaugaugaacuaguggaaugg

SEQ ID NO: 9031 - RNA, 22 nt, Artificial Sequence
  Guide RNA
uaguggaauggaagcggagaca

SEQ ID NO: 9032 - RNA, 22 nt, Artificial Sequence
  Guide RNA
uccauuccacuaguucaucauu

SEQ ID NO: 9033 - RNA, 22 nt, Artificial Sequence
  Guide RNA
uccgcuuccauuccacuaguuc

SEQ ID NO: 9034 - RNA, 22 nt, Artificial Sequence
  Guide RNA
ucuccgcuuccauuccacuagu

SEQ ID NO: 9035 - RNA, 22 nt, Artificial Sequence
  Guide RNA
ucugcugucuccgcuuccauuc

SEQ ID NO: 9036 - RNA, 22 nt, Artificial Sequence
  Guide RNA
ugaacuaguggaauggaagcgg

SEQ ID NO: 9037 - RNA, 22 nt, Artificial Sequence
  Guide RNA
ugaugaacuaguggaauggaag

SEQ ID NO: 9038 - RNA, 22 nt, Artificial Sequence
  Guide RNA
ugauuaaugaugaacuagugga

SEQ ID NO: 9039 - RNA, 22 nt, Artificial Sequence
  Guide RNA
ugcugucuccgcuuccauucca

SEQ ID NO: 9040 - RNA, 22 nt, Artificial Sequence
  Guide RNA
uggaauggaagcggagacagca

SEQ ID NO: 9041 - RNA, 22 nt, Artificial Sequence
  Guide RNA
ugucuccgcuuccauuccacua

SEQ ID NO: 9042 - RNA, 22 nt, Artificial Sequence
  Guide RNA
uuaaugaugaacuaguggaaug

SEQ ID NO: 9043 - RNA, 22 nt, Artificial Sequence
  Guide RNA
uuccauuccacuaguucaucau

SEQ ID NO: 9044 - RNA, 20 nt, Artificial Sequence
  Guide RNA
aacagcuguuacucaagaag

SEQ ID NO: 9045 - RNA, 20 nt, Artificial Sequence
  Guide RNA
acagcuguuacucaagaaga

SEQ ID NO: 9046 - RNA, 20 nt, Artificial Sequence
  Guide RNA
agcuguuacucaagaagaua

SEQ ID NO: 9047 - RNA, 20 nt, Artificial Sequence
  Guide RNA
auaucuucuugaguaacagc

SEQ ID NO: 9048 - RNA, 20 nt, Artificial Sequence
  Guide RNA
cagcuguuacucaagaagau

SEQ ID NO: 9049 - RNA, 20 nt, Artificial Sequence
  Guide RNA
cucuuauugucaagcauuaa

SEQ ID NO: 9050 - RNA, 20 nt, Artificial Sequence
  Guide RNA
cuguuacucaagaagauaua

SEQ ID NO: 9051 - RNA, 20 nt, Artificial Sequence
  Guide RNA
gaacagcuguuacucaagaa

SEQ ID NO: 9052 - RNA, 20 nt, Artificial Sequence
  Guide RNA
gcuguuacucaagaagauau

SEQ ID NO: 9053 - RNA, 20 nt, Artificial Sequence
  Guide RNA
uauaucuucuugaguaacag

SEQ ID NO: 9054 - RNA, 21 nt, Artificial Sequence
  Guide RNA
aacagcuguuacucaagaaga

SEQ ID NO: 9055 - RNA, 21 nt, Artificial Sequence
  Guide RNA
acagcuguuacucaagaagau

SEQ ID NO: 9056 - RNA, 21 nt, Artificial Sequence
  Guide RNA
agaacagcuguuacucaagaa

SEQ ID NO: 9057 - RNA, 21 nt, Artificial Sequence
  Guide RNA
agcuguuacucaagaagauau

SEQ ID NO: 9058 - RNA, 21 nt, Artificial Sequence
  Guide RNA
auaucuucuugaguaacagcu

SEQ ID NO: 9059 - RNA, 21 nt, Artificial Sequence
  Guide RNA
cagcuguuacucaagaagaua

SEQ ID NO: 9060 - RNA, 21 nt, Artificial Sequence
  Guide RNA
gaacagcuguuacucaagaag

SEQ ID NO: 9061 - RNA, 21 nt, Artificial Sequence
  Guide RNA
gcuguuacucaagaagauaua

SEQ ID NO: 9062 - RNA, 21 nt, Artificial Sequence
  Guide RNA
uauaucuucuugaguaacagc

SEQ ID NO: 9063 - RNA, 22 nt, Artificial Sequence
  Guide RNA
aacagcuguuacucaagaagau

SEQ ID NO: 9064 - RNA, 22 nt, Artificial Sequence
  Guide RNA
aagaacagcuguuacucaagaa

SEQ ID NO: 9065 - RNA, 22 nt, Artificial Sequence
  Guide RNA
acagcuguuacucaagaagaua

SEQ ID NO: 9066 - RNA, 22 nt, Artificial Sequence
  Guide RNA
agaacagcuguuacucaagaag

SEQ ID NO: 9067 - RNA, 22 nt, Artificial Sequence
  Guide RNA
agcuguuacucaagaagauaua

SEQ ID NO: 9068 - RNA, 22 nt, Artificial Sequence
  Guide RNA
auauaucuucuugaguaacagc

SEQ ID NO: 9069 - RNA, 22 nt, Artificial Sequence
  Guide RNA
auaucuucuugaguaacagcug

SEQ ID NO: 9070 - RNA, 22 nt, Artificial Sequence
  Guide RNA
cagcuguuacucaagaagauau

SEQ ID NO: 9071 - RNA, 22 nt, Artificial Sequence
  Guide RNA
gaacagcuguuacucaagaaga

SEQ ID NO: 9072 - RNA, 22 nt, Artificial Sequence
  Guide RNA
gcuguuacucaagaagauauau

SEQ ID NO: 9073 - RNA, 22 nt, Artificial Sequence
  Guide RNA
uauaucuucuugaguaacagcu

SEQ ID NO: 9074 - RNA, 20 nt, Artificial Sequence
  Guide RNA
aaauacaccuucuugaguaa

SEQ ID NO: 9075 - RNA, 20 nt, Artificial Sequence
  Guide RNA
aagaacagcuguuacucaag

SEQ ID NO: 9076 - RNA, 20 nt, Artificial Sequence
  Guide RNA
aagaagguguauuuaaugcu

SEQ ID NO: 9077 - RNA, 20 nt, Artificial Sequence
  Guide RNA
aagcauuaaauacaccuucu

SEQ ID NO: 9078 - RNA, 20 nt, Artificial Sequence
  Guide RNA
aagguguauuuaaugcuuga

SEQ ID NO: 9079 - RNA, 20 nt, Artificial Sequence
  Guide RNA
aauacaccuucuugaguaac

SEQ ID NO: 9080 - RNA, 20 nt, Artificial Sequence
  Guide RNA
acaccuucuugaguaacagc

SEQ ID NO: 9081 - RNA, 20 nt, Artificial Sequence
  Guide RNA
acagcuguuacucaagaagg

SEQ ID NO: 9082 - RNA, 20 nt, Artificial Sequence
  Guide RNA
accuucuugaguaacagcug

SEQ ID NO: 9083 - RNA, 20 nt, Artificial Sequence
  Guide RNA
acucaagaagguguauuuaa

SEQ ID NO: 9084 - RNA, 20 nt, Artificial Sequence
  Guide RNA
agaacagcuguuacucaaga

SEQ ID NO: 9085 - RNA, 20 nt, Artificial Sequence
  Guide RNA
agaagguguauuuaaugcuu

SEQ ID NO: 9086 - RNA, 20 nt, Artificial Sequence
  Guide RNA
agcauuaaauacaccuucuu

SEQ ID NO: 9087 - RNA, 20 nt, Artificial Sequence
  Guide RNA
agcuguuacucaagaaggug

SEQ ID NO: 9088 - RNA, 20 nt, Artificial Sequence
  Guide RNA
agguguauuuaaugcuugac

SEQ ID NO: 9089 - RNA, 20 nt, Artificial Sequence
  Guide RNA
auacaccuucuugaguaaca

SEQ ID NO: 9090 - RNA, 20 nt, Artificial Sequence
  Guide RNA
auuaaauacaccuucuugag

SEQ ID NO: 9091 - RNA, 20 nt, Artificial Sequence
  Guide RNA
caagaagguguauuuaaugc

SEQ ID NO: 9092 - RNA, 20 nt, Artificial Sequence
  Guide RNA
caagcauuaaauacaccuuc

SEQ ID NO: 9093 - RNA, 20 nt, Artificial Sequence
  Guide RNA
caccuucuugaguaacagcu

SEQ ID NO: 9094 - RNA, 20 nt, Artificial Sequence
  Guide RNA
cagcuguuacucaagaaggu

SEQ ID NO: 9095 - RNA, 20 nt, Artificial Sequence
  Guide RNA
cauuaaauacaccuucuuga

SEQ ID NO: 9096 - RNA, 20 nt, Artificial Sequence
  Guide RNA
cucaagaagguguauuuaau

SEQ ID NO: 9097 - RNA, 20 nt, Artificial Sequence
  Guide RNA
cuguuacucaagaaggugua

SEQ ID NO: 9098 - RNA, 20 nt, Artificial Sequence
  Guide RNA
gaagguguauuuaaugcuug

SEQ ID NO: 9099 - RNA, 20 nt, Artificial Sequence
  Guide RNA
gcauuaaauacaccuucuug

SEQ ID NO: 9100 - RNA, 20 nt, Artificial Sequence
  Guide RNA
gcuguuacucaagaaggugu

SEQ ID NO: 9101 - RNA, 20 nt, Artificial Sequence
  Guide RNA
gguguauuuaaugcuugaca

SEQ ID NO: 9102 - RNA, 20 nt, Artificial Sequence
  Guide RNA
gucaagcauuaaauacaccu

SEQ ID NO: 9103 - RNA, 20 nt, Artificial Sequence
  Guide RNA
guuacucaagaagguguauu

SEQ ID NO: 9104 - RNA, 20 nt, Artificial Sequence
  Guide RNA
uaaauacaccuucuugagua

SEQ ID NO: 9105 - RNA, 20 nt, Artificial Sequence
  Guide RNA
uacaccuucuugaguaacag

SEQ ID NO: 9106 - RNA, 20 nt, Artificial Sequence
  Guide RNA
uacucaagaagguguauuua

SEQ ID NO: 9107 - RNA, 20 nt, Artificial Sequence
  Guide RNA
ucaagaagguguauuuaaug

SEQ ID NO: 9108 - RNA, 20 nt, Artificial Sequence
  Guide RNA
ucaagcauuaaauacaccuu

SEQ ID NO: 9109 - RNA, 20 nt, Artificial Sequence
  Guide RNA
ugucaagcauuaaauacacc

SEQ ID NO: 9110 - RNA, 20 nt, Artificial Sequence
  Guide RNA
uguuacucaagaagguguau

SEQ ID NO: 9111 - RNA, 20 nt, Artificial Sequence
  Guide RNA
uuaaauacaccuucuugagu

SEQ ID NO: 9112 - RNA, 20 nt, Artificial Sequence
  Guide RNA
uuacucaagaagguguauuu

SEQ ID NO: 9113 - RNA, 20 nt, Artificial Sequence
  Guide RNA
uugucaagcauuaaauacac

SEQ ID NO: 9114 - RNA, 21 nt, Artificial Sequence
  Guide RNA
aaauacaccuucuugaguaac

SEQ ID NO: 9115 - RNA, 21 nt, Artificial Sequence
  Guide RNA
aacagcuguuacucaagaagg

SEQ ID NO: 9116 - RNA, 21 nt, Artificial Sequence
  Guide RNA
aagaacagcuguuacucaaga

SEQ ID NO: 9117 - RNA, 21 nt, Artificial Sequence
  Guide RNA
aagguguauuuaaugcuugac

SEQ ID NO: 9118 - RNA, 21 nt, Artificial Sequence
  Guide RNA
aauacaccuucuugaguaaca

SEQ ID NO: 9119 - RNA, 21 nt, Artificial Sequence
  Guide RNA
acaccuucuugaguaacagcu

SEQ ID NO: 9120 - RNA, 21 nt, Artificial Sequence
  Guide RNA
acagcuguuacucaagaaggu

SEQ ID NO: 9121 - RNA, 21 nt, Artificial Sequence
  Guide RNA
accuucuugaguaacagcugu

SEQ ID NO: 9122 - RNA, 21 nt, Artificial Sequence
  Guide RNA
agaagguguauuuaaugcuug

SEQ ID NO: 9123 - RNA, 21 nt, Artificial Sequence
  Guide RNA
agcauuaaauacaccuucuug

SEQ ID NO: 9124 - RNA, 21 nt, Artificial Sequence
  Guide RNA
agcuguuacucaagaaggugu

SEQ ID NO: 9125 - RNA, 21 nt, Artificial Sequence
  Guide RNA
agguguauuuaaugcuugaca

SEQ ID NO: 9126 - RNA, 21 nt, Artificial Sequence
  Guide RNA
auacaccuucuugaguaacag

SEQ ID NO: 9127 - RNA, 21 nt, Artificial Sequence
  Guide RNA
caagaacagcuguuacucaag

SEQ ID NO: 9128 - RNA, 21 nt, Artificial Sequence
  Guide RNA
caagaagguguauuuaaugcu

SEQ ID NO: 9129 - RNA, 21 nt, Artificial Sequence
  Guide RNA
caagcauuaaauacaccuucu

SEQ ID NO: 9130 - RNA, 21 nt, Artificial Sequence
  Guide RNA
caccuucuugaguaacagcug

SEQ ID NO: 9131 - RNA, 21 nt, Artificial Sequence
  Guide RNA
cagcuguuacucaagaaggug

SEQ ID NO: 9132 - RNA, 21 nt, Artificial Sequence
  Guide RNA
cauuaaauacaccuucuugag

SEQ ID NO: 9133 - RNA, 21 nt, Artificial Sequence
  Guide RNA
cucaagaagguguauuuaaug

SEQ ID NO: 9134 - RNA, 21 nt, Artificial Sequence
  Guide RNA
cuguuacucaagaagguguau

SEQ ID NO: 9135 - RNA, 21 nt, Artificial Sequence
  Guide RNA
gaagguguauuuaaugcuuga

SEQ ID NO: 9136 - RNA, 21 nt, Artificial Sequence
  Guide RNA
gcauuaaauacaccuucuuga

SEQ ID NO: 9137 - RNA, 21 nt, Artificial Sequence
  Guide RNA
gcuguuacucaagaaggugua

SEQ ID NO: 9138 - RNA, 21 nt, Artificial Sequence
  Guide RNA
gguguauuuaaugcuugacaa

SEQ ID NO: 9139 - RNA, 21 nt, Artificial Sequence
  Guide RNA
gucaagcauuaaauacaccuu

SEQ ID NO: 9140 - RNA, 21 nt, Artificial Sequence
  Guide RNA
guuacucaagaagguguauuu

SEQ ID NO: 9141 - RNA, 21 nt, Artificial Sequence
  Guide RNA
uacaccuucuugaguaacagc

SEQ ID NO: 9142 - RNA, 21 nt, Artificial Sequence
  Guide RNA
ucaagaagguguauuuaaugc

SEQ ID NO: 9143 - RNA, 21 nt, Artificial Sequence
  Guide RNA
ucaagcauuaaauacaccuuc

SEQ ID NO: 9144 - RNA, 21 nt, Artificial Sequence
  Guide RNA
ugucaagcauuaaauacaccu

SEQ ID NO: 9145 - RNA, 21 nt, Artificial Sequence
  Guide RNA
uguuacucaagaagguguauu

SEQ ID NO: 9146 - RNA, 21 nt, Artificial Sequence
  Guide RNA
uugucaagcauuaaauacacc

SEQ ID NO: 9147 - RNA, 22 nt, Artificial Sequence
  Guide RNA
aaauacaccuucuugaguaaca

SEQ ID NO: 9148 - RNA, 22 nt, Artificial Sequence
  Guide RNA
aacagcuguuacucaagaaggu

SEQ ID NO: 9149 - RNA, 22 nt, Artificial Sequence
  Guide RNA
aagaagguguauuuaaugcuug

SEQ ID NO: 9150 - RNA, 22 nt, Artificial Sequence
  Guide RNA
aagcauuaaauacaccuucuug

SEQ ID NO: 9151 - RNA, 22 nt, Artificial Sequence
  Guide RNA
aagguguauuuaaugcuugaca

SEQ ID NO: 9152 - RNA, 22 nt, Artificial Sequence
  Guide RNA
aauacaccuucuugaguaacag

SEQ ID NO: 9153 - RNA, 22 nt, Artificial Sequence
  Guide RNA
acaagaacagcuguuacucaag

SEQ ID NO: 9154 - RNA, 22 nt, Artificial Sequence
  Guide RNA
acaccuucuugaguaacagcug

SEQ ID NO: 9155 - RNA, 22 nt, Artificial Sequence
  Guide RNA
acagcuguuacucaagaaggug

SEQ ID NO: 9156 - RNA, 22 nt, Artificial Sequence
  Guide RNA
accuucuugaguaacagcuguu

SEQ ID NO: 9157 - RNA, 22 nt, Artificial Sequence
  Guide RNA
acucaagaagguguauuuaaug

SEQ ID NO: 9158 - RNA, 22 nt, Artificial Sequence
  Guide RNA
agaagguguauuuaaugcuuga

SEQ ID NO: 9159 - RNA, 22 nt, Artificial Sequence
  Guide RNA
agcauuaaauacaccuucuuga

SEQ ID NO: 9160 - RNA, 22 nt, Artificial Sequence
  Guide RNA
agcuguuacucaagaaggugua

SEQ ID NO: 9161 - RNA, 22 nt, Artificial Sequence
  Guide RNA
agguguauuuaaugcuugacaa

SEQ ID NO: 9162 - RNA, 22 nt, Artificial Sequence
  Guide RNA
auacaccuucuugaguaacagc

SEQ ID NO: 9163 - RNA, 22 nt, Artificial Sequence
  Guide RNA
auugucaagcauuaaauacacc

SEQ ID NO: 9164 - RNA, 22 nt, Artificial Sequence
  Guide RNA
caagaacagcuguuacucaaga

SEQ ID NO: 9165 - RNA, 22 nt, Artificial Sequence
  Guide RNA
caagaagguguauuuaaugcuu

SEQ ID NO: 9166 - RNA, 22 nt, Artificial Sequence
  Guide RNA
caagcauuaaauacaccuucuu

SEQ ID NO: 9167 - RNA, 22 nt, Artificial Sequence
  Guide RNA
caccuucuugaguaacagcugu

SEQ ID NO: 9168 - RNA, 22 nt, Artificial Sequence
  Guide RNA
cagcuguuacucaagaaggugu

SEQ ID NO: 9169 - RNA, 22 nt, Artificial Sequence
  Guide RNA
cauuaaauacaccuucuugagu

SEQ ID NO: 9170 - RNA, 22 nt, Artificial Sequence
  Guide RNA
cucaagaagguguauuuaaugc

SEQ ID NO: 9171 - RNA, 22 nt, Artificial Sequence
  Guide RNA
cuguuacucaagaagguguauu

SEQ ID NO: 9172 - RNA, 22 nt, Artificial Sequence
  Guide RNA
gaacagcuguuacucaagaagg

SEQ ID NO: 9173 - RNA, 22 nt, Artificial Sequence
  Guide RNA
gaagguguauuuaaugcuugac

SEQ ID NO: 9174 - RNA, 22 nt, Artificial Sequence
  Guide RNA
gcauuaaauacaccuucuugag

SEQ ID NO: 9175 - RNA, 22 nt, Artificial Sequence
  Guide RNA
gcuguuacucaagaagguguau

SEQ ID NO: 9176 - RNA, 22 nt, Artificial Sequence
  Guide RNA
gguguauuuaaugcuugacaau

SEQ ID NO: 9177 - RNA, 22 nt, Artificial Sequence
  Guide RNA
gucaagcauuaaauacaccuuc

SEQ ID NO: 9178 - RNA, 22 nt, Artificial Sequence
  Guide RNA
guuacucaagaagguguauuua

SEQ ID NO: 9179 - RNA, 22 nt, Artificial Sequence
  Guide RNA
uaaauacaccuucuugaguaac

SEQ ID NO: 9180 - RNA, 22 nt, Artificial Sequence
  Guide RNA
uacaccuucuugaguaacagcu

SEQ ID NO: 9181 - RNA, 22 nt, Artificial Sequence
  Guide RNA
ucaagaagguguauuuaaugcu

SEQ ID NO: 9182 - RNA, 22 nt, Artificial Sequence
  Guide RNA
ucaagcauuaaauacaccuucu

SEQ ID NO: 9183 - RNA, 22 nt, Artificial Sequence
  Guide RNA
ugucaagcauuaaauacaccuu

SEQ ID NO: 9184 - RNA, 22 nt, Artificial Sequence
  Guide RNA
uguuacucaagaagguguauuu

SEQ ID NO: 9185 - RNA, 22 nt, Artificial Sequence
  Guide RNA
uugucaagcauuaaauacaccu

SEQ ID NO: 9186 - RNA, 20 nt, Artificial Sequence
  Guide RNA
aacagcuguuacucaagaau

SEQ ID NO: 9187 - RNA, 20 nt, Artificial Sequence
  Guide RNA
acagcuguuacucaagaaua

SEQ ID NO: 9188 - RNA, 20 nt, Artificial Sequence
  Guide RNA
acauauucuugaguaacagc

SEQ ID NO: 9189 - RNA, 20 nt, Artificial Sequence
  Guide RNA
agcuguuacucaagaauaug

SEQ ID NO: 9190 - RNA, 20 nt, Artificial Sequence
  Guide RNA
auauucuugaguaacagcug

SEQ ID NO: 9191 - RNA, 20 nt, Artificial Sequence
  Guide RNA
caagaacagcuguuacucaa

SEQ ID NO: 9192 - RNA, 20 nt, Artificial Sequence
  Guide RNA
cagcuguuacucaagaauau

SEQ ID NO: 9193 - RNA, 20 nt, Artificial Sequence
  Guide RNA
cauauucuugaguaacagcu

SEQ ID NO: 9194 - RNA, 20 nt, Artificial Sequence
  Guide RNA
cuguuacucaagaauaugua

SEQ ID NO: 9195 - RNA, 20 nt, Artificial Sequence
  Guide RNA
gcuguuacucaagaauaugu

SEQ ID NO: 9196 - RNA, 20 nt, Artificial Sequence
  Guide RNA
uacauauucuugaguaacag

SEQ ID NO: 9197 - RNA, 20 nt, Artificial Sequence
  Guide RNA
uauucuugaguaacagcugu

SEQ ID NO: 9198 - RNA, 21 nt, Artificial Sequence
  Guide RNA
aacagcuguuacucaagaaua

SEQ ID NO: 9199 - RNA, 21 nt, Artificial Sequence
  Guide RNA
acaagaacagcuguuacucaa

SEQ ID NO: 9200 - RNA, 21 nt, Artificial Sequence
  Guide RNA
acagcuguuacucaagaauau

SEQ ID NO: 9201 - RNA, 21 nt, Artificial Sequence
  Guide RNA
acauauucuugaguaacagcu

SEQ ID NO: 9202 - RNA, 21 nt, Artificial Sequence
  Guide RNA
agcuguuacucaagaauaugu

SEQ ID NO: 9203 - RNA, 21 nt, Artificial Sequence
  Guide RNA
auauucuugaguaacagcugu

SEQ ID NO: 9204 - RNA, 21 nt, Artificial Sequence
  Guide RNA
cagcuguuacucaagaauaug

SEQ ID NO: 9205 - RNA, 21 nt, Artificial Sequence
  Guide RNA
cauauucuugaguaacagcug

SEQ ID NO: 9206 - RNA, 21 nt, Artificial Sequence
  Guide RNA
gaacagcuguuacucaagaau

SEQ ID NO: 9207 - RNA, 21 nt, Artificial Sequence
  Guide RNA
gcuguuacucaagaauaugua

SEQ ID NO: 9208 - RNA, 21 nt, Artificial Sequence
  Guide RNA
uacauauucuugaguaacagc

SEQ ID NO: 9209 - RNA, 21 nt, Artificial Sequence
  Guide RNA
uauucuugaguaacagcuguu

SEQ ID NO: 9210 - RNA, 22 nt, Artificial Sequence
  Guide RNA
aacaagaacagcuguuacucaa

SEQ ID NO: 9211 - RNA, 22 nt, Artificial Sequence
  Guide RNA
aacagcuguuacucaagaauau

SEQ ID NO: 9212 - RNA, 22 nt, Artificial Sequence
  Guide RNA
acagcuguuacucaagaauaug

SEQ ID NO: 9213 - RNA, 22 nt, Artificial Sequence
  Guide RNA
acauauucuugaguaacagcug

SEQ ID NO: 9214 - RNA, 22 nt, Artificial Sequence
  Guide RNA
agaacagcuguuacucaagaau

SEQ ID NO: 9215 - RNA, 22 nt, Artificial Sequence
  Guide RNA
agcuguuacucaagaauaugua

SEQ ID NO: 9216 - RNA, 22 nt, Artificial Sequence
  Guide RNA
auacauauucuugaguaacagc

SEQ ID NO: 9217 - RNA, 22 nt, Artificial Sequence
  Guide RNA
auauucuugaguaacagcuguu

SEQ ID NO: 9218 - RNA, 22 nt, Artificial Sequence
  Guide RNA
cagcuguuacucaagaauaugu

SEQ ID NO: 9219 - RNA, 22 nt, Artificial Sequence
  Guide RNA
cauauucuugaguaacagcugu

SEQ ID NO: 9220 - RNA, 22 nt, Artificial Sequence
  Guide RNA
gaacagcuguuacucaagaaua

SEQ ID NO: 9221 - RNA, 22 nt, Artificial Sequence
  Guide RNA
gcuguuacucaagaauauguau

SEQ ID NO: 9222 - RNA, 22 nt, Artificial Sequence
  Guide RNA
uacauauucuugaguaacagcu

SEQ ID NO: 9223 - RNA, 22 nt, Artificial Sequence
  Guide RNA
uauucuugaguaacagcuguuc

SEQ ID NO: 9224 - RNA, 20 nt, Artificial Sequence
  Guide RNA
aaaaccuugcagaaaagagg

SEQ ID NO: 9225 - RNA, 20 nt, Artificial Sequence
  Guide RNA
aaaagagguaaggguucaca

SEQ ID NO: 9226 - RNA, 20 nt, Artificial Sequence
  Guide RNA
aaaccuugcagaaaagaggu

SEQ ID NO: 9227 - RNA, 20 nt, Artificial Sequence
  Guide RNA
aaagagguaaggguucacaa

SEQ ID NO: 9228 - RNA, 20 nt, Artificial Sequence
  Guide RNA
aaaugcaaaaccuugcagaa

SEQ ID NO: 9229 - RNA, 20 nt, Artificial Sequence
  Guide RNA
aacccuuaccucuuuucugc

SEQ ID NO: 9230 - RNA, 20 nt, Artificial Sequence
  Guide RNA
aaccuugcagaaaagaggua

SEQ ID NO: 9231 - RNA, 20 nt, Artificial Sequence
  Guide RNA
aaugcaaaaccuugcagaaa

SEQ ID NO: 9232 - RNA, 20 nt, Artificial Sequence
  Guide RNA
acccuuaccucuuuucugca

SEQ ID NO: 9233 - RNA, 20 nt, Artificial Sequence
  Guide RNA
accucuuuucugcaagguuu

SEQ ID NO: 9234 - RNA, 20 nt, Artificial Sequence
  Guide RNA
accuugcagaaaagagguaa

SEQ ID NO: 9235 - RNA, 20 nt, Artificial Sequence
  Guide RNA
agaaaagagguaaggguuca

SEQ ID NO: 9236 - RNA, 20 nt, Artificial Sequence
  Guide RNA
aguugugaacccuuaccucu

SEQ ID NO: 9237 - RNA, 20 nt, Artificial Sequence
  Guide RNA
augcaaaaccuugcagaaaa

SEQ ID NO: 9238 - RNA, 20 nt, Artificial Sequence
  Guide RNA
caaaaccuugcagaaaagag

SEQ ID NO: 9239 - RNA, 20 nt, Artificial Sequence
  Guide RNA
caaaugcaaaaccuugcaga

SEQ ID NO: 9240 - RNA, 20 nt, Artificial Sequence
  Guide RNA
cagaaaagagguaaggguuc

SEQ ID NO: 9241 - RNA, 20 nt, Artificial Sequence
  Guide RNA
caguugugaacccuuaccuc

SEQ ID NO: 9242 - RNA, 20 nt, Artificial Sequence
  Guide RNA
cccuuaccucuuuucugcaa

SEQ ID NO: 9243 - RNA, 20 nt, Artificial Sequence
  Guide RNA
ccucuuuucugcaagguuuu

SEQ ID NO: 9244 - RNA, 20 nt, Artificial Sequence
  Guide RNA
ccuuaccucuuuucugcaag

SEQ ID NO: 9245 - RNA, 20 nt, Artificial Sequence
  Guide RNA
ccuugcagaaaagagguaag

SEQ ID NO: 9246 - RNA, 20 nt, Artificial Sequence
  Guide RNA
cucuuuucugcaagguuuug

SEQ ID NO: 9247 - RNA, 20 nt, Artificial Sequence
  Guide RNA
cuuaccucuuuucugcaagg

SEQ ID NO: 9248 - RNA, 20 nt, Artificial Sequence
  Guide RNA
cuugcagaaaagagguaagg

SEQ ID NO: 9249 - RNA, 20 nt, Artificial Sequence
  Guide RNA
cuuuucugcaagguuuugca

SEQ ID NO: 9250 - RNA, 20 nt, Artificial Sequence
  Guide RNA
gaaaagagguaaggguucac

SEQ ID NO: 9251 - RNA, 20 nt, Artificial Sequence
  Guide RNA
gaacccuuaccucuuuucug

SEQ ID NO: 9252 - RNA, 20 nt, Artificial Sequence
  Guide RNA
gcaaaaccuugcagaaaaga

SEQ ID NO: 9253 - RNA, 20 nt, Artificial Sequence
  Guide RNA
gcagaaaagagguaaggguu

SEQ ID NO: 9254 - RNA, 20 nt, Artificial Sequence
  Guide RNA
gugaacccuuaccucuuuuc

SEQ ID NO: 9255 - RNA, 20 nt, Artificial Sequence
  Guide RNA
guugugaacccuuaccucuu

SEQ ID NO: 9256 - RNA, 20 nt, Artificial Sequence
  Guide RNA
uaccucuuuucugcaagguu

SEQ ID NO: 9257 - RNA, 20 nt, Artificial Sequence
  Guide RNA
ucaaaugcaaaaccuugcag

SEQ ID NO: 9258 - RNA, 20 nt, Artificial Sequence
  Guide RNA
ucaguugugaacccuuaccu

SEQ ID NO: 9259 - RNA, 20 nt, Artificial Sequence
  Guide RNA
ucuuuucugcaagguuuugc

SEQ ID NO: 9260 - RNA, 20 nt, Artificial Sequence
  Guide RNA
ugaacccuuaccucuuuucu

SEQ ID NO: 9261 - RNA, 20 nt, Artificial Sequence
  Guide RNA
ugcaaaaccuugcagaaaag

SEQ ID NO: 9262 - RNA, 20 nt, Artificial Sequence
  Guide RNA
ugcagaaaagagguaagggu

SEQ ID NO: 9263 - RNA, 20 nt, Artificial Sequence
  Guide RNA
ugugaacccuuaccucuuuu

SEQ ID NO: 9264 - RNA, 20 nt, Artificial Sequence
  Guide RNA
uuaccucuuuucugcaaggu

SEQ ID NO: 9265 - RNA, 20 nt, Artificial Sequence
  Guide RNA
uucaaaugcaaaaccuugca

SEQ ID NO: 9266 - RNA, 20 nt, Artificial Sequence
  Guide RNA
uucaguugugaacccuuacc

SEQ ID NO: 9267 - RNA, 20 nt, Artificial Sequence
  Guide RNA
uugcagaaaagagguaaggg

SEQ ID NO: 9268 - RNA, 20 nt, Artificial Sequence
  Guide RNA
uugugaacccuuaccucuuu

SEQ ID NO: 9269 - RNA, 20 nt, Artificial Sequence
  Guide RNA
uuuucugcaagguuuugcau

SEQ ID NO: 9270 - RNA, 21 nt, Artificial Sequence
  Guide RNA
aaaaccuugcagaaaagaggu

SEQ ID NO: 9271 - RNA, 21 nt, Artificial Sequence
  Guide RNA
aaaagagguaaggguucacaa

SEQ ID NO: 9272 - RNA, 21 nt, Artificial Sequence
  Guide RNA
aaaccuugcagaaaagaggua

SEQ ID NO: 9273 - RNA, 21 nt, Artificial Sequence
  Guide RNA
aaagagguaaggguucacaac

SEQ ID NO: 9274 - RNA, 21 nt, Artificial Sequence
  Guide RNA
aaaugcaaaaccuugcagaaa

SEQ ID NO: 9275 - RNA, 21 nt, Artificial Sequence
  Guide RNA
aacccuuaccucuuuucugca

SEQ ID NO: 9276 - RNA, 21 nt, Artificial Sequence
  Guide RNA
aaccuugcagaaaagagguaa

SEQ ID NO: 9277 - RNA, 21 nt, Artificial Sequence
  Guide RNA
aaugcaaaaccuugcagaaaa

SEQ ID NO: 9278 - RNA, 21 nt, Artificial Sequence
  Guide RNA
acccuuaccucuuuucugcaa

SEQ ID NO: 9279 - RNA, 21 nt, Artificial Sequence
  Guide RNA
accucuuuucugcaagguuuu

SEQ ID NO: 9280 - RNA, 21 nt, Artificial Sequence
  Guide RNA
accuugcagaaaagagguaag

SEQ ID NO: 9281 - RNA, 21 nt, Artificial Sequence
  Guide RNA
agaaaagagguaaggguucac

SEQ ID NO: 9282 - RNA, 21 nt, Artificial Sequence
  Guide RNA
aguugugaacccuuaccucuu

SEQ ID NO: 9283 - RNA, 21 nt, Artificial Sequence
  Guide RNA
augcaaaaccuugcagaaaag

SEQ ID NO: 9284 - RNA, 21 nt, Artificial Sequence
  Guide RNA
caaaaccuugcagaaaagagg

SEQ ID NO: 9285 - RNA, 21 nt, Artificial Sequence
  Guide RNA
caaaugcaaaaccuugcagaa

SEQ ID NO: 9286 - RNA, 21 nt, Artificial Sequence
  Guide RNA
cagaaaagagguaaggguuca

SEQ ID NO: 9287 - RNA, 21 nt, Artificial Sequence
  Guide RNA
caguugugaacccuuaccucu

SEQ ID NO: 9288 - RNA, 21 nt, Artificial Sequence
  Guide RNA
cccuuaccucuuuucugcaag

SEQ ID NO: 9289 - RNA, 21 nt, Artificial Sequence
  Guide RNA
ccucuuuucugcaagguuuug

SEQ ID NO: 9290 - RNA, 21 nt, Artificial Sequence
  Guide RNA
ccuuaccucuuuucugcaagg

SEQ ID NO: 9291 - RNA, 21 nt, Artificial Sequence
  Guide RNA
ccuugcagaaaagagguaagg

SEQ ID NO: 9292 - RNA, 21 nt, Artificial Sequence
  Guide RNA
cucuuuucugcaagguuuugc

SEQ ID NO: 9293 - RNA, 21 nt, Artificial Sequence
  Guide RNA
cuuaccucuuuucugcaaggu

SEQ ID NO: 9294 - RNA, 21 nt, Artificial Sequence
  Guide RNA
cuucaaaugcaaaaccuugca

SEQ ID NO: 9295 - RNA, 21 nt, Artificial Sequence
  Guide RNA
cuucaguugugaacccuuacc

SEQ ID NO: 9296 - RNA, 21 nt, Artificial Sequence
  Guide RNA
cuugcagaaaagagguaaggg

SEQ ID NO: 9297 - RNA, 21 nt, Artificial Sequence
  Guide RNA
cuuuucugcaagguuuugcau

SEQ ID NO: 9298 - RNA, 21 nt, Artificial Sequence
  Guide RNA
gaaaagagguaaggguucaca

SEQ ID NO: 9299 - RNA, 21 nt, Artificial Sequence
  Guide RNA
gaacccuuaccucuuuucugc

SEQ ID NO: 9300 - RNA, 21 nt, Artificial Sequence
  Guide RNA
gcaaaaccuugcagaaaagag

SEQ ID NO: 9301 - RNA, 21 nt, Artificial Sequence
  Guide RNA
gcagaaaagagguaaggguuc

SEQ ID NO: 9302 - RNA, 21 nt, Artificial Sequence
  Guide RNA
gugaacccuuaccucuuuucu

SEQ ID NO: 9303 - RNA, 21 nt, Artificial Sequence
  Guide RNA
guugugaacccuuaccucuuu

SEQ ID NO: 9304 - RNA, 21 nt, Artificial Sequence
  Guide RNA
uaccucuuuucugcaagguuu

SEQ ID NO: 9305 - RNA, 21 nt, Artificial Sequence
  Guide RNA
ucaaaugcaaaaccuugcaga

SEQ ID NO: 9306 - RNA, 21 nt, Artificial Sequence
  Guide RNA
ucaguugugaacccuuaccuc

SEQ ID NO: 9307 - RNA, 21 nt, Artificial Sequence
  Guide RNA
ucuuuucugcaagguuuugca

SEQ ID NO: 9308 - RNA, 21 nt, Artificial Sequence
  Guide RNA
ugaacccuuaccucuuuucug

SEQ ID NO: 9309 - RNA, 21 nt, Artificial Sequence
  Guide RNA
ugcaaaaccuugcagaaaaga

SEQ ID NO: 9310 - RNA, 21 nt, Artificial Sequence
  Guide RNA
ugcagaaaagagguaaggguu

SEQ ID NO: 9311 - RNA, 21 nt, Artificial Sequence
  Guide RNA
ugugaacccuuaccucuuuuc

SEQ ID NO: 9312 - RNA, 21 nt, Artificial Sequence
  Guide RNA
uuaccucuuuucugcaagguu

SEQ ID NO: 9313 - RNA, 21 nt, Artificial Sequence
  Guide RNA
uucaaaugcaaaaccuugcag

SEQ ID NO: 9314 - RNA, 21 nt, Artificial Sequence
  Guide RNA
uucaguugugaacccuuaccu

SEQ ID NO: 9315 - RNA, 21 nt, Artificial Sequence
  Guide RNA
uugcagaaaagagguaagggu

SEQ ID NO: 9316 - RNA, 21 nt, Artificial Sequence
  Guide RNA
uugugaacccuuaccucuuuu

SEQ ID NO: 9317 - RNA, 21 nt, Artificial Sequence
  Guide RNA
uuuucugcaagguuuugcauu

SEQ ID NO: 9318 - RNA, 22 nt, Artificial Sequence
  Guide RNA
aaaaccuugcagaaaagaggua

SEQ ID NO: 9319 - RNA, 22 nt, Artificial Sequence
  Guide RNA
aaaagagguaaggguucacaac

SEQ ID NO: 9320 - RNA, 22 nt, Artificial Sequence
  Guide RNA
aaaccuugcagaaaagagguaa

SEQ ID NO: 9321 - RNA, 22 nt, Artificial Sequence
  Guide RNA
aaagagguaaggguucacaacu

SEQ ID NO: 9322 - RNA, 22 nt, Artificial Sequence
  Guide RNA
aaaugcaaaaccuugcagaaaa

SEQ ID NO: 9323 - RNA, 22 nt, Artificial Sequence
  Guide RNA
aacccuuaccucuuuucugcaa

SEQ ID NO: 9324 - RNA, 22 nt, Artificial Sequence
  Guide RNA
aaccuugcagaaaagagguaag

SEQ ID NO: 9325 - RNA, 22 nt, Artificial Sequence
  Guide RNA
aaugcaaaaccuugcagaaaag

SEQ ID NO: 9326 - RNA, 22 nt, Artificial Sequence
  Guide RNA
acccuuaccucuuuucugcaag

SEQ ID NO: 9327 - RNA, 22 nt, Artificial Sequence
  Guide RNA
accucuuuucugcaagguuuug

SEQ ID NO: 9328 - RNA, 22 nt, Artificial Sequence
  Guide RNA
accuugcagaaaagagguaagg

SEQ ID NO: 9329 - RNA, 22 nt, Artificial Sequence
  Guide RNA
acuucaaaugcaaaaccuugca

SEQ ID NO: 9330 - RNA, 22 nt, Artificial Sequence
  Guide RNA
acuucaguugugaacccuuacc

SEQ ID NO: 9331 - RNA, 22 nt, Artificial Sequence
  Guide RNA
agaaaagagguaaggguucaca

SEQ ID NO: 9332 - RNA, 22 nt, Artificial Sequence
  Guide RNA
aguugugaacccuuaccucuuu

SEQ ID NO: 9333 - RNA, 22 nt, Artificial Sequence
  Guide RNA
augcaaaaccuugcagaaaaga

SEQ ID NO: 9334 - RNA, 22 nt, Artificial Sequence
  Guide RNA
caaaaccuugcagaaaagaggu

SEQ ID NO: 9335 - RNA, 22 nt, Artificial Sequence
  Guide RNA
caaaugcaaaaccuugcagaaa

SEQ ID NO: 9336 - RNA, 22 nt, Artificial Sequence
  Guide RNA
cagaaaagagguaaggguucac

SEQ ID NO: 9337 - RNA, 22 nt, Artificial Sequence
  Guide RNA
caguugugaacccuuaccucuu

SEQ ID NO: 9338 - RNA, 22 nt, Artificial Sequence
  Guide RNA
cccuuaccucuuuucugcaagg

SEQ ID NO: 9339 - RNA, 22 nt, Artificial Sequence
  Guide RNA
ccucuuuucugcaagguuuugc

SEQ ID NO: 9340 - RNA, 22 nt, Artificial Sequence
  Guide RNA
ccuuaccucuuuucugcaaggu

SEQ ID NO: 9341 - RNA, 22 nt, Artificial Sequence
  Guide RNA
ccuugcagaaaagagguaaggg

SEQ ID NO: 9342 - RNA, 22 nt, Artificial Sequence
  Guide RNA
cucuuuucugcaagguuuugca

SEQ ID NO: 9343 - RNA, 22 nt, Artificial Sequence
  Guide RNA
cuuaccucuuuucugcaagguu

SEQ ID NO: 9344 - RNA, 22 nt, Artificial Sequence
  Guide RNA
cuucaaaugcaaaaccuugcag

SEQ ID NO: 9345 - RNA, 22 nt, Artificial Sequence
  Guide RNA
cuucaguugugaacccuuaccu

SEQ ID NO: 9346 - RNA, 22 nt, Artificial Sequence
  Guide RNA
cuugcagaaaagagguaagggu

SEQ ID NO: 9347 - RNA, 22 nt, Artificial Sequence
  Guide RNA
cuuuucugcaagguuuugcauu

SEQ ID NO: 9348 - RNA, 22 nt, Artificial Sequence
  Guide RNA
gaaaagagguaaggguucacaa

SEQ ID NO: 9349 - RNA, 22 nt, Artificial Sequence
  Guide RNA
gaacccuuaccucuuuucugca

SEQ ID NO: 9350 - RNA, 22 nt, Artificial Sequence
  Guide RNA
gcaaaaccuugcagaaaagagg

SEQ ID NO: 9351 - RNA, 22 nt, Artificial Sequence
  Guide RNA
gcagaaaagagguaaggguuca

SEQ ID NO: 9352 - RNA, 22 nt, Artificial Sequence
  Guide RNA
gugaacccuuaccucuuuucug

SEQ ID NO: 9353 - RNA, 22 nt, Artificial Sequence
  Guide RNA
guugugaacccuuaccucuuuu

SEQ ID NO: 9354 - RNA, 22 nt, Artificial Sequence
  Guide RNA
uaccucuuuucugcaagguuuu

SEQ ID NO: 9355 - RNA, 22 nt, Artificial Sequence
  Guide RNA
ucaaaugcaaaaccuugcagaa

SEQ ID NO: 9356 - RNA, 22 nt, Artificial Sequence
  Guide RNA
ucaguugugaacccuuaccucu

SEQ ID NO: 9357 - RNA, 22 nt, Artificial Sequence
  Guide RNA
ucuuuucugcaagguuuugcau

SEQ ID NO: 9358 - RNA, 22 nt, Artificial Sequence
  Guide RNA
ugaacccuuaccucuuuucugc

SEQ ID NO: 9359 - RNA, 22 nt, Artificial Sequence
  Guide RNA
ugcaaaaccuugcagaaaagag

SEQ ID NO: 9360 - RNA, 22 nt, Artificial Sequence
  Guide RNA
ugcagaaaagagguaaggguuc

SEQ ID NO: 9361 - RNA, 22 nt, Artificial Sequence
  Guide RNA
ugugaacccuuaccucuuuucu

SEQ ID NO: 9362 - RNA, 22 nt, Artificial Sequence
  Guide RNA
uuaccucuuuucugcaagguuu

SEQ ID NO: 9363 - RNA, 22 nt, Artificial Sequence
  Guide RNA
uucaaaugcaaaaccuugcaga

SEQ ID NO: 9364 - RNA, 22 nt, Artificial Sequence
  Guide RNA
uucaguugugaacccuuaccuc

SEQ ID NO: 9365 - RNA, 22 nt, Artificial Sequence
  Guide RNA
uugcagaaaagagguaaggguu

SEQ ID NO: 9366 - RNA, 22 nt, Artificial Sequence
  Guide RNA
uugugaacccuuaccucuuuuc

SEQ ID NO: 9367 - RNA, 22 nt, Artificial Sequence
  Guide RNA
uuuucugcaagguuuugcauuu

SEQ ID NO: 9368 - RNA, 20 nt, Artificial Sequence
  Guide RNA
aaacgcaaaaccuugcagaa

SEQ ID NO: 9369 - RNA, 20 nt, Artificial Sequence
  Guide RNA
aacgcaaaaccuugcagaac

SEQ ID NO: 9370 - RNA, 20 nt, Artificial Sequence
  Guide RNA
aagguuuugcguuugaaguc

SEQ ID NO: 9371 - RNA, 20 nt, Artificial Sequence
  Guide RNA
aauaugacuucaaacgcaaa

SEQ ID NO: 9372 - RNA, 20 nt, Artificial Sequence
  Guide RNA
acaagaugaauaugacuuca

SEQ ID NO: 9373 - RNA, 20 nt, Artificial Sequence
  Guide RNA
accucuguucugcaagguuu

SEQ ID NO: 9374 - RNA, 20 nt, Artificial Sequence
  Guide RNA
acgcaaaaccuugcagaaca

SEQ ID NO: 9375 - RNA, 20 nt, Artificial Sequence
  Guide RNA
acuucaaacgcaaaaccuug

SEQ ID NO: 9376 - RNA, 20 nt, Artificial Sequence
  Guide RNA
agaugaauaugacuucaaac

SEQ ID NO: 9377 - RNA, 20 nt, Artificial Sequence
  Guide RNA
agguuuugcguuugaaguca

SEQ ID NO: 9378 - RNA, 20 nt, Artificial Sequence
  Guide RNA
auaugacuucaaacgcaaaa

SEQ ID NO: 9379 - RNA, 20 nt, Artificial Sequence
  Guide RNA
augaauaugacuucaaacgc

SEQ ID NO: 9380 - RNA, 20 nt, Artificial Sequence
  Guide RNA
augacuucaaacgcaaaacc

SEQ ID NO: 9381 - RNA, 20 nt, Artificial Sequence
  Guide RNA
caaacgcaaaaccuugcaga

SEQ ID NO: 9382 - RNA, 20 nt, Artificial Sequence
  Guide RNA
caagaugaauaugacuucaa

SEQ ID NO: 9383 - RNA, 20 nt, Artificial Sequence
  Guide RNA
caagguuuugcguuugaagu

SEQ ID NO: 9384 - RNA, 20 nt, Artificial Sequence
  Guide RNA
ccucuguucugcaagguuuu

SEQ ID NO: 9385 - RNA, 20 nt, Artificial Sequence
  Guide RNA
cguuugaagucauauucauc

SEQ ID NO: 9386 - RNA, 20 nt, Artificial Sequence
  Guide RNA
cucuguucugcaagguuuug

SEQ ID NO: 9387 - RNA, 20 nt, Artificial Sequence
  Guide RNA
cugcaagguuuugcguuuga

SEQ ID NO: 9388 - RNA, 20 nt, Artificial Sequence
  Guide RNA
cuguucugcaagguuuugcg

SEQ ID NO: 9389 - RNA, 20 nt, Artificial Sequence
  Guide RNA
cuucaaacgcaaaaccuugc

SEQ ID NO: 9390 - RNA, 20 nt, Artificial Sequence
  Guide RNA
gaauaugacuucaaacgcaa

SEQ ID NO: 9391 - RNA, 20 nt, Artificial Sequence
  Guide RNA
gacuucaaacgcaaaaccuu

SEQ ID NO: 9392 - RNA, 20 nt, Artificial Sequence
  Guide RNA
gaugaauaugacuucaaacg

SEQ ID NO: 9393 - RNA, 20 nt, Artificial Sequence
  Guide RNA
gcaagguuuugcguuugaag

SEQ ID NO: 9394 - RNA, 20 nt, Artificial Sequence
  Guide RNA
gcguuugaagucauauucau

SEQ ID NO: 9395 - RNA, 20 nt, Artificial Sequence
  Guide RNA
gguuuugcguuugaagucau

SEQ ID NO: 9396 - RNA, 20 nt, Artificial Sequence
  Guide RNA
guucugcaagguuuugcguu

SEQ ID NO: 9397 - RNA, 20 nt, Artificial Sequence
  Guide RNA
guuuugcguuugaagucaua

SEQ ID NO: 9398 - RNA, 20 nt, Artificial Sequence
  Guide RNA
uacaagaugaauaugacuuc

SEQ ID NO: 9399 - RNA, 20 nt, Artificial Sequence
  Guide RNA
uaugacuucaaacgcaaaac

SEQ ID NO: 9400 - RNA, 20 nt, Artificial Sequence
  Guide RNA
ucaaacgcaaaaccuugcag

SEQ ID NO: 9401 - RNA, 20 nt, Artificial Sequence
  Guide RNA
ucugcaagguuuugcguuug

SEQ ID NO: 9402 - RNA, 20 nt, Artificial Sequence
  Guide RNA
ucuguucugcaagguuuugc

SEQ ID NO: 9403 - RNA, 20 nt, Artificial Sequence
  Guide RNA
ugaauaugacuucaaacgca

SEQ ID NO: 9404 - RNA, 20 nt, Artificial Sequence
  Guide RNA
ugacuucaaacgcaaaaccu

SEQ ID NO: 9405 - RNA, 20 nt, Artificial Sequence
  Guide RNA
ugcaagguuuugcguuugaa

SEQ ID NO: 9406 - RNA, 20 nt, Artificial Sequence
  Guide RNA
ugcguuugaagucauauuca

SEQ ID NO: 9407 - RNA, 20 nt, Artificial Sequence
  Guide RNA
uguucugcaagguuuugcgu

SEQ ID NO: 9408 - RNA, 20 nt, Artificial Sequence
  Guide RNA
uucaaacgcaaaaccuugca

SEQ ID NO: 9409 - RNA, 20 nt, Artificial Sequence
  Guide RNA
uucugcaagguuuugcguuu

SEQ ID NO: 9410 - RNA, 20 nt, Artificial Sequence
  Guide RNA
uugcguuugaagucauauuc

SEQ ID NO: 9411 - RNA, 20 nt, Artificial Sequence
  Guide RNA
uuugcguuugaagucauauu

SEQ ID NO: 9412 - RNA, 20 nt, Artificial Sequence
  Guide RNA
uuuugcguuugaagucauau

SEQ ID NO: 9413 - RNA, 21 nt, Artificial Sequence
  Guide RNA
aaacgcaaaaccuugcagaac

SEQ ID NO: 9414 - RNA, 21 nt, Artificial Sequence
  Guide RNA
aacgcaaaaccuugcagaaca

SEQ ID NO: 9415 - RNA, 21 nt, Artificial Sequence
  Guide RNA
aagguuuugcguuugaaguca

SEQ ID NO: 9416 - RNA, 21 nt, Artificial Sequence
  Guide RNA
accucuguucugcaagguuuu

SEQ ID NO: 9417 - RNA, 21 nt, Artificial Sequence
  Guide RNA
acgcaaaaccuugcagaacag

SEQ ID NO: 9418 - RNA, 21 nt, Artificial Sequence
  Guide RNA
acuucaaacgcaaaaccuugc

SEQ ID NO: 9419 - RNA, 21 nt, Artificial Sequence
  Guide RNA
agaugaauaugacuucaaacg

SEQ ID NO: 9420 - RNA, 21 nt, Artificial Sequence
  Guide RNA
agguuuugcguuugaagucau

SEQ ID NO: 9421 - RNA, 21 nt, Artificial Sequence
  Guide RNA
auaugacuucaaacgcaaaac

SEQ ID NO: 9422 - RNA, 21 nt, Artificial Sequence
  Guide RNA
augaauaugacuucaaacgca

SEQ ID NO: 9423 - RNA, 21 nt, Artificial Sequence
  Guide RNA
augacuucaaacgcaaaaccu

SEQ ID NO: 9424 - RNA, 21 nt, Artificial Sequence
  Guide RNA
caaacgcaaaaccuugcagaa

SEQ ID NO: 9425 - RNA, 21 nt, Artificial Sequence
  Guide RNA
caagguuuugcguuugaaguc

SEQ ID NO: 9426 - RNA, 21 nt, Artificial Sequence
  Guide RNA
ccucuguucugcaagguuuug

SEQ ID NO: 9427 - RNA, 21 nt, Artificial Sequence
  Guide RNA
cguuugaagucauauucaucu

SEQ ID NO: 9428 - RNA, 21 nt, Artificial Sequence
  Guide RNA
cucuguucugcaagguuuugc

SEQ ID NO: 9429 - RNA, 21 nt, Artificial Sequence
  Guide RNA
cugcaagguuuugcguuugaa

SEQ ID NO: 9430 - RNA, 21 nt, Artificial Sequence
  Guide RNA
cuguucugcaagguuuugcgu

SEQ ID NO: 9431 - RNA, 21 nt, Artificial Sequence
  Guide RNA
cuucaaacgcaaaaccuugca

SEQ ID NO: 9432 - RNA, 21 nt, Artificial Sequence
  Guide RNA
gaauaugacuucaaacgcaaa

SEQ ID NO: 9433 - RNA, 21 nt, Artificial Sequence
  Guide RNA
gacuucaaacgcaaaaccuug

SEQ ID NO: 9434 - RNA, 21 nt, Artificial Sequence
  Guide RNA
gaugaauaugacuucaaacgc

SEQ ID NO: 9435 - RNA, 21 nt, Artificial Sequence
  Guide RNA
gcaagguuuugcguuugaagu

SEQ ID NO: 9436 - RNA, 21 nt, Artificial Sequence
  Guide RNA
gcguuugaagucauauucauc

SEQ ID NO: 9437 - RNA, 21 nt, Artificial Sequence
  Guide RNA
gguuuugcguuugaagucaua

SEQ ID NO: 9438 - RNA, 21 nt, Artificial Sequence
  Guide RNA
guucugcaagguuuugcguuu

SEQ ID NO: 9439 - RNA, 21 nt, Artificial Sequence
  Guide RNA
guuuugcguuugaagucauau

SEQ ID NO: 9440 - RNA, 21 nt, Artificial Sequence
  Guide RNA
uaccucuguucugcaagguuu

SEQ ID NO: 9441 - RNA, 21 nt, Artificial Sequence
  Guide RNA
uaugacuucaaacgcaaaacc

SEQ ID NO: 9442 - RNA, 21 nt, Artificial Sequence
  Guide RNA
ucaaacgcaaaaccuugcaga

SEQ ID NO: 9443 - RNA, 21 nt, Artificial Sequence
  Guide RNA
ucugcaagguuuugcguuuga

SEQ ID NO: 9444 - RNA, 21 nt, Artificial Sequence
  Guide RNA
ucuguucugcaagguuuugcg

SEQ ID NO: 9445 - RNA, 21 nt, Artificial Sequence
  Guide RNA
ugaauaugacuucaaacgcaa

SEQ ID NO: 9446 - RNA, 21 nt, Artificial Sequence
  Guide RNA
ugacuucaaacgcaaaaccuu

SEQ ID NO: 9447 - RNA, 21 nt, Artificial Sequence
  Guide RNA
ugcaagguuuugcguuugaag

SEQ ID NO: 9448 - RNA, 21 nt, Artificial Sequence
  Guide RNA
ugcguuugaagucauauucau

SEQ ID NO: 9449 - RNA, 21 nt, Artificial Sequence
  Guide RNA
uguucugcaagguuuugcguu

SEQ ID NO: 9450 - RNA, 21 nt, Artificial Sequence
  Guide RNA
uucaaacgcaaaaccuugcag

SEQ ID NO: 9451 - RNA, 21 nt, Artificial Sequence
  Guide RNA
uucugcaagguuuugcguuug

SEQ ID NO: 9452 - RNA, 21 nt, Artificial Sequence
  Guide RNA
uugcguuugaagucauauuca

SEQ ID NO: 9453 - RNA, 21 nt, Artificial Sequence
  Guide RNA
uuugcguuugaagucauauuc

SEQ ID NO: 9454 - RNA, 22 nt, Artificial Sequence
  Guide RNA
aaacgcaaaaccuugcagaaca

SEQ ID NO: 9455 - RNA, 22 nt, Artificial Sequence
  Guide RNA
aacgcaaaaccuugcagaacag

SEQ ID NO: 9456 - RNA, 22 nt, Artificial Sequence
  Guide RNA
aagaugaauaugacuucaaacg

SEQ ID NO: 9457 - RNA, 22 nt, Artificial Sequence
  Guide RNA
aagguuuugcguuugaagucau

SEQ ID NO: 9458 - RNA, 22 nt, Artificial Sequence
  Guide RNA
aauaugacuucaaacgcaaaac

SEQ ID NO: 9459 - RNA, 22 nt, Artificial Sequence
  Guide RNA
accucuguucugcaagguuuug

SEQ ID NO: 9460 - RNA, 22 nt, Artificial Sequence
  Guide RNA
acgcaaaaccuugcagaacaga

SEQ ID NO: 9461 - RNA, 22 nt, Artificial Sequence
  Guide RNA
acuucaaacgcaaaaccuugca

SEQ ID NO: 9462 - RNA, 22 nt, Artificial Sequence
  Guide RNA
agaugaauaugacuucaaacgc

SEQ ID NO: 9463 - RNA, 22 nt, Artificial Sequence
  Guide RNA
agguuuugcguuugaagucaua

SEQ ID NO: 9464 - RNA, 22 nt, Artificial Sequence
  Guide RNA
auaugacuucaaacgcaaaacc

SEQ ID NO: 9465 - RNA, 22 nt, Artificial Sequence
  Guide RNA
augaauaugacuucaaacgcaa

SEQ ID NO: 9466 - RNA, 22 nt, Artificial Sequence
  Guide RNA
augacuucaaacgcaaaaccuu

SEQ ID NO: 9467 - RNA, 22 nt, Artificial Sequence
  Guide RNA
caaacgcaaaaccuugcagaac

SEQ ID NO: 9468 - RNA, 22 nt, Artificial Sequence
  Guide RNA
caagaugaauaugacuucaaac

SEQ ID NO: 9469 - RNA, 22 nt, Artificial Sequence
  Guide RNA
caagguuuugcguuugaaguca

SEQ ID NO: 9470 - RNA, 22 nt, Artificial Sequence
  Guide RNA
ccucuguucugcaagguuuugc

SEQ ID NO: 9471 - RNA, 22 nt, Artificial Sequence
  Guide RNA
cguuugaagucauauucaucuu

SEQ ID NO: 9472 - RNA, 22 nt, Artificial Sequence
  Guide RNA
cucuguucugcaagguuuugcg

SEQ ID NO: 9473 - RNA, 22 nt, Artificial Sequence
  Guide RNA
cugcaagguuuugcguuugaag

SEQ ID NO: 9474 - RNA, 22 nt, Artificial Sequence
  Guide RNA
cuguucugcaagguuuugcguu

SEQ ID NO: 9475 - RNA, 22 nt, Artificial Sequence
  Guide RNA
cuucaaacgcaaaaccuugcag

SEQ ID NO: 9476 - RNA, 22 nt, Artificial Sequence
  Guide RNA
gaauaugacuucaaacgcaaaa

SEQ ID NO: 9477 - RNA, 22 nt, Artificial Sequence
  Guide RNA
gacuucaaacgcaaaaccuugc

SEQ ID NO: 9478 - RNA, 22 nt, Artificial Sequence
  Guide RNA
gaugaauaugacuucaaacgca

SEQ ID NO: 9479 - RNA, 22 nt, Artificial Sequence
  Guide RNA
gcaagguuuugcguuugaaguc

SEQ ID NO: 9480 - RNA, 22 nt, Artificial Sequence
  Guide RNA
gcguuugaagucauauucaucu

SEQ ID NO: 9481 - RNA, 22 nt, Artificial Sequence
  Guide RNA
gguuuugcguuugaagucauau

SEQ ID NO: 9482 - RNA, 22 nt, Artificial Sequence
  Guide RNA
guucugcaagguuuugcguuug

SEQ ID NO: 9483 - RNA, 22 nt, Artificial Sequence
  Guide RNA
guuuugcguuugaagucauauu

SEQ ID NO: 9484 - RNA, 22 nt, Artificial Sequence
  Guide RNA
uaccucuguucugcaagguuuu

SEQ ID NO: 9485 - RNA, 22 nt, Artificial Sequence
  Guide RNA
uaugacuucaaacgcaaaaccu

SEQ ID NO: 9486 - RNA, 22 nt, Artificial Sequence
  Guide RNA
ucaaacgcaaaaccuugcagaa

SEQ ID NO: 9487 - RNA, 22 nt, Artificial Sequence
  Guide RNA
ucugcaagguuuugcguuugaa

SEQ ID NO: 9488 - RNA, 22 nt, Artificial Sequence
  Guide RNA
ucuguucugcaagguuuugcgu

SEQ ID NO: 9489 - RNA, 22 nt, Artificial Sequence
  Guide RNA
ugaauaugacuucaaacgcaaa

SEQ ID NO: 9490 - RNA, 22 nt, Artificial Sequence
  Guide RNA
ugacuucaaacgcaaaaccuug

SEQ ID NO: 9491 - RNA, 22 nt, Artificial Sequence
  Guide RNA
ugcaagguuuugcguuugaagu

SEQ ID NO: 9492 - RNA, 22 nt, Artificial Sequence
  Guide RNA
ugcguuugaagucauauucauc

SEQ ID NO: 9493 - RNA, 22 nt, Artificial Sequence
  Guide RNA
uguucugcaagguuuugcguuu

SEQ ID NO: 9494 - RNA, 22 nt, Artificial Sequence
  Guide RNA
uuaccucuguucugcaagguuu

SEQ ID NO: 9495 - RNA, 22 nt, Artificial Sequence
  Guide RNA
uucaaacgcaaaaccuugcaga

SEQ ID NO: 9496 - RNA, 22 nt, Artificial Sequence
  Guide RNA
uucugcaagguuuugcguuuga

SEQ ID NO: 9497 - RNA, 22 nt, Artificial Sequence
  Guide RNA
uugcguuugaagucauauucau

SEQ ID NO: 9498 - RNA, 22 nt, Artificial Sequence
  Guide RNA
uuugcguuugaagucauauuca

SEQ ID NO: 9499 - RNA, 22 nt, Artificial Sequence
  Guide RNA
uuuugcguuugaagucauauuc

SEQ ID NO: 9500 - RNA, 20 nt, Artificial Sequence
  Guide RNA
aagguuuugcauaugaaguc

SEQ ID NO: 9501 - RNA, 20 nt, Artificial Sequence
  Guide RNA
acuucauaugcaaaaccuug

SEQ ID NO: 9502 - RNA, 20 nt, Artificial Sequence
  Guide RNA
agguuuugcauaugaaguca

SEQ ID NO: 9503 - RNA, 20 nt, Artificial Sequence
  Guide RNA
auaugcaaaaccuugcagaa

SEQ ID NO: 9504 - RNA, 20 nt, Artificial Sequence
  Guide RNA
augaauaugacuucauaugc

SEQ ID NO: 9505 - RNA, 20 nt, Artificial Sequence
  Guide RNA
augacuucauaugcaaaacc

SEQ ID NO: 9506 - RNA, 20 nt, Artificial Sequence
  Guide RNA
caagaugaauaugacuucau

SEQ ID NO: 9507 - RNA, 20 nt, Artificial Sequence
  Guide RNA
caagguuuugcauaugaagu

SEQ ID NO: 9508 - RNA, 20 nt, Artificial Sequence
  Guide RNA
cauaugaagucauauucauc

SEQ ID NO: 9509 - RNA, 20 nt, Artificial Sequence
  Guide RNA
cauaugcaaaaccuugcaga

SEQ ID NO: 9510 - RNA, 20 nt, Artificial Sequence
  Guide RNA
cugcaagguuuugcauauga

SEQ ID NO: 9511 - RNA, 20 nt, Artificial Sequence
  Guide RNA
cuguucugcaagguuuugca

SEQ ID NO: 9512 - RNA, 20 nt, Artificial Sequence
  Guide RNA
cuucauaugcaaaaccuugc

SEQ ID NO: 9513 - RNA, 20 nt, Artificial Sequence
  Guide RNA
gaauaugacuucauaugcaa

SEQ ID NO: 9514 - RNA, 20 nt, Artificial Sequence
  Guide RNA
gacuucauaugcaaaaccuu

SEQ ID NO: 9515 - RNA, 20 nt, Artificial Sequence
  Guide RNA
gaugaauaugacuucauaug

SEQ ID NO: 9516 - RNA, 20 nt, Artificial Sequence
  Guide RNA
gcaagguuuugcauaugaag

SEQ ID NO: 9517 - RNA, 20 nt, Artificial Sequence
  Guide RNA
gcauaugaagucauauucau

SEQ ID NO: 9518 - RNA, 20 nt, Artificial Sequence
  Guide RNA
gguuuugcauaugaagucau

SEQ ID NO: 9519 - RNA, 20 nt, Artificial Sequence
  Guide RNA
guucugcaagguuuugcaua

SEQ ID NO: 9520 - RNA, 20 nt, Artificial Sequence
  Guide RNA
guuuugcauaugaagucaua

SEQ ID NO: 9521 - RNA, 20 nt, Artificial Sequence
  Guide RNA
uaugacuucauaugcaaaac

SEQ ID NO: 9522 - RNA, 20 nt, Artificial Sequence
  Guide RNA
ucauaugcaaaaccuugcag

SEQ ID NO: 9523 - RNA, 20 nt, Artificial Sequence
  Guide RNA
ucugcaagguuuugcauaug

SEQ ID NO: 9524 - RNA, 20 nt, Artificial Sequence
  Guide RNA
ugaauaugacuucauaugca

SEQ ID NO: 9525 - RNA, 20 nt, Artificial Sequence
  Guide RNA
ugacuucauaugcaaaaccu

SEQ ID NO: 9526 - RNA, 20 nt, Artificial Sequence
  Guide RNA
ugcaagguuuugcauaugaa

SEQ ID NO: 9527 - RNA, 20 nt, Artificial Sequence
  Guide RNA
ugcauaugaagucauauuca

SEQ ID NO: 9528 - RNA, 20 nt, Artificial Sequence
  Guide RNA
uguucugcaagguuuugcau

SEQ ID NO: 9529 - RNA, 20 nt, Artificial Sequence
  Guide RNA
uucauaugcaaaaccuugca

SEQ ID NO: 9530 - RNA, 20 nt, Artificial Sequence
  Guide RNA
uucugcaagguuuugcauau

SEQ ID NO: 9531 - RNA, 20 nt, Artificial Sequence
  Guide RNA
uugcauaugaagucauauuc

SEQ ID NO: 9532 - RNA, 21 nt, Artificial Sequence
  Guide RNA
aagguuuugcauaugaaguca

SEQ ID NO: 9533 - RNA, 21 nt, Artificial Sequence
  Guide RNA
acuucauaugcaaaaccuugc

SEQ ID NO: 9534 - RNA, 21 nt, Artificial Sequence
  Guide RNA
agguuuugcauaugaagucau

SEQ ID NO: 9535 - RNA, 21 nt, Artificial Sequence
  Guide RNA
auaugcaaaaccuugcagaac

SEQ ID NO: 9536 - RNA, 21 nt, Artificial Sequence
  Guide RNA
augacuucauaugcaaaaccu

SEQ ID NO: 9537 - RNA, 21 nt, Artificial Sequence
  Guide RNA
caagguuuugcauaugaaguc

SEQ ID NO: 9538 - RNA, 21 nt, Artificial Sequence
  Guide RNA
cauaugcaaaaccuugcagaa

SEQ ID NO: 9539 - RNA, 21 nt, Artificial Sequence
  Guide RNA
cugcaagguuuugcauaugaa

SEQ ID NO: 9540 - RNA, 21 nt, Artificial Sequence
  Guide RNA
cuguucugcaagguuuugcau

SEQ ID NO: 9541 - RNA, 21 nt, Artificial Sequence
  Guide RNA
cuucauaugcaaaaccuugca

SEQ ID NO: 9542 - RNA, 21 nt, Artificial Sequence
  Guide RNA
gacuucauaugcaaaaccuug

SEQ ID NO: 9543 - RNA, 21 nt, Artificial Sequence
  Guide RNA
gaugaauaugacuucauaugc

SEQ ID NO: 9544 - RNA, 21 nt, Artificial Sequence
  Guide RNA
gcaagguuuugcauaugaagu

SEQ ID NO: 9545 - RNA, 21 nt, Artificial Sequence
  Guide RNA
gcauaugaagucauauucauc

SEQ ID NO: 9546 - RNA, 21 nt, Artificial Sequence
  Guide RNA
gguuuugcauaugaagucaua

SEQ ID NO: 9547 - RNA, 21 nt, Artificial Sequence
  Guide RNA
guucugcaagguuuugcauau

SEQ ID NO: 9548 - RNA, 21 nt, Artificial Sequence
  Guide RNA
uaugacuucauaugcaaaacc

SEQ ID NO: 9549 - RNA, 21 nt, Artificial Sequence
  Guide RNA
ucauaugcaaaaccuugcaga

SEQ ID NO: 9550 - RNA, 21 nt, Artificial Sequence
  Guide RNA
ucugcaagguuuugcauauga

SEQ ID NO: 9551 - RNA, 21 nt, Artificial Sequence
  Guide RNA
ucuguucugcaagguuuugca

SEQ ID NO: 9552 - RNA, 21 nt, Artificial Sequence
  Guide RNA
ugacuucauaugcaaaaccuu

SEQ ID NO: 9553 - RNA, 21 nt, Artificial Sequence
  Guide RNA
ugcaagguuuugcauaugaag

SEQ ID NO: 9554 - RNA, 21 nt, Artificial Sequence
  Guide RNA
uguucugcaagguuuugcaua

SEQ ID NO: 9555 - RNA, 21 nt, Artificial Sequence
  Guide RNA
uucauaugcaaaaccuugcag

SEQ ID NO: 9556 - RNA, 21 nt, Artificial Sequence
  Guide RNA
uucugcaagguuuugcauaug

SEQ ID NO: 9557 - RNA, 22 nt, Artificial Sequence
  Guide RNA
aagguuuugcauaugaagucau

SEQ ID NO: 9558 - RNA, 22 nt, Artificial Sequence
  Guide RNA
acuucauaugcaaaaccuugca

SEQ ID NO: 9559 - RNA, 22 nt, Artificial Sequence
  Guide RNA
agaugaauaugacuucauaugc

SEQ ID NO: 9560 - RNA, 22 nt, Artificial Sequence
  Guide RNA
agguuuugcauaugaagucaua

SEQ ID NO: 9561 - RNA, 22 nt, Artificial Sequence
  Guide RNA
auaugacuucauaugcaaaacc

SEQ ID NO: 9562 - RNA, 22 nt, Artificial Sequence
  Guide RNA
auaugcaaaaccuugcagaaca

SEQ ID NO: 9563 - RNA, 22 nt, Artificial Sequence
  Guide RNA
augacuucauaugcaaaaccuu

SEQ ID NO: 9564 - RNA, 22 nt, Artificial Sequence
  Guide RNA
caagguuuugcauaugaaguca

SEQ ID NO: 9565 - RNA, 22 nt, Artificial Sequence
  Guide RNA
cauaugcaaaaccuugcagaac

SEQ ID NO: 9566 - RNA, 22 nt, Artificial Sequence
  Guide RNA
cucuguucugcaagguuuugca

SEQ ID NO: 9567 - RNA, 22 nt, Artificial Sequence
  Guide RNA
cugcaagguuuugcauaugaag

SEQ ID NO: 9568 - RNA, 22 nt, Artificial Sequence
  Guide RNA
cuguucugcaagguuuugcaua

SEQ ID NO: 9569 - RNA, 22 nt, Artificial Sequence
  Guide RNA
cuucauaugcaaaaccuugcag

SEQ ID NO: 9570 - RNA, 22 nt, Artificial Sequence
  Guide RNA
gacuucauaugcaaaaccuugc

SEQ ID NO: 9571 - RNA, 22 nt, Artificial Sequence
  Guide RNA
gaugaauaugacuucauaugca

SEQ ID NO: 9572 - RNA, 22 nt, Artificial Sequence
  Guide RNA
gcaagguuuugcauaugaaguc

SEQ ID NO: 9573 - RNA, 22 nt, Artificial Sequence
  Guide RNA
gcauaugaagucauauucaucu

SEQ ID NO: 9574 - RNA, 22 nt, Artificial Sequence
  Guide RNA
gguuuugcauaugaagucauau

SEQ ID NO: 9575 - RNA, 22 nt, Artificial Sequence
  Guide RNA
guucugcaagguuuugcauaug

SEQ ID NO: 9576 - RNA, 22 nt, Artificial Sequence
  Guide RNA
uaugacuucauaugcaaaaccu

SEQ ID NO: 9577 - RNA, 22 nt, Artificial Sequence
  Guide RNA
ucauaugcaaaaccuugcagaa

SEQ ID NO: 9578 - RNA, 22 nt, Artificial Sequence
  Guide RNA
ucugcaagguuuugcauaugaa

SEQ ID NO: 9579 - RNA, 22 nt, Artificial Sequence
  Guide RNA
ucuguucugcaagguuuugcau

SEQ ID NO: 9580 - RNA, 22 nt, Artificial Sequence
  Guide RNA
ugacuucauaugcaaaaccuug

SEQ ID NO: 9581 - RNA, 22 nt, Artificial Sequence
  Guide RNA
ugcaagguuuugcauaugaagu

SEQ ID NO: 9582 - RNA, 22 nt, Artificial Sequence
  Guide RNA
ugcauaugaagucauauucauc

SEQ ID NO: 9583 - RNA, 22 nt, Artificial Sequence
  Guide RNA
uguucugcaagguuuugcauau

SEQ ID NO: 9584 - RNA, 22 nt, Artificial Sequence
  Guide RNA
uucauaugcaaaaccuugcaga

SEQ ID NO: 9585 - RNA, 22 nt, Artificial Sequence
  Guide RNA
uucugcaagguuuugcauauga

SEQ ID NO: 9586 - RNA, 20 nt, Artificial Sequence
  Guide RNA
aagguuuugcauuugaaguc

SEQ ID NO: 9587 - RNA, 20 nt, Artificial Sequence
  Guide RNA
acaagaugaaaaugacuuca

SEQ ID NO: 9588 - RNA, 20 nt, Artificial Sequence
  Guide RNA
agguuuugcauuugaaguca

SEQ ID NO: 9589 - RNA, 20 nt, Artificial Sequence
  Guide RNA
augaaaaugacuucaaaugc

SEQ ID NO: 9590 - RNA, 20 nt, Artificial Sequence
  Guide RNA
caagaugaaaaugacuucaa

SEQ ID NO: 9591 - RNA, 20 nt, Artificial Sequence
  Guide RNA
caagguuuugcauuugaagu

SEQ ID NO: 9592 - RNA, 20 nt, Artificial Sequence
  Guide RNA
cauuugaagucauuuucauc

SEQ ID NO: 9593 - RNA, 20 nt, Artificial Sequence
  Guide RNA
ccuggaagauuuacaagaug

SEQ ID NO: 9594 - RNA, 20 nt, Artificial Sequence
  Guide RNA
cuggaagauuuacaagauga

SEQ ID NO: 9595 - RNA, 20 nt, Artificial Sequence
  Guide RNA
gaaaaugacuucaaaugcaa

SEQ ID NO: 9596 - RNA, 20 nt, Artificial Sequence
  Guide RNA
gaagucauuuucaucuugua

SEQ ID NO: 9597 - RNA, 20 nt, Artificial Sequence
  Guide RNA
gaugaaaaugacuucaaaug

SEQ ID NO: 9598 - RNA, 20 nt, Artificial Sequence
  Guide RNA
gcauuugaagucauuuucau

SEQ ID NO: 9599 - RNA, 20 nt, Artificial Sequence
  Guide RNA
gccuggaagauuuacaagau

SEQ ID NO: 9600 - RNA, 20 nt, Artificial Sequence
  Guide RNA
ggaagauuuacaagaugaaa

SEQ ID NO: 9601 - RNA, 20 nt, Artificial Sequence
  Guide RNA
gguuuugcauuugaagucau

SEQ ID NO: 9602 - RNA, 20 nt, Artificial Sequence
  Guide RNA
guuuugcauuugaagucauu

SEQ ID NO: 9603 - RNA, 20 nt, Artificial Sequence
  Guide RNA
uacaagaugaaaaugacuuc

SEQ ID NO: 9604 - RNA, 20 nt, Artificial Sequence
  Guide RNA
ugaaaaugacuucaaaugca

SEQ ID NO: 9605 - RNA, 20 nt, Artificial Sequence
  Guide RNA
ugaagucauuuucaucuugu

SEQ ID NO: 9606 - RNA, 20 nt, Artificial Sequence
  Guide RNA
ugcauuugaagucauuuuca

SEQ ID NO: 9607 - RNA, 20 nt, Artificial Sequence
  Guide RNA
uggaagauuuacaagaugaa

SEQ ID NO: 9608 - RNA, 20 nt, Artificial Sequence
  Guide RNA
uugaagucauuuucaucuug

SEQ ID NO: 9609 - RNA, 20 nt, Artificial Sequence
  Guide RNA
uugcauuugaagucauuuuc

SEQ ID NO: 9610 - RNA, 21 nt, Artificial Sequence
  Guide RNA
aagguuuugcauuugaaguca

SEQ ID NO: 9611 - RNA, 21 nt, Artificial Sequence
  Guide RNA
agccuggaagauuuacaagau

SEQ ID NO: 9612 - RNA, 21 nt, Artificial Sequence
  Guide RNA
agguuuugcauuugaagucau

SEQ ID NO: 9613 - RNA, 21 nt, Artificial Sequence
  Guide RNA
caagguuuugcauuugaaguc

SEQ ID NO: 9614 - RNA, 21 nt, Artificial Sequence
  Guide RNA
ccuggaagauuuacaagauga

SEQ ID NO: 9615 - RNA, 21 nt, Artificial Sequence
  Guide RNA
cuggaagauuuacaagaugaa

SEQ ID NO: 9616 - RNA, 21 nt, Artificial Sequence
  Guide RNA
gaugaaaaugacuucaaaugc

SEQ ID NO: 9617 - RNA, 21 nt, Artificial Sequence
  Guide RNA
gcaagguuuugcauuugaagu

SEQ ID NO: 9618 - RNA, 21 nt, Artificial Sequence
  Guide RNA
gcauuugaagucauuuucauc

SEQ ID NO: 9619 - RNA, 21 nt, Artificial Sequence
  Guide RNA
gccuggaagauuuacaagaug

SEQ ID NO: 9620 - RNA, 21 nt, Artificial Sequence
  Guide RNA
gguuuugcauuugaagucauu

SEQ ID NO: 9621 - RNA, 22 nt, Artificial Sequence
  Guide RNA
aaaugacuucaaaugcaaaacc

SEQ ID NO: 9622 - RNA, 22 nt, Artificial Sequence
  Guide RNA
aagguuuugcauuugaagucau

SEQ ID NO: 9623 - RNA, 22 nt, Artificial Sequence
  Guide RNA
agaugaaaaugacuucaaaugc

SEQ ID NO: 9624 - RNA, 22 nt, Artificial Sequence
  Guide RNA
agccuggaagauuuacaagaug

SEQ ID NO: 9625 - RNA, 22 nt, Artificial Sequence
  Guide RNA
agguuuugcauuugaagucauu

SEQ ID NO: 9626 - RNA, 22 nt, Artificial Sequence
  Guide RNA
caagguuuugcauuugaaguca

SEQ ID NO: 9627 - RNA, 22 nt, Artificial Sequence
  Guide RNA
ccuggaagauuuacaagaugaa

SEQ ID NO: 9628 - RNA, 22 nt, Artificial Sequence
  Guide RNA
cuggaagauuuacaagaugaaa

SEQ ID NO: 9629 - RNA, 22 nt, Artificial Sequence
  Guide RNA
gagccuggaagauuuacaagau

SEQ ID NO: 9630 - RNA, 22 nt, Artificial Sequence
  Guide RNA
gaugaaaaugacuucaaaugca

SEQ ID NO: 9631 - RNA, 22 nt, Artificial Sequence
  Guide RNA
gcaagguuuugcauuugaaguc

SEQ ID NO: 9632 - RNA, 22 nt, Artificial Sequence
  Guide RNA
gcauuugaagucauuuucaucu

SEQ ID NO: 9633 - RNA, 22 nt, Artificial Sequence
  Guide RNA
gccuggaagauuuacaagauga

SEQ ID NO: 9634 - RNA, 22 nt, Artificial Sequence
  Guide RNA
gguuuugcauuugaagucauuu

SEQ ID NO: 9635 - RNA, 22 nt, Artificial Sequence
  Guide RNA
ugcaagguuuugcauuugaagu

SEQ ID NO: 9636 - RNA, 22 nt, Artificial Sequence
  Guide RNA
ugcauuugaagucauuuucauc

SEQ ID NO: 9637 - RNA, 20 nt, Artificial Sequence
  Guide RNA
aaaccuuccaggcucuugau

SEQ ID NO: 9638 - RNA, 20 nt, Artificial Sequence
  Guide RNA
aaaucaagagccuggaaggu

SEQ ID NO: 9639 - RNA, 20 nt, Artificial Sequence
  Guide RNA
aaccuuccaggcucuugauu

SEQ ID NO: 9640 - RNA, 20 nt, Artificial Sequence
  Guide RNA
aagagccuggaagguuuaca

SEQ ID NO: 9641 - RNA, 20 nt, Artificial Sequence
  Guide RNA
aaucaagagccuggaagguu

SEQ ID NO: 9642 - RNA, 20 nt, Artificial Sequence
  Guide RNA
accuuccaggcucuugauuu

SEQ ID NO: 9643 - RNA, 20 nt, Artificial Sequence
  Guide RNA
agagccuggaagguuuacaa

SEQ ID NO: 9644 - RNA, 20 nt, Artificial Sequence
  Guide RNA
agccuggaagguuuacaaga

SEQ ID NO: 9645 - RNA, 20 nt, Artificial Sequence
  Guide RNA
agguuuacaagaugaauaug

SEQ ID NO: 9646 - RNA, 20 nt, Artificial Sequence
  Guide RNA
aucaagagccuggaagguuu

SEQ ID NO: 9647 - RNA, 20 nt, Artificial Sequence
  Guide RNA
aucuuguaaaccuuccaggc

SEQ ID NO: 9648 - RNA, 20 nt, Artificial Sequence
  Guide RNA
augaaaucaagagccuggaa

SEQ ID NO: 9649 - RNA, 20 nt, Artificial Sequence
  Guide RNA
auucaucuuguaaaccuucc

SEQ ID NO: 9650 - RNA, 20 nt, Artificial Sequence
  Guide RNA
caagagccuggaagguuuac

SEQ ID NO: 9651 - RNA, 20 nt, Artificial Sequence
  Guide RNA
cauauucaucuuguaaaccu

SEQ ID NO: 9652 - RNA, 20 nt, Artificial Sequence
  Guide RNA
caucuuguaaaccuuccagg

SEQ ID NO: 9653 - RNA, 20 nt, Artificial Sequence
  Guide RNA
caugaaaucaagagccugga

SEQ ID NO: 9654 - RNA, 20 nt, Artificial Sequence
  Guide RNA
ccuggaagguuuacaagaug

SEQ ID NO: 9655 - RNA, 20 nt, Artificial Sequence
  Guide RNA
cuggaagguuuacaagauga

SEQ ID NO: 9656 - RNA, 20 nt, Artificial Sequence
  Guide RNA
cuuguaaaccuuccaggcuc

SEQ ID NO: 9657 - RNA, 20 nt, Artificial Sequence
  Guide RNA
gaaaucaagagccuggaagg

SEQ ID NO: 9658 - RNA, 20 nt, Artificial Sequence
  Guide RNA
gaagguuuacaagaugaaua

SEQ ID NO: 9659 - RNA, 20 nt, Artificial Sequence
  Guide RNA
gaagucauauucaucuugua

SEQ ID NO: 9660 - RNA, 20 nt, Artificial Sequence
  Guide RNA
gagccuggaagguuuacaag

SEQ ID NO: 9661 - RNA, 20 nt, Artificial Sequence
  Guide RNA
gcaugaaaucaagagccugg

SEQ ID NO: 9662 - RNA, 20 nt, Artificial Sequence
  Guide RNA
gccuggaagguuuacaagau

SEQ ID NO: 9663 - RNA, 20 nt, Artificial Sequence
  Guide RNA
ggaagguuuacaagaugaau

SEQ ID NO: 9664 - RNA, 20 nt, Artificial Sequence
  Guide RNA
gguuuacaagaugaauauga

SEQ ID NO: 9665 - RNA, 20 nt, Artificial Sequence
  Guide RNA
guaaaccuuccaggcucuug

SEQ ID NO: 9666 - RNA, 20 nt, Artificial Sequence
  Guide RNA
gucauauucaucuuguaaac

SEQ ID NO: 9667 - RNA, 20 nt, Artificial Sequence
  Guide RNA
uaaaccuuccaggcucuuga

SEQ ID NO: 9668 - RNA, 20 nt, Artificial Sequence
  Guide RNA
uauucaucuuguaaaccuuc

SEQ ID NO: 9669 - RNA, 20 nt, Artificial Sequence
  Guide RNA
ucaagagccuggaagguuua

SEQ ID NO: 9670 - RNA, 20 nt, Artificial Sequence
  Guide RNA
ucauauucaucuuguaaacc

SEQ ID NO: 9671 - RNA, 20 nt, Artificial Sequence
  Guide RNA
ucaucuuguaaaccuuccag

SEQ ID NO: 9672 - RNA, 20 nt, Artificial Sequence
  Guide RNA
ucuuguaaaccuuccaggcu

SEQ ID NO: 9673 - RNA, 20 nt, Artificial Sequence
  Guide RNA
ugaaaucaagagccuggaag

SEQ ID NO: 9674 - RNA, 20 nt, Artificial Sequence
  Guide RNA
ugaagucauauucaucuugu

SEQ ID NO: 9675 - RNA, 20 nt, Artificial Sequence
  Guide RNA
uggaagguuuacaagaugaa

SEQ ID NO: 9676 - RNA, 20 nt, Artificial Sequence
  Guide RNA
uguaaaccuuccaggcucuu

SEQ ID NO: 9677 - RNA, 20 nt, Artificial Sequence
  Guide RNA
uucaucuuguaaaccuucca

SEQ ID NO: 9678 - RNA, 20 nt, Artificial Sequence
  Guide RNA
uuguaaaccuuccaggcucu

SEQ ID NO: 9679 - RNA, 21 nt, Artificial Sequence
  Guide RNA
aaaccuuccaggcucuugauu

SEQ ID NO: 9680 - RNA, 21 nt, Artificial Sequence
  Guide RNA
aaaucaagagccuggaagguu

SEQ ID NO: 9681 - RNA, 21 nt, Artificial Sequence
  Guide RNA
aaccuuccaggcucuugauuu

SEQ ID NO: 9682 - RNA, 21 nt, Artificial Sequence
  Guide RNA
aagagccuggaagguuuacaa

SEQ ID NO: 9683 - RNA, 21 nt, Artificial Sequence
  Guide RNA
aaucaagagccuggaagguuu

SEQ ID NO: 9684 - RNA, 21 nt, Artificial Sequence
  Guide RNA
accuuccaggcucuugauuuc

SEQ ID NO: 9685 - RNA, 21 nt, Artificial Sequence
  Guide RNA
agagccuggaagguuuacaag

SEQ ID NO: 9686 - RNA, 21 nt, Artificial Sequence
  Guide RNA
agcaugaaaucaagagccugg

SEQ ID NO: 9687 - RNA, 21 nt, Artificial Sequence
  Guide RNA
agccuggaagguuuacaagau

SEQ ID NO: 9688 - RNA, 21 nt, Artificial Sequence
  Guide RNA
aucaagagccuggaagguuua

SEQ ID NO: 9689 - RNA, 21 nt, Artificial Sequence
  Guide RNA
aucuuguaaaccuuccaggcu

SEQ ID NO: 9690 - RNA, 21 nt, Artificial Sequence
  Guide RNA
augaaaucaagagccuggaag

SEQ ID NO: 9691 - RNA, 21 nt, Artificial Sequence
  Guide RNA
auucaucuuguaaaccuucca

SEQ ID NO: 9692 - RNA, 21 nt, Artificial Sequence
  Guide RNA
caagagccuggaagguuuaca

SEQ ID NO: 9693 - RNA, 21 nt, Artificial Sequence
  Guide RNA
caucuuguaaaccuuccaggc

SEQ ID NO: 9694 - RNA, 21 nt, Artificial Sequence
  Guide RNA
caugaaaucaagagccuggaa

SEQ ID NO: 9695 - RNA, 21 nt, Artificial Sequence
  Guide RNA
ccuggaagguuuacaagauga

SEQ ID NO: 9696 - RNA, 21 nt, Artificial Sequence
  Guide RNA
cuggaagguuuacaagaugaa

SEQ ID NO: 9697 - RNA, 21 nt, Artificial Sequence
  Guide RNA
cuuguaaaccuuccaggcucu

SEQ ID NO: 9698 - RNA, 21 nt, Artificial Sequence
  Guide RNA
gaaaucaagagccuggaaggu

SEQ ID NO: 9699 - RNA, 21 nt, Artificial Sequence
  Guide RNA
gagccuggaagguuuacaaga

SEQ ID NO: 9700 - RNA, 21 nt, Artificial Sequence
  Guide RNA
gcaugaaaucaagagccugga

SEQ ID NO: 9701 - RNA, 21 nt, Artificial Sequence
  Guide RNA
gccuggaagguuuacaagaug

SEQ ID NO: 9702 - RNA, 21 nt, Artificial Sequence
  Guide RNA
ggaagguuuacaagaugaaua

SEQ ID NO: 9703 - RNA, 21 nt, Artificial Sequence
  Guide RNA
gguuuacaagaugaauaugac

SEQ ID NO: 9704 - RNA, 21 nt, Artificial Sequence
  Guide RNA
guaaaccuuccaggcucuuga

SEQ ID NO: 9705 - RNA, 21 nt, Artificial Sequence
  Guide RNA
gucauauucaucuuguaaacc

SEQ ID NO: 9706 - RNA, 21 nt, Artificial Sequence
  Guide RNA
uaaaccuuccaggcucuugau

SEQ ID NO: 9707 - RNA, 21 nt, Artificial Sequence
  Guide RNA
uauucaucuuguaaaccuucc

SEQ ID NO: 9708 - RNA, 21 nt, Artificial Sequence
  Guide RNA
ucaagagccuggaagguuuac

SEQ ID NO: 9709 - RNA, 21 nt, Artificial Sequence
  Guide RNA
ucaucuuguaaaccuuccagg

SEQ ID NO: 9710 - RNA, 21 nt, Artificial Sequence
  Guide RNA
ucuuguaaaccuuccaggcuc

SEQ ID NO: 9711 - RNA, 21 nt, Artificial Sequence
  Guide RNA
ugaaaucaagagccuggaagg

SEQ ID NO: 9712 - RNA, 21 nt, Artificial Sequence
  Guide RNA
uggaagguuuacaagaugaau

SEQ ID NO: 9713 - RNA, 21 nt, Artificial Sequence
  Guide RNA
uguaaaccuuccaggcucuug

SEQ ID NO: 9714 - RNA, 21 nt, Artificial Sequence
  Guide RNA
uucaucuuguaaaccuuccag

SEQ ID NO: 9715 - RNA, 21 nt, Artificial Sequence
  Guide RNA
uuguaaaccuuccaggcucuu

SEQ ID NO: 9716 - RNA, 22 nt, Artificial Sequence
  Guide RNA
aaaccuuccaggcucuugauuu

SEQ ID NO: 9717 - RNA, 22 nt, Artificial Sequence
  Guide RNA
aaaucaagagccuggaagguuu

SEQ ID NO: 9718 - RNA, 22 nt, Artificial Sequence
  Guide RNA
aaccuuccaggcucuugauuuc

SEQ ID NO: 9719 - RNA, 22 nt, Artificial Sequence
  Guide RNA
aagagccuggaagguuuacaag

SEQ ID NO: 9720 - RNA, 22 nt, Artificial Sequence
  Guide RNA
aaucaagagccuggaagguuua

SEQ ID NO: 9721 - RNA, 22 nt, Artificial Sequence
  Guide RNA
accuuccaggcucuugauuuca

SEQ ID NO: 9722 - RNA, 22 nt, Artificial Sequence
  Guide RNA
agagccuggaagguuuacaaga

SEQ ID NO: 9723 - RNA, 22 nt, Artificial Sequence
  Guide RNA
agcaugaaaucaagagccugga

SEQ ID NO: 9724 - RNA, 22 nt, Artificial Sequence
  Guide RNA
agccuggaagguuuacaagaug

SEQ ID NO: 9725 - RNA, 22 nt, Artificial Sequence
  Guide RNA
agguuuacaagaugaauaugac

SEQ ID NO: 9726 - RNA, 22 nt, Artificial Sequence
  Guide RNA
agucauauucaucuuguaaacc

SEQ ID NO: 9727 - RNA, 22 nt, Artificial Sequence
  Guide RNA
auauucaucuuguaaaccuucc

SEQ ID NO: 9728 - RNA, 22 nt, Artificial Sequence
  Guide RNA
aucaagagccuggaagguuuac

SEQ ID NO: 9729 - RNA, 22 nt, Artificial Sequence
  Guide RNA
aucuuguaaaccuuccaggcuc

SEQ ID NO: 9730 - RNA, 22 nt, Artificial Sequence
  Guide RNA
augaaaucaagagccuggaagg

SEQ ID NO: 9731 - RNA, 22 nt, Artificial Sequence
  Guide RNA
auucaucuuguaaaccuuccag

SEQ ID NO: 9732 - RNA, 22 nt, Artificial Sequence
  Guide RNA
caagagccuggaagguuuacaa

SEQ ID NO: 9733 - RNA, 22 nt, Artificial Sequence
  Guide RNA
cauauucaucuuguaaaccuuc

SEQ ID NO: 9734 - RNA, 22 nt, Artificial Sequence
  Guide RNA
caucuuguaaaccuuccaggcu

SEQ ID NO: 9735 - RNA, 22 nt, Artificial Sequence
  Guide RNA
caugaaaucaagagccuggaag

SEQ ID NO: 9736 - RNA, 22 nt, Artificial Sequence
  Guide RNA
ccuggaagguuuacaagaugaa

SEQ ID NO: 9737 - RNA, 22 nt, Artificial Sequence
  Guide RNA
cuggaagguuuacaagaugaau

SEQ ID NO: 9738 - RNA, 22 nt, Artificial Sequence
  Guide RNA
cuuguaaaccuuccaggcucuu

SEQ ID NO: 9739 - RNA, 22 nt, Artificial Sequence
  Guide RNA
gaaaucaagagccuggaagguu

SEQ ID NO: 9740 - RNA, 22 nt, Artificial Sequence
  Guide RNA
gaagguuuacaagaugaauaug

SEQ ID NO: 9741 - RNA, 22 nt, Artificial Sequence
  Guide RNA
gagcaugaaaucaagagccugg

SEQ ID NO: 9742 - RNA, 22 nt, Artificial Sequence
  Guide RNA
gagccuggaagguuuacaagau

SEQ ID NO: 9743 - RNA, 22 nt, Artificial Sequence
  Guide RNA
gcaugaaaucaagagccuggaa

SEQ ID NO: 9744 - RNA, 22 nt, Artificial Sequence
  Guide RNA
gccuggaagguuuacaagauga

SEQ ID NO: 9745 - RNA, 22 nt, Artificial Sequence
  Guide RNA
ggaagguuuacaagaugaauau

SEQ ID NO: 9746 - RNA, 22 nt, Artificial Sequence
  Guide RNA
gguuuacaagaugaauaugacu

SEQ ID NO: 9747 - RNA, 22 nt, Artificial Sequence
  Guide RNA
guaaaccuuccaggcucuugau

SEQ ID NO: 9748 - RNA, 22 nt, Artificial Sequence
  Guide RNA
gucauauucaucuuguaaaccu

SEQ ID NO: 9749 - RNA, 22 nt, Artificial Sequence
  Guide RNA
uaaaccuuccaggcucuugauu

SEQ ID NO: 9750 - RNA, 22 nt, Artificial Sequence
  Guide RNA
uauucaucuuguaaaccuucca

SEQ ID NO: 9751 - RNA, 22 nt, Artificial Sequence
  Guide RNA
ucaagagccuggaagguuuaca

SEQ ID NO: 9752 - RNA, 22 nt, Artificial Sequence
  Guide RNA
ucaucuuguaaaccuuccaggc

SEQ ID NO: 9753 - RNA, 22 nt, Artificial Sequence
  Guide RNA
ucuuguaaaccuuccaggcucu

SEQ ID NO: 9754 - RNA, 22 nt, Artificial Sequence
  Guide RNA
ugaaaucaagagccuggaaggu

SEQ ID NO: 9755 - RNA, 22 nt, Artificial Sequence
  Guide RNA
uggaagguuuacaagaugaaua

SEQ ID NO: 9756 - RNA, 22 nt, Artificial Sequence
  Guide RNA
uguaaaccuuccaggcucuuga

SEQ ID NO: 9757 - RNA, 22 nt, Artificial Sequence
  Guide RNA
uucaucuuguaaaccuuccagg

SEQ ID NO: 9758 - RNA, 22 nt, Artificial Sequence
  Guide RNA
uuguaaaccuuccaggcucuug

SEQ ID NO: 9759 - RNA, 20 nt, Artificial Sequence
  Guide RNA
aaaucaagagccuggaacau

SEQ ID NO: 9760 - RNA, 20 nt, Artificial Sequence
  Guide RNA
aaauguuccaggcucuugau

SEQ ID NO: 9761 - RNA, 20 nt, Artificial Sequence
  Guide RNA
aagagccuggaacauuuaca

SEQ ID NO: 9762 - RNA, 20 nt, Artificial Sequence
  Guide RNA
aaucaagagccuggaacauu

SEQ ID NO: 9763 - RNA, 20 nt, Artificial Sequence
  Guide RNA
aauguuccaggcucuugauu

SEQ ID NO: 9764 - RNA, 20 nt, Artificial Sequence
  Guide RNA
agagccuggaacauuuacaa

SEQ ID NO: 9765 - RNA, 20 nt, Artificial Sequence
  Guide RNA
agcaugaaaucaagagccug

SEQ ID NO: 9766 - RNA, 20 nt, Artificial Sequence
  Guide RNA
agccuggaacauuuacaaga

SEQ ID NO: 9767 - RNA, 20 nt, Artificial Sequence
  Guide RNA
aucaagagccuggaacauuu

SEQ ID NO: 9768 - RNA, 20 nt, Artificial Sequence
  Guide RNA
aucuuguaaauguuccaggc

SEQ ID NO: 9769 - RNA, 20 nt, Artificial Sequence
  Guide RNA
auguuccaggcucuugauuu

SEQ ID NO: 9770 - RNA, 20 nt, Artificial Sequence
  Guide RNA
auucaucuuguaaauguucc

SEQ ID NO: 9771 - RNA, 20 nt, Artificial Sequence
  Guide RNA
caagagccuggaacauuuac

SEQ ID NO: 9772 - RNA, 20 nt, Artificial Sequence
  Guide RNA
caucuuguaaauguuccagg

SEQ ID NO: 9773 - RNA, 20 nt, Artificial Sequence
  Guide RNA
ccuggaacauuuacaagaug

SEQ ID NO: 9774 - RNA, 20 nt, Artificial Sequence
  Guide RNA
cuggaacauuuacaagauga

SEQ ID NO: 9775 - RNA, 20 nt, Artificial Sequence
  Guide RNA
cuuguaaauguuccaggcuc

SEQ ID NO: 9776 - RNA, 20 nt, Artificial Sequence
  Guide RNA
gaaaucaagagccuggaaca

SEQ ID NO: 9777 - RNA, 20 nt, Artificial Sequence
  Guide RNA
gagccuggaacauuuacaag

SEQ ID NO: 9778 - RNA, 20 nt, Artificial Sequence
  Guide RNA
gccuggaacauuuacaagau

SEQ ID NO: 9779 - RNA, 20 nt, Artificial Sequence
  Guide RNA
ggaacauuuacaagaugaau

SEQ ID NO: 9780 - RNA, 20 nt, Artificial Sequence
  Guide RNA
guaaauguuccaggcucuug

SEQ ID NO: 9781 - RNA, 20 nt, Artificial Sequence
  Guide RNA
uaaauguuccaggcucuuga

SEQ ID NO: 9782 - RNA, 20 nt, Artificial Sequence
  Guide RNA
ucaagagccuggaacauuua

SEQ ID NO: 9783 - RNA, 20 nt, Artificial Sequence
  Guide RNA
ucaucuuguaaauguuccag

SEQ ID NO: 9784 - RNA, 20 nt, Artificial Sequence
  Guide RNA
ucuuguaaauguuccaggcu

SEQ ID NO: 9785 - RNA, 20 nt, Artificial Sequence
  Guide RNA
ugaaaucaagagccuggaac

SEQ ID NO: 9786 - RNA, 20 nt, Artificial Sequence
  Guide RNA
uggaacauuuacaagaugaa

SEQ ID NO: 9787 - RNA, 20 nt, Artificial Sequence
  Guide RNA
uguaaauguuccaggcucuu

SEQ ID NO: 9788 - RNA, 20 nt, Artificial Sequence
  Guide RNA
uguuccaggcucuugauuuc

SEQ ID NO: 9789 - RNA, 20 nt, Artificial Sequence
  Guide RNA
uucaucuuguaaauguucca

SEQ ID NO: 9790 - RNA, 20 nt, Artificial Sequence
  Guide RNA
uuguaaauguuccaggcucu

SEQ ID NO: 9791 - RNA, 21 nt, Artificial Sequence
  Guide RNA
aaaucaagagccuggaacauu

SEQ ID NO: 9792 - RNA, 21 nt, Artificial Sequence
  Guide RNA
aaauguuccaggcucuugauu

SEQ ID NO: 9793 - RNA, 21 nt, Artificial Sequence
  Guide RNA
aagagccuggaacauuuacaa

SEQ ID NO: 9794 - RNA, 21 nt, Artificial Sequence
  Guide RNA
aaucaagagccuggaacauuu

SEQ ID NO: 9795 - RNA, 21 nt, Artificial Sequence
  Guide RNA
aauguuccaggcucuugauuu

SEQ ID NO: 9796 - RNA, 21 nt, Artificial Sequence
  Guide RNA
agagccuggaacauuuacaag

SEQ ID NO: 9797 - RNA, 21 nt, Artificial Sequence
  Guide RNA
agccuggaacauuuacaagau

SEQ ID NO: 9798 - RNA, 21 nt, Artificial Sequence
  Guide RNA
aucaagagccuggaacauuua

SEQ ID NO: 9799 - RNA, 21 nt, Artificial Sequence
  Guide RNA
aucuuguaaauguuccaggcu

SEQ ID NO: 9800 - RNA, 21 nt, Artificial Sequence
  Guide RNA
augaaaucaagagccuggaac

SEQ ID NO: 9801 - RNA, 21 nt, Artificial Sequence
  Guide RNA
auguuccaggcucuugauuuc

SEQ ID NO: 9802 - RNA, 21 nt, Artificial Sequence
  Guide RNA
caagagccuggaacauuuaca

SEQ ID NO: 9803 - RNA, 21 nt, Artificial Sequence
  Guide RNA
caucuuguaaauguuccaggc

SEQ ID NO: 9804 - RNA, 21 nt, Artificial Sequence
  Guide RNA
ccuggaacauuuacaagauga

SEQ ID NO: 9805 - RNA, 21 nt, Artificial Sequence
  Guide RNA
cuggaacauuuacaagaugaa

SEQ ID NO: 9806 - RNA, 21 nt, Artificial Sequence
  Guide RNA
cuuguaaauguuccaggcucu

SEQ ID NO: 9807 - RNA, 21 nt, Artificial Sequence
  Guide RNA
gaaaucaagagccuggaacau

SEQ ID NO: 9808 - RNA, 21 nt, Artificial Sequence
  Guide RNA
gagcaugaaaucaagagccug

SEQ ID NO: 9809 - RNA, 21 nt, Artificial Sequence
  Guide RNA
gagccuggaacauuuacaaga

SEQ ID NO: 9810 - RNA, 21 nt, Artificial Sequence
  Guide RNA
gccuggaacauuuacaagaug

SEQ ID NO: 9811 - RNA, 21 nt, Artificial Sequence
  Guide RNA
guaaauguuccaggcucuuga

SEQ ID NO: 9812 - RNA, 21 nt, Artificial Sequence
  Guide RNA
uaaauguuccaggcucuugau

SEQ ID NO: 9813 - RNA, 21 nt, Artificial Sequence
  Guide RNA
ucaagagccuggaacauuuac

SEQ ID NO: 9814 - RNA, 21 nt, Artificial Sequence
  Guide RNA
ucaucuuguaaauguuccagg

SEQ ID NO: 9815 - RNA, 21 nt, Artificial Sequence
  Guide RNA
ucuuguaaauguuccaggcuc

SEQ ID NO: 9816 - RNA, 21 nt, Artificial Sequence
  Guide RNA
ugaaaucaagagccuggaaca

SEQ ID NO: 9817 - RNA, 21 nt, Artificial Sequence
  Guide RNA
uguaaauguuccaggcucuug

SEQ ID NO: 9818 - RNA, 21 nt, Artificial Sequence
  Guide RNA
uguuccaggcucuugauuuca

SEQ ID NO: 9819 - RNA, 21 nt, Artificial Sequence
  Guide RNA
uucaucuuguaaauguuccag

SEQ ID NO: 9820 - RNA, 21 nt, Artificial Sequence
  Guide RNA
uuguaaauguuccaggcucuu

SEQ ID NO: 9821 - RNA, 22 nt, Artificial Sequence
  Guide RNA
aaaucaagagccuggaacauuu

SEQ ID NO: 9822 - RNA, 22 nt, Artificial Sequence
  Guide RNA
aaauguuccaggcucuugauuu

SEQ ID NO: 9823 - RNA, 22 nt, Artificial Sequence
  Guide RNA
aagagccuggaacauuuacaag

SEQ ID NO: 9824 - RNA, 22 nt, Artificial Sequence
  Guide RNA
aaucaagagccuggaacauuua

SEQ ID NO: 9825 - RNA, 22 nt, Artificial Sequence
  Guide RNA
aauguuccaggcucuugauuuc

SEQ ID NO: 9826 - RNA, 22 nt, Artificial Sequence
  Guide RNA
agagcaugaaaucaagagccug

SEQ ID NO: 9827 - RNA, 22 nt, Artificial Sequence
  Guide RNA
agagccuggaacauuuacaaga

SEQ ID NO: 9828 - RNA, 22 nt, Artificial Sequence
  Guide RNA
agccuggaacauuuacaagaug

SEQ ID NO: 9829 - RNA, 22 nt, Artificial Sequence
  Guide RNA
aucaagagccuggaacauuuac

SEQ ID NO: 9830 - RNA, 22 nt, Artificial Sequence
  Guide RNA
aucuuguaaauguuccaggcuc

SEQ ID NO: 9831 - RNA, 22 nt, Artificial Sequence
  Guide RNA
augaaaucaagagccuggaaca

SEQ ID NO: 9832 - RNA, 22 nt, Artificial Sequence
  Guide RNA
auguuccaggcucuugauuuca

SEQ ID NO: 9833 - RNA, 22 nt, Artificial Sequence
  Guide RNA
auucaucuuguaaauguuccag

SEQ ID NO: 9834 - RNA, 22 nt, Artificial Sequence
  Guide RNA
caagagccuggaacauuuacaa

SEQ ID NO: 9835 - RNA, 22 nt, Artificial Sequence
  Guide RNA
caucuuguaaauguuccaggcu

SEQ ID NO: 9836 - RNA, 22 nt, Artificial Sequence
  Guide RNA
caugaaaucaagagccuggaac

SEQ ID NO: 9837 - RNA, 22 nt, Artificial Sequence
  Guide RNA
ccuggaacauuuacaagaugaa

SEQ ID NO: 9838 - RNA, 22 nt, Artificial Sequence
  Guide RNA
cuggaacauuuacaagaugaau

SEQ ID NO: 9839 - RNA, 22 nt, Artificial Sequence
  Guide RNA
cuuguaaauguuccaggcucuu

SEQ ID NO: 9840 - RNA, 22 nt, Artificial Sequence
  Guide RNA
gaaaucaagagccuggaacauu

SEQ ID NO: 9841 - RNA, 22 nt, Artificial Sequence
  Guide RNA
gagccuggaacauuuacaagau

SEQ ID NO: 9842 - RNA, 22 nt, Artificial Sequence
  Guide RNA
gccuggaacauuuacaagauga

SEQ ID NO: 9843 - RNA, 22 nt, Artificial Sequence
  Guide RNA
guaaauguuccaggcucuugau

SEQ ID NO: 9844 - RNA, 22 nt, Artificial Sequence
  Guide RNA
uaaauguuccaggcucuugauu

SEQ ID NO: 9845 - RNA, 22 nt, Artificial Sequence
  Guide RNA
ucaagagccuggaacauuuaca

SEQ ID NO: 9846 - RNA, 22 nt, Artificial Sequence
  Guide RNA
ucaucuuguaaauguuccaggc

SEQ ID NO: 9847 - RNA, 22 nt, Artificial Sequence
  Guide RNA
ucuuguaaauguuccaggcucu

SEQ ID NO: 9848 - RNA, 22 nt, Artificial Sequence
  Guide RNA
ugaaaucaagagccuggaacau

SEQ ID NO: 9849 - RNA, 22 nt, Artificial Sequence
  Guide RNA
uguaaauguuccaggcucuuga

SEQ ID NO: 9850 - RNA, 22 nt, Artificial Sequence
  Guide RNA
uguuccaggcucuugauuucau

SEQ ID NO: 9851 - RNA, 22 nt, Artificial Sequence
  Guide RNA
uucaucuuguaaauguuccagg

SEQ ID NO: 9852 - RNA, 22 nt, Artificial Sequence
  Guide RNA
uuguaaauguuccaggcucuug

SEQ ID NO: 9853 - RNA, 20 nt, Artificial Sequence
  Guide RNA
aaaucuuccaggcucuugag

SEQ ID NO: 9854 - RNA, 20 nt, Artificial Sequence
  Guide RNA
aacucaagagccuggaagau

SEQ ID NO: 9855 - RNA, 20 nt, Artificial Sequence
  Guide RNA
aaucuuccaggcucuugagu

SEQ ID NO: 9856 - RNA, 20 nt, Artificial Sequence
  Guide RNA
acucaagagccuggaagauu

SEQ ID NO: 9857 - RNA, 20 nt, Artificial Sequence
  Guide RNA
agagcaugaacucaagagcc

SEQ ID NO: 9858 - RNA, 20 nt, Artificial Sequence
  Guide RNA
agcaugaacucaagagccug

SEQ ID NO: 9859 - RNA, 20 nt, Artificial Sequence
  Guide RNA
aggcucuugaguucaugcuc

SEQ ID NO: 9860 - RNA, 20 nt, Artificial Sequence
  Guide RNA
aguguauagagcaugaacuc

SEQ ID NO: 9861 - RNA, 20 nt, Artificial Sequence
  Guide RNA
aguucaugcucuauacacua

SEQ ID NO: 9862 - RNA, 20 nt, Artificial Sequence
  Guide RNA
auagagcaugaacucaagag

SEQ ID NO: 9863 - RNA, 20 nt, Artificial Sequence
  Guide RNA
aucuuccaggcucuugaguu

SEQ ID NO: 9864 - RNA, 20 nt, Artificial Sequence
  Guide RNA
augaacucaagagccuggaa

SEQ ID NO: 9865 - RNA, 20 nt, Artificial Sequence
  Guide RNA
caggcucuugaguucaugcu

SEQ ID NO: 9866 - RNA, 20 nt, Artificial Sequence
  Guide RNA
caugaacucaagagccugga

SEQ ID NO: 9867 - RNA, 20 nt, Artificial Sequence
  Guide RNA
ccaggcucuugaguucaugc

SEQ ID NO: 9868 - RNA, 20 nt, Artificial Sequence
  Guide RNA
cucuugaguucaugcucuau

SEQ ID NO: 9869 - RNA, 20 nt, Artificial Sequence
  Guide RNA
cuuccaggcucuugaguuca

SEQ ID NO: 9870 - RNA, 20 nt, Artificial Sequence
  Guide RNA
cuugaguucaugcucuauac

SEQ ID NO: 9871 - RNA, 20 nt, Artificial Sequence
  Guide RNA
gaacucaagagccuggaaga

SEQ ID NO: 9872 - RNA, 20 nt, Artificial Sequence
  Guide RNA
gagcaugaacucaagagccu

SEQ ID NO: 9873 - RNA, 20 nt, Artificial Sequence
  Guide RNA
gaguucaugcucuauacacu

SEQ ID NO: 9874 - RNA, 20 nt, Artificial Sequence
  Guide RNA
gcaugaacucaagagccugg

SEQ ID NO: 9875 - RNA, 20 nt, Artificial Sequence
  Guide RNA
gcucuugaguucaugcucua

SEQ ID NO: 9876 - RNA, 20 nt, Artificial Sequence
  Guide RNA
ggcucuugaguucaugcucu

SEQ ID NO: 9877 - RNA, 20 nt, Artificial Sequence
  Guide RNA
guaaaucuuccaggcucuug

SEQ ID NO: 9878 - RNA, 20 nt, Artificial Sequence
  Guide RNA
guaguguauagagcaugaac

SEQ ID NO: 9879 - RNA, 20 nt, Artificial Sequence
  Guide RNA
guauagagcaugaacucaag

SEQ ID NO: 9880 - RNA, 20 nt, Artificial Sequence
  Guide RNA
guguauagagcaugaacuca

SEQ ID NO: 9881 - RNA, 20 nt, Artificial Sequence
  Guide RNA
guuuguaguguauagagcau

SEQ ID NO: 9882 - RNA, 20 nt, Artificial Sequence
  Guide RNA
uaaaucuuccaggcucuuga

SEQ ID NO: 9883 - RNA, 20 nt, Artificial Sequence
  Guide RNA
uagagcaugaacucaagagc

SEQ ID NO: 9884 - RNA, 20 nt, Artificial Sequence
  Guide RNA
uaguguauagagcaugaacu

SEQ ID NO: 9885 - RNA, 20 nt, Artificial Sequence
  Guide RNA
uauagagcaugaacucaaga

SEQ ID NO: 9886 - RNA, 20 nt, Artificial Sequence
  Guide RNA
uccaggcucuugaguucaug

SEQ ID NO: 9887 - RNA, 20 nt, Artificial Sequence
  Guide RNA
ucuuccaggcucuugaguuc

SEQ ID NO: 9888 - RNA, 20 nt, Artificial Sequence
  Guide RNA
ucuugaguucaugcucuaua

SEQ ID NO: 9889 - RNA, 20 nt, Artificial Sequence
  Guide RNA
ugaacucaagagccuggaag

SEQ ID NO: 9890 - RNA, 20 nt, Artificial Sequence
  Guide RNA
ugaguucaugcucuauacac

SEQ ID NO: 9891 - RNA, 20 nt, Artificial Sequence
  Guide RNA
uguaaaucuuccaggcucuu

SEQ ID NO: 9892 - RNA, 20 nt, Artificial Sequence
  Guide RNA
uguaguguauagagcaugaa

SEQ ID NO: 9893 - RNA, 20 nt, Artificial Sequence
  Guide RNA
uguauagagcaugaacucaa

SEQ ID NO: 9894 - RNA, 20 nt, Artificial Sequence
  Guide RNA
uuccaggcucuugaguucau

SEQ ID NO: 9895 - RNA, 20 nt, Artificial Sequence
  Guide RNA
uugaguucaugcucuauaca

SEQ ID NO: 9896 - RNA, 20 nt, Artificial Sequence
  Guide RNA
uuguaaaucuuccaggcucu

SEQ ID NO: 9897 - RNA, 20 nt, Artificial Sequence
  Guide RNA
uuguaguguauagagcauga

SEQ ID NO: 9898 - RNA, 20 nt, Artificial Sequence
  Guide RNA
uuuguaguguauagagcaug

SEQ ID NO: 9899 - RNA, 21 nt, Artificial Sequence
  Guide RNA
aaaucuuccaggcucuugagu

SEQ ID NO: 9900 - RNA, 21 nt, Artificial Sequence
  Guide RNA
aacucaagagccuggaagauu

SEQ ID NO: 9901 - RNA, 21 nt, Artificial Sequence
  Guide RNA
aaucuuccaggcucuugaguu

SEQ ID NO: 9902 - RNA, 21 nt, Artificial Sequence
  Guide RNA
acucaagagccuggaagauuu

SEQ ID NO: 9903 - RNA, 21 nt, Artificial Sequence
  Guide RNA
agagcaugaacucaagagccu

SEQ ID NO: 9904 - RNA, 21 nt, Artificial Sequence
  Guide RNA
agcaugaacucaagagccugg

SEQ ID NO: 9905 - RNA, 21 nt, Artificial Sequence
  Guide RNA
aggcucuugaguucaugcucu

SEQ ID NO: 9906 - RNA, 21 nt, Artificial Sequence
  Guide RNA
aguguauagagcaugaacuca

SEQ ID NO: 9907 - RNA, 21 nt, Artificial Sequence
  Guide RNA
aguucaugcucuauacacuac

SEQ ID NO: 9908 - RNA, 21 nt, Artificial Sequence
  Guide RNA
auagagcaugaacucaagagc

SEQ ID NO: 9909 - RNA, 21 nt, Artificial Sequence
  Guide RNA
aucuuccaggcucuugaguuc

SEQ ID NO: 9910 - RNA, 21 nt, Artificial Sequence
  Guide RNA
augaacucaagagccuggaag

SEQ ID NO: 9911 - RNA, 21 nt, Artificial Sequence
  Guide RNA
caggcucuugaguucaugcuc

SEQ ID NO: 9912 - RNA, 21 nt, Artificial Sequence
  Guide RNA
caugaacucaagagccuggaa

SEQ ID NO: 9913 - RNA, 21 nt, Artificial Sequence
  Guide RNA
ccaggcucuugaguucaugcu

SEQ ID NO: 9914 - RNA, 21 nt, Artificial Sequence
  Guide RNA
cucuugaguucaugcucuaua

SEQ ID NO: 9915 - RNA, 21 nt, Artificial Sequence
  Guide RNA
cuuccaggcucuugaguucau

SEQ ID NO: 9916 - RNA, 21 nt, Artificial Sequence
  Guide RNA
cuugaguucaugcucuauaca

SEQ ID NO: 9917 - RNA, 21 nt, Artificial Sequence
  Guide RNA
cuuguaaaucuuccaggcucu

SEQ ID NO: 9918 - RNA, 21 nt, Artificial Sequence
  Guide RNA
gaacucaagagccuggaagau

SEQ ID NO: 9919 - RNA, 21 nt, Artificial Sequence
  Guide RNA
gagcaugaacucaagagccug

SEQ ID NO: 9920 - RNA, 21 nt, Artificial Sequence
  Guide RNA
gaguucaugcucuauacacua

SEQ ID NO: 9921 - RNA, 21 nt, Artificial Sequence
  Guide RNA
gcaugaacucaagagccugga

SEQ ID NO: 9922 - RNA, 21 nt, Artificial Sequence
  Guide RNA
gcucuugaguucaugcucuau

SEQ ID NO: 9923 - RNA, 21 nt, Artificial Sequence
  Guide RNA
ggcucuugaguucaugcucua

SEQ ID NO: 9924 - RNA, 21 nt, Artificial Sequence
  Guide RNA
guaaaucuuccaggcucuuga

SEQ ID NO: 9925 - RNA, 21 nt, Artificial Sequence
  Guide RNA
guaguguauagagcaugaacu

SEQ ID NO: 9926 - RNA, 21 nt, Artificial Sequence
  Guide RNA
guauagagcaugaacucaaga

SEQ ID NO: 9927 - RNA, 21 nt, Artificial Sequence
  Guide RNA
guguauagagcaugaacucaa

SEQ ID NO: 9928 - RNA, 21 nt, Artificial Sequence
  Guide RNA
guuuguaguguauagagcaug

SEQ ID NO: 9929 - RNA, 21 nt, Artificial Sequence
  Guide RNA
uaaaucuuccaggcucuugag

SEQ ID NO: 9930 - RNA, 21 nt, Artificial Sequence
  Guide RNA
uagagcaugaacucaagagcc

SEQ ID NO: 9931 - RNA, 21 nt, Artificial Sequence
  Guide RNA
uaguguauagagcaugaacuc

SEQ ID NO: 9932 - RNA, 21 nt, Artificial Sequence
  Guide RNA
uauagagcaugaacucaagag

SEQ ID NO: 9933 - RNA, 21 nt, Artificial Sequence
  Guide RNA
uccaggcucuugaguucaugc

SEQ ID NO: 9934 - RNA, 21 nt, Artificial Sequence
  Guide RNA
ucuuccaggcucuugaguuca

SEQ ID NO: 9935 - RNA, 21 nt, Artificial Sequence
  Guide RNA
ucuugaguucaugcucuauac

SEQ ID NO: 9936 - RNA, 21 nt, Artificial Sequence
  Guide RNA
ugaacucaagagccuggaaga

SEQ ID NO: 9937 - RNA, 21 nt, Artificial Sequence
  Guide RNA
ugaguucaugcucuauacacu

SEQ ID NO: 9938 - RNA, 21 nt, Artificial Sequence
  Guide RNA
uguaaaucuuccaggcucuug

SEQ ID NO: 9939 - RNA, 21 nt, Artificial Sequence
  Guide RNA
uguaguguauagagcaugaac

SEQ ID NO: 9940 - RNA, 21 nt, Artificial Sequence
  Guide RNA
uguauagagcaugaacucaag

SEQ ID NO: 9941 - RNA, 21 nt, Artificial Sequence
  Guide RNA
uguuuguaguguauagagcau

SEQ ID NO: 9942 - RNA, 21 nt, Artificial Sequence
  Guide RNA
uuccaggcucuugaguucaug

SEQ ID NO: 9943 - RNA, 21 nt, Artificial Sequence
  Guide RNA
uugaguucaugcucuauacac

SEQ ID NO: 9944 - RNA, 21 nt, Artificial Sequence
  Guide RNA
uuguaaaucuuccaggcucuu

SEQ ID NO: 9945 - RNA, 21 nt, Artificial Sequence
  Guide RNA
uuguaguguauagagcaugaa

SEQ ID NO: 9946 - RNA, 21 nt, Artificial Sequence
  Guide RNA
uuuguaguguauagagcauga

SEQ ID NO: 9947 - RNA, 22 nt, Artificial Sequence
  Guide RNA
aaaucuuccaggcucuugaguu

SEQ ID NO: 9948 - RNA, 22 nt, Artificial Sequence
  Guide RNA
aacucaagagccuggaagauuu

SEQ ID NO: 9949 - RNA, 22 nt, Artificial Sequence
  Guide RNA
aaucuuccaggcucuugaguuc

SEQ ID NO: 9950 - RNA, 22 nt, Artificial Sequence
  Guide RNA
acucaagagccuggaagauuua

SEQ ID NO: 9951 - RNA, 22 nt, Artificial Sequence
  Guide RNA
agagcaugaacucaagagccug

SEQ ID NO: 9952 - RNA, 22 nt, Artificial Sequence
  Guide RNA
agcaugaacucaagagccugga

SEQ ID NO: 9953 - RNA, 22 nt, Artificial Sequence
  Guide RNA
aggcucuugaguucaugcucua

SEQ ID NO: 9954 - RNA, 22 nt, Artificial Sequence
  Guide RNA
aguguauagagcaugaacucaa

SEQ ID NO: 9955 - RNA, 22 nt, Artificial Sequence
  Guide RNA
aguucaugcucuauacacuaca

SEQ ID NO: 9956 - RNA, 22 nt, Artificial Sequence
  Guide RNA
auagagcaugaacucaagagcc

SEQ ID NO: 9957 - RNA, 22 nt, Artificial Sequence
  Guide RNA
aucuuccaggcucuugaguuca

SEQ ID NO: 9958 - RNA, 22 nt, Artificial Sequence
  Guide RNA
augaacucaagagccuggaaga

SEQ ID NO: 9959 - RNA, 22 nt, Artificial Sequence
  Guide RNA
caggcucuugaguucaugcucu

SEQ ID NO: 9960 - RNA, 22 nt, Artificial Sequence
  Guide RNA
caugaacucaagagccuggaag

SEQ ID NO: 9961 - RNA, 22 nt, Artificial Sequence
  Guide RNA
ccaggcucuugaguucaugcuc

SEQ ID NO: 9962 - RNA, 22 nt, Artificial Sequence
  Guide RNA
cucuugaguucaugcucuauac

SEQ ID NO: 9963 - RNA, 22 nt, Artificial Sequence
  Guide RNA
cuuccaggcucuugaguucaug

SEQ ID NO: 9964 - RNA, 22 nt, Artificial Sequence
  Guide RNA
cuugaguucaugcucuauacac

SEQ ID NO: 9965 - RNA, 22 nt, Artificial Sequence
  Guide RNA
cuuguaaaucuuccaggcucuu

SEQ ID NO: 9966 - RNA, 22 nt, Artificial Sequence
  Guide RNA
gaacucaagagccuggaagauu

SEQ ID NO: 9967 - RNA, 22 nt, Artificial Sequence
  Guide RNA
gagcaugaacucaagagccugg

SEQ ID NO: 9968 - RNA, 22 nt, Artificial Sequence
  Guide RNA
gaguucaugcucuauacacuac

SEQ ID NO: 9969 - RNA, 22 nt, Artificial Sequence
  Guide RNA
gcaugaacucaagagccuggaa

SEQ ID NO: 9970 - RNA, 22 nt, Artificial Sequence
  Guide RNA
gcucuugaguucaugcucuaua

SEQ ID NO: 9971 - RNA, 22 nt, Artificial Sequence
  Guide RNA
ggcucuugaguucaugcucuau

SEQ ID NO: 9972 - RNA, 22 nt, Artificial Sequence
  Guide RNA
guaaaucuuccaggcucuugag

SEQ ID NO: 9973 - RNA, 22 nt, Artificial Sequence
  Guide RNA
guaguguauagagcaugaacuc

SEQ ID NO: 9974 - RNA, 22 nt, Artificial Sequence
  Guide RNA
guauagagcaugaacucaagag

SEQ ID NO: 9975 - RNA, 22 nt, Artificial Sequence
  Guide RNA
guguauagagcaugaacucaag

SEQ ID NO: 9976 - RNA, 22 nt, Artificial Sequence
  Guide RNA
guuuguaguguauagagcauga

SEQ ID NO: 9977 - RNA, 22 nt, Artificial Sequence
  Guide RNA
uaaaucuuccaggcucuugagu

SEQ ID NO: 9978 - RNA, 22 nt, Artificial Sequence
  Guide RNA
uagagcaugaacucaagagccu

SEQ ID NO: 9979 - RNA, 22 nt, Artificial Sequence
  Guide RNA
uaguguauagagcaugaacuca

SEQ ID NO: 9980 - RNA, 22 nt, Artificial Sequence
  Guide RNA
uauagagcaugaacucaagagc

SEQ ID NO: 9981 - RNA, 22 nt, Artificial Sequence
  Guide RNA
uccaggcucuugaguucaugcu

SEQ ID NO: 9982 - RNA, 22 nt, Artificial Sequence
  Guide RNA
ucuuccaggcucuugaguucau

SEQ ID NO: 9983 - RNA, 22 nt, Artificial Sequence
  Guide RNA
ucuugaguucaugcucuauaca

SEQ ID NO: 9984 - RNA, 22 nt, Artificial Sequence
  Guide RNA
ucuuguaaaucuuccaggcucu

SEQ ID NO: 9985 - RNA, 22 nt, Artificial Sequence
  Guide RNA
ugaacucaagagccuggaagau

SEQ ID NO: 9986 - RNA, 22 nt, Artificial Sequence
  Guide RNA
ugaguucaugcucuauacacua

SEQ ID NO: 9987 - RNA, 22 nt, Artificial Sequence
  Guide RNA
uguaaaucuuccaggcucuuga

SEQ ID NO: 9988 - RNA, 22 nt, Artificial Sequence
  Guide RNA
uguaguguauagagcaugaacu

SEQ ID NO: 9989 - RNA, 22 nt, Artificial Sequence
  Guide RNA
uguauagagcaugaacucaaga

SEQ ID NO: 9990 - RNA, 22 nt, Artificial Sequence
  Guide RNA
uguuuguaguguauagagcaug

SEQ ID NO: 9991 - RNA, 22 nt, Artificial Sequence
  Guide RNA
uuccaggcucuugaguucaugc

SEQ ID NO: 9992 - RNA, 22 nt, Artificial Sequence
  Guide RNA
uugaguucaugcucuauacacu

SEQ ID NO: 9993 - RNA, 22 nt, Artificial Sequence
  Guide RNA
uuguaaaucuuccaggcucuug

SEQ ID NO: 9994 - RNA, 22 nt, Artificial Sequence
  Guide RNA
uuguaguguauagagcaugaac

SEQ ID NO: 9995 - RNA, 22 nt, Artificial Sequence
  Guide RNA
uuguuuguaguguauagagcau

SEQ ID NO: 9996 - RNA, 22 nt, Artificial Sequence
  Guide RNA
uuuguaguguauagagcaugaa

SEQ ID NO: 9997 - RNA, 20 nt, Artificial Sequence
  Guide RNA
aaacagagcuugacaguaaa

SEQ ID NO: 9998 - RNA, 20 nt, Artificial Sequence
  Guide RNA
aacagagcuugacaguaaag

SEQ ID NO: 9999 - RNA, 20 nt, Artificial Sequence
  Guide RNA
aagcucuguuugucuaacau

SEQ ID NO: 10000 - RNA, 20 nt, Artificial Sequence
  Guide RNA
acaaacagagcuugacagua

SEQ ID NO: 10001 - RNA, 20 nt, Artificial Sequence
  Guide RNA
acagagcuugacaguaaagu

SEQ ID NO: 10002 - RNA, 20 nt, Artificial Sequence
  Guide RNA
acagugauguuagacaaaca

SEQ ID NO: 10003 - RNA, 20 nt, Artificial Sequence
  Guide RNA
acauuucugacuuuacuguc

SEQ ID NO: 10004 - RNA, 20 nt, Artificial Sequence
  Guide RNA
acugucaagcucuguuuguc

SEQ ID NO: 10005 - RNA, 20 nt, Artificial Sequence
  Guide RNA
acuuuacugucaagcucugu

SEQ ID NO: 10006 - RNA, 20 nt, Artificial Sequence
  Guide RNA
agacaaacagagcuugacag

SEQ ID NO: 10007 - RNA, 20 nt, Artificial Sequence
  Guide RNA
agagcuugacaguaaaguca

SEQ ID NO: 10008 - RNA, 20 nt, Artificial Sequence
  Guide RNA
agcucuguuugucuaacauc

SEQ ID NO: 10009 - RNA, 20 nt, Artificial Sequence
  Guide RNA
agcuugacaguaaagucaga

SEQ ID NO: 10010 - RNA, 20 nt, Artificial Sequence
  Guide RNA
agugauguuagacaaacaga

SEQ ID NO: 10011 - RNA, 20 nt, Artificial Sequence
  Guide RNA
auguuagacaaacagagcuu

SEQ ID NO: 10012 - RNA, 20 nt, Artificial Sequence
  Guide RNA
auuucugacuuuacugucaa

SEQ ID NO: 10013 - RNA, 20 nt, Artificial Sequence
  Guide RNA
caaacagagcuugacaguaa

SEQ ID NO: 10014 - RNA, 20 nt, Artificial Sequence
  Guide RNA
caagcucuguuugucuaaca

SEQ ID NO: 10015 - RNA, 20 nt, Artificial Sequence
  Guide RNA
cacagugauguuagacaaac

SEQ ID NO: 10016 - RNA, 20 nt, Artificial Sequence
  Guide RNA
cagagcuugacaguaaaguc

SEQ ID NO: 10017 - RNA, 20 nt, Artificial Sequence
  Guide RNA
cagugauguuagacaaacag

SEQ ID NO: 10018 - RNA, 20 nt, Artificial Sequence
  Guide RNA
cauuucugacuuuacuguca

SEQ ID NO: 10019 - RNA, 20 nt, Artificial Sequence
  Guide RNA
cugacuuuacugucaagcuc

SEQ ID NO: 10020 - RNA, 20 nt, Artificial Sequence
  Guide RNA
cugucaagcucuguuugucu

SEQ ID NO: 10021 - RNA, 20 nt, Artificial Sequence
  Guide RNA
cuuuacugucaagcucuguu

SEQ ID NO: 10022 - RNA, 20 nt, Artificial Sequence
  Guide RNA
gacaaacagagcuugacagu

SEQ ID NO: 10023 - RNA, 20 nt, Artificial Sequence
  Guide RNA
gacuuuacugucaagcucug

SEQ ID NO: 10024 - RNA, 20 nt, Artificial Sequence
  Guide RNA
gagcuugacaguaaagucag

SEQ ID NO: 10025 - RNA, 20 nt, Artificial Sequence
  Guide RNA
gauguuagacaaacagagcu

SEQ ID NO: 10026 - RNA, 20 nt, Artificial Sequence
  Guide RNA
gcucuguuugucuaacauca

SEQ ID NO: 10027 - RNA, 20 nt, Artificial Sequence
  Guide RNA
gucaagcucuguuugucuaa

SEQ ID NO: 10028 - RNA, 20 nt, Artificial Sequence
  Guide RNA
gugauguuagacaaacagag

SEQ ID NO: 10029 - RNA, 20 nt, Artificial Sequence
  Guide RNA
guuagacaaacagagcuuga

SEQ ID NO: 10030 - RNA, 20 nt, Artificial Sequence
  Guide RNA
uacugucaagcucuguuugu

SEQ ID NO: 10031 - RNA, 20 nt, Artificial Sequence
  Guide RNA
uagacaaacagagcuugaca

SEQ ID NO: 10032 - RNA, 20 nt, Artificial Sequence
  Guide RNA
ucaagcucuguuugucuaac

SEQ ID NO: 10033 - RNA, 20 nt, Artificial Sequence
  Guide RNA
ucugacuuuacugucaagcu

SEQ ID NO: 10034 - RNA, 20 nt, Artificial Sequence
  Guide RNA
ugacuuuacugucaagcucu

SEQ ID NO: 10035 - RNA, 20 nt, Artificial Sequence
  Guide RNA
ugauguuagacaaacagagc

SEQ ID NO: 10036 - RNA, 20 nt, Artificial Sequence
  Guide RNA
ugucaagcucuguuugucua

SEQ ID NO: 10037 - RNA, 20 nt, Artificial Sequence
  Guide RNA
uguuagacaaacagagcuug

SEQ ID NO: 10038 - RNA, 20 nt, Artificial Sequence
  Guide RNA
uuacugucaagcucuguuug

SEQ ID NO: 10039 - RNA, 20 nt, Artificial Sequence
  Guide RNA
uuagacaaacagagcuugac

SEQ ID NO: 10040 - RNA, 20 nt, Artificial Sequence
  Guide RNA
uucugacuuuacugucaagc

SEQ ID NO: 10041 - RNA, 20 nt, Artificial Sequence
  Guide RNA
uuuacugucaagcucuguuu

SEQ ID NO: 10042 - RNA, 20 nt, Artificial Sequence
  Guide RNA
uuucugacuuuacugucaag

SEQ ID NO: 10043 - RNA, 21 nt, Artificial Sequence
  Guide RNA
aaacagagcuugacaguaaag

SEQ ID NO: 10044 - RNA, 21 nt, Artificial Sequence
  Guide RNA
aacagagcuugacaguaaagu

SEQ ID NO: 10045 - RNA, 21 nt, Artificial Sequence
  Guide RNA
aagcucuguuugucuaacauc

SEQ ID NO: 10046 - RNA, 21 nt, Artificial Sequence
  Guide RNA
acaaacagagcuugacaguaa

SEQ ID NO: 10047 - RNA, 21 nt, Artificial Sequence
  Guide RNA
acagagcuugacaguaaaguc

SEQ ID NO: 10048 - RNA, 21 nt, Artificial Sequence
  Guide RNA
acagugauguuagacaaacag

SEQ ID NO: 10049 - RNA, 21 nt, Artificial Sequence
  Guide RNA
acauuucugacuuuacuguca

SEQ ID NO: 10050 - RNA, 21 nt, Artificial Sequence
  Guide RNA
acugucaagcucuguuugucu

SEQ ID NO: 10051 - RNA, 21 nt, Artificial Sequence
  Guide RNA
acuuuacugucaagcucuguu

SEQ ID NO: 10052 - RNA, 21 nt, Artificial Sequence
  Guide RNA
agacaaacagagcuugacagu

SEQ ID NO: 10053 - RNA, 21 nt, Artificial Sequence
  Guide RNA
agagcuugacaguaaagucag

SEQ ID NO: 10054 - RNA, 21 nt, Artificial Sequence
  Guide RNA
agcucuguuugucuaacauca

SEQ ID NO: 10055 - RNA, 21 nt, Artificial Sequence
  Guide RNA
agcuugacaguaaagucagaa

SEQ ID NO: 10056 - RNA, 21 nt, Artificial Sequence
  Guide RNA
agugauguuagacaaacagag

SEQ ID NO: 10057 - RNA, 21 nt, Artificial Sequence
  Guide RNA
auguuagacaaacagagcuug

SEQ ID NO: 10058 - RNA, 21 nt, Artificial Sequence
  Guide RNA
auuucugacuuuacugucaag

SEQ ID NO: 10059 - RNA, 21 nt, Artificial Sequence
  Guide RNA
caaacagagcuugacaguaaa

SEQ ID NO: 10060 - RNA, 21 nt, Artificial Sequence
  Guide RNA
caagcucuguuugucuaacau

SEQ ID NO: 10061 - RNA, 21 nt, Artificial Sequence
  Guide RNA
cacagugauguuagacaaaca

SEQ ID NO: 10062 - RNA, 21 nt, Artificial Sequence
  Guide RNA
cacauuucugacuuuacuguc

SEQ ID NO: 10063 - RNA, 21 nt, Artificial Sequence
  Guide RNA
cagagcuugacaguaaaguca

SEQ ID NO: 10064 - RNA, 21 nt, Artificial Sequence
  Guide RNA
cagugauguuagacaaacaga

SEQ ID NO: 10065 - RNA, 21 nt, Artificial Sequence
  Guide RNA
cauuucugacuuuacugucaa

SEQ ID NO: 10066 - RNA, 21 nt, Artificial Sequence
  Guide RNA
cugacuuuacugucaagcucu

SEQ ID NO: 10067 - RNA, 21 nt, Artificial Sequence
  Guide RNA
cugucaagcucuguuugucua

SEQ ID NO: 10068 - RNA, 21 nt, Artificial Sequence
  Guide RNA
cuuuacugucaagcucuguuu

SEQ ID NO: 10069 - RNA, 21 nt, Artificial Sequence
  Guide RNA
gacaaacagagcuugacagua

SEQ ID NO: 10070 - RNA, 21 nt, Artificial Sequence
  Guide RNA
gacuuuacugucaagcucugu

SEQ ID NO: 10071 - RNA, 21 nt, Artificial Sequence
  Guide RNA
gagcuugacaguaaagucaga

SEQ ID NO: 10072 - RNA, 21 nt, Artificial Sequence
  Guide RNA
gauguuagacaaacagagcuu

SEQ ID NO: 10073 - RNA, 21 nt, Artificial Sequence
  Guide RNA
gcacagugauguuagacaaac

SEQ ID NO: 10074 - RNA, 21 nt, Artificial Sequence
  Guide RNA
gcucuguuugucuaacaucac

SEQ ID NO: 10075 - RNA, 21 nt, Artificial Sequence
  Guide RNA
gucaagcucuguuugucuaac

SEQ ID NO: 10076 - RNA, 21 nt, Artificial Sequence
  Guide RNA
gugauguuagacaaacagagc

SEQ ID NO: 10077 - RNA, 21 nt, Artificial Sequence
  Guide RNA
guuagacaaacagagcuugac

SEQ ID NO: 10078 - RNA, 21 nt, Artificial Sequence
  Guide RNA
uacugucaagcucuguuuguc

SEQ ID NO: 10079 - RNA, 21 nt, Artificial Sequence
  Guide RNA
uagacaaacagagcuugacag

SEQ ID NO: 10080 - RNA, 21 nt, Artificial Sequence
  Guide RNA
ucaagcucuguuugucuaaca

SEQ ID NO: 10081 - RNA, 21 nt, Artificial Sequence
  Guide RNA
ucugacuuuacugucaagcuc

SEQ ID NO: 10082 - RNA, 21 nt, Artificial Sequence
  Guide RNA
ugacuuuacugucaagcucug

SEQ ID NO: 10083 - RNA, 21 nt, Artificial Sequence
  Guide RNA
ugauguuagacaaacagagcu

SEQ ID NO: 10084 - RNA, 21 nt, Artificial Sequence
  Guide RNA
ugucaagcucuguuugucuaa

SEQ ID NO: 10085 - RNA, 21 nt, Artificial Sequence
  Guide RNA
uguuagacaaacagagcuuga

SEQ ID NO: 10086 - RNA, 21 nt, Artificial Sequence
  Guide RNA
uuacugucaagcucuguuugu

SEQ ID NO: 10087 - RNA, 21 nt, Artificial Sequence
  Guide RNA
uuagacaaacagagcuugaca

SEQ ID NO: 10088 - RNA, 21 nt, Artificial Sequence
  Guide RNA
uucugacuuuacugucaagcu

SEQ ID NO: 10089 - RNA, 21 nt, Artificial Sequence
  Guide RNA
uuuacugucaagcucuguuug

SEQ ID NO: 10090 - RNA, 21 nt, Artificial Sequence
  Guide RNA
uuucugacuuuacugucaagc

SEQ ID NO: 10091 - RNA, 22 nt, Artificial Sequence
  Guide RNA
aaacagagcuugacaguaaagu

SEQ ID NO: 10092 - RNA, 22 nt, Artificial Sequence
  Guide RNA
aacagagcuugacaguaaaguc

SEQ ID NO: 10093 - RNA, 22 nt, Artificial Sequence
  Guide RNA
aagcucuguuugucuaacauca

SEQ ID NO: 10094 - RNA, 22 nt, Artificial Sequence
  Guide RNA
acaaacagagcuugacaguaaa

SEQ ID NO: 10095 - RNA, 22 nt, Artificial Sequence
  Guide RNA
acagagcuugacaguaaaguca

SEQ ID NO: 10096 - RNA, 22 nt, Artificial Sequence
  Guide RNA
acagugauguuagacaaacaga

SEQ ID NO: 10097 - RNA, 22 nt, Artificial Sequence
  Guide RNA
acauuucugacuuuacugucaa

SEQ ID NO: 10098 - RNA, 22 nt, Artificial Sequence
  Guide RNA
acugucaagcucuguuugucua

SEQ ID NO: 10099 - RNA, 22 nt, Artificial Sequence
  Guide RNA
acuuuacugucaagcucuguuu

SEQ ID NO: 10100 - RNA, 22 nt, Artificial Sequence
  Guide RNA
agacaaacagagcuugacagua

SEQ ID NO: 10101 - RNA, 22 nt, Artificial Sequence
  Guide RNA
agagcuugacaguaaagucaga

SEQ ID NO: 10102 - RNA, 22 nt, Artificial Sequence
  Guide RNA
agcacagugauguuagacaaac

SEQ ID NO: 10103 - RNA, 22 nt, Artificial Sequence
  Guide RNA
agcucuguuugucuaacaucac

SEQ ID NO: 10104 - RNA, 22 nt, Artificial Sequence
  Guide RNA
agcuugacaguaaagucagaaa

SEQ ID NO: 10105 - RNA, 22 nt, Artificial Sequence
  Guide RNA
agugauguuagacaaacagagc

SEQ ID NO: 10106 - RNA, 22 nt, Artificial Sequence
  Guide RNA
auguuagacaaacagagcuuga

SEQ ID NO: 10107 - RNA, 22 nt, Artificial Sequence
  Guide RNA
auuucugacuuuacugucaagc

SEQ ID NO: 10108 - RNA, 22 nt, Artificial Sequence
  Guide RNA
caaacagagcuugacaguaaag

SEQ ID NO: 10109 - RNA, 22 nt, Artificial Sequence
  Guide RNA
caagcucuguuugucuaacauc

SEQ ID NO: 10110 - RNA, 22 nt, Artificial Sequence
  Guide RNA
cacagugauguuagacaaacag

SEQ ID NO: 10111 - RNA, 22 nt, Artificial Sequence
  Guide RNA
cacauuucugacuuuacuguca

SEQ ID NO: 10112 - RNA, 22 nt, Artificial Sequence
  Guide RNA
cagagcuugacaguaaagucag

SEQ ID NO: 10113 - RNA, 22 nt, Artificial Sequence
  Guide RNA
cagugauguuagacaaacagag

SEQ ID NO: 10114 - RNA, 22 nt, Artificial Sequence
  Guide RNA
cauuucugacuuuacugucaag

SEQ ID NO: 10115 - RNA, 22 nt, Artificial Sequence
  Guide RNA
cugacuuuacugucaagcucug

SEQ ID NO: 10116 - RNA, 22 nt, Artificial Sequence
  Guide RNA
cugucaagcucuguuugucuaa

SEQ ID NO: 10117 - RNA, 22 nt, Artificial Sequence
  Guide RNA
cuuuacugucaagcucuguuug

SEQ ID NO: 10118 - RNA, 22 nt, Artificial Sequence
  Guide RNA
gacaaacagagcuugacaguaa

SEQ ID NO: 10119 - RNA, 22 nt, Artificial Sequence
  Guide RNA
gacuuuacugucaagcucuguu

SEQ ID NO: 10120 - RNA, 22 nt, Artificial Sequence
  Guide RNA
gagcuugacaguaaagucagaa

SEQ ID NO: 10121 - RNA, 22 nt, Artificial Sequence
  Guide RNA
gauguuagacaaacagagcuug

SEQ ID NO: 10122 - RNA, 22 nt, Artificial Sequence
  Guide RNA
gcacagugauguuagacaaaca

SEQ ID NO: 10123 - RNA, 22 nt, Artificial Sequence
  Guide RNA
gcucuguuugucuaacaucacu

SEQ ID NO: 10124 - RNA, 22 nt, Artificial Sequence
  Guide RNA
gucaagcucuguuugucuaaca

SEQ ID NO: 10125 - RNA, 22 nt, Artificial Sequence
  Guide RNA
gugauguuagacaaacagagcu

SEQ ID NO: 10126 - RNA, 22 nt, Artificial Sequence
  Guide RNA
guuagacaaacagagcuugaca

SEQ ID NO: 10127 - RNA, 22 nt, Artificial Sequence
  Guide RNA
uacugucaagcucuguuugucu

SEQ ID NO: 10128 - RNA, 22 nt, Artificial Sequence
  Guide RNA
uagacaaacagagcuugacagu

SEQ ID NO: 10129 - RNA, 22 nt, Artificial Sequence
  Guide RNA
ucaagcucuguuugucuaacau

SEQ ID NO: 10130 - RNA, 22 nt, Artificial Sequence
  Guide RNA
ucacauuucugacuuuacuguc

SEQ ID NO: 10131 - RNA, 22 nt, Artificial Sequence
  Guide RNA
ucugacuuuacugucaagcucu

SEQ ID NO: 10132 - RNA, 22 nt, Artificial Sequence
  Guide RNA
ugacuuuacugucaagcucugu

SEQ ID NO: 10133 - RNA, 22 nt, Artificial Sequence
  Guide RNA
ugauguuagacaaacagagcuu

SEQ ID NO: 10134 - RNA, 22 nt, Artificial Sequence
  Guide RNA
ugucaagcucuguuugucuaac

SEQ ID NO: 10135 - RNA, 22 nt, Artificial Sequence
  Guide RNA
uguuagacaaacagagcuugac

SEQ ID NO: 10136 - RNA, 22 nt, Artificial Sequence
  Guide RNA
uuacugucaagcucuguuuguc

SEQ ID NO: 10137 - RNA, 22 nt, Artificial Sequence
  Guide RNA
uuagacaaacagagcuugacag

SEQ ID NO: 10138 - RNA, 22 nt, Artificial Sequence
  Guide RNA
uucugacuuuacugucaagcuc

SEQ ID NO: 10139 - RNA, 22 nt, Artificial Sequence
  Guide RNA
uuuacugucaagcucuguuugu

SEQ ID NO: 10140 - RNA, 22 nt, Artificial Sequence
  Guide RNA
uuucugacuuuacugucaagcu

SEQ ID NO: 10141 - RNA, 20 nt, Artificial Sequence
  Guide RNA
aagcucuuucuguuagucua

SEQ ID NO: 10142 - RNA, 20 nt, Artificial Sequence
  Guide RNA
acagugauguuagacuaaca

SEQ ID NO: 10143 - RNA, 20 nt, Artificial Sequence
  Guide RNA
acuaacagaaagagcuugac

SEQ ID NO: 10144 - RNA, 20 nt, Artificial Sequence
  Guide RNA
acugucaagcucuuucuguu

SEQ ID NO: 10145 - RNA, 20 nt, Artificial Sequence
  Guide RNA
agacuaacagaaagagcuug

SEQ ID NO: 10146 - RNA, 20 nt, Artificial Sequence
  Guide RNA
agagcacagugauguuagac

SEQ ID NO: 10147 - RNA, 20 nt, Artificial Sequence
  Guide RNA
agcacagugauguuagacua

SEQ ID NO: 10148 - RNA, 20 nt, Artificial Sequence
  Guide RNA
agcucuuucuguuagucuaa

SEQ ID NO: 10149 - RNA, 20 nt, Artificial Sequence
  Guide RNA
agugauguuagacuaacaga

SEQ ID NO: 10150 - RNA, 20 nt, Artificial Sequence
  Guide RNA
auguuagacuaacagaaaga

SEQ ID NO: 10151 - RNA, 20 nt, Artificial Sequence
  Guide RNA
caagcucuuucuguuagucu

SEQ ID NO: 10152 - RNA, 20 nt, Artificial Sequence
  Guide RNA
cacagugauguuagacuaac

SEQ ID NO: 10153 - RNA, 20 nt, Artificial Sequence
  Guide RNA
cagagcacagugauguuaga

SEQ ID NO: 10154 - RNA, 20 nt, Artificial Sequence
  Guide RNA
cagugauguuagacuaacag

SEQ ID NO: 10155 - RNA, 20 nt, Artificial Sequence
  Guide RNA
cuaacagaaagagcuugaca

SEQ ID NO: 10156 - RNA, 20 nt, Artificial Sequence
  Guide RNA
cucuuucuguuagucuaaca

SEQ ID NO: 10157 - RNA, 20 nt, Artificial Sequence
  Guide RNA
cugucaagcucuuucuguua

SEQ ID NO: 10158 - RNA, 20 nt, Artificial Sequence
  Guide RNA
cuguuagucuaacaucacug

SEQ ID NO: 10159 - RNA, 20 nt, Artificial Sequence
  Guide RNA
cuuucuguuagucuaacauc

SEQ ID NO: 10160 - RNA, 20 nt, Artificial Sequence
  Guide RNA
gacuaacagaaagagcuuga

SEQ ID NO: 10161 - RNA, 20 nt, Artificial Sequence
  Guide RNA
gagcacagugauguuagacu

SEQ ID NO: 10162 - RNA, 20 nt, Artificial Sequence
  Guide RNA
gauguuagacuaacagaaag

SEQ ID NO: 10163 - RNA, 20 nt, Artificial Sequence
  Guide RNA
gcacagugauguuagacuaa

SEQ ID NO: 10164 - RNA, 20 nt, Artificial Sequence
  Guide RNA
gcucuuucuguuagucuaac

SEQ ID NO: 10165 - RNA, 20 nt, Artificial Sequence
  Guide RNA
gucaagcucuuucuguuagu

SEQ ID NO: 10166 - RNA, 20 nt, Artificial Sequence
  Guide RNA
gugauguuagacuaacagaa

SEQ ID NO: 10167 - RNA, 20 nt, Artificial Sequence
  Guide RNA
guuagacuaacagaaagagc

SEQ ID NO: 10168 - RNA, 20 nt, Artificial Sequence
  Guide RNA
guuagucuaacaucacugug

SEQ ID NO: 10169 - RNA, 20 nt, Artificial Sequence
  Guide RNA
uacugucaagcucuuucugu

SEQ ID NO: 10170 - RNA, 20 nt, Artificial Sequence
  Guide RNA
uagacuaacagaaagagcuu

SEQ ID NO: 10171 - RNA, 20 nt, Artificial Sequence
  Guide RNA
uagucuaacaucacugugcu

SEQ ID NO: 10172 - RNA, 20 nt, Artificial Sequence
  Guide RNA
ucaagcucuuucuguuaguc

SEQ ID NO: 10173 - RNA, 20 nt, Artificial Sequence
  Guide RNA
ucagagcacagugauguuag

SEQ ID NO: 10174 - RNA, 20 nt, Artificial Sequence
  Guide RNA
ucuguuagucuaacaucacu

SEQ ID NO: 10175 - RNA, 20 nt, Artificial Sequence
  Guide RNA
ucuuucuguuagucuaacau

SEQ ID NO: 10176 - RNA, 20 nt, Artificial Sequence
  Guide RNA
ugauguuagacuaacagaaa

SEQ ID NO: 10177 - RNA, 20 nt, Artificial Sequence
  Guide RNA
ugucaagcucuuucuguuag

SEQ ID NO: 10178 - RNA, 20 nt, Artificial Sequence
  Guide RNA
uguuagacuaacagaaagag

SEQ ID NO: 10179 - RNA, 20 nt, Artificial Sequence
  Guide RNA
uguuagucuaacaucacugu

SEQ ID NO: 10180 - RNA, 20 nt, Artificial Sequence
  Guide RNA
uuacugucaagcucuuucug

SEQ ID NO: 10181 - RNA, 20 nt, Artificial Sequence
  Guide RNA
uuagacuaacagaaagagcu

SEQ ID NO: 10182 - RNA, 20 nt, Artificial Sequence
  Guide RNA
uuagucuaacaucacugugc

SEQ ID NO: 10183 - RNA, 20 nt, Artificial Sequence
  Guide RNA
uucagagcacagugauguua

SEQ ID NO: 10184 - RNA, 20 nt, Artificial Sequence
  Guide RNA
uucuguuagucuaacaucac

SEQ ID NO: 10185 - RNA, 20 nt, Artificial Sequence
  Guide RNA
uuuacugucaagcucuuucu

SEQ ID NO: 10186 - RNA, 20 nt, Artificial Sequence
  Guide RNA
uuucuguuagucuaacauca

SEQ ID NO: 10187 - RNA, 21 nt, Artificial Sequence
  Guide RNA
aagcucuuucuguuagucuaa

SEQ ID NO: 10188 - RNA, 21 nt, Artificial Sequence
  Guide RNA
acagugauguuagacuaacag

SEQ ID NO: 10189 - RNA, 21 nt, Artificial Sequence
  Guide RNA
acuaacagaaagagcuugaca

SEQ ID NO: 10190 - RNA, 21 nt, Artificial Sequence
  Guide RNA
acugucaagcucuuucuguua

SEQ ID NO: 10191 - RNA, 21 nt, Artificial Sequence
  Guide RNA
agacuaacagaaagagcuuga

SEQ ID NO: 10192 - RNA, 21 nt, Artificial Sequence
  Guide RNA
agagcacagugauguuagacu

SEQ ID NO: 10193 - RNA, 21 nt, Artificial Sequence
  Guide RNA
agcacagugauguuagacuaa

SEQ ID NO: 10194 - RNA, 21 nt, Artificial Sequence
  Guide RNA
agcucuuucuguuagucuaac

SEQ ID NO: 10195 - RNA, 21 nt, Artificial Sequence
  Guide RNA
agugauguuagacuaacagaa

SEQ ID NO: 10196 - RNA, 21 nt, Artificial Sequence
  Guide RNA
auguuagacuaacagaaagag

SEQ ID NO: 10197 - RNA, 21 nt, Artificial Sequence
  Guide RNA
auucagagcacagugauguua

SEQ ID NO: 10198 - RNA, 21 nt, Artificial Sequence
  Guide RNA
caagcucuuucuguuagucua

SEQ ID NO: 10199 - RNA, 21 nt, Artificial Sequence
  Guide RNA
cacagugauguuagacuaaca

SEQ ID NO: 10200 - RNA, 21 nt, Artificial Sequence
  Guide RNA
cagagcacagugauguuagac

SEQ ID NO: 10201 - RNA, 21 nt, Artificial Sequence
  Guide RNA
cagugauguuagacuaacaga

SEQ ID NO: 10202 - RNA, 21 nt, Artificial Sequence
  Guide RNA
cuaacagaaagagcuugacag

SEQ ID NO: 10203 - RNA, 21 nt, Artificial Sequence
  Guide RNA
cucuuucuguuagucuaacau

SEQ ID NO: 10204 - RNA, 21 nt, Artificial Sequence
  Guide RNA
cugucaagcucuuucuguuag

SEQ ID NO: 10205 - RNA, 21 nt, Artificial Sequence
  Guide RNA
cuguuagucuaacaucacugu

SEQ ID NO: 10206 - RNA, 21 nt, Artificial Sequence
  Guide RNA
cuuuacugucaagcucuuucu

SEQ ID NO: 10207 - RNA, 21 nt, Artificial Sequence
  Guide RNA
cuuucuguuagucuaacauca

SEQ ID NO: 10208 - RNA, 21 nt, Artificial Sequence
  Guide RNA
gacuaacagaaagagcuugac

SEQ ID NO: 10209 - RNA, 21 nt, Artificial Sequence
  Guide RNA
gagcacagugauguuagacua

SEQ ID NO: 10210 - RNA, 21 nt, Artificial Sequence
  Guide RNA
gauguuagacuaacagaaaga

SEQ ID NO: 10211 - RNA, 21 nt, Artificial Sequence
  Guide RNA
gcacagugauguuagacuaac

SEQ ID NO: 10212 - RNA, 21 nt, Artificial Sequence
  Guide RNA
gcucuuucuguuagucuaaca

SEQ ID NO: 10213 - RNA, 21 nt, Artificial Sequence
  Guide RNA
gucaagcucuuucuguuaguc

SEQ ID NO: 10214 - RNA, 21 nt, Artificial Sequence
  Guide RNA
gugauguuagacuaacagaaa

SEQ ID NO: 10215 - RNA, 21 nt, Artificial Sequence
  Guide RNA
guuagacuaacagaaagagcu

SEQ ID NO: 10216 - RNA, 21 nt, Artificial Sequence
  Guide RNA
guuagucuaacaucacugugc

SEQ ID NO: 10217 - RNA, 21 nt, Artificial Sequence
  Guide RNA
uacugucaagcucuuucuguu

SEQ ID NO: 10218 - RNA, 21 nt, Artificial Sequence
  Guide RNA
uagacuaacagaaagagcuug

SEQ ID NO: 10219 - RNA, 21 nt, Artificial Sequence
  Guide RNA
uagucuaacaucacugugcuc

SEQ ID NO: 10220 - RNA, 21 nt, Artificial Sequence
  Guide RNA
ucaagcucuuucuguuagucu

SEQ ID NO: 10221 - RNA, 21 nt, Artificial Sequence
  Guide RNA
ucagagcacagugauguuaga

SEQ ID NO: 10222 - RNA, 21 nt, Artificial Sequence
  Guide RNA
ucuguuagucuaacaucacug

SEQ ID NO: 10223 - RNA, 21 nt, Artificial Sequence
  Guide RNA
ucuuucuguuagucuaacauc

SEQ ID NO: 10224 - RNA, 21 nt, Artificial Sequence
  Guide RNA
ugauguuagacuaacagaaag

SEQ ID NO: 10225 - RNA, 21 nt, Artificial Sequence
  Guide RNA
ugucaagcucuuucuguuagu

SEQ ID NO: 10226 - RNA, 21 nt, Artificial Sequence
  Guide RNA
uguuagacuaacagaaagagc

SEQ ID NO: 10227 - RNA, 21 nt, Artificial Sequence
  Guide RNA
uguuagucuaacaucacugug

SEQ ID NO: 10228 - RNA, 21 nt, Artificial Sequence
  Guide RNA
uuacugucaagcucuuucugu

SEQ ID NO: 10229 - RNA, 21 nt, Artificial Sequence
  Guide RNA
uuagacuaacagaaagagcuu

SEQ ID NO: 10230 - RNA, 21 nt, Artificial Sequence
  Guide RNA
uuagucuaacaucacugugcu

SEQ ID NO: 10231 - RNA, 21 nt, Artificial Sequence
  Guide RNA
uucagagcacagugauguuag

SEQ ID NO: 10232 - RNA, 21 nt, Artificial Sequence
  Guide RNA
uucuguuagucuaacaucacu

SEQ ID NO: 10233 - RNA, 21 nt, Artificial Sequence
  Guide RNA
uuuacugucaagcucuuucug

SEQ ID NO: 10234 - RNA, 21 nt, Artificial Sequence
  Guide RNA
uuucuguuagucuaacaucac

SEQ ID NO: 10235 - RNA, 22 nt, Artificial Sequence
  Guide RNA
aagcucuuucuguuagucuaac

SEQ ID NO: 10236 - RNA, 22 nt, Artificial Sequence
  Guide RNA
acagugauguuagacuaacaga

SEQ ID NO: 10237 - RNA, 22 nt, Artificial Sequence
  Guide RNA
acuaacagaaagagcuugacag

SEQ ID NO: 10238 - RNA, 22 nt, Artificial Sequence
  Guide RNA
acugucaagcucuuucuguuag

SEQ ID NO: 10239 - RNA, 22 nt, Artificial Sequence
  Guide RNA
acuuuacugucaagcucuuucu

SEQ ID NO: 10240 - RNA, 22 nt, Artificial Sequence
  Guide RNA
agacuaacagaaagagcuugac

SEQ ID NO: 10241 - RNA, 22 nt, Artificial Sequence
  Guide RNA
agagcacagugauguuagacua

SEQ ID NO: 10242 - RNA, 22 nt, Artificial Sequence
  Guide RNA
agcacagugauguuagacuaac

SEQ ID NO: 10243 - RNA, 22 nt, Artificial Sequence
  Guide RNA
agcucuuucuguuagucuaaca

SEQ ID NO: 10244 - RNA, 22 nt, Artificial Sequence
  Guide RNA
agugauguuagacuaacagaaa

SEQ ID NO: 10245 - RNA, 22 nt, Artificial Sequence
  Guide RNA
auguuagacuaacagaaagagc

SEQ ID NO: 10246 - RNA, 22 nt, Artificial Sequence
  Guide RNA
auucagagcacagugauguuag

SEQ ID NO: 10247 - RNA, 22 nt, Artificial Sequence
  Guide RNA
caagcucuuucuguuagucuaa

SEQ ID NO: 10248 - RNA, 22 nt, Artificial Sequence
  Guide RNA
cacagugauguuagacuaacag

SEQ ID NO: 10249 - RNA, 22 nt, Artificial Sequence
  Guide RNA
cagagcacagugauguuagacu

SEQ ID NO: 10250 - RNA, 22 nt, Artificial Sequence
  Guide RNA
cagugauguuagacuaacagaa

SEQ ID NO: 10251 - RNA, 22 nt, Artificial Sequence
  Guide RNA
cuaacagaaagagcuugacagu

SEQ ID NO: 10252 - RNA, 22 nt, Artificial Sequence
  Guide RNA
cucuuucuguuagucuaacauc

SEQ ID NO: 10253 - RNA, 22 nt, Artificial Sequence
  Guide RNA
cugucaagcucuuucuguuagu

SEQ ID NO: 10254 - RNA, 22 nt, Artificial Sequence
  Guide RNA
cuguuagucuaacaucacugug

SEQ ID NO: 10255 - RNA, 22 nt, Artificial Sequence
  Guide RNA
cuuuacugucaagcucuuucug

SEQ ID NO: 10256 - RNA, 22 nt, Artificial Sequence
  Guide RNA
cuuucuguuagucuaacaucac

SEQ ID NO: 10257 - RNA, 22 nt, Artificial Sequence
  Guide RNA
gacuaacagaaagagcuugaca

SEQ ID NO: 10258 - RNA, 22 nt, Artificial Sequence
  Guide RNA
gagcacagugauguuagacuaa

SEQ ID NO: 10259 - RNA, 22 nt, Artificial Sequence
  Guide RNA
gauguuagacuaacagaaagag

SEQ ID NO: 10260 - RNA, 22 nt, Artificial Sequence
  Guide RNA
gcacagugauguuagacuaaca

SEQ ID NO: 10261 - RNA, 22 nt, Artificial Sequence
  Guide RNA
gcucuuucuguuagucuaacau

SEQ ID NO: 10262 - RNA, 22 nt, Artificial Sequence
  Guide RNA
gucaagcucuuucuguuagucu

SEQ ID NO: 10263 - RNA, 22 nt, Artificial Sequence
  Guide RNA
gugauguuagacuaacagaaag

SEQ ID NO: 10264 - RNA, 22 nt, Artificial Sequence
  Guide RNA
guuagacuaacagaaagagcuu

SEQ ID NO: 10265 - RNA, 22 nt, Artificial Sequence
  Guide RNA
guuagucuaacaucacugugcu

SEQ ID NO: 10266 - RNA, 22 nt, Artificial Sequence
  Guide RNA
uacugucaagcucuuucuguua

SEQ ID NO: 10267 - RNA, 22 nt, Artificial Sequence
  Guide RNA
uagacuaacagaaagagcuuga

SEQ ID NO: 10268 - RNA, 22 nt, Artificial Sequence
  Guide RNA
uagucuaacaucacugugcucu

SEQ ID NO: 10269 - RNA, 22 nt, Artificial Sequence
  Guide RNA
uauucagagcacagugauguua

SEQ ID NO: 10270 - RNA, 22 nt, Artificial Sequence
  Guide RNA
ucaagcucuuucuguuagucua

SEQ ID NO: 10271 - RNA, 22 nt, Artificial Sequence
  Guide RNA
ucagagcacagugauguuagac

SEQ ID NO: 10272 - RNA, 22 nt, Artificial Sequence
  Guide RNA
ucuguuagucuaacaucacugu

SEQ ID NO: 10273 - RNA, 22 nt, Artificial Sequence
  Guide RNA
ucuuucuguuagucuaacauca

SEQ ID NO: 10274 - RNA, 22 nt, Artificial Sequence
  Guide RNA
ugauguuagacuaacagaaaga

SEQ ID NO: 10275 - RNA, 22 nt, Artificial Sequence
  Guide RNA
ugucaagcucuuucuguuaguc

SEQ ID NO: 10276 - RNA, 22 nt, Artificial Sequence
  Guide RNA
uguuagacuaacagaaagagcu

SEQ ID NO: 10277 - RNA, 22 nt, Artificial Sequence
  Guide RNA
uguuagucuaacaucacugugc

SEQ ID NO: 10278 - RNA, 22 nt, Artificial Sequence
  Guide RNA
uuacugucaagcucuuucuguu

SEQ ID NO: 10279 - RNA, 22 nt, Artificial Sequence
  Guide RNA
uuagacuaacagaaagagcuug

SEQ ID NO: 10280 - RNA, 22 nt, Artificial Sequence
  Guide RNA
uuagucuaacaucacugugcuc

SEQ ID NO: 10281 - RNA, 22 nt, Artificial Sequence
  Guide RNA
uucagagcacagugauguuaga

SEQ ID NO: 10282 - RNA, 22 nt, Artificial Sequence
  Guide RNA
uucuguuagucuaacaucacug

SEQ ID NO: 10283 - RNA, 22 nt, Artificial Sequence
  Guide RNA
uuuacugucaagcucuuucugu

SEQ ID NO: 10284 - RNA, 22 nt, Artificial Sequence
  Guide RNA
uuucuguuagucuaacaucacu

SEQ ID NO: 10285 - RNA, 20 nt, Artificial Sequence
  Guide RNA
aagcucuuucuguuugucuu

SEQ ID NO: 10286 - RNA, 20 nt, Artificial Sequence
  Guide RNA
aauauucagagcacagugau

SEQ ID NO: 10287 - RNA, 20 nt, Artificial Sequence
  Guide RNA
acagugauguaagacaaaca

SEQ ID NO: 10288 - RNA, 20 nt, Artificial Sequence
  Guide RNA
agagcacagugauguaagac

SEQ ID NO: 10289 - RNA, 20 nt, Artificial Sequence
  Guide RNA
agcacagugauguaagacaa

SEQ ID NO: 10290 - RNA, 20 nt, Artificial Sequence
  Guide RNA
agcucuuucuguuugucuua

SEQ ID NO: 10291 - RNA, 20 nt, Artificial Sequence
  Guide RNA
agugauguaagacaaacaga

SEQ ID NO: 10292 - RNA, 20 nt, Artificial Sequence
  Guide RNA
auauucagagcacagugaug

SEQ ID NO: 10293 - RNA, 20 nt, Artificial Sequence
  Guide RNA
auguaagacaaacagaaaga

SEQ ID NO: 10294 - RNA, 20 nt, Artificial Sequence
  Guide RNA
auucagagcacagugaugua

SEQ ID NO: 10295 - RNA, 20 nt, Artificial Sequence
  Guide RNA
caagcucuuucuguuugucu

SEQ ID NO: 10296 - RNA, 20 nt, Artificial Sequence
  Guide RNA
cacagugauguaagacaaac

SEQ ID NO: 10297 - RNA, 20 nt, Artificial Sequence
  Guide RNA
cagagcacagugauguaaga

SEQ ID NO: 10298 - RNA, 20 nt, Artificial Sequence
  Guide RNA
cagugauguaagacaaacag

SEQ ID NO: 10299 - RNA, 20 nt, Artificial Sequence
  Guide RNA
cucuuucuguuugucuuaca

SEQ ID NO: 10300 - RNA, 20 nt, Artificial Sequence
  Guide RNA
cuguuugucuuacaucacug

SEQ ID NO: 10301 - RNA, 20 nt, Artificial Sequence
  Guide RNA
cuuacaucacugugcucuga

SEQ ID NO: 10302 - RNA, 20 nt, Artificial Sequence
  Guide RNA
cuuucuguuugucuuacauc

SEQ ID NO: 10303 - RNA, 20 nt, Artificial Sequence
  Guide RNA
gaauauucagagcacaguga

SEQ ID NO: 10304 - RNA, 20 nt, Artificial Sequence
  Guide RNA
gagcacagugauguaagaca

SEQ ID NO: 10305 - RNA, 20 nt, Artificial Sequence
  Guide RNA
gauguaagacaaacagaaag

SEQ ID NO: 10306 - RNA, 20 nt, Artificial Sequence
  Guide RNA
gcacagugauguaagacaaa

SEQ ID NO: 10307 - RNA, 20 nt, Artificial Sequence
  Guide RNA
gcucuuucuguuugucuuac

SEQ ID NO: 10308 - RNA, 20 nt, Artificial Sequence
  Guide RNA
guaagacaaacagaaagagc

SEQ ID NO: 10309 - RNA, 20 nt, Artificial Sequence
  Guide RNA
gucaagcucuuucuguuugu

SEQ ID NO: 10310 - RNA, 20 nt, Artificial Sequence
  Guide RNA
gucuuacaucacugugcucu

SEQ ID NO: 10311 - RNA, 20 nt, Artificial Sequence
  Guide RNA
gugauguaagacaaacagaa

SEQ ID NO: 10312 - RNA, 20 nt, Artificial Sequence
  Guide RNA
guuugucuuacaucacugug

SEQ ID NO: 10313 - RNA, 20 nt, Artificial Sequence
  Guide RNA
uaagacaaacagaaagagcu

SEQ ID NO: 10314 - RNA, 20 nt, Artificial Sequence
  Guide RNA
uauucagagcacagugaugu

SEQ ID NO: 10315 - RNA, 20 nt, Artificial Sequence
  Guide RNA
ucaagcucuuucuguuuguc

SEQ ID NO: 10316 - RNA, 20 nt, Artificial Sequence
  Guide RNA
ucagagcacagugauguaag

SEQ ID NO: 10317 - RNA, 20 nt, Artificial Sequence
  Guide RNA
ucuguuugucuuacaucacu

SEQ ID NO: 10318 - RNA, 20 nt, Artificial Sequence
  Guide RNA
ucuuacaucacugugcucug

SEQ ID NO: 10319 - RNA, 20 nt, Artificial Sequence
  Guide RNA
ucuuucuguuugucuuacau

SEQ ID NO: 10320 - RNA, 20 nt, Artificial Sequence
  Guide RNA
ugauguaagacaaacagaaa

SEQ ID NO: 10321 - RNA, 20 nt, Artificial Sequence
  Guide RNA
uguaagacaaacagaaagag

SEQ ID NO: 10322 - RNA, 20 nt, Artificial Sequence
  Guide RNA
ugucaagcucuuucuguuug

SEQ ID NO: 10323 - RNA, 20 nt, Artificial Sequence
  Guide RNA
ugucuuacaucacugugcuc

SEQ ID NO: 10324 - RNA, 20 nt, Artificial Sequence
  Guide RNA
uguuugucuuacaucacugu

SEQ ID NO: 10325 - RNA, 20 nt, Artificial Sequence
  Guide RNA
uuacaucacugugcucugaa

SEQ ID NO: 10326 - RNA, 20 nt, Artificial Sequence
  Guide RNA
uucagagcacagugauguaa

SEQ ID NO: 10327 - RNA, 20 nt, Artificial Sequence
  Guide RNA
uucuguuugucuuacaucac

SEQ ID NO: 10328 - RNA, 20 nt, Artificial Sequence
  Guide RNA
uugucuuacaucacugugcu

SEQ ID NO: 10329 - RNA, 20 nt, Artificial Sequence
  Guide RNA
uuucuguuugucuuacauca

SEQ ID NO: 10330 - RNA, 20 nt, Artificial Sequence
  Guide RNA
uuugucuuacaucacugugc

SEQ ID NO: 10331 - RNA, 21 nt, Artificial Sequence
  Guide RNA
aagcucuuucuguuugucuua

SEQ ID NO: 10332 - RNA, 21 nt, Artificial Sequence
  Guide RNA
aauauucagagcacagugaug

SEQ ID NO: 10333 - RNA, 21 nt, Artificial Sequence
  Guide RNA
acagugauguaagacaaacag

SEQ ID NO: 10334 - RNA, 21 nt, Artificial Sequence
  Guide RNA
agagcacagugauguaagaca

SEQ ID NO: 10335 - RNA, 21 nt, Artificial Sequence
  Guide RNA
agcacagugauguaagacaaa

SEQ ID NO: 10336 - RNA, 21 nt, Artificial Sequence
  Guide RNA
agcucuuucuguuugucuuac

SEQ ID NO: 10337 - RNA, 21 nt, Artificial Sequence
  Guide RNA
agugauguaagacaaacagaa

SEQ ID NO: 10338 - RNA, 21 nt, Artificial Sequence
  Guide RNA
auauucagagcacagugaugu

SEQ ID NO: 10339 - RNA, 21 nt, Artificial Sequence
  Guide RNA
auguaagacaaacagaaagag

SEQ ID NO: 10340 - RNA, 21 nt, Artificial Sequence
  Guide RNA
auucagagcacagugauguaa

SEQ ID NO: 10341 - RNA, 21 nt, Artificial Sequence
  Guide RNA
caagcucuuucuguuugucuu

SEQ ID NO: 10342 - RNA, 21 nt, Artificial Sequence
  Guide RNA
cacagugauguaagacaaaca

SEQ ID NO: 10343 - RNA, 21 nt, Artificial Sequence
  Guide RNA
cagagcacagugauguaagac

SEQ ID NO: 10344 - RNA, 21 nt, Artificial Sequence
  Guide RNA
cagugauguaagacaaacaga

SEQ ID NO: 10345 - RNA, 21 nt, Artificial Sequence
  Guide RNA
cucuuucuguuugucuuacau

SEQ ID NO: 10346 - RNA, 21 nt, Artificial Sequence
  Guide RNA
cugucaagcucuuucuguuug

SEQ ID NO: 10347 - RNA, 21 nt, Artificial Sequence
  Guide RNA
cuguuugucuuacaucacugu

SEQ ID NO: 10348 - RNA, 21 nt, Artificial Sequence
  Guide RNA
cuuacaucacugugcucugaa

SEQ ID NO: 10349 - RNA, 21 nt, Artificial Sequence
  Guide RNA
cuuucuguuugucuuacauca

SEQ ID NO: 10350 - RNA, 21 nt, Artificial Sequence
  Guide RNA
gaauauucagagcacagugau

SEQ ID NO: 10351 - RNA, 21 nt, Artificial Sequence
  Guide RNA
gagcacagugauguaagacaa

SEQ ID NO: 10352 - RNA, 21 nt, Artificial Sequence
  Guide RNA
gauguaagacaaacagaaaga

SEQ ID NO: 10353 - RNA, 21 nt, Artificial Sequence
  Guide RNA
gcacagugauguaagacaaac

SEQ ID NO: 10354 - RNA, 21 nt, Artificial Sequence
  Guide RNA
gcucuuucuguuugucuuaca

SEQ ID NO: 10355 - RNA, 21 nt, Artificial Sequence
  Guide RNA
ggaauauucagagcacaguga

SEQ ID NO: 10356 - RNA, 21 nt, Artificial Sequence
  Guide RNA
guaagacaaacagaaagagcu

SEQ ID NO: 10357 - RNA, 21 nt, Artificial Sequence
  Guide RNA
gucaagcucuuucuguuuguc

SEQ ID NO: 10358 - RNA, 21 nt, Artificial Sequence
  Guide RNA
gucuuacaucacugugcucug

SEQ ID NO: 10359 - RNA, 21 nt, Artificial Sequence
  Guide RNA
gugauguaagacaaacagaaa

SEQ ID NO: 10360 - RNA, 21 nt, Artificial Sequence
  Guide RNA
guuugucuuacaucacugugc

SEQ ID NO: 10361 - RNA, 21 nt, Artificial Sequence
  Guide RNA
uaagacaaacagaaagagcuu

SEQ ID NO: 10362 - RNA, 21 nt, Artificial Sequence
  Guide RNA
uauucagagcacagugaugua

SEQ ID NO: 10363 - RNA, 21 nt, Artificial Sequence
  Guide RNA
ucaagcucuuucuguuugucu

SEQ ID NO: 10364 - RNA, 21 nt, Artificial Sequence
  Guide RNA
ucagagcacagugauguaaga

SEQ ID NO: 10365 - RNA, 21 nt, Artificial Sequence
  Guide RNA
ucuguuugucuuacaucacug

SEQ ID NO: 10366 - RNA, 21 nt, Artificial Sequence
  Guide RNA
ucuuacaucacugugcucuga

SEQ ID NO: 10367 - RNA, 21 nt, Artificial Sequence
  Guide RNA
ucuuucuguuugucuuacauc

SEQ ID NO: 10368 - RNA, 21 nt, Artificial Sequence
  Guide RNA
ugauguaagacaaacagaaag

SEQ ID NO: 10369 - RNA, 21 nt, Artificial Sequence
  Guide RNA
uguaagacaaacagaaagagc

SEQ ID NO: 10370 - RNA, 21 nt, Artificial Sequence
  Guide RNA
ugucaagcucuuucuguuugu

SEQ ID NO: 10371 - RNA, 21 nt, Artificial Sequence
  Guide RNA
ugucuuacaucacugugcucu

SEQ ID NO: 10372 - RNA, 21 nt, Artificial Sequence
  Guide RNA
uguuugucuuacaucacugug

SEQ ID NO: 10373 - RNA, 21 nt, Artificial Sequence
  Guide RNA
uuacaucacugugcucugaau

SEQ ID NO: 10374 - RNA, 21 nt, Artificial Sequence
  Guide RNA
uucagagcacagugauguaag

SEQ ID NO: 10375 - RNA, 21 nt, Artificial Sequence
  Guide RNA
uucuguuugucuuacaucacu

SEQ ID NO: 10376 - RNA, 21 nt, Artificial Sequence
  Guide RNA
uugucuuacaucacugugcuc

SEQ ID NO: 10377 - RNA, 21 nt, Artificial Sequence
  Guide RNA
uuucuguuugucuuacaucac

SEQ ID NO: 10378 - RNA, 21 nt, Artificial Sequence
  Guide RNA
uuugucuuacaucacugugcu

SEQ ID NO: 10379 - RNA, 22 nt, Artificial Sequence
  Guide RNA
aagcucuuucuguuugucuuac

SEQ ID NO: 10380 - RNA, 22 nt, Artificial Sequence
  Guide RNA
aauauucagagcacagugaugu

SEQ ID NO: 10381 - RNA, 22 nt, Artificial Sequence
  Guide RNA
acagugauguaagacaaacaga

SEQ ID NO: 10382 - RNA, 22 nt, Artificial Sequence
  Guide RNA
acugucaagcucuuucuguuug

SEQ ID NO: 10383 - RNA, 22 nt, Artificial Sequence
  Guide RNA
agagcacagugauguaagacaa

SEQ ID NO: 10384 - RNA, 22 nt, Artificial Sequence
  Guide RNA
agcacagugauguaagacaaac

SEQ ID NO: 10385 - RNA, 22 nt, Artificial Sequence
  Guide RNA
agcucuuucuguuugucuuaca

SEQ ID NO: 10386 - RNA, 22 nt, Artificial Sequence
  Guide RNA
agugauguaagacaaacagaaa

SEQ ID NO: 10387 - RNA, 22 nt, Artificial Sequence
  Guide RNA
auauucagagcacagugaugua

SEQ ID NO: 10388 - RNA, 22 nt, Artificial Sequence
  Guide RNA
auguaagacaaacagaaagagc

SEQ ID NO: 10389 - RNA, 22 nt, Artificial Sequence
  Guide RNA
auucagagcacagugauguaag

SEQ ID NO: 10390 - RNA, 22 nt, Artificial Sequence
  Guide RNA
caagcucuuucuguuugucuua

SEQ ID NO: 10391 - RNA, 22 nt, Artificial Sequence
  Guide RNA
cacagugauguaagacaaacag

SEQ ID NO: 10392 - RNA, 22 nt, Artificial Sequence
  Guide RNA
cagagcacagugauguaagaca

SEQ ID NO: 10393 - RNA, 22 nt, Artificial Sequence
  Guide RNA
cagugauguaagacaaacagaa

SEQ ID NO: 10394 - RNA, 22 nt, Artificial Sequence
  Guide RNA
cucuuucuguuugucuuacauc

SEQ ID NO: 10395 - RNA, 22 nt, Artificial Sequence
  Guide RNA
cugucaagcucuuucuguuugu

SEQ ID NO: 10396 - RNA, 22 nt, Artificial Sequence
  Guide RNA
cuguuugucuuacaucacugug

SEQ ID NO: 10397 - RNA, 22 nt, Artificial Sequence
  Guide RNA
cuuacaucacugugcucugaau

SEQ ID NO: 10398 - RNA, 22 nt, Artificial Sequence
  Guide RNA
cuuucuguuugucuuacaucac

SEQ ID NO: 10399 - RNA, 22 nt, Artificial Sequence
  Guide RNA
gaauauucagagcacagugaug

SEQ ID NO: 10400 - RNA, 22 nt, Artificial Sequence
  Guide RNA
gagcacagugauguaagacaaa

SEQ ID NO: 10401 - RNA, 22 nt, Artificial Sequence
  Guide RNA
gauguaagacaaacagaaagag

SEQ ID NO: 10402 - RNA, 22 nt, Artificial Sequence
  Guide RNA
gcacagugauguaagacaaaca

SEQ ID NO: 10403 - RNA, 22 nt, Artificial Sequence
  Guide RNA
gcucuuucuguuugucuuacau

SEQ ID NO: 10404 - RNA, 22 nt, Artificial Sequence
  Guide RNA
ggaauauucagagcacagugau

SEQ ID NO: 10405 - RNA, 22 nt, Artificial Sequence
  Guide RNA
gggaauauucagagcacaguga

SEQ ID NO: 10406 - RNA, 22 nt, Artificial Sequence
  Guide RNA
guaagacaaacagaaagagcuu

SEQ ID NO: 10407 - RNA, 22 nt, Artificial Sequence
  Guide RNA
gucaagcucuuucuguuugucu

SEQ ID NO: 10408 - RNA, 22 nt, Artificial Sequence
  Guide RNA
gucuuacaucacugugcucuga

SEQ ID NO: 10409 - RNA, 22 nt, Artificial Sequence
  Guide RNA
gugauguaagacaaacagaaag

SEQ ID NO: 10410 - RNA, 22 nt, Artificial Sequence
  Guide RNA
guuugucuuacaucacugugcu

SEQ ID NO: 10411 - RNA, 22 nt, Artificial Sequence
  Guide RNA
uaagacaaacagaaagagcuug

SEQ ID NO: 10412 - RNA, 22 nt, Artificial Sequence
  Guide RNA
uauucagagcacagugauguaa

SEQ ID NO: 10413 - RNA, 22 nt, Artificial Sequence
  Guide RNA
ucaagcucuuucuguuugucuu

SEQ ID NO: 10414 - RNA, 22 nt, Artificial Sequence
  Guide RNA
ucagagcacagugauguaagac

SEQ ID NO: 10415 - RNA, 22 nt, Artificial Sequence
  Guide RNA
ucuguuugucuuacaucacugu

SEQ ID NO: 10416 - RNA, 22 nt, Artificial Sequence
  Guide RNA
ucuuacaucacugugcucugaa

SEQ ID NO: 10417 - RNA, 22 nt, Artificial Sequence
  Guide RNA
ucuuucuguuugucuuacauca

SEQ ID NO: 10418 - RNA, 22 nt, Artificial Sequence
  Guide RNA
ugauguaagacaaacagaaaga

SEQ ID NO: 10419 - RNA, 22 nt, Artificial Sequence
  Guide RNA
uguaagacaaacagaaagagcu

SEQ ID NO: 10420 - RNA, 22 nt, Artificial Sequence
  Guide RNA
ugucaagcucuuucuguuuguc

SEQ ID NO: 10421 - RNA, 22 nt, Artificial Sequence
  Guide RNA
ugucuuacaucacugugcucug

SEQ ID NO: 10422 - RNA, 22 nt, Artificial Sequence
  Guide RNA
uguuugucuuacaucacugugc

SEQ ID NO: 10423 - RNA, 22 nt, Artificial Sequence
  Guide RNA
uuacaucacugugcucugaaua

SEQ ID NO: 10424 - RNA, 22 nt, Artificial Sequence
  Guide RNA
uucagagcacagugauguaaga

SEQ ID NO: 10425 - RNA, 22 nt, Artificial Sequence
  Guide RNA
uucuguuugucuuacaucacug

SEQ ID NO: 10426 - RNA, 22 nt, Artificial Sequence
  Guide RNA
uugucuuacaucacugugcucu

SEQ ID NO: 10427 - RNA, 22 nt, Artificial Sequence
  Guide RNA
uuucuguuugucuuacaucacu

SEQ ID NO: 10428 - RNA, 22 nt, Artificial Sequence
  Guide RNA
uuugucuuacaucacugugcuc

SEQ ID NO: 10429 - RNA, 20 nt, Artificial Sequence
  Guide RNA
aauauuccccaacugagccu

SEQ ID NO: 10430 - RNA, 20 nt, Artificial Sequence
  Guide RNA
acaggcucaguuggggaaua

SEQ ID NO: 10431 - RNA, 20 nt, Artificial Sequence
  Guide RNA
acugugcucugaauauuccc

SEQ ID NO: 10432 - RNA, 20 nt, Artificial Sequence
  Guide RNA
aggcucaguuggggaauauu

SEQ ID NO: 10433 - RNA, 20 nt, Artificial Sequence
  Guide RNA
aguuggggaauauucagagc

SEQ ID NO: 10434 - RNA, 20 nt, Artificial Sequence
  Guide RNA
auauuccccaacugagccug

SEQ ID NO: 10435 - RNA, 20 nt, Artificial Sequence
  Guide RNA
auuacaggcucaguugggga

SEQ ID NO: 10436 - RNA, 20 nt, Artificial Sequence
  Guide RNA
auuccccaacugagccugua

SEQ ID NO: 10437 - RNA, 20 nt, Artificial Sequence
  Guide RNA
caacugagccuguaauggga

SEQ ID NO: 10438 - RNA, 20 nt, Artificial Sequence
  Guide RNA
cacugugcucugaauauucc

SEQ ID NO: 10439 - RNA, 20 nt, Artificial Sequence
  Guide RNA
caggcucaguuggggaauau

SEQ ID NO: 10440 - RNA, 20 nt, Artificial Sequence
  Guide RNA
caguuggggaauauucagag

SEQ ID NO: 10441 - RNA, 20 nt, Artificial Sequence
  Guide RNA
cauuacaggcucaguugggg

SEQ ID NO: 10442 - RNA, 20 nt, Artificial Sequence
  Guide RNA
ccaacugagccuguaauggg

SEQ ID NO: 10443 - RNA, 20 nt, Artificial Sequence
  Guide RNA
ccauuacaggcucaguuggg

SEQ ID NO: 10444 - RNA, 20 nt, Artificial Sequence
  Guide RNA
cccaacugagccuguaaugg

SEQ ID NO: 10445 - RNA, 20 nt, Artificial Sequence
  Guide RNA
cccauuacaggcucaguugg

SEQ ID NO: 10446 - RNA, 20 nt, Artificial Sequence
  Guide RNA
ccccaacugagccuguaaug

SEQ ID NO: 10447 - RNA, 20 nt, Artificial Sequence
  Guide RNA
cccuucccauuacaggcuca

SEQ ID NO: 10448 - RNA, 20 nt, Artificial Sequence
  Guide RNA
ccuucccauuacaggcucag

SEQ ID NO: 10449 - RNA, 20 nt, Artificial Sequence
  Guide RNA
cucaguuggggaauauucag

SEQ ID NO: 10450 - RNA, 20 nt, Artificial Sequence
  Guide RNA
cucugaauauuccccaacug

SEQ ID NO: 10451 - RNA, 20 nt, Artificial Sequence
  Guide RNA
cugaauauuccccaacugag

SEQ ID NO: 10452 - RNA, 20 nt, Artificial Sequence
  Guide RNA
cugugcucugaauauucccc

SEQ ID NO: 10453 - RNA, 20 nt, Artificial Sequence
  Guide RNA
cuucccauuacaggcucagu

SEQ ID NO: 10454 - RNA, 20 nt, Artificial Sequence
  Guide RNA
gaauauuccccaacugagcc

SEQ ID NO: 10455 - RNA, 20 nt, Artificial Sequence
  Guide RNA
gcccuucccauuacaggcuc

SEQ ID NO: 10456 - RNA, 20 nt, Artificial Sequence
  Guide RNA
gcucaguuggggaauauuca

SEQ ID NO: 10457 - RNA, 20 nt, Artificial Sequence
  Guide RNA
gcucugaauauuccccaacu

SEQ ID NO: 10458 - RNA, 20 nt, Artificial Sequence
  Guide RNA
ggcucaguuggggaauauuc

SEQ ID NO: 10459 - RNA, 20 nt, Artificial Sequence
  Guide RNA
gugcucugaauauuccccaa

SEQ ID NO: 10460 - RNA, 20 nt, Artificial Sequence
  Guide RNA
guuggggaauauucagagca

SEQ ID NO: 10461 - RNA, 20 nt, Artificial Sequence
  Guide RNA
uacaggcucaguuggggaau

SEQ ID NO: 10462 - RNA, 20 nt, Artificial Sequence
  Guide RNA
uauuccccaacugagccugu

SEQ ID NO: 10463 - RNA, 20 nt, Artificial Sequence
  Guide RNA
ucacugugcucugaauauuc

SEQ ID NO: 10464 - RNA, 20 nt, Artificial Sequence
  Guide RNA
ucaguuggggaauauucaga

SEQ ID NO: 10465 - RNA, 20 nt, Artificial Sequence
  Guide RNA
ucccauuacaggcucaguug

SEQ ID NO: 10466 - RNA, 20 nt, Artificial Sequence
  Guide RNA
uccccaacugagccuguaau

SEQ ID NO: 10467 - RNA, 20 nt, Artificial Sequence
  Guide RNA
ucugaauauuccccaacuga

SEQ ID NO: 10468 - RNA, 20 nt, Artificial Sequence
  Guide RNA
ugaauauuccccaacugagc

SEQ ID NO: 10469 - RNA, 20 nt, Artificial Sequence
  Guide RNA
ugcucugaauauuccccaac

SEQ ID NO: 10470 - RNA, 20 nt, Artificial Sequence
  Guide RNA
ugugcucugaauauucccca

SEQ ID NO: 10471 - RNA, 20 nt, Artificial Sequence
  Guide RNA
uuacaggcucaguuggggaa

SEQ ID NO: 10472 - RNA, 20 nt, Artificial Sequence
  Guide RNA
uucccauuacaggcucaguu

SEQ ID NO: 10473 - RNA, 20 nt, Artificial Sequence
  Guide RNA
uuccccaacugagccuguaa

SEQ ID NO: 10474 - RNA, 20 nt, Artificial Sequence
  Guide RNA
uuggggaauauucagagcac

SEQ ID NO: 10475 - RNA, 21 nt, Artificial Sequence
  Guide RNA
aauauuccccaacugagccug

SEQ ID NO: 10476 - RNA, 21 nt, Artificial Sequence
  Guide RNA
acaggcucaguuggggaauau

SEQ ID NO: 10477 - RNA, 21 nt, Artificial Sequence
  Guide RNA
acugugcucugaauauucccc

SEQ ID NO: 10478 - RNA, 21 nt, Artificial Sequence
  Guide RNA
aggcucaguuggggaauauuc

SEQ ID NO: 10479 - RNA, 21 nt, Artificial Sequence
  Guide RNA
aguuggggaauauucagagca

SEQ ID NO: 10480 - RNA, 21 nt, Artificial Sequence
  Guide RNA
auauuccccaacugagccugu

SEQ ID NO: 10481 - RNA, 21 nt, Artificial Sequence
  Guide RNA
aucacugugcucugaauauuc

SEQ ID NO: 10482 - RNA, 21 nt, Artificial Sequence
  Guide RNA
auuacaggcucaguuggggaa

SEQ ID NO: 10483 - RNA, 21 nt, Artificial Sequence
  Guide RNA
auuccccaacugagccuguaa

SEQ ID NO: 10484 - RNA, 21 nt, Artificial Sequence
  Guide RNA
caacugagccuguaaugggaa

SEQ ID NO: 10485 - RNA, 21 nt, Artificial Sequence
  Guide RNA
cacugugcucugaauauuccc

SEQ ID NO: 10486 - RNA, 21 nt, Artificial Sequence
  Guide RNA
caggcucaguuggggaauauu

SEQ ID NO: 10487 - RNA, 21 nt, Artificial Sequence
  Guide RNA
caguuggggaauauucagagc

SEQ ID NO: 10488 - RNA, 21 nt, Artificial Sequence
  Guide RNA
cauuacaggcucaguugggga

SEQ ID NO: 10489 - RNA, 21 nt, Artificial Sequence
  Guide RNA
ccaacugagccuguaauggga

SEQ ID NO: 10490 - RNA, 21 nt, Artificial Sequence
  Guide RNA
ccauuacaggcucaguugggg

SEQ ID NO: 10491 - RNA, 21 nt, Artificial Sequence
  Guide RNA
cccaacugagccuguaauggg

SEQ ID NO: 10492 - RNA, 21 nt, Artificial Sequence
  Guide RNA
cccauuacaggcucaguuggg

SEQ ID NO: 10493 - RNA, 21 nt, Artificial Sequence
  Guide RNA
ccccaacugagccuguaaugg

SEQ ID NO: 10494 - RNA, 21 nt, Artificial Sequence
  Guide RNA
cccuucccauuacaggcucag

SEQ ID NO: 10495 - RNA, 21 nt, Artificial Sequence
  Guide RNA
ccuucccauuacaggcucagu

SEQ ID NO: 10496 - RNA, 21 nt, Artificial Sequence
  Guide RNA
cucaguuggggaauauucaga

SEQ ID NO: 10497 - RNA, 21 nt, Artificial Sequence
  Guide RNA
cucugaauauuccccaacuga

SEQ ID NO: 10498 - RNA, 21 nt, Artificial Sequence
  Guide RNA
cugaauauuccccaacugagc

SEQ ID NO: 10499 - RNA, 21 nt, Artificial Sequence
  Guide RNA
cugugcucugaauauucccca

SEQ ID NO: 10500 - RNA, 21 nt, Artificial Sequence
  Guide RNA
cuucccauuacaggcucaguu

SEQ ID NO: 10501 - RNA, 21 nt, Artificial Sequence
  Guide RNA
gaauauuccccaacugagccu

SEQ ID NO: 10502 - RNA, 21 nt, Artificial Sequence
  Guide RNA
gcccuucccauuacaggcuca

SEQ ID NO: 10503 - RNA, 21 nt, Artificial Sequence
  Guide RNA
gcucaguuggggaauauucag

SEQ ID NO: 10504 - RNA, 21 nt, Artificial Sequence
  Guide RNA
gcucugaauauuccccaacug

SEQ ID NO: 10505 - RNA, 21 nt, Artificial Sequence
  Guide RNA
ggcucaguuggggaauauuca

SEQ ID NO: 10506 - RNA, 21 nt, Artificial Sequence
  Guide RNA
gugcucugaauauuccccaac

SEQ ID NO: 10507 - RNA, 21 nt, Artificial Sequence
  Guide RNA
guuggggaauauucagagcac

SEQ ID NO: 10508 - RNA, 21 nt, Artificial Sequence
  Guide RNA
uacaggcucaguuggggaaua

SEQ ID NO: 10509 - RNA, 21 nt, Artificial Sequence
  Guide RNA
uauuccccaacugagccugua

SEQ ID NO: 10510 - RNA, 21 nt, Artificial Sequence
  Guide RNA
ucacugugcucugaauauucc

SEQ ID NO: 10511 - RNA, 21 nt, Artificial Sequence
  Guide RNA
ucaguuggggaauauucagag

SEQ ID NO: 10512 - RNA, 21 nt, Artificial Sequence
  Guide RNA
ucccauuacaggcucaguugg

SEQ ID NO: 10513 - RNA, 21 nt, Artificial Sequence
  Guide RNA
uccccaacugagccuguaaug

SEQ ID NO: 10514 - RNA, 21 nt, Artificial Sequence
  Guide RNA
ucugaauauuccccaacugag

SEQ ID NO: 10515 - RNA, 21 nt, Artificial Sequence
  Guide RNA
ugaauauuccccaacugagcc

SEQ ID NO: 10516 - RNA, 21 nt, Artificial Sequence
  Guide RNA
ugcccuucccauuacaggcuc

SEQ ID NO: 10517 - RNA, 21 nt, Artificial Sequence
  Guide RNA
ugcucugaauauuccccaacu

SEQ ID NO: 10518 - RNA, 21 nt, Artificial Sequence
  Guide RNA
ugugcucugaauauuccccaa

SEQ ID NO: 10519 - RNA, 21 nt, Artificial Sequence
  Guide RNA
uuacaggcucaguuggggaau

SEQ ID NO: 10520 - RNA, 21 nt, Artificial Sequence
  Guide RNA
uucccauuacaggcucaguug

SEQ ID NO: 10521 - RNA, 21 nt, Artificial Sequence
  Guide RNA
uuccccaacugagccuguaau

SEQ ID NO: 10522 - RNA, 21 nt, Artificial Sequence
  Guide RNA
uuggggaauauucagagcaca

SEQ ID NO: 10523 - RNA, 22 nt, Artificial Sequence
  Guide RNA
aauauuccccaacugagccugu

SEQ ID NO: 10524 - RNA, 22 nt, Artificial Sequence
  Guide RNA
acaggcucaguuggggaauauu

SEQ ID NO: 10525 - RNA, 22 nt, Artificial Sequence
  Guide RNA
acugugcucugaauauucccca

SEQ ID NO: 10526 - RNA, 22 nt, Artificial Sequence
  Guide RNA
aggcucaguuggggaauauuca

SEQ ID NO: 10527 - RNA, 22 nt, Artificial Sequence
  Guide RNA
aguuggggaauauucagagcac

SEQ ID NO: 10528 - RNA, 22 nt, Artificial Sequence
  Guide RNA
auauuccccaacugagccugua

SEQ ID NO: 10529 - RNA, 22 nt, Artificial Sequence
  Guide RNA
aucacugugcucugaauauucc

SEQ ID NO: 10530 - RNA, 22 nt, Artificial Sequence
  Guide RNA
augcccuucccauuacaggcuc

SEQ ID NO: 10531 - RNA, 22 nt, Artificial Sequence
  Guide RNA
auuacaggcucaguuggggaau

SEQ ID NO: 10532 - RNA, 22 nt, Artificial Sequence
  Guide RNA
auuccccaacugagccuguaau

SEQ ID NO: 10533 - RNA, 22 nt, Artificial Sequence
  Guide RNA
caacugagccuguaaugggaag

SEQ ID NO: 10534 - RNA, 22 nt, Artificial Sequence
  Guide RNA
cacugugcucugaauauucccc

SEQ ID NO: 10535 - RNA, 22 nt, Artificial Sequence
  Guide RNA
caggcucaguuggggaauauuc

SEQ ID NO: 10536 - RNA, 22 nt, Artificial Sequence
  Guide RNA
caguuggggaauauucagagca

SEQ ID NO: 10537 - RNA, 22 nt, Artificial Sequence
  Guide RNA
caucacugugcucugaauauuc

SEQ ID NO: 10538 - RNA, 22 nt, Artificial Sequence
  Guide RNA
cauuacaggcucaguuggggaa

SEQ ID NO: 10539 - RNA, 22 nt, Artificial Sequence
  Guide RNA
ccaacugagccuguaaugggaa

SEQ ID NO: 10540 - RNA, 22 nt, Artificial Sequence
  Guide RNA
ccauuacaggcucaguugggga

SEQ ID NO: 10541 - RNA, 22 nt, Artificial Sequence
  Guide RNA
cccaacugagccuguaauggga

SEQ ID NO: 10542 - RNA, 22 nt, Artificial Sequence
  Guide RNA
cccauuacaggcucaguugggg

SEQ ID NO: 10543 - RNA, 22 nt, Artificial Sequence
  Guide RNA
ccccaacugagccuguaauggg

SEQ ID NO: 10544 - RNA, 22 nt, Artificial Sequence
  Guide RNA
cccuucccauuacaggcucagu

SEQ ID NO: 10545 - RNA, 22 nt, Artificial Sequence
  Guide RNA
ccuucccauuacaggcucaguu

SEQ ID NO: 10546 - RNA, 22 nt, Artificial Sequence
  Guide RNA
cucaguuggggaauauucagag

SEQ ID NO: 10547 - RNA, 22 nt, Artificial Sequence
  Guide RNA
cucugaauauuccccaacugag

SEQ ID NO: 10548 - RNA, 22 nt, Artificial Sequence
  Guide RNA
cugaauauuccccaacugagcc

SEQ ID NO: 10549 - RNA, 22 nt, Artificial Sequence
  Guide RNA
cugugcucugaauauuccccaa

SEQ ID NO: 10550 - RNA, 22 nt, Artificial Sequence
  Guide RNA
cuucccauuacaggcucaguug

SEQ ID NO: 10551 - RNA, 22 nt, Artificial Sequence
  Guide RNA
gaauauuccccaacugagccug

SEQ ID NO: 10552 - RNA, 22 nt, Artificial Sequence
  Guide RNA
gcccuucccauuacaggcucag

SEQ ID NO: 10553 - RNA, 22 nt, Artificial Sequence
  Guide RNA
gcucaguuggggaauauucaga

SEQ ID NO: 10554 - RNA, 22 nt, Artificial Sequence
  Guide RNA
gcucugaauauuccccaacuga

SEQ ID NO: 10555 - RNA, 22 nt, Artificial Sequence
  Guide RNA
ggcucaguuggggaauauucag

SEQ ID NO: 10556 - RNA, 22 nt, Artificial Sequence
  Guide RNA
gugcucugaauauuccccaacu

SEQ ID NO: 10557 - RNA, 22 nt, Artificial Sequence
  Guide RNA
guuggggaauauucagagcaca

SEQ ID NO: 10558 - RNA, 22 nt, Artificial Sequence
  Guide RNA
uacaggcucaguuggggaauau

SEQ ID NO: 10559 - RNA, 22 nt, Artificial Sequence
  Guide RNA
uauuccccaacugagccuguaa

SEQ ID NO: 10560 - RNA, 22 nt, Artificial Sequence
  Guide RNA
ucacugugcucugaauauuccc

SEQ ID NO: 10561 - RNA, 22 nt, Artificial Sequence
  Guide RNA
ucaguuggggaauauucagagc

SEQ ID NO: 10562 - RNA, 22 nt, Artificial Sequence
  Guide RNA
ucccauuacaggcucaguuggg

SEQ ID NO: 10563 - RNA, 22 nt, Artificial Sequence
  Guide RNA
uccccaacugagccuguaaugg

SEQ ID NO: 10564 - RNA, 22 nt, Artificial Sequence
  Guide RNA
ucugaauauuccccaacugagc

SEQ ID NO: 10565 - RNA, 22 nt, Artificial Sequence
  Guide RNA
ugaauauuccccaacugagccu

SEQ ID NO: 10566 - RNA, 22 nt, Artificial Sequence
  Guide RNA
ugcccuucccauuacaggcuca

SEQ ID NO: 10567 - RNA, 22 nt, Artificial Sequence
  Guide RNA
ugcucugaauauuccccaacug

SEQ ID NO: 10568 - RNA, 22 nt, Artificial Sequence
  Guide RNA
ugugcucugaauauuccccaac

SEQ ID NO: 10569 - RNA, 22 nt, Artificial Sequence
  Guide RNA
uuacaggcucaguuggggaaua

SEQ ID NO: 10570 - RNA, 22 nt, Artificial Sequence
  Guide RNA
uucccauuacaggcucaguugg

SEQ ID NO: 10571 - RNA, 22 nt, Artificial Sequence
  Guide RNA
uuccccaacugagccuguaaug

SEQ ID NO: 10572 - RNA, 22 nt, Artificial Sequence
  Guide RNA
uuggggaauauucagagcacag

SEQ ID NO: 10573 - RNA, 20 nt, Artificial Sequence
  Guide RNA
aaucuaggauaauuuucugg

SEQ ID NO: 10574 - RNA, 20 nt, Artificial Sequence
  Guide RNA
aauuuucuggaagacccaau

SEQ ID NO: 10575 - RNA, 20 nt, Artificial Sequence
  Guide RNA
acaucuggauugggucuucc

SEQ ID NO: 10576 - RNA, 20 nt, Artificial Sequence
  Guide RNA
agacaucuggauugggucuu

SEQ ID NO: 10577 - RNA, 20 nt, Artificial Sequence
  Guide RNA
aggauaauuuucuggaagac

SEQ ID NO: 10578 - RNA, 20 nt, Artificial Sequence
  Guide RNA
auaauuuucuggaagaccca

SEQ ID NO: 10579 - RNA, 20 nt, Artificial Sequence
  Guide RNA
aucuaggauaauuuucugga

SEQ ID NO: 10580 - RNA, 20 nt, Artificial Sequence
  Guide RNA
aucuggauugggucuuccag

SEQ ID NO: 10581 - RNA, 20 nt, Artificial Sequence
  Guide RNA
auugggucuuccagaaaauu

SEQ ID NO: 10582 - RNA, 20 nt, Artificial Sequence
  Guide RNA
auuuucuggaagacccaauc

SEQ ID NO: 10583 - RNA, 20 nt, Artificial Sequence
  Guide RNA
cacucaaaucuaggauaauu

SEQ ID NO: 10584 - RNA, 20 nt, Artificial Sequence
  Guide RNA
caucuggauugggucuucca

SEQ ID NO: 10585 - RNA, 20 nt, Artificial Sequence
  Guide RNA
ccagaaaauuauccuagauu

SEQ ID NO: 10586 - RNA, 20 nt, Artificial Sequence
  Guide RNA
cuaggauaauuuucuggaag

SEQ ID NO: 10587 - RNA, 20 nt, Artificial Sequence
  Guide RNA
cuggaagacccaauccagau

SEQ ID NO: 10588 - RNA, 20 nt, Artificial Sequence
  Guide RNA
cuggauugggucuuccagaa

SEQ ID NO: 10589 - RNA, 20 nt, Artificial Sequence
  Guide RNA
cuuccagaaaauuauccuag

SEQ ID NO: 10590 - RNA, 20 nt, Artificial Sequence
  Guide RNA
gacaucuggauugggucuuc

SEQ ID NO: 10591 - RNA, 20 nt, Artificial Sequence
  Guide RNA
gauaauuuucuggaagaccc

SEQ ID NO: 10592 - RNA, 20 nt, Artificial Sequence
  Guide RNA
gauugggucuuccagaaaau

SEQ ID NO: 10593 - RNA, 20 nt, Artificial Sequence
  Guide RNA
ggauaauuuucuggaagacc

SEQ ID NO: 10594 - RNA, 20 nt, Artificial Sequence
  Guide RNA
ggauugggucuuccagaaaa

SEQ ID NO: 10595 - RNA, 20 nt, Artificial Sequence
  Guide RNA
gggucuuccagaaaauuauc

SEQ ID NO: 10596 - RNA, 20 nt, Artificial Sequence
  Guide RNA
ggucuuccagaaaauuaucc

SEQ ID NO: 10597 - RNA, 20 nt, Artificial Sequence
  Guide RNA
gucuuccagaaaauuauccu

SEQ ID NO: 10598 - RNA, 20 nt, Artificial Sequence
  Guide RNA
uaauuuucuggaagacccaa

SEQ ID NO: 10599 - RNA, 20 nt, Artificial Sequence
  Guide RNA
uagacaucuggauugggucu

SEQ ID NO: 10600 - RNA, 20 nt, Artificial Sequence
  Guide RNA
uaggauaauuuucuggaaga

SEQ ID NO: 10601 - RNA, 20 nt, Artificial Sequence
  Guide RNA
uccagaaaauuauccuagau

SEQ ID NO: 10602 - RNA, 20 nt, Artificial Sequence
  Guide RNA
ucuaggauaauuuucuggaa

SEQ ID NO: 10603 - RNA, 20 nt, Artificial Sequence
  Guide RNA
ucuggaagacccaauccaga

SEQ ID NO: 10604 - RNA, 20 nt, Artificial Sequence
  Guide RNA
ucuggauugggucuuccaga

SEQ ID NO: 10605 - RNA, 20 nt, Artificial Sequence
  Guide RNA
ucuuccagaaaauuauccua

SEQ ID NO: 10606 - RNA, 20 nt, Artificial Sequence
  Guide RNA
uggauugggucuuccagaaa

SEQ ID NO: 10607 - RNA, 20 nt, Artificial Sequence
  Guide RNA
ugggucuuccagaaaauuau

SEQ ID NO: 10608 - RNA, 20 nt, Artificial Sequence
  Guide RNA
uuccagaaaauuauccuaga

SEQ ID NO: 10609 - RNA, 20 nt, Artificial Sequence
  Guide RNA
uucuggaagacccaauccag

SEQ ID NO: 10610 - RNA, 20 nt, Artificial Sequence
  Guide RNA
uugggucuuccagaaaauua

SEQ ID NO: 10611 - RNA, 20 nt, Artificial Sequence
  Guide RNA
uuucuggaagacccaaucca

SEQ ID NO: 10612 - RNA, 20 nt, Artificial Sequence
  Guide RNA
uuuucuggaagacccaaucc

SEQ ID NO: 10613 - RNA, 21 nt, Artificial Sequence
  Guide RNA
aauuuucuggaagacccaauc

SEQ ID NO: 10614 - RNA, 21 nt, Artificial Sequence
  Guide RNA
acaucuggauugggucuucca

SEQ ID NO: 10615 - RNA, 21 nt, Artificial Sequence
  Guide RNA
agacaucuggauugggucuuc

SEQ ID NO: 10616 - RNA, 21 nt, Artificial Sequence
  Guide RNA
aggauaauuuucuggaagacc

SEQ ID NO: 10617 - RNA, 21 nt, Artificial Sequence
  Guide RNA
auaauuuucuggaagacccaa

SEQ ID NO: 10618 - RNA, 21 nt, Artificial Sequence
  Guide RNA
auagacaucuggauugggucu

SEQ ID NO: 10619 - RNA, 21 nt, Artificial Sequence
  Guide RNA
aucuggauugggucuuccaga

SEQ ID NO: 10620 - RNA, 21 nt, Artificial Sequence
  Guide RNA
auugggucuuccagaaaauua

SEQ ID NO: 10621 - RNA, 21 nt, Artificial Sequence
  Guide RNA
auuuucuggaagacccaaucc

SEQ ID NO: 10622 - RNA, 21 nt, Artificial Sequence
  Guide RNA
caucuggauugggucuuccag

SEQ ID NO: 10623 - RNA, 21 nt, Artificial Sequence
  Guide RNA
ccacucaaaucuaggauaauu

SEQ ID NO: 10624 - RNA, 21 nt, Artificial Sequence
  Guide RNA
cuaggauaauuuucuggaaga

SEQ ID NO: 10625 - RNA, 21 nt, Artificial Sequence
  Guide RNA
cuggaagacccaauccagaug

SEQ ID NO: 10626 - RNA, 21 nt, Artificial Sequence
  Guide RNA
cuggauugggucuuccagaaa

SEQ ID NO: 10627 - RNA, 21 nt, Artificial Sequence
  Guide RNA
cuuccagaaaauuauccuaga

SEQ ID NO: 10628 - RNA, 21 nt, Artificial Sequence
  Guide RNA
gacaucuggauugggucuucc

SEQ ID NO: 10629 - RNA, 21 nt, Artificial Sequence
  Guide RNA
gauaauuuucuggaagaccca

SEQ ID NO: 10630 - RNA, 21 nt, Artificial Sequence
  Guide RNA
gauugggucuuccagaaaauu

SEQ ID NO: 10631 - RNA, 21 nt, Artificial Sequence
  Guide RNA
ggauaauuuucuggaagaccc

SEQ ID NO: 10632 - RNA, 21 nt, Artificial Sequence
  Guide RNA
ggauugggucuuccagaaaau

SEQ ID NO: 10633 - RNA, 21 nt, Artificial Sequence
  Guide RNA
gggucuuccagaaaauuaucc

SEQ ID NO: 10634 - RNA, 21 nt, Artificial Sequence
  Guide RNA
ggucuuccagaaaauuauccu

SEQ ID NO: 10635 - RNA, 21 nt, Artificial Sequence
  Guide RNA
gucuuccagaaaauuauccua

SEQ ID NO: 10636 - RNA, 21 nt, Artificial Sequence
  Guide RNA
uaauuuucuggaagacccaau

SEQ ID NO: 10637 - RNA, 21 nt, Artificial Sequence
  Guide RNA
uagacaucuggauugggucuu

SEQ ID NO: 10638 - RNA, 21 nt, Artificial Sequence
  Guide RNA
uaggauaauuuucuggaagac

SEQ ID NO: 10639 - RNA, 21 nt, Artificial Sequence
  Guide RNA
ucuaggauaauuuucuggaag

SEQ ID NO: 10640 - RNA, 21 nt, Artificial Sequence
  Guide RNA
ucuggaagacccaauccagau

SEQ ID NO: 10641 - RNA, 21 nt, Artificial Sequence
  Guide RNA
ucuggauugggucuuccagaa

SEQ ID NO: 10642 - RNA, 21 nt, Artificial Sequence
  Guide RNA
ucuuccagaaaauuauccuag

SEQ ID NO: 10643 - RNA, 21 nt, Artificial Sequence
  Guide RNA
uggauugggucuuccagaaaa

SEQ ID NO: 10644 - RNA, 21 nt, Artificial Sequence
  Guide RNA
ugggucuuccagaaaauuauc

SEQ ID NO: 10645 - RNA, 21 nt, Artificial Sequence
  Guide RNA
uucuggaagacccaauccaga

SEQ ID NO: 10646 - RNA, 21 nt, Artificial Sequence
  Guide RNA
uugggucuuccagaaaauuau

SEQ ID NO: 10647 - RNA, 21 nt, Artificial Sequence
  Guide RNA
uuucuggaagacccaauccag

SEQ ID NO: 10648 - RNA, 21 nt, Artificial Sequence
  Guide RNA
uuuucuggaagacccaaucca

SEQ ID NO: 10649 - RNA, 22 nt, Artificial Sequence
  Guide RNA
aauuuucuggaagacccaaucc

SEQ ID NO: 10650 - RNA, 22 nt, Artificial Sequence
  Guide RNA
acaucuggauugggucuuccag

SEQ ID NO: 10651 - RNA, 22 nt, Artificial Sequence
  Guide RNA
accacucaaaucuaggauaauu

SEQ ID NO: 10652 - RNA, 22 nt, Artificial Sequence
  Guide RNA
agacaucuggauugggucuucc

SEQ ID NO: 10653 - RNA, 22 nt, Artificial Sequence
  Guide RNA
aggauaauuuucuggaagaccc

SEQ ID NO: 10654 - RNA, 22 nt, Artificial Sequence
  Guide RNA
auaauuuucuggaagacccaau

SEQ ID NO: 10655 - RNA, 22 nt, Artificial Sequence
  Guide RNA
auagacaucuggauugggucuu

SEQ ID NO: 10656 - RNA, 22 nt, Artificial Sequence
  Guide RNA
aucuaggauaauuuucuggaag

SEQ ID NO: 10657 - RNA, 22 nt, Artificial Sequence
  Guide RNA
aucuggauugggucuuccagaa

SEQ ID NO: 10658 - RNA, 22 nt, Artificial Sequence
  Guide RNA
auugggucuuccagaaaauuau

SEQ ID NO: 10659 - RNA, 22 nt, Artificial Sequence
  Guide RNA
auuuucuggaagacccaaucca

SEQ ID NO: 10660 - RNA, 22 nt, Artificial Sequence
  Guide RNA
caaaucuaggauaauuuucugg

SEQ ID NO: 10661 - RNA, 22 nt, Artificial Sequence
  Guide RNA
cauagacaucuggauugggucu

SEQ ID NO: 10662 - RNA, 22 nt, Artificial Sequence
  Guide RNA
caucuggauugggucuuccaga

SEQ ID NO: 10663 - RNA, 22 nt, Artificial Sequence
  Guide RNA
ccacucaaaucuaggauaauuu

SEQ ID NO: 10664 - RNA, 22 nt, Artificial Sequence
  Guide RNA
ccagaaaauuauccuagauuug

SEQ ID NO: 10665 - RNA, 22 nt, Artificial Sequence
  Guide RNA
cuaggauaauuuucuggaagac

SEQ ID NO: 10666 - RNA, 22 nt, Artificial Sequence
  Guide RNA
cuggaagacccaauccagaugu

SEQ ID NO: 10667 - RNA, 22 nt, Artificial Sequence
  Guide RNA
cuggauugggucuuccagaaaa

SEQ ID NO: 10668 - RNA, 22 nt, Artificial Sequence
  Guide RNA
cuuccagaaaauuauccuagau

SEQ ID NO: 10669 - RNA, 22 nt, Artificial Sequence
  Guide RNA
gacaucuggauugggucuucca

SEQ ID NO: 10670 - RNA, 22 nt, Artificial Sequence
  Guide RNA
gauaauuuucuggaagacccaa

SEQ ID NO: 10671 - RNA, 22 nt, Artificial Sequence
  Guide RNA
gauugggucuuccagaaaauua

SEQ ID NO: 10672 - RNA, 22 nt, Artificial Sequence
  Guide RNA
ggauaauuuucuggaagaccca

SEQ ID NO: 10673 - RNA, 22 nt, Artificial Sequence
  Guide RNA
ggauugggucuuccagaaaauu

SEQ ID NO: 10674 - RNA, 22 nt, Artificial Sequence
  Guide RNA
gggucuuccagaaaauuauccu

SEQ ID NO: 10675 - RNA, 22 nt, Artificial Sequence
  Guide RNA
ggucuuccagaaaauuauccua

SEQ ID NO: 10676 - RNA, 22 nt, Artificial Sequence
  Guide RNA
gucuuccagaaaauuauccuag

SEQ ID NO: 10677 - RNA, 22 nt, Artificial Sequence
  Guide RNA
uaauuuucuggaagacccaauc

SEQ ID NO: 10678 - RNA, 22 nt, Artificial Sequence
  Guide RNA
uagacaucuggauugggucuuc

SEQ ID NO: 10679 - RNA, 22 nt, Artificial Sequence
  Guide RNA
uaggauaauuuucuggaagacc

SEQ ID NO: 10680 - RNA, 22 nt, Artificial Sequence
  Guide RNA
ucuaggauaauuuucuggaaga

SEQ ID NO: 10681 - RNA, 22 nt, Artificial Sequence
  Guide RNA
ucuggaagacccaauccagaug

SEQ ID NO: 10682 - RNA, 22 nt, Artificial Sequence
  Guide RNA
ucuggauugggucuuccagaaa

SEQ ID NO: 10683 - RNA, 22 nt, Artificial Sequence
  Guide RNA
ucuuccagaaaauuauccuaga

SEQ ID NO: 10684 - RNA, 22 nt, Artificial Sequence
  Guide RNA
uggauugggucuuccagaaaau

SEQ ID NO: 10685 - RNA, 22 nt, Artificial Sequence
  Guide RNA
ugggucuuccagaaaauuaucc

SEQ ID NO: 10686 - RNA, 22 nt, Artificial Sequence
  Guide RNA
uucuggaagacccaauccagau

SEQ ID NO: 10687 - RNA, 22 nt, Artificial Sequence
  Guide RNA
uugggucuuccagaaaauuauc

SEQ ID NO: 10688 - RNA, 22 nt, Artificial Sequence
  Guide RNA
uuucuggaagacccaauccaga

SEQ ID NO: 10689 - RNA, 22 nt, Artificial Sequence
  Guide RNA
uuuucuggaagacccaauccag

SEQ ID NO: 10690 - RNA, 20 nt, Artificial Sequence
  Guide RNA
aaccacucaaauguaggaua

SEQ ID NO: 10691 - RNA, 20 nt, Artificial Sequence
  Guide RNA
aauguaggauaauuuucagg

SEQ ID NO: 10692 - RNA, 20 nt, Artificial Sequence
  Guide RNA
aauuauccuacauuugagug

SEQ ID NO: 10693 - RNA, 20 nt, Artificial Sequence
  Guide RNA
acauuugagugguuagaaca

SEQ ID NO: 10694 - RNA, 20 nt, Artificial Sequence
  Guide RNA
accacucaaauguaggauaa

SEQ ID NO: 10695 - RNA, 20 nt, Artificial Sequence
  Guide RNA
auccuacauuugagugguua

SEQ ID NO: 10696 - RNA, 20 nt, Artificial Sequence
  Guide RNA
auguaggauaauuuucagga

SEQ ID NO: 10697 - RNA, 20 nt, Artificial Sequence
  Guide RNA
auuauccuacauuugagugg

SEQ ID NO: 10698 - RNA, 20 nt, Artificial Sequence
  Guide RNA
auuuuuguucuaaccacuca

SEQ ID NO: 10699 - RNA, 20 nt, Artificial Sequence
  Guide RNA
cacucaaauguaggauaauu

SEQ ID NO: 10700 - RNA, 20 nt, Artificial Sequence
  Guide RNA
ccacucaaauguaggauaau

SEQ ID NO: 10701 - RNA, 20 nt, Artificial Sequence
  Guide RNA
ccuacauuugagugguuaga

SEQ ID NO: 10702 - RNA, 20 nt, Artificial Sequence
  Guide RNA
ccugaaaauuauccuacauu

SEQ ID NO: 10703 - RNA, 20 nt, Artificial Sequence
  Guide RNA
cuaaccacucaaauguagga

SEQ ID NO: 10704 - RNA, 20 nt, Artificial Sequence
  Guide RNA
cuacauuugagugguuagaa

SEQ ID NO: 10705 - RNA, 20 nt, Artificial Sequence
  Guide RNA
cuuccugaaaauuauccuac

SEQ ID NO: 10706 - RNA, 20 nt, Artificial Sequence
  Guide RNA
gggucuuccugaaaauuauc

SEQ ID NO: 10707 - RNA, 20 nt, Artificial Sequence
  Guide RNA
ggucuuccugaaaauuaucc

SEQ ID NO: 10708 - RNA, 20 nt, Artificial Sequence
  Guide RNA
gucuuccugaaaauuauccu

SEQ ID NO: 10709 - RNA, 20 nt, Artificial Sequence
  Guide RNA
guucuaaccacucaaaugua

SEQ ID NO: 10710 - RNA, 20 nt, Artificial Sequence
  Guide RNA
uaaccacucaaauguaggau

SEQ ID NO: 10711 - RNA, 20 nt, Artificial Sequence
  Guide RNA
uacauuugagugguuagaac

SEQ ID NO: 10712 - RNA, 20 nt, Artificial Sequence
  Guide RNA
uauccuacauuugagugguu

SEQ ID NO: 10713 - RNA, 20 nt, Artificial Sequence
  Guide RNA
uccuacauuugagugguuag

SEQ ID NO: 10714 - RNA, 20 nt, Artificial Sequence
  Guide RNA
uccugaaaauuauccuacau

SEQ ID NO: 10715 - RNA, 20 nt, Artificial Sequence
  Guide RNA
ucuaaccacucaaauguagg

SEQ ID NO: 10716 - RNA, 20 nt, Artificial Sequence
  Guide RNA
ucuuccugaaaauuauccua

SEQ ID NO: 10717 - RNA, 20 nt, Artificial Sequence
  Guide RNA
uguaggauaauuuucaggaa

SEQ ID NO: 10718 - RNA, 20 nt, Artificial Sequence
  Guide RNA
uguucuaaccacucaaaugu

SEQ ID NO: 10719 - RNA, 20 nt, Artificial Sequence
  Guide RNA
uuauccuacauuugaguggu

SEQ ID NO: 10720 - RNA, 20 nt, Artificial Sequence
  Guide RNA
uuccugaaaauuauccuaca

SEQ ID NO: 10721 - RNA, 20 nt, Artificial Sequence
  Guide RNA
uucuaaccacucaaauguag

SEQ ID NO: 10722 - RNA, 20 nt, Artificial Sequence
  Guide RNA
uuguucuaaccacucaaaug

SEQ ID NO: 10723 - RNA, 20 nt, Artificial Sequence
  Guide RNA
uuuguucuaaccacucaaau

SEQ ID NO: 10724 - RNA, 20 nt, Artificial Sequence
  Guide RNA
uuuuguucuaaccacucaaa

SEQ ID NO: 10725 - RNA, 20 nt, Artificial Sequence
  Guide RNA
uuuuuguucuaaccacucaa

SEQ ID NO: 10726 - RNA, 21 nt, Artificial Sequence
  Guide RNA
aaccacucaaauguaggauaa

SEQ ID NO: 10727 - RNA, 21 nt, Artificial Sequence
  Guide RNA
aauuauccuacauuugagugg

SEQ ID NO: 10728 - RNA, 21 nt, Artificial Sequence
  Guide RNA
acauuugagugguuagaacaa

SEQ ID NO: 10729 - RNA, 21 nt, Artificial Sequence
  Guide RNA
accacucaaauguaggauaau

SEQ ID NO: 10730 - RNA, 21 nt, Artificial Sequence
  Guide RNA
auccuacauuugagugguuag

SEQ ID NO: 10731 - RNA, 21 nt, Artificial Sequence
  Guide RNA
auuauccuacauuugaguggu

SEQ ID NO: 10732 - RNA, 21 nt, Artificial Sequence
  Guide RNA
ccacucaaauguaggauaauu

SEQ ID NO: 10733 - RNA, 21 nt, Artificial Sequence
  Guide RNA
ccuacauuugagugguuagaa

SEQ ID NO: 10734 - RNA, 21 nt, Artificial Sequence
  Guide RNA
cuaaccacucaaauguaggau

SEQ ID NO: 10735 - RNA, 21 nt, Artificial Sequence
  Guide RNA
cuacauuugagugguuagaac

SEQ ID NO: 10736 - RNA, 21 nt, Artificial Sequence
  Guide RNA
cuuccugaaaauuauccuaca

SEQ ID NO: 10737 - RNA, 21 nt, Artificial Sequence
  Guide RNA
gggucuuccugaaaauuaucc

SEQ ID NO: 10738 - RNA, 21 nt, Artificial Sequence
  Guide RNA
ggucuuccugaaaauuauccu

SEQ ID NO: 10739 - RNA, 21 nt, Artificial Sequence
  Guide RNA
gucuuccugaaaauuauccua

SEQ ID NO: 10740 - RNA, 21 nt, Artificial Sequence
  Guide RNA
guucuaaccacucaaauguag

SEQ ID NO: 10741 - RNA, 21 nt, Artificial Sequence
  Guide RNA
uaaccacucaaauguaggaua

SEQ ID NO: 10742 - RNA, 21 nt, Artificial Sequence
  Guide RNA
uacauuugagugguuagaaca

SEQ ID NO: 10743 - RNA, 21 nt, Artificial Sequence
  Guide RNA
uauccuacauuugagugguua

SEQ ID NO: 10744 - RNA, 21 nt, Artificial Sequence
  Guide RNA
uccuacauuugagugguuaga

SEQ ID NO: 10745 - RNA, 21 nt, Artificial Sequence
  Guide RNA
ucuaaccacucaaauguagga

SEQ ID NO: 10746 - RNA, 21 nt, Artificial Sequence
  Guide RNA
ucuuccugaaaauuauccuac

SEQ ID NO: 10747 - RNA, 21 nt, Artificial Sequence
  Guide RNA
ugggucuuccugaaaauuauc

SEQ ID NO: 10748 - RNA, 21 nt, Artificial Sequence
  Guide RNA
uguaggauaauuuucaggaag

SEQ ID NO: 10749 - RNA, 21 nt, Artificial Sequence
  Guide RNA
uguucuaaccacucaaaugua

SEQ ID NO: 10750 - RNA, 21 nt, Artificial Sequence
  Guide RNA
uuauccuacauuugagugguu

SEQ ID NO: 10751 - RNA, 21 nt, Artificial Sequence
  Guide RNA
uucuaaccacucaaauguagg

SEQ ID NO: 10752 - RNA, 21 nt, Artificial Sequence
  Guide RNA
uuguucuaaccacucaaaugu

SEQ ID NO: 10753 - RNA, 21 nt, Artificial Sequence
  Guide RNA
uuuguucuaaccacucaaaug

SEQ ID NO: 10754 - RNA, 22 nt, Artificial Sequence
  Guide RNA
aaauuauccuacauuugagugg

SEQ ID NO: 10755 - RNA, 22 nt, Artificial Sequence
  Guide RNA
aaccacucaaauguaggauaau

SEQ ID NO: 10756 - RNA, 22 nt, Artificial Sequence
  Guide RNA
aauuauccuacauuugaguggu

SEQ ID NO: 10757 - RNA, 22 nt, Artificial Sequence
  Guide RNA
acauuugagugguuagaacaaa

SEQ ID NO: 10758 - RNA, 22 nt, Artificial Sequence
  Guide RNA
accacucaaauguaggauaauu

SEQ ID NO: 10759 - RNA, 22 nt, Artificial Sequence
  Guide RNA
auccuacauuugagugguuaga

SEQ ID NO: 10760 - RNA, 22 nt, Artificial Sequence
  Guide RNA
auguaggauaauuuucaggaag

SEQ ID NO: 10761 - RNA, 22 nt, Artificial Sequence
  Guide RNA
auuauccuacauuugagugguu

SEQ ID NO: 10762 - RNA, 22 nt, Artificial Sequence
  Guide RNA
caaauguaggauaauuuucagg

SEQ ID NO: 10763 - RNA, 22 nt, Artificial Sequence
  Guide RNA
ccacucaaauguaggauaauuu

SEQ ID NO: 10764 - RNA, 22 nt, Artificial Sequence
  Guide RNA
ccuacauuugagugguuagaac

SEQ ID NO: 10765 - RNA, 22 nt, Artificial Sequence
  Guide RNA
ccugaaaauuauccuacauuug

SEQ ID NO: 10766 - RNA, 22 nt, Artificial Sequence
  Guide RNA
cuaaccacucaaauguaggaua

SEQ ID NO: 10767 - RNA, 22 nt, Artificial Sequence
  Guide RNA
cuacauuugagugguuagaaca

SEQ ID NO: 10768 - RNA, 22 nt, Artificial Sequence
  Guide RNA
cuuccugaaaauuauccuacau

SEQ ID NO: 10769 - RNA, 22 nt, Artificial Sequence
  Guide RNA
gggucuuccugaaaauuauccu

SEQ ID NO: 10770 - RNA, 22 nt, Artificial Sequence
  Guide RNA
ggucuuccugaaaauuauccua

SEQ ID NO: 10771 - RNA, 22 nt, Artificial Sequence
  Guide RNA
gucuuccugaaaauuauccuac

SEQ ID NO: 10772 - RNA, 22 nt, Artificial Sequence
  Guide RNA
guucuaaccacucaaauguagg

SEQ ID NO: 10773 - RNA, 22 nt, Artificial Sequence
  Guide RNA
uaaccacucaaauguaggauaa

SEQ ID NO: 10774 - RNA, 22 nt, Artificial Sequence
  Guide RNA
uacauuugagugguuagaacaa

SEQ ID NO: 10775 - RNA, 22 nt, Artificial Sequence
  Guide RNA
uauccuacauuugagugguuag

SEQ ID NO: 10776 - RNA, 22 nt, Artificial Sequence
  Guide RNA
uccuacauuugagugguuagaa

SEQ ID NO: 10777 - RNA, 22 nt, Artificial Sequence
  Guide RNA
ucuaaccacucaaauguaggau

SEQ ID NO: 10778 - RNA, 22 nt, Artificial Sequence
  Guide RNA
ucuuccugaaaauuauccuaca

SEQ ID NO: 10779 - RNA, 22 nt, Artificial Sequence
  Guide RNA
ugggucuuccugaaaauuaucc

SEQ ID NO: 10780 - RNA, 22 nt, Artificial Sequence
  Guide RNA
uguaggauaauuuucaggaaga

SEQ ID NO: 10781 - RNA, 22 nt, Artificial Sequence
  Guide RNA
uguucuaaccacucaaauguag

SEQ ID NO: 10782 - RNA, 22 nt, Artificial Sequence
  Guide RNA
uuauccuacauuugagugguua

SEQ ID NO: 10783 - RNA, 22 nt, Artificial Sequence
  Guide RNA
uucuaaccacucaaauguagga

SEQ ID NO: 10784 - RNA, 22 nt, Artificial Sequence
  Guide RNA
uugggucuuccugaaaauuauc

SEQ ID NO: 10785 - RNA, 22 nt, Artificial Sequence
  Guide RNA
uuguucuaaccacucaaaugua

SEQ ID NO: 10786 - RNA, 22 nt, Artificial Sequence
  Guide RNA
uuuguucuaaccacucaaaugu

SEQ ID NO: 10787 - RNA, 22 nt, Artificial Sequence
  Guide RNA
uuuuguucuaaccacucaaaug

SEQ ID NO: 10788 - RNA, 20 nt, Artificial Sequence
  Guide RNA
aaaagcgacuauauugauca

SEQ ID NO: 10789 - RNA, 20 nt, Artificial Sequence
  Guide RNA
aaagcgacuauauugaucau

SEQ ID NO: 10790 - RNA, 20 nt, Artificial Sequence
  Guide RNA
aagcgacuauauugaucauu

SEQ ID NO: 10791 - RNA, 20 nt, Artificial Sequence
  Guide RNA
acagcugaaugaucaauaua

SEQ ID NO: 10792 - RNA, 20 nt, Artificial Sequence
  Guide RNA
accuccugucacagcugaau

SEQ ID NO: 10793 - RNA, 20 nt, Artificial Sequence
  Guide RNA
acuauauugaucauucagcu

SEQ ID NO: 10794 - RNA, 20 nt, Artificial Sequence
  Guide RNA
agaaaagcgacuauauugau

SEQ ID NO: 10795 - RNA, 20 nt, Artificial Sequence
  Guide RNA
agcgacuauauugaucauuc

SEQ ID NO: 10796 - RNA, 20 nt, Artificial Sequence
  Guide RNA
agcugaaugaucaauauagu

SEQ ID NO: 10797 - RNA, 20 nt, Artificial Sequence
  Guide RNA
auauugaucauucagcugug

SEQ ID NO: 10798 - RNA, 20 nt, Artificial Sequence
  Guide RNA
aucauucagcugugacagga

SEQ ID NO: 10799 - RNA, 20 nt, Artificial Sequence
  Guide RNA
augaccuccugucacagcug

SEQ ID NO: 10800 - RNA, 20 nt, Artificial Sequence
  Guide RNA
auucagcugugacaggaggu

SEQ ID NO: 10801 - RNA, 20 nt, Artificial Sequence
  Guide RNA
auugaucauucagcugugac

SEQ ID NO: 10802 - RNA, 20 nt, Artificial Sequence
  Guide RNA
cacagcugaaugaucaauau

SEQ ID NO: 10803 - RNA, 20 nt, Artificial Sequence
  Guide RNA
cagcugaaugaucaauauag

SEQ ID NO: 10804 - RNA, 20 nt, Artificial Sequence
  Guide RNA
caugaccuccugucacagcu

SEQ ID NO: 10805 - RNA, 20 nt, Artificial Sequence
  Guide RNA
cauucagcugugacaggagg

SEQ ID NO: 10806 - RNA, 20 nt, Artificial Sequence
  Guide RNA
ccuccugucacagcugaaug

SEQ ID NO: 10807 - RNA, 20 nt, Artificial Sequence
  Guide RNA
ccugucacagcugaaugauc

SEQ ID NO: 10808 - RNA, 20 nt, Artificial Sequence
  Guide RNA
cgacuauauugaucauucag

SEQ ID NO: 10809 - RNA, 20 nt, Artificial Sequence
  Guide RNA
cuauauugaucauucagcug

SEQ ID NO: 10810 - RNA, 20 nt, Artificial Sequence
  Guide RNA
cuccugucacagcugaauga

SEQ ID NO: 10811 - RNA, 20 nt, Artificial Sequence
  Guide RNA
cugaaugaucaauauagucg

SEQ ID NO: 10812 - RNA, 20 nt, Artificial Sequence
  Guide RNA
cugucacagcugaaugauca

SEQ ID NO: 10813 - RNA, 20 nt, Artificial Sequence
  Guide RNA
gaaaagcgacuauauugauc

SEQ ID NO: 10814 - RNA, 20 nt, Artificial Sequence
  Guide RNA
gaaugaucaauauagucgcu

SEQ ID NO: 10815 - RNA, 20 nt, Artificial Sequence
  Guide RNA
gaccuccugucacagcugaa

SEQ ID NO: 10816 - RNA, 20 nt, Artificial Sequence
  Guide RNA
gacuauauugaucauucagc

SEQ ID NO: 10817 - RNA, 20 nt, Artificial Sequence
  Guide RNA
gaucauucagcugugacagg

SEQ ID NO: 10818 - RNA, 20 nt, Artificial Sequence
  Guide RNA
gcgacuauauugaucauuca

SEQ ID NO: 10819 - RNA, 20 nt, Artificial Sequence
  Guide RNA
gcugaaugaucaauauaguc

SEQ ID NO: 10820 - RNA, 20 nt, Artificial Sequence
  Guide RNA
gucacagcugaaugaucaau

SEQ ID NO: 10821 - RNA, 20 nt, Artificial Sequence
  Guide RNA
uauauugaucauucagcugu

SEQ ID NO: 10822 - RNA, 20 nt, Artificial Sequence
  Guide RNA
uauugaucauucagcuguga

SEQ ID NO: 10823 - RNA, 20 nt, Artificial Sequence
  Guide RNA
ucacagcugaaugaucaaua

SEQ ID NO: 10824 - RNA, 20 nt, Artificial Sequence
  Guide RNA
ucaugaccuccugucacagc

SEQ ID NO: 10825 - RNA, 20 nt, Artificial Sequence
  Guide RNA
ucauucagcugugacaggag

SEQ ID NO: 10826 - RNA, 20 nt, Artificial Sequence
  Guide RNA
uccugucacagcugaaugau

SEQ ID NO: 10827 - RNA, 20 nt, Artificial Sequence
  Guide RNA
ugaaugaucaauauagucgc

SEQ ID NO: 10828 - RNA, 20 nt, Artificial Sequence
  Guide RNA
ugaccuccugucacagcuga

SEQ ID NO: 10829 - RNA, 20 nt, Artificial Sequence
  Guide RNA
ugaucauucagcugugacag

SEQ ID NO: 10830 - RNA, 20 nt, Artificial Sequence
  Guide RNA
ugucacagcugaaugaucaa

SEQ ID NO: 10831 - RNA, 20 nt, Artificial Sequence
  Guide RNA
uucagcugugacaggagguc

SEQ ID NO: 10832 - RNA, 20 nt, Artificial Sequence
  Guide RNA
uucaugaccuccugucacag

SEQ ID NO: 10833 - RNA, 20 nt, Artificial Sequence
  Guide RNA
uugaucauucagcugugaca

SEQ ID NO: 10834 - RNA, 21 nt, Artificial Sequence
  Guide RNA
aagcgacuauauugaucauuc

SEQ ID NO: 10835 - RNA, 21 nt, Artificial Sequence
  Guide RNA
acagcugaaugaucaauauag

SEQ ID NO: 10836 - RNA, 21 nt, Artificial Sequence
  Guide RNA
accuccugucacagcugaaug

SEQ ID NO: 10837 - RNA, 21 nt, Artificial Sequence
  Guide RNA
acuauauugaucauucagcug

SEQ ID NO: 10838 - RNA, 21 nt, Artificial Sequence
  Guide RNA
agaaaagcgacuauauugauc

SEQ ID NO: 10839 - RNA, 21 nt, Artificial Sequence
  Guide RNA
agcgacuauauugaucauuca

SEQ ID NO: 10840 - RNA, 21 nt, Artificial Sequence
  Guide RNA
agcugaaugaucaauauaguc

SEQ ID NO: 10841 - RNA, 21 nt, Artificial Sequence
  Guide RNA
auauugaucauucagcuguga

SEQ ID NO: 10842 - RNA, 21 nt, Artificial Sequence
  Guide RNA
aucauucagcugugacaggag

SEQ ID NO: 10843 - RNA, 21 nt, Artificial Sequence
  Guide RNA
augaccuccugucacagcuga

SEQ ID NO: 10844 - RNA, 21 nt, Artificial Sequence
  Guide RNA
auucagcugugacaggagguc

SEQ ID NO: 10845 - RNA, 21 nt, Artificial Sequence
  Guide RNA
auugaucauucagcugugaca

SEQ ID NO: 10846 - RNA, 21 nt, Artificial Sequence
  Guide RNA
cacagcugaaugaucaauaua

SEQ ID NO: 10847 - RNA, 21 nt, Artificial Sequence
  Guide RNA
cagcugaaugaucaauauagu

SEQ ID NO: 10848 - RNA, 21 nt, Artificial Sequence
  Guide RNA
caugaccuccugucacagcug

SEQ ID NO: 10849 - RNA, 21 nt, Artificial Sequence
  Guide RNA
cauucagcugugacaggaggu

SEQ ID NO: 10850 - RNA, 21 nt, Artificial Sequence
  Guide RNA
ccuccugucacagcugaauga

SEQ ID NO: 10851 - RNA, 21 nt, Artificial Sequence
  Guide RNA
ccugucacagcugaaugauca

SEQ ID NO: 10852 - RNA, 21 nt, Artificial Sequence
  Guide RNA
cgacuauauugaucauucagc

SEQ ID NO: 10853 - RNA, 21 nt, Artificial Sequence
  Guide RNA
cuauauugaucauucagcugu

SEQ ID NO: 10854 - RNA, 21 nt, Artificial Sequence
  Guide RNA
cuccugucacagcugaaugau

SEQ ID NO: 10855 - RNA, 21 nt, Artificial Sequence
  Guide RNA
cugaaugaucaauauagucgc

SEQ ID NO: 10856 - RNA, 21 nt, Artificial Sequence
  Guide RNA
cugucacagcugaaugaucaa

SEQ ID NO: 10857 - RNA, 21 nt, Artificial Sequence
  Guide RNA
gaaaagcgacuauauugauca

SEQ ID NO: 10858 - RNA, 21 nt, Artificial Sequence
  Guide RNA
gaaugaucaauauagucgcuu

SEQ ID NO: 10859 - RNA, 21 nt, Artificial Sequence
  Guide RNA
gaccuccugucacagcugaau

SEQ ID NO: 10860 - RNA, 21 nt, Artificial Sequence
  Guide RNA
gacuauauugaucauucagcu

SEQ ID NO: 10861 - RNA, 21 nt, Artificial Sequence
  Guide RNA
gaucauucagcugugacagga

SEQ ID NO: 10862 - RNA, 21 nt, Artificial Sequence
  Guide RNA
gcgacuauauugaucauucag

SEQ ID NO: 10863 - RNA, 21 nt, Artificial Sequence
  Guide RNA
gcugaaugaucaauauagucg

SEQ ID NO: 10864 - RNA, 21 nt, Artificial Sequence
  Guide RNA
gucacagcugaaugaucaaua

SEQ ID NO: 10865 - RNA, 21 nt, Artificial Sequence
  Guide RNA
uauauugaucauucagcugug

SEQ ID NO: 10866 - RNA, 21 nt, Artificial Sequence
  Guide RNA
uauugaucauucagcugugac

SEQ ID NO: 10867 - RNA, 21 nt, Artificial Sequence
  Guide RNA
ucacagcugaaugaucaauau

SEQ ID NO: 10868 - RNA, 21 nt, Artificial Sequence
  Guide RNA
ucaugaccuccugucacagcu

SEQ ID NO: 10869 - RNA, 21 nt, Artificial Sequence
  Guide RNA
ucauucagcugugacaggagg

SEQ ID NO: 10870 - RNA, 21 nt, Artificial Sequence
  Guide RNA
uccugucacagcugaaugauc

SEQ ID NO: 10871 - RNA, 21 nt, Artificial Sequence
  Guide RNA
ugaaugaucaauauagucgcu

SEQ ID NO: 10872 - RNA, 21 nt, Artificial Sequence
  Guide RNA
ugaccuccugucacagcugaa

SEQ ID NO: 10873 - RNA, 21 nt, Artificial Sequence
  Guide RNA
ugaucauucagcugugacagg

SEQ ID NO: 10874 - RNA, 21 nt, Artificial Sequence
  Guide RNA
ugucacagcugaaugaucaau

SEQ ID NO: 10875 - RNA, 21 nt, Artificial Sequence
  Guide RNA
uucagcugugacaggagguca

SEQ ID NO: 10876 - RNA, 21 nt, Artificial Sequence
  Guide RNA
uucaugaccuccugucacagc

SEQ ID NO: 10877 - RNA, 21 nt, Artificial Sequence
  Guide RNA
uugaucauucagcugugacag

SEQ ID NO: 10878 - RNA, 21 nt, Artificial Sequence
  Guide RNA
uuucaugaccuccugucacag

SEQ ID NO: 10879 - RNA, 22 nt, Artificial Sequence
  Guide RNA
aaagcgacuauauugaucauuc

SEQ ID NO: 10880 - RNA, 22 nt, Artificial Sequence
  Guide RNA
aagaaaagcgacuauauugauc

SEQ ID NO: 10881 - RNA, 22 nt, Artificial Sequence
  Guide RNA
aagcgacuauauugaucauuca

SEQ ID NO: 10882 - RNA, 22 nt, Artificial Sequence
  Guide RNA
acagcugaaugaucaauauagu

SEQ ID NO: 10883 - RNA, 22 nt, Artificial Sequence
  Guide RNA
accuccugucacagcugaauga

SEQ ID NO: 10884 - RNA, 22 nt, Artificial Sequence
  Guide RNA
acuauauugaucauucagcugu

SEQ ID NO: 10885 - RNA, 22 nt, Artificial Sequence
  Guide RNA
agaaaagcgacuauauugauca

SEQ ID NO: 10886 - RNA, 22 nt, Artificial Sequence
  Guide RNA
agcgacuauauugaucauucag

SEQ ID NO: 10887 - RNA, 22 nt, Artificial Sequence
  Guide RNA
agcugaaugaucaauauagucg

SEQ ID NO: 10888 - RNA, 22 nt, Artificial Sequence
  Guide RNA
auauugaucauucagcugugac

SEQ ID NO: 10889 - RNA, 22 nt, Artificial Sequence
  Guide RNA
aucauucagcugugacaggagg

SEQ ID NO: 10890 - RNA, 22 nt, Artificial Sequence
  Guide RNA
augaccuccugucacagcugaa

SEQ ID NO: 10891 - RNA, 22 nt, Artificial Sequence
  Guide RNA
auucagcugugacaggagguca

SEQ ID NO: 10892 - RNA, 22 nt, Artificial Sequence
  Guide RNA
auugaucauucagcugugacag

SEQ ID NO: 10893 - RNA, 22 nt, Artificial Sequence
  Guide RNA
cacagcugaaugaucaauauag

SEQ ID NO: 10894 - RNA, 22 nt, Artificial Sequence
  Guide RNA
cagcugaaugaucaauauaguc

SEQ ID NO: 10895 - RNA, 22 nt, Artificial Sequence
  Guide RNA
caugaccuccugucacagcuga

SEQ ID NO: 10896 - RNA, 22 nt, Artificial Sequence
  Guide RNA
cauucagcugugacaggagguc

SEQ ID NO: 10897 - RNA, 22 nt, Artificial Sequence
  Guide RNA
ccuccugucacagcugaaugau

SEQ ID NO: 10898 - RNA, 22 nt, Artificial Sequence
  Guide RNA
ccugucacagcugaaugaucaa

SEQ ID NO: 10899 - RNA, 22 nt, Artificial Sequence
  Guide RNA
cgacuauauugaucauucagcu

SEQ ID NO: 10900 - RNA, 22 nt, Artificial Sequence
  Guide RNA
cuauauugaucauucagcugug

SEQ ID NO: 10901 - RNA, 22 nt, Artificial Sequence
  Guide RNA
cuccugucacagcugaaugauc

SEQ ID NO: 10902 - RNA, 22 nt, Artificial Sequence
  Guide RNA
cugaaugaucaauauagucgcu

SEQ ID NO: 10903 - RNA, 22 nt, Artificial Sequence
  Guide RNA
cugucacagcugaaugaucaau

SEQ ID NO: 10904 - RNA, 22 nt, Artificial Sequence
  Guide RNA
gaaaagcgacuauauugaucau

SEQ ID NO: 10905 - RNA, 22 nt, Artificial Sequence
  Guide RNA
gaaugaucaauauagucgcuuu

SEQ ID NO: 10906 - RNA, 22 nt, Artificial Sequence
  Guide RNA
gaccuccugucacagcugaaug

SEQ ID NO: 10907 - RNA, 22 nt, Artificial Sequence
  Guide RNA
gacuauauugaucauucagcug

SEQ ID NO: 10908 - RNA, 22 nt, Artificial Sequence
  Guide RNA
gaucauucagcugugacaggag

SEQ ID NO: 10909 - RNA, 22 nt, Artificial Sequence
  Guide RNA
gcgacuauauugaucauucagc

SEQ ID NO: 10910 - RNA, 22 nt, Artificial Sequence
  Guide RNA
gcugaaugaucaauauagucgc

SEQ ID NO: 10911 - RNA, 22 nt, Artificial Sequence
  Guide RNA
gucacagcugaaugaucaauau

SEQ ID NO: 10912 - RNA, 22 nt, Artificial Sequence
  Guide RNA
uauauugaucauucagcuguga

SEQ ID NO: 10913 - RNA, 22 nt, Artificial Sequence
  Guide RNA
uauugaucauucagcugugaca

SEQ ID NO: 10914 - RNA, 22 nt, Artificial Sequence
  Guide RNA
ucacagcugaaugaucaauaua

SEQ ID NO: 10915 - RNA, 22 nt, Artificial Sequence
  Guide RNA
ucaugaccuccugucacagcug

SEQ ID NO: 10916 - RNA, 22 nt, Artificial Sequence
  Guide RNA
ucauucagcugugacaggaggu

SEQ ID NO: 10917 - RNA, 22 nt, Artificial Sequence
  Guide RNA
uccugucacagcugaaugauca

SEQ ID NO: 10918 - RNA, 22 nt, Artificial Sequence
  Guide RNA
ugaaugaucaauauagucgcuu

SEQ ID NO: 10919 - RNA, 22 nt, Artificial Sequence
  Guide RNA
ugaccuccugucacagcugaau

SEQ ID NO: 10920 - RNA, 22 nt, Artificial Sequence
  Guide RNA
ugaucauucagcugugacagga

SEQ ID NO: 10921 - RNA, 22 nt, Artificial Sequence
  Guide RNA
ugucacagcugaaugaucaaua

SEQ ID NO: 10922 - RNA, 22 nt, Artificial Sequence
  Guide RNA
uucagcugugacaggaggucau

SEQ ID NO: 10923 - RNA, 22 nt, Artificial Sequence
  Guide RNA
uucaugaccuccugucacagcu

SEQ ID NO: 10924 - RNA, 22 nt, Artificial Sequence
  Guide RNA
uugaucauucagcugugacagg

SEQ ID NO: 10925 - RNA, 22 nt, Artificial Sequence
  Guide RNA
uuucaugaccuccugucacagc

SEQ ID NO: 10926 - RNA, 22 nt, Artificial Sequence
  Guide RNA
uuuucaugaccuccugucacag

SEQ ID NO: 10927 - RNA, 20 nt, Artificial Sequence
  Guide RNA
accuccugucgcagcuggau

SEQ ID NO: 10928 - RNA, 20 nt, Artificial Sequence
  Guide RNA
acuauauugaucauccagcu

SEQ ID NO: 10929 - RNA, 20 nt, Artificial Sequence
  Guide RNA
agcugcgacaggaggucaug

SEQ ID NO: 10930 - RNA, 20 nt, Artificial Sequence
  Guide RNA
auauugaucauccagcugcg

SEQ ID NO: 10931 - RNA, 20 nt, Artificial Sequence
  Guide RNA
aucauccagcugcgacagga

SEQ ID NO: 10932 - RNA, 20 nt, Artificial Sequence
  Guide RNA
auccagcugcgacaggaggu

SEQ ID NO: 10933 - RNA, 20 nt, Artificial Sequence
  Guide RNA
auccguuuucaugaccuccu

SEQ ID NO: 10934 - RNA, 20 nt, Artificial Sequence
  Guide RNA
augaccuccugucgcagcug

SEQ ID NO: 10935 - RNA, 20 nt, Artificial Sequence
  Guide RNA
auugaucauccagcugcgac

SEQ ID NO: 10936 - RNA, 20 nt, Artificial Sequence
  Guide RNA
cagcugcgacaggaggucau

SEQ ID NO: 10937 - RNA, 20 nt, Artificial Sequence
  Guide RNA
cauccagcugcgacaggagg

SEQ ID NO: 10938 - RNA, 20 nt, Artificial Sequence
  Guide RNA
caugaccuccugucgcagcu

SEQ ID NO: 10939 - RNA, 20 nt, Artificial Sequence
  Guide RNA
ccagcugcgacaggagguca

SEQ ID NO: 10940 - RNA, 20 nt, Artificial Sequence
  Guide RNA
ccguuuucaugaccuccugu

SEQ ID NO: 10941 - RNA, 20 nt, Artificial Sequence
  Guide RNA
ccuccugucgcagcuggaug

SEQ ID NO: 10942 - RNA, 20 nt, Artificial Sequence
  Guide RNA
ccugucgcagcuggaugauc

SEQ ID NO: 10943 - RNA, 20 nt, Artificial Sequence
  Guide RNA
cgacuauauugaucauccag

SEQ ID NO: 10944 - RNA, 20 nt, Artificial Sequence
  Guide RNA
cgcagcuggaugaucaauau

SEQ ID NO: 10945 - RNA, 20 nt, Artificial Sequence
  Guide RNA
cguuuucaugaccuccuguc

SEQ ID NO: 10946 - RNA, 20 nt, Artificial Sequence
  Guide RNA
cuauauugaucauccagcug

SEQ ID NO: 10947 - RNA, 20 nt, Artificial Sequence
  Guide RNA
cuccugucgcagcuggauga

SEQ ID NO: 10948 - RNA, 20 nt, Artificial Sequence
  Guide RNA
cugcgacaggaggucaugaa

SEQ ID NO: 10949 - RNA, 20 nt, Artificial Sequence
  Guide RNA
cugucgcagcuggaugauca

SEQ ID NO: 10950 - RNA, 20 nt, Artificial Sequence
  Guide RNA
gaccuccugucgcagcugga

SEQ ID NO: 10951 - RNA, 20 nt, Artificial Sequence
  Guide RNA
gacuauauugaucauccagc

SEQ ID NO: 10952 - RNA, 20 nt, Artificial Sequence
  Guide RNA
gaucauccagcugcgacagg

SEQ ID NO: 10953 - RNA, 20 nt, Artificial Sequence
  Guide RNA
gcgacaggaggucaugaaaa

SEQ ID NO: 10954 - RNA, 20 nt, Artificial Sequence
  Guide RNA
gcugcgacaggaggucauga

SEQ ID NO: 10955 - RNA, 20 nt, Artificial Sequence
  Guide RNA
gucgcagcuggaugaucaau

SEQ ID NO: 10956 - RNA, 20 nt, Artificial Sequence
  Guide RNA
guuuucaugaccuccugucg

SEQ ID NO: 10957 - RNA, 20 nt, Artificial Sequence
  Guide RNA
uauauugaucauccagcugc

SEQ ID NO: 10958 - RNA, 20 nt, Artificial Sequence
  Guide RNA
uauugaucauccagcugcga

SEQ ID NO: 10959 - RNA, 20 nt, Artificial Sequence
  Guide RNA
ucauccagcugcgacaggag

SEQ ID NO: 10960 - RNA, 20 nt, Artificial Sequence
  Guide RNA
ucaugaccuccugucgcagc

SEQ ID NO: 10961 - RNA, 20 nt, Artificial Sequence
  Guide RNA
uccagcugcgacaggagguc

SEQ ID NO: 10962 - RNA, 20 nt, Artificial Sequence
  Guide RNA
uccguuuucaugaccuccug

SEQ ID NO: 10963 - RNA, 20 nt, Artificial Sequence
  Guide RNA
uccugucgcagcuggaugau

SEQ ID NO: 10964 - RNA, 20 nt, Artificial Sequence
  Guide RNA
ucgcagcuggaugaucaaua

SEQ ID NO: 10965 - RNA, 20 nt, Artificial Sequence
  Guide RNA
ugaccuccugucgcagcugg

SEQ ID NO: 10966 - RNA, 20 nt, Artificial Sequence
  Guide RNA
ugaucauccagcugcgacag

SEQ ID NO: 10967 - RNA, 20 nt, Artificial Sequence
  Guide RNA
ugcgacaggaggucaugaaa

SEQ ID NO: 10968 - RNA, 20 nt, Artificial Sequence
  Guide RNA
ugucgcagcuggaugaucaa

SEQ ID NO: 10969 - RNA, 20 nt, Artificial Sequence
  Guide RNA
uucaugaccuccugucgcag

SEQ ID NO: 10970 - RNA, 20 nt, Artificial Sequence
  Guide RNA
uugaucauccagcugcgaca

SEQ ID NO: 10971 - RNA, 20 nt, Artificial Sequence
  Guide RNA
uuucaugaccuccugucgca

SEQ ID NO: 10972 - RNA, 20 nt, Artificial Sequence
  Guide RNA
uuuucaugaccuccugucgc

SEQ ID NO: 10973 - RNA, 21 nt, Artificial Sequence
  Guide RNA
accuccugucgcagcuggaug

SEQ ID NO: 10974 - RNA, 21 nt, Artificial Sequence
  Guide RNA
acuauauugaucauccagcug

SEQ ID NO: 10975 - RNA, 21 nt, Artificial Sequence
  Guide RNA
agcugcgacaggaggucauga

SEQ ID NO: 10976 - RNA, 21 nt, Artificial Sequence
  Guide RNA
auauugaucauccagcugcga

SEQ ID NO: 10977 - RNA, 21 nt, Artificial Sequence
  Guide RNA
aucauccagcugcgacaggag

SEQ ID NO: 10978 - RNA, 21 nt, Artificial Sequence
  Guide RNA
auccagcugcgacaggagguc

SEQ ID NO: 10979 - RNA, 21 nt, Artificial Sequence
  Guide RNA
auccguuuucaugaccuccug

SEQ ID NO: 10980 - RNA, 21 nt, Artificial Sequence
  Guide RNA
augaccuccugucgcagcugg

SEQ ID NO: 10981 - RNA, 21 nt, Artificial Sequence
  Guide RNA
auugaucauccagcugcgaca

SEQ ID NO: 10982 - RNA, 21 nt, Artificial Sequence
  Guide RNA
cagcugcgacaggaggucaug

SEQ ID NO: 10983 - RNA, 21 nt, Artificial Sequence
  Guide RNA
cauccagcugcgacaggaggu

SEQ ID NO: 10984 - RNA, 21 nt, Artificial Sequence
  Guide RNA
cauccguuuucaugaccuccu

SEQ ID NO: 10985 - RNA, 21 nt, Artificial Sequence
  Guide RNA
caugaccuccugucgcagcug

SEQ ID NO: 10986 - RNA, 21 nt, Artificial Sequence
  Guide RNA
ccagcugcgacaggaggucau

SEQ ID NO: 10987 - RNA, 21 nt, Artificial Sequence
  Guide RNA
ccguuuucaugaccuccuguc

SEQ ID NO: 10988 - RNA, 21 nt, Artificial Sequence
  Guide RNA
ccuccugucgcagcuggauga

SEQ ID NO: 10989 - RNA, 21 nt, Artificial Sequence
  Guide RNA
ccugucgcagcuggaugauca

SEQ ID NO: 10990 - RNA, 21 nt, Artificial Sequence
  Guide RNA
cgacuauauugaucauccagc

SEQ ID NO: 10991 - RNA, 21 nt, Artificial Sequence
  Guide RNA
cgcagcuggaugaucaauaua

SEQ ID NO: 10992 - RNA, 21 nt, Artificial Sequence
  Guide RNA
cguuuucaugaccuccugucg

SEQ ID NO: 10993 - RNA, 21 nt, Artificial Sequence
  Guide RNA
cuauauugaucauccagcugc

SEQ ID NO: 10994 - RNA, 21 nt, Artificial Sequence
  Guide RNA
cuccugucgcagcuggaugau

SEQ ID NO: 10995 - RNA, 21 nt, Artificial Sequence
  Guide RNA
cugcgacaggaggucaugaaa

SEQ ID NO: 10996 - RNA, 21 nt, Artificial Sequence
  Guide RNA
cugucgcagcuggaugaucaa

SEQ ID NO: 10997 - RNA, 21 nt, Artificial Sequence
  Guide RNA
gaccuccugucgcagcuggau

SEQ ID NO: 10998 - RNA, 21 nt, Artificial Sequence
  Guide RNA
gacuauauugaucauccagcu

SEQ ID NO: 10999 - RNA, 21 nt, Artificial Sequence
  Guide RNA
gaucauccagcugcgacagga

SEQ ID NO: 11000 - RNA, 21 nt, Artificial Sequence
  Guide RNA
gcgacaggaggucaugaaaac

SEQ ID NO: 11001 - RNA, 21 nt, Artificial Sequence
  Guide RNA
gcgacuauauugaucauccag

SEQ ID NO: 11002 - RNA, 21 nt, Artificial Sequence
  Guide RNA
gcugcgacaggaggucaugaa

SEQ ID NO: 11003 - RNA, 21 nt, Artificial Sequence
  Guide RNA
gucgcagcuggaugaucaaua

SEQ ID NO: 11004 - RNA, 21 nt, Artificial Sequence
  Guide RNA
guuuucaugaccuccugucgc

SEQ ID NO: 11005 - RNA, 21 nt, Artificial Sequence
  Guide RNA
uauauugaucauccagcugcg

SEQ ID NO: 11006 - RNA, 21 nt, Artificial Sequence
  Guide RNA
uauugaucauccagcugcgac

SEQ ID NO: 11007 - RNA, 21 nt, Artificial Sequence
  Guide RNA
ucauccagcugcgacaggagg

SEQ ID NO: 11008 - RNA, 21 nt, Artificial Sequence
  Guide RNA
ucaugaccuccugucgcagcu

SEQ ID NO: 11009 - RNA, 21 nt, Artificial Sequence
  Guide RNA
uccagcugcgacaggagguca

SEQ ID NO: 11010 - RNA, 21 nt, Artificial Sequence
  Guide RNA
uccguuuucaugaccuccugu

SEQ ID NO: 11011 - RNA, 21 nt, Artificial Sequence
  Guide RNA
uccugucgcagcuggaugauc

SEQ ID NO: 11012 - RNA, 21 nt, Artificial Sequence
  Guide RNA
ucgcagcuggaugaucaauau

SEQ ID NO: 11013 - RNA, 21 nt, Artificial Sequence
  Guide RNA
ugaccuccugucgcagcugga

SEQ ID NO: 11014 - RNA, 21 nt, Artificial Sequence
  Guide RNA
ugaucauccagcugcgacagg

SEQ ID NO: 11015 - RNA, 21 nt, Artificial Sequence
  Guide RNA
ugcgacaggaggucaugaaaa

SEQ ID NO: 11016 - RNA, 21 nt, Artificial Sequence
  Guide RNA
ugucgcagcuggaugaucaau

SEQ ID NO: 11017 - RNA, 21 nt, Artificial Sequence
  Guide RNA
uucaugaccuccugucgcagc

SEQ ID NO: 11018 - RNA, 21 nt, Artificial Sequence
  Guide RNA
uugaucauccagcugcgacag

SEQ ID NO: 11019 - RNA, 21 nt, Artificial Sequence
  Guide RNA
uuucaugaccuccugucgcag

SEQ ID NO: 11020 - RNA, 21 nt, Artificial Sequence
  Guide RNA
uuuucaugaccuccugucgca

SEQ ID NO: 11021 - RNA, 22 nt, Artificial Sequence
  Guide RNA
accuccugucgcagcuggauga

SEQ ID NO: 11022 - RNA, 22 nt, Artificial Sequence
  Guide RNA
acuauauugaucauccagcugc

SEQ ID NO: 11023 - RNA, 22 nt, Artificial Sequence
  Guide RNA
agcgacuauauugaucauccag

SEQ ID NO: 11024 - RNA, 22 nt, Artificial Sequence
  Guide RNA
agcugcgacaggaggucaugaa

SEQ ID NO: 11025 - RNA, 22 nt, Artificial Sequence
  Guide RNA
auauugaucauccagcugcgac

SEQ ID NO: 11026 - RNA, 22 nt, Artificial Sequence
  Guide RNA
aucauccagcugcgacaggagg

SEQ ID NO: 11027 - RNA, 22 nt, Artificial Sequence
  Guide RNA
auccagcugcgacaggagguca

SEQ ID NO: 11028 - RNA, 22 nt, Artificial Sequence
  Guide RNA
auccguuuucaugaccuccugu

SEQ ID NO: 11029 - RNA, 22 nt, Artificial Sequence
  Guide RNA
augaccuccugucgcagcugga

SEQ ID NO: 11030 - RNA, 22 nt, Artificial Sequence
  Guide RNA
auugaucauccagcugcgacag

SEQ ID NO: 11031 - RNA, 22 nt, Artificial Sequence
  Guide RNA
cagcugcgacaggaggucauga

SEQ ID NO: 11032 - RNA, 22 nt, Artificial Sequence
  Guide RNA
cauccagcugcgacaggagguc

SEQ ID NO: 11033 - RNA, 22 nt, Artificial Sequence
  Guide RNA
cauccguuuucaugaccuccug

SEQ ID NO: 11034 - RNA, 22 nt, Artificial Sequence
  Guide RNA
caugaccuccugucgcagcugg

SEQ ID NO: 11035 - RNA, 22 nt, Artificial Sequence
  Guide RNA
ccagcugcgacaggaggucaug

SEQ ID NO: 11036 - RNA, 22 nt, Artificial Sequence
  Guide RNA
ccauccguuuucaugaccuccu

SEQ ID NO: 11037 - RNA, 22 nt, Artificial Sequence
  Guide RNA
ccguuuucaugaccuccugucg

SEQ ID NO: 11038 - RNA, 22 nt, Artificial Sequence
  Guide RNA
ccuccugucgcagcuggaugau

SEQ ID NO: 11039 - RNA, 22 nt, Artificial Sequence
  Guide RNA
ccugucgcagcuggaugaucaa

SEQ ID NO: 11040 - RNA, 22 nt, Artificial Sequence
  Guide RNA
cgacuauauugaucauccagcu

SEQ ID NO: 11041 - RNA, 22 nt, Artificial Sequence
  Guide RNA
cgcagcuggaugaucaauauag

SEQ ID NO: 11042 - RNA, 22 nt, Artificial Sequence
  Guide RNA
cguuuucaugaccuccugucgc

SEQ ID NO: 11043 - RNA, 22 nt, Artificial Sequence
  Guide RNA
cuauauugaucauccagcugcg

SEQ ID NO: 11044 - RNA, 22 nt, Artificial Sequence
  Guide RNA
cuccugucgcagcuggaugauc

SEQ ID NO: 11045 - RNA, 22 nt, Artificial Sequence
  Guide RNA
cugcgacaggaggucaugaaaa

SEQ ID NO: 11046 - RNA, 22 nt, Artificial Sequence
  Guide RNA
cugucgcagcuggaugaucaau

SEQ ID NO: 11047 - RNA, 22 nt, Artificial Sequence
  Guide RNA
gaccuccugucgcagcuggaug

SEQ ID NO: 11048 - RNA, 22 nt, Artificial Sequence
  Guide RNA
gacuauauugaucauccagcug

SEQ ID NO: 11049 - RNA, 22 nt, Artificial Sequence
  Guide RNA
gaucauccagcugcgacaggag

SEQ ID NO: 11050 - RNA, 22 nt, Artificial Sequence
  Guide RNA
gcgacaggaggucaugaaaacg

SEQ ID NO: 11051 - RNA, 22 nt, Artificial Sequence
  Guide RNA
gcgacuauauugaucauccagc

SEQ ID NO: 11052 - RNA, 22 nt, Artificial Sequence
  Guide RNA
gcugcgacaggaggucaugaaa

SEQ ID NO: 11053 - RNA, 22 nt, Artificial Sequence
  Guide RNA
gucgcagcuggaugaucaauau

SEQ ID NO: 11054 - RNA, 22 nt, Artificial Sequence
  Guide RNA
guuuucaugaccuccugucgca

SEQ ID NO: 11055 - RNA, 22 nt, Artificial Sequence
  Guide RNA
uauauugaucauccagcugcga

SEQ ID NO: 11056 - RNA, 22 nt, Artificial Sequence
  Guide RNA
uauugaucauccagcugcgaca

SEQ ID NO: 11057 - RNA, 22 nt, Artificial Sequence
  Guide RNA
ucauccagcugcgacaggaggu

SEQ ID NO: 11058 - RNA, 22 nt, Artificial Sequence
  Guide RNA
ucaugaccuccugucgcagcug

SEQ ID NO: 11059 - RNA, 22 nt, Artificial Sequence
  Guide RNA
uccagcugcgacaggaggucau

SEQ ID NO: 11060 - RNA, 22 nt, Artificial Sequence
  Guide RNA
uccguuuucaugaccuccuguc

SEQ ID NO: 11061 - RNA, 22 nt, Artificial Sequence
  Guide RNA
uccugucgcagcuggaugauca

SEQ ID NO: 11062 - RNA, 22 nt, Artificial Sequence
  Guide RNA
ucgcagcuggaugaucaauaua

SEQ ID NO: 11063 - RNA, 22 nt, Artificial Sequence
  Guide RNA
ugaccuccugucgcagcuggau

SEQ ID NO: 11064 - RNA, 22 nt, Artificial Sequence
  Guide RNA
ugaucauccagcugcgacagga

SEQ ID NO: 11065 - RNA, 22 nt, Artificial Sequence
  Guide RNA
ugcgacaggaggucaugaaaac

SEQ ID NO: 11066 - RNA, 22 nt, Artificial Sequence
  Guide RNA
ugucgcagcuggaugaucaaua

SEQ ID NO: 11067 - RNA, 22 nt, Artificial Sequence
  Guide RNA
uucaugaccuccugucgcagcu

SEQ ID NO: 11068 - RNA, 22 nt, Artificial Sequence
  Guide RNA
uugaucauccagcugcgacagg

SEQ ID NO: 11069 - RNA, 22 nt, Artificial Sequence
  Guide RNA
uuucaugaccuccugucgcagc

SEQ ID NO: 11070 - RNA, 22 nt, Artificial Sequence
  Guide RNA
uuuucaugaccuccugucgcag

SEQ ID NO: 11071 - RNA, 20 nt, Artificial Sequence
  Guide RNA
aaucagacaguaccuggcac

SEQ ID NO: 11072 - RNA, 20 nt, Artificial Sequence
  Guide RNA
acaguuuucccauggaauca

SEQ ID NO: 11073 - RNA, 20 nt, Artificial Sequence
  Guide RNA
accacugugccagguacugu

SEQ ID NO: 11074 - RNA, 20 nt, Artificial Sequence
  Guide RNA
acugucugauuccaugggaa

SEQ ID NO: 11075 - RNA, 20 nt, Artificial Sequence
  Guide RNA
acugugccagguacugucug

SEQ ID NO: 11076 - RNA, 20 nt, Artificial Sequence
  Guide RNA
agguacugucugauuccaug

SEQ ID NO: 11077 - RNA, 20 nt, Artificial Sequence
  Guide RNA
aguuuucccauggaaucaga

SEQ ID NO: 11078 - RNA, 20 nt, Artificial Sequence
  Guide RNA
aucagacaguaccuggcaca

SEQ ID NO: 11079 - RNA, 20 nt, Artificial Sequence
  Guide RNA
augacaguuuucccauggaa

SEQ ID NO: 11080 - RNA, 20 nt, Artificial Sequence
  Guide RNA
augaugacaguuuucccaug

SEQ ID NO: 11081 - RNA, 20 nt, Artificial Sequence
  Guide RNA
auggaaucagacaguaccug

SEQ ID NO: 11082 - RNA, 20 nt, Artificial Sequence
  Guide RNA
cacugugccagguacugucu

SEQ ID NO: 11083 - RNA, 20 nt, Artificial Sequence
  Guide RNA
cagguacugucugauuccau

SEQ ID NO: 11084 - RNA, 20 nt, Artificial Sequence
  Guide RNA
caguuuucccauggaaucag

SEQ ID NO: 11085 - RNA, 20 nt, Artificial Sequence
  Guide RNA
cauggaaucagacaguaccu

SEQ ID NO: 11086 - RNA, 20 nt, Artificial Sequence
  Guide RNA
ccacugugccagguacuguc

SEQ ID NO: 11087 - RNA, 20 nt, Artificial Sequence
  Guide RNA
ccagguacugucugauucca

SEQ ID NO: 11088 - RNA, 20 nt, Artificial Sequence
  Guide RNA
ccauggaaucagacaguacc

SEQ ID NO: 11089 - RNA, 20 nt, Artificial Sequence
  Guide RNA
cccauggaaucagacaguac

SEQ ID NO: 11090 - RNA, 20 nt, Artificial Sequence
  Guide RNA
cugauuccaugggaaaacug

SEQ ID NO: 11091 - RNA, 20 nt, Artificial Sequence
  Guide RNA
cugucugauuccaugggaaa

SEQ ID NO: 11092 - RNA, 20 nt, Artificial Sequence
  Guide RNA
cugugccagguacugucuga

SEQ ID NO: 11093 - RNA, 20 nt, Artificial Sequence
  Guide RNA
gaaucagacaguaccuggca

SEQ ID NO: 11094 - RNA, 20 nt, Artificial Sequence
  Guide RNA
gacaguuuucccauggaauc

SEQ ID NO: 11095 - RNA, 20 nt, Artificial Sequence
  Guide RNA
gaugacaguuuucccaugga

SEQ ID NO: 11096 - RNA, 20 nt, Artificial Sequence
  Guide RNA
gauuccaugggaaaacuguc

SEQ ID NO: 11097 - RNA, 20 nt, Artificial Sequence
  Guide RNA
gccagguacugucugauucc

SEQ ID NO: 11098 - RNA, 20 nt, Artificial Sequence
  Guide RNA
ggaaucagacaguaccuggc

SEQ ID NO: 11099 - RNA, 20 nt, Artificial Sequence
  Guide RNA
gguacugucugauuccaugg

SEQ ID NO: 11100 - RNA, 20 nt, Artificial Sequence
  Guide RNA
guacugucugauuccauggg

SEQ ID NO: 11101 - RNA, 20 nt, Artificial Sequence
  Guide RNA
gucugauuccaugggaaaac

SEQ ID NO: 11102 - RNA, 20 nt, Artificial Sequence
  Guide RNA
gugccagguacugucugauu

SEQ ID NO: 11103 - RNA, 20 nt, Artificial Sequence
  Guide RNA
guuuucccauggaaucagac

SEQ ID NO: 11104 - RNA, 20 nt, Artificial Sequence
  Guide RNA
uacugucugauuccauggga

SEQ ID NO: 11105 - RNA, 20 nt, Artificial Sequence
  Guide RNA
ucccauggaaucagacagua

SEQ ID NO: 11106 - RNA, 20 nt, Artificial Sequence
  Guide RNA
ucugauuccaugggaaaacu

SEQ ID NO: 11107 - RNA, 20 nt, Artificial Sequence
  Guide RNA
ugacaguuuucccauggaau

SEQ ID NO: 11108 - RNA, 20 nt, Artificial Sequence
  Guide RNA
ugaugacaguuuucccaugg

SEQ ID NO: 11109 - RNA, 20 nt, Artificial Sequence
  Guide RNA
ugauuccaugggaaaacugu

SEQ ID NO: 11110 - RNA, 20 nt, Artificial Sequence
  Guide RNA
ugccagguacugucugauuc

SEQ ID NO: 11111 - RNA, 20 nt, Artificial Sequence
  Guide RNA
uggaaucagacaguaccugg

SEQ ID NO: 11112 - RNA, 20 nt, Artificial Sequence
  Guide RNA
ugucugauuccaugggaaaa

SEQ ID NO: 11113 - RNA, 20 nt, Artificial Sequence
  Guide RNA
ugugccagguacugucugau

SEQ ID NO: 11114 - RNA, 20 nt, Artificial Sequence
  Guide RNA
uucccauggaaucagacagu

SEQ ID NO: 11115 - RNA, 20 nt, Artificial Sequence
  Guide RNA
uuucccauggaaucagacag

SEQ ID NO: 11116 - RNA, 20 nt, Artificial Sequence
  Guide RNA
uuuucccauggaaucagaca

SEQ ID NO: 11117 - RNA, 21 nt, Artificial Sequence
  Guide RNA
aaccacugugccagguacugu

SEQ ID NO: 11118 - RNA, 21 nt, Artificial Sequence
  Guide RNA
aaucagacaguaccuggcaca

SEQ ID NO: 11119 - RNA, 21 nt, Artificial Sequence
  Guide RNA
acaguuuucccauggaaucag

SEQ ID NO: 11120 - RNA, 21 nt, Artificial Sequence
  Guide RNA
accacugugccagguacuguc

SEQ ID NO: 11121 - RNA, 21 nt, Artificial Sequence
  Guide RNA
acugucugauuccaugggaaa

SEQ ID NO: 11122 - RNA, 21 nt, Artificial Sequence
  Guide RNA
acugugccagguacugucuga

SEQ ID NO: 11123 - RNA, 21 nt, Artificial Sequence
  Guide RNA
agguacugucugauuccaugg

SEQ ID NO: 11124 - RNA, 21 nt, Artificial Sequence
  Guide RNA
aguuuucccauggaaucagac

SEQ ID NO: 11125 - RNA, 21 nt, Artificial Sequence
  Guide RNA
aucagacaguaccuggcacag

SEQ ID NO: 11126 - RNA, 21 nt, Artificial Sequence
  Guide RNA
augacaguuuucccauggaau

SEQ ID NO: 11127 - RNA, 21 nt, Artificial Sequence
  Guide RNA
augaugacaguuuucccaugg

SEQ ID NO: 11128 - RNA, 21 nt, Artificial Sequence
  Guide RNA
auggaaucagacaguaccugg

SEQ ID NO: 11129 - RNA, 21 nt, Artificial Sequence
  Guide RNA
cacugugccagguacugucug

SEQ ID NO: 11130 - RNA, 21 nt, Artificial Sequence
  Guide RNA
cagguacugucugauuccaug

SEQ ID NO: 11131 - RNA, 21 nt, Artificial Sequence
  Guide RNA
caguuuucccauggaaucaga

SEQ ID NO: 11132 - RNA, 21 nt, Artificial Sequence
  Guide RNA
cauggaaucagacaguaccug

SEQ ID NO: 11133 - RNA, 21 nt, Artificial Sequence
  Guide RNA
ccacugugccagguacugucu

SEQ ID NO: 11134 - RNA, 21 nt, Artificial Sequence
  Guide RNA
ccagguacugucugauuccau

SEQ ID NO: 11135 - RNA, 21 nt, Artificial Sequence
  Guide RNA
ccauggaaucagacaguaccu

SEQ ID NO: 11136 - RNA, 21 nt, Artificial Sequence
  Guide RNA
cccauggaaucagacaguacc

SEQ ID NO: 11137 - RNA, 21 nt, Artificial Sequence
  Guide RNA
cugauuccaugggaaaacugu

SEQ ID NO: 11138 - RNA, 21 nt, Artificial Sequence
  Guide RNA
cugucugauuccaugggaaaa

SEQ ID NO: 11139 - RNA, 21 nt, Artificial Sequence
  Guide RNA
cugugccagguacugucugau

SEQ ID NO: 11140 - RNA, 21 nt, Artificial Sequence
  Guide RNA
gaaucagacaguaccuggcac

SEQ ID NO: 11141 - RNA, 21 nt, Artificial Sequence
  Guide RNA
gacaguuuucccauggaauca

SEQ ID NO: 11142 - RNA, 21 nt, Artificial Sequence
  Guide RNA
gaugacaguuuucccauggaa

SEQ ID NO: 11143 - RNA, 21 nt, Artificial Sequence
  Guide RNA
gauuccaugggaaaacuguca

SEQ ID NO: 11144 - RNA, 21 nt, Artificial Sequence
  Guide RNA
gccagguacugucugauucca

SEQ ID NO: 11145 - RNA, 21 nt, Artificial Sequence
  Guide RNA
ggaaucagacaguaccuggca

SEQ ID NO: 11146 - RNA, 21 nt, Artificial Sequence
  Guide RNA
gguacugucugauuccauggg

SEQ ID NO: 11147 - RNA, 21 nt, Artificial Sequence
  Guide RNA
guacugucugauuccauggga

SEQ ID NO: 11148 - RNA, 21 nt, Artificial Sequence
  Guide RNA
gucugauuccaugggaaaacu

SEQ ID NO: 11149 - RNA, 21 nt, Artificial Sequence
  Guide RNA
gugccagguacugucugauuc

SEQ ID NO: 11150 - RNA, 21 nt, Artificial Sequence
  Guide RNA
guuuucccauggaaucagaca

SEQ ID NO: 11151 - RNA, 21 nt, Artificial Sequence
  Guide RNA
uacugucugauuccaugggaa

SEQ ID NO: 11152 - RNA, 21 nt, Artificial Sequence
  Guide RNA
uaugaugacaguuuucccaug

SEQ ID NO: 11153 - RNA, 21 nt, Artificial Sequence
  Guide RNA
ucccauggaaucagacaguac

SEQ ID NO: 11154 - RNA, 21 nt, Artificial Sequence
  Guide RNA
ucugauuccaugggaaaacug

SEQ ID NO: 11155 - RNA, 21 nt, Artificial Sequence
  Guide RNA
ugacaguuuucccauggaauc

SEQ ID NO: 11156 - RNA, 21 nt, Artificial Sequence
  Guide RNA
ugaugacaguuuucccaugga

SEQ ID NO: 11157 - RNA, 21 nt, Artificial Sequence
  Guide RNA
ugauuccaugggaaaacuguc

SEQ ID NO: 11158 - RNA, 21 nt, Artificial Sequence
  Guide RNA
ugccagguacugucugauucc

SEQ ID NO: 11159 - RNA, 21 nt, Artificial Sequence
  Guide RNA
uggaaucagacaguaccuggc

SEQ ID NO: 11160 - RNA, 21 nt, Artificial Sequence
  Guide RNA
ugucugauuccaugggaaaac

SEQ ID NO: 11161 - RNA, 21 nt, Artificial Sequence
  Guide RNA
ugugccagguacugucugauu

SEQ ID NO: 11162 - RNA, 21 nt, Artificial Sequence
  Guide RNA
uucccauggaaucagacagua

SEQ ID NO: 11163 - RNA, 21 nt, Artificial Sequence
  Guide RNA
uuucccauggaaucagacagu

SEQ ID NO: 11164 - RNA, 21 nt, Artificial Sequence
  Guide RNA
uuuucccauggaaucagacag

SEQ ID NO: 11165 - RNA, 22 nt, Artificial Sequence
  Guide RNA
aaccacugugccagguacuguc

SEQ ID NO: 11166 - RNA, 22 nt, Artificial Sequence
  Guide RNA
aaucagacaguaccuggcacag

SEQ ID NO: 11167 - RNA, 22 nt, Artificial Sequence
  Guide RNA
acaguuuucccauggaaucaga

SEQ ID NO: 11168 - RNA, 22 nt, Artificial Sequence
  Guide RNA
accacugugccagguacugucu

SEQ ID NO: 11169 - RNA, 22 nt, Artificial Sequence
  Guide RNA
acugucugauuccaugggaaaa

SEQ ID NO: 11170 - RNA, 22 nt, Artificial Sequence
  Guide RNA
acugugccagguacugucugau

SEQ ID NO: 11171 - RNA, 22 nt, Artificial Sequence
  Guide RNA
agguacugucugauuccauggg

SEQ ID NO: 11172 - RNA, 22 nt, Artificial Sequence
  Guide RNA
aguuuucccauggaaucagaca

SEQ ID NO: 11173 - RNA, 22 nt, Artificial Sequence
  Guide RNA
aucagacaguaccuggcacagu

SEQ ID NO: 11174 - RNA, 22 nt, Artificial Sequence
  Guide RNA
augacaguuuucccauggaauc

SEQ ID NO: 11175 - RNA, 22 nt, Artificial Sequence
  Guide RNA
augaugacaguuuucccaugga

SEQ ID NO: 11176 - RNA, 22 nt, Artificial Sequence
  Guide RNA
auggaaucagacaguaccuggc

SEQ ID NO: 11177 - RNA, 22 nt, Artificial Sequence
  Guide RNA
cacugugccagguacugucuga

SEQ ID NO: 11178 - RNA, 22 nt, Artificial Sequence
  Guide RNA
cagguacugucugauuccaugg

SEQ ID NO: 11179 - RNA, 22 nt, Artificial Sequence
  Guide RNA
caguuuucccauggaaucagac

SEQ ID NO: 11180 - RNA, 22 nt, Artificial Sequence
  Guide RNA
cauggaaucagacaguaccugg

SEQ ID NO: 11181 - RNA, 22 nt, Artificial Sequence
  Guide RNA
ccacugugccagguacugucug

SEQ ID NO: 11182 - RNA, 22 nt, Artificial Sequence
  Guide RNA
ccagguacugucugauuccaug

SEQ ID NO: 11183 - RNA, 22 nt, Artificial Sequence
  Guide RNA
ccauggaaucagacaguaccug

SEQ ID NO: 11184 - RNA, 22 nt, Artificial Sequence
  Guide RNA
cccauggaaucagacaguaccu

SEQ ID NO: 11185 - RNA, 22 nt, Artificial Sequence
  Guide RNA
cugauuccaugggaaaacuguc

SEQ ID NO: 11186 - RNA, 22 nt, Artificial Sequence
  Guide RNA
cugucugauuccaugggaaaac

SEQ ID NO: 11187 - RNA, 22 nt, Artificial Sequence
  Guide RNA
cugugccagguacugucugauu

SEQ ID NO: 11188 - RNA, 22 nt, Artificial Sequence
  Guide RNA
gaaucagacaguaccuggcaca

SEQ ID NO: 11189 - RNA, 22 nt, Artificial Sequence
  Guide RNA
gacaguuuucccauggaaucag

SEQ ID NO: 11190 - RNA, 22 nt, Artificial Sequence
  Guide RNA
gaugacaguuuucccauggaau

SEQ ID NO: 11191 - RNA, 22 nt, Artificial Sequence
  Guide RNA
gauuccaugggaaaacugucau

SEQ ID NO: 11192 - RNA, 22 nt, Artificial Sequence
  Guide RNA
gccagguacugucugauuccau

SEQ ID NO: 11193 - RNA, 22 nt, Artificial Sequence
  Guide RNA
ggaaucagacaguaccuggcac

SEQ ID NO: 11194 - RNA, 22 nt, Artificial Sequence
  Guide RNA
gguacugucugauuccauggga

SEQ ID NO: 11195 - RNA, 22 nt, Artificial Sequence
  Guide RNA
guacugucugauuccaugggaa

SEQ ID NO: 11196 - RNA, 22 nt, Artificial Sequence
  Guide RNA
gucugauuccaugggaaaacug

SEQ ID NO: 11197 - RNA, 22 nt, Artificial Sequence
  Guide RNA
gugccagguacugucugauucc

SEQ ID NO: 11198 - RNA, 22 nt, Artificial Sequence
  Guide RNA
guuuucccauggaaucagacag

SEQ ID NO: 11199 - RNA, 22 nt, Artificial Sequence
  Guide RNA
uaaccacugugccagguacugu

SEQ ID NO: 11200 - RNA, 22 nt, Artificial Sequence
  Guide RNA
uacugucugauuccaugggaaa

SEQ ID NO: 11201 - RNA, 22 nt, Artificial Sequence
  Guide RNA
uaugaugacaguuuucccaugg

SEQ ID NO: 11202 - RNA, 22 nt, Artificial Sequence
  Guide RNA
ucccauggaaucagacaguacc

SEQ ID NO: 11203 - RNA, 22 nt, Artificial Sequence
  Guide RNA
ucugauuccaugggaaaacugu

SEQ ID NO: 11204 - RNA, 22 nt, Artificial Sequence
  Guide RNA
ugacaguuuucccauggaauca

SEQ ID NO: 11205 - RNA, 22 nt, Artificial Sequence
  Guide RNA
ugaugacaguuuucccauggaa

SEQ ID NO: 11206 - RNA, 22 nt, Artificial Sequence
  Guide RNA
ugauuccaugggaaaacuguca

SEQ ID NO: 11207 - RNA, 22 nt, Artificial Sequence
  Guide RNA
ugccagguacugucugauucca

SEQ ID NO: 11208 - RNA, 22 nt, Artificial Sequence
  Guide RNA
uggaaucagacaguaccuggca

SEQ ID NO: 11209 - RNA, 22 nt, Artificial Sequence
  Guide RNA
ugucugauuccaugggaaaacu

SEQ ID NO: 11210 - RNA, 22 nt, Artificial Sequence
  Guide RNA
ugugccagguacugucugauuc

SEQ ID NO: 11211 - RNA, 22 nt, Artificial Sequence
  Guide RNA
uuaugaugacaguuuucccaug

SEQ ID NO: 11212 - RNA, 22 nt, Artificial Sequence
  Guide RNA
uucccauggaaucagacaguac

SEQ ID NO: 11213 - RNA, 22 nt, Artificial Sequence
  Guide RNA
uuucccauggaaucagacagua

SEQ ID NO: 11214 - RNA, 22 nt, Artificial Sequence
  Guide RNA
uuuucccauggaaucagacagu

SEQ ID NO: 11215 - RNA, 20 nt, Artificial Sequence
  Guide RNA
aaaaguagaaaacgugacug

SEQ ID NO: 11216 - RNA, 20 nt, Artificial Sequence
  Guide RNA
aaacuuucugcgaaaaguag

SEQ ID NO: 11217 - RNA, 20 nt, Artificial Sequence
  Guide RNA
aaaguagaaaacgugacuga

SEQ ID NO: 11218 - RNA, 20 nt, Artificial Sequence
  Guide RNA
aaaugaaacuuucugcgaaa

SEQ ID NO: 11219 - RNA, 20 nt, Artificial Sequence
  Guide RNA
aacuuucugcgaaaaguaga

SEQ ID NO: 11220 - RNA, 20 nt, Artificial Sequence
  Guide RNA
aaguagaaaacgugacugau

SEQ ID NO: 11221 - RNA, 20 nt, Artificial Sequence
  Guide RNA
aaugaaacuuucugcgaaaa

SEQ ID NO: 11222 - RNA, 20 nt, Artificial Sequence
  Guide RNA
acguuuucuacuuuucgcag

SEQ ID NO: 11223 - RNA, 20 nt, Artificial Sequence
  Guide RNA
acuuucugcgaaaaguagaa

SEQ ID NO: 11224 - RNA, 20 nt, Artificial Sequence
  Guide RNA
aguagaaaacgugacugaug

SEQ ID NO: 11225 - RNA, 20 nt, Artificial Sequence
  Guide RNA
agucacguuuucuacuuuuc

SEQ ID NO: 11226 - RNA, 20 nt, Artificial Sequence
  Guide RNA
aucagucacguuuucuacuu

SEQ ID NO: 11227 - RNA, 20 nt, Artificial Sequence
  Guide RNA
augaaacuuucugcgaaaag

SEQ ID NO: 11228 - RNA, 20 nt, Artificial Sequence
  Guide RNA
caaaugaaacuuucugcgaa

SEQ ID NO: 11229 - RNA, 20 nt, Artificial Sequence
  Guide RNA
cacguuuucuacuuuucgca

SEQ ID NO: 11230 - RNA, 20 nt, Artificial Sequence
  Guide RNA
cagucacguuuucuacuuuu

SEQ ID NO: 11231 - RNA, 20 nt, Artificial Sequence
  Guide RNA
caucagucacguuuucuacu

SEQ ID NO: 11232 - RNA, 20 nt, Artificial Sequence
  Guide RNA
ccaucagucacguuuucuac

SEQ ID NO: 11233 - RNA, 20 nt, Artificial Sequence
  Guide RNA
ccuuuccaucagucacguuu

SEQ ID NO: 11234 - RNA, 20 nt, Artificial Sequence
  Guide RNA
cgaaaaguagaaaacgugac

SEQ ID NO: 11235 - RNA, 20 nt, Artificial Sequence
  Guide RNA
cguuuucuacuuuucgcaga

SEQ ID NO: 11236 - RNA, 20 nt, Artificial Sequence
  Guide RNA
cuacuuuucgcagaaaguuu

SEQ ID NO: 11237 - RNA, 20 nt, Artificial Sequence
  Guide RNA
cugcgaaaaguagaaaacgu

SEQ ID NO: 11238 - RNA, 20 nt, Artificial Sequence
  Guide RNA
cuuuccaucagucacguuuu

SEQ ID NO: 11239 - RNA, 20 nt, Artificial Sequence
  Guide RNA
cuuucugcgaaaaguagaaa

SEQ ID NO: 11240 - RNA, 20 nt, Artificial Sequence
  Guide RNA
gaaaaguagaaaacgugacu

SEQ ID NO: 11241 - RNA, 20 nt, Artificial Sequence
  Guide RNA
gaaacuuucugcgaaaagua

SEQ ID NO: 11242 - RNA, 20 nt, Artificial Sequence
  Guide RNA
gcgaaaaguagaaaacguga

SEQ ID NO: 11243 - RNA, 20 nt, Artificial Sequence
  Guide RNA
guagaaaacgugacugaugg

SEQ ID NO: 11244 - RNA, 20 nt, Artificial Sequence
  Guide RNA
gucacguuuucuacuuuucg

SEQ ID NO: 11245 - RNA, 20 nt, Artificial Sequence
  Guide RNA
guuuucuacuuuucgcagaa

SEQ ID NO: 11246 - RNA, 20 nt, Artificial Sequence
  Guide RNA
uacuuuucgcagaaaguuuc

SEQ ID NO: 11247 - RNA, 20 nt, Artificial Sequence
  Guide RNA
ucacguuuucuacuuuucgc

SEQ ID NO: 11248 - RNA, 20 nt, Artificial Sequence
  Guide RNA
ucagucacguuuucuacuuu

SEQ ID NO: 11249 - RNA, 20 nt, Artificial Sequence
  Guide RNA
uccaucagucacguuuucua

SEQ ID NO: 11250 - RNA, 20 nt, Artificial Sequence
  Guide RNA
ucuacuuuucgcagaaaguu

SEQ ID NO: 11251 - RNA, 20 nt, Artificial Sequence
  Guide RNA
ucugcgaaaaguagaaaacg

SEQ ID NO: 11252 - RNA, 20 nt, Artificial Sequence
  Guide RNA
ugaaacuuucugcgaaaagu

SEQ ID NO: 11253 - RNA, 20 nt, Artificial Sequence
  Guide RNA
ugcgaaaaguagaaaacgug

SEQ ID NO: 11254 - RNA, 20 nt, Artificial Sequence
  Guide RNA
uuccaucagucacguuuucu

SEQ ID NO: 11255 - RNA, 20 nt, Artificial Sequence
  Guide RNA
uucuacuuuucgcagaaagu

SEQ ID NO: 11256 - RNA, 20 nt, Artificial Sequence
  Guide RNA
uucugcgaaaaguagaaaac

SEQ ID NO: 11257 - RNA, 20 nt, Artificial Sequence
  Guide RNA
uuuccaucagucacguuuuc

SEQ ID NO: 11258 - RNA, 20 nt, Artificial Sequence
  Guide RNA
uuucuacuuuucgcagaaag

SEQ ID NO: 11259 - RNA, 20 nt, Artificial Sequence
  Guide RNA
uuucugcgaaaaguagaaaa

SEQ ID NO: 11260 - RNA, 20 nt, Artificial Sequence
  Guide RNA
uuuucuacuuuucgcagaaa

SEQ ID NO: 11261 - RNA, 21 nt, Artificial Sequence
  Guide RNA
aaaaguagaaaacgugacuga

SEQ ID NO: 11262 - RNA, 21 nt, Artificial Sequence
  Guide RNA
aaacuuucugcgaaaaguaga

SEQ ID NO: 11263 - RNA, 21 nt, Artificial Sequence
  Guide RNA
aaaguagaaaacgugacugau

SEQ ID NO: 11264 - RNA, 21 nt, Artificial Sequence
  Guide RNA
aacuuucugcgaaaaguagaa

SEQ ID NO: 11265 - RNA, 21 nt, Artificial Sequence
  Guide RNA
aaguagaaaacgugacugaug

SEQ ID NO: 11266 - RNA, 21 nt, Artificial Sequence
  Guide RNA
aaugaaacuuucugcgaaaag

SEQ ID NO: 11267 - RNA, 21 nt, Artificial Sequence
  Guide RNA
acguuuucuacuuuucgcaga

SEQ ID NO: 11268 - RNA, 21 nt, Artificial Sequence
  Guide RNA
acuuucugcgaaaaguagaaa

SEQ ID NO: 11269 - RNA, 21 nt, Artificial Sequence
  Guide RNA
aguagaaaacgugacugaugg

SEQ ID NO: 11270 - RNA, 21 nt, Artificial Sequence
  Guide RNA
agucacguuuucuacuuuucg

SEQ ID NO: 11271 - RNA, 21 nt, Artificial Sequence
  Guide RNA
aucagucacguuuucuacuuu

SEQ ID NO: 11272 - RNA, 21 nt, Artificial Sequence
  Guide RNA
augaaacuuucugcgaaaagu

SEQ ID NO: 11273 - RNA, 21 nt, Artificial Sequence
  Guide RNA
caaaugaaacuuucugcgaaa

SEQ ID NO: 11274 - RNA, 21 nt, Artificial Sequence
  Guide RNA
cacguuuucuacuuuucgcag

SEQ ID NO: 11275 - RNA, 21 nt, Artificial Sequence
  Guide RNA
cagucacguuuucuacuuuuc

SEQ ID NO: 11276 - RNA, 21 nt, Artificial Sequence
  Guide RNA
caucagucacguuuucuacuu

SEQ ID NO: 11277 - RNA, 21 nt, Artificial Sequence
  Guide RNA
ccaucagucacguuuucuacu

SEQ ID NO: 11278 - RNA, 21 nt, Artificial Sequence
  Guide RNA
cccuuuccaucagucacguuu

SEQ ID NO: 11279 - RNA, 21 nt, Artificial Sequence
  Guide RNA
ccuuuccaucagucacguuuu

SEQ ID NO: 11280 - RNA, 21 nt, Artificial Sequence
  Guide RNA
cgaaaaguagaaaacgugacu

SEQ ID NO: 11281 - RNA, 21 nt, Artificial Sequence
  Guide RNA
cguuuucuacuuuucgcagaa

SEQ ID NO: 11282 - RNA, 21 nt, Artificial Sequence
  Guide RNA
cuacuuuucgcagaaaguuuc

SEQ ID NO: 11283 - RNA, 21 nt, Artificial Sequence
  Guide RNA
cugcgaaaaguagaaaacgug

SEQ ID NO: 11284 - RNA, 21 nt, Artificial Sequence
  Guide RNA
cuuuccaucagucacguuuuc

SEQ ID NO: 11285 - RNA, 21 nt, Artificial Sequence
  Guide RNA
cuuucugcgaaaaguagaaaa

SEQ ID NO: 11286 - RNA, 21 nt, Artificial Sequence
  Guide RNA
gaaaaguagaaaacgugacug

SEQ ID NO: 11287 - RNA, 21 nt, Artificial Sequence
  Guide RNA
gaaacuuucugcgaaaaguag

SEQ ID NO: 11288 - RNA, 21 nt, Artificial Sequence
  Guide RNA
gcaaaugaaacuuucugcgaa

SEQ ID NO: 11289 - RNA, 21 nt, Artificial Sequence
  Guide RNA
gcgaaaaguagaaaacgugac

SEQ ID NO: 11290 - RNA, 21 nt, Artificial Sequence
  Guide RNA
guagaaaacgugacugaugga

SEQ ID NO: 11291 - RNA, 21 nt, Artificial Sequence
  Guide RNA
gucacguuuucuacuuuucgc

SEQ ID NO: 11292 - RNA, 21 nt, Artificial Sequence
  Guide RNA
guuuucuacuuuucgcagaaa

SEQ ID NO: 11293 - RNA, 21 nt, Artificial Sequence
  Guide RNA
uacuuuucgcagaaaguuuca

SEQ ID NO: 11294 - RNA, 21 nt, Artificial Sequence
  Guide RNA
ucacguuuucuacuuuucgca

SEQ ID NO: 11295 - RNA, 21 nt, Artificial Sequence
  Guide RNA
ucagucacguuuucuacuuuu

SEQ ID NO: 11296 - RNA, 21 nt, Artificial Sequence
  Guide RNA
uccaucagucacguuuucuac

SEQ ID NO: 11297 - RNA, 21 nt, Artificial Sequence
  Guide RNA
ucuacuuuucgcagaaaguuu

SEQ ID NO: 11298 - RNA, 21 nt, Artificial Sequence
  Guide RNA
ucugcgaaaaguagaaaacgu

SEQ ID NO: 11299 - RNA, 21 nt, Artificial Sequence
  Guide RNA
ugaaacuuucugcgaaaagua

SEQ ID NO: 11300 - RNA, 21 nt, Artificial Sequence
  Guide RNA
ugcgaaaaguagaaaacguga

SEQ ID NO: 11301 - RNA, 21 nt, Artificial Sequence
  Guide RNA
uuccaucagucacguuuucua

SEQ ID NO: 11302 - RNA, 21 nt, Artificial Sequence
  Guide RNA
uucuacuuuucgcagaaaguu

SEQ ID NO: 11303 - RNA, 21 nt, Artificial Sequence
  Guide RNA
uucugcgaaaaguagaaaacg

SEQ ID NO: 11304 - RNA, 21 nt, Artificial Sequence
  Guide RNA
uuuccaucagucacguuuucu

SEQ ID NO: 11305 - RNA, 21 nt, Artificial Sequence
  Guide RNA
uuucuacuuuucgcagaaagu

SEQ ID NO: 11306 - RNA, 21 nt, Artificial Sequence
  Guide RNA
uuucugcgaaaaguagaaaac

SEQ ID NO: 11307 - RNA, 21 nt, Artificial Sequence
  Guide RNA
uuuucuacuuuucgcagaaag

SEQ ID NO: 11308 - RNA, 22 nt, Artificial Sequence
  Guide RNA
aaaaguagaaaacgugacugau

SEQ ID NO: 11309 - RNA, 22 nt, Artificial Sequence
  Guide RNA
aaacuuucugcgaaaaguagaa

SEQ ID NO: 11310 - RNA, 22 nt, Artificial Sequence
  Guide RNA
aaaguagaaaacgugacugaug

SEQ ID NO: 11311 - RNA, 22 nt, Artificial Sequence
  Guide RNA
aaaugaaacuuucugcgaaaag

SEQ ID NO: 11312 - RNA, 22 nt, Artificial Sequence
  Guide RNA
aacuuucugcgaaaaguagaaa

SEQ ID NO: 11313 - RNA, 22 nt, Artificial Sequence
  Guide RNA
aaguagaaaacgugacugaugg

SEQ ID NO: 11314 - RNA, 22 nt, Artificial Sequence
  Guide RNA
aaugaaacuuucugcgaaaagu

SEQ ID NO: 11315 - RNA, 22 nt, Artificial Sequence
  Guide RNA
acguuuucuacuuuucgcagaa

SEQ ID NO: 11316 - RNA, 22 nt, Artificial Sequence
  Guide RNA
acuuucugcgaaaaguagaaaa

SEQ ID NO: 11317 - RNA, 22 nt, Artificial Sequence
  Guide RNA
agcaaaugaaacuuucugcgaa

SEQ ID NO: 11318 - RNA, 22 nt, Artificial Sequence
  Guide RNA
aguagaaaacgugacugaugga

SEQ ID NO: 11319 - RNA, 22 nt, Artificial Sequence
  Guide RNA
agucacguuuucuacuuuucgc

SEQ ID NO: 11320 - RNA, 22 nt, Artificial Sequence
  Guide RNA
aucagucacguuuucuacuuuu

SEQ ID NO: 11321 - RNA, 22 nt, Artificial Sequence
  Guide RNA
augaaacuuucugcgaaaagua

SEQ ID NO: 11322 - RNA, 22 nt, Artificial Sequence
  Guide RNA
caaaugaaacuuucugcgaaaa

SEQ ID NO: 11323 - RNA, 22 nt, Artificial Sequence
  Guide RNA
cacguuuucuacuuuucgcaga

SEQ ID NO: 11324 - RNA, 22 nt, Artificial Sequence
  Guide RNA
cagucacguuuucuacuuuucg

SEQ ID NO: 11325 - RNA, 22 nt, Artificial Sequence
  Guide RNA
caucagucacguuuucuacuuu

SEQ ID NO: 11326 - RNA, 22 nt, Artificial Sequence
  Guide RNA
ccaucagucacguuuucuacuu

SEQ ID NO: 11327 - RNA, 22 nt, Artificial Sequence
  Guide RNA
ccccuuuccaucagucacguuu

SEQ ID NO: 11328 - RNA, 22 nt, Artificial Sequence
  Guide RNA
cccuuuccaucagucacguuuu

SEQ ID NO: 11329 - RNA, 22 nt, Artificial Sequence
  Guide RNA
ccuuuccaucagucacguuuuc

SEQ ID NO: 11330 - RNA, 22 nt, Artificial Sequence
  Guide RNA
cgaaaaguagaaaacgugacug

SEQ ID NO: 11331 - RNA, 22 nt, Artificial Sequence
  Guide RNA
cguuuucuacuuuucgcagaaa

SEQ ID NO: 11332 - RNA, 22 nt, Artificial Sequence
  Guide RNA
cuacuuuucgcagaaaguuuca

SEQ ID NO: 11333 - RNA, 22 nt, Artificial Sequence
  Guide RNA
cugcgaaaaguagaaaacguga

SEQ ID NO: 11334 - RNA, 22 nt, Artificial Sequence
  Guide RNA
cuuuccaucagucacguuuucu

SEQ ID NO: 11335 - RNA, 22 nt, Artificial Sequence
  Guide RNA
cuuucugcgaaaaguagaaaac

SEQ ID NO: 11336 - RNA, 22 nt, Artificial Sequence
  Guide RNA
gaaaaguagaaaacgugacuga

SEQ ID NO: 11337 - RNA, 22 nt, Artificial Sequence
  Guide RNA
gaaacuuucugcgaaaaguaga

SEQ ID NO: 11338 - RNA, 22 nt, Artificial Sequence
  Guide RNA
gcaaaugaaacuuucugcgaaa

SEQ ID NO: 11339 - RNA, 22 nt, Artificial Sequence
  Guide RNA
gcgaaaaguagaaaacgugacu

SEQ ID NO: 11340 - RNA, 22 nt, Artificial Sequence
  Guide RNA
guagaaaacgugacugauggaa

SEQ ID NO: 11341 - RNA, 22 nt, Artificial Sequence
  Guide RNA
gucacguuuucuacuuuucgca

SEQ ID NO: 11342 - RNA, 22 nt, Artificial Sequence
  Guide RNA
guuuucuacuuuucgcagaaag

SEQ ID NO: 11343 - RNA, 22 nt, Artificial Sequence
  Guide RNA
uacuuuucgcagaaaguuucau

SEQ ID NO: 11344 - RNA, 22 nt, Artificial Sequence
  Guide RNA
ucacguuuucuacuuuucgcag

SEQ ID NO: 11345 - RNA, 22 nt, Artificial Sequence
  Guide RNA
ucagucacguuuucuacuuuuc

SEQ ID NO: 11346 - RNA, 22 nt, Artificial Sequence
  Guide RNA
uccaucagucacguuuucuacu

SEQ ID NO: 11347 - RNA, 22 nt, Artificial Sequence
  Guide RNA
ucuacuuuucgcagaaaguuuc

SEQ ID NO: 11348 - RNA, 22 nt, Artificial Sequence
  Guide RNA
ucugcgaaaaguagaaaacgug

SEQ ID NO: 11349 - RNA, 22 nt, Artificial Sequence
  Guide RNA
ugaaacuuucugcgaaaaguag

SEQ ID NO: 11350 - RNA, 22 nt, Artificial Sequence
  Guide RNA
ugcgaaaaguagaaaacgugac

SEQ ID NO: 11351 - RNA, 22 nt, Artificial Sequence
  Guide RNA
uuccaucagucacguuuucuac

SEQ ID NO: 11352 - RNA, 22 nt, Artificial Sequence
  Guide RNA
uucuacuuuucgcagaaaguuu

SEQ ID NO: 11353 - RNA, 22 nt, Artificial Sequence
  Guide RNA
uucugcgaaaaguagaaaacgu

SEQ ID NO: 11354 - RNA, 22 nt, Artificial Sequence
  Guide RNA
uuuccaucagucacguuuucua

SEQ ID NO: 11355 - RNA, 22 nt, Artificial Sequence
  Guide RNA
uuucuacuuuucgcagaaaguu

SEQ ID NO: 11356 - RNA, 22 nt, Artificial Sequence
  Guide RNA
uuucugcgaaaaguagaaaacg

SEQ ID NO: 11357 - RNA, 22 nt, Artificial Sequence
  Guide RNA
uuuucuacuuuucgcagaaagu

SEQ ID NO: 11358 - RNA, 20 nt, Artificial Sequence
  Guide RNA
acucuccgcaggaaagcgaa

SEQ ID NO: 11359 - RNA, 20 nt, Artificial Sequence
  Guide RNA
agacucuccgcaggaaagcg

SEQ ID NO: 11360 - RNA, 20 nt, Artificial Sequence
  Guide RNA
agccccuccgcagacucucc

SEQ ID NO: 11361 - RNA, 20 nt, Artificial Sequence
  Guide RNA
agccgagccccuccgcagac

SEQ ID NO: 11362 - RNA, 20 nt, Artificial Sequence
  Guide RNA
aguuucgcuuuccugcggag

SEQ ID NO: 11363 - RNA, 20 nt, Artificial Sequence
  Guide RNA
cagacucuccgcaggaaagc

SEQ ID NO: 11364 - RNA, 20 nt, Artificial Sequence
  Guide RNA
ccccuccgcagacucuccgc

SEQ ID NO: 11365 - RNA, 20 nt, Artificial Sequence
  Guide RNA
cccuccgcagacucuccgca

SEQ ID NO: 11366 - RNA, 20 nt, Artificial Sequence
  Guide RNA
ccgagccccuccgcagacuc

SEQ ID NO: 11367 - RNA, 20 nt, Artificial Sequence
  Guide RNA
ccgcagacucuccgcaggaa

SEQ ID NO: 11368 - RNA, 20 nt, Artificial Sequence
  Guide RNA
ccggguaguuucgcuuuccu

SEQ ID NO: 11369 - RNA, 20 nt, Artificial Sequence
  Guide RNA
ccuccgcagacucuccgcag

SEQ ID NO: 11370 - RNA, 20 nt, Artificial Sequence
  Guide RNA
ccugcggagagucugcggag

SEQ ID NO: 11371 - RNA, 20 nt, Artificial Sequence
  Guide RNA
cgagccccuccgcagacucu

SEQ ID NO: 11372 - RNA, 20 nt, Artificial Sequence
  Guide RNA
cgcagacucuccgcaggaaa

SEQ ID NO: 11373 - RNA, 20 nt, Artificial Sequence
  Guide RNA
cgcuuuccugcggagagucu

SEQ ID NO: 11374 - RNA, 20 nt, Artificial Sequence
  Guide RNA
cggagagucugcggaggggc

SEQ ID NO: 11375 - RNA, 20 nt, Artificial Sequence
  Guide RNA
cggguaguuucgcuuuccug

SEQ ID NO: 11376 - RNA, 20 nt, Artificial Sequence
  Guide RNA
cuccgcagacucuccgcagg

SEQ ID NO: 11377 - RNA, 20 nt, Artificial Sequence
  Guide RNA
cuccgcaggaaagcgaaacu

SEQ ID NO: 11378 - RNA, 20 nt, Artificial Sequence
  Guide RNA
cucuccgcaggaaagcgaaa

SEQ ID NO: 11379 - RNA, 20 nt, Artificial Sequence
  Guide RNA
cugcggagagucugcggagg

SEQ ID NO: 11380 - RNA, 20 nt, Artificial Sequence
  Guide RNA
cuuuccugcggagagucugc

SEQ ID NO: 11381 - RNA, 20 nt, Artificial Sequence
  Guide RNA
gacucuccgcaggaaagcga

SEQ ID NO: 11382 - RNA, 20 nt, Artificial Sequence
  Guide RNA
gagccccuccgcagacucuc

SEQ ID NO: 11383 - RNA, 20 nt, Artificial Sequence
  Guide RNA
gcagacucuccgcaggaaag

SEQ ID NO: 11384 - RNA, 20 nt, Artificial Sequence
  Guide RNA
gccccuccgcagacucuccg

SEQ ID NO: 11385 - RNA, 20 nt, Artificial Sequence
  Guide RNA
gccgagccccuccgcagacu

SEQ ID NO: 11386 - RNA, 20 nt, Artificial Sequence
  Guide RNA
gcggagagucugcggagggg

SEQ ID NO: 11387 - RNA, 20 nt, Artificial Sequence
  Guide RNA
gcuuuccugcggagagucug

SEQ ID NO: 11388 - RNA, 20 nt, Artificial Sequence
  Guide RNA
ggagagucugcggaggggcu

SEQ ID NO: 11389 - RNA, 20 nt, Artificial Sequence
  Guide RNA
ggguaguuucgcuuuccugc

SEQ ID NO: 11390 - RNA, 20 nt, Artificial Sequence
  Guide RNA
gguaguuucgcuuuccugcg

SEQ ID NO: 11391 - RNA, 20 nt, Artificial Sequence
  Guide RNA
guaguuucgcuuuccugcgg

SEQ ID NO: 11392 - RNA, 20 nt, Artificial Sequence
  Guide RNA
guuucgcuuuccugcggaga

SEQ ID NO: 11393 - RNA, 20 nt, Artificial Sequence
  Guide RNA
uaguuucgcuuuccugcgga

SEQ ID NO: 11394 - RNA, 20 nt, Artificial Sequence
  Guide RNA
uccgcagacucuccgcagga

SEQ ID NO: 11395 - RNA, 20 nt, Artificial Sequence
  Guide RNA
uccgcaggaaagcgaaacua

SEQ ID NO: 11396 - RNA, 20 nt, Artificial Sequence
  Guide RNA
uccugcggagagucugcgga

SEQ ID NO: 11397 - RNA, 20 nt, Artificial Sequence
  Guide RNA
ucgcuuuccugcggagaguc

SEQ ID NO: 11398 - RNA, 20 nt, Artificial Sequence
  Guide RNA
ucuccgcaggaaagcgaaac

SEQ ID NO: 11399 - RNA, 20 nt, Artificial Sequence
  Guide RNA
ugcggagagucugcggaggg

SEQ ID NO: 11400 - RNA, 20 nt, Artificial Sequence
  Guide RNA
uuccugcggagagucugcgg

SEQ ID NO: 11401 - RNA, 20 nt, Artificial Sequence
  Guide RNA
uucgcuuuccugcggagagu

SEQ ID NO: 11402 - RNA, 20 nt, Artificial Sequence
  Guide RNA
uuuccugcggagagucugcg

SEQ ID NO: 11403 - RNA, 20 nt, Artificial Sequence
  Guide RNA
uuucgcuuuccugcggagag

SEQ ID NO: 11404 - RNA, 21 nt, Artificial Sequence
  Guide RNA
acucuccgcaggaaagcgaaa

SEQ ID NO: 11405 - RNA, 21 nt, Artificial Sequence
  Guide RNA
agacucuccgcaggaaagcga

SEQ ID NO: 11406 - RNA, 21 nt, Artificial Sequence
  Guide RNA
agccccuccgcagacucuccg

SEQ ID NO: 11407 - RNA, 21 nt, Artificial Sequence
  Guide RNA
agccgagccccuccgcagacu

SEQ ID NO: 11408 - RNA, 21 nt, Artificial Sequence
  Guide RNA
aguuucgcuuuccugcggaga

SEQ ID NO: 11409 - RNA, 21 nt, Artificial Sequence
  Guide RNA
cagacucuccgcaggaaagcg

SEQ ID NO: 11410 - RNA, 21 nt, Artificial Sequence
  Guide RNA
cagccgagccccuccgcagac

SEQ ID NO: 11411 - RNA, 21 nt, Artificial Sequence
  Guide RNA
ccccuccgcagacucuccgca

SEQ ID NO: 11412 - RNA, 21 nt, Artificial Sequence
  Guide RNA
cccuccgcagacucuccgcag

SEQ ID NO: 11413 - RNA, 21 nt, Artificial Sequence
  Guide RNA
ccgagccccuccgcagacucu

SEQ ID NO: 11414 - RNA, 21 nt, Artificial Sequence
  Guide RNA
ccgcagacucuccgcaggaaa

SEQ ID NO: 11415 - RNA, 21 nt, Artificial Sequence
  Guide RNA
ccggguaguuucgcuuuccug

SEQ ID NO: 11416 - RNA, 21 nt, Artificial Sequence
  Guide RNA
ccuccgcagacucuccgcagg

SEQ ID NO: 11417 - RNA, 21 nt, Artificial Sequence
  Guide RNA
ccugcggagagucugcggagg

SEQ ID NO: 11418 - RNA, 21 nt, Artificial Sequence
  Guide RNA
cgagccccuccgcagacucuc

SEQ ID NO: 11419 - RNA, 21 nt, Artificial Sequence
  Guide RNA
cgcagacucuccgcaggaaag

SEQ ID NO: 11420 - RNA, 21 nt, Artificial Sequence
  Guide RNA
cgcuuuccugcggagagucug

SEQ ID NO: 11421 - RNA, 21 nt, Artificial Sequence
  Guide RNA
cggagagucugcggaggggcu

SEQ ID NO: 11422 - RNA, 21 nt, Artificial Sequence
  Guide RNA
cggguaguuucgcuuuccugc

SEQ ID NO: 11423 - RNA, 21 nt, Artificial Sequence
  Guide RNA
cuccgcagacucuccgcagga

SEQ ID NO: 11424 - RNA, 21 nt, Artificial Sequence
  Guide RNA
cuccgcaggaaagcgaaacua

SEQ ID NO: 11425 - RNA, 21 nt, Artificial Sequence
  Guide RNA
cucuccgcaggaaagcgaaac

SEQ ID NO: 11426 - RNA, 21 nt, Artificial Sequence
  Guide RNA
cugcggagagucugcggaggg

SEQ ID NO: 11427 - RNA, 21 nt, Artificial Sequence
  Guide RNA
cuuuccugcggagagucugcg

SEQ ID NO: 11428 - RNA, 21 nt, Artificial Sequence
  Guide RNA
gacucuccgcaggaaagcgaa

SEQ ID NO: 11429 - RNA, 21 nt, Artificial Sequence
  Guide RNA
gagccccuccgcagacucucc

SEQ ID NO: 11430 - RNA, 21 nt, Artificial Sequence
  Guide RNA
gcagacucuccgcaggaaagc

SEQ ID NO: 11431 - RNA, 21 nt, Artificial Sequence
  Guide RNA
gccccuccgcagacucuccgc

SEQ ID NO: 11432 - RNA, 21 nt, Artificial Sequence
  Guide RNA
gccgagccccuccgcagacuc

SEQ ID NO: 11433 - RNA, 21 nt, Artificial Sequence
  Guide RNA
gccggguaguuucgcuuuccu

SEQ ID NO: 11434 - RNA, 21 nt, Artificial Sequence
  Guide RNA
gcggagagucugcggaggggc

SEQ ID NO: 11435 - RNA, 21 nt, Artificial Sequence
  Guide RNA
gcuuuccugcggagagucugc

SEQ ID NO: 11436 - RNA, 21 nt, Artificial Sequence
  Guide RNA
ggagagucugcggaggggcuc

SEQ ID NO: 11437 - RNA, 21 nt, Artificial Sequence
  Guide RNA
ggguaguuucgcuuuccugcg

SEQ ID NO: 11438 - RNA, 21 nt, Artificial Sequence
  Guide RNA
gguaguuucgcuuuccugcgg

SEQ ID NO: 11439 - RNA, 21 nt, Artificial Sequence
  Guide RNA
guaguuucgcuuuccugcgga

SEQ ID NO: 11440 - RNA, 21 nt, Artificial Sequence
  Guide RNA
guuucgcuuuccugcggagag

SEQ ID NO: 11441 - RNA, 21 nt, Artificial Sequence
  Guide RNA
uaguuucgcuuuccugcggag

SEQ ID NO: 11442 - RNA, 21 nt, Artificial Sequence
  Guide RNA
uccgcagacucuccgcaggaa

SEQ ID NO: 11443 - RNA, 21 nt, Artificial Sequence
  Guide RNA
uccgcaggaaagcgaaacuac

SEQ ID NO: 11444 - RNA, 21 nt, Artificial Sequence
  Guide RNA
uccugcggagagucugcggag

SEQ ID NO: 11445 - RNA, 21 nt, Artificial Sequence
  Guide RNA
ucgcuuuccugcggagagucu

SEQ ID NO: 11446 - RNA, 21 nt, Artificial Sequence
  Guide RNA
ucuccgcaggaaagcgaaacu

SEQ ID NO: 11447 - RNA, 21 nt, Artificial Sequence
  Guide RNA
ugcggagagucugcggagggg

SEQ ID NO: 11448 - RNA, 21 nt, Artificial Sequence
  Guide RNA
uuccugcggagagucugcgga

SEQ ID NO: 11449 - RNA, 21 nt, Artificial Sequence
  Guide RNA
uucgcuuuccugcggagaguc

SEQ ID NO: 11450 - RNA, 21 nt, Artificial Sequence
  Guide RNA
uuuccugcggagagucugcgg

SEQ ID NO: 11451 - RNA, 21 nt, Artificial Sequence
  Guide RNA
uuucgcuuuccugcggagagu

SEQ ID NO: 11452 - RNA, 22 nt, Artificial Sequence
  Guide RNA
acucuccgcaggaaagcgaaac

SEQ ID NO: 11453 - RNA, 22 nt, Artificial Sequence
  Guide RNA
agacucuccgcaggaaagcgaa

SEQ ID NO: 11454 - RNA, 22 nt, Artificial Sequence
  Guide RNA
agccccuccgcagacucuccgc

SEQ ID NO: 11455 - RNA, 22 nt, Artificial Sequence
  Guide RNA
agccgagccccuccgcagacuc

SEQ ID NO: 11456 - RNA, 22 nt, Artificial Sequence
  Guide RNA
aguuucgcuuuccugcggagag

SEQ ID NO: 11457 - RNA, 22 nt, Artificial Sequence
  Guide RNA
cagacucuccgcaggaaagcga

SEQ ID NO: 11458 - RNA, 22 nt, Artificial Sequence
  Guide RNA
cagccgagccccuccgcagacu

SEQ ID NO: 11459 - RNA, 22 nt, Artificial Sequence
  Guide RNA
ccccuccgcagacucuccgcag

SEQ ID NO: 11460 - RNA, 22 nt, Artificial Sequence
  Guide RNA
cccuccgcagacucuccgcagg

SEQ ID NO: 11461 - RNA, 22 nt, Artificial Sequence
  Guide RNA
ccgagccccuccgcagacucuc

SEQ ID NO: 11462 - RNA, 22 nt, Artificial Sequence
  Guide RNA
ccgcagacucuccgcaggaaag

SEQ ID NO: 11463 - RNA, 22 nt, Artificial Sequence
  Guide RNA
ccggguaguuucgcuuuccugc

SEQ ID NO: 11464 - RNA, 22 nt, Artificial Sequence
  Guide RNA
ccuccgcagacucuccgcagga

SEQ ID NO: 11465 - RNA, 22 nt, Artificial Sequence
  Guide RNA
ccugcggagagucugcggaggg

SEQ ID NO: 11466 - RNA, 22 nt, Artificial Sequence
  Guide RNA
cgagccccuccgcagacucucc

SEQ ID NO: 11467 - RNA, 22 nt, Artificial Sequence
  Guide RNA
cgcagacucuccgcaggaaagc

SEQ ID NO: 11468 - RNA, 22 nt, Artificial Sequence
  Guide RNA
cgcuuuccugcggagagucugc

SEQ ID NO: 11469 - RNA, 22 nt, Artificial Sequence
  Guide RNA
cggagagucugcggaggggcuc

SEQ ID NO: 11470 - RNA, 22 nt, Artificial Sequence
  Guide RNA
cggguaguuucgcuuuccugcg

SEQ ID NO: 11471 - RNA, 22 nt, Artificial Sequence
  Guide RNA
cuccgcagacucuccgcaggaa

SEQ ID NO: 11472 - RNA, 22 nt, Artificial Sequence
  Guide RNA
cuccgcaggaaagcgaaacuac

SEQ ID NO: 11473 - RNA, 22 nt, Artificial Sequence
  Guide RNA
cucuccgcaggaaagcgaaacu

SEQ ID NO: 11474 - RNA, 22 nt, Artificial Sequence
  Guide RNA
cugcggagagucugcggagggg

SEQ ID NO: 11475 - RNA, 22 nt, Artificial Sequence
  Guide RNA
cuuuccugcggagagucugcgg

SEQ ID NO: 11476 - RNA, 22 nt, Artificial Sequence
  Guide RNA
gacucuccgcaggaaagcgaaa

SEQ ID NO: 11477 - RNA, 22 nt, Artificial Sequence
  Guide RNA
gagccccuccgcagacucuccg

SEQ ID NO: 11478 - RNA, 22 nt, Artificial Sequence
  Guide RNA
gcagacucuccgcaggaaagcg

SEQ ID NO: 11479 - RNA, 22 nt, Artificial Sequence
  Guide RNA
gcagccgagccccuccgcagac

SEQ ID NO: 11480 - RNA, 22 nt, Artificial Sequence
  Guide RNA
gccccuccgcagacucuccgca

SEQ ID NO: 11481 - RNA, 22 nt, Artificial Sequence
  Guide RNA
gccgagccccuccgcagacucu

SEQ ID NO: 11482 - RNA, 22 nt, Artificial Sequence
  Guide RNA
gccggguaguuucgcuuuccug

SEQ ID NO: 11483 - RNA, 22 nt, Artificial Sequence
  Guide RNA
gcggagagucugcggaggggcu

SEQ ID NO: 11484 - RNA, 22 nt, Artificial Sequence
  Guide RNA
gcuuuccugcggagagucugcg

SEQ ID NO: 11485 - RNA, 22 nt, Artificial Sequence
  Guide RNA
ggagagucugcggaggggcucg

SEQ ID NO: 11486 - RNA, 22 nt, Artificial Sequence
  Guide RNA
ggguaguuucgcuuuccugcgg

SEQ ID NO: 11487 - RNA, 22 nt, Artificial Sequence
  Guide RNA
gguaguuucgcuuuccugcgga

SEQ ID NO: 11488 - RNA, 22 nt, Artificial Sequence
  Guide RNA
guaguuucgcuuuccugcggag

SEQ ID NO: 11489 - RNA, 22 nt, Artificial Sequence
  Guide RNA
guuucgcuuuccugcggagagu

SEQ ID NO: 11490 - RNA, 22 nt, Artificial Sequence
  Guide RNA
uaguuucgcuuuccugcggaga

SEQ ID NO: 11491 - RNA, 22 nt, Artificial Sequence
  Guide RNA
uccgcagacucuccgcaggaaa

SEQ ID NO: 11492 - RNA, 22 nt, Artificial Sequence
  Guide RNA
uccgcaggaaagcgaaacuacc

SEQ ID NO: 11493 - RNA, 22 nt, Artificial Sequence
  Guide RNA
uccugcggagagucugcggagg

SEQ ID NO: 11494 - RNA, 22 nt, Artificial Sequence
  Guide RNA
ucgcuuuccugcggagagucug

SEQ ID NO: 11495 - RNA, 22 nt, Artificial Sequence
  Guide RNA
ucuccgcaggaaagcgaaacua

SEQ ID NO: 11496 - RNA, 22 nt, Artificial Sequence
  Guide RNA
ugccggguaguuucgcuuuccu

SEQ ID NO: 11497 - RNA, 22 nt, Artificial Sequence
  Guide RNA
ugcggagagucugcggaggggc

SEQ ID NO: 11498 - RNA, 22 nt, Artificial Sequence
  Guide RNA
uuccugcggagagucugcggag

SEQ ID NO: 11499 - RNA, 22 nt, Artificial Sequence
  Guide RNA
uucgcuuuccugcggagagucu

SEQ ID NO: 11500 - RNA, 22 nt, Artificial Sequence
  Guide RNA
uuuccugcggagagucugcgga

SEQ ID NO: 11501 - RNA, 22 nt, Artificial Sequence
  Guide RNA
uuucgcuuuccugcggagaguc

SEQ ID NO: 11502 - RNA, 20 nt, Artificial Sequence
  Guide RNA
aaacuacccggcagaagaaa

SEQ ID NO: 11503 - RNA, 20 nt, Artificial Sequence
  Guide RNA
aaagcgaaacuacccggcag

SEQ ID NO: 11504 - RNA, 20 nt, Artificial Sequence
  Guide RNA
aacuacccggcagaagaaaa

SEQ ID NO: 11505 - RNA, 20 nt, Artificial Sequence
  Guide RNA
aagcgaaacuacccggcaga

SEQ ID NO: 11506 - RNA, 20 nt, Artificial Sequence
  Guide RNA
acccggcagaagaaaaggca

SEQ ID NO: 11507 - RNA, 20 nt, Artificial Sequence
  Guide RNA
acuacccggcagaagaaaag

SEQ ID NO: 11508 - RNA, 20 nt, Artificial Sequence
  Guide RNA
agaagaaaaggcagcgcugg

SEQ ID NO: 11509 - RNA, 20 nt, Artificial Sequence
  Guide RNA
agcgaaacuacccggcagaa

SEQ ID NO: 11510 - RNA, 20 nt, Artificial Sequence
  Guide RNA
agcgcugccuuuucuucugc

SEQ ID NO: 11511 - RNA, 20 nt, Artificial Sequence
  Guide RNA
aggaaagcgaaacuacccgg

SEQ ID NO: 11512 - RNA, 20 nt, Artificial Sequence
  Guide RNA
cagaagaaaaggcagcgcug

SEQ ID NO: 11513 - RNA, 20 nt, Artificial Sequence
  Guide RNA
cagcgcugccuuuucuucug

SEQ ID NO: 11514 - RNA, 20 nt, Artificial Sequence
  Guide RNA
ccagcgcugccuuuucuucu

SEQ ID NO: 11515 - RNA, 20 nt, Artificial Sequence
  Guide RNA
cccggcagaagaaaaggcag

SEQ ID NO: 11516 - RNA, 20 nt, Artificial Sequence
  Guide RNA
ccggcagaagaaaaggcagc

SEQ ID NO: 11517 - RNA, 20 nt, Artificial Sequence
  Guide RNA
ccuuuucuucugccggguag

SEQ ID NO: 11518 - RNA, 20 nt, Artificial Sequence
  Guide RNA
cgaaacuacccggcagaaga

SEQ ID NO: 11519 - RNA, 20 nt, Artificial Sequence
  Guide RNA
cgccagcgcugccuuuucuu

SEQ ID NO: 11520 - RNA, 20 nt, Artificial Sequence
  Guide RNA
cgcugccuuuucuucugccg

SEQ ID NO: 11521 - RNA, 20 nt, Artificial Sequence
  Guide RNA
cggcagaagaaaaggcagcg

SEQ ID NO: 11522 - RNA, 20 nt, Artificial Sequence
  Guide RNA
cgggcgccagcgcugccuuu

SEQ ID NO: 11523 - RNA, 20 nt, Artificial Sequence
  Guide RNA
cuacccggcagaagaaaagg

SEQ ID NO: 11524 - RNA, 20 nt, Artificial Sequence
  Guide RNA
cugccuuuucuucugccggg

SEQ ID NO: 11525 - RNA, 20 nt, Artificial Sequence
  Guide RNA
cuucugccggguaguuucgc

SEQ ID NO: 11526 - RNA, 20 nt, Artificial Sequence
  Guide RNA
cuuuucuucugccggguagu

SEQ ID NO: 11527 - RNA, 20 nt, Artificial Sequence
  Guide RNA
gaaacuacccggcagaagaa

SEQ ID NO: 11528 - RNA, 20 nt, Artificial Sequence
  Guide RNA
gaaagcgaaacuacccggca

SEQ ID NO: 11529 - RNA, 20 nt, Artificial Sequence
  Guide RNA
gaagaaaaggcagcgcuggc

SEQ ID NO: 11530 - RNA, 20 nt, Artificial Sequence
  Guide RNA
gcagaagaaaaggcagcgcu

SEQ ID NO: 11531 - RNA, 20 nt, Artificial Sequence
  Guide RNA
gccagcgcugccuuuucuuc

SEQ ID NO: 11532 - RNA, 20 nt, Artificial Sequence
  Guide RNA
gccuuuucuucugccgggua

SEQ ID NO: 11533 - RNA, 20 nt, Artificial Sequence
  Guide RNA
gcgaaacuacccggcagaag

SEQ ID NO: 11534 - RNA, 20 nt, Artificial Sequence
  Guide RNA
gcgccagcgcugccuuuucu

SEQ ID NO: 11535 - RNA, 20 nt, Artificial Sequence
  Guide RNA
gcgcugccuuuucuucugcc

SEQ ID NO: 11536 - RNA, 20 nt, Artificial Sequence
  Guide RNA
gcugccuuuucuucugccgg

SEQ ID NO: 11537 - RNA, 20 nt, Artificial Sequence
  Guide RNA
ggaaagcgaaacuacccggc

SEQ ID NO: 11538 - RNA, 20 nt, Artificial Sequence
  Guide RNA
ggcagaagaaaaggcagcgc

SEQ ID NO: 11539 - RNA, 20 nt, Artificial Sequence
  Guide RNA
ggcgccagcgcugccuuuuc

SEQ ID NO: 11540 - RNA, 20 nt, Artificial Sequence
  Guide RNA
gggcgccagcgcugccuuuu

SEQ ID NO: 11541 - RNA, 20 nt, Artificial Sequence
  Guide RNA
uacccggcagaagaaaaggc

SEQ ID NO: 11542 - RNA, 20 nt, Artificial Sequence
  Guide RNA
ucuucugccggguaguuucg

SEQ ID NO: 11543 - RNA, 20 nt, Artificial Sequence
  Guide RNA
ugccuuuucuucugccgggu

SEQ ID NO: 11544 - RNA, 20 nt, Artificial Sequence
  Guide RNA
uucugccggguaguuucgcu

SEQ ID NO: 11545 - RNA, 20 nt, Artificial Sequence
  Guide RNA
uucuucugccggguaguuuc

SEQ ID NO: 11546 - RNA, 20 nt, Artificial Sequence
  Guide RNA
uuucuucugccggguaguuu

SEQ ID NO: 11547 - RNA, 20 nt, Artificial Sequence
  Guide RNA
uuuucuucugccggguaguu

SEQ ID NO: 11548 - RNA, 21 nt, Artificial Sequence
  Guide RNA
aaacuacccggcagaagaaaa

SEQ ID NO: 11549 - RNA, 21 nt, Artificial Sequence
  Guide RNA
aaagcgaaacuacccggcaga

SEQ ID NO: 11550 - RNA, 21 nt, Artificial Sequence
  Guide RNA
aacuacccggcagaagaaaag

SEQ ID NO: 11551 - RNA, 21 nt, Artificial Sequence
  Guide RNA
aagcgaaacuacccggcagaa

SEQ ID NO: 11552 - RNA, 21 nt, Artificial Sequence
  Guide RNA
acccggcagaagaaaaggcag

SEQ ID NO: 11553 - RNA, 21 nt, Artificial Sequence
  Guide RNA
acuacccggcagaagaaaagg

SEQ ID NO: 11554 - RNA, 21 nt, Artificial Sequence
  Guide RNA
agaagaaaaggcagcgcuggc

SEQ ID NO: 11555 - RNA, 21 nt, Artificial Sequence
  Guide RNA
agcgaaacuacccggcagaag

SEQ ID NO: 11556 - RNA, 21 nt, Artificial Sequence
  Guide RNA
agcgcugccuuuucuucugcc

SEQ ID NO: 11557 - RNA, 21 nt, Artificial Sequence
  Guide RNA
aggaaagcgaaacuacccggc

SEQ ID NO: 11558 - RNA, 21 nt, Artificial Sequence
  Guide RNA
cagaagaaaaggcagcgcugg

SEQ ID NO: 11559 - RNA, 21 nt, Artificial Sequence
  Guide RNA
cagcgcugccuuuucuucugc

SEQ ID NO: 11560 - RNA, 21 nt, Artificial Sequence
  Guide RNA
caggaaagcgaaacuacccgg

SEQ ID NO: 11561 - RNA, 21 nt, Artificial Sequence
  Guide RNA
ccagcgcugccuuuucuucug

SEQ ID NO: 11562 - RNA, 21 nt, Artificial Sequence
  Guide RNA
cccggcagaagaaaaggcagc

SEQ ID NO: 11563 - RNA, 21 nt, Artificial Sequence
  Guide RNA
ccggcagaagaaaaggcagcg

SEQ ID NO: 11564 - RNA, 21 nt, Artificial Sequence
  Guide RNA
ccgggcgccagcgcugccuuu

SEQ ID NO: 11565 - RNA, 21 nt, Artificial Sequence
  Guide RNA
ccuuuucuucugccggguagu

SEQ ID NO: 11566 - RNA, 21 nt, Artificial Sequence
  Guide RNA
cgaaacuacccggcagaagaa

SEQ ID NO: 11567 - RNA, 21 nt, Artificial Sequence
  Guide RNA
cgccagcgcugccuuuucuuc

SEQ ID NO: 11568 - RNA, 21 nt, Artificial Sequence
  Guide RNA
cgcugccuuuucuucugccgg

SEQ ID NO: 11569 - RNA, 21 nt, Artificial Sequence
  Guide RNA
cggcagaagaaaaggcagcgc

SEQ ID NO: 11570 - RNA, 21 nt, Artificial Sequence
  Guide RNA
cgggcgccagcgcugccuuuu

SEQ ID NO: 11571 - RNA, 21 nt, Artificial Sequence
  Guide RNA
cuacccggcagaagaaaaggc

SEQ ID NO: 11572 - RNA, 21 nt, Artificial Sequence
  Guide RNA
cugccuuuucuucugccgggu

SEQ ID NO: 11573 - RNA, 21 nt, Artificial Sequence
  Guide RNA
cuucugccggguaguuucgcu

SEQ ID NO: 11574 - RNA, 21 nt, Artificial Sequence
  Guide RNA
cuuuucuucugccggguaguu

SEQ ID NO: 11575 - RNA, 21 nt, Artificial Sequence
  Guide RNA
gaaacuacccggcagaagaaa

SEQ ID NO: 11576 - RNA, 21 nt, Artificial Sequence
  Guide RNA
gaaagcgaaacuacccggcag

SEQ ID NO: 11577 - RNA, 21 nt, Artificial Sequence
  Guide RNA
gaagaaaaggcagcgcuggcg

SEQ ID NO: 11578 - RNA, 21 nt, Artificial Sequence
  Guide RNA
gcagaagaaaaggcagcgcug

SEQ ID NO: 11579 - RNA, 21 nt, Artificial Sequence
  Guide RNA
gccagcgcugccuuuucuucu

SEQ ID NO: 11580 - RNA, 21 nt, Artificial Sequence
  Guide RNA
gccuuuucuucugccggguag

SEQ ID NO: 11581 - RNA, 21 nt, Artificial Sequence
  Guide RNA
gcgaaacuacccggcagaaga

SEQ ID NO: 11582 - RNA, 21 nt, Artificial Sequence
  Guide RNA
gcgccagcgcugccuuuucuu

SEQ ID NO: 11583 - RNA, 21 nt, Artificial Sequence
  Guide RNA
gcgcugccuuuucuucugccg

SEQ ID NO: 11584 - RNA, 21 nt, Artificial Sequence
  Guide RNA
gcugccuuuucuucugccggg

SEQ ID NO: 11585 - RNA, 21 nt, Artificial Sequence
  Guide RNA
ggaaagcgaaacuacccggca

SEQ ID NO: 11586 - RNA, 21 nt, Artificial Sequence
  Guide RNA
ggcagaagaaaaggcagcgcu

SEQ ID NO: 11587 - RNA, 21 nt, Artificial Sequence
  Guide RNA
ggcgccagcgcugccuuuucu

SEQ ID NO: 11588 - RNA, 21 nt, Artificial Sequence
  Guide RNA
gggcgccagcgcugccuuuuc

SEQ ID NO: 11589 - RNA, 21 nt, Artificial Sequence
  Guide RNA
uacccggcagaagaaaaggca

SEQ ID NO: 11590 - RNA, 21 nt, Artificial Sequence
  Guide RNA
ucuucugccggguaguuucgc

SEQ ID NO: 11591 - RNA, 21 nt, Artificial Sequence
  Guide RNA
ugccuuuucuucugccgggua

SEQ ID NO: 11592 - RNA, 21 nt, Artificial Sequence
  Guide RNA
uucugccggguaguuucgcuu

SEQ ID NO: 11593 - RNA, 21 nt, Artificial Sequence
  Guide RNA
uucuucugccggguaguuucg

SEQ ID NO: 11594 - RNA, 21 nt, Artificial Sequence
  Guide RNA
uuucuucugccggguaguuuc

SEQ ID NO: 11595 - RNA, 21 nt, Artificial Sequence
  Guide RNA
uuuucuucugccggguaguuu

SEQ ID NO: 11596 - RNA, 22 nt, Artificial Sequence
  Guide RNA
aaacuacccggcagaagaaaag

SEQ ID NO: 11597 - RNA, 22 nt, Artificial Sequence
  Guide RNA
aaagcgaaacuacccggcagaa

SEQ ID NO: 11598 - RNA, 22 nt, Artificial Sequence
  Guide RNA
aacuacccggcagaagaaaagg

SEQ ID NO: 11599 - RNA, 22 nt, Artificial Sequence
  Guide RNA
aagcgaaacuacccggcagaag

SEQ ID NO: 11600 - RNA, 22 nt, Artificial Sequence
  Guide RNA
acccggcagaagaaaaggcagc

SEQ ID NO: 11601 - RNA, 22 nt, Artificial Sequence
  Guide RNA
acuacccggcagaagaaaaggc

SEQ ID NO: 11602 - RNA, 22 nt, Artificial Sequence
  Guide RNA
agaagaaaaggcagcgcuggcg

SEQ ID NO: 11603 - RNA, 22 nt, Artificial Sequence
  Guide RNA
agcgaaacuacccggcagaaga

SEQ ID NO: 11604 - RNA, 22 nt, Artificial Sequence
  Guide RNA
agcgcugccuuuucuucugccg

SEQ ID NO: 11605 - RNA, 22 nt, Artificial Sequence
  Guide RNA
aggaaagcgaaacuacccggca

SEQ ID NO: 11606 - RNA, 22 nt, Artificial Sequence
  Guide RNA
cagaagaaaaggcagcgcuggc

SEQ ID NO: 11607 - RNA, 22 nt, Artificial Sequence
  Guide RNA
cagcgcugccuuuucuucugcc

SEQ ID NO: 11608 - RNA, 22 nt, Artificial Sequence
  Guide RNA
caggaaagcgaaacuacccggc

SEQ ID NO: 11609 - RNA, 22 nt, Artificial Sequence
  Guide RNA
ccagcgcugccuuuucuucugc

SEQ ID NO: 11610 - RNA, 22 nt, Artificial Sequence
  Guide RNA
cccggcagaagaaaaggcagcg

SEQ ID NO: 11611 - RNA, 22 nt, Artificial Sequence
  Guide RNA
ccggcagaagaaaaggcagcgc

SEQ ID NO: 11612 - RNA, 22 nt, Artificial Sequence
  Guide RNA
ccgggcgccagcgcugccuuuu

SEQ ID NO: 11613 - RNA, 22 nt, Artificial Sequence
  Guide RNA
ccuuuucuucugccggguaguu

SEQ ID NO: 11614 - RNA, 22 nt, Artificial Sequence
  Guide RNA
cgaaacuacccggcagaagaaa

SEQ ID NO: 11615 - RNA, 22 nt, Artificial Sequence
  Guide RNA
cgccagcgcugccuuuucuucu

SEQ ID NO: 11616 - RNA, 22 nt, Artificial Sequence
  Guide RNA
cgcugccuuuucuucugccggg

SEQ ID NO: 11617 - RNA, 22 nt, Artificial Sequence
  Guide RNA
cggcagaagaaaaggcagcgcu

SEQ ID NO: 11618 - RNA, 22 nt, Artificial Sequence
  Guide RNA
cgggcgccagcgcugccuuuuc

SEQ ID NO: 11619 - RNA, 22 nt, Artificial Sequence
  Guide RNA
cuacccggcagaagaaaaggca

SEQ ID NO: 11620 - RNA, 22 nt, Artificial Sequence
  Guide RNA
cugccuuuucuucugccgggua

SEQ ID NO: 11621 - RNA, 22 nt, Artificial Sequence
  Guide RNA
cuucugccggguaguuucgcuu

SEQ ID NO: 11622 - RNA, 22 nt, Artificial Sequence
  Guide RNA
cuuuucuucugccggguaguuu

SEQ ID NO: 11623 - RNA, 22 nt, Artificial Sequence
  Guide RNA
gaaacuacccggcagaagaaaa

SEQ ID NO: 11624 - RNA, 22 nt, Artificial Sequence
  Guide RNA
gaaagcgaaacuacccggcaga

SEQ ID NO: 11625 - RNA, 22 nt, Artificial Sequence
  Guide RNA
gaagaaaaggcagcgcuggcgc

SEQ ID NO: 11626 - RNA, 22 nt, Artificial Sequence
  Guide RNA
gcagaagaaaaggcagcgcugg

SEQ ID NO: 11627 - RNA, 22 nt, Artificial Sequence
  Guide RNA
gcaggaaagcgaaacuacccgg

SEQ ID NO: 11628 - RNA, 22 nt, Artificial Sequence
  Guide RNA
gccagcgcugccuuuucuucug

SEQ ID NO: 11629 - RNA, 22 nt, Artificial Sequence
  Guide RNA
gccgggcgccagcgcugccuuu

SEQ ID NO: 11630 - RNA, 22 nt, Artificial Sequence
  Guide RNA
gccuuuucuucugccggguagu

SEQ ID NO: 11631 - RNA, 22 nt, Artificial Sequence
  Guide RNA
gcgaaacuacccggcagaagaa

SEQ ID NO: 11632 - RNA, 22 nt, Artificial Sequence
  Guide RNA
gcgccagcgcugccuuuucuuc

SEQ ID NO: 11633 - RNA, 22 nt, Artificial Sequence
  Guide RNA
gcgcugccuuuucuucugccgg

SEQ ID NO: 11634 - RNA, 22 nt, Artificial Sequence
  Guide RNA
gcugccuuuucuucugccgggu

SEQ ID NO: 11635 - RNA, 22 nt, Artificial Sequence
  Guide RNA
ggaaagcgaaacuacccggcag

SEQ ID NO: 11636 - RNA, 22 nt, Artificial Sequence
  Guide RNA
ggcagaagaaaaggcagcgcug

SEQ ID NO: 11637 - RNA, 22 nt, Artificial Sequence
  Guide RNA
ggcgccagcgcugccuuuucuu

SEQ ID NO: 11638 - RNA, 22 nt, Artificial Sequence
  Guide RNA
gggcgccagcgcugccuuuucu

SEQ ID NO: 11639 - RNA, 22 nt, Artificial Sequence
  Guide RNA
uacccggcagaagaaaaggcag

SEQ ID NO: 11640 - RNA, 22 nt, Artificial Sequence
  Guide RNA
ucuucugccggguaguuucgcu

SEQ ID NO: 11641 - RNA, 22 nt, Artificial Sequence
  Guide RNA
ugccuuuucuucugccggguag

SEQ ID NO: 11642 - RNA, 22 nt, Artificial Sequence
  Guide RNA
uucugccggguaguuucgcuuu

SEQ ID NO: 11643 - RNA, 22 nt, Artificial Sequence
  Guide RNA
uucuucugccggguaguuucgc

SEQ ID NO: 11644 - RNA, 22 nt, Artificial Sequence
  Guide RNA
uuucuucugccggguaguuucg

SEQ ID NO: 11645 - RNA, 22 nt, Artificial Sequence
  Guide RNA
uuuucuucugccggguaguuuc

SEQ ID NO: 11646 - RNA, 20 nt, Artificial Sequence
  Guide RNA
aaacuaaugaaggccuauuc

SEQ ID NO: 11647 - RNA, 20 nt, Artificial Sequence
  Guide RNA
aaacuagugaaggccuauuc

SEQ ID NO: 11648 - RNA, 20 nt, Artificial Sequence
  Guide RNA
aacuaaugaaggccuauuca

SEQ ID NO: 11649 - RNA, 20 nt, Artificial Sequence
  Guide RNA
aacuagugaaggccuauuca

SEQ ID NO: 11650 - RNA, 20 nt, Artificial Sequence
  Guide RNA
aagccacugacuuccuaaac

SEQ ID NO: 11651 - RNA, 20 nt, Artificial Sequence
  Guide RNA
aagugacuuugaauaggccu

SEQ ID NO: 11652 - RNA, 20 nt, Artificial Sequence
  Guide RNA
aauaggccuucacuaguuua

SEQ ID NO: 11653 - RNA, 20 nt, Artificial Sequence
  Guide RNA
aauaggccuucauuaguuua

SEQ ID NO: 11654 - RNA, 20 nt, Artificial Sequence
  Guide RNA
aaugaaggccuauucaaagu

SEQ ID NO: 11655 - RNA, 20 nt, Artificial Sequence
  Guide RNA
acuaaugaaggccuauucaa

SEQ ID NO: 11656 - RNA, 20 nt, Artificial Sequence
  Guide RNA
acuagugaaggccuauucaa

SEQ ID NO: 11657 - RNA, 20 nt, Artificial Sequence
  Guide RNA
acuaguuuaggaagucagug

SEQ ID NO: 11658 - RNA, 20 nt, Artificial Sequence
  Guide RNA
acugacuuccuaaacuaaug

SEQ ID NO: 11659 - RNA, 20 nt, Artificial Sequence
  Guide RNA
acugacuuccuaaacuagug

SEQ ID NO: 11660 - RNA, 20 nt, Artificial Sequence
  Guide RNA
acuuccuaaacuaaugaagg

SEQ ID NO: 11661 - RNA, 20 nt, Artificial Sequence
  Guide RNA
acuuccuaaacuagugaagg

SEQ ID NO: 11662 - RNA, 20 nt, Artificial Sequence
  Guide RNA
acuuugaauaggccuucacu

SEQ ID NO: 11663 - RNA, 20 nt, Artificial Sequence
  Guide RNA
acuuugaauaggccuucauu

SEQ ID NO: 11664 - RNA, 20 nt, Artificial Sequence
  Guide RNA
agccacugacuuccuaaacu

SEQ ID NO: 11665 - RNA, 20 nt, Artificial Sequence
  Guide RNA
aggccuucacuaguuuagga

SEQ ID NO: 11666 - RNA, 20 nt, Artificial Sequence
  Guide RNA
aggccuucauuaguuuagga

SEQ ID NO: 11667 - RNA, 20 nt, Artificial Sequence
  Guide RNA
agugaaggccuauucaaagu

SEQ ID NO: 11668 - RNA, 20 nt, Artificial Sequence
  Guide RNA
agugacuuugaauaggccuu

SEQ ID NO: 11669 - RNA, 20 nt, Artificial Sequence
  Guide RNA
auaggccuucacuaguuuag

SEQ ID NO: 11670 - RNA, 20 nt, Artificial Sequence
  Guide RNA
auaggccuucauuaguuuag

SEQ ID NO: 11671 - RNA, 20 nt, Artificial Sequence
  Guide RNA
auuaguuuaggaagucagug

SEQ ID NO: 11672 - RNA, 20 nt, Artificial Sequence
  Guide RNA
caagccacugacuuccuaaa

SEQ ID NO: 11673 - RNA, 20 nt, Artificial Sequence
  Guide RNA
cacuaguuuaggaagucagu

SEQ ID NO: 11674 - RNA, 20 nt, Artificial Sequence
  Guide RNA
cacugacuuccuaaacuaau

SEQ ID NO: 11675 - RNA, 20 nt, Artificial Sequence
  Guide RNA
cacugacuuccuaaacuagu

SEQ ID NO: 11676 - RNA, 20 nt, Artificial Sequence
  Guide RNA
cauuaguuuaggaagucagu

SEQ ID NO: 11677 - RNA, 20 nt, Artificial Sequence
  Guide RNA
ccacugacuuccuaaacuaa

SEQ ID NO: 11678 - RNA, 20 nt, Artificial Sequence
  Guide RNA
ccacugacuuccuaaacuag

SEQ ID NO: 11679 - RNA, 20 nt, Artificial Sequence
  Guide RNA
ccuaaacuaaugaaggccua

SEQ ID NO: 11680 - RNA, 20 nt, Artificial Sequence
  Guide RNA
ccuaaacuagugaaggccua

SEQ ID NO: 11681 - RNA, 20 nt, Artificial Sequence
  Guide RNA
ccuucacuaguuuaggaagu

SEQ ID NO: 11682 - RNA, 20 nt, Artificial Sequence
  Guide RNA
ccuucauuaguuuaggaagu

SEQ ID NO: 11683 - RNA, 20 nt, Artificial Sequence
  Guide RNA
cuaaacuaaugaaggccuau

SEQ ID NO: 11684 - RNA, 20 nt, Artificial Sequence
  Guide RNA
cuaaacuagugaaggccuau

SEQ ID NO: 11685 - RNA, 20 nt, Artificial Sequence
  Guide RNA
cuaaugaaggccuauucaaa

SEQ ID NO: 11686 - RNA, 20 nt, Artificial Sequence
  Guide RNA
cuagugaaggccuauucaaa

SEQ ID NO: 11687 - RNA, 20 nt, Artificial Sequence
  Guide RNA
cugacuuccuaaacuaauga

SEQ ID NO: 11688 - RNA, 20 nt, Artificial Sequence
  Guide RNA
cugacuuccuaaacuaguga

SEQ ID NO: 11689 - RNA, 20 nt, Artificial Sequence
  Guide RNA
cuucacuaguuuaggaaguc

SEQ ID NO: 11690 - RNA, 20 nt, Artificial Sequence
  Guide RNA
cuucauuaguuuaggaaguc

SEQ ID NO: 11691 - RNA, 20 nt, Artificial Sequence
  Guide RNA
cuuccuaaacuaaugaaggc

SEQ ID NO: 11692 - RNA, 20 nt, Artificial Sequence
  Guide RNA
cuuccuaaacuagugaaggc

SEQ ID NO: 11693 - RNA, 20 nt, Artificial Sequence
  Guide RNA
cuuugaauaggccuucacua

SEQ ID NO: 11694 - RNA, 20 nt, Artificial Sequence
  Guide RNA
cuuugaauaggccuucauua

SEQ ID NO: 11695 - RNA, 20 nt, Artificial Sequence
  Guide RNA
gaauaggccuucacuaguuu

SEQ ID NO: 11696 - RNA, 20 nt, Artificial Sequence
  Guide RNA
gaauaggccuucauuaguuu

SEQ ID NO: 11697 - RNA, 20 nt, Artificial Sequence
  Guide RNA
gacuuccuaaacuaaugaag

SEQ ID NO: 11698 - RNA, 20 nt, Artificial Sequence
  Guide RNA
gacuuccuaaacuagugaag

SEQ ID NO: 11699 - RNA, 20 nt, Artificial Sequence
  Guide RNA
gacuuugaauaggccuucac

SEQ ID NO: 11700 - RNA, 20 nt, Artificial Sequence
  Guide RNA
gacuuugaauaggccuucau

SEQ ID NO: 11701 - RNA, 20 nt, Artificial Sequence
  Guide RNA
gccacugacuuccuaaacua

SEQ ID NO: 11702 - RNA, 20 nt, Artificial Sequence
  Guide RNA
gccuucacuaguuuaggaag

SEQ ID NO: 11703 - RNA, 20 nt, Artificial Sequence
  Guide RNA
gccuucauuaguuuaggaag

SEQ ID NO: 11704 - RNA, 20 nt, Artificial Sequence
  Guide RNA
ggccuucacuaguuuaggaa

SEQ ID NO: 11705 - RNA, 20 nt, Artificial Sequence
  Guide RNA
ggccuucauuaguuuaggaa

SEQ ID NO: 11706 - RNA, 20 nt, Artificial Sequence
  Guide RNA
gugacuuugaauaggccuuc

SEQ ID NO: 11707 - RNA, 20 nt, Artificial Sequence
  Guide RNA
uaaacuaaugaaggccuauu

SEQ ID NO: 11708 - RNA, 20 nt, Artificial Sequence
  Guide RNA
uaaacuagugaaggccuauu

SEQ ID NO: 11709 - RNA, 20 nt, Artificial Sequence
  Guide RNA
uaaugaaggccuauucaaag

SEQ ID NO: 11710 - RNA, 20 nt, Artificial Sequence
  Guide RNA
uaggccuucacuaguuuagg

SEQ ID NO: 11711 - RNA, 20 nt, Artificial Sequence
  Guide RNA
uaggccuucauuaguuuagg

SEQ ID NO: 11712 - RNA, 20 nt, Artificial Sequence
  Guide RNA
uagugaaggccuauucaaag

SEQ ID NO: 11713 - RNA, 20 nt, Artificial Sequence
  Guide RNA
ucacuaguuuaggaagucag

SEQ ID NO: 11714 - RNA, 20 nt, Artificial Sequence
  Guide RNA
ucauuaguuuaggaagucag

SEQ ID NO: 11715 - RNA, 20 nt, Artificial Sequence
  Guide RNA
uccuaaacuaaugaaggccu

SEQ ID NO: 11716 - RNA, 20 nt, Artificial Sequence
  Guide RNA
uccuaaacuagugaaggccu

SEQ ID NO: 11717 - RNA, 20 nt, Artificial Sequence
  Guide RNA
ugaauaggccuucacuaguu

SEQ ID NO: 11718 - RNA, 20 nt, Artificial Sequence
  Guide RNA
ugaauaggccuucauuaguu

SEQ ID NO: 11719 - RNA, 20 nt, Artificial Sequence
  Guide RNA
ugacuuccuaaacuaaugaa

SEQ ID NO: 11720 - RNA, 20 nt, Artificial Sequence
  Guide RNA
ugacuuccuaaacuagugaa

SEQ ID NO: 11721 - RNA, 20 nt, Artificial Sequence
  Guide RNA
ugacuuugaauaggccuuca

SEQ ID NO: 11722 - RNA, 20 nt, Artificial Sequence
  Guide RNA
uucacuaguuuaggaaguca

SEQ ID NO: 11723 - RNA, 20 nt, Artificial Sequence
  Guide RNA
uucauuaguuuaggaaguca

SEQ ID NO: 11724 - RNA, 20 nt, Artificial Sequence
  Guide RNA
uuccuaaacuaaugaaggcc

SEQ ID NO: 11725 - RNA, 20 nt, Artificial Sequence
  Guide RNA
uuccuaaacuagugaaggcc

SEQ ID NO: 11726 - RNA, 20 nt, Artificial Sequence
  Guide RNA
uugaauaggccuucacuagu

SEQ ID NO: 11727 - RNA, 20 nt, Artificial Sequence
  Guide RNA
uugaauaggccuucauuagu

SEQ ID NO: 11728 - RNA, 20 nt, Artificial Sequence
  Guide RNA
uuugaauaggccuucacuag

SEQ ID NO: 11729 - RNA, 20 nt, Artificial Sequence
  Guide RNA
uuugaauaggccuucauuag

SEQ ID NO: 11730 - RNA, 21 nt, Artificial Sequence
  Guide RNA
aaacuaaugaaggccuauuca

SEQ ID NO: 11731 - RNA, 21 nt, Artificial Sequence
  Guide RNA
aaacuagugaaggccuauuca

SEQ ID NO: 11732 - RNA, 21 nt, Artificial Sequence
  Guide RNA
aacuaaugaaggccuauucaa

SEQ ID NO: 11733 - RNA, 21 nt, Artificial Sequence
  Guide RNA
aacuagugaaggccuauucaa

SEQ ID NO: 11734 - RNA, 21 nt, Artificial Sequence
  Guide RNA
aagccacugacuuccuaaacu

SEQ ID NO: 11735 - RNA, 21 nt, Artificial Sequence
  Guide RNA
aagugacuuugaauaggccuu

SEQ ID NO: 11736 - RNA, 21 nt, Artificial Sequence
  Guide RNA
aauaggccuucacuaguuuag

SEQ ID NO: 11737 - RNA, 21 nt, Artificial Sequence
  Guide RNA
aauaggccuucauuaguuuag

SEQ ID NO: 11738 - RNA, 21 nt, Artificial Sequence
  Guide RNA
aaugaaggccuauucaaaguc

SEQ ID NO: 11739 - RNA, 21 nt, Artificial Sequence
  Guide RNA
acuaaugaaggccuauucaaa

SEQ ID NO: 11740 - RNA, 21 nt, Artificial Sequence
  Guide RNA
acuagugaaggccuauucaaa

SEQ ID NO: 11741 - RNA, 21 nt, Artificial Sequence
  Guide RNA
acuaguuuaggaagucagugg

SEQ ID NO: 11742 - RNA, 21 nt, Artificial Sequence
  Guide RNA
acugacuuccuaaacuaauga

SEQ ID NO: 11743 - RNA, 21 nt, Artificial Sequence
  Guide RNA
acugacuuccuaaacuaguga

SEQ ID NO: 11744 - RNA, 21 nt, Artificial Sequence
  Guide RNA
acuuccuaaacuaaugaaggc

SEQ ID NO: 11745 - RNA, 21 nt, Artificial Sequence
  Guide RNA
acuuccuaaacuagugaaggc

SEQ ID NO: 11746 - RNA, 21 nt, Artificial Sequence
  Guide RNA
acuuugaauaggccuucacua

SEQ ID NO: 11747 - RNA, 21 nt, Artificial Sequence
  Guide RNA
acuuugaauaggccuucauua

SEQ ID NO: 11748 - RNA, 21 nt, Artificial Sequence
  Guide RNA
agccacugacuuccuaaacua

SEQ ID NO: 11749 - RNA, 21 nt, Artificial Sequence
  Guide RNA
aggccuucacuaguuuaggaa

SEQ ID NO: 11750 - RNA, 21 nt, Artificial Sequence
  Guide RNA
aggccuucauuaguuuaggaa

SEQ ID NO: 11751 - RNA, 21 nt, Artificial Sequence
  Guide RNA
agugaaggccuauucaaaguc

SEQ ID NO: 11752 - RNA, 21 nt, Artificial Sequence
  Guide RNA
agugacuuugaauaggccuuc

SEQ ID NO: 11753 - RNA, 21 nt, Artificial Sequence
  Guide RNA
auaggccuucacuaguuuagg

SEQ ID NO: 11754 - RNA, 21 nt, Artificial Sequence
  Guide RNA
auaggccuucauuaguuuagg

SEQ ID NO: 11755 - RNA, 21 nt, Artificial Sequence
  Guide RNA
auuaguuuaggaagucagugg

SEQ ID NO: 11756 - RNA, 21 nt, Artificial Sequence
  Guide RNA
caagccacugacuuccuaaac

SEQ ID NO: 11757 - RNA, 21 nt, Artificial Sequence
  Guide RNA
cacuaguuuaggaagucagug

SEQ ID NO: 11758 - RNA, 21 nt, Artificial Sequence
  Guide RNA
cacugacuuccuaaacuaaug

SEQ ID NO: 11759 - RNA, 21 nt, Artificial Sequence
  Guide RNA
cacugacuuccuaaacuagug

SEQ ID NO: 11760 - RNA, 21 nt, Artificial Sequence
  Guide RNA
cauuaguuuaggaagucagug

SEQ ID NO: 11761 - RNA, 21 nt, Artificial Sequence
  Guide RNA
ccacugacuuccuaaacuaau

SEQ ID NO: 11762 - RNA, 21 nt, Artificial Sequence
  Guide RNA
ccacugacuuccuaaacuagu

SEQ ID NO: 11763 - RNA, 21 nt, Artificial Sequence
  Guide RNA
ccuaaacuaaugaaggccuau

SEQ ID NO: 11764 - RNA, 21 nt, Artificial Sequence
  Guide RNA
ccuaaacuagugaaggccuau

SEQ ID NO: 11765 - RNA, 21 nt, Artificial Sequence
  Guide RNA
ccuucacuaguuuaggaaguc

SEQ ID NO: 11766 - RNA, 21 nt, Artificial Sequence
  Guide RNA
ccuucauuaguuuaggaaguc

SEQ ID NO: 11767 - RNA, 21 nt, Artificial Sequence
  Guide RNA
cuaaacuaaugaaggccuauu

SEQ ID NO: 11768 - RNA, 21 nt, Artificial Sequence
  Guide RNA
cuaaacuagugaaggccuauu

SEQ ID NO: 11769 - RNA, 21 nt, Artificial Sequence
  Guide RNA
cuaaugaaggccuauucaaag

SEQ ID NO: 11770 - RNA, 21 nt, Artificial Sequence
  Guide RNA
cuagugaaggccuauucaaag

SEQ ID NO: 11771 - RNA, 21 nt, Artificial Sequence
  Guide RNA
cugacuuccuaaacuaaugaa

SEQ ID NO: 11772 - RNA, 21 nt, Artificial Sequence
  Guide RNA
cugacuuccuaaacuagugaa

SEQ ID NO: 11773 - RNA, 21 nt, Artificial Sequence
  Guide RNA
cuucacuaguuuaggaaguca

SEQ ID NO: 11774 - RNA, 21 nt, Artificial Sequence
  Guide RNA
cuucauuaguuuaggaaguca

SEQ ID NO: 11775 - RNA, 21 nt, Artificial Sequence
  Guide RNA
cuuccuaaacuaaugaaggcc

SEQ ID NO: 11776 - RNA, 21 nt, Artificial Sequence
  Guide RNA
cuuccuaaacuagugaaggcc

SEQ ID NO: 11777 - RNA, 21 nt, Artificial Sequence
  Guide RNA
cuuugaauaggccuucacuag

SEQ ID NO: 11778 - RNA, 21 nt, Artificial Sequence
  Guide RNA
cuuugaauaggccuucauuag

SEQ ID NO: 11779 - RNA, 21 nt, Artificial Sequence
  Guide RNA
gaauaggccuucacuaguuua

SEQ ID NO: 11780 - RNA, 21 nt, Artificial Sequence
  Guide RNA
gaauaggccuucauuaguuua

SEQ ID NO: 11781 - RNA, 21 nt, Artificial Sequence
  Guide RNA
gacuuccuaaacuaaugaagg

SEQ ID NO: 11782 - RNA, 21 nt, Artificial Sequence
  Guide RNA
gacuuccuaaacuagugaagg

SEQ ID NO: 11783 - RNA, 21 nt, Artificial Sequence
  Guide RNA
gacuuugaauaggccuucacu

SEQ ID NO: 11784 - RNA, 21 nt, Artificial Sequence
  Guide RNA
gacuuugaauaggccuucauu

SEQ ID NO: 11785 - RNA, 21 nt, Artificial Sequence
  Guide RNA
gccacugacuuccuaaacuaa

SEQ ID NO: 11786 - RNA, 21 nt, Artificial Sequence
  Guide RNA
gccacugacuuccuaaacuag

SEQ ID NO: 11787 - RNA, 21 nt, Artificial Sequence
  Guide RNA
gccuucacuaguuuaggaagu

SEQ ID NO: 11788 - RNA, 21 nt, Artificial Sequence
  Guide RNA
gccuucauuaguuuaggaagu

SEQ ID NO: 11789 - RNA, 21 nt, Artificial Sequence
  Guide RNA
ggccuucacuaguuuaggaag

SEQ ID NO: 11790 - RNA, 21 nt, Artificial Sequence
  Guide RNA
ggccuucauuaguuuaggaag

SEQ ID NO: 11791 - RNA, 21 nt, Artificial Sequence
  Guide RNA
gugacuuugaauaggccuuca

SEQ ID NO: 11792 - RNA, 21 nt, Artificial Sequence
  Guide RNA
uaaacuaaugaaggccuauuc

SEQ ID NO: 11793 - RNA, 21 nt, Artificial Sequence
  Guide RNA
uaaacuagugaaggccuauuc

SEQ ID NO: 11794 - RNA, 21 nt, Artificial Sequence
  Guide RNA
uaagugacuuugaauaggccu

SEQ ID NO: 11795 - RNA, 21 nt, Artificial Sequence
  Guide RNA
uaaugaaggccuauucaaagu

SEQ ID NO: 11796 - RNA, 21 nt, Artificial Sequence
  Guide RNA
uaggccuucacuaguuuagga

SEQ ID NO: 11797 - RNA, 21 nt, Artificial Sequence
  Guide RNA
uaggccuucauuaguuuagga

SEQ ID NO: 11798 - RNA, 21 nt, Artificial Sequence
  Guide RNA
uagugaaggccuauucaaagu

SEQ ID NO: 11799 - RNA, 21 nt, Artificial Sequence
  Guide RNA
ucaagccacugacuuccuaaa

SEQ ID NO: 11800 - RNA, 21 nt, Artificial Sequence
  Guide RNA
ucacuaguuuaggaagucagu

SEQ ID NO: 11801 - RNA, 21 nt, Artificial Sequence
  Guide RNA
ucauuaguuuaggaagucagu

SEQ ID NO: 11802 - RNA, 21 nt, Artificial Sequence
  Guide RNA
uccuaaacuaaugaaggccua

SEQ ID NO: 11803 - RNA, 21 nt, Artificial Sequence
  Guide RNA
uccuaaacuagugaaggccua

SEQ ID NO: 11804 - RNA, 21 nt, Artificial Sequence
  Guide RNA
ugaauaggccuucacuaguuu

SEQ ID NO: 11805 - RNA, 21 nt, Artificial Sequence
  Guide RNA
ugaauaggccuucauuaguuu

SEQ ID NO: 11806 - RNA, 21 nt, Artificial Sequence
  Guide RNA
ugacuuccuaaacuaaugaag

SEQ ID NO: 11807 - RNA, 21 nt, Artificial Sequence
  Guide RNA
ugacuuccuaaacuagugaag

SEQ ID NO: 11808 - RNA, 21 nt, Artificial Sequence
  Guide RNA
ugacuuugaauaggccuucac

SEQ ID NO: 11809 - RNA, 21 nt, Artificial Sequence
  Guide RNA
ugacuuugaauaggccuucau

SEQ ID NO: 11810 - RNA, 21 nt, Artificial Sequence
  Guide RNA
uucacuaguuuaggaagucag

SEQ ID NO: 11811 - RNA, 21 nt, Artificial Sequence
  Guide RNA
uucauuaguuuaggaagucag

SEQ ID NO: 11812 - RNA, 21 nt, Artificial Sequence
  Guide RNA
uuccuaaacuaaugaaggccu

SEQ ID NO: 11813 - RNA, 21 nt, Artificial Sequence
  Guide RNA
uuccuaaacuagugaaggccu

SEQ ID NO: 11814 - RNA, 21 nt, Artificial Sequence
  Guide RNA
uugaauaggccuucacuaguu

SEQ ID NO: 11815 - RNA, 21 nt, Artificial Sequence
  Guide RNA
uugaauaggccuucauuaguu

SEQ ID NO: 11816 - RNA, 21 nt, Artificial Sequence
  Guide RNA
uuugaauaggccuucacuagu

SEQ ID NO: 11817 - RNA, 21 nt, Artificial Sequence
  Guide RNA
uuugaauaggccuucauuagu

SEQ ID NO: 11818 - RNA, 22 nt, Artificial Sequence
  Guide RNA
aaacuaaugaaggccuauucaa

SEQ ID NO: 11819 - RNA, 22 nt, Artificial Sequence
  Guide RNA
aaacuagugaaggccuauucaa

SEQ ID NO: 11820 - RNA, 22 nt, Artificial Sequence
  Guide RNA
aacuaaugaaggccuauucaaa

SEQ ID NO: 11821 - RNA, 22 nt, Artificial Sequence
  Guide RNA
aacuagugaaggccuauucaaa

SEQ ID NO: 11822 - RNA, 22 nt, Artificial Sequence
  Guide RNA
aagccacugacuuccuaaacua

SEQ ID NO: 11823 - RNA, 22 nt, Artificial Sequence
  Guide RNA
aagugacuuugaauaggccuuc

SEQ ID NO: 11824 - RNA, 22 nt, Artificial Sequence
  Guide RNA
aauaggccuucacuaguuuagg

SEQ ID NO: 11825 - RNA, 22 nt, Artificial Sequence
  Guide RNA
aauaggccuucauuaguuuagg

SEQ ID NO: 11826 - RNA, 22 nt, Artificial Sequence
  Guide RNA
aaugaaggccuauucaaaguca

SEQ ID NO: 11827 - RNA, 22 nt, Artificial Sequence
  Guide RNA
acuaaugaaggccuauucaaag

SEQ ID NO: 11828 - RNA, 22 nt, Artificial Sequence
  Guide RNA
acuagugaaggccuauucaaag

SEQ ID NO: 11829 - RNA, 22 nt, Artificial Sequence
  Guide RNA
acuaguuuaggaagucaguggc

SEQ ID NO: 11830 - RNA, 22 nt, Artificial Sequence
  Guide RNA
acugacuuccuaaacuaaugaa

SEQ ID NO: 11831 - RNA, 22 nt, Artificial Sequence
  Guide RNA
acugacuuccuaaacuagugaa

SEQ ID NO: 11832 - RNA, 22 nt, Artificial Sequence
  Guide RNA
acuuccuaaacuaaugaaggcc

SEQ ID NO: 11833 - RNA, 22 nt, Artificial Sequence
  Guide RNA
acuuccuaaacuagugaaggcc

SEQ ID NO: 11834 - RNA, 22 nt, Artificial Sequence
  Guide RNA
acuuugaauaggccuucacuag

SEQ ID NO: 11835 - RNA, 22 nt, Artificial Sequence
  Guide RNA
acuuugaauaggccuucauuag

SEQ ID NO: 11836 - RNA, 22 nt, Artificial Sequence
  Guide RNA
agccacugacuuccuaaacuaa

SEQ ID NO: 11837 - RNA, 22 nt, Artificial Sequence
  Guide RNA
agccacugacuuccuaaacuag

SEQ ID NO: 11838 - RNA, 22 nt, Artificial Sequence
  Guide RNA
aggccuucacuaguuuaggaag

SEQ ID NO: 11839 - RNA, 22 nt, Artificial Sequence
  Guide RNA
aggccuucauuaguuuaggaag

SEQ ID NO: 11840 - RNA, 22 nt, Artificial Sequence
  Guide RNA
agugaaggccuauucaaaguca

SEQ ID NO: 11841 - RNA, 22 nt, Artificial Sequence
  Guide RNA
agugacuuugaauaggccuuca

SEQ ID NO: 11842 - RNA, 22 nt, Artificial Sequence
  Guide RNA
auaggccuucacuaguuuagga

SEQ ID NO: 11843 - RNA, 22 nt, Artificial Sequence
  Guide RNA
auaggccuucauuaguuuagga

SEQ ID NO: 11844 - RNA, 22 nt, Artificial Sequence
  Guide RNA
auuaguuuaggaagucaguggc

SEQ ID NO: 11845 - RNA, 22 nt, Artificial Sequence
  Guide RNA
caagccacugacuuccuaaacu

SEQ ID NO: 11846 - RNA, 22 nt, Artificial Sequence
  Guide RNA
cacuaguuuaggaagucagugg

SEQ ID NO: 11847 - RNA, 22 nt, Artificial Sequence
  Guide RNA
cacugacuuccuaaacuaauga

SEQ ID NO: 11848 - RNA, 22 nt, Artificial Sequence
  Guide RNA
cacugacuuccuaaacuaguga

SEQ ID NO: 11849 - RNA, 22 nt, Artificial Sequence
  Guide RNA
cauuaguuuaggaagucagugg

SEQ ID NO: 11850 - RNA, 22 nt, Artificial Sequence
  Guide RNA
ccacugacuuccuaaacuaaug

SEQ ID NO: 11851 - RNA, 22 nt, Artificial Sequence
  Guide RNA
ccacugacuuccuaaacuagug

SEQ ID NO: 11852 - RNA, 22 nt, Artificial Sequence
  Guide RNA
ccuaaacuaaugaaggccuauu

SEQ ID NO: 11853 - RNA, 22 nt, Artificial Sequence
  Guide RNA
ccuaaacuagugaaggccuauu

SEQ ID NO: 11854 - RNA, 22 nt, Artificial Sequence
  Guide RNA
ccuucacuaguuuaggaaguca

SEQ ID NO: 11855 - RNA, 22 nt, Artificial Sequence
  Guide RNA
ccuucauuaguuuaggaaguca

SEQ ID NO: 11856 - RNA, 22 nt, Artificial Sequence
  Guide RNA
cuaaacuaaugaaggccuauuc

SEQ ID NO: 11857 - RNA, 22 nt, Artificial Sequence
  Guide RNA
cuaaacuagugaaggccuauuc

SEQ ID NO: 11858 - RNA, 22 nt, Artificial Sequence
  Guide RNA
cuaaugaaggccuauucaaagu

SEQ ID NO: 11859 - RNA, 22 nt, Artificial Sequence
  Guide RNA
cuagugaaggccuauucaaagu

SEQ ID NO: 11860 - RNA, 22 nt, Artificial Sequence
  Guide RNA
cugacuuccuaaacuaaugaag

SEQ ID NO: 11861 - RNA, 22 nt, Artificial Sequence
  Guide RNA
cugacuuccuaaacuagugaag

SEQ ID NO: 11862 - RNA, 22 nt, Artificial Sequence
  Guide RNA
cuucacuaguuuaggaagucag

SEQ ID NO: 11863 - RNA, 22 nt, Artificial Sequence
  Guide RNA
cuucauuaguuuaggaagucag

SEQ ID NO: 11864 - RNA, 22 nt, Artificial Sequence
  Guide RNA
cuuccuaaacuaaugaaggccu

SEQ ID NO: 11865 - RNA, 22 nt, Artificial Sequence
  Guide RNA
cuuccuaaacuagugaaggccu

SEQ ID NO: 11866 - RNA, 22 nt, Artificial Sequence
  Guide RNA
cuuugaauaggccuucacuagu

SEQ ID NO: 11867 - RNA, 22 nt, Artificial Sequence
  Guide RNA
cuuugaauaggccuucauuagu

SEQ ID NO: 11868 - RNA, 22 nt, Artificial Sequence
  Guide RNA
gaauaggccuucacuaguuuag

SEQ ID NO: 11869 - RNA, 22 nt, Artificial Sequence
  Guide RNA
gaauaggccuucauuaguuuag

SEQ ID NO: 11870 - RNA, 22 nt, Artificial Sequence
  Guide RNA
gacuuccuaaacuaaugaaggc

SEQ ID NO: 11871 - RNA, 22 nt, Artificial Sequence
  Guide RNA
gacuuccuaaacuagugaaggc

SEQ ID NO: 11872 - RNA, 22 nt, Artificial Sequence
  Guide RNA
gacuuugaauaggccuucacua

SEQ ID NO: 11873 - RNA, 22 nt, Artificial Sequence
  Guide RNA
gacuuugaauaggccuucauua

SEQ ID NO: 11874 - RNA, 22 nt, Artificial Sequence
  Guide RNA
gccacugacuuccuaaacuaau

SEQ ID NO: 11875 - RNA, 22 nt, Artificial Sequence
  Guide RNA
gccacugacuuccuaaacuagu

SEQ ID NO: 11876 - RNA, 22 nt, Artificial Sequence
  Guide RNA
gccuucacuaguuuaggaaguc

SEQ ID NO: 11877 - RNA, 22 nt, Artificial Sequence
  Guide RNA
gccuucauuaguuuaggaaguc

SEQ ID NO: 11878 - RNA, 22 nt, Artificial Sequence
  Guide RNA
ggccuucacuaguuuaggaagu

SEQ ID NO: 11879 - RNA, 22 nt, Artificial Sequence
  Guide RNA
ggccuucauuaguuuaggaagu

SEQ ID NO: 11880 - RNA, 22 nt, Artificial Sequence
  Guide RNA
gugacuuugaauaggccuucac

SEQ ID NO: 11881 - RNA, 22 nt, Artificial Sequence
  Guide RNA
gugacuuugaauaggccuucau

SEQ ID NO: 11882 - RNA, 22 nt, Artificial Sequence
  Guide RNA
uaaacuaaugaaggccuauuca

SEQ ID NO: 11883 - RNA, 22 nt, Artificial Sequence
  Guide RNA
uaaacuagugaaggccuauuca

SEQ ID NO: 11884 - RNA, 22 nt, Artificial Sequence
  Guide RNA
uaagugacuuugaauaggccuu

SEQ ID NO: 11885 - RNA, 22 nt, Artificial Sequence
  Guide RNA
uaaugaaggccuauucaaaguc

SEQ ID NO: 11886 - RNA, 22 nt, Artificial Sequence
  Guide RNA
uaggccuucacuaguuuaggaa

SEQ ID NO: 11887 - RNA, 22 nt, Artificial Sequence
  Guide RNA
uaggccuucauuaguuuaggaa

SEQ ID NO: 11888 - RNA, 22 nt, Artificial Sequence
  Guide RNA
uagugaaggccuauucaaaguc

SEQ ID NO: 11889 - RNA, 22 nt, Artificial Sequence
  Guide RNA
ucaagccacugacuuccuaaac

SEQ ID NO: 11890 - RNA, 22 nt, Artificial Sequence
  Guide RNA
ucacuaguuuaggaagucagug

SEQ ID NO: 11891 - RNA, 22 nt, Artificial Sequence
  Guide RNA
ucauuaguuuaggaagucagug

SEQ ID NO: 11892 - RNA, 22 nt, Artificial Sequence
  Guide RNA
uccuaaacuaaugaaggccuau

SEQ ID NO: 11893 - RNA, 22 nt, Artificial Sequence
  Guide RNA
uccuaaacuagugaaggccuau

SEQ ID NO: 11894 - RNA, 22 nt, Artificial Sequence
  Guide RNA
ugaauaggccuucacuaguuua

SEQ ID NO: 11895 - RNA, 22 nt, Artificial Sequence
  Guide RNA
ugaauaggccuucauuaguuua

SEQ ID NO: 11896 - RNA, 22 nt, Artificial Sequence
  Guide RNA
ugacuuccuaaacuaaugaagg

SEQ ID NO: 11897 - RNA, 22 nt, Artificial Sequence
  Guide RNA
ugacuuccuaaacuagugaagg

SEQ ID NO: 11898 - RNA, 22 nt, Artificial Sequence
  Guide RNA
ugacuuugaauaggccuucacu

SEQ ID NO: 11899 - RNA, 22 nt, Artificial Sequence
  Guide RNA
ugacuuugaauaggccuucauu

SEQ ID NO: 11900 - RNA, 22 nt, Artificial Sequence
  Guide RNA
uuaagugacuuugaauaggccu

SEQ ID NO: 11901 - RNA, 22 nt, Artificial Sequence
  Guide RNA
uucaagccacugacuuccuaaa

SEQ ID NO: 11902 - RNA, 22 nt, Artificial Sequence
  Guide RNA
uucacuaguuuaggaagucagu

SEQ ID NO: 11903 - RNA, 22 nt, Artificial Sequence
  Guide RNA
uucauuaguuuaggaagucagu

SEQ ID NO: 11904 - RNA, 22 nt, Artificial Sequence
  Guide RNA
uuccuaaacuaaugaaggccua

SEQ ID NO: 11905 - RNA, 22 nt, Artificial Sequence
  Guide RNA
uuccuaaacuagugaaggccua

SEQ ID NO: 11906 - RNA, 22 nt, Artificial Sequence
  Guide RNA
uugaauaggccuucacuaguuu

SEQ ID NO: 11907 - RNA, 22 nt, Artificial Sequence
  Guide RNA
uugaauaggccuucauuaguuu

SEQ ID NO: 11908 - RNA, 22 nt, Artificial Sequence
  Guide RNA
uuugaauaggccuucacuaguu

SEQ ID NO: 11909 - RNA, 22 nt, Artificial Sequence
  Guide RNA
uuugaauaggccuucauuaguu

SEQ ID NO: 11910 - RNA, 20 nt, Artificial Sequence
  Guide RNA
aaaaaaccagcugaauuaag

SEQ ID NO: 11911 - RNA, 20 nt, Artificial Sequence
  Guide RNA
aaaaacagcugaauuaagug

SEQ ID NO: 11912 - RNA, 20 nt, Artificial Sequence
  Guide RNA
aaaaaccagcugaauuaagu

SEQ ID NO: 11913 - RNA, 20 nt, Artificial Sequence
  Guide RNA
aaaacagcugaauuaaguga

SEQ ID NO: 11914 - RNA, 20 nt, Artificial Sequence
  Guide RNA
aaaaccagcugaauuaagug

SEQ ID NO: 11915 - RNA, 20 nt, Artificial Sequence
  Guide RNA
aaacagcugaauuaagugac

SEQ ID NO: 11916 - RNA, 20 nt, Artificial Sequence
  Guide RNA
aaaccagcugaauuaaguga

SEQ ID NO: 11917 - RNA, 20 nt, Artificial Sequence
  Guide RNA
aaagucacuuaauucagcug

SEQ ID NO: 11918 - RNA, 20 nt, Artificial Sequence
  Guide RNA
aacagcugaauuaagugacu

SEQ ID NO: 11919 - RNA, 20 nt, Artificial Sequence
  Guide RNA
aaccagcugaauuaagugac

SEQ ID NO: 11920 - RNA, 20 nt, Artificial Sequence
  Guide RNA
aagucacuuaauucagcugg

SEQ ID NO: 11921 - RNA, 20 nt, Artificial Sequence
  Guide RNA
aagucacuuaauucagcugu

SEQ ID NO: 11922 - RNA, 20 nt, Artificial Sequence
  Guide RNA
accagcugaauuaagugacu

SEQ ID NO: 11923 - RNA, 20 nt, Artificial Sequence
  Guide RNA
acuuaauucagcugguuuuu

SEQ ID NO: 11924 - RNA, 20 nt, Artificial Sequence
  Guide RNA
agucacuuaauucagcuggu

SEQ ID NO: 11925 - RNA, 20 nt, Artificial Sequence
  Guide RNA
agucacuuaauucagcuguu

SEQ ID NO: 11926 - RNA, 20 nt, Artificial Sequence
  Guide RNA
caaagucacuuaauucagcu

SEQ ID NO: 11927 - RNA, 20 nt, Artificial Sequence
  Guide RNA
cacuuaauucagcugguuuu

SEQ ID NO: 11928 - RNA, 20 nt, Artificial Sequence
  Guide RNA
cacuuaauucagcuguuuuu

SEQ ID NO: 11929 - RNA, 20 nt, Artificial Sequence
  Guide RNA
cuuaauucagcugguuuuuu

SEQ ID NO: 11930 - RNA, 20 nt, Artificial Sequence
  Guide RNA
gucacuuaauucagcugguu

SEQ ID NO: 11931 - RNA, 20 nt, Artificial Sequence
  Guide RNA
gucacuuaauucagcuguuu

SEQ ID NO: 11932 - RNA, 20 nt, Artificial Sequence
  Guide RNA
ucaaagucacuuaauucagc

SEQ ID NO: 11933 - RNA, 20 nt, Artificial Sequence
  Guide RNA
ucacuuaauucagcugguuu

SEQ ID NO: 11934 - RNA, 20 nt, Artificial Sequence
  Guide RNA
ucacuuaauucagcuguuuu

SEQ ID NO: 11935 - RNA, 20 nt, Artificial Sequence
  Guide RNA
uucaaagucacuuaauucag

SEQ ID NO: 11936 - RNA, 21 nt, Artificial Sequence
  Guide RNA
aaaaaccagcugaauuaagug

SEQ ID NO: 11937 - RNA, 21 nt, Artificial Sequence
  Guide RNA
aaaacagcugaauuaagugac

SEQ ID NO: 11938 - RNA, 21 nt, Artificial Sequence
  Guide RNA
aaaaccagcugaauuaaguga

SEQ ID NO: 11939 - RNA, 21 nt, Artificial Sequence
  Guide RNA
aaacagcugaauuaagugacu

SEQ ID NO: 11940 - RNA, 21 nt, Artificial Sequence
  Guide RNA
aaaccagcugaauuaagugac

SEQ ID NO: 11941 - RNA, 21 nt, Artificial Sequence
  Guide RNA
aaagucacuuaauucagcugg

SEQ ID NO: 11942 - RNA, 21 nt, Artificial Sequence
  Guide RNA
aaagucacuuaauucagcugu

SEQ ID NO: 11943 - RNA, 21 nt, Artificial Sequence
  Guide RNA
aacagcugaauuaagugacuu

SEQ ID NO: 11944 - RNA, 21 nt, Artificial Sequence
  Guide RNA
aaccagcugaauuaagugacu

SEQ ID NO: 11945 - RNA, 21 nt, Artificial Sequence
  Guide RNA
aagucacuuaauucagcuggu

SEQ ID NO: 11946 - RNA, 21 nt, Artificial Sequence
  Guide RNA
aagucacuuaauucagcuguu

SEQ ID NO: 11947 - RNA, 21 nt, Artificial Sequence
  Guide RNA
accagcugaauuaagugacuu

SEQ ID NO: 11948 - RNA, 21 nt, Artificial Sequence
  Guide RNA
agucacuuaauucagcugguu

SEQ ID NO: 11949 - RNA, 21 nt, Artificial Sequence
  Guide RNA
agucacuuaauucagcuguuu

SEQ ID NO: 11950 - RNA, 21 nt, Artificial Sequence
  Guide RNA
caaagucacuuaauucagcug

SEQ ID NO: 11951 - RNA, 21 nt, Artificial Sequence
  Guide RNA
cacuuaauucagcugguuuuu

SEQ ID NO: 11952 - RNA, 21 nt, Artificial Sequence
  Guide RNA
gucacuuaauucagcugguuu

SEQ ID NO: 11953 - RNA, 21 nt, Artificial Sequence
  Guide RNA
gucacuuaauucagcuguuuu

SEQ ID NO: 11954 - RNA, 21 nt, Artificial Sequence
  Guide RNA
ucaaagucacuuaauucagcu

SEQ ID NO: 11955 - RNA, 21 nt, Artificial Sequence
  Guide RNA
ucacuuaauucagcugguuuu

SEQ ID NO: 11956 - RNA, 21 nt, Artificial Sequence
  Guide RNA
uucaaagucacuuaauucagc

SEQ ID NO: 11957 - RNA, 22 nt, Artificial Sequence
  Guide RNA
aaaaaaccagcugaauuaagug

SEQ ID NO: 11958 - RNA, 22 nt, Artificial Sequence
  Guide RNA
aaaaacagcugaauuaagugac

SEQ ID NO: 11959 - RNA, 22 nt, Artificial Sequence
  Guide RNA
aaaaaccagcugaauuaaguga

SEQ ID NO: 11960 - RNA, 22 nt, Artificial Sequence
  Guide RNA
aaaacagcugaauuaagugacu

SEQ ID NO: 11961 - RNA, 22 nt, Artificial Sequence
  Guide RNA
aaaaccagcugaauuaagugac

SEQ ID NO: 11962 - RNA, 22 nt, Artificial Sequence
  Guide RNA
aaacagcugaauuaagugacuu

SEQ ID NO: 11963 - RNA, 22 nt, Artificial Sequence
  Guide RNA
aaaccagcugaauuaagugacu

SEQ ID NO: 11964 - RNA, 22 nt, Artificial Sequence
  Guide RNA
aaagucacuuaauucagcuggu

SEQ ID NO: 11965 - RNA, 22 nt, Artificial Sequence
  Guide RNA
aaagucacuuaauucagcuguu

SEQ ID NO: 11966 - RNA, 22 nt, Artificial Sequence
  Guide RNA
aacagcugaauuaagugacuuu

SEQ ID NO: 11967 - RNA, 22 nt, Artificial Sequence
  Guide RNA
aaccagcugaauuaagugacuu

SEQ ID NO: 11968 - RNA, 22 nt, Artificial Sequence
  Guide RNA
aagucacuuaauucagcugguu

SEQ ID NO: 11969 - RNA, 22 nt, Artificial Sequence
  Guide RNA
aagucacuuaauucagcuguuu

SEQ ID NO: 11970 - RNA, 22 nt, Artificial Sequence
  Guide RNA
accagcugaauuaagugacuuu

SEQ ID NO: 11971 - RNA, 22 nt, Artificial Sequence
  Guide RNA
agucacuuaauucagcugguuu

SEQ ID NO: 11972 - RNA, 22 nt, Artificial Sequence
  Guide RNA
agucacuuaauucagcuguuuu

SEQ ID NO: 11973 - RNA, 22 nt, Artificial Sequence
  Guide RNA
auucaaagucacuuaauucagc

SEQ ID NO: 11974 - RNA, 22 nt, Artificial Sequence
  Guide RNA
caaagucacuuaauucagcugg

SEQ ID NO: 11975 - RNA, 22 nt, Artificial Sequence
  Guide RNA
caaagucacuuaauucagcugu

SEQ ID NO: 11976 - RNA, 22 nt, Artificial Sequence
  Guide RNA
cacuuaauucagcugguuuuuu

SEQ ID NO: 11977 - RNA, 22 nt, Artificial Sequence
  Guide RNA
gucacuuaauucagcugguuuu

SEQ ID NO: 11978 - RNA, 22 nt, Artificial Sequence
  Guide RNA
gucacuuaauucagcuguuuuu

SEQ ID NO: 11979 - RNA, 22 nt, Artificial Sequence
  Guide RNA
ucaaagucacuuaauucagcug

SEQ ID NO: 11980 - RNA, 22 nt, Artificial Sequence
  Guide RNA
ucacuuaauucagcugguuuuu

SEQ ID NO: 11981 - RNA, 22 nt, Artificial Sequence
  Guide RNA
uucaaagucacuuaauucagcu

SEQ ID NO: 11982 - RNA, 20 nt, Artificial Sequence
  Guide RNA
aaaacaacagcugaauuaag

SEQ ID NO: 11983 - RNA, 20 nt, Artificial Sequence
  Guide RNA
aaacaacagcugaauuaagu

SEQ ID NO: 11984 - RNA, 20 nt, Artificial Sequence
  Guide RNA
aacaacagcugaauuaagug

SEQ ID NO: 11985 - RNA, 20 nt, Artificial Sequence
  Guide RNA
acaacagcugaauuaaguga

SEQ ID NO: 11986 - RNA, 20 nt, Artificial Sequence
  Guide RNA
acuuaauucagcuguuguuu

SEQ ID NO: 11987 - RNA, 20 nt, Artificial Sequence
  Guide RNA
cacuuaauucagcuguuguu

SEQ ID NO: 11988 - RNA, 20 nt, Artificial Sequence
  Guide RNA
cuuaauucagcuguuguuuu

SEQ ID NO: 11989 - RNA, 20 nt, Artificial Sequence
  Guide RNA
gucacuuaauucagcuguug

SEQ ID NO: 11990 - RNA, 20 nt, Artificial Sequence
  Guide RNA
ucacuuaauucagcuguugu

SEQ ID NO: 11991 - RNA, 21 nt, Artificial Sequence
  Guide RNA
aaacaacagcugaauuaagug

SEQ ID NO: 11992 - RNA, 21 nt, Artificial Sequence
  Guide RNA
aacaacagcugaauuaaguga

SEQ ID NO: 11993 - RNA, 21 nt, Artificial Sequence
  Guide RNA
acaacagcugaauuaagugac

SEQ ID NO: 11994 - RNA, 21 nt, Artificial Sequence
  Guide RNA
agucacuuaauucagcuguug

SEQ ID NO: 11995 - RNA, 21 nt, Artificial Sequence
  Guide RNA
cacuuaauucagcuguuguuu

SEQ ID NO: 11996 - RNA, 21 nt, Artificial Sequence
  Guide RNA
gucacuuaauucagcuguugu

SEQ ID NO: 11997 - RNA, 21 nt, Artificial Sequence
  Guide RNA
ucacuuaauucagcuguuguu

SEQ ID NO: 11998 - RNA, 22 nt, Artificial Sequence
  Guide RNA
aaaacaacagcugaauuaagug

SEQ ID NO: 11999 - RNA, 22 nt, Artificial Sequence
  Guide RNA
aaacaacagcugaauuaaguga

SEQ ID NO: 12000 - RNA, 22 nt, Artificial Sequence
  Guide RNA
aacaacagcugaauuaagugac

SEQ ID NO: 12001 - RNA, 22 nt, Artificial Sequence
  Guide RNA
aagucacuuaauucagcuguug

SEQ ID NO: 12002 - RNA, 22 nt, Artificial Sequence
  Guide RNA
acaacagcugaauuaagugacu

SEQ ID NO: 12003 - RNA, 22 nt, Artificial Sequence
  Guide RNA
agucacuuaauucagcuguugu

SEQ ID NO: 12004 - RNA, 22 nt, Artificial Sequence
  Guide RNA
cacuuaauucagcuguuguuuu

SEQ ID NO: 12005 - RNA, 22 nt, Artificial Sequence
  Guide RNA
gucacuuaauucagcuguuguu

SEQ ID NO: 12006 - RNA, 22 nt, Artificial Sequence
  Guide RNA
ucacuuaauucagcuguuguuu

SEQ ID NO: 12007 - RNA, 20 nt, Artificial Sequence
  Guide RNA
aaacaaacagcugaauuaag

SEQ ID NO: 12008 - RNA, 20 nt, Artificial Sequence
  Guide RNA
aacaaacagcugaauuaagu

SEQ ID NO: 12009 - RNA, 20 nt, Artificial Sequence
  Guide RNA
acaaacagcugaauuaagug

SEQ ID NO: 12010 - RNA, 20 nt, Artificial Sequence
  Guide RNA
acuuaauucagcuguuuguu

SEQ ID NO: 12011 - RNA, 20 nt, Artificial Sequence
  Guide RNA
cacuuaauucagcuguuugu

SEQ ID NO: 12012 - RNA, 20 nt, Artificial Sequence
  Guide RNA
cuuaauucagcuguuuguuu

SEQ ID NO: 12013 - RNA, 20 nt, Artificial Sequence
  Guide RNA
ucacuuaauucagcuguuug

SEQ ID NO: 12014 - RNA, 21 nt, Artificial Sequence
  Guide RNA
aacaaacagcugaauuaagug

SEQ ID NO: 12015 - RNA, 21 nt, Artificial Sequence
  Guide RNA
acaaacagcugaauuaaguga

SEQ ID NO: 12016 - RNA, 21 nt, Artificial Sequence
  Guide RNA
cacuuaauucagcuguuuguu

SEQ ID NO: 12017 - RNA, 21 nt, Artificial Sequence
  Guide RNA
gucacuuaauucagcuguuug

SEQ ID NO: 12018 - RNA, 21 nt, Artificial Sequence
  Guide RNA
ucacuuaauucagcuguuugu

SEQ ID NO: 12019 - RNA, 22 nt, Artificial Sequence
  Guide RNA
aaacaaacagcugaauuaagug

SEQ ID NO: 12020 - RNA, 22 nt, Artificial Sequence
  Guide RNA
aacaaacagcugaauuaaguga

SEQ ID NO: 12021 - RNA, 22 nt, Artificial Sequence
  Guide RNA
acaaacagcugaauuaagugac

SEQ ID NO: 12022 - RNA, 22 nt, Artificial Sequence
  Guide RNA
agucacuuaauucagcuguuug

SEQ ID NO: 12023 - RNA, 22 nt, Artificial Sequence
  Guide RNA
cacuuaauucagcuguuuguuu

SEQ ID NO: 12024 - RNA, 22 nt, Artificial Sequence
  Guide RNA
gucacuuaauucagcuguuugu

SEQ ID NO: 12025 - RNA, 22 nt, Artificial Sequence
  Guide RNA
ucacuuaauucagcuguuuguu

SEQ ID NO: 12026 - RNA, 20 nt, Artificial Sequence
  Guide RNA
aaaaacaggcuaccaaaauu

SEQ ID NO: 12027 - RNA, 20 nt, Artificial Sequence
  Guide RNA
aaaacaggcuaccaaaauuu

SEQ ID NO: 12028 - RNA, 20 nt, Artificial Sequence
  Guide RNA
aaacaggcuaccaaaauuua

SEQ ID NO: 12029 - RNA, 20 nt, Artificial Sequence
  Guide RNA
aaauuuugguagccuguuuu

SEQ ID NO: 12030 - RNA, 20 nt, Artificial Sequence
  Guide RNA
aacaggcuaccaaaauuuau

SEQ ID NO: 12031 - RNA, 20 nt, Artificial Sequence
  Guide RNA
aauuuugguagccuguuuuu

SEQ ID NO: 12032 - RNA, 20 nt, Artificial Sequence
  Guide RNA
acaggcuaccaaaauuuauc

SEQ ID NO: 12033 - RNA, 20 nt, Artificial Sequence
  Guide RNA
acaggcuaucaaaauuuauc

SEQ ID NO: 12034 - RNA, 20 nt, Artificial Sequence
  Guide RNA
accugauuuuaaaaacaggc

SEQ ID NO: 12035 - RNA, 20 nt, Artificial Sequence
  Guide RNA
aggcuaccaaaauuuaucca

SEQ ID NO: 12036 - RNA, 20 nt, Artificial Sequence
  Guide RNA
aggcuaucaaaauuuaucca

SEQ ID NO: 12037 - RNA, 20 nt, Artificial Sequence
  Guide RNA
auaaauuuugguagccuguu

SEQ ID NO: 12038 - RNA, 20 nt, Artificial Sequence
  Guide RNA
auuuuaaaaacaggcuacca

SEQ ID NO: 12039 - RNA, 20 nt, Artificial Sequence
  Guide RNA
auuuugguagccuguuuuua

SEQ ID NO: 12040 - RNA, 20 nt, Artificial Sequence
  Guide RNA
caggcuaccaaaauuuaucc

SEQ ID NO: 12041 - RNA, 20 nt, Artificial Sequence
  Guide RNA
caggcuaucaaaauuuaucc

SEQ ID NO: 12042 - RNA, 20 nt, Artificial Sequence
  Guide RNA
ccugauuuuaaaaacaggcu

SEQ ID NO: 12043 - RNA, 20 nt, Artificial Sequence
  Guide RNA
cugauuuuaaaaacaggcua

SEQ ID NO: 12044 - RNA, 20 nt, Artificial Sequence
  Guide RNA
gauaaauuuugauagccugu

SEQ ID NO: 12045 - RNA, 20 nt, Artificial Sequence
  Guide RNA
gauaaauuuugguagccugu

SEQ ID NO: 12046 - RNA, 20 nt, Artificial Sequence
  Guide RNA
gauagccuguuuuuaaaauc

SEQ ID NO: 12047 - RNA, 20 nt, Artificial Sequence
  Guide RNA
gauuuuaaaaacaggcuacc

SEQ ID NO: 12048 - RNA, 20 nt, Artificial Sequence
  Guide RNA
gauuuuaaaaacaggcuauc

SEQ ID NO: 12049 - RNA, 20 nt, Artificial Sequence
  Guide RNA
gcuaccaaaauuuauccaaa

SEQ ID NO: 12050 - RNA, 20 nt, Artificial Sequence
  Guide RNA
ggauaaauuuugauagccug

SEQ ID NO: 12051 - RNA, 20 nt, Artificial Sequence
  Guide RNA
ggauaaauuuugguagccug

SEQ ID NO: 12052 - RNA, 20 nt, Artificial Sequence
  Guide RNA
ggcuaccaaaauuuauccaa

SEQ ID NO: 12053 - RNA, 20 nt, Artificial Sequence
  Guide RNA
ggcuaucaaaauuuauccaa

SEQ ID NO: 12054 - RNA, 20 nt, Artificial Sequence
  Guide RNA
gguagccuguuuuuaaaauc

SEQ ID NO: 12055 - RNA, 20 nt, Artificial Sequence
  Guide RNA
uaaaaacaggcuaccaaaau

SEQ ID NO: 12056 - RNA, 20 nt, Artificial Sequence
  Guide RNA
uaaauuuugguagccuguuu

SEQ ID NO: 12057 - RNA, 20 nt, Artificial Sequence
  Guide RNA
uaccugauuuuaaaaacagg

SEQ ID NO: 12058 - RNA, 20 nt, Artificial Sequence
  Guide RNA
ugauuuuaaaaacaggcuac

SEQ ID NO: 12059 - RNA, 20 nt, Artificial Sequence
  Guide RNA
uggauaaauuuugauagccu

SEQ ID NO: 12060 - RNA, 20 nt, Artificial Sequence
  Guide RNA
uggauaaauuuugguagccu

SEQ ID NO: 12061 - RNA, 20 nt, Artificial Sequence
  Guide RNA
ugguagccuguuuuuaaaau

SEQ ID NO: 12062 - RNA, 20 nt, Artificial Sequence
  Guide RNA
uuaaaaacaggcuaccaaaa

SEQ ID NO: 12063 - RNA, 20 nt, Artificial Sequence
  Guide RNA
uuggauaaauuuugauagcc

SEQ ID NO: 12064 - RNA, 20 nt, Artificial Sequence
  Guide RNA
uuggauaaauuuugguagcc

SEQ ID NO: 12065 - RNA, 20 nt, Artificial Sequence
  Guide RNA
uugguagccuguuuuuaaaa

SEQ ID NO: 12066 - RNA, 20 nt, Artificial Sequence
  Guide RNA
uuuaaaaacaggcuaccaaa

SEQ ID NO: 12067 - RNA, 20 nt, Artificial Sequence
  Guide RNA
uuuggauaaauuuugguagc

SEQ ID NO: 12068 - RNA, 20 nt, Artificial Sequence
  Guide RNA
uuugguagccuguuuuuaaa

SEQ ID NO: 12069 - RNA, 20 nt, Artificial Sequence
  Guide RNA
uuuuaaaaacaggcuaccaa

SEQ ID NO: 12070 - RNA, 20 nt, Artificial Sequence
  Guide RNA
uuuugguagccuguuuuuaa

SEQ ID NO: 12071 - RNA, 21 nt, Artificial Sequence
  Guide RNA
aacaggcuaccaaaauuuauc

SEQ ID NO: 12072 - RNA, 21 nt, Artificial Sequence
  Guide RNA
acaggcuaccaaaauuuaucc

SEQ ID NO: 12073 - RNA, 21 nt, Artificial Sequence
  Guide RNA
acaggcuaucaaaauuuaucc

SEQ ID NO: 12074 - RNA, 21 nt, Artificial Sequence
  Guide RNA
accugauuuuaaaaacaggcu

SEQ ID NO: 12075 - RNA, 21 nt, Artificial Sequence
  Guide RNA
aggcuaccaaaauuuauccaa

SEQ ID NO: 12076 - RNA, 21 nt, Artificial Sequence
  Guide RNA
caggcuaccaaaauuuaucca

SEQ ID NO: 12077 - RNA, 21 nt, Artificial Sequence
  Guide RNA
caggcuaucaaaauuuaucca

SEQ ID NO: 12078 - RNA, 21 nt, Artificial Sequence
  Guide RNA
ccugauuuuaaaaacaggcua

SEQ ID NO: 12079 - RNA, 21 nt, Artificial Sequence
  Guide RNA
cugauuuuaaaaacaggcuac

SEQ ID NO: 12080 - RNA, 21 nt, Artificial Sequence
  Guide RNA
gauaaauuuugguagccuguu

SEQ ID NO: 12081 - RNA, 21 nt, Artificial Sequence
  Guide RNA
gauuuuaaaaacaggcuacca

SEQ ID NO: 12082 - RNA, 21 nt, Artificial Sequence
  Guide RNA
ggauaaauuuugauagccugu

SEQ ID NO: 12083 - RNA, 21 nt, Artificial Sequence
  Guide RNA
ggauaaauuuugguagccugu

SEQ ID NO: 12084 - RNA, 21 nt, Artificial Sequence
  Guide RNA
ggcuaccaaaauuuauccaaa

SEQ ID NO: 12085 - RNA, 21 nt, Artificial Sequence
  Guide RNA
gguagccuguuuuuaaaauca

SEQ ID NO: 12086 - RNA, 21 nt, Artificial Sequence
  Guide RNA
uaccugauuuuaaaaacaggc

SEQ ID NO: 12087 - RNA, 21 nt, Artificial Sequence
  Guide RNA
ugauuuuaaaaacaggcuacc

SEQ ID NO: 12088 - RNA, 21 nt, Artificial Sequence
  Guide RNA
uggauaaauuuugauagccug

SEQ ID NO: 12089 - RNA, 21 nt, Artificial Sequence
  Guide RNA
uggauaaauuuugguagccug

SEQ ID NO: 12090 - RNA, 21 nt, Artificial Sequence
  Guide RNA
ugguagccuguuuuuaaaauc

SEQ ID NO: 12091 - RNA, 21 nt, Artificial Sequence
  Guide RNA
uuggauaaauuuugguagccu

SEQ ID NO: 12092 - RNA, 21 nt, Artificial Sequence
  Guide RNA
uuuggauaaauuuugguagcc

SEQ ID NO: 12093 - RNA, 22 nt, Artificial Sequence
  Guide RNA
aaacaggcuaccaaaauuuauc

SEQ ID NO: 12094 - RNA, 22 nt, Artificial Sequence
  Guide RNA
aacaggcuaccaaaauuuaucc

SEQ ID NO: 12095 - RNA, 22 nt, Artificial Sequence
  Guide RNA
aacaggcuaucaaaauuuaucc

SEQ ID NO: 12096 - RNA, 22 nt, Artificial Sequence
  Guide RNA
acaggcuaccaaaauuuaucca

SEQ ID NO: 12097 - RNA, 22 nt, Artificial Sequence
  Guide RNA
acaggcuaucaaaauuuaucca

SEQ ID NO: 12098 - RNA, 22 nt, Artificial Sequence
  Guide RNA
accugauuuuaaaaacaggcua

SEQ ID NO: 12099 - RNA, 22 nt, Artificial Sequence
  Guide RNA
aggcuaccaaaauuuauccaaa

SEQ ID NO: 12100 - RNA, 22 nt, Artificial Sequence
  Guide RNA
auuuggauaaauuuugguagcc

SEQ ID NO: 12101 - RNA, 22 nt, Artificial Sequence
  Guide RNA
caggcuaccaaaauuuauccaa

SEQ ID NO: 12102 - RNA, 22 nt, Artificial Sequence
  Guide RNA
caggcuaucaaaauuuauccaa

SEQ ID NO: 12103 - RNA, 22 nt, Artificial Sequence
  Guide RNA
ccugauuuuaaaaacaggcuac

SEQ ID NO: 12104 - RNA, 22 nt, Artificial Sequence
  Guide RNA
ccugauuuuaaaaacaggcuau

SEQ ID NO: 12105 - RNA, 22 nt, Artificial Sequence
  Guide RNA
cugauuuuaaaaacaggcuacc

SEQ ID NO: 12106 - RNA, 22 nt, Artificial Sequence
  Guide RNA
cugauuuuaaaaacaggcuauc

SEQ ID NO: 12107 - RNA, 22 nt, Artificial Sequence
  Guide RNA
cuuaccugauuuuaaaaacagg

SEQ ID NO: 12108 - RNA, 22 nt, Artificial Sequence
  Guide RNA
gauaaauuuugguagccuguuu

SEQ ID NO: 12109 - RNA, 22 nt, Artificial Sequence
  Guide RNA
gauagccuguuuuuaaaaucag

SEQ ID NO: 12110 - RNA, 22 nt, Artificial Sequence
  Guide RNA
gauuuuaaaaacaggcuaccaa

SEQ ID NO: 12111 - RNA, 22 nt, Artificial Sequence
  Guide RNA
ggauaaauuuugauagccuguu

SEQ ID NO: 12112 - RNA, 22 nt, Artificial Sequence
  Guide RNA
ggauaaauuuugguagccuguu

SEQ ID NO: 12113 - RNA, 22 nt, Artificial Sequence
  Guide RNA
ggcuaccaaaauuuauccaaau

SEQ ID NO: 12114 - RNA, 22 nt, Artificial Sequence
  Guide RNA
gguagccuguuuuuaaaaucag

SEQ ID NO: 12115 - RNA, 22 nt, Artificial Sequence
  Guide RNA
uaccugauuuuaaaaacaggcu

SEQ ID NO: 12116 - RNA, 22 nt, Artificial Sequence
  Guide RNA
ugauuuuaaaaacaggcuacca

SEQ ID NO: 12117 - RNA, 22 nt, Artificial Sequence
  Guide RNA
uggauaaauuuugauagccugu

SEQ ID NO: 12118 - RNA, 22 nt, Artificial Sequence
  Guide RNA
uggauaaauuuugguagccugu

SEQ ID NO: 12119 - RNA, 22 nt, Artificial Sequence
  Guide RNA
ugguagccuguuuuuaaaauca

SEQ ID NO: 12120 - RNA, 22 nt, Artificial Sequence
  Guide RNA
uuaccugauuuuaaaaacaggc

SEQ ID NO: 12121 - RNA, 22 nt, Artificial Sequence
  Guide RNA
uuggauaaauuuugauagccug

SEQ ID NO: 12122 - RNA, 22 nt, Artificial Sequence
  Guide RNA
uuggauaaauuuugguagccug

SEQ ID NO: 12123 - RNA, 22 nt, Artificial Sequence
  Guide RNA
uugguagccuguuuuuaaaauc

SEQ ID NO: 12124 - RNA, 22 nt, Artificial Sequence
  Guide RNA
uuuggauaaauuuugguagccu

SEQ ID NO: 12125 - RNA, 20 nt, Artificial Sequence
  Guide RNA
aaaaugucucucucaccccc

SEQ ID NO: 12126 - RNA, 20 nt, Artificial Sequence
  Guide RNA
aaaaugucucucucuccccc

SEQ ID NO: 12127 - RNA, 20 nt, Artificial Sequence
  Guide RNA
aaaugucucucucacccccu

SEQ ID NO: 12128 - RNA, 20 nt, Artificial Sequence
  Guide RNA
aaaugucucucucucccccu

SEQ ID NO: 12129 - RNA, 20 nt, Artificial Sequence
  Guide RNA
aagcuagggggagagagaga

SEQ ID NO: 12130 - RNA, 20 nt, Artificial Sequence
  Guide RNA
aagcuagggggugagagaga

SEQ ID NO: 12131 - RNA, 20 nt, Artificial Sequence
  Guide RNA
aaugucucucucacccccua

SEQ ID NO: 12132 - RNA, 20 nt, Artificial Sequence
  Guide RNA
aaugucucucucucccccua

SEQ ID NO: 12133 - RNA, 20 nt, Artificial Sequence
  Guide RNA
acaucaugaagcuaggggga

SEQ ID NO: 12134 - RNA, 20 nt, Artificial Sequence
  Guide RNA
acaucaugaagcuagggggu

SEQ ID NO: 12135 - RNA, 20 nt, Artificial Sequence
  Guide RNA
agcuagggggagagagagac

SEQ ID NO: 12136 - RNA, 20 nt, Artificial Sequence
  Guide RNA
agcuagggggugagagagac

SEQ ID NO: 12137 - RNA, 20 nt, Artificial Sequence
  Guide RNA
agggggagagagagacauuu

SEQ ID NO: 12138 - RNA, 20 nt, Artificial Sequence
  Guide RNA
agggggugagagagacauuu

SEQ ID NO: 12139 - RNA, 20 nt, Artificial Sequence
  Guide RNA
agucacaucaugaagcuagg

SEQ ID NO: 12140 - RNA, 20 nt, Artificial Sequence
  Guide RNA
aucaugaagcuagggggaga

SEQ ID NO: 12141 - RNA, 20 nt, Artificial Sequence
  Guide RNA
aucaugaagcuaggggguga

SEQ ID NO: 12142 - RNA, 20 nt, Artificial Sequence
  Guide RNA
augaagcuagggggagagag

SEQ ID NO: 12143 - RNA, 20 nt, Artificial Sequence
  Guide RNA
augaagcuagggggugagag

SEQ ID NO: 12144 - RNA, 20 nt, Artificial Sequence
  Guide RNA
augucucucucacccccuag

SEQ ID NO: 12145 - RNA, 20 nt, Artificial Sequence
  Guide RNA
augucucucucucccccuag

SEQ ID NO: 12146 - RNA, 20 nt, Artificial Sequence
  Guide RNA
cacaucaugaagcuaggggg

SEQ ID NO: 12147 - RNA, 20 nt, Artificial Sequence
  Guide RNA
cacccccuagcuucaugaug

SEQ ID NO: 12148 - RNA, 20 nt, Artificial Sequence
  Guide RNA
caucaugaagcuagggggag

SEQ ID NO: 12149 - RNA, 20 nt, Artificial Sequence
  Guide RNA
caucaugaagcuagggggug

SEQ ID NO: 12150 - RNA, 20 nt, Artificial Sequence
  Guide RNA
caugaagcuagggggagaga

SEQ ID NO: 12151 - RNA, 20 nt, Artificial Sequence
  Guide RNA
caugaagcuagggggugaga

SEQ ID NO: 12152 - RNA, 20 nt, Artificial Sequence
  Guide RNA
cuagggggagagagagacau

SEQ ID NO: 12153 - RNA, 20 nt, Artificial Sequence
  Guide RNA
cuagggggugagagagacau

SEQ ID NO: 12154 - RNA, 20 nt, Artificial Sequence
  Guide RNA
cucacccccuagcuucauga

SEQ ID NO: 12155 - RNA, 20 nt, Artificial Sequence
  Guide RNA
cucccccuagcuucaugaug

SEQ ID NO: 12156 - RNA, 20 nt, Artificial Sequence
  Guide RNA
cucucacccccuagcuucau

SEQ ID NO: 12157 - RNA, 20 nt, Artificial Sequence
  Guide RNA
cucucccccuagcuucauga

SEQ ID NO: 12158 - RNA, 20 nt, Artificial Sequence
  Guide RNA
cucucucacccccuagcuuc

SEQ ID NO: 12159 - RNA, 20 nt, Artificial Sequence
  Guide RNA
cucucucccccuagcuucau

SEQ ID NO: 12160 - RNA, 20 nt, Artificial Sequence
  Guide RNA
cucucucucccccuagcuuc

SEQ ID NO: 12161 - RNA, 20 nt, Artificial Sequence
  Guide RNA
gaagcuagggggagagagag

SEQ ID NO: 12162 - RNA, 20 nt, Artificial Sequence
  Guide RNA
gaagcuagggggugagagag

SEQ ID NO: 12163 - RNA, 20 nt, Artificial Sequence
  Guide RNA
gagagagagacauuuuaaac

SEQ ID NO: 12164 - RNA, 20 nt, Artificial Sequence
  Guide RNA
gcuagggggagagagagaca

SEQ ID NO: 12165 - RNA, 20 nt, Artificial Sequence
  Guide RNA
gcuagggggugagagagaca

SEQ ID NO: 12166 - RNA, 20 nt, Artificial Sequence
  Guide RNA
ggagagagagacauuuuaaa

SEQ ID NO: 12167 - RNA, 20 nt, Artificial Sequence
  Guide RNA
gggagagagagacauuuuaa

SEQ ID NO: 12168 - RNA, 20 nt, Artificial Sequence
  Guide RNA
ggggagagagagacauuuua

SEQ ID NO: 12169 - RNA, 20 nt, Artificial Sequence
  Guide RNA
gggggagagagagacauuuu

SEQ ID NO: 12170 - RNA, 20 nt, Artificial Sequence
  Guide RNA
gggggugagagagacauuuu

SEQ ID NO: 12171 - RNA, 20 nt, Artificial Sequence
  Guide RNA
ggggugagagagacauuuua

SEQ ID NO: 12172 - RNA, 20 nt, Artificial Sequence
  Guide RNA
gggugagagagacauuuuaa

SEQ ID NO: 12173 - RNA, 20 nt, Artificial Sequence
  Guide RNA
ggugagagagacauuuuaaa

SEQ ID NO: 12174 - RNA, 20 nt, Artificial Sequence
  Guide RNA
gucacaucaugaagcuaggg

SEQ ID NO: 12175 - RNA, 20 nt, Artificial Sequence
  Guide RNA
gucucucucacccccuagcu

SEQ ID NO: 12176 - RNA, 20 nt, Artificial Sequence
  Guide RNA
gucucucucucccccuagcu

SEQ ID NO: 12177 - RNA, 20 nt, Artificial Sequence
  Guide RNA
gugagagagacauuuuaaac

SEQ ID NO: 12178 - RNA, 20 nt, Artificial Sequence
  Guide RNA
guguguuuaaaaugucucuc

SEQ ID NO: 12179 - RNA, 20 nt, Artificial Sequence
  Guide RNA
guguuuaaaaugucucucuc

SEQ ID NO: 12180 - RNA, 20 nt, Artificial Sequence
  Guide RNA
guuuaaaaugucucucucac

SEQ ID NO: 12181 - RNA, 20 nt, Artificial Sequence
  Guide RNA
guuuaaaaugucucucucuc

SEQ ID NO: 12182 - RNA, 20 nt, Artificial Sequence
  Guide RNA
uaaaaugucucucucacccc

SEQ ID NO: 12183 - RNA, 20 nt, Artificial Sequence
  Guide RNA
uaaaaugucucucucucccc

SEQ ID NO: 12184 - RNA, 20 nt, Artificial Sequence
  Guide RNA
uagggggagagagagacauu

SEQ ID NO: 12185 - RNA, 20 nt, Artificial Sequence
  Guide RNA
uagggggugagagagacauu

SEQ ID NO: 12186 - RNA, 20 nt, Artificial Sequence
  Guide RNA
ucacaucaugaagcuagggg

SEQ ID NO: 12187 - RNA, 20 nt, Artificial Sequence
  Guide RNA
ucacccccuagcuucaugau

SEQ ID NO: 12188 - RNA, 20 nt, Artificial Sequence
  Guide RNA
ucaugaagcuagggggagag

SEQ ID NO: 12189 - RNA, 20 nt, Artificial Sequence
  Guide RNA
ucaugaagcuagggggugag

SEQ ID NO: 12190 - RNA, 20 nt, Artificial Sequence
  Guide RNA
ucucacccccuagcuucaug

SEQ ID NO: 12191 - RNA, 20 nt, Artificial Sequence
  Guide RNA
ucucccccuagcuucaugau

SEQ ID NO: 12192 - RNA, 20 nt, Artificial Sequence
  Guide RNA
ucucucacccccuagcuuca

SEQ ID NO: 12193 - RNA, 20 nt, Artificial Sequence
  Guide RNA
ucucucccccuagcuucaug

SEQ ID NO: 12194 - RNA, 20 nt, Artificial Sequence
  Guide RNA
ucucucucacccccuagcuu

SEQ ID NO: 12195 - RNA, 20 nt, Artificial Sequence
  Guide RNA
ucucucucccccuagcuuca

SEQ ID NO: 12196 - RNA, 20 nt, Artificial Sequence
  Guide RNA
ucucucucucccccuagcuu

SEQ ID NO: 12197 - RNA, 20 nt, Artificial Sequence
  Guide RNA
ugaagcuagggggagagaga

SEQ ID NO: 12198 - RNA, 20 nt, Artificial Sequence
  Guide RNA
ugaagcuagggggugagaga

SEQ ID NO: 12199 - RNA, 20 nt, Artificial Sequence
  Guide RNA
ugucucucucacccccuagc

SEQ ID NO: 12200 - RNA, 20 nt, Artificial Sequence
  Guide RNA
ugucucucucucccccuagc

SEQ ID NO: 12201 - RNA, 20 nt, Artificial Sequence
  Guide RNA
uguguguuuaaaaugucucu

SEQ ID NO: 12202 - RNA, 20 nt, Artificial Sequence
  Guide RNA
uguguuuaaaaugucucucu

SEQ ID NO: 12203 - RNA, 20 nt, Artificial Sequence
  Guide RNA
uguuuaaaaugucucucuca

SEQ ID NO: 12204 - RNA, 20 nt, Artificial Sequence
  Guide RNA
uguuuaaaaugucucucucu

SEQ ID NO: 12205 - RNA, 20 nt, Artificial Sequence
  Guide RNA
uuaaaaugucucucucaccc

SEQ ID NO: 12206 - RNA, 20 nt, Artificial Sequence
  Guide RNA
uuaaaaugucucucucuccc

SEQ ID NO: 12207 - RNA, 20 nt, Artificial Sequence
  Guide RNA
uuuaaaaugucucucucacc

SEQ ID NO: 12208 - RNA, 20 nt, Artificial Sequence
  Guide RNA
uuuaaaaugucucucucucc

SEQ ID NO: 12209 - RNA, 21 nt, Artificial Sequence
  Guide RNA
aaaaugucucucucacccccu

SEQ ID NO: 12210 - RNA, 21 nt, Artificial Sequence
  Guide RNA
aaaaugucucucucucccccu

SEQ ID NO: 12211 - RNA, 21 nt, Artificial Sequence
  Guide RNA
aaaugucucucucacccccua

SEQ ID NO: 12212 - RNA, 21 nt, Artificial Sequence
  Guide RNA
aaaugucucucucucccccua

SEQ ID NO: 12213 - RNA, 21 nt, Artificial Sequence
  Guide RNA
aagcuagggggagagagagac

SEQ ID NO: 12214 - RNA, 21 nt, Artificial Sequence
  Guide RNA
aagcuagggggugagagagac

SEQ ID NO: 12215 - RNA, 21 nt, Artificial Sequence
  Guide RNA
aaugucucucucacccccuag

SEQ ID NO: 12216 - RNA, 21 nt, Artificial Sequence
  Guide RNA
aaugucucucucucccccuag

SEQ ID NO: 12217 - RNA, 21 nt, Artificial Sequence
  Guide RNA
acaucaugaagcuagggggag

SEQ ID NO: 12218 - RNA, 21 nt, Artificial Sequence
  Guide RNA
acaucaugaagcuagggggug

SEQ ID NO: 12219 - RNA, 21 nt, Artificial Sequence
  Guide RNA
agcuagggggagagagagaca

SEQ ID NO: 12220 - RNA, 21 nt, Artificial Sequence
  Guide RNA
agcuagggggugagagagaca

SEQ ID NO: 12221 - RNA, 21 nt, Artificial Sequence
  Guide RNA
agggggagagagagacauuuu

SEQ ID NO: 12222 - RNA, 21 nt, Artificial Sequence
  Guide RNA
agggggugagagagacauuuu

SEQ ID NO: 12223 - RNA, 21 nt, Artificial Sequence
  Guide RNA
agucacaucaugaagcuaggg

SEQ ID NO: 12224 - RNA, 21 nt, Artificial Sequence
  Guide RNA
aucaugaagcuagggggagag

SEQ ID NO: 12225 - RNA, 21 nt, Artificial Sequence
  Guide RNA
aucaugaagcuagggggugag

SEQ ID NO: 12226 - RNA, 21 nt, Artificial Sequence
  Guide RNA
augaagcuagggggagagaga

SEQ ID NO: 12227 - RNA, 21 nt, Artificial Sequence
  Guide RNA
augaagcuagggggugagaga

SEQ ID NO: 12228 - RNA, 21 nt, Artificial Sequence
  Guide RNA
augucucucucacccccuagc

SEQ ID NO: 12229 - RNA, 21 nt, Artificial Sequence
  Guide RNA
augucucucucucccccuagc

SEQ ID NO: 12230 - RNA, 21 nt, Artificial Sequence
  Guide RNA
cacaucaugaagcuaggggga

SEQ ID NO: 12231 - RNA, 21 nt, Artificial Sequence
  Guide RNA
cacaucaugaagcuagggggu

SEQ ID NO: 12232 - RNA, 21 nt, Artificial Sequence
  Guide RNA
cacccccuagcuucaugaugu

SEQ ID NO: 12233 - RNA, 21 nt, Artificial Sequence
  Guide RNA
caucaugaagcuagggggaga

SEQ ID NO: 12234 - RNA, 21 nt, Artificial Sequence
  Guide RNA
caucaugaagcuaggggguga

SEQ ID NO: 12235 - RNA, 21 nt, Artificial Sequence
  Guide RNA
caugaagcuagggggagagag

SEQ ID NO: 12236 - RNA, 21 nt, Artificial Sequence
  Guide RNA
caugaagcuagggggugagag

SEQ ID NO: 12237 - RNA, 21 nt, Artificial Sequence
  Guide RNA
cuagggggagagagagacauu

SEQ ID NO: 12238 - RNA, 21 nt, Artificial Sequence
  Guide RNA
cuagggggugagagagacauu

SEQ ID NO: 12239 - RNA, 21 nt, Artificial Sequence
  Guide RNA
cucacccccuagcuucaugau

SEQ ID NO: 12240 - RNA, 21 nt, Artificial Sequence
  Guide RNA
cucccccuagcuucaugaugu

SEQ ID NO: 12241 - RNA, 21 nt, Artificial Sequence
  Guide RNA
cucucacccccuagcuucaug

SEQ ID NO: 12242 - RNA, 21 nt, Artificial Sequence
  Guide RNA
cucucccccuagcuucaugau

SEQ ID NO: 12243 - RNA, 21 nt, Artificial Sequence
  Guide RNA
cucucucacccccuagcuuca

SEQ ID NO: 12244 - RNA, 21 nt, Artificial Sequence
  Guide RNA
cucucucccccuagcuucaug

SEQ ID NO: 12245 - RNA, 21 nt, Artificial Sequence
  Guide RNA
cucucucucccccuagcuuca

SEQ ID NO: 12246 - RNA, 21 nt, Artificial Sequence
  Guide RNA
gaagcuagggggagagagaga

SEQ ID NO: 12247 - RNA, 21 nt, Artificial Sequence
  Guide RNA
gaagcuagggggugagagaga

SEQ ID NO: 12248 - RNA, 21 nt, Artificial Sequence
  Guide RNA
gagagagagacauuuuaaaca

SEQ ID NO: 12249 - RNA, 21 nt, Artificial Sequence
  Guide RNA
gagucacaucaugaagcuagg

SEQ ID NO: 12250 - RNA, 21 nt, Artificial Sequence
  Guide RNA
gcuagggggagagagagacau

SEQ ID NO: 12251 - RNA, 21 nt, Artificial Sequence
  Guide RNA
gcuagggggugagagagacau

SEQ ID NO: 12252 - RNA, 21 nt, Artificial Sequence
  Guide RNA
ggagagagagacauuuuaaac

SEQ ID NO: 12253 - RNA, 21 nt, Artificial Sequence
  Guide RNA
gggagagagagacauuuuaaa

SEQ ID NO: 12254 - RNA, 21 nt, Artificial Sequence
  Guide RNA
ggggagagagagacauuuuaa

SEQ ID NO: 12255 - RNA, 21 nt, Artificial Sequence
  Guide RNA
gggggagagagagacauuuua

SEQ ID NO: 12256 - RNA, 21 nt, Artificial Sequence
  Guide RNA
gggggugagagagacauuuua

SEQ ID NO: 12257 - RNA, 21 nt, Artificial Sequence
  Guide RNA
ggggugagagagacauuuuaa

SEQ ID NO: 12258 - RNA, 21 nt, Artificial Sequence
  Guide RNA
gggugagagagacauuuuaaa

SEQ ID NO: 12259 - RNA, 21 nt, Artificial Sequence
  Guide RNA
ggugagagagacauuuuaaac

SEQ ID NO: 12260 - RNA, 21 nt, Artificial Sequence
  Guide RNA
gucacaucaugaagcuagggg

SEQ ID NO: 12261 - RNA, 21 nt, Artificial Sequence
  Guide RNA
gucucucucacccccuagcuu

SEQ ID NO: 12262 - RNA, 21 nt, Artificial Sequence
  Guide RNA
gucucucucucccccuagcuu

SEQ ID NO: 12263 - RNA, 21 nt, Artificial Sequence
  Guide RNA
gugagagagacauuuuaaaca

SEQ ID NO: 12264 - RNA, 21 nt, Artificial Sequence
  Guide RNA
guguguuuaaaaugucucucu

SEQ ID NO: 12265 - RNA, 21 nt, Artificial Sequence
  Guide RNA
guguuuaaaaugucucucuca

SEQ ID NO: 12266 - RNA, 21 nt, Artificial Sequence
  Guide RNA
guguuuaaaaugucucucucu

SEQ ID NO: 12267 - RNA, 21 nt, Artificial Sequence
  Guide RNA
guuuaaaaugucucucucacc

SEQ ID NO: 12268 - RNA, 21 nt, Artificial Sequence
  Guide RNA
guuuaaaaugucucucucucc

SEQ ID NO: 12269 - RNA, 21 nt, Artificial Sequence
  Guide RNA
uaaaaugucucucucaccccc

SEQ ID NO: 12270 - RNA, 21 nt, Artificial Sequence
  Guide RNA
uaaaaugucucucucuccccc

SEQ ID NO: 12271 - RNA, 21 nt, Artificial Sequence
  Guide RNA
uagggggagagagagacauuu

SEQ ID NO: 12272 - RNA, 21 nt, Artificial Sequence
  Guide RNA
uagggggugagagagacauuu

SEQ ID NO: 12273 - RNA, 21 nt, Artificial Sequence
  Guide RNA
ucacaucaugaagcuaggggg

SEQ ID NO: 12274 - RNA, 21 nt, Artificial Sequence
  Guide RNA
ucacccccuagcuucaugaug

SEQ ID NO: 12275 - RNA, 21 nt, Artificial Sequence
  Guide RNA
ucaugaagcuagggggagaga

SEQ ID NO: 12276 - RNA, 21 nt, Artificial Sequence
  Guide RNA
ucaugaagcuagggggugaga

SEQ ID NO: 12277 - RNA, 21 nt, Artificial Sequence
  Guide RNA
ucucacccccuagcuucauga

SEQ ID NO: 12278 - RNA, 21 nt, Artificial Sequence
  Guide RNA
ucucccccuagcuucaugaug

SEQ ID NO: 12279 - RNA, 21 nt, Artificial Sequence
  Guide RNA
ucucucacccccuagcuucau

SEQ ID NO: 12280 - RNA, 21 nt, Artificial Sequence
  Guide RNA
ucucucccccuagcuucauga

SEQ ID NO: 12281 - RNA, 21 nt, Artificial Sequence
  Guide RNA
ucucucucacccccuagcuuc

SEQ ID NO: 12282 - RNA, 21 nt, Artificial Sequence
  Guide RNA
ucucucucccccuagcuucau

SEQ ID NO: 12283 - RNA, 21 nt, Artificial Sequence
  Guide RNA
ucucucucucccccuagcuuc

SEQ ID NO: 12284 - RNA, 21 nt, Artificial Sequence
  Guide RNA
ugaagcuagggggagagagag

SEQ ID NO: 12285 - RNA, 21 nt, Artificial Sequence
  Guide RNA
ugaagcuagggggugagagag

SEQ ID NO: 12286 - RNA, 21 nt, Artificial Sequence
  Guide RNA
ugucucucucacccccuagcu

SEQ ID NO: 12287 - RNA, 21 nt, Artificial Sequence
  Guide RNA
ugucucucucucccccuagcu

SEQ ID NO: 12288 - RNA, 21 nt, Artificial Sequence
  Guide RNA
uguguguuuaaaaugucucuc

SEQ ID NO: 12289 - RNA, 21 nt, Artificial Sequence
  Guide RNA
uguguuuaaaaugucucucuc

SEQ ID NO: 12290 - RNA, 21 nt, Artificial Sequence
  Guide RNA
uguuuaaaaugucucucucac

SEQ ID NO: 12291 - RNA, 21 nt, Artificial Sequence
  Guide RNA
uguuuaaaaugucucucucuc

SEQ ID NO: 12292 - RNA, 21 nt, Artificial Sequence
  Guide RNA
uuaaaaugucucucucacccc

SEQ ID NO: 12293 - RNA, 21 nt, Artificial Sequence
  Guide RNA
uuaaaaugucucucucucccc

SEQ ID NO: 12294 - RNA, 21 nt, Artificial Sequence
  Guide RNA
uuuaaaaugucucucucaccc

SEQ ID NO: 12295 - RNA, 21 nt, Artificial Sequence
  Guide RNA
uuuaaaaugucucucucuccc

SEQ ID NO: 12296 - RNA, 22 nt, Artificial Sequence
  Guide RNA
aaaaugucucucucacccccua

SEQ ID NO: 12297 - RNA, 22 nt, Artificial Sequence
  Guide RNA
aaaaugucucucucucccccua

SEQ ID NO: 12298 - RNA, 22 nt, Artificial Sequence
  Guide RNA
aaaugucucucucacccccuag

SEQ ID NO: 12299 - RNA, 22 nt, Artificial Sequence
  Guide RNA
aaaugucucucucucccccuag

SEQ ID NO: 12300 - RNA, 22 nt, Artificial Sequence
  Guide RNA
aagcuagggggagagagagaca

SEQ ID NO: 12301 - RNA, 22 nt, Artificial Sequence
  Guide RNA
aagcuagggggugagagagaca

SEQ ID NO: 12302 - RNA, 22 nt, Artificial Sequence
  Guide RNA
aaugucucucucacccccuagc

SEQ ID NO: 12303 - RNA, 22 nt, Artificial Sequence
  Guide RNA
aaugucucucucucccccuagc

SEQ ID NO: 12304 - RNA, 22 nt, Artificial Sequence
  Guide RNA
acaucaugaagcuagggggaga

SEQ ID NO: 12305 - RNA, 22 nt, Artificial Sequence
  Guide RNA
acaucaugaagcuaggggguga

SEQ ID NO: 12306 - RNA, 22 nt, Artificial Sequence
  Guide RNA
agagucacaucaugaagcuagg

SEQ ID NO: 12307 - RNA, 22 nt, Artificial Sequence
  Guide RNA
agcuagggggagagagagacau

SEQ ID NO: 12308 - RNA, 22 nt, Artificial Sequence
  Guide RNA
agcuagggggugagagagacau

SEQ ID NO: 12309 - RNA, 22 nt, Artificial Sequence
  Guide RNA
agggggagagagagacauuuua

SEQ ID NO: 12310 - RNA, 22 nt, Artificial Sequence
  Guide RNA
agggggugagagagacauuuua

SEQ ID NO: 12311 - RNA, 22 nt, Artificial Sequence
  Guide RNA
agucacaucaugaagcuagggg

SEQ ID NO: 12312 - RNA, 22 nt, Artificial Sequence
  Guide RNA
aucaugaagcuagggggagaga

SEQ ID NO: 12313 - RNA, 22 nt, Artificial Sequence
  Guide RNA
aucaugaagcuagggggugaga

SEQ ID NO: 12314 - RNA, 22 nt, Artificial Sequence
  Guide RNA
augaagcuagggggagagagag

SEQ ID NO: 12315 - RNA, 22 nt, Artificial Sequence
  Guide RNA
augaagcuagggggugagagag

SEQ ID NO: 12316 - RNA, 22 nt, Artificial Sequence
  Guide RNA
augucucucucacccccuagcu

SEQ ID NO: 12317 - RNA, 22 nt, Artificial Sequence
  Guide RNA
augucucucucucccccuagcu

SEQ ID NO: 12318 - RNA, 22 nt, Artificial Sequence
  Guide RNA
cacaucaugaagcuagggggag

SEQ ID NO: 12319 - RNA, 22 nt, Artificial Sequence
  Guide RNA
cacaucaugaagcuagggggug

SEQ ID NO: 12320 - RNA, 22 nt, Artificial Sequence
  Guide RNA
cacccccuagcuucaugaugug

SEQ ID NO: 12321 - RNA, 22 nt, Artificial Sequence
  Guide RNA
caucaugaagcuagggggagag

SEQ ID NO: 12322 - RNA, 22 nt, Artificial Sequence
  Guide RNA
caucaugaagcuagggggugag

SEQ ID NO: 12323 - RNA, 22 nt, Artificial Sequence
  Guide RNA
caugaagcuagggggagagaga

SEQ ID NO: 12324 - RNA, 22 nt, Artificial Sequence
  Guide RNA
caugaagcuagggggugagaga

SEQ ID NO: 12325 - RNA, 22 nt, Artificial Sequence
  Guide RNA
cuagggggagagagagacauuu

SEQ ID NO: 12326 - RNA, 22 nt, Artificial Sequence
  Guide RNA
cuagggggugagagagacauuu

SEQ ID NO: 12327 - RNA, 22 nt, Artificial Sequence
  Guide RNA
cucacccccuagcuucaugaug

SEQ ID NO: 12328 - RNA, 22 nt, Artificial Sequence
  Guide RNA
cucccccuagcuucaugaugug

SEQ ID NO: 12329 - RNA, 22 nt, Artificial Sequence
  Guide RNA
cucucacccccuagcuucauga

SEQ ID NO: 12330 - RNA, 22 nt, Artificial Sequence
  Guide RNA
cucucccccuagcuucaugaug

SEQ ID NO: 12331 - RNA, 22 nt, Artificial Sequence
  Guide RNA
cucucucacccccuagcuucau

SEQ ID NO: 12332 - RNA, 22 nt, Artificial Sequence
  Guide RNA
cucucucccccuagcuucauga

SEQ ID NO: 12333 - RNA, 22 nt, Artificial Sequence
  Guide RNA
cucucucucccccuagcuucau

SEQ ID NO: 12334 - RNA, 22 nt, Artificial Sequence
  Guide RNA
gaagcuagggggagagagagac

SEQ ID NO: 12335 - RNA, 22 nt, Artificial Sequence
  Guide RNA
gaagcuagggggugagagagac

SEQ ID NO: 12336 - RNA, 22 nt, Artificial Sequence
  Guide RNA
gagagagagacauuuuaaacac

SEQ ID NO: 12337 - RNA, 22 nt, Artificial Sequence
  Guide RNA
gagucacaucaugaagcuaggg

SEQ ID NO: 12338 - RNA, 22 nt, Artificial Sequence
  Guide RNA
gcuagggggagagagagacauu

SEQ ID NO: 12339 - RNA, 22 nt, Artificial Sequence
  Guide RNA
gcuagggggugagagagacauu

SEQ ID NO: 12340 - RNA, 22 nt, Artificial Sequence
  Guide RNA
ggagagagagacauuuuaaaca

SEQ ID NO: 12341 - RNA, 22 nt, Artificial Sequence
  Guide RNA
gggagagagagacauuuuaaac

SEQ ID NO: 12342 - RNA, 22 nt, Artificial Sequence
  Guide RNA
ggggagagagagacauuuuaaa

SEQ ID NO: 12343 - RNA, 22 nt, Artificial Sequence
  Guide RNA
gggggagagagagacauuuuaa

SEQ ID NO: 12344 - RNA, 22 nt, Artificial Sequence
  Guide RNA
gggggugagagagacauuuuaa

SEQ ID NO: 12345 - RNA, 22 nt, Artificial Sequence
  Guide RNA
ggggugagagagacauuuuaaa

SEQ ID NO: 12346 - RNA, 22 nt, Artificial Sequence
  Guide RNA
gggugagagagacauuuuaaac

SEQ ID NO: 12347 - RNA, 22 nt, Artificial Sequence
  Guide RNA
ggugagagagacauuuuaaaca

SEQ ID NO: 12348 - RNA, 22 nt, Artificial Sequence
  Guide RNA
gucacaucaugaagcuaggggg

SEQ ID NO: 12349 - RNA, 22 nt, Artificial Sequence
  Guide RNA
gucucucucacccccuagcuuc

SEQ ID NO: 12350 - RNA, 22 nt, Artificial Sequence
  Guide RNA
gucucucucucccccuagcuuc

SEQ ID NO: 12351 - RNA, 22 nt, Artificial Sequence
  Guide RNA
gugagagagacauuuuaaacac

SEQ ID NO: 12352 - RNA, 22 nt, Artificial Sequence
  Guide RNA
guguguuuaaaaugucucucuc

SEQ ID NO: 12353 - RNA, 22 nt, Artificial Sequence
  Guide RNA
guguuuaaaaugucucucucac

SEQ ID NO: 12354 - RNA, 22 nt, Artificial Sequence
  Guide RNA
guguuuaaaaugucucucucuc

SEQ ID NO: 12355 - RNA, 22 nt, Artificial Sequence
  Guide RNA
guuguguguuuaaaaugucucu

SEQ ID NO: 12356 - RNA, 22 nt, Artificial Sequence
  Guide RNA
guuuaaaaugucucucucaccc

SEQ ID NO: 12357 - RNA, 22 nt, Artificial Sequence
  Guide RNA
guuuaaaaugucucucucuccc

SEQ ID NO: 12358 - RNA, 22 nt, Artificial Sequence
  Guide RNA
uaaaaugucucucucacccccu

SEQ ID NO: 12359 - RNA, 22 nt, Artificial Sequence
  Guide RNA
uaaaaugucucucucucccccu

SEQ ID NO: 12360 - RNA, 22 nt, Artificial Sequence
  Guide RNA
uagggggagagagagacauuuu

SEQ ID NO: 12361 - RNA, 22 nt, Artificial Sequence
  Guide RNA
uagggggugagagagacauuuu

SEQ ID NO: 12362 - RNA, 22 nt, Artificial Sequence
  Guide RNA
ucacaucaugaagcuaggggga

SEQ ID NO: 12363 - RNA, 22 nt, Artificial Sequence
  Guide RNA
ucacaucaugaagcuagggggu

SEQ ID NO: 12364 - RNA, 22 nt, Artificial Sequence
  Guide RNA
ucacccccuagcuucaugaugu

SEQ ID NO: 12365 - RNA, 22 nt, Artificial Sequence
  Guide RNA
ucaugaagcuagggggagagag

SEQ ID NO: 12366 - RNA, 22 nt, Artificial Sequence
  Guide RNA
ucaugaagcuagggggugagag

SEQ ID NO: 12367 - RNA, 22 nt, Artificial Sequence
  Guide RNA
ucucacccccuagcuucaugau

SEQ ID NO: 12368 - RNA, 22 nt, Artificial Sequence
  Guide RNA
ucucccccuagcuucaugaugu

SEQ ID NO: 12369 - RNA, 22 nt, Artificial Sequence
  Guide RNA
ucucucacccccuagcuucaug

SEQ ID NO: 12370 - RNA, 22 nt, Artificial Sequence
  Guide RNA
ucucucccccuagcuucaugau

SEQ ID NO: 12371 - RNA, 22 nt, Artificial Sequence
  Guide RNA
ucucucucacccccuagcuuca

SEQ ID NO: 12372 - RNA, 22 nt, Artificial Sequence
  Guide RNA
ucucucucccccuagcuucaug

SEQ ID NO: 12373 - RNA, 22 nt, Artificial Sequence
  Guide RNA
ucucucucucccccuagcuuca

SEQ ID NO: 12374 - RNA, 22 nt, Artificial Sequence
  Guide RNA
ugaagcuagggggagagagaga

SEQ ID NO: 12375 - RNA, 22 nt, Artificial Sequence
  Guide RNA
ugaagcuagggggugagagaga

SEQ ID NO: 12376 - RNA, 22 nt, Artificial Sequence
  Guide RNA
ugucucucucacccccuagcuu

SEQ ID NO: 12377 - RNA, 22 nt, Artificial Sequence
  Guide RNA
ugucucucucucccccuagcuu

SEQ ID NO: 12378 - RNA, 22 nt, Artificial Sequence
  Guide RNA
uguguguuuaaaaugucucucu

SEQ ID NO: 12379 - RNA, 22 nt, Artificial Sequence
  Guide RNA
uguguuuaaaaugucucucuca

SEQ ID NO: 12380 - RNA, 22 nt, Artificial Sequence
  Guide RNA
uguguuuaaaaugucucucucu

SEQ ID NO: 12381 - RNA, 22 nt, Artificial Sequence
  Guide RNA
uguuuaaaaugucucucucacc

SEQ ID NO: 12382 - RNA, 22 nt, Artificial Sequence
  Guide RNA
uguuuaaaaugucucucucucc

SEQ ID NO: 12383 - RNA, 22 nt, Artificial Sequence
  Guide RNA
uuaaaaugucucucucaccccc

SEQ ID NO: 12384 - RNA, 22 nt, Artificial Sequence
  Guide RNA
uuaaaaugucucucucuccccc

SEQ ID NO: 12385 - RNA, 22 nt, Artificial Sequence
  Guide RNA
uuguguguuuaaaaugucucuc

SEQ ID NO: 12386 - RNA, 22 nt, Artificial Sequence
  Guide RNA
uuuaaaaugucucucucacccc

SEQ ID NO: 12387 - RNA, 22 nt, Artificial Sequence
  Guide RNA
uuuaaaaugucucucucucccc

SEQ ID NO: 12388 - RNA, 20 nt, Artificial Sequence
  Guide RNA
aaaaugucucucucacaccc

SEQ ID NO: 12389 - RNA, 20 nt, Artificial Sequence
  Guide RNA
aaaugucucucucacacccu

SEQ ID NO: 12390 - RNA, 20 nt, Artificial Sequence
  Guide RNA
aagcuagggugugagagaga

SEQ ID NO: 12391 - RNA, 20 nt, Artificial Sequence
  Guide RNA
aaugucucucucacacccua

SEQ ID NO: 12392 - RNA, 20 nt, Artificial Sequence
  Guide RNA
acacccuagcuucaugaugu

SEQ ID NO: 12393 - RNA, 20 nt, Artificial Sequence
  Guide RNA
acaucaugaagcuagggugu

SEQ ID NO: 12394 - RNA, 20 nt, Artificial Sequence
  Guide RNA
acccccuagcuucaugaugu

SEQ ID NO: 12395 - RNA, 20 nt, Artificial Sequence
  Guide RNA
agagucacaucaugaagcua

SEQ ID NO: 12396 - RNA, 20 nt, Artificial Sequence
  Guide RNA
agcuagggugugagagagac

SEQ ID NO: 12397 - RNA, 20 nt, Artificial Sequence
  Guide RNA
agggugugagagagacauuu

SEQ ID NO: 12398 - RNA, 20 nt, Artificial Sequence
  Guide RNA
aucaugaagcuaggguguga

SEQ ID NO: 12399 - RNA, 20 nt, Artificial Sequence
  Guide RNA
augaagcuagggugugagag

SEQ ID NO: 12400 - RNA, 20 nt, Artificial Sequence
  Guide RNA
augucucucucacacccuag

SEQ ID NO: 12401 - RNA, 20 nt, Artificial Sequence
  Guide RNA
cacacccuagcuucaugaug

SEQ ID NO: 12402 - RNA, 20 nt, Artificial Sequence
  Guide RNA
cacaucaugaagcuagggug

SEQ ID NO: 12403 - RNA, 20 nt, Artificial Sequence
  Guide RNA
cacccuagcuucaugaugug

SEQ ID NO: 12404 - RNA, 20 nt, Artificial Sequence
  Guide RNA
caucaugaagcuagggugug

SEQ ID NO: 12405 - RNA, 20 nt, Artificial Sequence
  Guide RNA
caugaagcuagggugugaga

SEQ ID NO: 12406 - RNA, 20 nt, Artificial Sequence
  Guide RNA
cccccuagcuucaugaugug

SEQ ID NO: 12407 - RNA, 20 nt, Artificial Sequence
  Guide RNA
cuagggugugagagagacau

SEQ ID NO: 12408 - RNA, 20 nt, Artificial Sequence
  Guide RNA
cucacacccuagcuucauga

SEQ ID NO: 12409 - RNA, 20 nt, Artificial Sequence
  Guide RNA
cucucacacccuagcuucau

SEQ ID NO: 12410 - RNA, 20 nt, Artificial Sequence
  Guide RNA
cucucucacacccuagcuuc

SEQ ID NO: 12411 - RNA, 20 nt, Artificial Sequence
  Guide RNA
gaagcuagggugugagagag

SEQ ID NO: 12412 - RNA, 20 nt, Artificial Sequence
  Guide RNA
gagucacaucaugaagcuag

SEQ ID NO: 12413 - RNA, 20 nt, Artificial Sequence
  Guide RNA
gcuagggugugagagagaca

SEQ ID NO: 12414 - RNA, 20 nt, Artificial Sequence
  Guide RNA
gggugugagagagacauuuu

SEQ ID NO: 12415 - RNA, 20 nt, Artificial Sequence
  Guide RNA
ggugugagagagacauuuua

SEQ ID NO: 12416 - RNA, 20 nt, Artificial Sequence
  Guide RNA
gucucucucacacccuagcu

SEQ ID NO: 12417 - RNA, 20 nt, Artificial Sequence
  Guide RNA
gugugagagagacauuuuaa

SEQ ID NO: 12418 - RNA, 20 nt, Artificial Sequence
  Guide RNA
uaaaaugucucucucacacc

SEQ ID NO: 12419 - RNA, 20 nt, Artificial Sequence
  Guide RNA
uagggugugagagagacauu

SEQ ID NO: 12420 - RNA, 20 nt, Artificial Sequence
  Guide RNA
ucacacccuagcuucaugau

SEQ ID NO: 12421 - RNA, 20 nt, Artificial Sequence
  Guide RNA
ucacaucaugaagcuagggu

SEQ ID NO: 12422 - RNA, 20 nt, Artificial Sequence
  Guide RNA
ucaugaagcuagggugugag

SEQ ID NO: 12423 - RNA, 20 nt, Artificial Sequence
  Guide RNA
ucucacacccuagcuucaug

SEQ ID NO: 12424 - RNA, 20 nt, Artificial Sequence
  Guide RNA
ucucucacacccuagcuuca

SEQ ID NO: 12425 - RNA, 20 nt, Artificial Sequence
  Guide RNA
ucucucucacacccuagcuu

SEQ ID NO: 12426 - RNA, 20 nt, Artificial Sequence
  Guide RNA
ugaagcuagggugugagaga

SEQ ID NO: 12427 - RNA, 20 nt, Artificial Sequence
  Guide RNA
ugucucucucacacccuagc

SEQ ID NO: 12428 - RNA, 20 nt, Artificial Sequence
  Guide RNA
uuaaaaugucucucucacac

SEQ ID NO: 12429 - RNA, 20 nt, Artificial Sequence
  Guide RNA
uuuaaaaugucucucucaca

SEQ ID NO: 12430 - RNA, 21 nt, Artificial Sequence
  Guide RNA
aaaaugucucucucacacccu

SEQ ID NO: 12431 - RNA, 21 nt, Artificial Sequence
  Guide RNA
aaaugucucucucacacccua

SEQ ID NO: 12432 - RNA, 21 nt, Artificial Sequence
  Guide RNA
aagagucacaucaugaagcua

SEQ ID NO: 12433 - RNA, 21 nt, Artificial Sequence
  Guide RNA
aagcuagggugugagagagac

SEQ ID NO: 12434 - RNA, 21 nt, Artificial Sequence
  Guide RNA
aaugucucucucacacccuag

SEQ ID NO: 12435 - RNA, 21 nt, Artificial Sequence
  Guide RNA
acacccuagcuucaugaugug

SEQ ID NO: 12436 - RNA, 21 nt, Artificial Sequence
  Guide RNA
acaucaugaagcuagggugug

SEQ ID NO: 12437 - RNA, 21 nt, Artificial Sequence
  Guide RNA
acccccuagcuucaugaugug

SEQ ID NO: 12438 - RNA, 21 nt, Artificial Sequence
  Guide RNA
agagucacaucaugaagcuag

SEQ ID NO: 12439 - RNA, 21 nt, Artificial Sequence
  Guide RNA
agcuagggugugagagagaca

SEQ ID NO: 12440 - RNA, 21 nt, Artificial Sequence
  Guide RNA
agggugugagagagacauuuu

SEQ ID NO: 12441 - RNA, 21 nt, Artificial Sequence
  Guide RNA
aucaugaagcuagggugugag

SEQ ID NO: 12442 - RNA, 21 nt, Artificial Sequence
  Guide RNA
augaagcuagggugugagaga

SEQ ID NO: 12443 - RNA, 21 nt, Artificial Sequence
  Guide RNA
augucucucucacacccuagc

SEQ ID NO: 12444 - RNA, 21 nt, Artificial Sequence
  Guide RNA
cacacccuagcuucaugaugu

SEQ ID NO: 12445 - RNA, 21 nt, Artificial Sequence
  Guide RNA
cacaucaugaagcuagggugu

SEQ ID NO: 12446 - RNA, 21 nt, Artificial Sequence
  Guide RNA
cacccuagcuucaugauguga

SEQ ID NO: 12447 - RNA, 21 nt, Artificial Sequence
  Guide RNA
caucaugaagcuaggguguga

SEQ ID NO: 12448 - RNA, 21 nt, Artificial Sequence
  Guide RNA
caugaagcuagggugugagag

SEQ ID NO: 12449 - RNA, 21 nt, Artificial Sequence
  Guide RNA
cccccuagcuucaugauguga

SEQ ID NO: 12450 - RNA, 21 nt, Artificial Sequence
  Guide RNA
cuagggugugagagagacauu

SEQ ID NO: 12451 - RNA, 21 nt, Artificial Sequence
  Guide RNA
cucacacccuagcuucaugau

SEQ ID NO: 12452 - RNA, 21 nt, Artificial Sequence
  Guide RNA
cucucacacccuagcuucaug

SEQ ID NO: 12453 - RNA, 21 nt, Artificial Sequence
  Guide RNA
cucucucacacccuagcuuca

SEQ ID NO: 12454 - RNA, 21 nt, Artificial Sequence
  Guide RNA
gaagcuagggugugagagaga

SEQ ID NO: 12455 - RNA, 21 nt, Artificial Sequence
  Guide RNA
gcuagggugugagagagacau

SEQ ID NO: 12456 - RNA, 21 nt, Artificial Sequence
  Guide RNA
gggugugagagagacauuuua

SEQ ID NO: 12457 - RNA, 21 nt, Artificial Sequence
  Guide RNA
ggugugagagagacauuuuaa

SEQ ID NO: 12458 - RNA, 21 nt, Artificial Sequence
  Guide RNA
gucacaucaugaagcuagggu

SEQ ID NO: 12459 - RNA, 21 nt, Artificial Sequence
  Guide RNA
gucucucucacacccuagcuu

SEQ ID NO: 12460 - RNA, 21 nt, Artificial Sequence
  Guide RNA
gugugagagagacauuuuaaa

SEQ ID NO: 12461 - RNA, 21 nt, Artificial Sequence
  Guide RNA
guuuaaaaugucucucucaca

SEQ ID NO: 12462 - RNA, 21 nt, Artificial Sequence
  Guide RNA
uaaaaugucucucucacaccc

SEQ ID NO: 12463 - RNA, 21 nt, Artificial Sequence
  Guide RNA
uagggugugagagagacauuu

SEQ ID NO: 12464 - RNA, 21 nt, Artificial Sequence
  Guide RNA
ucacacccuagcuucaugaug

SEQ ID NO: 12465 - RNA, 21 nt, Artificial Sequence
  Guide RNA
ucacaucaugaagcuagggug

SEQ ID NO: 12466 - RNA, 21 nt, Artificial Sequence
  Guide RNA
ucaugaagcuagggugugaga

SEQ ID NO: 12467 - RNA, 21 nt, Artificial Sequence
  Guide RNA
ucucacacccuagcuucauga

SEQ ID NO: 12468 - RNA, 21 nt, Artificial Sequence
  Guide RNA
ucucucacacccuagcuucau

SEQ ID NO: 12469 - RNA, 21 nt, Artificial Sequence
  Guide RNA
ucucucucacacccuagcuuc

SEQ ID NO: 12470 - RNA, 21 nt, Artificial Sequence
  Guide RNA
ugaagcuagggugugagagag

SEQ ID NO: 12471 - RNA, 21 nt, Artificial Sequence
  Guide RNA
ugucucucucacacccuagcu

SEQ ID NO: 12472 - RNA, 21 nt, Artificial Sequence
  Guide RNA
uuaaaaugucucucucacacc

SEQ ID NO: 12473 - RNA, 21 nt, Artificial Sequence
  Guide RNA
uuuaaaaugucucucucacac

SEQ ID NO: 12474 - RNA, 22 nt, Artificial Sequence
  Guide RNA
aaaaugucucucucacacccua

SEQ ID NO: 12475 - RNA, 22 nt, Artificial Sequence
  Guide RNA
aaaugucucucucacacccuag

SEQ ID NO: 12476 - RNA, 22 nt, Artificial Sequence
  Guide RNA
aagagucacaucaugaagcuag

SEQ ID NO: 12477 - RNA, 22 nt, Artificial Sequence
  Guide RNA
aagcuagggugugagagagaca

SEQ ID NO: 12478 - RNA, 22 nt, Artificial Sequence
  Guide RNA
aaugucucucucacacccuagc

SEQ ID NO: 12479 - RNA, 22 nt, Artificial Sequence
  Guide RNA
acacccuagcuucaugauguga

SEQ ID NO: 12480 - RNA, 22 nt, Artificial Sequence
  Guide RNA
acaucaugaagcuaggguguga

SEQ ID NO: 12481 - RNA, 22 nt, Artificial Sequence
  Guide RNA
acccccuagcuucaugauguga

SEQ ID NO: 12482 - RNA, 22 nt, Artificial Sequence
  Guide RNA
agcuagggugugagagagacau

SEQ ID NO: 12483 - RNA, 22 nt, Artificial Sequence
  Guide RNA
agggugugagagagacauuuua

SEQ ID NO: 12484 - RNA, 22 nt, Artificial Sequence
  Guide RNA
agucacaucaugaagcuagggu

SEQ ID NO: 12485 - RNA, 22 nt, Artificial Sequence
  Guide RNA
aucaugaagcuagggugugaga

SEQ ID NO: 12486 - RNA, 22 nt, Artificial Sequence
  Guide RNA
augaagcuagggugugagagag

SEQ ID NO: 12487 - RNA, 22 nt, Artificial Sequence
  Guide RNA
augucucucucacacccuagcu

SEQ ID NO: 12488 - RNA, 22 nt, Artificial Sequence
  Guide RNA
cacacccuagcuucaugaugug

SEQ ID NO: 12489 - RNA, 22 nt, Artificial Sequence
  Guide RNA
cacaucaugaagcuagggugug

SEQ ID NO: 12490 - RNA, 22 nt, Artificial Sequence
  Guide RNA
cacccuagcuucaugaugugac

SEQ ID NO: 12491 - RNA, 22 nt, Artificial Sequence
  Guide RNA
caucaugaagcuagggugugag

SEQ ID NO: 12492 - RNA, 22 nt, Artificial Sequence
  Guide RNA
caugaagcuagggugugagaga

SEQ ID NO: 12493 - RNA, 22 nt, Artificial Sequence
  Guide RNA
cccccuagcuucaugaugugac

SEQ ID NO: 12494 - RNA, 22 nt, Artificial Sequence
  Guide RNA
cuagggugugagagagacauuu

SEQ ID NO: 12495 - RNA, 22 nt, Artificial Sequence
  Guide RNA
cucacacccuagcuucaugaug

SEQ ID NO: 12496 - RNA, 22 nt, Artificial Sequence
  Guide RNA
cucucacacccuagcuucauga

SEQ ID NO: 12497 - RNA, 22 nt, Artificial Sequence
  Guide RNA
cucucucacacccuagcuucau

SEQ ID NO: 12498 - RNA, 22 nt, Artificial Sequence
  Guide RNA
gaagcuagggugugagagagac

SEQ ID NO: 12499 - RNA, 22 nt, Artificial Sequence
  Guide RNA
gcuagggugugagagagacauu

SEQ ID NO: 12500 - RNA, 22 nt, Artificial Sequence
  Guide RNA
gggugugagagagacauuuuaa

SEQ ID NO: 12501 - RNA, 22 nt, Artificial Sequence
  Guide RNA
ggugugagagagacauuuuaaa

SEQ ID NO: 12502 - RNA, 22 nt, Artificial Sequence
  Guide RNA
gucacaucaugaagcuagggug

SEQ ID NO: 12503 - RNA, 22 nt, Artificial Sequence
  Guide RNA
gucucucucacacccuagcuuc

SEQ ID NO: 12504 - RNA, 22 nt, Artificial Sequence
  Guide RNA
gugugagagagacauuuuaaac

SEQ ID NO: 12505 - RNA, 22 nt, Artificial Sequence
  Guide RNA
guuuaaaaugucucucucacac

SEQ ID NO: 12506 - RNA, 22 nt, Artificial Sequence
  Guide RNA
uaaaaugucucucucacacccu

SEQ ID NO: 12507 - RNA, 22 nt, Artificial Sequence
  Guide RNA
uaagagucacaucaugaagcua

SEQ ID NO: 12508 - RNA, 22 nt, Artificial Sequence
  Guide RNA
uagggugugagagagacauuuu

SEQ ID NO: 12509 - RNA, 22 nt, Artificial Sequence
  Guide RNA
ucacacccuagcuucaugaugu

SEQ ID NO: 12510 - RNA, 22 nt, Artificial Sequence
  Guide RNA
ucacaucaugaagcuagggugu

SEQ ID NO: 12511 - RNA, 22 nt, Artificial Sequence
  Guide RNA
ucaugaagcuagggugugagag

SEQ ID NO: 12512 - RNA, 22 nt, Artificial Sequence
  Guide RNA
ucucacacccuagcuucaugau

SEQ ID NO: 12513 - RNA, 22 nt, Artificial Sequence
  Guide RNA
ucucucacacccuagcuucaug

SEQ ID NO: 12514 - RNA, 22 nt, Artificial Sequence
  Guide RNA
ucucucucacacccuagcuuca

SEQ ID NO: 12515 - RNA, 22 nt, Artificial Sequence
  Guide RNA
ugaagcuagggugugagagaga

SEQ ID NO: 12516 - RNA, 22 nt, Artificial Sequence
  Guide RNA
ugucucucucacacccuagcuu

SEQ ID NO: 12517 - RNA, 22 nt, Artificial Sequence
  Guide RNA
uguuuaaaaugucucucucaca

SEQ ID NO: 12518 - RNA, 22 nt, Artificial Sequence
  Guide RNA
uuaaaaugucucucucacaccc

SEQ ID NO: 12519 - RNA, 22 nt, Artificial Sequence
  Guide RNA
uuuaaaaugucucucucacacc

SEQ ID NO: 12520 - RNA, 20 nt, Artificial Sequence
  Guide RNA
aaaaaacgaagggaugugca

SEQ ID NO: 12521 - RNA, 20 nt, Artificial Sequence
  Guide RNA
aaaaacgaagggaugugcaa

SEQ ID NO: 12522 - RNA, 20 nt, Artificial Sequence
  Guide RNA
aaaaagcgaagggaugugca

SEQ ID NO: 12523 - RNA, 20 nt, Artificial Sequence
  Guide RNA
aaaacgaagggaugugcaac

SEQ ID NO: 12524 - RNA, 20 nt, Artificial Sequence
  Guide RNA
aaaagcgaagggaugugcaa

SEQ ID NO: 12525 - RNA, 20 nt, Artificial Sequence
  Guide RNA
aaacgaagggaugugcaacu

SEQ ID NO: 12526 - RNA, 20 nt, Artificial Sequence
  Guide RNA
aaagcgaagggaugugcaac

SEQ ID NO: 12527 - RNA, 20 nt, Artificial Sequence
  Guide RNA
aacgaagggaugugcaacug

SEQ ID NO: 12528 - RNA, 20 nt, Artificial Sequence
  Guide RNA
aagcgaagggaugugcaacu

SEQ ID NO: 12529 - RNA, 20 nt, Artificial Sequence
  Guide RNA
acaucccuucgcuuuuuaga

SEQ ID NO: 12530 - RNA, 20 nt, Artificial Sequence
  Guide RNA
acaucccuucguuuuuuaga

SEQ ID NO: 12531 - RNA, 20 nt, Artificial Sequence
  Guide RNA
agcgaagggaugugcaacug

SEQ ID NO: 12532 - RNA, 20 nt, Artificial Sequence
  Guide RNA
agcugcaguugcacaucccu

SEQ ID NO: 12533 - RNA, 20 nt, Artificial Sequence
  Guide RNA
agucaaguuuaucagucuaa

SEQ ID NO: 12534 - RNA, 20 nt, Artificial Sequence
  Guide RNA
agucuaaaaaacgaagggau

SEQ ID NO: 12535 - RNA, 20 nt, Artificial Sequence
  Guide RNA
agucuaaaaagcgaagggau

SEQ ID NO: 12536 - RNA, 20 nt, Artificial Sequence
  Guide RNA
aguugcacaucccuucgcuu

SEQ ID NO: 12537 - RNA, 20 nt, Artificial Sequence
  Guide RNA
aguugcacaucccuucguuu

SEQ ID NO: 12538 - RNA, 20 nt, Artificial Sequence
  Guide RNA
aguuuaucagucuaaaaagc

SEQ ID NO: 12539 - RNA, 20 nt, Artificial Sequence
  Guide RNA
aucagucuaaaaaacgaagg

SEQ ID NO: 12540 - RNA, 20 nt, Artificial Sequence
  Guide RNA
aucagucuaaaaagcgaagg

SEQ ID NO: 12541 - RNA, 20 nt, Artificial Sequence
  Guide RNA
aucccuucgcuuuuuagacu

SEQ ID NO: 12542 - RNA, 20 nt, Artificial Sequence
  Guide RNA
aucccuucguuuuuuagacu

SEQ ID NO: 12543 - RNA, 20 nt, Artificial Sequence
  Guide RNA
cacaucccuucgcuuuuuag

SEQ ID NO: 12544 - RNA, 20 nt, Artificial Sequence
  Guide RNA
cacaucccuucguuuuuuag

SEQ ID NO: 12545 - RNA, 20 nt, Artificial Sequence
  Guide RNA
cagucuaaaaaacgaaggga

SEQ ID NO: 12546 - RNA, 20 nt, Artificial Sequence
  Guide RNA
cagucuaaaaagcgaaggga

SEQ ID NO: 12547 - RNA, 20 nt, Artificial Sequence
  Guide RNA
caguugcacaucccuucgcu

SEQ ID NO: 12548 - RNA, 20 nt, Artificial Sequence
  Guide RNA
caguugcacaucccuucguu

SEQ ID NO: 12549 - RNA, 20 nt, Artificial Sequence
  Guide RNA
caucccuucgcuuuuuagac

SEQ ID NO: 12550 - RNA, 20 nt, Artificial Sequence
  Guide RNA
caucccuucguuuuuuagac

SEQ ID NO: 12551 - RNA, 20 nt, Artificial Sequence
  Guide RNA
cccuucgcuuuuuagacuga

SEQ ID NO: 12552 - RNA, 20 nt, Artificial Sequence
  Guide RNA
cccuucguuuuuuagacuga

SEQ ID NO: 12553 - RNA, 20 nt, Artificial Sequence
  Guide RNA
ccuucgcuuuuuagacugau

SEQ ID NO: 12554 - RNA, 20 nt, Artificial Sequence
  Guide RNA
ccuucguuuuuuagacugau

SEQ ID NO: 12555 - RNA, 20 nt, Artificial Sequence
  Guide RNA
cgcuuuuuagacugauaaac

SEQ ID NO: 12556 - RNA, 20 nt, Artificial Sequence
  Guide RNA
cguuuuuuagacugauaaac

SEQ ID NO: 12557 - RNA, 20 nt, Artificial Sequence
  Guide RNA
cuaaaaaacgaagggaugug

SEQ ID NO: 12558 - RNA, 20 nt, Artificial Sequence
  Guide RNA
cuaaaaagcgaagggaugug

SEQ ID NO: 12559 - RNA, 20 nt, Artificial Sequence
  Guide RNA
cugcaguugcacaucccuuc

SEQ ID NO: 12560 - RNA, 20 nt, Artificial Sequence
  Guide RNA
cuucgcuuuuuagacugaua

SEQ ID NO: 12561 - RNA, 20 nt, Artificial Sequence
  Guide RNA
cuucguuuuuuagacugaua

SEQ ID NO: 12562 - RNA, 20 nt, Artificial Sequence
  Guide RNA
gcacaucccuucgcuuuuua

SEQ ID NO: 12563 - RNA, 20 nt, Artificial Sequence
  Guide RNA
gcacaucccuucguuuuuua

SEQ ID NO: 12564 - RNA, 20 nt, Artificial Sequence
  Guide RNA
gcaguugcacaucccuucgc

SEQ ID NO: 12565 - RNA, 20 nt, Artificial Sequence
  Guide RNA
gcaguugcacaucccuucgu

SEQ ID NO: 12566 - RNA, 20 nt, Artificial Sequence
  Guide RNA
gcugcaguugcacaucccuu

SEQ ID NO: 12567 - RNA, 20 nt, Artificial Sequence
  Guide RNA
gcuuuuuagacugauaaacu

SEQ ID NO: 12568 - RNA, 20 nt, Artificial Sequence
  Guide RNA
gucaaguuuaucagucuaaa

SEQ ID NO: 12569 - RNA, 20 nt, Artificial Sequence
  Guide RNA
gucuaaaaaacgaagggaug

SEQ ID NO: 12570 - RNA, 20 nt, Artificial Sequence
  Guide RNA
gucuaaaaagcgaagggaug

SEQ ID NO: 12571 - RNA, 20 nt, Artificial Sequence
  Guide RNA
guugcacaucccuucgcuuu

SEQ ID NO: 12572 - RNA, 20 nt, Artificial Sequence
  Guide RNA
guugcacaucccuucguuuu

SEQ ID NO: 12573 - RNA, 20 nt, Artificial Sequence
  Guide RNA
guuuaucagucuaaaaaacg

SEQ ID NO: 12574 - RNA, 20 nt, Artificial Sequence
  Guide RNA
guuuaucagucuaaaaagcg

SEQ ID NO: 12575 - RNA, 20 nt, Artificial Sequence
  Guide RNA
uaaaaaacgaagggaugugc

SEQ ID NO: 12576 - RNA, 20 nt, Artificial Sequence
  Guide RNA
uaaaaagcgaagggaugugc

SEQ ID NO: 12577 - RNA, 20 nt, Artificial Sequence
  Guide RNA
uaucagucuaaaaaacgaag

SEQ ID NO: 12578 - RNA, 20 nt, Artificial Sequence
  Guide RNA
uaucagucuaaaaagcgaag

SEQ ID NO: 12579 - RNA, 20 nt, Artificial Sequence
  Guide RNA
ucagucuaaaaaacgaaggg

SEQ ID NO: 12580 - RNA, 20 nt, Artificial Sequence
  Guide RNA
ucagucuaaaaagcgaaggg

SEQ ID NO: 12581 - RNA, 20 nt, Artificial Sequence
  Guide RNA
ucccuucgcuuuuuagacug

SEQ ID NO: 12582 - RNA, 20 nt, Artificial Sequence
  Guide RNA
ucccuucguuuuuuagacug

SEQ ID NO: 12583 - RNA, 20 nt, Artificial Sequence
  Guide RNA
ucgcuuuuuagacugauaaa

SEQ ID NO: 12584 - RNA, 20 nt, Artificial Sequence
  Guide RNA
ucuaaaaaacgaagggaugu

SEQ ID NO: 12585 - RNA, 20 nt, Artificial Sequence
  Guide RNA
ucuaaaaagcgaagggaugu

SEQ ID NO: 12586 - RNA, 20 nt, Artificial Sequence
  Guide RNA
ugcacaucccuucgcuuuuu

SEQ ID NO: 12587 - RNA, 20 nt, Artificial Sequence
  Guide RNA
ugcacaucccuucguuuuuu

SEQ ID NO: 12588 - RNA, 20 nt, Artificial Sequence
  Guide RNA
ugcaguugcacaucccuucg

SEQ ID NO: 12589 - RNA, 20 nt, Artificial Sequence
  Guide RNA
uuaucagucuaaaaagcgaa

SEQ ID NO: 12590 - RNA, 20 nt, Artificial Sequence
  Guide RNA
uucgcuuuuuagacugauaa

SEQ ID NO: 12591 - RNA, 20 nt, Artificial Sequence
  Guide RNA
uugcacaucccuucgcuuuu

SEQ ID NO: 12592 - RNA, 20 nt, Artificial Sequence
  Guide RNA
uugcacaucccuucguuuuu

SEQ ID NO: 12593 - RNA, 20 nt, Artificial Sequence
  Guide RNA
uuuaucagucuaaaaagcga

SEQ ID NO: 12594 - RNA, 21 nt, Artificial Sequence
  Guide RNA
aaaaaacgaagggaugugcaa

SEQ ID NO: 12595 - RNA, 21 nt, Artificial Sequence
  Guide RNA
aaaaacgaagggaugugcaac

SEQ ID NO: 12596 - RNA, 21 nt, Artificial Sequence
  Guide RNA
aaaaagcgaagggaugugcaa

SEQ ID NO: 12597 - RNA, 21 nt, Artificial Sequence
  Guide RNA
aaaacgaagggaugugcaacu

SEQ ID NO: 12598 - RNA, 21 nt, Artificial Sequence
  Guide RNA
aaaagcgaagggaugugcaac

SEQ ID NO: 12599 - RNA, 21 nt, Artificial Sequence
  Guide RNA
aaacgaagggaugugcaacug

SEQ ID NO: 12600 - RNA, 21 nt, Artificial Sequence
  Guide RNA
aaagcgaagggaugugcaacu

SEQ ID NO: 12601 - RNA, 21 nt, Artificial Sequence
  Guide RNA
aacgaagggaugugcaacugc

SEQ ID NO: 12602 - RNA, 21 nt, Artificial Sequence
  Guide RNA
aagcgaagggaugugcaacug

SEQ ID NO: 12603 - RNA, 21 nt, Artificial Sequence
  Guide RNA
acaucccuucgcuuuuuagac

SEQ ID NO: 12604 - RNA, 21 nt, Artificial Sequence
  Guide RNA
acaucccuucguuuuuuagac

SEQ ID NO: 12605 - RNA, 21 nt, Artificial Sequence
  Guide RNA
agcgaagggaugugcaacugc

SEQ ID NO: 12606 - RNA, 21 nt, Artificial Sequence
  Guide RNA
agcugcaguugcacaucccuu

SEQ ID NO: 12607 - RNA, 21 nt, Artificial Sequence
  Guide RNA
agucuaaaaaacgaagggaug

SEQ ID NO: 12608 - RNA, 21 nt, Artificial Sequence
  Guide RNA
agucuaaaaagcgaagggaug

SEQ ID NO: 12609 - RNA, 21 nt, Artificial Sequence
  Guide RNA
aguugcacaucccuucgcuuu

SEQ ID NO: 12610 - RNA, 21 nt, Artificial Sequence
  Guide RNA
aguugcacaucccuucguuuu

SEQ ID NO: 12611 - RNA, 21 nt, Artificial Sequence
  Guide RNA
aguuuaucagucuaaaaagcg

SEQ ID NO: 12612 - RNA, 21 nt, Artificial Sequence
  Guide RNA
aucagucuaaaaaacgaaggg

SEQ ID NO: 12613 - RNA, 21 nt, Artificial Sequence
  Guide RNA
aucagucuaaaaagcgaaggg

SEQ ID NO: 12614 - RNA, 21 nt, Artificial Sequence
  Guide RNA
aucccuucgcuuuuuagacug

SEQ ID NO: 12615 - RNA, 21 nt, Artificial Sequence
  Guide RNA
aucccuucguuuuuuagacug

SEQ ID NO: 12616 - RNA, 21 nt, Artificial Sequence
  Guide RNA
cacaucccuucgcuuuuuaga

SEQ ID NO: 12617 - RNA, 21 nt, Artificial Sequence
  Guide RNA
cacaucccuucguuuuuuaga

SEQ ID NO: 12618 - RNA, 21 nt, Artificial Sequence
  Guide RNA
cagucuaaaaaacgaagggau

SEQ ID NO: 12619 - RNA, 21 nt, Artificial Sequence
  Guide RNA
cagucuaaaaagcgaagggau

SEQ ID NO: 12620 - RNA, 21 nt, Artificial Sequence
  Guide RNA
caguugcacaucccuucgcuu

SEQ ID NO: 12621 - RNA, 21 nt, Artificial Sequence
  Guide RNA
caguugcacaucccuucguuu

SEQ ID NO: 12622 - RNA, 21 nt, Artificial Sequence
  Guide RNA
caucccuucgcuuuuuagacu

SEQ ID NO: 12623 - RNA, 21 nt, Artificial Sequence
  Guide RNA
caucccuucguuuuuuagacu

SEQ ID NO: 12624 - RNA, 21 nt, Artificial Sequence
  Guide RNA
cccuucgcuuuuuagacugau

SEQ ID NO: 12625 - RNA, 21 nt, Artificial Sequence
  Guide RNA
cccuucguuuuuuagacugau

SEQ ID NO: 12626 - RNA, 21 nt, Artificial Sequence
  Guide RNA
ccuucgcuuuuuagacugaua

SEQ ID NO: 12627 - RNA, 21 nt, Artificial Sequence
  Guide RNA
ccuucguuuuuuagacugaua

SEQ ID NO: 12628 - RNA, 21 nt, Artificial Sequence
  Guide RNA
cgcuuuuuagacugauaaacu

SEQ ID NO: 12629 - RNA, 21 nt, Artificial Sequence
  Guide RNA
cuaaaaaacgaagggaugugc

SEQ ID NO: 12630 - RNA, 21 nt, Artificial Sequence
  Guide RNA
cuaaaaagcgaagggaugugc

SEQ ID NO: 12631 - RNA, 21 nt, Artificial Sequence
  Guide RNA
cugcaguugcacaucccuucg

SEQ ID NO: 12632 - RNA, 21 nt, Artificial Sequence
  Guide RNA
cuucgcuuuuuagacugauaa

SEQ ID NO: 12633 - RNA, 21 nt, Artificial Sequence
  Guide RNA
gagcugcaguugcacaucccu

SEQ ID NO: 12634 - RNA, 21 nt, Artificial Sequence
  Guide RNA
gcacaucccuucgcuuuuuag

SEQ ID NO: 12635 - RNA, 21 nt, Artificial Sequence
  Guide RNA
gcacaucccuucguuuuuuag

SEQ ID NO: 12636 - RNA, 21 nt, Artificial Sequence
  Guide RNA
gcaguugcacaucccuucgcu

SEQ ID NO: 12637 - RNA, 21 nt, Artificial Sequence
  Guide RNA
gcaguugcacaucccuucguu

SEQ ID NO: 12638 - RNA, 21 nt, Artificial Sequence
  Guide RNA
gcugcaguugcacaucccuuc

SEQ ID NO: 12639 - RNA, 21 nt, Artificial Sequence
  Guide RNA
gucuaaaaaacgaagggaugu

SEQ ID NO: 12640 - RNA, 21 nt, Artificial Sequence
  Guide RNA
gucuaaaaagcgaagggaugu

SEQ ID NO: 12641 - RNA, 21 nt, Artificial Sequence
  Guide RNA
guugcacaucccuucgcuuuu

SEQ ID NO: 12642 - RNA, 21 nt, Artificial Sequence
  Guide RNA
guugcacaucccuucguuuuu

SEQ ID NO: 12643 - RNA, 21 nt, Artificial Sequence
  Guide RNA
guuuaucagucuaaaaagcga

SEQ ID NO: 12644 - RNA, 21 nt, Artificial Sequence
  Guide RNA
uaaaaaacgaagggaugugca

SEQ ID NO: 12645 - RNA, 21 nt, Artificial Sequence
  Guide RNA
uaaaaagcgaagggaugugca

SEQ ID NO: 12646 - RNA, 21 nt, Artificial Sequence
  Guide RNA
uaucagucuaaaaaacgaagg

SEQ ID NO: 12647 - RNA, 21 nt, Artificial Sequence
  Guide RNA
uaucagucuaaaaagcgaagg

SEQ ID NO: 12648 - RNA, 21 nt, Artificial Sequence
  Guide RNA
ucagucuaaaaaacgaaggga

SEQ ID NO: 12649 - RNA, 21 nt, Artificial Sequence
  Guide RNA
ucagucuaaaaagcgaaggga

SEQ ID NO: 12650 - RNA, 21 nt, Artificial Sequence
  Guide RNA
ucccuucgcuuuuuagacuga

SEQ ID NO: 12651 - RNA, 21 nt, Artificial Sequence
  Guide RNA
ucccuucguuuuuuagacuga

SEQ ID NO: 12652 - RNA, 21 nt, Artificial Sequence
  Guide RNA
ucgcuuuuuagacugauaaac

SEQ ID NO: 12653 - RNA, 21 nt, Artificial Sequence
  Guide RNA
ucuaaaaaacgaagggaugug

SEQ ID NO: 12654 - RNA, 21 nt, Artificial Sequence
  Guide RNA
ucuaaaaagcgaagggaugug

SEQ ID NO: 12655 - RNA, 21 nt, Artificial Sequence
  Guide RNA
ugcacaucccuucgcuuuuua

SEQ ID NO: 12656 - RNA, 21 nt, Artificial Sequence
  Guide RNA
ugcacaucccuucguuuuuua

SEQ ID NO: 12657 - RNA, 21 nt, Artificial Sequence
  Guide RNA
ugcaguugcacaucccuucgc

SEQ ID NO: 12658 - RNA, 21 nt, Artificial Sequence
  Guide RNA
ugcaguugcacaucccuucgu

SEQ ID NO: 12659 - RNA, 21 nt, Artificial Sequence
  Guide RNA
uuaucagucuaaaaagcgaag

SEQ ID NO: 12660 - RNA, 21 nt, Artificial Sequence
  Guide RNA
uugcacaucccuucgcuuuuu

SEQ ID NO: 12661 - RNA, 21 nt, Artificial Sequence
  Guide RNA
uugcacaucccuucguuuuuu

SEQ ID NO: 12662 - RNA, 22 nt, Artificial Sequence
  Guide RNA
aaaaaacgaagggaugugcaac

SEQ ID NO: 12663 - RNA, 22 nt, Artificial Sequence
  Guide RNA
aaaaacgaagggaugugcaacu

SEQ ID NO: 12664 - RNA, 22 nt, Artificial Sequence
  Guide RNA
aaaaagcgaagggaugugcaac

SEQ ID NO: 12665 - RNA, 22 nt, Artificial Sequence
  Guide RNA
aaaacgaagggaugugcaacug

SEQ ID NO: 12666 - RNA, 22 nt, Artificial Sequence
  Guide RNA
aaaagcgaagggaugugcaacu

SEQ ID NO: 12667 - RNA, 22 nt, Artificial Sequence
  Guide RNA
aaacgaagggaugugcaacugc

SEQ ID NO: 12668 - RNA, 22 nt, Artificial Sequence
  Guide RNA
aaagcgaagggaugugcaacug

SEQ ID NO: 12669 - RNA, 22 nt, Artificial Sequence
  Guide RNA
aacgaagggaugugcaacugca

SEQ ID NO: 12670 - RNA, 22 nt, Artificial Sequence
  Guide RNA
aagcgaagggaugugcaacugc

SEQ ID NO: 12671 - RNA, 22 nt, Artificial Sequence
  Guide RNA
aaguuuaucagucuaaaaagcg

SEQ ID NO: 12672 - RNA, 22 nt, Artificial Sequence
  Guide RNA
acaucccuucgcuuuuuagacu

SEQ ID NO: 12673 - RNA, 22 nt, Artificial Sequence
  Guide RNA
acaucccuucguuuuuuagacu

SEQ ID NO: 12674 - RNA, 22 nt, Artificial Sequence
  Guide RNA
agagcugcaguugcacaucccu

SEQ ID NO: 12675 - RNA, 22 nt, Artificial Sequence
  Guide RNA
agcgaagggaugugcaacugca

SEQ ID NO: 12676 - RNA, 22 nt, Artificial Sequence
  Guide RNA
agcugcaguugcacaucccuuc

SEQ ID NO: 12677 - RNA, 22 nt, Artificial Sequence
  Guide RNA
agucuaaaaaacgaagggaugu

SEQ ID NO: 12678 - RNA, 22 nt, Artificial Sequence
  Guide RNA
agucuaaaaagcgaagggaugu

SEQ ID NO: 12679 - RNA, 22 nt, Artificial Sequence
  Guide RNA
aguugcacaucccuucgcuuuu

SEQ ID NO: 12680 - RNA, 22 nt, Artificial Sequence
  Guide RNA
aguugcacaucccuucguuuuu

SEQ ID NO: 12681 - RNA, 22 nt, Artificial Sequence
  Guide RNA
aguuuaucagucuaaaaagcga

SEQ ID NO: 12682 - RNA, 22 nt, Artificial Sequence
  Guide RNA
aucagucuaaaaaacgaaggga

SEQ ID NO: 12683 - RNA, 22 nt, Artificial Sequence
  Guide RNA
aucagucuaaaaagcgaaggga

SEQ ID NO: 12684 - RNA, 22 nt, Artificial Sequence
  Guide RNA
aucccuucgcuuuuuagacuga

SEQ ID NO: 12685 - RNA, 22 nt, Artificial Sequence
  Guide RNA
aucccuucguuuuuuagacuga

SEQ ID NO: 12686 - RNA, 22 nt, Artificial Sequence
  Guide RNA
caaguuuaucagucuaaaaagc

SEQ ID NO: 12687 - RNA, 22 nt, Artificial Sequence
  Guide RNA
cacaucccuucgcuuuuuagac

SEQ ID NO: 12688 - RNA, 22 nt, Artificial Sequence
  Guide RNA
cacaucccuucguuuuuuagac

SEQ ID NO: 12689 - RNA, 22 nt, Artificial Sequence
  Guide RNA
cagucuaaaaaacgaagggaug

SEQ ID NO: 12690 - RNA, 22 nt, Artificial Sequence
  Guide RNA
cagucuaaaaagcgaagggaug

SEQ ID NO: 12691 - RNA, 22 nt, Artificial Sequence
  Guide RNA
caguugcacaucccuucgcuuu

SEQ ID NO: 12692 - RNA, 22 nt, Artificial Sequence
  Guide RNA
caguugcacaucccuucguuuu

SEQ ID NO: 12693 - RNA, 22 nt, Artificial Sequence
  Guide RNA
caucccuucgcuuuuuagacug

SEQ ID NO: 12694 - RNA, 22 nt, Artificial Sequence
  Guide RNA
caucccuucguuuuuuagacug

SEQ ID NO: 12695 - RNA, 22 nt, Artificial Sequence
  Guide RNA
cccuucgcuuuuuagacugaua

SEQ ID NO: 12696 - RNA, 22 nt, Artificial Sequence
  Guide RNA
cccuucguuuuuuagacugaua

SEQ ID NO: 12697 - RNA, 22 nt, Artificial Sequence
  Guide RNA
ccuucgcuuuuuagacugauaa

SEQ ID NO: 12698 - RNA, 22 nt, Artificial Sequence
  Guide RNA
ccuucguuuuuuagacugauaa

SEQ ID NO: 12699 - RNA, 22 nt, Artificial Sequence
  Guide RNA
cgcuuuuuagacugauaaacuu

SEQ ID NO: 12700 - RNA, 22 nt, Artificial Sequence
  Guide RNA
cuaaaaaacgaagggaugugca

SEQ ID NO: 12701 - RNA, 22 nt, Artificial Sequence
  Guide RNA
cuaaaaagcgaagggaugugca

SEQ ID NO: 12702 - RNA, 22 nt, Artificial Sequence
  Guide RNA
cugcaguugcacaucccuucgc

SEQ ID NO: 12703 - RNA, 22 nt, Artificial Sequence
  Guide RNA
cugcaguugcacaucccuucgu

SEQ ID NO: 12704 - RNA, 22 nt, Artificial Sequence
  Guide RNA
cuucgcuuuuuagacugauaaa

SEQ ID NO: 12705 - RNA, 22 nt, Artificial Sequence
  Guide RNA
gagcugcaguugcacaucccuu

SEQ ID NO: 12706 - RNA, 22 nt, Artificial Sequence
  Guide RNA
gcacaucccuucgcuuuuuaga

SEQ ID NO: 12707 - RNA, 22 nt, Artificial Sequence
  Guide RNA
gcacaucccuucguuuuuuaga

SEQ ID NO: 12708 - RNA, 22 nt, Artificial Sequence
  Guide RNA
gcaguugcacaucccuucgcuu

SEQ ID NO: 12709 - RNA, 22 nt, Artificial Sequence
  Guide RNA
gcaguugcacaucccuucguuu

SEQ ID NO: 12710 - RNA, 22 nt, Artificial Sequence
  Guide RNA
gcugcaguugcacaucccuucg

SEQ ID NO: 12711 - RNA, 22 nt, Artificial Sequence
  Guide RNA
gcuuuuuagacugauaaacuug

SEQ ID NO: 12712 - RNA, 22 nt, Artificial Sequence
  Guide RNA
gucuaaaaaacgaagggaugug

SEQ ID NO: 12713 - RNA, 22 nt, Artificial Sequence
  Guide RNA
gucuaaaaagcgaagggaugug

SEQ ID NO: 12714 - RNA, 22 nt, Artificial Sequence
  Guide RNA
guugcacaucccuucgcuuuuu

SEQ ID NO: 12715 - RNA, 22 nt, Artificial Sequence
  Guide RNA
guugcacaucccuucguuuuuu

SEQ ID NO: 12716 - RNA, 22 nt, Artificial Sequence
  Guide RNA
guuuaucagucuaaaaagcgaa

SEQ ID NO: 12717 - RNA, 22 nt, Artificial Sequence
  Guide RNA
uaaaaaacgaagggaugugcaa

SEQ ID NO: 12718 - RNA, 22 nt, Artificial Sequence
  Guide RNA
uaaaaagcgaagggaugugcaa

SEQ ID NO: 12719 - RNA, 22 nt, Artificial Sequence
  Guide RNA
uaucagucuaaaaaacgaaggg

SEQ ID NO: 12720 - RNA, 22 nt, Artificial Sequence
  Guide RNA
uaucagucuaaaaagcgaaggg

SEQ ID NO: 12721 - RNA, 22 nt, Artificial Sequence
  Guide RNA
ucagucuaaaaaacgaagggau

SEQ ID NO: 12722 - RNA, 22 nt, Artificial Sequence
  Guide RNA
ucagucuaaaaagcgaagggau

SEQ ID NO: 12723 - RNA, 22 nt, Artificial Sequence
  Guide RNA
ucccuucgcuuuuuagacugau

SEQ ID NO: 12724 - RNA, 22 nt, Artificial Sequence
  Guide RNA
ucccuucguuuuuuagacugau

SEQ ID NO: 12725 - RNA, 22 nt, Artificial Sequence
  Guide RNA
ucgcuuuuuagacugauaaacu

SEQ ID NO: 12726 - RNA, 22 nt, Artificial Sequence
  Guide RNA
ucuaaaaaacgaagggaugugc

SEQ ID NO: 12727 - RNA, 22 nt, Artificial Sequence
  Guide RNA
ucuaaaaagcgaagggaugugc

SEQ ID NO: 12728 - RNA, 22 nt, Artificial Sequence
  Guide RNA
ugcacaucccuucgcuuuuuag

SEQ ID NO: 12729 - RNA, 22 nt, Artificial Sequence
  Guide RNA
ugcacaucccuucguuuuuuag

SEQ ID NO: 12730 - RNA, 22 nt, Artificial Sequence
  Guide RNA
ugcaguugcacaucccuucgcu

SEQ ID NO: 12731 - RNA, 22 nt, Artificial Sequence
  Guide RNA
ugcaguugcacaucccuucguu

SEQ ID NO: 12732 - RNA, 22 nt, Artificial Sequence
  Guide RNA
uuaucagucuaaaaaacgaagg

SEQ ID NO: 12733 - RNA, 22 nt, Artificial Sequence
  Guide RNA
uuaucagucuaaaaagcgaagg

SEQ ID NO: 12734 - RNA, 22 nt, Artificial Sequence
  Guide RNA
uucgcuuuuuagacugauaaac

SEQ ID NO: 12735 - RNA, 22 nt, Artificial Sequence
  Guide RNA
uugcacaucccuucgcuuuuua

SEQ ID NO: 12736 - RNA, 22 nt, Artificial Sequence
  Guide RNA
uugcacaucccuucguuuuuua

SEQ ID NO: 12737 - RNA, 22 nt, Artificial Sequence
  Guide RNA
uuuaucagucuaaaaagcgaag

SEQ ID NO: 12738 - RNA, 20 nt, Artificial Sequence
  Guide RNA
aacagcuuccggccuggugc

SEQ ID NO: 12739 - RNA, 20 nt, Artificial Sequence
  Guide RNA
aacagcuucgggccuggugc

SEQ ID NO: 12740 - RNA, 20 nt, Artificial Sequence
  Guide RNA
aagcaugggaacagcuuccg

SEQ ID NO: 12741 - RNA, 20 nt, Artificial Sequence
  Guide RNA
aagcaugggaacagcuucgg

SEQ ID NO: 12742 - RNA, 20 nt, Artificial Sequence
  Guide RNA
acagcuuccggccuggugca

SEQ ID NO: 12743 - RNA, 20 nt, Artificial Sequence
  Guide RNA
acagcuucgggccuggugca

SEQ ID NO: 12744 - RNA, 20 nt, Artificial Sequence
  Guide RNA
accaggcccgaagcuguucc

SEQ ID NO: 12745 - RNA, 20 nt, Artificial Sequence
  Guide RNA
accaggccggaagcuguucc

SEQ ID NO: 12746 - RNA, 20 nt, Artificial Sequence
  Guide RNA
agcaugggaacagcuuccgg

SEQ ID NO: 12747 - RNA, 20 nt, Artificial Sequence
  Guide RNA
agcaugggaacagcuucggg

SEQ ID NO: 12748 - RNA, 20 nt, Artificial Sequence
  Guide RNA
agcucaagcaugggaacagc

SEQ ID NO: 12749 - RNA, 20 nt, Artificial Sequence
  Guide RNA
agcugcaccaggcccgaagc

SEQ ID NO: 12750 - RNA, 20 nt, Artificial Sequence
  Guide RNA
agcugcaccaggccggaagc

SEQ ID NO: 12751 - RNA, 20 nt, Artificial Sequence
  Guide RNA
agcuuccggccuggugcagc

SEQ ID NO: 12752 - RNA, 20 nt, Artificial Sequence
  Guide RNA
agcuucgggccuggugcagc

SEQ ID NO: 12753 - RNA, 20 nt, Artificial Sequence
  Guide RNA
aggcccgaagcuguucccau

SEQ ID NO: 12754 - RNA, 20 nt, Artificial Sequence
  Guide RNA
aggccggaagcuguucccau

SEQ ID NO: 12755 - RNA, 20 nt, Artificial Sequence
  Guide RNA
augggaacagcuuccggccu

SEQ ID NO: 12756 - RNA, 20 nt, Artificial Sequence
  Guide RNA
augggaacagcuucgggccu

SEQ ID NO: 12757 - RNA, 20 nt, Artificial Sequence
  Guide RNA
auguuccuuagcugcaccag

SEQ ID NO: 12758 - RNA, 20 nt, Artificial Sequence
  Guide RNA
caagcaugggaacagcuucc

SEQ ID NO: 12759 - RNA, 20 nt, Artificial Sequence
  Guide RNA
caagcaugggaacagcuucg

SEQ ID NO: 12760 - RNA, 20 nt, Artificial Sequence
  Guide RNA
caccaggcccgaagcuguuc

SEQ ID NO: 12761 - RNA, 20 nt, Artificial Sequence
  Guide RNA
caccaggccggaagcuguuc

SEQ ID NO: 12762 - RNA, 20 nt, Artificial Sequence
  Guide RNA
cagcuuccggccuggugcag

SEQ ID NO: 12763 - RNA, 20 nt, Artificial Sequence
  Guide RNA
cagcuucgggccuggugcag

SEQ ID NO: 12764 - RNA, 20 nt, Artificial Sequence
  Guide RNA
caggcccgaagcuguuccca

SEQ ID NO: 12765 - RNA, 20 nt, Artificial Sequence
  Guide RNA
caggccggaagcuguuccca

SEQ ID NO: 12766 - RNA, 20 nt, Artificial Sequence
  Guide RNA
caugggaacagcuuccggcc

SEQ ID NO: 12767 - RNA, 20 nt, Artificial Sequence
  Guide RNA
caugggaacagcuucgggcc

SEQ ID NO: 12768 - RNA, 20 nt, Artificial Sequence
  Guide RNA
ccaggcccgaagcuguuccc

SEQ ID NO: 12769 - RNA, 20 nt, Artificial Sequence
  Guide RNA
ccaggccggaagcuguuccc

SEQ ID NO: 12770 - RNA, 20 nt, Artificial Sequence
  Guide RNA
cccgaagcuguucccaugcu

SEQ ID NO: 12771 - RNA, 20 nt, Artificial Sequence
  Guide RNA
ccgaagcuguucccaugcuu

SEQ ID NO: 12772 - RNA, 20 nt, Artificial Sequence
  Guide RNA
ccggaagcuguucccaugcu

SEQ ID NO: 12773 - RNA, 20 nt, Artificial Sequence
  Guide RNA
ccggccuggugcagcuaagg

SEQ ID NO: 12774 - RNA, 20 nt, Artificial Sequence
  Guide RNA
ccuuagcugcaccaggcccg

SEQ ID NO: 12775 - RNA, 20 nt, Artificial Sequence
  Guide RNA
ccuuagcugcaccaggccgg

SEQ ID NO: 12776 - RNA, 20 nt, Artificial Sequence
  Guide RNA
cggaagcuguucccaugcuu

SEQ ID NO: 12777 - RNA, 20 nt, Artificial Sequence
  Guide RNA
cgggccuggugcagcuaagg

SEQ ID NO: 12778 - RNA, 20 nt, Artificial Sequence
  Guide RNA
cucaagcaugggaacagcuu

SEQ ID NO: 12779 - RNA, 20 nt, Artificial Sequence
  Guide RNA
cugcaccaggcccgaagcug

SEQ ID NO: 12780 - RNA, 20 nt, Artificial Sequence
  Guide RNA
cugcaccaggccggaagcug

SEQ ID NO: 12781 - RNA, 20 nt, Artificial Sequence
  Guide RNA
cuuagcugcaccaggcccga

SEQ ID NO: 12782 - RNA, 20 nt, Artificial Sequence
  Guide RNA
cuuagcugcaccaggccgga

SEQ ID NO: 12783 - RNA, 20 nt, Artificial Sequence
  Guide RNA
cuuccggccuggugcagcua

SEQ ID NO: 12784 - RNA, 20 nt, Artificial Sequence
  Guide RNA
cuucgggccuggugcagcua

SEQ ID NO: 12785 - RNA, 20 nt, Artificial Sequence
  Guide RNA
gaacagcuuccggccuggug

SEQ ID NO: 12786 - RNA, 20 nt, Artificial Sequence
  Guide RNA
gaacagcuucgggccuggug

SEQ ID NO: 12787 - RNA, 20 nt, Artificial Sequence
  Guide RNA
gcaccaggcccgaagcuguu

SEQ ID NO: 12788 - RNA, 20 nt, Artificial Sequence
  Guide RNA
gcaccaggccggaagcuguu

SEQ ID NO: 12789 - RNA, 20 nt, Artificial Sequence
  Guide RNA
gcaugggaacagcuuccggc

SEQ ID NO: 12790 - RNA, 20 nt, Artificial Sequence
  Guide RNA
gcaugggaacagcuucgggc

SEQ ID NO: 12791 - RNA, 20 nt, Artificial Sequence
  Guide RNA
gcccgaagcuguucccaugc

SEQ ID NO: 12792 - RNA, 20 nt, Artificial Sequence
  Guide RNA
gccggaagcuguucccaugc

SEQ ID NO: 12793 - RNA, 20 nt, Artificial Sequence
  Guide RNA
gcucaagcaugggaacagcu

SEQ ID NO: 12794 - RNA, 20 nt, Artificial Sequence
  Guide RNA
gcugcaccaggcccgaagcu

SEQ ID NO: 12795 - RNA, 20 nt, Artificial Sequence
  Guide RNA
gcugcaccaggccggaagcu

SEQ ID NO: 12796 - RNA, 20 nt, Artificial Sequence
  Guide RNA
gcuuccggccuggugcagcu

SEQ ID NO: 12797 - RNA, 20 nt, Artificial Sequence
  Guide RNA
gcuucgggccuggugcagcu

SEQ ID NO: 12798 - RNA, 20 nt, Artificial Sequence
  Guide RNA
ggaacagcuuccggccuggu

SEQ ID NO: 12799 - RNA, 20 nt, Artificial Sequence
  Guide RNA
ggaacagcuucgggccuggu

SEQ ID NO: 12800 - RNA, 20 nt, Artificial Sequence
  Guide RNA
ggcccgaagcuguucccaug

SEQ ID NO: 12801 - RNA, 20 nt, Artificial Sequence
  Guide RNA
ggccggaagcuguucccaug

SEQ ID NO: 12802 - RNA, 20 nt, Artificial Sequence
  Guide RNA
gggaacagcuuccggccugg

SEQ ID NO: 12803 - RNA, 20 nt, Artificial Sequence
  Guide RNA
gggaacagcuucgggccugg

SEQ ID NO: 12804 - RNA, 20 nt, Artificial Sequence
  Guide RNA
guuccuuagcugcaccaggc

SEQ ID NO: 12805 - RNA, 20 nt, Artificial Sequence
  Guide RNA
uagcugcaccaggcccgaag

SEQ ID NO: 12806 - RNA, 20 nt, Artificial Sequence
  Guide RNA
uagcugcaccaggccggaag

SEQ ID NO: 12807 - RNA, 20 nt, Artificial Sequence
  Guide RNA
ucaagcaugggaacagcuuc

SEQ ID NO: 12808 - RNA, 20 nt, Artificial Sequence
  Guide RNA
uccggccuggugcagcuaag

SEQ ID NO: 12809 - RNA, 20 nt, Artificial Sequence
  Guide RNA
uccuuagcugcaccaggccc

SEQ ID NO: 12810 - RNA, 20 nt, Artificial Sequence
  Guide RNA
uccuuagcugcaccaggccg

SEQ ID NO: 12811 - RNA, 20 nt, Artificial Sequence
  Guide RNA
ucgggccuggugcagcuaag

SEQ ID NO: 12812 - RNA, 20 nt, Artificial Sequence
  Guide RNA
ugcaccaggcccgaagcugu

SEQ ID NO: 12813 - RNA, 20 nt, Artificial Sequence
  Guide RNA
ugcaccaggccggaagcugu

SEQ ID NO: 12814 - RNA, 20 nt, Artificial Sequence
  Guide RNA
ugggaacagcuuccggccug

SEQ ID NO: 12815 - RNA, 20 nt, Artificial Sequence
  Guide RNA
ugggaacagcuucgggccug

SEQ ID NO: 12816 - RNA, 20 nt, Artificial Sequence
  Guide RNA
uguuccuuagcugcaccagg

SEQ ID NO: 12817 - RNA, 20 nt, Artificial Sequence
  Guide RNA
uuagcugcaccaggcccgaa

SEQ ID NO: 12818 - RNA, 20 nt, Artificial Sequence
  Guide RNA
uuagcugcaccaggccggaa

SEQ ID NO: 12819 - RNA, 20 nt, Artificial Sequence
  Guide RNA
uuccggccuggugcagcuaa

SEQ ID NO: 12820 - RNA, 20 nt, Artificial Sequence
  Guide RNA
uuccuuagcugcaccaggcc

SEQ ID NO: 12821 - RNA, 20 nt, Artificial Sequence
  Guide RNA
uucgggccuggugcagcuaa

SEQ ID NO: 12822 - RNA, 21 nt, Artificial Sequence
  Guide RNA
aacagcuuccggccuggugca

SEQ ID NO: 12823 - RNA, 21 nt, Artificial Sequence
  Guide RNA
aacagcuucgggccuggugca

SEQ ID NO: 12824 - RNA, 21 nt, Artificial Sequence
  Guide RNA
aagcaugggaacagcuuccgg

SEQ ID NO: 12825 - RNA, 21 nt, Artificial Sequence
  Guide RNA
aagcaugggaacagcuucggg

SEQ ID NO: 12826 - RNA, 21 nt, Artificial Sequence
  Guide RNA
aagcucaagcaugggaacagc

SEQ ID NO: 12827 - RNA, 21 nt, Artificial Sequence
  Guide RNA
aauguuccuuagcugcaccag

SEQ ID NO: 12828 - RNA, 21 nt, Artificial Sequence
  Guide RNA
acagcuuccggccuggugcag

SEQ ID NO: 12829 - RNA, 21 nt, Artificial Sequence
  Guide RNA
acagcuucgggccuggugcag

SEQ ID NO: 12830 - RNA, 21 nt, Artificial Sequence
  Guide RNA
accaggcccgaagcuguuccc

SEQ ID NO: 12831 - RNA, 21 nt, Artificial Sequence
  Guide RNA
accaggccggaagcuguuccc

SEQ ID NO: 12832 - RNA, 21 nt, Artificial Sequence
  Guide RNA
agcaugggaacagcuuccggc

SEQ ID NO: 12833 - RNA, 21 nt, Artificial Sequence
  Guide RNA
agcaugggaacagcuucgggc

SEQ ID NO: 12834 - RNA, 21 nt, Artificial Sequence
  Guide RNA
agcucaagcaugggaacagcu

SEQ ID NO: 12835 - RNA, 21 nt, Artificial Sequence
  Guide RNA
agcugcaccaggcccgaagcu

SEQ ID NO: 12836 - RNA, 21 nt, Artificial Sequence
  Guide RNA
agcugcaccaggccggaagcu

SEQ ID NO: 12837 - RNA, 21 nt, Artificial Sequence
  Guide RNA
agcuuccggccuggugcagcu

SEQ ID NO: 12838 - RNA, 21 nt, Artificial Sequence
  Guide RNA
agcuucgggccuggugcagcu

SEQ ID NO: 12839 - RNA, 21 nt, Artificial Sequence
  Guide RNA
aggcccgaagcuguucccaug

SEQ ID NO: 12840 - RNA, 21 nt, Artificial Sequence
  Guide RNA
aggccggaagcuguucccaug

SEQ ID NO: 12841 - RNA, 21 nt, Artificial Sequence
  Guide RNA
augggaacagcuuccggccug

SEQ ID NO: 12842 - RNA, 21 nt, Artificial Sequence
  Guide RNA
augggaacagcuucgggccug

SEQ ID NO: 12843 - RNA, 21 nt, Artificial Sequence
  Guide RNA
auguuccuuagcugcaccagg

SEQ ID NO: 12844 - RNA, 21 nt, Artificial Sequence
  Guide RNA
caagcaugggaacagcuuccg

SEQ ID NO: 12845 - RNA, 21 nt, Artificial Sequence
  Guide RNA
caagcaugggaacagcuucgg

SEQ ID NO: 12846 - RNA, 21 nt, Artificial Sequence
  Guide RNA
caccaggcccgaagcuguucc

SEQ ID NO: 12847 - RNA, 21 nt, Artificial Sequence
  Guide RNA
caccaggccggaagcuguucc

SEQ ID NO: 12848 - RNA, 21 nt, Artificial Sequence
  Guide RNA
cagcuuccggccuggugcagc

SEQ ID NO: 12849 - RNA, 21 nt, Artificial Sequence
  Guide RNA
cagcuucgggccuggugcagc

SEQ ID NO: 12850 - RNA, 21 nt, Artificial Sequence
  Guide RNA
caggcccgaagcuguucccau

SEQ ID NO: 12851 - RNA, 21 nt, Artificial Sequence
  Guide RNA
caggccggaagcuguucccau

SEQ ID NO: 12852 - RNA, 21 nt, Artificial Sequence
  Guide RNA
caugggaacagcuuccggccu

SEQ ID NO: 12853 - RNA, 21 nt, Artificial Sequence
  Guide RNA
caugggaacagcuucgggccu

SEQ ID NO: 12854 - RNA, 21 nt, Artificial Sequence
  Guide RNA
ccaggcccgaagcuguuccca

SEQ ID NO: 12855 - RNA, 21 nt, Artificial Sequence
  Guide RNA
ccaggccggaagcuguuccca

SEQ ID NO: 12856 - RNA, 21 nt, Artificial Sequence
  Guide RNA
cccgaagcuguucccaugcuu

SEQ ID NO: 12857 - RNA, 21 nt, Artificial Sequence
  Guide RNA
ccgaagcuguucccaugcuug

SEQ ID NO: 12858 - RNA, 21 nt, Artificial Sequence
  Guide RNA
ccggaagcuguucccaugcuu

SEQ ID NO: 12859 - RNA, 21 nt, Artificial Sequence
  Guide RNA
ccggccuggugcagcuaagga

SEQ ID NO: 12860 - RNA, 21 nt, Artificial Sequence
  Guide RNA
ccuuagcugcaccaggcccga

SEQ ID NO: 12861 - RNA, 21 nt, Artificial Sequence
  Guide RNA
ccuuagcugcaccaggccgga

SEQ ID NO: 12862 - RNA, 21 nt, Artificial Sequence
  Guide RNA
cggaagcuguucccaugcuug

SEQ ID NO: 12863 - RNA, 21 nt, Artificial Sequence
  Guide RNA
cgggccuggugcagcuaagga

SEQ ID NO: 12864 - RNA, 21 nt, Artificial Sequence
  Guide RNA
cucaagcaugggaacagcuuc

SEQ ID NO: 12865 - RNA, 21 nt, Artificial Sequence
  Guide RNA
cugcaccaggcccgaagcugu

SEQ ID NO: 12866 - RNA, 21 nt, Artificial Sequence
  Guide RNA
cugcaccaggccggaagcugu

SEQ ID NO: 12867 - RNA, 21 nt, Artificial Sequence
  Guide RNA
cuuagcugcaccaggcccgaa

SEQ ID NO: 12868 - RNA, 21 nt, Artificial Sequence
  Guide RNA
cuuagcugcaccaggccggaa

SEQ ID NO: 12869 - RNA, 21 nt, Artificial Sequence
  Guide RNA
cuuccggccuggugcagcuaa

SEQ ID NO: 12870 - RNA, 21 nt, Artificial Sequence
  Guide RNA
cuucgggccuggugcagcuaa

SEQ ID NO: 12871 - RNA, 21 nt, Artificial Sequence
  Guide RNA
gaacagcuuccggccuggugc

SEQ ID NO: 12872 - RNA, 21 nt, Artificial Sequence
  Guide RNA
gaacagcuucgggccuggugc

SEQ ID NO: 12873 - RNA, 21 nt, Artificial Sequence
  Guide RNA
gcaccaggcccgaagcuguuc

SEQ ID NO: 12874 - RNA, 21 nt, Artificial Sequence
  Guide RNA
gcaccaggccggaagcuguuc

SEQ ID NO: 12875 - RNA, 21 nt, Artificial Sequence
  Guide RNA
gcaugggaacagcuuccggcc

SEQ ID NO: 12876 - RNA, 21 nt, Artificial Sequence
  Guide RNA
gcaugggaacagcuucgggcc

SEQ ID NO: 12877 - RNA, 21 nt, Artificial Sequence
  Guide RNA
gcccgaagcuguucccaugcu

SEQ ID NO: 12878 - RNA, 21 nt, Artificial Sequence
  Guide RNA
gccggaagcuguucccaugcu

SEQ ID NO: 12879 - RNA, 21 nt, Artificial Sequence
  Guide RNA
gcucaagcaugggaacagcuu

SEQ ID NO: 12880 - RNA, 21 nt, Artificial Sequence
  Guide RNA
gcugcaccaggcccgaagcug

SEQ ID NO: 12881 - RNA, 21 nt, Artificial Sequence
  Guide RNA
gcugcaccaggccggaagcug

SEQ ID NO: 12882 - RNA, 21 nt, Artificial Sequence
  Guide RNA
gcuuccggccuggugcagcua

SEQ ID NO: 12883 - RNA, 21 nt, Artificial Sequence
  Guide RNA
gcuucgggccuggugcagcua

SEQ ID NO: 12884 - RNA, 21 nt, Artificial Sequence
  Guide RNA
ggaacagcuuccggccuggug

SEQ ID NO: 12885 - RNA, 21 nt, Artificial Sequence
  Guide RNA
ggaacagcuucgggccuggug

SEQ ID NO: 12886 - RNA, 21 nt, Artificial Sequence
  Guide RNA
ggcccgaagcuguucccaugc

SEQ ID NO: 12887 - RNA, 21 nt, Artificial Sequence
  Guide RNA
ggccggaagcuguucccaugc

SEQ ID NO: 12888 - RNA, 21 nt, Artificial Sequence
  Guide RNA
gggaacagcuuccggccuggu

SEQ ID NO: 12889 - RNA, 21 nt, Artificial Sequence
  Guide RNA
gggaacagcuucgggccuggu

SEQ ID NO: 12890 - RNA, 21 nt, Artificial Sequence
  Guide RNA
guuccuuagcugcaccaggcc

SEQ ID NO: 12891 - RNA, 21 nt, Artificial Sequence
  Guide RNA
uagcugcaccaggcccgaagc

SEQ ID NO: 12892 - RNA, 21 nt, Artificial Sequence
  Guide RNA
uagcugcaccaggccggaagc

SEQ ID NO: 12893 - RNA, 21 nt, Artificial Sequence
  Guide RNA
ucaagcaugggaacagcuucc

SEQ ID NO: 12894 - RNA, 21 nt, Artificial Sequence
  Guide RNA
ucaagcaugggaacagcuucg

SEQ ID NO: 12895 - RNA, 21 nt, Artificial Sequence
  Guide RNA
uccggccuggugcagcuaagg

SEQ ID NO: 12896 - RNA, 21 nt, Artificial Sequence
  Guide RNA
uccuuagcugcaccaggcccg

SEQ ID NO: 12897 - RNA, 21 nt, Artificial Sequence
  Guide RNA
uccuuagcugcaccaggccgg

SEQ ID NO: 12898 - RNA, 21 nt, Artificial Sequence
  Guide RNA
ucgggccuggugcagcuaagg

SEQ ID NO: 12899 - RNA, 21 nt, Artificial Sequence
  Guide RNA
ugcaccaggcccgaagcuguu

SEQ ID NO: 12900 - RNA, 21 nt, Artificial Sequence
  Guide RNA
ugcaccaggccggaagcuguu

SEQ ID NO: 12901 - RNA, 21 nt, Artificial Sequence
  Guide RNA
ugggaacagcuuccggccugg

SEQ ID NO: 12902 - RNA, 21 nt, Artificial Sequence
  Guide RNA
ugggaacagcuucgggccugg

SEQ ID NO: 12903 - RNA, 21 nt, Artificial Sequence
  Guide RNA
uguuccuuagcugcaccaggc

SEQ ID NO: 12904 - RNA, 21 nt, Artificial Sequence
  Guide RNA
uuagcugcaccaggcccgaag

SEQ ID NO: 12905 - RNA, 21 nt, Artificial Sequence
  Guide RNA
uuagcugcaccaggccggaag

SEQ ID NO: 12906 - RNA, 21 nt, Artificial Sequence
  Guide RNA
uuccggccuggugcagcuaag

SEQ ID NO: 12907 - RNA, 21 nt, Artificial Sequence
  Guide RNA
uuccuuagcugcaccaggccc

SEQ ID NO: 12908 - RNA, 21 nt, Artificial Sequence
  Guide RNA
uuccuuagcugcaccaggccg

SEQ ID NO: 12909 - RNA, 21 nt, Artificial Sequence
  Guide RNA
uucgggccuggugcagcuaag

SEQ ID NO: 12910 - RNA, 22 nt, Artificial Sequence
  Guide RNA
aacagcuuccggccuggugcag

SEQ ID NO: 12911 - RNA, 22 nt, Artificial Sequence
  Guide RNA
aacagcuucgggccuggugcag

SEQ ID NO: 12912 - RNA, 22 nt, Artificial Sequence
  Guide RNA
aagcaugggaacagcuuccggc

SEQ ID NO: 12913 - RNA, 22 nt, Artificial Sequence
  Guide RNA
aagcaugggaacagcuucgggc

SEQ ID NO: 12914 - RNA, 22 nt, Artificial Sequence
  Guide RNA
aagcucaagcaugggaacagcu

SEQ ID NO: 12915 - RNA, 22 nt, Artificial Sequence
  Guide RNA
aauguuccuuagcugcaccagg

SEQ ID NO: 12916 - RNA, 22 nt, Artificial Sequence
  Guide RNA
acagcuuccggccuggugcagc

SEQ ID NO: 12917 - RNA, 22 nt, Artificial Sequence
  Guide RNA
acagcuucgggccuggugcagc

SEQ ID NO: 12918 - RNA, 22 nt, Artificial Sequence
  Guide RNA
accaggcccgaagcuguuccca

SEQ ID NO: 12919 - RNA, 22 nt, Artificial Sequence
  Guide RNA
accaggccggaagcuguuccca

SEQ ID NO: 12920 - RNA, 22 nt, Artificial Sequence
  Guide RNA
agcaugggaacagcuuccggcc

SEQ ID NO: 12921 - RNA, 22 nt, Artificial Sequence
  Guide RNA
agcaugggaacagcuucgggcc

SEQ ID NO: 12922 - RNA, 22 nt, Artificial Sequence
  Guide RNA
agcucaagcaugggaacagcuu

SEQ ID NO: 12923 - RNA, 22 nt, Artificial Sequence
  Guide RNA
agcugcaccaggcccgaagcug

SEQ ID NO: 12924 - RNA, 22 nt, Artificial Sequence
  Guide RNA
agcugcaccaggccggaagcug

SEQ ID NO: 12925 - RNA, 22 nt, Artificial Sequence
  Guide RNA
agcuuccggccuggugcagcua

SEQ ID NO: 12926 - RNA, 22 nt, Artificial Sequence
  Guide RNA
agcuucgggccuggugcagcua

SEQ ID NO: 12927 - RNA, 22 nt, Artificial Sequence
  Guide RNA
aggcccgaagcuguucccaugc

SEQ ID NO: 12928 - RNA, 22 nt, Artificial Sequence
  Guide RNA
aggccggaagcuguucccaugc

SEQ ID NO: 12929 - RNA, 22 nt, Artificial Sequence
  Guide RNA
augggaacagcuuccggccugg

SEQ ID NO: 12930 - RNA, 22 nt, Artificial Sequence
  Guide RNA
augggaacagcuucgggccugg

SEQ ID NO: 12931 - RNA, 22 nt, Artificial Sequence
  Guide RNA
auguuccuuagcugcaccaggc

SEQ ID NO: 12932 - RNA, 22 nt, Artificial Sequence
  Guide RNA
caagcaugggaacagcuuccgg

SEQ ID NO: 12933 - RNA, 22 nt, Artificial Sequence
  Guide RNA
caagcaugggaacagcuucggg

SEQ ID NO: 12934 - RNA, 22 nt, Artificial Sequence
  Guide RNA
caauguuccuuagcugcaccag

SEQ ID NO: 12935 - RNA, 22 nt, Artificial Sequence
  Guide RNA
caccaggcccgaagcuguuccc

SEQ ID NO: 12936 - RNA, 22 nt, Artificial Sequence
  Guide RNA
caccaggccggaagcuguuccc

SEQ ID NO: 12937 - RNA, 22 nt, Artificial Sequence
  Guide RNA
cagcuuccggccuggugcagcu

SEQ ID NO: 12938 - RNA, 22 nt, Artificial Sequence
  Guide RNA
cagcuucgggccuggugcagcu

SEQ ID NO: 12939 - RNA, 22 nt, Artificial Sequence
  Guide RNA
caggcccgaagcuguucccaug

SEQ ID NO: 12940 - RNA, 22 nt, Artificial Sequence
  Guide RNA
caggccggaagcuguucccaug

SEQ ID NO: 12941 - RNA, 22 nt, Artificial Sequence
  Guide RNA
caugggaacagcuuccggccug

SEQ ID NO: 12942 - RNA, 22 nt, Artificial Sequence
  Guide RNA
caugggaacagcuucgggccug

SEQ ID NO: 12943 - RNA, 22 nt, Artificial Sequence
  Guide RNA
ccaggcccgaagcuguucccau

SEQ ID NO: 12944 - RNA, 22 nt, Artificial Sequence
  Guide RNA
ccaggccggaagcuguucccau

SEQ ID NO: 12945 - RNA, 22 nt, Artificial Sequence
  Guide RNA
cccgaagcuguucccaugcuug

SEQ ID NO: 12946 - RNA, 22 nt, Artificial Sequence
  Guide RNA
ccgaagcuguucccaugcuuga

SEQ ID NO: 12947 - RNA, 22 nt, Artificial Sequence
  Guide RNA
ccggaagcuguucccaugcuug

SEQ ID NO: 12948 - RNA, 22 nt, Artificial Sequence
  Guide RNA
ccggccuggugcagcuaaggaa

SEQ ID NO: 12949 - RNA, 22 nt, Artificial Sequence
  Guide RNA
ccuuagcugcaccaggcccgaa

SEQ ID NO: 12950 - RNA, 22 nt, Artificial Sequence
  Guide RNA
ccuuagcugcaccaggccggaa

SEQ ID NO: 12951 - RNA, 22 nt, Artificial Sequence
  Guide RNA
cggaagcuguucccaugcuuga

SEQ ID NO: 12952 - RNA, 22 nt, Artificial Sequence
  Guide RNA
cgggccuggugcagcuaaggaa

SEQ ID NO: 12953 - RNA, 22 nt, Artificial Sequence
  Guide RNA
cucaagcaugggaacagcuucc

SEQ ID NO: 12954 - RNA, 22 nt, Artificial Sequence
  Guide RNA
cucaagcaugggaacagcuucg

SEQ ID NO: 12955 - RNA, 22 nt, Artificial Sequence
  Guide RNA
cugcaccaggcccgaagcuguu

SEQ ID NO: 12956 - RNA, 22 nt, Artificial Sequence
  Guide RNA
cugcaccaggccggaagcuguu

SEQ ID NO: 12957 - RNA, 22 nt, Artificial Sequence
  Guide RNA
cuuagcugcaccaggcccgaag

SEQ ID NO: 12958 - RNA, 22 nt, Artificial Sequence
  Guide RNA
cuuagcugcaccaggccggaag

SEQ ID NO: 12959 - RNA, 22 nt, Artificial Sequence
  Guide RNA
cuuccggccuggugcagcuaag

SEQ ID NO: 12960 - RNA, 22 nt, Artificial Sequence
  Guide RNA
cuucgggccuggugcagcuaag

SEQ ID NO: 12961 - RNA, 22 nt, Artificial Sequence
  Guide RNA
gaacagcuuccggccuggugca

SEQ ID NO: 12962 - RNA, 22 nt, Artificial Sequence
  Guide RNA
gaacagcuucgggccuggugca

SEQ ID NO: 12963 - RNA, 22 nt, Artificial Sequence
  Guide RNA
gaagcucaagcaugggaacagc

SEQ ID NO: 12964 - RNA, 22 nt, Artificial Sequence
  Guide RNA
gcaccaggcccgaagcuguucc

SEQ ID NO: 12965 - RNA, 22 nt, Artificial Sequence
  Guide RNA
gcaccaggccggaagcuguucc

SEQ ID NO: 12966 - RNA, 22 nt, Artificial Sequence
  Guide RNA
gcaugggaacagcuuccggccu

SEQ ID NO: 12967 - RNA, 22 nt, Artificial Sequence
  Guide RNA
gcaugggaacagcuucgggccu

SEQ ID NO: 12968 - RNA, 22 nt, Artificial Sequence
  Guide RNA
gcccgaagcuguucccaugcuu

SEQ ID NO: 12969 - RNA, 22 nt, Artificial Sequence
  Guide RNA
gccggaagcuguucccaugcuu

SEQ ID NO: 12970 - RNA, 22 nt, Artificial Sequence
  Guide RNA
gcucaagcaugggaacagcuuc

SEQ ID NO: 12971 - RNA, 22 nt, Artificial Sequence
  Guide RNA
gcugcaccaggcccgaagcugu

SEQ ID NO: 12972 - RNA, 22 nt, Artificial Sequence
  Guide RNA
gcugcaccaggccggaagcugu

SEQ ID NO: 12973 - RNA, 22 nt, Artificial Sequence
  Guide RNA
gcuuccggccuggugcagcuaa

SEQ ID NO: 12974 - RNA, 22 nt, Artificial Sequence
  Guide RNA
gcuucgggccuggugcagcuaa

SEQ ID NO: 12975 - RNA, 22 nt, Artificial Sequence
  Guide RNA
ggaacagcuuccggccuggugc

SEQ ID NO: 12976 - RNA, 22 nt, Artificial Sequence
  Guide RNA
ggaacagcuucgggccuggugc

SEQ ID NO: 12977 - RNA, 22 nt, Artificial Sequence
  Guide RNA
ggcccgaagcuguucccaugcu

SEQ ID NO: 12978 - RNA, 22 nt, Artificial Sequence
  Guide RNA
ggccggaagcuguucccaugcu

SEQ ID NO: 12979 - RNA, 22 nt, Artificial Sequence
  Guide RNA
gggaacagcuuccggccuggug

SEQ ID NO: 12980 - RNA, 22 nt, Artificial Sequence
  Guide RNA
gggaacagcuucgggccuggug

SEQ ID NO: 12981 - RNA, 22 nt, Artificial Sequence
  Guide RNA
guuccuuagcugcaccaggccc

SEQ ID NO: 12982 - RNA, 22 nt, Artificial Sequence
  Guide RNA
guuccuuagcugcaccaggccg

SEQ ID NO: 12983 - RNA, 22 nt, Artificial Sequence
  Guide RNA
uagcugcaccaggcccgaagcu

SEQ ID NO: 12984 - RNA, 22 nt, Artificial Sequence
  Guide RNA
uagcugcaccaggccggaagcu

SEQ ID NO: 12985 - RNA, 22 nt, Artificial Sequence
  Guide RNA
ucaagcaugggaacagcuuccg

SEQ ID NO: 12986 - RNA, 22 nt, Artificial Sequence
  Guide RNA
ucaagcaugggaacagcuucgg

SEQ ID NO: 12987 - RNA, 22 nt, Artificial Sequence
  Guide RNA
uccggccuggugcagcuaagga

SEQ ID NO: 12988 - RNA, 22 nt, Artificial Sequence
  Guide RNA
uccuuagcugcaccaggcccga

SEQ ID NO: 12989 - RNA, 22 nt, Artificial Sequence
  Guide RNA
uccuuagcugcaccaggccgga

SEQ ID NO: 12990 - RNA, 22 nt, Artificial Sequence
  Guide RNA
ucgggccuggugcagcuaagga

SEQ ID NO: 12991 - RNA, 22 nt, Artificial Sequence
  Guide RNA
ugcaccaggcccgaagcuguuc

SEQ ID NO: 12992 - RNA, 22 nt, Artificial Sequence
  Guide RNA
ugcaccaggccggaagcuguuc

SEQ ID NO: 12993 - RNA, 22 nt, Artificial Sequence
  Guide RNA
ugggaacagcuuccggccuggu

SEQ ID NO: 12994 - RNA, 22 nt, Artificial Sequence
  Guide RNA
ugggaacagcuucgggccuggu

SEQ ID NO: 12995 - RNA, 22 nt, Artificial Sequence
  Guide RNA
uguuccuuagcugcaccaggcc

SEQ ID NO: 12996 - RNA, 22 nt, Artificial Sequence
  Guide RNA
uuagcugcaccaggcccgaagc

SEQ ID NO: 12997 - RNA, 22 nt, Artificial Sequence
  Guide RNA
uuagcugcaccaggccggaagc

SEQ ID NO: 12998 - RNA, 22 nt, Artificial Sequence
  Guide RNA
uuccggccuggugcagcuaagg

SEQ ID NO: 12999 - RNA, 22 nt, Artificial Sequence
  Guide RNA
uuccuuagcugcaccaggcccg

SEQ ID NO: 13000 - RNA, 22 nt, Artificial Sequence
  Guide RNA
uuccuuagcugcaccaggccgg

SEQ ID NO: 13001 - RNA, 22 nt, Artificial Sequence
  Guide RNA
uucgggccuggugcagcuaagg

SEQ ID NO: 13002 - RNA, 20 nt, Artificial Sequence
  Guide RNA
aaaguacaugaacaccauga

SEQ ID NO: 13003 - RNA, 20 nt, Artificial Sequence
  Guide RNA
aaaguaccugaacaccauga

SEQ ID NO: 13004 - RNA, 20 nt, Artificial Sequence
  Guide RNA
aaauguaacagucauggugu

SEQ ID NO: 13005 - RNA, 20 nt, Artificial Sequence
  Guide RNA
aacagucaugguguucaggu

SEQ ID NO: 13006 - RNA, 20 nt, Artificial Sequence
  Guide RNA
aacagucaugguguucaugu

SEQ ID NO: 13007 - RNA, 20 nt, Artificial Sequence
  Guide RNA
aaccauagagaaaguacaug

SEQ ID NO: 13008 - RNA, 20 nt, Artificial Sequence
  Guide RNA
aaccauagagaaaguaccug

SEQ ID NO: 13009 - RNA, 20 nt, Artificial Sequence
  Guide RNA
aaguacaugaacaccaugac

SEQ ID NO: 13010 - RNA, 20 nt, Artificial Sequence
  Guide RNA
aaguaccugaacaccaugac

SEQ ID NO: 13011 - RNA, 20 nt, Artificial Sequence
  Guide RNA
aauguaacagucaugguguu

SEQ ID NO: 13012 - RNA, 20 nt, Artificial Sequence
  Guide RNA
acagucaugguguucaggua

SEQ ID NO: 13013 - RNA, 20 nt, Artificial Sequence
  Guide RNA
acagucaugguguucaugua

SEQ ID NO: 13014 - RNA, 20 nt, Artificial Sequence
  Guide RNA
acaugaacaccaugacuguu

SEQ ID NO: 13015 - RNA, 20 nt, Artificial Sequence
  Guide RNA
accauagagaaaguacauga

SEQ ID NO: 13016 - RNA, 20 nt, Artificial Sequence
  Guide RNA
accauagagaaaguaccuga

SEQ ID NO: 13017 - RNA, 20 nt, Artificial Sequence
  Guide RNA
accugaacaccaugacuguu

SEQ ID NO: 13018 - RNA, 20 nt, Artificial Sequence
  Guide RNA
agaaaguacaugaacaccau

SEQ ID NO: 13019 - RNA, 20 nt, Artificial Sequence
  Guide RNA
agaaaguaccugaacaccau

SEQ ID NO: 13020 - RNA, 20 nt, Artificial Sequence
  Guide RNA
agagaaaguacaugaacacc

SEQ ID NO: 13021 - RNA, 20 nt, Artificial Sequence
  Guide RNA
agagaaaguaccugaacacc

SEQ ID NO: 13022 - RNA, 20 nt, Artificial Sequence
  Guide RNA
agguacuuucucuaugguug

SEQ ID NO: 13023 - RNA, 20 nt, Artificial Sequence
  Guide RNA
aguacaugaacaccaugacu

SEQ ID NO: 13024 - RNA, 20 nt, Artificial Sequence
  Guide RNA
aguaccugaacaccaugacu

SEQ ID NO: 13025 - RNA, 20 nt, Artificial Sequence
  Guide RNA
agucaugguguucagguacu

SEQ ID NO: 13026 - RNA, 20 nt, Artificial Sequence
  Guide RNA
agucaugguguucauguacu

SEQ ID NO: 13027 - RNA, 20 nt, Artificial Sequence
  Guide RNA
auagagaaaguacaugaaca

SEQ ID NO: 13028 - RNA, 20 nt, Artificial Sequence
  Guide RNA
auagagaaaguaccugaaca

SEQ ID NO: 13029 - RNA, 20 nt, Artificial Sequence
  Guide RNA
augguguucagguacuuucu

SEQ ID NO: 13030 - RNA, 20 nt, Artificial Sequence
  Guide RNA
augguguucauguacuuucu

SEQ ID NO: 13031 - RNA, 20 nt, Artificial Sequence
  Guide RNA
auguaacagucaugguguuc

SEQ ID NO: 13032 - RNA, 20 nt, Artificial Sequence
  Guide RNA
auguacuuucucuaugguug

SEQ ID NO: 13033 - RNA, 20 nt, Artificial Sequence
  Guide RNA
caaccauagagaaaguacau

SEQ ID NO: 13034 - RNA, 20 nt, Artificial Sequence
  Guide RNA
caaccauagagaaaguaccu

SEQ ID NO: 13035 - RNA, 20 nt, Artificial Sequence
  Guide RNA
cagguacuuucucuaugguu

SEQ ID NO: 13036 - RNA, 20 nt, Artificial Sequence
  Guide RNA
cagucaugguguucagguac

SEQ ID NO: 13037 - RNA, 20 nt, Artificial Sequence
  Guide RNA
cagucaugguguucauguac

SEQ ID NO: 13038 - RNA, 20 nt, Artificial Sequence
  Guide RNA
cauagagaaaguacaugaac

SEQ ID NO: 13039 - RNA, 20 nt, Artificial Sequence
  Guide RNA
cauagagaaaguaccugaac

SEQ ID NO: 13040 - RNA, 20 nt, Artificial Sequence
  Guide RNA
caugaacaccaugacuguua

SEQ ID NO: 13041 - RNA, 20 nt, Artificial Sequence
  Guide RNA
caugguguucagguacuuuc

SEQ ID NO: 13042 - RNA, 20 nt, Artificial Sequence
  Guide RNA
caugguguucauguacuuuc

SEQ ID NO: 13043 - RNA, 20 nt, Artificial Sequence
  Guide RNA
cauguacuuucucuaugguu

SEQ ID NO: 13044 - RNA, 20 nt, Artificial Sequence
  Guide RNA
ccaaccauagagaaaguaca

SEQ ID NO: 13045 - RNA, 20 nt, Artificial Sequence
  Guide RNA
ccaaccauagagaaaguacc

SEQ ID NO: 13046 - RNA, 20 nt, Artificial Sequence
  Guide RNA
ccauagagaaaguacaugaa

SEQ ID NO: 13047 - RNA, 20 nt, Artificial Sequence
  Guide RNA
ccauagagaaaguaccugaa

SEQ ID NO: 13048 - RNA, 20 nt, Artificial Sequence
  Guide RNA
ccugaacaccaugacuguua

SEQ ID NO: 13049 - RNA, 20 nt, Artificial Sequence
  Guide RNA
gaaaguacaugaacaccaug

SEQ ID NO: 13050 - RNA, 20 nt, Artificial Sequence
  Guide RNA
gaaaguaccugaacaccaug

SEQ ID NO: 13051 - RNA, 20 nt, Artificial Sequence
  Guide RNA
gagaaaguacaugaacacca

SEQ ID NO: 13052 - RNA, 20 nt, Artificial Sequence
  Guide RNA
gagaaaguaccugaacacca

SEQ ID NO: 13053 - RNA, 20 nt, Artificial Sequence
  Guide RNA
gguguucagguacuuucucu

SEQ ID NO: 13054 - RNA, 20 nt, Artificial Sequence
  Guide RNA
gguguucauguacuuucucu

SEQ ID NO: 13055 - RNA, 20 nt, Artificial Sequence
  Guide RNA
guaacagucaugguguucag

SEQ ID NO: 13056 - RNA, 20 nt, Artificial Sequence
  Guide RNA
guaacagucaugguguucau

SEQ ID NO: 13057 - RNA, 20 nt, Artificial Sequence
  Guide RNA
guacaugaacaccaugacug

SEQ ID NO: 13058 - RNA, 20 nt, Artificial Sequence
  Guide RNA
guaccugaacaccaugacug

SEQ ID NO: 13059 - RNA, 20 nt, Artificial Sequence
  Guide RNA
gucaugguguucagguacuu

SEQ ID NO: 13060 - RNA, 20 nt, Artificial Sequence
  Guide RNA
gucaugguguucauguacuu

SEQ ID NO: 13061 - RNA, 20 nt, Artificial Sequence
  Guide RNA
guguucagguacuuucucua

SEQ ID NO: 13062 - RNA, 20 nt, Artificial Sequence
  Guide RNA
guguucauguacuuucucua

SEQ ID NO: 13063 - RNA, 20 nt, Artificial Sequence
  Guide RNA
guucagguacuuucucuaug

SEQ ID NO: 13064 - RNA, 20 nt, Artificial Sequence
  Guide RNA
guucauguacuuucucuaug

SEQ ID NO: 13065 - RNA, 20 nt, Artificial Sequence
  Guide RNA
uaacagucaugguguucagg

SEQ ID NO: 13066 - RNA, 20 nt, Artificial Sequence
  Guide RNA
uaacagucaugguguucaug

SEQ ID NO: 13067 - RNA, 20 nt, Artificial Sequence
  Guide RNA
uacaugaacaccaugacugu

SEQ ID NO: 13068 - RNA, 20 nt, Artificial Sequence
  Guide RNA
uaccugaacaccaugacugu

SEQ ID NO: 13069 - RNA, 20 nt, Artificial Sequence
  Guide RNA
uagagaaaguacaugaacac

SEQ ID NO: 13070 - RNA, 20 nt, Artificial Sequence
  Guide RNA
uagagaaaguaccugaacac

SEQ ID NO: 13071 - RNA, 20 nt, Artificial Sequence
  Guide RNA
ucagguacuuucucuauggu

SEQ ID NO: 13072 - RNA, 20 nt, Artificial Sequence
  Guide RNA
ucaugguguucagguacuuu

SEQ ID NO: 13073 - RNA, 20 nt, Artificial Sequence
  Guide RNA
ucaugguguucauguacuuu

SEQ ID NO: 13074 - RNA, 20 nt, Artificial Sequence
  Guide RNA
ucauguacuuucucuauggu

SEQ ID NO: 13075 - RNA, 20 nt, Artificial Sequence
  Guide RNA
uccaaccauagagaaaguac

SEQ ID NO: 13076 - RNA, 20 nt, Artificial Sequence
  Guide RNA
ugguguucagguacuuucuc

SEQ ID NO: 13077 - RNA, 20 nt, Artificial Sequence
  Guide RNA
ugguguucauguacuuucuc

SEQ ID NO: 13078 - RNA, 20 nt, Artificial Sequence
  Guide RNA
uguaacagucaugguguuca

SEQ ID NO: 13079 - RNA, 20 nt, Artificial Sequence
  Guide RNA
uguucagguacuuucucuau

SEQ ID NO: 13080 - RNA, 20 nt, Artificial Sequence
  Guide RNA
uguucauguacuuucucuau

SEQ ID NO: 13081 - RNA, 20 nt, Artificial Sequence
  Guide RNA
uucagguacuuucucuaugg

SEQ ID NO: 13082 - RNA, 20 nt, Artificial Sequence
  Guide RNA
uucauguacuuucucuaugg

SEQ ID NO: 13083 - RNA, 20 nt, Artificial Sequence
  Guide RNA
uuccaaccauagagaaagua

SEQ ID NO: 13084 - RNA, 20 nt, Artificial Sequence
  Guide RNA
uuuccaaccauagagaaagu

SEQ ID NO: 13085 - RNA, 20 nt, Artificial Sequence
  Guide RNA
uuuuccaaccauagagaaag

SEQ ID NO: 13086 - RNA, 21 nt, Artificial Sequence
  Guide RNA
aaaauguaacagucauggugu

SEQ ID NO: 13087 - RNA, 21 nt, Artificial Sequence
  Guide RNA
aaaguacaugaacaccaugac

SEQ ID NO: 13088 - RNA, 21 nt, Artificial Sequence
  Guide RNA
aaaguaccugaacaccaugac

SEQ ID NO: 13089 - RNA, 21 nt, Artificial Sequence
  Guide RNA
aaauguaacagucaugguguu

SEQ ID NO: 13090 - RNA, 21 nt, Artificial Sequence
  Guide RNA
aacagucaugguguucaggua

SEQ ID NO: 13091 - RNA, 21 nt, Artificial Sequence
  Guide RNA
aacagucaugguguucaugua

SEQ ID NO: 13092 - RNA, 21 nt, Artificial Sequence
  Guide RNA
aaccauagagaaaguacauga

SEQ ID NO: 13093 - RNA, 21 nt, Artificial Sequence
  Guide RNA
aaccauagagaaaguaccuga

SEQ ID NO: 13094 - RNA, 21 nt, Artificial Sequence
  Guide RNA
aaguacaugaacaccaugacu

SEQ ID NO: 13095 - RNA, 21 nt, Artificial Sequence
  Guide RNA
aaguaccugaacaccaugacu

SEQ ID NO: 13096 - RNA, 21 nt, Artificial Sequence
  Guide RNA
aauguaacagucaugguguuc

SEQ ID NO: 13097 - RNA, 21 nt, Artificial Sequence
  Guide RNA
acagucaugguguucagguac

SEQ ID NO: 13098 - RNA, 21 nt, Artificial Sequence
  Guide RNA
acagucaugguguucauguac

SEQ ID NO: 13099 - RNA, 21 nt, Artificial Sequence
  Guide RNA
acaugaacaccaugacuguua

SEQ ID NO: 13100 - RNA, 21 nt, Artificial Sequence
  Guide RNA
accauagagaaaguacaugaa

SEQ ID NO: 13101 - RNA, 21 nt, Artificial Sequence
  Guide RNA
accauagagaaaguaccugaa

SEQ ID NO: 13102 - RNA, 21 nt, Artificial Sequence
  Guide RNA
accugaacaccaugacuguua

SEQ ID NO: 13103 - RNA, 21 nt, Artificial Sequence
  Guide RNA
agaaaguacaugaacaccaug

SEQ ID NO: 13104 - RNA, 21 nt, Artificial Sequence
  Guide RNA
agaaaguaccugaacaccaug

SEQ ID NO: 13105 - RNA, 21 nt, Artificial Sequence
  Guide RNA
agagaaaguacaugaacacca

SEQ ID NO: 13106 - RNA, 21 nt, Artificial Sequence
  Guide RNA
agagaaaguaccugaacacca

SEQ ID NO: 13107 - RNA, 21 nt, Artificial Sequence
  Guide RNA
agguacuuucucuaugguugg

SEQ ID NO: 13108 - RNA, 21 nt, Artificial Sequence
  Guide RNA
aguacaugaacaccaugacug

SEQ ID NO: 13109 - RNA, 21 nt, Artificial Sequence
  Guide RNA
aguaccugaacaccaugacug

SEQ ID NO: 13110 - RNA, 21 nt, Artificial Sequence
  Guide RNA
agucaugguguucagguacuu

SEQ ID NO: 13111 - RNA, 21 nt, Artificial Sequence
  Guide RNA
agucaugguguucauguacuu

SEQ ID NO: 13112 - RNA, 21 nt, Artificial Sequence
  Guide RNA
auagagaaaguacaugaacac

SEQ ID NO: 13113 - RNA, 21 nt, Artificial Sequence
  Guide RNA
auagagaaaguaccugaacac

SEQ ID NO: 13114 - RNA, 21 nt, Artificial Sequence
  Guide RNA
augguguucagguacuuucuc

SEQ ID NO: 13115 - RNA, 21 nt, Artificial Sequence
  Guide RNA
augguguucauguacuuucuc

SEQ ID NO: 13116 - RNA, 21 nt, Artificial Sequence
  Guide RNA
auguaacagucaugguguuca

SEQ ID NO: 13117 - RNA, 21 nt, Artificial Sequence
  Guide RNA
auguacuuucucuaugguugg

SEQ ID NO: 13118 - RNA, 21 nt, Artificial Sequence
  Guide RNA
caaccauagagaaaguacaug

SEQ ID NO: 13119 - RNA, 21 nt, Artificial Sequence
  Guide RNA
caaccauagagaaaguaccug

SEQ ID NO: 13120 - RNA, 21 nt, Artificial Sequence
  Guide RNA
cagguacuuucucuaugguug

SEQ ID NO: 13121 - RNA, 21 nt, Artificial Sequence
  Guide RNA
cagucaugguguucagguacu

SEQ ID NO: 13122 - RNA, 21 nt, Artificial Sequence
  Guide RNA
cagucaugguguucauguacu

SEQ ID NO: 13123 - RNA, 21 nt, Artificial Sequence
  Guide RNA
cauagagaaaguacaugaaca

SEQ ID NO: 13124 - RNA, 21 nt, Artificial Sequence
  Guide RNA
cauagagaaaguaccugaaca

SEQ ID NO: 13125 - RNA, 21 nt, Artificial Sequence
  Guide RNA
caugaacaccaugacuguuac

SEQ ID NO: 13126 - RNA, 21 nt, Artificial Sequence
  Guide RNA
caugguguucagguacuuucu

SEQ ID NO: 13127 - RNA, 21 nt, Artificial Sequence
  Guide RNA
caugguguucauguacuuucu

SEQ ID NO: 13128 - RNA, 21 nt, Artificial Sequence
  Guide RNA
cauguacuuucucuaugguug

SEQ ID NO: 13129 - RNA, 21 nt, Artificial Sequence
  Guide RNA
ccaaccauagagaaaguacau

SEQ ID NO: 13130 - RNA, 21 nt, Artificial Sequence
  Guide RNA
ccaaccauagagaaaguaccu

SEQ ID NO: 13131 - RNA, 21 nt, Artificial Sequence
  Guide RNA
ccauagagaaaguacaugaac

SEQ ID NO: 13132 - RNA, 21 nt, Artificial Sequence
  Guide RNA
ccauagagaaaguaccugaac

SEQ ID NO: 13133 - RNA, 21 nt, Artificial Sequence
  Guide RNA
ccugaacaccaugacuguuac

SEQ ID NO: 13134 - RNA, 21 nt, Artificial Sequence
  Guide RNA
gaaaguacaugaacaccauga

SEQ ID NO: 13135 - RNA, 21 nt, Artificial Sequence
  Guide RNA
gaaaguaccugaacaccauga

SEQ ID NO: 13136 - RNA, 21 nt, Artificial Sequence
  Guide RNA
gagaaaguacaugaacaccau

SEQ ID NO: 13137 - RNA, 21 nt, Artificial Sequence
  Guide RNA
gagaaaguaccugaacaccau

SEQ ID NO: 13138 - RNA, 21 nt, Artificial Sequence
  Guide RNA
gguguucagguacuuucucua

SEQ ID NO: 13139 - RNA, 21 nt, Artificial Sequence
  Guide RNA
gguguucauguacuuucucua

SEQ ID NO: 13140 - RNA, 21 nt, Artificial Sequence
  Guide RNA
guaacagucaugguguucagg

SEQ ID NO: 13141 - RNA, 21 nt, Artificial Sequence
  Guide RNA
guaacagucaugguguucaug

SEQ ID NO: 13142 - RNA, 21 nt, Artificial Sequence
  Guide RNA
guacaugaacaccaugacugu

SEQ ID NO: 13143 - RNA, 21 nt, Artificial Sequence
  Guide RNA
guaccugaacaccaugacugu

SEQ ID NO: 13144 - RNA, 21 nt, Artificial Sequence
  Guide RNA
gucaugguguucagguacuuu

SEQ ID NO: 13145 - RNA, 21 nt, Artificial Sequence
  Guide RNA
gucaugguguucauguacuuu

SEQ ID NO: 13146 - RNA, 21 nt, Artificial Sequence
  Guide RNA
guguucagguacuuucucuau

SEQ ID NO: 13147 - RNA, 21 nt, Artificial Sequence
  Guide RNA
guguucauguacuuucucuau

SEQ ID NO: 13148 - RNA, 21 nt, Artificial Sequence
  Guide RNA
guucagguacuuucucuaugg

SEQ ID NO: 13149 - RNA, 21 nt, Artificial Sequence
  Guide RNA
guucauguacuuucucuaugg

SEQ ID NO: 13150 - RNA, 21 nt, Artificial Sequence
  Guide RNA
guuuuccaaccauagagaaag

SEQ ID NO: 13151 - RNA, 21 nt, Artificial Sequence
  Guide RNA
uaacagucaugguguucaggu

SEQ ID NO: 13152 - RNA, 21 nt, Artificial Sequence
  Guide RNA
uaacagucaugguguucaugu

SEQ ID NO: 13153 - RNA, 21 nt, Artificial Sequence
  Guide RNA
uacaugaacaccaugacuguu

SEQ ID NO: 13154 - RNA, 21 nt, Artificial Sequence
  Guide RNA
uaccugaacaccaugacuguu

SEQ ID NO: 13155 - RNA, 21 nt, Artificial Sequence
  Guide RNA
uagagaaaguacaugaacacc

SEQ ID NO: 13156 - RNA, 21 nt, Artificial Sequence
  Guide RNA
uagagaaaguaccugaacacc

SEQ ID NO: 13157 - RNA, 21 nt, Artificial Sequence
  Guide RNA
ucagguacuuucucuaugguu

SEQ ID NO: 13158 - RNA, 21 nt, Artificial Sequence
  Guide RNA
ucaugguguucagguacuuuc

SEQ ID NO: 13159 - RNA, 21 nt, Artificial Sequence
  Guide RNA
ucaugguguucauguacuuuc

SEQ ID NO: 13160 - RNA, 21 nt, Artificial Sequence
  Guide RNA
ucauguacuuucucuaugguu

SEQ ID NO: 13161 - RNA, 21 nt, Artificial Sequence
  Guide RNA
uccaaccauagagaaaguaca

SEQ ID NO: 13162 - RNA, 21 nt, Artificial Sequence
  Guide RNA
uccaaccauagagaaaguacc

SEQ ID NO: 13163 - RNA, 21 nt, Artificial Sequence
  Guide RNA
ugguguucagguacuuucucu

SEQ ID NO: 13164 - RNA, 21 nt, Artificial Sequence
  Guide RNA
ugguguucauguacuuucucu

SEQ ID NO: 13165 - RNA, 21 nt, Artificial Sequence
  Guide RNA
uguaacagucaugguguucag

SEQ ID NO: 13166 - RNA, 21 nt, Artificial Sequence
  Guide RNA
uguaacagucaugguguucau

SEQ ID NO: 13167 - RNA, 21 nt, Artificial Sequence
  Guide RNA
uguucagguacuuucucuaug

SEQ ID NO: 13168 - RNA, 21 nt, Artificial Sequence
  Guide RNA
uguucauguacuuucucuaug

SEQ ID NO: 13169 - RNA, 21 nt, Artificial Sequence
  Guide RNA
uucagguacuuucucuauggu

SEQ ID NO: 13170 - RNA, 21 nt, Artificial Sequence
  Guide RNA
uucauguacuuucucuauggu

SEQ ID NO: 13171 - RNA, 21 nt, Artificial Sequence
  Guide RNA
uuccaaccauagagaaaguac

SEQ ID NO: 13172 - RNA, 21 nt, Artificial Sequence
  Guide RNA
uuuccaaccauagagaaagua

SEQ ID NO: 13173 - RNA, 21 nt, Artificial Sequence
  Guide RNA
uuuuccaaccauagagaaagu

SEQ ID NO: 13174 - RNA, 22 nt, Artificial Sequence
  Guide RNA
aaaauguaacagucaugguguu

SEQ ID NO: 13175 - RNA, 22 nt, Artificial Sequence
  Guide RNA
aaaguacaugaacaccaugacu

SEQ ID NO: 13176 - RNA, 22 nt, Artificial Sequence
  Guide RNA
aaaguaccugaacaccaugacu

SEQ ID NO: 13177 - RNA, 22 nt, Artificial Sequence
  Guide RNA
aaauguaacagucaugguguuc

SEQ ID NO: 13178 - RNA, 22 nt, Artificial Sequence
  Guide RNA
aacagucaugguguucagguac

SEQ ID NO: 13179 - RNA, 22 nt, Artificial Sequence
  Guide RNA
aacagucaugguguucauguac

SEQ ID NO: 13180 - RNA, 22 nt, Artificial Sequence
  Guide RNA
aaccauagagaaaguacaugaa

SEQ ID NO: 13181 - RNA, 22 nt, Artificial Sequence
  Guide RNA
aaccauagagaaaguaccugaa

SEQ ID NO: 13182 - RNA, 22 nt, Artificial Sequence
  Guide RNA
aaguacaugaacaccaugacug

SEQ ID NO: 13183 - RNA, 22 nt, Artificial Sequence
  Guide RNA
aaguaccugaacaccaugacug

SEQ ID NO: 13184 - RNA, 22 nt, Artificial Sequence
  Guide RNA
aauguaacagucaugguguuca

SEQ ID NO: 13185 - RNA, 22 nt, Artificial Sequence
  Guide RNA
acagucaugguguucagguacu

SEQ ID NO: 13186 - RNA, 22 nt, Artificial Sequence
  Guide RNA
acagucaugguguucauguacu

SEQ ID NO: 13187 - RNA, 22 nt, Artificial Sequence
  Guide RNA
acaugaacaccaugacuguuac

SEQ ID NO: 13188 - RNA, 22 nt, Artificial Sequence
  Guide RNA
accauagagaaaguacaugaac

SEQ ID NO: 13189 - RNA, 22 nt, Artificial Sequence
  Guide RNA
accauagagaaaguaccugaac

SEQ ID NO: 13190 - RNA, 22 nt, Artificial Sequence
  Guide RNA
accugaacaccaugacuguuac

SEQ ID NO: 13191 - RNA, 22 nt, Artificial Sequence
  Guide RNA
agaaaguacaugaacaccauga

SEQ ID NO: 13192 - RNA, 22 nt, Artificial Sequence
  Guide RNA
agaaaguaccugaacaccauga

SEQ ID NO: 13193 - RNA, 22 nt, Artificial Sequence
  Guide RNA
agagaaaguacaugaacaccau

SEQ ID NO: 13194 - RNA, 22 nt, Artificial Sequence
  Guide RNA
agagaaaguaccugaacaccau

SEQ ID NO: 13195 - RNA, 22 nt, Artificial Sequence
  Guide RNA
agguacuuucucuaugguugga

SEQ ID NO: 13196 - RNA, 22 nt, Artificial Sequence
  Guide RNA
aguacaugaacaccaugacugu

SEQ ID NO: 13197 - RNA, 22 nt, Artificial Sequence
  Guide RNA
aguaccugaacaccaugacugu

SEQ ID NO: 13198 - RNA, 22 nt, Artificial Sequence
  Guide RNA
agucaugguguucagguacuuu

SEQ ID NO: 13199 - RNA, 22 nt, Artificial Sequence
  Guide RNA
agucaugguguucauguacuuu

SEQ ID NO: 13200 - RNA, 22 nt, Artificial Sequence
  Guide RNA
aguuuuccaaccauagagaaag

SEQ ID NO: 13201 - RNA, 22 nt, Artificial Sequence
  Guide RNA
auagagaaaguacaugaacacc

SEQ ID NO: 13202 - RNA, 22 nt, Artificial Sequence
  Guide RNA
auagagaaaguaccugaacacc

SEQ ID NO: 13203 - RNA, 22 nt, Artificial Sequence
  Guide RNA
augguguucagguacuuucucu

SEQ ID NO: 13204 - RNA, 22 nt, Artificial Sequence
  Guide RNA
augguguucauguacuuucucu

SEQ ID NO: 13205 - RNA, 22 nt, Artificial Sequence
  Guide RNA
auguaacagucaugguguucag

SEQ ID NO: 13206 - RNA, 22 nt, Artificial Sequence
  Guide RNA
auguaacagucaugguguucau

SEQ ID NO: 13207 - RNA, 22 nt, Artificial Sequence
  Guide RNA
auguacuuucucuaugguugga

SEQ ID NO: 13208 - RNA, 22 nt, Artificial Sequence
  Guide RNA
caaccauagagaaaguacauga

SEQ ID NO: 13209 - RNA, 22 nt, Artificial Sequence
  Guide RNA
caaccauagagaaaguaccuga

SEQ ID NO: 13210 - RNA, 22 nt, Artificial Sequence
  Guide RNA
cagguacuuucucuaugguugg

SEQ ID NO: 13211 - RNA, 22 nt, Artificial Sequence
  Guide RNA
cagucaugguguucagguacuu

SEQ ID NO: 13212 - RNA, 22 nt, Artificial Sequence
  Guide RNA
cagucaugguguucauguacuu

SEQ ID NO: 13213 - RNA, 22 nt, Artificial Sequence
  Guide RNA
cauagagaaaguacaugaacac

SEQ ID NO: 13214 - RNA, 22 nt, Artificial Sequence
  Guide RNA
cauagagaaaguaccugaacac

SEQ ID NO: 13215 - RNA, 22 nt, Artificial Sequence
  Guide RNA
caugaacaccaugacuguuaca

SEQ ID NO: 13216 - RNA, 22 nt, Artificial Sequence
  Guide RNA
caugguguucagguacuuucuc

SEQ ID NO: 13217 - RNA, 22 nt, Artificial Sequence
  Guide RNA
caugguguucauguacuuucuc

SEQ ID NO: 13218 - RNA, 22 nt, Artificial Sequence
  Guide RNA
cauguacuuucucuaugguugg

SEQ ID NO: 13219 - RNA, 22 nt, Artificial Sequence
  Guide RNA
ccaaccauagagaaaguacaug

SEQ ID NO: 13220 - RNA, 22 nt, Artificial Sequence
  Guide RNA
ccaaccauagagaaaguaccug

SEQ ID NO: 13221 - RNA, 22 nt, Artificial Sequence
  Guide RNA
ccauagagaaaguacaugaaca

SEQ ID NO: 13222 - RNA, 22 nt, Artificial Sequence
  Guide RNA
ccauagagaaaguaccugaaca

SEQ ID NO: 13223 - RNA, 22 nt, Artificial Sequence
  Guide RNA
ccugaacaccaugacuguuaca

SEQ ID NO: 13224 - RNA, 22 nt, Artificial Sequence
  Guide RNA
gaaaauguaacagucauggugu

SEQ ID NO: 13225 - RNA, 22 nt, Artificial Sequence
  Guide RNA
gaaaguacaugaacaccaugac

SEQ ID NO: 13226 - RNA, 22 nt, Artificial Sequence
  Guide RNA
gaaaguaccugaacaccaugac

SEQ ID NO: 13227 - RNA, 22 nt, Artificial Sequence
  Guide RNA
gagaaaguacaugaacaccaug

SEQ ID NO: 13228 - RNA, 22 nt, Artificial Sequence
  Guide RNA
gagaaaguaccugaacaccaug

SEQ ID NO: 13229 - RNA, 22 nt, Artificial Sequence
  Guide RNA
gguguucagguacuuucucuau

SEQ ID NO: 13230 - RNA, 22 nt, Artificial Sequence
  Guide RNA
gguguucauguacuuucucuau

SEQ ID NO: 13231 - RNA, 22 nt, Artificial Sequence
  Guide RNA
guaacagucaugguguucaggu

SEQ ID NO: 13232 - RNA, 22 nt, Artificial Sequence
  Guide RNA
guaacagucaugguguucaugu

SEQ ID NO: 13233 - RNA, 22 nt, Artificial Sequence
  Guide RNA
guacaugaacaccaugacuguu

SEQ ID NO: 13234 - RNA, 22 nt, Artificial Sequence
  Guide RNA
guaccugaacaccaugacuguu

SEQ ID NO: 13235 - RNA, 22 nt, Artificial Sequence
  Guide RNA
gucaugguguucagguacuuuc

SEQ ID NO: 13236 - RNA, 22 nt, Artificial Sequence
  Guide RNA
gucaugguguucauguacuuuc

SEQ ID NO: 13237 - RNA, 22 nt, Artificial Sequence
  Guide RNA
guguucagguacuuucucuaug

SEQ ID NO: 13238 - RNA, 22 nt, Artificial Sequence
  Guide RNA
guguucauguacuuucucuaug

SEQ ID NO: 13239 - RNA, 22 nt, Artificial Sequence
  Guide RNA
guucagguacuuucucuauggu

SEQ ID NO: 13240 - RNA, 22 nt, Artificial Sequence
  Guide RNA
guucauguacuuucucuauggu

SEQ ID NO: 13241 - RNA, 22 nt, Artificial Sequence
  Guide RNA
guuuuccaaccauagagaaagu

SEQ ID NO: 13242 - RNA, 22 nt, Artificial Sequence
  Guide RNA
uaacagucaugguguucaggua

SEQ ID NO: 13243 - RNA, 22 nt, Artificial Sequence
  Guide RNA
uaacagucaugguguucaugua

SEQ ID NO: 13244 - RNA, 22 nt, Artificial Sequence
  Guide RNA
uacaugaacaccaugacuguua

SEQ ID NO: 13245 - RNA, 22 nt, Artificial Sequence
  Guide RNA
uaccugaacaccaugacuguua

SEQ ID NO: 13246 - RNA, 22 nt, Artificial Sequence
  Guide RNA
uagagaaaguacaugaacacca

SEQ ID NO: 13247 - RNA, 22 nt, Artificial Sequence
  Guide RNA
uagagaaaguaccugaacacca

SEQ ID NO: 13248 - RNA, 22 nt, Artificial Sequence
  Guide RNA
ucagguacuuucucuaugguug

SEQ ID NO: 13249 - RNA, 22 nt, Artificial Sequence
  Guide RNA
ucaugguguucagguacuuucu

SEQ ID NO: 13250 - RNA, 22 nt, Artificial Sequence
  Guide RNA
ucaugguguucauguacuuucu

SEQ ID NO: 13251 - RNA, 22 nt, Artificial Sequence
  Guide RNA
ucauguacuuucucuaugguug

SEQ ID NO: 13252 - RNA, 22 nt, Artificial Sequence
  Guide RNA
uccaaccauagagaaaguacau

SEQ ID NO: 13253 - RNA, 22 nt, Artificial Sequence
  Guide RNA
uccaaccauagagaaaguaccu

SEQ ID NO: 13254 - RNA, 22 nt, Artificial Sequence
  Guide RNA
ugguguucagguacuuucucua

SEQ ID NO: 13255 - RNA, 22 nt, Artificial Sequence
  Guide RNA
ugguguucauguacuuucucua

SEQ ID NO: 13256 - RNA, 22 nt, Artificial Sequence
  Guide RNA
uguaacagucaugguguucagg

SEQ ID NO: 13257 - RNA, 22 nt, Artificial Sequence
  Guide RNA
uguaacagucaugguguucaug

SEQ ID NO: 13258 - RNA, 22 nt, Artificial Sequence
  Guide RNA
uguucagguacuuucucuaugg

SEQ ID NO: 13259 - RNA, 22 nt, Artificial Sequence
  Guide RNA
uguucauguacuuucucuaugg

SEQ ID NO: 13260 - RNA, 22 nt, Artificial Sequence
  Guide RNA
uucagguacuuucucuaugguu

SEQ ID NO: 13261 - RNA, 22 nt, Artificial Sequence
  Guide RNA
uucauguacuuucucuaugguu

SEQ ID NO: 13262 - RNA, 22 nt, Artificial Sequence
  Guide RNA
uuccaaccauagagaaaguaca

SEQ ID NO: 13263 - RNA, 22 nt, Artificial Sequence
  Guide RNA
uuccaaccauagagaaaguacc

SEQ ID NO: 13264 - RNA, 22 nt, Artificial Sequence
  Guide RNA
uuuccaaccauagagaaaguac

SEQ ID NO: 13265 - RNA, 22 nt, Artificial Sequence
  Guide RNA
uuuuccaaccauagagaaagua

SEQ ID NO: 13266 - RNA, 20 nt, Artificial Sequence
  Guide RNA
agcuuauguuucucuuuucu

SEQ ID NO: 13267 - RNA, 20 nt, Artificial Sequence
  Guide RNA
cucuuuucuuuuucucuuuc

SEQ ID NO: 13268 - RNA, 20 nt, Artificial Sequence
  Guide RNA
gaaagagaaaaagaaaagag

SEQ ID NO: 13269 - RNA, 20 nt, Artificial Sequence
  Guide RNA
gagaaaaagaaaagagaaac

SEQ ID NO: 13270 - RNA, 20 nt, Artificial Sequence
  Guide RNA
gcuuauguuucucuuuucuu

SEQ ID NO: 13271 - RNA, 20 nt, Artificial Sequence
  Guide RNA
guuucucuuuucuuuuucuc

SEQ ID NO: 13272 - RNA, 20 nt, Artificial Sequence
  Guide RNA
uagcuuauguuucucuuuuc

SEQ ID NO: 13273 - RNA, 21 nt, Artificial Sequence
  Guide RNA
cuagcuuauguuucucuuuuc

SEQ ID NO: 13274 - RNA, 22 nt, Artificial Sequence
  Guide RNA
cuagcuuauguuucucuuuucu

SEQ ID NO: 13275 - RNA, 22 nt, Artificial Sequence
  Guide RNA
ucuagcuuauguuucucuuuuc

SEQ ID NO: 13276 - RNA, 20 nt, Artificial Sequence
  Guide RNA
agcggggcugaggcaggagg

SEQ ID NO: 13277 - RNA, 20 nt, Artificial Sequence
  Guide RNA
cgauccuccugccucagccc

SEQ ID NO: 13278 - RNA, 21 nt, Artificial Sequence
  Guide RNA
agcggggcugaggcaggagga

SEQ ID NO: 13279 - RNA, 21 nt, Artificial Sequence
  Guide RNA
cgauccuccugccucagcccc

SEQ ID NO: 13280 - RNA, 21 nt, Artificial Sequence
  Guide RNA
gcgauccuccugccucagccc

SEQ ID NO: 13281 - RNA, 21 nt, Artificial Sequence
  Guide RNA
uagcggggcugaggcaggagg

SEQ ID NO: 13282 - RNA, 22 nt, Artificial Sequence
  Guide RNA
agcgauccuccugccucagccc

SEQ ID NO: 13283 - RNA, 22 nt, Artificial Sequence
  Guide RNA
agcggggcugaggcaggaggau

SEQ ID NO: 13284 - RNA, 22 nt, Artificial Sequence
  Guide RNA
ccgcuaguagcugggauuacag

SEQ ID NO: 13285 - RNA, 22 nt, Artificial Sequence
  Guide RNA
cgauccuccugccucagccccg

SEQ ID NO: 13286 - RNA, 22 nt, Artificial Sequence
  Guide RNA
cgcuaguagcugggauuacagg

SEQ ID NO: 13287 - RNA, 22 nt, Artificial Sequence
  Guide RNA
cuagcggggcugaggcaggagg

SEQ ID NO: 13288 - RNA, 22 nt, Artificial Sequence
  Guide RNA
gcgauccuccugccucagcccc

SEQ ID NO: 13289 - RNA, 22 nt, Artificial Sequence
  Guide RNA
gugccuguaaucccagcuacua

SEQ ID NO: 13290 - RNA, 22 nt, Artificial Sequence
  Guide RNA
uagcggggcugaggcaggagga

SEQ ID NO: 13291 - RNA, 22 nt, Artificial Sequence
  Guide RNA
ugugccuguaaucccagcuacu

SEQ ID NO: 13292 - RNA, 20 nt, Artificial Sequence
  Guide RNA
aaaugugugcuuaauagggc

SEQ ID NO: 13293 - RNA, 20 nt, Artificial Sequence
  Guide RNA
aaaugugugcuuaauagggu

SEQ ID NO: 13294 - RNA, 20 nt, Artificial Sequence
  Guide RNA
aauagggcggaccguggggg

SEQ ID NO: 13295 - RNA, 20 nt, Artificial Sequence
  Guide RNA
aauaggguggaccguggggg

SEQ ID NO: 13296 - RNA, 20 nt, Artificial Sequence
  Guide RNA
aaugugugcuuaauagggcg

SEQ ID NO: 13297 - RNA, 20 nt, Artificial Sequence
  Guide RNA
aaugugugcuuaauagggug

SEQ ID NO: 13298 - RNA, 20 nt, Artificial Sequence
  Guide RNA
acccccacgguccacccuau

SEQ ID NO: 13299 - RNA, 20 nt, Artificial Sequence
  Guide RNA
acccccacgguccgcccuau

SEQ ID NO: 13300 - RNA, 20 nt, Artificial Sequence
  Guide RNA
acgguccacccuauuaagca

SEQ ID NO: 13301 - RNA, 20 nt, Artificial Sequence
  Guide RNA
acgguccgcccuauuaagca

SEQ ID NO: 13302 - RNA, 20 nt, Artificial Sequence
  Guide RNA
agggcggaccguggggguaa

SEQ ID NO: 13303 - RNA, 20 nt, Artificial Sequence
  Guide RNA
aggguggaccguggggguaa

SEQ ID NO: 13304 - RNA, 20 nt, Artificial Sequence
  Guide RNA
auagggcggaccgugggggu

SEQ ID NO: 13305 - RNA, 20 nt, Artificial Sequence
  Guide RNA
auaggguggaccgugggggu

SEQ ID NO: 13306 - RNA, 20 nt, Artificial Sequence
  Guide RNA
augugugcuuaauagggcgg

SEQ ID NO: 13307 - RNA, 20 nt, Artificial Sequence
  Guide RNA
augugugcuuaauagggugg

SEQ ID NO: 13308 - RNA, 20 nt, Artificial Sequence
  Guide RNA
caaaugugugcuuaauaggg

SEQ ID NO: 13309 - RNA, 20 nt, Artificial Sequence
  Guide RNA
cacccuauuaagcacacauu

SEQ ID NO: 13310 - RNA, 20 nt, Artificial Sequence
  Guide RNA
cacgguccacccuauuaagc

SEQ ID NO: 13311 - RNA, 20 nt, Artificial Sequence
  Guide RNA
cacgguccgcccuauuaagc

SEQ ID NO: 13312 - RNA, 20 nt, Artificial Sequence
  Guide RNA
ccacccuauuaagcacacau

SEQ ID NO: 13313 - RNA, 20 nt, Artificial Sequence
  Guide RNA
ccacgguccacccuauuaag

SEQ ID NO: 13314 - RNA, 20 nt, Artificial Sequence
  Guide RNA
ccacgguccgcccuauuaag

SEQ ID NO: 13315 - RNA, 20 nt, Artificial Sequence
  Guide RNA
cccacgguccacccuauuaa

SEQ ID NO: 13316 - RNA, 20 nt, Artificial Sequence
  Guide RNA
cccacgguccgcccuauuaa

SEQ ID NO: 13317 - RNA, 20 nt, Artificial Sequence
  Guide RNA
ccccacgguccacccuauua

SEQ ID NO: 13318 - RNA, 20 nt, Artificial Sequence
  Guide RNA
ccccacgguccgcccuauua

SEQ ID NO: 13319 - RNA, 20 nt, Artificial Sequence
  Guide RNA
cccccacgguccacccuauu

SEQ ID NO: 13320 - RNA, 20 nt, Artificial Sequence
  Guide RNA
cccccacgguccgcccuauu

SEQ ID NO: 13321 - RNA, 20 nt, Artificial Sequence
  Guide RNA
cccucucuuuacccccacgg

SEQ ID NO: 13322 - RNA, 20 nt, Artificial Sequence
  Guide RNA
ccgcccuauuaagcacacau

SEQ ID NO: 13323 - RNA, 20 nt, Artificial Sequence
  Guide RNA
ccucucuuuacccccacggu

SEQ ID NO: 13324 - RNA, 20 nt, Artificial Sequence
  Guide RNA
cgcccuauuaagcacacauu

SEQ ID NO: 13325 - RNA, 20 nt, Artificial Sequence
  Guide RNA
cgguccacccuauuaagcac

SEQ ID NO: 13326 - RNA, 20 nt, Artificial Sequence
  Guide RNA
cgguccgcccuauuaagcac

SEQ ID NO: 13327 - RNA, 20 nt, Artificial Sequence
  Guide RNA
cucucuuuacccccacgguc

SEQ ID NO: 13328 - RNA, 20 nt, Artificial Sequence
  Guide RNA
cucuuuacccccacggucca

SEQ ID NO: 13329 - RNA, 20 nt, Artificial Sequence
  Guide RNA
cucuuuacccccacgguccg

SEQ ID NO: 13330 - RNA, 20 nt, Artificial Sequence
  Guide RNA
cuuaauagggcggaccgugg

SEQ ID NO: 13331 - RNA, 20 nt, Artificial Sequence
  Guide RNA
cuuaauaggguggaccgugg

SEQ ID NO: 13332 - RNA, 20 nt, Artificial Sequence
  Guide RNA
cuuuacccccacgguccacc

SEQ ID NO: 13333 - RNA, 20 nt, Artificial Sequence
  Guide RNA
cuuuacccccacgguccgcc

SEQ ID NO: 13334 - RNA, 20 nt, Artificial Sequence
  Guide RNA
gcggaccguggggguaaaga

SEQ ID NO: 13335 - RNA, 20 nt, Artificial Sequence
  Guide RNA
gcuuaauagggcggaccgug

SEQ ID NO: 13336 - RNA, 20 nt, Artificial Sequence
  Guide RNA
gcuuaauaggguggaccgug

SEQ ID NO: 13337 - RNA, 20 nt, Artificial Sequence
  Guide RNA
ggcggaccguggggguaaag

SEQ ID NO: 13338 - RNA, 20 nt, Artificial Sequence
  Guide RNA
gggcggaccguggggguaaa

SEQ ID NO: 13339 - RNA, 20 nt, Artificial Sequence
  Guide RNA
ggguggaccguggggguaaa

SEQ ID NO: 13340 - RNA, 20 nt, Artificial Sequence
  Guide RNA
gguccacccuauuaagcaca

SEQ ID NO: 13341 - RNA, 20 nt, Artificial Sequence
  Guide RNA
gguccgcccuauuaagcaca

SEQ ID NO: 13342 - RNA, 20 nt, Artificial Sequence
  Guide RNA
gguggaccguggggguaaag

SEQ ID NO: 13343 - RNA, 20 nt, Artificial Sequence
  Guide RNA
guccacccuauuaagcacac

SEQ ID NO: 13344 - RNA, 20 nt, Artificial Sequence
  Guide RNA
guccgcccuauuaagcacac

SEQ ID NO: 13345 - RNA, 20 nt, Artificial Sequence
  Guide RNA
gugcuuaauagggcggaccg

SEQ ID NO: 13346 - RNA, 20 nt, Artificial Sequence
  Guide RNA
gugcuuaauaggguggaccg

SEQ ID NO: 13347 - RNA, 20 nt, Artificial Sequence
  Guide RNA
guggaccguggggguaaaga

SEQ ID NO: 13348 - RNA, 20 nt, Artificial Sequence
  Guide RNA
gugugcuuaauagggcggac

SEQ ID NO: 13349 - RNA, 20 nt, Artificial Sequence
  Guide RNA
gugugcuuaauaggguggac

SEQ ID NO: 13350 - RNA, 20 nt, Artificial Sequence
  Guide RNA
uaauagggcggaccgugggg

SEQ ID NO: 13351 - RNA, 20 nt, Artificial Sequence
  Guide RNA
uaauaggguggaccgugggg

SEQ ID NO: 13352 - RNA, 20 nt, Artificial Sequence
  Guide RNA
uacccccacgguccacccua

SEQ ID NO: 13353 - RNA, 20 nt, Artificial Sequence
  Guide RNA
uacccccacgguccgcccua

SEQ ID NO: 13354 - RNA, 20 nt, Artificial Sequence
  Guide RNA
uagggcggaccgugggggua

SEQ ID NO: 13355 - RNA, 20 nt, Artificial Sequence
  Guide RNA
uaggguggaccgugggggua

SEQ ID NO: 13356 - RNA, 20 nt, Artificial Sequence
  Guide RNA
ucaaaugugugcuuaauagg

SEQ ID NO: 13357 - RNA, 20 nt, Artificial Sequence
  Guide RNA
uccacccuauuaagcacaca

SEQ ID NO: 13358 - RNA, 20 nt, Artificial Sequence
  Guide RNA
uccgcccuauuaagcacaca

SEQ ID NO: 13359 - RNA, 20 nt, Artificial Sequence
  Guide RNA
ucucuuuacccccacggucc

SEQ ID NO: 13360 - RNA, 20 nt, Artificial Sequence
  Guide RNA
ucuuuacccccacgguccac

SEQ ID NO: 13361 - RNA, 20 nt, Artificial Sequence
  Guide RNA
ucuuuacccccacgguccgc

SEQ ID NO: 13362 - RNA, 20 nt, Artificial Sequence
  Guide RNA
ugcuuaauagggcggaccgu

SEQ ID NO: 13363 - RNA, 20 nt, Artificial Sequence
  Guide RNA
ugcuuaauaggguggaccgu

SEQ ID NO: 13364 - RNA, 20 nt, Artificial Sequence
  Guide RNA
ugugcuuaauagggcggacc

SEQ ID NO: 13365 - RNA, 20 nt, Artificial Sequence
  Guide RNA
ugugcuuaauaggguggacc

SEQ ID NO: 13366 - RNA, 20 nt, Artificial Sequence
  Guide RNA
ugugugcuuaauagggcgga

SEQ ID NO: 13367 - RNA, 20 nt, Artificial Sequence
  Guide RNA
ugugugcuuaauagggugga

SEQ ID NO: 13368 - RNA, 20 nt, Artificial Sequence
  Guide RNA
uuaauagggcggaccguggg

SEQ ID NO: 13369 - RNA, 20 nt, Artificial Sequence
  Guide RNA
uuaauaggguggaccguggg

SEQ ID NO: 13370 - RNA, 20 nt, Artificial Sequence
  Guide RNA
uuacccccacgguccacccu

SEQ ID NO: 13371 - RNA, 20 nt, Artificial Sequence
  Guide RNA
uuacccccacgguccgcccu

SEQ ID NO: 13372 - RNA, 20 nt, Artificial Sequence
  Guide RNA
uucaaaugugugcuuaauag

SEQ ID NO: 13373 - RNA, 20 nt, Artificial Sequence
  Guide RNA
uuuacccccacgguccaccc

SEQ ID NO: 13374 - RNA, 20 nt, Artificial Sequence
  Guide RNA
uuuacccccacgguccgccc

SEQ ID NO: 13375 - RNA, 21 nt, Artificial Sequence
  Guide RNA
aaaugugugcuuaauagggcg

SEQ ID NO: 13376 - RNA, 21 nt, Artificial Sequence
  Guide RNA
aaaugugugcuuaauagggug

SEQ ID NO: 13377 - RNA, 21 nt, Artificial Sequence
  Guide RNA
aauagggcggaccgugggggu

SEQ ID NO: 13378 - RNA, 21 nt, Artificial Sequence
  Guide RNA
aauaggguggaccgugggggu

SEQ ID NO: 13379 - RNA, 21 nt, Artificial Sequence
  Guide RNA
aaugugugcuuaauagggcgg

SEQ ID NO: 13380 - RNA, 21 nt, Artificial Sequence
  Guide RNA
aaugugugcuuaauagggugg

SEQ ID NO: 13381 - RNA, 21 nt, Artificial Sequence
  Guide RNA
acccccacgguccacccuauu

SEQ ID NO: 13382 - RNA, 21 nt, Artificial Sequence
  Guide RNA
acccccacgguccgcccuauu

SEQ ID NO: 13383 - RNA, 21 nt, Artificial Sequence
  Guide RNA
acgguccacccuauuaagcac

SEQ ID NO: 13384 - RNA, 21 nt, Artificial Sequence
  Guide RNA
acgguccgcccuauuaagcac

SEQ ID NO: 13385 - RNA, 21 nt, Artificial Sequence
  Guide RNA
agggcggaccguggggguaaa

SEQ ID NO: 13386 - RNA, 21 nt, Artificial Sequence
  Guide RNA
aggguggaccguggggguaaa

SEQ ID NO: 13387 - RNA, 21 nt, Artificial Sequence
  Guide RNA
auagggcggaccgugggggua

SEQ ID NO: 13388 - RNA, 21 nt, Artificial Sequence
  Guide RNA
auaggguggaccgugggggua

SEQ ID NO: 13389 - RNA, 21 nt, Artificial Sequence
  Guide RNA
augugugcuuaauagggcgga

SEQ ID NO: 13390 - RNA, 21 nt, Artificial Sequence
  Guide RNA
augugugcuuaauagggugga

SEQ ID NO: 13391 - RNA, 21 nt, Artificial Sequence
  Guide RNA
caaaugugugcuuaauagggc

SEQ ID NO: 13392 - RNA, 21 nt, Artificial Sequence
  Guide RNA
caaaugugugcuuaauagggu

SEQ ID NO: 13393 - RNA, 21 nt, Artificial Sequence
  Guide RNA
cacccuauuaagcacacauuu

SEQ ID NO: 13394 - RNA, 21 nt, Artificial Sequence
  Guide RNA
cacgguccacccuauuaagca

SEQ ID NO: 13395 - RNA, 21 nt, Artificial Sequence
  Guide RNA
cacgguccgcccuauuaagca

SEQ ID NO: 13396 - RNA, 21 nt, Artificial Sequence
  Guide RNA
ccacccuauuaagcacacauu

SEQ ID NO: 13397 - RNA, 21 nt, Artificial Sequence
  Guide RNA
ccacgguccacccuauuaagc

SEQ ID NO: 13398 - RNA, 21 nt, Artificial Sequence
  Guide RNA
ccacgguccgcccuauuaagc

SEQ ID NO: 13399 - RNA, 21 nt, Artificial Sequence
  Guide RNA
cccacgguccacccuauuaag

SEQ ID NO: 13400 - RNA, 21 nt, Artificial Sequence
  Guide RNA
cccacgguccgcccuauuaag

SEQ ID NO: 13401 - RNA, 21 nt, Artificial Sequence
  Guide RNA
ccccacgguccacccuauuaa

SEQ ID NO: 13402 - RNA, 21 nt, Artificial Sequence
  Guide RNA
ccccacgguccgcccuauuaa

SEQ ID NO: 13403 - RNA, 21 nt, Artificial Sequence
  Guide RNA
cccccacgguccacccuauua

SEQ ID NO: 13404 - RNA, 21 nt, Artificial Sequence
  Guide RNA
cccccacgguccgcccuauua

SEQ ID NO: 13405 - RNA, 21 nt, Artificial Sequence
  Guide RNA
cccucucuuuacccccacggu

SEQ ID NO: 13406 - RNA, 21 nt, Artificial Sequence
  Guide RNA
ccgcccuauuaagcacacauu

SEQ ID NO: 13407 - RNA, 21 nt, Artificial Sequence
  Guide RNA
ccucucuuuacccccacgguc

SEQ ID NO: 13408 - RNA, 21 nt, Artificial Sequence
  Guide RNA
cgcccuauuaagcacacauuu

SEQ ID NO: 13409 - RNA, 21 nt, Artificial Sequence
  Guide RNA
cgguccacccuauuaagcaca

SEQ ID NO: 13410 - RNA, 21 nt, Artificial Sequence
  Guide RNA
cgguccgcccuauuaagcaca

SEQ ID NO: 13411 - RNA, 21 nt, Artificial Sequence
  Guide RNA
cucucuuuacccccacggucc

SEQ ID NO: 13412 - RNA, 21 nt, Artificial Sequence
  Guide RNA
cucuuuacccccacgguccac

SEQ ID NO: 13413 - RNA, 21 nt, Artificial Sequence
  Guide RNA
cucuuuacccccacgguccgc

SEQ ID NO: 13414 - RNA, 21 nt, Artificial Sequence
  Guide RNA
cuuaauagggcggaccguggg

SEQ ID NO: 13415 - RNA, 21 nt, Artificial Sequence
  Guide RNA
cuuaauaggguggaccguggg

SEQ ID NO: 13416 - RNA, 21 nt, Artificial Sequence
  Guide RNA
cuuuacccccacgguccaccc

SEQ ID NO: 13417 - RNA, 21 nt, Artificial Sequence
  Guide RNA
cuuuacccccacgguccgccc

SEQ ID NO: 13418 - RNA, 21 nt, Artificial Sequence
  Guide RNA
gcggaccguggggguaaagag

SEQ ID NO: 13419 - RNA, 21 nt, Artificial Sequence
  Guide RNA
gcuuaauagggcggaccgugg

SEQ ID NO: 13420 - RNA, 21 nt, Artificial Sequence
  Guide RNA
gcuuaauaggguggaccgugg

SEQ ID NO: 13421 - RNA, 21 nt, Artificial Sequence
  Guide RNA
ggcggaccguggggguaaaga

SEQ ID NO: 13422 - RNA, 21 nt, Artificial Sequence
  Guide RNA
gggcggaccguggggguaaag

SEQ ID NO: 13423 - RNA, 21 nt, Artificial Sequence
  Guide RNA
ggguggaccguggggguaaag

SEQ ID NO: 13424 - RNA, 21 nt, Artificial Sequence
  Guide RNA
gguccacccuauuaagcacac

SEQ ID NO: 13425 - RNA, 21 nt, Artificial Sequence
  Guide RNA
gguccgcccuauuaagcacac

SEQ ID NO: 13426 - RNA, 21 nt, Artificial Sequence
  Guide RNA
gguggaccguggggguaaaga

SEQ ID NO: 13427 - RNA, 21 nt, Artificial Sequence
  Guide RNA
guccacccuauuaagcacaca

SEQ ID NO: 13428 - RNA, 21 nt, Artificial Sequence
  Guide RNA
guccgcccuauuaagcacaca

SEQ ID NO: 13429 - RNA, 21 nt, Artificial Sequence
  Guide RNA
gugcuuaauagggcggaccgu

SEQ ID NO: 13430 - RNA, 21 nt, Artificial Sequence
  Guide RNA
gugcuuaauaggguggaccgu

SEQ ID NO: 13431 - RNA, 21 nt, Artificial Sequence
  Guide RNA
guggaccguggggguaaagag

SEQ ID NO: 13432 - RNA, 21 nt, Artificial Sequence
  Guide RNA
gugugcuuaauagggcggacc

SEQ ID NO: 13433 - RNA, 21 nt, Artificial Sequence
  Guide RNA
gugugcuuaauaggguggacc

SEQ ID NO: 13434 - RNA, 21 nt, Artificial Sequence
  Guide RNA
uaauagggcggaccguggggg

SEQ ID NO: 13435 - RNA, 21 nt, Artificial Sequence
  Guide RNA
uaauaggguggaccguggggg

SEQ ID NO: 13436 - RNA, 21 nt, Artificial Sequence
  Guide RNA
uacccccacgguccacccuau

SEQ ID NO: 13437 - RNA, 21 nt, Artificial Sequence
  Guide RNA
uacccccacgguccgcccuau

SEQ ID NO: 13438 - RNA, 21 nt, Artificial Sequence
  Guide RNA
uagggcggaccguggggguaa

SEQ ID NO: 13439 - RNA, 21 nt, Artificial Sequence
  Guide RNA
uaggguggaccguggggguaa

SEQ ID NO: 13440 - RNA, 21 nt, Artificial Sequence
  Guide RNA
ucaaaugugugcuuaauaggg

SEQ ID NO: 13441 - RNA, 21 nt, Artificial Sequence
  Guide RNA
uccacccuauuaagcacacau

SEQ ID NO: 13442 - RNA, 21 nt, Artificial Sequence
  Guide RNA
ucccucucuuuacccccacgg

SEQ ID NO: 13443 - RNA, 21 nt, Artificial Sequence
  Guide RNA
uccgcccuauuaagcacacau

SEQ ID NO: 13444 - RNA, 21 nt, Artificial Sequence
  Guide RNA
ucucuuuacccccacggucca

SEQ ID NO: 13445 - RNA, 21 nt, Artificial Sequence
  Guide RNA
ucucuuuacccccacgguccg

SEQ ID NO: 13446 - RNA, 21 nt, Artificial Sequence
  Guide RNA
ucuuuacccccacgguccacc

SEQ ID NO: 13447 - RNA, 21 nt, Artificial Sequence
  Guide RNA
ucuuuacccccacgguccgcc

SEQ ID NO: 13448 - RNA, 21 nt, Artificial Sequence
  Guide RNA
ugcuuaauagggcggaccgug

SEQ ID NO: 13449 - RNA, 21 nt, Artificial Sequence
  Guide RNA
ugcuuaauaggguggaccgug

SEQ ID NO: 13450 - RNA, 21 nt, Artificial Sequence
  Guide RNA
ugugcuuaauagggcggaccg

SEQ ID NO: 13451 - RNA, 21 nt, Artificial Sequence
  Guide RNA
ugugcuuaauaggguggaccg

SEQ ID NO: 13452 - RNA, 21 nt, Artificial Sequence
  Guide RNA
ugugugcuuaauagggcggac

SEQ ID NO: 13453 - RNA, 21 nt, Artificial Sequence
  Guide RNA
ugugugcuuaauaggguggac

SEQ ID NO: 13454 - RNA, 21 nt, Artificial Sequence
  Guide RNA
uuaauagggcggaccgugggg

SEQ ID NO: 13455 - RNA, 21 nt, Artificial Sequence
  Guide RNA
uuaauaggguggaccgugggg

SEQ ID NO: 13456 - RNA, 21 nt, Artificial Sequence
  Guide RNA
uuacccccacgguccacccua

SEQ ID NO: 13457 - RNA, 21 nt, Artificial Sequence
  Guide RNA
uuacccccacgguccgcccua

SEQ ID NO: 13458 - RNA, 21 nt, Artificial Sequence
  Guide RNA
uucaaaugugugcuuaauagg

SEQ ID NO: 13459 - RNA, 21 nt, Artificial Sequence
  Guide RNA
uuuacccccacgguccacccu

SEQ ID NO: 13460 - RNA, 21 nt, Artificial Sequence
  Guide RNA
uuuacccccacgguccgcccu

SEQ ID NO: 13461 - RNA, 22 nt, Artificial Sequence
  Guide RNA
aaaugugugcuuaauagggcgg

SEQ ID NO: 13462 - RNA, 22 nt, Artificial Sequence
  Guide RNA
aaaugugugcuuaauagggugg

SEQ ID NO: 13463 - RNA, 22 nt, Artificial Sequence
  Guide RNA
aauagggcggaccgugggggua

SEQ ID NO: 13464 - RNA, 22 nt, Artificial Sequence
  Guide RNA
aauaggguggaccgugggggua

SEQ ID NO: 13465 - RNA, 22 nt, Artificial Sequence
  Guide RNA
aaugugugcuuaauagggcgga

SEQ ID NO: 13466 - RNA, 22 nt, Artificial Sequence
  Guide RNA
aaugugugcuuaauagggugga

SEQ ID NO: 13467 - RNA, 22 nt, Artificial Sequence
  Guide RNA
acccccacgguccacccuauua

SEQ ID NO: 13468 - RNA, 22 nt, Artificial Sequence
  Guide RNA
acccccacgguccgcccuauua

SEQ ID NO: 13469 - RNA, 22 nt, Artificial Sequence
  Guide RNA
acgguccacccuauuaagcaca

SEQ ID NO: 13470 - RNA, 22 nt, Artificial Sequence
  Guide RNA
acgguccgcccuauuaagcaca

SEQ ID NO: 13471 - RNA, 22 nt, Artificial Sequence
  Guide RNA
agggcggaccguggggguaaag

SEQ ID NO: 13472 - RNA, 22 nt, Artificial Sequence
  Guide RNA
aggguggaccguggggguaaag

SEQ ID NO: 13473 - RNA, 22 nt, Artificial Sequence
  Guide RNA
auagggcggaccguggggguaa

SEQ ID NO: 13474 - RNA, 22 nt, Artificial Sequence
  Guide RNA
auaggguggaccguggggguaa

SEQ ID NO: 13475 - RNA, 22 nt, Artificial Sequence
  Guide RNA
augugugcuuaauagggcggac

SEQ ID NO: 13476 - RNA, 22 nt, Artificial Sequence
  Guide RNA
augugugcuuaauaggguggac

SEQ ID NO: 13477 - RNA, 22 nt, Artificial Sequence
  Guide RNA
caaaugugugcuuaauagggcg

SEQ ID NO: 13478 - RNA, 22 nt, Artificial Sequence
  Guide RNA
caaaugugugcuuaauagggug

SEQ ID NO: 13479 - RNA, 22 nt, Artificial Sequence
  Guide RNA
cacccuauuaagcacacauuug

SEQ ID NO: 13480 - RNA, 22 nt, Artificial Sequence
  Guide RNA
cacgguccacccuauuaagcac

SEQ ID NO: 13481 - RNA, 22 nt, Artificial Sequence
  Guide RNA
cacgguccgcccuauuaagcac

SEQ ID NO: 13482 - RNA, 22 nt, Artificial Sequence
  Guide RNA
ccacccuauuaagcacacauuu

SEQ ID NO: 13483 - RNA, 22 nt, Artificial Sequence
  Guide RNA
ccacgguccacccuauuaagca

SEQ ID NO: 13484 - RNA, 22 nt, Artificial Sequence
  Guide RNA
ccacgguccgcccuauuaagca

SEQ ID NO: 13485 - RNA, 22 nt, Artificial Sequence
  Guide RNA
cccacgguccacccuauuaagc

SEQ ID NO: 13486 - RNA, 22 nt, Artificial Sequence
  Guide RNA
cccacgguccgcccuauuaagc

SEQ ID NO: 13487 - RNA, 22 nt, Artificial Sequence
  Guide RNA
ccccacgguccacccuauuaag

SEQ ID NO: 13488 - RNA, 22 nt, Artificial Sequence
  Guide RNA
ccccacgguccgcccuauuaag

SEQ ID NO: 13489 - RNA, 22 nt, Artificial Sequence
  Guide RNA
cccccacgguccacccuauuaa

SEQ ID NO: 13490 - RNA, 22 nt, Artificial Sequence
  Guide RNA
cccccacgguccgcccuauuaa

SEQ ID NO: 13491 - RNA, 22 nt, Artificial Sequence
  Guide RNA
cccucucuuuacccccacgguc

SEQ ID NO: 13492 - RNA, 22 nt, Artificial Sequence
  Guide RNA
ccgcccuauuaagcacacauuu

SEQ ID NO: 13493 - RNA, 22 nt, Artificial Sequence
  Guide RNA
ccucucuuuacccccacggucc

SEQ ID NO: 13494 - RNA, 22 nt, Artificial Sequence
  Guide RNA
cgcccuauuaagcacacauuug

SEQ ID NO: 13495 - RNA, 22 nt, Artificial Sequence
  Guide RNA
cgguccacccuauuaagcacac

SEQ ID NO: 13496 - RNA, 22 nt, Artificial Sequence
  Guide RNA
cgguccgcccuauuaagcacac

SEQ ID NO: 13497 - RNA, 22 nt, Artificial Sequence
  Guide RNA
cucccucucuuuacccccacgg

SEQ ID NO: 13498 - RNA, 22 nt, Artificial Sequence
  Guide RNA
cucucuuuacccccacggucca

SEQ ID NO: 13499 - RNA, 22 nt, Artificial Sequence
  Guide RNA
cucucuuuacccccacgguccg

SEQ ID NO: 13500 - RNA, 22 nt, Artificial Sequence
  Guide RNA
cucuuuacccccacgguccacc

SEQ ID NO: 13501 - RNA, 22 nt, Artificial Sequence
  Guide RNA
cucuuuacccccacgguccgcc

SEQ ID NO: 13502 - RNA, 22 nt, Artificial Sequence
  Guide RNA
cuuaauagggcggaccgugggg

SEQ ID NO: 13503 - RNA, 22 nt, Artificial Sequence
  Guide RNA
cuuaauaggguggaccgugggg

SEQ ID NO: 13504 - RNA, 22 nt, Artificial Sequence
  Guide RNA
cuuuacccccacgguccacccu

SEQ ID NO: 13505 - RNA, 22 nt, Artificial Sequence
  Guide RNA
cuuuacccccacgguccgcccu

SEQ ID NO: 13506 - RNA, 22 nt, Artificial Sequence
  Guide RNA
gcggaccguggggguaaagaga

SEQ ID NO: 13507 - RNA, 22 nt, Artificial Sequence
  Guide RNA
gcuuaauagggcggaccguggg

SEQ ID NO: 13508 - RNA, 22 nt, Artificial Sequence
  Guide RNA
gcuuaauaggguggaccguggg

SEQ ID NO: 13509 - RNA, 22 nt, Artificial Sequence
  Guide RNA
ggcggaccguggggguaaagag

SEQ ID NO: 13510 - RNA, 22 nt, Artificial Sequence
  Guide RNA
gggcggaccguggggguaaaga

SEQ ID NO: 13511 - RNA, 22 nt, Artificial Sequence
  Guide RNA
ggguggaccguggggguaaaga

SEQ ID NO: 13512 - RNA, 22 nt, Artificial Sequence
  Guide RNA
gguccacccuauuaagcacaca

SEQ ID NO: 13513 - RNA, 22 nt, Artificial Sequence
  Guide RNA
gguccgcccuauuaagcacaca

SEQ ID NO: 13514 - RNA, 22 nt, Artificial Sequence
  Guide RNA
gguggaccguggggguaaagag

SEQ ID NO: 13515 - RNA, 22 nt, Artificial Sequence
  Guide RNA
guccacccuauuaagcacacau

SEQ ID NO: 13516 - RNA, 22 nt, Artificial Sequence
  Guide RNA
guccgcccuauuaagcacacau

SEQ ID NO: 13517 - RNA, 22 nt, Artificial Sequence
  Guide RNA
gugcuuaauagggcggaccgug

SEQ ID NO: 13518 - RNA, 22 nt, Artificial Sequence
  Guide RNA
gugcuuaauaggguggaccgug

SEQ ID NO: 13519 - RNA, 22 nt, Artificial Sequence
  Guide RNA
guggaccguggggguaaagaga

SEQ ID NO: 13520 - RNA, 22 nt, Artificial Sequence
  Guide RNA
gugugcuuaauagggcggaccg

SEQ ID NO: 13521 - RNA, 22 nt, Artificial Sequence
  Guide RNA
gugugcuuaauaggguggaccg

SEQ ID NO: 13522 - RNA, 22 nt, Artificial Sequence
  Guide RNA
guuucaaaugugugcuuaauag

SEQ ID NO: 13523 - RNA, 22 nt, Artificial Sequence
  Guide RNA
uaauagggcggaccgugggggu

SEQ ID NO: 13524 - RNA, 22 nt, Artificial Sequence
  Guide RNA
uaauaggguggaccgugggggu

SEQ ID NO: 13525 - RNA, 22 nt, Artificial Sequence
  Guide RNA
uacccccacgguccacccuauu

SEQ ID NO: 13526 - RNA, 22 nt, Artificial Sequence
  Guide RNA
uacccccacgguccgcccuauu

SEQ ID NO: 13527 - RNA, 22 nt, Artificial Sequence
  Guide RNA
uagggcggaccguggggguaaa

SEQ ID NO: 13528 - RNA, 22 nt, Artificial Sequence
  Guide RNA
uaggguggaccguggggguaaa

SEQ ID NO: 13529 - RNA, 22 nt, Artificial Sequence
  Guide RNA
ucaaaugugugcuuaauagggc

SEQ ID NO: 13530 - RNA, 22 nt, Artificial Sequence
  Guide RNA
ucaaaugugugcuuaauagggu

SEQ ID NO: 13531 - RNA, 22 nt, Artificial Sequence
  Guide RNA
uccacccuauuaagcacacauu

SEQ ID NO: 13532 - RNA, 22 nt, Artificial Sequence
  Guide RNA
ucccucucuuuacccccacggu

SEQ ID NO: 13533 - RNA, 22 nt, Artificial Sequence
  Guide RNA
uccgcccuauuaagcacacauu

SEQ ID NO: 13534 - RNA, 22 nt, Artificial Sequence
  Guide RNA
ucucuuuacccccacgguccac

SEQ ID NO: 13535 - RNA, 22 nt, Artificial Sequence
  Guide RNA
ucucuuuacccccacgguccgc

SEQ ID NO: 13536 - RNA, 22 nt, Artificial Sequence
  Guide RNA
ucuuuacccccacgguccaccc

SEQ ID NO: 13537 - RNA, 22 nt, Artificial Sequence
  Guide RNA
ucuuuacccccacgguccgccc

SEQ ID NO: 13538 - RNA, 22 nt, Artificial Sequence
  Guide RNA
ugcuuaauagggcggaccgugg

SEQ ID NO: 13539 - RNA, 22 nt, Artificial Sequence
  Guide RNA
ugcuuaauaggguggaccgugg

SEQ ID NO: 13540 - RNA, 22 nt, Artificial Sequence
  Guide RNA
ugugcuuaauagggcggaccgu

SEQ ID NO: 13541 - RNA, 22 nt, Artificial Sequence
  Guide RNA
ugugcuuaauaggguggaccgu

SEQ ID NO: 13542 - RNA, 22 nt, Artificial Sequence
  Guide RNA
ugugugcuuaauagggcggacc

SEQ ID NO: 13543 - RNA, 22 nt, Artificial Sequence
  Guide RNA
ugugugcuuaauaggguggacc

SEQ ID NO: 13544 - RNA, 22 nt, Artificial Sequence
  Guide RNA
uuaauagggcggaccguggggg

SEQ ID NO: 13545 - RNA, 22 nt, Artificial Sequence
  Guide RNA
uuaauaggguggaccguggggg

SEQ ID NO: 13546 - RNA, 22 nt, Artificial Sequence
  Guide RNA
uuacccccacgguccacccuau

SEQ ID NO: 13547 - RNA, 22 nt, Artificial Sequence
  Guide RNA
uuacccccacgguccgcccuau

SEQ ID NO: 13548 - RNA, 22 nt, Artificial Sequence
  Guide RNA
uucaaaugugugcuuaauaggg

SEQ ID NO: 13549 - RNA, 22 nt, Artificial Sequence
  Guide RNA
uuuacccccacgguccacccua

SEQ ID NO: 13550 - RNA, 22 nt, Artificial Sequence
  Guide RNA
uuuacccccacgguccgcccua

SEQ ID NO: 13551 - RNA, 22 nt, Artificial Sequence
  Guide RNA
uuucaaaugugugcuuaauagg

SEQ ID NO: 13552 - RNA, 20 nt, Artificial Sequence
  Guide RNA
aaaaucaccugaaauggaac

SEQ ID NO: 13553 - RNA, 20 nt, Artificial Sequence
  Guide RNA
aaaaucaccugaaauggaau

SEQ ID NO: 13554 - RNA, 20 nt, Artificial Sequence
  Guide RNA
aaaucaccugaaauggaacg

SEQ ID NO: 13555 - RNA, 20 nt, Artificial Sequence
  Guide RNA
aaaucaccugaaauggaaug

SEQ ID NO: 13556 - RNA, 20 nt, Artificial Sequence
  Guide RNA
aaauggaacggaauggcuac

SEQ ID NO: 13557 - RNA, 20 nt, Artificial Sequence
  Guide RNA
aaauggaauggaauggcuac

SEQ ID NO: 13558 - RNA, 20 nt, Artificial Sequence
  Guide RNA
aacggaauggcuacagcgag

SEQ ID NO: 13559 - RNA, 20 nt, Artificial Sequence
  Guide RNA
aauaaaaucaccugaaaugg

SEQ ID NO: 13560 - RNA, 20 nt, Artificial Sequence
  Guide RNA
aaucaccugaaauggaacgg

SEQ ID NO: 13561 - RNA, 20 nt, Artificial Sequence
  Guide RNA
aaucaccugaaauggaaugg

SEQ ID NO: 13562 - RNA, 20 nt, Artificial Sequence
  Guide RNA
aauggaacggaauggcuaca

SEQ ID NO: 13563 - RNA, 20 nt, Artificial Sequence
  Guide RNA
aauggaauggaauggcuaca

SEQ ID NO: 13564 - RNA, 20 nt, Artificial Sequence
  Guide RNA
aauggaauggcuacagcgag

SEQ ID NO: 13565 - RNA, 20 nt, Artificial Sequence
  Guide RNA
acacucgcuguagccauucc

SEQ ID NO: 13566 - RNA, 20 nt, Artificial Sequence
  Guide RNA
accugaaauggaacggaaug

SEQ ID NO: 13567 - RNA, 20 nt, Artificial Sequence
  Guide RNA
accugaaauggaauggaaug

SEQ ID NO: 13568 - RNA, 20 nt, Artificial Sequence
  Guide RNA
acggaauggcuacagcgagu

SEQ ID NO: 13569 - RNA, 20 nt, Artificial Sequence
  Guide RNA
acucgcuguagccauuccau

SEQ ID NO: 13570 - RNA, 20 nt, Artificial Sequence
  Guide RNA
acucgcuguagccauuccgu

SEQ ID NO: 13571 - RNA, 20 nt, Artificial Sequence
  Guide RNA
agccauuccauuccauuuca

SEQ ID NO: 13572 - RNA, 20 nt, Artificial Sequence
  Guide RNA
agccauuccguuccauuuca

SEQ ID NO: 13573 - RNA, 20 nt, Artificial Sequence
  Guide RNA
auaaaaucaccugaaaugga

SEQ ID NO: 13574 - RNA, 20 nt, Artificial Sequence
  Guide RNA
aucaccugaaauggaacgga

SEQ ID NO: 13575 - RNA, 20 nt, Artificial Sequence
  Guide RNA
aucaccugaaauggaaugga

SEQ ID NO: 13576 - RNA, 20 nt, Artificial Sequence
  Guide RNA
auggaacggaauggcuacag

SEQ ID NO: 13577 - RNA, 20 nt, Artificial Sequence
  Guide RNA
auggaauggaauggcuacag

SEQ ID NO: 13578 - RNA, 20 nt, Artificial Sequence
  Guide RNA
auggaauggcuacagcgagu

SEQ ID NO: 13579 - RNA, 20 nt, Artificial Sequence
  Guide RNA
auuccauuccauuucaggug

SEQ ID NO: 13580 - RNA, 20 nt, Artificial Sequence
  Guide RNA
auuccguuccauuucaggug

SEQ ID NO: 13581 - RNA, 20 nt, Artificial Sequence
  Guide RNA
caccugaaauggaacggaau

SEQ ID NO: 13582 - RNA, 20 nt, Artificial Sequence
  Guide RNA
caccugaaauggaauggaau

SEQ ID NO: 13583 - RNA, 20 nt, Artificial Sequence
  Guide RNA
cacucgcuguagccauucca

SEQ ID NO: 13584 - RNA, 20 nt, Artificial Sequence
  Guide RNA
cacucgcuguagccauuccg

SEQ ID NO: 13585 - RNA, 20 nt, Artificial Sequence
  Guide RNA
cauuccauuccauuucaggu

SEQ ID NO: 13586 - RNA, 20 nt, Artificial Sequence
  Guide RNA
cauuccauuucaggugauuu

SEQ ID NO: 13587 - RNA, 20 nt, Artificial Sequence
  Guide RNA
cauuccguuccauuucaggu

SEQ ID NO: 13588 - RNA, 20 nt, Artificial Sequence
  Guide RNA
ccauuccauuccauuucagg

SEQ ID NO: 13589 - RNA, 20 nt, Artificial Sequence
  Guide RNA
ccauuccauuucaggugauu

SEQ ID NO: 13590 - RNA, 20 nt, Artificial Sequence
  Guide RNA
ccauuccguuccauuucagg

SEQ ID NO: 13591 - RNA, 20 nt, Artificial Sequence
  Guide RNA
ccguuccauuucaggugauu

SEQ ID NO: 13592 - RNA, 20 nt, Artificial Sequence
  Guide RNA
ccugaaauggaacggaaugg

SEQ ID NO: 13593 - RNA, 20 nt, Artificial Sequence
  Guide RNA
ccugaaauggaauggaaugg

SEQ ID NO: 13594 - RNA, 20 nt, Artificial Sequence
  Guide RNA
cgcuguagccauuccauucc

SEQ ID NO: 13595 - RNA, 20 nt, Artificial Sequence
  Guide RNA
cgcuguagccauuccguucc

SEQ ID NO: 13596 - RNA, 20 nt, Artificial Sequence
  Guide RNA
cguuccauuucaggugauuu

SEQ ID NO: 13597 - RNA, 20 nt, Artificial Sequence
  Guide RNA
cucgcuguagccauuccauu

SEQ ID NO: 13598 - RNA, 20 nt, Artificial Sequence
  Guide RNA
cucgcuguagccauuccguu

SEQ ID NO: 13599 - RNA, 20 nt, Artificial Sequence
  Guide RNA
cugaaauggaacggaauggc

SEQ ID NO: 13600 - RNA, 20 nt, Artificial Sequence
  Guide RNA
cugaaauggaauggaauggc

SEQ ID NO: 13601 - RNA, 20 nt, Artificial Sequence
  Guide RNA
cuguagccauuccauuccau

SEQ ID NO: 13602 - RNA, 20 nt, Artificial Sequence
  Guide RNA
cuguagccauuccguuccau

SEQ ID NO: 13603 - RNA, 20 nt, Artificial Sequence
  Guide RNA
gaaauggaacggaauggcua

SEQ ID NO: 13604 - RNA, 20 nt, Artificial Sequence
  Guide RNA
gaaauggaauggaauggcua

SEQ ID NO: 13605 - RNA, 20 nt, Artificial Sequence
  Guide RNA
gaacggaauggcuacagcga

SEQ ID NO: 13606 - RNA, 20 nt, Artificial Sequence
  Guide RNA
gaauaaaaucaccugaaaug

SEQ ID NO: 13607 - RNA, 20 nt, Artificial Sequence
  Guide RNA
gaauggaauggcuacagcga

SEQ ID NO: 13608 - RNA, 20 nt, Artificial Sequence
  Guide RNA
gacacucgcuguagccauuc

SEQ ID NO: 13609 - RNA, 20 nt, Artificial Sequence
  Guide RNA
gccauuccauuccauuucag

SEQ ID NO: 13610 - RNA, 20 nt, Artificial Sequence
  Guide RNA
gccauuccguuccauuucag

SEQ ID NO: 13611 - RNA, 20 nt, Artificial Sequence
  Guide RNA
gcuguagccauuccauucca

SEQ ID NO: 13612 - RNA, 20 nt, Artificial Sequence
  Guide RNA
gcuguagccauuccguucca

SEQ ID NO: 13613 - RNA, 20 nt, Artificial Sequence
  Guide RNA
ggaacggaauggcuacagcg

SEQ ID NO: 13614 - RNA, 20 nt, Artificial Sequence
  Guide RNA
ggaauggaauggcuacagcg

SEQ ID NO: 13615 - RNA, 20 nt, Artificial Sequence
  Guide RNA
ggacacucgcuguagccauu

SEQ ID NO: 13616 - RNA, 20 nt, Artificial Sequence
  Guide RNA
guagccauuccauuccauuu

SEQ ID NO: 13617 - RNA, 20 nt, Artificial Sequence
  Guide RNA
guagccauuccguuccauuu

SEQ ID NO: 13618 - RNA, 20 nt, Artificial Sequence
  Guide RNA
uaaaaucaccugaaauggaa

SEQ ID NO: 13619 - RNA, 20 nt, Artificial Sequence
  Guide RNA
uagccauuccauuccauuuc

SEQ ID NO: 13620 - RNA, 20 nt, Artificial Sequence
  Guide RNA
uagccauuccguuccauuuc

SEQ ID NO: 13621 - RNA, 20 nt, Artificial Sequence
  Guide RNA
ucaccugaaauggaacggaa

SEQ ID NO: 13622 - RNA, 20 nt, Artificial Sequence
  Guide RNA
ucaccugaaauggaauggaa

SEQ ID NO: 13623 - RNA, 20 nt, Artificial Sequence
  Guide RNA
uccauuccauuucaggugau

SEQ ID NO: 13624 - RNA, 20 nt, Artificial Sequence
  Guide RNA
uccguuccauuucaggugau

SEQ ID NO: 13625 - RNA, 20 nt, Artificial Sequence
  Guide RNA
ucgcuguagccauuccauuc

SEQ ID NO: 13626 - RNA, 20 nt, Artificial Sequence
  Guide RNA
ucgcuguagccauuccguuc

SEQ ID NO: 13627 - RNA, 20 nt, Artificial Sequence
  Guide RNA
ugaaauggaacggaauggcu

SEQ ID NO: 13628 - RNA, 20 nt, Artificial Sequence
  Guide RNA
ugaaauggaauggaauggcu

SEQ ID NO: 13629 - RNA, 20 nt, Artificial Sequence
  Guide RNA
uggaacggaauggcuacagc

SEQ ID NO: 13630 - RNA, 20 nt, Artificial Sequence
  Guide RNA
uggaauggaauggcuacagc

SEQ ID NO: 13631 - RNA, 20 nt, Artificial Sequence
  Guide RNA
uggacacucgcuguagccau

SEQ ID NO: 13632 - RNA, 20 nt, Artificial Sequence
  Guide RNA
uguagccauuccauuccauu

SEQ ID NO: 13633 - RNA, 20 nt, Artificial Sequence
  Guide RNA
uguagccauuccguuccauu

SEQ ID NO: 13634 - RNA, 20 nt, Artificial Sequence
  Guide RNA
uuccauuccauuucagguga

SEQ ID NO: 13635 - RNA, 20 nt, Artificial Sequence
  Guide RNA
uuccguuccauuucagguga

SEQ ID NO: 13636 - RNA, 21 nt, Artificial Sequence
  Guide RNA
aaaaucaccugaaauggaacg

SEQ ID NO: 13637 - RNA, 21 nt, Artificial Sequence
  Guide RNA
aaaaucaccugaaauggaaug

SEQ ID NO: 13638 - RNA, 21 nt, Artificial Sequence
  Guide RNA
aaaucaccugaaauggaacgg

SEQ ID NO: 13639 - RNA, 21 nt, Artificial Sequence
  Guide RNA
aaaucaccugaaauggaaugg

SEQ ID NO: 13640 - RNA, 21 nt, Artificial Sequence
  Guide RNA
aaauggaacggaauggcuaca

SEQ ID NO: 13641 - RNA, 21 nt, Artificial Sequence
  Guide RNA
aaauggaauggaauggcuaca

SEQ ID NO: 13642 - RNA, 21 nt, Artificial Sequence
  Guide RNA
aacggaauggcuacagcgagu

SEQ ID NO: 13643 - RNA, 21 nt, Artificial Sequence
  Guide RNA
aaucaccugaaauggaacgga

SEQ ID NO: 13644 - RNA, 21 nt, Artificial Sequence
  Guide RNA
aaucaccugaaauggaaugga

SEQ ID NO: 13645 - RNA, 21 nt, Artificial Sequence
  Guide RNA
aauggaacggaauggcuacag

SEQ ID NO: 13646 - RNA, 21 nt, Artificial Sequence
  Guide RNA
aauggaauggaauggcuacag

SEQ ID NO: 13647 - RNA, 21 nt, Artificial Sequence
  Guide RNA
aauggaauggcuacagcgagu

SEQ ID NO: 13648 - RNA, 21 nt, Artificial Sequence
  Guide RNA
acacucgcuguagccauucca

SEQ ID NO: 13649 - RNA, 21 nt, Artificial Sequence
  Guide RNA
acacucgcuguagccauuccg

SEQ ID NO: 13650 - RNA, 21 nt, Artificial Sequence
  Guide RNA
accugaaauggaacggaaugg

SEQ ID NO: 13651 - RNA, 21 nt, Artificial Sequence
  Guide RNA
accugaaauggaauggaaugg

SEQ ID NO: 13652 - RNA, 21 nt, Artificial Sequence
  Guide RNA
acggaauggcuacagcgagug

SEQ ID NO: 13653 - RNA, 21 nt, Artificial Sequence
  Guide RNA
acucgcuguagccauuccauu

SEQ ID NO: 13654 - RNA, 21 nt, Artificial Sequence
  Guide RNA
acucgcuguagccauuccguu

SEQ ID NO: 13655 - RNA, 21 nt, Artificial Sequence
  Guide RNA
agccauuccauuccauuucag

SEQ ID NO: 13656 - RNA, 21 nt, Artificial Sequence
  Guide RNA
agccauuccguuccauuucag

SEQ ID NO: 13657 - RNA, 21 nt, Artificial Sequence
  Guide RNA
aucaccugaaauggaacggaa

SEQ ID NO: 13658 - RNA, 21 nt, Artificial Sequence
  Guide RNA
aucaccugaaauggaauggaa

SEQ ID NO: 13659 - RNA, 21 nt, Artificial Sequence
  Guide RNA
auggaacggaauggcuacagc

SEQ ID NO: 13660 - RNA, 21 nt, Artificial Sequence
  Guide RNA
auggaauggaauggcuacagc

SEQ ID NO: 13661 - RNA, 21 nt, Artificial Sequence
  Guide RNA
auggaauggcuacagcgagug

SEQ ID NO: 13662 - RNA, 21 nt, Artificial Sequence
  Guide RNA
auuccauuccauuucagguga

SEQ ID NO: 13663 - RNA, 21 nt, Artificial Sequence
  Guide RNA
auuccguuccauuucagguga

SEQ ID NO: 13664 - RNA, 21 nt, Artificial Sequence
  Guide RNA
caccugaaauggaacggaaug

SEQ ID NO: 13665 - RNA, 21 nt, Artificial Sequence
  Guide RNA
caccugaaauggaauggaaug

SEQ ID NO: 13666 - RNA, 21 nt, Artificial Sequence
  Guide RNA
cacucgcuguagccauuccau

SEQ ID NO: 13667 - RNA, 21 nt, Artificial Sequence
  Guide RNA
cacucgcuguagccauuccgu

SEQ ID NO: 13668 - RNA, 21 nt, Artificial Sequence
  Guide RNA
cauuccauuccauuucaggug

SEQ ID NO: 13669 - RNA, 21 nt, Artificial Sequence
  Guide RNA
cauuccauuucaggugauuuu

SEQ ID NO: 13670 - RNA, 21 nt, Artificial Sequence
  Guide RNA
cauuccguuccauuucaggug

SEQ ID NO: 13671 - RNA, 21 nt, Artificial Sequence
  Guide RNA
ccauuccauuccauuucaggu

SEQ ID NO: 13672 - RNA, 21 nt, Artificial Sequence
  Guide RNA
ccauuccauuucaggugauuu

SEQ ID NO: 13673 - RNA, 21 nt, Artificial Sequence
  Guide RNA
ccauuccguuccauuucaggu

SEQ ID NO: 13674 - RNA, 21 nt, Artificial Sequence
  Guide RNA
ccguuccauuucaggugauuu

SEQ ID NO: 13675 - RNA, 21 nt, Artificial Sequence
  Guide RNA
ccugaaauggaacggaauggc

SEQ ID NO: 13676 - RNA, 21 nt, Artificial Sequence
  Guide RNA
ccugaaauggaauggaauggc

SEQ ID NO: 13677 - RNA, 21 nt, Artificial Sequence
  Guide RNA
cgcuguagccauuccauucca

SEQ ID NO: 13678 - RNA, 21 nt, Artificial Sequence
  Guide RNA
cgcuguagccauuccguucca

SEQ ID NO: 13679 - RNA, 21 nt, Artificial Sequence
  Guide RNA
cguuccauuucaggugauuuu

SEQ ID NO: 13680 - RNA, 21 nt, Artificial Sequence
  Guide RNA
cucgcuguagccauuccauuc

SEQ ID NO: 13681 - RNA, 21 nt, Artificial Sequence
  Guide RNA
cucgcuguagccauuccguuc

SEQ ID NO: 13682 - RNA, 21 nt, Artificial Sequence
  Guide RNA
cugaaauggaacggaauggcu

SEQ ID NO: 13683 - RNA, 21 nt, Artificial Sequence
  Guide RNA
cugaaauggaauggaauggcu

SEQ ID NO: 13684 - RNA, 21 nt, Artificial Sequence
  Guide RNA
cuguagccauuccauuccauu

SEQ ID NO: 13685 - RNA, 21 nt, Artificial Sequence
  Guide RNA
cuguagccauuccguuccauu

SEQ ID NO: 13686 - RNA, 21 nt, Artificial Sequence
  Guide RNA
gaaauggaacggaauggcuac

SEQ ID NO: 13687 - RNA, 21 nt, Artificial Sequence
  Guide RNA
gaaauggaauggaauggcuac

SEQ ID NO: 13688 - RNA, 21 nt, Artificial Sequence
  Guide RNA
gaacggaauggcuacagcgag

SEQ ID NO: 13689 - RNA, 21 nt, Artificial Sequence
  Guide RNA
gaauaaaaucaccugaaaugg

SEQ ID NO: 13690 - RNA, 21 nt, Artificial Sequence
  Guide RNA
gaauggaauggcuacagcgag

SEQ ID NO: 13691 - RNA, 21 nt, Artificial Sequence
  Guide RNA
gacacucgcuguagccauucc

SEQ ID NO: 13692 - RNA, 21 nt, Artificial Sequence
  Guide RNA
gccauuccauuccauuucagg

SEQ ID NO: 13693 - RNA, 21 nt, Artificial Sequence
  Guide RNA
gccauuccguuccauuucagg

SEQ ID NO: 13694 - RNA, 21 nt, Artificial Sequence
  Guide RNA
gcuguagccauuccauuccau

SEQ ID NO: 13695 - RNA, 21 nt, Artificial Sequence
  Guide RNA
gcuguagccauuccguuccau

SEQ ID NO: 13696 - RNA, 21 nt, Artificial Sequence
  Guide RNA
ggaacggaauggcuacagcga

SEQ ID NO: 13697 - RNA, 21 nt, Artificial Sequence
  Guide RNA
ggaauggaauggcuacagcga

SEQ ID NO: 13698 - RNA, 21 nt, Artificial Sequence
  Guide RNA
ggacacucgcuguagccauuc

SEQ ID NO: 13699 - RNA, 21 nt, Artificial Sequence
  Guide RNA
guagccauuccauuccauuuc

SEQ ID NO: 13700 - RNA, 21 nt, Artificial Sequence
  Guide RNA
guagccauuccguuccauuuc

SEQ ID NO: 13701 - RNA, 21 nt, Artificial Sequence
  Guide RNA
uaaaaucaccugaaauggaac

SEQ ID NO: 13702 - RNA, 21 nt, Artificial Sequence
  Guide RNA
uagccauuccauuccauuuca

SEQ ID NO: 13703 - RNA, 21 nt, Artificial Sequence
  Guide RNA
uagccauuccguuccauuuca

SEQ ID NO: 13704 - RNA, 21 nt, Artificial Sequence
  Guide RNA
ucaccugaaauggaacggaau

SEQ ID NO: 13705 - RNA, 21 nt, Artificial Sequence
  Guide RNA
ucaccugaaauggaauggaau

SEQ ID NO: 13706 - RNA, 21 nt, Artificial Sequence
  Guide RNA
uccauuccauuucaggugauu

SEQ ID NO: 13707 - RNA, 21 nt, Artificial Sequence
  Guide RNA
uccguuccauuucaggugauu

SEQ ID NO: 13708 - RNA, 21 nt, Artificial Sequence
  Guide RNA
ucgcuguagccauuccauucc

SEQ ID NO: 13709 - RNA, 21 nt, Artificial Sequence
  Guide RNA
ucgcuguagccauuccguucc

SEQ ID NO: 13710 - RNA, 21 nt, Artificial Sequence
  Guide RNA
ugaaauggaacggaauggcua

SEQ ID NO: 13711 - RNA, 21 nt, Artificial Sequence
  Guide RNA
ugaaauggaauggaauggcua

SEQ ID NO: 13712 - RNA, 21 nt, Artificial Sequence
  Guide RNA
uggaacggaauggcuacagcg

SEQ ID NO: 13713 - RNA, 21 nt, Artificial Sequence
  Guide RNA
uggaauggaauggcuacagcg

SEQ ID NO: 13714 - RNA, 21 nt, Artificial Sequence
  Guide RNA
uggacacucgcuguagccauu

SEQ ID NO: 13715 - RNA, 21 nt, Artificial Sequence
  Guide RNA
uguagccauuccauuccauuu

SEQ ID NO: 13716 - RNA, 21 nt, Artificial Sequence
  Guide RNA
uguagccauuccguuccauuu

SEQ ID NO: 13717 - RNA, 21 nt, Artificial Sequence
  Guide RNA
uuccauuccauuucaggugau

SEQ ID NO: 13718 - RNA, 21 nt, Artificial Sequence
  Guide RNA
uuccguuccauuucaggugau

SEQ ID NO: 13719 - RNA, 21 nt, Artificial Sequence
  Guide RNA
uuggacacucgcuguagccau

SEQ ID NO: 13720 - RNA, 22 nt, Artificial Sequence
  Guide RNA
aaaaucaccugaaauggaacgg

SEQ ID NO: 13721 - RNA, 22 nt, Artificial Sequence
  Guide RNA
aaaaucaccugaaauggaaugg

SEQ ID NO: 13722 - RNA, 22 nt, Artificial Sequence
  Guide RNA
aaaucaccugaaauggaacgga

SEQ ID NO: 13723 - RNA, 22 nt, Artificial Sequence
  Guide RNA
aaaucaccugaaauggaaugga

SEQ ID NO: 13724 - RNA, 22 nt, Artificial Sequence
  Guide RNA
aaauggaacggaauggcuacag

SEQ ID NO: 13725 - RNA, 22 nt, Artificial Sequence
  Guide RNA
aaauggaauggaauggcuacag

SEQ ID NO: 13726 - RNA, 22 nt, Artificial Sequence
  Guide RNA
aacggaauggcuacagcgagug

SEQ ID NO: 13727 - RNA, 22 nt, Artificial Sequence
  Guide RNA
aaucaccugaaauggaacggaa

SEQ ID NO: 13728 - RNA, 22 nt, Artificial Sequence
  Guide RNA
aaucaccugaaauggaauggaa

SEQ ID NO: 13729 - RNA, 22 nt, Artificial Sequence
  Guide RNA
aauggaacggaauggcuacagc

SEQ ID NO: 13730 - RNA, 22 nt, Artificial Sequence
  Guide RNA
aauggaauggaauggcuacagc

SEQ ID NO: 13731 - RNA, 22 nt, Artificial Sequence
  Guide RNA
aauggaauggcuacagcgagug

SEQ ID NO: 13732 - RNA, 22 nt, Artificial Sequence
  Guide RNA
acacucgcuguagccauuccau

SEQ ID NO: 13733 - RNA, 22 nt, Artificial Sequence
  Guide RNA
acacucgcuguagccauuccgu

SEQ ID NO: 13734 - RNA, 22 nt, Artificial Sequence
  Guide RNA
accugaaauggaacggaauggc

SEQ ID NO: 13735 - RNA, 22 nt, Artificial Sequence
  Guide RNA
accugaaauggaauggaauggc

SEQ ID NO: 13736 - RNA, 22 nt, Artificial Sequence
  Guide RNA
acggaauggcuacagcgagugu

SEQ ID NO: 13737 - RNA, 22 nt, Artificial Sequence
  Guide RNA
acucgcuguagccauuccauuc

SEQ ID NO: 13738 - RNA, 22 nt, Artificial Sequence
  Guide RNA
acucgcuguagccauuccguuc

SEQ ID NO: 13739 - RNA, 22 nt, Artificial Sequence
  Guide RNA
agccauuccauuccauuucagg

SEQ ID NO: 13740 - RNA, 22 nt, Artificial Sequence
  Guide RNA
agccauuccguuccauuucagg

SEQ ID NO: 13741 - RNA, 22 nt, Artificial Sequence
  Guide RNA
auaaaaucaccugaaauggaac

SEQ ID NO: 13742 - RNA, 22 nt, Artificial Sequence
  Guide RNA
aucaccugaaauggaacggaau

SEQ ID NO: 13743 - RNA, 22 nt, Artificial Sequence
  Guide RNA
aucaccugaaauggaauggaau

SEQ ID NO: 13744 - RNA, 22 nt, Artificial Sequence
  Guide RNA
auggaacggaauggcuacagcg

SEQ ID NO: 13745 - RNA, 22 nt, Artificial Sequence
  Guide RNA
auggaauggaauggcuacagcg

SEQ ID NO: 13746 - RNA, 22 nt, Artificial Sequence
  Guide RNA
auggaauggcuacagcgagugu

SEQ ID NO: 13747 - RNA, 22 nt, Artificial Sequence
  Guide RNA
auuccauuccauuucaggugau

SEQ ID NO: 13748 - RNA, 22 nt, Artificial Sequence
  Guide RNA
auuccguuccauuucaggugau

SEQ ID NO: 13749 - RNA, 22 nt, Artificial Sequence
  Guide RNA
caccugaaauggaacggaaugg

SEQ ID NO: 13750 - RNA, 22 nt, Artificial Sequence
  Guide RNA
caccugaaauggaauggaaugg

SEQ ID NO: 13751 - RNA, 22 nt, Artificial Sequence
  Guide RNA
cacucgcuguagccauuccauu

SEQ ID NO: 13752 - RNA, 22 nt, Artificial Sequence
  Guide RNA
cacucgcuguagccauuccguu

SEQ ID NO: 13753 - RNA, 22 nt, Artificial Sequence
  Guide RNA
cauuccauuccauuucagguga

SEQ ID NO: 13754 - RNA, 22 nt, Artificial Sequence
  Guide RNA
cauuccauuucaggugauuuua

SEQ ID NO: 13755 - RNA, 22 nt, Artificial Sequence
  Guide RNA
cauuccguuccauuucagguga

SEQ ID NO: 13756 - RNA, 22 nt, Artificial Sequence
  Guide RNA
ccauuccauuccauuucaggug

SEQ ID NO: 13757 - RNA, 22 nt, Artificial Sequence
  Guide RNA
ccauuccauuucaggugauuuu

SEQ ID NO: 13758 - RNA, 22 nt, Artificial Sequence
  Guide RNA
ccauuccguuccauuucaggug

SEQ ID NO: 13759 - RNA, 22 nt, Artificial Sequence
  Guide RNA
ccguuccauuucaggugauuuu

SEQ ID NO: 13760 - RNA, 22 nt, Artificial Sequence
  Guide RNA
ccugaaauggaacggaauggcu

SEQ ID NO: 13761 - RNA, 22 nt, Artificial Sequence
  Guide RNA
ccugaaauggaauggaauggcu

SEQ ID NO: 13762 - RNA, 22 nt, Artificial Sequence
  Guide RNA
cgcuguagccauuccauuccau

SEQ ID NO: 13763 - RNA, 22 nt, Artificial Sequence
  Guide RNA
cgcuguagccauuccguuccau

SEQ ID NO: 13764 - RNA, 22 nt, Artificial Sequence
  Guide RNA
cguuccauuucaggugauuuua

SEQ ID NO: 13765 - RNA, 22 nt, Artificial Sequence
  Guide RNA
cucgcuguagccauuccauucc

SEQ ID NO: 13766 - RNA, 22 nt, Artificial Sequence
  Guide RNA
cucgcuguagccauuccguucc

SEQ ID NO: 13767 - RNA, 22 nt, Artificial Sequence
  Guide RNA
cugaaauggaacggaauggcua

SEQ ID NO: 13768 - RNA, 22 nt, Artificial Sequence
  Guide RNA
cugaaauggaauggaauggcua

SEQ ID NO: 13769 - RNA, 22 nt, Artificial Sequence
  Guide RNA
cuguagccauuccauuccauuu

SEQ ID NO: 13770 - RNA, 22 nt, Artificial Sequence
  Guide RNA
cuguagccauuccguuccauuu

SEQ ID NO: 13771 - RNA, 22 nt, Artificial Sequence
  Guide RNA
gaaauggaacggaauggcuaca

SEQ ID NO: 13772 - RNA, 22 nt, Artificial Sequence
  Guide RNA
gaaauggaauggaauggcuaca

SEQ ID NO: 13773 - RNA, 22 nt, Artificial Sequence
  Guide RNA
gaacggaauggcuacagcgagu

SEQ ID NO: 13774 - RNA, 22 nt, Artificial Sequence
  Guide RNA
gaauaaaaucaccugaaaugga

SEQ ID NO: 13775 - RNA, 22 nt, Artificial Sequence
  Guide RNA
gaauggaauggcuacagcgagu

SEQ ID NO: 13776 - RNA, 22 nt, Artificial Sequence
  Guide RNA
gacacucgcuguagccauucca

SEQ ID NO: 13777 - RNA, 22 nt, Artificial Sequence
  Guide RNA
gacacucgcuguagccauuccg

SEQ ID NO: 13778 - RNA, 22 nt, Artificial Sequence
  Guide RNA
gccauuccauuccauuucaggu

SEQ ID NO: 13779 - RNA, 22 nt, Artificial Sequence
  Guide RNA
gccauuccguuccauuucaggu

SEQ ID NO: 13780 - RNA, 22 nt, Artificial Sequence
  Guide RNA
gcuguagccauuccauuccauu

SEQ ID NO: 13781 - RNA, 22 nt, Artificial Sequence
  Guide RNA
gcuguagccauuccguuccauu

SEQ ID NO: 13782 - RNA, 22 nt, Artificial Sequence
  Guide RNA
ggaacggaauggcuacagcgag

SEQ ID NO: 13783 - RNA, 22 nt, Artificial Sequence
  Guide RNA
ggaauggaauggcuacagcgag

SEQ ID NO: 13784 - RNA, 22 nt, Artificial Sequence
  Guide RNA
ggacacucgcuguagccauucc

SEQ ID NO: 13785 - RNA, 22 nt, Artificial Sequence
  Guide RNA
guagccauuccauuccauuuca

SEQ ID NO: 13786 - RNA, 22 nt, Artificial Sequence
  Guide RNA
guagccauuccguuccauuuca

SEQ ID NO: 13787 - RNA, 22 nt, Artificial Sequence
  Guide RNA
uaaaaucaccugaaauggaacg

SEQ ID NO: 13788 - RNA, 22 nt, Artificial Sequence
  Guide RNA
uaaaaucaccugaaauggaaug

SEQ ID NO: 13789 - RNA, 22 nt, Artificial Sequence
  Guide RNA
uagccauuccauuccauuucag

SEQ ID NO: 13790 - RNA, 22 nt, Artificial Sequence
  Guide RNA
uagccauuccguuccauuucag

SEQ ID NO: 13791 - RNA, 22 nt, Artificial Sequence
  Guide RNA
ucaccugaaauggaacggaaug

SEQ ID NO: 13792 - RNA, 22 nt, Artificial Sequence
  Guide RNA
ucaccugaaauggaauggaaug

SEQ ID NO: 13793 - RNA, 22 nt, Artificial Sequence
  Guide RNA
uccauuccauuucaggugauuu

SEQ ID NO: 13794 - RNA, 22 nt, Artificial Sequence
  Guide RNA
uccguuccauuucaggugauuu

SEQ ID NO: 13795 - RNA, 22 nt, Artificial Sequence
  Guide RNA
ucgcuguagccauuccauucca

SEQ ID NO: 13796 - RNA, 22 nt, Artificial Sequence
  Guide RNA
ucgcuguagccauuccguucca

SEQ ID NO: 13797 - RNA, 22 nt, Artificial Sequence
  Guide RNA
ugaaauggaacggaauggcuac

SEQ ID NO: 13798 - RNA, 22 nt, Artificial Sequence
  Guide RNA
ugaaauggaauggaauggcuac

SEQ ID NO: 13799 - RNA, 22 nt, Artificial Sequence
  Guide RNA
ugaauaaaaucaccugaaaugg

SEQ ID NO: 13800 - RNA, 22 nt, Artificial Sequence
  Guide RNA
uggaacggaauggcuacagcga

SEQ ID NO: 13801 - RNA, 22 nt, Artificial Sequence
  Guide RNA
uggaauggaauggcuacagcga

SEQ ID NO: 13802 - RNA, 22 nt, Artificial Sequence
  Guide RNA
uggacacucgcuguagccauuc

SEQ ID NO: 13803 - RNA, 22 nt, Artificial Sequence
  Guide RNA
uguagccauuccauuccauuuc

SEQ ID NO: 13804 - RNA, 22 nt, Artificial Sequence
  Guide RNA
uguagccauuccguuccauuuc

SEQ ID NO: 13805 - RNA, 22 nt, Artificial Sequence
  Guide RNA
uuccauuccauuucaggugauu

SEQ ID NO: 13806 - RNA, 22 nt, Artificial Sequence
  Guide RNA
uuccguuccauuucaggugauu

SEQ ID NO: 13807 - RNA, 22 nt, Artificial Sequence
  Guide RNA
uuggacacucgcuguagccauu

SEQ ID NO: 13808 - RNA, 22 nt, Artificial Sequence
  Guide RNA
uuuggacacucgcuguagccau

SEQ ID NO: 13809 - RNA, 20 nt, Artificial Sequence
  Guide RNA
aaacacacacgggccucuca

SEQ ID NO: 13810 - RNA, 20 nt, Artificial Sequence
  Guide RNA
aaacacauacgggccucuca

SEQ ID NO: 13811 - RNA, 20 nt, Artificial Sequence
  Guide RNA
aaaucccaaacacacacggg

SEQ ID NO: 13812 - RNA, 20 nt, Artificial Sequence
  Guide RNA
aaaucccaaacacauacggg

SEQ ID NO: 13813 - RNA, 20 nt, Artificial Sequence
  Guide RNA
aacacacacgggccucucac

SEQ ID NO: 13814 - RNA, 20 nt, Artificial Sequence
  Guide RNA
aacacauacgggccucucac

SEQ ID NO: 13815 - RNA, 20 nt, Artificial Sequence
  Guide RNA
aaucccaaacacacacgggc

SEQ ID NO: 13816 - RNA, 20 nt, Artificial Sequence
  Guide RNA
aaucccaaacacauacgggc

SEQ ID NO: 13817 - RNA, 20 nt, Artificial Sequence
  Guide RNA
acacacacgggccucucacc

SEQ ID NO: 13818 - RNA, 20 nt, Artificial Sequence
  Guide RNA
acacacgggccucucaccca

SEQ ID NO: 13819 - RNA, 20 nt, Artificial Sequence
  Guide RNA
acacauacgggccucucacc

SEQ ID NO: 13820 - RNA, 20 nt, Artificial Sequence
  Guide RNA
acacgggccucucacccaaa

SEQ ID NO: 13821 - RNA, 20 nt, Artificial Sequence
  Guide RNA
acauacgggccucucaccca

SEQ ID NO: 13822 - RNA, 20 nt, Artificial Sequence
  Guide RNA
agaggcccguauguguuugg

SEQ ID NO: 13823 - RNA, 20 nt, Artificial Sequence
  Guide RNA
agaggcccguguguguuugg

SEQ ID NO: 13824 - RNA, 20 nt, Artificial Sequence
  Guide RNA
aggcccguauguguuuggga

SEQ ID NO: 13825 - RNA, 20 nt, Artificial Sequence
  Guide RNA
aggcccguguguguuuggga

SEQ ID NO: 13826 - RNA, 20 nt, Artificial Sequence
  Guide RNA
auacgggccucucacccaaa

SEQ ID NO: 13827 - RNA, 20 nt, Artificial Sequence
  Guide RNA
aucccaaacacacacgggcc

SEQ ID NO: 13828 - RNA, 20 nt, Artificial Sequence
  Guide RNA
aucccaaacacauacgggcc

SEQ ID NO: 13829 - RNA, 20 nt, Artificial Sequence
  Guide RNA
auugccaaaucccaaacaca

SEQ ID NO: 13830 - RNA, 20 nt, Artificial Sequence
  Guide RNA
caaacacacacgggccucuc

SEQ ID NO: 13831 - RNA, 20 nt, Artificial Sequence
  Guide RNA
caaacacauacgggccucuc

SEQ ID NO: 13832 - RNA, 20 nt, Artificial Sequence
  Guide RNA
caaaucccaaacacacacgg

SEQ ID NO: 13833 - RNA, 20 nt, Artificial Sequence
  Guide RNA
caaaucccaaacacauacgg

SEQ ID NO: 13834 - RNA, 20 nt, Artificial Sequence
  Guide RNA
cacacacgggccucucaccc

SEQ ID NO: 13835 - RNA, 20 nt, Artificial Sequence
  Guide RNA
cacacgggccucucacccaa

SEQ ID NO: 13836 - RNA, 20 nt, Artificial Sequence
  Guide RNA
cacauacgggccucucaccc

SEQ ID NO: 13837 - RNA, 20 nt, Artificial Sequence
  Guide RNA
cauacgggccucucacccaa

SEQ ID NO: 13838 - RNA, 20 nt, Artificial Sequence
  Guide RNA
ccaaacacacacgggccucu

SEQ ID NO: 13839 - RNA, 20 nt, Artificial Sequence
  Guide RNA
ccaaacacauacgggccucu

SEQ ID NO: 13840 - RNA, 20 nt, Artificial Sequence
  Guide RNA
ccaaaucccaaacacacacg

SEQ ID NO: 13841 - RNA, 20 nt, Artificial Sequence
  Guide RNA
ccaaaucccaaacacauacg

SEQ ID NO: 13842 - RNA, 20 nt, Artificial Sequence
  Guide RNA
cccaaacacacacgggccuc

SEQ ID NO: 13843 - RNA, 20 nt, Artificial Sequence
  Guide RNA
cccaaacacauacgggccuc

SEQ ID NO: 13844 - RNA, 20 nt, Artificial Sequence
  Guide RNA
cccguauguguuugggauuu

SEQ ID NO: 13845 - RNA, 20 nt, Artificial Sequence
  Guide RNA
cccguguguguuugggauuu

SEQ ID NO: 13846 - RNA, 20 nt, Artificial Sequence
  Guide RNA
ccguauguguuugggauuug

SEQ ID NO: 13847 - RNA, 20 nt, Artificial Sequence
  Guide RNA
ccguguguguuugggauuug

SEQ ID NO: 13848 - RNA, 20 nt, Artificial Sequence
  Guide RNA
ccuuugggugagaggcccgu

SEQ ID NO: 13849 - RNA, 20 nt, Artificial Sequence
  Guide RNA
cguauguguuugggauuugg

SEQ ID NO: 13850 - RNA, 20 nt, Artificial Sequence
  Guide RNA
cguguguguuugggauuugg

SEQ ID NO: 13851 - RNA, 20 nt, Artificial Sequence
  Guide RNA
cugauugccaaaucccaaac

SEQ ID NO: 13852 - RNA, 20 nt, Artificial Sequence
  Guide RNA
cuuugggugagaggcccgua

SEQ ID NO: 13853 - RNA, 20 nt, Artificial Sequence
  Guide RNA
cuuugggugagaggcccgug

SEQ ID NO: 13854 - RNA, 20 nt, Artificial Sequence
  Guide RNA
gagaggcccguauguguuug

SEQ ID NO: 13855 - RNA, 20 nt, Artificial Sequence
  Guide RNA
gagaggcccguguguguuug

SEQ ID NO: 13856 - RNA, 20 nt, Artificial Sequence
  Guide RNA
gaggcccguauguguuuggg

SEQ ID NO: 13857 - RNA, 20 nt, Artificial Sequence
  Guide RNA
gaggcccguguguguuuggg

SEQ ID NO: 13858 - RNA, 20 nt, Artificial Sequence
  Guide RNA
gauugccaaaucccaaacac

SEQ ID NO: 13859 - RNA, 20 nt, Artificial Sequence
  Guide RNA
gccaaaucccaaacacacac

SEQ ID NO: 13860 - RNA, 20 nt, Artificial Sequence
  Guide RNA
gccaaaucccaaacacauac

SEQ ID NO: 13861 - RNA, 20 nt, Artificial Sequence
  Guide RNA
gcccguauguguuugggauu

SEQ ID NO: 13862 - RNA, 20 nt, Artificial Sequence
  Guide RNA
gcccguguguguuugggauu

SEQ ID NO: 13863 - RNA, 20 nt, Artificial Sequence
  Guide RNA
gccuuugggugagaggcccg

SEQ ID NO: 13864 - RNA, 20 nt, Artificial Sequence
  Guide RNA
ggcccguauguguuugggau

SEQ ID NO: 13865 - RNA, 20 nt, Artificial Sequence
  Guide RNA
ggcccguguguguuugggau

SEQ ID NO: 13866 - RNA, 20 nt, Artificial Sequence
  Guide RNA
ggccuuugggugagaggccc

SEQ ID NO: 13867 - RNA, 20 nt, Artificial Sequence
  Guide RNA
gggugagaggcccguaugug

SEQ ID NO: 13868 - RNA, 20 nt, Artificial Sequence
  Guide RNA
gggugagaggcccgugugug

SEQ ID NO: 13869 - RNA, 20 nt, Artificial Sequence
  Guide RNA
ggugagaggcccguaugugu

SEQ ID NO: 13870 - RNA, 20 nt, Artificial Sequence
  Guide RNA
ggugagaggcccgugugugu

SEQ ID NO: 13871 - RNA, 20 nt, Artificial Sequence
  Guide RNA
guauguguuugggauuuggc

SEQ ID NO: 13872 - RNA, 20 nt, Artificial Sequence
  Guide RNA
gugagaggcccguauguguu

SEQ ID NO: 13873 - RNA, 20 nt, Artificial Sequence
  Guide RNA
gugagaggcccguguguguu

SEQ ID NO: 13874 - RNA, 20 nt, Artificial Sequence
  Guide RNA
guguguguuugggauuuggc

SEQ ID NO: 13875 - RNA, 20 nt, Artificial Sequence
  Guide RNA
uauguguuugggauuuggca

SEQ ID NO: 13876 - RNA, 20 nt, Artificial Sequence
  Guide RNA
ucccaaacacacacgggccu

SEQ ID NO: 13877 - RNA, 20 nt, Artificial Sequence
  Guide RNA
ucccaaacacauacgggccu

SEQ ID NO: 13878 - RNA, 20 nt, Artificial Sequence
  Guide RNA
ugagaggcccguauguguuu

SEQ ID NO: 13879 - RNA, 20 nt, Artificial Sequence
  Guide RNA
ugagaggcccguguguguuu

SEQ ID NO: 13880 - RNA, 20 nt, Artificial Sequence
  Guide RNA
ugauugccaaaucccaaaca

SEQ ID NO: 13881 - RNA, 20 nt, Artificial Sequence
  Guide RNA
ugccaaaucccaaacacaca

SEQ ID NO: 13882 - RNA, 20 nt, Artificial Sequence
  Guide RNA
ugccaaaucccaaacacaua

SEQ ID NO: 13883 - RNA, 20 nt, Artificial Sequence
  Guide RNA
uggccuuugggugagaggcc

SEQ ID NO: 13884 - RNA, 20 nt, Artificial Sequence
  Guide RNA
ugggugagaggcccguaugu

SEQ ID NO: 13885 - RNA, 20 nt, Artificial Sequence
  Guide RNA
ugggugagaggcccgugugu

SEQ ID NO: 13886 - RNA, 20 nt, Artificial Sequence
  Guide RNA
uguguguuugggauuuggca

SEQ ID NO: 13887 - RNA, 20 nt, Artificial Sequence
  Guide RNA
uugccaaaucccaaacacac

SEQ ID NO: 13888 - RNA, 20 nt, Artificial Sequence
  Guide RNA
uugccaaaucccaaacacau

SEQ ID NO: 13889 - RNA, 20 nt, Artificial Sequence
  Guide RNA
uugggugagaggcccguaug

SEQ ID NO: 13890 - RNA, 20 nt, Artificial Sequence
  Guide RNA
uugggugagaggcccgugug

SEQ ID NO: 13891 - RNA, 20 nt, Artificial Sequence
  Guide RNA
uuugggugagaggcccguau

SEQ ID NO: 13892 - RNA, 20 nt, Artificial Sequence
  Guide RNA
uuugggugagaggcccgugu

SEQ ID NO: 13893 - RNA, 21 nt, Artificial Sequence
  Guide RNA
aaacacacacgggccucucac

SEQ ID NO: 13894 - RNA, 21 nt, Artificial Sequence
  Guide RNA
aaacacauacgggccucucac

SEQ ID NO: 13895 - RNA, 21 nt, Artificial Sequence
  Guide RNA
aaaucccaaacacacacgggc

SEQ ID NO: 13896 - RNA, 21 nt, Artificial Sequence
  Guide RNA
aaaucccaaacacauacgggc

SEQ ID NO: 13897 - RNA, 21 nt, Artificial Sequence
  Guide RNA
aacacacacgggccucucacc

SEQ ID NO: 13898 - RNA, 21 nt, Artificial Sequence
  Guide RNA
aacacauacgggccucucacc

SEQ ID NO: 13899 - RNA, 21 nt, Artificial Sequence
  Guide RNA
aaucccaaacacacacgggcc

SEQ ID NO: 13900 - RNA, 21 nt, Artificial Sequence
  Guide RNA
aaucccaaacacauacgggcc

SEQ ID NO: 13901 - RNA, 21 nt, Artificial Sequence
  Guide RNA
acacacacgggccucucaccc

SEQ ID NO: 13902 - RNA, 21 nt, Artificial Sequence
  Guide RNA
acacacgggccucucacccaa

SEQ ID NO: 13903 - RNA, 21 nt, Artificial Sequence
  Guide RNA
acacauacgggccucucaccc

SEQ ID NO: 13904 - RNA, 21 nt, Artificial Sequence
  Guide RNA
acacgggccucucacccaaag

SEQ ID NO: 13905 - RNA, 21 nt, Artificial Sequence
  Guide RNA
acauacgggccucucacccaa

SEQ ID NO: 13906 - RNA, 21 nt, Artificial Sequence
  Guide RNA
agaggcccguauguguuuggg

SEQ ID NO: 13907 - RNA, 21 nt, Artificial Sequence
  Guide RNA
agaggcccguguguguuuggg

SEQ ID NO: 13908 - RNA, 21 nt, Artificial Sequence
  Guide RNA
aggcccguauguguuugggau

SEQ ID NO: 13909 - RNA, 21 nt, Artificial Sequence
  Guide RNA
aggcccguguguguuugggau

SEQ ID NO: 13910 - RNA, 21 nt, Artificial Sequence
  Guide RNA
auacgggccucucacccaaag

SEQ ID NO: 13911 - RNA, 21 nt, Artificial Sequence
  Guide RNA
aucccaaacacacacgggccu

SEQ ID NO: 13912 - RNA, 21 nt, Artificial Sequence
  Guide RNA
aucccaaacacauacgggccu

SEQ ID NO: 13913 - RNA, 21 nt, Artificial Sequence
  Guide RNA
auggccuuugggugagaggcc

SEQ ID NO: 13914 - RNA, 21 nt, Artificial Sequence
  Guide RNA
auugccaaaucccaaacacac

SEQ ID NO: 13915 - RNA, 21 nt, Artificial Sequence
  Guide RNA
auugccaaaucccaaacacau

SEQ ID NO: 13916 - RNA, 21 nt, Artificial Sequence
  Guide RNA
caaacacacacgggccucuca

SEQ ID NO: 13917 - RNA, 21 nt, Artificial Sequence
  Guide RNA
caaacacauacgggccucuca

SEQ ID NO: 13918 - RNA, 21 nt, Artificial Sequence
  Guide RNA
caaaucccaaacacacacggg

SEQ ID NO: 13919 - RNA, 21 nt, Artificial Sequence
  Guide RNA
caaaucccaaacacauacggg

SEQ ID NO: 13920 - RNA, 21 nt, Artificial Sequence
  Guide RNA
cacacacgggccucucaccca

SEQ ID NO: 13921 - RNA, 21 nt, Artificial Sequence
  Guide RNA
cacacgggccucucacccaaa

SEQ ID NO: 13922 - RNA, 21 nt, Artificial Sequence
  Guide RNA
cacauacgggccucucaccca

SEQ ID NO: 13923 - RNA, 21 nt, Artificial Sequence
  Guide RNA
cauacgggccucucacccaaa

SEQ ID NO: 13924 - RNA, 21 nt, Artificial Sequence
  Guide RNA
ccaaacacacacgggccucuc

SEQ ID NO: 13925 - RNA, 21 nt, Artificial Sequence
  Guide RNA
ccaaacacauacgggccucuc

SEQ ID NO: 13926 - RNA, 21 nt, Artificial Sequence
  Guide RNA
ccaaaucccaaacacacacgg

SEQ ID NO: 13927 - RNA, 21 nt, Artificial Sequence
  Guide RNA
ccaaaucccaaacacauacgg

SEQ ID NO: 13928 - RNA, 21 nt, Artificial Sequence
  Guide RNA
cccaaacacacacgggccucu

SEQ ID NO: 13929 - RNA, 21 nt, Artificial Sequence
  Guide RNA
cccaaacacauacgggccucu

SEQ ID NO: 13930 - RNA, 21 nt, Artificial Sequence
  Guide RNA
cccguauguguuugggauuug

SEQ ID NO: 13931 - RNA, 21 nt, Artificial Sequence
  Guide RNA
cccguguguguuugggauuug

SEQ ID NO: 13932 - RNA, 21 nt, Artificial Sequence
  Guide RNA
ccguauguguuugggauuugg

SEQ ID NO: 13933 - RNA, 21 nt, Artificial Sequence
  Guide RNA
ccguguguguuugggauuugg

SEQ ID NO: 13934 - RNA, 21 nt, Artificial Sequence
  Guide RNA
ccuuugggugagaggcccgua

SEQ ID NO: 13935 - RNA, 21 nt, Artificial Sequence
  Guide RNA
ccuuugggugagaggcccgug

SEQ ID NO: 13936 - RNA, 21 nt, Artificial Sequence
  Guide RNA
cguauguguuugggauuuggc

SEQ ID NO: 13937 - RNA, 21 nt, Artificial Sequence
  Guide RNA
cguguguguuugggauuuggc

SEQ ID NO: 13938 - RNA, 21 nt, Artificial Sequence
  Guide RNA
cugauugccaaaucccaaaca

SEQ ID NO: 13939 - RNA, 21 nt, Artificial Sequence
  Guide RNA
cuuugggugagaggcccguau

SEQ ID NO: 13940 - RNA, 21 nt, Artificial Sequence
  Guide RNA
cuuugggugagaggcccgugu

SEQ ID NO: 13941 - RNA, 21 nt, Artificial Sequence
  Guide RNA
gagaggcccguauguguuugg

SEQ ID NO: 13942 - RNA, 21 nt, Artificial Sequence
  Guide RNA
gagaggcccguguguguuugg

SEQ ID NO: 13943 - RNA, 21 nt, Artificial Sequence
  Guide RNA
gaggcccguauguguuuggga

SEQ ID NO: 13944 - RNA, 21 nt, Artificial Sequence
  Guide RNA
gaggcccguguguguuuggga

SEQ ID NO: 13945 - RNA, 21 nt, Artificial Sequence
  Guide RNA
gauugccaaaucccaaacaca

SEQ ID NO: 13946 - RNA, 21 nt, Artificial Sequence
  Guide RNA
gccaaaucccaaacacacacg

SEQ ID NO: 13947 - RNA, 21 nt, Artificial Sequence
  Guide RNA
gccaaaucccaaacacauacg

SEQ ID NO: 13948 - RNA, 21 nt, Artificial Sequence
  Guide RNA
gcccguauguguuugggauuu

SEQ ID NO: 13949 - RNA, 21 nt, Artificial Sequence
  Guide RNA
gcccguguguguuugggauuu

SEQ ID NO: 13950 - RNA, 21 nt, Artificial Sequence
  Guide RNA
gccuuugggugagaggcccgu

SEQ ID NO: 13951 - RNA, 21 nt, Artificial Sequence
  Guide RNA
gcugauugccaaaucccaaac

SEQ ID NO: 13952 - RNA, 21 nt, Artificial Sequence
  Guide RNA
ggcccguauguguuugggauu

SEQ ID NO: 13953 - RNA, 21 nt, Artificial Sequence
  Guide RNA
ggcccguguguguuugggauu

SEQ ID NO: 13954 - RNA, 21 nt, Artificial Sequence
  Guide RNA
ggccuuugggugagaggcccg

SEQ ID NO: 13955 - RNA, 21 nt, Artificial Sequence
  Guide RNA
gggugagaggcccguaugugu

SEQ ID NO: 13956 - RNA, 21 nt, Artificial Sequence
  Guide RNA
gggugagaggcccgugugugu

SEQ ID NO: 13957 - RNA, 21 nt, Artificial Sequence
  Guide RNA
ggugagaggcccguauguguu

SEQ ID NO: 13958 - RNA, 21 nt, Artificial Sequence
  Guide RNA
ggugagaggcccguguguguu

SEQ ID NO: 13959 - RNA, 21 nt, Artificial Sequence
  Guide RNA
guauguguuugggauuuggca

SEQ ID NO: 13960 - RNA, 21 nt, Artificial Sequence
  Guide RNA
gugagaggcccguauguguuu

SEQ ID NO: 13961 - RNA, 21 nt, Artificial Sequence
  Guide RNA
gugagaggcccguguguguuu

SEQ ID NO: 13962 - RNA, 21 nt, Artificial Sequence
  Guide RNA
guguguguuugggauuuggca

SEQ ID NO: 13963 - RNA, 21 nt, Artificial Sequence
  Guide RNA
uauguguuugggauuuggcaa

SEQ ID NO: 13964 - RNA, 21 nt, Artificial Sequence
  Guide RNA
ucccaaacacacacgggccuc

SEQ ID NO: 13965 - RNA, 21 nt, Artificial Sequence
  Guide RNA
ucccaaacacauacgggccuc

SEQ ID NO: 13966 - RNA, 21 nt, Artificial Sequence
  Guide RNA
ugagaggcccguauguguuug

SEQ ID NO: 13967 - RNA, 21 nt, Artificial Sequence
  Guide RNA
ugagaggcccguguguguuug

SEQ ID NO: 13968 - RNA, 21 nt, Artificial Sequence
  Guide RNA
ugauugccaaaucccaaacac

SEQ ID NO: 13969 - RNA, 21 nt, Artificial Sequence
  Guide RNA
ugccaaaucccaaacacacac

SEQ ID NO: 13970 - RNA, 21 nt, Artificial Sequence
  Guide RNA
ugccaaaucccaaacacauac

SEQ ID NO: 13971 - RNA, 21 nt, Artificial Sequence
  Guide RNA
uggccuuugggugagaggccc

SEQ ID NO: 13972 - RNA, 21 nt, Artificial Sequence
  Guide RNA
ugggugagaggcccguaugug

SEQ ID NO: 13973 - RNA, 21 nt, Artificial Sequence
  Guide RNA
ugggugagaggcccgugugug

SEQ ID NO: 13974 - RNA, 21 nt, Artificial Sequence
  Guide RNA
uguguguuugggauuuggcaa

SEQ ID NO: 13975 - RNA, 21 nt, Artificial Sequence
  Guide RNA
uugccaaaucccaaacacaca

SEQ ID NO: 13976 - RNA, 21 nt, Artificial Sequence
  Guide RNA
uugccaaaucccaaacacaua

SEQ ID NO: 13977 - RNA, 21 nt, Artificial Sequence
  Guide RNA
uugggugagaggcccguaugu

SEQ ID NO: 13978 - RNA, 21 nt, Artificial Sequence
  Guide RNA
uugggugagaggcccgugugu

SEQ ID NO: 13979 - RNA, 21 nt, Artificial Sequence
  Guide RNA
uuugggugagaggcccguaug

SEQ ID NO: 13980 - RNA, 21 nt, Artificial Sequence
  Guide RNA
uuugggugagaggcccgugug

SEQ ID NO: 13981 - RNA, 22 nt, Artificial Sequence
  Guide RNA
aaacacacacgggccucucacc

SEQ ID NO: 13982 - RNA, 22 nt, Artificial Sequence
  Guide RNA
aaacacauacgggccucucacc

SEQ ID NO: 13983 - RNA, 22 nt, Artificial Sequence
  Guide RNA
aaaucccaaacacacacgggcc

SEQ ID NO: 13984 - RNA, 22 nt, Artificial Sequence
  Guide RNA
aaaucccaaacacauacgggcc

SEQ ID NO: 13985 - RNA, 22 nt, Artificial Sequence
  Guide RNA
aacacacacgggccucucaccc

SEQ ID NO: 13986 - RNA, 22 nt, Artificial Sequence
  Guide RNA
aacacauacgggccucucaccc

SEQ ID NO: 13987 - RNA, 22 nt, Artificial Sequence
  Guide RNA
aaucccaaacacacacgggccu

SEQ ID NO: 13988 - RNA, 22 nt, Artificial Sequence
  Guide RNA
aaucccaaacacauacgggccu

SEQ ID NO: 13989 - RNA, 22 nt, Artificial Sequence
  Guide RNA
acacacacgggccucucaccca

SEQ ID NO: 13990 - RNA, 22 nt, Artificial Sequence
  Guide RNA
acacacgggccucucacccaaa

SEQ ID NO: 13991 - RNA, 22 nt, Artificial Sequence
  Guide RNA
acacauacgggccucucaccca

SEQ ID NO: 13992 - RNA, 22 nt, Artificial Sequence
  Guide RNA
acacgggccucucacccaaagg

SEQ ID NO: 13993 - RNA, 22 nt, Artificial Sequence
  Guide RNA
acauacgggccucucacccaaa

SEQ ID NO: 13994 - RNA, 22 nt, Artificial Sequence
  Guide RNA
agaggcccguauguguuuggga

SEQ ID NO: 13995 - RNA, 22 nt, Artificial Sequence
  Guide RNA
agaggcccguguguguuuggga

SEQ ID NO: 13996 - RNA, 22 nt, Artificial Sequence
  Guide RNA
aggcccguauguguuugggauu

SEQ ID NO: 13997 - RNA, 22 nt, Artificial Sequence
  Guide RNA
aggcccguguguguuugggauu

SEQ ID NO: 13998 - RNA, 22 nt, Artificial Sequence
  Guide RNA
auacgggccucucacccaaagg

SEQ ID NO: 13999 - RNA, 22 nt, Artificial Sequence
  Guide RNA
aucccaaacacacacgggccuc

SEQ ID NO: 14000 - RNA, 22 nt, Artificial Sequence
  Guide RNA
aucccaaacacauacgggccuc

SEQ ID NO: 14001 - RNA, 22 nt, Artificial Sequence
  Guide RNA
auggccuuugggugagaggccc

SEQ ID NO: 14002 - RNA, 22 nt, Artificial Sequence
  Guide RNA
auugccaaaucccaaacacaca

SEQ ID NO: 14003 - RNA, 22 nt, Artificial Sequence
  Guide RNA
auugccaaaucccaaacacaua

SEQ ID NO: 14004 - RNA, 22 nt, Artificial Sequence
  Guide RNA
caaacacacacgggccucucac

SEQ ID NO: 14005 - RNA, 22 nt, Artificial Sequence
  Guide RNA
caaacacauacgggccucucac

SEQ ID NO: 14006 - RNA, 22 nt, Artificial Sequence
  Guide RNA
caaaucccaaacacacacgggc

SEQ ID NO: 14007 - RNA, 22 nt, Artificial Sequence
  Guide RNA
caaaucccaaacacauacgggc

SEQ ID NO: 14008 - RNA, 22 nt, Artificial Sequence
  Guide RNA
cacacacgggccucucacccaa

SEQ ID NO: 14009 - RNA, 22 nt, Artificial Sequence
  Guide RNA
cacacgggccucucacccaaag

SEQ ID NO: 14010 - RNA, 22 nt, Artificial Sequence
  Guide RNA
cacauacgggccucucacccaa

SEQ ID NO: 14011 - RNA, 22 nt, Artificial Sequence
  Guide RNA
cauacgggccucucacccaaag

SEQ ID NO: 14012 - RNA, 22 nt, Artificial Sequence
  Guide RNA
cauggccuuugggugagaggcc

SEQ ID NO: 14013 - RNA, 22 nt, Artificial Sequence
  Guide RNA
ccaaacacacacgggccucuca

SEQ ID NO: 14014 - RNA, 22 nt, Artificial Sequence
  Guide RNA
ccaaacacauacgggccucuca

SEQ ID NO: 14015 - RNA, 22 nt, Artificial Sequence
  Guide RNA
ccaaaucccaaacacacacggg

SEQ ID NO: 14016 - RNA, 22 nt, Artificial Sequence
  Guide RNA
ccaaaucccaaacacauacggg

SEQ ID NO: 14017 - RNA, 22 nt, Artificial Sequence
  Guide RNA
cccaaacacacacgggccucuc

SEQ ID NO: 14018 - RNA, 22 nt, Artificial Sequence
  Guide RNA
cccaaacacauacgggccucuc

SEQ ID NO: 14019 - RNA, 22 nt, Artificial Sequence
  Guide RNA
cccguauguguuugggauuugg

SEQ ID NO: 14020 - RNA, 22 nt, Artificial Sequence
  Guide RNA
cccguguguguuugggauuugg

SEQ ID NO: 14021 - RNA, 22 nt, Artificial Sequence
  Guide RNA
ccguauguguuugggauuuggc

SEQ ID NO: 14022 - RNA, 22 nt, Artificial Sequence
  Guide RNA
ccguguguguuugggauuuggc

SEQ ID NO: 14023 - RNA, 22 nt, Artificial Sequence
  Guide RNA
ccuuugggugagaggcccguau

SEQ ID NO: 14024 - RNA, 22 nt, Artificial Sequence
  Guide RNA
ccuuugggugagaggcccgugu

SEQ ID NO: 14025 - RNA, 22 nt, Artificial Sequence
  Guide RNA
cguauguguuugggauuuggca

SEQ ID NO: 14026 - RNA, 22 nt, Artificial Sequence
  Guide RNA
cguguguguuugggauuuggca

SEQ ID NO: 14027 - RNA, 22 nt, Artificial Sequence
  Guide RNA
cugauugccaaaucccaaacac

SEQ ID NO: 14028 - RNA, 22 nt, Artificial Sequence
  Guide RNA
cuuugggugagaggcccguaug

SEQ ID NO: 14029 - RNA, 22 nt, Artificial Sequence
  Guide RNA
cuuugggugagaggcccgugug

SEQ ID NO: 14030 - RNA, 22 nt, Artificial Sequence
  Guide RNA
gagaggcccguauguguuuggg

SEQ ID NO: 14031 - RNA, 22 nt, Artificial Sequence
  Guide RNA
gagaggcccguguguguuuggg

SEQ ID NO: 14032 - RNA, 22 nt, Artificial Sequence
  Guide RNA
gaggcccguauguguuugggau

SEQ ID NO: 14033 - RNA, 22 nt, Artificial Sequence
  Guide RNA
gaggcccguguguguuugggau

SEQ ID NO: 14034 - RNA, 22 nt, Artificial Sequence
  Guide RNA
gauugccaaaucccaaacacac

SEQ ID NO: 14035 - RNA, 22 nt, Artificial Sequence
  Guide RNA
gauugccaaaucccaaacacau

SEQ ID NO: 14036 - RNA, 22 nt, Artificial Sequence
  Guide RNA
gccaaaucccaaacacacacgg

SEQ ID NO: 14037 - RNA, 22 nt, Artificial Sequence
  Guide RNA
gccaaaucccaaacacauacgg

SEQ ID NO: 14038 - RNA, 22 nt, Artificial Sequence
  Guide RNA
gcccguauguguuugggauuug

SEQ ID NO: 14039 - RNA, 22 nt, Artificial Sequence
  Guide RNA
gcccguguguguuugggauuug

SEQ ID NO: 14040 - RNA, 22 nt, Artificial Sequence
  Guide RNA
gccuuugggugagaggcccgua

SEQ ID NO: 14041 - RNA, 22 nt, Artificial Sequence
  Guide RNA
gccuuugggugagaggcccgug

SEQ ID NO: 14042 - RNA, 22 nt, Artificial Sequence
  Guide RNA
gcugauugccaaaucccaaaca

SEQ ID NO: 14043 - RNA, 22 nt, Artificial Sequence
  Guide RNA
ggcccguauguguuugggauuu

SEQ ID NO: 14044 - RNA, 22 nt, Artificial Sequence
  Guide RNA
ggcccguguguguuugggauuu

SEQ ID NO: 14045 - RNA, 22 nt, Artificial Sequence
  Guide RNA
ggccuuugggugagaggcccgu

SEQ ID NO: 14046 - RNA, 22 nt, Artificial Sequence
  Guide RNA
gggugagaggcccguauguguu

SEQ ID NO: 14047 - RNA, 22 nt, Artificial Sequence
  Guide RNA
gggugagaggcccguguguguu

SEQ ID NO: 14048 - RNA, 22 nt, Artificial Sequence
  Guide RNA
ggugagaggcccguauguguuu

SEQ ID NO: 14049 - RNA, 22 nt, Artificial Sequence
  Guide RNA
ggugagaggcccguguguguuu

SEQ ID NO: 14050 - RNA, 22 nt, Artificial Sequence
  Guide RNA
guauguguuugggauuuggcaa

SEQ ID NO: 14051 - RNA, 22 nt, Artificial Sequence
  Guide RNA
gugagaggcccguauguguuug

SEQ ID NO: 14052 - RNA, 22 nt, Artificial Sequence
  Guide RNA
gugagaggcccguguguguuug

SEQ ID NO: 14053 - RNA, 22 nt, Artificial Sequence
  Guide RNA
guguguguuugggauuuggcaa

SEQ ID NO: 14054 - RNA, 22 nt, Artificial Sequence
  Guide RNA
uauguguuugggauuuggcaau

SEQ ID NO: 14055 - RNA, 22 nt, Artificial Sequence
  Guide RNA
ucccaaacacacacgggccucu

SEQ ID NO: 14056 - RNA, 22 nt, Artificial Sequence
  Guide RNA
ucccaaacacauacgggccucu

SEQ ID NO: 14057 - RNA, 22 nt, Artificial Sequence
  Guide RNA
ugagaggcccguauguguuugg

SEQ ID NO: 14058 - RNA, 22 nt, Artificial Sequence
  Guide RNA
ugagaggcccguguguguuugg

SEQ ID NO: 14059 - RNA, 22 nt, Artificial Sequence
  Guide RNA
ugauugccaaaucccaaacaca

SEQ ID NO: 14060 - RNA, 22 nt, Artificial Sequence
  Guide RNA
ugccaaaucccaaacacacacg

SEQ ID NO: 14061 - RNA, 22 nt, Artificial Sequence
  Guide RNA
ugccaaaucccaaacacauacg

SEQ ID NO: 14062 - RNA, 22 nt, Artificial Sequence
  Guide RNA
ugcugauugccaaaucccaaac

SEQ ID NO: 14063 - RNA, 22 nt, Artificial Sequence
  Guide RNA
uggccuuugggugagaggcccg

SEQ ID NO: 14064 - RNA, 22 nt, Artificial Sequence
  Guide RNA
ugggugagaggcccguaugugu

SEQ ID NO: 14065 - RNA, 22 nt, Artificial Sequence
  Guide RNA
ugggugagaggcccgugugugu

SEQ ID NO: 14066 - RNA, 22 nt, Artificial Sequence
  Guide RNA
uguguguuugggauuuggcaau

SEQ ID NO: 14067 - RNA, 22 nt, Artificial Sequence
  Guide RNA
uugccaaaucccaaacacacac

SEQ ID NO: 14068 - RNA, 22 nt, Artificial Sequence
  Guide RNA
uugccaaaucccaaacacauac

SEQ ID NO: 14069 - RNA, 22 nt, Artificial Sequence
  Guide RNA
uugggugagaggcccguaugug

SEQ ID NO: 14070 - RNA, 22 nt, Artificial Sequence
  Guide RNA
uugggugagaggcccgugugug

SEQ ID NO: 14071 - RNA, 22 nt, Artificial Sequence
  Guide RNA
uuugggugagaggcccguaugu

SEQ ID NO: 14072 - RNA, 22 nt, Artificial Sequence
  Guide RNA
uuugggugagaggcccgugugu

SEQ ID NO: 14073 - RNA, 20 nt, Artificial Sequence
  Guide RNA
agaucccgggccugucugcg

SEQ ID NO: 14074 - RNA, 20 nt, Artificial Sequence
  Guide RNA
agaucccgggccugucugug

SEQ ID NO: 14075 - RNA, 20 nt, Artificial Sequence
  Guide RNA
agggcucccucccacagaca

SEQ ID NO: 14076 - RNA, 20 nt, Artificial Sequence
  Guide RNA
agggcucccucccgcagaca

SEQ ID NO: 14077 - RNA, 20 nt, Artificial Sequence
  Guide RNA
aucccgggccugucugcggg

SEQ ID NO: 14078 - RNA, 20 nt, Artificial Sequence
  Guide RNA
aucccgggccugucuguggg

SEQ ID NO: 14079 - RNA, 20 nt, Artificial Sequence
  Guide RNA
auggcagaucccgggccugu

SEQ ID NO: 14080 - RNA, 20 nt, Artificial Sequence
  Guide RNA
cacagacaggcccgggaucu

SEQ ID NO: 14081 - RNA, 20 nt, Artificial Sequence
  Guide RNA
cagaucccgggccugucugc

SEQ ID NO: 14082 - RNA, 20 nt, Artificial Sequence
  Guide RNA
cagaucccgggccugucugu

SEQ ID NO: 14083 - RNA, 20 nt, Artificial Sequence
  Guide RNA
cagggcucccucccacagac

SEQ ID NO: 14084 - RNA, 20 nt, Artificial Sequence
  Guide RNA
cagggcucccucccgcagac

SEQ ID NO: 14085 - RNA, 20 nt, Artificial Sequence
  Guide RNA
ccacagacaggcccgggauc

SEQ ID NO: 14086 - RNA, 20 nt, Artificial Sequence
  Guide RNA
ccagggcucccucccacaga

SEQ ID NO: 14087 - RNA, 20 nt, Artificial Sequence
  Guide RNA
ccagggcucccucccgcaga

SEQ ID NO: 14088 - RNA, 20 nt, Artificial Sequence
  Guide RNA
cccacagacaggcccgggau

SEQ ID NO: 14089 - RNA, 20 nt, Artificial Sequence
  Guide RNA
cccgcagacaggcccgggau

SEQ ID NO: 14090 - RNA, 20 nt, Artificial Sequence
  Guide RNA
cccgggccugucugcgggag

SEQ ID NO: 14091 - RNA, 20 nt, Artificial Sequence
  Guide RNA
cccgggccugucugugggag

SEQ ID NO: 14092 - RNA, 20 nt, Artificial Sequence
  Guide RNA
cccucccacagacaggcccg

SEQ ID NO: 14093 - RNA, 20 nt, Artificial Sequence
  Guide RNA
cccucccgcagacaggcccg

SEQ ID NO: 14094 - RNA, 20 nt, Artificial Sequence
  Guide RNA
ccgcagacaggcccgggauc

SEQ ID NO: 14095 - RNA, 20 nt, Artificial Sequence
  Guide RNA
ccgccagggcucccucccac

SEQ ID NO: 14096 - RNA, 20 nt, Artificial Sequence
  Guide RNA
ccgggccugucugcgggagg

SEQ ID NO: 14097 - RNA, 20 nt, Artificial Sequence
  Guide RNA
ccgggccugucugugggagg

SEQ ID NO: 14098 - RNA, 20 nt, Artificial Sequence
  Guide RNA
ccucccacagacaggcccgg

SEQ ID NO: 14099 - RNA, 20 nt, Artificial Sequence
  Guide RNA
ccucccgcagacaggcccgg

SEQ ID NO: 14100 - RNA, 20 nt, Artificial Sequence
  Guide RNA
ccugucugcgggagggagcc

SEQ ID NO: 14101 - RNA, 20 nt, Artificial Sequence
  Guide RNA
ccugucugugggagggagcc

SEQ ID NO: 14102 - RNA, 20 nt, Artificial Sequence
  Guide RNA
cgcagacaggcccgggaucu

SEQ ID NO: 14103 - RNA, 20 nt, Artificial Sequence
  Guide RNA
cgccagggcucccucccaca

SEQ ID NO: 14104 - RNA, 20 nt, Artificial Sequence
  Guide RNA
cgccagggcucccucccgca

SEQ ID NO: 14105 - RNA, 20 nt, Artificial Sequence
  Guide RNA
cgggccugucugcgggaggg

SEQ ID NO: 14106 - RNA, 20 nt, Artificial Sequence
  Guide RNA
cgggccugucugugggaggg

SEQ ID NO: 14107 - RNA, 20 nt, Artificial Sequence
  Guide RNA
cucccacagacaggcccggg

SEQ ID NO: 14108 - RNA, 20 nt, Artificial Sequence
  Guide RNA
cucccgcagacaggcccggg

SEQ ID NO: 14109 - RNA, 20 nt, Artificial Sequence
  Guide RNA
cucccucccacagacaggcc

SEQ ID NO: 14110 - RNA, 20 nt, Artificial Sequence
  Guide RNA
cucccucccgcagacaggcc

SEQ ID NO: 14111 - RNA, 20 nt, Artificial Sequence
  Guide RNA
cuccgccagggcucccuccc

SEQ ID NO: 14112 - RNA, 20 nt, Artificial Sequence
  Guide RNA
cugcgggagggagcccuggc

SEQ ID NO: 14113 - RNA, 20 nt, Artificial Sequence
  Guide RNA
cugucugcgggagggagccc

SEQ ID NO: 14114 - RNA, 20 nt, Artificial Sequence
  Guide RNA
cugucugugggagggagccc

SEQ ID NO: 14115 - RNA, 20 nt, Artificial Sequence
  Guide RNA
cugugggagggagcccuggc

SEQ ID NO: 14116 - RNA, 20 nt, Artificial Sequence
  Guide RNA
gaucccgggccugucugcgg

SEQ ID NO: 14117 - RNA, 20 nt, Artificial Sequence
  Guide RNA
gaucccgggccugucugugg

SEQ ID NO: 14118 - RNA, 20 nt, Artificial Sequence
  Guide RNA
gcagaucccgggccugucug

SEQ ID NO: 14119 - RNA, 20 nt, Artificial Sequence
  Guide RNA
gccagggcucccucccacag

SEQ ID NO: 14120 - RNA, 20 nt, Artificial Sequence
  Guide RNA
gccagggcucccucccgcag

SEQ ID NO: 14121 - RNA, 20 nt, Artificial Sequence
  Guide RNA
gccugucugcgggagggagc

SEQ ID NO: 14122 - RNA, 20 nt, Artificial Sequence
  Guide RNA
gccugucugugggagggagc

SEQ ID NO: 14123 - RNA, 20 nt, Artificial Sequence
  Guide RNA
gcucccucccacagacaggc

SEQ ID NO: 14124 - RNA, 20 nt, Artificial Sequence
  Guide RNA
gcucccucccgcagacaggc

SEQ ID NO: 14125 - RNA, 20 nt, Artificial Sequence
  Guide RNA
gcuccgccagggcucccucc

SEQ ID NO: 14126 - RNA, 20 nt, Artificial Sequence
  Guide RNA
ggcagaucccgggccugucu

SEQ ID NO: 14127 - RNA, 20 nt, Artificial Sequence
  Guide RNA
ggccugucugcgggagggag

SEQ ID NO: 14128 - RNA, 20 nt, Artificial Sequence
  Guide RNA
ggccugucugugggagggag

SEQ ID NO: 14129 - RNA, 20 nt, Artificial Sequence
  Guide RNA
ggcucccucccacagacagg

SEQ ID NO: 14130 - RNA, 20 nt, Artificial Sequence
  Guide RNA
ggcucccucccgcagacagg

SEQ ID NO: 14131 - RNA, 20 nt, Artificial Sequence
  Guide RNA
ggcuccgccagggcucccuc

SEQ ID NO: 14132 - RNA, 20 nt, Artificial Sequence
  Guide RNA
gggccugucugcgggaggga

SEQ ID NO: 14133 - RNA, 20 nt, Artificial Sequence
  Guide RNA
gggccugucugugggaggga

SEQ ID NO: 14134 - RNA, 20 nt, Artificial Sequence
  Guide RNA
gggcucccucccacagacag

SEQ ID NO: 14135 - RNA, 20 nt, Artificial Sequence
  Guide RNA
gggcucccucccgcagacag

SEQ ID NO: 14136 - RNA, 20 nt, Artificial Sequence
  Guide RNA
gucugcgggagggagcccug

SEQ ID NO: 14137 - RNA, 20 nt, Artificial Sequence
  Guide RNA
gucugugggagggagcccug

SEQ ID NO: 14138 - RNA, 20 nt, Artificial Sequence
  Guide RNA
gugggagggagcccuggcgg

SEQ ID NO: 14139 - RNA, 20 nt, Artificial Sequence
  Guide RNA
ucccacagacaggcccggga

SEQ ID NO: 14140 - RNA, 20 nt, Artificial Sequence
  Guide RNA
ucccgcagacaggcccggga

SEQ ID NO: 14141 - RNA, 20 nt, Artificial Sequence
  Guide RNA
ucccgggccugucugcggga

SEQ ID NO: 14142 - RNA, 20 nt, Artificial Sequence
  Guide RNA
ucccgggccugucuguggga

SEQ ID NO: 14143 - RNA, 20 nt, Artificial Sequence
  Guide RNA
ucccucccacagacaggccc

SEQ ID NO: 14144 - RNA, 20 nt, Artificial Sequence
  Guide RNA
ucccucccgcagacaggccc

SEQ ID NO: 14145 - RNA, 20 nt, Artificial Sequence
  Guide RNA
uccgccagggcucccuccca

SEQ ID NO: 14146 - RNA, 20 nt, Artificial Sequence
  Guide RNA
uccgccagggcucccucccg

SEQ ID NO: 14147 - RNA, 20 nt, Artificial Sequence
  Guide RNA
ucugcgggagggagcccugg

SEQ ID NO: 14148 - RNA, 20 nt, Artificial Sequence
  Guide RNA
ucugugggagggagcccugg

SEQ ID NO: 14149 - RNA, 20 nt, Artificial Sequence
  Guide RNA
ugcgggagggagcccuggcg

SEQ ID NO: 14150 - RNA, 20 nt, Artificial Sequence
  Guide RNA
uggcagaucccgggccuguc

SEQ ID NO: 14151 - RNA, 20 nt, Artificial Sequence
  Guide RNA
uggcuccgccagggcucccu

SEQ ID NO: 14152 - RNA, 20 nt, Artificial Sequence
  Guide RNA
ugucugcgggagggagcccu

SEQ ID NO: 14153 - RNA, 20 nt, Artificial Sequence
  Guide RNA
ugucugugggagggagcccu

SEQ ID NO: 14154 - RNA, 20 nt, Artificial Sequence
  Guide RNA
ugugggagggagcccuggcg

SEQ ID NO: 14155 - RNA, 21 nt, Artificial Sequence
  Guide RNA
agaucccgggccugucugcgg

SEQ ID NO: 14156 - RNA, 21 nt, Artificial Sequence
  Guide RNA
agaucccgggccugucugugg

SEQ ID NO: 14157 - RNA, 21 nt, Artificial Sequence
  Guide RNA
agggcucccucccacagacag

SEQ ID NO: 14158 - RNA, 21 nt, Artificial Sequence
  Guide RNA
agggcucccucccgcagacag

SEQ ID NO: 14159 - RNA, 21 nt, Artificial Sequence
  Guide RNA
aucccgggccugucugcggga

SEQ ID NO: 14160 - RNA, 21 nt, Artificial Sequence
  Guide RNA
aucccgggccugucuguggga

SEQ ID NO: 14161 - RNA, 21 nt, Artificial Sequence
  Guide RNA
auggcagaucccgggccuguc

SEQ ID NO: 14162 - RNA, 21 nt, Artificial Sequence
  Guide RNA
cacagacaggcccgggaucug

SEQ ID NO: 14163 - RNA, 21 nt, Artificial Sequence
  Guide RNA
cagaucccgggccugucugcg

SEQ ID NO: 14164 - RNA, 21 nt, Artificial Sequence
  Guide RNA
cagaucccgggccugucugug

SEQ ID NO: 14165 - RNA, 21 nt, Artificial Sequence
  Guide RNA
cagggcucccucccacagaca

SEQ ID NO: 14166 - RNA, 21 nt, Artificial Sequence
  Guide RNA
cagggcucccucccgcagaca

SEQ ID NO: 14167 - RNA, 21 nt, Artificial Sequence
  Guide RNA
cauggcagaucccgggccugu

SEQ ID NO: 14168 - RNA, 21 nt, Artificial Sequence
  Guide RNA
ccacagacaggcccgggaucu

SEQ ID NO: 14169 - RNA, 21 nt, Artificial Sequence
  Guide RNA
ccagggcucccucccacagac

SEQ ID NO: 14170 - RNA, 21 nt, Artificial Sequence
  Guide RNA
ccagggcucccucccgcagac

SEQ ID NO: 14171 - RNA, 21 nt, Artificial Sequence
  Guide RNA
cccacagacaggcccgggauc

SEQ ID NO: 14172 - RNA, 21 nt, Artificial Sequence
  Guide RNA
cccgcagacaggcccgggauc

SEQ ID NO: 14173 - RNA, 21 nt, Artificial Sequence
  Guide RNA
cccgggccugucugugggagg

SEQ ID NO: 14174 - RNA, 21 nt, Artificial Sequence
  Guide RNA
cccucccacagacaggcccgg

SEQ ID NO: 14175 - RNA, 21 nt, Artificial Sequence
  Guide RNA
ccgcagacaggcccgggaucu

SEQ ID NO: 14176 - RNA, 21 nt, Artificial Sequence
  Guide RNA
ccgccagggcucccucccaca

SEQ ID NO: 14177 - RNA, 21 nt, Artificial Sequence
  Guide RNA
ccgggccugucugugggaggg

SEQ ID NO: 14178 - RNA, 21 nt, Artificial Sequence
  Guide RNA
ccucccacagacaggcccggg

SEQ ID NO: 14179 - RNA, 21 nt, Artificial Sequence
  Guide RNA
ccugucugcgggagggagccc

SEQ ID NO: 14180 - RNA, 21 nt, Artificial Sequence
  Guide RNA
ccugucugugggagggagccc

SEQ ID NO: 14181 - RNA, 21 nt, Artificial Sequence
  Guide RNA
cgcagacaggcccgggaucug

SEQ ID NO: 14182 - RNA, 21 nt, Artificial Sequence
  Guide RNA
cgccagggcucccucccacag

SEQ ID NO: 14183 - RNA, 21 nt, Artificial Sequence
  Guide RNA
cgggccugucugcgggaggga

SEQ ID NO: 14184 - RNA, 21 nt, Artificial Sequence
  Guide RNA
cgggccugucugugggaggga

SEQ ID NO: 14185 - RNA, 21 nt, Artificial Sequence
  Guide RNA
cucccacagacaggcccggga

SEQ ID NO: 14186 - RNA, 21 nt, Artificial Sequence
  Guide RNA
cucccgcagacaggcccggga

SEQ ID NO: 14187 - RNA, 21 nt, Artificial Sequence
  Guide RNA
cucccucccacagacaggccc

SEQ ID NO: 14188 - RNA, 21 nt, Artificial Sequence
  Guide RNA
cucccucccgcagacaggccc

SEQ ID NO: 14189 - RNA, 21 nt, Artificial Sequence
  Guide RNA
cuccgccagggcucccuccca

SEQ ID NO: 14190 - RNA, 21 nt, Artificial Sequence
  Guide RNA
cugucugcgggagggagcccu

SEQ ID NO: 14191 - RNA, 21 nt, Artificial Sequence
  Guide RNA
cugucugugggagggagcccu

SEQ ID NO: 14192 - RNA, 21 nt, Artificial Sequence
  Guide RNA
cugugggagggagcccuggcg

SEQ ID NO: 14193 - RNA, 21 nt, Artificial Sequence
  Guide RNA
gaucccgggccugucugcggg

SEQ ID NO: 14194 - RNA, 21 nt, Artificial Sequence
  Guide RNA
gaucccgggccugucuguggg

SEQ ID NO: 14195 - RNA, 21 nt, Artificial Sequence
  Guide RNA
gcagaucccgggccugucugc

SEQ ID NO: 14196 - RNA, 21 nt, Artificial Sequence
  Guide RNA
gcagaucccgggccugucugu

SEQ ID NO: 14197 - RNA, 21 nt, Artificial Sequence
  Guide RNA
gccagggcucccucccacaga

SEQ ID NO: 14198 - RNA, 21 nt, Artificial Sequence
  Guide RNA
gccagggcucccucccgcaga

SEQ ID NO: 14199 - RNA, 21 nt, Artificial Sequence
  Guide RNA
gccugucugcgggagggagcc

SEQ ID NO: 14200 - RNA, 21 nt, Artificial Sequence
  Guide RNA
gccugucugugggagggagcc

SEQ ID NO: 14201 - RNA, 21 nt, Artificial Sequence
  Guide RNA
gcucccucccacagacaggcc

SEQ ID NO: 14202 - RNA, 21 nt, Artificial Sequence
  Guide RNA
gcucccucccgcagacaggcc

SEQ ID NO: 14203 - RNA, 21 nt, Artificial Sequence
  Guide RNA
ggcagaucccgggccugucug

SEQ ID NO: 14204 - RNA, 21 nt, Artificial Sequence
  Guide RNA
ggccugucugcgggagggagc

SEQ ID NO: 14205 - RNA, 21 nt, Artificial Sequence
  Guide RNA
ggccugucugugggagggagc

SEQ ID NO: 14206 - RNA, 21 nt, Artificial Sequence
  Guide RNA
ggcucccucccacagacaggc

SEQ ID NO: 14207 - RNA, 21 nt, Artificial Sequence
  Guide RNA
ggcucccucccgcagacaggc

SEQ ID NO: 14208 - RNA, 21 nt, Artificial Sequence
  Guide RNA
gggccugucugcgggagggag

SEQ ID NO: 14209 - RNA, 21 nt, Artificial Sequence
  Guide RNA
gggccugucugugggagggag

SEQ ID NO: 14210 - RNA, 21 nt, Artificial Sequence
  Guide RNA
gggcucccucccacagacagg

SEQ ID NO: 14211 - RNA, 21 nt, Artificial Sequence
  Guide RNA
gggcucccucccgcagacagg

SEQ ID NO: 14212 - RNA, 21 nt, Artificial Sequence
  Guide RNA
gucugcgggagggagcccugg

SEQ ID NO: 14213 - RNA, 21 nt, Artificial Sequence
  Guide RNA
gucugugggagggagcccugg

SEQ ID NO: 14214 - RNA, 21 nt, Artificial Sequence
  Guide RNA
gugggagggagcccuggcgga

SEQ ID NO: 14215 - RNA, 21 nt, Artificial Sequence
  Guide RNA
ucccacagacaggcccgggau

SEQ ID NO: 14216 - RNA, 21 nt, Artificial Sequence
  Guide RNA
ucccgcagacaggcccgggau

SEQ ID NO: 14217 - RNA, 21 nt, Artificial Sequence
  Guide RNA
ucccgggccugucugcgggag

SEQ ID NO: 14218 - RNA, 21 nt, Artificial Sequence
  Guide RNA
ucccgggccugucugugggag

SEQ ID NO: 14219 - RNA, 21 nt, Artificial Sequence
  Guide RNA
ucccucccacagacaggcccg

SEQ ID NO: 14220 - RNA, 21 nt, Artificial Sequence
  Guide RNA
ucccucccgcagacaggcccg

SEQ ID NO: 14221 - RNA, 21 nt, Artificial Sequence
  Guide RNA
uccgccagggcucccucccac

SEQ ID NO: 14222 - RNA, 21 nt, Artificial Sequence
  Guide RNA
ucugcgggagggagcccuggc

SEQ ID NO: 14223 - RNA, 21 nt, Artificial Sequence
  Guide RNA
ucugugggagggagcccuggc

SEQ ID NO: 14224 - RNA, 21 nt, Artificial Sequence
  Guide RNA
uggcagaucccgggccugucu

SEQ ID NO: 14225 - RNA, 21 nt, Artificial Sequence
  Guide RNA
uggcuccgccagggcucccuc

SEQ ID NO: 14226 - RNA, 21 nt, Artificial Sequence
  Guide RNA
ugucugcgggagggagcccug

SEQ ID NO: 14227 - RNA, 21 nt, Artificial Sequence
  Guide RNA
ugucugugggagggagcccug

SEQ ID NO: 14228 - RNA, 21 nt, Artificial Sequence
  Guide RNA
ugugggagggagcccuggcgg

SEQ ID NO: 14229 - RNA, 21 nt, Artificial Sequence
  Guide RNA
uuggcuccgccagggcucccu

SEQ ID NO: 14230 - RNA, 22 nt, Artificial Sequence
  Guide RNA
agaucccgggccugucugcggg

SEQ ID NO: 14231 - RNA, 22 nt, Artificial Sequence
  Guide RNA
agaucccgggccugucuguggg

SEQ ID NO: 14232 - RNA, 22 nt, Artificial Sequence
  Guide RNA
agggcucccucccacagacagg

SEQ ID NO: 14233 - RNA, 22 nt, Artificial Sequence
  Guide RNA
agggcucccucccgcagacagg

SEQ ID NO: 14234 - RNA, 22 nt, Artificial Sequence
  Guide RNA
aucccgggccugucugcgggag

SEQ ID NO: 14235 - RNA, 22 nt, Artificial Sequence
  Guide RNA
aucccgggccugucugugggag

SEQ ID NO: 14236 - RNA, 22 nt, Artificial Sequence
  Guide RNA
auggcagaucccgggccugucu

SEQ ID NO: 14237 - RNA, 22 nt, Artificial Sequence
  Guide RNA
cacagacaggcccgggaucugc

SEQ ID NO: 14238 - RNA, 22 nt, Artificial Sequence
  Guide RNA
cagaucccgggccugucugcgg

SEQ ID NO: 14239 - RNA, 22 nt, Artificial Sequence
  Guide RNA
cagaucccgggccugucugugg

SEQ ID NO: 14240 - RNA, 22 nt, Artificial Sequence
  Guide RNA
cagggcucccucccacagacag

SEQ ID NO: 14241 - RNA, 22 nt, Artificial Sequence
  Guide RNA
cagggcucccucccgcagacag

SEQ ID NO: 14242 - RNA, 22 nt, Artificial Sequence
  Guide RNA
cauggcagaucccgggccuguc

SEQ ID NO: 14243 - RNA, 22 nt, Artificial Sequence
  Guide RNA
ccacagacaggcccgggaucug

SEQ ID NO: 14244 - RNA, 22 nt, Artificial Sequence
  Guide RNA
ccagggcucccucccacagaca

SEQ ID NO: 14245 - RNA, 22 nt, Artificial Sequence
  Guide RNA
ccagggcucccucccgcagaca

SEQ ID NO: 14246 - RNA, 22 nt, Artificial Sequence
  Guide RNA
ccauggcagaucccgggccugu

SEQ ID NO: 14247 - RNA, 22 nt, Artificial Sequence
  Guide RNA
cccacagacaggcccgggaucu

SEQ ID NO: 14248 - RNA, 22 nt, Artificial Sequence
  Guide RNA
cccgcagacaggcccgggaucu

SEQ ID NO: 14249 - RNA, 22 nt, Artificial Sequence
  Guide RNA
cccgggccugucugugggaggg

SEQ ID NO: 14250 - RNA, 22 nt, Artificial Sequence
  Guide RNA
cccucccacagacaggcccggg

SEQ ID NO: 14251 - RNA, 22 nt, Artificial Sequence
  Guide RNA
ccgcagacaggcccgggaucug

SEQ ID NO: 14252 - RNA, 22 nt, Artificial Sequence
  Guide RNA
ccgccagggcucccucccacag

SEQ ID NO: 14253 - RNA, 22 nt, Artificial Sequence
  Guide RNA
ccgggccugucugcgggaggga

SEQ ID NO: 14254 - RNA, 22 nt, Artificial Sequence
  Guide RNA
ccgggccugucugugggaggga

SEQ ID NO: 14255 - RNA, 22 nt, Artificial Sequence
  Guide RNA
ccucccacagacaggcccggga

SEQ ID NO: 14256 - RNA, 22 nt, Artificial Sequence
  Guide RNA
ccucccgcagacaggcccggga

SEQ ID NO: 14257 - RNA, 22 nt, Artificial Sequence
  Guide RNA
ccugucugcgggagggagcccu

SEQ ID NO: 14258 - RNA, 22 nt, Artificial Sequence
  Guide RNA
ccugucugugggagggagcccu

SEQ ID NO: 14259 - RNA, 22 nt, Artificial Sequence
  Guide RNA
cgcagacaggcccgggaucugc

SEQ ID NO: 14260 - RNA, 22 nt, Artificial Sequence
  Guide RNA
cgccagggcucccucccacaga

SEQ ID NO: 14261 - RNA, 22 nt, Artificial Sequence
  Guide RNA
cgccagggcucccucccgcaga

SEQ ID NO: 14262 - RNA, 22 nt, Artificial Sequence
  Guide RNA
cgggccugucugcgggagggag

SEQ ID NO: 14263 - RNA, 22 nt, Artificial Sequence
  Guide RNA
cgggccugucugugggagggag

SEQ ID NO: 14264 - RNA, 22 nt, Artificial Sequence
  Guide RNA
cucccacagacaggcccgggau

SEQ ID NO: 14265 - RNA, 22 nt, Artificial Sequence
  Guide RNA
cucccgcagacaggcccgggau

SEQ ID NO: 14266 - RNA, 22 nt, Artificial Sequence
  Guide RNA
cucccucccacagacaggcccg

SEQ ID NO: 14267 - RNA, 22 nt, Artificial Sequence
  Guide RNA
cucccucccgcagacaggcccg

SEQ ID NO: 14268 - RNA, 22 nt, Artificial Sequence
  Guide RNA
cuccgccagggcucccucccac

SEQ ID NO: 14269 - RNA, 22 nt, Artificial Sequence
  Guide RNA
cugucugcgggagggagcccug

SEQ ID NO: 14270 - RNA, 22 nt, Artificial Sequence
  Guide RNA
cugucugugggagggagcccug

SEQ ID NO: 14271 - RNA, 22 nt, Artificial Sequence
  Guide RNA
cugugggagggagcccuggcgg

SEQ ID NO: 14272 - RNA, 22 nt, Artificial Sequence
  Guide RNA
cuuggcuccgccagggcucccu

SEQ ID NO: 14273 - RNA, 22 nt, Artificial Sequence
  Guide RNA
gaucccgggccugucugcggga

SEQ ID NO: 14274 - RNA, 22 nt, Artificial Sequence
  Guide RNA
gaucccgggccugucuguggga

SEQ ID NO: 14275 - RNA, 22 nt, Artificial Sequence
  Guide RNA
gcagaucccgggccugucugcg

SEQ ID NO: 14276 - RNA, 22 nt, Artificial Sequence
  Guide RNA
gcagaucccgggccugucugug

SEQ ID NO: 14277 - RNA, 22 nt, Artificial Sequence
  Guide RNA
gccagggcucccucccacagac

SEQ ID NO: 14278 - RNA, 22 nt, Artificial Sequence
  Guide RNA
gccagggcucccucccgcagac

SEQ ID NO: 14279 - RNA, 22 nt, Artificial Sequence
  Guide RNA
gccugucugcgggagggagccc

SEQ ID NO: 14280 - RNA, 22 nt, Artificial Sequence
  Guide RNA
gccugucugugggagggagccc

SEQ ID NO: 14281 - RNA, 22 nt, Artificial Sequence
  Guide RNA
gcucccucccacagacaggccc

SEQ ID NO: 14282 - RNA, 22 nt, Artificial Sequence
  Guide RNA
gcucccucccgcagacaggccc

SEQ ID NO: 14283 - RNA, 22 nt, Artificial Sequence
  Guide RNA
gcuccgccagggcucccuccca

SEQ ID NO: 14284 - RNA, 22 nt, Artificial Sequence
  Guide RNA
ggcagaucccgggccugucugc

SEQ ID NO: 14285 - RNA, 22 nt, Artificial Sequence
  Guide RNA
ggcagaucccgggccugucugu

SEQ ID NO: 14286 - RNA, 22 nt, Artificial Sequence
  Guide RNA
ggccugucugcgggagggagcc

SEQ ID NO: 14287 - RNA, 22 nt, Artificial Sequence
  Guide RNA
ggccugucugugggagggagcc

SEQ ID NO: 14288 - RNA, 22 nt, Artificial Sequence
  Guide RNA
ggcucccucccacagacaggcc

SEQ ID NO: 14289 - RNA, 22 nt, Artificial Sequence
  Guide RNA
ggcucccucccgcagacaggcc

SEQ ID NO: 14290 - RNA, 22 nt, Artificial Sequence
  Guide RNA
gggccugucugcgggagggagc

SEQ ID NO: 14291 - RNA, 22 nt, Artificial Sequence
  Guide RNA
gggccugucugugggagggagc

SEQ ID NO: 14292 - RNA, 22 nt, Artificial Sequence
  Guide RNA
gggcucccucccacagacaggc

SEQ ID NO: 14293 - RNA, 22 nt, Artificial Sequence
  Guide RNA
gggcucccucccgcagacaggc

SEQ ID NO: 14294 - RNA, 22 nt, Artificial Sequence
  Guide RNA
gucugcgggagggagcccuggc

SEQ ID NO: 14295 - RNA, 22 nt, Artificial Sequence
  Guide RNA
gucugugggagggagcccuggc

SEQ ID NO: 14296 - RNA, 22 nt, Artificial Sequence
  Guide RNA
gugggagggagcccuggcggag

SEQ ID NO: 14297 - RNA, 22 nt, Artificial Sequence
  Guide RNA
ucccacagacaggcccgggauc

SEQ ID NO: 14298 - RNA, 22 nt, Artificial Sequence
  Guide RNA
ucccgcagacaggcccgggauc

SEQ ID NO: 14299 - RNA, 22 nt, Artificial Sequence
  Guide RNA
ucccgggccugucugcgggagg

SEQ ID NO: 14300 - RNA, 22 nt, Artificial Sequence
  Guide RNA
ucccgggccugucugugggagg

SEQ ID NO: 14301 - RNA, 22 nt, Artificial Sequence
  Guide RNA
ucccucccacagacaggcccgg

SEQ ID NO: 14302 - RNA, 22 nt, Artificial Sequence
  Guide RNA
ucccucccgcagacaggcccgg

SEQ ID NO: 14303 - RNA, 22 nt, Artificial Sequence
  Guide RNA
uccgccagggcucccucccaca

SEQ ID NO: 14304 - RNA, 22 nt, Artificial Sequence
  Guide RNA
uccgccagggcucccucccgca

SEQ ID NO: 14305 - RNA, 22 nt, Artificial Sequence
  Guide RNA
ucugcgggagggagcccuggcg

SEQ ID NO: 14306 - RNA, 22 nt, Artificial Sequence
  Guide RNA
ucugugggagggagcccuggcg

SEQ ID NO: 14307 - RNA, 22 nt, Artificial Sequence
  Guide RNA
ugcgggagggagcccuggcgga

SEQ ID NO: 14308 - RNA, 22 nt, Artificial Sequence
  Guide RNA
uggcagaucccgggccugucug

SEQ ID NO: 14309 - RNA, 22 nt, Artificial Sequence
  Guide RNA
uggcuccgccagggcucccucc

SEQ ID NO: 14310 - RNA, 22 nt, Artificial Sequence
  Guide RNA
ugucugcgggagggagcccugg

SEQ ID NO: 14311 - RNA, 22 nt, Artificial Sequence
  Guide RNA
ugucugugggagggagcccugg

SEQ ID NO: 14312 - RNA, 22 nt, Artificial Sequence
  Guide RNA
ugugggagggagcccuggcgga

SEQ ID NO: 14313 - RNA, 22 nt, Artificial Sequence
  Guide RNA
uuggcuccgccagggcucccuc

SEQ ID NO: 14314 - RNA, 20 nt, Artificial Sequence
  Guide RNA
aaaaaggagaaaagcuaagu

SEQ ID NO: 14315 - RNA, 20 nt, Artificial Sequence
  Guide RNA
aaaaggagaaaagcuaagua

SEQ ID NO: 14316 - RNA, 20 nt, Artificial Sequence
  Guide RNA
aaaggagaaaagcuaaguaa

SEQ ID NO: 14317 - RNA, 20 nt, Artificial Sequence
  Guide RNA
aaggagaaaagcuaaguaaa

SEQ ID NO: 14318 - RNA, 20 nt, Artificial Sequence
  Guide RNA
aagucagguucuaaaaaaga

SEQ ID NO: 14319 - RNA, 20 nt, Artificial Sequence
  Guide RNA
aagucagguucuaaaaagga

SEQ ID NO: 14320 - RNA, 20 nt, Artificial Sequence
  Guide RNA
acuuagcuuuucuccuuuuu

SEQ ID NO: 14321 - RNA, 20 nt, Artificial Sequence
  Guide RNA
agcuuuucuccuuuuuagaa

SEQ ID NO: 14322 - RNA, 20 nt, Artificial Sequence
  Guide RNA
aggagaaaagcuaaguaaau

SEQ ID NO: 14323 - RNA, 20 nt, Artificial Sequence
  Guide RNA
agguucuaaaaaggagaaaa

SEQ ID NO: 14324 - RNA, 20 nt, Artificial Sequence
  Guide RNA
agucagguucuaaaaaagag

SEQ ID NO: 14325 - RNA, 20 nt, Artificial Sequence
  Guide RNA
agucagguucuaaaaaggag

SEQ ID NO: 14326 - RNA, 20 nt, Artificial Sequence
  Guide RNA
auggaagucagguucuaaaa

SEQ ID NO: 14327 - RNA, 20 nt, Artificial Sequence
  Guide RNA
augggauuuacuuagcuuuu

SEQ ID NO: 14328 - RNA, 20 nt, Artificial Sequence
  Guide RNA
auuuacuuagcuuuucuccu

SEQ ID NO: 14329 - RNA, 20 nt, Artificial Sequence
  Guide RNA
cagguucuaaaaaagagaaa

SEQ ID NO: 14330 - RNA, 20 nt, Artificial Sequence
  Guide RNA
cagguucuaaaaaggagaaa

SEQ ID NO: 14331 - RNA, 20 nt, Artificial Sequence
  Guide RNA
cauggaagucagguucuaaa

SEQ ID NO: 14332 - RNA, 20 nt, Artificial Sequence
  Guide RNA
ccuuuuuagaaccugacuuc

SEQ ID NO: 14333 - RNA, 20 nt, Artificial Sequence
  Guide RNA
cuaaaaaggagaaaagcuaa

SEQ ID NO: 14334 - RNA, 20 nt, Artificial Sequence
  Guide RNA
cuccuuuuuagaaccugacu

SEQ ID NO: 14335 - RNA, 20 nt, Artificial Sequence
  Guide RNA
cucuuuuuuagaaccugacu

SEQ ID NO: 14336 - RNA, 20 nt, Artificial Sequence
  Guide RNA
cuuagcuuuucuccuuuuua

SEQ ID NO: 14337 - RNA, 20 nt, Artificial Sequence
  Guide RNA
cuuuucuccuuuuuagaacc

SEQ ID NO: 14338 - RNA, 20 nt, Artificial Sequence
  Guide RNA
cuuuucucuuuuuuagaacc

SEQ ID NO: 14339 - RNA, 20 nt, Artificial Sequence
  Guide RNA
cuuuuuuagaaccugacuuc

SEQ ID NO: 14340 - RNA, 20 nt, Artificial Sequence
  Guide RNA
gaagucagguucuaaaaaag

SEQ ID NO: 14341 - RNA, 20 nt, Artificial Sequence
  Guide RNA
gaagucagguucuaaaaagg

SEQ ID NO: 14342 - RNA, 20 nt, Artificial Sequence
  Guide RNA
gauuuacuuagcuuuucucc

SEQ ID NO: 14343 - RNA, 20 nt, Artificial Sequence
  Guide RNA
gauuuacuuagcuuuucucu

SEQ ID NO: 14344 - RNA, 20 nt, Artificial Sequence
  Guide RNA
gcauggaagucagguucuaa

SEQ ID NO: 14345 - RNA, 20 nt, Artificial Sequence
  Guide RNA
gcuuuucuccuuuuuagaac

SEQ ID NO: 14346 - RNA, 20 nt, Artificial Sequence
  Guide RNA
gcuuuucucuuuuuuagaac

SEQ ID NO: 14347 - RNA, 20 nt, Artificial Sequence
  Guide RNA
ggaagucagguucuaaaaaa

SEQ ID NO: 14348 - RNA, 20 nt, Artificial Sequence
  Guide RNA
ggaagucagguucuaaaaag

SEQ ID NO: 14349 - RNA, 20 nt, Artificial Sequence
  Guide RNA
ggauuuacuuagcuuuucuc

SEQ ID NO: 14350 - RNA, 20 nt, Artificial Sequence
  Guide RNA
gggauuuacuuagcuuuucu

SEQ ID NO: 14351 - RNA, 20 nt, Artificial Sequence
  Guide RNA
gguucuaaaaaagagaaaag

SEQ ID NO: 14352 - RNA, 20 nt, Artificial Sequence
  Guide RNA
gguucuaaaaaggagaaaag

SEQ ID NO: 14353 - RNA, 20 nt, Artificial Sequence
  Guide RNA
gucagguucuaaaaaagaga

SEQ ID NO: 14354 - RNA, 20 nt, Artificial Sequence
  Guide RNA
gucagguucuaaaaaggaga

SEQ ID NO: 14355 - RNA, 20 nt, Artificial Sequence
  Guide RNA
guucuaaaaaagagaaaagc

SEQ ID NO: 14356 - RNA, 20 nt, Artificial Sequence
  Guide RNA
guucuaaaaaggagaaaagc

SEQ ID NO: 14357 - RNA, 20 nt, Artificial Sequence
  Guide RNA
uaaaaaggagaaaagcuaag

SEQ ID NO: 14358 - RNA, 20 nt, Artificial Sequence
  Guide RNA
uacuuagcuuuucuccuuuu

SEQ ID NO: 14359 - RNA, 20 nt, Artificial Sequence
  Guide RNA
uagcuuuucuccuuuuuaga

SEQ ID NO: 14360 - RNA, 20 nt, Artificial Sequence
  Guide RNA
ucagguucuaaaaaagagaa

SEQ ID NO: 14361 - RNA, 20 nt, Artificial Sequence
  Guide RNA
ucagguucuaaaaaggagaa

SEQ ID NO: 14362 - RNA, 20 nt, Artificial Sequence
  Guide RNA
uccuuuuuagaaccugacuu

SEQ ID NO: 14363 - RNA, 20 nt, Artificial Sequence
  Guide RNA
ucuaaaaaggagaaaagcua

SEQ ID NO: 14364 - RNA, 20 nt, Artificial Sequence
  Guide RNA
ucuccuuuuuagaaccugac

SEQ ID NO: 14365 - RNA, 20 nt, Artificial Sequence
  Guide RNA
ucucuuuuuuagaaccugac

SEQ ID NO: 14366 - RNA, 20 nt, Artificial Sequence
  Guide RNA
ucuuuuuuagaaccugacuu

SEQ ID NO: 14367 - RNA, 20 nt, Artificial Sequence
  Guide RNA
uggaagucagguucuaaaaa

SEQ ID NO: 14368 - RNA, 20 nt, Artificial Sequence
  Guide RNA
ugggauuuacuuagcuuuuc

SEQ ID NO: 14369 - RNA, 20 nt, Artificial Sequence
  Guide RNA
uuacuuagcuuuucuccuuu

SEQ ID NO: 14370 - RNA, 20 nt, Artificial Sequence
  Guide RNA
uuagcuuuucuccuuuuuag

SEQ ID NO: 14371 - RNA, 20 nt, Artificial Sequence
  Guide RNA
uucuaaaaaggagaaaagcu

SEQ ID NO: 14372 - RNA, 20 nt, Artificial Sequence
  Guide RNA
uucuccuuuuuagaaccuga

SEQ ID NO: 14373 - RNA, 20 nt, Artificial Sequence
  Guide RNA
uucucuuuuuuagaaccuga

SEQ ID NO: 14374 - RNA, 20 nt, Artificial Sequence
  Guide RNA
uuuacuuagcuuuucuccuu

SEQ ID NO: 14375 - RNA, 20 nt, Artificial Sequence
  Guide RNA
uuucuccuuuuuagaaccug

SEQ ID NO: 14376 - RNA, 20 nt, Artificial Sequence
  Guide RNA
uuucucuuuuuuagaaccug

SEQ ID NO: 14377 - RNA, 20 nt, Artificial Sequence
  Guide RNA
uuuucuccuuuuuagaaccu

SEQ ID NO: 14378 - RNA, 21 nt, Artificial Sequence
  Guide RNA
aagucagguucuaaaaaagag

SEQ ID NO: 14379 - RNA, 21 nt, Artificial Sequence
  Guide RNA
aagucagguucuaaaaaggag

SEQ ID NO: 14380 - RNA, 21 nt, Artificial Sequence
  Guide RNA
agcuuuucuccuuuuuagaac

SEQ ID NO: 14381 - RNA, 21 nt, Artificial Sequence
  Guide RNA
aggagaaaagcuaaguaaauc

SEQ ID NO: 14382 - RNA, 21 nt, Artificial Sequence
  Guide RNA
agguucuaaaaaggagaaaag

SEQ ID NO: 14383 - RNA, 21 nt, Artificial Sequence
  Guide RNA
agucagguucuaaaaaagaga

SEQ ID NO: 14384 - RNA, 21 nt, Artificial Sequence
  Guide RNA
agucagguucuaaaaaggaga

SEQ ID NO: 14385 - RNA, 21 nt, Artificial Sequence
  Guide RNA
auggaagucagguucuaaaaa

SEQ ID NO: 14386 - RNA, 21 nt, Artificial Sequence
  Guide RNA
augggauuuacuuagcuuuuc

SEQ ID NO: 14387 - RNA, 21 nt, Artificial Sequence
  Guide RNA
cagguucuaaaaaggagaaaa

SEQ ID NO: 14388 - RNA, 21 nt, Artificial Sequence
  Guide RNA
cauggaagucagguucuaaaa

SEQ ID NO: 14389 - RNA, 21 nt, Artificial Sequence
  Guide RNA
ccuuuuuagaaccugacuucc

SEQ ID NO: 14390 - RNA, 21 nt, Artificial Sequence
  Guide RNA
cgcauggaagucagguucuaa

SEQ ID NO: 14391 - RNA, 21 nt, Artificial Sequence
  Guide RNA
cuaaaaaggagaaaagcuaag

SEQ ID NO: 14392 - RNA, 21 nt, Artificial Sequence
  Guide RNA
cuccuuuuuagaaccugacuu

SEQ ID NO: 14393 - RNA, 21 nt, Artificial Sequence
  Guide RNA
cucuuuuuuagaaccugacuu

SEQ ID NO: 14394 - RNA, 21 nt, Artificial Sequence
  Guide RNA
cuuagcuuuucuccuuuuuag

SEQ ID NO: 14395 - RNA, 21 nt, Artificial Sequence
  Guide RNA
cuuuucuccuuuuuagaaccu

SEQ ID NO: 14396 - RNA, 21 nt, Artificial Sequence
  Guide RNA
cuuuuuuagaaccugacuucc

SEQ ID NO: 14397 - RNA, 21 nt, Artificial Sequence
  Guide RNA
gaagucagguucuaaaaaaga

SEQ ID NO: 14398 - RNA, 21 nt, Artificial Sequence
  Guide RNA
gaagucagguucuaaaaagga

SEQ ID NO: 14399 - RNA, 21 nt, Artificial Sequence
  Guide RNA
gauuuacuuagcuuuucuccu

SEQ ID NO: 14400 - RNA, 21 nt, Artificial Sequence
  Guide RNA
gcauggaagucagguucuaaa

SEQ ID NO: 14401 - RNA, 21 nt, Artificial Sequence
  Guide RNA
gcuuuucuccuuuuuagaacc

SEQ ID NO: 14402 - RNA, 21 nt, Artificial Sequence
  Guide RNA
gcuuuucucuuuuuuagaacc

SEQ ID NO: 14403 - RNA, 21 nt, Artificial Sequence
  Guide RNA
ggaagucagguucuaaaaaag

SEQ ID NO: 14404 - RNA, 21 nt, Artificial Sequence
  Guide RNA
ggaagucagguucuaaaaagg

SEQ ID NO: 14405 - RNA, 21 nt, Artificial Sequence
  Guide RNA
ggauuuacuuagcuuuucucc

SEQ ID NO: 14406 - RNA, 21 nt, Artificial Sequence
  Guide RNA
ggauuuacuuagcuuuucucu

SEQ ID NO: 14407 - RNA, 21 nt, Artificial Sequence
  Guide RNA
gggauuuacuuagcuuuucuc

SEQ ID NO: 14408 - RNA, 21 nt, Artificial Sequence
  Guide RNA
gguucuaaaaaagagaaaagc

SEQ ID NO: 14409 - RNA, 21 nt, Artificial Sequence
  Guide RNA
gguucuaaaaaggagaaaagc

SEQ ID NO: 14410 - RNA, 21 nt, Artificial Sequence
  Guide RNA
gucagguucuaaaaaagagaa

SEQ ID NO: 14411 - RNA, 21 nt, Artificial Sequence
  Guide RNA
gucagguucuaaaaaggagaa

SEQ ID NO: 14412 - RNA, 21 nt, Artificial Sequence
  Guide RNA
guucuaaaaaggagaaaagcu

SEQ ID NO: 14413 - RNA, 21 nt, Artificial Sequence
  Guide RNA
ucagguucuaaaaaggagaaa

SEQ ID NO: 14414 - RNA, 21 nt, Artificial Sequence
  Guide RNA
uccuuuuuagaaccugacuuc

SEQ ID NO: 14415 - RNA, 21 nt, Artificial Sequence
  Guide RNA
ucuccuuuuuagaaccugacu

SEQ ID NO: 14416 - RNA, 21 nt, Artificial Sequence
  Guide RNA
ucucuuuuuuagaaccugacu

SEQ ID NO: 14417 - RNA, 21 nt, Artificial Sequence
  Guide RNA
ucuuuuuuagaaccugacuuc

SEQ ID NO: 14418 - RNA, 21 nt, Artificial Sequence
  Guide RNA
uggaagucagguucuaaaaaa

SEQ ID NO: 14419 - RNA, 21 nt, Artificial Sequence
  Guide RNA
uggaagucagguucuaaaaag

SEQ ID NO: 14420 - RNA, 21 nt, Artificial Sequence
  Guide RNA
ugggauuuacuuagcuuuucu

SEQ ID NO: 14421 - RNA, 21 nt, Artificial Sequence
  Guide RNA
uucuccuuuuuagaaccugac

SEQ ID NO: 14422 - RNA, 21 nt, Artificial Sequence
  Guide RNA
uucucuuuuuuagaaccugac

SEQ ID NO: 14423 - RNA, 21 nt, Artificial Sequence
  Guide RNA
uuucuccuuuuuagaaccuga

SEQ ID NO: 14424 - RNA, 21 nt, Artificial Sequence
  Guide RNA
uuuucuccuuuuuagaaccug

SEQ ID NO: 14425 - RNA, 22 nt, Artificial Sequence
  Guide RNA
aagagaaaagcuaaguaaaucc

SEQ ID NO: 14426 - RNA, 22 nt, Artificial Sequence
  Guide RNA
aaggagaaaagcuaaguaaauc

SEQ ID NO: 14427 - RNA, 22 nt, Artificial Sequence
  Guide RNA
aagucagguucuaaaaaagaga

SEQ ID NO: 14428 - RNA, 22 nt, Artificial Sequence
  Guide RNA
aagucagguucuaaaaaggaga

SEQ ID NO: 14429 - RNA, 22 nt, Artificial Sequence
  Guide RNA
acuuagcuuuucuccuuuuuag

SEQ ID NO: 14430 - RNA, 22 nt, Artificial Sequence
  Guide RNA
agcuuuucuccuuuuuagaacc

SEQ ID NO: 14431 - RNA, 22 nt, Artificial Sequence
  Guide RNA
agcuuuucucuuuuuuagaacc

SEQ ID NO: 14432 - RNA, 22 nt, Artificial Sequence
  Guide RNA
aggagaaaagcuaaguaaaucc

SEQ ID NO: 14433 - RNA, 22 nt, Artificial Sequence
  Guide RNA
agguucuaaaaaagagaaaagc

SEQ ID NO: 14434 - RNA, 22 nt, Artificial Sequence
  Guide RNA
agguucuaaaaaggagaaaagc

SEQ ID NO: 14435 - RNA, 22 nt, Artificial Sequence
  Guide RNA
agucagguucuaaaaaagagaa

SEQ ID NO: 14436 - RNA, 22 nt, Artificial Sequence
  Guide RNA
agucagguucuaaaaaggagaa

SEQ ID NO: 14437 - RNA, 22 nt, Artificial Sequence
  Guide RNA
auggaagucagguucuaaaaaa

SEQ ID NO: 14438 - RNA, 22 nt, Artificial Sequence
  Guide RNA
auggaagucagguucuaaaaag

SEQ ID NO: 14439 - RNA, 22 nt, Artificial Sequence
  Guide RNA
augggauuuacuuagcuuuucu

SEQ ID NO: 14440 - RNA, 22 nt, Artificial Sequence
  Guide RNA
cagguucuaaaaaagagaaaag

SEQ ID NO: 14441 - RNA, 22 nt, Artificial Sequence
  Guide RNA
cagguucuaaaaaggagaaaag

SEQ ID NO: 14442 - RNA, 22 nt, Artificial Sequence
  Guide RNA
cauggaagucagguucuaaaaa

SEQ ID NO: 14443 - RNA, 22 nt, Artificial Sequence
  Guide RNA
ccgcauggaagucagguucuaa

SEQ ID NO: 14444 - RNA, 22 nt, Artificial Sequence
  Guide RNA
ccuuuuuagaaccugacuucca

SEQ ID NO: 14445 - RNA, 22 nt, Artificial Sequence
  Guide RNA
cgcauggaagucagguucuaaa

SEQ ID NO: 14446 - RNA, 22 nt, Artificial Sequence
  Guide RNA
cuaaaaaggagaaaagcuaagu

SEQ ID NO: 14447 - RNA, 22 nt, Artificial Sequence
  Guide RNA
cuaugggauuuacuuagcuuuu

SEQ ID NO: 14448 - RNA, 22 nt, Artificial Sequence
  Guide RNA
cuccuuuuuagaaccugacuuc

SEQ ID NO: 14449 - RNA, 22 nt, Artificial Sequence
  Guide RNA
cucuuuuuuagaaccugacuuc

SEQ ID NO: 14450 - RNA, 22 nt, Artificial Sequence
  Guide RNA
cuuagcuuuucuccuuuuuaga

SEQ ID NO: 14451 - RNA, 22 nt, Artificial Sequence
  Guide RNA
cuuuucuccuuuuuagaaccug

SEQ ID NO: 14452 - RNA, 22 nt, Artificial Sequence
  Guide RNA
cuuuucucuuuuuuagaaccug

SEQ ID NO: 14453 - RNA, 22 nt, Artificial Sequence
  Guide RNA
cuuuuuuagaaccugacuucca

SEQ ID NO: 14454 - RNA, 22 nt, Artificial Sequence
  Guide RNA
gaagucagguucuaaaaaagag

SEQ ID NO: 14455 - RNA, 22 nt, Artificial Sequence
  Guide RNA
gaagucagguucuaaaaaggag

SEQ ID NO: 14456 - RNA, 22 nt, Artificial Sequence
  Guide RNA
gauuuacuuagcuuuucuccuu

SEQ ID NO: 14457 - RNA, 22 nt, Artificial Sequence
  Guide RNA
gcauggaagucagguucuaaaa

SEQ ID NO: 14458 - RNA, 22 nt, Artificial Sequence
  Guide RNA
gcuuuucuccuuuuuagaaccu

SEQ ID NO: 14459 - RNA, 22 nt, Artificial Sequence
  Guide RNA
gcuuuucucuuuuuuagaaccu

SEQ ID NO: 14460 - RNA, 22 nt, Artificial Sequence
  Guide RNA
ggaagucagguucuaaaaaaga

SEQ ID NO: 14461 - RNA, 22 nt, Artificial Sequence
  Guide RNA
ggaagucagguucuaaaaagga

SEQ ID NO: 14462 - RNA, 22 nt, Artificial Sequence
  Guide RNA
ggauuuacuuagcuuuucuccu

SEQ ID NO: 14463 - RNA, 22 nt, Artificial Sequence
  Guide RNA
ggauuuacuuagcuuuucucuu

SEQ ID NO: 14464 - RNA, 22 nt, Artificial Sequence
  Guide RNA
gggauuuacuuagcuuuucucc

SEQ ID NO: 14465 - RNA, 22 nt, Artificial Sequence
  Guide RNA
gggauuuacuuagcuuuucucu

SEQ ID NO: 14466 - RNA, 22 nt, Artificial Sequence
  Guide RNA
gguucuaaaaaagagaaaagcu

SEQ ID NO: 14467 - RNA, 22 nt, Artificial Sequence
  Guide RNA
gguucuaaaaaggagaaaagcu

SEQ ID NO: 14468 - RNA, 22 nt, Artificial Sequence
  Guide RNA
gucagguucuaaaaaagagaaa

SEQ ID NO: 14469 - RNA, 22 nt, Artificial Sequence
  Guide RNA
gucagguucuaaaaaggagaaa

SEQ ID NO: 14470 - RNA, 22 nt, Artificial Sequence
  Guide RNA
guucuaaaaaggagaaaagcua

SEQ ID NO: 14471 - RNA, 22 nt, Artificial Sequence
  Guide RNA
uagcuuuucuccuuuuuagaac

SEQ ID NO: 14472 - RNA, 22 nt, Artificial Sequence
  Guide RNA
uaugggauuuacuuagcuuuuc

SEQ ID NO: 14473 - RNA, 22 nt, Artificial Sequence
  Guide RNA
ucagguucuaaaaaggagaaaa

SEQ ID NO: 14474 - RNA, 22 nt, Artificial Sequence
  Guide RNA
uccuuuuuagaaccugacuucc

SEQ ID NO: 14475 - RNA, 22 nt, Artificial Sequence
  Guide RNA
ucuaaaaaggagaaaagcuaag

SEQ ID NO: 14476 - RNA, 22 nt, Artificial Sequence
  Guide RNA
ucuccuuuuuagaaccugacuu

SEQ ID NO: 14477 - RNA, 22 nt, Artificial Sequence
  Guide RNA
ucucuuuuuuagaaccugacuu

SEQ ID NO: 14478 - RNA, 22 nt, Artificial Sequence
  Guide RNA
ucuuuuuuagaaccugacuucc

SEQ ID NO: 14479 - RNA, 22 nt, Artificial Sequence
  Guide RNA
uggaagucagguucuaaaaaag

SEQ ID NO: 14480 - RNA, 22 nt, Artificial Sequence
  Guide RNA
uggaagucagguucuaaaaagg

SEQ ID NO: 14481 - RNA, 22 nt, Artificial Sequence
  Guide RNA
ugggauuuacuuagcuuuucuc

SEQ ID NO: 14482 - RNA, 22 nt, Artificial Sequence
  Guide RNA
uucuccuuuuuagaaccugacu

SEQ ID NO: 14483 - RNA, 22 nt, Artificial Sequence
  Guide RNA
uucucuuuuuuagaaccugacu

SEQ ID NO: 14484 - RNA, 22 nt, Artificial Sequence
  Guide RNA
uuucuccuuuuuagaaccugac

SEQ ID NO: 14485 - RNA, 22 nt, Artificial Sequence
  Guide RNA
uuucucuuuuuuagaaccugac

SEQ ID NO: 14486 - RNA, 22 nt, Artificial Sequence
  Guide RNA
uuuucuccuuuuuagaaccuga

SEQ ID NO: 14487 - RNA, 20 nt, Artificial Sequence
  Guide RNA
aagcacguuuccccaguggc

SEQ ID NO: 14488 - RNA, 20 nt, Artificial Sequence
  Guide RNA
aagcacguuuccucaguggc

SEQ ID NO: 14489 - RNA, 20 nt, Artificial Sequence
  Guide RNA
accaugaggccacugaggaa

SEQ ID NO: 14490 - RNA, 20 nt, Artificial Sequence
  Guide RNA
accaugaggccacuggggaa

SEQ ID NO: 14491 - RNA, 20 nt, Artificial Sequence
  Guide RNA
acguuuccccaguggccuca

SEQ ID NO: 14492 - RNA, 20 nt, Artificial Sequence
  Guide RNA
acguuuccucaguggccuca

SEQ ID NO: 14493 - RNA, 20 nt, Artificial Sequence
  Guide RNA
acugaggaaacgugcuucug

SEQ ID NO: 14494 - RNA, 20 nt, Artificial Sequence
  Guide RNA
acuggggaaacgugcuucug

SEQ ID NO: 14495 - RNA, 20 nt, Artificial Sequence
  Guide RNA
agaagcacguuuccccagug

SEQ ID NO: 14496 - RNA, 20 nt, Artificial Sequence
  Guide RNA
agaagcacguuuccucagug

SEQ ID NO: 14497 - RNA, 20 nt, Artificial Sequence
  Guide RNA
agcacguuuccccaguggcc

SEQ ID NO: 14498 - RNA, 20 nt, Artificial Sequence
  Guide RNA
agcacguuuccucaguggcc

SEQ ID NO: 14499 - RNA, 20 nt, Artificial Sequence
  Guide RNA
agcagaagcacguuucccca

SEQ ID NO: 14500 - RNA, 20 nt, Artificial Sequence
  Guide RNA
agcagaagcacguuuccuca

SEQ ID NO: 14501 - RNA, 20 nt, Artificial Sequence
  Guide RNA
aggccacugaggaaacgugc

SEQ ID NO: 14502 - RNA, 20 nt, Artificial Sequence
  Guide RNA
aggccacuggggaaacgugc

SEQ ID NO: 14503 - RNA, 20 nt, Artificial Sequence
  Guide RNA
augagcagaagcacguuucc

SEQ ID NO: 14504 - RNA, 20 nt, Artificial Sequence
  Guide RNA
augaggccacugaggaaacg

SEQ ID NO: 14505 - RNA, 20 nt, Artificial Sequence
  Guide RNA
augaggccacuggggaaacg

SEQ ID NO: 14506 - RNA, 20 nt, Artificial Sequence
  Guide RNA
caccaugaggccacugagga

SEQ ID NO: 14507 - RNA, 20 nt, Artificial Sequence
  Guide RNA
caccaugaggccacugggga

SEQ ID NO: 14508 - RNA, 20 nt, Artificial Sequence
  Guide RNA
cacguuuccccaguggccuc

SEQ ID NO: 14509 - RNA, 20 nt, Artificial Sequence
  Guide RNA
cacguuuccucaguggccuc

SEQ ID NO: 14510 - RNA, 20 nt, Artificial Sequence
  Guide RNA
cacugaggaaacgugcuucu

SEQ ID NO: 14511 - RNA, 20 nt, Artificial Sequence
  Guide RNA
cacuggggaaacgugcuucu

SEQ ID NO: 14512 - RNA, 20 nt, Artificial Sequence
  Guide RNA
cagaagcacguuuccccagu

SEQ ID NO: 14513 - RNA, 20 nt, Artificial Sequence
  Guide RNA
cagaagcacguuuccucagu

SEQ ID NO: 14514 - RNA, 20 nt, Artificial Sequence
  Guide RNA
caugagcagaagcacguuuc

SEQ ID NO: 14515 - RNA, 20 nt, Artificial Sequence
  Guide RNA
caugaggccacugaggaaac

SEQ ID NO: 14516 - RNA, 20 nt, Artificial Sequence
  Guide RNA
caugaggccacuggggaaac

SEQ ID NO: 14517 - RNA, 20 nt, Artificial Sequence
  Guide RNA
ccacugaggaaacgugcuuc

SEQ ID NO: 14518 - RNA, 20 nt, Artificial Sequence
  Guide RNA
ccacuggggaaacgugcuuc

SEQ ID NO: 14519 - RNA, 20 nt, Artificial Sequence
  Guide RNA
ccaugagcagaagcacguuu

SEQ ID NO: 14520 - RNA, 20 nt, Artificial Sequence
  Guide RNA
ccaugaggccacugaggaaa

SEQ ID NO: 14521 - RNA, 20 nt, Artificial Sequence
  Guide RNA
ccaugaggccacuggggaaa

SEQ ID NO: 14522 - RNA, 20 nt, Artificial Sequence
  Guide RNA
cccaguggccucauggugcg

SEQ ID NO: 14523 - RNA, 20 nt, Artificial Sequence
  Guide RNA
ccccaguggccucauggugc

SEQ ID NO: 14524 - RNA, 20 nt, Artificial Sequence
  Guide RNA
ccgcaccaugaggccacuga

SEQ ID NO: 14525 - RNA, 20 nt, Artificial Sequence
  Guide RNA
ccgcaccaugaggccacugg

SEQ ID NO: 14526 - RNA, 20 nt, Artificial Sequence
  Guide RNA
ccucaguggccucauggugc

SEQ ID NO: 14527 - RNA, 20 nt, Artificial Sequence
  Guide RNA
cgcaccaugaggccacugag

SEQ ID NO: 14528 - RNA, 20 nt, Artificial Sequence
  Guide RNA
cgcaccaugaggccacuggg

SEQ ID NO: 14529 - RNA, 20 nt, Artificial Sequence
  Guide RNA
cguuuccccaguggccucau

SEQ ID NO: 14530 - RNA, 20 nt, Artificial Sequence
  Guide RNA
cguuuccucaguggccucau

SEQ ID NO: 14531 - RNA, 20 nt, Artificial Sequence
  Guide RNA
cucaguggccucauggugcg

SEQ ID NO: 14532 - RNA, 20 nt, Artificial Sequence
  Guide RNA
cugaggaaacgugcuucugc

SEQ ID NO: 14533 - RNA, 20 nt, Artificial Sequence
  Guide RNA
cuggggaaacgugcuucugc

SEQ ID NO: 14534 - RNA, 20 nt, Artificial Sequence
  Guide RNA
gaagcacguuuccccagugg

SEQ ID NO: 14535 - RNA, 20 nt, Artificial Sequence
  Guide RNA
gaagcacguuuccucagugg

SEQ ID NO: 14536 - RNA, 20 nt, Artificial Sequence
  Guide RNA
gagcagaagcacguuucccc

SEQ ID NO: 14537 - RNA, 20 nt, Artificial Sequence
  Guide RNA
gagcagaagcacguuuccuc

SEQ ID NO: 14538 - RNA, 20 nt, Artificial Sequence
  Guide RNA
gaggaaacgugcuucugcuc

SEQ ID NO: 14539 - RNA, 20 nt, Artificial Sequence
  Guide RNA
gaggccacugaggaaacgug

SEQ ID NO: 14540 - RNA, 20 nt, Artificial Sequence
  Guide RNA
gaggccacuggggaaacgug

SEQ ID NO: 14541 - RNA, 20 nt, Artificial Sequence
  Guide RNA
gcaccaugaggccacugagg

SEQ ID NO: 14542 - RNA, 20 nt, Artificial Sequence
  Guide RNA
gcaccaugaggccacugggg

SEQ ID NO: 14543 - RNA, 20 nt, Artificial Sequence
  Guide RNA
gcacguuuccccaguggccu

SEQ ID NO: 14544 - RNA, 20 nt, Artificial Sequence
  Guide RNA
gcacguuuccucaguggccu

SEQ ID NO: 14545 - RNA, 20 nt, Artificial Sequence
  Guide RNA
gcagaagcacguuuccccag

SEQ ID NO: 14546 - RNA, 20 nt, Artificial Sequence
  Guide RNA
gcagaagcacguuuccucag

SEQ ID NO: 14547 - RNA, 20 nt, Artificial Sequence
  Guide RNA
gccacugaggaaacgugcuu

SEQ ID NO: 14548 - RNA, 20 nt, Artificial Sequence
  Guide RNA
gccacuggggaaacgugcuu

SEQ ID NO: 14549 - RNA, 20 nt, Artificial Sequence
  Guide RNA
ggccacugaggaaacgugcu

SEQ ID NO: 14550 - RNA, 20 nt, Artificial Sequence
  Guide RNA
ggccacuggggaaacgugcu

SEQ ID NO: 14551 - RNA, 20 nt, Artificial Sequence
  Guide RNA
ggggaaacgugcuucugcuc

SEQ ID NO: 14552 - RNA, 20 nt, Artificial Sequence
  Guide RNA
guccgcaccaugaggccacu

SEQ ID NO: 14553 - RNA, 20 nt, Artificial Sequence
  Guide RNA
guguccgcaccaugaggcca

SEQ ID NO: 14554 - RNA, 20 nt, Artificial Sequence
  Guide RNA
guuuccccaguggccucaug

SEQ ID NO: 14555 - RNA, 20 nt, Artificial Sequence
  Guide RNA
guuuccucaguggccucaug

SEQ ID NO: 14556 - RNA, 20 nt, Artificial Sequence
  Guide RNA
uccaugagcagaagcacguu

SEQ ID NO: 14557 - RNA, 20 nt, Artificial Sequence
  Guide RNA
uccccaguggccucauggug

SEQ ID NO: 14558 - RNA, 20 nt, Artificial Sequence
  Guide RNA
uccgcaccaugaggccacug

SEQ ID NO: 14559 - RNA, 20 nt, Artificial Sequence
  Guide RNA
uccucaguggccucauggug

SEQ ID NO: 14560 - RNA, 20 nt, Artificial Sequence
  Guide RNA
ugagcagaagcacguuuccc

SEQ ID NO: 14561 - RNA, 20 nt, Artificial Sequence
  Guide RNA
ugagcagaagcacguuuccu

SEQ ID NO: 14562 - RNA, 20 nt, Artificial Sequence
  Guide RNA
ugaggaaacgugcuucugcu

SEQ ID NO: 14563 - RNA, 20 nt, Artificial Sequence
  Guide RNA
ugaggccacugaggaaacgu

SEQ ID NO: 14564 - RNA, 20 nt, Artificial Sequence
  Guide RNA
ugaggccacuggggaaacgu

SEQ ID NO: 14565 - RNA, 20 nt, Artificial Sequence
  Guide RNA
uggggaaacgugcuucugcu

SEQ ID NO: 14566 - RNA, 20 nt, Artificial Sequence
  Guide RNA
uguccgcaccaugaggccac

SEQ ID NO: 14567 - RNA, 20 nt, Artificial Sequence
  Guide RNA
uuccccaguggccucauggu

SEQ ID NO: 14568 - RNA, 20 nt, Artificial Sequence
  Guide RNA
uuccucaguggccucauggu

SEQ ID NO: 14569 - RNA, 20 nt, Artificial Sequence
  Guide RNA
uuuccccaguggccucaugg

SEQ ID NO: 14570 - RNA, 20 nt, Artificial Sequence
  Guide RNA
uuuccucaguggccucaugg

SEQ ID NO: 14571 - RNA, 21 nt, Artificial Sequence
  Guide RNA
aagcacguuuccccaguggcc

SEQ ID NO: 14572 - RNA, 21 nt, Artificial Sequence
  Guide RNA
aagcacguuuccucaguggcc

SEQ ID NO: 14573 - RNA, 21 nt, Artificial Sequence
  Guide RNA
accaugaggccacugaggaaa

SEQ ID NO: 14574 - RNA, 21 nt, Artificial Sequence
  Guide RNA
accaugaggccacuggggaaa

SEQ ID NO: 14575 - RNA, 21 nt, Artificial Sequence
  Guide RNA
acguuuccccaguggccucau

SEQ ID NO: 14576 - RNA, 21 nt, Artificial Sequence
  Guide RNA
acguuuccucaguggccucau

SEQ ID NO: 14577 - RNA, 21 nt, Artificial Sequence
  Guide RNA
acugaggaaacgugcuucugc

SEQ ID NO: 14578 - RNA, 21 nt, Artificial Sequence
  Guide RNA
acuggggaaacgugcuucugc

SEQ ID NO: 14579 - RNA, 21 nt, Artificial Sequence
  Guide RNA
agaagcacguuuccccagugg

SEQ ID NO: 14580 - RNA, 21 nt, Artificial Sequence
  Guide RNA
agaagcacguuuccucagugg

SEQ ID NO: 14581 - RNA, 21 nt, Artificial Sequence
  Guide RNA
agcacguuuccccaguggccu

SEQ ID NO: 14582 - RNA, 21 nt, Artificial Sequence
  Guide RNA
agcacguuuccucaguggccu

SEQ ID NO: 14583 - RNA, 21 nt, Artificial Sequence
  Guide RNA
agcagaagcacguuuccccag

SEQ ID NO: 14584 - RNA, 21 nt, Artificial Sequence
  Guide RNA
agcagaagcacguuuccucag

SEQ ID NO: 14585 - RNA, 21 nt, Artificial Sequence
  Guide RNA
aggccacugaggaaacgugcu

SEQ ID NO: 14586 - RNA, 21 nt, Artificial Sequence
  Guide RNA
aggccacuggggaaacgugcu

SEQ ID NO: 14587 - RNA, 21 nt, Artificial Sequence
  Guide RNA
augagcagaagcacguuuccc

SEQ ID NO: 14588 - RNA, 21 nt, Artificial Sequence
  Guide RNA
augagcagaagcacguuuccu

SEQ ID NO: 14589 - RNA, 21 nt, Artificial Sequence
  Guide RNA
augaggccacugaggaaacgu

SEQ ID NO: 14590 - RNA, 21 nt, Artificial Sequence
  Guide RNA
augaggccacuggggaaacgu

SEQ ID NO: 14591 - RNA, 21 nt, Artificial Sequence
  Guide RNA
caccaugaggccacugaggaa

SEQ ID NO: 14592 - RNA, 21 nt, Artificial Sequence
  Guide RNA
caccaugaggccacuggggaa

SEQ ID NO: 14593 - RNA, 21 nt, Artificial Sequence
  Guide RNA
cacguuuccccaguggccuca

SEQ ID NO: 14594 - RNA, 21 nt, Artificial Sequence
  Guide RNA
cacguuuccucaguggccuca

SEQ ID NO: 14595 - RNA, 21 nt, Artificial Sequence
  Guide RNA
cacugaggaaacgugcuucug

SEQ ID NO: 14596 - RNA, 21 nt, Artificial Sequence
  Guide RNA
cacuggggaaacgugcuucug

SEQ ID NO: 14597 - RNA, 21 nt, Artificial Sequence
  Guide RNA
cagaagcacguuuccccagug

SEQ ID NO: 14598 - RNA, 21 nt, Artificial Sequence
  Guide RNA
cagaagcacguuuccucagug

SEQ ID NO: 14599 - RNA, 21 nt, Artificial Sequence
  Guide RNA
caugagcagaagcacguuucc

SEQ ID NO: 14600 - RNA, 21 nt, Artificial Sequence
  Guide RNA
caugaggccacugaggaaacg

SEQ ID NO: 14601 - RNA, 21 nt, Artificial Sequence
  Guide RNA
caugaggccacuggggaaacg

SEQ ID NO: 14602 - RNA, 21 nt, Artificial Sequence
  Guide RNA
ccacugaggaaacgugcuucu

SEQ ID NO: 14603 - RNA, 21 nt, Artificial Sequence
  Guide RNA
ccacuggggaaacgugcuucu

SEQ ID NO: 14604 - RNA, 21 nt, Artificial Sequence
  Guide RNA
ccaugagcagaagcacguuuc

SEQ ID NO: 14605 - RNA, 21 nt, Artificial Sequence
  Guide RNA
ccaugaggccacugaggaaac

SEQ ID NO: 14606 - RNA, 21 nt, Artificial Sequence
  Guide RNA
ccaugaggccacuggggaaac

SEQ ID NO: 14607 - RNA, 21 nt, Artificial Sequence
  Guide RNA
cccaguggccucauggugcgg

SEQ ID NO: 14608 - RNA, 21 nt, Artificial Sequence
  Guide RNA
ccccaguggccucauggugcg

SEQ ID NO: 14609 - RNA, 21 nt, Artificial Sequence
  Guide RNA
ccgcaccaugaggccacugag

SEQ ID NO: 14610 - RNA, 21 nt, Artificial Sequence
  Guide RNA
ccgcaccaugaggccacuggg

SEQ ID NO: 14611 - RNA, 21 nt, Artificial Sequence
  Guide RNA
ccucaguggccucauggugcg

SEQ ID NO: 14612 - RNA, 21 nt, Artificial Sequence
  Guide RNA
cgcaccaugaggccacugagg

SEQ ID NO: 14613 - RNA, 21 nt, Artificial Sequence
  Guide RNA
cgcaccaugaggccacugggg

SEQ ID NO: 14614 - RNA, 21 nt, Artificial Sequence
  Guide RNA
cguuuccccaguggccucaug

SEQ ID NO: 14615 - RNA, 21 nt, Artificial Sequence
  Guide RNA
cguuuccucaguggccucaug

SEQ ID NO: 14616 - RNA, 21 nt, Artificial Sequence
  Guide RNA
cucaguggccucauggugcgg

SEQ ID NO: 14617 - RNA, 21 nt, Artificial Sequence
  Guide RNA
cugaggaaacgugcuucugcu

SEQ ID NO: 14618 - RNA, 21 nt, Artificial Sequence
  Guide RNA
cuggggaaacgugcuucugcu

SEQ ID NO: 14619 - RNA, 21 nt, Artificial Sequence
  Guide RNA
gaagcacguuuccccaguggc

SEQ ID NO: 14620 - RNA, 21 nt, Artificial Sequence
  Guide RNA
gaagcacguuuccucaguggc

SEQ ID NO: 14621 - RNA, 21 nt, Artificial Sequence
  Guide RNA
gagcagaagcacguuucccca

SEQ ID NO: 14622 - RNA, 21 nt, Artificial Sequence
  Guide RNA
gagcagaagcacguuuccuca

SEQ ID NO: 14623 - RNA, 21 nt, Artificial Sequence
  Guide RNA
gaggaaacgugcuucugcuca

SEQ ID NO: 14624 - RNA, 21 nt, Artificial Sequence
  Guide RNA
gaggccacugaggaaacgugc

SEQ ID NO: 14625 - RNA, 21 nt, Artificial Sequence
  Guide RNA
gaggccacuggggaaacgugc

SEQ ID NO: 14626 - RNA, 21 nt, Artificial Sequence
  Guide RNA
gcaccaugaggccacugagga

SEQ ID NO: 14627 - RNA, 21 nt, Artificial Sequence
  Guide RNA
gcaccaugaggccacugggga

SEQ ID NO: 14628 - RNA, 21 nt, Artificial Sequence
  Guide RNA
gcacguuuccccaguggccuc

SEQ ID NO: 14629 - RNA, 21 nt, Artificial Sequence
  Guide RNA
gcacguuuccucaguggccuc

SEQ ID NO: 14630 - RNA, 21 nt, Artificial Sequence
  Guide RNA
gcagaagcacguuuccccagu

SEQ ID NO: 14631 - RNA, 21 nt, Artificial Sequence
  Guide RNA
gcagaagcacguuuccucagu

SEQ ID NO: 14632 - RNA, 21 nt, Artificial Sequence
  Guide RNA
gccacugaggaaacgugcuuc

SEQ ID NO: 14633 - RNA, 21 nt, Artificial Sequence
  Guide RNA
gccacuggggaaacgugcuuc

SEQ ID NO: 14634 - RNA, 21 nt, Artificial Sequence
  Guide RNA
ggccacugaggaaacgugcuu

SEQ ID NO: 14635 - RNA, 21 nt, Artificial Sequence
  Guide RNA
ggccacuggggaaacgugcuu

SEQ ID NO: 14636 - RNA, 21 nt, Artificial Sequence
  Guide RNA
ggggaaacgugcuucugcuca

SEQ ID NO: 14637 - RNA, 21 nt, Artificial Sequence
  Guide RNA
gguguccgcaccaugaggcca

SEQ ID NO: 14638 - RNA, 21 nt, Artificial Sequence
  Guide RNA
guccaugagcagaagcacguu

SEQ ID NO: 14639 - RNA, 21 nt, Artificial Sequence
  Guide RNA
guccgcaccaugaggccacug

SEQ ID NO: 14640 - RNA, 21 nt, Artificial Sequence
  Guide RNA
guguccgcaccaugaggccac

SEQ ID NO: 14641 - RNA, 21 nt, Artificial Sequence
  Guide RNA
guuuccccaguggccucaugg

SEQ ID NO: 14642 - RNA, 21 nt, Artificial Sequence
  Guide RNA
guuuccucaguggccucaugg

SEQ ID NO: 14643 - RNA, 21 nt, Artificial Sequence
  Guide RNA
uccaugagcagaagcacguuu

SEQ ID NO: 14644 - RNA, 21 nt, Artificial Sequence
  Guide RNA
uccccaguggccucauggugc

SEQ ID NO: 14645 - RNA, 21 nt, Artificial Sequence
  Guide RNA
uccgcaccaugaggccacuga

SEQ ID NO: 14646 - RNA, 21 nt, Artificial Sequence
  Guide RNA
uccgcaccaugaggccacugg

SEQ ID NO: 14647 - RNA, 21 nt, Artificial Sequence
  Guide RNA
uccucaguggccucauggugc

SEQ ID NO: 14648 - RNA, 21 nt, Artificial Sequence
  Guide RNA
ugagcagaagcacguuucccc

SEQ ID NO: 14649 - RNA, 21 nt, Artificial Sequence
  Guide RNA
ugagcagaagcacguuuccuc

SEQ ID NO: 14650 - RNA, 21 nt, Artificial Sequence
  Guide RNA
ugaggaaacgugcuucugcuc

SEQ ID NO: 14651 - RNA, 21 nt, Artificial Sequence
  Guide RNA
ugaggccacugaggaaacgug

SEQ ID NO: 14652 - RNA, 21 nt, Artificial Sequence
  Guide RNA
ugaggccacuggggaaacgug

SEQ ID NO: 14653 - RNA, 21 nt, Artificial Sequence
  Guide RNA
uggggaaacgugcuucugcuc

SEQ ID NO: 14654 - RNA, 21 nt, Artificial Sequence
  Guide RNA
uguccgcaccaugaggccacu

SEQ ID NO: 14655 - RNA, 21 nt, Artificial Sequence
  Guide RNA
uuccccaguggccucauggug

SEQ ID NO: 14656 - RNA, 21 nt, Artificial Sequence
  Guide RNA
uuccucaguggccucauggug

SEQ ID NO: 14657 - RNA, 21 nt, Artificial Sequence
  Guide RNA
uuuccccaguggccucauggu

SEQ ID NO: 14658 - RNA, 21 nt, Artificial Sequence
  Guide RNA
uuuccucaguggccucauggu

SEQ ID NO: 14659 - RNA, 22 nt, Artificial Sequence
  Guide RNA
aagcacguuuccccaguggccu

SEQ ID NO: 14660 - RNA, 22 nt, Artificial Sequence
  Guide RNA
aagcacguuuccucaguggccu

SEQ ID NO: 14661 - RNA, 22 nt, Artificial Sequence
  Guide RNA
accaugaggccacugaggaaac

SEQ ID NO: 14662 - RNA, 22 nt, Artificial Sequence
  Guide RNA
accaugaggccacuggggaaac

SEQ ID NO: 14663 - RNA, 22 nt, Artificial Sequence
  Guide RNA
acguuuccccaguggccucaug

SEQ ID NO: 14664 - RNA, 22 nt, Artificial Sequence
  Guide RNA
acguuuccucaguggccucaug

SEQ ID NO: 14665 - RNA, 22 nt, Artificial Sequence
  Guide RNA
acugaggaaacgugcuucugcu

SEQ ID NO: 14666 - RNA, 22 nt, Artificial Sequence
  Guide RNA
acuggggaaacgugcuucugcu

SEQ ID NO: 14667 - RNA, 22 nt, Artificial Sequence
  Guide RNA
agaagcacguuuccccaguggc

SEQ ID NO: 14668 - RNA, 22 nt, Artificial Sequence
  Guide RNA
agaagcacguuuccucaguggc

SEQ ID NO: 14669 - RNA, 22 nt, Artificial Sequence
  Guide RNA
agcacguuuccccaguggccuc

SEQ ID NO: 14670 - RNA, 22 nt, Artificial Sequence
  Guide RNA
agcacguuuccucaguggccuc

SEQ ID NO: 14671 - RNA, 22 nt, Artificial Sequence
  Guide RNA
agcagaagcacguuuccccagu

SEQ ID NO: 14672 - RNA, 22 nt, Artificial Sequence
  Guide RNA
agcagaagcacguuuccucagu

SEQ ID NO: 14673 - RNA, 22 nt, Artificial Sequence
  Guide RNA
aggccacugaggaaacgugcuu

SEQ ID NO: 14674 - RNA, 22 nt, Artificial Sequence
  Guide RNA
aggccacuggggaaacgugcuu

SEQ ID NO: 14675 - RNA, 22 nt, Artificial Sequence
  Guide RNA
augagcagaagcacguuucccc

SEQ ID NO: 14676 - RNA, 22 nt, Artificial Sequence
  Guide RNA
augagcagaagcacguuuccuc

SEQ ID NO: 14677 - RNA, 22 nt, Artificial Sequence
  Guide RNA
augaggccacugaggaaacgug

SEQ ID NO: 14678 - RNA, 22 nt, Artificial Sequence
  Guide RNA
augaggccacuggggaaacgug

SEQ ID NO: 14679 - RNA, 22 nt, Artificial Sequence
  Guide RNA
caccaugaggccacugaggaaa

SEQ ID NO: 14680 - RNA, 22 nt, Artificial Sequence
  Guide RNA
caccaugaggccacuggggaaa

SEQ ID NO: 14681 - RNA, 22 nt, Artificial Sequence
  Guide RNA
cacguuuccccaguggccucau

SEQ ID NO: 14682 - RNA, 22 nt, Artificial Sequence
  Guide RNA
cacguuuccucaguggccucau

SEQ ID NO: 14683 - RNA, 22 nt, Artificial Sequence
  Guide RNA
cacugaggaaacgugcuucugc

SEQ ID NO: 14684 - RNA, 22 nt, Artificial Sequence
  Guide RNA
cacuggggaaacgugcuucugc

SEQ ID NO: 14685 - RNA, 22 nt, Artificial Sequence
  Guide RNA
cagaagcacguuuccccagugg

SEQ ID NO: 14686 - RNA, 22 nt, Artificial Sequence
  Guide RNA
cagaagcacguuuccucagugg

SEQ ID NO: 14687 - RNA, 22 nt, Artificial Sequence
  Guide RNA
caugagcagaagcacguuuccc

SEQ ID NO: 14688 - RNA, 22 nt, Artificial Sequence
  Guide RNA
caugagcagaagcacguuuccu

SEQ ID NO: 14689 - RNA, 22 nt, Artificial Sequence
  Guide RNA
caugaggccacugaggaaacgu

SEQ ID NO: 14690 - RNA, 22 nt, Artificial Sequence
  Guide RNA
caugaggccacuggggaaacgu

SEQ ID NO: 14691 - RNA, 22 nt, Artificial Sequence
  Guide RNA
ccacugaggaaacgugcuucug

SEQ ID NO: 14692 - RNA, 22 nt, Artificial Sequence
  Guide RNA
ccacuggggaaacgugcuucug

SEQ ID NO: 14693 - RNA, 22 nt, Artificial Sequence
  Guide RNA
ccaugagcagaagcacguuucc

SEQ ID NO: 14694 - RNA, 22 nt, Artificial Sequence
  Guide RNA
ccaugaggccacugaggaaacg

SEQ ID NO: 14695 - RNA, 22 nt, Artificial Sequence
  Guide RNA
ccaugaggccacuggggaaacg

SEQ ID NO: 14696 - RNA, 22 nt, Artificial Sequence
  Guide RNA
cccaguggccucauggugcgga

SEQ ID NO: 14697 - RNA, 22 nt, Artificial Sequence
  Guide RNA
ccccaguggccucauggugcgg

SEQ ID NO: 14698 - RNA, 22 nt, Artificial Sequence
  Guide RNA
ccgcaccaugaggccacugagg

SEQ ID NO: 14699 - RNA, 22 nt, Artificial Sequence
  Guide RNA
ccgcaccaugaggccacugggg

SEQ ID NO: 14700 - RNA, 22 nt, Artificial Sequence
  Guide RNA
ccucaguggccucauggugcgg

SEQ ID NO: 14701 - RNA, 22 nt, Artificial Sequence
  Guide RNA
cgcaccaugaggccacugagga

SEQ ID NO: 14702 - RNA, 22 nt, Artificial Sequence
  Guide RNA
cgcaccaugaggccacugggga

SEQ ID NO: 14703 - RNA, 22 nt, Artificial Sequence
  Guide RNA
cguuuccccaguggccucaugg

SEQ ID NO: 14704 - RNA, 22 nt, Artificial Sequence
  Guide RNA
cguuuccucaguggccucaugg

SEQ ID NO: 14705 - RNA, 22 nt, Artificial Sequence
  Guide RNA
cucaguggccucauggugcgga

SEQ ID NO: 14706 - RNA, 22 nt, Artificial Sequence
  Guide RNA
cugaggaaacgugcuucugcuc

SEQ ID NO: 14707 - RNA, 22 nt, Artificial Sequence
  Guide RNA
cuggggaaacgugcuucugcuc

SEQ ID NO: 14708 - RNA, 22 nt, Artificial Sequence
  Guide RNA
gaagcacguuuccccaguggcc

SEQ ID NO: 14709 - RNA, 22 nt, Artificial Sequence
  Guide RNA
gaagcacguuuccucaguggcc

SEQ ID NO: 14710 - RNA, 22 nt, Artificial Sequence
  Guide RNA
gagcagaagcacguuuccccag

SEQ ID NO: 14711 - RNA, 22 nt, Artificial Sequence
  Guide RNA
gagcagaagcacguuuccucag

SEQ ID NO: 14712 - RNA, 22 nt, Artificial Sequence
  Guide RNA
gaggaaacgugcuucugcucau

SEQ ID NO: 14713 - RNA, 22 nt, Artificial Sequence
  Guide RNA
gaggccacugaggaaacgugcu

SEQ ID NO: 14714 - RNA, 22 nt, Artificial Sequence
  Guide RNA
gaggccacuggggaaacgugcu

SEQ ID NO: 14715 - RNA, 22 nt, Artificial Sequence
  Guide RNA
gcaccaugaggccacugaggaa

SEQ ID NO: 14716 - RNA, 22 nt, Artificial Sequence
  Guide RNA
gcaccaugaggccacuggggaa

SEQ ID NO: 14717 - RNA, 22 nt, Artificial Sequence
  Guide RNA
gcacguuuccccaguggccuca

SEQ ID NO: 14718 - RNA, 22 nt, Artificial Sequence
  Guide RNA
gcacguuuccucaguggccuca

SEQ ID NO: 14719 - RNA, 22 nt, Artificial Sequence
  Guide RNA
gcagaagcacguuuccccagug

SEQ ID NO: 14720 - RNA, 22 nt, Artificial Sequence
  Guide RNA
gcagaagcacguuuccucagug

SEQ ID NO: 14721 - RNA, 22 nt, Artificial Sequence
  Guide RNA
gccacugaggaaacgugcuucu

SEQ ID NO: 14722 - RNA, 22 nt, Artificial Sequence
  Guide RNA
gccacuggggaaacgugcuucu

SEQ ID NO: 14723 - RNA, 22 nt, Artificial Sequence
  Guide RNA
ggccacugaggaaacgugcuuc

SEQ ID NO: 14724 - RNA, 22 nt, Artificial Sequence
  Guide RNA
ggccacuggggaaacgugcuuc

SEQ ID NO: 14725 - RNA, 22 nt, Artificial Sequence
  Guide RNA
ggggaaacgugcuucugcucau

SEQ ID NO: 14726 - RNA, 22 nt, Artificial Sequence
  Guide RNA
gguccaugagcagaagcacguu

SEQ ID NO: 14727 - RNA, 22 nt, Artificial Sequence
  Guide RNA
gguguccgcaccaugaggccac

SEQ ID NO: 14728 - RNA, 22 nt, Artificial Sequence
  Guide RNA
guccaugagcagaagcacguuu

SEQ ID NO: 14729 - RNA, 22 nt, Artificial Sequence
  Guide RNA
guccgcaccaugaggccacuga

SEQ ID NO: 14730 - RNA, 22 nt, Artificial Sequence
  Guide RNA
guccgcaccaugaggccacugg

SEQ ID NO: 14731 - RNA, 22 nt, Artificial Sequence
  Guide RNA
guguccgcaccaugaggccacu

SEQ ID NO: 14732 - RNA, 22 nt, Artificial Sequence
  Guide RNA
guuuccccaguggccucauggu

SEQ ID NO: 14733 - RNA, 22 nt, Artificial Sequence
  Guide RNA
guuuccucaguggccucauggu

SEQ ID NO: 14734 - RNA, 22 nt, Artificial Sequence
  Guide RNA
uccaugagcagaagcacguuuc

SEQ ID NO: 14735 - RNA, 22 nt, Artificial Sequence
  Guide RNA
uccccaguggccucauggugcg

SEQ ID NO: 14736 - RNA, 22 nt, Artificial Sequence
  Guide RNA
uccgcaccaugaggccacugag

SEQ ID NO: 14737 - RNA, 22 nt, Artificial Sequence
  Guide RNA
uccgcaccaugaggccacuggg

SEQ ID NO: 14738 - RNA, 22 nt, Artificial Sequence
  Guide RNA
uccucaguggccucauggugcg

SEQ ID NO: 14739 - RNA, 22 nt, Artificial Sequence
  Guide RNA
ugagcagaagcacguuucccca

SEQ ID NO: 14740 - RNA, 22 nt, Artificial Sequence
  Guide RNA
ugagcagaagcacguuuccuca

SEQ ID NO: 14741 - RNA, 22 nt, Artificial Sequence
  Guide RNA
ugaggaaacgugcuucugcuca

SEQ ID NO: 14742 - RNA, 22 nt, Artificial Sequence
  Guide RNA
ugaggccacugaggaaacgugc

SEQ ID NO: 14743 - RNA, 22 nt, Artificial Sequence
  Guide RNA
ugaggccacuggggaaacgugc

SEQ ID NO: 14744 - RNA, 22 nt, Artificial Sequence
  Guide RNA
uggggaaacgugcuucugcuca

SEQ ID NO: 14745 - RNA, 22 nt, Artificial Sequence
  Guide RNA
ugguguccgcaccaugaggcca

SEQ ID NO: 14746 - RNA, 22 nt, Artificial Sequence
  Guide RNA
uguccgcaccaugaggccacug

SEQ ID NO: 14747 - RNA, 22 nt, Artificial Sequence
  Guide RNA
uuccccaguggccucauggugc

SEQ ID NO: 14748 - RNA, 22 nt, Artificial Sequence
  Guide RNA
uuccucaguggccucauggugc

SEQ ID NO: 14749 - RNA, 22 nt, Artificial Sequence
  Guide RNA
uuuccccaguggccucauggug

SEQ ID NO: 14750 - RNA, 22 nt, Artificial Sequence
  Guide RNA
uuuccucaguggccucauggug

SEQ ID NO: 14751 - RNA, 21 nt, Artificial Sequence
  Guide RNA
cgaaaccccgucucuaugaaa

SEQ ID NO: 14752 - RNA, 21 nt, Artificial Sequence
  Guide RNA
ggcgaaaccccgucucuauga

SEQ ID NO: 14753 - RNA, 21 nt, Artificial Sequence
  Guide RNA
uauuuuucauagagacggggu

SEQ ID NO: 14754 - RNA, 21 nt, Artificial Sequence
  Guide RNA
uuuuucauagagacgggguuu

SEQ ID NO: 14755 - RNA, 22 nt, Artificial Sequence
  Guide RNA
auuuuucauagagacgggguuu

SEQ ID NO: 14756 - RNA, 22 nt, Artificial Sequence
  Guide RNA
cgaaaccccgucucuaugaaaa

SEQ ID NO: 14757 - RNA, 22 nt, Artificial Sequence
  Guide RNA
gcgaaaccccgucucuaugaaa

SEQ ID NO: 14758 - RNA, 22 nt, Artificial Sequence
  Guide RNA
ggcgaaaccccgucucuaugaa

SEQ ID NO: 14759 - RNA, 22 nt, Artificial Sequence
  Guide RNA
guauuuuucauagagacggggu

SEQ ID NO: 14760 - RNA, 22 nt, Artificial Sequence
  Guide RNA
uauuuuucauagagacgggguu

SEQ ID NO: 14761 - RNA, 22 nt, Artificial Sequence
  Guide RNA
uggcgaaaccccgucucuauga

SEQ ID NO: 14762 - RNA, 22 nt, Artificial Sequence
  Guide RNA
uuuuucauagagacgggguuuc

SEQ ID NO: 14763 - RNA, 20 nt, Artificial Sequence
  Guide RNA
aaaaucagggcggcauccug

SEQ ID NO: 14764 - RNA, 20 nt, Artificial Sequence
  Guide RNA
aaaaucagggcugcauccug

SEQ ID NO: 14765 - RNA, 20 nt, Artificial Sequence
  Guide RNA
aaaucagggcggcauccugu

SEQ ID NO: 14766 - RNA, 20 nt, Artificial Sequence
  Guide RNA
aaaucagggcugcauccugu

SEQ ID NO: 14767 - RNA, 20 nt, Artificial Sequence
  Guide RNA
aacacuaauucugacaggau

SEQ ID NO: 14768 - RNA, 20 nt, Artificial Sequence
  Guide RNA
aaucagggcggcauccuguc

SEQ ID NO: 14769 - RNA, 20 nt, Artificial Sequence
  Guide RNA
aaucagggcugcauccuguc

SEQ ID NO: 14770 - RNA, 20 nt, Artificial Sequence
  Guide RNA
aauguaaaaucagggcggca

SEQ ID NO: 14771 - RNA, 20 nt, Artificial Sequence
  Guide RNA
aauguaaaaucagggcugca

SEQ ID NO: 14772 - RNA, 20 nt, Artificial Sequence
  Guide RNA
aauucugacaggaugcagcc

SEQ ID NO: 14773 - RNA, 20 nt, Artificial Sequence
  Guide RNA
aauucugacaggaugccgcc

SEQ ID NO: 14774 - RNA, 20 nt, Artificial Sequence
  Guide RNA
acacuaauucugacaggaug

SEQ ID NO: 14775 - RNA, 20 nt, Artificial Sequence
  Guide RNA
acaggaugcagcccugauuu

SEQ ID NO: 14776 - RNA, 20 nt, Artificial Sequence
  Guide RNA
acaggaugccgcccugauuu

SEQ ID NO: 14777 - RNA, 20 nt, Artificial Sequence
  Guide RNA
acuaauucugacaggaugca

SEQ ID NO: 14778 - RNA, 20 nt, Artificial Sequence
  Guide RNA
acuaauucugacaggaugcc

SEQ ID NO: 14779 - RNA, 20 nt, Artificial Sequence
  Guide RNA
aggaugcagcccugauuuua

SEQ ID NO: 14780 - RNA, 20 nt, Artificial Sequence
  Guide RNA
aggaugccgcccugauuuua

SEQ ID NO: 14781 - RNA, 20 nt, Artificial Sequence
  Guide RNA
agggcggcauccugucagaa

SEQ ID NO: 14782 - RNA, 20 nt, Artificial Sequence
  Guide RNA
agggcugcauccugucagaa

SEQ ID NO: 14783 - RNA, 20 nt, Artificial Sequence
  Guide RNA
aucagggcggcauccuguca

SEQ ID NO: 14784 - RNA, 20 nt, Artificial Sequence
  Guide RNA
aucagggcugcauccuguca

SEQ ID NO: 14785 - RNA, 20 nt, Artificial Sequence
  Guide RNA
augcagcccugauuuuacau

SEQ ID NO: 14786 - RNA, 20 nt, Artificial Sequence
  Guide RNA
augccgcccugauuuuacau

SEQ ID NO: 14787 - RNA, 20 nt, Artificial Sequence
  Guide RNA
auguaaaaucagggcggcau

SEQ ID NO: 14788 - RNA, 20 nt, Artificial Sequence
  Guide RNA
auguaaaaucagggcugcau

SEQ ID NO: 14789 - RNA, 20 nt, Artificial Sequence
  Guide RNA
auucugacaggaugcagccc

SEQ ID NO: 14790 - RNA, 20 nt, Artificial Sequence
  Guide RNA
auucugacaggaugccgccc

SEQ ID NO: 14791 - RNA, 20 nt, Artificial Sequence
  Guide RNA
caauguaaaaucagggcggc

SEQ ID NO: 14792 - RNA, 20 nt, Artificial Sequence
  Guide RNA
caauguaaaaucagggcugc

SEQ ID NO: 14793 - RNA, 20 nt, Artificial Sequence
  Guide RNA
cacuaauucugacaggaugc

SEQ ID NO: 14794 - RNA, 20 nt, Artificial Sequence
  Guide RNA
cagcccugauuuuacauugc

SEQ ID NO: 14795 - RNA, 20 nt, Artificial Sequence
  Guide RNA
caggaugcagcccugauuuu

SEQ ID NO: 14796 - RNA, 20 nt, Artificial Sequence
  Guide RNA
caggaugccgcccugauuuu

SEQ ID NO: 14797 - RNA, 20 nt, Artificial Sequence
  Guide RNA
cagggcggcauccugucaga

SEQ ID NO: 14798 - RNA, 20 nt, Artificial Sequence
  Guide RNA
cagggcugcauccugucaga

SEQ ID NO: 14799 - RNA, 20 nt, Artificial Sequence
  Guide RNA
ccgcccugauuuuacauugc

SEQ ID NO: 14800 - RNA, 20 nt, Artificial Sequence
  Guide RNA
cggcauccugucagaauuag

SEQ ID NO: 14801 - RNA, 20 nt, Artificial Sequence
  Guide RNA
cuaauucugacaggaugcag

SEQ ID NO: 14802 - RNA, 20 nt, Artificial Sequence
  Guide RNA
cuaauucugacaggaugccg

SEQ ID NO: 14803 - RNA, 20 nt, Artificial Sequence
  Guide RNA
cugacaggaugcagcccuga

SEQ ID NO: 14804 - RNA, 20 nt, Artificial Sequence
  Guide RNA
cugacaggaugccgcccuga

SEQ ID NO: 14805 - RNA, 20 nt, Artificial Sequence
  Guide RNA
cugcauccugucagaauuag

SEQ ID NO: 14806 - RNA, 20 nt, Artificial Sequence
  Guide RNA
gacaggaugcagcccugauu

SEQ ID NO: 14807 - RNA, 20 nt, Artificial Sequence
  Guide RNA
gacaggaugccgcccugauu

SEQ ID NO: 14808 - RNA, 20 nt, Artificial Sequence
  Guide RNA
gaugcagcccugauuuuaca

SEQ ID NO: 14809 - RNA, 20 nt, Artificial Sequence
  Guide RNA
gaugccgcccugauuuuaca

SEQ ID NO: 14810 - RNA, 20 nt, Artificial Sequence
  Guide RNA
gcaauguaaaaucagggcgg

SEQ ID NO: 14811 - RNA, 20 nt, Artificial Sequence
  Guide RNA
gcaauguaaaaucagggcug

SEQ ID NO: 14812 - RNA, 20 nt, Artificial Sequence
  Guide RNA
gcagcccugauuuuacauug

SEQ ID NO: 14813 - RNA, 20 nt, Artificial Sequence
  Guide RNA
gccgcccugauuuuacauug

SEQ ID NO: 14814 - RNA, 20 nt, Artificial Sequence
  Guide RNA
gcggcauccugucagaauua

SEQ ID NO: 14815 - RNA, 20 nt, Artificial Sequence
  Guide RNA
gcugcauccugucagaauua

SEQ ID NO: 14816 - RNA, 20 nt, Artificial Sequence
  Guide RNA
ggaugcagcccugauuuuac

SEQ ID NO: 14817 - RNA, 20 nt, Artificial Sequence
  Guide RNA
ggaugccgcccugauuuuac

SEQ ID NO: 14818 - RNA, 20 nt, Artificial Sequence
  Guide RNA
ggcaauguaaaaucagggcg

SEQ ID NO: 14819 - RNA, 20 nt, Artificial Sequence
  Guide RNA
ggcaauguaaaaucagggcu

SEQ ID NO: 14820 - RNA, 20 nt, Artificial Sequence
  Guide RNA
ggcggcauccugucagaauu

SEQ ID NO: 14821 - RNA, 20 nt, Artificial Sequence
  Guide RNA
ggcugcauccugucagaauu

SEQ ID NO: 14822 - RNA, 20 nt, Artificial Sequence
  Guide RNA
gggcggcauccugucagaau

SEQ ID NO: 14823 - RNA, 20 nt, Artificial Sequence
  Guide RNA
gggcugcauccugucagaau

SEQ ID NO: 14824 - RNA, 20 nt, Artificial Sequence
  Guide RNA
gguggcaauguaaaaucagg

SEQ ID NO: 14825 - RNA, 20 nt, Artificial Sequence
  Guide RNA
guaaaaucagggcggcaucc

SEQ ID NO: 14826 - RNA, 20 nt, Artificial Sequence
  Guide RNA
guaaaaucagggcugcaucc

SEQ ID NO: 14827 - RNA, 20 nt, Artificial Sequence
  Guide RNA
guggcaauguaaaaucaggg

SEQ ID NO: 14828 - RNA, 20 nt, Artificial Sequence
  Guide RNA
uaaaaucagggcggcauccu

SEQ ID NO: 14829 - RNA, 20 nt, Artificial Sequence
  Guide RNA
uaaaaucagggcugcauccu

SEQ ID NO: 14830 - RNA, 20 nt, Artificial Sequence
  Guide RNA
uaacacuaauucugacagga

SEQ ID NO: 14831 - RNA, 20 nt, Artificial Sequence
  Guide RNA
uaauucugacaggaugcagc

SEQ ID NO: 14832 - RNA, 20 nt, Artificial Sequence
  Guide RNA
uaauucugacaggaugccgc

SEQ ID NO: 14833 - RNA, 20 nt, Artificial Sequence
  Guide RNA
ucagggcggcauccugucag

SEQ ID NO: 14834 - RNA, 20 nt, Artificial Sequence
  Guide RNA
ucagggcugcauccugucag

SEQ ID NO: 14835 - RNA, 20 nt, Artificial Sequence
  Guide RNA
ucugacaggaugcagcccug

SEQ ID NO: 14836 - RNA, 20 nt, Artificial Sequence
  Guide RNA
ucugacaggaugccgcccug

SEQ ID NO: 14837 - RNA, 20 nt, Artificial Sequence
  Guide RNA
ugacaggaugcagcccugau

SEQ ID NO: 14838 - RNA, 20 nt, Artificial Sequence
  Guide RNA
ugacaggaugccgcccugau

SEQ ID NO: 14839 - RNA, 20 nt, Artificial Sequence
  Guide RNA
ugcagcccugauuuuacauu

SEQ ID NO: 14840 - RNA, 20 nt, Artificial Sequence
  Guide RNA
ugccgcccugauuuuacauu

SEQ ID NO: 14841 - RNA, 20 nt, Artificial Sequence
  Guide RNA
uggcaauguaaaaucagggc

SEQ ID NO: 14842 - RNA, 20 nt, Artificial Sequence
  Guide RNA
ugguggcaauguaaaaucag

SEQ ID NO: 14843 - RNA, 20 nt, Artificial Sequence
  Guide RNA
uguaaaaucagggcggcauc

SEQ ID NO: 14844 - RNA, 20 nt, Artificial Sequence
  Guide RNA
uguaaaaucagggcugcauc

SEQ ID NO: 14845 - RNA, 20 nt, Artificial Sequence
  Guide RNA
uucugacaggaugcagcccu

SEQ ID NO: 14846 - RNA, 20 nt, Artificial Sequence
  Guide RNA
uucugacaggaugccgcccu

SEQ ID NO: 14847 - RNA, 21 nt, Artificial Sequence
  Guide RNA
aaaaucagggcggcauccugu

SEQ ID NO: 14848 - RNA, 21 nt, Artificial Sequence
  Guide RNA
aaaaucagggcugcauccugu

SEQ ID NO: 14849 - RNA, 21 nt, Artificial Sequence
  Guide RNA
aaaucagggcggcauccuguc

SEQ ID NO: 14850 - RNA, 21 nt, Artificial Sequence
  Guide RNA
aaaucagggcugcauccuguc

SEQ ID NO: 14851 - RNA, 21 nt, Artificial Sequence
  Guide RNA
aacacuaauucugacaggaug

SEQ ID NO: 14852 - RNA, 21 nt, Artificial Sequence
  Guide RNA
aaucagggcggcauccuguca

SEQ ID NO: 14853 - RNA, 21 nt, Artificial Sequence
  Guide RNA
aaucagggcugcauccuguca

SEQ ID NO: 14854 - RNA, 21 nt, Artificial Sequence
  Guide RNA
aauguaaaaucagggcggcau

SEQ ID NO: 14855 - RNA, 21 nt, Artificial Sequence
  Guide RNA
aauguaaaaucagggcugcau

SEQ ID NO: 14856 - RNA, 21 nt, Artificial Sequence
  Guide RNA
aauucugacaggaugcagccc

SEQ ID NO: 14857 - RNA, 21 nt, Artificial Sequence
  Guide RNA
aauucugacaggaugccgccc

SEQ ID NO: 14858 - RNA, 21 nt, Artificial Sequence
  Guide RNA
acacuaauucugacaggaugc

SEQ ID NO: 14859 - RNA, 21 nt, Artificial Sequence
  Guide RNA
acaggaugcagcccugauuuu

SEQ ID NO: 14860 - RNA, 21 nt, Artificial Sequence
  Guide RNA
acaggaugccgcccugauuuu

SEQ ID NO: 14861 - RNA, 21 nt, Artificial Sequence
  Guide RNA
acuaauucugacaggaugcag

SEQ ID NO: 14862 - RNA, 21 nt, Artificial Sequence
  Guide RNA
acuaauucugacaggaugccg

SEQ ID NO: 14863 - RNA, 21 nt, Artificial Sequence
  Guide RNA
aggaugcagcccugauuuuac

SEQ ID NO: 14864 - RNA, 21 nt, Artificial Sequence
  Guide RNA
aggaugccgcccugauuuuac

SEQ ID NO: 14865 - RNA, 21 nt, Artificial Sequence
  Guide RNA
agggcggcauccugucagaau

SEQ ID NO: 14866 - RNA, 21 nt, Artificial Sequence
  Guide RNA
agggcugcauccugucagaau

SEQ ID NO: 14867 - RNA, 21 nt, Artificial Sequence
  Guide RNA
aucagggcggcauccugucag

SEQ ID NO: 14868 - RNA, 21 nt, Artificial Sequence
  Guide RNA
aucagggcugcauccugucag

SEQ ID NO: 14869 - RNA, 21 nt, Artificial Sequence
  Guide RNA
augcagcccugauuuuacauu

SEQ ID NO: 14870 - RNA, 21 nt, Artificial Sequence
  Guide RNA
augccgcccugauuuuacauu

SEQ ID NO: 14871 - RNA, 21 nt, Artificial Sequence
  Guide RNA
auguaaaaucagggcggcauc

SEQ ID NO: 14872 - RNA, 21 nt, Artificial Sequence
  Guide RNA
auguaaaaucagggcugcauc

SEQ ID NO: 14873 - RNA, 21 nt, Artificial Sequence
  Guide RNA
auucugacaggaugcagcccu

SEQ ID NO: 14874 - RNA, 21 nt, Artificial Sequence
  Guide RNA
auucugacaggaugccgcccu

SEQ ID NO: 14875 - RNA, 21 nt, Artificial Sequence
  Guide RNA
caauguaaaaucagggcggca

SEQ ID NO: 14876 - RNA, 21 nt, Artificial Sequence
  Guide RNA
caauguaaaaucagggcugca

SEQ ID NO: 14877 - RNA, 21 nt, Artificial Sequence
  Guide RNA
cacuaauucugacaggaugca

SEQ ID NO: 14878 - RNA, 21 nt, Artificial Sequence
  Guide RNA
cacuaauucugacaggaugcc

SEQ ID NO: 14879 - RNA, 21 nt, Artificial Sequence
  Guide RNA
cagcccugauuuuacauugcc

SEQ ID NO: 14880 - RNA, 21 nt, Artificial Sequence
  Guide RNA
caggaugcagcccugauuuua

SEQ ID NO: 14881 - RNA, 21 nt, Artificial Sequence
  Guide RNA
caggaugccgcccugauuuua

SEQ ID NO: 14882 - RNA, 21 nt, Artificial Sequence
  Guide RNA
cagggcggcauccugucagaa

SEQ ID NO: 14883 - RNA, 21 nt, Artificial Sequence
  Guide RNA
cagggcugcauccugucagaa

SEQ ID NO: 14884 - RNA, 21 nt, Artificial Sequence
  Guide RNA
ccgcccugauuuuacauugcc

SEQ ID NO: 14885 - RNA, 21 nt, Artificial Sequence
  Guide RNA
cggcauccugucagaauuagu

SEQ ID NO: 14886 - RNA, 21 nt, Artificial Sequence
  Guide RNA
cuaauucugacaggaugcagc

SEQ ID NO: 14887 - RNA, 21 nt, Artificial Sequence
  Guide RNA
cuaauucugacaggaugccgc

SEQ ID NO: 14888 - RNA, 21 nt, Artificial Sequence
  Guide RNA
cugacaggaugcagcccugau

SEQ ID NO: 14889 - RNA, 21 nt, Artificial Sequence
  Guide RNA
cugacaggaugccgcccugau

SEQ ID NO: 14890 - RNA, 21 nt, Artificial Sequence
  Guide RNA
cugcauccugucagaauuagu

SEQ ID NO: 14891 - RNA, 21 nt, Artificial Sequence
  Guide RNA
gacaggaugcagcccugauuu

SEQ ID NO: 14892 - RNA, 21 nt, Artificial Sequence
  Guide RNA
gacaggaugccgcccugauuu

SEQ ID NO: 14893 - RNA, 21 nt, Artificial Sequence
  Guide RNA
gaugcagcccugauuuuacau

SEQ ID NO: 14894 - RNA, 21 nt, Artificial Sequence
  Guide RNA
gaugccgcccugauuuuacau

SEQ ID NO: 14895 - RNA, 21 nt, Artificial Sequence
  Guide RNA
gcaauguaaaaucagggcggc

SEQ ID NO: 14896 - RNA, 21 nt, Artificial Sequence
  Guide RNA
gcaauguaaaaucagggcugc

SEQ ID NO: 14897 - RNA, 21 nt, Artificial Sequence
  Guide RNA
gcagcccugauuuuacauugc

SEQ ID NO: 14898 - RNA, 21 nt, Artificial Sequence
  Guide RNA
gccgcccugauuuuacauugc

SEQ ID NO: 14899 - RNA, 21 nt, Artificial Sequence
  Guide RNA
gcggcauccugucagaauuag

SEQ ID NO: 14900 - RNA, 21 nt, Artificial Sequence
  Guide RNA
gcugcauccugucagaauuag

SEQ ID NO: 14901 - RNA, 21 nt, Artificial Sequence
  Guide RNA
ggaugcagcccugauuuuaca

SEQ ID NO: 14902 - RNA, 21 nt, Artificial Sequence
  Guide RNA
ggaugccgcccugauuuuaca

SEQ ID NO: 14903 - RNA, 21 nt, Artificial Sequence
  Guide RNA
ggcaauguaaaaucagggcgg

SEQ ID NO: 14904 - RNA, 21 nt, Artificial Sequence
  Guide RNA
ggcaauguaaaaucagggcug

SEQ ID NO: 14905 - RNA, 21 nt, Artificial Sequence
  Guide RNA
ggcggcauccugucagaauua

SEQ ID NO: 14906 - RNA, 21 nt, Artificial Sequence
  Guide RNA
ggcugcauccugucagaauua

SEQ ID NO: 14907 - RNA, 21 nt, Artificial Sequence
  Guide RNA
gggcggcauccugucagaauu

SEQ ID NO: 14908 - RNA, 21 nt, Artificial Sequence
  Guide RNA
gggcugcauccugucagaauu

SEQ ID NO: 14909 - RNA, 21 nt, Artificial Sequence
  Guide RNA
gguggcaauguaaaaucaggg

SEQ ID NO: 14910 - RNA, 21 nt, Artificial Sequence
  Guide RNA
guaaaaucagggcggcauccu

SEQ ID NO: 14911 - RNA, 21 nt, Artificial Sequence
  Guide RNA
guaaaaucagggcugcauccu

SEQ ID NO: 14912 - RNA, 21 nt, Artificial Sequence
  Guide RNA
guaacacuaauucugacagga

SEQ ID NO: 14913 - RNA, 21 nt, Artificial Sequence
  Guide RNA
guggcaauguaaaaucagggc

SEQ ID NO: 14914 - RNA, 21 nt, Artificial Sequence
  Guide RNA
uaaaaucagggcggcauccug

SEQ ID NO: 14915 - RNA, 21 nt, Artificial Sequence
  Guide RNA
uaaaaucagggcugcauccug

SEQ ID NO: 14916 - RNA, 21 nt, Artificial Sequence
  Guide RNA
uaacacuaauucugacaggau

SEQ ID NO: 14917 - RNA, 21 nt, Artificial Sequence
  Guide RNA
uaauucugacaggaugcagcc

SEQ ID NO: 14918 - RNA, 21 nt, Artificial Sequence
  Guide RNA
uaauucugacaggaugccgcc

SEQ ID NO: 14919 - RNA, 21 nt, Artificial Sequence
  Guide RNA
ucagggcggcauccugucaga

SEQ ID NO: 14920 - RNA, 21 nt, Artificial Sequence
  Guide RNA
ucagggcugcauccugucaga

SEQ ID NO: 14921 - RNA, 21 nt, Artificial Sequence
  Guide RNA
ucugacaggaugcagcccuga

SEQ ID NO: 14922 - RNA, 21 nt, Artificial Sequence
  Guide RNA
ucugacaggaugccgcccuga

SEQ ID NO: 14923 - RNA, 21 nt, Artificial Sequence
  Guide RNA
ugacaggaugcagcccugauu

SEQ ID NO: 14924 - RNA, 21 nt, Artificial Sequence
  Guide RNA
ugacaggaugccgcccugauu

SEQ ID NO: 14925 - RNA, 21 nt, Artificial Sequence
  Guide RNA
ugcagcccugauuuuacauug

SEQ ID NO: 14926 - RNA, 21 nt, Artificial Sequence
  Guide RNA
ugccgcccugauuuuacauug

SEQ ID NO: 14927 - RNA, 21 nt, Artificial Sequence
  Guide RNA
uggcaauguaaaaucagggcg

SEQ ID NO: 14928 - RNA, 21 nt, Artificial Sequence
  Guide RNA
uggcaauguaaaaucagggcu

SEQ ID NO: 14929 - RNA, 21 nt, Artificial Sequence
  Guide RNA
ugguggcaauguaaaaucagg

SEQ ID NO: 14930 - RNA, 21 nt, Artificial Sequence
  Guide RNA
uguaaaaucagggcggcaucc

SEQ ID NO: 14931 - RNA, 21 nt, Artificial Sequence
  Guide RNA
uguaaaaucagggcugcaucc

SEQ ID NO: 14932 - RNA, 21 nt, Artificial Sequence
  Guide RNA
uucugacaggaugcagcccug

SEQ ID NO: 14933 - RNA, 21 nt, Artificial Sequence
  Guide RNA
uucugacaggaugccgcccug

SEQ ID NO: 14934 - RNA, 21 nt, Artificial Sequence
  Guide RNA
uugguggcaauguaaaaucag

SEQ ID NO: 14935 - RNA, 22 nt, Artificial Sequence
  Guide RNA
aaaaucagggcggcauccuguc

SEQ ID NO: 14936 - RNA, 22 nt, Artificial Sequence
  Guide RNA
aaaaucagggcugcauccuguc

SEQ ID NO: 14937 - RNA, 22 nt, Artificial Sequence
  Guide RNA
aaaucagggcggcauccuguca

SEQ ID NO: 14938 - RNA, 22 nt, Artificial Sequence
  Guide RNA
aaaucagggcugcauccuguca

SEQ ID NO: 14939 - RNA, 22 nt, Artificial Sequence
  Guide RNA
aacacuaauucugacaggaugc

SEQ ID NO: 14940 - RNA, 22 nt, Artificial Sequence
  Guide RNA
aaucagggcggcauccugucag

SEQ ID NO: 14941 - RNA, 22 nt, Artificial Sequence
  Guide RNA
aaucagggcugcauccugucag

SEQ ID NO: 14942 - RNA, 22 nt, Artificial Sequence
  Guide RNA
aauguaaaaucagggcggcauc

SEQ ID NO: 14943 - RNA, 22 nt, Artificial Sequence
  Guide RNA
aauguaaaaucagggcugcauc

SEQ ID NO: 14944 - RNA, 22 nt, Artificial Sequence
  Guide RNA
aauucugacaggaugcagcccu

SEQ ID NO: 14945 - RNA, 22 nt, Artificial Sequence
  Guide RNA
aauucugacaggaugccgcccu

SEQ ID NO: 14946 - RNA, 22 nt, Artificial Sequence
  Guide RNA
acacuaauucugacaggaugca

SEQ ID NO: 14947 - RNA, 22 nt, Artificial Sequence
  Guide RNA
acacuaauucugacaggaugcc

SEQ ID NO: 14948 - RNA, 22 nt, Artificial Sequence
  Guide RNA
acaggaugcagcccugauuuua

SEQ ID NO: 14949 - RNA, 22 nt, Artificial Sequence
  Guide RNA
acaggaugccgcccugauuuua

SEQ ID NO: 14950 - RNA, 22 nt, Artificial Sequence
  Guide RNA
acuaauucugacaggaugcagc

SEQ ID NO: 14951 - RNA, 22 nt, Artificial Sequence
  Guide RNA
acuaauucugacaggaugccgc

SEQ ID NO: 14952 - RNA, 22 nt, Artificial Sequence
  Guide RNA
aggaugcagcccugauuuuaca

SEQ ID NO: 14953 - RNA, 22 nt, Artificial Sequence
  Guide RNA
aggaugccgcccugauuuuaca

SEQ ID NO: 14954 - RNA, 22 nt, Artificial Sequence
  Guide RNA
agggcggcauccugucagaauu

SEQ ID NO: 14955 - RNA, 22 nt, Artificial Sequence
  Guide RNA
agggcugcauccugucagaauu

SEQ ID NO: 14956 - RNA, 22 nt, Artificial Sequence
  Guide RNA
aucagggcggcauccugucaga

SEQ ID NO: 14957 - RNA, 22 nt, Artificial Sequence
  Guide RNA
aucagggcugcauccugucaga

SEQ ID NO: 14958 - RNA, 22 nt, Artificial Sequence
  Guide RNA
augcagcccugauuuuacauug

SEQ ID NO: 14959 - RNA, 22 nt, Artificial Sequence
  Guide RNA
augccgcccugauuuuacauug

SEQ ID NO: 14960 - RNA, 22 nt, Artificial Sequence
  Guide RNA
auguaaaaucagggcggcaucc

SEQ ID NO: 14961 - RNA, 22 nt, Artificial Sequence
  Guide RNA
auguaaaaucagggcugcaucc

SEQ ID NO: 14962 - RNA, 22 nt, Artificial Sequence
  Guide RNA
auucugacaggaugcagcccug

SEQ ID NO: 14963 - RNA, 22 nt, Artificial Sequence
  Guide RNA
auucugacaggaugccgcccug

SEQ ID NO: 14964 - RNA, 22 nt, Artificial Sequence
  Guide RNA
caauguaaaaucagggcggcau

SEQ ID NO: 14965 - RNA, 22 nt, Artificial Sequence
  Guide RNA
caauguaaaaucagggcugcau

SEQ ID NO: 14966 - RNA, 22 nt, Artificial Sequence
  Guide RNA
cacuaauucugacaggaugcag

SEQ ID NO: 14967 - RNA, 22 nt, Artificial Sequence
  Guide RNA
cacuaauucugacaggaugccg

SEQ ID NO: 14968 - RNA, 22 nt, Artificial Sequence
  Guide RNA
cagcccugauuuuacauugcca

SEQ ID NO: 14969 - RNA, 22 nt, Artificial Sequence
  Guide RNA
caggaugcagcccugauuuuac

SEQ ID NO: 14970 - RNA, 22 nt, Artificial Sequence
  Guide RNA
caggaugccgcccugauuuuac

SEQ ID NO: 14971 - RNA, 22 nt, Artificial Sequence
  Guide RNA
cagggcggcauccugucagaau

SEQ ID NO: 14972 - RNA, 22 nt, Artificial Sequence
  Guide RNA
cagggcugcauccugucagaau

SEQ ID NO: 14973 - RNA, 22 nt, Artificial Sequence
  Guide RNA
ccgcccugauuuuacauugcca

SEQ ID NO: 14974 - RNA, 22 nt, Artificial Sequence
  Guide RNA
cggcauccugucagaauuagug

SEQ ID NO: 14975 - RNA, 22 nt, Artificial Sequence
  Guide RNA
cuaauucugacaggaugcagcc

SEQ ID NO: 14976 - RNA, 22 nt, Artificial Sequence
  Guide RNA
cuaauucugacaggaugccgcc

SEQ ID NO: 14977 - RNA, 22 nt, Artificial Sequence
  Guide RNA
cugacaggaugcagcccugauu

SEQ ID NO: 14978 - RNA, 22 nt, Artificial Sequence
  Guide RNA
cugacaggaugccgcccugauu

SEQ ID NO: 14979 - RNA, 22 nt, Artificial Sequence
  Guide RNA
cugcauccugucagaauuagug

SEQ ID NO: 14980 - RNA, 22 nt, Artificial Sequence
  Guide RNA
gacaggaugcagcccugauuuu

SEQ ID NO: 14981 - RNA, 22 nt, Artificial Sequence
  Guide RNA
gacaggaugccgcccugauuuu

SEQ ID NO: 14982 - RNA, 22 nt, Artificial Sequence
  Guide RNA
gaugcagcccugauuuuacauu

SEQ ID NO: 14983 - RNA, 22 nt, Artificial Sequence
  Guide RNA
gaugccgcccugauuuuacauu

SEQ ID NO: 14984 - RNA, 22 nt, Artificial Sequence
  Guide RNA
gcaauguaaaaucagggcggca

SEQ ID NO: 14985 - RNA, 22 nt, Artificial Sequence
  Guide RNA
gcaauguaaaaucagggcugca

SEQ ID NO: 14986 - RNA, 22 nt, Artificial Sequence
  Guide RNA
gcagcccugauuuuacauugcc

SEQ ID NO: 14987 - RNA, 22 nt, Artificial Sequence
  Guide RNA
gccgcccugauuuuacauugcc

SEQ ID NO: 14988 - RNA, 22 nt, Artificial Sequence
  Guide RNA
gcggcauccugucagaauuagu

SEQ ID NO: 14989 - RNA, 22 nt, Artificial Sequence
  Guide RNA
gcugcauccugucagaauuagu

SEQ ID NO: 14990 - RNA, 22 nt, Artificial Sequence
  Guide RNA
ggaugcagcccugauuuuacau

SEQ ID NO: 14991 - RNA, 22 nt, Artificial Sequence
  Guide RNA
ggaugccgcccugauuuuacau

SEQ ID NO: 14992 - RNA, 22 nt, Artificial Sequence
  Guide RNA
ggcaauguaaaaucagggcggc

SEQ ID NO: 14993 - RNA, 22 nt, Artificial Sequence
  Guide RNA
ggcaauguaaaaucagggcugc

SEQ ID NO: 14994 - RNA, 22 nt, Artificial Sequence
  Guide RNA
ggcggcauccugucagaauuag

SEQ ID NO: 14995 - RNA, 22 nt, Artificial Sequence
  Guide RNA
ggcugcauccugucagaauuag

SEQ ID NO: 14996 - RNA, 22 nt, Artificial Sequence
  Guide RNA
gggcggcauccugucagaauua

SEQ ID NO: 14997 - RNA, 22 nt, Artificial Sequence
  Guide RNA
gggcugcauccugucagaauua

SEQ ID NO: 14998 - RNA, 22 nt, Artificial Sequence
  Guide RNA
gguggcaauguaaaaucagggc

SEQ ID NO: 14999 - RNA, 22 nt, Artificial Sequence
  Guide RNA
guaaaaucagggcggcauccug

SEQ ID NO: 15000 - RNA, 22 nt, Artificial Sequence
  Guide RNA
guaaaaucagggcugcauccug

SEQ ID NO: 15001 - RNA, 22 nt, Artificial Sequence
  Guide RNA
guaacacuaauucugacaggau

SEQ ID NO: 15002 - RNA, 22 nt, Artificial Sequence
  Guide RNA
guggcaauguaaaaucagggcg

SEQ ID NO: 15003 - RNA, 22 nt, Artificial Sequence
  Guide RNA
guggcaauguaaaaucagggcu

SEQ ID NO: 15004 - RNA, 22 nt, Artificial Sequence
  Guide RNA
uaaaaucagggcggcauccugu

SEQ ID NO: 15005 - RNA, 22 nt, Artificial Sequence
  Guide RNA
uaaaaucagggcugcauccugu

SEQ ID NO: 15006 - RNA, 22 nt, Artificial Sequence
  Guide RNA
uaacacuaauucugacaggaug

SEQ ID NO: 15007 - RNA, 22 nt, Artificial Sequence
  Guide RNA
uaauucugacaggaugcagccc

SEQ ID NO: 15008 - RNA, 22 nt, Artificial Sequence
  Guide RNA
uaauucugacaggaugccgccc

SEQ ID NO: 15009 - RNA, 22 nt, Artificial Sequence
  Guide RNA
ucagggcggcauccugucagaa

SEQ ID NO: 15010 - RNA, 22 nt, Artificial Sequence
  Guide RNA
ucagggcugcauccugucagaa

SEQ ID NO: 15011 - RNA, 22 nt, Artificial Sequence
  Guide RNA
ucugacaggaugcagcccugau

SEQ ID NO: 15012 - RNA, 22 nt, Artificial Sequence
  Guide RNA
ucugacaggaugccgcccugau

SEQ ID NO: 15013 - RNA, 22 nt, Artificial Sequence
  Guide RNA
ugacaggaugcagcccugauuu

SEQ ID NO: 15014 - RNA, 22 nt, Artificial Sequence
  Guide RNA
ugacaggaugccgcccugauuu

SEQ ID NO: 15015 - RNA, 22 nt, Artificial Sequence
  Guide RNA
ugcagcccugauuuuacauugc

SEQ ID NO: 15016 - RNA, 22 nt, Artificial Sequence
  Guide RNA
ugccgcccugauuuuacauugc

SEQ ID NO: 15017 - RNA, 22 nt, Artificial Sequence
  Guide RNA
uggcaauguaaaaucagggcgg

SEQ ID NO: 15018 - RNA, 22 nt, Artificial Sequence
  Guide RNA
uggcaauguaaaaucagggcug

SEQ ID NO: 15019 - RNA, 22 nt, Artificial Sequence
  Guide RNA
ugguggcaauguaaaaucaggg

SEQ ID NO: 15020 - RNA, 22 nt, Artificial Sequence
  Guide RNA
uguaaaaucagggcggcauccu

SEQ ID NO: 15021 - RNA, 22 nt, Artificial Sequence
  Guide RNA
uguaaaaucagggcugcauccu

SEQ ID NO: 15022 - RNA, 22 nt, Artificial Sequence
  Guide RNA
uguaacacuaauucugacagga

SEQ ID NO: 15023 - RNA, 22 nt, Artificial Sequence
  Guide RNA
uucugacaggaugcagcccuga

SEQ ID NO: 15024 - RNA, 22 nt, Artificial Sequence
  Guide RNA
uucugacaggaugccgcccuga

SEQ ID NO: 15025 - RNA, 22 nt, Artificial Sequence
  Guide RNA
uugguggcaauguaaaaucagg

SEQ ID NO: 15026 - RNA, 22 nt, Artificial Sequence
  Guide RNA
uuugguggcaauguaaaaucag

SEQ ID NO: 15027 - RNA, 20 nt, Artificial Sequence
  Guide RNA
aacaaauuguaaagauacgg

SEQ ID NO: 15028 - RNA, 20 nt, Artificial Sequence
  Guide RNA
acaaauuguaaagauacggu

SEQ ID NO: 15029 - RNA, 20 nt, Artificial Sequence
  Guide RNA
accguaucuuuacaauuugu

SEQ ID NO: 15030 - RNA, 20 nt, Artificial Sequence
  Guide RNA
agaccguaucuuuacaauuu

SEQ ID NO: 15031 - RNA, 20 nt, Artificial Sequence
  Guide RNA
ccguaucuuuacaauuuguu

SEQ ID NO: 15032 - RNA, 20 nt, Artificial Sequence
  Guide RNA
gaccguaucuuuacaauuug

SEQ ID NO: 15033 - RNA, 20 nt, Artificial Sequence
  Guide RNA
gaccguaucuuuacaauuuu

SEQ ID NO: 15034 - RNA, 20 nt, Artificial Sequence
  Guide RNA
gagaccguaucuuuacaauu

SEQ ID NO: 15035 - RNA, 20 nt, Artificial Sequence
  Guide RNA
gugagaccguaucuuuacaa

SEQ ID NO: 15036 - RNA, 20 nt, Artificial Sequence
  Guide RNA
ugagaccguaucuuuacaau

SEQ ID NO: 15037 - RNA, 21 nt, Artificial Sequence
  Guide RNA
acaaauuguaaagauacgguc

SEQ ID NO: 15038 - RNA, 21 nt, Artificial Sequence
  Guide RNA
agaccguaucuuuacaauuug

SEQ ID NO: 15039 - RNA, 21 nt, Artificial Sequence
  Guide RNA
agugagaccguaucuuuacaa

SEQ ID NO: 15040 - RNA, 21 nt, Artificial Sequence
  Guide RNA
gaccguaucuuuacaauuugu

SEQ ID NO: 15041 - RNA, 21 nt, Artificial Sequence
  Guide RNA
gagaccguaucuuuacaauuu

SEQ ID NO: 15042 - RNA, 21 nt, Artificial Sequence
  Guide RNA
gugagaccguaucuuuacaau

SEQ ID NO: 15043 - RNA, 21 nt, Artificial Sequence
  Guide RNA
ugagaccguaucuuuacaauu

SEQ ID NO: 15044 - RNA, 22 nt, Artificial Sequence
  Guide RNA
aacaaauuguaaagauacgguc

SEQ ID NO: 15045 - RNA, 22 nt, Artificial Sequence
  Guide RNA
acaaauuguaaagauacggucu

SEQ ID NO: 15046 - RNA, 22 nt, Artificial Sequence
  Guide RNA
agaccguaucuuuacaauuugu

SEQ ID NO: 15047 - RNA, 22 nt, Artificial Sequence
  Guide RNA
agugagaccguaucuuuacaau

SEQ ID NO: 15048 - RNA, 22 nt, Artificial Sequence
  Guide RNA
gaccguaucuuuacaauuuguu

SEQ ID NO: 15049 - RNA, 22 nt, Artificial Sequence
  Guide RNA
gagaccguaucuuuacaauuug

SEQ ID NO: 15050 - RNA, 22 nt, Artificial Sequence
  Guide RNA
gagaccguaucuuuacaauuuu

SEQ ID NO: 15051 - RNA, 22 nt, Artificial Sequence
  Guide RNA
gugagaccguaucuuuacaauu

SEQ ID NO: 15052 - RNA, 22 nt, Artificial Sequence
  Guide RNA
uagugagaccguaucuuuacaa

SEQ ID NO: 15053 - RNA, 22 nt, Artificial Sequence
  Guide RNA
ugagaccguaucuuuacaauuu

SEQ ID NO: 15054 - RNA, 20 nt, Artificial Sequence
  Guide RNA
aacaugcacugaaugauuac

SEQ ID NO: 15055 - RNA, 20 nt, Artificial Sequence
  Guide RNA
aaguuuuugauguagacugu

SEQ ID NO: 15056 - RNA, 20 nt, Artificial Sequence
  Guide RNA
aaguuuuugauguaggcugu

SEQ ID NO: 15057 - RNA, 20 nt, Artificial Sequence
  Guide RNA
aaugauuacagccuacauca

SEQ ID NO: 15058 - RNA, 20 nt, Artificial Sequence
  Guide RNA
aaugauuacagucuacauca

SEQ ID NO: 15059 - RNA, 20 nt, Artificial Sequence
  Guide RNA
acagccuacaucaaaaacuu

SEQ ID NO: 15060 - RNA, 20 nt, Artificial Sequence
  Guide RNA
acagucuacaucaaaaacuu

SEQ ID NO: 15061 - RNA, 20 nt, Artificial Sequence
  Guide RNA
acaugcacugaaugauuaca

SEQ ID NO: 15062 - RNA, 20 nt, Artificial Sequence
  Guide RNA
acugaaugauuacagccuac

SEQ ID NO: 15063 - RNA, 20 nt, Artificial Sequence
  Guide RNA
acugaaugauuacagucuac

SEQ ID NO: 15064 - RNA, 20 nt, Artificial Sequence
  Guide RNA
agaaguuuuugauguagacu

SEQ ID NO: 15065 - RNA, 20 nt, Artificial Sequence
  Guide RNA
agaaguuuuugauguaggcu

SEQ ID NO: 15066 - RNA, 20 nt, Artificial Sequence
  Guide RNA
agacuguaaucauucagugc

SEQ ID NO: 15067 - RNA, 20 nt, Artificial Sequence
  Guide RNA
agccuacaucaaaaacuucu

SEQ ID NO: 15068 - RNA, 20 nt, Artificial Sequence
  Guide RNA
aggcuguaaucauucagugc

SEQ ID NO: 15069 - RNA, 20 nt, Artificial Sequence
  Guide RNA
agucuacaucaaaaacuucu

SEQ ID NO: 15070 - RNA, 20 nt, Artificial Sequence
  Guide RNA
aguuuuugauguagacugua

SEQ ID NO: 15071 - RNA, 20 nt, Artificial Sequence
  Guide RNA
aguuuuugauguaggcugua

SEQ ID NO: 15072 - RNA, 20 nt, Artificial Sequence
  Guide RNA
augauuacagccuacaucaa

SEQ ID NO: 15073 - RNA, 20 nt, Artificial Sequence
  Guide RNA
augauuacagucuacaucaa

SEQ ID NO: 15074 - RNA, 20 nt, Artificial Sequence
  Guide RNA
augcacugaaugauuacagc

SEQ ID NO: 15075 - RNA, 20 nt, Artificial Sequence
  Guide RNA
augcacugaaugauuacagu

SEQ ID NO: 15076 - RNA, 20 nt, Artificial Sequence
  Guide RNA
auguagacuguaaucauuca

SEQ ID NO: 15077 - RNA, 20 nt, Artificial Sequence
  Guide RNA
auguaggcuguaaucauuca

SEQ ID NO: 15078 - RNA, 20 nt, Artificial Sequence
  Guide RNA
auuacagccuacaucaaaaa

SEQ ID NO: 15079 - RNA, 20 nt, Artificial Sequence
  Guide RNA
cacugaaugauuacagccua

SEQ ID NO: 15080 - RNA, 20 nt, Artificial Sequence
  Guide RNA
cacugaaugauuacagucua

SEQ ID NO: 15081 - RNA, 20 nt, Artificial Sequence
  Guide RNA
cagccuacaucaaaaacuuc

SEQ ID NO: 15082 - RNA, 20 nt, Artificial Sequence
  Guide RNA
cagucuacaucaaaaacuuc

SEQ ID NO: 15083 - RNA, 20 nt, Artificial Sequence
  Guide RNA
caugcacugaaugauuacag

SEQ ID NO: 15084 - RNA, 20 nt, Artificial Sequence
  Guide RNA
cugaaugauuacagccuaca

SEQ ID NO: 15085 - RNA, 20 nt, Artificial Sequence
  Guide RNA
cugaaugauuacagucuaca

SEQ ID NO: 15086 - RNA, 20 nt, Artificial Sequence
  Guide RNA
gaaguuuuugauguagacug

SEQ ID NO: 15087 - RNA, 20 nt, Artificial Sequence
  Guide RNA
gaaguuuuugauguaggcug

SEQ ID NO: 15088 - RNA, 20 nt, Artificial Sequence
  Guide RNA
gaaugauuacagccuacauc

SEQ ID NO: 15089 - RNA, 20 nt, Artificial Sequence
  Guide RNA
gaaugauuacagucuacauc

SEQ ID NO: 15090 - RNA, 20 nt, Artificial Sequence
  Guide RNA
gacuguaaucauucagugca

SEQ ID NO: 15091 - RNA, 20 nt, Artificial Sequence
  Guide RNA
gauguagacuguaaucauuc

SEQ ID NO: 15092 - RNA, 20 nt, Artificial Sequence
  Guide RNA
gauguaggcuguaaucauuc

SEQ ID NO: 15093 - RNA, 20 nt, Artificial Sequence
  Guide RNA
gauuacagccuacaucaaaa

SEQ ID NO: 15094 - RNA, 20 nt, Artificial Sequence
  Guide RNA
gauuacagucuacaucaaaa

SEQ ID NO: 15095 - RNA, 20 nt, Artificial Sequence
  Guide RNA
gcacugaaugauuacagccu

SEQ ID NO: 15096 - RNA, 20 nt, Artificial Sequence
  Guide RNA
gcacugaaugauuacagucu

SEQ ID NO: 15097 - RNA, 20 nt, Artificial Sequence
  Guide RNA
gccuacaucaaaaacuucua

SEQ ID NO: 15098 - RNA, 20 nt, Artificial Sequence
  Guide RNA
ggcuguaaucauucagugca

SEQ ID NO: 15099 - RNA, 20 nt, Artificial Sequence
  Guide RNA
guagaaguuuuugauguaga

SEQ ID NO: 15100 - RNA, 20 nt, Artificial Sequence
  Guide RNA
guagaaguuuuugauguagg

SEQ ID NO: 15101 - RNA, 20 nt, Artificial Sequence
  Guide RNA
guagacuguaaucauucagu

SEQ ID NO: 15102 - RNA, 20 nt, Artificial Sequence
  Guide RNA
guaggcuguaaucauucagu

SEQ ID NO: 15103 - RNA, 20 nt, Artificial Sequence
  Guide RNA
gucuacaucaaaaacuucua

SEQ ID NO: 15104 - RNA, 20 nt, Artificial Sequence
  Guide RNA
guguagaaguuuuugaugua

SEQ ID NO: 15105 - RNA, 20 nt, Artificial Sequence
  Guide RNA
guguguagaaguuuuugaug

SEQ ID NO: 15106 - RNA, 20 nt, Artificial Sequence
  Guide RNA
guuuuugauguagacuguaa

SEQ ID NO: 15107 - RNA, 20 nt, Artificial Sequence
  Guide RNA
guuuuugauguaggcuguaa

SEQ ID NO: 15108 - RNA, 20 nt, Artificial Sequence
  Guide RNA
uaacaugcacugaaugauua

SEQ ID NO: 15109 - RNA, 20 nt, Artificial Sequence
  Guide RNA
uacagccuacaucaaaaacu

SEQ ID NO: 15110 - RNA, 20 nt, Artificial Sequence
  Guide RNA
uacagucuacaucaaaaacu

SEQ ID NO: 15111 - RNA, 20 nt, Artificial Sequence
  Guide RNA
uagaaguuuuugauguagac

SEQ ID NO: 15112 - RNA, 20 nt, Artificial Sequence
  Guide RNA
uagaaguuuuugauguaggc

SEQ ID NO: 15113 - RNA, 20 nt, Artificial Sequence
  Guide RNA
uagacuguaaucauucagug

SEQ ID NO: 15114 - RNA, 20 nt, Artificial Sequence
  Guide RNA
uaggcuguaaucauucagug

SEQ ID NO: 15115 - RNA, 20 nt, Artificial Sequence
  Guide RNA
ugaaugauuacagccuacau

SEQ ID NO: 15116 - RNA, 20 nt, Artificial Sequence
  Guide RNA
ugaaugauuacagucuacau

SEQ ID NO: 15117 - RNA, 20 nt, Artificial Sequence
  Guide RNA
ugauguagacuguaaucauu

SEQ ID NO: 15118 - RNA, 20 nt, Artificial Sequence
  Guide RNA
ugauguaggcuguaaucauu

SEQ ID NO: 15119 - RNA, 20 nt, Artificial Sequence
  Guide RNA
ugauuacagccuacaucaaa

SEQ ID NO: 15120 - RNA, 20 nt, Artificial Sequence
  Guide RNA
ugauuacagucuacaucaaa

SEQ ID NO: 15121 - RNA, 20 nt, Artificial Sequence
  Guide RNA
ugcacugaaugauuacagcc

SEQ ID NO: 15122 - RNA, 20 nt, Artificial Sequence
  Guide RNA
ugcacugaaugauuacaguc

SEQ ID NO: 15123 - RNA, 20 nt, Artificial Sequence
  Guide RNA
uguagaaguuuuugauguag

SEQ ID NO: 15124 - RNA, 20 nt, Artificial Sequence
  Guide RNA
uguagacuguaaucauucag

SEQ ID NO: 15125 - RNA, 20 nt, Artificial Sequence
  Guide RNA
uguaggcuguaaucauucag

SEQ ID NO: 15126 - RNA, 20 nt, Artificial Sequence
  Guide RNA
uguguagaaguuuuugaugu

SEQ ID NO: 15127 - RNA, 20 nt, Artificial Sequence
  Guide RNA
uuacagccuacaucaaaaac

SEQ ID NO: 15128 - RNA, 20 nt, Artificial Sequence
  Guide RNA
uuacagucuacaucaaaaac

SEQ ID NO: 15129 - RNA, 20 nt, Artificial Sequence
  Guide RNA
uugauguagacuguaaucau

SEQ ID NO: 15130 - RNA, 20 nt, Artificial Sequence
  Guide RNA
uugauguaggcuguaaucau

SEQ ID NO: 15131 - RNA, 20 nt, Artificial Sequence
  Guide RNA
uuugauguagacuguaauca

SEQ ID NO: 15132 - RNA, 20 nt, Artificial Sequence
  Guide RNA
uuugauguaggcuguaauca

SEQ ID NO: 15133 - RNA, 20 nt, Artificial Sequence
  Guide RNA
uuuugauguagacuguaauc

SEQ ID NO: 15134 - RNA, 20 nt, Artificial Sequence
  Guide RNA
uuuugauguaggcuguaauc

SEQ ID NO: 15135 - RNA, 20 nt, Artificial Sequence
  Guide RNA
uuuuugauguaggcuguaau

SEQ ID NO: 15136 - RNA, 21 nt, Artificial Sequence
  Guide RNA
aacaugcacugaaugauuaca

SEQ ID NO: 15137 - RNA, 21 nt, Artificial Sequence
  Guide RNA
aaguuuuugauguaggcugua

SEQ ID NO: 15138 - RNA, 21 nt, Artificial Sequence
  Guide RNA
aaugauuacagccuacaucaa

SEQ ID NO: 15139 - RNA, 21 nt, Artificial Sequence
  Guide RNA
acagccuacaucaaaaacuuc

SEQ ID NO: 15140 - RNA, 21 nt, Artificial Sequence
  Guide RNA
acagucuacaucaaaaacuuc

SEQ ID NO: 15141 - RNA, 21 nt, Artificial Sequence
  Guide RNA
acaugcacugaaugauuacag

SEQ ID NO: 15142 - RNA, 21 nt, Artificial Sequence
  Guide RNA
acugaaugauuacagccuaca

SEQ ID NO: 15143 - RNA, 21 nt, Artificial Sequence
  Guide RNA
acugaaugauuacagucuaca

SEQ ID NO: 15144 - RNA, 21 nt, Artificial Sequence
  Guide RNA
agaaguuuuugauguagacug

SEQ ID NO: 15145 - RNA, 21 nt, Artificial Sequence
  Guide RNA
agaaguuuuugauguaggcug

SEQ ID NO: 15146 - RNA, 21 nt, Artificial Sequence
  Guide RNA
agacuguaaucauucagugca

SEQ ID NO: 15147 - RNA, 21 nt, Artificial Sequence
  Guide RNA
agccuacaucaaaaacuucua

SEQ ID NO: 15148 - RNA, 21 nt, Artificial Sequence
  Guide RNA
aggcuguaaucauucagugca

SEQ ID NO: 15149 - RNA, 21 nt, Artificial Sequence
  Guide RNA
aguuuuugauguaggcuguaa

SEQ ID NO: 15150 - RNA, 21 nt, Artificial Sequence
  Guide RNA
augauuacagccuacaucaaa

SEQ ID NO: 15151 - RNA, 21 nt, Artificial Sequence
  Guide RNA
augcacugaaugauuacagcc

SEQ ID NO: 15152 - RNA, 21 nt, Artificial Sequence
  Guide RNA
augcacugaaugauuacaguc

SEQ ID NO: 15153 - RNA, 21 nt, Artificial Sequence
  Guide RNA
auguagacuguaaucauucag

SEQ ID NO: 15154 - RNA, 21 nt, Artificial Sequence
  Guide RNA
auguaggcuguaaucauucag

SEQ ID NO: 15155 - RNA, 21 nt, Artificial Sequence
  Guide RNA
auuacagccuacaucaaaaac

SEQ ID NO: 15156 - RNA, 21 nt, Artificial Sequence
  Guide RNA
cacugaaugauuacagccuac

SEQ ID NO: 15157 - RNA, 21 nt, Artificial Sequence
  Guide RNA
cacugaaugauuacagucuac

SEQ ID NO: 15158 - RNA, 21 nt, Artificial Sequence
  Guide RNA
cagccuacaucaaaaacuucu

SEQ ID NO: 15159 - RNA, 21 nt, Artificial Sequence
  Guide RNA
cagucuacaucaaaaacuucu

SEQ ID NO: 15160 - RNA, 21 nt, Artificial Sequence
  Guide RNA
caugcacugaaugauuacagc

SEQ ID NO: 15161 - RNA, 21 nt, Artificial Sequence
  Guide RNA
caugcacugaaugauuacagu

SEQ ID NO: 15162 - RNA, 21 nt, Artificial Sequence
  Guide RNA
cuaacaugcacugaaugauua

SEQ ID NO: 15163 - RNA, 21 nt, Artificial Sequence
  Guide RNA
cugaaugauuacagccuacau

SEQ ID NO: 15164 - RNA, 21 nt, Artificial Sequence
  Guide RNA
cugaaugauuacagucuacau

SEQ ID NO: 15165 - RNA, 21 nt, Artificial Sequence
  Guide RNA
gaaguuuuugauguagacugu

SEQ ID NO: 15166 - RNA, 21 nt, Artificial Sequence
  Guide RNA
gaaguuuuugauguaggcugu

SEQ ID NO: 15167 - RNA, 21 nt, Artificial Sequence
  Guide RNA
gaaugauuacagccuacauca

SEQ ID NO: 15168 - RNA, 21 nt, Artificial Sequence
  Guide RNA
gaaugauuacagucuacauca

SEQ ID NO: 15169 - RNA, 21 nt, Artificial Sequence
  Guide RNA
gacuguaaucauucagugcau

SEQ ID NO: 15170 - RNA, 21 nt, Artificial Sequence
  Guide RNA
gauguagacuguaaucauuca

SEQ ID NO: 15171 - RNA, 21 nt, Artificial Sequence
  Guide RNA
gauguaggcuguaaucauuca

SEQ ID NO: 15172 - RNA, 21 nt, Artificial Sequence
  Guide RNA
gauuacagccuacaucaaaaa

SEQ ID NO: 15173 - RNA, 21 nt, Artificial Sequence
  Guide RNA
gcacugaaugauuacagccua

SEQ ID NO: 15174 - RNA, 21 nt, Artificial Sequence
  Guide RNA
gcacugaaugauuacagucua

SEQ ID NO: 15175 - RNA, 21 nt, Artificial Sequence
  Guide RNA
gccuacaucaaaaacuucuac

SEQ ID NO: 15176 - RNA, 21 nt, Artificial Sequence
  Guide RNA
ggcuguaaucauucagugcau

SEQ ID NO: 15177 - RNA, 21 nt, Artificial Sequence
  Guide RNA
gguguguagaaguuuuugaug

SEQ ID NO: 15178 - RNA, 21 nt, Artificial Sequence
  Guide RNA
guagaaguuuuugauguagac

SEQ ID NO: 15179 - RNA, 21 nt, Artificial Sequence
  Guide RNA
guagaaguuuuugauguaggc

SEQ ID NO: 15180 - RNA, 21 nt, Artificial Sequence
  Guide RNA
guagacuguaaucauucagug

SEQ ID NO: 15181 - RNA, 21 nt, Artificial Sequence
  Guide RNA
guaggcuguaaucauucagug

SEQ ID NO: 15182 - RNA, 21 nt, Artificial Sequence
  Guide RNA
gucuacaucaaaaacuucuac

SEQ ID NO: 15183 - RNA, 21 nt, Artificial Sequence
  Guide RNA
guguagaaguuuuugauguag

SEQ ID NO: 15184 - RNA, 21 nt, Artificial Sequence
  Guide RNA
guguguagaaguuuuugaugu

SEQ ID NO: 15185 - RNA, 21 nt, Artificial Sequence
  Guide RNA
guuuuugauguaggcuguaau

SEQ ID NO: 15186 - RNA, 21 nt, Artificial Sequence
  Guide RNA
uaacaugcacugaaugauuac

SEQ ID NO: 15187 - RNA, 21 nt, Artificial Sequence
  Guide RNA
uacagccuacaucaaaaacuu

SEQ ID NO: 15188 - RNA, 21 nt, Artificial Sequence
  Guide RNA
uagaaguuuuugauguaggcu

SEQ ID NO: 15189 - RNA, 21 nt, Artificial Sequence
  Guide RNA
uagacuguaaucauucagugc

SEQ ID NO: 15190 - RNA, 21 nt, Artificial Sequence
  Guide RNA
uaggcuguaaucauucagugc

SEQ ID NO: 15191 - RNA, 21 nt, Artificial Sequence
  Guide RNA
ugaaugauuacagccuacauc

SEQ ID NO: 15192 - RNA, 21 nt, Artificial Sequence
  Guide RNA
ugaaugauuacagucuacauc

SEQ ID NO: 15193 - RNA, 21 nt, Artificial Sequence
  Guide RNA
ugauguagacuguaaucauuc

SEQ ID NO: 15194 - RNA, 21 nt, Artificial Sequence
  Guide RNA
ugauguaggcuguaaucauuc

SEQ ID NO: 15195 - RNA, 21 nt, Artificial Sequence
  Guide RNA
ugauuacagccuacaucaaaa

SEQ ID NO: 15196 - RNA, 21 nt, Artificial Sequence
  Guide RNA
ugcacugaaugauuacagccu

SEQ ID NO: 15197 - RNA, 21 nt, Artificial Sequence
  Guide RNA
ugcacugaaugauuacagucu

SEQ ID NO: 15198 - RNA, 21 nt, Artificial Sequence
  Guide RNA
uguagaaguuuuugauguagg

SEQ ID NO: 15199 - RNA, 21 nt, Artificial Sequence
  Guide RNA
uguagacuguaaucauucagu

SEQ ID NO: 15200 - RNA, 21 nt, Artificial Sequence
  Guide RNA
uguaggcuguaaucauucagu

SEQ ID NO: 15201 - RNA, 21 nt, Artificial Sequence
  Guide RNA
uuacagccuacaucaaaaacu

SEQ ID NO: 15202 - RNA, 21 nt, Artificial Sequence
  Guide RNA
uugauguaggcuguaaucauu

SEQ ID NO: 15203 - RNA, 21 nt, Artificial Sequence
  Guide RNA
uuugauguaggcuguaaucau

SEQ ID NO: 15204 - RNA, 21 nt, Artificial Sequence
  Guide RNA
uuuugauguaggcuguaauca

SEQ ID NO: 15205 - RNA, 21 nt, Artificial Sequence
  Guide RNA
uuuuugauguaggcuguaauc

SEQ ID NO: 15206 - RNA, 22 nt, Artificial Sequence
  Guide RNA
aacaugcacugaaugauuacag

SEQ ID NO: 15207 - RNA, 22 nt, Artificial Sequence
  Guide RNA
aaguuuuugauguaggcuguaa

SEQ ID NO: 15208 - RNA, 22 nt, Artificial Sequence
  Guide RNA
aaugauuacagccuacaucaaa

SEQ ID NO: 15209 - RNA, 22 nt, Artificial Sequence
  Guide RNA
acagccuacaucaaaaacuucu

SEQ ID NO: 15210 - RNA, 22 nt, Artificial Sequence
  Guide RNA
acagucuacaucaaaaacuucu

SEQ ID NO: 15211 - RNA, 22 nt, Artificial Sequence
  Guide RNA
acaugcacugaaugauuacagc

SEQ ID NO: 15212 - RNA, 22 nt, Artificial Sequence
  Guide RNA
acaugcacugaaugauuacagu

SEQ ID NO: 15213 - RNA, 22 nt, Artificial Sequence
  Guide RNA
acuaacaugcacugaaugauua

SEQ ID NO: 15214 - RNA, 22 nt, Artificial Sequence
  Guide RNA
acugaaugauuacagccuacau

SEQ ID NO: 15215 - RNA, 22 nt, Artificial Sequence
  Guide RNA
acugaaugauuacagucuacau

SEQ ID NO: 15216 - RNA, 22 nt, Artificial Sequence
  Guide RNA
agaaguuuuugauguagacugu

SEQ ID NO: 15217 - RNA, 22 nt, Artificial Sequence
  Guide RNA
agaaguuuuugauguaggcugu

SEQ ID NO: 15218 - RNA, 22 nt, Artificial Sequence
  Guide RNA
agacuguaaucauucagugcau

SEQ ID NO: 15219 - RNA, 22 nt, Artificial Sequence
  Guide RNA
agccuacaucaaaaacuucuac

SEQ ID NO: 15220 - RNA, 22 nt, Artificial Sequence
  Guide RNA
aggcuguaaucauucagugcau

SEQ ID NO: 15221 - RNA, 22 nt, Artificial Sequence
  Guide RNA
agucuacaucaaaaacuucuac

SEQ ID NO: 15222 - RNA, 22 nt, Artificial Sequence
  Guide RNA
aguuuuugauguaggcuguaau

SEQ ID NO: 15223 - RNA, 22 nt, Artificial Sequence
  Guide RNA
augauuacagccuacaucaaaa

SEQ ID NO: 15224 - RNA, 22 nt, Artificial Sequence
  Guide RNA
augcacugaaugauuacagccu

SEQ ID NO: 15225 - RNA, 22 nt, Artificial Sequence
  Guide RNA
augcacugaaugauuacagucu

SEQ ID NO: 15226 - RNA, 22 nt, Artificial Sequence
  Guide RNA
auguagacuguaaucauucagu

SEQ ID NO: 15227 - RNA, 22 nt, Artificial Sequence
  Guide RNA
auguaggcuguaaucauucagu

SEQ ID NO: 15228 - RNA, 22 nt, Artificial Sequence
  Guide RNA
auuacagccuacaucaaaaacu

SEQ ID NO: 15229 - RNA, 22 nt, Artificial Sequence
  Guide RNA
cacugaaugauuacagccuaca

SEQ ID NO: 15230 - RNA, 22 nt, Artificial Sequence
  Guide RNA
cacugaaugauuacagucuaca

SEQ ID NO: 15231 - RNA, 22 nt, Artificial Sequence
  Guide RNA
cagccuacaucaaaaacuucua

SEQ ID NO: 15232 - RNA, 22 nt, Artificial Sequence
  Guide RNA
cagucuacaucaaaaacuucua

SEQ ID NO: 15233 - RNA, 22 nt, Artificial Sequence
  Guide RNA
caugcacugaaugauuacagcc

SEQ ID NO: 15234 - RNA, 22 nt, Artificial Sequence
  Guide RNA
caugcacugaaugauuacaguc

SEQ ID NO: 15235 - RNA, 22 nt, Artificial Sequence
  Guide RNA
cuaacaugcacugaaugauuac

SEQ ID NO: 15236 - RNA, 22 nt, Artificial Sequence
  Guide RNA
cugaaugauuacagccuacauc

SEQ ID NO: 15237 - RNA, 22 nt, Artificial Sequence
  Guide RNA
cugaaugauuacagucuacauc

SEQ ID NO: 15238 - RNA, 22 nt, Artificial Sequence
  Guide RNA
gaaguuuuugauguagacugua

SEQ ID NO: 15239 - RNA, 22 nt, Artificial Sequence
  Guide RNA
gaaguuuuugauguaggcugua

SEQ ID NO: 15240 - RNA, 22 nt, Artificial Sequence
  Guide RNA
gaaugauuacagccuacaucaa

SEQ ID NO: 15241 - RNA, 22 nt, Artificial Sequence
  Guide RNA
gaaugauuacagucuacaucaa

SEQ ID NO: 15242 - RNA, 22 nt, Artificial Sequence
  Guide RNA
gacuguaaucauucagugcaug

SEQ ID NO: 15243 - RNA, 22 nt, Artificial Sequence
  Guide RNA
gauguagacuguaaucauucag

SEQ ID NO: 15244 - RNA, 22 nt, Artificial Sequence
  Guide RNA
gauguaggcuguaaucauucag

SEQ ID NO: 15245 - RNA, 22 nt, Artificial Sequence
  Guide RNA
gauuacagccuacaucaaaaac

SEQ ID NO: 15246 - RNA, 22 nt, Artificial Sequence
  Guide RNA
gauuacagucuacaucaaaaac

SEQ ID NO: 15247 - RNA, 22 nt, Artificial Sequence
  Guide RNA
gcacugaaugauuacagccuac

SEQ ID NO: 15248 - RNA, 22 nt, Artificial Sequence
  Guide RNA
gcacugaaugauuacagucuac

SEQ ID NO: 15249 - RNA, 22 nt, Artificial Sequence
  Guide RNA
gccuacaucaaaaacuucuaca

SEQ ID NO: 15250 - RNA, 22 nt, Artificial Sequence
  Guide RNA
ggcuguaaucauucagugcaug

SEQ ID NO: 15251 - RNA, 22 nt, Artificial Sequence
  Guide RNA
gguguguagaaguuuuugaugu

SEQ ID NO: 15252 - RNA, 22 nt, Artificial Sequence
  Guide RNA
guagaaguuuuugauguagacu

SEQ ID NO: 15253 - RNA, 22 nt, Artificial Sequence
  Guide RNA
guagaaguuuuugauguaggcu

SEQ ID NO: 15254 - RNA, 22 nt, Artificial Sequence
  Guide RNA
guagacuguaaucauucagugc

SEQ ID NO: 15255 - RNA, 22 nt, Artificial Sequence
  Guide RNA
guaggcuguaaucauucagugc

SEQ ID NO: 15256 - RNA, 22 nt, Artificial Sequence
  Guide RNA
gucuacaucaaaaacuucuaca

SEQ ID NO: 15257 - RNA, 22 nt, Artificial Sequence
  Guide RNA
guguagaaguuuuugauguaga

SEQ ID NO: 15258 - RNA, 22 nt, Artificial Sequence
  Guide RNA
guguagaaguuuuugauguagg

SEQ ID NO: 15259 - RNA, 22 nt, Artificial Sequence
  Guide RNA
guguguagaaguuuuugaugua

SEQ ID NO: 15260 - RNA, 22 nt, Artificial Sequence
  Guide RNA
guuuuugauguagacuguaauc

SEQ ID NO: 15261 - RNA, 22 nt, Artificial Sequence
  Guide RNA
guuuuugauguaggcuguaauc

SEQ ID NO: 15262 - RNA, 22 nt, Artificial Sequence
  Guide RNA
uaacaugcacugaaugauuaca

SEQ ID NO: 15263 - RNA, 22 nt, Artificial Sequence
  Guide RNA
uacagccuacaucaaaaacuuc

SEQ ID NO: 15264 - RNA, 22 nt, Artificial Sequence
  Guide RNA
uacagucuacaucaaaaacuuc

SEQ ID NO: 15265 - RNA, 22 nt, Artificial Sequence
  Guide RNA
uagaaguuuuugauguagacug

SEQ ID NO: 15266 - RNA, 22 nt, Artificial Sequence
  Guide RNA
uagaaguuuuugauguaggcug

SEQ ID NO: 15267 - RNA, 22 nt, Artificial Sequence
  Guide RNA
uagacuguaaucauucagugca

SEQ ID NO: 15268 - RNA, 22 nt, Artificial Sequence
  Guide RNA
uaggcuguaaucauucagugca

SEQ ID NO: 15269 - RNA, 22 nt, Artificial Sequence
  Guide RNA
ugaaugauuacagccuacauca

SEQ ID NO: 15270 - RNA, 22 nt, Artificial Sequence
  Guide RNA
ugaaugauuacagucuacauca

SEQ ID NO: 15271 - RNA, 22 nt, Artificial Sequence
  Guide RNA
ugauguagacuguaaucauuca

SEQ ID NO: 15272 - RNA, 22 nt, Artificial Sequence
  Guide RNA
ugauguaggcuguaaucauuca

SEQ ID NO: 15273 - RNA, 22 nt, Artificial Sequence
  Guide RNA
ugauuacagccuacaucaaaaa

SEQ ID NO: 15274 - RNA, 22 nt, Artificial Sequence
  Guide RNA
ugcacugaaugauuacagccua

SEQ ID NO: 15275 - RNA, 22 nt, Artificial Sequence
  Guide RNA
ugcacugaaugauuacagucua

SEQ ID NO: 15276 - RNA, 22 nt, Artificial Sequence
  Guide RNA
ugguguguagaaguuuuugaug

SEQ ID NO: 15277 - RNA, 22 nt, Artificial Sequence
  Guide RNA
uguagaaguuuuugauguagac

SEQ ID NO: 15278 - RNA, 22 nt, Artificial Sequence
  Guide RNA
uguagaaguuuuugauguaggc

SEQ ID NO: 15279 - RNA, 22 nt, Artificial Sequence
  Guide RNA
uguagacuguaaucauucagug

SEQ ID NO: 15280 - RNA, 22 nt, Artificial Sequence
  Guide RNA
uguaggcuguaaucauucagug

SEQ ID NO: 15281 - RNA, 22 nt, Artificial Sequence
  Guide RNA
uguguagaaguuuuugauguag

SEQ ID NO: 15282 - RNA, 22 nt, Artificial Sequence
  Guide RNA
uuacagccuacaucaaaaacuu

SEQ ID NO: 15283 - RNA, 22 nt, Artificial Sequence
  Guide RNA
uugauguagacuguaaucauuc

SEQ ID NO: 15284 - RNA, 22 nt, Artificial Sequence
  Guide RNA
uugauguaggcuguaaucauuc

SEQ ID NO: 15285 - RNA, 22 nt, Artificial Sequence
  Guide RNA
uuugauguaggcuguaaucauu

SEQ ID NO: 15286 - RNA, 22 nt, Artificial Sequence
  Guide RNA
uuuugauguaggcuguaaucau

SEQ ID NO: 15287 - RNA, 22 nt, Artificial Sequence
  Guide RNA
uuuuugauguaggcuguaauca

SEQ ID NO: 15288 - RNA, 20 nt, Artificial Sequence
  Guide RNA
aaacccaggugguauaaccu

SEQ ID NO: 15289 - RNA, 20 nt, Artificial Sequence
  Guide RNA
aacccaggugguauaaccua

SEQ ID NO: 15290 - RNA, 20 nt, Artificial Sequence
  Guide RNA
aaccuaccauacaccuacac

SEQ ID NO: 15291 - RNA, 20 nt, Artificial Sequence
  Guide RNA
aaccuacuauacaccuacac

SEQ ID NO: 15292 - RNA, 20 nt, Artificial Sequence
  Guide RNA
accauacaccuacacuauau

SEQ ID NO: 15293 - RNA, 20 nt, Artificial Sequence
  Guide RNA
accauauaguguagguguau

SEQ ID NO: 15294 - RNA, 20 nt, Artificial Sequence
  Guide RNA
acccaggugguauaaccuac

SEQ ID NO: 15295 - RNA, 20 nt, Artificial Sequence
  Guide RNA
accuaccauacaccuacacu

SEQ ID NO: 15296 - RNA, 20 nt, Artificial Sequence
  Guide RNA
accuacuauacaccuacacu

SEQ ID NO: 15297 - RNA, 20 nt, Artificial Sequence
  Guide RNA
acuauacaccuacacuauau

SEQ ID NO: 15298 - RNA, 20 nt, Artificial Sequence
  Guide RNA
aggugguauaaccuaccaua

SEQ ID NO: 15299 - RNA, 20 nt, Artificial Sequence
  Guide RNA
aggugguauaaccuacuaua

SEQ ID NO: 15300 - RNA, 20 nt, Artificial Sequence
  Guide RNA
agguguauaguagguuauac

SEQ ID NO: 15301 - RNA, 20 nt, Artificial Sequence
  Guide RNA
agguguaugguagguuauac

SEQ ID NO: 15302 - RNA, 20 nt, Artificial Sequence
  Guide RNA
aguguagguguauaguaggu

SEQ ID NO: 15303 - RNA, 20 nt, Artificial Sequence
  Guide RNA
aguguagguguaugguaggu

SEQ ID NO: 15304 - RNA, 20 nt, Artificial Sequence
  Guide RNA
auaaccuaccauacaccuac

SEQ ID NO: 15305 - RNA, 20 nt, Artificial Sequence
  Guide RNA
auaaccuacuauacaccuac

SEQ ID NO: 15306 - RNA, 20 nt, Artificial Sequence
  Guide RNA
auaguagguuauaccaccug

SEQ ID NO: 15307 - RNA, 20 nt, Artificial Sequence
  Guide RNA
auaguguagguguauaguag

SEQ ID NO: 15308 - RNA, 20 nt, Artificial Sequence
  Guide RNA
auaguguagguguaugguag

SEQ ID NO: 15309 - RNA, 20 nt, Artificial Sequence
  Guide RNA
auauaguguagguguauagu

SEQ ID NO: 15310 - RNA, 20 nt, Artificial Sequence
  Guide RNA
auauaguguagguguauggu

SEQ ID NO: 15311 - RNA, 20 nt, Artificial Sequence
  Guide RNA
augguagguuauaccaccug

SEQ ID NO: 15312 - RNA, 20 nt, Artificial Sequence
  Guide RNA
caaacccaggugguauaacc

SEQ ID NO: 15313 - RNA, 20 nt, Artificial Sequence
  Guide RNA
caggugguauaaccuaccau

SEQ ID NO: 15314 - RNA, 20 nt, Artificial Sequence
  Guide RNA
caggugguauaaccuacuau

SEQ ID NO: 15315 - RNA, 20 nt, Artificial Sequence
  Guide RNA
cauauaguguagguguauag

SEQ ID NO: 15316 - RNA, 20 nt, Artificial Sequence
  Guide RNA
cauauaguguagguguaugg

SEQ ID NO: 15317 - RNA, 20 nt, Artificial Sequence
  Guide RNA
ccaggugguauaaccuacca

SEQ ID NO: 15318 - RNA, 20 nt, Artificial Sequence
  Guide RNA
ccaggugguauaaccuacua

SEQ ID NO: 15319 - RNA, 20 nt, Artificial Sequence
  Guide RNA
ccauacaccuacacuauaug

SEQ ID NO: 15320 - RNA, 20 nt, Artificial Sequence
  Guide RNA
ccauauaguguagguguaua

SEQ ID NO: 15321 - RNA, 20 nt, Artificial Sequence
  Guide RNA
ccauauaguguagguguaug

SEQ ID NO: 15322 - RNA, 20 nt, Artificial Sequence
  Guide RNA
cccaggugguauaaccuacc

SEQ ID NO: 15323 - RNA, 20 nt, Artificial Sequence
  Guide RNA
cccaggugguauaaccuacu

SEQ ID NO: 15324 - RNA, 20 nt, Artificial Sequence
  Guide RNA
ccuaccauacaccuacacua

SEQ ID NO: 15325 - RNA, 20 nt, Artificial Sequence
  Guide RNA
ccuacuauacaccuacacua

SEQ ID NO: 15326 - RNA, 20 nt, Artificial Sequence
  Guide RNA
cuaccauacaccuacacuau

SEQ ID NO: 15327 - RNA, 20 nt, Artificial Sequence
  Guide RNA
cuacuauacaccuacacuau

SEQ ID NO: 15328 - RNA, 20 nt, Artificial Sequence
  Guide RNA
cuauacaccuacacuauaug

SEQ ID NO: 15329 - RNA, 20 nt, Artificial Sequence
  Guide RNA
gguauaaccuaccauacacc

SEQ ID NO: 15330 - RNA, 20 nt, Artificial Sequence
  Guide RNA
gguauaaccuacuauacacc

SEQ ID NO: 15331 - RNA, 20 nt, Artificial Sequence
  Guide RNA
ggugguauaaccuaccauac

SEQ ID NO: 15332 - RNA, 20 nt, Artificial Sequence
  Guide RNA
ggugguauaaccuacuauac

SEQ ID NO: 15333 - RNA, 20 nt, Artificial Sequence
  Guide RNA
gguguauaguagguuauacc

SEQ ID NO: 15334 - RNA, 20 nt, Artificial Sequence
  Guide RNA
gguguaugguagguuauacc

SEQ ID NO: 15335 - RNA, 20 nt, Artificial Sequence
  Guide RNA
guagguguauaguagguuau

SEQ ID NO: 15336 - RNA, 20 nt, Artificial Sequence
  Guide RNA
guagguguaugguagguuau

SEQ ID NO: 15337 - RNA, 20 nt, Artificial Sequence
  Guide RNA
guauaaccuaccauacaccu

SEQ ID NO: 15338 - RNA, 20 nt, Artificial Sequence
  Guide RNA
guauaaccuacuauacaccu

SEQ ID NO: 15339 - RNA, 20 nt, Artificial Sequence
  Guide RNA
guauaguagguuauaccacc

SEQ ID NO: 15340 - RNA, 20 nt, Artificial Sequence
  Guide RNA
guaugguagguuauaccacc

SEQ ID NO: 15341 - RNA, 20 nt, Artificial Sequence
  Guide RNA
gugguauaaccuaccauaca

SEQ ID NO: 15342 - RNA, 20 nt, Artificial Sequence
  Guide RNA
gugguauaaccuacuauaca

SEQ ID NO: 15343 - RNA, 20 nt, Artificial Sequence
  Guide RNA
guguagguguauaguagguu

SEQ ID NO: 15344 - RNA, 20 nt, Artificial Sequence
  Guide RNA
guguagguguaugguagguu

SEQ ID NO: 15345 - RNA, 20 nt, Artificial Sequence
  Guide RNA
guguauaguagguuauacca

SEQ ID NO: 15346 - RNA, 20 nt, Artificial Sequence
  Guide RNA
guguaugguagguuauacca

SEQ ID NO: 15347 - RNA, 20 nt, Artificial Sequence
  Guide RNA
uaaccuaccauacaccuaca

SEQ ID NO: 15348 - RNA, 20 nt, Artificial Sequence
  Guide RNA
uaaccuacuauacaccuaca

SEQ ID NO: 15349 - RNA, 20 nt, Artificial Sequence
  Guide RNA
uaccauacaccuacacuaua

SEQ ID NO: 15350 - RNA, 20 nt, Artificial Sequence
  Guide RNA
uaccauauaguguaggugua

SEQ ID NO: 15351 - RNA, 20 nt, Artificial Sequence
  Guide RNA
uacuauacaccuacacuaua

SEQ ID NO: 15352 - RNA, 20 nt, Artificial Sequence
  Guide RNA
uagguguauaguagguuaua

SEQ ID NO: 15353 - RNA, 20 nt, Artificial Sequence
  Guide RNA
uagguguaugguagguuaua

SEQ ID NO: 15354 - RNA, 20 nt, Artificial Sequence
  Guide RNA
uaguagguuauaccaccugg

SEQ ID NO: 15355 - RNA, 20 nt, Artificial Sequence
  Guide RNA
uaguguagguguauaguagg

SEQ ID NO: 15356 - RNA, 20 nt, Artificial Sequence
  Guide RNA
uaguguagguguaugguagg

SEQ ID NO: 15357 - RNA, 20 nt, Artificial Sequence
  Guide RNA
uauaaccuaccauacaccua

SEQ ID NO: 15358 - RNA, 20 nt, Artificial Sequence
  Guide RNA
uauaaccuacuauacaccua

SEQ ID NO: 15359 - RNA, 20 nt, Artificial Sequence
  Guide RNA
uauaguagguuauaccaccu

SEQ ID NO: 15360 - RNA, 20 nt, Artificial Sequence
  Guide RNA
uauaguguagguguauagua

SEQ ID NO: 15361 - RNA, 20 nt, Artificial Sequence
  Guide RNA
uauaguguagguguauggua

SEQ ID NO: 15362 - RNA, 20 nt, Artificial Sequence
  Guide RNA
uaugguagguuauaccaccu

SEQ ID NO: 15363 - RNA, 20 nt, Artificial Sequence
  Guide RNA
ugguagguuauaccaccugg

SEQ ID NO: 15364 - RNA, 20 nt, Artificial Sequence
  Guide RNA
ugguauaaccuaccauacac

SEQ ID NO: 15365 - RNA, 20 nt, Artificial Sequence
  Guide RNA
ugguauaaccuacuauacac

SEQ ID NO: 15366 - RNA, 20 nt, Artificial Sequence
  Guide RNA
uguagguguauaguagguua

SEQ ID NO: 15367 - RNA, 20 nt, Artificial Sequence
  Guide RNA
uguagguguaugguagguua

SEQ ID NO: 15368 - RNA, 20 nt, Artificial Sequence
  Guide RNA
uguauaguagguuauaccac

SEQ ID NO: 15369 - RNA, 20 nt, Artificial Sequence
  Guide RNA
uguaugguagguuauaccac

SEQ ID NO: 15370 - RNA, 20 nt, Artificial Sequence
  Guide RNA
uuaccauauaguguaggugu

SEQ ID NO: 15371 - RNA, 20 nt, Artificial Sequence
  Guide RNA
uuuaccauauaguguaggug

SEQ ID NO: 15372 - RNA, 21 nt, Artificial Sequence
  Guide RNA
aaacccaggugguauaaccua

SEQ ID NO: 15373 - RNA, 21 nt, Artificial Sequence
  Guide RNA
aacccaggugguauaaccuac

SEQ ID NO: 15374 - RNA, 21 nt, Artificial Sequence
  Guide RNA
aaccuaccauacaccuacacu

SEQ ID NO: 15375 - RNA, 21 nt, Artificial Sequence
  Guide RNA
aaccuacuauacaccuacacu

SEQ ID NO: 15376 - RNA, 21 nt, Artificial Sequence
  Guide RNA
acaaacccaggugguauaacc

SEQ ID NO: 15377 - RNA, 21 nt, Artificial Sequence
  Guide RNA
accauacaccuacacuauaug

SEQ ID NO: 15378 - RNA, 21 nt, Artificial Sequence
  Guide RNA
accauauaguguagguguaua

SEQ ID NO: 15379 - RNA, 21 nt, Artificial Sequence
  Guide RNA
accauauaguguagguguaug

SEQ ID NO: 15380 - RNA, 21 nt, Artificial Sequence
  Guide RNA
acccaggugguauaaccuacc

SEQ ID NO: 15381 - RNA, 21 nt, Artificial Sequence
  Guide RNA
acccaggugguauaaccuacu

SEQ ID NO: 15382 - RNA, 21 nt, Artificial Sequence
  Guide RNA
accuaccauacaccuacacua

SEQ ID NO: 15383 - RNA, 21 nt, Artificial Sequence
  Guide RNA
accuacuauacaccuacacua

SEQ ID NO: 15384 - RNA, 21 nt, Artificial Sequence
  Guide RNA
acuauacaccuacacuauaug

SEQ ID NO: 15385 - RNA, 21 nt, Artificial Sequence
  Guide RNA
aggugguauaaccuaccauac

SEQ ID NO: 15386 - RNA, 21 nt, Artificial Sequence
  Guide RNA
aggugguauaaccuacuauac

SEQ ID NO: 15387 - RNA, 21 nt, Artificial Sequence
  Guide RNA
agguguauaguagguuauacc

SEQ ID NO: 15388 - RNA, 21 nt, Artificial Sequence
  Guide RNA
agguguaugguagguuauacc

SEQ ID NO: 15389 - RNA, 21 nt, Artificial Sequence
  Guide RNA
aguguagguguauaguagguu

SEQ ID NO: 15390 - RNA, 21 nt, Artificial Sequence
  Guide RNA
aguguagguguaugguagguu

SEQ ID NO: 15391 - RNA, 21 nt, Artificial Sequence
  Guide RNA
auaaccuaccauacaccuaca

SEQ ID NO: 15392 - RNA, 21 nt, Artificial Sequence
  Guide RNA
auaaccuacuauacaccuaca

SEQ ID NO: 15393 - RNA, 21 nt, Artificial Sequence
  Guide RNA
auaguagguuauaccaccugg

SEQ ID NO: 15394 - RNA, 21 nt, Artificial Sequence
  Guide RNA
auaguguagguguauaguagg

SEQ ID NO: 15395 - RNA, 21 nt, Artificial Sequence
  Guide RNA
auaguguagguguaugguagg

SEQ ID NO: 15396 - RNA, 21 nt, Artificial Sequence
  Guide RNA
auauaguguagguguauggua

SEQ ID NO: 15397 - RNA, 21 nt, Artificial Sequence
  Guide RNA
augguagguuauaccaccugg

SEQ ID NO: 15398 - RNA, 21 nt, Artificial Sequence
  Guide RNA
caaacccaggugguauaaccu

SEQ ID NO: 15399 - RNA, 21 nt, Artificial Sequence
  Guide RNA
caggugguauaaccuaccaua

SEQ ID NO: 15400 - RNA, 21 nt, Artificial Sequence
  Guide RNA
caggugguauaaccuacuaua

SEQ ID NO: 15401 - RNA, 21 nt, Artificial Sequence
  Guide RNA
cauauaguguagguguauagu

SEQ ID NO: 15402 - RNA, 21 nt, Artificial Sequence
  Guide RNA
cauauaguguagguguauggu

SEQ ID NO: 15403 - RNA, 21 nt, Artificial Sequence
  Guide RNA
ccaggugguauaaccuaccau

SEQ ID NO: 15404 - RNA, 21 nt, Artificial Sequence
  Guide RNA
ccaggugguauaaccuacuau

SEQ ID NO: 15405 - RNA, 21 nt, Artificial Sequence
  Guide RNA
ccauacaccuacacuauaugg

SEQ ID NO: 15406 - RNA, 21 nt, Artificial Sequence
  Guide RNA
ccauauaguguagguguauag

SEQ ID NO: 15407 - RNA, 21 nt, Artificial Sequence
  Guide RNA
ccauauaguguagguguaugg

SEQ ID NO: 15408 - RNA, 21 nt, Artificial Sequence
  Guide RNA
cccaggugguauaaccuacca

SEQ ID NO: 15409 - RNA, 21 nt, Artificial Sequence
  Guide RNA
cccaggugguauaaccuacua

SEQ ID NO: 15410 - RNA, 21 nt, Artificial Sequence
  Guide RNA
ccuaccauacaccuacacuau

SEQ ID NO: 15411 - RNA, 21 nt, Artificial Sequence
  Guide RNA
ccuacuauacaccuacacuau

SEQ ID NO: 15412 - RNA, 21 nt, Artificial Sequence
  Guide RNA
cuaccauacaccuacacuaua

SEQ ID NO: 15413 - RNA, 21 nt, Artificial Sequence
  Guide RNA
cuacuauacaccuacacuaua

SEQ ID NO: 15414 - RNA, 21 nt, Artificial Sequence
  Guide RNA
cuauacaccuacacuauaugg

SEQ ID NO: 15415 - RNA, 21 nt, Artificial Sequence
  Guide RNA
cuuuaccauauaguguaggug

SEQ ID NO: 15416 - RNA, 21 nt, Artificial Sequence
  Guide RNA
gguauaaccuaccauacaccu

SEQ ID NO: 15417 - RNA, 21 nt, Artificial Sequence
  Guide RNA
gguauaaccuacuauacaccu

SEQ ID NO: 15418 - RNA, 21 nt, Artificial Sequence
  Guide RNA
ggugguauaaccuaccauaca

SEQ ID NO: 15419 - RNA, 21 nt, Artificial Sequence
  Guide RNA
ggugguauaaccuacuauaca

SEQ ID NO: 15420 - RNA, 21 nt, Artificial Sequence
  Guide RNA
gguguauaguagguuauacca

SEQ ID NO: 15421 - RNA, 21 nt, Artificial Sequence
  Guide RNA
gguguaugguagguuauacca

SEQ ID NO: 15422 - RNA, 21 nt, Artificial Sequence
  Guide RNA
guagguguauaguagguuaua

SEQ ID NO: 15423 - RNA, 21 nt, Artificial Sequence
  Guide RNA
guagguguaugguagguuaua

SEQ ID NO: 15424 - RNA, 21 nt, Artificial Sequence
  Guide RNA
guauaaccuaccauacaccua

SEQ ID NO: 15425 - RNA, 21 nt, Artificial Sequence
  Guide RNA
guauaaccuacuauacaccua

SEQ ID NO: 15426 - RNA, 21 nt, Artificial Sequence
  Guide RNA
guauaguagguuauaccaccu

SEQ ID NO: 15427 - RNA, 21 nt, Artificial Sequence
  Guide RNA
guaugguagguuauaccaccu

SEQ ID NO: 15428 - RNA, 21 nt, Artificial Sequence
  Guide RNA
gugguauaaccuaccauacac

SEQ ID NO: 15429 - RNA, 21 nt, Artificial Sequence
  Guide RNA
gugguauaaccuacuauacac

SEQ ID NO: 15430 - RNA, 21 nt, Artificial Sequence
  Guide RNA
guguagguguauaguagguua

SEQ ID NO: 15431 - RNA, 21 nt, Artificial Sequence
  Guide RNA
guguagguguaugguagguua

SEQ ID NO: 15432 - RNA, 21 nt, Artificial Sequence
  Guide RNA
guguauaguagguuauaccac

SEQ ID NO: 15433 - RNA, 21 nt, Artificial Sequence
  Guide RNA
guguaugguagguuauaccac

SEQ ID NO: 15434 - RNA, 21 nt, Artificial Sequence
  Guide RNA
uaaccuaccauacaccuacac

SEQ ID NO: 15435 - RNA, 21 nt, Artificial Sequence
  Guide RNA
uaaccuacuauacaccuacac

SEQ ID NO: 15436 - RNA, 21 nt, Artificial Sequence
  Guide RNA
uaccauacaccuacacuauau

SEQ ID NO: 15437 - RNA, 21 nt, Artificial Sequence
  Guide RNA
uaccauauaguguagguguau

SEQ ID NO: 15438 - RNA, 21 nt, Artificial Sequence
  Guide RNA
uagguguauaguagguuauac

SEQ ID NO: 15439 - RNA, 21 nt, Artificial Sequence
  Guide RNA
uagguguaugguagguuauac

SEQ ID NO: 15440 - RNA, 21 nt, Artificial Sequence
  Guide RNA
uaguagguuauaccaccuggg

SEQ ID NO: 15441 - RNA, 21 nt, Artificial Sequence
  Guide RNA
uaguguagguguauaguaggu

SEQ ID NO: 15442 - RNA, 21 nt, Artificial Sequence
  Guide RNA
uaguguagguguaugguaggu

SEQ ID NO: 15443 - RNA, 21 nt, Artificial Sequence
  Guide RNA
uauaaccuaccauacaccuac

SEQ ID NO: 15444 - RNA, 21 nt, Artificial Sequence
  Guide RNA
uauaaccuacuauacaccuac

SEQ ID NO: 15445 - RNA, 21 nt, Artificial Sequence
  Guide RNA
uauaguagguuauaccaccug

SEQ ID NO: 15446 - RNA, 21 nt, Artificial Sequence
  Guide RNA
uauaguguagguguauaguag

SEQ ID NO: 15447 - RNA, 21 nt, Artificial Sequence
  Guide RNA
uauaguguagguguaugguag

SEQ ID NO: 15448 - RNA, 21 nt, Artificial Sequence
  Guide RNA
uaugguagguuauaccaccug

SEQ ID NO: 15449 - RNA, 21 nt, Artificial Sequence
  Guide RNA
ugguagguuauaccaccuggg

SEQ ID NO: 15450 - RNA, 21 nt, Artificial Sequence
  Guide RNA
ugguauaaccuaccauacacc

SEQ ID NO: 15451 - RNA, 21 nt, Artificial Sequence
  Guide RNA
ugguauaaccuacuauacacc

SEQ ID NO: 15452 - RNA, 21 nt, Artificial Sequence
  Guide RNA
uguagguguauaguagguuau

SEQ ID NO: 15453 - RNA, 21 nt, Artificial Sequence
  Guide RNA
uguagguguaugguagguuau

SEQ ID NO: 15454 - RNA, 21 nt, Artificial Sequence
  Guide RNA
uguauaguagguuauaccacc

SEQ ID NO: 15455 - RNA, 21 nt, Artificial Sequence
  Guide RNA
uguaugguagguuauaccacc

SEQ ID NO: 15456 - RNA, 21 nt, Artificial Sequence
  Guide RNA
uuaccauauaguguaggugua

SEQ ID NO: 15457 - RNA, 21 nt, Artificial Sequence
  Guide RNA
uuuaccauauaguguaggugu

SEQ ID NO: 15458 - RNA, 22 nt, Artificial Sequence
  Guide RNA
aaacccaggugguauaaccuac

SEQ ID NO: 15459 - RNA, 22 nt, Artificial Sequence
  Guide RNA
aacccaggugguauaaccuacc

SEQ ID NO: 15460 - RNA, 22 nt, Artificial Sequence
  Guide RNA
aacccaggugguauaaccuacu

SEQ ID NO: 15461 - RNA, 22 nt, Artificial Sequence
  Guide RNA
aaccuaccauacaccuacacua

SEQ ID NO: 15462 - RNA, 22 nt, Artificial Sequence
  Guide RNA
aaccuacuauacaccuacacua

SEQ ID NO: 15463 - RNA, 22 nt, Artificial Sequence
  Guide RNA
acaaacccaggugguauaaccu

SEQ ID NO: 15464 - RNA, 22 nt, Artificial Sequence
  Guide RNA
accauacaccuacacuauaugg

SEQ ID NO: 15465 - RNA, 22 nt, Artificial Sequence
  Guide RNA
accauauaguguagguguauag

SEQ ID NO: 15466 - RNA, 22 nt, Artificial Sequence
  Guide RNA
accauauaguguagguguaugg

SEQ ID NO: 15467 - RNA, 22 nt, Artificial Sequence
  Guide RNA
acccaggugguauaaccuacca

SEQ ID NO: 15468 - RNA, 22 nt, Artificial Sequence
  Guide RNA
acccaggugguauaaccuacua

SEQ ID NO: 15469 - RNA, 22 nt, Artificial Sequence
  Guide RNA
accuaccauacaccuacacuau

SEQ ID NO: 15470 - RNA, 22 nt, Artificial Sequence
  Guide RNA
accuacuauacaccuacacuau

SEQ ID NO: 15471 - RNA, 22 nt, Artificial Sequence
  Guide RNA
acuauacaccuacacuauaugg

SEQ ID NO: 15472 - RNA, 22 nt, Artificial Sequence
  Guide RNA
aggugguauaaccuaccauaca

SEQ ID NO: 15473 - RNA, 22 nt, Artificial Sequence
  Guide RNA
aggugguauaaccuacuauaca

SEQ ID NO: 15474 - RNA, 22 nt, Artificial Sequence
  Guide RNA
agguguauaguagguuauacca

SEQ ID NO: 15475 - RNA, 22 nt, Artificial Sequence
  Guide RNA
agguguaugguagguuauacca

SEQ ID NO: 15476 - RNA, 22 nt, Artificial Sequence
  Guide RNA
aguguagguguauaguagguua

SEQ ID NO: 15477 - RNA, 22 nt, Artificial Sequence
  Guide RNA
aguguagguguaugguagguua

SEQ ID NO: 15478 - RNA, 22 nt, Artificial Sequence
  Guide RNA
auaaccuaccauacaccuacac

SEQ ID NO: 15479 - RNA, 22 nt, Artificial Sequence
  Guide RNA
auaaccuacuauacaccuacac

SEQ ID NO: 15480 - RNA, 22 nt, Artificial Sequence
  Guide RNA
auaguagguuauaccaccuggg

SEQ ID NO: 15481 - RNA, 22 nt, Artificial Sequence
  Guide RNA
auaguguagguguauaguaggu

SEQ ID NO: 15482 - RNA, 22 nt, Artificial Sequence
  Guide RNA
auaguguagguguaugguaggu

SEQ ID NO: 15483 - RNA, 22 nt, Artificial Sequence
  Guide RNA
auauaguguagguguauaguag

SEQ ID NO: 15484 - RNA, 22 nt, Artificial Sequence
  Guide RNA
auauaguguagguguaugguag

SEQ ID NO: 15485 - RNA, 22 nt, Artificial Sequence
  Guide RNA
augguagguuauaccaccuggg

SEQ ID NO: 15486 - RNA, 22 nt, Artificial Sequence
  Guide RNA
caaacccaggugguauaaccua

SEQ ID NO: 15487 - RNA, 22 nt, Artificial Sequence
  Guide RNA
cacaaacccaggugguauaacc

SEQ ID NO: 15488 - RNA, 22 nt, Artificial Sequence
  Guide RNA
caggugguauaaccuaccauac

SEQ ID NO: 15489 - RNA, 22 nt, Artificial Sequence
  Guide RNA
caggugguauaaccuacuauac

SEQ ID NO: 15490 - RNA, 22 nt, Artificial Sequence
  Guide RNA
cauauaguguagguguauagua

SEQ ID NO: 15491 - RNA, 22 nt, Artificial Sequence
  Guide RNA
cauauaguguagguguauggua

SEQ ID NO: 15492 - RNA, 22 nt, Artificial Sequence
  Guide RNA
ccaggugguauaaccuaccaua

SEQ ID NO: 15493 - RNA, 22 nt, Artificial Sequence
  Guide RNA
ccaggugguauaaccuacuaua

SEQ ID NO: 15494 - RNA, 22 nt, Artificial Sequence
  Guide RNA
ccauacaccuacacuauauggu

SEQ ID NO: 15495 - RNA, 22 nt, Artificial Sequence
  Guide RNA
ccauauaguguagguguauagu

SEQ ID NO: 15496 - RNA, 22 nt, Artificial Sequence
  Guide RNA
ccauauaguguagguguauggu

SEQ ID NO: 15497 - RNA, 22 nt, Artificial Sequence
  Guide RNA
cccaggugguauaaccuaccau

SEQ ID NO: 15498 - RNA, 22 nt, Artificial Sequence
  Guide RNA
cccaggugguauaaccuacuau

SEQ ID NO: 15499 - RNA, 22 nt, Artificial Sequence
  Guide RNA
ccuaccauacaccuacacuaua

SEQ ID NO: 15500 - RNA, 22 nt, Artificial Sequence
  Guide RNA
ccuacuauacaccuacacuaua

SEQ ID NO: 15501 - RNA, 22 nt, Artificial Sequence
  Guide RNA
cuaccauacaccuacacuauau

SEQ ID NO: 15502 - RNA, 22 nt, Artificial Sequence
  Guide RNA
cuacuauacaccuacacuauau

SEQ ID NO: 15503 - RNA, 22 nt, Artificial Sequence
  Guide RNA
cuauacaccuacacuauauggu

SEQ ID NO: 15504 - RNA, 22 nt, Artificial Sequence
  Guide RNA
cuuuaccauauaguguaggugu

SEQ ID NO: 15505 - RNA, 22 nt, Artificial Sequence
  Guide RNA
gcuuuaccauauaguguaggug

SEQ ID NO: 15506 - RNA, 22 nt, Artificial Sequence
  Guide RNA
gguauaaccuaccauacaccua

SEQ ID NO: 15507 - RNA, 22 nt, Artificial Sequence
  Guide RNA
gguauaaccuacuauacaccua

SEQ ID NO: 15508 - RNA, 22 nt, Artificial Sequence
  Guide RNA
ggugguauaaccuaccauacac

SEQ ID NO: 15509 - RNA, 22 nt, Artificial Sequence
  Guide RNA
ggugguauaaccuacuauacac

SEQ ID NO: 15510 - RNA, 22 nt, Artificial Sequence
  Guide RNA
gguguauaguagguuauaccac

SEQ ID NO: 15511 - RNA, 22 nt, Artificial Sequence
  Guide RNA
gguguaugguagguuauaccac

SEQ ID NO: 15512 - RNA, 22 nt, Artificial Sequence
  Guide RNA
guagguguauaguagguuauac

SEQ ID NO: 15513 - RNA, 22 nt, Artificial Sequence
  Guide RNA
guagguguaugguagguuauac

SEQ ID NO: 15514 - RNA, 22 nt, Artificial Sequence
  Guide RNA
guauaaccuaccauacaccuac

SEQ ID NO: 15515 - RNA, 22 nt, Artificial Sequence
  Guide RNA
guauaaccuacuauacaccuac

SEQ ID NO: 15516 - RNA, 22 nt, Artificial Sequence
  Guide RNA
guauaguagguuauaccaccug

SEQ ID NO: 15517 - RNA, 22 nt, Artificial Sequence
  Guide RNA
guaugguagguuauaccaccug

SEQ ID NO: 15518 - RNA, 22 nt, Artificial Sequence
  Guide RNA
gugguauaaccuaccauacacc

SEQ ID NO: 15519 - RNA, 22 nt, Artificial Sequence
  Guide RNA
gugguauaaccuacuauacacc

SEQ ID NO: 15520 - RNA, 22 nt, Artificial Sequence
  Guide RNA
guguagguguauaguagguuau

SEQ ID NO: 15521 - RNA, 22 nt, Artificial Sequence
  Guide RNA
guguagguguaugguagguuau

SEQ ID NO: 15522 - RNA, 22 nt, Artificial Sequence
  Guide RNA
guguauaguagguuauaccacc

SEQ ID NO: 15523 - RNA, 22 nt, Artificial Sequence
  Guide RNA
guguaugguagguuauaccacc

SEQ ID NO: 15524 - RNA, 22 nt, Artificial Sequence
  Guide RNA
uaaccuaccauacaccuacacu

SEQ ID NO: 15525 - RNA, 22 nt, Artificial Sequence
  Guide RNA
uaaccuacuauacaccuacacu

SEQ ID NO: 15526 - RNA, 22 nt, Artificial Sequence
  Guide RNA
uaccauacaccuacacuauaug

SEQ ID NO: 15527 - RNA, 22 nt, Artificial Sequence
  Guide RNA
uaccauauaguguagguguaua

SEQ ID NO: 15528 - RNA, 22 nt, Artificial Sequence
  Guide RNA
uaccauauaguguagguguaug

SEQ ID NO: 15529 - RNA, 22 nt, Artificial Sequence
  Guide RNA
uacuauacaccuacacuauaug

SEQ ID NO: 15530 - RNA, 22 nt, Artificial Sequence
  Guide RNA
uagguguauaguagguuauacc

SEQ ID NO: 15531 - RNA, 22 nt, Artificial Sequence
  Guide RNA
uagguguaugguagguuauacc

SEQ ID NO: 15532 - RNA, 22 nt, Artificial Sequence
  Guide RNA
uaguagguuauaccaccugggu

SEQ ID NO: 15533 - RNA, 22 nt, Artificial Sequence
  Guide RNA
uaguguagguguauaguagguu

SEQ ID NO: 15534 - RNA, 22 nt, Artificial Sequence
  Guide RNA
uaguguagguguaugguagguu

SEQ ID NO: 15535 - RNA, 22 nt, Artificial Sequence
  Guide RNA
uauaaccuaccauacaccuaca

SEQ ID NO: 15536 - RNA, 22 nt, Artificial Sequence
  Guide RNA
uauaaccuacuauacaccuaca

SEQ ID NO: 15537 - RNA, 22 nt, Artificial Sequence
  Guide RNA
uauaguagguuauaccaccugg

SEQ ID NO: 15538 - RNA, 22 nt, Artificial Sequence
  Guide RNA
uauaguguagguguauaguagg

SEQ ID NO: 15539 - RNA, 22 nt, Artificial Sequence
  Guide RNA
uauaguguagguguaugguagg

SEQ ID NO: 15540 - RNA, 22 nt, Artificial Sequence
  Guide RNA
uaugguagguuauaccaccugg

SEQ ID NO: 15541 - RNA, 22 nt, Artificial Sequence
  Guide RNA
ugguagguuauaccaccugggu

SEQ ID NO: 15542 - RNA, 22 nt, Artificial Sequence
  Guide RNA
ugguauaaccuaccauacaccu

SEQ ID NO: 15543 - RNA, 22 nt, Artificial Sequence
  Guide RNA
ugguauaaccuacuauacaccu

SEQ ID NO: 15544 - RNA, 22 nt, Artificial Sequence
  Guide RNA
uguagguguauaguagguuaua

SEQ ID NO: 15545 - RNA, 22 nt, Artificial Sequence
  Guide RNA
uguagguguaugguagguuaua

SEQ ID NO: 15546 - RNA, 22 nt, Artificial Sequence
  Guide RNA
uguauaguagguuauaccaccu

SEQ ID NO: 15547 - RNA, 22 nt, Artificial Sequence
  Guide RNA
uguaugguagguuauaccaccu

SEQ ID NO: 15548 - RNA, 22 nt, Artificial Sequence
  Guide RNA
uuaccauauaguguagguguau

SEQ ID NO: 15549 - RNA, 22 nt, Artificial Sequence
  Guide RNA
uuuaccauauaguguaggugua

SEQ ID NO: 15550 - RNA, 20 nt, Artificial Sequence
  Guide RNA
aaaaaacacucaaacucuug

SEQ ID NO: 15551 - RNA, 20 nt, Artificial Sequence
  Guide RNA
aaaaaaccacucaaacucuu

SEQ ID NO: 15552 - RNA, 20 nt, Artificial Sequence
  Guide RNA
aaaaacacucaaacucuugu

SEQ ID NO: 15553 - RNA, 20 nt, Artificial Sequence
  Guide RNA
aaaaaccacucaaacucuug

SEQ ID NO: 15554 - RNA, 20 nt, Artificial Sequence
  Guide RNA
aaaacacucaaacucuugua

SEQ ID NO: 15555 - RNA, 20 nt, Artificial Sequence
  Guide RNA
aaaaccacucaaacucuugu

SEQ ID NO: 15556 - RNA, 20 nt, Artificial Sequence
  Guide RNA
aaacacucaaacucuuguau

SEQ ID NO: 15557 - RNA, 20 nt, Artificial Sequence
  Guide RNA
aaaccacucaaacucuugua

SEQ ID NO: 15558 - RNA, 20 nt, Artificial Sequence
  Guide RNA
aacacucaaacucuuguaug

SEQ ID NO: 15559 - RNA, 20 nt, Artificial Sequence
  Guide RNA
aaccacucaaacucuuguau

SEQ ID NO: 15560 - RNA, 20 nt, Artificial Sequence
  Guide RNA
aagaguuugagugguuuuuu

SEQ ID NO: 15561 - RNA, 20 nt, Artificial Sequence
  Guide RNA
acaagaguuugagugguuuu

SEQ ID NO: 15562 - RNA, 20 nt, Artificial Sequence
  Guide RNA
acaagaguuugaguguuuuu

SEQ ID NO: 15563 - RNA, 20 nt, Artificial Sequence
  Guide RNA
accacucaaacucuuguaug

SEQ ID NO: 15564 - RNA, 20 nt, Artificial Sequence
  Guide RNA
auacaagaguuugagugguu

SEQ ID NO: 15565 - RNA, 20 nt, Artificial Sequence
  Guide RNA
auacaagaguuugaguguuu

SEQ ID NO: 15566 - RNA, 20 nt, Artificial Sequence
  Guide RNA
caagaguuugagugguuuuu

SEQ ID NO: 15567 - RNA, 20 nt, Artificial Sequence
  Guide RNA
caagaguuugaguguuuuuu

SEQ ID NO: 15568 - RNA, 20 nt, Artificial Sequence
  Guide RNA
cauacaagaguuugaguggu

SEQ ID NO: 15569 - RNA, 20 nt, Artificial Sequence
  Guide RNA
cauacaagaguuugaguguu

SEQ ID NO: 15570 - RNA, 20 nt, Artificial Sequence
  Guide RNA
ccauacaagaguuugagugg

SEQ ID NO: 15571 - RNA, 20 nt, Artificial Sequence
  Guide RNA
ccauacaagaguuugagugu

SEQ ID NO: 15572 - RNA, 20 nt, Artificial Sequence
  Guide RNA
cuccauacaagaguuugagu

SEQ ID NO: 15573 - RNA, 20 nt, Artificial Sequence
  Guide RNA
uacaagaguuugagugguuu

SEQ ID NO: 15574 - RNA, 20 nt, Artificial Sequence
  Guide RNA
uacaagaguuugaguguuuu

SEQ ID NO: 15575 - RNA, 20 nt, Artificial Sequence
  Guide RNA
uccauacaagaguuugagug

SEQ ID NO: 15576 - RNA, 20 nt, Artificial Sequence
  Guide RNA
ucuccauacaagaguuugag

SEQ ID NO: 15577 - RNA, 20 nt, Artificial Sequence
  Guide RNA
uucuccauacaagaguuuga

SEQ ID NO: 15578 - RNA, 21 nt, Artificial Sequence
  Guide RNA
aaaaaaccacucaaacucuug

SEQ ID NO: 15579 - RNA, 21 nt, Artificial Sequence
  Guide RNA
aaaaaccacucaaacucuugu

SEQ ID NO: 15580 - RNA, 21 nt, Artificial Sequence
  Guide RNA
aaaaccacucaaacucuugua

SEQ ID NO: 15581 - RNA, 21 nt, Artificial Sequence
  Guide RNA
aaacacucaaacucuuguaug

SEQ ID NO: 15582 - RNA, 21 nt, Artificial Sequence
  Guide RNA
aaaccacucaaacucuuguau

SEQ ID NO: 15583 - RNA, 21 nt, Artificial Sequence
  Guide RNA
aacacucaaacucuuguaugg

SEQ ID NO: 15584 - RNA, 21 nt, Artificial Sequence
  Guide RNA
aaccacucaaacucuuguaug

SEQ ID NO: 15585 - RNA, 21 nt, Artificial Sequence
  Guide RNA
acaagaguuugagugguuuuu

SEQ ID NO: 15586 - RNA, 21 nt, Artificial Sequence
  Guide RNA
accacucaaacucuuguaugg

SEQ ID NO: 15587 - RNA, 21 nt, Artificial Sequence
  Guide RNA
auacaagaguuugagugguuu

SEQ ID NO: 15588 - RNA, 21 nt, Artificial Sequence
  Guide RNA
auucuccauacaagaguuuga

SEQ ID NO: 15589 - RNA, 21 nt, Artificial Sequence
  Guide RNA
caagaguuugagugguuuuuu

SEQ ID NO: 15590 - RNA, 21 nt, Artificial Sequence
  Guide RNA
cauacaagaguuugagugguu

SEQ ID NO: 15591 - RNA, 21 nt, Artificial Sequence
  Guide RNA
cauacaagaguuugaguguuu

SEQ ID NO: 15592 - RNA, 21 nt, Artificial Sequence
  Guide RNA
ccauacaagaguuugaguggu

SEQ ID NO: 15593 - RNA, 21 nt, Artificial Sequence
  Guide RNA
ccauacaagaguuugaguguu

SEQ ID NO: 15594 - RNA, 21 nt, Artificial Sequence
  Guide RNA
cuccauacaagaguuugagug

SEQ ID NO: 15595 - RNA, 21 nt, Artificial Sequence
  Guide RNA
uacaagaguuugagugguuuu

SEQ ID NO: 15596 - RNA, 21 nt, Artificial Sequence
  Guide RNA
uccauacaagaguuugagugg

SEQ ID NO: 15597 - RNA, 21 nt, Artificial Sequence
  Guide RNA
uccauacaagaguuugagugu

SEQ ID NO: 15598 - RNA, 21 nt, Artificial Sequence
  Guide RNA
ucuccauacaagaguuugagu

SEQ ID NO: 15599 - RNA, 21 nt, Artificial Sequence
  Guide RNA
uucuccauacaagaguuugag

SEQ ID NO: 15600 - RNA, 22 nt, Artificial Sequence
  Guide RNA
aaaaaaccacucaaacucuugu

SEQ ID NO: 15601 - RNA, 22 nt, Artificial Sequence
  Guide RNA
aaaaaccacucaaacucuugua

SEQ ID NO: 15602 - RNA, 22 nt, Artificial Sequence
  Guide RNA
aaaacacucaaacucuuguaug

SEQ ID NO: 15603 - RNA, 22 nt, Artificial Sequence
  Guide RNA
aaaaccacucaaacucuuguau

SEQ ID NO: 15604 - RNA, 22 nt, Artificial Sequence
  Guide RNA
aaacacucaaacucuuguaugg

SEQ ID NO: 15605 - RNA, 22 nt, Artificial Sequence
  Guide RNA
aaaccacucaaacucuuguaug

SEQ ID NO: 15606 - RNA, 22 nt, Artificial Sequence
  Guide RNA
aacacucaaacucuuguaugga

SEQ ID NO: 15607 - RNA, 22 nt, Artificial Sequence
  Guide RNA
aaccacucaaacucuuguaugg

SEQ ID NO: 15608 - RNA, 22 nt, Artificial Sequence
  Guide RNA
acaagaguuugagugguuuuuu

SEQ ID NO: 15609 - RNA, 22 nt, Artificial Sequence
  Guide RNA
accacucaaacucuuguaugga

SEQ ID NO: 15610 - RNA, 22 nt, Artificial Sequence
  Guide RNA
auacaagaguuugagugguuuu

SEQ ID NO: 15611 - RNA, 22 nt, Artificial Sequence
  Guide RNA
auucuccauacaagaguuugag

SEQ ID NO: 15612 - RNA, 22 nt, Artificial Sequence
  Guide RNA
cauacaagaguuugagugguuu

SEQ ID NO: 15613 - RNA, 22 nt, Artificial Sequence
  Guide RNA
cauacaagaguuugaguguuuu

SEQ ID NO: 15614 - RNA, 22 nt, Artificial Sequence
  Guide RNA
cauucuccauacaagaguuuga

SEQ ID NO: 15615 - RNA, 22 nt, Artificial Sequence
  Guide RNA
ccauacaagaguuugagugguu

SEQ ID NO: 15616 - RNA, 22 nt, Artificial Sequence
  Guide RNA
ccauacaagaguuugaguguuu

SEQ ID NO: 15617 - RNA, 22 nt, Artificial Sequence
  Guide RNA
cuccauacaagaguuugagugg

SEQ ID NO: 15618 - RNA, 22 nt, Artificial Sequence
  Guide RNA
cuccauacaagaguuugagugu

SEQ ID NO: 15619 - RNA, 22 nt, Artificial Sequence
  Guide RNA
uacaagaguuugagugguuuuu

SEQ ID NO: 15620 - RNA, 22 nt, Artificial Sequence
  Guide RNA
uccauacaagaguuugaguggu

SEQ ID NO: 15621 - RNA, 22 nt, Artificial Sequence
  Guide RNA
uccauacaagaguuugaguguu

SEQ ID NO: 15622 - RNA, 22 nt, Artificial Sequence
  Guide RNA
ucuccauacaagaguuugagug

SEQ ID NO: 15623 - RNA, 22 nt, Artificial Sequence
  Guide RNA
uucuccauacaagaguuugagu

SEQ ID NO: 15624 - RNA, 20 nt, Artificial Sequence
  Guide RNA
aaaaaacacacucaaacucu

SEQ ID NO: 15625 - RNA, 20 nt, Artificial Sequence
  Guide RNA
aaaaacacacucaaacucuu

SEQ ID NO: 15626 - RNA, 20 nt, Artificial Sequence
  Guide RNA
aaaacacacucaaacucuug

SEQ ID NO: 15627 - RNA, 20 nt, Artificial Sequence
  Guide RNA
aaacacacucaaacucuugu

SEQ ID NO: 15628 - RNA, 20 nt, Artificial Sequence
  Guide RNA
aacacacucaaacucuugua

SEQ ID NO: 15629 - RNA, 20 nt, Artificial Sequence
  Guide RNA
aagaguuugaguguguuuuu

SEQ ID NO: 15630 - RNA, 20 nt, Artificial Sequence
  Guide RNA
acaagaguuugaguguguuu

SEQ ID NO: 15631 - RNA, 20 nt, Artificial Sequence
  Guide RNA
acacacucaaacucuuguau

SEQ ID NO: 15632 - RNA, 20 nt, Artificial Sequence
  Guide RNA
agaguuugaguguguuuuuu

SEQ ID NO: 15633 - RNA, 20 nt, Artificial Sequence
  Guide RNA
auacaagaguuugagugugu

SEQ ID NO: 15634 - RNA, 20 nt, Artificial Sequence
  Guide RNA
caagaguuugaguguguuuu

SEQ ID NO: 15635 - RNA, 20 nt, Artificial Sequence
  Guide RNA
cauacaagaguuugagugug

SEQ ID NO: 15636 - RNA, 20 nt, Artificial Sequence
  Guide RNA
uacaagaguuugaguguguu

SEQ ID NO: 15637 - RNA, 21 nt, Artificial Sequence
  Guide RNA
aaaaacacacucaaacucuug

SEQ ID NO: 15638 - RNA, 21 nt, Artificial Sequence
  Guide RNA
aaaacacacucaaacucuugu

SEQ ID NO: 15639 - RNA, 21 nt, Artificial Sequence
  Guide RNA
aaacacacucaaacucuugua

SEQ ID NO: 15640 - RNA, 21 nt, Artificial Sequence
  Guide RNA
aacacacucaaacucuuguau

SEQ ID NO: 15641 - RNA, 21 nt, Artificial Sequence
  Guide RNA
acaagaguuugaguguguuuu

SEQ ID NO: 15642 - RNA, 21 nt, Artificial Sequence
  Guide RNA
acacacucaaacucuuguaug

SEQ ID NO: 15643 - RNA, 21 nt, Artificial Sequence
  Guide RNA
auacaagaguuugaguguguu

SEQ ID NO: 15644 - RNA, 21 nt, Artificial Sequence
  Guide RNA
caagaguuugaguguguuuuu

SEQ ID NO: 15645 - RNA, 21 nt, Artificial Sequence
  Guide RNA
cauacaagaguuugagugugu

SEQ ID NO: 15646 - RNA, 21 nt, Artificial Sequence
  Guide RNA
ccauacaagaguuugagugug

SEQ ID NO: 15647 - RNA, 21 nt, Artificial Sequence
  Guide RNA
uacaagaguuugaguguguuu

SEQ ID NO: 15648 - RNA, 22 nt, Artificial Sequence
  Guide RNA
aaaaaacacacucaaacucuug

SEQ ID NO: 15649 - RNA, 22 nt, Artificial Sequence
  Guide RNA
aaaaacacacucaaacucuugu

SEQ ID NO: 15650 - RNA, 22 nt, Artificial Sequence
  Guide RNA
aaaacacacucaaacucuugua

SEQ ID NO: 15651 - RNA, 22 nt, Artificial Sequence
  Guide RNA
aaacacacucaaacucuuguau

SEQ ID NO: 15652 - RNA, 22 nt, Artificial Sequence
  Guide RNA
aacacacucaaacucuuguaug

SEQ ID NO: 15653 - RNA, 22 nt, Artificial Sequence
  Guide RNA
acaagaguuugaguguguuuuu

SEQ ID NO: 15654 - RNA, 22 nt, Artificial Sequence
  Guide RNA
acacacucaaacucuuguaugg

SEQ ID NO: 15655 - RNA, 22 nt, Artificial Sequence
  Guide RNA
auacaagaguuugaguguguuu

SEQ ID NO: 15656 - RNA, 22 nt, Artificial Sequence
  Guide RNA
caagaguuugaguguguuuuuu

SEQ ID NO: 15657 - RNA, 22 nt, Artificial Sequence
  Guide RNA
cauacaagaguuugaguguguu

SEQ ID NO: 15658 - RNA, 22 nt, Artificial Sequence
  Guide RNA
ccauacaagaguuugagugugu

SEQ ID NO: 15659 - RNA, 22 nt, Artificial Sequence
  Guide RNA
uacaagaguuugaguguguuuu

SEQ ID NO: 15660 - RNA, 22 nt, Artificial Sequence
  Guide RNA
uccauacaagaguuugagugug

SEQ ID NO: 15661 - RNA, 20 nt, Artificial Sequence
  Guide RNA
aacaacaaauagaugugcaa

SEQ ID NO: 15662 - RNA, 20 nt, Artificial Sequence
  Guide RNA
aagaacaaauagaugugcaa

SEQ ID NO: 15663 - RNA, 20 nt, Artificial Sequence
  Guide RNA
aagaacaacaaauagaugug

SEQ ID NO: 15664 - RNA, 20 nt, Artificial Sequence
  Guide RNA
aagaagaacaaauagaugug

SEQ ID NO: 15665 - RNA, 20 nt, Artificial Sequence
  Guide RNA
acaacaaauagaugugcaaa

SEQ ID NO: 15666 - RNA, 20 nt, Artificial Sequence
  Guide RNA
acaagaacaacaaauagaug

SEQ ID NO: 15667 - RNA, 20 nt, Artificial Sequence
  Guide RNA
acaagaagaacaaauagaug

SEQ ID NO: 15668 - RNA, 20 nt, Artificial Sequence
  Guide RNA
acaucuauuuguucuucuug

SEQ ID NO: 15669 - RNA, 20 nt, Artificial Sequence
  Guide RNA
acaucuauuuguuguucuug

SEQ ID NO: 15670 - RNA, 20 nt, Artificial Sequence
  Guide RNA
agaacaaauagaugugcaaa

SEQ ID NO: 15671 - RNA, 20 nt, Artificial Sequence
  Guide RNA
agaacaacaaauagaugugc

SEQ ID NO: 15672 - RNA, 20 nt, Artificial Sequence
  Guide RNA
agaagaacaaauagaugugc

SEQ ID NO: 15673 - RNA, 20 nt, Artificial Sequence
  Guide RNA
agggugcauuugugacaaga

SEQ ID NO: 15674 - RNA, 20 nt, Artificial Sequence
  Guide RNA
aucuauuuguucuucuuguc

SEQ ID NO: 15675 - RNA, 20 nt, Artificial Sequence
  Guide RNA
aucuauuuguuguucuuguc

SEQ ID NO: 15676 - RNA, 20 nt, Artificial Sequence
  Guide RNA
auuugugacaagaacaacaa

SEQ ID NO: 15677 - RNA, 20 nt, Artificial Sequence
  Guide RNA
auuugugacaagaagaacaa

SEQ ID NO: 15678 - RNA, 20 nt, Artificial Sequence
  Guide RNA
auuuguucuucuugucacaa

SEQ ID NO: 15679 - RNA, 20 nt, Artificial Sequence
  Guide RNA
auuuguuguucuugucacaa

SEQ ID NO: 15680 - RNA, 20 nt, Artificial Sequence
  Guide RNA
caagaacaacaaauagaugu

SEQ ID NO: 15681 - RNA, 20 nt, Artificial Sequence
  Guide RNA
caagaagaacaaauagaugu

SEQ ID NO: 15682 - RNA, 20 nt, Artificial Sequence
  Guide RNA
cacaucuauuuguucuucuu

SEQ ID NO: 15683 - RNA, 20 nt, Artificial Sequence
  Guide RNA
cacaucuauuuguuguucuu

SEQ ID NO: 15684 - RNA, 20 nt, Artificial Sequence
  Guide RNA
caucuauuuguucuucuugu

SEQ ID NO: 15685 - RNA, 20 nt, Artificial Sequence
  Guide RNA
caucuauuuguuguucuugu

SEQ ID NO: 15686 - RNA, 20 nt, Artificial Sequence
  Guide RNA
cauuugugacaagaacaaca

SEQ ID NO: 15687 - RNA, 20 nt, Artificial Sequence
  Guide RNA
cauuugugacaagaagaaca

SEQ ID NO: 15688 - RNA, 20 nt, Artificial Sequence
  Guide RNA
cuauuuguucuucuugucac

SEQ ID NO: 15689 - RNA, 20 nt, Artificial Sequence
  Guide RNA
cuauuuguuguucuugucac

SEQ ID NO: 15690 - RNA, 20 nt, Artificial Sequence
  Guide RNA
cuuugcacaucuauuuguuc

SEQ ID NO: 15691 - RNA, 20 nt, Artificial Sequence
  Guide RNA
cuuugcacaucuauuuguug

SEQ ID NO: 15692 - RNA, 20 nt, Artificial Sequence
  Guide RNA
gaacaacaaauagaugugca

SEQ ID NO: 15693 - RNA, 20 nt, Artificial Sequence
  Guide RNA
gaagaacaaauagaugugca

SEQ ID NO: 15694 - RNA, 20 nt, Artificial Sequence
  Guide RNA
gacaagaacaacaaauagau

SEQ ID NO: 15695 - RNA, 20 nt, Artificial Sequence
  Guide RNA
gacaagaagaacaaauagau

SEQ ID NO: 15696 - RNA, 20 nt, Artificial Sequence
  Guide RNA
gagggugcauuugugacaag

SEQ ID NO: 15697 - RNA, 20 nt, Artificial Sequence
  Guide RNA
gcacaucuauuuguucuucu

SEQ ID NO: 15698 - RNA, 20 nt, Artificial Sequence
  Guide RNA
gcacaucuauuuguuguucu

SEQ ID NO: 15699 - RNA, 20 nt, Artificial Sequence
  Guide RNA
gcauuugugacaagaacaac

SEQ ID NO: 15700 - RNA, 20 nt, Artificial Sequence
  Guide RNA
gcauuugugacaagaagaac

SEQ ID NO: 15701 - RNA, 20 nt, Artificial Sequence
  Guide RNA
gggugcauuugugacaagaa

SEQ ID NO: 15702 - RNA, 20 nt, Artificial Sequence
  Guide RNA
ggugcauuugugacaagaac

SEQ ID NO: 15703 - RNA, 20 nt, Artificial Sequence
  Guide RNA
ggugcauuugugacaagaag

SEQ ID NO: 15704 - RNA, 20 nt, Artificial Sequence
  Guide RNA
gugacaagaacaacaaauag

SEQ ID NO: 15705 - RNA, 20 nt, Artificial Sequence
  Guide RNA
gugacaagaagaacaaauag

SEQ ID NO: 15706 - RNA, 20 nt, Artificial Sequence
  Guide RNA
gugcauuugugacaagaaca

SEQ ID NO: 15707 - RNA, 20 nt, Artificial Sequence
  Guide RNA
gugcauuugugacaagaaga

SEQ ID NO: 15708 - RNA, 20 nt, Artificial Sequence
  Guide RNA
guucuucuugucacaaaugc

SEQ ID NO: 15709 - RNA, 20 nt, Artificial Sequence
  Guide RNA
guuguucuugucacaaaugc

SEQ ID NO: 15710 - RNA, 20 nt, Artificial Sequence
  Guide RNA
uauuuguucuucuugucaca

SEQ ID NO: 15711 - RNA, 20 nt, Artificial Sequence
  Guide RNA
uauuuguuguucuugucaca

SEQ ID NO: 15712 - RNA, 20 nt, Artificial Sequence
  Guide RNA
ucuauuuguucuucuuguca

SEQ ID NO: 15713 - RNA, 20 nt, Artificial Sequence
  Guide RNA
ucuauuuguuguucuuguca

SEQ ID NO: 15714 - RNA, 20 nt, Artificial Sequence
  Guide RNA
ucuucuugucacaaaugcac

SEQ ID NO: 15715 - RNA, 20 nt, Artificial Sequence
  Guide RNA
ucuuugcacaucuauuuguu

SEQ ID NO: 15716 - RNA, 20 nt, Artificial Sequence
  Guide RNA
ugacaagaacaacaaauaga

SEQ ID NO: 15717 - RNA, 20 nt, Artificial Sequence
  Guide RNA
ugacaagaagaacaaauaga

SEQ ID NO: 15718 - RNA, 20 nt, Artificial Sequence
  Guide RNA
ugagggugcauuugugacaa

SEQ ID NO: 15719 - RNA, 20 nt, Artificial Sequence
  Guide RNA
ugcacaucuauuuguucuuc

SEQ ID NO: 15720 - RNA, 20 nt, Artificial Sequence
  Guide RNA
ugcacaucuauuuguuguuc

SEQ ID NO: 15721 - RNA, 20 nt, Artificial Sequence
  Guide RNA
ugcauuugugacaagaacaa

SEQ ID NO: 15722 - RNA, 20 nt, Artificial Sequence
  Guide RNA
ugcauuugugacaagaagaa

SEQ ID NO: 15723 - RNA, 20 nt, Artificial Sequence
  Guide RNA
ugugacaagaacaacaaaua

SEQ ID NO: 15724 - RNA, 20 nt, Artificial Sequence
  Guide RNA
ugugacaagaagaacaaaua

SEQ ID NO: 15725 - RNA, 20 nt, Artificial Sequence
  Guide RNA
uguucuucuugucacaaaug

SEQ ID NO: 15726 - RNA, 20 nt, Artificial Sequence
  Guide RNA
uguucuugucacaaaugcac

SEQ ID NO: 15727 - RNA, 20 nt, Artificial Sequence
  Guide RNA
uguuguucuugucacaaaug

SEQ ID NO: 15728 - RNA, 20 nt, Artificial Sequence
  Guide RNA
uucuucuugucacaaaugca

SEQ ID NO: 15729 - RNA, 20 nt, Artificial Sequence
  Guide RNA
uucuuugcacaucuauuugu

SEQ ID NO: 15730 - RNA, 20 nt, Artificial Sequence
  Guide RNA
uugcacaucuauuuguucuu

SEQ ID NO: 15731 - RNA, 20 nt, Artificial Sequence
  Guide RNA
uugcacaucuauuuguuguu

SEQ ID NO: 15732 - RNA, 20 nt, Artificial Sequence
  Guide RNA
uugugacaagaacaacaaau

SEQ ID NO: 15733 - RNA, 20 nt, Artificial Sequence
  Guide RNA
uugugacaagaagaacaaau

SEQ ID NO: 15734 - RNA, 20 nt, Artificial Sequence
  Guide RNA
uuguucuucuugucacaaau

SEQ ID NO: 15735 - RNA, 20 nt, Artificial Sequence
  Guide RNA
uuguucuugucacaaaugca

SEQ ID NO: 15736 - RNA, 20 nt, Artificial Sequence
  Guide RNA
uuguuguucuugucacaaau

SEQ ID NO: 15737 - RNA, 20 nt, Artificial Sequence
  Guide RNA
uuucuuugcacaucuauuug

SEQ ID NO: 15738 - RNA, 20 nt, Artificial Sequence
  Guide RNA
uuugcacaucuauuuguucu

SEQ ID NO: 15739 - RNA, 20 nt, Artificial Sequence
  Guide RNA
uuugcacaucuauuuguugu

SEQ ID NO: 15740 - RNA, 20 nt, Artificial Sequence
  Guide RNA
uuugugacaagaacaacaaa

SEQ ID NO: 15741 - RNA, 20 nt, Artificial Sequence
  Guide RNA
uuugugacaagaagaacaaa

SEQ ID NO: 15742 - RNA, 20 nt, Artificial Sequence
  Guide RNA
uuuguucuucuugucacaaa

SEQ ID NO: 15743 - RNA, 20 nt, Artificial Sequence
  Guide RNA
uuuguuguucuugucacaaa

SEQ ID NO: 15744 - RNA, 21 nt, Artificial Sequence
  Guide RNA
aagaacaacaaauagaugugc

SEQ ID NO: 15745 - RNA, 21 nt, Artificial Sequence
  Guide RNA
aagaagaacaaauagaugugc

SEQ ID NO: 15746 - RNA, 21 nt, Artificial Sequence
  Guide RNA
acaacaaauagaugugcaaag

SEQ ID NO: 15747 - RNA, 21 nt, Artificial Sequence
  Guide RNA
agaacaaauagaugugcaaag

SEQ ID NO: 15748 - RNA, 21 nt, Artificial Sequence
  Guide RNA
agaacaacaaauagaugugca

SEQ ID NO: 15749 - RNA, 21 nt, Artificial Sequence
  Guide RNA
agaagaacaaauagaugugca

SEQ ID NO: 15750 - RNA, 21 nt, Artificial Sequence
  Guide RNA
agggugcauuugugacaagaa

SEQ ID NO: 15751 - RNA, 21 nt, Artificial Sequence
  Guide RNA
caagaacaacaaauagaugug

SEQ ID NO: 15752 - RNA, 21 nt, Artificial Sequence
  Guide RNA
caagaagaacaaauagaugug

SEQ ID NO: 15753 - RNA, 21 nt, Artificial Sequence
  Guide RNA
cacaucuauuuguucuucuug

SEQ ID NO: 15754 - RNA, 21 nt, Artificial Sequence
  Guide RNA
cacaucuauuuguuguucuug

SEQ ID NO: 15755 - RNA, 21 nt, Artificial Sequence
  Guide RNA
caucuauuuguucuucuuguc

SEQ ID NO: 15756 - RNA, 21 nt, Artificial Sequence
  Guide RNA
caucuauuuguuguucuuguc

SEQ ID NO: 15757 - RNA, 21 nt, Artificial Sequence
  Guide RNA
cauuugugacaagaacaacaa

SEQ ID NO: 15758 - RNA, 21 nt, Artificial Sequence
  Guide RNA
cauuugugacaagaagaacaa

SEQ ID NO: 15759 - RNA, 21 nt, Artificial Sequence
  Guide RNA
cuauuuguucuucuugucaca

SEQ ID NO: 15760 - RNA, 21 nt, Artificial Sequence
  Guide RNA
cuauuuguuguucuugucaca

SEQ ID NO: 15761 - RNA, 21 nt, Artificial Sequence
  Guide RNA
cuuugcacaucuauuuguucu

SEQ ID NO: 15762 - RNA, 21 nt, Artificial Sequence
  Guide RNA
cuuugcacaucuauuuguugu

SEQ ID NO: 15763 - RNA, 21 nt, Artificial Sequence
  Guide RNA
gaacaacaaauagaugugcaa

SEQ ID NO: 15764 - RNA, 21 nt, Artificial Sequence
  Guide RNA
gaagaacaaauagaugugcaa

SEQ ID NO: 15765 - RNA, 21 nt, Artificial Sequence
  Guide RNA
gacaagaacaacaaauagaug

SEQ ID NO: 15766 - RNA, 21 nt, Artificial Sequence
  Guide RNA
gacaagaagaacaaauagaug

SEQ ID NO: 15767 - RNA, 21 nt, Artificial Sequence
  Guide RNA
gagggugcauuugugacaaga

SEQ ID NO: 15768 - RNA, 21 nt, Artificial Sequence
  Guide RNA
gcacaucuauuuguucuucuu

SEQ ID NO: 15769 - RNA, 21 nt, Artificial Sequence
  Guide RNA
gcacaucuauuuguuguucuu

SEQ ID NO: 15770 - RNA, 21 nt, Artificial Sequence
  Guide RNA
gcauuugugacaagaacaaca

SEQ ID NO: 15771 - RNA, 21 nt, Artificial Sequence
  Guide RNA
gcauuugugacaagaagaaca

SEQ ID NO: 15772 - RNA, 21 nt, Artificial Sequence
  Guide RNA
gggugcauuugugacaagaac

SEQ ID NO: 15773 - RNA, 21 nt, Artificial Sequence
  Guide RNA
gggugcauuugugacaagaag

SEQ ID NO: 15774 - RNA, 21 nt, Artificial Sequence
  Guide RNA
ggugcauuugugacaagaaca

SEQ ID NO: 15775 - RNA, 21 nt, Artificial Sequence
  Guide RNA
ggugcauuugugacaagaaga

SEQ ID NO: 15776 - RNA, 21 nt, Artificial Sequence
  Guide RNA
gugacaagaacaacaaauaga

SEQ ID NO: 15777 - RNA, 21 nt, Artificial Sequence
  Guide RNA
gugacaagaagaacaaauaga

SEQ ID NO: 15778 - RNA, 21 nt, Artificial Sequence
  Guide RNA
gugagggugcauuugugacaa

SEQ ID NO: 15779 - RNA, 21 nt, Artificial Sequence
  Guide RNA
gugcauuugugacaagaacaa

SEQ ID NO: 15780 - RNA, 21 nt, Artificial Sequence
  Guide RNA
gugcauuugugacaagaagaa

SEQ ID NO: 15781 - RNA, 21 nt, Artificial Sequence
  Guide RNA
guucuucuugucacaaaugca

SEQ ID NO: 15782 - RNA, 21 nt, Artificial Sequence
  Guide RNA
guuguucuugucacaaaugca

SEQ ID NO: 15783 - RNA, 21 nt, Artificial Sequence
  Guide RNA
ucuauuuguucuucuugucac

SEQ ID NO: 15784 - RNA, 21 nt, Artificial Sequence
  Guide RNA
ucuauuuguuguucuugucac

SEQ ID NO: 15785 - RNA, 21 nt, Artificial Sequence
  Guide RNA
ucuucuugucacaaaugcacc

SEQ ID NO: 15786 - RNA, 21 nt, Artificial Sequence
  Guide RNA
ucuuugcacaucuauuuguuc

SEQ ID NO: 15787 - RNA, 21 nt, Artificial Sequence
  Guide RNA
ucuuugcacaucuauuuguug

SEQ ID NO: 15788 - RNA, 21 nt, Artificial Sequence
  Guide RNA
ugagggugcauuugugacaag

SEQ ID NO: 15789 - RNA, 21 nt, Artificial Sequence
  Guide RNA
ugcacaucuauuuguucuucu

SEQ ID NO: 15790 - RNA, 21 nt, Artificial Sequence
  Guide RNA
ugcacaucuauuuguuguucu

SEQ ID NO: 15791 - RNA, 21 nt, Artificial Sequence
  Guide RNA
ugcauuugugacaagaacaac

SEQ ID NO: 15792 - RNA, 21 nt, Artificial Sequence
  Guide RNA
ugcauuugugacaagaagaac

SEQ ID NO: 15793 - RNA, 21 nt, Artificial Sequence
  Guide RNA
ugugacaagaacaacaaauag

SEQ ID NO: 15794 - RNA, 21 nt, Artificial Sequence
  Guide RNA
ugugacaagaagaacaaauag

SEQ ID NO: 15795 - RNA, 21 nt, Artificial Sequence
  Guide RNA
uguucuucuugucacaaaugc

SEQ ID NO: 15796 - RNA, 21 nt, Artificial Sequence
  Guide RNA
uguucuugucacaaaugcacc

SEQ ID NO: 15797 - RNA, 21 nt, Artificial Sequence
  Guide RNA
uguuguucuugucacaaaugc

SEQ ID NO: 15798 - RNA, 21 nt, Artificial Sequence
  Guide RNA
uucuucuugucacaaaugcac

SEQ ID NO: 15799 - RNA, 21 nt, Artificial Sequence
  Guide RNA
uugcacaucuauuuguucuuc

SEQ ID NO: 15800 - RNA, 21 nt, Artificial Sequence
  Guide RNA
uugcacaucuauuuguuguuc

SEQ ID NO: 15801 - RNA, 21 nt, Artificial Sequence
  Guide RNA
uuguucuucuugucacaaaug

SEQ ID NO: 15802 - RNA, 21 nt, Artificial Sequence
  Guide RNA
uuguucuugucacaaaugcac

SEQ ID NO: 15803 - RNA, 21 nt, Artificial Sequence
  Guide RNA
uuguuguucuugucacaaaug

SEQ ID NO: 15804 - RNA, 22 nt, Artificial Sequence
  Guide RNA
aacaacaaauagaugugcaaag

SEQ ID NO: 15805 - RNA, 22 nt, Artificial Sequence
  Guide RNA
aagaacaaauagaugugcaaag

SEQ ID NO: 15806 - RNA, 22 nt, Artificial Sequence
  Guide RNA
aagaacaacaaauagaugugca

SEQ ID NO: 15807 - RNA, 22 nt, Artificial Sequence
  Guide RNA
aagaagaacaaauagaugugca

SEQ ID NO: 15808 - RNA, 22 nt, Artificial Sequence
  Guide RNA
acaacaaauagaugugcaaaga

SEQ ID NO: 15809 - RNA, 22 nt, Artificial Sequence
  Guide RNA
acaagaacaacaaauagaugug

SEQ ID NO: 15810 - RNA, 22 nt, Artificial Sequence
  Guide RNA
acaagaagaacaaauagaugug

SEQ ID NO: 15811 - RNA, 22 nt, Artificial Sequence
  Guide RNA
acaucuauuuguucuucuuguc

SEQ ID NO: 15812 - RNA, 22 nt, Artificial Sequence
  Guide RNA
acaucuauuuguuguucuuguc

SEQ ID NO: 15813 - RNA, 22 nt, Artificial Sequence
  Guide RNA
agaacaaauagaugugcaaaga

SEQ ID NO: 15814 - RNA, 22 nt, Artificial Sequence
  Guide RNA
agaacaacaaauagaugugcaa

SEQ ID NO: 15815 - RNA, 22 nt, Artificial Sequence
  Guide RNA
agaagaacaaauagaugugcaa

SEQ ID NO: 15816 - RNA, 22 nt, Artificial Sequence
  Guide RNA
agggugcauuugugacaagaac

SEQ ID NO: 15817 - RNA, 22 nt, Artificial Sequence
  Guide RNA
agggugcauuugugacaagaag

SEQ ID NO: 15818 - RNA, 22 nt, Artificial Sequence
  Guide RNA
aucuauuuguucuucuugucac

SEQ ID NO: 15819 - RNA, 22 nt, Artificial Sequence
  Guide RNA
aucuauuuguuguucuugucac

SEQ ID NO: 15820 - RNA, 22 nt, Artificial Sequence
  Guide RNA
caagaacaacaaauagaugugc

SEQ ID NO: 15821 - RNA, 22 nt, Artificial Sequence
  Guide RNA
caagaagaacaaauagaugugc

SEQ ID NO: 15822 - RNA, 22 nt, Artificial Sequence
  Guide RNA
cacaucuauuuguucuucuugu

SEQ ID NO: 15823 - RNA, 22 nt, Artificial Sequence
  Guide RNA
cacaucuauuuguuguucuugu

SEQ ID NO: 15824 - RNA, 22 nt, Artificial Sequence
  Guide RNA
caucuauuuguucuucuuguca

SEQ ID NO: 15825 - RNA, 22 nt, Artificial Sequence
  Guide RNA
caucuauuuguuguucuuguca

SEQ ID NO: 15826 - RNA, 22 nt, Artificial Sequence
  Guide RNA
cauuugugacaagaacaacaaa

SEQ ID NO: 15827 - RNA, 22 nt, Artificial Sequence
  Guide RNA
cauuugugacaagaagaacaaa

SEQ ID NO: 15828 - RNA, 22 nt, Artificial Sequence
  Guide RNA
cuauuuguucuucuugucacaa

SEQ ID NO: 15829 - RNA, 22 nt, Artificial Sequence
  Guide RNA
cuauuuguuguucuugucacaa

SEQ ID NO: 15830 - RNA, 22 nt, Artificial Sequence
  Guide RNA
cuuugcacaucuauuuguucuu

SEQ ID NO: 15831 - RNA, 22 nt, Artificial Sequence
  Guide RNA
cuuugcacaucuauuuguuguu

SEQ ID NO: 15832 - RNA, 22 nt, Artificial Sequence
  Guide RNA
gaacaacaaauagaugugcaaa

SEQ ID NO: 15833 - RNA, 22 nt, Artificial Sequence
  Guide RNA
gaagaacaaauagaugugcaaa

SEQ ID NO: 15834 - RNA, 22 nt, Artificial Sequence
  Guide RNA
gacaagaacaacaaauagaugu

SEQ ID NO: 15835 - RNA, 22 nt, Artificial Sequence
  Guide RNA
gacaagaagaacaaauagaugu

SEQ ID NO: 15836 - RNA, 22 nt, Artificial Sequence
  Guide RNA
gagggugcauuugugacaagaa

SEQ ID NO: 15837 - RNA, 22 nt, Artificial Sequence
  Guide RNA
gcacaucuauuuguucuucuug

SEQ ID NO: 15838 - RNA, 22 nt, Artificial Sequence
  Guide RNA
gcacaucuauuuguuguucuug

SEQ ID NO: 15839 - RNA, 22 nt, Artificial Sequence
  Guide RNA
gcauuugugacaagaacaacaa

SEQ ID NO: 15840 - RNA, 22 nt, Artificial Sequence
  Guide RNA
gcauuugugacaagaagaacaa

SEQ ID NO: 15841 - RNA, 22 nt, Artificial Sequence
  Guide RNA
gggugcauuugugacaagaaca

SEQ ID NO: 15842 - RNA, 22 nt, Artificial Sequence
  Guide RNA
gggugcauuugugacaagaaga

SEQ ID NO: 15843 - RNA, 22 nt, Artificial Sequence
  Guide RNA
ggugcauuugugacaagaacaa

SEQ ID NO: 15844 - RNA, 22 nt, Artificial Sequence
  Guide RNA
ggugcauuugugacaagaagaa

SEQ ID NO: 15845 - RNA, 22 nt, Artificial Sequence
  Guide RNA
gugacaagaacaacaaauagau

SEQ ID NO: 15846 - RNA, 22 nt, Artificial Sequence
  Guide RNA
gugacaagaagaacaaauagau

SEQ ID NO: 15847 - RNA, 22 nt, Artificial Sequence
  Guide RNA
gugagggugcauuugugacaag

SEQ ID NO: 15848 - RNA, 22 nt, Artificial Sequence
  Guide RNA
gugcauuugugacaagaacaac

SEQ ID NO: 15849 - RNA, 22 nt, Artificial Sequence
  Guide RNA
gugcauuugugacaagaagaac

SEQ ID NO: 15850 - RNA, 22 nt, Artificial Sequence
  Guide RNA
guucuucuugucacaaaugcac

SEQ ID NO: 15851 - RNA, 22 nt, Artificial Sequence
  Guide RNA
guuguucuugucacaaaugcac

SEQ ID NO: 15852 - RNA, 22 nt, Artificial Sequence
  Guide RNA
ucuauuuguucuucuugucaca

SEQ ID NO: 15853 - RNA, 22 nt, Artificial Sequence
  Guide RNA
ucuauuuguuguucuugucaca

SEQ ID NO: 15854 - RNA, 22 nt, Artificial Sequence
  Guide RNA
ucuucuugucacaaaugcaccc

SEQ ID NO: 15855 - RNA, 22 nt, Artificial Sequence
  Guide RNA
ucuuugcacaucuauuuguucu

SEQ ID NO: 15856 - RNA, 22 nt, Artificial Sequence
  Guide RNA
ucuuugcacaucuauuuguugu

SEQ ID NO: 15857 - RNA, 22 nt, Artificial Sequence
  Guide RNA
ugacaagaacaacaaauagaug

SEQ ID NO: 15858 - RNA, 22 nt, Artificial Sequence
  Guide RNA
ugacaagaagaacaaauagaug

SEQ ID NO: 15859 - RNA, 22 nt, Artificial Sequence
  Guide RNA
ugagggugcauuugugacaaga

SEQ ID NO: 15860 - RNA, 22 nt, Artificial Sequence
  Guide RNA
ugcacaucuauuuguucuucuu

SEQ ID NO: 15861 - RNA, 22 nt, Artificial Sequence
  Guide RNA
ugcacaucuauuuguuguucuu

SEQ ID NO: 15862 - RNA, 22 nt, Artificial Sequence
  Guide RNA
ugcauuugugacaagaacaaca

SEQ ID NO: 15863 - RNA, 22 nt, Artificial Sequence
  Guide RNA
ugcauuugugacaagaagaaca

SEQ ID NO: 15864 - RNA, 22 nt, Artificial Sequence
  Guide RNA
ugugacaagaacaacaaauaga

SEQ ID NO: 15865 - RNA, 22 nt, Artificial Sequence
  Guide RNA
ugugacaagaagaacaaauaga

SEQ ID NO: 15866 - RNA, 22 nt, Artificial Sequence
  Guide RNA
ugugagggugcauuugugacaa

SEQ ID NO: 15867 - RNA, 22 nt, Artificial Sequence
  Guide RNA
uguucuucuugucacaaaugca

SEQ ID NO: 15868 - RNA, 22 nt, Artificial Sequence
  Guide RNA
uguucuugucacaaaugcaccc

SEQ ID NO: 15869 - RNA, 22 nt, Artificial Sequence
  Guide RNA
uguuguucuugucacaaaugca

SEQ ID NO: 15870 - RNA, 22 nt, Artificial Sequence
  Guide RNA
uucuucuugucacaaaugcacc

SEQ ID NO: 15871 - RNA, 22 nt, Artificial Sequence
  Guide RNA
uucuuugcacaucuauuuguuc

SEQ ID NO: 15872 - RNA, 22 nt, Artificial Sequence
  Guide RNA
uucuuugcacaucuauuuguug

SEQ ID NO: 15873 - RNA, 22 nt, Artificial Sequence
  Guide RNA
uugcacaucuauuuguucuucu

SEQ ID NO: 15874 - RNA, 22 nt, Artificial Sequence
  Guide RNA
uugcacaucuauuuguuguucu

SEQ ID NO: 15875 - RNA, 22 nt, Artificial Sequence
  Guide RNA
uugugacaagaacaacaaauag

SEQ ID NO: 15876 - RNA, 22 nt, Artificial Sequence
  Guide RNA
uugugacaagaagaacaaauag

SEQ ID NO: 15877 - RNA, 22 nt, Artificial Sequence
  Guide RNA
uuguucuucuugucacaaaugc

SEQ ID NO: 15878 - RNA, 22 nt, Artificial Sequence
  Guide RNA
uuguucuugucacaaaugcacc

SEQ ID NO: 15879 - RNA, 22 nt, Artificial Sequence
  Guide RNA
uuguuguucuugucacaaaugc

SEQ ID NO: 15880 - RNA, 22 nt, Artificial Sequence
  Guide RNA
uuugcacaucuauuuguucuuc

SEQ ID NO: 15881 - RNA, 22 nt, Artificial Sequence
  Guide RNA
uuugcacaucuauuuguuguuc

SEQ ID NO: 15882 - RNA, 22 nt, Artificial Sequence
  Guide RNA
uuuguucuucuugucacaaaug

SEQ ID NO: 15883 - RNA, 22 nt, Artificial Sequence
  Guide RNA
uuuguuguucuugucacaaaug

SEQ ID NO: 15884 - RNA, 20 nt, Artificial Sequence
  Guide RNA
aauuuugauuuagcauggga

SEQ ID NO: 15885 - RNA, 20 nt, Artificial Sequence
  Guide RNA
aauuuugauuuagcguggga

SEQ ID NO: 15886 - RNA, 20 nt, Artificial Sequence
  Guide RNA
acagcaugccucagguuccc

SEQ ID NO: 15887 - RNA, 20 nt, Artificial Sequence
  Guide RNA
agaauuuugauuuagcaugg

SEQ ID NO: 15888 - RNA, 20 nt, Artificial Sequence
  Guide RNA
agaauuuugauuuagcgugg

SEQ ID NO: 15889 - RNA, 20 nt, Artificial Sequence
  Guide RNA
agacagcaugccucagguuc

SEQ ID NO: 15890 - RNA, 20 nt, Artificial Sequence
  Guide RNA
agcaugccucagguucccac

SEQ ID NO: 15891 - RNA, 20 nt, Artificial Sequence
  Guide RNA
agcaugccucagguucccau

SEQ ID NO: 15892 - RNA, 20 nt, Artificial Sequence
  Guide RNA
agcaugggaaccugaggcau

SEQ ID NO: 15893 - RNA, 20 nt, Artificial Sequence
  Guide RNA
agcgugggaaccugaggcau

SEQ ID NO: 15894 - RNA, 20 nt, Artificial Sequence
  Guide RNA
agguucccacgcuaaaucaa

SEQ ID NO: 15895 - RNA, 20 nt, Artificial Sequence
  Guide RNA
agguucccaugcuaaaucaa

SEQ ID NO: 15896 - RNA, 20 nt, Artificial Sequence
  Guide RNA
augccucagguucccacgcu

SEQ ID NO: 15897 - RNA, 20 nt, Artificial Sequence
  Guide RNA
augccucagguucccaugcu

SEQ ID NO: 15898 - RNA, 20 nt, Artificial Sequence
  Guide RNA
auuuagcaugggaaccugag

SEQ ID NO: 15899 - RNA, 20 nt, Artificial Sequence
  Guide RNA
auuuagcgugggaaccugag

SEQ ID NO: 15900 - RNA, 20 nt, Artificial Sequence
  Guide RNA
auuuugauuuagcaugggaa

SEQ ID NO: 15901 - RNA, 20 nt, Artificial Sequence
  Guide RNA
auuuugauuuagcgugggaa

SEQ ID NO: 15902 - RNA, 20 nt, Artificial Sequence
  Guide RNA
cacgcuaaaucaaaauucua

SEQ ID NO: 15903 - RNA, 20 nt, Artificial Sequence
  Guide RNA
cagcaugccucagguuccca

SEQ ID NO: 15904 - RNA, 20 nt, Artificial Sequence
  Guide RNA
cagguucccacgcuaaauca

SEQ ID NO: 15905 - RNA, 20 nt, Artificial Sequence
  Guide RNA
cagguucccaugcuaaauca

SEQ ID NO: 15906 - RNA, 20 nt, Artificial Sequence
  Guide RNA
caugccucagguucccacgc

SEQ ID NO: 15907 - RNA, 20 nt, Artificial Sequence
  Guide RNA
caugccucagguucccaugc

SEQ ID NO: 15908 - RNA, 20 nt, Artificial Sequence
  Guide RNA
caugggaaccugaggcaugc

SEQ ID NO: 15909 - RNA, 20 nt, Artificial Sequence
  Guide RNA
ccacgcuaaaucaaaauucu

SEQ ID NO: 15910 - RNA, 20 nt, Artificial Sequence
  Guide RNA
ccaugcuaaaucaaaauucu

SEQ ID NO: 15911 - RNA, 20 nt, Artificial Sequence
  Guide RNA
cccacgcuaaaucaaaauuc

SEQ ID NO: 15912 - RNA, 20 nt, Artificial Sequence
  Guide RNA
cccaugcuaaaucaaaauuc

SEQ ID NO: 15913 - RNA, 20 nt, Artificial Sequence
  Guide RNA
ccucagguucccacgcuaaa

SEQ ID NO: 15914 - RNA, 20 nt, Artificial Sequence
  Guide RNA
ccucagguucccaugcuaaa

SEQ ID NO: 15915 - RNA, 20 nt, Artificial Sequence
  Guide RNA
cgugggaaccugaggcaugc

SEQ ID NO: 15916 - RNA, 20 nt, Artificial Sequence
  Guide RNA
cucagguucccacgcuaaau

SEQ ID NO: 15917 - RNA, 20 nt, Artificial Sequence
  Guide RNA
cucagguucccaugcuaaau

SEQ ID NO: 15918 - RNA, 20 nt, Artificial Sequence
  Guide RNA
gaauuuugauuuagcauggg

SEQ ID NO: 15919 - RNA, 20 nt, Artificial Sequence
  Guide RNA
gaauuuugauuuagcguggg

SEQ ID NO: 15920 - RNA, 20 nt, Artificial Sequence
  Guide RNA
gacagcaugccucagguucc

SEQ ID NO: 15921 - RNA, 20 nt, Artificial Sequence
  Guide RNA
gauuuagcaugggaaccuga

SEQ ID NO: 15922 - RNA, 20 nt, Artificial Sequence
  Guide RNA
gauuuagcgugggaaccuga

SEQ ID NO: 15923 - RNA, 20 nt, Artificial Sequence
  Guide RNA
gcaugccucagguucccacg

SEQ ID NO: 15924 - RNA, 20 nt, Artificial Sequence
  Guide RNA
gcaugccucagguucccaug

SEQ ID NO: 15925 - RNA, 20 nt, Artificial Sequence
  Guide RNA
gcaugggaaccugaggcaug

SEQ ID NO: 15926 - RNA, 20 nt, Artificial Sequence
  Guide RNA
gccucagguucccacgcuaa

SEQ ID NO: 15927 - RNA, 20 nt, Artificial Sequence
  Guide RNA
gccucagguucccaugcuaa

SEQ ID NO: 15928 - RNA, 20 nt, Artificial Sequence
  Guide RNA
gcgugggaaccugaggcaug

SEQ ID NO: 15929 - RNA, 20 nt, Artificial Sequence
  Guide RNA
gguucccacgcuaaaucaaa

SEQ ID NO: 15930 - RNA, 20 nt, Artificial Sequence
  Guide RNA
gguucccaugcuaaaucaaa

SEQ ID NO: 15931 - RNA, 20 nt, Artificial Sequence
  Guide RNA
guucccacgcuaaaucaaaa

SEQ ID NO: 15932 - RNA, 20 nt, Artificial Sequence
  Guide RNA
guucccaugcuaaaucaaaa

SEQ ID NO: 15933 - RNA, 20 nt, Artificial Sequence
  Guide RNA
uagaauuuugauuuagcgug

SEQ ID NO: 15934 - RNA, 20 nt, Artificial Sequence
  Guide RNA
uagcaugggaaccugaggca

SEQ ID NO: 15935 - RNA, 20 nt, Artificial Sequence
  Guide RNA
uagcgugggaaccugaggca

SEQ ID NO: 15936 - RNA, 20 nt, Artificial Sequence
  Guide RNA
ucagguucccacgcuaaauc

SEQ ID NO: 15937 - RNA, 20 nt, Artificial Sequence
  Guide RNA
ucagguucccaugcuaaauc

SEQ ID NO: 15938 - RNA, 20 nt, Artificial Sequence
  Guide RNA
ucccacgcuaaaucaaaauu

SEQ ID NO: 15939 - RNA, 20 nt, Artificial Sequence
  Guide RNA
ucccaugcuaaaucaaaauu

SEQ ID NO: 15940 - RNA, 20 nt, Artificial Sequence
  Guide RNA
ugauuuagcaugggaaccug

SEQ ID NO: 15941 - RNA, 20 nt, Artificial Sequence
  Guide RNA
ugauuuagcgugggaaccug

SEQ ID NO: 15942 - RNA, 20 nt, Artificial Sequence
  Guide RNA
ugccucagguucccacgcua

SEQ ID NO: 15943 - RNA, 20 nt, Artificial Sequence
  Guide RNA
ugccucagguucccaugcua

SEQ ID NO: 15944 - RNA, 20 nt, Artificial Sequence
  Guide RNA
uuagcaugggaaccugaggc

SEQ ID NO: 15945 - RNA, 20 nt, Artificial Sequence
  Guide RNA
uuagcgugggaaccugaggc

SEQ ID NO: 15946 - RNA, 20 nt, Artificial Sequence
  Guide RNA
uucccacgcuaaaucaaaau

SEQ ID NO: 15947 - RNA, 20 nt, Artificial Sequence
  Guide RNA
uucccaugcuaaaucaaaau

SEQ ID NO: 15948 - RNA, 20 nt, Artificial Sequence
  Guide RNA
uugauuuagcaugggaaccu

SEQ ID NO: 15949 - RNA, 20 nt, Artificial Sequence
  Guide RNA
uugauuuagcgugggaaccu

SEQ ID NO: 15950 - RNA, 20 nt, Artificial Sequence
  Guide RNA
uuuagcaugggaaccugagg

SEQ ID NO: 15951 - RNA, 20 nt, Artificial Sequence
  Guide RNA
uuuagcgugggaaccugagg

SEQ ID NO: 15952 - RNA, 20 nt, Artificial Sequence
  Guide RNA
uuugauuuagcaugggaacc

SEQ ID NO: 15953 - RNA, 20 nt, Artificial Sequence
  Guide RNA
uuugauuuagcgugggaacc

SEQ ID NO: 15954 - RNA, 20 nt, Artificial Sequence
  Guide RNA
uuuugauuuagcaugggaac

SEQ ID NO: 15955 - RNA, 20 nt, Artificial Sequence
  Guide RNA
uuuugauuuagcgugggaac

SEQ ID NO: 15956 - RNA, 21 nt, Artificial Sequence
  Guide RNA
aauuuugauuuagcgugggaa

SEQ ID NO: 15957 - RNA, 21 nt, Artificial Sequence
  Guide RNA
acagcaugccucagguuccca

SEQ ID NO: 15958 - RNA, 21 nt, Artificial Sequence
  Guide RNA
agaauuuugauuuagcauggg

SEQ ID NO: 15959 - RNA, 21 nt, Artificial Sequence
  Guide RNA
agaauuuugauuuagcguggg

SEQ ID NO: 15960 - RNA, 21 nt, Artificial Sequence
  Guide RNA
agacagcaugccucagguucc

SEQ ID NO: 15961 - RNA, 21 nt, Artificial Sequence
  Guide RNA
agcaugccucagguucccacg

SEQ ID NO: 15962 - RNA, 21 nt, Artificial Sequence
  Guide RNA
agcaugccucagguucccaug

SEQ ID NO: 15963 - RNA, 21 nt, Artificial Sequence
  Guide RNA
agcaugggaaccugaggcaug

SEQ ID NO: 15964 - RNA, 21 nt, Artificial Sequence
  Guide RNA
agcgugggaaccugaggcaug

SEQ ID NO: 15965 - RNA, 21 nt, Artificial Sequence
  Guide RNA
agguucccacgcuaaaucaaa

SEQ ID NO: 15966 - RNA, 21 nt, Artificial Sequence
  Guide RNA
agguucccaugcuaaaucaaa

SEQ ID NO: 15967 - RNA, 21 nt, Artificial Sequence
  Guide RNA
augccucagguucccacgcua

SEQ ID NO: 15968 - RNA, 21 nt, Artificial Sequence
  Guide RNA
augccucagguucccaugcua

SEQ ID NO: 15969 - RNA, 21 nt, Artificial Sequence
  Guide RNA
auuuagcaugggaaccugagg

SEQ ID NO: 15970 - RNA, 21 nt, Artificial Sequence
  Guide RNA
auuuagcgugggaaccugagg

SEQ ID NO: 15971 - RNA, 21 nt, Artificial Sequence
  Guide RNA
auuuugauuuagcaugggaac

SEQ ID NO: 15972 - RNA, 21 nt, Artificial Sequence
  Guide RNA
auuuugauuuagcgugggaac

SEQ ID NO: 15973 - RNA, 21 nt, Artificial Sequence
  Guide RNA
cagcaugccucagguucccac

SEQ ID NO: 15974 - RNA, 21 nt, Artificial Sequence
  Guide RNA
cagcaugccucagguucccau

SEQ ID NO: 15975 - RNA, 21 nt, Artificial Sequence
  Guide RNA
cagguucccacgcuaaaucaa

SEQ ID NO: 15976 - RNA, 21 nt, Artificial Sequence
  Guide RNA
cagguucccaugcuaaaucaa

SEQ ID NO: 15977 - RNA, 21 nt, Artificial Sequence
  Guide RNA
caugccucagguucccacgcu

SEQ ID NO: 15978 - RNA, 21 nt, Artificial Sequence
  Guide RNA
caugccucagguucccaugcu

SEQ ID NO: 15979 - RNA, 21 nt, Artificial Sequence
  Guide RNA
caugggaaccugaggcaugcu

SEQ ID NO: 15980 - RNA, 21 nt, Artificial Sequence
  Guide RNA
ccacgcuaaaucaaaauucua

SEQ ID NO: 15981 - RNA, 21 nt, Artificial Sequence
  Guide RNA
cccacgcuaaaucaaaauucu

SEQ ID NO: 15982 - RNA, 21 nt, Artificial Sequence
  Guide RNA
cccaugcuaaaucaaaauucu

SEQ ID NO: 15983 - RNA, 21 nt, Artificial Sequence
  Guide RNA
ccucagguucccacgcuaaau

SEQ ID NO: 15984 - RNA, 21 nt, Artificial Sequence
  Guide RNA
ccucagguucccaugcuaaau

SEQ ID NO: 15985 - RNA, 21 nt, Artificial Sequence
  Guide RNA
cgugggaaccugaggcaugcu

SEQ ID NO: 15986 - RNA, 21 nt, Artificial Sequence
  Guide RNA
cucagguucccacgcuaaauc

SEQ ID NO: 15987 - RNA, 21 nt, Artificial Sequence
  Guide RNA
cucagguucccaugcuaaauc

SEQ ID NO: 15988 - RNA, 21 nt, Artificial Sequence
  Guide RNA
gaauuuugauuuagcauggga

SEQ ID NO: 15989 - RNA, 21 nt, Artificial Sequence
  Guide RNA
gaauuuugauuuagcguggga

SEQ ID NO: 15990 - RNA, 21 nt, Artificial Sequence
  Guide RNA
gacagcaugccucagguuccc

SEQ ID NO: 15991 - RNA, 21 nt, Artificial Sequence
  Guide RNA
gagacagcaugccucagguuc

SEQ ID NO: 15992 - RNA, 21 nt, Artificial Sequence
  Guide RNA
gauuuagcaugggaaccugag

SEQ ID NO: 15993 - RNA, 21 nt, Artificial Sequence
  Guide RNA
gauuuagcgugggaaccugag

SEQ ID NO: 15994 - RNA, 21 nt, Artificial Sequence
  Guide RNA
gcaugccucagguucccacgc

SEQ ID NO: 15995 - RNA, 21 nt, Artificial Sequence
  Guide RNA
gcaugccucagguucccaugc

SEQ ID NO: 15996 - RNA, 21 nt, Artificial Sequence
  Guide RNA
gcaugggaaccugaggcaugc

SEQ ID NO: 15997 - RNA, 21 nt, Artificial Sequence
  Guide RNA
gccucagguucccacgcuaaa

SEQ ID NO: 15998 - RNA, 21 nt, Artificial Sequence
  Guide RNA
gccucagguucccaugcuaaa

SEQ ID NO: 15999 - RNA, 21 nt, Artificial Sequence
  Guide RNA
gcgugggaaccugaggcaugc

SEQ ID NO: 16000 - RNA, 21 nt, Artificial Sequence
  Guide RNA
gguucccacgcuaaaucaaaa

SEQ ID NO: 16001 - RNA, 21 nt, Artificial Sequence
  Guide RNA
gguucccaugcuaaaucaaaa

SEQ ID NO: 16002 - RNA, 21 nt, Artificial Sequence
  Guide RNA
guucccacgcuaaaucaaaau

SEQ ID NO: 16003 - RNA, 21 nt, Artificial Sequence
  Guide RNA
guucccaugcuaaaucaaaau

SEQ ID NO: 16004 - RNA, 21 nt, Artificial Sequence
  Guide RNA
uagaauuuugauuuagcgugg

SEQ ID NO: 16005 - RNA, 21 nt, Artificial Sequence
  Guide RNA
uagcaugggaaccugaggcau

SEQ ID NO: 16006 - RNA, 21 nt, Artificial Sequence
  Guide RNA
uagcgugggaaccugaggcau

SEQ ID NO: 16007 - RNA, 21 nt, Artificial Sequence
  Guide RNA
ucagguucccacgcuaaauca

SEQ ID NO: 16008 - RNA, 21 nt, Artificial Sequence
  Guide RNA
ucagguucccaugcuaaauca

SEQ ID NO: 16009 - RNA, 21 nt, Artificial Sequence
  Guide RNA
ucccacgcuaaaucaaaauuc

SEQ ID NO: 16010 - RNA, 21 nt, Artificial Sequence
  Guide RNA
ucccaugcuaaaucaaaauuc

SEQ ID NO: 16011 - RNA, 21 nt, Artificial Sequence
  Guide RNA
ugauuuagcaugggaaccuga

SEQ ID NO: 16012 - RNA, 21 nt, Artificial Sequence
  Guide RNA
ugauuuagcgugggaaccuga

SEQ ID NO: 16013 - RNA, 21 nt, Artificial Sequence
  Guide RNA
ugccucagguucccacgcuaa

SEQ ID NO: 16014 - RNA, 21 nt, Artificial Sequence
  Guide RNA
ugccucagguucccaugcuaa

SEQ ID NO: 16015 - RNA, 21 nt, Artificial Sequence
  Guide RNA
uuagcaugggaaccugaggca

SEQ ID NO: 16016 - RNA, 21 nt, Artificial Sequence
  Guide RNA
uuagcgugggaaccugaggca

SEQ ID NO: 16017 - RNA, 21 nt, Artificial Sequence
  Guide RNA
uucccacgcuaaaucaaaauu

SEQ ID NO: 16018 - RNA, 21 nt, Artificial Sequence
  Guide RNA
uugauuuagcaugggaaccug

SEQ ID NO: 16019 - RNA, 21 nt, Artificial Sequence
  Guide RNA
uugauuuagcgugggaaccug

SEQ ID NO: 16020 - RNA, 21 nt, Artificial Sequence
  Guide RNA
uuuagcaugggaaccugaggc

SEQ ID NO: 16021 - RNA, 21 nt, Artificial Sequence
  Guide RNA
uuuagcgugggaaccugaggc

SEQ ID NO: 16022 - RNA, 21 nt, Artificial Sequence
  Guide RNA
uuugauuuagcaugggaaccu

SEQ ID NO: 16023 - RNA, 21 nt, Artificial Sequence
  Guide RNA
uuugauuuagcgugggaaccu

SEQ ID NO: 16024 - RNA, 21 nt, Artificial Sequence
  Guide RNA
uuuugauuuagcaugggaacc

SEQ ID NO: 16025 - RNA, 21 nt, Artificial Sequence
  Guide RNA
uuuugauuuagcgugggaacc

SEQ ID NO: 16026 - RNA, 22 nt, Artificial Sequence
  Guide RNA
aauuuugauuuagcaugggaac

SEQ ID NO: 16027 - RNA, 22 nt, Artificial Sequence
  Guide RNA
aauuuugauuuagcgugggaac

SEQ ID NO: 16028 - RNA, 22 nt, Artificial Sequence
  Guide RNA
acagcaugccucagguucccac

SEQ ID NO: 16029 - RNA, 22 nt, Artificial Sequence
  Guide RNA
acagcaugccucagguucccau

SEQ ID NO: 16030 - RNA, 22 nt, Artificial Sequence
  Guide RNA
agaauuuugauuuagcauggga

SEQ ID NO: 16031 - RNA, 22 nt, Artificial Sequence
  Guide RNA
agaauuuugauuuagcguggga

SEQ ID NO: 16032 - RNA, 22 nt, Artificial Sequence
  Guide RNA
agacagcaugccucagguuccc

SEQ ID NO: 16033 - RNA, 22 nt, Artificial Sequence
  Guide RNA
agcaugccucagguucccacgc

SEQ ID NO: 16034 - RNA, 22 nt, Artificial Sequence
  Guide RNA
agcaugccucagguucccaugc

SEQ ID NO: 16035 - RNA, 22 nt, Artificial Sequence
  Guide RNA
agcaugggaaccugaggcaugc

SEQ ID NO: 16036 - RNA, 22 nt, Artificial Sequence
  Guide RNA
agcgugggaaccugaggcaugc

SEQ ID NO: 16037 - RNA, 22 nt, Artificial Sequence
  Guide RNA
agguucccacgcuaaaucaaaa

SEQ ID NO: 16038 - RNA, 22 nt, Artificial Sequence
  Guide RNA
agguucccaugcuaaaucaaaa

SEQ ID NO: 16039 - RNA, 22 nt, Artificial Sequence
  Guide RNA
augccucagguucccacgcuaa

SEQ ID NO: 16040 - RNA, 22 nt, Artificial Sequence
  Guide RNA
augccucagguucccaugcuaa

SEQ ID NO: 16041 - RNA, 22 nt, Artificial Sequence
  Guide RNA
auuuagcaugggaaccugaggc

SEQ ID NO: 16042 - RNA, 22 nt, Artificial Sequence
  Guide RNA
auuuagcgugggaaccugaggc

SEQ ID NO: 16043 - RNA, 22 nt, Artificial Sequence
  Guide RNA
auuuugauuuagcaugggaacc

SEQ ID NO: 16044 - RNA, 22 nt, Artificial Sequence
  Guide RNA
auuuugauuuagcgugggaacc

SEQ ID NO: 16045 - RNA, 22 nt, Artificial Sequence
  Guide RNA
cagcaugccucagguucccacg

SEQ ID NO: 16046 - RNA, 22 nt, Artificial Sequence
  Guide RNA
cagcaugccucagguucccaug

SEQ ID NO: 16047 - RNA, 22 nt, Artificial Sequence
  Guide RNA
cagguucccacgcuaaaucaaa

SEQ ID NO: 16048 - RNA, 22 nt, Artificial Sequence
  Guide RNA
cagguucccaugcuaaaucaaa

SEQ ID NO: 16049 - RNA, 22 nt, Artificial Sequence
  Guide RNA
caugccucagguucccacgcua

SEQ ID NO: 16050 - RNA, 22 nt, Artificial Sequence
  Guide RNA
caugccucagguucccaugcua

SEQ ID NO: 16051 - RNA, 22 nt, Artificial Sequence
  Guide RNA
caugggaaccugaggcaugcug

SEQ ID NO: 16052 - RNA, 22 nt, Artificial Sequence
  Guide RNA
ccacgcuaaaucaaaauucuaa

SEQ ID NO: 16053 - RNA, 22 nt, Artificial Sequence
  Guide RNA
cccacgcuaaaucaaaauucua

SEQ ID NO: 16054 - RNA, 22 nt, Artificial Sequence
  Guide RNA
cccaugcuaaaucaaaauucua

SEQ ID NO: 16055 - RNA, 22 nt, Artificial Sequence
  Guide RNA
ccucagguucccacgcuaaauc

SEQ ID NO: 16056 - RNA, 22 nt, Artificial Sequence
  Guide RNA
ccucagguucccaugcuaaauc

SEQ ID NO: 16057 - RNA, 22 nt, Artificial Sequence
  Guide RNA
cgugggaaccugaggcaugcug

SEQ ID NO: 16058 - RNA, 22 nt, Artificial Sequence
  Guide RNA
cucagguucccacgcuaaauca

SEQ ID NO: 16059 - RNA, 22 nt, Artificial Sequence
  Guide RNA
cucagguucccaugcuaaauca

SEQ ID NO: 16060 - RNA, 22 nt, Artificial Sequence
  Guide RNA
gaauuuugauuuagcaugggaa

SEQ ID NO: 16061 - RNA, 22 nt, Artificial Sequence
  Guide RNA
gaauuuugauuuagcgugggaa

SEQ ID NO: 16062 - RNA, 22 nt, Artificial Sequence
  Guide RNA
gacagcaugccucagguuccca

SEQ ID NO: 16063 - RNA, 22 nt, Artificial Sequence
  Guide RNA
gagacagcaugccucagguucc

SEQ ID NO: 16064 - RNA, 22 nt, Artificial Sequence
  Guide RNA
gauuuagcaugggaaccugagg

SEQ ID NO: 16065 - RNA, 22 nt, Artificial Sequence
  Guide RNA
gauuuagcgugggaaccugagg

SEQ ID NO: 16066 - RNA, 22 nt, Artificial Sequence
  Guide RNA
gcaugccucagguucccacgcu

SEQ ID NO: 16067 - RNA, 22 nt, Artificial Sequence
  Guide RNA
gcaugccucagguucccaugcu

SEQ ID NO: 16068 - RNA, 22 nt, Artificial Sequence
  Guide RNA
gcaugggaaccugaggcaugcu

SEQ ID NO: 16069 - RNA, 22 nt, Artificial Sequence
  Guide RNA
gccucagguucccacgcuaaau

SEQ ID NO: 16070 - RNA, 22 nt, Artificial Sequence
  Guide RNA
gccucagguucccaugcuaaau

SEQ ID NO: 16071 - RNA, 22 nt, Artificial Sequence
  Guide RNA
gcgugggaaccugaggcaugcu

SEQ ID NO: 16072 - RNA, 22 nt, Artificial Sequence
  Guide RNA
ggagacagcaugccucagguuc

SEQ ID NO: 16073 - RNA, 22 nt, Artificial Sequence
  Guide RNA
gguucccacgcuaaaucaaaau

SEQ ID NO: 16074 - RNA, 22 nt, Artificial Sequence
  Guide RNA
gguucccaugcuaaaucaaaau

SEQ ID NO: 16075 - RNA, 22 nt, Artificial Sequence
  Guide RNA
guucccacgcuaaaucaaaauu

SEQ ID NO: 16076 - RNA, 22 nt, Artificial Sequence
  Guide RNA
guucccaugcuaaaucaaaauu

SEQ ID NO: 16077 - RNA, 22 nt, Artificial Sequence
  Guide RNA
uagaauuuugauuuagcauggg

SEQ ID NO: 16078 - RNA, 22 nt, Artificial Sequence
  Guide RNA
uagaauuuugauuuagcguggg

SEQ ID NO: 16079 - RNA, 22 nt, Artificial Sequence
  Guide RNA
uagcaugggaaccugaggcaug

SEQ ID NO: 16080 - RNA, 22 nt, Artificial Sequence
  Guide RNA
uagcgugggaaccugaggcaug

SEQ ID NO: 16081 - RNA, 22 nt, Artificial Sequence
  Guide RNA
ucagguucccacgcuaaaucaa

SEQ ID NO: 16082 - RNA, 22 nt, Artificial Sequence
  Guide RNA
ucagguucccaugcuaaaucaa

SEQ ID NO: 16083 - RNA, 22 nt, Artificial Sequence
  Guide RNA
ucccacgcuaaaucaaaauucu

SEQ ID NO: 16084 - RNA, 22 nt, Artificial Sequence
  Guide RNA
ucccaugcuaaaucaaaauucu

SEQ ID NO: 16085 - RNA, 22 nt, Artificial Sequence
  Guide RNA
ugauuuagcaugggaaccugag

SEQ ID NO: 16086 - RNA, 22 nt, Artificial Sequence
  Guide RNA
ugauuuagcgugggaaccugag

SEQ ID NO: 16087 - RNA, 22 nt, Artificial Sequence
  Guide RNA
ugccucagguucccacgcuaaa

SEQ ID NO: 16088 - RNA, 22 nt, Artificial Sequence
  Guide RNA
ugccucagguucccaugcuaaa

SEQ ID NO: 16089 - RNA, 22 nt, Artificial Sequence
  Guide RNA
uuagaauuuugauuuagcgugg

SEQ ID NO: 16090 - RNA, 22 nt, Artificial Sequence
  Guide RNA
uuagcaugggaaccugaggcau

SEQ ID NO: 16091 - RNA, 22 nt, Artificial Sequence
  Guide RNA
uuagcgugggaaccugaggcau

SEQ ID NO: 16092 - RNA, 22 nt, Artificial Sequence
  Guide RNA
uucccacgcuaaaucaaaauuc

SEQ ID NO: 16093 - RNA, 22 nt, Artificial Sequence
  Guide RNA
uucccaugcuaaaucaaaauuc

SEQ ID NO: 16094 - RNA, 22 nt, Artificial Sequence
  Guide RNA
uugauuuagcaugggaaccuga

SEQ ID NO: 16095 - RNA, 22 nt, Artificial Sequence
  Guide RNA
uugauuuagcgugggaaccuga

SEQ ID NO: 16096 - RNA, 22 nt, Artificial Sequence
  Guide RNA
uuuagcaugggaaccugaggca

SEQ ID NO: 16097 - RNA, 22 nt, Artificial Sequence
  Guide RNA
uuuagcgugggaaccugaggca

SEQ ID NO: 16098 - RNA, 22 nt, Artificial Sequence
  Guide RNA
uuugauuuagcaugggaaccug

SEQ ID NO: 16099 - RNA, 22 nt, Artificial Sequence
  Guide RNA
uuugauuuagcgugggaaccug

SEQ ID NO: 16100 - RNA, 22 nt, Artificial Sequence
  Guide RNA
uuuugauuuagcaugggaaccu

SEQ ID NO: 16101 - RNA, 22 nt, Artificial Sequence
  Guide RNA
uuuugauuuagcgugggaaccu

SEQ ID NO: 16102 - RNA, 20 nt, Artificial Sequence
  Guide RNA
agggaggagaaucguuugaa

SEQ ID NO: 16103 - RNA, 20 nt, Artificial Sequence
  Guide RNA
aguugaugggaggcugaggc

SEQ ID NO: 16104 - RNA, 20 nt, Artificial Sequence
  Guide RNA
aguugaugggaggcugaggg

SEQ ID NO: 16105 - RNA, 20 nt, Artificial Sequence
  Guide RNA
augggaggcugagggaggag

SEQ ID NO: 16106 - RNA, 20 nt, Artificial Sequence
  Guide RNA
auucuccucccucagccucc

SEQ ID NO: 16107 - RNA, 20 nt, Artificial Sequence
  Guide RNA
caguugaugggaggcugagg

SEQ ID NO: 16108 - RNA, 20 nt, Artificial Sequence
  Guide RNA
ccaguugaugggaggcugag

SEQ ID NO: 16109 - RNA, 20 nt, Artificial Sequence
  Guide RNA
ccuagguucaaacgauucuc

SEQ ID NO: 16110 - RNA, 20 nt, Artificial Sequence
  Guide RNA
ccucccucagccucccauca

SEQ ID NO: 16111 - RNA, 20 nt, Artificial Sequence
  Guide RNA
ccugccucagccucccauca

SEQ ID NO: 16112 - RNA, 20 nt, Artificial Sequence
  Guide RNA
cuagguucaaacgauucucc

SEQ ID NO: 16113 - RNA, 20 nt, Artificial Sequence
  Guide RNA
cucccucagccucccaucaa

SEQ ID NO: 16114 - RNA, 20 nt, Artificial Sequence
  Guide RNA
cuccucccucagccucccau

SEQ ID NO: 16115 - RNA, 20 nt, Artificial Sequence
  Guide RNA
cuccugccucagccucccau

SEQ ID NO: 16116 - RNA, 20 nt, Artificial Sequence
  Guide RNA
cugccucagccucccaucaa

SEQ ID NO: 16117 - RNA, 20 nt, Artificial Sequence
  Guide RNA
gaugggaggcugagggagga

SEQ ID NO: 16118 - RNA, 20 nt, Artificial Sequence
  Guide RNA
gauucuccucccucagccuc

SEQ ID NO: 16119 - RNA, 20 nt, Artificial Sequence
  Guide RNA
ggaggagaaucguuugaacc

SEQ ID NO: 16120 - RNA, 20 nt, Artificial Sequence
  Guide RNA
gggaggagaaucguuugaac

SEQ ID NO: 16121 - RNA, 20 nt, Artificial Sequence
  Guide RNA
guccaguugaugggaggcug

SEQ ID NO: 16122 - RNA, 20 nt, Artificial Sequence
  Guide RNA
guugaugggaggcugaggca

SEQ ID NO: 16123 - RNA, 20 nt, Artificial Sequence
  Guide RNA
guugaugggaggcugaggga

SEQ ID NO: 16124 - RNA, 20 nt, Artificial Sequence
  Guide RNA
uagguucaaacgauucuccu

SEQ ID NO: 16125 - RNA, 20 nt, Artificial Sequence
  Guide RNA
uccaguugaugggaggcuga

SEQ ID NO: 16126 - RNA, 20 nt, Artificial Sequence
  Guide RNA
ucccucagccucccaucaac

SEQ ID NO: 16127 - RNA, 20 nt, Artificial Sequence
  Guide RNA
uccuagguucaaacgauucu

SEQ ID NO: 16128 - RNA, 20 nt, Artificial Sequence
  Guide RNA
uccucccucagccucccauc

SEQ ID NO: 16129 - RNA, 20 nt, Artificial Sequence
  Guide RNA
uccugccucagccucccauc

SEQ ID NO: 16130 - RNA, 20 nt, Artificial Sequence
  Guide RNA
ucuccucccucagccuccca

SEQ ID NO: 16131 - RNA, 20 nt, Artificial Sequence
  Guide RNA
ucuccugccucagccuccca

SEQ ID NO: 16132 - RNA, 20 nt, Artificial Sequence
  Guide RNA
ugaugggaggcugaggcagg

SEQ ID NO: 16133 - RNA, 20 nt, Artificial Sequence
  Guide RNA
ugaugggaggcugagggagg

SEQ ID NO: 16134 - RNA, 20 nt, Artificial Sequence
  Guide RNA
ugccucagccucccaucaac

SEQ ID NO: 16135 - RNA, 20 nt, Artificial Sequence
  Guide RNA
uucuccucccucagccuccc

SEQ ID NO: 16136 - RNA, 20 nt, Artificial Sequence
  Guide RNA
uucuccugccucagccuccc

SEQ ID NO: 16137 - RNA, 20 nt, Artificial Sequence
  Guide RNA
uugaugggaggcugaggcag

SEQ ID NO: 16138 - RNA, 20 nt, Artificial Sequence
  Guide RNA
uugaugggaggcugagggag

SEQ ID NO: 16139 - RNA, 21 nt, Artificial Sequence
  Guide RNA
agggaggagaaucguuugaac

SEQ ID NO: 16140 - RNA, 21 nt, Artificial Sequence
  Guide RNA
aguugaugggaggcugaggca

SEQ ID NO: 16141 - RNA, 21 nt, Artificial Sequence
  Guide RNA
aguugaugggaggcugaggga

SEQ ID NO: 16142 - RNA, 21 nt, Artificial Sequence
  Guide RNA
augggaggcugagggaggaga

SEQ ID NO: 16143 - RNA, 21 nt, Artificial Sequence
  Guide RNA
auucuccucccucagccuccc

SEQ ID NO: 16144 - RNA, 21 nt, Artificial Sequence
  Guide RNA
auucuccugccucagccuccc

SEQ ID NO: 16145 - RNA, 21 nt, Artificial Sequence
  Guide RNA
caguugaugggaggcugaggc

SEQ ID NO: 16146 - RNA, 21 nt, Artificial Sequence
  Guide RNA
caguugaugggaggcugaggg

SEQ ID NO: 16147 - RNA, 21 nt, Artificial Sequence
  Guide RNA
ccaguugaugggaggcugagg

SEQ ID NO: 16148 - RNA, 21 nt, Artificial Sequence
  Guide RNA
ccuagguucaaacgauucucc

SEQ ID NO: 16149 - RNA, 21 nt, Artificial Sequence
  Guide RNA
ccucccucagccucccaucaa

SEQ ID NO: 16150 - RNA, 21 nt, Artificial Sequence
  Guide RNA
ccugccucagccucccaucaa

SEQ ID NO: 16151 - RNA, 21 nt, Artificial Sequence
  Guide RNA
cgauucuccucccucagccuc

SEQ ID NO: 16152 - RNA, 21 nt, Artificial Sequence
  Guide RNA
cuagguucaaacgauucuccu

SEQ ID NO: 16153 - RNA, 21 nt, Artificial Sequence
  Guide RNA
cucccucagccucccaucaac

SEQ ID NO: 16154 - RNA, 21 nt, Artificial Sequence
  Guide RNA
cuccuagguucaaacgauucu

SEQ ID NO: 16155 - RNA, 21 nt, Artificial Sequence
  Guide RNA
cuccucccucagccucccauc

SEQ ID NO: 16156 - RNA, 21 nt, Artificial Sequence
  Guide RNA
cuccugccucagccucccauc

SEQ ID NO: 16157 - RNA, 21 nt, Artificial Sequence
  Guide RNA
cugccucagccucccaucaac

SEQ ID NO: 16158 - RNA, 21 nt, Artificial Sequence
  Guide RNA
gagggaggagaaucguuugaa

SEQ ID NO: 16159 - RNA, 21 nt, Artificial Sequence
  Guide RNA
gaugggaggcugagggaggag

SEQ ID NO: 16160 - RNA, 21 nt, Artificial Sequence
  Guide RNA
gauucuccucccucagccucc

SEQ ID NO: 16161 - RNA, 21 nt, Artificial Sequence
  Guide RNA
ggaggagaaucguuugaaccu

SEQ ID NO: 16162 - RNA, 21 nt, Artificial Sequence
  Guide RNA
gggaggagaaucguuugaacc

SEQ ID NO: 16163 - RNA, 21 nt, Artificial Sequence
  Guide RNA
guccaguugaugggaggcuga

SEQ ID NO: 16164 - RNA, 21 nt, Artificial Sequence
  Guide RNA
guugaugggaggcugaggcag

SEQ ID NO: 16165 - RNA, 21 nt, Artificial Sequence
  Guide RNA
guugaugggaggcugagggag

SEQ ID NO: 16166 - RNA, 21 nt, Artificial Sequence
  Guide RNA
uagguucaaacgauucuccuc

SEQ ID NO: 16167 - RNA, 21 nt, Artificial Sequence
  Guide RNA
uccaguugaugggaggcugag

SEQ ID NO: 16168 - RNA, 21 nt, Artificial Sequence
  Guide RNA
ucccucagccucccaucaacu

SEQ ID NO: 16169 - RNA, 21 nt, Artificial Sequence
  Guide RNA
uccuagguucaaacgauucuc

SEQ ID NO: 16170 - RNA, 21 nt, Artificial Sequence
  Guide RNA
uccucccucagccucccauca

SEQ ID NO: 16171 - RNA, 21 nt, Artificial Sequence
  Guide RNA
uccugccucagccucccauca

SEQ ID NO: 16172 - RNA, 21 nt, Artificial Sequence
  Guide RNA
ucuccucccucagccucccau

SEQ ID NO: 16173 - RNA, 21 nt, Artificial Sequence
  Guide RNA
ucuccugccucagccucccau

SEQ ID NO: 16174 - RNA, 21 nt, Artificial Sequence
  Guide RNA
ugaugggaggcugaggcagga

SEQ ID NO: 16175 - RNA, 21 nt, Artificial Sequence
  Guide RNA
ugaugggaggcugagggagga

SEQ ID NO: 16176 - RNA, 21 nt, Artificial Sequence
  Guide RNA
ugccucagccucccaucaacu

SEQ ID NO: 16177 - RNA, 21 nt, Artificial Sequence
  Guide RNA
uguccaguugaugggaggcug

SEQ ID NO: 16178 - RNA, 21 nt, Artificial Sequence
  Guide RNA
uucuccucccucagccuccca

SEQ ID NO: 16179 - RNA, 21 nt, Artificial Sequence
  Guide RNA
uucuccugccucagccuccca

SEQ ID NO: 16180 - RNA, 21 nt, Artificial Sequence
  Guide RNA
uugaugggaggcugaggcagg

SEQ ID NO: 16181 - RNA, 21 nt, Artificial Sequence
  Guide RNA
uugaugggaggcugagggagg

SEQ ID NO: 16182 - RNA, 22 nt, Artificial Sequence
  Guide RNA
acgauucuccucccucagccuc

SEQ ID NO: 16183 - RNA, 22 nt, Artificial Sequence
  Guide RNA
agggaggagaaucguuugaacc

SEQ ID NO: 16184 - RNA, 22 nt, Artificial Sequence
  Guide RNA
aguugaugggaggcugaggcag

SEQ ID NO: 16185 - RNA, 22 nt, Artificial Sequence
  Guide RNA
aguugaugggaggcugagggag

SEQ ID NO: 16186 - RNA, 22 nt, Artificial Sequence
  Guide RNA
augggaggcugagggaggagaa

SEQ ID NO: 16187 - RNA, 22 nt, Artificial Sequence
  Guide RNA
auucuccucccucagccuccca

SEQ ID NO: 16188 - RNA, 22 nt, Artificial Sequence
  Guide RNA
auucuccugccucagccuccca

SEQ ID NO: 16189 - RNA, 22 nt, Artificial Sequence
  Guide RNA
caguugaugggaggcugaggca

SEQ ID NO: 16190 - RNA, 22 nt, Artificial Sequence
  Guide RNA
caguugaugggaggcugaggga

SEQ ID NO: 16191 - RNA, 22 nt, Artificial Sequence
  Guide RNA
ccaguugaugggaggcugaggc

SEQ ID NO: 16192 - RNA, 22 nt, Artificial Sequence
  Guide RNA
ccaguugaugggaggcugaggg

SEQ ID NO: 16193 - RNA, 22 nt, Artificial Sequence
  Guide RNA
ccuagguucaaacgauucuccu

SEQ ID NO: 16194 - RNA, 22 nt, Artificial Sequence
  Guide RNA
ccucccucagccucccaucaac

SEQ ID NO: 16195 - RNA, 22 nt, Artificial Sequence
  Guide RNA
ccuccuagguucaaacgauucu

SEQ ID NO: 16196 - RNA, 22 nt, Artificial Sequence
  Guide RNA
ccugccucagccucccaucaac

SEQ ID NO: 16197 - RNA, 22 nt, Artificial Sequence
  Guide RNA
cgauucuccucccucagccucc

SEQ ID NO: 16198 - RNA, 22 nt, Artificial Sequence
  Guide RNA
cgauucuccugccucagccucc

SEQ ID NO: 16199 - RNA, 22 nt, Artificial Sequence
  Guide RNA
cuagguucaaacgauucuccuc

SEQ ID NO: 16200 - RNA, 22 nt, Artificial Sequence
  Guide RNA
cucccucagccucccaucaacu

SEQ ID NO: 16201 - RNA, 22 nt, Artificial Sequence
  Guide RNA
cuccuagguucaaacgauucuc

SEQ ID NO: 16202 - RNA, 22 nt, Artificial Sequence
  Guide RNA
cuccucccucagccucccauca

SEQ ID NO: 16203 - RNA, 22 nt, Artificial Sequence
  Guide RNA
cuccugccucagccucccauca

SEQ ID NO: 16204 - RNA, 22 nt, Artificial Sequence
  Guide RNA
cugccucagccucccaucaacu

SEQ ID NO: 16205 - RNA, 22 nt, Artificial Sequence
  Guide RNA
gagggaggagaaucguuugaac

SEQ ID NO: 16206 - RNA, 22 nt, Artificial Sequence
  Guide RNA
gaugggaggcugaggcaggaga

SEQ ID NO: 16207 - RNA, 22 nt, Artificial Sequence
  Guide RNA
gaugggaggcugagggaggaga

SEQ ID NO: 16208 - RNA, 22 nt, Artificial Sequence
  Guide RNA
gauucuccucccucagccuccc

SEQ ID NO: 16209 - RNA, 22 nt, Artificial Sequence
  Guide RNA
gauucuccugccucagccuccc

SEQ ID NO: 16210 - RNA, 22 nt, Artificial Sequence
  Guide RNA
ggaggagaaucguuugaaccua

SEQ ID NO: 16211 - RNA, 22 nt, Artificial Sequence
  Guide RNA
gggaggagaaucguuugaaccu

SEQ ID NO: 16212 - RNA, 22 nt, Artificial Sequence
  Guide RNA
guccaguugaugggaggcugag

SEQ ID NO: 16213 - RNA, 22 nt, Artificial Sequence
  Guide RNA
guugaugggaggcugaggcagg

SEQ ID NO: 16214 - RNA, 22 nt, Artificial Sequence
  Guide RNA
guugaugggaggcugagggagg

SEQ ID NO: 16215 - RNA, 22 nt, Artificial Sequence
  Guide RNA
uagguucaaacgauucuccucc

SEQ ID NO: 16216 - RNA, 22 nt, Artificial Sequence
  Guide RNA
uccaguugaugggaggcugagg

SEQ ID NO: 16217 - RNA, 22 nt, Artificial Sequence
  Guide RNA
ucccucagccucccaucaacug

SEQ ID NO: 16218 - RNA, 22 nt, Artificial Sequence
  Guide RNA
uccuagguucaaacgauucucc

SEQ ID NO: 16219 - RNA, 22 nt, Artificial Sequence
  Guide RNA
uccucccucagccucccaucaa

SEQ ID NO: 16220 - RNA, 22 nt, Artificial Sequence
  Guide RNA
uccugccucagccucccaucaa

SEQ ID NO: 16221 - RNA, 22 nt, Artificial Sequence
  Guide RNA
ucuccucccucagccucccauc

SEQ ID NO: 16222 - RNA, 22 nt, Artificial Sequence
  Guide RNA
ucuccugccucagccucccauc

SEQ ID NO: 16223 - RNA, 22 nt, Artificial Sequence
  Guide RNA
ugagggaggagaaucguuugaa

SEQ ID NO: 16224 - RNA, 22 nt, Artificial Sequence
  Guide RNA
ugaugggaggcugaggcaggag

SEQ ID NO: 16225 - RNA, 22 nt, Artificial Sequence
  Guide RNA
ugaugggaggcugagggaggag

SEQ ID NO: 16226 - RNA, 22 nt, Artificial Sequence
  Guide RNA
ugccucagccucccaucaacug

SEQ ID NO: 16227 - RNA, 22 nt, Artificial Sequence
  Guide RNA
uguccaguugaugggaggcuga

SEQ ID NO: 16228 - RNA, 22 nt, Artificial Sequence
  Guide RNA
uucuccucccucagccucccau

SEQ ID NO: 16229 - RNA, 22 nt, Artificial Sequence
  Guide RNA
uucuccugccucagccucccau

SEQ ID NO: 16230 - RNA, 22 nt, Artificial Sequence
  Guide RNA
uugaugggaggcugaggcagga

SEQ ID NO: 16231 - RNA, 22 nt, Artificial Sequence
  Guide RNA
uugaugggaggcugagggagga

SEQ ID NO: 16232 - RNA, 22 nt, Artificial Sequence
  Guide RNA
uuguccaguugaugggaggcug

SEQ ID NO: 16233 - RNA, 20 nt, Artificial Sequence
  Guide RNA
aaaacucuuguuuccucagc

SEQ ID NO: 16234 - RNA, 20 nt, Artificial Sequence
  Guide RNA
aaaacucuuguuuccucggc

SEQ ID NO: 16235 - RNA, 20 nt, Artificial Sequence
  Guide RNA
aaacucuuguuuccucagcc

SEQ ID NO: 16236 - RNA, 20 nt, Artificial Sequence
  Guide RNA
aaacucuuguuuccucggcc

SEQ ID NO: 16237 - RNA, 20 nt, Artificial Sequence
  Guide RNA
aaaguucggcuggccgagga

SEQ ID NO: 16238 - RNA, 20 nt, Artificial Sequence
  Guide RNA
aaaguucggcuggcugagga

SEQ ID NO: 16239 - RNA, 20 nt, Artificial Sequence
  Guide RNA
aacucuuguuuccucagcca

SEQ ID NO: 16240 - RNA, 20 nt, Artificial Sequence
  Guide RNA
aacucuuguuuccucggcca

SEQ ID NO: 16241 - RNA, 20 nt, Artificial Sequence
  Guide RNA
aaguucggcuggccgaggaa

SEQ ID NO: 16242 - RNA, 20 nt, Artificial Sequence
  Guide RNA
aaguucggcuggcugaggaa

SEQ ID NO: 16243 - RNA, 20 nt, Artificial Sequence
  Guide RNA
acaaaacucuuguuuccuca

SEQ ID NO: 16244 - RNA, 20 nt, Artificial Sequence
  Guide RNA
acaaaacucuuguuuccucg

SEQ ID NO: 16245 - RNA, 20 nt, Artificial Sequence
  Guide RNA
acacaaaacucuuguuuccu

SEQ ID NO: 16246 - RNA, 20 nt, Artificial Sequence
  Guide RNA
acucuuguuuccucagccag

SEQ ID NO: 16247 - RNA, 20 nt, Artificial Sequence
  Guide RNA
acucuuguuuccucggccag

SEQ ID NO: 16248 - RNA, 20 nt, Artificial Sequence
  Guide RNA
aguucggcuggccgaggaaa

SEQ ID NO: 16249 - RNA, 20 nt, Artificial Sequence
  Guide RNA
aguucggcuggcugaggaaa

SEQ ID NO: 16250 - RNA, 20 nt, Artificial Sequence
  Guide RNA
augauuucgaaaguucggcu

SEQ ID NO: 16251 - RNA, 20 nt, Artificial Sequence
  Guide RNA
auuucgaaaguucggcuggc

SEQ ID NO: 16252 - RNA, 20 nt, Artificial Sequence
  Guide RNA
caaaacucuuguuuccucag

SEQ ID NO: 16253 - RNA, 20 nt, Artificial Sequence
  Guide RNA
caaaacucuuguuuccucgg

SEQ ID NO: 16254 - RNA, 20 nt, Artificial Sequence
  Guide RNA
cacaaaacucuuguuuccuc

SEQ ID NO: 16255 - RNA, 20 nt, Artificial Sequence
  Guide RNA
cagccagccgaacuuucgaa

SEQ ID NO: 16256 - RNA, 20 nt, Artificial Sequence
  Guide RNA
ccgaggaaacaagaguuuug

SEQ ID NO: 16257 - RNA, 20 nt, Artificial Sequence
  Guide RNA
ccucagccagccgaacuuuc

SEQ ID NO: 16258 - RNA, 20 nt, Artificial Sequence
  Guide RNA
ccucggccagccgaacuuuc

SEQ ID NO: 16259 - RNA, 20 nt, Artificial Sequence
  Guide RNA
cgaaaguucggcuggccgag

SEQ ID NO: 16260 - RNA, 20 nt, Artificial Sequence
  Guide RNA
cgaaaguucggcuggcugag

SEQ ID NO: 16261 - RNA, 20 nt, Artificial Sequence
  Guide RNA
cggccagccgaacuuucgaa

SEQ ID NO: 16262 - RNA, 20 nt, Artificial Sequence
  Guide RNA
cggcuggccgaggaaacaag

SEQ ID NO: 16263 - RNA, 20 nt, Artificial Sequence
  Guide RNA
cggcuggcugaggaaacaag

SEQ ID NO: 16264 - RNA, 20 nt, Artificial Sequence
  Guide RNA
cucagccagccgaacuuucg

SEQ ID NO: 16265 - RNA, 20 nt, Artificial Sequence
  Guide RNA
cucggccagccgaacuuucg

SEQ ID NO: 16266 - RNA, 20 nt, Artificial Sequence
  Guide RNA
cucuuguuuccucagccagc

SEQ ID NO: 16267 - RNA, 20 nt, Artificial Sequence
  Guide RNA
cucuuguuuccucggccagc

SEQ ID NO: 16268 - RNA, 20 nt, Artificial Sequence
  Guide RNA
cugaggaaacaagaguuuug

SEQ ID NO: 16269 - RNA, 20 nt, Artificial Sequence
  Guide RNA
cuggccgaggaaacaagagu

SEQ ID NO: 16270 - RNA, 20 nt, Artificial Sequence
  Guide RNA
cuggcugaggaaacaagagu

SEQ ID NO: 16271 - RNA, 20 nt, Artificial Sequence
  Guide RNA
cuuguuuccucagccagccg

SEQ ID NO: 16272 - RNA, 20 nt, Artificial Sequence
  Guide RNA
cuuguuuccucggccagccg

SEQ ID NO: 16273 - RNA, 20 nt, Artificial Sequence
  Guide RNA
gaaaguucggcuggccgagg

SEQ ID NO: 16274 - RNA, 20 nt, Artificial Sequence
  Guide RNA
gaaaguucggcuggcugagg

SEQ ID NO: 16275 - RNA, 20 nt, Artificial Sequence
  Guide RNA
gauuucgaaaguucggcugg

SEQ ID NO: 16276 - RNA, 20 nt, Artificial Sequence
  Guide RNA
gccgaggaaacaagaguuuu

SEQ ID NO: 16277 - RNA, 20 nt, Artificial Sequence
  Guide RNA
gcugaggaaacaagaguuuu

SEQ ID NO: 16278 - RNA, 20 nt, Artificial Sequence
  Guide RNA
gcuggccgaggaaacaagag

SEQ ID NO: 16279 - RNA, 20 nt, Artificial Sequence
  Guide RNA
gcuggcugaggaaacaagag

SEQ ID NO: 16280 - RNA, 20 nt, Artificial Sequence
  Guide RNA
ggccgaggaaacaagaguuu

SEQ ID NO: 16281 - RNA, 20 nt, Artificial Sequence
  Guide RNA
ggcugaggaaacaagaguuu

SEQ ID NO: 16282 - RNA, 20 nt, Artificial Sequence
  Guide RNA
ggcuggccgaggaaacaaga

SEQ ID NO: 16283 - RNA, 20 nt, Artificial Sequence
  Guide RNA
ggcuggcugaggaaacaaga

SEQ ID NO: 16284 - RNA, 20 nt, Artificial Sequence
  Guide RNA
guucggcuggccgaggaaac

SEQ ID NO: 16285 - RNA, 20 nt, Artificial Sequence
  Guide RNA
guucggcuggcugaggaaac

SEQ ID NO: 16286 - RNA, 20 nt, Artificial Sequence
  Guide RNA
guuuccucagccagccgaac

SEQ ID NO: 16287 - RNA, 20 nt, Artificial Sequence
  Guide RNA
guuuccucggccagccgaac

SEQ ID NO: 16288 - RNA, 20 nt, Artificial Sequence
  Guide RNA
uacacaaaacucuuguuucc

SEQ ID NO: 16289 - RNA, 20 nt, Artificial Sequence
  Guide RNA
ucagccagccgaacuuucga

SEQ ID NO: 16290 - RNA, 20 nt, Artificial Sequence
  Guide RNA
uccucagccagccgaacuuu

SEQ ID NO: 16291 - RNA, 20 nt, Artificial Sequence
  Guide RNA
uccucggccagccgaacuuu

SEQ ID NO: 16292 - RNA, 20 nt, Artificial Sequence
  Guide RNA
ucgaaaguucggcuggccga

SEQ ID NO: 16293 - RNA, 20 nt, Artificial Sequence
  Guide RNA
ucgaaaguucggcuggcuga

SEQ ID NO: 16294 - RNA, 20 nt, Artificial Sequence
  Guide RNA
ucggccagccgaacuuucga

SEQ ID NO: 16295 - RNA, 20 nt, Artificial Sequence
  Guide RNA
ucggcuggccgaggaaacaa

SEQ ID NO: 16296 - RNA, 20 nt, Artificial Sequence
  Guide RNA
ucggcuggcugaggaaacaa

SEQ ID NO: 16297 - RNA, 20 nt, Artificial Sequence
  Guide RNA
ucuuguuuccucagccagcc

SEQ ID NO: 16298 - RNA, 20 nt, Artificial Sequence
  Guide RNA
ucuuguuuccucggccagcc

SEQ ID NO: 16299 - RNA, 20 nt, Artificial Sequence
  Guide RNA
ugauuucgaaaguucggcug

SEQ ID NO: 16300 - RNA, 20 nt, Artificial Sequence
  Guide RNA
uggccgaggaaacaagaguu

SEQ ID NO: 16301 - RNA, 20 nt, Artificial Sequence
  Guide RNA
uggcugaggaaacaagaguu

SEQ ID NO: 16302 - RNA, 20 nt, Artificial Sequence
  Guide RNA
uguuuccucagccagccgaa

SEQ ID NO: 16303 - RNA, 20 nt, Artificial Sequence
  Guide RNA
uguuuccucggccagccgaa

SEQ ID NO: 16304 - RNA, 20 nt, Artificial Sequence
  Guide RNA
uuacacaaaacucuuguuuc

SEQ ID NO: 16305 - RNA, 20 nt, Artificial Sequence
  Guide RNA
uuccucagccagccgaacuu

SEQ ID NO: 16306 - RNA, 20 nt, Artificial Sequence
  Guide RNA
uuccucggccagccgaacuu

SEQ ID NO: 16307 - RNA, 20 nt, Artificial Sequence
  Guide RNA
uucgaaaguucggcuggccg

SEQ ID NO: 16308 - RNA, 20 nt, Artificial Sequence
  Guide RNA
uucgaaaguucggcuggcug

SEQ ID NO: 16309 - RNA, 20 nt, Artificial Sequence
  Guide RNA
uucggcuggccgaggaaaca

SEQ ID NO: 16310 - RNA, 20 nt, Artificial Sequence
  Guide RNA
uucggcuggcugaggaaaca

SEQ ID NO: 16311 - RNA, 20 nt, Artificial Sequence
  Guide RNA
uuguuuccucagccagccga

SEQ ID NO: 16312 - RNA, 20 nt, Artificial Sequence
  Guide RNA
uuguuuccucggccagccga

SEQ ID NO: 16313 - RNA, 20 nt, Artificial Sequence
  Guide RNA
uuuccucagccagccgaacu

SEQ ID NO: 16314 - RNA, 20 nt, Artificial Sequence
  Guide RNA
uuuccucggccagccgaacu

SEQ ID NO: 16315 - RNA, 20 nt, Artificial Sequence
  Guide RNA
uuucgaaaguucggcuggcc

SEQ ID NO: 16316 - RNA, 20 nt, Artificial Sequence
  Guide RNA
uuucgaaaguucggcuggcu

SEQ ID NO: 16317 - RNA, 21 nt, Artificial Sequence
  Guide RNA
aaaacucuuguuuccucagcc

SEQ ID NO: 16318 - RNA, 21 nt, Artificial Sequence
  Guide RNA
aaaacucuuguuuccucggcc

SEQ ID NO: 16319 - RNA, 21 nt, Artificial Sequence
  Guide RNA
aaacucuuguuuccucagcca

SEQ ID NO: 16320 - RNA, 21 nt, Artificial Sequence
  Guide RNA
aaacucuuguuuccucggcca

SEQ ID NO: 16321 - RNA, 21 nt, Artificial Sequence
  Guide RNA
aaaguucggcuggccgaggaa

SEQ ID NO: 16322 - RNA, 21 nt, Artificial Sequence
  Guide RNA
aaaguucggcuggcugaggaa

SEQ ID NO: 16323 - RNA, 21 nt, Artificial Sequence
  Guide RNA
aacucuuguuuccucagccag

SEQ ID NO: 16324 - RNA, 21 nt, Artificial Sequence
  Guide RNA
aacucuuguuuccucggccag

SEQ ID NO: 16325 - RNA, 21 nt, Artificial Sequence
  Guide RNA
aaguucggcuggccgaggaaa

SEQ ID NO: 16326 - RNA, 21 nt, Artificial Sequence
  Guide RNA
aaguucggcuggcugaggaaa

SEQ ID NO: 16327 - RNA, 21 nt, Artificial Sequence
  Guide RNA
aaugauuucgaaaguucggcu

SEQ ID NO: 16328 - RNA, 21 nt, Artificial Sequence
  Guide RNA
acaaaacucuuguuuccucag

SEQ ID NO: 16329 - RNA, 21 nt, Artificial Sequence
  Guide RNA
acaaaacucuuguuuccucgg

SEQ ID NO: 16330 - RNA, 21 nt, Artificial Sequence
  Guide RNA
acacaaaacucuuguuuccuc

SEQ ID NO: 16331 - RNA, 21 nt, Artificial Sequence
  Guide RNA
acucuuguuuccucagccagc

SEQ ID NO: 16332 - RNA, 21 nt, Artificial Sequence
  Guide RNA
acucuuguuuccucggccagc

SEQ ID NO: 16333 - RNA, 21 nt, Artificial Sequence
  Guide RNA
aguucggcuggccgaggaaac

SEQ ID NO: 16334 - RNA, 21 nt, Artificial Sequence
  Guide RNA
aguucggcuggcugaggaaac

SEQ ID NO: 16335 - RNA, 21 nt, Artificial Sequence
  Guide RNA
augauuucgaaaguucggcug

SEQ ID NO: 16336 - RNA, 21 nt, Artificial Sequence
  Guide RNA
auuucgaaaguucggcuggcc

SEQ ID NO: 16337 - RNA, 21 nt, Artificial Sequence
  Guide RNA
auuucgaaaguucggcuggcu

SEQ ID NO: 16338 - RNA, 21 nt, Artificial Sequence
  Guide RNA
caaaacucuuguuuccucagc

SEQ ID NO: 16339 - RNA, 21 nt, Artificial Sequence
  Guide RNA
caaaacucuuguuuccucggc

SEQ ID NO: 16340 - RNA, 21 nt, Artificial Sequence
  Guide RNA
cacaaaacucuuguuuccuca

SEQ ID NO: 16341 - RNA, 21 nt, Artificial Sequence
  Guide RNA
cacaaaacucuuguuuccucg

SEQ ID NO: 16342 - RNA, 21 nt, Artificial Sequence
  Guide RNA
cagccagccgaacuuucgaaa

SEQ ID NO: 16343 - RNA, 21 nt, Artificial Sequence
  Guide RNA
ccgaggaaacaagaguuuugu

SEQ ID NO: 16344 - RNA, 21 nt, Artificial Sequence
  Guide RNA
ccucagccagccgaacuuucg

SEQ ID NO: 16345 - RNA, 21 nt, Artificial Sequence
  Guide RNA
ccucggccagccgaacuuucg

SEQ ID NO: 16346 - RNA, 21 nt, Artificial Sequence
  Guide RNA
cgaaaguucggcuggccgagg

SEQ ID NO: 16347 - RNA, 21 nt, Artificial Sequence
  Guide RNA
cgaaaguucggcuggcugagg

SEQ ID NO: 16348 - RNA, 21 nt, Artificial Sequence
  Guide RNA
cggccagccgaacuuucgaaa

SEQ ID NO: 16349 - RNA, 21 nt, Artificial Sequence
  Guide RNA
cggcuggccgaggaaacaaga

SEQ ID NO: 16350 - RNA, 21 nt, Artificial Sequence
  Guide RNA
cggcuggcugaggaaacaaga

SEQ ID NO: 16351 - RNA, 21 nt, Artificial Sequence
  Guide RNA
cucagccagccgaacuuucga

SEQ ID NO: 16352 - RNA, 21 nt, Artificial Sequence
  Guide RNA
cucggccagccgaacuuucga

SEQ ID NO: 16353 - RNA, 21 nt, Artificial Sequence
  Guide RNA
cucuuguuuccucagccagcc

SEQ ID NO: 16354 - RNA, 21 nt, Artificial Sequence
  Guide RNA
cucuuguuuccucggccagcc

SEQ ID NO: 16355 - RNA, 21 nt, Artificial Sequence
  Guide RNA
cugaggaaacaagaguuuugu

SEQ ID NO: 16356 - RNA, 21 nt, Artificial Sequence
  Guide RNA
cuggccgaggaaacaagaguu

SEQ ID NO: 16357 - RNA, 21 nt, Artificial Sequence
  Guide RNA
cuggcugaggaaacaagaguu

SEQ ID NO: 16358 - RNA, 21 nt, Artificial Sequence
  Guide RNA
cuuguuuccucagccagccga

SEQ ID NO: 16359 - RNA, 21 nt, Artificial Sequence
  Guide RNA
cuuguuuccucggccagccga

SEQ ID NO: 16360 - RNA, 21 nt, Artificial Sequence
  Guide RNA
gaaaguucggcuggccgagga

SEQ ID NO: 16361 - RNA, 21 nt, Artificial Sequence
  Guide RNA
gaaaguucggcuggcugagga

SEQ ID NO: 16362 - RNA, 21 nt, Artificial Sequence
  Guide RNA
gauuucgaaaguucggcuggc

SEQ ID NO: 16363 - RNA, 21 nt, Artificial Sequence
  Guide RNA
gccgaggaaacaagaguuuug

SEQ ID NO: 16364 - RNA, 21 nt, Artificial Sequence
  Guide RNA
gcugaggaaacaagaguuuug

SEQ ID NO: 16365 - RNA, 21 nt, Artificial Sequence
  Guide RNA
gcuggccgaggaaacaagagu

SEQ ID NO: 16366 - RNA, 21 nt, Artificial Sequence
  Guide RNA
gcuggcugaggaaacaagagu

SEQ ID NO: 16367 - RNA, 21 nt, Artificial Sequence
  Guide RNA
ggccgaggaaacaagaguuuu

SEQ ID NO: 16368 - RNA, 21 nt, Artificial Sequence
  Guide RNA
ggcugaggaaacaagaguuuu

SEQ ID NO: 16369 - RNA, 21 nt, Artificial Sequence
  Guide RNA
ggcuggccgaggaaacaagag

SEQ ID NO: 16370 - RNA, 21 nt, Artificial Sequence
  Guide RNA
ggcuggcugaggaaacaagag

SEQ ID NO: 16371 - RNA, 21 nt, Artificial Sequence
  Guide RNA
guucggcuggccgaggaaaca

SEQ ID NO: 16372 - RNA, 21 nt, Artificial Sequence
  Guide RNA
guucggcuggcugaggaaaca

SEQ ID NO: 16373 - RNA, 21 nt, Artificial Sequence
  Guide RNA
guuuccucagccagccgaacu

SEQ ID NO: 16374 - RNA, 21 nt, Artificial Sequence
  Guide RNA
guuuccucggccagccgaacu

SEQ ID NO: 16375 - RNA, 21 nt, Artificial Sequence
  Guide RNA
uacacaaaacucuuguuuccu

SEQ ID NO: 16376 - RNA, 21 nt, Artificial Sequence
  Guide RNA
ucagccagccgaacuuucgaa

SEQ ID NO: 16377 - RNA, 21 nt, Artificial Sequence
  Guide RNA
uccucagccagccgaacuuuc

SEQ ID NO: 16378 - RNA, 21 nt, Artificial Sequence
  Guide RNA
uccucggccagccgaacuuuc

SEQ ID NO: 16379 - RNA, 21 nt, Artificial Sequence
  Guide RNA
ucgaaaguucggcuggccgag

SEQ ID NO: 16380 - RNA, 21 nt, Artificial Sequence
  Guide RNA
ucgaaaguucggcuggcugag

SEQ ID NO: 16381 - RNA, 21 nt, Artificial Sequence
  Guide RNA
ucggccagccgaacuuucgaa

SEQ ID NO: 16382 - RNA, 21 nt, Artificial Sequence
  Guide RNA
ucggcuggccgaggaaacaag

SEQ ID NO: 16383 - RNA, 21 nt, Artificial Sequence
  Guide RNA
ucggcuggcugaggaaacaag

SEQ ID NO: 16384 - RNA, 21 nt, Artificial Sequence
  Guide RNA
ucuuguuuccucagccagccg

SEQ ID NO: 16385 - RNA, 21 nt, Artificial Sequence
  Guide RNA
ucuuguuuccucggccagccg

SEQ ID NO: 16386 - RNA, 21 nt, Artificial Sequence
  Guide RNA
ugauuucgaaaguucggcugg

SEQ ID NO: 16387 - RNA, 21 nt, Artificial Sequence
  Guide RNA
uggccgaggaaacaagaguuu

SEQ ID NO: 16388 - RNA, 21 nt, Artificial Sequence
  Guide RNA
uggcugaggaaacaagaguuu

SEQ ID NO: 16389 - RNA, 21 nt, Artificial Sequence
  Guide RNA
uguuuccucagccagccgaac

SEQ ID NO: 16390 - RNA, 21 nt, Artificial Sequence
  Guide RNA
uguuuccucggccagccgaac

SEQ ID NO: 16391 - RNA, 21 nt, Artificial Sequence
  Guide RNA
uuacacaaaacucuuguuucc

SEQ ID NO: 16392 - RNA, 21 nt, Artificial Sequence
  Guide RNA
uuccucagccagccgaacuuu

SEQ ID NO: 16393 - RNA, 21 nt, Artificial Sequence
  Guide RNA
uuccucggccagccgaacuuu

SEQ ID NO: 16394 - RNA, 21 nt, Artificial Sequence
  Guide RNA
uucgaaaguucggcuggccga

SEQ ID NO: 16395 - RNA, 21 nt, Artificial Sequence
  Guide RNA
uucgaaaguucggcuggcuga

SEQ ID NO: 16396 - RNA, 21 nt, Artificial Sequence
  Guide RNA
uucggcuggccgaggaaacaa

SEQ ID NO: 16397 - RNA, 21 nt, Artificial Sequence
  Guide RNA
uucggcuggcugaggaaacaa

SEQ ID NO: 16398 - RNA, 21 nt, Artificial Sequence
  Guide RNA
uuguuuccucagccagccgaa

SEQ ID NO: 16399 - RNA, 21 nt, Artificial Sequence
  Guide RNA
uuguuuccucggccagccgaa

SEQ ID NO: 16400 - RNA, 21 nt, Artificial Sequence
  Guide RNA
uuuccucagccagccgaacuu

SEQ ID NO: 16401 - RNA, 21 nt, Artificial Sequence
  Guide RNA
uuuccucggccagccgaacuu

SEQ ID NO: 16402 - RNA, 21 nt, Artificial Sequence
  Guide RNA
uuucgaaaguucggcuggccg

SEQ ID NO: 16403 - RNA, 21 nt, Artificial Sequence
  Guide RNA
uuucgaaaguucggcuggcug

SEQ ID NO: 16404 - RNA, 22 nt, Artificial Sequence
  Guide RNA
aaaacucuuguuuccucagcca

SEQ ID NO: 16405 - RNA, 22 nt, Artificial Sequence
  Guide RNA
aaaacucuuguuuccucggcca

SEQ ID NO: 16406 - RNA, 22 nt, Artificial Sequence
  Guide RNA
aaacucuuguuuccucagccag

SEQ ID NO: 16407 - RNA, 22 nt, Artificial Sequence
  Guide RNA
aaacucuuguuuccucggccag

SEQ ID NO: 16408 - RNA, 22 nt, Artificial Sequence
  Guide RNA
aaaguucggcuggccgaggaaa

SEQ ID NO: 16409 - RNA, 22 nt, Artificial Sequence
  Guide RNA
aaaguucggcuggcugaggaaa

SEQ ID NO: 16410 - RNA, 22 nt, Artificial Sequence
  Guide RNA
aacucuuguuuccucagccagc

SEQ ID NO: 16411 - RNA, 22 nt, Artificial Sequence
  Guide RNA
aacucuuguuuccucggccagc

SEQ ID NO: 16412 - RNA, 22 nt, Artificial Sequence
  Guide RNA
aaguucggcuggccgaggaaac

SEQ ID NO: 16413 - RNA, 22 nt, Artificial Sequence
  Guide RNA
aaguucggcuggcugaggaaac

SEQ ID NO: 16414 - RNA, 22 nt, Artificial Sequence
  Guide RNA
aaugauuucgaaaguucggcug

SEQ ID NO: 16415 - RNA, 22 nt, Artificial Sequence
  Guide RNA
acaaaacucuuguuuccucagc

SEQ ID NO: 16416 - RNA, 22 nt, Artificial Sequence
  Guide RNA
acaaaacucuuguuuccucggc

SEQ ID NO: 16417 - RNA, 22 nt, Artificial Sequence
  Guide RNA
acacaaaacucuuguuuccuca

SEQ ID NO: 16418 - RNA, 22 nt, Artificial Sequence
  Guide RNA
acacaaaacucuuguuuccucg

SEQ ID NO: 16419 - RNA, 22 nt, Artificial Sequence
  Guide RNA
acucuuguuuccucagccagcc

SEQ ID NO: 16420 - RNA, 22 nt, Artificial Sequence
  Guide RNA
acucuuguuuccucggccagcc

SEQ ID NO: 16421 - RNA, 22 nt, Artificial Sequence
  Guide RNA
aguucggcuggccgaggaaaca

SEQ ID NO: 16422 - RNA, 22 nt, Artificial Sequence
  Guide RNA
aguucggcuggcugaggaaaca

SEQ ID NO: 16423 - RNA, 22 nt, Artificial Sequence
  Guide RNA
augauuucgaaaguucggcugg

SEQ ID NO: 16424 - RNA, 22 nt, Artificial Sequence
  Guide RNA
auuacacaaaacucuuguuucc

SEQ ID NO: 16425 - RNA, 22 nt, Artificial Sequence
  Guide RNA
auuucgaaaguucggcuggccg

SEQ ID NO: 16426 - RNA, 22 nt, Artificial Sequence
  Guide RNA
auuucgaaaguucggcuggcug

SEQ ID NO: 16427 - RNA, 22 nt, Artificial Sequence
  Guide RNA
caaaacucuuguuuccucagcc

SEQ ID NO: 16428 - RNA, 22 nt, Artificial Sequence
  Guide RNA
caaaacucuuguuuccucggcc

SEQ ID NO: 16429 - RNA, 22 nt, Artificial Sequence
  Guide RNA
caaugauuucgaaaguucggcu

SEQ ID NO: 16430 - RNA, 22 nt, Artificial Sequence
  Guide RNA
cacaaaacucuuguuuccucag

SEQ ID NO: 16431 - RNA, 22 nt, Artificial Sequence
  Guide RNA
cacaaaacucuuguuuccucgg

SEQ ID NO: 16432 - RNA, 22 nt, Artificial Sequence
  Guide RNA
cagccagccgaacuuucgaaau

SEQ ID NO: 16433 - RNA, 22 nt, Artificial Sequence
  Guide RNA
cauuacacaaaacucuuguuuc

SEQ ID NO: 16434 - RNA, 22 nt, Artificial Sequence
  Guide RNA
ccgaggaaacaagaguuuugug

SEQ ID NO: 16435 - RNA, 22 nt, Artificial Sequence
  Guide RNA
ccucagccagccgaacuuucga

SEQ ID NO: 16436 - RNA, 22 nt, Artificial Sequence
  Guide RNA
ccucggccagccgaacuuucga

SEQ ID NO: 16437 - RNA, 22 nt, Artificial Sequence
  Guide RNA
cgaaaguucggcuggccgagga

SEQ ID NO: 16438 - RNA, 22 nt, Artificial Sequence
  Guide RNA
cgaaaguucggcuggcugagga

SEQ ID NO: 16439 - RNA, 22 nt, Artificial Sequence
  Guide RNA
cggccagccgaacuuucgaaau

SEQ ID NO: 16440 - RNA, 22 nt, Artificial Sequence
  Guide RNA
cggcuggccgaggaaacaagag

SEQ ID NO: 16441 - RNA, 22 nt, Artificial Sequence
  Guide RNA
cggcuggcugaggaaacaagag

SEQ ID NO: 16442 - RNA, 22 nt, Artificial Sequence
  Guide RNA
cucagccagccgaacuuucgaa

SEQ ID NO: 16443 - RNA, 22 nt, Artificial Sequence
  Guide RNA
cucggccagccgaacuuucgaa

SEQ ID NO: 16444 - RNA, 22 nt, Artificial Sequence
  Guide RNA
cucuuguuuccucagccagccg

SEQ ID NO: 16445 - RNA, 22 nt, Artificial Sequence
  Guide RNA
cucuuguuuccucggccagccg

SEQ ID NO: 16446 - RNA, 22 nt, Artificial Sequence
  Guide RNA
cugaggaaacaagaguuuugug

SEQ ID NO: 16447 - RNA, 22 nt, Artificial Sequence
  Guide RNA
cuggccgaggaaacaagaguuu

SEQ ID NO: 16448 - RNA, 22 nt, Artificial Sequence
  Guide RNA
cuggcugaggaaacaagaguuu

SEQ ID NO: 16449 - RNA, 22 nt, Artificial Sequence
  Guide RNA
cuuguuuccucagccagccgaa

SEQ ID NO: 16450 - RNA, 22 nt, Artificial Sequence
  Guide RNA
cuuguuuccucggccagccgaa

SEQ ID NO: 16451 - RNA, 22 nt, Artificial Sequence
  Guide RNA
gaaaguucggcuggccgaggaa

SEQ ID NO: 16452 - RNA, 22 nt, Artificial Sequence
  Guide RNA
gaaaguucggcuggcugaggaa

SEQ ID NO: 16453 - RNA, 22 nt, Artificial Sequence
  Guide RNA
gauuucgaaaguucggcuggcc

SEQ ID NO: 16454 - RNA, 22 nt, Artificial Sequence
  Guide RNA
gauuucgaaaguucggcuggcu

SEQ ID NO: 16455 - RNA, 22 nt, Artificial Sequence
  Guide RNA
gccgaggaaacaagaguuuugu

SEQ ID NO: 16456 - RNA, 22 nt, Artificial Sequence
  Guide RNA
gcugaggaaacaagaguuuugu

SEQ ID NO: 16457 - RNA, 22 nt, Artificial Sequence
  Guide RNA
gcuggccgaggaaacaagaguu

SEQ ID NO: 16458 - RNA, 22 nt, Artificial Sequence
  Guide RNA
gcuggcugaggaaacaagaguu

SEQ ID NO: 16459 - RNA, 22 nt, Artificial Sequence
  Guide RNA
ggccgaggaaacaagaguuuug

SEQ ID NO: 16460 - RNA, 22 nt, Artificial Sequence
  Guide RNA
ggcugaggaaacaagaguuuug

SEQ ID NO: 16461 - RNA, 22 nt, Artificial Sequence
  Guide RNA
ggcuggccgaggaaacaagagu

SEQ ID NO: 16462 - RNA, 22 nt, Artificial Sequence
  Guide RNA
ggcuggcugaggaaacaagagu

SEQ ID NO: 16463 - RNA, 22 nt, Artificial Sequence
  Guide RNA
guucggcuggccgaggaaacaa

SEQ ID NO: 16464 - RNA, 22 nt, Artificial Sequence
  Guide RNA
guucggcuggcugaggaaacaa

SEQ ID NO: 16465 - RNA, 22 nt, Artificial Sequence
  Guide RNA
guuuccucagccagccgaacuu

SEQ ID NO: 16466 - RNA, 22 nt, Artificial Sequence
  Guide RNA
guuuccucggccagccgaacuu

SEQ ID NO: 16467 - RNA, 22 nt, Artificial Sequence
  Guide RNA
uacacaaaacucuuguuuccuc

SEQ ID NO: 16468 - RNA, 22 nt, Artificial Sequence
  Guide RNA
ucagccagccgaacuuucgaaa

SEQ ID NO: 16469 - RNA, 22 nt, Artificial Sequence
  Guide RNA
uccucagccagccgaacuuucg

SEQ ID NO: 16470 - RNA, 22 nt, Artificial Sequence
  Guide RNA
uccucggccagccgaacuuucg

SEQ ID NO: 16471 - RNA, 22 nt, Artificial Sequence
  Guide RNA
ucgaaaguucggcuggccgagg

SEQ ID NO: 16472 - RNA, 22 nt, Artificial Sequence
  Guide RNA
ucgaaaguucggcuggcugagg

SEQ ID NO: 16473 - RNA, 22 nt, Artificial Sequence
  Guide RNA
ucggccagccgaacuuucgaaa

SEQ ID NO: 16474 - RNA, 22 nt, Artificial Sequence
  Guide RNA
ucggcuggccgaggaaacaaga

SEQ ID NO: 16475 - RNA, 22 nt, Artificial Sequence
  Guide RNA
ucggcuggcugaggaaacaaga

SEQ ID NO: 16476 - RNA, 22 nt, Artificial Sequence
  Guide RNA
ucuuguuuccucagccagccga

SEQ ID NO: 16477 - RNA, 22 nt, Artificial Sequence
  Guide RNA
ucuuguuuccucggccagccga

SEQ ID NO: 16478 - RNA, 22 nt, Artificial Sequence
  Guide RNA
ugauuucgaaaguucggcuggc

SEQ ID NO: 16479 - RNA, 22 nt, Artificial Sequence
  Guide RNA
uggccgaggaaacaagaguuuu

SEQ ID NO: 16480 - RNA, 22 nt, Artificial Sequence
  Guide RNA
uggcugaggaaacaagaguuuu

SEQ ID NO: 16481 - RNA, 22 nt, Artificial Sequence
  Guide RNA
uguuuccucagccagccgaacu

SEQ ID NO: 16482 - RNA, 22 nt, Artificial Sequence
  Guide RNA
uguuuccucggccagccgaacu

SEQ ID NO: 16483 - RNA, 22 nt, Artificial Sequence
  Guide RNA
uuacacaaaacucuuguuuccu

SEQ ID NO: 16484 - RNA, 22 nt, Artificial Sequence
  Guide RNA
uuccucagccagccgaacuuuc

SEQ ID NO: 16485 - RNA, 22 nt, Artificial Sequence
  Guide RNA
uuccucggccagccgaacuuuc

SEQ ID NO: 16486 - RNA, 22 nt, Artificial Sequence
  Guide RNA
uucgaaaguucggcuggccgag

SEQ ID NO: 16487 - RNA, 22 nt, Artificial Sequence
  Guide RNA
uucgaaaguucggcuggcugag

SEQ ID NO: 16488 - RNA, 22 nt, Artificial Sequence
  Guide RNA
uucggcuggccgaggaaacaag

SEQ ID NO: 16489 - RNA, 22 nt, Artificial Sequence
  Guide RNA
uucggcuggcugaggaaacaag

SEQ ID NO: 16490 - RNA, 22 nt, Artificial Sequence
  Guide RNA
uuguuuccucagccagccgaac

SEQ ID NO: 16491 - RNA, 22 nt, Artificial Sequence
  Guide RNA
uuguuuccucggccagccgaac

SEQ ID NO: 16492 - RNA, 22 nt, Artificial Sequence
  Guide RNA
uuuccucagccagccgaacuuu

SEQ ID NO: 16493 - RNA, 22 nt, Artificial Sequence
  Guide RNA
uuuccucggccagccgaacuuu

SEQ ID NO: 16494 - RNA, 22 nt, Artificial Sequence
  Guide RNA
uuucgaaaguucggcuggccga

SEQ ID NO: 16495 - RNA, 22 nt, Artificial Sequence
  Guide RNA
uuucgaaaguucggcuggcuga

SEQ ID NO: 16496 - RNA, 20 nt, Artificial Sequence
  Guide RNA
aaaauaaacgucuguuugca

SEQ ID NO: 16497 - RNA, 20 nt, Artificial Sequence
  Guide RNA
aaacagacguuuauuuuccc

SEQ ID NO: 16498 - RNA, 20 nt, Artificial Sequence
  Guide RNA
aaacgucuauuugcauagua

SEQ ID NO: 16499 - RNA, 20 nt, Artificial Sequence
  Guide RNA
aaacgucuguuugcauagua

SEQ ID NO: 16500 - RNA, 20 nt, Artificial Sequence
  Guide RNA
aaauaaacgucuguuugcau

SEQ ID NO: 16501 - RNA, 20 nt, Artificial Sequence
  Guide RNA
aaauagacguuuauuuuccc

SEQ ID NO: 16502 - RNA, 20 nt, Artificial Sequence
  Guide RNA
aacagacguuuauuuucccc

SEQ ID NO: 16503 - RNA, 20 nt, Artificial Sequence
  Guide RNA
aacaggggaaaauaaacguc

SEQ ID NO: 16504 - RNA, 20 nt, Artificial Sequence
  Guide RNA
aacgucuauuugcauaguag

SEQ ID NO: 16505 - RNA, 20 nt, Artificial Sequence
  Guide RNA
aacgucuguuugcauaguag

SEQ ID NO: 16506 - RNA, 20 nt, Artificial Sequence
  Guide RNA
aauaaacgucuguuugcaua

SEQ ID NO: 16507 - RNA, 20 nt, Artificial Sequence
  Guide RNA
aauagacguuuauuuucccc

SEQ ID NO: 16508 - RNA, 20 nt, Artificial Sequence
  Guide RNA
acagacguuuauuuuccccu

SEQ ID NO: 16509 - RNA, 20 nt, Artificial Sequence
  Guide RNA
acagaguccuacuaugcaaa

SEQ ID NO: 16510 - RNA, 20 nt, Artificial Sequence
  Guide RNA
acaggggaaaauaaacgucu

SEQ ID NO: 16511 - RNA, 20 nt, Artificial Sequence
  Guide RNA
acgucuauuugcauaguagg

SEQ ID NO: 16512 - RNA, 20 nt, Artificial Sequence
  Guide RNA
acgucuguuugcauaguagg

SEQ ID NO: 16513 - RNA, 20 nt, Artificial Sequence
  Guide RNA
acuaugcaaacagacguuua

SEQ ID NO: 16514 - RNA, 20 nt, Artificial Sequence
  Guide RNA
acuaugcaaauagacguuua

SEQ ID NO: 16515 - RNA, 20 nt, Artificial Sequence
  Guide RNA
agaguccuacuaugcaaaca

SEQ ID NO: 16516 - RNA, 20 nt, Artificial Sequence
  Guide RNA
agaguccuacuaugcaaaua

SEQ ID NO: 16517 - RNA, 20 nt, Artificial Sequence
  Guide RNA
aggggaaaauaaacgucuau

SEQ ID NO: 16518 - RNA, 20 nt, Artificial Sequence
  Guide RNA
aggggaaaauaaacgucugu

SEQ ID NO: 16519 - RNA, 20 nt, Artificial Sequence
  Guide RNA
aguccuacuaugcaaacaga

SEQ ID NO: 16520 - RNA, 20 nt, Artificial Sequence
  Guide RNA
aguccuacuaugcaaauaga

SEQ ID NO: 16521 - RNA, 20 nt, Artificial Sequence
  Guide RNA
auaaacgucuauuugcauag

SEQ ID NO: 16522 - RNA, 20 nt, Artificial Sequence
  Guide RNA
auaaacgucuguuugcauag

SEQ ID NO: 16523 - RNA, 20 nt, Artificial Sequence
  Guide RNA
auagacguuuauuuuccccu

SEQ ID NO: 16524 - RNA, 20 nt, Artificial Sequence
  Guide RNA
augcaaacagacguuuauuu

SEQ ID NO: 16525 - RNA, 20 nt, Artificial Sequence
  Guide RNA
caaacagacguuuauuuucc

SEQ ID NO: 16526 - RNA, 20 nt, Artificial Sequence
  Guide RNA
caaauagacguuuauuuucc

SEQ ID NO: 16527 - RNA, 20 nt, Artificial Sequence
  Guide RNA
cagaguccuacuaugcaaac

SEQ ID NO: 16528 - RNA, 20 nt, Artificial Sequence
  Guide RNA
cagaguccuacuaugcaaau

SEQ ID NO: 16529 - RNA, 20 nt, Artificial Sequence
  Guide RNA
caggggaaaauaaacgucua

SEQ ID NO: 16530 - RNA, 20 nt, Artificial Sequence
  Guide RNA
caggggaaaauaaacgucug

SEQ ID NO: 16531 - RNA, 20 nt, Artificial Sequence
  Guide RNA
ccuacuaugcaaacagacgu

SEQ ID NO: 16532 - RNA, 20 nt, Artificial Sequence
  Guide RNA
ccuacuaugcaaauagacgu

SEQ ID NO: 16533 - RNA, 20 nt, Artificial Sequence
  Guide RNA
cgucuauuugcauaguagga

SEQ ID NO: 16534 - RNA, 20 nt, Artificial Sequence
  Guide RNA
cgucuguuugcauaguagga

SEQ ID NO: 16535 - RNA, 20 nt, Artificial Sequence
  Guide RNA
cuaacaggggaaaauaaacg

SEQ ID NO: 16536 - RNA, 20 nt, Artificial Sequence
  Guide RNA
cuacuaugcaaacagacguu

SEQ ID NO: 16537 - RNA, 20 nt, Artificial Sequence
  Guide RNA
cuacuaugcaaauagacguu

SEQ ID NO: 16538 - RNA, 20 nt, Artificial Sequence
  Guide RNA
cuaugcaaacagacguuuau

SEQ ID NO: 16539 - RNA, 20 nt, Artificial Sequence
  Guide RNA
cuaugcaaauagacguuuau

SEQ ID NO: 16540 - RNA, 20 nt, Artificial Sequence
  Guide RNA
cuauuugcauaguaggacuc

SEQ ID NO: 16541 - RNA, 20 nt, Artificial Sequence
  Guide RNA
cuguuugcauaguaggacuc

SEQ ID NO: 16542 - RNA, 20 nt, Artificial Sequence
  Guide RNA
gaaaauaaacgucuauuugc

SEQ ID NO: 16543 - RNA, 20 nt, Artificial Sequence
  Guide RNA
gaaaauaaacgucuguuugc

SEQ ID NO: 16544 - RNA, 20 nt, Artificial Sequence
  Guide RNA
gaguccuacuaugcaaacag

SEQ ID NO: 16545 - RNA, 20 nt, Artificial Sequence
  Guide RNA
gaguccuacuaugcaaauag

SEQ ID NO: 16546 - RNA, 20 nt, Artificial Sequence
  Guide RNA
gcaaacagacguuuauuuuc

SEQ ID NO: 16547 - RNA, 20 nt, Artificial Sequence
  Guide RNA
gcaaauagacguuuauuuuc

SEQ ID NO: 16548 - RNA, 20 nt, Artificial Sequence
  Guide RNA
ggaaaauaaacgucuauuug

SEQ ID NO: 16549 - RNA, 20 nt, Artificial Sequence
  Guide RNA
ggaaaauaaacgucuguuug

SEQ ID NO: 16550 - RNA, 20 nt, Artificial Sequence
  Guide RNA
gggaaaauaaacgucuauuu

SEQ ID NO: 16551 - RNA, 20 nt, Artificial Sequence
  Guide RNA
gggaaaauaaacgucuguuu

SEQ ID NO: 16552 - RNA, 20 nt, Artificial Sequence
  Guide RNA
ggggaaaauaaacgucuauu

SEQ ID NO: 16553 - RNA, 20 nt, Artificial Sequence
  Guide RNA
ggggaaaauaaacgucuguu

SEQ ID NO: 16554 - RNA, 20 nt, Artificial Sequence
  Guide RNA
gguacagaguccuacuaugc

SEQ ID NO: 16555 - RNA, 20 nt, Artificial Sequence
  Guide RNA
guacagaguccuacuaugca

SEQ ID NO: 16556 - RNA, 20 nt, Artificial Sequence
  Guide RNA
guccuacuaugcaaacagac

SEQ ID NO: 16557 - RNA, 20 nt, Artificial Sequence
  Guide RNA
guccuacuaugcaaauagac

SEQ ID NO: 16558 - RNA, 20 nt, Artificial Sequence
  Guide RNA
gucuauuugcauaguaggac

SEQ ID NO: 16559 - RNA, 20 nt, Artificial Sequence
  Guide RNA
gucuguuugcauaguaggac

SEQ ID NO: 16560 - RNA, 20 nt, Artificial Sequence
  Guide RNA
uaaacgucuauuugcauagu

SEQ ID NO: 16561 - RNA, 20 nt, Artificial Sequence
  Guide RNA
uaaacgucuguuugcauagu

SEQ ID NO: 16562 - RNA, 20 nt, Artificial Sequence
  Guide RNA
uaacaggggaaaauaaacgu

SEQ ID NO: 16563 - RNA, 20 nt, Artificial Sequence
  Guide RNA
uacagaguccuacuaugcaa

SEQ ID NO: 16564 - RNA, 20 nt, Artificial Sequence
  Guide RNA
uacuaugcaaacagacguuu

SEQ ID NO: 16565 - RNA, 20 nt, Artificial Sequence
  Guide RNA
uacuaugcaaauagacguuu

SEQ ID NO: 16566 - RNA, 20 nt, Artificial Sequence
  Guide RNA
uaugcaaacagacguuuauu

SEQ ID NO: 16567 - RNA, 20 nt, Artificial Sequence
  Guide RNA
uauuugcauaguaggacucu

SEQ ID NO: 16568 - RNA, 20 nt, Artificial Sequence
  Guide RNA
uccuacuaugcaaacagacg

SEQ ID NO: 16569 - RNA, 20 nt, Artificial Sequence
  Guide RNA
uccuacuaugcaaauagacg

SEQ ID NO: 16570 - RNA, 20 nt, Artificial Sequence
  Guide RNA
ucuauuugcauaguaggacu

SEQ ID NO: 16571 - RNA, 20 nt, Artificial Sequence
  Guide RNA
ucuguuugcauaguaggacu

SEQ ID NO: 16572 - RNA, 20 nt, Artificial Sequence
  Guide RNA
ugcaaacagacguuuauuuu

SEQ ID NO: 16573 - RNA, 20 nt, Artificial Sequence
  Guide RNA
uguuugcauaguaggacucu

SEQ ID NO: 16574 - RNA, 21 nt, Artificial Sequence
  Guide RNA
aaacagacguuuauuuucccc

SEQ ID NO: 16575 - RNA, 21 nt, Artificial Sequence
  Guide RNA
aaacgucuauuugcauaguag

SEQ ID NO: 16576 - RNA, 21 nt, Artificial Sequence
  Guide RNA
aaacgucuguuugcauaguag

SEQ ID NO: 16577 - RNA, 21 nt, Artificial Sequence
  Guide RNA
aaauagacguuuauuuucccc

SEQ ID NO: 16578 - RNA, 21 nt, Artificial Sequence
  Guide RNA
aacagacguuuauuuuccccu

SEQ ID NO: 16579 - RNA, 21 nt, Artificial Sequence
  Guide RNA
aacaggggaaaauaaacgucu

SEQ ID NO: 16580 - RNA, 21 nt, Artificial Sequence
  Guide RNA
aacgucuauuugcauaguagg

SEQ ID NO: 16581 - RNA, 21 nt, Artificial Sequence
  Guide RNA
aacgucuguuugcauaguagg

SEQ ID NO: 16582 - RNA, 21 nt, Artificial Sequence
  Guide RNA
aauaaacgucuguuugcauag

SEQ ID NO: 16583 - RNA, 21 nt, Artificial Sequence
  Guide RNA
aauagacguuuauuuuccccu

SEQ ID NO: 16584 - RNA, 21 nt, Artificial Sequence
  Guide RNA
acagacguuuauuuuccccug

SEQ ID NO: 16585 - RNA, 21 nt, Artificial Sequence
  Guide RNA
acagaguccuacuaugcaaac

SEQ ID NO: 16586 - RNA, 21 nt, Artificial Sequence
  Guide RNA
acagaguccuacuaugcaaau

SEQ ID NO: 16587 - RNA, 21 nt, Artificial Sequence
  Guide RNA
acaggggaaaauaaacgucua

SEQ ID NO: 16588 - RNA, 21 nt, Artificial Sequence
  Guide RNA
acaggggaaaauaaacgucug

SEQ ID NO: 16589 - RNA, 21 nt, Artificial Sequence
  Guide RNA
acgucuauuugcauaguagga

SEQ ID NO: 16590 - RNA, 21 nt, Artificial Sequence
  Guide RNA
acgucuguuugcauaguagga

SEQ ID NO: 16591 - RNA, 21 nt, Artificial Sequence
  Guide RNA
acuaugcaaacagacguuuau

SEQ ID NO: 16592 - RNA, 21 nt, Artificial Sequence
  Guide RNA
agaguccuacuaugcaaacag

SEQ ID NO: 16593 - RNA, 21 nt, Artificial Sequence
  Guide RNA
agaguccuacuaugcaaauag

SEQ ID NO: 16594 - RNA, 21 nt, Artificial Sequence
  Guide RNA
aggggaaaauaaacgucuauu

SEQ ID NO: 16595 - RNA, 21 nt, Artificial Sequence
  Guide RNA
aggggaaaauaaacgucuguu

SEQ ID NO: 16596 - RNA, 21 nt, Artificial Sequence
  Guide RNA
agguacagaguccuacuaugc

SEQ ID NO: 16597 - RNA, 21 nt, Artificial Sequence
  Guide RNA
aguccuacuaugcaaacagac

SEQ ID NO: 16598 - RNA, 21 nt, Artificial Sequence
  Guide RNA
aguccuacuaugcaaauagac

SEQ ID NO: 16599 - RNA, 21 nt, Artificial Sequence
  Guide RNA
auaaacgucuguuugcauagu

SEQ ID NO: 16600 - RNA, 21 nt, Artificial Sequence
  Guide RNA
auagacguuuauuuuccccug

SEQ ID NO: 16601 - RNA, 21 nt, Artificial Sequence
  Guide RNA
caaacagacguuuauuuuccc

SEQ ID NO: 16602 - RNA, 21 nt, Artificial Sequence
  Guide RNA
caaauagacguuuauuuuccc

SEQ ID NO: 16603 - RNA, 21 nt, Artificial Sequence
  Guide RNA
cagaguccuacuaugcaaaca

SEQ ID NO: 16604 - RNA, 21 nt, Artificial Sequence
  Guide RNA
cagaguccuacuaugcaaaua

SEQ ID NO: 16605 - RNA, 21 nt, Artificial Sequence
  Guide RNA
caggggaaaauaaacgucuau

SEQ ID NO: 16606 - RNA, 21 nt, Artificial Sequence
  Guide RNA
caggggaaaauaaacgucugu

SEQ ID NO: 16607 - RNA, 21 nt, Artificial Sequence
  Guide RNA
ccuacuaugcaaacagacguu

SEQ ID NO: 16608 - RNA, 21 nt, Artificial Sequence
  Guide RNA
ccuacuaugcaaauagacguu

SEQ ID NO: 16609 - RNA, 21 nt, Artificial Sequence
  Guide RNA
cgucuauuugcauaguaggac

SEQ ID NO: 16610 - RNA, 21 nt, Artificial Sequence
  Guide RNA
cgucuguuugcauaguaggac

SEQ ID NO: 16611 - RNA, 21 nt, Artificial Sequence
  Guide RNA
cuaacaggggaaaauaaacgu

SEQ ID NO: 16612 - RNA, 21 nt, Artificial Sequence
  Guide RNA
cuacuaugcaaacagacguuu

SEQ ID NO: 16613 - RNA, 21 nt, Artificial Sequence
  Guide RNA
cuacuaugcaaauagacguuu

SEQ ID NO: 16614 - RNA, 21 nt, Artificial Sequence
  Guide RNA
cuaugcaaacagacguuuauu

SEQ ID NO: 16615 - RNA, 21 nt, Artificial Sequence
  Guide RNA
cuauuugcauaguaggacucu

SEQ ID NO: 16616 - RNA, 21 nt, Artificial Sequence
  Guide RNA
cuguuugcauaguaggacucu

SEQ ID NO: 16617 - RNA, 21 nt, Artificial Sequence
  Guide RNA
gaaaauaaacgucuguuugca

SEQ ID NO: 16618 - RNA, 21 nt, Artificial Sequence
  Guide RNA
gaguccuacuaugcaaacaga

SEQ ID NO: 16619 - RNA, 21 nt, Artificial Sequence
  Guide RNA
gaguccuacuaugcaaauaga

SEQ ID NO: 16620 - RNA, 21 nt, Artificial Sequence
  Guide RNA
gcaaacagacguuuauuuucc

SEQ ID NO: 16621 - RNA, 21 nt, Artificial Sequence
  Guide RNA
gcaaauagacguuuauuuucc

SEQ ID NO: 16622 - RNA, 21 nt, Artificial Sequence
  Guide RNA
ggaaaauaaacgucuauuugc

SEQ ID NO: 16623 - RNA, 21 nt, Artificial Sequence
  Guide RNA
ggaaaauaaacgucuguuugc

SEQ ID NO: 16624 - RNA, 21 nt, Artificial Sequence
  Guide RNA
gggaaaauaaacgucuauuug

SEQ ID NO: 16625 - RNA, 21 nt, Artificial Sequence
  Guide RNA
gggaaaauaaacgucuguuug

SEQ ID NO: 16626 - RNA, 21 nt, Artificial Sequence
  Guide RNA
ggggaaaauaaacgucuauuu

SEQ ID NO: 16627 - RNA, 21 nt, Artificial Sequence
  Guide RNA
ggggaaaauaaacgucuguuu

SEQ ID NO: 16628 - RNA, 21 nt, Artificial Sequence
  Guide RNA
gguacagaguccuacuaugca

SEQ ID NO: 16629 - RNA, 21 nt, Artificial Sequence
  Guide RNA
guacagaguccuacuaugcaa

SEQ ID NO: 16630 - RNA, 21 nt, Artificial Sequence
  Guide RNA
guccuacuaugcaaacagacg

SEQ ID NO: 16631 - RNA, 21 nt, Artificial Sequence
  Guide RNA
guccuacuaugcaaauagacg

SEQ ID NO: 16632 - RNA, 21 nt, Artificial Sequence
  Guide RNA
gucuauuugcauaguaggacu

SEQ ID NO: 16633 - RNA, 21 nt, Artificial Sequence
  Guide RNA
gucuguuugcauaguaggacu

SEQ ID NO: 16634 - RNA, 21 nt, Artificial Sequence
  Guide RNA
uaaacgucuguuugcauagua

SEQ ID NO: 16635 - RNA, 21 nt, Artificial Sequence
  Guide RNA
uaacaggggaaaauaaacguc

SEQ ID NO: 16636 - RNA, 21 nt, Artificial Sequence
  Guide RNA
uacagaguccuacuaugcaaa

SEQ ID NO: 16637 - RNA, 21 nt, Artificial Sequence
  Guide RNA
uacuaugcaaacagacguuua

SEQ ID NO: 16638 - RNA, 21 nt, Artificial Sequence
  Guide RNA
uauuugcauaguaggacucug

SEQ ID NO: 16639 - RNA, 21 nt, Artificial Sequence
  Guide RNA
uccuacuaugcaaacagacgu

SEQ ID NO: 16640 - RNA, 21 nt, Artificial Sequence
  Guide RNA
uccuacuaugcaaauagacgu

SEQ ID NO: 16641 - RNA, 21 nt, Artificial Sequence
  Guide RNA
ucuaacaggggaaaauaaacg

SEQ ID NO: 16642 - RNA, 21 nt, Artificial Sequence
  Guide RNA
ucuauuugcauaguaggacuc

SEQ ID NO: 16643 - RNA, 21 nt, Artificial Sequence
  Guide RNA
ucuguuugcauaguaggacuc

SEQ ID NO: 16644 - RNA, 21 nt, Artificial Sequence
  Guide RNA
ugcaaacagacguuuauuuuc

SEQ ID NO: 16645 - RNA, 21 nt, Artificial Sequence
  Guide RNA
uguuugcauaguaggacucug

SEQ ID NO: 16646 - RNA, 22 nt, Artificial Sequence
  Guide RNA
aaacagacguuuauuuuccccu

SEQ ID NO: 16647 - RNA, 22 nt, Artificial Sequence
  Guide RNA
aaacgucuauuugcauaguagg

SEQ ID NO: 16648 - RNA, 22 nt, Artificial Sequence
  Guide RNA
aaacgucuguuugcauaguagg

SEQ ID NO: 16649 - RNA, 22 nt, Artificial Sequence
  Guide RNA
aaauaaacgucuguuugcauag

SEQ ID NO: 16650 - RNA, 22 nt, Artificial Sequence
  Guide RNA
aaauagacguuuauuuuccccu

SEQ ID NO: 16651 - RNA, 22 nt, Artificial Sequence
  Guide RNA
aacagacguuuauuuuccccug

SEQ ID NO: 16652 - RNA, 22 nt, Artificial Sequence
  Guide RNA
aacaggggaaaauaaacgucua

SEQ ID NO: 16653 - RNA, 22 nt, Artificial Sequence
  Guide RNA
aacaggggaaaauaaacgucug

SEQ ID NO: 16654 - RNA, 22 nt, Artificial Sequence
  Guide RNA
aacgucuauuugcauaguagga

SEQ ID NO: 16655 - RNA, 22 nt, Artificial Sequence
  Guide RNA
aacgucuguuugcauaguagga

SEQ ID NO: 16656 - RNA, 22 nt, Artificial Sequence
  Guide RNA
aagguacagaguccuacuaugc

SEQ ID NO: 16657 - RNA, 22 nt, Artificial Sequence
  Guide RNA
aauaaacgucuguuugcauagu

SEQ ID NO: 16658 - RNA, 22 nt, Artificial Sequence
  Guide RNA
aauagacguuuauuuuccccug

SEQ ID NO: 16659 - RNA, 22 nt, Artificial Sequence
  Guide RNA
acagacguuuauuuuccccugu

SEQ ID NO: 16660 - RNA, 22 nt, Artificial Sequence
  Guide RNA
acagaguccuacuaugcaaaca

SEQ ID NO: 16661 - RNA, 22 nt, Artificial Sequence
  Guide RNA
acagaguccuacuaugcaaaua

SEQ ID NO: 16662 - RNA, 22 nt, Artificial Sequence
  Guide RNA
acaggggaaaauaaacgucuau

SEQ ID NO: 16663 - RNA, 22 nt, Artificial Sequence
  Guide RNA
acaggggaaaauaaacgucugu

SEQ ID NO: 16664 - RNA, 22 nt, Artificial Sequence
  Guide RNA
acgucuauuugcauaguaggac

SEQ ID NO: 16665 - RNA, 22 nt, Artificial Sequence
  Guide RNA
acgucuguuugcauaguaggac

SEQ ID NO: 16666 - RNA, 22 nt, Artificial Sequence
  Guide RNA
acuaugcaaacagacguuuauu

SEQ ID NO: 16667 - RNA, 22 nt, Artificial Sequence
  Guide RNA
agaguccuacuaugcaaacaga

SEQ ID NO: 16668 - RNA, 22 nt, Artificial Sequence
  Guide RNA
agaguccuacuaugcaaauaga

SEQ ID NO: 16669 - RNA, 22 nt, Artificial Sequence
  Guide RNA
aggggaaaauaaacgucuauuu

SEQ ID NO: 16670 - RNA, 22 nt, Artificial Sequence
  Guide RNA
aggggaaaauaaacgucuguuu

SEQ ID NO: 16671 - RNA, 22 nt, Artificial Sequence
  Guide RNA
agguacagaguccuacuaugca

SEQ ID NO: 16672 - RNA, 22 nt, Artificial Sequence
  Guide RNA
aguccuacuaugcaaacagacg

SEQ ID NO: 16673 - RNA, 22 nt, Artificial Sequence
  Guide RNA
aguccuacuaugcaaauagacg

SEQ ID NO: 16674 - RNA, 22 nt, Artificial Sequence
  Guide RNA
auaaacgucuguuugcauagua

SEQ ID NO: 16675 - RNA, 22 nt, Artificial Sequence
  Guide RNA
auagacguuuauuuuccccugu

SEQ ID NO: 16676 - RNA, 22 nt, Artificial Sequence
  Guide RNA
augcaaacagacguuuauuuuc

SEQ ID NO: 16677 - RNA, 22 nt, Artificial Sequence
  Guide RNA
caaacagacguuuauuuucccc

SEQ ID NO: 16678 - RNA, 22 nt, Artificial Sequence
  Guide RNA
caaauagacguuuauuuucccc

SEQ ID NO: 16679 - RNA, 22 nt, Artificial Sequence
  Guide RNA
cagaguccuacuaugcaaacag

SEQ ID NO: 16680 - RNA, 22 nt, Artificial Sequence
  Guide RNA
cagaguccuacuaugcaaauag

SEQ ID NO: 16681 - RNA, 22 nt, Artificial Sequence
  Guide RNA
caggggaaaauaaacgucuauu

SEQ ID NO: 16682 - RNA, 22 nt, Artificial Sequence
  Guide RNA
caggggaaaauaaacgucuguu

SEQ ID NO: 16683 - RNA, 22 nt, Artificial Sequence
  Guide RNA
ccuacuaugcaaacagacguuu

SEQ ID NO: 16684 - RNA, 22 nt, Artificial Sequence
  Guide RNA
ccuacuaugcaaauagacguuu

SEQ ID NO: 16685 - RNA, 22 nt, Artificial Sequence
  Guide RNA
cgucuauuugcauaguaggacu

SEQ ID NO: 16686 - RNA, 22 nt, Artificial Sequence
  Guide RNA
cgucuguuugcauaguaggacu

SEQ ID NO: 16687 - RNA, 22 nt, Artificial Sequence
  Guide RNA
cuaacaggggaaaauaaacguc

SEQ ID NO: 16688 - RNA, 22 nt, Artificial Sequence
  Guide RNA
cuacuaugcaaacagacguuua

SEQ ID NO: 16689 - RNA, 22 nt, Artificial Sequence
  Guide RNA
cuacuaugcaaauagacguuua

SEQ ID NO: 16690 - RNA, 22 nt, Artificial Sequence
  Guide RNA
cuaugcaaacagacguuuauuu

SEQ ID NO: 16691 - RNA, 22 nt, Artificial Sequence
  Guide RNA
cuauuugcauaguaggacucug

SEQ ID NO: 16692 - RNA, 22 nt, Artificial Sequence
  Guide RNA
cuguuugcauaguaggacucug

SEQ ID NO: 16693 - RNA, 22 nt, Artificial Sequence
  Guide RNA
gaaaauaaacgucuguuugcau

SEQ ID NO: 16694 - RNA, 22 nt, Artificial Sequence
  Guide RNA
gaguccuacuaugcaaacagac

SEQ ID NO: 16695 - RNA, 22 nt, Artificial Sequence
  Guide RNA
gaguccuacuaugcaaauagac

SEQ ID NO: 16696 - RNA, 22 nt, Artificial Sequence
  Guide RNA
gcaaacagacguuuauuuuccc

SEQ ID NO: 16697 - RNA, 22 nt, Artificial Sequence
  Guide RNA
gcaaauagacguuuauuuuccc

SEQ ID NO: 16698 - RNA, 22 nt, Artificial Sequence
  Guide RNA
ggaaaauaaacgucuauuugca

SEQ ID NO: 16699 - RNA, 22 nt, Artificial Sequence
  Guide RNA
ggaaaauaaacgucuguuugca

SEQ ID NO: 16700 - RNA, 22 nt, Artificial Sequence
  Guide RNA
gggaaaauaaacgucuauuugc

SEQ ID NO: 16701 - RNA, 22 nt, Artificial Sequence
  Guide RNA
gggaaaauaaacgucuguuugc

SEQ ID NO: 16702 - RNA, 22 nt, Artificial Sequence
  Guide RNA
ggggaaaauaaacgucuauuug

SEQ ID NO: 16703 - RNA, 22 nt, Artificial Sequence
  Guide RNA
ggggaaaauaaacgucuguuug

SEQ ID NO: 16704 - RNA, 22 nt, Artificial Sequence
  Guide RNA
gguacagaguccuacuaugcaa

SEQ ID NO: 16705 - RNA, 22 nt, Artificial Sequence
  Guide RNA
guacagaguccuacuaugcaaa

SEQ ID NO: 16706 - RNA, 22 nt, Artificial Sequence
  Guide RNA
guccuacuaugcaaacagacgu

SEQ ID NO: 16707 - RNA, 22 nt, Artificial Sequence
  Guide RNA
guccuacuaugcaaauagacgu

SEQ ID NO: 16708 - RNA, 22 nt, Artificial Sequence
  Guide RNA
gucuauuugcauaguaggacuc

SEQ ID NO: 16709 - RNA, 22 nt, Artificial Sequence
  Guide RNA
gucuguuugcauaguaggacuc

SEQ ID NO: 16710 - RNA, 22 nt, Artificial Sequence
  Guide RNA
uaaacgucuauuugcauaguag

SEQ ID NO: 16711 - RNA, 22 nt, Artificial Sequence
  Guide RNA
uaaacgucuguuugcauaguag

SEQ ID NO: 16712 - RNA, 22 nt, Artificial Sequence
  Guide RNA
uaacaggggaaaauaaacgucu

SEQ ID NO: 16713 - RNA, 22 nt, Artificial Sequence
  Guide RNA
uacagaguccuacuaugcaaac

SEQ ID NO: 16714 - RNA, 22 nt, Artificial Sequence
  Guide RNA
uacagaguccuacuaugcaaau

SEQ ID NO: 16715 - RNA, 22 nt, Artificial Sequence
  Guide RNA
uacuaugcaaacagacguuuau

SEQ ID NO: 16716 - RNA, 22 nt, Artificial Sequence
  Guide RNA
uauuugcauaguaggacucugu

SEQ ID NO: 16717 - RNA, 22 nt, Artificial Sequence
  Guide RNA
uccuacuaugcaaacagacguu

SEQ ID NO: 16718 - RNA, 22 nt, Artificial Sequence
  Guide RNA
uccuacuaugcaaauagacguu

SEQ ID NO: 16719 - RNA, 22 nt, Artificial Sequence
  Guide RNA
ucuaacaggggaaaauaaacgu

SEQ ID NO: 16720 - RNA, 22 nt, Artificial Sequence
  Guide RNA
ucuauuugcauaguaggacucu

SEQ ID NO: 16721 - RNA, 22 nt, Artificial Sequence
  Guide RNA
ucuguuugcauaguaggacucu

SEQ ID NO: 16722 - RNA, 22 nt, Artificial Sequence
  Guide RNA
ugcaaacagacguuuauuuucc

SEQ ID NO: 16723 - RNA, 22 nt, Artificial Sequence
  Guide RNA
ugcaaauagacguuuauuuucc

SEQ ID NO: 16724 - RNA, 22 nt, Artificial Sequence
  Guide RNA
uguuugcauaguaggacucugu

SEQ ID NO: 16725 - RNA, 22 nt, Artificial Sequence
  Guide RNA
uucuaacaggggaaaauaaacg

SEQ ID NO: 16726 - RNA, 20 nt, Artificial Sequence
  Guide RNA
aaagauauuagcucucccug

SEQ ID NO: 16727 - RNA, 20 nt, Artificial Sequence
  Guide RNA
aaagauguuagcucucccug

SEQ ID NO: 16728 - RNA, 20 nt, Artificial Sequence
  Guide RNA
aacaucauaaagauguuagc

SEQ ID NO: 16729 - RNA, 20 nt, Artificial Sequence
  Guide RNA
aacucagggagagcuaacau

SEQ ID NO: 16730 - RNA, 20 nt, Artificial Sequence
  Guide RNA
aacucagggagagcuaauau

SEQ ID NO: 16731 - RNA, 20 nt, Artificial Sequence
  Guide RNA
aagauauuagcucucccuga

SEQ ID NO: 16732 - RNA, 20 nt, Artificial Sequence
  Guide RNA
aagauguuagcucucccuga

SEQ ID NO: 16733 - RNA, 20 nt, Artificial Sequence
  Guide RNA
aaguuaacucagggagagcu

SEQ ID NO: 16734 - RNA, 20 nt, Artificial Sequence
  Guide RNA
acaucauaaagauguuagcu

SEQ ID NO: 16735 - RNA, 20 nt, Artificial Sequence
  Guide RNA
acucagggagagcuaacauc

SEQ ID NO: 16736 - RNA, 20 nt, Artificial Sequence
  Guide RNA
acucagggagagcuaauauc

SEQ ID NO: 16737 - RNA, 20 nt, Artificial Sequence
  Guide RNA
agagcuaacaucuuuaugau

SEQ ID NO: 16738 - RNA, 20 nt, Artificial Sequence
  Guide RNA
agauauuagcucucccugag

SEQ ID NO: 16739 - RNA, 20 nt, Artificial Sequence
  Guide RNA
agauguuagcucucccugag

SEQ ID NO: 16740 - RNA, 20 nt, Artificial Sequence
  Guide RNA
agcuaacaucuuuaugaugu

SEQ ID NO: 16741 - RNA, 20 nt, Artificial Sequence
  Guide RNA
agggagagcuaacaucuuua

SEQ ID NO: 16742 - RNA, 20 nt, Artificial Sequence
  Guide RNA
agggagagcuaauaucuuua

SEQ ID NO: 16743 - RNA, 20 nt, Artificial Sequence
  Guide RNA
aguuaacucagggagagcua

SEQ ID NO: 16744 - RNA, 20 nt, Artificial Sequence
  Guide RNA
auaaagauauuagcucuccc

SEQ ID NO: 16745 - RNA, 20 nt, Artificial Sequence
  Guide RNA
auaaagauguuagcucuccc

SEQ ID NO: 16746 - RNA, 20 nt, Artificial Sequence
  Guide RNA
auauuagcucucccugaguu

SEQ ID NO: 16747 - RNA, 20 nt, Artificial Sequence
  Guide RNA
aucauaaagauguuagcucu

SEQ ID NO: 16748 - RNA, 20 nt, Artificial Sequence
  Guide RNA
auguuagcucucccugaguu

SEQ ID NO: 16749 - RNA, 20 nt, Artificial Sequence
  Guide RNA
caacaucauaaagauguuag

SEQ ID NO: 16750 - RNA, 20 nt, Artificial Sequence
  Guide RNA
caaguuaacucagggagagc

SEQ ID NO: 16751 - RNA, 20 nt, Artificial Sequence
  Guide RNA
cagggagagcuaacaucuuu

SEQ ID NO: 16752 - RNA, 20 nt, Artificial Sequence
  Guide RNA
cagggagagcuaauaucuuu

SEQ ID NO: 16753 - RNA, 20 nt, Artificial Sequence
  Guide RNA
cauaaagauauuagcucucc

SEQ ID NO: 16754 - RNA, 20 nt, Artificial Sequence
  Guide RNA
cauaaagauguuagcucucc

SEQ ID NO: 16755 - RNA, 20 nt, Artificial Sequence
  Guide RNA
caucauaaagauauuagcuc

SEQ ID NO: 16756 - RNA, 20 nt, Artificial Sequence
  Guide RNA
caucauaaagauguuagcuc

SEQ ID NO: 16757 - RNA, 20 nt, Artificial Sequence
  Guide RNA
cuaacaucuuuaugauguug

SEQ ID NO: 16758 - RNA, 20 nt, Artificial Sequence
  Guide RNA
cucagggagagcuaacaucu

SEQ ID NO: 16759 - RNA, 20 nt, Artificial Sequence
  Guide RNA
cucagggagagcuaauaucu

SEQ ID NO: 16760 - RNA, 20 nt, Artificial Sequence
  Guide RNA
gagagcuaacaucuuuauga

SEQ ID NO: 16761 - RNA, 20 nt, Artificial Sequence
  Guide RNA
gagagcuaauaucuuuauga

SEQ ID NO: 16762 - RNA, 20 nt, Artificial Sequence
  Guide RNA
gagcuaacaucuuuaugaug

SEQ ID NO: 16763 - RNA, 20 nt, Artificial Sequence
  Guide RNA
gagcuaauaucuuuaugaug

SEQ ID NO: 16764 - RNA, 20 nt, Artificial Sequence
  Guide RNA
gauauuagcucucccugagu

SEQ ID NO: 16765 - RNA, 20 nt, Artificial Sequence
  Guide RNA
gauguuagcucucccugagu

SEQ ID NO: 16766 - RNA, 20 nt, Artificial Sequence
  Guide RNA
gcuaacaucuuuaugauguu

SEQ ID NO: 16767 - RNA, 20 nt, Artificial Sequence
  Guide RNA
ggagagcuaacaucuuuaug

SEQ ID NO: 16768 - RNA, 20 nt, Artificial Sequence
  Guide RNA
ggagagcuaauaucuuuaug

SEQ ID NO: 16769 - RNA, 20 nt, Artificial Sequence
  Guide RNA
gggagagcuaacaucuuuau

SEQ ID NO: 16770 - RNA, 20 nt, Artificial Sequence
  Guide RNA
gggagagcuaauaucuuuau

SEQ ID NO: 16771 - RNA, 20 nt, Artificial Sequence
  Guide RNA
guuaacucagggagagcuaa

SEQ ID NO: 16772 - RNA, 20 nt, Artificial Sequence
  Guide RNA
uaaagauauuagcucucccu

SEQ ID NO: 16773 - RNA, 20 nt, Artificial Sequence
  Guide RNA
uaaagauguuagcucucccu

SEQ ID NO: 16774 - RNA, 20 nt, Artificial Sequence
  Guide RNA
uaacucagggagagcuaaca

SEQ ID NO: 16775 - RNA, 20 nt, Artificial Sequence
  Guide RNA
uaacucagggagagcuaaua

SEQ ID NO: 16776 - RNA, 20 nt, Artificial Sequence
  Guide RNA
uauuagcucucccugaguua

SEQ ID NO: 16777 - RNA, 20 nt, Artificial Sequence
  Guide RNA
ucagggagagcuaacaucuu

SEQ ID NO: 16778 - RNA, 20 nt, Artificial Sequence
  Guide RNA
ucagggagagcuaauaucuu

SEQ ID NO: 16779 - RNA, 20 nt, Artificial Sequence
  Guide RNA
ucauaaagauauuagcucuc

SEQ ID NO: 16780 - RNA, 20 nt, Artificial Sequence
  Guide RNA
ucauaaagauguuagcucuc

SEQ ID NO: 16781 - RNA, 20 nt, Artificial Sequence
  Guide RNA
uguuagcucucccugaguua

SEQ ID NO: 16782 - RNA, 20 nt, Artificial Sequence
  Guide RNA
uuaacucagggagagcuaac

SEQ ID NO: 16783 - RNA, 20 nt, Artificial Sequence
  Guide RNA
uuaacucagggagagcuaau

SEQ ID NO: 16784 - RNA, 21 nt, Artificial Sequence
  Guide RNA
aaagauauuagcucucccuga

SEQ ID NO: 16785 - RNA, 21 nt, Artificial Sequence
  Guide RNA
aaagauguuagcucucccuga

SEQ ID NO: 16786 - RNA, 21 nt, Artificial Sequence
  Guide RNA
aacucagggagagcuaacauc

SEQ ID NO: 16787 - RNA, 21 nt, Artificial Sequence
  Guide RNA
aacucagggagagcuaauauc

SEQ ID NO: 16788 - RNA, 21 nt, Artificial Sequence
  Guide RNA
aagauauuagcucucccugag

SEQ ID NO: 16789 - RNA, 21 nt, Artificial Sequence
  Guide RNA
aagauguuagcucucccugag

SEQ ID NO: 16790 - RNA, 21 nt, Artificial Sequence
  Guide RNA
aaguuaacucagggagagcua

SEQ ID NO: 16791 - RNA, 21 nt, Artificial Sequence
  Guide RNA
acaaguuaacucagggagagc

SEQ ID NO: 16792 - RNA, 21 nt, Artificial Sequence
  Guide RNA
acaucauaaagauguuagcuc

SEQ ID NO: 16793 - RNA, 21 nt, Artificial Sequence
  Guide RNA
acucagggagagcuaacaucu

SEQ ID NO: 16794 - RNA, 21 nt, Artificial Sequence
  Guide RNA
acucagggagagcuaauaucu

SEQ ID NO: 16795 - RNA, 21 nt, Artificial Sequence
  Guide RNA
agagcuaacaucuuuaugaug

SEQ ID NO: 16796 - RNA, 21 nt, Artificial Sequence
  Guide RNA
agauauuagcucucccugagu

SEQ ID NO: 16797 - RNA, 21 nt, Artificial Sequence
  Guide RNA
agauguuagcucucccugagu

SEQ ID NO: 16798 - RNA, 21 nt, Artificial Sequence
  Guide RNA
agggagagcuaacaucuuuau

SEQ ID NO: 16799 - RNA, 21 nt, Artificial Sequence
  Guide RNA
agggagagcuaauaucuuuau

SEQ ID NO: 16800 - RNA, 21 nt, Artificial Sequence
  Guide RNA
aguuaacucagggagagcuaa

SEQ ID NO: 16801 - RNA, 21 nt, Artificial Sequence
  Guide RNA
auaaagauauuagcucucccu

SEQ ID NO: 16802 - RNA, 21 nt, Artificial Sequence
  Guide RNA
auaaagauguuagcucucccu

SEQ ID NO: 16803 - RNA, 21 nt, Artificial Sequence
  Guide RNA
auauuagcucucccugaguua

SEQ ID NO: 16804 - RNA, 21 nt, Artificial Sequence
  Guide RNA
aucauaaagauguuagcucuc

SEQ ID NO: 16805 - RNA, 21 nt, Artificial Sequence
  Guide RNA
auguuagcucucccugaguua

SEQ ID NO: 16806 - RNA, 21 nt, Artificial Sequence
  Guide RNA
caacaucauaaagauguuagc

SEQ ID NO: 16807 - RNA, 21 nt, Artificial Sequence
  Guide RNA
caaguuaacucagggagagcu

SEQ ID NO: 16808 - RNA, 21 nt, Artificial Sequence
  Guide RNA
cagggagagcuaacaucuuua

SEQ ID NO: 16809 - RNA, 21 nt, Artificial Sequence
  Guide RNA
cagggagagcuaauaucuuua

SEQ ID NO: 16810 - RNA, 21 nt, Artificial Sequence
  Guide RNA
cauaaagauauuagcucuccc

SEQ ID NO: 16811 - RNA, 21 nt, Artificial Sequence
  Guide RNA
cauaaagauguuagcucuccc

SEQ ID NO: 16812 - RNA, 21 nt, Artificial Sequence
  Guide RNA
caucauaaagauguuagcucu

SEQ ID NO: 16813 - RNA, 21 nt, Artificial Sequence
  Guide RNA
cucagggagagcuaacaucuu

SEQ ID NO: 16814 - RNA, 21 nt, Artificial Sequence
  Guide RNA
cucagggagagcuaauaucuu

SEQ ID NO: 16815 - RNA, 21 nt, Artificial Sequence
  Guide RNA
gagagcuaacaucuuuaugau

SEQ ID NO: 16816 - RNA, 21 nt, Artificial Sequence
  Guide RNA
gagcuaacaucuuuaugaugu

SEQ ID NO: 16817 - RNA, 21 nt, Artificial Sequence
  Guide RNA
gauauuagcucucccugaguu

SEQ ID NO: 16818 - RNA, 21 nt, Artificial Sequence
  Guide RNA
gauguuagcucucccugaguu

SEQ ID NO: 16819 - RNA, 21 nt, Artificial Sequence
  Guide RNA
gcuaacaucuuuaugauguug

SEQ ID NO: 16820 - RNA, 21 nt, Artificial Sequence
  Guide RNA
ggagagcuaacaucuuuauga

SEQ ID NO: 16821 - RNA, 21 nt, Artificial Sequence
  Guide RNA
ggagagcuaauaucuuuauga

SEQ ID NO: 16822 - RNA, 21 nt, Artificial Sequence
  Guide RNA
gggagagcuaacaucuuuaug

SEQ ID NO: 16823 - RNA, 21 nt, Artificial Sequence
  Guide RNA
gggagagcuaauaucuuuaug

SEQ ID NO: 16824 - RNA, 21 nt, Artificial Sequence
  Guide RNA
guuaacucagggagagcuaac

SEQ ID NO: 16825 - RNA, 21 nt, Artificial Sequence
  Guide RNA
guuaacucagggagagcuaau

SEQ ID NO: 16826 - RNA, 21 nt, Artificial Sequence
  Guide RNA
uaaagauauuagcucucccug

SEQ ID NO: 16827 - RNA, 21 nt, Artificial Sequence
  Guide RNA
uaaagauguuagcucucccug

SEQ ID NO: 16828 - RNA, 21 nt, Artificial Sequence
  Guide RNA
uaacucagggagagcuaacau

SEQ ID NO: 16829 - RNA, 21 nt, Artificial Sequence
  Guide RNA
uaacucagggagagcuaauau

SEQ ID NO: 16830 - RNA, 21 nt, Artificial Sequence
  Guide RNA
uauuagcucucccugaguuaa

SEQ ID NO: 16831 - RNA, 21 nt, Artificial Sequence
  Guide RNA
ucagggagagcuaacaucuuu

SEQ ID NO: 16832 - RNA, 21 nt, Artificial Sequence
  Guide RNA
ucagggagagcuaauaucuuu

SEQ ID NO: 16833 - RNA, 21 nt, Artificial Sequence
  Guide RNA
ucauaaagauauuagcucucc

SEQ ID NO: 16834 - RNA, 21 nt, Artificial Sequence
  Guide RNA
ucauaaagauguuagcucucc

SEQ ID NO: 16835 - RNA, 21 nt, Artificial Sequence
  Guide RNA
uguuagcucucccugaguuaa

SEQ ID NO: 16836 - RNA, 21 nt, Artificial Sequence
  Guide RNA
uuaacucagggagagcuaaca

SEQ ID NO: 16837 - RNA, 21 nt, Artificial Sequence
  Guide RNA
uuaacucagggagagcuaaua

SEQ ID NO: 16838 - RNA, 22 nt, Artificial Sequence
  Guide RNA
aaagauauuagcucucccugag

SEQ ID NO: 16839 - RNA, 22 nt, Artificial Sequence
  Guide RNA
aaagauguuagcucucccugag

SEQ ID NO: 16840 - RNA, 22 nt, Artificial Sequence
  Guide RNA
aacaucauaaagauguuagcuc

SEQ ID NO: 16841 - RNA, 22 nt, Artificial Sequence
  Guide RNA
aacucagggagagcuaacaucu

SEQ ID NO: 16842 - RNA, 22 nt, Artificial Sequence
  Guide RNA
aacucagggagagcuaauaucu

SEQ ID NO: 16843 - RNA, 22 nt, Artificial Sequence
  Guide RNA
aagauauuagcucucccugagu

SEQ ID NO: 16844 - RNA, 22 nt, Artificial Sequence
  Guide RNA
aagauguuagcucucccugagu

SEQ ID NO: 16845 - RNA, 22 nt, Artificial Sequence
  Guide RNA
aaguuaacucagggagagcuaa

SEQ ID NO: 16846 - RNA, 22 nt, Artificial Sequence
  Guide RNA
acaacaucauaaagauguuagc

SEQ ID NO: 16847 - RNA, 22 nt, Artificial Sequence
  Guide RNA
acaaguuaacucagggagagcu

SEQ ID NO: 16848 - RNA, 22 nt, Artificial Sequence
  Guide RNA
acaucauaaagauguuagcucu

SEQ ID NO: 16849 - RNA, 22 nt, Artificial Sequence
  Guide RNA
acucagggagagcuaacaucuu

SEQ ID NO: 16850 - RNA, 22 nt, Artificial Sequence
  Guide RNA
acucagggagagcuaauaucuu

SEQ ID NO: 16851 - RNA, 22 nt, Artificial Sequence
  Guide RNA
agagcuaacaucuuuaugaugu

SEQ ID NO: 16852 - RNA, 22 nt, Artificial Sequence
  Guide RNA
agauauuagcucucccugaguu

SEQ ID NO: 16853 - RNA, 22 nt, Artificial Sequence
  Guide RNA
agauguuagcucucccugaguu

SEQ ID NO: 16854 - RNA, 22 nt, Artificial Sequence
  Guide RNA
agcuaacaucuuuaugauguug

SEQ ID NO: 16855 - RNA, 22 nt, Artificial Sequence
  Guide RNA
agggagagcuaacaucuuuaug

SEQ ID NO: 16856 - RNA, 22 nt, Artificial Sequence
  Guide RNA
agggagagcuaauaucuuuaug

SEQ ID NO: 16857 - RNA, 22 nt, Artificial Sequence
  Guide RNA
aguuaacucagggagagcuaac

SEQ ID NO: 16858 - RNA, 22 nt, Artificial Sequence
  Guide RNA
aguuaacucagggagagcuaau

SEQ ID NO: 16859 - RNA, 22 nt, Artificial Sequence
  Guide RNA
auaaagauauuagcucucccug

SEQ ID NO: 16860 - RNA, 22 nt, Artificial Sequence
  Guide RNA
auaaagauguuagcucucccug

SEQ ID NO: 16861 - RNA, 22 nt, Artificial Sequence
  Guide RNA
auauuagcucucccugaguuaa

SEQ ID NO: 16862 - RNA, 22 nt, Artificial Sequence
  Guide RNA
aucauaaagauauuagcucucc

SEQ ID NO: 16863 - RNA, 22 nt, Artificial Sequence
  Guide RNA
aucauaaagauguuagcucucc

SEQ ID NO: 16864 - RNA, 22 nt, Artificial Sequence
  Guide RNA
auguuagcucucccugaguuaa

SEQ ID NO: 16865 - RNA, 22 nt, Artificial Sequence
  Guide RNA
caacaucauaaagauguuagcu

SEQ ID NO: 16866 - RNA, 22 nt, Artificial Sequence
  Guide RNA
caaguuaacucagggagagcua

SEQ ID NO: 16867 - RNA, 22 nt, Artificial Sequence
  Guide RNA
cagggagagcuaacaucuuuau

SEQ ID NO: 16868 - RNA, 22 nt, Artificial Sequence
  Guide RNA
cagggagagcuaauaucuuuau

SEQ ID NO: 16869 - RNA, 22 nt, Artificial Sequence
  Guide RNA
cauaaagauauuagcucucccu

SEQ ID NO: 16870 - RNA, 22 nt, Artificial Sequence
  Guide RNA
cauaaagauguuagcucucccu

SEQ ID NO: 16871 - RNA, 22 nt, Artificial Sequence
  Guide RNA
caucauaaagauauuagcucuc

SEQ ID NO: 16872 - RNA, 22 nt, Artificial Sequence
  Guide RNA
caucauaaagauguuagcucuc

SEQ ID NO: 16873 - RNA, 22 nt, Artificial Sequence
  Guide RNA
cucagggagagcuaacaucuuu

SEQ ID NO: 16874 - RNA, 22 nt, Artificial Sequence
  Guide RNA
cucagggagagcuaauaucuuu

SEQ ID NO: 16875 - RNA, 22 nt, Artificial Sequence
  Guide RNA
gagagcuaacaucuuuaugaug

SEQ ID NO: 16876 - RNA, 22 nt, Artificial Sequence
  Guide RNA
gagagcuaauaucuuuaugaug

SEQ ID NO: 16877 - RNA, 22 nt, Artificial Sequence
  Guide RNA
gagcuaacaucuuuaugauguu

SEQ ID NO: 16878 - RNA, 22 nt, Artificial Sequence
  Guide RNA
gauauuagcucucccugaguua

SEQ ID NO: 16879 - RNA, 22 nt, Artificial Sequence
  Guide RNA
gauguuagcucucccugaguua

SEQ ID NO: 16880 - RNA, 22 nt, Artificial Sequence
  Guide RNA
gcuaacaucuuuaugauguugu

SEQ ID NO: 16881 - RNA, 22 nt, Artificial Sequence
  Guide RNA
ggagagcuaacaucuuuaugau

SEQ ID NO: 16882 - RNA, 22 nt, Artificial Sequence
  Guide RNA
ggagagcuaauaucuuuaugau

SEQ ID NO: 16883 - RNA, 22 nt, Artificial Sequence
  Guide RNA
gggagagcuaacaucuuuauga

SEQ ID NO: 16884 - RNA, 22 nt, Artificial Sequence
  Guide RNA
gggagagcuaauaucuuuauga

SEQ ID NO: 16885 - RNA, 22 nt, Artificial Sequence
  Guide RNA
guuaacucagggagagcuaaca

SEQ ID NO: 16886 - RNA, 22 nt, Artificial Sequence
  Guide RNA
guuaacucagggagagcuaaua

SEQ ID NO: 16887 - RNA, 22 nt, Artificial Sequence
  Guide RNA
uaaagauauuagcucucccuga

SEQ ID NO: 16888 - RNA, 22 nt, Artificial Sequence
  Guide RNA
uaaagauguuagcucucccuga

SEQ ID NO: 16889 - RNA, 22 nt, Artificial Sequence
  Guide RNA
uaacucagggagagcuaacauc

SEQ ID NO: 16890 - RNA, 22 nt, Artificial Sequence
  Guide RNA
uaacucagggagagcuaauauc

SEQ ID NO: 16891 - RNA, 22 nt, Artificial Sequence
  Guide RNA
uacaaguuaacucagggagagc

SEQ ID NO: 16892 - RNA, 22 nt, Artificial Sequence
  Guide RNA
uauuagcucucccugaguuaac

SEQ ID NO: 16893 - RNA, 22 nt, Artificial Sequence
  Guide RNA
ucagggagagcuaacaucuuua

SEQ ID NO: 16894 - RNA, 22 nt, Artificial Sequence
  Guide RNA
ucagggagagcuaauaucuuua

SEQ ID NO: 16895 - RNA, 22 nt, Artificial Sequence
  Guide RNA
ucauaaagauauuagcucuccc

SEQ ID NO: 16896 - RNA, 22 nt, Artificial Sequence
  Guide RNA
ucauaaagauguuagcucuccc

SEQ ID NO: 16897 - RNA, 22 nt, Artificial Sequence
  Guide RNA
uguuagcucucccugaguuaac

SEQ ID NO: 16898 - RNA, 22 nt, Artificial Sequence
  Guide RNA
uuaacucagggagagcuaacau

SEQ ID NO: 16899 - RNA, 22 nt, Artificial Sequence
  Guide RNA
uuaacucagggagagcuaauau

SEQ ID NO: 16900 - RNA, 20 nt, Artificial Sequence
  Guide RNA
aaaaaacaccuauuaaaccc

SEQ ID NO: 16901 - RNA, 20 nt, Artificial Sequence
  Guide RNA
aaggguuuaauagguguuuu

SEQ ID NO: 16902 - RNA, 20 nt, Artificial Sequence
  Guide RNA
acaaggguuuaauagguguu

SEQ ID NO: 16903 - RNA, 20 nt, Artificial Sequence
  Guide RNA
aggguuuaauagguguuuua

SEQ ID NO: 16904 - RNA, 20 nt, Artificial Sequence
  Guide RNA
aggguuuaauagguguuuuu

SEQ ID NO: 16905 - RNA, 20 nt, Artificial Sequence
  Guide RNA
auaaaacaccuauuaaaccc

SEQ ID NO: 16906 - RNA, 20 nt, Artificial Sequence
  Guide RNA
caaggguuuaauagguguuu

SEQ ID NO: 16907 - RNA, 20 nt, Artificial Sequence
  Guide RNA
ggguuuaauagguguuuuau

SEQ ID NO: 16908 - RNA, 20 nt, Artificial Sequence
  Guide RNA
ggguuuaauagguguuuuuu

SEQ ID NO: 16909 - RNA, 20 nt, Artificial Sequence
  Guide RNA
uacaaggguuuaauaggugu

SEQ ID NO: 16910 - RNA, 21 nt, Artificial Sequence
  Guide RNA
acaaggguuuaauagguguuu

SEQ ID NO: 16911 - RNA, 21 nt, Artificial Sequence
  Guide RNA
caaggguuuaauagguguuuu

SEQ ID NO: 16912 - RNA, 21 nt, Artificial Sequence
  Guide RNA
uacaaggguuuaauagguguu

SEQ ID NO: 16913 - RNA, 21 nt, Artificial Sequence
  Guide RNA
uuacaaggguuuaauaggugu

SEQ ID NO: 16914 - RNA, 22 nt, Artificial Sequence
  Guide RNA
acaaggguuuaauagguguuuu

SEQ ID NO: 16915 - RNA, 22 nt, Artificial Sequence
  Guide RNA
caaggguuuaauagguguuuua

SEQ ID NO: 16916 - RNA, 22 nt, Artificial Sequence
  Guide RNA
caaggguuuaauagguguuuuu

SEQ ID NO: 16917 - RNA, 22 nt, Artificial Sequence
  Guide RNA
uacaaggguuuaauagguguuu

SEQ ID NO: 16918 - RNA, 22 nt, Artificial Sequence
  Guide RNA
uuacaaggguuuaauagguguu

SEQ ID NO: 16919 - RNA, 22 nt, Artificial Sequence
  Guide RNA
uuuacaaggguuuaauaggugu

SEQ ID NO: 16920 - RNA, 20 nt, Artificial Sequence
  Guide RNA
aaacgcugugcugugaugac

SEQ ID NO: 16921 - RNA, 20 nt, Artificial Sequence
  Guide RNA
aaacugaagcuguggguaag

SEQ ID NO: 16922 - RNA, 20 nt, Artificial Sequence
  Guide RNA
aaacugaagcugugggugag

SEQ ID NO: 16923 - RNA, 20 nt, Artificial Sequence
  Guide RNA
aacgcugugcugugaugacc

SEQ ID NO: 16924 - RNA, 20 nt, Artificial Sequence
  Guide RNA
aacugaagcuguggguaagg

SEQ ID NO: 16925 - RNA, 20 nt, Artificial Sequence
  Guide RNA
aacugaagcugugggugagg

SEQ ID NO: 16926 - RNA, 20 nt, Artificial Sequence
  Guide RNA
aagcuguggguaaggucauc

SEQ ID NO: 16927 - RNA, 20 nt, Artificial Sequence
  Guide RNA
aagcugugggugaggucauc

SEQ ID NO: 16928 - RNA, 20 nt, Artificial Sequence
  Guide RNA
aaggaaacugaagcuguggg

SEQ ID NO: 16929 - RNA, 20 nt, Artificial Sequence
  Guide RNA
accucacccacagcuucagu

SEQ ID NO: 16930 - RNA, 20 nt, Artificial Sequence
  Guide RNA
accuuacccacagcuucagu

SEQ ID NO: 16931 - RNA, 20 nt, Artificial Sequence
  Guide RNA
acgcugugcugugaugaccu

SEQ ID NO: 16932 - RNA, 20 nt, Artificial Sequence
  Guide RNA
acugaagcuguggguaaggu

SEQ ID NO: 16933 - RNA, 20 nt, Artificial Sequence
  Guide RNA
acugaagcugugggugaggu

SEQ ID NO: 16934 - RNA, 20 nt, Artificial Sequence
  Guide RNA
agaaggaaacugaagcugug

SEQ ID NO: 16935 - RNA, 20 nt, Artificial Sequence
  Guide RNA
agcuguggguaaggucauca

SEQ ID NO: 16936 - RNA, 20 nt, Artificial Sequence
  Guide RNA
agcugugggugaggucauca

SEQ ID NO: 16937 - RNA, 20 nt, Artificial Sequence
  Guide RNA
aggaaacugaagcugugggu

SEQ ID NO: 16938 - RNA, 20 nt, Artificial Sequence
  Guide RNA
augaccucacccacagcuuc

SEQ ID NO: 16939 - RNA, 20 nt, Artificial Sequence
  Guide RNA
augaccuuacccacagcuuc

SEQ ID NO: 16940 - RNA, 20 nt, Artificial Sequence
  Guide RNA
ccucacccacagcuucaguu

SEQ ID NO: 16941 - RNA, 20 nt, Artificial Sequence
  Guide RNA
ccuuacccacagcuucaguu

SEQ ID NO: 16942 - RNA, 20 nt, Artificial Sequence
  Guide RNA
cgcugugcugugaugaccuc

SEQ ID NO: 16943 - RNA, 20 nt, Artificial Sequence
  Guide RNA
cgcugugcugugaugaccuu

SEQ ID NO: 16944 - RNA, 20 nt, Artificial Sequence
  Guide RNA
cucacccacagcuucaguuu

SEQ ID NO: 16945 - RNA, 20 nt, Artificial Sequence
  Guide RNA
cugaagcuguggguaagguc

SEQ ID NO: 16946 - RNA, 20 nt, Artificial Sequence
  Guide RNA
cugaagcugugggugagguc

SEQ ID NO: 16947 - RNA, 20 nt, Artificial Sequence
  Guide RNA
cugugaugaccucacccaca

SEQ ID NO: 16948 - RNA, 20 nt, Artificial Sequence
  Guide RNA
cugugaugaccuuacccaca

SEQ ID NO: 16949 - RNA, 20 nt, Artificial Sequence
  Guide RNA
cugugcugugaugaccucac

SEQ ID NO: 16950 - RNA, 20 nt, Artificial Sequence
  Guide RNA
cugugcugugaugaccuuac

SEQ ID NO: 16951 - RNA, 20 nt, Artificial Sequence
  Guide RNA
cuguggguaaggucaucaca

SEQ ID NO: 16952 - RNA, 20 nt, Artificial Sequence
  Guide RNA
cugugggugaggucaucaca

SEQ ID NO: 16953 - RNA, 20 nt, Artificial Sequence
  Guide RNA
cuuacccacagcuucaguuu

SEQ ID NO: 16954 - RNA, 20 nt, Artificial Sequence
  Guide RNA
gaaacugaagcuguggguaa

SEQ ID NO: 16955 - RNA, 20 nt, Artificial Sequence
  Guide RNA
gaaacugaagcuguggguga

SEQ ID NO: 16956 - RNA, 20 nt, Artificial Sequence
  Guide RNA
gaagcuguggguaaggucau

SEQ ID NO: 16957 - RNA, 20 nt, Artificial Sequence
  Guide RNA
gaagcugugggugaggucau

SEQ ID NO: 16958 - RNA, 20 nt, Artificial Sequence
  Guide RNA
gaaggaaacugaagcugugg

SEQ ID NO: 16959 - RNA, 20 nt, Artificial Sequence
  Guide RNA
gaccucacccacagcuucag

SEQ ID NO: 16960 - RNA, 20 nt, Artificial Sequence
  Guide RNA
gaccuuacccacagcuucag

SEQ ID NO: 16961 - RNA, 20 nt, Artificial Sequence
  Guide RNA
gaugaccucacccacagcuu

SEQ ID NO: 16962 - RNA, 20 nt, Artificial Sequence
  Guide RNA
gaugaccuuacccacagcuu

SEQ ID NO: 16963 - RNA, 20 nt, Artificial Sequence
  Guide RNA
gcugugaugaccucacccac

SEQ ID NO: 16964 - RNA, 20 nt, Artificial Sequence
  Guide RNA
gcugugaugaccuuacccac

SEQ ID NO: 16965 - RNA, 20 nt, Artificial Sequence
  Guide RNA
gcugugcugugaugaccuca

SEQ ID NO: 16966 - RNA, 20 nt, Artificial Sequence
  Guide RNA
gcugugcugugaugaccuua

SEQ ID NO: 16967 - RNA, 20 nt, Artificial Sequence
  Guide RNA
gcuguggguaaggucaucac

SEQ ID NO: 16968 - RNA, 20 nt, Artificial Sequence
  Guide RNA
gcugugggugaggucaucac

SEQ ID NO: 16969 - RNA, 20 nt, Artificial Sequence
  Guide RNA
ggaaacugaagcugugggua

SEQ ID NO: 16970 - RNA, 20 nt, Artificial Sequence
  Guide RNA
ggaaacugaagcugugggug

SEQ ID NO: 16971 - RNA, 20 nt, Artificial Sequence
  Guide RNA
ggguaaggucaucacagcac

SEQ ID NO: 16972 - RNA, 20 nt, Artificial Sequence
  Guide RNA
gggugaggucaucacagcac

SEQ ID NO: 16973 - RNA, 20 nt, Artificial Sequence
  Guide RNA
gguaaggucaucacagcaca

SEQ ID NO: 16974 - RNA, 20 nt, Artificial Sequence
  Guide RNA
ggugaggucaucacagcaca

SEQ ID NO: 16975 - RNA, 20 nt, Artificial Sequence
  Guide RNA
guaaggucaucacagcacag

SEQ ID NO: 16976 - RNA, 20 nt, Artificial Sequence
  Guide RNA
gugaggucaucacagcacag

SEQ ID NO: 16977 - RNA, 20 nt, Artificial Sequence
  Guide RNA
gugaugaccucacccacagc

SEQ ID NO: 16978 - RNA, 20 nt, Artificial Sequence
  Guide RNA
gugaugaccuuacccacagc

SEQ ID NO: 16979 - RNA, 20 nt, Artificial Sequence
  Guide RNA
gugcugugaugaccucaccc

SEQ ID NO: 16980 - RNA, 20 nt, Artificial Sequence
  Guide RNA
gugcugugaugaccuuaccc

SEQ ID NO: 16981 - RNA, 20 nt, Artificial Sequence
  Guide RNA
guggguaaggucaucacagc

SEQ ID NO: 16982 - RNA, 20 nt, Artificial Sequence
  Guide RNA
gugggugaggucaucacagc

SEQ ID NO: 16983 - RNA, 20 nt, Artificial Sequence
  Guide RNA
uaaacgcugugcugugauga

SEQ ID NO: 16984 - RNA, 20 nt, Artificial Sequence
  Guide RNA
uaaggucaucacagcacagc

SEQ ID NO: 16985 - RNA, 20 nt, Artificial Sequence
  Guide RNA
ucacccacagcuucaguuuc

SEQ ID NO: 16986 - RNA, 20 nt, Artificial Sequence
  Guide RNA
ugaagcuguggguaagguca

SEQ ID NO: 16987 - RNA, 20 nt, Artificial Sequence
  Guide RNA
ugaagcugugggugagguca

SEQ ID NO: 16988 - RNA, 20 nt, Artificial Sequence
  Guide RNA
ugaccucacccacagcuuca

SEQ ID NO: 16989 - RNA, 20 nt, Artificial Sequence
  Guide RNA
ugaccuuacccacagcuuca

SEQ ID NO: 16990 - RNA, 20 nt, Artificial Sequence
  Guide RNA
ugaggucaucacagcacagc

SEQ ID NO: 16991 - RNA, 20 nt, Artificial Sequence
  Guide RNA
ugaugaccucacccacagcu

SEQ ID NO: 16992 - RNA, 20 nt, Artificial Sequence
  Guide RNA
ugaugaccuuacccacagcu

SEQ ID NO: 16993 - RNA, 20 nt, Artificial Sequence
  Guide RNA
ugcugugaugaccucaccca

SEQ ID NO: 16994 - RNA, 20 nt, Artificial Sequence
  Guide RNA
ugcugugaugaccuuaccca

SEQ ID NO: 16995 - RNA, 20 nt, Artificial Sequence
  Guide RNA
uggguaaggucaucacagca

SEQ ID NO: 16996 - RNA, 20 nt, Artificial Sequence
  Guide RNA
ugggugaggucaucacagca

SEQ ID NO: 16997 - RNA, 20 nt, Artificial Sequence
  Guide RNA
ugugaugaccucacccacag

SEQ ID NO: 16998 - RNA, 20 nt, Artificial Sequence
  Guide RNA
ugugaugaccuuacccacag

SEQ ID NO: 16999 - RNA, 20 nt, Artificial Sequence
  Guide RNA
ugugcugugaugaccucacc

SEQ ID NO: 17000 - RNA, 20 nt, Artificial Sequence
  Guide RNA
ugugcugugaugaccuuacc

SEQ ID NO: 17001 - RNA, 20 nt, Artificial Sequence
  Guide RNA
uguggguaaggucaucacag

SEQ ID NO: 17002 - RNA, 20 nt, Artificial Sequence
  Guide RNA
ugugggugaggucaucacag

SEQ ID NO: 17003 - RNA, 20 nt, Artificial Sequence
  Guide RNA
uuacccacagcuucaguuuc

SEQ ID NO: 17004 - RNA, 21 nt, Artificial Sequence
  Guide RNA
aaacgcugugcugugaugacc

SEQ ID NO: 17005 - RNA, 21 nt, Artificial Sequence
  Guide RNA
aaacugaagcuguggguaagg

SEQ ID NO: 17006 - RNA, 21 nt, Artificial Sequence
  Guide RNA
aaacugaagcugugggugagg

SEQ ID NO: 17007 - RNA, 21 nt, Artificial Sequence
  Guide RNA
aacgcugugcugugaugaccu

SEQ ID NO: 17008 - RNA, 21 nt, Artificial Sequence
  Guide RNA
aacugaagcuguggguaaggu

SEQ ID NO: 17009 - RNA, 21 nt, Artificial Sequence
  Guide RNA
aacugaagcugugggugaggu

SEQ ID NO: 17010 - RNA, 21 nt, Artificial Sequence
  Guide RNA
aagcuguggguaaggucauca

SEQ ID NO: 17011 - RNA, 21 nt, Artificial Sequence
  Guide RNA
aagcugugggugaggucauca

SEQ ID NO: 17012 - RNA, 21 nt, Artificial Sequence
  Guide RNA
aaggaaacugaagcugugggu

SEQ ID NO: 17013 - RNA, 21 nt, Artificial Sequence
  Guide RNA
accucacccacagcuucaguu

SEQ ID NO: 17014 - RNA, 21 nt, Artificial Sequence
  Guide RNA
accuuacccacagcuucaguu

SEQ ID NO: 17015 - RNA, 21 nt, Artificial Sequence
  Guide RNA
acgcugugcugugaugaccuc

SEQ ID NO: 17016 - RNA, 21 nt, Artificial Sequence
  Guide RNA
acgcugugcugugaugaccuu

SEQ ID NO: 17017 - RNA, 21 nt, Artificial Sequence
  Guide RNA
acugaagcuguggguaagguc

SEQ ID NO: 17018 - RNA, 21 nt, Artificial Sequence
  Guide RNA
acugaagcugugggugagguc

SEQ ID NO: 17019 - RNA, 21 nt, Artificial Sequence
  Guide RNA
agaaggaaacugaagcugugg

SEQ ID NO: 17020 - RNA, 21 nt, Artificial Sequence
  Guide RNA
agcuguggguaaggucaucac

SEQ ID NO: 17021 - RNA, 21 nt, Artificial Sequence
  Guide RNA
agcugugggugaggucaucac

SEQ ID NO: 17022 - RNA, 21 nt, Artificial Sequence
  Guide RNA
aggaaacugaagcugugggua

SEQ ID NO: 17023 - RNA, 21 nt, Artificial Sequence
  Guide RNA
aggaaacugaagcugugggug

SEQ ID NO: 17024 - RNA, 21 nt, Artificial Sequence
  Guide RNA
augaccucacccacagcuuca

SEQ ID NO: 17025 - RNA, 21 nt, Artificial Sequence
  Guide RNA
augaccuuacccacagcuuca

SEQ ID NO: 17026 - RNA, 21 nt, Artificial Sequence
  Guide RNA
ccucacccacagcuucaguuu

SEQ ID NO: 17027 - RNA, 21 nt, Artificial Sequence
  Guide RNA
ccuuacccacagcuucaguuu

SEQ ID NO: 17028 - RNA, 21 nt, Artificial Sequence
  Guide RNA
cgcugugcugugaugaccuca

SEQ ID NO: 17029 - RNA, 21 nt, Artificial Sequence
  Guide RNA
cgcugugcugugaugaccuua

SEQ ID NO: 17030 - RNA, 21 nt, Artificial Sequence
  Guide RNA
cuaaacgcugugcugugauga

SEQ ID NO: 17031 - RNA, 21 nt, Artificial Sequence
  Guide RNA
cucacccacagcuucaguuuc

SEQ ID NO: 17032 - RNA, 21 nt, Artificial Sequence
  Guide RNA
cugaagcuguggguaagguca

SEQ ID NO: 17033 - RNA, 21 nt, Artificial Sequence
  Guide RNA
cugaagcugugggugagguca

SEQ ID NO: 17034 - RNA, 21 nt, Artificial Sequence
  Guide RNA
cugugaugaccucacccacag

SEQ ID NO: 17035 - RNA, 21 nt, Artificial Sequence
  Guide RNA
cugugaugaccuuacccacag

SEQ ID NO: 17036 - RNA, 21 nt, Artificial Sequence
  Guide RNA
cugugcugugaugaccucacc

SEQ ID NO: 17037 - RNA, 21 nt, Artificial Sequence
  Guide RNA
cugugcugugaugaccuuacc

SEQ ID NO: 17038 - RNA, 21 nt, Artificial Sequence
  Guide RNA
cuguggguaaggucaucacag

SEQ ID NO: 17039 - RNA, 21 nt, Artificial Sequence
  Guide RNA
cugugggugaggucaucacag

SEQ ID NO: 17040 - RNA, 21 nt, Artificial Sequence
  Guide RNA
cuuacccacagcuucaguuuc

SEQ ID NO: 17041 - RNA, 21 nt, Artificial Sequence
  Guide RNA
gaaacugaagcuguggguaag

SEQ ID NO: 17042 - RNA, 21 nt, Artificial Sequence
  Guide RNA
gaaacugaagcugugggugag

SEQ ID NO: 17043 - RNA, 21 nt, Artificial Sequence
  Guide RNA
gaagcuguggguaaggucauc

SEQ ID NO: 17044 - RNA, 21 nt, Artificial Sequence
  Guide RNA
gaagcugugggugaggucauc

SEQ ID NO: 17045 - RNA, 21 nt, Artificial Sequence
  Guide RNA
gaaggaaacugaagcuguggg

SEQ ID NO: 17046 - RNA, 21 nt, Artificial Sequence
  Guide RNA
gaccucacccacagcuucagu

SEQ ID NO: 17047 - RNA, 21 nt, Artificial Sequence
  Guide RNA
gaccuuacccacagcuucagu

SEQ ID NO: 17048 - RNA, 21 nt, Artificial Sequence
  Guide RNA
gaugaccucacccacagcuuc

SEQ ID NO: 17049 - RNA, 21 nt, Artificial Sequence
  Guide RNA
gaugaccuuacccacagcuuc

SEQ ID NO: 17050 - RNA, 21 nt, Artificial Sequence
  Guide RNA
gcugugaugaccucacccaca

SEQ ID NO: 17051 - RNA, 21 nt, Artificial Sequence
  Guide RNA
gcugugaugaccuuacccaca

SEQ ID NO: 17052 - RNA, 21 nt, Artificial Sequence
  Guide RNA
gcugugcugugaugaccucac

SEQ ID NO: 17053 - RNA, 21 nt, Artificial Sequence
  Guide RNA
gcugugcugugaugaccuuac

SEQ ID NO: 17054 - RNA, 21 nt, Artificial Sequence
  Guide RNA
gcuguggguaaggucaucaca

SEQ ID NO: 17055 - RNA, 21 nt, Artificial Sequence
  Guide RNA
gcugugggugaggucaucaca

SEQ ID NO: 17056 - RNA, 21 nt, Artificial Sequence
  Guide RNA
ggaaacugaagcuguggguaa

SEQ ID NO: 17057 - RNA, 21 nt, Artificial Sequence
  Guide RNA
ggaaacugaagcuguggguga

SEQ ID NO: 17058 - RNA, 21 nt, Artificial Sequence
  Guide RNA
ggguaaggucaucacagcaca

SEQ ID NO: 17059 - RNA, 21 nt, Artificial Sequence
  Guide RNA
gggugaggucaucacagcaca

SEQ ID NO: 17060 - RNA, 21 nt, Artificial Sequence
  Guide RNA
gguaaggucaucacagcacag

SEQ ID NO: 17061 - RNA, 21 nt, Artificial Sequence
  Guide RNA
ggugaggucaucacagcacag

SEQ ID NO: 17062 - RNA, 21 nt, Artificial Sequence
  Guide RNA
guaaggucaucacagcacagc

SEQ ID NO: 17063 - RNA, 21 nt, Artificial Sequence
  Guide RNA
gugaggucaucacagcacagc

SEQ ID NO: 17064 - RNA, 21 nt, Artificial Sequence
  Guide RNA
gugaugaccucacccacagcu

SEQ ID NO: 17065 - RNA, 21 nt, Artificial Sequence
  Guide RNA
gugaugaccuuacccacagcu

SEQ ID NO: 17066 - RNA, 21 nt, Artificial Sequence
  Guide RNA
gugcugugaugaccucaccca

SEQ ID NO: 17067 - RNA, 21 nt, Artificial Sequence
  Guide RNA
gugcugugaugaccuuaccca

SEQ ID NO: 17068 - RNA, 21 nt, Artificial Sequence
  Guide RNA
guggguaaggucaucacagca

SEQ ID NO: 17069 - RNA, 21 nt, Artificial Sequence
  Guide RNA
gugggugaggucaucacagca

SEQ ID NO: 17070 - RNA, 21 nt, Artificial Sequence
  Guide RNA
uaaacgcugugcugugaugac

SEQ ID NO: 17071 - RNA, 21 nt, Artificial Sequence
  Guide RNA
uaaggucaucacagcacagcg

SEQ ID NO: 17072 - RNA, 21 nt, Artificial Sequence
  Guide RNA
uagaaggaaacugaagcugug

SEQ ID NO: 17073 - RNA, 21 nt, Artificial Sequence
  Guide RNA
ucacccacagcuucaguuucc

SEQ ID NO: 17074 - RNA, 21 nt, Artificial Sequence
  Guide RNA
ugaagcuguggguaaggucau

SEQ ID NO: 17075 - RNA, 21 nt, Artificial Sequence
  Guide RNA
ugaagcugugggugaggucau

SEQ ID NO: 17076 - RNA, 21 nt, Artificial Sequence
  Guide RNA
ugaccucacccacagcuucag

SEQ ID NO: 17077 - RNA, 21 nt, Artificial Sequence
  Guide RNA
ugaccuuacccacagcuucag

SEQ ID NO: 17078 - RNA, 21 nt, Artificial Sequence
  Guide RNA
ugaggucaucacagcacagcg

SEQ ID NO: 17079 - RNA, 21 nt, Artificial Sequence
  Guide RNA
ugaugaccucacccacagcuu

SEQ ID NO: 17080 - RNA, 21 nt, Artificial Sequence
  Guide RNA
ugaugaccuuacccacagcuu

SEQ ID NO: 17081 - RNA, 21 nt, Artificial Sequence
  Guide RNA
ugcugugaugaccucacccac

SEQ ID NO: 17082 - RNA, 21 nt, Artificial Sequence
  Guide RNA
ugcugugaugaccuuacccac

SEQ ID NO: 17083 - RNA, 21 nt, Artificial Sequence
  Guide RNA
uggguaaggucaucacagcac

SEQ ID NO: 17084 - RNA, 21 nt, Artificial Sequence
  Guide RNA
ugggugaggucaucacagcac

SEQ ID NO: 17085 - RNA, 21 nt, Artificial Sequence
  Guide RNA
ugugaugaccucacccacagc

SEQ ID NO: 17086 - RNA, 21 nt, Artificial Sequence
  Guide RNA
ugugaugaccuuacccacagc

SEQ ID NO: 17087 - RNA, 21 nt, Artificial Sequence
  Guide RNA
ugugcugugaugaccucaccc

SEQ ID NO: 17088 - RNA, 21 nt, Artificial Sequence
  Guide RNA
ugugcugugaugaccuuaccc

SEQ ID NO: 17089 - RNA, 21 nt, Artificial Sequence
  Guide RNA
uguggguaaggucaucacagc

SEQ ID NO: 17090 - RNA, 21 nt, Artificial Sequence
  Guide RNA
ugugggugaggucaucacagc

SEQ ID NO: 17091 - RNA, 21 nt, Artificial Sequence
  Guide RNA
uuacccacagcuucaguuucc

SEQ ID NO: 17092 - RNA, 22 nt, Artificial Sequence
  Guide RNA
aaacgcugugcugugaugaccu

SEQ ID NO: 17093 - RNA, 22 nt, Artificial Sequence
  Guide RNA
aaacugaagcuguggguaaggu

SEQ ID NO: 17094 - RNA, 22 nt, Artificial Sequence
  Guide RNA
aaacugaagcugugggugaggu

SEQ ID NO: 17095 - RNA, 22 nt, Artificial Sequence
  Guide RNA
aacgcugugcugugaugaccuc

SEQ ID NO: 17096 - RNA, 22 nt, Artificial Sequence
  Guide RNA
aacgcugugcugugaugaccuu

SEQ ID NO: 17097 - RNA, 22 nt, Artificial Sequence
  Guide RNA
aacugaagcuguggguaagguc

SEQ ID NO: 17098 - RNA, 22 nt, Artificial Sequence
  Guide RNA
aacugaagcugugggugagguc

SEQ ID NO: 17099 - RNA, 22 nt, Artificial Sequence
  Guide RNA
aagcuguggguaaggucaucac

SEQ ID NO: 17100 - RNA, 22 nt, Artificial Sequence
  Guide RNA
aagcugugggugaggucaucac

SEQ ID NO: 17101 - RNA, 22 nt, Artificial Sequence
  Guide RNA
aaggaaacugaagcugugggua

SEQ ID NO: 17102 - RNA, 22 nt, Artificial Sequence
  Guide RNA
aaggaaacugaagcugugggug

SEQ ID NO: 17103 - RNA, 22 nt, Artificial Sequence
  Guide RNA
accucacccacagcuucaguuu

SEQ ID NO: 17104 - RNA, 22 nt, Artificial Sequence
  Guide RNA
accuuacccacagcuucaguuu

SEQ ID NO: 17105 - RNA, 22 nt, Artificial Sequence
  Guide RNA
acgcugugcugugaugaccuca

SEQ ID NO: 17106 - RNA, 22 nt, Artificial Sequence
  Guide RNA
acgcugugcugugaugaccuua

SEQ ID NO: 17107 - RNA, 22 nt, Artificial Sequence
  Guide RNA
acugaagcuguggguaagguca

SEQ ID NO: 17108 - RNA, 22 nt, Artificial Sequence
  Guide RNA
acugaagcugugggugagguca

SEQ ID NO: 17109 - RNA, 22 nt, Artificial Sequence
  Guide RNA
agaaggaaacugaagcuguggg

SEQ ID NO: 17110 - RNA, 22 nt, Artificial Sequence
  Guide RNA
agcuguggguaaggucaucaca

SEQ ID NO: 17111 - RNA, 22 nt, Artificial Sequence
  Guide RNA
agcugugggugaggucaucaca

SEQ ID NO: 17112 - RNA, 22 nt, Artificial Sequence
  Guide RNA
aggaaacugaagcuguggguaa

SEQ ID NO: 17113 - RNA, 22 nt, Artificial Sequence
  Guide RNA
aggaaacugaagcuguggguga

SEQ ID NO: 17114 - RNA, 22 nt, Artificial Sequence
  Guide RNA
augaccucacccacagcuucag

SEQ ID NO: 17115 - RNA, 22 nt, Artificial Sequence
  Guide RNA
augaccuuacccacagcuucag

SEQ ID NO: 17116 - RNA, 22 nt, Artificial Sequence
  Guide RNA
ccuaaacgcugugcugugauga

SEQ ID NO: 17117 - RNA, 22 nt, Artificial Sequence
  Guide RNA
ccucacccacagcuucaguuuc

SEQ ID NO: 17118 - RNA, 22 nt, Artificial Sequence
  Guide RNA
ccuuacccacagcuucaguuuc

SEQ ID NO: 17119 - RNA, 22 nt, Artificial Sequence
  Guide RNA
cgcugugcugugaugaccucac

SEQ ID NO: 17120 - RNA, 22 nt, Artificial Sequence
  Guide RNA
cgcugugcugugaugaccuuac

SEQ ID NO: 17121 - RNA, 22 nt, Artificial Sequence
  Guide RNA
cuaaacgcugugcugugaugac

SEQ ID NO: 17122 - RNA, 22 nt, Artificial Sequence
  Guide RNA
cuagaaggaaacugaagcugug

SEQ ID NO: 17123 - RNA, 22 nt, Artificial Sequence
  Guide RNA
cucacccacagcuucaguuucc

SEQ ID NO: 17124 - RNA, 22 nt, Artificial Sequence
  Guide RNA
cugaagcuguggguaaggucau

SEQ ID NO: 17125 - RNA, 22 nt, Artificial Sequence
  Guide RNA
cugaagcugugggugaggucau

SEQ ID NO: 17126 - RNA, 22 nt, Artificial Sequence
  Guide RNA
cugugaugaccucacccacagc

SEQ ID NO: 17127 - RNA, 22 nt, Artificial Sequence
  Guide RNA
cugugaugaccuuacccacagc

SEQ ID NO: 17128 - RNA, 22 nt, Artificial Sequence
  Guide RNA
cugugcugugaugaccucaccc

SEQ ID NO: 17129 - RNA, 22 nt, Artificial Sequence
  Guide RNA
cugugcugugaugaccuuaccc

SEQ ID NO: 17130 - RNA, 22 nt, Artificial Sequence
  Guide RNA
cuguggguaaggucaucacagc

SEQ ID NO: 17131 - RNA, 22 nt, Artificial Sequence
  Guide RNA
cugugggugaggucaucacagc

SEQ ID NO: 17132 - RNA, 22 nt, Artificial Sequence
  Guide RNA
cuuacccacagcuucaguuucc

SEQ ID NO: 17133 - RNA, 22 nt, Artificial Sequence
  Guide RNA
gaaacugaagcuguggguaagg

SEQ ID NO: 17134 - RNA, 22 nt, Artificial Sequence
  Guide RNA
gaaacugaagcugugggugagg

SEQ ID NO: 17135 - RNA, 22 nt, Artificial Sequence
  Guide RNA
gaagcuguggguaaggucauca

SEQ ID NO: 17136 - RNA, 22 nt, Artificial Sequence
  Guide RNA
gaagcugugggugaggucauca

SEQ ID NO: 17137 - RNA, 22 nt, Artificial Sequence
  Guide RNA
gaaggaaacugaagcugugggu

SEQ ID NO: 17138 - RNA, 22 nt, Artificial Sequence
  Guide RNA
gaccucacccacagcuucaguu

SEQ ID NO: 17139 - RNA, 22 nt, Artificial Sequence
  Guide RNA
gaccuuacccacagcuucaguu

SEQ ID NO: 17140 - RNA, 22 nt, Artificial Sequence
  Guide RNA
gaugaccucacccacagcuuca

SEQ ID NO: 17141 - RNA, 22 nt, Artificial Sequence
  Guide RNA
gaugaccuuacccacagcuuca

SEQ ID NO: 17142 - RNA, 22 nt, Artificial Sequence
  Guide RNA
gcugugaugaccucacccacag

SEQ ID NO: 17143 - RNA, 22 nt, Artificial Sequence
  Guide RNA
gcugugaugaccuuacccacag

SEQ ID NO: 17144 - RNA, 22 nt, Artificial Sequence
  Guide RNA
gcugugcugugaugaccucacc

SEQ ID NO: 17145 - RNA, 22 nt, Artificial Sequence
  Guide RNA
gcugugcugugaugaccuuacc

SEQ ID NO: 17146 - RNA, 22 nt, Artificial Sequence
  Guide RNA
gcuguggguaaggucaucacag

SEQ ID NO: 17147 - RNA, 22 nt, Artificial Sequence
  Guide RNA
gcugugggugaggucaucacag

SEQ ID NO: 17148 - RNA, 22 nt, Artificial Sequence
  Guide RNA
ggaaacugaagcuguggguaag

SEQ ID NO: 17149 - RNA, 22 nt, Artificial Sequence
  Guide RNA
ggaaacugaagcugugggugag

SEQ ID NO: 17150 - RNA, 22 nt, Artificial Sequence
  Guide RNA
ggguaaggucaucacagcacag

SEQ ID NO: 17151 - RNA, 22 nt, Artificial Sequence
  Guide RNA
gggugaggucaucacagcacag

SEQ ID NO: 17152 - RNA, 22 nt, Artificial Sequence
  Guide RNA
gguaaggucaucacagcacagc

SEQ ID NO: 17153 - RNA, 22 nt, Artificial Sequence
  Guide RNA
ggugaggucaucacagcacagc

SEQ ID NO: 17154 - RNA, 22 nt, Artificial Sequence
  Guide RNA
guaaggucaucacagcacagcg

SEQ ID NO: 17155 - RNA, 22 nt, Artificial Sequence
  Guide RNA
gugaggucaucacagcacagcg

SEQ ID NO: 17156 - RNA, 22 nt, Artificial Sequence
  Guide RNA
gugaugaccucacccacagcuu

SEQ ID NO: 17157 - RNA, 22 nt, Artificial Sequence
  Guide RNA
gugaugaccuuacccacagcuu

SEQ ID NO: 17158 - RNA, 22 nt, Artificial Sequence
  Guide RNA
gugcugugaugaccucacccac

SEQ ID NO: 17159 - RNA, 22 nt, Artificial Sequence
  Guide RNA
gugcugugaugaccuuacccac

SEQ ID NO: 17160 - RNA, 22 nt, Artificial Sequence
  Guide RNA
guggguaaggucaucacagcac

SEQ ID NO: 17161 - RNA, 22 nt, Artificial Sequence
  Guide RNA
gugggugaggucaucacagcac

SEQ ID NO: 17162 - RNA, 22 nt, Artificial Sequence
  Guide RNA
uaaacgcugugcugugaugacc

SEQ ID NO: 17163 - RNA, 22 nt, Artificial Sequence
  Guide RNA
uaaggucaucacagcacagcgu

SEQ ID NO: 17164 - RNA, 22 nt, Artificial Sequence
  Guide RNA
uagaaggaaacugaagcugugg

SEQ ID NO: 17165 - RNA, 22 nt, Artificial Sequence
  Guide RNA
ucacccacagcuucaguuuccu

SEQ ID NO: 17166 - RNA, 22 nt, Artificial Sequence
  Guide RNA
ugaagcuguggguaaggucauc

SEQ ID NO: 17167 - RNA, 22 nt, Artificial Sequence
  Guide RNA
ugaagcugugggugaggucauc

SEQ ID NO: 17168 - RNA, 22 nt, Artificial Sequence
  Guide RNA
ugaccucacccacagcuucagu

SEQ ID NO: 17169 - RNA, 22 nt, Artificial Sequence
  Guide RNA
ugaccuuacccacagcuucagu

SEQ ID NO: 17170 - RNA, 22 nt, Artificial Sequence
  Guide RNA
ugaggucaucacagcacagcgu

SEQ ID NO: 17171 - RNA, 22 nt, Artificial Sequence
  Guide RNA
ugaugaccucacccacagcuuc

SEQ ID NO: 17172 - RNA, 22 nt, Artificial Sequence
  Guide RNA
ugaugaccuuacccacagcuuc

SEQ ID NO: 17173 - RNA, 22 nt, Artificial Sequence
  Guide RNA
ugcugugaugaccucacccaca

SEQ ID NO: 17174 - RNA, 22 nt, Artificial Sequence
  Guide RNA
ugcugugaugaccuuacccaca

SEQ ID NO: 17175 - RNA, 22 nt, Artificial Sequence
  Guide RNA
uggguaaggucaucacagcaca

SEQ ID NO: 17176 - RNA, 22 nt, Artificial Sequence
  Guide RNA
ugggugaggucaucacagcaca

SEQ ID NO: 17177 - RNA, 22 nt, Artificial Sequence
  Guide RNA
ugugaugaccucacccacagcu

SEQ ID NO: 17178 - RNA, 22 nt, Artificial Sequence
  Guide RNA
ugugaugaccuuacccacagcu

SEQ ID NO: 17179 - RNA, 22 nt, Artificial Sequence
  Guide RNA
ugugcugugaugaccucaccca

SEQ ID NO: 17180 - RNA, 22 nt, Artificial Sequence
  Guide RNA
ugugcugugaugaccuuaccca

SEQ ID NO: 17181 - RNA, 22 nt, Artificial Sequence
  Guide RNA
uguggguaaggucaucacagca

SEQ ID NO: 17182 - RNA, 22 nt, Artificial Sequence
  Guide RNA
ugugggugaggucaucacagca

SEQ ID NO: 17183 - RNA, 22 nt, Artificial Sequence
  Guide RNA
uuacccacagcuucaguuuccu

SEQ ID NO: 17184 - RNA, 20 nt, Artificial Sequence
  Guide RNA
acuccauuuauguuaucuac

SEQ ID NO: 17185 - RNA, 20 nt, Artificial Sequence
  Guide RNA
acuccauuuauguuuucuac

SEQ ID NO: 17186 - RNA, 20 nt, Artificial Sequence
  Guide RNA
acugaugcuguagaaaacau

SEQ ID NO: 17187 - RNA, 20 nt, Artificial Sequence
  Guide RNA
acugaugcuguagauaacau

SEQ ID NO: 17188 - RNA, 20 nt, Artificial Sequence
  Guide RNA
agacuaacuccauuuauguu

SEQ ID NO: 17189 - RNA, 20 nt, Artificial Sequence
  Guide RNA
agagacuaacuccauuuaug

SEQ ID NO: 17190 - RNA, 20 nt, Artificial Sequence
  Guide RNA
auauuuacugaugcuguaga

SEQ ID NO: 17191 - RNA, 20 nt, Artificial Sequence
  Guide RNA
auguuaucuacagcaucagu

SEQ ID NO: 17192 - RNA, 20 nt, Artificial Sequence
  Guide RNA
auguuuucuacagcaucagu

SEQ ID NO: 17193 - RNA, 20 nt, Artificial Sequence
  Guide RNA
auuuacugaugcuguagaaa

SEQ ID NO: 17194 - RNA, 20 nt, Artificial Sequence
  Guide RNA
auuuacugaugcuguagaua

SEQ ID NO: 17195 - RNA, 20 nt, Artificial Sequence
  Guide RNA
cauuuauguuaucuacagca

SEQ ID NO: 17196 - RNA, 20 nt, Artificial Sequence
  Guide RNA
cauuuauguuuucuacagca

SEQ ID NO: 17197 - RNA, 20 nt, Artificial Sequence
  Guide RNA
ccauuuauguuaucuacagc

SEQ ID NO: 17198 - RNA, 20 nt, Artificial Sequence
  Guide RNA
ccauuuauguuuucuacagc

SEQ ID NO: 17199 - RNA, 20 nt, Artificial Sequence
  Guide RNA
cuaacuccauuuauguuauc

SEQ ID NO: 17200 - RNA, 20 nt, Artificial Sequence
  Guide RNA
cuaacuccauuuauguuuuc

SEQ ID NO: 17201 - RNA, 20 nt, Artificial Sequence
  Guide RNA
cuauauuuacugaugcugua

SEQ ID NO: 17202 - RNA, 20 nt, Artificial Sequence
  Guide RNA
cuccauuuauguuaucuaca

SEQ ID NO: 17203 - RNA, 20 nt, Artificial Sequence
  Guide RNA
cuccauuuauguuuucuaca

SEQ ID NO: 17204 - RNA, 20 nt, Artificial Sequence
  Guide RNA
cugaugcuguagaaaacaua

SEQ ID NO: 17205 - RNA, 20 nt, Artificial Sequence
  Guide RNA
cugaugcuguagauaacaua

SEQ ID NO: 17206 - RNA, 20 nt, Artificial Sequence
  Guide RNA
cuguagaaaacauaaaugga

SEQ ID NO: 17207 - RNA, 20 nt, Artificial Sequence
  Guide RNA
cuguagauaacauaaaugga

SEQ ID NO: 17208 - RNA, 20 nt, Artificial Sequence
  Guide RNA
gaaaacauaaauggaguuag

SEQ ID NO: 17209 - RNA, 20 nt, Artificial Sequence
  Guide RNA
gacuaacuccauuuauguua

SEQ ID NO: 17210 - RNA, 20 nt, Artificial Sequence
  Guide RNA
gacuaacuccauuuauguuu

SEQ ID NO: 17211 - RNA, 20 nt, Artificial Sequence
  Guide RNA
gagacuaacuccauuuaugu

SEQ ID NO: 17212 - RNA, 20 nt, Artificial Sequence
  Guide RNA
gauaacauaaauggaguuag

SEQ ID NO: 17213 - RNA, 20 nt, Artificial Sequence
  Guide RNA
gaugcuguagaaaacauaaa

SEQ ID NO: 17214 - RNA, 20 nt, Artificial Sequence
  Guide RNA
gaugcuguagauaacauaaa

SEQ ID NO: 17215 - RNA, 20 nt, Artificial Sequence
  Guide RNA
gcuauauuuacugaugcugu

SEQ ID NO: 17216 - RNA, 20 nt, Artificial Sequence
  Guide RNA
gcuguagaaaacauaaaugg

SEQ ID NO: 17217 - RNA, 20 nt, Artificial Sequence
  Guide RNA
gcuguagauaacauaaaugg

SEQ ID NO: 17218 - RNA, 20 nt, Artificial Sequence
  Guide RNA
guagaaaacauaaauggagu

SEQ ID NO: 17219 - RNA, 20 nt, Artificial Sequence
  Guide RNA
guagauaacauaaauggagu

SEQ ID NO: 17220 - RNA, 20 nt, Artificial Sequence
  Guide RNA
guuaucuacagcaucaguaa

SEQ ID NO: 17221 - RNA, 20 nt, Artificial Sequence
  Guide RNA
guuuucuacagcaucaguaa

SEQ ID NO: 17222 - RNA, 20 nt, Artificial Sequence
  Guide RNA
uacugaugcuguagaaaaca

SEQ ID NO: 17223 - RNA, 20 nt, Artificial Sequence
  Guide RNA
uacugaugcuguagauaaca

SEQ ID NO: 17224 - RNA, 20 nt, Artificial Sequence
  Guide RNA
uagagacuaacuccauuuau

SEQ ID NO: 17225 - RNA, 20 nt, Artificial Sequence
  Guide RNA
uauauuuacugaugcuguag

SEQ ID NO: 17226 - RNA, 20 nt, Artificial Sequence
  Guide RNA
uaucuacagcaucaguaaau

SEQ ID NO: 17227 - RNA, 20 nt, Artificial Sequence
  Guide RNA
uauguuaucuacagcaucag

SEQ ID NO: 17228 - RNA, 20 nt, Artificial Sequence
  Guide RNA
uauguuuucuacagcaucag

SEQ ID NO: 17229 - RNA, 20 nt, Artificial Sequence
  Guide RNA
uauuuacugaugcuguagaa

SEQ ID NO: 17230 - RNA, 20 nt, Artificial Sequence
  Guide RNA
uauuuacugaugcuguagau

SEQ ID NO: 17231 - RNA, 20 nt, Artificial Sequence
  Guide RNA
uccauuuauguuaucuacag

SEQ ID NO: 17232 - RNA, 20 nt, Artificial Sequence
  Guide RNA
uccauuuauguuuucuacag

SEQ ID NO: 17233 - RNA, 20 nt, Artificial Sequence
  Guide RNA
ugaugcuguagaaaacauaa

SEQ ID NO: 17234 - RNA, 20 nt, Artificial Sequence
  Guide RNA
ugaugcuguagauaacauaa

SEQ ID NO: 17235 - RNA, 20 nt, Artificial Sequence
  Guide RNA
ugcuguagaaaacauaaaug

SEQ ID NO: 17236 - RNA, 20 nt, Artificial Sequence
  Guide RNA
ugcuguagauaacauaaaug

SEQ ID NO: 17237 - RNA, 20 nt, Artificial Sequence
  Guide RNA
uguagaaaacauaaauggag

SEQ ID NO: 17238 - RNA, 20 nt, Artificial Sequence
  Guide RNA
uguagauaacauaaauggag

SEQ ID NO: 17239 - RNA, 20 nt, Artificial Sequence
  Guide RNA
uguuaucuacagcaucagua

SEQ ID NO: 17240 - RNA, 20 nt, Artificial Sequence
  Guide RNA
uguuuucuacagcaucagua

SEQ ID NO: 17241 - RNA, 20 nt, Artificial Sequence
  Guide RNA
uuacugaugcuguagaaaac

SEQ ID NO: 17242 - RNA, 20 nt, Artificial Sequence
  Guide RNA
uuacugaugcuguagauaac

SEQ ID NO: 17243 - RNA, 20 nt, Artificial Sequence
  Guide RNA
uuaucuacagcaucaguaaa

SEQ ID NO: 17244 - RNA, 20 nt, Artificial Sequence
  Guide RNA
uuauguuaucuacagcauca

SEQ ID NO: 17245 - RNA, 20 nt, Artificial Sequence
  Guide RNA
uuauguuuucuacagcauca

SEQ ID NO: 17246 - RNA, 20 nt, Artificial Sequence
  Guide RNA
uuuacugaugcuguagaaaa

SEQ ID NO: 17247 - RNA, 20 nt, Artificial Sequence
  Guide RNA
uuuacugaugcuguagauaa

SEQ ID NO: 17248 - RNA, 20 nt, Artificial Sequence
  Guide RNA
uuuauguuaucuacagcauc

SEQ ID NO: 17249 - RNA, 20 nt, Artificial Sequence
  Guide RNA
uuuauguuuucuacagcauc

SEQ ID NO: 17250 - RNA, 20 nt, Artificial Sequence
  Guide RNA
uuucuacagcaucaguaaau

SEQ ID NO: 17251 - RNA, 20 nt, Artificial Sequence
  Guide RNA
uuuucuacagcaucaguaaa

SEQ ID NO: 17252 - RNA, 21 nt, Artificial Sequence
  Guide RNA
acugaugcuguagaaaacaua

SEQ ID NO: 17253 - RNA, 21 nt, Artificial Sequence
  Guide RNA
acugaugcuguagauaacaua

SEQ ID NO: 17254 - RNA, 21 nt, Artificial Sequence
  Guide RNA
agagacuaacuccauuuaugu

SEQ ID NO: 17255 - RNA, 21 nt, Artificial Sequence
  Guide RNA
auguuaucuacagcaucagua

SEQ ID NO: 17256 - RNA, 21 nt, Artificial Sequence
  Guide RNA
auguuuucuacagcaucagua

SEQ ID NO: 17257 - RNA, 21 nt, Artificial Sequence
  Guide RNA
ccauuuauguuaucuacagca

SEQ ID NO: 17258 - RNA, 21 nt, Artificial Sequence
  Guide RNA
ccauuuauguuuucuacagca

SEQ ID NO: 17259 - RNA, 21 nt, Artificial Sequence
  Guide RNA
cuauauuuacugaugcuguag

SEQ ID NO: 17260 - RNA, 21 nt, Artificial Sequence
  Guide RNA
cuccauuuauguuaucuacag

SEQ ID NO: 17261 - RNA, 21 nt, Artificial Sequence
  Guide RNA
cuccauuuauguuuucuacag

SEQ ID NO: 17262 - RNA, 21 nt, Artificial Sequence
  Guide RNA
cugaugcuguagaaaacauaa

SEQ ID NO: 17263 - RNA, 21 nt, Artificial Sequence
  Guide RNA
cugaugcuguagauaacauaa

SEQ ID NO: 17264 - RNA, 21 nt, Artificial Sequence
  Guide RNA
cuguagaaaacauaaauggag

SEQ ID NO: 17265 - RNA, 21 nt, Artificial Sequence
  Guide RNA
cuguagauaacauaaauggag

SEQ ID NO: 17266 - RNA, 21 nt, Artificial Sequence
  Guide RNA
gagacuaacuccauuuauguu

SEQ ID NO: 17267 - RNA, 21 nt, Artificial Sequence
  Guide RNA
gcuauauuuacugaugcugua

SEQ ID NO: 17268 - RNA, 21 nt, Artificial Sequence
  Guide RNA
gcuguagaaaacauaaaugga

SEQ ID NO: 17269 - RNA, 21 nt, Artificial Sequence
  Guide RNA
gcuguagauaacauaaaugga

SEQ ID NO: 17270 - RNA, 21 nt, Artificial Sequence
  Guide RNA
guuaucuacagcaucaguaaa

SEQ ID NO: 17271 - RNA, 21 nt, Artificial Sequence
  Guide RNA
guuuucuacagcaucaguaaa

SEQ ID NO: 17272 - RNA, 21 nt, Artificial Sequence
  Guide RNA
uacugaugcuguagaaaacau

SEQ ID NO: 17273 - RNA, 21 nt, Artificial Sequence
  Guide RNA
uacugaugcuguagauaacau

SEQ ID NO: 17274 - RNA, 21 nt, Artificial Sequence
  Guide RNA
uagagacuaacuccauuuaug

SEQ ID NO: 17275 - RNA, 21 nt, Artificial Sequence
  Guide RNA
uauguuaucuacagcaucagu

SEQ ID NO: 17276 - RNA, 21 nt, Artificial Sequence
  Guide RNA
uauguuuucuacagcaucagu

SEQ ID NO: 17277 - RNA, 21 nt, Artificial Sequence
  Guide RNA
uccauuuauguuaucuacagc

SEQ ID NO: 17278 - RNA, 21 nt, Artificial Sequence
  Guide RNA
uccauuuauguuuucuacagc

SEQ ID NO: 17279 - RNA, 21 nt, Artificial Sequence
  Guide RNA
ugcuauauuuacugaugcugu

SEQ ID NO: 17280 - RNA, 21 nt, Artificial Sequence
  Guide RNA
ugcuguagaaaacauaaaugg

SEQ ID NO: 17281 - RNA, 21 nt, Artificial Sequence
  Guide RNA
ugcuguagauaacauaaaugg

SEQ ID NO: 17282 - RNA, 21 nt, Artificial Sequence
  Guide RNA
uguuaucuacagcaucaguaa

SEQ ID NO: 17283 - RNA, 21 nt, Artificial Sequence
  Guide RNA
uguuuucuacagcaucaguaa

SEQ ID NO: 17284 - RNA, 21 nt, Artificial Sequence
  Guide RNA
uuacugaugcuguagaaaaca

SEQ ID NO: 17285 - RNA, 21 nt, Artificial Sequence
  Guide RNA
uuacugaugcuguagauaaca

SEQ ID NO: 17286 - RNA, 21 nt, Artificial Sequence
  Guide RNA
uuauguuaucuacagcaucag

SEQ ID NO: 17287 - RNA, 21 nt, Artificial Sequence
  Guide RNA
uuauguuuucuacagcaucag

SEQ ID NO: 17288 - RNA, 21 nt, Artificial Sequence
  Guide RNA
uuuacugaugcuguagaaaac

SEQ ID NO: 17289 - RNA, 21 nt, Artificial Sequence
  Guide RNA
uuuacugaugcuguagauaac

SEQ ID NO: 17290 - RNA, 22 nt, Artificial Sequence
  Guide RNA
acuccauuuauguuaucuacag

SEQ ID NO: 17291 - RNA, 22 nt, Artificial Sequence
  Guide RNA
acuccauuuauguuuucuacag

SEQ ID NO: 17292 - RNA, 22 nt, Artificial Sequence
  Guide RNA
acugaugcuguagaaaacauaa

SEQ ID NO: 17293 - RNA, 22 nt, Artificial Sequence
  Guide RNA
acugaugcuguagauaacauaa

SEQ ID NO: 17294 - RNA, 22 nt, Artificial Sequence
  Guide RNA
agagacuaacuccauuuauguu

SEQ ID NO: 17295 - RNA, 22 nt, Artificial Sequence
  Guide RNA
auagagacuaacuccauuuaug

SEQ ID NO: 17296 - RNA, 22 nt, Artificial Sequence
  Guide RNA
augcuauauuuacugaugcugu

SEQ ID NO: 17297 - RNA, 22 nt, Artificial Sequence
  Guide RNA
augcuguagaaaacauaaaugg

SEQ ID NO: 17298 - RNA, 22 nt, Artificial Sequence
  Guide RNA
augcuguagauaacauaaaugg

SEQ ID NO: 17299 - RNA, 22 nt, Artificial Sequence
  Guide RNA
auguuaucuacagcaucaguaa

SEQ ID NO: 17300 - RNA, 22 nt, Artificial Sequence
  Guide RNA
auguuuucuacagcaucaguaa

SEQ ID NO: 17301 - RNA, 22 nt, Artificial Sequence
  Guide RNA
auuuacugaugcuguagaaaac

SEQ ID NO: 17302 - RNA, 22 nt, Artificial Sequence
  Guide RNA
auuuacugaugcuguagauaac

SEQ ID NO: 17303 - RNA, 22 nt, Artificial Sequence
  Guide RNA
cauuuauguuaucuacagcauc

SEQ ID NO: 17304 - RNA, 22 nt, Artificial Sequence
  Guide RNA
cauuuauguuuucuacagcauc

SEQ ID NO: 17305 - RNA, 22 nt, Artificial Sequence
  Guide RNA
ccauuuauguuaucuacagcau

SEQ ID NO: 17306 - RNA, 22 nt, Artificial Sequence
  Guide RNA
ccauuuauguuuucuacagcau

SEQ ID NO: 17307 - RNA, 22 nt, Artificial Sequence
  Guide RNA
cuauauuuacugaugcuguaga

SEQ ID NO: 17308 - RNA, 22 nt, Artificial Sequence
  Guide RNA
cuccauuuauguuaucuacagc

SEQ ID NO: 17309 - RNA, 22 nt, Artificial Sequence
  Guide RNA
cuccauuuauguuuucuacagc

SEQ ID NO: 17310 - RNA, 22 nt, Artificial Sequence
  Guide RNA
cugaugcuguagaaaacauaaa

SEQ ID NO: 17311 - RNA, 22 nt, Artificial Sequence
  Guide RNA
cugaugcuguagauaacauaaa

SEQ ID NO: 17312 - RNA, 22 nt, Artificial Sequence
  Guide RNA
cuguagaaaacauaaauggagu

SEQ ID NO: 17313 - RNA, 22 nt, Artificial Sequence
  Guide RNA
cuguagauaacauaaauggagu

SEQ ID NO: 17314 - RNA, 22 nt, Artificial Sequence
  Guide RNA
gaaaacauaaauggaguuaguc

SEQ ID NO: 17315 - RNA, 22 nt, Artificial Sequence
  Guide RNA
gacuaacuccauuuauguuauc

SEQ ID NO: 17316 - RNA, 22 nt, Artificial Sequence
  Guide RNA
gacuaacuccauuuauguuuuc

SEQ ID NO: 17317 - RNA, 22 nt, Artificial Sequence
  Guide RNA
gagacuaacuccauuuauguua

SEQ ID NO: 17318 - RNA, 22 nt, Artificial Sequence
  Guide RNA
gagacuaacuccauuuauguuu

SEQ ID NO: 17319 - RNA, 22 nt, Artificial Sequence
  Guide RNA
gauaacauaaauggaguuaguc

SEQ ID NO: 17320 - RNA, 22 nt, Artificial Sequence
  Guide RNA
gaugcuguagaaaacauaaaug

SEQ ID NO: 17321 - RNA, 22 nt, Artificial Sequence
  Guide RNA
gaugcuguagauaacauaaaug

SEQ ID NO: 17322 - RNA, 22 nt, Artificial Sequence
  Guide RNA
gcuauauuuacugaugcuguag

SEQ ID NO: 17323 - RNA, 22 nt, Artificial Sequence
  Guide RNA
gcuguagaaaacauaaauggag

SEQ ID NO: 17324 - RNA, 22 nt, Artificial Sequence
  Guide RNA
gcuguagauaacauaaauggag

SEQ ID NO: 17325 - RNA, 22 nt, Artificial Sequence
  Guide RNA
guuaucuacagcaucaguaaau

SEQ ID NO: 17326 - RNA, 22 nt, Artificial Sequence
  Guide RNA
guuuucuacagcaucaguaaau

SEQ ID NO: 17327 - RNA, 22 nt, Artificial Sequence
  Guide RNA
uacugaugcuguagaaaacaua

SEQ ID NO: 17328 - RNA, 22 nt, Artificial Sequence
  Guide RNA
uacugaugcuguagauaacaua

SEQ ID NO: 17329 - RNA, 22 nt, Artificial Sequence
  Guide RNA
uagagacuaacuccauuuaugu

SEQ ID NO: 17330 - RNA, 22 nt, Artificial Sequence
  Guide RNA
uauguuaucuacagcaucagua

SEQ ID NO: 17331 - RNA, 22 nt, Artificial Sequence
  Guide RNA
uauguuuucuacagcaucagua

SEQ ID NO: 17332 - RNA, 22 nt, Artificial Sequence
  Guide RNA
uccauuuauguuaucuacagca

SEQ ID NO: 17333 - RNA, 22 nt, Artificial Sequence
  Guide RNA
uccauuuauguuuucuacagca

SEQ ID NO: 17334 - RNA, 22 nt, Artificial Sequence
  Guide RNA
ugcuauauuuacugaugcugua

SEQ ID NO: 17335 - RNA, 22 nt, Artificial Sequence
  Guide RNA
ugcuguagaaaacauaaaugga

SEQ ID NO: 17336 - RNA, 22 nt, Artificial Sequence
  Guide RNA
ugcuguagauaacauaaaugga

SEQ ID NO: 17337 - RNA, 22 nt, Artificial Sequence
  Guide RNA
uguuaucuacagcaucaguaaa

SEQ ID NO: 17338 - RNA, 22 nt, Artificial Sequence
  Guide RNA
uguuuucuacagcaucaguaaa

SEQ ID NO: 17339 - RNA, 22 nt, Artificial Sequence
  Guide RNA
uuacugaugcuguagaaaacau

SEQ ID NO: 17340 - RNA, 22 nt, Artificial Sequence
  Guide RNA
uuacugaugcuguagauaacau

SEQ ID NO: 17341 - RNA, 22 nt, Artificial Sequence
  Guide RNA
uuauguuaucuacagcaucagu

SEQ ID NO: 17342 - RNA, 22 nt, Artificial Sequence
  Guide RNA
uuauguuuucuacagcaucagu

SEQ ID NO: 17343 - RNA, 22 nt, Artificial Sequence
  Guide RNA
uuuacugaugcuguagaaaaca

SEQ ID NO: 17344 - RNA, 22 nt, Artificial Sequence
  Guide RNA
uuuacugaugcuguagauaaca

SEQ ID NO: 17345 - RNA, 22 nt, Artificial Sequence
  Guide RNA
uuuauguuaucuacagcaucag

SEQ ID NO: 17346 - RNA, 22 nt, Artificial Sequence
  Guide RNA
uuuauguuuucuacagcaucag

SEQ ID NO: 17347 - RNA, 20 nt, Artificial Sequence
  Guide RNA
aaaaagcaagaaggaugugu

SEQ ID NO: 17348 - RNA, 20 nt, Artificial Sequence
  Guide RNA
aaaaagcaaggaggaugugu

SEQ ID NO: 17349 - RNA, 20 nt, Artificial Sequence
  Guide RNA
aaaagcaagaaggauguguu

SEQ ID NO: 17350 - RNA, 20 nt, Artificial Sequence
  Guide RNA
aaaagcaaggaggauguguu

SEQ ID NO: 17351 - RNA, 20 nt, Artificial Sequence
  Guide RNA
aaagcaagaaggauguguua

SEQ ID NO: 17352 - RNA, 20 nt, Artificial Sequence
  Guide RNA
aaagcaaggaggauguguua

SEQ ID NO: 17353 - RNA, 20 nt, Artificial Sequence
  Guide RNA
aacacauccuccuugcuuuu

SEQ ID NO: 17354 - RNA, 20 nt, Artificial Sequence
  Guide RNA
aacacauccuucuugcuuuu

SEQ ID NO: 17355 - RNA, 20 nt, Artificial Sequence
  Guide RNA
aagaaggauguguuaucauc

SEQ ID NO: 17356 - RNA, 20 nt, Artificial Sequence
  Guide RNA
aagcaagaaggauguguuau

SEQ ID NO: 17357 - RNA, 20 nt, Artificial Sequence
  Guide RNA
aagcaaggaggauguguuau

SEQ ID NO: 17358 - RNA, 20 nt, Artificial Sequence
  Guide RNA
aaggaggauguguuaucauc

SEQ ID NO: 17359 - RNA, 20 nt, Artificial Sequence
  Guide RNA
acacauccuccuugcuuuuu

SEQ ID NO: 17360 - RNA, 20 nt, Artificial Sequence
  Guide RNA
acacauccuucuugcuuuuu

SEQ ID NO: 17361 - RNA, 20 nt, Artificial Sequence
  Guide RNA
acauccuccuugcuuuuucc

SEQ ID NO: 17362 - RNA, 20 nt, Artificial Sequence
  Guide RNA
acauccuucuugcuuuuucc

SEQ ID NO: 17363 - RNA, 20 nt, Artificial Sequence
  Guide RNA
agaaggauguguuaucauca

SEQ ID NO: 17364 - RNA, 20 nt, Artificial Sequence
  Guide RNA
agaggcaggaaaaagcaaga

SEQ ID NO: 17365 - RNA, 20 nt, Artificial Sequence
  Guide RNA
agaggcaggaaaaagcaagg

SEQ ID NO: 17366 - RNA, 20 nt, Artificial Sequence
  Guide RNA
agcaagaaggauguguuauc

SEQ ID NO: 17367 - RNA, 20 nt, Artificial Sequence
  Guide RNA
agcaaggaggauguguuauc

SEQ ID NO: 17368 - RNA, 20 nt, Artificial Sequence
  Guide RNA
aggaaaaagcaagaaggaug

SEQ ID NO: 17369 - RNA, 20 nt, Artificial Sequence
  Guide RNA
aggaaaaagcaaggaggaug

SEQ ID NO: 17370 - RNA, 20 nt, Artificial Sequence
  Guide RNA
aggaggauguguuaucauca

SEQ ID NO: 17371 - RNA, 20 nt, Artificial Sequence
  Guide RNA
aggcaggaaaaagcaagaag

SEQ ID NO: 17372 - RNA, 20 nt, Artificial Sequence
  Guide RNA
aggcaggaaaaagcaaggag

SEQ ID NO: 17373 - RNA, 20 nt, Artificial Sequence
  Guide RNA
auaacacauccuccuugcuu

SEQ ID NO: 17374 - RNA, 20 nt, Artificial Sequence
  Guide RNA
auaacacauccuucuugcuu

SEQ ID NO: 17375 - RNA, 20 nt, Artificial Sequence
  Guide RNA
auccuccuugcuuuuuccug

SEQ ID NO: 17376 - RNA, 20 nt, Artificial Sequence
  Guide RNA
auccuucuugcuuuuuccug

SEQ ID NO: 17377 - RNA, 20 nt, Artificial Sequence
  Guide RNA
augauaacacauccuccuug

SEQ ID NO: 17378 - RNA, 20 nt, Artificial Sequence
  Guide RNA
augauaacacauccuucuug

SEQ ID NO: 17379 - RNA, 20 nt, Artificial Sequence
  Guide RNA
augaugauaacacauccucc

SEQ ID NO: 17380 - RNA, 20 nt, Artificial Sequence
  Guide RNA
augaugauaacacauccuuc

SEQ ID NO: 17381 - RNA, 20 nt, Artificial Sequence
  Guide RNA
caagaaggauguguuaucau

SEQ ID NO: 17382 - RNA, 20 nt, Artificial Sequence
  Guide RNA
caaggaggauguguuaucau

SEQ ID NO: 17383 - RNA, 20 nt, Artificial Sequence
  Guide RNA
cacauccuccuugcuuuuuc

SEQ ID NO: 17384 - RNA, 20 nt, Artificial Sequence
  Guide RNA
cacauccuucuugcuuuuuc

SEQ ID NO: 17385 - RNA, 20 nt, Artificial Sequence
  Guide RNA
cagaggcaggaaaaagcaag

SEQ ID NO: 17386 - RNA, 20 nt, Artificial Sequence
  Guide RNA
caggaaaaagcaagaaggau

SEQ ID NO: 17387 - RNA, 20 nt, Artificial Sequence
  Guide RNA
caggaaaaagcaaggaggau

SEQ ID NO: 17388 - RNA, 20 nt, Artificial Sequence
  Guide RNA
cauccuccuugcuuuuuccu

SEQ ID NO: 17389 - RNA, 20 nt, Artificial Sequence
  Guide RNA
cauccuucuugcuuuuuccu

SEQ ID NO: 17390 - RNA, 20 nt, Artificial Sequence
  Guide RNA
caugaugauaacacauccuc

SEQ ID NO: 17391 - RNA, 20 nt, Artificial Sequence
  Guide RNA
caugaugauaacacauccuu

SEQ ID NO: 17392 - RNA, 20 nt, Artificial Sequence
  Guide RNA
ccagaggcaggaaaaagcaa

SEQ ID NO: 17393 - RNA, 20 nt, Artificial Sequence
  Guide RNA
ccuccuugcuuuuuccugcc

SEQ ID NO: 17394 - RNA, 20 nt, Artificial Sequence
  Guide RNA
ccuucuugcuuuuuccugcc

SEQ ID NO: 17395 - RNA, 20 nt, Artificial Sequence
  Guide RNA
cuccuugcuuuuuccugccu

SEQ ID NO: 17396 - RNA, 20 nt, Artificial Sequence
  Guide RNA
cuucuugcuuuuuccugccu

SEQ ID NO: 17397 - RNA, 20 nt, Artificial Sequence
  Guide RNA
gaaaaagcaagaaggaugug

SEQ ID NO: 17398 - RNA, 20 nt, Artificial Sequence
  Guide RNA
gaaaaagcaaggaggaugug

SEQ ID NO: 17399 - RNA, 20 nt, Artificial Sequence
  Guide RNA
gaaggauguguuaucaucau

SEQ ID NO: 17400 - RNA, 20 nt, Artificial Sequence
  Guide RNA
gaggcaggaaaaagcaagaa

SEQ ID NO: 17401 - RNA, 20 nt, Artificial Sequence
  Guide RNA
gaggcaggaaaaagcaagga

SEQ ID NO: 17402 - RNA, 20 nt, Artificial Sequence
  Guide RNA
gauaacacauccuccuugcu

SEQ ID NO: 17403 - RNA, 20 nt, Artificial Sequence
  Guide RNA
gauaacacauccuucuugcu

SEQ ID NO: 17404 - RNA, 20 nt, Artificial Sequence
  Guide RNA
gaugauaacacauccuccuu

SEQ ID NO: 17405 - RNA, 20 nt, Artificial Sequence
  Guide RNA
gaugauaacacauccuucuu

SEQ ID NO: 17406 - RNA, 20 nt, Artificial Sequence
  Guide RNA
gcaagaaggauguguuauca

SEQ ID NO: 17407 - RNA, 20 nt, Artificial Sequence
  Guide RNA
gcaaggaggauguguuauca

SEQ ID NO: 17408 - RNA, 20 nt, Artificial Sequence
  Guide RNA
gcaggaaaaagcaagaagga

SEQ ID NO: 17409 - RNA, 20 nt, Artificial Sequence
  Guide RNA
gcaggaaaaagcaaggagga

SEQ ID NO: 17410 - RNA, 20 nt, Artificial Sequence
  Guide RNA
gccagaggcaggaaaaagca

SEQ ID NO: 17411 - RNA, 20 nt, Artificial Sequence
  Guide RNA
ggaaaaagcaagaaggaugu

SEQ ID NO: 17412 - RNA, 20 nt, Artificial Sequence
  Guide RNA
ggaaaaagcaaggaggaugu

SEQ ID NO: 17413 - RNA, 20 nt, Artificial Sequence
  Guide RNA
ggaggauguguuaucaucau

SEQ ID NO: 17414 - RNA, 20 nt, Artificial Sequence
  Guide RNA
ggcaggaaaaagcaagaagg

SEQ ID NO: 17415 - RNA, 20 nt, Artificial Sequence
  Guide RNA
ggcaggaaaaagcaaggagg

SEQ ID NO: 17416 - RNA, 20 nt, Artificial Sequence
  Guide RNA
ggucaugaugauaacacauc

SEQ ID NO: 17417 - RNA, 20 nt, Artificial Sequence
  Guide RNA
gucaugaugauaacacaucc

SEQ ID NO: 17418 - RNA, 20 nt, Artificial Sequence
  Guide RNA
uaacacauccuccuugcuuu

SEQ ID NO: 17419 - RNA, 20 nt, Artificial Sequence
  Guide RNA
uaacacauccuucuugcuuu

SEQ ID NO: 17420 - RNA, 20 nt, Artificial Sequence
  Guide RNA
ucaugaugauaacacauccu

SEQ ID NO: 17421 - RNA, 20 nt, Artificial Sequence
  Guide RNA
uccuccuugcuuuuuccugc

SEQ ID NO: 17422 - RNA, 20 nt, Artificial Sequence
  Guide RNA
uccuucuugcuuuuuccugc

SEQ ID NO: 17423 - RNA, 20 nt, Artificial Sequence
  Guide RNA
uccuugcuuuuuccugccuc

SEQ ID NO: 17424 - RNA, 20 nt, Artificial Sequence
  Guide RNA
ugauaacacauccuccuugc

SEQ ID NO: 17425 - RNA, 20 nt, Artificial Sequence
  Guide RNA
ugauaacacauccuucuugc

SEQ ID NO: 17426 - RNA, 20 nt, Artificial Sequence
  Guide RNA
ugaugauaacacauccuccu

SEQ ID NO: 17427 - RNA, 20 nt, Artificial Sequence
  Guide RNA
ugaugauaacacauccuucu

SEQ ID NO: 17428 - RNA, 20 nt, Artificial Sequence
  Guide RNA
ugccagaggcaggaaaaagc

SEQ ID NO: 17429 - RNA, 20 nt, Artificial Sequence
  Guide RNA
uggucaugaugauaacacau

SEQ ID NO: 17430 - RNA, 20 nt, Artificial Sequence
  Guide RNA
uucuugcuuuuuccugccuc

SEQ ID NO: 17431 - RNA, 21 nt, Artificial Sequence
  Guide RNA
aaaaagcaagaaggauguguu

SEQ ID NO: 17432 - RNA, 21 nt, Artificial Sequence
  Guide RNA
aaaaagcaaggaggauguguu

SEQ ID NO: 17433 - RNA, 21 nt, Artificial Sequence
  Guide RNA
aaaagcaagaaggauguguua

SEQ ID NO: 17434 - RNA, 21 nt, Artificial Sequence
  Guide RNA
aaaagcaaggaggauguguua

SEQ ID NO: 17435 - RNA, 21 nt, Artificial Sequence
  Guide RNA
aaagcaagaaggauguguuau

SEQ ID NO: 17436 - RNA, 21 nt, Artificial Sequence
  Guide RNA
aaagcaaggaggauguguuau

SEQ ID NO: 17437 - RNA, 21 nt, Artificial Sequence
  Guide RNA
aacacauccuccuugcuuuuu

SEQ ID NO: 17438 - RNA, 21 nt, Artificial Sequence
  Guide RNA
aacacauccuucuugcuuuuu

SEQ ID NO: 17439 - RNA, 21 nt, Artificial Sequence
  Guide RNA
aagaaggauguguuaucauca

SEQ ID NO: 17440 - RNA, 21 nt, Artificial Sequence
  Guide RNA
aagcaagaaggauguguuauc

SEQ ID NO: 17441 - RNA, 21 nt, Artificial Sequence
  Guide RNA
aagcaaggaggauguguuauc

SEQ ID NO: 17442 - RNA, 21 nt, Artificial Sequence
  Guide RNA
aaggaggauguguuaucauca

SEQ ID NO: 17443 - RNA, 21 nt, Artificial Sequence
  Guide RNA
acacauccuccuugcuuuuuc

SEQ ID NO: 17444 - RNA, 21 nt, Artificial Sequence
  Guide RNA
acacauccuucuugcuuuuuc

SEQ ID NO: 17445 - RNA, 21 nt, Artificial Sequence
  Guide RNA
acauccuccuugcuuuuuccu

SEQ ID NO: 17446 - RNA, 21 nt, Artificial Sequence
  Guide RNA
acauccuucuugcuuuuuccu

SEQ ID NO: 17447 - RNA, 21 nt, Artificial Sequence
  Guide RNA
agaaggauguguuaucaucau

SEQ ID NO: 17448 - RNA, 21 nt, Artificial Sequence
  Guide RNA
agaggcaggaaaaagcaagaa

SEQ ID NO: 17449 - RNA, 21 nt, Artificial Sequence
  Guide RNA
agaggcaggaaaaagcaagga

SEQ ID NO: 17450 - RNA, 21 nt, Artificial Sequence
  Guide RNA
agcaagaaggauguguuauca

SEQ ID NO: 17451 - RNA, 21 nt, Artificial Sequence
  Guide RNA
agcaaggaggauguguuauca

SEQ ID NO: 17452 - RNA, 21 nt, Artificial Sequence
  Guide RNA
aggaaaaagcaagaaggaugu

SEQ ID NO: 17453 - RNA, 21 nt, Artificial Sequence
  Guide RNA
aggaaaaagcaaggaggaugu

SEQ ID NO: 17454 - RNA, 21 nt, Artificial Sequence
  Guide RNA
aggaggauguguuaucaucau

SEQ ID NO: 17455 - RNA, 21 nt, Artificial Sequence
  Guide RNA
aggcaggaaaaagcaagaagg

SEQ ID NO: 17456 - RNA, 21 nt, Artificial Sequence
  Guide RNA
aggcaggaaaaagcaaggagg

SEQ ID NO: 17457 - RNA, 21 nt, Artificial Sequence
  Guide RNA
auaacacauccuccuugcuuu

SEQ ID NO: 17458 - RNA, 21 nt, Artificial Sequence
  Guide RNA
auaacacauccuucuugcuuu

SEQ ID NO: 17459 - RNA, 21 nt, Artificial Sequence
  Guide RNA
auccuccuugcuuuuuccugc

SEQ ID NO: 17460 - RNA, 21 nt, Artificial Sequence
  Guide RNA
auccuucuugcuuuuuccugc

SEQ ID NO: 17461 - RNA, 21 nt, Artificial Sequence
  Guide RNA
augauaacacauccuccuugc

SEQ ID NO: 17462 - RNA, 21 nt, Artificial Sequence
  Guide RNA
augauaacacauccuucuugc

SEQ ID NO: 17463 - RNA, 21 nt, Artificial Sequence
  Guide RNA
augaugauaacacauccuccu

SEQ ID NO: 17464 - RNA, 21 nt, Artificial Sequence
  Guide RNA
augaugauaacacauccuucu

SEQ ID NO: 17465 - RNA, 21 nt, Artificial Sequence
  Guide RNA
augccagaggcaggaaaaagc

SEQ ID NO: 17466 - RNA, 21 nt, Artificial Sequence
  Guide RNA
caagaaggauguguuaucauc

SEQ ID NO: 17467 - RNA, 21 nt, Artificial Sequence
  Guide RNA
caaggaggauguguuaucauc

SEQ ID NO: 17468 - RNA, 21 nt, Artificial Sequence
  Guide RNA
cacauccuccuugcuuuuucc

SEQ ID NO: 17469 - RNA, 21 nt, Artificial Sequence
  Guide RNA
cacauccuucuugcuuuuucc

SEQ ID NO: 17470 - RNA, 21 nt, Artificial Sequence
  Guide RNA
cagaggcaggaaaaagcaaga

SEQ ID NO: 17471 - RNA, 21 nt, Artificial Sequence
  Guide RNA
cagaggcaggaaaaagcaagg

SEQ ID NO: 17472 - RNA, 21 nt, Artificial Sequence
  Guide RNA
caggaaaaagcaagaaggaug

SEQ ID NO: 17473 - RNA, 21 nt, Artificial Sequence
  Guide RNA
caggaaaaagcaaggaggaug

SEQ ID NO: 17474 - RNA, 21 nt, Artificial Sequence
  Guide RNA
cauccuccuugcuuuuuccug

SEQ ID NO: 17475 - RNA, 21 nt, Artificial Sequence
  Guide RNA
cauccuucuugcuuuuuccug

SEQ ID NO: 17476 - RNA, 21 nt, Artificial Sequence
  Guide RNA
caugaugauaacacauccucc

SEQ ID NO: 17477 - RNA, 21 nt, Artificial Sequence
  Guide RNA
caugaugauaacacauccuuc

SEQ ID NO: 17478 - RNA, 21 nt, Artificial Sequence
  Guide RNA
ccagaggcaggaaaaagcaag

SEQ ID NO: 17479 - RNA, 21 nt, Artificial Sequence
  Guide RNA
ccuccuugcuuuuuccugccu

SEQ ID NO: 17480 - RNA, 21 nt, Artificial Sequence
  Guide RNA
ccuucuugcuuuuuccugccu

SEQ ID NO: 17481 - RNA, 21 nt, Artificial Sequence
  Guide RNA
cuccuugcuuuuuccugccuc

SEQ ID NO: 17482 - RNA, 21 nt, Artificial Sequence
  Guide RNA
cuucuugcuuuuuccugccuc

SEQ ID NO: 17483 - RNA, 21 nt, Artificial Sequence
  Guide RNA
gaaaaagcaagaaggaugugu

SEQ ID NO: 17484 - RNA, 21 nt, Artificial Sequence
  Guide RNA
gaaaaagcaaggaggaugugu

SEQ ID NO: 17485 - RNA, 21 nt, Artificial Sequence
  Guide RNA
gaaggauguguuaucaucaug

SEQ ID NO: 17486 - RNA, 21 nt, Artificial Sequence
  Guide RNA
gaggcaggaaaaagcaagaag

SEQ ID NO: 17487 - RNA, 21 nt, Artificial Sequence
  Guide RNA
gaggcaggaaaaagcaaggag

SEQ ID NO: 17488 - RNA, 21 nt, Artificial Sequence
  Guide RNA
gauaacacauccuccuugcuu

SEQ ID NO: 17489 - RNA, 21 nt, Artificial Sequence
  Guide RNA
gauaacacauccuucuugcuu

SEQ ID NO: 17490 - RNA, 21 nt, Artificial Sequence
  Guide RNA
gaugauaacacauccuccuug

SEQ ID NO: 17491 - RNA, 21 nt, Artificial Sequence
  Guide RNA
gaugauaacacauccuucuug

SEQ ID NO: 17492 - RNA, 21 nt, Artificial Sequence
  Guide RNA
gcaagaaggauguguuaucau

SEQ ID NO: 17493 - RNA, 21 nt, Artificial Sequence
  Guide RNA
gcaaggaggauguguuaucau

SEQ ID NO: 17494 - RNA, 21 nt, Artificial Sequence
  Guide RNA
gcaggaaaaagcaagaaggau

SEQ ID NO: 17495 - RNA, 21 nt, Artificial Sequence
  Guide RNA
gcaggaaaaagcaaggaggau

SEQ ID NO: 17496 - RNA, 21 nt, Artificial Sequence
  Guide RNA
gccagaggcaggaaaaagcaa

SEQ ID NO: 17497 - RNA, 21 nt, Artificial Sequence
  Guide RNA
ggaaaaagcaagaaggaugug

SEQ ID NO: 17498 - RNA, 21 nt, Artificial Sequence
  Guide RNA
ggaaaaagcaaggaggaugug

SEQ ID NO: 17499 - RNA, 21 nt, Artificial Sequence
  Guide RNA
ggaggauguguuaucaucaug

SEQ ID NO: 17500 - RNA, 21 nt, Artificial Sequence
  Guide RNA
ggcaggaaaaagcaagaagga

SEQ ID NO: 17501 - RNA, 21 nt, Artificial Sequence
  Guide RNA
ggcaggaaaaagcaaggagga

SEQ ID NO: 17502 - RNA, 21 nt, Artificial Sequence
  Guide RNA
ggucaugaugauaacacaucc

SEQ ID NO: 17503 - RNA, 21 nt, Artificial Sequence
  Guide RNA
gucaugaugauaacacauccu

SEQ ID NO: 17504 - RNA, 21 nt, Artificial Sequence
  Guide RNA
uaacacauccuccuugcuuuu

SEQ ID NO: 17505 - RNA, 21 nt, Artificial Sequence
  Guide RNA
uaacacauccuucuugcuuuu

SEQ ID NO: 17506 - RNA, 21 nt, Artificial Sequence
  Guide RNA
ucaugaugauaacacauccuc

SEQ ID NO: 17507 - RNA, 21 nt, Artificial Sequence
  Guide RNA
ucaugaugauaacacauccuu

SEQ ID NO: 17508 - RNA, 21 nt, Artificial Sequence
  Guide RNA
uccuccuugcuuuuuccugcc

SEQ ID NO: 17509 - RNA, 21 nt, Artificial Sequence
  Guide RNA
uccuucuugcuuuuuccugcc

SEQ ID NO: 17510 - RNA, 21 nt, Artificial Sequence
  Guide RNA
uccuugcuuuuuccugccucu

SEQ ID NO: 17511 - RNA, 21 nt, Artificial Sequence
  Guide RNA
ugauaacacauccuccuugcu

SEQ ID NO: 17512 - RNA, 21 nt, Artificial Sequence
  Guide RNA
ugauaacacauccuucuugcu

SEQ ID NO: 17513 - RNA, 21 nt, Artificial Sequence
  Guide RNA
ugaugauaacacauccuccuu

SEQ ID NO: 17514 - RNA, 21 nt, Artificial Sequence
  Guide RNA
ugaugauaacacauccuucuu

SEQ ID NO: 17515 - RNA, 21 nt, Artificial Sequence
  Guide RNA
ugccagaggcaggaaaaagca

SEQ ID NO: 17516 - RNA, 21 nt, Artificial Sequence
  Guide RNA
uggucaugaugauaacacauc

SEQ ID NO: 17517 - RNA, 21 nt, Artificial Sequence
  Guide RNA
uucuugcuuuuuccugccucu

SEQ ID NO: 17518 - RNA, 21 nt, Artificial Sequence
  Guide RNA
uuggucaugaugauaacacau

SEQ ID NO: 17519 - RNA, 22 nt, Artificial Sequence
  Guide RNA
aaaaagcaagaaggauguguua

SEQ ID NO: 17520 - RNA, 22 nt, Artificial Sequence
  Guide RNA
aaaaagcaaggaggauguguua

SEQ ID NO: 17521 - RNA, 22 nt, Artificial Sequence
  Guide RNA
aaaagcaagaaggauguguuau

SEQ ID NO: 17522 - RNA, 22 nt, Artificial Sequence
  Guide RNA
aaaagcaaggaggauguguuau

SEQ ID NO: 17523 - RNA, 22 nt, Artificial Sequence
  Guide RNA
aaagcaagaaggauguguuauc

SEQ ID NO: 17524 - RNA, 22 nt, Artificial Sequence
  Guide RNA
aaagcaaggaggauguguuauc

SEQ ID NO: 17525 - RNA, 22 nt, Artificial Sequence
  Guide RNA
aacacauccuccuugcuuuuuc

SEQ ID NO: 17526 - RNA, 22 nt, Artificial Sequence
  Guide RNA
aacacauccuucuugcuuuuuc

SEQ ID NO: 17527 - RNA, 22 nt, Artificial Sequence
  Guide RNA
aagaaggauguguuaucaucau

SEQ ID NO: 17528 - RNA, 22 nt, Artificial Sequence
  Guide RNA
aagcaagaaggauguguuauca

SEQ ID NO: 17529 - RNA, 22 nt, Artificial Sequence
  Guide RNA
aagcaaggaggauguguuauca

SEQ ID NO: 17530 - RNA, 22 nt, Artificial Sequence
  Guide RNA
aaggaggauguguuaucaucau

SEQ ID NO: 17531 - RNA, 22 nt, Artificial Sequence
  Guide RNA
aaugccagaggcaggaaaaagc

SEQ ID NO: 17532 - RNA, 22 nt, Artificial Sequence
  Guide RNA
acacauccuccuugcuuuuucc

SEQ ID NO: 17533 - RNA, 22 nt, Artificial Sequence
  Guide RNA
acacauccuucuugcuuuuucc

SEQ ID NO: 17534 - RNA, 22 nt, Artificial Sequence
  Guide RNA
acauccuccuugcuuuuuccug

SEQ ID NO: 17535 - RNA, 22 nt, Artificial Sequence
  Guide RNA
acauccuucuugcuuuuuccug

SEQ ID NO: 17536 - RNA, 22 nt, Artificial Sequence
  Guide RNA
agaaggauguguuaucaucaug

SEQ ID NO: 17537 - RNA, 22 nt, Artificial Sequence
  Guide RNA
agaggcaggaaaaagcaagaag

SEQ ID NO: 17538 - RNA, 22 nt, Artificial Sequence
  Guide RNA
agaggcaggaaaaagcaaggag

SEQ ID NO: 17539 - RNA, 22 nt, Artificial Sequence
  Guide RNA
agcaagaaggauguguuaucau

SEQ ID NO: 17540 - RNA, 22 nt, Artificial Sequence
  Guide RNA
agcaaggaggauguguuaucau

SEQ ID NO: 17541 - RNA, 22 nt, Artificial Sequence
  Guide RNA
aggaaaaagcaagaaggaugug

SEQ ID NO: 17542 - RNA, 22 nt, Artificial Sequence
  Guide RNA
aggaaaaagcaaggaggaugug

SEQ ID NO: 17543 - RNA, 22 nt, Artificial Sequence
  Guide RNA
aggaggauguguuaucaucaug

SEQ ID NO: 17544 - RNA, 22 nt, Artificial Sequence
  Guide RNA
aggcaggaaaaagcaagaagga

SEQ ID NO: 17545 - RNA, 22 nt, Artificial Sequence
  Guide RNA
aggcaggaaaaagcaaggagga

SEQ ID NO: 17546 - RNA, 22 nt, Artificial Sequence
  Guide RNA
auaacacauccuccuugcuuuu

SEQ ID NO: 17547 - RNA, 22 nt, Artificial Sequence
  Guide RNA
auaacacauccuucuugcuuuu

SEQ ID NO: 17548 - RNA, 22 nt, Artificial Sequence
  Guide RNA
auccuccuugcuuuuuccugcc

SEQ ID NO: 17549 - RNA, 22 nt, Artificial Sequence
  Guide RNA
auccuucuugcuuuuuccugcc

SEQ ID NO: 17550 - RNA, 22 nt, Artificial Sequence
  Guide RNA
augauaacacauccuccuugcu

SEQ ID NO: 17551 - RNA, 22 nt, Artificial Sequence
  Guide RNA
augauaacacauccuucuugcu

SEQ ID NO: 17552 - RNA, 22 nt, Artificial Sequence
  Guide RNA
augaugauaacacauccuccuu

SEQ ID NO: 17553 - RNA, 22 nt, Artificial Sequence
  Guide RNA
augaugauaacacauccuucuu

SEQ ID NO: 17554 - RNA, 22 nt, Artificial Sequence
  Guide RNA
augccagaggcaggaaaaagca

SEQ ID NO: 17555 - RNA, 22 nt, Artificial Sequence
  Guide RNA
caagaaggauguguuaucauca

SEQ ID NO: 17556 - RNA, 22 nt, Artificial Sequence
  Guide RNA
caaggaggauguguuaucauca

SEQ ID NO: 17557 - RNA, 22 nt, Artificial Sequence
  Guide RNA
cacauccuccuugcuuuuuccu

SEQ ID NO: 17558 - RNA, 22 nt, Artificial Sequence
  Guide RNA
cacauccuucuugcuuuuuccu

SEQ ID NO: 17559 - RNA, 22 nt, Artificial Sequence
  Guide RNA
cagaggcaggaaaaagcaagaa

SEQ ID NO: 17560 - RNA, 22 nt, Artificial Sequence
  Guide RNA
cagaggcaggaaaaagcaagga

SEQ ID NO: 17561 - RNA, 22 nt, Artificial Sequence
  Guide RNA
caggaaaaagcaagaaggaugu

SEQ ID NO: 17562 - RNA, 22 nt, Artificial Sequence
  Guide RNA
caggaaaaagcaaggaggaugu

SEQ ID NO: 17563 - RNA, 22 nt, Artificial Sequence
  Guide RNA
cauccuccuugcuuuuuccugc

SEQ ID NO: 17564 - RNA, 22 nt, Artificial Sequence
  Guide RNA
cauccuucuugcuuuuuccugc

SEQ ID NO: 17565 - RNA, 22 nt, Artificial Sequence
  Guide RNA
caugaugauaacacauccuccu

SEQ ID NO: 17566 - RNA, 22 nt, Artificial Sequence
  Guide RNA
caugaugauaacacauccuucu

SEQ ID NO: 17567 - RNA, 22 nt, Artificial Sequence
  Guide RNA
ccagaggcaggaaaaagcaaga

SEQ ID NO: 17568 - RNA, 22 nt, Artificial Sequence
  Guide RNA
ccagaggcaggaaaaagcaagg

SEQ ID NO: 17569 - RNA, 22 nt, Artificial Sequence
  Guide RNA
ccuccuugcuuuuuccugccuc

SEQ ID NO: 17570 - RNA, 22 nt, Artificial Sequence
  Guide RNA
ccuucuugcuuuuuccugccuc

SEQ ID NO: 17571 - RNA, 22 nt, Artificial Sequence
  Guide RNA
cuccuugcuuuuuccugccucu

SEQ ID NO: 17572 - RNA, 22 nt, Artificial Sequence
  Guide RNA
cuucuugcuuuuuccugccucu

SEQ ID NO: 17573 - RNA, 22 nt, Artificial Sequence
  Guide RNA
cuuggucaugaugauaacacau

SEQ ID NO: 17574 - RNA, 22 nt, Artificial Sequence
  Guide RNA
gaaaaagcaagaaggauguguu

SEQ ID NO: 17575 - RNA, 22 nt, Artificial Sequence
  Guide RNA
gaaaaagcaaggaggauguguu

SEQ ID NO: 17576 - RNA, 22 nt, Artificial Sequence
  Guide RNA
gaaggauguguuaucaucauga

SEQ ID NO: 17577 - RNA, 22 nt, Artificial Sequence
  Guide RNA
gaggcaggaaaaagcaagaagg

SEQ ID NO: 17578 - RNA, 22 nt, Artificial Sequence
  Guide RNA
gaggcaggaaaaagcaaggagg

SEQ ID NO: 17579 - RNA, 22 nt, Artificial Sequence
  Guide RNA
gauaacacauccuccuugcuuu

SEQ ID NO: 17580 - RNA, 22 nt, Artificial Sequence
  Guide RNA
gauaacacauccuucuugcuuu

SEQ ID NO: 17581 - RNA, 22 nt, Artificial Sequence
  Guide RNA
gaugauaacacauccuccuugc

SEQ ID NO: 17582 - RNA, 22 nt, Artificial Sequence
  Guide RNA
gaugauaacacauccuucuugc

SEQ ID NO: 17583 - RNA, 22 nt, Artificial Sequence
  Guide RNA
gcaagaaggauguguuaucauc

SEQ ID NO: 17584 - RNA, 22 nt, Artificial Sequence
  Guide RNA
gcaaggaggauguguuaucauc

SEQ ID NO: 17585 - RNA, 22 nt, Artificial Sequence
  Guide RNA
gcaggaaaaagcaagaaggaug

SEQ ID NO: 17586 - RNA, 22 nt, Artificial Sequence
  Guide RNA
gcaggaaaaagcaaggaggaug

SEQ ID NO: 17587 - RNA, 22 nt, Artificial Sequence
  Guide RNA
gccagaggcaggaaaaagcaag

SEQ ID NO: 17588 - RNA, 22 nt, Artificial Sequence
  Guide RNA
ggaaaaagcaagaaggaugugu

SEQ ID NO: 17589 - RNA, 22 nt, Artificial Sequence
  Guide RNA
ggaaaaagcaaggaggaugugu

SEQ ID NO: 17590 - RNA, 22 nt, Artificial Sequence
  Guide RNA
ggaggauguguuaucaucauga

SEQ ID NO: 17591 - RNA, 22 nt, Artificial Sequence
  Guide RNA
ggcaggaaaaagcaagaaggau

SEQ ID NO: 17592 - RNA, 22 nt, Artificial Sequence
  Guide RNA
ggcaggaaaaagcaaggaggau

SEQ ID NO: 17593 - RNA, 22 nt, Artificial Sequence
  Guide RNA
ggucaugaugauaacacauccu

SEQ ID NO: 17594 - RNA, 22 nt, Artificial Sequence
  Guide RNA
gucaugaugauaacacauccuc

SEQ ID NO: 17595 - RNA, 22 nt, Artificial Sequence
  Guide RNA
gucaugaugauaacacauccuu

SEQ ID NO: 17596 - RNA, 22 nt, Artificial Sequence
  Guide RNA
uaacacauccuccuugcuuuuu

SEQ ID NO: 17597 - RNA, 22 nt, Artificial Sequence
  Guide RNA
uaacacauccuucuugcuuuuu

SEQ ID NO: 17598 - RNA, 22 nt, Artificial Sequence
  Guide RNA
ucaugaugauaacacauccucc

SEQ ID NO: 17599 - RNA, 22 nt, Artificial Sequence
  Guide RNA
ucaugaugauaacacauccuuc

SEQ ID NO: 17600 - RNA, 22 nt, Artificial Sequence
  Guide RNA
uccuccuugcuuuuuccugccu

SEQ ID NO: 17601 - RNA, 22 nt, Artificial Sequence
  Guide RNA
uccuucuugcuuuuuccugccu

SEQ ID NO: 17602 - RNA, 22 nt, Artificial Sequence
  Guide RNA
uccuugcuuuuuccugccucug

SEQ ID NO: 17603 - RNA, 22 nt, Artificial Sequence
  Guide RNA
ugauaacacauccuccuugcuu

SEQ ID NO: 17604 - RNA, 22 nt, Artificial Sequence
  Guide RNA
ugauaacacauccuucuugcuu

SEQ ID NO: 17605 - RNA, 22 nt, Artificial Sequence
  Guide RNA
ugaugauaacacauccuccuug

SEQ ID NO: 17606 - RNA, 22 nt, Artificial Sequence
  Guide RNA
ugaugauaacacauccuucuug

SEQ ID NO: 17607 - RNA, 22 nt, Artificial Sequence
  Guide RNA
ugccagaggcaggaaaaagcaa

SEQ ID NO: 17608 - RNA, 22 nt, Artificial Sequence
  Guide RNA
uggucaugaugauaacacaucc

SEQ ID NO: 17609 - RNA, 22 nt, Artificial Sequence
  Guide RNA
uucuugcuuuuuccugccucug

SEQ ID NO: 17610 - RNA, 22 nt, Artificial Sequence
  Guide RNA
uuggucaugaugauaacacauc

SEQ ID NO: 17611 - RNA, 20 nt, Artificial Sequence
  Guide RNA
aaaugcucuaagcuaccaaa

SEQ ID NO: 17612 - RNA, 20 nt, Artificial Sequence
  Guide RNA
aaaugcucuaagcuaccaga

SEQ ID NO: 17613 - RNA, 20 nt, Artificial Sequence
  Guide RNA
aacucugguagcuuagagca

SEQ ID NO: 17614 - RNA, 20 nt, Artificial Sequence
  Guide RNA
aacuuugguagcuuagagca

SEQ ID NO: 17615 - RNA, 20 nt, Artificial Sequence
  Guide RNA
aagcuaccaaaguuauucug

SEQ ID NO: 17616 - RNA, 20 nt, Artificial Sequence
  Guide RNA
aagcuaccagaguuauucug

SEQ ID NO: 17617 - RNA, 20 nt, Artificial Sequence
  Guide RNA
aauaacucugguagcuuaga

SEQ ID NO: 17618 - RNA, 20 nt, Artificial Sequence
  Guide RNA
aauaacuuugguagcuuaga

SEQ ID NO: 17619 - RNA, 20 nt, Artificial Sequence
  Guide RNA
aaugcucuaagcuaccaaag

SEQ ID NO: 17620 - RNA, 20 nt, Artificial Sequence
  Guide RNA
aaugcucuaagcuaccagag

SEQ ID NO: 17621 - RNA, 20 nt, Artificial Sequence
  Guide RNA
accaaaguuauucugaaagu

SEQ ID NO: 17622 - RNA, 20 nt, Artificial Sequence
  Guide RNA
accagaguuauucugaaagu

SEQ ID NO: 17623 - RNA, 20 nt, Artificial Sequence
  Guide RNA
acucugguagcuuagagcau

SEQ ID NO: 17624 - RNA, 20 nt, Artificial Sequence
  Guide RNA
acuuucagaauaacucuggu

SEQ ID NO: 17625 - RNA, 20 nt, Artificial Sequence
  Guide RNA
acuuucagaauaacuuuggu

SEQ ID NO: 17626 - RNA, 20 nt, Artificial Sequence
  Guide RNA
acuuugguagcuuagagcau

SEQ ID NO: 17627 - RNA, 20 nt, Artificial Sequence
  Guide RNA
agaaaugcucuaagcuacca

SEQ ID NO: 17628 - RNA, 20 nt, Artificial Sequence
  Guide RNA
agaauaacucugguagcuua

SEQ ID NO: 17629 - RNA, 20 nt, Artificial Sequence
  Guide RNA
agaauaacuuugguagcuua

SEQ ID NO: 17630 - RNA, 20 nt, Artificial Sequence
  Guide RNA
agaguuauucugaaaguaug

SEQ ID NO: 17631 - RNA, 20 nt, Artificial Sequence
  Guide RNA
agcuaccaaaguuauucuga

SEQ ID NO: 17632 - RNA, 20 nt, Artificial Sequence
  Guide RNA
agcuaccagaguuauucuga

SEQ ID NO: 17633 - RNA, 20 nt, Artificial Sequence
  Guide RNA
auaacucugguagcuuagag

SEQ ID NO: 17634 - RNA, 20 nt, Artificial Sequence
  Guide RNA
auaacuuugguagcuuagag

SEQ ID NO: 17635 - RNA, 20 nt, Artificial Sequence
  Guide RNA
auacuuucagaauaacucug

SEQ ID NO: 17636 - RNA, 20 nt, Artificial Sequence
  Guide RNA
augcucuaagcuaccaaagu

SEQ ID NO: 17637 - RNA, 20 nt, Artificial Sequence
  Guide RNA
augcucuaagcuaccagagu

SEQ ID NO: 17638 - RNA, 20 nt, Artificial Sequence
  Guide RNA
cagaaaugcucuaagcuacc

SEQ ID NO: 17639 - RNA, 20 nt, Artificial Sequence
  Guide RNA
cagaauaacucugguagcuu

SEQ ID NO: 17640 - RNA, 20 nt, Artificial Sequence
  Guide RNA
cagaauaacuuugguagcuu

SEQ ID NO: 17641 - RNA, 20 nt, Artificial Sequence
  Guide RNA
cagaguuauucugaaaguau

SEQ ID NO: 17642 - RNA, 20 nt, Artificial Sequence
  Guide RNA
cauacuuucagaauaacucu

SEQ ID NO: 17643 - RNA, 20 nt, Artificial Sequence
  Guide RNA
ccaaaguuauucugaaagua

SEQ ID NO: 17644 - RNA, 20 nt, Artificial Sequence
  Guide RNA
ccagaguuauucugaaagua

SEQ ID NO: 17645 - RNA, 20 nt, Artificial Sequence
  Guide RNA
ccauacuuucagaauaacuc

SEQ ID NO: 17646 - RNA, 20 nt, Artificial Sequence
  Guide RNA
ccauacuuucagaauaacuu

SEQ ID NO: 17647 - RNA, 20 nt, Artificial Sequence
  Guide RNA
cccauacuuucagaauaacu

SEQ ID NO: 17648 - RNA, 20 nt, Artificial Sequence
  Guide RNA
cuaagcuaccaaaguuauuc

SEQ ID NO: 17649 - RNA, 20 nt, Artificial Sequence
  Guide RNA
cuaagcuaccagaguuauuc

SEQ ID NO: 17650 - RNA, 20 nt, Artificial Sequence
  Guide RNA
cuaccaaaguuauucugaaa

SEQ ID NO: 17651 - RNA, 20 nt, Artificial Sequence
  Guide RNA
cuaccagaguuauucugaaa

SEQ ID NO: 17652 - RNA, 20 nt, Artificial Sequence
  Guide RNA
cucuaagcuaccaaaguuau

SEQ ID NO: 17653 - RNA, 20 nt, Artificial Sequence
  Guide RNA
cucuaagcuaccagaguuau

SEQ ID NO: 17654 - RNA, 20 nt, Artificial Sequence
  Guide RNA
cucugguagcuuagagcauu

SEQ ID NO: 17655 - RNA, 20 nt, Artificial Sequence
  Guide RNA
cuuucagaauaacucuggua

SEQ ID NO: 17656 - RNA, 20 nt, Artificial Sequence
  Guide RNA
cuuucagaauaacuuuggua

SEQ ID NO: 17657 - RNA, 20 nt, Artificial Sequence
  Guide RNA
cuuugguagcuuagagcauu

SEQ ID NO: 17658 - RNA, 20 nt, Artificial Sequence
  Guide RNA
gaaaugcucuaagcuaccaa

SEQ ID NO: 17659 - RNA, 20 nt, Artificial Sequence
  Guide RNA
gaaaugcucuaagcuaccag

SEQ ID NO: 17660 - RNA, 20 nt, Artificial Sequence
  Guide RNA
gaauaacucugguagcuuag

SEQ ID NO: 17661 - RNA, 20 nt, Artificial Sequence
  Guide RNA
gaauaacuuugguagcuuag

SEQ ID NO: 17662 - RNA, 20 nt, Artificial Sequence
  Guide RNA
gcuaccaaaguuauucugaa

SEQ ID NO: 17663 - RNA, 20 nt, Artificial Sequence
  Guide RNA
gcuaccagaguuauucugaa

SEQ ID NO: 17664 - RNA, 20 nt, Artificial Sequence
  Guide RNA
gcucuaagcuaccaaaguua

SEQ ID NO: 17665 - RNA, 20 nt, Artificial Sequence
  Guide RNA
gcucuaagcuaccagaguua

SEQ ID NO: 17666 - RNA, 20 nt, Artificial Sequence
  Guide RNA
guucccauacuuucagaaua

SEQ ID NO: 17667 - RNA, 20 nt, Artificial Sequence
  Guide RNA
uaacucugguagcuuagagc

SEQ ID NO: 17668 - RNA, 20 nt, Artificial Sequence
  Guide RNA
uaacuuugguagcuuagagc

SEQ ID NO: 17669 - RNA, 20 nt, Artificial Sequence
  Guide RNA
uaagcuaccaaaguuauucu

SEQ ID NO: 17670 - RNA, 20 nt, Artificial Sequence
  Guide RNA
uaagcuaccagaguuauucu

SEQ ID NO: 17671 - RNA, 20 nt, Artificial Sequence
  Guide RNA
uaccaaaguuauucugaaag

SEQ ID NO: 17672 - RNA, 20 nt, Artificial Sequence
  Guide RNA
uaccagaguuauucugaaag

SEQ ID NO: 17673 - RNA, 20 nt, Artificial Sequence
  Guide RNA
uacuuucagaauaacucugg

SEQ ID NO: 17674 - RNA, 20 nt, Artificial Sequence
  Guide RNA
uacuuucagaauaacuuugg

SEQ ID NO: 17675 - RNA, 20 nt, Artificial Sequence
  Guide RNA
ucagaaaugcucuaagcuac

SEQ ID NO: 17676 - RNA, 20 nt, Artificial Sequence
  Guide RNA
ucagaauaacucugguagcu

SEQ ID NO: 17677 - RNA, 20 nt, Artificial Sequence
  Guide RNA
ucagaauaacuuugguagcu

SEQ ID NO: 17678 - RNA, 20 nt, Artificial Sequence
  Guide RNA
ucccauacuuucagaauaac

SEQ ID NO: 17679 - RNA, 20 nt, Artificial Sequence
  Guide RNA
ucuaagcuaccaaaguuauu

SEQ ID NO: 17680 - RNA, 20 nt, Artificial Sequence
  Guide RNA
ucuaagcuaccagaguuauu

SEQ ID NO: 17681 - RNA, 20 nt, Artificial Sequence
  Guide RNA
ucugguagcuuagagcauuu

SEQ ID NO: 17682 - RNA, 20 nt, Artificial Sequence
  Guide RNA
ugcucuaagcuaccaaaguu

SEQ ID NO: 17683 - RNA, 20 nt, Artificial Sequence
  Guide RNA
ugcucuaagcuaccagaguu

SEQ ID NO: 17684 - RNA, 20 nt, Artificial Sequence
  Guide RNA
uucagaaaugcucuaagcua

SEQ ID NO: 17685 - RNA, 20 nt, Artificial Sequence
  Guide RNA
uucagaauaacucugguagc

SEQ ID NO: 17686 - RNA, 20 nt, Artificial Sequence
  Guide RNA
uucagaauaacuuugguagc

SEQ ID NO: 17687 - RNA, 20 nt, Artificial Sequence
  Guide RNA
uucccauacuuucagaauaa

SEQ ID NO: 17688 - RNA, 20 nt, Artificial Sequence
  Guide RNA
uuucagaauaacucugguag

SEQ ID NO: 17689 - RNA, 20 nt, Artificial Sequence
  Guide RNA
uuucagaauaacuuugguag

SEQ ID NO: 17690 - RNA, 20 nt, Artificial Sequence
  Guide RNA
uuugguagcuuagagcauuu

SEQ ID NO: 17691 - RNA, 21 nt, Artificial Sequence
  Guide RNA
aaaugcucuaagcuaccaaag

SEQ ID NO: 17692 - RNA, 21 nt, Artificial Sequence
  Guide RNA
aaaugcucuaagcuaccagag

SEQ ID NO: 17693 - RNA, 21 nt, Artificial Sequence
  Guide RNA
aacucugguagcuuagagcau

SEQ ID NO: 17694 - RNA, 21 nt, Artificial Sequence
  Guide RNA
aacuuugguagcuuagagcau

SEQ ID NO: 17695 - RNA, 21 nt, Artificial Sequence
  Guide RNA
aagcuaccaaaguuauucuga

SEQ ID NO: 17696 - RNA, 21 nt, Artificial Sequence
  Guide RNA
aagcuaccagaguuauucuga

SEQ ID NO: 17697 - RNA, 21 nt, Artificial Sequence
  Guide RNA
aauaacucugguagcuuagag

SEQ ID NO: 17698 - RNA, 21 nt, Artificial Sequence
  Guide RNA
aauaacuuugguagcuuagag

SEQ ID NO: 17699 - RNA, 21 nt, Artificial Sequence
  Guide RNA
aaugcucuaagcuaccaaagu

SEQ ID NO: 17700 - RNA, 21 nt, Artificial Sequence
  Guide RNA
aaugcucuaagcuaccagagu

SEQ ID NO: 17701 - RNA, 21 nt, Artificial Sequence
  Guide RNA
accagaguuauucugaaagua

SEQ ID NO: 17702 - RNA, 21 nt, Artificial Sequence
  Guide RNA
acucugguagcuuagagcauu

SEQ ID NO: 17703 - RNA, 21 nt, Artificial Sequence
  Guide RNA
acuuucagaauaacucuggua

SEQ ID NO: 17704 - RNA, 21 nt, Artificial Sequence
  Guide RNA
acuuugguagcuuagagcauu

SEQ ID NO: 17705 - RNA, 21 nt, Artificial Sequence
  Guide RNA
agaaaugcucuaagcuaccaa

SEQ ID NO: 17706 - RNA, 21 nt, Artificial Sequence
  Guide RNA
agaaaugcucuaagcuaccag

SEQ ID NO: 17707 - RNA, 21 nt, Artificial Sequence
  Guide RNA
agaauaacucugguagcuuag

SEQ ID NO: 17708 - RNA, 21 nt, Artificial Sequence
  Guide RNA
agaauaacuuugguagcuuag

SEQ ID NO: 17709 - RNA, 21 nt, Artificial Sequence
  Guide RNA
agaguuauucugaaaguaugg

SEQ ID NO: 17710 - RNA, 21 nt, Artificial Sequence
  Guide RNA
agcuaccaaaguuauucugaa

SEQ ID NO: 17711 - RNA, 21 nt, Artificial Sequence
  Guide RNA
agcuaccagaguuauucugaa

SEQ ID NO: 17712 - RNA, 21 nt, Artificial Sequence
  Guide RNA
aguucccauacuuucagaaua

SEQ ID NO: 17713 - RNA, 21 nt, Artificial Sequence
  Guide RNA
auaacucugguagcuuagagc

SEQ ID NO: 17714 - RNA, 21 nt, Artificial Sequence
  Guide RNA
auaacuuugguagcuuagagc

SEQ ID NO: 17715 - RNA, 21 nt, Artificial Sequence
  Guide RNA
auacuuucagaauaacucugg

SEQ ID NO: 17716 - RNA, 21 nt, Artificial Sequence
  Guide RNA
augcucuaagcuaccaaaguu

SEQ ID NO: 17717 - RNA, 21 nt, Artificial Sequence
  Guide RNA
augcucuaagcuaccagaguu

SEQ ID NO: 17718 - RNA, 21 nt, Artificial Sequence
  Guide RNA
auucagaaaugcucuaagcua

SEQ ID NO: 17719 - RNA, 21 nt, Artificial Sequence
  Guide RNA
cagaaaugcucuaagcuacca

SEQ ID NO: 17720 - RNA, 21 nt, Artificial Sequence
  Guide RNA
cagaauaacucugguagcuua

SEQ ID NO: 17721 - RNA, 21 nt, Artificial Sequence
  Guide RNA
cagaauaacuuugguagcuua

SEQ ID NO: 17722 - RNA, 21 nt, Artificial Sequence
  Guide RNA
cagaguuauucugaaaguaug

SEQ ID NO: 17723 - RNA, 21 nt, Artificial Sequence
  Guide RNA
cauacuuucagaauaacucug

SEQ ID NO: 17724 - RNA, 21 nt, Artificial Sequence
  Guide RNA
ccagaguuauucugaaaguau

SEQ ID NO: 17725 - RNA, 21 nt, Artificial Sequence
  Guide RNA
ccauacuuucagaauaacucu

SEQ ID NO: 17726 - RNA, 21 nt, Artificial Sequence
  Guide RNA
cccauacuuucagaauaacuc

SEQ ID NO: 17727 - RNA, 21 nt, Artificial Sequence
  Guide RNA
cccauacuuucagaauaacuu

SEQ ID NO: 17728 - RNA, 21 nt, Artificial Sequence
  Guide RNA
cuaagcuaccaaaguuauucu

SEQ ID NO: 17729 - RNA, 21 nt, Artificial Sequence
  Guide RNA
cuaagcuaccagaguuauucu

SEQ ID NO: 17730 - RNA, 21 nt, Artificial Sequence
  Guide RNA
cuaccaaaguuauucugaaag

SEQ ID NO: 17731 - RNA, 21 nt, Artificial Sequence
  Guide RNA
cuaccagaguuauucugaaag

SEQ ID NO: 17732 - RNA, 21 nt, Artificial Sequence
  Guide RNA
cucuaagcuaccaaaguuauu

SEQ ID NO: 17733 - RNA, 21 nt, Artificial Sequence
  Guide RNA
cucuaagcuaccagaguuauu

SEQ ID NO: 17734 - RNA, 21 nt, Artificial Sequence
  Guide RNA
cucugguagcuuagagcauuu

SEQ ID NO: 17735 - RNA, 21 nt, Artificial Sequence
  Guide RNA
cuuucagaauaacucugguag

SEQ ID NO: 17736 - RNA, 21 nt, Artificial Sequence
  Guide RNA
cuuucagaauaacuuugguag

SEQ ID NO: 17737 - RNA, 21 nt, Artificial Sequence
  Guide RNA
cuuugguagcuuagagcauuu

SEQ ID NO: 17738 - RNA, 21 nt, Artificial Sequence
  Guide RNA
gaaaugcucuaagcuaccaaa

SEQ ID NO: 17739 - RNA, 21 nt, Artificial Sequence
  Guide RNA
gaaaugcucuaagcuaccaga

SEQ ID NO: 17740 - RNA, 21 nt, Artificial Sequence
  Guide RNA
gaauaacucugguagcuuaga

SEQ ID NO: 17741 - RNA, 21 nt, Artificial Sequence
  Guide RNA
gaauaacuuugguagcuuaga

SEQ ID NO: 17742 - RNA, 21 nt, Artificial Sequence
  Guide RNA
gcuaccaaaguuauucugaaa

SEQ ID NO: 17743 - RNA, 21 nt, Artificial Sequence
  Guide RNA
gcuaccagaguuauucugaaa

SEQ ID NO: 17744 - RNA, 21 nt, Artificial Sequence
  Guide RNA
gcucuaagcuaccaaaguuau

SEQ ID NO: 17745 - RNA, 21 nt, Artificial Sequence
  Guide RNA
gcucuaagcuaccagaguuau

SEQ ID NO: 17746 - RNA, 21 nt, Artificial Sequence
  Guide RNA
guucccauacuuucagaauaa

SEQ ID NO: 17747 - RNA, 21 nt, Artificial Sequence
  Guide RNA
uaacucugguagcuuagagca

SEQ ID NO: 17748 - RNA, 21 nt, Artificial Sequence
  Guide RNA
uaacuuugguagcuuagagca

SEQ ID NO: 17749 - RNA, 21 nt, Artificial Sequence
  Guide RNA
uaagcuaccaaaguuauucug

SEQ ID NO: 17750 - RNA, 21 nt, Artificial Sequence
  Guide RNA
uaagcuaccagaguuauucug

SEQ ID NO: 17751 - RNA, 21 nt, Artificial Sequence
  Guide RNA
uaccagaguuauucugaaagu

SEQ ID NO: 17752 - RNA, 21 nt, Artificial Sequence
  Guide RNA
uacuuucagaauaacucuggu

SEQ ID NO: 17753 - RNA, 21 nt, Artificial Sequence
  Guide RNA
ucagaaaugcucuaagcuacc

SEQ ID NO: 17754 - RNA, 21 nt, Artificial Sequence
  Guide RNA
ucagaauaacucugguagcuu

SEQ ID NO: 17755 - RNA, 21 nt, Artificial Sequence
  Guide RNA
ucagaauaacuuugguagcuu

SEQ ID NO: 17756 - RNA, 21 nt, Artificial Sequence
  Guide RNA
ucccauacuuucagaauaacu

SEQ ID NO: 17757 - RNA, 21 nt, Artificial Sequence
  Guide RNA
ucuaagcuaccaaaguuauuc

SEQ ID NO: 17758 - RNA, 21 nt, Artificial Sequence
  Guide RNA
ucuaagcuaccagaguuauuc

SEQ ID NO: 17759 - RNA, 21 nt, Artificial Sequence
  Guide RNA
ucugguagcuuagagcauuuc

SEQ ID NO: 17760 - RNA, 21 nt, Artificial Sequence
  Guide RNA
ugcucuaagcuaccaaaguua

SEQ ID NO: 17761 - RNA, 21 nt, Artificial Sequence
  Guide RNA
ugcucuaagcuaccagaguua

SEQ ID NO: 17762 - RNA, 21 nt, Artificial Sequence
  Guide RNA
uucagaaaugcucuaagcuac

SEQ ID NO: 17763 - RNA, 21 nt, Artificial Sequence
  Guide RNA
uucagaauaacucugguagcu

SEQ ID NO: 17764 - RNA, 21 nt, Artificial Sequence
  Guide RNA
uucagaauaacuuugguagcu

SEQ ID NO: 17765 - RNA, 21 nt, Artificial Sequence
  Guide RNA
uucccauacuuucagaauaac

SEQ ID NO: 17766 - RNA, 21 nt, Artificial Sequence
  Guide RNA
uuucagaauaacucugguagc

SEQ ID NO: 17767 - RNA, 21 nt, Artificial Sequence
  Guide RNA
uuucagaauaacuuugguagc

SEQ ID NO: 17768 - RNA, 21 nt, Artificial Sequence
  Guide RNA
uuugguagcuuagagcauuuc

SEQ ID NO: 17769 - RNA, 22 nt, Artificial Sequence
  Guide RNA
aaaguuauucugaaaguauggg

SEQ ID NO: 17770 - RNA, 22 nt, Artificial Sequence
  Guide RNA
aaaugcucuaagcuaccaaagu

SEQ ID NO: 17771 - RNA, 22 nt, Artificial Sequence
  Guide RNA
aaaugcucuaagcuaccagagu

SEQ ID NO: 17772 - RNA, 22 nt, Artificial Sequence
  Guide RNA
aacucugguagcuuagagcauu

SEQ ID NO: 17773 - RNA, 22 nt, Artificial Sequence
  Guide RNA
aacuuugguagcuuagagcauu

SEQ ID NO: 17774 - RNA, 22 nt, Artificial Sequence
  Guide RNA
aagcuaccaaaguuauucugaa

SEQ ID NO: 17775 - RNA, 22 nt, Artificial Sequence
  Guide RNA
aagcuaccagaguuauucugaa

SEQ ID NO: 17776 - RNA, 22 nt, Artificial Sequence
  Guide RNA
aauaacucugguagcuuagagc

SEQ ID NO: 17777 - RNA, 22 nt, Artificial Sequence
  Guide RNA
aauaacuuugguagcuuagagc

SEQ ID NO: 17778 - RNA, 22 nt, Artificial Sequence
  Guide RNA
aaugcucuaagcuaccaaaguu

SEQ ID NO: 17779 - RNA, 22 nt, Artificial Sequence
  Guide RNA
aaugcucuaagcuaccagaguu

SEQ ID NO: 17780 - RNA, 22 nt, Artificial Sequence
  Guide RNA
aauucagaaaugcucuaagcua

SEQ ID NO: 17781 - RNA, 22 nt, Artificial Sequence
  Guide RNA
accagaguuauucugaaaguau

SEQ ID NO: 17782 - RNA, 22 nt, Artificial Sequence
  Guide RNA
acucugguagcuuagagcauuu

SEQ ID NO: 17783 - RNA, 22 nt, Artificial Sequence
  Guide RNA
acuuucagaauaacucugguag

SEQ ID NO: 17784 - RNA, 22 nt, Artificial Sequence
  Guide RNA
acuuucagaauaacuuugguag

SEQ ID NO: 17785 - RNA, 22 nt, Artificial Sequence
  Guide RNA
acuuugguagcuuagagcauuu

SEQ ID NO: 17786 - RNA, 22 nt, Artificial Sequence
  Guide RNA
agaaaugcucuaagcuaccaaa

SEQ ID NO: 17787 - RNA, 22 nt, Artificial Sequence
  Guide RNA
agaaaugcucuaagcuaccaga

SEQ ID NO: 17788 - RNA, 22 nt, Artificial Sequence
  Guide RNA
agaauaacucugguagcuuaga

SEQ ID NO: 17789 - RNA, 22 nt, Artificial Sequence
  Guide RNA
agaauaacuuugguagcuuaga

SEQ ID NO: 17790 - RNA, 22 nt, Artificial Sequence
  Guide RNA
agaguuauucugaaaguauggg

SEQ ID NO: 17791 - RNA, 22 nt, Artificial Sequence
  Guide RNA
agcuaccaaaguuauucugaaa

SEQ ID NO: 17792 - RNA, 22 nt, Artificial Sequence
  Guide RNA
agcuaccagaguuauucugaaa

SEQ ID NO: 17793 - RNA, 22 nt, Artificial Sequence
  Guide RNA
aguucccauacuuucagaauaa

SEQ ID NO: 17794 - RNA, 22 nt, Artificial Sequence
  Guide RNA
auaacucugguagcuuagagca

SEQ ID NO: 17795 - RNA, 22 nt, Artificial Sequence
  Guide RNA
auaacuuugguagcuuagagca

SEQ ID NO: 17796 - RNA, 22 nt, Artificial Sequence
  Guide RNA
auacuuucagaauaacucuggu

SEQ ID NO: 17797 - RNA, 22 nt, Artificial Sequence
  Guide RNA
augcucuaagcuaccaaaguua

SEQ ID NO: 17798 - RNA, 22 nt, Artificial Sequence
  Guide RNA
augcucuaagcuaccagaguua

SEQ ID NO: 17799 - RNA, 22 nt, Artificial Sequence
  Guide RNA
auucagaaaugcucuaagcuac

SEQ ID NO: 17800 - RNA, 22 nt, Artificial Sequence
  Guide RNA
caaaguuauucugaaaguaugg

SEQ ID NO: 17801 - RNA, 22 nt, Artificial Sequence
  Guide RNA
cagaaaugcucuaagcuaccaa

SEQ ID NO: 17802 - RNA, 22 nt, Artificial Sequence
  Guide RNA
cagaaaugcucuaagcuaccag

SEQ ID NO: 17803 - RNA, 22 nt, Artificial Sequence
  Guide RNA
cagaauaacucugguagcuuag

SEQ ID NO: 17804 - RNA, 22 nt, Artificial Sequence
  Guide RNA
cagaauaacuuugguagcuuag

SEQ ID NO: 17805 - RNA, 22 nt, Artificial Sequence
  Guide RNA
cagaguuauucugaaaguaugg

SEQ ID NO: 17806 - RNA, 22 nt, Artificial Sequence
  Guide RNA
caguucccauacuuucagaaua

SEQ ID NO: 17807 - RNA, 22 nt, Artificial Sequence
  Guide RNA
cauacuuucagaauaacucugg

SEQ ID NO: 17808 - RNA, 22 nt, Artificial Sequence
  Guide RNA
cauacuuucagaauaacuuugg

SEQ ID NO: 17809 - RNA, 22 nt, Artificial Sequence
  Guide RNA
ccaaaguuauucugaaaguaug

SEQ ID NO: 17810 - RNA, 22 nt, Artificial Sequence
  Guide RNA
ccagaguuauucugaaaguaug

SEQ ID NO: 17811 - RNA, 22 nt, Artificial Sequence
  Guide RNA
ccauacuuucagaauaacucug

SEQ ID NO: 17812 - RNA, 22 nt, Artificial Sequence
  Guide RNA
ccauacuuucagaauaacuuug

SEQ ID NO: 17813 - RNA, 22 nt, Artificial Sequence
  Guide RNA
cccauacuuucagaauaacucu

SEQ ID NO: 17814 - RNA, 22 nt, Artificial Sequence
  Guide RNA
cccauacuuucagaauaacuuu

SEQ ID NO: 17815 - RNA, 22 nt, Artificial Sequence
  Guide RNA
cuaagcuaccaaaguuauucug

SEQ ID NO: 17816 - RNA, 22 nt, Artificial Sequence
  Guide RNA
cuaagcuaccagaguuauucug

SEQ ID NO: 17817 - RNA, 22 nt, Artificial Sequence
  Guide RNA
cuaccaaaguuauucugaaagu

SEQ ID NO: 17818 - RNA, 22 nt, Artificial Sequence
  Guide RNA
cuaccagaguuauucugaaagu

SEQ ID NO: 17819 - RNA, 22 nt, Artificial Sequence
  Guide RNA
cucuaagcuaccaaaguuauuc

SEQ ID NO: 17820 - RNA, 22 nt, Artificial Sequence
  Guide RNA
cucuaagcuaccagaguuauuc

SEQ ID NO: 17821 - RNA, 22 nt, Artificial Sequence
  Guide RNA
cucugguagcuuagagcauuuc

SEQ ID NO: 17822 - RNA, 22 nt, Artificial Sequence
  Guide RNA
cuuucagaauaacucugguagc

SEQ ID NO: 17823 - RNA, 22 nt, Artificial Sequence
  Guide RNA
cuuucagaauaacuuugguagc

SEQ ID NO: 17824 - RNA, 22 nt, Artificial Sequence
  Guide RNA
cuuugguagcuuagagcauuuc

SEQ ID NO: 17825 - RNA, 22 nt, Artificial Sequence
  Guide RNA
gaaaugcucuaagcuaccaaag

SEQ ID NO: 17826 - RNA, 22 nt, Artificial Sequence
  Guide RNA
gaaaugcucuaagcuaccagag

SEQ ID NO: 17827 - RNA, 22 nt, Artificial Sequence
  Guide RNA
gaauaacucugguagcuuagag

SEQ ID NO: 17828 - RNA, 22 nt, Artificial Sequence
  Guide RNA
gaauaacuuugguagcuuagag

SEQ ID NO: 17829 - RNA, 22 nt, Artificial Sequence
  Guide RNA
gcuaccaaaguuauucugaaag

SEQ ID NO: 17830 - RNA, 22 nt, Artificial Sequence
  Guide RNA
gcuaccagaguuauucugaaag

SEQ ID NO: 17831 - RNA, 22 nt, Artificial Sequence
  Guide RNA
gcucuaagcuaccaaaguuauu

SEQ ID NO: 17832 - RNA, 22 nt, Artificial Sequence
  Guide RNA
gcucuaagcuaccagaguuauu

SEQ ID NO: 17833 - RNA, 22 nt, Artificial Sequence
  Guide RNA
guucccauacuuucagaauaac

SEQ ID NO: 17834 - RNA, 22 nt, Artificial Sequence
  Guide RNA
uaacucugguagcuuagagcau

SEQ ID NO: 17835 - RNA, 22 nt, Artificial Sequence
  Guide RNA
uaacuuugguagcuuagagcau

SEQ ID NO: 17836 - RNA, 22 nt, Artificial Sequence
  Guide RNA
uaagcuaccaaaguuauucuga

SEQ ID NO: 17837 - RNA, 22 nt, Artificial Sequence
  Guide RNA
uaagcuaccagaguuauucuga

SEQ ID NO: 17838 - RNA, 22 nt, Artificial Sequence
  Guide RNA
uaccagaguuauucugaaagua

SEQ ID NO: 17839 - RNA, 22 nt, Artificial Sequence
  Guide RNA
uacuuucagaauaacucuggua

SEQ ID NO: 17840 - RNA, 22 nt, Artificial Sequence
  Guide RNA
ucagaaaugcucuaagcuacca

SEQ ID NO: 17841 - RNA, 22 nt, Artificial Sequence
  Guide RNA
ucagaauaacucugguagcuua

SEQ ID NO: 17842 - RNA, 22 nt, Artificial Sequence
  Guide RNA
ucagaauaacuuugguagcuua

SEQ ID NO: 17843 - RNA, 22 nt, Artificial Sequence
  Guide RNA
ucccauacuuucagaauaacuc

SEQ ID NO: 17844 - RNA, 22 nt, Artificial Sequence
  Guide RNA
ucccauacuuucagaauaacuu

SEQ ID NO: 17845 - RNA, 22 nt, Artificial Sequence
  Guide RNA
ucuaagcuaccaaaguuauucu

SEQ ID NO: 17846 - RNA, 22 nt, Artificial Sequence
  Guide RNA
ucuaagcuaccagaguuauucu

SEQ ID NO: 17847 - RNA, 22 nt, Artificial Sequence
  Guide RNA
ucugguagcuuagagcauuucu

SEQ ID NO: 17848 - RNA, 22 nt, Artificial Sequence
  Guide RNA
ugcucuaagcuaccaaaguuau

SEQ ID NO: 17849 - RNA, 22 nt, Artificial Sequence
  Guide RNA
ugcucuaagcuaccagaguuau

SEQ ID NO: 17850 - RNA, 22 nt, Artificial Sequence
  Guide RNA
uucagaaaugcucuaagcuacc

SEQ ID NO: 17851 - RNA, 22 nt, Artificial Sequence
  Guide RNA
uucagaauaacucugguagcuu

SEQ ID NO: 17852 - RNA, 22 nt, Artificial Sequence
  Guide RNA
uucagaauaacuuugguagcuu

SEQ ID NO: 17853 - RNA, 22 nt, Artificial Sequence
  Guide RNA
uucccauacuuucagaauaacu

SEQ ID NO: 17854 - RNA, 22 nt, Artificial Sequence
  Guide RNA
uuucagaauaacucugguagcu

SEQ ID NO: 17855 - RNA, 22 nt, Artificial Sequence
  Guide RNA
uuucagaauaacuuugguagcu

SEQ ID NO: 17856 - RNA, 22 nt, Artificial Sequence
  Guide RNA
uuugguagcuuagagcauuucu

SEQ ID NO: 17857 - RNA, 20 nt, Artificial Sequence
  Guide RNA
agacagagagagacucuguc

SEQ ID NO: 17858 - RNA, 20 nt, Artificial Sequence
  Guide RNA
gacagagagagacucugucu

SEQ ID NO: 17859 - RNA, 20 nt, Artificial Sequence
  Guide RNA
gagagacucugucucuuaaa

SEQ ID NO: 17860 - RNA, 20 nt, Artificial Sequence
  Guide RNA
uaagagacagagucucucuc

SEQ ID NO: 17861 - RNA, 21 nt, Artificial Sequence
  Guide RNA
agacagagagagacucugucu

SEQ ID NO: 17862 - RNA, 21 nt, Artificial Sequence
  Guide RNA
agagagacucugucucuuaaa

SEQ ID NO: 17863 - RNA, 21 nt, Artificial Sequence
  Guide RNA
gacagagagagacucugucuc

SEQ ID NO: 17864 - RNA, 21 nt, Artificial Sequence
  Guide RNA
gagacagagagagacucuguc

SEQ ID NO: 17865 - RNA, 21 nt, Artificial Sequence
  Guide RNA
gagagacucugucucuuaaaa

SEQ ID NO: 17866 - RNA, 21 nt, Artificial Sequence
  Guide RNA
gagagagacucugucucuuaa

SEQ ID NO: 17867 - RNA, 21 nt, Artificial Sequence
  Guide RNA
uaagagacagagucucucucu

SEQ ID NO: 17868 - RNA, 21 nt, Artificial Sequence
  Guide RNA
uuaagagacagagucucucuc

SEQ ID NO: 17869 - RNA, 21 nt, Artificial Sequence
  Guide RNA
uuagagacagagucucucucu

SEQ ID NO: 17870 - RNA, 21 nt, Artificial Sequence
  Guide RNA
uuuuuuaagagacagagucuc

SEQ ID NO: 17871 - RNA, 22 nt, Artificial Sequence
  Guide RNA
agacagagagagacucugucuc

SEQ ID NO: 17872 - RNA, 22 nt, Artificial Sequence
  Guide RNA
agagacucugucucuuaaaaaa

SEQ ID NO: 17873 - RNA, 22 nt, Artificial Sequence
  Guide RNA
agagagacucugucucuuaaaa

SEQ ID NO: 17874 - RNA, 22 nt, Artificial Sequence
  Guide RNA
agagagagacucugucucuuaa

SEQ ID NO: 17875 - RNA, 22 nt, Artificial Sequence
  Guide RNA
gacagagagagacucugucucu

SEQ ID NO: 17876 - RNA, 22 nt, Artificial Sequence
  Guide RNA
gagacagagagagacucugucu

SEQ ID NO: 17877 - RNA, 22 nt, Artificial Sequence
  Guide RNA
gagagacucugucucuuaaaaa

SEQ ID NO: 17878 - RNA, 22 nt, Artificial Sequence
  Guide RNA
gagagagacucugucucuuaaa

SEQ ID NO: 17879 - RNA, 22 nt, Artificial Sequence
  Guide RNA
ggagacagagagagacucuguc

SEQ ID NO: 17880 - RNA, 22 nt, Artificial Sequence
  Guide RNA
uaagagacagagucucucucug

SEQ ID NO: 17881 - RNA, 22 nt, Artificial Sequence
  Guide RNA
uuaagagacagagucucucucu

SEQ ID NO: 17882 - RNA, 22 nt, Artificial Sequence
  Guide RNA
uuagagacagagucucucucug

SEQ ID NO: 17883 - RNA, 22 nt, Artificial Sequence
  Guide RNA
uuuaagagacagagucucucuc

SEQ ID NO: 17884 - RNA, 22 nt, Artificial Sequence
  Guide RNA
uuuagagacagagucucucucu

SEQ ID NO: 17885 - RNA, 22 nt, Artificial Sequence
  Guide RNA
uuuuuuaagagacagagucucu

SEQ ID NO: 17886 - RNA, 20 nt, Artificial Sequence
  Guide RNA
aagaaaagagaaacauaagc

SEQ ID NO: 17887 - RNA, 20 nt, Artificial Sequence
  Guide RNA
agaaaagagaaacauaagcu

SEQ ID NO: 17888 - RNA, 20 nt, Artificial Sequence
  Guide RNA
agucuagcuuauguuucucu

SEQ ID NO: 17889 - RNA, 20 nt, Artificial Sequence
  Guide RNA
cuagcuuauguuucucuuuu

SEQ ID NO: 17890 - RNA, 20 nt, Artificial Sequence
  Guide RNA
gaaagaaagaaaagagaaac

SEQ ID NO: 17891 - RNA, 20 nt, Artificial Sequence
  Guide RNA
gucuagcuuauguuucucuu

SEQ ID NO: 17892 - RNA, 20 nt, Artificial Sequence
  Guide RNA
guuucucuuuucuuucuuuc

SEQ ID NO: 17893 - RNA, 20 nt, Artificial Sequence
  Guide RNA
ucuagcuuauguuucucuuu

SEQ ID NO: 17894 - RNA, 21 nt, Artificial Sequence
  Guide RNA
agucuagcuuauguuucucuu

SEQ ID NO: 17895 - RNA, 21 nt, Artificial Sequence
  Guide RNA
cagucuagcuuauguuucucu

SEQ ID NO: 17896 - RNA, 21 nt, Artificial Sequence
  Guide RNA
gucuagcuuauguuucucuuu

SEQ ID NO: 17897 - RNA, 22 nt, Artificial Sequence
  Guide RNA
agaaaagagaaacauaagcuag

SEQ ID NO: 17898 - RNA, 22 nt, Artificial Sequence
  Guide RNA
agucuagcuuauguuucucuuu

SEQ ID NO: 17899 - RNA, 22 nt, Artificial Sequence
  Guide RNA
cagucuagcuuauguuucucuu

SEQ ID NO: 17900 - RNA, 22 nt, Artificial Sequence
  Guide RNA
gaaagaaaagagaaacauaagc

SEQ ID NO: 17901 - RNA, 22 nt, Artificial Sequence
  Guide RNA
gcuuauguuucucuuuucuuuc

SEQ ID NO: 17902 - RNA, 22 nt, Artificial Sequence
  Guide RNA
gucuagcuuauguuucucuuuu

SEQ ID NO: 17903 - RNA, 22 nt, Artificial Sequence
  Guide RNA
ucagucuagcuuauguuucucu

SEQ ID NO: 17904 - RNA, 20 nt, Artificial Sequence
  Guide RNA
aaauacauucacaaagggaa

SEQ ID NO: 17905 - RNA, 20 nt, Artificial Sequence
  Guide RNA
aauacauucacaaagggaaa

SEQ ID NO: 17906 - RNA, 20 nt, Artificial Sequence
  Guide RNA
acauucacaaagggaaaaaa

SEQ ID NO: 17907 - RNA, 20 nt, Artificial Sequence
  Guide RNA
agguaauuggaaguuguuuu

SEQ ID NO: 17908 - RNA, 20 nt, Artificial Sequence
  Guide RNA
auaaauacauucacaaaggg

SEQ ID NO: 17909 - RNA, 20 nt, Artificial Sequence
  Guide RNA
auacauucacaaagggaaaa

SEQ ID NO: 17910 - RNA, 20 nt, Artificial Sequence
  Guide RNA
cauaaauacauucacaaagg

SEQ ID NO: 17911 - RNA, 20 nt, Artificial Sequence
  Guide RNA
gguaauuggaaguuguuuuu

SEQ ID NO: 17912 - RNA, 20 nt, Artificial Sequence
  Guide RNA
uaaauacauucacaaaggga

SEQ ID NO: 17913 - RNA, 20 nt, Artificial Sequence
  Guide RNA
uacauucacaaagggaaaaa

SEQ ID NO: 17914 - RNA, 20 nt, Artificial Sequence
  Guide RNA
ucccuuugugaauguauuua

SEQ ID NO: 17915 - RNA, 20 nt, Artificial Sequence
  Guide RNA
uucccuuugugaauguauuu

SEQ ID NO: 17916 - RNA, 20 nt, Artificial Sequence
  Guide RNA
uuucccuuugugaauguauu

SEQ ID NO: 17917 - RNA, 20 nt, Artificial Sequence
  Guide RNA
uuuucccuuugugaauguau

SEQ ID NO: 17918 - RNA, 20 nt, Artificial Sequence
  Guide RNA
uuuuucccuuugugaaugua

SEQ ID NO: 17919 - RNA, 20 nt, Artificial Sequence
  Guide RNA
uuuuuucccuuugugaaugu

SEQ ID NO: 17920 - RNA, 21 nt, Artificial Sequence
  Guide RNA
cauaaauacauucacaaaggg

SEQ ID NO: 17921 - RNA, 22 nt, Artificial Sequence
  Guide RNA
cauaaauacauucacaaaggga

SEQ ID NO: 17922 - RNA, 22 nt, Artificial Sequence
  Guide RNA
ucauaaauacauucacaaaggg

SEQ ID NO: 17923 - RNA, 22 nt, Artificial Sequence
  Guide RNA
ucccuuugugaauguauuuaug

SEQ ID NO: 17924 - RNA, 20 nt, Artificial Sequence
  Guide RNA
aacaggaaucacugguuacc

SEQ ID NO: 17925 - RNA, 20 nt, Artificial Sequence
  Guide RNA
aacagggaucacugguuacc

SEQ ID NO: 17926 - RNA, 20 nt, Artificial Sequence
  Guide RNA
aaccagugaucccuguucuc

SEQ ID NO: 17927 - RNA, 20 nt, Artificial Sequence
  Guide RNA
aaccagugauuccuguucuc

SEQ ID NO: 17928 - RNA, 20 nt, Artificial Sequence
  Guide RNA
aaucucuaugagaacaggaa

SEQ ID NO: 17929 - RNA, 20 nt, Artificial Sequence
  Guide RNA
aaucucuaugagaacaggga

SEQ ID NO: 17930 - RNA, 20 nt, Artificial Sequence
  Guide RNA
acaggaaucacugguuacca

SEQ ID NO: 17931 - RNA, 20 nt, Artificial Sequence
  Guide RNA
acagggaucacugguuacca

SEQ ID NO: 17932 - RNA, 20 nt, Artificial Sequence
  Guide RNA
accagugaucccuguucuca

SEQ ID NO: 17933 - RNA, 20 nt, Artificial Sequence
  Guide RNA
accagugauuccuguucuca

SEQ ID NO: 17934 - RNA, 20 nt, Artificial Sequence
  Guide RNA
agaacaggaaucacugguua

SEQ ID NO: 17935 - RNA, 20 nt, Artificial Sequence
  Guide RNA
agaacagggaucacugguua

SEQ ID NO: 17936 - RNA, 20 nt, Artificial Sequence
  Guide RNA
agagugguaaccagugaucc

SEQ ID NO: 17937 - RNA, 20 nt, Artificial Sequence
  Guide RNA
agagugguaaccagugauuc

SEQ ID NO: 17938 - RNA, 20 nt, Artificial Sequence
  Guide RNA
aggaaucacugguuaccacu

SEQ ID NO: 17939 - RNA, 20 nt, Artificial Sequence
  Guide RNA
agggaucacugguuaccacu

SEQ ID NO: 17940 - RNA, 20 nt, Artificial Sequence
  Guide RNA
agugaucccuguucucauag

SEQ ID NO: 17941 - RNA, 20 nt, Artificial Sequence
  Guide RNA
agugauuccuguucucauag

SEQ ID NO: 17942 - RNA, 20 nt, Artificial Sequence
  Guide RNA
agugguaaccagugaucccu

SEQ ID NO: 17943 - RNA, 20 nt, Artificial Sequence
  Guide RNA
agugguaaccagugauuccu

SEQ ID NO: 17944 - RNA, 20 nt, Artificial Sequence
  Guide RNA
aucccuguucucauagagau

SEQ ID NO: 17945 - RNA, 20 nt, Artificial Sequence
  Guide RNA
aucucuaugagaacaggaau

SEQ ID NO: 17946 - RNA, 20 nt, Artificial Sequence
  Guide RNA
aucucuaugagaacagggau

SEQ ID NO: 17947 - RNA, 20 nt, Artificial Sequence
  Guide RNA
augagaacaggaaucacugg

SEQ ID NO: 17948 - RNA, 20 nt, Artificial Sequence
  Guide RNA
augagaacagggaucacugg

SEQ ID NO: 17949 - RNA, 20 nt, Artificial Sequence
  Guide RNA
auuccuguucucauagagau

SEQ ID NO: 17950 - RNA, 20 nt, Artificial Sequence
  Guide RNA
caggaaucacugguuaccac

SEQ ID NO: 17951 - RNA, 20 nt, Artificial Sequence
  Guide RNA
cagggaucacugguuaccac

SEQ ID NO: 17952 - RNA, 20 nt, Artificial Sequence
  Guide RNA
cagugaucccuguucucaua

SEQ ID NO: 17953 - RNA, 20 nt, Artificial Sequence
  Guide RNA
cagugauuccuguucucaua

SEQ ID NO: 17954 - RNA, 20 nt, Artificial Sequence
  Guide RNA
ccagugaucccuguucucau

SEQ ID NO: 17955 - RNA, 20 nt, Artificial Sequence
  Guide RNA
ccagugauuccuguucucau

SEQ ID NO: 17956 - RNA, 20 nt, Artificial Sequence
  Guide RNA
cuaugagaacaggaaucacu

SEQ ID NO: 17957 - RNA, 20 nt, Artificial Sequence
  Guide RNA
cuaugagaacagggaucacu

SEQ ID NO: 17958 - RNA, 20 nt, Artificial Sequence
  Guide RNA
cucuaugagaacaggaauca

SEQ ID NO: 17959 - RNA, 20 nt, Artificial Sequence
  Guide RNA
cucuaugagaacagggauca

SEQ ID NO: 17960 - RNA, 20 nt, Artificial Sequence
  Guide RNA
gaacaggaaucacugguuac

SEQ ID NO: 17961 - RNA, 20 nt, Artificial Sequence
  Guide RNA
gaacagggaucacugguuac

SEQ ID NO: 17962 - RNA, 20 nt, Artificial Sequence
  Guide RNA
gaaucacugguuaccacucu

SEQ ID NO: 17963 - RNA, 20 nt, Artificial Sequence
  Guide RNA
gagaacaggaaucacugguu

SEQ ID NO: 17964 - RNA, 20 nt, Artificial Sequence
  Guide RNA
gagaacagggaucacugguu

SEQ ID NO: 17965 - RNA, 20 nt, Artificial Sequence
  Guide RNA
gagugguaaccagugauccc

SEQ ID NO: 17966 - RNA, 20 nt, Artificial Sequence
  Guide RNA
gagugguaaccagugauucc

SEQ ID NO: 17967 - RNA, 20 nt, Artificial Sequence
  Guide RNA
gaucccuguucucauagaga

SEQ ID NO: 17968 - RNA, 20 nt, Artificial Sequence
  Guide RNA
gauuccuguucucauagaga

SEQ ID NO: 17969 - RNA, 20 nt, Artificial Sequence
  Guide RNA
ggaaucacugguuaccacuc

SEQ ID NO: 17970 - RNA, 20 nt, Artificial Sequence
  Guide RNA
ggaucacugguuaccacucu

SEQ ID NO: 17971 - RNA, 20 nt, Artificial Sequence
  Guide RNA
gggaucacugguuaccacuc

SEQ ID NO: 17972 - RNA, 20 nt, Artificial Sequence
  Guide RNA
gguaaccagugaucccuguu

SEQ ID NO: 17973 - RNA, 20 nt, Artificial Sequence
  Guide RNA
gguaaccagugauuccuguu

SEQ ID NO: 17974 - RNA, 20 nt, Artificial Sequence
  Guide RNA
guaaccagugaucccuguuc

SEQ ID NO: 17975 - RNA, 20 nt, Artificial Sequence
  Guide RNA
guaaccagugauuccuguuc

SEQ ID NO: 17976 - RNA, 20 nt, Artificial Sequence
  Guide RNA
gugaucccuguucucauaga

SEQ ID NO: 17977 - RNA, 20 nt, Artificial Sequence
  Guide RNA
gugauuccuguucucauaga

SEQ ID NO: 17978 - RNA, 20 nt, Artificial Sequence
  Guide RNA
gugguaaccagugaucccug

SEQ ID NO: 17979 - RNA, 20 nt, Artificial Sequence
  Guide RNA
gugguaaccagugauuccug

SEQ ID NO: 17980 - RNA, 20 nt, Artificial Sequence
  Guide RNA
guguuagagugguaaccagu

SEQ ID NO: 17981 - RNA, 20 nt, Artificial Sequence
  Guide RNA
guuagagugguaaccaguga

SEQ ID NO: 17982 - RNA, 20 nt, Artificial Sequence
  Guide RNA
uaaccagugaucccuguucu

SEQ ID NO: 17983 - RNA, 20 nt, Artificial Sequence
  Guide RNA
uaaccagugauuccuguucu

SEQ ID NO: 17984 - RNA, 20 nt, Artificial Sequence
  Guide RNA
uaaucucuaugagaacagga

SEQ ID NO: 17985 - RNA, 20 nt, Artificial Sequence
  Guide RNA
uaaucucuaugagaacaggg

SEQ ID NO: 17986 - RNA, 20 nt, Artificial Sequence
  Guide RNA
uagagugguaaccagugauc

SEQ ID NO: 17987 - RNA, 20 nt, Artificial Sequence
  Guide RNA
uagagugguaaccagugauu

SEQ ID NO: 17988 - RNA, 20 nt, Artificial Sequence
  Guide RNA
uaugagaacaggaaucacug

SEQ ID NO: 17989 - RNA, 20 nt, Artificial Sequence
  Guide RNA
uaugagaacagggaucacug

SEQ ID NO: 17990 - RNA, 20 nt, Artificial Sequence
  Guide RNA
ucccuguucucauagagauu

SEQ ID NO: 17991 - RNA, 20 nt, Artificial Sequence
  Guide RNA
ucuaugagaacaggaaucac

SEQ ID NO: 17992 - RNA, 20 nt, Artificial Sequence
  Guide RNA
ucuaugagaacagggaucac

SEQ ID NO: 17993 - RNA, 20 nt, Artificial Sequence
  Guide RNA
ucucuaugagaacaggaauc

SEQ ID NO: 17994 - RNA, 20 nt, Artificial Sequence
  Guide RNA
ucucuaugagaacagggauc

SEQ ID NO: 17995 - RNA, 20 nt, Artificial Sequence
  Guide RNA
ugagaacaggaaucacuggu

SEQ ID NO: 17996 - RNA, 20 nt, Artificial Sequence
  Guide RNA
ugagaacagggaucacuggu

SEQ ID NO: 17997 - RNA, 20 nt, Artificial Sequence
  Guide RNA
ugaucccuguucucauagag

SEQ ID NO: 17998 - RNA, 20 nt, Artificial Sequence
  Guide RNA
ugauuccuguucucauagag

SEQ ID NO: 17999 - RNA, 20 nt, Artificial Sequence
  Guide RNA
ugguaaccagugaucccugu

SEQ ID NO: 18000 - RNA, 20 nt, Artificial Sequence
  Guide RNA
ugguaaccagugauuccugu

SEQ ID NO: 18001 - RNA, 20 nt, Artificial Sequence
  Guide RNA
uguuagagugguaaccagug

SEQ ID NO: 18002 - RNA, 20 nt, Artificial Sequence
  Guide RNA
uuaaucucuaugagaacagg

SEQ ID NO: 18003 - RNA, 20 nt, Artificial Sequence
  Guide RNA
uuagagugguaaccagugau

SEQ ID NO: 18004 - RNA, 20 nt, Artificial Sequence
  Guide RNA
uuccuguucucauagagauu

SEQ ID NO: 18005 - RNA, 20 nt, Artificial Sequence
  Guide RNA
uuuaaucucuaugagaacag

SEQ ID NO: 18006 - RNA, 21 nt, Artificial Sequence
  Guide RNA
aacaggaaucacugguuacca

SEQ ID NO: 18007 - RNA, 21 nt, Artificial Sequence
  Guide RNA
aacagggaucacugguuacca

SEQ ID NO: 18008 - RNA, 21 nt, Artificial Sequence
  Guide RNA
aaccagugaucccuguucuca

SEQ ID NO: 18009 - RNA, 21 nt, Artificial Sequence
  Guide RNA
aaccagugauuccuguucuca

SEQ ID NO: 18010 - RNA, 21 nt, Artificial Sequence
  Guide RNA
aaucucuaugagaacaggaau

SEQ ID NO: 18011 - RNA, 21 nt, Artificial Sequence
  Guide RNA
aaucucuaugagaacagggau

SEQ ID NO: 18012 - RNA, 21 nt, Artificial Sequence
  Guide RNA
acaggaaucacugguuaccac

SEQ ID NO: 18013 - RNA, 21 nt, Artificial Sequence
  Guide RNA
acagggaucacugguuaccac

SEQ ID NO: 18014 - RNA, 21 nt, Artificial Sequence
  Guide RNA
accagugaucccuguucucau

SEQ ID NO: 18015 - RNA, 21 nt, Artificial Sequence
  Guide RNA
accagugauuccuguucucau

SEQ ID NO: 18016 - RNA, 21 nt, Artificial Sequence
  Guide RNA
agaacaggaaucacugguuac

SEQ ID NO: 18017 - RNA, 21 nt, Artificial Sequence
  Guide RNA
agaacagggaucacugguuac

SEQ ID NO: 18018 - RNA, 21 nt, Artificial Sequence
  Guide RNA
agagugguaaccagugauccc

SEQ ID NO: 18019 - RNA, 21 nt, Artificial Sequence
  Guide RNA
agagugguaaccagugauucc

SEQ ID NO: 18020 - RNA, 21 nt, Artificial Sequence
  Guide RNA
aggaaucacugguuaccacuc

SEQ ID NO: 18021 - RNA, 21 nt, Artificial Sequence
  Guide RNA
agggaucacugguuaccacuc

SEQ ID NO: 18022 - RNA, 21 nt, Artificial Sequence
  Guide RNA
agugaucccuguucucauaga

SEQ ID NO: 18023 - RNA, 21 nt, Artificial Sequence
  Guide RNA
agugauuccuguucucauaga

SEQ ID NO: 18024 - RNA, 21 nt, Artificial Sequence
  Guide RNA
agugguaaccagugaucccug

SEQ ID NO: 18025 - RNA, 21 nt, Artificial Sequence
  Guide RNA
agugguaaccagugauuccug

SEQ ID NO: 18026 - RNA, 21 nt, Artificial Sequence
  Guide RNA
aucccuguucucauagagauu

SEQ ID NO: 18027 - RNA, 21 nt, Artificial Sequence
  Guide RNA
aucucuaugagaacaggaauc

SEQ ID NO: 18028 - RNA, 21 nt, Artificial Sequence
  Guide RNA
aucucuaugagaacagggauc

SEQ ID NO: 18029 - RNA, 21 nt, Artificial Sequence
  Guide RNA
augagaacaggaaucacuggu

SEQ ID NO: 18030 - RNA, 21 nt, Artificial Sequence
  Guide RNA
augagaacagggaucacuggu

SEQ ID NO: 18031 - RNA, 21 nt, Artificial Sequence
  Guide RNA
auuccuguucucauagagauu

SEQ ID NO: 18032 - RNA, 21 nt, Artificial Sequence
  Guide RNA
caggaaucacugguuaccacu

SEQ ID NO: 18033 - RNA, 21 nt, Artificial Sequence
  Guide RNA
cagggaucacugguuaccacu

SEQ ID NO: 18034 - RNA, 21 nt, Artificial Sequence
  Guide RNA
cagugaucccuguucucauag

SEQ ID NO: 18035 - RNA, 21 nt, Artificial Sequence
  Guide RNA
cagugauuccuguucucauag

SEQ ID NO: 18036 - RNA, 21 nt, Artificial Sequence
  Guide RNA
ccagugaucccuguucucaua

SEQ ID NO: 18037 - RNA, 21 nt, Artificial Sequence
  Guide RNA
ccagugauuccuguucucaua

SEQ ID NO: 18038 - RNA, 21 nt, Artificial Sequence
  Guide RNA
cuaugagaacaggaaucacug

SEQ ID NO: 18039 - RNA, 21 nt, Artificial Sequence
  Guide RNA
cuaugagaacagggaucacug

SEQ ID NO: 18040 - RNA, 21 nt, Artificial Sequence
  Guide RNA
cucuaugagaacaggaaucac

SEQ ID NO: 18041 - RNA, 21 nt, Artificial Sequence
  Guide RNA
cucuaugagaacagggaucac

SEQ ID NO: 18042 - RNA, 21 nt, Artificial Sequence
  Guide RNA
gaacaggaaucacugguuacc

SEQ ID NO: 18043 - RNA, 21 nt, Artificial Sequence
  Guide RNA
gaacagggaucacugguuacc

SEQ ID NO: 18044 - RNA, 21 nt, Artificial Sequence
  Guide RNA
gaaucacugguuaccacucua

SEQ ID NO: 18045 - RNA, 21 nt, Artificial Sequence
  Guide RNA
gagaacaggaaucacugguua

SEQ ID NO: 18046 - RNA, 21 nt, Artificial Sequence
  Guide RNA
gagaacagggaucacugguua

SEQ ID NO: 18047 - RNA, 21 nt, Artificial Sequence
  Guide RNA
gagugguaaccagugaucccu

SEQ ID NO: 18048 - RNA, 21 nt, Artificial Sequence
  Guide RNA
gagugguaaccagugauuccu

SEQ ID NO: 18049 - RNA, 21 nt, Artificial Sequence
  Guide RNA
gaucccuguucucauagagau

SEQ ID NO: 18050 - RNA, 21 nt, Artificial Sequence
  Guide RNA
gauuccuguucucauagagau

SEQ ID NO: 18051 - RNA, 21 nt, Artificial Sequence
  Guide RNA
ggaaucacugguuaccacucu

SEQ ID NO: 18052 - RNA, 21 nt, Artificial Sequence
  Guide RNA
ggaucacugguuaccacucua

SEQ ID NO: 18053 - RNA, 21 nt, Artificial Sequence
  Guide RNA
gggaucacugguuaccacucu

SEQ ID NO: 18054 - RNA, 21 nt, Artificial Sequence
  Guide RNA
gguaaccagugaucccuguuc

SEQ ID NO: 18055 - RNA, 21 nt, Artificial Sequence
  Guide RNA
gguaaccagugauuccuguuc

SEQ ID NO: 18056 - RNA, 21 nt, Artificial Sequence
  Guide RNA
gguguuagagugguaaccagu

SEQ ID NO: 18057 - RNA, 21 nt, Artificial Sequence
  Guide RNA
guaaccagugaucccuguucu

SEQ ID NO: 18058 - RNA, 21 nt, Artificial Sequence
  Guide RNA
guaaccagugauuccuguucu

SEQ ID NO: 18059 - RNA, 21 nt, Artificial Sequence
  Guide RNA
gugaucccuguucucauagag

SEQ ID NO: 18060 - RNA, 21 nt, Artificial Sequence
  Guide RNA
gugauuccuguucucauagag

SEQ ID NO: 18061 - RNA, 21 nt, Artificial Sequence
  Guide RNA
gugguaaccagugaucccugu

SEQ ID NO: 18062 - RNA, 21 nt, Artificial Sequence
  Guide RNA
gugguaaccagugauuccugu

SEQ ID NO: 18063 - RNA, 21 nt, Artificial Sequence
  Guide RNA
guguuagagugguaaccagug

SEQ ID NO: 18064 - RNA, 21 nt, Artificial Sequence
  Guide RNA
guuagagugguaaccagugau

SEQ ID NO: 18065 - RNA, 21 nt, Artificial Sequence
  Guide RNA
uaaccagugaucccuguucuc

SEQ ID NO: 18066 - RNA, 21 nt, Artificial Sequence
  Guide RNA
uaaccagugauuccuguucuc

SEQ ID NO: 18067 - RNA, 21 nt, Artificial Sequence
  Guide RNA
uaaucucuaugagaacaggaa

SEQ ID NO: 18068 - RNA, 21 nt, Artificial Sequence
  Guide RNA
uaaucucuaugagaacaggga

SEQ ID NO: 18069 - RNA, 21 nt, Artificial Sequence
  Guide RNA
uagagugguaaccagugaucc

SEQ ID NO: 18070 - RNA, 21 nt, Artificial Sequence
  Guide RNA
uagagugguaaccagugauuc

SEQ ID NO: 18071 - RNA, 21 nt, Artificial Sequence
  Guide RNA
uaugagaacaggaaucacugg

SEQ ID NO: 18072 - RNA, 21 nt, Artificial Sequence
  Guide RNA
uaugagaacagggaucacugg

SEQ ID NO: 18073 - RNA, 21 nt, Artificial Sequence
  Guide RNA
ucccuguucucauagagauua

SEQ ID NO: 18074 - RNA, 21 nt, Artificial Sequence
  Guide RNA
ucuaugagaacaggaaucacu

SEQ ID NO: 18075 - RNA, 21 nt, Artificial Sequence
  Guide RNA
ucuaugagaacagggaucacu

SEQ ID NO: 18076 - RNA, 21 nt, Artificial Sequence
  Guide RNA
ucucuaugagaacaggaauca

SEQ ID NO: 18077 - RNA, 21 nt, Artificial Sequence
  Guide RNA
ucucuaugagaacagggauca

SEQ ID NO: 18078 - RNA, 21 nt, Artificial Sequence
  Guide RNA
ugagaacaggaaucacugguu

SEQ ID NO: 18079 - RNA, 21 nt, Artificial Sequence
  Guide RNA
ugagaacagggaucacugguu

SEQ ID NO: 18080 - RNA, 21 nt, Artificial Sequence
  Guide RNA
ugaucccuguucucauagaga

SEQ ID NO: 18081 - RNA, 21 nt, Artificial Sequence
  Guide RNA
ugauuccuguucucauagaga

SEQ ID NO: 18082 - RNA, 21 nt, Artificial Sequence
  Guide RNA
ugguaaccagugaucccuguu

SEQ ID NO: 18083 - RNA, 21 nt, Artificial Sequence
  Guide RNA
ugguaaccagugauuccuguu

SEQ ID NO: 18084 - RNA, 21 nt, Artificial Sequence
  Guide RNA
uguuagagugguaaccaguga

SEQ ID NO: 18085 - RNA, 21 nt, Artificial Sequence
  Guide RNA
uuaaucucuaugagaacagga

SEQ ID NO: 18086 - RNA, 21 nt, Artificial Sequence
  Guide RNA
uuaaucucuaugagaacaggg

SEQ ID NO: 18087 - RNA, 21 nt, Artificial Sequence
  Guide RNA
uuagagugguaaccagugauc

SEQ ID NO: 18088 - RNA, 21 nt, Artificial Sequence
  Guide RNA
uuagagugguaaccagugauu

SEQ ID NO: 18089 - RNA, 21 nt, Artificial Sequence
  Guide RNA
uuccuguucucauagagauua

SEQ ID NO: 18090 - RNA, 21 nt, Artificial Sequence
  Guide RNA
uuuaaucucuaugagaacagg

SEQ ID NO: 18091 - RNA, 22 nt, Artificial Sequence
  Guide RNA
aacaggaaucacugguuaccac

SEQ ID NO: 18092 - RNA, 22 nt, Artificial Sequence
  Guide RNA
aacagggaucacugguuaccac

SEQ ID NO: 18093 - RNA, 22 nt, Artificial Sequence
  Guide RNA
aaccagugaucccuguucucau

SEQ ID NO: 18094 - RNA, 22 nt, Artificial Sequence
  Guide RNA
aaccagugauuccuguucucau

SEQ ID NO: 18095 - RNA, 22 nt, Artificial Sequence
  Guide RNA
aaucucuaugagaacaggaauc

SEQ ID NO: 18096 - RNA, 22 nt, Artificial Sequence
  Guide RNA
aaucucuaugagaacagggauc

SEQ ID NO: 18097 - RNA, 22 nt, Artificial Sequence
  Guide RNA
acaggaaucacugguuaccacu

SEQ ID NO: 18098 - RNA, 22 nt, Artificial Sequence
  Guide RNA
acagggaucacugguuaccacu

SEQ ID NO: 18099 - RNA, 22 nt, Artificial Sequence
  Guide RNA
accagugaucccuguucucaua

SEQ ID NO: 18100 - RNA, 22 nt, Artificial Sequence
  Guide RNA
accagugauuccuguucucaua

SEQ ID NO: 18101 - RNA, 22 nt, Artificial Sequence
  Guide RNA
agaacaggaaucacugguuacc

SEQ ID NO: 18102 - RNA, 22 nt, Artificial Sequence
  Guide RNA
agaacagggaucacugguuacc

SEQ ID NO: 18103 - RNA, 22 nt, Artificial Sequence
  Guide RNA
agagugguaaccagugaucccu

SEQ ID NO: 18104 - RNA, 22 nt, Artificial Sequence
  Guide RNA
agagugguaaccagugauuccu

SEQ ID NO: 18105 - RNA, 22 nt, Artificial Sequence
  Guide RNA
aggaaucacugguuaccacucu

SEQ ID NO: 18106 - RNA, 22 nt, Artificial Sequence
  Guide RNA
agggaucacugguuaccacucu

SEQ ID NO: 18107 - RNA, 22 nt, Artificial Sequence
  Guide RNA
agugaucccuguucucauagag

SEQ ID NO: 18108 - RNA, 22 nt, Artificial Sequence
  Guide RNA
agugauuccuguucucauagag

SEQ ID NO: 18109 - RNA, 22 nt, Artificial Sequence
  Guide RNA
agugguaaccagugaucccugu

SEQ ID NO: 18110 - RNA, 22 nt, Artificial Sequence
  Guide RNA
agugguaaccagugauuccugu

SEQ ID NO: 18111 - RNA, 22 nt, Artificial Sequence
  Guide RNA
aucccuguucucauagagauua

SEQ ID NO: 18112 - RNA, 22 nt, Artificial Sequence
  Guide RNA
aucucuaugagaacaggaauca

SEQ ID NO: 18113 - RNA, 22 nt, Artificial Sequence
  Guide RNA
aucucuaugagaacagggauca

SEQ ID NO: 18114 - RNA, 22 nt, Artificial Sequence
  Guide RNA
augagaacaggaaucacugguu

SEQ ID NO: 18115 - RNA, 22 nt, Artificial Sequence
  Guide RNA
augagaacagggaucacugguu

SEQ ID NO: 18116 - RNA, 22 nt, Artificial Sequence
  Guide RNA
auuccuguucucauagagauua

SEQ ID NO: 18117 - RNA, 22 nt, Artificial Sequence
  Guide RNA
auuuaaucucuaugagaacagg

SEQ ID NO: 18118 - RNA, 22 nt, Artificial Sequence
  Guide RNA
caggaaucacugguuaccacuc

SEQ ID NO: 18119 - RNA, 22 nt, Artificial Sequence
  Guide RNA
cagggaucacugguuaccacuc

SEQ ID NO: 18120 - RNA, 22 nt, Artificial Sequence
  Guide RNA
cagugaucccuguucucauaga

SEQ ID NO: 18121 - RNA, 22 nt, Artificial Sequence
  Guide RNA
cagugauuccuguucucauaga

SEQ ID NO: 18122 - RNA, 22 nt, Artificial Sequence
  Guide RNA
ccagugaucccuguucucauag

SEQ ID NO: 18123 - RNA, 22 nt, Artificial Sequence
  Guide RNA
ccagugauuccuguucucauag

SEQ ID NO: 18124 - RNA, 22 nt, Artificial Sequence
  Guide RNA
cuaugagaacaggaaucacugg

SEQ ID NO: 18125 - RNA, 22 nt, Artificial Sequence
  Guide RNA
cuaugagaacagggaucacugg

SEQ ID NO: 18126 - RNA, 22 nt, Artificial Sequence
  Guide RNA
cucuaugagaacaggaaucacu

SEQ ID NO: 18127 - RNA, 22 nt, Artificial Sequence
  Guide RNA
cucuaugagaacagggaucacu

SEQ ID NO: 18128 - RNA, 22 nt, Artificial Sequence
  Guide RNA
gaacaggaaucacugguuacca

SEQ ID NO: 18129 - RNA, 22 nt, Artificial Sequence
  Guide RNA
gaacagggaucacugguuacca

SEQ ID NO: 18130 - RNA, 22 nt, Artificial Sequence
  Guide RNA
gaaucacugguuaccacucuaa

SEQ ID NO: 18131 - RNA, 22 nt, Artificial Sequence
  Guide RNA
gagaacaggaaucacugguuac

SEQ ID NO: 18132 - RNA, 22 nt, Artificial Sequence
  Guide RNA
gagaacagggaucacugguuac

SEQ ID NO: 18133 - RNA, 22 nt, Artificial Sequence
  Guide RNA
gagugguaaccagugaucccug

SEQ ID NO: 18134 - RNA, 22 nt, Artificial Sequence
  Guide RNA
gagugguaaccagugauuccug

SEQ ID NO: 18135 - RNA, 22 nt, Artificial Sequence
  Guide RNA
gaucccuguucucauagagauu

SEQ ID NO: 18136 - RNA, 22 nt, Artificial Sequence
  Guide RNA
gauuccuguucucauagagauu

SEQ ID NO: 18137 - RNA, 22 nt, Artificial Sequence
  Guide RNA
ggaaucacugguuaccacucua

SEQ ID NO: 18138 - RNA, 22 nt, Artificial Sequence
  Guide RNA
ggaucacugguuaccacucuaa

SEQ ID NO: 18139 - RNA, 22 nt, Artificial Sequence
  Guide RNA
gggaucacugguuaccacucua

SEQ ID NO: 18140 - RNA, 22 nt, Artificial Sequence
  Guide RNA
ggguguuagagugguaaccagu

SEQ ID NO: 18141 - RNA, 22 nt, Artificial Sequence
  Guide RNA
gguaaccagugaucccuguucu

SEQ ID NO: 18142 - RNA, 22 nt, Artificial Sequence
  Guide RNA
gguaaccagugauuccuguucu

SEQ ID NO: 18143 - RNA, 22 nt, Artificial Sequence
  Guide RNA
gguguuagagugguaaccagug

SEQ ID NO: 18144 - RNA, 22 nt, Artificial Sequence
  Guide RNA
guaaccagugaucccuguucuc

SEQ ID NO: 18145 - RNA, 22 nt, Artificial Sequence
  Guide RNA
guaaccagugauuccuguucuc

SEQ ID NO: 18146 - RNA, 22 nt, Artificial Sequence
  Guide RNA
gugaucccuguucucauagaga

SEQ ID NO: 18147 - RNA, 22 nt, Artificial Sequence
  Guide RNA
gugauuccuguucucauagaga

SEQ ID NO: 18148 - RNA, 22 nt, Artificial Sequence
  Guide RNA
gugguaaccagugaucccuguu

SEQ ID NO: 18149 - RNA, 22 nt, Artificial Sequence
  Guide RNA
gugguaaccagugauuccuguu

SEQ ID NO: 18150 - RNA, 22 nt, Artificial Sequence
  Guide RNA
guguuagagugguaaccaguga

SEQ ID NO: 18151 - RNA, 22 nt, Artificial Sequence
  Guide RNA
guuagagugguaaccagugauc

SEQ ID NO: 18152 - RNA, 22 nt, Artificial Sequence
  Guide RNA
guuagagugguaaccagugauu

SEQ ID NO: 18153 - RNA, 22 nt, Artificial Sequence
  Guide RNA
uaaccagugaucccuguucuca

SEQ ID NO: 18154 - RNA, 22 nt, Artificial Sequence
  Guide RNA
uaaccagugauuccuguucuca

SEQ ID NO: 18155 - RNA, 22 nt, Artificial Sequence
  Guide RNA
uaaucucuaugagaacaggaau

SEQ ID NO: 18156 - RNA, 22 nt, Artificial Sequence
  Guide RNA
uaaucucuaugagaacagggau

SEQ ID NO: 18157 - RNA, 22 nt, Artificial Sequence
  Guide RNA
uagagugguaaccagugauccc

SEQ ID NO: 18158 - RNA, 22 nt, Artificial Sequence
  Guide RNA
uagagugguaaccagugauucc

SEQ ID NO: 18159 - RNA, 22 nt, Artificial Sequence
  Guide RNA
uaugagaacaggaaucacuggu

SEQ ID NO: 18160 - RNA, 22 nt, Artificial Sequence
  Guide RNA
uaugagaacagggaucacuggu

SEQ ID NO: 18161 - RNA, 22 nt, Artificial Sequence
  Guide RNA
ucccuguucucauagagauuaa

SEQ ID NO: 18162 - RNA, 22 nt, Artificial Sequence
  Guide RNA
ucuaugagaacaggaaucacug

SEQ ID NO: 18163 - RNA, 22 nt, Artificial Sequence
  Guide RNA
ucuaugagaacagggaucacug

SEQ ID NO: 18164 - RNA, 22 nt, Artificial Sequence
  Guide RNA
ucucuaugagaacaggaaucac

SEQ ID NO: 18165 - RNA, 22 nt, Artificial Sequence
  Guide RNA
ucucuaugagaacagggaucac

SEQ ID NO: 18166 - RNA, 22 nt, Artificial Sequence
  Guide RNA
ugagaacaggaaucacugguua

SEQ ID NO: 18167 - RNA, 22 nt, Artificial Sequence
  Guide RNA
ugagaacagggaucacugguua

SEQ ID NO: 18168 - RNA, 22 nt, Artificial Sequence
  Guide RNA
ugaucccuguucucauagagau

SEQ ID NO: 18169 - RNA, 22 nt, Artificial Sequence
  Guide RNA
ugauuccuguucucauagagau

SEQ ID NO: 18170 - RNA, 22 nt, Artificial Sequence
  Guide RNA
ugguaaccagugaucccuguuc

SEQ ID NO: 18171 - RNA, 22 nt, Artificial Sequence
  Guide RNA
ugguaaccagugauuccuguuc

SEQ ID NO: 18172 - RNA, 22 nt, Artificial Sequence
  Guide RNA
uguuagagugguaaccagugau

SEQ ID NO: 18173 - RNA, 22 nt, Artificial Sequence
  Guide RNA
uuaaucucuaugagaacaggaa

SEQ ID NO: 18174 - RNA, 22 nt, Artificial Sequence
  Guide RNA
uuaaucucuaugagaacaggga

SEQ ID NO: 18175 - RNA, 22 nt, Artificial Sequence
  Guide RNA
uuagagugguaaccagugaucc

SEQ ID NO: 18176 - RNA, 22 nt, Artificial Sequence
  Guide RNA
uuagagugguaaccagugauuc

SEQ ID NO: 18177 - RNA, 22 nt, Artificial Sequence
  Guide RNA
uuccuguucucauagagauuaa

SEQ ID NO: 18178 - RNA, 22 nt, Artificial Sequence
  Guide RNA
uuuaaucucuaugagaacagga

SEQ ID NO: 18179 - RNA, 22 nt, Artificial Sequence
  Guide RNA
uuuaaucucuaugagaacaggg

SEQ ID NO: 18180 - RNA, 20 nt, Artificial Sequence
  Guide RNA
aaacagcccaagcaggaauc

SEQ ID NO: 18181 - RNA, 20 nt, Artificial Sequence
  Guide RNA
aaacagcccgagcaggaauc

SEQ ID NO: 18182 - RNA, 20 nt, Artificial Sequence
  Guide RNA
aacagcaaacagcccaagca

SEQ ID NO: 18183 - RNA, 20 nt, Artificial Sequence
  Guide RNA
aacagcaaacagcccgagca

SEQ ID NO: 18184 - RNA, 20 nt, Artificial Sequence
  Guide RNA
aacagcccaagcaggaaucg

SEQ ID NO: 18185 - RNA, 20 nt, Artificial Sequence
  Guide RNA
aacagcccgagcaggaaucg

SEQ ID NO: 18186 - RNA, 20 nt, Artificial Sequence
  Guide RNA
acagcaaacagcccaagcag

SEQ ID NO: 18187 - RNA, 20 nt, Artificial Sequence
  Guide RNA
acagcaaacagcccgagcag

SEQ ID NO: 18188 - RNA, 20 nt, Artificial Sequence
  Guide RNA
acagcccaagcaggaaucgg

SEQ ID NO: 18189 - RNA, 20 nt, Artificial Sequence
  Guide RNA
acagcccgagcaggaaucgg

SEQ ID NO: 18190 - RNA, 20 nt, Artificial Sequence
  Guide RNA
accagccaacagcaaacagc

SEQ ID NO: 18191 - RNA, 20 nt, Artificial Sequence
  Guide RNA
acuaugugccgauuccugcu

SEQ ID NO: 18192 - RNA, 20 nt, Artificial Sequence
  Guide RNA
agcaaacagcccaagcagga

SEQ ID NO: 18193 - RNA, 20 nt, Artificial Sequence
  Guide RNA
agcaaacagcccgagcagga

SEQ ID NO: 18194 - RNA, 20 nt, Artificial Sequence
  Guide RNA
agccaacagcaaacagccca

SEQ ID NO: 18195 - RNA, 20 nt, Artificial Sequence
  Guide RNA
agccaacagcaaacagcccg

SEQ ID NO: 18196 - RNA, 20 nt, Artificial Sequence
  Guide RNA
agcccaagcaggaaucggca

SEQ ID NO: 18197 - RNA, 20 nt, Artificial Sequence
  Guide RNA
agcccgagcaggaaucggca

SEQ ID NO: 18198 - RNA, 20 nt, Artificial Sequence
  Guide RNA
augacuaugugccgauuccu

SEQ ID NO: 18199 - RNA, 20 nt, Artificial Sequence
  Guide RNA
augugccgauuccugcucgg

SEQ ID NO: 18200 - RNA, 20 nt, Artificial Sequence
  Guide RNA
augugccgauuccugcuugg

SEQ ID NO: 18201 - RNA, 20 nt, Artificial Sequence
  Guide RNA
auuccugcucgggcuguuug

SEQ ID NO: 18202 - RNA, 20 nt, Artificial Sequence
  Guide RNA
auuccugcuugggcuguuug

SEQ ID NO: 18203 - RNA, 20 nt, Artificial Sequence
  Guide RNA
caaacagcccaagcaggaau

SEQ ID NO: 18204 - RNA, 20 nt, Artificial Sequence
  Guide RNA
caaacagcccgagcaggaau

SEQ ID NO: 18205 - RNA, 20 nt, Artificial Sequence
  Guide RNA
caacagcaaacagcccaagc

SEQ ID NO: 18206 - RNA, 20 nt, Artificial Sequence
  Guide RNA
caacagcaaacagcccgagc

SEQ ID NO: 18207 - RNA, 20 nt, Artificial Sequence
  Guide RNA
caagcaggaaucggcacaua

SEQ ID NO: 18208 - RNA, 20 nt, Artificial Sequence
  Guide RNA
cagcaaacagcccaagcagg

SEQ ID NO: 18209 - RNA, 20 nt, Artificial Sequence
  Guide RNA
cagcaaacagcccgagcagg

SEQ ID NO: 18210 - RNA, 20 nt, Artificial Sequence
  Guide RNA
cagccaacagcaaacagccc

SEQ ID NO: 18211 - RNA, 20 nt, Artificial Sequence
  Guide RNA
cagcccaagcaggaaucggc

SEQ ID NO: 18212 - RNA, 20 nt, Artificial Sequence
  Guide RNA
cagcccgagcaggaaucggc

SEQ ID NO: 18213 - RNA, 20 nt, Artificial Sequence
  Guide RNA
ccaacagcaaacagcccaag

SEQ ID NO: 18214 - RNA, 20 nt, Artificial Sequence
  Guide RNA
ccaacagcaaacagcccgag

SEQ ID NO: 18215 - RNA, 20 nt, Artificial Sequence
  Guide RNA
ccaagcaggaaucggcacau

SEQ ID NO: 18216 - RNA, 20 nt, Artificial Sequence
  Guide RNA
ccagccaacagcaaacagcc

SEQ ID NO: 18217 - RNA, 20 nt, Artificial Sequence
  Guide RNA
cccaagcaggaaucggcaca

SEQ ID NO: 18218 - RNA, 20 nt, Artificial Sequence
  Guide RNA
cccgagcaggaaucggcaca

SEQ ID NO: 18219 - RNA, 20 nt, Artificial Sequence
  Guide RNA
ccgagcaggaaucggcacau

SEQ ID NO: 18220 - RNA, 20 nt, Artificial Sequence
  Guide RNA
ccgauuccugcucgggcugu

SEQ ID NO: 18221 - RNA, 20 nt, Artificial Sequence
  Guide RNA
ccgauuccugcuugggcugu

SEQ ID NO: 18222 - RNA, 20 nt, Artificial Sequence
  Guide RNA
ccugcucgggcuguuugcug

SEQ ID NO: 18223 - RNA, 20 nt, Artificial Sequence
  Guide RNA
ccugcuugggcuguuugcug

SEQ ID NO: 18224 - RNA, 20 nt, Artificial Sequence
  Guide RNA
cgagcaggaaucggcacaua

SEQ ID NO: 18225 - RNA, 20 nt, Artificial Sequence
  Guide RNA
cgauuccugcucgggcuguu

SEQ ID NO: 18226 - RNA, 20 nt, Artificial Sequence
  Guide RNA
cgauuccugcuugggcuguu

SEQ ID NO: 18227 - RNA, 20 nt, Artificial Sequence
  Guide RNA
cuaugugccgauuccugcuc

SEQ ID NO: 18228 - RNA, 20 nt, Artificial Sequence
  Guide RNA
cuaugugccgauuccugcuu

SEQ ID NO: 18229 - RNA, 20 nt, Artificial Sequence
  Guide RNA
cucgggcuguuugcuguugg

SEQ ID NO: 18230 - RNA, 20 nt, Artificial Sequence
  Guide RNA
cugcucgggcuguuugcugu

SEQ ID NO: 18231 - RNA, 20 nt, Artificial Sequence
  Guide RNA
cugcuugggcuguuugcugu

SEQ ID NO: 18232 - RNA, 20 nt, Artificial Sequence
  Guide RNA
cuugggcuguuugcuguugg

SEQ ID NO: 18233 - RNA, 20 nt, Artificial Sequence
  Guide RNA
gacuaugugccgauuccugc

SEQ ID NO: 18234 - RNA, 20 nt, Artificial Sequence
  Guide RNA
gauuccugcucgggcuguuu

SEQ ID NO: 18235 - RNA, 20 nt, Artificial Sequence
  Guide RNA
gauuccugcuugggcuguuu

SEQ ID NO: 18236 - RNA, 20 nt, Artificial Sequence
  Guide RNA
gcaaacagcccaagcaggaa

SEQ ID NO: 18237 - RNA, 20 nt, Artificial Sequence
  Guide RNA
gcaaacagcccgagcaggaa

SEQ ID NO: 18238 - RNA, 20 nt, Artificial Sequence
  Guide RNA
gccaacagcaaacagcccaa

SEQ ID NO: 18239 - RNA, 20 nt, Artificial Sequence
  Guide RNA
gccaacagcaaacagcccga

SEQ ID NO: 18240 - RNA, 20 nt, Artificial Sequence
  Guide RNA
gcccaagcaggaaucggcac

SEQ ID NO: 18241 - RNA, 20 nt, Artificial Sequence
  Guide RNA
gcccgagcaggaaucggcac

SEQ ID NO: 18242 - RNA, 20 nt, Artificial Sequence
  Guide RNA
gccgauuccugcucgggcug

SEQ ID NO: 18243 - RNA, 20 nt, Artificial Sequence
  Guide RNA
gccgauuccugcuugggcug

SEQ ID NO: 18244 - RNA, 20 nt, Artificial Sequence
  Guide RNA
gcucgggcuguuugcuguug

SEQ ID NO: 18245 - RNA, 20 nt, Artificial Sequence
  Guide RNA
gcuugggcuguuugcuguug

SEQ ID NO: 18246 - RNA, 20 nt, Artificial Sequence
  Guide RNA
gugccgauuccugcucgggc

SEQ ID NO: 18247 - RNA, 20 nt, Artificial Sequence
  Guide RNA
gugccgauuccugcuugggc

SEQ ID NO: 18248 - RNA, 20 nt, Artificial Sequence
  Guide RNA
uaccagccaacagcaaacag

SEQ ID NO: 18249 - RNA, 20 nt, Artificial Sequence
  Guide RNA
uaugugccgauuccugcucg

SEQ ID NO: 18250 - RNA, 20 nt, Artificial Sequence
  Guide RNA
uaugugccgauuccugcuug

SEQ ID NO: 18251 - RNA, 20 nt, Artificial Sequence
  Guide RNA
uccugcucgggcuguuugcu

SEQ ID NO: 18252 - RNA, 20 nt, Artificial Sequence
  Guide RNA
uccugcuugggcuguuugcu

SEQ ID NO: 18253 - RNA, 20 nt, Artificial Sequence
  Guide RNA
ucgggcuguuugcuguuggc

SEQ ID NO: 18254 - RNA, 20 nt, Artificial Sequence
  Guide RNA
ugacuaugugccgauuccug

SEQ ID NO: 18255 - RNA, 20 nt, Artificial Sequence
  Guide RNA
ugccgauuccugcucgggcu

SEQ ID NO: 18256 - RNA, 20 nt, Artificial Sequence
  Guide RNA
ugccgauuccugcuugggcu

SEQ ID NO: 18257 - RNA, 20 nt, Artificial Sequence
  Guide RNA
ugcucgggcuguuugcuguu

SEQ ID NO: 18258 - RNA, 20 nt, Artificial Sequence
  Guide RNA
ugcuugggcuguuugcuguu

SEQ ID NO: 18259 - RNA, 20 nt, Artificial Sequence
  Guide RNA
ugugccgauuccugcucggg

SEQ ID NO: 18260 - RNA, 20 nt, Artificial Sequence
  Guide RNA
ugugccgauuccugcuuggg

SEQ ID NO: 18261 - RNA, 20 nt, Artificial Sequence
  Guide RNA
uuccugcucgggcuguuugc

SEQ ID NO: 18262 - RNA, 20 nt, Artificial Sequence
  Guide RNA
uuccugcuugggcuguuugc

SEQ ID NO: 18263 - RNA, 20 nt, Artificial Sequence
  Guide RNA
uugggcuguuugcuguuggc

SEQ ID NO: 18264 - RNA, 21 nt, Artificial Sequence
  Guide RNA
aaacagcccaagcaggaaucg

SEQ ID NO: 18265 - RNA, 21 nt, Artificial Sequence
  Guide RNA
aaacagcccgagcaggaaucg

SEQ ID NO: 18266 - RNA, 21 nt, Artificial Sequence
  Guide RNA
aacagcaaacagcccaagcag

SEQ ID NO: 18267 - RNA, 21 nt, Artificial Sequence
  Guide RNA
aacagcaaacagcccgagcag

SEQ ID NO: 18268 - RNA, 21 nt, Artificial Sequence
  Guide RNA
aacagcccaagcaggaaucgg

SEQ ID NO: 18269 - RNA, 21 nt, Artificial Sequence
  Guide RNA
aacagcccgagcaggaaucgg

SEQ ID NO: 18270 - RNA, 21 nt, Artificial Sequence
  Guide RNA
acagcaaacagcccaagcagg

SEQ ID NO: 18271 - RNA, 21 nt, Artificial Sequence
  Guide RNA
acagcaaacagcccgagcagg

SEQ ID NO: 18272 - RNA, 21 nt, Artificial Sequence
  Guide RNA
acagcccaagcaggaaucggc

SEQ ID NO: 18273 - RNA, 21 nt, Artificial Sequence
  Guide RNA
acagcccgagcaggaaucggc

SEQ ID NO: 18274 - RNA, 21 nt, Artificial Sequence
  Guide RNA
accagccaacagcaaacagcc

SEQ ID NO: 18275 - RNA, 21 nt, Artificial Sequence
  Guide RNA
acuaugugccgauuccugcuc

SEQ ID NO: 18276 - RNA, 21 nt, Artificial Sequence
  Guide RNA
acuaugugccgauuccugcuu

SEQ ID NO: 18277 - RNA, 21 nt, Artificial Sequence
  Guide RNA
agcaaacagcccaagcaggaa

SEQ ID NO: 18278 - RNA, 21 nt, Artificial Sequence
  Guide RNA
agcaaacagcccgagcaggaa

SEQ ID NO: 18279 - RNA, 21 nt, Artificial Sequence
  Guide RNA
agccaacagcaaacagcccaa

SEQ ID NO: 18280 - RNA, 21 nt, Artificial Sequence
  Guide RNA
agccaacagcaaacagcccga

SEQ ID NO: 18281 - RNA, 21 nt, Artificial Sequence
  Guide RNA
agcccaagcaggaaucggcac

SEQ ID NO: 18282 - RNA, 21 nt, Artificial Sequence
  Guide RNA
agcccgagcaggaaucggcac

SEQ ID NO: 18283 - RNA, 21 nt, Artificial Sequence
  Guide RNA
augacuaugugccgauuccug

SEQ ID NO: 18284 - RNA, 21 nt, Artificial Sequence
  Guide RNA
augugccgauuccugcucggg

SEQ ID NO: 18285 - RNA, 21 nt, Artificial Sequence
  Guide RNA
augugccgauuccugcuuggg

SEQ ID NO: 18286 - RNA, 21 nt, Artificial Sequence
  Guide RNA
auuccugcucgggcuguuugc

SEQ ID NO: 18287 - RNA, 21 nt, Artificial Sequence
  Guide RNA
auuccugcuugggcuguuugc

SEQ ID NO: 18288 - RNA, 21 nt, Artificial Sequence
  Guide RNA
caaacagcccaagcaggaauc

SEQ ID NO: 18289 - RNA, 21 nt, Artificial Sequence
  Guide RNA
caaacagcccgagcaggaauc

SEQ ID NO: 18290 - RNA, 21 nt, Artificial Sequence
  Guide RNA
caacagcaaacagcccaagca

SEQ ID NO: 18291 - RNA, 21 nt, Artificial Sequence
  Guide RNA
caacagcaaacagcccgagca

SEQ ID NO: 18292 - RNA, 21 nt, Artificial Sequence
  Guide RNA
caagcaggaaucggcacauag

SEQ ID NO: 18293 - RNA, 21 nt, Artificial Sequence
  Guide RNA
cagcaaacagcccaagcagga

SEQ ID NO: 18294 - RNA, 21 nt, Artificial Sequence
  Guide RNA
cagcaaacagcccgagcagga

SEQ ID NO: 18295 - RNA, 21 nt, Artificial Sequence
  Guide RNA
cagccaacagcaaacagccca

SEQ ID NO: 18296 - RNA, 21 nt, Artificial Sequence
  Guide RNA
cagccaacagcaaacagcccg

SEQ ID NO: 18297 - RNA, 21 nt, Artificial Sequence
  Guide RNA
cagcccaagcaggaaucggca

SEQ ID NO: 18298 - RNA, 21 nt, Artificial Sequence
  Guide RNA
cagcccgagcaggaaucggca

SEQ ID NO: 18299 - RNA, 21 nt, Artificial Sequence
  Guide RNA
ccaacagcaaacagcccaagc

SEQ ID NO: 18300 - RNA, 21 nt, Artificial Sequence
  Guide RNA
ccaacagcaaacagcccgagc

SEQ ID NO: 18301 - RNA, 21 nt, Artificial Sequence
  Guide RNA
ccaagcaggaaucggcacaua

SEQ ID NO: 18302 - RNA, 21 nt, Artificial Sequence
  Guide RNA
ccagccaacagcaaacagccc

SEQ ID NO: 18303 - RNA, 21 nt, Artificial Sequence
  Guide RNA
cccaagcaggaaucggcacau

SEQ ID NO: 18304 - RNA, 21 nt, Artificial Sequence
  Guide RNA
cccgagcaggaaucggcacau

SEQ ID NO: 18305 - RNA, 21 nt, Artificial Sequence
  Guide RNA
ccgagcaggaaucggcacaua

SEQ ID NO: 18306 - RNA, 21 nt, Artificial Sequence
  Guide RNA
ccgauuccugcucgggcuguu

SEQ ID NO: 18307 - RNA, 21 nt, Artificial Sequence
  Guide RNA
ccgauuccugcuugggcuguu

SEQ ID NO: 18308 - RNA, 21 nt, Artificial Sequence
  Guide RNA
ccugcucgggcuguuugcugu

SEQ ID NO: 18309 - RNA, 21 nt, Artificial Sequence
  Guide RNA
ccugcuugggcuguuugcugu

SEQ ID NO: 18310 - RNA, 21 nt, Artificial Sequence
  Guide RNA
cgagcaggaaucggcacauag

SEQ ID NO: 18311 - RNA, 21 nt, Artificial Sequence
  Guide RNA
cgauuccugcucgggcuguuu

SEQ ID NO: 18312 - RNA, 21 nt, Artificial Sequence
  Guide RNA
cgauuccugcuugggcuguuu

SEQ ID NO: 18313 - RNA, 21 nt, Artificial Sequence
  Guide RNA
cuaugugccgauuccugcucg

SEQ ID NO: 18314 - RNA, 21 nt, Artificial Sequence
  Guide RNA
cuaugugccgauuccugcuug

SEQ ID NO: 18315 - RNA, 21 nt, Artificial Sequence
  Guide RNA
cucgggcuguuugcuguuggc

SEQ ID NO: 18316 - RNA, 21 nt, Artificial Sequence
  Guide RNA
cugcucgggcuguuugcuguu

SEQ ID NO: 18317 - RNA, 21 nt, Artificial Sequence
  Guide RNA
cugcuugggcuguuugcuguu

SEQ ID NO: 18318 - RNA, 21 nt, Artificial Sequence
  Guide RNA
cuugggcuguuugcuguuggc

SEQ ID NO: 18319 - RNA, 21 nt, Artificial Sequence
  Guide RNA
gacuaugugccgauuccugcu

SEQ ID NO: 18320 - RNA, 21 nt, Artificial Sequence
  Guide RNA
gauuccugcucgggcuguuug

SEQ ID NO: 18321 - RNA, 21 nt, Artificial Sequence
  Guide RNA
gauuccugcuugggcuguuug

SEQ ID NO: 18322 - RNA, 21 nt, Artificial Sequence
  Guide RNA
gcaaacagcccaagcaggaau

SEQ ID NO: 18323 - RNA, 21 nt, Artificial Sequence
  Guide RNA
gcaaacagcccgagcaggaau

SEQ ID NO: 18324 - RNA, 21 nt, Artificial Sequence
  Guide RNA
gccaacagcaaacagcccaag

SEQ ID NO: 18325 - RNA, 21 nt, Artificial Sequence
  Guide RNA
gccaacagcaaacagcccgag

SEQ ID NO: 18326 - RNA, 21 nt, Artificial Sequence
  Guide RNA
gcccaagcaggaaucggcaca

SEQ ID NO: 18327 - RNA, 21 nt, Artificial Sequence
  Guide RNA
gcccgagcaggaaucggcaca

SEQ ID NO: 18328 - RNA, 21 nt, Artificial Sequence
  Guide RNA
gccgauuccugcucgggcugu

SEQ ID NO: 18329 - RNA, 21 nt, Artificial Sequence
  Guide RNA
gccgauuccugcuugggcugu

SEQ ID NO: 18330 - RNA, 21 nt, Artificial Sequence
  Guide RNA
gcucgggcuguuugcuguugg

SEQ ID NO: 18331 - RNA, 21 nt, Artificial Sequence
  Guide RNA
gcuugggcuguuugcuguugg

SEQ ID NO: 18332 - RNA, 21 nt, Artificial Sequence
  Guide RNA
gugccgauuccugcucgggcu

SEQ ID NO: 18333 - RNA, 21 nt, Artificial Sequence
  Guide RNA
gugccgauuccugcuugggcu

SEQ ID NO: 18334 - RNA, 21 nt, Artificial Sequence
  Guide RNA
uaccagccaacagcaaacagc

SEQ ID NO: 18335 - RNA, 21 nt, Artificial Sequence
  Guide RNA
uaugacuaugugccgauuccu

SEQ ID NO: 18336 - RNA, 21 nt, Artificial Sequence
  Guide RNA
uaugugccgauuccugcucgg

SEQ ID NO: 18337 - RNA, 21 nt, Artificial Sequence
  Guide RNA
uaugugccgauuccugcuugg

SEQ ID NO: 18338 - RNA, 21 nt, Artificial Sequence
  Guide RNA
uccugcucgggcuguuugcug

SEQ ID NO: 18339 - RNA, 21 nt, Artificial Sequence
  Guide RNA
uccugcuugggcuguuugcug

SEQ ID NO: 18340 - RNA, 21 nt, Artificial Sequence
  Guide RNA
ucgggcuguuugcuguuggcu

SEQ ID NO: 18341 - RNA, 21 nt, Artificial Sequence
  Guide RNA
ugacuaugugccgauuccugc

SEQ ID NO: 18342 - RNA, 21 nt, Artificial Sequence
  Guide RNA
ugccgauuccugcucgggcug

SEQ ID NO: 18343 - RNA, 21 nt, Artificial Sequence
  Guide RNA
ugccgauuccugcuugggcug

SEQ ID NO: 18344 - RNA, 21 nt, Artificial Sequence
  Guide RNA
ugcucgggcuguuugcuguug

SEQ ID NO: 18345 - RNA, 21 nt, Artificial Sequence
  Guide RNA
ugcuugggcuguuugcuguug

SEQ ID NO: 18346 - RNA, 21 nt, Artificial Sequence
  Guide RNA
ugugccgauuccugcucgggc

SEQ ID NO: 18347 - RNA, 21 nt, Artificial Sequence
  Guide RNA
ugugccgauuccugcuugggc

SEQ ID NO: 18348 - RNA, 21 nt, Artificial Sequence
  Guide RNA
uuaccagccaacagcaaacag

SEQ ID NO: 18349 - RNA, 21 nt, Artificial Sequence
  Guide RNA
uuccugcucgggcuguuugcu

SEQ ID NO: 18350 - RNA, 21 nt, Artificial Sequence
  Guide RNA
uuccugcuugggcuguuugcu

SEQ ID NO: 18351 - RNA, 21 nt, Artificial Sequence
  Guide RNA
uugggcuguuugcuguuggcu

SEQ ID NO: 18352 - RNA, 22 nt, Artificial Sequence
  Guide RNA
aaacagcccaagcaggaaucgg

SEQ ID NO: 18353 - RNA, 22 nt, Artificial Sequence
  Guide RNA
aaacagcccgagcaggaaucgg

SEQ ID NO: 18354 - RNA, 22 nt, Artificial Sequence
  Guide RNA
aacagcaaacagcccaagcagg

SEQ ID NO: 18355 - RNA, 22 nt, Artificial Sequence
  Guide RNA
aacagcaaacagcccgagcagg

SEQ ID NO: 18356 - RNA, 22 nt, Artificial Sequence
  Guide RNA
aacagcccaagcaggaaucggc

SEQ ID NO: 18357 - RNA, 22 nt, Artificial Sequence
  Guide RNA
aacagcccgagcaggaaucggc

SEQ ID NO: 18358 - RNA, 22 nt, Artificial Sequence
  Guide RNA
acagcaaacagcccaagcagga

SEQ ID NO: 18359 - RNA, 22 nt, Artificial Sequence
  Guide RNA
acagcaaacagcccgagcagga

SEQ ID NO: 18360 - RNA, 22 nt, Artificial Sequence
  Guide RNA
acagcccaagcaggaaucggca

SEQ ID NO: 18361 - RNA, 22 nt, Artificial Sequence
  Guide RNA
acagcccgagcaggaaucggca

SEQ ID NO: 18362 - RNA, 22 nt, Artificial Sequence
  Guide RNA
accagccaacagcaaacagccc

SEQ ID NO: 18363 - RNA, 22 nt, Artificial Sequence
  Guide RNA
acuaugugccgauuccugcucg

SEQ ID NO: 18364 - RNA, 22 nt, Artificial Sequence
  Guide RNA
acuaugugccgauuccugcuug

SEQ ID NO: 18365 - RNA, 22 nt, Artificial Sequence
  Guide RNA
agcaaacagcccaagcaggaau

SEQ ID NO: 18366 - RNA, 22 nt, Artificial Sequence
  Guide RNA
agcaaacagcccgagcaggaau

SEQ ID NO: 18367 - RNA, 22 nt, Artificial Sequence
  Guide RNA
agccaacagcaaacagcccaag

SEQ ID NO: 18368 - RNA, 22 nt, Artificial Sequence
  Guide RNA
agccaacagcaaacagcccgag

SEQ ID NO: 18369 - RNA, 22 nt, Artificial Sequence
  Guide RNA
agcccaagcaggaaucggcaca

SEQ ID NO: 18370 - RNA, 22 nt, Artificial Sequence
  Guide RNA
agcccgagcaggaaucggcaca

SEQ ID NO: 18371 - RNA, 22 nt, Artificial Sequence
  Guide RNA
augacuaugugccgauuccugc

SEQ ID NO: 18372 - RNA, 22 nt, Artificial Sequence
  Guide RNA
augugccgauuccugcucgggc

SEQ ID NO: 18373 - RNA, 22 nt, Artificial Sequence
  Guide RNA
augugccgauuccugcuugggc

SEQ ID NO: 18374 - RNA, 22 nt, Artificial Sequence
  Guide RNA
auuaccagccaacagcaaacag

SEQ ID NO: 18375 - RNA, 22 nt, Artificial Sequence
  Guide RNA
auuccugcucgggcuguuugcu

SEQ ID NO: 18376 - RNA, 22 nt, Artificial Sequence
  Guide RNA
auuccugcuugggcuguuugcu

SEQ ID NO: 18377 - RNA, 22 nt, Artificial Sequence
  Guide RNA
caaacagcccaagcaggaaucg

SEQ ID NO: 18378 - RNA, 22 nt, Artificial Sequence
  Guide RNA
caaacagcccgagcaggaaucg

SEQ ID NO: 18379 - RNA, 22 nt, Artificial Sequence
  Guide RNA
caacagcaaacagcccaagcag

SEQ ID NO: 18380 - RNA, 22 nt, Artificial Sequence
  Guide RNA
caacagcaaacagcccgagcag

SEQ ID NO: 18381 - RNA, 22 nt, Artificial Sequence
  Guide RNA
caagcaggaaucggcacauagu

SEQ ID NO: 18382 - RNA, 22 nt, Artificial Sequence
  Guide RNA
cagcaaacagcccaagcaggaa

SEQ ID NO: 18383 - RNA, 22 nt, Artificial Sequence
  Guide RNA
cagcaaacagcccgagcaggaa

SEQ ID NO: 18384 - RNA, 22 nt, Artificial Sequence
  Guide RNA
cagccaacagcaaacagcccaa

SEQ ID NO: 18385 - RNA, 22 nt, Artificial Sequence
  Guide RNA
cagccaacagcaaacagcccga

SEQ ID NO: 18386 - RNA, 22 nt, Artificial Sequence
  Guide RNA
cagcccaagcaggaaucggcac

SEQ ID NO: 18387 - RNA, 22 nt, Artificial Sequence
  Guide RNA
cagcccgagcaggaaucggcac

SEQ ID NO: 18388 - RNA, 22 nt, Artificial Sequence
  Guide RNA
ccaacagcaaacagcccaagca

SEQ ID NO: 18389 - RNA, 22 nt, Artificial Sequence
  Guide RNA
ccaacagcaaacagcccgagca

SEQ ID NO: 18390 - RNA, 22 nt, Artificial Sequence
  Guide RNA
ccaagcaggaaucggcacauag

SEQ ID NO: 18391 - RNA, 22 nt, Artificial Sequence
  Guide RNA
ccagccaacagcaaacagccca

SEQ ID NO: 18392 - RNA, 22 nt, Artificial Sequence
  Guide RNA
ccagccaacagcaaacagcccg

SEQ ID NO: 18393 - RNA, 22 nt, Artificial Sequence
  Guide RNA
cccaagcaggaaucggcacaua

SEQ ID NO: 18394 - RNA, 22 nt, Artificial Sequence
  Guide RNA
cccgagcaggaaucggcacaua

SEQ ID NO: 18395 - RNA, 22 nt, Artificial Sequence
  Guide RNA
ccgagcaggaaucggcacauag

SEQ ID NO: 18396 - RNA, 22 nt, Artificial Sequence
  Guide RNA
ccgauuccugcucgggcuguuu

SEQ ID NO: 18397 - RNA, 22 nt, Artificial Sequence
  Guide RNA
ccgauuccugcuugggcuguuu

SEQ ID NO: 18398 - RNA, 22 nt, Artificial Sequence
  Guide RNA
ccugcucgggcuguuugcuguu

SEQ ID NO: 18399 - RNA, 22 nt, Artificial Sequence
  Guide RNA
ccugcuugggcuguuugcuguu

SEQ ID NO: 18400 - RNA, 22 nt, Artificial Sequence
  Guide RNA
cgagcaggaaucggcacauagu

SEQ ID NO: 18401 - RNA, 22 nt, Artificial Sequence
  Guide RNA
cgauuccugcucgggcuguuug

SEQ ID NO: 18402 - RNA, 22 nt, Artificial Sequence
  Guide RNA
cgauuccugcuugggcuguuug

SEQ ID NO: 18403 - RNA, 22 nt, Artificial Sequence
  Guide RNA
cuaugugccgauuccugcucgg

SEQ ID NO: 18404 - RNA, 22 nt, Artificial Sequence
  Guide RNA
cuaugugccgauuccugcuugg

SEQ ID NO: 18405 - RNA, 22 nt, Artificial Sequence
  Guide RNA
cucgggcuguuugcuguuggcu

SEQ ID NO: 18406 - RNA, 22 nt, Artificial Sequence
  Guide RNA
cugcucgggcuguuugcuguug

SEQ ID NO: 18407 - RNA, 22 nt, Artificial Sequence
  Guide RNA
cugcuugggcuguuugcuguug

SEQ ID NO: 18408 - RNA, 22 nt, Artificial Sequence
  Guide RNA
cuugggcuguuugcuguuggcu

SEQ ID NO: 18409 - RNA, 22 nt, Artificial Sequence
  Guide RNA
gacuaugugccgauuccugcuc

SEQ ID NO: 18410 - RNA, 22 nt, Artificial Sequence
  Guide RNA
gacuaugugccgauuccugcuu

SEQ ID NO: 18411 - RNA, 22 nt, Artificial Sequence
  Guide RNA
gauuccugcucgggcuguuugc

SEQ ID NO: 18412 - RNA, 22 nt, Artificial Sequence
  Guide RNA
gauuccugcuugggcuguuugc

SEQ ID NO: 18413 - RNA, 22 nt, Artificial Sequence
  Guide RNA
gcaaacagcccaagcaggaauc

SEQ ID NO: 18414 - RNA, 22 nt, Artificial Sequence
  Guide RNA
gcaaacagcccgagcaggaauc

SEQ ID NO: 18415 - RNA, 22 nt, Artificial Sequence
  Guide RNA
gccaacagcaaacagcccaagc

SEQ ID NO: 18416 - RNA, 22 nt, Artificial Sequence
  Guide RNA
gccaacagcaaacagcccgagc

SEQ ID NO: 18417 - RNA, 22 nt, Artificial Sequence
  Guide RNA
gcccaagcaggaaucggcacau

SEQ ID NO: 18418 - RNA, 22 nt, Artificial Sequence
  Guide RNA
gcccgagcaggaaucggcacau

SEQ ID NO: 18419 - RNA, 22 nt, Artificial Sequence
  Guide RNA
gccgauuccugcucgggcuguu

SEQ ID NO: 18420 - RNA, 22 nt, Artificial Sequence
  Guide RNA
gccgauuccugcuugggcuguu

SEQ ID NO: 18421 - RNA, 22 nt, Artificial Sequence
  Guide RNA
gcucgggcuguuugcuguuggc

SEQ ID NO: 18422 - RNA, 22 nt, Artificial Sequence
  Guide RNA
gcuugggcuguuugcuguuggc

SEQ ID NO: 18423 - RNA, 22 nt, Artificial Sequence
  Guide RNA
gugccgauuccugcucgggcug

SEQ ID NO: 18424 - RNA, 22 nt, Artificial Sequence
  Guide RNA
gugccgauuccugcuugggcug

SEQ ID NO: 18425 - RNA, 22 nt, Artificial Sequence
  Guide RNA
uaccagccaacagcaaacagcc

SEQ ID NO: 18426 - RNA, 22 nt, Artificial Sequence
  Guide RNA
uaugacuaugugccgauuccug

SEQ ID NO: 18427 - RNA, 22 nt, Artificial Sequence
  Guide RNA
uaugugccgauuccugcucggg

SEQ ID NO: 18428 - RNA, 22 nt, Artificial Sequence
  Guide RNA
uaugugccgauuccugcuuggg

SEQ ID NO: 18429 - RNA, 22 nt, Artificial Sequence
  Guide RNA
uccugcucgggcuguuugcugu

SEQ ID NO: 18430 - RNA, 22 nt, Artificial Sequence
  Guide RNA
uccugcuugggcuguuugcugu

SEQ ID NO: 18431 - RNA, 22 nt, Artificial Sequence
  Guide RNA
ucgggcuguuugcuguuggcug

SEQ ID NO: 18432 - RNA, 22 nt, Artificial Sequence
  Guide RNA
ugacuaugugccgauuccugcu

SEQ ID NO: 18433 - RNA, 22 nt, Artificial Sequence
  Guide RNA
ugccgauuccugcucgggcugu

SEQ ID NO: 18434 - RNA, 22 nt, Artificial Sequence
  Guide RNA
ugccgauuccugcuugggcugu

SEQ ID NO: 18435 - RNA, 22 nt, Artificial Sequence
  Guide RNA
ugcucgggcuguuugcuguugg

SEQ ID NO: 18436 - RNA, 22 nt, Artificial Sequence
  Guide RNA
ugcuugggcuguuugcuguugg

SEQ ID NO: 18437 - RNA, 22 nt, Artificial Sequence
  Guide RNA
ugugccgauuccugcucgggcu

SEQ ID NO: 18438 - RNA, 22 nt, Artificial Sequence
  Guide RNA
ugugccgauuccugcuugggcu

SEQ ID NO: 18439 - RNA, 22 nt, Artificial Sequence
  Guide RNA
uuaccagccaacagcaaacagc

SEQ ID NO: 18440 - RNA, 22 nt, Artificial Sequence
  Guide RNA
uuaugacuaugugccgauuccu

SEQ ID NO: 18441 - RNA, 22 nt, Artificial Sequence
  Guide RNA
uuccugcucgggcuguuugcug

SEQ ID NO: 18442 - RNA, 22 nt, Artificial Sequence
  Guide RNA
uuccugcuugggcuguuugcug

SEQ ID NO: 18443 - RNA, 22 nt, Artificial Sequence
  Guide RNA
uugggcuguuugcuguuggcug

SEQ ID NO: 18444 - RNA, 20 nt, Artificial Sequence
  Guide RNA
aaaaugaucggauccucaag

SEQ ID NO: 18445 - RNA, 20 nt, Artificial Sequence
  Guide RNA
aaaaugaucggauccucgag

SEQ ID NO: 18446 - RNA, 20 nt, Artificial Sequence
  Guide RNA
aaaugaucggauccucaaga

SEQ ID NO: 18447 - RNA, 20 nt, Artificial Sequence
  Guide RNA
aaaugaucggauccucgaga

SEQ ID NO: 18448 - RNA, 20 nt, Artificial Sequence
  Guide RNA
aaugagucucgaggauccga

SEQ ID NO: 18449 - RNA, 20 nt, Artificial Sequence
  Guide RNA
aaugagucuugaggauccga

SEQ ID NO: 18450 - RNA, 20 nt, Artificial Sequence
  Guide RNA
aaugaucggauccucaagac

SEQ ID NO: 18451 - RNA, 20 nt, Artificial Sequence
  Guide RNA
aaugaucggauccucgagac

SEQ ID NO: 18452 - RNA, 20 nt, Artificial Sequence
  Guide RNA
agucucgaggauccgaucau

SEQ ID NO: 18453 - RNA, 20 nt, Artificial Sequence
  Guide RNA
agucuugaggauccgaucau

SEQ ID NO: 18454 - RNA, 20 nt, Artificial Sequence
  Guide RNA
agugaaugagucucgaggau

SEQ ID NO: 18455 - RNA, 20 nt, Artificial Sequence
  Guide RNA
agugaaugagucuugaggau

SEQ ID NO: 18456 - RNA, 20 nt, Artificial Sequence
  Guide RNA
auagugaaugagucucgagg

SEQ ID NO: 18457 - RNA, 20 nt, Artificial Sequence
  Guide RNA
auagugaaugagucuugagg

SEQ ID NO: 18458 - RNA, 20 nt, Artificial Sequence
  Guide RNA
auccucaagacucauucacu

SEQ ID NO: 18459 - RNA, 20 nt, Artificial Sequence
  Guide RNA
auccucgagacucauucacu

SEQ ID NO: 18460 - RNA, 20 nt, Artificial Sequence
  Guide RNA
aucggauccucaagacucau

SEQ ID NO: 18461 - RNA, 20 nt, Artificial Sequence
  Guide RNA
aucggauccucgagacucau

SEQ ID NO: 18462 - RNA, 20 nt, Artificial Sequence
  Guide RNA
augagucucgaggauccgau

SEQ ID NO: 18463 - RNA, 20 nt, Artificial Sequence
  Guide RNA
augagucuugaggauccgau

SEQ ID NO: 18464 - RNA, 20 nt, Artificial Sequence
  Guide RNA
augaucggauccucaagacu

SEQ ID NO: 18465 - RNA, 20 nt, Artificial Sequence
  Guide RNA
augaucggauccucgagacu

SEQ ID NO: 18466 - RNA, 20 nt, Artificial Sequence
  Guide RNA
caagacucauucacuaucac

SEQ ID NO: 18467 - RNA, 20 nt, Artificial Sequence
  Guide RNA
ccucaagacucauucacuau

SEQ ID NO: 18468 - RNA, 20 nt, Artificial Sequence
  Guide RNA
ccucgagacucauucacuau

SEQ ID NO: 18469 - RNA, 20 nt, Artificial Sequence
  Guide RNA
cgagacucauucacuaucac

SEQ ID NO: 18470 - RNA, 20 nt, Artificial Sequence
  Guide RNA
cggauccucaagacucauuc

SEQ ID NO: 18471 - RNA, 20 nt, Artificial Sequence
  Guide RNA
cggauccucgagacucauuc

SEQ ID NO: 18472 - RNA, 20 nt, Artificial Sequence
  Guide RNA
cucaagacucauucacuauc

SEQ ID NO: 18473 - RNA, 20 nt, Artificial Sequence
  Guide RNA
cucgagacucauucacuauc

SEQ ID NO: 18474 - RNA, 20 nt, Artificial Sequence
  Guide RNA
cucgaggauccgaucauuuu

SEQ ID NO: 18475 - RNA, 20 nt, Artificial Sequence
  Guide RNA
cuugaggauccgaucauuuu

SEQ ID NO: 18476 - RNA, 20 nt, Artificial Sequence
  Guide RNA
gaaugagucucgaggauccg

SEQ ID NO: 18477 - RNA, 20 nt, Artificial Sequence
  Guide RNA
gaaugagucuugaggauccg

SEQ ID NO: 18478 - RNA, 20 nt, Artificial Sequence
  Guide RNA
gagucucgaggauccgauca

SEQ ID NO: 18479 - RNA, 20 nt, Artificial Sequence
  Guide RNA
gagucuugaggauccgauca

SEQ ID NO: 18480 - RNA, 20 nt, Artificial Sequence
  Guide RNA
gauagugaaugagucucgag

SEQ ID NO: 18481 - RNA, 20 nt, Artificial Sequence
  Guide RNA
gauagugaaugagucuugag

SEQ ID NO: 18482 - RNA, 20 nt, Artificial Sequence
  Guide RNA
gauccucaagacucauucac

SEQ ID NO: 18483 - RNA, 20 nt, Artificial Sequence
  Guide RNA
gauccucgagacucauucac

SEQ ID NO: 18484 - RNA, 20 nt, Artificial Sequence
  Guide RNA
gaucggauccucaagacuca

SEQ ID NO: 18485 - RNA, 20 nt, Artificial Sequence
  Guide RNA
gaucggauccucgagacuca

SEQ ID NO: 18486 - RNA, 20 nt, Artificial Sequence
  Guide RNA
ggauccucaagacucauuca

SEQ ID NO: 18487 - RNA, 20 nt, Artificial Sequence
  Guide RNA
ggauccucgagacucauuca

SEQ ID NO: 18488 - RNA, 20 nt, Artificial Sequence
  Guide RNA
gucucgaggauccgaucauu

SEQ ID NO: 18489 - RNA, 20 nt, Artificial Sequence
  Guide RNA
gucuugaggauccgaucauu

SEQ ID NO: 18490 - RNA, 20 nt, Artificial Sequence
  Guide RNA
gugaaugagucucgaggauc

SEQ ID NO: 18491 - RNA, 20 nt, Artificial Sequence
  Guide RNA
gugaaugagucuugaggauc

SEQ ID NO: 18492 - RNA, 20 nt, Artificial Sequence
  Guide RNA
gugauagugaaugagucucg

SEQ ID NO: 18493 - RNA, 20 nt, Artificial Sequence
  Guide RNA
gugauagugaaugagucuug

SEQ ID NO: 18494 - RNA, 20 nt, Artificial Sequence
  Guide RNA
uaaaaugaucggauccucaa

SEQ ID NO: 18495 - RNA, 20 nt, Artificial Sequence
  Guide RNA
uaaaaugaucggauccucga

SEQ ID NO: 18496 - RNA, 20 nt, Artificial Sequence
  Guide RNA
uagugaaugagucucgagga

SEQ ID NO: 18497 - RNA, 20 nt, Artificial Sequence
  Guide RNA
uagugaaugagucuugagga

SEQ ID NO: 18498 - RNA, 20 nt, Artificial Sequence
  Guide RNA
ucaagacucauucacuauca

SEQ ID NO: 18499 - RNA, 20 nt, Artificial Sequence
  Guide RNA
uccucaagacucauucacua

SEQ ID NO: 18500 - RNA, 20 nt, Artificial Sequence
  Guide RNA
uccucgagacucauucacua

SEQ ID NO: 18501 - RNA, 20 nt, Artificial Sequence
  Guide RNA
ucgagacucauucacuauca

SEQ ID NO: 18502 - RNA, 20 nt, Artificial Sequence
  Guide RNA
ucgaggauccgaucauuuua

SEQ ID NO: 18503 - RNA, 20 nt, Artificial Sequence
  Guide RNA
ucggauccucaagacucauu

SEQ ID NO: 18504 - RNA, 20 nt, Artificial Sequence
  Guide RNA
ucggauccucgagacucauu

SEQ ID NO: 18505 - RNA, 20 nt, Artificial Sequence
  Guide RNA
ucucgaggauccgaucauuu

SEQ ID NO: 18506 - RNA, 20 nt, Artificial Sequence
  Guide RNA
ucuugaggauccgaucauuu

SEQ ID NO: 18507 - RNA, 20 nt, Artificial Sequence
  Guide RNA
ugaaugagucucgaggaucc

SEQ ID NO: 18508 - RNA, 20 nt, Artificial Sequence
  Guide RNA
ugaaugagucuugaggaucc

SEQ ID NO: 18509 - RNA, 20 nt, Artificial Sequence
  Guide RNA
ugagucucgaggauccgauc

SEQ ID NO: 18510 - RNA, 20 nt, Artificial Sequence
  Guide RNA
ugagucuugaggauccgauc

SEQ ID NO: 18511 - RNA, 20 nt, Artificial Sequence
  Guide RNA
ugauagugaaugagucucga

SEQ ID NO: 18512 - RNA, 20 nt, Artificial Sequence
  Guide RNA
ugauagugaaugagucuuga

SEQ ID NO: 18513 - RNA, 20 nt, Artificial Sequence
  Guide RNA
ugaucggauccucaagacuc

SEQ ID NO: 18514 - RNA, 20 nt, Artificial Sequence
  Guide RNA
ugaucggauccucgagacuc

SEQ ID NO: 18515 - RNA, 20 nt, Artificial Sequence
  Guide RNA
ugugauagugaaugagucuc

SEQ ID NO: 18516 - RNA, 20 nt, Artificial Sequence
  Guide RNA
ugugauagugaaugagucuu

SEQ ID NO: 18517 - RNA, 20 nt, Artificial Sequence
  Guide RNA
uuaaaaugaucggauccuca

SEQ ID NO: 18518 - RNA, 20 nt, Artificial Sequence
  Guide RNA
uuaaaaugaucggauccucg

SEQ ID NO: 18519 - RNA, 20 nt, Artificial Sequence
  Guide RNA
uugaggauccgaucauuuua

SEQ ID NO: 18520 - RNA, 20 nt, Artificial Sequence
  Guide RNA
uugugauagugaaugagucu

SEQ ID NO: 18521 - RNA, 20 nt, Artificial Sequence
  Guide RNA
uuuaaaaugaucggauccuc

SEQ ID NO: 18522 - RNA, 20 nt, Artificial Sequence
  Guide RNA
uuugugauagugaaugaguc

SEQ ID NO: 18523 - RNA, 20 nt, Artificial Sequence
  Guide RNA
uuuuaaaaugaucggauccu

SEQ ID NO: 18524 - RNA, 20 nt, Artificial Sequence
  Guide RNA
uuuugugauagugaaugagu

SEQ ID NO: 18525 - RNA, 20 nt, Artificial Sequence
  Guide RNA
uuuuuaaaaugaucggaucc

SEQ ID NO: 18526 - RNA, 20 nt, Artificial Sequence
  Guide RNA
uuuuugugauagugaaugag

SEQ ID NO: 18527 - RNA, 21 nt, Artificial Sequence
  Guide RNA
aaaaugaucggauccucaaga

SEQ ID NO: 18528 - RNA, 21 nt, Artificial Sequence
  Guide RNA
aaaaugaucggauccucgaga

SEQ ID NO: 18529 - RNA, 21 nt, Artificial Sequence
  Guide RNA
aaaugaucggauccucaagac

SEQ ID NO: 18530 - RNA, 21 nt, Artificial Sequence
  Guide RNA
aaaugaucggauccucgagac

SEQ ID NO: 18531 - RNA, 21 nt, Artificial Sequence
  Guide RNA
aaugagucucgaggauccgau

SEQ ID NO: 18532 - RNA, 21 nt, Artificial Sequence
  Guide RNA
aaugagucuugaggauccgau

SEQ ID NO: 18533 - RNA, 21 nt, Artificial Sequence
  Guide RNA
aaugaucggauccucaagacu

SEQ ID NO: 18534 - RNA, 21 nt, Artificial Sequence
  Guide RNA
aaugaucggauccucgagacu

SEQ ID NO: 18535 - RNA, 21 nt, Artificial Sequence
  Guide RNA
agucucgaggauccgaucauu

SEQ ID NO: 18536 - RNA, 21 nt, Artificial Sequence
  Guide RNA
agucuugaggauccgaucauu

SEQ ID NO: 18537 - RNA, 21 nt, Artificial Sequence
  Guide RNA
agugaaugagucucgaggauc

SEQ ID NO: 18538 - RNA, 21 nt, Artificial Sequence
  Guide RNA
agugaaugagucuugaggauc

SEQ ID NO: 18539 - RNA, 21 nt, Artificial Sequence
  Guide RNA
auagugaaugagucucgagga

SEQ ID NO: 18540 - RNA, 21 nt, Artificial Sequence
  Guide RNA
auagugaaugagucuugagga

SEQ ID NO: 18541 - RNA, 21 nt, Artificial Sequence
  Guide RNA
auccucaagacucauucacua

SEQ ID NO: 18542 - RNA, 21 nt, Artificial Sequence
  Guide RNA
auccucgagacucauucacua

SEQ ID NO: 18543 - RNA, 21 nt, Artificial Sequence
  Guide RNA
aucggauccucaagacucauu

SEQ ID NO: 18544 - RNA, 21 nt, Artificial Sequence
  Guide RNA
aucggauccucgagacucauu

SEQ ID NO: 18545 - RNA, 21 nt, Artificial Sequence
  Guide RNA
augagucucgaggauccgauc

SEQ ID NO: 18546 - RNA, 21 nt, Artificial Sequence
  Guide RNA
augagucuugaggauccgauc

SEQ ID NO: 18547 - RNA, 21 nt, Artificial Sequence
  Guide RNA
augaucggauccucaagacuc

SEQ ID NO: 18548 - RNA, 21 nt, Artificial Sequence
  Guide RNA
augaucggauccucgagacuc

SEQ ID NO: 18549 - RNA, 21 nt, Artificial Sequence
  Guide RNA
caagacucauucacuaucaca

SEQ ID NO: 18550 - RNA, 21 nt, Artificial Sequence
  Guide RNA
ccucaagacucauucacuauc

SEQ ID NO: 18551 - RNA, 21 nt, Artificial Sequence
  Guide RNA
ccucgagacucauucacuauc

SEQ ID NO: 18552 - RNA, 21 nt, Artificial Sequence
  Guide RNA
cgagacucauucacuaucaca

SEQ ID NO: 18553 - RNA, 21 nt, Artificial Sequence
  Guide RNA
cggauccucaagacucauuca

SEQ ID NO: 18554 - RNA, 21 nt, Artificial Sequence
  Guide RNA
cggauccucgagacucauuca

SEQ ID NO: 18555 - RNA, 21 nt, Artificial Sequence
  Guide RNA
cucaagacucauucacuauca

SEQ ID NO: 18556 - RNA, 21 nt, Artificial Sequence
  Guide RNA
cucgagacucauucacuauca

SEQ ID NO: 18557 - RNA, 21 nt, Artificial Sequence
  Guide RNA
cucgaggauccgaucauuuua

SEQ ID NO: 18558 - RNA, 21 nt, Artificial Sequence
  Guide RNA
cuugaggauccgaucauuuua

SEQ ID NO: 18559 - RNA, 21 nt, Artificial Sequence
  Guide RNA
gaaugagucucgaggauccga

SEQ ID NO: 18560 - RNA, 21 nt, Artificial Sequence
  Guide RNA
gaaugagucuugaggauccga

SEQ ID NO: 18561 - RNA, 21 nt, Artificial Sequence
  Guide RNA
gagucucgaggauccgaucau

SEQ ID NO: 18562 - RNA, 21 nt, Artificial Sequence
  Guide RNA
gagucuugaggauccgaucau

SEQ ID NO: 18563 - RNA, 21 nt, Artificial Sequence
  Guide RNA
gauagugaaugagucucgagg

SEQ ID NO: 18564 - RNA, 21 nt, Artificial Sequence
  Guide RNA
gauagugaaugagucuugagg

SEQ ID NO: 18565 - RNA, 21 nt, Artificial Sequence
  Guide RNA
gauccucaagacucauucacu

SEQ ID NO: 18566 - RNA, 21 nt, Artificial Sequence
  Guide RNA
gauccucgagacucauucacu

SEQ ID NO: 18567 - RNA, 21 nt, Artificial Sequence
  Guide RNA
gaucggauccucaagacucau

SEQ ID NO: 18568 - RNA, 21 nt, Artificial Sequence
  Guide RNA
gaucggauccucgagacucau

SEQ ID NO: 18569 - RNA, 21 nt, Artificial Sequence
  Guide RNA
ggauccucaagacucauucac

SEQ ID NO: 18570 - RNA, 21 nt, Artificial Sequence
  Guide RNA
ggauccucgagacucauucac

SEQ ID NO: 18571 - RNA, 21 nt, Artificial Sequence
  Guide RNA
gucucgaggauccgaucauuu

SEQ ID NO: 18572 - RNA, 21 nt, Artificial Sequence
  Guide RNA
gucuugaggauccgaucauuu

SEQ ID NO: 18573 - RNA, 21 nt, Artificial Sequence
  Guide RNA
gugaaugagucucgaggaucc

SEQ ID NO: 18574 - RNA, 21 nt, Artificial Sequence
  Guide RNA
gugaaugagucuugaggaucc

SEQ ID NO: 18575 - RNA, 21 nt, Artificial Sequence
  Guide RNA
gugauagugaaugagucucga

SEQ ID NO: 18576 - RNA, 21 nt, Artificial Sequence
  Guide RNA
gugauagugaaugagucuuga

SEQ ID NO: 18577 - RNA, 21 nt, Artificial Sequence
  Guide RNA
guuuuugugauagugaaugag

SEQ ID NO: 18578 - RNA, 21 nt, Artificial Sequence
  Guide RNA
uaaaaugaucggauccucaag

SEQ ID NO: 18579 - RNA, 21 nt, Artificial Sequence
  Guide RNA
uaaaaugaucggauccucgag

SEQ ID NO: 18580 - RNA, 21 nt, Artificial Sequence
  Guide RNA
uagugaaugagucucgaggau

SEQ ID NO: 18581 - RNA, 21 nt, Artificial Sequence
  Guide RNA
uagugaaugagucuugaggau

SEQ ID NO: 18582 - RNA, 21 nt, Artificial Sequence
  Guide RNA
ucaagacucauucacuaucac

SEQ ID NO: 18583 - RNA, 21 nt, Artificial Sequence
  Guide RNA
uccucaagacucauucacuau

SEQ ID NO: 18584 - RNA, 21 nt, Artificial Sequence
  Guide RNA
uccucgagacucauucacuau

SEQ ID NO: 18585 - RNA, 21 nt, Artificial Sequence
  Guide RNA
ucgagacucauucacuaucac

SEQ ID NO: 18586 - RNA, 21 nt, Artificial Sequence
  Guide RNA
ucgaggauccgaucauuuuaa

SEQ ID NO: 18587 - RNA, 21 nt, Artificial Sequence
  Guide RNA
ucggauccucaagacucauuc

SEQ ID NO: 18588 - RNA, 21 nt, Artificial Sequence
  Guide RNA
ucggauccucgagacucauuc

SEQ ID NO: 18589 - RNA, 21 nt, Artificial Sequence
  Guide RNA
ucucgaggauccgaucauuuu

SEQ ID NO: 18590 - RNA, 21 nt, Artificial Sequence
  Guide RNA
ucuugaggauccgaucauuuu

SEQ ID NO: 18591 - RNA, 21 nt, Artificial Sequence
  Guide RNA
ugaaugagucucgaggauccg

SEQ ID NO: 18592 - RNA, 21 nt, Artificial Sequence
  Guide RNA
ugaaugagucuugaggauccg

SEQ ID NO: 18593 - RNA, 21 nt, Artificial Sequence
  Guide RNA
ugagucucgaggauccgauca

SEQ ID NO: 18594 - RNA, 21 nt, Artificial Sequence
  Guide RNA
ugagucuugaggauccgauca

SEQ ID NO: 18595 - RNA, 21 nt, Artificial Sequence
  Guide RNA
ugauagugaaugagucucgag

SEQ ID NO: 18596 - RNA, 21 nt, Artificial Sequence
  Guide RNA
ugauagugaaugagucuugag

SEQ ID NO: 18597 - RNA, 21 nt, Artificial Sequence
  Guide RNA
ugaucggauccucaagacuca

SEQ ID NO: 18598 - RNA, 21 nt, Artificial Sequence
  Guide RNA
ugaucggauccucgagacuca

SEQ ID NO: 18599 - RNA, 21 nt, Artificial Sequence
  Guide RNA
ugugauagugaaugagucucg

SEQ ID NO: 18600 - RNA, 21 nt, Artificial Sequence
  Guide RNA
ugugauagugaaugagucuug

SEQ ID NO: 18601 - RNA, 21 nt, Artificial Sequence
  Guide RNA
uuaaaaugaucggauccucaa

SEQ ID NO: 18602 - RNA, 21 nt, Artificial Sequence
  Guide RNA
uuaaaaugaucggauccucga

SEQ ID NO: 18603 - RNA, 21 nt, Artificial Sequence
  Guide RNA
uugaggauccgaucauuuuaa

SEQ ID NO: 18604 - RNA, 21 nt, Artificial Sequence
  Guide RNA
uugugauagugaaugagucuc

SEQ ID NO: 18605 - RNA, 21 nt, Artificial Sequence
  Guide RNA
uugugauagugaaugagucuu

SEQ ID NO: 18606 - RNA, 21 nt, Artificial Sequence
  Guide RNA
uuuaaaaugaucggauccuca

SEQ ID NO: 18607 - RNA, 21 nt, Artificial Sequence
  Guide RNA
uuuaaaaugaucggauccucg

SEQ ID NO: 18608 - RNA, 21 nt, Artificial Sequence
  Guide RNA
uuugugauagugaaugagucu

SEQ ID NO: 18609 - RNA, 21 nt, Artificial Sequence
  Guide RNA
uuuuaaaaugaucggauccuc

SEQ ID NO: 18610 - RNA, 21 nt, Artificial Sequence
  Guide RNA
uuuugugauagugaaugaguc

SEQ ID NO: 18611 - RNA, 22 nt, Artificial Sequence
  Guide RNA
aaaaugaucggauccucaagac

SEQ ID NO: 18612 - RNA, 22 nt, Artificial Sequence
  Guide RNA
aaaaugaucggauccucgagac

SEQ ID NO: 18613 - RNA, 22 nt, Artificial Sequence
  Guide RNA
aaaugaucggauccucaagacu

SEQ ID NO: 18614 - RNA, 22 nt, Artificial Sequence
  Guide RNA
aaaugaucggauccucgagacu

SEQ ID NO: 18615 - RNA, 22 nt, Artificial Sequence
  Guide RNA
aaugagucucgaggauccgauc

SEQ ID NO: 18616 - RNA, 22 nt, Artificial Sequence
  Guide RNA
aaugagucuugaggauccgauc

SEQ ID NO: 18617 - RNA, 22 nt, Artificial Sequence
  Guide RNA
aaugaucggauccucaagacuc

SEQ ID NO: 18618 - RNA, 22 nt, Artificial Sequence
  Guide RNA
aaugaucggauccucgagacuc

SEQ ID NO: 18619 - RNA, 22 nt, Artificial Sequence
  Guide RNA
agucucgaggauccgaucauuu

SEQ ID NO: 18620 - RNA, 22 nt, Artificial Sequence
  Guide RNA
agucuugaggauccgaucauuu

SEQ ID NO: 18621 - RNA, 22 nt, Artificial Sequence
  Guide RNA
agugaaugagucucgaggaucc

SEQ ID NO: 18622 - RNA, 22 nt, Artificial Sequence
  Guide RNA
agugaaugagucuugaggaucc

SEQ ID NO: 18623 - RNA, 22 nt, Artificial Sequence
  Guide RNA
auagugaaugagucucgaggau

SEQ ID NO: 18624 - RNA, 22 nt, Artificial Sequence
  Guide RNA
auagugaaugagucuugaggau

SEQ ID NO: 18625 - RNA, 22 nt, Artificial Sequence
  Guide RNA
auccucaagacucauucacuau

SEQ ID NO: 18626 - RNA, 22 nt, Artificial Sequence
  Guide RNA
auccucgagacucauucacuau

SEQ ID NO: 18627 - RNA, 22 nt, Artificial Sequence
  Guide RNA
aucggauccucaagacucauuc

SEQ ID NO: 18628 - RNA, 22 nt, Artificial Sequence
  Guide RNA
aucggauccucgagacucauuc

SEQ ID NO: 18629 - RNA, 22 nt, Artificial Sequence
  Guide RNA
augagucucgaggauccgauca

SEQ ID NO: 18630 - RNA, 22 nt, Artificial Sequence
  Guide RNA
augagucuugaggauccgauca

SEQ ID NO: 18631 - RNA, 22 nt, Artificial Sequence
  Guide RNA
augaucggauccucaagacuca

SEQ ID NO: 18632 - RNA, 22 nt, Artificial Sequence
  Guide RNA
augaucggauccucgagacuca

SEQ ID NO: 18633 - RNA, 22 nt, Artificial Sequence
  Guide RNA
caagacucauucacuaucacaa

SEQ ID NO: 18634 - RNA, 22 nt, Artificial Sequence
  Guide RNA
cauuuuuaaaaugaucggaucc

SEQ ID NO: 18635 - RNA, 22 nt, Artificial Sequence
  Guide RNA
ccauuuuuaaaaugaucggauc

SEQ ID NO: 18636 - RNA, 22 nt, Artificial Sequence
  Guide RNA
ccucaagacucauucacuauca

SEQ ID NO: 18637 - RNA, 22 nt, Artificial Sequence
  Guide RNA
ccucgagacucauucacuauca

SEQ ID NO: 18638 - RNA, 22 nt, Artificial Sequence
  Guide RNA
cgagacucauucacuaucacaa

SEQ ID NO: 18639 - RNA, 22 nt, Artificial Sequence
  Guide RNA
cggauccucaagacucauucac

SEQ ID NO: 18640 - RNA, 22 nt, Artificial Sequence
  Guide RNA
cggauccucgagacucauucac

SEQ ID NO: 18641 - RNA, 22 nt, Artificial Sequence
  Guide RNA
cucaagacucauucacuaucac

SEQ ID NO: 18642 - RNA, 22 nt, Artificial Sequence
  Guide RNA
cucgagacucauucacuaucac

SEQ ID NO: 18643 - RNA, 22 nt, Artificial Sequence
  Guide RNA
cucgaggauccgaucauuuuaa

SEQ ID NO: 18644 - RNA, 22 nt, Artificial Sequence
  Guide RNA
cuugaggauccgaucauuuuaa

SEQ ID NO: 18645 - RNA, 22 nt, Artificial Sequence
  Guide RNA
gaaugagucucgaggauccgau

SEQ ID NO: 18646 - RNA, 22 nt, Artificial Sequence
  Guide RNA
gaaugagucuugaggauccgau

SEQ ID NO: 18647 - RNA, 22 nt, Artificial Sequence
  Guide RNA
gagucucgaggauccgaucauu

SEQ ID NO: 18648 - RNA, 22 nt, Artificial Sequence
  Guide RNA
gagucuugaggauccgaucauu

SEQ ID NO: 18649 - RNA, 22 nt, Artificial Sequence
  Guide RNA
gauagugaaugagucucgagga

SEQ ID NO: 18650 - RNA, 22 nt, Artificial Sequence
  Guide RNA
gauagugaaugagucuugagga

SEQ ID NO: 18651 - RNA, 22 nt, Artificial Sequence
  Guide RNA
gauccucaagacucauucacua

SEQ ID NO: 18652 - RNA, 22 nt, Artificial Sequence
  Guide RNA
gauccucgagacucauucacua

SEQ ID NO: 18653 - RNA, 22 nt, Artificial Sequence
  Guide RNA
gaucggauccucaagacucauu

SEQ ID NO: 18654 - RNA, 22 nt, Artificial Sequence
  Guide RNA
gaucggauccucgagacucauu

SEQ ID NO: 18655 - RNA, 22 nt, Artificial Sequence
  Guide RNA
ggauccucaagacucauucacu

SEQ ID NO: 18656 - RNA, 22 nt, Artificial Sequence
  Guide RNA
ggauccucgagacucauucacu

SEQ ID NO: 18657 - RNA, 22 nt, Artificial Sequence
  Guide RNA
gucucgaggauccgaucauuuu

SEQ ID NO: 18658 - RNA, 22 nt, Artificial Sequence
  Guide RNA
gucuugaggauccgaucauuuu

SEQ ID NO: 18659 - RNA, 22 nt, Artificial Sequence
  Guide RNA
gugaaugagucucgaggauccg

SEQ ID NO: 18660 - RNA, 22 nt, Artificial Sequence
  Guide RNA
gugaaugagucuugaggauccg

SEQ ID NO: 18661 - RNA, 22 nt, Artificial Sequence
  Guide RNA
gugauagugaaugagucucgag

SEQ ID NO: 18662 - RNA, 22 nt, Artificial Sequence
  Guide RNA
gugauagugaaugagucuugag

SEQ ID NO: 18663 - RNA, 22 nt, Artificial Sequence
  Guide RNA
guuuuugugauagugaaugagu

SEQ ID NO: 18664 - RNA, 22 nt, Artificial Sequence
  Guide RNA
uaaaaugaucggauccucaaga

SEQ ID NO: 18665 - RNA, 22 nt, Artificial Sequence
  Guide RNA
uaaaaugaucggauccucgaga

SEQ ID NO: 18666 - RNA, 22 nt, Artificial Sequence
  Guide RNA
uagugaaugagucucgaggauc

SEQ ID NO: 18667 - RNA, 22 nt, Artificial Sequence
  Guide RNA
uagugaaugagucuugaggauc

SEQ ID NO: 18668 - RNA, 22 nt, Artificial Sequence
  Guide RNA
ucaagacucauucacuaucaca

SEQ ID NO: 18669 - RNA, 22 nt, Artificial Sequence
  Guide RNA
uccucaagacucauucacuauc

SEQ ID NO: 18670 - RNA, 22 nt, Artificial Sequence
  Guide RNA
uccucgagacucauucacuauc

SEQ ID NO: 18671 - RNA, 22 nt, Artificial Sequence
  Guide RNA
ucgagacucauucacuaucaca

SEQ ID NO: 18672 - RNA, 22 nt, Artificial Sequence
  Guide RNA
ucgaggauccgaucauuuuaaa

SEQ ID NO: 18673 - RNA, 22 nt, Artificial Sequence
  Guide RNA
ucggauccucaagacucauuca

SEQ ID NO: 18674 - RNA, 22 nt, Artificial Sequence
  Guide RNA
ucggauccucgagacucauuca

SEQ ID NO: 18675 - RNA, 22 nt, Artificial Sequence
  Guide RNA
ucucgaggauccgaucauuuua

SEQ ID NO: 18676 - RNA, 22 nt, Artificial Sequence
  Guide RNA
ucuugaggauccgaucauuuua

SEQ ID NO: 18677 - RNA, 22 nt, Artificial Sequence
  Guide RNA
ugaaugagucucgaggauccga

SEQ ID NO: 18678 - RNA, 22 nt, Artificial Sequence
  Guide RNA
ugaaugagucuugaggauccga

SEQ ID NO: 18679 - RNA, 22 nt, Artificial Sequence
  Guide RNA
ugagucucgaggauccgaucau

SEQ ID NO: 18680 - RNA, 22 nt, Artificial Sequence
  Guide RNA
ugagucuugaggauccgaucau

SEQ ID NO: 18681 - RNA, 22 nt, Artificial Sequence
  Guide RNA
ugauagugaaugagucucgagg

SEQ ID NO: 18682 - RNA, 22 nt, Artificial Sequence
  Guide RNA
ugauagugaaugagucuugagg

SEQ ID NO: 18683 - RNA, 22 nt, Artificial Sequence
  Guide RNA
ugaucggauccucaagacucau

SEQ ID NO: 18684 - RNA, 22 nt, Artificial Sequence
  Guide RNA
ugaucggauccucgagacucau

SEQ ID NO: 18685 - RNA, 22 nt, Artificial Sequence
  Guide RNA
ugugauagugaaugagucucga

SEQ ID NO: 18686 - RNA, 22 nt, Artificial Sequence
  Guide RNA
ugugauagugaaugagucuuga

SEQ ID NO: 18687 - RNA, 22 nt, Artificial Sequence
  Guide RNA
uguuuuugugauagugaaugag

SEQ ID NO: 18688 - RNA, 22 nt, Artificial Sequence
  Guide RNA
uuaaaaugaucggauccucaag

SEQ ID NO: 18689 - RNA, 22 nt, Artificial Sequence
  Guide RNA
uuaaaaugaucggauccucgag

SEQ ID NO: 18690 - RNA, 22 nt, Artificial Sequence
  Guide RNA
uugaggauccgaucauuuuaaa

SEQ ID NO: 18691 - RNA, 22 nt, Artificial Sequence
  Guide RNA
uugugauagugaaugagucucg

SEQ ID NO: 18692 - RNA, 22 nt, Artificial Sequence
  Guide RNA
uugugauagugaaugagucuug

SEQ ID NO: 18693 - RNA, 22 nt, Artificial Sequence
  Guide RNA
uuuaaaaugaucggauccucaa

SEQ ID NO: 18694 - RNA, 22 nt, Artificial Sequence
  Guide RNA
uuuaaaaugaucggauccucga

SEQ ID NO: 18695 - RNA, 22 nt, Artificial Sequence
  Guide RNA
uuugugauagugaaugagucuc

SEQ ID NO: 18696 - RNA, 22 nt, Artificial Sequence
  Guide RNA
uuugugauagugaaugagucuu

SEQ ID NO: 18697 - RNA, 22 nt, Artificial Sequence
  Guide RNA
uuuuaaaaugaucggauccuca

SEQ ID NO: 18698 - RNA, 22 nt, Artificial Sequence
  Guide RNA
uuuuaaaaugaucggauccucg

SEQ ID NO: 18699 - RNA, 22 nt, Artificial Sequence
  Guide RNA
uuuugugauagugaaugagucu

SEQ ID NO: 18700 - RNA, 22 nt, Artificial Sequence
  Guide RNA
uuuuuaaaaugaucggauccuc

SEQ ID NO: 18701 - RNA, 22 nt, Artificial Sequence
  Guide RNA
uuuuugugauagugaaugaguc

SEQ ID NO: 18702 - RNA, 20 nt, Artificial Sequence
  Guide RNA
aagaguaaggagaauaggga

SEQ ID NO: 18703 - RNA, 20 nt, Artificial Sequence
  Guide RNA
aaguguaaggagaauaggga

SEQ ID NO: 18704 - RNA, 20 nt, Artificial Sequence
  Guide RNA
aaucccauuuggggacuaga

SEQ ID NO: 18705 - RNA, 20 nt, Artificial Sequence
  Guide RNA
acacuucuaguccccaaaug

SEQ ID NO: 18706 - RNA, 20 nt, Artificial Sequence
  Guide RNA
acuagaagaguaaggagaau

SEQ ID NO: 18707 - RNA, 20 nt, Artificial Sequence
  Guide RNA
acuagaaguguaaggagaau

SEQ ID NO: 18708 - RNA, 20 nt, Artificial Sequence
  Guide RNA
acucuucuaguccccaaaug

SEQ ID NO: 18709 - RNA, 20 nt, Artificial Sequence
  Guide RNA
agaagaguaaggagaauagg

SEQ ID NO: 18710 - RNA, 20 nt, Artificial Sequence
  Guide RNA
agaaguguaaggagaauagg

SEQ ID NO: 18711 - RNA, 20 nt, Artificial Sequence
  Guide RNA
agaguaaggagaauagggau

SEQ ID NO: 18712 - RNA, 20 nt, Artificial Sequence
  Guide RNA
aguguaaggagaauagggau

SEQ ID NO: 18713 - RNA, 20 nt, Artificial Sequence
  Guide RNA
aucccauuuggggacuagaa

SEQ ID NO: 18714 - RNA, 20 nt, Artificial Sequence
  Guide RNA
aucccuauucuccuuacacu

SEQ ID NO: 18715 - RNA, 20 nt, Artificial Sequence
  Guide RNA
aucccuauucuccuuacucu

SEQ ID NO: 18716 - RNA, 20 nt, Artificial Sequence
  Guide RNA
auucuccuuacacuucuagu

SEQ ID NO: 18717 - RNA, 20 nt, Artificial Sequence
  Guide RNA
auucuccuuacucuucuagu

SEQ ID NO: 18718 - RNA, 20 nt, Artificial Sequence
  Guide RNA
auuuggggacuagaagagua

SEQ ID NO: 18719 - RNA, 20 nt, Artificial Sequence
  Guide RNA
auuuggggacuagaagugua

SEQ ID NO: 18720 - RNA, 20 nt, Artificial Sequence
  Guide RNA
cacuucuaguccccaaaugg

SEQ ID NO: 18721 - RNA, 20 nt, Artificial Sequence
  Guide RNA
caucccuauucuccuuacac

SEQ ID NO: 18722 - RNA, 20 nt, Artificial Sequence
  Guide RNA
caucccuauucuccuuacuc

SEQ ID NO: 18723 - RNA, 20 nt, Artificial Sequence
  Guide RNA
cauuuggggacuagaagagu

SEQ ID NO: 18724 - RNA, 20 nt, Artificial Sequence
  Guide RNA
cauuuggggacuagaagugu

SEQ ID NO: 18725 - RNA, 20 nt, Artificial Sequence
  Guide RNA
ccauuuggggacuagaagag

SEQ ID NO: 18726 - RNA, 20 nt, Artificial Sequence
  Guide RNA
ccauuuggggacuagaagug

SEQ ID NO: 18727 - RNA, 20 nt, Artificial Sequence
  Guide RNA
cccauuuggggacuagaaga

SEQ ID NO: 18728 - RNA, 20 nt, Artificial Sequence
  Guide RNA
cccauuuggggacuagaagu

SEQ ID NO: 18729 - RNA, 20 nt, Artificial Sequence
  Guide RNA
cccuauucuccuuacacuuc

SEQ ID NO: 18730 - RNA, 20 nt, Artificial Sequence
  Guide RNA
cccuauucuccuuacucuuc

SEQ ID NO: 18731 - RNA, 20 nt, Artificial Sequence
  Guide RNA
ccuauucuccuuacacuucu

SEQ ID NO: 18732 - RNA, 20 nt, Artificial Sequence
  Guide RNA
ccuauucuccuuacucuucu

SEQ ID NO: 18733 - RNA, 20 nt, Artificial Sequence
  Guide RNA
ccuuacacuucuagucccca

SEQ ID NO: 18734 - RNA, 20 nt, Artificial Sequence
  Guide RNA
ccuuacucuucuagucccca

SEQ ID NO: 18735 - RNA, 20 nt, Artificial Sequence
  Guide RNA
cuagaagaguaaggagaaua

SEQ ID NO: 18736 - RNA, 20 nt, Artificial Sequence
  Guide RNA
cuagaaguguaaggagaaua

SEQ ID NO: 18737 - RNA, 20 nt, Artificial Sequence
  Guide RNA
cuauucuccuuacacuucua

SEQ ID NO: 18738 - RNA, 20 nt, Artificial Sequence
  Guide RNA
cuauucuccuuacucuucua

SEQ ID NO: 18739 - RNA, 20 nt, Artificial Sequence
  Guide RNA
cuccuuacacuucuaguccc

SEQ ID NO: 18740 - RNA, 20 nt, Artificial Sequence
  Guide RNA
cuccuuacucuucuaguccc

SEQ ID NO: 18741 - RNA, 20 nt, Artificial Sequence
  Guide RNA
cucuucuaguccccaaaugg

SEQ ID NO: 18742 - RNA, 20 nt, Artificial Sequence
  Guide RNA
cuuacacuucuaguccccaa

SEQ ID NO: 18743 - RNA, 20 nt, Artificial Sequence
  Guide RNA
cuuacucuucuaguccccaa

SEQ ID NO: 18744 - RNA, 20 nt, Artificial Sequence
  Guide RNA
gaagaguaaggagaauaggg

SEQ ID NO: 18745 - RNA, 20 nt, Artificial Sequence
  Guide RNA
gaaguguaaggagaauaggg

SEQ ID NO: 18746 - RNA, 20 nt, Artificial Sequence
  Guide RNA
gacuagaagaguaaggagaa

SEQ ID NO: 18747 - RNA, 20 nt, Artificial Sequence
  Guide RNA
gacuagaaguguaaggagaa

SEQ ID NO: 18748 - RNA, 20 nt, Artificial Sequence
  Guide RNA
gaguaaggagaauagggaug

SEQ ID NO: 18749 - RNA, 20 nt, Artificial Sequence
  Guide RNA
ggacuagaagaguaaggaga

SEQ ID NO: 18750 - RNA, 20 nt, Artificial Sequence
  Guide RNA
ggacuagaaguguaaggaga

SEQ ID NO: 18751 - RNA, 20 nt, Artificial Sequence
  Guide RNA
gggacuagaagaguaaggag

SEQ ID NO: 18752 - RNA, 20 nt, Artificial Sequence
  Guide RNA
gggacuagaaguguaaggag

SEQ ID NO: 18753 - RNA, 20 nt, Artificial Sequence
  Guide RNA
ggggacuagaagaguaagga

SEQ ID NO: 18754 - RNA, 20 nt, Artificial Sequence
  Guide RNA
ggggacuagaaguguaagga

SEQ ID NO: 18755 - RNA, 20 nt, Artificial Sequence
  Guide RNA
guguaaggagaauagggaug

SEQ ID NO: 18756 - RNA, 20 nt, Artificial Sequence
  Guide RNA
guuucaucccuauucuccuu

SEQ ID NO: 18757 - RNA, 20 nt, Artificial Sequence
  Guide RNA
uaaucccauuuggggacuag

SEQ ID NO: 18758 - RNA, 20 nt, Artificial Sequence
  Guide RNA
uacacuucuaguccccaaau

SEQ ID NO: 18759 - RNA, 20 nt, Artificial Sequence
  Guide RNA
uacucuucuaguccccaaau

SEQ ID NO: 18760 - RNA, 20 nt, Artificial Sequence
  Guide RNA
uagaagaguaaggagaauag

SEQ ID NO: 18761 - RNA, 20 nt, Artificial Sequence
  Guide RNA
uagaaguguaaggagaauag

SEQ ID NO: 18762 - RNA, 20 nt, Artificial Sequence
  Guide RNA
uauucuccuuacacuucuag

SEQ ID NO: 18763 - RNA, 20 nt, Artificial Sequence
  Guide RNA
uauucuccuuacucuucuag

SEQ ID NO: 18764 - RNA, 20 nt, Artificial Sequence
  Guide RNA
ucaucccuauucuccuuaca

SEQ ID NO: 18765 - RNA, 20 nt, Artificial Sequence
  Guide RNA
ucaucccuauucuccuuacu

SEQ ID NO: 18766 - RNA, 20 nt, Artificial Sequence
  Guide RNA
ucccauuuggggacuagaag

SEQ ID NO: 18767 - RNA, 20 nt, Artificial Sequence
  Guide RNA
ucccuauucuccuuacacuu

SEQ ID NO: 18768 - RNA, 20 nt, Artificial Sequence
  Guide RNA
ucccuauucuccuuacucuu

SEQ ID NO: 18769 - RNA, 20 nt, Artificial Sequence
  Guide RNA
uccuuacacuucuagucccc

SEQ ID NO: 18770 - RNA, 20 nt, Artificial Sequence
  Guide RNA
uccuuacucuucuagucccc

SEQ ID NO: 18771 - RNA, 20 nt, Artificial Sequence
  Guide RNA
ucuccuuacacuucuagucc

SEQ ID NO: 18772 - RNA, 20 nt, Artificial Sequence
  Guide RNA
ucuccuuacucuucuagucc

SEQ ID NO: 18773 - RNA, 20 nt, Artificial Sequence
  Guide RNA
uggggacuagaagaguaagg

SEQ ID NO: 18774 - RNA, 20 nt, Artificial Sequence
  Guide RNA
uggggacuagaaguguaagg

SEQ ID NO: 18775 - RNA, 20 nt, Artificial Sequence
  Guide RNA
uguuucaucccuauucuccu

SEQ ID NO: 18776 - RNA, 20 nt, Artificial Sequence
  Guide RNA
uuacacuucuaguccccaaa

SEQ ID NO: 18777 - RNA, 20 nt, Artificial Sequence
  Guide RNA
uuacucuucuaguccccaaa

SEQ ID NO: 18778 - RNA, 20 nt, Artificial Sequence
  Guide RNA
uucaucccuauucuccuuac

SEQ ID NO: 18779 - RNA, 20 nt, Artificial Sequence
  Guide RNA
uucuccuuacacuucuaguc

SEQ ID NO: 18780 - RNA, 20 nt, Artificial Sequence
  Guide RNA
uucuccuuacucuucuaguc

SEQ ID NO: 18781 - RNA, 20 nt, Artificial Sequence
  Guide RNA
uuggggacuagaagaguaag

SEQ ID NO: 18782 - RNA, 20 nt, Artificial Sequence
  Guide RNA
uuggggacuagaaguguaag

SEQ ID NO: 18783 - RNA, 20 nt, Artificial Sequence
  Guide RNA
uuucaucccuauucuccuua

SEQ ID NO: 18784 - RNA, 20 nt, Artificial Sequence
  Guide RNA
uuuggggacuagaagaguaa

SEQ ID NO: 18785 - RNA, 20 nt, Artificial Sequence
  Guide RNA
uuuggggacuagaaguguaa

SEQ ID NO: 18786 - RNA, 21 nt, Artificial Sequence
  Guide RNA
aagaguaaggagaauagggau

SEQ ID NO: 18787 - RNA, 21 nt, Artificial Sequence
  Guide RNA
aaguguaaggagaauagggau

SEQ ID NO: 18788 - RNA, 21 nt, Artificial Sequence
  Guide RNA
aaucccauuuggggacuagaa

SEQ ID NO: 18789 - RNA, 21 nt, Artificial Sequence
  Guide RNA
acacuucuaguccccaaaugg

SEQ ID NO: 18790 - RNA, 21 nt, Artificial Sequence
  Guide RNA
acuagaagaguaaggagaaua

SEQ ID NO: 18791 - RNA, 21 nt, Artificial Sequence
  Guide RNA
acuagaaguguaaggagaaua

SEQ ID NO: 18792 - RNA, 21 nt, Artificial Sequence
  Guide RNA
acucuucuaguccccaaaugg

SEQ ID NO: 18793 - RNA, 21 nt, Artificial Sequence
  Guide RNA
agaagaguaaggagaauaggg

SEQ ID NO: 18794 - RNA, 21 nt, Artificial Sequence
  Guide RNA
agaaguguaaggagaauaggg

SEQ ID NO: 18795 - RNA, 21 nt, Artificial Sequence
  Guide RNA
agaguaaggagaauagggaug

SEQ ID NO: 18796 - RNA, 21 nt, Artificial Sequence
  Guide RNA
aguguaaggagaauagggaug

SEQ ID NO: 18797 - RNA, 21 nt, Artificial Sequence
  Guide RNA
auaaucccauuuggggacuag

SEQ ID NO: 18798 - RNA, 21 nt, Artificial Sequence
  Guide RNA
aucccauuuggggacuagaag

SEQ ID NO: 18799 - RNA, 21 nt, Artificial Sequence
  Guide RNA
aucccuauucuccuuacacuu

SEQ ID NO: 18800 - RNA, 21 nt, Artificial Sequence
  Guide RNA
aucccuauucuccuuacucuu

SEQ ID NO: 18801 - RNA, 21 nt, Artificial Sequence
  Guide RNA
auucuccuuacacuucuaguc

SEQ ID NO: 18802 - RNA, 21 nt, Artificial Sequence
  Guide RNA
auucuccuuacucuucuaguc

SEQ ID NO: 18803 - RNA, 21 nt, Artificial Sequence
  Guide RNA
auuuggggacuagaagaguaa

SEQ ID NO: 18804 - RNA, 21 nt, Artificial Sequence
  Guide RNA
auuuggggacuagaaguguaa

SEQ ID NO: 18805 - RNA, 21 nt, Artificial Sequence
  Guide RNA
cacuucuaguccccaaauggg

SEQ ID NO: 18806 - RNA, 21 nt, Artificial Sequence
  Guide RNA
caucccuauucuccuuacacu

SEQ ID NO: 18807 - RNA, 21 nt, Artificial Sequence
  Guide RNA
caucccuauucuccuuacucu

SEQ ID NO: 18808 - RNA, 21 nt, Artificial Sequence
  Guide RNA
cauuuggggacuagaagagua

SEQ ID NO: 18809 - RNA, 21 nt, Artificial Sequence
  Guide RNA
cauuuggggacuagaagugua

SEQ ID NO: 18810 - RNA, 21 nt, Artificial Sequence
  Guide RNA
ccauuuggggacuagaagagu

SEQ ID NO: 18811 - RNA, 21 nt, Artificial Sequence
  Guide RNA
ccauuuggggacuagaagugu

SEQ ID NO: 18812 - RNA, 21 nt, Artificial Sequence
  Guide RNA
cccauuuggggacuagaagag

SEQ ID NO: 18813 - RNA, 21 nt, Artificial Sequence
  Guide RNA
cccauuuggggacuagaagug

SEQ ID NO: 18814 - RNA, 21 nt, Artificial Sequence
  Guide RNA
cccuauucuccuuacacuucu

SEQ ID NO: 18815 - RNA, 21 nt, Artificial Sequence
  Guide RNA
cccuauucuccuuacucuucu

SEQ ID NO: 18816 - RNA, 21 nt, Artificial Sequence
  Guide RNA
ccuauucuccuuacacuucua

SEQ ID NO: 18817 - RNA, 21 nt, Artificial Sequence
  Guide RNA
ccuauucuccuuacucuucua

SEQ ID NO: 18818 - RNA, 21 nt, Artificial Sequence
  Guide RNA
ccuuacacuucuaguccccaa

SEQ ID NO: 18819 - RNA, 21 nt, Artificial Sequence
  Guide RNA
ccuuacucuucuaguccccaa

SEQ ID NO: 18820 - RNA, 21 nt, Artificial Sequence
  Guide RNA
cuagaagaguaaggagaauag

SEQ ID NO: 18821 - RNA, 21 nt, Artificial Sequence
  Guide RNA
cuagaaguguaaggagaauag

SEQ ID NO: 18822 - RNA, 21 nt, Artificial Sequence
  Guide RNA
cuauucuccuuacacuucuag

SEQ ID NO: 18823 - RNA, 21 nt, Artificial Sequence
  Guide RNA
cuauucuccuuacucuucuag

SEQ ID NO: 18824 - RNA, 21 nt, Artificial Sequence
  Guide RNA
cuccuuacacuucuagucccc

SEQ ID NO: 18825 - RNA, 21 nt, Artificial Sequence
  Guide RNA
cuccuuacucuucuagucccc

SEQ ID NO: 18826 - RNA, 21 nt, Artificial Sequence
  Guide RNA
cucuucuaguccccaaauggg

SEQ ID NO: 18827 - RNA, 21 nt, Artificial Sequence
  Guide RNA
cuuacacuucuaguccccaaa

SEQ ID NO: 18828 - RNA, 21 nt, Artificial Sequence
  Guide RNA
cuuacucuucuaguccccaaa

SEQ ID NO: 18829 - RNA, 21 nt, Artificial Sequence
  Guide RNA
gaagaguaaggagaauaggga

SEQ ID NO: 18830 - RNA, 21 nt, Artificial Sequence
  Guide RNA
gaaguguaaggagaauaggga

SEQ ID NO: 18831 - RNA, 21 nt, Artificial Sequence
  Guide RNA
gacuagaagaguaaggagaau

SEQ ID NO: 18832 - RNA, 21 nt, Artificial Sequence
  Guide RNA
gacuagaaguguaaggagaau

SEQ ID NO: 18833 - RNA, 21 nt, Artificial Sequence
  Guide RNA
gaguaaggagaauagggauga

SEQ ID NO: 18834 - RNA, 21 nt, Artificial Sequence
  Guide RNA
ggacuagaagaguaaggagaa

SEQ ID NO: 18835 - RNA, 21 nt, Artificial Sequence
  Guide RNA
ggacuagaaguguaaggagaa

SEQ ID NO: 18836 - RNA, 21 nt, Artificial Sequence
  Guide RNA
gggacuagaagaguaaggaga

SEQ ID NO: 18837 - RNA, 21 nt, Artificial Sequence
  Guide RNA
gggacuagaaguguaaggaga

SEQ ID NO: 18838 - RNA, 21 nt, Artificial Sequence
  Guide RNA
ggggacuagaagaguaaggag

SEQ ID NO: 18839 - RNA, 21 nt, Artificial Sequence
  Guide RNA
ggggacuagaaguguaaggag

SEQ ID NO: 18840 - RNA, 21 nt, Artificial Sequence
  Guide RNA
guguaaggagaauagggauga

SEQ ID NO: 18841 - RNA, 21 nt, Artificial Sequence
  Guide RNA
guuucaucccuauucuccuua

SEQ ID NO: 18842 - RNA, 21 nt, Artificial Sequence
  Guide RNA
uaaucccauuuggggacuaga

SEQ ID NO: 18843 - RNA, 21 nt, Artificial Sequence
  Guide RNA
uacacuucuaguccccaaaug

SEQ ID NO: 18844 - RNA, 21 nt, Artificial Sequence
  Guide RNA
uacucuucuaguccccaaaug

SEQ ID NO: 18845 - RNA, 21 nt, Artificial Sequence
  Guide RNA
uagaagaguaaggagaauagg

SEQ ID NO: 18846 - RNA, 21 nt, Artificial Sequence
  Guide RNA
uagaaguguaaggagaauagg

SEQ ID NO: 18847 - RNA, 21 nt, Artificial Sequence
  Guide RNA
uauucuccuuacacuucuagu

SEQ ID NO: 18848 - RNA, 21 nt, Artificial Sequence
  Guide RNA
uauucuccuuacucuucuagu

SEQ ID NO: 18849 - RNA, 21 nt, Artificial Sequence
  Guide RNA
ucaucccuauucuccuuacac

SEQ ID NO: 18850 - RNA, 21 nt, Artificial Sequence
  Guide RNA
ucaucccuauucuccuuacuc

SEQ ID NO: 18851 - RNA, 21 nt, Artificial Sequence
  Guide RNA
ucccauuuggggacuagaaga

SEQ ID NO: 18852 - RNA, 21 nt, Artificial Sequence
  Guide RNA
ucccauuuggggacuagaagu

SEQ ID NO: 18853 - RNA, 21 nt, Artificial Sequence
  Guide RNA
ucccuauucuccuuacacuuc

SEQ ID NO: 18854 - RNA, 21 nt, Artificial Sequence
  Guide RNA
ucccuauucuccuuacucuuc

SEQ ID NO: 18855 - RNA, 21 nt, Artificial Sequence
  Guide RNA
uccuuacacuucuagucccca

SEQ ID NO: 18856 - RNA, 21 nt, Artificial Sequence
  Guide RNA
uccuuacucuucuagucccca

SEQ ID NO: 18857 - RNA, 21 nt, Artificial Sequence
  Guide RNA
ucuccuuacacuucuaguccc

SEQ ID NO: 18858 - RNA, 21 nt, Artificial Sequence
  Guide RNA
ucuccuuacucuucuaguccc

SEQ ID NO: 18859 - RNA, 21 nt, Artificial Sequence
  Guide RNA
uggggacuagaagaguaagga

SEQ ID NO: 18860 - RNA, 21 nt, Artificial Sequence
  Guide RNA
uggggacuagaaguguaagga

SEQ ID NO: 18861 - RNA, 21 nt, Artificial Sequence
  Guide RNA
uguuucaucccuauucuccuu

SEQ ID NO: 18862 - RNA, 21 nt, Artificial Sequence
  Guide RNA
uuacacuucuaguccccaaau

SEQ ID NO: 18863 - RNA, 21 nt, Artificial Sequence
  Guide RNA
uuacucuucuaguccccaaau

SEQ ID NO: 18864 - RNA, 21 nt, Artificial Sequence
  Guide RNA
uucaucccuauucuccuuaca

SEQ ID NO: 18865 - RNA, 21 nt, Artificial Sequence
  Guide RNA
uucaucccuauucuccuuacu

SEQ ID NO: 18866 - RNA, 21 nt, Artificial Sequence
  Guide RNA
uucuccuuacacuucuagucc

SEQ ID NO: 18867 - RNA, 21 nt, Artificial Sequence
  Guide RNA
uucuccuuacucuucuagucc

SEQ ID NO: 18868 - RNA, 21 nt, Artificial Sequence
  Guide RNA
uuggggacuagaagaguaagg

SEQ ID NO: 18869 - RNA, 21 nt, Artificial Sequence
  Guide RNA
uuggggacuagaaguguaagg

SEQ ID NO: 18870 - RNA, 21 nt, Artificial Sequence
  Guide RNA
uuguuucaucccuauucuccu

SEQ ID NO: 18871 - RNA, 21 nt, Artificial Sequence
  Guide RNA
uuucaucccuauucuccuuac

SEQ ID NO: 18872 - RNA, 21 nt, Artificial Sequence
  Guide RNA
uuuggggacuagaagaguaag

SEQ ID NO: 18873 - RNA, 21 nt, Artificial Sequence
  Guide RNA
uuuggggacuagaaguguaag

SEQ ID NO: 18874 - RNA, 22 nt, Artificial Sequence
  Guide RNA
aagaguaaggagaauagggaug

SEQ ID NO: 18875 - RNA, 22 nt, Artificial Sequence
  Guide RNA
aaguguaaggagaauagggaug

SEQ ID NO: 18876 - RNA, 22 nt, Artificial Sequence
  Guide RNA
aauaaucccauuuggggacuag

SEQ ID NO: 18877 - RNA, 22 nt, Artificial Sequence
  Guide RNA
aaucccauuuggggacuagaag

SEQ ID NO: 18878 - RNA, 22 nt, Artificial Sequence
  Guide RNA
acacuucuaguccccaaauggg

SEQ ID NO: 18879 - RNA, 22 nt, Artificial Sequence
  Guide RNA
acuagaagaguaaggagaauag

SEQ ID NO: 18880 - RNA, 22 nt, Artificial Sequence
  Guide RNA
acuagaaguguaaggagaauag

SEQ ID NO: 18881 - RNA, 22 nt, Artificial Sequence
  Guide RNA
acucuucuaguccccaaauggg

SEQ ID NO: 18882 - RNA, 22 nt, Artificial Sequence
  Guide RNA
agaagaguaaggagaauaggga

SEQ ID NO: 18883 - RNA, 22 nt, Artificial Sequence
  Guide RNA
agaaguguaaggagaauaggga

SEQ ID NO: 18884 - RNA, 22 nt, Artificial Sequence
  Guide RNA
agaguaaggagaauagggauga

SEQ ID NO: 18885 - RNA, 22 nt, Artificial Sequence
  Guide RNA
aguguaaggagaauagggauga

SEQ ID NO: 18886 - RNA, 22 nt, Artificial Sequence
  Guide RNA
auaaucccauuuggggacuaga

SEQ ID NO: 18887 - RNA, 22 nt, Artificial Sequence
  Guide RNA
aucccauuuggggacuagaaga

SEQ ID NO: 18888 - RNA, 22 nt, Artificial Sequence
  Guide RNA
aucccauuuggggacuagaagu

SEQ ID NO: 18889 - RNA, 22 nt, Artificial Sequence
  Guide RNA
aucccuauucuccuuacacuuc

SEQ ID NO: 18890 - RNA, 22 nt, Artificial Sequence
  Guide RNA
aucccuauucuccuuacucuuc

SEQ ID NO: 18891 - RNA, 22 nt, Artificial Sequence
  Guide RNA
auucuccuuacacuucuagucc

SEQ ID NO: 18892 - RNA, 22 nt, Artificial Sequence
  Guide RNA
auucuccuuacucuucuagucc

SEQ ID NO: 18893 - RNA, 22 nt, Artificial Sequence
  Guide RNA
auuuggggacuagaagaguaag

SEQ ID NO: 18894 - RNA, 22 nt, Artificial Sequence
  Guide RNA
auuuggggacuagaaguguaag

SEQ ID NO: 18895 - RNA, 22 nt, Artificial Sequence
  Guide RNA
cacuucuaguccccaaauggga

SEQ ID NO: 18896 - RNA, 22 nt, Artificial Sequence
  Guide RNA
caucccuauucuccuuacacuu

SEQ ID NO: 18897 - RNA, 22 nt, Artificial Sequence
  Guide RNA
caucccuauucuccuuacucuu

SEQ ID NO: 18898 - RNA, 22 nt, Artificial Sequence
  Guide RNA
cauuuggggacuagaagaguaa

SEQ ID NO: 18899 - RNA, 22 nt, Artificial Sequence
  Guide RNA
cauuuggggacuagaaguguaa

SEQ ID NO: 18900 - RNA, 22 nt, Artificial Sequence
  Guide RNA
ccauuuggggacuagaagagua

SEQ ID NO: 18901 - RNA, 22 nt, Artificial Sequence
  Guide RNA
ccauuuggggacuagaagugua

SEQ ID NO: 18902 - RNA, 22 nt, Artificial Sequence
  Guide RNA
cccauuuggggacuagaagagu

SEQ ID NO: 18903 - RNA, 22 nt, Artificial Sequence
  Guide RNA
cccauuuggggacuagaagugu

SEQ ID NO: 18904 - RNA, 22 nt, Artificial Sequence
  Guide RNA
cccuauucuccuuacacuucua

SEQ ID NO: 18905 - RNA, 22 nt, Artificial Sequence
  Guide RNA
cccuauucuccuuacucuucua

SEQ ID NO: 18906 - RNA, 22 nt, Artificial Sequence
  Guide RNA
ccuauucuccuuacacuucuag

SEQ ID NO: 18907 - RNA, 22 nt, Artificial Sequence
  Guide RNA
ccuauucuccuuacucuucuag

SEQ ID NO: 18908 - RNA, 22 nt, Artificial Sequence
  Guide RNA
ccuuacacuucuaguccccaaa

SEQ ID NO: 18909 - RNA, 22 nt, Artificial Sequence
  Guide RNA
ccuuacucuucuaguccccaaa

SEQ ID NO: 18910 - RNA, 22 nt, Artificial Sequence
  Guide RNA
cuagaagaguaaggagaauagg

SEQ ID NO: 18911 - RNA, 22 nt, Artificial Sequence
  Guide RNA
cuagaaguguaaggagaauagg

SEQ ID NO: 18912 - RNA, 22 nt, Artificial Sequence
  Guide RNA
cuauucuccuuacacuucuagu

SEQ ID NO: 18913 - RNA, 22 nt, Artificial Sequence
  Guide RNA
cuauucuccuuacucuucuagu

SEQ ID NO: 18914 - RNA, 22 nt, Artificial Sequence
  Guide RNA
cuccuuacacuucuagucccca

SEQ ID NO: 18915 - RNA, 22 nt, Artificial Sequence
  Guide RNA
cuccuuacucuucuagucccca

SEQ ID NO: 18916 - RNA, 22 nt, Artificial Sequence
  Guide RNA
cucuucuaguccccaaauggga

SEQ ID NO: 18917 - RNA, 22 nt, Artificial Sequence
  Guide RNA
cuuacacuucuaguccccaaau

SEQ ID NO: 18918 - RNA, 22 nt, Artificial Sequence
  Guide RNA
cuuacucuucuaguccccaaau

SEQ ID NO: 18919 - RNA, 22 nt, Artificial Sequence
  Guide RNA
cuuguuucaucccuauucuccu

SEQ ID NO: 18920 - RNA, 22 nt, Artificial Sequence
  Guide RNA
gaagaguaaggagaauagggau

SEQ ID NO: 18921 - RNA, 22 nt, Artificial Sequence
  Guide RNA
gaaguguaaggagaauagggau

SEQ ID NO: 18922 - RNA, 22 nt, Artificial Sequence
  Guide RNA
gacuagaagaguaaggagaaua

SEQ ID NO: 18923 - RNA, 22 nt, Artificial Sequence
  Guide RNA
gacuagaaguguaaggagaaua

SEQ ID NO: 18924 - RNA, 22 nt, Artificial Sequence
  Guide RNA
gaguaaggagaauagggaugaa

SEQ ID NO: 18925 - RNA, 22 nt, Artificial Sequence
  Guide RNA
ggacuagaagaguaaggagaau

SEQ ID NO: 18926 - RNA, 22 nt, Artificial Sequence
  Guide RNA
ggacuagaaguguaaggagaau

SEQ ID NO: 18927 - RNA, 22 nt, Artificial Sequence
  Guide RNA
gggacuagaagaguaaggagaa

SEQ ID NO: 18928 - RNA, 22 nt, Artificial Sequence
  Guide RNA
gggacuagaaguguaaggagaa

SEQ ID NO: 18929 - RNA, 22 nt, Artificial Sequence
  Guide RNA
ggggacuagaagaguaaggaga

SEQ ID NO: 18930 - RNA, 22 nt, Artificial Sequence
  Guide RNA
ggggacuagaaguguaaggaga

SEQ ID NO: 18931 - RNA, 22 nt, Artificial Sequence
  Guide RNA
guguaaggagaauagggaugaa

SEQ ID NO: 18932 - RNA, 22 nt, Artificial Sequence
  Guide RNA
guuucaucccuauucuccuuac

SEQ ID NO: 18933 - RNA, 22 nt, Artificial Sequence
  Guide RNA
uaaucccauuuggggacuagaa

SEQ ID NO: 18934 - RNA, 22 nt, Artificial Sequence
  Guide RNA
uacacuucuaguccccaaaugg

SEQ ID NO: 18935 - RNA, 22 nt, Artificial Sequence
  Guide RNA
uacucuucuaguccccaaaugg

SEQ ID NO: 18936 - RNA, 22 nt, Artificial Sequence
  Guide RNA
uagaagaguaaggagaauaggg

SEQ ID NO: 18937 - RNA, 22 nt, Artificial Sequence
  Guide RNA
uagaaguguaaggagaauaggg

SEQ ID NO: 18938 - RNA, 22 nt, Artificial Sequence
  Guide RNA
uauucuccuuacacuucuaguc

SEQ ID NO: 18939 - RNA, 22 nt, Artificial Sequence
  Guide RNA
uauucuccuuacucuucuaguc

SEQ ID NO: 18940 - RNA, 22 nt, Artificial Sequence
  Guide RNA
ucaucccuauucuccuuacacu

SEQ ID NO: 18941 - RNA, 22 nt, Artificial Sequence
  Guide RNA
ucaucccuauucuccuuacucu

SEQ ID NO: 18942 - RNA, 22 nt, Artificial Sequence
  Guide RNA
ucccauuuggggacuagaagag

SEQ ID NO: 18943 - RNA, 22 nt, Artificial Sequence
  Guide RNA
ucccauuuggggacuagaagug

SEQ ID NO: 18944 - RNA, 22 nt, Artificial Sequence
  Guide RNA
ucccuauucuccuuacacuucu

SEQ ID NO: 18945 - RNA, 22 nt, Artificial Sequence
  Guide RNA
ucccuauucuccuuacucuucu

SEQ ID NO: 18946 - RNA, 22 nt, Artificial Sequence
  Guide RNA
uccuuacacuucuaguccccaa

SEQ ID NO: 18947 - RNA, 22 nt, Artificial Sequence
  Guide RNA
uccuuacucuucuaguccccaa

SEQ ID NO: 18948 - RNA, 22 nt, Artificial Sequence
  Guide RNA
ucuccuuacacuucuagucccc

SEQ ID NO: 18949 - RNA, 22 nt, Artificial Sequence
  Guide RNA
ucuccuuacucuucuagucccc

SEQ ID NO: 18950 - RNA, 22 nt, Artificial Sequence
  Guide RNA
uggggacuagaagaguaaggag

SEQ ID NO: 18951 - RNA, 22 nt, Artificial Sequence
  Guide RNA
uggggacuagaaguguaaggag

SEQ ID NO: 18952 - RNA, 22 nt, Artificial Sequence
  Guide RNA
uguuucaucccuauucuccuua

SEQ ID NO: 18953 - RNA, 22 nt, Artificial Sequence
  Guide RNA
uuacacuucuaguccccaaaug

SEQ ID NO: 18954 - RNA, 22 nt, Artificial Sequence
  Guide RNA
uuacucuucuaguccccaaaug

SEQ ID NO: 18955 - RNA, 22 nt, Artificial Sequence
  Guide RNA
uucaucccuauucuccuuacac

SEQ ID NO: 18956 - RNA, 22 nt, Artificial Sequence
  Guide RNA
uucaucccuauucuccuuacuc

SEQ ID NO: 18957 - RNA, 22 nt, Artificial Sequence
  Guide RNA
uucuccuuacacuucuaguccc

SEQ ID NO: 18958 - RNA, 22 nt, Artificial Sequence
  Guide RNA
uucuccuuacucuucuaguccc

SEQ ID NO: 18959 - RNA, 22 nt, Artificial Sequence
  Guide RNA
uuggggacuagaagaguaagga

SEQ ID NO: 18960 - RNA, 22 nt, Artificial Sequence
  Guide RNA
uuggggacuagaaguguaagga

SEQ ID NO: 18961 - RNA, 22 nt, Artificial Sequence
  Guide RNA
uuguuucaucccuauucuccuu

SEQ ID NO: 18962 - RNA, 22 nt, Artificial Sequence
  Guide RNA
uuucaucccuauucuccuuaca

SEQ ID NO: 18963 - RNA, 22 nt, Artificial Sequence
  Guide RNA
uuucaucccuauucuccuuacu

SEQ ID NO: 18964 - RNA, 22 nt, Artificial Sequence
  Guide RNA
uuuggggacuagaagaguaagg

SEQ ID NO: 18965 - RNA, 22 nt, Artificial Sequence
  Guide RNA
uuuggggacuagaaguguaagg

SEQ ID NO: 18966 - RNA, 20 nt, Artificial Sequence
  Guide RNA
acauuuuuaucaccucuggu

SEQ ID NO: 18967 - RNA, 20 nt, Artificial Sequence
  Guide RNA
acauuuuuaucagcucuggu

SEQ ID NO: 18968 - RNA, 20 nt, Artificial Sequence
  Guide RNA
accagagcugauaaaaaugu

SEQ ID NO: 18969 - RNA, 20 nt, Artificial Sequence
  Guide RNA
accagaggugauaaaaaugu

SEQ ID NO: 18970 - RNA, 20 nt, Artificial Sequence
  Guide RNA
accucugguaaggcugggaa

SEQ ID NO: 18971 - RNA, 20 nt, Artificial Sequence
  Guide RNA
agagcugauaaaaaugucaa

SEQ ID NO: 18972 - RNA, 20 nt, Artificial Sequence
  Guide RNA
agaggugauaaaaaugucaa

SEQ ID NO: 18973 - RNA, 20 nt, Artificial Sequence
  Guide RNA
agccuuaccagagcugauaa

SEQ ID NO: 18974 - RNA, 20 nt, Artificial Sequence
  Guide RNA
agccuuaccagaggugauaa

SEQ ID NO: 18975 - RNA, 20 nt, Artificial Sequence
  Guide RNA
agcucugguaaggcugggaa

SEQ ID NO: 18976 - RNA, 20 nt, Artificial Sequence
  Guide RNA
aucaccucugguaaggcugg

SEQ ID NO: 18977 - RNA, 20 nt, Artificial Sequence
  Guide RNA
aucagcucugguaaggcugg

SEQ ID NO: 18978 - RNA, 20 nt, Artificial Sequence
  Guide RNA
auggcuucccagccuuacca

SEQ ID NO: 18979 - RNA, 20 nt, Artificial Sequence
  Guide RNA
auugacauuuuuaucaccuc

SEQ ID NO: 18980 - RNA, 20 nt, Artificial Sequence
  Guide RNA
auugacauuuuuaucagcuc

SEQ ID NO: 18981 - RNA, 20 nt, Artificial Sequence
  Guide RNA
auuuuuaucaccucugguaa

SEQ ID NO: 18982 - RNA, 20 nt, Artificial Sequence
  Guide RNA
auuuuuaucagcucugguaa

SEQ ID NO: 18983 - RNA, 20 nt, Artificial Sequence
  Guide RNA
caccucugguaaggcuggga

SEQ ID NO: 18984 - RNA, 20 nt, Artificial Sequence
  Guide RNA
cagagcugauaaaaauguca

SEQ ID NO: 18985 - RNA, 20 nt, Artificial Sequence
  Guide RNA
cagaggugauaaaaauguca

SEQ ID NO: 18986 - RNA, 20 nt, Artificial Sequence
  Guide RNA
cagccuuaccagagcugaua

SEQ ID NO: 18987 - RNA, 20 nt, Artificial Sequence
  Guide RNA
cagccuuaccagaggugaua

SEQ ID NO: 18988 - RNA, 20 nt, Artificial Sequence
  Guide RNA
cagcucugguaaggcuggga

SEQ ID NO: 18989 - RNA, 20 nt, Artificial Sequence
  Guide RNA
cauuuuuaucaccucuggua

SEQ ID NO: 18990 - RNA, 20 nt, Artificial Sequence
  Guide RNA
cauuuuuaucagcucuggua

SEQ ID NO: 18991 - RNA, 20 nt, Artificial Sequence
  Guide RNA
ccagagcugauaaaaauguc

SEQ ID NO: 18992 - RNA, 20 nt, Artificial Sequence
  Guide RNA
ccagaggugauaaaaauguc

SEQ ID NO: 18993 - RNA, 20 nt, Artificial Sequence
  Guide RNA
ccagccuuaccagagcugau

SEQ ID NO: 18994 - RNA, 20 nt, Artificial Sequence
  Guide RNA
ccagccuuaccagaggugau

SEQ ID NO: 18995 - RNA, 20 nt, Artificial Sequence
  Guide RNA
cccagccuuaccagagcuga

SEQ ID NO: 18996 - RNA, 20 nt, Artificial Sequence
  Guide RNA
cccagccuuaccagagguga

SEQ ID NO: 18997 - RNA, 20 nt, Artificial Sequence
  Guide RNA
ccuuaccagagcugauaaaa

SEQ ID NO: 18998 - RNA, 20 nt, Artificial Sequence
  Guide RNA
ccuuaccagaggugauaaaa

SEQ ID NO: 18999 - RNA, 20 nt, Artificial Sequence
  Guide RNA
cuuaccagagcugauaaaaa

SEQ ID NO: 19000 - RNA, 20 nt, Artificial Sequence
  Guide RNA
cuuaccagaggugauaaaaa

SEQ ID NO: 19001 - RNA, 20 nt, Artificial Sequence
  Guide RNA
cuucccagccuuaccagagc

SEQ ID NO: 19002 - RNA, 20 nt, Artificial Sequence
  Guide RNA
cuucccagccuuaccagagg

SEQ ID NO: 19003 - RNA, 20 nt, Artificial Sequence
  Guide RNA
gaauugacauuuuuaucacc

SEQ ID NO: 19004 - RNA, 20 nt, Artificial Sequence
  Guide RNA
gaauugacauuuuuaucagc

SEQ ID NO: 19005 - RNA, 20 nt, Artificial Sequence
  Guide RNA
gacauuuuuaucaccucugg

SEQ ID NO: 19006 - RNA, 20 nt, Artificial Sequence
  Guide RNA
gacauuuuuaucagcucugg

SEQ ID NO: 19007 - RNA, 20 nt, Artificial Sequence
  Guide RNA
gagcugauaaaaaugucaau

SEQ ID NO: 19008 - RNA, 20 nt, Artificial Sequence
  Guide RNA
gaggugauaaaaaugucaau

SEQ ID NO: 19009 - RNA, 20 nt, Artificial Sequence
  Guide RNA
gccuuaccagagcugauaaa

SEQ ID NO: 19010 - RNA, 20 nt, Artificial Sequence
  Guide RNA
gccuuaccagaggugauaaa

SEQ ID NO: 19011 - RNA, 20 nt, Artificial Sequence
  Guide RNA
gcugauaaaaaugucaauuc

SEQ ID NO: 19012 - RNA, 20 nt, Artificial Sequence
  Guide RNA
gcuucccagccuuaccagag

SEQ ID NO: 19013 - RNA, 20 nt, Artificial Sequence
  Guide RNA
ggaauugacauuuuuaucac

SEQ ID NO: 19014 - RNA, 20 nt, Artificial Sequence
  Guide RNA
ggaauugacauuuuuaucag

SEQ ID NO: 19015 - RNA, 20 nt, Artificial Sequence
  Guide RNA
ggcuucccagccuuaccaga

SEQ ID NO: 19016 - RNA, 20 nt, Artificial Sequence
  Guide RNA
ggugauaaaaaugucaauuc

SEQ ID NO: 19017 - RNA, 20 nt, Artificial Sequence
  Guide RNA
uaccagagcugauaaaaaug

SEQ ID NO: 19018 - RNA, 20 nt, Artificial Sequence
  Guide RNA
uaccagaggugauaaaaaug

SEQ ID NO: 19019 - RNA, 20 nt, Artificial Sequence
  Guide RNA
uaucaccucugguaaggcug

SEQ ID NO: 19020 - RNA, 20 nt, Artificial Sequence
  Guide RNA
uaucagcucugguaaggcug

SEQ ID NO: 19021 - RNA, 20 nt, Artificial Sequence
  Guide RNA
ucaccucugguaaggcuggg

SEQ ID NO: 19022 - RNA, 20 nt, Artificial Sequence
  Guide RNA
ucagcucugguaaggcuggg

SEQ ID NO: 19023 - RNA, 20 nt, Artificial Sequence
  Guide RNA
ucccagccuuaccagagcug

SEQ ID NO: 19024 - RNA, 20 nt, Artificial Sequence
  Guide RNA
ucccagccuuaccagaggug

SEQ ID NO: 19025 - RNA, 20 nt, Artificial Sequence
  Guide RNA
ugacauuuuuaucaccucug

SEQ ID NO: 19026 - RNA, 20 nt, Artificial Sequence
  Guide RNA
ugacauuuuuaucagcucug

SEQ ID NO: 19027 - RNA, 20 nt, Artificial Sequence
  Guide RNA
uggcuucccagccuuaccag

SEQ ID NO: 19028 - RNA, 20 nt, Artificial Sequence
  Guide RNA
uuaccagagcugauaaaaau

SEQ ID NO: 19029 - RNA, 20 nt, Artificial Sequence
  Guide RNA
uuaccagaggugauaaaaau

SEQ ID NO: 19030 - RNA, 20 nt, Artificial Sequence
  Guide RNA
uuaucaccucugguaaggcu

SEQ ID NO: 19031 - RNA, 20 nt, Artificial Sequence
  Guide RNA
uuaucagcucugguaaggcu

SEQ ID NO: 19032 - RNA, 20 nt, Artificial Sequence
  Guide RNA
uucccagccuuaccagagcu

SEQ ID NO: 19033 - RNA, 20 nt, Artificial Sequence
  Guide RNA
uucccagccuuaccagaggu

SEQ ID NO: 19034 - RNA, 20 nt, Artificial Sequence
  Guide RNA
uugacauuuuuaucaccucu

SEQ ID NO: 19035 - RNA, 20 nt, Artificial Sequence
  Guide RNA
uugacauuuuuaucagcucu

SEQ ID NO: 19036 - RNA, 20 nt, Artificial Sequence
  Guide RNA
uuuaucaccucugguaaggc

SEQ ID NO: 19037 - RNA, 20 nt, Artificial Sequence
  Guide RNA
uuuaucagcucugguaaggc

SEQ ID NO: 19038 - RNA, 20 nt, Artificial Sequence
  Guide RNA
uuuuaucaccucugguaagg

SEQ ID NO: 19039 - RNA, 20 nt, Artificial Sequence
  Guide RNA
uuuuaucagcucugguaagg

SEQ ID NO: 19040 - RNA, 20 nt, Artificial Sequence
  Guide RNA
uuuuuaucaccucugguaag

SEQ ID NO: 19041 - RNA, 20 nt, Artificial Sequence
  Guide RNA
uuuuuaucagcucugguaag

SEQ ID NO: 19042 - RNA, 21 nt, Artificial Sequence
  Guide RNA
acauuuuuaucaccucuggua

SEQ ID NO: 19043 - RNA, 21 nt, Artificial Sequence
  Guide RNA
acauuuuuaucagcucuggua

SEQ ID NO: 19044 - RNA, 21 nt, Artificial Sequence
  Guide RNA
accagagcugauaaaaauguc

SEQ ID NO: 19045 - RNA, 21 nt, Artificial Sequence
  Guide RNA
accagaggugauaaaaauguc

SEQ ID NO: 19046 - RNA, 21 nt, Artificial Sequence
  Guide RNA
accucugguaaggcugggaag

SEQ ID NO: 19047 - RNA, 21 nt, Artificial Sequence
  Guide RNA
agccuuaccagagcugauaaa

SEQ ID NO: 19048 - RNA, 21 nt, Artificial Sequence
  Guide RNA
agccuuaccagaggugauaaa

SEQ ID NO: 19049 - RNA, 21 nt, Artificial Sequence
  Guide RNA
agcucugguaaggcugggaag

SEQ ID NO: 19050 - RNA, 21 nt, Artificial Sequence
  Guide RNA
aucaccucugguaaggcuggg

SEQ ID NO: 19051 - RNA, 21 nt, Artificial Sequence
  Guide RNA
aucagcucugguaaggcuggg

SEQ ID NO: 19052 - RNA, 21 nt, Artificial Sequence
  Guide RNA
auggcuucccagccuuaccag

SEQ ID NO: 19053 - RNA, 21 nt, Artificial Sequence
  Guide RNA
auuuuuaucaccucugguaag

SEQ ID NO: 19054 - RNA, 21 nt, Artificial Sequence
  Guide RNA
auuuuuaucagcucugguaag

SEQ ID NO: 19055 - RNA, 21 nt, Artificial Sequence
  Guide RNA
caccucugguaaggcugggaa

SEQ ID NO: 19056 - RNA, 21 nt, Artificial Sequence
  Guide RNA
cagagcugauaaaaaugucaa

SEQ ID NO: 19057 - RNA, 21 nt, Artificial Sequence
  Guide RNA
cagaggugauaaaaaugucaa

SEQ ID NO: 19058 - RNA, 21 nt, Artificial Sequence
  Guide RNA
cagccuuaccagagcugauaa

SEQ ID NO: 19059 - RNA, 21 nt, Artificial Sequence
  Guide RNA
cagccuuaccagaggugauaa

SEQ ID NO: 19060 - RNA, 21 nt, Artificial Sequence
  Guide RNA
cagcucugguaaggcugggaa

SEQ ID NO: 19061 - RNA, 21 nt, Artificial Sequence
  Guide RNA
cauggcuucccagccuuacca

SEQ ID NO: 19062 - RNA, 21 nt, Artificial Sequence
  Guide RNA
cauuuuuaucaccucugguaa

SEQ ID NO: 19063 - RNA, 21 nt, Artificial Sequence
  Guide RNA
cauuuuuaucagcucugguaa

SEQ ID NO: 19064 - RNA, 21 nt, Artificial Sequence
  Guide RNA
ccagagcugauaaaaauguca

SEQ ID NO: 19065 - RNA, 21 nt, Artificial Sequence
  Guide RNA
ccagaggugauaaaaauguca

SEQ ID NO: 19066 - RNA, 21 nt, Artificial Sequence
  Guide RNA
ccagccuuaccagagcugaua

SEQ ID NO: 19067 - RNA, 21 nt, Artificial Sequence
  Guide RNA
ccagccuuaccagaggugaua

SEQ ID NO: 19068 - RNA, 21 nt, Artificial Sequence
  Guide RNA
cccagccuuaccagagcugau

SEQ ID NO: 19069 - RNA, 21 nt, Artificial Sequence
  Guide RNA
cccagccuuaccagaggugau

SEQ ID NO: 19070 - RNA, 21 nt, Artificial Sequence
  Guide RNA
ccuuaccagagcugauaaaaa

SEQ ID NO: 19071 - RNA, 21 nt, Artificial Sequence
  Guide RNA
ccuuaccagaggugauaaaaa

SEQ ID NO: 19072 - RNA, 21 nt, Artificial Sequence
  Guide RNA
cuuaccagagcugauaaaaau

SEQ ID NO: 19073 - RNA, 21 nt, Artificial Sequence
  Guide RNA
cuuaccagaggugauaaaaau

SEQ ID NO: 19074 - RNA, 21 nt, Artificial Sequence
  Guide RNA
cuucccagccuuaccagagcu

SEQ ID NO: 19075 - RNA, 21 nt, Artificial Sequence
  Guide RNA
cuucccagccuuaccagaggu

SEQ ID NO: 19076 - RNA, 21 nt, Artificial Sequence
  Guide RNA
gacauuuuuaucaccucuggu

SEQ ID NO: 19077 - RNA, 21 nt, Artificial Sequence
  Guide RNA
gacauuuuuaucagcucuggu

SEQ ID NO: 19078 - RNA, 21 nt, Artificial Sequence
  Guide RNA
gccuuaccagagcugauaaaa

SEQ ID NO: 19079 - RNA, 21 nt, Artificial Sequence
  Guide RNA
gccuuaccagaggugauaaaa

SEQ ID NO: 19080 - RNA, 21 nt, Artificial Sequence
  Guide RNA
gcugauaaaaaugucaauucc

SEQ ID NO: 19081 - RNA, 21 nt, Artificial Sequence
  Guide RNA
gcuucccagccuuaccagagc

SEQ ID NO: 19082 - RNA, 21 nt, Artificial Sequence
  Guide RNA
gcuucccagccuuaccagagg

SEQ ID NO: 19083 - RNA, 21 nt, Artificial Sequence
  Guide RNA
ggaauugacauuuuuaucacc

SEQ ID NO: 19084 - RNA, 21 nt, Artificial Sequence
  Guide RNA
ggaauugacauuuuuaucagc

SEQ ID NO: 19085 - RNA, 21 nt, Artificial Sequence
  Guide RNA
ggcuucccagccuuaccagag

SEQ ID NO: 19086 - RNA, 21 nt, Artificial Sequence
  Guide RNA
ggugauaaaaaugucaauucc

SEQ ID NO: 19087 - RNA, 21 nt, Artificial Sequence
  Guide RNA
uaccagagcugauaaaaaugu

SEQ ID NO: 19088 - RNA, 21 nt, Artificial Sequence
  Guide RNA
uaccagaggugauaaaaaugu

SEQ ID NO: 19089 - RNA, 21 nt, Artificial Sequence
  Guide RNA
uaucaccucugguaaggcugg

SEQ ID NO: 19090 - RNA, 21 nt, Artificial Sequence
  Guide RNA
uaucagcucugguaaggcugg

SEQ ID NO: 19091 - RNA, 21 nt, Artificial Sequence
  Guide RNA
ucaccucugguaaggcuggga

SEQ ID NO: 19092 - RNA, 21 nt, Artificial Sequence
  Guide RNA
ucagcucugguaaggcuggga

SEQ ID NO: 19093 - RNA, 21 nt, Artificial Sequence
  Guide RNA
ucccagccuuaccagagcuga

SEQ ID NO: 19094 - RNA, 21 nt, Artificial Sequence
  Guide RNA
ucccagccuuaccagagguga

SEQ ID NO: 19095 - RNA, 21 nt, Artificial Sequence
  Guide RNA
ugacauuuuuaucaccucugg

SEQ ID NO: 19096 - RNA, 21 nt, Artificial Sequence
  Guide RNA
ugacauuuuuaucagcucugg

SEQ ID NO: 19097 - RNA, 21 nt, Artificial Sequence
  Guide RNA
uggcuucccagccuuaccaga

SEQ ID NO: 19098 - RNA, 21 nt, Artificial Sequence
  Guide RNA
uuaccagagcugauaaaaaug

SEQ ID NO: 19099 - RNA, 21 nt, Artificial Sequence
  Guide RNA
uuaccagaggugauaaaaaug

SEQ ID NO: 19100 - RNA, 21 nt, Artificial Sequence
  Guide RNA
uuaucaccucugguaaggcug

SEQ ID NO: 19101 - RNA, 21 nt, Artificial Sequence
  Guide RNA
uuaucagcucugguaaggcug

SEQ ID NO: 19102 - RNA, 21 nt, Artificial Sequence
  Guide RNA
uucccagccuuaccagagcug

SEQ ID NO: 19103 - RNA, 21 nt, Artificial Sequence
  Guide RNA
uucccagccuuaccagaggug

SEQ ID NO: 19104 - RNA, 21 nt, Artificial Sequence
  Guide RNA
uugacauuuuuaucaccucug

SEQ ID NO: 19105 - RNA, 21 nt, Artificial Sequence
  Guide RNA
uugacauuuuuaucagcucug

SEQ ID NO: 19106 - RNA, 21 nt, Artificial Sequence
  Guide RNA
uuuaucaccucugguaaggcu

SEQ ID NO: 19107 - RNA, 21 nt, Artificial Sequence
  Guide RNA
uuuaucagcucugguaaggcu

SEQ ID NO: 19108 - RNA, 21 nt, Artificial Sequence
  Guide RNA
uuuuaucaccucugguaaggc

SEQ ID NO: 19109 - RNA, 21 nt, Artificial Sequence
  Guide RNA
uuuuaucagcucugguaaggc

SEQ ID NO: 19110 - RNA, 21 nt, Artificial Sequence
  Guide RNA
uuuuuaucaccucugguaagg

SEQ ID NO: 19111 - RNA, 21 nt, Artificial Sequence
  Guide RNA
uuuuuaucagcucugguaagg

SEQ ID NO: 19112 - RNA, 22 nt, Artificial Sequence
  Guide RNA
acauuuuuaucaccucugguaa

SEQ ID NO: 19113 - RNA, 22 nt, Artificial Sequence
  Guide RNA
acauuuuuaucagcucugguaa

SEQ ID NO: 19114 - RNA, 22 nt, Artificial Sequence
  Guide RNA
accagagcugauaaaaauguca

SEQ ID NO: 19115 - RNA, 22 nt, Artificial Sequence
  Guide RNA
accagaggugauaaaaauguca

SEQ ID NO: 19116 - RNA, 22 nt, Artificial Sequence
  Guide RNA
accucugguaaggcugggaagc

SEQ ID NO: 19117 - RNA, 22 nt, Artificial Sequence
  Guide RNA
agccuuaccagagcugauaaaa

SEQ ID NO: 19118 - RNA, 22 nt, Artificial Sequence
  Guide RNA
agccuuaccagaggugauaaaa

SEQ ID NO: 19119 - RNA, 22 nt, Artificial Sequence
  Guide RNA
agcucugguaaggcugggaagc

SEQ ID NO: 19120 - RNA, 22 nt, Artificial Sequence
  Guide RNA
agcugauaaaaaugucaauucc

SEQ ID NO: 19121 - RNA, 22 nt, Artificial Sequence
  Guide RNA
aggaauugacauuuuuaucacc

SEQ ID NO: 19122 - RNA, 22 nt, Artificial Sequence
  Guide RNA
aggaauugacauuuuuaucagc

SEQ ID NO: 19123 - RNA, 22 nt, Artificial Sequence
  Guide RNA
aggugauaaaaaugucaauucc

SEQ ID NO: 19124 - RNA, 22 nt, Artificial Sequence
  Guide RNA
aucaccucugguaaggcuggga

SEQ ID NO: 19125 - RNA, 22 nt, Artificial Sequence
  Guide RNA
aucagcucugguaaggcuggga

SEQ ID NO: 19126 - RNA, 22 nt, Artificial Sequence
  Guide RNA
auggcuucccagccuuaccaga

SEQ ID NO: 19127 - RNA, 22 nt, Artificial Sequence
  Guide RNA
auugacauuuuuaucaccucug

SEQ ID NO: 19128 - RNA, 22 nt, Artificial Sequence
  Guide RNA
auugacauuuuuaucagcucug

SEQ ID NO: 19129 - RNA, 22 nt, Artificial Sequence
  Guide RNA
auuuuuaucaccucugguaagg

SEQ ID NO: 19130 - RNA, 22 nt, Artificial Sequence
  Guide RNA
auuuuuaucagcucugguaagg

SEQ ID NO: 19131 - RNA, 22 nt, Artificial Sequence
  Guide RNA
caccucugguaaggcugggaag

SEQ ID NO: 19132 - RNA, 22 nt, Artificial Sequence
  Guide RNA
cagagcugauaaaaaugucaau

SEQ ID NO: 19133 - RNA, 22 nt, Artificial Sequence
  Guide RNA
cagaggugauaaaaaugucaau

SEQ ID NO: 19134 - RNA, 22 nt, Artificial Sequence
  Guide RNA
cagccuuaccagagcugauaaa

SEQ ID NO: 19135 - RNA, 22 nt, Artificial Sequence
  Guide RNA
cagccuuaccagaggugauaaa

SEQ ID NO: 19136 - RNA, 22 nt, Artificial Sequence
  Guide RNA
cagcucugguaaggcugggaag

SEQ ID NO: 19137 - RNA, 22 nt, Artificial Sequence
  Guide RNA
cauggcuucccagccuuaccag

SEQ ID NO: 19138 - RNA, 22 nt, Artificial Sequence
  Guide RNA
cauuuuuaucaccucugguaag

SEQ ID NO: 19139 - RNA, 22 nt, Artificial Sequence
  Guide RNA
cauuuuuaucagcucugguaag

SEQ ID NO: 19140 - RNA, 22 nt, Artificial Sequence
  Guide RNA
ccagagcugauaaaaaugucaa

SEQ ID NO: 19141 - RNA, 22 nt, Artificial Sequence
  Guide RNA
ccagaggugauaaaaaugucaa

SEQ ID NO: 19142 - RNA, 22 nt, Artificial Sequence
  Guide RNA
ccagccuuaccagagcugauaa

SEQ ID NO: 19143 - RNA, 22 nt, Artificial Sequence
  Guide RNA
ccagccuuaccagaggugauaa

SEQ ID NO: 19144 - RNA, 22 nt, Artificial Sequence
  Guide RNA
ccauggcuucccagccuuacca

SEQ ID NO: 19145 - RNA, 22 nt, Artificial Sequence
  Guide RNA
cccaaaggaauugacauuuuua

SEQ ID NO: 19146 - RNA, 22 nt, Artificial Sequence
  Guide RNA
cccagccuuaccagagcugaua

SEQ ID NO: 19147 - RNA, 22 nt, Artificial Sequence
  Guide RNA
cccagccuuaccagaggugaua

SEQ ID NO: 19148 - RNA, 22 nt, Artificial Sequence
  Guide RNA
ccuuaccagagcugauaaaaau

SEQ ID NO: 19149 - RNA, 22 nt, Artificial Sequence
  Guide RNA
ccuuaccagaggugauaaaaau

SEQ ID NO: 19150 - RNA, 22 nt, Artificial Sequence
  Guide RNA
cuuaccagagcugauaaaaaug

SEQ ID NO: 19151 - RNA, 22 nt, Artificial Sequence
  Guide RNA
cuuaccagaggugauaaaaaug

SEQ ID NO: 19152 - RNA, 22 nt, Artificial Sequence
  Guide RNA
cuucccagccuuaccagagcug

SEQ ID NO: 19153 - RNA, 22 nt, Artificial Sequence
  Guide RNA
cuucccagccuuaccagaggug

SEQ ID NO: 19154 - RNA, 22 nt, Artificial Sequence
  Guide RNA
gaauugacauuuuuaucaccuc

SEQ ID NO: 19155 - RNA, 22 nt, Artificial Sequence
  Guide RNA
gaauugacauuuuuaucagcuc

SEQ ID NO: 19156 - RNA, 22 nt, Artificial Sequence
  Guide RNA
gacauuuuuaucaccucuggua

SEQ ID NO: 19157 - RNA, 22 nt, Artificial Sequence
  Guide RNA
gacauuuuuaucagcucuggua

SEQ ID NO: 19158 - RNA, 22 nt, Artificial Sequence
  Guide RNA
gagcugauaaaaaugucaauuc

SEQ ID NO: 19159 - RNA, 22 nt, Artificial Sequence
  Guide RNA
gaggugauaaaaaugucaauuc

SEQ ID NO: 19160 - RNA, 22 nt, Artificial Sequence
  Guide RNA
gccuuaccagagcugauaaaaa

SEQ ID NO: 19161 - RNA, 22 nt, Artificial Sequence
  Guide RNA
gccuuaccagaggugauaaaaa

SEQ ID NO: 19162 - RNA, 22 nt, Artificial Sequence
  Guide RNA
gcugauaaaaaugucaauuccu

SEQ ID NO: 19163 - RNA, 22 nt, Artificial Sequence
  Guide RNA
gcuucccagccuuaccagagcu

SEQ ID NO: 19164 - RNA, 22 nt, Artificial Sequence
  Guide RNA
gcuucccagccuuaccagaggu

SEQ ID NO: 19165 - RNA, 22 nt, Artificial Sequence
  Guide RNA
ggaauugacauuuuuaucaccu

SEQ ID NO: 19166 - RNA, 22 nt, Artificial Sequence
  Guide RNA
ggaauugacauuuuuaucagcu

SEQ ID NO: 19167 - RNA, 22 nt, Artificial Sequence
  Guide RNA
ggcuucccagccuuaccagagc

SEQ ID NO: 19168 - RNA, 22 nt, Artificial Sequence
  Guide RNA
ggcuucccagccuuaccagagg

SEQ ID NO: 19169 - RNA, 22 nt, Artificial Sequence
  Guide RNA
ggugauaaaaaugucaauuccu

SEQ ID NO: 19170 - RNA, 22 nt, Artificial Sequence
  Guide RNA
uaccagagcugauaaaaauguc

SEQ ID NO: 19171 - RNA, 22 nt, Artificial Sequence
  Guide RNA
uaccagaggugauaaaaauguc

SEQ ID NO: 19172 - RNA, 22 nt, Artificial Sequence
  Guide RNA
uaucaccucugguaaggcuggg

SEQ ID NO: 19173 - RNA, 22 nt, Artificial Sequence
  Guide RNA
uaucagcucugguaaggcuggg

SEQ ID NO: 19174 - RNA, 22 nt, Artificial Sequence
  Guide RNA
ucaccucugguaaggcugggaa

SEQ ID NO: 19175 - RNA, 22 nt, Artificial Sequence
  Guide RNA
ucagcucugguaaggcugggaa

SEQ ID NO: 19176 - RNA, 22 nt, Artificial Sequence
  Guide RNA
ucccagccuuaccagagcugau

SEQ ID NO: 19177 - RNA, 22 nt, Artificial Sequence
  Guide RNA
ucccagccuuaccagaggugau

SEQ ID NO: 19178 - RNA, 22 nt, Artificial Sequence
  Guide RNA
ugacauuuuuaucaccucuggu

SEQ ID NO: 19179 - RNA, 22 nt, Artificial Sequence
  Guide RNA
ugacauuuuuaucagcucuggu

SEQ ID NO: 19180 - RNA, 22 nt, Artificial Sequence
  Guide RNA
uggcuucccagccuuaccagag

SEQ ID NO: 19181 - RNA, 22 nt, Artificial Sequence
  Guide RNA
uuaccagagcugauaaaaaugu

SEQ ID NO: 19182 - RNA, 22 nt, Artificial Sequence
  Guide RNA
uuaccagaggugauaaaaaugu

SEQ ID NO: 19183 - RNA, 22 nt, Artificial Sequence
  Guide RNA
uuaucaccucugguaaggcugg

SEQ ID NO: 19184 - RNA, 22 nt, Artificial Sequence
  Guide RNA
uuaucagcucugguaaggcugg

SEQ ID NO: 19185 - RNA, 22 nt, Artificial Sequence
  Guide RNA
uucccagccuuaccagagcuga

SEQ ID NO: 19186 - RNA, 22 nt, Artificial Sequence
  Guide RNA
uucccagccuuaccagagguga

SEQ ID NO: 19187 - RNA, 22 nt, Artificial Sequence
  Guide RNA
uugacauuuuuaucaccucugg

SEQ ID NO: 19188 - RNA, 22 nt, Artificial Sequence
  Guide RNA
uugacauuuuuaucagcucugg

SEQ ID NO: 19189 - RNA, 22 nt, Artificial Sequence
  Guide RNA
uuuaucaccucugguaaggcug

SEQ ID NO: 19190 - RNA, 22 nt, Artificial Sequence
  Guide RNA
uuuaucagcucugguaaggcug

SEQ ID NO: 19191 - RNA, 22 nt, Artificial Sequence
  Guide RNA
uuuuaucaccucugguaaggcu

SEQ ID NO: 19192 - RNA, 22 nt, Artificial Sequence
  Guide RNA
uuuuaucagcucugguaaggcu

SEQ ID NO: 19193 - RNA, 22 nt, Artificial Sequence
  Guide RNA
uuuuuaucaccucugguaaggc

SEQ ID NO: 19194 - RNA, 22 nt, Artificial Sequence
  Guide RNA
uuuuuaucagcucugguaaggc

SEQ ID NO: 19195 - RNA, 20 nt, Artificial Sequence
  Guide RNA
aaacugugauagguacacgg

SEQ ID NO: 19196 - RNA, 20 nt, Artificial Sequence
  Guide RNA
aaacugugauagguacaugg

SEQ ID NO: 19197 - RNA, 20 nt, Artificial Sequence
  Guide RNA
aacugugauagguacacggg

SEQ ID NO: 19198 - RNA, 20 nt, Artificial Sequence
  Guide RNA
aacugugauagguacauggg

SEQ ID NO: 19199 - RNA, 20 nt, Artificial Sequence
  Guide RNA
aauccccauguaccuaucac

SEQ ID NO: 19200 - RNA, 20 nt, Artificial Sequence
  Guide RNA
aauccccguguaccuaucac

SEQ ID NO: 19201 - RNA, 20 nt, Artificial Sequence
  Guide RNA
aaucuguugaauccccaugu

SEQ ID NO: 19202 - RNA, 20 nt, Artificial Sequence
  Guide RNA
aaucuguugaauccccgugu

SEQ ID NO: 19203 - RNA, 20 nt, Artificial Sequence
  Guide RNA
acacggggauucaacagauu

SEQ ID NO: 19204 - RNA, 20 nt, Artificial Sequence
  Guide RNA
acauggggauucaacagauu

SEQ ID NO: 19205 - RNA, 20 nt, Artificial Sequence
  Guide RNA
acggggauucaacagauuca

SEQ ID NO: 19206 - RNA, 20 nt, Artificial Sequence
  Guide RNA
acugugauagguacacgggg

SEQ ID NO: 19207 - RNA, 20 nt, Artificial Sequence
  Guide RNA
acugugauagguacaugggg

SEQ ID NO: 19208 - RNA, 20 nt, Artificial Sequence
  Guide RNA
agguacacggggauucaaca

SEQ ID NO: 19209 - RNA, 20 nt, Artificial Sequence
  Guide RNA
agguacauggggauucaaca

SEQ ID NO: 19210 - RNA, 20 nt, Artificial Sequence
  Guide RNA
auagguacacggggauucaa

SEQ ID NO: 19211 - RNA, 20 nt, Artificial Sequence
  Guide RNA
auagguacauggggauucaa

SEQ ID NO: 19212 - RNA, 20 nt, Artificial Sequence
  Guide RNA
auccccauguaccuaucaca

SEQ ID NO: 19213 - RNA, 20 nt, Artificial Sequence
  Guide RNA
auccccguguaccuaucaca

SEQ ID NO: 19214 - RNA, 20 nt, Artificial Sequence
  Guide RNA
aucuguugaauccccaugua

SEQ ID NO: 19215 - RNA, 20 nt, Artificial Sequence
  Guide RNA
aucuguugaauccccgugua

SEQ ID NO: 19216 - RNA, 20 nt, Artificial Sequence
  Guide RNA
auggggauucaacagauuca

SEQ ID NO: 19217 - RNA, 20 nt, Artificial Sequence
  Guide RNA
cacggggauucaacagauuc

SEQ ID NO: 19218 - RNA, 20 nt, Artificial Sequence
  Guide RNA
cauggggauucaacagauuc

SEQ ID NO: 19219 - RNA, 20 nt, Artificial Sequence
  Guide RNA
cauguaccuaucacaguuuc

SEQ ID NO: 19220 - RNA, 20 nt, Artificial Sequence
  Guide RNA
ccauguaccuaucacaguuu

SEQ ID NO: 19221 - RNA, 20 nt, Artificial Sequence
  Guide RNA
cccauguaccuaucacaguu

SEQ ID NO: 19222 - RNA, 20 nt, Artificial Sequence
  Guide RNA
ccccauguaccuaucacagu

SEQ ID NO: 19223 - RNA, 20 nt, Artificial Sequence
  Guide RNA
ccccguguaccuaucacagu

SEQ ID NO: 19224 - RNA, 20 nt, Artificial Sequence
  Guide RNA
cccguguaccuaucacaguu

SEQ ID NO: 19225 - RNA, 20 nt, Artificial Sequence
  Guide RNA
ccguguaccuaucacaguuu

SEQ ID NO: 19226 - RNA, 20 nt, Artificial Sequence
  Guide RNA
cguguaccuaucacaguuuc

SEQ ID NO: 19227 - RNA, 20 nt, Artificial Sequence
  Guide RNA
cugugauagguacacgggga

SEQ ID NO: 19228 - RNA, 20 nt, Artificial Sequence
  Guide RNA
cugugauagguacaugggga

SEQ ID NO: 19229 - RNA, 20 nt, Artificial Sequence
  Guide RNA
cuguugaauccccauguacc

SEQ ID NO: 19230 - RNA, 20 nt, Artificial Sequence
  Guide RNA
cuguugaauccccguguacc

SEQ ID NO: 19231 - RNA, 20 nt, Artificial Sequence
  Guide RNA
cuuguugaaucuguugaauc

SEQ ID NO: 19232 - RNA, 20 nt, Artificial Sequence
  Guide RNA
gaaacugugauagguacacg

SEQ ID NO: 19233 - RNA, 20 nt, Artificial Sequence
  Guide RNA
gaaacugugauagguacaug

SEQ ID NO: 19234 - RNA, 20 nt, Artificial Sequence
  Guide RNA
gaauccccauguaccuauca

SEQ ID NO: 19235 - RNA, 20 nt, Artificial Sequence
  Guide RNA
gaauccccguguaccuauca

SEQ ID NO: 19236 - RNA, 20 nt, Artificial Sequence
  Guide RNA
gaaucuguugaauccccaug

SEQ ID NO: 19237 - RNA, 20 nt, Artificial Sequence
  Guide RNA
gaaucuguugaauccccgug

SEQ ID NO: 19238 - RNA, 20 nt, Artificial Sequence
  Guide RNA
gauagguacacggggauuca

SEQ ID NO: 19239 - RNA, 20 nt, Artificial Sequence
  Guide RNA
gauagguacauggggauuca

SEQ ID NO: 19240 - RNA, 20 nt, Artificial Sequence
  Guide RNA
gguacacggggauucaacag

SEQ ID NO: 19241 - RNA, 20 nt, Artificial Sequence
  Guide RNA
gguacauggggauucaacag

SEQ ID NO: 19242 - RNA, 20 nt, Artificial Sequence
  Guide RNA
guacacggggauucaacaga

SEQ ID NO: 19243 - RNA, 20 nt, Artificial Sequence
  Guide RNA
guacauggggauucaacaga

SEQ ID NO: 19244 - RNA, 20 nt, Artificial Sequence
  Guide RNA
gugauagguacacggggauu

SEQ ID NO: 19245 - RNA, 20 nt, Artificial Sequence
  Guide RNA
gugauagguacauggggauu

SEQ ID NO: 19246 - RNA, 20 nt, Artificial Sequence
  Guide RNA
guugaaacugugauagguac

SEQ ID NO: 19247 - RNA, 20 nt, Artificial Sequence
  Guide RNA
guugaauccccauguaccua

SEQ ID NO: 19248 - RNA, 20 nt, Artificial Sequence
  Guide RNA
guugaauccccguguaccua

SEQ ID NO: 19249 - RNA, 20 nt, Artificial Sequence
  Guide RNA
guugaaucuguugaaucccc

SEQ ID NO: 19250 - RNA, 20 nt, Artificial Sequence
  Guide RNA
uacacggggauucaacagau

SEQ ID NO: 19251 - RNA, 20 nt, Artificial Sequence
  Guide RNA
uacauggggauucaacagau

SEQ ID NO: 19252 - RNA, 20 nt, Artificial Sequence
  Guide RNA
uagguacacggggauucaac

SEQ ID NO: 19253 - RNA, 20 nt, Artificial Sequence
  Guide RNA
uagguacauggggauucaac

SEQ ID NO: 19254 - RNA, 20 nt, Artificial Sequence
  Guide RNA
uccccauguaccuaucacag

SEQ ID NO: 19255 - RNA, 20 nt, Artificial Sequence
  Guide RNA
uccccguguaccuaucacag

SEQ ID NO: 19256 - RNA, 20 nt, Artificial Sequence
  Guide RNA
ucuguugaauccccauguac

SEQ ID NO: 19257 - RNA, 20 nt, Artificial Sequence
  Guide RNA
ucuguugaauccccguguac

SEQ ID NO: 19258 - RNA, 20 nt, Artificial Sequence
  Guide RNA
ugaaacugugauagguacac

SEQ ID NO: 19259 - RNA, 20 nt, Artificial Sequence
  Guide RNA
ugaaacugugauagguacau

SEQ ID NO: 19260 - RNA, 20 nt, Artificial Sequence
  Guide RNA
ugaauccccauguaccuauc

SEQ ID NO: 19261 - RNA, 20 nt, Artificial Sequence
  Guide RNA
ugaauccccguguaccuauc

SEQ ID NO: 19262 - RNA, 20 nt, Artificial Sequence
  Guide RNA
ugaaucuguugaauccccau

SEQ ID NO: 19263 - RNA, 20 nt, Artificial Sequence
  Guide RNA
ugaaucuguugaauccccgu

SEQ ID NO: 19264 - RNA, 20 nt, Artificial Sequence
  Guide RNA
ugauagguacacggggauuc

SEQ ID NO: 19265 - RNA, 20 nt, Artificial Sequence
  Guide RNA
ugauagguacauggggauuc

SEQ ID NO: 19266 - RNA, 20 nt, Artificial Sequence
  Guide RNA
ugugauagguacacggggau

SEQ ID NO: 19267 - RNA, 20 nt, Artificial Sequence
  Guide RNA
ugugauagguacauggggau

SEQ ID NO: 19268 - RNA, 20 nt, Artificial Sequence
  Guide RNA
uguugaaacugugauaggua

SEQ ID NO: 19269 - RNA, 20 nt, Artificial Sequence
  Guide RNA
uguugaauccccauguaccu

SEQ ID NO: 19270 - RNA, 20 nt, Artificial Sequence
  Guide RNA
uguugaauccccguguaccu

SEQ ID NO: 19271 - RNA, 20 nt, Artificial Sequence
  Guide RNA
uguugaaucuguugaauccc

SEQ ID NO: 19272 - RNA, 20 nt, Artificial Sequence
  Guide RNA
uugaaacugugauagguaca

SEQ ID NO: 19273 - RNA, 20 nt, Artificial Sequence
  Guide RNA
uugaauccccauguaccuau

SEQ ID NO: 19274 - RNA, 20 nt, Artificial Sequence
  Guide RNA
uugaauccccguguaccuau

SEQ ID NO: 19275 - RNA, 20 nt, Artificial Sequence
  Guide RNA
uugaaucuguugaaucccca

SEQ ID NO: 19276 - RNA, 20 nt, Artificial Sequence
  Guide RNA
uugaaucuguugaauccccg

SEQ ID NO: 19277 - RNA, 20 nt, Artificial Sequence
  Guide RNA
uuguugaaacugugauaggu

SEQ ID NO: 19278 - RNA, 20 nt, Artificial Sequence
  Guide RNA
uuguugaaucuguugaaucc

SEQ ID NO: 19279 - RNA, 21 nt, Artificial Sequence
  Guide RNA
aaacugugauagguacacggg

SEQ ID NO: 19280 - RNA, 21 nt, Artificial Sequence
  Guide RNA
aaacugugauagguacauggg

SEQ ID NO: 19281 - RNA, 21 nt, Artificial Sequence
  Guide RNA
aacugugauagguacacgggg

SEQ ID NO: 19282 - RNA, 21 nt, Artificial Sequence
  Guide RNA
aacugugauagguacaugggg

SEQ ID NO: 19283 - RNA, 21 nt, Artificial Sequence
  Guide RNA
aauccccauguaccuaucaca

SEQ ID NO: 19284 - RNA, 21 nt, Artificial Sequence
  Guide RNA
aauccccguguaccuaucaca

SEQ ID NO: 19285 - RNA, 21 nt, Artificial Sequence
  Guide RNA
aaucuguugaauccccaugua

SEQ ID NO: 19286 - RNA, 21 nt, Artificial Sequence
  Guide RNA
aaucuguugaauccccgugua

SEQ ID NO: 19287 - RNA, 21 nt, Artificial Sequence
  Guide RNA
acacggggauucaacagauuc

SEQ ID NO: 19288 - RNA, 21 nt, Artificial Sequence
  Guide RNA
acauggggauucaacagauuc

SEQ ID NO: 19289 - RNA, 21 nt, Artificial Sequence
  Guide RNA
acggggauucaacagauucaa

SEQ ID NO: 19290 - RNA, 21 nt, Artificial Sequence
  Guide RNA
acugugauagguacacgggga

SEQ ID NO: 19291 - RNA, 21 nt, Artificial Sequence
  Guide RNA
acugugauagguacaugggga

SEQ ID NO: 19292 - RNA, 21 nt, Artificial Sequence
  Guide RNA
acuuguugaaucuguugaauc

SEQ ID NO: 19293 - RNA, 21 nt, Artificial Sequence
  Guide RNA
agguacacggggauucaacag

SEQ ID NO: 19294 - RNA, 21 nt, Artificial Sequence
  Guide RNA
agguacauggggauucaacag

SEQ ID NO: 19295 - RNA, 21 nt, Artificial Sequence
  Guide RNA
auagguacacggggauucaac

SEQ ID NO: 19296 - RNA, 21 nt, Artificial Sequence
  Guide RNA
auagguacauggggauucaac

SEQ ID NO: 19297 - RNA, 21 nt, Artificial Sequence
  Guide RNA
auccccauguaccuaucacag

SEQ ID NO: 19298 - RNA, 21 nt, Artificial Sequence
  Guide RNA
auccccguguaccuaucacag

SEQ ID NO: 19299 - RNA, 21 nt, Artificial Sequence
  Guide RNA
aucuguugaauccccauguac

SEQ ID NO: 19300 - RNA, 21 nt, Artificial Sequence
  Guide RNA
aucuguugaauccccguguac

SEQ ID NO: 19301 - RNA, 21 nt, Artificial Sequence
  Guide RNA
auggggauucaacagauucaa

SEQ ID NO: 19302 - RNA, 21 nt, Artificial Sequence
  Guide RNA
auuguugaaacugugauaggu

SEQ ID NO: 19303 - RNA, 21 nt, Artificial Sequence
  Guide RNA
cacggggauucaacagauuca

SEQ ID NO: 19304 - RNA, 21 nt, Artificial Sequence
  Guide RNA
cauggggauucaacagauuca

SEQ ID NO: 19305 - RNA, 21 nt, Artificial Sequence
  Guide RNA
cauguaccuaucacaguuuca

SEQ ID NO: 19306 - RNA, 21 nt, Artificial Sequence
  Guide RNA
ccauguaccuaucacaguuuc

SEQ ID NO: 19307 - RNA, 21 nt, Artificial Sequence
  Guide RNA
cccauguaccuaucacaguuu

SEQ ID NO: 19308 - RNA, 21 nt, Artificial Sequence
  Guide RNA
ccccauguaccuaucacaguu

SEQ ID NO: 19309 - RNA, 21 nt, Artificial Sequence
  Guide RNA
ccccguguaccuaucacaguu

SEQ ID NO: 19310 - RNA, 21 nt, Artificial Sequence
  Guide RNA
cccguguaccuaucacaguuu

SEQ ID NO: 19311 - RNA, 21 nt, Artificial Sequence
  Guide RNA
ccguguaccuaucacaguuuc

SEQ ID NO: 19312 - RNA, 21 nt, Artificial Sequence
  Guide RNA
cguguaccuaucacaguuuca

SEQ ID NO: 19313 - RNA, 21 nt, Artificial Sequence
  Guide RNA
cugugauagguacacggggau

SEQ ID NO: 19314 - RNA, 21 nt, Artificial Sequence
  Guide RNA
cugugauagguacauggggau

SEQ ID NO: 19315 - RNA, 21 nt, Artificial Sequence
  Guide RNA
cuguugaauccccauguaccu

SEQ ID NO: 19316 - RNA, 21 nt, Artificial Sequence
  Guide RNA
cuguugaauccccguguaccu

SEQ ID NO: 19317 - RNA, 21 nt, Artificial Sequence
  Guide RNA
cuuguugaaucuguugaaucc

SEQ ID NO: 19318 - RNA, 21 nt, Artificial Sequence
  Guide RNA
gaaacugugauagguacacgg

SEQ ID NO: 19319 - RNA, 21 nt, Artificial Sequence
  Guide RNA
gaaacugugauagguacaugg

SEQ ID NO: 19320 - RNA, 21 nt, Artificial Sequence
  Guide RNA
gaauccccauguaccuaucac

SEQ ID NO: 19321 - RNA, 21 nt, Artificial Sequence
  Guide RNA
gaauccccguguaccuaucac

SEQ ID NO: 19322 - RNA, 21 nt, Artificial Sequence
  Guide RNA
gaaucuguugaauccccaugu

SEQ ID NO: 19323 - RNA, 21 nt, Artificial Sequence
  Guide RNA
gaaucuguugaauccccgugu

SEQ ID NO: 19324 - RNA, 21 nt, Artificial Sequence
  Guide RNA
gauagguacacggggauucaa

SEQ ID NO: 19325 - RNA, 21 nt, Artificial Sequence
  Guide RNA
gauagguacauggggauucaa

SEQ ID NO: 19326 - RNA, 21 nt, Artificial Sequence
  Guide RNA
gguacacggggauucaacaga

SEQ ID NO: 19327 - RNA, 21 nt, Artificial Sequence
  Guide RNA
gguacauggggauucaacaga

SEQ ID NO: 19328 - RNA, 21 nt, Artificial Sequence
  Guide RNA
guacacggggauucaacagau

SEQ ID NO: 19329 - RNA, 21 nt, Artificial Sequence
  Guide RNA
guacauggggauucaacagau

SEQ ID NO: 19330 - RNA, 21 nt, Artificial Sequence
  Guide RNA
gugauagguacacggggauuc

SEQ ID NO: 19331 - RNA, 21 nt, Artificial Sequence
  Guide RNA
gugauagguacauggggauuc

SEQ ID NO: 19332 - RNA, 21 nt, Artificial Sequence
  Guide RNA
guugaaacugugauagguaca

SEQ ID NO: 19333 - RNA, 21 nt, Artificial Sequence
  Guide RNA
guugaauccccauguaccuau

SEQ ID NO: 19334 - RNA, 21 nt, Artificial Sequence
  Guide RNA
guugaauccccguguaccuau

SEQ ID NO: 19335 - RNA, 21 nt, Artificial Sequence
  Guide RNA
guugaaucuguugaaucccca

SEQ ID NO: 19336 - RNA, 21 nt, Artificial Sequence
  Guide RNA
guugaaucuguugaauccccg

SEQ ID NO: 19337 - RNA, 21 nt, Artificial Sequence
  Guide RNA
uacacggggauucaacagauu

SEQ ID NO: 19338 - RNA, 21 nt, Artificial Sequence
  Guide RNA
uacauggggauucaacagauu

SEQ ID NO: 19339 - RNA, 21 nt, Artificial Sequence
  Guide RNA
uagguacacggggauucaaca

SEQ ID NO: 19340 - RNA, 21 nt, Artificial Sequence
  Guide RNA
uagguacauggggauucaaca

SEQ ID NO: 19341 - RNA, 21 nt, Artificial Sequence
  Guide RNA
uccccauguaccuaucacagu

SEQ ID NO: 19342 - RNA, 21 nt, Artificial Sequence
  Guide RNA
uccccguguaccuaucacagu

SEQ ID NO: 19343 - RNA, 21 nt, Artificial Sequence
  Guide RNA
ucuguugaauccccauguacc

SEQ ID NO: 19344 - RNA, 21 nt, Artificial Sequence
  Guide RNA
ucuguugaauccccguguacc

SEQ ID NO: 19345 - RNA, 21 nt, Artificial Sequence
  Guide RNA
ugaaacugugauagguacacg

SEQ ID NO: 19346 - RNA, 21 nt, Artificial Sequence
  Guide RNA
ugaaacugugauagguacaug

SEQ ID NO: 19347 - RNA, 21 nt, Artificial Sequence
  Guide RNA
ugaauccccauguaccuauca

SEQ ID NO: 19348 - RNA, 21 nt, Artificial Sequence
  Guide RNA
ugaauccccguguaccuauca

SEQ ID NO: 19349 - RNA, 21 nt, Artificial Sequence
  Guide RNA
ugaaucuguugaauccccaug

SEQ ID NO: 19350 - RNA, 21 nt, Artificial Sequence
  Guide RNA
ugaaucuguugaauccccgug

SEQ ID NO: 19351 - RNA, 21 nt, Artificial Sequence
  Guide RNA
ugauagguacacggggauuca

SEQ ID NO: 19352 - RNA, 21 nt, Artificial Sequence
  Guide RNA
ugauagguacauggggauuca

SEQ ID NO: 19353 - RNA, 21 nt, Artificial Sequence
  Guide RNA
ugugauagguacacggggauu

SEQ ID NO: 19354 - RNA, 21 nt, Artificial Sequence
  Guide RNA
ugugauagguacauggggauu

SEQ ID NO: 19355 - RNA, 21 nt, Artificial Sequence
  Guide RNA
uguugaaacugugauagguac

SEQ ID NO: 19356 - RNA, 21 nt, Artificial Sequence
  Guide RNA
uguugaauccccauguaccua

SEQ ID NO: 19357 - RNA, 21 nt, Artificial Sequence
  Guide RNA
uguugaauccccguguaccua

SEQ ID NO: 19358 - RNA, 21 nt, Artificial Sequence
  Guide RNA
uguugaaucuguugaaucccc

SEQ ID NO: 19359 - RNA, 21 nt, Artificial Sequence
  Guide RNA
uugaaacugugauagguacac

SEQ ID NO: 19360 - RNA, 21 nt, Artificial Sequence
  Guide RNA
uugaaacugugauagguacau

SEQ ID NO: 19361 - RNA, 21 nt, Artificial Sequence
  Guide RNA
uugaauccccauguaccuauc

SEQ ID NO: 19362 - RNA, 21 nt, Artificial Sequence
  Guide RNA
uugaauccccguguaccuauc

SEQ ID NO: 19363 - RNA, 21 nt, Artificial Sequence
  Guide RNA
uugaaucuguugaauccccau

SEQ ID NO: 19364 - RNA, 21 nt, Artificial Sequence
  Guide RNA
uugaaucuguugaauccccgu

SEQ ID NO: 19365 - RNA, 21 nt, Artificial Sequence
  Guide RNA
uuguugaaacugugauaggua

SEQ ID NO: 19366 - RNA, 21 nt, Artificial Sequence
  Guide RNA
uuguugaaucuguugaauccc

SEQ ID NO: 19367 - RNA, 22 nt, Artificial Sequence
  Guide RNA
aaacugugauagguacacgggg

SEQ ID NO: 19368 - RNA, 22 nt, Artificial Sequence
  Guide RNA
aaacugugauagguacaugggg

SEQ ID NO: 19369 - RNA, 22 nt, Artificial Sequence
  Guide RNA
aacugugauagguacacgggga

SEQ ID NO: 19370 - RNA, 22 nt, Artificial Sequence
  Guide RNA
aacugugauagguacaugggga

SEQ ID NO: 19371 - RNA, 22 nt, Artificial Sequence
  Guide RNA
aacuuguugaaucuguugaauc

SEQ ID NO: 19372 - RNA, 22 nt, Artificial Sequence
  Guide RNA
aauccccauguaccuaucacag

SEQ ID NO: 19373 - RNA, 22 nt, Artificial Sequence
  Guide RNA
aauccccguguaccuaucacag

SEQ ID NO: 19374 - RNA, 22 nt, Artificial Sequence
  Guide RNA
aaucuguugaauccccauguac

SEQ ID NO: 19375 - RNA, 22 nt, Artificial Sequence
  Guide RNA
aaucuguugaauccccguguac

SEQ ID NO: 19376 - RNA, 22 nt, Artificial Sequence
  Guide RNA
aauuguugaaacugugauaggu

SEQ ID NO: 19377 - RNA, 22 nt, Artificial Sequence
  Guide RNA
acacggggauucaacagauuca

SEQ ID NO: 19378 - RNA, 22 nt, Artificial Sequence
  Guide RNA
acauggggauucaacagauuca

SEQ ID NO: 19379 - RNA, 22 nt, Artificial Sequence
  Guide RNA
acggggauucaacagauucaac

SEQ ID NO: 19380 - RNA, 22 nt, Artificial Sequence
  Guide RNA
acugugauagguacacggggau

SEQ ID NO: 19381 - RNA, 22 nt, Artificial Sequence
  Guide RNA
acugugauagguacauggggau

SEQ ID NO: 19382 - RNA, 22 nt, Artificial Sequence
  Guide RNA
acuuguugaaucuguugaaucc

SEQ ID NO: 19383 - RNA, 22 nt, Artificial Sequence
  Guide RNA
agguacacggggauucaacaga

SEQ ID NO: 19384 - RNA, 22 nt, Artificial Sequence
  Guide RNA
agguacauggggauucaacaga

SEQ ID NO: 19385 - RNA, 22 nt, Artificial Sequence
  Guide RNA
auagguacacggggauucaaca

SEQ ID NO: 19386 - RNA, 22 nt, Artificial Sequence
  Guide RNA
auagguacauggggauucaaca

SEQ ID NO: 19387 - RNA, 22 nt, Artificial Sequence
  Guide RNA
auccccauguaccuaucacagu

SEQ ID NO: 19388 - RNA, 22 nt, Artificial Sequence
  Guide RNA
auccccguguaccuaucacagu

SEQ ID NO: 19389 - RNA, 22 nt, Artificial Sequence
  Guide RNA
aucuguugaauccccauguacc

SEQ ID NO: 19390 - RNA, 22 nt, Artificial Sequence
  Guide RNA
aucuguugaauccccguguacc

SEQ ID NO: 19391 - RNA, 22 nt, Artificial Sequence
  Guide RNA
auggggauucaacagauucaac

SEQ ID NO: 19392 - RNA, 22 nt, Artificial Sequence
  Guide RNA
auuguugaaacugugauaggua

SEQ ID NO: 19393 - RNA, 22 nt, Artificial Sequence
  Guide RNA
cacggggauucaacagauucaa

SEQ ID NO: 19394 - RNA, 22 nt, Artificial Sequence
  Guide RNA
cauggggauucaacagauucaa

SEQ ID NO: 19395 - RNA, 22 nt, Artificial Sequence
  Guide RNA
cauguaccuaucacaguuucaa

SEQ ID NO: 19396 - RNA, 22 nt, Artificial Sequence
  Guide RNA
ccauguaccuaucacaguuuca

SEQ ID NO: 19397 - RNA, 22 nt, Artificial Sequence
  Guide RNA
cccauguaccuaucacaguuuc

SEQ ID NO: 19398 - RNA, 22 nt, Artificial Sequence
  Guide RNA
ccccauguaccuaucacaguuu

SEQ ID NO: 19399 - RNA, 22 nt, Artificial Sequence
  Guide RNA
ccccguguaccuaucacaguuu

SEQ ID NO: 19400 - RNA, 22 nt, Artificial Sequence
  Guide RNA
cccguguaccuaucacaguuuc

SEQ ID NO: 19401 - RNA, 22 nt, Artificial Sequence
  Guide RNA
ccguguaccuaucacaguuuca

SEQ ID NO: 19402 - RNA, 22 nt, Artificial Sequence
  Guide RNA
cguguaccuaucacaguuucaa

SEQ ID NO: 19403 - RNA, 22 nt, Artificial Sequence
  Guide RNA
cugugauagguacacggggauu

SEQ ID NO: 19404 - RNA, 22 nt, Artificial Sequence
  Guide RNA
cugugauagguacauggggauu

SEQ ID NO: 19405 - RNA, 22 nt, Artificial Sequence
  Guide RNA
cuguugaauccccauguaccua

SEQ ID NO: 19406 - RNA, 22 nt, Artificial Sequence
  Guide RNA
cuguugaauccccguguaccua

SEQ ID NO: 19407 - RNA, 22 nt, Artificial Sequence
  Guide RNA
cuuguugaaucuguugaauccc

SEQ ID NO: 19408 - RNA, 22 nt, Artificial Sequence
  Guide RNA
gaaacugugauagguacacggg

SEQ ID NO: 19409 - RNA, 22 nt, Artificial Sequence
  Guide RNA
gaaacugugauagguacauggg

SEQ ID NO: 19410 - RNA, 22 nt, Artificial Sequence
  Guide RNA
gaauccccauguaccuaucaca

SEQ ID NO: 19411 - RNA, 22 nt, Artificial Sequence
  Guide RNA
gaauccccguguaccuaucaca

SEQ ID NO: 19412 - RNA, 22 nt, Artificial Sequence
  Guide RNA
gaaucuguugaauccccaugua

SEQ ID NO: 19413 - RNA, 22 nt, Artificial Sequence
  Guide RNA
gaaucuguugaauccccgugua

SEQ ID NO: 19414 - RNA, 22 nt, Artificial Sequence
  Guide RNA
gauagguacacggggauucaac

SEQ ID NO: 19415 - RNA, 22 nt, Artificial Sequence
  Guide RNA
gauagguacauggggauucaac

SEQ ID NO: 19416 - RNA, 22 nt, Artificial Sequence
  Guide RNA
gguacacggggauucaacagau

SEQ ID NO: 19417 - RNA, 22 nt, Artificial Sequence
  Guide RNA
gguacauggggauucaacagau

SEQ ID NO: 19418 - RNA, 22 nt, Artificial Sequence
  Guide RNA
guacacggggauucaacagauu

SEQ ID NO: 19419 - RNA, 22 nt, Artificial Sequence
  Guide RNA
guacauggggauucaacagauu

SEQ ID NO: 19420 - RNA, 22 nt, Artificial Sequence
  Guide RNA
gugauagguacacggggauuca

SEQ ID NO: 19421 - RNA, 22 nt, Artificial Sequence
  Guide RNA
gugauagguacauggggauuca

SEQ ID NO: 19422 - RNA, 22 nt, Artificial Sequence
  Guide RNA
guugaaacugugauagguacac

SEQ ID NO: 19423 - RNA, 22 nt, Artificial Sequence
  Guide RNA
guugaaacugugauagguacau

SEQ ID NO: 19424 - RNA, 22 nt, Artificial Sequence
  Guide RNA
guugaauccccauguaccuauc

SEQ ID NO: 19425 - RNA, 22 nt, Artificial Sequence
  Guide RNA
guugaauccccguguaccuauc

SEQ ID NO: 19426 - RNA, 22 nt, Artificial Sequence
  Guide RNA
guugaaucuguugaauccccau

SEQ ID NO: 19427 - RNA, 22 nt, Artificial Sequence
  Guide RNA
guugaaucuguugaauccccgu

SEQ ID NO: 19428 - RNA, 22 nt, Artificial Sequence
  Guide RNA
uacacggggauucaacagauuc

SEQ ID NO: 19429 - RNA, 22 nt, Artificial Sequence
  Guide RNA
uacauggggauucaacagauuc

SEQ ID NO: 19430 - RNA, 22 nt, Artificial Sequence
  Guide RNA
uagguacacggggauucaacag

SEQ ID NO: 19431 - RNA, 22 nt, Artificial Sequence
  Guide RNA
uagguacauggggauucaacag

SEQ ID NO: 19432 - RNA, 22 nt, Artificial Sequence
  Guide RNA
uccccauguaccuaucacaguu

SEQ ID NO: 19433 - RNA, 22 nt, Artificial Sequence
  Guide RNA
uccccguguaccuaucacaguu

SEQ ID NO: 19434 - RNA, 22 nt, Artificial Sequence
  Guide RNA
ucuguugaauccccauguaccu

SEQ ID NO: 19435 - RNA, 22 nt, Artificial Sequence
  Guide RNA
ucuguugaauccccguguaccu

SEQ ID NO: 19436 - RNA, 22 nt, Artificial Sequence
  Guide RNA
ugaaacugugauagguacacgg

SEQ ID NO: 19437 - RNA, 22 nt, Artificial Sequence
  Guide RNA
ugaaacugugauagguacaugg

SEQ ID NO: 19438 - RNA, 22 nt, Artificial Sequence
  Guide RNA
ugaauccccauguaccuaucac

SEQ ID NO: 19439 - RNA, 22 nt, Artificial Sequence
  Guide RNA
ugaauccccguguaccuaucac

SEQ ID NO: 19440 - RNA, 22 nt, Artificial Sequence
  Guide RNA
ugaaucuguugaauccccaugu

SEQ ID NO: 19441 - RNA, 22 nt, Artificial Sequence
  Guide RNA
ugaaucuguugaauccccgugu

SEQ ID NO: 19442 - RNA, 22 nt, Artificial Sequence
  Guide RNA
ugauagguacacggggauucaa

SEQ ID NO: 19443 - RNA, 22 nt, Artificial Sequence
  Guide RNA
ugauagguacauggggauucaa

SEQ ID NO: 19444 - RNA, 22 nt, Artificial Sequence
  Guide RNA
ugugauagguacacggggauuc

SEQ ID NO: 19445 - RNA, 22 nt, Artificial Sequence
  Guide RNA
ugugauagguacauggggauuc

SEQ ID NO: 19446 - RNA, 22 nt, Artificial Sequence
  Guide RNA
uguugaaacugugauagguaca

SEQ ID NO: 19447 - RNA, 22 nt, Artificial Sequence
  Guide RNA
uguugaauccccauguaccuau

SEQ ID NO: 19448 - RNA, 22 nt, Artificial Sequence
  Guide RNA
uguugaauccccguguaccuau

SEQ ID NO: 19449 - RNA, 22 nt, Artificial Sequence
  Guide RNA
uguugaaucuguugaaucccca

SEQ ID NO: 19450 - RNA, 22 nt, Artificial Sequence
  Guide RNA
uguugaaucuguugaauccccg

SEQ ID NO: 19451 - RNA, 22 nt, Artificial Sequence
  Guide RNA
uugaaacugugauagguacacg

SEQ ID NO: 19452 - RNA, 22 nt, Artificial Sequence
  Guide RNA
uugaaacugugauagguacaug

SEQ ID NO: 19453 - RNA, 22 nt, Artificial Sequence
  Guide RNA
uugaauccccauguaccuauca

SEQ ID NO: 19454 - RNA, 22 nt, Artificial Sequence
  Guide RNA
uugaauccccguguaccuauca

SEQ ID NO: 19455 - RNA, 22 nt, Artificial Sequence
  Guide RNA
uugaaucuguugaauccccaug

SEQ ID NO: 19456 - RNA, 22 nt, Artificial Sequence
  Guide RNA
uugaaucuguugaauccccgug

SEQ ID NO: 19457 - RNA, 22 nt, Artificial Sequence
  Guide RNA
uuguugaaacugugauagguac

SEQ ID NO: 19458 - RNA, 22 nt, Artificial Sequence
  Guide RNA
uuguugaaucuguugaaucccc

SEQ ID NO: 19459 - RNA, 20 nt, Artificial Sequence
  Guide RNA
aaagguguucacggacucag

SEQ ID NO: 19460 - RNA, 20 nt, Artificial Sequence
  Guide RNA
aaagguguucauggacucag

SEQ ID NO: 19461 - RNA, 20 nt, Artificial Sequence
  Guide RNA
aaggcuuugcaaagguguuc

SEQ ID NO: 19462 - RNA, 20 nt, Artificial Sequence
  Guide RNA
aagguguucacggacucagg

SEQ ID NO: 19463 - RNA, 20 nt, Artificial Sequence
  Guide RNA
aagguguucauggacucagg

SEQ ID NO: 19464 - RNA, 20 nt, Artificial Sequence
  Guide RNA
acaccugaguccaugaacac

SEQ ID NO: 19465 - RNA, 20 nt, Artificial Sequence
  Guide RNA
acaccugaguccgugaacac

SEQ ID NO: 19466 - RNA, 20 nt, Artificial Sequence
  Guide RNA
accugaguccaugaacaccu

SEQ ID NO: 19467 - RNA, 20 nt, Artificial Sequence
  Guide RNA
accugaguccgugaacaccu

SEQ ID NO: 19468 - RNA, 20 nt, Artificial Sequence
  Guide RNA
acggacucagguguccucug

SEQ ID NO: 19469 - RNA, 20 nt, Artificial Sequence
  Guide RNA
agaaggcuuugcaaaggugu

SEQ ID NO: 19470 - RNA, 20 nt, Artificial Sequence
  Guide RNA
agaggacaccugaguccaug

SEQ ID NO: 19471 - RNA, 20 nt, Artificial Sequence
  Guide RNA
agaggacaccugaguccgug

SEQ ID NO: 19472 - RNA, 20 nt, Artificial Sequence
  Guide RNA
aggacaccugaguccaugaa

SEQ ID NO: 19473 - RNA, 20 nt, Artificial Sequence
  Guide RNA
aggacaccugaguccgugaa

SEQ ID NO: 19474 - RNA, 20 nt, Artificial Sequence
  Guide RNA
aggcuuugcaaagguguuca

SEQ ID NO: 19475 - RNA, 20 nt, Artificial Sequence
  Guide RNA
agguguucacggacucaggu

SEQ ID NO: 19476 - RNA, 20 nt, Artificial Sequence
  Guide RNA
agguguucauggacucaggu

SEQ ID NO: 19477 - RNA, 20 nt, Artificial Sequence
  Guide RNA
aguccaugaacaccuuugca

SEQ ID NO: 19478 - RNA, 20 nt, Artificial Sequence
  Guide RNA
aguccgugaacaccuuugca

SEQ ID NO: 19479 - RNA, 20 nt, Artificial Sequence
  Guide RNA
auggacucagguguccucug

SEQ ID NO: 19480 - RNA, 20 nt, Artificial Sequence
  Guide RNA
caaagguguucacggacuca

SEQ ID NO: 19481 - RNA, 20 nt, Artificial Sequence
  Guide RNA
caaagguguucauggacuca

SEQ ID NO: 19482 - RNA, 20 nt, Artificial Sequence
  Guide RNA
caccugaguccaugaacacc

SEQ ID NO: 19483 - RNA, 20 nt, Artificial Sequence
  Guide RNA
caccugaguccgugaacacc

SEQ ID NO: 19484 - RNA, 20 nt, Artificial Sequence
  Guide RNA
cacggacucagguguccucu

SEQ ID NO: 19485 - RNA, 20 nt, Artificial Sequence
  Guide RNA
cagaggacaccugaguccau

SEQ ID NO: 19486 - RNA, 20 nt, Artificial Sequence
  Guide RNA
cagaggacaccugaguccgu

SEQ ID NO: 19487 - RNA, 20 nt, Artificial Sequence
  Guide RNA
caugaacaccuuugcaaagc

SEQ ID NO: 19488 - RNA, 20 nt, Artificial Sequence
  Guide RNA
cauggacucagguguccucu

SEQ ID NO: 19489 - RNA, 20 nt, Artificial Sequence
  Guide RNA
ccaugaacaccuuugcaaag

SEQ ID NO: 19490 - RNA, 20 nt, Artificial Sequence
  Guide RNA
ccgugaacaccuuugcaaag

SEQ ID NO: 19491 - RNA, 20 nt, Artificial Sequence
  Guide RNA
ccucucagaggacaccugag

SEQ ID NO: 19492 - RNA, 20 nt, Artificial Sequence
  Guide RNA
ccugaguccaugaacaccuu

SEQ ID NO: 19493 - RNA, 20 nt, Artificial Sequence
  Guide RNA
ccugaguccgugaacaccuu

SEQ ID NO: 19494 - RNA, 20 nt, Artificial Sequence
  Guide RNA
cgugaacaccuuugcaaagc

SEQ ID NO: 19495 - RNA, 20 nt, Artificial Sequence
  Guide RNA
cucagaggacaccugagucc

SEQ ID NO: 19496 - RNA, 20 nt, Artificial Sequence
  Guide RNA
cucucagaggacaccugagu

SEQ ID NO: 19497 - RNA, 20 nt, Artificial Sequence
  Guide RNA
cugaguccaugaacaccuuu

SEQ ID NO: 19498 - RNA, 20 nt, Artificial Sequence
  Guide RNA
cugaguccgugaacaccuuu

SEQ ID NO: 19499 - RNA, 20 nt, Artificial Sequence
  Guide RNA
cuuugcaaagguguucacgg

SEQ ID NO: 19500 - RNA, 20 nt, Artificial Sequence
  Guide RNA
cuuugcaaagguguucaugg

SEQ ID NO: 19501 - RNA, 20 nt, Artificial Sequence
  Guide RNA
gaaggcuuugcaaagguguu

SEQ ID NO: 19502 - RNA, 20 nt, Artificial Sequence
  Guide RNA
gacaccugaguccaugaaca

SEQ ID NO: 19503 - RNA, 20 nt, Artificial Sequence
  Guide RNA
gacaccugaguccgugaaca

SEQ ID NO: 19504 - RNA, 20 nt, Artificial Sequence
  Guide RNA
gaggacaccugaguccauga

SEQ ID NO: 19505 - RNA, 20 nt, Artificial Sequence
  Guide RNA
gaggacaccugaguccguga

SEQ ID NO: 19506 - RNA, 20 nt, Artificial Sequence
  Guide RNA
gaguccaugaacaccuuugc

SEQ ID NO: 19507 - RNA, 20 nt, Artificial Sequence
  Guide RNA
gaguccgugaacaccuuugc

SEQ ID NO: 19508 - RNA, 20 nt, Artificial Sequence
  Guide RNA
gcaaagguguucacggacuc

SEQ ID NO: 19509 - RNA, 20 nt, Artificial Sequence
  Guide RNA
gcaaagguguucauggacuc

SEQ ID NO: 19510 - RNA, 20 nt, Artificial Sequence
  Guide RNA
gcuuugcaaagguguucacg

SEQ ID NO: 19511 - RNA, 20 nt, Artificial Sequence
  Guide RNA
gcuuugcaaagguguucaug

SEQ ID NO: 19512 - RNA, 20 nt, Artificial Sequence
  Guide RNA
ggacaccugaguccaugaac

SEQ ID NO: 19513 - RNA, 20 nt, Artificial Sequence
  Guide RNA
ggacaccugaguccgugaac

SEQ ID NO: 19514 - RNA, 20 nt, Artificial Sequence
  Guide RNA
ggcuuugcaaagguguucac

SEQ ID NO: 19515 - RNA, 20 nt, Artificial Sequence
  Guide RNA
ggcuuugcaaagguguucau

SEQ ID NO: 19516 - RNA, 20 nt, Artificial Sequence
  Guide RNA
gguguucacggacucaggug

SEQ ID NO: 19517 - RNA, 20 nt, Artificial Sequence
  Guide RNA
gguguucauggacucaggug

SEQ ID NO: 19518 - RNA, 20 nt, Artificial Sequence
  Guide RNA
guccaugaacaccuuugcaa

SEQ ID NO: 19519 - RNA, 20 nt, Artificial Sequence
  Guide RNA
guccgugaacaccuuugcaa

SEQ ID NO: 19520 - RNA, 20 nt, Artificial Sequence
  Guide RNA
guguucacggacucaggugu

SEQ ID NO: 19521 - RNA, 20 nt, Artificial Sequence
  Guide RNA
guguucauggacucaggugu

SEQ ID NO: 19522 - RNA, 20 nt, Artificial Sequence
  Guide RNA
guucacggacucaggugucc

SEQ ID NO: 19523 - RNA, 20 nt, Artificial Sequence
  Guide RNA
guucauggacucaggugucc

SEQ ID NO: 19524 - RNA, 20 nt, Artificial Sequence
  Guide RNA
ucacggacucagguguccuc

SEQ ID NO: 19525 - RNA, 20 nt, Artificial Sequence
  Guide RNA
ucagaggacaccugagucca

SEQ ID NO: 19526 - RNA, 20 nt, Artificial Sequence
  Guide RNA
ucagaggacaccugaguccg

SEQ ID NO: 19527 - RNA, 20 nt, Artificial Sequence
  Guide RNA
ucauggacucagguguccuc

SEQ ID NO: 19528 - RNA, 20 nt, Artificial Sequence
  Guide RNA
uccaugaacaccuuugcaaa

SEQ ID NO: 19529 - RNA, 20 nt, Artificial Sequence
  Guide RNA
uccgugaacaccuuugcaaa

SEQ ID NO: 19530 - RNA, 20 nt, Artificial Sequence
  Guide RNA
ucucagaggacaccugaguc

SEQ ID NO: 19531 - RNA, 20 nt, Artificial Sequence
  Guide RNA
ugaguccaugaacaccuuug

SEQ ID NO: 19532 - RNA, 20 nt, Artificial Sequence
  Guide RNA
ugaguccgugaacaccuuug

SEQ ID NO: 19533 - RNA, 20 nt, Artificial Sequence
  Guide RNA
ugcaaagguguucacggacu

SEQ ID NO: 19534 - RNA, 20 nt, Artificial Sequence
  Guide RNA
ugcaaagguguucauggacu

SEQ ID NO: 19535 - RNA, 20 nt, Artificial Sequence
  Guide RNA
uguucacggacucagguguc

SEQ ID NO: 19536 - RNA, 20 nt, Artificial Sequence
  Guide RNA
uguucauggacucagguguc

SEQ ID NO: 19537 - RNA, 20 nt, Artificial Sequence
  Guide RNA
uucacggacucagguguccu

SEQ ID NO: 19538 - RNA, 20 nt, Artificial Sequence
  Guide RNA
uucauggacucagguguccu

SEQ ID NO: 19539 - RNA, 20 nt, Artificial Sequence
  Guide RNA
uugcaaagguguucacggac

SEQ ID NO: 19540 - RNA, 20 nt, Artificial Sequence
  Guide RNA
uugcaaagguguucauggac

SEQ ID NO: 19541 - RNA, 20 nt, Artificial Sequence
  Guide RNA
uuugcaaagguguucacgga

SEQ ID NO: 19542 - RNA, 20 nt, Artificial Sequence
  Guide RNA
uuugcaaagguguucaugga

SEQ ID NO: 19543 - RNA, 21 nt, Artificial Sequence
  Guide RNA
aaagguguucacggacucagg

SEQ ID NO: 19544 - RNA, 21 nt, Artificial Sequence
  Guide RNA
aaagguguucauggacucagg

SEQ ID NO: 19545 - RNA, 21 nt, Artificial Sequence
  Guide RNA
aagaaggcuuugcaaaggugu

SEQ ID NO: 19546 - RNA, 21 nt, Artificial Sequence
  Guide RNA
aaggcuuugcaaagguguuca

SEQ ID NO: 19547 - RNA, 21 nt, Artificial Sequence
  Guide RNA
aagguguucacggacucaggu

SEQ ID NO: 19548 - RNA, 21 nt, Artificial Sequence
  Guide RNA
aagguguucauggacucaggu

SEQ ID NO: 19549 - RNA, 21 nt, Artificial Sequence
  Guide RNA
acaccugaguccaugaacacc

SEQ ID NO: 19550 - RNA, 21 nt, Artificial Sequence
  Guide RNA
acaccugaguccgugaacacc

SEQ ID NO: 19551 - RNA, 21 nt, Artificial Sequence
  Guide RNA
accugaguccaugaacaccuu

SEQ ID NO: 19552 - RNA, 21 nt, Artificial Sequence
  Guide RNA
accugaguccgugaacaccuu

SEQ ID NO: 19553 - RNA, 21 nt, Artificial Sequence
  Guide RNA
acggacucagguguccucuga

SEQ ID NO: 19554 - RNA, 21 nt, Artificial Sequence
  Guide RNA
agaaggcuuugcaaagguguu

SEQ ID NO: 19555 - RNA, 21 nt, Artificial Sequence
  Guide RNA
agaggacaccugaguccauga

SEQ ID NO: 19556 - RNA, 21 nt, Artificial Sequence
  Guide RNA
agaggacaccugaguccguga

SEQ ID NO: 19557 - RNA, 21 nt, Artificial Sequence
  Guide RNA
aggacaccugaguccaugaac

SEQ ID NO: 19558 - RNA, 21 nt, Artificial Sequence
  Guide RNA
aggacaccugaguccgugaac

SEQ ID NO: 19559 - RNA, 21 nt, Artificial Sequence
  Guide RNA
aggcuuugcaaagguguucac

SEQ ID NO: 19560 - RNA, 21 nt, Artificial Sequence
  Guide RNA
aggcuuugcaaagguguucau

SEQ ID NO: 19561 - RNA, 21 nt, Artificial Sequence
  Guide RNA
agguguucacggacucaggug

SEQ ID NO: 19562 - RNA, 21 nt, Artificial Sequence
  Guide RNA
agguguucauggacucaggug

SEQ ID NO: 19563 - RNA, 21 nt, Artificial Sequence
  Guide RNA
aguccaugaacaccuuugcaa

SEQ ID NO: 19564 - RNA, 21 nt, Artificial Sequence
  Guide RNA
aguccgugaacaccuuugcaa

SEQ ID NO: 19565 - RNA, 21 nt, Artificial Sequence
  Guide RNA
auggacucagguguccucuga

SEQ ID NO: 19566 - RNA, 21 nt, Artificial Sequence
  Guide RNA
caaagguguucacggacucag

SEQ ID NO: 19567 - RNA, 21 nt, Artificial Sequence
  Guide RNA
caaagguguucauggacucag

SEQ ID NO: 19568 - RNA, 21 nt, Artificial Sequence
  Guide RNA
caccugaguccaugaacaccu

SEQ ID NO: 19569 - RNA, 21 nt, Artificial Sequence
  Guide RNA
caccugaguccgugaacaccu

SEQ ID NO: 19570 - RNA, 21 nt, Artificial Sequence
  Guide RNA
cacggacucagguguccucug

SEQ ID NO: 19571 - RNA, 21 nt, Artificial Sequence
  Guide RNA
cagaggacaccugaguccaug

SEQ ID NO: 19572 - RNA, 21 nt, Artificial Sequence
  Guide RNA
cagaggacaccugaguccgug

SEQ ID NO: 19573 - RNA, 21 nt, Artificial Sequence
  Guide RNA
caugaacaccuuugcaaagcc

SEQ ID NO: 19574 - RNA, 21 nt, Artificial Sequence
  Guide RNA
cauggacucagguguccucug

SEQ ID NO: 19575 - RNA, 21 nt, Artificial Sequence
  Guide RNA
ccaugaacaccuuugcaaagc

SEQ ID NO: 19576 - RNA, 21 nt, Artificial Sequence
  Guide RNA
ccgugaacaccuuugcaaagc

SEQ ID NO: 19577 - RNA, 21 nt, Artificial Sequence
  Guide RNA
ccucucagaggacaccugagu

SEQ ID NO: 19578 - RNA, 21 nt, Artificial Sequence
  Guide RNA
ccugaguccaugaacaccuuu

SEQ ID NO: 19579 - RNA, 21 nt, Artificial Sequence
  Guide RNA
ccugaguccgugaacaccuuu

SEQ ID NO: 19580 - RNA, 21 nt, Artificial Sequence
  Guide RNA
cgugaacaccuuugcaaagcc

SEQ ID NO: 19581 - RNA, 21 nt, Artificial Sequence
  Guide RNA
cucagaggacaccugagucca

SEQ ID NO: 19582 - RNA, 21 nt, Artificial Sequence
  Guide RNA
cucagaggacaccugaguccg

SEQ ID NO: 19583 - RNA, 21 nt, Artificial Sequence
  Guide RNA
cucucagaggacaccugaguc

SEQ ID NO: 19584 - RNA, 21 nt, Artificial Sequence
  Guide RNA
cugaguccaugaacaccuuug

SEQ ID NO: 19585 - RNA, 21 nt, Artificial Sequence
  Guide RNA
cugaguccgugaacaccuuug

SEQ ID NO: 19586 - RNA, 21 nt, Artificial Sequence
  Guide RNA
cuuugcaaagguguucacgga

SEQ ID NO: 19587 - RNA, 21 nt, Artificial Sequence
  Guide RNA
cuuugcaaagguguucaugga

SEQ ID NO: 19588 - RNA, 21 nt, Artificial Sequence
  Guide RNA
gaaggcuuugcaaagguguuc

SEQ ID NO: 19589 - RNA, 21 nt, Artificial Sequence
  Guide RNA
gacaccugaguccaugaacac

SEQ ID NO: 19590 - RNA, 21 nt, Artificial Sequence
  Guide RNA
gacaccugaguccgugaacac

SEQ ID NO: 19591 - RNA, 21 nt, Artificial Sequence
  Guide RNA
gaggacaccugaguccaugaa

SEQ ID NO: 19592 - RNA, 21 nt, Artificial Sequence
  Guide RNA
gaggacaccugaguccgugaa

SEQ ID NO: 19593 - RNA, 21 nt, Artificial Sequence
  Guide RNA
gaguccaugaacaccuuugca

SEQ ID NO: 19594 - RNA, 21 nt, Artificial Sequence
  Guide RNA
gaguccgugaacaccuuugca

SEQ ID NO: 19595 - RNA, 21 nt, Artificial Sequence
  Guide RNA
gcaaagguguucacggacuca

SEQ ID NO: 19596 - RNA, 21 nt, Artificial Sequence
  Guide RNA
gcaaagguguucauggacuca

SEQ ID NO: 19597 - RNA, 21 nt, Artificial Sequence
  Guide RNA
gccucucagaggacaccugag

SEQ ID NO: 19598 - RNA, 21 nt, Artificial Sequence
  Guide RNA
gcuuugcaaagguguucacgg

SEQ ID NO: 19599 - RNA, 21 nt, Artificial Sequence
  Guide RNA
gcuuugcaaagguguucaugg

SEQ ID NO: 19600 - RNA, 21 nt, Artificial Sequence
  Guide RNA
ggacaccugaguccaugaaca

SEQ ID NO: 19601 - RNA, 21 nt, Artificial Sequence
  Guide RNA
ggacaccugaguccgugaaca

SEQ ID NO: 19602 - RNA, 21 nt, Artificial Sequence
  Guide RNA
ggcuuugcaaagguguucacg

SEQ ID NO: 19603 - RNA, 21 nt, Artificial Sequence
  Guide RNA
ggcuuugcaaagguguucaug

SEQ ID NO: 19604 - RNA, 21 nt, Artificial Sequence
  Guide RNA
gguguucacggacucaggugu

SEQ ID NO: 19605 - RNA, 21 nt, Artificial Sequence
  Guide RNA
gguguucauggacucaggugu

SEQ ID NO: 19606 - RNA, 21 nt, Artificial Sequence
  Guide RNA
guccaugaacaccuuugcaaa

SEQ ID NO: 19607 - RNA, 21 nt, Artificial Sequence
  Guide RNA
guccgugaacaccuuugcaaa

SEQ ID NO: 19608 - RNA, 21 nt, Artificial Sequence
  Guide RNA
guguucacggacucagguguc

SEQ ID NO: 19609 - RNA, 21 nt, Artificial Sequence
  Guide RNA
guguucauggacucagguguc

SEQ ID NO: 19610 - RNA, 21 nt, Artificial Sequence
  Guide RNA
guucacggacucagguguccu

SEQ ID NO: 19611 - RNA, 21 nt, Artificial Sequence
  Guide RNA
guucauggacucagguguccu

SEQ ID NO: 19612 - RNA, 21 nt, Artificial Sequence
  Guide RNA
ucacggacucagguguccucu

SEQ ID NO: 19613 - RNA, 21 nt, Artificial Sequence
  Guide RNA
ucagaggacaccugaguccau

SEQ ID NO: 19614 - RNA, 21 nt, Artificial Sequence
  Guide RNA
ucagaggacaccugaguccgu

SEQ ID NO: 19615 - RNA, 21 nt, Artificial Sequence
  Guide RNA
ucauggacucagguguccucu

SEQ ID NO: 19616 - RNA, 21 nt, Artificial Sequence
  Guide RNA
uccaugaacaccuuugcaaag

SEQ ID NO: 19617 - RNA, 21 nt, Artificial Sequence
  Guide RNA
uccgugaacaccuuugcaaag

SEQ ID NO: 19618 - RNA, 21 nt, Artificial Sequence
  Guide RNA
ucucagaggacaccugagucc

SEQ ID NO: 19619 - RNA, 21 nt, Artificial Sequence
  Guide RNA
ugaguccaugaacaccuuugc

SEQ ID NO: 19620 - RNA, 21 nt, Artificial Sequence
  Guide RNA
ugaguccgugaacaccuuugc

SEQ ID NO: 19621 - RNA, 21 nt, Artificial Sequence
  Guide RNA
ugcaaagguguucacggacuc

SEQ ID NO: 19622 - RNA, 21 nt, Artificial Sequence
  Guide RNA
ugcaaagguguucauggacuc

SEQ ID NO: 19623 - RNA, 21 nt, Artificial Sequence
  Guide RNA
uguucacggacucaggugucc

SEQ ID NO: 19624 - RNA, 21 nt, Artificial Sequence
  Guide RNA
uguucauggacucaggugucc

SEQ ID NO: 19625 - RNA, 21 nt, Artificial Sequence
  Guide RNA
uucacggacucagguguccuc

SEQ ID NO: 19626 - RNA, 21 nt, Artificial Sequence
  Guide RNA
uucauggacucagguguccuc

SEQ ID NO: 19627 - RNA, 21 nt, Artificial Sequence
  Guide RNA
uugcaaagguguucacggacu

SEQ ID NO: 19628 - RNA, 21 nt, Artificial Sequence
  Guide RNA
uugcaaagguguucauggacu

SEQ ID NO: 19629 - RNA, 21 nt, Artificial Sequence
  Guide RNA
uuugcaaagguguucacggac

SEQ ID NO: 19630 - RNA, 21 nt, Artificial Sequence
  Guide RNA
uuugcaaagguguucauggac

SEQ ID NO: 19631 - RNA, 22 nt, Artificial Sequence
  Guide RNA
aaagguguucacggacucaggu

SEQ ID NO: 19632 - RNA, 22 nt, Artificial Sequence
  Guide RNA
aaagguguucauggacucaggu

SEQ ID NO: 19633 - RNA, 22 nt, Artificial Sequence
  Guide RNA
aagaaggcuuugcaaagguguu

SEQ ID NO: 19634 - RNA, 22 nt, Artificial Sequence
  Guide RNA
aaggcuuugcaaagguguucac

SEQ ID NO: 19635 - RNA, 22 nt, Artificial Sequence
  Guide RNA
aaggcuuugcaaagguguucau

SEQ ID NO: 19636 - RNA, 22 nt, Artificial Sequence
  Guide RNA
aagguguucacggacucaggug

SEQ ID NO: 19637 - RNA, 22 nt, Artificial Sequence
  Guide RNA
aagguguucauggacucaggug

SEQ ID NO: 19638 - RNA, 22 nt, Artificial Sequence
  Guide RNA
acaccugaguccaugaacaccu

SEQ ID NO: 19639 - RNA, 22 nt, Artificial Sequence
  Guide RNA
acaccugaguccgugaacaccu

SEQ ID NO: 19640 - RNA, 22 nt, Artificial Sequence
  Guide RNA
accugaguccaugaacaccuuu

SEQ ID NO: 19641 - RNA, 22 nt, Artificial Sequence
  Guide RNA
accugaguccgugaacaccuuu

SEQ ID NO: 19642 - RNA, 22 nt, Artificial Sequence
  Guide RNA
acggacucagguguccucugag

SEQ ID NO: 19643 - RNA, 22 nt, Artificial Sequence
  Guide RNA
agaaggcuuugcaaagguguuc

SEQ ID NO: 19644 - RNA, 22 nt, Artificial Sequence
  Guide RNA
agaggacaccugaguccaugaa

SEQ ID NO: 19645 - RNA, 22 nt, Artificial Sequence
  Guide RNA
agaggacaccugaguccgugaa

SEQ ID NO: 19646 - RNA, 22 nt, Artificial Sequence
  Guide RNA
agccucucagaggacaccugag

SEQ ID NO: 19647 - RNA, 22 nt, Artificial Sequence
  Guide RNA
aggacaccugaguccaugaaca

SEQ ID NO: 19648 - RNA, 22 nt, Artificial Sequence
  Guide RNA
aggacaccugaguccgugaaca

SEQ ID NO: 19649 - RNA, 22 nt, Artificial Sequence
  Guide RNA
aggcuuugcaaagguguucacg

SEQ ID NO: 19650 - RNA, 22 nt, Artificial Sequence
  Guide RNA
aggcuuugcaaagguguucaug

SEQ ID NO: 19651 - RNA, 22 nt, Artificial Sequence
  Guide RNA
agguguucacggacucaggugu

SEQ ID NO: 19652 - RNA, 22 nt, Artificial Sequence
  Guide RNA
agguguucauggacucaggugu

SEQ ID NO: 19653 - RNA, 22 nt, Artificial Sequence
  Guide RNA
aguccaugaacaccuuugcaaa

SEQ ID NO: 19654 - RNA, 22 nt, Artificial Sequence
  Guide RNA
aguccgugaacaccuuugcaaa

SEQ ID NO: 19655 - RNA, 22 nt, Artificial Sequence
  Guide RNA
auggacucagguguccucugag

SEQ ID NO: 19656 - RNA, 22 nt, Artificial Sequence
  Guide RNA
caaagguguucacggacucagg

SEQ ID NO: 19657 - RNA, 22 nt, Artificial Sequence
  Guide RNA
caaagguguucauggacucagg

SEQ ID NO: 19658 - RNA, 22 nt, Artificial Sequence
  Guide RNA
caagaaggcuuugcaaaggugu

SEQ ID NO: 19659 - RNA, 22 nt, Artificial Sequence
  Guide RNA
caccugaguccaugaacaccuu

SEQ ID NO: 19660 - RNA, 22 nt, Artificial Sequence
  Guide RNA
caccugaguccgugaacaccuu

SEQ ID NO: 19661 - RNA, 22 nt, Artificial Sequence
  Guide RNA
cacggacucagguguccucuga

SEQ ID NO: 19662 - RNA, 22 nt, Artificial Sequence
  Guide RNA
cagaggacaccugaguccauga

SEQ ID NO: 19663 - RNA, 22 nt, Artificial Sequence
  Guide RNA
cagaggacaccugaguccguga

SEQ ID NO: 19664 - RNA, 22 nt, Artificial Sequence
  Guide RNA
caugaacaccuuugcaaagccu

SEQ ID NO: 19665 - RNA, 22 nt, Artificial Sequence
  Guide RNA
cauggacucagguguccucuga

SEQ ID NO: 19666 - RNA, 22 nt, Artificial Sequence
  Guide RNA
ccaugaacaccuuugcaaagcc

SEQ ID NO: 19667 - RNA, 22 nt, Artificial Sequence
  Guide RNA
ccgugaacaccuuugcaaagcc

SEQ ID NO: 19668 - RNA, 22 nt, Artificial Sequence
  Guide RNA
ccucucagaggacaccugaguc

SEQ ID NO: 19669 - RNA, 22 nt, Artificial Sequence
  Guide RNA
ccugaguccaugaacaccuuug

SEQ ID NO: 19670 - RNA, 22 nt, Artificial Sequence
  Guide RNA
ccugaguccgugaacaccuuug

SEQ ID NO: 19671 - RNA, 22 nt, Artificial Sequence
  Guide RNA
cgugaacaccuuugcaaagccu

SEQ ID NO: 19672 - RNA, 22 nt, Artificial Sequence
  Guide RNA
cucagaggacaccugaguccau

SEQ ID NO: 19673 - RNA, 22 nt, Artificial Sequence
  Guide RNA
cucagaggacaccugaguccgu

SEQ ID NO: 19674 - RNA, 22 nt, Artificial Sequence
  Guide RNA
cucucagaggacaccugagucc

SEQ ID NO: 19675 - RNA, 22 nt, Artificial Sequence
  Guide RNA
cugaguccaugaacaccuuugc

SEQ ID NO: 19676 - RNA, 22 nt, Artificial Sequence
  Guide RNA
cugaguccgugaacaccuuugc

SEQ ID NO: 19677 - RNA, 22 nt, Artificial Sequence
  Guide RNA
cuuugcaaagguguucacggac

SEQ ID NO: 19678 - RNA, 22 nt, Artificial Sequence
  Guide RNA
cuuugcaaagguguucauggac

SEQ ID NO: 19679 - RNA, 22 nt, Artificial Sequence
  Guide RNA
gaaggcuuugcaaagguguuca

SEQ ID NO: 19680 - RNA, 22 nt, Artificial Sequence
  Guide RNA
gacaccugaguccaugaacacc

SEQ ID NO: 19681 - RNA, 22 nt, Artificial Sequence
  Guide RNA
gacaccugaguccgugaacacc

SEQ ID NO: 19682 - RNA, 22 nt, Artificial Sequence
  Guide RNA
gaggacaccugaguccaugaac

SEQ ID NO: 19683 - RNA, 22 nt, Artificial Sequence
  Guide RNA
gaggacaccugaguccgugaac

SEQ ID NO: 19684 - RNA, 22 nt, Artificial Sequence
  Guide RNA
gaguccaugaacaccuuugcaa

SEQ ID NO: 19685 - RNA, 22 nt, Artificial Sequence
  Guide RNA
gaguccgugaacaccuuugcaa

SEQ ID NO: 19686 - RNA, 22 nt, Artificial Sequence
  Guide RNA
gcaaagguguucacggacucag

SEQ ID NO: 19687 - RNA, 22 nt, Artificial Sequence
  Guide RNA
gcaaagguguucauggacucag

SEQ ID NO: 19688 - RNA, 22 nt, Artificial Sequence
  Guide RNA
gccucucagaggacaccugagu

SEQ ID NO: 19689 - RNA, 22 nt, Artificial Sequence
  Guide RNA
gcuuugcaaagguguucacgga

SEQ ID NO: 19690 - RNA, 22 nt, Artificial Sequence
  Guide RNA
gcuuugcaaagguguucaugga

SEQ ID NO: 19691 - RNA, 22 nt, Artificial Sequence
  Guide RNA
ggacaccugaguccaugaacac

SEQ ID NO: 19692 - RNA, 22 nt, Artificial Sequence
  Guide RNA
ggacaccugaguccgugaacac

SEQ ID NO: 19693 - RNA, 22 nt, Artificial Sequence
  Guide RNA
ggcuuugcaaagguguucacgg

SEQ ID NO: 19694 - RNA, 22 nt, Artificial Sequence
  Guide RNA
ggcuuugcaaagguguucaugg

SEQ ID NO: 19695 - RNA, 22 nt, Artificial Sequence
  Guide RNA
gguguucacggacucagguguc

SEQ ID NO: 19696 - RNA, 22 nt, Artificial Sequence
  Guide RNA
gguguucauggacucagguguc

SEQ ID NO: 19697 - RNA, 22 nt, Artificial Sequence
  Guide RNA
guccaugaacaccuuugcaaag

SEQ ID NO: 19698 - RNA, 22 nt, Artificial Sequence
  Guide RNA
guccgugaacaccuuugcaaag

SEQ ID NO: 19699 - RNA, 22 nt, Artificial Sequence
  Guide RNA
guguucacggacucaggugucc

SEQ ID NO: 19700 - RNA, 22 nt, Artificial Sequence
  Guide RNA
guguucauggacucaggugucc

SEQ ID NO: 19701 - RNA, 22 nt, Artificial Sequence
  Guide RNA
guucacggacucagguguccuc

SEQ ID NO: 19702 - RNA, 22 nt, Artificial Sequence
  Guide RNA
guucauggacucagguguccuc

SEQ ID NO: 19703 - RNA, 22 nt, Artificial Sequence
  Guide RNA
ucacggacucagguguccucug

SEQ ID NO: 19704 - RNA, 22 nt, Artificial Sequence
  Guide RNA
ucagaggacaccugaguccaug

SEQ ID NO: 19705 - RNA, 22 nt, Artificial Sequence
  Guide RNA
ucagaggacaccugaguccgug

SEQ ID NO: 19706 - RNA, 22 nt, Artificial Sequence
  Guide RNA
ucauggacucagguguccucug

SEQ ID NO: 19707 - RNA, 22 nt, Artificial Sequence
  Guide RNA
uccaugaacaccuuugcaaagc

SEQ ID NO: 19708 - RNA, 22 nt, Artificial Sequence
  Guide RNA
uccgugaacaccuuugcaaagc

SEQ ID NO: 19709 - RNA, 22 nt, Artificial Sequence
  Guide RNA
ucucagaggacaccugagucca

SEQ ID NO: 19710 - RNA, 22 nt, Artificial Sequence
  Guide RNA
ucucagaggacaccugaguccg

SEQ ID NO: 19711 - RNA, 22 nt, Artificial Sequence
  Guide RNA
ugaguccaugaacaccuuugca

SEQ ID NO: 19712 - RNA, 22 nt, Artificial Sequence
  Guide RNA
ugaguccgugaacaccuuugca

SEQ ID NO: 19713 - RNA, 22 nt, Artificial Sequence
  Guide RNA
ugcaaagguguucacggacuca

SEQ ID NO: 19714 - RNA, 22 nt, Artificial Sequence
  Guide RNA
ugcaaagguguucauggacuca

SEQ ID NO: 19715 - RNA, 22 nt, Artificial Sequence
  Guide RNA
uguucacggacucagguguccu

SEQ ID NO: 19716 - RNA, 22 nt, Artificial Sequence
  Guide RNA
uguucauggacucagguguccu

SEQ ID NO: 19717 - RNA, 22 nt, Artificial Sequence
  Guide RNA
uucacggacucagguguccucu

SEQ ID NO: 19718 - RNA, 22 nt, Artificial Sequence
  Guide RNA
uucauggacucagguguccucu

SEQ ID NO: 19719 - RNA, 22 nt, Artificial Sequence
  Guide RNA
uugcaaagguguucacggacuc

SEQ ID NO: 19720 - RNA, 22 nt, Artificial Sequence
  Guide RNA
uugcaaagguguucauggacuc

SEQ ID NO: 19721 - RNA, 22 nt, Artificial Sequence
  Guide RNA
uuugcaaagguguucacggacu

SEQ ID NO: 19722 - RNA, 22 nt, Artificial Sequence
  Guide RNA
uuugcaaagguguucauggacu

SEQ ID NO: 19723 - RNA, 20 nt, Artificial Sequence
  Guide RNA
accccaggguagcauggaaa

SEQ ID NO: 19724 - RNA, 20 nt, Artificial Sequence
  Guide RNA
accccaggguagcguggaaa

SEQ ID NO: 19725 - RNA, 20 nt, Artificial Sequence
  Guide RNA
accugcccuccaucuuucca

SEQ ID NO: 19726 - RNA, 20 nt, Artificial Sequence
  Guide RNA
acgcuacccuggggugacua

SEQ ID NO: 19727 - RNA, 20 nt, Artificial Sequence
  Guide RNA
agcauggaaagauggagggc

SEQ ID NO: 19728 - RNA, 20 nt, Artificial Sequence
  Guide RNA
agcguggaaagauggagggc

SEQ ID NO: 19729 - RNA, 20 nt, Artificial Sequence
  Guide RNA
aggguagcauggaaagaugg

SEQ ID NO: 19730 - RNA, 20 nt, Artificial Sequence
  Guide RNA
aggguagcguggaaagaugg

SEQ ID NO: 19731 - RNA, 20 nt, Artificial Sequence
  Guide RNA
agucaccccaggguagcaug

SEQ ID NO: 19732 - RNA, 20 nt, Artificial Sequence
  Guide RNA
agucaccccaggguagcgug

SEQ ID NO: 19733 - RNA, 20 nt, Artificial Sequence
  Guide RNA
auagucaccccaggguagca

SEQ ID NO: 19734 - RNA, 20 nt, Artificial Sequence
  Guide RNA
auagucaccccaggguagcg

SEQ ID NO: 19735 - RNA, 20 nt, Artificial Sequence
  Guide RNA
aucuauagucaccccagggu

SEQ ID NO: 19736 - RNA, 20 nt, Artificial Sequence
  Guide RNA
aucuuuccacgcuacccugg

SEQ ID NO: 19737 - RNA, 20 nt, Artificial Sequence
  Guide RNA
aucuuuccaugcuacccugg

SEQ ID NO: 19738 - RNA, 20 nt, Artificial Sequence
  Guide RNA
augcuacccuggggugacua

SEQ ID NO: 19739 - RNA, 20 nt, Artificial Sequence
  Guide RNA
caccccaggguagcauggaa

SEQ ID NO: 19740 - RNA, 20 nt, Artificial Sequence
  Guide RNA
caccccaggguagcguggaa

SEQ ID NO: 19741 - RNA, 20 nt, Artificial Sequence
  Guide RNA
caccugcccuccaucuuucc

SEQ ID NO: 19742 - RNA, 20 nt, Artificial Sequence
  Guide RNA
cacgcuacccuggggugacu

SEQ ID NO: 19743 - RNA, 20 nt, Artificial Sequence
  Guide RNA
caggguagcauggaaagaug

SEQ ID NO: 19744 - RNA, 20 nt, Artificial Sequence
  Guide RNA
caggguagcguggaaagaug

SEQ ID NO: 19745 - RNA, 20 nt, Artificial Sequence
  Guide RNA
caucuuuccacgcuacccug

SEQ ID NO: 19746 - RNA, 20 nt, Artificial Sequence
  Guide RNA
caucuuuccaugcuacccug

SEQ ID NO: 19747 - RNA, 20 nt, Artificial Sequence
  Guide RNA
caugcuacccuggggugacu

SEQ ID NO: 19748 - RNA, 20 nt, Artificial Sequence
  Guide RNA
cauggaaagauggagggcag

SEQ ID NO: 19749 - RNA, 20 nt, Artificial Sequence
  Guide RNA
ccacgcuacccuggggugac

SEQ ID NO: 19750 - RNA, 20 nt, Artificial Sequence
  Guide RNA
ccaggguagcauggaaagau

SEQ ID NO: 19751 - RNA, 20 nt, Artificial Sequence
  Guide RNA
ccaggguagcguggaaagau

SEQ ID NO: 19752 - RNA, 20 nt, Artificial Sequence
  Guide RNA
ccaucuuuccacgcuacccu

SEQ ID NO: 19753 - RNA, 20 nt, Artificial Sequence
  Guide RNA
ccaucuuuccaugcuacccu

SEQ ID NO: 19754 - RNA, 20 nt, Artificial Sequence
  Guide RNA
ccaugcuacccuggggugac

SEQ ID NO: 19755 - RNA, 20 nt, Artificial Sequence
  Guide RNA
cccaggguagcauggaaaga

SEQ ID NO: 19756 - RNA, 20 nt, Artificial Sequence
  Guide RNA
cccaggguagcguggaaaga

SEQ ID NO: 19757 - RNA, 20 nt, Artificial Sequence
  Guide RNA
ccccaggguagcauggaaag

SEQ ID NO: 19758 - RNA, 20 nt, Artificial Sequence
  Guide RNA
ccccaggguagcguggaaag

SEQ ID NO: 19759 - RNA, 20 nt, Artificial Sequence
  Guide RNA
cccuccaucuuuccacgcua

SEQ ID NO: 19760 - RNA, 20 nt, Artificial Sequence
  Guide RNA
cccuccaucuuuccaugcua

SEQ ID NO: 19761 - RNA, 20 nt, Artificial Sequence
  Guide RNA
ccuccaucuuuccacgcuac

SEQ ID NO: 19762 - RNA, 20 nt, Artificial Sequence
  Guide RNA
ccuccaucuuuccaugcuac

SEQ ID NO: 19763 - RNA, 20 nt, Artificial Sequence
  Guide RNA
ccugcccuccaucuuuccac

SEQ ID NO: 19764 - RNA, 20 nt, Artificial Sequence
  Guide RNA
ccugcccuccaucuuuccau

SEQ ID NO: 19765 - RNA, 20 nt, Artificial Sequence
  Guide RNA
cguggaaagauggagggcag

SEQ ID NO: 19766 - RNA, 20 nt, Artificial Sequence
  Guide RNA
cuauagucaccccaggguag

SEQ ID NO: 19767 - RNA, 20 nt, Artificial Sequence
  Guide RNA
cucaccugcccuccaucuuu

SEQ ID NO: 19768 - RNA, 20 nt, Artificial Sequence
  Guide RNA
cuccaucuuuccacgcuacc

SEQ ID NO: 19769 - RNA, 20 nt, Artificial Sequence
  Guide RNA
cuccaucuuuccaugcuacc

SEQ ID NO: 19770 - RNA, 20 nt, Artificial Sequence
  Guide RNA
cugcccuccaucuuuccacg

SEQ ID NO: 19771 - RNA, 20 nt, Artificial Sequence
  Guide RNA
cugcccuccaucuuuccaug

SEQ ID NO: 19772 - RNA, 20 nt, Artificial Sequence
  Guide RNA
cuuuccacgcuacccugggg

SEQ ID NO: 19773 - RNA, 20 nt, Artificial Sequence
  Guide RNA
cuuuccaugcuacccugggg

SEQ ID NO: 19774 - RNA, 20 nt, Artificial Sequence
  Guide RNA
gcauggaaagauggagggca

SEQ ID NO: 19775 - RNA, 20 nt, Artificial Sequence
  Guide RNA
gcccuccaucuuuccacgcu

SEQ ID NO: 19776 - RNA, 20 nt, Artificial Sequence
  Guide RNA
gcccuccaucuuuccaugcu

SEQ ID NO: 19777 - RNA, 20 nt, Artificial Sequence
  Guide RNA
gcguggaaagauggagggca

SEQ ID NO: 19778 - RNA, 20 nt, Artificial Sequence
  Guide RNA
ggguagcauggaaagaugga

SEQ ID NO: 19779 - RNA, 20 nt, Artificial Sequence
  Guide RNA
ggguagcguggaaagaugga

SEQ ID NO: 19780 - RNA, 20 nt, Artificial Sequence
  Guide RNA
gguagcauggaaagauggag

SEQ ID NO: 19781 - RNA, 20 nt, Artificial Sequence
  Guide RNA
gguagcguggaaagauggag

SEQ ID NO: 19782 - RNA, 20 nt, Artificial Sequence
  Guide RNA
guagcauggaaagauggagg

SEQ ID NO: 19783 - RNA, 20 nt, Artificial Sequence
  Guide RNA
guagcguggaaagauggagg

SEQ ID NO: 19784 - RNA, 20 nt, Artificial Sequence
  Guide RNA
gucaccccaggguagcaugg

SEQ ID NO: 19785 - RNA, 20 nt, Artificial Sequence
  Guide RNA
gucaccccaggguagcgugg

SEQ ID NO: 19786 - RNA, 20 nt, Artificial Sequence
  Guide RNA
uagcauggaaagauggaggg

SEQ ID NO: 19787 - RNA, 20 nt, Artificial Sequence
  Guide RNA
uagcguggaaagauggaggg

SEQ ID NO: 19788 - RNA, 20 nt, Artificial Sequence
  Guide RNA
uagucaccccaggguagcau

SEQ ID NO: 19789 - RNA, 20 nt, Artificial Sequence
  Guide RNA
uagucaccccaggguagcgu

SEQ ID NO: 19790 - RNA, 20 nt, Artificial Sequence
  Guide RNA
uauagucaccccaggguagc

SEQ ID NO: 19791 - RNA, 20 nt, Artificial Sequence
  Guide RNA
ucaccccaggguagcaugga

SEQ ID NO: 19792 - RNA, 20 nt, Artificial Sequence
  Guide RNA
ucaccccaggguagcgugga

SEQ ID NO: 19793 - RNA, 20 nt, Artificial Sequence
  Guide RNA
ucaccugcccuccaucuuuc

SEQ ID NO: 19794 - RNA, 20 nt, Artificial Sequence
  Guide RNA
uccacgcuacccugggguga

SEQ ID NO: 19795 - RNA, 20 nt, Artificial Sequence
  Guide RNA
uccaucuuuccacgcuaccc

SEQ ID NO: 19796 - RNA, 20 nt, Artificial Sequence
  Guide RNA
uccaucuuuccaugcuaccc

SEQ ID NO: 19797 - RNA, 20 nt, Artificial Sequence
  Guide RNA
uccaugcuacccugggguga

SEQ ID NO: 19798 - RNA, 20 nt, Artificial Sequence
  Guide RNA
ucuauagucaccccagggua

SEQ ID NO: 19799 - RNA, 20 nt, Artificial Sequence
  Guide RNA
ucuuuccacgcuacccuggg

SEQ ID NO: 19800 - RNA, 20 nt, Artificial Sequence
  Guide RNA
ucuuuccaugcuacccuggg

SEQ ID NO: 19801 - RNA, 20 nt, Artificial Sequence
  Guide RNA
ugcccuccaucuuuccacgc

SEQ ID NO: 19802 - RNA, 20 nt, Artificial Sequence
  Guide RNA
ugcccuccaucuuuccaugc

SEQ ID NO: 19803 - RNA, 20 nt, Artificial Sequence
  Guide RNA
uuccacgcuacccuggggug

SEQ ID NO: 19804 - RNA, 20 nt, Artificial Sequence
  Guide RNA
uuccaugcuacccuggggug

SEQ ID NO: 19805 - RNA, 20 nt, Artificial Sequence
  Guide RNA
uuuccacgcuacccuggggu

SEQ ID NO: 19806 - RNA, 20 nt, Artificial Sequence
  Guide RNA
uuuccaugcuacccuggggu

SEQ ID NO: 19807 - RNA, 21 nt, Artificial Sequence
  Guide RNA
accccaggguagcauggaaag

SEQ ID NO: 19808 - RNA, 21 nt, Artificial Sequence
  Guide RNA
accccaggguagcguggaaag

SEQ ID NO: 19809 - RNA, 21 nt, Artificial Sequence
  Guide RNA
accugcccuccaucuuuccac

SEQ ID NO: 19810 - RNA, 21 nt, Artificial Sequence
  Guide RNA
accugcccuccaucuuuccau

SEQ ID NO: 19811 - RNA, 21 nt, Artificial Sequence
  Guide RNA
acgcuacccuggggugacuau

SEQ ID NO: 19812 - RNA, 21 nt, Artificial Sequence
  Guide RNA
agcauggaaagauggagggca

SEQ ID NO: 19813 - RNA, 21 nt, Artificial Sequence
  Guide RNA
agcguggaaagauggagggca

SEQ ID NO: 19814 - RNA, 21 nt, Artificial Sequence
  Guide RNA
aggguagcauggaaagaugga

SEQ ID NO: 19815 - RNA, 21 nt, Artificial Sequence
  Guide RNA
aggguagcguggaaagaugga

SEQ ID NO: 19816 - RNA, 21 nt, Artificial Sequence
  Guide RNA
agucaccccaggguagcaugg

SEQ ID NO: 19817 - RNA, 21 nt, Artificial Sequence
  Guide RNA
agucaccccaggguagcgugg

SEQ ID NO: 19818 - RNA, 21 nt, Artificial Sequence
  Guide RNA
auagucaccccaggguagcau

SEQ ID NO: 19819 - RNA, 21 nt, Artificial Sequence
  Guide RNA
auagucaccccaggguagcgu

SEQ ID NO: 19820 - RNA, 21 nt, Artificial Sequence
  Guide RNA
aucuauagucaccccagggua

SEQ ID NO: 19821 - RNA, 21 nt, Artificial Sequence
  Guide RNA
aucuuuccacgcuacccuggg

SEQ ID NO: 19822 - RNA, 21 nt, Artificial Sequence
  Guide RNA
aucuuuccaugcuacccuggg

SEQ ID NO: 19823 - RNA, 21 nt, Artificial Sequence
  Guide RNA
augcuacccuggggugacuau

SEQ ID NO: 19824 - RNA, 21 nt, Artificial Sequence
  Guide RNA
caccccaggguagcauggaaa

SEQ ID NO: 19825 - RNA, 21 nt, Artificial Sequence
  Guide RNA
caccccaggguagcguggaaa

SEQ ID NO: 19826 - RNA, 21 nt, Artificial Sequence
  Guide RNA
caccugcccuccaucuuucca

SEQ ID NO: 19827 - RNA, 21 nt, Artificial Sequence
  Guide RNA
cacgcuacccuggggugacua

SEQ ID NO: 19828 - RNA, 21 nt, Artificial Sequence
  Guide RNA
caggguagcauggaaagaugg

SEQ ID NO: 19829 - RNA, 21 nt, Artificial Sequence
  Guide RNA
caggguagcguggaaagaugg

SEQ ID NO: 19830 - RNA, 21 nt, Artificial Sequence
  Guide RNA
caucuauagucaccccagggu

SEQ ID NO: 19831 - RNA, 21 nt, Artificial Sequence
  Guide RNA
caucuuuccacgcuacccugg

SEQ ID NO: 19832 - RNA, 21 nt, Artificial Sequence
  Guide RNA
caucuuuccaugcuacccugg

SEQ ID NO: 19833 - RNA, 21 nt, Artificial Sequence
  Guide RNA
caugcuacccuggggugacua

SEQ ID NO: 19834 - RNA, 21 nt, Artificial Sequence
  Guide RNA
cauggaaagauggagggcagg

SEQ ID NO: 19835 - RNA, 21 nt, Artificial Sequence
  Guide RNA
ccacgcuacccuggggugacu

SEQ ID NO: 19836 - RNA, 21 nt, Artificial Sequence
  Guide RNA
ccaggguagcauggaaagaug

SEQ ID NO: 19837 - RNA, 21 nt, Artificial Sequence
  Guide RNA
ccaggguagcguggaaagaug

SEQ ID NO: 19838 - RNA, 21 nt, Artificial Sequence
  Guide RNA
ccaucuuuccacgcuacccug

SEQ ID NO: 19839 - RNA, 21 nt, Artificial Sequence
  Guide RNA
ccaucuuuccaugcuacccug

SEQ ID NO: 19840 - RNA, 21 nt, Artificial Sequence
  Guide RNA
ccaugcuacccuggggugacu

SEQ ID NO: 19841 - RNA, 21 nt, Artificial Sequence
  Guide RNA
cccaggguagcauggaaagau

SEQ ID NO: 19842 - RNA, 21 nt, Artificial Sequence
  Guide RNA
cccaggguagcguggaaagau

SEQ ID NO: 19843 - RNA, 21 nt, Artificial Sequence
  Guide RNA
ccccaggguagcauggaaaga

SEQ ID NO: 19844 - RNA, 21 nt, Artificial Sequence
  Guide RNA
ccccaggguagcguggaaaga

SEQ ID NO: 19845 - RNA, 21 nt, Artificial Sequence
  Guide RNA
cccuccaucuuuccacgcuac

SEQ ID NO: 19846 - RNA, 21 nt, Artificial Sequence
  Guide RNA
cccuccaucuuuccaugcuac

SEQ ID NO: 19847 - RNA, 21 nt, Artificial Sequence
  Guide RNA
ccuccaucuuuccacgcuacc

SEQ ID NO: 19848 - RNA, 21 nt, Artificial Sequence
  Guide RNA
ccuccaucuuuccaugcuacc

SEQ ID NO: 19849 - RNA, 21 nt, Artificial Sequence
  Guide RNA
ccugcccuccaucuuuccacg

SEQ ID NO: 19850 - RNA, 21 nt, Artificial Sequence
  Guide RNA
ccugcccuccaucuuuccaug

SEQ ID NO: 19851 - RNA, 21 nt, Artificial Sequence
  Guide RNA
cguggaaagauggagggcagg

SEQ ID NO: 19852 - RNA, 21 nt, Artificial Sequence
  Guide RNA
cuauagucaccccaggguagc

SEQ ID NO: 19853 - RNA, 21 nt, Artificial Sequence
  Guide RNA
cucaccugcccuccaucuuuc

SEQ ID NO: 19854 - RNA, 21 nt, Artificial Sequence
  Guide RNA
cuccaucuuuccacgcuaccc

SEQ ID NO: 19855 - RNA, 21 nt, Artificial Sequence
  Guide RNA
cuccaucuuuccaugcuaccc

SEQ ID NO: 19856 - RNA, 21 nt, Artificial Sequence
  Guide RNA
cugcccuccaucuuuccacgc

SEQ ID NO: 19857 - RNA, 21 nt, Artificial Sequence
  Guide RNA
cugcccuccaucuuuccaugc

SEQ ID NO: 19858 - RNA, 21 nt, Artificial Sequence
  Guide RNA
cuuuccacgcuacccuggggu

SEQ ID NO: 19859 - RNA, 21 nt, Artificial Sequence
  Guide RNA
cuuuccaugcuacccuggggu

SEQ ID NO: 19860 - RNA, 21 nt, Artificial Sequence
  Guide RNA
gcauggaaagauggagggcag

SEQ ID NO: 19861 - RNA, 21 nt, Artificial Sequence
  Guide RNA
gcccuccaucuuuccacgcua

SEQ ID NO: 19862 - RNA, 21 nt, Artificial Sequence
  Guide RNA
gcccuccaucuuuccaugcua

SEQ ID NO: 19863 - RNA, 21 nt, Artificial Sequence
  Guide RNA
gcguggaaagauggagggcag

SEQ ID NO: 19864 - RNA, 21 nt, Artificial Sequence
  Guide RNA
ggguagcauggaaagauggag

SEQ ID NO: 19865 - RNA, 21 nt, Artificial Sequence
  Guide RNA
ggguagcguggaaagauggag

SEQ ID NO: 19866 - RNA, 21 nt, Artificial Sequence
  Guide RNA
gguagcauggaaagauggagg

SEQ ID NO: 19867 - RNA, 21 nt, Artificial Sequence
  Guide RNA
gguagcguggaaagauggagg

SEQ ID NO: 19868 - RNA, 21 nt, Artificial Sequence
  Guide RNA
guagcauggaaagauggaggg

SEQ ID NO: 19869 - RNA, 21 nt, Artificial Sequence
  Guide RNA
guagcguggaaagauggaggg

SEQ ID NO: 19870 - RNA, 21 nt, Artificial Sequence
  Guide RNA
gucaccccaggguagcaugga

SEQ ID NO: 19871 - RNA, 21 nt, Artificial Sequence
  Guide RNA
gucaccccaggguagcgugga

SEQ ID NO: 19872 - RNA, 21 nt, Artificial Sequence
  Guide RNA
uagcauggaaagauggagggc

SEQ ID NO: 19873 - RNA, 21 nt, Artificial Sequence
  Guide RNA
uagcguggaaagauggagggc

SEQ ID NO: 19874 - RNA, 21 nt, Artificial Sequence
  Guide RNA
uagucaccccaggguagcaug

SEQ ID NO: 19875 - RNA, 21 nt, Artificial Sequence
  Guide RNA
uagucaccccaggguagcgug

SEQ ID NO: 19876 - RNA, 21 nt, Artificial Sequence
  Guide RNA
uauagucaccccaggguagca

SEQ ID NO: 19877 - RNA, 21 nt, Artificial Sequence
  Guide RNA
uauagucaccccaggguagcg

SEQ ID NO: 19878 - RNA, 21 nt, Artificial Sequence
  Guide RNA
ucaccccaggguagcauggaa

SEQ ID NO: 19879 - RNA, 21 nt, Artificial Sequence
  Guide RNA
ucaccccaggguagcguggaa

SEQ ID NO: 19880 - RNA, 21 nt, Artificial Sequence
  Guide RNA
ucaccugcccuccaucuuucc

SEQ ID NO: 19881 - RNA, 21 nt, Artificial Sequence
  Guide RNA
uccacgcuacccuggggugac

SEQ ID NO: 19882 - RNA, 21 nt, Artificial Sequence
  Guide RNA
uccaucuuuccacgcuacccu

SEQ ID NO: 19883 - RNA, 21 nt, Artificial Sequence
  Guide RNA
uccaucuuuccaugcuacccu

SEQ ID NO: 19884 - RNA, 21 nt, Artificial Sequence
  Guide RNA
uccaugcuacccuggggugac

SEQ ID NO: 19885 - RNA, 21 nt, Artificial Sequence
  Guide RNA
ucuauagucaccccaggguag

SEQ ID NO: 19886 - RNA, 21 nt, Artificial Sequence
  Guide RNA
ucucaccugcccuccaucuuu

SEQ ID NO: 19887 - RNA, 21 nt, Artificial Sequence
  Guide RNA
ucuuuccacgcuacccugggg

SEQ ID NO: 19888 - RNA, 21 nt, Artificial Sequence
  Guide RNA
ucuuuccaugcuacccugggg

SEQ ID NO: 19889 - RNA, 21 nt, Artificial Sequence
  Guide RNA
ugcccuccaucuuuccacgcu

SEQ ID NO: 19890 - RNA, 21 nt, Artificial Sequence
  Guide RNA
ugcccuccaucuuuccaugcu

SEQ ID NO: 19891 - RNA, 21 nt, Artificial Sequence
  Guide RNA
uuccacgcuacccugggguga

SEQ ID NO: 19892 - RNA, 21 nt, Artificial Sequence
  Guide RNA
uuccaugcuacccugggguga

SEQ ID NO: 19893 - RNA, 21 nt, Artificial Sequence
  Guide RNA
uuuccacgcuacccuggggug

SEQ ID NO: 19894 - RNA, 21 nt, Artificial Sequence
  Guide RNA
uuuccaugcuacccuggggug

SEQ ID NO: 19895 - RNA, 22 nt, Artificial Sequence
  Guide RNA
accccaggguagcauggaaaga

SEQ ID NO: 19896 - RNA, 22 nt, Artificial Sequence
  Guide RNA
accccaggguagcguggaaaga

SEQ ID NO: 19897 - RNA, 22 nt, Artificial Sequence
  Guide RNA
accugcccuccaucuuuccacg

SEQ ID NO: 19898 - RNA, 22 nt, Artificial Sequence
  Guide RNA
accugcccuccaucuuuccaug

SEQ ID NO: 19899 - RNA, 22 nt, Artificial Sequence
  Guide RNA
acgcuacccuggggugacuaua

SEQ ID NO: 19900 - RNA, 22 nt, Artificial Sequence
  Guide RNA
agcauggaaagauggagggcag

SEQ ID NO: 19901 - RNA, 22 nt, Artificial Sequence
  Guide RNA
agcguggaaagauggagggcag

SEQ ID NO: 19902 - RNA, 22 nt, Artificial Sequence
  Guide RNA
aggguagcauggaaagauggag

SEQ ID NO: 19903 - RNA, 22 nt, Artificial Sequence
  Guide RNA
aggguagcguggaaagauggag

SEQ ID NO: 19904 - RNA, 22 nt, Artificial Sequence
  Guide RNA
agucaccccaggguagcaugga

SEQ ID NO: 19905 - RNA, 22 nt, Artificial Sequence
  Guide RNA
agucaccccaggguagcgugga

SEQ ID NO: 19906 - RNA, 22 nt, Artificial Sequence
  Guide RNA
auagucaccccaggguagcaug

SEQ ID NO: 19907 - RNA, 22 nt, Artificial Sequence
  Guide RNA
auagucaccccaggguagcgug

SEQ ID NO: 19908 - RNA, 22 nt, Artificial Sequence
  Guide RNA
aucuauagucaccccaggguag

SEQ ID NO: 19909 - RNA, 22 nt, Artificial Sequence
  Guide RNA
aucuuuccacgcuacccugggg

SEQ ID NO: 19910 - RNA, 22 nt, Artificial Sequence
  Guide RNA
aucuuuccaugcuacccugggg

SEQ ID NO: 19911 - RNA, 22 nt, Artificial Sequence
  Guide RNA
augcuacccuggggugacuaua

SEQ ID NO: 19912 - RNA, 22 nt, Artificial Sequence
  Guide RNA
caccccaggguagcauggaaag

SEQ ID NO: 19913 - RNA, 22 nt, Artificial Sequence
  Guide RNA
caccccaggguagcguggaaag

SEQ ID NO: 19914 - RNA, 22 nt, Artificial Sequence
  Guide RNA
caccugcccuccaucuuuccac

SEQ ID NO: 19915 - RNA, 22 nt, Artificial Sequence
  Guide RNA
caccugcccuccaucuuuccau

SEQ ID NO: 19916 - RNA, 22 nt, Artificial Sequence
  Guide RNA
cacgcuacccuggggugacuau

SEQ ID NO: 19917 - RNA, 22 nt, Artificial Sequence
  Guide RNA
caggguagcauggaaagaugga

SEQ ID NO: 19918 - RNA, 22 nt, Artificial Sequence
  Guide RNA
caggguagcguggaaagaugga

SEQ ID NO: 19919 - RNA, 22 nt, Artificial Sequence
  Guide RNA
caucuauagucaccccagggua

SEQ ID NO: 19920 - RNA, 22 nt, Artificial Sequence
  Guide RNA
caucuuuccacgcuacccuggg

SEQ ID NO: 19921 - RNA, 22 nt, Artificial Sequence
  Guide RNA
caucuuuccaugcuacccuggg

SEQ ID NO: 19922 - RNA, 22 nt, Artificial Sequence
  Guide RNA
caugcuacccuggggugacuau

SEQ ID NO: 19923 - RNA, 22 nt, Artificial Sequence
  Guide RNA
cauggaaagauggagggcaggu

SEQ ID NO: 19924 - RNA, 22 nt, Artificial Sequence
  Guide RNA
ccacgcuacccuggggugacua

SEQ ID NO: 19925 - RNA, 22 nt, Artificial Sequence
  Guide RNA
ccaggguagcauggaaagaugg

SEQ ID NO: 19926 - RNA, 22 nt, Artificial Sequence
  Guide RNA
ccaggguagcguggaaagaugg

SEQ ID NO: 19927 - RNA, 22 nt, Artificial Sequence
  Guide RNA
ccaucuauagucaccccagggu

SEQ ID NO: 19928 - RNA, 22 nt, Artificial Sequence
  Guide RNA
ccaucuuuccacgcuacccugg

SEQ ID NO: 19929 - RNA, 22 nt, Artificial Sequence
  Guide RNA
ccaucuuuccaugcuacccugg

SEQ ID NO: 19930 - RNA, 22 nt, Artificial Sequence
  Guide RNA
ccaugcuacccuggggugacua

SEQ ID NO: 19931 - RNA, 22 nt, Artificial Sequence
  Guide RNA
cccaggguagcauggaaagaug

SEQ ID NO: 19932 - RNA, 22 nt, Artificial Sequence
  Guide RNA
cccaggguagcguggaaagaug

SEQ ID NO: 19933 - RNA, 22 nt, Artificial Sequence
  Guide RNA
ccccaggguagcauggaaagau

SEQ ID NO: 19934 - RNA, 22 nt, Artificial Sequence
  Guide RNA
ccccaggguagcguggaaagau

SEQ ID NO: 19935 - RNA, 22 nt, Artificial Sequence
  Guide RNA
cccuccaucuuuccacgcuacc

SEQ ID NO: 19936 - RNA, 22 nt, Artificial Sequence
  Guide RNA
cccuccaucuuuccaugcuacc

SEQ ID NO: 19937 - RNA, 22 nt, Artificial Sequence
  Guide RNA
ccuccaucuuuccacgcuaccc

SEQ ID NO: 19938 - RNA, 22 nt, Artificial Sequence
  Guide RNA
ccuccaucuuuccaugcuaccc

SEQ ID NO: 19939 - RNA, 22 nt, Artificial Sequence
  Guide RNA
ccugcccuccaucuuuccacgc

SEQ ID NO: 19940 - RNA, 22 nt, Artificial Sequence
  Guide RNA
ccugcccuccaucuuuccaugc

SEQ ID NO: 19941 - RNA, 22 nt, Artificial Sequence
  Guide RNA
cguggaaagauggagggcaggu

SEQ ID NO: 19942 - RNA, 22 nt, Artificial Sequence
  Guide RNA
cuauagucaccccaggguagca

SEQ ID NO: 19943 - RNA, 22 nt, Artificial Sequence
  Guide RNA
cuauagucaccccaggguagcg

SEQ ID NO: 19944 - RNA, 22 nt, Artificial Sequence
  Guide RNA
cucaccugcccuccaucuuucc

SEQ ID NO: 19945 - RNA, 22 nt, Artificial Sequence
  Guide RNA
cuccaucuuuccacgcuacccu

SEQ ID NO: 19946 - RNA, 22 nt, Artificial Sequence
  Guide RNA
cuccaucuuuccaugcuacccu

SEQ ID NO: 19947 - RNA, 22 nt, Artificial Sequence
  Guide RNA
cucucaccugcccuccaucuuu

SEQ ID NO: 19948 - RNA, 22 nt, Artificial Sequence
  Guide RNA
cugcccuccaucuuuccacgcu

SEQ ID NO: 19949 - RNA, 22 nt, Artificial Sequence
  Guide RNA
cugcccuccaucuuuccaugcu

SEQ ID NO: 19950 - RNA, 22 nt, Artificial Sequence
  Guide RNA
cuuuccacgcuacccuggggug

SEQ ID NO: 19951 - RNA, 22 nt, Artificial Sequence
  Guide RNA
cuuuccaugcuacccuggggug

SEQ ID NO: 19952 - RNA, 22 nt, Artificial Sequence
  Guide RNA
gcauggaaagauggagggcagg

SEQ ID NO: 19953 - RNA, 22 nt, Artificial Sequence
  Guide RNA
gcccuccaucuuuccacgcuac

SEQ ID NO: 19954 - RNA, 22 nt, Artificial Sequence
  Guide RNA
gcccuccaucuuuccaugcuac

SEQ ID NO: 19955 - RNA, 22 nt, Artificial Sequence
  Guide RNA
gcguggaaagauggagggcagg

SEQ ID NO: 19956 - RNA, 22 nt, Artificial Sequence
  Guide RNA
ggguagcauggaaagauggagg

SEQ ID NO: 19957 - RNA, 22 nt, Artificial Sequence
  Guide RNA
ggguagcguggaaagauggagg

SEQ ID NO: 19958 - RNA, 22 nt, Artificial Sequence
  Guide RNA
gguagcauggaaagauggaggg

SEQ ID NO: 19959 - RNA, 22 nt, Artificial Sequence
  Guide RNA
gguagcguggaaagauggaggg

SEQ ID NO: 19960 - RNA, 22 nt, Artificial Sequence
  Guide RNA
guagcauggaaagauggagggc

SEQ ID NO: 19961 - RNA, 22 nt, Artificial Sequence
  Guide RNA
guagcguggaaagauggagggc

SEQ ID NO: 19962 - RNA, 22 nt, Artificial Sequence
  Guide RNA
gucaccccaggguagcauggaa

SEQ ID NO: 19963 - RNA, 22 nt, Artificial Sequence
  Guide RNA
gucaccccaggguagcguggaa

SEQ ID NO: 19964 - RNA, 22 nt, Artificial Sequence
  Guide RNA
uagcauggaaagauggagggca

SEQ ID NO: 19965 - RNA, 22 nt, Artificial Sequence
  Guide RNA
uagcguggaaagauggagggca

SEQ ID NO: 19966 - RNA, 22 nt, Artificial Sequence
  Guide RNA
uagucaccccaggguagcaugg

SEQ ID NO: 19967 - RNA, 22 nt, Artificial Sequence
  Guide RNA
uagucaccccaggguagcgugg

SEQ ID NO: 19968 - RNA, 22 nt, Artificial Sequence
  Guide RNA
uauagucaccccaggguagcau

SEQ ID NO: 19969 - RNA, 22 nt, Artificial Sequence
  Guide RNA
uauagucaccccaggguagcgu

SEQ ID NO: 19970 - RNA, 22 nt, Artificial Sequence
  Guide RNA
ucaccccaggguagcauggaaa

SEQ ID NO: 19971 - RNA, 22 nt, Artificial Sequence
  Guide RNA
ucaccccaggguagcguggaaa

SEQ ID NO: 19972 - RNA, 22 nt, Artificial Sequence
  Guide RNA
ucaccugcccuccaucuuucca

SEQ ID NO: 19973 - RNA, 22 nt, Artificial Sequence
  Guide RNA
uccacgcuacccuggggugacu

SEQ ID NO: 19974 - RNA, 22 nt, Artificial Sequence
  Guide RNA
uccaucuuuccacgcuacccug

SEQ ID NO: 19975 - RNA, 22 nt, Artificial Sequence
  Guide RNA
uccaucuuuccaugcuacccug

SEQ ID NO: 19976 - RNA, 22 nt, Artificial Sequence
  Guide RNA
uccaugcuacccuggggugacu

SEQ ID NO: 19977 - RNA, 22 nt, Artificial Sequence
  Guide RNA
ucuauagucaccccaggguagc

SEQ ID NO: 19978 - RNA, 22 nt, Artificial Sequence
  Guide RNA
ucucaccugcccuccaucuuuc

SEQ ID NO: 19979 - RNA, 22 nt, Artificial Sequence
  Guide RNA
ucuuuccacgcuacccuggggu

SEQ ID NO: 19980 - RNA, 22 nt, Artificial Sequence
  Guide RNA
ucuuuccaugcuacccuggggu

SEQ ID NO: 19981 - RNA, 22 nt, Artificial Sequence
  Guide RNA
ugcccuccaucuuuccacgcua

SEQ ID NO: 19982 - RNA, 22 nt, Artificial Sequence
  Guide RNA
ugcccuccaucuuuccaugcua

SEQ ID NO: 19983 - RNA, 22 nt, Artificial Sequence
  Guide RNA
uuccacgcuacccuggggugac

SEQ ID NO: 19984 - RNA, 22 nt, Artificial Sequence
  Guide RNA
uuccaugcuacccuggggugac

SEQ ID NO: 19985 - RNA, 22 nt, Artificial Sequence
  Guide RNA
uuuccacgcuacccugggguga

SEQ ID NO: 19986 - RNA, 22 nt, Artificial Sequence
  Guide RNA
uuuccaugcuacccugggguga

SEQ ID NO: 19987 - RNA, 20 nt, Artificial Sequence
  Guide RNA
aaaagaccaguguauguaug

SEQ ID NO: 19988 - RNA, 20 nt, Artificial Sequence
  Guide RNA
aaagaccaguguauguaugc

SEQ ID NO: 19989 - RNA, 20 nt, Artificial Sequence
  Guide RNA
aagaccaguguauguaugca

SEQ ID NO: 19990 - RNA, 20 nt, Artificial Sequence
  Guide RNA
aaguuuuuaccugccugagc

SEQ ID NO: 19991 - RNA, 20 nt, Artificial Sequence
  Guide RNA
acagggcucaggcagguaaa

SEQ ID NO: 19992 - RNA, 20 nt, Artificial Sequence
  Guide RNA
accaguguauguaugcacag

SEQ ID NO: 19993 - RNA, 20 nt, Artificial Sequence
  Guide RNA
accaguguauguaugcauag

SEQ ID NO: 19994 - RNA, 20 nt, Artificial Sequence
  Guide RNA
accugccugagcccuaugca

SEQ ID NO: 19995 - RNA, 20 nt, Artificial Sequence
  Guide RNA
accugccugagcccugugca

SEQ ID NO: 19996 - RNA, 20 nt, Artificial Sequence
  Guide RNA
agaccaguguauguaugcac

SEQ ID NO: 19997 - RNA, 20 nt, Artificial Sequence
  Guide RNA
agaccaguguauguaugcau

SEQ ID NO: 19998 - RNA, 20 nt, Artificial Sequence
  Guide RNA
agcccuaugcauacauacac

SEQ ID NO: 19999 - RNA, 20 nt, Artificial Sequence
  Guide RNA
agcccugugcauacauacac

SEQ ID NO: 20000 - RNA, 20 nt, Artificial Sequence
  Guide RNA
aguguauguaugcacagggc

SEQ ID NO: 20001 - RNA, 20 nt, Artificial Sequence
  Guide RNA
aguguauguaugcauagggc

SEQ ID NO: 20002 - RNA, 20 nt, Artificial Sequence
  Guide RNA
aguuuuuaccugccugagcc

SEQ ID NO: 20003 - RNA, 20 nt, Artificial Sequence
  Guide RNA
auagggcucaggcagguaaa

SEQ ID NO: 20004 - RNA, 20 nt, Artificial Sequence
  Guide RNA
augcacagggcucaggcagg

SEQ ID NO: 20005 - RNA, 20 nt, Artificial Sequence
  Guide RNA
augcauagggcucaggcagg

SEQ ID NO: 20006 - RNA, 20 nt, Artificial Sequence
  Guide RNA
auguaugcacagggcucagg

SEQ ID NO: 20007 - RNA, 20 nt, Artificial Sequence
  Guide RNA
auguaugcauagggcucagg

SEQ ID NO: 20008 - RNA, 20 nt, Artificial Sequence
  Guide RNA
caaaagaccaguguauguau

SEQ ID NO: 20009 - RNA, 20 nt, Artificial Sequence
  Guide RNA
cacagggcucaggcagguaa

SEQ ID NO: 20010 - RNA, 20 nt, Artificial Sequence
  Guide RNA
caguguauguaugcacaggg

SEQ ID NO: 20011 - RNA, 20 nt, Artificial Sequence
  Guide RNA
caguguauguaugcauaggg

SEQ ID NO: 20012 - RNA, 20 nt, Artificial Sequence
  Guide RNA
cauagggcucaggcagguaa

SEQ ID NO: 20013 - RNA, 20 nt, Artificial Sequence
  Guide RNA
ccaguguauguaugcacagg

SEQ ID NO: 20014 - RNA, 20 nt, Artificial Sequence
  Guide RNA
ccaguguauguaugcauagg

SEQ ID NO: 20015 - RNA, 20 nt, Artificial Sequence
  Guide RNA
cccuaugcauacauacacug

SEQ ID NO: 20016 - RNA, 20 nt, Artificial Sequence
  Guide RNA
cccugugcauacauacacug

SEQ ID NO: 20017 - RNA, 20 nt, Artificial Sequence
  Guide RNA
ccuaugcauacauacacugg

SEQ ID NO: 20018 - RNA, 20 nt, Artificial Sequence
  Guide RNA
ccugagcccuaugcauacau

SEQ ID NO: 20019 - RNA, 20 nt, Artificial Sequence
  Guide RNA
ccugagcccugugcauacau

SEQ ID NO: 20020 - RNA, 20 nt, Artificial Sequence
  Guide RNA
ccugccugagcccuaugcau

SEQ ID NO: 20021 - RNA, 20 nt, Artificial Sequence
  Guide RNA
ccugccugagcccugugcau

SEQ ID NO: 20022 - RNA, 20 nt, Artificial Sequence
  Guide RNA
ccugugcauacauacacugg

SEQ ID NO: 20023 - RNA, 20 nt, Artificial Sequence
  Guide RNA
cuaugcauacauacacuggu

SEQ ID NO: 20024 - RNA, 20 nt, Artificial Sequence
  Guide RNA
cugagcccuaugcauacaua

SEQ ID NO: 20025 - RNA, 20 nt, Artificial Sequence
  Guide RNA
cugagcccugugcauacaua

SEQ ID NO: 20026 - RNA, 20 nt, Artificial Sequence
  Guide RNA
cugccugagcccuaugcaua

SEQ ID NO: 20027 - RNA, 20 nt, Artificial Sequence
  Guide RNA
cugccugagcccugugcaua

SEQ ID NO: 20028 - RNA, 20 nt, Artificial Sequence
  Guide RNA
cugugcauacauacacuggu

SEQ ID NO: 20029 - RNA, 20 nt, Artificial Sequence
  Guide RNA
gaccaguguauguaugcaca

SEQ ID NO: 20030 - RNA, 20 nt, Artificial Sequence
  Guide RNA
gaccaguguauguaugcaua

SEQ ID NO: 20031 - RNA, 20 nt, Artificial Sequence
  Guide RNA
gagcccuaugcauacauaca

SEQ ID NO: 20032 - RNA, 20 nt, Artificial Sequence
  Guide RNA
gagcccugugcauacauaca

SEQ ID NO: 20033 - RNA, 20 nt, Artificial Sequence
  Guide RNA
gcacagggcucaggcaggua

SEQ ID NO: 20034 - RNA, 20 nt, Artificial Sequence
  Guide RNA
gcauagggcucaggcaggua

SEQ ID NO: 20035 - RNA, 20 nt, Artificial Sequence
  Guide RNA
gcccuaugcauacauacacu

SEQ ID NO: 20036 - RNA, 20 nt, Artificial Sequence
  Guide RNA
gcccugugcauacauacacu

SEQ ID NO: 20037 - RNA, 20 nt, Artificial Sequence
  Guide RNA
gccugagcccuaugcauaca

SEQ ID NO: 20038 - RNA, 20 nt, Artificial Sequence
  Guide RNA
gccugagcccugugcauaca

SEQ ID NO: 20039 - RNA, 20 nt, Artificial Sequence
  Guide RNA
guaugcacagggcucaggca

SEQ ID NO: 20040 - RNA, 20 nt, Artificial Sequence
  Guide RNA
guaugcauagggcucaggca

SEQ ID NO: 20041 - RNA, 20 nt, Artificial Sequence
  Guide RNA
guauguaugcacagggcuca

SEQ ID NO: 20042 - RNA, 20 nt, Artificial Sequence
  Guide RNA
guauguaugcauagggcuca

SEQ ID NO: 20043 - RNA, 20 nt, Artificial Sequence
  Guide RNA
guguauguaugcacagggcu

SEQ ID NO: 20044 - RNA, 20 nt, Artificial Sequence
  Guide RNA
guguauguaugcauagggcu

SEQ ID NO: 20045 - RNA, 20 nt, Artificial Sequence
  Guide RNA
guuuuuaccugccugagccc

SEQ ID NO: 20046 - RNA, 20 nt, Artificial Sequence
  Guide RNA
uaccugccugagcccuaugc

SEQ ID NO: 20047 - RNA, 20 nt, Artificial Sequence
  Guide RNA
uaccugccugagcccugugc

SEQ ID NO: 20048 - RNA, 20 nt, Artificial Sequence
  Guide RNA
uaugcacagggcucaggcag

SEQ ID NO: 20049 - RNA, 20 nt, Artificial Sequence
  Guide RNA
uaugcauacauacacugguc

SEQ ID NO: 20050 - RNA, 20 nt, Artificial Sequence
  Guide RNA
uaugcauagggcucaggcag

SEQ ID NO: 20051 - RNA, 20 nt, Artificial Sequence
  Guide RNA
uauguaugcacagggcucag

SEQ ID NO: 20052 - RNA, 20 nt, Artificial Sequence
  Guide RNA
uauguaugcauagggcucag

SEQ ID NO: 20053 - RNA, 20 nt, Artificial Sequence
  Guide RNA
ugagcccuaugcauacauac

SEQ ID NO: 20054 - RNA, 20 nt, Artificial Sequence
  Guide RNA
ugagcccugugcauacauac

SEQ ID NO: 20055 - RNA, 20 nt, Artificial Sequence
  Guide RNA
ugcacagggcucaggcaggu

SEQ ID NO: 20056 - RNA, 20 nt, Artificial Sequence
  Guide RNA
ugcauagggcucaggcaggu

SEQ ID NO: 20057 - RNA, 20 nt, Artificial Sequence
  Guide RNA
ugccugagcccuaugcauac

SEQ ID NO: 20058 - RNA, 20 nt, Artificial Sequence
  Guide RNA
ugccugagcccugugcauac

SEQ ID NO: 20059 - RNA, 20 nt, Artificial Sequence
  Guide RNA
uguaugcacagggcucaggc

SEQ ID NO: 20060 - RNA, 20 nt, Artificial Sequence
  Guide RNA
uguaugcauagggcucaggc

SEQ ID NO: 20061 - RNA, 20 nt, Artificial Sequence
  Guide RNA
uguauguaugcacagggcuc

SEQ ID NO: 20062 - RNA, 20 nt, Artificial Sequence
  Guide RNA
uguauguaugcauagggcuc

SEQ ID NO: 20063 - RNA, 20 nt, Artificial Sequence
  Guide RNA
ugugcauacauacacugguc

SEQ ID NO: 20064 - RNA, 20 nt, Artificial Sequence
  Guide RNA
uuaccugccugagcccuaug

SEQ ID NO: 20065 - RNA, 20 nt, Artificial Sequence
  Guide RNA
uuaccugccugagcccugug

SEQ ID NO: 20066 - RNA, 20 nt, Artificial Sequence
  Guide RNA
uuuaccugccugagcccuau

SEQ ID NO: 20067 - RNA, 20 nt, Artificial Sequence
  Guide RNA
uuuaccugccugagcccugu

SEQ ID NO: 20068 - RNA, 20 nt, Artificial Sequence
  Guide RNA
uuuuaccugccugagcccua

SEQ ID NO: 20069 - RNA, 20 nt, Artificial Sequence
  Guide RNA
uuuuaccugccugagcccug

SEQ ID NO: 20070 - RNA, 20 nt, Artificial Sequence
  Guide RNA
uuuuuaccugccugagcccu

SEQ ID NO: 20071 - RNA, 21 nt, Artificial Sequence
  Guide RNA
aaaagaccaguguauguaugc

SEQ ID NO: 20072 - RNA, 21 nt, Artificial Sequence
  Guide RNA
aaagaccaguguauguaugca

SEQ ID NO: 20073 - RNA, 21 nt, Artificial Sequence
  Guide RNA
aagaccaguguauguaugcac

SEQ ID NO: 20074 - RNA, 21 nt, Artificial Sequence
  Guide RNA
aagaccaguguauguaugcau

SEQ ID NO: 20075 - RNA, 21 nt, Artificial Sequence
  Guide RNA
aaguuuuuaccugccugagcc

SEQ ID NO: 20076 - RNA, 21 nt, Artificial Sequence
  Guide RNA
acagggcucaggcagguaaaa

SEQ ID NO: 20077 - RNA, 21 nt, Artificial Sequence
  Guide RNA
accaguguauguaugcacagg

SEQ ID NO: 20078 - RNA, 21 nt, Artificial Sequence
  Guide RNA
accaguguauguaugcauagg

SEQ ID NO: 20079 - RNA, 21 nt, Artificial Sequence
  Guide RNA
accugccugagcccuaugcau

SEQ ID NO: 20080 - RNA, 21 nt, Artificial Sequence
  Guide RNA
accugccugagcccugugcau

SEQ ID NO: 20081 - RNA, 21 nt, Artificial Sequence
  Guide RNA
agaccaguguauguaugcaca

SEQ ID NO: 20082 - RNA, 21 nt, Artificial Sequence
  Guide RNA
agaccaguguauguaugcaua

SEQ ID NO: 20083 - RNA, 21 nt, Artificial Sequence
  Guide RNA
agcccuaugcauacauacacu

SEQ ID NO: 20084 - RNA, 21 nt, Artificial Sequence
  Guide RNA
agcccugugcauacauacacu

SEQ ID NO: 20085 - RNA, 21 nt, Artificial Sequence
  Guide RNA
aguguauguaugcacagggcu

SEQ ID NO: 20086 - RNA, 21 nt, Artificial Sequence
  Guide RNA
aguguauguaugcauagggcu

SEQ ID NO: 20087 - RNA, 21 nt, Artificial Sequence
  Guide RNA
aguuuuuaccugccugagccc

SEQ ID NO: 20088 - RNA, 21 nt, Artificial Sequence
  Guide RNA
auagggcucaggcagguaaaa

SEQ ID NO: 20089 - RNA, 21 nt, Artificial Sequence
  Guide RNA
augcacagggcucaggcaggu

SEQ ID NO: 20090 - RNA, 21 nt, Artificial Sequence
  Guide RNA
augcauagggcucaggcaggu

SEQ ID NO: 20091 - RNA, 21 nt, Artificial Sequence
  Guide RNA
auguaugcacagggcucaggc

SEQ ID NO: 20092 - RNA, 21 nt, Artificial Sequence
  Guide RNA
auguaugcauagggcucaggc

SEQ ID NO: 20093 - RNA, 21 nt, Artificial Sequence
  Guide RNA
caaaagaccaguguauguaug

SEQ ID NO: 20094 - RNA, 21 nt, Artificial Sequence
  Guide RNA
caaguuuuuaccugccugagc

SEQ ID NO: 20095 - RNA, 21 nt, Artificial Sequence
  Guide RNA
cacagggcucaggcagguaaa

SEQ ID NO: 20096 - RNA, 21 nt, Artificial Sequence
  Guide RNA
caguguauguaugcacagggc

SEQ ID NO: 20097 - RNA, 21 nt, Artificial Sequence
  Guide RNA
caguguauguaugcauagggc

SEQ ID NO: 20098 - RNA, 21 nt, Artificial Sequence
  Guide RNA
cauagggcucaggcagguaaa

SEQ ID NO: 20099 - RNA, 21 nt, Artificial Sequence
  Guide RNA
ccaaaagaccaguguauguau

SEQ ID NO: 20100 - RNA, 21 nt, Artificial Sequence
  Guide RNA
ccaguguauguaugcacaggg

SEQ ID NO: 20101 - RNA, 21 nt, Artificial Sequence
  Guide RNA
ccaguguauguaugcauaggg

SEQ ID NO: 20102 - RNA, 21 nt, Artificial Sequence
  Guide RNA
cccuaugcauacauacacugg

SEQ ID NO: 20103 - RNA, 21 nt, Artificial Sequence
  Guide RNA
cccugugcauacauacacugg

SEQ ID NO: 20104 - RNA, 21 nt, Artificial Sequence
  Guide RNA
ccuaugcauacauacacuggu

SEQ ID NO: 20105 - RNA, 21 nt, Artificial Sequence
  Guide RNA
ccugagcccuaugcauacaua

SEQ ID NO: 20106 - RNA, 21 nt, Artificial Sequence
  Guide RNA
ccugagcccugugcauacaua

SEQ ID NO: 20107 - RNA, 21 nt, Artificial Sequence
  Guide RNA
ccugccugagcccuaugcaua

SEQ ID NO: 20108 - RNA, 21 nt, Artificial Sequence
  Guide RNA
ccugccugagcccugugcaua

SEQ ID NO: 20109 - RNA, 21 nt, Artificial Sequence
  Guide RNA
ccugugcauacauacacuggu

SEQ ID NO: 20110 - RNA, 21 nt, Artificial Sequence
  Guide RNA
cuaugcauacauacacugguc

SEQ ID NO: 20111 - RNA, 21 nt, Artificial Sequence
  Guide RNA
cugagcccuaugcauacauac

SEQ ID NO: 20112 - RNA, 21 nt, Artificial Sequence
  Guide RNA
cugagcccugugcauacauac

SEQ ID NO: 20113 - RNA, 21 nt, Artificial Sequence
  Guide RNA
cugccugagcccuaugcauac

SEQ ID NO: 20114 - RNA, 21 nt, Artificial Sequence
  Guide RNA
cugccugagcccugugcauac

SEQ ID NO: 20115 - RNA, 21 nt, Artificial Sequence
  Guide RNA
cugugcauacauacacugguc

SEQ ID NO: 20116 - RNA, 21 nt, Artificial Sequence
  Guide RNA
gaccaguguauguaugcacag

SEQ ID NO: 20117 - RNA, 21 nt, Artificial Sequence
  Guide RNA
gaccaguguauguaugcauag

SEQ ID NO: 20118 - RNA, 21 nt, Artificial Sequence
  Guide RNA
gagcccuaugcauacauacac

SEQ ID NO: 20119 - RNA, 21 nt, Artificial Sequence
  Guide RNA
gagcccugugcauacauacac

SEQ ID NO: 20120 - RNA, 21 nt, Artificial Sequence
  Guide RNA
gcacagggcucaggcagguaa

SEQ ID NO: 20121 - RNA, 21 nt, Artificial Sequence
  Guide RNA
gcauagggcucaggcagguaa

SEQ ID NO: 20122 - RNA, 21 nt, Artificial Sequence
  Guide RNA
gcccuaugcauacauacacug

SEQ ID NO: 20123 - RNA, 21 nt, Artificial Sequence
  Guide RNA
gcccugugcauacauacacug

SEQ ID NO: 20124 - RNA, 21 nt, Artificial Sequence
  Guide RNA
gccugagcccuaugcauacau

SEQ ID NO: 20125 - RNA, 21 nt, Artificial Sequence
  Guide RNA
gccugagcccugugcauacau

SEQ ID NO: 20126 - RNA, 21 nt, Artificial Sequence
  Guide RNA
guaugcacagggcucaggcag

SEQ ID NO: 20127 - RNA, 21 nt, Artificial Sequence
  Guide RNA
guaugcauagggcucaggcag

SEQ ID NO: 20128 - RNA, 21 nt, Artificial Sequence
  Guide RNA
guauguaugcacagggcucag

SEQ ID NO: 20129 - RNA, 21 nt, Artificial Sequence
  Guide RNA
guauguaugcauagggcucag

SEQ ID NO: 20130 - RNA, 21 nt, Artificial Sequence
  Guide RNA
guguauguaugcacagggcuc

SEQ ID NO: 20131 - RNA, 21 nt, Artificial Sequence
  Guide RNA
guguauguaugcauagggcuc

SEQ ID NO: 20132 - RNA, 21 nt, Artificial Sequence
  Guide RNA
guuuuuaccugccugagcccu

SEQ ID NO: 20133 - RNA, 21 nt, Artificial Sequence
  Guide RNA
uaccugccugagcccuaugca

SEQ ID NO: 20134 - RNA, 21 nt, Artificial Sequence
  Guide RNA
uaccugccugagcccugugca

SEQ ID NO: 20135 - RNA, 21 nt, Artificial Sequence
  Guide RNA
uaugcacagggcucaggcagg

SEQ ID NO: 20136 - RNA, 21 nt, Artificial Sequence
  Guide RNA
uaugcauacauacacuggucu

SEQ ID NO: 20137 - RNA, 21 nt, Artificial Sequence
  Guide RNA
uaugcauagggcucaggcagg

SEQ ID NO: 20138 - RNA, 21 nt, Artificial Sequence
  Guide RNA
uauguaugcacagggcucagg

SEQ ID NO: 20139 - RNA, 21 nt, Artificial Sequence
  Guide RNA
uauguaugcauagggcucagg

SEQ ID NO: 20140 - RNA, 21 nt, Artificial Sequence
  Guide RNA
ugagcccuaugcauacauaca

SEQ ID NO: 20141 - RNA, 21 nt, Artificial Sequence
  Guide RNA
ugagcccugugcauacauaca

SEQ ID NO: 20142 - RNA, 21 nt, Artificial Sequence
  Guide RNA
ugcacagggcucaggcaggua

SEQ ID NO: 20143 - RNA, 21 nt, Artificial Sequence
  Guide RNA
ugcauagggcucaggcaggua

SEQ ID NO: 20144 - RNA, 21 nt, Artificial Sequence
  Guide RNA
ugccugagcccuaugcauaca

SEQ ID NO: 20145 - RNA, 21 nt, Artificial Sequence
  Guide RNA
ugccugagcccugugcauaca

SEQ ID NO: 20146 - RNA, 21 nt, Artificial Sequence
  Guide RNA
uguaugcacagggcucaggca

SEQ ID NO: 20147 - RNA, 21 nt, Artificial Sequence
  Guide RNA
uguaugcauagggcucaggca

SEQ ID NO: 20148 - RNA, 21 nt, Artificial Sequence
  Guide RNA
uguauguaugcacagggcuca

SEQ ID NO: 20149 - RNA, 21 nt, Artificial Sequence
  Guide RNA
uguauguaugcauagggcuca

SEQ ID NO: 20150 - RNA, 21 nt, Artificial Sequence
  Guide RNA
ugugcauacauacacuggucu

SEQ ID NO: 20151 - RNA, 21 nt, Artificial Sequence
  Guide RNA
uuaccugccugagcccuaugc

SEQ ID NO: 20152 - RNA, 21 nt, Artificial Sequence
  Guide RNA
uuaccugccugagcccugugc

SEQ ID NO: 20153 - RNA, 21 nt, Artificial Sequence
  Guide RNA
uuuaccugccugagcccuaug

SEQ ID NO: 20154 - RNA, 21 nt, Artificial Sequence
  Guide RNA
uuuaccugccugagcccugug

SEQ ID NO: 20155 - RNA, 21 nt, Artificial Sequence
  Guide RNA
uuuuaccugccugagcccuau

SEQ ID NO: 20156 - RNA, 21 nt, Artificial Sequence
  Guide RNA
uuuuaccugccugagcccugu

SEQ ID NO: 20157 - RNA, 21 nt, Artificial Sequence
  Guide RNA
uuuuuaccugccugagcccua

SEQ ID NO: 20158 - RNA, 21 nt, Artificial Sequence
  Guide RNA
uuuuuaccugccugagcccug

SEQ ID NO: 20159 - RNA, 22 nt, Artificial Sequence
  Guide RNA
aaaagaccaguguauguaugca

SEQ ID NO: 20160 - RNA, 22 nt, Artificial Sequence
  Guide RNA
aaagaccaguguauguaugcac

SEQ ID NO: 20161 - RNA, 22 nt, Artificial Sequence
  Guide RNA
aaagaccaguguauguaugcau

SEQ ID NO: 20162 - RNA, 22 nt, Artificial Sequence
  Guide RNA
aagaccaguguauguaugcaca

SEQ ID NO: 20163 - RNA, 22 nt, Artificial Sequence
  Guide RNA
aagaccaguguauguaugcaua

SEQ ID NO: 20164 - RNA, 22 nt, Artificial Sequence
  Guide RNA
aaguuuuuaccugccugagccc

SEQ ID NO: 20165 - RNA, 22 nt, Artificial Sequence
  Guide RNA
acagggcucaggcagguaaaaa

SEQ ID NO: 20166 - RNA, 22 nt, Artificial Sequence
  Guide RNA
accaguguauguaugcacaggg

SEQ ID NO: 20167 - RNA, 22 nt, Artificial Sequence
  Guide RNA
accaguguauguaugcauaggg

SEQ ID NO: 20168 - RNA, 22 nt, Artificial Sequence
  Guide RNA
accugccugagcccuaugcaua

SEQ ID NO: 20169 - RNA, 22 nt, Artificial Sequence
  Guide RNA
accugccugagcccugugcaua

SEQ ID NO: 20170 - RNA, 22 nt, Artificial Sequence
  Guide RNA
agaccaguguauguaugcacag

SEQ ID NO: 20171 - RNA, 22 nt, Artificial Sequence
  Guide RNA
agaccaguguauguaugcauag

SEQ ID NO: 20172 - RNA, 22 nt, Artificial Sequence
  Guide RNA
agcccuaugcauacauacacug

SEQ ID NO: 20173 - RNA, 22 nt, Artificial Sequence
  Guide RNA
agcccugugcauacauacacug

SEQ ID NO: 20174 - RNA, 22 nt, Artificial Sequence
  Guide RNA
aguguauguaugcacagggcuc

SEQ ID NO: 20175 - RNA, 22 nt, Artificial Sequence
  Guide RNA
aguguauguaugcauagggcuc

SEQ ID NO: 20176 - RNA, 22 nt, Artificial Sequence
  Guide RNA
aguuuuuaccugccugagcccu

SEQ ID NO: 20177 - RNA, 22 nt, Artificial Sequence
  Guide RNA
auagggcucaggcagguaaaaa

SEQ ID NO: 20178 - RNA, 22 nt, Artificial Sequence
  Guide RNA
augcacagggcucaggcaggua

SEQ ID NO: 20179 - RNA, 22 nt, Artificial Sequence
  Guide RNA
augcauagggcucaggcaggua

SEQ ID NO: 20180 - RNA, 22 nt, Artificial Sequence
  Guide RNA
auguaugcacagggcucaggca

SEQ ID NO: 20181 - RNA, 22 nt, Artificial Sequence
  Guide RNA
auguaugcauagggcucaggca

SEQ ID NO: 20182 - RNA, 22 nt, Artificial Sequence
  Guide RNA
caaaagaccaguguauguaugc

SEQ ID NO: 20183 - RNA, 22 nt, Artificial Sequence
  Guide RNA
caaguuuuuaccugccugagcc

SEQ ID NO: 20184 - RNA, 22 nt, Artificial Sequence
  Guide RNA
cacagggcucaggcagguaaaa

SEQ ID NO: 20185 - RNA, 22 nt, Artificial Sequence
  Guide RNA
caguguauguaugcacagggcu

SEQ ID NO: 20186 - RNA, 22 nt, Artificial Sequence
  Guide RNA
caguguauguaugcauagggcu

SEQ ID NO: 20187 - RNA, 22 nt, Artificial Sequence
  Guide RNA
cauagggcucaggcagguaaaa

SEQ ID NO: 20188 - RNA, 22 nt, Artificial Sequence
  Guide RNA
ccaaaagaccaguguauguaug

SEQ ID NO: 20189 - RNA, 22 nt, Artificial Sequence
  Guide RNA
ccaaguuuuuaccugccugagc

SEQ ID NO: 20190 - RNA, 22 nt, Artificial Sequence
  Guide RNA
ccaguguauguaugcacagggc

SEQ ID NO: 20191 - RNA, 22 nt, Artificial Sequence
  Guide RNA
ccaguguauguaugcauagggc

SEQ ID NO: 20192 - RNA, 22 nt, Artificial Sequence
  Guide RNA
cccaaaagaccaguguauguau

SEQ ID NO: 20193 - RNA, 22 nt, Artificial Sequence
  Guide RNA
cccuaugcauacauacacuggu

SEQ ID NO: 20194 - RNA, 22 nt, Artificial Sequence
  Guide RNA
cccugugcauacauacacuggu

SEQ ID NO: 20195 - RNA, 22 nt, Artificial Sequence
  Guide RNA
ccuaugcauacauacacugguc

SEQ ID NO: 20196 - RNA, 22 nt, Artificial Sequence
  Guide RNA
ccugagcccuaugcauacauac

SEQ ID NO: 20197 - RNA, 22 nt, Artificial Sequence
  Guide RNA
ccugagcccugugcauacauac

SEQ ID NO: 20198 - RNA, 22 nt, Artificial Sequence
  Guide RNA
ccugccugagcccuaugcauac

SEQ ID NO: 20199 - RNA, 22 nt, Artificial Sequence
  Guide RNA
ccugccugagcccugugcauac

SEQ ID NO: 20200 - RNA, 22 nt, Artificial Sequence
  Guide RNA
ccugugcauacauacacugguc

SEQ ID NO: 20201 - RNA, 22 nt, Artificial Sequence
  Guide RNA
cuaugcauacauacacuggucu

SEQ ID NO: 20202 - RNA, 22 nt, Artificial Sequence
  Guide RNA
cugagcccuaugcauacauaca

SEQ ID NO: 20203 - RNA, 22 nt, Artificial Sequence
  Guide RNA
cugagcccugugcauacauaca

SEQ ID NO: 20204 - RNA, 22 nt, Artificial Sequence
  Guide RNA
cugccugagcccuaugcauaca

SEQ ID NO: 20205 - RNA, 22 nt, Artificial Sequence
  Guide RNA
cugccugagcccugugcauaca

SEQ ID NO: 20206 - RNA, 22 nt, Artificial Sequence
  Guide RNA
cugugcauacauacacuggucu

SEQ ID NO: 20207 - RNA, 22 nt, Artificial Sequence
  Guide RNA
gaccaguguauguaugcacagg

SEQ ID NO: 20208 - RNA, 22 nt, Artificial Sequence
  Guide RNA
gaccaguguauguaugcauagg

SEQ ID NO: 20209 - RNA, 22 nt, Artificial Sequence
  Guide RNA
gagcccuaugcauacauacacu

SEQ ID NO: 20210 - RNA, 22 nt, Artificial Sequence
  Guide RNA
gagcccugugcauacauacacu

SEQ ID NO: 20211 - RNA, 22 nt, Artificial Sequence
  Guide RNA
gcacagggcucaggcagguaaa

SEQ ID NO: 20212 - RNA, 22 nt, Artificial Sequence
  Guide RNA
gcauagggcucaggcagguaaa

SEQ ID NO: 20213 - RNA, 22 nt, Artificial Sequence
  Guide RNA
gcccuaugcauacauacacugg

SEQ ID NO: 20214 - RNA, 22 nt, Artificial Sequence
  Guide RNA
gcccugugcauacauacacugg

SEQ ID NO: 20215 - RNA, 22 nt, Artificial Sequence
  Guide RNA
gccugagcccuaugcauacaua

SEQ ID NO: 20216 - RNA, 22 nt, Artificial Sequence
  Guide RNA
gccugagcccugugcauacaua

SEQ ID NO: 20217 - RNA, 22 nt, Artificial Sequence
  Guide RNA
guaugcacagggcucaggcagg

SEQ ID NO: 20218 - RNA, 22 nt, Artificial Sequence
  Guide RNA
guaugcauagggcucaggcagg

SEQ ID NO: 20219 - RNA, 22 nt, Artificial Sequence
  Guide RNA
guauguaugcacagggcucagg

SEQ ID NO: 20220 - RNA, 22 nt, Artificial Sequence
  Guide RNA
guauguaugcauagggcucagg

SEQ ID NO: 20221 - RNA, 22 nt, Artificial Sequence
  Guide RNA
guguauguaugcacagggcuca

SEQ ID NO: 20222 - RNA, 22 nt, Artificial Sequence
  Guide RNA
guguauguaugcauagggcuca

SEQ ID NO: 20223 - RNA, 22 nt, Artificial Sequence
  Guide RNA
guuuuuaccugccugagcccua

SEQ ID NO: 20224 - RNA, 22 nt, Artificial Sequence
  Guide RNA
guuuuuaccugccugagcccug

SEQ ID NO: 20225 - RNA, 22 nt, Artificial Sequence
  Guide RNA
uaccugccugagcccuaugcau

SEQ ID NO: 20226 - RNA, 22 nt, Artificial Sequence
  Guide RNA
uaccugccugagcccugugcau

SEQ ID NO: 20227 - RNA, 22 nt, Artificial Sequence
  Guide RNA
uaugcacagggcucaggcaggu

SEQ ID NO: 20228 - RNA, 22 nt, Artificial Sequence
  Guide RNA
uaugcauacauacacuggucuu

SEQ ID NO: 20229 - RNA, 22 nt, Artificial Sequence
  Guide RNA
uaugcauagggcucaggcaggu

SEQ ID NO: 20230 - RNA, 22 nt, Artificial Sequence
  Guide RNA
uauguaugcacagggcucaggc

SEQ ID NO: 20231 - RNA, 22 nt, Artificial Sequence
  Guide RNA
uauguaugcauagggcucaggc

SEQ ID NO: 20232 - RNA, 22 nt, Artificial Sequence
  Guide RNA
ugagcccuaugcauacauacac

SEQ ID NO: 20233 - RNA, 22 nt, Artificial Sequence
  Guide RNA
ugagcccugugcauacauacac

SEQ ID NO: 20234 - RNA, 22 nt, Artificial Sequence
  Guide RNA
ugcacagggcucaggcagguaa

SEQ ID NO: 20235 - RNA, 22 nt, Artificial Sequence
  Guide RNA
ugcauagggcucaggcagguaa

SEQ ID NO: 20236 - RNA, 22 nt, Artificial Sequence
  Guide RNA
ugccugagcccuaugcauacau

SEQ ID NO: 20237 - RNA, 22 nt, Artificial Sequence
  Guide RNA
ugccugagcccugugcauacau

SEQ ID NO: 20238 - RNA, 22 nt, Artificial Sequence
  Guide RNA
uguaugcacagggcucaggcag

SEQ ID NO: 20239 - RNA, 22 nt, Artificial Sequence
  Guide RNA
uguaugcauagggcucaggcag

SEQ ID NO: 20240 - RNA, 22 nt, Artificial Sequence
  Guide RNA
uguauguaugcacagggcucag

SEQ ID NO: 20241 - RNA, 22 nt, Artificial Sequence
  Guide RNA
uguauguaugcauagggcucag

SEQ ID NO: 20242 - RNA, 22 nt, Artificial Sequence
  Guide RNA
ugugcauacauacacuggucuu

SEQ ID NO: 20243 - RNA, 22 nt, Artificial Sequence
  Guide RNA
uuaccugccugagcccuaugca

SEQ ID NO: 20244 - RNA, 22 nt, Artificial Sequence
  Guide RNA
uuaccugccugagcccugugca

SEQ ID NO: 20245 - RNA, 22 nt, Artificial Sequence
  Guide RNA
uuuaccugccugagcccuaugc

SEQ ID NO: 20246 - RNA, 22 nt, Artificial Sequence
  Guide RNA
uuuaccugccugagcccugugc

SEQ ID NO: 20247 - RNA, 22 nt, Artificial Sequence
  Guide RNA
uuuuaccugccugagcccuaug

SEQ ID NO: 20248 - RNA, 22 nt, Artificial Sequence
  Guide RNA
uuuuaccugccugagcccugug

SEQ ID NO: 20249 - RNA, 22 nt, Artificial Sequence
  Guide RNA
uuuuuaccugccugagcccuau

SEQ ID NO: 20250 - RNA, 22 nt, Artificial Sequence
  Guide RNA
uuuuuaccugccugagcccugu

SEQ ID NO: 20251 - RNA, 20 nt, Artificial Sequence
  Guide RNA
aacacuccacgcuucacguc

SEQ ID NO: 20252 - RNA, 20 nt, Artificial Sequence
  Guide RNA
aacacuccaugcuucacguc

SEQ ID NO: 20253 - RNA, 20 nt, Artificial Sequence
  Guide RNA
aagcauggaguguucagcua

SEQ ID NO: 20254 - RNA, 20 nt, Artificial Sequence
  Guide RNA
aagcguggaguguucagcua

SEQ ID NO: 20255 - RNA, 20 nt, Artificial Sequence
  Guide RNA
acacuccacgcuucacgucc

SEQ ID NO: 20256 - RNA, 20 nt, Artificial Sequence
  Guide RNA
acacuccaugcuucacgucc

SEQ ID NO: 20257 - RNA, 20 nt, Artificial Sequence
  Guide RNA
accuagcugaacacuccacg

SEQ ID NO: 20258 - RNA, 20 nt, Artificial Sequence
  Guide RNA
accuagcugaacacuccaug

SEQ ID NO: 20259 - RNA, 20 nt, Artificial Sequence
  Guide RNA
acgcuucacguccacacacg

SEQ ID NO: 20260 - RNA, 20 nt, Artificial Sequence
  Guide RNA
acgugaagcauggaguguuc

SEQ ID NO: 20261 - RNA, 20 nt, Artificial Sequence
  Guide RNA
acgugaagcguggaguguuc

SEQ ID NO: 20262 - RNA, 20 nt, Artificial Sequence
  Guide RNA
acuccacgcuucacguccac

SEQ ID NO: 20263 - RNA, 20 nt, Artificial Sequence
  Guide RNA
acuccaugcuucacguccac

SEQ ID NO: 20264 - RNA, 20 nt, Artificial Sequence
  Guide RNA
agcauggaguguucagcuag

SEQ ID NO: 20265 - RNA, 20 nt, Artificial Sequence
  Guide RNA
agcguggaguguucagcuag

SEQ ID NO: 20266 - RNA, 20 nt, Artificial Sequence
  Guide RNA
agcugaacacuccacgcuuc

SEQ ID NO: 20267 - RNA, 20 nt, Artificial Sequence
  Guide RNA
agcugaacacuccaugcuuc

SEQ ID NO: 20268 - RNA, 20 nt, Artificial Sequence
  Guide RNA
aggggcguguguggacguga

SEQ ID NO: 20269 - RNA, 20 nt, Artificial Sequence
  Guide RNA
augcuucacguccacacacg

SEQ ID NO: 20270 - RNA, 20 nt, Artificial Sequence
  Guide RNA
cacgcuucacguccacacac

SEQ ID NO: 20271 - RNA, 20 nt, Artificial Sequence
  Guide RNA
cacuccacgcuucacgucca

SEQ ID NO: 20272 - RNA, 20 nt, Artificial Sequence
  Guide RNA
cacuccaugcuucacgucca

SEQ ID NO: 20273 - RNA, 20 nt, Artificial Sequence
  Guide RNA
caugcuucacguccacacac

SEQ ID NO: 20274 - RNA, 20 nt, Artificial Sequence
  Guide RNA
cauggaguguucagcuaggu

SEQ ID NO: 20275 - RNA, 20 nt, Artificial Sequence
  Guide RNA
ccacgcuucacguccacaca

SEQ ID NO: 20276 - RNA, 20 nt, Artificial Sequence
  Guide RNA
ccaugcuucacguccacaca

SEQ ID NO: 20277 - RNA, 20 nt, Artificial Sequence
  Guide RNA
ccuagcugaacacuccacgc

SEQ ID NO: 20278 - RNA, 20 nt, Artificial Sequence
  Guide RNA
ccuagcugaacacuccaugc

SEQ ID NO: 20279 - RNA, 20 nt, Artificial Sequence
  Guide RNA
ccuggaccuagcugaacacu

SEQ ID NO: 20280 - RNA, 20 nt, Artificial Sequence
  Guide RNA
cgugaagcauggaguguuca

SEQ ID NO: 20281 - RNA, 20 nt, Artificial Sequence
  Guide RNA
cgugaagcguggaguguuca

SEQ ID NO: 20282 - RNA, 20 nt, Artificial Sequence
  Guide RNA
cguggaguguucagcuaggu

SEQ ID NO: 20283 - RNA, 20 nt, Artificial Sequence
  Guide RNA
cguguguggacgugaagcau

SEQ ID NO: 20284 - RNA, 20 nt, Artificial Sequence
  Guide RNA
cguguguggacgugaagcgu

SEQ ID NO: 20285 - RNA, 20 nt, Artificial Sequence
  Guide RNA
cuagcugaacacuccacgcu

SEQ ID NO: 20286 - RNA, 20 nt, Artificial Sequence
  Guide RNA
cuagcugaacacuccaugcu

SEQ ID NO: 20287 - RNA, 20 nt, Artificial Sequence
  Guide RNA
cuccacgcuucacguccaca

SEQ ID NO: 20288 - RNA, 20 nt, Artificial Sequence
  Guide RNA
cuccaugcuucacguccaca

SEQ ID NO: 20289 - RNA, 20 nt, Artificial Sequence
  Guide RNA
cugaacacuccacgcuucac

SEQ ID NO: 20290 - RNA, 20 nt, Artificial Sequence
  Guide RNA
cugaacacuccaugcuucac

SEQ ID NO: 20291 - RNA, 20 nt, Artificial Sequence
  Guide RNA
cuggaccuagcugaacacuc

SEQ ID NO: 20292 - RNA, 20 nt, Artificial Sequence
  Guide RNA
gaacacuccacgcuucacgu

SEQ ID NO: 20293 - RNA, 20 nt, Artificial Sequence
  Guide RNA
gaacacuccaugcuucacgu

SEQ ID NO: 20294 - RNA, 20 nt, Artificial Sequence
  Guide RNA
gaagcauggaguguucagcu

SEQ ID NO: 20295 - RNA, 20 nt, Artificial Sequence
  Guide RNA
gaagcguggaguguucagcu

SEQ ID NO: 20296 - RNA, 20 nt, Artificial Sequence
  Guide RNA
gaccuagcugaacacuccac

SEQ ID NO: 20297 - RNA, 20 nt, Artificial Sequence
  Guide RNA
gaccuagcugaacacuccau

SEQ ID NO: 20298 - RNA, 20 nt, Artificial Sequence
  Guide RNA
gacgugaagcauggaguguu

SEQ ID NO: 20299 - RNA, 20 nt, Artificial Sequence
  Guide RNA
gacgugaagcguggaguguu

SEQ ID NO: 20300 - RNA, 20 nt, Artificial Sequence
  Guide RNA
gcauggaguguucagcuagg

SEQ ID NO: 20301 - RNA, 20 nt, Artificial Sequence
  Guide RNA
gcguggaguguucagcuagg

SEQ ID NO: 20302 - RNA, 20 nt, Artificial Sequence
  Guide RNA
gcguguguggacgugaagca

SEQ ID NO: 20303 - RNA, 20 nt, Artificial Sequence
  Guide RNA
gcguguguggacgugaagcg

SEQ ID NO: 20304 - RNA, 20 nt, Artificial Sequence
  Guide RNA
gcugaacacuccacgcuuca

SEQ ID NO: 20305 - RNA, 20 nt, Artificial Sequence
  Guide RNA
gcugaacacuccaugcuuca

SEQ ID NO: 20306 - RNA, 20 nt, Artificial Sequence
  Guide RNA
ggaccuagcugaacacucca

SEQ ID NO: 20307 - RNA, 20 nt, Artificial Sequence
  Guide RNA
ggacgugaagcauggagugu

SEQ ID NO: 20308 - RNA, 20 nt, Artificial Sequence
  Guide RNA
ggacgugaagcguggagugu

SEQ ID NO: 20309 - RNA, 20 nt, Artificial Sequence
  Guide RNA
ggcguguguggacgugaagc

SEQ ID NO: 20310 - RNA, 20 nt, Artificial Sequence
  Guide RNA
gggcguguguggacgugaag

SEQ ID NO: 20311 - RNA, 20 nt, Artificial Sequence
  Guide RNA
ggggcguguguggacgugaa

SEQ ID NO: 20312 - RNA, 20 nt, Artificial Sequence
  Guide RNA
gugaagcauggaguguucag

SEQ ID NO: 20313 - RNA, 20 nt, Artificial Sequence
  Guide RNA
gugaagcguggaguguucag

SEQ ID NO: 20314 - RNA, 20 nt, Artificial Sequence
  Guide RNA
guggacgugaagcauggagu

SEQ ID NO: 20315 - RNA, 20 nt, Artificial Sequence
  Guide RNA
guggacgugaagcguggagu

SEQ ID NO: 20316 - RNA, 20 nt, Artificial Sequence
  Guide RNA
guguggacgugaagcaugga

SEQ ID NO: 20317 - RNA, 20 nt, Artificial Sequence
  Guide RNA
guguggacgugaagcgugga

SEQ ID NO: 20318 - RNA, 20 nt, Artificial Sequence
  Guide RNA
guguguggacgugaagcaug

SEQ ID NO: 20319 - RNA, 20 nt, Artificial Sequence
  Guide RNA
guguguggacgugaagcgug

SEQ ID NO: 20320 - RNA, 20 nt, Artificial Sequence
  Guide RNA
uagcugaacacuccacgcuu

SEQ ID NO: 20321 - RNA, 20 nt, Artificial Sequence
  Guide RNA
uagcugaacacuccaugcuu

SEQ ID NO: 20322 - RNA, 20 nt, Artificial Sequence
  Guide RNA
uccacgcuucacguccacac

SEQ ID NO: 20323 - RNA, 20 nt, Artificial Sequence
  Guide RNA
uccaugcuucacguccacac

SEQ ID NO: 20324 - RNA, 20 nt, Artificial Sequence
  Guide RNA
ugaacacuccacgcuucacg

SEQ ID NO: 20325 - RNA, 20 nt, Artificial Sequence
  Guide RNA
ugaacacuccaugcuucacg

SEQ ID NO: 20326 - RNA, 20 nt, Artificial Sequence
  Guide RNA
ugaagcauggaguguucagc

SEQ ID NO: 20327 - RNA, 20 nt, Artificial Sequence
  Guide RNA
ugaagcguggaguguucagc

SEQ ID NO: 20328 - RNA, 20 nt, Artificial Sequence
  Guide RNA
uggaccuagcugaacacucc

SEQ ID NO: 20329 - RNA, 20 nt, Artificial Sequence
  Guide RNA
uggacgugaagcauggagug

SEQ ID NO: 20330 - RNA, 20 nt, Artificial Sequence
  Guide RNA
uggacgugaagcguggagug

SEQ ID NO: 20331 - RNA, 20 nt, Artificial Sequence
  Guide RNA
uguggacgugaagcauggag

SEQ ID NO: 20332 - RNA, 20 nt, Artificial Sequence
  Guide RNA
uguggacgugaagcguggag

SEQ ID NO: 20333 - RNA, 20 nt, Artificial Sequence
  Guide RNA
uguguggacgugaagcaugg

SEQ ID NO: 20334 - RNA, 20 nt, Artificial Sequence
  Guide RNA
uguguggacgugaagcgugg

SEQ ID NO: 20335 - RNA, 21 nt, Artificial Sequence
  Guide RNA
aacacuccacgcuucacgucc

SEQ ID NO: 20336 - RNA, 21 nt, Artificial Sequence
  Guide RNA
aacacuccaugcuucacgucc

SEQ ID NO: 20337 - RNA, 21 nt, Artificial Sequence
  Guide RNA
aagcauggaguguucagcuag

SEQ ID NO: 20338 - RNA, 21 nt, Artificial Sequence
  Guide RNA
aagcguggaguguucagcuag

SEQ ID NO: 20339 - RNA, 21 nt, Artificial Sequence
  Guide RNA
aaggggcguguguggacguga

SEQ ID NO: 20340 - RNA, 21 nt, Artificial Sequence
  Guide RNA
acacuccacgcuucacgucca

SEQ ID NO: 20341 - RNA, 21 nt, Artificial Sequence
  Guide RNA
acacuccaugcuucacgucca

SEQ ID NO: 20342 - RNA, 21 nt, Artificial Sequence
  Guide RNA
accuagcugaacacuccacgc

SEQ ID NO: 20343 - RNA, 21 nt, Artificial Sequence
  Guide RNA
accuagcugaacacuccaugc

SEQ ID NO: 20344 - RNA, 21 nt, Artificial Sequence
  Guide RNA
acgcuucacguccacacacgc

SEQ ID NO: 20345 - RNA, 21 nt, Artificial Sequence
  Guide RNA
acgugaagcauggaguguuca

SEQ ID NO: 20346 - RNA, 21 nt, Artificial Sequence
  Guide RNA
acgugaagcguggaguguuca

SEQ ID NO: 20347 - RNA, 21 nt, Artificial Sequence
  Guide RNA
acuccacgcuucacguccaca

SEQ ID NO: 20348 - RNA, 21 nt, Artificial Sequence
  Guide RNA
acuccaugcuucacguccaca

SEQ ID NO: 20349 - RNA, 21 nt, Artificial Sequence
  Guide RNA
agcauggaguguucagcuagg

SEQ ID NO: 20350 - RNA, 21 nt, Artificial Sequence
  Guide RNA
agcguggaguguucagcuagg

SEQ ID NO: 20351 - RNA, 21 nt, Artificial Sequence
  Guide RNA
agcugaacacuccacgcuuca

SEQ ID NO: 20352 - RNA, 21 nt, Artificial Sequence
  Guide RNA
agcugaacacuccaugcuuca

SEQ ID NO: 20353 - RNA, 21 nt, Artificial Sequence
  Guide RNA
aggggcguguguggacgugaa

SEQ ID NO: 20354 - RNA, 21 nt, Artificial Sequence
  Guide RNA
augcuucacguccacacacgc

SEQ ID NO: 20355 - RNA, 21 nt, Artificial Sequence
  Guide RNA
cacgcuucacguccacacacg

SEQ ID NO: 20356 - RNA, 21 nt, Artificial Sequence
  Guide RNA
cacuccacgcuucacguccac

SEQ ID NO: 20357 - RNA, 21 nt, Artificial Sequence
  Guide RNA
cacuccaugcuucacguccac

SEQ ID NO: 20358 - RNA, 21 nt, Artificial Sequence
  Guide RNA
caugcuucacguccacacacg

SEQ ID NO: 20359 - RNA, 21 nt, Artificial Sequence
  Guide RNA
cauggaguguucagcuagguc

SEQ ID NO: 20360 - RNA, 21 nt, Artificial Sequence
  Guide RNA
ccacgcuucacguccacacac

SEQ ID NO: 20361 - RNA, 21 nt, Artificial Sequence
  Guide RNA
ccaugcuucacguccacacac

SEQ ID NO: 20362 - RNA, 21 nt, Artificial Sequence
  Guide RNA
ccuagcugaacacuccacgcu

SEQ ID NO: 20363 - RNA, 21 nt, Artificial Sequence
  Guide RNA
ccuagcugaacacuccaugcu

SEQ ID NO: 20364 - RNA, 21 nt, Artificial Sequence
  Guide RNA
ccuggaccuagcugaacacuc

SEQ ID NO: 20365 - RNA, 21 nt, Artificial Sequence
  Guide RNA
cgugaagcauggaguguucag

SEQ ID NO: 20366 - RNA, 21 nt, Artificial Sequence
  Guide RNA
cgugaagcguggaguguucag

SEQ ID NO: 20367 - RNA, 21 nt, Artificial Sequence
  Guide RNA
cguggaguguucagcuagguc

SEQ ID NO: 20368 - RNA, 21 nt, Artificial Sequence
  Guide RNA
cguguguggacgugaagcaug

SEQ ID NO: 20369 - RNA, 21 nt, Artificial Sequence
  Guide RNA
cguguguggacgugaagcgug

SEQ ID NO: 20370 - RNA, 21 nt, Artificial Sequence
  Guide RNA
cuagcugaacacuccacgcuu

SEQ ID NO: 20371 - RNA, 21 nt, Artificial Sequence
  Guide RNA
cuagcugaacacuccaugcuu

SEQ ID NO: 20372 - RNA, 21 nt, Artificial Sequence
  Guide RNA
cuccacgcuucacguccacac

SEQ ID NO: 20373 - RNA, 21 nt, Artificial Sequence
  Guide RNA
cuccaugcuucacguccacac

SEQ ID NO: 20374 - RNA, 21 nt, Artificial Sequence
  Guide RNA
cugaacacuccacgcuucacg

SEQ ID NO: 20375 - RNA, 21 nt, Artificial Sequence
  Guide RNA
cugaacacuccaugcuucacg

SEQ ID NO: 20376 - RNA, 21 nt, Artificial Sequence
  Guide RNA
cuggaccuagcugaacacucc

SEQ ID NO: 20377 - RNA, 21 nt, Artificial Sequence
  Guide RNA
gaacacuccacgcuucacguc

SEQ ID NO: 20378 - RNA, 21 nt, Artificial Sequence
  Guide RNA
gaacacuccaugcuucacguc

SEQ ID NO: 20379 - RNA, 21 nt, Artificial Sequence
  Guide RNA
gaagcauggaguguucagcua

SEQ ID NO: 20380 - RNA, 21 nt, Artificial Sequence
  Guide RNA
gaagcguggaguguucagcua

SEQ ID NO: 20381 - RNA, 21 nt, Artificial Sequence
  Guide RNA
gaccuagcugaacacuccacg

SEQ ID NO: 20382 - RNA, 21 nt, Artificial Sequence
  Guide RNA
gaccuagcugaacacuccaug

SEQ ID NO: 20383 - RNA, 21 nt, Artificial Sequence
  Guide RNA
gacgugaagcauggaguguuc

SEQ ID NO: 20384 - RNA, 21 nt, Artificial Sequence
  Guide RNA
gacgugaagcguggaguguuc

SEQ ID NO: 20385 - RNA, 21 nt, Artificial Sequence
  Guide RNA
gcauggaguguucagcuaggu

SEQ ID NO: 20386 - RNA, 21 nt, Artificial Sequence
  Guide RNA
gccuggaccuagcugaacacu

SEQ ID NO: 20387 - RNA, 21 nt, Artificial Sequence
  Guide RNA
gcguggaguguucagcuaggu

SEQ ID NO: 20388 - RNA, 21 nt, Artificial Sequence
  Guide RNA
gcguguguggacgugaagcau

SEQ ID NO: 20389 - RNA, 21 nt, Artificial Sequence
  Guide RNA
gcguguguggacgugaagcgu

SEQ ID NO: 20390 - RNA, 21 nt, Artificial Sequence
  Guide RNA
gcugaacacuccacgcuucac

SEQ ID NO: 20391 - RNA, 21 nt, Artificial Sequence
  Guide RNA
gcugaacacuccaugcuucac

SEQ ID NO: 20392 - RNA, 21 nt, Artificial Sequence
  Guide RNA
ggaccuagcugaacacuccac

SEQ ID NO: 20393 - RNA, 21 nt, Artificial Sequence
  Guide RNA
ggaccuagcugaacacuccau

SEQ ID NO: 20394 - RNA, 21 nt, Artificial Sequence
  Guide RNA
ggacgugaagcauggaguguu

SEQ ID NO: 20395 - RNA, 21 nt, Artificial Sequence
  Guide RNA
ggacgugaagcguggaguguu

SEQ ID NO: 20396 - RNA, 21 nt, Artificial Sequence
  Guide RNA
ggcguguguggacgugaagca

SEQ ID NO: 20397 - RNA, 21 nt, Artificial Sequence
  Guide RNA
ggcguguguggacgugaagcg

SEQ ID NO: 20398 - RNA, 21 nt, Artificial Sequence
  Guide RNA
gggcguguguggacgugaagc

SEQ ID NO: 20399 - RNA, 21 nt, Artificial Sequence
  Guide RNA
ggggcguguguggacgugaag

SEQ ID NO: 20400 - RNA, 21 nt, Artificial Sequence
  Guide RNA
gugaagcauggaguguucagc

SEQ ID NO: 20401 - RNA, 21 nt, Artificial Sequence
  Guide RNA
gugaagcguggaguguucagc

SEQ ID NO: 20402 - RNA, 21 nt, Artificial Sequence
  Guide RNA
guggacgugaagcauggagug

SEQ ID NO: 20403 - RNA, 21 nt, Artificial Sequence
  Guide RNA
guggacgugaagcguggagug

SEQ ID NO: 20404 - RNA, 21 nt, Artificial Sequence
  Guide RNA
guguggacgugaagcauggag

SEQ ID NO: 20405 - RNA, 21 nt, Artificial Sequence
  Guide RNA
guguggacgugaagcguggag

SEQ ID NO: 20406 - RNA, 21 nt, Artificial Sequence
  Guide RNA
guguguggacgugaagcaugg

SEQ ID NO: 20407 - RNA, 21 nt, Artificial Sequence
  Guide RNA
guguguggacgugaagcgugg

SEQ ID NO: 20408 - RNA, 21 nt, Artificial Sequence
  Guide RNA
uagcugaacacuccacgcuuc

SEQ ID NO: 20409 - RNA, 21 nt, Artificial Sequence
  Guide RNA
uagcugaacacuccaugcuuc

SEQ ID NO: 20410 - RNA, 21 nt, Artificial Sequence
  Guide RNA
uccacgcuucacguccacaca

SEQ ID NO: 20411 - RNA, 21 nt, Artificial Sequence
  Guide RNA
uccaugcuucacguccacaca

SEQ ID NO: 20412 - RNA, 21 nt, Artificial Sequence
  Guide RNA
ugaacacuccacgcuucacgu

SEQ ID NO: 20413 - RNA, 21 nt, Artificial Sequence
  Guide RNA
ugaacacuccaugcuucacgu

SEQ ID NO: 20414 - RNA, 21 nt, Artificial Sequence
  Guide RNA
ugaagcauggaguguucagcu

SEQ ID NO: 20415 - RNA, 21 nt, Artificial Sequence
  Guide RNA
ugaagcguggaguguucagcu

SEQ ID NO: 20416 - RNA, 21 nt, Artificial Sequence
  Guide RNA
uggaccuagcugaacacucca

SEQ ID NO: 20417 - RNA, 21 nt, Artificial Sequence
  Guide RNA
uggacgugaagcauggagugu

SEQ ID NO: 20418 - RNA, 21 nt, Artificial Sequence
  Guide RNA
uggacgugaagcguggagugu

SEQ ID NO: 20419 - RNA, 21 nt, Artificial Sequence
  Guide RNA
uguggacgugaagcauggagu

SEQ ID NO: 20420 - RNA, 21 nt, Artificial Sequence
  Guide RNA
uguggacgugaagcguggagu

SEQ ID NO: 20421 - RNA, 21 nt, Artificial Sequence
  Guide RNA
uguguggacgugaagcaugga

SEQ ID NO: 20422 - RNA, 21 nt, Artificial Sequence
  Guide RNA
uguguggacgugaagcgugga

SEQ ID NO: 20423 - RNA, 22 nt, Artificial Sequence
  Guide RNA
aaaggggcguguguggacguga

SEQ ID NO: 20424 - RNA, 22 nt, Artificial Sequence
  Guide RNA
aacacuccacgcuucacgucca

SEQ ID NO: 20425 - RNA, 22 nt, Artificial Sequence
  Guide RNA
aacacuccaugcuucacgucca

SEQ ID NO: 20426 - RNA, 22 nt, Artificial Sequence
  Guide RNA
aagcauggaguguucagcuagg

SEQ ID NO: 20427 - RNA, 22 nt, Artificial Sequence
  Guide RNA
aagcguggaguguucagcuagg

SEQ ID NO: 20428 - RNA, 22 nt, Artificial Sequence
  Guide RNA
aaggggcguguguggacgugaa

SEQ ID NO: 20429 - RNA, 22 nt, Artificial Sequence
  Guide RNA
acacuccacgcuucacguccac

SEQ ID NO: 20430 - RNA, 22 nt, Artificial Sequence
  Guide RNA
acacuccaugcuucacguccac

SEQ ID NO: 20431 - RNA, 22 nt, Artificial Sequence
  Guide RNA
accuagcugaacacuccacgcu

SEQ ID NO: 20432 - RNA, 22 nt, Artificial Sequence
  Guide RNA
accuagcugaacacuccaugcu

SEQ ID NO: 20433 - RNA, 22 nt, Artificial Sequence
  Guide RNA
acgcuucacguccacacacgcc

SEQ ID NO: 20434 - RNA, 22 nt, Artificial Sequence
  Guide RNA
acgugaagcauggaguguucag

SEQ ID NO: 20435 - RNA, 22 nt, Artificial Sequence
  Guide RNA
acgugaagcguggaguguucag

SEQ ID NO: 20436 - RNA, 22 nt, Artificial Sequence
  Guide RNA
acuccacgcuucacguccacac

SEQ ID NO: 20437 - RNA, 22 nt, Artificial Sequence
  Guide RNA
acuccaugcuucacguccacac

SEQ ID NO: 20438 - RNA, 22 nt, Artificial Sequence
  Guide RNA
agcauggaguguucagcuaggu

SEQ ID NO: 20439 - RNA, 22 nt, Artificial Sequence
  Guide RNA
agccuggaccuagcugaacacu

SEQ ID NO: 20440 - RNA, 22 nt, Artificial Sequence
  Guide RNA
agcguggaguguucagcuaggu

SEQ ID NO: 20441 - RNA, 22 nt, Artificial Sequence
  Guide RNA
agcugaacacuccacgcuucac

SEQ ID NO: 20442 - RNA, 22 nt, Artificial Sequence
  Guide RNA
agcugaacacuccaugcuucac

SEQ ID NO: 20443 - RNA, 22 nt, Artificial Sequence
  Guide RNA
aggggcguguguggacgugaag

SEQ ID NO: 20444 - RNA, 22 nt, Artificial Sequence
  Guide RNA
augcuucacguccacacacgcc

SEQ ID NO: 20445 - RNA, 22 nt, Artificial Sequence
  Guide RNA
cacgcuucacguccacacacgc

SEQ ID NO: 20446 - RNA, 22 nt, Artificial Sequence
  Guide RNA
cacuccacgcuucacguccaca

SEQ ID NO: 20447 - RNA, 22 nt, Artificial Sequence
  Guide RNA
cacuccaugcuucacguccaca

SEQ ID NO: 20448 - RNA, 22 nt, Artificial Sequence
  Guide RNA
caugcuucacguccacacacgc

SEQ ID NO: 20449 - RNA, 22 nt, Artificial Sequence
  Guide RNA
cauggaguguucagcuaggucc

SEQ ID NO: 20450 - RNA, 22 nt, Artificial Sequence
  Guide RNA
ccacgcuucacguccacacacg

SEQ ID NO: 20451 - RNA, 22 nt, Artificial Sequence
  Guide RNA
ccaugcuucacguccacacacg

SEQ ID NO: 20452 - RNA, 22 nt, Artificial Sequence
  Guide RNA
ccuagcugaacacuccacgcuu

SEQ ID NO: 20453 - RNA, 22 nt, Artificial Sequence
  Guide RNA
ccuagcugaacacuccaugcuu

SEQ ID NO: 20454 - RNA, 22 nt, Artificial Sequence
  Guide RNA
ccuggaccuagcugaacacucc

SEQ ID NO: 20455 - RNA, 22 nt, Artificial Sequence
  Guide RNA
cgugaagcauggaguguucagc

SEQ ID NO: 20456 - RNA, 22 nt, Artificial Sequence
  Guide RNA
cgugaagcguggaguguucagc

SEQ ID NO: 20457 - RNA, 22 nt, Artificial Sequence
  Guide RNA
cguggaguguucagcuaggucc

SEQ ID NO: 20458 - RNA, 22 nt, Artificial Sequence
  Guide RNA
cguguguggacgugaagcaugg

SEQ ID NO: 20459 - RNA, 22 nt, Artificial Sequence
  Guide RNA
cguguguggacgugaagcgugg

SEQ ID NO: 20460 - RNA, 22 nt, Artificial Sequence
  Guide RNA
cuagcugaacacuccacgcuuc

SEQ ID NO: 20461 - RNA, 22 nt, Artificial Sequence
  Guide RNA
cuagcugaacacuccaugcuuc

SEQ ID NO: 20462 - RNA, 22 nt, Artificial Sequence
  Guide RNA
cuccacgcuucacguccacaca

SEQ ID NO: 20463 - RNA, 22 nt, Artificial Sequence
  Guide RNA
cuccaugcuucacguccacaca

SEQ ID NO: 20464 - RNA, 22 nt, Artificial Sequence
  Guide RNA
cugaacacuccacgcuucacgu

SEQ ID NO: 20465 - RNA, 22 nt, Artificial Sequence
  Guide RNA
cugaacacuccaugcuucacgu

SEQ ID NO: 20466 - RNA, 22 nt, Artificial Sequence
  Guide RNA
cuggaccuagcugaacacucca

SEQ ID NO: 20467 - RNA, 22 nt, Artificial Sequence
  Guide RNA
gaacacuccacgcuucacgucc

SEQ ID NO: 20468 - RNA, 22 nt, Artificial Sequence
  Guide RNA
gaacacuccaugcuucacgucc

SEQ ID NO: 20469 - RNA, 22 nt, Artificial Sequence
  Guide RNA
gaagcauggaguguucagcuag

SEQ ID NO: 20470 - RNA, 22 nt, Artificial Sequence
  Guide RNA
gaagcguggaguguucagcuag

SEQ ID NO: 20471 - RNA, 22 nt, Artificial Sequence
  Guide RNA
gaccuagcugaacacuccacgc

SEQ ID NO: 20472 - RNA, 22 nt, Artificial Sequence
  Guide RNA
gaccuagcugaacacuccaugc

SEQ ID NO: 20473 - RNA, 22 nt, Artificial Sequence
  Guide RNA
gacgugaagcauggaguguuca

SEQ ID NO: 20474 - RNA, 22 nt, Artificial Sequence
  Guide RNA
gacgugaagcguggaguguuca

SEQ ID NO: 20475 - RNA, 22 nt, Artificial Sequence
  Guide RNA
gcauggaguguucagcuagguc

SEQ ID NO: 20476 - RNA, 22 nt, Artificial Sequence
  Guide RNA
gccuggaccuagcugaacacuc

SEQ ID NO: 20477 - RNA, 22 nt, Artificial Sequence
  Guide RNA
gcguggaguguucagcuagguc

SEQ ID NO: 20478 - RNA, 22 nt, Artificial Sequence
  Guide RNA
gcguguguggacgugaagcaug

SEQ ID NO: 20479 - RNA, 22 nt, Artificial Sequence
  Guide RNA
gcguguguggacgugaagcgug

SEQ ID NO: 20480 - RNA, 22 nt, Artificial Sequence
  Guide RNA
gcugaacacuccacgcuucacg

SEQ ID NO: 20481 - RNA, 22 nt, Artificial Sequence
  Guide RNA
gcugaacacuccaugcuucacg

SEQ ID NO: 20482 - RNA, 22 nt, Artificial Sequence
  Guide RNA
ggaccuagcugaacacuccacg

SEQ ID NO: 20483 - RNA, 22 nt, Artificial Sequence
  Guide RNA
ggaccuagcugaacacuccaug

SEQ ID NO: 20484 - RNA, 22 nt, Artificial Sequence
  Guide RNA
ggacgugaagcauggaguguuc

SEQ ID NO: 20485 - RNA, 22 nt, Artificial Sequence
  Guide RNA
ggacgugaagcguggaguguuc

SEQ ID NO: 20486 - RNA, 22 nt, Artificial Sequence
  Guide RNA
ggcguguguggacgugaagcau

SEQ ID NO: 20487 - RNA, 22 nt, Artificial Sequence
  Guide RNA
ggcguguguggacgugaagcgu

SEQ ID NO: 20488 - RNA, 22 nt, Artificial Sequence
  Guide RNA
gggcguguguggacgugaagca

SEQ ID NO: 20489 - RNA, 22 nt, Artificial Sequence
  Guide RNA
gggcguguguggacgugaagcg

SEQ ID NO: 20490 - RNA, 22 nt, Artificial Sequence
  Guide RNA
ggggcguguguggacgugaagc

SEQ ID NO: 20491 - RNA, 22 nt, Artificial Sequence
  Guide RNA
gugaagcauggaguguucagcu

SEQ ID NO: 20492 - RNA, 22 nt, Artificial Sequence
  Guide RNA
gugaagcguggaguguucagcu

SEQ ID NO: 20493 - RNA, 22 nt, Artificial Sequence
  Guide RNA
guggacgugaagcauggagugu

SEQ ID NO: 20494 - RNA, 22 nt, Artificial Sequence
  Guide RNA
guggacgugaagcguggagugu

SEQ ID NO: 20495 - RNA, 22 nt, Artificial Sequence
  Guide RNA
guguggacgugaagcauggagu

SEQ ID NO: 20496 - RNA, 22 nt, Artificial Sequence
  Guide RNA
guguggacgugaagcguggagu

SEQ ID NO: 20497 - RNA, 22 nt, Artificial Sequence
  Guide RNA
guguguggacgugaagcaugga

SEQ ID NO: 20498 - RNA, 22 nt, Artificial Sequence
  Guide RNA
guguguggacgugaagcgugga

SEQ ID NO: 20499 - RNA, 22 nt, Artificial Sequence
  Guide RNA
uagcugaacacuccacgcuuca

SEQ ID NO: 20500 - RNA, 22 nt, Artificial Sequence
  Guide RNA
uagcugaacacuccaugcuuca

SEQ ID NO: 20501 - RNA, 22 nt, Artificial Sequence
  Guide RNA
uccacgcuucacguccacacac

SEQ ID NO: 20502 - RNA, 22 nt, Artificial Sequence
  Guide RNA
uccaugcuucacguccacacac

SEQ ID NO: 20503 - RNA, 22 nt, Artificial Sequence
  Guide RNA
ugaacacuccacgcuucacguc

SEQ ID NO: 20504 - RNA, 22 nt, Artificial Sequence
  Guide RNA
ugaacacuccaugcuucacguc

SEQ ID NO: 20505 - RNA, 22 nt, Artificial Sequence
  Guide RNA
ugaagcauggaguguucagcua

SEQ ID NO: 20506 - RNA, 22 nt, Artificial Sequence
  Guide RNA
ugaagcguggaguguucagcua

SEQ ID NO: 20507 - RNA, 22 nt, Artificial Sequence
  Guide RNA
uggaccuagcugaacacuccac

SEQ ID NO: 20508 - RNA, 22 nt, Artificial Sequence
  Guide RNA
uggaccuagcugaacacuccau

SEQ ID NO: 20509 - RNA, 22 nt, Artificial Sequence
  Guide RNA
uggacgugaagcauggaguguu

SEQ ID NO: 20510 - RNA, 22 nt, Artificial Sequence
  Guide RNA
uggacgugaagcguggaguguu

SEQ ID NO: 20511 - RNA, 22 nt, Artificial Sequence
  Guide RNA
uguggacgugaagcauggagug

SEQ ID NO: 20512 - RNA, 22 nt, Artificial Sequence
  Guide RNA
uguggacgugaagcguggagug

SEQ ID NO: 20513 - RNA, 22 nt, Artificial Sequence
  Guide RNA
uguguggacgugaagcauggag

SEQ ID NO: 20514 - RNA, 22 nt, Artificial Sequence
  Guide RNA
uguguggacgugaagcguggag

SEQ ID NO: 20515 - RNA, 20 nt, Artificial Sequence
  Guide RNA
aaauuguaaagauacggucu

SEQ ID NO: 20516 - RNA, 20 nt, Artificial Sequence
  Guide RNA
aacaauuuguaaagauacgg

SEQ ID NO: 20517 - RNA, 20 nt, Artificial Sequence
  Guide RNA
aauuguaaagauacggucuc

SEQ ID NO: 20518 - RNA, 20 nt, Artificial Sequence
  Guide RNA
aauuuguaaagauacggucu

SEQ ID NO: 20519 - RNA, 20 nt, Artificial Sequence
  Guide RNA
acaauuuguaaagauacggu

SEQ ID NO: 20520 - RNA, 20 nt, Artificial Sequence
  Guide RNA
accguaucuuuacaaauugu

SEQ ID NO: 20521 - RNA, 20 nt, Artificial Sequence
  Guide RNA
agaccguaucuuuacaaauu

SEQ ID NO: 20522 - RNA, 20 nt, Artificial Sequence
  Guide RNA
agugagaccguaucuuuaca

SEQ ID NO: 20523 - RNA, 20 nt, Artificial Sequence
  Guide RNA
auagugagaccguaucuuua

SEQ ID NO: 20524 - RNA, 20 nt, Artificial Sequence
  Guide RNA
auuuguaaagauacggucuc

SEQ ID NO: 20525 - RNA, 20 nt, Artificial Sequence
  Guide RNA
caaauuguaaagauacgguc

SEQ ID NO: 20526 - RNA, 20 nt, Artificial Sequence
  Guide RNA
caauuuguaaagauacgguc

SEQ ID NO: 20527 - RNA, 20 nt, Artificial Sequence
  Guide RNA
ccguaucuuuacaaauuguu

SEQ ID NO: 20528 - RNA, 20 nt, Artificial Sequence
  Guide RNA
gaccguaucuuuacaaauug

SEQ ID NO: 20529 - RNA, 20 nt, Artificial Sequence
  Guide RNA
gagaccguaucuuuacaaau

SEQ ID NO: 20530 - RNA, 20 nt, Artificial Sequence
  Guide RNA
uagugagaccguaucuuuac

SEQ ID NO: 20531 - RNA, 20 nt, Artificial Sequence
  Guide RNA
ugagaccguaucuuuacaaa

SEQ ID NO: 20532 - RNA, 21 nt, Artificial Sequence
  Guide RNA
aaauuguaaagauacggucuc

SEQ ID NO: 20533 - RNA, 21 nt, Artificial Sequence
  Guide RNA
aauuguaaagauacggucuca

SEQ ID NO: 20534 - RNA, 21 nt, Artificial Sequence
  Guide RNA
aauuuguaaagauacggucuc

SEQ ID NO: 20535 - RNA, 21 nt, Artificial Sequence
  Guide RNA
acaauuuguaaagauacgguc

SEQ ID NO: 20536 - RNA, 21 nt, Artificial Sequence
  Guide RNA
agaccguaucuuuacaaauug

SEQ ID NO: 20537 - RNA, 21 nt, Artificial Sequence
  Guide RNA
auagugagaccguaucuuuac

SEQ ID NO: 20538 - RNA, 21 nt, Artificial Sequence
  Guide RNA
auuuguaaagauacggucuca

SEQ ID NO: 20539 - RNA, 21 nt, Artificial Sequence
  Guide RNA
caaauuguaaagauacggucu

SEQ ID NO: 20540 - RNA, 21 nt, Artificial Sequence
  Guide RNA
caauuuguaaagauacggucu

SEQ ID NO: 20541 - RNA, 21 nt, Artificial Sequence
  Guide RNA
cauagugagaccguaucuuua

SEQ ID NO: 20542 - RNA, 21 nt, Artificial Sequence
  Guide RNA
gaccguaucuuuacaaauugu

SEQ ID NO: 20543 - RNA, 21 nt, Artificial Sequence
  Guide RNA
gagaccguaucuuuacaaauu

SEQ ID NO: 20544 - RNA, 21 nt, Artificial Sequence
  Guide RNA
gugagaccguaucuuuacaaa

SEQ ID NO: 20545 - RNA, 21 nt, Artificial Sequence
  Guide RNA
uagugagaccguaucuuuaca

SEQ ID NO: 20546 - RNA, 21 nt, Artificial Sequence
  Guide RNA
ugagaccguaucuuuacaaau

SEQ ID NO: 20547 - RNA, 22 nt, Artificial Sequence
  Guide RNA
aaauuguaaagauacggucuca

SEQ ID NO: 20548 - RNA, 22 nt, Artificial Sequence
  Guide RNA
aacaauuuguaaagauacgguc

SEQ ID NO: 20549 - RNA, 22 nt, Artificial Sequence
  Guide RNA
aauuguaaagauacggucucac

SEQ ID NO: 20550 - RNA, 22 nt, Artificial Sequence
  Guide RNA
aauuuguaaagauacggucuca

SEQ ID NO: 20551 - RNA, 22 nt, Artificial Sequence
  Guide RNA
acaauuuguaaagauacggucu

SEQ ID NO: 20552 - RNA, 22 nt, Artificial Sequence
  Guide RNA
acauagugagaccguaucuuua

SEQ ID NO: 20553 - RNA, 22 nt, Artificial Sequence
  Guide RNA
agaccguaucuuuacaaauugu

SEQ ID NO: 20554 - RNA, 22 nt, Artificial Sequence
  Guide RNA
agugagaccguaucuuuacaaa

SEQ ID NO: 20555 - RNA, 22 nt, Artificial Sequence
  Guide RNA
auagugagaccguaucuuuaca

SEQ ID NO: 20556 - RNA, 22 nt, Artificial Sequence
  Guide RNA
auuuguaaagauacggucucac

SEQ ID NO: 20557 - RNA, 22 nt, Artificial Sequence
  Guide RNA
caaauuguaaagauacggucuc

SEQ ID NO: 20558 - RNA, 22 nt, Artificial Sequence
  Guide RNA
caauuuguaaagauacggucuc

SEQ ID NO: 20559 - RNA, 22 nt, Artificial Sequence
  Guide RNA
cauagugagaccguaucuuuac

SEQ ID NO: 20560 - RNA, 22 nt, Artificial Sequence
  Guide RNA
gaccguaucuuuacaaauuguu

SEQ ID NO: 20561 - RNA, 22 nt, Artificial Sequence
  Guide RNA
gagaccguaucuuuacaaauug

SEQ ID NO: 20562 - RNA, 22 nt, Artificial Sequence
  Guide RNA
gugagaccguaucuuuacaaau

SEQ ID NO: 20563 - RNA, 22 nt, Artificial Sequence
  Guide RNA
ugagaccguaucuuuacaaauu

SEQ ID NO: 20564 - RNA, 20 nt, Artificial Sequence
  Guide RNA
aaaaagcucuaaaagcagua

SEQ ID NO: 20565 - RNA, 20 nt, Artificial Sequence
  Guide RNA
aaaagcaauauugucuucag

SEQ ID NO: 20566 - RNA, 20 nt, Artificial Sequence
  Guide RNA
aaaagcaguauugucuucag

SEQ ID NO: 20567 - RNA, 20 nt, Artificial Sequence
  Guide RNA
aaaagcucuaaaagcaguau

SEQ ID NO: 20568 - RNA, 20 nt, Artificial Sequence
  Guide RNA
aaagcaauauugucuucagc

SEQ ID NO: 20569 - RNA, 20 nt, Artificial Sequence
  Guide RNA
aaagcaguauugucuucagc

SEQ ID NO: 20570 - RNA, 20 nt, Artificial Sequence
  Guide RNA
aaagcucuaaaagcaguauu

SEQ ID NO: 20571 - RNA, 20 nt, Artificial Sequence
  Guide RNA
aaagcugaagacaauacugc

SEQ ID NO: 20572 - RNA, 20 nt, Artificial Sequence
  Guide RNA
aaagcugaagacaauauugc

SEQ ID NO: 20573 - RNA, 20 nt, Artificial Sequence
  Guide RNA
aagacaauacugcuuuuaga

SEQ ID NO: 20574 - RNA, 20 nt, Artificial Sequence
  Guide RNA
aagcaauauugucuucagcu

SEQ ID NO: 20575 - RNA, 20 nt, Artificial Sequence
  Guide RNA
aagcaguauugucuucagcu

SEQ ID NO: 20576 - RNA, 20 nt, Artificial Sequence
  Guide RNA
aagcucuaaaagcaauauug

SEQ ID NO: 20577 - RNA, 20 nt, Artificial Sequence
  Guide RNA
aagcucuaaaagcaguauug

SEQ ID NO: 20578 - RNA, 20 nt, Artificial Sequence
  Guide RNA
aagcugaagacaauacugcu

SEQ ID NO: 20579 - RNA, 20 nt, Artificial Sequence
  Guide RNA
aagcugaagacaauauugcu

SEQ ID NO: 20580 - RNA, 20 nt, Artificial Sequence
  Guide RNA
aauacugcuuuuagagcuuu

SEQ ID NO: 20581 - RNA, 20 nt, Artificial Sequence
  Guide RNA
aauauugucuucagcuuucc

SEQ ID NO: 20582 - RNA, 20 nt, Artificial Sequence
  Guide RNA
acaauacugcuuuuagagcu

SEQ ID NO: 20583 - RNA, 20 nt, Artificial Sequence
  Guide RNA
acaauauugcuuuuagagcu

SEQ ID NO: 20584 - RNA, 20 nt, Artificial Sequence
  Guide RNA
acugcuuuuagagcuuuuua

SEQ ID NO: 20585 - RNA, 20 nt, Artificial Sequence
  Guide RNA
agacaauacugcuuuuagag

SEQ ID NO: 20586 - RNA, 20 nt, Artificial Sequence
  Guide RNA
agacaauauugcuuuuagag

SEQ ID NO: 20587 - RNA, 20 nt, Artificial Sequence
  Guide RNA
agcaauauugucuucagcuu

SEQ ID NO: 20588 - RNA, 20 nt, Artificial Sequence
  Guide RNA
agcaguauugucuucagcuu

SEQ ID NO: 20589 - RNA, 20 nt, Artificial Sequence
  Guide RNA
agcucuaaaagcaauauugu

SEQ ID NO: 20590 - RNA, 20 nt, Artificial Sequence
  Guide RNA
agcucuaaaagcaguauugu

SEQ ID NO: 20591 - RNA, 20 nt, Artificial Sequence
  Guide RNA
agcugaagacaauacugcuu

SEQ ID NO: 20592 - RNA, 20 nt, Artificial Sequence
  Guide RNA
agcugaagacaauauugcuu

SEQ ID NO: 20593 - RNA, 20 nt, Artificial Sequence
  Guide RNA
aggaaagcugaagacaauac

SEQ ID NO: 20594 - RNA, 20 nt, Artificial Sequence
  Guide RNA
aggaaagcugaagacaauau

SEQ ID NO: 20595 - RNA, 20 nt, Artificial Sequence
  Guide RNA
aguauugucuucagcuuucc

SEQ ID NO: 20596 - RNA, 20 nt, Artificial Sequence
  Guide RNA
auacugcuuuuagagcuuuu

SEQ ID NO: 20597 - RNA, 20 nt, Artificial Sequence
  Guide RNA
caauacugcuuuuagagcuu

SEQ ID NO: 20598 - RNA, 20 nt, Artificial Sequence
  Guide RNA
caauauugcuuuuagagcuu

SEQ ID NO: 20599 - RNA, 20 nt, Artificial Sequence
  Guide RNA
caauauugucuucagcuuuc

SEQ ID NO: 20600 - RNA, 20 nt, Artificial Sequence
  Guide RNA
caguauugucuucagcuuuc

SEQ ID NO: 20601 - RNA, 20 nt, Artificial Sequence
  Guide RNA
cuaaaagcaauauugucuuc

SEQ ID NO: 20602 - RNA, 20 nt, Artificial Sequence
  Guide RNA
cuaaaagcaguauugucuuc

SEQ ID NO: 20603 - RNA, 20 nt, Artificial Sequence
  Guide RNA
cucuaaaagcaauauugucu

SEQ ID NO: 20604 - RNA, 20 nt, Artificial Sequence
  Guide RNA
cucuaaaagcaguauugucu

SEQ ID NO: 20605 - RNA, 20 nt, Artificial Sequence
  Guide RNA
cugaagacaauacugcuuuu

SEQ ID NO: 20606 - RNA, 20 nt, Artificial Sequence
  Guide RNA
cugaagacaauauugcuuuu

SEQ ID NO: 20607 - RNA, 20 nt, Artificial Sequence
  Guide RNA
cuuaaaaagcucuaaaagca

SEQ ID NO: 20608 - RNA, 20 nt, Artificial Sequence
  Guide RNA
gaaagcugaagacaauacug

SEQ ID NO: 20609 - RNA, 20 nt, Artificial Sequence
  Guide RNA
gaaagcugaagacaauauug

SEQ ID NO: 20610 - RNA, 20 nt, Artificial Sequence
  Guide RNA
gaagacaauacugcuuuuag

SEQ ID NO: 20611 - RNA, 20 nt, Artificial Sequence
  Guide RNA
gaagacaauauugcuuuuag

SEQ ID NO: 20612 - RNA, 20 nt, Artificial Sequence
  Guide RNA
gacaauacugcuuuuagagc

SEQ ID NO: 20613 - RNA, 20 nt, Artificial Sequence
  Guide RNA
gacaauauugcuuuuagagc

SEQ ID NO: 20614 - RNA, 20 nt, Artificial Sequence
  Guide RNA
gcaauauugucuucagcuuu

SEQ ID NO: 20615 - RNA, 20 nt, Artificial Sequence
  Guide RNA
gcaguauugucuucagcuuu

SEQ ID NO: 20616 - RNA, 20 nt, Artificial Sequence
  Guide RNA
gcucuaaaagcaauauuguc

SEQ ID NO: 20617 - RNA, 20 nt, Artificial Sequence
  Guide RNA
gcucuaaaagcaguauuguc

SEQ ID NO: 20618 - RNA, 20 nt, Artificial Sequence
  Guide RNA
gcugaagacaauacugcuuu

SEQ ID NO: 20619 - RNA, 20 nt, Artificial Sequence
  Guide RNA
gcugaagacaauauugcuuu

SEQ ID NO: 20620 - RNA, 20 nt, Artificial Sequence
  Guide RNA
ggaaagcugaagacaauacu

SEQ ID NO: 20621 - RNA, 20 nt, Artificial Sequence
  Guide RNA
ggaaagcugaagacaauauu

SEQ ID NO: 20622 - RNA, 20 nt, Artificial Sequence
  Guide RNA
uaaaaagcucuaaaagcagu

SEQ ID NO: 20623 - RNA, 20 nt, Artificial Sequence
  Guide RNA
uaaaagcaguauugucuuca

SEQ ID NO: 20624 - RNA, 20 nt, Artificial Sequence
  Guide RNA
uacugcuuuuagagcuuuuu

SEQ ID NO: 20625 - RNA, 20 nt, Artificial Sequence
  Guide RNA
uaggaaagcugaagacaaua

SEQ ID NO: 20626 - RNA, 20 nt, Artificial Sequence
  Guide RNA
ucuaaaagcaguauugucuu

SEQ ID NO: 20627 - RNA, 20 nt, Artificial Sequence
  Guide RNA
ucuuaaaaagcucuaaaagc

SEQ ID NO: 20628 - RNA, 20 nt, Artificial Sequence
  Guide RNA
ugaagacaauacugcuuuua

SEQ ID NO: 20629 - RNA, 20 nt, Artificial Sequence
  Guide RNA
uuaaaaagcucuaaaagcag

SEQ ID NO: 20630 - RNA, 20 nt, Artificial Sequence
  Guide RNA
uuaggaaagcugaagacaau

SEQ ID NO: 20631 - RNA, 20 nt, Artificial Sequence
  Guide RNA
uuuaggaaagcugaagacaa

SEQ ID NO: 20632 - RNA, 20 nt, Artificial Sequence
  Guide RNA
uuuuaggaaagcugaagaca

SEQ ID NO: 20633 - RNA, 21 nt, Artificial Sequence
  Guide RNA
aaaagcaauauugucuucagc

SEQ ID NO: 20634 - RNA, 21 nt, Artificial Sequence
  Guide RNA
aaaagcaguauugucuucagc

SEQ ID NO: 20635 - RNA, 21 nt, Artificial Sequence
  Guide RNA
aaagcaauauugucuucagcu

SEQ ID NO: 20636 - RNA, 21 nt, Artificial Sequence
  Guide RNA
aaagcaguauugucuucagcu

SEQ ID NO: 20637 - RNA, 21 nt, Artificial Sequence
  Guide RNA
aaagcucuaaaagcaguauug

SEQ ID NO: 20638 - RNA, 21 nt, Artificial Sequence
  Guide RNA
aaagcugaagacaauacugcu

SEQ ID NO: 20639 - RNA, 21 nt, Artificial Sequence
  Guide RNA
aaagcugaagacaauauugcu

SEQ ID NO: 20640 - RNA, 21 nt, Artificial Sequence
  Guide RNA
aagacaauacugcuuuuagag

SEQ ID NO: 20641 - RNA, 21 nt, Artificial Sequence
  Guide RNA
aagcaauauugucuucagcuu

SEQ ID NO: 20642 - RNA, 21 nt, Artificial Sequence
  Guide RNA
aagcaguauugucuucagcuu

SEQ ID NO: 20643 - RNA, 21 nt, Artificial Sequence
  Guide RNA
aagcucuaaaagcaguauugu

SEQ ID NO: 20644 - RNA, 21 nt, Artificial Sequence
  Guide RNA
aagcugaagacaauacugcuu

SEQ ID NO: 20645 - RNA, 21 nt, Artificial Sequence
  Guide RNA
aagcugaagacaauauugcuu

SEQ ID NO: 20646 - RNA, 21 nt, Artificial Sequence
  Guide RNA
aauauugucuucagcuuuccu

SEQ ID NO: 20647 - RNA, 21 nt, Artificial Sequence
  Guide RNA
acaauacugcuuuuagagcuu

SEQ ID NO: 20648 - RNA, 21 nt, Artificial Sequence
  Guide RNA
agacaauacugcuuuuagagc

SEQ ID NO: 20649 - RNA, 21 nt, Artificial Sequence
  Guide RNA
agacaauauugcuuuuagagc

SEQ ID NO: 20650 - RNA, 21 nt, Artificial Sequence
  Guide RNA
agcaauauugucuucagcuuu

SEQ ID NO: 20651 - RNA, 21 nt, Artificial Sequence
  Guide RNA
agcaguauugucuucagcuuu

SEQ ID NO: 20652 - RNA, 21 nt, Artificial Sequence
  Guide RNA
agcucuaaaagcaauauuguc

SEQ ID NO: 20653 - RNA, 21 nt, Artificial Sequence
  Guide RNA
agcucuaaaagcaguauuguc

SEQ ID NO: 20654 - RNA, 21 nt, Artificial Sequence
  Guide RNA
agcugaagacaauacugcuuu

SEQ ID NO: 20655 - RNA, 21 nt, Artificial Sequence
  Guide RNA
agcugaagacaauauugcuuu

SEQ ID NO: 20656 - RNA, 21 nt, Artificial Sequence
  Guide RNA
aggaaagcugaagacaauacu

SEQ ID NO: 20657 - RNA, 21 nt, Artificial Sequence
  Guide RNA
aggaaagcugaagacaauauu

SEQ ID NO: 20658 - RNA, 21 nt, Artificial Sequence
  Guide RNA
aguauugucuucagcuuuccu

SEQ ID NO: 20659 - RNA, 21 nt, Artificial Sequence
  Guide RNA
caauacugcuuuuagagcuuu

SEQ ID NO: 20660 - RNA, 21 nt, Artificial Sequence
  Guide RNA
caauauugucuucagcuuucc

SEQ ID NO: 20661 - RNA, 21 nt, Artificial Sequence
  Guide RNA
caguauugucuucagcuuucc

SEQ ID NO: 20662 - RNA, 21 nt, Artificial Sequence
  Guide RNA
cuaaaagcaguauugucuuca

SEQ ID NO: 20663 - RNA, 21 nt, Artificial Sequence
  Guide RNA
cucuaaaagcaguauugucuu

SEQ ID NO: 20664 - RNA, 21 nt, Artificial Sequence
  Guide RNA
cugaagacaauacugcuuuua

SEQ ID NO: 20665 - RNA, 21 nt, Artificial Sequence
  Guide RNA
cuuaaaaagcucuaaaagcag

SEQ ID NO: 20666 - RNA, 21 nt, Artificial Sequence
  Guide RNA
gaaagcugaagacaauacugc

SEQ ID NO: 20667 - RNA, 21 nt, Artificial Sequence
  Guide RNA
gaaagcugaagacaauauugc

SEQ ID NO: 20668 - RNA, 21 nt, Artificial Sequence
  Guide RNA
gaagacaauacugcuuuuaga

SEQ ID NO: 20669 - RNA, 21 nt, Artificial Sequence
  Guide RNA
gacaauacugcuuuuagagcu

SEQ ID NO: 20670 - RNA, 21 nt, Artificial Sequence
  Guide RNA
gacaauauugcuuuuagagcu

SEQ ID NO: 20671 - RNA, 21 nt, Artificial Sequence
  Guide RNA
gcaauauugucuucagcuuuc

SEQ ID NO: 20672 - RNA, 21 nt, Artificial Sequence
  Guide RNA
gcaguauugucuucagcuuuc

SEQ ID NO: 20673 - RNA, 21 nt, Artificial Sequence
  Guide RNA
gcucuaaaagcaauauugucu

SEQ ID NO: 20674 - RNA, 21 nt, Artificial Sequence
  Guide RNA
gcucuaaaagcaguauugucu

SEQ ID NO: 20675 - RNA, 21 nt, Artificial Sequence
  Guide RNA
gcugaagacaauacugcuuuu

SEQ ID NO: 20676 - RNA, 21 nt, Artificial Sequence
  Guide RNA
gcugaagacaauauugcuuuu

SEQ ID NO: 20677 - RNA, 21 nt, Artificial Sequence
  Guide RNA
ggaaagcugaagacaauacug

SEQ ID NO: 20678 - RNA, 21 nt, Artificial Sequence
  Guide RNA
ggaaagcugaagacaauauug

SEQ ID NO: 20679 - RNA, 21 nt, Artificial Sequence
  Guide RNA
guuuuaggaaagcugaagaca

SEQ ID NO: 20680 - RNA, 21 nt, Artificial Sequence
  Guide RNA
uaaaagcaguauugucuucag

SEQ ID NO: 20681 - RNA, 21 nt, Artificial Sequence
  Guide RNA
uaggaaagcugaagacaauac

SEQ ID NO: 20682 - RNA, 21 nt, Artificial Sequence
  Guide RNA
uaggaaagcugaagacaauau

SEQ ID NO: 20683 - RNA, 21 nt, Artificial Sequence
  Guide RNA
ucuaaaagcaguauugucuuc

SEQ ID NO: 20684 - RNA, 21 nt, Artificial Sequence
  Guide RNA
ugaagacaauacugcuuuuag

SEQ ID NO: 20685 - RNA, 21 nt, Artificial Sequence
  Guide RNA
uuaggaaagcugaagacaaua

SEQ ID NO: 20686 - RNA, 21 nt, Artificial Sequence
  Guide RNA
uuuaggaaagcugaagacaau

SEQ ID NO: 20687 - RNA, 21 nt, Artificial Sequence
  Guide RNA
uuuuaggaaagcugaagacaa

SEQ ID NO: 20688 - RNA, 22 nt, Artificial Sequence
  Guide RNA
aaaagcaauauugucuucagcu

SEQ ID NO: 20689 - RNA, 22 nt, Artificial Sequence
  Guide RNA
aaaagcaguauugucuucagcu

SEQ ID NO: 20690 - RNA, 22 nt, Artificial Sequence
  Guide RNA
aaaagcucuaaaagcaguauug

SEQ ID NO: 20691 - RNA, 22 nt, Artificial Sequence
  Guide RNA
aaagcaauauugucuucagcuu

SEQ ID NO: 20692 - RNA, 22 nt, Artificial Sequence
  Guide RNA
aaagcaguauugucuucagcuu

SEQ ID NO: 20693 - RNA, 22 nt, Artificial Sequence
  Guide RNA
aaagcucuaaaagcaguauugu

SEQ ID NO: 20694 - RNA, 22 nt, Artificial Sequence
  Guide RNA
aaagcugaagacaauacugcuu

SEQ ID NO: 20695 - RNA, 22 nt, Artificial Sequence
  Guide RNA
aaagcugaagacaauauugcuu

SEQ ID NO: 20696 - RNA, 22 nt, Artificial Sequence
  Guide RNA
aagacaauacugcuuuuagagc

SEQ ID NO: 20697 - RNA, 22 nt, Artificial Sequence
  Guide RNA
aagacaauauugcuuuuagagc

SEQ ID NO: 20698 - RNA, 22 nt, Artificial Sequence
  Guide RNA
aagcaauauugucuucagcuuu

SEQ ID NO: 20699 - RNA, 22 nt, Artificial Sequence
  Guide RNA
aagcaguauugucuucagcuuu

SEQ ID NO: 20700 - RNA, 22 nt, Artificial Sequence
  Guide RNA
aagcucuaaaagcaauauuguc

SEQ ID NO: 20701 - RNA, 22 nt, Artificial Sequence
  Guide RNA
aagcucuaaaagcaguauuguc

SEQ ID NO: 20702 - RNA, 22 nt, Artificial Sequence
  Guide RNA
aagcugaagacaauacugcuuu

SEQ ID NO: 20703 - RNA, 22 nt, Artificial Sequence
  Guide RNA
aagcugaagacaauauugcuuu

SEQ ID NO: 20704 - RNA, 22 nt, Artificial Sequence
  Guide RNA
aauauugucuucagcuuuccua

SEQ ID NO: 20705 - RNA, 22 nt, Artificial Sequence
  Guide RNA
acaauacugcuuuuagagcuuu

SEQ ID NO: 20706 - RNA, 22 nt, Artificial Sequence
  Guide RNA
acugcuuuuagagcuuuuuaag

SEQ ID NO: 20707 - RNA, 22 nt, Artificial Sequence
  Guide RNA
agacaauacugcuuuuagagcu

SEQ ID NO: 20708 - RNA, 22 nt, Artificial Sequence
  Guide RNA
agacaauauugcuuuuagagcu

SEQ ID NO: 20709 - RNA, 22 nt, Artificial Sequence
  Guide RNA
agcaauauugucuucagcuuuc

SEQ ID NO: 20710 - RNA, 22 nt, Artificial Sequence
  Guide RNA
agcaguauugucuucagcuuuc

SEQ ID NO: 20711 - RNA, 22 nt, Artificial Sequence
  Guide RNA
agcucuaaaagcaauauugucu

SEQ ID NO: 20712 - RNA, 22 nt, Artificial Sequence
  Guide RNA
agcucuaaaagcaguauugucu

SEQ ID NO: 20713 - RNA, 22 nt, Artificial Sequence
  Guide RNA
agcugaagacaauacugcuuuu

SEQ ID NO: 20714 - RNA, 22 nt, Artificial Sequence
  Guide RNA
agcugaagacaauauugcuuuu

SEQ ID NO: 20715 - RNA, 22 nt, Artificial Sequence
  Guide RNA
aggaaagcugaagacaauacug

SEQ ID NO: 20716 - RNA, 22 nt, Artificial Sequence
  Guide RNA
aggaaagcugaagacaauauug

SEQ ID NO: 20717 - RNA, 22 nt, Artificial Sequence
  Guide RNA
aguauugucuucagcuuuccua

SEQ ID NO: 20718 - RNA, 22 nt, Artificial Sequence
  Guide RNA
aguuuuaggaaagcugaagaca

SEQ ID NO: 20719 - RNA, 22 nt, Artificial Sequence
  Guide RNA
caauacugcuuuuagagcuuuu

SEQ ID NO: 20720 - RNA, 22 nt, Artificial Sequence
  Guide RNA
caauauugucuucagcuuuccu

SEQ ID NO: 20721 - RNA, 22 nt, Artificial Sequence
  Guide RNA
caguauugucuucagcuuuccu

SEQ ID NO: 20722 - RNA, 22 nt, Artificial Sequence
  Guide RNA
cuaaaagcaauauugucuucag

SEQ ID NO: 20723 - RNA, 22 nt, Artificial Sequence
  Guide RNA
cuaaaagcaguauugucuucag

SEQ ID NO: 20724 - RNA, 22 nt, Artificial Sequence
  Guide RNA
cucuaaaagcaauauugucuuc

SEQ ID NO: 20725 - RNA, 22 nt, Artificial Sequence
  Guide RNA
cucuaaaagcaguauugucuuc

SEQ ID NO: 20726 - RNA, 22 nt, Artificial Sequence
  Guide RNA
cugaagacaauacugcuuuuag

SEQ ID NO: 20727 - RNA, 22 nt, Artificial Sequence
  Guide RNA
cugaagacaauauugcuuuuag

SEQ ID NO: 20728 - RNA, 22 nt, Artificial Sequence
  Guide RNA
cuuaaaaagcucuaaaagcagu

SEQ ID NO: 20729 - RNA, 22 nt, Artificial Sequence
  Guide RNA
gaaagcugaagacaauacugcu

SEQ ID NO: 20730 - RNA, 22 nt, Artificial Sequence
  Guide RNA
gaaagcugaagacaauauugcu

SEQ ID NO: 20731 - RNA, 22 nt, Artificial Sequence
  Guide RNA
gaagacaauacugcuuuuagag

SEQ ID NO: 20732 - RNA, 22 nt, Artificial Sequence
  Guide RNA
gaagacaauauugcuuuuagag

SEQ ID NO: 20733 - RNA, 22 nt, Artificial Sequence
  Guide RNA
gacaauacugcuuuuagagcuu

SEQ ID NO: 20734 - RNA, 22 nt, Artificial Sequence
  Guide RNA
gacaauauugcuuuuagagcuu

SEQ ID NO: 20735 - RNA, 22 nt, Artificial Sequence
  Guide RNA
gaucuuaaaaagcucuaaaagc

SEQ ID NO: 20736 - RNA, 22 nt, Artificial Sequence
  Guide RNA
gcaauauugucuucagcuuucc

SEQ ID NO: 20737 - RNA, 22 nt, Artificial Sequence
  Guide RNA
gcaguauugucuucagcuuucc

SEQ ID NO: 20738 - RNA, 22 nt, Artificial Sequence
  Guide RNA
gcucuaaaagcaauauugucuu

SEQ ID NO: 20739 - RNA, 22 nt, Artificial Sequence
  Guide RNA
gcucuaaaagcaguauugucuu

SEQ ID NO: 20740 - RNA, 22 nt, Artificial Sequence
  Guide RNA
gcugaagacaauacugcuuuua

SEQ ID NO: 20741 - RNA, 22 nt, Artificial Sequence
  Guide RNA
gcugaagacaauauugcuuuua

SEQ ID NO: 20742 - RNA, 22 nt, Artificial Sequence
  Guide RNA
ggaaagcugaagacaauacugc

SEQ ID NO: 20743 - RNA, 22 nt, Artificial Sequence
  Guide RNA
ggaaagcugaagacaauauugc

SEQ ID NO: 20744 - RNA, 22 nt, Artificial Sequence
  Guide RNA
guuuuaggaaagcugaagacaa

SEQ ID NO: 20745 - RNA, 22 nt, Artificial Sequence
  Guide RNA
uaaaagcaauauugucuucagc

SEQ ID NO: 20746 - RNA, 22 nt, Artificial Sequence
  Guide RNA
uaaaagcaguauugucuucagc

SEQ ID NO: 20747 - RNA, 22 nt, Artificial Sequence
  Guide RNA
uaggaaagcugaagacaauacu

SEQ ID NO: 20748 - RNA, 22 nt, Artificial Sequence
  Guide RNA
uaggaaagcugaagacaauauu

SEQ ID NO: 20749 - RNA, 22 nt, Artificial Sequence
  Guide RNA
ucuaaaagcaguauugucuuca

SEQ ID NO: 20750 - RNA, 22 nt, Artificial Sequence
  Guide RNA
ucuuaaaaagcucuaaaagcag

SEQ ID NO: 20751 - RNA, 22 nt, Artificial Sequence
  Guide RNA
ugaagacaauacugcuuuuaga

SEQ ID NO: 20752 - RNA, 22 nt, Artificial Sequence
  Guide RNA
uuaggaaagcugaagacaauac

SEQ ID NO: 20753 - RNA, 22 nt, Artificial Sequence
  Guide RNA
uuaggaaagcugaagacaauau

SEQ ID NO: 20754 - RNA, 22 nt, Artificial Sequence
  Guide RNA
uuuaggaaagcugaagacaaua

SEQ ID NO: 20755 - RNA, 22 nt, Artificial Sequence
  Guide RNA
uuuuaggaaagcugaagacaau

SEQ ID NO: 20756 - RNA, 20 nt, Artificial Sequence
  Guide RNA
aaacaccuaguauaaugccu

SEQ ID NO: 20757 - RNA, 20 nt, Artificial Sequence
  Guide RNA
aaacaucuaguauaaugccu

SEQ ID NO: 20758 - RNA, 20 nt, Artificial Sequence
  Guide RNA
aacaccuaguauaaugccug

SEQ ID NO: 20759 - RNA, 20 nt, Artificial Sequence
  Guide RNA
aacaucuaguauaaugccug

SEQ ID NO: 20760 - RNA, 20 nt, Artificial Sequence
  Guide RNA
aauguuucccaaacaccuag

SEQ ID NO: 20761 - RNA, 20 nt, Artificial Sequence
  Guide RNA
aauguuucccaaacaucuag

SEQ ID NO: 20762 - RNA, 20 nt, Artificial Sequence
  Guide RNA
acaccuaguauaaugccugg

SEQ ID NO: 20763 - RNA, 20 nt, Artificial Sequence
  Guide RNA
acaucuaguauaaugccugg

SEQ ID NO: 20764 - RNA, 20 nt, Artificial Sequence
  Guide RNA
accaauguuucccaaacacc

SEQ ID NO: 20765 - RNA, 20 nt, Artificial Sequence
  Guide RNA
accaauguuucccaaacauc

SEQ ID NO: 20766 - RNA, 20 nt, Artificial Sequence
  Guide RNA
accuaguauaaugccuggcu

SEQ ID NO: 20767 - RNA, 20 nt, Artificial Sequence
  Guide RNA
acuagauguuugggaaacau

SEQ ID NO: 20768 - RNA, 20 nt, Artificial Sequence
  Guide RNA
acuagguguuugggaaacau

SEQ ID NO: 20769 - RNA, 20 nt, Artificial Sequence
  Guide RNA
agauguuugggaaacauugg

SEQ ID NO: 20770 - RNA, 20 nt, Artificial Sequence
  Guide RNA
agccaggcauuauacuagau

SEQ ID NO: 20771 - RNA, 20 nt, Artificial Sequence
  Guide RNA
agccaggcauuauacuaggu

SEQ ID NO: 20772 - RNA, 20 nt, Artificial Sequence
  Guide RNA
aggcauuauacuagauguuu

SEQ ID NO: 20773 - RNA, 20 nt, Artificial Sequence
  Guide RNA
aggcauuauacuagguguuu

SEQ ID NO: 20774 - RNA, 20 nt, Artificial Sequence
  Guide RNA
agguguuugggaaacauugg

SEQ ID NO: 20775 - RNA, 20 nt, Artificial Sequence
  Guide RNA
auacuagauguuugggaaac

SEQ ID NO: 20776 - RNA, 20 nt, Artificial Sequence
  Guide RNA
auacuagguguuugggaaac

SEQ ID NO: 20777 - RNA, 20 nt, Artificial Sequence
  Guide RNA
aucuaguauaaugccuggcu

SEQ ID NO: 20778 - RNA, 20 nt, Artificial Sequence
  Guide RNA
augagccaggcauuauacua

SEQ ID NO: 20779 - RNA, 20 nt, Artificial Sequence
  Guide RNA
auguuucccaaacaccuagu

SEQ ID NO: 20780 - RNA, 20 nt, Artificial Sequence
  Guide RNA
auguuucccaaacaucuagu

SEQ ID NO: 20781 - RNA, 20 nt, Artificial Sequence
  Guide RNA
auuauacuagauguuuggga

SEQ ID NO: 20782 - RNA, 20 nt, Artificial Sequence
  Guide RNA
auuauacuagguguuuggga

SEQ ID NO: 20783 - RNA, 20 nt, Artificial Sequence
  Guide RNA
caaacaccuaguauaaugcc

SEQ ID NO: 20784 - RNA, 20 nt, Artificial Sequence
  Guide RNA
caaacaucuaguauaaugcc

SEQ ID NO: 20785 - RNA, 20 nt, Artificial Sequence
  Guide RNA
caauguuucccaaacaccua

SEQ ID NO: 20786 - RNA, 20 nt, Artificial Sequence
  Guide RNA
caauguuucccaaacaucua

SEQ ID NO: 20787 - RNA, 20 nt, Artificial Sequence
  Guide RNA
caccuaguauaaugccuggc

SEQ ID NO: 20788 - RNA, 20 nt, Artificial Sequence
  Guide RNA
caggcauuauacuagauguu

SEQ ID NO: 20789 - RNA, 20 nt, Artificial Sequence
  Guide RNA
caggcauuauacuagguguu

SEQ ID NO: 20790 - RNA, 20 nt, Artificial Sequence
  Guide RNA
caucuaguauaaugccuggc

SEQ ID NO: 20791 - RNA, 20 nt, Artificial Sequence
  Guide RNA
caugagccaggcauuauacu

SEQ ID NO: 20792 - RNA, 20 nt, Artificial Sequence
  Guide RNA
cauuauacuagauguuuggg

SEQ ID NO: 20793 - RNA, 20 nt, Artificial Sequence
  Guide RNA
cauuauacuagguguuuggg

SEQ ID NO: 20794 - RNA, 20 nt, Artificial Sequence
  Guide RNA
ccaaacaccuaguauaaugc

SEQ ID NO: 20795 - RNA, 20 nt, Artificial Sequence
  Guide RNA
ccaaacaucuaguauaaugc

SEQ ID NO: 20796 - RNA, 20 nt, Artificial Sequence
  Guide RNA
ccaauguuucccaaacaccu

SEQ ID NO: 20797 - RNA, 20 nt, Artificial Sequence
  Guide RNA
ccaauguuucccaaacaucu

SEQ ID NO: 20798 - RNA, 20 nt, Artificial Sequence
  Guide RNA
ccaggcauuauacuagaugu

SEQ ID NO: 20799 - RNA, 20 nt, Artificial Sequence
  Guide RNA
ccaggcauuauacuaggugu

SEQ ID NO: 20800 - RNA, 20 nt, Artificial Sequence
  Guide RNA
ccaugagccaggcauuauac

SEQ ID NO: 20801 - RNA, 20 nt, Artificial Sequence
  Guide RNA
cccaaacaccuaguauaaug

SEQ ID NO: 20802 - RNA, 20 nt, Artificial Sequence
  Guide RNA
cccaaacaucuaguauaaug

SEQ ID NO: 20803 - RNA, 20 nt, Artificial Sequence
  Guide RNA
cuagauguuugggaaacauu

SEQ ID NO: 20804 - RNA, 20 nt, Artificial Sequence
  Guide RNA
cuagguguuugggaaacauu

SEQ ID NO: 20805 - RNA, 20 nt, Artificial Sequence
  Guide RNA
gagccaggcauuauacuaga

SEQ ID NO: 20806 - RNA, 20 nt, Artificial Sequence
  Guide RNA
gagccaggcauuauacuagg

SEQ ID NO: 20807 - RNA, 20 nt, Artificial Sequence
  Guide RNA
gauguuugggaaacauuggu

SEQ ID NO: 20808 - RNA, 20 nt, Artificial Sequence
  Guide RNA
gcauuauacuagauguuugg

SEQ ID NO: 20809 - RNA, 20 nt, Artificial Sequence
  Guide RNA
gcauuauacuagguguuugg

SEQ ID NO: 20810 - RNA, 20 nt, Artificial Sequence
  Guide RNA
gccaggcauuauacuagaug

SEQ ID NO: 20811 - RNA, 20 nt, Artificial Sequence
  Guide RNA
gccaggcauuauacuaggug

SEQ ID NO: 20812 - RNA, 20 nt, Artificial Sequence
  Guide RNA
ggcauuauacuagauguuug

SEQ ID NO: 20813 - RNA, 20 nt, Artificial Sequence
  Guide RNA
ggcauuauacuagguguuug

SEQ ID NO: 20814 - RNA, 20 nt, Artificial Sequence
  Guide RNA
gguguuugggaaacauuggu

SEQ ID NO: 20815 - RNA, 20 nt, Artificial Sequence
  Guide RNA
guuuaccaauguuucccaaa

SEQ ID NO: 20816 - RNA, 20 nt, Artificial Sequence
  Guide RNA
guuucccaaacaccuaguau

SEQ ID NO: 20817 - RNA, 20 nt, Artificial Sequence
  Guide RNA
guuucccaaacaucuaguau

SEQ ID NO: 20818 - RNA, 20 nt, Artificial Sequence
  Guide RNA
uaccaauguuucccaaacac

SEQ ID NO: 20819 - RNA, 20 nt, Artificial Sequence
  Guide RNA
uaccaauguuucccaaacau

SEQ ID NO: 20820 - RNA, 20 nt, Artificial Sequence
  Guide RNA
uacuagauguuugggaaaca

SEQ ID NO: 20821 - RNA, 20 nt, Artificial Sequence
  Guide RNA
uacuagguguuugggaaaca

SEQ ID NO: 20822 - RNA, 20 nt, Artificial Sequence
  Guide RNA
uagauguuugggaaacauug

SEQ ID NO: 20823 - RNA, 20 nt, Artificial Sequence
  Guide RNA
uagguguuugggaaacauug

SEQ ID NO: 20824 - RNA, 20 nt, Artificial Sequence
  Guide RNA
uauacuagauguuugggaaa

SEQ ID NO: 20825 - RNA, 20 nt, Artificial Sequence
  Guide RNA
uauacuagguguuugggaaa

SEQ ID NO: 20826 - RNA, 20 nt, Artificial Sequence
  Guide RNA
ucccaaacaccuaguauaau

SEQ ID NO: 20827 - RNA, 20 nt, Artificial Sequence
  Guide RNA
ucccaaacaucuaguauaau

SEQ ID NO: 20828 - RNA, 20 nt, Artificial Sequence
  Guide RNA
ugagccaggcauuauacuag

SEQ ID NO: 20829 - RNA, 20 nt, Artificial Sequence
  Guide RNA
uguuuaccaauguuucccaa

SEQ ID NO: 20830 - RNA, 20 nt, Artificial Sequence
  Guide RNA
uguuucccaaacaccuagua

SEQ ID NO: 20831 - RNA, 20 nt, Artificial Sequence
  Guide RNA
uguuucccaaacaucuagua

SEQ ID NO: 20832 - RNA, 20 nt, Artificial Sequence
  Guide RNA
uuaccaauguuucccaaaca

SEQ ID NO: 20833 - RNA, 20 nt, Artificial Sequence
  Guide RNA
uuauacuagauguuugggaa

SEQ ID NO: 20834 - RNA, 20 nt, Artificial Sequence
  Guide RNA
uuauacuagguguuugggaa

SEQ ID NO: 20835 - RNA, 20 nt, Artificial Sequence
  Guide RNA
uucccaaacaccuaguauaa

SEQ ID NO: 20836 - RNA, 20 nt, Artificial Sequence
  Guide RNA
uucccaaacaucuaguauaa

SEQ ID NO: 20837 - RNA, 20 nt, Artificial Sequence
  Guide RNA
uuuaccaauguuucccaaac

SEQ ID NO: 20838 - RNA, 20 nt, Artificial Sequence
  Guide RNA
uuucccaaacaccuaguaua

SEQ ID NO: 20839 - RNA, 20 nt, Artificial Sequence
  Guide RNA
uuucccaaacaucuaguaua

SEQ ID NO: 20840 - RNA, 21 nt, Artificial Sequence
  Guide RNA
aaacaccuaguauaaugccug

SEQ ID NO: 20841 - RNA, 21 nt, Artificial Sequence
  Guide RNA
aaacaucuaguauaaugccug

SEQ ID NO: 20842 - RNA, 21 nt, Artificial Sequence
  Guide RNA
aacaccuaguauaaugccugg

SEQ ID NO: 20843 - RNA, 21 nt, Artificial Sequence
  Guide RNA
aacaucuaguauaaugccugg

SEQ ID NO: 20844 - RNA, 21 nt, Artificial Sequence
  Guide RNA
aauguuucccaaacaccuagu

SEQ ID NO: 20845 - RNA, 21 nt, Artificial Sequence
  Guide RNA
aauguuucccaaacaucuagu

SEQ ID NO: 20846 - RNA, 21 nt, Artificial Sequence
  Guide RNA
acaccuaguauaaugccuggc

SEQ ID NO: 20847 - RNA, 21 nt, Artificial Sequence
  Guide RNA
acaucuaguauaaugccuggc

SEQ ID NO: 20848 - RNA, 21 nt, Artificial Sequence
  Guide RNA
accaauguuucccaaacaccu

SEQ ID NO: 20849 - RNA, 21 nt, Artificial Sequence
  Guide RNA
accaauguuucccaaacaucu

SEQ ID NO: 20850 - RNA, 21 nt, Artificial Sequence
  Guide RNA
accuaguauaaugccuggcuc

SEQ ID NO: 20851 - RNA, 21 nt, Artificial Sequence
  Guide RNA
acuagauguuugggaaacauu

SEQ ID NO: 20852 - RNA, 21 nt, Artificial Sequence
  Guide RNA
acuagguguuugggaaacauu

SEQ ID NO: 20853 - RNA, 21 nt, Artificial Sequence
  Guide RNA
agauguuugggaaacauuggu

SEQ ID NO: 20854 - RNA, 21 nt, Artificial Sequence
  Guide RNA
agccaggcauuauacuagaug

SEQ ID NO: 20855 - RNA, 21 nt, Artificial Sequence
  Guide RNA
agccaggcauuauacuaggug

SEQ ID NO: 20856 - RNA, 21 nt, Artificial Sequence
  Guide RNA
aggcauuauacuagauguuug

SEQ ID NO: 20857 - RNA, 21 nt, Artificial Sequence
  Guide RNA
aggcauuauacuagguguuug

SEQ ID NO: 20858 - RNA, 21 nt, Artificial Sequence
  Guide RNA
agguguuugggaaacauuggu

SEQ ID NO: 20859 - RNA, 21 nt, Artificial Sequence
  Guide RNA
auacuagauguuugggaaaca

SEQ ID NO: 20860 - RNA, 21 nt, Artificial Sequence
  Guide RNA
auacuagguguuugggaaaca

SEQ ID NO: 20861 - RNA, 21 nt, Artificial Sequence
  Guide RNA
aucuaguauaaugccuggcuc

SEQ ID NO: 20862 - RNA, 21 nt, Artificial Sequence
  Guide RNA
augagccaggcauuauacuag

SEQ ID NO: 20863 - RNA, 21 nt, Artificial Sequence
  Guide RNA
auguuucccaaacaccuagua

SEQ ID NO: 20864 - RNA, 21 nt, Artificial Sequence
  Guide RNA
auguuucccaaacaucuagua

SEQ ID NO: 20865 - RNA, 21 nt, Artificial Sequence
  Guide RNA
auuauacuagguguuugggaa

SEQ ID NO: 20866 - RNA, 21 nt, Artificial Sequence
  Guide RNA
caaacaccuaguauaaugccu

SEQ ID NO: 20867 - RNA, 21 nt, Artificial Sequence
  Guide RNA
caaacaucuaguauaaugccu

SEQ ID NO: 20868 - RNA, 21 nt, Artificial Sequence
  Guide RNA
caauguuucccaaacaccuag

SEQ ID NO: 20869 - RNA, 21 nt, Artificial Sequence
  Guide RNA
caauguuucccaaacaucuag

SEQ ID NO: 20870 - RNA, 21 nt, Artificial Sequence
  Guide RNA
caccuaguauaaugccuggcu

SEQ ID NO: 20871 - RNA, 21 nt, Artificial Sequence
  Guide RNA
caggcauuauacuagauguuu

SEQ ID NO: 20872 - RNA, 21 nt, Artificial Sequence
  Guide RNA
caggcauuauacuagguguuu

SEQ ID NO: 20873 - RNA, 21 nt, Artificial Sequence
  Guide RNA
caucuaguauaaugccuggcu

SEQ ID NO: 20874 - RNA, 21 nt, Artificial Sequence
  Guide RNA
caugagccaggcauuauacua

SEQ ID NO: 20875 - RNA, 21 nt, Artificial Sequence
  Guide RNA
cauuauacuagauguuuggga

SEQ ID NO: 20876 - RNA, 21 nt, Artificial Sequence
  Guide RNA
cauuauacuagguguuuggga

SEQ ID NO: 20877 - RNA, 21 nt, Artificial Sequence
  Guide RNA
ccaaacaccuaguauaaugcc

SEQ ID NO: 20878 - RNA, 21 nt, Artificial Sequence
  Guide RNA
ccaaacaucuaguauaaugcc

SEQ ID NO: 20879 - RNA, 21 nt, Artificial Sequence
  Guide RNA
ccaauguuucccaaacaccua

SEQ ID NO: 20880 - RNA, 21 nt, Artificial Sequence
  Guide RNA
ccaauguuucccaaacaucua

SEQ ID NO: 20881 - RNA, 21 nt, Artificial Sequence
  Guide RNA
ccaggcauuauacuagauguu

SEQ ID NO: 20882 - RNA, 21 nt, Artificial Sequence
  Guide RNA
ccaggcauuauacuagguguu

SEQ ID NO: 20883 - RNA, 21 nt, Artificial Sequence
  Guide RNA
ccaugagccaggcauuauacu

SEQ ID NO: 20884 - RNA, 21 nt, Artificial Sequence
  Guide RNA
cccaaacaccuaguauaaugc

SEQ ID NO: 20885 - RNA, 21 nt, Artificial Sequence
  Guide RNA
cccaaacaucuaguauaaugc

SEQ ID NO: 20886 - RNA, 21 nt, Artificial Sequence
  Guide RNA
cuagauguuugggaaacauug

SEQ ID NO: 20887 - RNA, 21 nt, Artificial Sequence
  Guide RNA
cuagguguuugggaaacauug

SEQ ID NO: 20888 - RNA, 21 nt, Artificial Sequence
  Guide RNA
gagccaggcauuauacuagau

SEQ ID NO: 20889 - RNA, 21 nt, Artificial Sequence
  Guide RNA
gagccaggcauuauacuaggu

SEQ ID NO: 20890 - RNA, 21 nt, Artificial Sequence
  Guide RNA
gauguuugggaaacauuggua

SEQ ID NO: 20891 - RNA, 21 nt, Artificial Sequence
  Guide RNA
gcauuauacuagauguuuggg

SEQ ID NO: 20892 - RNA, 21 nt, Artificial Sequence
  Guide RNA
gcauuauacuagguguuuggg

SEQ ID NO: 20893 - RNA, 21 nt, Artificial Sequence
  Guide RNA
gccaggcauuauacuagaugu

SEQ ID NO: 20894 - RNA, 21 nt, Artificial Sequence
  Guide RNA
gccaggcauuauacuaggugu

SEQ ID NO: 20895 - RNA, 21 nt, Artificial Sequence
  Guide RNA
gccaugagccaggcauuauac

SEQ ID NO: 20896 - RNA, 21 nt, Artificial Sequence
  Guide RNA
ggcauuauacuagauguuugg

SEQ ID NO: 20897 - RNA, 21 nt, Artificial Sequence
  Guide RNA
ggcauuauacuagguguuugg

SEQ ID NO: 20898 - RNA, 21 nt, Artificial Sequence
  Guide RNA
gguguuugggaaacauuggua

SEQ ID NO: 20899 - RNA, 21 nt, Artificial Sequence
  Guide RNA
guuuaccaauguuucccaaac

SEQ ID NO: 20900 - RNA, 21 nt, Artificial Sequence
  Guide RNA
guuucccaaacaccuaguaua

SEQ ID NO: 20901 - RNA, 21 nt, Artificial Sequence
  Guide RNA
guuucccaaacaucuaguaua

SEQ ID NO: 20902 - RNA, 21 nt, Artificial Sequence
  Guide RNA
uaccaauguuucccaaacacc

SEQ ID NO: 20903 - RNA, 21 nt, Artificial Sequence
  Guide RNA
uaccaauguuucccaaacauc

SEQ ID NO: 20904 - RNA, 21 nt, Artificial Sequence
  Guide RNA
uacuagauguuugggaaacau

SEQ ID NO: 20905 - RNA, 21 nt, Artificial Sequence
  Guide RNA
uacuagguguuugggaaacau

SEQ ID NO: 20906 - RNA, 21 nt, Artificial Sequence
  Guide RNA
uagauguuugggaaacauugg

SEQ ID NO: 20907 - RNA, 21 nt, Artificial Sequence
  Guide RNA
uagguguuugggaaacauugg

SEQ ID NO: 20908 - RNA, 21 nt, Artificial Sequence
  Guide RNA
uauacuagauguuugggaaac

SEQ ID NO: 20909 - RNA, 21 nt, Artificial Sequence
  Guide RNA
uauacuagguguuugggaaac

SEQ ID NO: 20910 - RNA, 21 nt, Artificial Sequence
  Guide RNA
ucccaaacaccuaguauaaug

SEQ ID NO: 20911 - RNA, 21 nt, Artificial Sequence
  Guide RNA
ucccaaacaucuaguauaaug

SEQ ID NO: 20912 - RNA, 21 nt, Artificial Sequence
  Guide RNA
ugagccaggcauuauacuaga

SEQ ID NO: 20913 - RNA, 21 nt, Artificial Sequence
  Guide RNA
ugagccaggcauuauacuagg

SEQ ID NO: 20914 - RNA, 21 nt, Artificial Sequence
  Guide RNA
uguuuaccaauguuucccaaa

SEQ ID NO: 20915 - RNA, 21 nt, Artificial Sequence
  Guide RNA
uguuucccaaacaccuaguau

SEQ ID NO: 20916 - RNA, 21 nt, Artificial Sequence
  Guide RNA
uguuucccaaacaucuaguau

SEQ ID NO: 20917 - RNA, 21 nt, Artificial Sequence
  Guide RNA
uuaccaauguuucccaaacac

SEQ ID NO: 20918 - RNA, 21 nt, Artificial Sequence
  Guide RNA
uuaccaauguuucccaaacau

SEQ ID NO: 20919 - RNA, 21 nt, Artificial Sequence
  Guide RNA
uuauacuagguguuugggaaa

SEQ ID NO: 20920 - RNA, 21 nt, Artificial Sequence
  Guide RNA
uucccaaacaccuaguauaau

SEQ ID NO: 20921 - RNA, 21 nt, Artificial Sequence
  Guide RNA
uuguuuaccaauguuucccaa

SEQ ID NO: 20922 - RNA, 21 nt, Artificial Sequence
  Guide RNA
uuuaccaauguuucccaaaca

SEQ ID NO: 20923 - RNA, 21 nt, Artificial Sequence
  Guide RNA
uuucccaaacaccuaguauaa

SEQ ID NO: 20924 - RNA, 22 nt, Artificial Sequence
  Guide RNA
aaacaccuaguauaaugccugg

SEQ ID NO: 20925 - RNA, 22 nt, Artificial Sequence
  Guide RNA
aaacaucuaguauaaugccugg

SEQ ID NO: 20926 - RNA, 22 nt, Artificial Sequence
  Guide RNA
aacaccuaguauaaugccuggc

SEQ ID NO: 20927 - RNA, 22 nt, Artificial Sequence
  Guide RNA
aacaucuaguauaaugccuggc

SEQ ID NO: 20928 - RNA, 22 nt, Artificial Sequence
  Guide RNA
aauguuucccaaacaccuagua

SEQ ID NO: 20929 - RNA, 22 nt, Artificial Sequence
  Guide RNA
aauguuucccaaacaucuagua

SEQ ID NO: 20930 - RNA, 22 nt, Artificial Sequence
  Guide RNA
acaccuaguauaaugccuggcu

SEQ ID NO: 20931 - RNA, 22 nt, Artificial Sequence
  Guide RNA
acaucuaguauaaugccuggcu

SEQ ID NO: 20932 - RNA, 22 nt, Artificial Sequence
  Guide RNA
accaauguuucccaaacaccua

SEQ ID NO: 20933 - RNA, 22 nt, Artificial Sequence
  Guide RNA
accaauguuucccaaacaucua

SEQ ID NO: 20934 - RNA, 22 nt, Artificial Sequence
  Guide RNA
accuaguauaaugccuggcuca

SEQ ID NO: 20935 - RNA, 22 nt, Artificial Sequence
  Guide RNA
acuagauguuugggaaacauug

SEQ ID NO: 20936 - RNA, 22 nt, Artificial Sequence
  Guide RNA
acuagguguuugggaaacauug

SEQ ID NO: 20937 - RNA, 22 nt, Artificial Sequence
  Guide RNA
agauguuugggaaacauuggua

SEQ ID NO: 20938 - RNA, 22 nt, Artificial Sequence
  Guide RNA
agccaggcauuauacuagaugu

SEQ ID NO: 20939 - RNA, 22 nt, Artificial Sequence
  Guide RNA
agccaggcauuauacuaggugu

SEQ ID NO: 20940 - RNA, 22 nt, Artificial Sequence
  Guide RNA
aggcauuauacuagauguuugg

SEQ ID NO: 20941 - RNA, 22 nt, Artificial Sequence
  Guide RNA
aggcauuauacuagguguuugg

SEQ ID NO: 20942 - RNA, 22 nt, Artificial Sequence
  Guide RNA
agguguuugggaaacauuggua

SEQ ID NO: 20943 - RNA, 22 nt, Artificial Sequence
  Guide RNA
auacuagauguuugggaaacau

SEQ ID NO: 20944 - RNA, 22 nt, Artificial Sequence
  Guide RNA
auacuagguguuugggaaacau

SEQ ID NO: 20945 - RNA, 22 nt, Artificial Sequence
  Guide RNA
aucuaguauaaugccuggcuca

SEQ ID NO: 20946 - RNA, 22 nt, Artificial Sequence
  Guide RNA
augagccaggcauuauacuaga

SEQ ID NO: 20947 - RNA, 22 nt, Artificial Sequence
  Guide RNA
augagccaggcauuauacuagg

SEQ ID NO: 20948 - RNA, 22 nt, Artificial Sequence
  Guide RNA
auguuucccaaacaccuaguau

SEQ ID NO: 20949 - RNA, 22 nt, Artificial Sequence
  Guide RNA
auguuucccaaacaucuaguau

SEQ ID NO: 20950 - RNA, 22 nt, Artificial Sequence
  Guide RNA
auuauacuagguguuugggaaa

SEQ ID NO: 20951 - RNA, 22 nt, Artificial Sequence
  Guide RNA
caaacaccuaguauaaugccug

SEQ ID NO: 20952 - RNA, 22 nt, Artificial Sequence
  Guide RNA
caaacaucuaguauaaugccug

SEQ ID NO: 20953 - RNA, 22 nt, Artificial Sequence
  Guide RNA
caauguuucccaaacaccuagu

SEQ ID NO: 20954 - RNA, 22 nt, Artificial Sequence
  Guide RNA
caauguuucccaaacaucuagu

SEQ ID NO: 20955 - RNA, 22 nt, Artificial Sequence
  Guide RNA
caccuaguauaaugccuggcuc

SEQ ID NO: 20956 - RNA, 22 nt, Artificial Sequence
  Guide RNA
caggcauuauacuagauguuug

SEQ ID NO: 20957 - RNA, 22 nt, Artificial Sequence
  Guide RNA
caggcauuauacuagguguuug

SEQ ID NO: 20958 - RNA, 22 nt, Artificial Sequence
  Guide RNA
caucuaguauaaugccuggcuc

SEQ ID NO: 20959 - RNA, 22 nt, Artificial Sequence
  Guide RNA
caugagccaggcauuauacuag

SEQ ID NO: 20960 - RNA, 22 nt, Artificial Sequence
  Guide RNA
cauuauacuagauguuugggaa

SEQ ID NO: 20961 - RNA, 22 nt, Artificial Sequence
  Guide RNA
cauuauacuagguguuugggaa

SEQ ID NO: 20962 - RNA, 22 nt, Artificial Sequence
  Guide RNA
ccaaacaccuaguauaaugccu

SEQ ID NO: 20963 - RNA, 22 nt, Artificial Sequence
  Guide RNA
ccaaacaucuaguauaaugccu

SEQ ID NO: 20964 - RNA, 22 nt, Artificial Sequence
  Guide RNA
ccaauguuucccaaacaccuag

SEQ ID NO: 20965 - RNA, 22 nt, Artificial Sequence
  Guide RNA
ccaauguuucccaaacaucuag

SEQ ID NO: 20966 - RNA, 22 nt, Artificial Sequence
  Guide RNA
ccaggcauuauacuagauguuu

SEQ ID NO: 20967 - RNA, 22 nt, Artificial Sequence
  Guide RNA
ccaggcauuauacuagguguuu

SEQ ID NO: 20968 - RNA, 22 nt, Artificial Sequence
  Guide RNA
ccaugagccaggcauuauacua

SEQ ID NO: 20969 - RNA, 22 nt, Artificial Sequence
  Guide RNA
cccaaacaccuaguauaaugcc

SEQ ID NO: 20970 - RNA, 22 nt, Artificial Sequence
  Guide RNA
cccaaacaucuaguauaaugcc

SEQ ID NO: 20971 - RNA, 22 nt, Artificial Sequence
  Guide RNA
cuagauguuugggaaacauugg

SEQ ID NO: 20972 - RNA, 22 nt, Artificial Sequence
  Guide RNA
cuagguguuugggaaacauugg

SEQ ID NO: 20973 - RNA, 22 nt, Artificial Sequence
  Guide RNA
gagccaggcauuauacuagaug

SEQ ID NO: 20974 - RNA, 22 nt, Artificial Sequence
  Guide RNA
gagccaggcauuauacuaggug

SEQ ID NO: 20975 - RNA, 22 nt, Artificial Sequence
  Guide RNA
gauguuugggaaacauugguaa

SEQ ID NO: 20976 - RNA, 22 nt, Artificial Sequence
  Guide RNA
gcauuauacuagauguuuggga

SEQ ID NO: 20977 - RNA, 22 nt, Artificial Sequence
  Guide RNA
gcauuauacuagguguuuggga

SEQ ID NO: 20978 - RNA, 22 nt, Artificial Sequence
  Guide RNA
gccaggcauuauacuagauguu

SEQ ID NO: 20979 - RNA, 22 nt, Artificial Sequence
  Guide RNA
gccaggcauuauacuagguguu

SEQ ID NO: 20980 - RNA, 22 nt, Artificial Sequence
  Guide RNA
gccaugagccaggcauuauacu

SEQ ID NO: 20981 - RNA, 22 nt, Artificial Sequence
  Guide RNA
ggcauuauacuagauguuuggg

SEQ ID NO: 20982 - RNA, 22 nt, Artificial Sequence
  Guide RNA
ggcauuauacuagguguuuggg

SEQ ID NO: 20983 - RNA, 22 nt, Artificial Sequence
  Guide RNA
gguguuugggaaacauugguaa

SEQ ID NO: 20984 - RNA, 22 nt, Artificial Sequence
  Guide RNA
guuuaccaauguuucccaaaca

SEQ ID NO: 20985 - RNA, 22 nt, Artificial Sequence
  Guide RNA
guuucccaaacaccuaguauaa

SEQ ID NO: 20986 - RNA, 22 nt, Artificial Sequence
  Guide RNA
guuucccaaacaucuaguauaa

SEQ ID NO: 20987 - RNA, 22 nt, Artificial Sequence
  Guide RNA
uaccaauguuucccaaacaccu

SEQ ID NO: 20988 - RNA, 22 nt, Artificial Sequence
  Guide RNA
uaccaauguuucccaaacaucu

SEQ ID NO: 20989 - RNA, 22 nt, Artificial Sequence
  Guide RNA
uacuagauguuugggaaacauu

SEQ ID NO: 20990 - RNA, 22 nt, Artificial Sequence
  Guide RNA
uacuagguguuugggaaacauu

SEQ ID NO: 20991 - RNA, 22 nt, Artificial Sequence
  Guide RNA
uagauguuugggaaacauuggu

SEQ ID NO: 20992 - RNA, 22 nt, Artificial Sequence
  Guide RNA
uagguguuugggaaacauuggu

SEQ ID NO: 20993 - RNA, 22 nt, Artificial Sequence
  Guide RNA
uauacuagauguuugggaaaca

SEQ ID NO: 20994 - RNA, 22 nt, Artificial Sequence
  Guide RNA
uauacuagguguuugggaaaca

SEQ ID NO: 20995 - RNA, 22 nt, Artificial Sequence
  Guide RNA
ucccaaacaccuaguauaaugc

SEQ ID NO: 20996 - RNA, 22 nt, Artificial Sequence
  Guide RNA
ucccaaacaucuaguauaaugc

SEQ ID NO: 20997 - RNA, 22 nt, Artificial Sequence
  Guide RNA
ugagccaggcauuauacuagau

SEQ ID NO: 20998 - RNA, 22 nt, Artificial Sequence
  Guide RNA
ugagccaggcauuauacuaggu

SEQ ID NO: 20999 - RNA, 22 nt, Artificial Sequence
  Guide RNA
ugccaugagccaggcauuauac

SEQ ID NO: 21000 - RNA, 22 nt, Artificial Sequence
  Guide RNA
uguuuaccaauguuucccaaac

SEQ ID NO: 21001 - RNA, 22 nt, Artificial Sequence
  Guide RNA
uguuucccaaacaccuaguaua

SEQ ID NO: 21002 - RNA, 22 nt, Artificial Sequence
  Guide RNA
uguuucccaaacaucuaguaua

SEQ ID NO: 21003 - RNA, 22 nt, Artificial Sequence
  Guide RNA
uuaccaauguuucccaaacacc

SEQ ID NO: 21004 - RNA, 22 nt, Artificial Sequence
  Guide RNA
uuaccaauguuucccaaacauc

SEQ ID NO: 21005 - RNA, 22 nt, Artificial Sequence
  Guide RNA
uuauacuagauguuugggaaac

SEQ ID NO: 21006 - RNA, 22 nt, Artificial Sequence
  Guide RNA
uuauacuagguguuugggaaac

SEQ ID NO: 21007 - RNA, 22 nt, Artificial Sequence
  Guide RNA
uucccaaacaccuaguauaaug

SEQ ID NO: 21008 - RNA, 22 nt, Artificial Sequence
  Guide RNA
uucccaaacaucuaguauaaug

SEQ ID NO: 21009 - RNA, 22 nt, Artificial Sequence
  Guide RNA
uuguuuaccaauguuucccaaa

SEQ ID NO: 21010 - RNA, 22 nt, Artificial Sequence
  Guide RNA
uuuaccaauguuucccaaacac

SEQ ID NO: 21011 - RNA, 22 nt, Artificial Sequence
  Guide RNA
uuuaccaauguuucccaaacau

SEQ ID NO: 21012 - RNA, 22 nt, Artificial Sequence
  Guide RNA
uuucccaaacaccuaguauaau

SEQ ID NO: 21013 - RNA, 22 nt, Artificial Sequence
  Guide RNA
uuuguuuaccaauguuucccaa

SEQ ID NO: 21014 - RNA, 20 nt, Artificial Sequence
  Guide RNA
aaaacacuuucuagcuuuuc

SEQ ID NO: 21015 - RNA, 20 nt, Artificial Sequence
  Guide RNA
aaacacuuucuagcuuuucc

SEQ ID NO: 21016 - RNA, 20 nt, Artificial Sequence
  Guide RNA
aaacacuuucuagcuuuuuc

SEQ ID NO: 21017 - RNA, 20 nt, Artificial Sequence
  Guide RNA
aaaggacaggaaaaagcuag

SEQ ID NO: 21018 - RNA, 20 nt, Artificial Sequence
  Guide RNA
aaaggacagggaaaagcuag

SEQ ID NO: 21019 - RNA, 20 nt, Artificial Sequence
  Guide RNA
aacacuuucuagcuuuuccc

SEQ ID NO: 21020 - RNA, 20 nt, Artificial Sequence
  Guide RNA
aacacuuucuagcuuuuucc

SEQ ID NO: 21021 - RNA, 20 nt, Artificial Sequence
  Guide RNA
aacccagggaaaggacagga

SEQ ID NO: 21022 - RNA, 20 nt, Artificial Sequence
  Guide RNA
aacccagggaaaggacaggg

SEQ ID NO: 21023 - RNA, 20 nt, Artificial Sequence
  Guide RNA
aaggacaggaaaaagcuaga

SEQ ID NO: 21024 - RNA, 20 nt, Artificial Sequence
  Guide RNA
aaggacagggaaaagcuaga

SEQ ID NO: 21025 - RNA, 20 nt, Artificial Sequence
  Guide RNA
acacuuucuagcuuuucccu

SEQ ID NO: 21026 - RNA, 20 nt, Artificial Sequence
  Guide RNA
acacuuucuagcuuuuuccu

SEQ ID NO: 21027 - RNA, 20 nt, Artificial Sequence
  Guide RNA
acaggaaaaagcuagaaagu

SEQ ID NO: 21028 - RNA, 20 nt, Artificial Sequence
  Guide RNA
acagggaaaagcuagaaagu

SEQ ID NO: 21029 - RNA, 20 nt, Artificial Sequence
  Guide RNA
acccagggaaaggacaggaa

SEQ ID NO: 21030 - RNA, 20 nt, Artificial Sequence
  Guide RNA
acccagggaaaggacaggga

SEQ ID NO: 21031 - RNA, 20 nt, Artificial Sequence
  Guide RNA
acuaacccagggaaaggaca

SEQ ID NO: 21032 - RNA, 20 nt, Artificial Sequence
  Guide RNA
acuuucuagcuuuucccugu

SEQ ID NO: 21033 - RNA, 20 nt, Artificial Sequence
  Guide RNA
acuuucuagcuuuuuccugu

SEQ ID NO: 21034 - RNA, 20 nt, Artificial Sequence
  Guide RNA
agcuuuucccuguccuuucc

SEQ ID NO: 21035 - RNA, 20 nt, Artificial Sequence
  Guide RNA
agcuuuuuccuguccuuucc

SEQ ID NO: 21036 - RNA, 20 nt, Artificial Sequence
  Guide RNA
aggaaaaagcuagaaagugu

SEQ ID NO: 21037 - RNA, 20 nt, Artificial Sequence
  Guide RNA
aggacaggaaaaagcuagaa

SEQ ID NO: 21038 - RNA, 20 nt, Artificial Sequence
  Guide RNA
aggacagggaaaagcuagaa

SEQ ID NO: 21039 - RNA, 20 nt, Artificial Sequence
  Guide RNA
agggaaaagcuagaaagugu

SEQ ID NO: 21040 - RNA, 20 nt, Artificial Sequence
  Guide RNA
agggaaaggacaggaaaaag

SEQ ID NO: 21041 - RNA, 20 nt, Artificial Sequence
  Guide RNA
agggaaaggacagggaaaag

SEQ ID NO: 21042 - RNA, 20 nt, Artificial Sequence
  Guide RNA
caaaacacuuucuagcuuuu

SEQ ID NO: 21043 - RNA, 20 nt, Artificial Sequence
  Guide RNA
cacuuucuagcuuuucccug

SEQ ID NO: 21044 - RNA, 20 nt, Artificial Sequence
  Guide RNA
cacuuucuagcuuuuuccug

SEQ ID NO: 21045 - RNA, 20 nt, Artificial Sequence
  Guide RNA
caggaaaaagcuagaaagug

SEQ ID NO: 21046 - RNA, 20 nt, Artificial Sequence
  Guide RNA
cagggaaaagcuagaaagug

SEQ ID NO: 21047 - RNA, 20 nt, Artificial Sequence
  Guide RNA
cagggaaaggacaggaaaaa

SEQ ID NO: 21048 - RNA, 20 nt, Artificial Sequence
  Guide RNA
cagggaaaggacagggaaaa

SEQ ID NO: 21049 - RNA, 20 nt, Artificial Sequence
  Guide RNA
ccagggaaaggacaggaaaa

SEQ ID NO: 21050 - RNA, 20 nt, Artificial Sequence
  Guide RNA
ccagggaaaggacagggaaa

SEQ ID NO: 21051 - RNA, 20 nt, Artificial Sequence
  Guide RNA
cccagggaaaggacaggaaa

SEQ ID NO: 21052 - RNA, 20 nt, Artificial Sequence
  Guide RNA
cccagggaaaggacagggaa

SEQ ID NO: 21053 - RNA, 20 nt, Artificial Sequence
  Guide RNA
cuaacccagggaaaggacag

SEQ ID NO: 21054 - RNA, 20 nt, Artificial Sequence
  Guide RNA
cuagcuuuucccuguccuuu

SEQ ID NO: 21055 - RNA, 20 nt, Artificial Sequence
  Guide RNA
cuagcuuuuuccuguccuuu

SEQ ID NO: 21056 - RNA, 20 nt, Artificial Sequence
  Guide RNA
cuuucuagcuuuucccuguc

SEQ ID NO: 21057 - RNA, 20 nt, Artificial Sequence
  Guide RNA
cuuucuagcuuuuuccuguc

SEQ ID NO: 21058 - RNA, 20 nt, Artificial Sequence
  Guide RNA
cuuuucccuguccuuucccu

SEQ ID NO: 21059 - RNA, 20 nt, Artificial Sequence
  Guide RNA
cuuuuuccuguccuuucccu

SEQ ID NO: 21060 - RNA, 20 nt, Artificial Sequence
  Guide RNA
gaaaaagcuagaaaguguuu

SEQ ID NO: 21061 - RNA, 20 nt, Artificial Sequence
  Guide RNA
gaaaggacaggaaaaagcua

SEQ ID NO: 21062 - RNA, 20 nt, Artificial Sequence
  Guide RNA
gaaaggacagggaaaagcua

SEQ ID NO: 21063 - RNA, 20 nt, Artificial Sequence
  Guide RNA
gacaggaaaaagcuagaaag

SEQ ID NO: 21064 - RNA, 20 nt, Artificial Sequence
  Guide RNA
gacagggaaaagcuagaaag

SEQ ID NO: 21065 - RNA, 20 nt, Artificial Sequence
  Guide RNA
gacuaacccagggaaaggac

SEQ ID NO: 21066 - RNA, 20 nt, Artificial Sequence
  Guide RNA
gcuuuucccuguccuuuccc

SEQ ID NO: 21067 - RNA, 20 nt, Artificial Sequence
  Guide RNA
gcuuuuuccuguccuuuccc

SEQ ID NO: 21068 - RNA, 20 nt, Artificial Sequence
  Guide RNA
ggaaaaagcuagaaaguguu

SEQ ID NO: 21069 - RNA, 20 nt, Artificial Sequence
  Guide RNA
ggaaaagcuagaaaguguuu

SEQ ID NO: 21070 - RNA, 20 nt, Artificial Sequence
  Guide RNA
ggaaaggacaggaaaaagcu

SEQ ID NO: 21071 - RNA, 20 nt, Artificial Sequence
  Guide RNA
ggaaaggacagggaaaagcu

SEQ ID NO: 21072 - RNA, 20 nt, Artificial Sequence
  Guide RNA
ggacaggaaaaagcuagaaa

SEQ ID NO: 21073 - RNA, 20 nt, Artificial Sequence
  Guide RNA
ggacagggaaaagcuagaaa

SEQ ID NO: 21074 - RNA, 20 nt, Artificial Sequence
  Guide RNA
gggaaaagcuagaaaguguu

SEQ ID NO: 21075 - RNA, 20 nt, Artificial Sequence
  Guide RNA
gggaaaggacaggaaaaagc

SEQ ID NO: 21076 - RNA, 20 nt, Artificial Sequence
  Guide RNA
gggaaaggacagggaaaagc

SEQ ID NO: 21077 - RNA, 20 nt, Artificial Sequence
  Guide RNA
uaacccagggaaaggacagg

SEQ ID NO: 21078 - RNA, 20 nt, Artificial Sequence
  Guide RNA
uagcuuuucccuguccuuuc

SEQ ID NO: 21079 - RNA, 20 nt, Artificial Sequence
  Guide RNA
uagcuuuuuccuguccuuuc

SEQ ID NO: 21080 - RNA, 20 nt, Artificial Sequence
  Guide RNA
ucaaaacacuuucuagcuuu

SEQ ID NO: 21081 - RNA, 20 nt, Artificial Sequence
  Guide RNA
ucccuguccuuucccugggu

SEQ ID NO: 21082 - RNA, 20 nt, Artificial Sequence
  Guide RNA
ucuagcuuuucccuguccuu

SEQ ID NO: 21083 - RNA, 20 nt, Artificial Sequence
  Guide RNA
ucuagcuuuuuccuguccuu

SEQ ID NO: 21084 - RNA, 20 nt, Artificial Sequence
  Guide RNA
uucaaaacacuuucuagcuu

SEQ ID NO: 21085 - RNA, 20 nt, Artificial Sequence
  Guide RNA
uucccuguccuuucccuggg

SEQ ID NO: 21086 - RNA, 20 nt, Artificial Sequence
  Guide RNA
uuccuguccuuucccugggu

SEQ ID NO: 21087 - RNA, 20 nt, Artificial Sequence
  Guide RNA
uucuagcuuuucccuguccu

SEQ ID NO: 21088 - RNA, 20 nt, Artificial Sequence
  Guide RNA
uucuagcuuuuuccuguccu

SEQ ID NO: 21089 - RNA, 20 nt, Artificial Sequence
  Guide RNA
uuucaaaacacuuucuagcu

SEQ ID NO: 21090 - RNA, 20 nt, Artificial Sequence
  Guide RNA
uuucccuguccuuucccugg

SEQ ID NO: 21091 - RNA, 20 nt, Artificial Sequence
  Guide RNA
uuuccuguccuuucccuggg

SEQ ID NO: 21092 - RNA, 20 nt, Artificial Sequence
  Guide RNA
uuucuagcuuuucccugucc

SEQ ID NO: 21093 - RNA, 20 nt, Artificial Sequence
  Guide RNA
uuucuagcuuuuuccugucc

SEQ ID NO: 21094 - RNA, 20 nt, Artificial Sequence
  Guide RNA
uuuucccuguccuuucccug

SEQ ID NO: 21095 - RNA, 20 nt, Artificial Sequence
  Guide RNA
uuuuccuguccuuucccugg

SEQ ID NO: 21096 - RNA, 20 nt, Artificial Sequence
  Guide RNA
uuuuuccuguccuuucccug

SEQ ID NO: 21097 - RNA, 21 nt, Artificial Sequence
  Guide RNA
aaaacacuuucuagcuuuucc

SEQ ID NO: 21098 - RNA, 21 nt, Artificial Sequence
  Guide RNA
aaacacuuucuagcuuuuccc

SEQ ID NO: 21099 - RNA, 21 nt, Artificial Sequence
  Guide RNA
aaacacuuucuagcuuuuucc

SEQ ID NO: 21100 - RNA, 21 nt, Artificial Sequence
  Guide RNA
aaaggacaggaaaaagcuaga

SEQ ID NO: 21101 - RNA, 21 nt, Artificial Sequence
  Guide RNA
aaaggacagggaaaagcuaga

SEQ ID NO: 21102 - RNA, 21 nt, Artificial Sequence
  Guide RNA
aacacuuucuagcuuuucccu

SEQ ID NO: 21103 - RNA, 21 nt, Artificial Sequence
  Guide RNA
aacacuuucuagcuuuuuccu

SEQ ID NO: 21104 - RNA, 21 nt, Artificial Sequence
  Guide RNA
aacccagggaaaggacaggaa

SEQ ID NO: 21105 - RNA, 21 nt, Artificial Sequence
  Guide RNA
aacccagggaaaggacaggga

SEQ ID NO: 21106 - RNA, 21 nt, Artificial Sequence
  Guide RNA
aaggacaggaaaaagcuagaa

SEQ ID NO: 21107 - RNA, 21 nt, Artificial Sequence
  Guide RNA
aaggacagggaaaagcuagaa

SEQ ID NO: 21108 - RNA, 21 nt, Artificial Sequence
  Guide RNA
acacuuucuagcuuuucccug

SEQ ID NO: 21109 - RNA, 21 nt, Artificial Sequence
  Guide RNA
acacuuucuagcuuuuuccug

SEQ ID NO: 21110 - RNA, 21 nt, Artificial Sequence
  Guide RNA
acaggaaaaagcuagaaagug

SEQ ID NO: 21111 - RNA, 21 nt, Artificial Sequence
  Guide RNA
acagggaaaagcuagaaagug

SEQ ID NO: 21112 - RNA, 21 nt, Artificial Sequence
  Guide RNA
acccagggaaaggacaggaaa

SEQ ID NO: 21113 - RNA, 21 nt, Artificial Sequence
  Guide RNA
acccagggaaaggacagggaa

SEQ ID NO: 21114 - RNA, 21 nt, Artificial Sequence
  Guide RNA
acuaacccagggaaaggacag

SEQ ID NO: 21115 - RNA, 21 nt, Artificial Sequence
  Guide RNA
acuuucuagcuuuucccuguc

SEQ ID NO: 21116 - RNA, 21 nt, Artificial Sequence
  Guide RNA
acuuucuagcuuuuuccuguc

SEQ ID NO: 21117 - RNA, 21 nt, Artificial Sequence
  Guide RNA
agcuuuucccuguccuuuccc

SEQ ID NO: 21118 - RNA, 21 nt, Artificial Sequence
  Guide RNA
agcuuuuuccuguccuuuccc

SEQ ID NO: 21119 - RNA, 21 nt, Artificial Sequence
  Guide RNA
aggaaaaagcuagaaaguguu

SEQ ID NO: 21120 - RNA, 21 nt, Artificial Sequence
  Guide RNA
aggacaggaaaaagcuagaaa

SEQ ID NO: 21121 - RNA, 21 nt, Artificial Sequence
  Guide RNA
aggacagggaaaagcuagaaa

SEQ ID NO: 21122 - RNA, 21 nt, Artificial Sequence
  Guide RNA
agggaaaagcuagaaaguguu

SEQ ID NO: 21123 - RNA, 21 nt, Artificial Sequence
  Guide RNA
agggaaaggacaggaaaaagc

SEQ ID NO: 21124 - RNA, 21 nt, Artificial Sequence
  Guide RNA
agggaaaggacagggaaaagc

SEQ ID NO: 21125 - RNA, 21 nt, Artificial Sequence
  Guide RNA
caaaacacuuucuagcuuuuc

SEQ ID NO: 21126 - RNA, 21 nt, Artificial Sequence
  Guide RNA
cacuuucuagcuuuucccugu

SEQ ID NO: 21127 - RNA, 21 nt, Artificial Sequence
  Guide RNA
cacuuucuagcuuuuuccugu

SEQ ID NO: 21128 - RNA, 21 nt, Artificial Sequence
  Guide RNA
caggaaaaagcuagaaagugu

SEQ ID NO: 21129 - RNA, 21 nt, Artificial Sequence
  Guide RNA
cagggaaaagcuagaaagugu

SEQ ID NO: 21130 - RNA, 21 nt, Artificial Sequence
  Guide RNA
cagggaaaggacaggaaaaag

SEQ ID NO: 21131 - RNA, 21 nt, Artificial Sequence
  Guide RNA
cagggaaaggacagggaaaag

SEQ ID NO: 21132 - RNA, 21 nt, Artificial Sequence
  Guide RNA
ccagggaaaggacaggaaaaa

SEQ ID NO: 21133 - RNA, 21 nt, Artificial Sequence
  Guide RNA
ccagggaaaggacagggaaaa

SEQ ID NO: 21134 - RNA, 21 nt, Artificial Sequence
  Guide RNA
cccagggaaaggacaggaaaa

SEQ ID NO: 21135 - RNA, 21 nt, Artificial Sequence
  Guide RNA
cccagggaaaggacagggaaa

SEQ ID NO: 21136 - RNA, 21 nt, Artificial Sequence
  Guide RNA
cuaacccagggaaaggacagg

SEQ ID NO: 21137 - RNA, 21 nt, Artificial Sequence
  Guide RNA
cuagcuuuucccuguccuuuc

SEQ ID NO: 21138 - RNA, 21 nt, Artificial Sequence
  Guide RNA
cuagcuuuuuccuguccuuuc

SEQ ID NO: 21139 - RNA, 21 nt, Artificial Sequence
  Guide RNA
cuuucuagcuuuucccugucc

SEQ ID NO: 21140 - RNA, 21 nt, Artificial Sequence
  Guide RNA
cuuucuagcuuuuuccugucc

SEQ ID NO: 21141 - RNA, 21 nt, Artificial Sequence
  Guide RNA
cuuuucccuguccuuucccug

SEQ ID NO: 21142 - RNA, 21 nt, Artificial Sequence
  Guide RNA
cuuuuuccuguccuuucccug

SEQ ID NO: 21143 - RNA, 21 nt, Artificial Sequence
  Guide RNA
gaaaggacaggaaaaagcuag

SEQ ID NO: 21144 - RNA, 21 nt, Artificial Sequence
  Guide RNA
gaaaggacagggaaaagcuag

SEQ ID NO: 21145 - RNA, 21 nt, Artificial Sequence
  Guide RNA
gacaggaaaaagcuagaaagu

SEQ ID NO: 21146 - RNA, 21 nt, Artificial Sequence
  Guide RNA
gacagggaaaagcuagaaagu

SEQ ID NO: 21147 - RNA, 21 nt, Artificial Sequence
  Guide RNA
gacuaacccagggaaaggaca

SEQ ID NO: 21148 - RNA, 21 nt, Artificial Sequence
  Guide RNA
gcuuuucccuguccuuucccu

SEQ ID NO: 21149 - RNA, 21 nt, Artificial Sequence
  Guide RNA
gcuuuuuccuguccuuucccu

SEQ ID NO: 21150 - RNA, 21 nt, Artificial Sequence
  Guide RNA
ggaaaaagcuagaaaguguuu

SEQ ID NO: 21151 - RNA, 21 nt, Artificial Sequence
  Guide RNA
ggaaaagcuagaaaguguuuu

SEQ ID NO: 21152 - RNA, 21 nt, Artificial Sequence
  Guide RNA
ggaaaggacaggaaaaagcua

SEQ ID NO: 21153 - RNA, 21 nt, Artificial Sequence
  Guide RNA
ggaaaggacagggaaaagcua

SEQ ID NO: 21154 - RNA, 21 nt, Artificial Sequence
  Guide RNA
ggacaggaaaaagcuagaaag

SEQ ID NO: 21155 - RNA, 21 nt, Artificial Sequence
  Guide RNA
ggacagggaaaagcuagaaag

SEQ ID NO: 21156 - RNA, 21 nt, Artificial Sequence
  Guide RNA
gggaaaagcuagaaaguguuu

SEQ ID NO: 21157 - RNA, 21 nt, Artificial Sequence
  Guide RNA
gggaaaggacaggaaaaagcu

SEQ ID NO: 21158 - RNA, 21 nt, Artificial Sequence
  Guide RNA
gggaaaggacagggaaaagcu

SEQ ID NO: 21159 - RNA, 21 nt, Artificial Sequence
  Guide RNA
uaacccagggaaaggacagga

SEQ ID NO: 21160 - RNA, 21 nt, Artificial Sequence
  Guide RNA
uaacccagggaaaggacaggg

SEQ ID NO: 21161 - RNA, 21 nt, Artificial Sequence
  Guide RNA
uagcuuuucccuguccuuucc

SEQ ID NO: 21162 - RNA, 21 nt, Artificial Sequence
  Guide RNA
uagcuuuuuccuguccuuucc

SEQ ID NO: 21163 - RNA, 21 nt, Artificial Sequence
  Guide RNA
ucccuguccuuucccuggguu

SEQ ID NO: 21164 - RNA, 21 nt, Artificial Sequence
  Guide RNA
ucuagcuuuucccuguccuuu

SEQ ID NO: 21165 - RNA, 21 nt, Artificial Sequence
  Guide RNA
ucuagcuuuuuccuguccuuu

SEQ ID NO: 21166 - RNA, 21 nt, Artificial Sequence
  Guide RNA
ugacuaacccagggaaaggac

SEQ ID NO: 21167 - RNA, 21 nt, Artificial Sequence
  Guide RNA
uucccuguccuuucccugggu

SEQ ID NO: 21168 - RNA, 21 nt, Artificial Sequence
  Guide RNA
uuccuguccuuucccuggguu

SEQ ID NO: 21169 - RNA, 21 nt, Artificial Sequence
  Guide RNA
uucuagcuuuucccuguccuu

SEQ ID NO: 21170 - RNA, 21 nt, Artificial Sequence
  Guide RNA
uucuagcuuuuuccuguccuu

SEQ ID NO: 21171 - RNA, 21 nt, Artificial Sequence
  Guide RNA
uuucccuguccuuucccuggg

SEQ ID NO: 21172 - RNA, 21 nt, Artificial Sequence
  Guide RNA
uuuccuguccuuucccugggu

SEQ ID NO: 21173 - RNA, 21 nt, Artificial Sequence
  Guide RNA
uuucuagcuuuucccuguccu

SEQ ID NO: 21174 - RNA, 21 nt, Artificial Sequence
  Guide RNA
uuucuagcuuuuuccuguccu

SEQ ID NO: 21175 - RNA, 21 nt, Artificial Sequence
  Guide RNA
uuuucccuguccuuucccugg

SEQ ID NO: 21176 - RNA, 21 nt, Artificial Sequence
  Guide RNA
uuuuccuguccuuucccuggg

SEQ ID NO: 21177 - RNA, 21 nt, Artificial Sequence
  Guide RNA
uuuuuccuguccuuucccugg

SEQ ID NO: 21178 - RNA, 22 nt, Artificial Sequence
  Guide RNA
aaaacacuuucuagcuuuuccc

SEQ ID NO: 21179 - RNA, 22 nt, Artificial Sequence
  Guide RNA
aaaacacuuucuagcuuuuucc

SEQ ID NO: 21180 - RNA, 22 nt, Artificial Sequence
  Guide RNA
aaacacuuucuagcuuuucccu

SEQ ID NO: 21181 - RNA, 22 nt, Artificial Sequence
  Guide RNA
aaacacuuucuagcuuuuuccu

SEQ ID NO: 21182 - RNA, 22 nt, Artificial Sequence
  Guide RNA
aaaggacaggaaaaagcuagaa

SEQ ID NO: 21183 - RNA, 22 nt, Artificial Sequence
  Guide RNA
aaaggacagggaaaagcuagaa

SEQ ID NO: 21184 - RNA, 22 nt, Artificial Sequence
  Guide RNA
aacacuuucuagcuuuucccug

SEQ ID NO: 21185 - RNA, 22 nt, Artificial Sequence
  Guide RNA
aacacuuucuagcuuuuuccug

SEQ ID NO: 21186 - RNA, 22 nt, Artificial Sequence
  Guide RNA
aacccagggaaaggacaggaaa

SEQ ID NO: 21187 - RNA, 22 nt, Artificial Sequence
  Guide RNA
aacccagggaaaggacagggaa

SEQ ID NO: 21188 - RNA, 22 nt, Artificial Sequence
  Guide RNA
aaggacaggaaaaagcuagaaa

SEQ ID NO: 21189 - RNA, 22 nt, Artificial Sequence
  Guide RNA
aaggacagggaaaagcuagaaa

SEQ ID NO: 21190 - RNA, 22 nt, Artificial Sequence
  Guide RNA
acacuuucuagcuuuucccugu

SEQ ID NO: 21191 - RNA, 22 nt, Artificial Sequence
  Guide RNA
acacuuucuagcuuuuuccugu

SEQ ID NO: 21192 - RNA, 22 nt, Artificial Sequence
  Guide RNA
acaggaaaaagcuagaaagugu

SEQ ID NO: 21193 - RNA, 22 nt, Artificial Sequence
  Guide RNA
acagggaaaagcuagaaagugu

SEQ ID NO: 21194 - RNA, 22 nt, Artificial Sequence
  Guide RNA
acccagggaaaggacaggaaaa

SEQ ID NO: 21195 - RNA, 22 nt, Artificial Sequence
  Guide RNA
acccagggaaaggacagggaaa

SEQ ID NO: 21196 - RNA, 22 nt, Artificial Sequence
  Guide RNA
acuaacccagggaaaggacagg

SEQ ID NO: 21197 - RNA, 22 nt, Artificial Sequence
  Guide RNA
acuuucuagcuuuucccugucc

SEQ ID NO: 21198 - RNA, 22 nt, Artificial Sequence
  Guide RNA
acuuucuagcuuuuuccugucc

SEQ ID NO: 21199 - RNA, 22 nt, Artificial Sequence
  Guide RNA
agcuuuucccuguccuuucccu

SEQ ID NO: 21200 - RNA, 22 nt, Artificial Sequence
  Guide RNA
agcuuuuuccuguccuuucccu

SEQ ID NO: 21201 - RNA, 22 nt, Artificial Sequence
  Guide RNA
aggaaaaagcuagaaaguguuu

SEQ ID NO: 21202 - RNA, 22 nt, Artificial Sequence
  Guide RNA
aggacaggaaaaagcuagaaag

SEQ ID NO: 21203 - RNA, 22 nt, Artificial Sequence
  Guide RNA
aggacagggaaaagcuagaaag

SEQ ID NO: 21204 - RNA, 22 nt, Artificial Sequence
  Guide RNA
agggaaaagcuagaaaguguuu

SEQ ID NO: 21205 - RNA, 22 nt, Artificial Sequence
  Guide RNA
agggaaaggacaggaaaaagcu

SEQ ID NO: 21206 - RNA, 22 nt, Artificial Sequence
  Guide RNA
agggaaaggacagggaaaagcu

SEQ ID NO: 21207 - RNA, 22 nt, Artificial Sequence
  Guide RNA
caaaacacuuucuagcuuuucc

SEQ ID NO: 21208 - RNA, 22 nt, Artificial Sequence
  Guide RNA
caaaacacuuucuagcuuuuuc

SEQ ID NO: 21209 - RNA, 22 nt, Artificial Sequence
  Guide RNA
cacuuucuagcuuuucccuguc

SEQ ID NO: 21210 - RNA, 22 nt, Artificial Sequence
  Guide RNA
cacuuucuagcuuuuuccuguc

SEQ ID NO: 21211 - RNA, 22 nt, Artificial Sequence
  Guide RNA
caggaaaaagcuagaaaguguu

SEQ ID NO: 21212 - RNA, 22 nt, Artificial Sequence
  Guide RNA
cagggaaaagcuagaaaguguu

SEQ ID NO: 21213 - RNA, 22 nt, Artificial Sequence
  Guide RNA
cagggaaaggacaggaaaaagc

SEQ ID NO: 21214 - RNA, 22 nt, Artificial Sequence
  Guide RNA
cagggaaaggacagggaaaagc

SEQ ID NO: 21215 - RNA, 22 nt, Artificial Sequence
  Guide RNA
ccagggaaaggacaggaaaaag

SEQ ID NO: 21216 - RNA, 22 nt, Artificial Sequence
  Guide RNA
ccagggaaaggacagggaaaag

SEQ ID NO: 21217 - RNA, 22 nt, Artificial Sequence
  Guide RNA
cccagggaaaggacaggaaaaa

SEQ ID NO: 21218 - RNA, 22 nt, Artificial Sequence
  Guide RNA
cccagggaaaggacagggaaaa

SEQ ID NO: 21219 - RNA, 22 nt, Artificial Sequence
  Guide RNA
cuaacccagggaaaggacagga

SEQ ID NO: 21220 - RNA, 22 nt, Artificial Sequence
  Guide RNA
cuaacccagggaaaggacaggg

SEQ ID NO: 21221 - RNA, 22 nt, Artificial Sequence
  Guide RNA
cuagcuuuucccuguccuuucc

SEQ ID NO: 21222 - RNA, 22 nt, Artificial Sequence
  Guide RNA
cuagcuuuuuccuguccuuucc

SEQ ID NO: 21223 - RNA, 22 nt, Artificial Sequence
  Guide RNA
cugacuaacccagggaaaggac

SEQ ID NO: 21224 - RNA, 22 nt, Artificial Sequence
  Guide RNA
cuuucuagcuuuucccuguccu

SEQ ID NO: 21225 - RNA, 22 nt, Artificial Sequence
  Guide RNA
cuuucuagcuuuuuccuguccu

SEQ ID NO: 21226 - RNA, 22 nt, Artificial Sequence
  Guide RNA
cuuuucccuguccuuucccugg

SEQ ID NO: 21227 - RNA, 22 nt, Artificial Sequence
  Guide RNA
cuuuuuccuguccuuucccugg

SEQ ID NO: 21228 - RNA, 22 nt, Artificial Sequence
  Guide RNA
gaaaaagcuagaaaguguuuug

SEQ ID NO: 21229 - RNA, 22 nt, Artificial Sequence
  Guide RNA
gaaaggacaggaaaaagcuaga

SEQ ID NO: 21230 - RNA, 22 nt, Artificial Sequence
  Guide RNA
gaaaggacagggaaaagcuaga

SEQ ID NO: 21231 - RNA, 22 nt, Artificial Sequence
  Guide RNA
gacaggaaaaagcuagaaagug

SEQ ID NO: 21232 - RNA, 22 nt, Artificial Sequence
  Guide RNA
gacagggaaaagcuagaaagug

SEQ ID NO: 21233 - RNA, 22 nt, Artificial Sequence
  Guide RNA
gacuaacccagggaaaggacag

SEQ ID NO: 21234 - RNA, 22 nt, Artificial Sequence
  Guide RNA
gcuuuucccuguccuuucccug

SEQ ID NO: 21235 - RNA, 22 nt, Artificial Sequence
  Guide RNA
gcuuuuuccuguccuuucccug

SEQ ID NO: 21236 - RNA, 22 nt, Artificial Sequence
  Guide RNA
ggaaaaagcuagaaaguguuuu

SEQ ID NO: 21237 - RNA, 22 nt, Artificial Sequence
  Guide RNA
ggaaaagcuagaaaguguuuug

SEQ ID NO: 21238 - RNA, 22 nt, Artificial Sequence
  Guide RNA
ggaaaggacaggaaaaagcuag

SEQ ID NO: 21239 - RNA, 22 nt, Artificial Sequence
  Guide RNA
ggaaaggacagggaaaagcuag

SEQ ID NO: 21240 - RNA, 22 nt, Artificial Sequence
  Guide RNA
ggacaggaaaaagcuagaaagu

SEQ ID NO: 21241 - RNA, 22 nt, Artificial Sequence
  Guide RNA
ggacagggaaaagcuagaaagu

SEQ ID NO: 21242 - RNA, 22 nt, Artificial Sequence
  Guide RNA
gggaaaagcuagaaaguguuuu

SEQ ID NO: 21243 - RNA, 22 nt, Artificial Sequence
  Guide RNA
gggaaaggacaggaaaaagcua

SEQ ID NO: 21244 - RNA, 22 nt, Artificial Sequence
  Guide RNA
gggaaaggacagggaaaagcua

SEQ ID NO: 21245 - RNA, 22 nt, Artificial Sequence
  Guide RNA
guuuucaaaacacuuucuagcu

SEQ ID NO: 21246 - RNA, 22 nt, Artificial Sequence
  Guide RNA
uaacccagggaaaggacaggaa

SEQ ID NO: 21247 - RNA, 22 nt, Artificial Sequence
  Guide RNA
uaacccagggaaaggacaggga

SEQ ID NO: 21248 - RNA, 22 nt, Artificial Sequence
  Guide RNA
uagcuuuucccuguccuuuccc

SEQ ID NO: 21249 - RNA, 22 nt, Artificial Sequence
  Guide RNA
uagcuuuuuccuguccuuuccc

SEQ ID NO: 21250 - RNA, 22 nt, Artificial Sequence
  Guide RNA
ucaaaacacuuucuagcuuuuc

SEQ ID NO: 21251 - RNA, 22 nt, Artificial Sequence
  Guide RNA
ucccuguccuuucccuggguua

SEQ ID NO: 21252 - RNA, 22 nt, Artificial Sequence
  Guide RNA
ucuagcuuuucccuguccuuuc

SEQ ID NO: 21253 - RNA, 22 nt, Artificial Sequence
  Guide RNA
ucuagcuuuuuccuguccuuuc

SEQ ID NO: 21254 - RNA, 22 nt, Artificial Sequence
  Guide RNA
ugacuaacccagggaaaggaca

SEQ ID NO: 21255 - RNA, 22 nt, Artificial Sequence
  Guide RNA
uucccuguccuuucccuggguu

SEQ ID NO: 21256 - RNA, 22 nt, Artificial Sequence
  Guide RNA
uuccuguccuuucccuggguua

SEQ ID NO: 21257 - RNA, 22 nt, Artificial Sequence
  Guide RNA
uucuagcuuuucccuguccuuu

SEQ ID NO: 21258 - RNA, 22 nt, Artificial Sequence
  Guide RNA
uucuagcuuuuuccuguccuuu

SEQ ID NO: 21259 - RNA, 22 nt, Artificial Sequence
  Guide RNA
uuucccuguccuuucccugggu

SEQ ID NO: 21260 - RNA, 22 nt, Artificial Sequence
  Guide RNA
uuuccuguccuuucccuggguu

SEQ ID NO: 21261 - RNA, 22 nt, Artificial Sequence
  Guide RNA
uuucuagcuuuucccuguccuu

SEQ ID NO: 21262 - RNA, 22 nt, Artificial Sequence
  Guide RNA
uuucuagcuuuuuccuguccuu

SEQ ID NO: 21263 - RNA, 22 nt, Artificial Sequence
  Guide RNA
uuuucccuguccuuucccuggg

SEQ ID NO: 21264 - RNA, 22 nt, Artificial Sequence
  Guide RNA
uuuuccuguccuuucccugggu

SEQ ID NO: 21265 - RNA, 22 nt, Artificial Sequence
  Guide RNA
uuuuuccuguccuuucccuggg

SEQ ID NO: 21266 - RNA, 20 nt, Artificial Sequence
  Guide RNA
acaugccuuugucacccuuu

SEQ ID NO: 21267 - RNA, 20 nt, Artificial Sequence
  Guide RNA
acccuuugcccccagcagga

SEQ ID NO: 21268 - RNA, 20 nt, Artificial Sequence
  Guide RNA
acccuuuucccccagcagga

SEQ ID NO: 21269 - RNA, 20 nt, Artificial Sequence
  Guide RNA
acugcgcuagguccugcugg

SEQ ID NO: 21270 - RNA, 20 nt, Artificial Sequence
  Guide RNA
agacaugccuuugucacccu

SEQ ID NO: 21271 - RNA, 20 nt, Artificial Sequence
  Guide RNA
agguccugcugggggaaaag

SEQ ID NO: 21272 - RNA, 20 nt, Artificial Sequence
  Guide RNA
agguccugcugggggcaaag

SEQ ID NO: 21273 - RNA, 20 nt, Artificial Sequence
  Guide RNA
augccuuugucacccuuugc

SEQ ID NO: 21274 - RNA, 20 nt, Artificial Sequence
  Guide RNA
augccuuugucacccuuuuc

SEQ ID NO: 21275 - RNA, 20 nt, Artificial Sequence
  Guide RNA
cacccuuugcccccagcagg

SEQ ID NO: 21276 - RNA, 20 nt, Artificial Sequence
  Guide RNA
cacccuuuucccccagcagg

SEQ ID NO: 21277 - RNA, 20 nt, Artificial Sequence
  Guide RNA
caugccuuugucacccuuug

SEQ ID NO: 21278 - RNA, 20 nt, Artificial Sequence
  Guide RNA
caugccuuugucacccuuuu

SEQ ID NO: 21279 - RNA, 20 nt, Artificial Sequence
  Guide RNA
cccuuugcccccagcaggac

SEQ ID NO: 21280 - RNA, 20 nt, Artificial Sequence
  Guide RNA
cccuuuucccccagcaggac

SEQ ID NO: 21281 - RNA, 20 nt, Artificial Sequence
  Guide RNA
ccugcugggggaaaagggug

SEQ ID NO: 21282 - RNA, 20 nt, Artificial Sequence
  Guide RNA
ccugcugggggcaaagggug

SEQ ID NO: 21283 - RNA, 20 nt, Artificial Sequence
  Guide RNA
ccuuugcccccagcaggacc

SEQ ID NO: 21284 - RNA, 20 nt, Artificial Sequence
  Guide RNA
ccuuugucacccuuugcccc

SEQ ID NO: 21285 - RNA, 20 nt, Artificial Sequence
  Guide RNA
ccuuugucacccuuuucccc

SEQ ID NO: 21286 - RNA, 20 nt, Artificial Sequence
  Guide RNA
ccuuuucccccagcaggacc

SEQ ID NO: 21287 - RNA, 20 nt, Artificial Sequence
  Guide RNA
cgcuagguccugcuggggga

SEQ ID NO: 21288 - RNA, 20 nt, Artificial Sequence
  Guide RNA
cgcuagguccugcugggggc

SEQ ID NO: 21289 - RNA, 20 nt, Artificial Sequence
  Guide RNA
cuagguccugcugggggaaa

SEQ ID NO: 21290 - RNA, 20 nt, Artificial Sequence
  Guide RNA
cuagguccugcugggggcaa

SEQ ID NO: 21291 - RNA, 20 nt, Artificial Sequence
  Guide RNA
cugcgcuagguccugcuggg

SEQ ID NO: 21292 - RNA, 20 nt, Artificial Sequence
  Guide RNA
cugcugggggaaaaggguga

SEQ ID NO: 21293 - RNA, 20 nt, Artificial Sequence
  Guide RNA
cugcugggggcaaaggguga

SEQ ID NO: 21294 - RNA, 20 nt, Artificial Sequence
  Guide RNA
cugggggaaaagggugacaa

SEQ ID NO: 21295 - RNA, 20 nt, Artificial Sequence
  Guide RNA
cugggggcaaagggugacaa

SEQ ID NO: 21296 - RNA, 20 nt, Artificial Sequence
  Guide RNA
cuuugcccccagcaggaccu

SEQ ID NO: 21297 - RNA, 20 nt, Artificial Sequence
  Guide RNA
cuuugucacccuuugccccc

SEQ ID NO: 21298 - RNA, 20 nt, Artificial Sequence
  Guide RNA
cuuugucacccuuuuccccc

SEQ ID NO: 21299 - RNA, 20 nt, Artificial Sequence
  Guide RNA
cuuuucccccagcaggaccu

SEQ ID NO: 21300 - RNA, 20 nt, Artificial Sequence
  Guide RNA
gaaaagggugacaaaggcau

SEQ ID NO: 21301 - RNA, 20 nt, Artificial Sequence
  Guide RNA
gacaugccuuugucacccuu

SEQ ID NO: 21302 - RNA, 20 nt, Artificial Sequence
  Guide RNA
gagacaugccuuugucaccc

SEQ ID NO: 21303 - RNA, 20 nt, Artificial Sequence
  Guide RNA
gcaaagggugacaaaggcau

SEQ ID NO: 21304 - RNA, 20 nt, Artificial Sequence
  Guide RNA
gccuuugucacccuuugccc

SEQ ID NO: 21305 - RNA, 20 nt, Artificial Sequence
  Guide RNA
gccuuugucacccuuuuccc

SEQ ID NO: 21306 - RNA, 20 nt, Artificial Sequence
  Guide RNA
gcgcuagguccugcuggggg

SEQ ID NO: 21307 - RNA, 20 nt, Artificial Sequence
  Guide RNA
gcuagguccugcugggggaa

SEQ ID NO: 21308 - RNA, 20 nt, Artificial Sequence
  Guide RNA
gcuagguccugcugggggca

SEQ ID NO: 21309 - RNA, 20 nt, Artificial Sequence
  Guide RNA
gcugggggaaaagggugaca

SEQ ID NO: 21310 - RNA, 20 nt, Artificial Sequence
  Guide RNA
gcugggggcaaagggugaca

SEQ ID NO: 21311 - RNA, 20 nt, Artificial Sequence
  Guide RNA
ggaaaagggugacaaaggca

SEQ ID NO: 21312 - RNA, 20 nt, Artificial Sequence
  Guide RNA
ggcaaagggugacaaaggca

SEQ ID NO: 21313 - RNA, 20 nt, Artificial Sequence
  Guide RNA
gggaaaagggugacaaaggc

SEQ ID NO: 21314 - RNA, 20 nt, Artificial Sequence
  Guide RNA
gggcaaagggugacaaaggc

SEQ ID NO: 21315 - RNA, 20 nt, Artificial Sequence
  Guide RNA
ggggaaaagggugacaaagg

SEQ ID NO: 21316 - RNA, 20 nt, Artificial Sequence
  Guide RNA
ggggcaaagggugacaaagg

SEQ ID NO: 21317 - RNA, 20 nt, Artificial Sequence
  Guide RNA
gggggaaaagggugacaaag

SEQ ID NO: 21318 - RNA, 20 nt, Artificial Sequence
  Guide RNA
gggggcaaagggugacaaag

SEQ ID NO: 21319 - RNA, 20 nt, Artificial Sequence
  Guide RNA
gguccugcugggggaaaagg

SEQ ID NO: 21320 - RNA, 20 nt, Artificial Sequence
  Guide RNA
gguccugcugggggcaaagg

SEQ ID NO: 21321 - RNA, 20 nt, Artificial Sequence
  Guide RNA
gucacccuuugcccccagca

SEQ ID NO: 21322 - RNA, 20 nt, Artificial Sequence
  Guide RNA
gucacccuuuucccccagca

SEQ ID NO: 21323 - RNA, 20 nt, Artificial Sequence
  Guide RNA
guccugcugggggaaaaggg

SEQ ID NO: 21324 - RNA, 20 nt, Artificial Sequence
  Guide RNA
guccugcugggggcaaaggg

SEQ ID NO: 21325 - RNA, 20 nt, Artificial Sequence
  Guide RNA
uagguccugcugggggaaaa

SEQ ID NO: 21326 - RNA, 20 nt, Artificial Sequence
  Guide RNA
uagguccugcugggggcaaa

SEQ ID NO: 21327 - RNA, 20 nt, Artificial Sequence
  Guide RNA
ucacccuuugcccccagcag

SEQ ID NO: 21328 - RNA, 20 nt, Artificial Sequence
  Guide RNA
ucacccuuuucccccagcag

SEQ ID NO: 21329 - RNA, 20 nt, Artificial Sequence
  Guide RNA
uccugcugggggaaaagggu

SEQ ID NO: 21330 - RNA, 20 nt, Artificial Sequence
  Guide RNA
uccugcugggggcaaagggu

SEQ ID NO: 21331 - RNA, 20 nt, Artificial Sequence
  Guide RNA
ugcccccagcaggaccuagc

SEQ ID NO: 21332 - RNA, 20 nt, Artificial Sequence
  Guide RNA
ugccuuugucacccuuugcc

SEQ ID NO: 21333 - RNA, 20 nt, Artificial Sequence
  Guide RNA
ugccuuugucacccuuuucc

SEQ ID NO: 21334 - RNA, 20 nt, Artificial Sequence
  Guide RNA
ugcgcuagguccugcugggg

SEQ ID NO: 21335 - RNA, 20 nt, Artificial Sequence
  Guide RNA
ugcugggggaaaagggugac

SEQ ID NO: 21336 - RNA, 20 nt, Artificial Sequence
  Guide RNA
ugcugggggcaaagggugac

SEQ ID NO: 21337 - RNA, 20 nt, Artificial Sequence
  Guide RNA
ugggggaaaagggugacaaa

SEQ ID NO: 21338 - RNA, 20 nt, Artificial Sequence
  Guide RNA
ugggggcaaagggugacaaa

SEQ ID NO: 21339 - RNA, 20 nt, Artificial Sequence
  Guide RNA
ugucacccuuugcccccagc

SEQ ID NO: 21340 - RNA, 20 nt, Artificial Sequence
  Guide RNA
ugucacccuuuucccccagc

SEQ ID NO: 21341 - RNA, 20 nt, Artificial Sequence
  Guide RNA
uucccccagcaggaccuagc

SEQ ID NO: 21342 - RNA, 20 nt, Artificial Sequence
  Guide RNA
uugcccccagcaggaccuag

SEQ ID NO: 21343 - RNA, 20 nt, Artificial Sequence
  Guide RNA
uugucacccuuugcccccag

SEQ ID NO: 21344 - RNA, 20 nt, Artificial Sequence
  Guide RNA
uugucacccuuuucccccag

SEQ ID NO: 21345 - RNA, 20 nt, Artificial Sequence
  Guide RNA
uuucccccagcaggaccuag

SEQ ID NO: 21346 - RNA, 20 nt, Artificial Sequence
  Guide RNA
uuugcccccagcaggaccua

SEQ ID NO: 21347 - RNA, 20 nt, Artificial Sequence
  Guide RNA
uuugucacccuuugccccca

SEQ ID NO: 21348 - RNA, 20 nt, Artificial Sequence
  Guide RNA
uuugucacccuuuuccccca

SEQ ID NO: 21349 - RNA, 20 nt, Artificial Sequence
  Guide RNA
uuuucccccagcaggaccua

SEQ ID NO: 21350 - RNA, 21 nt, Artificial Sequence
  Guide RNA
acaugccuuugucacccuuug

SEQ ID NO: 21351 - RNA, 21 nt, Artificial Sequence
  Guide RNA
acaugccuuugucacccuuuu

SEQ ID NO: 21352 - RNA, 21 nt, Artificial Sequence
  Guide RNA
acccuuugcccccagcaggac

SEQ ID NO: 21353 - RNA, 21 nt, Artificial Sequence
  Guide RNA
acccuuuucccccagcaggac

SEQ ID NO: 21354 - RNA, 21 nt, Artificial Sequence
  Guide RNA
acugcgcuagguccugcuggg

SEQ ID NO: 21355 - RNA, 21 nt, Artificial Sequence
  Guide RNA
agacaugccuuugucacccuu

SEQ ID NO: 21356 - RNA, 21 nt, Artificial Sequence
  Guide RNA
agagacaugccuuugucaccc

SEQ ID NO: 21357 - RNA, 21 nt, Artificial Sequence
  Guide RNA
agguccugcugggggaaaagg

SEQ ID NO: 21358 - RNA, 21 nt, Artificial Sequence
  Guide RNA
agguccugcugggggcaaagg

SEQ ID NO: 21359 - RNA, 21 nt, Artificial Sequence
  Guide RNA
augccuuugucacccuuugcc

SEQ ID NO: 21360 - RNA, 21 nt, Artificial Sequence
  Guide RNA
augccuuugucacccuuuucc

SEQ ID NO: 21361 - RNA, 21 nt, Artificial Sequence
  Guide RNA
cacccuuugcccccagcagga

SEQ ID NO: 21362 - RNA, 21 nt, Artificial Sequence
  Guide RNA
cacccuuuucccccagcagga

SEQ ID NO: 21363 - RNA, 21 nt, Artificial Sequence
  Guide RNA
cacugcgcuagguccugcugg

SEQ ID NO: 21364 - RNA, 21 nt, Artificial Sequence
  Guide RNA
caugccuuugucacccuuugc

SEQ ID NO: 21365 - RNA, 21 nt, Artificial Sequence
  Guide RNA
caugccuuugucacccuuuuc

SEQ ID NO: 21366 - RNA, 21 nt, Artificial Sequence
  Guide RNA
cccuuugcccccagcaggacc

SEQ ID NO: 21367 - RNA, 21 nt, Artificial Sequence
  Guide RNA
cccuuuucccccagcaggacc

SEQ ID NO: 21368 - RNA, 21 nt, Artificial Sequence
  Guide RNA
ccugcugggggaaaaggguga

SEQ ID NO: 21369 - RNA, 21 nt, Artificial Sequence
  Guide RNA
ccugcugggggcaaaggguga

SEQ ID NO: 21370 - RNA, 21 nt, Artificial Sequence
  Guide RNA
ccuuugcccccagcaggaccu

SEQ ID NO: 21371 - RNA, 21 nt, Artificial Sequence
  Guide RNA
ccuuugucacccuuugccccc

SEQ ID NO: 21372 - RNA, 21 nt, Artificial Sequence
  Guide RNA
ccuuugucacccuuuuccccc

SEQ ID NO: 21373 - RNA, 21 nt, Artificial Sequence
  Guide RNA
ccuuuucccccagcaggaccu

SEQ ID NO: 21374 - RNA, 21 nt, Artificial Sequence
  Guide RNA
cgcuagguccugcugggggaa

SEQ ID NO: 21375 - RNA, 21 nt, Artificial Sequence
  Guide RNA
cgcuagguccugcugggggca

SEQ ID NO: 21376 - RNA, 21 nt, Artificial Sequence
  Guide RNA
cuagguccugcugggggaaaa

SEQ ID NO: 21377 - RNA, 21 nt, Artificial Sequence
  Guide RNA
cuagguccugcugggggcaaa

SEQ ID NO: 21378 - RNA, 21 nt, Artificial Sequence
  Guide RNA
cugcgcuagguccugcugggg

SEQ ID NO: 21379 - RNA, 21 nt, Artificial Sequence
  Guide RNA
cugcugggggaaaagggugac

SEQ ID NO: 21380 - RNA, 21 nt, Artificial Sequence
  Guide RNA
cugcugggggcaaagggugac

SEQ ID NO: 21381 - RNA, 21 nt, Artificial Sequence
  Guide RNA
cugggggaaaagggugacaaa

SEQ ID NO: 21382 - RNA, 21 nt, Artificial Sequence
  Guide RNA
cugggggcaaagggugacaaa

SEQ ID NO: 21383 - RNA, 21 nt, Artificial Sequence
  Guide RNA
cuuugcccccagcaggaccua

SEQ ID NO: 21384 - RNA, 21 nt, Artificial Sequence
  Guide RNA
cuuugucacccuuugccccca

SEQ ID NO: 21385 - RNA, 21 nt, Artificial Sequence
  Guide RNA
cuuugucacccuuuuccccca

SEQ ID NO: 21386 - RNA, 21 nt, Artificial Sequence
  Guide RNA
cuuuucccccagcaggaccua

SEQ ID NO: 21387 - RNA, 21 nt, Artificial Sequence
  Guide RNA
gaaaagggugacaaaggcaug

SEQ ID NO: 21388 - RNA, 21 nt, Artificial Sequence
  Guide RNA
gacaugccuuugucacccuuu

SEQ ID NO: 21389 - RNA, 21 nt, Artificial Sequence
  Guide RNA
gagacaugccuuugucacccu

SEQ ID NO: 21390 - RNA, 21 nt, Artificial Sequence
  Guide RNA
gcaaagggugacaaaggcaug

SEQ ID NO: 21391 - RNA, 21 nt, Artificial Sequence
  Guide RNA
gccuuugucacccuuugcccc

SEQ ID NO: 21392 - RNA, 21 nt, Artificial Sequence
  Guide RNA
gccuuugucacccuuuucccc

SEQ ID NO: 21393 - RNA, 21 nt, Artificial Sequence
  Guide RNA
gcgcuagguccugcuggggga

SEQ ID NO: 21394 - RNA, 21 nt, Artificial Sequence
  Guide RNA
gcgcuagguccugcugggggc

SEQ ID NO: 21395 - RNA, 21 nt, Artificial Sequence
  Guide RNA
gcuagguccugcugggggaaa

SEQ ID NO: 21396 - RNA, 21 nt, Artificial Sequence
  Guide RNA
gcuagguccugcugggggcaa

SEQ ID NO: 21397 - RNA, 21 nt, Artificial Sequence
  Guide RNA
gcugggggaaaagggugacaa

SEQ ID NO: 21398 - RNA, 21 nt, Artificial Sequence
  Guide RNA
gcugggggcaaagggugacaa

SEQ ID NO: 21399 - RNA, 21 nt, Artificial Sequence
  Guide RNA
ggaaaagggugacaaaggcau

SEQ ID NO: 21400 - RNA, 21 nt, Artificial Sequence
  Guide RNA
ggcaaagggugacaaaggcau

SEQ ID NO: 21401 - RNA, 21 nt, Artificial Sequence
  Guide RNA
gggaaaagggugacaaaggca

SEQ ID NO: 21402 - RNA, 21 nt, Artificial Sequence
  Guide RNA
gggcaaagggugacaaaggca

SEQ ID NO: 21403 - RNA, 21 nt, Artificial Sequence
  Guide RNA
ggggaaaagggugacaaaggc

SEQ ID NO: 21404 - RNA, 21 nt, Artificial Sequence
  Guide RNA
ggggcaaagggugacaaaggc

SEQ ID NO: 21405 - RNA, 21 nt, Artificial Sequence
  Guide RNA
gggggaaaagggugacaaagg

SEQ ID NO: 21406 - RNA, 21 nt, Artificial Sequence
  Guide RNA
gggggcaaagggugacaaagg

SEQ ID NO: 21407 - RNA, 21 nt, Artificial Sequence
  Guide RNA
gguccugcugggggaaaaggg

SEQ ID NO: 21408 - RNA, 21 nt, Artificial Sequence
  Guide RNA
gguccugcugggggcaaaggg

SEQ ID NO: 21409 - RNA, 21 nt, Artificial Sequence
  Guide RNA
gucacccuuugcccccagcag

SEQ ID NO: 21410 - RNA, 21 nt, Artificial Sequence
  Guide RNA
gucacccuuuucccccagcag

SEQ ID NO: 21411 - RNA, 21 nt, Artificial Sequence
  Guide RNA
guccugcugggggaaaagggu

SEQ ID NO: 21412 - RNA, 21 nt, Artificial Sequence
  Guide RNA
guccugcugggggcaaagggu

SEQ ID NO: 21413 - RNA, 21 nt, Artificial Sequence
  Guide RNA
uagguccugcugggggaaaag

SEQ ID NO: 21414 - RNA, 21 nt, Artificial Sequence
  Guide RNA
uagguccugcugggggcaaag

SEQ ID NO: 21415 - RNA, 21 nt, Artificial Sequence
  Guide RNA
ucacccuuugcccccagcagg

SEQ ID NO: 21416 - RNA, 21 nt, Artificial Sequence
  Guide RNA
ucacccuuuucccccagcagg

SEQ ID NO: 21417 - RNA, 21 nt, Artificial Sequence
  Guide RNA
uccugcugggggaaaagggug

SEQ ID NO: 21418 - RNA, 21 nt, Artificial Sequence
  Guide RNA
uccugcugggggcaaagggug

SEQ ID NO: 21419 - RNA, 21 nt, Artificial Sequence
  Guide RNA
ugcccccagcaggaccuagcg

SEQ ID NO: 21420 - RNA, 21 nt, Artificial Sequence
  Guide RNA
ugccuuugucacccuuugccc

SEQ ID NO: 21421 - RNA, 21 nt, Artificial Sequence
  Guide RNA
ugccuuugucacccuuuuccc

SEQ ID NO: 21422 - RNA, 21 nt, Artificial Sequence
  Guide RNA
ugcgcuagguccugcuggggg

SEQ ID NO: 21423 - RNA, 21 nt, Artificial Sequence
  Guide RNA
ugcugggggaaaagggugaca

SEQ ID NO: 21424 - RNA, 21 nt, Artificial Sequence
  Guide RNA
ugcugggggcaaagggugaca

SEQ ID NO: 21425 - RNA, 21 nt, Artificial Sequence
  Guide RNA
ugggggaaaagggugacaaag

SEQ ID NO: 21426 - RNA, 21 nt, Artificial Sequence
  Guide RNA
ugggggcaaagggugacaaag

SEQ ID NO: 21427 - RNA, 21 nt, Artificial Sequence
  Guide RNA
ugucacccuuugcccccagca

SEQ ID NO: 21428 - RNA, 21 nt, Artificial Sequence
  Guide RNA
ugucacccuuuucccccagca

SEQ ID NO: 21429 - RNA, 21 nt, Artificial Sequence
  Guide RNA
uucccccagcaggaccuagcg

SEQ ID NO: 21430 - RNA, 21 nt, Artificial Sequence
  Guide RNA
uugcccccagcaggaccuagc

SEQ ID NO: 21431 - RNA, 21 nt, Artificial Sequence
  Guide RNA
uugucacccuuugcccccagc

SEQ ID NO: 21432 - RNA, 21 nt, Artificial Sequence
  Guide RNA
uugucacccuuuucccccagc

SEQ ID NO: 21433 - RNA, 21 nt, Artificial Sequence
  Guide RNA
uuucccccagcaggaccuagc

SEQ ID NO: 21434 - RNA, 21 nt, Artificial Sequence
  Guide RNA
uuugcccccagcaggaccuag

SEQ ID NO: 21435 - RNA, 21 nt, Artificial Sequence
  Guide RNA
uuugucacccuuugcccccag

SEQ ID NO: 21436 - RNA, 21 nt, Artificial Sequence
  Guide RNA
uuugucacccuuuucccccag

SEQ ID NO: 21437 - RNA, 21 nt, Artificial Sequence
  Guide RNA
uuuucccccagcaggaccuag

SEQ ID NO: 21438 - RNA, 22 nt, Artificial Sequence
  Guide RNA
acaugccuuugucacccuuugc

SEQ ID NO: 21439 - RNA, 22 nt, Artificial Sequence
  Guide RNA
acaugccuuugucacccuuuuc

SEQ ID NO: 21440 - RNA, 22 nt, Artificial Sequence
  Guide RNA
acccuuugcccccagcaggacc

SEQ ID NO: 21441 - RNA, 22 nt, Artificial Sequence
  Guide RNA
acccuuuucccccagcaggacc

SEQ ID NO: 21442 - RNA, 22 nt, Artificial Sequence
  Guide RNA
acugcgcuagguccugcugggg

SEQ ID NO: 21443 - RNA, 22 nt, Artificial Sequence
  Guide RNA
agacaugccuuugucacccuuu

SEQ ID NO: 21444 - RNA, 22 nt, Artificial Sequence
  Guide RNA
agagacaugccuuugucacccu

SEQ ID NO: 21445 - RNA, 22 nt, Artificial Sequence
  Guide RNA
agguccugcugggggaaaaggg

SEQ ID NO: 21446 - RNA, 22 nt, Artificial Sequence
  Guide RNA
agguccugcugggggcaaaggg

SEQ ID NO: 21447 - RNA, 22 nt, Artificial Sequence
  Guide RNA
augccuuugucacccuuugccc

SEQ ID NO: 21448 - RNA, 22 nt, Artificial Sequence
  Guide RNA
augccuuugucacccuuuuccc

SEQ ID NO: 21449 - RNA, 22 nt, Artificial Sequence
  Guide RNA
cacccuuugcccccagcaggac

SEQ ID NO: 21450 - RNA, 22 nt, Artificial Sequence
  Guide RNA
cacccuuuucccccagcaggac

SEQ ID NO: 21451 - RNA, 22 nt, Artificial Sequence
  Guide RNA
cacugcgcuagguccugcuggg

SEQ ID NO: 21452 - RNA, 22 nt, Artificial Sequence
  Guide RNA
cagagacaugccuuugucaccc

SEQ ID NO: 21453 - RNA, 22 nt, Artificial Sequence
  Guide RNA
caugccuuugucacccuuugcc

SEQ ID NO: 21454 - RNA, 22 nt, Artificial Sequence
  Guide RNA
caugccuuugucacccuuuucc

SEQ ID NO: 21455 - RNA, 22 nt, Artificial Sequence
  Guide RNA
cccuuugcccccagcaggaccu

SEQ ID NO: 21456 - RNA, 22 nt, Artificial Sequence
  Guide RNA
cccuuuucccccagcaggaccu

SEQ ID NO: 21457 - RNA, 22 nt, Artificial Sequence
  Guide RNA
ccugcugggggaaaagggugac

SEQ ID NO: 21458 - RNA, 22 nt, Artificial Sequence
  Guide RNA
ccugcugggggcaaagggugac

SEQ ID NO: 21459 - RNA, 22 nt, Artificial Sequence
  Guide RNA
ccuuugcccccagcaggaccua

SEQ ID NO: 21460 - RNA, 22 nt, Artificial Sequence
  Guide RNA
ccuuugucacccuuugccccca

SEQ ID NO: 21461 - RNA, 22 nt, Artificial Sequence
  Guide RNA
ccuuugucacccuuuuccccca

SEQ ID NO: 21462 - RNA, 22 nt, Artificial Sequence
  Guide RNA
ccuuuucccccagcaggaccua

SEQ ID NO: 21463 - RNA, 22 nt, Artificial Sequence
  Guide RNA
cgcuagguccugcugggggaaa

SEQ ID NO: 21464 - RNA, 22 nt, Artificial Sequence
  Guide RNA
cgcuagguccugcugggggcaa

SEQ ID NO: 21465 - RNA, 22 nt, Artificial Sequence
  Guide RNA
cuagguccugcugggggaaaag

SEQ ID NO: 21466 - RNA, 22 nt, Artificial Sequence
  Guide RNA
cuagguccugcugggggcaaag

SEQ ID NO: 21467 - RNA, 22 nt, Artificial Sequence
  Guide RNA
cugcgcuagguccugcuggggg

SEQ ID NO: 21468 - RNA, 22 nt, Artificial Sequence
  Guide RNA
cugcugggggaaaagggugaca

SEQ ID NO: 21469 - RNA, 22 nt, Artificial Sequence
  Guide RNA
cugcugggggcaaagggugaca

SEQ ID NO: 21470 - RNA, 22 nt, Artificial Sequence
  Guide RNA
cugggggaaaagggugacaaag

SEQ ID NO: 21471 - RNA, 22 nt, Artificial Sequence
  Guide RNA
cugggggcaaagggugacaaag

SEQ ID NO: 21472 - RNA, 22 nt, Artificial Sequence
  Guide RNA
cuuugcccccagcaggaccuag

SEQ ID NO: 21473 - RNA, 22 nt, Artificial Sequence
  Guide RNA
cuuugucacccuuugcccccag

SEQ ID NO: 21474 - RNA, 22 nt, Artificial Sequence
  Guide RNA
cuuugucacccuuuucccccag

SEQ ID NO: 21475 - RNA, 22 nt, Artificial Sequence
  Guide RNA
cuuuucccccagcaggaccuag

SEQ ID NO: 21476 - RNA, 22 nt, Artificial Sequence
  Guide RNA
gaaaagggugacaaaggcaugu

SEQ ID NO: 21477 - RNA, 22 nt, Artificial Sequence
  Guide RNA
gacaugccuuugucacccuuug

SEQ ID NO: 21478 - RNA, 22 nt, Artificial Sequence
  Guide RNA
gacaugccuuugucacccuuuu

SEQ ID NO: 21479 - RNA, 22 nt, Artificial Sequence
  Guide RNA
gagacaugccuuugucacccuu

SEQ ID NO: 21480 - RNA, 22 nt, Artificial Sequence
  Guide RNA
gcaaagggugacaaaggcaugu

SEQ ID NO: 21481 - RNA, 22 nt, Artificial Sequence
  Guide RNA
gcacugcgcuagguccugcugg

SEQ ID NO: 21482 - RNA, 22 nt, Artificial Sequence
  Guide RNA
gccuuugucacccuuugccccc

SEQ ID NO: 21483 - RNA, 22 nt, Artificial Sequence
  Guide RNA
gccuuugucacccuuuuccccc

SEQ ID NO: 21484 - RNA, 22 nt, Artificial Sequence
  Guide RNA
gcgcuagguccugcugggggaa

SEQ ID NO: 21485 - RNA, 22 nt, Artificial Sequence
  Guide RNA
gcgcuagguccugcugggggca

SEQ ID NO: 21486 - RNA, 22 nt, Artificial Sequence
  Guide RNA
gcuagguccugcugggggaaaa

SEQ ID NO: 21487 - RNA, 22 nt, Artificial Sequence
  Guide RNA
gcuagguccugcugggggcaaa

SEQ ID NO: 21488 - RNA, 22 nt, Artificial Sequence
  Guide RNA
gcugggggaaaagggugacaaa

SEQ ID NO: 21489 - RNA, 22 nt, Artificial Sequence
  Guide RNA
gcugggggcaaagggugacaaa

SEQ ID NO: 21490 - RNA, 22 nt, Artificial Sequence
  Guide RNA
ggaaaagggugacaaaggcaug

SEQ ID NO: 21491 - RNA, 22 nt, Artificial Sequence
  Guide RNA
ggcaaagggugacaaaggcaug

SEQ ID NO: 21492 - RNA, 22 nt, Artificial Sequence
  Guide RNA
gggaaaagggugacaaaggcau

SEQ ID NO: 21493 - RNA, 22 nt, Artificial Sequence
  Guide RNA
gggcaaagggugacaaaggcau

SEQ ID NO: 21494 - RNA, 22 nt, Artificial Sequence
  Guide RNA
ggggaaaagggugacaaaggca

SEQ ID NO: 21495 - RNA, 22 nt, Artificial Sequence
  Guide RNA
ggggcaaagggugacaaaggca

SEQ ID NO: 21496 - RNA, 22 nt, Artificial Sequence
  Guide RNA
gggggaaaagggugacaaaggc

SEQ ID NO: 21497 - RNA, 22 nt, Artificial Sequence
  Guide RNA
gggggcaaagggugacaaaggc

SEQ ID NO: 21498 - RNA, 22 nt, Artificial Sequence
  Guide RNA
gguccugcugggggaaaagggu

SEQ ID NO: 21499 - RNA, 22 nt, Artificial Sequence
  Guide RNA
gguccugcugggggcaaagggu

SEQ ID NO: 21500 - RNA, 22 nt, Artificial Sequence
  Guide RNA
gucacccuuugcccccagcagg

SEQ ID NO: 21501 - RNA, 22 nt, Artificial Sequence
  Guide RNA
gucacccuuuucccccagcagg

SEQ ID NO: 21502 - RNA, 22 nt, Artificial Sequence
  Guide RNA
guccugcugggggaaaagggug

SEQ ID NO: 21503 - RNA, 22 nt, Artificial Sequence
  Guide RNA
guccugcugggggcaaagggug

SEQ ID NO: 21504 - RNA, 22 nt, Artificial Sequence
  Guide RNA
uagguccugcugggggaaaagg

SEQ ID NO: 21505 - RNA, 22 nt, Artificial Sequence
  Guide RNA
uagguccugcugggggcaaagg

SEQ ID NO: 21506 - RNA, 22 nt, Artificial Sequence
  Guide RNA
ucacccuuugcccccagcagga

SEQ ID NO: 21507 - RNA, 22 nt, Artificial Sequence
  Guide RNA
ucacccuuuucccccagcagga

SEQ ID NO: 21508 - RNA, 22 nt, Artificial Sequence
  Guide RNA
uccugcugggggaaaaggguga

SEQ ID NO: 21509 - RNA, 22 nt, Artificial Sequence
  Guide RNA
uccugcugggggcaaaggguga

SEQ ID NO: 21510 - RNA, 22 nt, Artificial Sequence
  Guide RNA
ugcccccagcaggaccuagcgc

SEQ ID NO: 21511 - RNA, 22 nt, Artificial Sequence
  Guide RNA
ugccuuugucacccuuugcccc

SEQ ID NO: 21512 - RNA, 22 nt, Artificial Sequence
  Guide RNA
ugccuuugucacccuuuucccc

SEQ ID NO: 21513 - RNA, 22 nt, Artificial Sequence
  Guide RNA
ugcgcuagguccugcuggggga

SEQ ID NO: 21514 - RNA, 22 nt, Artificial Sequence
  Guide RNA
ugcgcuagguccugcugggggc

SEQ ID NO: 21515 - RNA, 22 nt, Artificial Sequence
  Guide RNA
ugcugggggaaaagggugacaa

SEQ ID NO: 21516 - RNA, 22 nt, Artificial Sequence
  Guide RNA
ugcugggggcaaagggugacaa

SEQ ID NO: 21517 - RNA, 22 nt, Artificial Sequence
  Guide RNA
ugggggaaaagggugacaaagg

SEQ ID NO: 21518 - RNA, 22 nt, Artificial Sequence
  Guide RNA
ugggggcaaagggugacaaagg

SEQ ID NO: 21519 - RNA, 22 nt, Artificial Sequence
  Guide RNA
ugucacccuuugcccccagcag

SEQ ID NO: 21520 - RNA, 22 nt, Artificial Sequence
  Guide RNA
ugucacccuuuucccccagcag

SEQ ID NO: 21521 - RNA, 22 nt, Artificial Sequence
  Guide RNA
uucccccagcaggaccuagcgc

SEQ ID NO: 21522 - RNA, 22 nt, Artificial Sequence
  Guide RNA
uugcccccagcaggaccuagcg

SEQ ID NO: 21523 - RNA, 22 nt, Artificial Sequence
  Guide RNA
uugucacccuuugcccccagca

SEQ ID NO: 21524 - RNA, 22 nt, Artificial Sequence
  Guide RNA
uugucacccuuuucccccagca

SEQ ID NO: 21525 - RNA, 22 nt, Artificial Sequence
  Guide RNA
uuucccccagcaggaccuagcg

SEQ ID NO: 21526 - RNA, 22 nt, Artificial Sequence
  Guide RNA
uuugcccccagcaggaccuagc

SEQ ID NO: 21527 - RNA, 22 nt, Artificial Sequence
  Guide RNA
uuugucacccuuugcccccagc

SEQ ID NO: 21528 - RNA, 22 nt, Artificial Sequence
  Guide RNA
uuugucacccuuuucccccagc

SEQ ID NO: 21529 - RNA, 22 nt, Artificial Sequence
  Guide RNA
uuuucccccagcaggaccuagc

SEQ ID NO: 21530 - RNA, 20 nt, Artificial Sequence
  Guide RNA
aaaacuaacaugcacugaau

SEQ ID NO: 21531 - RNA, 20 nt, Artificial Sequence
  Guide RNA
aagcuuuguuauuugaggag

SEQ ID NO: 21532 - RNA, 20 nt, Artificial Sequence
  Guide RNA
aaucauucagugcauguuag

SEQ ID NO: 21533 - RNA, 20 nt, Artificial Sequence
  Guide RNA
acaacuaacaugcacugaau

SEQ ID NO: 21534 - RNA, 20 nt, Artificial Sequence
  Guide RNA
agcuuuguuauuugaggagu

SEQ ID NO: 21535 - RNA, 20 nt, Artificial Sequence
  Guide RNA
aggaguaaaacuaacaugca

SEQ ID NO: 21536 - RNA, 20 nt, Artificial Sequence
  Guide RNA
aggaguacaacuaacaugca

SEQ ID NO: 21537 - RNA, 20 nt, Artificial Sequence
  Guide RNA
aguaaaacuaacaugcacug

SEQ ID NO: 21538 - RNA, 20 nt, Artificial Sequence
  Guide RNA
aguacaacuaacaugcacug

SEQ ID NO: 21539 - RNA, 20 nt, Artificial Sequence
  Guide RNA
agugcauguuaguuguacuc

SEQ ID NO: 21540 - RNA, 20 nt, Artificial Sequence
  Guide RNA
agugcauguuaguuuuacuc

SEQ ID NO: 21541 - RNA, 20 nt, Artificial Sequence
  Guide RNA
aguuguacuccucaaauaac

SEQ ID NO: 21542 - RNA, 20 nt, Artificial Sequence
  Guide RNA
aguuuuacuccucaaauaac

SEQ ID NO: 21543 - RNA, 20 nt, Artificial Sequence
  Guide RNA
aucauucagugcauguuagu

SEQ ID NO: 21544 - RNA, 20 nt, Artificial Sequence
  Guide RNA
auguuaguuguacuccucaa

SEQ ID NO: 21545 - RNA, 20 nt, Artificial Sequence
  Guide RNA
auguuaguuuuacuccucaa

SEQ ID NO: 21546 - RNA, 20 nt, Artificial Sequence
  Guide RNA
auucagugcauguuaguugu

SEQ ID NO: 21547 - RNA, 20 nt, Artificial Sequence
  Guide RNA
auucagugcauguuaguuuu

SEQ ID NO: 21548 - RNA, 20 nt, Artificial Sequence
  Guide RNA
auuugaggaguaaaacuaac

SEQ ID NO: 21549 - RNA, 20 nt, Artificial Sequence
  Guide RNA
auuugaggaguacaacuaac

SEQ ID NO: 21550 - RNA, 20 nt, Artificial Sequence
  Guide RNA
cagugcauguuaguuguacu

SEQ ID NO: 21551 - RNA, 20 nt, Artificial Sequence
  Guide RNA
cagugcauguuaguuuuacu

SEQ ID NO: 21552 - RNA, 20 nt, Artificial Sequence
  Guide RNA
cauguuaguuguacuccuca

SEQ ID NO: 21553 - RNA, 20 nt, Artificial Sequence
  Guide RNA
cauguuaguuuuacuccuca

SEQ ID NO: 21554 - RNA, 20 nt, Artificial Sequence
  Guide RNA
cauucagugcauguuaguug

SEQ ID NO: 21555 - RNA, 20 nt, Artificial Sequence
  Guide RNA
cauucagugcauguuaguuu

SEQ ID NO: 21556 - RNA, 20 nt, Artificial Sequence
  Guide RNA
cuuuguuauuugaggaguaa

SEQ ID NO: 21557 - RNA, 20 nt, Artificial Sequence
  Guide RNA
cuuuguuauuugaggaguac

SEQ ID NO: 21558 - RNA, 20 nt, Artificial Sequence
  Guide RNA
gaagcuuuguuauuugagga

SEQ ID NO: 21559 - RNA, 20 nt, Artificial Sequence
  Guide RNA
gaggaguaaaacuaacaugc

SEQ ID NO: 21560 - RNA, 20 nt, Artificial Sequence
  Guide RNA
gaggaguacaacuaacaugc

SEQ ID NO: 21561 - RNA, 20 nt, Artificial Sequence
  Guide RNA
gaguaaaacuaacaugcacu

SEQ ID NO: 21562 - RNA, 20 nt, Artificial Sequence
  Guide RNA
gaguacaacuaacaugcacu

SEQ ID NO: 21563 - RNA, 20 nt, Artificial Sequence
  Guide RNA
gcauguuaguuguacuccuc

SEQ ID NO: 21564 - RNA, 20 nt, Artificial Sequence
  Guide RNA
gcauguuaguuuuacuccuc

SEQ ID NO: 21565 - RNA, 20 nt, Artificial Sequence
  Guide RNA
gcuuuguuauuugaggagua

SEQ ID NO: 21566 - RNA, 20 nt, Artificial Sequence
  Guide RNA
ggaguaaaacuaacaugcac

SEQ ID NO: 21567 - RNA, 20 nt, Artificial Sequence
  Guide RNA
ggaguacaacuaacaugcac

SEQ ID NO: 21568 - RNA, 20 nt, Artificial Sequence
  Guide RNA
guaaaacuaacaugcacuga

SEQ ID NO: 21569 - RNA, 20 nt, Artificial Sequence
  Guide RNA
guacaacuaacaugcacuga

SEQ ID NO: 21570 - RNA, 20 nt, Artificial Sequence
  Guide RNA
gugcauguuaguuguacucc

SEQ ID NO: 21571 - RNA, 20 nt, Artificial Sequence
  Guide RNA
gugcauguuaguuuuacucc

SEQ ID NO: 21572 - RNA, 20 nt, Artificial Sequence
  Guide RNA
guuaguuguacuccucaaau

SEQ ID NO: 21573 - RNA, 20 nt, Artificial Sequence
  Guide RNA
guuaguuuuacuccucaaau

SEQ ID NO: 21574 - RNA, 20 nt, Artificial Sequence
  Guide RNA
guuauuugaggaguaaaacu

SEQ ID NO: 21575 - RNA, 20 nt, Artificial Sequence
  Guide RNA
guuauuugaggaguacaacu

SEQ ID NO: 21576 - RNA, 20 nt, Artificial Sequence
  Guide RNA
guuguacuccucaaauaaca

SEQ ID NO: 21577 - RNA, 20 nt, Artificial Sequence
  Guide RNA
guuuuacuccucaaauaaca

SEQ ID NO: 21578 - RNA, 20 nt, Artificial Sequence
  Guide RNA
uaaaacuaacaugcacugaa

SEQ ID NO: 21579 - RNA, 20 nt, Artificial Sequence
  Guide RNA
uaaucauucagugcauguua

SEQ ID NO: 21580 - RNA, 20 nt, Artificial Sequence
  Guide RNA
uacaacuaacaugcacugaa

SEQ ID NO: 21581 - RNA, 20 nt, Artificial Sequence
  Guide RNA
uaguuguacuccucaaauaa

SEQ ID NO: 21582 - RNA, 20 nt, Artificial Sequence
  Guide RNA
uauuugaggaguacaacuaa

SEQ ID NO: 21583 - RNA, 20 nt, Artificial Sequence
  Guide RNA
ucagugcauguuaguuguac

SEQ ID NO: 21584 - RNA, 20 nt, Artificial Sequence
  Guide RNA
ucagugcauguuaguuuuac

SEQ ID NO: 21585 - RNA, 20 nt, Artificial Sequence
  Guide RNA
ucauucagugcauguuaguu

SEQ ID NO: 21586 - RNA, 20 nt, Artificial Sequence
  Guide RNA
ugaggaguaaaacuaacaug

SEQ ID NO: 21587 - RNA, 20 nt, Artificial Sequence
  Guide RNA
ugaggaguacaacuaacaug

SEQ ID NO: 21588 - RNA, 20 nt, Artificial Sequence
  Guide RNA
ugcauguuaguuguacuccu

SEQ ID NO: 21589 - RNA, 20 nt, Artificial Sequence
  Guide RNA
ugcauguuaguuuuacuccu

SEQ ID NO: 21590 - RNA, 20 nt, Artificial Sequence
  Guide RNA
uguacuccucaaauaacaaa

SEQ ID NO: 21591 - RNA, 20 nt, Artificial Sequence
  Guide RNA
uguuaguuguacuccucaaa

SEQ ID NO: 21592 - RNA, 20 nt, Artificial Sequence
  Guide RNA
uguuaguuuuacuccucaaa

SEQ ID NO: 21593 - RNA, 20 nt, Artificial Sequence
  Guide RNA
uguuauuugaggaguaaaac

SEQ ID NO: 21594 - RNA, 20 nt, Artificial Sequence
  Guide RNA
uguuauuugaggaguacaac

SEQ ID NO: 21595 - RNA, 20 nt, Artificial Sequence
  Guide RNA
uuaguuguacuccucaaaua

SEQ ID NO: 21596 - RNA, 20 nt, Artificial Sequence
  Guide RNA
uuauuugaggaguacaacua

SEQ ID NO: 21597 - RNA, 20 nt, Artificial Sequence
  Guide RNA
uucagugcauguuaguugua

SEQ ID NO: 21598 - RNA, 20 nt, Artificial Sequence
  Guide RNA
uucagugcauguuaguuuua

SEQ ID NO: 21599 - RNA, 20 nt, Artificial Sequence
  Guide RNA
uugaggaguaaaacuaacau

SEQ ID NO: 21600 - RNA, 20 nt, Artificial Sequence
  Guide RNA
uugaggaguacaacuaacau

SEQ ID NO: 21601 - RNA, 20 nt, Artificial Sequence
  Guide RNA
uuguacuccucaaauaacaa

SEQ ID NO: 21602 - RNA, 20 nt, Artificial Sequence
  Guide RNA
uuguuauuugaggaguacaa

SEQ ID NO: 21603 - RNA, 20 nt, Artificial Sequence
  Guide RNA
uuugaggaguaaaacuaaca

SEQ ID NO: 21604 - RNA, 20 nt, Artificial Sequence
  Guide RNA
uuugaggaguacaacuaaca

SEQ ID NO: 21605 - RNA, 20 nt, Artificial Sequence
  Guide RNA
uuuguuauuugaggaguaca

SEQ ID NO: 21606 - RNA, 21 nt, Artificial Sequence
  Guide RNA
aaaacuaacaugcacugaaug

SEQ ID NO: 21607 - RNA, 21 nt, Artificial Sequence
  Guide RNA
aagcuuuguuauuugaggagu

SEQ ID NO: 21608 - RNA, 21 nt, Artificial Sequence
  Guide RNA
aaucauucagugcauguuagu

SEQ ID NO: 21609 - RNA, 21 nt, Artificial Sequence
  Guide RNA
acaacuaacaugcacugaaug

SEQ ID NO: 21610 - RNA, 21 nt, Artificial Sequence
  Guide RNA
agaagcuuuguuauuugagga

SEQ ID NO: 21611 - RNA, 21 nt, Artificial Sequence
  Guide RNA
agcuuuguuauuugaggagua

SEQ ID NO: 21612 - RNA, 21 nt, Artificial Sequence
  Guide RNA
aggaguaaaacuaacaugcac

SEQ ID NO: 21613 - RNA, 21 nt, Artificial Sequence
  Guide RNA
aggaguacaacuaacaugcac

SEQ ID NO: 21614 - RNA, 21 nt, Artificial Sequence
  Guide RNA
aguaaaacuaacaugcacuga

SEQ ID NO: 21615 - RNA, 21 nt, Artificial Sequence
  Guide RNA
aguacaacuaacaugcacuga

SEQ ID NO: 21616 - RNA, 21 nt, Artificial Sequence
  Guide RNA
agugcauguuaguuguacucc

SEQ ID NO: 21617 - RNA, 21 nt, Artificial Sequence
  Guide RNA
agugcauguuaguuuuacucc

SEQ ID NO: 21618 - RNA, 21 nt, Artificial Sequence
  Guide RNA
aguuguacuccucaaauaaca

SEQ ID NO: 21619 - RNA, 21 nt, Artificial Sequence
  Guide RNA
aucauucagugcauguuaguu

SEQ ID NO: 21620 - RNA, 21 nt, Artificial Sequence
  Guide RNA
auguuaguuguacuccucaaa

SEQ ID NO: 21621 - RNA, 21 nt, Artificial Sequence
  Guide RNA
auucagugcauguuaguugua

SEQ ID NO: 21622 - RNA, 21 nt, Artificial Sequence
  Guide RNA
auuugaggaguacaacuaaca

SEQ ID NO: 21623 - RNA, 21 nt, Artificial Sequence
  Guide RNA
cagugcauguuaguuguacuc

SEQ ID NO: 21624 - RNA, 21 nt, Artificial Sequence
  Guide RNA
cagugcauguuaguuuuacuc

SEQ ID NO: 21625 - RNA, 21 nt, Artificial Sequence
  Guide RNA
cauguuaguuguacuccucaa

SEQ ID NO: 21626 - RNA, 21 nt, Artificial Sequence
  Guide RNA
cauguuaguuuuacuccucaa

SEQ ID NO: 21627 - RNA, 21 nt, Artificial Sequence
  Guide RNA
cauucagugcauguuaguugu

SEQ ID NO: 21628 - RNA, 21 nt, Artificial Sequence
  Guide RNA
cauucagugcauguuaguuuu

SEQ ID NO: 21629 - RNA, 21 nt, Artificial Sequence
  Guide RNA
cuuuguuauuugaggaguaca

SEQ ID NO: 21630 - RNA, 21 nt, Artificial Sequence
  Guide RNA
gaagcuuuguuauuugaggag

SEQ ID NO: 21631 - RNA, 21 nt, Artificial Sequence
  Guide RNA
gaggaguaaaacuaacaugca

SEQ ID NO: 21632 - RNA, 21 nt, Artificial Sequence
  Guide RNA
gaggaguacaacuaacaugca

SEQ ID NO: 21633 - RNA, 21 nt, Artificial Sequence
  Guide RNA
gaguaaaacuaacaugcacug

SEQ ID NO: 21634 - RNA, 21 nt, Artificial Sequence
  Guide RNA
gaguacaacuaacaugcacug

SEQ ID NO: 21635 - RNA, 21 nt, Artificial Sequence
  Guide RNA
gcauguuaguuguacuccuca

SEQ ID NO: 21636 - RNA, 21 nt, Artificial Sequence
  Guide RNA
gcauguuaguuuuacuccuca

SEQ ID NO: 21637 - RNA, 21 nt, Artificial Sequence
  Guide RNA
gcuuuguuauuugaggaguaa

SEQ ID NO: 21638 - RNA, 21 nt, Artificial Sequence
  Guide RNA
gcuuuguuauuugaggaguac

SEQ ID NO: 21639 - RNA, 21 nt, Artificial Sequence
  Guide RNA
ggaguaaaacuaacaugcacu

SEQ ID NO: 21640 - RNA, 21 nt, Artificial Sequence
  Guide RNA
ggaguacaacuaacaugcacu

SEQ ID NO: 21641 - RNA, 21 nt, Artificial Sequence
  Guide RNA
guaaaacuaacaugcacugaa

SEQ ID NO: 21642 - RNA, 21 nt, Artificial Sequence
  Guide RNA
guaaucauucagugcauguua

SEQ ID NO: 21643 - RNA, 21 nt, Artificial Sequence
  Guide RNA
guacaacuaacaugcacugaa

SEQ ID NO: 21644 - RNA, 21 nt, Artificial Sequence
  Guide RNA
gugcauguuaguuguacuccu

SEQ ID NO: 21645 - RNA, 21 nt, Artificial Sequence
  Guide RNA
gugcauguuaguuuuacuccu

SEQ ID NO: 21646 - RNA, 21 nt, Artificial Sequence
  Guide RNA
guuaguuguacuccucaaaua

SEQ ID NO: 21647 - RNA, 21 nt, Artificial Sequence
  Guide RNA
guuauuugaggaguacaacua

SEQ ID NO: 21648 - RNA, 21 nt, Artificial Sequence
  Guide RNA
guuguacuccucaaauaacaa

SEQ ID NO: 21649 - RNA, 21 nt, Artificial Sequence
  Guide RNA
uaaucauucagugcauguuag

SEQ ID NO: 21650 - RNA, 21 nt, Artificial Sequence
  Guide RNA
uacaacuaacaugcacugaau

SEQ ID NO: 21651 - RNA, 21 nt, Artificial Sequence
  Guide RNA
uaguuguacuccucaaauaac

SEQ ID NO: 21652 - RNA, 21 nt, Artificial Sequence
  Guide RNA
uauuugaggaguacaacuaac

SEQ ID NO: 21653 - RNA, 21 nt, Artificial Sequence
  Guide RNA
ucagugcauguuaguuguacu

SEQ ID NO: 21654 - RNA, 21 nt, Artificial Sequence
  Guide RNA
ucagugcauguuaguuuuacu

SEQ ID NO: 21655 - RNA, 21 nt, Artificial Sequence
  Guide RNA
ucauucagugcauguuaguug

SEQ ID NO: 21656 - RNA, 21 nt, Artificial Sequence
  Guide RNA
ucauucagugcauguuaguuu

SEQ ID NO: 21657 - RNA, 21 nt, Artificial Sequence
  Guide RNA
ugaggaguaaaacuaacaugc

SEQ ID NO: 21658 - RNA, 21 nt, Artificial Sequence
  Guide RNA
ugaggaguacaacuaacaugc

SEQ ID NO: 21659 - RNA, 21 nt, Artificial Sequence
  Guide RNA
ugcauguuaguuguacuccuc

SEQ ID NO: 21660 - RNA, 21 nt, Artificial Sequence
  Guide RNA
ugcauguuaguuuuacuccuc

SEQ ID NO: 21661 - RNA, 21 nt, Artificial Sequence
  Guide RNA
uguacuccucaaauaacaaag

SEQ ID NO: 21662 - RNA, 21 nt, Artificial Sequence
  Guide RNA
uguuaguuguacuccucaaau

SEQ ID NO: 21663 - RNA, 21 nt, Artificial Sequence
  Guide RNA
uguuauuugaggaguacaacu

SEQ ID NO: 21664 - RNA, 21 nt, Artificial Sequence
  Guide RNA
uucagugcauguuaguuguac

SEQ ID NO: 21665 - RNA, 21 nt, Artificial Sequence
  Guide RNA
uucagugcauguuaguuuuac

SEQ ID NO: 21666 - RNA, 21 nt, Artificial Sequence
  Guide RNA
uugaggaguaaaacuaacaug

SEQ ID NO: 21667 - RNA, 21 nt, Artificial Sequence
  Guide RNA
uugaggaguacaacuaacaug

SEQ ID NO: 21668 - RNA, 21 nt, Artificial Sequence
  Guide RNA
uuguuauuugaggaguacaac

SEQ ID NO: 21669 - RNA, 21 nt, Artificial Sequence
  Guide RNA
uuugaggaguacaacuaacau

SEQ ID NO: 21670 - RNA, 22 nt, Artificial Sequence
  Guide RNA
aaaacuaacaugcacugaauga

SEQ ID NO: 21671 - RNA, 22 nt, Artificial Sequence
  Guide RNA
aagcuuuguuauuugaggagua

SEQ ID NO: 21672 - RNA, 22 nt, Artificial Sequence
  Guide RNA
aaucauucagugcauguuaguu

SEQ ID NO: 21673 - RNA, 22 nt, Artificial Sequence
  Guide RNA
acaacuaacaugcacugaauga

SEQ ID NO: 21674 - RNA, 22 nt, Artificial Sequence
  Guide RNA
agaagcuuuguuauuugaggag

SEQ ID NO: 21675 - RNA, 22 nt, Artificial Sequence
  Guide RNA
agcuuuguuauuugaggaguaa

SEQ ID NO: 21676 - RNA, 22 nt, Artificial Sequence
  Guide RNA
agcuuuguuauuugaggaguac

SEQ ID NO: 21677 - RNA, 22 nt, Artificial Sequence
  Guide RNA
aggaguaaaacuaacaugcacu

SEQ ID NO: 21678 - RNA, 22 nt, Artificial Sequence
  Guide RNA
aggaguacaacuaacaugcacu

SEQ ID NO: 21679 - RNA, 22 nt, Artificial Sequence
  Guide RNA
aguaaaacuaacaugcacugaa

SEQ ID NO: 21680 - RNA, 22 nt, Artificial Sequence
  Guide RNA
aguacaacuaacaugcacugaa

SEQ ID NO: 21681 - RNA, 22 nt, Artificial Sequence
  Guide RNA
agugcauguuaguuguacuccu

SEQ ID NO: 21682 - RNA, 22 nt, Artificial Sequence
  Guide RNA
agugcauguuaguuuuacuccu

SEQ ID NO: 21683 - RNA, 22 nt, Artificial Sequence
  Guide RNA
aguuguacuccucaaauaacaa

SEQ ID NO: 21684 - RNA, 22 nt, Artificial Sequence
  Guide RNA
aucauucagugcauguuaguug

SEQ ID NO: 21685 - RNA, 22 nt, Artificial Sequence
  Guide RNA
aucauucagugcauguuaguuu

SEQ ID NO: 21686 - RNA, 22 nt, Artificial Sequence
  Guide RNA
auguuaguuguacuccucaaau

SEQ ID NO: 21687 - RNA, 22 nt, Artificial Sequence
  Guide RNA
auucagugcauguuaguuguac

SEQ ID NO: 21688 - RNA, 22 nt, Artificial Sequence
  Guide RNA
auucagugcauguuaguuuuac

SEQ ID NO: 21689 - RNA, 22 nt, Artificial Sequence
  Guide RNA
auuugaggaguacaacuaacau

SEQ ID NO: 21690 - RNA, 22 nt, Artificial Sequence
  Guide RNA
cagugcauguuaguuguacucc

SEQ ID NO: 21691 - RNA, 22 nt, Artificial Sequence
  Guide RNA
cagugcauguuaguuuuacucc

SEQ ID NO: 21692 - RNA, 22 nt, Artificial Sequence
  Guide RNA
cauguuaguuguacuccucaaa

SEQ ID NO: 21693 - RNA, 22 nt, Artificial Sequence
  Guide RNA
cauguuaguuuuacuccucaaa

SEQ ID NO: 21694 - RNA, 22 nt, Artificial Sequence
  Guide RNA
cauucagugcauguuaguugua

SEQ ID NO: 21695 - RNA, 22 nt, Artificial Sequence
  Guide RNA
cauucagugcauguuaguuuua

SEQ ID NO: 21696 - RNA, 22 nt, Artificial Sequence
  Guide RNA
cuuuguuauuugaggaguacaa

SEQ ID NO: 21697 - RNA, 22 nt, Artificial Sequence
  Guide RNA
gaagcuuuguuauuugaggagu

SEQ ID NO: 21698 - RNA, 22 nt, Artificial Sequence
  Guide RNA
gaggaguaaaacuaacaugcac

SEQ ID NO: 21699 - RNA, 22 nt, Artificial Sequence
  Guide RNA
gaggaguacaacuaacaugcac

SEQ ID NO: 21700 - RNA, 22 nt, Artificial Sequence
  Guide RNA
gaguaaaacuaacaugcacuga

SEQ ID NO: 21701 - RNA, 22 nt, Artificial Sequence
  Guide RNA
gaguacaacuaacaugcacuga

SEQ ID NO: 21702 - RNA, 22 nt, Artificial Sequence
  Guide RNA
gcauguuaguuguacuccucaa

SEQ ID NO: 21703 - RNA, 22 nt, Artificial Sequence
  Guide RNA
gcauguuaguuuuacuccucaa

SEQ ID NO: 21704 - RNA, 22 nt, Artificial Sequence
  Guide RNA
gcuuuguuauuugaggaguaaa

SEQ ID NO: 21705 - RNA, 22 nt, Artificial Sequence
  Guide RNA
gcuuuguuauuugaggaguaca

SEQ ID NO: 21706 - RNA, 22 nt, Artificial Sequence
  Guide RNA
ggaguaaaacuaacaugcacug

SEQ ID NO: 21707 - RNA, 22 nt, Artificial Sequence
  Guide RNA
ggaguacaacuaacaugcacug

SEQ ID NO: 21708 - RNA, 22 nt, Artificial Sequence
  Guide RNA
guaaaacuaacaugcacugaau

SEQ ID NO: 21709 - RNA, 22 nt, Artificial Sequence
  Guide RNA
guaaucauucagugcauguuag

SEQ ID NO: 21710 - RNA, 22 nt, Artificial Sequence
  Guide RNA
guacaacuaacaugcacugaau

SEQ ID NO: 21711 - RNA, 22 nt, Artificial Sequence
  Guide RNA
gugcauguuaguuguacuccuc

SEQ ID NO: 21712 - RNA, 22 nt, Artificial Sequence
  Guide RNA
gugcauguuaguuuuacuccuc

SEQ ID NO: 21713 - RNA, 22 nt, Artificial Sequence
  Guide RNA
guuaguuguacuccucaaauaa

SEQ ID NO: 21714 - RNA, 22 nt, Artificial Sequence
  Guide RNA
guuauuugaggaguacaacuaa

SEQ ID NO: 21715 - RNA, 22 nt, Artificial Sequence
  Guide RNA
guuguacuccucaaauaacaaa

SEQ ID NO: 21716 - RNA, 22 nt, Artificial Sequence
  Guide RNA
uaaaacuaacaugcacugaaug

SEQ ID NO: 21717 - RNA, 22 nt, Artificial Sequence
  Guide RNA
uaaucauucagugcauguuagu

SEQ ID NO: 21718 - RNA, 22 nt, Artificial Sequence
  Guide RNA
uacaacuaacaugcacugaaug

SEQ ID NO: 21719 - RNA, 22 nt, Artificial Sequence
  Guide RNA
uagaagcuuuguuauuugagga

SEQ ID NO: 21720 - RNA, 22 nt, Artificial Sequence
  Guide RNA
uaguuguacuccucaaauaaca

SEQ ID NO: 21721 - RNA, 22 nt, Artificial Sequence
  Guide RNA
uauuugaggaguacaacuaaca

SEQ ID NO: 21722 - RNA, 22 nt, Artificial Sequence
  Guide RNA
ucagugcauguuaguuguacuc

SEQ ID NO: 21723 - RNA, 22 nt, Artificial Sequence
  Guide RNA
ucagugcauguuaguuuuacuc

SEQ ID NO: 21724 - RNA, 22 nt, Artificial Sequence
  Guide RNA
ucauucagugcauguuaguugu

SEQ ID NO: 21725 - RNA, 22 nt, Artificial Sequence
  Guide RNA
ucauucagugcauguuaguuuu

SEQ ID NO: 21726 - RNA, 22 nt, Artificial Sequence
  Guide RNA
ugaggaguaaaacuaacaugca

SEQ ID NO: 21727 - RNA, 22 nt, Artificial Sequence
  Guide RNA
ugaggaguacaacuaacaugca

SEQ ID NO: 21728 - RNA, 22 nt, Artificial Sequence
  Guide RNA
ugcauguuaguuguacuccuca

SEQ ID NO: 21729 - RNA, 22 nt, Artificial Sequence
  Guide RNA
ugcauguuaguuuuacuccuca

SEQ ID NO: 21730 - RNA, 22 nt, Artificial Sequence
  Guide RNA
uguaaucauucagugcauguua

SEQ ID NO: 21731 - RNA, 22 nt, Artificial Sequence
  Guide RNA
uguacuccucaaauaacaaagc

SEQ ID NO: 21732 - RNA, 22 nt, Artificial Sequence
  Guide RNA
uguuaguuguacuccucaaaua

SEQ ID NO: 21733 - RNA, 22 nt, Artificial Sequence
  Guide RNA
uguuauuugaggaguacaacua

SEQ ID NO: 21734 - RNA, 22 nt, Artificial Sequence
  Guide RNA
uuaguuguacuccucaaauaac

SEQ ID NO: 21735 - RNA, 22 nt, Artificial Sequence
  Guide RNA
uuauuugaggaguacaacuaac

SEQ ID NO: 21736 - RNA, 22 nt, Artificial Sequence
  Guide RNA
uucagugcauguuaguuguacu

SEQ ID NO: 21737 - RNA, 22 nt, Artificial Sequence
  Guide RNA
uucagugcauguuaguuuuacu

SEQ ID NO: 21738 - RNA, 22 nt, Artificial Sequence
  Guide RNA
uugaggaguaaaacuaacaugc

SEQ ID NO: 21739 - RNA, 22 nt, Artificial Sequence
  Guide RNA
uugaggaguacaacuaacaugc

SEQ ID NO: 21740 - RNA, 22 nt, Artificial Sequence
  Guide RNA
uuguacuccucaaauaacaaag

SEQ ID NO: 21741 - RNA, 22 nt, Artificial Sequence
  Guide RNA
uuguuauuugaggaguacaacu

SEQ ID NO: 21742 - RNA, 22 nt, Artificial Sequence
  Guide RNA
uuuacuccucaaauaacaaagc

SEQ ID NO: 21743 - RNA, 22 nt, Artificial Sequence
  Guide RNA
uuugaggaguaaaacuaacaug

SEQ ID NO: 21744 - RNA, 22 nt, Artificial Sequence
  Guide RNA
uuugaggaguacaacuaacaug

SEQ ID NO: 21745 - RNA, 22 nt, Artificial Sequence
  Guide RNA
uuuguuauuugaggaguacaac

SEQ ID NO: 21746 - RNA, 20 nt, Artificial Sequence
  Guide RNA
aaaguaaguuacuuggcuag

SEQ ID NO: 21747 - RNA, 20 nt, Artificial Sequence
  Guide RNA
aaaguaaguuacuuugcuag

SEQ ID NO: 21748 - RNA, 20 nt, Artificial Sequence
  Guide RNA
aaguaaguuacuuggcuaga

SEQ ID NO: 21749 - RNA, 20 nt, Artificial Sequence
  Guide RNA
aaguaaguuacuuugcuaga

SEQ ID NO: 21750 - RNA, 20 nt, Artificial Sequence
  Guide RNA
aaguuacuuggcuagaagag

SEQ ID NO: 21751 - RNA, 20 nt, Artificial Sequence
  Guide RNA
aaguuacuuugcuagaagag

SEQ ID NO: 21752 - RNA, 20 nt, Artificial Sequence
  Guide RNA
aaugcagugacucuucuagc

SEQ ID NO: 21753 - RNA, 20 nt, Artificial Sequence
  Guide RNA
acaaaguaaguuacuuggcu

SEQ ID NO: 21754 - RNA, 20 nt, Artificial Sequence
  Guide RNA
acaaaguaaguuacuuugcu

SEQ ID NO: 21755 - RNA, 20 nt, Artificial Sequence
  Guide RNA
acucuucuagcaaaguaacu

SEQ ID NO: 21756 - RNA, 20 nt, Artificial Sequence
  Guide RNA
acucuucuagccaaguaacu

SEQ ID NO: 21757 - RNA, 20 nt, Artificial Sequence
  Guide RNA
acuuggcuagaagagucacu

SEQ ID NO: 21758 - RNA, 20 nt, Artificial Sequence
  Guide RNA
acuuugcuagaagagucacu

SEQ ID NO: 21759 - RNA, 20 nt, Artificial Sequence
  Guide RNA
agcaaaguaacuuacuuugu

SEQ ID NO: 21760 - RNA, 20 nt, Artificial Sequence
  Guide RNA
agccaaguaacuuacuuugu

SEQ ID NO: 21761 - RNA, 20 nt, Artificial Sequence
  Guide RNA
aguaaguuacuuggcuagaa

SEQ ID NO: 21762 - RNA, 20 nt, Artificial Sequence
  Guide RNA
aguaaguuacuuugcuagaa

SEQ ID NO: 21763 - RNA, 20 nt, Artificial Sequence
  Guide RNA
aguaaugcagugacucuucu

SEQ ID NO: 21764 - RNA, 20 nt, Artificial Sequence
  Guide RNA
agugacucuucuagcaaagu

SEQ ID NO: 21765 - RNA, 20 nt, Artificial Sequence
  Guide RNA
agugacucuucuagccaagu

SEQ ID NO: 21766 - RNA, 20 nt, Artificial Sequence
  Guide RNA
aguuacuuggcuagaagagu

SEQ ID NO: 21767 - RNA, 20 nt, Artificial Sequence
  Guide RNA
aguuacuuugcuagaagagu

SEQ ID NO: 21768 - RNA, 20 nt, Artificial Sequence
  Guide RNA
aucugucacaaaguaaguua

SEQ ID NO: 21769 - RNA, 20 nt, Artificial Sequence
  Guide RNA
augcagugacucuucuagca

SEQ ID NO: 21770 - RNA, 20 nt, Artificial Sequence
  Guide RNA
augcagugacucuucuagcc

SEQ ID NO: 21771 - RNA, 20 nt, Artificial Sequence
  Guide RNA
caaaguaacuuacuuuguga

SEQ ID NO: 21772 - RNA, 20 nt, Artificial Sequence
  Guide RNA
caaaguaaguuacuuggcua

SEQ ID NO: 21773 - RNA, 20 nt, Artificial Sequence
  Guide RNA
caaaguaaguuacuuugcua

SEQ ID NO: 21774 - RNA, 20 nt, Artificial Sequence
  Guide RNA
cacaaaguaaguuacuuggc

SEQ ID NO: 21775 - RNA, 20 nt, Artificial Sequence
  Guide RNA
cacaaaguaaguuacuuugc

SEQ ID NO: 21776 - RNA, 20 nt, Artificial Sequence
  Guide RNA
cagugacucuucuagcaaag

SEQ ID NO: 21777 - RNA, 20 nt, Artificial Sequence
  Guide RNA
cagugacucuucuagccaag

SEQ ID NO: 21778 - RNA, 20 nt, Artificial Sequence
  Guide RNA
ccaaguaacuuacuuuguga

SEQ ID NO: 21779 - RNA, 20 nt, Artificial Sequence
  Guide RNA
cuagcaaaguaacuuacuuu

SEQ ID NO: 21780 - RNA, 20 nt, Artificial Sequence
  Guide RNA
cuagccaaguaacuuacuuu

SEQ ID NO: 21781 - RNA, 20 nt, Artificial Sequence
  Guide RNA
cucuucuagcaaaguaacuu

SEQ ID NO: 21782 - RNA, 20 nt, Artificial Sequence
  Guide RNA
cucuucuagccaaguaacuu

SEQ ID NO: 21783 - RNA, 20 nt, Artificial Sequence
  Guide RNA
cugucacaaaguaaguuacu

SEQ ID NO: 21784 - RNA, 20 nt, Artificial Sequence
  Guide RNA
cuucuagcaaaguaacuuac

SEQ ID NO: 21785 - RNA, 20 nt, Artificial Sequence
  Guide RNA
cuucuagccaaguaacuuac

SEQ ID NO: 21786 - RNA, 20 nt, Artificial Sequence
  Guide RNA
cuuggcuagaagagucacug

SEQ ID NO: 21787 - RNA, 20 nt, Artificial Sequence
  Guide RNA
cuuugcuagaagagucacug

SEQ ID NO: 21788 - RNA, 20 nt, Artificial Sequence
  Guide RNA
gacucuucuagcaaaguaac

SEQ ID NO: 21789 - RNA, 20 nt, Artificial Sequence
  Guide RNA
gacucuucuagccaaguaac

SEQ ID NO: 21790 - RNA, 20 nt, Artificial Sequence
  Guide RNA
gcaaaguaacuuacuuugug

SEQ ID NO: 21791 - RNA, 20 nt, Artificial Sequence
  Guide RNA
gcagugacucuucuagcaaa

SEQ ID NO: 21792 - RNA, 20 nt, Artificial Sequence
  Guide RNA
gcagugacucuucuagccaa

SEQ ID NO: 21793 - RNA, 20 nt, Artificial Sequence
  Guide RNA
gccaaguaacuuacuuugug

SEQ ID NO: 21794 - RNA, 20 nt, Artificial Sequence
  Guide RNA
guaaguuacuuggcuagaag

SEQ ID NO: 21795 - RNA, 20 nt, Artificial Sequence
  Guide RNA
guaaguuacuuugcuagaag

SEQ ID NO: 21796 - RNA, 20 nt, Artificial Sequence
  Guide RNA
guaaugcagugacucuucua

SEQ ID NO: 21797 - RNA, 20 nt, Artificial Sequence
  Guide RNA
gucacaaaguaaguuacuug

SEQ ID NO: 21798 - RNA, 20 nt, Artificial Sequence
  Guide RNA
gucacaaaguaaguuacuuu

SEQ ID NO: 21799 - RNA, 20 nt, Artificial Sequence
  Guide RNA
gugacucuucuagcaaagua

SEQ ID NO: 21800 - RNA, 20 nt, Artificial Sequence
  Guide RNA
gugacucuucuagccaagua

SEQ ID NO: 21801 - RNA, 20 nt, Artificial Sequence
  Guide RNA
guuacuuggcuagaagaguc

SEQ ID NO: 21802 - RNA, 20 nt, Artificial Sequence
  Guide RNA
guuacuuugcuagaagaguc

SEQ ID NO: 21803 - RNA, 20 nt, Artificial Sequence
  Guide RNA
uaaguuacuuggcuagaaga

SEQ ID NO: 21804 - RNA, 20 nt, Artificial Sequence
  Guide RNA
uaaguuacuuugcuagaaga

SEQ ID NO: 21805 - RNA, 20 nt, Artificial Sequence
  Guide RNA
uaaugcagugacucuucuag

SEQ ID NO: 21806 - RNA, 20 nt, Artificial Sequence
  Guide RNA
uacuuggcuagaagagucac

SEQ ID NO: 21807 - RNA, 20 nt, Artificial Sequence
  Guide RNA
uacuuugcuagaagagucac

SEQ ID NO: 21808 - RNA, 20 nt, Artificial Sequence
  Guide RNA
uagcaaaguaacuuacuuug

SEQ ID NO: 21809 - RNA, 20 nt, Artificial Sequence
  Guide RNA
uagccaaguaacuuacuuug

SEQ ID NO: 21810 - RNA, 20 nt, Artificial Sequence
  Guide RNA
ucacaaaguaaguuacuugg

SEQ ID NO: 21811 - RNA, 20 nt, Artificial Sequence
  Guide RNA
ucacaaaguaaguuacuuug

SEQ ID NO: 21812 - RNA, 20 nt, Artificial Sequence
  Guide RNA
ucuagcaaaguaacuuacuu

SEQ ID NO: 21813 - RNA, 20 nt, Artificial Sequence
  Guide RNA
ucuagccaaguaacuuacuu

SEQ ID NO: 21814 - RNA, 20 nt, Artificial Sequence
  Guide RNA
ucugucacaaaguaaguuac

SEQ ID NO: 21815 - RNA, 20 nt, Artificial Sequence
  Guide RNA
ucuucuagcaaaguaacuua

SEQ ID NO: 21816 - RNA, 20 nt, Artificial Sequence
  Guide RNA
ucuucuagccaaguaacuua

SEQ ID NO: 21817 - RNA, 20 nt, Artificial Sequence
  Guide RNA
ugacucuucuagcaaaguaa

SEQ ID NO: 21818 - RNA, 20 nt, Artificial Sequence
  Guide RNA
ugacucuucuagccaaguaa

SEQ ID NO: 21819 - RNA, 20 nt, Artificial Sequence
  Guide RNA
ugcagugacucuucuagcaa

SEQ ID NO: 21820 - RNA, 20 nt, Artificial Sequence
  Guide RNA
ugcagugacucuucuagcca

SEQ ID NO: 21821 - RNA, 20 nt, Artificial Sequence
  Guide RNA
uggcuagaagagucacugca

SEQ ID NO: 21822 - RNA, 20 nt, Artificial Sequence
  Guide RNA
ugucacaaaguaaguuacuu

SEQ ID NO: 21823 - RNA, 20 nt, Artificial Sequence
  Guide RNA
uuacuuggcuagaagaguca

SEQ ID NO: 21824 - RNA, 20 nt, Artificial Sequence
  Guide RNA
uuacuuugcuagaagaguca

SEQ ID NO: 21825 - RNA, 20 nt, Artificial Sequence
  Guide RNA
uucuagcaaaguaacuuacu

SEQ ID NO: 21826 - RNA, 20 nt, Artificial Sequence
  Guide RNA
uucuagccaaguaacuuacu

SEQ ID NO: 21827 - RNA, 20 nt, Artificial Sequence
  Guide RNA
uugcuagaagagucacugca

SEQ ID NO: 21828 - RNA, 20 nt, Artificial Sequence
  Guide RNA
uuggcuagaagagucacugc

SEQ ID NO: 21829 - RNA, 20 nt, Artificial Sequence
  Guide RNA
uuugcuagaagagucacugc

SEQ ID NO: 21830 - RNA, 21 nt, Artificial Sequence
  Guide RNA
aaaguaaguuacuuggcuaga

SEQ ID NO: 21831 - RNA, 21 nt, Artificial Sequence
  Guide RNA
aaguaaguuacuuggcuagaa

SEQ ID NO: 21832 - RNA, 21 nt, Artificial Sequence
  Guide RNA
aaguuacuuggcuagaagagu

SEQ ID NO: 21833 - RNA, 21 nt, Artificial Sequence
  Guide RNA
aaguuacuuugcuagaagagu

SEQ ID NO: 21834 - RNA, 21 nt, Artificial Sequence
  Guide RNA
aaugcagugacucuucuagca

SEQ ID NO: 21835 - RNA, 21 nt, Artificial Sequence
  Guide RNA
aaugcagugacucuucuagcc

SEQ ID NO: 21836 - RNA, 21 nt, Artificial Sequence
  Guide RNA
acaaaguaaguuacuuggcua

SEQ ID NO: 21837 - RNA, 21 nt, Artificial Sequence
  Guide RNA
acucuucuagcaaaguaacuu

SEQ ID NO: 21838 - RNA, 21 nt, Artificial Sequence
  Guide RNA
acucuucuagccaaguaacuu

SEQ ID NO: 21839 - RNA, 21 nt, Artificial Sequence
  Guide RNA
acuuggcuagaagagucacug

SEQ ID NO: 21840 - RNA, 21 nt, Artificial Sequence
  Guide RNA
acuuugcuagaagagucacug

SEQ ID NO: 21841 - RNA, 21 nt, Artificial Sequence
  Guide RNA
agcaaaguaacuuacuuugug

SEQ ID NO: 21842 - RNA, 21 nt, Artificial Sequence
  Guide RNA
agccaaguaacuuacuuugug

SEQ ID NO: 21843 - RNA, 21 nt, Artificial Sequence
  Guide RNA
aguaaguuacuuggcuagaag

SEQ ID NO: 21844 - RNA, 21 nt, Artificial Sequence
  Guide RNA
aguaaguuacuuugcuagaag

SEQ ID NO: 21845 - RNA, 21 nt, Artificial Sequence
  Guide RNA
aguaaugcagugacucuucua

SEQ ID NO: 21846 - RNA, 21 nt, Artificial Sequence
  Guide RNA
agugacucuucuagcaaagua

SEQ ID NO: 21847 - RNA, 21 nt, Artificial Sequence
  Guide RNA
agugacucuucuagccaagua

SEQ ID NO: 21848 - RNA, 21 nt, Artificial Sequence
  Guide RNA
aguuacuuggcuagaagaguc

SEQ ID NO: 21849 - RNA, 21 nt, Artificial Sequence
  Guide RNA
aguuacuuugcuagaagaguc

SEQ ID NO: 21850 - RNA, 21 nt, Artificial Sequence
  Guide RNA
aucugucacaaaguaaguuac

SEQ ID NO: 21851 - RNA, 21 nt, Artificial Sequence
  Guide RNA
augcagugacucuucuagcaa

SEQ ID NO: 21852 - RNA, 21 nt, Artificial Sequence
  Guide RNA
augcagugacucuucuagcca

SEQ ID NO: 21853 - RNA, 21 nt, Artificial Sequence
  Guide RNA
caaaguaacuuacuuugugac

SEQ ID NO: 21854 - RNA, 21 nt, Artificial Sequence
  Guide RNA
caaaguaaguuacuuggcuag

SEQ ID NO: 21855 - RNA, 21 nt, Artificial Sequence
  Guide RNA
caaaguaaguuacuuugcuag

SEQ ID NO: 21856 - RNA, 21 nt, Artificial Sequence
  Guide RNA
cacaaaguaaguuacuuggcu

SEQ ID NO: 21857 - RNA, 21 nt, Artificial Sequence
  Guide RNA
cacaaaguaaguuacuuugcu

SEQ ID NO: 21858 - RNA, 21 nt, Artificial Sequence
  Guide RNA
caguaaugcagugacucuucu

SEQ ID NO: 21859 - RNA, 21 nt, Artificial Sequence
  Guide RNA
cagugacucuucuagcaaagu

SEQ ID NO: 21860 - RNA, 21 nt, Artificial Sequence
  Guide RNA
cagugacucuucuagccaagu

SEQ ID NO: 21861 - RNA, 21 nt, Artificial Sequence
  Guide RNA
ccaaguaacuuacuuugugac

SEQ ID NO: 21862 - RNA, 21 nt, Artificial Sequence
  Guide RNA
cuagcaaaguaacuuacuuug

SEQ ID NO: 21863 - RNA, 21 nt, Artificial Sequence
  Guide RNA
cuagccaaguaacuuacuuug

SEQ ID NO: 21864 - RNA, 21 nt, Artificial Sequence
  Guide RNA
cucuucuagcaaaguaacuua

SEQ ID NO: 21865 - RNA, 21 nt, Artificial Sequence
  Guide RNA
cucuucuagccaaguaacuua

SEQ ID NO: 21866 - RNA, 21 nt, Artificial Sequence
  Guide RNA
cugucacaaaguaaguuacuu

SEQ ID NO: 21867 - RNA, 21 nt, Artificial Sequence
  Guide RNA
cuucuagcaaaguaacuuacu

SEQ ID NO: 21868 - RNA, 21 nt, Artificial Sequence
  Guide RNA
cuucuagccaaguaacuuacu

SEQ ID NO: 21869 - RNA, 21 nt, Artificial Sequence
  Guide RNA
cuuggcuagaagagucacugc

SEQ ID NO: 21870 - RNA, 21 nt, Artificial Sequence
  Guide RNA
cuuugcuagaagagucacugc

SEQ ID NO: 21871 - RNA, 21 nt, Artificial Sequence
  Guide RNA
gacucuucuagcaaaguaacu

SEQ ID NO: 21872 - RNA, 21 nt, Artificial Sequence
  Guide RNA
gacucuucuagccaaguaacu

SEQ ID NO: 21873 - RNA, 21 nt, Artificial Sequence
  Guide RNA
gcaaaguaacuuacuuuguga

SEQ ID NO: 21874 - RNA, 21 nt, Artificial Sequence
  Guide RNA
gcagugacucuucuagcaaag

SEQ ID NO: 21875 - RNA, 21 nt, Artificial Sequence
  Guide RNA
gcagugacucuucuagccaag

SEQ ID NO: 21876 - RNA, 21 nt, Artificial Sequence
  Guide RNA
gccaaguaacuuacuuuguga

SEQ ID NO: 21877 - RNA, 21 nt, Artificial Sequence
  Guide RNA
guaaguuacuuggcuagaaga

SEQ ID NO: 21878 - RNA, 21 nt, Artificial Sequence
  Guide RNA
guaaguuacuuugcuagaaga

SEQ ID NO: 21879 - RNA, 21 nt, Artificial Sequence
  Guide RNA
guaaugcagugacucuucuag

SEQ ID NO: 21880 - RNA, 21 nt, Artificial Sequence
  Guide RNA
gucacaaaguaaguuacuugg

SEQ ID NO: 21881 - RNA, 21 nt, Artificial Sequence
  Guide RNA
gucacaaaguaaguuacuuug

SEQ ID NO: 21882 - RNA, 21 nt, Artificial Sequence
  Guide RNA
gugacucuucuagcaaaguaa

SEQ ID NO: 21883 - RNA, 21 nt, Artificial Sequence
  Guide RNA
gugacucuucuagccaaguaa

SEQ ID NO: 21884 - RNA, 21 nt, Artificial Sequence
  Guide RNA
guuacuuggcuagaagaguca

SEQ ID NO: 21885 - RNA, 21 nt, Artificial Sequence
  Guide RNA
guuacuuugcuagaagaguca

SEQ ID NO: 21886 - RNA, 21 nt, Artificial Sequence
  Guide RNA
uaaguuacuuggcuagaagag

SEQ ID NO: 21887 - RNA, 21 nt, Artificial Sequence
  Guide RNA
uaaguuacuuugcuagaagag

SEQ ID NO: 21888 - RNA, 21 nt, Artificial Sequence
  Guide RNA
uaaugcagugacucuucuagc

SEQ ID NO: 21889 - RNA, 21 nt, Artificial Sequence
  Guide RNA
uacuuggcuagaagagucacu

SEQ ID NO: 21890 - RNA, 21 nt, Artificial Sequence
  Guide RNA
uacuuugcuagaagagucacu

SEQ ID NO: 21891 - RNA, 21 nt, Artificial Sequence
  Guide RNA
uagccaaguaacuuacuuugu

SEQ ID NO: 21892 - RNA, 21 nt, Artificial Sequence
  Guide RNA
ucacaaaguaaguuacuuggc

SEQ ID NO: 21893 - RNA, 21 nt, Artificial Sequence
  Guide RNA
ucacaaaguaaguuacuuugc

SEQ ID NO: 21894 - RNA, 21 nt, Artificial Sequence
  Guide RNA
ucuagccaaguaacuuacuuu

SEQ ID NO: 21895 - RNA, 21 nt, Artificial Sequence
  Guide RNA
ucugucacaaaguaaguuacu

SEQ ID NO: 21896 - RNA, 21 nt, Artificial Sequence
  Guide RNA
ucuucuagcaaaguaacuuac

SEQ ID NO: 21897 - RNA, 21 nt, Artificial Sequence
  Guide RNA
ucuucuagccaaguaacuuac

SEQ ID NO: 21898 - RNA, 21 nt, Artificial Sequence
  Guide RNA
ugacucuucuagcaaaguaac

SEQ ID NO: 21899 - RNA, 21 nt, Artificial Sequence
  Guide RNA
ugacucuucuagccaaguaac

SEQ ID NO: 21900 - RNA, 21 nt, Artificial Sequence
  Guide RNA
ugcagugacucuucuagcaaa

SEQ ID NO: 21901 - RNA, 21 nt, Artificial Sequence
  Guide RNA
ugcagugacucuucuagccaa

SEQ ID NO: 21902 - RNA, 21 nt, Artificial Sequence
  Guide RNA
uggcuagaagagucacugcau

SEQ ID NO: 21903 - RNA, 21 nt, Artificial Sequence
  Guide RNA
ugucacaaaguaaguuacuug

SEQ ID NO: 21904 - RNA, 21 nt, Artificial Sequence
  Guide RNA
uuacuuggcuagaagagucac

SEQ ID NO: 21905 - RNA, 21 nt, Artificial Sequence
  Guide RNA
uuacuuugcuagaagagucac

SEQ ID NO: 21906 - RNA, 21 nt, Artificial Sequence
  Guide RNA
uucuagccaaguaacuuacuu

SEQ ID NO: 21907 - RNA, 21 nt, Artificial Sequence
  Guide RNA
uugcuagaagagucacugcau

SEQ ID NO: 21908 - RNA, 21 nt, Artificial Sequence
  Guide RNA
uuggcuagaagagucacugca

SEQ ID NO: 21909 - RNA, 21 nt, Artificial Sequence
  Guide RNA
uuugcuagaagagucacugca

SEQ ID NO: 21910 - RNA, 22 nt, Artificial Sequence
  Guide RNA
aaaguaaguuacuuggcuagaa

SEQ ID NO: 21911 - RNA, 22 nt, Artificial Sequence
  Guide RNA
aaguaaguuacuuggcuagaag

SEQ ID NO: 21912 - RNA, 22 nt, Artificial Sequence
  Guide RNA
aaguaaguuacuuugcuagaag

SEQ ID NO: 21913 - RNA, 22 nt, Artificial Sequence
  Guide RNA
aaguuacuuggcuagaagaguc

SEQ ID NO: 21914 - RNA, 22 nt, Artificial Sequence
  Guide RNA
aaguuacuuugcuagaagaguc

SEQ ID NO: 21915 - RNA, 22 nt, Artificial Sequence
  Guide RNA
aaugcagugacucuucuagcaa

SEQ ID NO: 21916 - RNA, 22 nt, Artificial Sequence
  Guide RNA
aaugcagugacucuucuagcca

SEQ ID NO: 21917 - RNA, 22 nt, Artificial Sequence
  Guide RNA
acaaaguaaguuacuuggcuag

SEQ ID NO: 21918 - RNA, 22 nt, Artificial Sequence
  Guide RNA
acaaaguaaguuacuuugcuag

SEQ ID NO: 21919 - RNA, 22 nt, Artificial Sequence
  Guide RNA
acucuucuagcaaaguaacuua

SEQ ID NO: 21920 - RNA, 22 nt, Artificial Sequence
  Guide RNA
acucuucuagccaaguaacuua

SEQ ID NO: 21921 - RNA, 22 nt, Artificial Sequence
  Guide RNA
acuuggcuagaagagucacugc

SEQ ID NO: 21922 - RNA, 22 nt, Artificial Sequence
  Guide RNA
acuuugcuagaagagucacugc

SEQ ID NO: 21923 - RNA, 22 nt, Artificial Sequence
  Guide RNA
agcaaaguaacuuacuuuguga

SEQ ID NO: 21924 - RNA, 22 nt, Artificial Sequence
  Guide RNA
agccaaguaacuuacuuuguga

SEQ ID NO: 21925 - RNA, 22 nt, Artificial Sequence
  Guide RNA
aguaaguuacuuggcuagaaga

SEQ ID NO: 21926 - RNA, 22 nt, Artificial Sequence
  Guide RNA
aguaaguuacuuugcuagaaga

SEQ ID NO: 21927 - RNA, 22 nt, Artificial Sequence
  Guide RNA
aguaaugcagugacucuucuag

SEQ ID NO: 21928 - RNA, 22 nt, Artificial Sequence
  Guide RNA
agugacucuucuagcaaaguaa

SEQ ID NO: 21929 - RNA, 22 nt, Artificial Sequence
  Guide RNA
agugacucuucuagccaaguaa

SEQ ID NO: 21930 - RNA, 22 nt, Artificial Sequence
  Guide RNA
aguuacuuggcuagaagaguca

SEQ ID NO: 21931 - RNA, 22 nt, Artificial Sequence
  Guide RNA
aguuacuuugcuagaagaguca

SEQ ID NO: 21932 - RNA, 22 nt, Artificial Sequence
  Guide RNA
aucugucacaaaguaaguuacu

SEQ ID NO: 21933 - RNA, 22 nt, Artificial Sequence
  Guide RNA
augcagugacucuucuagcaaa

SEQ ID NO: 21934 - RNA, 22 nt, Artificial Sequence
  Guide RNA
augcagugacucuucuagccaa

SEQ ID NO: 21935 - RNA, 22 nt, Artificial Sequence
  Guide RNA
caaaguaacuuacuuugugaca

SEQ ID NO: 21936 - RNA, 22 nt, Artificial Sequence
  Guide RNA
caaaguaaguuacuuggcuaga

SEQ ID NO: 21937 - RNA, 22 nt, Artificial Sequence
  Guide RNA
caaaguaaguuacuuugcuaga

SEQ ID NO: 21938 - RNA, 22 nt, Artificial Sequence
  Guide RNA
cacaaaguaaguuacuuggcua

SEQ ID NO: 21939 - RNA, 22 nt, Artificial Sequence
  Guide RNA
cacaaaguaaguuacuuugcua

SEQ ID NO: 21940 - RNA, 22 nt, Artificial Sequence
  Guide RNA
caguaaugcagugacucuucua

SEQ ID NO: 21941 - RNA, 22 nt, Artificial Sequence
  Guide RNA
cagugacucuucuagcaaagua

SEQ ID NO: 21942 - RNA, 22 nt, Artificial Sequence
  Guide RNA
cagugacucuucuagccaagua

SEQ ID NO: 21943 - RNA, 22 nt, Artificial Sequence
  Guide RNA
ccaaguaacuuacuuugugaca

SEQ ID NO: 21944 - RNA, 22 nt, Artificial Sequence
  Guide RNA
ccaguaaugcagugacucuucu

SEQ ID NO: 21945 - RNA, 22 nt, Artificial Sequence
  Guide RNA
cuagcaaaguaacuuacuuugu

SEQ ID NO: 21946 - RNA, 22 nt, Artificial Sequence
  Guide RNA
cuagccaaguaacuuacuuugu

SEQ ID NO: 21947 - RNA, 22 nt, Artificial Sequence
  Guide RNA
cucuucuagcaaaguaacuuac

SEQ ID NO: 21948 - RNA, 22 nt, Artificial Sequence
  Guide RNA
cucuucuagccaaguaacuuac

SEQ ID NO: 21949 - RNA, 22 nt, Artificial Sequence
  Guide RNA
cugucacaaaguaaguuacuug

SEQ ID NO: 21950 - RNA, 22 nt, Artificial Sequence
  Guide RNA
cugucacaaaguaaguuacuuu

SEQ ID NO: 21951 - RNA, 22 nt, Artificial Sequence
  Guide RNA
cuucuagcaaaguaacuuacuu

SEQ ID NO: 21952 - RNA, 22 nt, Artificial Sequence
  Guide RNA
cuucuagccaaguaacuuacuu

SEQ ID NO: 21953 - RNA, 22 nt, Artificial Sequence
  Guide RNA
cuuggcuagaagagucacugca

SEQ ID NO: 21954 - RNA, 22 nt, Artificial Sequence
  Guide RNA
cuuugcuagaagagucacugca

SEQ ID NO: 21955 - RNA, 22 nt, Artificial Sequence
  Guide RNA
gacucuucuagcaaaguaacuu

SEQ ID NO: 21956 - RNA, 22 nt, Artificial Sequence
  Guide RNA
gacucuucuagccaaguaacuu

SEQ ID NO: 21957 - RNA, 22 nt, Artificial Sequence
  Guide RNA
gcaaaguaacuuacuuugugac

SEQ ID NO: 21958 - RNA, 22 nt, Artificial Sequence
  Guide RNA
gcagugacucuucuagcaaagu

SEQ ID NO: 21959 - RNA, 22 nt, Artificial Sequence
  Guide RNA
gcagugacucuucuagccaagu

SEQ ID NO: 21960 - RNA, 22 nt, Artificial Sequence
  Guide RNA
gccaaguaacuuacuuugugac

SEQ ID NO: 21961 - RNA, 22 nt, Artificial Sequence
  Guide RNA
guaaguuacuuggcuagaagag

SEQ ID NO: 21962 - RNA, 22 nt, Artificial Sequence
  Guide RNA
guaaguuacuuugcuagaagag

SEQ ID NO: 21963 - RNA, 22 nt, Artificial Sequence
  Guide RNA
guaaugcagugacucuucuagc

SEQ ID NO: 21964 - RNA, 22 nt, Artificial Sequence
  Guide RNA
gucacaaaguaaguuacuuggc

SEQ ID NO: 21965 - RNA, 22 nt, Artificial Sequence
  Guide RNA
gucacaaaguaaguuacuuugc

SEQ ID NO: 21966 - RNA, 22 nt, Artificial Sequence
  Guide RNA
gugacucuucuagcaaaguaac

SEQ ID NO: 21967 - RNA, 22 nt, Artificial Sequence
  Guide RNA
gugacucuucuagccaaguaac

SEQ ID NO: 21968 - RNA, 22 nt, Artificial Sequence
  Guide RNA
guuacuuggcuagaagagucac

SEQ ID NO: 21969 - RNA, 22 nt, Artificial Sequence
  Guide RNA
guuacuuugcuagaagagucac

SEQ ID NO: 21970 - RNA, 22 nt, Artificial Sequence
  Guide RNA
uaaguuacuuggcuagaagagu

SEQ ID NO: 21971 - RNA, 22 nt, Artificial Sequence
  Guide RNA
uaaguuacuuugcuagaagagu

SEQ ID NO: 21972 - RNA, 22 nt, Artificial Sequence
  Guide RNA
uaaugcagugacucuucuagca

SEQ ID NO: 21973 - RNA, 22 nt, Artificial Sequence
  Guide RNA
uaaugcagugacucuucuagcc

SEQ ID NO: 21974 - RNA, 22 nt, Artificial Sequence
  Guide RNA
uacuuggcuagaagagucacug

SEQ ID NO: 21975 - RNA, 22 nt, Artificial Sequence
  Guide RNA
uacuuugcuagaagagucacug

SEQ ID NO: 21976 - RNA, 22 nt, Artificial Sequence
  Guide RNA
uagcaaaguaacuuacuuugug

SEQ ID NO: 21977 - RNA, 22 nt, Artificial Sequence
  Guide RNA
uagccaaguaacuuacuuugug

SEQ ID NO: 21978 - RNA, 22 nt, Artificial Sequence
  Guide RNA
uaucugucacaaaguaaguuac

SEQ ID NO: 21979 - RNA, 22 nt, Artificial Sequence
  Guide RNA
ucacaaaguaaguuacuuggcu

SEQ ID NO: 21980 - RNA, 22 nt, Artificial Sequence
  Guide RNA
ucacaaaguaaguuacuuugcu

SEQ ID NO: 21981 - RNA, 22 nt, Artificial Sequence
  Guide RNA
ucuagcaaaguaacuuacuuug

SEQ ID NO: 21982 - RNA, 22 nt, Artificial Sequence
  Guide RNA
ucuagccaaguaacuuacuuug

SEQ ID NO: 21983 - RNA, 22 nt, Artificial Sequence
  Guide RNA
ucugucacaaaguaaguuacuu

SEQ ID NO: 21984 - RNA, 22 nt, Artificial Sequence
  Guide RNA
ucuucuagcaaaguaacuuacu

SEQ ID NO: 21985 - RNA, 22 nt, Artificial Sequence
  Guide RNA
ucuucuagccaaguaacuuacu

SEQ ID NO: 21986 - RNA, 22 nt, Artificial Sequence
  Guide RNA
ugacucuucuagcaaaguaacu

SEQ ID NO: 21987 - RNA, 22 nt, Artificial Sequence
  Guide RNA
ugacucuucuagccaaguaacu

SEQ ID NO: 21988 - RNA, 22 nt, Artificial Sequence
  Guide RNA
ugcagugacucuucuagcaaag

SEQ ID NO: 21989 - RNA, 22 nt, Artificial Sequence
  Guide RNA
ugcagugacucuucuagccaag

SEQ ID NO: 21990 - RNA, 22 nt, Artificial Sequence
  Guide RNA
uggcuagaagagucacugcauu

SEQ ID NO: 21991 - RNA, 22 nt, Artificial Sequence
  Guide RNA
ugucacaaaguaaguuacuugg

SEQ ID NO: 21992 - RNA, 22 nt, Artificial Sequence
  Guide RNA
ugucacaaaguaaguuacuuug

SEQ ID NO: 21993 - RNA, 22 nt, Artificial Sequence
  Guide RNA
uuacuuggcuagaagagucacu

SEQ ID NO: 21994 - RNA, 22 nt, Artificial Sequence
  Guide RNA
uuacuuugcuagaagagucacu

SEQ ID NO: 21995 - RNA, 22 nt, Artificial Sequence
  Guide RNA
uucuagccaaguaacuuacuuu

SEQ ID NO: 21996 - RNA, 22 nt, Artificial Sequence
  Guide RNA
uugcuagaagagucacugcauu

SEQ ID NO: 21997 - RNA, 22 nt, Artificial Sequence
  Guide RNA
uuggcuagaagagucacugcau

SEQ ID NO: 21998 - RNA, 22 nt, Artificial Sequence
  Guide RNA
uuugcuagaagagucacugcau

SEQ ID NO: 21999 - RNA, 20 nt, Artificial Sequence
  Guide RNA
aaaggucaaaauugugauga

SEQ ID NO: 22000 - RNA, 20 nt, Artificial Sequence
  Guide RNA
aaaggucgaaauugugauga

SEQ ID NO: 22001 - RNA, 20 nt, Artificial Sequence
  Guide RNA
aaauuggccaaaggucaaaa

SEQ ID NO: 22002 - RNA, 20 nt, Artificial Sequence
  Guide RNA
aaauuggccaaaggucgaaa

SEQ ID NO: 22003 - RNA, 20 nt, Artificial Sequence
  Guide RNA
aaggucaaaauugugaugaa

SEQ ID NO: 22004 - RNA, 20 nt, Artificial Sequence
  Guide RNA
aaggucgaaauugugaugaa

SEQ ID NO: 22005 - RNA, 20 nt, Artificial Sequence
  Guide RNA
aauuggccaaaggucaaaau

SEQ ID NO: 22006 - RNA, 20 nt, Artificial Sequence
  Guide RNA
aauuggccaaaggucgaaau

SEQ ID NO: 22007 - RNA, 20 nt, Artificial Sequence
  Guide RNA
aauuucgaccuuuggccaau

SEQ ID NO: 22008 - RNA, 20 nt, Artificial Sequence
  Guide RNA
aauuuugaccuuuggccaau

SEQ ID NO: 22009 - RNA, 20 nt, Artificial Sequence
  Guide RNA
acaauuucgaccuuuggcca

SEQ ID NO: 22010 - RNA, 20 nt, Artificial Sequence
  Guide RNA
acaauuuugaccuuuggcca

SEQ ID NO: 22011 - RNA, 20 nt, Artificial Sequence
  Guide RNA
aggucaaaauugugaugaaa

SEQ ID NO: 22012 - RNA, 20 nt, Artificial Sequence
  Guide RNA
aggucgaaauugugaugaaa

SEQ ID NO: 22013 - RNA, 20 nt, Artificial Sequence
  Guide RNA
aguuucaucacaauuucgac

SEQ ID NO: 22014 - RNA, 20 nt, Artificial Sequence
  Guide RNA
aguuucaucacaauuuugac

SEQ ID NO: 22015 - RNA, 20 nt, Artificial Sequence
  Guide RNA
auaaauuggccaaaggucaa

SEQ ID NO: 22016 - RNA, 20 nt, Artificial Sequence
  Guide RNA
auaaauuggccaaaggucga

SEQ ID NO: 22017 - RNA, 20 nt, Artificial Sequence
  Guide RNA
auauaaauuggccaaagguc

SEQ ID NO: 22018 - RNA, 20 nt, Artificial Sequence
  Guide RNA
aucacaauuucgaccuuugg

SEQ ID NO: 22019 - RNA, 20 nt, Artificial Sequence
  Guide RNA
aucacaauuuugaccuuugg

SEQ ID NO: 22020 - RNA, 20 nt, Artificial Sequence
  Guide RNA
auuggccaaaggucaaaauu

SEQ ID NO: 22021 - RNA, 20 nt, Artificial Sequence
  Guide RNA
auuggccaaaggucgaaauu

SEQ ID NO: 22022 - RNA, 20 nt, Artificial Sequence
  Guide RNA
auuucgaccuuuggccaauu

SEQ ID NO: 22023 - RNA, 20 nt, Artificial Sequence
  Guide RNA
auuuugaccuuuggccaauu

SEQ ID NO: 22024 - RNA, 20 nt, Artificial Sequence
  Guide RNA
caaaauugugaugaaacuga

SEQ ID NO: 22025 - RNA, 20 nt, Artificial Sequence
  Guide RNA
caaaggucaaaauugugaug

SEQ ID NO: 22026 - RNA, 20 nt, Artificial Sequence
  Guide RNA
caaaggucgaaauugugaug

SEQ ID NO: 22027 - RNA, 20 nt, Artificial Sequence
  Guide RNA
caauuucgaccuuuggccaa

SEQ ID NO: 22028 - RNA, 20 nt, Artificial Sequence
  Guide RNA
caauuuugaccuuuggccaa

SEQ ID NO: 22029 - RNA, 20 nt, Artificial Sequence
  Guide RNA
cacaauuucgaccuuuggcc

SEQ ID NO: 22030 - RNA, 20 nt, Artificial Sequence
  Guide RNA
cacaauuuugaccuuuggcc

SEQ ID NO: 22031 - RNA, 20 nt, Artificial Sequence
  Guide RNA
caguuucaucacaauuucga

SEQ ID NO: 22032 - RNA, 20 nt, Artificial Sequence
  Guide RNA
caguuucaucacaauuuuga

SEQ ID NO: 22033 - RNA, 20 nt, Artificial Sequence
  Guide RNA
cauauaaauuggccaaaggu

SEQ ID NO: 22034 - RNA, 20 nt, Artificial Sequence
  Guide RNA
caucacaauuucgaccuuug

SEQ ID NO: 22035 - RNA, 20 nt, Artificial Sequence
  Guide RNA
caucacaauuuugaccuuug

SEQ ID NO: 22036 - RNA, 20 nt, Artificial Sequence
  Guide RNA
ccaaaggucaaaauugugau

SEQ ID NO: 22037 - RNA, 20 nt, Artificial Sequence
  Guide RNA
ccaaaggucgaaauugugau

SEQ ID NO: 22038 - RNA, 20 nt, Artificial Sequence
  Guide RNA
ccauauaaauuggccaaagg

SEQ ID NO: 22039 - RNA, 20 nt, Artificial Sequence
  Guide RNA
cccauauaaauuggccaaag

SEQ ID NO: 22040 - RNA, 20 nt, Artificial Sequence
  Guide RNA
cgaaauugugaugaaacuga

SEQ ID NO: 22041 - RNA, 20 nt, Artificial Sequence
  Guide RNA
gccaaaggucaaaauuguga

SEQ ID NO: 22042 - RNA, 20 nt, Artificial Sequence
  Guide RNA
gccaaaggucgaaauuguga

SEQ ID NO: 22043 - RNA, 20 nt, Artificial Sequence
  Guide RNA
ggccaaaggucaaaauugug

SEQ ID NO: 22044 - RNA, 20 nt, Artificial Sequence
  Guide RNA
ggccaaaggucgaaauugug

SEQ ID NO: 22045 - RNA, 20 nt, Artificial Sequence
  Guide RNA
ggucaaaauugugaugaaac

SEQ ID NO: 22046 - RNA, 20 nt, Artificial Sequence
  Guide RNA
ggucgaaauugugaugaaac

SEQ ID NO: 22047 - RNA, 20 nt, Artificial Sequence
  Guide RNA
gucaaaauugugaugaaacu

SEQ ID NO: 22048 - RNA, 20 nt, Artificial Sequence
  Guide RNA
gucgaaauugugaugaaacu

SEQ ID NO: 22049 - RNA, 20 nt, Artificial Sequence
  Guide RNA
guuucaucacaauuucgacc

SEQ ID NO: 22050 - RNA, 20 nt, Artificial Sequence
  Guide RNA
guuucaucacaauuuugacc

SEQ ID NO: 22051 - RNA, 20 nt, Artificial Sequence
  Guide RNA
uaaauuggccaaaggucaaa

SEQ ID NO: 22052 - RNA, 20 nt, Artificial Sequence
  Guide RNA
uaaauuggccaaaggucgaa

SEQ ID NO: 22053 - RNA, 20 nt, Artificial Sequence
  Guide RNA
uauaaauuggccaaagguca

SEQ ID NO: 22054 - RNA, 20 nt, Artificial Sequence
  Guide RNA
uauaaauuggccaaaggucg

SEQ ID NO: 22055 - RNA, 20 nt, Artificial Sequence
  Guide RNA
ucaaaauugugaugaaacug

SEQ ID NO: 22056 - RNA, 20 nt, Artificial Sequence
  Guide RNA
ucacaauuucgaccuuuggc

SEQ ID NO: 22057 - RNA, 20 nt, Artificial Sequence
  Guide RNA
ucacaauuuugaccuuuggc

SEQ ID NO: 22058 - RNA, 20 nt, Artificial Sequence
  Guide RNA
ucaguuucaucacaauuucg

SEQ ID NO: 22059 - RNA, 20 nt, Artificial Sequence
  Guide RNA
ucaguuucaucacaauuuug

SEQ ID NO: 22060 - RNA, 20 nt, Artificial Sequence
  Guide RNA
ucaucacaauuucgaccuuu

SEQ ID NO: 22061 - RNA, 20 nt, Artificial Sequence
  Guide RNA
ucaucacaauuuugaccuuu

SEQ ID NO: 22062 - RNA, 20 nt, Artificial Sequence
  Guide RNA
ucgaaauugugaugaaacug

SEQ ID NO: 22063 - RNA, 20 nt, Artificial Sequence
  Guide RNA
ucgaccuuuggccaauuuau

SEQ ID NO: 22064 - RNA, 20 nt, Artificial Sequence
  Guide RNA
uggccaaaggucaaaauugu

SEQ ID NO: 22065 - RNA, 20 nt, Artificial Sequence
  Guide RNA
uggccaaaggucgaaauugu

SEQ ID NO: 22066 - RNA, 20 nt, Artificial Sequence
  Guide RNA
uucaguuucaucacaauuuc

SEQ ID NO: 22067 - RNA, 20 nt, Artificial Sequence
  Guide RNA
uucaucacaauuucgaccuu

SEQ ID NO: 22068 - RNA, 20 nt, Artificial Sequence
  Guide RNA
uucaucacaauuuugaccuu

SEQ ID NO: 22069 - RNA, 20 nt, Artificial Sequence
  Guide RNA
uucgaccuuuggccaauuua

SEQ ID NO: 22070 - RNA, 20 nt, Artificial Sequence
  Guide RNA
uugaccuuuggccaauuuau

SEQ ID NO: 22071 - RNA, 20 nt, Artificial Sequence
  Guide RNA
uuggccaaaggucaaaauug

SEQ ID NO: 22072 - RNA, 20 nt, Artificial Sequence
  Guide RNA
uuggccaaaggucgaaauug

SEQ ID NO: 22073 - RNA, 20 nt, Artificial Sequence
  Guide RNA
uuucaucacaauuucgaccu

SEQ ID NO: 22074 - RNA, 20 nt, Artificial Sequence
  Guide RNA
uuucaucacaauuuugaccu

SEQ ID NO: 22075 - RNA, 20 nt, Artificial Sequence
  Guide RNA
uuucgaccuuuggccaauuu

SEQ ID NO: 22076 - RNA, 20 nt, Artificial Sequence
  Guide RNA
uuugaccuuuggccaauuua

SEQ ID NO: 22077 - RNA, 20 nt, Artificial Sequence
  Guide RNA
uuuugaccuuuggccaauuu

SEQ ID NO: 22078 - RNA, 21 nt, Artificial Sequence
  Guide RNA
aaaggucgaaauugugaugaa

SEQ ID NO: 22079 - RNA, 21 nt, Artificial Sequence
  Guide RNA
aaauuggccaaaggucaaaau

SEQ ID NO: 22080 - RNA, 21 nt, Artificial Sequence
  Guide RNA
aaauuggccaaaggucgaaau

SEQ ID NO: 22081 - RNA, 21 nt, Artificial Sequence
  Guide RNA
aaggucgaaauugugaugaaa

SEQ ID NO: 22082 - RNA, 21 nt, Artificial Sequence
  Guide RNA
aauuggccaaaggucaaaauu

SEQ ID NO: 22083 - RNA, 21 nt, Artificial Sequence
  Guide RNA
aauuggccaaaggucgaaauu

SEQ ID NO: 22084 - RNA, 21 nt, Artificial Sequence
  Guide RNA
aauuucgaccuuuggccaauu

SEQ ID NO: 22085 - RNA, 21 nt, Artificial Sequence
  Guide RNA
aauuuugaccuuuggccaauu

SEQ ID NO: 22086 - RNA, 21 nt, Artificial Sequence
  Guide RNA
acaauuucgaccuuuggccaa

SEQ ID NO: 22087 - RNA, 21 nt, Artificial Sequence
  Guide RNA
acaauuuugaccuuuggccaa

SEQ ID NO: 22088 - RNA, 21 nt, Artificial Sequence
  Guide RNA
acccauauaaauuggccaaag

SEQ ID NO: 22089 - RNA, 21 nt, Artificial Sequence
  Guide RNA
aggucaaaauugugaugaaac

SEQ ID NO: 22090 - RNA, 21 nt, Artificial Sequence
  Guide RNA
aggucgaaauugugaugaaac

SEQ ID NO: 22091 - RNA, 21 nt, Artificial Sequence
  Guide RNA
aguuucaucacaauuucgacc

SEQ ID NO: 22092 - RNA, 21 nt, Artificial Sequence
  Guide RNA
aguuucaucacaauuuugacc

SEQ ID NO: 22093 - RNA, 21 nt, Artificial Sequence
  Guide RNA
auaaauuggccaaaggucaaa

SEQ ID NO: 22094 - RNA, 21 nt, Artificial Sequence
  Guide RNA
auaaauuggccaaaggucgaa

SEQ ID NO: 22095 - RNA, 21 nt, Artificial Sequence
  Guide RNA
auauaaauuggccaaagguca

SEQ ID NO: 22096 - RNA, 21 nt, Artificial Sequence
  Guide RNA
auauaaauuggccaaaggucg

SEQ ID NO: 22097 - RNA, 21 nt, Artificial Sequence
  Guide RNA
aucacaauuucgaccuuuggc

SEQ ID NO: 22098 - RNA, 21 nt, Artificial Sequence
  Guide RNA
aucacaauuuugaccuuuggc

SEQ ID NO: 22099 - RNA, 21 nt, Artificial Sequence
  Guide RNA
auuggccaaaggucaaaauug

SEQ ID NO: 22100 - RNA, 21 nt, Artificial Sequence
  Guide RNA
auuggccaaaggucgaaauug

SEQ ID NO: 22101 - RNA, 21 nt, Artificial Sequence
  Guide RNA
auuucgaccuuuggccaauuu

SEQ ID NO: 22102 - RNA, 21 nt, Artificial Sequence
  Guide RNA
auuuugaccuuuggccaauuu

SEQ ID NO: 22103 - RNA, 21 nt, Artificial Sequence
  Guide RNA
caaaggucaaaauugugauga

SEQ ID NO: 22104 - RNA, 21 nt, Artificial Sequence
  Guide RNA
caaaggucgaaauugugauga

SEQ ID NO: 22105 - RNA, 21 nt, Artificial Sequence
  Guide RNA
caauuucgaccuuuggccaau

SEQ ID NO: 22106 - RNA, 21 nt, Artificial Sequence
  Guide RNA
caauuuugaccuuuggccaau

SEQ ID NO: 22107 - RNA, 21 nt, Artificial Sequence
  Guide RNA
cacaauuucgaccuuuggcca

SEQ ID NO: 22108 - RNA, 21 nt, Artificial Sequence
  Guide RNA
cacaauuuugaccuuuggcca

SEQ ID NO: 22109 - RNA, 21 nt, Artificial Sequence
  Guide RNA
caguuucaucacaauuucgac

SEQ ID NO: 22110 - RNA, 21 nt, Artificial Sequence
  Guide RNA
caguuucaucacaauuuugac

SEQ ID NO: 22111 - RNA, 21 nt, Artificial Sequence
  Guide RNA
cauauaaauuggccaaagguc

SEQ ID NO: 22112 - RNA, 21 nt, Artificial Sequence
  Guide RNA
caucacaauuucgaccuuugg

SEQ ID NO: 22113 - RNA, 21 nt, Artificial Sequence
  Guide RNA
caucacaauuuugaccuuugg

SEQ ID NO: 22114 - RNA, 21 nt, Artificial Sequence
  Guide RNA
ccaaaggucaaaauugugaug

SEQ ID NO: 22115 - RNA, 21 nt, Artificial Sequence
  Guide RNA
ccaaaggucgaaauugugaug

SEQ ID NO: 22116 - RNA, 21 nt, Artificial Sequence
  Guide RNA
ccauauaaauuggccaaaggu

SEQ ID NO: 22117 - RNA, 21 nt, Artificial Sequence
  Guide RNA
cccauauaaauuggccaaagg

SEQ ID NO: 22118 - RNA, 21 nt, Artificial Sequence
  Guide RNA
cgaaauugugaugaaacugaa

SEQ ID NO: 22119 - RNA, 21 nt, Artificial Sequence
  Guide RNA
gccaaaggucaaaauugugau

SEQ ID NO: 22120 - RNA, 21 nt, Artificial Sequence
  Guide RNA
gccaaaggucgaaauugugau

SEQ ID NO: 22121 - RNA, 21 nt, Artificial Sequence
  Guide RNA
ggccaaaggucaaaauuguga

SEQ ID NO: 22122 - RNA, 21 nt, Artificial Sequence
  Guide RNA
ggccaaaggucgaaauuguga

SEQ ID NO: 22123 - RNA, 21 nt, Artificial Sequence
  Guide RNA
ggucaaaauugugaugaaacu

SEQ ID NO: 22124 - RNA, 21 nt, Artificial Sequence
  Guide RNA
ggucgaaauugugaugaaacu

SEQ ID NO: 22125 - RNA, 21 nt, Artificial Sequence
  Guide RNA
gucaaaauugugaugaaacug

SEQ ID NO: 22126 - RNA, 21 nt, Artificial Sequence
  Guide RNA
gucgaaauugugaugaaacug

SEQ ID NO: 22127 - RNA, 21 nt, Artificial Sequence
  Guide RNA
guuucaucacaauuucgaccu

SEQ ID NO: 22128 - RNA, 21 nt, Artificial Sequence
  Guide RNA
guuucaucacaauuuugaccu

SEQ ID NO: 22129 - RNA, 21 nt, Artificial Sequence
  Guide RNA
uaaauuggccaaaggucaaaa

SEQ ID NO: 22130 - RNA, 21 nt, Artificial Sequence
  Guide RNA
uaaauuggccaaaggucgaaa

SEQ ID NO: 22131 - RNA, 21 nt, Artificial Sequence
  Guide RNA
uauaaauuggccaaaggucaa

SEQ ID NO: 22132 - RNA, 21 nt, Artificial Sequence
  Guide RNA
uauaaauuggccaaaggucga

SEQ ID NO: 22133 - RNA, 21 nt, Artificial Sequence
  Guide RNA
ucacaauuucgaccuuuggcc

SEQ ID NO: 22134 - RNA, 21 nt, Artificial Sequence
  Guide RNA
ucacaauuuugaccuuuggcc

SEQ ID NO: 22135 - RNA, 21 nt, Artificial Sequence
  Guide RNA
ucaguuucaucacaauuucga

SEQ ID NO: 22136 - RNA, 21 nt, Artificial Sequence
  Guide RNA
ucaucacaauuucgaccuuug

SEQ ID NO: 22137 - RNA, 21 nt, Artificial Sequence
  Guide RNA
ucaucacaauuuugaccuuug

SEQ ID NO: 22138 - RNA, 21 nt, Artificial Sequence
  Guide RNA
ucgaaauugugaugaaacuga

SEQ ID NO: 22139 - RNA, 21 nt, Artificial Sequence
  Guide RNA
ucgaccuuuggccaauuuaua

SEQ ID NO: 22140 - RNA, 21 nt, Artificial Sequence
  Guide RNA
uggccaaaggucaaaauugug

SEQ ID NO: 22141 - RNA, 21 nt, Artificial Sequence
  Guide RNA
uggccaaaggucgaaauugug

SEQ ID NO: 22142 - RNA, 21 nt, Artificial Sequence
  Guide RNA
uucaguuucaucacaauuucg

SEQ ID NO: 22143 - RNA, 21 nt, Artificial Sequence
  Guide RNA
uucaucacaauuucgaccuuu

SEQ ID NO: 22144 - RNA, 21 nt, Artificial Sequence
  Guide RNA
uucgaccuuuggccaauuuau

SEQ ID NO: 22145 - RNA, 21 nt, Artificial Sequence
  Guide RNA
uugaccuuuggccaauuuaua

SEQ ID NO: 22146 - RNA, 21 nt, Artificial Sequence
  Guide RNA
uuggccaaaggucaaaauugu

SEQ ID NO: 22147 - RNA, 21 nt, Artificial Sequence
  Guide RNA
uuggccaaaggucgaaauugu

SEQ ID NO: 22148 - RNA, 21 nt, Artificial Sequence
  Guide RNA
uuucaucacaauuucgaccuu

SEQ ID NO: 22149 - RNA, 21 nt, Artificial Sequence
  Guide RNA
uuucgaccuuuggccaauuua

SEQ ID NO: 22150 - RNA, 21 nt, Artificial Sequence
  Guide RNA
uuugaccuuuggccaauuuau

SEQ ID NO: 22151 - RNA, 21 nt, Artificial Sequence
  Guide RNA
uuuugaccuuuggccaauuua

SEQ ID NO: 22152 - RNA, 22 nt, Artificial Sequence
  Guide RNA
aaaggucgaaauugugaugaaa

SEQ ID NO: 22153 - RNA, 22 nt, Artificial Sequence
  Guide RNA
aaauuggccaaaggucaaaauu

SEQ ID NO: 22154 - RNA, 22 nt, Artificial Sequence
  Guide RNA
aaauuggccaaaggucgaaauu

SEQ ID NO: 22155 - RNA, 22 nt, Artificial Sequence
  Guide RNA
aaggucaaaauugugaugaaac

SEQ ID NO: 22156 - RNA, 22 nt, Artificial Sequence
  Guide RNA
aaggucgaaauugugaugaaac

SEQ ID NO: 22157 - RNA, 22 nt, Artificial Sequence
  Guide RNA
aauuggccaaaggucaaaauug

SEQ ID NO: 22158 - RNA, 22 nt, Artificial Sequence
  Guide RNA
aauuggccaaaggucgaaauug

SEQ ID NO: 22159 - RNA, 22 nt, Artificial Sequence
  Guide RNA
aauuucgaccuuuggccaauuu

SEQ ID NO: 22160 - RNA, 22 nt, Artificial Sequence
  Guide RNA
aauuuugaccuuuggccaauuu

SEQ ID NO: 22161 - RNA, 22 nt, Artificial Sequence
  Guide RNA
acaauuucgaccuuuggccaau

SEQ ID NO: 22162 - RNA, 22 nt, Artificial Sequence
  Guide RNA
acaauuuugaccuuuggccaau

SEQ ID NO: 22163 - RNA, 22 nt, Artificial Sequence
  Guide RNA
acccauauaaauuggccaaagg

SEQ ID NO: 22164 - RNA, 22 nt, Artificial Sequence
  Guide RNA
aggucaaaauugugaugaaacu

SEQ ID NO: 22165 - RNA, 22 nt, Artificial Sequence
  Guide RNA
aggucgaaauugugaugaaacu

SEQ ID NO: 22166 - RNA, 22 nt, Artificial Sequence
  Guide RNA
aguuucaucacaauuucgaccu

SEQ ID NO: 22167 - RNA, 22 nt, Artificial Sequence
  Guide RNA
aguuucaucacaauuuugaccu

SEQ ID NO: 22168 - RNA, 22 nt, Artificial Sequence
  Guide RNA
auaaauuggccaaaggucaaaa

SEQ ID NO: 22169 - RNA, 22 nt, Artificial Sequence
  Guide RNA
auaaauuggccaaaggucgaaa

SEQ ID NO: 22170 - RNA, 22 nt, Artificial Sequence
  Guide RNA
auauaaauuggccaaaggucaa

SEQ ID NO: 22171 - RNA, 22 nt, Artificial Sequence
  Guide RNA
auauaaauuggccaaaggucga

SEQ ID NO: 22172 - RNA, 22 nt, Artificial Sequence
  Guide RNA
aucacaauuucgaccuuuggcc

SEQ ID NO: 22173 - RNA, 22 nt, Artificial Sequence
  Guide RNA
aucacaauuuugaccuuuggcc

SEQ ID NO: 22174 - RNA, 22 nt, Artificial Sequence
  Guide RNA
auucaguuucaucacaauuucg

SEQ ID NO: 22175 - RNA, 22 nt, Artificial Sequence
  Guide RNA
auuggccaaaggucaaaauugu

SEQ ID NO: 22176 - RNA, 22 nt, Artificial Sequence
  Guide RNA
auuggccaaaggucgaaauugu

SEQ ID NO: 22177 - RNA, 22 nt, Artificial Sequence
  Guide RNA
auuucgaccuuuggccaauuua

SEQ ID NO: 22178 - RNA, 22 nt, Artificial Sequence
  Guide RNA
auuuugaccuuuggccaauuua

SEQ ID NO: 22179 - RNA, 22 nt, Artificial Sequence
  Guide RNA
caaaggucaaaauugugaugaa

SEQ ID NO: 22180 - RNA, 22 nt, Artificial Sequence
  Guide RNA
caaaggucgaaauugugaugaa

SEQ ID NO: 22181 - RNA, 22 nt, Artificial Sequence
  Guide RNA
caauuucgaccuuuggccaauu

SEQ ID NO: 22182 - RNA, 22 nt, Artificial Sequence
  Guide RNA
caauuuugaccuuuggccaauu

SEQ ID NO: 22183 - RNA, 22 nt, Artificial Sequence
  Guide RNA
cacaauuucgaccuuuggccaa

SEQ ID NO: 22184 - RNA, 22 nt, Artificial Sequence
  Guide RNA
cacaauuuugaccuuuggccaa

SEQ ID NO: 22185 - RNA, 22 nt, Artificial Sequence
  Guide RNA
caguuucaucacaauuucgacc

SEQ ID NO: 22186 - RNA, 22 nt, Artificial Sequence
  Guide RNA
caguuucaucacaauuuugacc

SEQ ID NO: 22187 - RNA, 22 nt, Artificial Sequence
  Guide RNA
cauauaaauuggccaaagguca

SEQ ID NO: 22188 - RNA, 22 nt, Artificial Sequence
  Guide RNA
cauauaaauuggccaaaggucg

SEQ ID NO: 22189 - RNA, 22 nt, Artificial Sequence
  Guide RNA
caucacaauuucgaccuuuggc

SEQ ID NO: 22190 - RNA, 22 nt, Artificial Sequence
  Guide RNA
caucacaauuuugaccuuuggc

SEQ ID NO: 22191 - RNA, 22 nt, Artificial Sequence
  Guide RNA
ccaaaggucaaaauugugauga

SEQ ID NO: 22192 - RNA, 22 nt, Artificial Sequence
  Guide RNA
ccaaaggucgaaauugugauga

SEQ ID NO: 22193 - RNA, 22 nt, Artificial Sequence
  Guide RNA
ccaauauucaguuucaucacaa

SEQ ID NO: 22194 - RNA, 22 nt, Artificial Sequence
  Guide RNA
ccauauaaauuggccaaagguc

SEQ ID NO: 22195 - RNA, 22 nt, Artificial Sequence
  Guide RNA
cccauauaaauuggccaaaggu

SEQ ID NO: 22196 - RNA, 22 nt, Artificial Sequence
  Guide RNA
cgaaauugugaugaaacugaau

SEQ ID NO: 22197 - RNA, 22 nt, Artificial Sequence
  Guide RNA
gccaaaggucaaaauugugaug

SEQ ID NO: 22198 - RNA, 22 nt, Artificial Sequence
  Guide RNA
gccaaaggucgaaauugugaug

SEQ ID NO: 22199 - RNA, 22 nt, Artificial Sequence
  Guide RNA
ggccaaaggucaaaauugugau

SEQ ID NO: 22200 - RNA, 22 nt, Artificial Sequence
  Guide RNA
ggccaaaggucgaaauugugau

SEQ ID NO: 22201 - RNA, 22 nt, Artificial Sequence
  Guide RNA
ggucaaaauugugaugaaacug

SEQ ID NO: 22202 - RNA, 22 nt, Artificial Sequence
  Guide RNA
ggucgaaauugugaugaaacug

SEQ ID NO: 22203 - RNA, 22 nt, Artificial Sequence
  Guide RNA
gucaaaauugugaugaaacuga

SEQ ID NO: 22204 - RNA, 22 nt, Artificial Sequence
  Guide RNA
gucgaaauugugaugaaacuga

SEQ ID NO: 22205 - RNA, 22 nt, Artificial Sequence
  Guide RNA
guuucaucacaauuucgaccuu

SEQ ID NO: 22206 - RNA, 22 nt, Artificial Sequence
  Guide RNA
guuucaucacaauuuugaccuu

SEQ ID NO: 22207 - RNA, 22 nt, Artificial Sequence
  Guide RNA
uaaauuggccaaaggucaaaau

SEQ ID NO: 22208 - RNA, 22 nt, Artificial Sequence
  Guide RNA
uaaauuggccaaaggucgaaau

SEQ ID NO: 22209 - RNA, 22 nt, Artificial Sequence
  Guide RNA
uacccauauaaauuggccaaag

SEQ ID NO: 22210 - RNA, 22 nt, Artificial Sequence
  Guide RNA
uauaaauuggccaaaggucaaa

SEQ ID NO: 22211 - RNA, 22 nt, Artificial Sequence
  Guide RNA
uauaaauuggccaaaggucgaa

SEQ ID NO: 22212 - RNA, 22 nt, Artificial Sequence
  Guide RNA
ucacaauuucgaccuuuggcca

SEQ ID NO: 22213 - RNA, 22 nt, Artificial Sequence
  Guide RNA
ucacaauuuugaccuuuggcca

SEQ ID NO: 22214 - RNA, 22 nt, Artificial Sequence
  Guide RNA
ucaguuucaucacaauuucgac

SEQ ID NO: 22215 - RNA, 22 nt, Artificial Sequence
  Guide RNA
ucaguuucaucacaauuuugac

SEQ ID NO: 22216 - RNA, 22 nt, Artificial Sequence
  Guide RNA
ucaucacaauuucgaccuuugg

SEQ ID NO: 22217 - RNA, 22 nt, Artificial Sequence
  Guide RNA
ucaucacaauuuugaccuuugg

SEQ ID NO: 22218 - RNA, 22 nt, Artificial Sequence
  Guide RNA
ucgaaauugugaugaaacugaa

SEQ ID NO: 22219 - RNA, 22 nt, Artificial Sequence
  Guide RNA
ucgaccuuuggccaauuuauau

SEQ ID NO: 22220 - RNA, 22 nt, Artificial Sequence
  Guide RNA
uggccaaaggucaaaauuguga

SEQ ID NO: 22221 - RNA, 22 nt, Artificial Sequence
  Guide RNA
uggccaaaggucgaaauuguga

SEQ ID NO: 22222 - RNA, 22 nt, Artificial Sequence
  Guide RNA
uucaguuucaucacaauuucga

SEQ ID NO: 22223 - RNA, 22 nt, Artificial Sequence
  Guide RNA
uucaucacaauuucgaccuuug

SEQ ID NO: 22224 - RNA, 22 nt, Artificial Sequence
  Guide RNA
uucaucacaauuuugaccuuug

SEQ ID NO: 22225 - RNA, 22 nt, Artificial Sequence
  Guide RNA
uucgaccuuuggccaauuuaua

SEQ ID NO: 22226 - RNA, 22 nt, Artificial Sequence
  Guide RNA
uugaccuuuggccaauuuauau

SEQ ID NO: 22227 - RNA, 22 nt, Artificial Sequence
  Guide RNA
uuggccaaaggucaaaauugug

SEQ ID NO: 22228 - RNA, 22 nt, Artificial Sequence
  Guide RNA
uuggccaaaggucgaaauugug

SEQ ID NO: 22229 - RNA, 22 nt, Artificial Sequence
  Guide RNA
uuucaucacaauuucgaccuuu

SEQ ID NO: 22230 - RNA, 22 nt, Artificial Sequence
  Guide RNA
uuucgaccuuuggccaauuuau

SEQ ID NO: 22231 - RNA, 22 nt, Artificial Sequence
  Guide RNA
uuugaccuuuggccaauuuaua

SEQ ID NO: 22232 - RNA, 22 nt, Artificial Sequence
  Guide RNA
uuuugaccuuuggccaauuuau

SEQ ID NO: 22233 - RNA, 20 nt, Artificial Sequence
  Guide RNA
aaauccuaucaggggcucau

SEQ ID NO: 22234 - RNA, 20 nt, Artificial Sequence
  Guide RNA
aaauccuaucgggggcucau

SEQ ID NO: 22235 - RNA, 20 nt, Artificial Sequence
  Guide RNA
aaaugagcccccgauaggau

SEQ ID NO: 22236 - RNA, 20 nt, Artificial Sequence
  Guide RNA
aaaugagccccugauaggau

SEQ ID NO: 22237 - RNA, 20 nt, Artificial Sequence
  Guide RNA
aauccuaucaggggcucauu

SEQ ID NO: 22238 - RNA, 20 nt, Artificial Sequence
  Guide RNA
aauccuaucgggggcucauu

SEQ ID NO: 22239 - RNA, 20 nt, Artificial Sequence
  Guide RNA
aaugagcccccgauaggauu

SEQ ID NO: 22240 - RNA, 20 nt, Artificial Sequence
  Guide RNA
aaugagccccugauaggauu

SEQ ID NO: 22241 - RNA, 20 nt, Artificial Sequence
  Guide RNA
accccaaaugagcccccgau

SEQ ID NO: 22242 - RNA, 20 nt, Artificial Sequence
  Guide RNA
accccaaaugagccccugau

SEQ ID NO: 22243 - RNA, 20 nt, Artificial Sequence
  Guide RNA
acuuaccccaaaugagcccc

SEQ ID NO: 22244 - RNA, 20 nt, Artificial Sequence
  Guide RNA
agcccccgauaggauuuaau

SEQ ID NO: 22245 - RNA, 20 nt, Artificial Sequence
  Guide RNA
agccccugauaggauuuaau

SEQ ID NO: 22246 - RNA, 20 nt, Artificial Sequence
  Guide RNA
auacuuaccccaaaugagcc

SEQ ID NO: 22247 - RNA, 20 nt, Artificial Sequence
  Guide RNA
aucaggggcucauuuggggu

SEQ ID NO: 22248 - RNA, 20 nt, Artificial Sequence
  Guide RNA
auccuaucaggggcucauuu

SEQ ID NO: 22249 - RNA, 20 nt, Artificial Sequence
  Guide RNA
auccuaucgggggcucauuu

SEQ ID NO: 22250 - RNA, 20 nt, Artificial Sequence
  Guide RNA
aucgggggcucauuuggggu

SEQ ID NO: 22251 - RNA, 20 nt, Artificial Sequence
  Guide RNA
augagcccccgauaggauuu

SEQ ID NO: 22252 - RNA, 20 nt, Artificial Sequence
  Guide RNA
augagccccugauaggauuu

SEQ ID NO: 22253 - RNA, 20 nt, Artificial Sequence
  Guide RNA
auuaaauccuaucaggggcu

SEQ ID NO: 22254 - RNA, 20 nt, Artificial Sequence
  Guide RNA
auuaaauccuaucgggggcu

SEQ ID NO: 22255 - RNA, 20 nt, Artificial Sequence
  Guide RNA
caaaugagcccccgauagga

SEQ ID NO: 22256 - RNA, 20 nt, Artificial Sequence
  Guide RNA
caaaugagccccugauagga

SEQ ID NO: 22257 - RNA, 20 nt, Artificial Sequence
  Guide RNA
caggggcucauuugggguaa

SEQ ID NO: 22258 - RNA, 20 nt, Artificial Sequence
  Guide RNA
ccaaaugagcccccgauagg

SEQ ID NO: 22259 - RNA, 20 nt, Artificial Sequence
  Guide RNA
ccaaaugagccccugauagg

SEQ ID NO: 22260 - RNA, 20 nt, Artificial Sequence
  Guide RNA
cccaaaugagcccccgauag

SEQ ID NO: 22261 - RNA, 20 nt, Artificial Sequence
  Guide RNA
cccaaaugagccccugauag

SEQ ID NO: 22262 - RNA, 20 nt, Artificial Sequence
  Guide RNA
ccccaaaugagcccccgaua

SEQ ID NO: 22263 - RNA, 20 nt, Artificial Sequence
  Guide RNA
ccccaaaugagccccugaua

SEQ ID NO: 22264 - RNA, 20 nt, Artificial Sequence
  Guide RNA
cccccgauaggauuuaauaa

SEQ ID NO: 22265 - RNA, 20 nt, Artificial Sequence
  Guide RNA
ccccgauaggauuuaauaaa

SEQ ID NO: 22266 - RNA, 20 nt, Artificial Sequence
  Guide RNA
ccccugauaggauuuaauaa

SEQ ID NO: 22267 - RNA, 20 nt, Artificial Sequence
  Guide RNA
cccgauaggauuuaauaaac

SEQ ID NO: 22268 - RNA, 20 nt, Artificial Sequence
  Guide RNA
cccugauaggauuuaauaaa

SEQ ID NO: 22269 - RNA, 20 nt, Artificial Sequence
  Guide RNA
ccgauaggauuuaauaaacc

SEQ ID NO: 22270 - RNA, 20 nt, Artificial Sequence
  Guide RNA
ccuaucaggggcucauuugg

SEQ ID NO: 22271 - RNA, 20 nt, Artificial Sequence
  Guide RNA
ccuaucgggggcucauuugg

SEQ ID NO: 22272 - RNA, 20 nt, Artificial Sequence
  Guide RNA
ccugauaggauuuaauaaac

SEQ ID NO: 22273 - RNA, 20 nt, Artificial Sequence
  Guide RNA
cgggggcucauuugggguaa

SEQ ID NO: 22274 - RNA, 20 nt, Artificial Sequence
  Guide RNA
cuaucaggggcucauuuggg

SEQ ID NO: 22275 - RNA, 20 nt, Artificial Sequence
  Guide RNA
cuaucgggggcucauuuggg

SEQ ID NO: 22276 - RNA, 20 nt, Artificial Sequence
  Guide RNA
cugauaggauuuaauaaacc

SEQ ID NO: 22277 - RNA, 20 nt, Artificial Sequence
  Guide RNA
cuuaccccaaaugagccccc

SEQ ID NO: 22278 - RNA, 20 nt, Artificial Sequence
  Guide RNA
cuuaccccaaaugagccccu

SEQ ID NO: 22279 - RNA, 20 nt, Artificial Sequence
  Guide RNA
gagcccccgauaggauuuaa

SEQ ID NO: 22280 - RNA, 20 nt, Artificial Sequence
  Guide RNA
gagccccugauaggauuuaa

SEQ ID NO: 22281 - RNA, 20 nt, Artificial Sequence
  Guide RNA
gcccccgauaggauuuaaua

SEQ ID NO: 22282 - RNA, 20 nt, Artificial Sequence
  Guide RNA
gccccugauaggauuuaaua

SEQ ID NO: 22283 - RNA, 20 nt, Artificial Sequence
  Guide RNA
ggugguuuauuaaauccuau

SEQ ID NO: 22284 - RNA, 20 nt, Artificial Sequence
  Guide RNA
gguuuauuaaauccuaucag

SEQ ID NO: 22285 - RNA, 20 nt, Artificial Sequence
  Guide RNA
gguuuauuaaauccuaucgg

SEQ ID NO: 22286 - RNA, 20 nt, Artificial Sequence
  Guide RNA
guggugguuuauuaaauccu

SEQ ID NO: 22287 - RNA, 20 nt, Artificial Sequence
  Guide RNA
gugguuuauuaaauccuauc

SEQ ID NO: 22288 - RNA, 20 nt, Artificial Sequence
  Guide RNA
guuuauuaaauccuaucagg

SEQ ID NO: 22289 - RNA, 20 nt, Artificial Sequence
  Guide RNA
guuuauuaaauccuaucggg

SEQ ID NO: 22290 - RNA, 20 nt, Artificial Sequence
  Guide RNA
uaaauccuaucaggggcuca

SEQ ID NO: 22291 - RNA, 20 nt, Artificial Sequence
  Guide RNA
uaaauccuaucgggggcuca

SEQ ID NO: 22292 - RNA, 20 nt, Artificial Sequence
  Guide RNA
uaccccaaaugagcccccga

SEQ ID NO: 22293 - RNA, 20 nt, Artificial Sequence
  Guide RNA
uaccccaaaugagccccuga

SEQ ID NO: 22294 - RNA, 20 nt, Artificial Sequence
  Guide RNA
uacuuaccccaaaugagccc

SEQ ID NO: 22295 - RNA, 20 nt, Artificial Sequence
  Guide RNA
uauacuuaccccaaaugagc

SEQ ID NO: 22296 - RNA, 20 nt, Artificial Sequence
  Guide RNA
uaucaggggcucauuugggg

SEQ ID NO: 22297 - RNA, 20 nt, Artificial Sequence
  Guide RNA
uaucgggggcucauuugggg

SEQ ID NO: 22298 - RNA, 20 nt, Artificial Sequence
  Guide RNA
uauuaaauccuaucaggggc

SEQ ID NO: 22299 - RNA, 20 nt, Artificial Sequence
  Guide RNA
uauuaaauccuaucgggggc

SEQ ID NO: 22300 - RNA, 20 nt, Artificial Sequence
  Guide RNA
ucaggggcucauuuggggua

SEQ ID NO: 22301 - RNA, 20 nt, Artificial Sequence
  Guide RNA
uccuaucaggggcucauuug

SEQ ID NO: 22302 - RNA, 20 nt, Artificial Sequence
  Guide RNA
uccuaucgggggcucauuug

SEQ ID NO: 22303 - RNA, 20 nt, Artificial Sequence
  Guide RNA
ucgggggcucauuuggggua

SEQ ID NO: 22304 - RNA, 20 nt, Artificial Sequence
  Guide RNA
ugagcccccgauaggauuua

SEQ ID NO: 22305 - RNA, 20 nt, Artificial Sequence
  Guide RNA
ugagccccugauaggauuua

SEQ ID NO: 22306 - RNA, 20 nt, Artificial Sequence
  Guide RNA
uggugguuuauuaaauccua

SEQ ID NO: 22307 - RNA, 20 nt, Artificial Sequence
  Guide RNA
ugguuuauuaaauccuaucg

SEQ ID NO: 22308 - RNA, 20 nt, Artificial Sequence
  Guide RNA
uuaaauccuaucaggggcuc

SEQ ID NO: 22309 - RNA, 20 nt, Artificial Sequence
  Guide RNA
uuaaauccuaucgggggcuc

SEQ ID NO: 22310 - RNA, 20 nt, Artificial Sequence
  Guide RNA
uuaccccaaaugagcccccg

SEQ ID NO: 22311 - RNA, 20 nt, Artificial Sequence
  Guide RNA
uuaccccaaaugagccccug

SEQ ID NO: 22312 - RNA, 20 nt, Artificial Sequence
  Guide RNA
uuauuaaauccuaucagggg

SEQ ID NO: 22313 - RNA, 20 nt, Artificial Sequence
  Guide RNA
uuauuaaauccuaucggggg

SEQ ID NO: 22314 - RNA, 20 nt, Artificial Sequence
  Guide RNA
uuuauuaaauccuaucaggg

SEQ ID NO: 22315 - RNA, 20 nt, Artificial Sequence
  Guide RNA
uuuauuaaauccuaucgggg

SEQ ID NO: 22316 - RNA, 21 nt, Artificial Sequence
  Guide RNA
aaauccuaucaggggcucauu

SEQ ID NO: 22317 - RNA, 21 nt, Artificial Sequence
  Guide RNA
aaauccuaucgggggcucauu

SEQ ID NO: 22318 - RNA, 21 nt, Artificial Sequence
  Guide RNA
aaaugagcccccgauaggauu

SEQ ID NO: 22319 - RNA, 21 nt, Artificial Sequence
  Guide RNA
aaaugagccccugauaggauu

SEQ ID NO: 22320 - RNA, 21 nt, Artificial Sequence
  Guide RNA
aauccuaucaggggcucauuu

SEQ ID NO: 22321 - RNA, 21 nt, Artificial Sequence
  Guide RNA
aauccuaucgggggcucauuu

SEQ ID NO: 22322 - RNA, 21 nt, Artificial Sequence
  Guide RNA
aaugagcccccgauaggauuu

SEQ ID NO: 22323 - RNA, 21 nt, Artificial Sequence
  Guide RNA
aaugagccccugauaggauuu

SEQ ID NO: 22324 - RNA, 21 nt, Artificial Sequence
  Guide RNA
accccaaaugagcccccgaua

SEQ ID NO: 22325 - RNA, 21 nt, Artificial Sequence
  Guide RNA
accccaaaugagccccugaua

SEQ ID NO: 22326 - RNA, 21 nt, Artificial Sequence
  Guide RNA
acuuaccccaaaugagccccc

SEQ ID NO: 22327 - RNA, 21 nt, Artificial Sequence
  Guide RNA
acuuaccccaaaugagccccu

SEQ ID NO: 22328 - RNA, 21 nt, Artificial Sequence
  Guide RNA
agcccccgauaggauuuaaua

SEQ ID NO: 22329 - RNA, 21 nt, Artificial Sequence
  Guide RNA
agccccugauaggauuuaaua

SEQ ID NO: 22330 - RNA, 21 nt, Artificial Sequence
  Guide RNA
auacuuaccccaaaugagccc

SEQ ID NO: 22331 - RNA, 21 nt, Artificial Sequence
  Guide RNA
aucaggggcucauuuggggua

SEQ ID NO: 22332 - RNA, 21 nt, Artificial Sequence
  Guide RNA
auccuaucaggggcucauuug

SEQ ID NO: 22333 - RNA, 21 nt, Artificial Sequence
  Guide RNA
auccuaucgggggcucauuug

SEQ ID NO: 22334 - RNA, 21 nt, Artificial Sequence
  Guide RNA
aucgggggcucauuuggggua

SEQ ID NO: 22335 - RNA, 21 nt, Artificial Sequence
  Guide RNA
augagcccccgauaggauuua

SEQ ID NO: 22336 - RNA, 21 nt, Artificial Sequence
  Guide RNA
augagccccugauaggauuua

SEQ ID NO: 22337 - RNA, 21 nt, Artificial Sequence
  Guide RNA
auuaaauccuaucaggggcuc

SEQ ID NO: 22338 - RNA, 21 nt, Artificial Sequence
  Guide RNA
auuaaauccuaucgggggcuc

SEQ ID NO: 22339 - RNA, 21 nt, Artificial Sequence
  Guide RNA
caaaugagcccccgauaggau

SEQ ID NO: 22340 - RNA, 21 nt, Artificial Sequence
  Guide RNA
caaaugagccccugauaggau

SEQ ID NO: 22341 - RNA, 21 nt, Artificial Sequence
  Guide RNA
caggggcucauuugggguaag

SEQ ID NO: 22342 - RNA, 21 nt, Artificial Sequence
  Guide RNA
ccaaaugagcccccgauagga

SEQ ID NO: 22343 - RNA, 21 nt, Artificial Sequence
  Guide RNA
ccaaaugagccccugauagga

SEQ ID NO: 22344 - RNA, 21 nt, Artificial Sequence
  Guide RNA
cccaaaugagcccccgauagg

SEQ ID NO: 22345 - RNA, 21 nt, Artificial Sequence
  Guide RNA
cccaaaugagccccugauagg

SEQ ID NO: 22346 - RNA, 21 nt, Artificial Sequence
  Guide RNA
ccccaaaugagcccccgauag

SEQ ID NO: 22347 - RNA, 21 nt, Artificial Sequence
  Guide RNA
ccccaaaugagccccugauag

SEQ ID NO: 22348 - RNA, 21 nt, Artificial Sequence
  Guide RNA
cccccgauaggauuuaauaaa

SEQ ID NO: 22349 - RNA, 21 nt, Artificial Sequence
  Guide RNA
ccccgauaggauuuaauaaac

SEQ ID NO: 22350 - RNA, 21 nt, Artificial Sequence
  Guide RNA
ccccugauaggauuuaauaaa

SEQ ID NO: 22351 - RNA, 21 nt, Artificial Sequence
  Guide RNA
cccgauaggauuuaauaaacc

SEQ ID NO: 22352 - RNA, 21 nt, Artificial Sequence
  Guide RNA
cccugauaggauuuaauaaac

SEQ ID NO: 22353 - RNA, 21 nt, Artificial Sequence
  Guide RNA
ccgauaggauuuaauaaacca

SEQ ID NO: 22354 - RNA, 21 nt, Artificial Sequence
  Guide RNA
ccuaucaggggcucauuuggg

SEQ ID NO: 22355 - RNA, 21 nt, Artificial Sequence
  Guide RNA
ccuaucgggggcucauuuggg

SEQ ID NO: 22356 - RNA, 21 nt, Artificial Sequence
  Guide RNA
ccugauaggauuuaauaaacc

SEQ ID NO: 22357 - RNA, 21 nt, Artificial Sequence
  Guide RNA
cgggggcucauuugggguaag

SEQ ID NO: 22358 - RNA, 21 nt, Artificial Sequence
  Guide RNA
cuaucaggggcucauuugggg

SEQ ID NO: 22359 - RNA, 21 nt, Artificial Sequence
  Guide RNA
cuaucgggggcucauuugggg

SEQ ID NO: 22360 - RNA, 21 nt, Artificial Sequence
  Guide RNA
cuuaccccaaaugagcccccg

SEQ ID NO: 22361 - RNA, 21 nt, Artificial Sequence
  Guide RNA
cuuaccccaaaugagccccug

SEQ ID NO: 22362 - RNA, 21 nt, Artificial Sequence
  Guide RNA
gagcccccgauaggauuuaau

SEQ ID NO: 22363 - RNA, 21 nt, Artificial Sequence
  Guide RNA
gagccccugauaggauuuaau

SEQ ID NO: 22364 - RNA, 21 nt, Artificial Sequence
  Guide RNA
gcccccgauaggauuuaauaa

SEQ ID NO: 22365 - RNA, 21 nt, Artificial Sequence
  Guide RNA
gccccugauaggauuuaauaa

SEQ ID NO: 22366 - RNA, 21 nt, Artificial Sequence
  Guide RNA
ggugguuuauuaaauccuauc

SEQ ID NO: 22367 - RNA, 21 nt, Artificial Sequence
  Guide RNA
gguuuauuaaauccuaucagg

SEQ ID NO: 22368 - RNA, 21 nt, Artificial Sequence
  Guide RNA
gguuuauuaaauccuaucggg

SEQ ID NO: 22369 - RNA, 21 nt, Artificial Sequence
  Guide RNA
guggugguuuauuaaauccua

SEQ ID NO: 22370 - RNA, 21 nt, Artificial Sequence
  Guide RNA
gugguuuauuaaauccuaucg

SEQ ID NO: 22371 - RNA, 21 nt, Artificial Sequence
  Guide RNA
guuuauuaaauccuaucaggg

SEQ ID NO: 22372 - RNA, 21 nt, Artificial Sequence
  Guide RNA
guuuauuaaauccuaucgggg

SEQ ID NO: 22373 - RNA, 21 nt, Artificial Sequence
  Guide RNA
uaaauccuaucaggggcucau

SEQ ID NO: 22374 - RNA, 21 nt, Artificial Sequence
  Guide RNA
uaaauccuaucgggggcucau

SEQ ID NO: 22375 - RNA, 21 nt, Artificial Sequence
  Guide RNA
uaccccaaaugagcccccgau

SEQ ID NO: 22376 - RNA, 21 nt, Artificial Sequence
  Guide RNA
uaccccaaaugagccccugau

SEQ ID NO: 22377 - RNA, 21 nt, Artificial Sequence
  Guide RNA
uacuuaccccaaaugagcccc

SEQ ID NO: 22378 - RNA, 21 nt, Artificial Sequence
  Guide RNA
uauacuuaccccaaaugagcc

SEQ ID NO: 22379 - RNA, 21 nt, Artificial Sequence
  Guide RNA
uaucaggggcucauuuggggu

SEQ ID NO: 22380 - RNA, 21 nt, Artificial Sequence
  Guide RNA
uaucgggggcucauuuggggu

SEQ ID NO: 22381 - RNA, 21 nt, Artificial Sequence
  Guide RNA
uauuaaauccuaucaggggcu

SEQ ID NO: 22382 - RNA, 21 nt, Artificial Sequence
  Guide RNA
uauuaaauccuaucgggggcu

SEQ ID NO: 22383 - RNA, 21 nt, Artificial Sequence
  Guide RNA
ucaggggcucauuugggguaa

SEQ ID NO: 22384 - RNA, 21 nt, Artificial Sequence
  Guide RNA
uccuaucaggggcucauuugg

SEQ ID NO: 22385 - RNA, 21 nt, Artificial Sequence
  Guide RNA
uccuaucgggggcucauuugg

SEQ ID NO: 22386 - RNA, 21 nt, Artificial Sequence
  Guide RNA
ucgggggcucauuugggguaa

SEQ ID NO: 22387 - RNA, 21 nt, Artificial Sequence
  Guide RNA
ugagcccccgauaggauuuaa

SEQ ID NO: 22388 - RNA, 21 nt, Artificial Sequence
  Guide RNA
ugagccccugauaggauuuaa

SEQ ID NO: 22389 - RNA, 21 nt, Artificial Sequence
  Guide RNA
ugguuuauuaaauccuaucgg

SEQ ID NO: 22390 - RNA, 21 nt, Artificial Sequence
  Guide RNA
uguggugguuuauuaaauccu

SEQ ID NO: 22391 - RNA, 21 nt, Artificial Sequence
  Guide RNA
uuaaauccuaucaggggcuca

SEQ ID NO: 22392 - RNA, 21 nt, Artificial Sequence
  Guide RNA
uuaaauccuaucgggggcuca

SEQ ID NO: 22393 - RNA, 21 nt, Artificial Sequence
  Guide RNA
uuaccccaaaugagcccccga

SEQ ID NO: 22394 - RNA, 21 nt, Artificial Sequence
  Guide RNA
uuaccccaaaugagccccuga

SEQ ID NO: 22395 - RNA, 21 nt, Artificial Sequence
  Guide RNA
uuauacuuaccccaaaugagc

SEQ ID NO: 22396 - RNA, 21 nt, Artificial Sequence
  Guide RNA
uuauuaaauccuaucaggggc

SEQ ID NO: 22397 - RNA, 21 nt, Artificial Sequence
  Guide RNA
uuauuaaauccuaucgggggc

SEQ ID NO: 22398 - RNA, 21 nt, Artificial Sequence
  Guide RNA
uuuauuaaauccuaucagggg

SEQ ID NO: 22399 - RNA, 21 nt, Artificial Sequence
  Guide RNA
uuuauuaaauccuaucggggg

SEQ ID NO: 22400 - RNA, 22 nt, Artificial Sequence
  Guide RNA
aaauccuaucaggggcucauuu

SEQ ID NO: 22401 - RNA, 22 nt, Artificial Sequence
  Guide RNA
aaauccuaucgggggcucauuu

SEQ ID NO: 22402 - RNA, 22 nt, Artificial Sequence
  Guide RNA
aaaugagcccccgauaggauuu

SEQ ID NO: 22403 - RNA, 22 nt, Artificial Sequence
  Guide RNA
aaaugagccccugauaggauuu

SEQ ID NO: 22404 - RNA, 22 nt, Artificial Sequence
  Guide RNA
aauccuaucaggggcucauuug

SEQ ID NO: 22405 - RNA, 22 nt, Artificial Sequence
  Guide RNA
aauccuaucgggggcucauuug

SEQ ID NO: 22406 - RNA, 22 nt, Artificial Sequence
  Guide RNA
aaugagcccccgauaggauuua

SEQ ID NO: 22407 - RNA, 22 nt, Artificial Sequence
  Guide RNA
aaugagccccugauaggauuua

SEQ ID NO: 22408 - RNA, 22 nt, Artificial Sequence
  Guide RNA
accccaaaugagcccccgauag

SEQ ID NO: 22409 - RNA, 22 nt, Artificial Sequence
  Guide RNA
accccaaaugagccccugauag

SEQ ID NO: 22410 - RNA, 22 nt, Artificial Sequence
  Guide RNA
acuuaccccaaaugagcccccg

SEQ ID NO: 22411 - RNA, 22 nt, Artificial Sequence
  Guide RNA
acuuaccccaaaugagccccug

SEQ ID NO: 22412 - RNA, 22 nt, Artificial Sequence
  Guide RNA
agcccccgauaggauuuaauaa

SEQ ID NO: 22413 - RNA, 22 nt, Artificial Sequence
  Guide RNA
agccccugauaggauuuaauaa

SEQ ID NO: 22414 - RNA, 22 nt, Artificial Sequence
  Guide RNA
auacuuaccccaaaugagcccc

SEQ ID NO: 22415 - RNA, 22 nt, Artificial Sequence
  Guide RNA
aucaggggcucauuugggguaa

SEQ ID NO: 22416 - RNA, 22 nt, Artificial Sequence
  Guide RNA
auccuaucaggggcucauuugg

SEQ ID NO: 22417 - RNA, 22 nt, Artificial Sequence
  Guide RNA
auccuaucgggggcucauuugg

SEQ ID NO: 22418 - RNA, 22 nt, Artificial Sequence
  Guide RNA
aucgggggcucauuugggguaa

SEQ ID NO: 22419 - RNA, 22 nt, Artificial Sequence
  Guide RNA
augagcccccgauaggauuuaa

SEQ ID NO: 22420 - RNA, 22 nt, Artificial Sequence
  Guide RNA
augagccccugauaggauuuaa

SEQ ID NO: 22421 - RNA, 22 nt, Artificial Sequence
  Guide RNA
auuaaauccuaucaggggcuca

SEQ ID NO: 22422 - RNA, 22 nt, Artificial Sequence
  Guide RNA
auuaaauccuaucgggggcuca

SEQ ID NO: 22423 - RNA, 22 nt, Artificial Sequence
  Guide RNA
caaaugagcccccgauaggauu

SEQ ID NO: 22424 - RNA, 22 nt, Artificial Sequence
  Guide RNA
caaaugagccccugauaggauu

SEQ ID NO: 22425 - RNA, 22 nt, Artificial Sequence
  Guide RNA
caggggcucauuugggguaagu

SEQ ID NO: 22426 - RNA, 22 nt, Artificial Sequence
  Guide RNA
ccaaaugagcccccgauaggau

SEQ ID NO: 22427 - RNA, 22 nt, Artificial Sequence
  Guide RNA
ccaaaugagccccugauaggau

SEQ ID NO: 22428 - RNA, 22 nt, Artificial Sequence
  Guide RNA
cccaaaugagcccccgauagga

SEQ ID NO: 22429 - RNA, 22 nt, Artificial Sequence
  Guide RNA
cccaaaugagccccugauagga

SEQ ID NO: 22430 - RNA, 22 nt, Artificial Sequence
  Guide RNA
ccccaaaugagcccccgauagg

SEQ ID NO: 22431 - RNA, 22 nt, Artificial Sequence
  Guide RNA
ccccaaaugagccccugauagg

SEQ ID NO: 22432 - RNA, 22 nt, Artificial Sequence
  Guide RNA
cccccgauaggauuuaauaaac

SEQ ID NO: 22433 - RNA, 22 nt, Artificial Sequence
  Guide RNA
ccccgauaggauuuaauaaacc

SEQ ID NO: 22434 - RNA, 22 nt, Artificial Sequence
  Guide RNA
ccccugauaggauuuaauaaac

SEQ ID NO: 22435 - RNA, 22 nt, Artificial Sequence
  Guide RNA
cccgauaggauuuaauaaacca

SEQ ID NO: 22436 - RNA, 22 nt, Artificial Sequence
  Guide RNA
cccugauaggauuuaauaaacc

SEQ ID NO: 22437 - RNA, 22 nt, Artificial Sequence
  Guide RNA
ccgauaggauuuaauaaaccac

SEQ ID NO: 22438 - RNA, 22 nt, Artificial Sequence
  Guide RNA
ccuaucaggggcucauuugggg

SEQ ID NO: 22439 - RNA, 22 nt, Artificial Sequence
  Guide RNA
ccuaucgggggcucauuugggg

SEQ ID NO: 22440 - RNA, 22 nt, Artificial Sequence
  Guide RNA
ccugauaggauuuaauaaacca

SEQ ID NO: 22441 - RNA, 22 nt, Artificial Sequence
  Guide RNA
cgggggcucauuugggguaagu

SEQ ID NO: 22442 - RNA, 22 nt, Artificial Sequence
  Guide RNA
cuaucaggggcucauuuggggu

SEQ ID NO: 22443 - RNA, 22 nt, Artificial Sequence
  Guide RNA
cuaucgggggcucauuuggggu

SEQ ID NO: 22444 - RNA, 22 nt, Artificial Sequence
  Guide RNA
cugauaggauuuaauaaaccac

SEQ ID NO: 22445 - RNA, 22 nt, Artificial Sequence
  Guide RNA
cuuaccccaaaugagcccccga

SEQ ID NO: 22446 - RNA, 22 nt, Artificial Sequence
  Guide RNA
cuuaccccaaaugagccccuga

SEQ ID NO: 22447 - RNA, 22 nt, Artificial Sequence
  Guide RNA
cuuauacuuaccccaaaugagc

SEQ ID NO: 22448 - RNA, 22 nt, Artificial Sequence
  Guide RNA
gagcccccgauaggauuuaaua

SEQ ID NO: 22449 - RNA, 22 nt, Artificial Sequence
  Guide RNA
gagccccugauaggauuuaaua

SEQ ID NO: 22450 - RNA, 22 nt, Artificial Sequence
  Guide RNA
gcccccgauaggauuuaauaaa

SEQ ID NO: 22451 - RNA, 22 nt, Artificial Sequence
  Guide RNA
gccccugauaggauuuaauaaa

SEQ ID NO: 22452 - RNA, 22 nt, Artificial Sequence
  Guide RNA
ggugguuuauuaaauccuauca

SEQ ID NO: 22453 - RNA, 22 nt, Artificial Sequence
  Guide RNA
ggugguuuauuaaauccuaucg

SEQ ID NO: 22454 - RNA, 22 nt, Artificial Sequence
  Guide RNA
gguuuauuaaauccuaucaggg

SEQ ID NO: 22455 - RNA, 22 nt, Artificial Sequence
  Guide RNA
gguuuauuaaauccuaucgggg

SEQ ID NO: 22456 - RNA, 22 nt, Artificial Sequence
  Guide RNA
guggugguuuauuaaauccuau

SEQ ID NO: 22457 - RNA, 22 nt, Artificial Sequence
  Guide RNA
gugguuuauuaaauccuaucag

SEQ ID NO: 22458 - RNA, 22 nt, Artificial Sequence
  Guide RNA
gugguuuauuaaauccuaucgg

SEQ ID NO: 22459 - RNA, 22 nt, Artificial Sequence
  Guide RNA
guuuauuaaauccuaucagggg

SEQ ID NO: 22460 - RNA, 22 nt, Artificial Sequence
  Guide RNA
guuuauuaaauccuaucggggg

SEQ ID NO: 22461 - RNA, 22 nt, Artificial Sequence
  Guide RNA
uaaauccuaucaggggcucauu

SEQ ID NO: 22462 - RNA, 22 nt, Artificial Sequence
  Guide RNA
uaaauccuaucgggggcucauu

SEQ ID NO: 22463 - RNA, 22 nt, Artificial Sequence
  Guide RNA
uaccccaaaugagcccccgaua

SEQ ID NO: 22464 - RNA, 22 nt, Artificial Sequence
  Guide RNA
uaccccaaaugagccccugaua

SEQ ID NO: 22465 - RNA, 22 nt, Artificial Sequence
  Guide RNA
uacuuaccccaaaugagccccc

SEQ ID NO: 22466 - RNA, 22 nt, Artificial Sequence
  Guide RNA
uacuuaccccaaaugagccccu

SEQ ID NO: 22467 - RNA, 22 nt, Artificial Sequence
  Guide RNA
uauacuuaccccaaaugagccc

SEQ ID NO: 22468 - RNA, 22 nt, Artificial Sequence
  Guide RNA
uaucaggggcucauuuggggua

SEQ ID NO: 22469 - RNA, 22 nt, Artificial Sequence
  Guide RNA
uaucgggggcucauuuggggua

SEQ ID NO: 22470 - RNA, 22 nt, Artificial Sequence
  Guide RNA
uauuaaauccuaucaggggcuc

SEQ ID NO: 22471 - RNA, 22 nt, Artificial Sequence
  Guide RNA
uauuaaauccuaucgggggcuc

SEQ ID NO: 22472 - RNA, 22 nt, Artificial Sequence
  Guide RNA
ucaggggcucauuugggguaag

SEQ ID NO: 22473 - RNA, 22 nt, Artificial Sequence
  Guide RNA
uccuaucaggggcucauuuggg

SEQ ID NO: 22474 - RNA, 22 nt, Artificial Sequence
  Guide RNA
uccuaucgggggcucauuuggg

SEQ ID NO: 22475 - RNA, 22 nt, Artificial Sequence
  Guide RNA
ucgggggcucauuugggguaag

SEQ ID NO: 22476 - RNA, 22 nt, Artificial Sequence
  Guide RNA
ugagcccccgauaggauuuaau

SEQ ID NO: 22477 - RNA, 22 nt, Artificial Sequence
  Guide RNA
ugagccccugauaggauuuaau

SEQ ID NO: 22478 - RNA, 22 nt, Artificial Sequence
  Guide RNA
uggugguuuauuaaauccuauc

SEQ ID NO: 22479 - RNA, 22 nt, Artificial Sequence
  Guide RNA
ugguuuauuaaauccuaucagg

SEQ ID NO: 22480 - RNA, 22 nt, Artificial Sequence
  Guide RNA
ugguuuauuaaauccuaucggg

SEQ ID NO: 22481 - RNA, 22 nt, Artificial Sequence
  Guide RNA
uguggugguuuauuaaauccua

SEQ ID NO: 22482 - RNA, 22 nt, Artificial Sequence
  Guide RNA
uuaaauccuaucaggggcucau

SEQ ID NO: 22483 - RNA, 22 nt, Artificial Sequence
  Guide RNA
uuaaauccuaucgggggcucau

SEQ ID NO: 22484 - RNA, 22 nt, Artificial Sequence
  Guide RNA
uuaccccaaaugagcccccgau

SEQ ID NO: 22485 - RNA, 22 nt, Artificial Sequence
  Guide RNA
uuaccccaaaugagccccugau

SEQ ID NO: 22486 - RNA, 22 nt, Artificial Sequence
  Guide RNA
uuauacuuaccccaaaugagcc

SEQ ID NO: 22487 - RNA, 22 nt, Artificial Sequence
  Guide RNA
uuauuaaauccuaucaggggcu

SEQ ID NO: 22488 - RNA, 22 nt, Artificial Sequence
  Guide RNA
uuauuaaauccuaucgggggcu

SEQ ID NO: 22489 - RNA, 22 nt, Artificial Sequence
  Guide RNA
uuguggugguuuauuaaauccu

SEQ ID NO: 22490 - RNA, 22 nt, Artificial Sequence
  Guide RNA
uuuauuaaauccuaucaggggc

SEQ ID NO: 22491 - RNA, 22 nt, Artificial Sequence
  Guide RNA
uuuauuaaauccuaucgggggc

SEQ ID NO: 22492 - RNA, 20 nt, Artificial Sequence
  Guide RNA
cugugugggggauuuaacuc

SEQ ID NO: 22493 - RNA, 20 nt, Artificial Sequence
  Guide RNA
gcugugugggggauuuaacu

SEQ ID NO: 22494 - RNA, 20 nt, Artificial Sequence
  Guide RNA
gggauuuaacucuagaaaaa

SEQ ID NO: 22495 - RNA, 20 nt, Artificial Sequence
  Guide RNA
ggggauuuaacucuaaaaaa

SEQ ID NO: 22496 - RNA, 20 nt, Artificial Sequence
  Guide RNA
ggggauuuaacucuagaaaa

SEQ ID NO: 22497 - RNA, 20 nt, Artificial Sequence
  Guide RNA
gggggauuuaacucuaaaaa

SEQ ID NO: 22498 - RNA, 20 nt, Artificial Sequence
  Guide RNA
gggggauuuaacucuagaaa

SEQ ID NO: 22499 - RNA, 20 nt, Artificial Sequence
  Guide RNA
gugggggauuuaacucuaaa

SEQ ID NO: 22500 - RNA, 20 nt, Artificial Sequence
  Guide RNA
gugggggauuuaacucuaga

SEQ ID NO: 22501 - RNA, 20 nt, Artificial Sequence
  Guide RNA
gugugggggauuuaacucua

SEQ ID NO: 22502 - RNA, 20 nt, Artificial Sequence
  Guide RNA
ucuagaguuaaaucccccac

SEQ ID NO: 22503 - RNA, 20 nt, Artificial Sequence
  Guide RNA
ugggggauuuaacucuaaaa

SEQ ID NO: 22504 - RNA, 20 nt, Artificial Sequence
  Guide RNA
ugggggauuuaacucuagaa

SEQ ID NO: 22505 - RNA, 20 nt, Artificial Sequence
  Guide RNA
ugugggggauuuaacucuaa

SEQ ID NO: 22506 - RNA, 20 nt, Artificial Sequence
  Guide RNA
ugugggggauuuaacucuag

SEQ ID NO: 22507 - RNA, 20 nt, Artificial Sequence
  Guide RNA
ugugugggggauuuaacucu

SEQ ID NO: 22508 - RNA, 20 nt, Artificial Sequence
  Guide RNA
uucuagaguuaaauccccca

SEQ ID NO: 22509 - RNA, 20 nt, Artificial Sequence
  Guide RNA
uuuagaguuaaaucccccac

SEQ ID NO: 22510 - RNA, 20 nt, Artificial Sequence
  Guide RNA
uuucuagaguuaaauccccc

SEQ ID NO: 22511 - RNA, 20 nt, Artificial Sequence
  Guide RNA
uuuuagaguuaaauccccca

SEQ ID NO: 22512 - RNA, 20 nt, Artificial Sequence
  Guide RNA
uuuucuagaguuaaaucccc

SEQ ID NO: 22513 - RNA, 20 nt, Artificial Sequence
  Guide RNA
uuuuuagaguuaaauccccc

SEQ ID NO: 22514 - RNA, 20 nt, Artificial Sequence
  Guide RNA
uuuuucuagaguuaaauccc

SEQ ID NO: 22515 - RNA, 20 nt, Artificial Sequence
  Guide RNA
uuuuuuagaguuaaaucccc

SEQ ID NO: 22516 - RNA, 21 nt, Artificial Sequence
  Guide RNA
cugugugggggauuuaacucu

SEQ ID NO: 22517 - RNA, 21 nt, Artificial Sequence
  Guide RNA
gcugugugggggauuuaacuc

SEQ ID NO: 22518 - RNA, 21 nt, Artificial Sequence
  Guide RNA
ggggauuuaacucuagaaaaa

SEQ ID NO: 22519 - RNA, 21 nt, Artificial Sequence
  Guide RNA
gggggauuuaacucuaaaaaa

SEQ ID NO: 22520 - RNA, 21 nt, Artificial Sequence
  Guide RNA
gggggauuuaacucuagaaaa

SEQ ID NO: 22521 - RNA, 21 nt, Artificial Sequence
  Guide RNA
gugggggauuuaacucuaaaa

SEQ ID NO: 22522 - RNA, 21 nt, Artificial Sequence
  Guide RNA
gugggggauuuaacucuagaa

SEQ ID NO: 22523 - RNA, 21 nt, Artificial Sequence
  Guide RNA
gugugggggauuuaacucuaa

SEQ ID NO: 22524 - RNA, 21 nt, Artificial Sequence
  Guide RNA
gugugggggauuuaacucuag

SEQ ID NO: 22525 - RNA, 21 nt, Artificial Sequence
  Guide RNA
ucuagaguuaaaucccccaca

SEQ ID NO: 22526 - RNA, 21 nt, Artificial Sequence
  Guide RNA
ugcugugugggggauuuaacu

SEQ ID NO: 22527 - RNA, 21 nt, Artificial Sequence
  Guide RNA
ugggggauuuaacucuaaaaa

SEQ ID NO: 22528 - RNA, 21 nt, Artificial Sequence
  Guide RNA
ugggggauuuaacucuagaaa

SEQ ID NO: 22529 - RNA, 21 nt, Artificial Sequence
  Guide RNA
ugugggggauuuaacucuaaa

SEQ ID NO: 22530 - RNA, 21 nt, Artificial Sequence
  Guide RNA
ugugggggauuuaacucuaga

SEQ ID NO: 22531 - RNA, 21 nt, Artificial Sequence
  Guide RNA
ugugugggggauuuaacucua

SEQ ID NO: 22532 - RNA, 21 nt, Artificial Sequence
  Guide RNA
uucuagaguuaaaucccccac

SEQ ID NO: 22533 - RNA, 21 nt, Artificial Sequence
  Guide RNA
uuuagaguuaaaucccccaca

SEQ ID NO: 22534 - RNA, 21 nt, Artificial Sequence
  Guide RNA
uuucuagaguuaaauccccca

SEQ ID NO: 22535 - RNA, 21 nt, Artificial Sequence
  Guide RNA
uuuuagaguuaaaucccccac

SEQ ID NO: 22536 - RNA, 21 nt, Artificial Sequence
  Guide RNA
uuuucuagaguuaaauccccc

SEQ ID NO: 22537 - RNA, 21 nt, Artificial Sequence
  Guide RNA
uuuuuagaguuaaauccccca

SEQ ID NO: 22538 - RNA, 21 nt, Artificial Sequence
  Guide RNA
uuuuucuagaguuaaaucccc

SEQ ID NO: 22539 - RNA, 21 nt, Artificial Sequence
  Guide RNA
uuuuuuagaguuaaauccccc

SEQ ID NO: 22540 - RNA, 22 nt, Artificial Sequence
  Guide RNA
auuuuucuagaguuaaaucccc

SEQ ID NO: 22541 - RNA, 22 nt, Artificial Sequence
  Guide RNA
cugugugggggauuuaacucua

SEQ ID NO: 22542 - RNA, 22 nt, Artificial Sequence
  Guide RNA
gcugugugggggauuuaacucu

SEQ ID NO: 22543 - RNA, 22 nt, Artificial Sequence
  Guide RNA
ggggauuuaacucuagaaaaau

SEQ ID NO: 22544 - RNA, 22 nt, Artificial Sequence
  Guide RNA
gggggauuuaacucuagaaaaa

SEQ ID NO: 22545 - RNA, 22 nt, Artificial Sequence
  Guide RNA
gugggggauuuaacucuaaaaa

SEQ ID NO: 22546 - RNA, 22 nt, Artificial Sequence
  Guide RNA
gugggggauuuaacucuagaaa

SEQ ID NO: 22547 - RNA, 22 nt, Artificial Sequence
  Guide RNA
gugugggggauuuaacucuaaa

SEQ ID NO: 22548 - RNA, 22 nt, Artificial Sequence
  Guide RNA
gugugggggauuuaacucuaga

SEQ ID NO: 22549 - RNA, 22 nt, Artificial Sequence
  Guide RNA
ucuagaguuaaaucccccacac

SEQ ID NO: 22550 - RNA, 22 nt, Artificial Sequence
  Guide RNA
ugcugugugggggauuuaacuc

SEQ ID NO: 22551 - RNA, 22 nt, Artificial Sequence
  Guide RNA
ugggggauuuaacucuaaaaaa

SEQ ID NO: 22552 - RNA, 22 nt, Artificial Sequence
  Guide RNA
ugggggauuuaacucuagaaaa

SEQ ID NO: 22553 - RNA, 22 nt, Artificial Sequence
  Guide RNA
ugugggggauuuaacucuaaaa

SEQ ID NO: 22554 - RNA, 22 nt, Artificial Sequence
  Guide RNA
ugugggggauuuaacucuagaa

SEQ ID NO: 22555 - RNA, 22 nt, Artificial Sequence
  Guide RNA
ugugugggggauuuaacucuaa

SEQ ID NO: 22556 - RNA, 22 nt, Artificial Sequence
  Guide RNA
ugugugggggauuuaacucuag

SEQ ID NO: 22557 - RNA, 22 nt, Artificial Sequence
  Guide RNA
uucuagaguuaaaucccccaca

SEQ ID NO: 22558 - RNA, 22 nt, Artificial Sequence
  Guide RNA
uugcugugugggggauuuaacu

SEQ ID NO: 22559 - RNA, 22 nt, Artificial Sequence
  Guide RNA
uuuagaguuaaaucccccacac

SEQ ID NO: 22560 - RNA, 22 nt, Artificial Sequence
  Guide RNA
uuucuagaguuaaaucccccac

SEQ ID NO: 22561 - RNA, 22 nt, Artificial Sequence
  Guide RNA
uuuuagaguuaaaucccccaca

SEQ ID NO: 22562 - RNA, 22 nt, Artificial Sequence
  Guide RNA
uuuucuagaguuaaauccccca

SEQ ID NO: 22563 - RNA, 22 nt, Artificial Sequence
  Guide RNA
uuuuuagaguuaaaucccccac

SEQ ID NO: 22564 - RNA, 22 nt, Artificial Sequence
  Guide RNA
uuuuucuagaguuaaauccccc

SEQ ID NO: 22565 - RNA, 22 nt, Artificial Sequence
  Guide RNA
uuuuuuagaguuaaauccccca

SEQ ID NO: 22566 - RNA, 20 nt, Artificial Sequence
  Guide RNA
aaagcuaguuauccucauau

SEQ ID NO: 22567 - RNA, 20 nt, Artificial Sequence
  Guide RNA
aagcuaguuauccucauaua

SEQ ID NO: 22568 - RNA, 20 nt, Artificial Sequence
  Guide RNA
acugguauauaugaggauaa

SEQ ID NO: 22569 - RNA, 20 nt, Artificial Sequence
  Guide RNA
agcuaguuauccucauauau

SEQ ID NO: 22570 - RNA, 20 nt, Artificial Sequence
  Guide RNA
aggauaacuagcuuuauagg

SEQ ID NO: 22571 - RNA, 20 nt, Artificial Sequence
  Guide RNA
aguuauccucauauauacca

SEQ ID NO: 22572 - RNA, 20 nt, Artificial Sequence
  Guide RNA
auaaagcuaguuauccucau

SEQ ID NO: 22573 - RNA, 20 nt, Artificial Sequence
  Guide RNA
auauaugaggauaacuagcu

SEQ ID NO: 22574 - RNA, 20 nt, Artificial Sequence
  Guide RNA
auaugaggauaacuagcuuu

SEQ ID NO: 22575 - RNA, 20 nt, Artificial Sequence
  Guide RNA
aucaucauauauaccaguag

SEQ ID NO: 22576 - RNA, 20 nt, Artificial Sequence
  Guide RNA
auccucauauauaccaguag

SEQ ID NO: 22577 - RNA, 20 nt, Artificial Sequence
  Guide RNA
augaggauaacuagcuuuau

SEQ ID NO: 22578 - RNA, 20 nt, Artificial Sequence
  Guide RNA
augauaacuagcuuuauagg

SEQ ID NO: 22579 - RNA, 20 nt, Artificial Sequence
  Guide RNA
caucauauauaccaguagaa

SEQ ID NO: 22580 - RNA, 20 nt, Artificial Sequence
  Guide RNA
ccguuucuacugguauauau

SEQ ID NO: 22581 - RNA, 20 nt, Artificial Sequence
  Guide RNA
ccuauaaagcuaguuaucau

SEQ ID NO: 22582 - RNA, 20 nt, Artificial Sequence
  Guide RNA
ccuauaaagcuaguuauccu

SEQ ID NO: 22583 - RNA, 20 nt, Artificial Sequence
  Guide RNA
ccucauauauaccaguagaa

SEQ ID NO: 22584 - RNA, 20 nt, Artificial Sequence
  Guide RNA
cguuucuacugguauauaug

SEQ ID NO: 22585 - RNA, 20 nt, Artificial Sequence
  Guide RNA
cuacugguauauaugaggau

SEQ ID NO: 22586 - RNA, 20 nt, Artificial Sequence
  Guide RNA
cuacugguauauaugaugau

SEQ ID NO: 22587 - RNA, 20 nt, Artificial Sequence
  Guide RNA
cuaguuauccucauauauac

SEQ ID NO: 22588 - RNA, 20 nt, Artificial Sequence
  Guide RNA
cuauaaagcuaguuaucauc

SEQ ID NO: 22589 - RNA, 20 nt, Artificial Sequence
  Guide RNA
cuauaaagcuaguuauccuc

SEQ ID NO: 22590 - RNA, 20 nt, Artificial Sequence
  Guide RNA
cuggccuauaaagcuaguua

SEQ ID NO: 22591 - RNA, 20 nt, Artificial Sequence
  Guide RNA
cugguauauaugaggauaac

SEQ ID NO: 22592 - RNA, 20 nt, Artificial Sequence
  Guide RNA
cugguauauaugaugauaac

SEQ ID NO: 22593 - RNA, 20 nt, Artificial Sequence
  Guide RNA
gaggauaacuagcuuuauag

SEQ ID NO: 22594 - RNA, 20 nt, Artificial Sequence
  Guide RNA
gaugauaacuagcuuuauag

SEQ ID NO: 22595 - RNA, 20 nt, Artificial Sequence
  Guide RNA
gccuauaaagcuaguuauca

SEQ ID NO: 22596 - RNA, 20 nt, Artificial Sequence
  Guide RNA
gccuauaaagcuaguuaucc

SEQ ID NO: 22597 - RNA, 20 nt, Artificial Sequence
  Guide RNA
gcuaguuauccucauauaua

SEQ ID NO: 22598 - RNA, 20 nt, Artificial Sequence
  Guide RNA
ggccuauaaagcuaguuauc

SEQ ID NO: 22599 - RNA, 20 nt, Artificial Sequence
  Guide RNA
gguauauaugaggauaacua

SEQ ID NO: 22600 - RNA, 20 nt, Artificial Sequence
  Guide RNA
guauauaugaggauaacuag

SEQ ID NO: 22601 - RNA, 20 nt, Artificial Sequence
  Guide RNA
guuaucaucauauauaccag

SEQ ID NO: 22602 - RNA, 20 nt, Artificial Sequence
  Guide RNA
guuauccucauauauaccag

SEQ ID NO: 22603 - RNA, 20 nt, Artificial Sequence
  Guide RNA
guuucuacugguauauauga

SEQ ID NO: 22604 - RNA, 20 nt, Artificial Sequence
  Guide RNA
uaaagcuaguuauccucaua

SEQ ID NO: 22605 - RNA, 20 nt, Artificial Sequence
  Guide RNA
uacugguauauaugaggaua

SEQ ID NO: 22606 - RNA, 20 nt, Artificial Sequence
  Guide RNA
uaguuauccucauauauacc

SEQ ID NO: 22607 - RNA, 20 nt, Artificial Sequence
  Guide RNA
uauaaagcuaguuauccuca

SEQ ID NO: 22608 - RNA, 20 nt, Artificial Sequence
  Guide RNA
uauauaugaggauaacuagc

SEQ ID NO: 22609 - RNA, 20 nt, Artificial Sequence
  Guide RNA
uauaugaggauaacuagcuu

SEQ ID NO: 22610 - RNA, 20 nt, Artificial Sequence
  Guide RNA
uauccucauauauaccagua

SEQ ID NO: 22611 - RNA, 20 nt, Artificial Sequence
  Guide RNA
uaugaggauaacuagcuuua

SEQ ID NO: 22612 - RNA, 20 nt, Artificial Sequence
  Guide RNA
ucaucauauauaccaguaga

SEQ ID NO: 22613 - RNA, 20 nt, Artificial Sequence
  Guide RNA
uccguuucuacugguauaua

SEQ ID NO: 22614 - RNA, 20 nt, Artificial Sequence
  Guide RNA
uccucauauauaccaguaga

SEQ ID NO: 22615 - RNA, 20 nt, Artificial Sequence
  Guide RNA
ucuacugguauauaugagga

SEQ ID NO: 22616 - RNA, 20 nt, Artificial Sequence
  Guide RNA
ucuacugguauauaugauga

SEQ ID NO: 22617 - RNA, 20 nt, Artificial Sequence
  Guide RNA
ucuggccuauaaagcuaguu

SEQ ID NO: 22618 - RNA, 20 nt, Artificial Sequence
  Guide RNA
ugaggauaacuagcuuuaua

SEQ ID NO: 22619 - RNA, 20 nt, Artificial Sequence
  Guide RNA
uggccuauaaagcuaguuau

SEQ ID NO: 22620 - RNA, 20 nt, Artificial Sequence
  Guide RNA
ugguauauaugaggauaacu

SEQ ID NO: 22621 - RNA, 20 nt, Artificial Sequence
  Guide RNA
uuauccucauauauaccagu

SEQ ID NO: 22622 - RNA, 20 nt, Artificial Sequence
  Guide RNA
uucuacugguauauaugagg

SEQ ID NO: 22623 - RNA, 20 nt, Artificial Sequence
  Guide RNA
uucuacugguauauaugaug

SEQ ID NO: 22624 - RNA, 20 nt, Artificial Sequence
  Guide RNA
uuucuacugguauauaugag

SEQ ID NO: 22625 - RNA, 21 nt, Artificial Sequence
  Guide RNA
acugguauauaugaggauaac

SEQ ID NO: 22626 - RNA, 21 nt, Artificial Sequence
  Guide RNA
aggauaacuagcuuuauaggc

SEQ ID NO: 22627 - RNA, 21 nt, Artificial Sequence
  Guide RNA
aguuauccucauauauaccag

SEQ ID NO: 22628 - RNA, 21 nt, Artificial Sequence
  Guide RNA
auccucauauauaccaguaga

SEQ ID NO: 22629 - RNA, 21 nt, Artificial Sequence
  Guide RNA
augauaacuagcuuuauaggc

SEQ ID NO: 22630 - RNA, 21 nt, Artificial Sequence
  Guide RNA
ccguuucuacugguauauaug

SEQ ID NO: 22631 - RNA, 21 nt, Artificial Sequence
  Guide RNA
ccuauaaagcuaguuaucauc

SEQ ID NO: 22632 - RNA, 21 nt, Artificial Sequence
  Guide RNA
ccuauaaagcuaguuauccuc

SEQ ID NO: 22633 - RNA, 21 nt, Artificial Sequence
  Guide RNA
ccucauauauaccaguagaaa

SEQ ID NO: 22634 - RNA, 21 nt, Artificial Sequence
  Guide RNA
cguuucuacugguauauauga

SEQ ID NO: 22635 - RNA, 21 nt, Artificial Sequence
  Guide RNA
cuacugguauauaugaggaua

SEQ ID NO: 22636 - RNA, 21 nt, Artificial Sequence
  Guide RNA
cuaguuauccucauauauacc

SEQ ID NO: 22637 - RNA, 21 nt, Artificial Sequence
  Guide RNA
cuauaaagcuaguuauccuca

SEQ ID NO: 22638 - RNA, 21 nt, Artificial Sequence
  Guide RNA
cuggccuauaaagcuaguuau

SEQ ID NO: 22639 - RNA, 21 nt, Artificial Sequence
  Guide RNA
cugguauauaugaggauaacu

SEQ ID NO: 22640 - RNA, 21 nt, Artificial Sequence
  Guide RNA
gaggauaacuagcuuuauagg

SEQ ID NO: 22641 - RNA, 21 nt, Artificial Sequence
  Guide RNA
gaugauaacuagcuuuauagg

SEQ ID NO: 22642 - RNA, 21 nt, Artificial Sequence
  Guide RNA
gccuauaaagcuaguuaucau

SEQ ID NO: 22643 - RNA, 21 nt, Artificial Sequence
  Guide RNA
gccuauaaagcuaguuauccu

SEQ ID NO: 22644 - RNA, 21 nt, Artificial Sequence
  Guide RNA
gcuaguuauccucauauauac

SEQ ID NO: 22645 - RNA, 21 nt, Artificial Sequence
  Guide RNA
ggccuauaaagcuaguuauca

SEQ ID NO: 22646 - RNA, 21 nt, Artificial Sequence
  Guide RNA
ggccuauaaagcuaguuaucc

SEQ ID NO: 22647 - RNA, 21 nt, Artificial Sequence
  Guide RNA
gguauauaugaggauaacuag

SEQ ID NO: 22648 - RNA, 21 nt, Artificial Sequence
  Guide RNA
guauauaugaggauaacuagc

SEQ ID NO: 22649 - RNA, 21 nt, Artificial Sequence
  Guide RNA
guccguuucuacugguauaua

SEQ ID NO: 22650 - RNA, 21 nt, Artificial Sequence
  Guide RNA
gucuggccuauaaagcuaguu

SEQ ID NO: 22651 - RNA, 21 nt, Artificial Sequence
  Guide RNA
guuauccucauauauaccagu

SEQ ID NO: 22652 - RNA, 21 nt, Artificial Sequence
  Guide RNA
guuucuacugguauauaugag

SEQ ID NO: 22653 - RNA, 21 nt, Artificial Sequence
  Guide RNA
uauccucauauauaccaguag

SEQ ID NO: 22654 - RNA, 21 nt, Artificial Sequence
  Guide RNA
uccguuucuacugguauauau

SEQ ID NO: 22655 - RNA, 21 nt, Artificial Sequence
  Guide RNA
uccucauauauaccaguagaa

SEQ ID NO: 22656 - RNA, 21 nt, Artificial Sequence
  Guide RNA
ucuacugguauauaugaggau

SEQ ID NO: 22657 - RNA, 21 nt, Artificial Sequence
  Guide RNA
ucuggccuauaaagcuaguua

SEQ ID NO: 22658 - RNA, 21 nt, Artificial Sequence
  Guide RNA
ugaggauaacuagcuuuauag

SEQ ID NO: 22659 - RNA, 21 nt, Artificial Sequence
  Guide RNA
uggccuauaaagcuaguuauc

SEQ ID NO: 22660 - RNA, 21 nt, Artificial Sequence
  Guide RNA
uucuacugguauauaugagga

SEQ ID NO: 22661 - RNA, 21 nt, Artificial Sequence
  Guide RNA
uuucuacugguauauaugagg

SEQ ID NO: 22662 - RNA, 22 nt, Artificial Sequence
  Guide RNA
acugguauauaugaggauaacu

SEQ ID NO: 22663 - RNA, 22 nt, Artificial Sequence
  Guide RNA
agcuaguuauccucauauauac

SEQ ID NO: 22664 - RNA, 22 nt, Artificial Sequence
  Guide RNA
aggauaacuagcuuuauaggcc

SEQ ID NO: 22665 - RNA, 22 nt, Artificial Sequence
  Guide RNA
aguuauccucauauauaccagu

SEQ ID NO: 22666 - RNA, 22 nt, Artificial Sequence
  Guide RNA
auccucauauauaccaguagaa

SEQ ID NO: 22667 - RNA, 22 nt, Artificial Sequence
  Guide RNA
augaggauaacuagcuuuauag

SEQ ID NO: 22668 - RNA, 22 nt, Artificial Sequence
  Guide RNA
augauaacuagcuuuauaggcc

SEQ ID NO: 22669 - RNA, 22 nt, Artificial Sequence
  Guide RNA
caucauauauaccaguagaaac

SEQ ID NO: 22670 - RNA, 22 nt, Artificial Sequence
  Guide RNA
ccguuucuacugguauauauga

SEQ ID NO: 22671 - RNA, 22 nt, Artificial Sequence
  Guide RNA
ccuauaaagcuaguuaucauca

SEQ ID NO: 22672 - RNA, 22 nt, Artificial Sequence
  Guide RNA
ccuauaaagcuaguuauccuca

SEQ ID NO: 22673 - RNA, 22 nt, Artificial Sequence
  Guide RNA
ccucauauauaccaguagaaac

SEQ ID NO: 22674 - RNA, 22 nt, Artificial Sequence
  Guide RNA
cguuucuacugguauauaugag

SEQ ID NO: 22675 - RNA, 22 nt, Artificial Sequence
  Guide RNA
cguuucuacugguauauaugau

SEQ ID NO: 22676 - RNA, 22 nt, Artificial Sequence
  Guide RNA
cuacugguauauaugaggauaa

SEQ ID NO: 22677 - RNA, 22 nt, Artificial Sequence
  Guide RNA
cuaguuauccucauauauacca

SEQ ID NO: 22678 - RNA, 22 nt, Artificial Sequence
  Guide RNA
cuauaaagcuaguuauccucau

SEQ ID NO: 22679 - RNA, 22 nt, Artificial Sequence
  Guide RNA
cuggccuauaaagcuaguuauc

SEQ ID NO: 22680 - RNA, 22 nt, Artificial Sequence
  Guide RNA
cugguauauaugaggauaacua

SEQ ID NO: 22681 - RNA, 22 nt, Artificial Sequence
  Guide RNA
gaggauaacuagcuuuauaggc

SEQ ID NO: 22682 - RNA, 22 nt, Artificial Sequence
  Guide RNA
gaugauaacuagcuuuauaggc

SEQ ID NO: 22683 - RNA, 22 nt, Artificial Sequence
  Guide RNA
gccuauaaagcuaguuaucauc

SEQ ID NO: 22684 - RNA, 22 nt, Artificial Sequence
  Guide RNA
gccuauaaagcuaguuauccuc

SEQ ID NO: 22685 - RNA, 22 nt, Artificial Sequence
  Guide RNA
gcuaguuaucaucauauauacc

SEQ ID NO: 22686 - RNA, 22 nt, Artificial Sequence
  Guide RNA
gcuaguuauccucauauauacc

SEQ ID NO: 22687 - RNA, 22 nt, Artificial Sequence
  Guide RNA
ggccuauaaagcuaguuaucau

SEQ ID NO: 22688 - RNA, 22 nt, Artificial Sequence
  Guide RNA
ggccuauaaagcuaguuauccu

SEQ ID NO: 22689 - RNA, 22 nt, Artificial Sequence
  Guide RNA
gguauauaugaggauaacuagc

SEQ ID NO: 22690 - RNA, 22 nt, Artificial Sequence
  Guide RNA
gguauauaugaugauaacuagc

SEQ ID NO: 22691 - RNA, 22 nt, Artificial Sequence
  Guide RNA
gguccguuucuacugguauaua

SEQ ID NO: 22692 - RNA, 22 nt, Artificial Sequence
  Guide RNA
guauauaugaggauaacuagcu

SEQ ID NO: 22693 - RNA, 22 nt, Artificial Sequence
  Guide RNA
guccguuucuacugguauauau

SEQ ID NO: 22694 - RNA, 22 nt, Artificial Sequence
  Guide RNA
gucuggccuauaaagcuaguua

SEQ ID NO: 22695 - RNA, 22 nt, Artificial Sequence
  Guide RNA
guuauccucauauauaccagua

SEQ ID NO: 22696 - RNA, 22 nt, Artificial Sequence
  Guide RNA
guuucuacugguauauaugagg

SEQ ID NO: 22697 - RNA, 22 nt, Artificial Sequence
  Guide RNA
guuucuacugguauauaugaug

SEQ ID NO: 22698 - RNA, 22 nt, Artificial Sequence
  Guide RNA
uacugguauauaugaggauaac

SEQ ID NO: 22699 - RNA, 22 nt, Artificial Sequence
  Guide RNA
uaguuauccucauauauaccag

SEQ ID NO: 22700 - RNA, 22 nt, Artificial Sequence
  Guide RNA
uauccucauauauaccaguaga

SEQ ID NO: 22701 - RNA, 22 nt, Artificial Sequence
  Guide RNA
uccguuucuacugguauauaug

SEQ ID NO: 22702 - RNA, 22 nt, Artificial Sequence
  Guide RNA
uccucauauauaccaguagaaa

SEQ ID NO: 22703 - RNA, 22 nt, Artificial Sequence
  Guide RNA
ucuacugguauauaugaggaua

SEQ ID NO: 22704 - RNA, 22 nt, Artificial Sequence
  Guide RNA
ucuggccuauaaagcuaguuau

SEQ ID NO: 22705 - RNA, 22 nt, Artificial Sequence
  Guide RNA
ugaggauaacuagcuuuauagg

SEQ ID NO: 22706 - RNA, 22 nt, Artificial Sequence
  Guide RNA
ugaugauaacuagcuuuauagg

SEQ ID NO: 22707 - RNA, 22 nt, Artificial Sequence
  Guide RNA
uggccuauaaagcuaguuauca

SEQ ID NO: 22708 - RNA, 22 nt, Artificial Sequence
  Guide RNA
uggccuauaaagcuaguuaucc

SEQ ID NO: 22709 - RNA, 22 nt, Artificial Sequence
  Guide RNA
ugguauauaugaggauaacuag

SEQ ID NO: 22710 - RNA, 22 nt, Artificial Sequence
  Guide RNA
ugucuggccuauaaagcuaguu

SEQ ID NO: 22711 - RNA, 22 nt, Artificial Sequence
  Guide RNA
uuauccucauauauaccaguag

SEQ ID NO: 22712 - RNA, 22 nt, Artificial Sequence
  Guide RNA
uucuacugguauauaugaggau

SEQ ID NO: 22713 - RNA, 22 nt, Artificial Sequence
  Guide RNA
uuucuacugguauauaugagga

SEQ ID NO: 22714 - RNA, 20 nt, Artificial Sequence
  Guide RNA
aaaguguaagaagguacaau

SEQ ID NO: 22715 - RNA, 20 nt, Artificial Sequence
  Guide RNA
aaaguguaggaagguacaau

SEQ ID NO: 22716 - RNA, 20 nt, Artificial Sequence
  Guide RNA
aacaacaaucaggaaagugu

SEQ ID NO: 22717 - RNA, 20 nt, Artificial Sequence
  Guide RNA
aacaaucaggaaaguguaag

SEQ ID NO: 22718 - RNA, 20 nt, Artificial Sequence
  Guide RNA
aacaaucaggaaaguguagg

SEQ ID NO: 22719 - RNA, 20 nt, Artificial Sequence
  Guide RNA
aagaagguacaaucucuaau

SEQ ID NO: 22720 - RNA, 20 nt, Artificial Sequence
  Guide RNA
aaguguaagaagguacaauc

SEQ ID NO: 22721 - RNA, 20 nt, Artificial Sequence
  Guide RNA
aaguguaggaagguacaauc

SEQ ID NO: 22722 - RNA, 20 nt, Artificial Sequence
  Guide RNA
aaucaggaaaguguaagaag

SEQ ID NO: 22723 - RNA, 20 nt, Artificial Sequence
  Guide RNA
aaucaggaaaguguaggaag

SEQ ID NO: 22724 - RNA, 20 nt, Artificial Sequence
  Guide RNA
aaucauuagagauuguaccu

SEQ ID NO: 22725 - RNA, 20 nt, Artificial Sequence
  Guide RNA
acaacaaucaggaaagugua

SEQ ID NO: 22726 - RNA, 20 nt, Artificial Sequence
  Guide RNA
acaaucaggaaaguguaaga

SEQ ID NO: 22727 - RNA, 20 nt, Artificial Sequence
  Guide RNA
acaaucaggaaaguguagga

SEQ ID NO: 22728 - RNA, 20 nt, Artificial Sequence
  Guide RNA
accuuccuacacuuuccuga

SEQ ID NO: 22729 - RNA, 20 nt, Artificial Sequence
  Guide RNA
accuucuuacacuuuccuga

SEQ ID NO: 22730 - RNA, 20 nt, Artificial Sequence
  Guide RNA
agagauuguaccuuccuaca

SEQ ID NO: 22731 - RNA, 20 nt, Artificial Sequence
  Guide RNA
agagauuguaccuucuuaca

SEQ ID NO: 22732 - RNA, 20 nt, Artificial Sequence
  Guide RNA
agauuguaccuuccuacacu

SEQ ID NO: 22733 - RNA, 20 nt, Artificial Sequence
  Guide RNA
agauuguaccuucuuacacu

SEQ ID NO: 22734 - RNA, 20 nt, Artificial Sequence
  Guide RNA
aggaaaguguaagaagguac

SEQ ID NO: 22735 - RNA, 20 nt, Artificial Sequence
  Guide RNA
aggaaaguguaggaagguac

SEQ ID NO: 22736 - RNA, 20 nt, Artificial Sequence
  Guide RNA
aggaagguacaaucucuaau

SEQ ID NO: 22737 - RNA, 20 nt, Artificial Sequence
  Guide RNA
aguguaagaagguacaaucu

SEQ ID NO: 22738 - RNA, 20 nt, Artificial Sequence
  Guide RNA
aguguaggaagguacaaucu

SEQ ID NO: 22739 - RNA, 20 nt, Artificial Sequence
  Guide RNA
aucaggaaaguguaagaagg

SEQ ID NO: 22740 - RNA, 20 nt, Artificial Sequence
  Guide RNA
aucaggaaaguguaggaagg

SEQ ID NO: 22741 - RNA, 20 nt, Artificial Sequence
  Guide RNA
aucauuagagauuguaccuu

SEQ ID NO: 22742 - RNA, 20 nt, Artificial Sequence
  Guide RNA
auuagagauuguaccuuccu

SEQ ID NO: 22743 - RNA, 20 nt, Artificial Sequence
  Guide RNA
auuagagauuguaccuucuu

SEQ ID NO: 22744 - RNA, 20 nt, Artificial Sequence
  Guide RNA
auuguaccuuccuacacuuu

SEQ ID NO: 22745 - RNA, 20 nt, Artificial Sequence
  Guide RNA
auuguaccuucuuacacuuu

SEQ ID NO: 22746 - RNA, 20 nt, Artificial Sequence
  Guide RNA
caacaacaaucaggaaagug

SEQ ID NO: 22747 - RNA, 20 nt, Artificial Sequence
  Guide RNA
caacaaucaggaaaguguaa

SEQ ID NO: 22748 - RNA, 20 nt, Artificial Sequence
  Guide RNA
caacaaucaggaaaguguag

SEQ ID NO: 22749 - RNA, 20 nt, Artificial Sequence
  Guide RNA
caaucaggaaaguguaagaa

SEQ ID NO: 22750 - RNA, 20 nt, Artificial Sequence
  Guide RNA
caaucaggaaaguguaggaa

SEQ ID NO: 22751 - RNA, 20 nt, Artificial Sequence
  Guide RNA
caaucauuagagauuguacc

SEQ ID NO: 22752 - RNA, 20 nt, Artificial Sequence
  Guide RNA
caggaaaguguaagaaggua

SEQ ID NO: 22753 - RNA, 20 nt, Artificial Sequence
  Guide RNA
caggaaaguguaggaaggua

SEQ ID NO: 22754 - RNA, 20 nt, Artificial Sequence
  Guide RNA
cauuagagauuguaccuucc

SEQ ID NO: 22755 - RNA, 20 nt, Artificial Sequence
  Guide RNA
cauuagagauuguaccuucu

SEQ ID NO: 22756 - RNA, 20 nt, Artificial Sequence
  Guide RNA
ccuacacuuuccugauuguu

SEQ ID NO: 22757 - RNA, 20 nt, Artificial Sequence
  Guide RNA
ccuuccuacacuuuccugau

SEQ ID NO: 22758 - RNA, 20 nt, Artificial Sequence
  Guide RNA
ccuucuuacacuuuccugau

SEQ ID NO: 22759 - RNA, 20 nt, Artificial Sequence
  Guide RNA
cuuacacuuuccugauuguu

SEQ ID NO: 22760 - RNA, 20 nt, Artificial Sequence
  Guide RNA
cuuccuacacuuuccugauu

SEQ ID NO: 22761 - RNA, 20 nt, Artificial Sequence
  Guide RNA
cuucuuacacuuuccugauu

SEQ ID NO: 22762 - RNA, 20 nt, Artificial Sequence
  Guide RNA
gaaaguguaagaagguacaa

SEQ ID NO: 22763 - RNA, 20 nt, Artificial Sequence
  Guide RNA
gaaaguguaggaagguacaa

SEQ ID NO: 22764 - RNA, 20 nt, Artificial Sequence
  Guide RNA
gagauuguaccuuccuacac

SEQ ID NO: 22765 - RNA, 20 nt, Artificial Sequence
  Guide RNA
gagauuguaccuucuuacac

SEQ ID NO: 22766 - RNA, 20 nt, Artificial Sequence
  Guide RNA
gauuguaccuuccuacacuu

SEQ ID NO: 22767 - RNA, 20 nt, Artificial Sequence
  Guide RNA
gauuguaccuucuuacacuu

SEQ ID NO: 22768 - RNA, 20 nt, Artificial Sequence
  Guide RNA
ggaaaguguaagaagguaca

SEQ ID NO: 22769 - RNA, 20 nt, Artificial Sequence
  Guide RNA
ggaaaguguaggaagguaca

SEQ ID NO: 22770 - RNA, 20 nt, Artificial Sequence
  Guide RNA
guaagaagguacaaucucua

SEQ ID NO: 22771 - RNA, 20 nt, Artificial Sequence
  Guide RNA
guaccuuccuacacuuuccu

SEQ ID NO: 22772 - RNA, 20 nt, Artificial Sequence
  Guide RNA
guaccuucuuacacuuuccu

SEQ ID NO: 22773 - RNA, 20 nt, Artificial Sequence
  Guide RNA
guaggaagguacaaucucua

SEQ ID NO: 22774 - RNA, 20 nt, Artificial Sequence
  Guide RNA
guguaagaagguacaaucuc

SEQ ID NO: 22775 - RNA, 20 nt, Artificial Sequence
  Guide RNA
guguaggaagguacaaucuc

SEQ ID NO: 22776 - RNA, 20 nt, Artificial Sequence
  Guide RNA
uaagaagguacaaucucuaa

SEQ ID NO: 22777 - RNA, 20 nt, Artificial Sequence
  Guide RNA
uaccuuccuacacuuuccug

SEQ ID NO: 22778 - RNA, 20 nt, Artificial Sequence
  Guide RNA
uaccuucuuacacuuuccug

SEQ ID NO: 22779 - RNA, 20 nt, Artificial Sequence
  Guide RNA
uagagauuguaccuuccuac

SEQ ID NO: 22780 - RNA, 20 nt, Artificial Sequence
  Guide RNA
uagagauuguaccuucuuac

SEQ ID NO: 22781 - RNA, 20 nt, Artificial Sequence
  Guide RNA
uaggaagguacaaucucuaa

SEQ ID NO: 22782 - RNA, 20 nt, Artificial Sequence
  Guide RNA
ucaacaacaaucaggaaagu

SEQ ID NO: 22783 - RNA, 20 nt, Artificial Sequence
  Guide RNA
ucaggaaaguguaagaaggu

SEQ ID NO: 22784 - RNA, 20 nt, Artificial Sequence
  Guide RNA
ucaggaaaguguaggaaggu

SEQ ID NO: 22785 - RNA, 20 nt, Artificial Sequence
  Guide RNA
ucauuagagauuguaccuuc

SEQ ID NO: 22786 - RNA, 20 nt, Artificial Sequence
  Guide RNA
uccuacacuuuccugauugu

SEQ ID NO: 22787 - RNA, 20 nt, Artificial Sequence
  Guide RNA
ucuuacacuuuccugauugu

SEQ ID NO: 22788 - RNA, 20 nt, Artificial Sequence
  Guide RNA
uguaagaagguacaaucucu

SEQ ID NO: 22789 - RNA, 20 nt, Artificial Sequence
  Guide RNA
uguaccuuccuacacuuucc

SEQ ID NO: 22790 - RNA, 20 nt, Artificial Sequence
  Guide RNA
uguaccuucuuacacuuucc

SEQ ID NO: 22791 - RNA, 20 nt, Artificial Sequence
  Guide RNA
uguaggaagguacaaucucu

SEQ ID NO: 22792 - RNA, 20 nt, Artificial Sequence
  Guide RNA
uuagagauuguaccuuccua

SEQ ID NO: 22793 - RNA, 20 nt, Artificial Sequence
  Guide RNA
uuagagauuguaccuucuua

SEQ ID NO: 22794 - RNA, 20 nt, Artificial Sequence
  Guide RNA
uuccuacacuuuccugauug

SEQ ID NO: 22795 - RNA, 20 nt, Artificial Sequence
  Guide RNA
uucuuacacuuuccugauug

SEQ ID NO: 22796 - RNA, 20 nt, Artificial Sequence
  Guide RNA
uuguaccuuccuacacuuuc

SEQ ID NO: 22797 - RNA, 20 nt, Artificial Sequence
  Guide RNA
uuguaccuucuuacacuuuc

SEQ ID NO: 22798 - RNA, 21 nt, Artificial Sequence
  Guide RNA
aaaguguaagaagguacaauc

SEQ ID NO: 22799 - RNA, 21 nt, Artificial Sequence
  Guide RNA
aaaguguaggaagguacaauc

SEQ ID NO: 22800 - RNA, 21 nt, Artificial Sequence
  Guide RNA
aacaacaaucaggaaagugua

SEQ ID NO: 22801 - RNA, 21 nt, Artificial Sequence
  Guide RNA
aacaaucaggaaaguguaaga

SEQ ID NO: 22802 - RNA, 21 nt, Artificial Sequence
  Guide RNA
aacaaucaggaaaguguagga

SEQ ID NO: 22803 - RNA, 21 nt, Artificial Sequence
  Guide RNA
aagaagguacaaucucuaaug

SEQ ID NO: 22804 - RNA, 21 nt, Artificial Sequence
  Guide RNA
aaguguaagaagguacaaucu

SEQ ID NO: 22805 - RNA, 21 nt, Artificial Sequence
  Guide RNA
aaguguaggaagguacaaucu

SEQ ID NO: 22806 - RNA, 21 nt, Artificial Sequence
  Guide RNA
aaucaggaaaguguaagaagg

SEQ ID NO: 22807 - RNA, 21 nt, Artificial Sequence
  Guide RNA
aaucaggaaaguguaggaagg

SEQ ID NO: 22808 - RNA, 21 nt, Artificial Sequence
  Guide RNA
acaacaaucaggaaaguguaa

SEQ ID NO: 22809 - RNA, 21 nt, Artificial Sequence
  Guide RNA
acaacaaucaggaaaguguag

SEQ ID NO: 22810 - RNA, 21 nt, Artificial Sequence
  Guide RNA
acaaucaggaaaguguaagaa

SEQ ID NO: 22811 - RNA, 21 nt, Artificial Sequence
  Guide RNA
acaaucaggaaaguguaggaa

SEQ ID NO: 22812 - RNA, 21 nt, Artificial Sequence
  Guide RNA
acaaucauuagagauuguacc

SEQ ID NO: 22813 - RNA, 21 nt, Artificial Sequence
  Guide RNA
accuuccuacacuuuccugau

SEQ ID NO: 22814 - RNA, 21 nt, Artificial Sequence
  Guide RNA
accuucuuacacuuuccugau

SEQ ID NO: 22815 - RNA, 21 nt, Artificial Sequence
  Guide RNA
agagauuguaccuuccuacac

SEQ ID NO: 22816 - RNA, 21 nt, Artificial Sequence
  Guide RNA
agagauuguaccuucuuacac

SEQ ID NO: 22817 - RNA, 21 nt, Artificial Sequence
  Guide RNA
agauuguaccuuccuacacuu

SEQ ID NO: 22818 - RNA, 21 nt, Artificial Sequence
  Guide RNA
agauuguaccuucuuacacuu

SEQ ID NO: 22819 - RNA, 21 nt, Artificial Sequence
  Guide RNA
aggaaaguguaagaagguaca

SEQ ID NO: 22820 - RNA, 21 nt, Artificial Sequence
  Guide RNA
aggaaaguguaggaagguaca

SEQ ID NO: 22821 - RNA, 21 nt, Artificial Sequence
  Guide RNA
aggaagguacaaucucuaaug

SEQ ID NO: 22822 - RNA, 21 nt, Artificial Sequence
  Guide RNA
aguguaagaagguacaaucuc

SEQ ID NO: 22823 - RNA, 21 nt, Artificial Sequence
  Guide RNA
aguguaggaagguacaaucuc

SEQ ID NO: 22824 - RNA, 21 nt, Artificial Sequence
  Guide RNA
aucaggaaaguguaagaaggu

SEQ ID NO: 22825 - RNA, 21 nt, Artificial Sequence
  Guide RNA
aucaggaaaguguaggaaggu

SEQ ID NO: 22826 - RNA, 21 nt, Artificial Sequence
  Guide RNA
aucauuagagauuguaccuuc

SEQ ID NO: 22827 - RNA, 21 nt, Artificial Sequence
  Guide RNA
auuagagauuguaccuuccua

SEQ ID NO: 22828 - RNA, 21 nt, Artificial Sequence
  Guide RNA
auuguaccuuccuacacuuuc

SEQ ID NO: 22829 - RNA, 21 nt, Artificial Sequence
  Guide RNA
auuguaccuucuuacacuuuc

SEQ ID NO: 22830 - RNA, 21 nt, Artificial Sequence
  Guide RNA
caacaacaaucaggaaagugu

SEQ ID NO: 22831 - RNA, 21 nt, Artificial Sequence
  Guide RNA
caacaaucaggaaaguguaag

SEQ ID NO: 22832 - RNA, 21 nt, Artificial Sequence
  Guide RNA
caacaaucaggaaaguguagg

SEQ ID NO: 22833 - RNA, 21 nt, Artificial Sequence
  Guide RNA
caaucaggaaaguguaagaag

SEQ ID NO: 22834 - RNA, 21 nt, Artificial Sequence
  Guide RNA
caaucaggaaaguguaggaag

SEQ ID NO: 22835 - RNA, 21 nt, Artificial Sequence
  Guide RNA
caaucauuagagauuguaccu

SEQ ID NO: 22836 - RNA, 21 nt, Artificial Sequence
  Guide RNA
caggaaaguguaagaagguac

SEQ ID NO: 22837 - RNA, 21 nt, Artificial Sequence
  Guide RNA
caggaaaguguaggaagguac

SEQ ID NO: 22838 - RNA, 21 nt, Artificial Sequence
  Guide RNA
cauuagagauuguaccuuccu

SEQ ID NO: 22839 - RNA, 21 nt, Artificial Sequence
  Guide RNA
cauuagagauuguaccuucuu

SEQ ID NO: 22840 - RNA, 21 nt, Artificial Sequence
  Guide RNA
ccuacacuuuccugauuguug

SEQ ID NO: 22841 - RNA, 21 nt, Artificial Sequence
  Guide RNA
ccuuccuacacuuuccugauu

SEQ ID NO: 22842 - RNA, 21 nt, Artificial Sequence
  Guide RNA
ccuucuuacacuuuccugauu

SEQ ID NO: 22843 - RNA, 21 nt, Artificial Sequence
  Guide RNA
cuuacacuuuccugauuguug

SEQ ID NO: 22844 - RNA, 21 nt, Artificial Sequence
  Guide RNA
cuuccuacacuuuccugauug

SEQ ID NO: 22845 - RNA, 21 nt, Artificial Sequence
  Guide RNA
cuucuuacacuuuccugauug

SEQ ID NO: 22846 - RNA, 21 nt, Artificial Sequence
  Guide RNA
gaaaguguaagaagguacaau

SEQ ID NO: 22847 - RNA, 21 nt, Artificial Sequence
  Guide RNA
gaaaguguaggaagguacaau

SEQ ID NO: 22848 - RNA, 21 nt, Artificial Sequence
  Guide RNA
gagauuguaccuuccuacacu

SEQ ID NO: 22849 - RNA, 21 nt, Artificial Sequence
  Guide RNA
gagauuguaccuucuuacacu

SEQ ID NO: 22850 - RNA, 21 nt, Artificial Sequence
  Guide RNA
gauuguaccuuccuacacuuu

SEQ ID NO: 22851 - RNA, 21 nt, Artificial Sequence
  Guide RNA
gauuguaccuucuuacacuuu

SEQ ID NO: 22852 - RNA, 21 nt, Artificial Sequence
  Guide RNA
ggaaaguguaagaagguacaa

SEQ ID NO: 22853 - RNA, 21 nt, Artificial Sequence
  Guide RNA
ggaaaguguaggaagguacaa

SEQ ID NO: 22854 - RNA, 21 nt, Artificial Sequence
  Guide RNA
guaagaagguacaaucucuaa

SEQ ID NO: 22855 - RNA, 21 nt, Artificial Sequence
  Guide RNA
guaccuuccuacacuuuccug

SEQ ID NO: 22856 - RNA, 21 nt, Artificial Sequence
  Guide RNA
guaccuucuuacacuuuccug

SEQ ID NO: 22857 - RNA, 21 nt, Artificial Sequence
  Guide RNA
guaggaagguacaaucucuaa

SEQ ID NO: 22858 - RNA, 21 nt, Artificial Sequence
  Guide RNA
gucaacaacaaucaggaaagu

SEQ ID NO: 22859 - RNA, 21 nt, Artificial Sequence
  Guide RNA
guguaagaagguacaaucucu

SEQ ID NO: 22860 - RNA, 21 nt, Artificial Sequence
  Guide RNA
guguaggaagguacaaucucu

SEQ ID NO: 22861 - RNA, 21 nt, Artificial Sequence
  Guide RNA
uaccuuccuacacuuuccuga

SEQ ID NO: 22862 - RNA, 21 nt, Artificial Sequence
  Guide RNA
uaccuucuuacacuuuccuga

SEQ ID NO: 22863 - RNA, 21 nt, Artificial Sequence
  Guide RNA
uagagauuguaccuuccuaca

SEQ ID NO: 22864 - RNA, 21 nt, Artificial Sequence
  Guide RNA
uagagauuguaccuucuuaca

SEQ ID NO: 22865 - RNA, 21 nt, Artificial Sequence
  Guide RNA
uaggaagguacaaucucuaau

SEQ ID NO: 22866 - RNA, 21 nt, Artificial Sequence
  Guide RNA
ucaacaacaaucaggaaagug

SEQ ID NO: 22867 - RNA, 21 nt, Artificial Sequence
  Guide RNA
ucaggaaaguguaagaaggua

SEQ ID NO: 22868 - RNA, 21 nt, Artificial Sequence
  Guide RNA
ucaggaaaguguaggaaggua

SEQ ID NO: 22869 - RNA, 21 nt, Artificial Sequence
  Guide RNA
ucauuagagauuguaccuucc

SEQ ID NO: 22870 - RNA, 21 nt, Artificial Sequence
  Guide RNA
ucauuagagauuguaccuucu

SEQ ID NO: 22871 - RNA, 21 nt, Artificial Sequence
  Guide RNA
uccuacacuuuccugauuguu

SEQ ID NO: 22872 - RNA, 21 nt, Artificial Sequence
  Guide RNA
ucuuacacuuuccugauuguu

SEQ ID NO: 22873 - RNA, 21 nt, Artificial Sequence
  Guide RNA
uguaagaagguacaaucucua

SEQ ID NO: 22874 - RNA, 21 nt, Artificial Sequence
  Guide RNA
uguaccuuccuacacuuuccu

SEQ ID NO: 22875 - RNA, 21 nt, Artificial Sequence
  Guide RNA
uguaccuucuuacacuuuccu

SEQ ID NO: 22876 - RNA, 21 nt, Artificial Sequence
  Guide RNA
uguaggaagguacaaucucua

SEQ ID NO: 22877 - RNA, 21 nt, Artificial Sequence
  Guide RNA
uuagagauuguaccuuccuac

SEQ ID NO: 22878 - RNA, 21 nt, Artificial Sequence
  Guide RNA
uuagagauuguaccuucuuac

SEQ ID NO: 22879 - RNA, 21 nt, Artificial Sequence
  Guide RNA
uuccuacacuuuccugauugu

SEQ ID NO: 22880 - RNA, 21 nt, Artificial Sequence
  Guide RNA
uucuuacacuuuccugauugu

SEQ ID NO: 22881 - RNA, 21 nt, Artificial Sequence
  Guide RNA
uuguaccuuccuacacuuucc

SEQ ID NO: 22882 - RNA, 21 nt, Artificial Sequence
  Guide RNA
uuguaccuucuuacacuuucc

SEQ ID NO: 22883 - RNA, 22 nt, Artificial Sequence
  Guide RNA
aaaguguaagaagguacaaucu

SEQ ID NO: 22884 - RNA, 22 nt, Artificial Sequence
  Guide RNA
aaaguguaggaagguacaaucu

SEQ ID NO: 22885 - RNA, 22 nt, Artificial Sequence
  Guide RNA
aacaacaaucaggaaaguguaa

SEQ ID NO: 22886 - RNA, 22 nt, Artificial Sequence
  Guide RNA
aacaacaaucaggaaaguguag

SEQ ID NO: 22887 - RNA, 22 nt, Artificial Sequence
  Guide RNA
aacaaucaggaaaguguaagaa

SEQ ID NO: 22888 - RNA, 22 nt, Artificial Sequence
  Guide RNA
aacaaucaggaaaguguaggaa

SEQ ID NO: 22889 - RNA, 22 nt, Artificial Sequence
  Guide RNA
aagaagguacaaucucuaauga

SEQ ID NO: 22890 - RNA, 22 nt, Artificial Sequence
  Guide RNA
aaguguaagaagguacaaucuc

SEQ ID NO: 22891 - RNA, 22 nt, Artificial Sequence
  Guide RNA
aaguguaggaagguacaaucuc

SEQ ID NO: 22892 - RNA, 22 nt, Artificial Sequence
  Guide RNA
aaucaggaaaguguaagaaggu

SEQ ID NO: 22893 - RNA, 22 nt, Artificial Sequence
  Guide RNA
aaucaggaaaguguaggaaggu

SEQ ID NO: 22894 - RNA, 22 nt, Artificial Sequence
  Guide RNA
aaucauuagagauuguaccuuc

SEQ ID NO: 22895 - RNA, 22 nt, Artificial Sequence
  Guide RNA
acaacaaucaggaaaguguaag

SEQ ID NO: 22896 - RNA, 22 nt, Artificial Sequence
  Guide RNA
acaacaaucaggaaaguguagg

SEQ ID NO: 22897 - RNA, 22 nt, Artificial Sequence
  Guide RNA
acaaucaggaaaguguaagaag

SEQ ID NO: 22898 - RNA, 22 nt, Artificial Sequence
  Guide RNA
acaaucaggaaaguguaggaag

SEQ ID NO: 22899 - RNA, 22 nt, Artificial Sequence
  Guide RNA
acaaucauuagagauuguaccu

SEQ ID NO: 22900 - RNA, 22 nt, Artificial Sequence
  Guide RNA
accuuccuacacuuuccugauu

SEQ ID NO: 22901 - RNA, 22 nt, Artificial Sequence
  Guide RNA
accuucuuacacuuuccugauu

SEQ ID NO: 22902 - RNA, 22 nt, Artificial Sequence
  Guide RNA
agagauuguaccuuccuacacu

SEQ ID NO: 22903 - RNA, 22 nt, Artificial Sequence
  Guide RNA
agagauuguaccuucuuacacu

SEQ ID NO: 22904 - RNA, 22 nt, Artificial Sequence
  Guide RNA
agauuguaccuuccuacacuuu

SEQ ID NO: 22905 - RNA, 22 nt, Artificial Sequence
  Guide RNA
agauuguaccuucuuacacuuu

SEQ ID NO: 22906 - RNA, 22 nt, Artificial Sequence
  Guide RNA
aggaaaguguaagaagguacaa

SEQ ID NO: 22907 - RNA, 22 nt, Artificial Sequence
  Guide RNA
aggaaaguguaggaagguacaa

SEQ ID NO: 22908 - RNA, 22 nt, Artificial Sequence
  Guide RNA
aggaagguacaaucucuaauga

SEQ ID NO: 22909 - RNA, 22 nt, Artificial Sequence
  Guide RNA
aguguaagaagguacaaucucu

SEQ ID NO: 22910 - RNA, 22 nt, Artificial Sequence
  Guide RNA
aguguaggaagguacaaucucu

SEQ ID NO: 22911 - RNA, 22 nt, Artificial Sequence
  Guide RNA
aucaggaaaguguaagaaggua

SEQ ID NO: 22912 - RNA, 22 nt, Artificial Sequence
  Guide RNA
aucaggaaaguguaggaaggua

SEQ ID NO: 22913 - RNA, 22 nt, Artificial Sequence
  Guide RNA
aucauuagagauuguaccuucc

SEQ ID NO: 22914 - RNA, 22 nt, Artificial Sequence
  Guide RNA
aucauuagagauuguaccuucu

SEQ ID NO: 22915 - RNA, 22 nt, Artificial Sequence
  Guide RNA
auuagagauuguaccuuccuac

SEQ ID NO: 22916 - RNA, 22 nt, Artificial Sequence
  Guide RNA
auuagagauuguaccuucuuac

SEQ ID NO: 22917 - RNA, 22 nt, Artificial Sequence
  Guide RNA
auuguaccuuccuacacuuucc

SEQ ID NO: 22918 - RNA, 22 nt, Artificial Sequence
  Guide RNA
auuguaccuucuuacacuuucc

SEQ ID NO: 22919 - RNA, 22 nt, Artificial Sequence
  Guide RNA
caacaacaaucaggaaagugua

SEQ ID NO: 22920 - RNA, 22 nt, Artificial Sequence
  Guide RNA
caacaaucaggaaaguguaaga

SEQ ID NO: 22921 - RNA, 22 nt, Artificial Sequence
  Guide RNA
caacaaucaggaaaguguagga

SEQ ID NO: 22922 - RNA, 22 nt, Artificial Sequence
  Guide RNA
caaucaggaaaguguaagaagg

SEQ ID NO: 22923 - RNA, 22 nt, Artificial Sequence
  Guide RNA
caaucaggaaaguguaggaagg

SEQ ID NO: 22924 - RNA, 22 nt, Artificial Sequence
  Guide RNA
caaucauuagagauuguaccuu

SEQ ID NO: 22925 - RNA, 22 nt, Artificial Sequence
  Guide RNA
caggaaaguguaagaagguaca

SEQ ID NO: 22926 - RNA, 22 nt, Artificial Sequence
  Guide RNA
caggaaaguguaggaagguaca

SEQ ID NO: 22927 - RNA, 22 nt, Artificial Sequence
  Guide RNA
cauuagagauuguaccuuccua

SEQ ID NO: 22928 - RNA, 22 nt, Artificial Sequence
  Guide RNA
cauuagagauuguaccuucuua

SEQ ID NO: 22929 - RNA, 22 nt, Artificial Sequence
  Guide RNA
ccuacacuuuccugauuguugu

SEQ ID NO: 22930 - RNA, 22 nt, Artificial Sequence
  Guide RNA
ccuuccuacacuuuccugauug

SEQ ID NO: 22931 - RNA, 22 nt, Artificial Sequence
  Guide RNA
ccuucuuacacuuuccugauug

SEQ ID NO: 22932 - RNA, 22 nt, Artificial Sequence
  Guide RNA
cgucaacaacaaucaggaaagu

SEQ ID NO: 22933 - RNA, 22 nt, Artificial Sequence
  Guide RNA
cuuacacuuuccugauuguugu

SEQ ID NO: 22934 - RNA, 22 nt, Artificial Sequence
  Guide RNA
cuuccuacacuuuccugauugu

SEQ ID NO: 22935 - RNA, 22 nt, Artificial Sequence
  Guide RNA
cuucuuacacuuuccugauugu

SEQ ID NO: 22936 - RNA, 22 nt, Artificial Sequence
  Guide RNA
gaaaguguaagaagguacaauc

SEQ ID NO: 22937 - RNA, 22 nt, Artificial Sequence
  Guide RNA
gaaaguguaggaagguacaauc

SEQ ID NO: 22938 - RNA, 22 nt, Artificial Sequence
  Guide RNA
gagauuguaccuuccuacacuu

SEQ ID NO: 22939 - RNA, 22 nt, Artificial Sequence
  Guide RNA
gagauuguaccuucuuacacuu

SEQ ID NO: 22940 - RNA, 22 nt, Artificial Sequence
  Guide RNA
gauuguaccuuccuacacuuuc

SEQ ID NO: 22941 - RNA, 22 nt, Artificial Sequence
  Guide RNA
gauuguaccuucuuacacuuuc

SEQ ID NO: 22942 - RNA, 22 nt, Artificial Sequence
  Guide RNA
ggaaaguguaagaagguacaau

SEQ ID NO: 22943 - RNA, 22 nt, Artificial Sequence
  Guide RNA
ggaaaguguaggaagguacaau

SEQ ID NO: 22944 - RNA, 22 nt, Artificial Sequence
  Guide RNA
guaagaagguacaaucucuaau

SEQ ID NO: 22945 - RNA, 22 nt, Artificial Sequence
  Guide RNA
guaccuuccuacacuuuccuga

SEQ ID NO: 22946 - RNA, 22 nt, Artificial Sequence
  Guide RNA
guaccuucuuacacuuuccuga

SEQ ID NO: 22947 - RNA, 22 nt, Artificial Sequence
  Guide RNA
guaggaagguacaaucucuaau

SEQ ID NO: 22948 - RNA, 22 nt, Artificial Sequence
  Guide RNA
gucaacaacaaucaggaaagug

SEQ ID NO: 22949 - RNA, 22 nt, Artificial Sequence
  Guide RNA
guguaagaagguacaaucucua

SEQ ID NO: 22950 - RNA, 22 nt, Artificial Sequence
  Guide RNA
guguaggaagguacaaucucua

SEQ ID NO: 22951 - RNA, 22 nt, Artificial Sequence
  Guide RNA
uaagaagguacaaucucuaaug

SEQ ID NO: 22952 - RNA, 22 nt, Artificial Sequence
  Guide RNA
uacaaucauuagagauuguacc

SEQ ID NO: 22953 - RNA, 22 nt, Artificial Sequence
  Guide RNA
uaccuuccuacacuuuccugau

SEQ ID NO: 22954 - RNA, 22 nt, Artificial Sequence
  Guide RNA
uaccuucuuacacuuuccugau

SEQ ID NO: 22955 - RNA, 22 nt, Artificial Sequence
  Guide RNA
uagagauuguaccuuccuacac

SEQ ID NO: 22956 - RNA, 22 nt, Artificial Sequence
  Guide RNA
uagagauuguaccuucuuacac

SEQ ID NO: 22957 - RNA, 22 nt, Artificial Sequence
  Guide RNA
uaggaagguacaaucucuaaug

SEQ ID NO: 22958 - RNA, 22 nt, Artificial Sequence
  Guide RNA
ucaacaacaaucaggaaagugu

SEQ ID NO: 22959 - RNA, 22 nt, Artificial Sequence
  Guide RNA
ucaggaaaguguaagaagguac

SEQ ID NO: 22960 - RNA, 22 nt, Artificial Sequence
  Guide RNA
ucaggaaaguguaggaagguac

SEQ ID NO: 22961 - RNA, 22 nt, Artificial Sequence
  Guide RNA
ucauuagagauuguaccuuccu

SEQ ID NO: 22962 - RNA, 22 nt, Artificial Sequence
  Guide RNA
ucauuagagauuguaccuucuu

SEQ ID NO: 22963 - RNA, 22 nt, Artificial Sequence
  Guide RNA
uccuacacuuuccugauuguug

SEQ ID NO: 22964 - RNA, 22 nt, Artificial Sequence
  Guide RNA
ucuuacacuuuccugauuguug

SEQ ID NO: 22965 - RNA, 22 nt, Artificial Sequence
  Guide RNA
uguaagaagguacaaucucuaa

SEQ ID NO: 22966 - RNA, 22 nt, Artificial Sequence
  Guide RNA
uguaccuuccuacacuuuccug

SEQ ID NO: 22967 - RNA, 22 nt, Artificial Sequence
  Guide RNA
uguaccuucuuacacuuuccug

SEQ ID NO: 22968 - RNA, 22 nt, Artificial Sequence
  Guide RNA
uguaggaagguacaaucucuaa

SEQ ID NO: 22969 - RNA, 22 nt, Artificial Sequence
  Guide RNA
uuagagauuguaccuuccuaca

SEQ ID NO: 22970 - RNA, 22 nt, Artificial Sequence
  Guide RNA
uuagagauuguaccuucuuaca

SEQ ID NO: 22971 - RNA, 22 nt, Artificial Sequence
  Guide RNA
uuccuacacuuuccugauuguu

SEQ ID NO: 22972 - RNA, 22 nt, Artificial Sequence
  Guide RNA
uucuuacacuuuccugauuguu

SEQ ID NO: 22973 - RNA, 22 nt, Artificial Sequence
  Guide RNA
uuguaccuuccuacacuuuccu

SEQ ID NO: 22974 - RNA, 22 nt, Artificial Sequence
  Guide RNA
uuguaccuucuuacacuuuccu

SEQ ID NO: 22975 - RNA, 20 nt, Artificial Sequence
  Guide RNA
aauauuauuggaaacagcug

SEQ ID NO: 22976 - RNA, 20 nt, Artificial Sequence
  Guide RNA
aauauuauuggcaacagcug

SEQ ID NO: 22977 - RNA, 20 nt, Artificial Sequence
  Guide RNA
acagcuguugccaauaauau

SEQ ID NO: 22978 - RNA, 20 nt, Artificial Sequence
  Guide RNA
acagcuguuuccaauaauau

SEQ ID NO: 22979 - RNA, 20 nt, Artificial Sequence
  Guide RNA
accuauuacagcuguugcca

SEQ ID NO: 22980 - RNA, 20 nt, Artificial Sequence
  Guide RNA
accuauuacagcuguuucca

SEQ ID NO: 22981 - RNA, 20 nt, Artificial Sequence
  Guide RNA
agaggaguaauauuauugga

SEQ ID NO: 22982 - RNA, 20 nt, Artificial Sequence
  Guide RNA
agaggaguaauauuauuggc

SEQ ID NO: 22983 - RNA, 20 nt, Artificial Sequence
  Guide RNA
agcuguugccaauaauauua

SEQ ID NO: 22984 - RNA, 20 nt, Artificial Sequence
  Guide RNA
aggaguaauauuauuggcaa

SEQ ID NO: 22985 - RNA, 20 nt, Artificial Sequence
  Guide RNA
aguaauauuauuggcaacag

SEQ ID NO: 22986 - RNA, 20 nt, Artificial Sequence
  Guide RNA
auauuauuggaaacagcugu

SEQ ID NO: 22987 - RNA, 20 nt, Artificial Sequence
  Guide RNA
auauuauuggcaacagcugu

SEQ ID NO: 22988 - RNA, 20 nt, Artificial Sequence
  Guide RNA
auggcaccuauuacagcugu

SEQ ID NO: 22989 - RNA, 20 nt, Artificial Sequence
  Guide RNA
auuacagcuguugccaauaa

SEQ ID NO: 22990 - RNA, 20 nt, Artificial Sequence
  Guide RNA
auuacagcuguuuccaauaa

SEQ ID NO: 22991 - RNA, 20 nt, Artificial Sequence
  Guide RNA
auuauuggaaacagcuguaa

SEQ ID NO: 22992 - RNA, 20 nt, Artificial Sequence
  Guide RNA
auuauuggcaacagcuguaa

SEQ ID NO: 22993 - RNA, 20 nt, Artificial Sequence
  Guide RNA
auuggaaacagcuguaauag

SEQ ID NO: 22994 - RNA, 20 nt, Artificial Sequence
  Guide RNA
auuggcaacagcuguaauag

SEQ ID NO: 22995 - RNA, 20 nt, Artificial Sequence
  Guide RNA
caccuauuacagcuguugcc

SEQ ID NO: 22996 - RNA, 20 nt, Artificial Sequence
  Guide RNA
caccuauuacagcuguuucc

SEQ ID NO: 22997 - RNA, 20 nt, Artificial Sequence
  Guide RNA
cagaggaguaauauuauugg

SEQ ID NO: 22998 - RNA, 20 nt, Artificial Sequence
  Guide RNA
cagcuguugccaauaauauu

SEQ ID NO: 22999 - RNA, 20 nt, Artificial Sequence
  Guide RNA
cagcuguuuccaauaauauu

SEQ ID NO: 23000 - RNA, 20 nt, Artificial Sequence
  Guide RNA
ccuauuacagcuguugccaa

SEQ ID NO: 23001 - RNA, 20 nt, Artificial Sequence
  Guide RNA
ccuauuacagcuguuuccaa

SEQ ID NO: 23002 - RNA, 20 nt, Artificial Sequence
  Guide RNA
cuauuacagcuguugccaau

SEQ ID NO: 23003 - RNA, 20 nt, Artificial Sequence
  Guide RNA
cuauuacagcuguuuccaau

SEQ ID NO: 23004 - RNA, 20 nt, Artificial Sequence
  Guide RNA
cuguugccaauaauauuacu

SEQ ID NO: 23005 - RNA, 20 nt, Artificial Sequence
  Guide RNA
gaaacagcuguaauaggugc

SEQ ID NO: 23006 - RNA, 20 nt, Artificial Sequence
  Guide RNA
gaggaguaauauuauuggaa

SEQ ID NO: 23007 - RNA, 20 nt, Artificial Sequence
  Guide RNA
gaggaguaauauuauuggca

SEQ ID NO: 23008 - RNA, 20 nt, Artificial Sequence
  Guide RNA
gaguaauauuauuggcaaca

SEQ ID NO: 23009 - RNA, 20 nt, Artificial Sequence
  Guide RNA
gcaacagcuguaauaggugc

SEQ ID NO: 23010 - RNA, 20 nt, Artificial Sequence
  Guide RNA
gcaccuauuacagcuguugc

SEQ ID NO: 23011 - RNA, 20 nt, Artificial Sequence
  Guide RNA
gcaccuauuacagcuguuuc

SEQ ID NO: 23012 - RNA, 20 nt, Artificial Sequence
  Guide RNA
gcuguugccaauaauauuac

SEQ ID NO: 23013 - RNA, 20 nt, Artificial Sequence
  Guide RNA
gcuguuuccaauaauauuac

SEQ ID NO: 23014 - RNA, 20 nt, Artificial Sequence
  Guide RNA
ggaaacagcuguaauaggug

SEQ ID NO: 23015 - RNA, 20 nt, Artificial Sequence
  Guide RNA
ggaguaauauuauuggaaac

SEQ ID NO: 23016 - RNA, 20 nt, Artificial Sequence
  Guide RNA
ggaguaauauuauuggcaac

SEQ ID NO: 23017 - RNA, 20 nt, Artificial Sequence
  Guide RNA
ggcaacagcuguaauaggug

SEQ ID NO: 23018 - RNA, 20 nt, Artificial Sequence
  Guide RNA
ggcaccuauuacagcuguug

SEQ ID NO: 23019 - RNA, 20 nt, Artificial Sequence
  Guide RNA
ggcaccuauuacagcuguuu

SEQ ID NO: 23020 - RNA, 20 nt, Artificial Sequence
  Guide RNA
ggucagaggaguaauauuau

SEQ ID NO: 23021 - RNA, 20 nt, Artificial Sequence
  Guide RNA
guaauauuauuggaaacagc

SEQ ID NO: 23022 - RNA, 20 nt, Artificial Sequence
  Guide RNA
guaauauuauuggcaacagc

SEQ ID NO: 23023 - RNA, 20 nt, Artificial Sequence
  Guide RNA
gucagaggaguaauauuauu

SEQ ID NO: 23024 - RNA, 20 nt, Artificial Sequence
  Guide RNA
guugccaauaauauuacucc

SEQ ID NO: 23025 - RNA, 20 nt, Artificial Sequence
  Guide RNA
guuuccaauaauauuacucc

SEQ ID NO: 23026 - RNA, 20 nt, Artificial Sequence
  Guide RNA
uaauauuauuggcaacagcu

SEQ ID NO: 23027 - RNA, 20 nt, Artificial Sequence
  Guide RNA
uacagcuguugccaauaaua

SEQ ID NO: 23028 - RNA, 20 nt, Artificial Sequence
  Guide RNA
uacagcuguuuccaauaaua

SEQ ID NO: 23029 - RNA, 20 nt, Artificial Sequence
  Guide RNA
uauggcaccuauuacagcug

SEQ ID NO: 23030 - RNA, 20 nt, Artificial Sequence
  Guide RNA
uauuacagcuguugccaaua

SEQ ID NO: 23031 - RNA, 20 nt, Artificial Sequence
  Guide RNA
uauuacagcuguuuccaaua

SEQ ID NO: 23032 - RNA, 20 nt, Artificial Sequence
  Guide RNA
uauuauuggaaacagcugua

SEQ ID NO: 23033 - RNA, 20 nt, Artificial Sequence
  Guide RNA
uauuauuggcaacagcugua

SEQ ID NO: 23034 - RNA, 20 nt, Artificial Sequence
  Guide RNA
uauuggaaacagcuguaaua

SEQ ID NO: 23035 - RNA, 20 nt, Artificial Sequence
  Guide RNA
uauuggcaacagcuguaaua

SEQ ID NO: 23036 - RNA, 20 nt, Artificial Sequence
  Guide RNA
ucagaggaguaauauuauug

SEQ ID NO: 23037 - RNA, 20 nt, Artificial Sequence
  Guide RNA
ugccaauaauauuacuccuc

SEQ ID NO: 23038 - RNA, 20 nt, Artificial Sequence
  Guide RNA
uggaaacagcuguaauaggu

SEQ ID NO: 23039 - RNA, 20 nt, Artificial Sequence
  Guide RNA
uggcaacagcuguaauaggu

SEQ ID NO: 23040 - RNA, 20 nt, Artificial Sequence
  Guide RNA
uggcaccuauuacagcuguu

SEQ ID NO: 23041 - RNA, 20 nt, Artificial Sequence
  Guide RNA
uguugccaauaauauuacuc

SEQ ID NO: 23042 - RNA, 20 nt, Artificial Sequence
  Guide RNA
uuacagcuguugccaauaau

SEQ ID NO: 23043 - RNA, 20 nt, Artificial Sequence
  Guide RNA
uuacagcuguuuccaauaau

SEQ ID NO: 23044 - RNA, 20 nt, Artificial Sequence
  Guide RNA
uuauggcaccuauuacagcu

SEQ ID NO: 23045 - RNA, 20 nt, Artificial Sequence
  Guide RNA
uuauuggaaacagcuguaau

SEQ ID NO: 23046 - RNA, 20 nt, Artificial Sequence
  Guide RNA
uuauuggcaacagcuguaau

SEQ ID NO: 23047 - RNA, 20 nt, Artificial Sequence
  Guide RNA
uuccaauaauauuacuccuc

SEQ ID NO: 23048 - RNA, 20 nt, Artificial Sequence
  Guide RNA
uugccaauaauauuacuccu

SEQ ID NO: 23049 - RNA, 20 nt, Artificial Sequence
  Guide RNA
uuggaaacagcuguaauagg

SEQ ID NO: 23050 - RNA, 20 nt, Artificial Sequence
  Guide RNA
uuggcaacagcuguaauagg

SEQ ID NO: 23051 - RNA, 21 nt, Artificial Sequence
  Guide RNA
aauauuauuggcaacagcugu

SEQ ID NO: 23052 - RNA, 21 nt, Artificial Sequence
  Guide RNA
acagcuguugccaauaauauu

SEQ ID NO: 23053 - RNA, 21 nt, Artificial Sequence
  Guide RNA
accuauuacagcuguugccaa

SEQ ID NO: 23054 - RNA, 21 nt, Artificial Sequence
  Guide RNA
accuauuacagcuguuuccaa

SEQ ID NO: 23055 - RNA, 21 nt, Artificial Sequence
  Guide RNA
agaggaguaauauuauuggca

SEQ ID NO: 23056 - RNA, 21 nt, Artificial Sequence
  Guide RNA
agcuguugccaauaauauuac

SEQ ID NO: 23057 - RNA, 21 nt, Artificial Sequence
  Guide RNA
aggaguaauauuauuggcaac

SEQ ID NO: 23058 - RNA, 21 nt, Artificial Sequence
  Guide RNA
aggucagaggaguaauauuau

SEQ ID NO: 23059 - RNA, 21 nt, Artificial Sequence
  Guide RNA
aguaauauuauuggcaacagc

SEQ ID NO: 23060 - RNA, 21 nt, Artificial Sequence
  Guide RNA
auauuauuggcaacagcugua

SEQ ID NO: 23061 - RNA, 21 nt, Artificial Sequence
  Guide RNA
auggcaccuauuacagcuguu

SEQ ID NO: 23062 - RNA, 21 nt, Artificial Sequence
  Guide RNA
auuacagcuguugccaauaau

SEQ ID NO: 23063 - RNA, 21 nt, Artificial Sequence
  Guide RNA
auuauuggcaacagcuguaau

SEQ ID NO: 23064 - RNA, 21 nt, Artificial Sequence
  Guide RNA
auuggaaacagcuguaauagg

SEQ ID NO: 23065 - RNA, 21 nt, Artificial Sequence
  Guide RNA
auuggcaacagcuguaauagg

SEQ ID NO: 23066 - RNA, 21 nt, Artificial Sequence
  Guide RNA
caccuauuacagcuguugcca

SEQ ID NO: 23067 - RNA, 21 nt, Artificial Sequence
  Guide RNA
caccuauuacagcuguuucca

SEQ ID NO: 23068 - RNA, 21 nt, Artificial Sequence
  Guide RNA
cagaggaguaauauuauugga

SEQ ID NO: 23069 - RNA, 21 nt, Artificial Sequence
  Guide RNA
cagaggaguaauauuauuggc

SEQ ID NO: 23070 - RNA, 21 nt, Artificial Sequence
  Guide RNA
cagcuguugccaauaauauua

SEQ ID NO: 23071 - RNA, 21 nt, Artificial Sequence
  Guide RNA
ccuauuacagcuguugccaau

SEQ ID NO: 23072 - RNA, 21 nt, Artificial Sequence
  Guide RNA
ccuauuacagcuguuuccaau

SEQ ID NO: 23073 - RNA, 21 nt, Artificial Sequence
  Guide RNA
cuauuacagcuguugccaaua

SEQ ID NO: 23074 - RNA, 21 nt, Artificial Sequence
  Guide RNA
cuauuacagcuguuuccaaua

SEQ ID NO: 23075 - RNA, 21 nt, Artificial Sequence
  Guide RNA
cuguugccaauaauauuacuc

SEQ ID NO: 23076 - RNA, 21 nt, Artificial Sequence
  Guide RNA
gaaacagcuguaauaggugcc

SEQ ID NO: 23077 - RNA, 21 nt, Artificial Sequence
  Guide RNA
gaggaguaauauuauuggcaa

SEQ ID NO: 23078 - RNA, 21 nt, Artificial Sequence
  Guide RNA
gaguaauauuauuggcaacag

SEQ ID NO: 23079 - RNA, 21 nt, Artificial Sequence
  Guide RNA
gcaacagcuguaauaggugcc

SEQ ID NO: 23080 - RNA, 21 nt, Artificial Sequence
  Guide RNA
gcaccuauuacagcuguugcc

SEQ ID NO: 23081 - RNA, 21 nt, Artificial Sequence
  Guide RNA
gcaccuauuacagcuguuucc

SEQ ID NO: 23082 - RNA, 21 nt, Artificial Sequence
  Guide RNA
gcuguugccaauaauauuacu

SEQ ID NO: 23083 - RNA, 21 nt, Artificial Sequence
  Guide RNA
ggaaacagcuguaauaggugc

SEQ ID NO: 23084 - RNA, 21 nt, Artificial Sequence
  Guide RNA
ggaguaauauuauuggcaaca

SEQ ID NO: 23085 - RNA, 21 nt, Artificial Sequence
  Guide RNA
ggcaacagcuguaauaggugc

SEQ ID NO: 23086 - RNA, 21 nt, Artificial Sequence
  Guide RNA
ggcaccuauuacagcuguugc

SEQ ID NO: 23087 - RNA, 21 nt, Artificial Sequence
  Guide RNA
ggcaccuauuacagcuguuuc

SEQ ID NO: 23088 - RNA, 21 nt, Artificial Sequence
  Guide RNA
ggucagaggaguaauauuauu

SEQ ID NO: 23089 - RNA, 21 nt, Artificial Sequence
  Guide RNA
guaauauuauuggcaacagcu

SEQ ID NO: 23090 - RNA, 21 nt, Artificial Sequence
  Guide RNA
gucagaggaguaauauuauug

SEQ ID NO: 23091 - RNA, 21 nt, Artificial Sequence
  Guide RNA
guugccaauaauauuacuccu

SEQ ID NO: 23092 - RNA, 21 nt, Artificial Sequence
  Guide RNA
uaauauuauuggcaacagcug

SEQ ID NO: 23093 - RNA, 21 nt, Artificial Sequence
  Guide RNA
uacagcuguugccaauaauau

SEQ ID NO: 23094 - RNA, 21 nt, Artificial Sequence
  Guide RNA
uauggcaccuauuacagcugu

SEQ ID NO: 23095 - RNA, 21 nt, Artificial Sequence
  Guide RNA
uauuacagcuguugccaauaa

SEQ ID NO: 23096 - RNA, 21 nt, Artificial Sequence
  Guide RNA
uauuauuggcaacagcuguaa

SEQ ID NO: 23097 - RNA, 21 nt, Artificial Sequence
  Guide RNA
uauuggaaacagcuguaauag

SEQ ID NO: 23098 - RNA, 21 nt, Artificial Sequence
  Guide RNA
uauuggcaacagcuguaauag

SEQ ID NO: 23099 - RNA, 21 nt, Artificial Sequence
  Guide RNA
ucagaggaguaauauuauugg

SEQ ID NO: 23100 - RNA, 21 nt, Artificial Sequence
  Guide RNA
ugccaauaauauuacuccucu

SEQ ID NO: 23101 - RNA, 21 nt, Artificial Sequence
  Guide RNA
uggaaacagcuguaauaggug

SEQ ID NO: 23102 - RNA, 21 nt, Artificial Sequence
  Guide RNA
uggcaacagcuguaauaggug

SEQ ID NO: 23103 - RNA, 21 nt, Artificial Sequence
  Guide RNA
uggcaccuauuacagcuguug

SEQ ID NO: 23104 - RNA, 21 nt, Artificial Sequence
  Guide RNA
uggcaccuauuacagcuguuu

SEQ ID NO: 23105 - RNA, 21 nt, Artificial Sequence
  Guide RNA
uguugccaauaauauuacucc

SEQ ID NO: 23106 - RNA, 21 nt, Artificial Sequence
  Guide RNA
uuacagcuguugccaauaaua

SEQ ID NO: 23107 - RNA, 21 nt, Artificial Sequence
  Guide RNA
uuauggcaccuauuacagcug

SEQ ID NO: 23108 - RNA, 21 nt, Artificial Sequence
  Guide RNA
uuauuggcaacagcuguaaua

SEQ ID NO: 23109 - RNA, 21 nt, Artificial Sequence
  Guide RNA
uugccaauaauauuacuccuc

SEQ ID NO: 23110 - RNA, 21 nt, Artificial Sequence
  Guide RNA
uuggaaacagcuguaauaggu

SEQ ID NO: 23111 - RNA, 21 nt, Artificial Sequence
  Guide RNA
uuggcaacagcuguaauaggu

SEQ ID NO: 23112 - RNA, 21 nt, Artificial Sequence
  Guide RNA
uuuauggcaccuauuacagcu

SEQ ID NO: 23113 - RNA, 22 nt, Artificial Sequence
  Guide RNA
aauauuauuggcaacagcugua

SEQ ID NO: 23114 - RNA, 22 nt, Artificial Sequence
  Guide RNA
acagcuguugccaauaauauua

SEQ ID NO: 23115 - RNA, 22 nt, Artificial Sequence
  Guide RNA
accuauuacagcuguugccaau

SEQ ID NO: 23116 - RNA, 22 nt, Artificial Sequence
  Guide RNA
accuauuacagcuguuuccaau

SEQ ID NO: 23117 - RNA, 22 nt, Artificial Sequence
  Guide RNA
agaggaguaauauuauuggcaa

SEQ ID NO: 23118 - RNA, 22 nt, Artificial Sequence
  Guide RNA
agcuguugccaauaauauuacu

SEQ ID NO: 23119 - RNA, 22 nt, Artificial Sequence
  Guide RNA
aggaguaauauuauuggcaaca

SEQ ID NO: 23120 - RNA, 22 nt, Artificial Sequence
  Guide RNA
aggucagaggaguaauauuauu

SEQ ID NO: 23121 - RNA, 22 nt, Artificial Sequence
  Guide RNA
aguaauauuauuggcaacagcu

SEQ ID NO: 23122 - RNA, 22 nt, Artificial Sequence
  Guide RNA
auauuauuggcaacagcuguaa

SEQ ID NO: 23123 - RNA, 22 nt, Artificial Sequence
  Guide RNA
auggcaccuauuacagcuguug

SEQ ID NO: 23124 - RNA, 22 nt, Artificial Sequence
  Guide RNA
auggcaccuauuacagcuguuu

SEQ ID NO: 23125 - RNA, 22 nt, Artificial Sequence
  Guide RNA
auuacagcuguugccaauaaua

SEQ ID NO: 23126 - RNA, 22 nt, Artificial Sequence
  Guide RNA
auuauuggcaacagcuguaaua

SEQ ID NO: 23127 - RNA, 22 nt, Artificial Sequence
  Guide RNA
auuggaaacagcuguaauaggu

SEQ ID NO: 23128 - RNA, 22 nt, Artificial Sequence
  Guide RNA
auuggcaacagcuguaauaggu

SEQ ID NO: 23129 - RNA, 22 nt, Artificial Sequence
  Guide RNA
caccuauuacagcuguugccaa

SEQ ID NO: 23130 - RNA, 22 nt, Artificial Sequence
  Guide RNA
caccuauuacagcuguuuccaa

SEQ ID NO: 23131 - RNA, 22 nt, Artificial Sequence
  Guide RNA
cagaggaguaauauuauuggaa

SEQ ID NO: 23132 - RNA, 22 nt, Artificial Sequence
  Guide RNA
cagaggaguaauauuauuggca

SEQ ID NO: 23133 - RNA, 22 nt, Artificial Sequence
  Guide RNA
cagcuguugccaauaauauuac

SEQ ID NO: 23134 - RNA, 22 nt, Artificial Sequence
  Guide RNA
cagcuguuuccaauaauauuac

SEQ ID NO: 23135 - RNA, 22 nt, Artificial Sequence
  Guide RNA
ccuauuacagcuguugccaaua

SEQ ID NO: 23136 - RNA, 22 nt, Artificial Sequence
  Guide RNA
ccuauuacagcuguuuccaaua

SEQ ID NO: 23137 - RNA, 22 nt, Artificial Sequence
  Guide RNA
cuauuacagcuguugccaauaa

SEQ ID NO: 23138 - RNA, 22 nt, Artificial Sequence
  Guide RNA
cuauuacagcuguuuccaauaa

SEQ ID NO: 23139 - RNA, 22 nt, Artificial Sequence
  Guide RNA
cuguugccaauaauauuacucc

SEQ ID NO: 23140 - RNA, 22 nt, Artificial Sequence
  Guide RNA
cuguuuccaauaauauuacucc

SEQ ID NO: 23141 - RNA, 22 nt, Artificial Sequence
  Guide RNA
gaaacagcuguaauaggugcca

SEQ ID NO: 23142 - RNA, 22 nt, Artificial Sequence
  Guide RNA
gaggaguaauauuauuggaaac

SEQ ID NO: 23143 - RNA, 22 nt, Artificial Sequence
  Guide RNA
gaggaguaauauuauuggcaac

SEQ ID NO: 23144 - RNA, 22 nt, Artificial Sequence
  Guide RNA
gaggucagaggaguaauauuau

SEQ ID NO: 23145 - RNA, 22 nt, Artificial Sequence
  Guide RNA
gaguaauauuauuggaaacagc

SEQ ID NO: 23146 - RNA, 22 nt, Artificial Sequence
  Guide RNA
gaguaauauuauuggcaacagc

SEQ ID NO: 23147 - RNA, 22 nt, Artificial Sequence
  Guide RNA
gcaacagcuguaauaggugcca

SEQ ID NO: 23148 - RNA, 22 nt, Artificial Sequence
  Guide RNA
gcaccuauuacagcuguugcca

SEQ ID NO: 23149 - RNA, 22 nt, Artificial Sequence
  Guide RNA
gcaccuauuacagcuguuucca

SEQ ID NO: 23150 - RNA, 22 nt, Artificial Sequence
  Guide RNA
gcuguugccaauaauauuacuc

SEQ ID NO: 23151 - RNA, 22 nt, Artificial Sequence
  Guide RNA
gcuguuuccaauaauauuacuc

SEQ ID NO: 23152 - RNA, 22 nt, Artificial Sequence
  Guide RNA
ggaaacagcuguaauaggugcc

SEQ ID NO: 23153 - RNA, 22 nt, Artificial Sequence
  Guide RNA
ggaguaauauuauuggaaacag

SEQ ID NO: 23154 - RNA, 22 nt, Artificial Sequence
  Guide RNA
ggaguaauauuauuggcaacag

SEQ ID NO: 23155 - RNA, 22 nt, Artificial Sequence
  Guide RNA
ggcaacagcuguaauaggugcc

SEQ ID NO: 23156 - RNA, 22 nt, Artificial Sequence
  Guide RNA
ggcaccuauuacagcuguugcc

SEQ ID NO: 23157 - RNA, 22 nt, Artificial Sequence
  Guide RNA
ggcaccuauuacagcuguuucc

SEQ ID NO: 23158 - RNA, 22 nt, Artificial Sequence
  Guide RNA
ggucagaggaguaauauuauug

SEQ ID NO: 23159 - RNA, 22 nt, Artificial Sequence
  Guide RNA
guaauauuauuggaaacagcug

SEQ ID NO: 23160 - RNA, 22 nt, Artificial Sequence
  Guide RNA
guaauauuauuggcaacagcug

SEQ ID NO: 23161 - RNA, 22 nt, Artificial Sequence
  Guide RNA
gucagaggaguaauauuauugg

SEQ ID NO: 23162 - RNA, 22 nt, Artificial Sequence
  Guide RNA
guugccaauaauauuacuccuc

SEQ ID NO: 23163 - RNA, 22 nt, Artificial Sequence
  Guide RNA
guuuccaauaauauuacuccuc

SEQ ID NO: 23164 - RNA, 22 nt, Artificial Sequence
  Guide RNA
uaauauuauuggcaacagcugu

SEQ ID NO: 23165 - RNA, 22 nt, Artificial Sequence
  Guide RNA
uacagcuguugccaauaauauu

SEQ ID NO: 23166 - RNA, 22 nt, Artificial Sequence
  Guide RNA
uauggcaccuauuacagcuguu

SEQ ID NO: 23167 - RNA, 22 nt, Artificial Sequence
  Guide RNA
uauuacagcuguugccaauaau

SEQ ID NO: 23168 - RNA, 22 nt, Artificial Sequence
  Guide RNA
uauuauuggcaacagcuguaau

SEQ ID NO: 23169 - RNA, 22 nt, Artificial Sequence
  Guide RNA
uauuggaaacagcuguaauagg

SEQ ID NO: 23170 - RNA, 22 nt, Artificial Sequence
  Guide RNA
uauuggcaacagcuguaauagg

SEQ ID NO: 23171 - RNA, 22 nt, Artificial Sequence
  Guide RNA
ucagaggaguaauauuauugga

SEQ ID NO: 23172 - RNA, 22 nt, Artificial Sequence
  Guide RNA
ucagaggaguaauauuauuggc

SEQ ID NO: 23173 - RNA, 22 nt, Artificial Sequence
  Guide RNA
ugccaauaauauuacuccucug

SEQ ID NO: 23174 - RNA, 22 nt, Artificial Sequence
  Guide RNA
uggaaacagcuguaauaggugc

SEQ ID NO: 23175 - RNA, 22 nt, Artificial Sequence
  Guide RNA
uggcaacagcuguaauaggugc

SEQ ID NO: 23176 - RNA, 22 nt, Artificial Sequence
  Guide RNA
uggcaccuauuacagcuguugc

SEQ ID NO: 23177 - RNA, 22 nt, Artificial Sequence
  Guide RNA
uggcaccuauuacagcuguuuc

SEQ ID NO: 23178 - RNA, 22 nt, Artificial Sequence
  Guide RNA
uguugccaauaauauuacuccu

SEQ ID NO: 23179 - RNA, 22 nt, Artificial Sequence
  Guide RNA
uuacagcuguugccaauaauau

SEQ ID NO: 23180 - RNA, 22 nt, Artificial Sequence
  Guide RNA
uuauggcaccuauuacagcugu

SEQ ID NO: 23181 - RNA, 22 nt, Artificial Sequence
  Guide RNA
uuauuggaaacagcuguaauag

SEQ ID NO: 23182 - RNA, 22 nt, Artificial Sequence
  Guide RNA
uuauuggcaacagcuguaauag

SEQ ID NO: 23183 - RNA, 22 nt, Artificial Sequence
  Guide RNA
uuccaauaauauuacuccucug

SEQ ID NO: 23184 - RNA, 22 nt, Artificial Sequence
  Guide RNA
uugccaauaauauuacuccucu

SEQ ID NO: 23185 - RNA, 22 nt, Artificial Sequence
  Guide RNA
uuggaaacagcuguaauaggug

SEQ ID NO: 23186 - RNA, 22 nt, Artificial Sequence
  Guide RNA
uuggcaacagcuguaauaggug

SEQ ID NO: 23187 - RNA, 22 nt, Artificial Sequence
  Guide RNA
uuuauggcaccuauuacagcug

SEQ ID NO: 23188 - RNA, 22 nt, Artificial Sequence
  Guide RNA
uuuuauggcaccuauuacagcu

SEQ ID NO: 23189 - RNA, 20 nt, Artificial Sequence
  Guide RNA
aaaaaacucacacacacaca

SEQ ID NO: 23190 - RNA, 20 nt, Artificial Sequence
  Guide RNA
aaaaaacucauacacacaca

SEQ ID NO: 23191 - RNA, 20 nt, Artificial Sequence
  Guide RNA
aaaaacucacacacacacau

SEQ ID NO: 23192 - RNA, 20 nt, Artificial Sequence
  Guide RNA
aaaaacucauacacacacau

SEQ ID NO: 23193 - RNA, 20 nt, Artificial Sequence
  Guide RNA
aaaacucacacacacacaua

SEQ ID NO: 23194 - RNA, 20 nt, Artificial Sequence
  Guide RNA
aaaacucauacacacacaua

SEQ ID NO: 23195 - RNA, 20 nt, Artificial Sequence
  Guide RNA
aaacucacacacacacauau

SEQ ID NO: 23196 - RNA, 20 nt, Artificial Sequence
  Guide RNA
aaacucauacacacacauau

SEQ ID NO: 23197 - RNA, 20 nt, Artificial Sequence
  Guide RNA
aacucacacacacacauaua

SEQ ID NO: 23198 - RNA, 20 nt, Artificial Sequence
  Guide RNA
aacucauacacacacauaua

SEQ ID NO: 23199 - RNA, 20 nt, Artificial Sequence
  Guide RNA
acacacacacauauaggcau

SEQ ID NO: 23200 - RNA, 20 nt, Artificial Sequence
  Guide RNA
acucacacacacacauauag

SEQ ID NO: 23201 - RNA, 20 nt, Artificial Sequence
  Guide RNA
acucauacacacacauauag

SEQ ID NO: 23202 - RNA, 20 nt, Artificial Sequence
  Guide RNA
auacacacacauauaggcau

SEQ ID NO: 23203 - RNA, 20 nt, Artificial Sequence
  Guide RNA
auaugccuauaugugugugu

SEQ ID NO: 23204 - RNA, 20 nt, Artificial Sequence
  Guide RNA
auauguguguguaugaguuu

SEQ ID NO: 23205 - RNA, 20 nt, Artificial Sequence
  Guide RNA
auaugugugugugugaguuu

SEQ ID NO: 23206 - RNA, 20 nt, Artificial Sequence
  Guide RNA
augccuauauguguguguau

SEQ ID NO: 23207 - RNA, 20 nt, Artificial Sequence
  Guide RNA
augccuauaugugugugugu

SEQ ID NO: 23208 - RNA, 20 nt, Artificial Sequence
  Guide RNA
auguguguguaugaguuuuu

SEQ ID NO: 23209 - RNA, 20 nt, Artificial Sequence
  Guide RNA
augugugugugugaguuuuu

SEQ ID NO: 23210 - RNA, 20 nt, Artificial Sequence
  Guide RNA
cacacacacacauauaggca

SEQ ID NO: 23211 - RNA, 20 nt, Artificial Sequence
  Guide RNA
cauacacacacauauaggca

SEQ ID NO: 23212 - RNA, 20 nt, Artificial Sequence
  Guide RNA
ccuauauguguguguaugag

SEQ ID NO: 23213 - RNA, 20 nt, Artificial Sequence
  Guide RNA
ccuauaugugugugugugag

SEQ ID NO: 23214 - RNA, 20 nt, Artificial Sequence
  Guide RNA
cuauauguguguguaugagu

SEQ ID NO: 23215 - RNA, 20 nt, Artificial Sequence
  Guide RNA
cuauaugugugugugugagu

SEQ ID NO: 23216 - RNA, 20 nt, Artificial Sequence
  Guide RNA
cucacacacacacauauagg

SEQ ID NO: 23217 - RNA, 20 nt, Artificial Sequence
  Guide RNA
cucauacacacacauauagg

SEQ ID NO: 23218 - RNA, 20 nt, Artificial Sequence
  Guide RNA
gauaugccuauaugugugug

SEQ ID NO: 23219 - RNA, 20 nt, Artificial Sequence
  Guide RNA
gccuauauguguguguauga

SEQ ID NO: 23220 - RNA, 20 nt, Artificial Sequence
  Guide RNA
gccuauauguguguguguga

SEQ ID NO: 23221 - RNA, 20 nt, Artificial Sequence
  Guide RNA
ggauaugccuauaugugugu

SEQ ID NO: 23222 - RNA, 20 nt, Artificial Sequence
  Guide RNA
uauauguguguguaugaguu

SEQ ID NO: 23223 - RNA, 20 nt, Artificial Sequence
  Guide RNA
uauaugugugugugugaguu

SEQ ID NO: 23224 - RNA, 20 nt, Artificial Sequence
  Guide RNA
uaugccuauaugugugugua

SEQ ID NO: 23225 - RNA, 20 nt, Artificial Sequence
  Guide RNA
uaugccuauaugugugugug

SEQ ID NO: 23226 - RNA, 20 nt, Artificial Sequence
  Guide RNA
uauguguguguaugaguuuu

SEQ ID NO: 23227 - RNA, 20 nt, Artificial Sequence
  Guide RNA
uaugugugugugugaguuuu

SEQ ID NO: 23228 - RNA, 20 nt, Artificial Sequence
  Guide RNA
ucacacacacacauauaggc

SEQ ID NO: 23229 - RNA, 20 nt, Artificial Sequence
  Guide RNA
ucauacacacacauauaggc

SEQ ID NO: 23230 - RNA, 20 nt, Artificial Sequence
  Guide RNA
ugccuauauguguguguaug

SEQ ID NO: 23231 - RNA, 20 nt, Artificial Sequence
  Guide RNA
ugccuauaugugugugugug

SEQ ID NO: 23232 - RNA, 20 nt, Artificial Sequence
  Guide RNA
uggauaugccuauaugugug

SEQ ID NO: 23233 - RNA, 20 nt, Artificial Sequence
  Guide RNA
uguguguguaugaguuuuuu

SEQ ID NO: 23234 - RNA, 20 nt, Artificial Sequence
  Guide RNA
ugugugugugugaguuuuuu

SEQ ID NO: 23235 - RNA, 21 nt, Artificial Sequence
  Guide RNA
aaaaaacucacacacacacau

SEQ ID NO: 23236 - RNA, 21 nt, Artificial Sequence
  Guide RNA
aaaaacucacacacacacaua

SEQ ID NO: 23237 - RNA, 21 nt, Artificial Sequence
  Guide RNA
aaaacucacacacacacauau

SEQ ID NO: 23238 - RNA, 21 nt, Artificial Sequence
  Guide RNA
aaacucacacacacacauaua

SEQ ID NO: 23239 - RNA, 21 nt, Artificial Sequence
  Guide RNA
aacucacacacacacauauag

SEQ ID NO: 23240 - RNA, 21 nt, Artificial Sequence
  Guide RNA
aacucauacacacacauauag

SEQ ID NO: 23241 - RNA, 21 nt, Artificial Sequence
  Guide RNA
acacacacacauauaggcaua

SEQ ID NO: 23242 - RNA, 21 nt, Artificial Sequence
  Guide RNA
acucacacacacacauauagg

SEQ ID NO: 23243 - RNA, 21 nt, Artificial Sequence
  Guide RNA
acucauacacacacauauagg

SEQ ID NO: 23244 - RNA, 21 nt, Artificial Sequence
  Guide RNA
auacacacacauauaggcaua

SEQ ID NO: 23245 - RNA, 21 nt, Artificial Sequence
  Guide RNA
auaugccuauaugugugugua

SEQ ID NO: 23246 - RNA, 21 nt, Artificial Sequence
  Guide RNA
auaugccuauaugugugugug

SEQ ID NO: 23247 - RNA, 21 nt, Artificial Sequence
  Guide RNA
auaugugugugugugaguuuu

SEQ ID NO: 23248 - RNA, 21 nt, Artificial Sequence
  Guide RNA
augccuauauguguguguaug

SEQ ID NO: 23249 - RNA, 21 nt, Artificial Sequence
  Guide RNA
augccuauaugugugugugug

SEQ ID NO: 23250 - RNA, 21 nt, Artificial Sequence
  Guide RNA
auggauaugccuauaugugug

SEQ ID NO: 23251 - RNA, 21 nt, Artificial Sequence
  Guide RNA
augugugugugugaguuuuuu

SEQ ID NO: 23252 - RNA, 21 nt, Artificial Sequence
  Guide RNA
cacacacacacauauaggcau

SEQ ID NO: 23253 - RNA, 21 nt, Artificial Sequence
  Guide RNA
cauacacacacauauaggcau

SEQ ID NO: 23254 - RNA, 21 nt, Artificial Sequence
  Guide RNA
ccuauauguguguguaugagu

SEQ ID NO: 23255 - RNA, 21 nt, Artificial Sequence
  Guide RNA
ccuauaugugugugugugagu

SEQ ID NO: 23256 - RNA, 21 nt, Artificial Sequence
  Guide RNA
cuauauguguguguaugaguu

SEQ ID NO: 23257 - RNA, 21 nt, Artificial Sequence
  Guide RNA
cuauaugugugugugugaguu

SEQ ID NO: 23258 - RNA, 21 nt, Artificial Sequence
  Guide RNA
cucacacacacacauauaggc

SEQ ID NO: 23259 - RNA, 21 nt, Artificial Sequence
  Guide RNA
cucauacacacacauauaggc

SEQ ID NO: 23260 - RNA, 21 nt, Artificial Sequence
  Guide RNA
gauaugccuauaugugugugu

SEQ ID NO: 23261 - RNA, 21 nt, Artificial Sequence
  Guide RNA
gccuauauguguguguaugag

SEQ ID NO: 23262 - RNA, 21 nt, Artificial Sequence
  Guide RNA
gccuauaugugugugugugag

SEQ ID NO: 23263 - RNA, 21 nt, Artificial Sequence
  Guide RNA
ggauaugccuauaugugugug

SEQ ID NO: 23264 - RNA, 21 nt, Artificial Sequence
  Guide RNA
uauaugugugugugugaguuu

SEQ ID NO: 23265 - RNA, 21 nt, Artificial Sequence
  Guide RNA
uaugccuauauguguguguau

SEQ ID NO: 23266 - RNA, 21 nt, Artificial Sequence
  Guide RNA
uaugccuauaugugugugugu

SEQ ID NO: 23267 - RNA, 21 nt, Artificial Sequence
  Guide RNA
uaugugugugugugaguuuuu

SEQ ID NO: 23268 - RNA, 21 nt, Artificial Sequence
  Guide RNA
ucacacacacacauauaggca

SEQ ID NO: 23269 - RNA, 21 nt, Artificial Sequence
  Guide RNA
ucauacacacacauauaggca

SEQ ID NO: 23270 - RNA, 21 nt, Artificial Sequence
  Guide RNA
ugccuauauguguguguauga

SEQ ID NO: 23271 - RNA, 21 nt, Artificial Sequence
  Guide RNA
ugccuauauguguguguguga

SEQ ID NO: 23272 - RNA, 21 nt, Artificial Sequence
  Guide RNA
uggauaugccuauaugugugu

SEQ ID NO: 23273 - RNA, 22 nt, Artificial Sequence
  Guide RNA
aaaaaacucacacacacacaua

SEQ ID NO: 23274 - RNA, 22 nt, Artificial Sequence
  Guide RNA
aaaaacucacacacacacauau

SEQ ID NO: 23275 - RNA, 22 nt, Artificial Sequence
  Guide RNA
aaaacucacacacacacauaua

SEQ ID NO: 23276 - RNA, 22 nt, Artificial Sequence
  Guide RNA
aaacucacacacacacauauag

SEQ ID NO: 23277 - RNA, 22 nt, Artificial Sequence
  Guide RNA
aaacucauacacacacauauag

SEQ ID NO: 23278 - RNA, 22 nt, Artificial Sequence
  Guide RNA
aacucacacacacacauauagg

SEQ ID NO: 23279 - RNA, 22 nt, Artificial Sequence
  Guide RNA
aacucauacacacacauauagg

SEQ ID NO: 23280 - RNA, 22 nt, Artificial Sequence
  Guide RNA
acacacacacauauaggcauau

SEQ ID NO: 23281 - RNA, 22 nt, Artificial Sequence
  Guide RNA
acucacacacacacauauaggc

SEQ ID NO: 23282 - RNA, 22 nt, Artificial Sequence
  Guide RNA
acucauacacacacauauaggc

SEQ ID NO: 23283 - RNA, 22 nt, Artificial Sequence
  Guide RNA
auacacacacauauaggcauau

SEQ ID NO: 23284 - RNA, 22 nt, Artificial Sequence
  Guide RNA
auaugccuauauguguguguau

SEQ ID NO: 23285 - RNA, 22 nt, Artificial Sequence
  Guide RNA
auaugccuauaugugugugugu

SEQ ID NO: 23286 - RNA, 22 nt, Artificial Sequence
  Guide RNA
auaugugugugugugaguuuuu

SEQ ID NO: 23287 - RNA, 22 nt, Artificial Sequence
  Guide RNA
augccuauauguguguguauga

SEQ ID NO: 23288 - RNA, 22 nt, Artificial Sequence
  Guide RNA
augccuauauguguguguguga

SEQ ID NO: 23289 - RNA, 22 nt, Artificial Sequence
  Guide RNA
auggauaugccuauaugugugu

SEQ ID NO: 23290 - RNA, 22 nt, Artificial Sequence
  Guide RNA
cacacacacacauauaggcaua

SEQ ID NO: 23291 - RNA, 22 nt, Artificial Sequence
  Guide RNA
cauacacacacauauaggcaua

SEQ ID NO: 23292 - RNA, 22 nt, Artificial Sequence
  Guide RNA
cauggauaugccuauaugugug

SEQ ID NO: 23293 - RNA, 22 nt, Artificial Sequence
  Guide RNA
ccuauauguguguguaugaguu

SEQ ID NO: 23294 - RNA, 22 nt, Artificial Sequence
  Guide RNA
ccuauaugugugugugugaguu

SEQ ID NO: 23295 - RNA, 22 nt, Artificial Sequence
  Guide RNA
cuauauguguguguaugaguuu

SEQ ID NO: 23296 - RNA, 22 nt, Artificial Sequence
  Guide RNA
cuauaugugugugugugaguuu

SEQ ID NO: 23297 - RNA, 22 nt, Artificial Sequence
  Guide RNA
cucacacacacacauauaggca

SEQ ID NO: 23298 - RNA, 22 nt, Artificial Sequence
  Guide RNA
cucauacacacacauauaggca

SEQ ID NO: 23299 - RNA, 22 nt, Artificial Sequence
  Guide RNA
gauaugccuauaugugugugua

SEQ ID NO: 23300 - RNA, 22 nt, Artificial Sequence
  Guide RNA
gauaugccuauaugugugugug

SEQ ID NO: 23301 - RNA, 22 nt, Artificial Sequence
  Guide RNA
gccuauauguguguguaugagu

SEQ ID NO: 23302 - RNA, 22 nt, Artificial Sequence
  Guide RNA
gccuauaugugugugugugagu

SEQ ID NO: 23303 - RNA, 22 nt, Artificial Sequence
  Guide RNA
ggauaugccuauaugugugugu

SEQ ID NO: 23304 - RNA, 22 nt, Artificial Sequence
  Guide RNA
uauaugugugugugugaguuuu

SEQ ID NO: 23305 - RNA, 22 nt, Artificial Sequence
  Guide RNA
uaugccuauauguguguguaug

SEQ ID NO: 23306 - RNA, 22 nt, Artificial Sequence
  Guide RNA
uaugccuauaugugugugugug

SEQ ID NO: 23307 - RNA, 22 nt, Artificial Sequence
  Guide RNA
uaugugugugugugaguuuuuu

SEQ ID NO: 23308 - RNA, 22 nt, Artificial Sequence
  Guide RNA
ucacacacacacauauaggcau

SEQ ID NO: 23309 - RNA, 22 nt, Artificial Sequence
  Guide RNA
ucauacacacacauauaggcau

SEQ ID NO: 23310 - RNA, 22 nt, Artificial Sequence
  Guide RNA
ugccuauauguguguguaugag

SEQ ID NO: 23311 - RNA, 22 nt, Artificial Sequence
  Guide RNA
ugccuauaugugugugugugag

SEQ ID NO: 23312 - RNA, 22 nt, Artificial Sequence
  Guide RNA
uggauaugccuauaugugugug

SEQ ID NO: 23313 - RNA, 20 nt, Artificial Sequence
  Guide RNA
acacacacacacacacccuc

SEQ ID NO: 23314 - RNA, 20 nt, Artificial Sequence
  Guide RNA
acacacacacacacccucua

SEQ ID NO: 23315 - RNA, 20 nt, Artificial Sequence
  Guide RNA
acacacacacacccucuaua

SEQ ID NO: 23316 - RNA, 20 nt, Artificial Sequence
  Guide RNA
acacacacacccucuauaca

SEQ ID NO: 23317 - RNA, 20 nt, Artificial Sequence
  Guide RNA
acacacacccucuauacacc

SEQ ID NO: 23318 - RNA, 20 nt, Artificial Sequence
  Guide RNA
acacacccucuauacaccac

SEQ ID NO: 23319 - RNA, 20 nt, Artificial Sequence
  Guide RNA
acacccucuauacaccacua

SEQ ID NO: 23320 - RNA, 20 nt, Artificial Sequence
  Guide RNA
acccucuauacaccacuaaa

SEQ ID NO: 23321 - RNA, 20 nt, Artificial Sequence
  Guide RNA
aggcuuuagugguguauaga

SEQ ID NO: 23322 - RNA, 20 nt, Artificial Sequence
  Guide RNA
agugguguauagagggugug

SEQ ID NO: 23323 - RNA, 20 nt, Artificial Sequence
  Guide RNA
auagagggugugugugugug

SEQ ID NO: 23324 - RNA, 20 nt, Artificial Sequence
  Guide RNA
cacacacacacacacacccu

SEQ ID NO: 23325 - RNA, 20 nt, Artificial Sequence
  Guide RNA
cacacacacacacacccucu

SEQ ID NO: 23326 - RNA, 20 nt, Artificial Sequence
  Guide RNA
cacacacacacacccucuau

SEQ ID NO: 23327 - RNA, 20 nt, Artificial Sequence
  Guide RNA
cacacacacacccucuauac

SEQ ID NO: 23328 - RNA, 20 nt, Artificial Sequence
  Guide RNA
cacacacacccucuauacac

SEQ ID NO: 23329 - RNA, 20 nt, Artificial Sequence
  Guide RNA
cacacacccucuauacacca

SEQ ID NO: 23330 - RNA, 20 nt, Artificial Sequence
  Guide RNA
cacacccucuauacaccacu

SEQ ID NO: 23331 - RNA, 20 nt, Artificial Sequence
  Guide RNA
cacccucuauacaccacuaa

SEQ ID NO: 23332 - RNA, 20 nt, Artificial Sequence
  Guide RNA
cccucuauacaccacuaaag

SEQ ID NO: 23333 - RNA, 20 nt, Artificial Sequence
  Guide RNA
cuuuagugguguauagaggg

SEQ ID NO: 23334 - RNA, 20 nt, Artificial Sequence
  Guide RNA
gaggcuuuagugguguauag

SEQ ID NO: 23335 - RNA, 20 nt, Artificial Sequence
  Guide RNA
gcuuuagugguguauagagg

SEQ ID NO: 23336 - RNA, 20 nt, Artificial Sequence
  Guide RNA
ggaggcuuuagugguguaua

SEQ ID NO: 23337 - RNA, 20 nt, Artificial Sequence
  Guide RNA
ggcuuuagugguguauagag

SEQ ID NO: 23338 - RNA, 20 nt, Artificial Sequence
  Guide RNA
gguguauagagggugugugu

SEQ ID NO: 23339 - RNA, 20 nt, Artificial Sequence
  Guide RNA
guauagagggugugugugug

SEQ ID NO: 23340 - RNA, 20 nt, Artificial Sequence
  Guide RNA
gugguguauagagggugugu

SEQ ID NO: 23341 - RNA, 20 nt, Artificial Sequence
  Guide RNA
guguauagagggugugugug

SEQ ID NO: 23342 - RNA, 20 nt, Artificial Sequence
  Guide RNA
uagugguguauagagggugu

SEQ ID NO: 23343 - RNA, 20 nt, Artificial Sequence
  Guide RNA
uauagagggugugugugugu

SEQ ID NO: 23344 - RNA, 20 nt, Artificial Sequence
  Guide RNA
ugguguauagagggugugug

SEQ ID NO: 23345 - RNA, 20 nt, Artificial Sequence
  Guide RNA
uguauagagggugugugugu

SEQ ID NO: 23346 - RNA, 20 nt, Artificial Sequence
  Guide RNA
uuagugguguauagagggug

SEQ ID NO: 23347 - RNA, 20 nt, Artificial Sequence
  Guide RNA
uuuagugguguauagagggu

SEQ ID NO: 23348 - RNA, 21 nt, Artificial Sequence
  Guide RNA
acacacacacacacacacccu

SEQ ID NO: 23349 - RNA, 21 nt, Artificial Sequence
  Guide RNA
acacacacacacacacccucu

SEQ ID NO: 23350 - RNA, 21 nt, Artificial Sequence
  Guide RNA
acacacacacacacccucuau

SEQ ID NO: 23351 - RNA, 21 nt, Artificial Sequence
  Guide RNA
acacacacacacccucuauac

SEQ ID NO: 23352 - RNA, 21 nt, Artificial Sequence
  Guide RNA
acacacacacccucuauacac

SEQ ID NO: 23353 - RNA, 21 nt, Artificial Sequence
  Guide RNA
acacacacccucuauacacca

SEQ ID NO: 23354 - RNA, 21 nt, Artificial Sequence
  Guide RNA
acacacccucuauacaccacu

SEQ ID NO: 23355 - RNA, 21 nt, Artificial Sequence
  Guide RNA
acacccucuauacaccacuaa

SEQ ID NO: 23356 - RNA, 21 nt, Artificial Sequence
  Guide RNA
acccucuauacaccacuaaag

SEQ ID NO: 23357 - RNA, 21 nt, Artificial Sequence
  Guide RNA
aggcuuuagugguguauagag

SEQ ID NO: 23358 - RNA, 21 nt, Artificial Sequence
  Guide RNA
agugguguauagagggugugu

SEQ ID NO: 23359 - RNA, 21 nt, Artificial Sequence
  Guide RNA
auagagggugugugugugugu

SEQ ID NO: 23360 - RNA, 21 nt, Artificial Sequence
  Guide RNA
cacacacacacacacacccuc

SEQ ID NO: 23361 - RNA, 21 nt, Artificial Sequence
  Guide RNA
cacacacacacacacccucua

SEQ ID NO: 23362 - RNA, 21 nt, Artificial Sequence
  Guide RNA
cacacacacacacccucuaua

SEQ ID NO: 23363 - RNA, 21 nt, Artificial Sequence
  Guide RNA
cacacacacacccucuauaca

SEQ ID NO: 23364 - RNA, 21 nt, Artificial Sequence
  Guide RNA
cacacacacccucuauacacc

SEQ ID NO: 23365 - RNA, 21 nt, Artificial Sequence
  Guide RNA
cacacacccucuauacaccac

SEQ ID NO: 23366 - RNA, 21 nt, Artificial Sequence
  Guide RNA
cacacccucuauacaccacua

SEQ ID NO: 23367 - RNA, 21 nt, Artificial Sequence
  Guide RNA
cacccucuauacaccacuaaa

SEQ ID NO: 23368 - RNA, 21 nt, Artificial Sequence
  Guide RNA
cccucuauacaccacuaaagc

SEQ ID NO: 23369 - RNA, 21 nt, Artificial Sequence
  Guide RNA
cuuuagugguguauagagggu

SEQ ID NO: 23370 - RNA, 21 nt, Artificial Sequence
  Guide RNA
gaggcuuuagugguguauaga

SEQ ID NO: 23371 - RNA, 21 nt, Artificial Sequence
  Guide RNA
gcuuuagugguguauagaggg

SEQ ID NO: 23372 - RNA, 21 nt, Artificial Sequence
  Guide RNA
ggaggcuuuagugguguauag

SEQ ID NO: 23373 - RNA, 21 nt, Artificial Sequence
  Guide RNA
ggcuuuagugguguauagagg

SEQ ID NO: 23374 - RNA, 21 nt, Artificial Sequence
  Guide RNA
gggaggcuuuagugguguaua

SEQ ID NO: 23375 - RNA, 21 nt, Artificial Sequence
  Guide RNA
gguguauagagggugugugug

SEQ ID NO: 23376 - RNA, 21 nt, Artificial Sequence
  Guide RNA
guauagagggugugugugugu

SEQ ID NO: 23377 - RNA, 21 nt, Artificial Sequence
  Guide RNA
gugguguauagagggugugug

SEQ ID NO: 23378 - RNA, 21 nt, Artificial Sequence
  Guide RNA
guguauagagggugugugugu

SEQ ID NO: 23379 - RNA, 21 nt, Artificial Sequence
  Guide RNA
uagugguguauagagggugug

SEQ ID NO: 23380 - RNA, 21 nt, Artificial Sequence
  Guide RNA
uauagagggugugugugugug

SEQ ID NO: 23381 - RNA, 21 nt, Artificial Sequence
  Guide RNA
ugguguauagagggugugugu

SEQ ID NO: 23382 - RNA, 21 nt, Artificial Sequence
  Guide RNA
uguauagagggugugugugug

SEQ ID NO: 23383 - RNA, 21 nt, Artificial Sequence
  Guide RNA
uuagugguguauagagggugu

SEQ ID NO: 23384 - RNA, 21 nt, Artificial Sequence
  Guide RNA
uuuagugguguauagagggug

SEQ ID NO: 23385 - RNA, 22 nt, Artificial Sequence
  Guide RNA
acacacacacacacacacccuc

SEQ ID NO: 23386 - RNA, 22 nt, Artificial Sequence
  Guide RNA
acacacacacacacacccucua

SEQ ID NO: 23387 - RNA, 22 nt, Artificial Sequence
  Guide RNA
acacacacacacacccucuaua

SEQ ID NO: 23388 - RNA, 22 nt, Artificial Sequence
  Guide RNA
acacacacacacccucuauaca

SEQ ID NO: 23389 - RNA, 22 nt, Artificial Sequence
  Guide RNA
acacacacacccucuauacacc

SEQ ID NO: 23390 - RNA, 22 nt, Artificial Sequence
  Guide RNA
acacacacccucuauacaccac

SEQ ID NO: 23391 - RNA, 22 nt, Artificial Sequence
  Guide RNA
acacacccucuauacaccacua

SEQ ID NO: 23392 - RNA, 22 nt, Artificial Sequence
  Guide RNA
acacccucuauacaccacuaaa

SEQ ID NO: 23393 - RNA, 22 nt, Artificial Sequence
  Guide RNA
acccucuauacaccacuaaagc

SEQ ID NO: 23394 - RNA, 22 nt, Artificial Sequence
  Guide RNA
aggcuuuagugguguauagagg

SEQ ID NO: 23395 - RNA, 22 nt, Artificial Sequence
  Guide RNA
agugguguauagagggugugug

SEQ ID NO: 23396 - RNA, 22 nt, Artificial Sequence
  Guide RNA
auagagggugugugugugugug

SEQ ID NO: 23397 - RNA, 22 nt, Artificial Sequence
  Guide RNA
cacacacacacacacacacccu

SEQ ID NO: 23398 - RNA, 22 nt, Artificial Sequence
  Guide RNA
cacacacacacacacacccucu

SEQ ID NO: 23399 - RNA, 22 nt, Artificial Sequence
  Guide RNA
cacacacacacacacccucuau

SEQ ID NO: 23400 - RNA, 22 nt, Artificial Sequence
  Guide RNA
cacacacacacacccucuauac

SEQ ID NO: 23401 - RNA, 22 nt, Artificial Sequence
  Guide RNA
cacacacacacccucuauacac

SEQ ID NO: 23402 - RNA, 22 nt, Artificial Sequence
  Guide RNA
cacacacacccucuauacacca

SEQ ID NO: 23403 - RNA, 22 nt, Artificial Sequence
  Guide RNA
cacacacccucuauacaccacu

SEQ ID NO: 23404 - RNA, 22 nt, Artificial Sequence
  Guide RNA
cacacccucuauacaccacuaa

SEQ ID NO: 23405 - RNA, 22 nt, Artificial Sequence
  Guide RNA
cacccucuauacaccacuaaag

SEQ ID NO: 23406 - RNA, 22 nt, Artificial Sequence
  Guide RNA
cccucuauacaccacuaaagcc

SEQ ID NO: 23407 - RNA, 22 nt, Artificial Sequence
  Guide RNA
cuuuagugguguauagagggug

SEQ ID NO: 23408 - RNA, 22 nt, Artificial Sequence
  Guide RNA
gaggcuuuagugguguauagag

SEQ ID NO: 23409 - RNA, 22 nt, Artificial Sequence
  Guide RNA
gcuuuagugguguauagagggu

SEQ ID NO: 23410 - RNA, 22 nt, Artificial Sequence
  Guide RNA
ggaggcuuuagugguguauaga

SEQ ID NO: 23411 - RNA, 22 nt, Artificial Sequence
  Guide RNA
ggcuuuagugguguauagaggg

SEQ ID NO: 23412 - RNA, 22 nt, Artificial Sequence
  Guide RNA
gggaggcuuuagugguguauag

SEQ ID NO: 23413 - RNA, 22 nt, Artificial Sequence
  Guide RNA
gguguauagagggugugugugu

SEQ ID NO: 23414 - RNA, 22 nt, Artificial Sequence
  Guide RNA
guauagagggugugugugugug

SEQ ID NO: 23415 - RNA, 22 nt, Artificial Sequence
  Guide RNA
gugguguauagagggugugugu

SEQ ID NO: 23416 - RNA, 22 nt, Artificial Sequence
  Guide RNA
guguauagagggugugugugug

SEQ ID NO: 23417 - RNA, 22 nt, Artificial Sequence
  Guide RNA
uagugguguauagagggugugu

SEQ ID NO: 23418 - RNA, 22 nt, Artificial Sequence
  Guide RNA
uauagagggugugugugugugu

SEQ ID NO: 23419 - RNA, 22 nt, Artificial Sequence
  Guide RNA
ugggaggcuuuagugguguaua

SEQ ID NO: 23420 - RNA, 22 nt, Artificial Sequence
  Guide RNA
ugguguauagagggugugugug

SEQ ID NO: 23421 - RNA, 22 nt, Artificial Sequence
  Guide RNA
uguauagagggugugugugugu

SEQ ID NO: 23422 - RNA, 22 nt, Artificial Sequence
  Guide RNA
uuagugguguauagagggugug

SEQ ID NO: 23423 - RNA, 22 nt, Artificial Sequence
  Guide RNA
uuuagugguguauagagggugu

SEQ ID NO: 23424 - RNA, 20 nt, Artificial Sequence
  Guide RNA
aggacguuuuuaaauuagca

SEQ ID NO: 23425 - RNA, 20 nt, Artificial Sequence
  Guide RNA
caggacguuuuuaaauuagc

SEQ ID NO: 23426 - RNA, 20 nt, Artificial Sequence
  Guide RNA
ggacguuuuuaaauuagcaa

SEQ ID NO: 23427 - RNA, 20 nt, Artificial Sequence
  Guide RNA
ucaggacguuuuuaaauuag

SEQ ID NO: 23428 - RNA, 20 nt, Artificial Sequence
  Guide RNA
uugcuaauuuaaaaacgucc

SEQ ID NO: 23429 - RNA, 21 nt, Artificial Sequence
  Guide RNA
caggacguuuuuaaauuagca

SEQ ID NO: 23430 - RNA, 21 nt, Artificial Sequence
  Guide RNA
ucaggacguuuuuaaauuagc

SEQ ID NO: 23431 - RNA, 22 nt, Artificial Sequence
  Guide RNA
caggacguuuuuaaauuagcaa

SEQ ID NO: 23432 - RNA, 22 nt, Artificial Sequence
  Guide RNA
ucaggacguuuuuaaauuagca

SEQ ID NO: 23433 - RNA, 22 nt, Artificial Sequence
  Guide RNA
uucaggacguuuuuaaauuagc

SEQ ID NO: 23434 - RNA, 22 nt, Artificial Sequence
  Guide RNA
uugcuaauuuaaaaacguccug

SEQ ID NO: 23435 - RNA, 20 nt, Artificial Sequence
  Guide RNA
aaaaggggggcuggggaggg

SEQ ID NO: 23436 - RNA, 20 nt, Artificial Sequence
  Guide RNA
aaagccuuaccaucugcucu

SEQ ID NO: 23437 - RNA, 20 nt, Artificial Sequence
  Guide RNA
aaagccuuaccaucugcugu

SEQ ID NO: 23438 - RNA, 20 nt, Artificial Sequence
  Guide RNA
aaaggggggcuggggaggga

SEQ ID NO: 23439 - RNA, 20 nt, Artificial Sequence
  Guide RNA
aagccuuaccaucugcucuc

SEQ ID NO: 23440 - RNA, 20 nt, Artificial Sequence
  Guide RNA
aagccuuaccaucugcuguc

SEQ ID NO: 23441 - RNA, 20 nt, Artificial Sequence
  Guide RNA
aaggggggcuggggagggag

SEQ ID NO: 23442 - RNA, 20 nt, Artificial Sequence
  Guide RNA
acaaagccuuaccaucugcu

SEQ ID NO: 23443 - RNA, 20 nt, Artificial Sequence
  Guide RNA
acagcagaugguaaggcuuu

SEQ ID NO: 23444 - RNA, 20 nt, Artificial Sequence
  Guide RNA
accaucugcucucucccucc

SEQ ID NO: 23445 - RNA, 20 nt, Artificial Sequence
  Guide RNA
accaucugcugucucccucc

SEQ ID NO: 23446 - RNA, 20 nt, Artificial Sequence
  Guide RNA
agacagcagaugguaaggcu

SEQ ID NO: 23447 - RNA, 20 nt, Artificial Sequence
  Guide RNA
agagagcagaugguaaggcu

SEQ ID NO: 23448 - RNA, 20 nt, Artificial Sequence
  Guide RNA
agagcagaugguaaggcuuu

SEQ ID NO: 23449 - RNA, 20 nt, Artificial Sequence
  Guide RNA
agccuuaccaucugcucucu

SEQ ID NO: 23450 - RNA, 20 nt, Artificial Sequence
  Guide RNA
agccuuaccaucugcugucu

SEQ ID NO: 23451 - RNA, 20 nt, Artificial Sequence
  Guide RNA
agggagacagcagaugguaa

SEQ ID NO: 23452 - RNA, 20 nt, Artificial Sequence
  Guide RNA
agggagagagcagaugguaa

SEQ ID NO: 23453 - RNA, 20 nt, Artificial Sequence
  Guide RNA
aggggggcuggggagggaga

SEQ ID NO: 23454 - RNA, 20 nt, Artificial Sequence
  Guide RNA
aucacaaagccuuaccaucu

SEQ ID NO: 23455 - RNA, 20 nt, Artificial Sequence
  Guide RNA
aucugcucucucccucccca

SEQ ID NO: 23456 - RNA, 20 nt, Artificial Sequence
  Guide RNA
aucugcugucucccucccca

SEQ ID NO: 23457 - RNA, 20 nt, Artificial Sequence
  Guide RNA
caaagccuuaccaucugcuc

SEQ ID NO: 23458 - RNA, 20 nt, Artificial Sequence
  Guide RNA
caaagccuuaccaucugcug

SEQ ID NO: 23459 - RNA, 20 nt, Artificial Sequence
  Guide RNA
cacaaagccuuaccaucugc

SEQ ID NO: 23460 - RNA, 20 nt, Artificial Sequence
  Guide RNA
caucugcucucucccucccc

SEQ ID NO: 23461 - RNA, 20 nt, Artificial Sequence
  Guide RNA
caucugcugucucccucccc

SEQ ID NO: 23462 - RNA, 20 nt, Artificial Sequence
  Guide RNA
ccaucugcucucucccuccc

SEQ ID NO: 23463 - RNA, 20 nt, Artificial Sequence
  Guide RNA
ccaucugcugucucccuccc

SEQ ID NO: 23464 - RNA, 20 nt, Artificial Sequence
  Guide RNA
ccuuaccaucugcucucucc

SEQ ID NO: 23465 - RNA, 20 nt, Artificial Sequence
  Guide RNA
ccuuaccaucugcugucucc

SEQ ID NO: 23466 - RNA, 20 nt, Artificial Sequence
  Guide RNA
cucucucccuccccagcccc

SEQ ID NO: 23467 - RNA, 20 nt, Artificial Sequence
  Guide RNA
cugcucucucccuccccagc

SEQ ID NO: 23468 - RNA, 20 nt, Artificial Sequence
  Guide RNA
cugcugucucccuccccagc

SEQ ID NO: 23469 - RNA, 20 nt, Artificial Sequence
  Guide RNA
cuggggagggagacagcaga

SEQ ID NO: 23470 - RNA, 20 nt, Artificial Sequence
  Guide RNA
cuggggagggagagagcaga

SEQ ID NO: 23471 - RNA, 20 nt, Artificial Sequence
  Guide RNA
cugucucccuccccagcccc

SEQ ID NO: 23472 - RNA, 20 nt, Artificial Sequence
  Guide RNA
cuuaccaucugcucucuccc

SEQ ID NO: 23473 - RNA, 20 nt, Artificial Sequence
  Guide RNA
cuuaccaucugcugucuccc

SEQ ID NO: 23474 - RNA, 20 nt, Artificial Sequence
  Guide RNA
gacagcagaugguaaggcuu

SEQ ID NO: 23475 - RNA, 20 nt, Artificial Sequence
  Guide RNA
gagacagcagaugguaaggc

SEQ ID NO: 23476 - RNA, 20 nt, Artificial Sequence
  Guide RNA
gagagagcagaugguaaggc

SEQ ID NO: 23477 - RNA, 20 nt, Artificial Sequence
  Guide RNA
gagagcagaugguaaggcuu

SEQ ID NO: 23478 - RNA, 20 nt, Artificial Sequence
  Guide RNA
gagggagacagcagauggua

SEQ ID NO: 23479 - RNA, 20 nt, Artificial Sequence
  Guide RNA
gagggagagagcagauggua

SEQ ID NO: 23480 - RNA, 20 nt, Artificial Sequence
  Guide RNA
gccuuaccaucugcucucuc

SEQ ID NO: 23481 - RNA, 20 nt, Artificial Sequence
  Guide RNA
gccuuaccaucugcugucuc

SEQ ID NO: 23482 - RNA, 20 nt, Artificial Sequence
  Guide RNA
gcucucucccuccccagccc

SEQ ID NO: 23483 - RNA, 20 nt, Artificial Sequence
  Guide RNA
gcuggggagggagacagcag

SEQ ID NO: 23484 - RNA, 20 nt, Artificial Sequence
  Guide RNA
gcuggggagggagagagcag

SEQ ID NO: 23485 - RNA, 20 nt, Artificial Sequence
  Guide RNA
gcugucucccuccccagccc

SEQ ID NO: 23486 - RNA, 20 nt, Artificial Sequence
  Guide RNA
ggagacagcagaugguaagg

SEQ ID NO: 23487 - RNA, 20 nt, Artificial Sequence
  Guide RNA
ggagagagcagaugguaagg

SEQ ID NO: 23488 - RNA, 20 nt, Artificial Sequence
  Guide RNA
ggagggagacagcagauggu

SEQ ID NO: 23489 - RNA, 20 nt, Artificial Sequence
  Guide RNA
ggagggagagagcagauggu

SEQ ID NO: 23490 - RNA, 20 nt, Artificial Sequence
  Guide RNA
ggcuggggagggagacagca

SEQ ID NO: 23491 - RNA, 20 nt, Artificial Sequence
  Guide RNA
ggcuggggagggagagagca

SEQ ID NO: 23492 - RNA, 20 nt, Artificial Sequence
  Guide RNA
gggagacagcagaugguaag

SEQ ID NO: 23493 - RNA, 20 nt, Artificial Sequence
  Guide RNA
gggagagagcagaugguaag

SEQ ID NO: 23494 - RNA, 20 nt, Artificial Sequence
  Guide RNA
gggagggagacagcagaugg

SEQ ID NO: 23495 - RNA, 20 nt, Artificial Sequence
  Guide RNA
gggagggagagagcagaugg

SEQ ID NO: 23496 - RNA, 20 nt, Artificial Sequence
  Guide RNA
gggcuggggagggagacagc

SEQ ID NO: 23497 - RNA, 20 nt, Artificial Sequence
  Guide RNA
gggcuggggagggagagagc

SEQ ID NO: 23498 - RNA, 20 nt, Artificial Sequence
  Guide RNA
ggggagggagacagcagaug

SEQ ID NO: 23499 - RNA, 20 nt, Artificial Sequence
  Guide RNA
ggggagggagagagcagaug

SEQ ID NO: 23500 - RNA, 20 nt, Artificial Sequence
  Guide RNA
ggggcuggggagggagacag

SEQ ID NO: 23501 - RNA, 20 nt, Artificial Sequence
  Guide RNA
ggggcuggggagggagagag

SEQ ID NO: 23502 - RNA, 20 nt, Artificial Sequence
  Guide RNA
gggggcuggggagggagaca

SEQ ID NO: 23503 - RNA, 20 nt, Artificial Sequence
  Guide RNA
gggggcuggggagggagaga

SEQ ID NO: 23504 - RNA, 20 nt, Artificial Sequence
  Guide RNA
ggggggcuggggagggagac

SEQ ID NO: 23505 - RNA, 20 nt, Artificial Sequence
  Guide RNA
ggggggcuggggagggagag

SEQ ID NO: 23506 - RNA, 20 nt, Artificial Sequence
  Guide RNA
uaccaucugcucucucccuc

SEQ ID NO: 23507 - RNA, 20 nt, Artificial Sequence
  Guide RNA
uaccaucugcugucucccuc

SEQ ID NO: 23508 - RNA, 20 nt, Artificial Sequence
  Guide RNA
ucacaaagccuuaccaucug

SEQ ID NO: 23509 - RNA, 20 nt, Artificial Sequence
  Guide RNA
ucucucccuccccagccccc

SEQ ID NO: 23510 - RNA, 20 nt, Artificial Sequence
  Guide RNA
ucugcucucucccuccccag

SEQ ID NO: 23511 - RNA, 20 nt, Artificial Sequence
  Guide RNA
ucugcugucucccuccccag

SEQ ID NO: 23512 - RNA, 20 nt, Artificial Sequence
  Guide RNA
ugcucucucccuccccagcc

SEQ ID NO: 23513 - RNA, 20 nt, Artificial Sequence
  Guide RNA
ugcugucucccuccccagcc

SEQ ID NO: 23514 - RNA, 20 nt, Artificial Sequence
  Guide RNA
uggggagggagacagcagau

SEQ ID NO: 23515 - RNA, 20 nt, Artificial Sequence
  Guide RNA
uggggagggagagagcagau

SEQ ID NO: 23516 - RNA, 20 nt, Artificial Sequence
  Guide RNA
ugucucccuccccagccccc

SEQ ID NO: 23517 - RNA, 20 nt, Artificial Sequence
  Guide RNA
uuaccaucugcucucucccu

SEQ ID NO: 23518 - RNA, 20 nt, Artificial Sequence
  Guide RNA
uuaccaucugcugucucccu

SEQ ID NO: 23519 - RNA, 21 nt, Artificial Sequence
  Guide RNA
aaaaggggggcuggggaggga

SEQ ID NO: 23520 - RNA, 21 nt, Artificial Sequence
  Guide RNA
aaagccuuaccaucugcucuc

SEQ ID NO: 23521 - RNA, 21 nt, Artificial Sequence
  Guide RNA
aaagccuuaccaucugcuguc

SEQ ID NO: 23522 - RNA, 21 nt, Artificial Sequence
  Guide RNA
aaaggggggcuggggagggag

SEQ ID NO: 23523 - RNA, 21 nt, Artificial Sequence
  Guide RNA
aagccuuaccaucugcucucu

SEQ ID NO: 23524 - RNA, 21 nt, Artificial Sequence
  Guide RNA
aagccuuaccaucugcugucu

SEQ ID NO: 23525 - RNA, 21 nt, Artificial Sequence
  Guide RNA
aaggggggcuggggagggaga

SEQ ID NO: 23526 - RNA, 21 nt, Artificial Sequence
  Guide RNA
acaaagccuuaccaucugcuc

SEQ ID NO: 23527 - RNA, 21 nt, Artificial Sequence
  Guide RNA
acaaagccuuaccaucugcug

SEQ ID NO: 23528 - RNA, 21 nt, Artificial Sequence
  Guide RNA
acagcagaugguaaggcuuug

SEQ ID NO: 23529 - RNA, 21 nt, Artificial Sequence
  Guide RNA
accaucugcucucucccuccc

SEQ ID NO: 23530 - RNA, 21 nt, Artificial Sequence
  Guide RNA
accaucugcugucucccuccc

SEQ ID NO: 23531 - RNA, 21 nt, Artificial Sequence
  Guide RNA
agacagcagaugguaaggcuu

SEQ ID NO: 23532 - RNA, 21 nt, Artificial Sequence
  Guide RNA
agagagcagaugguaaggcuu

SEQ ID NO: 23533 - RNA, 21 nt, Artificial Sequence
  Guide RNA
agagcagaugguaaggcuuug

SEQ ID NO: 23534 - RNA, 21 nt, Artificial Sequence
  Guide RNA
agccuuaccaucugcucucuc

SEQ ID NO: 23535 - RNA, 21 nt, Artificial Sequence
  Guide RNA
agccuuaccaucugcugucuc

SEQ ID NO: 23536 - RNA, 21 nt, Artificial Sequence
  Guide RNA
agggagacagcagaugguaag

SEQ ID NO: 23537 - RNA, 21 nt, Artificial Sequence
  Guide RNA
agggagagagcagaugguaag

SEQ ID NO: 23538 - RNA, 21 nt, Artificial Sequence
  Guide RNA
aggggggcuggggagggagac

SEQ ID NO: 23539 - RNA, 21 nt, Artificial Sequence
  Guide RNA
aggggggcuggggagggagag

SEQ ID NO: 23540 - RNA, 21 nt, Artificial Sequence
  Guide RNA
aucacaaagccuuaccaucug

SEQ ID NO: 23541 - RNA, 21 nt, Artificial Sequence
  Guide RNA
aucugcucucucccuccccag

SEQ ID NO: 23542 - RNA, 21 nt, Artificial Sequence
  Guide RNA
aucugcugucucccuccccag

SEQ ID NO: 23543 - RNA, 21 nt, Artificial Sequence
  Guide RNA
caaagccuuaccaucugcucu

SEQ ID NO: 23544 - RNA, 21 nt, Artificial Sequence
  Guide RNA
caaagccuuaccaucugcugu

SEQ ID NO: 23545 - RNA, 21 nt, Artificial Sequence
  Guide RNA
cacaaagccuuaccaucugcu

SEQ ID NO: 23546 - RNA, 21 nt, Artificial Sequence
  Guide RNA
caucacaaagccuuaccaucu

SEQ ID NO: 23547 - RNA, 21 nt, Artificial Sequence
  Guide RNA
caucugcucucucccucccca

SEQ ID NO: 23548 - RNA, 21 nt, Artificial Sequence
  Guide RNA
caucugcugucucccucccca

SEQ ID NO: 23549 - RNA, 21 nt, Artificial Sequence
  Guide RNA
ccaucugcucucucccucccc

SEQ ID NO: 23550 - RNA, 21 nt, Artificial Sequence
  Guide RNA
ccaucugcugucucccucccc

SEQ ID NO: 23551 - RNA, 21 nt, Artificial Sequence
  Guide RNA
ccuuaccaucugcucucuccc

SEQ ID NO: 23552 - RNA, 21 nt, Artificial Sequence
  Guide RNA
ccuuaccaucugcugucuccc

SEQ ID NO: 23553 - RNA, 21 nt, Artificial Sequence
  Guide RNA
cucucucccuccccagccccc

SEQ ID NO: 23554 - RNA, 21 nt, Artificial Sequence
  Guide RNA
cugcucucucccuccccagcc

SEQ ID NO: 23555 - RNA, 21 nt, Artificial Sequence
  Guide RNA
cugcugucucccuccccagcc

SEQ ID NO: 23556 - RNA, 21 nt, Artificial Sequence
  Guide RNA
cuggggagggagacagcagau

SEQ ID NO: 23557 - RNA, 21 nt, Artificial Sequence
  Guide RNA
cuggggagggagagagcagau

SEQ ID NO: 23558 - RNA, 21 nt, Artificial Sequence
  Guide RNA
cugucucccuccccagccccc

SEQ ID NO: 23559 - RNA, 21 nt, Artificial Sequence
  Guide RNA
cuuaccaucugcucucucccu

SEQ ID NO: 23560 - RNA, 21 nt, Artificial Sequence
  Guide RNA
cuuaccaucugcugucucccu

SEQ ID NO: 23561 - RNA, 21 nt, Artificial Sequence
  Guide RNA
gaaaaggggggcuggggaggg

SEQ ID NO: 23562 - RNA, 21 nt, Artificial Sequence
  Guide RNA
gacagcagaugguaaggcuuu

SEQ ID NO: 23563 - RNA, 21 nt, Artificial Sequence
  Guide RNA
gagacagcagaugguaaggcu

SEQ ID NO: 23564 - RNA, 21 nt, Artificial Sequence
  Guide RNA
gagagagcagaugguaaggcu

SEQ ID NO: 23565 - RNA, 21 nt, Artificial Sequence
  Guide RNA
gagagcagaugguaaggcuuu

SEQ ID NO: 23566 - RNA, 21 nt, Artificial Sequence
  Guide RNA
gagggagacagcagaugguaa

SEQ ID NO: 23567 - RNA, 21 nt, Artificial Sequence
  Guide RNA
gagggagagagcagaugguaa

SEQ ID NO: 23568 - RNA, 21 nt, Artificial Sequence
  Guide RNA
gccuuaccaucugcucucucc

SEQ ID NO: 23569 - RNA, 21 nt, Artificial Sequence
  Guide RNA
gccuuaccaucugcugucucc

SEQ ID NO: 23570 - RNA, 21 nt, Artificial Sequence
  Guide RNA
gcucucucccuccccagcccc

SEQ ID NO: 23571 - RNA, 21 nt, Artificial Sequence
  Guide RNA
gcuggggagggagacagcaga

SEQ ID NO: 23572 - RNA, 21 nt, Artificial Sequence
  Guide RNA
gcuggggagggagagagcaga

SEQ ID NO: 23573 - RNA, 21 nt, Artificial Sequence
  Guide RNA
gcugucucccuccccagcccc

SEQ ID NO: 23574 - RNA, 21 nt, Artificial Sequence
  Guide RNA
ggagacagcagaugguaaggc

SEQ ID NO: 23575 - RNA, 21 nt, Artificial Sequence
  Guide RNA
ggagagagcagaugguaaggc

SEQ ID NO: 23576 - RNA, 21 nt, Artificial Sequence
  Guide RNA
ggagggagacagcagauggua

SEQ ID NO: 23577 - RNA, 21 nt, Artificial Sequence
  Guide RNA
ggagggagagagcagauggua

SEQ ID NO: 23578 - RNA, 21 nt, Artificial Sequence
  Guide RNA
ggcuggggagggagacagcag

SEQ ID NO: 23579 - RNA, 21 nt, Artificial Sequence
  Guide RNA
ggcuggggagggagagagcag

SEQ ID NO: 23580 - RNA, 21 nt, Artificial Sequence
  Guide RNA
gggagacagcagaugguaagg

SEQ ID NO: 23581 - RNA, 21 nt, Artificial Sequence
  Guide RNA
gggagagagcagaugguaagg

SEQ ID NO: 23582 - RNA, 21 nt, Artificial Sequence
  Guide RNA
gggagggagacagcagauggu

SEQ ID NO: 23583 - RNA, 21 nt, Artificial Sequence
  Guide RNA
gggagggagagagcagauggu

SEQ ID NO: 23584 - RNA, 21 nt, Artificial Sequence
  Guide RNA
gggcuggggagggagacagca

SEQ ID NO: 23585 - RNA, 21 nt, Artificial Sequence
  Guide RNA
gggcuggggagggagagagca

SEQ ID NO: 23586 - RNA, 21 nt, Artificial Sequence
  Guide RNA
ggggagggagacagcagaugg

SEQ ID NO: 23587 - RNA, 21 nt, Artificial Sequence
  Guide RNA
ggggagggagagagcagaugg

SEQ ID NO: 23588 - RNA, 21 nt, Artificial Sequence
  Guide RNA
ggggcuggggagggagacagc

SEQ ID NO: 23589 - RNA, 21 nt, Artificial Sequence
  Guide RNA
ggggcuggggagggagagagc

SEQ ID NO: 23590 - RNA, 21 nt, Artificial Sequence
  Guide RNA
gggggcuggggagggagacag

SEQ ID NO: 23591 - RNA, 21 nt, Artificial Sequence
  Guide RNA
gggggcuggggagggagagag

SEQ ID NO: 23592 - RNA, 21 nt, Artificial Sequence
  Guide RNA
ggggggcuggggagggagaca

SEQ ID NO: 23593 - RNA, 21 nt, Artificial Sequence
  Guide RNA
ggggggcuggggagggagaga

SEQ ID NO: 23594 - RNA, 21 nt, Artificial Sequence
  Guide RNA
uaccaucugcucucucccucc

SEQ ID NO: 23595 - RNA, 21 nt, Artificial Sequence
  Guide RNA
uaccaucugcugucucccucc

SEQ ID NO: 23596 - RNA, 21 nt, Artificial Sequence
  Guide RNA
ucacaaagccuuaccaucugc

SEQ ID NO: 23597 - RNA, 21 nt, Artificial Sequence
  Guide RNA
ucucucccuccccagcccccc

SEQ ID NO: 23598 - RNA, 21 nt, Artificial Sequence
  Guide RNA
ucugcucucucccuccccagc

SEQ ID NO: 23599 - RNA, 21 nt, Artificial Sequence
  Guide RNA
ucugcugucucccuccccagc

SEQ ID NO: 23600 - RNA, 21 nt, Artificial Sequence
  Guide RNA
ugcucucucccuccccagccc

SEQ ID NO: 23601 - RNA, 21 nt, Artificial Sequence
  Guide RNA
ugcugucucccuccccagccc

SEQ ID NO: 23602 - RNA, 21 nt, Artificial Sequence
  Guide RNA
uggggagggagacagcagaug

SEQ ID NO: 23603 - RNA, 21 nt, Artificial Sequence
  Guide RNA
uggggagggagagagcagaug

SEQ ID NO: 23604 - RNA, 21 nt, Artificial Sequence
  Guide RNA
ugucucccuccccagcccccc

SEQ ID NO: 23605 - RNA, 21 nt, Artificial Sequence
  Guide RNA
uuaccaucugcucucucccuc

SEQ ID NO: 23606 - RNA, 21 nt, Artificial Sequence
  Guide RNA
uuaccaucugcugucucccuc

SEQ ID NO: 23607 - RNA, 22 nt, Artificial Sequence
  Guide RNA
aaaaggggggcuggggagggag

SEQ ID NO: 23608 - RNA, 22 nt, Artificial Sequence
  Guide RNA
aaagccuuaccaucugcucucu

SEQ ID NO: 23609 - RNA, 22 nt, Artificial Sequence
  Guide RNA
aaagccuuaccaucugcugucu

SEQ ID NO: 23610 - RNA, 22 nt, Artificial Sequence
  Guide RNA
aaaggggggcuggggagggaga

SEQ ID NO: 23611 - RNA, 22 nt, Artificial Sequence
  Guide RNA
aagccuuaccaucugcucucuc

SEQ ID NO: 23612 - RNA, 22 nt, Artificial Sequence
  Guide RNA
aagccuuaccaucugcugucuc

SEQ ID NO: 23613 - RNA, 22 nt, Artificial Sequence
  Guide RNA
aaggggggcuggggagggagac

SEQ ID NO: 23614 - RNA, 22 nt, Artificial Sequence
  Guide RNA
aaggggggcuggggagggagag

SEQ ID NO: 23615 - RNA, 22 nt, Artificial Sequence
  Guide RNA
acaaagccuuaccaucugcucu

SEQ ID NO: 23616 - RNA, 22 nt, Artificial Sequence
  Guide RNA
acaaagccuuaccaucugcugu

SEQ ID NO: 23617 - RNA, 22 nt, Artificial Sequence
  Guide RNA
acagcagaugguaaggcuuugu

SEQ ID NO: 23618 - RNA, 22 nt, Artificial Sequence
  Guide RNA
acaucacaaagccuuaccaucu

SEQ ID NO: 23619 - RNA, 22 nt, Artificial Sequence
  Guide RNA
accaucugcucucucccucccc

SEQ ID NO: 23620 - RNA, 22 nt, Artificial Sequence
  Guide RNA
accaucugcugucucccucccc

SEQ ID NO: 23621 - RNA, 22 nt, Artificial Sequence
  Guide RNA
agacagcagaugguaaggcuuu

SEQ ID NO: 23622 - RNA, 22 nt, Artificial Sequence
  Guide RNA
agagagcagaugguaaggcuuu

SEQ ID NO: 23623 - RNA, 22 nt, Artificial Sequence
  Guide RNA
agagcagaugguaaggcuuugu

SEQ ID NO: 23624 - RNA, 22 nt, Artificial Sequence
  Guide RNA
agccuuaccaucugcucucucc

SEQ ID NO: 23625 - RNA, 22 nt, Artificial Sequence
  Guide RNA
agccuuaccaucugcugucucc

SEQ ID NO: 23626 - RNA, 22 nt, Artificial Sequence
  Guide RNA
agggagacagcagaugguaagg

SEQ ID NO: 23627 - RNA, 22 nt, Artificial Sequence
  Guide RNA
agggagagagcagaugguaagg

SEQ ID NO: 23628 - RNA, 22 nt, Artificial Sequence
  Guide RNA
aggggggcuggggagggagaca

SEQ ID NO: 23629 - RNA, 22 nt, Artificial Sequence
  Guide RNA
aggggggcuggggagggagaga

SEQ ID NO: 23630 - RNA, 22 nt, Artificial Sequence
  Guide RNA
aucacaaagccuuaccaucugc

SEQ ID NO: 23631 - RNA, 22 nt, Artificial Sequence
  Guide RNA
aucugcucucucccuccccagc

SEQ ID NO: 23632 - RNA, 22 nt, Artificial Sequence
  Guide RNA
aucugcugucucccuccccagc

SEQ ID NO: 23633 - RNA, 22 nt, Artificial Sequence
  Guide RNA
caaagccuuaccaucugcucuc

SEQ ID NO: 23634 - RNA, 22 nt, Artificial Sequence
  Guide RNA
caaagccuuaccaucugcuguc

SEQ ID NO: 23635 - RNA, 22 nt, Artificial Sequence
  Guide RNA
cacaaagccuuaccaucugcuc

SEQ ID NO: 23636 - RNA, 22 nt, Artificial Sequence
  Guide RNA
cacaaagccuuaccaucugcug

SEQ ID NO: 23637 - RNA, 22 nt, Artificial Sequence
  Guide RNA
caucacaaagccuuaccaucug

SEQ ID NO: 23638 - RNA, 22 nt, Artificial Sequence
  Guide RNA
caucugcucucucccuccccag

SEQ ID NO: 23639 - RNA, 22 nt, Artificial Sequence
  Guide RNA
caucugcugucucccuccccag

SEQ ID NO: 23640 - RNA, 22 nt, Artificial Sequence
  Guide RNA
ccaucugcucucucccucccca

SEQ ID NO: 23641 - RNA, 22 nt, Artificial Sequence
  Guide RNA
ccaucugcugucucccucccca

SEQ ID NO: 23642 - RNA, 22 nt, Artificial Sequence
  Guide RNA
ccuuaccaucugcucucucccu

SEQ ID NO: 23643 - RNA, 22 nt, Artificial Sequence
  Guide RNA
ccuuaccaucugcugucucccu

SEQ ID NO: 23644 - RNA, 22 nt, Artificial Sequence
  Guide RNA
cucucucccuccccagcccccc

SEQ ID NO: 23645 - RNA, 22 nt, Artificial Sequence
  Guide RNA
cugcucucucccuccccagccc

SEQ ID NO: 23646 - RNA, 22 nt, Artificial Sequence
  Guide RNA
cugcugucucccuccccagccc

SEQ ID NO: 23647 - RNA, 22 nt, Artificial Sequence
  Guide RNA
cuggggagggagacagcagaug

SEQ ID NO: 23648 - RNA, 22 nt, Artificial Sequence
  Guide RNA
cuggggagggagagagcagaug

SEQ ID NO: 23649 - RNA, 22 nt, Artificial Sequence
  Guide RNA
cugucucccuccccagcccccc

SEQ ID NO: 23650 - RNA, 22 nt, Artificial Sequence
  Guide RNA
cuuaccaucugcucucucccuc

SEQ ID NO: 23651 - RNA, 22 nt, Artificial Sequence
  Guide RNA
cuuaccaucugcugucucccuc

SEQ ID NO: 23652 - RNA, 22 nt, Artificial Sequence
  Guide RNA
gaaaaggggggcuggggaggga

SEQ ID NO: 23653 - RNA, 22 nt, Artificial Sequence
  Guide RNA
gacagcagaugguaaggcuuug

SEQ ID NO: 23654 - RNA, 22 nt, Artificial Sequence
  Guide RNA
gagacagcagaugguaaggcuu

SEQ ID NO: 23655 - RNA, 22 nt, Artificial Sequence
  Guide RNA
gagagagcagaugguaaggcuu

SEQ ID NO: 23656 - RNA, 22 nt, Artificial Sequence
  Guide RNA
gagagcagaugguaaggcuuug

SEQ ID NO: 23657 - RNA, 22 nt, Artificial Sequence
  Guide RNA
gagggagacagcagaugguaag

SEQ ID NO: 23658 - RNA, 22 nt, Artificial Sequence
  Guide RNA
gagggagagagcagaugguaag

SEQ ID NO: 23659 - RNA, 22 nt, Artificial Sequence
  Guide RNA
gccuuaccaucugcucucuccc

SEQ ID NO: 23660 - RNA, 22 nt, Artificial Sequence
  Guide RNA
gccuuaccaucugcugucuccc

SEQ ID NO: 23661 - RNA, 22 nt, Artificial Sequence
  Guide RNA
gcucucucccuccccagccccc

SEQ ID NO: 23662 - RNA, 22 nt, Artificial Sequence
  Guide RNA
gcuggggagggagacagcagau

SEQ ID NO: 23663 - RNA, 22 nt, Artificial Sequence
  Guide RNA
gcuggggagggagagagcagau

SEQ ID NO: 23664 - RNA, 22 nt, Artificial Sequence
  Guide RNA
gcugucucccuccccagccccc

SEQ ID NO: 23665 - RNA, 22 nt, Artificial Sequence
  Guide RNA
ggaaaaggggggcuggggaggg

SEQ ID NO: 23666 - RNA, 22 nt, Artificial Sequence
  Guide RNA
ggagacagcagaugguaaggcu

SEQ ID NO: 23667 - RNA, 22 nt, Artificial Sequence
  Guide RNA
ggagagagcagaugguaaggcu

SEQ ID NO: 23668 - RNA, 22 nt, Artificial Sequence
  Guide RNA
ggagggagacagcagaugguaa

SEQ ID NO: 23669 - RNA, 22 nt, Artificial Sequence
  Guide RNA
ggagggagagagcagaugguaa

SEQ ID NO: 23670 - RNA, 22 nt, Artificial Sequence
  Guide RNA
ggcuggggagggagacagcaga

SEQ ID NO: 23671 - RNA, 22 nt, Artificial Sequence
  Guide RNA
ggcuggggagggagagagcaga

SEQ ID NO: 23672 - RNA, 22 nt, Artificial Sequence
  Guide RNA
gggagacagcagaugguaaggc

SEQ ID NO: 23673 - RNA, 22 nt, Artificial Sequence
  Guide RNA
gggagagagcagaugguaaggc

SEQ ID NO: 23674 - RNA, 22 nt, Artificial Sequence
  Guide RNA
gggagggagacagcagauggua

SEQ ID NO: 23675 - RNA, 22 nt, Artificial Sequence
  Guide RNA
gggagggagagagcagauggua

SEQ ID NO: 23676 - RNA, 22 nt, Artificial Sequence
  Guide RNA
gggcuggggagggagacagcag

SEQ ID NO: 23677 - RNA, 22 nt, Artificial Sequence
  Guide RNA
gggcuggggagggagagagcag

SEQ ID NO: 23678 - RNA, 22 nt, Artificial Sequence
  Guide RNA
ggggagggagacagcagauggu

SEQ ID NO: 23679 - RNA, 22 nt, Artificial Sequence
  Guide RNA
ggggagggagagagcagauggu

SEQ ID NO: 23680 - RNA, 22 nt, Artificial Sequence
  Guide RNA
ggggcuggggagggagacagca

SEQ ID NO: 23681 - RNA, 22 nt, Artificial Sequence
  Guide RNA
ggggcuggggagggagagagca

SEQ ID NO: 23682 - RNA, 22 nt, Artificial Sequence
  Guide RNA
gggggcuggggagggagacagc

SEQ ID NO: 23683 - RNA, 22 nt, Artificial Sequence
  Guide RNA
gggggcuggggagggagagagc

SEQ ID NO: 23684 - RNA, 22 nt, Artificial Sequence
  Guide RNA
ggggggcuggggagggagacag

SEQ ID NO: 23685 - RNA, 22 nt, Artificial Sequence
  Guide RNA
ggggggcuggggagggagagag

SEQ ID NO: 23686 - RNA, 22 nt, Artificial Sequence
  Guide RNA
uaccaucugcucucucccuccc

SEQ ID NO: 23687 - RNA, 22 nt, Artificial Sequence
  Guide RNA
uaccaucugcugucucccuccc

SEQ ID NO: 23688 - RNA, 22 nt, Artificial Sequence
  Guide RNA
ucacaaagccuuaccaucugcu

SEQ ID NO: 23689 - RNA, 22 nt, Artificial Sequence
  Guide RNA
ucucucccuccccagccccccu

SEQ ID NO: 23690 - RNA, 22 nt, Artificial Sequence
  Guide RNA
ucugcucucucccuccccagcc

SEQ ID NO: 23691 - RNA, 22 nt, Artificial Sequence
  Guide RNA
ucugcugucucccuccccagcc

SEQ ID NO: 23692 - RNA, 22 nt, Artificial Sequence
  Guide RNA
ugcucucucccuccccagcccc

SEQ ID NO: 23693 - RNA, 22 nt, Artificial Sequence
  Guide RNA
ugcugucucccuccccagcccc

SEQ ID NO: 23694 - RNA, 22 nt, Artificial Sequence
  Guide RNA
uggggagggagacagcagaugg

SEQ ID NO: 23695 - RNA, 22 nt, Artificial Sequence
  Guide RNA
uggggagggagagagcagaugg

SEQ ID NO: 23696 - RNA, 22 nt, Artificial Sequence
  Guide RNA
ugucucccuccccagccccccu

SEQ ID NO: 23697 - RNA, 22 nt, Artificial Sequence
  Guide RNA
uuaccaucugcucucucccucc

SEQ ID NO: 23698 - RNA, 22 nt, Artificial Sequence
  Guide RNA
uuaccaucugcugucucccucc

SEQ ID NO: 23699 - RNA, 20 nt, Artificial Sequence
  Guide RNA
aaauagccccaauggccagu

SEQ ID NO: 23700 - RNA, 20 nt, Artificial Sequence
  Guide RNA
aaauagccccaguggccagu

SEQ ID NO: 23701 - RNA, 20 nt, Artificial Sequence
  Guide RNA
aacaacuggccacuggggcu

SEQ ID NO: 23702 - RNA, 20 nt, Artificial Sequence
  Guide RNA
aacaacuggccauuggggcu

SEQ ID NO: 23703 - RNA, 20 nt, Artificial Sequence
  Guide RNA
aacuggccacuggggcuauu

SEQ ID NO: 23704 - RNA, 20 nt, Artificial Sequence
  Guide RNA
aacuggccauuggggcuauu

SEQ ID NO: 23705 - RNA, 20 nt, Artificial Sequence
  Guide RNA
aauagccccaauggccaguu

SEQ ID NO: 23706 - RNA, 20 nt, Artificial Sequence
  Guide RNA
aauagccccaguggccaguu

SEQ ID NO: 23707 - RNA, 20 nt, Artificial Sequence
  Guide RNA
aauggccaguuguuaaggga

SEQ ID NO: 23708 - RNA, 20 nt, Artificial Sequence
  Guide RNA
acaacuggccacuggggcua

SEQ ID NO: 23709 - RNA, 20 nt, Artificial Sequence
  Guide RNA
acaacuggccauuggggcua

SEQ ID NO: 23710 - RNA, 20 nt, Artificial Sequence
  Guide RNA
acuggccacuggggcuauuu

SEQ ID NO: 23711 - RNA, 20 nt, Artificial Sequence
  Guide RNA
acuggccauuggggcuauuu

SEQ ID NO: 23712 - RNA, 20 nt, Artificial Sequence
  Guide RNA
acuggggcuauuucagagau

SEQ ID NO: 23713 - RNA, 20 nt, Artificial Sequence
  Guide RNA
acuucucccuuaacaacugg

SEQ ID NO: 23714 - RNA, 20 nt, Artificial Sequence
  Guide RNA
agccccaauggccaguuguu

SEQ ID NO: 23715 - RNA, 20 nt, Artificial Sequence
  Guide RNA
agccccaguggccaguuguu

SEQ ID NO: 23716 - RNA, 20 nt, Artificial Sequence
  Guide RNA
aguggccaguuguuaaggga

SEQ ID NO: 23717 - RNA, 20 nt, Artificial Sequence
  Guide RNA
auagccccaauggccaguug

SEQ ID NO: 23718 - RNA, 20 nt, Artificial Sequence
  Guide RNA
auagccccaguggccaguug

SEQ ID NO: 23719 - RNA, 20 nt, Artificial Sequence
  Guide RNA
aucucugaaauagccccaau

SEQ ID NO: 23720 - RNA, 20 nt, Artificial Sequence
  Guide RNA
aucucugaaauagccccagu

SEQ ID NO: 23721 - RNA, 20 nt, Artificial Sequence
  Guide RNA
auuggggcuauuucagagau

SEQ ID NO: 23722 - RNA, 20 nt, Artificial Sequence
  Guide RNA
caacuggccacuggggcuau

SEQ ID NO: 23723 - RNA, 20 nt, Artificial Sequence
  Guide RNA
caacuggccauuggggcuau

SEQ ID NO: 23724 - RNA, 20 nt, Artificial Sequence
  Guide RNA
caauggccaguuguuaaggg

SEQ ID NO: 23725 - RNA, 20 nt, Artificial Sequence
  Guide RNA
cacuggggcuauuucagaga

SEQ ID NO: 23726 - RNA, 20 nt, Artificial Sequence
  Guide RNA
caguggccaguuguuaaggg

SEQ ID NO: 23727 - RNA, 20 nt, Artificial Sequence
  Guide RNA
caucucugaaauagccccaa

SEQ ID NO: 23728 - RNA, 20 nt, Artificial Sequence
  Guide RNA
caucucugaaauagccccag

SEQ ID NO: 23729 - RNA, 20 nt, Artificial Sequence
  Guide RNA
cauuggggcuauuucagaga

SEQ ID NO: 23730 - RNA, 20 nt, Artificial Sequence
  Guide RNA
ccaauggccaguuguuaagg

SEQ ID NO: 23731 - RNA, 20 nt, Artificial Sequence
  Guide RNA
ccacuggggcuauuucagag

SEQ ID NO: 23732 - RNA, 20 nt, Artificial Sequence
  Guide RNA
ccaguggccaguuguuaagg

SEQ ID NO: 23733 - RNA, 20 nt, Artificial Sequence
  Guide RNA
ccauuggggcuauuucagag

SEQ ID NO: 23734 - RNA, 20 nt, Artificial Sequence
  Guide RNA
cccaauggccaguuguuaag

SEQ ID NO: 23735 - RNA, 20 nt, Artificial Sequence
  Guide RNA
cccaguggccaguuguuaag

SEQ ID NO: 23736 - RNA, 20 nt, Artificial Sequence
  Guide RNA
ccccaauggccaguuguuaa

SEQ ID NO: 23737 - RNA, 20 nt, Artificial Sequence
  Guide RNA
ccccaguggccaguuguuaa

SEQ ID NO: 23738 - RNA, 20 nt, Artificial Sequence
  Guide RNA
cccuuaacaacuggccacug

SEQ ID NO: 23739 - RNA, 20 nt, Artificial Sequence
  Guide RNA
cccuuaacaacuggccauug

SEQ ID NO: 23740 - RNA, 20 nt, Artificial Sequence
  Guide RNA
ccuuaacaacuggccacugg

SEQ ID NO: 23741 - RNA, 20 nt, Artificial Sequence
  Guide RNA
ccuuaacaacuggccauugg

SEQ ID NO: 23742 - RNA, 20 nt, Artificial Sequence
  Guide RNA
cucccuuaacaacuggccac

SEQ ID NO: 23743 - RNA, 20 nt, Artificial Sequence
  Guide RNA
cucccuuaacaacuggccau

SEQ ID NO: 23744 - RNA, 20 nt, Artificial Sequence
  Guide RNA
cucugaaauagccccaaugg

SEQ ID NO: 23745 - RNA, 20 nt, Artificial Sequence
  Guide RNA
cucugaaauagccccagugg

SEQ ID NO: 23746 - RNA, 20 nt, Artificial Sequence
  Guide RNA
cugaaauagccccaauggcc

SEQ ID NO: 23747 - RNA, 20 nt, Artificial Sequence
  Guide RNA
cugaaauagccccaguggcc

SEQ ID NO: 23748 - RNA, 20 nt, Artificial Sequence
  Guide RNA
cugcaucucugaaauagccc

SEQ ID NO: 23749 - RNA, 20 nt, Artificial Sequence
  Guide RNA
cuggccacuggggcuauuuc

SEQ ID NO: 23750 - RNA, 20 nt, Artificial Sequence
  Guide RNA
cuggccauuggggcuauuuc

SEQ ID NO: 23751 - RNA, 20 nt, Artificial Sequence
  Guide RNA
cuuaacaacuggccacuggg

SEQ ID NO: 23752 - RNA, 20 nt, Artificial Sequence
  Guide RNA
cuuaacaacuggccauuggg

SEQ ID NO: 23753 - RNA, 20 nt, Artificial Sequence
  Guide RNA
cuucucccuuaacaacuggc

SEQ ID NO: 23754 - RNA, 20 nt, Artificial Sequence
  Guide RNA
gaaauagccccaauggccag

SEQ ID NO: 23755 - RNA, 20 nt, Artificial Sequence
  Guide RNA
gaaauagccccaguggccag

SEQ ID NO: 23756 - RNA, 20 nt, Artificial Sequence
  Guide RNA
gcaucucugaaauagcccca

SEQ ID NO: 23757 - RNA, 20 nt, Artificial Sequence
  Guide RNA
gccacuggggcuauuucaga

SEQ ID NO: 23758 - RNA, 20 nt, Artificial Sequence
  Guide RNA
gccauuggggcuauuucaga

SEQ ID NO: 23759 - RNA, 20 nt, Artificial Sequence
  Guide RNA
gccccaauggccaguuguua

SEQ ID NO: 23760 - RNA, 20 nt, Artificial Sequence
  Guide RNA
gccccaguggccaguuguua

SEQ ID NO: 23761 - RNA, 20 nt, Artificial Sequence
  Guide RNA
gcugcaucucugaaauagcc

SEQ ID NO: 23762 - RNA, 20 nt, Artificial Sequence
  Guide RNA
ggccacuggggcuauuucag

SEQ ID NO: 23763 - RNA, 20 nt, Artificial Sequence
  Guide RNA
ggccauuggggcuauuucag

SEQ ID NO: 23764 - RNA, 20 nt, Artificial Sequence
  Guide RNA
uaacaacuggccacuggggc

SEQ ID NO: 23765 - RNA, 20 nt, Artificial Sequence
  Guide RNA
uaacaacuggccauuggggc

SEQ ID NO: 23766 - RNA, 20 nt, Artificial Sequence
  Guide RNA
uagccccaauggccaguugu

SEQ ID NO: 23767 - RNA, 20 nt, Artificial Sequence
  Guide RNA
uagccccaguggccaguugu

SEQ ID NO: 23768 - RNA, 20 nt, Artificial Sequence
  Guide RNA
ucccuuaacaacuggccacu

SEQ ID NO: 23769 - RNA, 20 nt, Artificial Sequence
  Guide RNA
ucccuuaacaacuggccauu

SEQ ID NO: 23770 - RNA, 20 nt, Artificial Sequence
  Guide RNA
ucucccuuaacaacuggcca

SEQ ID NO: 23771 - RNA, 20 nt, Artificial Sequence
  Guide RNA
ucucugaaauagccccaaug

SEQ ID NO: 23772 - RNA, 20 nt, Artificial Sequence
  Guide RNA
ucucugaaauagccccagug

SEQ ID NO: 23773 - RNA, 20 nt, Artificial Sequence
  Guide RNA
ucugaaauagccccaauggc

SEQ ID NO: 23774 - RNA, 20 nt, Artificial Sequence
  Guide RNA
ucugaaauagccccaguggc

SEQ ID NO: 23775 - RNA, 20 nt, Artificial Sequence
  Guide RNA
ugaaauagccccaauggcca

SEQ ID NO: 23776 - RNA, 20 nt, Artificial Sequence
  Guide RNA
ugaaauagccccaguggcca

SEQ ID NO: 23777 - RNA, 20 nt, Artificial Sequence
  Guide RNA
ugcaucucugaaauagcccc

SEQ ID NO: 23778 - RNA, 20 nt, Artificial Sequence
  Guide RNA
uggccacuggggcuauuuca

SEQ ID NO: 23779 - RNA, 20 nt, Artificial Sequence
  Guide RNA
uggccauuggggcuauuuca

SEQ ID NO: 23780 - RNA, 20 nt, Artificial Sequence
  Guide RNA
uuaacaacuggccacugggg

SEQ ID NO: 23781 - RNA, 20 nt, Artificial Sequence
  Guide RNA
uuaacaacuggccauugggg

SEQ ID NO: 23782 - RNA, 20 nt, Artificial Sequence
  Guide RNA
uucucccuuaacaacuggcc

SEQ ID NO: 23783 - RNA, 21 nt, Artificial Sequence
  Guide RNA
aaauagccccaauggccaguu

SEQ ID NO: 23784 - RNA, 21 nt, Artificial Sequence
  Guide RNA
aaauagccccaguggccaguu

SEQ ID NO: 23785 - RNA, 21 nt, Artificial Sequence
  Guide RNA
aacaacuggccacuggggcua

SEQ ID NO: 23786 - RNA, 21 nt, Artificial Sequence
  Guide RNA
aacaacuggccauuggggcua

SEQ ID NO: 23787 - RNA, 21 nt, Artificial Sequence
  Guide RNA
aacuggccacuggggcuauuu

SEQ ID NO: 23788 - RNA, 21 nt, Artificial Sequence
  Guide RNA
aacuggccauuggggcuauuu

SEQ ID NO: 23789 - RNA, 21 nt, Artificial Sequence
  Guide RNA
aauagccccaauggccaguug

SEQ ID NO: 23790 - RNA, 21 nt, Artificial Sequence
  Guide RNA
aauagccccaguggccaguug

SEQ ID NO: 23791 - RNA, 21 nt, Artificial Sequence
  Guide RNA
aauggccaguuguuaagggag

SEQ ID NO: 23792 - RNA, 21 nt, Artificial Sequence
  Guide RNA
acaacuggccacuggggcuau

SEQ ID NO: 23793 - RNA, 21 nt, Artificial Sequence
  Guide RNA
acaacuggccauuggggcuau

SEQ ID NO: 23794 - RNA, 21 nt, Artificial Sequence
  Guide RNA
acuggccacuggggcuauuuc

SEQ ID NO: 23795 - RNA, 21 nt, Artificial Sequence
  Guide RNA
acuggccauuggggcuauuuc

SEQ ID NO: 23796 - RNA, 21 nt, Artificial Sequence
  Guide RNA
acuggggcuauuucagagaug

SEQ ID NO: 23797 - RNA, 21 nt, Artificial Sequence
  Guide RNA
acuucucccuuaacaacuggc

SEQ ID NO: 23798 - RNA, 21 nt, Artificial Sequence
  Guide RNA
agccccaauggccaguuguua

SEQ ID NO: 23799 - RNA, 21 nt, Artificial Sequence
  Guide RNA
agccccaguggccaguuguua

SEQ ID NO: 23800 - RNA, 21 nt, Artificial Sequence
  Guide RNA
aguggccaguuguuaagggag

SEQ ID NO: 23801 - RNA, 21 nt, Artificial Sequence
  Guide RNA
auagccccaauggccaguugu

SEQ ID NO: 23802 - RNA, 21 nt, Artificial Sequence
  Guide RNA
auagccccaguggccaguugu

SEQ ID NO: 23803 - RNA, 21 nt, Artificial Sequence
  Guide RNA
aucucugaaauagccccaaug

SEQ ID NO: 23804 - RNA, 21 nt, Artificial Sequence
  Guide RNA
aucucugaaauagccccagug

SEQ ID NO: 23805 - RNA, 21 nt, Artificial Sequence
  Guide RNA
auuggggcuauuucagagaug

SEQ ID NO: 23806 - RNA, 21 nt, Artificial Sequence
  Guide RNA
caacuggccacuggggcuauu

SEQ ID NO: 23807 - RNA, 21 nt, Artificial Sequence
  Guide RNA
caacuggccauuggggcuauu

SEQ ID NO: 23808 - RNA, 21 nt, Artificial Sequence
  Guide RNA
caauggccaguuguuaaggga

SEQ ID NO: 23809 - RNA, 21 nt, Artificial Sequence
  Guide RNA
cacuggggcuauuucagagau

SEQ ID NO: 23810 - RNA, 21 nt, Artificial Sequence
  Guide RNA
cacuucucccuuaacaacugg

SEQ ID NO: 23811 - RNA, 21 nt, Artificial Sequence
  Guide RNA
caguggccaguuguuaaggga

SEQ ID NO: 23812 - RNA, 21 nt, Artificial Sequence
  Guide RNA
caucucugaaauagccccaau

SEQ ID NO: 23813 - RNA, 21 nt, Artificial Sequence
  Guide RNA
caucucugaaauagccccagu

SEQ ID NO: 23814 - RNA, 21 nt, Artificial Sequence
  Guide RNA
cauuggggcuauuucagagau

SEQ ID NO: 23815 - RNA, 21 nt, Artificial Sequence
  Guide RNA
ccaauggccaguuguuaaggg

SEQ ID NO: 23816 - RNA, 21 nt, Artificial Sequence
  Guide RNA
ccacuggggcuauuucagaga

SEQ ID NO: 23817 - RNA, 21 nt, Artificial Sequence
  Guide RNA
ccaguggccaguuguuaaggg

SEQ ID NO: 23818 - RNA, 21 nt, Artificial Sequence
  Guide RNA
ccauuggggcuauuucagaga

SEQ ID NO: 23819 - RNA, 21 nt, Artificial Sequence
  Guide RNA
cccaauggccaguuguuaagg

SEQ ID NO: 23820 - RNA, 21 nt, Artificial Sequence
  Guide RNA
cccaguggccaguuguuaagg

SEQ ID NO: 23821 - RNA, 21 nt, Artificial Sequence
  Guide RNA
ccccaauggccaguuguuaag

SEQ ID NO: 23822 - RNA, 21 nt, Artificial Sequence
  Guide RNA
ccccaguggccaguuguuaag

SEQ ID NO: 23823 - RNA, 21 nt, Artificial Sequence
  Guide RNA
cccuuaacaacuggccacugg

SEQ ID NO: 23824 - RNA, 21 nt, Artificial Sequence
  Guide RNA
cccuuaacaacuggccauugg

SEQ ID NO: 23825 - RNA, 21 nt, Artificial Sequence
  Guide RNA
ccuuaacaacuggccacuggg

SEQ ID NO: 23826 - RNA, 21 nt, Artificial Sequence
  Guide RNA
ccuuaacaacuggccauuggg

SEQ ID NO: 23827 - RNA, 21 nt, Artificial Sequence
  Guide RNA
cucccuuaacaacuggccacu

SEQ ID NO: 23828 - RNA, 21 nt, Artificial Sequence
  Guide RNA
cucccuuaacaacuggccauu

SEQ ID NO: 23829 - RNA, 21 nt, Artificial Sequence
  Guide RNA
cucugaaauagccccaauggc

SEQ ID NO: 23830 - RNA, 21 nt, Artificial Sequence
  Guide RNA
cucugaaauagccccaguggc

SEQ ID NO: 23831 - RNA, 21 nt, Artificial Sequence
  Guide RNA
cugaaauagccccaauggcca

SEQ ID NO: 23832 - RNA, 21 nt, Artificial Sequence
  Guide RNA
cugaaauagccccaguggcca

SEQ ID NO: 23833 - RNA, 21 nt, Artificial Sequence
  Guide RNA
cugcaucucugaaauagcccc

SEQ ID NO: 23834 - RNA, 21 nt, Artificial Sequence
  Guide RNA
cuggccacuggggcuauuuca

SEQ ID NO: 23835 - RNA, 21 nt, Artificial Sequence
  Guide RNA
cuggccauuggggcuauuuca

SEQ ID NO: 23836 - RNA, 21 nt, Artificial Sequence
  Guide RNA
cuuaacaacuggccacugggg

SEQ ID NO: 23837 - RNA, 21 nt, Artificial Sequence
  Guide RNA
cuuaacaacuggccauugggg

SEQ ID NO: 23838 - RNA, 21 nt, Artificial Sequence
  Guide RNA
cuucucccuuaacaacuggcc

SEQ ID NO: 23839 - RNA, 21 nt, Artificial Sequence
  Guide RNA
gaaauagccccaauggccagu

SEQ ID NO: 23840 - RNA, 21 nt, Artificial Sequence
  Guide RNA
gaaauagccccaguggccagu

SEQ ID NO: 23841 - RNA, 21 nt, Artificial Sequence
  Guide RNA
gcaucucugaaauagccccaa

SEQ ID NO: 23842 - RNA, 21 nt, Artificial Sequence
  Guide RNA
gcaucucugaaauagccccag

SEQ ID NO: 23843 - RNA, 21 nt, Artificial Sequence
  Guide RNA
gccacuggggcuauuucagag

SEQ ID NO: 23844 - RNA, 21 nt, Artificial Sequence
  Guide RNA
gccauuggggcuauuucagag

SEQ ID NO: 23845 - RNA, 21 nt, Artificial Sequence
  Guide RNA
gccccaauggccaguuguuaa

SEQ ID NO: 23846 - RNA, 21 nt, Artificial Sequence
  Guide RNA
gccccaguggccaguuguuaa

SEQ ID NO: 23847 - RNA, 21 nt, Artificial Sequence
  Guide RNA
gcugcaucucugaaauagccc

SEQ ID NO: 23848 - RNA, 21 nt, Artificial Sequence
  Guide RNA
ggccacuggggcuauuucaga

SEQ ID NO: 23849 - RNA, 21 nt, Artificial Sequence
  Guide RNA
ggccauuggggcuauuucaga

SEQ ID NO: 23850 - RNA, 21 nt, Artificial Sequence
  Guide RNA
uaacaacuggccacuggggcu

SEQ ID NO: 23851 - RNA, 21 nt, Artificial Sequence
  Guide RNA
uaacaacuggccauuggggcu

SEQ ID NO: 23852 - RNA, 21 nt, Artificial Sequence
  Guide RNA
uagccccaauggccaguuguu

SEQ ID NO: 23853 - RNA, 21 nt, Artificial Sequence
  Guide RNA
uagccccaguggccaguuguu

SEQ ID NO: 23854 - RNA, 21 nt, Artificial Sequence
  Guide RNA
ucccuuaacaacuggccacug

SEQ ID NO: 23855 - RNA, 21 nt, Artificial Sequence
  Guide RNA
ucccuuaacaacuggccauug

SEQ ID NO: 23856 - RNA, 21 nt, Artificial Sequence
  Guide RNA
ucucccuuaacaacuggccac

SEQ ID NO: 23857 - RNA, 21 nt, Artificial Sequence
  Guide RNA
ucucccuuaacaacuggccau

SEQ ID NO: 23858 - RNA, 21 nt, Artificial Sequence
  Guide RNA
ucucugaaauagccccaaugg

SEQ ID NO: 23859 - RNA, 21 nt, Artificial Sequence
  Guide RNA
ucucugaaauagccccagugg

SEQ ID NO: 23860 - RNA, 21 nt, Artificial Sequence
  Guide RNA
ucugaaauagccccaauggcc

SEQ ID NO: 23861 - RNA, 21 nt, Artificial Sequence
  Guide RNA
ucugaaauagccccaguggcc

SEQ ID NO: 23862 - RNA, 21 nt, Artificial Sequence
  Guide RNA
ugaaauagccccaauggccag

SEQ ID NO: 23863 - RNA, 21 nt, Artificial Sequence
  Guide RNA
ugaaauagccccaguggccag

SEQ ID NO: 23864 - RNA, 21 nt, Artificial Sequence
  Guide RNA
ugcaucucugaaauagcccca

SEQ ID NO: 23865 - RNA, 21 nt, Artificial Sequence
  Guide RNA
ugcugcaucucugaaauagcc

SEQ ID NO: 23866 - RNA, 21 nt, Artificial Sequence
  Guide RNA
uggccacuggggcuauuucag

SEQ ID NO: 23867 - RNA, 21 nt, Artificial Sequence
  Guide RNA
uggccauuggggcuauuucag

SEQ ID NO: 23868 - RNA, 21 nt, Artificial Sequence
  Guide RNA
uuaacaacuggccacuggggc

SEQ ID NO: 23869 - RNA, 21 nt, Artificial Sequence
  Guide RNA
uuaacaacuggccauuggggc

SEQ ID NO: 23870 - RNA, 21 nt, Artificial Sequence
  Guide RNA
uucucccuuaacaacuggcca

SEQ ID NO: 23871 - RNA, 22 nt, Artificial Sequence
  Guide RNA
aaauagccccaauggccaguug

SEQ ID NO: 23872 - RNA, 22 nt, Artificial Sequence
  Guide RNA
aaauagccccaguggccaguug

SEQ ID NO: 23873 - RNA, 22 nt, Artificial Sequence
  Guide RNA
aacaacuggccacuggggcuau

SEQ ID NO: 23874 - RNA, 22 nt, Artificial Sequence
  Guide RNA
aacaacuggccauuggggcuau

SEQ ID NO: 23875 - RNA, 22 nt, Artificial Sequence
  Guide RNA
aacuggccacuggggcuauuuc

SEQ ID NO: 23876 - RNA, 22 nt, Artificial Sequence
  Guide RNA
aacuggccauuggggcuauuuc

SEQ ID NO: 23877 - RNA, 22 nt, Artificial Sequence
  Guide RNA
aauagccccaauggccaguugu

SEQ ID NO: 23878 - RNA, 22 nt, Artificial Sequence
  Guide RNA
aauagccccaguggccaguugu

SEQ ID NO: 23879 - RNA, 22 nt, Artificial Sequence
  Guide RNA
aauggccaguuguuaagggaga

SEQ ID NO: 23880 - RNA, 22 nt, Artificial Sequence
  Guide RNA
acaacuggccacuggggcuauu

SEQ ID NO: 23881 - RNA, 22 nt, Artificial Sequence
  Guide RNA
acaacuggccauuggggcuauu

SEQ ID NO: 23882 - RNA, 22 nt, Artificial Sequence
  Guide RNA
acuggccacuggggcuauuuca

SEQ ID NO: 23883 - RNA, 22 nt, Artificial Sequence
  Guide RNA
acuggccauuggggcuauuuca

SEQ ID NO: 23884 - RNA, 22 nt, Artificial Sequence
  Guide RNA
acuggggcuauuucagagaugc

SEQ ID NO: 23885 - RNA, 22 nt, Artificial Sequence
  Guide RNA
acuucucccuuaacaacuggcc

SEQ ID NO: 23886 - RNA, 22 nt, Artificial Sequence
  Guide RNA
agccccaauggccaguuguuaa

SEQ ID NO: 23887 - RNA, 22 nt, Artificial Sequence
  Guide RNA
agccccaguggccaguuguuaa

SEQ ID NO: 23888 - RNA, 22 nt, Artificial Sequence
  Guide RNA
aguggccaguuguuaagggaga

SEQ ID NO: 23889 - RNA, 22 nt, Artificial Sequence
  Guide RNA
auagccccaauggccaguuguu

SEQ ID NO: 23890 - RNA, 22 nt, Artificial Sequence
  Guide RNA
auagccccaguggccaguuguu

SEQ ID NO: 23891 - RNA, 22 nt, Artificial Sequence
  Guide RNA
aucucugaaauagccccaaugg

SEQ ID NO: 23892 - RNA, 22 nt, Artificial Sequence
  Guide RNA
aucucugaaauagccccagugg

SEQ ID NO: 23893 - RNA, 22 nt, Artificial Sequence
  Guide RNA
auuggggcuauuucagagaugc

SEQ ID NO: 23894 - RNA, 22 nt, Artificial Sequence
  Guide RNA
caacuggccacuggggcuauuu

SEQ ID NO: 23895 - RNA, 22 nt, Artificial Sequence
  Guide RNA
caacuggccauuggggcuauuu

SEQ ID NO: 23896 - RNA, 22 nt, Artificial Sequence
  Guide RNA
caauggccaguuguuaagggag

SEQ ID NO: 23897 - RNA, 22 nt, Artificial Sequence
  Guide RNA
cacuggggcuauuucagagaug

SEQ ID NO: 23898 - RNA, 22 nt, Artificial Sequence
  Guide RNA
cacuucucccuuaacaacuggc

SEQ ID NO: 23899 - RNA, 22 nt, Artificial Sequence
  Guide RNA
caguggccaguuguuaagggag

SEQ ID NO: 23900 - RNA, 22 nt, Artificial Sequence
  Guide RNA
caucucugaaauagccccaaug

SEQ ID NO: 23901 - RNA, 22 nt, Artificial Sequence
  Guide RNA
caucucugaaauagccccagug

SEQ ID NO: 23902 - RNA, 22 nt, Artificial Sequence
  Guide RNA
cauuggggcuauuucagagaug

SEQ ID NO: 23903 - RNA, 22 nt, Artificial Sequence
  Guide RNA
ccaauggccaguuguuaaggga

SEQ ID NO: 23904 - RNA, 22 nt, Artificial Sequence
  Guide RNA
ccacuggggcuauuucagagau

SEQ ID NO: 23905 - RNA, 22 nt, Artificial Sequence
  Guide RNA
ccaguggccaguuguuaaggga

SEQ ID NO: 23906 - RNA, 22 nt, Artificial Sequence
  Guide RNA
ccauuggggcuauuucagagau

SEQ ID NO: 23907 - RNA, 22 nt, Artificial Sequence
  Guide RNA
cccaauggccaguuguuaaggg

SEQ ID NO: 23908 - RNA, 22 nt, Artificial Sequence
  Guide RNA
cccaguggccaguuguuaaggg

SEQ ID NO: 23909 - RNA, 22 nt, Artificial Sequence
  Guide RNA
ccccaauggccaguuguuaagg

SEQ ID NO: 23910 - RNA, 22 nt, Artificial Sequence
  Guide RNA
ccccaguggccaguuguuaagg

SEQ ID NO: 23911 - RNA, 22 nt, Artificial Sequence
  Guide RNA
cccuuaacaacuggccacuggg

SEQ ID NO: 23912 - RNA, 22 nt, Artificial Sequence
  Guide RNA
cccuuaacaacuggccauuggg

SEQ ID NO: 23913 - RNA, 22 nt, Artificial Sequence
  Guide RNA
ccuuaacaacuggccacugggg

SEQ ID NO: 23914 - RNA, 22 nt, Artificial Sequence
  Guide RNA
ccuuaacaacuggccauugggg

SEQ ID NO: 23915 - RNA, 22 nt, Artificial Sequence
  Guide RNA
cucccuuaacaacuggccacug

SEQ ID NO: 23916 - RNA, 22 nt, Artificial Sequence
  Guide RNA
cucccuuaacaacuggccauug

SEQ ID NO: 23917 - RNA, 22 nt, Artificial Sequence
  Guide RNA
cucugaaauagccccaauggcc

SEQ ID NO: 23918 - RNA, 22 nt, Artificial Sequence
  Guide RNA
cucugaaauagccccaguggcc

SEQ ID NO: 23919 - RNA, 22 nt, Artificial Sequence
  Guide RNA
cugaaauagccccaauggccag

SEQ ID NO: 23920 - RNA, 22 nt, Artificial Sequence
  Guide RNA
cugaaauagccccaguggccag

SEQ ID NO: 23921 - RNA, 22 nt, Artificial Sequence
  Guide RNA
cugcaucucugaaauagcccca

SEQ ID NO: 23922 - RNA, 22 nt, Artificial Sequence
  Guide RNA
cugcugcaucucugaaauagcc

SEQ ID NO: 23923 - RNA, 22 nt, Artificial Sequence
  Guide RNA
cuggccacuggggcuauuucag

SEQ ID NO: 23924 - RNA, 22 nt, Artificial Sequence
  Guide RNA
cuggccauuggggcuauuucag

SEQ ID NO: 23925 - RNA, 22 nt, Artificial Sequence
  Guide RNA
cuuaacaacuggccacuggggc

SEQ ID NO: 23926 - RNA, 22 nt, Artificial Sequence
  Guide RNA
cuuaacaacuggccauuggggc

SEQ ID NO: 23927 - RNA, 22 nt, Artificial Sequence
  Guide RNA
cuucucccuuaacaacuggcca

SEQ ID NO: 23928 - RNA, 22 nt, Artificial Sequence
  Guide RNA
gaaauagccccaauggccaguu

SEQ ID NO: 23929 - RNA, 22 nt, Artificial Sequence
  Guide RNA
gaaauagccccaguggccaguu

SEQ ID NO: 23930 - RNA, 22 nt, Artificial Sequence
  Guide RNA
gcaucucugaaauagccccaau

SEQ ID NO: 23931 - RNA, 22 nt, Artificial Sequence
  Guide RNA
gcaucucugaaauagccccagu

SEQ ID NO: 23932 - RNA, 22 nt, Artificial Sequence
  Guide RNA
gccacuggggcuauuucagaga

SEQ ID NO: 23933 - RNA, 22 nt, Artificial Sequence
  Guide RNA
gccauuggggcuauuucagaga

SEQ ID NO: 23934 - RNA, 22 nt, Artificial Sequence
  Guide RNA
gccccaauggccaguuguuaag

SEQ ID NO: 23935 - RNA, 22 nt, Artificial Sequence
  Guide RNA
gccccaguggccaguuguuaag

SEQ ID NO: 23936 - RNA, 22 nt, Artificial Sequence
  Guide RNA
gcugcaucucugaaauagcccc

SEQ ID NO: 23937 - RNA, 22 nt, Artificial Sequence
  Guide RNA
ggccacuggggcuauuucagag

SEQ ID NO: 23938 - RNA, 22 nt, Artificial Sequence
  Guide RNA
ggccauuggggcuauuucagag

SEQ ID NO: 23939 - RNA, 22 nt, Artificial Sequence
  Guide RNA
uaacaacuggccacuggggcua

SEQ ID NO: 23940 - RNA, 22 nt, Artificial Sequence
  Guide RNA
uaacaacuggccauuggggcua

SEQ ID NO: 23941 - RNA, 22 nt, Artificial Sequence
  Guide RNA
uagccccaauggccaguuguua

SEQ ID NO: 23942 - RNA, 22 nt, Artificial Sequence
  Guide RNA
uagccccaguggccaguuguua

SEQ ID NO: 23943 - RNA, 22 nt, Artificial Sequence
  Guide RNA
ucacuucucccuuaacaacugg

SEQ ID NO: 23944 - RNA, 22 nt, Artificial Sequence
  Guide RNA
ucccuuaacaacuggccacugg

SEQ ID NO: 23945 - RNA, 22 nt, Artificial Sequence
  Guide RNA
ucccuuaacaacuggccauugg

SEQ ID NO: 23946 - RNA, 22 nt, Artificial Sequence
  Guide RNA
ucucccuuaacaacuggccacu

SEQ ID NO: 23947 - RNA, 22 nt, Artificial Sequence
  Guide RNA
ucucccuuaacaacuggccauu

SEQ ID NO: 23948 - RNA, 22 nt, Artificial Sequence
  Guide RNA
ucucugaaauagccccaauggc

SEQ ID NO: 23949 - RNA, 22 nt, Artificial Sequence
  Guide RNA
ucucugaaauagccccaguggc

SEQ ID NO: 23950 - RNA, 22 nt, Artificial Sequence
  Guide RNA
ucugaaauagccccaauggcca

SEQ ID NO: 23951 - RNA, 22 nt, Artificial Sequence
  Guide RNA
ucugaaauagccccaguggcca

SEQ ID NO: 23952 - RNA, 22 nt, Artificial Sequence
  Guide RNA
ugaaauagccccaauggccagu

SEQ ID NO: 23953 - RNA, 22 nt, Artificial Sequence
  Guide RNA
ugaaauagccccaguggccagu

SEQ ID NO: 23954 - RNA, 22 nt, Artificial Sequence
  Guide RNA
ugcaucucugaaauagccccaa

SEQ ID NO: 23955 - RNA, 22 nt, Artificial Sequence
  Guide RNA
ugcaucucugaaauagccccag

SEQ ID NO: 23956 - RNA, 22 nt, Artificial Sequence
  Guide RNA
ugcugcaucucugaaauagccc

SEQ ID NO: 23957 - RNA, 22 nt, Artificial Sequence
  Guide RNA
uggccacuggggcuauuucaga

SEQ ID NO: 23958 - RNA, 22 nt, Artificial Sequence
  Guide RNA
uggccauuggggcuauuucaga

SEQ ID NO: 23959 - RNA, 22 nt, Artificial Sequence
  Guide RNA
uuaacaacuggccacuggggcu

SEQ ID NO: 23960 - RNA, 22 nt, Artificial Sequence
  Guide RNA
uuaacaacuggccauuggggcu

SEQ ID NO: 23961 - RNA, 22 nt, Artificial Sequence
  Guide RNA
uucucccuuaacaacuggccac

SEQ ID NO: 23962 - RNA, 22 nt, Artificial Sequence
  Guide RNA
uucucccuuaacaacuggccau

SEQ ID NO: 23963 - RNA, 20 nt, Artificial Sequence
  Guide RNA
aacguggcaagagucaugaa

SEQ ID NO: 23964 - RNA, 20 nt, Artificial Sequence
  Guide RNA
aacguggcgagagucaugaa

SEQ ID NO: 23965 - RNA, 20 nt, Artificial Sequence
  Guide RNA
aagcagacguggcugaacgu

SEQ ID NO: 23966 - RNA, 20 nt, Artificial Sequence
  Guide RNA
acaguguuauucaugacucu

SEQ ID NO: 23967 - RNA, 20 nt, Artificial Sequence
  Guide RNA
acguggcaagagucaugaau

SEQ ID NO: 23968 - RNA, 20 nt, Artificial Sequence
  Guide RNA
acguggcgagagucaugaau

SEQ ID NO: 23969 - RNA, 20 nt, Artificial Sequence
  Guide RNA
acguggcugaacguggcaag

SEQ ID NO: 23970 - RNA, 20 nt, Artificial Sequence
  Guide RNA
acguggcugaacguggcgag

SEQ ID NO: 23971 - RNA, 20 nt, Artificial Sequence
  Guide RNA
acucucgccacguucagcca

SEQ ID NO: 23972 - RNA, 20 nt, Artificial Sequence
  Guide RNA
acucuugccacguucagcca

SEQ ID NO: 23973 - RNA, 20 nt, Artificial Sequence
  Guide RNA
agacguggcugaacguggca

SEQ ID NO: 23974 - RNA, 20 nt, Artificial Sequence
  Guide RNA
agacguggcugaacguggcg

SEQ ID NO: 23975 - RNA, 20 nt, Artificial Sequence
  Guide RNA
agcacaguguuauucaugac

SEQ ID NO: 23976 - RNA, 20 nt, Artificial Sequence
  Guide RNA
agcagacguggcugaacgug

SEQ ID NO: 23977 - RNA, 20 nt, Artificial Sequence
  Guide RNA
aguguuauucaugacucucg

SEQ ID NO: 23978 - RNA, 20 nt, Artificial Sequence
  Guide RNA
aguguuauucaugacucuug

SEQ ID NO: 23979 - RNA, 20 nt, Artificial Sequence
  Guide RNA
augacucucgccacguucag

SEQ ID NO: 23980 - RNA, 20 nt, Artificial Sequence
  Guide RNA
augacucuugccacguucag

SEQ ID NO: 23981 - RNA, 20 nt, Artificial Sequence
  Guide RNA
auucaugacucucgccacgu

SEQ ID NO: 23982 - RNA, 20 nt, Artificial Sequence
  Guide RNA
auucaugacucuugccacgu

SEQ ID NO: 23983 - RNA, 20 nt, Artificial Sequence
  Guide RNA
caagagucaugaauaacacu

SEQ ID NO: 23984 - RNA, 20 nt, Artificial Sequence
  Guide RNA
cacaguguuauucaugacuc

SEQ ID NO: 23985 - RNA, 20 nt, Artificial Sequence
  Guide RNA
cagacguggcugaacguggc

SEQ ID NO: 23986 - RNA, 20 nt, Artificial Sequence
  Guide RNA
caguguuauucaugacucuc

SEQ ID NO: 23987 - RNA, 20 nt, Artificial Sequence
  Guide RNA
caguguuauucaugacucuu

SEQ ID NO: 23988 - RNA, 20 nt, Artificial Sequence
  Guide RNA
caugacucucgccacguuca

SEQ ID NO: 23989 - RNA, 20 nt, Artificial Sequence
  Guide RNA
caugacucuugccacguuca

SEQ ID NO: 23990 - RNA, 20 nt, Artificial Sequence
  Guide RNA
cgagagucaugaauaacacu

SEQ ID NO: 23991 - RNA, 20 nt, Artificial Sequence
  Guide RNA
cguggcaagagucaugaaua

SEQ ID NO: 23992 - RNA, 20 nt, Artificial Sequence
  Guide RNA
cguggcgagagucaugaaua

SEQ ID NO: 23993 - RNA, 20 nt, Artificial Sequence
  Guide RNA
cguggcugaacguggcaaga

SEQ ID NO: 23994 - RNA, 20 nt, Artificial Sequence
  Guide RNA
cguggcugaacguggcgaga

SEQ ID NO: 23995 - RNA, 20 nt, Artificial Sequence
  Guide RNA
cucgccacguucagccacgu

SEQ ID NO: 23996 - RNA, 20 nt, Artificial Sequence
  Guide RNA
cucucgccacguucagccac

SEQ ID NO: 23997 - RNA, 20 nt, Artificial Sequence
  Guide RNA
cucuugccacguucagccac

SEQ ID NO: 23998 - RNA, 20 nt, Artificial Sequence
  Guide RNA
cugaacguggcaagagucau

SEQ ID NO: 23999 - RNA, 20 nt, Artificial Sequence
  Guide RNA
cugaacguggcgagagucau

SEQ ID NO: 24000 - RNA, 20 nt, Artificial Sequence
  Guide RNA
cuugccacguucagccacgu

SEQ ID NO: 24001 - RNA, 20 nt, Artificial Sequence
  Guide RNA
gaacguggcaagagucauga

SEQ ID NO: 24002 - RNA, 20 nt, Artificial Sequence
  Guide RNA
gaacguggcgagagucauga

SEQ ID NO: 24003 - RNA, 20 nt, Artificial Sequence
  Guide RNA
gacguggcugaacguggcaa

SEQ ID NO: 24004 - RNA, 20 nt, Artificial Sequence
  Guide RNA
gacguggcugaacguggcga

SEQ ID NO: 24005 - RNA, 20 nt, Artificial Sequence
  Guide RNA
gacucucgccacguucagcc

SEQ ID NO: 24006 - RNA, 20 nt, Artificial Sequence
  Guide RNA
gacucuugccacguucagcc

SEQ ID NO: 24007 - RNA, 20 nt, Artificial Sequence
  Guide RNA
gcaagagucaugaauaacac

SEQ ID NO: 24008 - RNA, 20 nt, Artificial Sequence
  Guide RNA
gcacaguguuauucaugacu

SEQ ID NO: 24009 - RNA, 20 nt, Artificial Sequence
  Guide RNA
gcagacguggcugaacgugg

SEQ ID NO: 24010 - RNA, 20 nt, Artificial Sequence
  Guide RNA
gcgagagucaugaauaacac

SEQ ID NO: 24011 - RNA, 20 nt, Artificial Sequence
  Guide RNA
gcugaacguggcaagaguca

SEQ ID NO: 24012 - RNA, 20 nt, Artificial Sequence
  Guide RNA
gcugaacguggcgagaguca

SEQ ID NO: 24013 - RNA, 20 nt, Artificial Sequence
  Guide RNA
ggcaagagucaugaauaaca

SEQ ID NO: 24014 - RNA, 20 nt, Artificial Sequence
  Guide RNA
ggcgagagucaugaauaaca

SEQ ID NO: 24015 - RNA, 20 nt, Artificial Sequence
  Guide RNA
ggcugaacguggcaagaguc

SEQ ID NO: 24016 - RNA, 20 nt, Artificial Sequence
  Guide RNA
ggcugaacguggcgagaguc

SEQ ID NO: 24017 - RNA, 20 nt, Artificial Sequence
  Guide RNA
guggcaagagucaugaauaa

SEQ ID NO: 24018 - RNA, 20 nt, Artificial Sequence
  Guide RNA
guggcgagagucaugaauaa

SEQ ID NO: 24019 - RNA, 20 nt, Artificial Sequence
  Guide RNA
guggcugaacguggcaagag

SEQ ID NO: 24020 - RNA, 20 nt, Artificial Sequence
  Guide RNA
guggcugaacguggcgagag

SEQ ID NO: 24021 - RNA, 20 nt, Artificial Sequence
  Guide RNA
guguuauucaugacucucgc

SEQ ID NO: 24022 - RNA, 20 nt, Artificial Sequence
  Guide RNA
guguuauucaugacucuugc

SEQ ID NO: 24023 - RNA, 20 nt, Artificial Sequence
  Guide RNA
guuauucaugacucucgcca

SEQ ID NO: 24024 - RNA, 20 nt, Artificial Sequence
  Guide RNA
guuauucaugacucuugcca

SEQ ID NO: 24025 - RNA, 20 nt, Artificial Sequence
  Guide RNA
uauucaugacucucgccacg

SEQ ID NO: 24026 - RNA, 20 nt, Artificial Sequence
  Guide RNA
uauucaugacucuugccacg

SEQ ID NO: 24027 - RNA, 20 nt, Artificial Sequence
  Guide RNA
ucaugacucucgccacguuc

SEQ ID NO: 24028 - RNA, 20 nt, Artificial Sequence
  Guide RNA
ucaugacucuugccacguuc

SEQ ID NO: 24029 - RNA, 20 nt, Artificial Sequence
  Guide RNA
ucgccacguucagccacguc

SEQ ID NO: 24030 - RNA, 20 nt, Artificial Sequence
  Guide RNA
ucucgccacguucagccacg

SEQ ID NO: 24031 - RNA, 20 nt, Artificial Sequence
  Guide RNA
ucuugccacguucagccacg

SEQ ID NO: 24032 - RNA, 20 nt, Artificial Sequence
  Guide RNA
ugaacguggcaagagucaug

SEQ ID NO: 24033 - RNA, 20 nt, Artificial Sequence
  Guide RNA
ugaacguggcgagagucaug

SEQ ID NO: 24034 - RNA, 20 nt, Artificial Sequence
  Guide RNA
ugacucucgccacguucagc

SEQ ID NO: 24035 - RNA, 20 nt, Artificial Sequence
  Guide RNA
ugacucuugccacguucagc

SEQ ID NO: 24036 - RNA, 20 nt, Artificial Sequence
  Guide RNA
uggcaagagucaugaauaac

SEQ ID NO: 24037 - RNA, 20 nt, Artificial Sequence
  Guide RNA
uggcgagagucaugaauaac

SEQ ID NO: 24038 - RNA, 20 nt, Artificial Sequence
  Guide RNA
uggcugaacguggcaagagu

SEQ ID NO: 24039 - RNA, 20 nt, Artificial Sequence
  Guide RNA
uggcugaacguggcgagagu

SEQ ID NO: 24040 - RNA, 20 nt, Artificial Sequence
  Guide RNA
uguuauucaugacucucgcc

SEQ ID NO: 24041 - RNA, 20 nt, Artificial Sequence
  Guide RNA
uguuauucaugacucuugcc

SEQ ID NO: 24042 - RNA, 20 nt, Artificial Sequence
  Guide RNA
uuauucaugacucucgccac

SEQ ID NO: 24043 - RNA, 20 nt, Artificial Sequence
  Guide RNA
uuauucaugacucuugccac

SEQ ID NO: 24044 - RNA, 20 nt, Artificial Sequence
  Guide RNA
uucaugacucucgccacguu

SEQ ID NO: 24045 - RNA, 20 nt, Artificial Sequence
  Guide RNA
uucaugacucuugccacguu

SEQ ID NO: 24046 - RNA, 20 nt, Artificial Sequence
  Guide RNA
uugccacguucagccacguc

SEQ ID NO: 24047 - RNA, 21 nt, Artificial Sequence
  Guide RNA
aacguggcaagagucaugaau

SEQ ID NO: 24048 - RNA, 21 nt, Artificial Sequence
  Guide RNA
aacguggcgagagucaugaau

SEQ ID NO: 24049 - RNA, 21 nt, Artificial Sequence
  Guide RNA
aagcacaguguuauucaugac

SEQ ID NO: 24050 - RNA, 21 nt, Artificial Sequence
  Guide RNA
aagcagacguggcugaacgug

SEQ ID NO: 24051 - RNA, 21 nt, Artificial Sequence
  Guide RNA
acaguguuauucaugacucuc

SEQ ID NO: 24052 - RNA, 21 nt, Artificial Sequence
  Guide RNA
acaguguuauucaugacucuu

SEQ ID NO: 24053 - RNA, 21 nt, Artificial Sequence
  Guide RNA
acguggcaagagucaugaaua

SEQ ID NO: 24054 - RNA, 21 nt, Artificial Sequence
  Guide RNA
acguggcgagagucaugaaua

SEQ ID NO: 24055 - RNA, 21 nt, Artificial Sequence
  Guide RNA
acguggcugaacguggcaaga

SEQ ID NO: 24056 - RNA, 21 nt, Artificial Sequence
  Guide RNA
acguggcugaacguggcgaga

SEQ ID NO: 24057 - RNA, 21 nt, Artificial Sequence
  Guide RNA
acucucgccacguucagccac

SEQ ID NO: 24058 - RNA, 21 nt, Artificial Sequence
  Guide RNA
acucuugccacguucagccac

SEQ ID NO: 24059 - RNA, 21 nt, Artificial Sequence
  Guide RNA
agacguggcugaacguggcaa

SEQ ID NO: 24060 - RNA, 21 nt, Artificial Sequence
  Guide RNA
agacguggcugaacguggcga

SEQ ID NO: 24061 - RNA, 21 nt, Artificial Sequence
  Guide RNA
agcacaguguuauucaugacu

SEQ ID NO: 24062 - RNA, 21 nt, Artificial Sequence
  Guide RNA
agcagacguggcugaacgugg

SEQ ID NO: 24063 - RNA, 21 nt, Artificial Sequence
  Guide RNA
aguguuauucaugacucucgc

SEQ ID NO: 24064 - RNA, 21 nt, Artificial Sequence
  Guide RNA
aguguuauucaugacucuugc

SEQ ID NO: 24065 - RNA, 21 nt, Artificial Sequence
  Guide RNA
augacucucgccacguucagc

SEQ ID NO: 24066 - RNA, 21 nt, Artificial Sequence
  Guide RNA
augacucuugccacguucagc

SEQ ID NO: 24067 - RNA, 21 nt, Artificial Sequence
  Guide RNA
auucaugacucucgccacguu

SEQ ID NO: 24068 - RNA, 21 nt, Artificial Sequence
  Guide RNA
auucaugacucuugccacguu

SEQ ID NO: 24069 - RNA, 21 nt, Artificial Sequence
  Guide RNA
caagagucaugaauaacacug

SEQ ID NO: 24070 - RNA, 21 nt, Artificial Sequence
  Guide RNA
caagcagacguggcugaacgu

SEQ ID NO: 24071 - RNA, 21 nt, Artificial Sequence
  Guide RNA
cacaguguuauucaugacucu

SEQ ID NO: 24072 - RNA, 21 nt, Artificial Sequence
  Guide RNA
cagacguggcugaacguggca

SEQ ID NO: 24073 - RNA, 21 nt, Artificial Sequence
  Guide RNA
cagacguggcugaacguggcg

SEQ ID NO: 24074 - RNA, 21 nt, Artificial Sequence
  Guide RNA
caguguuauucaugacucucg

SEQ ID NO: 24075 - RNA, 21 nt, Artificial Sequence
  Guide RNA
caguguuauucaugacucuug

SEQ ID NO: 24076 - RNA, 21 nt, Artificial Sequence
  Guide RNA
caugacucucgccacguucag

SEQ ID NO: 24077 - RNA, 21 nt, Artificial Sequence
  Guide RNA
caugacucuugccacguucag

SEQ ID NO: 24078 - RNA, 21 nt, Artificial Sequence
  Guide RNA
cgagagucaugaauaacacug

SEQ ID NO: 24079 - RNA, 21 nt, Artificial Sequence
  Guide RNA
cguggcaagagucaugaauaa

SEQ ID NO: 24080 - RNA, 21 nt, Artificial Sequence
  Guide RNA
cguggcgagagucaugaauaa

SEQ ID NO: 24081 - RNA, 21 nt, Artificial Sequence
  Guide RNA
cguggcugaacguggcaagag

SEQ ID NO: 24082 - RNA, 21 nt, Artificial Sequence
  Guide RNA
cguggcugaacguggcgagag

SEQ ID NO: 24083 - RNA, 21 nt, Artificial Sequence
  Guide RNA
cucgccacguucagccacguc

SEQ ID NO: 24084 - RNA, 21 nt, Artificial Sequence
  Guide RNA
cucucgccacguucagccacg

SEQ ID NO: 24085 - RNA, 21 nt, Artificial Sequence
  Guide RNA
cucuugccacguucagccacg

SEQ ID NO: 24086 - RNA, 21 nt, Artificial Sequence
  Guide RNA
cugaacguggcaagagucaug

SEQ ID NO: 24087 - RNA, 21 nt, Artificial Sequence
  Guide RNA
cugaacguggcgagagucaug

SEQ ID NO: 24088 - RNA, 21 nt, Artificial Sequence
  Guide RNA
cuugccacguucagccacguc

SEQ ID NO: 24089 - RNA, 21 nt, Artificial Sequence
  Guide RNA
gaacguggcaagagucaugaa

SEQ ID NO: 24090 - RNA, 21 nt, Artificial Sequence
  Guide RNA
gaacguggcgagagucaugaa

SEQ ID NO: 24091 - RNA, 21 nt, Artificial Sequence
  Guide RNA
gacguggcugaacguggcaag

SEQ ID NO: 24092 - RNA, 21 nt, Artificial Sequence
  Guide RNA
gacguggcugaacguggcgag

SEQ ID NO: 24093 - RNA, 21 nt, Artificial Sequence
  Guide RNA
gacucucgccacguucagcca

SEQ ID NO: 24094 - RNA, 21 nt, Artificial Sequence
  Guide RNA
gacucuugccacguucagcca

SEQ ID NO: 24095 - RNA, 21 nt, Artificial Sequence
  Guide RNA
gcaagagucaugaauaacacu

SEQ ID NO: 24096 - RNA, 21 nt, Artificial Sequence
  Guide RNA
gcacaguguuauucaugacuc

SEQ ID NO: 24097 - RNA, 21 nt, Artificial Sequence
  Guide RNA
gcagacguggcugaacguggc

SEQ ID NO: 24098 - RNA, 21 nt, Artificial Sequence
  Guide RNA
gcgagagucaugaauaacacu

SEQ ID NO: 24099 - RNA, 21 nt, Artificial Sequence
  Guide RNA
gcugaacguggcaagagucau

SEQ ID NO: 24100 - RNA, 21 nt, Artificial Sequence
  Guide RNA
gcugaacguggcgagagucau

SEQ ID NO: 24101 - RNA, 21 nt, Artificial Sequence
  Guide RNA
ggcaagagucaugaauaacac

SEQ ID NO: 24102 - RNA, 21 nt, Artificial Sequence
  Guide RNA
ggcgagagucaugaauaacac

SEQ ID NO: 24103 - RNA, 21 nt, Artificial Sequence
  Guide RNA
ggcugaacguggcaagaguca

SEQ ID NO: 24104 - RNA, 21 nt, Artificial Sequence
  Guide RNA
ggcugaacguggcgagaguca

SEQ ID NO: 24105 - RNA, 21 nt, Artificial Sequence
  Guide RNA
guggcaagagucaugaauaac

SEQ ID NO: 24106 - RNA, 21 nt, Artificial Sequence
  Guide RNA
guggcgagagucaugaauaac

SEQ ID NO: 24107 - RNA, 21 nt, Artificial Sequence
  Guide RNA
guggcugaacguggcaagagu

SEQ ID NO: 24108 - RNA, 21 nt, Artificial Sequence
  Guide RNA
guggcugaacguggcgagagu

SEQ ID NO: 24109 - RNA, 21 nt, Artificial Sequence
  Guide RNA
guguuauucaugacucucgcc

SEQ ID NO: 24110 - RNA, 21 nt, Artificial Sequence
  Guide RNA
guguuauucaugacucuugcc

SEQ ID NO: 24111 - RNA, 21 nt, Artificial Sequence
  Guide RNA
guuauucaugacucucgccac

SEQ ID NO: 24112 - RNA, 21 nt, Artificial Sequence
  Guide RNA
guuauucaugacucuugccac

SEQ ID NO: 24113 - RNA, 21 nt, Artificial Sequence
  Guide RNA
uauucaugacucucgccacgu

SEQ ID NO: 24114 - RNA, 21 nt, Artificial Sequence
  Guide RNA
uauucaugacucuugccacgu

SEQ ID NO: 24115 - RNA, 21 nt, Artificial Sequence
  Guide RNA
ucaugacucucgccacguuca

SEQ ID NO: 24116 - RNA, 21 nt, Artificial Sequence
  Guide RNA
ucaugacucuugccacguuca

SEQ ID NO: 24117 - RNA, 21 nt, Artificial Sequence
  Guide RNA
ucgccacguucagccacgucu

SEQ ID NO: 24118 - RNA, 21 nt, Artificial Sequence
  Guide RNA
ucucgccacguucagccacgu

SEQ ID NO: 24119 - RNA, 21 nt, Artificial Sequence
  Guide RNA
ucuugccacguucagccacgu

SEQ ID NO: 24120 - RNA, 21 nt, Artificial Sequence
  Guide RNA
ugaacguggcaagagucauga

SEQ ID NO: 24121 - RNA, 21 nt, Artificial Sequence
  Guide RNA
ugaacguggcgagagucauga

SEQ ID NO: 24122 - RNA, 21 nt, Artificial Sequence
  Guide RNA
ugacucucgccacguucagcc

SEQ ID NO: 24123 - RNA, 21 nt, Artificial Sequence
  Guide RNA
ugacucuugccacguucagcc

SEQ ID NO: 24124 - RNA, 21 nt, Artificial Sequence
  Guide RNA
uggcaagagucaugaauaaca

SEQ ID NO: 24125 - RNA, 21 nt, Artificial Sequence
  Guide RNA
uggcgagagucaugaauaaca

SEQ ID NO: 24126 - RNA, 21 nt, Artificial Sequence
  Guide RNA
uggcugaacguggcaagaguc

SEQ ID NO: 24127 - RNA, 21 nt, Artificial Sequence
  Guide RNA
uggcugaacguggcgagaguc

SEQ ID NO: 24128 - RNA, 21 nt, Artificial Sequence
  Guide RNA
uguuauucaugacucucgcca

SEQ ID NO: 24129 - RNA, 21 nt, Artificial Sequence
  Guide RNA
uguuauucaugacucuugcca

SEQ ID NO: 24130 - RNA, 21 nt, Artificial Sequence
  Guide RNA
uuauucaugacucucgccacg

SEQ ID NO: 24131 - RNA, 21 nt, Artificial Sequence
  Guide RNA
uuauucaugacucuugccacg

SEQ ID NO: 24132 - RNA, 21 nt, Artificial Sequence
  Guide RNA
uucaugacucucgccacguuc

SEQ ID NO: 24133 - RNA, 21 nt, Artificial Sequence
  Guide RNA
uucaugacucuugccacguuc

SEQ ID NO: 24134 - RNA, 21 nt, Artificial Sequence
  Guide RNA
uugccacguucagccacgucu

SEQ ID NO: 24135 - RNA, 22 nt, Artificial Sequence
  Guide RNA
aaagcacaguguuauucaugac

SEQ ID NO: 24136 - RNA, 22 nt, Artificial Sequence
  Guide RNA
aacguggcaagagucaugaaua

SEQ ID NO: 24137 - RNA, 22 nt, Artificial Sequence
  Guide RNA
aacguggcgagagucaugaaua

SEQ ID NO: 24138 - RNA, 22 nt, Artificial Sequence
  Guide RNA
aagcacaguguuauucaugacu

SEQ ID NO: 24139 - RNA, 22 nt, Artificial Sequence
  Guide RNA
aagcagacguggcugaacgugg

SEQ ID NO: 24140 - RNA, 22 nt, Artificial Sequence
  Guide RNA
acaguguuauucaugacucucg

SEQ ID NO: 24141 - RNA, 22 nt, Artificial Sequence
  Guide RNA
acaguguuauucaugacucuug

SEQ ID NO: 24142 - RNA, 22 nt, Artificial Sequence
  Guide RNA
acguggcaagagucaugaauaa

SEQ ID NO: 24143 - RNA, 22 nt, Artificial Sequence
  Guide RNA
acguggcgagagucaugaauaa

SEQ ID NO: 24144 - RNA, 22 nt, Artificial Sequence
  Guide RNA
acguggcugaacguggcaagag

SEQ ID NO: 24145 - RNA, 22 nt, Artificial Sequence
  Guide RNA
acguggcugaacguggcgagag

SEQ ID NO: 24146 - RNA, 22 nt, Artificial Sequence
  Guide RNA
acucucgccacguucagccacg

SEQ ID NO: 24147 - RNA, 22 nt, Artificial Sequence
  Guide RNA
acucuugccacguucagccacg

SEQ ID NO: 24148 - RNA, 22 nt, Artificial Sequence
  Guide RNA
agacguggcugaacguggcaag

SEQ ID NO: 24149 - RNA, 22 nt, Artificial Sequence
  Guide RNA
agacguggcugaacguggcgag

SEQ ID NO: 24150 - RNA, 22 nt, Artificial Sequence
  Guide RNA
agcacaguguuauucaugacuc

SEQ ID NO: 24151 - RNA, 22 nt, Artificial Sequence
  Guide RNA
agcagacguggcugaacguggc

SEQ ID NO: 24152 - RNA, 22 nt, Artificial Sequence
  Guide RNA
aguguuauucaugacucucgcc

SEQ ID NO: 24153 - RNA, 22 nt, Artificial Sequence
  Guide RNA
aguguuauucaugacucuugcc

SEQ ID NO: 24154 - RNA, 22 nt, Artificial Sequence
  Guide RNA
augacucucgccacguucagcc

SEQ ID NO: 24155 - RNA, 22 nt, Artificial Sequence
  Guide RNA
augacucuugccacguucagcc

SEQ ID NO: 24156 - RNA, 22 nt, Artificial Sequence
  Guide RNA
auucaugacucucgccacguuc

SEQ ID NO: 24157 - RNA, 22 nt, Artificial Sequence
  Guide RNA
auucaugacucuugccacguuc

SEQ ID NO: 24158 - RNA, 22 nt, Artificial Sequence
  Guide RNA
caagagucaugaauaacacugu

SEQ ID NO: 24159 - RNA, 22 nt, Artificial Sequence
  Guide RNA
caagcagacguggcugaacgug

SEQ ID NO: 24160 - RNA, 22 nt, Artificial Sequence
  Guide RNA
cacaguguuauucaugacucuc

SEQ ID NO: 24161 - RNA, 22 nt, Artificial Sequence
  Guide RNA
cacaguguuauucaugacucuu

SEQ ID NO: 24162 - RNA, 22 nt, Artificial Sequence
  Guide RNA
cagacguggcugaacguggcaa

SEQ ID NO: 24163 - RNA, 22 nt, Artificial Sequence
  Guide RNA
cagacguggcugaacguggcga

SEQ ID NO: 24164 - RNA, 22 nt, Artificial Sequence
  Guide RNA
caguguuauucaugacucucgc

SEQ ID NO: 24165 - RNA, 22 nt, Artificial Sequence
  Guide RNA
caguguuauucaugacucuugc

SEQ ID NO: 24166 - RNA, 22 nt, Artificial Sequence
  Guide RNA
caugacucucgccacguucagc

SEQ ID NO: 24167 - RNA, 22 nt, Artificial Sequence
  Guide RNA
caugacucuugccacguucagc

SEQ ID NO: 24168 - RNA, 22 nt, Artificial Sequence
  Guide RNA
ccaagcagacguggcugaacgu

SEQ ID NO: 24169 - RNA, 22 nt, Artificial Sequence
  Guide RNA
cgagagucaugaauaacacugu

SEQ ID NO: 24170 - RNA, 22 nt, Artificial Sequence
  Guide RNA
cguggcaagagucaugaauaac

SEQ ID NO: 24171 - RNA, 22 nt, Artificial Sequence
  Guide RNA
cguggcgagagucaugaauaac

SEQ ID NO: 24172 - RNA, 22 nt, Artificial Sequence
  Guide RNA
cguggcugaacguggcaagagu

SEQ ID NO: 24173 - RNA, 22 nt, Artificial Sequence
  Guide RNA
cguggcugaacguggcgagagu

SEQ ID NO: 24174 - RNA, 22 nt, Artificial Sequence
  Guide RNA
cucgccacguucagccacgucu

SEQ ID NO: 24175 - RNA, 22 nt, Artificial Sequence
  Guide RNA
cucucgccacguucagccacgu

SEQ ID NO: 24176 - RNA, 22 nt, Artificial Sequence
  Guide RNA
cucuugccacguucagccacgu

SEQ ID NO: 24177 - RNA, 22 nt, Artificial Sequence
  Guide RNA
cugaacguggcaagagucauga

SEQ ID NO: 24178 - RNA, 22 nt, Artificial Sequence
  Guide RNA
cugaacguggcgagagucauga

SEQ ID NO: 24179 - RNA, 22 nt, Artificial Sequence
  Guide RNA
cuugccacguucagccacgucu

SEQ ID NO: 24180 - RNA, 22 nt, Artificial Sequence
  Guide RNA
gaacguggcaagagucaugaau

SEQ ID NO: 24181 - RNA, 22 nt, Artificial Sequence
  Guide RNA
gaacguggcgagagucaugaau

SEQ ID NO: 24182 - RNA, 22 nt, Artificial Sequence
  Guide RNA
gacguggcugaacguggcaaga

SEQ ID NO: 24183 - RNA, 22 nt, Artificial Sequence
  Guide RNA
gacguggcugaacguggcgaga

SEQ ID NO: 24184 - RNA, 22 nt, Artificial Sequence
  Guide RNA
gacucucgccacguucagccac

SEQ ID NO: 24185 - RNA, 22 nt, Artificial Sequence
  Guide RNA
gacucuugccacguucagccac

SEQ ID NO: 24186 - RNA, 22 nt, Artificial Sequence
  Guide RNA
gcaagagucaugaauaacacug

SEQ ID NO: 24187 - RNA, 22 nt, Artificial Sequence
  Guide RNA
gcacaguguuauucaugacucu

SEQ ID NO: 24188 - RNA, 22 nt, Artificial Sequence
  Guide RNA
gcagacguggcugaacguggca

SEQ ID NO: 24189 - RNA, 22 nt, Artificial Sequence
  Guide RNA
gcagacguggcugaacguggcg

SEQ ID NO: 24190 - RNA, 22 nt, Artificial Sequence
  Guide RNA
gcgagagucaugaauaacacug

SEQ ID NO: 24191 - RNA, 22 nt, Artificial Sequence
  Guide RNA
gcugaacguggcaagagucaug

SEQ ID NO: 24192 - RNA, 22 nt, Artificial Sequence
  Guide RNA
gcugaacguggcgagagucaug

SEQ ID NO: 24193 - RNA, 22 nt, Artificial Sequence
  Guide RNA
ggcaagagucaugaauaacacu

SEQ ID NO: 24194 - RNA, 22 nt, Artificial Sequence
  Guide RNA
ggcgagagucaugaauaacacu

SEQ ID NO: 24195 - RNA, 22 nt, Artificial Sequence
  Guide RNA
ggcugaacguggcaagagucau

SEQ ID NO: 24196 - RNA, 22 nt, Artificial Sequence
  Guide RNA
ggcugaacguggcgagagucau

SEQ ID NO: 24197 - RNA, 22 nt, Artificial Sequence
  Guide RNA
guggcaagagucaugaauaaca

SEQ ID NO: 24198 - RNA, 22 nt, Artificial Sequence
  Guide RNA
guggcgagagucaugaauaaca

SEQ ID NO: 24199 - RNA, 22 nt, Artificial Sequence
  Guide RNA
guggcugaacguggcaagaguc

SEQ ID NO: 24200 - RNA, 22 nt, Artificial Sequence
  Guide RNA
guggcugaacguggcgagaguc

SEQ ID NO: 24201 - RNA, 22 nt, Artificial Sequence
  Guide RNA
guguuauucaugacucucgcca

SEQ ID NO: 24202 - RNA, 22 nt, Artificial Sequence
  Guide RNA
guguuauucaugacucuugcca

SEQ ID NO: 24203 - RNA, 22 nt, Artificial Sequence
  Guide RNA
guuauucaugacucucgccacg

SEQ ID NO: 24204 - RNA, 22 nt, Artificial Sequence
  Guide RNA
guuauucaugacucuugccacg

SEQ ID NO: 24205 - RNA, 22 nt, Artificial Sequence
  Guide RNA
uauucaugacucucgccacguu

SEQ ID NO: 24206 - RNA, 22 nt, Artificial Sequence
  Guide RNA
uauucaugacucuugccacguu

SEQ ID NO: 24207 - RNA, 22 nt, Artificial Sequence
  Guide RNA
ucaugacucucgccacguucag

SEQ ID NO: 24208 - RNA, 22 nt, Artificial Sequence
  Guide RNA
ucaugacucuugccacguucag

SEQ ID NO: 24209 - RNA, 22 nt, Artificial Sequence
  Guide RNA
ucgccacguucagccacgucug

SEQ ID NO: 24210 - RNA, 22 nt, Artificial Sequence
  Guide RNA
ucucgccacguucagccacguc

SEQ ID NO: 24211 - RNA, 22 nt, Artificial Sequence
  Guide RNA
ucuugccacguucagccacguc

SEQ ID NO: 24212 - RNA, 22 nt, Artificial Sequence
  Guide RNA
ugaacguggcaagagucaugaa

SEQ ID NO: 24213 - RNA, 22 nt, Artificial Sequence
  Guide RNA
ugaacguggcgagagucaugaa

SEQ ID NO: 24214 - RNA, 22 nt, Artificial Sequence
  Guide RNA
ugacucucgccacguucagcca

SEQ ID NO: 24215 - RNA, 22 nt, Artificial Sequence
  Guide RNA
ugacucuugccacguucagcca

SEQ ID NO: 24216 - RNA, 22 nt, Artificial Sequence
  Guide RNA
uggcaagagucaugaauaacac

SEQ ID NO: 24217 - RNA, 22 nt, Artificial Sequence
  Guide RNA
uggcgagagucaugaauaacac

SEQ ID NO: 24218 - RNA, 22 nt, Artificial Sequence
  Guide RNA
uggcugaacguggcaagaguca

SEQ ID NO: 24219 - RNA, 22 nt, Artificial Sequence
  Guide RNA
uggcugaacguggcgagaguca

SEQ ID NO: 24220 - RNA, 22 nt, Artificial Sequence
  Guide RNA
uguuauucaugacucucgccac

SEQ ID NO: 24221 - RNA, 22 nt, Artificial Sequence
  Guide RNA
uguuauucaugacucuugccac

SEQ ID NO: 24222 - RNA, 22 nt, Artificial Sequence
  Guide RNA
uuauucaugacucucgccacgu

SEQ ID NO: 24223 - RNA, 22 nt, Artificial Sequence
  Guide RNA
uuauucaugacucuugccacgu

SEQ ID NO: 24224 - RNA, 22 nt, Artificial Sequence
  Guide RNA
uucaugacucucgccacguuca

SEQ ID NO: 24225 - RNA, 22 nt, Artificial Sequence
  Guide RNA
uucaugacucuugccacguuca

SEQ ID NO: 24226 - RNA, 22 nt, Artificial Sequence
  Guide RNA
uugccacguucagccacgucug

SEQ ID NO: 24227 - RNA, 20 nt, Artificial Sequence
  Guide RNA
aaagcagauaugcuggacca

SEQ ID NO: 24228 - RNA, 20 nt, Artificial Sequence
  Guide RNA
aaagcagauaugcuggaccg

SEQ ID NO: 24229 - RNA, 20 nt, Artificial Sequence
  Guide RNA
aagcagauaugcuggaccau

SEQ ID NO: 24230 - RNA, 20 nt, Artificial Sequence
  Guide RNA
aagcagauaugcuggaccgu

SEQ ID NO: 24231 - RNA, 20 nt, Artificial Sequence
  Guide RNA
accaucaggcaaugggagcu

SEQ ID NO: 24232 - RNA, 20 nt, Artificial Sequence
  Guide RNA
accgucaggcaaugggagcu

SEQ ID NO: 24233 - RNA, 20 nt, Artificial Sequence
  Guide RNA
accuaaagcagauaugcugg

SEQ ID NO: 24234 - RNA, 20 nt, Artificial Sequence
  Guide RNA
acgguccagcauaucugcuu

SEQ ID NO: 24235 - RNA, 20 nt, Artificial Sequence
  Guide RNA
agauaugcuggaccaucagg

SEQ ID NO: 24236 - RNA, 20 nt, Artificial Sequence
  Guide RNA
agauaugcuggaccgucagg

SEQ ID NO: 24237 - RNA, 20 nt, Artificial Sequence
  Guide RNA
agcagauaugcuggaccauc

SEQ ID NO: 24238 - RNA, 20 nt, Artificial Sequence
  Guide RNA
agcagauaugcuggaccguc

SEQ ID NO: 24239 - RNA, 20 nt, Artificial Sequence
  Guide RNA
agcucccauugccugacggu

SEQ ID NO: 24240 - RNA, 20 nt, Artificial Sequence
  Guide RNA
agcucccauugccugauggu

SEQ ID NO: 24241 - RNA, 20 nt, Artificial Sequence
  Guide RNA
auaugcuggaccaucaggca

SEQ ID NO: 24242 - RNA, 20 nt, Artificial Sequence
  Guide RNA
auaugcuggaccgucaggca

SEQ ID NO: 24243 - RNA, 20 nt, Artificial Sequence
  Guide RNA
augcuggaccaucaggcaau

SEQ ID NO: 24244 - RNA, 20 nt, Artificial Sequence
  Guide RNA
augcuggaccgucaggcaau

SEQ ID NO: 24245 - RNA, 20 nt, Artificial Sequence
  Guide RNA
augguccagcauaucugcuu

SEQ ID NO: 24246 - RNA, 20 nt, Artificial Sequence
  Guide RNA
auugccugacgguccagcau

SEQ ID NO: 24247 - RNA, 20 nt, Artificial Sequence
  Guide RNA
auugccugaugguccagcau

SEQ ID NO: 24248 - RNA, 20 nt, Artificial Sequence
  Guide RNA
cagauaugcuggaccaucag

SEQ ID NO: 24249 - RNA, 20 nt, Artificial Sequence
  Guide RNA
cagauaugcuggaccgucag

SEQ ID NO: 24250 - RNA, 20 nt, Artificial Sequence
  Guide RNA
cagcucccauugccugacgg

SEQ ID NO: 24251 - RNA, 20 nt, Artificial Sequence
  Guide RNA
cagcucccauugccugaugg

SEQ ID NO: 24252 - RNA, 20 nt, Artificial Sequence
  Guide RNA
caucaggcaaugggagcugc

SEQ ID NO: 24253 - RNA, 20 nt, Artificial Sequence
  Guide RNA
cauugccugacgguccagca

SEQ ID NO: 24254 - RNA, 20 nt, Artificial Sequence
  Guide RNA
cauugccugaugguccagca

SEQ ID NO: 24255 - RNA, 20 nt, Artificial Sequence
  Guide RNA
ccaucaggcaaugggagcug

SEQ ID NO: 24256 - RNA, 20 nt, Artificial Sequence
  Guide RNA
ccauugccugacgguccagc

SEQ ID NO: 24257 - RNA, 20 nt, Artificial Sequence
  Guide RNA
ccauugccugaugguccagc

SEQ ID NO: 24258 - RNA, 20 nt, Artificial Sequence
  Guide RNA
cccauugccugacgguccag

SEQ ID NO: 24259 - RNA, 20 nt, Artificial Sequence
  Guide RNA
cccauugccugaugguccag

SEQ ID NO: 24260 - RNA, 20 nt, Artificial Sequence
  Guide RNA
ccgucaggcaaugggagcug

SEQ ID NO: 24261 - RNA, 20 nt, Artificial Sequence
  Guide RNA
ccuaaagcagauaugcugga

SEQ ID NO: 24262 - RNA, 20 nt, Artificial Sequence
  Guide RNA
ccugacgguccagcauaucu

SEQ ID NO: 24263 - RNA, 20 nt, Artificial Sequence
  Guide RNA
ccugaugguccagcauaucu

SEQ ID NO: 24264 - RNA, 20 nt, Artificial Sequence
  Guide RNA
cgucaggcaaugggagcugc

SEQ ID NO: 24265 - RNA, 20 nt, Artificial Sequence
  Guide RNA
cguugcagcucccauugccu

SEQ ID NO: 24266 - RNA, 20 nt, Artificial Sequence
  Guide RNA
cuaaagcagauaugcuggac

SEQ ID NO: 24267 - RNA, 20 nt, Artificial Sequence
  Guide RNA
cucccauugccugacggucc

SEQ ID NO: 24268 - RNA, 20 nt, Artificial Sequence
  Guide RNA
cucccauugccugauggucc

SEQ ID NO: 24269 - RNA, 20 nt, Artificial Sequence
  Guide RNA
cugacgguccagcauaucug

SEQ ID NO: 24270 - RNA, 20 nt, Artificial Sequence
  Guide RNA
cugaugguccagcauaucug

SEQ ID NO: 24271 - RNA, 20 nt, Artificial Sequence
  Guide RNA
cuggaccaucaggcaauggg

SEQ ID NO: 24272 - RNA, 20 nt, Artificial Sequence
  Guide RNA
cuggaccgucaggcaauggg

SEQ ID NO: 24273 - RNA, 20 nt, Artificial Sequence
  Guide RNA
gaccaucaggcaaugggagc

SEQ ID NO: 24274 - RNA, 20 nt, Artificial Sequence
  Guide RNA
gaccgucaggcaaugggagc

SEQ ID NO: 24275 - RNA, 20 nt, Artificial Sequence
  Guide RNA
gacgguccagcauaucugcu

SEQ ID NO: 24276 - RNA, 20 nt, Artificial Sequence
  Guide RNA
gauaugcuggaccaucaggc

SEQ ID NO: 24277 - RNA, 20 nt, Artificial Sequence
  Guide RNA
gauaugcuggaccgucaggc

SEQ ID NO: 24278 - RNA, 20 nt, Artificial Sequence
  Guide RNA
gaugguccagcauaucugcu

SEQ ID NO: 24279 - RNA, 20 nt, Artificial Sequence
  Guide RNA
gcagauaugcuggaccauca

SEQ ID NO: 24280 - RNA, 20 nt, Artificial Sequence
  Guide RNA
gcagauaugcuggaccguca

SEQ ID NO: 24281 - RNA, 20 nt, Artificial Sequence
  Guide RNA
gcagcucccauugccugacg

SEQ ID NO: 24282 - RNA, 20 nt, Artificial Sequence
  Guide RNA
gcagcucccauugccugaug

SEQ ID NO: 24283 - RNA, 20 nt, Artificial Sequence
  Guide RNA
gccugacgguccagcauauc

SEQ ID NO: 24284 - RNA, 20 nt, Artificial Sequence
  Guide RNA
gccugaugguccagcauauc

SEQ ID NO: 24285 - RNA, 20 nt, Artificial Sequence
  Guide RNA
gcguugcagcucccauugcc

SEQ ID NO: 24286 - RNA, 20 nt, Artificial Sequence
  Guide RNA
gcucccauugccugacgguc

SEQ ID NO: 24287 - RNA, 20 nt, Artificial Sequence
  Guide RNA
gcucccauugccugaugguc

SEQ ID NO: 24288 - RNA, 20 nt, Artificial Sequence
  Guide RNA
gcuggaccaucaggcaaugg

SEQ ID NO: 24289 - RNA, 20 nt, Artificial Sequence
  Guide RNA
gcuggaccgucaggcaaugg

SEQ ID NO: 24290 - RNA, 20 nt, Artificial Sequence
  Guide RNA
ggaccaucaggcaaugggag

SEQ ID NO: 24291 - RNA, 20 nt, Artificial Sequence
  Guide RNA
ggaccgucaggcaaugggag

SEQ ID NO: 24292 - RNA, 20 nt, Artificial Sequence
  Guide RNA
guugcagcucccauugccug

SEQ ID NO: 24293 - RNA, 20 nt, Artificial Sequence
  Guide RNA
uaaagcagauaugcuggacc

SEQ ID NO: 24294 - RNA, 20 nt, Artificial Sequence
  Guide RNA
uaugcuggaccaucaggcaa

SEQ ID NO: 24295 - RNA, 20 nt, Artificial Sequence
  Guide RNA
uaugcuggaccgucaggcaa

SEQ ID NO: 24296 - RNA, 20 nt, Artificial Sequence
  Guide RNA
ucccauugccugacggucca

SEQ ID NO: 24297 - RNA, 20 nt, Artificial Sequence
  Guide RNA
ucccauugccugauggucca

SEQ ID NO: 24298 - RNA, 20 nt, Artificial Sequence
  Guide RNA
ugacgguccagcauaucugc

SEQ ID NO: 24299 - RNA, 20 nt, Artificial Sequence
  Guide RNA
ugaugguccagcauaucugc

SEQ ID NO: 24300 - RNA, 20 nt, Artificial Sequence
  Guide RNA
ugcagcucccauugccugac

SEQ ID NO: 24301 - RNA, 20 nt, Artificial Sequence
  Guide RNA
ugcagcucccauugccugau

SEQ ID NO: 24302 - RNA, 20 nt, Artificial Sequence
  Guide RNA
ugccugacgguccagcauau

SEQ ID NO: 24303 - RNA, 20 nt, Artificial Sequence
  Guide RNA
ugccugaugguccagcauau

SEQ ID NO: 24304 - RNA, 20 nt, Artificial Sequence
  Guide RNA
ugcuggaccaucaggcaaug

SEQ ID NO: 24305 - RNA, 20 nt, Artificial Sequence
  Guide RNA
ugcuggaccgucaggcaaug

SEQ ID NO: 24306 - RNA, 20 nt, Artificial Sequence
  Guide RNA
uggaccaucaggcaauggga

SEQ ID NO: 24307 - RNA, 20 nt, Artificial Sequence
  Guide RNA
uggaccgucaggcaauggga

SEQ ID NO: 24308 - RNA, 20 nt, Artificial Sequence
  Guide RNA
uugcagcucccauugccuga

SEQ ID NO: 24309 - RNA, 20 nt, Artificial Sequence
  Guide RNA
uugccugacgguccagcaua

SEQ ID NO: 24310 - RNA, 20 nt, Artificial Sequence
  Guide RNA
uugccugaugguccagcaua

SEQ ID NO: 24311 - RNA, 21 nt, Artificial Sequence
  Guide RNA
aaagcagauaugcuggaccau

SEQ ID NO: 24312 - RNA, 21 nt, Artificial Sequence
  Guide RNA
aaagcagauaugcuggaccgu

SEQ ID NO: 24313 - RNA, 21 nt, Artificial Sequence
  Guide RNA
aagcagauaugcuggaccauc

SEQ ID NO: 24314 - RNA, 21 nt, Artificial Sequence
  Guide RNA
aagcagauaugcuggaccguc

SEQ ID NO: 24315 - RNA, 21 nt, Artificial Sequence
  Guide RNA
accaucaggcaaugggagcug

SEQ ID NO: 24316 - RNA, 21 nt, Artificial Sequence
  Guide RNA
accgucaggcaaugggagcug

SEQ ID NO: 24317 - RNA, 21 nt, Artificial Sequence
  Guide RNA
accuaaagcagauaugcugga

SEQ ID NO: 24318 - RNA, 21 nt, Artificial Sequence
  Guide RNA
acgguccagcauaucugcuuu

SEQ ID NO: 24319 - RNA, 21 nt, Artificial Sequence
  Guide RNA
agauaugcuggaccaucaggc

SEQ ID NO: 24320 - RNA, 21 nt, Artificial Sequence
  Guide RNA
agauaugcuggaccgucaggc

SEQ ID NO: 24321 - RNA, 21 nt, Artificial Sequence
  Guide RNA
agcagauaugcuggaccauca

SEQ ID NO: 24322 - RNA, 21 nt, Artificial Sequence
  Guide RNA
agcagauaugcuggaccguca

SEQ ID NO: 24323 - RNA, 21 nt, Artificial Sequence
  Guide RNA
agcucccauugccugacgguc

SEQ ID NO: 24324 - RNA, 21 nt, Artificial Sequence
  Guide RNA
agcucccauugccugaugguc

SEQ ID NO: 24325 - RNA, 21 nt, Artificial Sequence
  Guide RNA
auaugcuggaccaucaggcaa

SEQ ID NO: 24326 - RNA, 21 nt, Artificial Sequence
  Guide RNA
auaugcuggaccgucaggcaa

SEQ ID NO: 24327 - RNA, 21 nt, Artificial Sequence
  Guide RNA
augcuggaccaucaggcaaug

SEQ ID NO: 24328 - RNA, 21 nt, Artificial Sequence
  Guide RNA
augcuggaccgucaggcaaug

SEQ ID NO: 24329 - RNA, 21 nt, Artificial Sequence
  Guide RNA
augguccagcauaucugcuuu

SEQ ID NO: 24330 - RNA, 21 nt, Artificial Sequence
  Guide RNA
auugccugacgguccagcaua

SEQ ID NO: 24331 - RNA, 21 nt, Artificial Sequence
  Guide RNA
auugccugaugguccagcaua

SEQ ID NO: 24332 - RNA, 21 nt, Artificial Sequence
  Guide RNA
cagauaugcuggaccaucagg

SEQ ID NO: 24333 - RNA, 21 nt, Artificial Sequence
  Guide RNA
cagauaugcuggaccgucagg

SEQ ID NO: 24334 - RNA, 21 nt, Artificial Sequence
  Guide RNA
cagcucccauugccugacggu

SEQ ID NO: 24335 - RNA, 21 nt, Artificial Sequence
  Guide RNA
cagcucccauugccugauggu

SEQ ID NO: 24336 - RNA, 21 nt, Artificial Sequence
  Guide RNA
caucaggcaaugggagcugca

SEQ ID NO: 24337 - RNA, 21 nt, Artificial Sequence
  Guide RNA
cauugccugacgguccagcau

SEQ ID NO: 24338 - RNA, 21 nt, Artificial Sequence
  Guide RNA
cauugccugaugguccagcau

SEQ ID NO: 24339 - RNA, 21 nt, Artificial Sequence
  Guide RNA
ccaucaggcaaugggagcugc

SEQ ID NO: 24340 - RNA, 21 nt, Artificial Sequence
  Guide RNA
ccauugccugacgguccagca

SEQ ID NO: 24341 - RNA, 21 nt, Artificial Sequence
  Guide RNA
ccauugccugaugguccagca

SEQ ID NO: 24342 - RNA, 21 nt, Artificial Sequence
  Guide RNA
cccauugccugacgguccagc

SEQ ID NO: 24343 - RNA, 21 nt, Artificial Sequence
  Guide RNA
cccauugccugaugguccagc

SEQ ID NO: 24344 - RNA, 21 nt, Artificial Sequence
  Guide RNA
ccgucaggcaaugggagcugc

SEQ ID NO: 24345 - RNA, 21 nt, Artificial Sequence
  Guide RNA
ccuaaagcagauaugcuggac

SEQ ID NO: 24346 - RNA, 21 nt, Artificial Sequence
  Guide RNA
ccugacgguccagcauaucug

SEQ ID NO: 24347 - RNA, 21 nt, Artificial Sequence
  Guide RNA
ccugaugguccagcauaucug

SEQ ID NO: 24348 - RNA, 21 nt, Artificial Sequence
  Guide RNA
cgucaggcaaugggagcugca

SEQ ID NO: 24349 - RNA, 21 nt, Artificial Sequence
  Guide RNA
cguugcagcucccauugccug

SEQ ID NO: 24350 - RNA, 21 nt, Artificial Sequence
  Guide RNA
cuaaagcagauaugcuggacc

SEQ ID NO: 24351 - RNA, 21 nt, Artificial Sequence
  Guide RNA
cucccauugccugacggucca

SEQ ID NO: 24352 - RNA, 21 nt, Artificial Sequence
  Guide RNA
cucccauugccugauggucca

SEQ ID NO: 24353 - RNA, 21 nt, Artificial Sequence
  Guide RNA
cugacgguccagcauaucugc

SEQ ID NO: 24354 - RNA, 21 nt, Artificial Sequence
  Guide RNA
cugaugguccagcauaucugc

SEQ ID NO: 24355 - RNA, 21 nt, Artificial Sequence
  Guide RNA
cuggaccaucaggcaauggga

SEQ ID NO: 24356 - RNA, 21 nt, Artificial Sequence
  Guide RNA
cuggaccgucaggcaauggga

SEQ ID NO: 24357 - RNA, 21 nt, Artificial Sequence
  Guide RNA
gaccaucaggcaaugggagcu

SEQ ID NO: 24358 - RNA, 21 nt, Artificial Sequence
  Guide RNA
gaccgucaggcaaugggagcu

SEQ ID NO: 24359 - RNA, 21 nt, Artificial Sequence
  Guide RNA
gacgguccagcauaucugcuu

SEQ ID NO: 24360 - RNA, 21 nt, Artificial Sequence
  Guide RNA
gauaugcuggaccaucaggca

SEQ ID NO: 24361 - RNA, 21 nt, Artificial Sequence
  Guide RNA
gauaugcuggaccgucaggca

SEQ ID NO: 24362 - RNA, 21 nt, Artificial Sequence
  Guide RNA
gaugguccagcauaucugcuu

SEQ ID NO: 24363 - RNA, 21 nt, Artificial Sequence
  Guide RNA
gcagauaugcuggaccaucag

SEQ ID NO: 24364 - RNA, 21 nt, Artificial Sequence
  Guide RNA
gcagauaugcuggaccgucag

SEQ ID NO: 24365 - RNA, 21 nt, Artificial Sequence
  Guide RNA
gcagcucccauugccugacgg

SEQ ID NO: 24366 - RNA, 21 nt, Artificial Sequence
  Guide RNA
gcagcucccauugccugaugg

SEQ ID NO: 24367 - RNA, 21 nt, Artificial Sequence
  Guide RNA
gccugacgguccagcauaucu

SEQ ID NO: 24368 - RNA, 21 nt, Artificial Sequence
  Guide RNA
gccugaugguccagcauaucu

SEQ ID NO: 24369 - RNA, 21 nt, Artificial Sequence
  Guide RNA
gcguugcagcucccauugccu

SEQ ID NO: 24370 - RNA, 21 nt, Artificial Sequence
  Guide RNA
gcucccauugccugacggucc

SEQ ID NO: 24371 - RNA, 21 nt, Artificial Sequence
  Guide RNA
gcucccauugccugauggucc

SEQ ID NO: 24372 - RNA, 21 nt, Artificial Sequence
  Guide RNA
gcuggaccaucaggcaauggg

SEQ ID NO: 24373 - RNA, 21 nt, Artificial Sequence
  Guide RNA
gcuggaccgucaggcaauggg

SEQ ID NO: 24374 - RNA, 21 nt, Artificial Sequence
  Guide RNA
ggaccaucaggcaaugggagc

SEQ ID NO: 24375 - RNA, 21 nt, Artificial Sequence
  Guide RNA
ggaccgucaggcaaugggagc

SEQ ID NO: 24376 - RNA, 21 nt, Artificial Sequence
  Guide RNA
ggcguugcagcucccauugcc

SEQ ID NO: 24377 - RNA, 21 nt, Artificial Sequence
  Guide RNA
guugcagcucccauugccuga

SEQ ID NO: 24378 - RNA, 21 nt, Artificial Sequence
  Guide RNA
uaaagcagauaugcuggacca

SEQ ID NO: 24379 - RNA, 21 nt, Artificial Sequence
  Guide RNA
uaaagcagauaugcuggaccg

SEQ ID NO: 24380 - RNA, 21 nt, Artificial Sequence
  Guide RNA
uaccuaaagcagauaugcugg

SEQ ID NO: 24381 - RNA, 21 nt, Artificial Sequence
  Guide RNA
uaugcuggaccaucaggcaau

SEQ ID NO: 24382 - RNA, 21 nt, Artificial Sequence
  Guide RNA
uaugcuggaccgucaggcaau

SEQ ID NO: 24383 - RNA, 21 nt, Artificial Sequence
  Guide RNA
ucccauugccugacgguccag

SEQ ID NO: 24384 - RNA, 21 nt, Artificial Sequence
  Guide RNA
ucccauugccugaugguccag

SEQ ID NO: 24385 - RNA, 21 nt, Artificial Sequence
  Guide RNA
ugacgguccagcauaucugcu

SEQ ID NO: 24386 - RNA, 21 nt, Artificial Sequence
  Guide RNA
ugaugguccagcauaucugcu

SEQ ID NO: 24387 - RNA, 21 nt, Artificial Sequence
  Guide RNA
ugcagcucccauugccugacg

SEQ ID NO: 24388 - RNA, 21 nt, Artificial Sequence
  Guide RNA
ugcagcucccauugccugaug

SEQ ID NO: 24389 - RNA, 21 nt, Artificial Sequence
  Guide RNA
ugccugacgguccagcauauc

SEQ ID NO: 24390 - RNA, 21 nt, Artificial Sequence
  Guide RNA
ugccugaugguccagcauauc

SEQ ID NO: 24391 - RNA, 21 nt, Artificial Sequence
  Guide RNA
ugcuggaccaucaggcaaugg

SEQ ID NO: 24392 - RNA, 21 nt, Artificial Sequence
  Guide RNA
ugcuggaccgucaggcaaugg

SEQ ID NO: 24393 - RNA, 21 nt, Artificial Sequence
  Guide RNA
uggaccaucaggcaaugggag

SEQ ID NO: 24394 - RNA, 21 nt, Artificial Sequence
  Guide RNA
uggaccgucaggcaaugggag

SEQ ID NO: 24395 - RNA, 21 nt, Artificial Sequence
  Guide RNA
uugcagcucccauugccugac

SEQ ID NO: 24396 - RNA, 21 nt, Artificial Sequence
  Guide RNA
uugcagcucccauugccugau

SEQ ID NO: 24397 - RNA, 21 nt, Artificial Sequence
  Guide RNA
uugccugacgguccagcauau

SEQ ID NO: 24398 - RNA, 21 nt, Artificial Sequence
  Guide RNA
uugccugaugguccagcauau

SEQ ID NO: 24399 - RNA, 22 nt, Artificial Sequence
  Guide RNA
aaagcagauaugcuggaccauc

SEQ ID NO: 24400 - RNA, 22 nt, Artificial Sequence
  Guide RNA
aaagcagauaugcuggaccguc

SEQ ID NO: 24401 - RNA, 22 nt, Artificial Sequence
  Guide RNA
aagcagauaugcuggaccauca

SEQ ID NO: 24402 - RNA, 22 nt, Artificial Sequence
  Guide RNA
aagcagauaugcuggaccguca

SEQ ID NO: 24403 - RNA, 22 nt, Artificial Sequence
  Guide RNA
accaucaggcaaugggagcugc

SEQ ID NO: 24404 - RNA, 22 nt, Artificial Sequence
  Guide RNA
accgucaggcaaugggagcugc

SEQ ID NO: 24405 - RNA, 22 nt, Artificial Sequence
  Guide RNA
accuaaagcagauaugcuggac

SEQ ID NO: 24406 - RNA, 22 nt, Artificial Sequence
  Guide RNA
acgguccagcauaucugcuuua

SEQ ID NO: 24407 - RNA, 22 nt, Artificial Sequence
  Guide RNA
agauaugcuggaccaucaggca

SEQ ID NO: 24408 - RNA, 22 nt, Artificial Sequence
  Guide RNA
agauaugcuggaccgucaggca

SEQ ID NO: 24409 - RNA, 22 nt, Artificial Sequence
  Guide RNA
agcagauaugcuggaccaucag

SEQ ID NO: 24410 - RNA, 22 nt, Artificial Sequence
  Guide RNA
agcagauaugcuggaccgucag

SEQ ID NO: 24411 - RNA, 22 nt, Artificial Sequence
  Guide RNA
agcucccauugccugacggucc

SEQ ID NO: 24412 - RNA, 22 nt, Artificial Sequence
  Guide RNA
agcucccauugccugauggucc

SEQ ID NO: 24413 - RNA, 22 nt, Artificial Sequence
  Guide RNA
aggcguugcagcucccauugcc

SEQ ID NO: 24414 - RNA, 22 nt, Artificial Sequence
  Guide RNA
auaugcuggaccaucaggcaau

SEQ ID NO: 24415 - RNA, 22 nt, Artificial Sequence
  Guide RNA
auaugcuggaccgucaggcaau

SEQ ID NO: 24416 - RNA, 22 nt, Artificial Sequence
  Guide RNA
augcuggaccaucaggcaaugg

SEQ ID NO: 24417 - RNA, 22 nt, Artificial Sequence
  Guide RNA
augcuggaccgucaggcaaugg

SEQ ID NO: 24418 - RNA, 22 nt, Artificial Sequence
  Guide RNA
augguccagcauaucugcuuua

SEQ ID NO: 24419 - RNA, 22 nt, Artificial Sequence
  Guide RNA
auugccugacgguccagcauau

SEQ ID NO: 24420 - RNA, 22 nt, Artificial Sequence
  Guide RNA
auugccugaugguccagcauau

SEQ ID NO: 24421 - RNA, 22 nt, Artificial Sequence
  Guide RNA
cagauaugcuggaccaucaggc

SEQ ID NO: 24422 - RNA, 22 nt, Artificial Sequence
  Guide RNA
cagauaugcuggaccgucaggc

SEQ ID NO: 24423 - RNA, 22 nt, Artificial Sequence
  Guide RNA
cagcucccauugccugacgguc

SEQ ID NO: 24424 - RNA, 22 nt, Artificial Sequence
  Guide RNA
cagcucccauugccugaugguc

SEQ ID NO: 24425 - RNA, 22 nt, Artificial Sequence
  Guide RNA
caucaggcaaugggagcugcaa

SEQ ID NO: 24426 - RNA, 22 nt, Artificial Sequence
  Guide RNA
cauugccugacgguccagcaua

SEQ ID NO: 24427 - RNA, 22 nt, Artificial Sequence
  Guide RNA
cauugccugaugguccagcaua

SEQ ID NO: 24428 - RNA, 22 nt, Artificial Sequence
  Guide RNA
ccaucaggcaaugggagcugca

SEQ ID NO: 24429 - RNA, 22 nt, Artificial Sequence
  Guide RNA
ccauugccugacgguccagcau

SEQ ID NO: 24430 - RNA, 22 nt, Artificial Sequence
  Guide RNA
ccauugccugaugguccagcau

SEQ ID NO: 24431 - RNA, 22 nt, Artificial Sequence
  Guide RNA
cccauugccugacgguccagca

SEQ ID NO: 24432 - RNA, 22 nt, Artificial Sequence
  Guide RNA
cccauugccugaugguccagca

SEQ ID NO: 24433 - RNA, 22 nt, Artificial Sequence
  Guide RNA
ccgucaggcaaugggagcugca

SEQ ID NO: 24434 - RNA, 22 nt, Artificial Sequence
  Guide RNA
ccuaaagcagauaugcuggacc

SEQ ID NO: 24435 - RNA, 22 nt, Artificial Sequence
  Guide RNA
ccugacgguccagcauaucugc

SEQ ID NO: 24436 - RNA, 22 nt, Artificial Sequence
  Guide RNA
ccugaugguccagcauaucugc

SEQ ID NO: 24437 - RNA, 22 nt, Artificial Sequence
  Guide RNA
cgucaggcaaugggagcugcaa

SEQ ID NO: 24438 - RNA, 22 nt, Artificial Sequence
  Guide RNA
cguugcagcucccauugccuga

SEQ ID NO: 24439 - RNA, 22 nt, Artificial Sequence
  Guide RNA
cuaaagcagauaugcuggacca

SEQ ID NO: 24440 - RNA, 22 nt, Artificial Sequence
  Guide RNA
cuaaagcagauaugcuggaccg

SEQ ID NO: 24441 - RNA, 22 nt, Artificial Sequence
  Guide RNA
cuaccuaaagcagauaugcugg

SEQ ID NO: 24442 - RNA, 22 nt, Artificial Sequence
  Guide RNA
cucccauugccugacgguccag

SEQ ID NO: 24443 - RNA, 22 nt, Artificial Sequence
  Guide RNA
cucccauugccugaugguccag

SEQ ID NO: 24444 - RNA, 22 nt, Artificial Sequence
  Guide RNA
cugacgguccagcauaucugcu

SEQ ID NO: 24445 - RNA, 22 nt, Artificial Sequence
  Guide RNA
cugaugguccagcauaucugcu

SEQ ID NO: 24446 - RNA, 22 nt, Artificial Sequence
  Guide RNA
cuggaccaucaggcaaugggag

SEQ ID NO: 24447 - RNA, 22 nt, Artificial Sequence
  Guide RNA
cuggaccgucaggcaaugggag

SEQ ID NO: 24448 - RNA, 22 nt, Artificial Sequence
  Guide RNA
gaccaucaggcaaugggagcug

SEQ ID NO: 24449 - RNA, 22 nt, Artificial Sequence
  Guide RNA
gaccgucaggcaaugggagcug

SEQ ID NO: 24450 - RNA, 22 nt, Artificial Sequence
  Guide RNA
gacgguccagcauaucugcuuu

SEQ ID NO: 24451 - RNA, 22 nt, Artificial Sequence
  Guide RNA
gauaugcuggaccaucaggcaa

SEQ ID NO: 24452 - RNA, 22 nt, Artificial Sequence
  Guide RNA
gauaugcuggaccgucaggcaa

SEQ ID NO: 24453 - RNA, 22 nt, Artificial Sequence
  Guide RNA
gaugguccagcauaucugcuuu

SEQ ID NO: 24454 - RNA, 22 nt, Artificial Sequence
  Guide RNA
gcagauaugcuggaccaucagg

SEQ ID NO: 24455 - RNA, 22 nt, Artificial Sequence
  Guide RNA
gcagauaugcuggaccgucagg

SEQ ID NO: 24456 - RNA, 22 nt, Artificial Sequence
  Guide RNA
gcagcucccauugccugacggu

SEQ ID NO: 24457 - RNA, 22 nt, Artificial Sequence
  Guide RNA
gcagcucccauugccugauggu

SEQ ID NO: 24458 - RNA, 22 nt, Artificial Sequence
  Guide RNA
gccugacgguccagcauaucug

SEQ ID NO: 24459 - RNA, 22 nt, Artificial Sequence
  Guide RNA
gccugaugguccagcauaucug

SEQ ID NO: 24460 - RNA, 22 nt, Artificial Sequence
  Guide RNA
gcguugcagcucccauugccug

SEQ ID NO: 24461 - RNA, 22 nt, Artificial Sequence
  Guide RNA
gcucccauugccugacggucca

SEQ ID NO: 24462 - RNA, 22 nt, Artificial Sequence
  Guide RNA
gcucccauugccugauggucca

SEQ ID NO: 24463 - RNA, 22 nt, Artificial Sequence
  Guide RNA
gcuggaccaucaggcaauggga

SEQ ID NO: 24464 - RNA, 22 nt, Artificial Sequence
  Guide RNA
gcuggaccgucaggcaauggga

SEQ ID NO: 24465 - RNA, 22 nt, Artificial Sequence
  Guide RNA
ggaccaucaggcaaugggagcu

SEQ ID NO: 24466 - RNA, 22 nt, Artificial Sequence
  Guide RNA
ggaccgucaggcaaugggagcu

SEQ ID NO: 24467 - RNA, 22 nt, Artificial Sequence
  Guide RNA
ggcguugcagcucccauugccu

SEQ ID NO: 24468 - RNA, 22 nt, Artificial Sequence
  Guide RNA
guugcagcucccauugccugac

SEQ ID NO: 24469 - RNA, 22 nt, Artificial Sequence
  Guide RNA
guugcagcucccauugccugau

SEQ ID NO: 24470 - RNA, 22 nt, Artificial Sequence
  Guide RNA
uaaagcagauaugcuggaccau

SEQ ID NO: 24471 - RNA, 22 nt, Artificial Sequence
  Guide RNA
uaaagcagauaugcuggaccgu

SEQ ID NO: 24472 - RNA, 22 nt, Artificial Sequence
  Guide RNA
uaccuaaagcagauaugcugga

SEQ ID NO: 24473 - RNA, 22 nt, Artificial Sequence
  Guide RNA
uaugcuggaccaucaggcaaug

SEQ ID NO: 24474 - RNA, 22 nt, Artificial Sequence
  Guide RNA
uaugcuggaccgucaggcaaug

SEQ ID NO: 24475 - RNA, 22 nt, Artificial Sequence
  Guide RNA
ucccauugccugacgguccagc

SEQ ID NO: 24476 - RNA, 22 nt, Artificial Sequence
  Guide RNA
ucccauugccugaugguccagc

SEQ ID NO: 24477 - RNA, 22 nt, Artificial Sequence
  Guide RNA
ugacgguccagcauaucugcuu

SEQ ID NO: 24478 - RNA, 22 nt, Artificial Sequence
  Guide RNA
ugaugguccagcauaucugcuu

SEQ ID NO: 24479 - RNA, 22 nt, Artificial Sequence
  Guide RNA
ugcagcucccauugccugacgg

SEQ ID NO: 24480 - RNA, 22 nt, Artificial Sequence
  Guide RNA
ugcagcucccauugccugaugg

SEQ ID NO: 24481 - RNA, 22 nt, Artificial Sequence
  Guide RNA
ugccugacgguccagcauaucu

SEQ ID NO: 24482 - RNA, 22 nt, Artificial Sequence
  Guide RNA
ugccugaugguccagcauaucu

SEQ ID NO: 24483 - RNA, 22 nt, Artificial Sequence
  Guide RNA
ugcuggaccaucaggcaauggg

SEQ ID NO: 24484 - RNA, 22 nt, Artificial Sequence
  Guide RNA
ugcuggaccgucaggcaauggg

SEQ ID NO: 24485 - RNA, 22 nt, Artificial Sequence
  Guide RNA
uggaccaucaggcaaugggagc

SEQ ID NO: 24486 - RNA, 22 nt, Artificial Sequence
  Guide RNA
uggaccgucaggcaaugggagc

SEQ ID NO: 24487 - RNA, 22 nt, Artificial Sequence
  Guide RNA
uugcagcucccauugccugacg

SEQ ID NO: 24488 - RNA, 22 nt, Artificial Sequence
  Guide RNA
uugcagcucccauugccugaug

SEQ ID NO: 24489 - RNA, 22 nt, Artificial Sequence
  Guide RNA
uugccugacgguccagcauauc

SEQ ID NO: 24490 - RNA, 22 nt, Artificial Sequence
  Guide RNA
uugccugaugguccagcauauc

SEQ ID NO: 24491 - RNA, 20 nt, Artificial Sequence
  Guide RNA
aaacuguaacucuagacaau

SEQ ID NO: 24492 - RNA, 20 nt, Artificial Sequence
  Guide RNA
aacucuagacaaugucuauu

SEQ ID NO: 24493 - RNA, 20 nt, Artificial Sequence
  Guide RNA
aacuguaacucuagacaaug

SEQ ID NO: 24494 - RNA, 20 nt, Artificial Sequence
  Guide RNA
aacuguaauucuagacaaug

SEQ ID NO: 24495 - RNA, 20 nt, Artificial Sequence
  Guide RNA
aauagacauugucuagaguu

SEQ ID NO: 24496 - RNA, 20 nt, Artificial Sequence
  Guide RNA
acauugucuagaauuacagu

SEQ ID NO: 24497 - RNA, 20 nt, Artificial Sequence
  Guide RNA
acauugucuagaguuacagu

SEQ ID NO: 24498 - RNA, 20 nt, Artificial Sequence
  Guide RNA
acucuagacaaugucuauug

SEQ ID NO: 24499 - RNA, 20 nt, Artificial Sequence
  Guide RNA
acuguaacucuagacaaugu

SEQ ID NO: 24500 - RNA, 20 nt, Artificial Sequence
  Guide RNA
acuguaauucuagacaaugu

SEQ ID NO: 24501 - RNA, 20 nt, Artificial Sequence
  Guide RNA
acuuccaauagacauugucu

SEQ ID NO: 24502 - RNA, 20 nt, Artificial Sequence
  Guide RNA
agacauugucuagaauuaca

SEQ ID NO: 24503 - RNA, 20 nt, Artificial Sequence
  Guide RNA
agacauugucuagaguuaca

SEQ ID NO: 24504 - RNA, 20 nt, Artificial Sequence
  Guide RNA
agagugagcuuauaaacugu

SEQ ID NO: 24505 - RNA, 20 nt, Artificial Sequence
  Guide RNA
agaguuacaguuuauaagcu

SEQ ID NO: 24506 - RNA, 20 nt, Artificial Sequence
  Guide RNA
agcuuauaaacuguaacucu

SEQ ID NO: 24507 - RNA, 20 nt, Artificial Sequence
  Guide RNA
agugagcuuauaaacuguaa

SEQ ID NO: 24508 - RNA, 20 nt, Artificial Sequence
  Guide RNA
aguuacaguuuauaagcuca

SEQ ID NO: 24509 - RNA, 20 nt, Artificial Sequence
  Guide RNA
auaaacuguaacucuagaca

SEQ ID NO: 24510 - RNA, 20 nt, Artificial Sequence
  Guide RNA
auagacauugucuagaguua

SEQ ID NO: 24511 - RNA, 20 nt, Artificial Sequence
  Guide RNA
auucuagacaaugucuauug

SEQ ID NO: 24512 - RNA, 20 nt, Artificial Sequence
  Guide RNA
auugucuagaguuacaguuu

SEQ ID NO: 24513 - RNA, 20 nt, Artificial Sequence
  Guide RNA
caauagacauugucuagaau

SEQ ID NO: 24514 - RNA, 20 nt, Artificial Sequence
  Guide RNA
caauagacauugucuagagu

SEQ ID NO: 24515 - RNA, 20 nt, Artificial Sequence
  Guide RNA
cauugucuagaauuacaguu

SEQ ID NO: 24516 - RNA, 20 nt, Artificial Sequence
  Guide RNA
cauugucuagaguuacaguu

SEQ ID NO: 24517 - RNA, 20 nt, Artificial Sequence
  Guide RNA
ccaauagacauugucuagaa

SEQ ID NO: 24518 - RNA, 20 nt, Artificial Sequence
  Guide RNA
ccaauagacauugucuagag

SEQ ID NO: 24519 - RNA, 20 nt, Artificial Sequence
  Guide RNA
cuagaguuacaguuuauaag

SEQ ID NO: 24520 - RNA, 20 nt, Artificial Sequence
  Guide RNA
cuguaacucuagacaauguc

SEQ ID NO: 24521 - RNA, 20 nt, Artificial Sequence
  Guide RNA
cuguaauucuagacaauguc

SEQ ID NO: 24522 - RNA, 20 nt, Artificial Sequence
  Guide RNA
cuuauaaacuguaacucuag

SEQ ID NO: 24523 - RNA, 20 nt, Artificial Sequence
  Guide RNA
cuuccaauagacauugucua

SEQ ID NO: 24524 - RNA, 20 nt, Artificial Sequence
  Guide RNA
gaauuacaguuuauaagcuc

SEQ ID NO: 24525 - RNA, 20 nt, Artificial Sequence
  Guide RNA
gacauugucuagaauuacag

SEQ ID NO: 24526 - RNA, 20 nt, Artificial Sequence
  Guide RNA
gacauugucuagaguuacag

SEQ ID NO: 24527 - RNA, 20 nt, Artificial Sequence
  Guide RNA
gagcuuauaaacuguaacuc

SEQ ID NO: 24528 - RNA, 20 nt, Artificial Sequence
  Guide RNA
gagcuuauaaacuguaauuc

SEQ ID NO: 24529 - RNA, 20 nt, Artificial Sequence
  Guide RNA
gagugagcuuauaaacugua

SEQ ID NO: 24530 - RNA, 20 nt, Artificial Sequence
  Guide RNA
gaguuacaguuuauaagcuc

SEQ ID NO: 24531 - RNA, 20 nt, Artificial Sequence
  Guide RNA
gcuuauaaacuguaacucua

SEQ ID NO: 24532 - RNA, 20 nt, Artificial Sequence
  Guide RNA
guaacucuagacaaugucua

SEQ ID NO: 24533 - RNA, 20 nt, Artificial Sequence
  Guide RNA
guaauucuagacaaugucua

SEQ ID NO: 24534 - RNA, 20 nt, Artificial Sequence
  Guide RNA
gucuagaguuacaguuuaua

SEQ ID NO: 24535 - RNA, 20 nt, Artificial Sequence
  Guide RNA
gugagcuuauaaacuguaac

SEQ ID NO: 24536 - RNA, 20 nt, Artificial Sequence
  Guide RNA
gugagcuuauaaacuguaau

SEQ ID NO: 24537 - RNA, 20 nt, Artificial Sequence
  Guide RNA
uaaacuguaacucuagacaa

SEQ ID NO: 24538 - RNA, 20 nt, Artificial Sequence
  Guide RNA
uaacucuagacaaugucuau

SEQ ID NO: 24539 - RNA, 20 nt, Artificial Sequence
  Guide RNA
uagacauugucuagaauuac

SEQ ID NO: 24540 - RNA, 20 nt, Artificial Sequence
  Guide RNA
uagacauugucuagaguuac

SEQ ID NO: 24541 - RNA, 20 nt, Artificial Sequence
  Guide RNA
uagagugagcuuauaaacug

SEQ ID NO: 24542 - RNA, 20 nt, Artificial Sequence
  Guide RNA
uagaguuacaguuuauaagc

SEQ ID NO: 24543 - RNA, 20 nt, Artificial Sequence
  Guide RNA
uauaaacuguaacucuagac

SEQ ID NO: 24544 - RNA, 20 nt, Artificial Sequence
  Guide RNA
uccaauagacauugucuaga

SEQ ID NO: 24545 - RNA, 20 nt, Artificial Sequence
  Guide RNA
ugagcuuauaaacuguaacu

SEQ ID NO: 24546 - RNA, 20 nt, Artificial Sequence
  Guide RNA
uguaacucuagacaaugucu

SEQ ID NO: 24547 - RNA, 20 nt, Artificial Sequence
  Guide RNA
uguaauucuagacaaugucu

SEQ ID NO: 24548 - RNA, 20 nt, Artificial Sequence
  Guide RNA
ugucuagaguuacaguuuau

SEQ ID NO: 24549 - RNA, 20 nt, Artificial Sequence
  Guide RNA
uuccaauagacauugucuag

SEQ ID NO: 24550 - RNA, 20 nt, Artificial Sequence
  Guide RNA
uugucuagaguuacaguuua

SEQ ID NO: 24551 - RNA, 21 nt, Artificial Sequence
  Guide RNA
aaacuguaacucuagacaaug

SEQ ID NO: 24552 - RNA, 21 nt, Artificial Sequence
  Guide RNA
aacucuagacaaugucuauug

SEQ ID NO: 24553 - RNA, 21 nt, Artificial Sequence
  Guide RNA
aacuguaacucuagacaaugu

SEQ ID NO: 24554 - RNA, 21 nt, Artificial Sequence
  Guide RNA
aacuuccaauagacauugucu

SEQ ID NO: 24555 - RNA, 21 nt, Artificial Sequence
  Guide RNA
acauugucuagaguuacaguu

SEQ ID NO: 24556 - RNA, 21 nt, Artificial Sequence
  Guide RNA
acucuagacaaugucuauugg

SEQ ID NO: 24557 - RNA, 21 nt, Artificial Sequence
  Guide RNA
acuguaacucuagacaauguc

SEQ ID NO: 24558 - RNA, 21 nt, Artificial Sequence
  Guide RNA
acuguaauucuagacaauguc

SEQ ID NO: 24559 - RNA, 21 nt, Artificial Sequence
  Guide RNA
acuuccaauagacauugucua

SEQ ID NO: 24560 - RNA, 21 nt, Artificial Sequence
  Guide RNA
agacauugucuagaauuacag

SEQ ID NO: 24561 - RNA, 21 nt, Artificial Sequence
  Guide RNA
agacauugucuagaguuacag

SEQ ID NO: 24562 - RNA, 21 nt, Artificial Sequence
  Guide RNA
agagugagcuuauaaacugua

SEQ ID NO: 24563 - RNA, 21 nt, Artificial Sequence
  Guide RNA
agaguuacaguuuauaagcuc

SEQ ID NO: 24564 - RNA, 21 nt, Artificial Sequence
  Guide RNA
agugagcuuauaaacuguaac

SEQ ID NO: 24565 - RNA, 21 nt, Artificial Sequence
  Guide RNA
aguuacaguuuauaagcucac

SEQ ID NO: 24566 - RNA, 21 nt, Artificial Sequence
  Guide RNA
auagacauugucuagaguuac

SEQ ID NO: 24567 - RNA, 21 nt, Artificial Sequence
  Guide RNA
auucuagacaaugucuauugg

SEQ ID NO: 24568 - RNA, 21 nt, Artificial Sequence
  Guide RNA
caauagacauugucuagaguu

SEQ ID NO: 24569 - RNA, 21 nt, Artificial Sequence
  Guide RNA
cauugucuagaguuacaguuu

SEQ ID NO: 24570 - RNA, 21 nt, Artificial Sequence
  Guide RNA
ccaauagacauugucuagaau

SEQ ID NO: 24571 - RNA, 21 nt, Artificial Sequence
  Guide RNA
ccaauagacauugucuagagu

SEQ ID NO: 24572 - RNA, 21 nt, Artificial Sequence
  Guide RNA
cuagaguuacaguuuauaagc

SEQ ID NO: 24573 - RNA, 21 nt, Artificial Sequence
  Guide RNA
cuguaacucuagacaaugucu

SEQ ID NO: 24574 - RNA, 21 nt, Artificial Sequence
  Guide RNA
cuguaauucuagacaaugucu

SEQ ID NO: 24575 - RNA, 21 nt, Artificial Sequence
  Guide RNA
cuuccaauagacauugucuag

SEQ ID NO: 24576 - RNA, 21 nt, Artificial Sequence
  Guide RNA
gacauugucuagaauuacagu

SEQ ID NO: 24577 - RNA, 21 nt, Artificial Sequence
  Guide RNA
gacauugucuagaguuacagu

SEQ ID NO: 24578 - RNA, 21 nt, Artificial Sequence
  Guide RNA
gagcuuauaaacuguaacucu

SEQ ID NO: 24579 - RNA, 21 nt, Artificial Sequence
  Guide RNA
gagugagcuuauaaacuguaa

SEQ ID NO: 24580 - RNA, 21 nt, Artificial Sequence
  Guide RNA
gaguuacaguuuauaagcuca

SEQ ID NO: 24581 - RNA, 21 nt, Artificial Sequence
  Guide RNA
gcuuauaaacuguaacucuag

SEQ ID NO: 24582 - RNA, 21 nt, Artificial Sequence
  Guide RNA
guaacucuagacaaugucuau

SEQ ID NO: 24583 - RNA, 21 nt, Artificial Sequence
  Guide RNA
gugagcuuauaaacuguaacu

SEQ ID NO: 24584 - RNA, 21 nt, Artificial Sequence
  Guide RNA
uagacauugucuagaguuaca

SEQ ID NO: 24585 - RNA, 21 nt, Artificial Sequence
  Guide RNA
uagagugagcuuauaaacugu

SEQ ID NO: 24586 - RNA, 21 nt, Artificial Sequence
  Guide RNA
uccaauagacauugucuagaa

SEQ ID NO: 24587 - RNA, 21 nt, Artificial Sequence
  Guide RNA
uccaauagacauugucuagag

SEQ ID NO: 24588 - RNA, 21 nt, Artificial Sequence
  Guide RNA
ugagcuuauaaacuguaacuc

SEQ ID NO: 24589 - RNA, 21 nt, Artificial Sequence
  Guide RNA
uguaacucuagacaaugucua

SEQ ID NO: 24590 - RNA, 21 nt, Artificial Sequence
  Guide RNA
uuagagugagcuuauaaacug

SEQ ID NO: 24591 - RNA, 21 nt, Artificial Sequence
  Guide RNA
uuccaauagacauugucuaga

SEQ ID NO: 24592 - RNA, 22 nt, Artificial Sequence
  Guide RNA
aaacuguaacucuagacaaugu

SEQ ID NO: 24593 - RNA, 22 nt, Artificial Sequence
  Guide RNA
aacucuagacaaugucuauugg

SEQ ID NO: 24594 - RNA, 22 nt, Artificial Sequence
  Guide RNA
aacuguaacucuagacaauguc

SEQ ID NO: 24595 - RNA, 22 nt, Artificial Sequence
  Guide RNA
aacuguaauucuagacaauguc

SEQ ID NO: 24596 - RNA, 22 nt, Artificial Sequence
  Guide RNA
aacuuccaauagacauugucua

SEQ ID NO: 24597 - RNA, 22 nt, Artificial Sequence
  Guide RNA
aauagacauugucuagaguuac

SEQ ID NO: 24598 - RNA, 22 nt, Artificial Sequence
  Guide RNA
aauucuagacaaugucuauugg

SEQ ID NO: 24599 - RNA, 22 nt, Artificial Sequence
  Guide RNA
acauugucuagaguuacaguuu

SEQ ID NO: 24600 - RNA, 22 nt, Artificial Sequence
  Guide RNA
acucuagacaaugucuauugga

SEQ ID NO: 24601 - RNA, 22 nt, Artificial Sequence
  Guide RNA
acuguaacucuagacaaugucu

SEQ ID NO: 24602 - RNA, 22 nt, Artificial Sequence
  Guide RNA
acuguaauucuagacaaugucu

SEQ ID NO: 24603 - RNA, 22 nt, Artificial Sequence
  Guide RNA
acuuccaauagacauugucuag

SEQ ID NO: 24604 - RNA, 22 nt, Artificial Sequence
  Guide RNA
agacauugucuagaauuacagu

SEQ ID NO: 24605 - RNA, 22 nt, Artificial Sequence
  Guide RNA
agacauugucuagaguuacagu

SEQ ID NO: 24606 - RNA, 22 nt, Artificial Sequence
  Guide RNA
agagugagcuuauaaacuguaa

SEQ ID NO: 24607 - RNA, 22 nt, Artificial Sequence
  Guide RNA
agaguuacaguuuauaagcuca

SEQ ID NO: 24608 - RNA, 22 nt, Artificial Sequence
  Guide RNA
agcuuauaaacuguaacucuag

SEQ ID NO: 24609 - RNA, 22 nt, Artificial Sequence
  Guide RNA
agugagcuuauaaacuguaacu

SEQ ID NO: 24610 - RNA, 22 nt, Artificial Sequence
  Guide RNA
aguuacaguuuauaagcucacu

SEQ ID NO: 24611 - RNA, 22 nt, Artificial Sequence
  Guide RNA
auagacauugucuagaguuaca

SEQ ID NO: 24612 - RNA, 22 nt, Artificial Sequence
  Guide RNA
auucuagacaaugucuauugga

SEQ ID NO: 24613 - RNA, 22 nt, Artificial Sequence
  Guide RNA
caauagacauugucuagaguua

SEQ ID NO: 24614 - RNA, 22 nt, Artificial Sequence
  Guide RNA
cauugucuagaguuacaguuua

SEQ ID NO: 24615 - RNA, 22 nt, Artificial Sequence
  Guide RNA
ccaauagacauugucuagaauu

SEQ ID NO: 24616 - RNA, 22 nt, Artificial Sequence
  Guide RNA
ccaauagacauugucuagaguu

SEQ ID NO: 24617 - RNA, 22 nt, Artificial Sequence
  Guide RNA
cuagaguuacaguuuauaagcu

SEQ ID NO: 24618 - RNA, 22 nt, Artificial Sequence
  Guide RNA
cuguaacucuagacaaugucua

SEQ ID NO: 24619 - RNA, 22 nt, Artificial Sequence
  Guide RNA
cuguaauucuagacaaugucua

SEQ ID NO: 24620 - RNA, 22 nt, Artificial Sequence
  Guide RNA
cuuauaaacuguaacucuagac

SEQ ID NO: 24621 - RNA, 22 nt, Artificial Sequence
  Guide RNA
cuuccaauagacauugucuaga

SEQ ID NO: 24622 - RNA, 22 nt, Artificial Sequence
  Guide RNA
gaacuuccaauagacauugucu

SEQ ID NO: 24623 - RNA, 22 nt, Artificial Sequence
  Guide RNA
gaauuacaguuuauaagcucac

SEQ ID NO: 24624 - RNA, 22 nt, Artificial Sequence
  Guide RNA
gacauugucuagaauuacaguu

SEQ ID NO: 24625 - RNA, 22 nt, Artificial Sequence
  Guide RNA
gacauugucuagaguuacaguu

SEQ ID NO: 24626 - RNA, 22 nt, Artificial Sequence
  Guide RNA
gagcuuauaaacuguaacucua

SEQ ID NO: 24627 - RNA, 22 nt, Artificial Sequence
  Guide RNA
gagugagcuuauaaacuguaac

SEQ ID NO: 24628 - RNA, 22 nt, Artificial Sequence
  Guide RNA
gagugagcuuauaaacuguaau

SEQ ID NO: 24629 - RNA, 22 nt, Artificial Sequence
  Guide RNA
gaguuacaguuuauaagcucac

SEQ ID NO: 24630 - RNA, 22 nt, Artificial Sequence
  Guide RNA
gcuuauaaacuguaacucuaga

SEQ ID NO: 24631 - RNA, 22 nt, Artificial Sequence
  Guide RNA
guaacucuagacaaugucuauu

SEQ ID NO: 24632 - RNA, 22 nt, Artificial Sequence
  Guide RNA
gucuagaguuacaguuuauaag

SEQ ID NO: 24633 - RNA, 22 nt, Artificial Sequence
  Guide RNA
gugagcuuauaaacuguaacuc

SEQ ID NO: 24634 - RNA, 22 nt, Artificial Sequence
  Guide RNA
gugagcuuauaaacuguaauuc

SEQ ID NO: 24635 - RNA, 22 nt, Artificial Sequence
  Guide RNA
guuagagugagcuuauaaacug

SEQ ID NO: 24636 - RNA, 22 nt, Artificial Sequence
  Guide RNA
uaaacuguaacucuagacaaug

SEQ ID NO: 24637 - RNA, 22 nt, Artificial Sequence
  Guide RNA
uaacucuagacaaugucuauug

SEQ ID NO: 24638 - RNA, 22 nt, Artificial Sequence
  Guide RNA
uagacauugucuagaauuacag

SEQ ID NO: 24639 - RNA, 22 nt, Artificial Sequence
  Guide RNA
uagacauugucuagaguuacag

SEQ ID NO: 24640 - RNA, 22 nt, Artificial Sequence
  Guide RNA
uagagugagcuuauaaacugua

SEQ ID NO: 24641 - RNA, 22 nt, Artificial Sequence
  Guide RNA
uagaguuacaguuuauaagcuc

SEQ ID NO: 24642 - RNA, 22 nt, Artificial Sequence
  Guide RNA
uccaauagacauugucuagaau

SEQ ID NO: 24643 - RNA, 22 nt, Artificial Sequence
  Guide RNA
uccaauagacauugucuagagu

SEQ ID NO: 24644 - RNA, 22 nt, Artificial Sequence
  Guide RNA
ucuagaguuacaguuuauaagc

SEQ ID NO: 24645 - RNA, 22 nt, Artificial Sequence
  Guide RNA
ugagcuuauaaacuguaacucu

SEQ ID NO: 24646 - RNA, 22 nt, Artificial Sequence
  Guide RNA
uguaacucuagacaaugucuau

SEQ ID NO: 24647 - RNA, 22 nt, Artificial Sequence
  Guide RNA
uuagagugagcuuauaaacugu

SEQ ID NO: 24648 - RNA, 22 nt, Artificial Sequence
  Guide RNA
uuccaauagacauugucuagaa

SEQ ID NO: 24649 - RNA, 22 nt, Artificial Sequence
  Guide RNA
uuccaauagacauugucuagag

SEQ ID NO: 24650 - RNA, 20 nt, Artificial Sequence
  Guide RNA
aaggcccagaccauuuauuu

SEQ ID NO: 24651 - RNA, 20 nt, Artificial Sequence
  Guide RNA
aaguaucacugaaugaccuu

SEQ ID NO: 24652 - RNA, 20 nt, Artificial Sequence
  Guide RNA
aaugaccuucggcaaauaaa

SEQ ID NO: 24653 - RNA, 20 nt, Artificial Sequence
  Guide RNA
aaugaccuuuggcaaauaaa

SEQ ID NO: 24654 - RNA, 20 nt, Artificial Sequence
  Guide RNA
accauuuauuugccaaaggu

SEQ ID NO: 24655 - RNA, 20 nt, Artificial Sequence
  Guide RNA
accauuuauuugccgaaggu

SEQ ID NO: 24656 - RNA, 20 nt, Artificial Sequence
  Guide RNA
accuucggcaaauaaauggu

SEQ ID NO: 24657 - RNA, 20 nt, Artificial Sequence
  Guide RNA
accuuuggcaaauaaauggu

SEQ ID NO: 24658 - RNA, 20 nt, Artificial Sequence
  Guide RNA
acugaaugaccuucggcaaa

SEQ ID NO: 24659 - RNA, 20 nt, Artificial Sequence
  Guide RNA
acugaaugaccuuuggcaaa

SEQ ID NO: 24660 - RNA, 20 nt, Artificial Sequence
  Guide RNA
agaccauuuauuugccaaag

SEQ ID NO: 24661 - RNA, 20 nt, Artificial Sequence
  Guide RNA
agaccauuuauuugccgaag

SEQ ID NO: 24662 - RNA, 20 nt, Artificial Sequence
  Guide RNA
aggcccagaccauuuauuug

SEQ ID NO: 24663 - RNA, 20 nt, Artificial Sequence
  Guide RNA
aguaucacugaaugaccuuc

SEQ ID NO: 24664 - RNA, 20 nt, Artificial Sequence
  Guide RNA
aguaucacugaaugaccuuu

SEQ ID NO: 24665 - RNA, 20 nt, Artificial Sequence
  Guide RNA
aucacugaaugaccuucggc

SEQ ID NO: 24666 - RNA, 20 nt, Artificial Sequence
  Guide RNA
aucacugaaugaccuuuggc

SEQ ID NO: 24667 - RNA, 20 nt, Artificial Sequence
  Guide RNA
augaccuucggcaaauaaau

SEQ ID NO: 24668 - RNA, 20 nt, Artificial Sequence
  Guide RNA
augaccuuuggcaaauaaau

SEQ ID NO: 24669 - RNA, 20 nt, Artificial Sequence
  Guide RNA
auuuauuugccaaaggucau

SEQ ID NO: 24670 - RNA, 20 nt, Artificial Sequence
  Guide RNA
auuuauuugccgaaggucau

SEQ ID NO: 24671 - RNA, 20 nt, Artificial Sequence
  Guide RNA
auuugccaaaggucauucag

SEQ ID NO: 24672 - RNA, 20 nt, Artificial Sequence
  Guide RNA
auuugccgaaggucauucag

SEQ ID NO: 24673 - RNA, 20 nt, Artificial Sequence
  Guide RNA
caaaggucauucagugauac

SEQ ID NO: 24674 - RNA, 20 nt, Artificial Sequence
  Guide RNA
caaguaucacugaaugaccu

SEQ ID NO: 24675 - RNA, 20 nt, Artificial Sequence
  Guide RNA
cacugaaugaccuucggcaa

SEQ ID NO: 24676 - RNA, 20 nt, Artificial Sequence
  Guide RNA
cacugaaugaccuuuggcaa

SEQ ID NO: 24677 - RNA, 20 nt, Artificial Sequence
  Guide RNA
cagaccauuuauuugccaaa

SEQ ID NO: 24678 - RNA, 20 nt, Artificial Sequence
  Guide RNA
cagaccauuuauuugccgaa

SEQ ID NO: 24679 - RNA, 20 nt, Artificial Sequence
  Guide RNA
cauuuauuugccaaagguca

SEQ ID NO: 24680 - RNA, 20 nt, Artificial Sequence
  Guide RNA
cauuuauuugccgaagguca

SEQ ID NO: 24681 - RNA, 20 nt, Artificial Sequence
  Guide RNA
ccaaaggucauucagugaua

SEQ ID NO: 24682 - RNA, 20 nt, Artificial Sequence
  Guide RNA
ccagaccauuuauuugccaa

SEQ ID NO: 24683 - RNA, 20 nt, Artificial Sequence
  Guide RNA
ccagaccauuuauuugccga

SEQ ID NO: 24684 - RNA, 20 nt, Artificial Sequence
  Guide RNA
ccauuuauuugccaaagguc

SEQ ID NO: 24685 - RNA, 20 nt, Artificial Sequence
  Guide RNA
ccauuuauuugccgaagguc

SEQ ID NO: 24686 - RNA, 20 nt, Artificial Sequence
  Guide RNA
cccagaccauuuauuugcca

SEQ ID NO: 24687 - RNA, 20 nt, Artificial Sequence
  Guide RNA
cccagaccauuuauuugccg

SEQ ID NO: 24688 - RNA, 20 nt, Artificial Sequence
  Guide RNA
ccgaaggucauucagugaua

SEQ ID NO: 24689 - RNA, 20 nt, Artificial Sequence
  Guide RNA
ccuucggcaaauaaaugguc

SEQ ID NO: 24690 - RNA, 20 nt, Artificial Sequence
  Guide RNA
ccuuuggcaaauaaaugguc

SEQ ID NO: 24691 - RNA, 20 nt, Artificial Sequence
  Guide RNA
cgaaggucauucagugauac

SEQ ID NO: 24692 - RNA, 20 nt, Artificial Sequence
  Guide RNA
cugaaugaccuucggcaaau

SEQ ID NO: 24693 - RNA, 20 nt, Artificial Sequence
  Guide RNA
cugaaugaccuuuggcaaau

SEQ ID NO: 24694 - RNA, 20 nt, Artificial Sequence
  Guide RNA
cuucggcaaauaaauggucu

SEQ ID NO: 24695 - RNA, 20 nt, Artificial Sequence
  Guide RNA
cuuuggcaaauaaauggucu

SEQ ID NO: 24696 - RNA, 20 nt, Artificial Sequence
  Guide RNA
gaaugaccuucggcaaauaa

SEQ ID NO: 24697 - RNA, 20 nt, Artificial Sequence
  Guide RNA
gaaugaccuuuggcaaauaa

SEQ ID NO: 24698 - RNA, 20 nt, Artificial Sequence
  Guide RNA
gaccauuuauuugccaaagg

SEQ ID NO: 24699 - RNA, 20 nt, Artificial Sequence
  Guide RNA
gaccauuuauuugccgaagg

SEQ ID NO: 24700 - RNA, 20 nt, Artificial Sequence
  Guide RNA
gaccuucggcaaauaaaugg

SEQ ID NO: 24701 - RNA, 20 nt, Artificial Sequence
  Guide RNA
gaccuuuggcaaauaaaugg

SEQ ID NO: 24702 - RNA, 20 nt, Artificial Sequence
  Guide RNA
gcaaguaucacugaaugacc

SEQ ID NO: 24703 - RNA, 20 nt, Artificial Sequence
  Guide RNA
gccaaaggucauucagugau

SEQ ID NO: 24704 - RNA, 20 nt, Artificial Sequence
  Guide RNA
gcccagaccauuuauuugcc

SEQ ID NO: 24705 - RNA, 20 nt, Artificial Sequence
  Guide RNA
gccgaaggucauucagugau

SEQ ID NO: 24706 - RNA, 20 nt, Artificial Sequence
  Guide RNA
ggcaaguaucacugaaugac

SEQ ID NO: 24707 - RNA, 20 nt, Artificial Sequence
  Guide RNA
ggcccagaccauuuauuugc

SEQ ID NO: 24708 - RNA, 20 nt, Artificial Sequence
  Guide RNA
guaucacugaaugaccuucg

SEQ ID NO: 24709 - RNA, 20 nt, Artificial Sequence
  Guide RNA
guaucacugaaugaccuuug

SEQ ID NO: 24710 - RNA, 20 nt, Artificial Sequence
  Guide RNA
uaucacugaaugaccuucgg

SEQ ID NO: 24711 - RNA, 20 nt, Artificial Sequence
  Guide RNA
uaucacugaaugaccuuugg

SEQ ID NO: 24712 - RNA, 20 nt, Artificial Sequence
  Guide RNA
uauuugccaaaggucauuca

SEQ ID NO: 24713 - RNA, 20 nt, Artificial Sequence
  Guide RNA
uauuugccgaaggucauuca

SEQ ID NO: 24714 - RNA, 20 nt, Artificial Sequence
  Guide RNA
ucacugaaugaccuucggca

SEQ ID NO: 24715 - RNA, 20 nt, Artificial Sequence
  Guide RNA
ucacugaaugaccuuuggca

SEQ ID NO: 24716 - RNA, 20 nt, Artificial Sequence
  Guide RNA
ucggcaaauaaauggucugg

SEQ ID NO: 24717 - RNA, 20 nt, Artificial Sequence
  Guide RNA
ugaaugaccuucggcaaaua

SEQ ID NO: 24718 - RNA, 20 nt, Artificial Sequence
  Guide RNA
ugaaugaccuuuggcaaaua

SEQ ID NO: 24719 - RNA, 20 nt, Artificial Sequence
  Guide RNA
ugaccuucggcaaauaaaug

SEQ ID NO: 24720 - RNA, 20 nt, Artificial Sequence
  Guide RNA
ugaccuuuggcaaauaaaug

SEQ ID NO: 24721 - RNA, 20 nt, Artificial Sequence
  Guide RNA
ugccaaaggucauucaguga

SEQ ID NO: 24722 - RNA, 20 nt, Artificial Sequence
  Guide RNA
ugccgaaggucauucaguga

SEQ ID NO: 24723 - RNA, 20 nt, Artificial Sequence
  Guide RNA
uuauuugccaaaggucauuc

SEQ ID NO: 24724 - RNA, 20 nt, Artificial Sequence
  Guide RNA
uuauuugccgaaggucauuc

SEQ ID NO: 24725 - RNA, 20 nt, Artificial Sequence
  Guide RNA
uucggcaaauaaauggucug

SEQ ID NO: 24726 - RNA, 20 nt, Artificial Sequence
  Guide RNA
uugccaaaggucauucagug

SEQ ID NO: 24727 - RNA, 20 nt, Artificial Sequence
  Guide RNA
uugccgaaggucauucagug

SEQ ID NO: 24728 - RNA, 20 nt, Artificial Sequence
  Guide RNA
uuggcaaauaaauggucugg

SEQ ID NO: 24729 - RNA, 20 nt, Artificial Sequence
  Guide RNA
uuuauuugccaaaggucauu

SEQ ID NO: 24730 - RNA, 20 nt, Artificial Sequence
  Guide RNA
uuuauuugccgaaggucauu

SEQ ID NO: 24731 - RNA, 20 nt, Artificial Sequence
  Guide RNA
uuugccaaaggucauucagu

SEQ ID NO: 24732 - RNA, 20 nt, Artificial Sequence
  Guide RNA
uuugccgaaggucauucagu

SEQ ID NO: 24733 - RNA, 20 nt, Artificial Sequence
  Guide RNA
uuuggcaaauaaauggucug

SEQ ID NO: 24734 - RNA, 21 nt, Artificial Sequence
  Guide RNA
aaggcccagaccauuuauuug

SEQ ID NO: 24735 - RNA, 21 nt, Artificial Sequence
  Guide RNA
aaguaucacugaaugaccuuc

SEQ ID NO: 24736 - RNA, 21 nt, Artificial Sequence
  Guide RNA
aaguaucacugaaugaccuuu

SEQ ID NO: 24737 - RNA, 21 nt, Artificial Sequence
  Guide RNA
aaugaccuucggcaaauaaau

SEQ ID NO: 24738 - RNA, 21 nt, Artificial Sequence
  Guide RNA
accauuuauuugccaaagguc

SEQ ID NO: 24739 - RNA, 21 nt, Artificial Sequence
  Guide RNA
accauuuauuugccgaagguc

SEQ ID NO: 24740 - RNA, 21 nt, Artificial Sequence
  Guide RNA
accuucggcaaauaaaugguc

SEQ ID NO: 24741 - RNA, 21 nt, Artificial Sequence
  Guide RNA
accuuuggcaaauaaaugguc

SEQ ID NO: 24742 - RNA, 21 nt, Artificial Sequence
  Guide RNA
acugaaugaccuucggcaaau

SEQ ID NO: 24743 - RNA, 21 nt, Artificial Sequence
  Guide RNA
acugaaugaccuuuggcaaau

SEQ ID NO: 24744 - RNA, 21 nt, Artificial Sequence
  Guide RNA
agaccauuuauuugccaaagg

SEQ ID NO: 24745 - RNA, 21 nt, Artificial Sequence
  Guide RNA
agaccauuuauuugccgaagg

SEQ ID NO: 24746 - RNA, 21 nt, Artificial Sequence
  Guide RNA
aggcccagaccauuuauuugc

SEQ ID NO: 24747 - RNA, 21 nt, Artificial Sequence
  Guide RNA
aguaucacugaaugaccuucg

SEQ ID NO: 24748 - RNA, 21 nt, Artificial Sequence
  Guide RNA
aguaucacugaaugaccuuug

SEQ ID NO: 24749 - RNA, 21 nt, Artificial Sequence
  Guide RNA
aucacugaaugaccuucggca

SEQ ID NO: 24750 - RNA, 21 nt, Artificial Sequence
  Guide RNA
aucacugaaugaccuuuggca

SEQ ID NO: 24751 - RNA, 21 nt, Artificial Sequence
  Guide RNA
augaccuucggcaaauaaaug

SEQ ID NO: 24752 - RNA, 21 nt, Artificial Sequence
  Guide RNA
augaccuuuggcaaauaaaug

SEQ ID NO: 24753 - RNA, 21 nt, Artificial Sequence
  Guide RNA
auuuauuugccgaaggucauu

SEQ ID NO: 24754 - RNA, 21 nt, Artificial Sequence
  Guide RNA
auuugccaaaggucauucagu

SEQ ID NO: 24755 - RNA, 21 nt, Artificial Sequence
  Guide RNA
auuugccgaaggucauucagu

SEQ ID NO: 24756 - RNA, 21 nt, Artificial Sequence
  Guide RNA
caaaggucauucagugauacu

SEQ ID NO: 24757 - RNA, 21 nt, Artificial Sequence
  Guide RNA
caaguaucacugaaugaccuu

SEQ ID NO: 24758 - RNA, 21 nt, Artificial Sequence
  Guide RNA
cacugaaugaccuucggcaaa

SEQ ID NO: 24759 - RNA, 21 nt, Artificial Sequence
  Guide RNA
cacugaaugaccuuuggcaaa

SEQ ID NO: 24760 - RNA, 21 nt, Artificial Sequence
  Guide RNA
cagaccauuuauuugccaaag

SEQ ID NO: 24761 - RNA, 21 nt, Artificial Sequence
  Guide RNA
cagaccauuuauuugccgaag

SEQ ID NO: 24762 - RNA, 21 nt, Artificial Sequence
  Guide RNA
cauuuauuugccaaaggucau

SEQ ID NO: 24763 - RNA, 21 nt, Artificial Sequence
  Guide RNA
cauuuauuugccgaaggucau

SEQ ID NO: 24764 - RNA, 21 nt, Artificial Sequence
  Guide RNA
ccaaaggucauucagugauac

SEQ ID NO: 24765 - RNA, 21 nt, Artificial Sequence
  Guide RNA
ccagaccauuuauuugccaaa

SEQ ID NO: 24766 - RNA, 21 nt, Artificial Sequence
  Guide RNA
ccagaccauuuauuugccgaa

SEQ ID NO: 24767 - RNA, 21 nt, Artificial Sequence
  Guide RNA
ccauuuauuugccaaagguca

SEQ ID NO: 24768 - RNA, 21 nt, Artificial Sequence
  Guide RNA
ccauuuauuugccgaagguca

SEQ ID NO: 24769 - RNA, 21 nt, Artificial Sequence
  Guide RNA
cccagaccauuuauuugccaa

SEQ ID NO: 24770 - RNA, 21 nt, Artificial Sequence
  Guide RNA
cccagaccauuuauuugccga

SEQ ID NO: 24771 - RNA, 21 nt, Artificial Sequence
  Guide RNA
ccgaaggucauucagugauac

SEQ ID NO: 24772 - RNA, 21 nt, Artificial Sequence
  Guide RNA
ccuucggcaaauaaauggucu

SEQ ID NO: 24773 - RNA, 21 nt, Artificial Sequence
  Guide RNA
ccuuuggcaaauaaauggucu

SEQ ID NO: 24774 - RNA, 21 nt, Artificial Sequence
  Guide RNA
cgaaggucauucagugauacu

SEQ ID NO: 24775 - RNA, 21 nt, Artificial Sequence
  Guide RNA
cugaaugaccuucggcaaaua

SEQ ID NO: 24776 - RNA, 21 nt, Artificial Sequence
  Guide RNA
cugaaugaccuuuggcaaaua

SEQ ID NO: 24777 - RNA, 21 nt, Artificial Sequence
  Guide RNA
cuucggcaaauaaauggucug

SEQ ID NO: 24778 - RNA, 21 nt, Artificial Sequence
  Guide RNA
cuuuggcaaauaaauggucug

SEQ ID NO: 24779 - RNA, 21 nt, Artificial Sequence
  Guide RNA
gaaugaccuucggcaaauaaa

SEQ ID NO: 24780 - RNA, 21 nt, Artificial Sequence
  Guide RNA
gaaugaccuuuggcaaauaaa

SEQ ID NO: 24781 - RNA, 21 nt, Artificial Sequence
  Guide RNA
gaccauuuauuugccaaaggu

SEQ ID NO: 24782 - RNA, 21 nt, Artificial Sequence
  Guide RNA
gaccauuuauuugccgaaggu

SEQ ID NO: 24783 - RNA, 21 nt, Artificial Sequence
  Guide RNA
gaccuucggcaaauaaauggu

SEQ ID NO: 24784 - RNA, 21 nt, Artificial Sequence
  Guide RNA
gaccuuuggcaaauaaauggu

SEQ ID NO: 24785 - RNA, 21 nt, Artificial Sequence
  Guide RNA
gcaaguaucacugaaugaccu

SEQ ID NO: 24786 - RNA, 21 nt, Artificial Sequence
  Guide RNA
gccaaaggucauucagugaua

SEQ ID NO: 24787 - RNA, 21 nt, Artificial Sequence
  Guide RNA
gcccagaccauuuauuugcca

SEQ ID NO: 24788 - RNA, 21 nt, Artificial Sequence
  Guide RNA
gcccagaccauuuauuugccg

SEQ ID NO: 24789 - RNA, 21 nt, Artificial Sequence
  Guide RNA
gccgaaggucauucagugaua

SEQ ID NO: 24790 - RNA, 21 nt, Artificial Sequence
  Guide RNA
ggcaaguaucacugaaugacc

SEQ ID NO: 24791 - RNA, 21 nt, Artificial Sequence
  Guide RNA
ggcccagaccauuuauuugcc

SEQ ID NO: 24792 - RNA, 21 nt, Artificial Sequence
  Guide RNA
guaucacugaaugaccuucgg

SEQ ID NO: 24793 - RNA, 21 nt, Artificial Sequence
  Guide RNA
guaucacugaaugaccuuugg

SEQ ID NO: 24794 - RNA, 21 nt, Artificial Sequence
  Guide RNA
uaaggcccagaccauuuauuu

SEQ ID NO: 24795 - RNA, 21 nt, Artificial Sequence
  Guide RNA
uaucacugaaugaccuucggc

SEQ ID NO: 24796 - RNA, 21 nt, Artificial Sequence
  Guide RNA
uaucacugaaugaccuuuggc

SEQ ID NO: 24797 - RNA, 21 nt, Artificial Sequence
  Guide RNA
uauuugccaaaggucauucag

SEQ ID NO: 24798 - RNA, 21 nt, Artificial Sequence
  Guide RNA
uauuugccgaaggucauucag

SEQ ID NO: 24799 - RNA, 21 nt, Artificial Sequence
  Guide RNA
ucacugaaugaccuucggcaa

SEQ ID NO: 24800 - RNA, 21 nt, Artificial Sequence
  Guide RNA
ucacugaaugaccuuuggcaa

SEQ ID NO: 24801 - RNA, 21 nt, Artificial Sequence
  Guide RNA
ucggcaaauaaauggucuggg

SEQ ID NO: 24802 - RNA, 21 nt, Artificial Sequence
  Guide RNA
ugaaugaccuucggcaaauaa

SEQ ID NO: 24803 - RNA, 21 nt, Artificial Sequence
  Guide RNA
ugaaugaccuuuggcaaauaa

SEQ ID NO: 24804 - RNA, 21 nt, Artificial Sequence
  Guide RNA
ugaccuucggcaaauaaaugg

SEQ ID NO: 24805 - RNA, 21 nt, Artificial Sequence
  Guide RNA
ugaccuuuggcaaauaaaugg

SEQ ID NO: 24806 - RNA, 21 nt, Artificial Sequence
  Guide RNA
ugccaaaggucauucagugau

SEQ ID NO: 24807 - RNA, 21 nt, Artificial Sequence
  Guide RNA
ugccgaaggucauucagugau

SEQ ID NO: 24808 - RNA, 21 nt, Artificial Sequence
  Guide RNA
uggcaaguaucacugaaugac

SEQ ID NO: 24809 - RNA, 21 nt, Artificial Sequence
  Guide RNA
uuauuugccaaaggucauuca

SEQ ID NO: 24810 - RNA, 21 nt, Artificial Sequence
  Guide RNA
uuauuugccgaaggucauuca

SEQ ID NO: 24811 - RNA, 21 nt, Artificial Sequence
  Guide RNA
uucggcaaauaaauggucugg

SEQ ID NO: 24812 - RNA, 21 nt, Artificial Sequence
  Guide RNA
uugccaaaggucauucaguga

SEQ ID NO: 24813 - RNA, 21 nt, Artificial Sequence
  Guide RNA
uugccgaaggucauucaguga

SEQ ID NO: 24814 - RNA, 21 nt, Artificial Sequence
  Guide RNA
uuggcaaauaaauggucuggg

SEQ ID NO: 24815 - RNA, 21 nt, Artificial Sequence
  Guide RNA
uuuauuugccaaaggucauuc

SEQ ID NO: 24816 - RNA, 21 nt, Artificial Sequence
  Guide RNA
uuuauuugccgaaggucauuc

SEQ ID NO: 24817 - RNA, 21 nt, Artificial Sequence
  Guide RNA
uuugccaaaggucauucagug

SEQ ID NO: 24818 - RNA, 21 nt, Artificial Sequence
  Guide RNA
uuugccgaaggucauucagug

SEQ ID NO: 24819 - RNA, 21 nt, Artificial Sequence
  Guide RNA
uuuggcaaauaaauggucugg

SEQ ID NO: 24820 - RNA, 22 nt, Artificial Sequence
  Guide RNA
aaggcccagaccauuuauuugc

SEQ ID NO: 24821 - RNA, 22 nt, Artificial Sequence
  Guide RNA
aaguaucacugaaugaccuucg

SEQ ID NO: 24822 - RNA, 22 nt, Artificial Sequence
  Guide RNA
aaguaucacugaaugaccuuug

SEQ ID NO: 24823 - RNA, 22 nt, Artificial Sequence
  Guide RNA
aaugaccuucggcaaauaaaug

SEQ ID NO: 24824 - RNA, 22 nt, Artificial Sequence
  Guide RNA
aaugaccuuuggcaaauaaaug

SEQ ID NO: 24825 - RNA, 22 nt, Artificial Sequence
  Guide RNA
accauuuauuugccaaagguca

SEQ ID NO: 24826 - RNA, 22 nt, Artificial Sequence
  Guide RNA
accauuuauuugccgaagguca

SEQ ID NO: 24827 - RNA, 22 nt, Artificial Sequence
  Guide RNA
accuucggcaaauaaauggucu

SEQ ID NO: 24828 - RNA, 22 nt, Artificial Sequence
  Guide RNA
accuuuggcaaauaaauggucu

SEQ ID NO: 24829 - RNA, 22 nt, Artificial Sequence
  Guide RNA
acugaaugaccuucggcaaaua

SEQ ID NO: 24830 - RNA, 22 nt, Artificial Sequence
  Guide RNA
acugaaugaccuuuggcaaaua

SEQ ID NO: 24831 - RNA, 22 nt, Artificial Sequence
  Guide RNA
agaccauuuauuugccaaaggu

SEQ ID NO: 24832 - RNA, 22 nt, Artificial Sequence
  Guide RNA
agaccauuuauuugccgaaggu

SEQ ID NO: 24833 - RNA, 22 nt, Artificial Sequence
  Guide RNA
aggcccagaccauuuauuugcc

SEQ ID NO: 24834 - RNA, 22 nt, Artificial Sequence
  Guide RNA
aguaucacugaaugaccuucgg

SEQ ID NO: 24835 - RNA, 22 nt, Artificial Sequence
  Guide RNA
aguaucacugaaugaccuuugg

SEQ ID NO: 24836 - RNA, 22 nt, Artificial Sequence
  Guide RNA
aucacugaaugaccuucggcaa

SEQ ID NO: 24837 - RNA, 22 nt, Artificial Sequence
  Guide RNA
aucacugaaugaccuuuggcaa

SEQ ID NO: 24838 - RNA, 22 nt, Artificial Sequence
  Guide RNA
augaccuucggcaaauaaaugg

SEQ ID NO: 24839 - RNA, 22 nt, Artificial Sequence
  Guide RNA
augaccuuuggcaaauaaaugg

SEQ ID NO: 24840 - RNA, 22 nt, Artificial Sequence
  Guide RNA
auuuauuugccaaaggucauuc

SEQ ID NO: 24841 - RNA, 22 nt, Artificial Sequence
  Guide RNA
auuuauuugccgaaggucauuc

SEQ ID NO: 24842 - RNA, 22 nt, Artificial Sequence
  Guide RNA
auuugccaaaggucauucagug

SEQ ID NO: 24843 - RNA, 22 nt, Artificial Sequence
  Guide RNA
auuugccgaaggucauucagug

SEQ ID NO: 24844 - RNA, 22 nt, Artificial Sequence
  Guide RNA
caaaggucauucagugauacuu

SEQ ID NO: 24845 - RNA, 22 nt, Artificial Sequence
  Guide RNA
caaguaucacugaaugaccuuc

SEQ ID NO: 24846 - RNA, 22 nt, Artificial Sequence
  Guide RNA
caaguaucacugaaugaccuuu

SEQ ID NO: 24847 - RNA, 22 nt, Artificial Sequence
  Guide RNA
cacugaaugaccuucggcaaau

SEQ ID NO: 24848 - RNA, 22 nt, Artificial Sequence
  Guide RNA
cacugaaugaccuuuggcaaau

SEQ ID NO: 24849 - RNA, 22 nt, Artificial Sequence
  Guide RNA
cagaccauuuauuugccaaagg

SEQ ID NO: 24850 - RNA, 22 nt, Artificial Sequence
  Guide RNA
cagaccauuuauuugccgaagg

SEQ ID NO: 24851 - RNA, 22 nt, Artificial Sequence
  Guide RNA
cauuuauuugccaaaggucauu

SEQ ID NO: 24852 - RNA, 22 nt, Artificial Sequence
  Guide RNA
cauuuauuugccgaaggucauu

SEQ ID NO: 24853 - RNA, 22 nt, Artificial Sequence
  Guide RNA
ccaaaggucauucagugauacu

SEQ ID NO: 24854 - RNA, 22 nt, Artificial Sequence
  Guide RNA
ccagaccauuuauuugccaaag

SEQ ID NO: 24855 - RNA, 22 nt, Artificial Sequence
  Guide RNA
ccagaccauuuauuugccgaag

SEQ ID NO: 24856 - RNA, 22 nt, Artificial Sequence
  Guide RNA
ccauuuauuugccaaaggucau

SEQ ID NO: 24857 - RNA, 22 nt, Artificial Sequence
  Guide RNA
ccauuuauuugccgaaggucau

SEQ ID NO: 24858 - RNA, 22 nt, Artificial Sequence
  Guide RNA
cccagaccauuuauuugccaaa

SEQ ID NO: 24859 - RNA, 22 nt, Artificial Sequence
  Guide RNA
cccagaccauuuauuugccgaa

SEQ ID NO: 24860 - RNA, 22 nt, Artificial Sequence
  Guide RNA
ccgaaggucauucagugauacu

SEQ ID NO: 24861 - RNA, 22 nt, Artificial Sequence
  Guide RNA
ccuucggcaaauaaauggucug

SEQ ID NO: 24862 - RNA, 22 nt, Artificial Sequence
  Guide RNA
ccuuuggcaaauaaauggucug

SEQ ID NO: 24863 - RNA, 22 nt, Artificial Sequence
  Guide RNA
cgaaggucauucagugauacuu

SEQ ID NO: 24864 - RNA, 22 nt, Artificial Sequence
  Guide RNA
cugaaugaccuucggcaaauaa

SEQ ID NO: 24865 - RNA, 22 nt, Artificial Sequence
  Guide RNA
cugaaugaccuuuggcaaauaa

SEQ ID NO: 24866 - RNA, 22 nt, Artificial Sequence
  Guide RNA
cuggcaaguaucacugaaugac

SEQ ID NO: 24867 - RNA, 22 nt, Artificial Sequence
  Guide RNA
cuucggcaaauaaauggucugg

SEQ ID NO: 24868 - RNA, 22 nt, Artificial Sequence
  Guide RNA
cuuuggcaaauaaauggucugg

SEQ ID NO: 24869 - RNA, 22 nt, Artificial Sequence
  Guide RNA
gaaugaccuucggcaaauaaau

SEQ ID NO: 24870 - RNA, 22 nt, Artificial Sequence
  Guide RNA
gaaugaccuuuggcaaauaaau

SEQ ID NO: 24871 - RNA, 22 nt, Artificial Sequence
  Guide RNA
gaccauuuauuugccaaagguc

SEQ ID NO: 24872 - RNA, 22 nt, Artificial Sequence
  Guide RNA
gaccauuuauuugccgaagguc

SEQ ID NO: 24873 - RNA, 22 nt, Artificial Sequence
  Guide RNA
gaccuucggcaaauaaaugguc

SEQ ID NO: 24874 - RNA, 22 nt, Artificial Sequence
  Guide RNA
gaccuuuggcaaauaaaugguc

SEQ ID NO: 24875 - RNA, 22 nt, Artificial Sequence
  Guide RNA
gcaaguaucacugaaugaccuu

SEQ ID NO: 24876 - RNA, 22 nt, Artificial Sequence
  Guide RNA
gccaaaggucauucagugauac

SEQ ID NO: 24877 - RNA, 22 nt, Artificial Sequence
  Guide RNA
gcccagaccauuuauuugccaa

SEQ ID NO: 24878 - RNA, 22 nt, Artificial Sequence
  Guide RNA
gcccagaccauuuauuugccga

SEQ ID NO: 24879 - RNA, 22 nt, Artificial Sequence
  Guide RNA
gccgaaggucauucagugauac

SEQ ID NO: 24880 - RNA, 22 nt, Artificial Sequence
  Guide RNA
ggcaaguaucacugaaugaccu

SEQ ID NO: 24881 - RNA, 22 nt, Artificial Sequence
  Guide RNA
ggcccagaccauuuauuugcca

SEQ ID NO: 24882 - RNA, 22 nt, Artificial Sequence
  Guide RNA
ggcccagaccauuuauuugccg

SEQ ID NO: 24883 - RNA, 22 nt, Artificial Sequence
  Guide RNA
guaaggcccagaccauuuauuu

SEQ ID NO: 24884 - RNA, 22 nt, Artificial Sequence
  Guide RNA
guaucacugaaugaccuucggc

SEQ ID NO: 24885 - RNA, 22 nt, Artificial Sequence
  Guide RNA
guaucacugaaugaccuuuggc

SEQ ID NO: 24886 - RNA, 22 nt, Artificial Sequence
  Guide RNA
uaaggcccagaccauuuauuug

SEQ ID NO: 24887 - RNA, 22 nt, Artificial Sequence
  Guide RNA
uaucacugaaugaccuucggca

SEQ ID NO: 24888 - RNA, 22 nt, Artificial Sequence
  Guide RNA
uaucacugaaugaccuuuggca

SEQ ID NO: 24889 - RNA, 22 nt, Artificial Sequence
  Guide RNA
uauuugccaaaggucauucagu

SEQ ID NO: 24890 - RNA, 22 nt, Artificial Sequence
  Guide RNA
uauuugccgaaggucauucagu

SEQ ID NO: 24891 - RNA, 22 nt, Artificial Sequence
  Guide RNA
ucacugaaugaccuucggcaaa

SEQ ID NO: 24892 - RNA, 22 nt, Artificial Sequence
  Guide RNA
ucacugaaugaccuuuggcaaa

SEQ ID NO: 24893 - RNA, 22 nt, Artificial Sequence
  Guide RNA
ucggcaaauaaauggucugggc

SEQ ID NO: 24894 - RNA, 22 nt, Artificial Sequence
  Guide RNA
ugaaugaccuucggcaaauaaa

SEQ ID NO: 24895 - RNA, 22 nt, Artificial Sequence
  Guide RNA
ugaaugaccuuuggcaaauaaa

SEQ ID NO: 24896 - RNA, 22 nt, Artificial Sequence
  Guide RNA
ugaccuucggcaaauaaauggu

SEQ ID NO: 24897 - RNA, 22 nt, Artificial Sequence
  Guide RNA
ugaccuuuggcaaauaaauggu

SEQ ID NO: 24898 - RNA, 22 nt, Artificial Sequence
  Guide RNA
ugccaaaggucauucagugaua

SEQ ID NO: 24899 - RNA, 22 nt, Artificial Sequence
  Guide RNA
ugccgaaggucauucagugaua

SEQ ID NO: 24900 - RNA, 22 nt, Artificial Sequence
  Guide RNA
uggcaaguaucacugaaugacc

SEQ ID NO: 24901 - RNA, 22 nt, Artificial Sequence
  Guide RNA
uuauuugccaaaggucauucag

SEQ ID NO: 24902 - RNA, 22 nt, Artificial Sequence
  Guide RNA
uuauuugccgaaggucauucag

SEQ ID NO: 24903 - RNA, 22 nt, Artificial Sequence
  Guide RNA
uucggcaaauaaauggucuggg

SEQ ID NO: 24904 - RNA, 22 nt, Artificial Sequence
  Guide RNA
uugccaaaggucauucagugau

SEQ ID NO: 24905 - RNA, 22 nt, Artificial Sequence
  Guide RNA
uugccgaaggucauucagugau

SEQ ID NO: 24906 - RNA, 22 nt, Artificial Sequence
  Guide RNA
uuggcaaauaaauggucugggc

SEQ ID NO: 24907 - RNA, 22 nt, Artificial Sequence
  Guide RNA
uuuauuugccaaaggucauuca

SEQ ID NO: 24908 - RNA, 22 nt, Artificial Sequence
  Guide RNA
uuuauuugccgaaggucauuca

SEQ ID NO: 24909 - RNA, 22 nt, Artificial Sequence
  Guide RNA
uuugccaaaggucauucaguga

SEQ ID NO: 24910 - RNA, 22 nt, Artificial Sequence
  Guide RNA
uuugccgaaggucauucaguga

SEQ ID NO: 24911 - RNA, 22 nt, Artificial Sequence
  Guide RNA
uuuggcaaauaaauggucuggg

SEQ ID NO: 24912 - RNA, 20 nt, Artificial Sequence
  Guide RNA
aagccacaaggcauugucau

SEQ ID NO: 24913 - RNA, 20 nt, Artificial Sequence
  Guide RNA
aagccacgaggcauugucau

SEQ ID NO: 24914 - RNA, 20 nt, Artificial Sequence
  Guide RNA
aaugccucguggcuuacccu

SEQ ID NO: 24915 - RNA, 20 nt, Artificial Sequence
  Guide RNA
aaugccuuguggcuuacccu

SEQ ID NO: 24916 - RNA, 20 nt, Artificial Sequence
  Guide RNA
acaaggcauugucaucucag

SEQ ID NO: 24917 - RNA, 20 nt, Artificial Sequence
  Guide RNA
acaaugccucguggcuuacc

SEQ ID NO: 24918 - RNA, 20 nt, Artificial Sequence
  Guide RNA
acaaugccuuguggcuuacc

SEQ ID NO: 24919 - RNA, 20 nt, Artificial Sequence
  Guide RNA
acccugagaugacaaugccu

SEQ ID NO: 24920 - RNA, 20 nt, Artificial Sequence
  Guide RNA
acgaggcauugucaucucag

SEQ ID NO: 24921 - RNA, 20 nt, Artificial Sequence
  Guide RNA
acuacccugagaugacaaug

SEQ ID NO: 24922 - RNA, 20 nt, Artificial Sequence
  Guide RNA
agaugacaaugccucguggc

SEQ ID NO: 24923 - RNA, 20 nt, Artificial Sequence
  Guide RNA
agaugacaaugccuuguggc

SEQ ID NO: 24924 - RNA, 20 nt, Artificial Sequence
  Guide RNA
agccacaaggcauugucauc

SEQ ID NO: 24925 - RNA, 20 nt, Artificial Sequence
  Guide RNA
agccacgaggcauugucauc

SEQ ID NO: 24926 - RNA, 20 nt, Artificial Sequence
  Guide RNA
aggguaagccacaaggcauu

SEQ ID NO: 24927 - RNA, 20 nt, Artificial Sequence
  Guide RNA
aggguaagccacgaggcauu

SEQ ID NO: 24928 - RNA, 20 nt, Artificial Sequence
  Guide RNA
augacaaugccucguggcuu

SEQ ID NO: 24929 - RNA, 20 nt, Artificial Sequence
  Guide RNA
augacaaugccuuguggcuu

SEQ ID NO: 24930 - RNA, 20 nt, Artificial Sequence
  Guide RNA
augccucguggcuuacccug

SEQ ID NO: 24931 - RNA, 20 nt, Artificial Sequence
  Guide RNA
augccuuguggcuuacccug

SEQ ID NO: 24932 - RNA, 20 nt, Artificial Sequence
  Guide RNA
caaggcauugucaucucagg

SEQ ID NO: 24933 - RNA, 20 nt, Artificial Sequence
  Guide RNA
caaugccucguggcuuaccc

SEQ ID NO: 24934 - RNA, 20 nt, Artificial Sequence
  Guide RNA
caaugccuuguggcuuaccc

SEQ ID NO: 24935 - RNA, 20 nt, Artificial Sequence
  Guide RNA
cacaaggcauugucaucuca

SEQ ID NO: 24936 - RNA, 20 nt, Artificial Sequence
  Guide RNA
cacgaggcauugucaucuca

SEQ ID NO: 24937 - RNA, 20 nt, Artificial Sequence
  Guide RNA
caggguaagccacaaggcau

SEQ ID NO: 24938 - RNA, 20 nt, Artificial Sequence
  Guide RNA
caggguaagccacgaggcau

SEQ ID NO: 24939 - RNA, 20 nt, Artificial Sequence
  Guide RNA
ccacaaggcauugucaucuc

SEQ ID NO: 24940 - RNA, 20 nt, Artificial Sequence
  Guide RNA
ccacgaggcauugucaucuc

SEQ ID NO: 24941 - RNA, 20 nt, Artificial Sequence
  Guide RNA
ccaggguaagccacaaggca

SEQ ID NO: 24942 - RNA, 20 nt, Artificial Sequence
  Guide RNA
ccaggguaagccacgaggca

SEQ ID NO: 24943 - RNA, 20 nt, Artificial Sequence
  Guide RNA
cccugagaugacaaugccuc

SEQ ID NO: 24944 - RNA, 20 nt, Artificial Sequence
  Guide RNA
cccugagaugacaaugccuu

SEQ ID NO: 24945 - RNA, 20 nt, Artificial Sequence
  Guide RNA
ccucguggcuuacccuggac

SEQ ID NO: 24946 - RNA, 20 nt, Artificial Sequence
  Guide RNA
ccugagaugacaaugccucg

SEQ ID NO: 24947 - RNA, 20 nt, Artificial Sequence
  Guide RNA
ccugagaugacaaugccuug

SEQ ID NO: 24948 - RNA, 20 nt, Artificial Sequence
  Guide RNA
ccuuguggcuuacccuggac

SEQ ID NO: 24949 - RNA, 20 nt, Artificial Sequence
  Guide RNA
cgaggcauugucaucucagg

SEQ ID NO: 24950 - RNA, 20 nt, Artificial Sequence
  Guide RNA
cuacccugagaugacaaugc

SEQ ID NO: 24951 - RNA, 20 nt, Artificial Sequence
  Guide RNA
cucguggcuuacccuggaca

SEQ ID NO: 24952 - RNA, 20 nt, Artificial Sequence
  Guide RNA
cugagaugacaaugccucgu

SEQ ID NO: 24953 - RNA, 20 nt, Artificial Sequence
  Guide RNA
cugagaugacaaugccuugu

SEQ ID NO: 24954 - RNA, 20 nt, Artificial Sequence
  Guide RNA
cuguccaggguaagccacaa

SEQ ID NO: 24955 - RNA, 20 nt, Artificial Sequence
  Guide RNA
cuguccaggguaagccacga

SEQ ID NO: 24956 - RNA, 20 nt, Artificial Sequence
  Guide RNA
cuuguggcuuacccuggaca

SEQ ID NO: 24957 - RNA, 20 nt, Artificial Sequence
  Guide RNA
cuuuucuguccaggguaagc

SEQ ID NO: 24958 - RNA, 20 nt, Artificial Sequence
  Guide RNA
gacaaugccucguggcuuac

SEQ ID NO: 24959 - RNA, 20 nt, Artificial Sequence
  Guide RNA
gacaaugccuuguggcuuac

SEQ ID NO: 24960 - RNA, 20 nt, Artificial Sequence
  Guide RNA
gagaugacaaugccucgugg

SEQ ID NO: 24961 - RNA, 20 nt, Artificial Sequence
  Guide RNA
gagaugacaaugccuugugg

SEQ ID NO: 24962 - RNA, 20 nt, Artificial Sequence
  Guide RNA
gaugacaaugccucguggcu

SEQ ID NO: 24963 - RNA, 20 nt, Artificial Sequence
  Guide RNA
gaugacaaugccuuguggcu

SEQ ID NO: 24964 - RNA, 20 nt, Artificial Sequence
  Guide RNA
gccacaaggcauugucaucu

SEQ ID NO: 24965 - RNA, 20 nt, Artificial Sequence
  Guide RNA
gccacgaggcauugucaucu

SEQ ID NO: 24966 - RNA, 20 nt, Artificial Sequence
  Guide RNA
gccucguggcuuacccugga

SEQ ID NO: 24967 - RNA, 20 nt, Artificial Sequence
  Guide RNA
gccuuguggcuuacccugga

SEQ ID NO: 24968 - RNA, 20 nt, Artificial Sequence
  Guide RNA
ggguaagccacaaggcauug

SEQ ID NO: 24969 - RNA, 20 nt, Artificial Sequence
  Guide RNA
ggguaagccacgaggcauug

SEQ ID NO: 24970 - RNA, 20 nt, Artificial Sequence
  Guide RNA
gguaagccacaaggcauugu

SEQ ID NO: 24971 - RNA, 20 nt, Artificial Sequence
  Guide RNA
gguaagccacgaggcauugu

SEQ ID NO: 24972 - RNA, 20 nt, Artificial Sequence
  Guide RNA
guaagccacaaggcauuguc

SEQ ID NO: 24973 - RNA, 20 nt, Artificial Sequence
  Guide RNA
guaagccacgaggcauuguc

SEQ ID NO: 24974 - RNA, 20 nt, Artificial Sequence
  Guide RNA
guccaggguaagccacaagg

SEQ ID NO: 24975 - RNA, 20 nt, Artificial Sequence
  Guide RNA
guccaggguaagccacgagg

SEQ ID NO: 24976 - RNA, 20 nt, Artificial Sequence
  Guide RNA
uaagccacaaggcauuguca

SEQ ID NO: 24977 - RNA, 20 nt, Artificial Sequence
  Guide RNA
uaagccacgaggcauuguca

SEQ ID NO: 24978 - RNA, 20 nt, Artificial Sequence
  Guide RNA
uacccugagaugacaaugcc

SEQ ID NO: 24979 - RNA, 20 nt, Artificial Sequence
  Guide RNA
uccaggguaagccacaaggc

SEQ ID NO: 24980 - RNA, 20 nt, Artificial Sequence
  Guide RNA
uccaggguaagccacgaggc

SEQ ID NO: 24981 - RNA, 20 nt, Artificial Sequence
  Guide RNA
ucguggcuuacccuggacag

SEQ ID NO: 24982 - RNA, 20 nt, Artificial Sequence
  Guide RNA
ucuguccaggguaagccaca

SEQ ID NO: 24983 - RNA, 20 nt, Artificial Sequence
  Guide RNA
ucuguccaggguaagccacg

SEQ ID NO: 24984 - RNA, 20 nt, Artificial Sequence
  Guide RNA
ugacaaugccucguggcuua

SEQ ID NO: 24985 - RNA, 20 nt, Artificial Sequence
  Guide RNA
ugacaaugccuuguggcuua

SEQ ID NO: 24986 - RNA, 20 nt, Artificial Sequence
  Guide RNA
ugagaugacaaugccucgug

SEQ ID NO: 24987 - RNA, 20 nt, Artificial Sequence
  Guide RNA
ugagaugacaaugccuugug

SEQ ID NO: 24988 - RNA, 20 nt, Artificial Sequence
  Guide RNA
ugccucguggcuuacccugg

SEQ ID NO: 24989 - RNA, 20 nt, Artificial Sequence
  Guide RNA
ugccuuguggcuuacccugg

SEQ ID NO: 24990 - RNA, 20 nt, Artificial Sequence
  Guide RNA
uguccaggguaagccacaag

SEQ ID NO: 24991 - RNA, 20 nt, Artificial Sequence
  Guide RNA
uguccaggguaagccacgag

SEQ ID NO: 24992 - RNA, 20 nt, Artificial Sequence
  Guide RNA
uucuguccaggguaagccac

SEQ ID NO: 24993 - RNA, 20 nt, Artificial Sequence
  Guide RNA
uuguggcuuacccuggacag

SEQ ID NO: 24994 - RNA, 20 nt, Artificial Sequence
  Guide RNA
uuucuguccaggguaagcca

SEQ ID NO: 24995 - RNA, 20 nt, Artificial Sequence
  Guide RNA
uuuucuguccaggguaagcc

SEQ ID NO: 24996 - RNA, 21 nt, Artificial Sequence
  Guide RNA
aagccacaaggcauugucauc

SEQ ID NO: 24997 - RNA, 21 nt, Artificial Sequence
  Guide RNA
aagccacgaggcauugucauc

SEQ ID NO: 24998 - RNA, 21 nt, Artificial Sequence
  Guide RNA
aaugccucguggcuuacccug

SEQ ID NO: 24999 - RNA, 21 nt, Artificial Sequence
  Guide RNA
aaugccuuguggcuuacccug

SEQ ID NO: 25000 - RNA, 21 nt, Artificial Sequence
  Guide RNA
acaaggcauugucaucucagg

SEQ ID NO: 25001 - RNA, 21 nt, Artificial Sequence
  Guide RNA
acaaugccucguggcuuaccc

SEQ ID NO: 25002 - RNA, 21 nt, Artificial Sequence
  Guide RNA
acaaugccuuguggcuuaccc

SEQ ID NO: 25003 - RNA, 21 nt, Artificial Sequence
  Guide RNA
acccugagaugacaaugccuc

SEQ ID NO: 25004 - RNA, 21 nt, Artificial Sequence
  Guide RNA
acccugagaugacaaugccuu

SEQ ID NO: 25005 - RNA, 21 nt, Artificial Sequence
  Guide RNA
acgaggcauugucaucucagg

SEQ ID NO: 25006 - RNA, 21 nt, Artificial Sequence
  Guide RNA
acuacccugagaugacaaugc

SEQ ID NO: 25007 - RNA, 21 nt, Artificial Sequence
  Guide RNA
agaugacaaugccucguggcu

SEQ ID NO: 25008 - RNA, 21 nt, Artificial Sequence
  Guide RNA
agaugacaaugccuuguggcu

SEQ ID NO: 25009 - RNA, 21 nt, Artificial Sequence
  Guide RNA
agccacaaggcauugucaucu

SEQ ID NO: 25010 - RNA, 21 nt, Artificial Sequence
  Guide RNA
agccacgaggcauugucaucu

SEQ ID NO: 25011 - RNA, 21 nt, Artificial Sequence
  Guide RNA
aggguaagccacaaggcauug

SEQ ID NO: 25012 - RNA, 21 nt, Artificial Sequence
  Guide RNA
aggguaagccacgaggcauug

SEQ ID NO: 25013 - RNA, 21 nt, Artificial Sequence
  Guide RNA
augacaaugccucguggcuua

SEQ ID NO: 25014 - RNA, 21 nt, Artificial Sequence
  Guide RNA
augacaaugccuuguggcuua

SEQ ID NO: 25015 - RNA, 21 nt, Artificial Sequence
  Guide RNA
augccucguggcuuacccugg

SEQ ID NO: 25016 - RNA, 21 nt, Artificial Sequence
  Guide RNA
augccuuguggcuuacccugg

SEQ ID NO: 25017 - RNA, 21 nt, Artificial Sequence
  Guide RNA
caaggcauugucaucucaggg

SEQ ID NO: 25018 - RNA, 21 nt, Artificial Sequence
  Guide RNA
caaugccucguggcuuacccu

SEQ ID NO: 25019 - RNA, 21 nt, Artificial Sequence
  Guide RNA
caaugccuuguggcuuacccu

SEQ ID NO: 25020 - RNA, 21 nt, Artificial Sequence
  Guide RNA
cacaaggcauugucaucucag

SEQ ID NO: 25021 - RNA, 21 nt, Artificial Sequence
  Guide RNA
cacgaggcauugucaucucag

SEQ ID NO: 25022 - RNA, 21 nt, Artificial Sequence
  Guide RNA
cacuacccugagaugacaaug

SEQ ID NO: 25023 - RNA, 21 nt, Artificial Sequence
  Guide RNA
caggguaagccacaaggcauu

SEQ ID NO: 25024 - RNA, 21 nt, Artificial Sequence
  Guide RNA
caggguaagccacgaggcauu

SEQ ID NO: 25025 - RNA, 21 nt, Artificial Sequence
  Guide RNA
ccacaaggcauugucaucuca

SEQ ID NO: 25026 - RNA, 21 nt, Artificial Sequence
  Guide RNA
ccacgaggcauugucaucuca

SEQ ID NO: 25027 - RNA, 21 nt, Artificial Sequence
  Guide RNA
ccaggguaagccacaaggcau

SEQ ID NO: 25028 - RNA, 21 nt, Artificial Sequence
  Guide RNA
ccaggguaagccacgaggcau

SEQ ID NO: 25029 - RNA, 21 nt, Artificial Sequence
  Guide RNA
cccugagaugacaaugccucg

SEQ ID NO: 25030 - RNA, 21 nt, Artificial Sequence
  Guide RNA
cccugagaugacaaugccuug

SEQ ID NO: 25031 - RNA, 21 nt, Artificial Sequence
  Guide RNA
ccucguggcuuacccuggaca

SEQ ID NO: 25032 - RNA, 21 nt, Artificial Sequence
  Guide RNA
ccugagaugacaaugccucgu

SEQ ID NO: 25033 - RNA, 21 nt, Artificial Sequence
  Guide RNA
ccugagaugacaaugccuugu

SEQ ID NO: 25034 - RNA, 21 nt, Artificial Sequence
  Guide RNA
ccuuguggcuuacccuggaca

SEQ ID NO: 25035 - RNA, 21 nt, Artificial Sequence
  Guide RNA
cgaggcauugucaucucaggg

SEQ ID NO: 25036 - RNA, 21 nt, Artificial Sequence
  Guide RNA
cuacccugagaugacaaugcc

SEQ ID NO: 25037 - RNA, 21 nt, Artificial Sequence
  Guide RNA
cucguggcuuacccuggacag

SEQ ID NO: 25038 - RNA, 21 nt, Artificial Sequence
  Guide RNA
cugagaugacaaugccucgug

SEQ ID NO: 25039 - RNA, 21 nt, Artificial Sequence
  Guide RNA
cugagaugacaaugccuugug

SEQ ID NO: 25040 - RNA, 21 nt, Artificial Sequence
  Guide RNA
cuguccaggguaagccacaag

SEQ ID NO: 25041 - RNA, 21 nt, Artificial Sequence
  Guide RNA
cuguccaggguaagccacgag

SEQ ID NO: 25042 - RNA, 21 nt, Artificial Sequence
  Guide RNA
cuuguggcuuacccuggacag

SEQ ID NO: 25043 - RNA, 21 nt, Artificial Sequence
  Guide RNA
cuuuucuguccaggguaagcc

SEQ ID NO: 25044 - RNA, 21 nt, Artificial Sequence
  Guide RNA
gacaaugccucguggcuuacc

SEQ ID NO: 25045 - RNA, 21 nt, Artificial Sequence
  Guide RNA
gacaaugccuuguggcuuacc

SEQ ID NO: 25046 - RNA, 21 nt, Artificial Sequence
  Guide RNA
gagaugacaaugccucguggc

SEQ ID NO: 25047 - RNA, 21 nt, Artificial Sequence
  Guide RNA
gagaugacaaugccuuguggc

SEQ ID NO: 25048 - RNA, 21 nt, Artificial Sequence
  Guide RNA
gaugacaaugccucguggcuu

SEQ ID NO: 25049 - RNA, 21 nt, Artificial Sequence
  Guide RNA
gaugacaaugccuuguggcuu

SEQ ID NO: 25050 - RNA, 21 nt, Artificial Sequence
  Guide RNA
gccacaaggcauugucaucuc

SEQ ID NO: 25051 - RNA, 21 nt, Artificial Sequence
  Guide RNA
gccacgaggcauugucaucuc

SEQ ID NO: 25052 - RNA, 21 nt, Artificial Sequence
  Guide RNA
gccucguggcuuacccuggac

SEQ ID NO: 25053 - RNA, 21 nt, Artificial Sequence
  Guide RNA
gccuuguggcuuacccuggac

SEQ ID NO: 25054 - RNA, 21 nt, Artificial Sequence
  Guide RNA
gcuuuucuguccaggguaagc

SEQ ID NO: 25055 - RNA, 21 nt, Artificial Sequence
  Guide RNA
ggguaagccacaaggcauugu

SEQ ID NO: 25056 - RNA, 21 nt, Artificial Sequence
  Guide RNA
ggguaagccacgaggcauugu

SEQ ID NO: 25057 - RNA, 21 nt, Artificial Sequence
  Guide RNA
gguaagccacaaggcauuguc

SEQ ID NO: 25058 - RNA, 21 nt, Artificial Sequence
  Guide RNA
gguaagccacgaggcauuguc

SEQ ID NO: 25059 - RNA, 21 nt, Artificial Sequence
  Guide RNA
guaagccacaaggcauuguca

SEQ ID NO: 25060 - RNA, 21 nt, Artificial Sequence
  Guide RNA
guaagccacgaggcauuguca

SEQ ID NO: 25061 - RNA, 21 nt, Artificial Sequence
  Guide RNA
guccaggguaagccacaaggc

SEQ ID NO: 25062 - RNA, 21 nt, Artificial Sequence
  Guide RNA
guccaggguaagccacgaggc

SEQ ID NO: 25063 - RNA, 21 nt, Artificial Sequence
  Guide RNA
uaagccacaaggcauugucau

SEQ ID NO: 25064 - RNA, 21 nt, Artificial Sequence
  Guide RNA
uaagccacgaggcauugucau

SEQ ID NO: 25065 - RNA, 21 nt, Artificial Sequence
  Guide RNA
uacccugagaugacaaugccu

SEQ ID NO: 25066 - RNA, 21 nt, Artificial Sequence
  Guide RNA
uccaggguaagccacaaggca

SEQ ID NO: 25067 - RNA, 21 nt, Artificial Sequence
  Guide RNA
uccaggguaagccacgaggca

SEQ ID NO: 25068 - RNA, 21 nt, Artificial Sequence
  Guide RNA
ucguggcuuacccuggacaga

SEQ ID NO: 25069 - RNA, 21 nt, Artificial Sequence
  Guide RNA
ucuguccaggguaagccacaa

SEQ ID NO: 25070 - RNA, 21 nt, Artificial Sequence
  Guide RNA
ucuguccaggguaagccacga

SEQ ID NO: 25071 - RNA, 21 nt, Artificial Sequence
  Guide RNA
ugacaaugccucguggcuuac

SEQ ID NO: 25072 - RNA, 21 nt, Artificial Sequence
  Guide RNA
ugacaaugccuuguggcuuac

SEQ ID NO: 25073 - RNA, 21 nt, Artificial Sequence
  Guide RNA
ugagaugacaaugccucgugg

SEQ ID NO: 25074 - RNA, 21 nt, Artificial Sequence
  Guide RNA
ugagaugacaaugccuugugg

SEQ ID NO: 25075 - RNA, 21 nt, Artificial Sequence
  Guide RNA
ugccucguggcuuacccugga

SEQ ID NO: 25076 - RNA, 21 nt, Artificial Sequence
  Guide RNA
ugccuuguggcuuacccugga

SEQ ID NO: 25077 - RNA, 21 nt, Artificial Sequence
  Guide RNA
uguccaggguaagccacaagg

SEQ ID NO: 25078 - RNA, 21 nt, Artificial Sequence
  Guide RNA
uguccaggguaagccacgagg

SEQ ID NO: 25079 - RNA, 21 nt, Artificial Sequence
  Guide RNA
uucuguccaggguaagccaca

SEQ ID NO: 25080 - RNA, 21 nt, Artificial Sequence
  Guide RNA
uucuguccaggguaagccacg

SEQ ID NO: 25081 - RNA, 21 nt, Artificial Sequence
  Guide RNA
uuguggcuuacccuggacaga

SEQ ID NO: 25082 - RNA, 21 nt, Artificial Sequence
  Guide RNA
uuucuguccaggguaagccac

SEQ ID NO: 25083 - RNA, 21 nt, Artificial Sequence
  Guide RNA
uuuucuguccaggguaagcca

SEQ ID NO: 25084 - RNA, 22 nt, Artificial Sequence
  Guide RNA
aagccacaaggcauugucaucu

SEQ ID NO: 25085 - RNA, 22 nt, Artificial Sequence
  Guide RNA
aagccacgaggcauugucaucu

SEQ ID NO: 25086 - RNA, 22 nt, Artificial Sequence
  Guide RNA
aaugccucguggcuuacccugg

SEQ ID NO: 25087 - RNA, 22 nt, Artificial Sequence
  Guide RNA
aaugccuuguggcuuacccugg

SEQ ID NO: 25088 - RNA, 22 nt, Artificial Sequence
  Guide RNA
acaaggcauugucaucucaggg

SEQ ID NO: 25089 - RNA, 22 nt, Artificial Sequence
  Guide RNA
acaaugccucguggcuuacccu

SEQ ID NO: 25090 - RNA, 22 nt, Artificial Sequence
  Guide RNA
acaaugccuuguggcuuacccu

SEQ ID NO: 25091 - RNA, 22 nt, Artificial Sequence
  Guide RNA
acccugagaugacaaugccucg

SEQ ID NO: 25092 - RNA, 22 nt, Artificial Sequence
  Guide RNA
acccugagaugacaaugccuug

SEQ ID NO: 25093 - RNA, 22 nt, Artificial Sequence
  Guide RNA
acgaggcauugucaucucaggg

SEQ ID NO: 25094 - RNA, 22 nt, Artificial Sequence
  Guide RNA
acuacccugagaugacaaugcc

SEQ ID NO: 25095 - RNA, 22 nt, Artificial Sequence
  Guide RNA
agaugacaaugccucguggcuu

SEQ ID NO: 25096 - RNA, 22 nt, Artificial Sequence
  Guide RNA
agaugacaaugccuuguggcuu

SEQ ID NO: 25097 - RNA, 22 nt, Artificial Sequence
  Guide RNA
agccacaaggcauugucaucuc

SEQ ID NO: 25098 - RNA, 22 nt, Artificial Sequence
  Guide RNA
agccacgaggcauugucaucuc

SEQ ID NO: 25099 - RNA, 22 nt, Artificial Sequence
  Guide RNA
aggguaagccacaaggcauugu

SEQ ID NO: 25100 - RNA, 22 nt, Artificial Sequence
  Guide RNA
aggguaagccacgaggcauugu

SEQ ID NO: 25101 - RNA, 22 nt, Artificial Sequence
  Guide RNA
augacaaugccucguggcuuac

SEQ ID NO: 25102 - RNA, 22 nt, Artificial Sequence
  Guide RNA
augacaaugccuuguggcuuac

SEQ ID NO: 25103 - RNA, 22 nt, Artificial Sequence
  Guide RNA
augccucguggcuuacccugga

SEQ ID NO: 25104 - RNA, 22 nt, Artificial Sequence
  Guide RNA
augccuuguggcuuacccugga

SEQ ID NO: 25105 - RNA, 22 nt, Artificial Sequence
  Guide RNA
caaggcauugucaucucagggu

SEQ ID NO: 25106 - RNA, 22 nt, Artificial Sequence
  Guide RNA
caaugccucguggcuuacccug

SEQ ID NO: 25107 - RNA, 22 nt, Artificial Sequence
  Guide RNA
caaugccuuguggcuuacccug

SEQ ID NO: 25108 - RNA, 22 nt, Artificial Sequence
  Guide RNA
cacaaggcauugucaucucagg

SEQ ID NO: 25109 - RNA, 22 nt, Artificial Sequence
  Guide RNA
cacgaggcauugucaucucagg

SEQ ID NO: 25110 - RNA, 22 nt, Artificial Sequence
  Guide RNA
cacuacccugagaugacaaugc

SEQ ID NO: 25111 - RNA, 22 nt, Artificial Sequence
  Guide RNA
caggguaagccacaaggcauug

SEQ ID NO: 25112 - RNA, 22 nt, Artificial Sequence
  Guide RNA
caggguaagccacgaggcauug

SEQ ID NO: 25113 - RNA, 22 nt, Artificial Sequence
  Guide RNA
ccacaaggcauugucaucucag

SEQ ID NO: 25114 - RNA, 22 nt, Artificial Sequence
  Guide RNA
ccacgaggcauugucaucucag

SEQ ID NO: 25115 - RNA, 22 nt, Artificial Sequence
  Guide RNA
ccaggguaagccacaaggcauu

SEQ ID NO: 25116 - RNA, 22 nt, Artificial Sequence
  Guide RNA
ccaggguaagccacgaggcauu

SEQ ID NO: 25117 - RNA, 22 nt, Artificial Sequence
  Guide RNA
cccugagaugacaaugccucgu

SEQ ID NO: 25118 - RNA, 22 nt, Artificial Sequence
  Guide RNA
cccugagaugacaaugccuugu

SEQ ID NO: 25119 - RNA, 22 nt, Artificial Sequence
  Guide RNA
ccucguggcuuacccuggacag

SEQ ID NO: 25120 - RNA, 22 nt, Artificial Sequence
  Guide RNA
ccugagaugacaaugccucgug

SEQ ID NO: 25121 - RNA, 22 nt, Artificial Sequence
  Guide RNA
ccugagaugacaaugccuugug

SEQ ID NO: 25122 - RNA, 22 nt, Artificial Sequence
  Guide RNA
ccuuguggcuuacccuggacag

SEQ ID NO: 25123 - RNA, 22 nt, Artificial Sequence
  Guide RNA
cgaggcauugucaucucagggu

SEQ ID NO: 25124 - RNA, 22 nt, Artificial Sequence
  Guide RNA
cuacccugagaugacaaugccu

SEQ ID NO: 25125 - RNA, 22 nt, Artificial Sequence
  Guide RNA
cucguggcuuacccuggacaga

SEQ ID NO: 25126 - RNA, 22 nt, Artificial Sequence
  Guide RNA
cugagaugacaaugccucgugg

SEQ ID NO: 25127 - RNA, 22 nt, Artificial Sequence
  Guide RNA
cugagaugacaaugccuugugg

SEQ ID NO: 25128 - RNA, 22 nt, Artificial Sequence
  Guide RNA
cuguccaggguaagccacaagg

SEQ ID NO: 25129 - RNA, 22 nt, Artificial Sequence
  Guide RNA
cuguccaggguaagccacgagg

SEQ ID NO: 25130 - RNA, 22 nt, Artificial Sequence
  Guide RNA
cuuguggcuuacccuggacaga

SEQ ID NO: 25131 - RNA, 22 nt, Artificial Sequence
  Guide RNA
cuuuucuguccaggguaagcca

SEQ ID NO: 25132 - RNA, 22 nt, Artificial Sequence
  Guide RNA
gacaaugccucguggcuuaccc

SEQ ID NO: 25133 - RNA, 22 nt, Artificial Sequence
  Guide RNA
gacaaugccuuguggcuuaccc

SEQ ID NO: 25134 - RNA, 22 nt, Artificial Sequence
  Guide RNA
gagaugacaaugccucguggcu

SEQ ID NO: 25135 - RNA, 22 nt, Artificial Sequence
  Guide RNA
gagaugacaaugccuuguggcu

SEQ ID NO: 25136 - RNA, 22 nt, Artificial Sequence
  Guide RNA
gaugacaaugccucguggcuua

SEQ ID NO: 25137 - RNA, 22 nt, Artificial Sequence
  Guide RNA
gaugacaaugccuuguggcuua

SEQ ID NO: 25138 - RNA, 22 nt, Artificial Sequence
  Guide RNA
gcacuacccugagaugacaaug

SEQ ID NO: 25139 - RNA, 22 nt, Artificial Sequence
  Guide RNA
gccacaaggcauugucaucuca

SEQ ID NO: 25140 - RNA, 22 nt, Artificial Sequence
  Guide RNA
gccacgaggcauugucaucuca

SEQ ID NO: 25141 - RNA, 22 nt, Artificial Sequence
  Guide RNA
gccucguggcuuacccuggaca

SEQ ID NO: 25142 - RNA, 22 nt, Artificial Sequence
  Guide RNA
gccuuguggcuuacccuggaca

SEQ ID NO: 25143 - RNA, 22 nt, Artificial Sequence
  Guide RNA
gcuuuucuguccaggguaagcc

SEQ ID NO: 25144 - RNA, 22 nt, Artificial Sequence
  Guide RNA
ggguaagccacaaggcauuguc

SEQ ID NO: 25145 - RNA, 22 nt, Artificial Sequence
  Guide RNA
ggguaagccacgaggcauuguc

SEQ ID NO: 25146 - RNA, 22 nt, Artificial Sequence
  Guide RNA
gguaagccacaaggcauuguca

SEQ ID NO: 25147 - RNA, 22 nt, Artificial Sequence
  Guide RNA
gguaagccacgaggcauuguca

SEQ ID NO: 25148 - RNA, 22 nt, Artificial Sequence
  Guide RNA
guaagccacaaggcauugucau

SEQ ID NO: 25149 - RNA, 22 nt, Artificial Sequence
  Guide RNA
guaagccacgaggcauugucau

SEQ ID NO: 25150 - RNA, 22 nt, Artificial Sequence
  Guide RNA
guccaggguaagccacaaggca

SEQ ID NO: 25151 - RNA, 22 nt, Artificial Sequence
  Guide RNA
guccaggguaagccacgaggca

SEQ ID NO: 25152 - RNA, 22 nt, Artificial Sequence
  Guide RNA
uaagccacaaggcauugucauc

SEQ ID NO: 25153 - RNA, 22 nt, Artificial Sequence
  Guide RNA
uaagccacgaggcauugucauc

SEQ ID NO: 25154 - RNA, 22 nt, Artificial Sequence
  Guide RNA
uacccugagaugacaaugccuc

SEQ ID NO: 25155 - RNA, 22 nt, Artificial Sequence
  Guide RNA
uacccugagaugacaaugccuu

SEQ ID NO: 25156 - RNA, 22 nt, Artificial Sequence
  Guide RNA
uccaggguaagccacaaggcau

SEQ ID NO: 25157 - RNA, 22 nt, Artificial Sequence
  Guide RNA
uccaggguaagccacgaggcau

SEQ ID NO: 25158 - RNA, 22 nt, Artificial Sequence
  Guide RNA
ucguggcuuacccuggacagaa

SEQ ID NO: 25159 - RNA, 22 nt, Artificial Sequence
  Guide RNA
ucuguccaggguaagccacaag

SEQ ID NO: 25160 - RNA, 22 nt, Artificial Sequence
  Guide RNA
ucuguccaggguaagccacgag

SEQ ID NO: 25161 - RNA, 22 nt, Artificial Sequence
  Guide RNA
ugacaaugccucguggcuuacc

SEQ ID NO: 25162 - RNA, 22 nt, Artificial Sequence
  Guide RNA
ugacaaugccuuguggcuuacc

SEQ ID NO: 25163 - RNA, 22 nt, Artificial Sequence
  Guide RNA
ugagaugacaaugccucguggc

SEQ ID NO: 25164 - RNA, 22 nt, Artificial Sequence
  Guide RNA
ugagaugacaaugccuuguggc

SEQ ID NO: 25165 - RNA, 22 nt, Artificial Sequence
  Guide RNA
ugccucguggcuuacccuggac

SEQ ID NO: 25166 - RNA, 22 nt, Artificial Sequence
  Guide RNA
ugccuuguggcuuacccuggac

SEQ ID NO: 25167 - RNA, 22 nt, Artificial Sequence
  Guide RNA
ugcuuuucuguccaggguaagc

SEQ ID NO: 25168 - RNA, 22 nt, Artificial Sequence
  Guide RNA
uguccaggguaagccacaaggc

SEQ ID NO: 25169 - RNA, 22 nt, Artificial Sequence
  Guide RNA
uguccaggguaagccacgaggc

SEQ ID NO: 25170 - RNA, 22 nt, Artificial Sequence
  Guide RNA
uucuguccaggguaagccacaa

SEQ ID NO: 25171 - RNA, 22 nt, Artificial Sequence
  Guide RNA
uucuguccaggguaagccacga

SEQ ID NO: 25172 - RNA, 22 nt, Artificial Sequence
  Guide RNA
uuguggcuuacccuggacagaa

SEQ ID NO: 25173 - RNA, 22 nt, Artificial Sequence
  Guide RNA
uuucuguccaggguaagccaca

SEQ ID NO: 25174 - RNA, 22 nt, Artificial Sequence
  Guide RNA
uuucuguccaggguaagccacg

SEQ ID NO: 25175 - RNA, 22 nt, Artificial Sequence
  Guide RNA
uuuucuguccaggguaagccac

SEQ ID NO: 25176 - RNA, 20 nt, Artificial Sequence
  Guide RNA
aacugcucacuccauuggaa

SEQ ID NO: 25177 - RNA, 20 nt, Artificial Sequence
  Guide RNA
aacugcucacucuauuggaa

SEQ ID NO: 25178 - RNA, 20 nt, Artificial Sequence
  Guide RNA
aaggggguccuuuccaauag

SEQ ID NO: 25179 - RNA, 20 nt, Artificial Sequence
  Guide RNA
aaggggguccuuuccaaugg

SEQ ID NO: 25180 - RNA, 20 nt, Artificial Sequence
  Guide RNA
aauagagugagcaguugucc

SEQ ID NO: 25181 - RNA, 20 nt, Artificial Sequence
  Guide RNA
aauggagugagcaguugucc

SEQ ID NO: 25182 - RNA, 20 nt, Artificial Sequence
  Guide RNA
acaacugcucacuccauugg

SEQ ID NO: 25183 - RNA, 20 nt, Artificial Sequence
  Guide RNA
acaacugcucacucuauugg

SEQ ID NO: 25184 - RNA, 20 nt, Artificial Sequence
  Guide RNA
acuccauuggaaaggacccc

SEQ ID NO: 25185 - RNA, 20 nt, Artificial Sequence
  Guide RNA
acucuauuggaaaggacccc

SEQ ID NO: 25186 - RNA, 20 nt, Artificial Sequence
  Guide RNA
acugcucacuccauuggaaa

SEQ ID NO: 25187 - RNA, 20 nt, Artificial Sequence
  Guide RNA
acugcucacucuauuggaaa

SEQ ID NO: 25188 - RNA, 20 nt, Artificial Sequence
  Guide RNA
acuuggacaacugcucacuc

SEQ ID NO: 25189 - RNA, 20 nt, Artificial Sequence
  Guide RNA
aggaaggggguccuuuccaa

SEQ ID NO: 25190 - RNA, 20 nt, Artificial Sequence
  Guide RNA
aggggguccuuuccaauaga

SEQ ID NO: 25191 - RNA, 20 nt, Artificial Sequence
  Guide RNA
aggggguccuuuccaaugga

SEQ ID NO: 25192 - RNA, 20 nt, Artificial Sequence
  Guide RNA
auagagugagcaguugucca

SEQ ID NO: 25193 - RNA, 20 nt, Artificial Sequence
  Guide RNA
auggagugagcaguugucca

SEQ ID NO: 25194 - RNA, 20 nt, Artificial Sequence
  Guide RNA
caacugcucacuccauugga

SEQ ID NO: 25195 - RNA, 20 nt, Artificial Sequence
  Guide RNA
caacugcucacucuauugga

SEQ ID NO: 25196 - RNA, 20 nt, Artificial Sequence
  Guide RNA
caauagagugagcaguuguc

SEQ ID NO: 25197 - RNA, 20 nt, Artificial Sequence
  Guide RNA
caauggagugagcaguuguc

SEQ ID NO: 25198 - RNA, 20 nt, Artificial Sequence
  Guide RNA
cacuccauuggaaaggaccc

SEQ ID NO: 25199 - RNA, 20 nt, Artificial Sequence
  Guide RNA
cacucuauuggaaaggaccc

SEQ ID NO: 25200 - RNA, 20 nt, Artificial Sequence
  Guide RNA
caggaaggggguccuuucca

SEQ ID NO: 25201 - RNA, 20 nt, Artificial Sequence
  Guide RNA
ccaauagagugagcaguugu

SEQ ID NO: 25202 - RNA, 20 nt, Artificial Sequence
  Guide RNA
ccaauggagugagcaguugu

SEQ ID NO: 25203 - RNA, 20 nt, Artificial Sequence
  Guide RNA
ccauuggaaaggacccccuu

SEQ ID NO: 25204 - RNA, 20 nt, Artificial Sequence
  Guide RNA
ccuuuccaauagagugagca

SEQ ID NO: 25205 - RNA, 20 nt, Artificial Sequence
  Guide RNA
ccuuuccaauggagugagca

SEQ ID NO: 25206 - RNA, 20 nt, Artificial Sequence
  Guide RNA
cuauuggaaaggacccccuu

SEQ ID NO: 25207 - RNA, 20 nt, Artificial Sequence
  Guide RNA
cucacuccauuggaaaggac

SEQ ID NO: 25208 - RNA, 20 nt, Artificial Sequence
  Guide RNA
cucacucuauuggaaaggac

SEQ ID NO: 25209 - RNA, 20 nt, Artificial Sequence
  Guide RNA
cuccauuggaaaggaccccc

SEQ ID NO: 25210 - RNA, 20 nt, Artificial Sequence
  Guide RNA
cucuauuggaaaggaccccc

SEQ ID NO: 25211 - RNA, 20 nt, Artificial Sequence
  Guide RNA
cugcucacuccauuggaaag

SEQ ID NO: 25212 - RNA, 20 nt, Artificial Sequence
  Guide RNA
cugcucacucuauuggaaag

SEQ ID NO: 25213 - RNA, 20 nt, Artificial Sequence
  Guide RNA
cuuacuuggacaacugcuca

SEQ ID NO: 25214 - RNA, 20 nt, Artificial Sequence
  Guide RNA
cuuggacaacugcucacucc

SEQ ID NO: 25215 - RNA, 20 nt, Artificial Sequence
  Guide RNA
cuuggacaacugcucacucu

SEQ ID NO: 25216 - RNA, 20 nt, Artificial Sequence
  Guide RNA
cuuuccaauagagugagcag

SEQ ID NO: 25217 - RNA, 20 nt, Artificial Sequence
  Guide RNA
cuuuccaauggagugagcag

SEQ ID NO: 25218 - RNA, 20 nt, Artificial Sequence
  Guide RNA
gaaggggguccuuuccaaua

SEQ ID NO: 25219 - RNA, 20 nt, Artificial Sequence
  Guide RNA
gaaggggguccuuuccaaug

SEQ ID NO: 25220 - RNA, 20 nt, Artificial Sequence
  Guide RNA
gacaacugcucacuccauug

SEQ ID NO: 25221 - RNA, 20 nt, Artificial Sequence
  Guide RNA
gacaacugcucacucuauug

SEQ ID NO: 25222 - RNA, 20 nt, Artificial Sequence
  Guide RNA
gcucacuccauuggaaagga

SEQ ID NO: 25223 - RNA, 20 nt, Artificial Sequence
  Guide RNA
gcucacucuauuggaaagga

SEQ ID NO: 25224 - RNA, 20 nt, Artificial Sequence
  Guide RNA
ggaaggggguccuuuccaau

SEQ ID NO: 25225 - RNA, 20 nt, Artificial Sequence
  Guide RNA
ggacaacugcucacuccauu

SEQ ID NO: 25226 - RNA, 20 nt, Artificial Sequence
  Guide RNA
ggacaacugcucacucuauu

SEQ ID NO: 25227 - RNA, 20 nt, Artificial Sequence
  Guide RNA
ggggguccuuuccaauagag

SEQ ID NO: 25228 - RNA, 20 nt, Artificial Sequence
  Guide RNA
ggggguccuuuccaauggag

SEQ ID NO: 25229 - RNA, 20 nt, Artificial Sequence
  Guide RNA
gggguccuuuccaauagagu

SEQ ID NO: 25230 - RNA, 20 nt, Artificial Sequence
  Guide RNA
gggguccuuuccaauggagu

SEQ ID NO: 25231 - RNA, 20 nt, Artificial Sequence
  Guide RNA
ggguccuuuccaauagagug

SEQ ID NO: 25232 - RNA, 20 nt, Artificial Sequence
  Guide RNA
ggguccuuuccaauggagug

SEQ ID NO: 25233 - RNA, 20 nt, Artificial Sequence
  Guide RNA
gguccuuuccaauagaguga

SEQ ID NO: 25234 - RNA, 20 nt, Artificial Sequence
  Guide RNA
gguccuuuccaauggaguga

SEQ ID NO: 25235 - RNA, 20 nt, Artificial Sequence
  Guide RNA
guccuuuccaauagagugag

SEQ ID NO: 25236 - RNA, 20 nt, Artificial Sequence
  Guide RNA
guccuuuccaauggagugag

SEQ ID NO: 25237 - RNA, 20 nt, Artificial Sequence
  Guide RNA
uacuuggacaacugcucacu

SEQ ID NO: 25238 - RNA, 20 nt, Artificial Sequence
  Guide RNA
uagagugagcaguuguccaa

SEQ ID NO: 25239 - RNA, 20 nt, Artificial Sequence
  Guide RNA
ucacuccauuggaaaggacc

SEQ ID NO: 25240 - RNA, 20 nt, Artificial Sequence
  Guide RNA
ucacucuauuggaaaggacc

SEQ ID NO: 25241 - RNA, 20 nt, Artificial Sequence
  Guide RNA
ucaggaaggggguccuuucc

SEQ ID NO: 25242 - RNA, 20 nt, Artificial Sequence
  Guide RNA
uccaauagagugagcaguug

SEQ ID NO: 25243 - RNA, 20 nt, Artificial Sequence
  Guide RNA
uccaauggagugagcaguug

SEQ ID NO: 25244 - RNA, 20 nt, Artificial Sequence
  Guide RNA
uccauuggaaaggacccccu

SEQ ID NO: 25245 - RNA, 20 nt, Artificial Sequence
  Guide RNA
uccuuuccaauagagugagc

SEQ ID NO: 25246 - RNA, 20 nt, Artificial Sequence
  Guide RNA
uccuuuccaauggagugagc

SEQ ID NO: 25247 - RNA, 20 nt, Artificial Sequence
  Guide RNA
ucuauuggaaaggacccccu

SEQ ID NO: 25248 - RNA, 20 nt, Artificial Sequence
  Guide RNA
ugcucacuccauuggaaagg

SEQ ID NO: 25249 - RNA, 20 nt, Artificial Sequence
  Guide RNA
ugcucacucuauuggaaagg

SEQ ID NO: 25250 - RNA, 20 nt, Artificial Sequence
  Guide RNA
uggacaacugcucacuccau

SEQ ID NO: 25251 - RNA, 20 nt, Artificial Sequence
  Guide RNA
uggacaacugcucacucuau

SEQ ID NO: 25252 - RNA, 20 nt, Artificial Sequence
  Guide RNA
uggagugagcaguuguccaa

SEQ ID NO: 25253 - RNA, 20 nt, Artificial Sequence
  Guide RNA
uuacuuggacaacugcucac

SEQ ID NO: 25254 - RNA, 20 nt, Artificial Sequence
  Guide RNA
uuccaauagagugagcaguu

SEQ ID NO: 25255 - RNA, 20 nt, Artificial Sequence
  Guide RNA
uuccaauggagugagcaguu

SEQ ID NO: 25256 - RNA, 20 nt, Artificial Sequence
  Guide RNA
uuggacaacugcucacucca

SEQ ID NO: 25257 - RNA, 20 nt, Artificial Sequence
  Guide RNA
uuggacaacugcucacucua

SEQ ID NO: 25258 - RNA, 20 nt, Artificial Sequence
  Guide RNA
uuuccaauagagugagcagu

SEQ ID NO: 25259 - RNA, 20 nt, Artificial Sequence
  Guide RNA
uuuccaauggagugagcagu

SEQ ID NO: 25260 - RNA, 21 nt, Artificial Sequence
  Guide RNA
aacugcucacuccauuggaaa

SEQ ID NO: 25261 - RNA, 21 nt, Artificial Sequence
  Guide RNA
aacugcucacucuauuggaaa

SEQ ID NO: 25262 - RNA, 21 nt, Artificial Sequence
  Guide RNA
aaggggguccuuuccaauaga

SEQ ID NO: 25263 - RNA, 21 nt, Artificial Sequence
  Guide RNA
aaggggguccuuuccaaugga

SEQ ID NO: 25264 - RNA, 21 nt, Artificial Sequence
  Guide RNA
aauagagugagcaguugucca

SEQ ID NO: 25265 - RNA, 21 nt, Artificial Sequence
  Guide RNA
aauggagugagcaguugucca

SEQ ID NO: 25266 - RNA, 21 nt, Artificial Sequence
  Guide RNA
acaacugcucacuccauugga

SEQ ID NO: 25267 - RNA, 21 nt, Artificial Sequence
  Guide RNA
acaacugcucacucuauugga

SEQ ID NO: 25268 - RNA, 21 nt, Artificial Sequence
  Guide RNA
acuccauuggaaaggaccccc

SEQ ID NO: 25269 - RNA, 21 nt, Artificial Sequence
  Guide RNA
acucuauuggaaaggaccccc

SEQ ID NO: 25270 - RNA, 21 nt, Artificial Sequence
  Guide RNA
acugcucacuccauuggaaag

SEQ ID NO: 25271 - RNA, 21 nt, Artificial Sequence
  Guide RNA
acugcucacucuauuggaaag

SEQ ID NO: 25272 - RNA, 21 nt, Artificial Sequence
  Guide RNA
acuuggacaacugcucacucc

SEQ ID NO: 25273 - RNA, 21 nt, Artificial Sequence
  Guide RNA
acuuggacaacugcucacucu

SEQ ID NO: 25274 - RNA, 21 nt, Artificial Sequence
  Guide RNA
aggaaggggguccuuuccaau

SEQ ID NO: 25275 - RNA, 21 nt, Artificial Sequence
  Guide RNA
aggggguccuuuccaauagag

SEQ ID NO: 25276 - RNA, 21 nt, Artificial Sequence
  Guide RNA
aggggguccuuuccaauggag

SEQ ID NO: 25277 - RNA, 21 nt, Artificial Sequence
  Guide RNA
auagagugagcaguuguccaa

SEQ ID NO: 25278 - RNA, 21 nt, Artificial Sequence
  Guide RNA
auggagugagcaguuguccaa

SEQ ID NO: 25279 - RNA, 21 nt, Artificial Sequence
  Guide RNA
caacugcucacuccauuggaa

SEQ ID NO: 25280 - RNA, 21 nt, Artificial Sequence
  Guide RNA
caacugcucacucuauuggaa

SEQ ID NO: 25281 - RNA, 21 nt, Artificial Sequence
  Guide RNA
caauagagugagcaguugucc

SEQ ID NO: 25282 - RNA, 21 nt, Artificial Sequence
  Guide RNA
caauggagugagcaguugucc

SEQ ID NO: 25283 - RNA, 21 nt, Artificial Sequence
  Guide RNA
cacuccauuggaaaggacccc

SEQ ID NO: 25284 - RNA, 21 nt, Artificial Sequence
  Guide RNA
cacucuauuggaaaggacccc

SEQ ID NO: 25285 - RNA, 21 nt, Artificial Sequence
  Guide RNA
caggaaggggguccuuuccaa

SEQ ID NO: 25286 - RNA, 21 nt, Artificial Sequence
  Guide RNA
ccaauagagugagcaguuguc

SEQ ID NO: 25287 - RNA, 21 nt, Artificial Sequence
  Guide RNA
ccaauggagugagcaguuguc

SEQ ID NO: 25288 - RNA, 21 nt, Artificial Sequence
  Guide RNA
ccauuggaaaggacccccuuc

SEQ ID NO: 25289 - RNA, 21 nt, Artificial Sequence
  Guide RNA
ccuuacuuggacaacugcuca

SEQ ID NO: 25290 - RNA, 21 nt, Artificial Sequence
  Guide RNA
ccuuuccaauagagugagcag

SEQ ID NO: 25291 - RNA, 21 nt, Artificial Sequence
  Guide RNA
ccuuuccaauggagugagcag

SEQ ID NO: 25292 - RNA, 21 nt, Artificial Sequence
  Guide RNA
cuauuggaaaggacccccuuc

SEQ ID NO: 25293 - RNA, 21 nt, Artificial Sequence
  Guide RNA
cucacuccauuggaaaggacc

SEQ ID NO: 25294 - RNA, 21 nt, Artificial Sequence
  Guide RNA
cucacucuauuggaaaggacc

SEQ ID NO: 25295 - RNA, 21 nt, Artificial Sequence
  Guide RNA
cucaggaaggggguccuuucc

SEQ ID NO: 25296 - RNA, 21 nt, Artificial Sequence
  Guide RNA
cuccauuggaaaggacccccu

SEQ ID NO: 25297 - RNA, 21 nt, Artificial Sequence
  Guide RNA
cucuauuggaaaggacccccu

SEQ ID NO: 25298 - RNA, 21 nt, Artificial Sequence
  Guide RNA
cugcucacuccauuggaaagg

SEQ ID NO: 25299 - RNA, 21 nt, Artificial Sequence
  Guide RNA
cugcucacucuauuggaaagg

SEQ ID NO: 25300 - RNA, 21 nt, Artificial Sequence
  Guide RNA
cuuacuuggacaacugcucac

SEQ ID NO: 25301 - RNA, 21 nt, Artificial Sequence
  Guide RNA
cuuggacaacugcucacucca

SEQ ID NO: 25302 - RNA, 21 nt, Artificial Sequence
  Guide RNA
cuuggacaacugcucacucua

SEQ ID NO: 25303 - RNA, 21 nt, Artificial Sequence
  Guide RNA
cuuuccaauagagugagcagu

SEQ ID NO: 25304 - RNA, 21 nt, Artificial Sequence
  Guide RNA
cuuuccaauggagugagcagu

SEQ ID NO: 25305 - RNA, 21 nt, Artificial Sequence
  Guide RNA
gaaggggguccuuuccaauag

SEQ ID NO: 25306 - RNA, 21 nt, Artificial Sequence
  Guide RNA
gaaggggguccuuuccaaugg

SEQ ID NO: 25307 - RNA, 21 nt, Artificial Sequence
  Guide RNA
gacaacugcucacuccauugg

SEQ ID NO: 25308 - RNA, 21 nt, Artificial Sequence
  Guide RNA
gacaacugcucacucuauugg

SEQ ID NO: 25309 - RNA, 21 nt, Artificial Sequence
  Guide RNA
gcucacuccauuggaaaggac

SEQ ID NO: 25310 - RNA, 21 nt, Artificial Sequence
  Guide RNA
gcucacucuauuggaaaggac

SEQ ID NO: 25311 - RNA, 21 nt, Artificial Sequence
  Guide RNA
ggaaggggguccuuuccaaua

SEQ ID NO: 25312 - RNA, 21 nt, Artificial Sequence
  Guide RNA
ggaaggggguccuuuccaaug

SEQ ID NO: 25313 - RNA, 21 nt, Artificial Sequence
  Guide RNA
ggacaacugcucacuccauug

SEQ ID NO: 25314 - RNA, 21 nt, Artificial Sequence
  Guide RNA
ggacaacugcucacucuauug

SEQ ID NO: 25315 - RNA, 21 nt, Artificial Sequence
  Guide RNA
ggggguccuuuccaauagagu

SEQ ID NO: 25316 - RNA, 21 nt, Artificial Sequence
  Guide RNA
ggggguccuuuccaauggagu

SEQ ID NO: 25317 - RNA, 21 nt, Artificial Sequence
  Guide RNA
gggguccuuuccaauagagug

SEQ ID NO: 25318 - RNA, 21 nt, Artificial Sequence
  Guide RNA
gggguccuuuccaauggagug

SEQ ID NO: 25319 - RNA, 21 nt, Artificial Sequence
  Guide RNA
ggguccuuuccaauagaguga

SEQ ID NO: 25320 - RNA, 21 nt, Artificial Sequence
  Guide RNA
ggguccuuuccaauggaguga

SEQ ID NO: 25321 - RNA, 21 nt, Artificial Sequence
  Guide RNA
gguccuuuccaauagagugag

SEQ ID NO: 25322 - RNA, 21 nt, Artificial Sequence
  Guide RNA
gguccuuuccaauggagugag

SEQ ID NO: 25323 - RNA, 21 nt, Artificial Sequence
  Guide RNA
guccuuuccaauagagugagc

SEQ ID NO: 25324 - RNA, 21 nt, Artificial Sequence
  Guide RNA
guccuuuccaauggagugagc

SEQ ID NO: 25325 - RNA, 21 nt, Artificial Sequence
  Guide RNA
uacuuggacaacugcucacuc

SEQ ID NO: 25326 - RNA, 21 nt, Artificial Sequence
  Guide RNA
uagagugagcaguuguccaag

SEQ ID NO: 25327 - RNA, 21 nt, Artificial Sequence
  Guide RNA
ucacuccauuggaaaggaccc

SEQ ID NO: 25328 - RNA, 21 nt, Artificial Sequence
  Guide RNA
ucacucuauuggaaaggaccc

SEQ ID NO: 25329 - RNA, 21 nt, Artificial Sequence
  Guide RNA
ucaggaaggggguccuuucca

SEQ ID NO: 25330 - RNA, 21 nt, Artificial Sequence
  Guide RNA
uccaauagagugagcaguugu

SEQ ID NO: 25331 - RNA, 21 nt, Artificial Sequence
  Guide RNA
uccaauggagugagcaguugu

SEQ ID NO: 25332 - RNA, 21 nt, Artificial Sequence
  Guide RNA
uccauuggaaaggacccccuu

SEQ ID NO: 25333 - RNA, 21 nt, Artificial Sequence
  Guide RNA
uccuuuccaauagagugagca

SEQ ID NO: 25334 - RNA, 21 nt, Artificial Sequence
  Guide RNA
uccuuuccaauggagugagca

SEQ ID NO: 25335 - RNA, 21 nt, Artificial Sequence
  Guide RNA
ucuauuggaaaggacccccuu

SEQ ID NO: 25336 - RNA, 21 nt, Artificial Sequence
  Guide RNA
ugcucacuccauuggaaagga

SEQ ID NO: 25337 - RNA, 21 nt, Artificial Sequence
  Guide RNA
ugcucacucuauuggaaagga

SEQ ID NO: 25338 - RNA, 21 nt, Artificial Sequence
  Guide RNA
uggacaacugcucacuccauu

SEQ ID NO: 25339 - RNA, 21 nt, Artificial Sequence
  Guide RNA
uggacaacugcucacucuauu

SEQ ID NO: 25340 - RNA, 21 nt, Artificial Sequence
  Guide RNA
uggagugagcaguuguccaag

SEQ ID NO: 25341 - RNA, 21 nt, Artificial Sequence
  Guide RNA
uuacuuggacaacugcucacu

SEQ ID NO: 25342 - RNA, 21 nt, Artificial Sequence
  Guide RNA
uuccaauagagugagcaguug

SEQ ID NO: 25343 - RNA, 21 nt, Artificial Sequence
  Guide RNA
uuccaauggagugagcaguug

SEQ ID NO: 25344 - RNA, 21 nt, Artificial Sequence
  Guide RNA
uuggacaacugcucacuccau

SEQ ID NO: 25345 - RNA, 21 nt, Artificial Sequence
  Guide RNA
uuggacaacugcucacucuau

SEQ ID NO: 25346 - RNA, 21 nt, Artificial Sequence
  Guide RNA
uuuccaauagagugagcaguu

SEQ ID NO: 25347 - RNA, 21 nt, Artificial Sequence
  Guide RNA
uuuccaauggagugagcaguu

SEQ ID NO: 25348 - RNA, 22 nt, Artificial Sequence
  Guide RNA
aacugcucacuccauuggaaag

SEQ ID NO: 25349 - RNA, 22 nt, Artificial Sequence
  Guide RNA
aacugcucacucuauuggaaag

SEQ ID NO: 25350 - RNA, 22 nt, Artificial Sequence
  Guide RNA
aaggggguccuuuccaauagag

SEQ ID NO: 25351 - RNA, 22 nt, Artificial Sequence
  Guide RNA
aaggggguccuuuccaauggag

SEQ ID NO: 25352 - RNA, 22 nt, Artificial Sequence
  Guide RNA
aauagagugagcaguuguccaa

SEQ ID NO: 25353 - RNA, 22 nt, Artificial Sequence
  Guide RNA
aauggagugagcaguuguccaa

SEQ ID NO: 25354 - RNA, 22 nt, Artificial Sequence
  Guide RNA
acaacugcucacuccauuggaa

SEQ ID NO: 25355 - RNA, 22 nt, Artificial Sequence
  Guide RNA
acaacugcucacucuauuggaa

SEQ ID NO: 25356 - RNA, 22 nt, Artificial Sequence
  Guide RNA
acuccauuggaaaggacccccu

SEQ ID NO: 25357 - RNA, 22 nt, Artificial Sequence
  Guide RNA
acucuauuggaaaggacccccu

SEQ ID NO: 25358 - RNA, 22 nt, Artificial Sequence
  Guide RNA
acugcucacuccauuggaaagg

SEQ ID NO: 25359 - RNA, 22 nt, Artificial Sequence
  Guide RNA
acugcucacucuauuggaaagg

SEQ ID NO: 25360 - RNA, 22 nt, Artificial Sequence
  Guide RNA
acuuggacaacugcucacucca

SEQ ID NO: 25361 - RNA, 22 nt, Artificial Sequence
  Guide RNA
acuuggacaacugcucacucua

SEQ ID NO: 25362 - RNA, 22 nt, Artificial Sequence
  Guide RNA
aggaaggggguccuuuccaaua

SEQ ID NO: 25363 - RNA, 22 nt, Artificial Sequence
  Guide RNA
aggaaggggguccuuuccaaug

SEQ ID NO: 25364 - RNA, 22 nt, Artificial Sequence
  Guide RNA
aggggguccuuuccaauagagu

SEQ ID NO: 25365 - RNA, 22 nt, Artificial Sequence
  Guide RNA
aggggguccuuuccaauggagu

SEQ ID NO: 25366 - RNA, 22 nt, Artificial Sequence
  Guide RNA
auagagugagcaguuguccaag

SEQ ID NO: 25367 - RNA, 22 nt, Artificial Sequence
  Guide RNA
auggagugagcaguuguccaag

SEQ ID NO: 25368 - RNA, 22 nt, Artificial Sequence
  Guide RNA
caacugcucacuccauuggaaa

SEQ ID NO: 25369 - RNA, 22 nt, Artificial Sequence
  Guide RNA
caacugcucacucuauuggaaa

SEQ ID NO: 25370 - RNA, 22 nt, Artificial Sequence
  Guide RNA
caauagagugagcaguugucca

SEQ ID NO: 25371 - RNA, 22 nt, Artificial Sequence
  Guide RNA
caauggagugagcaguugucca

SEQ ID NO: 25372 - RNA, 22 nt, Artificial Sequence
  Guide RNA
cacuccauuggaaaggaccccc

SEQ ID NO: 25373 - RNA, 22 nt, Artificial Sequence
  Guide RNA
cacucuauuggaaaggaccccc

SEQ ID NO: 25374 - RNA, 22 nt, Artificial Sequence
  Guide RNA
caggaaggggguccuuuccaau

SEQ ID NO: 25375 - RNA, 22 nt, Artificial Sequence
  Guide RNA
ccaauagagugagcaguugucc

SEQ ID NO: 25376 - RNA, 22 nt, Artificial Sequence
  Guide RNA
ccaauggagugagcaguugucc

SEQ ID NO: 25377 - RNA, 22 nt, Artificial Sequence
  Guide RNA
ccauuggaaaggacccccuucc

SEQ ID NO: 25378 - RNA, 22 nt, Artificial Sequence
  Guide RNA
cccuuacuuggacaacugcuca

SEQ ID NO: 25379 - RNA, 22 nt, Artificial Sequence
  Guide RNA
ccuuacuuggacaacugcucac

SEQ ID NO: 25380 - RNA, 22 nt, Artificial Sequence
  Guide RNA
ccuuuccaauagagugagcagu

SEQ ID NO: 25381 - RNA, 22 nt, Artificial Sequence
  Guide RNA
ccuuuccaauggagugagcagu

SEQ ID NO: 25382 - RNA, 22 nt, Artificial Sequence
  Guide RNA
cuauuggaaaggacccccuucc

SEQ ID NO: 25383 - RNA, 22 nt, Artificial Sequence
  Guide RNA
cucacuccauuggaaaggaccc

SEQ ID NO: 25384 - RNA, 22 nt, Artificial Sequence
  Guide RNA
cucacucuauuggaaaggaccc

SEQ ID NO: 25385 - RNA, 22 nt, Artificial Sequence
  Guide RNA
cucaggaaggggguccuuucca

SEQ ID NO: 25386 - RNA, 22 nt, Artificial Sequence
  Guide RNA
cuccauuggaaaggacccccuu

SEQ ID NO: 25387 - RNA, 22 nt, Artificial Sequence
  Guide RNA
cucuauuggaaaggacccccuu

SEQ ID NO: 25388 - RNA, 22 nt, Artificial Sequence
  Guide RNA
cugcucacuccauuggaaagga

SEQ ID NO: 25389 - RNA, 22 nt, Artificial Sequence
  Guide RNA
cugcucacucuauuggaaagga

SEQ ID NO: 25390 - RNA, 22 nt, Artificial Sequence
  Guide RNA
cuuacuuggacaacugcucacu

SEQ ID NO: 25391 - RNA, 22 nt, Artificial Sequence
  Guide RNA
cuuggacaacugcucacuccau

SEQ ID NO: 25392 - RNA, 22 nt, Artificial Sequence
  Guide RNA
cuuggacaacugcucacucuau

SEQ ID NO: 25393 - RNA, 22 nt, Artificial Sequence
  Guide RNA
cuuuccaauagagugagcaguu

SEQ ID NO: 25394 - RNA, 22 nt, Artificial Sequence
  Guide RNA
cuuuccaauggagugagcaguu

SEQ ID NO: 25395 - RNA, 22 nt, Artificial Sequence
  Guide RNA
gaaggggguccuuuccaauaga

SEQ ID NO: 25396 - RNA, 22 nt, Artificial Sequence
  Guide RNA
gaaggggguccuuuccaaugga

SEQ ID NO: 25397 - RNA, 22 nt, Artificial Sequence
  Guide RNA
gacaacugcucacuccauugga

SEQ ID NO: 25398 - RNA, 22 nt, Artificial Sequence
  Guide RNA
gacaacugcucacucuauugga

SEQ ID NO: 25399 - RNA, 22 nt, Artificial Sequence
  Guide RNA
gcucacuccauuggaaaggacc

SEQ ID NO: 25400 - RNA, 22 nt, Artificial Sequence
  Guide RNA
gcucacucuauuggaaaggacc

SEQ ID NO: 25401 - RNA, 22 nt, Artificial Sequence
  Guide RNA
gcucaggaaggggguccuuucc

SEQ ID NO: 25402 - RNA, 22 nt, Artificial Sequence
  Guide RNA
ggaaggggguccuuuccaauag

SEQ ID NO: 25403 - RNA, 22 nt, Artificial Sequence
  Guide RNA
ggaaggggguccuuuccaaugg

SEQ ID NO: 25404 - RNA, 22 nt, Artificial Sequence
  Guide RNA
ggacaacugcucacuccauugg

SEQ ID NO: 25405 - RNA, 22 nt, Artificial Sequence
  Guide RNA
ggacaacugcucacucuauugg

SEQ ID NO: 25406 - RNA, 22 nt, Artificial Sequence
  Guide RNA
ggggguccuuuccaauagagug

SEQ ID NO: 25407 - RNA, 22 nt, Artificial Sequence
  Guide RNA
ggggguccuuuccaauggagug

SEQ ID NO: 25408 - RNA, 22 nt, Artificial Sequence
  Guide RNA
gggguccuuuccaauagaguga

SEQ ID NO: 25409 - RNA, 22 nt, Artificial Sequence
  Guide RNA
gggguccuuuccaauggaguga

SEQ ID NO: 25410 - RNA, 22 nt, Artificial Sequence
  Guide RNA
ggguccuuuccaauagagugag

SEQ ID NO: 25411 - RNA, 22 nt, Artificial Sequence
  Guide RNA
ggguccuuuccaauggagugag

SEQ ID NO: 25412 - RNA, 22 nt, Artificial Sequence
  Guide RNA
gguccuuuccaauagagugagc

SEQ ID NO: 25413 - RNA, 22 nt, Artificial Sequence
  Guide RNA
gguccuuuccaauggagugagc

SEQ ID NO: 25414 - RNA, 22 nt, Artificial Sequence
  Guide RNA
guccuuuccaauagagugagca

SEQ ID NO: 25415 - RNA, 22 nt, Artificial Sequence
  Guide RNA
guccuuuccaauggagugagca

SEQ ID NO: 25416 - RNA, 22 nt, Artificial Sequence
  Guide RNA
uacuuggacaacugcucacucc

SEQ ID NO: 25417 - RNA, 22 nt, Artificial Sequence
  Guide RNA
uacuuggacaacugcucacucu

SEQ ID NO: 25418 - RNA, 22 nt, Artificial Sequence
  Guide RNA
uagagugagcaguuguccaagu

SEQ ID NO: 25419 - RNA, 22 nt, Artificial Sequence
  Guide RNA
ucacuccauuggaaaggacccc

SEQ ID NO: 25420 - RNA, 22 nt, Artificial Sequence
  Guide RNA
ucacucuauuggaaaggacccc

SEQ ID NO: 25421 - RNA, 22 nt, Artificial Sequence
  Guide RNA
ucaggaaggggguccuuuccaa

SEQ ID NO: 25422 - RNA, 22 nt, Artificial Sequence
  Guide RNA
uccaauagagugagcaguuguc

SEQ ID NO: 25423 - RNA, 22 nt, Artificial Sequence
  Guide RNA
uccaauggagugagcaguuguc

SEQ ID NO: 25424 - RNA, 22 nt, Artificial Sequence
  Guide RNA
uccauuggaaaggacccccuuc

SEQ ID NO: 25425 - RNA, 22 nt, Artificial Sequence
  Guide RNA
uccuuuccaauagagugagcag

SEQ ID NO: 25426 - RNA, 22 nt, Artificial Sequence
  Guide RNA
uccuuuccaauggagugagcag

SEQ ID NO: 25427 - RNA, 22 nt, Artificial Sequence
  Guide RNA
ucuauuggaaaggacccccuuc

SEQ ID NO: 25428 - RNA, 22 nt, Artificial Sequence
  Guide RNA
ugcucacuccauuggaaaggac

SEQ ID NO: 25429 - RNA, 22 nt, Artificial Sequence
  Guide RNA
ugcucacucuauuggaaaggac

SEQ ID NO: 25430 - RNA, 22 nt, Artificial Sequence
  Guide RNA
uggacaacugcucacuccauug

SEQ ID NO: 25431 - RNA, 22 nt, Artificial Sequence
  Guide RNA
uggacaacugcucacucuauug

SEQ ID NO: 25432 - RNA, 22 nt, Artificial Sequence
  Guide RNA
uggagugagcaguuguccaagu

SEQ ID NO: 25433 - RNA, 22 nt, Artificial Sequence
  Guide RNA
uuacuuggacaacugcucacuc

SEQ ID NO: 25434 - RNA, 22 nt, Artificial Sequence
  Guide RNA
uuccaauagagugagcaguugu

SEQ ID NO: 25435 - RNA, 22 nt, Artificial Sequence
  Guide RNA
uuccaauggagugagcaguugu

SEQ ID NO: 25436 - RNA, 22 nt, Artificial Sequence
  Guide RNA
uuggacaacugcucacuccauu

SEQ ID NO: 25437 - RNA, 22 nt, Artificial Sequence
  Guide RNA
uuggacaacugcucacucuauu

SEQ ID NO: 25438 - RNA, 22 nt, Artificial Sequence
  Guide RNA
uuuccaauagagugagcaguug

SEQ ID NO: 25439 - RNA, 22 nt, Artificial Sequence
  Guide RNA
uuuccaauggagugagcaguug

SEQ ID NO: 25440 - RNA, 20 nt, Artificial Sequence
  Guide RNA
aagaguguaagugaaugaua

SEQ ID NO: 25441 - RNA, 20 nt, Artificial Sequence
  Guide RNA
aagaguguaagugaaugaug

SEQ ID NO: 25442 - RNA, 20 nt, Artificial Sequence
  Guide RNA
agaguguaagugaaugauaa

SEQ ID NO: 25443 - RNA, 20 nt, Artificial Sequence
  Guide RNA
agaguguaagugaaugauga

SEQ ID NO: 25444 - RNA, 20 nt, Artificial Sequence
  Guide RNA
aguguaagugaaugaugaau

SEQ ID NO: 25445 - RNA, 20 nt, Artificial Sequence
  Guide RNA
auaagaguguaagugaauga

SEQ ID NO: 25446 - RNA, 20 nt, Artificial Sequence
  Guide RNA
auucaucauucacuuacacu

SEQ ID NO: 25447 - RNA, 20 nt, Artificial Sequence
  Guide RNA
cauaagaguguaagugaaug

SEQ ID NO: 25448 - RNA, 20 nt, Artificial Sequence
  Guide RNA
gaguguaagugaaugauaaa

SEQ ID NO: 25449 - RNA, 20 nt, Artificial Sequence
  Guide RNA
gaguguaagugaaugaugaa

SEQ ID NO: 25450 - RNA, 20 nt, Artificial Sequence
  Guide RNA
gcauaagaguguaagugaau

SEQ ID NO: 25451 - RNA, 20 nt, Artificial Sequence
  Guide RNA
guguaagugaaugaugaaua

SEQ ID NO: 25452 - RNA, 20 nt, Artificial Sequence
  Guide RNA
uaagaguguaagugaaugau

SEQ ID NO: 25453 - RNA, 20 nt, Artificial Sequence
  Guide RNA
uauucaucauucacuuacac

SEQ ID NO: 25454 - RNA, 20 nt, Artificial Sequence
  Guide RNA
ucaucauucacuuacacucu

SEQ ID NO: 25455 - RNA, 20 nt, Artificial Sequence
  Guide RNA
uuaucauucacuuacacucu

SEQ ID NO: 25456 - RNA, 20 nt, Artificial Sequence
  Guide RNA
uucaucauucacuuacacuc

SEQ ID NO: 25457 - RNA, 20 nt, Artificial Sequence
  Guide RNA
uuuaucauucacuuacacuc

SEQ ID NO: 25458 - RNA, 21 nt, Artificial Sequence
  Guide RNA
aagaguguaagugaaugauga

SEQ ID NO: 25459 - RNA, 21 nt, Artificial Sequence
  Guide RNA
agaguguaagugaaugaugaa

SEQ ID NO: 25460 - RNA, 21 nt, Artificial Sequence
  Guide RNA
agcauaagaguguaagugaau

SEQ ID NO: 25461 - RNA, 21 nt, Artificial Sequence
  Guide RNA
auucaucauucacuuacacuc

SEQ ID NO: 25462 - RNA, 21 nt, Artificial Sequence
  Guide RNA
cauaagaguguaagugaauga

SEQ ID NO: 25463 - RNA, 21 nt, Artificial Sequence
  Guide RNA
gaguguaagugaaugaugaau

SEQ ID NO: 25464 - RNA, 21 nt, Artificial Sequence
  Guide RNA
gcauaagaguguaagugaaug

SEQ ID NO: 25465 - RNA, 21 nt, Artificial Sequence
  Guide RNA
uaagaguguaagugaaugaug

SEQ ID NO: 25466 - RNA, 21 nt, Artificial Sequence
  Guide RNA
ucaucauucacuuacacucuu

SEQ ID NO: 25467 - RNA, 21 nt, Artificial Sequence
  Guide RNA
uucaucauucacuuacacucu

SEQ ID NO: 25468 - RNA, 22 nt, Artificial Sequence
  Guide RNA
aagaguguaagugaaugaugaa

SEQ ID NO: 25469 - RNA, 22 nt, Artificial Sequence
  Guide RNA
agaguguaagugaaugaugaau

SEQ ID NO: 25470 - RNA, 22 nt, Artificial Sequence
  Guide RNA
agcauaagaguguaagugaaug

SEQ ID NO: 25471 - RNA, 22 nt, Artificial Sequence
  Guide RNA
auaagaguguaagugaaugaug

SEQ ID NO: 25472 - RNA, 22 nt, Artificial Sequence
  Guide RNA
auucaucauucacuuacacucu

SEQ ID NO: 25473 - RNA, 22 nt, Artificial Sequence
  Guide RNA
cauaagaguguaagugaaugau

SEQ ID NO: 25474 - RNA, 22 nt, Artificial Sequence
  Guide RNA
gagcauaagaguguaagugaau

SEQ ID NO: 25475 - RNA, 22 nt, Artificial Sequence
  Guide RNA
gaguguaagugaaugaugaaua

SEQ ID NO: 25476 - RNA, 22 nt, Artificial Sequence
  Guide RNA
gcauaagaguguaagugaauga

SEQ ID NO: 25477 - RNA, 22 nt, Artificial Sequence
  Guide RNA
uaagaguguaagugaaugauga

SEQ ID NO: 25478 - RNA, 22 nt, Artificial Sequence
  Guide RNA
uauucaucauucacuuacacuc

SEQ ID NO: 25479 - RNA, 22 nt, Artificial Sequence
  Guide RNA
ucaucauucacuuacacucuua

SEQ ID NO: 25480 - RNA, 22 nt, Artificial Sequence
  Guide RNA
uucaucauucacuuacacucuu

SEQ ID NO: 25481 - RNA, 20 nt, Artificial Sequence
  Guide RNA
agaaaaauaaaagccacuac

SEQ ID NO: 25482 - RNA, 20 nt, Artificial Sequence
  Guide RNA
aguaguggcuuuuauuuuuc

SEQ ID NO: 25483 - RNA, 20 nt, Artificial Sequence
  Guide RNA
cuggaaagaaaaauaaaagc

SEQ ID NO: 25484 - RNA, 20 nt, Artificial Sequence
  Guide RNA
gaaaaauaaaagccacuacu

SEQ ID NO: 25485 - RNA, 20 nt, Artificial Sequence
  Guide RNA
gaaagaaaaauaaaagccac

SEQ ID NO: 25486 - RNA, 20 nt, Artificial Sequence
  Guide RNA
ggaaagaaaaauaaaagcca

SEQ ID NO: 25487 - RNA, 20 nt, Artificial Sequence
  Guide RNA
guaguggcuuuuauuuuucu

SEQ ID NO: 25488 - RNA, 20 nt, Artificial Sequence
  Guide RNA
uggaaagaaaaauaaaagcc

SEQ ID NO: 25489 - RNA, 21 nt, Artificial Sequence
  Guide RNA
cuggaaagaaaaauaaaagcc

SEQ ID NO: 25490 - RNA, 21 nt, Artificial Sequence
  Guide RNA
ggaaagaaaaauaaaagccac

SEQ ID NO: 25491 - RNA, 22 nt, Artificial Sequence
  Guide RNA
aguggcuuuuauuuuucuuucc

SEQ ID NO: 25492 - RNA, 22 nt, Artificial Sequence
  Guide RNA
cuggaaagaaaaauaaaagcca

SEQ ID NO: 25493 - RNA, 22 nt, Artificial Sequence
  Guide RNA
ggaaagaaaaauaaaagccacu

SEQ ID NO: 25494 - RNA, 22 nt, Artificial Sequence
  Guide RNA
gucuggaaagaaaaauaaaagc

SEQ ID NO: 25495 - RNA, 22 nt, Artificial Sequence
  Guide RNA
ucuggaaagaaaaauaaaagcc

SEQ ID NO: 25496 - RNA, 22 nt, Artificial Sequence
  Guide RNA
uggaaagaaaaauaaaagccac

SEQ ID NO: 25497 - RNA, 20 nt, Artificial Sequence
  Guide RNA
aaaacugucaucauaaagcu

SEQ ID NO: 25498 - RNA, 20 nt, Artificial Sequence
  Guide RNA
aaaacugucaucauagagcu

SEQ ID NO: 25499 - RNA, 20 nt, Artificial Sequence
  Guide RNA
aaacugucaucauaaagcug

SEQ ID NO: 25500 - RNA, 20 nt, Artificial Sequence
  Guide RNA
aaacugucaucauagagcug

SEQ ID NO: 25501 - RNA, 20 nt, Artificial Sequence
  Guide RNA
aaagcuggugaaccugcucc

SEQ ID NO: 25502 - RNA, 20 nt, Artificial Sequence
  Guide RNA
aacugucaucauaaagcugg

SEQ ID NO: 25503 - RNA, 20 nt, Artificial Sequence
  Guide RNA
aacugucaucauagagcugg

SEQ ID NO: 25504 - RNA, 20 nt, Artificial Sequence
  Guide RNA
accagcucuaugaugacagu

SEQ ID NO: 25505 - RNA, 20 nt, Artificial Sequence
  Guide RNA
accagcuuuaugaugacagu

SEQ ID NO: 25506 - RNA, 20 nt, Artificial Sequence
  Guide RNA
acugucaucauaaagcuggu

SEQ ID NO: 25507 - RNA, 20 nt, Artificial Sequence
  Guide RNA
acugucaucauagagcuggu

SEQ ID NO: 25508 - RNA, 20 nt, Artificial Sequence
  Guide RNA
agagcuggugaaccugcucc

SEQ ID NO: 25509 - RNA, 20 nt, Artificial Sequence
  Guide RNA
agcagguucaccagcucuau

SEQ ID NO: 25510 - RNA, 20 nt, Artificial Sequence
  Guide RNA
agcagguucaccagcuuuau

SEQ ID NO: 25511 - RNA, 20 nt, Artificial Sequence
  Guide RNA
agcucuaugaugacaguuuu

SEQ ID NO: 25512 - RNA, 20 nt, Artificial Sequence
  Guide RNA
agcuuuaugaugacaguuuu

SEQ ID NO: 25513 - RNA, 20 nt, Artificial Sequence
  Guide RNA
agguucaccagcucuaugau

SEQ ID NO: 25514 - RNA, 20 nt, Artificial Sequence
  Guide RNA
agguucaccagcuuuaugau

SEQ ID NO: 25515 - RNA, 20 nt, Artificial Sequence
  Guide RNA
auaaagcuggugaaccugcu

SEQ ID NO: 25516 - RNA, 20 nt, Artificial Sequence
  Guide RNA
auagagcuggugaaccugcu

SEQ ID NO: 25517 - RNA, 20 nt, Artificial Sequence
  Guide RNA
aucauaaagcuggugaaccu

SEQ ID NO: 25518 - RNA, 20 nt, Artificial Sequence
  Guide RNA
aucauagagcuggugaaccu

SEQ ID NO: 25519 - RNA, 20 nt, Artificial Sequence
  Guide RNA
augggaaaacugucaucaua

SEQ ID NO: 25520 - RNA, 20 nt, Artificial Sequence
  Guide RNA
caccagcucuaugaugacag

SEQ ID NO: 25521 - RNA, 20 nt, Artificial Sequence
  Guide RNA
caccagcuuuaugaugacag

SEQ ID NO: 25522 - RNA, 20 nt, Artificial Sequence
  Guide RNA
cagcucuaugaugacaguuu

SEQ ID NO: 25523 - RNA, 20 nt, Artificial Sequence
  Guide RNA
cagcuuuaugaugacaguuu

SEQ ID NO: 25524 - RNA, 20 nt, Artificial Sequence
  Guide RNA
cagguucaccagcucuauga

SEQ ID NO: 25525 - RNA, 20 nt, Artificial Sequence
  Guide RNA
cagguucaccagcuuuauga

SEQ ID NO: 25526 - RNA, 20 nt, Artificial Sequence
  Guide RNA
cauaaagcuggugaaccugc

SEQ ID NO: 25527 - RNA, 20 nt, Artificial Sequence
  Guide RNA
cauagagcuggugaaccugc

SEQ ID NO: 25528 - RNA, 20 nt, Artificial Sequence
  Guide RNA
caucauaaagcuggugaacc

SEQ ID NO: 25529 - RNA, 20 nt, Artificial Sequence
  Guide RNA
caucauagagcuggugaacc

SEQ ID NO: 25530 - RNA, 20 nt, Artificial Sequence
  Guide RNA
caugggaaaacugucaucau

SEQ ID NO: 25531 - RNA, 20 nt, Artificial Sequence
  Guide RNA
ccagcucuaugaugacaguu

SEQ ID NO: 25532 - RNA, 20 nt, Artificial Sequence
  Guide RNA
ccagcuuuaugaugacaguu

SEQ ID NO: 25533 - RNA, 20 nt, Artificial Sequence
  Guide RNA
ccaugggaaaacugucauca

SEQ ID NO: 25534 - RNA, 20 nt, Artificial Sequence
  Guide RNA
ccuggagcagguucaccagc

SEQ ID NO: 25535 - RNA, 20 nt, Artificial Sequence
  Guide RNA
cucuaugaugacaguuuucc

SEQ ID NO: 25536 - RNA, 20 nt, Artificial Sequence
  Guide RNA
cuggagcagguucaccagcu

SEQ ID NO: 25537 - RNA, 20 nt, Artificial Sequence
  Guide RNA
cugucaucauaaagcuggug

SEQ ID NO: 25538 - RNA, 20 nt, Artificial Sequence
  Guide RNA
cugucaucauagagcuggug

SEQ ID NO: 25539 - RNA, 20 nt, Artificial Sequence
  Guide RNA
cuuuaugaugacaguuuucc

SEQ ID NO: 25540 - RNA, 20 nt, Artificial Sequence
  Guide RNA
gaaaacugucaucauaaagc

SEQ ID NO: 25541 - RNA, 20 nt, Artificial Sequence
  Guide RNA
gaaaacugucaucauagagc

SEQ ID NO: 25542 - RNA, 20 nt, Artificial Sequence
  Guide RNA
gagcagguucaccagcucua

SEQ ID NO: 25543 - RNA, 20 nt, Artificial Sequence
  Guide RNA
gagcagguucaccagcuuua

SEQ ID NO: 25544 - RNA, 20 nt, Artificial Sequence
  Guide RNA
gcagguucaccagcucuaug

SEQ ID NO: 25545 - RNA, 20 nt, Artificial Sequence
  Guide RNA
gcagguucaccagcuuuaug

SEQ ID NO: 25546 - RNA, 20 nt, Artificial Sequence
  Guide RNA
gcucuaugaugacaguuuuc

SEQ ID NO: 25547 - RNA, 20 nt, Artificial Sequence
  Guide RNA
gcuuuaugaugacaguuuuc

SEQ ID NO: 25548 - RNA, 20 nt, Artificial Sequence
  Guide RNA
ggaaaacugucaucauaaag

SEQ ID NO: 25549 - RNA, 20 nt, Artificial Sequence
  Guide RNA
ggaaaacugucaucauagag

SEQ ID NO: 25550 - RNA, 20 nt, Artificial Sequence
  Guide RNA
ggagcagguucaccagcucu

SEQ ID NO: 25551 - RNA, 20 nt, Artificial Sequence
  Guide RNA
ggagcagguucaccagcuuu

SEQ ID NO: 25552 - RNA, 20 nt, Artificial Sequence
  Guide RNA
gggaaaacugucaucauaaa

SEQ ID NO: 25553 - RNA, 20 nt, Artificial Sequence
  Guide RNA
gggaaaacugucaucauaga

SEQ ID NO: 25554 - RNA, 20 nt, Artificial Sequence
  Guide RNA
gguucaccagcucuaugaug

SEQ ID NO: 25555 - RNA, 20 nt, Artificial Sequence
  Guide RNA
gguucaccagcuuuaugaug

SEQ ID NO: 25556 - RNA, 20 nt, Artificial Sequence
  Guide RNA
gucaucauaaagcuggugaa

SEQ ID NO: 25557 - RNA, 20 nt, Artificial Sequence
  Guide RNA
gucaucauagagcuggugaa

SEQ ID NO: 25558 - RNA, 20 nt, Artificial Sequence
  Guide RNA
guucaccagcucuaugauga

SEQ ID NO: 25559 - RNA, 20 nt, Artificial Sequence
  Guide RNA
guucaccagcuuuaugauga

SEQ ID NO: 25560 - RNA, 20 nt, Artificial Sequence
  Guide RNA
uaaagcuggugaaccugcuc

SEQ ID NO: 25561 - RNA, 20 nt, Artificial Sequence
  Guide RNA
uagagcuggugaaccugcuc

SEQ ID NO: 25562 - RNA, 20 nt, Artificial Sequence
  Guide RNA
ucaccagcucuaugaugaca

SEQ ID NO: 25563 - RNA, 20 nt, Artificial Sequence
  Guide RNA
ucaccagcuuuaugaugaca

SEQ ID NO: 25564 - RNA, 20 nt, Artificial Sequence
  Guide RNA
ucauaaagcuggugaaccug

SEQ ID NO: 25565 - RNA, 20 nt, Artificial Sequence
  Guide RNA
ucauagagcuggugaaccug

SEQ ID NO: 25566 - RNA, 20 nt, Artificial Sequence
  Guide RNA
ucaucauaaagcuggugaac

SEQ ID NO: 25567 - RNA, 20 nt, Artificial Sequence
  Guide RNA
ucaucauagagcuggugaac

SEQ ID NO: 25568 - RNA, 20 nt, Artificial Sequence
  Guide RNA
uccaugggaaaacugucauc

SEQ ID NO: 25569 - RNA, 20 nt, Artificial Sequence
  Guide RNA
uccuggagcagguucaccag

SEQ ID NO: 25570 - RNA, 20 nt, Artificial Sequence
  Guide RNA
ucuaugaugacaguuuuccc

SEQ ID NO: 25571 - RNA, 20 nt, Artificial Sequence
  Guide RNA
uggagcagguucaccagcuc

SEQ ID NO: 25572 - RNA, 20 nt, Artificial Sequence
  Guide RNA
uggagcagguucaccagcuu

SEQ ID NO: 25573 - RNA, 20 nt, Artificial Sequence
  Guide RNA
ugggaaaacugucaucauaa

SEQ ID NO: 25574 - RNA, 20 nt, Artificial Sequence
  Guide RNA
ugggaaaacugucaucauag

SEQ ID NO: 25575 - RNA, 20 nt, Artificial Sequence
  Guide RNA
ugucaucauaaagcugguga

SEQ ID NO: 25576 - RNA, 20 nt, Artificial Sequence
  Guide RNA
ugucaucauagagcugguga

SEQ ID NO: 25577 - RNA, 20 nt, Artificial Sequence
  Guide RNA
uucaccagcucuaugaugac

SEQ ID NO: 25578 - RNA, 20 nt, Artificial Sequence
  Guide RNA
uucaccagcuuuaugaugac

SEQ ID NO: 25579 - RNA, 20 nt, Artificial Sequence
  Guide RNA
uuccuggagcagguucacca

SEQ ID NO: 25580 - RNA, 20 nt, Artificial Sequence
  Guide RNA
uuuaugaugacaguuuuccc

SEQ ID NO: 25581 - RNA, 21 nt, Artificial Sequence
  Guide RNA
aaaacugucaucauaaagcug

SEQ ID NO: 25582 - RNA, 21 nt, Artificial Sequence
  Guide RNA
aaaacugucaucauagagcug

SEQ ID NO: 25583 - RNA, 21 nt, Artificial Sequence
  Guide RNA
aaacugucaucauaaagcugg

SEQ ID NO: 25584 - RNA, 21 nt, Artificial Sequence
  Guide RNA
aaacugucaucauagagcugg

SEQ ID NO: 25585 - RNA, 21 nt, Artificial Sequence
  Guide RNA
aaagcuggugaaccugcucca

SEQ ID NO: 25586 - RNA, 21 nt, Artificial Sequence
  Guide RNA
aacugucaucauaaagcuggu

SEQ ID NO: 25587 - RNA, 21 nt, Artificial Sequence
  Guide RNA
aacugucaucauagagcuggu

SEQ ID NO: 25588 - RNA, 21 nt, Artificial Sequence
  Guide RNA
accagcucuaugaugacaguu

SEQ ID NO: 25589 - RNA, 21 nt, Artificial Sequence
  Guide RNA
accagcuuuaugaugacaguu

SEQ ID NO: 25590 - RNA, 21 nt, Artificial Sequence
  Guide RNA
acugucaucauaaagcuggug

SEQ ID NO: 25591 - RNA, 21 nt, Artificial Sequence
  Guide RNA
acugucaucauagagcuggug

SEQ ID NO: 25592 - RNA, 21 nt, Artificial Sequence
  Guide RNA
agagcuggugaaccugcucca

SEQ ID NO: 25593 - RNA, 21 nt, Artificial Sequence
  Guide RNA
agcagguucaccagcucuaug

SEQ ID NO: 25594 - RNA, 21 nt, Artificial Sequence
  Guide RNA
agcagguucaccagcuuuaug

SEQ ID NO: 25595 - RNA, 21 nt, Artificial Sequence
  Guide RNA
agcucuaugaugacaguuuuc

SEQ ID NO: 25596 - RNA, 21 nt, Artificial Sequence
  Guide RNA
agcuuuaugaugacaguuuuc

SEQ ID NO: 25597 - RNA, 21 nt, Artificial Sequence
  Guide RNA
agguucaccagcucuaugaug

SEQ ID NO: 25598 - RNA, 21 nt, Artificial Sequence
  Guide RNA
agguucaccagcuuuaugaug

SEQ ID NO: 25599 - RNA, 21 nt, Artificial Sequence
  Guide RNA
auaaagcuggugaaccugcuc

SEQ ID NO: 25600 - RNA, 21 nt, Artificial Sequence
  Guide RNA
auagagcuggugaaccugcuc

SEQ ID NO: 25601 - RNA, 21 nt, Artificial Sequence
  Guide RNA
aucauaaagcuggugaaccug

SEQ ID NO: 25602 - RNA, 21 nt, Artificial Sequence
  Guide RNA
aucauagagcuggugaaccug

SEQ ID NO: 25603 - RNA, 21 nt, Artificial Sequence
  Guide RNA
augggaaaacugucaucauaa

SEQ ID NO: 25604 - RNA, 21 nt, Artificial Sequence
  Guide RNA
augggaaaacugucaucauag

SEQ ID NO: 25605 - RNA, 21 nt, Artificial Sequence
  Guide RNA
auuccuggagcagguucacca

SEQ ID NO: 25606 - RNA, 21 nt, Artificial Sequence
  Guide RNA
caccagcucuaugaugacagu

SEQ ID NO: 25607 - RNA, 21 nt, Artificial Sequence
  Guide RNA
caccagcuuuaugaugacagu

SEQ ID NO: 25608 - RNA, 21 nt, Artificial Sequence
  Guide RNA
cagcucuaugaugacaguuuu

SEQ ID NO: 25609 - RNA, 21 nt, Artificial Sequence
  Guide RNA
cagcuuuaugaugacaguuuu

SEQ ID NO: 25610 - RNA, 21 nt, Artificial Sequence
  Guide RNA
cagguucaccagcucuaugau

SEQ ID NO: 25611 - RNA, 21 nt, Artificial Sequence
  Guide RNA
cagguucaccagcuuuaugau

SEQ ID NO: 25612 - RNA, 21 nt, Artificial Sequence
  Guide RNA
cauaaagcuggugaaccugcu

SEQ ID NO: 25613 - RNA, 21 nt, Artificial Sequence
  Guide RNA
cauagagcuggugaaccugcu

SEQ ID NO: 25614 - RNA, 21 nt, Artificial Sequence
  Guide RNA
caucauaaagcuggugaaccu

SEQ ID NO: 25615 - RNA, 21 nt, Artificial Sequence
  Guide RNA
caucauagagcuggugaaccu

SEQ ID NO: 25616 - RNA, 21 nt, Artificial Sequence
  Guide RNA
caugggaaaacugucaucaua

SEQ ID NO: 25617 - RNA, 21 nt, Artificial Sequence
  Guide RNA
ccagcucuaugaugacaguuu

SEQ ID NO: 25618 - RNA, 21 nt, Artificial Sequence
  Guide RNA
ccagcuuuaugaugacaguuu

SEQ ID NO: 25619 - RNA, 21 nt, Artificial Sequence
  Guide RNA
ccaugggaaaacugucaucau

SEQ ID NO: 25620 - RNA, 21 nt, Artificial Sequence
  Guide RNA
ccuggagcagguucaccagcu

SEQ ID NO: 25621 - RNA, 21 nt, Artificial Sequence
  Guide RNA
cucuaugaugacaguuuuccc

SEQ ID NO: 25622 - RNA, 21 nt, Artificial Sequence
  Guide RNA
cuggagcagguucaccagcuc

SEQ ID NO: 25623 - RNA, 21 nt, Artificial Sequence
  Guide RNA
cuggagcagguucaccagcuu

SEQ ID NO: 25624 - RNA, 21 nt, Artificial Sequence
  Guide RNA
cugucaucauaaagcugguga

SEQ ID NO: 25625 - RNA, 21 nt, Artificial Sequence
  Guide RNA
cugucaucauagagcugguga

SEQ ID NO: 25626 - RNA, 21 nt, Artificial Sequence
  Guide RNA
cuuuaugaugacaguuuuccc

SEQ ID NO: 25627 - RNA, 21 nt, Artificial Sequence
  Guide RNA
gaaaacugucaucauaaagcu

SEQ ID NO: 25628 - RNA, 21 nt, Artificial Sequence
  Guide RNA
gaaaacugucaucauagagcu

SEQ ID NO: 25629 - RNA, 21 nt, Artificial Sequence
  Guide RNA
gagcagguucaccagcucuau

SEQ ID NO: 25630 - RNA, 21 nt, Artificial Sequence
  Guide RNA
gagcagguucaccagcuuuau

SEQ ID NO: 25631 - RNA, 21 nt, Artificial Sequence
  Guide RNA
gcagguucaccagcucuauga

SEQ ID NO: 25632 - RNA, 21 nt, Artificial Sequence
  Guide RNA
gcagguucaccagcuuuauga

SEQ ID NO: 25633 - RNA, 21 nt, Artificial Sequence
  Guide RNA
gcucuaugaugacaguuuucc

SEQ ID NO: 25634 - RNA, 21 nt, Artificial Sequence
  Guide RNA
gcuuuaugaugacaguuuucc

SEQ ID NO: 25635 - RNA, 21 nt, Artificial Sequence
  Guide RNA
ggaaaacugucaucauaaagc

SEQ ID NO: 25636 - RNA, 21 nt, Artificial Sequence
  Guide RNA
ggaaaacugucaucauagagc

SEQ ID NO: 25637 - RNA, 21 nt, Artificial Sequence
  Guide RNA
ggagcagguucaccagcucua

SEQ ID NO: 25638 - RNA, 21 nt, Artificial Sequence
  Guide RNA
ggagcagguucaccagcuuua

SEQ ID NO: 25639 - RNA, 21 nt, Artificial Sequence
  Guide RNA
gggaaaacugucaucauaaag

SEQ ID NO: 25640 - RNA, 21 nt, Artificial Sequence
  Guide RNA
gggaaaacugucaucauagag

SEQ ID NO: 25641 - RNA, 21 nt, Artificial Sequence
  Guide RNA
gguucaccagcucuaugauga

SEQ ID NO: 25642 - RNA, 21 nt, Artificial Sequence
  Guide RNA
gguucaccagcuuuaugauga

SEQ ID NO: 25643 - RNA, 21 nt, Artificial Sequence
  Guide RNA
gucaucauaaagcuggugaac

SEQ ID NO: 25644 - RNA, 21 nt, Artificial Sequence
  Guide RNA
gucaucauagagcuggugaac

SEQ ID NO: 25645 - RNA, 21 nt, Artificial Sequence
  Guide RNA
guucaccagcucuaugaugac

SEQ ID NO: 25646 - RNA, 21 nt, Artificial Sequence
  Guide RNA
guucaccagcuuuaugaugac

SEQ ID NO: 25647 - RNA, 21 nt, Artificial Sequence
  Guide RNA
uaaagcuggugaaccugcucc

SEQ ID NO: 25648 - RNA, 21 nt, Artificial Sequence
  Guide RNA
uagagcuggugaaccugcucc

SEQ ID NO: 25649 - RNA, 21 nt, Artificial Sequence
  Guide RNA
ucaccagcucuaugaugacag

SEQ ID NO: 25650 - RNA, 21 nt, Artificial Sequence
  Guide RNA
ucaccagcuuuaugaugacag

SEQ ID NO: 25651 - RNA, 21 nt, Artificial Sequence
  Guide RNA
ucauaaagcuggugaaccugc

SEQ ID NO: 25652 - RNA, 21 nt, Artificial Sequence
  Guide RNA
ucauagagcuggugaaccugc

SEQ ID NO: 25653 - RNA, 21 nt, Artificial Sequence
  Guide RNA
ucaucauaaagcuggugaacc

SEQ ID NO: 25654 - RNA, 21 nt, Artificial Sequence
  Guide RNA
ucaucauagagcuggugaacc

SEQ ID NO: 25655 - RNA, 21 nt, Artificial Sequence
  Guide RNA
uccaugggaaaacugucauca

SEQ ID NO: 25656 - RNA, 21 nt, Artificial Sequence
  Guide RNA
uccuggagcagguucaccagc

SEQ ID NO: 25657 - RNA, 21 nt, Artificial Sequence
  Guide RNA
ucuaugaugacaguuuuccca

SEQ ID NO: 25658 - RNA, 21 nt, Artificial Sequence
  Guide RNA
uggagcagguucaccagcucu

SEQ ID NO: 25659 - RNA, 21 nt, Artificial Sequence
  Guide RNA
uggagcagguucaccagcuuu

SEQ ID NO: 25660 - RNA, 21 nt, Artificial Sequence
  Guide RNA
ugggaaaacugucaucauaaa

SEQ ID NO: 25661 - RNA, 21 nt, Artificial Sequence
  Guide RNA
ugggaaaacugucaucauaga

SEQ ID NO: 25662 - RNA, 21 nt, Artificial Sequence
  Guide RNA
ugucaucauaaagcuggugaa

SEQ ID NO: 25663 - RNA, 21 nt, Artificial Sequence
  Guide RNA
ugucaucauagagcuggugaa

SEQ ID NO: 25664 - RNA, 21 nt, Artificial Sequence
  Guide RNA
uucaccagcucuaugaugaca

SEQ ID NO: 25665 - RNA, 21 nt, Artificial Sequence
  Guide RNA
uucaccagcuuuaugaugaca

SEQ ID NO: 25666 - RNA, 21 nt, Artificial Sequence
  Guide RNA
uuccaugggaaaacugucauc

SEQ ID NO: 25667 - RNA, 21 nt, Artificial Sequence
  Guide RNA
uuccuggagcagguucaccag

SEQ ID NO: 25668 - RNA, 21 nt, Artificial Sequence
  Guide RNA
uuuaugaugacaguuuuccca

SEQ ID NO: 25669 - RNA, 22 nt, Artificial Sequence
  Guide RNA
aaaacugucaucauaaagcugg

SEQ ID NO: 25670 - RNA, 22 nt, Artificial Sequence
  Guide RNA
aaaacugucaucauagagcugg

SEQ ID NO: 25671 - RNA, 22 nt, Artificial Sequence
  Guide RNA
aaacugucaucauaaagcuggu

SEQ ID NO: 25672 - RNA, 22 nt, Artificial Sequence
  Guide RNA
aaacugucaucauagagcuggu

SEQ ID NO: 25673 - RNA, 22 nt, Artificial Sequence
  Guide RNA
aaagcuggugaaccugcuccag

SEQ ID NO: 25674 - RNA, 22 nt, Artificial Sequence
  Guide RNA
aacugucaucauaaagcuggug

SEQ ID NO: 25675 - RNA, 22 nt, Artificial Sequence
  Guide RNA
aacugucaucauagagcuggug

SEQ ID NO: 25676 - RNA, 22 nt, Artificial Sequence
  Guide RNA
aauuccuggagcagguucacca

SEQ ID NO: 25677 - RNA, 22 nt, Artificial Sequence
  Guide RNA
accagcucuaugaugacaguuu

SEQ ID NO: 25678 - RNA, 22 nt, Artificial Sequence
  Guide RNA
accagcuuuaugaugacaguuu

SEQ ID NO: 25679 - RNA, 22 nt, Artificial Sequence
  Guide RNA
acugucaucauaaagcugguga

SEQ ID NO: 25680 - RNA, 22 nt, Artificial Sequence
  Guide RNA
acugucaucauagagcugguga

SEQ ID NO: 25681 - RNA, 22 nt, Artificial Sequence
  Guide RNA
agagcuggugaaccugcuccag

SEQ ID NO: 25682 - RNA, 22 nt, Artificial Sequence
  Guide RNA
agcagguucaccagcucuauga

SEQ ID NO: 25683 - RNA, 22 nt, Artificial Sequence
  Guide RNA
agcagguucaccagcuuuauga

SEQ ID NO: 25684 - RNA, 22 nt, Artificial Sequence
  Guide RNA
agcucuaugaugacaguuuucc

SEQ ID NO: 25685 - RNA, 22 nt, Artificial Sequence
  Guide RNA
agcuuuaugaugacaguuuucc

SEQ ID NO: 25686 - RNA, 22 nt, Artificial Sequence
  Guide RNA
agguucaccagcucuaugauga

SEQ ID NO: 25687 - RNA, 22 nt, Artificial Sequence
  Guide RNA
agguucaccagcuuuaugauga

SEQ ID NO: 25688 - RNA, 22 nt, Artificial Sequence
  Guide RNA
auaaagcuggugaaccugcucc

SEQ ID NO: 25689 - RNA, 22 nt, Artificial Sequence
  Guide RNA
auagagcuggugaaccugcucc

SEQ ID NO: 25690 - RNA, 22 nt, Artificial Sequence
  Guide RNA
aucauaaagcuggugaaccugc

SEQ ID NO: 25691 - RNA, 22 nt, Artificial Sequence
  Guide RNA
aucauagagcuggugaaccugc

SEQ ID NO: 25692 - RNA, 22 nt, Artificial Sequence
  Guide RNA
augggaaaacugucaucauaaa

SEQ ID NO: 25693 - RNA, 22 nt, Artificial Sequence
  Guide RNA
augggaaaacugucaucauaga

SEQ ID NO: 25694 - RNA, 22 nt, Artificial Sequence
  Guide RNA
auuccuggagcagguucaccag

SEQ ID NO: 25695 - RNA, 22 nt, Artificial Sequence
  Guide RNA
caccagcucuaugaugacaguu

SEQ ID NO: 25696 - RNA, 22 nt, Artificial Sequence
  Guide RNA
caccagcuuuaugaugacaguu

SEQ ID NO: 25697 - RNA, 22 nt, Artificial Sequence
  Guide RNA
cagcucuaugaugacaguuuuc

SEQ ID NO: 25698 - RNA, 22 nt, Artificial Sequence
  Guide RNA
cagcuuuaugaugacaguuuuc

SEQ ID NO: 25699 - RNA, 22 nt, Artificial Sequence
  Guide RNA
cagguucaccagcucuaugaug

SEQ ID NO: 25700 - RNA, 22 nt, Artificial Sequence
  Guide RNA
cagguucaccagcuuuaugaug

SEQ ID NO: 25701 - RNA, 22 nt, Artificial Sequence
  Guide RNA
cauaaagcuggugaaccugcuc

SEQ ID NO: 25702 - RNA, 22 nt, Artificial Sequence
  Guide RNA
cauagagcuggugaaccugcuc

SEQ ID NO: 25703 - RNA, 22 nt, Artificial Sequence
  Guide RNA
caucauaaagcuggugaaccug

SEQ ID NO: 25704 - RNA, 22 nt, Artificial Sequence
  Guide RNA
caucauagagcuggugaaccug

SEQ ID NO: 25705 - RNA, 22 nt, Artificial Sequence
  Guide RNA
caugggaaaacugucaucauaa

SEQ ID NO: 25706 - RNA, 22 nt, Artificial Sequence
  Guide RNA
caugggaaaacugucaucauag

SEQ ID NO: 25707 - RNA, 22 nt, Artificial Sequence
  Guide RNA
ccagcucuaugaugacaguuuu

SEQ ID NO: 25708 - RNA, 22 nt, Artificial Sequence
  Guide RNA
ccagcuuuaugaugacaguuuu

SEQ ID NO: 25709 - RNA, 22 nt, Artificial Sequence
  Guide RNA
ccaugggaaaacugucaucaua

SEQ ID NO: 25710 - RNA, 22 nt, Artificial Sequence
  Guide RNA
ccuggagcagguucaccagcuc

SEQ ID NO: 25711 - RNA, 22 nt, Artificial Sequence
  Guide RNA
ccuggagcagguucaccagcuu

SEQ ID NO: 25712 - RNA, 22 nt, Artificial Sequence
  Guide RNA
cucuaugaugacaguuuuccca

SEQ ID NO: 25713 - RNA, 22 nt, Artificial Sequence
  Guide RNA
cuggagcagguucaccagcucu

SEQ ID NO: 25714 - RNA, 22 nt, Artificial Sequence
  Guide RNA
cuggagcagguucaccagcuuu

SEQ ID NO: 25715 - RNA, 22 nt, Artificial Sequence
  Guide RNA
cugucaucauaaagcuggugaa

SEQ ID NO: 25716 - RNA, 22 nt, Artificial Sequence
  Guide RNA
cugucaucauagagcuggugaa

SEQ ID NO: 25717 - RNA, 22 nt, Artificial Sequence
  Guide RNA
cuuuaugaugacaguuuuccca

SEQ ID NO: 25718 - RNA, 22 nt, Artificial Sequence
  Guide RNA
gaaaacugucaucauaaagcug

SEQ ID NO: 25719 - RNA, 22 nt, Artificial Sequence
  Guide RNA
gaaaacugucaucauagagcug

SEQ ID NO: 25720 - RNA, 22 nt, Artificial Sequence
  Guide RNA
gagcagguucaccagcucuaug

SEQ ID NO: 25721 - RNA, 22 nt, Artificial Sequence
  Guide RNA
gagcagguucaccagcuuuaug

SEQ ID NO: 25722 - RNA, 22 nt, Artificial Sequence
  Guide RNA
gcagguucaccagcucuaugau

SEQ ID NO: 25723 - RNA, 22 nt, Artificial Sequence
  Guide RNA
gcagguucaccagcuuuaugau

SEQ ID NO: 25724 - RNA, 22 nt, Artificial Sequence
  Guide RNA
gcucuaugaugacaguuuuccc

SEQ ID NO: 25725 - RNA, 22 nt, Artificial Sequence
  Guide RNA
gcuuuaugaugacaguuuuccc

SEQ ID NO: 25726 - RNA, 22 nt, Artificial Sequence
  Guide RNA
ggaaaacugucaucauaaagcu

SEQ ID NO: 25727 - RNA, 22 nt, Artificial Sequence
  Guide RNA
ggaaaacugucaucauagagcu

SEQ ID NO: 25728 - RNA, 22 nt, Artificial Sequence
  Guide RNA
ggagcagguucaccagcucuau

SEQ ID NO: 25729 - RNA, 22 nt, Artificial Sequence
  Guide RNA
ggagcagguucaccagcuuuau

SEQ ID NO: 25730 - RNA, 22 nt, Artificial Sequence
  Guide RNA
gggaaaacugucaucauaaagc

SEQ ID NO: 25731 - RNA, 22 nt, Artificial Sequence
  Guide RNA
gggaaaacugucaucauagagc

SEQ ID NO: 25732 - RNA, 22 nt, Artificial Sequence
  Guide RNA
gguucaccagcucuaugaugac

SEQ ID NO: 25733 - RNA, 22 nt, Artificial Sequence
  Guide RNA
gguucaccagcuuuaugaugac

SEQ ID NO: 25734 - RNA, 22 nt, Artificial Sequence
  Guide RNA
gucaucauaaagcuggugaacc

SEQ ID NO: 25735 - RNA, 22 nt, Artificial Sequence
  Guide RNA
gucaucauagagcuggugaacc

SEQ ID NO: 25736 - RNA, 22 nt, Artificial Sequence
  Guide RNA
guucaccagcucuaugaugaca

SEQ ID NO: 25737 - RNA, 22 nt, Artificial Sequence
  Guide RNA
guucaccagcuuuaugaugaca

SEQ ID NO: 25738 - RNA, 22 nt, Artificial Sequence
  Guide RNA
uaaagcuggugaaccugcucca

SEQ ID NO: 25739 - RNA, 22 nt, Artificial Sequence
  Guide RNA
uagagcuggugaaccugcucca

SEQ ID NO: 25740 - RNA, 22 nt, Artificial Sequence
  Guide RNA
ucaccagcucuaugaugacagu

SEQ ID NO: 25741 - RNA, 22 nt, Artificial Sequence
  Guide RNA
ucaccagcuuuaugaugacagu

SEQ ID NO: 25742 - RNA, 22 nt, Artificial Sequence
  Guide RNA
ucauaaagcuggugaaccugcu

SEQ ID NO: 25743 - RNA, 22 nt, Artificial Sequence
  Guide RNA
ucauagagcuggugaaccugcu

SEQ ID NO: 25744 - RNA, 22 nt, Artificial Sequence
  Guide RNA
ucaucauaaagcuggugaaccu

SEQ ID NO: 25745 - RNA, 22 nt, Artificial Sequence
  Guide RNA
ucaucauagagcuggugaaccu

SEQ ID NO: 25746 - RNA, 22 nt, Artificial Sequence
  Guide RNA
uccaugggaaaacugucaucau

SEQ ID NO: 25747 - RNA, 22 nt, Artificial Sequence
  Guide RNA
uccuggagcagguucaccagcu

SEQ ID NO: 25748 - RNA, 22 nt, Artificial Sequence
  Guide RNA
ucuaugaugacaguuuucccau

SEQ ID NO: 25749 - RNA, 22 nt, Artificial Sequence
  Guide RNA
uggagcagguucaccagcucua

SEQ ID NO: 25750 - RNA, 22 nt, Artificial Sequence
  Guide RNA
uggagcagguucaccagcuuua

SEQ ID NO: 25751 - RNA, 22 nt, Artificial Sequence
  Guide RNA
ugggaaaacugucaucauaaag

SEQ ID NO: 25752 - RNA, 22 nt, Artificial Sequence
  Guide RNA
ugggaaaacugucaucauagag

SEQ ID NO: 25753 - RNA, 22 nt, Artificial Sequence
  Guide RNA
ugucaucauaaagcuggugaac

SEQ ID NO: 25754 - RNA, 22 nt, Artificial Sequence
  Guide RNA
ugucaucauagagcuggugaac

SEQ ID NO: 25755 - RNA, 22 nt, Artificial Sequence
  Guide RNA
uucaccagcucuaugaugacag

SEQ ID NO: 25756 - RNA, 22 nt, Artificial Sequence
  Guide RNA
uucaccagcuuuaugaugacag

SEQ ID NO: 25757 - RNA, 22 nt, Artificial Sequence
  Guide RNA
uuccaugggaaaacugucauca

SEQ ID NO: 25758 - RNA, 22 nt, Artificial Sequence
  Guide RNA
uuccuggagcagguucaccagc

SEQ ID NO: 25759 - RNA, 22 nt, Artificial Sequence
  Guide RNA
uuuaugaugacaguuuucccau

SEQ ID NO: 25760 - RNA, 22 nt, Artificial Sequence
  Guide RNA
uuuccaugggaaaacugucauc

SEQ ID NO: 25761 - RNA, 20 nt, Artificial Sequence
  Guide RNA
aaagcaaugaugaauaucuc

SEQ ID NO: 25762 - RNA, 20 nt, Artificial Sequence
  Guide RNA
aagcaaugaugaauaucucu

SEQ ID NO: 25763 - RNA, 20 nt, Artificial Sequence
  Guide RNA
acuucuuggggcuauaaaau

SEQ ID NO: 25764 - RNA, 20 nt, Artificial Sequence
  Guide RNA
agcaaugaugaauaucucua

SEQ ID NO: 25765 - RNA, 20 nt, Artificial Sequence
  Guide RNA
agcaaugaugaauaucucuc

SEQ ID NO: 25766 - RNA, 20 nt, Artificial Sequence
  Guide RNA
aucucuaauuuuauagcccc

SEQ ID NO: 25767 - RNA, 20 nt, Artificial Sequence
  Guide RNA
aucucucuaauuuuauagcc

SEQ ID NO: 25768 - RNA, 20 nt, Artificial Sequence
  Guide RNA
caaagcaaugaugaauaucu

SEQ ID NO: 25769 - RNA, 20 nt, Artificial Sequence
  Guide RNA
caaugaugaauaucucucua

SEQ ID NO: 25770 - RNA, 20 nt, Artificial Sequence
  Guide RNA
cacuucuuggggcuauaaaa

SEQ ID NO: 25771 - RNA, 20 nt, Artificial Sequence
  Guide RNA
ccacuucuuggggcuauaaa

SEQ ID NO: 25772 - RNA, 20 nt, Artificial Sequence
  Guide RNA
cccacuucuuggggcuauaa

SEQ ID NO: 25773 - RNA, 20 nt, Artificial Sequence
  Guide RNA
cuaauuuuauagccccaaga

SEQ ID NO: 25774 - RNA, 20 nt, Artificial Sequence
  Guide RNA
cucuaauuuuauagccccaa

SEQ ID NO: 25775 - RNA, 20 nt, Artificial Sequence
  Guide RNA
cucucuaauuuuauagcccc

SEQ ID NO: 25776 - RNA, 20 nt, Artificial Sequence
  Guide RNA
cuucuuggggcuauaaaauu

SEQ ID NO: 25777 - RNA, 20 nt, Artificial Sequence
  Guide RNA
cuuggggcuauaaaauuaga

SEQ ID NO: 25778 - RNA, 20 nt, Artificial Sequence
  Guide RNA
gcaaugaugaauaucucuaa

SEQ ID NO: 25779 - RNA, 20 nt, Artificial Sequence
  Guide RNA
gcaaugaugaauaucucucu

SEQ ID NO: 25780 - RNA, 20 nt, Artificial Sequence
  Guide RNA
ggcuauaaaauuagagagau

SEQ ID NO: 25781 - RNA, 20 nt, Artificial Sequence
  Guide RNA
gggcuauaaaauuagagaga

SEQ ID NO: 25782 - RNA, 20 nt, Artificial Sequence
  Guide RNA
gggcuauaaaauuagagaua

SEQ ID NO: 25783 - RNA, 20 nt, Artificial Sequence
  Guide RNA
ggggcuauaaaauuagagag

SEQ ID NO: 25784 - RNA, 20 nt, Artificial Sequence
  Guide RNA
ggggcuauaaaauuagagau

SEQ ID NO: 25785 - RNA, 20 nt, Artificial Sequence
  Guide RNA
uaauuuuauagccccaagaa

SEQ ID NO: 25786 - RNA, 20 nt, Artificial Sequence
  Guide RNA
uaucucuaauuuuauagccc

SEQ ID NO: 25787 - RNA, 20 nt, Artificial Sequence
  Guide RNA
ucaaagcaaugaugaauauc

SEQ ID NO: 25788 - RNA, 20 nt, Artificial Sequence
  Guide RNA
ucuaauuuuauagccccaag

SEQ ID NO: 25789 - RNA, 20 nt, Artificial Sequence
  Guide RNA
ucucuaauuuuauagcccca

SEQ ID NO: 25790 - RNA, 20 nt, Artificial Sequence
  Guide RNA
ucucucuaauuuuauagccc

SEQ ID NO: 25791 - RNA, 20 nt, Artificial Sequence
  Guide RNA
ucuuggggcuauaaaauuag

SEQ ID NO: 25792 - RNA, 20 nt, Artificial Sequence
  Guide RNA
uggggcuauaaaauuagaga

SEQ ID NO: 25793 - RNA, 20 nt, Artificial Sequence
  Guide RNA
uuagagauauucaucauugc

SEQ ID NO: 25794 - RNA, 20 nt, Artificial Sequence
  Guide RNA
uucuuggggcuauaaaauua

SEQ ID NO: 25795 - RNA, 20 nt, Artificial Sequence
  Guide RNA
uuggggcuauaaaauuagag

SEQ ID NO: 25796 - RNA, 21 nt, Artificial Sequence
  Guide RNA
aagcaaugaugaauaucucuc

SEQ ID NO: 25797 - RNA, 21 nt, Artificial Sequence
  Guide RNA
acuucuuggggcuauaaaauu

SEQ ID NO: 25798 - RNA, 21 nt, Artificial Sequence
  Guide RNA
agcaaugaugaauaucucucu

SEQ ID NO: 25799 - RNA, 21 nt, Artificial Sequence
  Guide RNA
aucucuaauuuuauagcccca

SEQ ID NO: 25800 - RNA, 21 nt, Artificial Sequence
  Guide RNA
aucucucuaauuuuauagccc

SEQ ID NO: 25801 - RNA, 21 nt, Artificial Sequence
  Guide RNA
caaagcaaugaugaauaucuc

SEQ ID NO: 25802 - RNA, 21 nt, Artificial Sequence
  Guide RNA
cacuucuuggggcuauaaaau

SEQ ID NO: 25803 - RNA, 21 nt, Artificial Sequence
  Guide RNA
ccacuucuuggggcuauaaaa

SEQ ID NO: 25804 - RNA, 21 nt, Artificial Sequence
  Guide RNA
cccacuucuuggggcuauaaa

SEQ ID NO: 25805 - RNA, 21 nt, Artificial Sequence
  Guide RNA
cuaauuuuauagccccaagaa

SEQ ID NO: 25806 - RNA, 21 nt, Artificial Sequence
  Guide RNA
cucuaauuuuauagccccaag

SEQ ID NO: 25807 - RNA, 21 nt, Artificial Sequence
  Guide RNA
cucucuaauuuuauagcccca

SEQ ID NO: 25808 - RNA, 21 nt, Artificial Sequence
  Guide RNA
cuucuuggggcuauaaaauua

SEQ ID NO: 25809 - RNA, 21 nt, Artificial Sequence
  Guide RNA
cuuggggcuauaaaauuagag

SEQ ID NO: 25810 - RNA, 21 nt, Artificial Sequence
  Guide RNA
gcaaugaugaauaucucucua

SEQ ID NO: 25811 - RNA, 21 nt, Artificial Sequence
  Guide RNA
gggcuauaaaauuagagagau

SEQ ID NO: 25812 - RNA, 21 nt, Artificial Sequence
  Guide RNA
ggggcuauaaaauuagagaga

SEQ ID NO: 25813 - RNA, 21 nt, Artificial Sequence
  Guide RNA
ggggcuauaaaauuagagaua

SEQ ID NO: 25814 - RNA, 21 nt, Artificial Sequence
  Guide RNA
gucaaagcaaugaugaauauc

SEQ ID NO: 25815 - RNA, 21 nt, Artificial Sequence
  Guide RNA
uaauuuuauagccccaagaag

SEQ ID NO: 25816 - RNA, 21 nt, Artificial Sequence
  Guide RNA
uaucucuaauuuuauagcccc

SEQ ID NO: 25817 - RNA, 21 nt, Artificial Sequence
  Guide RNA
ucccacuucuuggggcuauaa

SEQ ID NO: 25818 - RNA, 21 nt, Artificial Sequence
  Guide RNA
ucuaauuuuauagccccaaga

SEQ ID NO: 25819 - RNA, 21 nt, Artificial Sequence
  Guide RNA
ucucuaauuuuauagccccaa

SEQ ID NO: 25820 - RNA, 21 nt, Artificial Sequence
  Guide RNA
ucucucuaauuuuauagcccc

SEQ ID NO: 25821 - RNA, 21 nt, Artificial Sequence
  Guide RNA
ucuuggggcuauaaaauuaga

SEQ ID NO: 25822 - RNA, 21 nt, Artificial Sequence
  Guide RNA
uggggcuauaaaauuagagag

SEQ ID NO: 25823 - RNA, 21 nt, Artificial Sequence
  Guide RNA
uggggcuauaaaauuagagau

SEQ ID NO: 25824 - RNA, 21 nt, Artificial Sequence
  Guide RNA
uucuuggggcuauaaaauuag

SEQ ID NO: 25825 - RNA, 21 nt, Artificial Sequence
  Guide RNA
uuggggcuauaaaauuagaga

SEQ ID NO: 25826 - RNA, 22 nt, Artificial Sequence
  Guide RNA
aaagcaaugaugaauaucucuc

SEQ ID NO: 25827 - RNA, 22 nt, Artificial Sequence
  Guide RNA
aagcaaugaugaauaucucucu

SEQ ID NO: 25828 - RNA, 22 nt, Artificial Sequence
  Guide RNA
acuucuuggggcuauaaaauua

SEQ ID NO: 25829 - RNA, 22 nt, Artificial Sequence
  Guide RNA
agcaaugaugaauaucucucua

SEQ ID NO: 25830 - RNA, 22 nt, Artificial Sequence
  Guide RNA
auaucucuaauuuuauagcccc

SEQ ID NO: 25831 - RNA, 22 nt, Artificial Sequence
  Guide RNA
aucucuaauuuuauagccccaa

SEQ ID NO: 25832 - RNA, 22 nt, Artificial Sequence
  Guide RNA
aucucucuaauuuuauagcccc

SEQ ID NO: 25833 - RNA, 22 nt, Artificial Sequence
  Guide RNA
caaagcaaugaugaauaucucu

SEQ ID NO: 25834 - RNA, 22 nt, Artificial Sequence
  Guide RNA
cacuucuuggggcuauaaaauu

SEQ ID NO: 25835 - RNA, 22 nt, Artificial Sequence
  Guide RNA
ccacuucuuggggcuauaaaau

SEQ ID NO: 25836 - RNA, 22 nt, Artificial Sequence
  Guide RNA
cccacuucuuggggcuauaaaa

SEQ ID NO: 25837 - RNA, 22 nt, Artificial Sequence
  Guide RNA
cuaauuuuauagccccaagaag

SEQ ID NO: 25838 - RNA, 22 nt, Artificial Sequence
  Guide RNA
cucccacuucuuggggcuauaa

SEQ ID NO: 25839 - RNA, 22 nt, Artificial Sequence
  Guide RNA
cucuaauuuuauagccccaaga

SEQ ID NO: 25840 - RNA, 22 nt, Artificial Sequence
  Guide RNA
cucucuaauuuuauagccccaa

SEQ ID NO: 25841 - RNA, 22 nt, Artificial Sequence
  Guide RNA
cuucuuggggcuauaaaauuag

SEQ ID NO: 25842 - RNA, 22 nt, Artificial Sequence
  Guide RNA
cuuggggcuauaaaauuagaga

SEQ ID NO: 25843 - RNA, 22 nt, Artificial Sequence
  Guide RNA
gcaaugaugaauaucucucuaa

SEQ ID NO: 25844 - RNA, 22 nt, Artificial Sequence
  Guide RNA
gggcuauaaaauuagagagaua

SEQ ID NO: 25845 - RNA, 22 nt, Artificial Sequence
  Guide RNA
ggggcuauaaaauuagagagau

SEQ ID NO: 25846 - RNA, 22 nt, Artificial Sequence
  Guide RNA
ggggcuauaaaauuagagauau

SEQ ID NO: 25847 - RNA, 22 nt, Artificial Sequence
  Guide RNA
gucaaagcaaugaugaauaucu

SEQ ID NO: 25848 - RNA, 22 nt, Artificial Sequence
  Guide RNA
uaauuuuauagccccaagaagu

SEQ ID NO: 25849 - RNA, 22 nt, Artificial Sequence
  Guide RNA
uaucucuaauuuuauagcccca

SEQ ID NO: 25850 - RNA, 22 nt, Artificial Sequence
  Guide RNA
uaucucucuaauuuuauagccc

SEQ ID NO: 25851 - RNA, 22 nt, Artificial Sequence
  Guide RNA
ucaaagcaaugaugaauaucuc

SEQ ID NO: 25852 - RNA, 22 nt, Artificial Sequence
  Guide RNA
ucccacuucuuggggcuauaaa

SEQ ID NO: 25853 - RNA, 22 nt, Artificial Sequence
  Guide RNA
ucuaauuuuauagccccaagaa

SEQ ID NO: 25854 - RNA, 22 nt, Artificial Sequence
  Guide RNA
ucucuaauuuuauagccccaag

SEQ ID NO: 25855 - RNA, 22 nt, Artificial Sequence
  Guide RNA
ucucucuaauuuuauagcccca

SEQ ID NO: 25856 - RNA, 22 nt, Artificial Sequence
  Guide RNA
ucuuggggcuauaaaauuagag

SEQ ID NO: 25857 - RNA, 22 nt, Artificial Sequence
  Guide RNA
uggggcuauaaaauuagagaga

SEQ ID NO: 25858 - RNA, 22 nt, Artificial Sequence
  Guide RNA
uggggcuauaaaauuagagaua

SEQ ID NO: 25859 - RNA, 22 nt, Artificial Sequence
  Guide RNA
ugucaaagcaaugaugaauauc

SEQ ID NO: 25860 - RNA, 22 nt, Artificial Sequence
  Guide RNA
uuagagagauauucaucauugc

SEQ ID NO: 25861 - RNA, 22 nt, Artificial Sequence
  Guide RNA
uucuuggggcuauaaaauuaga

SEQ ID NO: 25862 - RNA, 22 nt, Artificial Sequence
  Guide RNA
uuggggcuauaaaauuagagag

SEQ ID NO: 25863 - RNA, 22 nt, Artificial Sequence
  Guide RNA
uuggggcuauaaaauuagagau

SEQ ID NO: 25864 - RNA, 20 nt, Artificial Sequence
  Guide RNA
aacugcccucaaguggacgu

SEQ ID NO: 25865 - RNA, 20 nt, Artificial Sequence
  Guide RNA
accugcccucaaguggacgu

SEQ ID NO: 25866 - RNA, 20 nt, Artificial Sequence
  Guide RNA
acguccacuugagggcaggu

SEQ ID NO: 25867 - RNA, 20 nt, Artificial Sequence
  Guide RNA
acguccacuugagggcaguu

SEQ ID NO: 25868 - RNA, 20 nt, Artificial Sequence
  Guide RNA
acuccagguccaacugcccu

SEQ ID NO: 25869 - RNA, 20 nt, Artificial Sequence
  Guide RNA
acuccagguccaccugcccu

SEQ ID NO: 25870 - RNA, 20 nt, Artificial Sequence
  Guide RNA
acuugagggcagguggaccu

SEQ ID NO: 25871 - RNA, 20 nt, Artificial Sequence
  Guide RNA
acuugagggcaguuggaccu

SEQ ID NO: 25872 - RNA, 20 nt, Artificial Sequence
  Guide RNA
agggcagguggaccuggagu

SEQ ID NO: 25873 - RNA, 20 nt, Artificial Sequence
  Guide RNA
agggcaguuggaccuggagu

SEQ ID NO: 25874 - RNA, 20 nt, Artificial Sequence
  Guide RNA
agguccaacugcccucaagu

SEQ ID NO: 25875 - RNA, 20 nt, Artificial Sequence
  Guide RNA
agguccaccugcccucaagu

SEQ ID NO: 25876 - RNA, 20 nt, Artificial Sequence
  Guide RNA
agguggaccuggagucacug

SEQ ID NO: 25877 - RNA, 20 nt, Artificial Sequence
  Guide RNA
agugacuccagguccaacug

SEQ ID NO: 25878 - RNA, 20 nt, Artificial Sequence
  Guide RNA
agugacuccagguccaccug

SEQ ID NO: 25879 - RNA, 20 nt, Artificial Sequence
  Guide RNA
aguuggaccuggagucacug

SEQ ID NO: 25880 - RNA, 20 nt, Artificial Sequence
  Guide RNA
auugacguccacuugagggc

SEQ ID NO: 25881 - RNA, 20 nt, Artificial Sequence
  Guide RNA
caacugcccucaaguggacg

SEQ ID NO: 25882 - RNA, 20 nt, Artificial Sequence
  Guide RNA
caccugcccucaaguggacg

SEQ ID NO: 25883 - RNA, 20 nt, Artificial Sequence
  Guide RNA
cacuugagggcagguggacc

SEQ ID NO: 25884 - RNA, 20 nt, Artificial Sequence
  Guide RNA
cacuugagggcaguuggacc

SEQ ID NO: 25885 - RNA, 20 nt, Artificial Sequence
  Guide RNA
cagguccaacugcccucaag

SEQ ID NO: 25886 - RNA, 20 nt, Artificial Sequence
  Guide RNA
cagguccaccugcccucaag

SEQ ID NO: 25887 - RNA, 20 nt, Artificial Sequence
  Guide RNA
cagguggaccuggagucacu

SEQ ID NO: 25888 - RNA, 20 nt, Artificial Sequence
  Guide RNA
cagugacuccagguccaacu

SEQ ID NO: 25889 - RNA, 20 nt, Artificial Sequence
  Guide RNA
cagugacuccagguccaccu

SEQ ID NO: 25890 - RNA, 20 nt, Artificial Sequence
  Guide RNA
caguuggaccuggagucacu

SEQ ID NO: 25891 - RNA, 20 nt, Artificial Sequence
  Guide RNA
ccaacugcccucaaguggac

SEQ ID NO: 25892 - RNA, 20 nt, Artificial Sequence
  Guide RNA
ccaccugcccucaaguggac

SEQ ID NO: 25893 - RNA, 20 nt, Artificial Sequence
  Guide RNA
ccacuugagggcagguggac

SEQ ID NO: 25894 - RNA, 20 nt, Artificial Sequence
  Guide RNA
ccacuugagggcaguuggac

SEQ ID NO: 25895 - RNA, 20 nt, Artificial Sequence
  Guide RNA
ccagguccaacugcccucaa

SEQ ID NO: 25896 - RNA, 20 nt, Artificial Sequence
  Guide RNA
ccagguccaccugcccucaa

SEQ ID NO: 25897 - RNA, 20 nt, Artificial Sequence
  Guide RNA
ccagugacuccagguccaac

SEQ ID NO: 25898 - RNA, 20 nt, Artificial Sequence
  Guide RNA
ccagugacuccagguccacc

SEQ ID NO: 25899 - RNA, 20 nt, Artificial Sequence
  Guide RNA
cccagugacuccagguccaa

SEQ ID NO: 25900 - RNA, 20 nt, Artificial Sequence
  Guide RNA
cccagugacuccagguccac

SEQ ID NO: 25901 - RNA, 20 nt, Artificial Sequence
  Guide RNA
cguccacuugagggcaggug

SEQ ID NO: 25902 - RNA, 20 nt, Artificial Sequence
  Guide RNA
cguccacuugagggcaguug

SEQ ID NO: 25903 - RNA, 20 nt, Artificial Sequence
  Guide RNA
cuccagguccaacugcccuc

SEQ ID NO: 25904 - RNA, 20 nt, Artificial Sequence
  Guide RNA
cuccagguccaccugcccuc

SEQ ID NO: 25905 - RNA, 20 nt, Artificial Sequence
  Guide RNA
cuugagggcagguggaccug

SEQ ID NO: 25906 - RNA, 20 nt, Artificial Sequence
  Guide RNA
cuugagggcaguuggaccug

SEQ ID NO: 25907 - RNA, 20 nt, Artificial Sequence
  Guide RNA
gacguccacuugagggcagg

SEQ ID NO: 25908 - RNA, 20 nt, Artificial Sequence
  Guide RNA
gacguccacuugagggcagu

SEQ ID NO: 25909 - RNA, 20 nt, Artificial Sequence
  Guide RNA
gacuccagguccaacugccc

SEQ ID NO: 25910 - RNA, 20 nt, Artificial Sequence
  Guide RNA
gacuccagguccaccugccc

SEQ ID NO: 25911 - RNA, 20 nt, Artificial Sequence
  Guide RNA
gagggcagguggaccuggag

SEQ ID NO: 25912 - RNA, 20 nt, Artificial Sequence
  Guide RNA
gagggcaguuggaccuggag

SEQ ID NO: 25913 - RNA, 20 nt, Artificial Sequence
  Guide RNA
gauugacguccacuugaggg

SEQ ID NO: 25914 - RNA, 20 nt, Artificial Sequence
  Guide RNA
gcagguggaccuggagucac

SEQ ID NO: 25915 - RNA, 20 nt, Artificial Sequence
  Guide RNA
gcaguuggaccuggagucac

SEQ ID NO: 25916 - RNA, 20 nt, Artificial Sequence
  Guide RNA
gcccagugacuccaggucca

SEQ ID NO: 25917 - RNA, 20 nt, Artificial Sequence
  Guide RNA
ggcagguggaccuggaguca

SEQ ID NO: 25918 - RNA, 20 nt, Artificial Sequence
  Guide RNA
ggcaguuggaccuggaguca

SEQ ID NO: 25919 - RNA, 20 nt, Artificial Sequence
  Guide RNA
ggcccagugacuccaggucc

SEQ ID NO: 25920 - RNA, 20 nt, Artificial Sequence
  Guide RNA
gggcagguggaccuggaguc

SEQ ID NO: 25921 - RNA, 20 nt, Artificial Sequence
  Guide RNA
gggcaguuggaccuggaguc

SEQ ID NO: 25922 - RNA, 20 nt, Artificial Sequence
  Guide RNA
gggcccagugacuccagguc

SEQ ID NO: 25923 - RNA, 20 nt, Artificial Sequence
  Guide RNA
gguccaacugcccucaagug

SEQ ID NO: 25924 - RNA, 20 nt, Artificial Sequence
  Guide RNA
gguccaccugcccucaagug

SEQ ID NO: 25925 - RNA, 20 nt, Artificial Sequence
  Guide RNA
gguggaccuggagucacugg

SEQ ID NO: 25926 - RNA, 20 nt, Artificial Sequence
  Guide RNA
guccaacugcccucaagugg

SEQ ID NO: 25927 - RNA, 20 nt, Artificial Sequence
  Guide RNA
guccaccugcccucaagugg

SEQ ID NO: 25928 - RNA, 20 nt, Artificial Sequence
  Guide RNA
guccacuugagggcaggugg

SEQ ID NO: 25929 - RNA, 20 nt, Artificial Sequence
  Guide RNA
guccacuugagggcaguugg

SEQ ID NO: 25930 - RNA, 20 nt, Artificial Sequence
  Guide RNA
gugacuccagguccaacugc

SEQ ID NO: 25931 - RNA, 20 nt, Artificial Sequence
  Guide RNA
gugacuccagguccaccugc

SEQ ID NO: 25932 - RNA, 20 nt, Artificial Sequence
  Guide RNA
guuggaccuggagucacugg

SEQ ID NO: 25933 - RNA, 20 nt, Artificial Sequence
  Guide RNA
uccaacugcccucaagugga

SEQ ID NO: 25934 - RNA, 20 nt, Artificial Sequence
  Guide RNA
uccaccugcccucaagugga

SEQ ID NO: 25935 - RNA, 20 nt, Artificial Sequence
  Guide RNA
uccacuugagggcaggugga

SEQ ID NO: 25936 - RNA, 20 nt, Artificial Sequence
  Guide RNA
uccacuugagggcaguugga

SEQ ID NO: 25937 - RNA, 20 nt, Artificial Sequence
  Guide RNA
uccagguccaacugcccuca

SEQ ID NO: 25938 - RNA, 20 nt, Artificial Sequence
  Guide RNA
uccagguccaccugcccuca

SEQ ID NO: 25939 - RNA, 20 nt, Artificial Sequence
  Guide RNA
ugacguccacuugagggcag

SEQ ID NO: 25940 - RNA, 20 nt, Artificial Sequence
  Guide RNA
ugacuccagguccaacugcc

SEQ ID NO: 25941 - RNA, 20 nt, Artificial Sequence
  Guide RNA
ugacuccagguccaccugcc

SEQ ID NO: 25942 - RNA, 20 nt, Artificial Sequence
  Guide RNA
ugagggcagguggaccugga

SEQ ID NO: 25943 - RNA, 20 nt, Artificial Sequence
  Guide RNA
ugagggcaguuggaccugga

SEQ ID NO: 25944 - RNA, 20 nt, Artificial Sequence
  Guide RNA
ugggcccagugacuccaggu

SEQ ID NO: 25945 - RNA, 20 nt, Artificial Sequence
  Guide RNA
uugacguccacuugagggca

SEQ ID NO: 25946 - RNA, 20 nt, Artificial Sequence
  Guide RNA
uugagggcagguggaccugg

SEQ ID NO: 25947 - RNA, 20 nt, Artificial Sequence
  Guide RNA
uugagggcaguuggaccugg

SEQ ID NO: 25948 - RNA, 21 nt, Artificial Sequence
  Guide RNA
aacugcccucaaguggacguc

SEQ ID NO: 25949 - RNA, 21 nt, Artificial Sequence
  Guide RNA
accugcccucaaguggacguc

SEQ ID NO: 25950 - RNA, 21 nt, Artificial Sequence
  Guide RNA
acguccacuugagggcaggug

SEQ ID NO: 25951 - RNA, 21 nt, Artificial Sequence
  Guide RNA
acguccacuugagggcaguug

SEQ ID NO: 25952 - RNA, 21 nt, Artificial Sequence
  Guide RNA
acuccagguccaacugcccuc

SEQ ID NO: 25953 - RNA, 21 nt, Artificial Sequence
  Guide RNA
acuccagguccaccugcccuc

SEQ ID NO: 25954 - RNA, 21 nt, Artificial Sequence
  Guide RNA
acuugagggcagguggaccug

SEQ ID NO: 25955 - RNA, 21 nt, Artificial Sequence
  Guide RNA
acuugagggcaguuggaccug

SEQ ID NO: 25956 - RNA, 21 nt, Artificial Sequence
  Guide RNA
agauugacguccacuugaggg

SEQ ID NO: 25957 - RNA, 21 nt, Artificial Sequence
  Guide RNA
agggcagguggaccuggaguc

SEQ ID NO: 25958 - RNA, 21 nt, Artificial Sequence
  Guide RNA
agggcaguuggaccuggaguc

SEQ ID NO: 25959 - RNA, 21 nt, Artificial Sequence
  Guide RNA
agguccaacugcccucaagug

SEQ ID NO: 25960 - RNA, 21 nt, Artificial Sequence
  Guide RNA
agguccaccugcccucaagug

SEQ ID NO: 25961 - RNA, 21 nt, Artificial Sequence
  Guide RNA
agguggaccuggagucacugg

SEQ ID NO: 25962 - RNA, 21 nt, Artificial Sequence
  Guide RNA
agugacuccagguccaacugc

SEQ ID NO: 25963 - RNA, 21 nt, Artificial Sequence
  Guide RNA
agugacuccagguccaccugc

SEQ ID NO: 25964 - RNA, 21 nt, Artificial Sequence
  Guide RNA
aguuggaccuggagucacugg

SEQ ID NO: 25965 - RNA, 21 nt, Artificial Sequence
  Guide RNA
auugacguccacuugagggca

SEQ ID NO: 25966 - RNA, 21 nt, Artificial Sequence
  Guide RNA
caacugcccucaaguggacgu

SEQ ID NO: 25967 - RNA, 21 nt, Artificial Sequence
  Guide RNA
caccugcccucaaguggacgu

SEQ ID NO: 25968 - RNA, 21 nt, Artificial Sequence
  Guide RNA
cacuugagggcagguggaccu

SEQ ID NO: 25969 - RNA, 21 nt, Artificial Sequence
  Guide RNA
cacuugagggcaguuggaccu

SEQ ID NO: 25970 - RNA, 21 nt, Artificial Sequence
  Guide RNA
cagguccaacugcccucaagu

SEQ ID NO: 25971 - RNA, 21 nt, Artificial Sequence
  Guide RNA
cagguccaccugcccucaagu

SEQ ID NO: 25972 - RNA, 21 nt, Artificial Sequence
  Guide RNA
cagguggaccuggagucacug

SEQ ID NO: 25973 - RNA, 21 nt, Artificial Sequence
  Guide RNA
cagugacuccagguccaacug

SEQ ID NO: 25974 - RNA, 21 nt, Artificial Sequence
  Guide RNA
cagugacuccagguccaccug

SEQ ID NO: 25975 - RNA, 21 nt, Artificial Sequence
  Guide RNA
caguuggaccuggagucacug

SEQ ID NO: 25976 - RNA, 21 nt, Artificial Sequence
  Guide RNA
ccaacugcccucaaguggacg

SEQ ID NO: 25977 - RNA, 21 nt, Artificial Sequence
  Guide RNA
ccaccugcccucaaguggacg

SEQ ID NO: 25978 - RNA, 21 nt, Artificial Sequence
  Guide RNA
ccacuugagggcagguggacc

SEQ ID NO: 25979 - RNA, 21 nt, Artificial Sequence
  Guide RNA
ccacuugagggcaguuggacc

SEQ ID NO: 25980 - RNA, 21 nt, Artificial Sequence
  Guide RNA
ccagguccaacugcccucaag

SEQ ID NO: 25981 - RNA, 21 nt, Artificial Sequence
  Guide RNA
ccagguccaccugcccucaag

SEQ ID NO: 25982 - RNA, 21 nt, Artificial Sequence
  Guide RNA
ccagugacuccagguccaacu

SEQ ID NO: 25983 - RNA, 21 nt, Artificial Sequence
  Guide RNA
ccagugacuccagguccaccu

SEQ ID NO: 25984 - RNA, 21 nt, Artificial Sequence
  Guide RNA
cccagugacuccagguccaac

SEQ ID NO: 25985 - RNA, 21 nt, Artificial Sequence
  Guide RNA
cccagugacuccagguccacc

SEQ ID NO: 25986 - RNA, 21 nt, Artificial Sequence
  Guide RNA
cguccacuugagggcaggugg

SEQ ID NO: 25987 - RNA, 21 nt, Artificial Sequence
  Guide RNA
cguccacuugagggcaguugg

SEQ ID NO: 25988 - RNA, 21 nt, Artificial Sequence
  Guide RNA
cuccagguccaacugcccuca

SEQ ID NO: 25989 - RNA, 21 nt, Artificial Sequence
  Guide RNA
cuccagguccaccugcccuca

SEQ ID NO: 25990 - RNA, 21 nt, Artificial Sequence
  Guide RNA
cugggcccagugacuccaggu

SEQ ID NO: 25991 - RNA, 21 nt, Artificial Sequence
  Guide RNA
cuugagggcagguggaccugg

SEQ ID NO: 25992 - RNA, 21 nt, Artificial Sequence
  Guide RNA
cuugagggcaguuggaccugg

SEQ ID NO: 25993 - RNA, 21 nt, Artificial Sequence
  Guide RNA
gacguccacuugagggcaggu

SEQ ID NO: 25994 - RNA, 21 nt, Artificial Sequence
  Guide RNA
gacguccacuugagggcaguu

SEQ ID NO: 25995 - RNA, 21 nt, Artificial Sequence
  Guide RNA
gacuccagguccaacugcccu

SEQ ID NO: 25996 - RNA, 21 nt, Artificial Sequence
  Guide RNA
gacuccagguccaccugcccu

SEQ ID NO: 25997 - RNA, 21 nt, Artificial Sequence
  Guide RNA
gagggcagguggaccuggagu

SEQ ID NO: 25998 - RNA, 21 nt, Artificial Sequence
  Guide RNA
gagggcaguuggaccuggagu

SEQ ID NO: 25999 - RNA, 21 nt, Artificial Sequence
  Guide RNA
gauugacguccacuugagggc

SEQ ID NO: 26000 - RNA, 21 nt, Artificial Sequence
  Guide RNA
gcagguggaccuggagucacu

SEQ ID NO: 26001 - RNA, 21 nt, Artificial Sequence
  Guide RNA
gcaguuggaccuggagucacu

SEQ ID NO: 26002 - RNA, 21 nt, Artificial Sequence
  Guide RNA
gcccagugacuccagguccaa

SEQ ID NO: 26003 - RNA, 21 nt, Artificial Sequence
  Guide RNA
gcccagugacuccagguccac

SEQ ID NO: 26004 - RNA, 21 nt, Artificial Sequence
  Guide RNA
ggcagguggaccuggagucac

SEQ ID NO: 26005 - RNA, 21 nt, Artificial Sequence
  Guide RNA
ggcaguuggaccuggagucac

SEQ ID NO: 26006 - RNA, 21 nt, Artificial Sequence
  Guide RNA
ggcccagugacuccaggucca

SEQ ID NO: 26007 - RNA, 21 nt, Artificial Sequence
  Guide RNA
gggcagguggaccuggaguca

SEQ ID NO: 26008 - RNA, 21 nt, Artificial Sequence
  Guide RNA
gggcaguuggaccuggaguca

SEQ ID NO: 26009 - RNA, 21 nt, Artificial Sequence
  Guide RNA
gggcccagugacuccaggucc

SEQ ID NO: 26010 - RNA, 21 nt, Artificial Sequence
  Guide RNA
gguccaacugcccucaagugg

SEQ ID NO: 26011 - RNA, 21 nt, Artificial Sequence
  Guide RNA
gguccaccugcccucaagugg

SEQ ID NO: 26012 - RNA, 21 nt, Artificial Sequence
  Guide RNA
gguggaccuggagucacuggg

SEQ ID NO: 26013 - RNA, 21 nt, Artificial Sequence
  Guide RNA
guccaacugcccucaagugga

SEQ ID NO: 26014 - RNA, 21 nt, Artificial Sequence
  Guide RNA
guccaccugcccucaagugga

SEQ ID NO: 26015 - RNA, 21 nt, Artificial Sequence
  Guide RNA
guccacuugagggcaggugga

SEQ ID NO: 26016 - RNA, 21 nt, Artificial Sequence
  Guide RNA
guccacuugagggcaguugga

SEQ ID NO: 26017 - RNA, 21 nt, Artificial Sequence
  Guide RNA
gugacuccagguccaacugcc

SEQ ID NO: 26018 - RNA, 21 nt, Artificial Sequence
  Guide RNA
gugacuccagguccaccugcc

SEQ ID NO: 26019 - RNA, 21 nt, Artificial Sequence
  Guide RNA
guuggaccuggagucacuggg

SEQ ID NO: 26020 - RNA, 21 nt, Artificial Sequence
  Guide RNA
uccaacugcccucaaguggac

SEQ ID NO: 26021 - RNA, 21 nt, Artificial Sequence
  Guide RNA
uccaccugcccucaaguggac

SEQ ID NO: 26022 - RNA, 21 nt, Artificial Sequence
  Guide RNA
uccacuugagggcagguggac

SEQ ID NO: 26023 - RNA, 21 nt, Artificial Sequence
  Guide RNA
uccacuugagggcaguuggac

SEQ ID NO: 26024 - RNA, 21 nt, Artificial Sequence
  Guide RNA
uccagguccaacugcccucaa

SEQ ID NO: 26025 - RNA, 21 nt, Artificial Sequence
  Guide RNA
uccagguccaccugcccucaa

SEQ ID NO: 26026 - RNA, 21 nt, Artificial Sequence
  Guide RNA
ugacguccacuugagggcagg

SEQ ID NO: 26027 - RNA, 21 nt, Artificial Sequence
  Guide RNA
ugacguccacuugagggcagu

SEQ ID NO: 26028 - RNA, 21 nt, Artificial Sequence
  Guide RNA
ugacuccagguccaacugccc

SEQ ID NO: 26029 - RNA, 21 nt, Artificial Sequence
  Guide RNA
ugacuccagguccaccugccc

SEQ ID NO: 26030 - RNA, 21 nt, Artificial Sequence
  Guide RNA
ugagggcagguggaccuggag

SEQ ID NO: 26031 - RNA, 21 nt, Artificial Sequence
  Guide RNA
ugagggcaguuggaccuggag

SEQ ID NO: 26032 - RNA, 21 nt, Artificial Sequence
  Guide RNA
ugggcccagugacuccagguc

SEQ ID NO: 26033 - RNA, 21 nt, Artificial Sequence
  Guide RNA
uugacguccacuugagggcag

SEQ ID NO: 26034 - RNA, 21 nt, Artificial Sequence
  Guide RNA
uugagggcagguggaccugga

SEQ ID NO: 26035 - RNA, 21 nt, Artificial Sequence
  Guide RNA
uugagggcaguuggaccugga

SEQ ID NO: 26036 - RNA, 22 nt, Artificial Sequence
  Guide RNA
aacugcccucaaguggacguca

SEQ ID NO: 26037 - RNA, 22 nt, Artificial Sequence
  Guide RNA
accugcccucaaguggacguca

SEQ ID NO: 26038 - RNA, 22 nt, Artificial Sequence
  Guide RNA
acguccacuugagggcaggugg

SEQ ID NO: 26039 - RNA, 22 nt, Artificial Sequence
  Guide RNA
acguccacuugagggcaguugg

SEQ ID NO: 26040 - RNA, 22 nt, Artificial Sequence
  Guide RNA
acuccagguccaacugcccuca

SEQ ID NO: 26041 - RNA, 22 nt, Artificial Sequence
  Guide RNA
acuccagguccaccugcccuca

SEQ ID NO: 26042 - RNA, 22 nt, Artificial Sequence
  Guide RNA
acuugagggcagguggaccugg

SEQ ID NO: 26043 - RNA, 22 nt, Artificial Sequence
  Guide RNA
acuugagggcaguuggaccugg

SEQ ID NO: 26044 - RNA, 22 nt, Artificial Sequence
  Guide RNA
agauugacguccacuugagggc

SEQ ID NO: 26045 - RNA, 22 nt, Artificial Sequence
  Guide RNA
agggcagguggaccuggaguca

SEQ ID NO: 26046 - RNA, 22 nt, Artificial Sequence
  Guide RNA
agggcaguuggaccuggaguca

SEQ ID NO: 26047 - RNA, 22 nt, Artificial Sequence
  Guide RNA
agguccaacugcccucaagugg

SEQ ID NO: 26048 - RNA, 22 nt, Artificial Sequence
  Guide RNA
agguccaccugcccucaagugg

SEQ ID NO: 26049 - RNA, 22 nt, Artificial Sequence
  Guide RNA
agguggaccuggagucacuggg

SEQ ID NO: 26050 - RNA, 22 nt, Artificial Sequence
  Guide RNA
agugacuccagguccaacugcc

SEQ ID NO: 26051 - RNA, 22 nt, Artificial Sequence
  Guide RNA
agugacuccagguccaccugcc

SEQ ID NO: 26052 - RNA, 22 nt, Artificial Sequence
  Guide RNA
aguuggaccuggagucacuggg

SEQ ID NO: 26053 - RNA, 22 nt, Artificial Sequence
  Guide RNA
auugacguccacuugagggcag

SEQ ID NO: 26054 - RNA, 22 nt, Artificial Sequence
  Guide RNA
caacugcccucaaguggacguc

SEQ ID NO: 26055 - RNA, 22 nt, Artificial Sequence
  Guide RNA
caccugcccucaaguggacguc

SEQ ID NO: 26056 - RNA, 22 nt, Artificial Sequence
  Guide RNA
cacuugagggcagguggaccug

SEQ ID NO: 26057 - RNA, 22 nt, Artificial Sequence
  Guide RNA
cacuugagggcaguuggaccug

SEQ ID NO: 26058 - RNA, 22 nt, Artificial Sequence
  Guide RNA
cagguccaacugcccucaagug

SEQ ID NO: 26059 - RNA, 22 nt, Artificial Sequence
  Guide RNA
cagguccaccugcccucaagug

SEQ ID NO: 26060 - RNA, 22 nt, Artificial Sequence
  Guide RNA
cagguggaccuggagucacugg

SEQ ID NO: 26061 - RNA, 22 nt, Artificial Sequence
  Guide RNA
cagugacuccagguccaacugc

SEQ ID NO: 26062 - RNA, 22 nt, Artificial Sequence
  Guide RNA
cagugacuccagguccaccugc

SEQ ID NO: 26063 - RNA, 22 nt, Artificial Sequence
  Guide RNA
caguuggaccuggagucacugg

SEQ ID NO: 26064 - RNA, 22 nt, Artificial Sequence
  Guide RNA
ccaacugcccucaaguggacgu

SEQ ID NO: 26065 - RNA, 22 nt, Artificial Sequence
  Guide RNA
ccaccugcccucaaguggacgu

SEQ ID NO: 26066 - RNA, 22 nt, Artificial Sequence
  Guide RNA
ccacuugagggcagguggaccu

SEQ ID NO: 26067 - RNA, 22 nt, Artificial Sequence
  Guide RNA
ccacuugagggcaguuggaccu

SEQ ID NO: 26068 - RNA, 22 nt, Artificial Sequence
  Guide RNA
ccagguccaacugcccucaagu

SEQ ID NO: 26069 - RNA, 22 nt, Artificial Sequence
  Guide RNA
ccagguccaccugcccucaagu

SEQ ID NO: 26070 - RNA, 22 nt, Artificial Sequence
  Guide RNA
ccagugacuccagguccaacug

SEQ ID NO: 26071 - RNA, 22 nt, Artificial Sequence
  Guide RNA
ccagugacuccagguccaccug

SEQ ID NO: 26072 - RNA, 22 nt, Artificial Sequence
  Guide RNA
cccagugacuccagguccaacu

SEQ ID NO: 26073 - RNA, 22 nt, Artificial Sequence
  Guide RNA
cccagugacuccagguccaccu

SEQ ID NO: 26074 - RNA, 22 nt, Artificial Sequence
  Guide RNA
cguccacuugagggcaggugga

SEQ ID NO: 26075 - RNA, 22 nt, Artificial Sequence
  Guide RNA
cguccacuugagggcaguugga

SEQ ID NO: 26076 - RNA, 22 nt, Artificial Sequence
  Guide RNA
cuccagguccaacugcccucaa

SEQ ID NO: 26077 - RNA, 22 nt, Artificial Sequence
  Guide RNA
cuccagguccaccugcccucaa

SEQ ID NO: 26078 - RNA, 22 nt, Artificial Sequence
  Guide RNA
cugggcccagugacuccagguc

SEQ ID NO: 26079 - RNA, 22 nt, Artificial Sequence
  Guide RNA
cuugagggcagguggaccugga

SEQ ID NO: 26080 - RNA, 22 nt, Artificial Sequence
  Guide RNA
cuugagggcaguuggaccugga

SEQ ID NO: 26081 - RNA, 22 nt, Artificial Sequence
  Guide RNA
gacguccacuugagggcaggug

SEQ ID NO: 26082 - RNA, 22 nt, Artificial Sequence
  Guide RNA
gacguccacuugagggcaguug

SEQ ID NO: 26083 - RNA, 22 nt, Artificial Sequence
  Guide RNA
gacuccagguccaacugcccuc

SEQ ID NO: 26084 - RNA, 22 nt, Artificial Sequence
  Guide RNA
gacuccagguccaccugcccuc

SEQ ID NO: 26085 - RNA, 22 nt, Artificial Sequence
  Guide RNA
gagauugacguccacuugaggg

SEQ ID NO: 26086 - RNA, 22 nt, Artificial Sequence
  Guide RNA
gagggcagguggaccuggaguc

SEQ ID NO: 26087 - RNA, 22 nt, Artificial Sequence
  Guide RNA
gagggcaguuggaccuggaguc

SEQ ID NO: 26088 - RNA, 22 nt, Artificial Sequence
  Guide RNA
gauugacguccacuugagggca

SEQ ID NO: 26089 - RNA, 22 nt, Artificial Sequence
  Guide RNA
gcagguggaccuggagucacug

SEQ ID NO: 26090 - RNA, 22 nt, Artificial Sequence
  Guide RNA
gcaguuggaccuggagucacug

SEQ ID NO: 26091 - RNA, 22 nt, Artificial Sequence
  Guide RNA
gcccagugacuccagguccaac

SEQ ID NO: 26092 - RNA, 22 nt, Artificial Sequence
  Guide RNA
gcccagugacuccagguccacc

SEQ ID NO: 26093 - RNA, 22 nt, Artificial Sequence
  Guide RNA
gcugggcccagugacuccaggu

SEQ ID NO: 26094 - RNA, 22 nt, Artificial Sequence
  Guide RNA
ggcagguggaccuggagucacu

SEQ ID NO: 26095 - RNA, 22 nt, Artificial Sequence
  Guide RNA
ggcaguuggaccuggagucacu

SEQ ID NO: 26096 - RNA, 22 nt, Artificial Sequence
  Guide RNA
ggcccagugacuccagguccaa

SEQ ID NO: 26097 - RNA, 22 nt, Artificial Sequence
  Guide RNA
ggcccagugacuccagguccac

SEQ ID NO: 26098 - RNA, 22 nt, Artificial Sequence
  Guide RNA
gggcagguggaccuggagucac

SEQ ID NO: 26099 - RNA, 22 nt, Artificial Sequence
  Guide RNA
gggcaguuggaccuggagucac

SEQ ID NO: 26100 - RNA, 22 nt, Artificial Sequence
  Guide RNA
gggcccagugacuccaggucca

SEQ ID NO: 26101 - RNA, 22 nt, Artificial Sequence
  Guide RNA
gguccaacugcccucaagugga

SEQ ID NO: 26102 - RNA, 22 nt, Artificial Sequence
  Guide RNA
gguccaccugcccucaagugga

SEQ ID NO: 26103 - RNA, 22 nt, Artificial Sequence
  Guide RNA
gguggaccuggagucacugggc

SEQ ID NO: 26104 - RNA, 22 nt, Artificial Sequence
  Guide RNA
guccaacugcccucaaguggac

SEQ ID NO: 26105 - RNA, 22 nt, Artificial Sequence
  Guide RNA
guccaccugcccucaaguggac

SEQ ID NO: 26106 - RNA, 22 nt, Artificial Sequence
  Guide RNA
guccacuugagggcagguggac

SEQ ID NO: 26107 - RNA, 22 nt, Artificial Sequence
  Guide RNA
guccacuugagggcaguuggac

SEQ ID NO: 26108 - RNA, 22 nt, Artificial Sequence
  Guide RNA
gugacuccagguccaacugccc

SEQ ID NO: 26109 - RNA, 22 nt, Artificial Sequence
  Guide RNA
gugacuccagguccaccugccc

SEQ ID NO: 26110 - RNA, 22 nt, Artificial Sequence
  Guide RNA
guuggaccuggagucacugggc

SEQ ID NO: 26111 - RNA, 22 nt, Artificial Sequence
  Guide RNA
uccaacugcccucaaguggacg

SEQ ID NO: 26112 - RNA, 22 nt, Artificial Sequence
  Guide RNA
uccaccugcccucaaguggacg

SEQ ID NO: 26113 - RNA, 22 nt, Artificial Sequence
  Guide RNA
uccacuugagggcagguggacc

SEQ ID NO: 26114 - RNA, 22 nt, Artificial Sequence
  Guide RNA
uccacuugagggcaguuggacc

SEQ ID NO: 26115 - RNA, 22 nt, Artificial Sequence
  Guide RNA
uccagguccaacugcccucaag

SEQ ID NO: 26116 - RNA, 22 nt, Artificial Sequence
  Guide RNA
uccagguccaccugcccucaag

SEQ ID NO: 26117 - RNA, 22 nt, Artificial Sequence
  Guide RNA
ugacguccacuugagggcaggu

SEQ ID NO: 26118 - RNA, 22 nt, Artificial Sequence
  Guide RNA
ugacguccacuugagggcaguu

SEQ ID NO: 26119 - RNA, 22 nt, Artificial Sequence
  Guide RNA
ugacuccagguccaacugcccu

SEQ ID NO: 26120 - RNA, 22 nt, Artificial Sequence
  Guide RNA
ugacuccagguccaccugcccu

SEQ ID NO: 26121 - RNA, 22 nt, Artificial Sequence
  Guide RNA
ugagggcagguggaccuggagu

SEQ ID NO: 26122 - RNA, 22 nt, Artificial Sequence
  Guide RNA
ugagggcaguuggaccuggagu

SEQ ID NO: 26123 - RNA, 22 nt, Artificial Sequence
  Guide RNA
ugggcccagugacuccaggucc

SEQ ID NO: 26124 - RNA, 22 nt, Artificial Sequence
  Guide RNA
uugacguccacuugagggcagg

SEQ ID NO: 26125 - RNA, 22 nt, Artificial Sequence
  Guide RNA
uugacguccacuugagggcagu

SEQ ID NO: 26126 - RNA, 22 nt, Artificial Sequence
  Guide RNA
uugagggcagguggaccuggag

SEQ ID NO: 26127 - RNA, 22 nt, Artificial Sequence
  Guide RNA
uugagggcaguuggaccuggag

SEQ ID NO: 26128 - RNA, 20 nt, Artificial Sequence
  Guide RNA
aaaagcccacaacagcuacu

SEQ ID NO: 26129 - RNA, 20 nt, Artificial Sequence
  Guide RNA
aaaagcccacagcagcuacu

SEQ ID NO: 26130 - RNA, 20 nt, Artificial Sequence
  Guide RNA
aaagcccacaacagcuacuc

SEQ ID NO: 26131 - RNA, 20 nt, Artificial Sequence
  Guide RNA
aaagcccacagcagcuacuc

SEQ ID NO: 26132 - RNA, 20 nt, Artificial Sequence
  Guide RNA
aacagcuacuccacugaguu

SEQ ID NO: 26133 - RNA, 20 nt, Artificial Sequence
  Guide RNA
aacucaguggaguagcugcu

SEQ ID NO: 26134 - RNA, 20 nt, Artificial Sequence
  Guide RNA
aacucaguggaguagcuguu

SEQ ID NO: 26135 - RNA, 20 nt, Artificial Sequence
  Guide RNA
aagaauacaaaagcccacaa

SEQ ID NO: 26136 - RNA, 20 nt, Artificial Sequence
  Guide RNA
aagaauacaaaagcccacag

SEQ ID NO: 26137 - RNA, 20 nt, Artificial Sequence
  Guide RNA
aagcccacaacagcuacucc

SEQ ID NO: 26138 - RNA, 20 nt, Artificial Sequence
  Guide RNA
aagcccacagcagcuacucc

SEQ ID NO: 26139 - RNA, 20 nt, Artificial Sequence
  Guide RNA
aauacaaaagcccacaacag

SEQ ID NO: 26140 - RNA, 20 nt, Artificial Sequence
  Guide RNA
aauacaaaagcccacagcag

SEQ ID NO: 26141 - RNA, 20 nt, Artificial Sequence
  Guide RNA
acaaaagcccacaacagcua

SEQ ID NO: 26142 - RNA, 20 nt, Artificial Sequence
  Guide RNA
acaaaagcccacagcagcua

SEQ ID NO: 26143 - RNA, 20 nt, Artificial Sequence
  Guide RNA
acaacagcuacuccacugag

SEQ ID NO: 26144 - RNA, 20 nt, Artificial Sequence
  Guide RNA
acaacucaguggaguagcug

SEQ ID NO: 26145 - RNA, 20 nt, Artificial Sequence
  Guide RNA
acagcagcuacuccacugag

SEQ ID NO: 26146 - RNA, 20 nt, Artificial Sequence
  Guide RNA
acucaguggaguagcugcug

SEQ ID NO: 26147 - RNA, 20 nt, Artificial Sequence
  Guide RNA
acucaguggaguagcuguug

SEQ ID NO: 26148 - RNA, 20 nt, Artificial Sequence
  Guide RNA
agaauacaaaagcccacaac

SEQ ID NO: 26149 - RNA, 20 nt, Artificial Sequence
  Guide RNA
agaauacaaaagcccacagc

SEQ ID NO: 26150 - RNA, 20 nt, Artificial Sequence
  Guide RNA
agcagcuacuccacugaguu

SEQ ID NO: 26151 - RNA, 20 nt, Artificial Sequence
  Guide RNA
agcccacaacagcuacucca

SEQ ID NO: 26152 - RNA, 20 nt, Artificial Sequence
  Guide RNA
agcccacagcagcuacucca

SEQ ID NO: 26153 - RNA, 20 nt, Artificial Sequence
  Guide RNA
agcugcugugggcuuuugua

SEQ ID NO: 26154 - RNA, 20 nt, Artificial Sequence
  Guide RNA
agcuguugugggcuuuugua

SEQ ID NO: 26155 - RNA, 20 nt, Artificial Sequence
  Guide RNA
aguagcugcugugggcuuuu

SEQ ID NO: 26156 - RNA, 20 nt, Artificial Sequence
  Guide RNA
aguagcuguugugggcuuuu

SEQ ID NO: 26157 - RNA, 20 nt, Artificial Sequence
  Guide RNA
aguggaguagcugcuguggg

SEQ ID NO: 26158 - RNA, 20 nt, Artificial Sequence
  Guide RNA
aguggaguagcuguuguggg

SEQ ID NO: 26159 - RNA, 20 nt, Artificial Sequence
  Guide RNA
auacaaaagcccacaacagc

SEQ ID NO: 26160 - RNA, 20 nt, Artificial Sequence
  Guide RNA
auacaaaagcccacagcagc

SEQ ID NO: 26161 - RNA, 20 nt, Artificial Sequence
  Guide RNA
caaaagcccacaacagcuac

SEQ ID NO: 26162 - RNA, 20 nt, Artificial Sequence
  Guide RNA
caaaagcccacagcagcuac

SEQ ID NO: 26163 - RNA, 20 nt, Artificial Sequence
  Guide RNA
caacagcuacuccacugagu

SEQ ID NO: 26164 - RNA, 20 nt, Artificial Sequence
  Guide RNA
caacucaguggaguagcugc

SEQ ID NO: 26165 - RNA, 20 nt, Artificial Sequence
  Guide RNA
caacucaguggaguagcugu

SEQ ID NO: 26166 - RNA, 20 nt, Artificial Sequence
  Guide RNA
cacaacagcuacuccacuga

SEQ ID NO: 26167 - RNA, 20 nt, Artificial Sequence
  Guide RNA
cacagcagcuacuccacuga

SEQ ID NO: 26168 - RNA, 20 nt, Artificial Sequence
  Guide RNA
cagcagcuacuccacugagu

SEQ ID NO: 26169 - RNA, 20 nt, Artificial Sequence
  Guide RNA
caguggaguagcugcugugg

SEQ ID NO: 26170 - RNA, 20 nt, Artificial Sequence
  Guide RNA
caguggaguagcuguugugg

SEQ ID NO: 26171 - RNA, 20 nt, Artificial Sequence
  Guide RNA
ccacaacagcuacuccacug

SEQ ID NO: 26172 - RNA, 20 nt, Artificial Sequence
  Guide RNA
ccacagcagcuacuccacug

SEQ ID NO: 26173 - RNA, 20 nt, Artificial Sequence
  Guide RNA
cccacaacagcuacuccacu

SEQ ID NO: 26174 - RNA, 20 nt, Artificial Sequence
  Guide RNA
cccacagcagcuacuccacu

SEQ ID NO: 26175 - RNA, 20 nt, Artificial Sequence
  Guide RNA
cgaagaauacaaaagcccac

SEQ ID NO: 26176 - RNA, 20 nt, Artificial Sequence
  Guide RNA
cucaguggaguagcugcugu

SEQ ID NO: 26177 - RNA, 20 nt, Artificial Sequence
  Guide RNA
cucaguggaguagcuguugu

SEQ ID NO: 26178 - RNA, 20 nt, Artificial Sequence
  Guide RNA
cugcugugggcuuuuguauu

SEQ ID NO: 26179 - RNA, 20 nt, Artificial Sequence
  Guide RNA
cuguugugggcuuuuguauu

SEQ ID NO: 26180 - RNA, 20 nt, Artificial Sequence
  Guide RNA
gaagaauacaaaagcccaca

SEQ ID NO: 26181 - RNA, 20 nt, Artificial Sequence
  Guide RNA
gaauacaaaagcccacaaca

SEQ ID NO: 26182 - RNA, 20 nt, Artificial Sequence
  Guide RNA
gaauacaaaagcccacagca

SEQ ID NO: 26183 - RNA, 20 nt, Artificial Sequence
  Guide RNA
gacaacucaguggaguagcu

SEQ ID NO: 26184 - RNA, 20 nt, Artificial Sequence
  Guide RNA
gaguagcugcugugggcuuu

SEQ ID NO: 26185 - RNA, 20 nt, Artificial Sequence
  Guide RNA
gaguagcuguugugggcuuu

SEQ ID NO: 26186 - RNA, 20 nt, Artificial Sequence
  Guide RNA
gcccacaacagcuacuccac

SEQ ID NO: 26187 - RNA, 20 nt, Artificial Sequence
  Guide RNA
gcccacagcagcuacuccac

SEQ ID NO: 26188 - RNA, 20 nt, Artificial Sequence
  Guide RNA
gcgaagaauacaaaagccca

SEQ ID NO: 26189 - RNA, 20 nt, Artificial Sequence
  Guide RNA
gcugcugugggcuuuuguau

SEQ ID NO: 26190 - RNA, 20 nt, Artificial Sequence
  Guide RNA
gcugugggcuuuuguauucu

SEQ ID NO: 26191 - RNA, 20 nt, Artificial Sequence
  Guide RNA
gcuguugugggcuuuuguau

SEQ ID NO: 26192 - RNA, 20 nt, Artificial Sequence
  Guide RNA
ggacaacucaguggaguagc

SEQ ID NO: 26193 - RNA, 20 nt, Artificial Sequence
  Guide RNA
ggaguagcugcugugggcuu

SEQ ID NO: 26194 - RNA, 20 nt, Artificial Sequence
  Guide RNA
ggaguagcuguugugggcuu

SEQ ID NO: 26195 - RNA, 20 nt, Artificial Sequence
  Guide RNA
guagcugcugugggcuuuug

SEQ ID NO: 26196 - RNA, 20 nt, Artificial Sequence
  Guide RNA
guagcuguugugggcuuuug

SEQ ID NO: 26197 - RNA, 20 nt, Artificial Sequence
  Guide RNA
guggaguagcugcugugggc

SEQ ID NO: 26198 - RNA, 20 nt, Artificial Sequence
  Guide RNA
guggaguagcuguugugggc

SEQ ID NO: 26199 - RNA, 20 nt, Artificial Sequence
  Guide RNA
guugugggcuuuuguauucu

SEQ ID NO: 26200 - RNA, 20 nt, Artificial Sequence
  Guide RNA
uacaaaagcccacaacagcu

SEQ ID NO: 26201 - RNA, 20 nt, Artificial Sequence
  Guide RNA
uacaaaagcccacagcagcu

SEQ ID NO: 26202 - RNA, 20 nt, Artificial Sequence
  Guide RNA
uagcugcugugggcuuuugu

SEQ ID NO: 26203 - RNA, 20 nt, Artificial Sequence
  Guide RNA
uagcuguugugggcuuuugu

SEQ ID NO: 26204 - RNA, 20 nt, Artificial Sequence
  Guide RNA
ucaguggaguagcugcugug

SEQ ID NO: 26205 - RNA, 20 nt, Artificial Sequence
  Guide RNA
ucaguggaguagcuguugug

SEQ ID NO: 26206 - RNA, 20 nt, Artificial Sequence
  Guide RNA
ugcgaagaauacaaaagccc

SEQ ID NO: 26207 - RNA, 20 nt, Artificial Sequence
  Guide RNA
ugcugugggcuuuuguauuc

SEQ ID NO: 26208 - RNA, 20 nt, Artificial Sequence
  Guide RNA
uggacaacucaguggaguag

SEQ ID NO: 26209 - RNA, 20 nt, Artificial Sequence
  Guide RNA
uggaguagcugcugugggcu

SEQ ID NO: 26210 - RNA, 20 nt, Artificial Sequence
  Guide RNA
uggaguagcuguugugggcu

SEQ ID NO: 26211 - RNA, 20 nt, Artificial Sequence
  Guide RNA
uguugugggcuuuuguauuc

SEQ ID NO: 26212 - RNA, 21 nt, Artificial Sequence
  Guide RNA
aaaagcccacaacagcuacuc

SEQ ID NO: 26213 - RNA, 21 nt, Artificial Sequence
  Guide RNA
aaaagcccacagcagcuacuc

SEQ ID NO: 26214 - RNA, 21 nt, Artificial Sequence
  Guide RNA
aaagcccacaacagcuacucc

SEQ ID NO: 26215 - RNA, 21 nt, Artificial Sequence
  Guide RNA
aaagcccacagcagcuacucc

SEQ ID NO: 26216 - RNA, 21 nt, Artificial Sequence
  Guide RNA
aacagcuacuccacugaguug

SEQ ID NO: 26217 - RNA, 21 nt, Artificial Sequence
  Guide RNA
aacucaguggaguagcugcug

SEQ ID NO: 26218 - RNA, 21 nt, Artificial Sequence
  Guide RNA
aacucaguggaguagcuguug

SEQ ID NO: 26219 - RNA, 21 nt, Artificial Sequence
  Guide RNA
aagaauacaaaagcccacaac

SEQ ID NO: 26220 - RNA, 21 nt, Artificial Sequence
  Guide RNA
aagaauacaaaagcccacagc

SEQ ID NO: 26221 - RNA, 21 nt, Artificial Sequence
  Guide RNA
aagcccacaacagcuacucca

SEQ ID NO: 26222 - RNA, 21 nt, Artificial Sequence
  Guide RNA
aagcccacagcagcuacucca

SEQ ID NO: 26223 - RNA, 21 nt, Artificial Sequence
  Guide RNA
aauacaaaagcccacaacagc

SEQ ID NO: 26224 - RNA, 21 nt, Artificial Sequence
  Guide RNA
aauacaaaagcccacagcagc

SEQ ID NO: 26225 - RNA, 21 nt, Artificial Sequence
  Guide RNA
acaaaagcccacaacagcuac

SEQ ID NO: 26226 - RNA, 21 nt, Artificial Sequence
  Guide RNA
acaaaagcccacagcagcuac

SEQ ID NO: 26227 - RNA, 21 nt, Artificial Sequence
  Guide RNA
acaacagcuacuccacugagu

SEQ ID NO: 26228 - RNA, 21 nt, Artificial Sequence
  Guide RNA
acaacucaguggaguagcugc

SEQ ID NO: 26229 - RNA, 21 nt, Artificial Sequence
  Guide RNA
acaacucaguggaguagcugu

SEQ ID NO: 26230 - RNA, 21 nt, Artificial Sequence
  Guide RNA
acagcagcuacuccacugagu

SEQ ID NO: 26231 - RNA, 21 nt, Artificial Sequence
  Guide RNA
acucaguggaguagcugcugu

SEQ ID NO: 26232 - RNA, 21 nt, Artificial Sequence
  Guide RNA
acucaguggaguagcuguugu

SEQ ID NO: 26233 - RNA, 21 nt, Artificial Sequence
  Guide RNA
agaauacaaaagcccacaaca

SEQ ID NO: 26234 - RNA, 21 nt, Artificial Sequence
  Guide RNA
agaauacaaaagcccacagca

SEQ ID NO: 26235 - RNA, 21 nt, Artificial Sequence
  Guide RNA
agcagcuacuccacugaguug

SEQ ID NO: 26236 - RNA, 21 nt, Artificial Sequence
  Guide RNA
agcccacaacagcuacuccac

SEQ ID NO: 26237 - RNA, 21 nt, Artificial Sequence
  Guide RNA
agcccacagcagcuacuccac

SEQ ID NO: 26238 - RNA, 21 nt, Artificial Sequence
  Guide RNA
agcugcugugggcuuuuguau

SEQ ID NO: 26239 - RNA, 21 nt, Artificial Sequence
  Guide RNA
agcuguugugggcuuuuguau

SEQ ID NO: 26240 - RNA, 21 nt, Artificial Sequence
  Guide RNA
aguagcugcugugggcuuuug

SEQ ID NO: 26241 - RNA, 21 nt, Artificial Sequence
  Guide RNA
aguagcuguugugggcuuuug

SEQ ID NO: 26242 - RNA, 21 nt, Artificial Sequence
  Guide RNA
aguggaguagcugcugugggc

SEQ ID NO: 26243 - RNA, 21 nt, Artificial Sequence
  Guide RNA
aguggaguagcuguugugggc

SEQ ID NO: 26244 - RNA, 21 nt, Artificial Sequence
  Guide RNA
auacaaaagcccacaacagcu

SEQ ID NO: 26245 - RNA, 21 nt, Artificial Sequence
  Guide RNA
auacaaaagcccacagcagcu

SEQ ID NO: 26246 - RNA, 21 nt, Artificial Sequence
  Guide RNA
augcgaagaauacaaaagccc

SEQ ID NO: 26247 - RNA, 21 nt, Artificial Sequence
  Guide RNA
auggacaacucaguggaguag

SEQ ID NO: 26248 - RNA, 21 nt, Artificial Sequence
  Guide RNA
caaaagcccacaacagcuacu

SEQ ID NO: 26249 - RNA, 21 nt, Artificial Sequence
  Guide RNA
caaaagcccacagcagcuacu

SEQ ID NO: 26250 - RNA, 21 nt, Artificial Sequence
  Guide RNA
caacagcuacuccacugaguu

SEQ ID NO: 26251 - RNA, 21 nt, Artificial Sequence
  Guide RNA
caacucaguggaguagcugcu

SEQ ID NO: 26252 - RNA, 21 nt, Artificial Sequence
  Guide RNA
caacucaguggaguagcuguu

SEQ ID NO: 26253 - RNA, 21 nt, Artificial Sequence
  Guide RNA
cacaacagcuacuccacugag

SEQ ID NO: 26254 - RNA, 21 nt, Artificial Sequence
  Guide RNA
cacagcagcuacuccacugag

SEQ ID NO: 26255 - RNA, 21 nt, Artificial Sequence
  Guide RNA
cagcagcuacuccacugaguu

SEQ ID NO: 26256 - RNA, 21 nt, Artificial Sequence
  Guide RNA
caguggaguagcugcuguggg

SEQ ID NO: 26257 - RNA, 21 nt, Artificial Sequence
  Guide RNA
caguggaguagcuguuguggg

SEQ ID NO: 26258 - RNA, 21 nt, Artificial Sequence
  Guide RNA
ccacaacagcuacuccacuga

SEQ ID NO: 26259 - RNA, 21 nt, Artificial Sequence
  Guide RNA
ccacagcagcuacuccacuga

SEQ ID NO: 26260 - RNA, 21 nt, Artificial Sequence
  Guide RNA
cccacaacagcuacuccacug

SEQ ID NO: 26261 - RNA, 21 nt, Artificial Sequence
  Guide RNA
cccacagcagcuacuccacug

SEQ ID NO: 26262 - RNA, 21 nt, Artificial Sequence
  Guide RNA
cgaagaauacaaaagcccaca

SEQ ID NO: 26263 - RNA, 21 nt, Artificial Sequence
  Guide RNA
cucaguggaguagcugcugug

SEQ ID NO: 26264 - RNA, 21 nt, Artificial Sequence
  Guide RNA
cucaguggaguagcuguugug

SEQ ID NO: 26265 - RNA, 21 nt, Artificial Sequence
  Guide RNA
cugcugugggcuuuuguauuc

SEQ ID NO: 26266 - RNA, 21 nt, Artificial Sequence
  Guide RNA
cuguugugggcuuuuguauuc

SEQ ID NO: 26267 - RNA, 21 nt, Artificial Sequence
  Guide RNA
gaagaauacaaaagcccacaa

SEQ ID NO: 26268 - RNA, 21 nt, Artificial Sequence
  Guide RNA
gaagaauacaaaagcccacag

SEQ ID NO: 26269 - RNA, 21 nt, Artificial Sequence
  Guide RNA
gaauacaaaagcccacaacag

SEQ ID NO: 26270 - RNA, 21 nt, Artificial Sequence
  Guide RNA
gaauacaaaagcccacagcag

SEQ ID NO: 26271 - RNA, 21 nt, Artificial Sequence
  Guide RNA
gacaacucaguggaguagcug

SEQ ID NO: 26272 - RNA, 21 nt, Artificial Sequence
  Guide RNA
gaguagcugcugugggcuuuu

SEQ ID NO: 26273 - RNA, 21 nt, Artificial Sequence
  Guide RNA
gaguagcuguugugggcuuuu

SEQ ID NO: 26274 - RNA, 21 nt, Artificial Sequence
  Guide RNA
gcccacaacagcuacuccacu

SEQ ID NO: 26275 - RNA, 21 nt, Artificial Sequence
  Guide RNA
gcccacagcagcuacuccacu

SEQ ID NO: 26276 - RNA, 21 nt, Artificial Sequence
  Guide RNA
gcgaagaauacaaaagcccac

SEQ ID NO: 26277 - RNA, 21 nt, Artificial Sequence
  Guide RNA
gcugcugugggcuuuuguauu

SEQ ID NO: 26278 - RNA, 21 nt, Artificial Sequence
  Guide RNA
gcugugggcuuuuguauucuu

SEQ ID NO: 26279 - RNA, 21 nt, Artificial Sequence
  Guide RNA
gcuguugugggcuuuuguauu

SEQ ID NO: 26280 - RNA, 21 nt, Artificial Sequence
  Guide RNA
ggacaacucaguggaguagcu

SEQ ID NO: 26281 - RNA, 21 nt, Artificial Sequence
  Guide RNA
ggaguagcugcugugggcuuu

SEQ ID NO: 26282 - RNA, 21 nt, Artificial Sequence
  Guide RNA
ggaguagcuguugugggcuuu

SEQ ID NO: 26283 - RNA, 21 nt, Artificial Sequence
  Guide RNA
guagcugcugugggcuuuugu

SEQ ID NO: 26284 - RNA, 21 nt, Artificial Sequence
  Guide RNA
guagcuguugugggcuuuugu

SEQ ID NO: 26285 - RNA, 21 nt, Artificial Sequence
  Guide RNA
guggaguagcugcugugggcu

SEQ ID NO: 26286 - RNA, 21 nt, Artificial Sequence
  Guide RNA
guggaguagcuguugugggcu

SEQ ID NO: 26287 - RNA, 21 nt, Artificial Sequence
  Guide RNA
guugugggcuuuuguauucuu

SEQ ID NO: 26288 - RNA, 21 nt, Artificial Sequence
  Guide RNA
uacaaaagcccacaacagcua

SEQ ID NO: 26289 - RNA, 21 nt, Artificial Sequence
  Guide RNA
uacaaaagcccacagcagcua

SEQ ID NO: 26290 - RNA, 21 nt, Artificial Sequence
  Guide RNA
uagcugcugugggcuuuugua

SEQ ID NO: 26291 - RNA, 21 nt, Artificial Sequence
  Guide RNA
uagcuguugugggcuuuugua

SEQ ID NO: 26292 - RNA, 21 nt, Artificial Sequence
  Guide RNA
ucaguggaguagcugcugugg

SEQ ID NO: 26293 - RNA, 21 nt, Artificial Sequence
  Guide RNA
ucaguggaguagcuguugugg

SEQ ID NO: 26294 - RNA, 21 nt, Artificial Sequence
  Guide RNA
ugcgaagaauacaaaagccca

SEQ ID NO: 26295 - RNA, 21 nt, Artificial Sequence
  Guide RNA
ugcugugggcuuuuguauucu

SEQ ID NO: 26296 - RNA, 21 nt, Artificial Sequence
  Guide RNA
uggacaacucaguggaguagc

SEQ ID NO: 26297 - RNA, 21 nt, Artificial Sequence
  Guide RNA
uggaguagcugcugugggcuu

SEQ ID NO: 26298 - RNA, 21 nt, Artificial Sequence
  Guide RNA
uggaguagcuguugugggcuu

SEQ ID NO: 26299 - RNA, 21 nt, Artificial Sequence
  Guide RNA
uguugugggcuuuuguauucu

SEQ ID NO: 26300 - RNA, 22 nt, Artificial Sequence
  Guide RNA
aaaagcccacaacagcuacucc

SEQ ID NO: 26301 - RNA, 22 nt, Artificial Sequence
  Guide RNA
aaaagcccacagcagcuacucc

SEQ ID NO: 26302 - RNA, 22 nt, Artificial Sequence
  Guide RNA
aaagcccacaacagcuacucca

SEQ ID NO: 26303 - RNA, 22 nt, Artificial Sequence
  Guide RNA
aaagcccacagcagcuacucca

SEQ ID NO: 26304 - RNA, 22 nt, Artificial Sequence
  Guide RNA
aacagcuacuccacugaguugu

SEQ ID NO: 26305 - RNA, 22 nt, Artificial Sequence
  Guide RNA
aacucaguggaguagcugcugu

SEQ ID NO: 26306 - RNA, 22 nt, Artificial Sequence
  Guide RNA
aacucaguggaguagcuguugu

SEQ ID NO: 26307 - RNA, 22 nt, Artificial Sequence
  Guide RNA
aagaauacaaaagcccacaaca

SEQ ID NO: 26308 - RNA, 22 nt, Artificial Sequence
  Guide RNA
aagaauacaaaagcccacagca

SEQ ID NO: 26309 - RNA, 22 nt, Artificial Sequence
  Guide RNA
aagcccacaacagcuacuccac

SEQ ID NO: 26310 - RNA, 22 nt, Artificial Sequence
  Guide RNA
aagcccacagcagcuacuccac

SEQ ID NO: 26311 - RNA, 22 nt, Artificial Sequence
  Guide RNA
aauacaaaagcccacaacagcu

SEQ ID NO: 26312 - RNA, 22 nt, Artificial Sequence
  Guide RNA
aauacaaaagcccacagcagcu

SEQ ID NO: 26313 - RNA, 22 nt, Artificial Sequence
  Guide RNA
acaaaagcccacaacagcuacu

SEQ ID NO: 26314 - RNA, 22 nt, Artificial Sequence
  Guide RNA
acaaaagcccacagcagcuacu

SEQ ID NO: 26315 - RNA, 22 nt, Artificial Sequence
  Guide RNA
acaacagcuacuccacugaguu

SEQ ID NO: 26316 - RNA, 22 nt, Artificial Sequence
  Guide RNA
acaacucaguggaguagcugcu

SEQ ID NO: 26317 - RNA, 22 nt, Artificial Sequence
  Guide RNA
acaacucaguggaguagcuguu

SEQ ID NO: 26318 - RNA, 22 nt, Artificial Sequence
  Guide RNA
acagcagcuacuccacugaguu

SEQ ID NO: 26319 - RNA, 22 nt, Artificial Sequence
  Guide RNA
acucaguggaguagcugcugug

SEQ ID NO: 26320 - RNA, 22 nt, Artificial Sequence
  Guide RNA
acucaguggaguagcuguugug

SEQ ID NO: 26321 - RNA, 22 nt, Artificial Sequence
  Guide RNA
agaauacaaaagcccacaacag

SEQ ID NO: 26322 - RNA, 22 nt, Artificial Sequence
  Guide RNA
agaauacaaaagcccacagcag

SEQ ID NO: 26323 - RNA, 22 nt, Artificial Sequence
  Guide RNA
agcagcuacuccacugaguugu

SEQ ID NO: 26324 - RNA, 22 nt, Artificial Sequence
  Guide RNA
agcccacaacagcuacuccacu

SEQ ID NO: 26325 - RNA, 22 nt, Artificial Sequence
  Guide RNA
agcccacagcagcuacuccacu

SEQ ID NO: 26326 - RNA, 22 nt, Artificial Sequence
  Guide RNA
agcugcugugggcuuuuguauu

SEQ ID NO: 26327 - RNA, 22 nt, Artificial Sequence
  Guide RNA
agcuguugugggcuuuuguauu

SEQ ID NO: 26328 - RNA, 22 nt, Artificial Sequence
  Guide RNA
aguagcugcugugggcuuuugu

SEQ ID NO: 26329 - RNA, 22 nt, Artificial Sequence
  Guide RNA
aguagcuguugugggcuuuugu

SEQ ID NO: 26330 - RNA, 22 nt, Artificial Sequence
  Guide RNA
aguggaguagcugcugugggcu

SEQ ID NO: 26331 - RNA, 22 nt, Artificial Sequence
  Guide RNA
aguggaguagcuguugugggcu

SEQ ID NO: 26332 - RNA, 22 nt, Artificial Sequence
  Guide RNA
auacaaaagcccacaacagcua

SEQ ID NO: 26333 - RNA, 22 nt, Artificial Sequence
  Guide RNA
auacaaaagcccacagcagcua

SEQ ID NO: 26334 - RNA, 22 nt, Artificial Sequence
  Guide RNA
augcgaagaauacaaaagccca

SEQ ID NO: 26335 - RNA, 22 nt, Artificial Sequence
  Guide RNA
auggacaacucaguggaguagc

SEQ ID NO: 26336 - RNA, 22 nt, Artificial Sequence
  Guide RNA
caaaagcccacaacagcuacuc

SEQ ID NO: 26337 - RNA, 22 nt, Artificial Sequence
  Guide RNA
caaaagcccacagcagcuacuc

SEQ ID NO: 26338 - RNA, 22 nt, Artificial Sequence
  Guide RNA
caacagcuacuccacugaguug

SEQ ID NO: 26339 - RNA, 22 nt, Artificial Sequence
  Guide RNA
caacucaguggaguagcugcug

SEQ ID NO: 26340 - RNA, 22 nt, Artificial Sequence
  Guide RNA
caacucaguggaguagcuguug

SEQ ID NO: 26341 - RNA, 22 nt, Artificial Sequence
  Guide RNA
cacaacagcuacuccacugagu

SEQ ID NO: 26342 - RNA, 22 nt, Artificial Sequence
  Guide RNA
cacagcagcuacuccacugagu

SEQ ID NO: 26343 - RNA, 22 nt, Artificial Sequence
  Guide RNA
cagcagcuacuccacugaguug

SEQ ID NO: 26344 - RNA, 22 nt, Artificial Sequence
  Guide RNA
caguggaguagcugcugugggc

SEQ ID NO: 26345 - RNA, 22 nt, Artificial Sequence
  Guide RNA
caguggaguagcuguugugggc

SEQ ID NO: 26346 - RNA, 22 nt, Artificial Sequence
  Guide RNA
cauggacaacucaguggaguag

SEQ ID NO: 26347 - RNA, 22 nt, Artificial Sequence
  Guide RNA
ccacaacagcuacuccacugag

SEQ ID NO: 26348 - RNA, 22 nt, Artificial Sequence
  Guide RNA
ccacagcagcuacuccacugag

SEQ ID NO: 26349 - RNA, 22 nt, Artificial Sequence
  Guide RNA
cccacaacagcuacuccacuga

SEQ ID NO: 26350 - RNA, 22 nt, Artificial Sequence
  Guide RNA
cccacagcagcuacuccacuga

SEQ ID NO: 26351 - RNA, 22 nt, Artificial Sequence
  Guide RNA
cgaagaauacaaaagcccacaa

SEQ ID NO: 26352 - RNA, 22 nt, Artificial Sequence
  Guide RNA
cgaagaauacaaaagcccacag

SEQ ID NO: 26353 - RNA, 22 nt, Artificial Sequence
  Guide RNA
cucaguggaguagcugcugugg

SEQ ID NO: 26354 - RNA, 22 nt, Artificial Sequence
  Guide RNA
cucaguggaguagcuguugugg

SEQ ID NO: 26355 - RNA, 22 nt, Artificial Sequence
  Guide RNA
cugcugugggcuuuuguauucu

SEQ ID NO: 26356 - RNA, 22 nt, Artificial Sequence
  Guide RNA
cuguugugggcuuuuguauucu

SEQ ID NO: 26357 - RNA, 22 nt, Artificial Sequence
  Guide RNA
gaagaauacaaaagcccacaac

SEQ ID NO: 26358 - RNA, 22 nt, Artificial Sequence
  Guide RNA
gaagaauacaaaagcccacagc

SEQ ID NO: 26359 - RNA, 22 nt, Artificial Sequence
  Guide RNA
gaauacaaaagcccacaacagc

SEQ ID NO: 26360 - RNA, 22 nt, Artificial Sequence
  Guide RNA
gaauacaaaagcccacagcagc

SEQ ID NO: 26361 - RNA, 22 nt, Artificial Sequence
  Guide RNA
gacaacucaguggaguagcugc

SEQ ID NO: 26362 - RNA, 22 nt, Artificial Sequence
  Guide RNA
gacaacucaguggaguagcugu

SEQ ID NO: 26363 - RNA, 22 nt, Artificial Sequence
  Guide RNA
gaguagcugcugugggcuuuug

SEQ ID NO: 26364 - RNA, 22 nt, Artificial Sequence
  Guide RNA
gaguagcuguugugggcuuuug

SEQ ID NO: 26365 - RNA, 22 nt, Artificial Sequence
  Guide RNA
gaugcgaagaauacaaaagccc

SEQ ID NO: 26366 - RNA, 22 nt, Artificial Sequence
  Guide RNA
gcccacaacagcuacuccacug

SEQ ID NO: 26367 - RNA, 22 nt, Artificial Sequence
  Guide RNA
gcccacagcagcuacuccacug

SEQ ID NO: 26368 - RNA, 22 nt, Artificial Sequence
  Guide RNA
gcgaagaauacaaaagcccaca

SEQ ID NO: 26369 - RNA, 22 nt, Artificial Sequence
  Guide RNA
gcugcugugggcuuuuguauuc

SEQ ID NO: 26370 - RNA, 22 nt, Artificial Sequence
  Guide RNA
gcugugggcuuuuguauucuuc

SEQ ID NO: 26371 - RNA, 22 nt, Artificial Sequence
  Guide RNA
gcuguugugggcuuuuguauuc

SEQ ID NO: 26372 - RNA, 22 nt, Artificial Sequence
  Guide RNA
ggacaacucaguggaguagcug

SEQ ID NO: 26373 - RNA, 22 nt, Artificial Sequence
  Guide RNA
ggaguagcugcugugggcuuuu

SEQ ID NO: 26374 - RNA, 22 nt, Artificial Sequence
  Guide RNA
ggaguagcuguugugggcuuuu

SEQ ID NO: 26375 - RNA, 22 nt, Artificial Sequence
  Guide RNA
guagcugcugugggcuuuugua

SEQ ID NO: 26376 - RNA, 22 nt, Artificial Sequence
  Guide RNA
guagcuguugugggcuuuugua

SEQ ID NO: 26377 - RNA, 22 nt, Artificial Sequence
  Guide RNA
guggaguagcugcugugggcuu

SEQ ID NO: 26378 - RNA, 22 nt, Artificial Sequence
  Guide RNA
guggaguagcuguugugggcuu

SEQ ID NO: 26379 - RNA, 22 nt, Artificial Sequence
  Guide RNA
guugugggcuuuuguauucuuc

SEQ ID NO: 26380 - RNA, 22 nt, Artificial Sequence
  Guide RNA
uacaaaagcccacaacagcuac

SEQ ID NO: 26381 - RNA, 22 nt, Artificial Sequence
  Guide RNA
uacaaaagcccacagcagcuac

SEQ ID NO: 26382 - RNA, 22 nt, Artificial Sequence
  Guide RNA
uagcugcugugggcuuuuguau

SEQ ID NO: 26383 - RNA, 22 nt, Artificial Sequence
  Guide RNA
uagcuguugugggcuuuuguau

SEQ ID NO: 26384 - RNA, 22 nt, Artificial Sequence
  Guide RNA
ucaguggaguagcugcuguggg

SEQ ID NO: 26385 - RNA, 22 nt, Artificial Sequence
  Guide RNA
ucaguggaguagcuguuguggg

SEQ ID NO: 26386 - RNA, 22 nt, Artificial Sequence
  Guide RNA
ugcgaagaauacaaaagcccac

SEQ ID NO: 26387 - RNA, 22 nt, Artificial Sequence
  Guide RNA
ugcugugggcuuuuguauucuu

SEQ ID NO: 26388 - RNA, 22 nt, Artificial Sequence
  Guide RNA
uggacaacucaguggaguagcu

SEQ ID NO: 26389 - RNA, 22 nt, Artificial Sequence
  Guide RNA
uggaguagcugcugugggcuuu

SEQ ID NO: 26390 - RNA, 22 nt, Artificial Sequence
  Guide RNA
uggaguagcuguugugggcuuu

SEQ ID NO: 26391 - RNA, 22 nt, Artificial Sequence
  Guide RNA
uguugugggcuuuuguauucuu

SEQ ID NO: 26392 - RNA, 20 nt, Artificial Sequence
  Guide RNA
aaaaaagaccuacgguaaaa

SEQ ID NO: 26393 - RNA, 20 nt, Artificial Sequence
  Guide RNA
aaaaaccuacgguaaaaaac

SEQ ID NO: 26394 - RNA, 20 nt, Artificial Sequence
  Guide RNA
aaaaagaccuacgguaaaaa

SEQ ID NO: 26395 - RNA, 20 nt, Artificial Sequence
  Guide RNA
aaaaccuacgguaaaaaacg

SEQ ID NO: 26396 - RNA, 20 nt, Artificial Sequence
  Guide RNA
aaaagaccuacgguaaaaaa

SEQ ID NO: 26397 - RNA, 20 nt, Artificial Sequence
  Guide RNA
aaaccuacgguaaaaaacgu

SEQ ID NO: 26398 - RNA, 20 nt, Artificial Sequence
  Guide RNA
aaagaccuacgguaaaaaac

SEQ ID NO: 26399 - RNA, 20 nt, Artificial Sequence
  Guide RNA
aagaccuacgguaaaaaacg

SEQ ID NO: 26400 - RNA, 20 nt, Artificial Sequence
  Guide RNA
aauggcuggaaugugagaaa

SEQ ID NO: 26401 - RNA, 20 nt, Artificial Sequence
  Guide RNA
aaugugagaaaaaagaccua

SEQ ID NO: 26402 - RNA, 20 nt, Artificial Sequence
  Guide RNA
accguaggucuuuuuucuca

SEQ ID NO: 26403 - RNA, 20 nt, Artificial Sequence
  Guide RNA
acguuuuuuaccguaggucu

SEQ ID NO: 26404 - RNA, 20 nt, Artificial Sequence
  Guide RNA
acguuuuuuaccguagguuu

SEQ ID NO: 26405 - RNA, 20 nt, Artificial Sequence
  Guide RNA
agaaaaaagaccuacgguaa

SEQ ID NO: 26406 - RNA, 20 nt, Artificial Sequence
  Guide RNA
agaccuacgguaaaaaacgu

SEQ ID NO: 26407 - RNA, 20 nt, Artificial Sequence
  Guide RNA
aggucuuuuuucucacauuc

SEQ ID NO: 26408 - RNA, 20 nt, Artificial Sequence
  Guide RNA
agucuacguuuuuuaccgua

SEQ ID NO: 26409 - RNA, 20 nt, Artificial Sequence
  Guide RNA
auggcuggaaugugagaaaa

SEQ ID NO: 26410 - RNA, 20 nt, Artificial Sequence
  Guide RNA
augugagaaaaaagaccuac

SEQ ID NO: 26411 - RNA, 20 nt, Artificial Sequence
  Guide RNA
ccguaggucuuuuuucucac

SEQ ID NO: 26412 - RNA, 20 nt, Artificial Sequence
  Guide RNA
cguaggucuuuuuucucaca

SEQ ID NO: 26413 - RNA, 20 nt, Artificial Sequence
  Guide RNA
cguuuuuuaccguaggucuu

SEQ ID NO: 26414 - RNA, 20 nt, Artificial Sequence
  Guide RNA
cguuuuuuaccguagguuuu

SEQ ID NO: 26415 - RNA, 20 nt, Artificial Sequence
  Guide RNA
cuacguuuuuuaccguaggu

SEQ ID NO: 26416 - RNA, 20 nt, Artificial Sequence
  Guide RNA
cuggaaugugagaaaaaaga

SEQ ID NO: 26417 - RNA, 20 nt, Artificial Sequence
  Guide RNA
gaaaaaagaccuacgguaaa

SEQ ID NO: 26418 - RNA, 20 nt, Artificial Sequence
  Guide RNA
gaaugugagaaaaaagaccu

SEQ ID NO: 26419 - RNA, 20 nt, Artificial Sequence
  Guide RNA
gagaaaaaagaccuacggua

SEQ ID NO: 26420 - RNA, 20 nt, Artificial Sequence
  Guide RNA
gcuggaaugugagaaaaaag

SEQ ID NO: 26421 - RNA, 20 nt, Artificial Sequence
  Guide RNA
ggaaugugagaaaaaagacc

SEQ ID NO: 26422 - RNA, 20 nt, Artificial Sequence
  Guide RNA
ggcuggaaugugagaaaaaa

SEQ ID NO: 26423 - RNA, 20 nt, Artificial Sequence
  Guide RNA
ggucuuuuuucucacauucc

SEQ ID NO: 26424 - RNA, 20 nt, Artificial Sequence
  Guide RNA
guaggucuuuuuucucacau

SEQ ID NO: 26425 - RNA, 20 nt, Artificial Sequence
  Guide RNA
gucuacguuuuuuaccguag

SEQ ID NO: 26426 - RNA, 20 nt, Artificial Sequence
  Guide RNA
gucuuuuuucucacauucca

SEQ ID NO: 26427 - RNA, 20 nt, Artificial Sequence
  Guide RNA
gugagaaaaaagaccuacgg

SEQ ID NO: 26428 - RNA, 20 nt, Artificial Sequence
  Guide RNA
guuuuuuaccguaggucuuu

SEQ ID NO: 26429 - RNA, 20 nt, Artificial Sequence
  Guide RNA
guuuuuuaccguagguuuuu

SEQ ID NO: 26430 - RNA, 20 nt, Artificial Sequence
  Guide RNA
uaccguaggucuuuuuucuc

SEQ ID NO: 26431 - RNA, 20 nt, Artificial Sequence
  Guide RNA
uacguuuuuuaccguagguc

SEQ ID NO: 26432 - RNA, 20 nt, Artificial Sequence
  Guide RNA
uacguuuuuuaccguagguu

SEQ ID NO: 26433 - RNA, 20 nt, Artificial Sequence
  Guide RNA
uaggucuuuuuucucacauu

SEQ ID NO: 26434 - RNA, 20 nt, Artificial Sequence
  Guide RNA
ucuacguuuuuuaccguagg

SEQ ID NO: 26435 - RNA, 20 nt, Artificial Sequence
  Guide RNA
ucuuuuuucucacauuccag

SEQ ID NO: 26436 - RNA, 20 nt, Artificial Sequence
  Guide RNA
ugagaaaaaagaccuacggu

SEQ ID NO: 26437 - RNA, 20 nt, Artificial Sequence
  Guide RNA
uggaaugugagaaaaaagac

SEQ ID NO: 26438 - RNA, 20 nt, Artificial Sequence
  Guide RNA
uggcuggaaugugagaaaaa

SEQ ID NO: 26439 - RNA, 20 nt, Artificial Sequence
  Guide RNA
ugugagaaaaaagaccuacg

SEQ ID NO: 26440 - RNA, 20 nt, Artificial Sequence
  Guide RNA
uuaccguaggucuuuuuucu

SEQ ID NO: 26441 - RNA, 20 nt, Artificial Sequence
  Guide RNA
uuuaccguaggucuuuuuuc

SEQ ID NO: 26442 - RNA, 20 nt, Artificial Sequence
  Guide RNA
uuuuaccguaggucuuuuuu

SEQ ID NO: 26443 - RNA, 20 nt, Artificial Sequence
  Guide RNA
uuuuuaccguaggucuuuuu

SEQ ID NO: 26444 - RNA, 20 nt, Artificial Sequence
  Guide RNA
uuuuuuaccguaggucuuuu

SEQ ID NO: 26445 - RNA, 21 nt, Artificial Sequence
  Guide RNA
aaaaaccuacgguaaaaaacg

SEQ ID NO: 26446 - RNA, 21 nt, Artificial Sequence
  Guide RNA
aaaaccuacgguaaaaaacgu

SEQ ID NO: 26447 - RNA, 21 nt, Artificial Sequence
  Guide RNA
aaaagaccuacgguaaaaaac

SEQ ID NO: 26448 - RNA, 21 nt, Artificial Sequence
  Guide RNA
aaaccuacgguaaaaaacgua

SEQ ID NO: 26449 - RNA, 21 nt, Artificial Sequence
  Guide RNA
aaagaccuacgguaaaaaacg

SEQ ID NO: 26450 - RNA, 21 nt, Artificial Sequence
  Guide RNA
aaauggcuggaaugugagaaa

SEQ ID NO: 26451 - RNA, 21 nt, Artificial Sequence
  Guide RNA
aagaccuacgguaaaaaacgu

SEQ ID NO: 26452 - RNA, 21 nt, Artificial Sequence
  Guide RNA
aauggcuggaaugugagaaaa

SEQ ID NO: 26453 - RNA, 21 nt, Artificial Sequence
  Guide RNA
aaugugagaaaaaagaccuac

SEQ ID NO: 26454 - RNA, 21 nt, Artificial Sequence
  Guide RNA
accguaggucuuuuuucucac

SEQ ID NO: 26455 - RNA, 21 nt, Artificial Sequence
  Guide RNA
acguuuuuuaccguaggucuu

SEQ ID NO: 26456 - RNA, 21 nt, Artificial Sequence
  Guide RNA
acguuuuuuaccguagguuuu

SEQ ID NO: 26457 - RNA, 21 nt, Artificial Sequence
  Guide RNA
agaaaaaagaccuacgguaaa

SEQ ID NO: 26458 - RNA, 21 nt, Artificial Sequence
  Guide RNA
agaccuacgguaaaaaacgua

SEQ ID NO: 26459 - RNA, 21 nt, Artificial Sequence
  Guide RNA
aggucuuuuuucucacauucc

SEQ ID NO: 26460 - RNA, 21 nt, Artificial Sequence
  Guide RNA
agucuacguuuuuuaccguag

SEQ ID NO: 26461 - RNA, 21 nt, Artificial Sequence
  Guide RNA
auggcuggaaugugagaaaaa

SEQ ID NO: 26462 - RNA, 21 nt, Artificial Sequence
  Guide RNA
augugagaaaaaagaccuacg

SEQ ID NO: 26463 - RNA, 21 nt, Artificial Sequence
  Guide RNA
ccguaggucuuuuuucucaca

SEQ ID NO: 26464 - RNA, 21 nt, Artificial Sequence
  Guide RNA
cguaggucuuuuuucucacau

SEQ ID NO: 26465 - RNA, 21 nt, Artificial Sequence
  Guide RNA
cguuuuuuaccguaggucuuu

SEQ ID NO: 26466 - RNA, 21 nt, Artificial Sequence
  Guide RNA
cguuuuuuaccguagguuuuu

SEQ ID NO: 26467 - RNA, 21 nt, Artificial Sequence
  Guide RNA
cuacguuuuuuaccguagguc

SEQ ID NO: 26468 - RNA, 21 nt, Artificial Sequence
  Guide RNA
cuacguuuuuuaccguagguu

SEQ ID NO: 26469 - RNA, 21 nt, Artificial Sequence
  Guide RNA
cuggaaugugagaaaaaagac

SEQ ID NO: 26470 - RNA, 21 nt, Artificial Sequence
  Guide RNA
gaaaaaagaccuacgguaaaa

SEQ ID NO: 26471 - RNA, 21 nt, Artificial Sequence
  Guide RNA
gaaugugagaaaaaagaccua

SEQ ID NO: 26472 - RNA, 21 nt, Artificial Sequence
  Guide RNA
gagaaaaaagaccuacgguaa

SEQ ID NO: 26473 - RNA, 21 nt, Artificial Sequence
  Guide RNA
gcuggaaugugagaaaaaaga

SEQ ID NO: 26474 - RNA, 21 nt, Artificial Sequence
  Guide RNA
ggaaugugagaaaaaagaccu

SEQ ID NO: 26475 - RNA, 21 nt, Artificial Sequence
  Guide RNA
ggcuggaaugugagaaaaaag

SEQ ID NO: 26476 - RNA, 21 nt, Artificial Sequence
  Guide RNA
ggucuuuuuucucacauucca

SEQ ID NO: 26477 - RNA, 21 nt, Artificial Sequence
  Guide RNA
guaggucuuuuuucucacauu

SEQ ID NO: 26478 - RNA, 21 nt, Artificial Sequence
  Guide RNA
gucuacguuuuuuaccguagg

SEQ ID NO: 26479 - RNA, 21 nt, Artificial Sequence
  Guide RNA
gucuuuuuucucacauuccag

SEQ ID NO: 26480 - RNA, 21 nt, Artificial Sequence
  Guide RNA
gugagaaaaaagaccuacggu

SEQ ID NO: 26481 - RNA, 21 nt, Artificial Sequence
  Guide RNA
guuuuuuaccguaggucuuuu

SEQ ID NO: 26482 - RNA, 21 nt, Artificial Sequence
  Guide RNA
uaccguaggucuuuuuucuca

SEQ ID NO: 26483 - RNA, 21 nt, Artificial Sequence
  Guide RNA
uacguuuuuuaccguaggucu

SEQ ID NO: 26484 - RNA, 21 nt, Artificial Sequence
  Guide RNA
uacguuuuuuaccguagguuu

SEQ ID NO: 26485 - RNA, 21 nt, Artificial Sequence
  Guide RNA
uaggucuuuuuucucacauuc

SEQ ID NO: 26486 - RNA, 21 nt, Artificial Sequence
  Guide RNA
uagucuacguuuuuuaccgua

SEQ ID NO: 26487 - RNA, 21 nt, Artificial Sequence
  Guide RNA
ucuacguuuuuuaccguaggu

SEQ ID NO: 26488 - RNA, 21 nt, Artificial Sequence
  Guide RNA
ucuuuuuucucacauuccagc

SEQ ID NO: 26489 - RNA, 21 nt, Artificial Sequence
  Guide RNA
ugagaaaaaagaccuacggua

SEQ ID NO: 26490 - RNA, 21 nt, Artificial Sequence
  Guide RNA
uggaaugugagaaaaaagacc

SEQ ID NO: 26491 - RNA, 21 nt, Artificial Sequence
  Guide RNA
uggcuggaaugugagaaaaaa

SEQ ID NO: 26492 - RNA, 21 nt, Artificial Sequence
  Guide RNA
ugugagaaaaaagaccuacgg

SEQ ID NO: 26493 - RNA, 21 nt, Artificial Sequence
  Guide RNA
uuaccguaggucuuuuuucuc

SEQ ID NO: 26494 - RNA, 21 nt, Artificial Sequence
  Guide RNA
uuuaccguaggucuuuuuucu

SEQ ID NO: 26495 - RNA, 21 nt, Artificial Sequence
  Guide RNA
uuuuaccguaggucuuuuuuc

SEQ ID NO: 26496 - RNA, 22 nt, Artificial Sequence
  Guide RNA
aaaaaaccuacgguaaaaaacg

SEQ ID NO: 26497 - RNA, 22 nt, Artificial Sequence
  Guide RNA
aaaaaccuacgguaaaaaacgu

SEQ ID NO: 26498 - RNA, 22 nt, Artificial Sequence
  Guide RNA
aaaaagaccuacgguaaaaaac

SEQ ID NO: 26499 - RNA, 22 nt, Artificial Sequence
  Guide RNA
aaaaccuacgguaaaaaacgua

SEQ ID NO: 26500 - RNA, 22 nt, Artificial Sequence
  Guide RNA
aaaagaccuacgguaaaaaacg

SEQ ID NO: 26501 - RNA, 22 nt, Artificial Sequence
  Guide RNA
aaaauggcuggaaugugagaaa

SEQ ID NO: 26502 - RNA, 22 nt, Artificial Sequence
  Guide RNA
aaaccuacgguaaaaaacguag

SEQ ID NO: 26503 - RNA, 22 nt, Artificial Sequence
  Guide RNA
aaagaccuacgguaaaaaacgu

SEQ ID NO: 26504 - RNA, 22 nt, Artificial Sequence
  Guide RNA
aaauggcuggaaugugagaaaa

SEQ ID NO: 26505 - RNA, 22 nt, Artificial Sequence
  Guide RNA
aagaccuacgguaaaaaacgua

SEQ ID NO: 26506 - RNA, 22 nt, Artificial Sequence
  Guide RNA
aauggcuggaaugugagaaaaa

SEQ ID NO: 26507 - RNA, 22 nt, Artificial Sequence
  Guide RNA
aaugugagaaaaaagaccuacg

SEQ ID NO: 26508 - RNA, 22 nt, Artificial Sequence
  Guide RNA
accguaggucuuuuuucucaca

SEQ ID NO: 26509 - RNA, 22 nt, Artificial Sequence
  Guide RNA
acguuuuuuaccguaggucuuu

SEQ ID NO: 26510 - RNA, 22 nt, Artificial Sequence
  Guide RNA
acguuuuuuaccguagguuuuu

SEQ ID NO: 26511 - RNA, 22 nt, Artificial Sequence
  Guide RNA
agaaaaaagaccuacgguaaaa

SEQ ID NO: 26512 - RNA, 22 nt, Artificial Sequence
  Guide RNA
agaccuacgguaaaaaacguag

SEQ ID NO: 26513 - RNA, 22 nt, Artificial Sequence
  Guide RNA
aggucuuuuuucucacauucca

SEQ ID NO: 26514 - RNA, 22 nt, Artificial Sequence
  Guide RNA
agucuacguuuuuuaccguagg

SEQ ID NO: 26515 - RNA, 22 nt, Artificial Sequence
  Guide RNA
auagucuacguuuuuuaccgua

SEQ ID NO: 26516 - RNA, 22 nt, Artificial Sequence
  Guide RNA
auggcuggaaugugagaaaaaa

SEQ ID NO: 26517 - RNA, 22 nt, Artificial Sequence
  Guide RNA
augugagaaaaaagaccuacgg

SEQ ID NO: 26518 - RNA, 22 nt, Artificial Sequence
  Guide RNA
ccguaggucuuuuuucucacau

SEQ ID NO: 26519 - RNA, 22 nt, Artificial Sequence
  Guide RNA
cguaggucuuuuuucucacauu

SEQ ID NO: 26520 - RNA, 22 nt, Artificial Sequence
  Guide RNA
cguuuuuuaccguaggucuuuu

SEQ ID NO: 26521 - RNA, 22 nt, Artificial Sequence
  Guide RNA
cguuuuuuaccguagguuuuuu

SEQ ID NO: 26522 - RNA, 22 nt, Artificial Sequence
  Guide RNA
cuacguuuuuuaccguaggucu

SEQ ID NO: 26523 - RNA, 22 nt, Artificial Sequence
  Guide RNA
cuacguuuuuuaccguagguuu

SEQ ID NO: 26524 - RNA, 22 nt, Artificial Sequence
  Guide RNA
cuggaaugugagaaaaaagacc

SEQ ID NO: 26525 - RNA, 22 nt, Artificial Sequence
  Guide RNA
gaaaaaagaccuacgguaaaaa

SEQ ID NO: 26526 - RNA, 22 nt, Artificial Sequence
  Guide RNA
gaaugugagaaaaaagaccuac

SEQ ID NO: 26527 - RNA, 22 nt, Artificial Sequence
  Guide RNA
gagaaaaaagaccuacgguaaa

SEQ ID NO: 26528 - RNA, 22 nt, Artificial Sequence
  Guide RNA
gcuggaaugugagaaaaaagac

SEQ ID NO: 26529 - RNA, 22 nt, Artificial Sequence
  Guide RNA
ggaaugugagaaaaaagaccua

SEQ ID NO: 26530 - RNA, 22 nt, Artificial Sequence
  Guide RNA
ggcuggaaugugagaaaaaaga

SEQ ID NO: 26531 - RNA, 22 nt, Artificial Sequence
  Guide RNA
ggucuuuuuucucacauuccag

SEQ ID NO: 26532 - RNA, 22 nt, Artificial Sequence
  Guide RNA
guaggucuuuuuucucacauuc

SEQ ID NO: 26533 - RNA, 22 nt, Artificial Sequence
  Guide RNA
gucuacguuuuuuaccguaggu

SEQ ID NO: 26534 - RNA, 22 nt, Artificial Sequence
  Guide RNA
gucuuuuuucucacauuccagc

SEQ ID NO: 26535 - RNA, 22 nt, Artificial Sequence
  Guide RNA
gugagaaaaaagaccuacggua

SEQ ID NO: 26536 - RNA, 22 nt, Artificial Sequence
  Guide RNA
guuuuuuaccguaggucuuuuu

SEQ ID NO: 26537 - RNA, 22 nt, Artificial Sequence
  Guide RNA
uaccguaggucuuuuuucucac

SEQ ID NO: 26538 - RNA, 22 nt, Artificial Sequence
  Guide RNA
uacguuuuuuaccguaggucuu

SEQ ID NO: 26539 - RNA, 22 nt, Artificial Sequence
  Guide RNA
uacguuuuuuaccguagguuuu

SEQ ID NO: 26540 - RNA, 22 nt, Artificial Sequence
  Guide RNA
uaggucuuuuuucucacauucc

SEQ ID NO: 26541 - RNA, 22 nt, Artificial Sequence
  Guide RNA
uagucuacguuuuuuaccguag

SEQ ID NO: 26542 - RNA, 22 nt, Artificial Sequence
  Guide RNA
ucuacguuuuuuaccguagguc

SEQ ID NO: 26543 - RNA, 22 nt, Artificial Sequence
  Guide RNA
ucuacguuuuuuaccguagguu

SEQ ID NO: 26544 - RNA, 22 nt, Artificial Sequence
  Guide RNA
ucuuuuuucucacauuccagcc

SEQ ID NO: 26545 - RNA, 22 nt, Artificial Sequence
  Guide RNA
ugagaaaaaagaccuacgguaa

SEQ ID NO: 26546 - RNA, 22 nt, Artificial Sequence
  Guide RNA
uggaaugugagaaaaaagaccu

SEQ ID NO: 26547 - RNA, 22 nt, Artificial Sequence
  Guide RNA
uggcuggaaugugagaaaaaag

SEQ ID NO: 26548 - RNA, 22 nt, Artificial Sequence
  Guide RNA
ugugagaaaaaagaccuacggu

SEQ ID NO: 26549 - RNA, 22 nt, Artificial Sequence
  Guide RNA
uuaccguaggucuuuuuucuca

SEQ ID NO: 26550 - RNA, 22 nt, Artificial Sequence
  Guide RNA
uuuaccguaggucuuuuuucuc

SEQ ID NO: 26551 - RNA, 22 nt, Artificial Sequence
  Guide RNA
uuuuaccguaggucuuuuuucu

SEQ ID NO: 26552 - RNA, 22 nt, Artificial Sequence
  Guide RNA
uuuuuaccguaggucuuuuuuc

SEQ ID NO: 26553 - RNA, 20 nt, Artificial Sequence
  Guide RNA
accccguggaucuagcaagc

SEQ ID NO: 26554 - RNA, 20 nt, Artificial Sequence
  Guide RNA
acgccguggaucuagcaagc

SEQ ID NO: 26555 - RNA, 20 nt, Artificial Sequence
  Guide RNA
acggcguaggaaacugcuca

SEQ ID NO: 26556 - RNA, 20 nt, Artificial Sequence
  Guide RNA
acgggguaggaaacugcuca

SEQ ID NO: 26557 - RNA, 20 nt, Artificial Sequence
  Guide RNA
agauccacggcguaggaaac

SEQ ID NO: 26558 - RNA, 20 nt, Artificial Sequence
  Guide RNA
agauccacgggguaggaaac

SEQ ID NO: 26559 - RNA, 20 nt, Artificial Sequence
  Guide RNA
agcaguuuccuaccccgugg

SEQ ID NO: 26560 - RNA, 20 nt, Artificial Sequence
  Guide RNA
agcaguuuccuacgccgugg

SEQ ID NO: 26561 - RNA, 20 nt, Artificial Sequence
  Guide RNA
agugagcaguuuccuacccc

SEQ ID NO: 26562 - RNA, 20 nt, Artificial Sequence
  Guide RNA
agugagcaguuuccuacgcc

SEQ ID NO: 26563 - RNA, 20 nt, Artificial Sequence
  Guide RNA
aguuuccuaccccguggauc

SEQ ID NO: 26564 - RNA, 20 nt, Artificial Sequence
  Guide RNA
aguuuccuacgccguggauc

SEQ ID NO: 26565 - RNA, 20 nt, Artificial Sequence
  Guide RNA
auccacggcguaggaaacug

SEQ ID NO: 26566 - RNA, 20 nt, Artificial Sequence
  Guide RNA
auccacgggguaggaaacug

SEQ ID NO: 26567 - RNA, 20 nt, Artificial Sequence
  Guide RNA
augcugagugagcaguuucc

SEQ ID NO: 26568 - RNA, 20 nt, Artificial Sequence
  Guide RNA
auggcuugcuagauccacgg

SEQ ID NO: 26569 - RNA, 20 nt, Artificial Sequence
  Guide RNA
cacggcguaggaaacugcuc

SEQ ID NO: 26570 - RNA, 20 nt, Artificial Sequence
  Guide RNA
cacgggguaggaaacugcuc

SEQ ID NO: 26571 - RNA, 20 nt, Artificial Sequence
  Guide RNA
caguuuccuaccccguggau

SEQ ID NO: 26572 - RNA, 20 nt, Artificial Sequence
  Guide RNA
caguuuccuacgccguggau

SEQ ID NO: 26573 - RNA, 20 nt, Artificial Sequence
  Guide RNA
cauggcuugcuagauccacg

SEQ ID NO: 26574 - RNA, 20 nt, Artificial Sequence
  Guide RNA
ccacggcguaggaaacugcu

SEQ ID NO: 26575 - RNA, 20 nt, Artificial Sequence
  Guide RNA
ccacgggguaggaaacugcu

SEQ ID NO: 26576 - RNA, 20 nt, Artificial Sequence
  Guide RNA
ccauggcuugcuagauccac

SEQ ID NO: 26577 - RNA, 20 nt, Artificial Sequence
  Guide RNA
ccccguggaucuagcaagcc

SEQ ID NO: 26578 - RNA, 20 nt, Artificial Sequence
  Guide RNA
ccuaccccguggaucuagca

SEQ ID NO: 26579 - RNA, 20 nt, Artificial Sequence
  Guide RNA
ccuacgccguggaucuagca

SEQ ID NO: 26580 - RNA, 20 nt, Artificial Sequence
  Guide RNA
cgccguggaucuagcaagcc

SEQ ID NO: 26581 - RNA, 20 nt, Artificial Sequence
  Guide RNA
cggcguaggaaacugcucac

SEQ ID NO: 26582 - RNA, 20 nt, Artificial Sequence
  Guide RNA
cgggguaggaaacugcucac

SEQ ID NO: 26583 - RNA, 20 nt, Artificial Sequence
  Guide RNA
cuaccccguggaucuagcaa

SEQ ID NO: 26584 - RNA, 20 nt, Artificial Sequence
  Guide RNA
cuacgccguggaucuagcaa

SEQ ID NO: 26585 - RNA, 20 nt, Artificial Sequence
  Guide RNA
cuagauccacggcguaggaa

SEQ ID NO: 26586 - RNA, 20 nt, Artificial Sequence
  Guide RNA
cuagauccacgggguaggaa

SEQ ID NO: 26587 - RNA, 20 nt, Artificial Sequence
  Guide RNA
cugagugagcaguuuccuac

SEQ ID NO: 26588 - RNA, 20 nt, Artificial Sequence
  Guide RNA
cuugcuagauccacggcgua

SEQ ID NO: 26589 - RNA, 20 nt, Artificial Sequence
  Guide RNA
cuugcuagauccacggggua

SEQ ID NO: 26590 - RNA, 20 nt, Artificial Sequence
  Guide RNA
gagcaguuuccuaccccgug

SEQ ID NO: 26591 - RNA, 20 nt, Artificial Sequence
  Guide RNA
gagcaguuuccuacgccgug

SEQ ID NO: 26592 - RNA, 20 nt, Artificial Sequence
  Guide RNA
gagugagcaguuuccuaccc

SEQ ID NO: 26593 - RNA, 20 nt, Artificial Sequence
  Guide RNA
gagugagcaguuuccuacgc

SEQ ID NO: 26594 - RNA, 20 nt, Artificial Sequence
  Guide RNA
gauccacggcguaggaaacu

SEQ ID NO: 26595 - RNA, 20 nt, Artificial Sequence
  Guide RNA
gauccacgggguaggaaacu

SEQ ID NO: 26596 - RNA, 20 nt, Artificial Sequence
  Guide RNA
gcaguuuccuaccccgugga

SEQ ID NO: 26597 - RNA, 20 nt, Artificial Sequence
  Guide RNA
gcaguuuccuacgccgugga

SEQ ID NO: 26598 - RNA, 20 nt, Artificial Sequence
  Guide RNA
gcguaggaaacugcucacuc

SEQ ID NO: 26599 - RNA, 20 nt, Artificial Sequence
  Guide RNA
gcuagauccacggcguagga

SEQ ID NO: 26600 - RNA, 20 nt, Artificial Sequence
  Guide RNA
gcuagauccacgggguagga

SEQ ID NO: 26601 - RNA, 20 nt, Artificial Sequence
  Guide RNA
gcugagugagcaguuuccua

SEQ ID NO: 26602 - RNA, 20 nt, Artificial Sequence
  Guide RNA
gcuugcuagauccacggcgu

SEQ ID NO: 26603 - RNA, 20 nt, Artificial Sequence
  Guide RNA
gcuugcuagauccacggggu

SEQ ID NO: 26604 - RNA, 20 nt, Artificial Sequence
  Guide RNA
ggcguaggaaacugcucacu

SEQ ID NO: 26605 - RNA, 20 nt, Artificial Sequence
  Guide RNA
ggcuugcuagauccacggcg

SEQ ID NO: 26606 - RNA, 20 nt, Artificial Sequence
  Guide RNA
ggcuugcuagauccacgggg

SEQ ID NO: 26607 - RNA, 20 nt, Artificial Sequence
  Guide RNA
gggguaggaaacugcucacu

SEQ ID NO: 26608 - RNA, 20 nt, Artificial Sequence
  Guide RNA
ggguaggaaacugcucacuc

SEQ ID NO: 26609 - RNA, 20 nt, Artificial Sequence
  Guide RNA
gugagcaguuuccuaccccg

SEQ ID NO: 26610 - RNA, 20 nt, Artificial Sequence
  Guide RNA
gugagcaguuuccuacgccg

SEQ ID NO: 26611 - RNA, 20 nt, Artificial Sequence
  Guide RNA
guuuccuaccccguggaucu

SEQ ID NO: 26612 - RNA, 20 nt, Artificial Sequence
  Guide RNA
guuuccuacgccguggaucu

SEQ ID NO: 26613 - RNA, 20 nt, Artificial Sequence
  Guide RNA
uaccccguggaucuagcaag

SEQ ID NO: 26614 - RNA, 20 nt, Artificial Sequence
  Guide RNA
uacgccguggaucuagcaag

SEQ ID NO: 26615 - RNA, 20 nt, Artificial Sequence
  Guide RNA
uagauccacggcguaggaaa

SEQ ID NO: 26616 - RNA, 20 nt, Artificial Sequence
  Guide RNA
uagauccacgggguaggaaa

SEQ ID NO: 26617 - RNA, 20 nt, Artificial Sequence
  Guide RNA
uccacggcguaggaaacugc

SEQ ID NO: 26618 - RNA, 20 nt, Artificial Sequence
  Guide RNA
uccacgggguaggaaacugc

SEQ ID NO: 26619 - RNA, 20 nt, Artificial Sequence
  Guide RNA
uccauggcuugcuagaucca

SEQ ID NO: 26620 - RNA, 20 nt, Artificial Sequence
  Guide RNA
uccuaccccguggaucuagc

SEQ ID NO: 26621 - RNA, 20 nt, Artificial Sequence
  Guide RNA
uccuacgccguggaucuagc

SEQ ID NO: 26622 - RNA, 20 nt, Artificial Sequence
  Guide RNA
ugagcaguuuccuaccccgu

SEQ ID NO: 26623 - RNA, 20 nt, Artificial Sequence
  Guide RNA
ugagcaguuuccuacgccgu

SEQ ID NO: 26624 - RNA, 20 nt, Artificial Sequence
  Guide RNA
ugagugagcaguuuccuacc

SEQ ID NO: 26625 - RNA, 20 nt, Artificial Sequence
  Guide RNA
ugagugagcaguuuccuacg

SEQ ID NO: 26626 - RNA, 20 nt, Artificial Sequence
  Guide RNA
ugcuagauccacggcguagg

SEQ ID NO: 26627 - RNA, 20 nt, Artificial Sequence
  Guide RNA
ugcuagauccacgggguagg

SEQ ID NO: 26628 - RNA, 20 nt, Artificial Sequence
  Guide RNA
ugcugagugagcaguuuccu

SEQ ID NO: 26629 - RNA, 20 nt, Artificial Sequence
  Guide RNA
uggcuugcuagauccacggc

SEQ ID NO: 26630 - RNA, 20 nt, Artificial Sequence
  Guide RNA
uggcuugcuagauccacggg

SEQ ID NO: 26631 - RNA, 20 nt, Artificial Sequence
  Guide RNA
uuccuaccccguggaucuag

SEQ ID NO: 26632 - RNA, 20 nt, Artificial Sequence
  Guide RNA
uuccuacgccguggaucuag

SEQ ID NO: 26633 - RNA, 20 nt, Artificial Sequence
  Guide RNA
uugcuagauccacggcguag

SEQ ID NO: 26634 - RNA, 20 nt, Artificial Sequence
  Guide RNA
uugcuagauccacgggguag

SEQ ID NO: 26635 - RNA, 20 nt, Artificial Sequence
  Guide RNA
uuuccuaccccguggaucua

SEQ ID NO: 26636 - RNA, 20 nt, Artificial Sequence
  Guide RNA
uuuccuacgccguggaucua

SEQ ID NO: 26637 - RNA, 21 nt, Artificial Sequence
  Guide RNA
accccguggaucuagcaagcc

SEQ ID NO: 26638 - RNA, 21 nt, Artificial Sequence
  Guide RNA
acgccguggaucuagcaagcc

SEQ ID NO: 26639 - RNA, 21 nt, Artificial Sequence
  Guide RNA
acggcguaggaaacugcucac

SEQ ID NO: 26640 - RNA, 21 nt, Artificial Sequence
  Guide RNA
acgggguaggaaacugcucac

SEQ ID NO: 26641 - RNA, 21 nt, Artificial Sequence
  Guide RNA
agauccacggcguaggaaacu

SEQ ID NO: 26642 - RNA, 21 nt, Artificial Sequence
  Guide RNA
agauccacgggguaggaaacu

SEQ ID NO: 26643 - RNA, 21 nt, Artificial Sequence
  Guide RNA
agcaguuuccuaccccgugga

SEQ ID NO: 26644 - RNA, 21 nt, Artificial Sequence
  Guide RNA
agcaguuuccuacgccgugga

SEQ ID NO: 26645 - RNA, 21 nt, Artificial Sequence
  Guide RNA
agugagcaguuuccuaccccg

SEQ ID NO: 26646 - RNA, 21 nt, Artificial Sequence
  Guide RNA
agugagcaguuuccuacgccg

SEQ ID NO: 26647 - RNA, 21 nt, Artificial Sequence
  Guide RNA
aguuuccuaccccguggaucu

SEQ ID NO: 26648 - RNA, 21 nt, Artificial Sequence
  Guide RNA
aguuuccuacgccguggaucu

SEQ ID NO: 26649 - RNA, 21 nt, Artificial Sequence
  Guide RNA
auccacggcguaggaaacugc

SEQ ID NO: 26650 - RNA, 21 nt, Artificial Sequence
  Guide RNA
auccacgggguaggaaacugc

SEQ ID NO: 26651 - RNA, 21 nt, Artificial Sequence
  Guide RNA
augcugagugagcaguuuccu

SEQ ID NO: 26652 - RNA, 21 nt, Artificial Sequence
  Guide RNA
auggcuugcuagauccacggc

SEQ ID NO: 26653 - RNA, 21 nt, Artificial Sequence
  Guide RNA
auggcuugcuagauccacggg

SEQ ID NO: 26654 - RNA, 21 nt, Artificial Sequence
  Guide RNA
cacggcguaggaaacugcuca

SEQ ID NO: 26655 - RNA, 21 nt, Artificial Sequence
  Guide RNA
cacgggguaggaaacugcuca

SEQ ID NO: 26656 - RNA, 21 nt, Artificial Sequence
  Guide RNA
caguuuccuaccccguggauc

SEQ ID NO: 26657 - RNA, 21 nt, Artificial Sequence
  Guide RNA
caguuuccuacgccguggauc

SEQ ID NO: 26658 - RNA, 21 nt, Artificial Sequence
  Guide RNA
cauggcuugcuagauccacgg

SEQ ID NO: 26659 - RNA, 21 nt, Artificial Sequence
  Guide RNA
ccacggcguaggaaacugcuc

SEQ ID NO: 26660 - RNA, 21 nt, Artificial Sequence
  Guide RNA
ccacgggguaggaaacugcuc

SEQ ID NO: 26661 - RNA, 21 nt, Artificial Sequence
  Guide RNA
ccauggcuugcuagauccacg

SEQ ID NO: 26662 - RNA, 21 nt, Artificial Sequence
  Guide RNA
ccccguggaucuagcaagcca

SEQ ID NO: 26663 - RNA, 21 nt, Artificial Sequence
  Guide RNA
ccuaccccguggaucuagcaa

SEQ ID NO: 26664 - RNA, 21 nt, Artificial Sequence
  Guide RNA
ccuacgccguggaucuagcaa

SEQ ID NO: 26665 - RNA, 21 nt, Artificial Sequence
  Guide RNA
cgccguggaucuagcaagcca

SEQ ID NO: 26666 - RNA, 21 nt, Artificial Sequence
  Guide RNA
cggcguaggaaacugcucacu

SEQ ID NO: 26667 - RNA, 21 nt, Artificial Sequence
  Guide RNA
cgggguaggaaacugcucacu

SEQ ID NO: 26668 - RNA, 21 nt, Artificial Sequence
  Guide RNA
cuaccccguggaucuagcaag

SEQ ID NO: 26669 - RNA, 21 nt, Artificial Sequence
  Guide RNA
cuacgccguggaucuagcaag

SEQ ID NO: 26670 - RNA, 21 nt, Artificial Sequence
  Guide RNA
cuagauccacggcguaggaaa

SEQ ID NO: 26671 - RNA, 21 nt, Artificial Sequence
  Guide RNA
cuagauccacgggguaggaaa

SEQ ID NO: 26672 - RNA, 21 nt, Artificial Sequence
  Guide RNA
cuccauggcuugcuagaucca

SEQ ID NO: 26673 - RNA, 21 nt, Artificial Sequence
  Guide RNA
cugagugagcaguuuccuacc

SEQ ID NO: 26674 - RNA, 21 nt, Artificial Sequence
  Guide RNA
cugagugagcaguuuccuacg

SEQ ID NO: 26675 - RNA, 21 nt, Artificial Sequence
  Guide RNA
cuugcuagauccacggcguag

SEQ ID NO: 26676 - RNA, 21 nt, Artificial Sequence
  Guide RNA
cuugcuagauccacgggguag

SEQ ID NO: 26677 - RNA, 21 nt, Artificial Sequence
  Guide RNA
gagcaguuuccuaccccgugg

SEQ ID NO: 26678 - RNA, 21 nt, Artificial Sequence
  Guide RNA
gagcaguuuccuacgccgugg

SEQ ID NO: 26679 - RNA, 21 nt, Artificial Sequence
  Guide RNA
gagugagcaguuuccuacccc

SEQ ID NO: 26680 - RNA, 21 nt, Artificial Sequence
  Guide RNA
gagugagcaguuuccuacgcc

SEQ ID NO: 26681 - RNA, 21 nt, Artificial Sequence
  Guide RNA
gauccacggcguaggaaacug

SEQ ID NO: 26682 - RNA, 21 nt, Artificial Sequence
  Guide RNA
gauccacgggguaggaaacug

SEQ ID NO: 26683 - RNA, 21 nt, Artificial Sequence
  Guide RNA
gaugcugagugagcaguuucc

SEQ ID NO: 26684 - RNA, 21 nt, Artificial Sequence
  Guide RNA
gcaguuuccuaccccguggau

SEQ ID NO: 26685 - RNA, 21 nt, Artificial Sequence
  Guide RNA
gcaguuuccuacgccguggau

SEQ ID NO: 26686 - RNA, 21 nt, Artificial Sequence
  Guide RNA
gcguaggaaacugcucacuca

SEQ ID NO: 26687 - RNA, 21 nt, Artificial Sequence
  Guide RNA
gcuagauccacggcguaggaa

SEQ ID NO: 26688 - RNA, 21 nt, Artificial Sequence
  Guide RNA
gcuagauccacgggguaggaa

SEQ ID NO: 26689 - RNA, 21 nt, Artificial Sequence
  Guide RNA
gcugagugagcaguuuccuac

SEQ ID NO: 26690 - RNA, 21 nt, Artificial Sequence
  Guide RNA
gcuugcuagauccacggcgua

SEQ ID NO: 26691 - RNA, 21 nt, Artificial Sequence
  Guide RNA
gcuugcuagauccacggggua

SEQ ID NO: 26692 - RNA, 21 nt, Artificial Sequence
  Guide RNA
ggcguaggaaacugcucacuc

SEQ ID NO: 26693 - RNA, 21 nt, Artificial Sequence
  Guide RNA
ggcuugcuagauccacggcgu

SEQ ID NO: 26694 - RNA, 21 nt, Artificial Sequence
  Guide RNA
ggcuugcuagauccacggggu

SEQ ID NO: 26695 - RNA, 21 nt, Artificial Sequence
  Guide RNA
gggguaggaaacugcucacuc

SEQ ID NO: 26696 - RNA, 21 nt, Artificial Sequence
  Guide RNA
ggguaggaaacugcucacuca

SEQ ID NO: 26697 - RNA, 21 nt, Artificial Sequence
  Guide RNA
gugagcaguuuccuaccccgu

SEQ ID NO: 26698 - RNA, 21 nt, Artificial Sequence
  Guide RNA
gugagcaguuuccuacgccgu

SEQ ID NO: 26699 - RNA, 21 nt, Artificial Sequence
  Guide RNA
guuuccuaccccguggaucua

SEQ ID NO: 26700 - RNA, 21 nt, Artificial Sequence
  Guide RNA
guuuccuacgccguggaucua

SEQ ID NO: 26701 - RNA, 21 nt, Artificial Sequence
  Guide RNA
uaccccguggaucuagcaagc

SEQ ID NO: 26702 - RNA, 21 nt, Artificial Sequence
  Guide RNA
uacgccguggaucuagcaagc

SEQ ID NO: 26703 - RNA, 21 nt, Artificial Sequence
  Guide RNA
uagauccacggcguaggaaac

SEQ ID NO: 26704 - RNA, 21 nt, Artificial Sequence
  Guide RNA
uagauccacgggguaggaaac

SEQ ID NO: 26705 - RNA, 21 nt, Artificial Sequence
  Guide RNA
uccacggcguaggaaacugcu

SEQ ID NO: 26706 - RNA, 21 nt, Artificial Sequence
  Guide RNA
uccacgggguaggaaacugcu

SEQ ID NO: 26707 - RNA, 21 nt, Artificial Sequence
  Guide RNA
uccauggcuugcuagauccac

SEQ ID NO: 26708 - RNA, 21 nt, Artificial Sequence
  Guide RNA
uccuaccccguggaucuagca

SEQ ID NO: 26709 - RNA, 21 nt, Artificial Sequence
  Guide RNA
uccuacgccguggaucuagca

SEQ ID NO: 26710 - RNA, 21 nt, Artificial Sequence
  Guide RNA
ugagcaguuuccuaccccgug

SEQ ID NO: 26711 - RNA, 21 nt, Artificial Sequence
  Guide RNA
ugagcaguuuccuacgccgug

SEQ ID NO: 26712 - RNA, 21 nt, Artificial Sequence
  Guide RNA
ugagugagcaguuuccuaccc

SEQ ID NO: 26713 - RNA, 21 nt, Artificial Sequence
  Guide RNA
ugagugagcaguuuccuacgc

SEQ ID NO: 26714 - RNA, 21 nt, Artificial Sequence
  Guide RNA
ugcuagauccacggcguagga

SEQ ID NO: 26715 - RNA, 21 nt, Artificial Sequence
  Guide RNA
ugcuagauccacgggguagga

SEQ ID NO: 26716 - RNA, 21 nt, Artificial Sequence
  Guide RNA
ugcugagugagcaguuuccua

SEQ ID NO: 26717 - RNA, 21 nt, Artificial Sequence
  Guide RNA
uggcuugcuagauccacggcg

SEQ ID NO: 26718 - RNA, 21 nt, Artificial Sequence
  Guide RNA
uggcuugcuagauccacgggg

SEQ ID NO: 26719 - RNA, 21 nt, Artificial Sequence
  Guide RNA
uuccuaccccguggaucuagc

SEQ ID NO: 26720 - RNA, 21 nt, Artificial Sequence
  Guide RNA
uuccuacgccguggaucuagc

SEQ ID NO: 26721 - RNA, 21 nt, Artificial Sequence
  Guide RNA
uugcuagauccacggcguagg

SEQ ID NO: 26722 - RNA, 21 nt, Artificial Sequence
  Guide RNA
uugcuagauccacgggguagg

SEQ ID NO: 26723 - RNA, 21 nt, Artificial Sequence
  Guide RNA
uuuccuaccccguggaucuag

SEQ ID NO: 26724 - RNA, 21 nt, Artificial Sequence
  Guide RNA
uuuccuacgccguggaucuag

SEQ ID NO: 26725 - RNA, 22 nt, Artificial Sequence
  Guide RNA
accccguggaucuagcaagcca

SEQ ID NO: 26726 - RNA, 22 nt, Artificial Sequence
  Guide RNA
acgccguggaucuagcaagcca

SEQ ID NO: 26727 - RNA, 22 nt, Artificial Sequence
  Guide RNA
acggcguaggaaacugcucacu

SEQ ID NO: 26728 - RNA, 22 nt, Artificial Sequence
  Guide RNA
acgggguaggaaacugcucacu

SEQ ID NO: 26729 - RNA, 22 nt, Artificial Sequence
  Guide RNA
agauccacggcguaggaaacug

SEQ ID NO: 26730 - RNA, 22 nt, Artificial Sequence
  Guide RNA
agauccacgggguaggaaacug

SEQ ID NO: 26731 - RNA, 22 nt, Artificial Sequence
  Guide RNA
agcaguuuccuaccccguggau

SEQ ID NO: 26732 - RNA, 22 nt, Artificial Sequence
  Guide RNA
agcaguuuccuacgccguggau

SEQ ID NO: 26733 - RNA, 22 nt, Artificial Sequence
  Guide RNA
agugagcaguuuccuaccccgu

SEQ ID NO: 26734 - RNA, 22 nt, Artificial Sequence
  Guide RNA
agugagcaguuuccuacgccgu

SEQ ID NO: 26735 - RNA, 22 nt, Artificial Sequence
  Guide RNA
aguuuccuaccccguggaucua

SEQ ID NO: 26736 - RNA, 22 nt, Artificial Sequence
  Guide RNA
aguuuccuacgccguggaucua

SEQ ID NO: 26737 - RNA, 22 nt, Artificial Sequence
  Guide RNA
auccacggcguaggaaacugcu

SEQ ID NO: 26738 - RNA, 22 nt, Artificial Sequence
  Guide RNA
auccacgggguaggaaacugcu

SEQ ID NO: 26739 - RNA, 22 nt, Artificial Sequence
  Guide RNA
augcugagugagcaguuuccua

SEQ ID NO: 26740 - RNA, 22 nt, Artificial Sequence
  Guide RNA
auggcuugcuagauccacggcg

SEQ ID NO: 26741 - RNA, 22 nt, Artificial Sequence
  Guide RNA
auggcuugcuagauccacgggg

SEQ ID NO: 26742 - RNA, 22 nt, Artificial Sequence
  Guide RNA
cacggcguaggaaacugcucac

SEQ ID NO: 26743 - RNA, 22 nt, Artificial Sequence
  Guide RNA
cacgggguaggaaacugcucac

SEQ ID NO: 26744 - RNA, 22 nt, Artificial Sequence
  Guide RNA
caguuuccuaccccguggaucu

SEQ ID NO: 26745 - RNA, 22 nt, Artificial Sequence
  Guide RNA
caguuuccuacgccguggaucu

SEQ ID NO: 26746 - RNA, 22 nt, Artificial Sequence
  Guide RNA
cauggcuugcuagauccacggc

SEQ ID NO: 26747 - RNA, 22 nt, Artificial Sequence
  Guide RNA
cauggcuugcuagauccacggg

SEQ ID NO: 26748 - RNA, 22 nt, Artificial Sequence
  Guide RNA
ccacggcguaggaaacugcuca

SEQ ID NO: 26749 - RNA, 22 nt, Artificial Sequence
  Guide RNA
ccacgggguaggaaacugcuca

SEQ ID NO: 26750 - RNA, 22 nt, Artificial Sequence
  Guide RNA
ccauggcuugcuagauccacgg

SEQ ID NO: 26751 - RNA, 22 nt, Artificial Sequence
  Guide RNA
ccccguggaucuagcaagccau

SEQ ID NO: 26752 - RNA, 22 nt, Artificial Sequence
  Guide RNA
ccuaccccguggaucuagcaag

SEQ ID NO: 26753 - RNA, 22 nt, Artificial Sequence
  Guide RNA
ccuacgccguggaucuagcaag

SEQ ID NO: 26754 - RNA, 22 nt, Artificial Sequence
  Guide RNA
cgccguggaucuagcaagccau

SEQ ID NO: 26755 - RNA, 22 nt, Artificial Sequence
  Guide RNA
cggcguaggaaacugcucacuc

SEQ ID NO: 26756 - RNA, 22 nt, Artificial Sequence
  Guide RNA
cgggguaggaaacugcucacuc

SEQ ID NO: 26757 - RNA, 22 nt, Artificial Sequence
  Guide RNA
cuaccccguggaucuagcaagc

SEQ ID NO: 26758 - RNA, 22 nt, Artificial Sequence
  Guide RNA
cuacgccguggaucuagcaagc

SEQ ID NO: 26759 - RNA, 22 nt, Artificial Sequence
  Guide RNA
cuagauccacggcguaggaaac

SEQ ID NO: 26760 - RNA, 22 nt, Artificial Sequence
  Guide RNA
cuagauccacgggguaggaaac

SEQ ID NO: 26761 - RNA, 22 nt, Artificial Sequence
  Guide RNA
cuccauggcuugcuagauccac

SEQ ID NO: 26762 - RNA, 22 nt, Artificial Sequence
  Guide RNA
cugagugagcaguuuccuaccc

SEQ ID NO: 26763 - RNA, 22 nt, Artificial Sequence
  Guide RNA
cugagugagcaguuuccuacgc

SEQ ID NO: 26764 - RNA, 22 nt, Artificial Sequence
  Guide RNA
cuugcuagauccacggcguagg

SEQ ID NO: 26765 - RNA, 22 nt, Artificial Sequence
  Guide RNA
cuugcuagauccacgggguagg

SEQ ID NO: 26766 - RNA, 22 nt, Artificial Sequence
  Guide RNA
gagcaguuuccuaccccgugga

SEQ ID NO: 26767 - RNA, 22 nt, Artificial Sequence
  Guide RNA
gagcaguuuccuacgccgugga

SEQ ID NO: 26768 - RNA, 22 nt, Artificial Sequence
  Guide RNA
gagugagcaguuuccuaccccg

SEQ ID NO: 26769 - RNA, 22 nt, Artificial Sequence
  Guide RNA
gagugagcaguuuccuacgccg

SEQ ID NO: 26770 - RNA, 22 nt, Artificial Sequence
  Guide RNA
gauccacggcguaggaaacugc

SEQ ID NO: 26771 - RNA, 22 nt, Artificial Sequence
  Guide RNA
gauccacgggguaggaaacugc

SEQ ID NO: 26772 - RNA, 22 nt, Artificial Sequence
  Guide RNA
gaugcugagugagcaguuuccu

SEQ ID NO: 26773 - RNA, 22 nt, Artificial Sequence
  Guide RNA
gcaguuuccuaccccguggauc

SEQ ID NO: 26774 - RNA, 22 nt, Artificial Sequence
  Guide RNA
gcaguuuccuacgccguggauc

SEQ ID NO: 26775 - RNA, 22 nt, Artificial Sequence
  Guide RNA
gcguaggaaacugcucacucag

SEQ ID NO: 26776 - RNA, 22 nt, Artificial Sequence
  Guide RNA
gcuagauccacggcguaggaaa

SEQ ID NO: 26777 - RNA, 22 nt, Artificial Sequence
  Guide RNA
gcuagauccacgggguaggaaa

SEQ ID NO: 26778 - RNA, 22 nt, Artificial Sequence
  Guide RNA
gcugagugagcaguuuccuacc

SEQ ID NO: 26779 - RNA, 22 nt, Artificial Sequence
  Guide RNA
gcugagugagcaguuuccuacg

SEQ ID NO: 26780 - RNA, 22 nt, Artificial Sequence
  Guide RNA
gcuugcuagauccacggcguag

SEQ ID NO: 26781 - RNA, 22 nt, Artificial Sequence
  Guide RNA
gcuugcuagauccacgggguag

SEQ ID NO: 26782 - RNA, 22 nt, Artificial Sequence
  Guide RNA
ggaugcugagugagcaguuucc

SEQ ID NO: 26783 - RNA, 22 nt, Artificial Sequence
  Guide RNA
ggcguaggaaacugcucacuca

SEQ ID NO: 26784 - RNA, 22 nt, Artificial Sequence
  Guide RNA
ggcuugcuagauccacggcgua

SEQ ID NO: 26785 - RNA, 22 nt, Artificial Sequence
  Guide RNA
ggcuugcuagauccacggggua

SEQ ID NO: 26786 - RNA, 22 nt, Artificial Sequence
  Guide RNA
gggguaggaaacugcucacuca

SEQ ID NO: 26787 - RNA, 22 nt, Artificial Sequence
  Guide RNA
ggguaggaaacugcucacucag

SEQ ID NO: 26788 - RNA, 22 nt, Artificial Sequence
  Guide RNA
gugagcaguuuccuaccccgug

SEQ ID NO: 26789 - RNA, 22 nt, Artificial Sequence
  Guide RNA
gugagcaguuuccuacgccgug

SEQ ID NO: 26790 - RNA, 22 nt, Artificial Sequence
  Guide RNA
guuuccuaccccguggaucuag

SEQ ID NO: 26791 - RNA, 22 nt, Artificial Sequence
  Guide RNA
guuuccuacgccguggaucuag

SEQ ID NO: 26792 - RNA, 22 nt, Artificial Sequence
  Guide RNA
uaccccguggaucuagcaagcc

SEQ ID NO: 26793 - RNA, 22 nt, Artificial Sequence
  Guide RNA
uacgccguggaucuagcaagcc

SEQ ID NO: 26794 - RNA, 22 nt, Artificial Sequence
  Guide RNA
uagauccacggcguaggaaacu

SEQ ID NO: 26795 - RNA, 22 nt, Artificial Sequence
  Guide RNA
uagauccacgggguaggaaacu

SEQ ID NO: 26796 - RNA, 22 nt, Artificial Sequence
  Guide RNA
uccacggcguaggaaacugcuc

SEQ ID NO: 26797 - RNA, 22 nt, Artificial Sequence
  Guide RNA
uccacgggguaggaaacugcuc

SEQ ID NO: 26798 - RNA, 22 nt, Artificial Sequence
  Guide RNA
uccauggcuugcuagauccacg

SEQ ID NO: 26799 - RNA, 22 nt, Artificial Sequence
  Guide RNA
uccuaccccguggaucuagcaa

SEQ ID NO: 26800 - RNA, 22 nt, Artificial Sequence
  Guide RNA
uccuacgccguggaucuagcaa

SEQ ID NO: 26801 - RNA, 22 nt, Artificial Sequence
  Guide RNA
ucuccauggcuugcuagaucca

SEQ ID NO: 26802 - RNA, 22 nt, Artificial Sequence
  Guide RNA
ugagcaguuuccuaccccgugg

SEQ ID NO: 26803 - RNA, 22 nt, Artificial Sequence
  Guide RNA
ugagcaguuuccuacgccgugg

SEQ ID NO: 26804 - RNA, 22 nt, Artificial Sequence
  Guide RNA
ugagugagcaguuuccuacccc

SEQ ID NO: 26805 - RNA, 22 nt, Artificial Sequence
  Guide RNA
ugagugagcaguuuccuacgcc

SEQ ID NO: 26806 - RNA, 22 nt, Artificial Sequence
  Guide RNA
ugcuagauccacggcguaggaa

SEQ ID NO: 26807 - RNA, 22 nt, Artificial Sequence
  Guide RNA
ugcuagauccacgggguaggaa

SEQ ID NO: 26808 - RNA, 22 nt, Artificial Sequence
  Guide RNA
ugcugagugagcaguuuccuac

SEQ ID NO: 26809 - RNA, 22 nt, Artificial Sequence
  Guide RNA
uggcuugcuagauccacggcgu

SEQ ID NO: 26810 - RNA, 22 nt, Artificial Sequence
  Guide RNA
uggcuugcuagauccacggggu

SEQ ID NO: 26811 - RNA, 22 nt, Artificial Sequence
  Guide RNA
uuccuaccccguggaucuagca

SEQ ID NO: 26812 - RNA, 22 nt, Artificial Sequence
  Guide RNA
uuccuacgccguggaucuagca

SEQ ID NO: 26813 - RNA, 22 nt, Artificial Sequence
  Guide RNA
uugcuagauccacggcguagga

SEQ ID NO: 26814 - RNA, 22 nt, Artificial Sequence
  Guide RNA
uugcuagauccacgggguagga

SEQ ID NO: 26815 - RNA, 22 nt, Artificial Sequence
  Guide RNA
uuuccuaccccguggaucuagc

SEQ ID NO: 26816 - RNA, 22 nt, Artificial Sequence
  Guide RNA
uuuccuacgccguggaucuagc

SEQ ID NO: 26817 - RNA, 20 nt, Artificial Sequence
  Guide RNA
aagacuauauuauuuugggg

SEQ ID NO: 26818 - RNA, 20 nt, Artificial Sequence
  Guide RNA
acccccaccccaaaauaaua

SEQ ID NO: 26819 - RNA, 20 nt, Artificial Sequence
  Guide RNA
accccccaccccaaaauaau

SEQ ID NO: 26820 - RNA, 20 nt, Artificial Sequence
  Guide RNA
acuauauuauuuuggggugg

SEQ ID NO: 26821 - RNA, 20 nt, Artificial Sequence
  Guide RNA
agacccccaccccaaaauaa

SEQ ID NO: 26822 - RNA, 20 nt, Artificial Sequence
  Guide RNA
agaccccccaccccaaaaua

SEQ ID NO: 26823 - RNA, 20 nt, Artificial Sequence
  Guide RNA
agacuauauuauuuuggggu

SEQ ID NO: 26824 - RNA, 20 nt, Artificial Sequence
  Guide RNA
aguuuuugcagacccccacc

SEQ ID NO: 26825 - RNA, 20 nt, Artificial Sequence
  Guide RNA
aguuuuugcagaccccccac

SEQ ID NO: 26826 - RNA, 20 nt, Artificial Sequence
  Guide RNA
auauuauuuugggguggggg

SEQ ID NO: 26827 - RNA, 20 nt, Artificial Sequence
  Guide RNA
auguuuaguuuuugcagacc

SEQ ID NO: 26828 - RNA, 20 nt, Artificial Sequence
  Guide RNA
auuauuuugggguggggggu

SEQ ID NO: 26829 - RNA, 20 nt, Artificial Sequence
  Guide RNA
auuauuuugggguggggguc

SEQ ID NO: 26830 - RNA, 20 nt, Artificial Sequence
  Guide RNA
auuuugggguggggggucug

SEQ ID NO: 26831 - RNA, 20 nt, Artificial Sequence
  Guide RNA
auuuuggggugggggucugc

SEQ ID NO: 26832 - RNA, 20 nt, Artificial Sequence
  Guide RNA
caccccaaaauaauauaguc

SEQ ID NO: 26833 - RNA, 20 nt, Artificial Sequence
  Guide RNA
cagacccccaccccaaaaua

SEQ ID NO: 26834 - RNA, 20 nt, Artificial Sequence
  Guide RNA
cagaccccccaccccaaaau

SEQ ID NO: 26835 - RNA, 20 nt, Artificial Sequence
  Guide RNA
ccaccccaaaauaauauagu

SEQ ID NO: 26836 - RNA, 20 nt, Artificial Sequence
  Guide RNA
cccaccccaaaauaauauag

SEQ ID NO: 26837 - RNA, 20 nt, Artificial Sequence
  Guide RNA
ccccaccccaaaauaauaua

SEQ ID NO: 26838 - RNA, 20 nt, Artificial Sequence
  Guide RNA
cccccaccccaaaauaauau

SEQ ID NO: 26839 - RNA, 20 nt, Artificial Sequence
  Guide RNA
ccccccaccccaaaauaaua

SEQ ID NO: 26840 - RNA, 20 nt, Artificial Sequence
  Guide RNA
cuauauuauuuugggguggg

SEQ ID NO: 26841 - RNA, 20 nt, Artificial Sequence
  Guide RNA
gacccccaccccaaaauaau

SEQ ID NO: 26842 - RNA, 20 nt, Artificial Sequence
  Guide RNA
gaccccccaccccaaaauaa

SEQ ID NO: 26843 - RNA, 20 nt, Artificial Sequence
  Guide RNA
gacuauauuauuuuggggug

SEQ ID NO: 26844 - RNA, 20 nt, Artificial Sequence
  Guide RNA
gcagacccccaccccaaaau

SEQ ID NO: 26845 - RNA, 20 nt, Artificial Sequence
  Guide RNA
gcagaccccccaccccaaaa

SEQ ID NO: 26846 - RNA, 20 nt, Artificial Sequence
  Guide RNA
gggguggggggucugcaaaa

SEQ ID NO: 26847 - RNA, 20 nt, Artificial Sequence
  Guide RNA
ggggugggggucugcaaaaa

SEQ ID NO: 26848 - RNA, 20 nt, Artificial Sequence
  Guide RNA
ggguggggggucugcaaaaa

SEQ ID NO: 26849 - RNA, 20 nt, Artificial Sequence
  Guide RNA
gggugggggucugcaaaaac

SEQ ID NO: 26850 - RNA, 20 nt, Artificial Sequence
  Guide RNA
gguggggggucugcaaaaac

SEQ ID NO: 26851 - RNA, 20 nt, Artificial Sequence
  Guide RNA
ggugggggucugcaaaaacu

SEQ ID NO: 26852 - RNA, 20 nt, Artificial Sequence
  Guide RNA
guggggggucugcaaaaacu

SEQ ID NO: 26853 - RNA, 20 nt, Artificial Sequence
  Guide RNA
gugggggucugcaaaaacua

SEQ ID NO: 26854 - RNA, 20 nt, Artificial Sequence
  Guide RNA
guuuaguuuuugcagacccc

SEQ ID NO: 26855 - RNA, 20 nt, Artificial Sequence
  Guide RNA
guuuuugcagacccccaccc

SEQ ID NO: 26856 - RNA, 20 nt, Artificial Sequence
  Guide RNA
guuuuugcagaccccccacc

SEQ ID NO: 26857 - RNA, 20 nt, Artificial Sequence
  Guide RNA
uaguuuuugcagacccccac

SEQ ID NO: 26858 - RNA, 20 nt, Artificial Sequence
  Guide RNA
uaguuuuugcagacccccca

SEQ ID NO: 26859 - RNA, 20 nt, Artificial Sequence
  Guide RNA
uauauuauuuuggggugggg

SEQ ID NO: 26860 - RNA, 20 nt, Artificial Sequence
  Guide RNA
uauuauuuuggggugggggg

SEQ ID NO: 26861 - RNA, 20 nt, Artificial Sequence
  Guide RNA
uauuauuuuggggugggggu

SEQ ID NO: 26862 - RNA, 20 nt, Artificial Sequence
  Guide RNA
uauuuugggguggggggucu

SEQ ID NO: 26863 - RNA, 20 nt, Artificial Sequence
  Guide RNA
uauuuuggggugggggucug

SEQ ID NO: 26864 - RNA, 20 nt, Artificial Sequence
  Guide RNA
ugcagacccccaccccaaaa

SEQ ID NO: 26865 - RNA, 20 nt, Artificial Sequence
  Guide RNA
ugcagaccccccaccccaaa

SEQ ID NO: 26866 - RNA, 20 nt, Artificial Sequence
  Guide RNA
ugggguggggggucugcaaa

SEQ ID NO: 26867 - RNA, 20 nt, Artificial Sequence
  Guide RNA
uggggugggggucugcaaaa

SEQ ID NO: 26868 - RNA, 20 nt, Artificial Sequence
  Guide RNA
uguuuaguuuuugcagaccc

SEQ ID NO: 26869 - RNA, 20 nt, Artificial Sequence
  Guide RNA
uuaguuuuugcagaccccca

SEQ ID NO: 26870 - RNA, 20 nt, Artificial Sequence
  Guide RNA
uuaguuuuugcagacccccc

SEQ ID NO: 26871 - RNA, 20 nt, Artificial Sequence
  Guide RNA
uuauuuuggggugggggguc

SEQ ID NO: 26872 - RNA, 20 nt, Artificial Sequence
  Guide RNA
uuauuuuggggugggggucu

SEQ ID NO: 26873 - RNA, 20 nt, Artificial Sequence
  Guide RNA
uugcagacccccaccccaaa

SEQ ID NO: 26874 - RNA, 20 nt, Artificial Sequence
  Guide RNA
uugcagaccccccaccccaa

SEQ ID NO: 26875 - RNA, 20 nt, Artificial Sequence
  Guide RNA
uugggguggggggucugcaa

SEQ ID NO: 26876 - RNA, 20 nt, Artificial Sequence
  Guide RNA
uuggggugggggucugcaaa

SEQ ID NO: 26877 - RNA, 20 nt, Artificial Sequence
  Guide RNA
uuuaguuuuugcagaccccc

SEQ ID NO: 26878 - RNA, 20 nt, Artificial Sequence
  Guide RNA
uuugcagacccccaccccaa

SEQ ID NO: 26879 - RNA, 20 nt, Artificial Sequence
  Guide RNA
uuugcagaccccccacccca

SEQ ID NO: 26880 - RNA, 20 nt, Artificial Sequence
  Guide RNA
uuugggguggggggucugca

SEQ ID NO: 26881 - RNA, 20 nt, Artificial Sequence
  Guide RNA
uuuggggugggggucugcaa

SEQ ID NO: 26882 - RNA, 20 nt, Artificial Sequence
  Guide RNA
uuuugcagacccccacccca

SEQ ID NO: 26883 - RNA, 20 nt, Artificial Sequence
  Guide RNA
uuuugcagaccccccacccc

SEQ ID NO: 26884 - RNA, 20 nt, Artificial Sequence
  Guide RNA
uuuugggguggggggucugc

SEQ ID NO: 26885 - RNA, 20 nt, Artificial Sequence
  Guide RNA
uuuuggggugggggucugca

SEQ ID NO: 26886 - RNA, 20 nt, Artificial Sequence
  Guide RNA
uuuuugcagacccccacccc

SEQ ID NO: 26887 - RNA, 20 nt, Artificial Sequence
  Guide RNA
uuuuugcagaccccccaccc

SEQ ID NO: 26888 - RNA, 21 nt, Artificial Sequence
  Guide RNA
acccccaccccaaaauaauau

SEQ ID NO: 26889 - RNA, 21 nt, Artificial Sequence
  Guide RNA
accccccaccccaaaauaaua

SEQ ID NO: 26890 - RNA, 21 nt, Artificial Sequence
  Guide RNA
acuauauuauuuugggguggg

SEQ ID NO: 26891 - RNA, 21 nt, Artificial Sequence
  Guide RNA
agacccccaccccaaaauaau

SEQ ID NO: 26892 - RNA, 21 nt, Artificial Sequence
  Guide RNA
agaccccccaccccaaaauaa

SEQ ID NO: 26893 - RNA, 21 nt, Artificial Sequence
  Guide RNA
agacuauauuauuuuggggug

SEQ ID NO: 26894 - RNA, 21 nt, Artificial Sequence
  Guide RNA
aguuuuugcagacccccaccc

SEQ ID NO: 26895 - RNA, 21 nt, Artificial Sequence
  Guide RNA
aguuuuugcagaccccccacc

SEQ ID NO: 26896 - RNA, 21 nt, Artificial Sequence
  Guide RNA
auauuauuuuggggugggggg

SEQ ID NO: 26897 - RNA, 21 nt, Artificial Sequence
  Guide RNA
auauuauuuuggggugggggu

SEQ ID NO: 26898 - RNA, 21 nt, Artificial Sequence
  Guide RNA
auguuuaguuuuugcagaccc

SEQ ID NO: 26899 - RNA, 21 nt, Artificial Sequence
  Guide RNA
auuauuuuggggugggggguc

SEQ ID NO: 26900 - RNA, 21 nt, Artificial Sequence
  Guide RNA
auuauuuuggggugggggucu

SEQ ID NO: 26901 - RNA, 21 nt, Artificial Sequence
  Guide RNA
auuuugggguggggggucugc

SEQ ID NO: 26902 - RNA, 21 nt, Artificial Sequence
  Guide RNA
auuuuggggugggggucugca

SEQ ID NO: 26903 - RNA, 21 nt, Artificial Sequence
  Guide RNA
caccccaaaauaauauagucu

SEQ ID NO: 26904 - RNA, 21 nt, Artificial Sequence
  Guide RNA
cagacccccaccccaaaauaa

SEQ ID NO: 26905 - RNA, 21 nt, Artificial Sequence
  Guide RNA
cagaccccccaccccaaaaua

SEQ ID NO: 26906 - RNA, 21 nt, Artificial Sequence
  Guide RNA
ccaccccaaaauaauauaguc

SEQ ID NO: 26907 - RNA, 21 nt, Artificial Sequence
  Guide RNA
cccaccccaaaauaauauagu

SEQ ID NO: 26908 - RNA, 21 nt, Artificial Sequence
  Guide RNA
ccccaccccaaaauaauauag

SEQ ID NO: 26909 - RNA, 21 nt, Artificial Sequence
  Guide RNA
cccccaccccaaaauaauaua

SEQ ID NO: 26910 - RNA, 21 nt, Artificial Sequence
  Guide RNA
ccccccaccccaaaauaauau

SEQ ID NO: 26911 - RNA, 21 nt, Artificial Sequence
  Guide RNA
cuauauuauuuuggggugggg

SEQ ID NO: 26912 - RNA, 21 nt, Artificial Sequence
  Guide RNA
gacccccaccccaaaauaaua

SEQ ID NO: 26913 - RNA, 21 nt, Artificial Sequence
  Guide RNA
gaccccccaccccaaaauaau

SEQ ID NO: 26914 - RNA, 21 nt, Artificial Sequence
  Guide RNA
gacuauauuauuuuggggugg

SEQ ID NO: 26915 - RNA, 21 nt, Artificial Sequence
  Guide RNA
gauguuuaguuuuugcagacc

SEQ ID NO: 26916 - RNA, 21 nt, Artificial Sequence
  Guide RNA
gcagacccccaccccaaaaua

SEQ ID NO: 26917 - RNA, 21 nt, Artificial Sequence
  Guide RNA
gcagaccccccaccccaaaau

SEQ ID NO: 26918 - RNA, 21 nt, Artificial Sequence
  Guide RNA
gggguggggggucugcaaaaa

SEQ ID NO: 26919 - RNA, 21 nt, Artificial Sequence
  Guide RNA
ggggugggggucugcaaaaac

SEQ ID NO: 26920 - RNA, 21 nt, Artificial Sequence
  Guide RNA
ggguggggggucugcaaaaac

SEQ ID NO: 26921 - RNA, 21 nt, Artificial Sequence
  Guide RNA
gggugggggucugcaaaaacu

SEQ ID NO: 26922 - RNA, 21 nt, Artificial Sequence
  Guide RNA
gguggggggucugcaaaaacu

SEQ ID NO: 26923 - RNA, 21 nt, Artificial Sequence
  Guide RNA
ggugggggucugcaaaaacua

SEQ ID NO: 26924 - RNA, 21 nt, Artificial Sequence
  Guide RNA
guggggggucugcaaaaacua

SEQ ID NO: 26925 - RNA, 21 nt, Artificial Sequence
  Guide RNA
gugggggucugcaaaaacuaa

SEQ ID NO: 26926 - RNA, 21 nt, Artificial Sequence
  Guide RNA
guuuaguuuuugcagaccccc

SEQ ID NO: 26927 - RNA, 21 nt, Artificial Sequence
  Guide RNA
guuuuugcagacccccacccc

SEQ ID NO: 26928 - RNA, 21 nt, Artificial Sequence
  Guide RNA
guuuuugcagaccccccaccc

SEQ ID NO: 26929 - RNA, 21 nt, Artificial Sequence
  Guide RNA
uaguuuuugcagacccccacc

SEQ ID NO: 26930 - RNA, 21 nt, Artificial Sequence
  Guide RNA
uaguuuuugcagaccccccac

SEQ ID NO: 26931 - RNA, 21 nt, Artificial Sequence
  Guide RNA
uauauuauuuugggguggggg

SEQ ID NO: 26932 - RNA, 21 nt, Artificial Sequence
  Guide RNA
uauuauuuugggguggggggu

SEQ ID NO: 26933 - RNA, 21 nt, Artificial Sequence
  Guide RNA
uauuauuuugggguggggguc

SEQ ID NO: 26934 - RNA, 21 nt, Artificial Sequence
  Guide RNA
uauuuugggguggggggucug

SEQ ID NO: 26935 - RNA, 21 nt, Artificial Sequence
  Guide RNA
uauuuuggggugggggucugc

SEQ ID NO: 26936 - RNA, 21 nt, Artificial Sequence
  Guide RNA
ugcagacccccaccccaaaau

SEQ ID NO: 26937 - RNA, 21 nt, Artificial Sequence
  Guide RNA
ugcagaccccccaccccaaaa

SEQ ID NO: 26938 - RNA, 21 nt, Artificial Sequence
  Guide RNA
ugggguggggggucugcaaaa

SEQ ID NO: 26939 - RNA, 21 nt, Artificial Sequence
  Guide RNA
uggggugggggucugcaaaaa

SEQ ID NO: 26940 - RNA, 21 nt, Artificial Sequence
  Guide RNA
uguuuaguuuuugcagacccc

SEQ ID NO: 26941 - RNA, 21 nt, Artificial Sequence
  Guide RNA
uuaguuuuugcagacccccac

SEQ ID NO: 26942 - RNA, 21 nt, Artificial Sequence
  Guide RNA
uuaguuuuugcagacccccca

SEQ ID NO: 26943 - RNA, 21 nt, Artificial Sequence
  Guide RNA
uuauuuugggguggggggucu

SEQ ID NO: 26944 - RNA, 21 nt, Artificial Sequence
  Guide RNA
uuauuuuggggugggggucug

SEQ ID NO: 26945 - RNA, 21 nt, Artificial Sequence
  Guide RNA
uugcagacccccaccccaaaa

SEQ ID NO: 26946 - RNA, 21 nt, Artificial Sequence
  Guide RNA
uugcagaccccccaccccaaa

SEQ ID NO: 26947 - RNA, 21 nt, Artificial Sequence
  Guide RNA
uugggguggggggucugcaaa

SEQ ID NO: 26948 - RNA, 21 nt, Artificial Sequence
  Guide RNA
uuggggugggggucugcaaaa

SEQ ID NO: 26949 - RNA, 21 nt, Artificial Sequence
  Guide RNA
uuuaguuuuugcagaccccca

SEQ ID NO: 26950 - RNA, 21 nt, Artificial Sequence
  Guide RNA
uuuaguuuuugcagacccccc

SEQ ID NO: 26951 - RNA, 21 nt, Artificial Sequence
  Guide RNA
uuugcagacccccaccccaaa

SEQ ID NO: 26952 - RNA, 21 nt, Artificial Sequence
  Guide RNA
uuugcagaccccccaccccaa

SEQ ID NO: 26953 - RNA, 21 nt, Artificial Sequence
  Guide RNA
uuugggguggggggucugcaa

SEQ ID NO: 26954 - RNA, 21 nt, Artificial Sequence
  Guide RNA
uuuggggugggggucugcaaa

SEQ ID NO: 26955 - RNA, 21 nt, Artificial Sequence
  Guide RNA
uuuugcagacccccaccccaa

SEQ ID NO: 26956 - RNA, 21 nt, Artificial Sequence
  Guide RNA
uuuugcagaccccccacccca

SEQ ID NO: 26957 - RNA, 21 nt, Artificial Sequence
  Guide RNA
uuuugggguggggggucugca

SEQ ID NO: 26958 - RNA, 21 nt, Artificial Sequence
  Guide RNA
uuuuggggugggggucugcaa

SEQ ID NO: 26959 - RNA, 21 nt, Artificial Sequence
  Guide RNA
uuuuugcagacccccacccca

SEQ ID NO: 26960 - RNA, 21 nt, Artificial Sequence
  Guide RNA
uuuuugcagaccccccacccc

SEQ ID NO: 26961 - RNA, 22 nt, Artificial Sequence
  Guide RNA
aagacuauauuauuuuggggug

SEQ ID NO: 26962 - RNA, 22 nt, Artificial Sequence
  Guide RNA
acccccaccccaaaauaauaua

SEQ ID NO: 26963 - RNA, 22 nt, Artificial Sequence
  Guide RNA
accccccaccccaaaauaauau

SEQ ID NO: 26964 - RNA, 22 nt, Artificial Sequence
  Guide RNA
acuauauuauuuuggggugggg

SEQ ID NO: 26965 - RNA, 22 nt, Artificial Sequence
  Guide RNA
agacccccaccccaaaauaaua

SEQ ID NO: 26966 - RNA, 22 nt, Artificial Sequence
  Guide RNA
agaccccccaccccaaaauaau

SEQ ID NO: 26967 - RNA, 22 nt, Artificial Sequence
  Guide RNA
agacuauauuauuuuggggugg

SEQ ID NO: 26968 - RNA, 22 nt, Artificial Sequence
  Guide RNA
aguuuuugcagacccccacccc

SEQ ID NO: 26969 - RNA, 22 nt, Artificial Sequence
  Guide RNA
aguuuuugcagaccccccaccc

SEQ ID NO: 26970 - RNA, 22 nt, Artificial Sequence
  Guide RNA
auauuauuuugggguggggggu

SEQ ID NO: 26971 - RNA, 22 nt, Artificial Sequence
  Guide RNA
auauuauuuugggguggggguc

SEQ ID NO: 26972 - RNA, 22 nt, Artificial Sequence
  Guide RNA
auguuuaguuuuugcagacccc

SEQ ID NO: 26973 - RNA, 22 nt, Artificial Sequence
  Guide RNA
auuauuuugggguggggggucu

SEQ ID NO: 26974 - RNA, 22 nt, Artificial Sequence
  Guide RNA
auuauuuuggggugggggucug

SEQ ID NO: 26975 - RNA, 22 nt, Artificial Sequence
  Guide RNA
auuuugggguggggggucugca

SEQ ID NO: 26976 - RNA, 22 nt, Artificial Sequence
  Guide RNA
auuuuggggugggggucugcaa

SEQ ID NO: 26977 - RNA, 22 nt, Artificial Sequence
  Guide RNA
caccccaaaauaauauagucuu

SEQ ID NO: 26978 - RNA, 22 nt, Artificial Sequence
  Guide RNA
cagacccccaccccaaaauaau

SEQ ID NO: 26979 - RNA, 22 nt, Artificial Sequence
  Guide RNA
cagaccccccaccccaaaauaa

SEQ ID NO: 26980 - RNA, 22 nt, Artificial Sequence
  Guide RNA
ccaccccaaaauaauauagucu

SEQ ID NO: 26981 - RNA, 22 nt, Artificial Sequence
  Guide RNA
cccaccccaaaauaauauaguc

SEQ ID NO: 26982 - RNA, 22 nt, Artificial Sequence
  Guide RNA
ccccaccccaaaauaauauagu

SEQ ID NO: 26983 - RNA, 22 nt, Artificial Sequence
  Guide RNA
cccccaccccaaaauaauauag

SEQ ID NO: 26984 - RNA, 22 nt, Artificial Sequence
  Guide RNA
ccccccaccccaaaauaauaua

SEQ ID NO: 26985 - RNA, 22 nt, Artificial Sequence
  Guide RNA
cuauauuauuuugggguggggg

SEQ ID NO: 26986 - RNA, 22 nt, Artificial Sequence
  Guide RNA
gacccccaccccaaaauaauau

SEQ ID NO: 26987 - RNA, 22 nt, Artificial Sequence
  Guide RNA
gaccccccaccccaaaauaaua

SEQ ID NO: 26988 - RNA, 22 nt, Artificial Sequence
  Guide RNA
gacuauauuauuuugggguggg

SEQ ID NO: 26989 - RNA, 22 nt, Artificial Sequence
  Guide RNA
gauguuuaguuuuugcagaccc

SEQ ID NO: 26990 - RNA, 22 nt, Artificial Sequence
  Guide RNA
gcagacccccaccccaaaauaa

SEQ ID NO: 26991 - RNA, 22 nt, Artificial Sequence
  Guide RNA
gcagaccccccaccccaaaaua

SEQ ID NO: 26992 - RNA, 22 nt, Artificial Sequence
  Guide RNA
gggguggggggucugcaaaaac

SEQ ID NO: 26993 - RNA, 22 nt, Artificial Sequence
  Guide RNA
ggggugggggucugcaaaaacu

SEQ ID NO: 26994 - RNA, 22 nt, Artificial Sequence
  Guide RNA
ggguggggggucugcaaaaacu

SEQ ID NO: 26995 - RNA, 22 nt, Artificial Sequence
  Guide RNA
gggugggggucugcaaaaacua

SEQ ID NO: 26996 - RNA, 22 nt, Artificial Sequence
  Guide RNA
gguggggggucugcaaaaacua

SEQ ID NO: 26997 - RNA, 22 nt, Artificial Sequence
  Guide RNA
ggugggggucugcaaaaacuaa

SEQ ID NO: 26998 - RNA, 22 nt, Artificial Sequence
  Guide RNA
guggggggucugcaaaaacuaa

SEQ ID NO: 26999 - RNA, 22 nt, Artificial Sequence
  Guide RNA
gugggggucugcaaaaacuaaa

SEQ ID NO: 27000 - RNA, 22 nt, Artificial Sequence
  Guide RNA
guuuaguuuuugcagaccccca

SEQ ID NO: 27001 - RNA, 22 nt, Artificial Sequence
  Guide RNA
guuuaguuuuugcagacccccc

SEQ ID NO: 27002 - RNA, 22 nt, Artificial Sequence
  Guide RNA
guuuuugcagacccccacccca

SEQ ID NO: 27003 - RNA, 22 nt, Artificial Sequence
  Guide RNA
guuuuugcagaccccccacccc

SEQ ID NO: 27004 - RNA, 22 nt, Artificial Sequence
  Guide RNA
uaguuuuugcagacccccaccc

SEQ ID NO: 27005 - RNA, 22 nt, Artificial Sequence
  Guide RNA
uaguuuuugcagaccccccacc

SEQ ID NO: 27006 - RNA, 22 nt, Artificial Sequence
  Guide RNA
uauauuauuuuggggugggggg

SEQ ID NO: 27007 - RNA, 22 nt, Artificial Sequence
  Guide RNA
uauauuauuuuggggugggggu

SEQ ID NO: 27008 - RNA, 22 nt, Artificial Sequence
  Guide RNA
uauuauuuuggggugggggguc

SEQ ID NO: 27009 - RNA, 22 nt, Artificial Sequence
  Guide RNA
uauuauuuuggggugggggucu

SEQ ID NO: 27010 - RNA, 22 nt, Artificial Sequence
  Guide RNA
uauuuugggguggggggucugc

SEQ ID NO: 27011 - RNA, 22 nt, Artificial Sequence
  Guide RNA
uauuuuggggugggggucugca

SEQ ID NO: 27012 - RNA, 22 nt, Artificial Sequence
  Guide RNA
ugauguuuaguuuuugcagacc

SEQ ID NO: 27013 - RNA, 22 nt, Artificial Sequence
  Guide RNA
ugcagacccccaccccaaaaua

SEQ ID NO: 27014 - RNA, 22 nt, Artificial Sequence
  Guide RNA
ugcagaccccccaccccaaaau

SEQ ID NO: 27015 - RNA, 22 nt, Artificial Sequence
  Guide RNA
ugggguggggggucugcaaaaa

SEQ ID NO: 27016 - RNA, 22 nt, Artificial Sequence
  Guide RNA
uggggugggggucugcaaaaac

SEQ ID NO: 27017 - RNA, 22 nt, Artificial Sequence
  Guide RNA
uguuuaguuuuugcagaccccc

SEQ ID NO: 27018 - RNA, 22 nt, Artificial Sequence
  Guide RNA
uuaguuuuugcagacccccacc

SEQ ID NO: 27019 - RNA, 22 nt, Artificial Sequence
  Guide RNA
uuaguuuuugcagaccccccac

SEQ ID NO: 27020 - RNA, 22 nt, Artificial Sequence
  Guide RNA
uuauuuugggguggggggucug

SEQ ID NO: 27021 - RNA, 22 nt, Artificial Sequence
  Guide RNA
uuauuuuggggugggggucugc

SEQ ID NO: 27022 - RNA, 22 nt, Artificial Sequence
  Guide RNA
uugcagacccccaccccaaaau

SEQ ID NO: 27023 - RNA, 22 nt, Artificial Sequence
  Guide RNA
uugcagaccccccaccccaaaa

SEQ ID NO: 27024 - RNA, 22 nt, Artificial Sequence
  Guide RNA
uugggguggggggucugcaaaa

SEQ ID NO: 27025 - RNA, 22 nt, Artificial Sequence
  Guide RNA
uuggggugggggucugcaaaaa

SEQ ID NO: 27026 - RNA, 22 nt, Artificial Sequence
  Guide RNA
uuuaguuuuugcagacccccac

SEQ ID NO: 27027 - RNA, 22 nt, Artificial Sequence
  Guide RNA
uuuaguuuuugcagacccccca

SEQ ID NO: 27028 - RNA, 22 nt, Artificial Sequence
  Guide RNA
uuugcagacccccaccccaaaa

SEQ ID NO: 27029 - RNA, 22 nt, Artificial Sequence
  Guide RNA
uuugcagaccccccaccccaaa

SEQ ID NO: 27030 - RNA, 22 nt, Artificial Sequence
  Guide RNA
uuugggguggggggucugcaaa

SEQ ID NO: 27031 - RNA, 22 nt, Artificial Sequence
  Guide RNA
uuuggggugggggucugcaaaa

SEQ ID NO: 27032 - RNA, 22 nt, Artificial Sequence
  Guide RNA
uuuugcagacccccaccccaaa

SEQ ID NO: 27033 - RNA, 22 nt, Artificial Sequence
  Guide RNA
uuuugcagaccccccaccccaa

SEQ ID NO: 27034 - RNA, 22 nt, Artificial Sequence
  Guide RNA
uuuugggguggggggucugcaa

SEQ ID NO: 27035 - RNA, 22 nt, Artificial Sequence
  Guide RNA
uuuuggggugggggucugcaaa

SEQ ID NO: 27036 - RNA, 22 nt, Artificial Sequence
  Guide RNA
uuuuugcagacccccaccccaa

SEQ ID NO: 27037 - RNA, 22 nt, Artificial Sequence
  Guide RNA
uuuuugcagaccccccacccca

SEQ ID NO: 27038 - RNA, 20 nt, Artificial Sequence
  Guide RNA
aaaaaauguaauugguuccc

SEQ ID NO: 27039 - RNA, 20 nt, Artificial Sequence
  Guide RNA
aaaaaauguacuugguuccc

SEQ ID NO: 27040 - RNA, 20 nt, Artificial Sequence
  Guide RNA
aaaaauguaauugguucccu

SEQ ID NO: 27041 - RNA, 20 nt, Artificial Sequence
  Guide RNA
aaaaauguacuugguucccu

SEQ ID NO: 27042 - RNA, 20 nt, Artificial Sequence
  Guide RNA
aaaauguaauugguucccua

SEQ ID NO: 27043 - RNA, 20 nt, Artificial Sequence
  Guide RNA
aaaauguacuugguucccua

SEQ ID NO: 27044 - RNA, 20 nt, Artificial Sequence
  Guide RNA
aaauguaauugguucccuau

SEQ ID NO: 27045 - RNA, 20 nt, Artificial Sequence
  Guide RNA
aaauguacuugguucccuau

SEQ ID NO: 27046 - RNA, 20 nt, Artificial Sequence
  Guide RNA
aacauuagccauagggaacc

SEQ ID NO: 27047 - RNA, 20 nt, Artificial Sequence
  Guide RNA
aauguaauugguucccuaug

SEQ ID NO: 27048 - RNA, 20 nt, Artificial Sequence
  Guide RNA
aauguacuugguucccuaug

SEQ ID NO: 27049 - RNA, 20 nt, Artificial Sequence
  Guide RNA
aauugguucccuauggcuaa

SEQ ID NO: 27050 - RNA, 20 nt, Artificial Sequence
  Guide RNA
acauuagccauagggaacca

SEQ ID NO: 27051 - RNA, 20 nt, Artificial Sequence
  Guide RNA
acuugguucccuauggcuaa

SEQ ID NO: 27052 - RNA, 20 nt, Artificial Sequence
  Guide RNA
agccauagggaaccaaguac

SEQ ID NO: 27053 - RNA, 20 nt, Artificial Sequence
  Guide RNA
agccauagggaaccaauuac

SEQ ID NO: 27054 - RNA, 20 nt, Artificial Sequence
  Guide RNA
agggaaccaaguacauuuuu

SEQ ID NO: 27055 - RNA, 20 nt, Artificial Sequence
  Guide RNA
agggaaccaauuacauuuuu

SEQ ID NO: 27056 - RNA, 20 nt, Artificial Sequence
  Guide RNA
auagggaaccaaguacauuu

SEQ ID NO: 27057 - RNA, 20 nt, Artificial Sequence
  Guide RNA
auagggaaccaauuacauuu

SEQ ID NO: 27058 - RNA, 20 nt, Artificial Sequence
  Guide RNA
auguaauugguucccuaugg

SEQ ID NO: 27059 - RNA, 20 nt, Artificial Sequence
  Guide RNA
auguacuugguucccuaugg

SEQ ID NO: 27060 - RNA, 20 nt, Artificial Sequence
  Guide RNA
auuagccauagggaaccaag

SEQ ID NO: 27061 - RNA, 20 nt, Artificial Sequence
  Guide RNA
auuagccauagggaaccaau

SEQ ID NO: 27062 - RNA, 20 nt, Artificial Sequence
  Guide RNA
cauagggaaccaaguacauu

SEQ ID NO: 27063 - RNA, 20 nt, Artificial Sequence
  Guide RNA
cauagggaaccaauuacauu

SEQ ID NO: 27064 - RNA, 20 nt, Artificial Sequence
  Guide RNA
cauuagccauagggaaccaa

SEQ ID NO: 27065 - RNA, 20 nt, Artificial Sequence
  Guide RNA
ccauagggaaccaaguacau

SEQ ID NO: 27066 - RNA, 20 nt, Artificial Sequence
  Guide RNA
ccauagggaaccaauuacau

SEQ ID NO: 27067 - RNA, 20 nt, Artificial Sequence
  Guide RNA
gaacauuagccauagggaac

SEQ ID NO: 27068 - RNA, 20 nt, Artificial Sequence
  Guide RNA
gccauagggaaccaaguaca

SEQ ID NO: 27069 - RNA, 20 nt, Artificial Sequence
  Guide RNA
gccauagggaaccaauuaca

SEQ ID NO: 27070 - RNA, 20 nt, Artificial Sequence
  Guide RNA
gggaaccaaguacauuuuuu

SEQ ID NO: 27071 - RNA, 20 nt, Artificial Sequence
  Guide RNA
gggaaccaauuacauuuuuu

SEQ ID NO: 27072 - RNA, 20 nt, Artificial Sequence
  Guide RNA
guaauugguucccuauggcu

SEQ ID NO: 27073 - RNA, 20 nt, Artificial Sequence
  Guide RNA
guacuugguucccuauggcu

SEQ ID NO: 27074 - RNA, 20 nt, Artificial Sequence
  Guide RNA
uaauugguucccuauggcua

SEQ ID NO: 27075 - RNA, 20 nt, Artificial Sequence
  Guide RNA
uacuugguucccuauggcua

SEQ ID NO: 27076 - RNA, 20 nt, Artificial Sequence
  Guide RNA
uagccauagggaaccaagua

SEQ ID NO: 27077 - RNA, 20 nt, Artificial Sequence
  Guide RNA
uagccauagggaaccaauua

SEQ ID NO: 27078 - RNA, 20 nt, Artificial Sequence
  Guide RNA
uagggaaccaaguacauuuu

SEQ ID NO: 27079 - RNA, 20 nt, Artificial Sequence
  Guide RNA
uagggaaccaauuacauuuu

SEQ ID NO: 27080 - RNA, 20 nt, Artificial Sequence
  Guide RNA
uguaauugguucccuauggc

SEQ ID NO: 27081 - RNA, 20 nt, Artificial Sequence
  Guide RNA
uguacuugguucccuauggc

SEQ ID NO: 27082 - RNA, 20 nt, Artificial Sequence
  Guide RNA
uuagccauagggaaccaagu

SEQ ID NO: 27083 - RNA, 20 nt, Artificial Sequence
  Guide RNA
uuagccauagggaaccaauu

SEQ ID NO: 27084 - RNA, 21 nt, Artificial Sequence
  Guide RNA
aaaaaauguacuugguucccu

SEQ ID NO: 27085 - RNA, 21 nt, Artificial Sequence
  Guide RNA
aaaaauguacuugguucccua

SEQ ID NO: 27086 - RNA, 21 nt, Artificial Sequence
  Guide RNA
aaaauguacuugguucccuau

SEQ ID NO: 27087 - RNA, 21 nt, Artificial Sequence
  Guide RNA
aaauguaauugguucccuaug

SEQ ID NO: 27088 - RNA, 21 nt, Artificial Sequence
  Guide RNA
aaauguacuugguucccuaug

SEQ ID NO: 27089 - RNA, 21 nt, Artificial Sequence
  Guide RNA
aacauuagccauagggaacca

SEQ ID NO: 27090 - RNA, 21 nt, Artificial Sequence
  Guide RNA
aauguaauugguucccuaugg

SEQ ID NO: 27091 - RNA, 21 nt, Artificial Sequence
  Guide RNA
aauguacuugguucccuaugg

SEQ ID NO: 27092 - RNA, 21 nt, Artificial Sequence
  Guide RNA
aauugguucccuauggcuaau

SEQ ID NO: 27093 - RNA, 21 nt, Artificial Sequence
  Guide RNA
acauuagccauagggaaccaa

SEQ ID NO: 27094 - RNA, 21 nt, Artificial Sequence
  Guide RNA
acuugguucccuauggcuaau

SEQ ID NO: 27095 - RNA, 21 nt, Artificial Sequence
  Guide RNA
agccauagggaaccaaguaca

SEQ ID NO: 27096 - RNA, 21 nt, Artificial Sequence
  Guide RNA
agccauagggaaccaauuaca

SEQ ID NO: 27097 - RNA, 21 nt, Artificial Sequence
  Guide RNA
agggaaccaaguacauuuuuu

SEQ ID NO: 27098 - RNA, 21 nt, Artificial Sequence
  Guide RNA
auagggaaccaaguacauuuu

SEQ ID NO: 27099 - RNA, 21 nt, Artificial Sequence
  Guide RNA
auguaauugguucccuauggc

SEQ ID NO: 27100 - RNA, 21 nt, Artificial Sequence
  Guide RNA
auguacuugguucccuauggc

SEQ ID NO: 27101 - RNA, 21 nt, Artificial Sequence
  Guide RNA
auuagccauagggaaccaagu

SEQ ID NO: 27102 - RNA, 21 nt, Artificial Sequence
  Guide RNA
auuagccauagggaaccaauu

SEQ ID NO: 27103 - RNA, 21 nt, Artificial Sequence
  Guide RNA
cauagggaaccaaguacauuu

SEQ ID NO: 27104 - RNA, 21 nt, Artificial Sequence
  Guide RNA
cauagggaaccaauuacauuu

SEQ ID NO: 27105 - RNA, 21 nt, Artificial Sequence
  Guide RNA
cauuagccauagggaaccaag

SEQ ID NO: 27106 - RNA, 21 nt, Artificial Sequence
  Guide RNA
cauuagccauagggaaccaau

SEQ ID NO: 27107 - RNA, 21 nt, Artificial Sequence
  Guide RNA
ccauagggaaccaaguacauu

SEQ ID NO: 27108 - RNA, 21 nt, Artificial Sequence
  Guide RNA
ccauagggaaccaauuacauu

SEQ ID NO: 27109 - RNA, 21 nt, Artificial Sequence
  Guide RNA
gaacauuagccauagggaacc

SEQ ID NO: 27110 - RNA, 21 nt, Artificial Sequence
  Guide RNA
gccauagggaaccaaguacau

SEQ ID NO: 27111 - RNA, 21 nt, Artificial Sequence
  Guide RNA
gccauagggaaccaauuacau

SEQ ID NO: 27112 - RNA, 21 nt, Artificial Sequence
  Guide RNA
guaauugguucccuauggcua

SEQ ID NO: 27113 - RNA, 21 nt, Artificial Sequence
  Guide RNA
guacuugguucccuauggcua

SEQ ID NO: 27114 - RNA, 21 nt, Artificial Sequence
  Guide RNA
uaauugguucccuauggcuaa

SEQ ID NO: 27115 - RNA, 21 nt, Artificial Sequence
  Guide RNA
uacuugguucccuauggcuaa

SEQ ID NO: 27116 - RNA, 21 nt, Artificial Sequence
  Guide RNA
uagccauagggaaccaaguac

SEQ ID NO: 27117 - RNA, 21 nt, Artificial Sequence
  Guide RNA
uagccauagggaaccaauuac

SEQ ID NO: 27118 - RNA, 21 nt, Artificial Sequence
  Guide RNA
uagggaaccaaguacauuuuu

SEQ ID NO: 27119 - RNA, 21 nt, Artificial Sequence
  Guide RNA
ugaacauuagccauagggaac

SEQ ID NO: 27120 - RNA, 21 nt, Artificial Sequence
  Guide RNA
uguaauugguucccuauggcu

SEQ ID NO: 27121 - RNA, 21 nt, Artificial Sequence
  Guide RNA
uguacuugguucccuauggcu

SEQ ID NO: 27122 - RNA, 21 nt, Artificial Sequence
  Guide RNA
uuagccauagggaaccaagua

SEQ ID NO: 27123 - RNA, 21 nt, Artificial Sequence
  Guide RNA
uuagccauagggaaccaauua

SEQ ID NO: 27124 - RNA, 22 nt, Artificial Sequence
  Guide RNA
aaaaaauguacuugguucccua

SEQ ID NO: 27125 - RNA, 22 nt, Artificial Sequence
  Guide RNA
aaaaauguacuugguucccuau

SEQ ID NO: 27126 - RNA, 22 nt, Artificial Sequence
  Guide RNA
aaaauguaauugguucccuaug

SEQ ID NO: 27127 - RNA, 22 nt, Artificial Sequence
  Guide RNA
aaaauguacuugguucccuaug

SEQ ID NO: 27128 - RNA, 22 nt, Artificial Sequence
  Guide RNA
aaauguaauugguucccuaugg

SEQ ID NO: 27129 - RNA, 22 nt, Artificial Sequence
  Guide RNA
aaauguacuugguucccuaugg

SEQ ID NO: 27130 - RNA, 22 nt, Artificial Sequence
  Guide RNA
aacauuagccauagggaaccaa

SEQ ID NO: 27131 - RNA, 22 nt, Artificial Sequence
  Guide RNA
aauguaauugguucccuauggc

SEQ ID NO: 27132 - RNA, 22 nt, Artificial Sequence
  Guide RNA
aauguacuugguucccuauggc

SEQ ID NO: 27133 - RNA, 22 nt, Artificial Sequence
  Guide RNA
aauugguucccuauggcuaaug

SEQ ID NO: 27134 - RNA, 22 nt, Artificial Sequence
  Guide RNA
acauuagccauagggaaccaag

SEQ ID NO: 27135 - RNA, 22 nt, Artificial Sequence
  Guide RNA
acauuagccauagggaaccaau

SEQ ID NO: 27136 - RNA, 22 nt, Artificial Sequence
  Guide RNA
acuugguucccuauggcuaaug

SEQ ID NO: 27137 - RNA, 22 nt, Artificial Sequence
  Guide RNA
agccauagggaaccaaguacau

SEQ ID NO: 27138 - RNA, 22 nt, Artificial Sequence
  Guide RNA
agccauagggaaccaauuacau

SEQ ID NO: 27139 - RNA, 22 nt, Artificial Sequence
  Guide RNA
auagggaaccaaguacauuuuu

SEQ ID NO: 27140 - RNA, 22 nt, Artificial Sequence
  Guide RNA
auguaauugguucccuauggcu

SEQ ID NO: 27141 - RNA, 22 nt, Artificial Sequence
  Guide RNA
auguacuugguucccuauggcu

SEQ ID NO: 27142 - RNA, 22 nt, Artificial Sequence
  Guide RNA
auuagccauagggaaccaagua

SEQ ID NO: 27143 - RNA, 22 nt, Artificial Sequence
  Guide RNA
auuagccauagggaaccaauua

SEQ ID NO: 27144 - RNA, 22 nt, Artificial Sequence
  Guide RNA
cauagggaaccaaguacauuuu

SEQ ID NO: 27145 - RNA, 22 nt, Artificial Sequence
  Guide RNA
cauagggaaccaauuacauuuu

SEQ ID NO: 27146 - RNA, 22 nt, Artificial Sequence
  Guide RNA
cauuagccauagggaaccaagu

SEQ ID NO: 27147 - RNA, 22 nt, Artificial Sequence
  Guide RNA
cauuagccauagggaaccaauu

SEQ ID NO: 27148 - RNA, 22 nt, Artificial Sequence
  Guide RNA
ccauagggaaccaaguacauuu

SEQ ID NO: 27149 - RNA, 22 nt, Artificial Sequence
  Guide RNA
ccauagggaaccaauuacauuu

SEQ ID NO: 27150 - RNA, 22 nt, Artificial Sequence
  Guide RNA
gaacauuagccauagggaacca

SEQ ID NO: 27151 - RNA, 22 nt, Artificial Sequence
  Guide RNA
gccauagggaaccaaguacauu

SEQ ID NO: 27152 - RNA, 22 nt, Artificial Sequence
  Guide RNA
gccauagggaaccaauuacauu

SEQ ID NO: 27153 - RNA, 22 nt, Artificial Sequence
  Guide RNA
guaauugguucccuauggcuaa

SEQ ID NO: 27154 - RNA, 22 nt, Artificial Sequence
  Guide RNA
guacuugguucccuauggcuaa

SEQ ID NO: 27155 - RNA, 22 nt, Artificial Sequence
  Guide RNA
uaauugguucccuauggcuaau

SEQ ID NO: 27156 - RNA, 22 nt, Artificial Sequence
  Guide RNA
uacuugguucccuauggcuaau

SEQ ID NO: 27157 - RNA, 22 nt, Artificial Sequence
  Guide RNA
uagccauagggaaccaaguaca

SEQ ID NO: 27158 - RNA, 22 nt, Artificial Sequence
  Guide RNA
uagccauagggaaccaauuaca

SEQ ID NO: 27159 - RNA, 22 nt, Artificial Sequence
  Guide RNA
uagggaaccaaguacauuuuuu

SEQ ID NO: 27160 - RNA, 22 nt, Artificial Sequence
  Guide RNA
ugaacauuagccauagggaacc

SEQ ID NO: 27161 - RNA, 22 nt, Artificial Sequence
  Guide RNA
uguaauugguucccuauggcua

SEQ ID NO: 27162 - RNA, 22 nt, Artificial Sequence
  Guide RNA
uguacuugguucccuauggcua

SEQ ID NO: 27163 - RNA, 22 nt, Artificial Sequence
  Guide RNA
uuagccauagggaaccaaguac

SEQ ID NO: 27164 - RNA, 22 nt, Artificial Sequence
  Guide RNA
uuagccauagggaaccaauuac

SEQ ID NO: 27165 - RNA, 22 nt, Artificial Sequence
  Guide RNA
uugaacauuagccauagggaac

SEQ ID NO: 27166 - RNA, 20 nt, Artificial Sequence
  Guide RNA
aaaauuguaucaucccgaaa

SEQ ID NO: 27167 - RNA, 20 nt, Artificial Sequence
  Guide RNA
aaauuguaucaucccgaaag

SEQ ID NO: 27168 - RNA, 20 nt, Artificial Sequence
  Guide RNA
aaauuguaucauccugaaag

SEQ ID NO: 27169 - RNA, 20 nt, Artificial Sequence
  Guide RNA
aagcuuucaggaugauacaa

SEQ ID NO: 27170 - RNA, 20 nt, Artificial Sequence
  Guide RNA
aagcuuucgggaugauacaa

SEQ ID NO: 27171 - RNA, 20 nt, Artificial Sequence
  Guide RNA
aaggugaagcuuucaggaug

SEQ ID NO: 27172 - RNA, 20 nt, Artificial Sequence
  Guide RNA
aaggugaagcuuucgggaug

SEQ ID NO: 27173 - RNA, 20 nt, Artificial Sequence
  Guide RNA
aauuguaucaucccgaaagc

SEQ ID NO: 27174 - RNA, 20 nt, Artificial Sequence
  Guide RNA
aauuguaucauccugaaagc

SEQ ID NO: 27175 - RNA, 20 nt, Artificial Sequence
  Guide RNA
acaaggugaagcuuucagga

SEQ ID NO: 27176 - RNA, 20 nt, Artificial Sequence
  Guide RNA
acaaggugaagcuuucggga

SEQ ID NO: 27177 - RNA, 20 nt, Artificial Sequence
  Guide RNA
agauacaaggugaagcuuuc

SEQ ID NO: 27178 - RNA, 20 nt, Artificial Sequence
  Guide RNA
agcuuucaggaugauacaau

SEQ ID NO: 27179 - RNA, 20 nt, Artificial Sequence
  Guide RNA
agcuuucgggaugauacaau

SEQ ID NO: 27180 - RNA, 20 nt, Artificial Sequence
  Guide RNA
aggugaagcuuucaggauga

SEQ ID NO: 27181 - RNA, 20 nt, Artificial Sequence
  Guide RNA
aggugaagcuuucgggauga

SEQ ID NO: 27182 - RNA, 20 nt, Artificial Sequence
  Guide RNA
auacaaggugaagcuuucag

SEQ ID NO: 27183 - RNA, 20 nt, Artificial Sequence
  Guide RNA
auacaaggugaagcuuucgg

SEQ ID NO: 27184 - RNA, 20 nt, Artificial Sequence
  Guide RNA
aucaucccgaaagcuucacc

SEQ ID NO: 27185 - RNA, 20 nt, Artificial Sequence
  Guide RNA
aucauccugaaagcuucacc

SEQ ID NO: 27186 - RNA, 20 nt, Artificial Sequence
  Guide RNA
aucccgaaagcuucaccuug

SEQ ID NO: 27187 - RNA, 20 nt, Artificial Sequence
  Guide RNA
auccugaaagcuucaccuug

SEQ ID NO: 27188 - RNA, 20 nt, Artificial Sequence
  Guide RNA
augagauacaaggugaagcu

SEQ ID NO: 27189 - RNA, 20 nt, Artificial Sequence
  Guide RNA
auuguaucaucccgaaagcu

SEQ ID NO: 27190 - RNA, 20 nt, Artificial Sequence
  Guide RNA
auuguaucauccugaaagcu

SEQ ID NO: 27191 - RNA, 20 nt, Artificial Sequence
  Guide RNA
caaaauuguaucaucccgaa

SEQ ID NO: 27192 - RNA, 20 nt, Artificial Sequence
  Guide RNA
caaaauuguaucauccugaa

SEQ ID NO: 27193 - RNA, 20 nt, Artificial Sequence
  Guide RNA
caaggugaagcuuucaggau

SEQ ID NO: 27194 - RNA, 20 nt, Artificial Sequence
  Guide RNA
caaggugaagcuuucgggau

SEQ ID NO: 27195 - RNA, 20 nt, Artificial Sequence
  Guide RNA
caggaugauacaauuuugaa

SEQ ID NO: 27196 - RNA, 20 nt, Artificial Sequence
  Guide RNA
caucccgaaagcuucaccuu

SEQ ID NO: 27197 - RNA, 20 nt, Artificial Sequence
  Guide RNA
cauccugaaagcuucaccuu

SEQ ID NO: 27198 - RNA, 20 nt, Artificial Sequence
  Guide RNA
cccgaaagcuucaccuugua

SEQ ID NO: 27199 - RNA, 20 nt, Artificial Sequence
  Guide RNA
ccgaaagcuucaccuuguau

SEQ ID NO: 27200 - RNA, 20 nt, Artificial Sequence
  Guide RNA
ccugaaagcuucaccuugua

SEQ ID NO: 27201 - RNA, 20 nt, Artificial Sequence
  Guide RNA
cgggaugauacaauuuugaa

SEQ ID NO: 27202 - RNA, 20 nt, Artificial Sequence
  Guide RNA
cugaaagcuucaccuuguau

SEQ ID NO: 27203 - RNA, 20 nt, Artificial Sequence
  Guide RNA
cugcuuucaaaauuguauca

SEQ ID NO: 27204 - RNA, 20 nt, Artificial Sequence
  Guide RNA
cuuucaaaauuguaucaucc

SEQ ID NO: 27205 - RNA, 20 nt, Artificial Sequence
  Guide RNA
cuuucaggaugauacaauuu

SEQ ID NO: 27206 - RNA, 20 nt, Artificial Sequence
  Guide RNA
cuuucgggaugauacaauuu

SEQ ID NO: 27207 - RNA, 20 nt, Artificial Sequence
  Guide RNA
gaagcuuucaggaugauaca

SEQ ID NO: 27208 - RNA, 20 nt, Artificial Sequence
  Guide RNA
gaagcuuucgggaugauaca

SEQ ID NO: 27209 - RNA, 20 nt, Artificial Sequence
  Guide RNA
gagauacaaggugaagcuuu

SEQ ID NO: 27210 - RNA, 20 nt, Artificial Sequence
  Guide RNA
gauacaaggugaagcuuuca

SEQ ID NO: 27211 - RNA, 20 nt, Artificial Sequence
  Guide RNA
gauacaaggugaagcuuucg

SEQ ID NO: 27212 - RNA, 20 nt, Artificial Sequence
  Guide RNA
gcuuucaaaauuguaucauc

SEQ ID NO: 27213 - RNA, 20 nt, Artificial Sequence
  Guide RNA
gcuuucaggaugauacaauu

SEQ ID NO: 27214 - RNA, 20 nt, Artificial Sequence
  Guide RNA
gcuuucgggaugauacaauu

SEQ ID NO: 27215 - RNA, 20 nt, Artificial Sequence
  Guide RNA
ggugaagcuuucaggaugau

SEQ ID NO: 27216 - RNA, 20 nt, Artificial Sequence
  Guide RNA
ggugaagcuuucgggaugau

SEQ ID NO: 27217 - RNA, 20 nt, Artificial Sequence
  Guide RNA
guaucaucccgaaagcuuca

SEQ ID NO: 27218 - RNA, 20 nt, Artificial Sequence
  Guide RNA
guaucauccugaaagcuuca

SEQ ID NO: 27219 - RNA, 20 nt, Artificial Sequence
  Guide RNA
gugaagcuuucaggaugaua

SEQ ID NO: 27220 - RNA, 20 nt, Artificial Sequence
  Guide RNA
gugaagcuuucgggaugaua

SEQ ID NO: 27221 - RNA, 20 nt, Artificial Sequence
  Guide RNA
uacaaggugaagcuuucagg

SEQ ID NO: 27222 - RNA, 20 nt, Artificial Sequence
  Guide RNA
uacaaggugaagcuuucggg

SEQ ID NO: 27223 - RNA, 20 nt, Artificial Sequence
  Guide RNA
uaucaucccgaaagcuucac

SEQ ID NO: 27224 - RNA, 20 nt, Artificial Sequence
  Guide RNA
uaucauccugaaagcuucac

SEQ ID NO: 27225 - RNA, 20 nt, Artificial Sequence
  Guide RNA
ucaaaauuguaucaucccga

SEQ ID NO: 27226 - RNA, 20 nt, Artificial Sequence
  Guide RNA
ucaaaauuguaucauccuga

SEQ ID NO: 27227 - RNA, 20 nt, Artificial Sequence
  Guide RNA
ucaggaugauacaauuuuga

SEQ ID NO: 27228 - RNA, 20 nt, Artificial Sequence
  Guide RNA
ucaucccgaaagcuucaccu

SEQ ID NO: 27229 - RNA, 20 nt, Artificial Sequence
  Guide RNA
ucauccugaaagcuucaccu

SEQ ID NO: 27230 - RNA, 20 nt, Artificial Sequence
  Guide RNA
ucccgaaagcuucaccuugu

SEQ ID NO: 27231 - RNA, 20 nt, Artificial Sequence
  Guide RNA
uccugaaagcuucaccuugu

SEQ ID NO: 27232 - RNA, 20 nt, Artificial Sequence
  Guide RNA
ucgggaugauacaauuuuga

SEQ ID NO: 27233 - RNA, 20 nt, Artificial Sequence
  Guide RNA
ugaagcuuucaggaugauac

SEQ ID NO: 27234 - RNA, 20 nt, Artificial Sequence
  Guide RNA
ugaagcuuucgggaugauac

SEQ ID NO: 27235 - RNA, 20 nt, Artificial Sequence
  Guide RNA
ugagauacaaggugaagcuu

SEQ ID NO: 27236 - RNA, 20 nt, Artificial Sequence
  Guide RNA
uguaucaucccgaaagcuuc

SEQ ID NO: 27237 - RNA, 20 nt, Artificial Sequence
  Guide RNA
uguaucauccugaaagcuuc

SEQ ID NO: 27238 - RNA, 20 nt, Artificial Sequence
  Guide RNA
uucaaaauuguaucaucccg

SEQ ID NO: 27239 - RNA, 20 nt, Artificial Sequence
  Guide RNA
uucaaaauuguaucauccug

SEQ ID NO: 27240 - RNA, 20 nt, Artificial Sequence
  Guide RNA
uucaggaugauacaauuuug

SEQ ID NO: 27241 - RNA, 20 nt, Artificial Sequence
  Guide RNA
uucgggaugauacaauuuug

SEQ ID NO: 27242 - RNA, 20 nt, Artificial Sequence
  Guide RNA
uuguaucaucccgaaagcuu

SEQ ID NO: 27243 - RNA, 20 nt, Artificial Sequence
  Guide RNA
uuguaucauccugaaagcuu

SEQ ID NO: 27244 - RNA, 20 nt, Artificial Sequence
  Guide RNA
uuucaaaauuguaucauccc

SEQ ID NO: 27245 - RNA, 20 nt, Artificial Sequence
  Guide RNA
uuucgggaugauacaauuuu

SEQ ID NO: 27246 - RNA, 21 nt, Artificial Sequence
  Guide RNA
aaaauuguaucaucccgaaag

SEQ ID NO: 27247 - RNA, 21 nt, Artificial Sequence
  Guide RNA
aaauuguaucaucccgaaagc

SEQ ID NO: 27248 - RNA, 21 nt, Artificial Sequence
  Guide RNA
aaauuguaucauccugaaagc

SEQ ID NO: 27249 - RNA, 21 nt, Artificial Sequence
  Guide RNA
aagcuuucaggaugauacaau

SEQ ID NO: 27250 - RNA, 21 nt, Artificial Sequence
  Guide RNA
aagcuuucgggaugauacaau

SEQ ID NO: 27251 - RNA, 21 nt, Artificial Sequence
  Guide RNA
aaggugaagcuuucaggauga

SEQ ID NO: 27252 - RNA, 21 nt, Artificial Sequence
  Guide RNA
aaggugaagcuuucgggauga

SEQ ID NO: 27253 - RNA, 21 nt, Artificial Sequence
  Guide RNA
aauuguaucaucccgaaagcu

SEQ ID NO: 27254 - RNA, 21 nt, Artificial Sequence
  Guide RNA
aauuguaucauccugaaagcu

SEQ ID NO: 27255 - RNA, 21 nt, Artificial Sequence
  Guide RNA
acaaggugaagcuuucaggau

SEQ ID NO: 27256 - RNA, 21 nt, Artificial Sequence
  Guide RNA
acaaggugaagcuuucgggau

SEQ ID NO: 27257 - RNA, 21 nt, Artificial Sequence
  Guide RNA
agauacaaggugaagcuuuca

SEQ ID NO: 27258 - RNA, 21 nt, Artificial Sequence
  Guide RNA
agauacaaggugaagcuuucg

SEQ ID NO: 27259 - RNA, 21 nt, Artificial Sequence
  Guide RNA
agcuuucaggaugauacaauu

SEQ ID NO: 27260 - RNA, 21 nt, Artificial Sequence
  Guide RNA
agcuuucgggaugauacaauu

SEQ ID NO: 27261 - RNA, 21 nt, Artificial Sequence
  Guide RNA
aggugaagcuuucaggaugau

SEQ ID NO: 27262 - RNA, 21 nt, Artificial Sequence
  Guide RNA
aggugaagcuuucgggaugau

SEQ ID NO: 27263 - RNA, 21 nt, Artificial Sequence
  Guide RNA
auacaaggugaagcuuucagg

SEQ ID NO: 27264 - RNA, 21 nt, Artificial Sequence
  Guide RNA
auacaaggugaagcuuucggg

SEQ ID NO: 27265 - RNA, 21 nt, Artificial Sequence
  Guide RNA
aucaucccgaaagcuucaccu

SEQ ID NO: 27266 - RNA, 21 nt, Artificial Sequence
  Guide RNA
aucauccugaaagcuucaccu

SEQ ID NO: 27267 - RNA, 21 nt, Artificial Sequence
  Guide RNA
aucccgaaagcuucaccuugu

SEQ ID NO: 27268 - RNA, 21 nt, Artificial Sequence
  Guide RNA
auccugaaagcuucaccuugu

SEQ ID NO: 27269 - RNA, 21 nt, Artificial Sequence
  Guide RNA
augagauacaaggugaagcuu

SEQ ID NO: 27270 - RNA, 21 nt, Artificial Sequence
  Guide RNA
auuguaucaucccgaaagcuu

SEQ ID NO: 27271 - RNA, 21 nt, Artificial Sequence
  Guide RNA
auuguaucauccugaaagcuu

SEQ ID NO: 27272 - RNA, 21 nt, Artificial Sequence
  Guide RNA
caaaauuguaucaucccgaaa

SEQ ID NO: 27273 - RNA, 21 nt, Artificial Sequence
  Guide RNA
caaggugaagcuuucaggaug

SEQ ID NO: 27274 - RNA, 21 nt, Artificial Sequence
  Guide RNA
caaggugaagcuuucgggaug

SEQ ID NO: 27275 - RNA, 21 nt, Artificial Sequence
  Guide RNA
caucccgaaagcuucaccuug

SEQ ID NO: 27276 - RNA, 21 nt, Artificial Sequence
  Guide RNA
cauccugaaagcuucaccuug

SEQ ID NO: 27277 - RNA, 21 nt, Artificial Sequence
  Guide RNA
cccgaaagcuucaccuuguau

SEQ ID NO: 27278 - RNA, 21 nt, Artificial Sequence
  Guide RNA
ccgaaagcuucaccuuguauc

SEQ ID NO: 27279 - RNA, 21 nt, Artificial Sequence
  Guide RNA
ccugaaagcuucaccuuguau

SEQ ID NO: 27280 - RNA, 21 nt, Artificial Sequence
  Guide RNA
ccugcuuucaaaauuguauca

SEQ ID NO: 27281 - RNA, 21 nt, Artificial Sequence
  Guide RNA
cgggaugauacaauuuugaaa

SEQ ID NO: 27282 - RNA, 21 nt, Artificial Sequence
  Guide RNA
cugaaagcuucaccuuguauc

SEQ ID NO: 27283 - RNA, 21 nt, Artificial Sequence
  Guide RNA
cuuucaaaauuguaucauccc

SEQ ID NO: 27284 - RNA, 21 nt, Artificial Sequence
  Guide RNA
cuuucgggaugauacaauuuu

SEQ ID NO: 27285 - RNA, 21 nt, Artificial Sequence
  Guide RNA
gaagcuuucaggaugauacaa

SEQ ID NO: 27286 - RNA, 21 nt, Artificial Sequence
  Guide RNA
gaagcuuucgggaugauacaa

SEQ ID NO: 27287 - RNA, 21 nt, Artificial Sequence
  Guide RNA
gagauacaaggugaagcuuuc

SEQ ID NO: 27288 - RNA, 21 nt, Artificial Sequence
  Guide RNA
gauacaaggugaagcuuucag

SEQ ID NO: 27289 - RNA, 21 nt, Artificial Sequence
  Guide RNA
gauacaaggugaagcuuucgg

SEQ ID NO: 27290 - RNA, 21 nt, Artificial Sequence
  Guide RNA
gaugagauacaaggugaagcu

SEQ ID NO: 27291 - RNA, 21 nt, Artificial Sequence
  Guide RNA
gcuuucaaaauuguaucaucc

SEQ ID NO: 27292 - RNA, 21 nt, Artificial Sequence
  Guide RNA
gcuuucaggaugauacaauuu

SEQ ID NO: 27293 - RNA, 21 nt, Artificial Sequence
  Guide RNA
gcuuucgggaugauacaauuu

SEQ ID NO: 27294 - RNA, 21 nt, Artificial Sequence
  Guide RNA
ggugaagcuuucaggaugaua

SEQ ID NO: 27295 - RNA, 21 nt, Artificial Sequence
  Guide RNA
ggugaagcuuucgggaugaua

SEQ ID NO: 27296 - RNA, 21 nt, Artificial Sequence
  Guide RNA
guaucaucccgaaagcuucac

SEQ ID NO: 27297 - RNA, 21 nt, Artificial Sequence
  Guide RNA
guaucauccugaaagcuucac

SEQ ID NO: 27298 - RNA, 21 nt, Artificial Sequence
  Guide RNA
gugaagcuuucaggaugauac

SEQ ID NO: 27299 - RNA, 21 nt, Artificial Sequence
  Guide RNA
gugaagcuuucgggaugauac

SEQ ID NO: 27300 - RNA, 21 nt, Artificial Sequence
  Guide RNA
uacaaggugaagcuuucagga

SEQ ID NO: 27301 - RNA, 21 nt, Artificial Sequence
  Guide RNA
uacaaggugaagcuuucggga

SEQ ID NO: 27302 - RNA, 21 nt, Artificial Sequence
  Guide RNA
uaucaucccgaaagcuucacc

SEQ ID NO: 27303 - RNA, 21 nt, Artificial Sequence
  Guide RNA
uaucauccugaaagcuucacc

SEQ ID NO: 27304 - RNA, 21 nt, Artificial Sequence
  Guide RNA
ucaaaauuguaucaucccgaa

SEQ ID NO: 27305 - RNA, 21 nt, Artificial Sequence
  Guide RNA
ucaucccgaaagcuucaccuu

SEQ ID NO: 27306 - RNA, 21 nt, Artificial Sequence
  Guide RNA
ucauccugaaagcuucaccuu

SEQ ID NO: 27307 - RNA, 21 nt, Artificial Sequence
  Guide RNA
ucccgaaagcuucaccuugua

SEQ ID NO: 27308 - RNA, 21 nt, Artificial Sequence
  Guide RNA
uccugaaagcuucaccuugua

SEQ ID NO: 27309 - RNA, 21 nt, Artificial Sequence
  Guide RNA
ucgggaugauacaauuuugaa

SEQ ID NO: 27310 - RNA, 21 nt, Artificial Sequence
  Guide RNA
ugaagcuuucaggaugauaca

SEQ ID NO: 27311 - RNA, 21 nt, Artificial Sequence
  Guide RNA
ugaagcuuucgggaugauaca

SEQ ID NO: 27312 - RNA, 21 nt, Artificial Sequence
  Guide RNA
ugagauacaaggugaagcuuu

SEQ ID NO: 27313 - RNA, 21 nt, Artificial Sequence
  Guide RNA
uguaucaucccgaaagcuuca

SEQ ID NO: 27314 - RNA, 21 nt, Artificial Sequence
  Guide RNA
uguaucauccugaaagcuuca

SEQ ID NO: 27315 - RNA, 21 nt, Artificial Sequence
  Guide RNA
uucaaaauuguaucaucccga

SEQ ID NO: 27316 - RNA, 21 nt, Artificial Sequence
  Guide RNA
uucgggaugauacaauuuuga

SEQ ID NO: 27317 - RNA, 21 nt, Artificial Sequence
  Guide RNA
uuguaucaucccgaaagcuuc

SEQ ID NO: 27318 - RNA, 21 nt, Artificial Sequence
  Guide RNA
uuguaucauccugaaagcuuc

SEQ ID NO: 27319 - RNA, 21 nt, Artificial Sequence
  Guide RNA
uuucaaaauuguaucaucccg

SEQ ID NO: 27320 - RNA, 21 nt, Artificial Sequence
  Guide RNA
uuucgggaugauacaauuuug

SEQ ID NO: 27321 - RNA, 22 nt, Artificial Sequence
  Guide RNA
aaaauuguaucaucccgaaagc

SEQ ID NO: 27322 - RNA, 22 nt, Artificial Sequence
  Guide RNA
aaaauuguaucauccugaaagc

SEQ ID NO: 27323 - RNA, 22 nt, Artificial Sequence
  Guide RNA
aaauuguaucaucccgaaagcu

SEQ ID NO: 27324 - RNA, 22 nt, Artificial Sequence
  Guide RNA
aaauuguaucauccugaaagcu

SEQ ID NO: 27325 - RNA, 22 nt, Artificial Sequence
  Guide RNA
aagcuuucaggaugauacaauu

SEQ ID NO: 27326 - RNA, 22 nt, Artificial Sequence
  Guide RNA
aagcuuucgggaugauacaauu

SEQ ID NO: 27327 - RNA, 22 nt, Artificial Sequence
  Guide RNA
aaggugaagcuuucaggaugau

SEQ ID NO: 27328 - RNA, 22 nt, Artificial Sequence
  Guide RNA
aaggugaagcuuucgggaugau

SEQ ID NO: 27329 - RNA, 22 nt, Artificial Sequence
  Guide RNA
aauuguaucaucccgaaagcuu

SEQ ID NO: 27330 - RNA, 22 nt, Artificial Sequence
  Guide RNA
aauuguaucauccugaaagcuu

SEQ ID NO: 27331 - RNA, 22 nt, Artificial Sequence
  Guide RNA
acaaggugaagcuuucaggaug

SEQ ID NO: 27332 - RNA, 22 nt, Artificial Sequence
  Guide RNA
acaaggugaagcuuucgggaug

SEQ ID NO: 27333 - RNA, 22 nt, Artificial Sequence
  Guide RNA
accugcuuucaaaauuguauca

SEQ ID NO: 27334 - RNA, 22 nt, Artificial Sequence
  Guide RNA
agauacaaggugaagcuuucag

SEQ ID NO: 27335 - RNA, 22 nt, Artificial Sequence
  Guide RNA
agauacaaggugaagcuuucgg

SEQ ID NO: 27336 - RNA, 22 nt, Artificial Sequence
  Guide RNA
agcuuucaggaugauacaauuu

SEQ ID NO: 27337 - RNA, 22 nt, Artificial Sequence
  Guide RNA
agcuuucgggaugauacaauuu

SEQ ID NO: 27338 - RNA, 22 nt, Artificial Sequence
  Guide RNA
aggugaagcuuucaggaugaua

SEQ ID NO: 27339 - RNA, 22 nt, Artificial Sequence
  Guide RNA
aggugaagcuuucgggaugaua

SEQ ID NO: 27340 - RNA, 22 nt, Artificial Sequence
  Guide RNA
auacaaggugaagcuuucagga

SEQ ID NO: 27341 - RNA, 22 nt, Artificial Sequence
  Guide RNA
auacaaggugaagcuuucggga

SEQ ID NO: 27342 - RNA, 22 nt, Artificial Sequence
  Guide RNA
aucaucccgaaagcuucaccuu

SEQ ID NO: 27343 - RNA, 22 nt, Artificial Sequence
  Guide RNA
aucauccugaaagcuucaccuu

SEQ ID NO: 27344 - RNA, 22 nt, Artificial Sequence
  Guide RNA
aucccgaaagcuucaccuugua

SEQ ID NO: 27345 - RNA, 22 nt, Artificial Sequence
  Guide RNA
auccugaaagcuucaccuugua

SEQ ID NO: 27346 - RNA, 22 nt, Artificial Sequence
  Guide RNA
augagauacaaggugaagcuuu

SEQ ID NO: 27347 - RNA, 22 nt, Artificial Sequence
  Guide RNA
auuguaucaucccgaaagcuuc

SEQ ID NO: 27348 - RNA, 22 nt, Artificial Sequence
  Guide RNA
auuguaucauccugaaagcuuc

SEQ ID NO: 27349 - RNA, 22 nt, Artificial Sequence
  Guide RNA
caaaauuguaucaucccgaaag

SEQ ID NO: 27350 - RNA, 22 nt, Artificial Sequence
  Guide RNA
caaaauuguaucauccugaaag

SEQ ID NO: 27351 - RNA, 22 nt, Artificial Sequence
  Guide RNA
caaggugaagcuuucaggauga

SEQ ID NO: 27352 - RNA, 22 nt, Artificial Sequence
  Guide RNA
caaggugaagcuuucgggauga

SEQ ID NO: 27353 - RNA, 22 nt, Artificial Sequence
  Guide RNA
caggaugauacaauuuugaaag

SEQ ID NO: 27354 - RNA, 22 nt, Artificial Sequence
  Guide RNA
caucccgaaagcuucaccuugu

SEQ ID NO: 27355 - RNA, 22 nt, Artificial Sequence
  Guide RNA
cauccugaaagcuucaccuugu

SEQ ID NO: 27356 - RNA, 22 nt, Artificial Sequence
  Guide RNA
cccgaaagcuucaccuuguauc

SEQ ID NO: 27357 - RNA, 22 nt, Artificial Sequence
  Guide RNA
ccgaaagcuucaccuuguaucu

SEQ ID NO: 27358 - RNA, 22 nt, Artificial Sequence
  Guide RNA
ccugaaagcuucaccuuguauc

SEQ ID NO: 27359 - RNA, 22 nt, Artificial Sequence
  Guide RNA
ccugcuuucaaaauuguaucau

SEQ ID NO: 27360 - RNA, 22 nt, Artificial Sequence
  Guide RNA
cgggaugauacaauuuugaaag

SEQ ID NO: 27361 - RNA, 22 nt, Artificial Sequence
  Guide RNA
cugaaagcuucaccuuguaucu

SEQ ID NO: 27362 - RNA, 22 nt, Artificial Sequence
  Guide RNA
cugcuuucaaaauuguaucauc

SEQ ID NO: 27363 - RNA, 22 nt, Artificial Sequence
  Guide RNA
cuuucaaaauuguaucaucccg

SEQ ID NO: 27364 - RNA, 22 nt, Artificial Sequence
  Guide RNA
cuuucaaaauuguaucauccug

SEQ ID NO: 27365 - RNA, 22 nt, Artificial Sequence
  Guide RNA
cuuucaggaugauacaauuuug

SEQ ID NO: 27366 - RNA, 22 nt, Artificial Sequence
  Guide RNA
cuuucgggaugauacaauuuug

SEQ ID NO: 27367 - RNA, 22 nt, Artificial Sequence
  Guide RNA
gaagcuuucaggaugauacaau

SEQ ID NO: 27368 - RNA, 22 nt, Artificial Sequence
  Guide RNA
gaagcuuucgggaugauacaau

SEQ ID NO: 27369 - RNA, 22 nt, Artificial Sequence
  Guide RNA
gagauacaaggugaagcuuuca

SEQ ID NO: 27370 - RNA, 22 nt, Artificial Sequence
  Guide RNA
gagauacaaggugaagcuuucg

SEQ ID NO: 27371 - RNA, 22 nt, Artificial Sequence
  Guide RNA
gauacaaggugaagcuuucagg

SEQ ID NO: 27372 - RNA, 22 nt, Artificial Sequence
  Guide RNA
gauacaaggugaagcuuucggg

SEQ ID NO: 27373 - RNA, 22 nt, Artificial Sequence
  Guide RNA
gaugagauacaaggugaagcuu

SEQ ID NO: 27374 - RNA, 22 nt, Artificial Sequence
  Guide RNA
gcuuucaaaauuguaucauccc

SEQ ID NO: 27375 - RNA, 22 nt, Artificial Sequence
  Guide RNA
gcuuucaaaauuguaucauccu

SEQ ID NO: 27376 - RNA, 22 nt, Artificial Sequence
  Guide RNA
gcuuucaggaugauacaauuuu

SEQ ID NO: 27377 - RNA, 22 nt, Artificial Sequence
  Guide RNA
gcuuucgggaugauacaauuuu

SEQ ID NO: 27378 - RNA, 22 nt, Artificial Sequence
  Guide RNA
ggugaagcuuucaggaugauac

SEQ ID NO: 27379 - RNA, 22 nt, Artificial Sequence
  Guide RNA
ggugaagcuuucgggaugauac

SEQ ID NO: 27380 - RNA, 22 nt, Artificial Sequence
  Guide RNA
guaucaucccgaaagcuucacc

SEQ ID NO: 27381 - RNA, 22 nt, Artificial Sequence
  Guide RNA
guaucauccugaaagcuucacc

SEQ ID NO: 27382 - RNA, 22 nt, Artificial Sequence
  Guide RNA
gugaagcuuucaggaugauaca

SEQ ID NO: 27383 - RNA, 22 nt, Artificial Sequence
  Guide RNA
gugaagcuuucgggaugauaca

SEQ ID NO: 27384 - RNA, 22 nt, Artificial Sequence
  Guide RNA
uacaaggugaagcuuucaggau

SEQ ID NO: 27385 - RNA, 22 nt, Artificial Sequence
  Guide RNA
uacaaggugaagcuuucgggau

SEQ ID NO: 27386 - RNA, 22 nt, Artificial Sequence
  Guide RNA
uaucaucccgaaagcuucaccu

SEQ ID NO: 27387 - RNA, 22 nt, Artificial Sequence
  Guide RNA
uaucauccugaaagcuucaccu

SEQ ID NO: 27388 - RNA, 22 nt, Artificial Sequence
  Guide RNA
ucaaaauuguaucaucccgaaa

SEQ ID NO: 27389 - RNA, 22 nt, Artificial Sequence
  Guide RNA
ucaucccgaaagcuucaccuug

SEQ ID NO: 27390 - RNA, 22 nt, Artificial Sequence
  Guide RNA
ucauccugaaagcuucaccuug

SEQ ID NO: 27391 - RNA, 22 nt, Artificial Sequence
  Guide RNA
ucccgaaagcuucaccuuguau

SEQ ID NO: 27392 - RNA, 22 nt, Artificial Sequence
  Guide RNA
uccugaaagcuucaccuuguau

SEQ ID NO: 27393 - RNA, 22 nt, Artificial Sequence
  Guide RNA
ucgggaugauacaauuuugaaa

SEQ ID NO: 27394 - RNA, 22 nt, Artificial Sequence
  Guide RNA
ugaagcuuucaggaugauacaa

SEQ ID NO: 27395 - RNA, 22 nt, Artificial Sequence
  Guide RNA
ugaagcuuucgggaugauacaa

SEQ ID NO: 27396 - RNA, 22 nt, Artificial Sequence
  Guide RNA
ugagauacaaggugaagcuuuc

SEQ ID NO: 27397 - RNA, 22 nt, Artificial Sequence
  Guide RNA
ugaugagauacaaggugaagcu

SEQ ID NO: 27398 - RNA, 22 nt, Artificial Sequence
  Guide RNA
ugcuuucaaaauuguaucaucc

SEQ ID NO: 27399 - RNA, 22 nt, Artificial Sequence
  Guide RNA
uguaucaucccgaaagcuucac

SEQ ID NO: 27400 - RNA, 22 nt, Artificial Sequence
  Guide RNA
uguaucauccugaaagcuucac

SEQ ID NO: 27401 - RNA, 22 nt, Artificial Sequence
  Guide RNA
uucaaaauuguaucaucccgaa

SEQ ID NO: 27402 - RNA, 22 nt, Artificial Sequence
  Guide RNA
uucgggaugauacaauuuugaa

SEQ ID NO: 27403 - RNA, 22 nt, Artificial Sequence
  Guide RNA
uuguaucaucccgaaagcuuca

SEQ ID NO: 27404 - RNA, 22 nt, Artificial Sequence
  Guide RNA
uuguaucauccugaaagcuuca

SEQ ID NO: 27405 - RNA, 22 nt, Artificial Sequence
  Guide RNA
uuucaaaauuguaucaucccga

SEQ ID NO: 27406 - RNA, 22 nt, Artificial Sequence
  Guide RNA
uuucgggaugauacaauuuuga

SEQ ID NO: 27407 - RNA, 20 nt, Artificial Sequence
  Guide RNA
accaugcuuccuguaacagc

SEQ ID NO: 27408 - RNA, 20 nt, Artificial Sequence
  Guide RNA
acuuaugguucugcaggcug

SEQ ID NO: 27409 - RNA, 20 nt, Artificial Sequence
  Guide RNA
agcaccaugcuuccuguaac

SEQ ID NO: 27410 - RNA, 20 nt, Artificial Sequence
  Guide RNA
aggcuguuacaggaagcaug

SEQ ID NO: 27411 - RNA, 20 nt, Artificial Sequence
  Guide RNA
augcuuccuguaacagccug

SEQ ID NO: 27412 - RNA, 20 nt, Artificial Sequence
  Guide RNA
augguucugcaggcuguuac

SEQ ID NO: 27413 - RNA, 20 nt, Artificial Sequence
  Guide RNA
caccaugcuuccuguaacag

SEQ ID NO: 27414 - RNA, 20 nt, Artificial Sequence
  Guide RNA
cagcaccaugcuuccuguaa

SEQ ID NO: 27415 - RNA, 20 nt, Artificial Sequence
  Guide RNA
caggcuguuacaggaagcau

SEQ ID NO: 27416 - RNA, 20 nt, Artificial Sequence
  Guide RNA
caugcuuccuguaacagccu

SEQ ID NO: 27417 - RNA, 20 nt, Artificial Sequence
  Guide RNA
ccagcaccaugcuuccugua

SEQ ID NO: 27418 - RNA, 20 nt, Artificial Sequence
  Guide RNA
ccaugcuuccuguaacagcc

SEQ ID NO: 27419 - RNA, 20 nt, Artificial Sequence
  Guide RNA
ccuguaacagccugcagaac

SEQ ID NO: 27420 - RNA, 20 nt, Artificial Sequence
  Guide RNA
cugcaggcuguuacaggaag

SEQ ID NO: 27421 - RNA, 20 nt, Artificial Sequence
  Guide RNA
cuguaacagccugcagaacc

SEQ ID NO: 27422 - RNA, 20 nt, Artificial Sequence
  Guide RNA
cuguuacaggaagcauggug

SEQ ID NO: 27423 - RNA, 20 nt, Artificial Sequence
  Guide RNA
cuuaugguucugcaggcugu

SEQ ID NO: 27424 - RNA, 20 nt, Artificial Sequence
  Guide RNA
cuuccuguaacagccugcag

SEQ ID NO: 27425 - RNA, 20 nt, Artificial Sequence
  Guide RNA
gacuuaugguucugcaggcu

SEQ ID NO: 27426 - RNA, 20 nt, Artificial Sequence
  Guide RNA
gcaccaugcuuccuguaaca

SEQ ID NO: 27427 - RNA, 20 nt, Artificial Sequence
  Guide RNA
gcaggcuguuacaggaagca

SEQ ID NO: 27428 - RNA, 20 nt, Artificial Sequence
  Guide RNA
gccagcaccaugcuuccugu

SEQ ID NO: 27429 - RNA, 20 nt, Artificial Sequence
  Guide RNA
gcuguuacaggaagcauggu

SEQ ID NO: 27430 - RNA, 20 nt, Artificial Sequence
  Guide RNA
gcuuccuguaacagccugca

SEQ ID NO: 27431 - RNA, 20 nt, Artificial Sequence
  Guide RNA
ggcuguuacaggaagcaugg

SEQ ID NO: 27432 - RNA, 20 nt, Artificial Sequence
  Guide RNA
gguucugcaggcuguuacag

SEQ ID NO: 27433 - RNA, 20 nt, Artificial Sequence
  Guide RNA
guaacagccugcagaaccau

SEQ ID NO: 27434 - RNA, 20 nt, Artificial Sequence
  Guide RNA
guacagccugcagaaccaua

SEQ ID NO: 27435 - RNA, 20 nt, Artificial Sequence
  Guide RNA
guuacaggaagcauggugcu

SEQ ID NO: 27436 - RNA, 20 nt, Artificial Sequence
  Guide RNA
guucugcaggcuguuacagg

SEQ ID NO: 27437 - RNA, 20 nt, Artificial Sequence
  Guide RNA
uaugguucugcaggcuguua

SEQ ID NO: 27438 - RNA, 20 nt, Artificial Sequence
  Guide RNA
uccuguaacagccugcagaa

SEQ ID NO: 27439 - RNA, 20 nt, Artificial Sequence
  Guide RNA
ucugcaggcuguuacaggaa

SEQ ID NO: 27440 - RNA, 20 nt, Artificial Sequence
  Guide RNA
ugacuuaugguucugcaggc

SEQ ID NO: 27441 - RNA, 20 nt, Artificial Sequence
  Guide RNA
ugcaggcuguuacaggaagc

SEQ ID NO: 27442 - RNA, 20 nt, Artificial Sequence
  Guide RNA
ugccagcaccaugcuuccug

SEQ ID NO: 27443 - RNA, 20 nt, Artificial Sequence
  Guide RNA
ugcuuccuguaacagccugc

SEQ ID NO: 27444 - RNA, 20 nt, Artificial Sequence
  Guide RNA
ugguucugcaggcuguuaca

SEQ ID NO: 27445 - RNA, 20 nt, Artificial Sequence
  Guide RNA
uguaacagccugcagaacca

SEQ ID NO: 27446 - RNA, 20 nt, Artificial Sequence
  Guide RNA
uguacagccugcagaaccau

SEQ ID NO: 27447 - RNA, 20 nt, Artificial Sequence
  Guide RNA
uguuacaggaagcauggugc

SEQ ID NO: 27448 - RNA, 20 nt, Artificial Sequence
  Guide RNA
uuaugguucugcaggcuguu

SEQ ID NO: 27449 - RNA, 20 nt, Artificial Sequence
  Guide RNA
uuccuguaacagccugcaga

SEQ ID NO: 27450 - RNA, 20 nt, Artificial Sequence
  Guide RNA
uucugcaggcuguuacagga

SEQ ID NO: 27451 - RNA, 21 nt, Artificial Sequence
  Guide RNA
accaugcuuccuguaacagcc

SEQ ID NO: 27452 - RNA, 21 nt, Artificial Sequence
  Guide RNA
acuuaugguucugcaggcugu

SEQ ID NO: 27453 - RNA, 21 nt, Artificial Sequence
  Guide RNA
agcaccaugcuuccuguaaca

SEQ ID NO: 27454 - RNA, 21 nt, Artificial Sequence
  Guide RNA
aggcuguuacaggaagcaugg

SEQ ID NO: 27455 - RNA, 21 nt, Artificial Sequence
  Guide RNA
augccagcaccaugcuuccug

SEQ ID NO: 27456 - RNA, 21 nt, Artificial Sequence
  Guide RNA
augcuuccuguaacagccugc

SEQ ID NO: 27457 - RNA, 21 nt, Artificial Sequence
  Guide RNA
augguucugcaggcuguuaca

SEQ ID NO: 27458 - RNA, 21 nt, Artificial Sequence
  Guide RNA
caccaugcuuccuguaacagc

SEQ ID NO: 27459 - RNA, 21 nt, Artificial Sequence
  Guide RNA
cagcaccaugcuuccuguaac

SEQ ID NO: 27460 - RNA, 21 nt, Artificial Sequence
  Guide RNA
caggcuguuacaggaagcaug

SEQ ID NO: 27461 - RNA, 21 nt, Artificial Sequence
  Guide RNA
caugcuuccuguaacagccug

SEQ ID NO: 27462 - RNA, 21 nt, Artificial Sequence
  Guide RNA
ccagcaccaugcuuccuguaa

SEQ ID NO: 27463 - RNA, 21 nt, Artificial Sequence
  Guide RNA
ccaugcuuccuguaacagccu

SEQ ID NO: 27464 - RNA, 21 nt, Artificial Sequence
  Guide RNA
ccuguaacagccugcagaacc

SEQ ID NO: 27465 - RNA, 21 nt, Artificial Sequence
  Guide RNA
cugcaggcuguuacaggaagc

SEQ ID NO: 27466 - RNA, 21 nt, Artificial Sequence
  Guide RNA
cuguaacagccugcagaacca

SEQ ID NO: 27467 - RNA, 21 nt, Artificial Sequence
  Guide RNA
cuguacagccugcagaaccau

SEQ ID NO: 27468 - RNA, 21 nt, Artificial Sequence
  Guide RNA
cuguuacaggaagcauggugc

SEQ ID NO: 27469 - RNA, 21 nt, Artificial Sequence
  Guide RNA
cuuaugguucugcaggcuguu

SEQ ID NO: 27470 - RNA, 21 nt, Artificial Sequence
  Guide RNA
cuuccuguaacagccugcaga

SEQ ID NO: 27471 - RNA, 21 nt, Artificial Sequence
  Guide RNA
gacuuaugguucugcaggcug

SEQ ID NO: 27472 - RNA, 21 nt, Artificial Sequence
  Guide RNA
gcaccaugcuuccuguaacag

SEQ ID NO: 27473 - RNA, 21 nt, Artificial Sequence
  Guide RNA
gcaggcuguuacaggaagcau

SEQ ID NO: 27474 - RNA, 21 nt, Artificial Sequence
  Guide RNA
gccagcaccaugcuuccugua

SEQ ID NO: 27475 - RNA, 21 nt, Artificial Sequence
  Guide RNA
gcuguuacaggaagcauggug

SEQ ID NO: 27476 - RNA, 21 nt, Artificial Sequence
  Guide RNA
gcuuccuguaacagccugcag

SEQ ID NO: 27477 - RNA, 21 nt, Artificial Sequence
  Guide RNA
ggcuguuacaggaagcauggu

SEQ ID NO: 27478 - RNA, 21 nt, Artificial Sequence
  Guide RNA
gguucugcaggcuguuacagg

SEQ ID NO: 27479 - RNA, 21 nt, Artificial Sequence
  Guide RNA
guaacagccugcagaaccaua

SEQ ID NO: 27480 - RNA, 21 nt, Artificial Sequence
  Guide RNA
guacagccugcagaaccauaa

SEQ ID NO: 27481 - RNA, 21 nt, Artificial Sequence
  Guide RNA
guuacaggaagcauggugcug

SEQ ID NO: 27482 - RNA, 21 nt, Artificial Sequence
  Guide RNA
guucugcaggcuguuacagga

SEQ ID NO: 27483 - RNA, 21 nt, Artificial Sequence
  Guide RNA
uaugguucugcaggcuguuac

SEQ ID NO: 27484 - RNA, 21 nt, Artificial Sequence
  Guide RNA
uccuguaacagccugcagaac

SEQ ID NO: 27485 - RNA, 21 nt, Artificial Sequence
  Guide RNA
ucugcaggcuguuacaggaag

SEQ ID NO: 27486 - RNA, 21 nt, Artificial Sequence
  Guide RNA
ugacuuaugguucugcaggcu

SEQ ID NO: 27487 - RNA, 21 nt, Artificial Sequence
  Guide RNA
ugcaggcuguuacaggaagca

SEQ ID NO: 27488 - RNA, 21 nt, Artificial Sequence
  Guide RNA
ugccagcaccaugcuuccugu

SEQ ID NO: 27489 - RNA, 21 nt, Artificial Sequence
  Guide RNA
ugcuuccuguaacagccugca

SEQ ID NO: 27490 - RNA, 21 nt, Artificial Sequence
  Guide RNA
ugguucugcaggcuguuacag

SEQ ID NO: 27491 - RNA, 21 nt, Artificial Sequence
  Guide RNA
uguaacagccugcagaaccau

SEQ ID NO: 27492 - RNA, 21 nt, Artificial Sequence
  Guide RNA
uguacagccugcagaaccaua

SEQ ID NO: 27493 - RNA, 21 nt, Artificial Sequence
  Guide RNA
uguuacaggaagcauggugcu

SEQ ID NO: 27494 - RNA, 21 nt, Artificial Sequence
  Guide RNA
uuaugguucugcaggcuguua

SEQ ID NO: 27495 - RNA, 21 nt, Artificial Sequence
  Guide RNA
uuccuguaacagccugcagaa

SEQ ID NO: 27496 - RNA, 21 nt, Artificial Sequence
  Guide RNA
uucugcaggcuguuacaggaa

SEQ ID NO: 27497 - RNA, 21 nt, Artificial Sequence
  Guide RNA
uugacuuaugguucugcaggc

SEQ ID NO: 27498 - RNA, 22 nt, Artificial Sequence
  Guide RNA
accaugcuuccuguaacagccu

SEQ ID NO: 27499 - RNA, 22 nt, Artificial Sequence
  Guide RNA
acuuaugguucugcaggcugua

SEQ ID NO: 27500 - RNA, 22 nt, Artificial Sequence
  Guide RNA
acuuaugguucugcaggcuguu

SEQ ID NO: 27501 - RNA, 22 nt, Artificial Sequence
  Guide RNA
agcaccaugcuuccuguaacag

SEQ ID NO: 27502 - RNA, 22 nt, Artificial Sequence
  Guide RNA
aggcuguuacaggaagcauggu

SEQ ID NO: 27503 - RNA, 22 nt, Artificial Sequence
  Guide RNA
augccagcaccaugcuuccugu

SEQ ID NO: 27504 - RNA, 22 nt, Artificial Sequence
  Guide RNA
augcuuccuguaacagccugca

SEQ ID NO: 27505 - RNA, 22 nt, Artificial Sequence
  Guide RNA
augguucugcaggcuguuacag

SEQ ID NO: 27506 - RNA, 22 nt, Artificial Sequence
  Guide RNA
auugacuuaugguucugcaggc

SEQ ID NO: 27507 - RNA, 22 nt, Artificial Sequence
  Guide RNA
caccaugcuuccuguaacagcc

SEQ ID NO: 27508 - RNA, 22 nt, Artificial Sequence
  Guide RNA
cagcaccaugcuuccuguaaca

SEQ ID NO: 27509 - RNA, 22 nt, Artificial Sequence
  Guide RNA
caggcuguuacaggaagcaugg

SEQ ID NO: 27510 - RNA, 22 nt, Artificial Sequence
  Guide RNA
caugcuuccuguaacagccugc

SEQ ID NO: 27511 - RNA, 22 nt, Artificial Sequence
  Guide RNA
ccagcaccaugcuuccuguaac

SEQ ID NO: 27512 - RNA, 22 nt, Artificial Sequence
  Guide RNA
ccaugcuuccuguaacagccug

SEQ ID NO: 27513 - RNA, 22 nt, Artificial Sequence
  Guide RNA
ccuguaacagccugcagaacca

SEQ ID NO: 27514 - RNA, 22 nt, Artificial Sequence
  Guide RNA
ccuguacagccugcagaaccau

SEQ ID NO: 27515 - RNA, 22 nt, Artificial Sequence
  Guide RNA
cugcaggcuguuacaggaagca

SEQ ID NO: 27516 - RNA, 22 nt, Artificial Sequence
  Guide RNA
cuguaacagccugcagaaccau

SEQ ID NO: 27517 - RNA, 22 nt, Artificial Sequence
  Guide RNA
cuguacagccugcagaaccaua

SEQ ID NO: 27518 - RNA, 22 nt, Artificial Sequence
  Guide RNA
cuguuacaggaagcauggugcu

SEQ ID NO: 27519 - RNA, 22 nt, Artificial Sequence
  Guide RNA
cuuaugguucugcaggcuguua

SEQ ID NO: 27520 - RNA, 22 nt, Artificial Sequence
  Guide RNA
cuuccuguaacagccugcagaa

SEQ ID NO: 27521 - RNA, 22 nt, Artificial Sequence
  Guide RNA
gacuuaugguucugcaggcugu

SEQ ID NO: 27522 - RNA, 22 nt, Artificial Sequence
  Guide RNA
gaugccagcaccaugcuuccug

SEQ ID NO: 27523 - RNA, 22 nt, Artificial Sequence
  Guide RNA
gcaccaugcuuccuguaacagc

SEQ ID NO: 27524 - RNA, 22 nt, Artificial Sequence
  Guide RNA
gcaggcuguuacaggaagcaug

SEQ ID NO: 27525 - RNA, 22 nt, Artificial Sequence
  Guide RNA
gccagcaccaugcuuccuguaa

SEQ ID NO: 27526 - RNA, 22 nt, Artificial Sequence
  Guide RNA
gcuguuacaggaagcauggugc

SEQ ID NO: 27527 - RNA, 22 nt, Artificial Sequence
  Guide RNA
gcuuccuguaacagccugcaga

SEQ ID NO: 27528 - RNA, 22 nt, Artificial Sequence
  Guide RNA
ggcuguuacaggaagcauggug

SEQ ID NO: 27529 - RNA, 22 nt, Artificial Sequence
  Guide RNA
gguucugcaggcuguuacagga

SEQ ID NO: 27530 - RNA, 22 nt, Artificial Sequence
  Guide RNA
guaacagccugcagaaccauaa

SEQ ID NO: 27531 - RNA, 22 nt, Artificial Sequence
  Guide RNA
guacagccugcagaaccauaag

SEQ ID NO: 27532 - RNA, 22 nt, Artificial Sequence
  Guide RNA
guuacaggaagcauggugcugg

SEQ ID NO: 27533 - RNA, 22 nt, Artificial Sequence
  Guide RNA
guucugcaggcuguuacaggaa

SEQ ID NO: 27534 - RNA, 22 nt, Artificial Sequence
  Guide RNA
uaugguucugcaggcuguuaca

SEQ ID NO: 27535 - RNA, 22 nt, Artificial Sequence
  Guide RNA
uccuguaacagccugcagaacc

SEQ ID NO: 27536 - RNA, 22 nt, Artificial Sequence
  Guide RNA
ucugcaggcuguuacaggaagc

SEQ ID NO: 27537 - RNA, 22 nt, Artificial Sequence
  Guide RNA
ugacuuaugguucugcaggcug

SEQ ID NO: 27538 - RNA, 22 nt, Artificial Sequence
  Guide RNA
ugcaggcuguuacaggaagcau

SEQ ID NO: 27539 - RNA, 22 nt, Artificial Sequence
  Guide RNA
ugccagcaccaugcuuccugua

SEQ ID NO: 27540 - RNA, 22 nt, Artificial Sequence
  Guide RNA
ugcuuccuguaacagccugcag

SEQ ID NO: 27541 - RNA, 22 nt, Artificial Sequence
  Guide RNA
ugguucugcaggcuguuacagg

SEQ ID NO: 27542 - RNA, 22 nt, Artificial Sequence
  Guide RNA
uguaacagccugcagaaccaua

SEQ ID NO: 27543 - RNA, 22 nt, Artificial Sequence
  Guide RNA
uguacagccugcagaaccauaa

SEQ ID NO: 27544 - RNA, 22 nt, Artificial Sequence
  Guide RNA
uguuacaggaagcauggugcug

SEQ ID NO: 27545 - RNA, 22 nt, Artificial Sequence
  Guide RNA
uuaugguucugcaggcuguuac

SEQ ID NO: 27546 - RNA, 22 nt, Artificial Sequence
  Guide RNA
uuccuguaacagccugcagaac

SEQ ID NO: 27547 - RNA, 22 nt, Artificial Sequence
  Guide RNA
uucugcaggcuguuacaggaag

SEQ ID NO: 27548 - RNA, 22 nt, Artificial Sequence
  Guide RNA
uugacuuaugguucugcaggcu

SEQ ID NO: 27549 - RNA, 20 nt, Artificial Sequence
  Guide RNA
aaaagagagaacauguuucc

SEQ ID NO: 27550 - RNA, 20 nt, Artificial Sequence
  Guide RNA
aaaagagagagcauguuucc

SEQ ID NO: 27551 - RNA, 20 nt, Artificial Sequence
  Guide RNA
aaacaugcucucucuuuucc

SEQ ID NO: 27552 - RNA, 20 nt, Artificial Sequence
  Guide RNA
aaacauguucucucuuuucc

SEQ ID NO: 27553 - RNA, 20 nt, Artificial Sequence
  Guide RNA
aaaccagggaaaagagagaa

SEQ ID NO: 27554 - RNA, 20 nt, Artificial Sequence
  Guide RNA
aaaccagggaaaagagagag

SEQ ID NO: 27555 - RNA, 20 nt, Artificial Sequence
  Guide RNA
aaagagagaacauguuucca

SEQ ID NO: 27556 - RNA, 20 nt, Artificial Sequence
  Guide RNA
aaagagagagcauguuucca

SEQ ID NO: 27557 - RNA, 20 nt, Artificial Sequence
  Guide RNA
aaauaaaccagggaaaagag

SEQ ID NO: 27558 - RNA, 20 nt, Artificial Sequence
  Guide RNA
aacaugcucucucuuuuccc

SEQ ID NO: 27559 - RNA, 20 nt, Artificial Sequence
  Guide RNA
aacauguucucucuuuuccc

SEQ ID NO: 27560 - RNA, 20 nt, Artificial Sequence
  Guide RNA
aacauguuuccaggguggga

SEQ ID NO: 27561 - RNA, 20 nt, Artificial Sequence
  Guide RNA
aaccagggaaaagagagaac

SEQ ID NO: 27562 - RNA, 20 nt, Artificial Sequence
  Guide RNA
aaccagggaaaagagagagc

SEQ ID NO: 27563 - RNA, 20 nt, Artificial Sequence
  Guide RNA
aagagagaacauguuuccag

SEQ ID NO: 27564 - RNA, 20 nt, Artificial Sequence
  Guide RNA
aagagagagcauguuuccag

SEQ ID NO: 27565 - RNA, 20 nt, Artificial Sequence
  Guide RNA
aauaaaccagggaaaagaga

SEQ ID NO: 27566 - RNA, 20 nt, Artificial Sequence
  Guide RNA
acaugcucucucuuuucccu

SEQ ID NO: 27567 - RNA, 20 nt, Artificial Sequence
  Guide RNA
acauguucucucuuuucccu

SEQ ID NO: 27568 - RNA, 20 nt, Artificial Sequence
  Guide RNA
accagggaaaagagagaaca

SEQ ID NO: 27569 - RNA, 20 nt, Artificial Sequence
  Guide RNA
accagggaaaagagagagca

SEQ ID NO: 27570 - RNA, 20 nt, Artificial Sequence
  Guide RNA
acccuggaaacaugcucucu

SEQ ID NO: 27571 - RNA, 20 nt, Artificial Sequence
  Guide RNA
acccuggaaacauguucucu

SEQ ID NO: 27572 - RNA, 20 nt, Artificial Sequence
  Guide RNA
accucccacccuggaaacau

SEQ ID NO: 27573 - RNA, 20 nt, Artificial Sequence
  Guide RNA
agaacauguuuccagggugg

SEQ ID NO: 27574 - RNA, 20 nt, Artificial Sequence
  Guide RNA
agagaacauguuuccagggu

SEQ ID NO: 27575 - RNA, 20 nt, Artificial Sequence
  Guide RNA
agagagaacauguuuccagg

SEQ ID NO: 27576 - RNA, 20 nt, Artificial Sequence
  Guide RNA
agagagagcauguuuccagg

SEQ ID NO: 27577 - RNA, 20 nt, Artificial Sequence
  Guide RNA
agagagcauguuuccagggu

SEQ ID NO: 27578 - RNA, 20 nt, Artificial Sequence
  Guide RNA
agagcauguuuccagggugg

SEQ ID NO: 27579 - RNA, 20 nt, Artificial Sequence
  Guide RNA
agcauguuuccaggguggga

SEQ ID NO: 27580 - RNA, 20 nt, Artificial Sequence
  Guide RNA
agggaaaagagagaacaugu

SEQ ID NO: 27581 - RNA, 20 nt, Artificial Sequence
  Guide RNA
agggaaaagagagagcaugu

SEQ ID NO: 27582 - RNA, 20 nt, Artificial Sequence
  Guide RNA
auaaaccagggaaaagagag

SEQ ID NO: 27583 - RNA, 20 nt, Artificial Sequence
  Guide RNA
augcucucucuuuucccugg

SEQ ID NO: 27584 - RNA, 20 nt, Artificial Sequence
  Guide RNA
auguucucucuuuucccugg

SEQ ID NO: 27585 - RNA, 20 nt, Artificial Sequence
  Guide RNA
cacccuggaaacaugcucuc

SEQ ID NO: 27586 - RNA, 20 nt, Artificial Sequence
  Guide RNA
cacccuggaaacauguucuc

SEQ ID NO: 27587 - RNA, 20 nt, Artificial Sequence
  Guide RNA
caccucccacccuggaaaca

SEQ ID NO: 27588 - RNA, 20 nt, Artificial Sequence
  Guide RNA
cagggaaaagagagaacaug

SEQ ID NO: 27589 - RNA, 20 nt, Artificial Sequence
  Guide RNA
cagggaaaagagagagcaug

SEQ ID NO: 27590 - RNA, 20 nt, Artificial Sequence
  Guide RNA
caugcucucucuuuucccug

SEQ ID NO: 27591 - RNA, 20 nt, Artificial Sequence
  Guide RNA
cauguucucucuuuucccug

SEQ ID NO: 27592 - RNA, 20 nt, Artificial Sequence
  Guide RNA
ccacccuggaaacaugcucu

SEQ ID NO: 27593 - RNA, 20 nt, Artificial Sequence
  Guide RNA
ccacccuggaaacauguucu

SEQ ID NO: 27594 - RNA, 20 nt, Artificial Sequence
  Guide RNA
ccaccucccacccuggaaac

SEQ ID NO: 27595 - RNA, 20 nt, Artificial Sequence
  Guide RNA
ccagggaaaagagagaacau

SEQ ID NO: 27596 - RNA, 20 nt, Artificial Sequence
  Guide RNA
ccagggaaaagagagagcau

SEQ ID NO: 27597 - RNA, 20 nt, Artificial Sequence
  Guide RNA
cccacccuggaaacaugcuc

SEQ ID NO: 27598 - RNA, 20 nt, Artificial Sequence
  Guide RNA
cccacccuggaaacauguuc

SEQ ID NO: 27599 - RNA, 20 nt, Artificial Sequence
  Guide RNA
cccuggaaacaugcucucuc

SEQ ID NO: 27600 - RNA, 20 nt, Artificial Sequence
  Guide RNA
cccuggaaacauguucucuc

SEQ ID NO: 27601 - RNA, 20 nt, Artificial Sequence
  Guide RNA
ccucccacccuggaaacaug

SEQ ID NO: 27602 - RNA, 20 nt, Artificial Sequence
  Guide RNA
ccuggaaacaugcucucucu

SEQ ID NO: 27603 - RNA, 20 nt, Artificial Sequence
  Guide RNA
ccuggaaacauguucucucu

SEQ ID NO: 27604 - RNA, 20 nt, Artificial Sequence
  Guide RNA
cucccacccuggaaacaugc

SEQ ID NO: 27605 - RNA, 20 nt, Artificial Sequence
  Guide RNA
cucccacccuggaaacaugu

SEQ ID NO: 27606 - RNA, 20 nt, Artificial Sequence
  Guide RNA
cuggaaacaugcucucucuu

SEQ ID NO: 27607 - RNA, 20 nt, Artificial Sequence
  Guide RNA
cuggaaacauguucucucuu

SEQ ID NO: 27608 - RNA, 20 nt, Artificial Sequence
  Guide RNA
gaaaagagagaacauguuuc

SEQ ID NO: 27609 - RNA, 20 nt, Artificial Sequence
  Guide RNA
gaaaagagagagcauguuuc

SEQ ID NO: 27610 - RNA, 20 nt, Artificial Sequence
  Guide RNA
gaaacaugcucucucuuuuc

SEQ ID NO: 27611 - RNA, 20 nt, Artificial Sequence
  Guide RNA
gaaacauguucucucuuuuc

SEQ ID NO: 27612 - RNA, 20 nt, Artificial Sequence
  Guide RNA
gaacauguuuccaggguggg

SEQ ID NO: 27613 - RNA, 20 nt, Artificial Sequence
  Guide RNA
gagaacauguuuccagggug

SEQ ID NO: 27614 - RNA, 20 nt, Artificial Sequence
  Guide RNA
gagagaacauguuuccaggg

SEQ ID NO: 27615 - RNA, 20 nt, Artificial Sequence
  Guide RNA
gagagagcauguuuccaggg

SEQ ID NO: 27616 - RNA, 20 nt, Artificial Sequence
  Guide RNA
gagagcauguuuccagggug

SEQ ID NO: 27617 - RNA, 20 nt, Artificial Sequence
  Guide RNA
gagcauguuuccaggguggg

SEQ ID NO: 27618 - RNA, 20 nt, Artificial Sequence
  Guide RNA
gcucucucuuuucccugguu

SEQ ID NO: 27619 - RNA, 20 nt, Artificial Sequence
  Guide RNA
ggaaaagagagaacauguuu

SEQ ID NO: 27620 - RNA, 20 nt, Artificial Sequence
  Guide RNA
ggaaaagagagagcauguuu

SEQ ID NO: 27621 - RNA, 20 nt, Artificial Sequence
  Guide RNA
ggaaacaugcucucucuuuu

SEQ ID NO: 27622 - RNA, 20 nt, Artificial Sequence
  Guide RNA
ggaaacauguucucucuuuu

SEQ ID NO: 27623 - RNA, 20 nt, Artificial Sequence
  Guide RNA
gggaaaagagagaacauguu

SEQ ID NO: 27624 - RNA, 20 nt, Artificial Sequence
  Guide RNA
gggaaaagagagagcauguu

SEQ ID NO: 27625 - RNA, 20 nt, Artificial Sequence
  Guide RNA
guucucucuuuucccugguu

SEQ ID NO: 27626 - RNA, 20 nt, Artificial Sequence
  Guide RNA
uaaaccagggaaaagagaga

SEQ ID NO: 27627 - RNA, 20 nt, Artificial Sequence
  Guide RNA
ucccacccuggaaacaugcu

SEQ ID NO: 27628 - RNA, 20 nt, Artificial Sequence
  Guide RNA
ucccacccuggaaacauguu

SEQ ID NO: 27629 - RNA, 20 nt, Artificial Sequence
  Guide RNA
ugcucucucuuuucccuggu

SEQ ID NO: 27630 - RNA, 20 nt, Artificial Sequence
  Guide RNA
uggaaacaugcucucucuuu

SEQ ID NO: 27631 - RNA, 20 nt, Artificial Sequence
  Guide RNA
uggaaacauguucucucuuu

SEQ ID NO: 27632 - RNA, 20 nt, Artificial Sequence
  Guide RNA
uguucucucuuuucccuggu

SEQ ID NO: 27633 - RNA, 21 nt, Artificial Sequence
  Guide RNA
aaaagagagaacauguuucca

SEQ ID NO: 27634 - RNA, 21 nt, Artificial Sequence
  Guide RNA
aaaagagagagcauguuucca

SEQ ID NO: 27635 - RNA, 21 nt, Artificial Sequence
  Guide RNA
aaaauaaaccagggaaaagag

SEQ ID NO: 27636 - RNA, 21 nt, Artificial Sequence
  Guide RNA
aaacaugcucucucuuuuccc

SEQ ID NO: 27637 - RNA, 21 nt, Artificial Sequence
  Guide RNA
aaacauguucucucuuuuccc

SEQ ID NO: 27638 - RNA, 21 nt, Artificial Sequence
  Guide RNA
aaaccagggaaaagagagaac

SEQ ID NO: 27639 - RNA, 21 nt, Artificial Sequence
  Guide RNA
aaaccagggaaaagagagagc

SEQ ID NO: 27640 - RNA, 21 nt, Artificial Sequence
  Guide RNA
aaagagagaacauguuuccag

SEQ ID NO: 27641 - RNA, 21 nt, Artificial Sequence
  Guide RNA
aaagagagagcauguuuccag

SEQ ID NO: 27642 - RNA, 21 nt, Artificial Sequence
  Guide RNA
aaauaaaccagggaaaagaga

SEQ ID NO: 27643 - RNA, 21 nt, Artificial Sequence
  Guide RNA
aacaugcucucucuuuucccu

SEQ ID NO: 27644 - RNA, 21 nt, Artificial Sequence
  Guide RNA
aacauguucucucuuuucccu

SEQ ID NO: 27645 - RNA, 21 nt, Artificial Sequence
  Guide RNA
aacauguuuccagggugggag

SEQ ID NO: 27646 - RNA, 21 nt, Artificial Sequence
  Guide RNA
aaccagggaaaagagagaaca

SEQ ID NO: 27647 - RNA, 21 nt, Artificial Sequence
  Guide RNA
aaccagggaaaagagagagca

SEQ ID NO: 27648 - RNA, 21 nt, Artificial Sequence
  Guide RNA
aagagagaacauguuuccagg

SEQ ID NO: 27649 - RNA, 21 nt, Artificial Sequence
  Guide RNA
aagagagagcauguuuccagg

SEQ ID NO: 27650 - RNA, 21 nt, Artificial Sequence
  Guide RNA
aauaaaccagggaaaagagag

SEQ ID NO: 27651 - RNA, 21 nt, Artificial Sequence
  Guide RNA
acaugcucucucuuuucccug

SEQ ID NO: 27652 - RNA, 21 nt, Artificial Sequence
  Guide RNA
acauguucucucuuuucccug

SEQ ID NO: 27653 - RNA, 21 nt, Artificial Sequence
  Guide RNA
accaccucccacccuggaaac

SEQ ID NO: 27654 - RNA, 21 nt, Artificial Sequence
  Guide RNA
accagggaaaagagagaacau

SEQ ID NO: 27655 - RNA, 21 nt, Artificial Sequence
  Guide RNA
accagggaaaagagagagcau

SEQ ID NO: 27656 - RNA, 21 nt, Artificial Sequence
  Guide RNA
acccuggaaacaugcucucuc

SEQ ID NO: 27657 - RNA, 21 nt, Artificial Sequence
  Guide RNA
acccuggaaacauguucucuc

SEQ ID NO: 27658 - RNA, 21 nt, Artificial Sequence
  Guide RNA
accucccacccuggaaacaug

SEQ ID NO: 27659 - RNA, 21 nt, Artificial Sequence
  Guide RNA
agaacauguuuccaggguggg

SEQ ID NO: 27660 - RNA, 21 nt, Artificial Sequence
  Guide RNA
agagaacauguuuccagggug

SEQ ID NO: 27661 - RNA, 21 nt, Artificial Sequence
  Guide RNA
agagagaacauguuuccaggg

SEQ ID NO: 27662 - RNA, 21 nt, Artificial Sequence
  Guide RNA
agagagagcauguuuccaggg

SEQ ID NO: 27663 - RNA, 21 nt, Artificial Sequence
  Guide RNA
agagagcauguuuccagggug

SEQ ID NO: 27664 - RNA, 21 nt, Artificial Sequence
  Guide RNA
agagcauguuuccaggguggg

SEQ ID NO: 27665 - RNA, 21 nt, Artificial Sequence
  Guide RNA
agcauguuuccagggugggag

SEQ ID NO: 27666 - RNA, 21 nt, Artificial Sequence
  Guide RNA
agggaaaagagagaacauguu

SEQ ID NO: 27667 - RNA, 21 nt, Artificial Sequence
  Guide RNA
agggaaaagagagagcauguu

SEQ ID NO: 27668 - RNA, 21 nt, Artificial Sequence
  Guide RNA
auaaaccagggaaaagagaga

SEQ ID NO: 27669 - RNA, 21 nt, Artificial Sequence
  Guide RNA
augcucucucuuuucccuggu

SEQ ID NO: 27670 - RNA, 21 nt, Artificial Sequence
  Guide RNA
auguucucucuuuucccuggu

SEQ ID NO: 27671 - RNA, 21 nt, Artificial Sequence
  Guide RNA
cacccuggaaacaugcucucu

SEQ ID NO: 27672 - RNA, 21 nt, Artificial Sequence
  Guide RNA
cacccuggaaacauguucucu

SEQ ID NO: 27673 - RNA, 21 nt, Artificial Sequence
  Guide RNA
caccucccacccuggaaacau

SEQ ID NO: 27674 - RNA, 21 nt, Artificial Sequence
  Guide RNA
cagggaaaagagagaacaugu

SEQ ID NO: 27675 - RNA, 21 nt, Artificial Sequence
  Guide RNA
cagggaaaagagagagcaugu

SEQ ID NO: 27676 - RNA, 21 nt, Artificial Sequence
  Guide RNA
caugcucucucuuuucccugg

SEQ ID NO: 27677 - RNA, 21 nt, Artificial Sequence
  Guide RNA
cauguucucucuuuucccugg

SEQ ID NO: 27678 - RNA, 21 nt, Artificial Sequence
  Guide RNA
ccacccuggaaacaugcucuc

SEQ ID NO: 27679 - RNA, 21 nt, Artificial Sequence
  Guide RNA
ccacccuggaaacauguucuc

SEQ ID NO: 27680 - RNA, 21 nt, Artificial Sequence
  Guide RNA
ccaccucccacccuggaaaca

SEQ ID NO: 27681 - RNA, 21 nt, Artificial Sequence
  Guide RNA
ccagggaaaagagagaacaug

SEQ ID NO: 27682 - RNA, 21 nt, Artificial Sequence
  Guide RNA
ccagggaaaagagagagcaug

SEQ ID NO: 27683 - RNA, 21 nt, Artificial Sequence
  Guide RNA
cccacccuggaaacaugcucu

SEQ ID NO: 27684 - RNA, 21 nt, Artificial Sequence
  Guide RNA
cccacccuggaaacauguucu

SEQ ID NO: 27685 - RNA, 21 nt, Artificial Sequence
  Guide RNA
cccuggaaacaugcucucucu

SEQ ID NO: 27686 - RNA, 21 nt, Artificial Sequence
  Guide RNA
cccuggaaacauguucucucu

SEQ ID NO: 27687 - RNA, 21 nt, Artificial Sequence
  Guide RNA
ccucccacccuggaaacaugc

SEQ ID NO: 27688 - RNA, 21 nt, Artificial Sequence
  Guide RNA
ccucccacccuggaaacaugu

SEQ ID NO: 27689 - RNA, 21 nt, Artificial Sequence
  Guide RNA
ccuggaaacaugcucucucuu

SEQ ID NO: 27690 - RNA, 21 nt, Artificial Sequence
  Guide RNA
ccuggaaacauguucucucuu

SEQ ID NO: 27691 - RNA, 21 nt, Artificial Sequence
  Guide RNA
cucccacccuggaaacaugcu

SEQ ID NO: 27692 - RNA, 21 nt, Artificial Sequence
  Guide RNA
cucccacccuggaaacauguu

SEQ ID NO: 27693 - RNA, 21 nt, Artificial Sequence
  Guide RNA
cuggaaacaugcucucucuuu

SEQ ID NO: 27694 - RNA, 21 nt, Artificial Sequence
  Guide RNA
cuggaaacauguucucucuuu

SEQ ID NO: 27695 - RNA, 21 nt, Artificial Sequence
  Guide RNA
gaaaagagagaacauguuucc

SEQ ID NO: 27696 - RNA, 21 nt, Artificial Sequence
  Guide RNA
gaaaagagagagcauguuucc

SEQ ID NO: 27697 - RNA, 21 nt, Artificial Sequence
  Guide RNA
gaaacaugcucucucuuuucc

SEQ ID NO: 27698 - RNA, 21 nt, Artificial Sequence
  Guide RNA
gaaacauguucucucuuuucc

SEQ ID NO: 27699 - RNA, 21 nt, Artificial Sequence
  Guide RNA
gaacauguuuccaggguggga

SEQ ID NO: 27700 - RNA, 21 nt, Artificial Sequence
  Guide RNA
gagaacauguuuccagggugg

SEQ ID NO: 27701 - RNA, 21 nt, Artificial Sequence
  Guide RNA
gagagaacauguuuccagggu

SEQ ID NO: 27702 - RNA, 21 nt, Artificial Sequence
  Guide RNA
gagagagcauguuuccagggu

SEQ ID NO: 27703 - RNA, 21 nt, Artificial Sequence
  Guide RNA
gagagcauguuuccagggugg

SEQ ID NO: 27704 - RNA, 21 nt, Artificial Sequence
  Guide RNA
gagcauguuuccaggguggga

SEQ ID NO: 27705 - RNA, 21 nt, Artificial Sequence
  Guide RNA
gcucucucuuuucccugguuu

SEQ ID NO: 27706 - RNA, 21 nt, Artificial Sequence
  Guide RNA
ggaaaagagagaacauguuuc

SEQ ID NO: 27707 - RNA, 21 nt, Artificial Sequence
  Guide RNA
ggaaaagagagagcauguuuc

SEQ ID NO: 27708 - RNA, 21 nt, Artificial Sequence
  Guide RNA
ggaaacaugcucucucuuuuc

SEQ ID NO: 27709 - RNA, 21 nt, Artificial Sequence
  Guide RNA
ggaaacauguucucucuuuuc

SEQ ID NO: 27710 - RNA, 21 nt, Artificial Sequence
  Guide RNA
gggaaaagagagaacauguuu

SEQ ID NO: 27711 - RNA, 21 nt, Artificial Sequence
  Guide RNA
gggaaaagagagagcauguuu

SEQ ID NO: 27712 - RNA, 21 nt, Artificial Sequence
  Guide RNA
guucucucuuuucccugguuu

SEQ ID NO: 27713 - RNA, 21 nt, Artificial Sequence
  Guide RNA
uaaaccagggaaaagagagaa

SEQ ID NO: 27714 - RNA, 21 nt, Artificial Sequence
  Guide RNA
uaaaccagggaaaagagagag

SEQ ID NO: 27715 - RNA, 21 nt, Artificial Sequence
  Guide RNA
ucccacccuggaaacaugcuc

SEQ ID NO: 27716 - RNA, 21 nt, Artificial Sequence
  Guide RNA
ucccacccuggaaacauguuc

SEQ ID NO: 27717 - RNA, 21 nt, Artificial Sequence
  Guide RNA
ugcucucucuuuucccugguu

SEQ ID NO: 27718 - RNA, 21 nt, Artificial Sequence
  Guide RNA
uggaaacaugcucucucuuuu

SEQ ID NO: 27719 - RNA, 21 nt, Artificial Sequence
  Guide RNA
uggaaacauguucucucuuuu

SEQ ID NO: 27720 - RNA, 21 nt, Artificial Sequence
  Guide RNA
uguucucucuuuucccugguu

SEQ ID NO: 27721 - RNA, 22 nt, Artificial Sequence
  Guide RNA
aaaaauaaaccagggaaaagag

SEQ ID NO: 27722 - RNA, 22 nt, Artificial Sequence
  Guide RNA
aaaagagagaacauguuuccag

SEQ ID NO: 27723 - RNA, 22 nt, Artificial Sequence
  Guide RNA
aaaagagagagcauguuuccag

SEQ ID NO: 27724 - RNA, 22 nt, Artificial Sequence
  Guide RNA
aaaauaaaccagggaaaagaga

SEQ ID NO: 27725 - RNA, 22 nt, Artificial Sequence
  Guide RNA
aaacaugcucucucuuuucccu

SEQ ID NO: 27726 - RNA, 22 nt, Artificial Sequence
  Guide RNA
aaacauguucucucuuuucccu

SEQ ID NO: 27727 - RNA, 22 nt, Artificial Sequence
  Guide RNA
aaaccagggaaaagagagaaca

SEQ ID NO: 27728 - RNA, 22 nt, Artificial Sequence
  Guide RNA
aaaccagggaaaagagagagca

SEQ ID NO: 27729 - RNA, 22 nt, Artificial Sequence
  Guide RNA
aaagagagaacauguuuccagg

SEQ ID NO: 27730 - RNA, 22 nt, Artificial Sequence
  Guide RNA
aaagagagagcauguuuccagg

SEQ ID NO: 27731 - RNA, 22 nt, Artificial Sequence
  Guide RNA
aaauaaaccagggaaaagagag

SEQ ID NO: 27732 - RNA, 22 nt, Artificial Sequence
  Guide RNA
aacaugcucucucuuuucccug

SEQ ID NO: 27733 - RNA, 22 nt, Artificial Sequence
  Guide RNA
aacauguucucucuuuucccug

SEQ ID NO: 27734 - RNA, 22 nt, Artificial Sequence
  Guide RNA
aacauguuuccagggugggagg

SEQ ID NO: 27735 - RNA, 22 nt, Artificial Sequence
  Guide RNA
aaccaccucccacccuggaaac

SEQ ID NO: 27736 - RNA, 22 nt, Artificial Sequence
  Guide RNA
aaccagggaaaagagagaacau

SEQ ID NO: 27737 - RNA, 22 nt, Artificial Sequence
  Guide RNA
aaccagggaaaagagagagcau

SEQ ID NO: 27738 - RNA, 22 nt, Artificial Sequence
  Guide RNA
aagagagaacauguuuccaggg

SEQ ID NO: 27739 - RNA, 22 nt, Artificial Sequence
  Guide RNA
aagagagagcauguuuccaggg

SEQ ID NO: 27740 - RNA, 22 nt, Artificial Sequence
  Guide RNA
aauaaaccagggaaaagagaga

SEQ ID NO: 27741 - RNA, 22 nt, Artificial Sequence
  Guide RNA
acaugcucucucuuuucccugg

SEQ ID NO: 27742 - RNA, 22 nt, Artificial Sequence
  Guide RNA
acauguucucucuuuucccugg

SEQ ID NO: 27743 - RNA, 22 nt, Artificial Sequence
  Guide RNA
accaccucccacccuggaaaca

SEQ ID NO: 27744 - RNA, 22 nt, Artificial Sequence
  Guide RNA
accagggaaaagagagaacaug

SEQ ID NO: 27745 - RNA, 22 nt, Artificial Sequence
  Guide RNA
accagggaaaagagagagcaug

SEQ ID NO: 27746 - RNA, 22 nt, Artificial Sequence
  Guide RNA
acccuggaaacaugcucucucu

SEQ ID NO: 27747 - RNA, 22 nt, Artificial Sequence
  Guide RNA
acccuggaaacauguucucucu

SEQ ID NO: 27748 - RNA, 22 nt, Artificial Sequence
  Guide RNA
accucccacccuggaaacaugc

SEQ ID NO: 27749 - RNA, 22 nt, Artificial Sequence
  Guide RNA
accucccacccuggaaacaugu

SEQ ID NO: 27750 - RNA, 22 nt, Artificial Sequence
  Guide RNA
agaacauguuuccaggguggga

SEQ ID NO: 27751 - RNA, 22 nt, Artificial Sequence
  Guide RNA
agagaacauguuuccagggugg

SEQ ID NO: 27752 - RNA, 22 nt, Artificial Sequence
  Guide RNA
agagagaacauguuuccagggu

SEQ ID NO: 27753 - RNA, 22 nt, Artificial Sequence
  Guide RNA
agagagagcauguuuccagggu

SEQ ID NO: 27754 - RNA, 22 nt, Artificial Sequence
  Guide RNA
agagagcauguuuccagggugg

SEQ ID NO: 27755 - RNA, 22 nt, Artificial Sequence
  Guide RNA
agagcauguuuccaggguggga

SEQ ID NO: 27756 - RNA, 22 nt, Artificial Sequence
  Guide RNA
agcauguuuccagggugggagg

SEQ ID NO: 27757 - RNA, 22 nt, Artificial Sequence
  Guide RNA
agggaaaagagagaacauguuu

SEQ ID NO: 27758 - RNA, 22 nt, Artificial Sequence
  Guide RNA
agggaaaagagagagcauguuu

SEQ ID NO: 27759 - RNA, 22 nt, Artificial Sequence
  Guide RNA
auaaaccagggaaaagagagaa

SEQ ID NO: 27760 - RNA, 22 nt, Artificial Sequence
  Guide RNA
auaaaccagggaaaagagagag

SEQ ID NO: 27761 - RNA, 22 nt, Artificial Sequence
  Guide RNA
augcucucucuuuucccugguu

SEQ ID NO: 27762 - RNA, 22 nt, Artificial Sequence
  Guide RNA
auguucucucuuuucccugguu

SEQ ID NO: 27763 - RNA, 22 nt, Artificial Sequence
  Guide RNA
cacccuggaaacaugcucucuc

SEQ ID NO: 27764 - RNA, 22 nt, Artificial Sequence
  Guide RNA
cacccuggaaacauguucucuc

SEQ ID NO: 27765 - RNA, 22 nt, Artificial Sequence
  Guide RNA
caccucccacccuggaaacaug

SEQ ID NO: 27766 - RNA, 22 nt, Artificial Sequence
  Guide RNA
cagggaaaagagagaacauguu

SEQ ID NO: 27767 - RNA, 22 nt, Artificial Sequence
  Guide RNA
cagggaaaagagagagcauguu

SEQ ID NO: 27768 - RNA, 22 nt, Artificial Sequence
  Guide RNA
caugcucucucuuuucccuggu

SEQ ID NO: 27769 - RNA, 22 nt, Artificial Sequence
  Guide RNA
cauguucucucuuuucccuggu

SEQ ID NO: 27770 - RNA, 22 nt, Artificial Sequence
  Guide RNA
ccacccuggaaacaugcucucu

SEQ ID NO: 27771 - RNA, 22 nt, Artificial Sequence
  Guide RNA
ccacccuggaaacauguucucu

SEQ ID NO: 27772 - RNA, 22 nt, Artificial Sequence
  Guide RNA
ccaccucccacccuggaaacau

SEQ ID NO: 27773 - RNA, 22 nt, Artificial Sequence
  Guide RNA
ccagggaaaagagagaacaugu

SEQ ID NO: 27774 - RNA, 22 nt, Artificial Sequence
  Guide RNA
ccagggaaaagagagagcaugu

SEQ ID NO: 27775 - RNA, 22 nt, Artificial Sequence
  Guide RNA
cccacccuggaaacaugcucuc

SEQ ID NO: 27776 - RNA, 22 nt, Artificial Sequence
  Guide RNA
cccacccuggaaacauguucuc

SEQ ID NO: 27777 - RNA, 22 nt, Artificial Sequence
  Guide RNA
cccuggaaacaugcucucucuu

SEQ ID NO: 27778 - RNA, 22 nt, Artificial Sequence
  Guide RNA
cccuggaaacauguucucucuu

SEQ ID NO: 27779 - RNA, 22 nt, Artificial Sequence
  Guide RNA
ccucccacccuggaaacaugcu

SEQ ID NO: 27780 - RNA, 22 nt, Artificial Sequence
  Guide RNA
ccucccacccuggaaacauguu

SEQ ID NO: 27781 - RNA, 22 nt, Artificial Sequence
  Guide RNA
ccuggaaacaugcucucucuuu

SEQ ID NO: 27782 - RNA, 22 nt, Artificial Sequence
  Guide RNA
ccuggaaacauguucucucuuu

SEQ ID NO: 27783 - RNA, 22 nt, Artificial Sequence
  Guide RNA
cucccacccuggaaacaugcuc

SEQ ID NO: 27784 - RNA, 22 nt, Artificial Sequence
  Guide RNA
cucccacccuggaaacauguuc

SEQ ID NO: 27785 - RNA, 22 nt, Artificial Sequence
  Guide RNA
cuggaaacaugcucucucuuuu

SEQ ID NO: 27786 - RNA, 22 nt, Artificial Sequence
  Guide RNA
cuggaaacauguucucucuuuu

SEQ ID NO: 27787 - RNA, 22 nt, Artificial Sequence
  Guide RNA
gaaaagagagaacauguuucca

SEQ ID NO: 27788 - RNA, 22 nt, Artificial Sequence
  Guide RNA
gaaaagagagagcauguuucca

SEQ ID NO: 27789 - RNA, 22 nt, Artificial Sequence
  Guide RNA
gaaacaugcucucucuuuuccc

SEQ ID NO: 27790 - RNA, 22 nt, Artificial Sequence
  Guide RNA
gaaacauguucucucuuuuccc

SEQ ID NO: 27791 - RNA, 22 nt, Artificial Sequence
  Guide RNA
gaacauguuuccagggugggag

SEQ ID NO: 27792 - RNA, 22 nt, Artificial Sequence
  Guide RNA
gagaacauguuuccaggguggg

SEQ ID NO: 27793 - RNA, 22 nt, Artificial Sequence
  Guide RNA
gagagaacauguuuccagggug

SEQ ID NO: 27794 - RNA, 22 nt, Artificial Sequence
  Guide RNA
gagagagcauguuuccagggug

SEQ ID NO: 27795 - RNA, 22 nt, Artificial Sequence
  Guide RNA
gagagcauguuuccaggguggg

SEQ ID NO: 27796 - RNA, 22 nt, Artificial Sequence
  Guide RNA
gagcauguuuccagggugggag

SEQ ID NO: 27797 - RNA, 22 nt, Artificial Sequence
  Guide RNA
gcucucucuuuucccugguuua

SEQ ID NO: 27798 - RNA, 22 nt, Artificial Sequence
  Guide RNA
ggaaaagagagaacauguuucc

SEQ ID NO: 27799 - RNA, 22 nt, Artificial Sequence
  Guide RNA
ggaaaagagagagcauguuucc

SEQ ID NO: 27800 - RNA, 22 nt, Artificial Sequence
  Guide RNA
ggaaacaugcucucucuuuucc

SEQ ID NO: 27801 - RNA, 22 nt, Artificial Sequence
  Guide RNA
ggaaacauguucucucuuuucc

SEQ ID NO: 27802 - RNA, 22 nt, Artificial Sequence
  Guide RNA
gggaaaagagagaacauguuuc

SEQ ID NO: 27803 - RNA, 22 nt, Artificial Sequence
  Guide RNA
gggaaaagagagagcauguuuc

SEQ ID NO: 27804 - RNA, 22 nt, Artificial Sequence
  Guide RNA
guucucucuuuucccugguuua

SEQ ID NO: 27805 - RNA, 22 nt, Artificial Sequence
  Guide RNA
uaaaccagggaaaagagagaac

SEQ ID NO: 27806 - RNA, 22 nt, Artificial Sequence
  Guide RNA
uaaaccagggaaaagagagagc

SEQ ID NO: 27807 - RNA, 22 nt, Artificial Sequence
  Guide RNA
ucccacccuggaaacaugcucu

SEQ ID NO: 27808 - RNA, 22 nt, Artificial Sequence
  Guide RNA
ucccacccuggaaacauguucu

SEQ ID NO: 27809 - RNA, 22 nt, Artificial Sequence
  Guide RNA
ugcucucucuuuucccugguuu

SEQ ID NO: 27810 - RNA, 22 nt, Artificial Sequence
  Guide RNA
uggaaacaugcucucucuuuuc

SEQ ID NO: 27811 - RNA, 22 nt, Artificial Sequence
  Guide RNA
uggaaacauguucucucuuuuc

SEQ ID NO: 27812 - RNA, 22 nt, Artificial Sequence
  Guide RNA
uguucucucuuuucccugguuu

SEQ ID NO: 27813 - RNA, 20 nt, Artificial Sequence
  Guide RNA
aaagagaaguagaugagcag

SEQ ID NO: 27814 - RNA, 20 nt, Artificial Sequence
  Guide RNA
aaagagaaguagaugaguag

SEQ ID NO: 27815 - RNA, 20 nt, Artificial Sequence
  Guide RNA
aacuaccacuuccuacucau

SEQ ID NO: 27816 - RNA, 20 nt, Artificial Sequence
  Guide RNA
aacuaccacuuccugcucau

SEQ ID NO: 27817 - RNA, 20 nt, Artificial Sequence
  Guide RNA
aacuucaacuaccacuuccu

SEQ ID NO: 27818 - RNA, 20 nt, Artificial Sequence
  Guide RNA
aagagaaguagaugagcagg

SEQ ID NO: 27819 - RNA, 20 nt, Artificial Sequence
  Guide RNA
aagagaaguagaugaguagg

SEQ ID NO: 27820 - RNA, 20 nt, Artificial Sequence
  Guide RNA
aaguagaugagcaggaagug

SEQ ID NO: 27821 - RNA, 20 nt, Artificial Sequence
  Guide RNA
aaguagaugaguaggaagug

SEQ ID NO: 27822 - RNA, 20 nt, Artificial Sequence
  Guide RNA
accacuuccuacucaucuac

SEQ ID NO: 27823 - RNA, 20 nt, Artificial Sequence
  Guide RNA
accacuuccugcucaucuac

SEQ ID NO: 27824 - RNA, 20 nt, Artificial Sequence
  Guide RNA
acuaccacuuccuacucauc

SEQ ID NO: 27825 - RNA, 20 nt, Artificial Sequence
  Guide RNA
acuaccacuuccugcucauc

SEQ ID NO: 27826 - RNA, 20 nt, Artificial Sequence
  Guide RNA
acuucaacuaccacuuccua

SEQ ID NO: 27827 - RNA, 20 nt, Artificial Sequence
  Guide RNA
acuucaacuaccacuuccug

SEQ ID NO: 27828 - RNA, 20 nt, Artificial Sequence
  Guide RNA
acuuccuacucaucuacuuc

SEQ ID NO: 27829 - RNA, 20 nt, Artificial Sequence
  Guide RNA
acuuccugcucaucuacuuc

SEQ ID NO: 27830 - RNA, 20 nt, Artificial Sequence
  Guide RNA
agaaguagaugagcaggaag

SEQ ID NO: 27831 - RNA, 20 nt, Artificial Sequence
  Guide RNA
agaaguagaugaguaggaag

SEQ ID NO: 27832 - RNA, 20 nt, Artificial Sequence
  Guide RNA
agagaaguagaugagcagga

SEQ ID NO: 27833 - RNA, 20 nt, Artificial Sequence
  Guide RNA
agagaaguagaugaguagga

SEQ ID NO: 27834 - RNA, 20 nt, Artificial Sequence
  Guide RNA
agaugagcaggaagugguag

SEQ ID NO: 27835 - RNA, 20 nt, Artificial Sequence
  Guide RNA
agaugaguaggaagugguag

SEQ ID NO: 27836 - RNA, 20 nt, Artificial Sequence
  Guide RNA
agcaacuucaacuaccacuu

SEQ ID NO: 27837 - RNA, 20 nt, Artificial Sequence
  Guide RNA
agcaggaagugguaguugaa

SEQ ID NO: 27838 - RNA, 20 nt, Artificial Sequence
  Guide RNA
aguagaugagcaggaagugg

SEQ ID NO: 27839 - RNA, 20 nt, Artificial Sequence
  Guide RNA
aguagaugaguaggaagugg

SEQ ID NO: 27840 - RNA, 20 nt, Artificial Sequence
  Guide RNA
aguaggaagugguaguugaa

SEQ ID NO: 27841 - RNA, 20 nt, Artificial Sequence
  Guide RNA
augagcaggaagugguaguu

SEQ ID NO: 27842 - RNA, 20 nt, Artificial Sequence
  Guide RNA
augaguaggaagugguaguu

SEQ ID NO: 27843 - RNA, 20 nt, Artificial Sequence
  Guide RNA
caaagagaaguagaugagca

SEQ ID NO: 27844 - RNA, 20 nt, Artificial Sequence
  Guide RNA
caaagagaaguagaugagua

SEQ ID NO: 27845 - RNA, 20 nt, Artificial Sequence
  Guide RNA
caacuaccacuuccuacuca

SEQ ID NO: 27846 - RNA, 20 nt, Artificial Sequence
  Guide RNA
caacuaccacuuccugcuca

SEQ ID NO: 27847 - RNA, 20 nt, Artificial Sequence
  Guide RNA
caacuucaacuaccacuucc

SEQ ID NO: 27848 - RNA, 20 nt, Artificial Sequence
  Guide RNA
cacuuccuacucaucuacuu

SEQ ID NO: 27849 - RNA, 20 nt, Artificial Sequence
  Guide RNA
cacuuccugcucaucuacuu

SEQ ID NO: 27850 - RNA, 20 nt, Artificial Sequence
  Guide RNA
ccacuuccuacucaucuacu

SEQ ID NO: 27851 - RNA, 20 nt, Artificial Sequence
  Guide RNA
ccacuuccugcucaucuacu

SEQ ID NO: 27852 - RNA, 20 nt, Artificial Sequence
  Guide RNA
ccuacucaucuacuucucuu

SEQ ID NO: 27853 - RNA, 20 nt, Artificial Sequence
  Guide RNA
ccugcucaucuacuucucuu

SEQ ID NO: 27854 - RNA, 20 nt, Artificial Sequence
  Guide RNA
cuaccacuuccuacucaucu

SEQ ID NO: 27855 - RNA, 20 nt, Artificial Sequence
  Guide RNA
cuaccacuuccugcucaucu

SEQ ID NO: 27856 - RNA, 20 nt, Artificial Sequence
  Guide RNA
cuacucaucuacuucucuuu

SEQ ID NO: 27857 - RNA, 20 nt, Artificial Sequence
  Guide RNA
cugcucaucuacuucucuuu

SEQ ID NO: 27858 - RNA, 20 nt, Artificial Sequence
  Guide RNA
cuucaacuaccacuuccuac

SEQ ID NO: 27859 - RNA, 20 nt, Artificial Sequence
  Guide RNA
cuucaacuaccacuuccugc

SEQ ID NO: 27860 - RNA, 20 nt, Artificial Sequence
  Guide RNA
cuuccuacucaucuacuucu

SEQ ID NO: 27861 - RNA, 20 nt, Artificial Sequence
  Guide RNA
cuuccugcucaucuacuucu

SEQ ID NO: 27862 - RNA, 20 nt, Artificial Sequence
  Guide RNA
cuuucaaagagaaguagaug

SEQ ID NO: 27863 - RNA, 20 nt, Artificial Sequence
  Guide RNA
gaaguagaugagcaggaagu

SEQ ID NO: 27864 - RNA, 20 nt, Artificial Sequence
  Guide RNA
gaaguagaugaguaggaagu

SEQ ID NO: 27865 - RNA, 20 nt, Artificial Sequence
  Guide RNA
gagaaguagaugagcaggaa

SEQ ID NO: 27866 - RNA, 20 nt, Artificial Sequence
  Guide RNA
gagaaguagaugaguaggaa

SEQ ID NO: 27867 - RNA, 20 nt, Artificial Sequence
  Guide RNA
gagcaggaagugguaguuga

SEQ ID NO: 27868 - RNA, 20 nt, Artificial Sequence
  Guide RNA
gaguaggaagugguaguuga

SEQ ID NO: 27869 - RNA, 20 nt, Artificial Sequence
  Guide RNA
gaugagcaggaagugguagu

SEQ ID NO: 27870 - RNA, 20 nt, Artificial Sequence
  Guide RNA
gaugaguaggaagugguagu

SEQ ID NO: 27871 - RNA, 20 nt, Artificial Sequence
  Guide RNA
gcaacuucaacuaccacuuc

SEQ ID NO: 27872 - RNA, 20 nt, Artificial Sequence
  Guide RNA
gcaggaagugguaguugaag

SEQ ID NO: 27873 - RNA, 20 nt, Artificial Sequence
  Guide RNA
gcuuucaaagagaaguagau

SEQ ID NO: 27874 - RNA, 20 nt, Artificial Sequence
  Guide RNA
guagaugagcaggaaguggu

SEQ ID NO: 27875 - RNA, 20 nt, Artificial Sequence
  Guide RNA
guagaugaguaggaaguggu

SEQ ID NO: 27876 - RNA, 20 nt, Artificial Sequence
  Guide RNA
guaggaagugguaguugaag

SEQ ID NO: 27877 - RNA, 20 nt, Artificial Sequence
  Guide RNA
uaccacuuccuacucaucua

SEQ ID NO: 27878 - RNA, 20 nt, Artificial Sequence
  Guide RNA
uaccacuuccugcucaucua

SEQ ID NO: 27879 - RNA, 20 nt, Artificial Sequence
  Guide RNA
uacucaucuacuucucuuug

SEQ ID NO: 27880 - RNA, 20 nt, Artificial Sequence
  Guide RNA
uagaugagcaggaaguggua

SEQ ID NO: 27881 - RNA, 20 nt, Artificial Sequence
  Guide RNA
uagaugaguaggaaguggua

SEQ ID NO: 27882 - RNA, 20 nt, Artificial Sequence
  Guide RNA
ucaaagagaaguagaugagc

SEQ ID NO: 27883 - RNA, 20 nt, Artificial Sequence
  Guide RNA
ucaaagagaaguagaugagu

SEQ ID NO: 27884 - RNA, 20 nt, Artificial Sequence
  Guide RNA
ucaacuaccacuuccuacuc

SEQ ID NO: 27885 - RNA, 20 nt, Artificial Sequence
  Guide RNA
ucaacuaccacuuccugcuc

SEQ ID NO: 27886 - RNA, 20 nt, Artificial Sequence
  Guide RNA
uccuacucaucuacuucucu

SEQ ID NO: 27887 - RNA, 20 nt, Artificial Sequence
  Guide RNA
uccugcucaucuacuucucu

SEQ ID NO: 27888 - RNA, 20 nt, Artificial Sequence
  Guide RNA
ugagcaggaagugguaguug

SEQ ID NO: 27889 - RNA, 20 nt, Artificial Sequence
  Guide RNA
ugaguaggaagugguaguug

SEQ ID NO: 27890 - RNA, 20 nt, Artificial Sequence
  Guide RNA
ugcucaucuacuucucuuug

SEQ ID NO: 27891 - RNA, 20 nt, Artificial Sequence
  Guide RNA
uucaaagagaaguagaugag

SEQ ID NO: 27892 - RNA, 20 nt, Artificial Sequence
  Guide RNA
uucaacuaccacuuccuacu

SEQ ID NO: 27893 - RNA, 20 nt, Artificial Sequence
  Guide RNA
uucaacuaccacuuccugcu

SEQ ID NO: 27894 - RNA, 20 nt, Artificial Sequence
  Guide RNA
uuccuacucaucuacuucuc

SEQ ID NO: 27895 - RNA, 20 nt, Artificial Sequence
  Guide RNA
uuccugcucaucuacuucuc

SEQ ID NO: 27896 - RNA, 20 nt, Artificial Sequence
  Guide RNA
uuucaaagagaaguagauga

SEQ ID NO: 27897 - RNA, 21 nt, Artificial Sequence
  Guide RNA
aaagagaaguagaugagcagg

SEQ ID NO: 27898 - RNA, 21 nt, Artificial Sequence
  Guide RNA
aaagagaaguagaugaguagg

SEQ ID NO: 27899 - RNA, 21 nt, Artificial Sequence
  Guide RNA
aacuaccacuuccuacucauc

SEQ ID NO: 27900 - RNA, 21 nt, Artificial Sequence
  Guide RNA
aacuaccacuuccugcucauc

SEQ ID NO: 27901 - RNA, 21 nt, Artificial Sequence
  Guide RNA
aacuucaacuaccacuuccua

SEQ ID NO: 27902 - RNA, 21 nt, Artificial Sequence
  Guide RNA
aacuucaacuaccacuuccug

SEQ ID NO: 27903 - RNA, 21 nt, Artificial Sequence
  Guide RNA
aagagaaguagaugagcagga

SEQ ID NO: 27904 - RNA, 21 nt, Artificial Sequence
  Guide RNA
aagagaaguagaugaguagga

SEQ ID NO: 27905 - RNA, 21 nt, Artificial Sequence
  Guide RNA
aaguagaugagcaggaagugg

SEQ ID NO: 27906 - RNA, 21 nt, Artificial Sequence
  Guide RNA
aaguagaugaguaggaagugg

SEQ ID NO: 27907 - RNA, 21 nt, Artificial Sequence
  Guide RNA
accacuuccuacucaucuacu

SEQ ID NO: 27908 - RNA, 21 nt, Artificial Sequence
  Guide RNA
accacuuccugcucaucuacu

SEQ ID NO: 27909 - RNA, 21 nt, Artificial Sequence
  Guide RNA
acuaccacuuccuacucaucu

SEQ ID NO: 27910 - RNA, 21 nt, Artificial Sequence
  Guide RNA
acuaccacuuccugcucaucu

SEQ ID NO: 27911 - RNA, 21 nt, Artificial Sequence
  Guide RNA
acuucaacuaccacuuccuac

SEQ ID NO: 27912 - RNA, 21 nt, Artificial Sequence
  Guide RNA
acuucaacuaccacuuccugc

SEQ ID NO: 27913 - RNA, 21 nt, Artificial Sequence
  Guide RNA
acuuccuacucaucuacuucu

SEQ ID NO: 27914 - RNA, 21 nt, Artificial Sequence
  Guide RNA
acuuccugcucaucuacuucu

SEQ ID NO: 27915 - RNA, 21 nt, Artificial Sequence
  Guide RNA
agaaguagaugagcaggaagu

SEQ ID NO: 27916 - RNA, 21 nt, Artificial Sequence
  Guide RNA
agaaguagaugaguaggaagu

SEQ ID NO: 27917 - RNA, 21 nt, Artificial Sequence
  Guide RNA
agagaaguagaugagcaggaa

SEQ ID NO: 27918 - RNA, 21 nt, Artificial Sequence
  Guide RNA
agagaaguagaugaguaggaa

SEQ ID NO: 27919 - RNA, 21 nt, Artificial Sequence
  Guide RNA
agaugagcaggaagugguagu

SEQ ID NO: 27920 - RNA, 21 nt, Artificial Sequence
  Guide RNA
agaugaguaggaagugguagu

SEQ ID NO: 27921 - RNA, 21 nt, Artificial Sequence
  Guide RNA
agcaacuucaacuaccacuuc

SEQ ID NO: 27922 - RNA, 21 nt, Artificial Sequence
  Guide RNA
agcaggaagugguaguugaag

SEQ ID NO: 27923 - RNA, 21 nt, Artificial Sequence
  Guide RNA
agcuuucaaagagaaguagau

SEQ ID NO: 27924 - RNA, 21 nt, Artificial Sequence
  Guide RNA
aguagaugagcaggaaguggu

SEQ ID NO: 27925 - RNA, 21 nt, Artificial Sequence
  Guide RNA
aguagaugaguaggaaguggu

SEQ ID NO: 27926 - RNA, 21 nt, Artificial Sequence
  Guide RNA
aguaggaagugguaguugaag

SEQ ID NO: 27927 - RNA, 21 nt, Artificial Sequence
  Guide RNA
augagcaggaagugguaguug

SEQ ID NO: 27928 - RNA, 21 nt, Artificial Sequence
  Guide RNA
augaguaggaagugguaguug

SEQ ID NO: 27929 - RNA, 21 nt, Artificial Sequence
  Guide RNA
caaagagaaguagaugagcag

SEQ ID NO: 27930 - RNA, 21 nt, Artificial Sequence
  Guide RNA
caaagagaaguagaugaguag

SEQ ID NO: 27931 - RNA, 21 nt, Artificial Sequence
  Guide RNA
caacuaccacuuccuacucau

SEQ ID NO: 27932 - RNA, 21 nt, Artificial Sequence
  Guide RNA
caacuaccacuuccugcucau

SEQ ID NO: 27933 - RNA, 21 nt, Artificial Sequence
  Guide RNA
caacuucaacuaccacuuccu

SEQ ID NO: 27934 - RNA, 21 nt, Artificial Sequence
  Guide RNA
cacuuccuacucaucuacuuc

SEQ ID NO: 27935 - RNA, 21 nt, Artificial Sequence
  Guide RNA
cacuuccugcucaucuacuuc

SEQ ID NO: 27936 - RNA, 21 nt, Artificial Sequence
  Guide RNA
cagcaacuucaacuaccacuu

SEQ ID NO: 27937 - RNA, 21 nt, Artificial Sequence
  Guide RNA
ccacuuccuacucaucuacuu

SEQ ID NO: 27938 - RNA, 21 nt, Artificial Sequence
  Guide RNA
ccacuuccugcucaucuacuu

SEQ ID NO: 27939 - RNA, 21 nt, Artificial Sequence
  Guide RNA
ccuacucaucuacuucucuuu

SEQ ID NO: 27940 - RNA, 21 nt, Artificial Sequence
  Guide RNA
ccugcucaucuacuucucuuu

SEQ ID NO: 27941 - RNA, 21 nt, Artificial Sequence
  Guide RNA
cuaccacuuccuacucaucua

SEQ ID NO: 27942 - RNA, 21 nt, Artificial Sequence
  Guide RNA
cuaccacuuccugcucaucua

SEQ ID NO: 27943 - RNA, 21 nt, Artificial Sequence
  Guide RNA
cuacucaucuacuucucuuug

SEQ ID NO: 27944 - RNA, 21 nt, Artificial Sequence
  Guide RNA
cugcucaucuacuucucuuug

SEQ ID NO: 27945 - RNA, 21 nt, Artificial Sequence
  Guide RNA
cuucaacuaccacuuccuacu

SEQ ID NO: 27946 - RNA, 21 nt, Artificial Sequence
  Guide RNA
cuucaacuaccacuuccugcu

SEQ ID NO: 27947 - RNA, 21 nt, Artificial Sequence
  Guide RNA
cuuccuacucaucuacuucuc

SEQ ID NO: 27948 - RNA, 21 nt, Artificial Sequence
  Guide RNA
cuuccugcucaucuacuucuc

SEQ ID NO: 27949 - RNA, 21 nt, Artificial Sequence
  Guide RNA
cuuucaaagagaaguagauga

SEQ ID NO: 27950 - RNA, 21 nt, Artificial Sequence
  Guide RNA
gaaguagaugagcaggaagug

SEQ ID NO: 27951 - RNA, 21 nt, Artificial Sequence
  Guide RNA
gaaguagaugaguaggaagug

SEQ ID NO: 27952 - RNA, 21 nt, Artificial Sequence
  Guide RNA
gagaaguagaugagcaggaag

SEQ ID NO: 27953 - RNA, 21 nt, Artificial Sequence
  Guide RNA
gagaaguagaugaguaggaag

SEQ ID NO: 27954 - RNA, 21 nt, Artificial Sequence
  Guide RNA
gagcaggaagugguaguugaa

SEQ ID NO: 27955 - RNA, 21 nt, Artificial Sequence
  Guide RNA
gaguaggaagugguaguugaa

SEQ ID NO: 27956 - RNA, 21 nt, Artificial Sequence
  Guide RNA
gaugagcaggaagugguaguu

SEQ ID NO: 27957 - RNA, 21 nt, Artificial Sequence
  Guide RNA
gaugaguaggaagugguaguu

SEQ ID NO: 27958 - RNA, 21 nt, Artificial Sequence
  Guide RNA
gcaacuucaacuaccacuucc

SEQ ID NO: 27959 - RNA, 21 nt, Artificial Sequence
  Guide RNA
gcaggaagugguaguugaagu

SEQ ID NO: 27960 - RNA, 21 nt, Artificial Sequence
  Guide RNA
gcuuucaaagagaaguagaug

SEQ ID NO: 27961 - RNA, 21 nt, Artificial Sequence
  Guide RNA
guagaugagcaggaaguggua

SEQ ID NO: 27962 - RNA, 21 nt, Artificial Sequence
  Guide RNA
guagaugaguaggaaguggua

SEQ ID NO: 27963 - RNA, 21 nt, Artificial Sequence
  Guide RNA
guaggaagugguaguugaagu

SEQ ID NO: 27964 - RNA, 21 nt, Artificial Sequence
  Guide RNA
uaccacuuccuacucaucuac

SEQ ID NO: 27965 - RNA, 21 nt, Artificial Sequence
  Guide RNA
uaccacuuccugcucaucuac

SEQ ID NO: 27966 - RNA, 21 nt, Artificial Sequence
  Guide RNA
uacucaucuacuucucuuuga

SEQ ID NO: 27967 - RNA, 21 nt, Artificial Sequence
  Guide RNA
uagaugagcaggaagugguag

SEQ ID NO: 27968 - RNA, 21 nt, Artificial Sequence
  Guide RNA
uagaugaguaggaagugguag

SEQ ID NO: 27969 - RNA, 21 nt, Artificial Sequence
  Guide RNA
ucaaagagaaguagaugagca

SEQ ID NO: 27970 - RNA, 21 nt, Artificial Sequence
  Guide RNA
ucaaagagaaguagaugagua

SEQ ID NO: 27971 - RNA, 21 nt, Artificial Sequence
  Guide RNA
ucaacuaccacuuccuacuca

SEQ ID NO: 27972 - RNA, 21 nt, Artificial Sequence
  Guide RNA
ucaacuaccacuuccugcuca

SEQ ID NO: 27973 - RNA, 21 nt, Artificial Sequence
  Guide RNA
uccuacucaucuacuucucuu

SEQ ID NO: 27974 - RNA, 21 nt, Artificial Sequence
  Guide RNA
uccugcucaucuacuucucuu

SEQ ID NO: 27975 - RNA, 21 nt, Artificial Sequence
  Guide RNA
ugagcaggaagugguaguuga

SEQ ID NO: 27976 - RNA, 21 nt, Artificial Sequence
  Guide RNA
ugaguaggaagugguaguuga

SEQ ID NO: 27977 - RNA, 21 nt, Artificial Sequence
  Guide RNA
ugcucaucuacuucucuuuga

SEQ ID NO: 27978 - RNA, 21 nt, Artificial Sequence
  Guide RNA
uucaaagagaaguagaugagc

SEQ ID NO: 27979 - RNA, 21 nt, Artificial Sequence
  Guide RNA
uucaaagagaaguagaugagu

SEQ ID NO: 27980 - RNA, 21 nt, Artificial Sequence
  Guide RNA
uucaacuaccacuuccuacuc

SEQ ID NO: 27981 - RNA, 21 nt, Artificial Sequence
  Guide RNA
uucaacuaccacuuccugcuc

SEQ ID NO: 27982 - RNA, 21 nt, Artificial Sequence
  Guide RNA
uuccuacucaucuacuucucu

SEQ ID NO: 27983 - RNA, 21 nt, Artificial Sequence
  Guide RNA
uuccugcucaucuacuucucu

SEQ ID NO: 27984 - RNA, 21 nt, Artificial Sequence
  Guide RNA
uuucaaagagaaguagaugag

SEQ ID NO: 27985 - RNA, 22 nt, Artificial Sequence
  Guide RNA
aaagagaaguagaugagcagga

SEQ ID NO: 27986 - RNA, 22 nt, Artificial Sequence
  Guide RNA
aaagagaaguagaugaguagga

SEQ ID NO: 27987 - RNA, 22 nt, Artificial Sequence
  Guide RNA
aacuaccacuuccuacucaucu

SEQ ID NO: 27988 - RNA, 22 nt, Artificial Sequence
  Guide RNA
aacuaccacuuccugcucaucu

SEQ ID NO: 27989 - RNA, 22 nt, Artificial Sequence
  Guide RNA
aacuucaacuaccacuuccuac

SEQ ID NO: 27990 - RNA, 22 nt, Artificial Sequence
  Guide RNA
aacuucaacuaccacuuccugc

SEQ ID NO: 27991 - RNA, 22 nt, Artificial Sequence
  Guide RNA
aagagaaguagaugagcaggaa

SEQ ID NO: 27992 - RNA, 22 nt, Artificial Sequence
  Guide RNA
aagagaaguagaugaguaggaa

SEQ ID NO: 27993 - RNA, 22 nt, Artificial Sequence
  Guide RNA
aaguagaugagcaggaaguggu

SEQ ID NO: 27994 - RNA, 22 nt, Artificial Sequence
  Guide RNA
aaguagaugaguaggaaguggu

SEQ ID NO: 27995 - RNA, 22 nt, Artificial Sequence
  Guide RNA
acagcaacuucaacuaccacuu

SEQ ID NO: 27996 - RNA, 22 nt, Artificial Sequence
  Guide RNA
accacuuccuacucaucuacuu

SEQ ID NO: 27997 - RNA, 22 nt, Artificial Sequence
  Guide RNA
accacuuccugcucaucuacuu

SEQ ID NO: 27998 - RNA, 22 nt, Artificial Sequence
  Guide RNA
acuaccacuuccuacucaucua

SEQ ID NO: 27999 - RNA, 22 nt, Artificial Sequence
  Guide RNA
acuaccacuuccugcucaucua

SEQ ID NO: 28000 - RNA, 22 nt, Artificial Sequence
  Guide RNA
acuucaacuaccacuuccuacu

SEQ ID NO: 28001 - RNA, 22 nt, Artificial Sequence
  Guide RNA
acuucaacuaccacuuccugcu

SEQ ID NO: 28002 - RNA, 22 nt, Artificial Sequence
  Guide RNA
acuuccuacucaucuacuucuc

SEQ ID NO: 28003 - RNA, 22 nt, Artificial Sequence
  Guide RNA
acuuccugcucaucuacuucuc

SEQ ID NO: 28004 - RNA, 22 nt, Artificial Sequence
  Guide RNA
agaaguagaugagcaggaagug

SEQ ID NO: 28005 - RNA, 22 nt, Artificial Sequence
  Guide RNA
agaaguagaugaguaggaagug

SEQ ID NO: 28006 - RNA, 22 nt, Artificial Sequence
  Guide RNA
agagaaguagaugagcaggaag

SEQ ID NO: 28007 - RNA, 22 nt, Artificial Sequence
  Guide RNA
agagaaguagaugaguaggaag

SEQ ID NO: 28008 - RNA, 22 nt, Artificial Sequence
  Guide RNA
agaugagcaggaagugguaguu

SEQ ID NO: 28009 - RNA, 22 nt, Artificial Sequence
  Guide RNA
agaugaguaggaagugguaguu

SEQ ID NO: 28010 - RNA, 22 nt, Artificial Sequence
  Guide RNA
agcaacuucaacuaccacuucc

SEQ ID NO: 28011 - RNA, 22 nt, Artificial Sequence
  Guide RNA
agcaggaagugguaguugaagu

SEQ ID NO: 28012 - RNA, 22 nt, Artificial Sequence
  Guide RNA
agcuuucaaagagaaguagaug

SEQ ID NO: 28013 - RNA, 22 nt, Artificial Sequence
  Guide RNA
aguagaugagcaggaaguggua

SEQ ID NO: 28014 - RNA, 22 nt, Artificial Sequence
  Guide RNA
aguagaugaguaggaaguggua

SEQ ID NO: 28015 - RNA, 22 nt, Artificial Sequence
  Guide RNA
aguaggaagugguaguugaagu

SEQ ID NO: 28016 - RNA, 22 nt, Artificial Sequence
  Guide RNA
augagcaggaagugguaguuga

SEQ ID NO: 28017 - RNA, 22 nt, Artificial Sequence
  Guide RNA
augaguaggaagugguaguuga

SEQ ID NO: 28018 - RNA, 22 nt, Artificial Sequence
  Guide RNA
caaagagaaguagaugagcagg

SEQ ID NO: 28019 - RNA, 22 nt, Artificial Sequence
  Guide RNA
caaagagaaguagaugaguagg

SEQ ID NO: 28020 - RNA, 22 nt, Artificial Sequence
  Guide RNA
caacuaccacuuccuacucauc

SEQ ID NO: 28021 - RNA, 22 nt, Artificial Sequence
  Guide RNA
caacuaccacuuccugcucauc

SEQ ID NO: 28022 - RNA, 22 nt, Artificial Sequence
  Guide RNA
caacuucaacuaccacuuccua

SEQ ID NO: 28023 - RNA, 22 nt, Artificial Sequence
  Guide RNA
caacuucaacuaccacuuccug

SEQ ID NO: 28024 - RNA, 22 nt, Artificial Sequence
  Guide RNA
cacuuccuacucaucuacuucu

SEQ ID NO: 28025 - RNA, 22 nt, Artificial Sequence
  Guide RNA
cacuuccugcucaucuacuucu

SEQ ID NO: 28026 - RNA, 22 nt, Artificial Sequence
  Guide RNA
cagcaacuucaacuaccacuuc

SEQ ID NO: 28027 - RNA, 22 nt, Artificial Sequence
  Guide RNA
ccacuuccuacucaucuacuuc

SEQ ID NO: 28028 - RNA, 22 nt, Artificial Sequence
  Guide RNA
ccacuuccugcucaucuacuuc

SEQ ID NO: 28029 - RNA, 22 nt, Artificial Sequence
  Guide RNA
ccuacucaucuacuucucuuug

SEQ ID NO: 28030 - RNA, 22 nt, Artificial Sequence
  Guide RNA
ccugcucaucuacuucucuuug

SEQ ID NO: 28031 - RNA, 22 nt, Artificial Sequence
  Guide RNA
cuaccacuuccuacucaucuac

SEQ ID NO: 28032 - RNA, 22 nt, Artificial Sequence
  Guide RNA
cuaccacuuccugcucaucuac

SEQ ID NO: 28033 - RNA, 22 nt, Artificial Sequence
  Guide RNA
cuacucaucuacuucucuuuga

SEQ ID NO: 28034 - RNA, 22 nt, Artificial Sequence
  Guide RNA
cugcucaucuacuucucuuuga

SEQ ID NO: 28035 - RNA, 22 nt, Artificial Sequence
  Guide RNA
cuucaacuaccacuuccuacuc

SEQ ID NO: 28036 - RNA, 22 nt, Artificial Sequence
  Guide RNA
cuucaacuaccacuuccugcuc

SEQ ID NO: 28037 - RNA, 22 nt, Artificial Sequence
  Guide RNA
cuuccuacucaucuacuucucu

SEQ ID NO: 28038 - RNA, 22 nt, Artificial Sequence
  Guide RNA
cuuccugcucaucuacuucucu

SEQ ID NO: 28039 - RNA, 22 nt, Artificial Sequence
  Guide RNA
cuuucaaagagaaguagaugag

SEQ ID NO: 28040 - RNA, 22 nt, Artificial Sequence
  Guide RNA
gaaguagaugagcaggaagugg

SEQ ID NO: 28041 - RNA, 22 nt, Artificial Sequence
  Guide RNA
gaaguagaugaguaggaagugg

SEQ ID NO: 28042 - RNA, 22 nt, Artificial Sequence
  Guide RNA
gagaaguagaugagcaggaagu

SEQ ID NO: 28043 - RNA, 22 nt, Artificial Sequence
  Guide RNA
gagaaguagaugaguaggaagu

SEQ ID NO: 28044 - RNA, 22 nt, Artificial Sequence
  Guide RNA
gagcaggaagugguaguugaag

SEQ ID NO: 28045 - RNA, 22 nt, Artificial Sequence
  Guide RNA
gaguaggaagugguaguugaag

SEQ ID NO: 28046 - RNA, 22 nt, Artificial Sequence
  Guide RNA
gaugagcaggaagugguaguug

SEQ ID NO: 28047 - RNA, 22 nt, Artificial Sequence
  Guide RNA
gaugaguaggaagugguaguug

SEQ ID NO: 28048 - RNA, 22 nt, Artificial Sequence
  Guide RNA
gcaacuucaacuaccacuuccu

SEQ ID NO: 28049 - RNA, 22 nt, Artificial Sequence
  Guide RNA
gcaggaagugguaguugaaguu

SEQ ID NO: 28050 - RNA, 22 nt, Artificial Sequence
  Guide RNA
gcuuucaaagagaaguagauga

SEQ ID NO: 28051 - RNA, 22 nt, Artificial Sequence
  Guide RNA
guagaugagcaggaagugguag

SEQ ID NO: 28052 - RNA, 22 nt, Artificial Sequence
  Guide RNA
guagaugaguaggaagugguag

SEQ ID NO: 28053 - RNA, 22 nt, Artificial Sequence
  Guide RNA
guaggaagugguaguugaaguu

SEQ ID NO: 28054 - RNA, 22 nt, Artificial Sequence
  Guide RNA
uaccacuuccuacucaucuacu

SEQ ID NO: 28055 - RNA, 22 nt, Artificial Sequence
  Guide RNA
uaccacuuccugcucaucuacu

SEQ ID NO: 28056 - RNA, 22 nt, Artificial Sequence
  Guide RNA
uacucaucuacuucucuuugaa

SEQ ID NO: 28057 - RNA, 22 nt, Artificial Sequence
  Guide RNA
uagaugagcaggaagugguagu

SEQ ID NO: 28058 - RNA, 22 nt, Artificial Sequence
  Guide RNA
uagaugaguaggaagugguagu

SEQ ID NO: 28059 - RNA, 22 nt, Artificial Sequence
  Guide RNA
uagcuuucaaagagaaguagau

SEQ ID NO: 28060 - RNA, 22 nt, Artificial Sequence
  Guide RNA
ucaaagagaaguagaugagcag

SEQ ID NO: 28061 - RNA, 22 nt, Artificial Sequence
  Guide RNA
ucaaagagaaguagaugaguag

SEQ ID NO: 28062 - RNA, 22 nt, Artificial Sequence
  Guide RNA
ucaacuaccacuuccuacucau

SEQ ID NO: 28063 - RNA, 22 nt, Artificial Sequence
  Guide RNA
ucaacuaccacuuccugcucau

SEQ ID NO: 28064 - RNA, 22 nt, Artificial Sequence
  Guide RNA
uccuacucaucuacuucucuuu

SEQ ID NO: 28065 - RNA, 22 nt, Artificial Sequence
  Guide RNA
uccugcucaucuacuucucuuu

SEQ ID NO: 28066 - RNA, 22 nt, Artificial Sequence
  Guide RNA
ugagcaggaagugguaguugaa

SEQ ID NO: 28067 - RNA, 22 nt, Artificial Sequence
  Guide RNA
ugaguaggaagugguaguugaa

SEQ ID NO: 28068 - RNA, 22 nt, Artificial Sequence
  Guide RNA
ugcucaucuacuucucuuugaa

SEQ ID NO: 28069 - RNA, 22 nt, Artificial Sequence
  Guide RNA
uucaaagagaaguagaugagca

SEQ ID NO: 28070 - RNA, 22 nt, Artificial Sequence
  Guide RNA
uucaaagagaaguagaugagua

SEQ ID NO: 28071 - RNA, 22 nt, Artificial Sequence
  Guide RNA
uucaacuaccacuuccuacuca

SEQ ID NO: 28072 - RNA, 22 nt, Artificial Sequence
  Guide RNA
uucaacuaccacuuccugcuca

SEQ ID NO: 28073 - RNA, 22 nt, Artificial Sequence
  Guide RNA
uuccuacucaucuacuucucuu

SEQ ID NO: 28074 - RNA, 22 nt, Artificial Sequence
  Guide RNA
uuccugcucaucuacuucucuu

SEQ ID NO: 28075 - RNA, 22 nt, Artificial Sequence
  Guide RNA
uuucaaagagaaguagaugagc

SEQ ID NO: 28076 - RNA, 22 nt, Artificial Sequence
  Guide RNA
uuucaaagagaaguagaugagu

SEQ ID NO: 28077 - RNA, 20 nt, Artificial Sequence
  Guide RNA
aacuggcguucuguuuacau

SEQ ID NO: 28078 - RNA, 20 nt, Artificial Sequence
  Guide RNA
aacuggcguucuguuuacgu

SEQ ID NO: 28079 - RNA, 20 nt, Artificial Sequence
  Guide RNA
aagauacguaaacagaacgc

SEQ ID NO: 28080 - RNA, 20 nt, Artificial Sequence
  Guide RNA
aagauauguaaacagaacgc

SEQ ID NO: 28081 - RNA, 20 nt, Artificial Sequence
  Guide RNA
acauaucuuagagaacgauc

SEQ ID NO: 28082 - RNA, 20 nt, Artificial Sequence
  Guide RNA
acguaaacagaacgccaguu

SEQ ID NO: 28083 - RNA, 20 nt, Artificial Sequence
  Guide RNA
acguaucuuagagaacgauc

SEQ ID NO: 28084 - RNA, 20 nt, Artificial Sequence
  Guide RNA
acuggcguucuguuuacaua

SEQ ID NO: 28085 - RNA, 20 nt, Artificial Sequence
  Guide RNA
acuggcguucuguuuacgua

SEQ ID NO: 28086 - RNA, 20 nt, Artificial Sequence
  Guide RNA
agauacguaaacagaacgcc

SEQ ID NO: 28087 - RNA, 20 nt, Artificial Sequence
  Guide RNA
agauauguaaacagaacgcc

SEQ ID NO: 28088 - RNA, 20 nt, Artificial Sequence
  Guide RNA
auacguaaacagaacgccag

SEQ ID NO: 28089 - RNA, 20 nt, Artificial Sequence
  Guide RNA
auauguaaacagaacgccag

SEQ ID NO: 28090 - RNA, 20 nt, Artificial Sequence
  Guide RNA
aucguucucuaagauacgua

SEQ ID NO: 28091 - RNA, 20 nt, Artificial Sequence
  Guide RNA
aucguucucuaagauaugua

SEQ ID NO: 28092 - RNA, 20 nt, Artificial Sequence
  Guide RNA
auguaaacagaacgccaguu

SEQ ID NO: 28093 - RNA, 20 nt, Artificial Sequence
  Guide RNA
cauaucuuagagaacgauca

SEQ ID NO: 28094 - RNA, 20 nt, Artificial Sequence
  Guide RNA
ccuucugaucguucucuaag

SEQ ID NO: 28095 - RNA, 20 nt, Artificial Sequence
  Guide RNA
cguaucuuagagaacgauca

SEQ ID NO: 28096 - RNA, 20 nt, Artificial Sequence
  Guide RNA
cguucucuaagauacguaaa

SEQ ID NO: 28097 - RNA, 20 nt, Artificial Sequence
  Guide RNA
cguucucuaagauauguaaa

SEQ ID NO: 28098 - RNA, 20 nt, Artificial Sequence
  Guide RNA
cguucuguuuacauaucuua

SEQ ID NO: 28099 - RNA, 20 nt, Artificial Sequence
  Guide RNA
cguucuguuuacguaucuua

SEQ ID NO: 28100 - RNA, 20 nt, Artificial Sequence
  Guide RNA
cuaagauacguaaacagaac

SEQ ID NO: 28101 - RNA, 20 nt, Artificial Sequence
  Guide RNA
cuaagauauguaaacagaac

SEQ ID NO: 28102 - RNA, 20 nt, Artificial Sequence
  Guide RNA
cucuaagauacguaaacaga

SEQ ID NO: 28103 - RNA, 20 nt, Artificial Sequence
  Guide RNA
cucuaagauauguaaacaga

SEQ ID NO: 28104 - RNA, 20 nt, Artificial Sequence
  Guide RNA
cugaucguucucuaagauac

SEQ ID NO: 28105 - RNA, 20 nt, Artificial Sequence
  Guide RNA
cugaucguucucuaagauau

SEQ ID NO: 28106 - RNA, 20 nt, Artificial Sequence
  Guide RNA
cuggcguucuguuuacauau

SEQ ID NO: 28107 - RNA, 20 nt, Artificial Sequence
  Guide RNA
cuggcguucuguuuacguau

SEQ ID NO: 28108 - RNA, 20 nt, Artificial Sequence
  Guide RNA
cugggaacuggcguucuguu

SEQ ID NO: 28109 - RNA, 20 nt, Artificial Sequence
  Guide RNA
cuguuuacauaucuuagaga

SEQ ID NO: 28110 - RNA, 20 nt, Artificial Sequence
  Guide RNA
cuguuuacguaucuuagaga

SEQ ID NO: 28111 - RNA, 20 nt, Artificial Sequence
  Guide RNA
cuucugaucguucucuaaga

SEQ ID NO: 28112 - RNA, 20 nt, Artificial Sequence
  Guide RNA
gaacuggcguucuguuuaca

SEQ ID NO: 28113 - RNA, 20 nt, Artificial Sequence
  Guide RNA
gaacuggcguucuguuuacg

SEQ ID NO: 28114 - RNA, 20 nt, Artificial Sequence
  Guide RNA
gauacguaaacagaacgcca

SEQ ID NO: 28115 - RNA, 20 nt, Artificial Sequence
  Guide RNA
gauauguaaacagaacgcca

SEQ ID NO: 28116 - RNA, 20 nt, Artificial Sequence
  Guide RNA
gaucguucucuaagauacgu

SEQ ID NO: 28117 - RNA, 20 nt, Artificial Sequence
  Guide RNA
gaucguucucuaagauaugu

SEQ ID NO: 28118 - RNA, 20 nt, Artificial Sequence
  Guide RNA
gcguucuguuuacauaucuu

SEQ ID NO: 28119 - RNA, 20 nt, Artificial Sequence
  Guide RNA
gcguucuguuuacguaucuu

SEQ ID NO: 28120 - RNA, 20 nt, Artificial Sequence
  Guide RNA
ggaacuggcguucuguuuac

SEQ ID NO: 28121 - RNA, 20 nt, Artificial Sequence
  Guide RNA
ggcguucuguuuacauaucu

SEQ ID NO: 28122 - RNA, 20 nt, Artificial Sequence
  Guide RNA
ggcguucuguuuacguaucu

SEQ ID NO: 28123 - RNA, 20 nt, Artificial Sequence
  Guide RNA
gggaacuggcguucuguuua

SEQ ID NO: 28124 - RNA, 20 nt, Artificial Sequence
  Guide RNA
guucucuaagauacguaaac

SEQ ID NO: 28125 - RNA, 20 nt, Artificial Sequence
  Guide RNA
guucucuaagauauguaaac

SEQ ID NO: 28126 - RNA, 20 nt, Artificial Sequence
  Guide RNA
guucuguuuacauaucuuag

SEQ ID NO: 28127 - RNA, 20 nt, Artificial Sequence
  Guide RNA
guucuguuuacguaucuuag

SEQ ID NO: 28128 - RNA, 20 nt, Artificial Sequence
  Guide RNA
guuuacauaucuuagagaac

SEQ ID NO: 28129 - RNA, 20 nt, Artificial Sequence
  Guide RNA
guuuacguaucuuagagaac

SEQ ID NO: 28130 - RNA, 20 nt, Artificial Sequence
  Guide RNA
uaagauacguaaacagaacg

SEQ ID NO: 28131 - RNA, 20 nt, Artificial Sequence
  Guide RNA
uaagauauguaaacagaacg

SEQ ID NO: 28132 - RNA, 20 nt, Artificial Sequence
  Guide RNA
uacauaucuuagagaacgau

SEQ ID NO: 28133 - RNA, 20 nt, Artificial Sequence
  Guide RNA
uacguaaacagaacgccagu

SEQ ID NO: 28134 - RNA, 20 nt, Artificial Sequence
  Guide RNA
uacguaucuuagagaacgau

SEQ ID NO: 28135 - RNA, 20 nt, Artificial Sequence
  Guide RNA
uauguaaacagaacgccagu

SEQ ID NO: 28136 - RNA, 20 nt, Artificial Sequence
  Guide RNA
ucguucucuaagauacguaa

SEQ ID NO: 28137 - RNA, 20 nt, Artificial Sequence
  Guide RNA
ucguucucuaagauauguaa

SEQ ID NO: 28138 - RNA, 20 nt, Artificial Sequence
  Guide RNA
ucuaagauacguaaacagaa

SEQ ID NO: 28139 - RNA, 20 nt, Artificial Sequence
  Guide RNA
ucucuaagauacguaaacag

SEQ ID NO: 28140 - RNA, 20 nt, Artificial Sequence
  Guide RNA
ucucuaagauauguaaacag

SEQ ID NO: 28141 - RNA, 20 nt, Artificial Sequence
  Guide RNA
ucugaucguucucuaagaua

SEQ ID NO: 28142 - RNA, 20 nt, Artificial Sequence
  Guide RNA
ucuguuuacauaucuuagag

SEQ ID NO: 28143 - RNA, 20 nt, Artificial Sequence
  Guide RNA
ucuguuuacguaucuuagag

SEQ ID NO: 28144 - RNA, 20 nt, Artificial Sequence
  Guide RNA
ugaucguucucuaagauacg

SEQ ID NO: 28145 - RNA, 20 nt, Artificial Sequence
  Guide RNA
ugaucguucucuaagauaug

SEQ ID NO: 28146 - RNA, 20 nt, Artificial Sequence
  Guide RNA
uggcguucuguuuacauauc

SEQ ID NO: 28147 - RNA, 20 nt, Artificial Sequence
  Guide RNA
uggcguucuguuuacguauc

SEQ ID NO: 28148 - RNA, 20 nt, Artificial Sequence
  Guide RNA
ugggaacuggcguucuguuu

SEQ ID NO: 28149 - RNA, 20 nt, Artificial Sequence
  Guide RNA
uguuuacguaucuuagagaa

SEQ ID NO: 28150 - RNA, 20 nt, Artificial Sequence
  Guide RNA
uuacauaucuuagagaacga

SEQ ID NO: 28151 - RNA, 20 nt, Artificial Sequence
  Guide RNA
uuacguaucuuagagaacga

SEQ ID NO: 28152 - RNA, 20 nt, Artificial Sequence
  Guide RNA
uucucuaagauacguaaaca

SEQ ID NO: 28153 - RNA, 20 nt, Artificial Sequence
  Guide RNA
uucugaucguucucuaagau

SEQ ID NO: 28154 - RNA, 20 nt, Artificial Sequence
  Guide RNA
uucuguuuacguaucuuaga

SEQ ID NO: 28155 - RNA, 20 nt, Artificial Sequence
  Guide RNA
uuuacauaucuuagagaacg

SEQ ID NO: 28156 - RNA, 20 nt, Artificial Sequence
  Guide RNA
uuuacguaucuuagagaacg

SEQ ID NO: 28157 - RNA, 21 nt, Artificial Sequence
  Guide RNA
aacuggcguucuguuuacaua

SEQ ID NO: 28158 - RNA, 21 nt, Artificial Sequence
  Guide RNA
aacuggcguucuguuuacgua

SEQ ID NO: 28159 - RNA, 21 nt, Artificial Sequence
  Guide RNA
aagauacguaaacagaacgcc

SEQ ID NO: 28160 - RNA, 21 nt, Artificial Sequence
  Guide RNA
aagauauguaaacagaacgcc

SEQ ID NO: 28161 - RNA, 21 nt, Artificial Sequence
  Guide RNA
acauaucuuagagaacgauca

SEQ ID NO: 28162 - RNA, 21 nt, Artificial Sequence
  Guide RNA
acguaaacagaacgccaguuc

SEQ ID NO: 28163 - RNA, 21 nt, Artificial Sequence
  Guide RNA
acguaucuuagagaacgauca

SEQ ID NO: 28164 - RNA, 21 nt, Artificial Sequence
  Guide RNA
acuggcguucuguuuacauau

SEQ ID NO: 28165 - RNA, 21 nt, Artificial Sequence
  Guide RNA
acuggcguucuguuuacguau

SEQ ID NO: 28166 - RNA, 21 nt, Artificial Sequence
  Guide RNA
agauacguaaacagaacgcca

SEQ ID NO: 28167 - RNA, 21 nt, Artificial Sequence
  Guide RNA
agauauguaaacagaacgcca

SEQ ID NO: 28168 - RNA, 21 nt, Artificial Sequence
  Guide RNA
auacguaaacagaacgccagu

SEQ ID NO: 28169 - RNA, 21 nt, Artificial Sequence
  Guide RNA
auauguaaacagaacgccagu

SEQ ID NO: 28170 - RNA, 21 nt, Artificial Sequence
  Guide RNA
aucguucucuaagauacguaa

SEQ ID NO: 28171 - RNA, 21 nt, Artificial Sequence
  Guide RNA
auguaaacagaacgccaguuc

SEQ ID NO: 28172 - RNA, 21 nt, Artificial Sequence
  Guide RNA
cauaucuuagagaacgaucag

SEQ ID NO: 28173 - RNA, 21 nt, Artificial Sequence
  Guide RNA
ccuucugaucguucucuaaga

SEQ ID NO: 28174 - RNA, 21 nt, Artificial Sequence
  Guide RNA
cguaucuuagagaacgaucag

SEQ ID NO: 28175 - RNA, 21 nt, Artificial Sequence
  Guide RNA
cguucucuaagauacguaaac

SEQ ID NO: 28176 - RNA, 21 nt, Artificial Sequence
  Guide RNA
cguucucuaagauauguaaac

SEQ ID NO: 28177 - RNA, 21 nt, Artificial Sequence
  Guide RNA
cguucuguuuacauaucuuag

SEQ ID NO: 28178 - RNA, 21 nt, Artificial Sequence
  Guide RNA
cguucuguuuacguaucuuag

SEQ ID NO: 28179 - RNA, 21 nt, Artificial Sequence
  Guide RNA
cuaagauacguaaacagaacg

SEQ ID NO: 28180 - RNA, 21 nt, Artificial Sequence
  Guide RNA
cuaagauauguaaacagaacg

SEQ ID NO: 28181 - RNA, 21 nt, Artificial Sequence
  Guide RNA
cucuaagauacguaaacagaa

SEQ ID NO: 28182 - RNA, 21 nt, Artificial Sequence
  Guide RNA
cugaucguucucuaagauacg

SEQ ID NO: 28183 - RNA, 21 nt, Artificial Sequence
  Guide RNA
cugaucguucucuaagauaug

SEQ ID NO: 28184 - RNA, 21 nt, Artificial Sequence
  Guide RNA
cuggcguucuguuuacauauc

SEQ ID NO: 28185 - RNA, 21 nt, Artificial Sequence
  Guide RNA
cuggcguucuguuuacguauc

SEQ ID NO: 28186 - RNA, 21 nt, Artificial Sequence
  Guide RNA
cugggaacuggcguucuguuu

SEQ ID NO: 28187 - RNA, 21 nt, Artificial Sequence
  Guide RNA
cuguuuacguaucuuagagaa

SEQ ID NO: 28188 - RNA, 21 nt, Artificial Sequence
  Guide RNA
cuucugaucguucucuaagau

SEQ ID NO: 28189 - RNA, 21 nt, Artificial Sequence
  Guide RNA
gaacuggcguucuguuuacau

SEQ ID NO: 28190 - RNA, 21 nt, Artificial Sequence
  Guide RNA
gaacuggcguucuguuuacgu

SEQ ID NO: 28191 - RNA, 21 nt, Artificial Sequence
  Guide RNA
gauacguaaacagaacgccag

SEQ ID NO: 28192 - RNA, 21 nt, Artificial Sequence
  Guide RNA
gauauguaaacagaacgccag

SEQ ID NO: 28193 - RNA, 21 nt, Artificial Sequence
  Guide RNA
gaucguucucuaagauacgua

SEQ ID NO: 28194 - RNA, 21 nt, Artificial Sequence
  Guide RNA
gaucguucucuaagauaugua

SEQ ID NO: 28195 - RNA, 21 nt, Artificial Sequence
  Guide RNA
gcguucuguuuacauaucuua

SEQ ID NO: 28196 - RNA, 21 nt, Artificial Sequence
  Guide RNA
gcguucuguuuacguaucuua

SEQ ID NO: 28197 - RNA, 21 nt, Artificial Sequence
  Guide RNA
gcugggaacuggcguucuguu

SEQ ID NO: 28198 - RNA, 21 nt, Artificial Sequence
  Guide RNA
ggaacuggcguucuguuuaca

SEQ ID NO: 28199 - RNA, 21 nt, Artificial Sequence
  Guide RNA
ggaacuggcguucuguuuacg

SEQ ID NO: 28200 - RNA, 21 nt, Artificial Sequence
  Guide RNA
ggcguucuguuuacauaucuu

SEQ ID NO: 28201 - RNA, 21 nt, Artificial Sequence
  Guide RNA
ggcguucuguuuacguaucuu

SEQ ID NO: 28202 - RNA, 21 nt, Artificial Sequence
  Guide RNA
gggaacuggcguucuguuuac

SEQ ID NO: 28203 - RNA, 21 nt, Artificial Sequence
  Guide RNA
guucucuaagauacguaaaca

SEQ ID NO: 28204 - RNA, 21 nt, Artificial Sequence
  Guide RNA
guucuguuuacguaucuuaga

SEQ ID NO: 28205 - RNA, 21 nt, Artificial Sequence
  Guide RNA
guuuacauaucuuagagaacg

SEQ ID NO: 28206 - RNA, 21 nt, Artificial Sequence
  Guide RNA
guuuacguaucuuagagaacg

SEQ ID NO: 28207 - RNA, 21 nt, Artificial Sequence
  Guide RNA
uaagauacguaaacagaacgc

SEQ ID NO: 28208 - RNA, 21 nt, Artificial Sequence
  Guide RNA
uaagauauguaaacagaacgc

SEQ ID NO: 28209 - RNA, 21 nt, Artificial Sequence
  Guide RNA
uacauaucuuagagaacgauc

SEQ ID NO: 28210 - RNA, 21 nt, Artificial Sequence
  Guide RNA
uacguaaacagaacgccaguu

SEQ ID NO: 28211 - RNA, 21 nt, Artificial Sequence
  Guide RNA
uacguaucuuagagaacgauc

SEQ ID NO: 28212 - RNA, 21 nt, Artificial Sequence
  Guide RNA
uauguaaacagaacgccaguu

SEQ ID NO: 28213 - RNA, 21 nt, Artificial Sequence
  Guide RNA
uccuucugaucguucucuaag

SEQ ID NO: 28214 - RNA, 21 nt, Artificial Sequence
  Guide RNA
ucguucucuaagauacguaaa

SEQ ID NO: 28215 - RNA, 21 nt, Artificial Sequence
  Guide RNA
ucuaagauacguaaacagaac

SEQ ID NO: 28216 - RNA, 21 nt, Artificial Sequence
  Guide RNA
ucucuaagauacguaaacaga

SEQ ID NO: 28217 - RNA, 21 nt, Artificial Sequence
  Guide RNA
ucugaucguucucuaagauac

SEQ ID NO: 28218 - RNA, 21 nt, Artificial Sequence
  Guide RNA
ucugaucguucucuaagauau

SEQ ID NO: 28219 - RNA, 21 nt, Artificial Sequence
  Guide RNA
ucuguuuacguaucuuagaga

SEQ ID NO: 28220 - RNA, 21 nt, Artificial Sequence
  Guide RNA
ugaucguucucuaagauacgu

SEQ ID NO: 28221 - RNA, 21 nt, Artificial Sequence
  Guide RNA
ugaucguucucuaagauaugu

SEQ ID NO: 28222 - RNA, 21 nt, Artificial Sequence
  Guide RNA
uggcguucuguuuacauaucu

SEQ ID NO: 28223 - RNA, 21 nt, Artificial Sequence
  Guide RNA
uggcguucuguuuacguaucu

SEQ ID NO: 28224 - RNA, 21 nt, Artificial Sequence
  Guide RNA
ugggaacuggcguucuguuua

SEQ ID NO: 28225 - RNA, 21 nt, Artificial Sequence
  Guide RNA
uguuuacguaucuuagagaac

SEQ ID NO: 28226 - RNA, 21 nt, Artificial Sequence
  Guide RNA
uuacguaucuuagagaacgau

SEQ ID NO: 28227 - RNA, 21 nt, Artificial Sequence
  Guide RNA
uucucuaagauacguaaacag

SEQ ID NO: 28228 - RNA, 21 nt, Artificial Sequence
  Guide RNA
uucugaucguucucuaagaua

SEQ ID NO: 28229 - RNA, 21 nt, Artificial Sequence
  Guide RNA
uucuguuuacguaucuuagag

SEQ ID NO: 28230 - RNA, 21 nt, Artificial Sequence
  Guide RNA
uuuacguaucuuagagaacga

SEQ ID NO: 28231 - RNA, 22 nt, Artificial Sequence
  Guide RNA
aacuggcguucuguuuacauau

SEQ ID NO: 28232 - RNA, 22 nt, Artificial Sequence
  Guide RNA
aacuggcguucuguuuacguau

SEQ ID NO: 28233 - RNA, 22 nt, Artificial Sequence
  Guide RNA
aagauacguaaacagaacgcca

SEQ ID NO: 28234 - RNA, 22 nt, Artificial Sequence
  Guide RNA
aagauauguaaacagaacgcca

SEQ ID NO: 28235 - RNA, 22 nt, Artificial Sequence
  Guide RNA
acauaucuuagagaacgaucag

SEQ ID NO: 28236 - RNA, 22 nt, Artificial Sequence
  Guide RNA
acguaaacagaacgccaguucc

SEQ ID NO: 28237 - RNA, 22 nt, Artificial Sequence
  Guide RNA
acguaucuuagagaacgaucag

SEQ ID NO: 28238 - RNA, 22 nt, Artificial Sequence
  Guide RNA
acuggcguucuguuuacauauc

SEQ ID NO: 28239 - RNA, 22 nt, Artificial Sequence
  Guide RNA
acuggcguucuguuuacguauc

SEQ ID NO: 28240 - RNA, 22 nt, Artificial Sequence
  Guide RNA
agauacguaaacagaacgccag

SEQ ID NO: 28241 - RNA, 22 nt, Artificial Sequence
  Guide RNA
agauauguaaacagaacgccag

SEQ ID NO: 28242 - RNA, 22 nt, Artificial Sequence
  Guide RNA
auacguaaacagaacgccaguu

SEQ ID NO: 28243 - RNA, 22 nt, Artificial Sequence
  Guide RNA
auauguaaacagaacgccaguu

SEQ ID NO: 28244 - RNA, 22 nt, Artificial Sequence
  Guide RNA
aucguucucuaagauacguaaa

SEQ ID NO: 28245 - RNA, 22 nt, Artificial Sequence
  Guide RNA
auguaaacagaacgccaguucc

SEQ ID NO: 28246 - RNA, 22 nt, Artificial Sequence
  Guide RNA
cauaucuuagagaacgaucaga

SEQ ID NO: 28247 - RNA, 22 nt, Artificial Sequence
  Guide RNA
ccuucugaucguucucuaagau

SEQ ID NO: 28248 - RNA, 22 nt, Artificial Sequence
  Guide RNA
cgcugggaacuggcguucuguu

SEQ ID NO: 28249 - RNA, 22 nt, Artificial Sequence
  Guide RNA
cguaucuuagagaacgaucaga

SEQ ID NO: 28250 - RNA, 22 nt, Artificial Sequence
  Guide RNA
cguucucuaagauacguaaaca

SEQ ID NO: 28251 - RNA, 22 nt, Artificial Sequence
  Guide RNA
cguucucuaagauauguaaaca

SEQ ID NO: 28252 - RNA, 22 nt, Artificial Sequence
  Guide RNA
cguucuguuuacauaucuuaga

SEQ ID NO: 28253 - RNA, 22 nt, Artificial Sequence
  Guide RNA
cguucuguuuacguaucuuaga

SEQ ID NO: 28254 - RNA, 22 nt, Artificial Sequence
  Guide RNA
cuaagauacguaaacagaacgc

SEQ ID NO: 28255 - RNA, 22 nt, Artificial Sequence
  Guide RNA
cuaagauauguaaacagaacgc

SEQ ID NO: 28256 - RNA, 22 nt, Artificial Sequence
  Guide RNA
cucuaagauacguaaacagaac

SEQ ID NO: 28257 - RNA, 22 nt, Artificial Sequence
  Guide RNA
cucuaagauauguaaacagaac

SEQ ID NO: 28258 - RNA, 22 nt, Artificial Sequence
  Guide RNA
cugaucguucucuaagauacgu

SEQ ID NO: 28259 - RNA, 22 nt, Artificial Sequence
  Guide RNA
cugaucguucucuaagauaugu

SEQ ID NO: 28260 - RNA, 22 nt, Artificial Sequence
  Guide RNA
cuggcguucuguuuacauaucu

SEQ ID NO: 28261 - RNA, 22 nt, Artificial Sequence
  Guide RNA
cuggcguucuguuuacguaucu

SEQ ID NO: 28262 - RNA, 22 nt, Artificial Sequence
  Guide RNA
cugggaacuggcguucuguuua

SEQ ID NO: 28263 - RNA, 22 nt, Artificial Sequence
  Guide RNA
cuguuuacauaucuuagagaac

SEQ ID NO: 28264 - RNA, 22 nt, Artificial Sequence
  Guide RNA
cuguuuacguaucuuagagaac

SEQ ID NO: 28265 - RNA, 22 nt, Artificial Sequence
  Guide RNA
cuucugaucguucucuaagaua

SEQ ID NO: 28266 - RNA, 22 nt, Artificial Sequence
  Guide RNA
gaacuggcguucuguuuacaua

SEQ ID NO: 28267 - RNA, 22 nt, Artificial Sequence
  Guide RNA
gaacuggcguucuguuuacgua

SEQ ID NO: 28268 - RNA, 22 nt, Artificial Sequence
  Guide RNA
gauacguaaacagaacgccagu

SEQ ID NO: 28269 - RNA, 22 nt, Artificial Sequence
  Guide RNA
gauauguaaacagaacgccagu

SEQ ID NO: 28270 - RNA, 22 nt, Artificial Sequence
  Guide RNA
gaucguucucuaagauacguaa

SEQ ID NO: 28271 - RNA, 22 nt, Artificial Sequence
  Guide RNA
gaucguucucuaagauauguaa

SEQ ID NO: 28272 - RNA, 22 nt, Artificial Sequence
  Guide RNA
gcguucuguuuacauaucuuag

SEQ ID NO: 28273 - RNA, 22 nt, Artificial Sequence
  Guide RNA
gcguucuguuuacguaucuuag

SEQ ID NO: 28274 - RNA, 22 nt, Artificial Sequence
  Guide RNA
gcugggaacuggcguucuguuu

SEQ ID NO: 28275 - RNA, 22 nt, Artificial Sequence
  Guide RNA
ggaacuggcguucuguuuacau

SEQ ID NO: 28276 - RNA, 22 nt, Artificial Sequence
  Guide RNA
ggaacuggcguucuguuuacgu

SEQ ID NO: 28277 - RNA, 22 nt, Artificial Sequence
  Guide RNA
ggcguucuguuuacauaucuua

SEQ ID NO: 28278 - RNA, 22 nt, Artificial Sequence
  Guide RNA
ggcguucuguuuacguaucuua

SEQ ID NO: 28279 - RNA, 22 nt, Artificial Sequence
  Guide RNA
gggaacuggcguucuguuuaca

SEQ ID NO: 28280 - RNA, 22 nt, Artificial Sequence
  Guide RNA
gggaacuggcguucuguuuacg

SEQ ID NO: 28281 - RNA, 22 nt, Artificial Sequence
  Guide RNA
guccuucugaucguucucuaag

SEQ ID NO: 28282 - RNA, 22 nt, Artificial Sequence
  Guide RNA
guucucuaagauacguaaacag

SEQ ID NO: 28283 - RNA, 22 nt, Artificial Sequence
  Guide RNA
guucucuaagauauguaaacag

SEQ ID NO: 28284 - RNA, 22 nt, Artificial Sequence
  Guide RNA
guucuguuuacauaucuuagag

SEQ ID NO: 28285 - RNA, 22 nt, Artificial Sequence
  Guide RNA
guucuguuuacguaucuuagag

SEQ ID NO: 28286 - RNA, 22 nt, Artificial Sequence
  Guide RNA
guuuacauaucuuagagaacga

SEQ ID NO: 28287 - RNA, 22 nt, Artificial Sequence
  Guide RNA
guuuacguaucuuagagaacga

SEQ ID NO: 28288 - RNA, 22 nt, Artificial Sequence
  Guide RNA
uaagauacguaaacagaacgcc

SEQ ID NO: 28289 - RNA, 22 nt, Artificial Sequence
  Guide RNA
uaagauauguaaacagaacgcc

SEQ ID NO: 28290 - RNA, 22 nt, Artificial Sequence
  Guide RNA
uacauaucuuagagaacgauca

SEQ ID NO: 28291 - RNA, 22 nt, Artificial Sequence
  Guide RNA
uacguaaacagaacgccaguuc

SEQ ID NO: 28292 - RNA, 22 nt, Artificial Sequence
  Guide RNA
uacguaucuuagagaacgauca

SEQ ID NO: 28293 - RNA, 22 nt, Artificial Sequence
  Guide RNA
uauguaaacagaacgccaguuc

SEQ ID NO: 28294 - RNA, 22 nt, Artificial Sequence
  Guide RNA
uccuucugaucguucucuaaga

SEQ ID NO: 28295 - RNA, 22 nt, Artificial Sequence
  Guide RNA
ucguucucuaagauacguaaac

SEQ ID NO: 28296 - RNA, 22 nt, Artificial Sequence
  Guide RNA
ucguucucuaagauauguaaac

SEQ ID NO: 28297 - RNA, 22 nt, Artificial Sequence
  Guide RNA
ucuaagauacguaaacagaacg

SEQ ID NO: 28298 - RNA, 22 nt, Artificial Sequence
  Guide RNA
ucuaagauauguaaacagaacg

SEQ ID NO: 28299 - RNA, 22 nt, Artificial Sequence
  Guide RNA
ucucuaagauacguaaacagaa

SEQ ID NO: 28300 - RNA, 22 nt, Artificial Sequence
  Guide RNA
ucugaucguucucuaagauacg

SEQ ID NO: 28301 - RNA, 22 nt, Artificial Sequence
  Guide RNA
ucugaucguucucuaagauaug

SEQ ID NO: 28302 - RNA, 22 nt, Artificial Sequence
  Guide RNA
ucuguuuacguaucuuagagaa

SEQ ID NO: 28303 - RNA, 22 nt, Artificial Sequence
  Guide RNA
ugaucguucucuaagauacgua

SEQ ID NO: 28304 - RNA, 22 nt, Artificial Sequence
  Guide RNA
ugaucguucucuaagauaugua

SEQ ID NO: 28305 - RNA, 22 nt, Artificial Sequence
  Guide RNA
uggcguucuguuuacauaucuu

SEQ ID NO: 28306 - RNA, 22 nt, Artificial Sequence
  Guide RNA
uggcguucuguuuacguaucuu

SEQ ID NO: 28307 - RNA, 22 nt, Artificial Sequence
  Guide RNA
ugggaacuggcguucuguuuac

SEQ ID NO: 28308 - RNA, 22 nt, Artificial Sequence
  Guide RNA
uguuuacauaucuuagagaacg

SEQ ID NO: 28309 - RNA, 22 nt, Artificial Sequence
  Guide RNA
uguuuacguaucuuagagaacg

SEQ ID NO: 28310 - RNA, 22 nt, Artificial Sequence
  Guide RNA
uuacauaucuuagagaacgauc

SEQ ID NO: 28311 - RNA, 22 nt, Artificial Sequence
  Guide RNA
uuacguaucuuagagaacgauc

SEQ ID NO: 28312 - RNA, 22 nt, Artificial Sequence
  Guide RNA
uucucuaagauacguaaacaga

SEQ ID NO: 28313 - RNA, 22 nt, Artificial Sequence
  Guide RNA
uucugaucguucucuaagauac

SEQ ID NO: 28314 - RNA, 22 nt, Artificial Sequence
  Guide RNA
uucugaucguucucuaagauau

SEQ ID NO: 28315 - RNA, 22 nt, Artificial Sequence
  Guide RNA
uucuguuuacguaucuuagaga

SEQ ID NO: 28316 - RNA, 22 nt, Artificial Sequence
  Guide RNA
uuuacguaucuuagagaacgau

SEQ ID NO: 28317 - RNA, 20 nt, Artificial Sequence
  Guide RNA
aaccuaggugcccaagauca

SEQ ID NO: 28318 - RNA, 20 nt, Artificial Sequence
  Guide RNA
aagaucaccccuagaucuuc

SEQ ID NO: 28319 - RNA, 20 nt, Artificial Sequence
  Guide RNA
aagaucacccguagaucuuc

SEQ ID NO: 28320 - RNA, 20 nt, Artificial Sequence
  Guide RNA
aagaucuacgggugaucuug

SEQ ID NO: 28321 - RNA, 20 nt, Artificial Sequence
  Guide RNA
aagaucuaggggugaucuug

SEQ ID NO: 28322 - RNA, 20 nt, Artificial Sequence
  Guide RNA
acauugaagaucuacgggug

SEQ ID NO: 28323 - RNA, 20 nt, Artificial Sequence
  Guide RNA
acauugaagaucuaggggug

SEQ ID NO: 28324 - RNA, 20 nt, Artificial Sequence
  Guide RNA
accccuagaucuucaaugua

SEQ ID NO: 28325 - RNA, 20 nt, Artificial Sequence
  Guide RNA
acccguagaucuucaaugua

SEQ ID NO: 28326 - RNA, 20 nt, Artificial Sequence
  Guide RNA
accuaggugcccaagaucac

SEQ ID NO: 28327 - RNA, 20 nt, Artificial Sequence
  Guide RNA
acgggugaucuugggcaccu

SEQ ID NO: 28328 - RNA, 20 nt, Artificial Sequence
  Guide RNA
agaucaccccuagaucuuca

SEQ ID NO: 28329 - RNA, 20 nt, Artificial Sequence
  Guide RNA
agaucacccguagaucuuca

SEQ ID NO: 28330 - RNA, 20 nt, Artificial Sequence
  Guide RNA
agaucuacgggugaucuugg

SEQ ID NO: 28331 - RNA, 20 nt, Artificial Sequence
  Guide RNA
agaucuaggggugaucuugg

SEQ ID NO: 28332 - RNA, 20 nt, Artificial Sequence
  Guide RNA
aggggugaucuugggcaccu

SEQ ID NO: 28333 - RNA, 20 nt, Artificial Sequence
  Guide RNA
aggugcccaagaucaccccu

SEQ ID NO: 28334 - RNA, 20 nt, Artificial Sequence
  Guide RNA
aggugcccaagaucacccgu

SEQ ID NO: 28335 - RNA, 20 nt, Artificial Sequence
  Guide RNA
aguuacauugaagaucuacg

SEQ ID NO: 28336 - RNA, 20 nt, Artificial Sequence
  Guide RNA
aguuacauugaagaucuagg

SEQ ID NO: 28337 - RNA, 20 nt, Artificial Sequence
  Guide RNA
aucaccccuagaucuucaau

SEQ ID NO: 28338 - RNA, 20 nt, Artificial Sequence
  Guide RNA
aucacccguagaucuucaau

SEQ ID NO: 28339 - RNA, 20 nt, Artificial Sequence
  Guide RNA
aucaguuacauugaagaucu

SEQ ID NO: 28340 - RNA, 20 nt, Artificial Sequence
  Guide RNA
aucuacgggugaucuugggc

SEQ ID NO: 28341 - RNA, 20 nt, Artificial Sequence
  Guide RNA
aucuaggggugaucuugggc

SEQ ID NO: 28342 - RNA, 20 nt, Artificial Sequence
  Guide RNA
auugaagaucuacgggugau

SEQ ID NO: 28343 - RNA, 20 nt, Artificial Sequence
  Guide RNA
auugaagaucuaggggugau

SEQ ID NO: 28344 - RNA, 20 nt, Artificial Sequence
  Guide RNA
caagaucaccccuagaucuu

SEQ ID NO: 28345 - RNA, 20 nt, Artificial Sequence
  Guide RNA
caagaucacccguagaucuu

SEQ ID NO: 28346 - RNA, 20 nt, Artificial Sequence
  Guide RNA
caccccuagaucuucaaugu

SEQ ID NO: 28347 - RNA, 20 nt, Artificial Sequence
  Guide RNA
cacccguagaucuucaaugu

SEQ ID NO: 28348 - RNA, 20 nt, Artificial Sequence
  Guide RNA
caguuacauugaagaucuac

SEQ ID NO: 28349 - RNA, 20 nt, Artificial Sequence
  Guide RNA
caguuacauugaagaucuag

SEQ ID NO: 28350 - RNA, 20 nt, Artificial Sequence
  Guide RNA
cauugaagaucuacggguga

SEQ ID NO: 28351 - RNA, 20 nt, Artificial Sequence
  Guide RNA
cauugaagaucuagggguga

SEQ ID NO: 28352 - RNA, 20 nt, Artificial Sequence
  Guide RNA
ccaagaucaccccuagaucu

SEQ ID NO: 28353 - RNA, 20 nt, Artificial Sequence
  Guide RNA
ccaagaucacccguagaucu

SEQ ID NO: 28354 - RNA, 20 nt, Artificial Sequence
  Guide RNA
cccaagaucaccccuagauc

SEQ ID NO: 28355 - RNA, 20 nt, Artificial Sequence
  Guide RNA
cccaagaucacccguagauc

SEQ ID NO: 28356 - RNA, 20 nt, Artificial Sequence
  Guide RNA
ccccuagaucuucaauguaa

SEQ ID NO: 28357 - RNA, 20 nt, Artificial Sequence
  Guide RNA
cccguagaucuucaauguaa

SEQ ID NO: 28358 - RNA, 20 nt, Artificial Sequence
  Guide RNA
cccuagaucuucaauguaac

SEQ ID NO: 28359 - RNA, 20 nt, Artificial Sequence
  Guide RNA
ccguagaucuucaauguaac

SEQ ID NO: 28360 - RNA, 20 nt, Artificial Sequence
  Guide RNA
ccuagaucuucaauguaacu

SEQ ID NO: 28361 - RNA, 20 nt, Artificial Sequence
  Guide RNA
ccuaggugcccaagaucacc

SEQ ID NO: 28362 - RNA, 20 nt, Artificial Sequence
  Guide RNA
cguagaucuucaauguaacu

SEQ ID NO: 28363 - RNA, 20 nt, Artificial Sequence
  Guide RNA
cuacgggugaucuugggcac

SEQ ID NO: 28364 - RNA, 20 nt, Artificial Sequence
  Guide RNA
cuaggggugaucuugggcac

SEQ ID NO: 28365 - RNA, 20 nt, Artificial Sequence
  Guide RNA
cuaggugcccaagaucaccc

SEQ ID NO: 28366 - RNA, 20 nt, Artificial Sequence
  Guide RNA
gaagaucuacgggugaucuu

SEQ ID NO: 28367 - RNA, 20 nt, Artificial Sequence
  Guide RNA
gaagaucuaggggugaucuu

SEQ ID NO: 28368 - RNA, 20 nt, Artificial Sequence
  Guide RNA
gaucaccccuagaucuucaa

SEQ ID NO: 28369 - RNA, 20 nt, Artificial Sequence
  Guide RNA
gaucacccguagaucuucaa

SEQ ID NO: 28370 - RNA, 20 nt, Artificial Sequence
  Guide RNA
gaucuacgggugaucuuggg

SEQ ID NO: 28371 - RNA, 20 nt, Artificial Sequence
  Guide RNA
gaucuaggggugaucuuggg

SEQ ID NO: 28372 - RNA, 20 nt, Artificial Sequence
  Guide RNA
gcccaagaucaccccuagau

SEQ ID NO: 28373 - RNA, 20 nt, Artificial Sequence
  Guide RNA
gcccaagaucacccguagau

SEQ ID NO: 28374 - RNA, 20 nt, Artificial Sequence
  Guide RNA
ggugcccaagaucaccccua

SEQ ID NO: 28375 - RNA, 20 nt, Artificial Sequence
  Guide RNA
ggugcccaagaucacccgua

SEQ ID NO: 28376 - RNA, 20 nt, Artificial Sequence
  Guide RNA
guaucaguuacauugaagau

SEQ ID NO: 28377 - RNA, 20 nt, Artificial Sequence
  Guide RNA
gugcccaagaucaccccuag

SEQ ID NO: 28378 - RNA, 20 nt, Artificial Sequence
  Guide RNA
gugcccaagaucacccguag

SEQ ID NO: 28379 - RNA, 20 nt, Artificial Sequence
  Guide RNA
guuacauugaagaucuacgg

SEQ ID NO: 28380 - RNA, 20 nt, Artificial Sequence
  Guide RNA
guuacauugaagaucuaggg

SEQ ID NO: 28381 - RNA, 20 nt, Artificial Sequence
  Guide RNA
uacauugaagaucuacgggu

SEQ ID NO: 28382 - RNA, 20 nt, Artificial Sequence
  Guide RNA
uacauugaagaucuaggggu

SEQ ID NO: 28383 - RNA, 20 nt, Artificial Sequence
  Guide RNA
uacgggugaucuugggcacc

SEQ ID NO: 28384 - RNA, 20 nt, Artificial Sequence
  Guide RNA
uaggggugaucuugggcacc

SEQ ID NO: 28385 - RNA, 20 nt, Artificial Sequence
  Guide RNA
uaggugcccaagaucacccc

SEQ ID NO: 28386 - RNA, 20 nt, Artificial Sequence
  Guide RNA
uaggugcccaagaucacccg

SEQ ID NO: 28387 - RNA, 20 nt, Artificial Sequence
  Guide RNA
uaucaguuacauugaagauc

SEQ ID NO: 28388 - RNA, 20 nt, Artificial Sequence
  Guide RNA
ucaccccuagaucuucaaug

SEQ ID NO: 28389 - RNA, 20 nt, Artificial Sequence
  Guide RNA
ucacccguagaucuucaaug

SEQ ID NO: 28390 - RNA, 20 nt, Artificial Sequence
  Guide RNA
ucaguuacauugaagaucua

SEQ ID NO: 28391 - RNA, 20 nt, Artificial Sequence
  Guide RNA
ucuacgggugaucuugggca

SEQ ID NO: 28392 - RNA, 20 nt, Artificial Sequence
  Guide RNA
ucuaggggugaucuugggca

SEQ ID NO: 28393 - RNA, 20 nt, Artificial Sequence
  Guide RNA
ugaagaucuacgggugaucu

SEQ ID NO: 28394 - RNA, 20 nt, Artificial Sequence
  Guide RNA
ugaagaucuaggggugaucu

SEQ ID NO: 28395 - RNA, 20 nt, Artificial Sequence
  Guide RNA
ugcccaagaucaccccuaga

SEQ ID NO: 28396 - RNA, 20 nt, Artificial Sequence
  Guide RNA
ugcccaagaucacccguaga

SEQ ID NO: 28397 - RNA, 20 nt, Artificial Sequence
  Guide RNA
uuacauugaagaucuacggg

SEQ ID NO: 28398 - RNA, 20 nt, Artificial Sequence
  Guide RNA
uuacauugaagaucuagggg

SEQ ID NO: 28399 - RNA, 20 nt, Artificial Sequence
  Guide RNA
uugaagaucuacgggugauc

SEQ ID NO: 28400 - RNA, 20 nt, Artificial Sequence
  Guide RNA
uugaagaucuaggggugauc

SEQ ID NO: 28401 - RNA, 21 nt, Artificial Sequence
  Guide RNA
aaccuaggugcccaagaucac

SEQ ID NO: 28402 - RNA, 21 nt, Artificial Sequence
  Guide RNA
aagaucaccccuagaucuuca

SEQ ID NO: 28403 - RNA, 21 nt, Artificial Sequence
  Guide RNA
aagaucacccguagaucuuca

SEQ ID NO: 28404 - RNA, 21 nt, Artificial Sequence
  Guide RNA
aagaucuacgggugaucuugg

SEQ ID NO: 28405 - RNA, 21 nt, Artificial Sequence
  Guide RNA
aagaucuaggggugaucuugg

SEQ ID NO: 28406 - RNA, 21 nt, Artificial Sequence
  Guide RNA
acauugaagaucuacggguga

SEQ ID NO: 28407 - RNA, 21 nt, Artificial Sequence
  Guide RNA
acauugaagaucuagggguga

SEQ ID NO: 28408 - RNA, 21 nt, Artificial Sequence
  Guide RNA
accccuagaucuucaauguaa

SEQ ID NO: 28409 - RNA, 21 nt, Artificial Sequence
  Guide RNA
acccguagaucuucaauguaa

SEQ ID NO: 28410 - RNA, 21 nt, Artificial Sequence
  Guide RNA
accuaggugcccaagaucacc

SEQ ID NO: 28411 - RNA, 21 nt, Artificial Sequence
  Guide RNA
acgggugaucuugggcaccua

SEQ ID NO: 28412 - RNA, 21 nt, Artificial Sequence
  Guide RNA
agaucaccccuagaucuucaa

SEQ ID NO: 28413 - RNA, 21 nt, Artificial Sequence
  Guide RNA
agaucacccguagaucuucaa

SEQ ID NO: 28414 - RNA, 21 nt, Artificial Sequence
  Guide RNA
agaucuacgggugaucuuggg

SEQ ID NO: 28415 - RNA, 21 nt, Artificial Sequence
  Guide RNA
agaucuaggggugaucuuggg

SEQ ID NO: 28416 - RNA, 21 nt, Artificial Sequence
  Guide RNA
aggggugaucuugggcaccua

SEQ ID NO: 28417 - RNA, 21 nt, Artificial Sequence
  Guide RNA
aggugcccaagaucaccccua

SEQ ID NO: 28418 - RNA, 21 nt, Artificial Sequence
  Guide RNA
aggugcccaagaucacccgua

SEQ ID NO: 28419 - RNA, 21 nt, Artificial Sequence
  Guide RNA
aguuacauugaagaucuacgg

SEQ ID NO: 28420 - RNA, 21 nt, Artificial Sequence
  Guide RNA
aguuacauugaagaucuaggg

SEQ ID NO: 28421 - RNA, 21 nt, Artificial Sequence
  Guide RNA
aucaccccuagaucuucaaug

SEQ ID NO: 28422 - RNA, 21 nt, Artificial Sequence
  Guide RNA
aucacccguagaucuucaaug

SEQ ID NO: 28423 - RNA, 21 nt, Artificial Sequence
  Guide RNA
aucuacgggugaucuugggca

SEQ ID NO: 28424 - RNA, 21 nt, Artificial Sequence
  Guide RNA
aucuaggggugaucuugggca

SEQ ID NO: 28425 - RNA, 21 nt, Artificial Sequence
  Guide RNA
auugaagaucuacgggugauc

SEQ ID NO: 28426 - RNA, 21 nt, Artificial Sequence
  Guide RNA
auugaagaucuaggggugauc

SEQ ID NO: 28427 - RNA, 21 nt, Artificial Sequence
  Guide RNA
caaccuaggugcccaagauca

SEQ ID NO: 28428 - RNA, 21 nt, Artificial Sequence
  Guide RNA
caagaucaccccuagaucuuc

SEQ ID NO: 28429 - RNA, 21 nt, Artificial Sequence
  Guide RNA
caagaucacccguagaucuuc

SEQ ID NO: 28430 - RNA, 21 nt, Artificial Sequence
  Guide RNA
caccccuagaucuucaaugua

SEQ ID NO: 28431 - RNA, 21 nt, Artificial Sequence
  Guide RNA
cacccguagaucuucaaugua

SEQ ID NO: 28432 - RNA, 21 nt, Artificial Sequence
  Guide RNA
caguuacauugaagaucuacg

SEQ ID NO: 28433 - RNA, 21 nt, Artificial Sequence
  Guide RNA
caguuacauugaagaucuagg

SEQ ID NO: 28434 - RNA, 21 nt, Artificial Sequence
  Guide RNA
cauugaagaucuacgggugau

SEQ ID NO: 28435 - RNA, 21 nt, Artificial Sequence
  Guide RNA
cauugaagaucuaggggugau

SEQ ID NO: 28436 - RNA, 21 nt, Artificial Sequence
  Guide RNA
ccaagaucaccccuagaucuu

SEQ ID NO: 28437 - RNA, 21 nt, Artificial Sequence
  Guide RNA
ccaagaucacccguagaucuu

SEQ ID NO: 28438 - RNA, 21 nt, Artificial Sequence
  Guide RNA
cccaagaucaccccuagaucu

SEQ ID NO: 28439 - RNA, 21 nt, Artificial Sequence
  Guide RNA
cccaagaucacccguagaucu

SEQ ID NO: 28440 - RNA, 21 nt, Artificial Sequence
  Guide RNA
ccccuagaucuucaauguaac

SEQ ID NO: 28441 - RNA, 21 nt, Artificial Sequence
  Guide RNA
cccguagaucuucaauguaac

SEQ ID NO: 28442 - RNA, 21 nt, Artificial Sequence
  Guide RNA
cccuagaucuucaauguaacu

SEQ ID NO: 28443 - RNA, 21 nt, Artificial Sequence
  Guide RNA
ccguagaucuucaauguaacu

SEQ ID NO: 28444 - RNA, 21 nt, Artificial Sequence
  Guide RNA
ccuagaucuucaauguaacug

SEQ ID NO: 28445 - RNA, 21 nt, Artificial Sequence
  Guide RNA
ccuaggugcccaagaucaccc

SEQ ID NO: 28446 - RNA, 21 nt, Artificial Sequence
  Guide RNA
cguagaucuucaauguaacug

SEQ ID NO: 28447 - RNA, 21 nt, Artificial Sequence
  Guide RNA
cuacgggugaucuugggcacc

SEQ ID NO: 28448 - RNA, 21 nt, Artificial Sequence
  Guide RNA
cuaggggugaucuugggcacc

SEQ ID NO: 28449 - RNA, 21 nt, Artificial Sequence
  Guide RNA
cuaggugcccaagaucacccc

SEQ ID NO: 28450 - RNA, 21 nt, Artificial Sequence
  Guide RNA
cuaggugcccaagaucacccg

SEQ ID NO: 28451 - RNA, 21 nt, Artificial Sequence
  Guide RNA
gaagaucuacgggugaucuug

SEQ ID NO: 28452 - RNA, 21 nt, Artificial Sequence
  Guide RNA
gaagaucuaggggugaucuug

SEQ ID NO: 28453 - RNA, 21 nt, Artificial Sequence
  Guide RNA
gaucaccccuagaucuucaau

SEQ ID NO: 28454 - RNA, 21 nt, Artificial Sequence
  Guide RNA
gaucacccguagaucuucaau

SEQ ID NO: 28455 - RNA, 21 nt, Artificial Sequence
  Guide RNA
gaucuacgggugaucuugggc

SEQ ID NO: 28456 - RNA, 21 nt, Artificial Sequence
  Guide RNA
gaucuaggggugaucuugggc

SEQ ID NO: 28457 - RNA, 21 nt, Artificial Sequence
  Guide RNA
gcccaagaucaccccuagauc

SEQ ID NO: 28458 - RNA, 21 nt, Artificial Sequence
  Guide RNA
gcccaagaucacccguagauc

SEQ ID NO: 28459 - RNA, 21 nt, Artificial Sequence
  Guide RNA
ggugcccaagaucaccccuag

SEQ ID NO: 28460 - RNA, 21 nt, Artificial Sequence
  Guide RNA
ggugcccaagaucacccguag

SEQ ID NO: 28461 - RNA, 21 nt, Artificial Sequence
  Guide RNA
guaucaguuacauugaagauc

SEQ ID NO: 28462 - RNA, 21 nt, Artificial Sequence
  Guide RNA
gugcccaagaucaccccuaga

SEQ ID NO: 28463 - RNA, 21 nt, Artificial Sequence
  Guide RNA
gugcccaagaucacccguaga

SEQ ID NO: 28464 - RNA, 21 nt, Artificial Sequence
  Guide RNA
guuacauugaagaucuacggg

SEQ ID NO: 28465 - RNA, 21 nt, Artificial Sequence
  Guide RNA
guuacauugaagaucuagggg

SEQ ID NO: 28466 - RNA, 21 nt, Artificial Sequence
  Guide RNA
uacauugaagaucuacgggug

SEQ ID NO: 28467 - RNA, 21 nt, Artificial Sequence
  Guide RNA
uacauugaagaucuaggggug

SEQ ID NO: 28468 - RNA, 21 nt, Artificial Sequence
  Guide RNA
uacgggugaucuugggcaccu

SEQ ID NO: 28469 - RNA, 21 nt, Artificial Sequence
  Guide RNA
uaggggugaucuugggcaccu

SEQ ID NO: 28470 - RNA, 21 nt, Artificial Sequence
  Guide RNA
uaggugcccaagaucaccccu

SEQ ID NO: 28471 - RNA, 21 nt, Artificial Sequence
  Guide RNA
uaggugcccaagaucacccgu

SEQ ID NO: 28472 - RNA, 21 nt, Artificial Sequence
  Guide RNA
ucaccccuagaucuucaaugu

SEQ ID NO: 28473 - RNA, 21 nt, Artificial Sequence
  Guide RNA
ucacccguagaucuucaaugu

SEQ ID NO: 28474 - RNA, 21 nt, Artificial Sequence
  Guide RNA
ucaguuacauugaagaucuac

SEQ ID NO: 28475 - RNA, 21 nt, Artificial Sequence
  Guide RNA
ucaguuacauugaagaucuag

SEQ ID NO: 28476 - RNA, 21 nt, Artificial Sequence
  Guide RNA
ucuacgggugaucuugggcac

SEQ ID NO: 28477 - RNA, 21 nt, Artificial Sequence
  Guide RNA
ucuaggggugaucuugggcac

SEQ ID NO: 28478 - RNA, 21 nt, Artificial Sequence
  Guide RNA
ugaagaucuacgggugaucuu

SEQ ID NO: 28479 - RNA, 21 nt, Artificial Sequence
  Guide RNA
ugaagaucuaggggugaucuu

SEQ ID NO: 28480 - RNA, 21 nt, Artificial Sequence
  Guide RNA
ugcccaagaucaccccuagau

SEQ ID NO: 28481 - RNA, 21 nt, Artificial Sequence
  Guide RNA
ugcccaagaucacccguagau

SEQ ID NO: 28482 - RNA, 21 nt, Artificial Sequence
  Guide RNA
uuacauugaagaucuacgggu

SEQ ID NO: 28483 - RNA, 21 nt, Artificial Sequence
  Guide RNA
uuacauugaagaucuaggggu

SEQ ID NO: 28484 - RNA, 21 nt, Artificial Sequence
  Guide RNA
uugaagaucuacgggugaucu

SEQ ID NO: 28485 - RNA, 21 nt, Artificial Sequence
  Guide RNA
uugaagaucuaggggugaucu

SEQ ID NO: 28486 - RNA, 22 nt, Artificial Sequence
  Guide RNA
aaccuaggugcccaagaucacc

SEQ ID NO: 28487 - RNA, 22 nt, Artificial Sequence
  Guide RNA
aagaucaccccuagaucuucaa

SEQ ID NO: 28488 - RNA, 22 nt, Artificial Sequence
  Guide RNA
aagaucacccguagaucuucaa

SEQ ID NO: 28489 - RNA, 22 nt, Artificial Sequence
  Guide RNA
aagaucuacgggugaucuuggg

SEQ ID NO: 28490 - RNA, 22 nt, Artificial Sequence
  Guide RNA
aagaucuaggggugaucuuggg

SEQ ID NO: 28491 - RNA, 22 nt, Artificial Sequence
  Guide RNA
acauugaagaucuacgggugau

SEQ ID NO: 28492 - RNA, 22 nt, Artificial Sequence
  Guide RNA
acauugaagaucuaggggugau

SEQ ID NO: 28493 - RNA, 22 nt, Artificial Sequence
  Guide RNA
accccuagaucuucaauguaac

SEQ ID NO: 28494 - RNA, 22 nt, Artificial Sequence
  Guide RNA
acccguagaucuucaauguaac

SEQ ID NO: 28495 - RNA, 22 nt, Artificial Sequence
  Guide RNA
accuaggugcccaagaucaccc

SEQ ID NO: 28496 - RNA, 22 nt, Artificial Sequence
  Guide RNA
acgggugaucuugggcaccuag

SEQ ID NO: 28497 - RNA, 22 nt, Artificial Sequence
  Guide RNA
agaucaccccuagaucuucaau

SEQ ID NO: 28498 - RNA, 22 nt, Artificial Sequence
  Guide RNA
agaucacccguagaucuucaau

SEQ ID NO: 28499 - RNA, 22 nt, Artificial Sequence
  Guide RNA
agaucuacgggugaucuugggc

SEQ ID NO: 28500 - RNA, 22 nt, Artificial Sequence
  Guide RNA
agaucuaggggugaucuugggc

SEQ ID NO: 28501 - RNA, 22 nt, Artificial Sequence
  Guide RNA
aggggugaucuugggcaccuag

SEQ ID NO: 28502 - RNA, 22 nt, Artificial Sequence
  Guide RNA
aggugcccaagaucaccccuag

SEQ ID NO: 28503 - RNA, 22 nt, Artificial Sequence
  Guide RNA
aggugcccaagaucacccguag

SEQ ID NO: 28504 - RNA, 22 nt, Artificial Sequence
  Guide RNA
aguaucaguuacauugaagauc

SEQ ID NO: 28505 - RNA, 22 nt, Artificial Sequence
  Guide RNA
aguuacauugaagaucuacggg

SEQ ID NO: 28506 - RNA, 22 nt, Artificial Sequence
  Guide RNA
aguuacauugaagaucuagggg

SEQ ID NO: 28507 - RNA, 22 nt, Artificial Sequence
  Guide RNA
aucaccccuagaucuucaaugu

SEQ ID NO: 28508 - RNA, 22 nt, Artificial Sequence
  Guide RNA
aucacccguagaucuucaaugu

SEQ ID NO: 28509 - RNA, 22 nt, Artificial Sequence
  Guide RNA
aucaguuacauugaagaucuac

SEQ ID NO: 28510 - RNA, 22 nt, Artificial Sequence
  Guide RNA
aucaguuacauugaagaucuag

SEQ ID NO: 28511 - RNA, 22 nt, Artificial Sequence
  Guide RNA
aucuacgggugaucuugggcac

SEQ ID NO: 28512 - RNA, 22 nt, Artificial Sequence
  Guide RNA
aucuaggggugaucuugggcac

SEQ ID NO: 28513 - RNA, 22 nt, Artificial Sequence
  Guide RNA
auugaagaucuacgggugaucu

SEQ ID NO: 28514 - RNA, 22 nt, Artificial Sequence
  Guide RNA
auugaagaucuaggggugaucu

SEQ ID NO: 28515 - RNA, 22 nt, Artificial Sequence
  Guide RNA
caaccuaggugcccaagaucac

SEQ ID NO: 28516 - RNA, 22 nt, Artificial Sequence
  Guide RNA
caagaucaccccuagaucuuca

SEQ ID NO: 28517 - RNA, 22 nt, Artificial Sequence
  Guide RNA
caagaucacccguagaucuuca

SEQ ID NO: 28518 - RNA, 22 nt, Artificial Sequence
  Guide RNA
caccccuagaucuucaauguaa

SEQ ID NO: 28519 - RNA, 22 nt, Artificial Sequence
  Guide RNA
cacccguagaucuucaauguaa

SEQ ID NO: 28520 - RNA, 22 nt, Artificial Sequence
  Guide RNA
caguuacauugaagaucuacgg

SEQ ID NO: 28521 - RNA, 22 nt, Artificial Sequence
  Guide RNA
caguuacauugaagaucuaggg

SEQ ID NO: 28522 - RNA, 22 nt, Artificial Sequence
  Guide RNA
cauugaagaucuacgggugauc

SEQ ID NO: 28523 - RNA, 22 nt, Artificial Sequence
  Guide RNA
cauugaagaucuaggggugauc

SEQ ID NO: 28524 - RNA, 22 nt, Artificial Sequence
  Guide RNA
ccaagaucaccccuagaucuuc

SEQ ID NO: 28525 - RNA, 22 nt, Artificial Sequence
  Guide RNA
ccaagaucacccguagaucuuc

SEQ ID NO: 28526 - RNA, 22 nt, Artificial Sequence
  Guide RNA
cccaagaucaccccuagaucuu

SEQ ID NO: 28527 - RNA, 22 nt, Artificial Sequence
  Guide RNA
cccaagaucacccguagaucuu

SEQ ID NO: 28528 - RNA, 22 nt, Artificial Sequence
  Guide RNA
ccccuagaucuucaauguaacu

SEQ ID NO: 28529 - RNA, 22 nt, Artificial Sequence
  Guide RNA
cccguagaucuucaauguaacu

SEQ ID NO: 28530 - RNA, 22 nt, Artificial Sequence
  Guide RNA
cccuagaucuucaauguaacug

SEQ ID NO: 28531 - RNA, 22 nt, Artificial Sequence
  Guide RNA
ccguagaucuucaauguaacug

SEQ ID NO: 28532 - RNA, 22 nt, Artificial Sequence
  Guide RNA
ccuagaucuucaauguaacuga

SEQ ID NO: 28533 - RNA, 22 nt, Artificial Sequence
  Guide RNA
ccuaggugcccaagaucacccc

SEQ ID NO: 28534 - RNA, 22 nt, Artificial Sequence
  Guide RNA
ccuaggugcccaagaucacccg

SEQ ID NO: 28535 - RNA, 22 nt, Artificial Sequence
  Guide RNA
cguagaucuucaauguaacuga

SEQ ID NO: 28536 - RNA, 22 nt, Artificial Sequence
  Guide RNA
cuacgggugaucuugggcaccu

SEQ ID NO: 28537 - RNA, 22 nt, Artificial Sequence
  Guide RNA
cuaggggugaucuugggcaccu

SEQ ID NO: 28538 - RNA, 22 nt, Artificial Sequence
  Guide RNA
cuaggugcccaagaucaccccu

SEQ ID NO: 28539 - RNA, 22 nt, Artificial Sequence
  Guide RNA
cuaggugcccaagaucacccgu

SEQ ID NO: 28540 - RNA, 22 nt, Artificial Sequence
  Guide RNA
gaagaucuacgggugaucuugg

SEQ ID NO: 28541 - RNA, 22 nt, Artificial Sequence
  Guide RNA
gaagaucuaggggugaucuugg

SEQ ID NO: 28542 - RNA, 22 nt, Artificial Sequence
  Guide RNA
gaucaccccuagaucuucaaug

SEQ ID NO: 28543 - RNA, 22 nt, Artificial Sequence
  Guide RNA
gaucacccguagaucuucaaug

SEQ ID NO: 28544 - RNA, 22 nt, Artificial Sequence
  Guide RNA
gaucuacgggugaucuugggca

SEQ ID NO: 28545 - RNA, 22 nt, Artificial Sequence
  Guide RNA
gaucuaggggugaucuugggca

SEQ ID NO: 28546 - RNA, 22 nt, Artificial Sequence
  Guide RNA
gcccaagaucaccccuagaucu

SEQ ID NO: 28547 - RNA, 22 nt, Artificial Sequence
  Guide RNA
gcccaagaucacccguagaucu

SEQ ID NO: 28548 - RNA, 22 nt, Artificial Sequence
  Guide RNA
ggugcccaagaucaccccuaga

SEQ ID NO: 28549 - RNA, 22 nt, Artificial Sequence
  Guide RNA
ggugcccaagaucacccguaga

SEQ ID NO: 28550 - RNA, 22 nt, Artificial Sequence
  Guide RNA
guaucaguuacauugaagaucu

SEQ ID NO: 28551 - RNA, 22 nt, Artificial Sequence
  Guide RNA
gugcccaagaucaccccuagau

SEQ ID NO: 28552 - RNA, 22 nt, Artificial Sequence
  Guide RNA
gugcccaagaucacccguagau

SEQ ID NO: 28553 - RNA, 22 nt, Artificial Sequence
  Guide RNA
guuacauugaagaucuacgggu

SEQ ID NO: 28554 - RNA, 22 nt, Artificial Sequence
  Guide RNA
guuacauugaagaucuaggggu

SEQ ID NO: 28555 - RNA, 22 nt, Artificial Sequence
  Guide RNA
uacauugaagaucuacggguga

SEQ ID NO: 28556 - RNA, 22 nt, Artificial Sequence
  Guide RNA
uacauugaagaucuagggguga

SEQ ID NO: 28557 - RNA, 22 nt, Artificial Sequence
  Guide RNA
uacgggugaucuugggcaccua

SEQ ID NO: 28558 - RNA, 22 nt, Artificial Sequence
  Guide RNA
uaggggugaucuugggcaccua

SEQ ID NO: 28559 - RNA, 22 nt, Artificial Sequence
  Guide RNA
uaggugcccaagaucaccccua

SEQ ID NO: 28560 - RNA, 22 nt, Artificial Sequence
  Guide RNA
uaggugcccaagaucacccgua

SEQ ID NO: 28561 - RNA, 22 nt, Artificial Sequence
  Guide RNA
ucaaccuaggugcccaagauca

SEQ ID NO: 28562 - RNA, 22 nt, Artificial Sequence
  Guide RNA
ucaccccuagaucuucaaugua

SEQ ID NO: 28563 - RNA, 22 nt, Artificial Sequence
  Guide RNA
ucacccguagaucuucaaugua

SEQ ID NO: 28564 - RNA, 22 nt, Artificial Sequence
  Guide RNA
ucaguuacauugaagaucuacg

SEQ ID NO: 28565 - RNA, 22 nt, Artificial Sequence
  Guide RNA
ucaguuacauugaagaucuagg

SEQ ID NO: 28566 - RNA, 22 nt, Artificial Sequence
  Guide RNA
ucuacgggugaucuugggcacc

SEQ ID NO: 28567 - RNA, 22 nt, Artificial Sequence
  Guide RNA
ucuaggggugaucuugggcacc

SEQ ID NO: 28568 - RNA, 22 nt, Artificial Sequence
  Guide RNA
ugaagaucuacgggugaucuug

SEQ ID NO: 28569 - RNA, 22 nt, Artificial Sequence
  Guide RNA
ugaagaucuaggggugaucuug

SEQ ID NO: 28570 - RNA, 22 nt, Artificial Sequence
  Guide RNA
ugcccaagaucaccccuagauc

SEQ ID NO: 28571 - RNA, 22 nt, Artificial Sequence
  Guide RNA
ugcccaagaucacccguagauc

SEQ ID NO: 28572 - RNA, 22 nt, Artificial Sequence
  Guide RNA
uuacauugaagaucuacgggug

SEQ ID NO: 28573 - RNA, 22 nt, Artificial Sequence
  Guide RNA
uuacauugaagaucuaggggug

SEQ ID NO: 28574 - RNA, 22 nt, Artificial Sequence
  Guide RNA
uugaagaucuacgggugaucuu

SEQ ID NO: 28575 - RNA, 22 nt, Artificial Sequence
  Guide RNA
uugaagaucuaggggugaucuu

SEQ ID NO: 28576 - RNA, 20 nt, Artificial Sequence
  Guide RNA
aagagggccuucagcaggua

SEQ ID NO: 28577 - RNA, 20 nt, Artificial Sequence
  Guide RNA
aagagggccuucagcaugua

SEQ ID NO: 28578 - RNA, 20 nt, Artificial Sequence
  Guide RNA
aauaagagggccuucagcag

SEQ ID NO: 28579 - RNA, 20 nt, Artificial Sequence
  Guide RNA
aauaagagggccuucagcau

SEQ ID NO: 28580 - RNA, 20 nt, Artificial Sequence
  Guide RNA
aauacauaguacaugcugaa

SEQ ID NO: 28581 - RNA, 20 nt, Artificial Sequence
  Guide RNA
aauacauaguaccugcugaa

SEQ ID NO: 28582 - RNA, 20 nt, Artificial Sequence
  Guide RNA
acauaguacaugcugaaggc

SEQ ID NO: 28583 - RNA, 20 nt, Artificial Sequence
  Guide RNA
acauaguaccugcugaaggc

SEQ ID NO: 28584 - RNA, 20 nt, Artificial Sequence
  Guide RNA
acaugcugaaggcccucuua

SEQ ID NO: 28585 - RNA, 20 nt, Artificial Sequence
  Guide RNA
accugcugaaggcccucuua

SEQ ID NO: 28586 - RNA, 20 nt, Artificial Sequence
  Guide RNA
agagggccuucagcagguac

SEQ ID NO: 28587 - RNA, 20 nt, Artificial Sequence
  Guide RNA
agagggccuucagcauguac

SEQ ID NO: 28588 - RNA, 20 nt, Artificial Sequence
  Guide RNA
agcagguacuauguauuauc

SEQ ID NO: 28589 - RNA, 20 nt, Artificial Sequence
  Guide RNA
agcauguacuauguauuauc

SEQ ID NO: 28590 - RNA, 20 nt, Artificial Sequence
  Guide RNA
agcccaggauaauacauagu

SEQ ID NO: 28591 - RNA, 20 nt, Artificial Sequence
  Guide RNA
aggauaauacauaguacaug

SEQ ID NO: 28592 - RNA, 20 nt, Artificial Sequence
  Guide RNA
aggauaauacauaguaccug

SEQ ID NO: 28593 - RNA, 20 nt, Artificial Sequence
  Guide RNA
agggccuucagcagguacua

SEQ ID NO: 28594 - RNA, 20 nt, Artificial Sequence
  Guide RNA
agggccuucagcauguacua

SEQ ID NO: 28595 - RNA, 20 nt, Artificial Sequence
  Guide RNA
agguacuauguauuauccug

SEQ ID NO: 28596 - RNA, 20 nt, Artificial Sequence
  Guide RNA
aguacaugcugaaggcccuc

SEQ ID NO: 28597 - RNA, 20 nt, Artificial Sequence
  Guide RNA
aguaccugcugaaggcccuc

SEQ ID NO: 28598 - RNA, 20 nt, Artificial Sequence
  Guide RNA
auaagagggccuucagcagg

SEQ ID NO: 28599 - RNA, 20 nt, Artificial Sequence
  Guide RNA
auaagagggccuucagcaug

SEQ ID NO: 28600 - RNA, 20 nt, Artificial Sequence
  Guide RNA
auaauacauaguacaugcug

SEQ ID NO: 28601 - RNA, 20 nt, Artificial Sequence
  Guide RNA
auaauacauaguaccugcug

SEQ ID NO: 28602 - RNA, 20 nt, Artificial Sequence
  Guide RNA
auacauaguacaugcugaag

SEQ ID NO: 28603 - RNA, 20 nt, Artificial Sequence
  Guide RNA
auacauaguaccugcugaag

SEQ ID NO: 28604 - RNA, 20 nt, Artificial Sequence
  Guide RNA
auaguacaugcugaaggccc

SEQ ID NO: 28605 - RNA, 20 nt, Artificial Sequence
  Guide RNA
auaguaccugcugaaggccc

SEQ ID NO: 28606 - RNA, 20 nt, Artificial Sequence
  Guide RNA
auguacuauguauuauccug

SEQ ID NO: 28607 - RNA, 20 nt, Artificial Sequence
  Guide RNA
cagcagguacuauguauuau

SEQ ID NO: 28608 - RNA, 20 nt, Artificial Sequence
  Guide RNA
cagcauguacuauguauuau

SEQ ID NO: 28609 - RNA, 20 nt, Artificial Sequence
  Guide RNA
caggauaauacauaguacau

SEQ ID NO: 28610 - RNA, 20 nt, Artificial Sequence
  Guide RNA
caggauaauacauaguaccu

SEQ ID NO: 28611 - RNA, 20 nt, Artificial Sequence
  Guide RNA
cagguacuauguauuauccu

SEQ ID NO: 28612 - RNA, 20 nt, Artificial Sequence
  Guide RNA
cauaguacaugcugaaggcc

SEQ ID NO: 28613 - RNA, 20 nt, Artificial Sequence
  Guide RNA
cauaguaccugcugaaggcc

SEQ ID NO: 28614 - RNA, 20 nt, Artificial Sequence
  Guide RNA
caugcugaaggcccucuuau

SEQ ID NO: 28615 - RNA, 20 nt, Artificial Sequence
  Guide RNA
cauguacuauguauuauccu

SEQ ID NO: 28616 - RNA, 20 nt, Artificial Sequence
  Guide RNA
ccaggauaauacauaguaca

SEQ ID NO: 28617 - RNA, 20 nt, Artificial Sequence
  Guide RNA
ccaggauaauacauaguacc

SEQ ID NO: 28618 - RNA, 20 nt, Artificial Sequence
  Guide RNA
cccaggauaauacauaguac

SEQ ID NO: 28619 - RNA, 20 nt, Artificial Sequence
  Guide RNA
ccugcugaaggcccucuuau

SEQ ID NO: 28620 - RNA, 20 nt, Artificial Sequence
  Guide RNA
ccuucagcagguacuaugua

SEQ ID NO: 28621 - RNA, 20 nt, Artificial Sequence
  Guide RNA
ccuucagcauguacuaugua

SEQ ID NO: 28622 - RNA, 20 nt, Artificial Sequence
  Guide RNA
cuucagcagguacuauguau

SEQ ID NO: 28623 - RNA, 20 nt, Artificial Sequence
  Guide RNA
cuucagcauguacuauguau

SEQ ID NO: 28624 - RNA, 20 nt, Artificial Sequence
  Guide RNA
gaauaagagggccuucagca

SEQ ID NO: 28625 - RNA, 20 nt, Artificial Sequence
  Guide RNA
gagggccuucagcagguacu

SEQ ID NO: 28626 - RNA, 20 nt, Artificial Sequence
  Guide RNA
gagggccuucagcauguacu

SEQ ID NO: 28627 - RNA, 20 nt, Artificial Sequence
  Guide RNA
gauaauacauaguacaugcu

SEQ ID NO: 28628 - RNA, 20 nt, Artificial Sequence
  Guide RNA
gauaauacauaguaccugcu

SEQ ID NO: 28629 - RNA, 20 nt, Artificial Sequence
  Guide RNA
gcagguacuauguauuaucc

SEQ ID NO: 28630 - RNA, 20 nt, Artificial Sequence
  Guide RNA
gcauguacuauguauuaucc

SEQ ID NO: 28631 - RNA, 20 nt, Artificial Sequence
  Guide RNA
gcccaggauaauacauagua

SEQ ID NO: 28632 - RNA, 20 nt, Artificial Sequence
  Guide RNA
gccuucagcagguacuaugu

SEQ ID NO: 28633 - RNA, 20 nt, Artificial Sequence
  Guide RNA
gccuucagcauguacuaugu

SEQ ID NO: 28634 - RNA, 20 nt, Artificial Sequence
  Guide RNA
ggaauaagagggccuucagc

SEQ ID NO: 28635 - RNA, 20 nt, Artificial Sequence
  Guide RNA
ggauaauacauaguacaugc

SEQ ID NO: 28636 - RNA, 20 nt, Artificial Sequence
  Guide RNA
ggauaauacauaguaccugc

SEQ ID NO: 28637 - RNA, 20 nt, Artificial Sequence
  Guide RNA
ggccuucagcagguacuaug

SEQ ID NO: 28638 - RNA, 20 nt, Artificial Sequence
  Guide RNA
ggccuucagcauguacuaug

SEQ ID NO: 28639 - RNA, 20 nt, Artificial Sequence
  Guide RNA
gggccuucagcagguacuau

SEQ ID NO: 28640 - RNA, 20 nt, Artificial Sequence
  Guide RNA
gggccuucagcauguacuau

SEQ ID NO: 28641 - RNA, 20 nt, Artificial Sequence
  Guide RNA
guacaugcugaaggcccucu

SEQ ID NO: 28642 - RNA, 20 nt, Artificial Sequence
  Guide RNA
guaccugcugaaggcccucu

SEQ ID NO: 28643 - RNA, 20 nt, Artificial Sequence
  Guide RNA
guggaauaagagggccuuca

SEQ ID NO: 28644 - RNA, 20 nt, Artificial Sequence
  Guide RNA
uaagagggccuucagcaggu

SEQ ID NO: 28645 - RNA, 20 nt, Artificial Sequence
  Guide RNA
uaagagggccuucagcaugu

SEQ ID NO: 28646 - RNA, 20 nt, Artificial Sequence
  Guide RNA
uaauacauaguacaugcuga

SEQ ID NO: 28647 - RNA, 20 nt, Artificial Sequence
  Guide RNA
uaauacauaguaccugcuga

SEQ ID NO: 28648 - RNA, 20 nt, Artificial Sequence
  Guide RNA
uacauaguacaugcugaagg

SEQ ID NO: 28649 - RNA, 20 nt, Artificial Sequence
  Guide RNA
uacauaguaccugcugaagg

SEQ ID NO: 28650 - RNA, 20 nt, Artificial Sequence
  Guide RNA
uacaugcugaaggcccucuu

SEQ ID NO: 28651 - RNA, 20 nt, Artificial Sequence
  Guide RNA
uaccugcugaaggcccucuu

SEQ ID NO: 28652 - RNA, 20 nt, Artificial Sequence
  Guide RNA
uagcccaggauaauacauag

SEQ ID NO: 28653 - RNA, 20 nt, Artificial Sequence
  Guide RNA
uaguacaugcugaaggcccu

SEQ ID NO: 28654 - RNA, 20 nt, Artificial Sequence
  Guide RNA
uaguaccugcugaaggcccu

SEQ ID NO: 28655 - RNA, 20 nt, Artificial Sequence
  Guide RNA
ucagcagguacuauguauua

SEQ ID NO: 28656 - RNA, 20 nt, Artificial Sequence
  Guide RNA
ucagcauguacuauguauua

SEQ ID NO: 28657 - RNA, 20 nt, Artificial Sequence
  Guide RNA
uggaauaagagggccuucag

SEQ ID NO: 28658 - RNA, 20 nt, Artificial Sequence
  Guide RNA
uucagcagguacuauguauu

SEQ ID NO: 28659 - RNA, 20 nt, Artificial Sequence
  Guide RNA
uucagcauguacuauguauu

SEQ ID NO: 28660 - RNA, 21 nt, Artificial Sequence
  Guide RNA
aagagggccuucagcagguac

SEQ ID NO: 28661 - RNA, 21 nt, Artificial Sequence
  Guide RNA
aagagggccuucagcauguac

SEQ ID NO: 28662 - RNA, 21 nt, Artificial Sequence
  Guide RNA
aauaagagggccuucagcagg

SEQ ID NO: 28663 - RNA, 21 nt, Artificial Sequence
  Guide RNA
aauaagagggccuucagcaug

SEQ ID NO: 28664 - RNA, 21 nt, Artificial Sequence
  Guide RNA
aauacauaguacaugcugaag

SEQ ID NO: 28665 - RNA, 21 nt, Artificial Sequence
  Guide RNA
aauacauaguaccugcugaag

SEQ ID NO: 28666 - RNA, 21 nt, Artificial Sequence
  Guide RNA
acauaguacaugcugaaggcc

SEQ ID NO: 28667 - RNA, 21 nt, Artificial Sequence
  Guide RNA
acauaguaccugcugaaggcc

SEQ ID NO: 28668 - RNA, 21 nt, Artificial Sequence
  Guide RNA
acaugcugaaggcccucuuau

SEQ ID NO: 28669 - RNA, 21 nt, Artificial Sequence
  Guide RNA
accugcugaaggcccucuuau

SEQ ID NO: 28670 - RNA, 21 nt, Artificial Sequence
  Guide RNA
agagggccuucagcagguacu

SEQ ID NO: 28671 - RNA, 21 nt, Artificial Sequence
  Guide RNA
agagggccuucagcauguacu

SEQ ID NO: 28672 - RNA, 21 nt, Artificial Sequence
  Guide RNA
agcagguacuauguauuaucc

SEQ ID NO: 28673 - RNA, 21 nt, Artificial Sequence
  Guide RNA
agcauguacuauguauuaucc

SEQ ID NO: 28674 - RNA, 21 nt, Artificial Sequence
  Guide RNA
agcccaggauaauacauagua

SEQ ID NO: 28675 - RNA, 21 nt, Artificial Sequence
  Guide RNA
aggauaauacauaguacaugc

SEQ ID NO: 28676 - RNA, 21 nt, Artificial Sequence
  Guide RNA
aggauaauacauaguaccugc

SEQ ID NO: 28677 - RNA, 21 nt, Artificial Sequence
  Guide RNA
agggccuucagcagguacuau

SEQ ID NO: 28678 - RNA, 21 nt, Artificial Sequence
  Guide RNA
agggccuucagcauguacuau

SEQ ID NO: 28679 - RNA, 21 nt, Artificial Sequence
  Guide RNA
agguacuauguauuauccugg

SEQ ID NO: 28680 - RNA, 21 nt, Artificial Sequence
  Guide RNA
aguacaugcugaaggcccucu

SEQ ID NO: 28681 - RNA, 21 nt, Artificial Sequence
  Guide RNA
aguaccugcugaaggcccucu

SEQ ID NO: 28682 - RNA, 21 nt, Artificial Sequence
  Guide RNA
auaagagggccuucagcaggu

SEQ ID NO: 28683 - RNA, 21 nt, Artificial Sequence
  Guide RNA
auaagagggccuucagcaugu

SEQ ID NO: 28684 - RNA, 21 nt, Artificial Sequence
  Guide RNA
auaauacauaguaccugcuga

SEQ ID NO: 28685 - RNA, 21 nt, Artificial Sequence
  Guide RNA
auacauaguacaugcugaagg

SEQ ID NO: 28686 - RNA, 21 nt, Artificial Sequence
  Guide RNA
auacauaguaccugcugaagg

SEQ ID NO: 28687 - RNA, 21 nt, Artificial Sequence
  Guide RNA
auaguacaugcugaaggcccu

SEQ ID NO: 28688 - RNA, 21 nt, Artificial Sequence
  Guide RNA
auaguaccugcugaaggcccu

SEQ ID NO: 28689 - RNA, 21 nt, Artificial Sequence
  Guide RNA
auguacuauguauuauccugg

SEQ ID NO: 28690 - RNA, 21 nt, Artificial Sequence
  Guide RNA
cagcagguacuauguauuauc

SEQ ID NO: 28691 - RNA, 21 nt, Artificial Sequence
  Guide RNA
cagcauguacuauguauuauc

SEQ ID NO: 28692 - RNA, 21 nt, Artificial Sequence
  Guide RNA
caggauaauacauaguacaug

SEQ ID NO: 28693 - RNA, 21 nt, Artificial Sequence
  Guide RNA
caggauaauacauaguaccug

SEQ ID NO: 28694 - RNA, 21 nt, Artificial Sequence
  Guide RNA
cagguacuauguauuauccug

SEQ ID NO: 28695 - RNA, 21 nt, Artificial Sequence
  Guide RNA
cauaguacaugcugaaggccc

SEQ ID NO: 28696 - RNA, 21 nt, Artificial Sequence
  Guide RNA
cauaguaccugcugaaggccc

SEQ ID NO: 28697 - RNA, 21 nt, Artificial Sequence
  Guide RNA
caugcugaaggcccucuuauu

SEQ ID NO: 28698 - RNA, 21 nt, Artificial Sequence
  Guide RNA
cauguacuauguauuauccug

SEQ ID NO: 28699 - RNA, 21 nt, Artificial Sequence
  Guide RNA
ccaggauaauacauaguacau

SEQ ID NO: 28700 - RNA, 21 nt, Artificial Sequence
  Guide RNA
ccaggauaauacauaguaccu

SEQ ID NO: 28701 - RNA, 21 nt, Artificial Sequence
  Guide RNA
cccaggauaauacauaguaca

SEQ ID NO: 28702 - RNA, 21 nt, Artificial Sequence
  Guide RNA
cccaggauaauacauaguacc

SEQ ID NO: 28703 - RNA, 21 nt, Artificial Sequence
  Guide RNA
ccugcugaaggcccucuuauu

SEQ ID NO: 28704 - RNA, 21 nt, Artificial Sequence
  Guide RNA
ccuucagcagguacuauguau

SEQ ID NO: 28705 - RNA, 21 nt, Artificial Sequence
  Guide RNA
ccuucagcauguacuauguau

SEQ ID NO: 28706 - RNA, 21 nt, Artificial Sequence
  Guide RNA
cguggaauaagagggccuuca

SEQ ID NO: 28707 - RNA, 21 nt, Artificial Sequence
  Guide RNA
cuucagcagguacuauguauu

SEQ ID NO: 28708 - RNA, 21 nt, Artificial Sequence
  Guide RNA
cuucagcauguacuauguauu

SEQ ID NO: 28709 - RNA, 21 nt, Artificial Sequence
  Guide RNA
gaauaagagggccuucagcag

SEQ ID NO: 28710 - RNA, 21 nt, Artificial Sequence
  Guide RNA
gaauaagagggccuucagcau

SEQ ID NO: 28711 - RNA, 21 nt, Artificial Sequence
  Guide RNA
gagggccuucagcagguacua

SEQ ID NO: 28712 - RNA, 21 nt, Artificial Sequence
  Guide RNA
gagggccuucagcauguacua

SEQ ID NO: 28713 - RNA, 21 nt, Artificial Sequence
  Guide RNA
gauaauacauaguacaugcug

SEQ ID NO: 28714 - RNA, 21 nt, Artificial Sequence
  Guide RNA
gauaauacauaguaccugcug

SEQ ID NO: 28715 - RNA, 21 nt, Artificial Sequence
  Guide RNA
gcagguacuauguauuauccu

SEQ ID NO: 28716 - RNA, 21 nt, Artificial Sequence
  Guide RNA
gcauguacuauguauuauccu

SEQ ID NO: 28717 - RNA, 21 nt, Artificial Sequence
  Guide RNA
gcccaggauaauacauaguac

SEQ ID NO: 28718 - RNA, 21 nt, Artificial Sequence
  Guide RNA
gccuucagcagguacuaugua

SEQ ID NO: 28719 - RNA, 21 nt, Artificial Sequence
  Guide RNA
gccuucagcauguacuaugua

SEQ ID NO: 28720 - RNA, 21 nt, Artificial Sequence
  Guide RNA
ggaauaagagggccuucagca

SEQ ID NO: 28721 - RNA, 21 nt, Artificial Sequence
  Guide RNA
ggauaauacauaguacaugcu

SEQ ID NO: 28722 - RNA, 21 nt, Artificial Sequence
  Guide RNA
ggauaauacauaguaccugcu

SEQ ID NO: 28723 - RNA, 21 nt, Artificial Sequence
  Guide RNA
ggccuucagcagguacuaugu

SEQ ID NO: 28724 - RNA, 21 nt, Artificial Sequence
  Guide RNA
ggccuucagcauguacuaugu

SEQ ID NO: 28725 - RNA, 21 nt, Artificial Sequence
  Guide RNA
gggccuucagcagguacuaug

SEQ ID NO: 28726 - RNA, 21 nt, Artificial Sequence
  Guide RNA
gggccuucagcauguacuaug

SEQ ID NO: 28727 - RNA, 21 nt, Artificial Sequence
  Guide RNA
guacaugcugaaggcccucuu

SEQ ID NO: 28728 - RNA, 21 nt, Artificial Sequence
  Guide RNA
guaccugcugaaggcccucuu

SEQ ID NO: 28729 - RNA, 21 nt, Artificial Sequence
  Guide RNA
guggaauaagagggccuucag

SEQ ID NO: 28730 - RNA, 21 nt, Artificial Sequence
  Guide RNA
uaagagggccuucagcaggua

SEQ ID NO: 28731 - RNA, 21 nt, Artificial Sequence
  Guide RNA
uaagagggccuucagcaugua

SEQ ID NO: 28732 - RNA, 21 nt, Artificial Sequence
  Guide RNA
uaauacauaguaccugcugaa

SEQ ID NO: 28733 - RNA, 21 nt, Artificial Sequence
  Guide RNA
uacauaguacaugcugaaggc

SEQ ID NO: 28734 - RNA, 21 nt, Artificial Sequence
  Guide RNA
uacauaguaccugcugaaggc

SEQ ID NO: 28735 - RNA, 21 nt, Artificial Sequence
  Guide RNA
uacaugcugaaggcccucuua

SEQ ID NO: 28736 - RNA, 21 nt, Artificial Sequence
  Guide RNA
uaccugcugaaggcccucuua

SEQ ID NO: 28737 - RNA, 21 nt, Artificial Sequence
  Guide RNA
uagcccaggauaauacauagu

SEQ ID NO: 28738 - RNA, 21 nt, Artificial Sequence
  Guide RNA
uaguacaugcugaaggcccuc

SEQ ID NO: 28739 - RNA, 21 nt, Artificial Sequence
  Guide RNA
uaguaccugcugaaggcccuc

SEQ ID NO: 28740 - RNA, 21 nt, Artificial Sequence
  Guide RNA
ucagcagguacuauguauuau

SEQ ID NO: 28741 - RNA, 21 nt, Artificial Sequence
  Guide RNA
uggaauaagagggccuucagc

SEQ ID NO: 28742 - RNA, 21 nt, Artificial Sequence
  Guide RNA
uuagcccaggauaauacauag

SEQ ID NO: 28743 - RNA, 21 nt, Artificial Sequence
  Guide RNA
uucagcagguacuauguauua

SEQ ID NO: 28744 - RNA, 22 nt, Artificial Sequence
  Guide RNA
aagagggccuucagcagguacu

SEQ ID NO: 28745 - RNA, 22 nt, Artificial Sequence
  Guide RNA
aagagggccuucagcauguacu

SEQ ID NO: 28746 - RNA, 22 nt, Artificial Sequence
  Guide RNA
aauaagagggccuucagcaggu

SEQ ID NO: 28747 - RNA, 22 nt, Artificial Sequence
  Guide RNA
aauaagagggccuucagcaugu

SEQ ID NO: 28748 - RNA, 22 nt, Artificial Sequence
  Guide RNA
aauacauaguacaugcugaagg

SEQ ID NO: 28749 - RNA, 22 nt, Artificial Sequence
  Guide RNA
aauacauaguaccugcugaagg

SEQ ID NO: 28750 - RNA, 22 nt, Artificial Sequence
  Guide RNA
acauaguacaugcugaaggccc

SEQ ID NO: 28751 - RNA, 22 nt, Artificial Sequence
  Guide RNA
acauaguaccugcugaaggccc

SEQ ID NO: 28752 - RNA, 22 nt, Artificial Sequence
  Guide RNA
acaugcugaaggcccucuuauu

SEQ ID NO: 28753 - RNA, 22 nt, Artificial Sequence
  Guide RNA
accugcugaaggcccucuuauu

SEQ ID NO: 28754 - RNA, 22 nt, Artificial Sequence
  Guide RNA
agagggccuucagcagguacua

SEQ ID NO: 28755 - RNA, 22 nt, Artificial Sequence
  Guide RNA
agagggccuucagcauguacua

SEQ ID NO: 28756 - RNA, 22 nt, Artificial Sequence
  Guide RNA
agcagguacuauguauuauccu

SEQ ID NO: 28757 - RNA, 22 nt, Artificial Sequence
  Guide RNA
agcauguacuauguauuauccu

SEQ ID NO: 28758 - RNA, 22 nt, Artificial Sequence
  Guide RNA
agcccaggauaauacauaguac

SEQ ID NO: 28759 - RNA, 22 nt, Artificial Sequence
  Guide RNA
aggauaauacauaguacaugcu

SEQ ID NO: 28760 - RNA, 22 nt, Artificial Sequence
  Guide RNA
aggauaauacauaguaccugcu

SEQ ID NO: 28761 - RNA, 22 nt, Artificial Sequence
  Guide RNA
agggccuucagcagguacuaug

SEQ ID NO: 28762 - RNA, 22 nt, Artificial Sequence
  Guide RNA
agggccuucagcauguacuaug

SEQ ID NO: 28763 - RNA, 22 nt, Artificial Sequence
  Guide RNA
agguacuauguauuauccuggg

SEQ ID NO: 28764 - RNA, 22 nt, Artificial Sequence
  Guide RNA
aguacaugcugaaggcccucuu

SEQ ID NO: 28765 - RNA, 22 nt, Artificial Sequence
  Guide RNA
aguaccugcugaaggcccucuu

SEQ ID NO: 28766 - RNA, 22 nt, Artificial Sequence
  Guide RNA
auaagagggccuucagcaggua

SEQ ID NO: 28767 - RNA, 22 nt, Artificial Sequence
  Guide RNA
auaagagggccuucagcaugua

SEQ ID NO: 28768 - RNA, 22 nt, Artificial Sequence
  Guide RNA
auaauacauaguaccugcugaa

SEQ ID NO: 28769 - RNA, 22 nt, Artificial Sequence
  Guide RNA
auacauaguacaugcugaaggc

SEQ ID NO: 28770 - RNA, 22 nt, Artificial Sequence
  Guide RNA
auacauaguaccugcugaaggc

SEQ ID NO: 28771 - RNA, 22 nt, Artificial Sequence
  Guide RNA
auaguacaugcugaaggcccuc

SEQ ID NO: 28772 - RNA, 22 nt, Artificial Sequence
  Guide RNA
auaguaccugcugaaggcccuc

SEQ ID NO: 28773 - RNA, 22 nt, Artificial Sequence
  Guide RNA
auguacuauguauuauccuggg

SEQ ID NO: 28774 - RNA, 22 nt, Artificial Sequence
  Guide RNA
auuagcccaggauaauacauag

SEQ ID NO: 28775 - RNA, 22 nt, Artificial Sequence
  Guide RNA
cagcagguacuauguauuaucc

SEQ ID NO: 28776 - RNA, 22 nt, Artificial Sequence
  Guide RNA
cagcauguacuauguauuaucc

SEQ ID NO: 28777 - RNA, 22 nt, Artificial Sequence
  Guide RNA
caggauaauacauaguacaugc

SEQ ID NO: 28778 - RNA, 22 nt, Artificial Sequence
  Guide RNA
caggauaauacauaguaccugc

SEQ ID NO: 28779 - RNA, 22 nt, Artificial Sequence
  Guide RNA
cagguacuauguauuauccugg

SEQ ID NO: 28780 - RNA, 22 nt, Artificial Sequence
  Guide RNA
cauaguacaugcugaaggcccu

SEQ ID NO: 28781 - RNA, 22 nt, Artificial Sequence
  Guide RNA
cauaguaccugcugaaggcccu

SEQ ID NO: 28782 - RNA, 22 nt, Artificial Sequence
  Guide RNA
caugcugaaggcccucuuauuc

SEQ ID NO: 28783 - RNA, 22 nt, Artificial Sequence
  Guide RNA
cauguacuauguauuauccugg

SEQ ID NO: 28784 - RNA, 22 nt, Artificial Sequence
  Guide RNA
ccaggauaauacauaguacaug

SEQ ID NO: 28785 - RNA, 22 nt, Artificial Sequence
  Guide RNA
ccaggauaauacauaguaccug

SEQ ID NO: 28786 - RNA, 22 nt, Artificial Sequence
  Guide RNA
cccaggauaauacauaguacau

SEQ ID NO: 28787 - RNA, 22 nt, Artificial Sequence
  Guide RNA
cccaggauaauacauaguaccu

SEQ ID NO: 28788 - RNA, 22 nt, Artificial Sequence
  Guide RNA
ccguggaauaagagggccuuca

SEQ ID NO: 28789 - RNA, 22 nt, Artificial Sequence
  Guide RNA
ccugcugaaggcccucuuauuc

SEQ ID NO: 28790 - RNA, 22 nt, Artificial Sequence
  Guide RNA
ccuucagcagguacuauguauu

SEQ ID NO: 28791 - RNA, 22 nt, Artificial Sequence
  Guide RNA
ccuucagcauguacuauguauu

SEQ ID NO: 28792 - RNA, 22 nt, Artificial Sequence
  Guide RNA
cguggaauaagagggccuucag

SEQ ID NO: 28793 - RNA, 22 nt, Artificial Sequence
  Guide RNA
cuucagcagguacuauguauua

SEQ ID NO: 28794 - RNA, 22 nt, Artificial Sequence
  Guide RNA
cuucagcauguacuauguauua

SEQ ID NO: 28795 - RNA, 22 nt, Artificial Sequence
  Guide RNA
gaauaagagggccuucagcagg

SEQ ID NO: 28796 - RNA, 22 nt, Artificial Sequence
  Guide RNA
gaauaagagggccuucagcaug

SEQ ID NO: 28797 - RNA, 22 nt, Artificial Sequence
  Guide RNA
gagggccuucagcagguacuau

SEQ ID NO: 28798 - RNA, 22 nt, Artificial Sequence
  Guide RNA
gagggccuucagcauguacuau

SEQ ID NO: 28799 - RNA, 22 nt, Artificial Sequence
  Guide RNA
gauaauacauaguacaugcuga

SEQ ID NO: 28800 - RNA, 22 nt, Artificial Sequence
  Guide RNA
gauaauacauaguaccugcuga

SEQ ID NO: 28801 - RNA, 22 nt, Artificial Sequence
  Guide RNA
gcagguacuauguauuauccug

SEQ ID NO: 28802 - RNA, 22 nt, Artificial Sequence
  Guide RNA
gcauguacuauguauuauccug

SEQ ID NO: 28803 - RNA, 22 nt, Artificial Sequence
  Guide RNA
gcccaggauaauacauaguaca

SEQ ID NO: 28804 - RNA, 22 nt, Artificial Sequence
  Guide RNA
gcccaggauaauacauaguacc

SEQ ID NO: 28805 - RNA, 22 nt, Artificial Sequence
  Guide RNA
gccuucagcagguacuauguau

SEQ ID NO: 28806 - RNA, 22 nt, Artificial Sequence
  Guide RNA
gccuucagcauguacuauguau

SEQ ID NO: 28807 - RNA, 22 nt, Artificial Sequence
  Guide RNA
ggaauaagagggccuucagcag

SEQ ID NO: 28808 - RNA, 22 nt, Artificial Sequence
  Guide RNA
ggaauaagagggccuucagcau

SEQ ID NO: 28809 - RNA, 22 nt, Artificial Sequence
  Guide RNA
ggauaauacauaguacaugcug

SEQ ID NO: 28810 - RNA, 22 nt, Artificial Sequence
  Guide RNA
ggauaauacauaguaccugcug

SEQ ID NO: 28811 - RNA, 22 nt, Artificial Sequence
  Guide RNA
ggccuucagcagguacuaugua

SEQ ID NO: 28812 - RNA, 22 nt, Artificial Sequence
  Guide RNA
ggccuucagcauguacuaugua

SEQ ID NO: 28813 - RNA, 22 nt, Artificial Sequence
  Guide RNA
gggccuucagcagguacuaugu

SEQ ID NO: 28814 - RNA, 22 nt, Artificial Sequence
  Guide RNA
gggccuucagcauguacuaugu

SEQ ID NO: 28815 - RNA, 22 nt, Artificial Sequence
  Guide RNA
guacaugcugaaggcccucuua

SEQ ID NO: 28816 - RNA, 22 nt, Artificial Sequence
  Guide RNA
guaccugcugaaggcccucuua

SEQ ID NO: 28817 - RNA, 22 nt, Artificial Sequence
  Guide RNA
guggaauaagagggccuucagc

SEQ ID NO: 28818 - RNA, 22 nt, Artificial Sequence
  Guide RNA
uaagagggccuucagcagguac

SEQ ID NO: 28819 - RNA, 22 nt, Artificial Sequence
  Guide RNA
uaagagggccuucagcauguac

SEQ ID NO: 28820 - RNA, 22 nt, Artificial Sequence
  Guide RNA
uaauacauaguacaugcugaag

SEQ ID NO: 28821 - RNA, 22 nt, Artificial Sequence
  Guide RNA
uaauacauaguaccugcugaag

SEQ ID NO: 28822 - RNA, 22 nt, Artificial Sequence
  Guide RNA
uacauaguacaugcugaaggcc

SEQ ID NO: 28823 - RNA, 22 nt, Artificial Sequence
  Guide RNA
uacauaguaccugcugaaggcc

SEQ ID NO: 28824 - RNA, 22 nt, Artificial Sequence
  Guide RNA
uacaugcugaaggcccucuuau

SEQ ID NO: 28825 - RNA, 22 nt, Artificial Sequence
  Guide RNA
uaccugcugaaggcccucuuau

SEQ ID NO: 28826 - RNA, 22 nt, Artificial Sequence
  Guide RNA
uagcccaggauaauacauagua

SEQ ID NO: 28827 - RNA, 22 nt, Artificial Sequence
  Guide RNA
uaguacaugcugaaggcccucu

SEQ ID NO: 28828 - RNA, 22 nt, Artificial Sequence
  Guide RNA
uaguaccugcugaaggcccucu

SEQ ID NO: 28829 - RNA, 22 nt, Artificial Sequence
  Guide RNA
ucagcagguacuauguauuauc

SEQ ID NO: 28830 - RNA, 22 nt, Artificial Sequence
  Guide RNA
ucagcauguacuauguauuauc

SEQ ID NO: 28831 - RNA, 22 nt, Artificial Sequence
  Guide RNA
uggaauaagagggccuucagca

SEQ ID NO: 28832 - RNA, 22 nt, Artificial Sequence
  Guide RNA
uuagcccaggauaauacauagu

SEQ ID NO: 28833 - RNA, 22 nt, Artificial Sequence
  Guide RNA
uucagcagguacuauguauuau

SEQ ID NO: 28834 - RNA, 20 nt, Artificial Sequence
  Guide RNA
aaaaaagguccuccacaaca

SEQ ID NO: 28835 - RNA, 20 nt, Artificial Sequence
  Guide RNA
aaaaaaguccuccacaacac

SEQ ID NO: 28836 - RNA, 20 nt, Artificial Sequence
  Guide RNA
aaaaagguccuccacaacac

SEQ ID NO: 28837 - RNA, 20 nt, Artificial Sequence
  Guide RNA
aaaaaguccuccacaacacu

SEQ ID NO: 28838 - RNA, 20 nt, Artificial Sequence
  Guide RNA
aaaagguccuccacaacacu

SEQ ID NO: 28839 - RNA, 20 nt, Artificial Sequence
  Guide RNA
aaaaguccuccacaacacuc

SEQ ID NO: 28840 - RNA, 20 nt, Artificial Sequence
  Guide RNA
aaagguccuccacaacacuc

SEQ ID NO: 28841 - RNA, 20 nt, Artificial Sequence
  Guide RNA
aaaguccuccacaacacucu

SEQ ID NO: 28842 - RNA, 20 nt, Artificial Sequence
  Guide RNA
aagaguguuguggaggaccu

SEQ ID NO: 28843 - RNA, 20 nt, Artificial Sequence
  Guide RNA
aagaguguuguggaggacuu

SEQ ID NO: 28844 - RNA, 20 nt, Artificial Sequence
  Guide RNA
aagguccuccacaacacucu

SEQ ID NO: 28845 - RNA, 20 nt, Artificial Sequence
  Guide RNA
aaguccuccacaacacucuu

SEQ ID NO: 28846 - RNA, 20 nt, Artificial Sequence
  Guide RNA
acauaagaguguuguggagg

SEQ ID NO: 28847 - RNA, 20 nt, Artificial Sequence
  Guide RNA
agaguguuguggaggaccuu

SEQ ID NO: 28848 - RNA, 20 nt, Artificial Sequence
  Guide RNA
agaguguuguggaggacuuu

SEQ ID NO: 28849 - RNA, 20 nt, Artificial Sequence
  Guide RNA
agguccuccacaacacucuu

SEQ ID NO: 28850 - RNA, 20 nt, Artificial Sequence
  Guide RNA
aguguuguggaggaccuuuu

SEQ ID NO: 28851 - RNA, 20 nt, Artificial Sequence
  Guide RNA
aguguuguggaggacuuuuu

SEQ ID NO: 28852 - RNA, 20 nt, Artificial Sequence
  Guide RNA
auaagaguguuguggaggac

SEQ ID NO: 28853 - RNA, 20 nt, Artificial Sequence
  Guide RNA
cauaagaguguuguggagga

SEQ ID NO: 28854 - RNA, 20 nt, Artificial Sequence
  Guide RNA
gacauaagaguguuguggag

SEQ ID NO: 28855 - RNA, 20 nt, Artificial Sequence
  Guide RNA
gaguguuguggaggaccuuu

SEQ ID NO: 28856 - RNA, 20 nt, Artificial Sequence
  Guide RNA
gaguguuguggaggacuuuu

SEQ ID NO: 28857 - RNA, 20 nt, Artificial Sequence
  Guide RNA
guguuguggaggaccuuuuu

SEQ ID NO: 28858 - RNA, 20 nt, Artificial Sequence
  Guide RNA
guguuguggaggacuuuuuu

SEQ ID NO: 28859 - RNA, 20 nt, Artificial Sequence
  Guide RNA
uaagaguguuguggaggacc

SEQ ID NO: 28860 - RNA, 20 nt, Artificial Sequence
  Guide RNA
uaagaguguuguggaggacu

SEQ ID NO: 28861 - RNA, 20 nt, Artificial Sequence
  Guide RNA
uguuguggaggaccuuuuuu

SEQ ID NO: 28862 - RNA, 21 nt, Artificial Sequence
  Guide RNA
aaaaaagguccuccacaacac

SEQ ID NO: 28863 - RNA, 21 nt, Artificial Sequence
  Guide RNA
aaaaaaguccuccacaacacu

SEQ ID NO: 28864 - RNA, 21 nt, Artificial Sequence
  Guide RNA
aaaaagguccuccacaacacu

SEQ ID NO: 28865 - RNA, 21 nt, Artificial Sequence
  Guide RNA
aaaaaguccuccacaacacuc

SEQ ID NO: 28866 - RNA, 21 nt, Artificial Sequence
  Guide RNA
aaaagguccuccacaacacuc

SEQ ID NO: 28867 - RNA, 21 nt, Artificial Sequence
  Guide RNA
aaaaguccuccacaacacucu

SEQ ID NO: 28868 - RNA, 21 nt, Artificial Sequence
  Guide RNA
aaagguccuccacaacacucu

SEQ ID NO: 28869 - RNA, 21 nt, Artificial Sequence
  Guide RNA
aaaguccuccacaacacucuu

SEQ ID NO: 28870 - RNA, 21 nt, Artificial Sequence
  Guide RNA
aagaguguuguggaggaccuu

SEQ ID NO: 28871 - RNA, 21 nt, Artificial Sequence
  Guide RNA
aagaguguuguggaggacuuu

SEQ ID NO: 28872 - RNA, 21 nt, Artificial Sequence
  Guide RNA
aagguccuccacaacacucuu

SEQ ID NO: 28873 - RNA, 21 nt, Artificial Sequence
  Guide RNA
aaguccuccacaacacucuua

SEQ ID NO: 28874 - RNA, 21 nt, Artificial Sequence
  Guide RNA
acauaagaguguuguggagga

SEQ ID NO: 28875 - RNA, 21 nt, Artificial Sequence
  Guide RNA
agaguguuguggaggaccuuu

SEQ ID NO: 28876 - RNA, 21 nt, Artificial Sequence
  Guide RNA
agaguguuguggaggacuuuu

SEQ ID NO: 28877 - RNA, 21 nt, Artificial Sequence
  Guide RNA
agguccuccacaacacucuua

SEQ ID NO: 28878 - RNA, 21 nt, Artificial Sequence
  Guide RNA
aguguuguggaggaccuuuuu

SEQ ID NO: 28879 - RNA, 21 nt, Artificial Sequence
  Guide RNA
aguguuguggaggacuuuuuu

SEQ ID NO: 28880 - RNA, 21 nt, Artificial Sequence
  Guide RNA
auaagaguguuguggaggacc

SEQ ID NO: 28881 - RNA, 21 nt, Artificial Sequence
  Guide RNA
auaagaguguuguggaggacu

SEQ ID NO: 28882 - RNA, 21 nt, Artificial Sequence
  Guide RNA
cauaagaguguuguggaggac

SEQ ID NO: 28883 - RNA, 21 nt, Artificial Sequence
  Guide RNA
gacauaagaguguuguggagg

SEQ ID NO: 28884 - RNA, 21 nt, Artificial Sequence
  Guide RNA
gaguguuguggaggaccuuuu

SEQ ID NO: 28885 - RNA, 21 nt, Artificial Sequence
  Guide RNA
gaguguuguggaggacuuuuu

SEQ ID NO: 28886 - RNA, 21 nt, Artificial Sequence
  Guide RNA
guguuguggaggaccuuuuuu

SEQ ID NO: 28887 - RNA, 21 nt, Artificial Sequence
  Guide RNA
uaagaguguuguggaggaccu

SEQ ID NO: 28888 - RNA, 21 nt, Artificial Sequence
  Guide RNA
uaagaguguuguggaggacuu

SEQ ID NO: 28889 - RNA, 21 nt, Artificial Sequence
  Guide RNA
ugacauaagaguguuguggag

SEQ ID NO: 28890 - RNA, 22 nt, Artificial Sequence
  Guide RNA
aaaaaagguccuccacaacacu

SEQ ID NO: 28891 - RNA, 22 nt, Artificial Sequence
  Guide RNA
aaaaaaguccuccacaacacuc

SEQ ID NO: 28892 - RNA, 22 nt, Artificial Sequence
  Guide RNA
aaaaagguccuccacaacacuc

SEQ ID NO: 28893 - RNA, 22 nt, Artificial Sequence
  Guide RNA
aaaaaguccuccacaacacucu

SEQ ID NO: 28894 - RNA, 22 nt, Artificial Sequence
  Guide RNA
aaaagguccuccacaacacucu

SEQ ID NO: 28895 - RNA, 22 nt, Artificial Sequence
  Guide RNA
aaaaguccuccacaacacucuu

SEQ ID NO: 28896 - RNA, 22 nt, Artificial Sequence
  Guide RNA
aaagguccuccacaacacucuu

SEQ ID NO: 28897 - RNA, 22 nt, Artificial Sequence
  Guide RNA
aaaguccuccacaacacucuua

SEQ ID NO: 28898 - RNA, 22 nt, Artificial Sequence
  Guide RNA
aagaguguuguggaggaccuuu

SEQ ID NO: 28899 - RNA, 22 nt, Artificial Sequence
  Guide RNA
aagaguguuguggaggacuuuu

SEQ ID NO: 28900 - RNA, 22 nt, Artificial Sequence
  Guide RNA
aagguccuccacaacacucuua

SEQ ID NO: 28901 - RNA, 22 nt, Artificial Sequence
  Guide RNA
aaguccuccacaacacucuuau

SEQ ID NO: 28902 - RNA, 22 nt, Artificial Sequence
  Guide RNA
acauaagaguguuguggaggac

SEQ ID NO: 28903 - RNA, 22 nt, Artificial Sequence
  Guide RNA
agaguguuguggaggaccuuuu

SEQ ID NO: 28904 - RNA, 22 nt, Artificial Sequence
  Guide RNA
agaguguuguggaggacuuuuu

SEQ ID NO: 28905 - RNA, 22 nt, Artificial Sequence
  Guide RNA
agguccuccacaacacucuuau

SEQ ID NO: 28906 - RNA, 22 nt, Artificial Sequence
  Guide RNA
aguguuguggaggaccuuuuuu

SEQ ID NO: 28907 - RNA, 22 nt, Artificial Sequence
  Guide RNA
auaagaguguuguggaggaccu

SEQ ID NO: 28908 - RNA, 22 nt, Artificial Sequence
  Guide RNA
auaagaguguuguggaggacuu

SEQ ID NO: 28909 - RNA, 22 nt, Artificial Sequence
  Guide RNA
cauaagaguguuguggaggacc

SEQ ID NO: 28910 - RNA, 22 nt, Artificial Sequence
  Guide RNA
cauaagaguguuguggaggacu

SEQ ID NO: 28911 - RNA, 22 nt, Artificial Sequence
  Guide RNA
cugacauaagaguguuguggag

SEQ ID NO: 28912 - RNA, 22 nt, Artificial Sequence
  Guide RNA
gacauaagaguguuguggagga

SEQ ID NO: 28913 - RNA, 22 nt, Artificial Sequence
  Guide RNA
gaguguuguggaggaccuuuuu

SEQ ID NO: 28914 - RNA, 22 nt, Artificial Sequence
  Guide RNA
gaguguuguggaggacuuuuuu

SEQ ID NO: 28915 - RNA, 22 nt, Artificial Sequence
  Guide RNA
uaagaguguuguggaggaccuu

SEQ ID NO: 28916 - RNA, 22 nt, Artificial Sequence
  Guide RNA
uaagaguguuguggaggacuuu

SEQ ID NO: 28917 - RNA, 22 nt, Artificial Sequence
  Guide RNA
ugacauaagaguguuguggagg

SEQ ID NO: 28918 - RNA, 20 nt, Artificial Sequence
  Guide RNA
aaauaagucccaaugcuuaa

SEQ ID NO: 28919 - RNA, 20 nt, Artificial Sequence
  Guide RNA
aagucccaaugcuuaaugua

SEQ ID NO: 28920 - RNA, 20 nt, Artificial Sequence
  Guide RNA
aagucccaaugcuuaauguu

SEQ ID NO: 28921 - RNA, 20 nt, Artificial Sequence
  Guide RNA
aauaagucccaaugcuuaau

SEQ ID NO: 28922 - RNA, 20 nt, Artificial Sequence
  Guide RNA
agucccaaugcuuaauguaa

SEQ ID NO: 28923 - RNA, 20 nt, Artificial Sequence
  Guide RNA
agucccaaugcuuaauguua

SEQ ID NO: 28924 - RNA, 20 nt, Artificial Sequence
  Guide RNA
auaagucccaaugcuuaaug

SEQ ID NO: 28925 - RNA, 20 nt, Artificial Sequence
  Guide RNA
cccaaugcuuaauguaaaaa

SEQ ID NO: 28926 - RNA, 20 nt, Artificial Sequence
  Guide RNA
cccaaugcuuaauguuaaaa

SEQ ID NO: 28927 - RNA, 20 nt, Artificial Sequence
  Guide RNA
gucccaaugcuuaauguaaa

SEQ ID NO: 28928 - RNA, 20 nt, Artificial Sequence
  Guide RNA
gucccaaugcuuaauguuaa

SEQ ID NO: 28929 - RNA, 20 nt, Artificial Sequence
  Guide RNA
uaacauuaagcauugggacu

SEQ ID NO: 28930 - RNA, 20 nt, Artificial Sequence
  Guide RNA
uaagucccaaugcuuaaugu

SEQ ID NO: 28931 - RNA, 20 nt, Artificial Sequence
  Guide RNA
ucccaaugcuuaauguaaaa

SEQ ID NO: 28932 - RNA, 20 nt, Artificial Sequence
  Guide RNA
ucccaaugcuuaauguuaaa

SEQ ID NO: 28933 - RNA, 20 nt, Artificial Sequence
  Guide RNA
uuaacauuaagcauugggac

SEQ ID NO: 28934 - RNA, 20 nt, Artificial Sequence
  Guide RNA
uuacauuaagcauugggacu

SEQ ID NO: 28935 - RNA, 20 nt, Artificial Sequence
  Guide RNA
uuuaacauuaagcauuggga

SEQ ID NO: 28936 - RNA, 20 nt, Artificial Sequence
  Guide RNA
uuuacauuaagcauugggac

SEQ ID NO: 28937 - RNA, 20 nt, Artificial Sequence
  Guide RNA
uuuuaacauuaagcauuggg

SEQ ID NO: 28938 - RNA, 20 nt, Artificial Sequence
  Guide RNA
uuuuacauuaagcauuggga

SEQ ID NO: 28939 - RNA, 20 nt, Artificial Sequence
  Guide RNA
uuuuuacauuaagcauuggg

SEQ ID NO: 28940 - RNA, 21 nt, Artificial Sequence
  Guide RNA
aagucccaaugcuuaauguaa

SEQ ID NO: 28941 - RNA, 21 nt, Artificial Sequence
  Guide RNA
aagucccaaugcuuaauguua

SEQ ID NO: 28942 - RNA, 21 nt, Artificial Sequence
  Guide RNA
aauaagucccaaugcuuaaug

SEQ ID NO: 28943 - RNA, 21 nt, Artificial Sequence
  Guide RNA
agucccaaugcuuaauguaaa

SEQ ID NO: 28944 - RNA, 21 nt, Artificial Sequence
  Guide RNA
agucccaaugcuuaauguuaa

SEQ ID NO: 28945 - RNA, 21 nt, Artificial Sequence
  Guide RNA
auaagucccaaugcuuaaugu

SEQ ID NO: 28946 - RNA, 21 nt, Artificial Sequence
  Guide RNA
gucccaaugcuuaauguaaaa

SEQ ID NO: 28947 - RNA, 21 nt, Artificial Sequence
  Guide RNA
gucccaaugcuuaauguuaaa

SEQ ID NO: 28948 - RNA, 21 nt, Artificial Sequence
  Guide RNA
uaacauuaagcauugggacuu

SEQ ID NO: 28949 - RNA, 21 nt, Artificial Sequence
  Guide RNA
uaagucccaaugcuuaaugua

SEQ ID NO: 28950 - RNA, 21 nt, Artificial Sequence
  Guide RNA
uaagucccaaugcuuaauguu

SEQ ID NO: 28951 - RNA, 21 nt, Artificial Sequence
  Guide RNA
uuaacauuaagcauugggacu

SEQ ID NO: 28952 - RNA, 21 nt, Artificial Sequence
  Guide RNA
uuacauuaagcauugggacuu

SEQ ID NO: 28953 - RNA, 21 nt, Artificial Sequence
  Guide RNA
uuuaacauuaagcauugggac

SEQ ID NO: 28954 - RNA, 21 nt, Artificial Sequence
  Guide RNA
uuuacauuaagcauugggacu

SEQ ID NO: 28955 - RNA, 21 nt, Artificial Sequence
  Guide RNA
uuuuacauuaagcauugggac

SEQ ID NO: 28956 - RNA, 22 nt, Artificial Sequence
  Guide RNA
aaauaagucccaaugcuuaaug

SEQ ID NO: 28957 - RNA, 22 nt, Artificial Sequence
  Guide RNA
aagucccaaugcuuaauguaaa

SEQ ID NO: 28958 - RNA, 22 nt, Artificial Sequence
  Guide RNA
aagucccaaugcuuaauguuaa

SEQ ID NO: 28959 - RNA, 22 nt, Artificial Sequence
  Guide RNA
aauaagucccaaugcuuaaugu

SEQ ID NO: 28960 - RNA, 22 nt, Artificial Sequence
  Guide RNA
agucccaaugcuuaauguaaaa

SEQ ID NO: 28961 - RNA, 22 nt, Artificial Sequence
  Guide RNA
agucccaaugcuuaauguuaaa

SEQ ID NO: 28962 - RNA, 22 nt, Artificial Sequence
  Guide RNA
auaagucccaaugcuuaaugua

SEQ ID NO: 28963 - RNA, 22 nt, Artificial Sequence
  Guide RNA
auaagucccaaugcuuaauguu

SEQ ID NO: 28964 - RNA, 22 nt, Artificial Sequence
  Guide RNA
gucccaaugcuuaauguaaaaa

SEQ ID NO: 28965 - RNA, 22 nt, Artificial Sequence
  Guide RNA
gucccaaugcuuaauguuaaaa

SEQ ID NO: 28966 - RNA, 22 nt, Artificial Sequence
  Guide RNA
uaacauuaagcauugggacuua

SEQ ID NO: 28967 - RNA, 22 nt, Artificial Sequence
  Guide RNA
uaagucccaaugcuuaauguaa

SEQ ID NO: 28968 - RNA, 22 nt, Artificial Sequence
  Guide RNA
uaagucccaaugcuuaauguua

SEQ ID NO: 28969 - RNA, 22 nt, Artificial Sequence
  Guide RNA
uuaacauuaagcauugggacuu

SEQ ID NO: 28970 - RNA, 22 nt, Artificial Sequence
  Guide RNA
uuacauuaagcauugggacuua

SEQ ID NO: 28971 - RNA, 22 nt, Artificial Sequence
  Guide RNA
uuuaacauuaagcauugggacu

SEQ ID NO: 28972 - RNA, 22 nt, Artificial Sequence
  Guide RNA
uuuacauuaagcauugggacuu

SEQ ID NO: 28973 - RNA, 22 nt, Artificial Sequence
  Guide RNA
uuuuaacauuaagcauugggac

SEQ ID NO: 28974 - RNA, 22 nt, Artificial Sequence
  Guide RNA
uuuuacauuaagcauugggacu

SEQ ID NO: 28975 - RNA, 22 nt, Artificial Sequence
  Guide RNA
uuuuuacauuaagcauugggac

SEQ ID NO: 28976 - RNA, 20 nt, Artificial Sequence
  Guide RNA
acgaaaaagcagggaggcug

SEQ ID NO: 28977 - RNA, 20 nt, Artificial Sequence
  Guide RNA
agccucccugcuuuuuccuc

SEQ ID NO: 28978 - RNA, 20 nt, Artificial Sequence
  Guide RNA
agccucccugcuuuuucguc

SEQ ID NO: 28979 - RNA, 20 nt, Artificial Sequence
  Guide RNA
aggaaaaagcagggaggcug

SEQ ID NO: 28980 - RNA, 20 nt, Artificial Sequence
  Guide RNA
aucucagccucccugcuuuu

SEQ ID NO: 28981 - RNA, 20 nt, Artificial Sequence
  Guide RNA
cagccucccugcuuuuuccu

SEQ ID NO: 28982 - RNA, 20 nt, Artificial Sequence
  Guide RNA
cagccucccugcuuuuucgu

SEQ ID NO: 28983 - RNA, 20 nt, Artificial Sequence
  Guide RNA
caucucagccucccugcuuu

SEQ ID NO: 28984 - RNA, 20 nt, Artificial Sequence
  Guide RNA
cccugcuuuuuccucagaag

SEQ ID NO: 28985 - RNA, 20 nt, Artificial Sequence
  Guide RNA
cccugcuuuuucgucagaag

SEQ ID NO: 28986 - RNA, 20 nt, Artificial Sequence
  Guide RNA
ccucagaagaaaaauagaac

SEQ ID NO: 28987 - RNA, 20 nt, Artificial Sequence
  Guide RNA
ccucccugcuuuuuccucag

SEQ ID NO: 28988 - RNA, 20 nt, Artificial Sequence
  Guide RNA
ccucccugcuuuuucgucag

SEQ ID NO: 28989 - RNA, 20 nt, Artificial Sequence
  Guide RNA
ccugcuuuuuccucagaaga

SEQ ID NO: 28990 - RNA, 20 nt, Artificial Sequence
  Guide RNA
ccugcuuuuucgucagaaga

SEQ ID NO: 28991 - RNA, 20 nt, Artificial Sequence
  Guide RNA
cgucagaagaaaaauagaac

SEQ ID NO: 28992 - RNA, 20 nt, Artificial Sequence
  Guide RNA
cuauuuuucuucugacgaaa

SEQ ID NO: 28993 - RNA, 20 nt, Artificial Sequence
  Guide RNA
cuauuuuucuucugaggaaa

SEQ ID NO: 28994 - RNA, 20 nt, Artificial Sequence
  Guide RNA
cucagccucccugcuuuuuc

SEQ ID NO: 28995 - RNA, 20 nt, Artificial Sequence
  Guide RNA
cucccugcuuuuuccucaga

SEQ ID NO: 28996 - RNA, 20 nt, Artificial Sequence
  Guide RNA
cucccugcuuuuucgucaga

SEQ ID NO: 28997 - RNA, 20 nt, Artificial Sequence
  Guide RNA
cugacgaaaaagcagggagg

SEQ ID NO: 28998 - RNA, 20 nt, Artificial Sequence
  Guide RNA
cugaggaaaaagcagggagg

SEQ ID NO: 28999 - RNA, 20 nt, Artificial Sequence
  Guide RNA
cugcuuuuuccucagaagaa

SEQ ID NO: 29000 - RNA, 20 nt, Artificial Sequence
  Guide RNA
cugcuuuuucgucagaagaa

SEQ ID NO: 29001 - RNA, 20 nt, Artificial Sequence
  Guide RNA
cuucugacgaaaaagcaggg

SEQ ID NO: 29002 - RNA, 20 nt, Artificial Sequence
  Guide RNA
cuucugaggaaaaagcaggg

SEQ ID NO: 29003 - RNA, 20 nt, Artificial Sequence
  Guide RNA
cuuguucuauuuuucuucug

SEQ ID NO: 29004 - RNA, 20 nt, Artificial Sequence
  Guide RNA
cuuuuuccucagaagaaaaa

SEQ ID NO: 29005 - RNA, 20 nt, Artificial Sequence
  Guide RNA
cuuuuucgucagaagaaaaa

SEQ ID NO: 29006 - RNA, 20 nt, Artificial Sequence
  Guide RNA
gacgaaaaagcagggaggcu

SEQ ID NO: 29007 - RNA, 20 nt, Artificial Sequence
  Guide RNA
gaggaaaaagcagggaggcu

SEQ ID NO: 29008 - RNA, 20 nt, Artificial Sequence
  Guide RNA
gccucccugcuuuuuccuca

SEQ ID NO: 29009 - RNA, 20 nt, Artificial Sequence
  Guide RNA
gccucccugcuuuuucguca

SEQ ID NO: 29010 - RNA, 20 nt, Artificial Sequence
  Guide RNA
gcuuuuuccucagaagaaaa

SEQ ID NO: 29011 - RNA, 20 nt, Artificial Sequence
  Guide RNA
gcuuuuucgucagaagaaaa

SEQ ID NO: 29012 - RNA, 20 nt, Artificial Sequence
  Guide RNA
guucuauuuuucuucugacg

SEQ ID NO: 29013 - RNA, 20 nt, Artificial Sequence
  Guide RNA
guucuauuuuucuucugagg

SEQ ID NO: 29014 - RNA, 20 nt, Artificial Sequence
  Guide RNA
ucagccucccugcuuuuucc

SEQ ID NO: 29015 - RNA, 20 nt, Artificial Sequence
  Guide RNA
ucagccucccugcuuuuucg

SEQ ID NO: 29016 - RNA, 20 nt, Artificial Sequence
  Guide RNA
ucccugcuuuuuccucagaa

SEQ ID NO: 29017 - RNA, 20 nt, Artificial Sequence
  Guide RNA
ucccugcuuuuucgucagaa

SEQ ID NO: 29018 - RNA, 20 nt, Artificial Sequence
  Guide RNA
uccucagaagaaaaauagaa

SEQ ID NO: 29019 - RNA, 20 nt, Artificial Sequence
  Guide RNA
ucgucagaagaaaaauagaa

SEQ ID NO: 29020 - RNA, 20 nt, Artificial Sequence
  Guide RNA
ucuauuuuucuucugacgaa

SEQ ID NO: 29021 - RNA, 20 nt, Artificial Sequence
  Guide RNA
ucuauuuuucuucugaggaa

SEQ ID NO: 29022 - RNA, 20 nt, Artificial Sequence
  Guide RNA
ucucagccucccugcuuuuu

SEQ ID NO: 29023 - RNA, 20 nt, Artificial Sequence
  Guide RNA
ucugacgaaaaagcagggag

SEQ ID NO: 29024 - RNA, 20 nt, Artificial Sequence
  Guide RNA
ucugaggaaaaagcagggag

SEQ ID NO: 29025 - RNA, 20 nt, Artificial Sequence
  Guide RNA
ucuucugacgaaaaagcagg

SEQ ID NO: 29026 - RNA, 20 nt, Artificial Sequence
  Guide RNA
ucuucugaggaaaaagcagg

SEQ ID NO: 29027 - RNA, 20 nt, Artificial Sequence
  Guide RNA
ugacgaaaaagcagggaggc

SEQ ID NO: 29028 - RNA, 20 nt, Artificial Sequence
  Guide RNA
ugaggaaaaagcagggaggc

SEQ ID NO: 29029 - RNA, 20 nt, Artificial Sequence
  Guide RNA
ugcuuuuuccucagaagaaa

SEQ ID NO: 29030 - RNA, 20 nt, Artificial Sequence
  Guide RNA
ugcuuuuucgucagaagaaa

SEQ ID NO: 29031 - RNA, 20 nt, Artificial Sequence
  Guide RNA
uguucuauuuuucuucugac

SEQ ID NO: 29032 - RNA, 20 nt, Artificial Sequence
  Guide RNA
uguucuauuuuucuucugag

SEQ ID NO: 29033 - RNA, 20 nt, Artificial Sequence
  Guide RNA
uuccucagaagaaaaauaga

SEQ ID NO: 29034 - RNA, 20 nt, Artificial Sequence
  Guide RNA
uucgucagaagaaaaauaga

SEQ ID NO: 29035 - RNA, 20 nt, Artificial Sequence
  Guide RNA
uucuauuuuucuucugacga

SEQ ID NO: 29036 - RNA, 20 nt, Artificial Sequence
  Guide RNA
uucuauuuuucuucugagga

SEQ ID NO: 29037 - RNA, 20 nt, Artificial Sequence
  Guide RNA
uucugacgaaaaagcaggga

SEQ ID NO: 29038 - RNA, 20 nt, Artificial Sequence
  Guide RNA
uucugaggaaaaagcaggga

SEQ ID NO: 29039 - RNA, 20 nt, Artificial Sequence
  Guide RNA
uucuucugacgaaaaagcag

SEQ ID NO: 29040 - RNA, 20 nt, Artificial Sequence
  Guide RNA
uucuucugaggaaaaagcag

SEQ ID NO: 29041 - RNA, 20 nt, Artificial Sequence
  Guide RNA
uuuccucagaagaaaaauag

SEQ ID NO: 29042 - RNA, 20 nt, Artificial Sequence
  Guide RNA
uuucgucagaagaaaaauag

SEQ ID NO: 29043 - RNA, 20 nt, Artificial Sequence
  Guide RNA
uuucuucugacgaaaaagca

SEQ ID NO: 29044 - RNA, 20 nt, Artificial Sequence
  Guide RNA
uuucuucugaggaaaaagca

SEQ ID NO: 29045 - RNA, 20 nt, Artificial Sequence
  Guide RNA
uuuucuucugacgaaaaagc

SEQ ID NO: 29046 - RNA, 20 nt, Artificial Sequence
  Guide RNA
uuuucuucugaggaaaaagc

SEQ ID NO: 29047 - RNA, 20 nt, Artificial Sequence
  Guide RNA
uuuuucuucugacgaaaaag

SEQ ID NO: 29048 - RNA, 20 nt, Artificial Sequence
  Guide RNA
uuuuucuucugaggaaaaag

SEQ ID NO: 29049 - RNA, 21 nt, Artificial Sequence
  Guide RNA
acgaaaaagcagggaggcuga

SEQ ID NO: 29050 - RNA, 21 nt, Artificial Sequence
  Guide RNA
agccucccugcuuuuuccuca

SEQ ID NO: 29051 - RNA, 21 nt, Artificial Sequence
  Guide RNA
agccucccugcuuuuucguca

SEQ ID NO: 29052 - RNA, 21 nt, Artificial Sequence
  Guide RNA
aggaaaaagcagggaggcuga

SEQ ID NO: 29053 - RNA, 21 nt, Artificial Sequence
  Guide RNA
aucucagccucccugcuuuuu

SEQ ID NO: 29054 - RNA, 21 nt, Artificial Sequence
  Guide RNA
cagccucccugcuuuuuccuc

SEQ ID NO: 29055 - RNA, 21 nt, Artificial Sequence
  Guide RNA
cagccucccugcuuuuucguc

SEQ ID NO: 29056 - RNA, 21 nt, Artificial Sequence
  Guide RNA
caucucagccucccugcuuuu

SEQ ID NO: 29057 - RNA, 21 nt, Artificial Sequence
  Guide RNA
cccugcuuuuuccucagaaga

SEQ ID NO: 29058 - RNA, 21 nt, Artificial Sequence
  Guide RNA
cccugcuuuuucgucagaaga

SEQ ID NO: 29059 - RNA, 21 nt, Artificial Sequence
  Guide RNA
ccucagaagaaaaauagaaca

SEQ ID NO: 29060 - RNA, 21 nt, Artificial Sequence
  Guide RNA
ccucccugcuuuuuccucaga

SEQ ID NO: 29061 - RNA, 21 nt, Artificial Sequence
  Guide RNA
ccucccugcuuuuucgucaga

SEQ ID NO: 29062 - RNA, 21 nt, Artificial Sequence
  Guide RNA
ccugcuuuuuccucagaagaa

SEQ ID NO: 29063 - RNA, 21 nt, Artificial Sequence
  Guide RNA
ccugcuuuuucgucagaagaa

SEQ ID NO: 29064 - RNA, 21 nt, Artificial Sequence
  Guide RNA
cgucagaagaaaaauagaaca

SEQ ID NO: 29065 - RNA, 21 nt, Artificial Sequence
  Guide RNA
cucagccucccugcuuuuucc

SEQ ID NO: 29066 - RNA, 21 nt, Artificial Sequence
  Guide RNA
cucagccucccugcuuuuucg

SEQ ID NO: 29067 - RNA, 21 nt, Artificial Sequence
  Guide RNA
cucccugcuuuuuccucagaa

SEQ ID NO: 29068 - RNA, 21 nt, Artificial Sequence
  Guide RNA
cucccugcuuuuucgucagaa

SEQ ID NO: 29069 - RNA, 21 nt, Artificial Sequence
  Guide RNA
cugacgaaaaagcagggaggc

SEQ ID NO: 29070 - RNA, 21 nt, Artificial Sequence
  Guide RNA
cugaggaaaaagcagggaggc

SEQ ID NO: 29071 - RNA, 21 nt, Artificial Sequence
  Guide RNA
cugcuuuuuccucagaagaaa

SEQ ID NO: 29072 - RNA, 21 nt, Artificial Sequence
  Guide RNA
cugcuuuuucgucagaagaaa

SEQ ID NO: 29073 - RNA, 21 nt, Artificial Sequence
  Guide RNA
cuucugacgaaaaagcaggga

SEQ ID NO: 29074 - RNA, 21 nt, Artificial Sequence
  Guide RNA
cuucugaggaaaaagcaggga

SEQ ID NO: 29075 - RNA, 21 nt, Artificial Sequence
  Guide RNA
gacgaaaaagcagggaggcug

SEQ ID NO: 29076 - RNA, 21 nt, Artificial Sequence
  Guide RNA
gaggaaaaagcagggaggcug

SEQ ID NO: 29077 - RNA, 21 nt, Artificial Sequence
  Guide RNA
gccucccugcuuuuuccucag

SEQ ID NO: 29078 - RNA, 21 nt, Artificial Sequence
  Guide RNA
gccucccugcuuuuucgucag

SEQ ID NO: 29079 - RNA, 21 nt, Artificial Sequence
  Guide RNA
gcuuuuuccucagaagaaaaa

SEQ ID NO: 29080 - RNA, 21 nt, Artificial Sequence
  Guide RNA
gcuuuuucgucagaagaaaaa

SEQ ID NO: 29081 - RNA, 21 nt, Artificial Sequence
  Guide RNA
guucuauuuuucuucugacga

SEQ ID NO: 29082 - RNA, 21 nt, Artificial Sequence
  Guide RNA
guucuauuuuucuucugagga

SEQ ID NO: 29083 - RNA, 21 nt, Artificial Sequence
  Guide RNA
ucagccucccugcuuuuuccu

SEQ ID NO: 29084 - RNA, 21 nt, Artificial Sequence
  Guide RNA
ucagccucccugcuuuuucgu

SEQ ID NO: 29085 - RNA, 21 nt, Artificial Sequence
  Guide RNA
ucaucucagccucccugcuuu

SEQ ID NO: 29086 - RNA, 21 nt, Artificial Sequence
  Guide RNA
ucccugcuuuuuccucagaag

SEQ ID NO: 29087 - RNA, 21 nt, Artificial Sequence
  Guide RNA
ucccugcuuuuucgucagaag

SEQ ID NO: 29088 - RNA, 21 nt, Artificial Sequence
  Guide RNA
uccucagaagaaaaauagaac

SEQ ID NO: 29089 - RNA, 21 nt, Artificial Sequence
  Guide RNA
ucgucagaagaaaaauagaac

SEQ ID NO: 29090 - RNA, 21 nt, Artificial Sequence
  Guide RNA
ucucagccucccugcuuuuuc

SEQ ID NO: 29091 - RNA, 21 nt, Artificial Sequence
  Guide RNA
ucugacgaaaaagcagggagg

SEQ ID NO: 29092 - RNA, 21 nt, Artificial Sequence
  Guide RNA
ucugaggaaaaagcagggagg

SEQ ID NO: 29093 - RNA, 21 nt, Artificial Sequence
  Guide RNA
ucuucugacgaaaaagcaggg

SEQ ID NO: 29094 - RNA, 21 nt, Artificial Sequence
  Guide RNA
ucuucugaggaaaaagcaggg

SEQ ID NO: 29095 - RNA, 21 nt, Artificial Sequence
  Guide RNA
ugacgaaaaagcagggaggcu

SEQ ID NO: 29096 - RNA, 21 nt, Artificial Sequence
  Guide RNA
ugaggaaaaagcagggaggcu

SEQ ID NO: 29097 - RNA, 21 nt, Artificial Sequence
  Guide RNA
ugcuuuuuccucagaagaaaa

SEQ ID NO: 29098 - RNA, 21 nt, Artificial Sequence
  Guide RNA
ugcuuuuucgucagaagaaaa

SEQ ID NO: 29099 - RNA, 21 nt, Artificial Sequence
  Guide RNA
uguucuauuuuucuucugacg

SEQ ID NO: 29100 - RNA, 21 nt, Artificial Sequence
  Guide RNA
uguucuauuuuucuucugagg

SEQ ID NO: 29101 - RNA, 21 nt, Artificial Sequence
  Guide RNA
uucugacgaaaaagcagggag

SEQ ID NO: 29102 - RNA, 21 nt, Artificial Sequence
  Guide RNA
uucugaggaaaaagcagggag

SEQ ID NO: 29103 - RNA, 21 nt, Artificial Sequence
  Guide RNA
uucuucugacgaaaaagcagg

SEQ ID NO: 29104 - RNA, 21 nt, Artificial Sequence
  Guide RNA
uucuucugaggaaaaagcagg

SEQ ID NO: 29105 - RNA, 21 nt, Artificial Sequence
  Guide RNA
uuucuucugacgaaaaagcag

SEQ ID NO: 29106 - RNA, 21 nt, Artificial Sequence
  Guide RNA
uuucuucugaggaaaaagcag

SEQ ID NO: 29107 - RNA, 21 nt, Artificial Sequence
  Guide RNA
uuuucuucugacgaaaaagca

SEQ ID NO: 29108 - RNA, 21 nt, Artificial Sequence
  Guide RNA
uuuucuucugaggaaaaagca

SEQ ID NO: 29109 - RNA, 21 nt, Artificial Sequence
  Guide RNA
uuuuucuucugacgaaaaagc

SEQ ID NO: 29110 - RNA, 21 nt, Artificial Sequence
  Guide RNA
uuuuucuucugaggaaaaagc

SEQ ID NO: 29111 - RNA, 22 nt, Artificial Sequence
  Guide RNA
acgaaaaagcagggaggcugag

SEQ ID NO: 29112 - RNA, 22 nt, Artificial Sequence
  Guide RNA
agccucccugcuuuuuccucag

SEQ ID NO: 29113 - RNA, 22 nt, Artificial Sequence
  Guide RNA
agccucccugcuuuuucgucag

SEQ ID NO: 29114 - RNA, 22 nt, Artificial Sequence
  Guide RNA
aggaaaaagcagggaggcugag

SEQ ID NO: 29115 - RNA, 22 nt, Artificial Sequence
  Guide RNA
aucucagccucccugcuuuuuc

SEQ ID NO: 29116 - RNA, 22 nt, Artificial Sequence
  Guide RNA
auuuuucuucugacgaaaaagc

SEQ ID NO: 29117 - RNA, 22 nt, Artificial Sequence
  Guide RNA
auuuuucuucugaggaaaaagc

SEQ ID NO: 29118 - RNA, 22 nt, Artificial Sequence
  Guide RNA
cagccucccugcuuuuuccuca

SEQ ID NO: 29119 - RNA, 22 nt, Artificial Sequence
  Guide RNA
cagccucccugcuuuuucguca

SEQ ID NO: 29120 - RNA, 22 nt, Artificial Sequence
  Guide RNA
caucucagccucccugcuuuuu

SEQ ID NO: 29121 - RNA, 22 nt, Artificial Sequence
  Guide RNA
cccugcuuuuuccucagaagaa

SEQ ID NO: 29122 - RNA, 22 nt, Artificial Sequence
  Guide RNA
cccugcuuuuucgucagaagaa

SEQ ID NO: 29123 - RNA, 22 nt, Artificial Sequence
  Guide RNA
ccucagaagaaaaauagaacaa

SEQ ID NO: 29124 - RNA, 22 nt, Artificial Sequence
  Guide RNA
ccucccugcuuuuuccucagaa

SEQ ID NO: 29125 - RNA, 22 nt, Artificial Sequence
  Guide RNA
ccucccugcuuuuucgucagaa

SEQ ID NO: 29126 - RNA, 22 nt, Artificial Sequence
  Guide RNA
ccugcuuuuuccucagaagaaa

SEQ ID NO: 29127 - RNA, 22 nt, Artificial Sequence
  Guide RNA
ccugcuuuuucgucagaagaaa

SEQ ID NO: 29128 - RNA, 22 nt, Artificial Sequence
  Guide RNA
cgucagaagaaaaauagaacaa

SEQ ID NO: 29129 - RNA, 22 nt, Artificial Sequence
  Guide RNA
cucagccucccugcuuuuuccu

SEQ ID NO: 29130 - RNA, 22 nt, Artificial Sequence
  Guide RNA
cucagccucccugcuuuuucgu

SEQ ID NO: 29131 - RNA, 22 nt, Artificial Sequence
  Guide RNA
cucaucucagccucccugcuuu

SEQ ID NO: 29132 - RNA, 22 nt, Artificial Sequence
  Guide RNA
cucccugcuuuuuccucagaag

SEQ ID NO: 29133 - RNA, 22 nt, Artificial Sequence
  Guide RNA
cucccugcuuuuucgucagaag

SEQ ID NO: 29134 - RNA, 22 nt, Artificial Sequence
  Guide RNA
cugacgaaaaagcagggaggcu

SEQ ID NO: 29135 - RNA, 22 nt, Artificial Sequence
  Guide RNA
cugaggaaaaagcagggaggcu

SEQ ID NO: 29136 - RNA, 22 nt, Artificial Sequence
  Guide RNA
cugcuuuuuccucagaagaaaa

SEQ ID NO: 29137 - RNA, 22 nt, Artificial Sequence
  Guide RNA
cugcuuuuucgucagaagaaaa

SEQ ID NO: 29138 - RNA, 22 nt, Artificial Sequence
  Guide RNA
cuucugacgaaaaagcagggag

SEQ ID NO: 29139 - RNA, 22 nt, Artificial Sequence
  Guide RNA
cuucugaggaaaaagcagggag

SEQ ID NO: 29140 - RNA, 22 nt, Artificial Sequence
  Guide RNA
cuuguucuauuuuucuucugac

SEQ ID NO: 29141 - RNA, 22 nt, Artificial Sequence
  Guide RNA
cuuguucuauuuuucuucugag

SEQ ID NO: 29142 - RNA, 22 nt, Artificial Sequence
  Guide RNA
gacgaaaaagcagggaggcuga

SEQ ID NO: 29143 - RNA, 22 nt, Artificial Sequence
  Guide RNA
gaggaaaaagcagggaggcuga

SEQ ID NO: 29144 - RNA, 22 nt, Artificial Sequence
  Guide RNA
gccucccugcuuuuuccucaga

SEQ ID NO: 29145 - RNA, 22 nt, Artificial Sequence
  Guide RNA
gccucccugcuuuuucgucaga

SEQ ID NO: 29146 - RNA, 22 nt, Artificial Sequence
  Guide RNA
gcuuuuuccucagaagaaaaau

SEQ ID NO: 29147 - RNA, 22 nt, Artificial Sequence
  Guide RNA
gcuuuuucgucagaagaaaaau

SEQ ID NO: 29148 - RNA, 22 nt, Artificial Sequence
  Guide RNA
guucuauuuuucuucugacgaa

SEQ ID NO: 29149 - RNA, 22 nt, Artificial Sequence
  Guide RNA
guucuauuuuucuucugaggaa

SEQ ID NO: 29150 - RNA, 22 nt, Artificial Sequence
  Guide RNA
ucagccucccugcuuuuuccuc

SEQ ID NO: 29151 - RNA, 22 nt, Artificial Sequence
  Guide RNA
ucagccucccugcuuuuucguc

SEQ ID NO: 29152 - RNA, 22 nt, Artificial Sequence
  Guide RNA
ucaucucagccucccugcuuuu

SEQ ID NO: 29153 - RNA, 22 nt, Artificial Sequence
  Guide RNA
ucccugcuuuuuccucagaaga

SEQ ID NO: 29154 - RNA, 22 nt, Artificial Sequence
  Guide RNA
ucccugcuuuuucgucagaaga

SEQ ID NO: 29155 - RNA, 22 nt, Artificial Sequence
  Guide RNA
uccucagaagaaaaauagaaca

SEQ ID NO: 29156 - RNA, 22 nt, Artificial Sequence
  Guide RNA
ucgucagaagaaaaauagaaca

SEQ ID NO: 29157 - RNA, 22 nt, Artificial Sequence
  Guide RNA
ucucagccucccugcuuuuucc

SEQ ID NO: 29158 - RNA, 22 nt, Artificial Sequence
  Guide RNA
ucucagccucccugcuuuuucg

SEQ ID NO: 29159 - RNA, 22 nt, Artificial Sequence
  Guide RNA
ucugacgaaaaagcagggaggc

SEQ ID NO: 29160 - RNA, 22 nt, Artificial Sequence
  Guide RNA
ucugaggaaaaagcagggaggc

SEQ ID NO: 29161 - RNA, 22 nt, Artificial Sequence
  Guide RNA
ucuucugacgaaaaagcaggga

SEQ ID NO: 29162 - RNA, 22 nt, Artificial Sequence
  Guide RNA
ucuucugaggaaaaagcaggga

SEQ ID NO: 29163 - RNA, 22 nt, Artificial Sequence
  Guide RNA
ugacgaaaaagcagggaggcug

SEQ ID NO: 29164 - RNA, 22 nt, Artificial Sequence
  Guide RNA
ugaggaaaaagcagggaggcug

SEQ ID NO: 29165 - RNA, 22 nt, Artificial Sequence
  Guide RNA
ugcuuuuuccucagaagaaaaa

SEQ ID NO: 29166 - RNA, 22 nt, Artificial Sequence
  Guide RNA
ugcuuuuucgucagaagaaaaa

SEQ ID NO: 29167 - RNA, 22 nt, Artificial Sequence
  Guide RNA
uguucuauuuuucuucugacga

SEQ ID NO: 29168 - RNA, 22 nt, Artificial Sequence
  Guide RNA
uguucuauuuuucuucugagga

SEQ ID NO: 29169 - RNA, 22 nt, Artificial Sequence
  Guide RNA
uuccucagaagaaaaauagaac

SEQ ID NO: 29170 - RNA, 22 nt, Artificial Sequence
  Guide RNA
uucgucagaagaaaaauagaac

SEQ ID NO: 29171 - RNA, 22 nt, Artificial Sequence
  Guide RNA
uucugacgaaaaagcagggagg

SEQ ID NO: 29172 - RNA, 22 nt, Artificial Sequence
  Guide RNA
uucugaggaaaaagcagggagg

SEQ ID NO: 29173 - RNA, 22 nt, Artificial Sequence
  Guide RNA
uucuucugacgaaaaagcaggg

SEQ ID NO: 29174 - RNA, 22 nt, Artificial Sequence
  Guide RNA
uucuucugaggaaaaagcaggg

SEQ ID NO: 29175 - RNA, 22 nt, Artificial Sequence
  Guide RNA
uuguucuauuuuucuucugacg

SEQ ID NO: 29176 - RNA, 22 nt, Artificial Sequence
  Guide RNA
uuguucuauuuuucuucugagg

SEQ ID NO: 29177 - RNA, 22 nt, Artificial Sequence
  Guide RNA
uuucuucugacgaaaaagcagg

SEQ ID NO: 29178 - RNA, 22 nt, Artificial Sequence
  Guide RNA
uuucuucugaggaaaaagcagg

SEQ ID NO: 29179 - RNA, 22 nt, Artificial Sequence
  Guide RNA
uuuucuucugacgaaaaagcag

SEQ ID NO: 29180 - RNA, 22 nt, Artificial Sequence
  Guide RNA
uuuucuucugaggaaaaagcag

SEQ ID NO: 29181 - RNA, 22 nt, Artificial Sequence
  Guide RNA
uuuuucuucugacgaaaaagca

SEQ ID NO: 29182 - RNA, 22 nt, Artificial Sequence
  Guide RNA
uuuuucuucugaggaaaaagca

SEQ ID NO: 29183 - RNA, 20 nt, Artificial Sequence
  Guide RNA
aaaugggaaggugcagugcc

SEQ ID NO: 29184 - RNA, 20 nt, Artificial Sequence
  Guide RNA
aaggugcagugccuuccaga

SEQ ID NO: 29185 - RNA, 20 nt, Artificial Sequence
  Guide RNA
aaggugcagugccuucuaga

SEQ ID NO: 29186 - RNA, 20 nt, Artificial Sequence
  Guide RNA
aaugggaaggugcagugccu

SEQ ID NO: 29187 - RNA, 20 nt, Artificial Sequence
  Guide RNA
aauuuuccucuagaaggcac

SEQ ID NO: 29188 - RNA, 20 nt, Artificial Sequence
  Guide RNA
aauuuuccucuggaaggcac

SEQ ID NO: 29189 - RNA, 20 nt, Artificial Sequence
  Guide RNA
aggugcagugccuuccagag

SEQ ID NO: 29190 - RNA, 20 nt, Artificial Sequence
  Guide RNA
aggugcagugccuucuagag

SEQ ID NO: 29191 - RNA, 20 nt, Artificial Sequence
  Guide RNA
agugccuuccagaggaaaau

SEQ ID NO: 29192 - RNA, 20 nt, Artificial Sequence
  Guide RNA
agugccuucuagaggaaaau

SEQ ID NO: 29193 - RNA, 20 nt, Artificial Sequence
  Guide RNA
auaauuuuccucuagaaggc

SEQ ID NO: 29194 - RNA, 20 nt, Artificial Sequence
  Guide RNA
auaauuuuccucuggaaggc

SEQ ID NO: 29195 - RNA, 20 nt, Artificial Sequence
  Guide RNA
auauaauuuuccucuggaag

SEQ ID NO: 29196 - RNA, 20 nt, Artificial Sequence
  Guide RNA
augggaaggugcagugccuu

SEQ ID NO: 29197 - RNA, 20 nt, Artificial Sequence
  Guide RNA
auuuuccucuagaaggcacu

SEQ ID NO: 29198 - RNA, 20 nt, Artificial Sequence
  Guide RNA
auuuuccucuggaaggcacu

SEQ ID NO: 29199 - RNA, 20 nt, Artificial Sequence
  Guide RNA
cagugccuuccagaggaaaa

SEQ ID NO: 29200 - RNA, 20 nt, Artificial Sequence
  Guide RNA
cagugccuucuagaggaaaa

SEQ ID NO: 29201 - RNA, 20 nt, Artificial Sequence
  Guide RNA
ccagaggaaaauuauauuuc

SEQ ID NO: 29202 - RNA, 20 nt, Artificial Sequence
  Guide RNA
ccucuagaaggcacugcacc

SEQ ID NO: 29203 - RNA, 20 nt, Artificial Sequence
  Guide RNA
ccucuggaaggcacugcacc

SEQ ID NO: 29204 - RNA, 20 nt, Artificial Sequence
  Guide RNA
ccuuccagaggaaaauuaua

SEQ ID NO: 29205 - RNA, 20 nt, Artificial Sequence
  Guide RNA
ccuucuagaggaaaauuaua

SEQ ID NO: 29206 - RNA, 20 nt, Artificial Sequence
  Guide RNA
cuagaaggcacugcaccuuc

SEQ ID NO: 29207 - RNA, 20 nt, Artificial Sequence
  Guide RNA
cucuagaaggcacugcaccu

SEQ ID NO: 29208 - RNA, 20 nt, Artificial Sequence
  Guide RNA
cucuggaaggcacugcaccu

SEQ ID NO: 29209 - RNA, 20 nt, Artificial Sequence
  Guide RNA
cuggaaggcacugcaccuuc

SEQ ID NO: 29210 - RNA, 20 nt, Artificial Sequence
  Guide RNA
cuuccagaggaaaauuauau

SEQ ID NO: 29211 - RNA, 20 nt, Artificial Sequence
  Guide RNA
gaaauauaauuuuccucugg

SEQ ID NO: 29212 - RNA, 20 nt, Artificial Sequence
  Guide RNA
gaaggugcagugccuuccag

SEQ ID NO: 29213 - RNA, 20 nt, Artificial Sequence
  Guide RNA
gaaggugcagugccuucuag

SEQ ID NO: 29214 - RNA, 20 nt, Artificial Sequence
  Guide RNA
gcagugccuuccagaggaaa

SEQ ID NO: 29215 - RNA, 20 nt, Artificial Sequence
  Guide RNA
gcagugccuucuagaggaaa

SEQ ID NO: 29216 - RNA, 20 nt, Artificial Sequence
  Guide RNA
gccuuccagaggaaaauuau

SEQ ID NO: 29217 - RNA, 20 nt, Artificial Sequence
  Guide RNA
gccuucuagaggaaaauuau

SEQ ID NO: 29218 - RNA, 20 nt, Artificial Sequence
  Guide RNA
ggaaggugcagugccuucca

SEQ ID NO: 29219 - RNA, 20 nt, Artificial Sequence
  Guide RNA
ggaaggugcagugccuucua

SEQ ID NO: 29220 - RNA, 20 nt, Artificial Sequence
  Guide RNA
gggaaggugcagugccuucc

SEQ ID NO: 29221 - RNA, 20 nt, Artificial Sequence
  Guide RNA
gggaaggugcagugccuucu

SEQ ID NO: 29222 - RNA, 20 nt, Artificial Sequence
  Guide RNA
ggugcagugccuuccagagg

SEQ ID NO: 29223 - RNA, 20 nt, Artificial Sequence
  Guide RNA
ggugcagugccuucuagagg

SEQ ID NO: 29224 - RNA, 20 nt, Artificial Sequence
  Guide RNA
gugcagugccuuccagagga

SEQ ID NO: 29225 - RNA, 20 nt, Artificial Sequence
  Guide RNA
gugcagugccuucuagagga

SEQ ID NO: 29226 - RNA, 20 nt, Artificial Sequence
  Guide RNA
gugccuuccagaggaaaauu

SEQ ID NO: 29227 - RNA, 20 nt, Artificial Sequence
  Guide RNA
gugccuucuagaggaaaauu

SEQ ID NO: 29228 - RNA, 20 nt, Artificial Sequence
  Guide RNA
uaauuuuccucuagaaggca

SEQ ID NO: 29229 - RNA, 20 nt, Artificial Sequence
  Guide RNA
uaauuuuccucuggaaggca

SEQ ID NO: 29230 - RNA, 20 nt, Artificial Sequence
  Guide RNA
uagaaggcacugcaccuucc

SEQ ID NO: 29231 - RNA, 20 nt, Artificial Sequence
  Guide RNA
uauaauuuuccucuagaagg

SEQ ID NO: 29232 - RNA, 20 nt, Artificial Sequence
  Guide RNA
uauaauuuuccucuggaagg

SEQ ID NO: 29233 - RNA, 20 nt, Artificial Sequence
  Guide RNA
uccucuagaaggcacugcac

SEQ ID NO: 29234 - RNA, 20 nt, Artificial Sequence
  Guide RNA
uccucuggaaggcacugcac

SEQ ID NO: 29235 - RNA, 20 nt, Artificial Sequence
  Guide RNA
ucuagaaggcacugcaccuu

SEQ ID NO: 29236 - RNA, 20 nt, Artificial Sequence
  Guide RNA
ucuggaaggcacugcaccuu

SEQ ID NO: 29237 - RNA, 20 nt, Artificial Sequence
  Guide RNA
ugcagugccuuccagaggaa

SEQ ID NO: 29238 - RNA, 20 nt, Artificial Sequence
  Guide RNA
ugcagugccuucuagaggaa

SEQ ID NO: 29239 - RNA, 20 nt, Artificial Sequence
  Guide RNA
ugccuuccagaggaaaauua

SEQ ID NO: 29240 - RNA, 20 nt, Artificial Sequence
  Guide RNA
ugccuucuagaggaaaauua

SEQ ID NO: 29241 - RNA, 20 nt, Artificial Sequence
  Guide RNA
uggaaggcacugcaccuucc

SEQ ID NO: 29242 - RNA, 20 nt, Artificial Sequence
  Guide RNA
ugggaaggugcagugccuuc

SEQ ID NO: 29243 - RNA, 20 nt, Artificial Sequence
  Guide RNA
uuccucuagaaggcacugca

SEQ ID NO: 29244 - RNA, 20 nt, Artificial Sequence
  Guide RNA
uuccucuggaaggcacugca

SEQ ID NO: 29245 - RNA, 20 nt, Artificial Sequence
  Guide RNA
uuuccucuagaaggcacugc

SEQ ID NO: 29246 - RNA, 20 nt, Artificial Sequence
  Guide RNA
uuuccucuggaaggcacugc

SEQ ID NO: 29247 - RNA, 20 nt, Artificial Sequence
  Guide RNA
uuuuccucuagaaggcacug

SEQ ID NO: 29248 - RNA, 20 nt, Artificial Sequence
  Guide RNA
uuuuccucuggaaggcacug

SEQ ID NO: 29249 - RNA, 21 nt, Artificial Sequence
  Guide RNA
aaaugggaaggugcagugccu

SEQ ID NO: 29250 - RNA, 21 nt, Artificial Sequence
  Guide RNA
aaggugcagugccuuccagag

SEQ ID NO: 29251 - RNA, 21 nt, Artificial Sequence
  Guide RNA
aaggugcagugccuucuagag

SEQ ID NO: 29252 - RNA, 21 nt, Artificial Sequence
  Guide RNA
aaugggaaggugcagugccuu

SEQ ID NO: 29253 - RNA, 21 nt, Artificial Sequence
  Guide RNA
aauuuuccucuagaaggcacu

SEQ ID NO: 29254 - RNA, 21 nt, Artificial Sequence
  Guide RNA
aauuuuccucuggaaggcacu

SEQ ID NO: 29255 - RNA, 21 nt, Artificial Sequence
  Guide RNA
aggugcagugccuuccagagg

SEQ ID NO: 29256 - RNA, 21 nt, Artificial Sequence
  Guide RNA
aggugcagugccuucuagagg

SEQ ID NO: 29257 - RNA, 21 nt, Artificial Sequence
  Guide RNA
agugccuuccagaggaaaauu

SEQ ID NO: 29258 - RNA, 21 nt, Artificial Sequence
  Guide RNA
agugccuucuagaggaaaauu

SEQ ID NO: 29259 - RNA, 21 nt, Artificial Sequence
  Guide RNA
auaauuuuccucuagaaggca

SEQ ID NO: 29260 - RNA, 21 nt, Artificial Sequence
  Guide RNA
auaauuuuccucuggaaggca

SEQ ID NO: 29261 - RNA, 21 nt, Artificial Sequence
  Guide RNA
auauaauuuuccucuggaagg

SEQ ID NO: 29262 - RNA, 21 nt, Artificial Sequence
  Guide RNA
augggaaggugcagugccuuc

SEQ ID NO: 29263 - RNA, 21 nt, Artificial Sequence
  Guide RNA
auuuuccucuagaaggcacug

SEQ ID NO: 29264 - RNA, 21 nt, Artificial Sequence
  Guide RNA
auuuuccucuggaaggcacug

SEQ ID NO: 29265 - RNA, 21 nt, Artificial Sequence
  Guide RNA
cagugccuuccagaggaaaau

SEQ ID NO: 29266 - RNA, 21 nt, Artificial Sequence
  Guide RNA
cagugccuucuagaggaaaau

SEQ ID NO: 29267 - RNA, 21 nt, Artificial Sequence
  Guide RNA
ccucuagaaggcacugcaccu

SEQ ID NO: 29268 - RNA, 21 nt, Artificial Sequence
  Guide RNA
ccucuggaaggcacugcaccu

SEQ ID NO: 29269 - RNA, 21 nt, Artificial Sequence
  Guide RNA
ccuuccagaggaaaauuauau

SEQ ID NO: 29270 - RNA, 21 nt, Artificial Sequence
  Guide RNA
cuagaaggcacugcaccuucc

SEQ ID NO: 29271 - RNA, 21 nt, Artificial Sequence
  Guide RNA
cucuagaaggcacugcaccuu

SEQ ID NO: 29272 - RNA, 21 nt, Artificial Sequence
  Guide RNA
cucuggaaggcacugcaccuu

SEQ ID NO: 29273 - RNA, 21 nt, Artificial Sequence
  Guide RNA
cuggaaggcacugcaccuucc

SEQ ID NO: 29274 - RNA, 21 nt, Artificial Sequence
  Guide RNA
gaaggugcagugccuuccaga

SEQ ID NO: 29275 - RNA, 21 nt, Artificial Sequence
  Guide RNA
gaaggugcagugccuucuaga

SEQ ID NO: 29276 - RNA, 21 nt, Artificial Sequence
  Guide RNA
gcagugccuuccagaggaaaa

SEQ ID NO: 29277 - RNA, 21 nt, Artificial Sequence
  Guide RNA
gcagugccuucuagaggaaaa

SEQ ID NO: 29278 - RNA, 21 nt, Artificial Sequence
  Guide RNA
gccuuccagaggaaaauuaua

SEQ ID NO: 29279 - RNA, 21 nt, Artificial Sequence
  Guide RNA
gccuucuagaggaaaauuaua

SEQ ID NO: 29280 - RNA, 21 nt, Artificial Sequence
  Guide RNA
ggaaggugcagugccuuccag

SEQ ID NO: 29281 - RNA, 21 nt, Artificial Sequence
  Guide RNA
ggaaggugcagugccuucuag

SEQ ID NO: 29282 - RNA, 21 nt, Artificial Sequence
  Guide RNA
gggaaggugcagugccuucca

SEQ ID NO: 29283 - RNA, 21 nt, Artificial Sequence
  Guide RNA
gggaaggugcagugccuucua

SEQ ID NO: 29284 - RNA, 21 nt, Artificial Sequence
  Guide RNA
ggugcagugccuuccagagga

SEQ ID NO: 29285 - RNA, 21 nt, Artificial Sequence
  Guide RNA
ggugcagugccuucuagagga

SEQ ID NO: 29286 - RNA, 21 nt, Artificial Sequence
  Guide RNA
gugcagugccuuccagaggaa

SEQ ID NO: 29287 - RNA, 21 nt, Artificial Sequence
  Guide RNA
gugcagugccuucuagaggaa

SEQ ID NO: 29288 - RNA, 21 nt, Artificial Sequence
  Guide RNA
gugccuuccagaggaaaauua

SEQ ID NO: 29289 - RNA, 21 nt, Artificial Sequence
  Guide RNA
gugccuucuagaggaaaauua

SEQ ID NO: 29290 - RNA, 21 nt, Artificial Sequence
  Guide RNA
uaaaugggaaggugcagugcc

SEQ ID NO: 29291 - RNA, 21 nt, Artificial Sequence
  Guide RNA
uaauuuuccucuagaaggcac

SEQ ID NO: 29292 - RNA, 21 nt, Artificial Sequence
  Guide RNA
uaauuuuccucuggaaggcac

SEQ ID NO: 29293 - RNA, 21 nt, Artificial Sequence
  Guide RNA
uagaaggcacugcaccuuccc

SEQ ID NO: 29294 - RNA, 21 nt, Artificial Sequence
  Guide RNA
uauaauuuuccucuagaaggc

SEQ ID NO: 29295 - RNA, 21 nt, Artificial Sequence
  Guide RNA
uauaauuuuccucuggaaggc

SEQ ID NO: 29296 - RNA, 21 nt, Artificial Sequence
  Guide RNA
uccucuagaaggcacugcacc

SEQ ID NO: 29297 - RNA, 21 nt, Artificial Sequence
  Guide RNA
uccucuggaaggcacugcacc

SEQ ID NO: 29298 - RNA, 21 nt, Artificial Sequence
  Guide RNA
ucuagaaggcacugcaccuuc

SEQ ID NO: 29299 - RNA, 21 nt, Artificial Sequence
  Guide RNA
ucuggaaggcacugcaccuuc

SEQ ID NO: 29300 - RNA, 21 nt, Artificial Sequence
  Guide RNA
ugcagugccuuccagaggaaa

SEQ ID NO: 29301 - RNA, 21 nt, Artificial Sequence
  Guide RNA
ugcagugccuucuagaggaaa

SEQ ID NO: 29302 - RNA, 21 nt, Artificial Sequence
  Guide RNA
ugccuuccagaggaaaauuau

SEQ ID NO: 29303 - RNA, 21 nt, Artificial Sequence
  Guide RNA
ugccuucuagaggaaaauuau

SEQ ID NO: 29304 - RNA, 21 nt, Artificial Sequence
  Guide RNA
uggaaggcacugcaccuuccc

SEQ ID NO: 29305 - RNA, 21 nt, Artificial Sequence
  Guide RNA
ugggaaggugcagugccuucc

SEQ ID NO: 29306 - RNA, 21 nt, Artificial Sequence
  Guide RNA
ugggaaggugcagugccuucu

SEQ ID NO: 29307 - RNA, 21 nt, Artificial Sequence
  Guide RNA
uuccucuagaaggcacugcac

SEQ ID NO: 29308 - RNA, 21 nt, Artificial Sequence
  Guide RNA
uuccucuggaaggcacugcac

SEQ ID NO: 29309 - RNA, 21 nt, Artificial Sequence
  Guide RNA
uuuccucuagaaggcacugca

SEQ ID NO: 29310 - RNA, 21 nt, Artificial Sequence
  Guide RNA
uuuccucuggaaggcacugca

SEQ ID NO: 29311 - RNA, 21 nt, Artificial Sequence
  Guide RNA
uuuuccucuagaaggcacugc

SEQ ID NO: 29312 - RNA, 21 nt, Artificial Sequence
  Guide RNA
uuuuccucuggaaggcacugc

SEQ ID NO: 29313 - RNA, 22 nt, Artificial Sequence
  Guide RNA
aaaugggaaggugcagugccuu

SEQ ID NO: 29314 - RNA, 22 nt, Artificial Sequence
  Guide RNA
aaggugcagugccuuccagagg

SEQ ID NO: 29315 - RNA, 22 nt, Artificial Sequence
  Guide RNA
aaggugcagugccuucuagagg

SEQ ID NO: 29316 - RNA, 22 nt, Artificial Sequence
  Guide RNA
aauauaauuuuccucuggaagg

SEQ ID NO: 29317 - RNA, 22 nt, Artificial Sequence
  Guide RNA
aaugggaaggugcagugccuuc

SEQ ID NO: 29318 - RNA, 22 nt, Artificial Sequence
  Guide RNA
aauuuuccucuagaaggcacug

SEQ ID NO: 29319 - RNA, 22 nt, Artificial Sequence
  Guide RNA
aauuuuccucuggaaggcacug

SEQ ID NO: 29320 - RNA, 22 nt, Artificial Sequence
  Guide RNA
aggugcagugccuuccagagga

SEQ ID NO: 29321 - RNA, 22 nt, Artificial Sequence
  Guide RNA
aggugcagugccuucuagagga

SEQ ID NO: 29322 - RNA, 22 nt, Artificial Sequence
  Guide RNA
agugccuuccagaggaaaauua

SEQ ID NO: 29323 - RNA, 22 nt, Artificial Sequence
  Guide RNA
agugccuucuagaggaaaauua

SEQ ID NO: 29324 - RNA, 22 nt, Artificial Sequence
  Guide RNA
auaauuuuccucuagaaggcac

SEQ ID NO: 29325 - RNA, 22 nt, Artificial Sequence
  Guide RNA
auaauuuuccucuggaaggcac

SEQ ID NO: 29326 - RNA, 22 nt, Artificial Sequence
  Guide RNA
auauaauuuuccucuagaaggc

SEQ ID NO: 29327 - RNA, 22 nt, Artificial Sequence
  Guide RNA
auauaauuuuccucuggaaggc

SEQ ID NO: 29328 - RNA, 22 nt, Artificial Sequence
  Guide RNA
augggaaggugcagugccuucc

SEQ ID NO: 29329 - RNA, 22 nt, Artificial Sequence
  Guide RNA
augggaaggugcagugccuucu

SEQ ID NO: 29330 - RNA, 22 nt, Artificial Sequence
  Guide RNA
auuuuccucuagaaggcacugc

SEQ ID NO: 29331 - RNA, 22 nt, Artificial Sequence
  Guide RNA
auuuuccucuggaaggcacugc

SEQ ID NO: 29332 - RNA, 22 nt, Artificial Sequence
  Guide RNA
cagugccuuccagaggaaaauu

SEQ ID NO: 29333 - RNA, 22 nt, Artificial Sequence
  Guide RNA
cagugccuucuagaggaaaauu

SEQ ID NO: 29334 - RNA, 22 nt, Artificial Sequence
  Guide RNA
ccagaggaaaauuauauuucac

SEQ ID NO: 29335 - RNA, 22 nt, Artificial Sequence
  Guide RNA
ccucuagaaggcacugcaccuu

SEQ ID NO: 29336 - RNA, 22 nt, Artificial Sequence
  Guide RNA
ccucuggaaggcacugcaccuu

SEQ ID NO: 29337 - RNA, 22 nt, Artificial Sequence
  Guide RNA
ccuuccagaggaaaauuauauu

SEQ ID NO: 29338 - RNA, 22 nt, Artificial Sequence
  Guide RNA
cuagaaggcacugcaccuuccc

SEQ ID NO: 29339 - RNA, 22 nt, Artificial Sequence
  Guide RNA
cucuagaaggcacugcaccuuc

SEQ ID NO: 29340 - RNA, 22 nt, Artificial Sequence
  Guide RNA
cucuggaaggcacugcaccuuc

SEQ ID NO: 29341 - RNA, 22 nt, Artificial Sequence
  Guide RNA
cuggaaggcacugcaccuuccc

SEQ ID NO: 29342 - RNA, 22 nt, Artificial Sequence
  Guide RNA
gaaggugcagugccuuccagag

SEQ ID NO: 29343 - RNA, 22 nt, Artificial Sequence
  Guide RNA
gaaggugcagugccuucuagag

SEQ ID NO: 29344 - RNA, 22 nt, Artificial Sequence
  Guide RNA
gcagugccuuccagaggaaaau

SEQ ID NO: 29345 - RNA, 22 nt, Artificial Sequence
  Guide RNA
gcagugccuucuagaggaaaau

SEQ ID NO: 29346 - RNA, 22 nt, Artificial Sequence
  Guide RNA
gccuuccagaggaaaauuauau

SEQ ID NO: 29347 - RNA, 22 nt, Artificial Sequence
  Guide RNA
gccuucuagaggaaaauuauau

SEQ ID NO: 29348 - RNA, 22 nt, Artificial Sequence
  Guide RNA
ggaaggugcagugccuuccaga

SEQ ID NO: 29349 - RNA, 22 nt, Artificial Sequence
  Guide RNA
ggaaggugcagugccuucuaga

SEQ ID NO: 29350 - RNA, 22 nt, Artificial Sequence
  Guide RNA
gggaaggugcagugccuuccag

SEQ ID NO: 29351 - RNA, 22 nt, Artificial Sequence
  Guide RNA
gggaaggugcagugccuucuag

SEQ ID NO: 29352 - RNA, 22 nt, Artificial Sequence
  Guide RNA
ggugcagugccuuccagaggaa

SEQ ID NO: 29353 - RNA, 22 nt, Artificial Sequence
  Guide RNA
ggugcagugccuucuagaggaa

SEQ ID NO: 29354 - RNA, 22 nt, Artificial Sequence
  Guide RNA
guaaaugggaaggugcagugcc

SEQ ID NO: 29355 - RNA, 22 nt, Artificial Sequence
  Guide RNA
gugaaauauaauuuuccucugg

SEQ ID NO: 29356 - RNA, 22 nt, Artificial Sequence
  Guide RNA
gugcagugccuuccagaggaaa

SEQ ID NO: 29357 - RNA, 22 nt, Artificial Sequence
  Guide RNA
gugcagugccuucuagaggaaa

SEQ ID NO: 29358 - RNA, 22 nt, Artificial Sequence
  Guide RNA
gugccuuccagaggaaaauuau

SEQ ID NO: 29359 - RNA, 22 nt, Artificial Sequence
  Guide RNA
gugccuucuagaggaaaauuau

SEQ ID NO: 29360 - RNA, 22 nt, Artificial Sequence
  Guide RNA
uaaaugggaaggugcagugccu

SEQ ID NO: 29361 - RNA, 22 nt, Artificial Sequence
  Guide RNA
uaauuuuccucuagaaggcacu

SEQ ID NO: 29362 - RNA, 22 nt, Artificial Sequence
  Guide RNA
uaauuuuccucuggaaggcacu

SEQ ID NO: 29363 - RNA, 22 nt, Artificial Sequence
  Guide RNA
uagaaggcacugcaccuuccca

SEQ ID NO: 29364 - RNA, 22 nt, Artificial Sequence
  Guide RNA
uauaauuuuccucuagaaggca

SEQ ID NO: 29365 - RNA, 22 nt, Artificial Sequence
  Guide RNA
uauaauuuuccucuggaaggca

SEQ ID NO: 29366 - RNA, 22 nt, Artificial Sequence
  Guide RNA
uccucuagaaggcacugcaccu

SEQ ID NO: 29367 - RNA, 22 nt, Artificial Sequence
  Guide RNA
uccucuggaaggcacugcaccu

SEQ ID NO: 29368 - RNA, 22 nt, Artificial Sequence
  Guide RNA
ucuagaaggcacugcaccuucc

SEQ ID NO: 29369 - RNA, 22 nt, Artificial Sequence
  Guide RNA
ucuggaaggcacugcaccuucc

SEQ ID NO: 29370 - RNA, 22 nt, Artificial Sequence
  Guide RNA
ugcagugccuuccagaggaaaa

SEQ ID NO: 29371 - RNA, 22 nt, Artificial Sequence
  Guide RNA
ugcagugccuucuagaggaaaa

SEQ ID NO: 29372 - RNA, 22 nt, Artificial Sequence
  Guide RNA
ugccuuccagaggaaaauuaua

SEQ ID NO: 29373 - RNA, 22 nt, Artificial Sequence
  Guide RNA
ugccuucuagaggaaaauuaua

SEQ ID NO: 29374 - RNA, 22 nt, Artificial Sequence
  Guide RNA
uggaaggcacugcaccuuccca

SEQ ID NO: 29375 - RNA, 22 nt, Artificial Sequence
  Guide RNA
ugggaaggugcagugccuucca

SEQ ID NO: 29376 - RNA, 22 nt, Artificial Sequence
  Guide RNA
ugggaaggugcagugccuucua

SEQ ID NO: 29377 - RNA, 22 nt, Artificial Sequence
  Guide RNA
uuccucuagaaggcacugcacc

SEQ ID NO: 29378 - RNA, 22 nt, Artificial Sequence
  Guide RNA
uuccucuggaaggcacugcacc

SEQ ID NO: 29379 - RNA, 22 nt, Artificial Sequence
  Guide RNA
uuuccucuagaaggcacugcac

SEQ ID NO: 29380 - RNA, 22 nt, Artificial Sequence
  Guide RNA
uuuccucuggaaggcacugcac

SEQ ID NO: 29381 - RNA, 22 nt, Artificial Sequence
  Guide RNA
uuuuccucuagaaggcacugca

SEQ ID NO: 29382 - RNA, 22 nt, Artificial Sequence
  Guide RNA
uuuuccucuggaaggcacugca

SEQ ID NO: 29383 - RNA, 20 nt, Artificial Sequence
  Guide RNA
aaacaaaggaggcuuauuug

SEQ ID NO: 29384 - RNA, 20 nt, Artificial Sequence
  Guide RNA
aaacaaaugaggcuuauuug

SEQ ID NO: 29385 - RNA, 20 nt, Artificial Sequence
  Guide RNA
aaaggaggcuuauuuguaga

SEQ ID NO: 29386 - RNA, 20 nt, Artificial Sequence
  Guide RNA
aaauaagccucauuuguuug

SEQ ID NO: 29387 - RNA, 20 nt, Artificial Sequence
  Guide RNA
aaauaagccuccuuuguuug

SEQ ID NO: 29388 - RNA, 20 nt, Artificial Sequence
  Guide RNA
aaaucccaaacaaaggaggc

SEQ ID NO: 29389 - RNA, 20 nt, Artificial Sequence
  Guide RNA
aaaucccaaacaaaugaggc

SEQ ID NO: 29390 - RNA, 20 nt, Artificial Sequence
  Guide RNA
aaaugaggcuuauuuguaga

SEQ ID NO: 29391 - RNA, 20 nt, Artificial Sequence
  Guide RNA
aacaaaggaggcuuauuugu

SEQ ID NO: 29392 - RNA, 20 nt, Artificial Sequence
  Guide RNA
aacaaaugaggcuuauuugu

SEQ ID NO: 29393 - RNA, 20 nt, Artificial Sequence
  Guide RNA
aagccucauuuguuugggau

SEQ ID NO: 29394 - RNA, 20 nt, Artificial Sequence
  Guide RNA
aagccuccuuuguuugggau

SEQ ID NO: 29395 - RNA, 20 nt, Artificial Sequence
  Guide RNA
aaggaggcuuauuuguagaa

SEQ ID NO: 29396 - RNA, 20 nt, Artificial Sequence
  Guide RNA
aauaagccucauuuguuugg

SEQ ID NO: 29397 - RNA, 20 nt, Artificial Sequence
  Guide RNA
aauaagccuccuuuguuugg

SEQ ID NO: 29398 - RNA, 20 nt, Artificial Sequence
  Guide RNA
aaucccaaacaaaggaggcu

SEQ ID NO: 29399 - RNA, 20 nt, Artificial Sequence
  Guide RNA
aaucccaaacaaaugaggcu

SEQ ID NO: 29400 - RNA, 20 nt, Artificial Sequence
  Guide RNA
aaugaggcuuauuuguagaa

SEQ ID NO: 29401 - RNA, 20 nt, Artificial Sequence
  Guide RNA
aaugugaccaaaucccaaac

SEQ ID NO: 29402 - RNA, 20 nt, Artificial Sequence
  Guide RNA
acaaaggaggcuuauuugua

SEQ ID NO: 29403 - RNA, 20 nt, Artificial Sequence
  Guide RNA
acaaauaagccucauuuguu

SEQ ID NO: 29404 - RNA, 20 nt, Artificial Sequence
  Guide RNA
acaaauaagccuccuuuguu

SEQ ID NO: 29405 - RNA, 20 nt, Artificial Sequence
  Guide RNA
acaaaugaggcuuauuugua

SEQ ID NO: 29406 - RNA, 20 nt, Artificial Sequence
  Guide RNA
accaaaucccaaacaaagga

SEQ ID NO: 29407 - RNA, 20 nt, Artificial Sequence
  Guide RNA
accaaaucccaaacaaauga

SEQ ID NO: 29408 - RNA, 20 nt, Artificial Sequence
  Guide RNA
agccucauuuguuugggauu

SEQ ID NO: 29409 - RNA, 20 nt, Artificial Sequence
  Guide RNA
agccuccuuuguuugggauu

SEQ ID NO: 29410 - RNA, 20 nt, Artificial Sequence
  Guide RNA
aggaggcuuauuuguagaau

SEQ ID NO: 29411 - RNA, 20 nt, Artificial Sequence
  Guide RNA
auaagccucauuuguuuggg

SEQ ID NO: 29412 - RNA, 20 nt, Artificial Sequence
  Guide RNA
auaagccuccuuuguuuggg

SEQ ID NO: 29413 - RNA, 20 nt, Artificial Sequence
  Guide RNA
aucccaaacaaaggaggcuu

SEQ ID NO: 29414 - RNA, 20 nt, Artificial Sequence
  Guide RNA
aucccaaacaaaugaggcuu

SEQ ID NO: 29415 - RNA, 20 nt, Artificial Sequence
  Guide RNA
augaggcuuauuuguagaau

SEQ ID NO: 29416 - RNA, 20 nt, Artificial Sequence
  Guide RNA
augugaccaaaucccaaaca

SEQ ID NO: 29417 - RNA, 20 nt, Artificial Sequence
  Guide RNA
auucuacaaauaagccucau

SEQ ID NO: 29418 - RNA, 20 nt, Artificial Sequence
  Guide RNA
auucuacaaauaagccuccu

SEQ ID NO: 29419 - RNA, 20 nt, Artificial Sequence
  Guide RNA
caaacaaaggaggcuuauuu

SEQ ID NO: 29420 - RNA, 20 nt, Artificial Sequence
  Guide RNA
caaacaaaugaggcuuauuu

SEQ ID NO: 29421 - RNA, 20 nt, Artificial Sequence
  Guide RNA
caaaggaggcuuauuuguag

SEQ ID NO: 29422 - RNA, 20 nt, Artificial Sequence
  Guide RNA
caaauaagccucauuuguuu

SEQ ID NO: 29423 - RNA, 20 nt, Artificial Sequence
  Guide RNA
caaauaagccuccuuuguuu

SEQ ID NO: 29424 - RNA, 20 nt, Artificial Sequence
  Guide RNA
caaaucccaaacaaaggagg

SEQ ID NO: 29425 - RNA, 20 nt, Artificial Sequence
  Guide RNA
caaaucccaaacaaaugagg

SEQ ID NO: 29426 - RNA, 20 nt, Artificial Sequence
  Guide RNA
caaaugaggcuuauuuguag

SEQ ID NO: 29427 - RNA, 20 nt, Artificial Sequence
  Guide RNA
cauucuacaaauaagccuca

SEQ ID NO: 29428 - RNA, 20 nt, Artificial Sequence
  Guide RNA
cauucuacaaauaagccucc

SEQ ID NO: 29429 - RNA, 20 nt, Artificial Sequence
  Guide RNA
cauuuguuugggauuugguc

SEQ ID NO: 29430 - RNA, 20 nt, Artificial Sequence
  Guide RNA
ccaaacaaaggaggcuuauu

SEQ ID NO: 29431 - RNA, 20 nt, Artificial Sequence
  Guide RNA
ccaaacaaaugaggcuuauu

SEQ ID NO: 29432 - RNA, 20 nt, Artificial Sequence
  Guide RNA
ccaaaucccaaacaaaggag

SEQ ID NO: 29433 - RNA, 20 nt, Artificial Sequence
  Guide RNA
ccaaaucccaaacaaaugag

SEQ ID NO: 29434 - RNA, 20 nt, Artificial Sequence
  Guide RNA
cccaaacaaaggaggcuuau

SEQ ID NO: 29435 - RNA, 20 nt, Artificial Sequence
  Guide RNA
cccaaacaaaugaggcuuau

SEQ ID NO: 29436 - RNA, 20 nt, Artificial Sequence
  Guide RNA
ccucauuuguuugggauuug

SEQ ID NO: 29437 - RNA, 20 nt, Artificial Sequence
  Guide RNA
ccuccuuuguuugggauuug

SEQ ID NO: 29438 - RNA, 20 nt, Artificial Sequence
  Guide RNA
ccuuuguuugggauuugguc

SEQ ID NO: 29439 - RNA, 20 nt, Artificial Sequence
  Guide RNA
cuacaaauaagccucauuug

SEQ ID NO: 29440 - RNA, 20 nt, Artificial Sequence
  Guide RNA
cuacaaauaagccuccuuug

SEQ ID NO: 29441 - RNA, 20 nt, Artificial Sequence
  Guide RNA
cucauuuguuugggauuugg

SEQ ID NO: 29442 - RNA, 20 nt, Artificial Sequence
  Guide RNA
cuccuuuguuugggauuugg

SEQ ID NO: 29443 - RNA, 20 nt, Artificial Sequence
  Guide RNA
gaccaaaucccaaacaaagg

SEQ ID NO: 29444 - RNA, 20 nt, Artificial Sequence
  Guide RNA
gaccaaaucccaaacaaaug

SEQ ID NO: 29445 - RNA, 20 nt, Artificial Sequence
  Guide RNA
gccucauuuguuugggauuu

SEQ ID NO: 29446 - RNA, 20 nt, Artificial Sequence
  Guide RNA
gccuccuuuguuugggauuu

SEQ ID NO: 29447 - RNA, 20 nt, Artificial Sequence
  Guide RNA
gugaccaaaucccaaacaaa

SEQ ID NO: 29448 - RNA, 20 nt, Artificial Sequence
  Guide RNA
guucauucuacaaauaagcc

SEQ ID NO: 29449 - RNA, 20 nt, Artificial Sequence
  Guide RNA
uaagccucauuuguuuggga

SEQ ID NO: 29450 - RNA, 20 nt, Artificial Sequence
  Guide RNA
uaagccuccuuuguuuggga

SEQ ID NO: 29451 - RNA, 20 nt, Artificial Sequence
  Guide RNA
uacaaauaagccucauuugu

SEQ ID NO: 29452 - RNA, 20 nt, Artificial Sequence
  Guide RNA
uacaaauaagccuccuuugu

SEQ ID NO: 29453 - RNA, 20 nt, Artificial Sequence
  Guide RNA
ucauucuacaaauaagccuc

SEQ ID NO: 29454 - RNA, 20 nt, Artificial Sequence
  Guide RNA
ucauuuguuugggauuuggu

SEQ ID NO: 29455 - RNA, 20 nt, Artificial Sequence
  Guide RNA
ucccaaacaaaggaggcuua

SEQ ID NO: 29456 - RNA, 20 nt, Artificial Sequence
  Guide RNA
ucccaaacaaaugaggcuua

SEQ ID NO: 29457 - RNA, 20 nt, Artificial Sequence
  Guide RNA
uccuuuguuugggauuuggu

SEQ ID NO: 29458 - RNA, 20 nt, Artificial Sequence
  Guide RNA
ucuacaaauaagccucauuu

SEQ ID NO: 29459 - RNA, 20 nt, Artificial Sequence
  Guide RNA
ucuacaaauaagccuccuuu

SEQ ID NO: 29460 - RNA, 20 nt, Artificial Sequence
  Guide RNA
ugaccaaaucccaaacaaag

SEQ ID NO: 29461 - RNA, 20 nt, Artificial Sequence
  Guide RNA
ugaccaaaucccaaacaaau

SEQ ID NO: 29462 - RNA, 20 nt, Artificial Sequence
  Guide RNA
ugugaccaaaucccaaacaa

SEQ ID NO: 29463 - RNA, 20 nt, Artificial Sequence
  Guide RNA
uguucauucuacaaauaagc

SEQ ID NO: 29464 - RNA, 20 nt, Artificial Sequence
  Guide RNA
uucauucuacaaauaagccu

SEQ ID NO: 29465 - RNA, 20 nt, Artificial Sequence
  Guide RNA
uucuacaaauaagccucauu

SEQ ID NO: 29466 - RNA, 20 nt, Artificial Sequence
  Guide RNA
uucuacaaauaagccuccuu

SEQ ID NO: 29467 - RNA, 21 nt, Artificial Sequence
  Guide RNA
aaacaaaggaggcuuauuugu

SEQ ID NO: 29468 - RNA, 21 nt, Artificial Sequence
  Guide RNA
aaaggaggcuuauuuguagaa

SEQ ID NO: 29469 - RNA, 21 nt, Artificial Sequence
  Guide RNA
aaauaagccucauuuguuugg

SEQ ID NO: 29470 - RNA, 21 nt, Artificial Sequence
  Guide RNA
aaauaagccuccuuuguuugg

SEQ ID NO: 29471 - RNA, 21 nt, Artificial Sequence
  Guide RNA
aaaucccaaacaaaggaggcu

SEQ ID NO: 29472 - RNA, 21 nt, Artificial Sequence
  Guide RNA
aaaucccaaacaaaugaggcu

SEQ ID NO: 29473 - RNA, 21 nt, Artificial Sequence
  Guide RNA
aaaugugaccaaaucccaaac

SEQ ID NO: 29474 - RNA, 21 nt, Artificial Sequence
  Guide RNA
aacaaaggaggcuuauuugua

SEQ ID NO: 29475 - RNA, 21 nt, Artificial Sequence
  Guide RNA
aagccucauuuguuugggauu

SEQ ID NO: 29476 - RNA, 21 nt, Artificial Sequence
  Guide RNA
aagccuccuuuguuugggauu

SEQ ID NO: 29477 - RNA, 21 nt, Artificial Sequence
  Guide RNA
aaggaggcuuauuuguagaau

SEQ ID NO: 29478 - RNA, 21 nt, Artificial Sequence
  Guide RNA
aauaagccucauuuguuuggg

SEQ ID NO: 29479 - RNA, 21 nt, Artificial Sequence
  Guide RNA
aauaagccuccuuuguuuggg

SEQ ID NO: 29480 - RNA, 21 nt, Artificial Sequence
  Guide RNA
aaucccaaacaaaggaggcuu

SEQ ID NO: 29481 - RNA, 21 nt, Artificial Sequence
  Guide RNA
aaucccaaacaaaugaggcuu

SEQ ID NO: 29482 - RNA, 21 nt, Artificial Sequence
  Guide RNA
aaugugaccaaaucccaaaca

SEQ ID NO: 29483 - RNA, 21 nt, Artificial Sequence
  Guide RNA
acaaaggaggcuuauuuguag

SEQ ID NO: 29484 - RNA, 21 nt, Artificial Sequence
  Guide RNA
acaaauaagccuccuuuguuu

SEQ ID NO: 29485 - RNA, 21 nt, Artificial Sequence
  Guide RNA
acaaaugaggcuuauuuguag

SEQ ID NO: 29486 - RNA, 21 nt, Artificial Sequence
  Guide RNA
accaaaucccaaacaaaggag

SEQ ID NO: 29487 - RNA, 21 nt, Artificial Sequence
  Guide RNA
accaaaucccaaacaaaugag

SEQ ID NO: 29488 - RNA, 21 nt, Artificial Sequence
  Guide RNA
agccucauuuguuugggauuu

SEQ ID NO: 29489 - RNA, 21 nt, Artificial Sequence
  Guide RNA
agccuccuuuguuugggauuu

SEQ ID NO: 29490 - RNA, 21 nt, Artificial Sequence
  Guide RNA
aggaggcuuauuuguagaaug

SEQ ID NO: 29491 - RNA, 21 nt, Artificial Sequence
  Guide RNA
auaagccucauuuguuuggga

SEQ ID NO: 29492 - RNA, 21 nt, Artificial Sequence
  Guide RNA
auaagccuccuuuguuuggga

SEQ ID NO: 29493 - RNA, 21 nt, Artificial Sequence
  Guide RNA
aucccaaacaaaggaggcuua

SEQ ID NO: 29494 - RNA, 21 nt, Artificial Sequence
  Guide RNA
aucccaaacaaaugaggcuua

SEQ ID NO: 29495 - RNA, 21 nt, Artificial Sequence
  Guide RNA
augaggcuuauuuguagaaug

SEQ ID NO: 29496 - RNA, 21 nt, Artificial Sequence
  Guide RNA
augugaccaaaucccaaacaa

SEQ ID NO: 29497 - RNA, 21 nt, Artificial Sequence
  Guide RNA
auucuacaaauaagccuccuu

SEQ ID NO: 29498 - RNA, 21 nt, Artificial Sequence
  Guide RNA
caaacaaaggaggcuuauuug

SEQ ID NO: 29499 - RNA, 21 nt, Artificial Sequence
  Guide RNA
caaacaaaugaggcuuauuug

SEQ ID NO: 29500 - RNA, 21 nt, Artificial Sequence
  Guide RNA
caaaggaggcuuauuuguaga

SEQ ID NO: 29501 - RNA, 21 nt, Artificial Sequence
  Guide RNA
caaauaagccucauuuguuug

SEQ ID NO: 29502 - RNA, 21 nt, Artificial Sequence
  Guide RNA
caaauaagccuccuuuguuug

SEQ ID NO: 29503 - RNA, 21 nt, Artificial Sequence
  Guide RNA
caaaucccaaacaaaggaggc

SEQ ID NO: 29504 - RNA, 21 nt, Artificial Sequence
  Guide RNA
caaaucccaaacaaaugaggc

SEQ ID NO: 29505 - RNA, 21 nt, Artificial Sequence
  Guide RNA
caaaugaggcuuauuuguaga

SEQ ID NO: 29506 - RNA, 21 nt, Artificial Sequence
  Guide RNA
cauucuacaaauaagccucau

SEQ ID NO: 29507 - RNA, 21 nt, Artificial Sequence
  Guide RNA
cauucuacaaauaagccuccu

SEQ ID NO: 29508 - RNA, 21 nt, Artificial Sequence
  Guide RNA
cauuuguuugggauuugguca

SEQ ID NO: 29509 - RNA, 21 nt, Artificial Sequence
  Guide RNA
ccaaacaaaggaggcuuauuu

SEQ ID NO: 29510 - RNA, 21 nt, Artificial Sequence
  Guide RNA
ccaaacaaaugaggcuuauuu

SEQ ID NO: 29511 - RNA, 21 nt, Artificial Sequence
  Guide RNA
ccaaaucccaaacaaaggagg

SEQ ID NO: 29512 - RNA, 21 nt, Artificial Sequence
  Guide RNA
ccaaaucccaaacaaaugagg

SEQ ID NO: 29513 - RNA, 21 nt, Artificial Sequence
  Guide RNA
cccaaacaaaggaggcuuauu

SEQ ID NO: 29514 - RNA, 21 nt, Artificial Sequence
  Guide RNA
cccaaacaaaugaggcuuauu

SEQ ID NO: 29515 - RNA, 21 nt, Artificial Sequence
  Guide RNA
ccucauuuguuugggauuugg

SEQ ID NO: 29516 - RNA, 21 nt, Artificial Sequence
  Guide RNA
ccuccuuuguuugggauuugg

SEQ ID NO: 29517 - RNA, 21 nt, Artificial Sequence
  Guide RNA
ccuuuguuugggauuugguca

SEQ ID NO: 29518 - RNA, 21 nt, Artificial Sequence
  Guide RNA
cuacaaauaagccucauuugu

SEQ ID NO: 29519 - RNA, 21 nt, Artificial Sequence
  Guide RNA
cuacaaauaagccuccuuugu

SEQ ID NO: 29520 - RNA, 21 nt, Artificial Sequence
  Guide RNA
cucauuuguuugggauuuggu

SEQ ID NO: 29521 - RNA, 21 nt, Artificial Sequence
  Guide RNA
cuccuuuguuugggauuuggu

SEQ ID NO: 29522 - RNA, 21 nt, Artificial Sequence
  Guide RNA
gaccaaaucccaaacaaagga

SEQ ID NO: 29523 - RNA, 21 nt, Artificial Sequence
  Guide RNA
gaccaaaucccaaacaaauga

SEQ ID NO: 29524 - RNA, 21 nt, Artificial Sequence
  Guide RNA
gccucauuuguuugggauuug

SEQ ID NO: 29525 - RNA, 21 nt, Artificial Sequence
  Guide RNA
gccuccuuuguuugggauuug

SEQ ID NO: 29526 - RNA, 21 nt, Artificial Sequence
  Guide RNA
gugaccaaaucccaaacaaag

SEQ ID NO: 29527 - RNA, 21 nt, Artificial Sequence
  Guide RNA
gugaccaaaucccaaacaaau

SEQ ID NO: 29528 - RNA, 21 nt, Artificial Sequence
  Guide RNA
guucauucuacaaauaagccu

SEQ ID NO: 29529 - RNA, 21 nt, Artificial Sequence
  Guide RNA
uaagccucauuuguuugggau

SEQ ID NO: 29530 - RNA, 21 nt, Artificial Sequence
  Guide RNA
uaagccuccuuuguuugggau

SEQ ID NO: 29531 - RNA, 21 nt, Artificial Sequence
  Guide RNA
uacaaauaagccuccuuuguu

SEQ ID NO: 29532 - RNA, 21 nt, Artificial Sequence
  Guide RNA
ucauucuacaaauaagccuca

SEQ ID NO: 29533 - RNA, 21 nt, Artificial Sequence
  Guide RNA
ucauucuacaaauaagccucc

SEQ ID NO: 29534 - RNA, 21 nt, Artificial Sequence
  Guide RNA
ucauuuguuugggauuugguc

SEQ ID NO: 29535 - RNA, 21 nt, Artificial Sequence
  Guide RNA
ucccaaacaaaggaggcuuau

SEQ ID NO: 29536 - RNA, 21 nt, Artificial Sequence
  Guide RNA
ucccaaacaaaugaggcuuau

SEQ ID NO: 29537 - RNA, 21 nt, Artificial Sequence
  Guide RNA
uccuuuguuugggauuugguc

SEQ ID NO: 29538 - RNA, 21 nt, Artificial Sequence
  Guide RNA
ucuacaaauaagccucauuug

SEQ ID NO: 29539 - RNA, 21 nt, Artificial Sequence
  Guide RNA
ucuacaaauaagccuccuuug

SEQ ID NO: 29540 - RNA, 21 nt, Artificial Sequence
  Guide RNA
ugaccaaaucccaaacaaagg

SEQ ID NO: 29541 - RNA, 21 nt, Artificial Sequence
  Guide RNA
ugaccaaaucccaaacaaaug

SEQ ID NO: 29542 - RNA, 21 nt, Artificial Sequence
  Guide RNA
ugugaccaaaucccaaacaaa

SEQ ID NO: 29543 - RNA, 21 nt, Artificial Sequence
  Guide RNA
uguucauucuacaaauaagcc

SEQ ID NO: 29544 - RNA, 21 nt, Artificial Sequence
  Guide RNA
uucauucuacaaauaagccuc

SEQ ID NO: 29545 - RNA, 21 nt, Artificial Sequence
  Guide RNA
uucuacaaauaagccuccuuu

SEQ ID NO: 29546 - RNA, 22 nt, Artificial Sequence
  Guide RNA
aaacaaaggaggcuuauuugua

SEQ ID NO: 29547 - RNA, 22 nt, Artificial Sequence
  Guide RNA
aaaggaggcuuauuuguagaau

SEQ ID NO: 29548 - RNA, 22 nt, Artificial Sequence
  Guide RNA
aaauaagccucauuuguuuggg

SEQ ID NO: 29549 - RNA, 22 nt, Artificial Sequence
  Guide RNA
aaauaagccuccuuuguuuggg

SEQ ID NO: 29550 - RNA, 22 nt, Artificial Sequence
  Guide RNA
aaaucccaaacaaaggaggcuu

SEQ ID NO: 29551 - RNA, 22 nt, Artificial Sequence
  Guide RNA
aaaucccaaacaaaugaggcuu

SEQ ID NO: 29552 - RNA, 22 nt, Artificial Sequence
  Guide RNA
aaaugugaccaaaucccaaaca

SEQ ID NO: 29553 - RNA, 22 nt, Artificial Sequence
  Guide RNA
aacaaaggaggcuuauuuguag

SEQ ID NO: 29554 - RNA, 22 nt, Artificial Sequence
  Guide RNA
aacaaaugaggcuuauuuguag

SEQ ID NO: 29555 - RNA, 22 nt, Artificial Sequence
  Guide RNA
aagccucauuuguuugggauuu

SEQ ID NO: 29556 - RNA, 22 nt, Artificial Sequence
  Guide RNA
aagccuccuuuguuugggauuu

SEQ ID NO: 29557 - RNA, 22 nt, Artificial Sequence
  Guide RNA
aaggaggcuuauuuguagaaug

SEQ ID NO: 29558 - RNA, 22 nt, Artificial Sequence
  Guide RNA
aauaagccucauuuguuuggga

SEQ ID NO: 29559 - RNA, 22 nt, Artificial Sequence
  Guide RNA
aauaagccuccuuuguuuggga

SEQ ID NO: 29560 - RNA, 22 nt, Artificial Sequence
  Guide RNA
aaucccaaacaaaggaggcuua

SEQ ID NO: 29561 - RNA, 22 nt, Artificial Sequence
  Guide RNA
aaucccaaacaaaugaggcuua

SEQ ID NO: 29562 - RNA, 22 nt, Artificial Sequence
  Guide RNA
aaugaggcuuauuuguagaaug

SEQ ID NO: 29563 - RNA, 22 nt, Artificial Sequence
  Guide RNA
aaugugaccaaaucccaaacaa

SEQ ID NO: 29564 - RNA, 22 nt, Artificial Sequence
  Guide RNA
acaaaggaggcuuauuuguaga

SEQ ID NO: 29565 - RNA, 22 nt, Artificial Sequence
  Guide RNA
acaaauaagccucauuuguuug

SEQ ID NO: 29566 - RNA, 22 nt, Artificial Sequence
  Guide RNA
acaaauaagccuccuuuguuug

SEQ ID NO: 29567 - RNA, 22 nt, Artificial Sequence
  Guide RNA
acaaaugaggcuuauuuguaga

SEQ ID NO: 29568 - RNA, 22 nt, Artificial Sequence
  Guide RNA
accaaaucccaaacaaaggagg

SEQ ID NO: 29569 - RNA, 22 nt, Artificial Sequence
  Guide RNA
accaaaucccaaacaaaugagg

SEQ ID NO: 29570 - RNA, 22 nt, Artificial Sequence
  Guide RNA
agccucauuuguuugggauuug

SEQ ID NO: 29571 - RNA, 22 nt, Artificial Sequence
  Guide RNA
agccuccuuuguuugggauuug

SEQ ID NO: 29572 - RNA, 22 nt, Artificial Sequence
  Guide RNA
aggaggcuuauuuguagaauga

SEQ ID NO: 29573 - RNA, 22 nt, Artificial Sequence
  Guide RNA
auaagccucauuuguuugggau

SEQ ID NO: 29574 - RNA, 22 nt, Artificial Sequence
  Guide RNA
auaagccuccuuuguuugggau

SEQ ID NO: 29575 - RNA, 22 nt, Artificial Sequence
  Guide RNA
aucccaaacaaaggaggcuuau

SEQ ID NO: 29576 - RNA, 22 nt, Artificial Sequence
  Guide RNA
aucccaaacaaaugaggcuuau

SEQ ID NO: 29577 - RNA, 22 nt, Artificial Sequence
  Guide RNA
augaggcuuauuuguagaauga

SEQ ID NO: 29578 - RNA, 22 nt, Artificial Sequence
  Guide RNA
augugaccaaaucccaaacaaa

SEQ ID NO: 29579 - RNA, 22 nt, Artificial Sequence
  Guide RNA
auguucauucuacaaauaagcc

SEQ ID NO: 29580 - RNA, 22 nt, Artificial Sequence
  Guide RNA
auucuacaaauaagccuccuuu

SEQ ID NO: 29581 - RNA, 22 nt, Artificial Sequence
  Guide RNA
caaacaaaggaggcuuauuugu

SEQ ID NO: 29582 - RNA, 22 nt, Artificial Sequence
  Guide RNA
caaacaaaugaggcuuauuugu

SEQ ID NO: 29583 - RNA, 22 nt, Artificial Sequence
  Guide RNA
caaaggaggcuuauuuguagaa

SEQ ID NO: 29584 - RNA, 22 nt, Artificial Sequence
  Guide RNA
caaauaagccucauuuguuugg

SEQ ID NO: 29585 - RNA, 22 nt, Artificial Sequence
  Guide RNA
caaauaagccuccuuuguuugg

SEQ ID NO: 29586 - RNA, 22 nt, Artificial Sequence
  Guide RNA
caaaucccaaacaaaggaggcu

SEQ ID NO: 29587 - RNA, 22 nt, Artificial Sequence
  Guide RNA
caaaucccaaacaaaugaggcu

SEQ ID NO: 29588 - RNA, 22 nt, Artificial Sequence
  Guide RNA
caaaugaggcuuauuuguagaa

SEQ ID NO: 29589 - RNA, 22 nt, Artificial Sequence
  Guide RNA
cauucuacaaauaagccucauu

SEQ ID NO: 29590 - RNA, 22 nt, Artificial Sequence
  Guide RNA
cauucuacaaauaagccuccuu

SEQ ID NO: 29591 - RNA, 22 nt, Artificial Sequence
  Guide RNA
cauuuguuugggauuuggucac

SEQ ID NO: 29592 - RNA, 22 nt, Artificial Sequence
  Guide RNA
ccaaacaaaggaggcuuauuug

SEQ ID NO: 29593 - RNA, 22 nt, Artificial Sequence
  Guide RNA
ccaaacaaaugaggcuuauuug

SEQ ID NO: 29594 - RNA, 22 nt, Artificial Sequence
  Guide RNA
ccaaaucccaaacaaaggaggc

SEQ ID NO: 29595 - RNA, 22 nt, Artificial Sequence
  Guide RNA
ccaaaucccaaacaaaugaggc

SEQ ID NO: 29596 - RNA, 22 nt, Artificial Sequence
  Guide RNA
cccaaacaaaggaggcuuauuu

SEQ ID NO: 29597 - RNA, 22 nt, Artificial Sequence
  Guide RNA
cccaaacaaaugaggcuuauuu

SEQ ID NO: 29598 - RNA, 22 nt, Artificial Sequence
  Guide RNA
ccucauuuguuugggauuuggu

SEQ ID NO: 29599 - RNA, 22 nt, Artificial Sequence
  Guide RNA
ccuccuuuguuugggauuuggu

SEQ ID NO: 29600 - RNA, 22 nt, Artificial Sequence
  Guide RNA
ccuuuguuugggauuuggucac

SEQ ID NO: 29601 - RNA, 22 nt, Artificial Sequence
  Guide RNA
cuacaaauaagccucauuuguu

SEQ ID NO: 29602 - RNA, 22 nt, Artificial Sequence
  Guide RNA
cuacaaauaagccuccuuuguu

SEQ ID NO: 29603 - RNA, 22 nt, Artificial Sequence
  Guide RNA
cucauuuguuugggauuugguc

SEQ ID NO: 29604 - RNA, 22 nt, Artificial Sequence
  Guide RNA
cuccuuuguuugggauuugguc

SEQ ID NO: 29605 - RNA, 22 nt, Artificial Sequence
  Guide RNA
gaaaugugaccaaaucccaaac

SEQ ID NO: 29606 - RNA, 22 nt, Artificial Sequence
  Guide RNA
gaccaaaucccaaacaaaggag

SEQ ID NO: 29607 - RNA, 22 nt, Artificial Sequence
  Guide RNA
gaccaaaucccaaacaaaugag

SEQ ID NO: 29608 - RNA, 22 nt, Artificial Sequence
  Guide RNA
gccucauuuguuugggauuugg

SEQ ID NO: 29609 - RNA, 22 nt, Artificial Sequence
  Guide RNA
gccuccuuuguuugggauuugg

SEQ ID NO: 29610 - RNA, 22 nt, Artificial Sequence
  Guide RNA
gugaccaaaucccaaacaaagg

SEQ ID NO: 29611 - RNA, 22 nt, Artificial Sequence
  Guide RNA
gugaccaaaucccaaacaaaug

SEQ ID NO: 29612 - RNA, 22 nt, Artificial Sequence
  Guide RNA
guucauucuacaaauaagccuc

SEQ ID NO: 29613 - RNA, 22 nt, Artificial Sequence
  Guide RNA
uaagccucauuuguuugggauu

SEQ ID NO: 29614 - RNA, 22 nt, Artificial Sequence
  Guide RNA
uaagccuccuuuguuugggauu

SEQ ID NO: 29615 - RNA, 22 nt, Artificial Sequence
  Guide RNA
uacaaauaagccuccuuuguuu

SEQ ID NO: 29616 - RNA, 22 nt, Artificial Sequence
  Guide RNA
ucauucuacaaauaagccucau

SEQ ID NO: 29617 - RNA, 22 nt, Artificial Sequence
  Guide RNA
ucauucuacaaauaagccuccu

SEQ ID NO: 29618 - RNA, 22 nt, Artificial Sequence
  Guide RNA
ucauuuguuugggauuugguca

SEQ ID NO: 29619 - RNA, 22 nt, Artificial Sequence
  Guide RNA
ucccaaacaaaggaggcuuauu

SEQ ID NO: 29620 - RNA, 22 nt, Artificial Sequence
  Guide RNA
ucccaaacaaaugaggcuuauu

SEQ ID NO: 29621 - RNA, 22 nt, Artificial Sequence
  Guide RNA
uccuuuguuugggauuugguca

SEQ ID NO: 29622 - RNA, 22 nt, Artificial Sequence
  Guide RNA
ucuacaaauaagccucauuugu

SEQ ID NO: 29623 - RNA, 22 nt, Artificial Sequence
  Guide RNA
ucuacaaauaagccuccuuugu

SEQ ID NO: 29624 - RNA, 22 nt, Artificial Sequence
  Guide RNA
ugaccaaaucccaaacaaagga

SEQ ID NO: 29625 - RNA, 22 nt, Artificial Sequence
  Guide RNA
ugaccaaaucccaaacaaauga

SEQ ID NO: 29626 - RNA, 22 nt, Artificial Sequence
  Guide RNA
ugugaccaaaucccaaacaaag

SEQ ID NO: 29627 - RNA, 22 nt, Artificial Sequence
  Guide RNA
ugugaccaaaucccaaacaaau

SEQ ID NO: 29628 - RNA, 22 nt, Artificial Sequence
  Guide RNA
uguucauucuacaaauaagccu

SEQ ID NO: 29629 - RNA, 22 nt, Artificial Sequence
  Guide RNA
uucauucuacaaauaagccuca

SEQ ID NO: 29630 - RNA, 22 nt, Artificial Sequence
  Guide RNA
uucauucuacaaauaagccucc

SEQ ID NO: 29631 - RNA, 22 nt, Artificial Sequence
  Guide RNA
uucuacaaauaagccucauuug

SEQ ID NO: 29632 - RNA, 22 nt, Artificial Sequence
  Guide RNA
uucuacaaauaagccuccuuug

SEQ ID NO: 29633 - RNA, 20 nt, Artificial Sequence
  Guide RNA
aauaaguauuacuggaugga

SEQ ID NO: 29634 - RNA, 20 nt, Artificial Sequence
  Guide RNA
aauacuuacuaaaugccuac

SEQ ID NO: 29635 - RNA, 20 nt, Artificial Sequence
  Guide RNA
acacaguaggcauuuaauaa

SEQ ID NO: 29636 - RNA, 20 nt, Artificial Sequence
  Guide RNA
acacaguaggcauuuaguaa

SEQ ID NO: 29637 - RNA, 20 nt, Artificial Sequence
  Guide RNA
acaguaggcauuuaauaagu

SEQ ID NO: 29638 - RNA, 20 nt, Artificial Sequence
  Guide RNA
acaguaggcauuuaguaagu

SEQ ID NO: 29639 - RNA, 20 nt, Artificial Sequence
  Guide RNA
acuaaaugccuacugugugc

SEQ ID NO: 29640 - RNA, 20 nt, Artificial Sequence
  Guide RNA
acuuacuaaaugccuacugu

SEQ ID NO: 29641 - RNA, 20 nt, Artificial Sequence
  Guide RNA
acuuauuaaaugccuacugu

SEQ ID NO: 29642 - RNA, 20 nt, Artificial Sequence
  Guide RNA
aggcauuuaguaaguauuac

SEQ ID NO: 29643 - RNA, 20 nt, Artificial Sequence
  Guide RNA
aguaaguauuacuggaugga

SEQ ID NO: 29644 - RNA, 20 nt, Artificial Sequence
  Guide RNA
aguaauacuuacuaaaugcc

SEQ ID NO: 29645 - RNA, 20 nt, Artificial Sequence
  Guide RNA
aguaggcauuuaguaaguau

SEQ ID NO: 29646 - RNA, 20 nt, Artificial Sequence
  Guide RNA
agucauccauccaguaauac

SEQ ID NO: 29647 - RNA, 20 nt, Artificial Sequence
  Guide RNA
auacuuacuaaaugccuacu

SEQ ID NO: 29648 - RNA, 20 nt, Artificial Sequence
  Guide RNA
auccauccaguaauacuuac

SEQ ID NO: 29649 - RNA, 20 nt, Artificial Sequence
  Guide RNA
auccauccaguaauacuuau

SEQ ID NO: 29650 - RNA, 20 nt, Artificial Sequence
  Guide RNA
auuaaaugccuacugugugc

SEQ ID NO: 29651 - RNA, 20 nt, Artificial Sequence
  Guide RNA
cacacaguaggcauuuaaua

SEQ ID NO: 29652 - RNA, 20 nt, Artificial Sequence
  Guide RNA
cacacaguaggcauuuagua

SEQ ID NO: 29653 - RNA, 20 nt, Artificial Sequence
  Guide RNA
cacaguaggcauuuaauaag

SEQ ID NO: 29654 - RNA, 20 nt, Artificial Sequence
  Guide RNA
cacaguaggcauuuaguaag

SEQ ID NO: 29655 - RNA, 20 nt, Artificial Sequence
  Guide RNA
caguaauacuuacuaaaugc

SEQ ID NO: 29656 - RNA, 20 nt, Artificial Sequence
  Guide RNA
caguaggcauuuaauaagua

SEQ ID NO: 29657 - RNA, 20 nt, Artificial Sequence
  Guide RNA
caguaggcauuuaguaagua

SEQ ID NO: 29658 - RNA, 20 nt, Artificial Sequence
  Guide RNA
cauccaguaauacuuacuaa

SEQ ID NO: 29659 - RNA, 20 nt, Artificial Sequence
  Guide RNA
cauccauccaguaauacuua

SEQ ID NO: 29660 - RNA, 20 nt, Artificial Sequence
  Guide RNA
cauuuaguaaguauuacugg

SEQ ID NO: 29661 - RNA, 20 nt, Artificial Sequence
  Guide RNA
ccaguaauacuuacuaaaug

SEQ ID NO: 29662 - RNA, 20 nt, Artificial Sequence
  Guide RNA
ccauccaguaauacuuacua

SEQ ID NO: 29663 - RNA, 20 nt, Artificial Sequence
  Guide RNA
ccauccaguaauacuuauua

SEQ ID NO: 29664 - RNA, 20 nt, Artificial Sequence
  Guide RNA
cccggcacacaguaggcauu

SEQ ID NO: 29665 - RNA, 20 nt, Artificial Sequence
  Guide RNA
ccggcacacaguaggcauuu

SEQ ID NO: 29666 - RNA, 20 nt, Artificial Sequence
  Guide RNA
cggcacacaguaggcauuua

SEQ ID NO: 29667 - RNA, 20 nt, Artificial Sequence
  Guide RNA
cuuacuaaaugccuacugug

SEQ ID NO: 29668 - RNA, 20 nt, Artificial Sequence
  Guide RNA
cuuauuaaaugccuacugug

SEQ ID NO: 29669 - RNA, 20 nt, Artificial Sequence
  Guide RNA
gcacacaguaggcauuuaau

SEQ ID NO: 29670 - RNA, 20 nt, Artificial Sequence
  Guide RNA
gcacacaguaggcauuuagu

SEQ ID NO: 29671 - RNA, 20 nt, Artificial Sequence
  Guide RNA
gcauuuaguaaguauuacug

SEQ ID NO: 29672 - RNA, 20 nt, Artificial Sequence
  Guide RNA
gcccggcacacaguaggcau

SEQ ID NO: 29673 - RNA, 20 nt, Artificial Sequence
  Guide RNA
ggcacacaguaggcauuuaa

SEQ ID NO: 29674 - RNA, 20 nt, Artificial Sequence
  Guide RNA
ggcacacaguaggcauuuag

SEQ ID NO: 29675 - RNA, 20 nt, Artificial Sequence
  Guide RNA
ggcauuuaguaaguauuacu

SEQ ID NO: 29676 - RNA, 20 nt, Artificial Sequence
  Guide RNA
guaauacuuacuaaaugccu

SEQ ID NO: 29677 - RNA, 20 nt, Artificial Sequence
  Guide RNA
guaggcauuuaguaaguauu

SEQ ID NO: 29678 - RNA, 20 nt, Artificial Sequence
  Guide RNA
gucauccauccaguaauacu

SEQ ID NO: 29679 - RNA, 20 nt, Artificial Sequence
  Guide RNA
uaauaaguauuacuggaugg

SEQ ID NO: 29680 - RNA, 20 nt, Artificial Sequence
  Guide RNA
uacuaaaugccuacugugug

SEQ ID NO: 29681 - RNA, 20 nt, Artificial Sequence
  Guide RNA
uacuuacuaaaugccuacug

SEQ ID NO: 29682 - RNA, 20 nt, Artificial Sequence
  Guide RNA
uacuuauuaaaugccuacug

SEQ ID NO: 29683 - RNA, 20 nt, Artificial Sequence
  Guide RNA
uaguaaguauuacuggaugg

SEQ ID NO: 29684 - RNA, 20 nt, Artificial Sequence
  Guide RNA
uauuaaaugccuacugugug

SEQ ID NO: 29685 - RNA, 20 nt, Artificial Sequence
  Guide RNA
ucauccauccaguaauacuu

SEQ ID NO: 29686 - RNA, 20 nt, Artificial Sequence
  Guide RNA
uccauccaguaauacuuacu

SEQ ID NO: 29687 - RNA, 20 nt, Artificial Sequence
  Guide RNA
uccauccaguaauacuuauu

SEQ ID NO: 29688 - RNA, 20 nt, Artificial Sequence
  Guide RNA
uuacuaaaugccuacugugu

SEQ ID NO: 29689 - RNA, 20 nt, Artificial Sequence
  Guide RNA
uuaguaaguauuacuggaug

SEQ ID NO: 29690 - RNA, 20 nt, Artificial Sequence
  Guide RNA
uuauuaaaugccuacugugu

SEQ ID NO: 29691 - RNA, 21 nt, Artificial Sequence
  Guide RNA
acacaguaggcauuuaauaag

SEQ ID NO: 29692 - RNA, 21 nt, Artificial Sequence
  Guide RNA
acacaguaggcauuuaguaag

SEQ ID NO: 29693 - RNA, 21 nt, Artificial Sequence
  Guide RNA
acaguaggcauuuaguaagua

SEQ ID NO: 29694 - RNA, 21 nt, Artificial Sequence
  Guide RNA
acuaaaugccuacugugugcc

SEQ ID NO: 29695 - RNA, 21 nt, Artificial Sequence
  Guide RNA
acuuacuaaaugccuacugug

SEQ ID NO: 29696 - RNA, 21 nt, Artificial Sequence
  Guide RNA
acuuauuaaaugccuacugug

SEQ ID NO: 29697 - RNA, 21 nt, Artificial Sequence
  Guide RNA
aguaaguauuacuggauggau

SEQ ID NO: 29698 - RNA, 21 nt, Artificial Sequence
  Guide RNA
agucauccauccaguaauacu

SEQ ID NO: 29699 - RNA, 21 nt, Artificial Sequence
  Guide RNA
auacuuacuaaaugccuacug

SEQ ID NO: 29700 - RNA, 21 nt, Artificial Sequence
  Guide RNA
auccauccaguaauacuuacu

SEQ ID NO: 29701 - RNA, 21 nt, Artificial Sequence
  Guide RNA
auuaaaugccuacugugugcc

SEQ ID NO: 29702 - RNA, 21 nt, Artificial Sequence
  Guide RNA
cacacaguaggcauuuaauaa

SEQ ID NO: 29703 - RNA, 21 nt, Artificial Sequence
  Guide RNA
cacacaguaggcauuuaguaa

SEQ ID NO: 29704 - RNA, 21 nt, Artificial Sequence
  Guide RNA
cacaguaggcauuuaauaagu

SEQ ID NO: 29705 - RNA, 21 nt, Artificial Sequence
  Guide RNA
cacaguaggcauuuaguaagu

SEQ ID NO: 29706 - RNA, 21 nt, Artificial Sequence
  Guide RNA
caguaauacuuacuaaaugcc

SEQ ID NO: 29707 - RNA, 21 nt, Artificial Sequence
  Guide RNA
caguaggcauuuaguaaguau

SEQ ID NO: 29708 - RNA, 21 nt, Artificial Sequence
  Guide RNA
cagucauccauccaguaauac

SEQ ID NO: 29709 - RNA, 21 nt, Artificial Sequence
  Guide RNA
cauccauccaguaauacuuac

SEQ ID NO: 29710 - RNA, 21 nt, Artificial Sequence
  Guide RNA
cauccauccaguaauacuuau

SEQ ID NO: 29711 - RNA, 21 nt, Artificial Sequence
  Guide RNA
ccaguaauacuuacuaaaugc

SEQ ID NO: 29712 - RNA, 21 nt, Artificial Sequence
  Guide RNA
ccauccaguaauacuuacuaa

SEQ ID NO: 29713 - RNA, 21 nt, Artificial Sequence
  Guide RNA
cccggcacacaguaggcauuu

SEQ ID NO: 29714 - RNA, 21 nt, Artificial Sequence
  Guide RNA
ccggcacacaguaggcauuua

SEQ ID NO: 29715 - RNA, 21 nt, Artificial Sequence
  Guide RNA
cggcacacaguaggcauuuaa

SEQ ID NO: 29716 - RNA, 21 nt, Artificial Sequence
  Guide RNA
cggcacacaguaggcauuuag

SEQ ID NO: 29717 - RNA, 21 nt, Artificial Sequence
  Guide RNA
cuuacuaaaugccuacugugu

SEQ ID NO: 29718 - RNA, 21 nt, Artificial Sequence
  Guide RNA
cuuauuaaaugccuacugugu

SEQ ID NO: 29719 - RNA, 21 nt, Artificial Sequence
  Guide RNA
gcacacaguaggcauuuaaua

SEQ ID NO: 29720 - RNA, 21 nt, Artificial Sequence
  Guide RNA
gcacacaguaggcauuuagua

SEQ ID NO: 29721 - RNA, 21 nt, Artificial Sequence
  Guide RNA
gcauuuaguaaguauuacugg

SEQ ID NO: 29722 - RNA, 21 nt, Artificial Sequence
  Guide RNA
gcccggcacacaguaggcauu

SEQ ID NO: 29723 - RNA, 21 nt, Artificial Sequence
  Guide RNA
ggcacacaguaggcauuuaau

SEQ ID NO: 29724 - RNA, 21 nt, Artificial Sequence
  Guide RNA
ggcacacaguaggcauuuagu

SEQ ID NO: 29725 - RNA, 21 nt, Artificial Sequence
  Guide RNA
ggcauuuaguaaguauuacug

SEQ ID NO: 29726 - RNA, 21 nt, Artificial Sequence
  Guide RNA
gucauccauccaguaauacuu

SEQ ID NO: 29727 - RNA, 21 nt, Artificial Sequence
  Guide RNA
uacuaaaugccuacugugugc

SEQ ID NO: 29728 - RNA, 21 nt, Artificial Sequence
  Guide RNA
uacuuacuaaaugccuacugu

SEQ ID NO: 29729 - RNA, 21 nt, Artificial Sequence
  Guide RNA
uaguaaguauuacuggaugga

SEQ ID NO: 29730 - RNA, 21 nt, Artificial Sequence
  Guide RNA
uauuaaaugccuacugugugc

SEQ ID NO: 29731 - RNA, 21 nt, Artificial Sequence
  Guide RNA
ucauccauccaguaauacuua

SEQ ID NO: 29732 - RNA, 21 nt, Artificial Sequence
  Guide RNA
uccauccaguaauacuuacua

SEQ ID NO: 29733 - RNA, 21 nt, Artificial Sequence
  Guide RNA
ugcccggcacacaguaggcau

SEQ ID NO: 29734 - RNA, 21 nt, Artificial Sequence
  Guide RNA
uuacuaaaugccuacugugug

SEQ ID NO: 29735 - RNA, 21 nt, Artificial Sequence
  Guide RNA
uuaguaaguauuacuggaugg

SEQ ID NO: 29736 - RNA, 21 nt, Artificial Sequence
  Guide RNA
uuauuaaaugccuacugugug

SEQ ID NO: 29737 - RNA, 22 nt, Artificial Sequence
  Guide RNA
aauaaguauuacuggauggaug

SEQ ID NO: 29738 - RNA, 22 nt, Artificial Sequence
  Guide RNA
aauacuuacuaaaugccuacug

SEQ ID NO: 29739 - RNA, 22 nt, Artificial Sequence
  Guide RNA
acacaguaggcauuuaauaagu

SEQ ID NO: 29740 - RNA, 22 nt, Artificial Sequence
  Guide RNA
acacaguaggcauuuaguaagu

SEQ ID NO: 29741 - RNA, 22 nt, Artificial Sequence
  Guide RNA
acaguaggcauuuaguaaguau

SEQ ID NO: 29742 - RNA, 22 nt, Artificial Sequence
  Guide RNA
acuaaaugccuacugugugccg

SEQ ID NO: 29743 - RNA, 22 nt, Artificial Sequence
  Guide RNA
acuuacuaaaugccuacugugu

SEQ ID NO: 29744 - RNA, 22 nt, Artificial Sequence
  Guide RNA
acuuauuaaaugccuacugugu

SEQ ID NO: 29745 - RNA, 22 nt, Artificial Sequence
  Guide RNA
aggcauuuaguaaguauuacug

SEQ ID NO: 29746 - RNA, 22 nt, Artificial Sequence
  Guide RNA
aguaaguauuacuggauggaug

SEQ ID NO: 29747 - RNA, 22 nt, Artificial Sequence
  Guide RNA
agucauccauccaguaauacuu

SEQ ID NO: 29748 - RNA, 22 nt, Artificial Sequence
  Guide RNA
auacuuacuaaaugccuacugu

SEQ ID NO: 29749 - RNA, 22 nt, Artificial Sequence
  Guide RNA
auccauccaguaauacuuacua

SEQ ID NO: 29750 - RNA, 22 nt, Artificial Sequence
  Guide RNA
auuaaaugccuacugugugccg

SEQ ID NO: 29751 - RNA, 22 nt, Artificial Sequence
  Guide RNA
cacacaguaggcauuuaauaag

SEQ ID NO: 29752 - RNA, 22 nt, Artificial Sequence
  Guide RNA
cacacaguaggcauuuaguaag

SEQ ID NO: 29753 - RNA, 22 nt, Artificial Sequence
  Guide RNA
cacaguaggcauuuaauaagua

SEQ ID NO: 29754 - RNA, 22 nt, Artificial Sequence
  Guide RNA
cacaguaggcauuuaguaagua

SEQ ID NO: 29755 - RNA, 22 nt, Artificial Sequence
  Guide RNA
caguaauacuuacuaaaugccu

SEQ ID NO: 29756 - RNA, 22 nt, Artificial Sequence
  Guide RNA
caguaggcauuuaguaaguauu

SEQ ID NO: 29757 - RNA, 22 nt, Artificial Sequence
  Guide RNA
cagucauccauccaguaauacu

SEQ ID NO: 29758 - RNA, 22 nt, Artificial Sequence
  Guide RNA
cauccauccaguaauacuuacu

SEQ ID NO: 29759 - RNA, 22 nt, Artificial Sequence
  Guide RNA
cauccauccaguaauacuuauu

SEQ ID NO: 29760 - RNA, 22 nt, Artificial Sequence
  Guide RNA
ccaguaauacuuacuaaaugcc

SEQ ID NO: 29761 - RNA, 22 nt, Artificial Sequence
  Guide RNA
ccaguaauacuuauuaaaugcc

SEQ ID NO: 29762 - RNA, 22 nt, Artificial Sequence
  Guide RNA
ccauccaguaauacuuacuaaa

SEQ ID NO: 29763 - RNA, 22 nt, Artificial Sequence
  Guide RNA
cccggcacacaguaggcauuua

SEQ ID NO: 29764 - RNA, 22 nt, Artificial Sequence
  Guide RNA
ccggcacacaguaggcauuuaa

SEQ ID NO: 29765 - RNA, 22 nt, Artificial Sequence
  Guide RNA
ccggcacacaguaggcauuuag

SEQ ID NO: 29766 - RNA, 22 nt, Artificial Sequence
  Guide RNA
cggcacacaguaggcauuuaau

SEQ ID NO: 29767 - RNA, 22 nt, Artificial Sequence
  Guide RNA
cggcacacaguaggcauuuagu

SEQ ID NO: 29768 - RNA, 22 nt, Artificial Sequence
  Guide RNA
cuuacuaaaugccuacugugug

SEQ ID NO: 29769 - RNA, 22 nt, Artificial Sequence
  Guide RNA
cuuauuaaaugccuacugugug

SEQ ID NO: 29770 - RNA, 22 nt, Artificial Sequence
  Guide RNA
gcacacaguaggcauuuaauaa

SEQ ID NO: 29771 - RNA, 22 nt, Artificial Sequence
  Guide RNA
gcacacaguaggcauuuaguaa

SEQ ID NO: 29772 - RNA, 22 nt, Artificial Sequence
  Guide RNA
gcauuuaguaaguauuacugga

SEQ ID NO: 29773 - RNA, 22 nt, Artificial Sequence
  Guide RNA
gcccggcacacaguaggcauuu

SEQ ID NO: 29774 - RNA, 22 nt, Artificial Sequence
  Guide RNA
ggcacacaguaggcauuuaaua

SEQ ID NO: 29775 - RNA, 22 nt, Artificial Sequence
  Guide RNA
ggcacacaguaggcauuuagua

SEQ ID NO: 29776 - RNA, 22 nt, Artificial Sequence
  Guide RNA
ggcauuuaauaaguauuacugg

SEQ ID NO: 29777 - RNA, 22 nt, Artificial Sequence
  Guide RNA
ggcauuuaguaaguauuacugg

SEQ ID NO: 29778 - RNA, 22 nt, Artificial Sequence
  Guide RNA
guaauacuuacuaaaugccuac

SEQ ID NO: 29779 - RNA, 22 nt, Artificial Sequence
  Guide RNA
guaggcauuuaguaaguauuac

SEQ ID NO: 29780 - RNA, 22 nt, Artificial Sequence
  Guide RNA
gucauccauccaguaauacuua

SEQ ID NO: 29781 - RNA, 22 nt, Artificial Sequence
  Guide RNA
gugcccggcacacaguaggcau

SEQ ID NO: 29782 - RNA, 22 nt, Artificial Sequence
  Guide RNA
uacuaaaugccuacugugugcc

SEQ ID NO: 29783 - RNA, 22 nt, Artificial Sequence
  Guide RNA
uacuuacuaaaugccuacugug

SEQ ID NO: 29784 - RNA, 22 nt, Artificial Sequence
  Guide RNA
uacuuauuaaaugccuacugug

SEQ ID NO: 29785 - RNA, 22 nt, Artificial Sequence
  Guide RNA
uaguaaguauuacuggauggau

SEQ ID NO: 29786 - RNA, 22 nt, Artificial Sequence
  Guide RNA
uauuaaaugccuacugugugcc

SEQ ID NO: 29787 - RNA, 22 nt, Artificial Sequence
  Guide RNA
ucagucauccauccaguaauac

SEQ ID NO: 29788 - RNA, 22 nt, Artificial Sequence
  Guide RNA
ucauccauccaguaauacuuac

SEQ ID NO: 29789 - RNA, 22 nt, Artificial Sequence
  Guide RNA
ucauccauccaguaauacuuau

SEQ ID NO: 29790 - RNA, 22 nt, Artificial Sequence
  Guide RNA
uccaguaauacuuacuaaaugc

SEQ ID NO: 29791 - RNA, 22 nt, Artificial Sequence
  Guide RNA
uccauccaguaauacuuacuaa

SEQ ID NO: 29792 - RNA, 22 nt, Artificial Sequence
  Guide RNA
ugcccggcacacaguaggcauu

SEQ ID NO: 29793 - RNA, 22 nt, Artificial Sequence
  Guide RNA
uuacuaaaugccuacugugugc

SEQ ID NO: 29794 - RNA, 22 nt, Artificial Sequence
  Guide RNA
uuaguaaguauuacuggaugga

SEQ ID NO: 29795 - RNA, 22 nt, Artificial Sequence
  Guide RNA
uuauuaaaugccuacugugugc

SEQ ID NO: 29796 - RNA, 22 nt, Artificial Sequence
  Guide RNA
uuuaguaaguauuacuggaugg

SEQ ID NO: 29797 - RNA, 20 nt, Artificial Sequence
  Guide RNA
aaacgagaggaagaagcccg

SEQ ID NO: 29798 - RNA, 20 nt, Artificial Sequence
  Guide RNA
aaacgagaggaagacgcccg

SEQ ID NO: 29799 - RNA, 20 nt, Artificial Sequence
  Guide RNA
aaccccgggcgucuuccucu

SEQ ID NO: 29800 - RNA, 20 nt, Artificial Sequence
  Guide RNA
aaccccgggcuucuuccucu

SEQ ID NO: 29801 - RNA, 20 nt, Artificial Sequence
  Guide RNA
aacgagaggaagaagcccgg

SEQ ID NO: 29802 - RNA, 20 nt, Artificial Sequence
  Guide RNA
aacgagaggaagacgcccgg

SEQ ID NO: 29803 - RNA, 20 nt, Artificial Sequence
  Guide RNA
aagaagcccgggguuauuag

SEQ ID NO: 29804 - RNA, 20 nt, Artificial Sequence
  Guide RNA
aagacgcccgggguuauuag

SEQ ID NO: 29805 - RNA, 20 nt, Artificial Sequence
  Guide RNA
aagcccgggguuauuagcua

SEQ ID NO: 29806 - RNA, 20 nt, Artificial Sequence
  Guide RNA
aagugagagaaacgagagga

SEQ ID NO: 29807 - RNA, 20 nt, Artificial Sequence
  Guide RNA
aauaaccccgggcgucuucc

SEQ ID NO: 29808 - RNA, 20 nt, Artificial Sequence
  Guide RNA
aauaaccccgggcuucuucc

SEQ ID NO: 29809 - RNA, 20 nt, Artificial Sequence
  Guide RNA
accccgggcgucuuccucuc

SEQ ID NO: 29810 - RNA, 20 nt, Artificial Sequence
  Guide RNA
accccgggcuucuuccucuc

SEQ ID NO: 29811 - RNA, 20 nt, Artificial Sequence
  Guide RNA
acgagaggaagaagcccggg

SEQ ID NO: 29812 - RNA, 20 nt, Artificial Sequence
  Guide RNA
acgagaggaagacgcccggg

SEQ ID NO: 29813 - RNA, 20 nt, Artificial Sequence
  Guide RNA
acgcccgggguuauuagcua

SEQ ID NO: 29814 - RNA, 20 nt, Artificial Sequence
  Guide RNA
agaaacgagaggaagaagcc

SEQ ID NO: 29815 - RNA, 20 nt, Artificial Sequence
  Guide RNA
agaaacgagaggaagacgcc

SEQ ID NO: 29816 - RNA, 20 nt, Artificial Sequence
  Guide RNA
agaagcccgggguuauuagc

SEQ ID NO: 29817 - RNA, 20 nt, Artificial Sequence
  Guide RNA
agacgcccgggguuauuagc

SEQ ID NO: 29818 - RNA, 20 nt, Artificial Sequence
  Guide RNA
agagaaacgagaggaagaag

SEQ ID NO: 29819 - RNA, 20 nt, Artificial Sequence
  Guide RNA
agagaaacgagaggaagacg

SEQ ID NO: 29820 - RNA, 20 nt, Artificial Sequence
  Guide RNA
agaggaagaagcccgggguu

SEQ ID NO: 29821 - RNA, 20 nt, Artificial Sequence
  Guide RNA
agaggaagacgcccgggguu

SEQ ID NO: 29822 - RNA, 20 nt, Artificial Sequence
  Guide RNA
agcuaauaaccccgggcguc

SEQ ID NO: 29823 - RNA, 20 nt, Artificial Sequence
  Guide RNA
agcuaauaaccccgggcuuc

SEQ ID NO: 29824 - RNA, 20 nt, Artificial Sequence
  Guide RNA
aggaagaagcccgggguuau

SEQ ID NO: 29825 - RNA, 20 nt, Artificial Sequence
  Guide RNA
aggaagacgcccgggguuau

SEQ ID NO: 29826 - RNA, 20 nt, Artificial Sequence
  Guide RNA
agugagagaaacgagaggaa

SEQ ID NO: 29827 - RNA, 20 nt, Artificial Sequence
  Guide RNA
auaaccccgggcgucuuccu

SEQ ID NO: 29828 - RNA, 20 nt, Artificial Sequence
  Guide RNA
auaaccccgggcuucuuccu

SEQ ID NO: 29829 - RNA, 20 nt, Artificial Sequence
  Guide RNA
ccccgggcgucuuccucucg

SEQ ID NO: 29830 - RNA, 20 nt, Artificial Sequence
  Guide RNA
ccccgggcuucuuccucucg

SEQ ID NO: 29831 - RNA, 20 nt, Artificial Sequence
  Guide RNA
cccgggcgucuuccucucgu

SEQ ID NO: 29832 - RNA, 20 nt, Artificial Sequence
  Guide RNA
cccgggcuucuuccucucgu

SEQ ID NO: 29833 - RNA, 20 nt, Artificial Sequence
  Guide RNA
ccgggcgucuuccucucguu

SEQ ID NO: 29834 - RNA, 20 nt, Artificial Sequence
  Guide RNA
ccgggcuucuuccucucguu

SEQ ID NO: 29835 - RNA, 20 nt, Artificial Sequence
  Guide RNA
cgagaggaagaagcccgggg

SEQ ID NO: 29836 - RNA, 20 nt, Artificial Sequence
  Guide RNA
cgagaggaagacgcccgggg

SEQ ID NO: 29837 - RNA, 20 nt, Artificial Sequence
  Guide RNA
cgggcgucuuccucucguuu

SEQ ID NO: 29838 - RNA, 20 nt, Artificial Sequence
  Guide RNA
cgggcuucuuccucucguuu

SEQ ID NO: 29839 - RNA, 20 nt, Artificial Sequence
  Guide RNA
cgucuuccucucguuucucu

SEQ ID NO: 29840 - RNA, 20 nt, Artificial Sequence
  Guide RNA
cuaauaaccccgggcgucuu

SEQ ID NO: 29841 - RNA, 20 nt, Artificial Sequence
  Guide RNA
cuaauaaccccgggcuucuu

SEQ ID NO: 29842 - RNA, 20 nt, Artificial Sequence
  Guide RNA
cuucuuccucucguuucucu

SEQ ID NO: 29843 - RNA, 20 nt, Artificial Sequence
  Guide RNA
gaaacgagaggaagaagccc

SEQ ID NO: 29844 - RNA, 20 nt, Artificial Sequence
  Guide RNA
gaaacgagaggaagacgccc

SEQ ID NO: 29845 - RNA, 20 nt, Artificial Sequence
  Guide RNA
gaagaagcccgggguuauua

SEQ ID NO: 29846 - RNA, 20 nt, Artificial Sequence
  Guide RNA
gaagacgcccgggguuauua

SEQ ID NO: 29847 - RNA, 20 nt, Artificial Sequence
  Guide RNA
gaagcccgggguuauuagcu

SEQ ID NO: 29848 - RNA, 20 nt, Artificial Sequence
  Guide RNA
gacgcccgggguuauuagcu

SEQ ID NO: 29849 - RNA, 20 nt, Artificial Sequence
  Guide RNA
gagaaacgagaggaagaagc

SEQ ID NO: 29850 - RNA, 20 nt, Artificial Sequence
  Guide RNA
gagaaacgagaggaagacgc

SEQ ID NO: 29851 - RNA, 20 nt, Artificial Sequence
  Guide RNA
gagagaaacgagaggaagaa

SEQ ID NO: 29852 - RNA, 20 nt, Artificial Sequence
  Guide RNA
gagagaaacgagaggaagac

SEQ ID NO: 29853 - RNA, 20 nt, Artificial Sequence
  Guide RNA
gagaggaagaagcccggggu

SEQ ID NO: 29854 - RNA, 20 nt, Artificial Sequence
  Guide RNA
gagaggaagacgcccggggu

SEQ ID NO: 29855 - RNA, 20 nt, Artificial Sequence
  Guide RNA
gaggaagaagcccgggguua

SEQ ID NO: 29856 - RNA, 20 nt, Artificial Sequence
  Guide RNA
gaggaagacgcccgggguua

SEQ ID NO: 29857 - RNA, 20 nt, Artificial Sequence
  Guide RNA
gcgucuuccucucguuucuc

SEQ ID NO: 29858 - RNA, 20 nt, Artificial Sequence
  Guide RNA
gcuaauaaccccgggcgucu

SEQ ID NO: 29859 - RNA, 20 nt, Artificial Sequence
  Guide RNA
gcuaauaaccccgggcuucu

SEQ ID NO: 29860 - RNA, 20 nt, Artificial Sequence
  Guide RNA
gcuucuuccucucguuucuc

SEQ ID NO: 29861 - RNA, 20 nt, Artificial Sequence
  Guide RNA
ggaagaagcccgggguuauu

SEQ ID NO: 29862 - RNA, 20 nt, Artificial Sequence
  Guide RNA
ggaagacgcccgggguuauu

SEQ ID NO: 29863 - RNA, 20 nt, Artificial Sequence
  Guide RNA
ggcgucuuccucucguuucu

SEQ ID NO: 29864 - RNA, 20 nt, Artificial Sequence
  Guide RNA
ggcuucuuccucucguuucu

SEQ ID NO: 29865 - RNA, 20 nt, Artificial Sequence
  Guide RNA
gggcgucuuccucucguuuc

SEQ ID NO: 29866 - RNA, 20 nt, Artificial Sequence
  Guide RNA
gggcuucuuccucucguuuc

SEQ ID NO: 29867 - RNA, 20 nt, Artificial Sequence
  Guide RNA
guagcuaauaaccccgggcg

SEQ ID NO: 29868 - RNA, 20 nt, Artificial Sequence
  Guide RNA
guagcuaauaaccccgggcu

SEQ ID NO: 29869 - RNA, 20 nt, Artificial Sequence
  Guide RNA
gugagagaaacgagaggaag

SEQ ID NO: 29870 - RNA, 20 nt, Artificial Sequence
  Guide RNA
guguagcuaauaaccccggg

SEQ ID NO: 29871 - RNA, 20 nt, Artificial Sequence
  Guide RNA
uaaccccgggcgucuuccuc

SEQ ID NO: 29872 - RNA, 20 nt, Artificial Sequence
  Guide RNA
uaaccccgggcuucuuccuc

SEQ ID NO: 29873 - RNA, 20 nt, Artificial Sequence
  Guide RNA
uaauaaccccgggcgucuuc

SEQ ID NO: 29874 - RNA, 20 nt, Artificial Sequence
  Guide RNA
uaauaaccccgggcuucuuc

SEQ ID NO: 29875 - RNA, 20 nt, Artificial Sequence
  Guide RNA
uagcuaauaaccccgggcgu

SEQ ID NO: 29876 - RNA, 20 nt, Artificial Sequence
  Guide RNA
uagcuaauaaccccgggcuu

SEQ ID NO: 29877 - RNA, 20 nt, Artificial Sequence
  Guide RNA
ugagagaaacgagaggaaga

SEQ ID NO: 29878 - RNA, 20 nt, Artificial Sequence
  Guide RNA
uguagcuaauaaccccgggc

SEQ ID NO: 29879 - RNA, 20 nt, Artificial Sequence
  Guide RNA
uguguagcuaauaaccccgg

SEQ ID NO: 29880 - RNA, 20 nt, Artificial Sequence
  Guide RNA
uuguguagcuaauaaccccg

SEQ ID NO: 29881 - RNA, 21 nt, Artificial Sequence
  Guide RNA
aaacgagaggaagaagcccgg

SEQ ID NO: 29882 - RNA, 21 nt, Artificial Sequence
  Guide RNA
aaacgagaggaagacgcccgg

SEQ ID NO: 29883 - RNA, 21 nt, Artificial Sequence
  Guide RNA
aaccccgggcgucuuccucuc

SEQ ID NO: 29884 - RNA, 21 nt, Artificial Sequence
  Guide RNA
aaccccgggcuucuuccucuc

SEQ ID NO: 29885 - RNA, 21 nt, Artificial Sequence
  Guide RNA
aacgagaggaagaagcccggg

SEQ ID NO: 29886 - RNA, 21 nt, Artificial Sequence
  Guide RNA
aacgagaggaagacgcccggg

SEQ ID NO: 29887 - RNA, 21 nt, Artificial Sequence
  Guide RNA
aagaagcccgggguuauuagc

SEQ ID NO: 29888 - RNA, 21 nt, Artificial Sequence
  Guide RNA
aagacgcccgggguuauuagc

SEQ ID NO: 29889 - RNA, 21 nt, Artificial Sequence
  Guide RNA
aagcccgggguuauuagcuac

SEQ ID NO: 29890 - RNA, 21 nt, Artificial Sequence
  Guide RNA
aagugagagaaacgagaggaa

SEQ ID NO: 29891 - RNA, 21 nt, Artificial Sequence
  Guide RNA
aauaaccccgggcgucuuccu

SEQ ID NO: 29892 - RNA, 21 nt, Artificial Sequence
  Guide RNA
aauaaccccgggcuucuuccu

SEQ ID NO: 29893 - RNA, 21 nt, Artificial Sequence
  Guide RNA
accccgggcgucuuccucucg

SEQ ID NO: 29894 - RNA, 21 nt, Artificial Sequence
  Guide RNA
accccgggcuucuuccucucg

SEQ ID NO: 29895 - RNA, 21 nt, Artificial Sequence
  Guide RNA
acgagaggaagaagcccgggg

SEQ ID NO: 29896 - RNA, 21 nt, Artificial Sequence
  Guide RNA
acgagaggaagacgcccgggg

SEQ ID NO: 29897 - RNA, 21 nt, Artificial Sequence
  Guide RNA
acgcccgggguuauuagcuac

SEQ ID NO: 29898 - RNA, 21 nt, Artificial Sequence
  Guide RNA
agaaacgagaggaagaagccc

SEQ ID NO: 29899 - RNA, 21 nt, Artificial Sequence
  Guide RNA
agaaacgagaggaagacgccc

SEQ ID NO: 29900 - RNA, 21 nt, Artificial Sequence
  Guide RNA
agaagcccgggguuauuagcu

SEQ ID NO: 29901 - RNA, 21 nt, Artificial Sequence
  Guide RNA
agacgcccgggguuauuagcu

SEQ ID NO: 29902 - RNA, 21 nt, Artificial Sequence
  Guide RNA
agagaaacgagaggaagaagc

SEQ ID NO: 29903 - RNA, 21 nt, Artificial Sequence
  Guide RNA
agagaaacgagaggaagacgc

SEQ ID NO: 29904 - RNA, 21 nt, Artificial Sequence
  Guide RNA
agaggaagaagcccgggguua

SEQ ID NO: 29905 - RNA, 21 nt, Artificial Sequence
  Guide RNA
agaggaagacgcccgggguua

SEQ ID NO: 29906 - RNA, 21 nt, Artificial Sequence
  Guide RNA
agcuaauaaccccgggcgucu

SEQ ID NO: 29907 - RNA, 21 nt, Artificial Sequence
  Guide RNA
agcuaauaaccccgggcuucu

SEQ ID NO: 29908 - RNA, 21 nt, Artificial Sequence
  Guide RNA
aggaagaagcccgggguuauu

SEQ ID NO: 29909 - RNA, 21 nt, Artificial Sequence
  Guide RNA
aggaagacgcccgggguuauu

SEQ ID NO: 29910 - RNA, 21 nt, Artificial Sequence
  Guide RNA
agugagagaaacgagaggaag

SEQ ID NO: 29911 - RNA, 21 nt, Artificial Sequence
  Guide RNA
auaaccccgggcgucuuccuc

SEQ ID NO: 29912 - RNA, 21 nt, Artificial Sequence
  Guide RNA
auaaccccgggcuucuuccuc

SEQ ID NO: 29913 - RNA, 21 nt, Artificial Sequence
  Guide RNA
caagugagagaaacgagagga

SEQ ID NO: 29914 - RNA, 21 nt, Artificial Sequence
  Guide RNA
ccccgggcgucuuccucucgu

SEQ ID NO: 29915 - RNA, 21 nt, Artificial Sequence
  Guide RNA
ccccgggcuucuuccucucgu

SEQ ID NO: 29916 - RNA, 21 nt, Artificial Sequence
  Guide RNA
cccgggcgucuuccucucguu

SEQ ID NO: 29917 - RNA, 21 nt, Artificial Sequence
  Guide RNA
cccgggcuucuuccucucguu

SEQ ID NO: 29918 - RNA, 21 nt, Artificial Sequence
  Guide RNA
ccgggcgucuuccucucguuu

SEQ ID NO: 29919 - RNA, 21 nt, Artificial Sequence
  Guide RNA
ccgggcuucuuccucucguuu

SEQ ID NO: 29920 - RNA, 21 nt, Artificial Sequence
  Guide RNA
cgagaggaagaagcccggggu

SEQ ID NO: 29921 - RNA, 21 nt, Artificial Sequence
  Guide RNA
cgagaggaagacgcccggggu

SEQ ID NO: 29922 - RNA, 21 nt, Artificial Sequence
  Guide RNA
cgggcgucuuccucucguuuc

SEQ ID NO: 29923 - RNA, 21 nt, Artificial Sequence
  Guide RNA
cgggcuucuuccucucguuuc

SEQ ID NO: 29924 - RNA, 21 nt, Artificial Sequence
  Guide RNA
cgucuuccucucguuucucuc

SEQ ID NO: 29925 - RNA, 21 nt, Artificial Sequence
  Guide RNA
cuaauaaccccgggcgucuuc

SEQ ID NO: 29926 - RNA, 21 nt, Artificial Sequence
  Guide RNA
cuaauaaccccgggcuucuuc

SEQ ID NO: 29927 - RNA, 21 nt, Artificial Sequence
  Guide RNA
cuucuuccucucguuucucuc

SEQ ID NO: 29928 - RNA, 21 nt, Artificial Sequence
  Guide RNA
gaaacgagaggaagaagcccg

SEQ ID NO: 29929 - RNA, 21 nt, Artificial Sequence
  Guide RNA
gaaacgagaggaagacgcccg

SEQ ID NO: 29930 - RNA, 21 nt, Artificial Sequence
  Guide RNA
gaagaagcccgggguuauuag

SEQ ID NO: 29931 - RNA, 21 nt, Artificial Sequence
  Guide RNA
gaagacgcccgggguuauuag

SEQ ID NO: 29932 - RNA, 21 nt, Artificial Sequence
  Guide RNA
gaagcccgggguuauuagcua

SEQ ID NO: 29933 - RNA, 21 nt, Artificial Sequence
  Guide RNA
gacgcccgggguuauuagcua

SEQ ID NO: 29934 - RNA, 21 nt, Artificial Sequence
  Guide RNA
gagaaacgagaggaagaagcc

SEQ ID NO: 29935 - RNA, 21 nt, Artificial Sequence
  Guide RNA
gagaaacgagaggaagacgcc

SEQ ID NO: 29936 - RNA, 21 nt, Artificial Sequence
  Guide RNA
gagagaaacgagaggaagaag

SEQ ID NO: 29937 - RNA, 21 nt, Artificial Sequence
  Guide RNA
gagagaaacgagaggaagacg

SEQ ID NO: 29938 - RNA, 21 nt, Artificial Sequence
  Guide RNA
gagaggaagaagcccgggguu

SEQ ID NO: 29939 - RNA, 21 nt, Artificial Sequence
  Guide RNA
gagaggaagacgcccgggguu

SEQ ID NO: 29940 - RNA, 21 nt, Artificial Sequence
  Guide RNA
gaggaagaagcccgggguuau

SEQ ID NO: 29941 - RNA, 21 nt, Artificial Sequence
  Guide RNA
gaggaagacgcccgggguuau

SEQ ID NO: 29942 - RNA, 21 nt, Artificial Sequence
  Guide RNA
gcgucuuccucucguuucucu

SEQ ID NO: 29943 - RNA, 21 nt, Artificial Sequence
  Guide RNA
gcuaauaaccccgggcgucuu

SEQ ID NO: 29944 - RNA, 21 nt, Artificial Sequence
  Guide RNA
gcuaauaaccccgggcuucuu

SEQ ID NO: 29945 - RNA, 21 nt, Artificial Sequence
  Guide RNA
gcuucuuccucucguuucucu

SEQ ID NO: 29946 - RNA, 21 nt, Artificial Sequence
  Guide RNA
ggaagaagcccgggguuauua

SEQ ID NO: 29947 - RNA, 21 nt, Artificial Sequence
  Guide RNA
ggaagacgcccgggguuauua

SEQ ID NO: 29948 - RNA, 21 nt, Artificial Sequence
  Guide RNA
ggcgucuuccucucguuucuc

SEQ ID NO: 29949 - RNA, 21 nt, Artificial Sequence
  Guide RNA
ggcuucuuccucucguuucuc

SEQ ID NO: 29950 - RNA, 21 nt, Artificial Sequence
  Guide RNA
gggcgucuuccucucguuucu

SEQ ID NO: 29951 - RNA, 21 nt, Artificial Sequence
  Guide RNA
gggcuucuuccucucguuucu

SEQ ID NO: 29952 - RNA, 21 nt, Artificial Sequence
  Guide RNA
guagcuaauaaccccgggcgu

SEQ ID NO: 29953 - RNA, 21 nt, Artificial Sequence
  Guide RNA
guagcuaauaaccccgggcuu

SEQ ID NO: 29954 - RNA, 21 nt, Artificial Sequence
  Guide RNA
gugagagaaacgagaggaaga

SEQ ID NO: 29955 - RNA, 21 nt, Artificial Sequence
  Guide RNA
guguagcuaauaaccccgggc

SEQ ID NO: 29956 - RNA, 21 nt, Artificial Sequence
  Guide RNA
uaaccccgggcgucuuccucu

SEQ ID NO: 29957 - RNA, 21 nt, Artificial Sequence
  Guide RNA
uaaccccgggcuucuuccucu

SEQ ID NO: 29958 - RNA, 21 nt, Artificial Sequence
  Guide RNA
uaauaaccccgggcgucuucc

SEQ ID NO: 29959 - RNA, 21 nt, Artificial Sequence
  Guide RNA
uaauaaccccgggcuucuucc

SEQ ID NO: 29960 - RNA, 21 nt, Artificial Sequence
  Guide RNA
uagcuaauaaccccgggcguc

SEQ ID NO: 29961 - RNA, 21 nt, Artificial Sequence
  Guide RNA
uagcuaauaaccccgggcuuc

SEQ ID NO: 29962 - RNA, 21 nt, Artificial Sequence
  Guide RNA
ugagagaaacgagaggaagaa

SEQ ID NO: 29963 - RNA, 21 nt, Artificial Sequence
  Guide RNA
ugagagaaacgagaggaagac

SEQ ID NO: 29964 - RNA, 21 nt, Artificial Sequence
  Guide RNA
uguagcuaauaaccccgggcg

SEQ ID NO: 29965 - RNA, 21 nt, Artificial Sequence
  Guide RNA
uguagcuaauaaccccgggcu

SEQ ID NO: 29966 - RNA, 21 nt, Artificial Sequence
  Guide RNA
uguguagcuaauaaccccggg

SEQ ID NO: 29967 - RNA, 21 nt, Artificial Sequence
  Guide RNA
uuguguagcuaauaaccccgg

SEQ ID NO: 29968 - RNA, 21 nt, Artificial Sequence
  Guide RNA
uuuguguagcuaauaaccccg

SEQ ID NO: 29969 - RNA, 22 nt, Artificial Sequence
  Guide RNA
aaacgagaggaagaagcccggg

SEQ ID NO: 29970 - RNA, 22 nt, Artificial Sequence
  Guide RNA
aaacgagaggaagacgcccggg

SEQ ID NO: 29971 - RNA, 22 nt, Artificial Sequence
  Guide RNA
aaccccgggcgucuuccucucg

SEQ ID NO: 29972 - RNA, 22 nt, Artificial Sequence
  Guide RNA
aaccccgggcuucuuccucucg

SEQ ID NO: 29973 - RNA, 22 nt, Artificial Sequence
  Guide RNA
aacgagaggaagaagcccgggg

SEQ ID NO: 29974 - RNA, 22 nt, Artificial Sequence
  Guide RNA
aacgagaggaagacgcccgggg

SEQ ID NO: 29975 - RNA, 22 nt, Artificial Sequence
  Guide RNA
aagaagcccgggguuauuagcu

SEQ ID NO: 29976 - RNA, 22 nt, Artificial Sequence
  Guide RNA
aagacgcccgggguuauuagcu

SEQ ID NO: 29977 - RNA, 22 nt, Artificial Sequence
  Guide RNA
aagcccgggguuauuagcuaca

SEQ ID NO: 29978 - RNA, 22 nt, Artificial Sequence
  Guide RNA
aagugagagaaacgagaggaag

SEQ ID NO: 29979 - RNA, 22 nt, Artificial Sequence
  Guide RNA
aauaaccccgggcgucuuccuc

SEQ ID NO: 29980 - RNA, 22 nt, Artificial Sequence
  Guide RNA
aauaaccccgggcuucuuccuc

SEQ ID NO: 29981 - RNA, 22 nt, Artificial Sequence
  Guide RNA
accccgggcgucuuccucucgu

SEQ ID NO: 29982 - RNA, 22 nt, Artificial Sequence
  Guide RNA
accccgggcuucuuccucucgu

SEQ ID NO: 29983 - RNA, 22 nt, Artificial Sequence
  Guide RNA
acgagaggaagaagcccggggu

SEQ ID NO: 29984 - RNA, 22 nt, Artificial Sequence
  Guide RNA
acgagaggaagacgcccggggu

SEQ ID NO: 29985 - RNA, 22 nt, Artificial Sequence
  Guide RNA
acgcccgggguuauuagcuaca

SEQ ID NO: 29986 - RNA, 22 nt, Artificial Sequence
  Guide RNA
agaaacgagaggaagaagcccg

SEQ ID NO: 29987 - RNA, 22 nt, Artificial Sequence
  Guide RNA
agaaacgagaggaagacgcccg

SEQ ID NO: 29988 - RNA, 22 nt, Artificial Sequence
  Guide RNA
agaagcccgggguuauuagcua

SEQ ID NO: 29989 - RNA, 22 nt, Artificial Sequence
  Guide RNA
agacgcccgggguuauuagcua

SEQ ID NO: 29990 - RNA, 22 nt, Artificial Sequence
  Guide RNA
agagaaacgagaggaagaagcc

SEQ ID NO: 29991 - RNA, 22 nt, Artificial Sequence
  Guide RNA
agagaaacgagaggaagacgcc

SEQ ID NO: 29992 - RNA, 22 nt, Artificial Sequence
  Guide RNA
agaggaagaagcccgggguuau

SEQ ID NO: 29993 - RNA, 22 nt, Artificial Sequence
  Guide RNA
agaggaagacgcccgggguuau

SEQ ID NO: 29994 - RNA, 22 nt, Artificial Sequence
  Guide RNA
agcuaauaaccccgggcgucuu

SEQ ID NO: 29995 - RNA, 22 nt, Artificial Sequence
  Guide RNA
agcuaauaaccccgggcuucuu

SEQ ID NO: 29996 - RNA, 22 nt, Artificial Sequence
  Guide RNA
aggaagaagcccgggguuauua

SEQ ID NO: 29997 - RNA, 22 nt, Artificial Sequence
  Guide RNA
aggaagacgcccgggguuauua

SEQ ID NO: 29998 - RNA, 22 nt, Artificial Sequence
  Guide RNA
agugagagaaacgagaggaaga

SEQ ID NO: 29999 - RNA, 22 nt, Artificial Sequence
  Guide RNA
auaaccccgggcgucuuccucu

SEQ ID NO: 30000 - RNA, 22 nt, Artificial Sequence
  Guide RNA
auaaccccgggcuucuuccucu

SEQ ID NO: 30001 - RNA, 22 nt, Artificial Sequence
  Guide RNA
auuuguguagcuaauaaccccg

SEQ ID NO: 30002 - RNA, 22 nt, Artificial Sequence
  Guide RNA
caagugagagaaacgagaggaa

SEQ ID NO: 30003 - RNA, 22 nt, Artificial Sequence
  Guide RNA
ccaagugagagaaacgagagga

SEQ ID NO: 30004 - RNA, 22 nt, Artificial Sequence
  Guide RNA
ccccgggcgucuuccucucguu

SEQ ID NO: 30005 - RNA, 22 nt, Artificial Sequence
  Guide RNA
ccccgggcuucuuccucucguu

SEQ ID NO: 30006 - RNA, 22 nt, Artificial Sequence
  Guide RNA
cccgggcgucuuccucucguuu

SEQ ID NO: 30007 - RNA, 22 nt, Artificial Sequence
  Guide RNA
cccgggcuucuuccucucguuu

SEQ ID NO: 30008 - RNA, 22 nt, Artificial Sequence
  Guide RNA
ccgggcgucuuccucucguuuc

SEQ ID NO: 30009 - RNA, 22 nt, Artificial Sequence
  Guide RNA
ccgggcuucuuccucucguuuc

SEQ ID NO: 30010 - RNA, 22 nt, Artificial Sequence
  Guide RNA
cgagaggaagaagcccgggguu

SEQ ID NO: 30011 - RNA, 22 nt, Artificial Sequence
  Guide RNA
cgagaggaagacgcccgggguu

SEQ ID NO: 30012 - RNA, 22 nt, Artificial Sequence
  Guide RNA
cgggcgucuuccucucguuucu

SEQ ID NO: 30013 - RNA, 22 nt, Artificial Sequence
  Guide RNA
cgggcuucuuccucucguuucu

SEQ ID NO: 30014 - RNA, 22 nt, Artificial Sequence
  Guide RNA
cgucuuccucucguuucucuca

SEQ ID NO: 30015 - RNA, 22 nt, Artificial Sequence
  Guide RNA
cuaauaaccccgggcgucuucc

SEQ ID NO: 30016 - RNA, 22 nt, Artificial Sequence
  Guide RNA
cuaauaaccccgggcuucuucc

SEQ ID NO: 30017 - RNA, 22 nt, Artificial Sequence
  Guide RNA
cuucuuccucucguuucucuca

SEQ ID NO: 30018 - RNA, 22 nt, Artificial Sequence
  Guide RNA
gaaacgagaggaagaagcccgg

SEQ ID NO: 30019 - RNA, 22 nt, Artificial Sequence
  Guide RNA
gaaacgagaggaagacgcccgg

SEQ ID NO: 30020 - RNA, 22 nt, Artificial Sequence
  Guide RNA
gaagaagcccgggguuauuagc

SEQ ID NO: 30021 - RNA, 22 nt, Artificial Sequence
  Guide RNA
gaagacgcccgggguuauuagc

SEQ ID NO: 30022 - RNA, 22 nt, Artificial Sequence
  Guide RNA
gaagcccgggguuauuagcuac

SEQ ID NO: 30023 - RNA, 22 nt, Artificial Sequence
  Guide RNA
gacgcccgggguuauuagcuac

SEQ ID NO: 30024 - RNA, 22 nt, Artificial Sequence
  Guide RNA
gagaaacgagaggaagaagccc

SEQ ID NO: 30025 - RNA, 22 nt, Artificial Sequence
  Guide RNA
gagaaacgagaggaagacgccc

SEQ ID NO: 30026 - RNA, 22 nt, Artificial Sequence
  Guide RNA
gagagaaacgagaggaagaagc

SEQ ID NO: 30027 - RNA, 22 nt, Artificial Sequence
  Guide RNA
gagagaaacgagaggaagacgc

SEQ ID NO: 30028 - RNA, 22 nt, Artificial Sequence
  Guide RNA
gagaggaagaagcccgggguua

SEQ ID NO: 30029 - RNA, 22 nt, Artificial Sequence
  Guide RNA
gagaggaagacgcccgggguua

SEQ ID NO: 30030 - RNA, 22 nt, Artificial Sequence
  Guide RNA
gaggaagaagcccgggguuauu

SEQ ID NO: 30031 - RNA, 22 nt, Artificial Sequence
  Guide RNA
gaggaagacgcccgggguuauu

SEQ ID NO: 30032 - RNA, 22 nt, Artificial Sequence
  Guide RNA
gcgucuuccucucguuucucuc

SEQ ID NO: 30033 - RNA, 22 nt, Artificial Sequence
  Guide RNA
gcuaauaaccccgggcgucuuc

SEQ ID NO: 30034 - RNA, 22 nt, Artificial Sequence
  Guide RNA
gcuaauaaccccgggcuucuuc

SEQ ID NO: 30035 - RNA, 22 nt, Artificial Sequence
  Guide RNA
gcuucuuccucucguuucucuc

SEQ ID NO: 30036 - RNA, 22 nt, Artificial Sequence
  Guide RNA
ggaagaagcccgggguuauuag

SEQ ID NO: 30037 - RNA, 22 nt, Artificial Sequence
  Guide RNA
ggaagacgcccgggguuauuag

SEQ ID NO: 30038 - RNA, 22 nt, Artificial Sequence
  Guide RNA
ggcgucuuccucucguuucucu

SEQ ID NO: 30039 - RNA, 22 nt, Artificial Sequence
  Guide RNA
ggcuucuuccucucguuucucu

SEQ ID NO: 30040 - RNA, 22 nt, Artificial Sequence
  Guide RNA
gggcgucuuccucucguuucuc

SEQ ID NO: 30041 - RNA, 22 nt, Artificial Sequence
  Guide RNA
gggcuucuuccucucguuucuc

SEQ ID NO: 30042 - RNA, 22 nt, Artificial Sequence
  Guide RNA
guagcuaauaaccccgggcguc

SEQ ID NO: 30043 - RNA, 22 nt, Artificial Sequence
  Guide RNA
guagcuaauaaccccgggcuuc

SEQ ID NO: 30044 - RNA, 22 nt, Artificial Sequence
  Guide RNA
gugagagaaacgagaggaagaa

SEQ ID NO: 30045 - RNA, 22 nt, Artificial Sequence
  Guide RNA
gugagagaaacgagaggaagac

SEQ ID NO: 30046 - RNA, 22 nt, Artificial Sequence
  Guide RNA
guguagcuaauaaccccgggcg

SEQ ID NO: 30047 - RNA, 22 nt, Artificial Sequence
  Guide RNA
guguagcuaauaaccccgggcu

SEQ ID NO: 30048 - RNA, 22 nt, Artificial Sequence
  Guide RNA
uaaccccgggcgucuuccucuc

SEQ ID NO: 30049 - RNA, 22 nt, Artificial Sequence
  Guide RNA
uaaccccgggcuucuuccucuc

SEQ ID NO: 30050 - RNA, 22 nt, Artificial Sequence
  Guide RNA
uaauaaccccgggcgucuuccu

SEQ ID NO: 30051 - RNA, 22 nt, Artificial Sequence
  Guide RNA
uaauaaccccgggcuucuuccu

SEQ ID NO: 30052 - RNA, 22 nt, Artificial Sequence
  Guide RNA
uagcuaauaaccccgggcgucu

SEQ ID NO: 30053 - RNA, 22 nt, Artificial Sequence
  Guide RNA
uagcuaauaaccccgggcuucu

SEQ ID NO: 30054 - RNA, 22 nt, Artificial Sequence
  Guide RNA
ugagagaaacgagaggaagaag

SEQ ID NO: 30055 - RNA, 22 nt, Artificial Sequence
  Guide RNA
ugagagaaacgagaggaagacg

SEQ ID NO: 30056 - RNA, 22 nt, Artificial Sequence
  Guide RNA
uguagcuaauaaccccgggcgu

SEQ ID NO: 30057 - RNA, 22 nt, Artificial Sequence
  Guide RNA
uguagcuaauaaccccgggcuu

SEQ ID NO: 30058 - RNA, 22 nt, Artificial Sequence
  Guide RNA
uguguagcuaauaaccccgggc

SEQ ID NO: 30059 - RNA, 22 nt, Artificial Sequence
  Guide RNA
uuguguagcuaauaaccccggg

SEQ ID NO: 30060 - RNA, 22 nt, Artificial Sequence
  Guide RNA
uuuguguagcuaauaaccccgg

SEQ ID NO: 30061 - RNA, 20 nt, Artificial Sequence
  Guide RNA
aaagauacagucucacuaug

SEQ ID NO: 30062 - RNA, 20 nt, Artificial Sequence
  Guide RNA
aaagauacggucucacuaug

SEQ ID NO: 30063 - RNA, 20 nt, Artificial Sequence
  Guide RNA
aacauagugagaccguaucu

SEQ ID NO: 30064 - RNA, 20 nt, Artificial Sequence
  Guide RNA
aacauagugagacuguaucu

SEQ ID NO: 30065 - RNA, 20 nt, Artificial Sequence
  Guide RNA
aagauacagucucacuaugu

SEQ ID NO: 30066 - RNA, 20 nt, Artificial Sequence
  Guide RNA
aagauacggucucacuaugu

SEQ ID NO: 30067 - RNA, 20 nt, Artificial Sequence
  Guide RNA
aauuguaaagauacagucuc

SEQ ID NO: 30068 - RNA, 20 nt, Artificial Sequence
  Guide RNA
acagucucacuauguugccu

SEQ ID NO: 30069 - RNA, 20 nt, Artificial Sequence
  Guide RNA
acauagugagaccguaucuu

SEQ ID NO: 30070 - RNA, 20 nt, Artificial Sequence
  Guide RNA
acauagugagacuguaucuu

SEQ ID NO: 30071 - RNA, 20 nt, Artificial Sequence
  Guide RNA
acggucucacuauguugccu

SEQ ID NO: 30072 - RNA, 20 nt, Artificial Sequence
  Guide RNA
agauacagucucacuauguu

SEQ ID NO: 30073 - RNA, 20 nt, Artificial Sequence
  Guide RNA
agauacggucucacuauguu

SEQ ID NO: 30074 - RNA, 20 nt, Artificial Sequence
  Guide RNA
agcucaggcaacauagugag

SEQ ID NO: 30075 - RNA, 20 nt, Artificial Sequence
  Guide RNA
aggcaacauagugagaccgu

SEQ ID NO: 30076 - RNA, 20 nt, Artificial Sequence
  Guide RNA
aggcaacauagugagacugu

SEQ ID NO: 30077 - RNA, 20 nt, Artificial Sequence
  Guide RNA
agugagacuguaucuuuaca

SEQ ID NO: 30078 - RNA, 20 nt, Artificial Sequence
  Guide RNA
auacagucucacuauguugc

SEQ ID NO: 30079 - RNA, 20 nt, Artificial Sequence
  Guide RNA
auacggucucacuauguugc

SEQ ID NO: 30080 - RNA, 20 nt, Artificial Sequence
  Guide RNA
auagugagacuguaucuuua

SEQ ID NO: 30081 - RNA, 20 nt, Artificial Sequence
  Guide RNA
auuguaaagauacagucuca

SEQ ID NO: 30082 - RNA, 20 nt, Artificial Sequence
  Guide RNA
auuguaaagauacggucuca

SEQ ID NO: 30083 - RNA, 20 nt, Artificial Sequence
  Guide RNA
caaauuguaaagauacaguc

SEQ ID NO: 30084 - RNA, 20 nt, Artificial Sequence
  Guide RNA
caacauagugagaccguauc

SEQ ID NO: 30085 - RNA, 20 nt, Artificial Sequence
  Guide RNA
caacauagugagacuguauc

SEQ ID NO: 30086 - RNA, 20 nt, Artificial Sequence
  Guide RNA
cagcucaggcaacauaguga

SEQ ID NO: 30087 - RNA, 20 nt, Artificial Sequence
  Guide RNA
caggcaacauagugagaccg

SEQ ID NO: 30088 - RNA, 20 nt, Artificial Sequence
  Guide RNA
caggcaacauagugagacug

SEQ ID NO: 30089 - RNA, 20 nt, Artificial Sequence
  Guide RNA
cagucucacuauguugccug

SEQ ID NO: 30090 - RNA, 20 nt, Artificial Sequence
  Guide RNA
cauagugagaccguaucuuu

SEQ ID NO: 30091 - RNA, 20 nt, Artificial Sequence
  Guide RNA
cauagugagacuguaucuuu

SEQ ID NO: 30092 - RNA, 20 nt, Artificial Sequence
  Guide RNA
cggucucacuauguugccug

SEQ ID NO: 30093 - RNA, 20 nt, Artificial Sequence
  Guide RNA
cucaggcaacauagugagac

SEQ ID NO: 30094 - RNA, 20 nt, Artificial Sequence
  Guide RNA
gacuguaucuuuacaauuug

SEQ ID NO: 30095 - RNA, 20 nt, Artificial Sequence
  Guide RNA
gagacuguaucuuuacaauu

SEQ ID NO: 30096 - RNA, 20 nt, Artificial Sequence
  Guide RNA
gauacagucucacuauguug

SEQ ID NO: 30097 - RNA, 20 nt, Artificial Sequence
  Guide RNA
gauacggucucacuauguug

SEQ ID NO: 30098 - RNA, 20 nt, Artificial Sequence
  Guide RNA
gcaacauagugagaccguau

SEQ ID NO: 30099 - RNA, 20 nt, Artificial Sequence
  Guide RNA
gcaacauagugagacuguau

SEQ ID NO: 30100 - RNA, 20 nt, Artificial Sequence
  Guide RNA
gcucaggcaacauagugaga

SEQ ID NO: 30101 - RNA, 20 nt, Artificial Sequence
  Guide RNA
ggcaacauagugagaccgua

SEQ ID NO: 30102 - RNA, 20 nt, Artificial Sequence
  Guide RNA
ggcaacauagugagacugua

SEQ ID NO: 30103 - RNA, 20 nt, Artificial Sequence
  Guide RNA
guaaagauacagucucacua

SEQ ID NO: 30104 - RNA, 20 nt, Artificial Sequence
  Guide RNA
guaaagauacggucucacua

SEQ ID NO: 30105 - RNA, 20 nt, Artificial Sequence
  Guide RNA
gugagacuguaucuuuacaa

SEQ ID NO: 30106 - RNA, 20 nt, Artificial Sequence
  Guide RNA
uaaagauacagucucacuau

SEQ ID NO: 30107 - RNA, 20 nt, Artificial Sequence
  Guide RNA
uaaagauacggucucacuau

SEQ ID NO: 30108 - RNA, 20 nt, Artificial Sequence
  Guide RNA
uacagucucacuauguugcc

SEQ ID NO: 30109 - RNA, 20 nt, Artificial Sequence
  Guide RNA
uacggucucacuauguugcc

SEQ ID NO: 30110 - RNA, 20 nt, Artificial Sequence
  Guide RNA
uagugagacuguaucuuuac

SEQ ID NO: 30111 - RNA, 20 nt, Artificial Sequence
  Guide RNA
ucaggcaacauagugagacc

SEQ ID NO: 30112 - RNA, 20 nt, Artificial Sequence
  Guide RNA
ucaggcaacauagugagacu

SEQ ID NO: 30113 - RNA, 20 nt, Artificial Sequence
  Guide RNA
ugagacuguaucuuuacaau

SEQ ID NO: 30114 - RNA, 20 nt, Artificial Sequence
  Guide RNA
uguaaagauacagucucacu

SEQ ID NO: 30115 - RNA, 20 nt, Artificial Sequence
  Guide RNA
uguaaagauacggucucacu

SEQ ID NO: 30116 - RNA, 20 nt, Artificial Sequence
  Guide RNA
uuguaaagauacagucucac

SEQ ID NO: 30117 - RNA, 20 nt, Artificial Sequence
  Guide RNA
uuguaaagauacggucucac

SEQ ID NO: 30118 - RNA, 21 nt, Artificial Sequence
  Guide RNA
aaagauacagucucacuaugu

SEQ ID NO: 30119 - RNA, 21 nt, Artificial Sequence
  Guide RNA
aaagauacggucucacuaugu

SEQ ID NO: 30120 - RNA, 21 nt, Artificial Sequence
  Guide RNA
aacauagugagaccguaucuu

SEQ ID NO: 30121 - RNA, 21 nt, Artificial Sequence
  Guide RNA
aacauagugagacuguaucuu

SEQ ID NO: 30122 - RNA, 21 nt, Artificial Sequence
  Guide RNA
aagauacagucucacuauguu

SEQ ID NO: 30123 - RNA, 21 nt, Artificial Sequence
  Guide RNA
aagauacggucucacuauguu

SEQ ID NO: 30124 - RNA, 21 nt, Artificial Sequence
  Guide RNA
acagucucacuauguugccug

SEQ ID NO: 30125 - RNA, 21 nt, Artificial Sequence
  Guide RNA
acauagugagaccguaucuuu

SEQ ID NO: 30126 - RNA, 21 nt, Artificial Sequence
  Guide RNA
acauagugagacuguaucuuu

SEQ ID NO: 30127 - RNA, 21 nt, Artificial Sequence
  Guide RNA
acggucucacuauguugccug

SEQ ID NO: 30128 - RNA, 21 nt, Artificial Sequence
  Guide RNA
agauacagucucacuauguug

SEQ ID NO: 30129 - RNA, 21 nt, Artificial Sequence
  Guide RNA
agauacggucucacuauguug

SEQ ID NO: 30130 - RNA, 21 nt, Artificial Sequence
  Guide RNA
agcucaggcaacauagugaga

SEQ ID NO: 30131 - RNA, 21 nt, Artificial Sequence
  Guide RNA
aggcaacauagugagaccgua

SEQ ID NO: 30132 - RNA, 21 nt, Artificial Sequence
  Guide RNA
aggcaacauagugagacugua

SEQ ID NO: 30133 - RNA, 21 nt, Artificial Sequence
  Guide RNA
agugagacuguaucuuuacaa

SEQ ID NO: 30134 - RNA, 21 nt, Artificial Sequence
  Guide RNA
auacagucucacuauguugcc

SEQ ID NO: 30135 - RNA, 21 nt, Artificial Sequence
  Guide RNA
auacggucucacuauguugcc

SEQ ID NO: 30136 - RNA, 21 nt, Artificial Sequence
  Guide RNA
auagugagacuguaucuuuac

SEQ ID NO: 30137 - RNA, 21 nt, Artificial Sequence
  Guide RNA
auuguaaagauacagucucac

SEQ ID NO: 30138 - RNA, 21 nt, Artificial Sequence
  Guide RNA
auuguaaagauacggucucac

SEQ ID NO: 30139 - RNA, 21 nt, Artificial Sequence
  Guide RNA
caacauagugagaccguaucu

SEQ ID NO: 30140 - RNA, 21 nt, Artificial Sequence
  Guide RNA
caacauagugagacuguaucu

SEQ ID NO: 30141 - RNA, 21 nt, Artificial Sequence
  Guide RNA
cagcucaggcaacauagugag

SEQ ID NO: 30142 - RNA, 21 nt, Artificial Sequence
  Guide RNA
caggcaacauagugagaccgu

SEQ ID NO: 30143 - RNA, 21 nt, Artificial Sequence
  Guide RNA
caggcaacauagugagacugu

SEQ ID NO: 30144 - RNA, 21 nt, Artificial Sequence
  Guide RNA
cagucucacuauguugccuga

SEQ ID NO: 30145 - RNA, 21 nt, Artificial Sequence
  Guide RNA
cauagugagacuguaucuuua

SEQ ID NO: 30146 - RNA, 21 nt, Artificial Sequence
  Guide RNA
ccagcucaggcaacauaguga

SEQ ID NO: 30147 - RNA, 21 nt, Artificial Sequence
  Guide RNA
cggucucacuauguugccuga

SEQ ID NO: 30148 - RNA, 21 nt, Artificial Sequence
  Guide RNA
cucaggcaacauagugagacc

SEQ ID NO: 30149 - RNA, 21 nt, Artificial Sequence
  Guide RNA
cucaggcaacauagugagacu

SEQ ID NO: 30150 - RNA, 21 nt, Artificial Sequence
  Guide RNA
gauacagucucacuauguugc

SEQ ID NO: 30151 - RNA, 21 nt, Artificial Sequence
  Guide RNA
gauacggucucacuauguugc

SEQ ID NO: 30152 - RNA, 21 nt, Artificial Sequence
  Guide RNA
gcaacauagugagaccguauc

SEQ ID NO: 30153 - RNA, 21 nt, Artificial Sequence
  Guide RNA
gcaacauagugagacuguauc

SEQ ID NO: 30154 - RNA, 21 nt, Artificial Sequence
  Guide RNA
gcucaggcaacauagugagac

SEQ ID NO: 30155 - RNA, 21 nt, Artificial Sequence
  Guide RNA
ggcaacauagugagaccguau

SEQ ID NO: 30156 - RNA, 21 nt, Artificial Sequence
  Guide RNA
ggcaacauagugagacuguau

SEQ ID NO: 30157 - RNA, 21 nt, Artificial Sequence
  Guide RNA
guaaagauacagucucacuau

SEQ ID NO: 30158 - RNA, 21 nt, Artificial Sequence
  Guide RNA
guaaagauacggucucacuau

SEQ ID NO: 30159 - RNA, 21 nt, Artificial Sequence
  Guide RNA
gugagacuguaucuuuacaau

SEQ ID NO: 30160 - RNA, 21 nt, Artificial Sequence
  Guide RNA
uaaagauacagucucacuaug

SEQ ID NO: 30161 - RNA, 21 nt, Artificial Sequence
  Guide RNA
uaaagauacggucucacuaug

SEQ ID NO: 30162 - RNA, 21 nt, Artificial Sequence
  Guide RNA
uacagucucacuauguugccu

SEQ ID NO: 30163 - RNA, 21 nt, Artificial Sequence
  Guide RNA
uacggucucacuauguugccu

SEQ ID NO: 30164 - RNA, 21 nt, Artificial Sequence
  Guide RNA
uagugagacuguaucuuuaca

SEQ ID NO: 30165 - RNA, 21 nt, Artificial Sequence
  Guide RNA
ucaggcaacauagugagaccg

SEQ ID NO: 30166 - RNA, 21 nt, Artificial Sequence
  Guide RNA
ucaggcaacauagugagacug

SEQ ID NO: 30167 - RNA, 21 nt, Artificial Sequence
  Guide RNA
uguaaagauacagucucacua

SEQ ID NO: 30168 - RNA, 21 nt, Artificial Sequence
  Guide RNA
uguaaagauacggucucacua

SEQ ID NO: 30169 - RNA, 21 nt, Artificial Sequence
  Guide RNA
uuguaaagauacagucucacu

SEQ ID NO: 30170 - RNA, 21 nt, Artificial Sequence
  Guide RNA
uuguaaagauacggucucacu

SEQ ID NO: 30171 - RNA, 22 nt, Artificial Sequence
  Guide RNA
aaagauacagucucacuauguu

SEQ ID NO: 30172 - RNA, 22 nt, Artificial Sequence
  Guide RNA
aaagauacggucucacuauguu

SEQ ID NO: 30173 - RNA, 22 nt, Artificial Sequence
  Guide RNA
aacauagugagaccguaucuuu

SEQ ID NO: 30174 - RNA, 22 nt, Artificial Sequence
  Guide RNA
aacauagugagacuguaucuuu

SEQ ID NO: 30175 - RNA, 22 nt, Artificial Sequence
  Guide RNA
aagauacagucucacuauguug

SEQ ID NO: 30176 - RNA, 22 nt, Artificial Sequence
  Guide RNA
aagauacggucucacuauguug

SEQ ID NO: 30177 - RNA, 22 nt, Artificial Sequence
  Guide RNA
aauuguaaagauacagucucac

SEQ ID NO: 30178 - RNA, 22 nt, Artificial Sequence
  Guide RNA
acagucucacuauguugccuga

SEQ ID NO: 30179 - RNA, 22 nt, Artificial Sequence
  Guide RNA
acauagugagacuguaucuuua

SEQ ID NO: 30180 - RNA, 22 nt, Artificial Sequence
  Guide RNA
accagcucaggcaacauaguga

SEQ ID NO: 30181 - RNA, 22 nt, Artificial Sequence
  Guide RNA
acggucucacuauguugccuga

SEQ ID NO: 30182 - RNA, 22 nt, Artificial Sequence
  Guide RNA
agauacagucucacuauguugc

SEQ ID NO: 30183 - RNA, 22 nt, Artificial Sequence
  Guide RNA
agauacggucucacuauguugc

SEQ ID NO: 30184 - RNA, 22 nt, Artificial Sequence
  Guide RNA
agcucaggcaacauagugagac

SEQ ID NO: 30185 - RNA, 22 nt, Artificial Sequence
  Guide RNA
aggcaacauagugagaccguau

SEQ ID NO: 30186 - RNA, 22 nt, Artificial Sequence
  Guide RNA
aggcaacauagugagacuguau

SEQ ID NO: 30187 - RNA, 22 nt, Artificial Sequence
  Guide RNA
agugagacuguaucuuuacaau

SEQ ID NO: 30188 - RNA, 22 nt, Artificial Sequence
  Guide RNA
auacagucucacuauguugccu

SEQ ID NO: 30189 - RNA, 22 nt, Artificial Sequence
  Guide RNA
auacggucucacuauguugccu

SEQ ID NO: 30190 - RNA, 22 nt, Artificial Sequence
  Guide RNA
auagugagacuguaucuuuaca

SEQ ID NO: 30191 - RNA, 22 nt, Artificial Sequence
  Guide RNA
auuguaaagauacagucucacu

SEQ ID NO: 30192 - RNA, 22 nt, Artificial Sequence
  Guide RNA
auuguaaagauacggucucacu

SEQ ID NO: 30193 - RNA, 22 nt, Artificial Sequence
  Guide RNA
caaauuguaaagauacagucuc

SEQ ID NO: 30194 - RNA, 22 nt, Artificial Sequence
  Guide RNA
caacauagugagaccguaucuu

SEQ ID NO: 30195 - RNA, 22 nt, Artificial Sequence
  Guide RNA
caacauagugagacuguaucuu

SEQ ID NO: 30196 - RNA, 22 nt, Artificial Sequence
  Guide RNA
cagcucaggcaacauagugaga

SEQ ID NO: 30197 - RNA, 22 nt, Artificial Sequence
  Guide RNA
caggcaacauagugagaccgua

SEQ ID NO: 30198 - RNA, 22 nt, Artificial Sequence
  Guide RNA
caggcaacauagugagacugua

SEQ ID NO: 30199 - RNA, 22 nt, Artificial Sequence
  Guide RNA
cagucucacuauguugccugag

SEQ ID NO: 30200 - RNA, 22 nt, Artificial Sequence
  Guide RNA
cauagugagacuguaucuuuac

SEQ ID NO: 30201 - RNA, 22 nt, Artificial Sequence
  Guide RNA
ccagcucaggcaacauagugag

SEQ ID NO: 30202 - RNA, 22 nt, Artificial Sequence
  Guide RNA
cggucucacuauguugccugag

SEQ ID NO: 30203 - RNA, 22 nt, Artificial Sequence
  Guide RNA
cucaggcaacauagugagaccg

SEQ ID NO: 30204 - RNA, 22 nt, Artificial Sequence
  Guide RNA
cucaggcaacauagugagacug

SEQ ID NO: 30205 - RNA, 22 nt, Artificial Sequence
  Guide RNA
gagacuguaucuuuacaauuug

SEQ ID NO: 30206 - RNA, 22 nt, Artificial Sequence
  Guide RNA
gauacagucucacuauguugcc

SEQ ID NO: 30207 - RNA, 22 nt, Artificial Sequence
  Guide RNA
gauacggucucacuauguugcc

SEQ ID NO: 30208 - RNA, 22 nt, Artificial Sequence
  Guide RNA
gcaacauagugagaccguaucu

SEQ ID NO: 30209 - RNA, 22 nt, Artificial Sequence
  Guide RNA
gcaacauagugagacuguaucu

SEQ ID NO: 30210 - RNA, 22 nt, Artificial Sequence
  Guide RNA
gcucaggcaacauagugagacc

SEQ ID NO: 30211 - RNA, 22 nt, Artificial Sequence
  Guide RNA
gcucaggcaacauagugagacu

SEQ ID NO: 30212 - RNA, 22 nt, Artificial Sequence
  Guide RNA
ggcaacauagugagaccguauc

SEQ ID NO: 30213 - RNA, 22 nt, Artificial Sequence
  Guide RNA
ggcaacauagugagacuguauc

SEQ ID NO: 30214 - RNA, 22 nt, Artificial Sequence
  Guide RNA
guaaagauacagucucacuaug

SEQ ID NO: 30215 - RNA, 22 nt, Artificial Sequence
  Guide RNA
guaaagauacggucucacuaug

SEQ ID NO: 30216 - RNA, 22 nt, Artificial Sequence
  Guide RNA
gugagacuguaucuuuacaauu

SEQ ID NO: 30217 - RNA, 22 nt, Artificial Sequence
  Guide RNA
uaaagauacagucucacuaugu

SEQ ID NO: 30218 - RNA, 22 nt, Artificial Sequence
  Guide RNA
uaaagauacggucucacuaugu

SEQ ID NO: 30219 - RNA, 22 nt, Artificial Sequence
  Guide RNA
uacagucucacuauguugccug

SEQ ID NO: 30220 - RNA, 22 nt, Artificial Sequence
  Guide RNA
uacggucucacuauguugccug

SEQ ID NO: 30221 - RNA, 22 nt, Artificial Sequence
  Guide RNA
uagugagacuguaucuuuacaa

SEQ ID NO: 30222 - RNA, 22 nt, Artificial Sequence
  Guide RNA
ucaggcaacauagugagaccgu

SEQ ID NO: 30223 - RNA, 22 nt, Artificial Sequence
  Guide RNA
ucaggcaacauagugagacugu

SEQ ID NO: 30224 - RNA, 22 nt, Artificial Sequence
  Guide RNA
uguaaagauacagucucacuau

SEQ ID NO: 30225 - RNA, 22 nt, Artificial Sequence
  Guide RNA
uguaaagauacggucucacuau

SEQ ID NO: 30226 - RNA, 22 nt, Artificial Sequence
  Guide RNA
uuguaaagauacagucucacua

SEQ ID NO: 30227 - RNA, 22 nt, Artificial Sequence
  Guide RNA
uuguaaagauacggucucacua

SEQ ID NO: 30228 - RNA, 20 nt, Artificial Sequence
  Guide RNA
aaagauuacacugucugauu

SEQ ID NO: 30229 - RNA, 20 nt, Artificial Sequence
  Guide RNA
aaauggaaagauuacacugu

SEQ ID NO: 30230 - RNA, 20 nt, Artificial Sequence
  Guide RNA
aagaagcuauuaaucagaca

SEQ ID NO: 30231 - RNA, 20 nt, Artificial Sequence
  Guide RNA
aagauuacacugucugauua

SEQ ID NO: 30232 - RNA, 20 nt, Artificial Sequence
  Guide RNA
aagcuauuaaucagacagug

SEQ ID NO: 30233 - RNA, 20 nt, Artificial Sequence
  Guide RNA
aagcuauuaaucagauagug

SEQ ID NO: 30234 - RNA, 20 nt, Artificial Sequence
  Guide RNA
aaucagacaguguaaucuuu

SEQ ID NO: 30235 - RNA, 20 nt, Artificial Sequence
  Guide RNA
aauggaaagauuacacuauc

SEQ ID NO: 30236 - RNA, 20 nt, Artificial Sequence
  Guide RNA
aauggaaagauuacacuguc

SEQ ID NO: 30237 - RNA, 20 nt, Artificial Sequence
  Guide RNA
acacuaucugauuaauagcu

SEQ ID NO: 30238 - RNA, 20 nt, Artificial Sequence
  Guide RNA
acacugucugauuaauagcu

SEQ ID NO: 30239 - RNA, 20 nt, Artificial Sequence
  Guide RNA
acaguguaaucuuuccauuu

SEQ ID NO: 30240 - RNA, 20 nt, Artificial Sequence
  Guide RNA
acuaucugauuaauagcuuc

SEQ ID NO: 30241 - RNA, 20 nt, Artificial Sequence
  Guide RNA
acugucugauuaauagcuuc

SEQ ID NO: 30242 - RNA, 20 nt, Artificial Sequence
  Guide RNA
agaagcuauuaaucagacag

SEQ ID NO: 30243 - RNA, 20 nt, Artificial Sequence
  Guide RNA
agaagcuauuaaucagauag

SEQ ID NO: 30244 - RNA, 20 nt, Artificial Sequence
  Guide RNA
agacaguguaaucuuuccau

SEQ ID NO: 30245 - RNA, 20 nt, Artificial Sequence
  Guide RNA
agauaguguaaucuuuccau

SEQ ID NO: 30246 - RNA, 20 nt, Artificial Sequence
  Guide RNA
agauuacacugucugauuaa

SEQ ID NO: 30247 - RNA, 20 nt, Artificial Sequence
  Guide RNA
agcuauuaaucagacagugu

SEQ ID NO: 30248 - RNA, 20 nt, Artificial Sequence
  Guide RNA
agcuauuaaucagauagugu

SEQ ID NO: 30249 - RNA, 20 nt, Artificial Sequence
  Guide RNA
aucagacaguguaaucuuuc

SEQ ID NO: 30250 - RNA, 20 nt, Artificial Sequence
  Guide RNA
aucagauaguguaaucuuuc

SEQ ID NO: 30251 - RNA, 20 nt, Artificial Sequence
  Guide RNA
augaagaagcuauuaaucag

SEQ ID NO: 30252 - RNA, 20 nt, Artificial Sequence
  Guide RNA
auggaaagauuacacuaucu

SEQ ID NO: 30253 - RNA, 20 nt, Artificial Sequence
  Guide RNA
auggaaagauuacacugucu

SEQ ID NO: 30254 - RNA, 20 nt, Artificial Sequence
  Guide RNA
auuaaucagacaguguaauc

SEQ ID NO: 30255 - RNA, 20 nt, Artificial Sequence
  Guide RNA
cacuaucugauuaauagcuu

SEQ ID NO: 30256 - RNA, 20 nt, Artificial Sequence
  Guide RNA
cacugucugauuaauagcuu

SEQ ID NO: 30257 - RNA, 20 nt, Artificial Sequence
  Guide RNA
cagacaguguaaucuuucca

SEQ ID NO: 30258 - RNA, 20 nt, Artificial Sequence
  Guide RNA
cagauaguguaaucuuucca

SEQ ID NO: 30259 - RNA, 20 nt, Artificial Sequence
  Guide RNA
cuaucugauuaauagcuucu

SEQ ID NO: 30260 - RNA, 20 nt, Artificial Sequence
  Guide RNA
cuauuaaucagacaguguaa

SEQ ID NO: 30261 - RNA, 20 nt, Artificial Sequence
  Guide RNA
cugucugauuaauagcuucu

SEQ ID NO: 30262 - RNA, 20 nt, Artificial Sequence
  Guide RNA
gaaagauuacacuaucugau

SEQ ID NO: 30263 - RNA, 20 nt, Artificial Sequence
  Guide RNA
gaaagauuacacugucugau

SEQ ID NO: 30264 - RNA, 20 nt, Artificial Sequence
  Guide RNA
gaagaagcuauuaaucagac

SEQ ID NO: 30265 - RNA, 20 nt, Artificial Sequence
  Guide RNA
gaagaagcuauuaaucagau

SEQ ID NO: 30266 - RNA, 20 nt, Artificial Sequence
  Guide RNA
gaagcuauuaaucagacagu

SEQ ID NO: 30267 - RNA, 20 nt, Artificial Sequence
  Guide RNA
gaagcuauuaaucagauagu

SEQ ID NO: 30268 - RNA, 20 nt, Artificial Sequence
  Guide RNA
gacaguguaaucuuuccauu

SEQ ID NO: 30269 - RNA, 20 nt, Artificial Sequence
  Guide RNA
gauaguguaaucuuuccauu

SEQ ID NO: 30270 - RNA, 20 nt, Artificial Sequence
  Guide RNA
gauuacacugucugauuaau

SEQ ID NO: 30271 - RNA, 20 nt, Artificial Sequence
  Guide RNA
gcuauuaaucagacagugua

SEQ ID NO: 30272 - RNA, 20 nt, Artificial Sequence
  Guide RNA
gcuauuaaucagauagugua

SEQ ID NO: 30273 - RNA, 20 nt, Artificial Sequence
  Guide RNA
ggaaagauuacacuaucuga

SEQ ID NO: 30274 - RNA, 20 nt, Artificial Sequence
  Guide RNA
ggaaagauuacacugucuga

SEQ ID NO: 30275 - RNA, 20 nt, Artificial Sequence
  Guide RNA
guaugaagaagcuauuaauc

SEQ ID NO: 30276 - RNA, 20 nt, Artificial Sequence
  Guide RNA
uaaauggaaagauuacacug

SEQ ID NO: 30277 - RNA, 20 nt, Artificial Sequence
  Guide RNA
uaaucagacaguguaaucuu

SEQ ID NO: 30278 - RNA, 20 nt, Artificial Sequence
  Guide RNA
uacacuaucugauuaauagc

SEQ ID NO: 30279 - RNA, 20 nt, Artificial Sequence
  Guide RNA
uacacugucugauuaauagc

SEQ ID NO: 30280 - RNA, 20 nt, Artificial Sequence
  Guide RNA
ucagacaguguaaucuuucc

SEQ ID NO: 30281 - RNA, 20 nt, Artificial Sequence
  Guide RNA
ucagauaguguaaucuuucc

SEQ ID NO: 30282 - RNA, 20 nt, Artificial Sequence
  Guide RNA
ugaagaagcuauuaaucaga

SEQ ID NO: 30283 - RNA, 20 nt, Artificial Sequence
  Guide RNA
uggaaagauuacacuaucug

SEQ ID NO: 30284 - RNA, 20 nt, Artificial Sequence
  Guide RNA
uggaaagauuacacugucug

SEQ ID NO: 30285 - RNA, 20 nt, Artificial Sequence
  Guide RNA
ugucugauuaauagcuucuu

SEQ ID NO: 30286 - RNA, 20 nt, Artificial Sequence
  Guide RNA
uuaaucagacaguguaaucu

SEQ ID NO: 30287 - RNA, 20 nt, Artificial Sequence
  Guide RNA
uuacacugucugauuaauag

SEQ ID NO: 30288 - RNA, 21 nt, Artificial Sequence
  Guide RNA
aaauggaaagauuacacuguc

SEQ ID NO: 30289 - RNA, 21 nt, Artificial Sequence
  Guide RNA
aagaagcuauuaaucagacag

SEQ ID NO: 30290 - RNA, 21 nt, Artificial Sequence
  Guide RNA
aagcuauuaaucagacagugu

SEQ ID NO: 30291 - RNA, 21 nt, Artificial Sequence
  Guide RNA
aaucagacaguguaaucuuuc

SEQ ID NO: 30292 - RNA, 21 nt, Artificial Sequence
  Guide RNA
aauggaaagauuacacugucu

SEQ ID NO: 30293 - RNA, 21 nt, Artificial Sequence
  Guide RNA
acacugucugauuaauagcuu

SEQ ID NO: 30294 - RNA, 21 nt, Artificial Sequence
  Guide RNA
acugucugauuaauagcuucu

SEQ ID NO: 30295 - RNA, 21 nt, Artificial Sequence
  Guide RNA
agaagcuauuaaucagacagu

SEQ ID NO: 30296 - RNA, 21 nt, Artificial Sequence
  Guide RNA
agacaguguaaucuuuccauu

SEQ ID NO: 30297 - RNA, 21 nt, Artificial Sequence
  Guide RNA
agcuauuaaucagacagugua

SEQ ID NO: 30298 - RNA, 21 nt, Artificial Sequence
  Guide RNA
aucagacaguguaaucuuucc

SEQ ID NO: 30299 - RNA, 21 nt, Artificial Sequence
  Guide RNA
aucagauaguguaaucuuucc

SEQ ID NO: 30300 - RNA, 21 nt, Artificial Sequence
  Guide RNA
auggaaagauuacacuaucug

SEQ ID NO: 30301 - RNA, 21 nt, Artificial Sequence
  Guide RNA
auggaaagauuacacugucug

SEQ ID NO: 30302 - RNA, 21 nt, Artificial Sequence
  Guide RNA
cacuaucugauuaauagcuuc

SEQ ID NO: 30303 - RNA, 21 nt, Artificial Sequence
  Guide RNA
cacugucugauuaauagcuuc

SEQ ID NO: 30304 - RNA, 21 nt, Artificial Sequence
  Guide RNA
cagacaguguaaucuuuccau

SEQ ID NO: 30305 - RNA, 21 nt, Artificial Sequence
  Guide RNA
cagauaguguaaucuuuccau

SEQ ID NO: 30306 - RNA, 21 nt, Artificial Sequence
  Guide RNA
cugucugauuaauagcuucuu

SEQ ID NO: 30307 - RNA, 21 nt, Artificial Sequence
  Guide RNA
gaaagauuacacugucugauu

SEQ ID NO: 30308 - RNA, 21 nt, Artificial Sequence
  Guide RNA
gaagaagcuauuaaucagaca

SEQ ID NO: 30309 - RNA, 21 nt, Artificial Sequence
  Guide RNA
gaagcuauuaaucagacagug

SEQ ID NO: 30310 - RNA, 21 nt, Artificial Sequence
  Guide RNA
gaagcuauuaaucagauagug

SEQ ID NO: 30311 - RNA, 21 nt, Artificial Sequence
  Guide RNA
gacaguguaaucuuuccauuu

SEQ ID NO: 30312 - RNA, 21 nt, Artificial Sequence
  Guide RNA
gcuauuaaucagacaguguaa

SEQ ID NO: 30313 - RNA, 21 nt, Artificial Sequence
  Guide RNA
ggaaagauuacacuaucugau

SEQ ID NO: 30314 - RNA, 21 nt, Artificial Sequence
  Guide RNA
ggaaagauuacacugucugau

SEQ ID NO: 30315 - RNA, 21 nt, Artificial Sequence
  Guide RNA
uacacugucugauuaauagcu

SEQ ID NO: 30316 - RNA, 21 nt, Artificial Sequence
  Guide RNA
ucagacaguguaaucuuucca

SEQ ID NO: 30317 - RNA, 21 nt, Artificial Sequence
  Guide RNA
ucagauaguguaaucuuucca

SEQ ID NO: 30318 - RNA, 21 nt, Artificial Sequence
  Guide RNA
ugaagaagcuauuaaucagac

SEQ ID NO: 30319 - RNA, 21 nt, Artificial Sequence
  Guide RNA
uggaaagauuacacuaucuga

SEQ ID NO: 30320 - RNA, 21 nt, Artificial Sequence
  Guide RNA
uggaaagauuacacugucuga

SEQ ID NO: 30321 - RNA, 21 nt, Artificial Sequence
  Guide RNA
ugucugauuaauagcuucuuc

SEQ ID NO: 30322 - RNA, 21 nt, Artificial Sequence
  Guide RNA
uuacacugucugauuaauagc

SEQ ID NO: 30323 - RNA, 22 nt, Artificial Sequence
  Guide RNA
aaauggaaagauuacacugucu

SEQ ID NO: 30324 - RNA, 22 nt, Artificial Sequence
  Guide RNA
aagaagcuauuaaucagacagu

SEQ ID NO: 30325 - RNA, 22 nt, Artificial Sequence
  Guide RNA
aagcuauuaaucagacagugua

SEQ ID NO: 30326 - RNA, 22 nt, Artificial Sequence
  Guide RNA
aaucagacaguguaaucuuucc

SEQ ID NO: 30327 - RNA, 22 nt, Artificial Sequence
  Guide RNA
aaucagauaguguaaucuuucc

SEQ ID NO: 30328 - RNA, 22 nt, Artificial Sequence
  Guide RNA
aauggaaagauuacacuaucug

SEQ ID NO: 30329 - RNA, 22 nt, Artificial Sequence
  Guide RNA
aauggaaagauuacacugucug

SEQ ID NO: 30330 - RNA, 22 nt, Artificial Sequence
  Guide RNA
acacuaucugauuaauagcuuc

SEQ ID NO: 30331 - RNA, 22 nt, Artificial Sequence
  Guide RNA
acacugucugauuaauagcuuc

SEQ ID NO: 30332 - RNA, 22 nt, Artificial Sequence
  Guide RNA
acugucugauuaauagcuucuu

SEQ ID NO: 30333 - RNA, 22 nt, Artificial Sequence
  Guide RNA
agaagcuauuaaucagacagug

SEQ ID NO: 30334 - RNA, 22 nt, Artificial Sequence
  Guide RNA
agaagcuauuaaucagauagug

SEQ ID NO: 30335 - RNA, 22 nt, Artificial Sequence
  Guide RNA
agacaguguaaucuuuccauuu

SEQ ID NO: 30336 - RNA, 22 nt, Artificial Sequence
  Guide RNA
agcuauuaaucagacaguguaa

SEQ ID NO: 30337 - RNA, 22 nt, Artificial Sequence
  Guide RNA
aucagacaguguaaucuuucca

SEQ ID NO: 30338 - RNA, 22 nt, Artificial Sequence
  Guide RNA
aucagauaguguaaucuuucca

SEQ ID NO: 30339 - RNA, 22 nt, Artificial Sequence
  Guide RNA
augaagaagcuauuaaucagac

SEQ ID NO: 30340 - RNA, 22 nt, Artificial Sequence
  Guide RNA
auggaaagauuacacuaucuga

SEQ ID NO: 30341 - RNA, 22 nt, Artificial Sequence
  Guide RNA
auggaaagauuacacugucuga

SEQ ID NO: 30342 - RNA, 22 nt, Artificial Sequence
  Guide RNA
auuacacugucugauuaauagc

SEQ ID NO: 30343 - RNA, 22 nt, Artificial Sequence
  Guide RNA
cacuaucugauuaauagcuucu

SEQ ID NO: 30344 - RNA, 22 nt, Artificial Sequence
  Guide RNA
cacugucugauuaauagcuucu

SEQ ID NO: 30345 - RNA, 22 nt, Artificial Sequence
  Guide RNA
cagacaguguaaucuuuccauu

SEQ ID NO: 30346 - RNA, 22 nt, Artificial Sequence
  Guide RNA
cagauaguguaaucuuuccauu

SEQ ID NO: 30347 - RNA, 22 nt, Artificial Sequence
  Guide RNA
cuaucugauuaauagcuucuuc

SEQ ID NO: 30348 - RNA, 22 nt, Artificial Sequence
  Guide RNA
cuauuaaucagacaguguaauc

SEQ ID NO: 30349 - RNA, 22 nt, Artificial Sequence
  Guide RNA
cugucugauuaauagcuucuuc

SEQ ID NO: 30350 - RNA, 22 nt, Artificial Sequence
  Guide RNA
gaaagauuacacugucugauua

SEQ ID NO: 30351 - RNA, 22 nt, Artificial Sequence
  Guide RNA
gaagaagcuauuaaucagacag

SEQ ID NO: 30352 - RNA, 22 nt, Artificial Sequence
  Guide RNA
gaagaagcuauuaaucagauag

SEQ ID NO: 30353 - RNA, 22 nt, Artificial Sequence
  Guide RNA
gaagcuauuaaucagacagugu

SEQ ID NO: 30354 - RNA, 22 nt, Artificial Sequence
  Guide RNA
gaagcuauuaaucagauagugu

SEQ ID NO: 30355 - RNA, 22 nt, Artificial Sequence
  Guide RNA
gacaguguaaucuuuccauuua

SEQ ID NO: 30356 - RNA, 22 nt, Artificial Sequence
  Guide RNA
gaguaugaagaagcuauuaauc

SEQ ID NO: 30357 - RNA, 22 nt, Artificial Sequence
  Guide RNA
gauuacacugucugauuaauag

SEQ ID NO: 30358 - RNA, 22 nt, Artificial Sequence
  Guide RNA
gcuauuaaucagacaguguaau

SEQ ID NO: 30359 - RNA, 22 nt, Artificial Sequence
  Guide RNA
ggaaagauuacacuaucugauu

SEQ ID NO: 30360 - RNA, 22 nt, Artificial Sequence
  Guide RNA
ggaaagauuacacugucugauu

SEQ ID NO: 30361 - RNA, 22 nt, Artificial Sequence
  Guide RNA
guaugaagaagcuauuaaucag

SEQ ID NO: 30362 - RNA, 22 nt, Artificial Sequence
  Guide RNA
uaaauggaaagauuacacuguc

SEQ ID NO: 30363 - RNA, 22 nt, Artificial Sequence
  Guide RNA
uaaucagacaguguaaucuuuc

SEQ ID NO: 30364 - RNA, 22 nt, Artificial Sequence
  Guide RNA
uacacugucugauuaauagcuu

SEQ ID NO: 30365 - RNA, 22 nt, Artificial Sequence
  Guide RNA
ucagacaguguaaucuuuccau

SEQ ID NO: 30366 - RNA, 22 nt, Artificial Sequence
  Guide RNA
ucagauaguguaaucuuuccau

SEQ ID NO: 30367 - RNA, 22 nt, Artificial Sequence
  Guide RNA
ugaagaagcuauuaaucagaca

SEQ ID NO: 30368 - RNA, 22 nt, Artificial Sequence
  Guide RNA
uggaaagauuacacuaucugau

SEQ ID NO: 30369 - RNA, 22 nt, Artificial Sequence
  Guide RNA
uggaaagauuacacugucugau

SEQ ID NO: 30370 - RNA, 22 nt, Artificial Sequence
  Guide RNA
ugucugauuaauagcuucuuca

SEQ ID NO: 30371 - RNA, 22 nt, Artificial Sequence
  Guide RNA
uuacacugucugauuaauagcu

SEQ ID NO: 30372 - RNA, 20 nt, Artificial Sequence
  Guide RNA
aaucauggcgggaggcaagg

SEQ ID NO: 30373 - RNA, 20 nt, Artificial Sequence
  Guide RNA
aaucauggcgggcggcaagg

SEQ ID NO: 30374 - RNA, 20 nt, Artificial Sequence
  Guide RNA
acaaucauggcgggaggcaa

SEQ ID NO: 30375 - RNA, 20 nt, Artificial Sequence
  Guide RNA
acaaucauggcgggcggcaa

SEQ ID NO: 30376 - RNA, 20 nt, Artificial Sequence
  Guide RNA
acuuguuccuccuugccgcc

SEQ ID NO: 30377 - RNA, 20 nt, Artificial Sequence
  Guide RNA
acuuguuccuccuugccucc

SEQ ID NO: 30378 - RNA, 20 nt, Artificial Sequence
  Guide RNA
aggccucacaaucauggcgg

SEQ ID NO: 30379 - RNA, 20 nt, Artificial Sequence
  Guide RNA
aucauggcgggaggcaagga

SEQ ID NO: 30380 - RNA, 20 nt, Artificial Sequence
  Guide RNA
aucauggcgggcggcaagga

SEQ ID NO: 30381 - RNA, 20 nt, Artificial Sequence
  Guide RNA
auggcgggaggcaaggagga

SEQ ID NO: 30382 - RNA, 20 nt, Artificial Sequence
  Guide RNA
auggcgggcggcaaggagga

SEQ ID NO: 30383 - RNA, 20 nt, Artificial Sequence
  Guide RNA
augugacuuguuccuccuug

SEQ ID NO: 30384 - RNA, 20 nt, Artificial Sequence
  Guide RNA
caaucauggcgggaggcaag

SEQ ID NO: 30385 - RNA, 20 nt, Artificial Sequence
  Guide RNA
caaucauggcgggcggcaag

SEQ ID NO: 30386 - RNA, 20 nt, Artificial Sequence
  Guide RNA
cacaaucauggcgggaggca

SEQ ID NO: 30387 - RNA, 20 nt, Artificial Sequence
  Guide RNA
cacaaucauggcgggcggca

SEQ ID NO: 30388 - RNA, 20 nt, Artificial Sequence
  Guide RNA
cauggcgggaggcaaggagg

SEQ ID NO: 30389 - RNA, 20 nt, Artificial Sequence
  Guide RNA
cauggcgggcggcaaggagg

SEQ ID NO: 30390 - RNA, 20 nt, Artificial Sequence
  Guide RNA
ccgcccgccaugauugugag

SEQ ID NO: 30391 - RNA, 20 nt, Artificial Sequence
  Guide RNA
ccucacaaucauggcgggcg

SEQ ID NO: 30392 - RNA, 20 nt, Artificial Sequence
  Guide RNA
ccuccuugccgcccgccaug

SEQ ID NO: 30393 - RNA, 20 nt, Artificial Sequence
  Guide RNA
ccuccuugccucccgccaug

SEQ ID NO: 30394 - RNA, 20 nt, Artificial Sequence
  Guide RNA
ccuugccgcccgccaugauu

SEQ ID NO: 30395 - RNA, 20 nt, Artificial Sequence
  Guide RNA
ccuugccucccgccaugauu

SEQ ID NO: 30396 - RNA, 20 nt, Artificial Sequence
  Guide RNA
cgcccgccaugauugugagg

SEQ ID NO: 30397 - RNA, 20 nt, Artificial Sequence
  Guide RNA
cgggaggcaaggaggaacaa

SEQ ID NO: 30398 - RNA, 20 nt, Artificial Sequence
  Guide RNA
cgggcggcaaggaggaacaa

SEQ ID NO: 30399 - RNA, 20 nt, Artificial Sequence
  Guide RNA
cucacaaucauggcgggagg

SEQ ID NO: 30400 - RNA, 20 nt, Artificial Sequence
  Guide RNA
cucacaaucauggcgggcgg

SEQ ID NO: 30401 - RNA, 20 nt, Artificial Sequence
  Guide RNA
cuccuugccgcccgccauga

SEQ ID NO: 30402 - RNA, 20 nt, Artificial Sequence
  Guide RNA
cuccuugccucccgccauga

SEQ ID NO: 30403 - RNA, 20 nt, Artificial Sequence
  Guide RNA
cuugccgcccgccaugauug

SEQ ID NO: 30404 - RNA, 20 nt, Artificial Sequence
  Guide RNA
cuugccucccgccaugauug

SEQ ID NO: 30405 - RNA, 20 nt, Artificial Sequence
  Guide RNA
cuuguuccuccuugccgccc

SEQ ID NO: 30406 - RNA, 20 nt, Artificial Sequence
  Guide RNA
cuuguuccuccuugccuccc

SEQ ID NO: 30407 - RNA, 20 nt, Artificial Sequence
  Guide RNA
gacuuguuccuccuugccgc

SEQ ID NO: 30408 - RNA, 20 nt, Artificial Sequence
  Guide RNA
gacuuguuccuccuugccuc

SEQ ID NO: 30409 - RNA, 20 nt, Artificial Sequence
  Guide RNA
gaggcaaggaggaacaaguc

SEQ ID NO: 30410 - RNA, 20 nt, Artificial Sequence
  Guide RNA
gaggccucacaaucauggcg

SEQ ID NO: 30411 - RNA, 20 nt, Artificial Sequence
  Guide RNA
gaugugacuuguuccuccuu

SEQ ID NO: 30412 - RNA, 20 nt, Artificial Sequence
  Guide RNA
gccgcccgccaugauuguga

SEQ ID NO: 30413 - RNA, 20 nt, Artificial Sequence
  Guide RNA
gccucacaaucauggcgggc

SEQ ID NO: 30414 - RNA, 20 nt, Artificial Sequence
  Guide RNA
gcggcaaggaggaacaaguc

SEQ ID NO: 30415 - RNA, 20 nt, Artificial Sequence
  Guide RNA
gcgggaggcaaggaggaaca

SEQ ID NO: 30416 - RNA, 20 nt, Artificial Sequence
  Guide RNA
gcgggcggcaaggaggaaca

SEQ ID NO: 30417 - RNA, 20 nt, Artificial Sequence
  Guide RNA
ggaggcaaggaggaacaagu

SEQ ID NO: 30418 - RNA, 20 nt, Artificial Sequence
  Guide RNA
ggaggccucacaaucauggc

SEQ ID NO: 30419 - RNA, 20 nt, Artificial Sequence
  Guide RNA
ggccucacaaucauggcggg

SEQ ID NO: 30420 - RNA, 20 nt, Artificial Sequence
  Guide RNA
ggcggcaaggaggaacaagu

SEQ ID NO: 30421 - RNA, 20 nt, Artificial Sequence
  Guide RNA
ggcgggaggcaaggaggaac

SEQ ID NO: 30422 - RNA, 20 nt, Artificial Sequence
  Guide RNA
ggcgggcggcaaggaggaac

SEQ ID NO: 30423 - RNA, 20 nt, Artificial Sequence
  Guide RNA
gggaggcaaggaggaacaag

SEQ ID NO: 30424 - RNA, 20 nt, Artificial Sequence
  Guide RNA
gggcggcaaggaggaacaag

SEQ ID NO: 30425 - RNA, 20 nt, Artificial Sequence
  Guide RNA
gugacuuguuccuccuugcc

SEQ ID NO: 30426 - RNA, 20 nt, Artificial Sequence
  Guide RNA
guuccuccuugccgcccgcc

SEQ ID NO: 30427 - RNA, 20 nt, Artificial Sequence
  Guide RNA
guuccuccuugccucccgcc

SEQ ID NO: 30428 - RNA, 20 nt, Artificial Sequence
  Guide RNA
ucacaaucauggcgggaggc

SEQ ID NO: 30429 - RNA, 20 nt, Artificial Sequence
  Guide RNA
ucacaaucauggcgggcggc

SEQ ID NO: 30430 - RNA, 20 nt, Artificial Sequence
  Guide RNA
ucauggcgggaggcaaggag

SEQ ID NO: 30431 - RNA, 20 nt, Artificial Sequence
  Guide RNA
ucauggcgggcggcaaggag

SEQ ID NO: 30432 - RNA, 20 nt, Artificial Sequence
  Guide RNA
uccuccuugccgcccgccau

SEQ ID NO: 30433 - RNA, 20 nt, Artificial Sequence
  Guide RNA
uccuccuugccucccgccau

SEQ ID NO: 30434 - RNA, 20 nt, Artificial Sequence
  Guide RNA
uccuugccgcccgccaugau

SEQ ID NO: 30435 - RNA, 20 nt, Artificial Sequence
  Guide RNA
uccuugccucccgccaugau

SEQ ID NO: 30436 - RNA, 20 nt, Artificial Sequence
  Guide RNA
ugacuuguuccuccuugccg

SEQ ID NO: 30437 - RNA, 20 nt, Artificial Sequence
  Guide RNA
ugacuuguuccuccuugccu

SEQ ID NO: 30438 - RNA, 20 nt, Artificial Sequence
  Guide RNA
ugccgcccgccaugauugug

SEQ ID NO: 30439 - RNA, 20 nt, Artificial Sequence
  Guide RNA
uggcgggaggcaaggaggaa

SEQ ID NO: 30440 - RNA, 20 nt, Artificial Sequence
  Guide RNA
uggcgggcggcaaggaggaa

SEQ ID NO: 30441 - RNA, 20 nt, Artificial Sequence
  Guide RNA
ugugacuuguuccuccuugc

SEQ ID NO: 30442 - RNA, 20 nt, Artificial Sequence
  Guide RNA
uguuccuccuugccgcccgc

SEQ ID NO: 30443 - RNA, 20 nt, Artificial Sequence
  Guide RNA
uguuccuccuugccucccgc

SEQ ID NO: 30444 - RNA, 20 nt, Artificial Sequence
  Guide RNA
uuccuccuugccgcccgcca

SEQ ID NO: 30445 - RNA, 20 nt, Artificial Sequence
  Guide RNA
uuccuccuugccucccgcca

SEQ ID NO: 30446 - RNA, 20 nt, Artificial Sequence
  Guide RNA
uugccgcccgccaugauugu

SEQ ID NO: 30447 - RNA, 20 nt, Artificial Sequence
  Guide RNA
uuguuccuccuugccgcccg

SEQ ID NO: 30448 - RNA, 20 nt, Artificial Sequence
  Guide RNA
uuguuccuccuugccucccg

SEQ ID NO: 30449 - RNA, 21 nt, Artificial Sequence
  Guide RNA
aaucauggcgggaggcaagga

SEQ ID NO: 30450 - RNA, 21 nt, Artificial Sequence
  Guide RNA
aaucauggcgggcggcaagga

SEQ ID NO: 30451 - RNA, 21 nt, Artificial Sequence
  Guide RNA
acaaucauggcgggaggcaag

SEQ ID NO: 30452 - RNA, 21 nt, Artificial Sequence
  Guide RNA
acaaucauggcgggcggcaag

SEQ ID NO: 30453 - RNA, 21 nt, Artificial Sequence
  Guide RNA
acuuguuccuccuugccgccc

SEQ ID NO: 30454 - RNA, 21 nt, Artificial Sequence
  Guide RNA
acuuguuccuccuugccuccc

SEQ ID NO: 30455 - RNA, 21 nt, Artificial Sequence
  Guide RNA
agaugugacuuguuccuccuu

SEQ ID NO: 30456 - RNA, 21 nt, Artificial Sequence
  Guide RNA
aggccucacaaucauggcggg

SEQ ID NO: 30457 - RNA, 21 nt, Artificial Sequence
  Guide RNA
aucauggcgggaggcaaggag

SEQ ID NO: 30458 - RNA, 21 nt, Artificial Sequence
  Guide RNA
aucauggcgggcggcaaggag

SEQ ID NO: 30459 - RNA, 21 nt, Artificial Sequence
  Guide RNA
auggcgggaggcaaggaggaa

SEQ ID NO: 30460 - RNA, 21 nt, Artificial Sequence
  Guide RNA
auggcgggcggcaaggaggaa

SEQ ID NO: 30461 - RNA, 21 nt, Artificial Sequence
  Guide RNA
augugacuuguuccuccuugc

SEQ ID NO: 30462 - RNA, 21 nt, Artificial Sequence
  Guide RNA
caaucauggcgggaggcaagg

SEQ ID NO: 30463 - RNA, 21 nt, Artificial Sequence
  Guide RNA
caaucauggcgggcggcaagg

SEQ ID NO: 30464 - RNA, 21 nt, Artificial Sequence
  Guide RNA
cacaaucauggcgggaggcaa

SEQ ID NO: 30465 - RNA, 21 nt, Artificial Sequence
  Guide RNA
cacaaucauggcgggcggcaa

SEQ ID NO: 30466 - RNA, 21 nt, Artificial Sequence
  Guide RNA
cauggcgggaggcaaggagga

SEQ ID NO: 30467 - RNA, 21 nt, Artificial Sequence
  Guide RNA
cauggcgggcggcaaggagga

SEQ ID NO: 30468 - RNA, 21 nt, Artificial Sequence
  Guide RNA
ccgcccgccaugauugugagg

SEQ ID NO: 30469 - RNA, 21 nt, Artificial Sequence
  Guide RNA
ccucacaaucauggcgggagg

SEQ ID NO: 30470 - RNA, 21 nt, Artificial Sequence
  Guide RNA
ccucacaaucauggcgggcgg

SEQ ID NO: 30471 - RNA, 21 nt, Artificial Sequence
  Guide RNA
ccuccuugccgcccgccauga

SEQ ID NO: 30472 - RNA, 21 nt, Artificial Sequence
  Guide RNA
ccuccuugccucccgccauga

SEQ ID NO: 30473 - RNA, 21 nt, Artificial Sequence
  Guide RNA
ccuugccgcccgccaugauug

SEQ ID NO: 30474 - RNA, 21 nt, Artificial Sequence
  Guide RNA
ccuugccucccgccaugauug

SEQ ID NO: 30475 - RNA, 21 nt, Artificial Sequence
  Guide RNA
cgcccgccaugauugugaggc

SEQ ID NO: 30476 - RNA, 21 nt, Artificial Sequence
  Guide RNA
cgggaggcaaggaggaacaag

SEQ ID NO: 30477 - RNA, 21 nt, Artificial Sequence
  Guide RNA
cgggcggcaaggaggaacaag

SEQ ID NO: 30478 - RNA, 21 nt, Artificial Sequence
  Guide RNA
cucacaaucauggcgggaggc

SEQ ID NO: 30479 - RNA, 21 nt, Artificial Sequence
  Guide RNA
cucacaaucauggcgggcggc

SEQ ID NO: 30480 - RNA, 21 nt, Artificial Sequence
  Guide RNA
cuccuugccgcccgccaugau

SEQ ID NO: 30481 - RNA, 21 nt, Artificial Sequence
  Guide RNA
cuccuugccucccgccaugau

SEQ ID NO: 30482 - RNA, 21 nt, Artificial Sequence
  Guide RNA
cuugccgcccgccaugauugu

SEQ ID NO: 30483 - RNA, 21 nt, Artificial Sequence
  Guide RNA
cuugccucccgccaugauugu

SEQ ID NO: 30484 - RNA, 21 nt, Artificial Sequence
  Guide RNA
cuuguuccuccuugccgcccg

SEQ ID NO: 30485 - RNA, 21 nt, Artificial Sequence
  Guide RNA
cuuguuccuccuugccucccg

SEQ ID NO: 30486 - RNA, 21 nt, Artificial Sequence
  Guide RNA
gacuuguuccuccuugccgcc

SEQ ID NO: 30487 - RNA, 21 nt, Artificial Sequence
  Guide RNA
gacuuguuccuccuugccucc

SEQ ID NO: 30488 - RNA, 21 nt, Artificial Sequence
  Guide RNA
gaggcaaggaggaacaaguca

SEQ ID NO: 30489 - RNA, 21 nt, Artificial Sequence
  Guide RNA
gaggccucacaaucauggcgg

SEQ ID NO: 30490 - RNA, 21 nt, Artificial Sequence
  Guide RNA
gaugugacuuguuccuccuug

SEQ ID NO: 30491 - RNA, 21 nt, Artificial Sequence
  Guide RNA
gccgcccgccaugauugugag

SEQ ID NO: 30492 - RNA, 21 nt, Artificial Sequence
  Guide RNA
gccucacaaucauggcgggcg

SEQ ID NO: 30493 - RNA, 21 nt, Artificial Sequence
  Guide RNA
gcggcaaggaggaacaaguca

SEQ ID NO: 30494 - RNA, 21 nt, Artificial Sequence
  Guide RNA
gcgggaggcaaggaggaacaa

SEQ ID NO: 30495 - RNA, 21 nt, Artificial Sequence
  Guide RNA
gcgggcggcaaggaggaacaa

SEQ ID NO: 30496 - RNA, 21 nt, Artificial Sequence
  Guide RNA
ggaggcaaggaggaacaaguc

SEQ ID NO: 30497 - RNA, 21 nt, Artificial Sequence
  Guide RNA
ggaggccucacaaucauggcg

SEQ ID NO: 30498 - RNA, 21 nt, Artificial Sequence
  Guide RNA
ggccucacaaucauggcgggc

SEQ ID NO: 30499 - RNA, 21 nt, Artificial Sequence
  Guide RNA
ggcggcaaggaggaacaaguc

SEQ ID NO: 30500 - RNA, 21 nt, Artificial Sequence
  Guide RNA
ggcgggaggcaaggaggaaca

SEQ ID NO: 30501 - RNA, 21 nt, Artificial Sequence
  Guide RNA
ggcgggcggcaaggaggaaca

SEQ ID NO: 30502 - RNA, 21 nt, Artificial Sequence
  Guide RNA
gggaggcaaggaggaacaagu

SEQ ID NO: 30503 - RNA, 21 nt, Artificial Sequence
  Guide RNA
gggaggccucacaaucauggc

SEQ ID NO: 30504 - RNA, 21 nt, Artificial Sequence
  Guide RNA
gggcggcaaggaggaacaagu

SEQ ID NO: 30505 - RNA, 21 nt, Artificial Sequence
  Guide RNA
gugacuuguuccuccuugccg

SEQ ID NO: 30506 - RNA, 21 nt, Artificial Sequence
  Guide RNA
gugacuuguuccuccuugccu

SEQ ID NO: 30507 - RNA, 21 nt, Artificial Sequence
  Guide RNA
guuccuccuugccgcccgcca

SEQ ID NO: 30508 - RNA, 21 nt, Artificial Sequence
  Guide RNA
guuccuccuugccucccgcca

SEQ ID NO: 30509 - RNA, 21 nt, Artificial Sequence
  Guide RNA
ucacaaucauggcgggaggca

SEQ ID NO: 30510 - RNA, 21 nt, Artificial Sequence
  Guide RNA
ucacaaucauggcgggcggca

SEQ ID NO: 30511 - RNA, 21 nt, Artificial Sequence
  Guide RNA
ucauggcgggaggcaaggagg

SEQ ID NO: 30512 - RNA, 21 nt, Artificial Sequence
  Guide RNA
ucauggcgggcggcaaggagg

SEQ ID NO: 30513 - RNA, 21 nt, Artificial Sequence
  Guide RNA
uccuccuugccgcccgccaug

SEQ ID NO: 30514 - RNA, 21 nt, Artificial Sequence
  Guide RNA
uccuccuugccucccgccaug

SEQ ID NO: 30515 - RNA, 21 nt, Artificial Sequence
  Guide RNA
uccuugccgcccgccaugauu

SEQ ID NO: 30516 - RNA, 21 nt, Artificial Sequence
  Guide RNA
uccuugccucccgccaugauu

SEQ ID NO: 30517 - RNA, 21 nt, Artificial Sequence
  Guide RNA
ugacuuguuccuccuugccgc

SEQ ID NO: 30518 - RNA, 21 nt, Artificial Sequence
  Guide RNA
ugacuuguuccuccuugccuc

SEQ ID NO: 30519 - RNA, 21 nt, Artificial Sequence
  Guide RNA
ugccgcccgccaugauuguga

SEQ ID NO: 30520 - RNA, 21 nt, Artificial Sequence
  Guide RNA
uggcgggaggcaaggaggaac

SEQ ID NO: 30521 - RNA, 21 nt, Artificial Sequence
  Guide RNA
uggcgggcggcaaggaggaac

SEQ ID NO: 30522 - RNA, 21 nt, Artificial Sequence
  Guide RNA
ugugacuuguuccuccuugcc

SEQ ID NO: 30523 - RNA, 21 nt, Artificial Sequence
  Guide RNA
uguuccuccuugccgcccgcc

SEQ ID NO: 30524 - RNA, 21 nt, Artificial Sequence
  Guide RNA
uguuccuccuugccucccgcc

SEQ ID NO: 30525 - RNA, 21 nt, Artificial Sequence
  Guide RNA
uuccuccuugccgcccgccau

SEQ ID NO: 30526 - RNA, 21 nt, Artificial Sequence
  Guide RNA
uuccuccuugccucccgccau

SEQ ID NO: 30527 - RNA, 21 nt, Artificial Sequence
  Guide RNA
uugccgcccgccaugauugug

SEQ ID NO: 30528 - RNA, 21 nt, Artificial Sequence
  Guide RNA
uuguuccuccuugccgcccgc

SEQ ID NO: 30529 - RNA, 21 nt, Artificial Sequence
  Guide RNA
uuguuccuccuugccucccgc

SEQ ID NO: 30530 - RNA, 22 nt, Artificial Sequence
  Guide RNA
aagaugugacuuguuccuccuu

SEQ ID NO: 30531 - RNA, 22 nt, Artificial Sequence
  Guide RNA
aaucauggcgggaggcaaggag

SEQ ID NO: 30532 - RNA, 22 nt, Artificial Sequence
  Guide RNA
aaucauggcgggcggcaaggag

SEQ ID NO: 30533 - RNA, 22 nt, Artificial Sequence
  Guide RNA
acaaucauggcgggaggcaagg

SEQ ID NO: 30534 - RNA, 22 nt, Artificial Sequence
  Guide RNA
acaaucauggcgggcggcaagg

SEQ ID NO: 30535 - RNA, 22 nt, Artificial Sequence
  Guide RNA
acuuguuccuccuugccgcccg

SEQ ID NO: 30536 - RNA, 22 nt, Artificial Sequence
  Guide RNA
acuuguuccuccuugccucccg

SEQ ID NO: 30537 - RNA, 22 nt, Artificial Sequence
  Guide RNA
agaugugacuuguuccuccuug

SEQ ID NO: 30538 - RNA, 22 nt, Artificial Sequence
  Guide RNA
aggccucacaaucauggcgggc

SEQ ID NO: 30539 - RNA, 22 nt, Artificial Sequence
  Guide RNA
aucauggcgggaggcaaggagg

SEQ ID NO: 30540 - RNA, 22 nt, Artificial Sequence
  Guide RNA
aucauggcgggcggcaaggagg

SEQ ID NO: 30541 - RNA, 22 nt, Artificial Sequence
  Guide RNA
auggcgggaggcaaggaggaac

SEQ ID NO: 30542 - RNA, 22 nt, Artificial Sequence
  Guide RNA
auggcgggcggcaaggaggaac

SEQ ID NO: 30543 - RNA, 22 nt, Artificial Sequence
  Guide RNA
augugacuuguuccuccuugcc

SEQ ID NO: 30544 - RNA, 22 nt, Artificial Sequence
  Guide RNA
caaucauggcgggaggcaagga

SEQ ID NO: 30545 - RNA, 22 nt, Artificial Sequence
  Guide RNA
caaucauggcgggcggcaagga

SEQ ID NO: 30546 - RNA, 22 nt, Artificial Sequence
  Guide RNA
cacaaucauggcgggaggcaag

SEQ ID NO: 30547 - RNA, 22 nt, Artificial Sequence
  Guide RNA
cacaaucauggcgggcggcaag

SEQ ID NO: 30548 - RNA, 22 nt, Artificial Sequence
  Guide RNA
cauggcgggaggcaaggaggaa

SEQ ID NO: 30549 - RNA, 22 nt, Artificial Sequence
  Guide RNA
cauggcgggcggcaaggaggaa

SEQ ID NO: 30550 - RNA, 22 nt, Artificial Sequence
  Guide RNA
ccgcccgccaugauugugaggc

SEQ ID NO: 30551 - RNA, 22 nt, Artificial Sequence
  Guide RNA
ccucacaaucauggcgggaggc

SEQ ID NO: 30552 - RNA, 22 nt, Artificial Sequence
  Guide RNA
ccucacaaucauggcgggcggc

SEQ ID NO: 30553 - RNA, 22 nt, Artificial Sequence
  Guide RNA
ccuccuugccgcccgccaugau

SEQ ID NO: 30554 - RNA, 22 nt, Artificial Sequence
  Guide RNA
ccuccuugccucccgccaugau

SEQ ID NO: 30555 - RNA, 22 nt, Artificial Sequence
  Guide RNA
ccuugccgcccgccaugauugu

SEQ ID NO: 30556 - RNA, 22 nt, Artificial Sequence
  Guide RNA
ccuugccucccgccaugauugu

SEQ ID NO: 30557 - RNA, 22 nt, Artificial Sequence
  Guide RNA
cgcccgccaugauugugaggcc

SEQ ID NO: 30558 - RNA, 22 nt, Artificial Sequence
  Guide RNA
cgggaggcaaggaggaacaagu

SEQ ID NO: 30559 - RNA, 22 nt, Artificial Sequence
  Guide RNA
cgggcggcaaggaggaacaagu

SEQ ID NO: 30560 - RNA, 22 nt, Artificial Sequence
  Guide RNA
cucacaaucauggcgggaggca

SEQ ID NO: 30561 - RNA, 22 nt, Artificial Sequence
  Guide RNA
cucacaaucauggcgggcggca

SEQ ID NO: 30562 - RNA, 22 nt, Artificial Sequence
  Guide RNA
cuccuugccgcccgccaugauu

SEQ ID NO: 30563 - RNA, 22 nt, Artificial Sequence
  Guide RNA
cuccuugccucccgccaugauu

SEQ ID NO: 30564 - RNA, 22 nt, Artificial Sequence
  Guide RNA
cuugccgcccgccaugauugug

SEQ ID NO: 30565 - RNA, 22 nt, Artificial Sequence
  Guide RNA
cuugccucccgccaugauugug

SEQ ID NO: 30566 - RNA, 22 nt, Artificial Sequence
  Guide RNA
cuuguuccuccuugccgcccgc

SEQ ID NO: 30567 - RNA, 22 nt, Artificial Sequence
  Guide RNA
cuuguuccuccuugccucccgc

SEQ ID NO: 30568 - RNA, 22 nt, Artificial Sequence
  Guide RNA
gacuuguuccuccuugccgccc

SEQ ID NO: 30569 - RNA, 22 nt, Artificial Sequence
  Guide RNA
gacuuguuccuccuugccuccc

SEQ ID NO: 30570 - RNA, 22 nt, Artificial Sequence
  Guide RNA
gaggcaaggaggaacaagucac

SEQ ID NO: 30571 - RNA, 22 nt, Artificial Sequence
  Guide RNA
gaggccucacaaucauggcggg

SEQ ID NO: 30572 - RNA, 22 nt, Artificial Sequence
  Guide RNA
gaugugacuuguuccuccuugc

SEQ ID NO: 30573 - RNA, 22 nt, Artificial Sequence
  Guide RNA
gccgcccgccaugauugugagg

SEQ ID NO: 30574 - RNA, 22 nt, Artificial Sequence
  Guide RNA
gccucacaaucauggcgggagg

SEQ ID NO: 30575 - RNA, 22 nt, Artificial Sequence
  Guide RNA
gccucacaaucauggcgggcgg

SEQ ID NO: 30576 - RNA, 22 nt, Artificial Sequence
  Guide RNA
gcggcaaggaggaacaagucac

SEQ ID NO: 30577 - RNA, 22 nt, Artificial Sequence
  Guide RNA
gcgggaggcaaggaggaacaag

SEQ ID NO: 30578 - RNA, 22 nt, Artificial Sequence
  Guide RNA
gcgggcggcaaggaggaacaag

SEQ ID NO: 30579 - RNA, 22 nt, Artificial Sequence
  Guide RNA
ggaggcaaggaggaacaaguca

SEQ ID NO: 30580 - RNA, 22 nt, Artificial Sequence
  Guide RNA
ggaggccucacaaucauggcgg

SEQ ID NO: 30581 - RNA, 22 nt, Artificial Sequence
  Guide RNA
ggccucacaaucauggcgggcg

SEQ ID NO: 30582 - RNA, 22 nt, Artificial Sequence
  Guide RNA
ggcggcaaggaggaacaaguca

SEQ ID NO: 30583 - RNA, 22 nt, Artificial Sequence
  Guide RNA
ggcgggaggcaaggaggaacaa

SEQ ID NO: 30584 - RNA, 22 nt, Artificial Sequence
  Guide RNA
ggcgggcggcaaggaggaacaa

SEQ ID NO: 30585 - RNA, 22 nt, Artificial Sequence
  Guide RNA
gggaggcaaggaggaacaaguc

SEQ ID NO: 30586 - RNA, 22 nt, Artificial Sequence
  Guide RNA
gggaggccucacaaucauggcg

SEQ ID NO: 30587 - RNA, 22 nt, Artificial Sequence
  Guide RNA
gggcggcaaggaggaacaaguc

SEQ ID NO: 30588 - RNA, 22 nt, Artificial Sequence
  Guide RNA
ggggaggccucacaaucauggc

SEQ ID NO: 30589 - RNA, 22 nt, Artificial Sequence
  Guide RNA
gugacuuguuccuccuugccgc

SEQ ID NO: 30590 - RNA, 22 nt, Artificial Sequence
  Guide RNA
gugacuuguuccuccuugccuc

SEQ ID NO: 30591 - RNA, 22 nt, Artificial Sequence
  Guide RNA
guuccuccuugccgcccgccau

SEQ ID NO: 30592 - RNA, 22 nt, Artificial Sequence
  Guide RNA
guuccuccuugccucccgccau

SEQ ID NO: 30593 - RNA, 22 nt, Artificial Sequence
  Guide RNA
ucacaaucauggcgggaggcaa

SEQ ID NO: 30594 - RNA, 22 nt, Artificial Sequence
  Guide RNA
ucacaaucauggcgggcggcaa

SEQ ID NO: 30595 - RNA, 22 nt, Artificial Sequence
  Guide RNA
ucauggcgggaggcaaggagga

SEQ ID NO: 30596 - RNA, 22 nt, Artificial Sequence
  Guide RNA
ucauggcgggcggcaaggagga

SEQ ID NO: 30597 - RNA, 22 nt, Artificial Sequence
  Guide RNA
uccuccuugccgcccgccauga

SEQ ID NO: 30598 - RNA, 22 nt, Artificial Sequence
  Guide RNA
uccuccuugccucccgccauga

SEQ ID NO: 30599 - RNA, 22 nt, Artificial Sequence
  Guide RNA
uccuugccgcccgccaugauug

SEQ ID NO: 30600 - RNA, 22 nt, Artificial Sequence
  Guide RNA
uccuugccucccgccaugauug

SEQ ID NO: 30601 - RNA, 22 nt, Artificial Sequence
  Guide RNA
ugacuuguuccuccuugccgcc

SEQ ID NO: 30602 - RNA, 22 nt, Artificial Sequence
  Guide RNA
ugacuuguuccuccuugccucc

SEQ ID NO: 30603 - RNA, 22 nt, Artificial Sequence
  Guide RNA
ugccgcccgccaugauugugag

SEQ ID NO: 30604 - RNA, 22 nt, Artificial Sequence
  Guide RNA
uggcgggaggcaaggaggaaca

SEQ ID NO: 30605 - RNA, 22 nt, Artificial Sequence
  Guide RNA
uggcgggcggcaaggaggaaca

SEQ ID NO: 30606 - RNA, 22 nt, Artificial Sequence
  Guide RNA
ugugacuuguuccuccuugccg

SEQ ID NO: 30607 - RNA, 22 nt, Artificial Sequence
  Guide RNA
ugugacuuguuccuccuugccu

SEQ ID NO: 30608 - RNA, 22 nt, Artificial Sequence
  Guide RNA
uguuccuccuugccgcccgcca

SEQ ID NO: 30609 - RNA, 22 nt, Artificial Sequence
  Guide RNA
uguuccuccuugccucccgcca

SEQ ID NO: 30610 - RNA, 22 nt, Artificial Sequence
  Guide RNA
uuccuccuugccgcccgccaug

SEQ ID NO: 30611 - RNA, 22 nt, Artificial Sequence
  Guide RNA
uuccuccuugccucccgccaug

SEQ ID NO: 30612 - RNA, 22 nt, Artificial Sequence
  Guide RNA
uugccgcccgccaugauuguga

SEQ ID NO: 30613 - RNA, 22 nt, Artificial Sequence
  Guide RNA
uuguuccuccuugccgcccgcc

SEQ ID NO: 30614 - RNA, 22 nt, Artificial Sequence
  Guide RNA
uuguuccuccuugccucccgcc

SEQ ID NO: 30615 - RNA, 20 nt, Artificial Sequence
  Guide RNA
accugcgaucaggaguuuga

SEQ ID NO: 30616 - RNA, 20 nt, Artificial Sequence
  Guide RNA
aucgcaggugauccaccugc

SEQ ID NO: 30617 - RNA, 20 nt, Artificial Sequence
  Guide RNA
aucucaggugauccaccugc

SEQ ID NO: 30618 - RNA, 20 nt, Artificial Sequence
  Guide RNA
ccggggcagguggaucaccu

SEQ ID NO: 30619 - RNA, 20 nt, Artificial Sequence
  Guide RNA
ccugcgaucaggaguuugag

SEQ ID NO: 30620 - RNA, 20 nt, Artificial Sequence
  Guide RNA
cgcaggugauccaccugccc

SEQ ID NO: 30621 - RNA, 20 nt, Artificial Sequence
  Guide RNA
cggggcagguggaucaccug

SEQ ID NO: 30622 - RNA, 20 nt, Artificial Sequence
  Guide RNA
cugcgaucaggaguuugaga

SEQ ID NO: 30623 - RNA, 20 nt, Artificial Sequence
  Guide RNA
cuggucucaaacuccugauc

SEQ ID NO: 30624 - RNA, 20 nt, Artificial Sequence
  Guide RNA
gaucgcaggugauccaccug

SEQ ID NO: 30625 - RNA, 20 nt, Artificial Sequence
  Guide RNA
gccggggcagguggaucacc

SEQ ID NO: 30626 - RNA, 20 nt, Artificial Sequence
  Guide RNA
ggccggggcagguggaucac

SEQ ID NO: 30627 - RNA, 20 nt, Artificial Sequence
  Guide RNA
gggcagguggaucaccugcg

SEQ ID NO: 30628 - RNA, 20 nt, Artificial Sequence
  Guide RNA
ggggcagguggaucaccugc

SEQ ID NO: 30629 - RNA, 20 nt, Artificial Sequence
  Guide RNA
ggucucaaacuccugaucgc

SEQ ID NO: 30630 - RNA, 20 nt, Artificial Sequence
  Guide RNA
ucgcaggugauccaccugcc

SEQ ID NO: 30631 - RNA, 20 nt, Artificial Sequence
  Guide RNA
ucucaggugauccaccugcc

SEQ ID NO: 30632 - RNA, 20 nt, Artificial Sequence
  Guide RNA
ugaucgcaggugauccaccu

SEQ ID NO: 30633 - RNA, 20 nt, Artificial Sequence
  Guide RNA
uggucucaaacuccugaucg

SEQ ID NO: 30634 - RNA, 21 nt, Artificial Sequence
  Guide RNA
accugcgaucaggaguuugag

SEQ ID NO: 30635 - RNA, 21 nt, Artificial Sequence
  Guide RNA
aggccggggcagguggaucac

SEQ ID NO: 30636 - RNA, 21 nt, Artificial Sequence
  Guide RNA
aucgcaggugauccaccugcc

SEQ ID NO: 30637 - RNA, 21 nt, Artificial Sequence
  Guide RNA
aucucaggugauccaccugcc

SEQ ID NO: 30638 - RNA, 21 nt, Artificial Sequence
  Guide RNA
caccugcgaucaggaguuuga

SEQ ID NO: 30639 - RNA, 21 nt, Artificial Sequence
  Guide RNA
ccggggcagguggaucaccug

SEQ ID NO: 30640 - RNA, 21 nt, Artificial Sequence
  Guide RNA
ccugcgaucaggaguuugaga

SEQ ID NO: 30641 - RNA, 21 nt, Artificial Sequence
  Guide RNA
cgcaggugauccaccugcccc

SEQ ID NO: 30642 - RNA, 21 nt, Artificial Sequence
  Guide RNA
cggggcagguggaucaccuga

SEQ ID NO: 30643 - RNA, 21 nt, Artificial Sequence
  Guide RNA
cggggcagguggaucaccugc

SEQ ID NO: 30644 - RNA, 21 nt, Artificial Sequence
  Guide RNA
cugaucgcaggugauccaccu

SEQ ID NO: 30645 - RNA, 21 nt, Artificial Sequence
  Guide RNA
cugcgaucaggaguuugagac

SEQ ID NO: 30646 - RNA, 21 nt, Artificial Sequence
  Guide RNA
cuggucucaaacuccugaucg

SEQ ID NO: 30647 - RNA, 21 nt, Artificial Sequence
  Guide RNA
gaucgcaggugauccaccugc

SEQ ID NO: 30648 - RNA, 21 nt, Artificial Sequence
  Guide RNA
gaucucaggugauccaccugc

SEQ ID NO: 30649 - RNA, 21 nt, Artificial Sequence
  Guide RNA
gccggggcagguggaucaccu

SEQ ID NO: 30650 - RNA, 21 nt, Artificial Sequence
  Guide RNA
gcuggucucaaacuccugauc

SEQ ID NO: 30651 - RNA, 21 nt, Artificial Sequence
  Guide RNA
ggccggggcagguggaucacc

SEQ ID NO: 30652 - RNA, 21 nt, Artificial Sequence
  Guide RNA
gggcagguggaucaccugcga

SEQ ID NO: 30653 - RNA, 21 nt, Artificial Sequence
  Guide RNA
ggggcagguggaucaccugcg

SEQ ID NO: 30654 - RNA, 21 nt, Artificial Sequence
  Guide RNA
ggucucaaacuccugaucgca

SEQ ID NO: 30655 - RNA, 21 nt, Artificial Sequence
  Guide RNA
ucgcaggugauccaccugccc

SEQ ID NO: 30656 - RNA, 21 nt, Artificial Sequence
  Guide RNA
ucucaggugauccaccugccc

SEQ ID NO: 30657 - RNA, 21 nt, Artificial Sequence
  Guide RNA
ugaucgcaggugauccaccug

SEQ ID NO: 30658 - RNA, 21 nt, Artificial Sequence
  Guide RNA
uggucucaaacuccugaucgc

SEQ ID NO: 30659 - RNA, 22 nt, Artificial Sequence
  Guide RNA
accugcgaucaggaguuugaga

SEQ ID NO: 30660 - RNA, 22 nt, Artificial Sequence
  Guide RNA
aggccggggcagguggaucacc

SEQ ID NO: 30661 - RNA, 22 nt, Artificial Sequence
  Guide RNA
aucgcaggugauccaccugccc

SEQ ID NO: 30662 - RNA, 22 nt, Artificial Sequence
  Guide RNA
aucucaggugauccaccugccc

SEQ ID NO: 30663 - RNA, 22 nt, Artificial Sequence
  Guide RNA
caccugcgaucaggaguuugag

SEQ ID NO: 30664 - RNA, 22 nt, Artificial Sequence
  Guide RNA
ccggggcagguggaucaccuga

SEQ ID NO: 30665 - RNA, 22 nt, Artificial Sequence
  Guide RNA
ccggggcagguggaucaccugc

SEQ ID NO: 30666 - RNA, 22 nt, Artificial Sequence
  Guide RNA
ccugaucgcaggugauccaccu

SEQ ID NO: 30667 - RNA, 22 nt, Artificial Sequence
  Guide RNA
ccugcgaucaggaguuugagac

SEQ ID NO: 30668 - RNA, 22 nt, Artificial Sequence
  Guide RNA
cgcaggugauccaccugccccg

SEQ ID NO: 30669 - RNA, 22 nt, Artificial Sequence
  Guide RNA
cggggcagguggaucaccugag

SEQ ID NO: 30670 - RNA, 22 nt, Artificial Sequence
  Guide RNA
cggggcagguggaucaccugcg

SEQ ID NO: 30671 - RNA, 22 nt, Artificial Sequence
  Guide RNA
cugaucgcaggugauccaccug

SEQ ID NO: 30672 - RNA, 22 nt, Artificial Sequence
  Guide RNA
cugcgaucaggaguuugagacc

SEQ ID NO: 30673 - RNA, 22 nt, Artificial Sequence
  Guide RNA
cuggucucaaacuccugaucgc

SEQ ID NO: 30674 - RNA, 22 nt, Artificial Sequence
  Guide RNA
gaggccggggcagguggaucac

SEQ ID NO: 30675 - RNA, 22 nt, Artificial Sequence
  Guide RNA
gaucgcaggugauccaccugcc

SEQ ID NO: 30676 - RNA, 22 nt, Artificial Sequence
  Guide RNA
gaucucaggugauccaccugcc

SEQ ID NO: 30677 - RNA, 22 nt, Artificial Sequence
  Guide RNA
gccggggcagguggaucaccug

SEQ ID NO: 30678 - RNA, 22 nt, Artificial Sequence
  Guide RNA
gcuggucucaaacuccugaucg

SEQ ID NO: 30679 - RNA, 22 nt, Artificial Sequence
  Guide RNA
ggccggggcagguggaucaccu

SEQ ID NO: 30680 - RNA, 22 nt, Artificial Sequence
  Guide RNA
ggcuggucucaaacuccugauc

SEQ ID NO: 30681 - RNA, 22 nt, Artificial Sequence
  Guide RNA
gggcagguggaucaccugcgau

SEQ ID NO: 30682 - RNA, 22 nt, Artificial Sequence
  Guide RNA
ggggcagguggaucaccugcga

SEQ ID NO: 30683 - RNA, 22 nt, Artificial Sequence
  Guide RNA
ggucucaaacuccugaucgcag

SEQ ID NO: 30684 - RNA, 22 nt, Artificial Sequence
  Guide RNA
ucaccugcgaucaggaguuuga

SEQ ID NO: 30685 - RNA, 22 nt, Artificial Sequence
  Guide RNA
ucgcaggugauccaccugcccc

SEQ ID NO: 30686 - RNA, 22 nt, Artificial Sequence
  Guide RNA
ucucaggugauccaccugcccc

SEQ ID NO: 30687 - RNA, 22 nt, Artificial Sequence
  Guide RNA
ugaucgcaggugauccaccugc

SEQ ID NO: 30688 - RNA, 22 nt, Artificial Sequence
  Guide RNA
ugaucucaggugauccaccugc

SEQ ID NO: 30689 - RNA, 22 nt, Artificial Sequence
  Guide RNA
uggucucaaacuccugaucgca

SEQ ID NO: 30690 - RNA, 20 nt, Artificial Sequence
  Guide RNA
aaggaagggguggcaugcca

SEQ ID NO: 30691 - RNA, 20 nt, Artificial Sequence
  Guide RNA
aaggaggggguggcaugcca

SEQ ID NO: 30692 - RNA, 20 nt, Artificial Sequence
  Guide RNA
aagggguggcaugccaaguc

SEQ ID NO: 30693 - RNA, 20 nt, Artificial Sequence
  Guide RNA
acccccuccuucuaggucag

SEQ ID NO: 30694 - RNA, 20 nt, Artificial Sequence
  Guide RNA
accccuuccuucuaggucag

SEQ ID NO: 30695 - RNA, 20 nt, Artificial Sequence
  Guide RNA
accuagaaggaagggguggc

SEQ ID NO: 30696 - RNA, 20 nt, Artificial Sequence
  Guide RNA
accuagaaggaggggguggc

SEQ ID NO: 30697 - RNA, 20 nt, Artificial Sequence
  Guide RNA
acuuggcaugccacccccuc

SEQ ID NO: 30698 - RNA, 20 nt, Artificial Sequence
  Guide RNA
acuuggcaugccaccccuuc

SEQ ID NO: 30699 - RNA, 20 nt, Artificial Sequence
  Guide RNA
agaaggaagggguggcaugc

SEQ ID NO: 30700 - RNA, 20 nt, Artificial Sequence
  Guide RNA
agaaggaggggguggcaugc

SEQ ID NO: 30701 - RNA, 20 nt, Artificial Sequence
  Guide RNA
aggaagggguggcaugccaa

SEQ ID NO: 30702 - RNA, 20 nt, Artificial Sequence
  Guide RNA
aggaggggguggcaugccaa

SEQ ID NO: 30703 - RNA, 20 nt, Artificial Sequence
  Guide RNA
aggggguggcaugccaaguc

SEQ ID NO: 30704 - RNA, 20 nt, Artificial Sequence
  Guide RNA
augccacccccuccuucuag

SEQ ID NO: 30705 - RNA, 20 nt, Artificial Sequence
  Guide RNA
augccaccccuuccuucuag

SEQ ID NO: 30706 - RNA, 20 nt, Artificial Sequence
  Guide RNA
cacccccuccuucuagguca

SEQ ID NO: 30707 - RNA, 20 nt, Artificial Sequence
  Guide RNA
caccccuuccuucuagguca

SEQ ID NO: 30708 - RNA, 20 nt, Artificial Sequence
  Guide RNA
caugccacccccuccuucua

SEQ ID NO: 30709 - RNA, 20 nt, Artificial Sequence
  Guide RNA
caugccaccccuuccuucua

SEQ ID NO: 30710 - RNA, 20 nt, Artificial Sequence
  Guide RNA
ccacccccuccuucuagguc

SEQ ID NO: 30711 - RNA, 20 nt, Artificial Sequence
  Guide RNA
ccaccccuuccuucuagguc

SEQ ID NO: 30712 - RNA, 20 nt, Artificial Sequence
  Guide RNA
cccccuccuucuaggucagc

SEQ ID NO: 30713 - RNA, 20 nt, Artificial Sequence
  Guide RNA
ccccuccuucuaggucagcc

SEQ ID NO: 30714 - RNA, 20 nt, Artificial Sequence
  Guide RNA
ccccuuccuucuaggucagc

SEQ ID NO: 30715 - RNA, 20 nt, Artificial Sequence
  Guide RNA
cccuccuucuaggucagccc

SEQ ID NO: 30716 - RNA, 20 nt, Artificial Sequence
  Guide RNA
cccuuccuucuaggucagcc

SEQ ID NO: 30717 - RNA, 20 nt, Artificial Sequence
  Guide RNA
ccuagaaggaagggguggca

SEQ ID NO: 30718 - RNA, 20 nt, Artificial Sequence
  Guide RNA
ccuagaaggaggggguggca

SEQ ID NO: 30719 - RNA, 20 nt, Artificial Sequence
  Guide RNA
ccuccuucuaggucagcccc

SEQ ID NO: 30720 - RNA, 20 nt, Artificial Sequence
  Guide RNA
ccuuccuucuaggucagccc

SEQ ID NO: 30721 - RNA, 20 nt, Artificial Sequence
  Guide RNA
ccuuuggggcugaccuagaa

SEQ ID NO: 30722 - RNA, 20 nt, Artificial Sequence
  Guide RNA
cuagaaggaagggguggcau

SEQ ID NO: 30723 - RNA, 20 nt, Artificial Sequence
  Guide RNA
cuagaaggaggggguggcau

SEQ ID NO: 30724 - RNA, 20 nt, Artificial Sequence
  Guide RNA
cugaccuagaaggaaggggu

SEQ ID NO: 30725 - RNA, 20 nt, Artificial Sequence
  Guide RNA
cugaccuagaaggagggggu

SEQ ID NO: 30726 - RNA, 20 nt, Artificial Sequence
  Guide RNA
cuggacuuggcaugccaccc

SEQ ID NO: 30727 - RNA, 20 nt, Artificial Sequence
  Guide RNA
cuuccuucuaggucagcccc

SEQ ID NO: 30728 - RNA, 20 nt, Artificial Sequence
  Guide RNA
cuuggcaugccacccccucc

SEQ ID NO: 30729 - RNA, 20 nt, Artificial Sequence
  Guide RNA
cuuggcaugccaccccuucc

SEQ ID NO: 30730 - RNA, 20 nt, Artificial Sequence
  Guide RNA
cuuuggggcugaccuagaag

SEQ ID NO: 30731 - RNA, 20 nt, Artificial Sequence
  Guide RNA
gaaggaagggguggcaugcc

SEQ ID NO: 30732 - RNA, 20 nt, Artificial Sequence
  Guide RNA
gaaggaggggguggcaugcc

SEQ ID NO: 30733 - RNA, 20 nt, Artificial Sequence
  Guide RNA
gaagggguggcaugccaagu

SEQ ID NO: 30734 - RNA, 20 nt, Artificial Sequence
  Guide RNA
gaccuagaaggaaggggugg

SEQ ID NO: 30735 - RNA, 20 nt, Artificial Sequence
  Guide RNA
gaccuagaaggagggggugg

SEQ ID NO: 30736 - RNA, 20 nt, Artificial Sequence
  Guide RNA
gacuuggcaugccacccccu

SEQ ID NO: 30737 - RNA, 20 nt, Artificial Sequence
  Guide RNA
gacuuggcaugccaccccuu

SEQ ID NO: 30738 - RNA, 20 nt, Artificial Sequence
  Guide RNA
gaggggguggcaugccaagu

SEQ ID NO: 30739 - RNA, 20 nt, Artificial Sequence
  Guide RNA
gcaugccacccccuccuucu

SEQ ID NO: 30740 - RNA, 20 nt, Artificial Sequence
  Guide RNA
gcaugccaccccuuccuucu

SEQ ID NO: 30741 - RNA, 20 nt, Artificial Sequence
  Guide RNA
gccacccccuccuucuaggu

SEQ ID NO: 30742 - RNA, 20 nt, Artificial Sequence
  Guide RNA
gccaccccuuccuucuaggu

SEQ ID NO: 30743 - RNA, 20 nt, Artificial Sequence
  Guide RNA
gcugaccuagaaggaagggg

SEQ ID NO: 30744 - RNA, 20 nt, Artificial Sequence
  Guide RNA
gcugaccuagaaggaggggg

SEQ ID NO: 30745 - RNA, 20 nt, Artificial Sequence
  Guide RNA
gcuggacuuggcaugccacc

SEQ ID NO: 30746 - RNA, 20 nt, Artificial Sequence
  Guide RNA
ggaagggguggcaugccaag

SEQ ID NO: 30747 - RNA, 20 nt, Artificial Sequence
  Guide RNA
ggacuuggcaugccaccccc

SEQ ID NO: 30748 - RNA, 20 nt, Artificial Sequence
  Guide RNA
ggacuuggcaugccaccccu

SEQ ID NO: 30749 - RNA, 20 nt, Artificial Sequence
  Guide RNA
ggaggggguggcaugccaag

SEQ ID NO: 30750 - RNA, 20 nt, Artificial Sequence
  Guide RNA
ggcaugccacccccuccuuc

SEQ ID NO: 30751 - RNA, 20 nt, Artificial Sequence
  Guide RNA
ggcaugccaccccuuccuuc

SEQ ID NO: 30752 - RNA, 20 nt, Artificial Sequence
  Guide RNA
ggcugaccuagaaggaaggg

SEQ ID NO: 30753 - RNA, 20 nt, Artificial Sequence
  Guide RNA
ggcugaccuagaaggagggg

SEQ ID NO: 30754 - RNA, 20 nt, Artificial Sequence
  Guide RNA
ggcuggacuuggcaugccac

SEQ ID NO: 30755 - RNA, 20 nt, Artificial Sequence
  Guide RNA
gggcugaccuagaaggaagg

SEQ ID NO: 30756 - RNA, 20 nt, Artificial Sequence
  Guide RNA
gggcugaccuagaaggaggg

SEQ ID NO: 30757 - RNA, 20 nt, Artificial Sequence
  Guide RNA
ggggcugaccuagaaggaag

SEQ ID NO: 30758 - RNA, 20 nt, Artificial Sequence
  Guide RNA
ggggcugaccuagaaggagg

SEQ ID NO: 30759 - RNA, 20 nt, Artificial Sequence
  Guide RNA
uagaaggaagggguggcaug

SEQ ID NO: 30760 - RNA, 20 nt, Artificial Sequence
  Guide RNA
uagaaggaggggguggcaug

SEQ ID NO: 30761 - RNA, 20 nt, Artificial Sequence
  Guide RNA
ugaccuagaaggaaggggug

SEQ ID NO: 30762 - RNA, 20 nt, Artificial Sequence
  Guide RNA
ugaccuagaaggagggggug

SEQ ID NO: 30763 - RNA, 20 nt, Artificial Sequence
  Guide RNA
ugccacccccuccuucuagg

SEQ ID NO: 30764 - RNA, 20 nt, Artificial Sequence
  Guide RNA
ugccaccccuuccuucuagg

SEQ ID NO: 30765 - RNA, 20 nt, Artificial Sequence
  Guide RNA
uggacuuggcaugccacccc

SEQ ID NO: 30766 - RNA, 20 nt, Artificial Sequence
  Guide RNA
uggcaugccacccccuccuu

SEQ ID NO: 30767 - RNA, 20 nt, Artificial Sequence
  Guide RNA
uggcaugccaccccuuccuu

SEQ ID NO: 30768 - RNA, 20 nt, Artificial Sequence
  Guide RNA
uggggcugaccuagaaggaa

SEQ ID NO: 30769 - RNA, 20 nt, Artificial Sequence
  Guide RNA
uggggcugaccuagaaggag

SEQ ID NO: 30770 - RNA, 20 nt, Artificial Sequence
  Guide RNA
uuggcaugccacccccuccu

SEQ ID NO: 30771 - RNA, 20 nt, Artificial Sequence
  Guide RNA
uuggcaugccaccccuuccu

SEQ ID NO: 30772 - RNA, 20 nt, Artificial Sequence
  Guide RNA
uuggggcugaccuagaagga

SEQ ID NO: 30773 - RNA, 20 nt, Artificial Sequence
  Guide RNA
uuuggggcugaccuagaagg

SEQ ID NO: 30774 - RNA, 21 nt, Artificial Sequence
  Guide RNA
aaggaagggguggcaugccaa

SEQ ID NO: 30775 - RNA, 21 nt, Artificial Sequence
  Guide RNA
aaggaggggguggcaugccaa

SEQ ID NO: 30776 - RNA, 21 nt, Artificial Sequence
  Guide RNA
aagggguggcaugccaagucc

SEQ ID NO: 30777 - RNA, 21 nt, Artificial Sequence
  Guide RNA
acccccuccuucuaggucagc

SEQ ID NO: 30778 - RNA, 21 nt, Artificial Sequence
  Guide RNA
accccuuccuucuaggucagc

SEQ ID NO: 30779 - RNA, 21 nt, Artificial Sequence
  Guide RNA
accuagaaggaagggguggca

SEQ ID NO: 30780 - RNA, 21 nt, Artificial Sequence
  Guide RNA
accuagaaggaggggguggca

SEQ ID NO: 30781 - RNA, 21 nt, Artificial Sequence
  Guide RNA
acuuggcaugccacccccucc

SEQ ID NO: 30782 - RNA, 21 nt, Artificial Sequence
  Guide RNA
acuuggcaugccaccccuucc

SEQ ID NO: 30783 - RNA, 21 nt, Artificial Sequence
  Guide RNA
agaaggaagggguggcaugcc

SEQ ID NO: 30784 - RNA, 21 nt, Artificial Sequence
  Guide RNA
agaaggaggggguggcaugcc

SEQ ID NO: 30785 - RNA, 21 nt, Artificial Sequence
  Guide RNA
aggaagggguggcaugccaag

SEQ ID NO: 30786 - RNA, 21 nt, Artificial Sequence
  Guide RNA
aggaggggguggcaugccaag

SEQ ID NO: 30787 - RNA, 21 nt, Artificial Sequence
  Guide RNA
aggggguggcaugccaagucc

SEQ ID NO: 30788 - RNA, 21 nt, Artificial Sequence
  Guide RNA
augccacccccuccuucuagg

SEQ ID NO: 30789 - RNA, 21 nt, Artificial Sequence
  Guide RNA
augccaccccuuccuucuagg

SEQ ID NO: 30790 - RNA, 21 nt, Artificial Sequence
  Guide RNA
cacccccuccuucuaggucag

SEQ ID NO: 30791 - RNA, 21 nt, Artificial Sequence
  Guide RNA
caccccuuccuucuaggucag

SEQ ID NO: 30792 - RNA, 21 nt, Artificial Sequence
  Guide RNA
caugccacccccuccuucuag

SEQ ID NO: 30793 - RNA, 21 nt, Artificial Sequence
  Guide RNA
caugccaccccuuccuucuag

SEQ ID NO: 30794 - RNA, 21 nt, Artificial Sequence
  Guide RNA
ccacccccuccuucuagguca

SEQ ID NO: 30795 - RNA, 21 nt, Artificial Sequence
  Guide RNA
ccaccccuuccuucuagguca

SEQ ID NO: 30796 - RNA, 21 nt, Artificial Sequence
  Guide RNA
cccccuccuucuaggucagcc

SEQ ID NO: 30797 - RNA, 21 nt, Artificial Sequence
  Guide RNA
ccccuccuucuaggucagccc

SEQ ID NO: 30798 - RNA, 21 nt, Artificial Sequence
  Guide RNA
ccccuuccuucuaggucagcc

SEQ ID NO: 30799 - RNA, 21 nt, Artificial Sequence
  Guide RNA
cccuccuucuaggucagcccc

SEQ ID NO: 30800 - RNA, 21 nt, Artificial Sequence
  Guide RNA
cccuuccuucuaggucagccc

SEQ ID NO: 30801 - RNA, 21 nt, Artificial Sequence
  Guide RNA
ccuagaaggaagggguggcau

SEQ ID NO: 30802 - RNA, 21 nt, Artificial Sequence
  Guide RNA
ccuagaaggaggggguggcau

SEQ ID NO: 30803 - RNA, 21 nt, Artificial Sequence
  Guide RNA
ccuccuucuaggucagcccca

SEQ ID NO: 30804 - RNA, 21 nt, Artificial Sequence
  Guide RNA
ccuuccuucuaggucagcccc

SEQ ID NO: 30805 - RNA, 21 nt, Artificial Sequence
  Guide RNA
ccuuuggggcugaccuagaag

SEQ ID NO: 30806 - RNA, 21 nt, Artificial Sequence
  Guide RNA
cuagaaggaagggguggcaug

SEQ ID NO: 30807 - RNA, 21 nt, Artificial Sequence
  Guide RNA
cuagaaggaggggguggcaug

SEQ ID NO: 30808 - RNA, 21 nt, Artificial Sequence
  Guide RNA
cugaccuagaaggaaggggug

SEQ ID NO: 30809 - RNA, 21 nt, Artificial Sequence
  Guide RNA
cugaccuagaaggagggggug

SEQ ID NO: 30810 - RNA, 21 nt, Artificial Sequence
  Guide RNA
cuggacuuggcaugccacccc

SEQ ID NO: 30811 - RNA, 21 nt, Artificial Sequence
  Guide RNA
cuuccuucuaggucagcccca

SEQ ID NO: 30812 - RNA, 21 nt, Artificial Sequence
  Guide RNA
cuuggcaugccacccccuccu

SEQ ID NO: 30813 - RNA, 21 nt, Artificial Sequence
  Guide RNA
cuuggcaugccaccccuuccu

SEQ ID NO: 30814 - RNA, 21 nt, Artificial Sequence
  Guide RNA
cuuuggggcugaccuagaagg

SEQ ID NO: 30815 - RNA, 21 nt, Artificial Sequence
  Guide RNA
gaaggaagggguggcaugcca

SEQ ID NO: 30816 - RNA, 21 nt, Artificial Sequence
  Guide RNA
gaaggaggggguggcaugcca

SEQ ID NO: 30817 - RNA, 21 nt, Artificial Sequence
  Guide RNA
gaagggguggcaugccaaguc

SEQ ID NO: 30818 - RNA, 21 nt, Artificial Sequence
  Guide RNA
gaccuagaaggaagggguggc

SEQ ID NO: 30819 - RNA, 21 nt, Artificial Sequence
  Guide RNA
gaccuagaaggaggggguggc

SEQ ID NO: 30820 - RNA, 21 nt, Artificial Sequence
  Guide RNA
gacuuggcaugccacccccuc

SEQ ID NO: 30821 - RNA, 21 nt, Artificial Sequence
  Guide RNA
gacuuggcaugccaccccuuc

SEQ ID NO: 30822 - RNA, 21 nt, Artificial Sequence
  Guide RNA
gaggggguggcaugccaaguc

SEQ ID NO: 30823 - RNA, 21 nt, Artificial Sequence
  Guide RNA
gcaugccacccccuccuucua

SEQ ID NO: 30824 - RNA, 21 nt, Artificial Sequence
  Guide RNA
gcaugccaccccuuccuucua

SEQ ID NO: 30825 - RNA, 21 nt, Artificial Sequence
  Guide RNA
gccacccccuccuucuagguc

SEQ ID NO: 30826 - RNA, 21 nt, Artificial Sequence
  Guide RNA
gccaccccuuccuucuagguc

SEQ ID NO: 30827 - RNA, 21 nt, Artificial Sequence
  Guide RNA
gcugaccuagaaggaaggggu

SEQ ID NO: 30828 - RNA, 21 nt, Artificial Sequence
  Guide RNA
gcugaccuagaaggagggggu

SEQ ID NO: 30829 - RNA, 21 nt, Artificial Sequence
  Guide RNA
gcuggacuuggcaugccaccc

SEQ ID NO: 30830 - RNA, 21 nt, Artificial Sequence
  Guide RNA
ggaagggguggcaugccaagu

SEQ ID NO: 30831 - RNA, 21 nt, Artificial Sequence
  Guide RNA
ggacuuggcaugccacccccu

SEQ ID NO: 30832 - RNA, 21 nt, Artificial Sequence
  Guide RNA
ggacuuggcaugccaccccuu

SEQ ID NO: 30833 - RNA, 21 nt, Artificial Sequence
  Guide RNA
ggaggggguggcaugccaagu

SEQ ID NO: 30834 - RNA, 21 nt, Artificial Sequence
  Guide RNA
ggcaugccacccccuccuucu

SEQ ID NO: 30835 - RNA, 21 nt, Artificial Sequence
  Guide RNA
ggcaugccaccccuuccuucu

SEQ ID NO: 30836 - RNA, 21 nt, Artificial Sequence
  Guide RNA
ggcugaccuagaaggaagggg

SEQ ID NO: 30837 - RNA, 21 nt, Artificial Sequence
  Guide RNA
ggcugaccuagaaggaggggg

SEQ ID NO: 30838 - RNA, 21 nt, Artificial Sequence
  Guide RNA
ggcuggacuuggcaugccacc

SEQ ID NO: 30839 - RNA, 21 nt, Artificial Sequence
  Guide RNA
gggcugaccuagaaggaaggg

SEQ ID NO: 30840 - RNA, 21 nt, Artificial Sequence
  Guide RNA
gggcugaccuagaaggagggg

SEQ ID NO: 30841 - RNA, 21 nt, Artificial Sequence
  Guide RNA
ggggcugaccuagaaggaagg

SEQ ID NO: 30842 - RNA, 21 nt, Artificial Sequence
  Guide RNA
ggggcugaccuagaaggaggg

SEQ ID NO: 30843 - RNA, 21 nt, Artificial Sequence
  Guide RNA
uagaaggaagggguggcaugc

SEQ ID NO: 30844 - RNA, 21 nt, Artificial Sequence
  Guide RNA
uagaaggaggggguggcaugc

SEQ ID NO: 30845 - RNA, 21 nt, Artificial Sequence
  Guide RNA
uccuuuggggcugaccuagaa

SEQ ID NO: 30846 - RNA, 21 nt, Artificial Sequence
  Guide RNA
ugaccuagaaggaaggggugg

SEQ ID NO: 30847 - RNA, 21 nt, Artificial Sequence
  Guide RNA
ugaccuagaaggagggggugg

SEQ ID NO: 30848 - RNA, 21 nt, Artificial Sequence
  Guide RNA
ugccacccccuccuucuaggu

SEQ ID NO: 30849 - RNA, 21 nt, Artificial Sequence
  Guide RNA
ugccaccccuuccuucuaggu

SEQ ID NO: 30850 - RNA, 21 nt, Artificial Sequence
  Guide RNA
uggacuuggcaugccaccccc

SEQ ID NO: 30851 - RNA, 21 nt, Artificial Sequence
  Guide RNA
uggacuuggcaugccaccccu

SEQ ID NO: 30852 - RNA, 21 nt, Artificial Sequence
  Guide RNA
uggcaugccacccccuccuuc

SEQ ID NO: 30853 - RNA, 21 nt, Artificial Sequence
  Guide RNA
uggcaugccaccccuuccuuc

SEQ ID NO: 30854 - RNA, 21 nt, Artificial Sequence
  Guide RNA
uggcuggacuuggcaugccac

SEQ ID NO: 30855 - RNA, 21 nt, Artificial Sequence
  Guide RNA
uggggcugaccuagaaggaag

SEQ ID NO: 30856 - RNA, 21 nt, Artificial Sequence
  Guide RNA
uggggcugaccuagaaggagg

SEQ ID NO: 30857 - RNA, 21 nt, Artificial Sequence
  Guide RNA
uuggcaugccacccccuccuu

SEQ ID NO: 30858 - RNA, 21 nt, Artificial Sequence
  Guide RNA
uuggcaugccaccccuuccuu

SEQ ID NO: 30859 - RNA, 21 nt, Artificial Sequence
  Guide RNA
uuggggcugaccuagaaggaa

SEQ ID NO: 30860 - RNA, 21 nt, Artificial Sequence
  Guide RNA
uuggggcugaccuagaaggag

SEQ ID NO: 30861 - RNA, 21 nt, Artificial Sequence
  Guide RNA
uuuggggcugaccuagaagga

SEQ ID NO: 30862 - RNA, 22 nt, Artificial Sequence
  Guide RNA
aaggaagggguggcaugccaag

SEQ ID NO: 30863 - RNA, 22 nt, Artificial Sequence
  Guide RNA
aaggaggggguggcaugccaag

SEQ ID NO: 30864 - RNA, 22 nt, Artificial Sequence
  Guide RNA
aagggguggcaugccaagucca

SEQ ID NO: 30865 - RNA, 22 nt, Artificial Sequence
  Guide RNA
acccccuccuucuaggucagcc

SEQ ID NO: 30866 - RNA, 22 nt, Artificial Sequence
  Guide RNA
accccuuccuucuaggucagcc

SEQ ID NO: 30867 - RNA, 22 nt, Artificial Sequence
  Guide RNA
accuagaaggaagggguggcau

SEQ ID NO: 30868 - RNA, 22 nt, Artificial Sequence
  Guide RNA
accuagaaggaggggguggcau

SEQ ID NO: 30869 - RNA, 22 nt, Artificial Sequence
  Guide RNA
acuuggcaugccacccccuccu

SEQ ID NO: 30870 - RNA, 22 nt, Artificial Sequence
  Guide RNA
acuuggcaugccaccccuuccu

SEQ ID NO: 30871 - RNA, 22 nt, Artificial Sequence
  Guide RNA
agaaggaagggguggcaugcca

SEQ ID NO: 30872 - RNA, 22 nt, Artificial Sequence
  Guide RNA
agaaggaggggguggcaugcca

SEQ ID NO: 30873 - RNA, 22 nt, Artificial Sequence
  Guide RNA
aggaagggguggcaugccaagu

SEQ ID NO: 30874 - RNA, 22 nt, Artificial Sequence
  Guide RNA
aggaggggguggcaugccaagu

SEQ ID NO: 30875 - RNA, 22 nt, Artificial Sequence
  Guide RNA
aggggguggcaugccaagucca

SEQ ID NO: 30876 - RNA, 22 nt, Artificial Sequence
  Guide RNA
augccacccccuccuucuaggu

SEQ ID NO: 30877 - RNA, 22 nt, Artificial Sequence
  Guide RNA
augccaccccuuccuucuaggu

SEQ ID NO: 30878 - RNA, 22 nt, Artificial Sequence
  Guide RNA
cacccccuccuucuaggucagc

SEQ ID NO: 30879 - RNA, 22 nt, Artificial Sequence
  Guide RNA
caccccuuccuucuaggucagc

SEQ ID NO: 30880 - RNA, 22 nt, Artificial Sequence
  Guide RNA
caugccacccccuccuucuagg

SEQ ID NO: 30881 - RNA, 22 nt, Artificial Sequence
  Guide RNA
caugccaccccuuccuucuagg

SEQ ID NO: 30882 - RNA, 22 nt, Artificial Sequence
  Guide RNA
ccacccccuccuucuaggucag

SEQ ID NO: 30883 - RNA, 22 nt, Artificial Sequence
  Guide RNA
ccaccccuuccuucuaggucag

SEQ ID NO: 30884 - RNA, 22 nt, Artificial Sequence
  Guide RNA
cccccuccuucuaggucagccc

SEQ ID NO: 30885 - RNA, 22 nt, Artificial Sequence
  Guide RNA
ccccuccuucuaggucagcccc

SEQ ID NO: 30886 - RNA, 22 nt, Artificial Sequence
  Guide RNA
ccccuuccuucuaggucagccc

SEQ ID NO: 30887 - RNA, 22 nt, Artificial Sequence
  Guide RNA
cccuccuucuaggucagcccca

SEQ ID NO: 30888 - RNA, 22 nt, Artificial Sequence
  Guide RNA
cccuuccuucuaggucagcccc

SEQ ID NO: 30889 - RNA, 22 nt, Artificial Sequence
  Guide RNA
ccuagaaggaagggguggcaug

SEQ ID NO: 30890 - RNA, 22 nt, Artificial Sequence
  Guide RNA
ccuagaaggaggggguggcaug

SEQ ID NO: 30891 - RNA, 22 nt, Artificial Sequence
  Guide RNA
ccuccuucuaggucagccccaa

SEQ ID NO: 30892 - RNA, 22 nt, Artificial Sequence
  Guide RNA
ccuuccuucuaggucagcccca

SEQ ID NO: 30893 - RNA, 22 nt, Artificial Sequence
  Guide RNA
ccuuuggggcugaccuagaagg

SEQ ID NO: 30894 - RNA, 22 nt, Artificial Sequence
  Guide RNA
cuagaaggaagggguggcaugc

SEQ ID NO: 30895 - RNA, 22 nt, Artificial Sequence
  Guide RNA
cuagaaggaggggguggcaugc

SEQ ID NO: 30896 - RNA, 22 nt, Artificial Sequence
  Guide RNA
cuccuuuggggcugaccuagaa

SEQ ID NO: 30897 - RNA, 22 nt, Artificial Sequence
  Guide RNA
cugaccuagaaggaaggggugg

SEQ ID NO: 30898 - RNA, 22 nt, Artificial Sequence
  Guide RNA
cugaccuagaaggagggggugg

SEQ ID NO: 30899 - RNA, 22 nt, Artificial Sequence
  Guide RNA
cuggacuuggcaugccaccccc

SEQ ID NO: 30900 - RNA, 22 nt, Artificial Sequence
  Guide RNA
cuggacuuggcaugccaccccu

SEQ ID NO: 30901 - RNA, 22 nt, Artificial Sequence
  Guide RNA
cuuccuucuaggucagccccaa

SEQ ID NO: 30902 - RNA, 22 nt, Artificial Sequence
  Guide RNA
cuuggcaugccacccccuccuu

SEQ ID NO: 30903 - RNA, 22 nt, Artificial Sequence
  Guide RNA
cuuggcaugccaccccuuccuu

SEQ ID NO: 30904 - RNA, 22 nt, Artificial Sequence
  Guide RNA
cuuuggggcugaccuagaagga

SEQ ID NO: 30905 - RNA, 22 nt, Artificial Sequence
  Guide RNA
gaaggaagggguggcaugccaa

SEQ ID NO: 30906 - RNA, 22 nt, Artificial Sequence
  Guide RNA
gaaggaggggguggcaugccaa

SEQ ID NO: 30907 - RNA, 22 nt, Artificial Sequence
  Guide RNA
gaagggguggcaugccaagucc

SEQ ID NO: 30908 - RNA, 22 nt, Artificial Sequence
  Guide RNA
gaccuagaaggaagggguggca

SEQ ID NO: 30909 - RNA, 22 nt, Artificial Sequence
  Guide RNA
gaccuagaaggaggggguggca

SEQ ID NO: 30910 - RNA, 22 nt, Artificial Sequence
  Guide RNA
gacuuggcaugccacccccucc

SEQ ID NO: 30911 - RNA, 22 nt, Artificial Sequence
  Guide RNA
gacuuggcaugccaccccuucc

SEQ ID NO: 30912 - RNA, 22 nt, Artificial Sequence
  Guide RNA
gaggggguggcaugccaagucc

SEQ ID NO: 30913 - RNA, 22 nt, Artificial Sequence
  Guide RNA
gcaugccacccccuccuucuag

SEQ ID NO: 30914 - RNA, 22 nt, Artificial Sequence
  Guide RNA
gcaugccaccccuuccuucuag

SEQ ID NO: 30915 - RNA, 22 nt, Artificial Sequence
  Guide RNA
gccacccccuccuucuagguca

SEQ ID NO: 30916 - RNA, 22 nt, Artificial Sequence
  Guide RNA
gccaccccuuccuucuagguca

SEQ ID NO: 30917 - RNA, 22 nt, Artificial Sequence
  Guide RNA
gcugaccuagaaggaaggggug

SEQ ID NO: 30918 - RNA, 22 nt, Artificial Sequence
  Guide RNA
gcugaccuagaaggagggggug

SEQ ID NO: 30919 - RNA, 22 nt, Artificial Sequence
  Guide RNA
gcuggacuuggcaugccacccc

SEQ ID NO: 30920 - RNA, 22 nt, Artificial Sequence
  Guide RNA
ggaagggguggcaugccaaguc

SEQ ID NO: 30921 - RNA, 22 nt, Artificial Sequence
  Guide RNA
ggacuuggcaugccacccccuc

SEQ ID NO: 30922 - RNA, 22 nt, Artificial Sequence
  Guide RNA
ggacuuggcaugccaccccuuc

SEQ ID NO: 30923 - RNA, 22 nt, Artificial Sequence
  Guide RNA
ggaggggguggcaugccaaguc

SEQ ID NO: 30924 - RNA, 22 nt, Artificial Sequence
  Guide RNA
ggcaugccacccccuccuucua

SEQ ID NO: 30925 - RNA, 22 nt, Artificial Sequence
  Guide RNA
ggcaugccaccccuuccuucua

SEQ ID NO: 30926 - RNA, 22 nt, Artificial Sequence
  Guide RNA
ggcugaccuagaaggaaggggu

SEQ ID NO: 30927 - RNA, 22 nt, Artificial Sequence
  Guide RNA
ggcugaccuagaaggagggggu

SEQ ID NO: 30928 - RNA, 22 nt, Artificial Sequence
  Guide RNA
ggcuggacuuggcaugccaccc

SEQ ID NO: 30929 - RNA, 22 nt, Artificial Sequence
  Guide RNA
gggcugaccuagaaggaagggg

SEQ ID NO: 30930 - RNA, 22 nt, Artificial Sequence
  Guide RNA
gggcugaccuagaaggaggggg

SEQ ID NO: 30931 - RNA, 22 nt, Artificial Sequence
  Guide RNA
ggggcugaccuagaaggaaggg

SEQ ID NO: 30932 - RNA, 22 nt, Artificial Sequence
  Guide RNA
ggggcugaccuagaaggagggg

SEQ ID NO: 30933 - RNA, 22 nt, Artificial Sequence
  Guide RNA
guggcuggacuuggcaugccac

SEQ ID NO: 30934 - RNA, 22 nt, Artificial Sequence
  Guide RNA
uagaaggaagggguggcaugcc

SEQ ID NO: 30935 - RNA, 22 nt, Artificial Sequence
  Guide RNA
uagaaggaggggguggcaugcc

SEQ ID NO: 30936 - RNA, 22 nt, Artificial Sequence
  Guide RNA
uccuuuggggcugaccuagaag

SEQ ID NO: 30937 - RNA, 22 nt, Artificial Sequence
  Guide RNA
ugaccuagaaggaagggguggc

SEQ ID NO: 30938 - RNA, 22 nt, Artificial Sequence
  Guide RNA
ugaccuagaaggaggggguggc

SEQ ID NO: 30939 - RNA, 22 nt, Artificial Sequence
  Guide RNA
ugccacccccuccuucuagguc

SEQ ID NO: 30940 - RNA, 22 nt, Artificial Sequence
  Guide RNA
ugccaccccuuccuucuagguc

SEQ ID NO: 30941 - RNA, 22 nt, Artificial Sequence
  Guide RNA
uggacuuggcaugccacccccu

SEQ ID NO: 30942 - RNA, 22 nt, Artificial Sequence
  Guide RNA
uggacuuggcaugccaccccuu

SEQ ID NO: 30943 - RNA, 22 nt, Artificial Sequence
  Guide RNA
uggcaugccacccccuccuucu

SEQ ID NO: 30944 - RNA, 22 nt, Artificial Sequence
  Guide RNA
uggcaugccaccccuuccuucu

SEQ ID NO: 30945 - RNA, 22 nt, Artificial Sequence
  Guide RNA
uggcuggacuuggcaugccacc

SEQ ID NO: 30946 - RNA, 22 nt, Artificial Sequence
  Guide RNA
uggggcugaccuagaaggaagg

SEQ ID NO: 30947 - RNA, 22 nt, Artificial Sequence
  Guide RNA
uggggcugaccuagaaggaggg

SEQ ID NO: 30948 - RNA, 22 nt, Artificial Sequence
  Guide RNA
uuggcaugccacccccuccuuc

SEQ ID NO: 30949 - RNA, 22 nt, Artificial Sequence
  Guide RNA
uuggcaugccaccccuuccuuc

SEQ ID NO: 30950 - RNA, 22 nt, Artificial Sequence
  Guide RNA
uuggggcugaccuagaaggaag

SEQ ID NO: 30951 - RNA, 22 nt, Artificial Sequence
  Guide RNA
uuggggcugaccuagaaggagg

SEQ ID NO: 30952 - RNA, 22 nt, Artificial Sequence
  Guide RNA
uuuggggcugaccuagaaggaa

SEQ ID NO: 30953 - RNA, 22 nt, Artificial Sequence
  Guide RNA
uuuggggcugaccuagaaggag

SEQ ID NO: 30954 - RNA, 20 nt, Artificial Sequence
  Guide RNA
aaguguccaauccuuauacc

SEQ ID NO: 30955 - RNA, 20 nt, Artificial Sequence
  Guide RNA
aaguguccaauccuuaugcc

SEQ ID NO: 30956 - RNA, 20 nt, Artificial Sequence
  Guide RNA
aauauugaaucuuggaggca

SEQ ID NO: 30957 - RNA, 20 nt, Artificial Sequence
  Guide RNA
aauauugaaucuuggaggua

SEQ ID NO: 30958 - RNA, 20 nt, Artificial Sequence
  Guide RNA
aauccuuauaccuccaagau

SEQ ID NO: 30959 - RNA, 20 nt, Artificial Sequence
  Guide RNA
aauccuuaugccuccaagau

SEQ ID NO: 30960 - RNA, 20 nt, Artificial Sequence
  Guide RNA
aaucuuggaggcauaaggau

SEQ ID NO: 30961 - RNA, 20 nt, Artificial Sequence
  Guide RNA
aaucuuggagguauaaggau

SEQ ID NO: 30962 - RNA, 20 nt, Artificial Sequence
  Guide RNA
aggaauauugaaucuuggag

SEQ ID NO: 30963 - RNA, 20 nt, Artificial Sequence
  Guide RNA
aggcauaaggauuggacacu

SEQ ID NO: 30964 - RNA, 20 nt, Artificial Sequence
  Guide RNA
agguauaaggauuggacacu

SEQ ID NO: 30965 - RNA, 20 nt, Artificial Sequence
  Guide RNA
aguguccaauccuuauaccu

SEQ ID NO: 30966 - RNA, 20 nt, Artificial Sequence
  Guide RNA
aguguccaauccuuaugccu

SEQ ID NO: 30967 - RNA, 20 nt, Artificial Sequence
  Guide RNA
auaccuccaagauucaauau

SEQ ID NO: 30968 - RNA, 20 nt, Artificial Sequence
  Guide RNA
auauugaaucuuggaggcau

SEQ ID NO: 30969 - RNA, 20 nt, Artificial Sequence
  Guide RNA
auauugaaucuuggagguau

SEQ ID NO: 30970 - RNA, 20 nt, Artificial Sequence
  Guide RNA
auccuuauaccuccaagauu

SEQ ID NO: 30971 - RNA, 20 nt, Artificial Sequence
  Guide RNA
auccuuaugccuccaagauu

SEQ ID NO: 30972 - RNA, 20 nt, Artificial Sequence
  Guide RNA
aucuuggaggcauaaggauu

SEQ ID NO: 30973 - RNA, 20 nt, Artificial Sequence
  Guide RNA
aucuuggagguauaaggauu

SEQ ID NO: 30974 - RNA, 20 nt, Artificial Sequence
  Guide RNA
augccuccaagauucaauau

SEQ ID NO: 30975 - RNA, 20 nt, Artificial Sequence
  Guide RNA
auugaaucuuggaggcauaa

SEQ ID NO: 30976 - RNA, 20 nt, Artificial Sequence
  Guide RNA
auugaaucuuggagguauaa

SEQ ID NO: 30977 - RNA, 20 nt, Artificial Sequence
  Guide RNA
caauccuuauaccuccaaga

SEQ ID NO: 30978 - RNA, 20 nt, Artificial Sequence
  Guide RNA
caauccuuaugccuccaaga

SEQ ID NO: 30979 - RNA, 20 nt, Artificial Sequence
  Guide RNA
caggaauauugaaucuugga

SEQ ID NO: 30980 - RNA, 20 nt, Artificial Sequence
  Guide RNA
ccaauccuuauaccuccaag

SEQ ID NO: 30981 - RNA, 20 nt, Artificial Sequence
  Guide RNA
ccaauccuuaugccuccaag

SEQ ID NO: 30982 - RNA, 20 nt, Artificial Sequence
  Guide RNA
ccuuauaccuccaagauuca

SEQ ID NO: 30983 - RNA, 20 nt, Artificial Sequence
  Guide RNA
ccuuaugccuccaagauuca

SEQ ID NO: 30984 - RNA, 20 nt, Artificial Sequence
  Guide RNA
cuuauaccuccaagauucaa

SEQ ID NO: 30985 - RNA, 20 nt, Artificial Sequence
  Guide RNA
cuuaugccuccaagauucaa

SEQ ID NO: 30986 - RNA, 20 nt, Artificial Sequence
  Guide RNA
cuuggaggcauaaggauugg

SEQ ID NO: 30987 - RNA, 20 nt, Artificial Sequence
  Guide RNA
cuuggagguauaaggauugg

SEQ ID NO: 30988 - RNA, 20 nt, Artificial Sequence
  Guide RNA
gaaguguccaauccuuauac

SEQ ID NO: 30989 - RNA, 20 nt, Artificial Sequence
  Guide RNA
gaaguguccaauccuuaugc

SEQ ID NO: 30990 - RNA, 20 nt, Artificial Sequence
  Guide RNA
gaauauugaaucuuggaggc

SEQ ID NO: 30991 - RNA, 20 nt, Artificial Sequence
  Guide RNA
gaauauugaaucuuggaggu

SEQ ID NO: 30992 - RNA, 20 nt, Artificial Sequence
  Guide RNA
gaaucuuggaggcauaagga

SEQ ID NO: 30993 - RNA, 20 nt, Artificial Sequence
  Guide RNA
gaaucuuggagguauaagga

SEQ ID NO: 30994 - RNA, 20 nt, Artificial Sequence
  Guide RNA
gaggcauaaggauuggacac

SEQ ID NO: 30995 - RNA, 20 nt, Artificial Sequence
  Guide RNA
gagguauaaggauuggacac

SEQ ID NO: 30996 - RNA, 20 nt, Artificial Sequence
  Guide RNA
gcauaaggauuggacacuuc

SEQ ID NO: 30997 - RNA, 20 nt, Artificial Sequence
  Guide RNA
ggaauauugaaucuuggagg

SEQ ID NO: 30998 - RNA, 20 nt, Artificial Sequence
  Guide RNA
ggaggcauaaggauuggaca

SEQ ID NO: 30999 - RNA, 20 nt, Artificial Sequence
  Guide RNA
ggagguauaaggauuggaca

SEQ ID NO: 31000 - RNA, 20 nt, Artificial Sequence
  Guide RNA
ggcauaaggauuggacacuu

SEQ ID NO: 31001 - RNA, 20 nt, Artificial Sequence
  Guide RNA
gguauaaggauuggacacuu

SEQ ID NO: 31002 - RNA, 20 nt, Artificial Sequence
  Guide RNA
guauaaggauuggacacuuc

SEQ ID NO: 31003 - RNA, 20 nt, Artificial Sequence
  Guide RNA
guccaauccuuauaccucca

SEQ ID NO: 31004 - RNA, 20 nt, Artificial Sequence
  Guide RNA
guccaauccuuaugccucca

SEQ ID NO: 31005 - RNA, 20 nt, Artificial Sequence
  Guide RNA
guguccaauccuuauaccuc

SEQ ID NO: 31006 - RNA, 20 nt, Artificial Sequence
  Guide RNA
guguccaauccuuaugccuc

SEQ ID NO: 31007 - RNA, 20 nt, Artificial Sequence
  Guide RNA
uaccuccaagauucaauauu

SEQ ID NO: 31008 - RNA, 20 nt, Artificial Sequence
  Guide RNA
uauaccuccaagauucaaua

SEQ ID NO: 31009 - RNA, 20 nt, Artificial Sequence
  Guide RNA
uaugccuccaagauucaaua

SEQ ID NO: 31010 - RNA, 20 nt, Artificial Sequence
  Guide RNA
uauugaaucuuggaggcaua

SEQ ID NO: 31011 - RNA, 20 nt, Artificial Sequence
  Guide RNA
uauugaaucuuggagguaua

SEQ ID NO: 31012 - RNA, 20 nt, Artificial Sequence
  Guide RNA
ucaggaauauugaaucuugg

SEQ ID NO: 31013 - RNA, 20 nt, Artificial Sequence
  Guide RNA
uccaauccuuauaccuccaa

SEQ ID NO: 31014 - RNA, 20 nt, Artificial Sequence
  Guide RNA
uccaauccuuaugccuccaa

SEQ ID NO: 31015 - RNA, 20 nt, Artificial Sequence
  Guide RNA
uccuuauaccuccaagauuc

SEQ ID NO: 31016 - RNA, 20 nt, Artificial Sequence
  Guide RNA
uccuuaugccuccaagauuc

SEQ ID NO: 31017 - RNA, 20 nt, Artificial Sequence
  Guide RNA
ucuuggaggcauaaggauug

SEQ ID NO: 31018 - RNA, 20 nt, Artificial Sequence
  Guide RNA
ucuuggagguauaaggauug

SEQ ID NO: 31019 - RNA, 20 nt, Artificial Sequence
  Guide RNA
ugaaguguccaauccuuaua

SEQ ID NO: 31020 - RNA, 20 nt, Artificial Sequence
  Guide RNA
ugaaguguccaauccuuaug

SEQ ID NO: 31021 - RNA, 20 nt, Artificial Sequence
  Guide RNA
ugaaucuuggaggcauaagg

SEQ ID NO: 31022 - RNA, 20 nt, Artificial Sequence
  Guide RNA
ugaaucuuggagguauaagg

SEQ ID NO: 31023 - RNA, 20 nt, Artificial Sequence
  Guide RNA
ugccuccaagauucaauauu

SEQ ID NO: 31024 - RNA, 20 nt, Artificial Sequence
  Guide RNA
uggaggcauaaggauuggac

SEQ ID NO: 31025 - RNA, 20 nt, Artificial Sequence
  Guide RNA
uggagguauaaggauuggac

SEQ ID NO: 31026 - RNA, 20 nt, Artificial Sequence
  Guide RNA
uguccaauccuuauaccucc

SEQ ID NO: 31027 - RNA, 20 nt, Artificial Sequence
  Guide RNA
uguccaauccuuaugccucc

SEQ ID NO: 31028 - RNA, 20 nt, Artificial Sequence
  Guide RNA
uuauaccuccaagauucaau

SEQ ID NO: 31029 - RNA, 20 nt, Artificial Sequence
  Guide RNA
uuaugccuccaagauucaau

SEQ ID NO: 31030 - RNA, 20 nt, Artificial Sequence
  Guide RNA
uugaaguguccaauccuuau

SEQ ID NO: 31031 - RNA, 20 nt, Artificial Sequence
  Guide RNA
uugaaucuuggaggcauaag

SEQ ID NO: 31032 - RNA, 20 nt, Artificial Sequence
  Guide RNA
uugaaucuuggagguauaag

SEQ ID NO: 31033 - RNA, 20 nt, Artificial Sequence
  Guide RNA
uuggaggcauaaggauugga

SEQ ID NO: 31034 - RNA, 20 nt, Artificial Sequence
  Guide RNA
uuggagguauaaggauugga

SEQ ID NO: 31035 - RNA, 20 nt, Artificial Sequence
  Guide RNA
uuugaaguguccaauccuua

SEQ ID NO: 31036 - RNA, 20 nt, Artificial Sequence
  Guide RNA
uuuugaaguguccaauccuu

SEQ ID NO: 31037 - RNA, 20 nt, Artificial Sequence
  Guide RNA
uuuuugaaguguccaauccu

SEQ ID NO: 31038 - RNA, 21 nt, Artificial Sequence
  Guide RNA
aaguguccaauccuuauaccu

SEQ ID NO: 31039 - RNA, 21 nt, Artificial Sequence
  Guide RNA
aaguguccaauccuuaugccu

SEQ ID NO: 31040 - RNA, 21 nt, Artificial Sequence
  Guide RNA
aauauugaaucuuggaggcau

SEQ ID NO: 31041 - RNA, 21 nt, Artificial Sequence
  Guide RNA
aauccuuauaccuccaagauu

SEQ ID NO: 31042 - RNA, 21 nt, Artificial Sequence
  Guide RNA
aauccuuaugccuccaagauu

SEQ ID NO: 31043 - RNA, 21 nt, Artificial Sequence
  Guide RNA
aaucuuggaggcauaaggauu

SEQ ID NO: 31044 - RNA, 21 nt, Artificial Sequence
  Guide RNA
aaucuuggagguauaaggauu

SEQ ID NO: 31045 - RNA, 21 nt, Artificial Sequence
  Guide RNA
aggaauauugaaucuuggagg

SEQ ID NO: 31046 - RNA, 21 nt, Artificial Sequence
  Guide RNA
aggcauaaggauuggacacuu

SEQ ID NO: 31047 - RNA, 21 nt, Artificial Sequence
  Guide RNA
agguauaaggauuggacacuu

SEQ ID NO: 31048 - RNA, 21 nt, Artificial Sequence
  Guide RNA
aguguccaauccuuauaccuc

SEQ ID NO: 31049 - RNA, 21 nt, Artificial Sequence
  Guide RNA
aguguccaauccuuaugccuc

SEQ ID NO: 31050 - RNA, 21 nt, Artificial Sequence
  Guide RNA
auauugaaucuuggaggcaua

SEQ ID NO: 31051 - RNA, 21 nt, Artificial Sequence
  Guide RNA
auccuuauaccuccaagauuc

SEQ ID NO: 31052 - RNA, 21 nt, Artificial Sequence
  Guide RNA
auccuuaugccuccaagauuc

SEQ ID NO: 31053 - RNA, 21 nt, Artificial Sequence
  Guide RNA
aucuuggaggcauaaggauug

SEQ ID NO: 31054 - RNA, 21 nt, Artificial Sequence
  Guide RNA
aucuuggagguauaaggauug

SEQ ID NO: 31055 - RNA, 21 nt, Artificial Sequence
  Guide RNA
augccuccaagauucaauauu

SEQ ID NO: 31056 - RNA, 21 nt, Artificial Sequence
  Guide RNA
auugaaucuuggaggcauaag

SEQ ID NO: 31057 - RNA, 21 nt, Artificial Sequence
  Guide RNA
auugaaucuuggagguauaag

SEQ ID NO: 31058 - RNA, 21 nt, Artificial Sequence
  Guide RNA
caauccuuauaccuccaagau

SEQ ID NO: 31059 - RNA, 21 nt, Artificial Sequence
  Guide RNA
caauccuuaugccuccaagau

SEQ ID NO: 31060 - RNA, 21 nt, Artificial Sequence
  Guide RNA
caggaauauugaaucuuggag

SEQ ID NO: 31061 - RNA, 21 nt, Artificial Sequence
  Guide RNA
ccaauccuuauaccuccaaga

SEQ ID NO: 31062 - RNA, 21 nt, Artificial Sequence
  Guide RNA
ccaauccuuaugccuccaaga

SEQ ID NO: 31063 - RNA, 21 nt, Artificial Sequence
  Guide RNA
ccuuauaccuccaagauucaa

SEQ ID NO: 31064 - RNA, 21 nt, Artificial Sequence
  Guide RNA
ccuuaugccuccaagauucaa

SEQ ID NO: 31065 - RNA, 21 nt, Artificial Sequence
  Guide RNA
cuuauaccuccaagauucaau

SEQ ID NO: 31066 - RNA, 21 nt, Artificial Sequence
  Guide RNA
cuuaugccuccaagauucaau

SEQ ID NO: 31067 - RNA, 21 nt, Artificial Sequence
  Guide RNA
cuuggaggcauaaggauugga

SEQ ID NO: 31068 - RNA, 21 nt, Artificial Sequence
  Guide RNA
cuuggagguauaaggauugga

SEQ ID NO: 31069 - RNA, 21 nt, Artificial Sequence
  Guide RNA
gaaguguccaauccuuauacc

SEQ ID NO: 31070 - RNA, 21 nt, Artificial Sequence
  Guide RNA
gaaguguccaauccuuaugcc

SEQ ID NO: 31071 - RNA, 21 nt, Artificial Sequence
  Guide RNA
gaauauugaaucuuggaggca

SEQ ID NO: 31072 - RNA, 21 nt, Artificial Sequence
  Guide RNA
gaauauugaaucuuggaggua

SEQ ID NO: 31073 - RNA, 21 nt, Artificial Sequence
  Guide RNA
gaaucuuggaggcauaaggau

SEQ ID NO: 31074 - RNA, 21 nt, Artificial Sequence
  Guide RNA
gaaucuuggagguauaaggau

SEQ ID NO: 31075 - RNA, 21 nt, Artificial Sequence
  Guide RNA
gaggcauaaggauuggacacu

SEQ ID NO: 31076 - RNA, 21 nt, Artificial Sequence
  Guide RNA
gagguauaaggauuggacacu

SEQ ID NO: 31077 - RNA, 21 nt, Artificial Sequence
  Guide RNA
gcauaaggauuggacacuuca

SEQ ID NO: 31078 - RNA, 21 nt, Artificial Sequence
  Guide RNA
ggaauauugaaucuuggaggc

SEQ ID NO: 31079 - RNA, 21 nt, Artificial Sequence
  Guide RNA
ggaauauugaaucuuggaggu

SEQ ID NO: 31080 - RNA, 21 nt, Artificial Sequence
  Guide RNA
ggaggcauaaggauuggacac

SEQ ID NO: 31081 - RNA, 21 nt, Artificial Sequence
  Guide RNA
ggagguauaaggauuggacac

SEQ ID NO: 31082 - RNA, 21 nt, Artificial Sequence
  Guide RNA
ggcauaaggauuggacacuuc

SEQ ID NO: 31083 - RNA, 21 nt, Artificial Sequence
  Guide RNA
gguauaaggauuggacacuuc

SEQ ID NO: 31084 - RNA, 21 nt, Artificial Sequence
  Guide RNA
guauaaggauuggacacuuca

SEQ ID NO: 31085 - RNA, 21 nt, Artificial Sequence
  Guide RNA
guccaauccuuauaccuccaa

SEQ ID NO: 31086 - RNA, 21 nt, Artificial Sequence
  Guide RNA
guccaauccuuaugccuccaa

SEQ ID NO: 31087 - RNA, 21 nt, Artificial Sequence
  Guide RNA
guguccaauccuuauaccucc

SEQ ID NO: 31088 - RNA, 21 nt, Artificial Sequence
  Guide RNA
guguccaauccuuaugccucc

SEQ ID NO: 31089 - RNA, 21 nt, Artificial Sequence
  Guide RNA
guuuuugaaguguccaauccu

SEQ ID NO: 31090 - RNA, 21 nt, Artificial Sequence
  Guide RNA
uaccuccaagauucaauauuc

SEQ ID NO: 31091 - RNA, 21 nt, Artificial Sequence
  Guide RNA
uaugccuccaagauucaauau

SEQ ID NO: 31092 - RNA, 21 nt, Artificial Sequence
  Guide RNA
uauugaaucuuggaggcauaa

SEQ ID NO: 31093 - RNA, 21 nt, Artificial Sequence
  Guide RNA
ucaggaauauugaaucuugga

SEQ ID NO: 31094 - RNA, 21 nt, Artificial Sequence
  Guide RNA
uccaauccuuauaccuccaag

SEQ ID NO: 31095 - RNA, 21 nt, Artificial Sequence
  Guide RNA
uccaauccuuaugccuccaag

SEQ ID NO: 31096 - RNA, 21 nt, Artificial Sequence
  Guide RNA
uccuuauaccuccaagauuca

SEQ ID NO: 31097 - RNA, 21 nt, Artificial Sequence
  Guide RNA
uccuuaugccuccaagauuca

SEQ ID NO: 31098 - RNA, 21 nt, Artificial Sequence
  Guide RNA
ucuuggaggcauaaggauugg

SEQ ID NO: 31099 - RNA, 21 nt, Artificial Sequence
  Guide RNA
ucuuggagguauaaggauugg

SEQ ID NO: 31100 - RNA, 21 nt, Artificial Sequence
  Guide RNA
ugaaguguccaauccuuauac

SEQ ID NO: 31101 - RNA, 21 nt, Artificial Sequence
  Guide RNA
ugaaguguccaauccuuaugc

SEQ ID NO: 31102 - RNA, 21 nt, Artificial Sequence
  Guide RNA
ugaaucuuggaggcauaagga

SEQ ID NO: 31103 - RNA, 21 nt, Artificial Sequence
  Guide RNA
ugaaucuuggagguauaagga

SEQ ID NO: 31104 - RNA, 21 nt, Artificial Sequence
  Guide RNA
ugccuccaagauucaauauuc

SEQ ID NO: 31105 - RNA, 21 nt, Artificial Sequence
  Guide RNA
uggaggcauaaggauuggaca

SEQ ID NO: 31106 - RNA, 21 nt, Artificial Sequence
  Guide RNA
uggagguauaaggauuggaca

SEQ ID NO: 31107 - RNA, 21 nt, Artificial Sequence
  Guide RNA
uguccaauccuuauaccucca

SEQ ID NO: 31108 - RNA, 21 nt, Artificial Sequence
  Guide RNA
uguccaauccuuaugccucca

SEQ ID NO: 31109 - RNA, 21 nt, Artificial Sequence
  Guide RNA
uuaugccuccaagauucaaua

SEQ ID NO: 31110 - RNA, 21 nt, Artificial Sequence
  Guide RNA
uucaggaauauugaaucuugg

SEQ ID NO: 31111 - RNA, 21 nt, Artificial Sequence
  Guide RNA
uugaaguguccaauccuuaua

SEQ ID NO: 31112 - RNA, 21 nt, Artificial Sequence
  Guide RNA
uugaaguguccaauccuuaug

SEQ ID NO: 31113 - RNA, 21 nt, Artificial Sequence
  Guide RNA
uugaaucuuggaggcauaagg

SEQ ID NO: 31114 - RNA, 21 nt, Artificial Sequence
  Guide RNA
uugaaucuuggagguauaagg

SEQ ID NO: 31115 - RNA, 21 nt, Artificial Sequence
  Guide RNA
uuggaggcauaaggauuggac

SEQ ID NO: 31116 - RNA, 21 nt, Artificial Sequence
  Guide RNA
uuggagguauaaggauuggac

SEQ ID NO: 31117 - RNA, 21 nt, Artificial Sequence
  Guide RNA
uuugaaguguccaauccuuau

SEQ ID NO: 31118 - RNA, 21 nt, Artificial Sequence
  Guide RNA
uuuugaaguguccaauccuua

SEQ ID NO: 31119 - RNA, 21 nt, Artificial Sequence
  Guide RNA
uuuuugaaguguccaauccuu

SEQ ID NO: 31120 - RNA, 22 nt, Artificial Sequence
  Guide RNA
aaguguccaauccuuauaccuc

SEQ ID NO: 31121 - RNA, 22 nt, Artificial Sequence
  Guide RNA
aaguguccaauccuuaugccuc

SEQ ID NO: 31122 - RNA, 22 nt, Artificial Sequence
  Guide RNA
aauauugaaucuuggaggcaua

SEQ ID NO: 31123 - RNA, 22 nt, Artificial Sequence
  Guide RNA
aauccuuauaccuccaagauuc

SEQ ID NO: 31124 - RNA, 22 nt, Artificial Sequence
  Guide RNA
aauccuuaugccuccaagauuc

SEQ ID NO: 31125 - RNA, 22 nt, Artificial Sequence
  Guide RNA
aaucuuggaggcauaaggauug

SEQ ID NO: 31126 - RNA, 22 nt, Artificial Sequence
  Guide RNA
aaucuuggagguauaaggauug

SEQ ID NO: 31127 - RNA, 22 nt, Artificial Sequence
  Guide RNA
aggaauauugaaucuuggaggc

SEQ ID NO: 31128 - RNA, 22 nt, Artificial Sequence
  Guide RNA
aggaauauugaaucuuggaggu

SEQ ID NO: 31129 - RNA, 22 nt, Artificial Sequence
  Guide RNA
aggcauaaggauuggacacuuc

SEQ ID NO: 31130 - RNA, 22 nt, Artificial Sequence
  Guide RNA
agguauaaggauuggacacuuc

SEQ ID NO: 31131 - RNA, 22 nt, Artificial Sequence
  Guide RNA
aguguccaauccuuauaccucc

SEQ ID NO: 31132 - RNA, 22 nt, Artificial Sequence
  Guide RNA
aguguccaauccuuaugccucc

SEQ ID NO: 31133 - RNA, 22 nt, Artificial Sequence
  Guide RNA
auaccuccaagauucaauauuc

SEQ ID NO: 31134 - RNA, 22 nt, Artificial Sequence
  Guide RNA
auauugaaucuuggaggcauaa

SEQ ID NO: 31135 - RNA, 22 nt, Artificial Sequence
  Guide RNA
auccuuauaccuccaagauuca

SEQ ID NO: 31136 - RNA, 22 nt, Artificial Sequence
  Guide RNA
auccuuaugccuccaagauuca

SEQ ID NO: 31137 - RNA, 22 nt, Artificial Sequence
  Guide RNA
aucuuggaggcauaaggauugg

SEQ ID NO: 31138 - RNA, 22 nt, Artificial Sequence
  Guide RNA
aucuuggagguauaaggauugg

SEQ ID NO: 31139 - RNA, 22 nt, Artificial Sequence
  Guide RNA
augccuccaagauucaauauuc

SEQ ID NO: 31140 - RNA, 22 nt, Artificial Sequence
  Guide RNA
auugaaucuuggaggcauaagg

SEQ ID NO: 31141 - RNA, 22 nt, Artificial Sequence
  Guide RNA
auugaaucuuggagguauaagg

SEQ ID NO: 31142 - RNA, 22 nt, Artificial Sequence
  Guide RNA
caauccuuauaccuccaagauu

SEQ ID NO: 31143 - RNA, 22 nt, Artificial Sequence
  Guide RNA
caauccuuaugccuccaagauu

SEQ ID NO: 31144 - RNA, 22 nt, Artificial Sequence
  Guide RNA
caggaauauugaaucuuggagg

SEQ ID NO: 31145 - RNA, 22 nt, Artificial Sequence
  Guide RNA
ccaauccuuauaccuccaagau

SEQ ID NO: 31146 - RNA, 22 nt, Artificial Sequence
  Guide RNA
ccaauccuuaugccuccaagau

SEQ ID NO: 31147 - RNA, 22 nt, Artificial Sequence
  Guide RNA
ccuuauaccuccaagauucaau

SEQ ID NO: 31148 - RNA, 22 nt, Artificial Sequence
  Guide RNA
ccuuaugccuccaagauucaau

SEQ ID NO: 31149 - RNA, 22 nt, Artificial Sequence
  Guide RNA
cuuauaccuccaagauucaaua

SEQ ID NO: 31150 - RNA, 22 nt, Artificial Sequence
  Guide RNA
cuuaugccuccaagauucaaua

SEQ ID NO: 31151 - RNA, 22 nt, Artificial Sequence
  Guide RNA
cuucaggaauauugaaucuugg

SEQ ID NO: 31152 - RNA, 22 nt, Artificial Sequence
  Guide RNA
cuuggaggcauaaggauuggac

SEQ ID NO: 31153 - RNA, 22 nt, Artificial Sequence
  Guide RNA
cuuggagguauaaggauuggac

SEQ ID NO: 31154 - RNA, 22 nt, Artificial Sequence
  Guide RNA
gaaguguccaauccuuauaccu

SEQ ID NO: 31155 - RNA, 22 nt, Artificial Sequence
  Guide RNA
gaaguguccaauccuuaugccu

SEQ ID NO: 31156 - RNA, 22 nt, Artificial Sequence
  Guide RNA
gaauauugaaucuuggaggcau

SEQ ID NO: 31157 - RNA, 22 nt, Artificial Sequence
  Guide RNA
gaauauugaaucuuggagguau

SEQ ID NO: 31158 - RNA, 22 nt, Artificial Sequence
  Guide RNA
gaaucuuggaggcauaaggauu

SEQ ID NO: 31159 - RNA, 22 nt, Artificial Sequence
  Guide RNA
gaaucuuggagguauaaggauu

SEQ ID NO: 31160 - RNA, 22 nt, Artificial Sequence
  Guide RNA
gaggcauaaggauuggacacuu

SEQ ID NO: 31161 - RNA, 22 nt, Artificial Sequence
  Guide RNA
gagguauaaggauuggacacuu

SEQ ID NO: 31162 - RNA, 22 nt, Artificial Sequence
  Guide RNA
gcauaaggauuggacacuucaa

SEQ ID NO: 31163 - RNA, 22 nt, Artificial Sequence
  Guide RNA
ggaauauugaaucuuggaggca

SEQ ID NO: 31164 - RNA, 22 nt, Artificial Sequence
  Guide RNA
ggaauauugaaucuuggaggua

SEQ ID NO: 31165 - RNA, 22 nt, Artificial Sequence
  Guide RNA
ggaggcauaaggauuggacacu

SEQ ID NO: 31166 - RNA, 22 nt, Artificial Sequence
  Guide RNA
ggagguauaaggauuggacacu

SEQ ID NO: 31167 - RNA, 22 nt, Artificial Sequence
  Guide RNA
ggcauaaggauuggacacuuca

SEQ ID NO: 31168 - RNA, 22 nt, Artificial Sequence
  Guide RNA
gguauaaggauuggacacuuca

SEQ ID NO: 31169 - RNA, 22 nt, Artificial Sequence
  Guide RNA
gguuuuugaaguguccaauccu

SEQ ID NO: 31170 - RNA, 22 nt, Artificial Sequence
  Guide RNA
guauaaggauuggacacuucaa

SEQ ID NO: 31171 - RNA, 22 nt, Artificial Sequence
  Guide RNA
guccaauccuuauaccuccaag

SEQ ID NO: 31172 - RNA, 22 nt, Artificial Sequence
  Guide RNA
guccaauccuuaugccuccaag

SEQ ID NO: 31173 - RNA, 22 nt, Artificial Sequence
  Guide RNA
guguccaauccuuauaccucca

SEQ ID NO: 31174 - RNA, 22 nt, Artificial Sequence
  Guide RNA
guguccaauccuuaugccucca

SEQ ID NO: 31175 - RNA, 22 nt, Artificial Sequence
  Guide RNA
guuuuugaaguguccaauccuu

SEQ ID NO: 31176 - RNA, 22 nt, Artificial Sequence
  Guide RNA
uaccuccaagauucaauauucc

SEQ ID NO: 31177 - RNA, 22 nt, Artificial Sequence
  Guide RNA
uaugccuccaagauucaauauu

SEQ ID NO: 31178 - RNA, 22 nt, Artificial Sequence
  Guide RNA
uauugaaucuuggaggcauaag

SEQ ID NO: 31179 - RNA, 22 nt, Artificial Sequence
  Guide RNA
uauugaaucuuggagguauaag

SEQ ID NO: 31180 - RNA, 22 nt, Artificial Sequence
  Guide RNA
ucaggaauauugaaucuuggag

SEQ ID NO: 31181 - RNA, 22 nt, Artificial Sequence
  Guide RNA
uccaauccuuauaccuccaaga

SEQ ID NO: 31182 - RNA, 22 nt, Artificial Sequence
  Guide RNA
uccaauccuuaugccuccaaga

SEQ ID NO: 31183 - RNA, 22 nt, Artificial Sequence
  Guide RNA
uccuuauaccuccaagauucaa

SEQ ID NO: 31184 - RNA, 22 nt, Artificial Sequence
  Guide RNA
uccuuaugccuccaagauucaa

SEQ ID NO: 31185 - RNA, 22 nt, Artificial Sequence
  Guide RNA
ucuuggaggcauaaggauugga

SEQ ID NO: 31186 - RNA, 22 nt, Artificial Sequence
  Guide RNA
ucuuggagguauaaggauugga

SEQ ID NO: 31187 - RNA, 22 nt, Artificial Sequence
  Guide RNA
ugaaguguccaauccuuauacc

SEQ ID NO: 31188 - RNA, 22 nt, Artificial Sequence
  Guide RNA
ugaaguguccaauccuuaugcc

SEQ ID NO: 31189 - RNA, 22 nt, Artificial Sequence
  Guide RNA
ugaaucuuggaggcauaaggau

SEQ ID NO: 31190 - RNA, 22 nt, Artificial Sequence
  Guide RNA
ugaaucuuggagguauaaggau

SEQ ID NO: 31191 - RNA, 22 nt, Artificial Sequence
  Guide RNA
ugccuccaagauucaauauucc

SEQ ID NO: 31192 - RNA, 22 nt, Artificial Sequence
  Guide RNA
uggaggcauaaggauuggacac

SEQ ID NO: 31193 - RNA, 22 nt, Artificial Sequence
  Guide RNA
uggagguauaaggauuggacac

SEQ ID NO: 31194 - RNA, 22 nt, Artificial Sequence
  Guide RNA
uguccaauccuuauaccuccaa

SEQ ID NO: 31195 - RNA, 22 nt, Artificial Sequence
  Guide RNA
uguccaauccuuaugccuccaa

SEQ ID NO: 31196 - RNA, 22 nt, Artificial Sequence
  Guide RNA
uuaugccuccaagauucaauau

SEQ ID NO: 31197 - RNA, 22 nt, Artificial Sequence
  Guide RNA
uucaggaauauugaaucuugga

SEQ ID NO: 31198 - RNA, 22 nt, Artificial Sequence
  Guide RNA
uugaaguguccaauccuuauac

SEQ ID NO: 31199 - RNA, 22 nt, Artificial Sequence
  Guide RNA
uugaaguguccaauccuuaugc

SEQ ID NO: 31200 - RNA, 22 nt, Artificial Sequence
  Guide RNA
uugaaucuuggaggcauaagga

SEQ ID NO: 31201 - RNA, 22 nt, Artificial Sequence
  Guide RNA
uugaaucuuggagguauaagga

SEQ ID NO: 31202 - RNA, 22 nt, Artificial Sequence
  Guide RNA
uuggaggcauaaggauuggaca

SEQ ID NO: 31203 - RNA, 22 nt, Artificial Sequence
  Guide RNA
uuggagguauaaggauuggaca

SEQ ID NO: 31204 - RNA, 22 nt, Artificial Sequence
  Guide RNA
uuugaaguguccaauccuuaua

SEQ ID NO: 31205 - RNA, 22 nt, Artificial Sequence
  Guide RNA
uuugaaguguccaauccuuaug

SEQ ID NO: 31206 - RNA, 22 nt, Artificial Sequence
  Guide RNA
uuuugaaguguccaauccuuau

SEQ ID NO: 31207 - RNA, 22 nt, Artificial Sequence
  Guide RNA
uuuuugaaguguccaauccuua

SEQ ID NO: 31208 - RNA, 20 nt, Artificial Sequence
  Guide RNA
aacaugaagaggcauuaaaa

SEQ ID NO: 31209 - RNA, 20 nt, Artificial Sequence
  Guide RNA
aacaugaagaggccauuaaa

SEQ ID NO: 31210 - RNA, 20 nt, Artificial Sequence
  Guide RNA
aagagaggacaguccuuuua

SEQ ID NO: 31211 - RNA, 20 nt, Artificial Sequence
  Guide RNA
aagaggcauuaaaaggacug

SEQ ID NO: 31212 - RNA, 20 nt, Artificial Sequence
  Guide RNA
aagaggccauuaaaaggacu

SEQ ID NO: 31213 - RNA, 20 nt, Artificial Sequence
  Guide RNA
aaggaaguguaacaugaaga

SEQ ID NO: 31214 - RNA, 20 nt, Artificial Sequence
  Guide RNA
aaguguaacaugaagaggca

SEQ ID NO: 31215 - RNA, 20 nt, Artificial Sequence
  Guide RNA
aaguguaacaugaagaggcc

SEQ ID NO: 31216 - RNA, 20 nt, Artificial Sequence
  Guide RNA
aaugccucuucauguuacac

SEQ ID NO: 31217 - RNA, 20 nt, Artificial Sequence
  Guide RNA
aauggccucuucauguuaca

SEQ ID NO: 31218 - RNA, 20 nt, Artificial Sequence
  Guide RNA
acaguccuuuuaaugccucu

SEQ ID NO: 31219 - RNA, 20 nt, Artificial Sequence
  Guide RNA
acaguccuuuuaauggccuc

SEQ ID NO: 31220 - RNA, 20 nt, Artificial Sequence
  Guide RNA
acaugaagaggcauuaaaag

SEQ ID NO: 31221 - RNA, 20 nt, Artificial Sequence
  Guide RNA
acaugaagaggccauuaaaa

SEQ ID NO: 31222 - RNA, 20 nt, Artificial Sequence
  Guide RNA
agagaggacaguccuuuuaa

SEQ ID NO: 31223 - RNA, 20 nt, Artificial Sequence
  Guide RNA
agaggacaguccuuuuaaug

SEQ ID NO: 31224 - RNA, 20 nt, Artificial Sequence
  Guide RNA
agaggcauuaaaaggacugu

SEQ ID NO: 31225 - RNA, 20 nt, Artificial Sequence
  Guide RNA
agaggccauuaaaaggacug

SEQ ID NO: 31226 - RNA, 20 nt, Artificial Sequence
  Guide RNA
aggaaguguaacaugaagag

SEQ ID NO: 31227 - RNA, 20 nt, Artificial Sequence
  Guide RNA
aggacaguccuuuuaaugcc

SEQ ID NO: 31228 - RNA, 20 nt, Artificial Sequence
  Guide RNA
aggacaguccuuuuaauggc

SEQ ID NO: 31229 - RNA, 20 nt, Artificial Sequence
  Guide RNA
aggcauuaaaaggacugucc

SEQ ID NO: 31230 - RNA, 20 nt, Artificial Sequence
  Guide RNA
aggccauuaaaaggacuguc

SEQ ID NO: 31231 - RNA, 20 nt, Artificial Sequence
  Guide RNA
aguccuuuuaaugccucuuc

SEQ ID NO: 31232 - RNA, 20 nt, Artificial Sequence
  Guide RNA
aguccuuuuaauggccucuu

SEQ ID NO: 31233 - RNA, 20 nt, Artificial Sequence
  Guide RNA
aguguaacaugaagaggcau

SEQ ID NO: 31234 - RNA, 20 nt, Artificial Sequence
  Guide RNA
aguguaacaugaagaggcca

SEQ ID NO: 31235 - RNA, 20 nt, Artificial Sequence
  Guide RNA
augaagaggcauuaaaagga

SEQ ID NO: 31236 - RNA, 20 nt, Artificial Sequence
  Guide RNA
augaagaggccauuaaaagg

SEQ ID NO: 31237 - RNA, 20 nt, Artificial Sequence
  Guide RNA
augccucuucauguuacacu

SEQ ID NO: 31238 - RNA, 20 nt, Artificial Sequence
  Guide RNA
auggccucuucauguuacac

SEQ ID NO: 31239 - RNA, 20 nt, Artificial Sequence
  Guide RNA
caguccuuuuaaugccucuu

SEQ ID NO: 31240 - RNA, 20 nt, Artificial Sequence
  Guide RNA
caguccuuuuaauggccucu

SEQ ID NO: 31241 - RNA, 20 nt, Artificial Sequence
  Guide RNA
caugaagaggcauuaaaagg

SEQ ID NO: 31242 - RNA, 20 nt, Artificial Sequence
  Guide RNA
caugaagaggccauuaaaag

SEQ ID NO: 31243 - RNA, 20 nt, Artificial Sequence
  Guide RNA
ccucuucauguuacacuucc

SEQ ID NO: 31244 - RNA, 20 nt, Artificial Sequence
  Guide RNA
ccuuuuaaugccucuucaug

SEQ ID NO: 31245 - RNA, 20 nt, Artificial Sequence
  Guide RNA
ccuuuuaauggccucuucau

SEQ ID NO: 31246 - RNA, 20 nt, Artificial Sequence
  Guide RNA
cuuuuaaugccucuucaugu

SEQ ID NO: 31247 - RNA, 20 nt, Artificial Sequence
  Guide RNA
cuuuuaauggccucuucaug

SEQ ID NO: 31248 - RNA, 20 nt, Artificial Sequence
  Guide RNA
gaagaggcauuaaaaggacu

SEQ ID NO: 31249 - RNA, 20 nt, Artificial Sequence
  Guide RNA
gaagaggccauuaaaaggac

SEQ ID NO: 31250 - RNA, 20 nt, Artificial Sequence
  Guide RNA
gaaggaaguguaacaugaag

SEQ ID NO: 31251 - RNA, 20 nt, Artificial Sequence
  Guide RNA
gaaguguaacaugaagaggc

SEQ ID NO: 31252 - RNA, 20 nt, Artificial Sequence
  Guide RNA
gacaguccuuuuaaugccuc

SEQ ID NO: 31253 - RNA, 20 nt, Artificial Sequence
  Guide RNA
gacaguccuuuuaauggccu

SEQ ID NO: 31254 - RNA, 20 nt, Artificial Sequence
  Guide RNA
gagaggacaguccuuuuaau

SEQ ID NO: 31255 - RNA, 20 nt, Artificial Sequence
  Guide RNA
gaggacaguccuuuuaaugc

SEQ ID NO: 31256 - RNA, 20 nt, Artificial Sequence
  Guide RNA
gaggacaguccuuuuaaugg

SEQ ID NO: 31257 - RNA, 20 nt, Artificial Sequence
  Guide RNA
gaggcauuaaaaggacuguc

SEQ ID NO: 31258 - RNA, 20 nt, Artificial Sequence
  Guide RNA
gaggccauuaaaaggacugu

SEQ ID NO: 31259 - RNA, 20 nt, Artificial Sequence
  Guide RNA
gccauuaaaaggacuguccu

SEQ ID NO: 31260 - RNA, 20 nt, Artificial Sequence
  Guide RNA
gccucuucauguuacacuuc

SEQ ID NO: 31261 - RNA, 20 nt, Artificial Sequence
  Guide RNA
ggaaggaaguguaacaugaa

SEQ ID NO: 31262 - RNA, 20 nt, Artificial Sequence
  Guide RNA
ggaaguguaacaugaagagg

SEQ ID NO: 31263 - RNA, 20 nt, Artificial Sequence
  Guide RNA
ggacaguccuuuuaaugccu

SEQ ID NO: 31264 - RNA, 20 nt, Artificial Sequence
  Guide RNA
ggacaguccuuuuaauggcc

SEQ ID NO: 31265 - RNA, 20 nt, Artificial Sequence
  Guide RNA
ggcauuaaaaggacuguccu

SEQ ID NO: 31266 - RNA, 20 nt, Artificial Sequence
  Guide RNA
ggccauuaaaaggacugucc

SEQ ID NO: 31267 - RNA, 20 nt, Artificial Sequence
  Guide RNA
ggccucuucauguuacacuu

SEQ ID NO: 31268 - RNA, 20 nt, Artificial Sequence
  Guide RNA
guaacaugaagaggcauuaa

SEQ ID NO: 31269 - RNA, 20 nt, Artificial Sequence
  Guide RNA
guaacaugaagaggccauua

SEQ ID NO: 31270 - RNA, 20 nt, Artificial Sequence
  Guide RNA
guccuuuuaaugccucuuca

SEQ ID NO: 31271 - RNA, 20 nt, Artificial Sequence
  Guide RNA
guccuuuuaauggccucuuc

SEQ ID NO: 31272 - RNA, 20 nt, Artificial Sequence
  Guide RNA
guguaacaugaagaggcauu

SEQ ID NO: 31273 - RNA, 20 nt, Artificial Sequence
  Guide RNA
guguaacaugaagaggccau

SEQ ID NO: 31274 - RNA, 20 nt, Artificial Sequence
  Guide RNA
uaacaugaagaggcauuaaa

SEQ ID NO: 31275 - RNA, 20 nt, Artificial Sequence
  Guide RNA
uaacaugaagaggccauuaa

SEQ ID NO: 31276 - RNA, 20 nt, Artificial Sequence
  Guide RNA
uaaugccucuucauguuaca

SEQ ID NO: 31277 - RNA, 20 nt, Artificial Sequence
  Guide RNA
uaauggccucuucauguuac

SEQ ID NO: 31278 - RNA, 20 nt, Artificial Sequence
  Guide RNA
uccuuuuaaugccucuucau

SEQ ID NO: 31279 - RNA, 20 nt, Artificial Sequence
  Guide RNA
uccuuuuaauggccucuuca

SEQ ID NO: 31280 - RNA, 20 nt, Artificial Sequence
  Guide RNA
ugaagaggcauuaaaaggac

SEQ ID NO: 31281 - RNA, 20 nt, Artificial Sequence
  Guide RNA
ugaagaggccauuaaaagga

SEQ ID NO: 31282 - RNA, 20 nt, Artificial Sequence
  Guide RNA
ugccucuucauguuacacuu

SEQ ID NO: 31283 - RNA, 20 nt, Artificial Sequence
  Guide RNA
uggccucuucauguuacacu

SEQ ID NO: 31284 - RNA, 20 nt, Artificial Sequence
  Guide RNA
uguaacaugaagaggcauua

SEQ ID NO: 31285 - RNA, 20 nt, Artificial Sequence
  Guide RNA
uguaacaugaagaggccauu

SEQ ID NO: 31286 - RNA, 20 nt, Artificial Sequence
  Guide RNA
uuaaugccucuucauguuac

SEQ ID NO: 31287 - RNA, 20 nt, Artificial Sequence
  Guide RNA
uuaauggccucuucauguua

SEQ ID NO: 31288 - RNA, 20 nt, Artificial Sequence
  Guide RNA
uuuaaugccucuucauguua

SEQ ID NO: 31289 - RNA, 20 nt, Artificial Sequence
  Guide RNA
uuuaauggccucuucauguu

SEQ ID NO: 31290 - RNA, 20 nt, Artificial Sequence
  Guide RNA
uuuuaaugccucuucauguu

SEQ ID NO: 31291 - RNA, 20 nt, Artificial Sequence
  Guide RNA
uuuuaauggccucuucaugu

SEQ ID NO: 31292 - RNA, 21 nt, Artificial Sequence
  Guide RNA
aaagagaggacaguccuuuua

SEQ ID NO: 31293 - RNA, 21 nt, Artificial Sequence
  Guide RNA
aacaugaagaggcauuaaaag

SEQ ID NO: 31294 - RNA, 21 nt, Artificial Sequence
  Guide RNA
aacaugaagaggccauuaaaa

SEQ ID NO: 31295 - RNA, 21 nt, Artificial Sequence
  Guide RNA
aagagaggacaguccuuuuaa

SEQ ID NO: 31296 - RNA, 21 nt, Artificial Sequence
  Guide RNA
aagaggcauuaaaaggacugu

SEQ ID NO: 31297 - RNA, 21 nt, Artificial Sequence
  Guide RNA
aagaggccauuaaaaggacug

SEQ ID NO: 31298 - RNA, 21 nt, Artificial Sequence
  Guide RNA
aaggaaguguaacaugaagag

SEQ ID NO: 31299 - RNA, 21 nt, Artificial Sequence
  Guide RNA
aaguguaacaugaagaggcau

SEQ ID NO: 31300 - RNA, 21 nt, Artificial Sequence
  Guide RNA
aaguguaacaugaagaggcca

SEQ ID NO: 31301 - RNA, 21 nt, Artificial Sequence
  Guide RNA
aaugccucuucauguuacacu

SEQ ID NO: 31302 - RNA, 21 nt, Artificial Sequence
  Guide RNA
aauggccucuucauguuacac

SEQ ID NO: 31303 - RNA, 21 nt, Artificial Sequence
  Guide RNA
acaguccuuuuaaugccucuu

SEQ ID NO: 31304 - RNA, 21 nt, Artificial Sequence
  Guide RNA
acaguccuuuuaauggccucu

SEQ ID NO: 31305 - RNA, 21 nt, Artificial Sequence
  Guide RNA
acaugaagaggcauuaaaagg

SEQ ID NO: 31306 - RNA, 21 nt, Artificial Sequence
  Guide RNA
acaugaagaggccauuaaaag

SEQ ID NO: 31307 - RNA, 21 nt, Artificial Sequence
  Guide RNA
agagaggacaguccuuuuaau

SEQ ID NO: 31308 - RNA, 21 nt, Artificial Sequence
  Guide RNA
agaggacaguccuuuuaaugc

SEQ ID NO: 31309 - RNA, 21 nt, Artificial Sequence
  Guide RNA
agaggacaguccuuuuaaugg

SEQ ID NO: 31310 - RNA, 21 nt, Artificial Sequence
  Guide RNA
agaggcauuaaaaggacuguc

SEQ ID NO: 31311 - RNA, 21 nt, Artificial Sequence
  Guide RNA
agaggccauuaaaaggacugu

SEQ ID NO: 31312 - RNA, 21 nt, Artificial Sequence
  Guide RNA
aggaaguguaacaugaagagg

SEQ ID NO: 31313 - RNA, 21 nt, Artificial Sequence
  Guide RNA
aggacaguccuuuuaaugccu

SEQ ID NO: 31314 - RNA, 21 nt, Artificial Sequence
  Guide RNA
aggacaguccuuuuaauggcc

SEQ ID NO: 31315 - RNA, 21 nt, Artificial Sequence
  Guide RNA
aggcauuaaaaggacuguccu

SEQ ID NO: 31316 - RNA, 21 nt, Artificial Sequence
  Guide RNA
aggccauuaaaaggacugucc

SEQ ID NO: 31317 - RNA, 21 nt, Artificial Sequence
  Guide RNA
aguccuuuuaaugccucuuca

SEQ ID NO: 31318 - RNA, 21 nt, Artificial Sequence
  Guide RNA
aguccuuuuaauggccucuuc

SEQ ID NO: 31319 - RNA, 21 nt, Artificial Sequence
  Guide RNA
aguguaacaugaagaggcauu

SEQ ID NO: 31320 - RNA, 21 nt, Artificial Sequence
  Guide RNA
aguguaacaugaagaggccau

SEQ ID NO: 31321 - RNA, 21 nt, Artificial Sequence
  Guide RNA
augaagaggcauuaaaaggac

SEQ ID NO: 31322 - RNA, 21 nt, Artificial Sequence
  Guide RNA
augaagaggccauuaaaagga

SEQ ID NO: 31323 - RNA, 21 nt, Artificial Sequence
  Guide RNA
augccucuucauguuacacuu

SEQ ID NO: 31324 - RNA, 21 nt, Artificial Sequence
  Guide RNA
auggccucuucauguuacacu

SEQ ID NO: 31325 - RNA, 21 nt, Artificial Sequence
  Guide RNA
caguccuuuuaaugccucuuc

SEQ ID NO: 31326 - RNA, 21 nt, Artificial Sequence
  Guide RNA
caguccuuuuaauggccucuu

SEQ ID NO: 31327 - RNA, 21 nt, Artificial Sequence
  Guide RNA
caugaagaggcauuaaaagga

SEQ ID NO: 31328 - RNA, 21 nt, Artificial Sequence
  Guide RNA
caugaagaggccauuaaaagg

SEQ ID NO: 31329 - RNA, 21 nt, Artificial Sequence
  Guide RNA
ccucuucauguuacacuuccu

SEQ ID NO: 31330 - RNA, 21 nt, Artificial Sequence
  Guide RNA
ccuuuuaaugccucuucaugu

SEQ ID NO: 31331 - RNA, 21 nt, Artificial Sequence
  Guide RNA
ccuuuuaauggccucuucaug

SEQ ID NO: 31332 - RNA, 21 nt, Artificial Sequence
  Guide RNA
cuuuuaaugccucuucauguu

SEQ ID NO: 31333 - RNA, 21 nt, Artificial Sequence
  Guide RNA
cuuuuaauggccucuucaugu

SEQ ID NO: 31334 - RNA, 21 nt, Artificial Sequence
  Guide RNA
gaagaggcauuaaaaggacug

SEQ ID NO: 31335 - RNA, 21 nt, Artificial Sequence
  Guide RNA
gaagaggccauuaaaaggacu

SEQ ID NO: 31336 - RNA, 21 nt, Artificial Sequence
  Guide RNA
gaaggaaguguaacaugaaga

SEQ ID NO: 31337 - RNA, 21 nt, Artificial Sequence
  Guide RNA
gaaguguaacaugaagaggca

SEQ ID NO: 31338 - RNA, 21 nt, Artificial Sequence
  Guide RNA
gaaguguaacaugaagaggcc

SEQ ID NO: 31339 - RNA, 21 nt, Artificial Sequence
  Guide RNA
gacaguccuuuuaaugccucu

SEQ ID NO: 31340 - RNA, 21 nt, Artificial Sequence
  Guide RNA
gacaguccuuuuaauggccuc

SEQ ID NO: 31341 - RNA, 21 nt, Artificial Sequence
  Guide RNA
gagaggacaguccuuuuaaug

SEQ ID NO: 31342 - RNA, 21 nt, Artificial Sequence
  Guide RNA
gaggacaguccuuuuaaugcc

SEQ ID NO: 31343 - RNA, 21 nt, Artificial Sequence
  Guide RNA
gaggacaguccuuuuaauggc

SEQ ID NO: 31344 - RNA, 21 nt, Artificial Sequence
  Guide RNA
gaggcauuaaaaggacugucc

SEQ ID NO: 31345 - RNA, 21 nt, Artificial Sequence
  Guide RNA
gaggccauuaaaaggacuguc

SEQ ID NO: 31346 - RNA, 21 nt, Artificial Sequence
  Guide RNA
gccauuaaaaggacuguccuc

SEQ ID NO: 31347 - RNA, 21 nt, Artificial Sequence
  Guide RNA
gccucuucauguuacacuucc

SEQ ID NO: 31348 - RNA, 21 nt, Artificial Sequence
  Guide RNA
ggaaggaaguguaacaugaag

SEQ ID NO: 31349 - RNA, 21 nt, Artificial Sequence
  Guide RNA
ggaaguguaacaugaagaggc

SEQ ID NO: 31350 - RNA, 21 nt, Artificial Sequence
  Guide RNA
ggacaguccuuuuaaugccuc

SEQ ID NO: 31351 - RNA, 21 nt, Artificial Sequence
  Guide RNA
ggacaguccuuuuaauggccu

SEQ ID NO: 31352 - RNA, 21 nt, Artificial Sequence
  Guide RNA
ggcauuaaaaggacuguccuc

SEQ ID NO: 31353 - RNA, 21 nt, Artificial Sequence
  Guide RNA
ggccauuaaaaggacuguccu

SEQ ID NO: 31354 - RNA, 21 nt, Artificial Sequence
  Guide RNA
ggccucuucauguuacacuuc

SEQ ID NO: 31355 - RNA, 21 nt, Artificial Sequence
  Guide RNA
guaacaugaagaggcauuaaa

SEQ ID NO: 31356 - RNA, 21 nt, Artificial Sequence
  Guide RNA
guaacaugaagaggccauuaa

SEQ ID NO: 31357 - RNA, 21 nt, Artificial Sequence
  Guide RNA
guccuuuuaaugccucuucau

SEQ ID NO: 31358 - RNA, 21 nt, Artificial Sequence
  Guide RNA
guccuuuuaauggccucuuca

SEQ ID NO: 31359 - RNA, 21 nt, Artificial Sequence
  Guide RNA
guguaacaugaagaggcauua

SEQ ID NO: 31360 - RNA, 21 nt, Artificial Sequence
  Guide RNA
guguaacaugaagaggccauu

SEQ ID NO: 31361 - RNA, 21 nt, Artificial Sequence
  Guide RNA
uaacaugaagaggccauuaaa

SEQ ID NO: 31362 - RNA, 21 nt, Artificial Sequence
  Guide RNA
uaaugccucuucauguuacac

SEQ ID NO: 31363 - RNA, 21 nt, Artificial Sequence
  Guide RNA
uaauggccucuucauguuaca

SEQ ID NO: 31364 - RNA, 21 nt, Artificial Sequence
  Guide RNA
uccuuuuaaugccucuucaug

SEQ ID NO: 31365 - RNA, 21 nt, Artificial Sequence
  Guide RNA
uccuuuuaauggccucuucau

SEQ ID NO: 31366 - RNA, 21 nt, Artificial Sequence
  Guide RNA
ugaagaggcauuaaaaggacu

SEQ ID NO: 31367 - RNA, 21 nt, Artificial Sequence
  Guide RNA
ugaagaggccauuaaaaggac

SEQ ID NO: 31368 - RNA, 21 nt, Artificial Sequence
  Guide RNA
ugccucuucauguuacacuuc

SEQ ID NO: 31369 - RNA, 21 nt, Artificial Sequence
  Guide RNA
uggaaggaaguguaacaugaa

SEQ ID NO: 31370 - RNA, 21 nt, Artificial Sequence
  Guide RNA
uggccucuucauguuacacuu

SEQ ID NO: 31371 - RNA, 21 nt, Artificial Sequence
  Guide RNA
uguaacaugaagaggcauuaa

SEQ ID NO: 31372 - RNA, 21 nt, Artificial Sequence
  Guide RNA
uguaacaugaagaggccauua

SEQ ID NO: 31373 - RNA, 21 nt, Artificial Sequence
  Guide RNA
uuaaugccucuucauguuaca

SEQ ID NO: 31374 - RNA, 21 nt, Artificial Sequence
  Guide RNA
uuaauggccucuucauguuac

SEQ ID NO: 31375 - RNA, 21 nt, Artificial Sequence
  Guide RNA
uuuaaugccucuucauguuac

SEQ ID NO: 31376 - RNA, 21 nt, Artificial Sequence
  Guide RNA
uuuaauggccucuucauguua

SEQ ID NO: 31377 - RNA, 21 nt, Artificial Sequence
  Guide RNA
uuuuaauggccucuucauguu

SEQ ID NO: 31378 - RNA, 22 nt, Artificial Sequence
  Guide RNA
aaagagaggacaguccuuuuaa

SEQ ID NO: 31379 - RNA, 22 nt, Artificial Sequence
  Guide RNA
aacaugaagaggcauuaaaagg

SEQ ID NO: 31380 - RNA, 22 nt, Artificial Sequence
  Guide RNA
aacaugaagaggccauuaaaag

SEQ ID NO: 31381 - RNA, 22 nt, Artificial Sequence
  Guide RNA
aagagaggacaguccuuuuaau

SEQ ID NO: 31382 - RNA, 22 nt, Artificial Sequence
  Guide RNA
aagaggcauuaaaaggacuguc

SEQ ID NO: 31383 - RNA, 22 nt, Artificial Sequence
  Guide RNA
aagaggccauuaaaaggacugu

SEQ ID NO: 31384 - RNA, 22 nt, Artificial Sequence
  Guide RNA
aaggaaguguaacaugaagagg

SEQ ID NO: 31385 - RNA, 22 nt, Artificial Sequence
  Guide RNA
aaguguaacaugaagaggcauu

SEQ ID NO: 31386 - RNA, 22 nt, Artificial Sequence
  Guide RNA
aaguguaacaugaagaggccau

SEQ ID NO: 31387 - RNA, 22 nt, Artificial Sequence
  Guide RNA
aaugccucuucauguuacacuu

SEQ ID NO: 31388 - RNA, 22 nt, Artificial Sequence
  Guide RNA
aauggccucuucauguuacacu

SEQ ID NO: 31389 - RNA, 22 nt, Artificial Sequence
  Guide RNA
acaguccuuuuaaugccucuuc

SEQ ID NO: 31390 - RNA, 22 nt, Artificial Sequence
  Guide RNA
acaguccuuuuaauggccucuu

SEQ ID NO: 31391 - RNA, 22 nt, Artificial Sequence
  Guide RNA
acaugaagaggcauuaaaagga

SEQ ID NO: 31392 - RNA, 22 nt, Artificial Sequence
  Guide RNA
acaugaagaggccauuaaaagg

SEQ ID NO: 31393 - RNA, 22 nt, Artificial Sequence
  Guide RNA
agagaggacaguccuuuuaaug

SEQ ID NO: 31394 - RNA, 22 nt, Artificial Sequence
  Guide RNA
agaggacaguccuuuuaaugcc

SEQ ID NO: 31395 - RNA, 22 nt, Artificial Sequence
  Guide RNA
agaggacaguccuuuuaauggc

SEQ ID NO: 31396 - RNA, 22 nt, Artificial Sequence
  Guide RNA
agaggcauuaaaaggacugucc

SEQ ID NO: 31397 - RNA, 22 nt, Artificial Sequence
  Guide RNA
agaggccauuaaaaggacuguc

SEQ ID NO: 31398 - RNA, 22 nt, Artificial Sequence
  Guide RNA
aggaaguguaacaugaagaggc

SEQ ID NO: 31399 - RNA, 22 nt, Artificial Sequence
  Guide RNA
aggacaguccuuuuaaugccuc

SEQ ID NO: 31400 - RNA, 22 nt, Artificial Sequence
  Guide RNA
aggacaguccuuuuaauggccu

SEQ ID NO: 31401 - RNA, 22 nt, Artificial Sequence
  Guide RNA
aggcauuaaaaggacuguccuc

SEQ ID NO: 31402 - RNA, 22 nt, Artificial Sequence
  Guide RNA
aggccauuaaaaggacuguccu

SEQ ID NO: 31403 - RNA, 22 nt, Artificial Sequence
  Guide RNA
aguccuuuuaaugccucuucau

SEQ ID NO: 31404 - RNA, 22 nt, Artificial Sequence
  Guide RNA
aguccuuuuaauggccucuuca

SEQ ID NO: 31405 - RNA, 22 nt, Artificial Sequence
  Guide RNA
aguguaacaugaagaggcauua

SEQ ID NO: 31406 - RNA, 22 nt, Artificial Sequence
  Guide RNA
aguguaacaugaagaggccauu

SEQ ID NO: 31407 - RNA, 22 nt, Artificial Sequence
  Guide RNA
augaagaggcauuaaaaggacu

SEQ ID NO: 31408 - RNA, 22 nt, Artificial Sequence
  Guide RNA
augaagaggccauuaaaaggac

SEQ ID NO: 31409 - RNA, 22 nt, Artificial Sequence
  Guide RNA
augccucuucauguuacacuuc

SEQ ID NO: 31410 - RNA, 22 nt, Artificial Sequence
  Guide RNA
auggccucuucauguuacacuu

SEQ ID NO: 31411 - RNA, 22 nt, Artificial Sequence
  Guide RNA
caguccuuuuaaugccucuuca

SEQ ID NO: 31412 - RNA, 22 nt, Artificial Sequence
  Guide RNA
caguccuuuuaauggccucuuc

SEQ ID NO: 31413 - RNA, 22 nt, Artificial Sequence
  Guide RNA
caugaagaggcauuaaaaggac

SEQ ID NO: 31414 - RNA, 22 nt, Artificial Sequence
  Guide RNA
caugaagaggccauuaaaagga

SEQ ID NO: 31415 - RNA, 22 nt, Artificial Sequence
  Guide RNA
ccucuucauguuacacuuccuu

SEQ ID NO: 31416 - RNA, 22 nt, Artificial Sequence
  Guide RNA
ccuuuuaaugccucuucauguu

SEQ ID NO: 31417 - RNA, 22 nt, Artificial Sequence
  Guide RNA
ccuuuuaauggccucuucaugu

SEQ ID NO: 31418 - RNA, 22 nt, Artificial Sequence
  Guide RNA
cuuuuaaugccucuucauguua

SEQ ID NO: 31419 - RNA, 22 nt, Artificial Sequence
  Guide RNA
cuuuuaauggccucuucauguu

SEQ ID NO: 31420 - RNA, 22 nt, Artificial Sequence
  Guide RNA
gaagaggcauuaaaaggacugu

SEQ ID NO: 31421 - RNA, 22 nt, Artificial Sequence
  Guide RNA
gaagaggccauuaaaaggacug

SEQ ID NO: 31422 - RNA, 22 nt, Artificial Sequence
  Guide RNA
gaaggaaguguaacaugaagag

SEQ ID NO: 31423 - RNA, 22 nt, Artificial Sequence
  Guide RNA
gaaguguaacaugaagaggcau

SEQ ID NO: 31424 - RNA, 22 nt, Artificial Sequence
  Guide RNA
gaaguguaacaugaagaggcca

SEQ ID NO: 31425 - RNA, 22 nt, Artificial Sequence
  Guide RNA
gacaguccuuuuaaugccucuu

SEQ ID NO: 31426 - RNA, 22 nt, Artificial Sequence
  Guide RNA
gacaguccuuuuaauggccucu

SEQ ID NO: 31427 - RNA, 22 nt, Artificial Sequence
  Guide RNA
gagaggacaguccuuuuaaugc

SEQ ID NO: 31428 - RNA, 22 nt, Artificial Sequence
  Guide RNA
gagaggacaguccuuuuaaugg

SEQ ID NO: 31429 - RNA, 22 nt, Artificial Sequence
  Guide RNA
gaggacaguccuuuuaaugccu

SEQ ID NO: 31430 - RNA, 22 nt, Artificial Sequence
  Guide RNA
gaggacaguccuuuuaauggcc

SEQ ID NO: 31431 - RNA, 22 nt, Artificial Sequence
  Guide RNA
gaggcauuaaaaggacuguccu

SEQ ID NO: 31432 - RNA, 22 nt, Artificial Sequence
  Guide RNA
gaggccauuaaaaggacugucc

SEQ ID NO: 31433 - RNA, 22 nt, Artificial Sequence
  Guide RNA
gccauuaaaaggacuguccucu

SEQ ID NO: 31434 - RNA, 22 nt, Artificial Sequence
  Guide RNA
gccucuucauguuacacuuccu

SEQ ID NO: 31435 - RNA, 22 nt, Artificial Sequence
  Guide RNA
ggaaggaaguguaacaugaaga

SEQ ID NO: 31436 - RNA, 22 nt, Artificial Sequence
  Guide RNA
ggaaguguaacaugaagaggca

SEQ ID NO: 31437 - RNA, 22 nt, Artificial Sequence
  Guide RNA
ggaaguguaacaugaagaggcc

SEQ ID NO: 31438 - RNA, 22 nt, Artificial Sequence
  Guide RNA
ggacaguccuuuuaaugccucu

SEQ ID NO: 31439 - RNA, 22 nt, Artificial Sequence
  Guide RNA
ggacaguccuuuuaauggccuc

SEQ ID NO: 31440 - RNA, 22 nt, Artificial Sequence
  Guide RNA
ggcauuaaaaggacuguccucu

SEQ ID NO: 31441 - RNA, 22 nt, Artificial Sequence
  Guide RNA
ggccauuaaaaggacuguccuc

SEQ ID NO: 31442 - RNA, 22 nt, Artificial Sequence
  Guide RNA
ggccucuucauguuacacuucc

SEQ ID NO: 31443 - RNA, 22 nt, Artificial Sequence
  Guide RNA
guaacaugaagaggcauuaaaa

SEQ ID NO: 31444 - RNA, 22 nt, Artificial Sequence
  Guide RNA
guaacaugaagaggccauuaaa

SEQ ID NO: 31445 - RNA, 22 nt, Artificial Sequence
  Guide RNA
guccuuuuaaugccucuucaug

SEQ ID NO: 31446 - RNA, 22 nt, Artificial Sequence
  Guide RNA
guccuuuuaauggccucuucau

SEQ ID NO: 31447 - RNA, 22 nt, Artificial Sequence
  Guide RNA
guguaacaugaagaggcauuaa

SEQ ID NO: 31448 - RNA, 22 nt, Artificial Sequence
  Guide RNA
guguaacaugaagaggccauua

SEQ ID NO: 31449 - RNA, 22 nt, Artificial Sequence
  Guide RNA
uaaagagaggacaguccuuuua

SEQ ID NO: 31450 - RNA, 22 nt, Artificial Sequence
  Guide RNA
uaacaugaagaggcauuaaaag

SEQ ID NO: 31451 - RNA, 22 nt, Artificial Sequence
  Guide RNA
uaacaugaagaggccauuaaaa

SEQ ID NO: 31452 - RNA, 22 nt, Artificial Sequence
  Guide RNA
uaaugccucuucauguuacacu

SEQ ID NO: 31453 - RNA, 22 nt, Artificial Sequence
  Guide RNA
uaauggccucuucauguuacac

SEQ ID NO: 31454 - RNA, 22 nt, Artificial Sequence
  Guide RNA
uccuuuuaaugccucuucaugu

SEQ ID NO: 31455 - RNA, 22 nt, Artificial Sequence
  Guide RNA
uccuuuuaauggccucuucaug

SEQ ID NO: 31456 - RNA, 22 nt, Artificial Sequence
  Guide RNA
ugaagaggcauuaaaaggacug

SEQ ID NO: 31457 - RNA, 22 nt, Artificial Sequence
  Guide RNA
ugaagaggccauuaaaaggacu

SEQ ID NO: 31458 - RNA, 22 nt, Artificial Sequence
  Guide RNA
ugccucuucauguuacacuucc

SEQ ID NO: 31459 - RNA, 22 nt, Artificial Sequence
  Guide RNA
uggaaggaaguguaacaugaag

SEQ ID NO: 31460 - RNA, 22 nt, Artificial Sequence
  Guide RNA
uggccucuucauguuacacuuc

SEQ ID NO: 31461 - RNA, 22 nt, Artificial Sequence
  Guide RNA
uguaacaugaagaggcauuaaa

SEQ ID NO: 31462 - RNA, 22 nt, Artificial Sequence
  Guide RNA
uguaacaugaagaggccauuaa

SEQ ID NO: 31463 - RNA, 22 nt, Artificial Sequence
  Guide RNA
uuaaugccucuucauguuacac

SEQ ID NO: 31464 - RNA, 22 nt, Artificial Sequence
  Guide RNA
uuaauggccucuucauguuaca

SEQ ID NO: 31465 - RNA, 22 nt, Artificial Sequence
  Guide RNA
uuggaaggaaguguaacaugaa

SEQ ID NO: 31466 - RNA, 22 nt, Artificial Sequence
  Guide RNA
uuuaaugccucuucauguuaca

SEQ ID NO: 31467 - RNA, 22 nt, Artificial Sequence
  Guide RNA
uuuaauggccucuucauguuac

SEQ ID NO: 31468 - RNA, 22 nt, Artificial Sequence
  Guide RNA
uuuuaaugccucuucauguuac

SEQ ID NO: 31469 - RNA, 22 nt, Artificial Sequence
  Guide RNA
uuuuaauggccucuucauguua

SEQ ID NO: 31470 - RNA, 20 nt, Artificial Sequence
  Guide RNA
aaaccucauaacacuuguua

SEQ ID NO: 31471 - RNA, 20 nt, Artificial Sequence
  Guide RNA
aacaaguguuaugaggauug

SEQ ID NO: 31472 - RNA, 20 nt, Artificial Sequence
  Guide RNA
aacaaguguuaugagguuug

SEQ ID NO: 31473 - RNA, 20 nt, Artificial Sequence
  Guide RNA
aaccucauaacacuuguuaa

SEQ ID NO: 31474 - RNA, 20 nt, Artificial Sequence
  Guide RNA
aaguguuaugaggauugcaa

SEQ ID NO: 31475 - RNA, 20 nt, Artificial Sequence
  Guide RNA
aaguguuaugagguuugcaa

SEQ ID NO: 31476 - RNA, 20 nt, Artificial Sequence
  Guide RNA
aauccucauaacacuuguua

SEQ ID NO: 31477 - RNA, 20 nt, Artificial Sequence
  Guide RNA
acaaguguuaugaggauugc

SEQ ID NO: 31478 - RNA, 20 nt, Artificial Sequence
  Guide RNA
acaaguguuaugagguuugc

SEQ ID NO: 31479 - RNA, 20 nt, Artificial Sequence
  Guide RNA
acacuugcaaaccucauaac

SEQ ID NO: 31480 - RNA, 20 nt, Artificial Sequence
  Guide RNA
acacuugcaauccucauaac

SEQ ID NO: 31481 - RNA, 20 nt, Artificial Sequence
  Guide RNA
acuguaucacacuugcaaac

SEQ ID NO: 31482 - RNA, 20 nt, Artificial Sequence
  Guide RNA
acuguaucacacuugcaauc

SEQ ID NO: 31483 - RNA, 20 nt, Artificial Sequence
  Guide RNA
acuugcaaaccucauaacac

SEQ ID NO: 31484 - RNA, 20 nt, Artificial Sequence
  Guide RNA
acuugcaauccucauaacac

SEQ ID NO: 31485 - RNA, 20 nt, Artificial Sequence
  Guide RNA
aggauugcaagugugauaca

SEQ ID NO: 31486 - RNA, 20 nt, Artificial Sequence
  Guide RNA
agguuuaacaaguguuauga

SEQ ID NO: 31487 - RNA, 20 nt, Artificial Sequence
  Guide RNA
agguuugcaagugugauaca

SEQ ID NO: 31488 - RNA, 20 nt, Artificial Sequence
  Guide RNA
agugacuguaucacacuugc

SEQ ID NO: 31489 - RNA, 20 nt, Artificial Sequence
  Guide RNA
aguguuaugaggauugcaag

SEQ ID NO: 31490 - RNA, 20 nt, Artificial Sequence
  Guide RNA
aguguuaugagguuugcaag

SEQ ID NO: 31491 - RNA, 20 nt, Artificial Sequence
  Guide RNA
aucacacuugcaaaccucau

SEQ ID NO: 31492 - RNA, 20 nt, Artificial Sequence
  Guide RNA
aucacacuugcaauccucau

SEQ ID NO: 31493 - RNA, 20 nt, Artificial Sequence
  Guide RNA
auccucauaacacuuguuaa

SEQ ID NO: 31494 - RNA, 20 nt, Artificial Sequence
  Guide RNA
augaggauugcaagugugau

SEQ ID NO: 31495 - RNA, 20 nt, Artificial Sequence
  Guide RNA
augagguuugcaagugugau

SEQ ID NO: 31496 - RNA, 20 nt, Artificial Sequence
  Guide RNA
caaaccucauaacacuuguu

SEQ ID NO: 31497 - RNA, 20 nt, Artificial Sequence
  Guide RNA
caaguguuaugaggauugca

SEQ ID NO: 31498 - RNA, 20 nt, Artificial Sequence
  Guide RNA
caaguguuaugagguuugca

SEQ ID NO: 31499 - RNA, 20 nt, Artificial Sequence
  Guide RNA
caauccucauaacacuuguu

SEQ ID NO: 31500 - RNA, 20 nt, Artificial Sequence
  Guide RNA
cacacuugcaaaccucauaa

SEQ ID NO: 31501 - RNA, 20 nt, Artificial Sequence
  Guide RNA
cacacuugcaauccucauaa

SEQ ID NO: 31502 - RNA, 20 nt, Artificial Sequence
  Guide RNA
cacuugcaaaccucauaaca

SEQ ID NO: 31503 - RNA, 20 nt, Artificial Sequence
  Guide RNA
cacuugcaauccucauaaca

SEQ ID NO: 31504 - RNA, 20 nt, Artificial Sequence
  Guide RNA
cagugacuguaucacacuug

SEQ ID NO: 31505 - RNA, 20 nt, Artificial Sequence
  Guide RNA
cuguaucacacuugcaaacc

SEQ ID NO: 31506 - RNA, 20 nt, Artificial Sequence
  Guide RNA
cuguaucacacuugcaaucc

SEQ ID NO: 31507 - RNA, 20 nt, Artificial Sequence
  Guide RNA
cuugcaaaccucauaacacu

SEQ ID NO: 31508 - RNA, 20 nt, Artificial Sequence
  Guide RNA
cuugcaauccucauaacacu

SEQ ID NO: 31509 - RNA, 20 nt, Artificial Sequence
  Guide RNA
gacuguaucacacuugcaaa

SEQ ID NO: 31510 - RNA, 20 nt, Artificial Sequence
  Guide RNA
gacuguaucacacuugcaau

SEQ ID NO: 31511 - RNA, 20 nt, Artificial Sequence
  Guide RNA
gaggauugcaagugugauac

SEQ ID NO: 31512 - RNA, 20 nt, Artificial Sequence
  Guide RNA
gagguuugcaagugugauac

SEQ ID NO: 31513 - RNA, 20 nt, Artificial Sequence
  Guide RNA
gauugcaagugugauacagu

SEQ ID NO: 31514 - RNA, 20 nt, Artificial Sequence
  Guide RNA
gcaaaccucauaacacuugu

SEQ ID NO: 31515 - RNA, 20 nt, Artificial Sequence
  Guide RNA
gcaauccucauaacacuugu

SEQ ID NO: 31516 - RNA, 20 nt, Artificial Sequence
  Guide RNA
ggauugcaagugugauacag

SEQ ID NO: 31517 - RNA, 20 nt, Artificial Sequence
  Guide RNA
gguuuaacaaguguuaugag

SEQ ID NO: 31518 - RNA, 20 nt, Artificial Sequence
  Guide RNA
gguuugcaagugugauacag

SEQ ID NO: 31519 - RNA, 20 nt, Artificial Sequence
  Guide RNA
guaucacacuugcaaaccuc

SEQ ID NO: 31520 - RNA, 20 nt, Artificial Sequence
  Guide RNA
guaucacacuugcaauccuc

SEQ ID NO: 31521 - RNA, 20 nt, Artificial Sequence
  Guide RNA
gugacuguaucacacuugca

SEQ ID NO: 31522 - RNA, 20 nt, Artificial Sequence
  Guide RNA
guguuaugaggauugcaagu

SEQ ID NO: 31523 - RNA, 20 nt, Artificial Sequence
  Guide RNA
guguuaugagguuugcaagu

SEQ ID NO: 31524 - RNA, 20 nt, Artificial Sequence
  Guide RNA
guuaugaggauugcaagugu

SEQ ID NO: 31525 - RNA, 20 nt, Artificial Sequence
  Guide RNA
guuaugagguuugcaagugu

SEQ ID NO: 31526 - RNA, 20 nt, Artificial Sequence
  Guide RNA
guuuaacaaguguuaugagg

SEQ ID NO: 31527 - RNA, 20 nt, Artificial Sequence
  Guide RNA
guuugcaagugugauacagu

SEQ ID NO: 31528 - RNA, 20 nt, Artificial Sequence
  Guide RNA
uaacaaguguuaugaggauu

SEQ ID NO: 31529 - RNA, 20 nt, Artificial Sequence
  Guide RNA
uaacaaguguuaugagguuu

SEQ ID NO: 31530 - RNA, 20 nt, Artificial Sequence
  Guide RNA
uagguuuaacaaguguuaug

SEQ ID NO: 31531 - RNA, 20 nt, Artificial Sequence
  Guide RNA
uaucacacuugcaaaccuca

SEQ ID NO: 31532 - RNA, 20 nt, Artificial Sequence
  Guide RNA
uaucacacuugcaauccuca

SEQ ID NO: 31533 - RNA, 20 nt, Artificial Sequence
  Guide RNA
uaugaggauugcaaguguga

SEQ ID NO: 31534 - RNA, 20 nt, Artificial Sequence
  Guide RNA
uaugagguuugcaaguguga

SEQ ID NO: 31535 - RNA, 20 nt, Artificial Sequence
  Guide RNA
ucacacuugcaaaccucaua

SEQ ID NO: 31536 - RNA, 20 nt, Artificial Sequence
  Guide RNA
ucacacuugcaauccucaua

SEQ ID NO: 31537 - RNA, 20 nt, Artificial Sequence
  Guide RNA
ugacuguaucacacuugcaa

SEQ ID NO: 31538 - RNA, 20 nt, Artificial Sequence
  Guide RNA
ugaggauugcaagugugaua

SEQ ID NO: 31539 - RNA, 20 nt, Artificial Sequence
  Guide RNA
ugagguuugcaagugugaua

SEQ ID NO: 31540 - RNA, 20 nt, Artificial Sequence
  Guide RNA
ugcaaaccucauaacacuug

SEQ ID NO: 31541 - RNA, 20 nt, Artificial Sequence
  Guide RNA
ugcaauccucauaacacuug

SEQ ID NO: 31542 - RNA, 20 nt, Artificial Sequence
  Guide RNA
uguaucacacuugcaaaccu

SEQ ID NO: 31543 - RNA, 20 nt, Artificial Sequence
  Guide RNA
uguaucacacuugcaauccu

SEQ ID NO: 31544 - RNA, 20 nt, Artificial Sequence
  Guide RNA
uguuaugaggauugcaagug

SEQ ID NO: 31545 - RNA, 20 nt, Artificial Sequence
  Guide RNA
uguuaugagguuugcaagug

SEQ ID NO: 31546 - RNA, 20 nt, Artificial Sequence
  Guide RNA
uuaacaaguguuaugaggau

SEQ ID NO: 31547 - RNA, 20 nt, Artificial Sequence
  Guide RNA
uuaacaaguguuaugagguu

SEQ ID NO: 31548 - RNA, 20 nt, Artificial Sequence
  Guide RNA
uuaugaggauugcaagugug

SEQ ID NO: 31549 - RNA, 20 nt, Artificial Sequence
  Guide RNA
uuaugagguuugcaagugug

SEQ ID NO: 31550 - RNA, 20 nt, Artificial Sequence
  Guide RNA
uugcaaaccucauaacacuu

SEQ ID NO: 31551 - RNA, 20 nt, Artificial Sequence
  Guide RNA
uugcaauccucauaacacuu

SEQ ID NO: 31552 - RNA, 20 nt, Artificial Sequence
  Guide RNA
uuuaacaaguguuaugagga

SEQ ID NO: 31553 - RNA, 20 nt, Artificial Sequence
  Guide RNA
uuuaacaaguguuaugaggu

SEQ ID NO: 31554 - RNA, 21 nt, Artificial Sequence
  Guide RNA
aacaaguguuaugaggauugc

SEQ ID NO: 31555 - RNA, 21 nt, Artificial Sequence
  Guide RNA
aacaaguguuaugagguuugc

SEQ ID NO: 31556 - RNA, 21 nt, Artificial Sequence
  Guide RNA
aaguguuaugaggauugcaag

SEQ ID NO: 31557 - RNA, 21 nt, Artificial Sequence
  Guide RNA
aaguguuaugagguuugcaag

SEQ ID NO: 31558 - RNA, 21 nt, Artificial Sequence
  Guide RNA
acaaguguuaugaggauugca

SEQ ID NO: 31559 - RNA, 21 nt, Artificial Sequence
  Guide RNA
acaaguguuaugagguuugca

SEQ ID NO: 31560 - RNA, 21 nt, Artificial Sequence
  Guide RNA
acacuugcaaaccucauaaca

SEQ ID NO: 31561 - RNA, 21 nt, Artificial Sequence
  Guide RNA
acacuugcaauccucauaaca

SEQ ID NO: 31562 - RNA, 21 nt, Artificial Sequence
  Guide RNA
acuguaucacacuugcaaacc

SEQ ID NO: 31563 - RNA, 21 nt, Artificial Sequence
  Guide RNA
acuguaucacacuugcaaucc

SEQ ID NO: 31564 - RNA, 21 nt, Artificial Sequence
  Guide RNA
acuugcaaaccucauaacacu

SEQ ID NO: 31565 - RNA, 21 nt, Artificial Sequence
  Guide RNA
acuugcaauccucauaacacu

SEQ ID NO: 31566 - RNA, 21 nt, Artificial Sequence
  Guide RNA
aggauugcaagugugauacag

SEQ ID NO: 31567 - RNA, 21 nt, Artificial Sequence
  Guide RNA
agguuuaacaaguguuaugag

SEQ ID NO: 31568 - RNA, 21 nt, Artificial Sequence
  Guide RNA
agguuugcaagugugauacag

SEQ ID NO: 31569 - RNA, 21 nt, Artificial Sequence
  Guide RNA
agugacuguaucacacuugca

SEQ ID NO: 31570 - RNA, 21 nt, Artificial Sequence
  Guide RNA
aguguuaugaggauugcaagu

SEQ ID NO: 31571 - RNA, 21 nt, Artificial Sequence
  Guide RNA
aguguuaugagguuugcaagu

SEQ ID NO: 31572 - RNA, 21 nt, Artificial Sequence
  Guide RNA
aucacacuugcaaaccucaua

SEQ ID NO: 31573 - RNA, 21 nt, Artificial Sequence
  Guide RNA
aucacacuugcaauccucaua

SEQ ID NO: 31574 - RNA, 21 nt, Artificial Sequence
  Guide RNA
augaggauugcaagugugaua

SEQ ID NO: 31575 - RNA, 21 nt, Artificial Sequence
  Guide RNA
augagguuugcaagugugaua

SEQ ID NO: 31576 - RNA, 21 nt, Artificial Sequence
  Guide RNA
caaaccucauaacacuuguua

SEQ ID NO: 31577 - RNA, 21 nt, Artificial Sequence
  Guide RNA
caaguguuaugaggauugcaa

SEQ ID NO: 31578 - RNA, 21 nt, Artificial Sequence
  Guide RNA
caaguguuaugagguuugcaa

SEQ ID NO: 31579 - RNA, 21 nt, Artificial Sequence
  Guide RNA
caauccucauaacacuuguua

SEQ ID NO: 31580 - RNA, 21 nt, Artificial Sequence
  Guide RNA
cacacuugcaaaccucauaac

SEQ ID NO: 31581 - RNA, 21 nt, Artificial Sequence
  Guide RNA
cacacuugcaauccucauaac

SEQ ID NO: 31582 - RNA, 21 nt, Artificial Sequence
  Guide RNA
cacuugcaaaccucauaacac

SEQ ID NO: 31583 - RNA, 21 nt, Artificial Sequence
  Guide RNA
cacuugcaauccucauaacac

SEQ ID NO: 31584 - RNA, 21 nt, Artificial Sequence
  Guide RNA
cagugacuguaucacacuugc

SEQ ID NO: 31585 - RNA, 21 nt, Artificial Sequence
  Guide RNA
ccagugacuguaucacacuug

SEQ ID NO: 31586 - RNA, 21 nt, Artificial Sequence
  Guide RNA
cuguaucacacuugcaaaccu

SEQ ID NO: 31587 - RNA, 21 nt, Artificial Sequence
  Guide RNA
cuguaucacacuugcaauccu

SEQ ID NO: 31588 - RNA, 21 nt, Artificial Sequence
  Guide RNA
cuugcaaaccucauaacacuu

SEQ ID NO: 31589 - RNA, 21 nt, Artificial Sequence
  Guide RNA
cuugcaauccucauaacacuu

SEQ ID NO: 31590 - RNA, 21 nt, Artificial Sequence
  Guide RNA
gacuguaucacacuugcaaac

SEQ ID NO: 31591 - RNA, 21 nt, Artificial Sequence
  Guide RNA
gacuguaucacacuugcaauc

SEQ ID NO: 31592 - RNA, 21 nt, Artificial Sequence
  Guide RNA
gaggauugcaagugugauaca

SEQ ID NO: 31593 - RNA, 21 nt, Artificial Sequence
  Guide RNA
gagguuugcaagugugauaca

SEQ ID NO: 31594 - RNA, 21 nt, Artificial Sequence
  Guide RNA
gauugcaagugugauacaguc

SEQ ID NO: 31595 - RNA, 21 nt, Artificial Sequence
  Guide RNA
gcaaaccucauaacacuuguu

SEQ ID NO: 31596 - RNA, 21 nt, Artificial Sequence
  Guide RNA
gcaauccucauaacacuuguu

SEQ ID NO: 31597 - RNA, 21 nt, Artificial Sequence
  Guide RNA
ggauugcaagugugauacagu

SEQ ID NO: 31598 - RNA, 21 nt, Artificial Sequence
  Guide RNA
gguuuaacaaguguuaugagg

SEQ ID NO: 31599 - RNA, 21 nt, Artificial Sequence
  Guide RNA
gguuugcaagugugauacagu

SEQ ID NO: 31600 - RNA, 21 nt, Artificial Sequence
  Guide RNA
guaucacacuugcaaaccuca

SEQ ID NO: 31601 - RNA, 21 nt, Artificial Sequence
  Guide RNA
guaucacacuugcaauccuca

SEQ ID NO: 31602 - RNA, 21 nt, Artificial Sequence
  Guide RNA
gugacuguaucacacuugcaa

SEQ ID NO: 31603 - RNA, 21 nt, Artificial Sequence
  Guide RNA
guguuaugaggauugcaagug

SEQ ID NO: 31604 - RNA, 21 nt, Artificial Sequence
  Guide RNA
guguuaugagguuugcaagug

SEQ ID NO: 31605 - RNA, 21 nt, Artificial Sequence
  Guide RNA
guuaugaggauugcaagugug

SEQ ID NO: 31606 - RNA, 21 nt, Artificial Sequence
  Guide RNA
guuaugagguuugcaagugug

SEQ ID NO: 31607 - RNA, 21 nt, Artificial Sequence
  Guide RNA
guuuaacaaguguuaugagga

SEQ ID NO: 31608 - RNA, 21 nt, Artificial Sequence
  Guide RNA
guuuaacaaguguuaugaggu

SEQ ID NO: 31609 - RNA, 21 nt, Artificial Sequence
  Guide RNA
guuugcaagugugauacaguc

SEQ ID NO: 31610 - RNA, 21 nt, Artificial Sequence
  Guide RNA
uaacaaguguuaugaggauug

SEQ ID NO: 31611 - RNA, 21 nt, Artificial Sequence
  Guide RNA
uaacaaguguuaugagguuug

SEQ ID NO: 31612 - RNA, 21 nt, Artificial Sequence
  Guide RNA
uaucacacuugcaaaccucau

SEQ ID NO: 31613 - RNA, 21 nt, Artificial Sequence
  Guide RNA
uaucacacuugcaauccucau

SEQ ID NO: 31614 - RNA, 21 nt, Artificial Sequence
  Guide RNA
uaugaggauugcaagugugau

SEQ ID NO: 31615 - RNA, 21 nt, Artificial Sequence
  Guide RNA
uaugagguuugcaagugugau

SEQ ID NO: 31616 - RNA, 21 nt, Artificial Sequence
  Guide RNA
ucacacuugcaaaccucauaa

SEQ ID NO: 31617 - RNA, 21 nt, Artificial Sequence
  Guide RNA
ucacacuugcaauccucauaa

SEQ ID NO: 31618 - RNA, 21 nt, Artificial Sequence
  Guide RNA
ugacuguaucacacuugcaaa

SEQ ID NO: 31619 - RNA, 21 nt, Artificial Sequence
  Guide RNA
ugacuguaucacacuugcaau

SEQ ID NO: 31620 - RNA, 21 nt, Artificial Sequence
  Guide RNA
ugaggauugcaagugugauac

SEQ ID NO: 31621 - RNA, 21 nt, Artificial Sequence
  Guide RNA
ugagguuugcaagugugauac

SEQ ID NO: 31622 - RNA, 21 nt, Artificial Sequence
  Guide RNA
ugcaaaccucauaacacuugu

SEQ ID NO: 31623 - RNA, 21 nt, Artificial Sequence
  Guide RNA
ugcaauccucauaacacuugu

SEQ ID NO: 31624 - RNA, 21 nt, Artificial Sequence
  Guide RNA
uguaucacacuugcaaaccuc

SEQ ID NO: 31625 - RNA, 21 nt, Artificial Sequence
  Guide RNA
uguaucacacuugcaauccuc

SEQ ID NO: 31626 - RNA, 21 nt, Artificial Sequence
  Guide RNA
uguuaugaggauugcaagugu

SEQ ID NO: 31627 - RNA, 21 nt, Artificial Sequence
  Guide RNA
uguuaugagguuugcaagugu

SEQ ID NO: 31628 - RNA, 21 nt, Artificial Sequence
  Guide RNA
uuaugaggauugcaaguguga

SEQ ID NO: 31629 - RNA, 21 nt, Artificial Sequence
  Guide RNA
uuaugagguuugcaaguguga

SEQ ID NO: 31630 - RNA, 21 nt, Artificial Sequence
  Guide RNA
uugcaaaccucauaacacuug

SEQ ID NO: 31631 - RNA, 21 nt, Artificial Sequence
  Guide RNA
uugcaauccucauaacacuug

SEQ ID NO: 31632 - RNA, 22 nt, Artificial Sequence
  Guide RNA
aacaaguguuaugaggauugca

SEQ ID NO: 31633 - RNA, 22 nt, Artificial Sequence
  Guide RNA
aacaaguguuaugagguuugca

SEQ ID NO: 31634 - RNA, 22 nt, Artificial Sequence
  Guide RNA
aaccucauaacacuuguuaaac

SEQ ID NO: 31635 - RNA, 22 nt, Artificial Sequence
  Guide RNA
aaguguuaugaggauugcaagu

SEQ ID NO: 31636 - RNA, 22 nt, Artificial Sequence
  Guide RNA
aaguguuaugagguuugcaagu

SEQ ID NO: 31637 - RNA, 22 nt, Artificial Sequence
  Guide RNA
acaaguguuaugaggauugcaa

SEQ ID NO: 31638 - RNA, 22 nt, Artificial Sequence
  Guide RNA
acaaguguuaugagguuugcaa

SEQ ID NO: 31639 - RNA, 22 nt, Artificial Sequence
  Guide RNA
acacuugcaaaccucauaacac

SEQ ID NO: 31640 - RNA, 22 nt, Artificial Sequence
  Guide RNA
acacuugcaauccucauaacac

SEQ ID NO: 31641 - RNA, 22 nt, Artificial Sequence
  Guide RNA
acuguaucacacuugcaaaccu

SEQ ID NO: 31642 - RNA, 22 nt, Artificial Sequence
  Guide RNA
acuguaucacacuugcaauccu

SEQ ID NO: 31643 - RNA, 22 nt, Artificial Sequence
  Guide RNA
acuugcaaaccucauaacacuu

SEQ ID NO: 31644 - RNA, 22 nt, Artificial Sequence
  Guide RNA
acuugcaauccucauaacacuu

SEQ ID NO: 31645 - RNA, 22 nt, Artificial Sequence
  Guide RNA
aggauugcaagugugauacagu

SEQ ID NO: 31646 - RNA, 22 nt, Artificial Sequence
  Guide RNA
agguuuaacaaguguuaugagg

SEQ ID NO: 31647 - RNA, 22 nt, Artificial Sequence
  Guide RNA
agguuugcaagugugauacagu

SEQ ID NO: 31648 - RNA, 22 nt, Artificial Sequence
  Guide RNA
agugacuguaucacacuugcaa

SEQ ID NO: 31649 - RNA, 22 nt, Artificial Sequence
  Guide RNA
aguguuaugaggauugcaagug

SEQ ID NO: 31650 - RNA, 22 nt, Artificial Sequence
  Guide RNA
aguguuaugagguuugcaagug

SEQ ID NO: 31651 - RNA, 22 nt, Artificial Sequence
  Guide RNA
aucacacuugcaaaccucauaa

SEQ ID NO: 31652 - RNA, 22 nt, Artificial Sequence
  Guide RNA
aucacacuugcaauccucauaa

SEQ ID NO: 31653 - RNA, 22 nt, Artificial Sequence
  Guide RNA
auccucauaacacuuguuaaac

SEQ ID NO: 31654 - RNA, 22 nt, Artificial Sequence
  Guide RNA
augaggauugcaagugugauac

SEQ ID NO: 31655 - RNA, 22 nt, Artificial Sequence
  Guide RNA
augagguuugcaagugugauac

SEQ ID NO: 31656 - RNA, 22 nt, Artificial Sequence
  Guide RNA
caaaccucauaacacuuguuaa

SEQ ID NO: 31657 - RNA, 22 nt, Artificial Sequence
  Guide RNA
caaguguuaugaggauugcaag

SEQ ID NO: 31658 - RNA, 22 nt, Artificial Sequence
  Guide RNA
caaguguuaugagguuugcaag

SEQ ID NO: 31659 - RNA, 22 nt, Artificial Sequence
  Guide RNA
caauccucauaacacuuguuaa

SEQ ID NO: 31660 - RNA, 22 nt, Artificial Sequence
  Guide RNA
cacacuugcaaaccucauaaca

SEQ ID NO: 31661 - RNA, 22 nt, Artificial Sequence
  Guide RNA
cacacuugcaauccucauaaca

SEQ ID NO: 31662 - RNA, 22 nt, Artificial Sequence
  Guide RNA
cacuugcaaaccucauaacacu

SEQ ID NO: 31663 - RNA, 22 nt, Artificial Sequence
  Guide RNA
cacuugcaauccucauaacacu

SEQ ID NO: 31664 - RNA, 22 nt, Artificial Sequence
  Guide RNA
cagugacuguaucacacuugca

SEQ ID NO: 31665 - RNA, 22 nt, Artificial Sequence
  Guide RNA
ccagugacuguaucacacuugc

SEQ ID NO: 31666 - RNA, 22 nt, Artificial Sequence
  Guide RNA
cuguaucacacuugcaaaccuc

SEQ ID NO: 31667 - RNA, 22 nt, Artificial Sequence
  Guide RNA
cuguaucacacuugcaauccuc

SEQ ID NO: 31668 - RNA, 22 nt, Artificial Sequence
  Guide RNA
cuugcaaaccucauaacacuug

SEQ ID NO: 31669 - RNA, 22 nt, Artificial Sequence
  Guide RNA
cuugcaauccucauaacacuug

SEQ ID NO: 31670 - RNA, 22 nt, Artificial Sequence
  Guide RNA
gacuguaucacacuugcaaacc

SEQ ID NO: 31671 - RNA, 22 nt, Artificial Sequence
  Guide RNA
gacuguaucacacuugcaaucc

SEQ ID NO: 31672 - RNA, 22 nt, Artificial Sequence
  Guide RNA
gaggauugcaagugugauacag

SEQ ID NO: 31673 - RNA, 22 nt, Artificial Sequence
  Guide RNA
gagguuugcaagugugauacag

SEQ ID NO: 31674 - RNA, 22 nt, Artificial Sequence
  Guide RNA
gauagguuuaacaaguguuaug

SEQ ID NO: 31675 - RNA, 22 nt, Artificial Sequence
  Guide RNA
gauugcaagugugauacaguca

SEQ ID NO: 31676 - RNA, 22 nt, Artificial Sequence
  Guide RNA
gcaaaccucauaacacuuguua

SEQ ID NO: 31677 - RNA, 22 nt, Artificial Sequence
  Guide RNA
gcaauccucauaacacuuguua

SEQ ID NO: 31678 - RNA, 22 nt, Artificial Sequence
  Guide RNA
ggauugcaagugugauacaguc

SEQ ID NO: 31679 - RNA, 22 nt, Artificial Sequence
  Guide RNA
gguuuaacaaguguuaugagga

SEQ ID NO: 31680 - RNA, 22 nt, Artificial Sequence
  Guide RNA
gguuuaacaaguguuaugaggu

SEQ ID NO: 31681 - RNA, 22 nt, Artificial Sequence
  Guide RNA
gguuugcaagugugauacaguc

SEQ ID NO: 31682 - RNA, 22 nt, Artificial Sequence
  Guide RNA
guaucacacuugcaaaccucau

SEQ ID NO: 31683 - RNA, 22 nt, Artificial Sequence
  Guide RNA
guaucacacuugcaauccucau

SEQ ID NO: 31684 - RNA, 22 nt, Artificial Sequence
  Guide RNA
gugacuguaucacacuugcaaa

SEQ ID NO: 31685 - RNA, 22 nt, Artificial Sequence
  Guide RNA
gugacuguaucacacuugcaau

SEQ ID NO: 31686 - RNA, 22 nt, Artificial Sequence
  Guide RNA
guguuaugaggauugcaagugu

SEQ ID NO: 31687 - RNA, 22 nt, Artificial Sequence
  Guide RNA
guguuaugagguuugcaagugu

SEQ ID NO: 31688 - RNA, 22 nt, Artificial Sequence
  Guide RNA
guuaugaggauugcaaguguga

SEQ ID NO: 31689 - RNA, 22 nt, Artificial Sequence
  Guide RNA
guuaugagguuugcaaguguga

SEQ ID NO: 31690 - RNA, 22 nt, Artificial Sequence
  Guide RNA
guuuaacaaguguuaugaggau

SEQ ID NO: 31691 - RNA, 22 nt, Artificial Sequence
  Guide RNA
guuuaacaaguguuaugagguu

SEQ ID NO: 31692 - RNA, 22 nt, Artificial Sequence
  Guide RNA
guuugcaagugugauacaguca

SEQ ID NO: 31693 - RNA, 22 nt, Artificial Sequence
  Guide RNA
uaacaaguguuaugaggauugc

SEQ ID NO: 31694 - RNA, 22 nt, Artificial Sequence
  Guide RNA
uaacaaguguuaugagguuugc

SEQ ID NO: 31695 - RNA, 22 nt, Artificial Sequence
  Guide RNA
uagguuuaacaaguguuaugag

SEQ ID NO: 31696 - RNA, 22 nt, Artificial Sequence
  Guide RNA
uaucacacuugcaaaccucaua

SEQ ID NO: 31697 - RNA, 22 nt, Artificial Sequence
  Guide RNA
uaucacacuugcaauccucaua

SEQ ID NO: 31698 - RNA, 22 nt, Artificial Sequence
  Guide RNA
uaugaggauugcaagugugaua

SEQ ID NO: 31699 - RNA, 22 nt, Artificial Sequence
  Guide RNA
uaugagguuugcaagugugaua

SEQ ID NO: 31700 - RNA, 22 nt, Artificial Sequence
  Guide RNA
ucacacuugcaaaccucauaac

SEQ ID NO: 31701 - RNA, 22 nt, Artificial Sequence
  Guide RNA
ucacacuugcaauccucauaac

SEQ ID NO: 31702 - RNA, 22 nt, Artificial Sequence
  Guide RNA
uccagugacuguaucacacuug

SEQ ID NO: 31703 - RNA, 22 nt, Artificial Sequence
  Guide RNA
ugacuguaucacacuugcaaac

SEQ ID NO: 31704 - RNA, 22 nt, Artificial Sequence
  Guide RNA
ugacuguaucacacuugcaauc

SEQ ID NO: 31705 - RNA, 22 nt, Artificial Sequence
  Guide RNA
ugaggauugcaagugugauaca

SEQ ID NO: 31706 - RNA, 22 nt, Artificial Sequence
  Guide RNA
ugagguuugcaagugugauaca

SEQ ID NO: 31707 - RNA, 22 nt, Artificial Sequence
  Guide RNA
ugcaaaccucauaacacuuguu

SEQ ID NO: 31708 - RNA, 22 nt, Artificial Sequence
  Guide RNA
ugcaauccucauaacacuuguu

SEQ ID NO: 31709 - RNA, 22 nt, Artificial Sequence
  Guide RNA
uguaucacacuugcaaaccuca

SEQ ID NO: 31710 - RNA, 22 nt, Artificial Sequence
  Guide RNA
uguaucacacuugcaauccuca

SEQ ID NO: 31711 - RNA, 22 nt, Artificial Sequence
  Guide RNA
uguuaugaggauugcaagugug

SEQ ID NO: 31712 - RNA, 22 nt, Artificial Sequence
  Guide RNA
uguuaugagguuugcaagugug

SEQ ID NO: 31713 - RNA, 22 nt, Artificial Sequence
  Guide RNA
uuaacaaguguuaugaggauug

SEQ ID NO: 31714 - RNA, 22 nt, Artificial Sequence
  Guide RNA
uuaacaaguguuaugagguuug

SEQ ID NO: 31715 - RNA, 22 nt, Artificial Sequence
  Guide RNA
uuaugaggauugcaagugugau

SEQ ID NO: 31716 - RNA, 22 nt, Artificial Sequence
  Guide RNA
uuaugagguuugcaagugugau

SEQ ID NO: 31717 - RNA, 22 nt, Artificial Sequence
  Guide RNA
uugcaaaccucauaacacuugu

SEQ ID NO: 31718 - RNA, 22 nt, Artificial Sequence
  Guide RNA
uugcaauccucauaacacuugu

SEQ ID NO: 31719 - RNA, 20 nt, Artificial Sequence
  Guide RNA
aaaauuguaaagauacgguc

SEQ ID NO: 31720 - RNA, 22 nt, Artificial Sequence
  Guide RNA
aaaauuguaaagauacggucuc

SEQ ID NO: 31721 - RNA, 20 nt, Artificial Sequence
  Guide RNA
acaggcauuuucaaauaucu

SEQ ID NO: 31722 - RNA, 20 nt, Artificial Sequence
  Guide RNA
agauauuugaaaaugccugu

SEQ ID NO: 31723 - RNA, 20 nt, Artificial Sequence
  Guide RNA
aggcauuuucaaauaucuca

SEQ ID NO: 31724 - RNA, 20 nt, Artificial Sequence
  Guide RNA
caggcauuuucaaauaucuc

SEQ ID NO: 31725 - RNA, 20 nt, Artificial Sequence
  Guide RNA
caggcauuuucaaauauuuc

SEQ ID NO: 31726 - RNA, 20 nt, Artificial Sequence
  Guide RNA
cugauacaggcauuuucaaa

SEQ ID NO: 31727 - RNA, 20 nt, Artificial Sequence
  Guide RNA
gaaauauuugaaaaugccug

SEQ ID NO: 31728 - RNA, 20 nt, Artificial Sequence
  Guide RNA
gagauauuugaaaaugccug

SEQ ID NO: 31729 - RNA, 20 nt, Artificial Sequence
  Guide RNA
gauacaggcauuuucaaaua

SEQ ID NO: 31730 - RNA, 20 nt, Artificial Sequence
  Guide RNA
ggcauuuucaaauaucucaa

SEQ ID NO: 31731 - RNA, 20 nt, Artificial Sequence
  Guide RNA
uacaggcauuuucaaauauc

SEQ ID NO: 31732 - RNA, 20 nt, Artificial Sequence
  Guide RNA
ugagauauuugaaaaugccu

SEQ ID NO: 31733 - RNA, 20 nt, Artificial Sequence
  Guide RNA
ugauacaggcauuuucaaau

SEQ ID NO: 31734 - RNA, 20 nt, Artificial Sequence
  Guide RNA
uugagauauuugaaaaugcc

SEQ ID NO: 31735 - RNA, 21 nt, Artificial Sequence
  Guide RNA
acaggcauuuucaaauaucuc

SEQ ID NO: 31736 - RNA, 21 nt, Artificial Sequence
  Guide RNA
caggcauuuucaaauaucuca

SEQ ID NO: 31737 - RNA, 21 nt, Artificial Sequence
  Guide RNA
ccugauacaggcauuuucaaa

SEQ ID NO: 31738 - RNA, 21 nt, Artificial Sequence
  Guide RNA
cugauacaggcauuuucaaau

SEQ ID NO: 31739 - RNA, 21 nt, Artificial Sequence
  Guide RNA
gagauauuugaaaaugccugu

SEQ ID NO: 31740 - RNA, 21 nt, Artificial Sequence
  Guide RNA
ugagauauuugaaaaugccug

SEQ ID NO: 31741 - RNA, 22 nt, Artificial Sequence
  Guide RNA
acaggcauuuucaaauaucuca

SEQ ID NO: 31742 - RNA, 22 nt, Artificial Sequence
  Guide RNA
caggcauuuucaaauaucucaa

SEQ ID NO: 31743 - RNA, 22 nt, Artificial Sequence
  Guide RNA
ccugauacaggcauuuucaaau

SEQ ID NO: 31744 - RNA, 22 nt, Artificial Sequence
  Guide RNA
cugauacaggcauuuucaaaua

SEQ ID NO: 31745 - RNA, 22 nt, Artificial Sequence
  Guide RNA
gagauauuugaaaaugccugua

SEQ ID NO: 31746 - RNA, 22 nt, Artificial Sequence
  Guide RNA
gauacaggcauuuucaaauauc

SEQ ID NO: 31747 - RNA, 22 nt, Artificial Sequence
  Guide RNA
gccugauacaggcauuuucaaa

SEQ ID NO: 31748 - RNA, 22 nt, Artificial Sequence
  Guide RNA
uacaggcauuuucaaauaucuc

SEQ ID NO: 31749 - RNA, 22 nt, Artificial Sequence
  Guide RNA
ugagauauuugaaaaugccugu

SEQ ID NO: 31750 - RNA, 22 nt, Artificial Sequence
  Guide RNA
uugagauauuugaaaaugccug

SEQ ID NO: 31751 - RNA, 20 nt, Artificial Sequence
  Guide RNA
aagcgauccuccugcuucag

SEQ ID NO: 31752 - RNA, 20 nt, Artificial Sequence
  Guide RNA
acuaggggggcugaagcagg

SEQ ID NO: 31753 - RNA, 20 nt, Artificial Sequence
  Guide RNA
agcgauccuccugcuucagc

SEQ ID NO: 31754 - RNA, 20 nt, Artificial Sequence
  Guide RNA
agcuacuaggggggcugaag

SEQ ID NO: 31755 - RNA, 20 nt, Artificial Sequence
  Guide RNA
aggggggcugaagcaggagg

SEQ ID NO: 31756 - RNA, 20 nt, Artificial Sequence
  Guide RNA
aucccagcuacuaggggggc

SEQ ID NO: 31757 - RNA, 20 nt, Artificial Sequence
  Guide RNA
auccuccugcuucagccccc

SEQ ID NO: 31758 - RNA, 20 nt, Artificial Sequence
  Guide RNA
cagcuacuaggggggcugaa

SEQ ID NO: 31759 - RNA, 20 nt, Artificial Sequence
  Guide RNA
ccagcuacuaggggggcuga

SEQ ID NO: 31760 - RNA, 20 nt, Artificial Sequence
  Guide RNA
cccagcuacuaggggggcug

SEQ ID NO: 31761 - RNA, 20 nt, Artificial Sequence
  Guide RNA
ccuccugcuucagccccccu

SEQ ID NO: 31762 - RNA, 20 nt, Artificial Sequence
  Guide RNA
ccugcuucagccccccuagu

SEQ ID NO: 31763 - RNA, 20 nt, Artificial Sequence
  Guide RNA
cgauccuccugcuucagccc

SEQ ID NO: 31764 - RNA, 20 nt, Artificial Sequence
  Guide RNA
cuacuaggggggcugaagca

SEQ ID NO: 31765 - RNA, 20 nt, Artificial Sequence
  Guide RNA
cuaggggggcugaagcagga

SEQ ID NO: 31766 - RNA, 20 nt, Artificial Sequence
  Guide RNA
cuccugcuucagccccccua

SEQ ID NO: 31767 - RNA, 20 nt, Artificial Sequence
  Guide RNA
cugcuucagccccccuagua

SEQ ID NO: 31768 - RNA, 20 nt, Artificial Sequence
  Guide RNA
cuucagccccccuaguagcu

SEQ ID NO: 31769 - RNA, 20 nt, Artificial Sequence
  Guide RNA
gauccuccugcuucagcccc

SEQ ID NO: 31770 - RNA, 20 nt, Artificial Sequence
  Guide RNA
gcgauccuccugcuucagcc

SEQ ID NO: 31771 - RNA, 20 nt, Artificial Sequence
  Guide RNA
gcuacuaggggggcugaagc

SEQ ID NO: 31772 - RNA, 20 nt, Artificial Sequence
  Guide RNA
gcuucagccccccuaguagc

SEQ ID NO: 31773 - RNA, 20 nt, Artificial Sequence
  Guide RNA
ggggcugaagcaggaggauc

SEQ ID NO: 31774 - RNA, 20 nt, Artificial Sequence
  Guide RNA
gggggcugaagcaggaggau

SEQ ID NO: 31775 - RNA, 20 nt, Artificial Sequence
  Guide RNA
ggggggcugaagcaggagga

SEQ ID NO: 31776 - RNA, 20 nt, Artificial Sequence
  Guide RNA
uacuaggggggcugaagcag

SEQ ID NO: 31777 - RNA, 20 nt, Artificial Sequence
  Guide RNA
uaggggggcugaagcaggag

SEQ ID NO: 31778 - RNA, 20 nt, Artificial Sequence
  Guide RNA
ucccagcuacuaggggggcu

SEQ ID NO: 31779 - RNA, 20 nt, Artificial Sequence
  Guide RNA
uccuccugcuucagcccccc

SEQ ID NO: 31780 - RNA, 20 nt, Artificial Sequence
  Guide RNA
uccugcuucagccccccuag

SEQ ID NO: 31781 - RNA, 20 nt, Artificial Sequence
  Guide RNA
ugcuucagccccccuaguag

SEQ ID NO: 31782 - RNA, 21 nt, Artificial Sequence
  Guide RNA
aagcgauccuccugcuucagc

SEQ ID NO: 31783 - RNA, 21 nt, Artificial Sequence
  Guide RNA
aaucccagcuacuaggggggc

SEQ ID NO: 31784 - RNA, 21 nt, Artificial Sequence
  Guide RNA
acuaggggggcugaagcagga

SEQ ID NO: 31785 - RNA, 21 nt, Artificial Sequence
  Guide RNA
agcgauccuccugcuucagcc

SEQ ID NO: 31786 - RNA, 21 nt, Artificial Sequence
  Guide RNA
agcuacuaggggggcugaagc

SEQ ID NO: 31787 - RNA, 21 nt, Artificial Sequence
  Guide RNA
aggggggcugaagcaggagga

SEQ ID NO: 31788 - RNA, 21 nt, Artificial Sequence
  Guide RNA
aucccagcuacuaggggggcu

SEQ ID NO: 31789 - RNA, 21 nt, Artificial Sequence
  Guide RNA
auccuccugcuucagcccccc

SEQ ID NO: 31790 - RNA, 21 nt, Artificial Sequence
  Guide RNA
caagcgauccuccugcuucag

SEQ ID NO: 31791 - RNA, 21 nt, Artificial Sequence
  Guide RNA
cagcuacuaggggggcugaag

SEQ ID NO: 31792 - RNA, 21 nt, Artificial Sequence
  Guide RNA
ccagcuacuaggggggcugaa

SEQ ID NO: 31793 - RNA, 21 nt, Artificial Sequence
  Guide RNA
cccagcuacuaggggggcuga

SEQ ID NO: 31794 - RNA, 21 nt, Artificial Sequence
  Guide RNA
ccuccugcuucagccccccua

SEQ ID NO: 31795 - RNA, 21 nt, Artificial Sequence
  Guide RNA
ccugcuucagccccccuagua

SEQ ID NO: 31796 - RNA, 21 nt, Artificial Sequence
  Guide RNA
cgauccuccugcuucagcccc

SEQ ID NO: 31797 - RNA, 21 nt, Artificial Sequence
  Guide RNA
cuacuaggggggcugaagcag

SEQ ID NO: 31798 - RNA, 21 nt, Artificial Sequence
  Guide RNA
cuaggggggcugaagcaggag

SEQ ID NO: 31799 - RNA, 21 nt, Artificial Sequence
  Guide RNA
cuccugcuucagccccccuag

SEQ ID NO: 31800 - RNA, 21 nt, Artificial Sequence
  Guide RNA
cugcuucagccccccuaguag

SEQ ID NO: 31801 - RNA, 21 nt, Artificial Sequence
  Guide RNA
cuucagccccccuaguagcug

SEQ ID NO: 31802 - RNA, 21 nt, Artificial Sequence
  Guide RNA
gauccuccugcuucagccccc

SEQ ID NO: 31803 - RNA, 21 nt, Artificial Sequence
  Guide RNA
gcgauccuccugcuucagccc

SEQ ID NO: 31804 - RNA, 21 nt, Artificial Sequence
  Guide RNA
gcuacuaggggggcugaagca

SEQ ID NO: 31805 - RNA, 21 nt, Artificial Sequence
  Guide RNA
gcuucagccccccuaguagcu

SEQ ID NO: 31806 - RNA, 21 nt, Artificial Sequence
  Guide RNA
ggggcugaagcaggaggaucg

SEQ ID NO: 31807 - RNA, 21 nt, Artificial Sequence
  Guide RNA
gggggcugaagcaggaggauc

SEQ ID NO: 31808 - RNA, 21 nt, Artificial Sequence
  Guide RNA
ggggggcugaagcaggaggau

SEQ ID NO: 31809 - RNA, 21 nt, Artificial Sequence
  Guide RNA
uacuaggggggcugaagcagg

SEQ ID NO: 31810 - RNA, 21 nt, Artificial Sequence
  Guide RNA
uaggggggcugaagcaggagg

SEQ ID NO: 31811 - RNA, 21 nt, Artificial Sequence
  Guide RNA
uccagguucaagcgauccucc

SEQ ID NO: 31812 - RNA, 21 nt, Artificial Sequence
  Guide RNA
ucccagcuacuaggggggcug

SEQ ID NO: 31813 - RNA, 21 nt, Artificial Sequence
  Guide RNA
uccuccugcuucagccccccu

SEQ ID NO: 31814 - RNA, 21 nt, Artificial Sequence
  Guide RNA
uccugcuucagccccccuagu

SEQ ID NO: 31815 - RNA, 21 nt, Artificial Sequence
  Guide RNA
ugcuucagccccccuaguagc

SEQ ID NO: 31816 - RNA, 22 nt, Artificial Sequence
  Guide RNA
aagcaggaggaucgcuugaacc

SEQ ID NO: 31817 - RNA, 22 nt, Artificial Sequence
  Guide RNA
aagcgauccuccugcuucagcc

SEQ ID NO: 31818 - RNA, 22 nt, Artificial Sequence
  Guide RNA
aaucccagcuacuaggggggcu

SEQ ID NO: 31819 - RNA, 22 nt, Artificial Sequence
  Guide RNA
acuaggggggcugaagcaggag

SEQ ID NO: 31820 - RNA, 22 nt, Artificial Sequence
  Guide RNA
agcgauccuccugcuucagccc

SEQ ID NO: 31821 - RNA, 22 nt, Artificial Sequence
  Guide RNA
agcuacuaggggggcugaagca

SEQ ID NO: 31822 - RNA, 22 nt, Artificial Sequence
  Guide RNA
aggggggcugaagcaggaggau

SEQ ID NO: 31823 - RNA, 22 nt, Artificial Sequence
  Guide RNA
aucccagcuacuaggggggcug

SEQ ID NO: 31824 - RNA, 22 nt, Artificial Sequence
  Guide RNA
auccuccugcuucagccccccu

SEQ ID NO: 31825 - RNA, 22 nt, Artificial Sequence
  Guide RNA
caagcgauccuccugcuucagc

SEQ ID NO: 31826 - RNA, 22 nt, Artificial Sequence
  Guide RNA
cagcuacuaggggggcugaagc

SEQ ID NO: 31827 - RNA, 22 nt, Artificial Sequence
  Guide RNA
ccagcuacuaggggggcugaag

SEQ ID NO: 31828 - RNA, 22 nt, Artificial Sequence
  Guide RNA
cccagcuacuaggggggcugaa

SEQ ID NO: 31829 - RNA, 22 nt, Artificial Sequence
  Guide RNA
ccuccugcuucagccccccuag

SEQ ID NO: 31830 - RNA, 22 nt, Artificial Sequence
  Guide RNA
ccugcuucagccccccuaguag

SEQ ID NO: 31831 - RNA, 22 nt, Artificial Sequence
  Guide RNA
cgauccuccugcuucagccccc

SEQ ID NO: 31832 - RNA, 22 nt, Artificial Sequence
  Guide RNA
cuacuaggggggcugaagcagg

SEQ ID NO: 31833 - RNA, 22 nt, Artificial Sequence
  Guide RNA
cuaggggggcugaagcaggagg

SEQ ID NO: 31834 - RNA, 22 nt, Artificial Sequence
  Guide RNA
cuccugcuucagccccccuagu

SEQ ID NO: 31835 - RNA, 22 nt, Artificial Sequence
  Guide RNA
cugcuucagccccccuaguagc

SEQ ID NO: 31836 - RNA, 22 nt, Artificial Sequence
  Guide RNA
cuucagccccccuaguagcugg

SEQ ID NO: 31837 - RNA, 22 nt, Artificial Sequence
  Guide RNA
gauccuccugcuucagcccccc

SEQ ID NO: 31838 - RNA, 22 nt, Artificial Sequence
  Guide RNA
gcgauccuccugcuucagcccc

SEQ ID NO: 31839 - RNA, 22 nt, Artificial Sequence
  Guide RNA
gcuacuaggggggcugaagcag

SEQ ID NO: 31840 - RNA, 22 nt, Artificial Sequence
  Guide RNA
gcuucagccccccuaguagcug

SEQ ID NO: 31841 - RNA, 22 nt, Artificial Sequence
  Guide RNA
gggcugaagcaggaggaucgcu

SEQ ID NO: 31842 - RNA, 22 nt, Artificial Sequence
  Guide RNA
ggggcugaagcaggaggaucgc

SEQ ID NO: 31843 - RNA, 22 nt, Artificial Sequence
  Guide RNA
gggggcugaagcaggaggaucg

SEQ ID NO: 31844 - RNA, 22 nt, Artificial Sequence
  Guide RNA
ggggggcugaagcaggaggauc

SEQ ID NO: 31845 - RNA, 22 nt, Artificial Sequence
  Guide RNA
uaaucccagcuacuaggggggc

SEQ ID NO: 31846 - RNA, 22 nt, Artificial Sequence
  Guide RNA
uacuaggggggcugaagcagga

SEQ ID NO: 31847 - RNA, 22 nt, Artificial Sequence
  Guide RNA
uaggggggcugaagcaggagga

SEQ ID NO: 31848 - RNA, 22 nt, Artificial Sequence
  Guide RNA
ucaagcgauccuccugcuucag

SEQ ID NO: 31849 - RNA, 22 nt, Artificial Sequence
  Guide RNA
uccagguucaagcgauccuccu

SEQ ID NO: 31850 - RNA, 22 nt, Artificial Sequence
  Guide RNA
ucccagcuacuaggggggcuga

SEQ ID NO: 31851 - RNA, 22 nt, Artificial Sequence
  Guide RNA
uccuccugcuucagccccccua

SEQ ID NO: 31852 - RNA, 22 nt, Artificial Sequence
  Guide RNA
uccugcuucagccccccuagua

SEQ ID NO: 31853 - RNA, 22 nt, Artificial Sequence
  Guide RNA
ugcuucagccccccuaguagcu

SEQ ID NO: 31854 - RNA, 22 nt, Artificial Sequence
  Guide RNA
uucaagcgauccuccugcuuca

SEQ ID NO: 31855 - RNA, 22 nt, Artificial Sequence
  Guide RNA
uuccagguucaagcgauccucc

SEQ ID NO: 31856 - RNA, 20 nt, Artificial Sequence
  Guide RNA
aaacaccuacaguauaccau

SEQ ID NO: 31857 - RNA, 20 nt, Artificial Sequence
  Guide RNA
aacaccuacaguauaccaug

SEQ ID NO: 31858 - RNA, 20 nt, Artificial Sequence
  Guide RNA
aagcaccuacaguauaccau

SEQ ID NO: 31859 - RNA, 20 nt, Artificial Sequence
  Guide RNA
aaguacaugguauacuguag

SEQ ID NO: 31860 - RNA, 20 nt, Artificial Sequence
  Guide RNA
aauaggugacauuaaacacc

SEQ ID NO: 31861 - RNA, 20 nt, Artificial Sequence
  Guide RNA
aauaggugacauuaagcacc

SEQ ID NO: 31862 - RNA, 20 nt, Artificial Sequence
  Guide RNA
acaugguauacuguaggugc

SEQ ID NO: 31863 - RNA, 20 nt, Artificial Sequence
  Guide RNA
acaugguauacuguaggugu

SEQ ID NO: 31864 - RNA, 20 nt, Artificial Sequence
  Guide RNA
acauuaaacaccuacaguau

SEQ ID NO: 31865 - RNA, 20 nt, Artificial Sequence
  Guide RNA
acauuaagcaccuacaguau

SEQ ID NO: 31866 - RNA, 20 nt, Artificial Sequence
  Guide RNA
accauuaauaggugacauua

SEQ ID NO: 31867 - RNA, 20 nt, Artificial Sequence
  Guide RNA
acuguaggugcuuaauguca

SEQ ID NO: 31868 - RNA, 20 nt, Artificial Sequence
  Guide RNA
acuguagguguuuaauguca

SEQ ID NO: 31869 - RNA, 20 nt, Artificial Sequence
  Guide RNA
agcaccuacaguauaccaug

SEQ ID NO: 31870 - RNA, 20 nt, Artificial Sequence
  Guide RNA
aggugacauuaaacaccuac

SEQ ID NO: 31871 - RNA, 20 nt, Artificial Sequence
  Guide RNA
aggugacauuaagcaccuac

SEQ ID NO: 31872 - RNA, 20 nt, Artificial Sequence
  Guide RNA
aggugcuuaaugucaccuau

SEQ ID NO: 31873 - RNA, 20 nt, Artificial Sequence
  Guide RNA
agguguuuaaugucaccuau

SEQ ID NO: 31874 - RNA, 20 nt, Artificial Sequence
  Guide RNA
aguacaugguauacuguagg

SEQ ID NO: 31875 - RNA, 20 nt, Artificial Sequence
  Guide RNA
auacuguaggugcuuaaugu

SEQ ID NO: 31876 - RNA, 20 nt, Artificial Sequence
  Guide RNA
auacuguagguguuuaaugu

SEQ ID NO: 31877 - RNA, 20 nt, Artificial Sequence
  Guide RNA
auaggugacauuaaacaccu

SEQ ID NO: 31878 - RNA, 20 nt, Artificial Sequence
  Guide RNA
auaggugacauuaagcaccu

SEQ ID NO: 31879 - RNA, 20 nt, Artificial Sequence
  Guide RNA
augguauacuguaggugcuu

SEQ ID NO: 31880 - RNA, 20 nt, Artificial Sequence
  Guide RNA
augguauacuguagguguuu

SEQ ID NO: 31881 - RNA, 20 nt, Artificial Sequence
  Guide RNA
auuaaacaccuacaguauac

SEQ ID NO: 31882 - RNA, 20 nt, Artificial Sequence
  Guide RNA
auuaagcaccuacaguauac

SEQ ID NO: 31883 - RNA, 20 nt, Artificial Sequence
  Guide RNA
auuaauaggugacauuaagc

SEQ ID NO: 31884 - RNA, 20 nt, Artificial Sequence
  Guide RNA
caccauuaauaggugacauu

SEQ ID NO: 31885 - RNA, 20 nt, Artificial Sequence
  Guide RNA
caugguauacuguaggugcu

SEQ ID NO: 31886 - RNA, 20 nt, Artificial Sequence
  Guide RNA
caugguauacuguagguguu

SEQ ID NO: 31887 - RNA, 20 nt, Artificial Sequence
  Guide RNA
cauuaaacaccuacaguaua

SEQ ID NO: 31888 - RNA, 20 nt, Artificial Sequence
  Guide RNA
cauuaagcaccuacaguaua

SEQ ID NO: 31889 - RNA, 20 nt, Artificial Sequence
  Guide RNA
cauuaauaggugacauuaag

SEQ ID NO: 31890 - RNA, 20 nt, Artificial Sequence
  Guide RNA
ccaccauuaauaggugacau

SEQ ID NO: 31891 - RNA, 20 nt, Artificial Sequence
  Guide RNA
ccauuaauaggugacauuaa

SEQ ID NO: 31892 - RNA, 20 nt, Artificial Sequence
  Guide RNA
cuguaggugcuuaaugucac

SEQ ID NO: 31893 - RNA, 20 nt, Artificial Sequence
  Guide RNA
cuguagguguuuaaugucac

SEQ ID NO: 31894 - RNA, 20 nt, Artificial Sequence
  Guide RNA
gacauuaaacaccuacagua

SEQ ID NO: 31895 - RNA, 20 nt, Artificial Sequence
  Guide RNA
gacauuaagcaccuacagua

SEQ ID NO: 31896 - RNA, 20 nt, Artificial Sequence
  Guide RNA
gcuuaaugucaccuauuaau

SEQ ID NO: 31897 - RNA, 20 nt, Artificial Sequence
  Guide RNA
gguauacuguaggugcuuaa

SEQ ID NO: 31898 - RNA, 20 nt, Artificial Sequence
  Guide RNA
gguauacuguagguguuuaa

SEQ ID NO: 31899 - RNA, 20 nt, Artificial Sequence
  Guide RNA
ggugacauuaaacaccuaca

SEQ ID NO: 31900 - RNA, 20 nt, Artificial Sequence
  Guide RNA
ggugacauuaagcaccuaca

SEQ ID NO: 31901 - RNA, 20 nt, Artificial Sequence
  Guide RNA
ggugcuuaaugucaccuauu

SEQ ID NO: 31902 - RNA, 20 nt, Artificial Sequence
  Guide RNA
gguguuuaaugucaccuauu

SEQ ID NO: 31903 - RNA, 20 nt, Artificial Sequence
  Guide RNA
guacaugguauacuguaggu

SEQ ID NO: 31904 - RNA, 20 nt, Artificial Sequence
  Guide RNA
guaggugcuuaaugucaccu

SEQ ID NO: 31905 - RNA, 20 nt, Artificial Sequence
  Guide RNA
guagguguuuaaugucaccu

SEQ ID NO: 31906 - RNA, 20 nt, Artificial Sequence
  Guide RNA
guauacuguaggugcuuaau

SEQ ID NO: 31907 - RNA, 20 nt, Artificial Sequence
  Guide RNA
guauacuguagguguuuaau

SEQ ID NO: 31908 - RNA, 20 nt, Artificial Sequence
  Guide RNA
gugacauuaaacaccuacag

SEQ ID NO: 31909 - RNA, 20 nt, Artificial Sequence
  Guide RNA
gugacauuaagcaccuacag

SEQ ID NO: 31910 - RNA, 20 nt, Artificial Sequence
  Guide RNA
gugcuuaaugucaccuauua

SEQ ID NO: 31911 - RNA, 20 nt, Artificial Sequence
  Guide RNA
guguuuaaugucaccuauua

SEQ ID NO: 31912 - RNA, 20 nt, Artificial Sequence
  Guide RNA
uaaacaccuacaguauacca

SEQ ID NO: 31913 - RNA, 20 nt, Artificial Sequence
  Guide RNA
uaagcaccuacaguauacca

SEQ ID NO: 31914 - RNA, 20 nt, Artificial Sequence
  Guide RNA
uaauaggugacauuaaacac

SEQ ID NO: 31915 - RNA, 20 nt, Artificial Sequence
  Guide RNA
uaauaggugacauuaagcac

SEQ ID NO: 31916 - RNA, 20 nt, Artificial Sequence
  Guide RNA
uacaugguauacuguaggug

SEQ ID NO: 31917 - RNA, 20 nt, Artificial Sequence
  Guide RNA
uacuguaggugcuuaauguc

SEQ ID NO: 31918 - RNA, 20 nt, Artificial Sequence
  Guide RNA
uacuguagguguuuaauguc

SEQ ID NO: 31919 - RNA, 20 nt, Artificial Sequence
  Guide RNA
uaggugacauuaaacaccua

SEQ ID NO: 31920 - RNA, 20 nt, Artificial Sequence
  Guide RNA
uaggugacauuaagcaccua

SEQ ID NO: 31921 - RNA, 20 nt, Artificial Sequence
  Guide RNA
uaggugcuuaaugucaccua

SEQ ID NO: 31922 - RNA, 20 nt, Artificial Sequence
  Guide RNA
uagguguuuaaugucaccua

SEQ ID NO: 31923 - RNA, 20 nt, Artificial Sequence
  Guide RNA
uauacuguaggugcuuaaug

SEQ ID NO: 31924 - RNA, 20 nt, Artificial Sequence
  Guide RNA
uauacuguagguguuuaaug

SEQ ID NO: 31925 - RNA, 20 nt, Artificial Sequence
  Guide RNA
ugacauuaaacaccuacagu

SEQ ID NO: 31926 - RNA, 20 nt, Artificial Sequence
  Guide RNA
ugacauuaagcaccuacagu

SEQ ID NO: 31927 - RNA, 20 nt, Artificial Sequence
  Guide RNA
ugcuuaaugucaccuauuaa

SEQ ID NO: 31928 - RNA, 20 nt, Artificial Sequence
  Guide RNA
ugguauacuguaggugcuua

SEQ ID NO: 31929 - RNA, 20 nt, Artificial Sequence
  Guide RNA
ugguauacuguagguguuua

SEQ ID NO: 31930 - RNA, 20 nt, Artificial Sequence
  Guide RNA
uguaggugcuuaaugucacc

SEQ ID NO: 31931 - RNA, 20 nt, Artificial Sequence
  Guide RNA
uguagguguuuaaugucacc

SEQ ID NO: 31932 - RNA, 20 nt, Artificial Sequence
  Guide RNA
uuaaacaccuacaguauacc

SEQ ID NO: 31933 - RNA, 20 nt, Artificial Sequence
  Guide RNA
uuaagcaccuacaguauacc

SEQ ID NO: 31934 - RNA, 20 nt, Artificial Sequence
  Guide RNA
uuaauaggugacauuaagca

SEQ ID NO: 31935 - RNA, 21 nt, Artificial Sequence
  Guide RNA
aaacaccuacaguauaccaug

SEQ ID NO: 31936 - RNA, 21 nt, Artificial Sequence
  Guide RNA
aacaccuacaguauaccaugu

SEQ ID NO: 31937 - RNA, 21 nt, Artificial Sequence
  Guide RNA
aagcaccuacaguauaccaug

SEQ ID NO: 31938 - RNA, 21 nt, Artificial Sequence
  Guide RNA
aaguacaugguauacuguagg

SEQ ID NO: 31939 - RNA, 21 nt, Artificial Sequence
  Guide RNA
aauaggugacauuaaacaccu

SEQ ID NO: 31940 - RNA, 21 nt, Artificial Sequence
  Guide RNA
aauaggugacauuaagcaccu

SEQ ID NO: 31941 - RNA, 21 nt, Artificial Sequence
  Guide RNA
acaugguauacuguaggugcu

SEQ ID NO: 31942 - RNA, 21 nt, Artificial Sequence
  Guide RNA
acaugguauacuguagguguu

SEQ ID NO: 31943 - RNA, 21 nt, Artificial Sequence
  Guide RNA
acauuaagcaccuacaguaua

SEQ ID NO: 31944 - RNA, 21 nt, Artificial Sequence
  Guide RNA
accaccauuaauaggugacau

SEQ ID NO: 31945 - RNA, 21 nt, Artificial Sequence
  Guide RNA
acuguaggugcuuaaugucac

SEQ ID NO: 31946 - RNA, 21 nt, Artificial Sequence
  Guide RNA
acuguagguguuuaaugucac

SEQ ID NO: 31947 - RNA, 21 nt, Artificial Sequence
  Guide RNA
agcaccuacaguauaccaugu

SEQ ID NO: 31948 - RNA, 21 nt, Artificial Sequence
  Guide RNA
aggugacauuaaacaccuaca

SEQ ID NO: 31949 - RNA, 21 nt, Artificial Sequence
  Guide RNA
aggugacauuaagcaccuaca

SEQ ID NO: 31950 - RNA, 21 nt, Artificial Sequence
  Guide RNA
aggugcuuaaugucaccuauu

SEQ ID NO: 31951 - RNA, 21 nt, Artificial Sequence
  Guide RNA
agguguuuaaugucaccuauu

SEQ ID NO: 31952 - RNA, 21 nt, Artificial Sequence
  Guide RNA
aguacaugguauacuguaggu

SEQ ID NO: 31953 - RNA, 21 nt, Artificial Sequence
  Guide RNA
auacuguaggugcuuaauguc

SEQ ID NO: 31954 - RNA, 21 nt, Artificial Sequence
  Guide RNA
auacuguagguguuuaauguc

SEQ ID NO: 31955 - RNA, 21 nt, Artificial Sequence
  Guide RNA
auaggugacauuaaacaccua

SEQ ID NO: 31956 - RNA, 21 nt, Artificial Sequence
  Guide RNA
auaggugacauuaagcaccua

SEQ ID NO: 31957 - RNA, 21 nt, Artificial Sequence
  Guide RNA
augguauacuguaggugcuua

SEQ ID NO: 31958 - RNA, 21 nt, Artificial Sequence
  Guide RNA
augguauacuguagguguuua

SEQ ID NO: 31959 - RNA, 21 nt, Artificial Sequence
  Guide RNA
auuaaacaccuacaguauacc

SEQ ID NO: 31960 - RNA, 21 nt, Artificial Sequence
  Guide RNA
auuaagcaccuacaguauacc

SEQ ID NO: 31961 - RNA, 21 nt, Artificial Sequence
  Guide RNA
caccauuaauaggugacauua

SEQ ID NO: 31962 - RNA, 21 nt, Artificial Sequence
  Guide RNA
caugguauacuguaggugcuu

SEQ ID NO: 31963 - RNA, 21 nt, Artificial Sequence
  Guide RNA
caugguauacuguagguguuu

SEQ ID NO: 31964 - RNA, 21 nt, Artificial Sequence
  Guide RNA
cauuaaacaccuacaguauac

SEQ ID NO: 31965 - RNA, 21 nt, Artificial Sequence
  Guide RNA
cauuaagcaccuacaguauac

SEQ ID NO: 31966 - RNA, 21 nt, Artificial Sequence
  Guide RNA
cauuaauaggugacauuaagc

SEQ ID NO: 31967 - RNA, 21 nt, Artificial Sequence
  Guide RNA
ccaccauuaauaggugacauu

SEQ ID NO: 31968 - RNA, 21 nt, Artificial Sequence
  Guide RNA
ccauuaauaggugacauuaag

SEQ ID NO: 31969 - RNA, 21 nt, Artificial Sequence
  Guide RNA
cuguaggugcuuaaugucacc

SEQ ID NO: 31970 - RNA, 21 nt, Artificial Sequence
  Guide RNA
cuguagguguuuaaugucacc

SEQ ID NO: 31971 - RNA, 21 nt, Artificial Sequence
  Guide RNA
gaaguacaugguauacuguag

SEQ ID NO: 31972 - RNA, 21 nt, Artificial Sequence
  Guide RNA
gacauuaaacaccuacaguau

SEQ ID NO: 31973 - RNA, 21 nt, Artificial Sequence
  Guide RNA
gacauuaagcaccuacaguau

SEQ ID NO: 31974 - RNA, 21 nt, Artificial Sequence
  Guide RNA
gcuuaaugucaccuauuaaug

SEQ ID NO: 31975 - RNA, 21 nt, Artificial Sequence
  Guide RNA
gguauacuguaggugcuuaau

SEQ ID NO: 31976 - RNA, 21 nt, Artificial Sequence
  Guide RNA
gguauacuguagguguuuaau

SEQ ID NO: 31977 - RNA, 21 nt, Artificial Sequence
  Guide RNA
ggugacauuaaacaccuacag

SEQ ID NO: 31978 - RNA, 21 nt, Artificial Sequence
  Guide RNA
ggugacauuaagcaccuacag

SEQ ID NO: 31979 - RNA, 21 nt, Artificial Sequence
  Guide RNA
ggugcuuaaugucaccuauua

SEQ ID NO: 31980 - RNA, 21 nt, Artificial Sequence
  Guide RNA
gguguuuaaugucaccuauua

SEQ ID NO: 31981 - RNA, 21 nt, Artificial Sequence
  Guide RNA
guacaugguauacuguaggug

SEQ ID NO: 31982 - RNA, 21 nt, Artificial Sequence
  Guide RNA
guaggugcuuaaugucaccua

SEQ ID NO: 31983 - RNA, 21 nt, Artificial Sequence
  Guide RNA
guagguguuuaaugucaccua

SEQ ID NO: 31984 - RNA, 21 nt, Artificial Sequence
  Guide RNA
guauacuguaggugcuuaaug

SEQ ID NO: 31985 - RNA, 21 nt, Artificial Sequence
  Guide RNA
guauacuguagguguuuaaug

SEQ ID NO: 31986 - RNA, 21 nt, Artificial Sequence
  Guide RNA
gugacauuaaacaccuacagu

SEQ ID NO: 31987 - RNA, 21 nt, Artificial Sequence
  Guide RNA
gugacauuaagcaccuacagu

SEQ ID NO: 31988 - RNA, 21 nt, Artificial Sequence
  Guide RNA
gugcuuaaugucaccuauuaa

SEQ ID NO: 31989 - RNA, 21 nt, Artificial Sequence
  Guide RNA
uaaacaccuacaguauaccau

SEQ ID NO: 31990 - RNA, 21 nt, Artificial Sequence
  Guide RNA
uaagcaccuacaguauaccau

SEQ ID NO: 31991 - RNA, 21 nt, Artificial Sequence
  Guide RNA
uaauaggugacauuaaacacc

SEQ ID NO: 31992 - RNA, 21 nt, Artificial Sequence
  Guide RNA
uaauaggugacauuaagcacc

SEQ ID NO: 31993 - RNA, 21 nt, Artificial Sequence
  Guide RNA
uacaugguauacuguaggugc

SEQ ID NO: 31994 - RNA, 21 nt, Artificial Sequence
  Guide RNA
uacaugguauacuguaggugu

SEQ ID NO: 31995 - RNA, 21 nt, Artificial Sequence
  Guide RNA
uacuguaggugcuuaauguca

SEQ ID NO: 31996 - RNA, 21 nt, Artificial Sequence
  Guide RNA
uacuguagguguuuaauguca

SEQ ID NO: 31997 - RNA, 21 nt, Artificial Sequence
  Guide RNA
uaggugacauuaaacaccuac

SEQ ID NO: 31998 - RNA, 21 nt, Artificial Sequence
  Guide RNA
uaggugacauuaagcaccuac

SEQ ID NO: 31999 - RNA, 21 nt, Artificial Sequence
  Guide RNA
uaggugcuuaaugucaccuau

SEQ ID NO: 32000 - RNA, 21 nt, Artificial Sequence
  Guide RNA
uagguguuuaaugucaccuau

SEQ ID NO: 32001 - RNA, 21 nt, Artificial Sequence
  Guide RNA
uauacuguaggugcuuaaugu

SEQ ID NO: 32002 - RNA, 21 nt, Artificial Sequence
  Guide RNA
ugacauuaaacaccuacagua

SEQ ID NO: 32003 - RNA, 21 nt, Artificial Sequence
  Guide RNA
ugacauuaagcaccuacagua

SEQ ID NO: 32004 - RNA, 21 nt, Artificial Sequence
  Guide RNA
ugguauacuguaggugcuuaa

SEQ ID NO: 32005 - RNA, 21 nt, Artificial Sequence
  Guide RNA
ugguauacuguagguguuuaa

SEQ ID NO: 32006 - RNA, 21 nt, Artificial Sequence
  Guide RNA
uguaggugcuuaaugucaccu

SEQ ID NO: 32007 - RNA, 21 nt, Artificial Sequence
  Guide RNA
uguagguguuuaaugucaccu

SEQ ID NO: 32008 - RNA, 21 nt, Artificial Sequence
  Guide RNA
uuaaacaccuacaguauacca

SEQ ID NO: 32009 - RNA, 21 nt, Artificial Sequence
  Guide RNA
uuaagcaccuacaguauacca

SEQ ID NO: 32010 - RNA, 21 nt, Artificial Sequence
  Guide RNA
uuaauaggugacauuaagcac

SEQ ID NO: 32011 - RNA, 22 nt, Artificial Sequence
  Guide RNA
aaacaccuacaguauaccaugu

SEQ ID NO: 32012 - RNA, 22 nt, Artificial Sequence
  Guide RNA
aacaccuacaguauaccaugua

SEQ ID NO: 32013 - RNA, 22 nt, Artificial Sequence
  Guide RNA
aagcaccuacaguauaccaugu

SEQ ID NO: 32014 - RNA, 22 nt, Artificial Sequence
  Guide RNA
aaguacaugguauacuguaggu

SEQ ID NO: 32015 - RNA, 22 nt, Artificial Sequence
  Guide RNA
aauaggugacauuaaacaccua

SEQ ID NO: 32016 - RNA, 22 nt, Artificial Sequence
  Guide RNA
aauaggugacauuaagcaccua

SEQ ID NO: 32017 - RNA, 22 nt, Artificial Sequence
  Guide RNA
acaugguauacuguaggugcuu

SEQ ID NO: 32018 - RNA, 22 nt, Artificial Sequence
  Guide RNA
acaugguauacuguagguguuu

SEQ ID NO: 32019 - RNA, 22 nt, Artificial Sequence
  Guide RNA
acauuaaacaccuacaguauac

SEQ ID NO: 32020 - RNA, 22 nt, Artificial Sequence
  Guide RNA
acauuaagcaccuacaguauac

SEQ ID NO: 32021 - RNA, 22 nt, Artificial Sequence
  Guide RNA
accaccauuaauaggugacauu

SEQ ID NO: 32022 - RNA, 22 nt, Artificial Sequence
  Guide RNA
accauuaauaggugacauuaag

SEQ ID NO: 32023 - RNA, 22 nt, Artificial Sequence
  Guide RNA
acuguaggugcuuaaugucacc

SEQ ID NO: 32024 - RNA, 22 nt, Artificial Sequence
  Guide RNA
acuguagguguuuaaugucacc

SEQ ID NO: 32025 - RNA, 22 nt, Artificial Sequence
  Guide RNA
agcaccuacaguauaccaugua

SEQ ID NO: 32026 - RNA, 22 nt, Artificial Sequence
  Guide RNA
aggugacauuaaacaccuacag

SEQ ID NO: 32027 - RNA, 22 nt, Artificial Sequence
  Guide RNA
aggugacauuaagcaccuacag

SEQ ID NO: 32028 - RNA, 22 nt, Artificial Sequence
  Guide RNA
aggugcuuaaugucaccuauua

SEQ ID NO: 32029 - RNA, 22 nt, Artificial Sequence
  Guide RNA
agguguuuaaugucaccuauua

SEQ ID NO: 32030 - RNA, 22 nt, Artificial Sequence
  Guide RNA
aguacaugguauacuguaggug

SEQ ID NO: 32031 - RNA, 22 nt, Artificial Sequence
  Guide RNA
auacuguaggugcuuaauguca

SEQ ID NO: 32032 - RNA, 22 nt, Artificial Sequence
  Guide RNA
auacuguagguguuuaauguca

SEQ ID NO: 32033 - RNA, 22 nt, Artificial Sequence
  Guide RNA
auaggugacauuaaacaccuac

SEQ ID NO: 32034 - RNA, 22 nt, Artificial Sequence
  Guide RNA
auaggugacauuaagcaccuac

SEQ ID NO: 32035 - RNA, 22 nt, Artificial Sequence
  Guide RNA
augguauacuguaggugcuuaa

SEQ ID NO: 32036 - RNA, 22 nt, Artificial Sequence
  Guide RNA
augguauacuguagguguuuaa

SEQ ID NO: 32037 - RNA, 22 nt, Artificial Sequence
  Guide RNA
auuaaacaccuacaguauacca

SEQ ID NO: 32038 - RNA, 22 nt, Artificial Sequence
  Guide RNA
auuaagcaccuacaguauacca

SEQ ID NO: 32039 - RNA, 22 nt, Artificial Sequence
  Guide RNA
auuaauaggugacauuaagcac

SEQ ID NO: 32040 - RNA, 22 nt, Artificial Sequence
  Guide RNA
caccaccauuaauaggugacau

SEQ ID NO: 32041 - RNA, 22 nt, Artificial Sequence
  Guide RNA
caccauuaauaggugacauuaa

SEQ ID NO: 32042 - RNA, 22 nt, Artificial Sequence
  Guide RNA
caugguauacuguaggugcuua

SEQ ID NO: 32043 - RNA, 22 nt, Artificial Sequence
  Guide RNA
caugguauacuguagguguuua

SEQ ID NO: 32044 - RNA, 22 nt, Artificial Sequence
  Guide RNA
cauuaaacaccuacaguauacc

SEQ ID NO: 32045 - RNA, 22 nt, Artificial Sequence
  Guide RNA
cauuaagcaccuacaguauacc

SEQ ID NO: 32046 - RNA, 22 nt, Artificial Sequence
  Guide RNA
cauuaauaggugacauuaagca

SEQ ID NO: 32047 - RNA, 22 nt, Artificial Sequence
  Guide RNA
ccaccauuaauaggugacauua

SEQ ID NO: 32048 - RNA, 22 nt, Artificial Sequence
  Guide RNA
ccauuaauaggugacauuaaac

SEQ ID NO: 32049 - RNA, 22 nt, Artificial Sequence
  Guide RNA
ccauuaauaggugacauuaagc

SEQ ID NO: 32050 - RNA, 22 nt, Artificial Sequence
  Guide RNA
cuguaggugcuuaaugucaccu

SEQ ID NO: 32051 - RNA, 22 nt, Artificial Sequence
  Guide RNA
cuguagguguuuaaugucaccu

SEQ ID NO: 32052 - RNA, 22 nt, Artificial Sequence
  Guide RNA
gaaguacaugguauacuguagg

SEQ ID NO: 32053 - RNA, 22 nt, Artificial Sequence
  Guide RNA
gacauuaaacaccuacaguaua

SEQ ID NO: 32054 - RNA, 22 nt, Artificial Sequence
  Guide RNA
gacauuaagcaccuacaguaua

SEQ ID NO: 32055 - RNA, 22 nt, Artificial Sequence
  Guide RNA
gcuuaaugucaccuauuaaugg

SEQ ID NO: 32056 - RNA, 22 nt, Artificial Sequence
  Guide RNA
gguauacuguaggugcuuaaug

SEQ ID NO: 32057 - RNA, 22 nt, Artificial Sequence
  Guide RNA
gguauacuguagguguuuaaug

SEQ ID NO: 32058 - RNA, 22 nt, Artificial Sequence
  Guide RNA
ggugacauuaaacaccuacagu

SEQ ID NO: 32059 - RNA, 22 nt, Artificial Sequence
  Guide RNA
ggugacauuaagcaccuacagu

SEQ ID NO: 32060 - RNA, 22 nt, Artificial Sequence
  Guide RNA
ggugcuuaaugucaccuauuaa

SEQ ID NO: 32061 - RNA, 22 nt, Artificial Sequence
  Guide RNA
gguguuuaaugucaccuauuaa

SEQ ID NO: 32062 - RNA, 22 nt, Artificial Sequence
  Guide RNA
guacaugguauacuguaggugc

SEQ ID NO: 32063 - RNA, 22 nt, Artificial Sequence
  Guide RNA
guacaugguauacuguaggugu

SEQ ID NO: 32064 - RNA, 22 nt, Artificial Sequence
  Guide RNA
guaggugcuuaaugucaccuau

SEQ ID NO: 32065 - RNA, 22 nt, Artificial Sequence
  Guide RNA
guagguguuuaaugucaccuau

SEQ ID NO: 32066 - RNA, 22 nt, Artificial Sequence
  Guide RNA
guauacuguaggugcuuaaugu

SEQ ID NO: 32067 - RNA, 22 nt, Artificial Sequence
  Guide RNA
guauacuguagguguuuaaugu

SEQ ID NO: 32068 - RNA, 22 nt, Artificial Sequence
  Guide RNA
gugacauuaaacaccuacagua

SEQ ID NO: 32069 - RNA, 22 nt, Artificial Sequence
  Guide RNA
gugacauuaagcaccuacagua

SEQ ID NO: 32070 - RNA, 22 nt, Artificial Sequence
  Guide RNA
gugcuuaaugucaccuauuaau

SEQ ID NO: 32071 - RNA, 22 nt, Artificial Sequence
  Guide RNA
guuuaaugucaccuauuaaugg

SEQ ID NO: 32072 - RNA, 22 nt, Artificial Sequence
  Guide RNA
uaaacaccuacaguauaccaug

SEQ ID NO: 32073 - RNA, 22 nt, Artificial Sequence
  Guide RNA
uaagcaccuacaguauaccaug

SEQ ID NO: 32074 - RNA, 22 nt, Artificial Sequence
  Guide RNA
uaauaggugacauuaaacaccu

SEQ ID NO: 32075 - RNA, 22 nt, Artificial Sequence
  Guide RNA
uaauaggugacauuaagcaccu

SEQ ID NO: 32076 - RNA, 22 nt, Artificial Sequence
  Guide RNA
uacaugguauacuguaggugcu

SEQ ID NO: 32077 - RNA, 22 nt, Artificial Sequence
  Guide RNA
uacaugguauacuguagguguu

SEQ ID NO: 32078 - RNA, 22 nt, Artificial Sequence
  Guide RNA
uacuguaggugcuuaaugucac

SEQ ID NO: 32079 - RNA, 22 nt, Artificial Sequence
  Guide RNA
uacuguagguguuuaaugucac

SEQ ID NO: 32080 - RNA, 22 nt, Artificial Sequence
  Guide RNA
uaggugacauuaaacaccuaca

SEQ ID NO: 32081 - RNA, 22 nt, Artificial Sequence
  Guide RNA
uaggugacauuaagcaccuaca

SEQ ID NO: 32082 - RNA, 22 nt, Artificial Sequence
  Guide RNA
uaggugcuuaaugucaccuauu

SEQ ID NO: 32083 - RNA, 22 nt, Artificial Sequence
  Guide RNA
uagguguuuaaugucaccuauu

SEQ ID NO: 32084 - RNA, 22 nt, Artificial Sequence
  Guide RNA
uauacuguaggugcuuaauguc

SEQ ID NO: 32085 - RNA, 22 nt, Artificial Sequence
  Guide RNA
uauacuguagguguuuaauguc

SEQ ID NO: 32086 - RNA, 22 nt, Artificial Sequence
  Guide RNA
ugaaguacaugguauacuguag

SEQ ID NO: 32087 - RNA, 22 nt, Artificial Sequence
  Guide RNA
ugacauuaaacaccuacaguau

SEQ ID NO: 32088 - RNA, 22 nt, Artificial Sequence
  Guide RNA
ugacauuaagcaccuacaguau

SEQ ID NO: 32089 - RNA, 22 nt, Artificial Sequence
  Guide RNA
ugcuuaaugucaccuauuaaug

SEQ ID NO: 32090 - RNA, 22 nt, Artificial Sequence
  Guide RNA
ugguauacuguaggugcuuaau

SEQ ID NO: 32091 - RNA, 22 nt, Artificial Sequence
  Guide RNA
ugguauacuguagguguuuaau

SEQ ID NO: 32092 - RNA, 22 nt, Artificial Sequence
  Guide RNA
uguaggugcuuaaugucaccua

SEQ ID NO: 32093 - RNA, 22 nt, Artificial Sequence
  Guide RNA
uguagguguuuaaugucaccua

SEQ ID NO: 32094 - RNA, 22 nt, Artificial Sequence
  Guide RNA
uuaaacaccuacaguauaccau

SEQ ID NO: 32095 - RNA, 22 nt, Artificial Sequence
  Guide RNA
uuaagcaccuacaguauaccau

SEQ ID NO: 32096 - RNA, 22 nt, Artificial Sequence
  Guide RNA
uuaauaggugacauuaaacacc

SEQ ID NO: 32097 - RNA, 22 nt, Artificial Sequence
  Guide RNA
uuaauaggugacauuaagcacc

SEQ ID NO: 32098 - RNA, 20 nt, Artificial Sequence
  Guide RNA
acagacggcccguccucgcc

SEQ ID NO: 32099 - RNA, 20 nt, Artificial Sequence
  Guide RNA
acagacgggccguccucgcc

SEQ ID NO: 32100 - RNA, 20 nt, Artificial Sequence
  Guide RNA
acggcccgucugugcugacc

SEQ ID NO: 32101 - RNA, 20 nt, Artificial Sequence
  Guide RNA
acgggccgucugugcugacc

SEQ ID NO: 32102 - RNA, 20 nt, Artificial Sequence
  Guide RNA
agacggcccguccucgcccg

SEQ ID NO: 32103 - RNA, 20 nt, Artificial Sequence
  Guide RNA
agacgggccguccucgcccg

SEQ ID NO: 32104 - RNA, 20 nt, Artificial Sequence
  Guide RNA
agcacagacggcccguccuc

SEQ ID NO: 32105 - RNA, 20 nt, Artificial Sequence
  Guide RNA
agcacagacgggccguccuc

SEQ ID NO: 32106 - RNA, 20 nt, Artificial Sequence
  Guide RNA
aggacggcccgucugugcug

SEQ ID NO: 32107 - RNA, 20 nt, Artificial Sequence
  Guide RNA
aggacgggccgucugugcug

SEQ ID NO: 32108 - RNA, 20 nt, Artificial Sequence
  Guide RNA
aguuggacgccgggcgagga

SEQ ID NO: 32109 - RNA, 20 nt, Artificial Sequence
  Guide RNA
auucgcgggucagcacagac

SEQ ID NO: 32110 - RNA, 20 nt, Artificial Sequence
  Guide RNA
cacagacggcccguccucgc

SEQ ID NO: 32111 - RNA, 20 nt, Artificial Sequence
  Guide RNA
cacagacgggccguccucgc

SEQ ID NO: 32112 - RNA, 20 nt, Artificial Sequence
  Guide RNA
cagacggcccguccucgccc

SEQ ID NO: 32113 - RNA, 20 nt, Artificial Sequence
  Guide RNA
cagacgggccguccucgccc

SEQ ID NO: 32114 - RNA, 20 nt, Artificial Sequence
  Guide RNA
cagcacagacggcccguccu

SEQ ID NO: 32115 - RNA, 20 nt, Artificial Sequence
  Guide RNA
cagcacagacgggccguccu

SEQ ID NO: 32116 - RNA, 20 nt, Artificial Sequence
  Guide RNA
cgaggacggcccgucugugc

SEQ ID NO: 32117 - RNA, 20 nt, Artificial Sequence
  Guide RNA
cgaggacgggccgucugugc

SEQ ID NO: 32118 - RNA, 20 nt, Artificial Sequence
  Guide RNA
cgcgggucagcacagacggc

SEQ ID NO: 32119 - RNA, 20 nt, Artificial Sequence
  Guide RNA
cgcgggucagcacagacggg

SEQ ID NO: 32120 - RNA, 20 nt, Artificial Sequence
  Guide RNA
cggcccgucugugcugaccc

SEQ ID NO: 32121 - RNA, 20 nt, Artificial Sequence
  Guide RNA
cgggccgucugugcugaccc

SEQ ID NO: 32122 - RNA, 20 nt, Artificial Sequence
  Guide RNA
cgggcgaggacggcccgucu

SEQ ID NO: 32123 - RNA, 20 nt, Artificial Sequence
  Guide RNA
cgggcgaggacgggccgucu

SEQ ID NO: 32124 - RNA, 20 nt, Artificial Sequence
  Guide RNA
cgggucagcacagacggccc

SEQ ID NO: 32125 - RNA, 20 nt, Artificial Sequence
  Guide RNA
cgggucagcacagacgggcc

SEQ ID NO: 32126 - RNA, 20 nt, Artificial Sequence
  Guide RNA
gacggcccgucugugcugac

SEQ ID NO: 32127 - RNA, 20 nt, Artificial Sequence
  Guide RNA
gacgggccgucugugcugac

SEQ ID NO: 32128 - RNA, 20 nt, Artificial Sequence
  Guide RNA
gaggacggcccgucugugcu

SEQ ID NO: 32129 - RNA, 20 nt, Artificial Sequence
  Guide RNA
gaggacgggccgucugugcu

SEQ ID NO: 32130 - RNA, 20 nt, Artificial Sequence
  Guide RNA
gcacagacggcccguccucg

SEQ ID NO: 32131 - RNA, 20 nt, Artificial Sequence
  Guide RNA
gcacagacgggccguccucg

SEQ ID NO: 32132 - RNA, 20 nt, Artificial Sequence
  Guide RNA
gcccgucugugcugacccgc

SEQ ID NO: 32133 - RNA, 20 nt, Artificial Sequence
  Guide RNA
gcgaggacggcccgucugug

SEQ ID NO: 32134 - RNA, 20 nt, Artificial Sequence
  Guide RNA
gcgaggacgggccgucugug

SEQ ID NO: 32135 - RNA, 20 nt, Artificial Sequence
  Guide RNA
gcgggucagcacagacggcc

SEQ ID NO: 32136 - RNA, 20 nt, Artificial Sequence
  Guide RNA
gcgggucagcacagacgggc

SEQ ID NO: 32137 - RNA, 20 nt, Artificial Sequence
  Guide RNA
ggacggcccgucugugcuga

SEQ ID NO: 32138 - RNA, 20 nt, Artificial Sequence
  Guide RNA
ggacgggccgucugugcuga

SEQ ID NO: 32139 - RNA, 20 nt, Artificial Sequence
  Guide RNA
ggcccgucugugcugacccg

SEQ ID NO: 32140 - RNA, 20 nt, Artificial Sequence
  Guide RNA
ggccgucugugcugacccgc

SEQ ID NO: 32141 - RNA, 20 nt, Artificial Sequence
  Guide RNA
ggcgaggacggcccgucugu

SEQ ID NO: 32142 - RNA, 20 nt, Artificial Sequence
  Guide RNA
ggcgaggacgggccgucugu

SEQ ID NO: 32143 - RNA, 20 nt, Artificial Sequence
  Guide RNA
gggccgucugugcugacccg

SEQ ID NO: 32144 - RNA, 20 nt, Artificial Sequence
  Guide RNA
gggcgaggacggcccgucug

SEQ ID NO: 32145 - RNA, 20 nt, Artificial Sequence
  Guide RNA
gggcgaggacgggccgucug

SEQ ID NO: 32146 - RNA, 20 nt, Artificial Sequence
  Guide RNA
gggucagcacagacggcccg

SEQ ID NO: 32147 - RNA, 20 nt, Artificial Sequence
  Guide RNA
gggucagcacagacgggccg

SEQ ID NO: 32148 - RNA, 20 nt, Artificial Sequence
  Guide RNA
ggucagcacagacggcccgu

SEQ ID NO: 32149 - RNA, 20 nt, Artificial Sequence
  Guide RNA
ggucagcacagacgggccgu

SEQ ID NO: 32150 - RNA, 20 nt, Artificial Sequence
  Guide RNA
gucagcacagacggcccguc

SEQ ID NO: 32151 - RNA, 20 nt, Artificial Sequence
  Guide RNA
gucagcacagacgggccguc

SEQ ID NO: 32152 - RNA, 20 nt, Artificial Sequence
  Guide RNA
guuggacgccgggcgaggac

SEQ ID NO: 32153 - RNA, 20 nt, Artificial Sequence
  Guide RNA
uauucgcgggucagcacaga

SEQ ID NO: 32154 - RNA, 20 nt, Artificial Sequence
  Guide RNA
ucagcacagacggcccgucc

SEQ ID NO: 32155 - RNA, 20 nt, Artificial Sequence
  Guide RNA
ucagcacagacgggccgucc

SEQ ID NO: 32156 - RNA, 20 nt, Artificial Sequence
  Guide RNA
ucgcgggucagcacagacgg

SEQ ID NO: 32157 - RNA, 20 nt, Artificial Sequence
  Guide RNA
uggacgccgggcgaggacgg

SEQ ID NO: 32158 - RNA, 20 nt, Artificial Sequence
  Guide RNA
uucgcgggucagcacagacg

SEQ ID NO: 32159 - RNA, 20 nt, Artificial Sequence
  Guide RNA
uuggacgccgggcgaggacg

SEQ ID NO: 32160 - RNA, 21 nt, Artificial Sequence
  Guide RNA
acagacggcccguccucgccc

SEQ ID NO: 32161 - RNA, 21 nt, Artificial Sequence
  Guide RNA
acagacgggccguccucgccc

SEQ ID NO: 32162 - RNA, 21 nt, Artificial Sequence
  Guide RNA
acggcccgucugugcugaccc

SEQ ID NO: 32163 - RNA, 21 nt, Artificial Sequence
  Guide RNA
acgggccgucugugcugaccc

SEQ ID NO: 32164 - RNA, 21 nt, Artificial Sequence
  Guide RNA
agcacagacggcccguccucg

SEQ ID NO: 32165 - RNA, 21 nt, Artificial Sequence
  Guide RNA
agcacagacgggccguccucg

SEQ ID NO: 32166 - RNA, 21 nt, Artificial Sequence
  Guide RNA
aggacggcccgucugugcuga

SEQ ID NO: 32167 - RNA, 21 nt, Artificial Sequence
  Guide RNA
aggacgggccgucugugcuga

SEQ ID NO: 32168 - RNA, 21 nt, Artificial Sequence
  Guide RNA
aguuggacgccgggcgaggac

SEQ ID NO: 32169 - RNA, 21 nt, Artificial Sequence
  Guide RNA
auucgcgggucagcacagacg

SEQ ID NO: 32170 - RNA, 21 nt, Artificial Sequence
  Guide RNA
cacagacggcccguccucgcc

SEQ ID NO: 32171 - RNA, 21 nt, Artificial Sequence
  Guide RNA
cacagacgggccguccucgcc

SEQ ID NO: 32172 - RNA, 21 nt, Artificial Sequence
  Guide RNA
cagcacagacggcccguccuc

SEQ ID NO: 32173 - RNA, 21 nt, Artificial Sequence
  Guide RNA
cagcacagacgggccguccuc

SEQ ID NO: 32174 - RNA, 21 nt, Artificial Sequence
  Guide RNA
caguuggacgccgggcgagga

SEQ ID NO: 32175 - RNA, 21 nt, Artificial Sequence
  Guide RNA
cgaggacggcccgucugugcu

SEQ ID NO: 32176 - RNA, 21 nt, Artificial Sequence
  Guide RNA
cgaggacgggccgucugugcu

SEQ ID NO: 32177 - RNA, 21 nt, Artificial Sequence
  Guide RNA
cgcgggucagcacagacggcc

SEQ ID NO: 32178 - RNA, 21 nt, Artificial Sequence
  Guide RNA
cgcgggucagcacagacgggc

SEQ ID NO: 32179 - RNA, 21 nt, Artificial Sequence
  Guide RNA
cggcccgucugugcugacccg

SEQ ID NO: 32180 - RNA, 21 nt, Artificial Sequence
  Guide RNA
cgggccgucugugcugacccg

SEQ ID NO: 32181 - RNA, 21 nt, Artificial Sequence
  Guide RNA
cgggucagcacagacggcccg

SEQ ID NO: 32182 - RNA, 21 nt, Artificial Sequence
  Guide RNA
cgggucagcacagacgggccg

SEQ ID NO: 32183 - RNA, 21 nt, Artificial Sequence
  Guide RNA
cuauucgcgggucagcacaga

SEQ ID NO: 32184 - RNA, 21 nt, Artificial Sequence
  Guide RNA
gacggcccgucugugcugacc

SEQ ID NO: 32185 - RNA, 21 nt, Artificial Sequence
  Guide RNA
gacgggccgucugugcugacc

SEQ ID NO: 32186 - RNA, 21 nt, Artificial Sequence
  Guide RNA
gaggacggcccgucugugcug

SEQ ID NO: 32187 - RNA, 21 nt, Artificial Sequence
  Guide RNA
gaggacgggccgucugugcug

SEQ ID NO: 32188 - RNA, 21 nt, Artificial Sequence
  Guide RNA
gcacagacggcccguccucgc

SEQ ID NO: 32189 - RNA, 21 nt, Artificial Sequence
  Guide RNA
gcacagacgggccguccucgc

SEQ ID NO: 32190 - RNA, 21 nt, Artificial Sequence
  Guide RNA
gcccgucugugcugacccgcg

SEQ ID NO: 32191 - RNA, 21 nt, Artificial Sequence
  Guide RNA
gcgaggacggcccgucugugc

SEQ ID NO: 32192 - RNA, 21 nt, Artificial Sequence
  Guide RNA
gcgaggacgggccgucugugc

SEQ ID NO: 32193 - RNA, 21 nt, Artificial Sequence
  Guide RNA
gcgggucagcacagacggccc

SEQ ID NO: 32194 - RNA, 21 nt, Artificial Sequence
  Guide RNA
gcgggucagcacagacgggcc

SEQ ID NO: 32195 - RNA, 21 nt, Artificial Sequence
  Guide RNA
ggacggcccgucugugcugac

SEQ ID NO: 32196 - RNA, 21 nt, Artificial Sequence
  Guide RNA
ggacgggccgucugugcugac

SEQ ID NO: 32197 - RNA, 21 nt, Artificial Sequence
  Guide RNA
ggcccgucugugcugacccgc

SEQ ID NO: 32198 - RNA, 21 nt, Artificial Sequence
  Guide RNA
ggccgucugugcugacccgcg

SEQ ID NO: 32199 - RNA, 21 nt, Artificial Sequence
  Guide RNA
ggcgaggacggcccgucugug

SEQ ID NO: 32200 - RNA, 21 nt, Artificial Sequence
  Guide RNA
ggcgaggacgggccgucugug

SEQ ID NO: 32201 - RNA, 21 nt, Artificial Sequence
  Guide RNA
gggccgucugugcugacccgc

SEQ ID NO: 32202 - RNA, 21 nt, Artificial Sequence
  Guide RNA
gggcgaggacggcccgucugu

SEQ ID NO: 32203 - RNA, 21 nt, Artificial Sequence
  Guide RNA
gggcgaggacgggccgucugu

SEQ ID NO: 32204 - RNA, 21 nt, Artificial Sequence
  Guide RNA
gggucagcacagacggcccgu

SEQ ID NO: 32205 - RNA, 21 nt, Artificial Sequence
  Guide RNA
gggucagcacagacgggccgu

SEQ ID NO: 32206 - RNA, 21 nt, Artificial Sequence
  Guide RNA
ggucagcacagacggcccguc

SEQ ID NO: 32207 - RNA, 21 nt, Artificial Sequence
  Guide RNA
ggucagcacagacgggccguc

SEQ ID NO: 32208 - RNA, 21 nt, Artificial Sequence
  Guide RNA
gucagcacagacggcccgucc

SEQ ID NO: 32209 - RNA, 21 nt, Artificial Sequence
  Guide RNA
gucagcacagacgggccgucc

SEQ ID NO: 32210 - RNA, 21 nt, Artificial Sequence
  Guide RNA
guuggacgccgggcgaggacg

SEQ ID NO: 32211 - RNA, 21 nt, Artificial Sequence
  Guide RNA
uauucgcgggucagcacagac

SEQ ID NO: 32212 - RNA, 21 nt, Artificial Sequence
  Guide RNA
ucagcacagacggcccguccu

SEQ ID NO: 32213 - RNA, 21 nt, Artificial Sequence
  Guide RNA
ucagcacagacgggccguccu

SEQ ID NO: 32214 - RNA, 21 nt, Artificial Sequence
  Guide RNA
ucgcgggucagcacagacggc

SEQ ID NO: 32215 - RNA, 21 nt, Artificial Sequence
  Guide RNA
ucgcgggucagcacagacggg

SEQ ID NO: 32216 - RNA, 21 nt, Artificial Sequence
  Guide RNA
uucgcgggucagcacagacgg

SEQ ID NO: 32217 - RNA, 21 nt, Artificial Sequence
  Guide RNA
uuggacgccgggcgaggacgg

SEQ ID NO: 32218 - RNA, 22 nt, Artificial Sequence
  Guide RNA
acagacggcccguccucgcccg

SEQ ID NO: 32219 - RNA, 22 nt, Artificial Sequence
  Guide RNA
acagacgggccguccucgcccg

SEQ ID NO: 32220 - RNA, 22 nt, Artificial Sequence
  Guide RNA
acggcccgucugugcugacccg

SEQ ID NO: 32221 - RNA, 22 nt, Artificial Sequence
  Guide RNA
acgggccgucugugcugacccg

SEQ ID NO: 32222 - RNA, 22 nt, Artificial Sequence
  Guide RNA
acuauucgcgggucagcacaga

SEQ ID NO: 32223 - RNA, 22 nt, Artificial Sequence
  Guide RNA
agcacagacggcccguccucgc

SEQ ID NO: 32224 - RNA, 22 nt, Artificial Sequence
  Guide RNA
agcacagacgggccguccucgc

SEQ ID NO: 32225 - RNA, 22 nt, Artificial Sequence
  Guide RNA
aggacggcccgucugugcugac

SEQ ID NO: 32226 - RNA, 22 nt, Artificial Sequence
  Guide RNA
aggacgggccgucugugcugac

SEQ ID NO: 32227 - RNA, 22 nt, Artificial Sequence
  Guide RNA
aguuggacgccgggcgaggacg

SEQ ID NO: 32228 - RNA, 22 nt, Artificial Sequence
  Guide RNA
auucgcgggucagcacagacgg

SEQ ID NO: 32229 - RNA, 22 nt, Artificial Sequence
  Guide RNA
cacagacggcccguccucgccc

SEQ ID NO: 32230 - RNA, 22 nt, Artificial Sequence
  Guide RNA
cacagacgggccguccucgccc

SEQ ID NO: 32231 - RNA, 22 nt, Artificial Sequence
  Guide RNA
cagcacagacggcccguccucg

SEQ ID NO: 32232 - RNA, 22 nt, Artificial Sequence
  Guide RNA
cagcacagacgggccguccucg

SEQ ID NO: 32233 - RNA, 22 nt, Artificial Sequence
  Guide RNA
caguuggacgccgggcgaggac

SEQ ID NO: 32234 - RNA, 22 nt, Artificial Sequence
  Guide RNA
cgaggacggcccgucugugcug

SEQ ID NO: 32235 - RNA, 22 nt, Artificial Sequence
  Guide RNA
cgaggacgggccgucugugcug

SEQ ID NO: 32236 - RNA, 22 nt, Artificial Sequence
  Guide RNA
cgcgggucagcacagacggccc

SEQ ID NO: 32237 - RNA, 22 nt, Artificial Sequence
  Guide RNA
cgcgggucagcacagacgggcc

SEQ ID NO: 32238 - RNA, 22 nt, Artificial Sequence
  Guide RNA
cggcccgucugugcugacccgc

SEQ ID NO: 32239 - RNA, 22 nt, Artificial Sequence
  Guide RNA
cgggccgucugugcugacccgc

SEQ ID NO: 32240 - RNA, 22 nt, Artificial Sequence
  Guide RNA
cgggcgaggacggcccgucugu

SEQ ID NO: 32241 - RNA, 22 nt, Artificial Sequence
  Guide RNA
cgggcgaggacgggccgucugu

SEQ ID NO: 32242 - RNA, 22 nt, Artificial Sequence
  Guide RNA
cgggucagcacagacggcccgu

SEQ ID NO: 32243 - RNA, 22 nt, Artificial Sequence
  Guide RNA
cgggucagcacagacgggccgu

SEQ ID NO: 32244 - RNA, 22 nt, Artificial Sequence
  Guide RNA
cuauucgcgggucagcacagac

SEQ ID NO: 32245 - RNA, 22 nt, Artificial Sequence
  Guide RNA
gacggcccgucugugcugaccc

SEQ ID NO: 32246 - RNA, 22 nt, Artificial Sequence
  Guide RNA
gacgggccgucugugcugaccc

SEQ ID NO: 32247 - RNA, 22 nt, Artificial Sequence
  Guide RNA
gaggacggcccgucugugcuga

SEQ ID NO: 32248 - RNA, 22 nt, Artificial Sequence
  Guide RNA
gaggacgggccgucugugcuga

SEQ ID NO: 32249 - RNA, 22 nt, Artificial Sequence
  Guide RNA
gcacagacggcccguccucgcc

SEQ ID NO: 32250 - RNA, 22 nt, Artificial Sequence
  Guide RNA
gcacagacgggccguccucgcc

SEQ ID NO: 32251 - RNA, 22 nt, Artificial Sequence
  Guide RNA
gcaguuggacgccgggcgagga

SEQ ID NO: 32252 - RNA, 22 nt, Artificial Sequence
  Guide RNA
gcccgucugugcugacccgcga

SEQ ID NO: 32253 - RNA, 22 nt, Artificial Sequence
  Guide RNA
gcgaggacggcccgucugugcu

SEQ ID NO: 32254 - RNA, 22 nt, Artificial Sequence
  Guide RNA
gcgaggacgggccgucugugcu

SEQ ID NO: 32255 - RNA, 22 nt, Artificial Sequence
  Guide RNA
gcgggucagcacagacggcccg

SEQ ID NO: 32256 - RNA, 22 nt, Artificial Sequence
  Guide RNA
gcgggucagcacagacgggccg

SEQ ID NO: 32257 - RNA, 22 nt, Artificial Sequence
  Guide RNA
ggacggcccgucugugcugacc

SEQ ID NO: 32258 - RNA, 22 nt, Artificial Sequence
  Guide RNA
ggacgggccgucugugcugacc

SEQ ID NO: 32259 - RNA, 22 nt, Artificial Sequence
  Guide RNA
ggcccgucugugcugacccgcg

SEQ ID NO: 32260 - RNA, 22 nt, Artificial Sequence
  Guide RNA
ggccgucugugcugacccgcga

SEQ ID NO: 32261 - RNA, 22 nt, Artificial Sequence
  Guide RNA
ggcgaggacggcccgucugugc

SEQ ID NO: 32262 - RNA, 22 nt, Artificial Sequence
  Guide RNA
ggcgaggacgggccgucugugc

SEQ ID NO: 32263 - RNA, 22 nt, Artificial Sequence
  Guide RNA
gggccgucugugcugacccgcg

SEQ ID NO: 32264 - RNA, 22 nt, Artificial Sequence
  Guide RNA
gggcgaggacggcccgucugug

SEQ ID NO: 32265 - RNA, 22 nt, Artificial Sequence
  Guide RNA
gggcgaggacgggccgucugug

SEQ ID NO: 32266 - RNA, 22 nt, Artificial Sequence
  Guide RNA
gggucagcacagacggcccguc

SEQ ID NO: 32267 - RNA, 22 nt, Artificial Sequence
  Guide RNA
gggucagcacagacgggccguc

SEQ ID NO: 32268 - RNA, 22 nt, Artificial Sequence
  Guide RNA
ggucagcacagacggcccgucc

SEQ ID NO: 32269 - RNA, 22 nt, Artificial Sequence
  Guide RNA
ggucagcacagacgggccgucc

SEQ ID NO: 32270 - RNA, 22 nt, Artificial Sequence
  Guide RNA
gucagcacagacggcccguccu

SEQ ID NO: 32271 - RNA, 22 nt, Artificial Sequence
  Guide RNA
gucagcacagacgggccguccu

SEQ ID NO: 32272 - RNA, 22 nt, Artificial Sequence
  Guide RNA
guuggacgccgggcgaggacgg

SEQ ID NO: 32273 - RNA, 22 nt, Artificial Sequence
  Guide RNA
uauucgcgggucagcacagacg

SEQ ID NO: 32274 - RNA, 22 nt, Artificial Sequence
  Guide RNA
ucagcacagacggcccguccuc

SEQ ID NO: 32275 - RNA, 22 nt, Artificial Sequence
  Guide RNA
ucagcacagacgggccguccuc

SEQ ID NO: 32276 - RNA, 22 nt, Artificial Sequence
  Guide RNA
ucgcgggucagcacagacggcc

SEQ ID NO: 32277 - RNA, 22 nt, Artificial Sequence
  Guide RNA
ucgcgggucagcacagacgggc

SEQ ID NO: 32278 - RNA, 22 nt, Artificial Sequence
  Guide RNA
uucgcgggucagcacagacggc

SEQ ID NO: 32279 - RNA, 22 nt, Artificial Sequence
  Guide RNA
uucgcgggucagcacagacggg

SEQ ID NO: 32280 - RNA, 22 nt, Artificial Sequence
  Guide RNA
uuggacgccgggcgaggacggc

SEQ ID NO: 32281 - RNA, 22 nt, Artificial Sequence
  Guide RNA
uuggacgccgggcgaggacggg

SEQ ID NO: 32282 - RNA, 20 nt, Artificial Sequence
  Guide RNA
acugucuauguuuucuuucc

SEQ ID NO: 32283 - RNA, 20 nt, Artificial Sequence
  Guide RNA
augaaggaaagaaaacauag

SEQ ID NO: 32284 - RNA, 20 nt, Artificial Sequence
  Guide RNA
cuauguuuucuuuccuucau

SEQ ID NO: 32285 - RNA, 20 nt, Artificial Sequence
  Guide RNA
cugucuauguuuucuuuccu

SEQ ID NO: 32286 - RNA, 20 nt, Artificial Sequence
  Guide RNA
gaaaaugaaggaaagaaaac

SEQ ID NO: 32287 - RNA, 20 nt, Artificial Sequence
  Guide RNA
gucuauguuuucuuuccuuc

SEQ ID NO: 32288 - RNA, 20 nt, Artificial Sequence
  Guide RNA
gucuauguuuucuuuccuuu

SEQ ID NO: 32289 - RNA, 20 nt, Artificial Sequence
  Guide RNA
guuuucuuuccuucauuuuc

SEQ ID NO: 32290 - RNA, 20 nt, Artificial Sequence
  Guide RNA
uacugucuauguuuucuuuc

SEQ ID NO: 32291 - RNA, 20 nt, Artificial Sequence
  Guide RNA
ucuauguuuucuuuccuuca

SEQ ID NO: 32292 - RNA, 20 nt, Artificial Sequence
  Guide RNA
ugaaggaaagaaaacauaga

SEQ ID NO: 32293 - RNA, 20 nt, Artificial Sequence
  Guide RNA
ugucuauguuuucuuuccuu

SEQ ID NO: 32294 - RNA, 21 nt, Artificial Sequence
  Guide RNA
acugucuauguuuucuuuccu

SEQ ID NO: 32295 - RNA, 21 nt, Artificial Sequence
  Guide RNA
cugucuauguuuucuuuccuu

SEQ ID NO: 32296 - RNA, 21 nt, Artificial Sequence
  Guide RNA
gucuauguuuucuuuccuuca

SEQ ID NO: 32297 - RNA, 21 nt, Artificial Sequence
  Guide RNA
uacugucuauguuuucuuucc

SEQ ID NO: 32298 - RNA, 21 nt, Artificial Sequence
  Guide RNA
ugaaggaaagaaaacauagac

SEQ ID NO: 32299 - RNA, 21 nt, Artificial Sequence
  Guide RNA
ugucuauguuuucuuuccuuc

SEQ ID NO: 32300 - RNA, 22 nt, Artificial Sequence
  Guide RNA
acugucuauguuuucuuuccuu

SEQ ID NO: 32301 - RNA, 22 nt, Artificial Sequence
  Guide RNA
auacugucuauguuuucuuucc

SEQ ID NO: 32302 - RNA, 22 nt, Artificial Sequence
  Guide RNA
augaaggaaagaaaacauagac

SEQ ID NO: 32303 - RNA, 22 nt, Artificial Sequence
  Guide RNA
cugucuauguuuucuuuccuuc

SEQ ID NO: 32304 - RNA, 22 nt, Artificial Sequence
  Guide RNA
cugucuauguuuucuuuccuuu

SEQ ID NO: 32305 - RNA, 22 nt, Artificial Sequence
  Guide RNA
gucuauguuuucuuuccuucau

SEQ ID NO: 32306 - RNA, 22 nt, Artificial Sequence
  Guide RNA
uacugucuauguuuucuuuccu

SEQ ID NO: 32307 - RNA, 22 nt, Artificial Sequence
  Guide RNA
ugaaggaaagaaaacauagaca

SEQ ID NO: 32308 - RNA, 22 nt, Artificial Sequence
  Guide RNA
ugucuauguuuucuuuccuuca

SEQ ID NO: 32309 - RNA, 20 nt, Artificial Sequence
  Guide RNA
aaacggcagccacccgcgcc

SEQ ID NO: 32310 - RNA, 20 nt, Artificial Sequence
  Guide RNA
aaauggcagccacccgcgcc

SEQ ID NO: 32311 - RNA, 20 nt, Artificial Sequence
  Guide RNA
aacggcagccacccgcgccu

SEQ ID NO: 32312 - RNA, 20 nt, Artificial Sequence
  Guide RNA
aaggugaaacggcagccacc

SEQ ID NO: 32313 - RNA, 20 nt, Artificial Sequence
  Guide RNA
aaggugaaauggcagccacc

SEQ ID NO: 32314 - RNA, 20 nt, Artificial Sequence
  Guide RNA
aauggcagccacccgcgccu

SEQ ID NO: 32315 - RNA, 20 nt, Artificial Sequence
  Guide RNA
acggcagccacccgcgccuc

SEQ ID NO: 32316 - RNA, 20 nt, Artificial Sequence
  Guide RNA
aggcgcggguggcugccauu

SEQ ID NO: 32317 - RNA, 20 nt, Artificial Sequence
  Guide RNA
aggcgcggguggcugccguu

SEQ ID NO: 32318 - RNA, 20 nt, Artificial Sequence
  Guide RNA
aggcggaggcgcggguggcu

SEQ ID NO: 32319 - RNA, 20 nt, Artificial Sequence
  Guide RNA
aggugaaacggcagccaccc

SEQ ID NO: 32320 - RNA, 20 nt, Artificial Sequence
  Guide RNA
aggugaaauggcagccaccc

SEQ ID NO: 32321 - RNA, 20 nt, Artificial Sequence
  Guide RNA
auggcagccacccgcgccuc

SEQ ID NO: 32322 - RNA, 20 nt, Artificial Sequence
  Guide RNA
cauuucaccuuagagggagg

SEQ ID NO: 32323 - RNA, 20 nt, Artificial Sequence
  Guide RNA
ccauuucaccuuagagggag

SEQ ID NO: 32324 - RNA, 20 nt, Artificial Sequence
  Guide RNA
cccucccucccucuaaggug

SEQ ID NO: 32325 - RNA, 20 nt, Artificial Sequence
  Guide RNA
cccucccucuaaggugaaac

SEQ ID NO: 32326 - RNA, 20 nt, Artificial Sequence
  Guide RNA
cccucccucuaaggugaaau

SEQ ID NO: 32327 - RNA, 20 nt, Artificial Sequence
  Guide RNA
cccucuaaggugaaacggca

SEQ ID NO: 32328 - RNA, 20 nt, Artificial Sequence
  Guide RNA
cccucuaaggugaaauggca

SEQ ID NO: 32329 - RNA, 20 nt, Artificial Sequence
  Guide RNA
ccguuucaccuuagagggag

SEQ ID NO: 32330 - RNA, 20 nt, Artificial Sequence
  Guide RNA
ccucccucccucuaagguga

SEQ ID NO: 32331 - RNA, 20 nt, Artificial Sequence
  Guide RNA
ccucccucuaaggugaaacg

SEQ ID NO: 32332 - RNA, 20 nt, Artificial Sequence
  Guide RNA
ccucccucuaaggugaaaug

SEQ ID NO: 32333 - RNA, 20 nt, Artificial Sequence
  Guide RNA
ccucuaaggugaaacggcag

SEQ ID NO: 32334 - RNA, 20 nt, Artificial Sequence
  Guide RNA
ccucuaaggugaaauggcag

SEQ ID NO: 32335 - RNA, 20 nt, Artificial Sequence
  Guide RNA
cgcggguggcugccauuuca

SEQ ID NO: 32336 - RNA, 20 nt, Artificial Sequence
  Guide RNA
cgcggguggcugccguuuca

SEQ ID NO: 32337 - RNA, 20 nt, Artificial Sequence
  Guide RNA
cggguggcugccauuucacc

SEQ ID NO: 32338 - RNA, 20 nt, Artificial Sequence
  Guide RNA
cggguggcugccguuucacc

SEQ ID NO: 32339 - RNA, 20 nt, Artificial Sequence
  Guide RNA
cguuucaccuuagagggagg

SEQ ID NO: 32340 - RNA, 20 nt, Artificial Sequence
  Guide RNA
cuaaggugaaacggcagcca

SEQ ID NO: 32341 - RNA, 20 nt, Artificial Sequence
  Guide RNA
cuaaggugaaauggcagcca

SEQ ID NO: 32342 - RNA, 20 nt, Artificial Sequence
  Guide RNA
cucccucccucuaaggugaa

SEQ ID NO: 32343 - RNA, 20 nt, Artificial Sequence
  Guide RNA
cucccucuaaggugaaacgg

SEQ ID NO: 32344 - RNA, 20 nt, Artificial Sequence
  Guide RNA
cucccucuaaggugaaaugg

SEQ ID NO: 32345 - RNA, 20 nt, Artificial Sequence
  Guide RNA
cucuaaggugaaacggcagc

SEQ ID NO: 32346 - RNA, 20 nt, Artificial Sequence
  Guide RNA
cucuaaggugaaauggcagc

SEQ ID NO: 32347 - RNA, 20 nt, Artificial Sequence
  Guide RNA
cugccauuucaccuuagagg

SEQ ID NO: 32348 - RNA, 20 nt, Artificial Sequence
  Guide RNA
cugccguuucaccuuagagg

SEQ ID NO: 32349 - RNA, 20 nt, Artificial Sequence
  Guide RNA
gaaacggcagccacccgcgc

SEQ ID NO: 32350 - RNA, 20 nt, Artificial Sequence
  Guide RNA
gaaauggcagccacccgcgc

SEQ ID NO: 32351 - RNA, 20 nt, Artificial Sequence
  Guide RNA
gaggcgcggguggcugccau

SEQ ID NO: 32352 - RNA, 20 nt, Artificial Sequence
  Guide RNA
gaggcgcggguggcugccgu

SEQ ID NO: 32353 - RNA, 20 nt, Artificial Sequence
  Guide RNA
gccauuucaccuuagaggga

SEQ ID NO: 32354 - RNA, 20 nt, Artificial Sequence
  Guide RNA
gccguuucaccuuagaggga

SEQ ID NO: 32355 - RNA, 20 nt, Artificial Sequence
  Guide RNA
gcgcggguggcugccauuuc

SEQ ID NO: 32356 - RNA, 20 nt, Artificial Sequence
  Guide RNA
gcgcggguggcugccguuuc

SEQ ID NO: 32357 - RNA, 20 nt, Artificial Sequence
  Guide RNA
gcggguggcugccauuucac

SEQ ID NO: 32358 - RNA, 20 nt, Artificial Sequence
  Guide RNA
gcggguggcugccguuucac

SEQ ID NO: 32359 - RNA, 20 nt, Artificial Sequence
  Guide RNA
gcugccauuucaccuuagag

SEQ ID NO: 32360 - RNA, 20 nt, Artificial Sequence
  Guide RNA
gcugccguuucaccuuagag

SEQ ID NO: 32361 - RNA, 20 nt, Artificial Sequence
  Guide RNA
ggaggcgcggguggcugcca

SEQ ID NO: 32362 - RNA, 20 nt, Artificial Sequence
  Guide RNA
ggcgcggguggcugccauuu

SEQ ID NO: 32363 - RNA, 20 nt, Artificial Sequence
  Guide RNA
ggcgcggguggcugccguuu

SEQ ID NO: 32364 - RNA, 20 nt, Artificial Sequence
  Guide RNA
ggcugccauuucaccuuaga

SEQ ID NO: 32365 - RNA, 20 nt, Artificial Sequence
  Guide RNA
ggcugccguuucaccuuaga

SEQ ID NO: 32366 - RNA, 20 nt, Artificial Sequence
  Guide RNA
ggguggcugccauuucaccu

SEQ ID NO: 32367 - RNA, 20 nt, Artificial Sequence
  Guide RNA
ggguggcugccguuucaccu

SEQ ID NO: 32368 - RNA, 20 nt, Artificial Sequence
  Guide RNA
ggugaaacggcagccacccg

SEQ ID NO: 32369 - RNA, 20 nt, Artificial Sequence
  Guide RNA
ggugaaauggcagccacccg

SEQ ID NO: 32370 - RNA, 20 nt, Artificial Sequence
  Guide RNA
gguggcugccauuucaccuu

SEQ ID NO: 32371 - RNA, 20 nt, Artificial Sequence
  Guide RNA
gguggcugccguuucaccuu

SEQ ID NO: 32372 - RNA, 20 nt, Artificial Sequence
  Guide RNA
gugaaacggcagccacccgc

SEQ ID NO: 32373 - RNA, 20 nt, Artificial Sequence
  Guide RNA
gugaaauggcagccacccgc

SEQ ID NO: 32374 - RNA, 20 nt, Artificial Sequence
  Guide RNA
guggcugccauuucaccuua

SEQ ID NO: 32375 - RNA, 20 nt, Artificial Sequence
  Guide RNA
guggcugccguuucaccuua

SEQ ID NO: 32376 - RNA, 20 nt, Artificial Sequence
  Guide RNA
uaaggugaaacggcagccac

SEQ ID NO: 32377 - RNA, 20 nt, Artificial Sequence
  Guide RNA
uaaggugaaauggcagccac

SEQ ID NO: 32378 - RNA, 20 nt, Artificial Sequence
  Guide RNA
ucccucccucuaaggugaaa

SEQ ID NO: 32379 - RNA, 20 nt, Artificial Sequence
  Guide RNA
ucccucuaaggugaaacggc

SEQ ID NO: 32380 - RNA, 20 nt, Artificial Sequence
  Guide RNA
ucccucuaaggugaaauggc

SEQ ID NO: 32381 - RNA, 20 nt, Artificial Sequence
  Guide RNA
ucuaaggugaaacggcagcc

SEQ ID NO: 32382 - RNA, 20 nt, Artificial Sequence
  Guide RNA
ucuaaggugaaauggcagcc

SEQ ID NO: 32383 - RNA, 20 nt, Artificial Sequence
  Guide RNA
ugaaacggcagccacccgcg

SEQ ID NO: 32384 - RNA, 20 nt, Artificial Sequence
  Guide RNA
ugaaauggcagccacccgcg

SEQ ID NO: 32385 - RNA, 20 nt, Artificial Sequence
  Guide RNA
ugccauuucaccuuagaggg

SEQ ID NO: 32386 - RNA, 20 nt, Artificial Sequence
  Guide RNA
ugccguuucaccuuagaggg

SEQ ID NO: 32387 - RNA, 20 nt, Artificial Sequence
  Guide RNA
uggcugccauuucaccuuag

SEQ ID NO: 32388 - RNA, 20 nt, Artificial Sequence
  Guide RNA
uggcugccguuucaccuuag

SEQ ID NO: 32389 - RNA, 21 nt, Artificial Sequence
  Guide RNA
aaacggcagccacccgcgccu

SEQ ID NO: 32390 - RNA, 21 nt, Artificial Sequence
  Guide RNA
aaauggcagccacccgcgccu

SEQ ID NO: 32391 - RNA, 21 nt, Artificial Sequence
  Guide RNA
aacggcagccacccgcgccuc

SEQ ID NO: 32392 - RNA, 21 nt, Artificial Sequence
  Guide RNA
aaggcggaggcgcggguggcu

SEQ ID NO: 32393 - RNA, 21 nt, Artificial Sequence
  Guide RNA
aaggugaaacggcagccaccc

SEQ ID NO: 32394 - RNA, 21 nt, Artificial Sequence
  Guide RNA
aaggugaaauggcagccaccc

SEQ ID NO: 32395 - RNA, 21 nt, Artificial Sequence
  Guide RNA
aauggcagccacccgcgccuc

SEQ ID NO: 32396 - RNA, 21 nt, Artificial Sequence
  Guide RNA
aggcgcggguggcugccauuu

SEQ ID NO: 32397 - RNA, 21 nt, Artificial Sequence
  Guide RNA
aggcgcggguggcugccguuu

SEQ ID NO: 32398 - RNA, 21 nt, Artificial Sequence
  Guide RNA
aggugaaacggcagccacccg

SEQ ID NO: 32399 - RNA, 21 nt, Artificial Sequence
  Guide RNA
aggugaaauggcagccacccg

SEQ ID NO: 32400 - RNA, 21 nt, Artificial Sequence
  Guide RNA
auggcagccacccgcgccucc

SEQ ID NO: 32401 - RNA, 21 nt, Artificial Sequence
  Guide RNA
cauuucaccuuagagggaggg

SEQ ID NO: 32402 - RNA, 21 nt, Artificial Sequence
  Guide RNA
ccauuucaccuuagagggagg

SEQ ID NO: 32403 - RNA, 21 nt, Artificial Sequence
  Guide RNA
cccucccucccucuaagguga

SEQ ID NO: 32404 - RNA, 21 nt, Artificial Sequence
  Guide RNA
cccucccucuaaggugaaacg

SEQ ID NO: 32405 - RNA, 21 nt, Artificial Sequence
  Guide RNA
cccucccucuaaggugaaaug

SEQ ID NO: 32406 - RNA, 21 nt, Artificial Sequence
  Guide RNA
cccucuaaggugaaacggcag

SEQ ID NO: 32407 - RNA, 21 nt, Artificial Sequence
  Guide RNA
cccucuaaggugaaauggcag

SEQ ID NO: 32408 - RNA, 21 nt, Artificial Sequence
  Guide RNA
ccguuucaccuuagagggagg

SEQ ID NO: 32409 - RNA, 21 nt, Artificial Sequence
  Guide RNA
ccucccucccucuaaggugaa

SEQ ID NO: 32410 - RNA, 21 nt, Artificial Sequence
  Guide RNA
ccucccucuaaggugaaacgg

SEQ ID NO: 32411 - RNA, 21 nt, Artificial Sequence
  Guide RNA
ccucccucuaaggugaaaugg

SEQ ID NO: 32412 - RNA, 21 nt, Artificial Sequence
  Guide RNA
ccucuaaggugaaacggcagc

SEQ ID NO: 32413 - RNA, 21 nt, Artificial Sequence
  Guide RNA
ccucuaaggugaaauggcagc

SEQ ID NO: 32414 - RNA, 21 nt, Artificial Sequence
  Guide RNA
cgcggguggcugccauuucac

SEQ ID NO: 32415 - RNA, 21 nt, Artificial Sequence
  Guide RNA
cgcggguggcugccguuucac

SEQ ID NO: 32416 - RNA, 21 nt, Artificial Sequence
  Guide RNA
cggguggcugccauuucaccu

SEQ ID NO: 32417 - RNA, 21 nt, Artificial Sequence
  Guide RNA
cggguggcugccguuucaccu

SEQ ID NO: 32418 - RNA, 21 nt, Artificial Sequence
  Guide RNA
cguuucaccuuagagggaggg

SEQ ID NO: 32419 - RNA, 21 nt, Artificial Sequence
  Guide RNA
cuaaggugaaacggcagccac

SEQ ID NO: 32420 - RNA, 21 nt, Artificial Sequence
  Guide RNA
cuaaggugaaauggcagccac

SEQ ID NO: 32421 - RNA, 21 nt, Artificial Sequence
  Guide RNA
cucccucccucuaaggugaaa

SEQ ID NO: 32422 - RNA, 21 nt, Artificial Sequence
  Guide RNA
cucccucuaaggugaaacggc

SEQ ID NO: 32423 - RNA, 21 nt, Artificial Sequence
  Guide RNA
cucccucuaaggugaaauggc

SEQ ID NO: 32424 - RNA, 21 nt, Artificial Sequence
  Guide RNA
cucuaaggugaaacggcagcc

SEQ ID NO: 32425 - RNA, 21 nt, Artificial Sequence
  Guide RNA
cucuaaggugaaauggcagcc

SEQ ID NO: 32426 - RNA, 21 nt, Artificial Sequence
  Guide RNA
cugccauuucaccuuagaggg

SEQ ID NO: 32427 - RNA, 21 nt, Artificial Sequence
  Guide RNA
cugccguuucaccuuagaggg

SEQ ID NO: 32428 - RNA, 21 nt, Artificial Sequence
  Guide RNA
gaaacggcagccacccgcgcc

SEQ ID NO: 32429 - RNA, 21 nt, Artificial Sequence
  Guide RNA
gaaauggcagccacccgcgcc

SEQ ID NO: 32430 - RNA, 21 nt, Artificial Sequence
  Guide RNA
gaggcgcggguggcugccauu

SEQ ID NO: 32431 - RNA, 21 nt, Artificial Sequence
  Guide RNA
gaggcgcggguggcugccguu

SEQ ID NO: 32432 - RNA, 21 nt, Artificial Sequence
  Guide RNA
gccauuucaccuuagagggag

SEQ ID NO: 32433 - RNA, 21 nt, Artificial Sequence
  Guide RNA
gccguuucaccuuagagggag

SEQ ID NO: 32434 - RNA, 21 nt, Artificial Sequence
  Guide RNA
gcgcggguggcugccauuuca

SEQ ID NO: 32435 - RNA, 21 nt, Artificial Sequence
  Guide RNA
gcgcggguggcugccguuuca

SEQ ID NO: 32436 - RNA, 21 nt, Artificial Sequence
  Guide RNA
gcggguggcugccauuucacc

SEQ ID NO: 32437 - RNA, 21 nt, Artificial Sequence
  Guide RNA
gcggguggcugccguuucacc

SEQ ID NO: 32438 - RNA, 21 nt, Artificial Sequence
  Guide RNA
gcugccauuucaccuuagagg

SEQ ID NO: 32439 - RNA, 21 nt, Artificial Sequence
  Guide RNA
gcugccguuucaccuuagagg

SEQ ID NO: 32440 - RNA, 21 nt, Artificial Sequence
  Guide RNA
ggaggcgcggguggcugccau

SEQ ID NO: 32441 - RNA, 21 nt, Artificial Sequence
  Guide RNA
ggcgcggguggcugccauuuc

SEQ ID NO: 32442 - RNA, 21 nt, Artificial Sequence
  Guide RNA
ggcgcggguggcugccguuuc

SEQ ID NO: 32443 - RNA, 21 nt, Artificial Sequence
  Guide RNA
ggcugccauuucaccuuagag

SEQ ID NO: 32444 - RNA, 21 nt, Artificial Sequence
  Guide RNA
ggcugccguuucaccuuagag

SEQ ID NO: 32445 - RNA, 21 nt, Artificial Sequence
  Guide RNA
ggguggcugccauuucaccuu

SEQ ID NO: 32446 - RNA, 21 nt, Artificial Sequence
  Guide RNA
ggguggcugccguuucaccuu

SEQ ID NO: 32447 - RNA, 21 nt, Artificial Sequence
  Guide RNA
ggugaaacggcagccacccgc

SEQ ID NO: 32448 - RNA, 21 nt, Artificial Sequence
  Guide RNA
ggugaaauggcagccacccgc

SEQ ID NO: 32449 - RNA, 21 nt, Artificial Sequence
  Guide RNA
gguggcugccauuucaccuua

SEQ ID NO: 32450 - RNA, 21 nt, Artificial Sequence
  Guide RNA
gguggcugccguuucaccuua

SEQ ID NO: 32451 - RNA, 21 nt, Artificial Sequence
  Guide RNA
gugaaacggcagccacccgcg

SEQ ID NO: 32452 - RNA, 21 nt, Artificial Sequence
  Guide RNA
gugaaauggcagccacccgcg

SEQ ID NO: 32453 - RNA, 21 nt, Artificial Sequence
  Guide RNA
guggcugccauuucaccuuag

SEQ ID NO: 32454 - RNA, 21 nt, Artificial Sequence
  Guide RNA
guggcugccguuucaccuuag

SEQ ID NO: 32455 - RNA, 21 nt, Artificial Sequence
  Guide RNA
uaaggugaaacggcagccacc

SEQ ID NO: 32456 - RNA, 21 nt, Artificial Sequence
  Guide RNA
uaaggugaaauggcagccacc

SEQ ID NO: 32457 - RNA, 21 nt, Artificial Sequence
  Guide RNA
ucccucccucccucuaaggug

SEQ ID NO: 32458 - RNA, 21 nt, Artificial Sequence
  Guide RNA
ucccucccucuaaggugaaac

SEQ ID NO: 32459 - RNA, 21 nt, Artificial Sequence
  Guide RNA
ucccucccucuaaggugaaau

SEQ ID NO: 32460 - RNA, 21 nt, Artificial Sequence
  Guide RNA
ucccucuaaggugaaacggca

SEQ ID NO: 32461 - RNA, 21 nt, Artificial Sequence
  Guide RNA
ucccucuaaggugaaauggca

SEQ ID NO: 32462 - RNA, 21 nt, Artificial Sequence
  Guide RNA
ucuaaggugaaacggcagcca

SEQ ID NO: 32463 - RNA, 21 nt, Artificial Sequence
  Guide RNA
ucuaaggugaaauggcagcca

SEQ ID NO: 32464 - RNA, 21 nt, Artificial Sequence
  Guide RNA
ugaaacggcagccacccgcgc

SEQ ID NO: 32465 - RNA, 21 nt, Artificial Sequence
  Guide RNA
ugaaauggcagccacccgcgc

SEQ ID NO: 32466 - RNA, 21 nt, Artificial Sequence
  Guide RNA
ugccauuucaccuuagaggga

SEQ ID NO: 32467 - RNA, 21 nt, Artificial Sequence
  Guide RNA
ugccguuucaccuuagaggga

SEQ ID NO: 32468 - RNA, 21 nt, Artificial Sequence
  Guide RNA
uggcugccauuucaccuuaga

SEQ ID NO: 32469 - RNA, 21 nt, Artificial Sequence
  Guide RNA
uggcugccguuucaccuuaga

SEQ ID NO: 32470 - RNA, 22 nt, Artificial Sequence
  Guide RNA
aaacggcagccacccgcgccuc

SEQ ID NO: 32471 - RNA, 22 nt, Artificial Sequence
  Guide RNA
aaauggcagccacccgcgccuc

SEQ ID NO: 32472 - RNA, 22 nt, Artificial Sequence
  Guide RNA
aacggcagccacccgcgccucc

SEQ ID NO: 32473 - RNA, 22 nt, Artificial Sequence
  Guide RNA
aaggcggaggcgcggguggcug

SEQ ID NO: 32474 - RNA, 22 nt, Artificial Sequence
  Guide RNA
aaggugaaacggcagccacccg

SEQ ID NO: 32475 - RNA, 22 nt, Artificial Sequence
  Guide RNA
aaggugaaauggcagccacccg

SEQ ID NO: 32476 - RNA, 22 nt, Artificial Sequence
  Guide RNA
aauggcagccacccgcgccucc

SEQ ID NO: 32477 - RNA, 22 nt, Artificial Sequence
  Guide RNA
aggcgcggguggcugccauuuc

SEQ ID NO: 32478 - RNA, 22 nt, Artificial Sequence
  Guide RNA
aggcgcggguggcugccguuuc

SEQ ID NO: 32479 - RNA, 22 nt, Artificial Sequence
  Guide RNA
aggugaaacggcagccacccgc

SEQ ID NO: 32480 - RNA, 22 nt, Artificial Sequence
  Guide RNA
aggugaaauggcagccacccgc

SEQ ID NO: 32481 - RNA, 22 nt, Artificial Sequence
  Guide RNA
auggcagccacccgcgccuccg

SEQ ID NO: 32482 - RNA, 22 nt, Artificial Sequence
  Guide RNA
cauuucaccuuagagggaggga

SEQ ID NO: 32483 - RNA, 22 nt, Artificial Sequence
  Guide RNA
ccauuucaccuuagagggaggg

SEQ ID NO: 32484 - RNA, 22 nt, Artificial Sequence
  Guide RNA
cccucccucccucuaaggugaa

SEQ ID NO: 32485 - RNA, 22 nt, Artificial Sequence
  Guide RNA
cccucccucuaaggugaaacgg

SEQ ID NO: 32486 - RNA, 22 nt, Artificial Sequence
  Guide RNA
cccucccucuaaggugaaaugg

SEQ ID NO: 32487 - RNA, 22 nt, Artificial Sequence
  Guide RNA
cccucuaaggugaaacggcagc

SEQ ID NO: 32488 - RNA, 22 nt, Artificial Sequence
  Guide RNA
cccucuaaggugaaauggcagc

SEQ ID NO: 32489 - RNA, 22 nt, Artificial Sequence
  Guide RNA
ccguuucaccuuagagggaggg

SEQ ID NO: 32490 - RNA, 22 nt, Artificial Sequence
  Guide RNA
ccucccucccucuaaggugaaa

SEQ ID NO: 32491 - RNA, 22 nt, Artificial Sequence
  Guide RNA
ccucccucuaaggugaaacggc

SEQ ID NO: 32492 - RNA, 22 nt, Artificial Sequence
  Guide RNA
ccucccucuaaggugaaauggc

SEQ ID NO: 32493 - RNA, 22 nt, Artificial Sequence
  Guide RNA
ccucuaaggugaaacggcagcc

SEQ ID NO: 32494 - RNA, 22 nt, Artificial Sequence
  Guide RNA
ccucuaaggugaaauggcagcc

SEQ ID NO: 32495 - RNA, 22 nt, Artificial Sequence
  Guide RNA
cgcggguggcugccauuucacc

SEQ ID NO: 32496 - RNA, 22 nt, Artificial Sequence
  Guide RNA
cgcggguggcugccguuucacc

SEQ ID NO: 32497 - RNA, 22 nt, Artificial Sequence
  Guide RNA
cggaggcgcggguggcugccau

SEQ ID NO: 32498 - RNA, 22 nt, Artificial Sequence
  Guide RNA
cggguggcugccauuucaccuu

SEQ ID NO: 32499 - RNA, 22 nt, Artificial Sequence
  Guide RNA
cggguggcugccguuucaccuu

SEQ ID NO: 32500 - RNA, 22 nt, Artificial Sequence
  Guide RNA
cguuucaccuuagagggaggga

SEQ ID NO: 32501 - RNA, 22 nt, Artificial Sequence
  Guide RNA
cuaaggugaaacggcagccacc

SEQ ID NO: 32502 - RNA, 22 nt, Artificial Sequence
  Guide RNA
cuaaggugaaauggcagccacc

SEQ ID NO: 32503 - RNA, 22 nt, Artificial Sequence
  Guide RNA
cucccucccucuaaggugaaac

SEQ ID NO: 32504 - RNA, 22 nt, Artificial Sequence
  Guide RNA
cucccucccucuaaggugaaau

SEQ ID NO: 32505 - RNA, 22 nt, Artificial Sequence
  Guide RNA
cucccucuaaggugaaacggca

SEQ ID NO: 32506 - RNA, 22 nt, Artificial Sequence
  Guide RNA
cucccucuaaggugaaauggca

SEQ ID NO: 32507 - RNA, 22 nt, Artificial Sequence
  Guide RNA
cucuaaggugaaacggcagcca

SEQ ID NO: 32508 - RNA, 22 nt, Artificial Sequence
  Guide RNA
cucuaaggugaaauggcagcca

SEQ ID NO: 32509 - RNA, 22 nt, Artificial Sequence
  Guide RNA
cugccauuucaccuuagaggga

SEQ ID NO: 32510 - RNA, 22 nt, Artificial Sequence
  Guide RNA
cugccguuucaccuuagaggga

SEQ ID NO: 32511 - RNA, 22 nt, Artificial Sequence
  Guide RNA
gaaacggcagccacccgcgccu

SEQ ID NO: 32512 - RNA, 22 nt, Artificial Sequence
  Guide RNA
gaaauggcagccacccgcgccu

SEQ ID NO: 32513 - RNA, 22 nt, Artificial Sequence
  Guide RNA
gaaggcggaggcgcggguggcu

SEQ ID NO: 32514 - RNA, 22 nt, Artificial Sequence
  Guide RNA
gaggcgcggguggcugccauuu

SEQ ID NO: 32515 - RNA, 22 nt, Artificial Sequence
  Guide RNA
gaggcgcggguggcugccguuu

SEQ ID NO: 32516 - RNA, 22 nt, Artificial Sequence
  Guide RNA
gccauuucaccuuagagggagg

SEQ ID NO: 32517 - RNA, 22 nt, Artificial Sequence
  Guide RNA
gccguuucaccuuagagggagg

SEQ ID NO: 32518 - RNA, 22 nt, Artificial Sequence
  Guide RNA
gcgcggguggcugccauuucac

SEQ ID NO: 32519 - RNA, 22 nt, Artificial Sequence
  Guide RNA
gcgcggguggcugccguuucac

SEQ ID NO: 32520 - RNA, 22 nt, Artificial Sequence
  Guide RNA
gcggguggcugccauuucaccu

SEQ ID NO: 32521 - RNA, 22 nt, Artificial Sequence
  Guide RNA
gcggguggcugccguuucaccu

SEQ ID NO: 32522 - RNA, 22 nt, Artificial Sequence
  Guide RNA
gcugccauuucaccuuagaggg

SEQ ID NO: 32523 - RNA, 22 nt, Artificial Sequence
  Guide RNA
gcugccguuucaccuuagaggg

SEQ ID NO: 32524 - RNA, 22 nt, Artificial Sequence
  Guide RNA
ggaggcgcggguggcugccauu

SEQ ID NO: 32525 - RNA, 22 nt, Artificial Sequence
  Guide RNA
ggaggcgcggguggcugccguu

SEQ ID NO: 32526 - RNA, 22 nt, Artificial Sequence
  Guide RNA
ggcgcggguggcugccauuuca

SEQ ID NO: 32527 - RNA, 22 nt, Artificial Sequence
  Guide RNA
ggcgcggguggcugccguuuca

SEQ ID NO: 32528 - RNA, 22 nt, Artificial Sequence
  Guide RNA
ggcugccauuucaccuuagagg

SEQ ID NO: 32529 - RNA, 22 nt, Artificial Sequence
  Guide RNA
ggcugccguuucaccuuagagg

SEQ ID NO: 32530 - RNA, 22 nt, Artificial Sequence
  Guide RNA
ggguggcugccauuucaccuua

SEQ ID NO: 32531 - RNA, 22 nt, Artificial Sequence
  Guide RNA
ggguggcugccguuucaccuua

SEQ ID NO: 32532 - RNA, 22 nt, Artificial Sequence
  Guide RNA
ggugaaacggcagccacccgcg

SEQ ID NO: 32533 - RNA, 22 nt, Artificial Sequence
  Guide RNA
ggugaaauggcagccacccgcg

SEQ ID NO: 32534 - RNA, 22 nt, Artificial Sequence
  Guide RNA
gguggcugccauuucaccuuag

SEQ ID NO: 32535 - RNA, 22 nt, Artificial Sequence
  Guide RNA
gguggcugccguuucaccuuag

SEQ ID NO: 32536 - RNA, 22 nt, Artificial Sequence
  Guide RNA
gugaaacggcagccacccgcgc

SEQ ID NO: 32537 - RNA, 22 nt, Artificial Sequence
  Guide RNA
gugaaauggcagccacccgcgc

SEQ ID NO: 32538 - RNA, 22 nt, Artificial Sequence
  Guide RNA
guggcugccauuucaccuuaga

SEQ ID NO: 32539 - RNA, 22 nt, Artificial Sequence
  Guide RNA
guggcugccguuucaccuuaga

SEQ ID NO: 32540 - RNA, 22 nt, Artificial Sequence
  Guide RNA
uaaggugaaacggcagccaccc

SEQ ID NO: 32541 - RNA, 22 nt, Artificial Sequence
  Guide RNA
uaaggugaaauggcagccaccc

SEQ ID NO: 32542 - RNA, 22 nt, Artificial Sequence
  Guide RNA
ucccucccucccucuaagguga

SEQ ID NO: 32543 - RNA, 22 nt, Artificial Sequence
  Guide RNA
ucccucccucuaaggugaaacg

SEQ ID NO: 32544 - RNA, 22 nt, Artificial Sequence
  Guide RNA
ucccucccucuaaggugaaaug

SEQ ID NO: 32545 - RNA, 22 nt, Artificial Sequence
  Guide RNA
ucccucuaaggugaaacggcag

SEQ ID NO: 32546 - RNA, 22 nt, Artificial Sequence
  Guide RNA
ucccucuaaggugaaauggcag

SEQ ID NO: 32547 - RNA, 22 nt, Artificial Sequence
  Guide RNA
ucuaaggugaaacggcagccac

SEQ ID NO: 32548 - RNA, 22 nt, Artificial Sequence
  Guide RNA
ucuaaggugaaauggcagccac

SEQ ID NO: 32549 - RNA, 22 nt, Artificial Sequence
  Guide RNA
ugaaacggcagccacccgcgcc

SEQ ID NO: 32550 - RNA, 22 nt, Artificial Sequence
  Guide RNA
ugaaauggcagccacccgcgcc

SEQ ID NO: 32551 - RNA, 22 nt, Artificial Sequence
  Guide RNA
ugccauuucaccuuagagggag

SEQ ID NO: 32552 - RNA, 22 nt, Artificial Sequence
  Guide RNA
ugccguuucaccuuagagggag

SEQ ID NO: 32553 - RNA, 22 nt, Artificial Sequence
  Guide RNA
uggcugccauuucaccuuagag

SEQ ID NO: 32554 - RNA, 22 nt, Artificial Sequence
  Guide RNA
uggcugccguuucaccuuagag

SEQ ID NO: 32555 - RNA, 22 nt, Artificial Sequence
  Guide RNA
uucccucccucccucuaaggug

SEQ ID NO: 32556 - RNA, 20 nt, Artificial Sequence
  Guide RNA
accgagccugagaacgccua

SEQ ID NO: 32557 - RNA, 20 nt, Artificial Sequence
  Guide RNA
accgagccugaggacgccua

SEQ ID NO: 32558 - RNA, 20 nt, Artificial Sequence
  Guide RNA
agaacgccuauagaaacugc

SEQ ID NO: 32559 - RNA, 20 nt, Artificial Sequence
  Guide RNA
agaccgagccugagaacgcc

SEQ ID NO: 32560 - RNA, 20 nt, Artificial Sequence
  Guide RNA
agaccgagccugaggacgcc

SEQ ID NO: 32561 - RNA, 20 nt, Artificial Sequence
  Guide RNA
agccugagaacgccuauaga

SEQ ID NO: 32562 - RNA, 20 nt, Artificial Sequence
  Guide RNA
agccugaggacgccuauaga

SEQ ID NO: 32563 - RNA, 20 nt, Artificial Sequence
  Guide RNA
aggacgccuauagaaacugc

SEQ ID NO: 32564 - RNA, 20 nt, Artificial Sequence
  Guide RNA
aggcguccucaggcucgguc

SEQ ID NO: 32565 - RNA, 20 nt, Artificial Sequence
  Guide RNA
aggcguucucaggcucgguc

SEQ ID NO: 32566 - RNA, 20 nt, Artificial Sequence
  Guide RNA
aguuucuauaggcguccuca

SEQ ID NO: 32567 - RNA, 20 nt, Artificial Sequence
  Guide RNA
aguuucuauaggcguucuca

SEQ ID NO: 32568 - RNA, 20 nt, Artificial Sequence
  Guide RNA
auaggcguccucaggcucgg

SEQ ID NO: 32569 - RNA, 20 nt, Artificial Sequence
  Guide RNA
auaggcguucucaggcucgg

SEQ ID NO: 32570 - RNA, 20 nt, Artificial Sequence
  Guide RNA
cagaccgagccugagaacgc

SEQ ID NO: 32571 - RNA, 20 nt, Artificial Sequence
  Guide RNA
cagaccgagccugaggacgc

SEQ ID NO: 32572 - RNA, 20 nt, Artificial Sequence
  Guide RNA
caguuucuauaggcguccuc

SEQ ID NO: 32573 - RNA, 20 nt, Artificial Sequence
  Guide RNA
caguuucuauaggcguucuc

SEQ ID NO: 32574 - RNA, 20 nt, Artificial Sequence
  Guide RNA
ccccuugcagaccgagccug

SEQ ID NO: 32575 - RNA, 20 nt, Artificial Sequence
  Guide RNA
cccuugcagaccgagccuga

SEQ ID NO: 32576 - RNA, 20 nt, Artificial Sequence
  Guide RNA
ccgagccugagaacgccuau

SEQ ID NO: 32577 - RNA, 20 nt, Artificial Sequence
  Guide RNA
ccgagccugaggacgccuau

SEQ ID NO: 32578 - RNA, 20 nt, Artificial Sequence
  Guide RNA
ccugagaacgccuauagaaa

SEQ ID NO: 32579 - RNA, 20 nt, Artificial Sequence
  Guide RNA
ccugaggacgccuauagaaa

SEQ ID NO: 32580 - RNA, 20 nt, Artificial Sequence
  Guide RNA
ccuugcagaccgagccugag

SEQ ID NO: 32581 - RNA, 20 nt, Artificial Sequence
  Guide RNA
cgagccugagaacgccuaua

SEQ ID NO: 32582 - RNA, 20 nt, Artificial Sequence
  Guide RNA
cgagccugaggacgccuaua

SEQ ID NO: 32583 - RNA, 20 nt, Artificial Sequence
  Guide RNA
cguccucaggcucggucugc

SEQ ID NO: 32584 - RNA, 20 nt, Artificial Sequence
  Guide RNA
cguucucaggcucggucugc

SEQ ID NO: 32585 - RNA, 20 nt, Artificial Sequence
  Guide RNA
cuauaggcguccucaggcuc

SEQ ID NO: 32586 - RNA, 20 nt, Artificial Sequence
  Guide RNA
cuauaggcguucucaggcuc

SEQ ID NO: 32587 - RNA, 20 nt, Artificial Sequence
  Guide RNA
cugagaacgccuauagaaac

SEQ ID NO: 32588 - RNA, 20 nt, Artificial Sequence
  Guide RNA
cugaggacgccuauagaaac

SEQ ID NO: 32589 - RNA, 20 nt, Artificial Sequence
  Guide RNA
cuggcaguuucuauaggcgu

SEQ ID NO: 32590 - RNA, 20 nt, Artificial Sequence
  Guide RNA
cuugcagaccgagccugaga

SEQ ID NO: 32591 - RNA, 20 nt, Artificial Sequence
  Guide RNA
cuugcagaccgagccugagg

SEQ ID NO: 32592 - RNA, 20 nt, Artificial Sequence
  Guide RNA
gaacgccuauagaaacugcc

SEQ ID NO: 32593 - RNA, 20 nt, Artificial Sequence
  Guide RNA
gaccgagccugagaacgccu

SEQ ID NO: 32594 - RNA, 20 nt, Artificial Sequence
  Guide RNA
gaccgagccugaggacgccu

SEQ ID NO: 32595 - RNA, 20 nt, Artificial Sequence
  Guide RNA
gagaacgccuauagaaacug

SEQ ID NO: 32596 - RNA, 20 nt, Artificial Sequence
  Guide RNA
gagccugagaacgccuauag

SEQ ID NO: 32597 - RNA, 20 nt, Artificial Sequence
  Guide RNA
gagccugaggacgccuauag

SEQ ID NO: 32598 - RNA, 20 nt, Artificial Sequence
  Guide RNA
gaggacgccuauagaaacug

SEQ ID NO: 32599 - RNA, 20 nt, Artificial Sequence
  Guide RNA
gcagaccgagccugagaacg

SEQ ID NO: 32600 - RNA, 20 nt, Artificial Sequence
  Guide RNA
gcagaccgagccugaggacg

SEQ ID NO: 32601 - RNA, 20 nt, Artificial Sequence
  Guide RNA
gcaguuucuauaggcguccu

SEQ ID NO: 32602 - RNA, 20 nt, Artificial Sequence
  Guide RNA
gcaguuucuauaggcguucu

SEQ ID NO: 32603 - RNA, 20 nt, Artificial Sequence
  Guide RNA
gccccuugcagaccgagccu

SEQ ID NO: 32604 - RNA, 20 nt, Artificial Sequence
  Guide RNA
gccugagaacgccuauagaa

SEQ ID NO: 32605 - RNA, 20 nt, Artificial Sequence
  Guide RNA
gccugaggacgccuauagaa

SEQ ID NO: 32606 - RNA, 20 nt, Artificial Sequence
  Guide RNA
gcguccucaggcucggucug

SEQ ID NO: 32607 - RNA, 20 nt, Artificial Sequence
  Guide RNA
gcguucucaggcucggucug

SEQ ID NO: 32608 - RNA, 20 nt, Artificial Sequence
  Guide RNA
ggacgccuauagaaacugcc

SEQ ID NO: 32609 - RNA, 20 nt, Artificial Sequence
  Guide RNA
ggcaguuucuauaggcgucc

SEQ ID NO: 32610 - RNA, 20 nt, Artificial Sequence
  Guide RNA
ggcaguuucuauaggcguuc

SEQ ID NO: 32611 - RNA, 20 nt, Artificial Sequence
  Guide RNA
ggcguccucaggcucggucu

SEQ ID NO: 32612 - RNA, 20 nt, Artificial Sequence
  Guide RNA
ggcguucucaggcucggucu

SEQ ID NO: 32613 - RNA, 20 nt, Artificial Sequence
  Guide RNA
ggucuggcaguuucuauagg

SEQ ID NO: 32614 - RNA, 20 nt, Artificial Sequence
  Guide RNA
guccucaggcucggucugca

SEQ ID NO: 32615 - RNA, 20 nt, Artificial Sequence
  Guide RNA
gucuggcaguuucuauaggc

SEQ ID NO: 32616 - RNA, 20 nt, Artificial Sequence
  Guide RNA
guucucaggcucggucugca

SEQ ID NO: 32617 - RNA, 20 nt, Artificial Sequence
  Guide RNA
guuucuauaggcguccucag

SEQ ID NO: 32618 - RNA, 20 nt, Artificial Sequence
  Guide RNA
guuucuauaggcguucucag

SEQ ID NO: 32619 - RNA, 20 nt, Artificial Sequence
  Guide RNA
uaggcguccucaggcucggu

SEQ ID NO: 32620 - RNA, 20 nt, Artificial Sequence
  Guide RNA
uaggcguucucaggcucggu

SEQ ID NO: 32621 - RNA, 20 nt, Artificial Sequence
  Guide RNA
uauaggcguccucaggcucg

SEQ ID NO: 32622 - RNA, 20 nt, Artificial Sequence
  Guide RNA
uauaggcguucucaggcucg

SEQ ID NO: 32623 - RNA, 20 nt, Artificial Sequence
  Guide RNA
uccucaggcucggucugcaa

SEQ ID NO: 32624 - RNA, 20 nt, Artificial Sequence
  Guide RNA
ucuauaggcguccucaggcu

SEQ ID NO: 32625 - RNA, 20 nt, Artificial Sequence
  Guide RNA
ucuauaggcguucucaggcu

SEQ ID NO: 32626 - RNA, 20 nt, Artificial Sequence
  Guide RNA
ucuggcaguuucuauaggcg

SEQ ID NO: 32627 - RNA, 20 nt, Artificial Sequence
  Guide RNA
ugagaacgccuauagaaacu

SEQ ID NO: 32628 - RNA, 20 nt, Artificial Sequence
  Guide RNA
ugaggacgccuauagaaacu

SEQ ID NO: 32629 - RNA, 20 nt, Artificial Sequence
  Guide RNA
ugcagaccgagccugagaac

SEQ ID NO: 32630 - RNA, 20 nt, Artificial Sequence
  Guide RNA
ugcagaccgagccugaggac

SEQ ID NO: 32631 - RNA, 20 nt, Artificial Sequence
  Guide RNA
uggcaguuucuauaggcguc

SEQ ID NO: 32632 - RNA, 20 nt, Artificial Sequence
  Guide RNA
uggcaguuucuauaggcguu

SEQ ID NO: 32633 - RNA, 20 nt, Artificial Sequence
  Guide RNA
uucuauaggcguccucaggc

SEQ ID NO: 32634 - RNA, 20 nt, Artificial Sequence
  Guide RNA
uucuauaggcguucucaggc

SEQ ID NO: 32635 - RNA, 20 nt, Artificial Sequence
  Guide RNA
uucucaggcucggucugcaa

SEQ ID NO: 32636 - RNA, 20 nt, Artificial Sequence
  Guide RNA
uugcagaccgagccugagaa

SEQ ID NO: 32637 - RNA, 20 nt, Artificial Sequence
  Guide RNA
uugcagaccgagccugagga

SEQ ID NO: 32638 - RNA, 20 nt, Artificial Sequence
  Guide RNA
uuucuauaggcguccucagg

SEQ ID NO: 32639 - RNA, 20 nt, Artificial Sequence
  Guide RNA
uuucuauaggcguucucagg

SEQ ID NO: 32640 - RNA, 21 nt, Artificial Sequence
  Guide RNA
accgagccugagaacgccuau

SEQ ID NO: 32641 - RNA, 21 nt, Artificial Sequence
  Guide RNA
accgagccugaggacgccuau

SEQ ID NO: 32642 - RNA, 21 nt, Artificial Sequence
  Guide RNA
agaacgccuauagaaacugcc

SEQ ID NO: 32643 - RNA, 21 nt, Artificial Sequence
  Guide RNA
agaccgagccugagaacgccu

SEQ ID NO: 32644 - RNA, 21 nt, Artificial Sequence
  Guide RNA
agaccgagccugaggacgccu

SEQ ID NO: 32645 - RNA, 21 nt, Artificial Sequence
  Guide RNA
agccccuugcagaccgagccu

SEQ ID NO: 32646 - RNA, 21 nt, Artificial Sequence
  Guide RNA
agccugagaacgccuauagaa

SEQ ID NO: 32647 - RNA, 21 nt, Artificial Sequence
  Guide RNA
agccugaggacgccuauagaa

SEQ ID NO: 32648 - RNA, 21 nt, Artificial Sequence
  Guide RNA
aggacgccuauagaaacugcc

SEQ ID NO: 32649 - RNA, 21 nt, Artificial Sequence
  Guide RNA
aggcguccucaggcucggucu

SEQ ID NO: 32650 - RNA, 21 nt, Artificial Sequence
  Guide RNA
aggcguucucaggcucggucu

SEQ ID NO: 32651 - RNA, 21 nt, Artificial Sequence
  Guide RNA
aguuucuauaggcguccucag

SEQ ID NO: 32652 - RNA, 21 nt, Artificial Sequence
  Guide RNA
aguuucuauaggcguucucag

SEQ ID NO: 32653 - RNA, 21 nt, Artificial Sequence
  Guide RNA
auaggcguccucaggcucggu

SEQ ID NO: 32654 - RNA, 21 nt, Artificial Sequence
  Guide RNA
auaggcguucucaggcucggu

SEQ ID NO: 32655 - RNA, 21 nt, Artificial Sequence
  Guide RNA
cagaccgagccugagaacgcc

SEQ ID NO: 32656 - RNA, 21 nt, Artificial Sequence
  Guide RNA
cagaccgagccugaggacgcc

SEQ ID NO: 32657 - RNA, 21 nt, Artificial Sequence
  Guide RNA
caguuucuauaggcguccuca

SEQ ID NO: 32658 - RNA, 21 nt, Artificial Sequence
  Guide RNA
caguuucuauaggcguucuca

SEQ ID NO: 32659 - RNA, 21 nt, Artificial Sequence
  Guide RNA
ccccuugcagaccgagccuga

SEQ ID NO: 32660 - RNA, 21 nt, Artificial Sequence
  Guide RNA
cccuugcagaccgagccugag

SEQ ID NO: 32661 - RNA, 21 nt, Artificial Sequence
  Guide RNA
ccgagccugagaacgccuaua

SEQ ID NO: 32662 - RNA, 21 nt, Artificial Sequence
  Guide RNA
ccgagccugaggacgccuaua

SEQ ID NO: 32663 - RNA, 21 nt, Artificial Sequence
  Guide RNA
ccugagaacgccuauagaaac

SEQ ID NO: 32664 - RNA, 21 nt, Artificial Sequence
  Guide RNA
ccugaggacgccuauagaaac

SEQ ID NO: 32665 - RNA, 21 nt, Artificial Sequence
  Guide RNA
ccuugcagaccgagccugaga

SEQ ID NO: 32666 - RNA, 21 nt, Artificial Sequence
  Guide RNA
ccuugcagaccgagccugagg

SEQ ID NO: 32667 - RNA, 21 nt, Artificial Sequence
  Guide RNA
cgagccugagaacgccuauag

SEQ ID NO: 32668 - RNA, 21 nt, Artificial Sequence
  Guide RNA
cgagccugaggacgccuauag

SEQ ID NO: 32669 - RNA, 21 nt, Artificial Sequence
  Guide RNA
cguccucaggcucggucugca

SEQ ID NO: 32670 - RNA, 21 nt, Artificial Sequence
  Guide RNA
cguucucaggcucggucugca

SEQ ID NO: 32671 - RNA, 21 nt, Artificial Sequence
  Guide RNA
cuauaggcguccucaggcucg

SEQ ID NO: 32672 - RNA, 21 nt, Artificial Sequence
  Guide RNA
cuauaggcguucucaggcucg

SEQ ID NO: 32673 - RNA, 21 nt, Artificial Sequence
  Guide RNA
cugagaacgccuauagaaacu

SEQ ID NO: 32674 - RNA, 21 nt, Artificial Sequence
  Guide RNA
cugaggacgccuauagaaacu

SEQ ID NO: 32675 - RNA, 21 nt, Artificial Sequence
  Guide RNA
cuggcaguuucuauaggcguc

SEQ ID NO: 32676 - RNA, 21 nt, Artificial Sequence
  Guide RNA
cuggcaguuucuauaggcguu

SEQ ID NO: 32677 - RNA, 21 nt, Artificial Sequence
  Guide RNA
cuugcagaccgagccugagaa

SEQ ID NO: 32678 - RNA, 21 nt, Artificial Sequence
  Guide RNA
cuugcagaccgagccugagga

SEQ ID NO: 32679 - RNA, 21 nt, Artificial Sequence
  Guide RNA
gaacgccuauagaaacugcca

SEQ ID NO: 32680 - RNA, 21 nt, Artificial Sequence
  Guide RNA
gaccgagccugagaacgccua

SEQ ID NO: 32681 - RNA, 21 nt, Artificial Sequence
  Guide RNA
gaccgagccugaggacgccua

SEQ ID NO: 32682 - RNA, 21 nt, Artificial Sequence
  Guide RNA
gagaacgccuauagaaacugc

SEQ ID NO: 32683 - RNA, 21 nt, Artificial Sequence
  Guide RNA
gagccugagaacgccuauaga

SEQ ID NO: 32684 - RNA, 21 nt, Artificial Sequence
  Guide RNA
gagccugaggacgccuauaga

SEQ ID NO: 32685 - RNA, 21 nt, Artificial Sequence
  Guide RNA
gaggacgccuauagaaacugc

SEQ ID NO: 32686 - RNA, 21 nt, Artificial Sequence
  Guide RNA
gcagaccgagccugagaacgc

SEQ ID NO: 32687 - RNA, 21 nt, Artificial Sequence
  Guide RNA
gcagaccgagccugaggacgc

SEQ ID NO: 32688 - RNA, 21 nt, Artificial Sequence
  Guide RNA
gcaguuucuauaggcguccuc

SEQ ID NO: 32689 - RNA, 21 nt, Artificial Sequence
  Guide RNA
gcaguuucuauaggcguucuc

SEQ ID NO: 32690 - RNA, 21 nt, Artificial Sequence
  Guide RNA
gccccuugcagaccgagccug

SEQ ID NO: 32691 - RNA, 21 nt, Artificial Sequence
  Guide RNA
gccugagaacgccuauagaaa

SEQ ID NO: 32692 - RNA, 21 nt, Artificial Sequence
  Guide RNA
gccugaggacgccuauagaaa

SEQ ID NO: 32693 - RNA, 21 nt, Artificial Sequence
  Guide RNA
gcguccucaggcucggucugc

SEQ ID NO: 32694 - RNA, 21 nt, Artificial Sequence
  Guide RNA
gcguucucaggcucggucugc

SEQ ID NO: 32695 - RNA, 21 nt, Artificial Sequence
  Guide RNA
ggacgccuauagaaacugcca

SEQ ID NO: 32696 - RNA, 21 nt, Artificial Sequence
  Guide RNA
ggcaguuucuauaggcguccu

SEQ ID NO: 32697 - RNA, 21 nt, Artificial Sequence
  Guide RNA
ggcaguuucuauaggcguucu

SEQ ID NO: 32698 - RNA, 21 nt, Artificial Sequence
  Guide RNA
ggcguccucaggcucggucug

SEQ ID NO: 32699 - RNA, 21 nt, Artificial Sequence
  Guide RNA
ggcguucucaggcucggucug

SEQ ID NO: 32700 - RNA, 21 nt, Artificial Sequence
  Guide RNA
gggucuggcaguuucuauagg

SEQ ID NO: 32701 - RNA, 21 nt, Artificial Sequence
  Guide RNA
ggucuggcaguuucuauaggc

SEQ ID NO: 32702 - RNA, 21 nt, Artificial Sequence
  Guide RNA
guccucaggcucggucugcaa

SEQ ID NO: 32703 - RNA, 21 nt, Artificial Sequence
  Guide RNA
gucuggcaguuucuauaggcg

SEQ ID NO: 32704 - RNA, 21 nt, Artificial Sequence
  Guide RNA
guucucaggcucggucugcaa

SEQ ID NO: 32705 - RNA, 21 nt, Artificial Sequence
  Guide RNA
guuucuauaggcguccucagg

SEQ ID NO: 32706 - RNA, 21 nt, Artificial Sequence
  Guide RNA
guuucuauaggcguucucagg

SEQ ID NO: 32707 - RNA, 21 nt, Artificial Sequence
  Guide RNA
uaggcguccucaggcucgguc

SEQ ID NO: 32708 - RNA, 21 nt, Artificial Sequence
  Guide RNA
uaggcguucucaggcucgguc

SEQ ID NO: 32709 - RNA, 21 nt, Artificial Sequence
  Guide RNA
uauaggcguccucaggcucgg

SEQ ID NO: 32710 - RNA, 21 nt, Artificial Sequence
  Guide RNA
uauaggcguucucaggcucgg

SEQ ID NO: 32711 - RNA, 21 nt, Artificial Sequence
  Guide RNA
uccucaggcucggucugcaag

SEQ ID NO: 32712 - RNA, 21 nt, Artificial Sequence
  Guide RNA
ucuauaggcguccucaggcuc

SEQ ID NO: 32713 - RNA, 21 nt, Artificial Sequence
  Guide RNA
ucuauaggcguucucaggcuc

SEQ ID NO: 32714 - RNA, 21 nt, Artificial Sequence
  Guide RNA
ucuggcaguuucuauaggcgu

SEQ ID NO: 32715 - RNA, 21 nt, Artificial Sequence
  Guide RNA
ugagaacgccuauagaaacug

SEQ ID NO: 32716 - RNA, 21 nt, Artificial Sequence
  Guide RNA
ugaggacgccuauagaaacug

SEQ ID NO: 32717 - RNA, 21 nt, Artificial Sequence
  Guide RNA
ugcagaccgagccugagaacg

SEQ ID NO: 32718 - RNA, 21 nt, Artificial Sequence
  Guide RNA
ugcagaccgagccugaggacg

SEQ ID NO: 32719 - RNA, 21 nt, Artificial Sequence
  Guide RNA
uggcaguuucuauaggcgucc

SEQ ID NO: 32720 - RNA, 21 nt, Artificial Sequence
  Guide RNA
uggcaguuucuauaggcguuc

SEQ ID NO: 32721 - RNA, 21 nt, Artificial Sequence
  Guide RNA
uucuauaggcguccucaggcu

SEQ ID NO: 32722 - RNA, 21 nt, Artificial Sequence
  Guide RNA
uucuauaggcguucucaggcu

SEQ ID NO: 32723 - RNA, 21 nt, Artificial Sequence
  Guide RNA
uucucaggcucggucugcaag

SEQ ID NO: 32724 - RNA, 21 nt, Artificial Sequence
  Guide RNA
uugcagaccgagccugagaac

SEQ ID NO: 32725 - RNA, 21 nt, Artificial Sequence
  Guide RNA
uugcagaccgagccugaggac

SEQ ID NO: 32726 - RNA, 21 nt, Artificial Sequence
  Guide RNA
uuucuauaggcguccucaggc

SEQ ID NO: 32727 - RNA, 21 nt, Artificial Sequence
  Guide RNA
uuucuauaggcguucucaggc

SEQ ID NO: 32728 - RNA, 22 nt, Artificial Sequence
  Guide RNA
aagccccuugcagaccgagccu

SEQ ID NO: 32729 - RNA, 22 nt, Artificial Sequence
  Guide RNA
accgagccugagaacgccuaua

SEQ ID NO: 32730 - RNA, 22 nt, Artificial Sequence
  Guide RNA
accgagccugaggacgccuaua

SEQ ID NO: 32731 - RNA, 22 nt, Artificial Sequence
  Guide RNA
agaacgccuauagaaacugcca

SEQ ID NO: 32732 - RNA, 22 nt, Artificial Sequence
  Guide RNA
agaccgagccugagaacgccua

SEQ ID NO: 32733 - RNA, 22 nt, Artificial Sequence
  Guide RNA
agaccgagccugaggacgccua

SEQ ID NO: 32734 - RNA, 22 nt, Artificial Sequence
  Guide RNA
agccccuugcagaccgagccug

SEQ ID NO: 32735 - RNA, 22 nt, Artificial Sequence
  Guide RNA
agccugagaacgccuauagaaa

SEQ ID NO: 32736 - RNA, 22 nt, Artificial Sequence
  Guide RNA
agccugaggacgccuauagaaa

SEQ ID NO: 32737 - RNA, 22 nt, Artificial Sequence
  Guide RNA
aggacgccuauagaaacugcca

SEQ ID NO: 32738 - RNA, 22 nt, Artificial Sequence
  Guide RNA
aggcguccucaggcucggucug

SEQ ID NO: 32739 - RNA, 22 nt, Artificial Sequence
  Guide RNA
aggcguucucaggcucggucug

SEQ ID NO: 32740 - RNA, 22 nt, Artificial Sequence
  Guide RNA
aguuucuauaggcguccucagg

SEQ ID NO: 32741 - RNA, 22 nt, Artificial Sequence
  Guide RNA
aguuucuauaggcguucucagg

SEQ ID NO: 32742 - RNA, 22 nt, Artificial Sequence
  Guide RNA
auaggcguccucaggcucgguc

SEQ ID NO: 32743 - RNA, 22 nt, Artificial Sequence
  Guide RNA
auaggcguucucaggcucgguc

SEQ ID NO: 32744 - RNA, 22 nt, Artificial Sequence
  Guide RNA
cagaccgagccugagaacgccu

SEQ ID NO: 32745 - RNA, 22 nt, Artificial Sequence
  Guide RNA
cagaccgagccugaggacgccu

SEQ ID NO: 32746 - RNA, 22 nt, Artificial Sequence
  Guide RNA
caguuucuauaggcguccucag

SEQ ID NO: 32747 - RNA, 22 nt, Artificial Sequence
  Guide RNA
caguuucuauaggcguucucag

SEQ ID NO: 32748 - RNA, 22 nt, Artificial Sequence
  Guide RNA
ccccuugcagaccgagccugag

SEQ ID NO: 32749 - RNA, 22 nt, Artificial Sequence
  Guide RNA
cccuugcagaccgagccugaga

SEQ ID NO: 32750 - RNA, 22 nt, Artificial Sequence
  Guide RNA
cccuugcagaccgagccugagg

SEQ ID NO: 32751 - RNA, 22 nt, Artificial Sequence
  Guide RNA
ccgagccugagaacgccuauag

SEQ ID NO: 32752 - RNA, 22 nt, Artificial Sequence
  Guide RNA
ccgagccugaggacgccuauag

SEQ ID NO: 32753 - RNA, 22 nt, Artificial Sequence
  Guide RNA
ccugagaacgccuauagaaacu

SEQ ID NO: 32754 - RNA, 22 nt, Artificial Sequence
  Guide RNA
ccugaggacgccuauagaaacu

SEQ ID NO: 32755 - RNA, 22 nt, Artificial Sequence
  Guide RNA
ccuugcagaccgagccugagaa

SEQ ID NO: 32756 - RNA, 22 nt, Artificial Sequence
  Guide RNA
ccuugcagaccgagccugagga

SEQ ID NO: 32757 - RNA, 22 nt, Artificial Sequence
  Guide RNA
cgagccugagaacgccuauaga

SEQ ID NO: 32758 - RNA, 22 nt, Artificial Sequence
  Guide RNA
cgagccugaggacgccuauaga

SEQ ID NO: 32759 - RNA, 22 nt, Artificial Sequence
  Guide RNA
cguccucaggcucggucugcaa

SEQ ID NO: 32760 - RNA, 22 nt, Artificial Sequence
  Guide RNA
cguucucaggcucggucugcaa

SEQ ID NO: 32761 - RNA, 22 nt, Artificial Sequence
  Guide RNA
cuauaggcguccucaggcucgg

SEQ ID NO: 32762 - RNA, 22 nt, Artificial Sequence
  Guide RNA
cuauaggcguucucaggcucgg

SEQ ID NO: 32763 - RNA, 22 nt, Artificial Sequence
  Guide RNA
cugagaacgccuauagaaacug

SEQ ID NO: 32764 - RNA, 22 nt, Artificial Sequence
  Guide RNA
cugaggacgccuauagaaacug

SEQ ID NO: 32765 - RNA, 22 nt, Artificial Sequence
  Guide RNA
cuggcaguuucuauaggcgucc

SEQ ID NO: 32766 - RNA, 22 nt, Artificial Sequence
  Guide RNA
cuggcaguuucuauaggcguuc

SEQ ID NO: 32767 - RNA, 22 nt, Artificial Sequence
  Guide RNA
cuugcagaccgagccugagaac

SEQ ID NO: 32768 - RNA, 22 nt, Artificial Sequence
  Guide RNA
cuugcagaccgagccugaggac

SEQ ID NO: 32769 - RNA, 22 nt, Artificial Sequence
  Guide RNA
gaacgccuauagaaacugccag

SEQ ID NO: 32770 - RNA, 22 nt, Artificial Sequence
  Guide RNA
gaccgagccugagaacgccuau

SEQ ID NO: 32771 - RNA, 22 nt, Artificial Sequence
  Guide RNA
gaccgagccugaggacgccuau

SEQ ID NO: 32772 - RNA, 22 nt, Artificial Sequence
  Guide RNA
gagaacgccuauagaaacugcc

SEQ ID NO: 32773 - RNA, 22 nt, Artificial Sequence
  Guide RNA
gagccugagaacgccuauagaa

SEQ ID NO: 32774 - RNA, 22 nt, Artificial Sequence
  Guide RNA
gagccugaggacgccuauagaa

SEQ ID NO: 32775 - RNA, 22 nt, Artificial Sequence
  Guide RNA
gaggacgccuauagaaacugcc

SEQ ID NO: 32776 - RNA, 22 nt, Artificial Sequence
  Guide RNA
gcagaccgagccugagaacgcc

SEQ ID NO: 32777 - RNA, 22 nt, Artificial Sequence
  Guide RNA
gcagaccgagccugaggacgcc

SEQ ID NO: 32778 - RNA, 22 nt, Artificial Sequence
  Guide RNA
gcaguuucuauaggcguccuca

SEQ ID NO: 32779 - RNA, 22 nt, Artificial Sequence
  Guide RNA
gcaguuucuauaggcguucuca

SEQ ID NO: 32780 - RNA, 22 nt, Artificial Sequence
  Guide RNA
gccccuugcagaccgagccuga

SEQ ID NO: 32781 - RNA, 22 nt, Artificial Sequence
  Guide RNA
gccugagaacgccuauagaaac

SEQ ID NO: 32782 - RNA, 22 nt, Artificial Sequence
  Guide RNA
gccugaggacgccuauagaaac

SEQ ID NO: 32783 - RNA, 22 nt, Artificial Sequence
  Guide RNA
gcguccucaggcucggucugca

SEQ ID NO: 32784 - RNA, 22 nt, Artificial Sequence
  Guide RNA
gcguucucaggcucggucugca

SEQ ID NO: 32785 - RNA, 22 nt, Artificial Sequence
  Guide RNA
ggacgccuauagaaacugccag

SEQ ID NO: 32786 - RNA, 22 nt, Artificial Sequence
  Guide RNA
ggcaguuucuauaggcguccuc

SEQ ID NO: 32787 - RNA, 22 nt, Artificial Sequence
  Guide RNA
ggcaguuucuauaggcguucuc

SEQ ID NO: 32788 - RNA, 22 nt, Artificial Sequence
  Guide RNA
ggcguccucaggcucggucugc

SEQ ID NO: 32789 - RNA, 22 nt, Artificial Sequence
  Guide RNA
ggcguucucaggcucggucugc

SEQ ID NO: 32790 - RNA, 22 nt, Artificial Sequence
  Guide RNA
ggggucuggcaguuucuauagg

SEQ ID NO: 32791 - RNA, 22 nt, Artificial Sequence
  Guide RNA
gggucuggcaguuucuauaggc

SEQ ID NO: 32792 - RNA, 22 nt, Artificial Sequence
  Guide RNA
ggucuggcaguuucuauaggcg

SEQ ID NO: 32793 - RNA, 22 nt, Artificial Sequence
  Guide RNA
guccucaggcucggucugcaag

SEQ ID NO: 32794 - RNA, 22 nt, Artificial Sequence
  Guide RNA
gucuggcaguuucuauaggcgu

SEQ ID NO: 32795 - RNA, 22 nt, Artificial Sequence
  Guide RNA
guucucaggcucggucugcaag

SEQ ID NO: 32796 - RNA, 22 nt, Artificial Sequence
  Guide RNA
guuucuauaggcguccucaggc

SEQ ID NO: 32797 - RNA, 22 nt, Artificial Sequence
  Guide RNA
guuucuauaggcguucucaggc

SEQ ID NO: 32798 - RNA, 22 nt, Artificial Sequence
  Guide RNA
uaggcguccucaggcucggucu

SEQ ID NO: 32799 - RNA, 22 nt, Artificial Sequence
  Guide RNA
uaggcguucucaggcucggucu

SEQ ID NO: 32800 - RNA, 22 nt, Artificial Sequence
  Guide RNA
uauaggcguccucaggcucggu

SEQ ID NO: 32801 - RNA, 22 nt, Artificial Sequence
  Guide RNA
uauaggcguucucaggcucggu

SEQ ID NO: 32802 - RNA, 22 nt, Artificial Sequence
  Guide RNA
uccucaggcucggucugcaagg

SEQ ID NO: 32803 - RNA, 22 nt, Artificial Sequence
  Guide RNA
ucuauaggcguccucaggcucg

SEQ ID NO: 32804 - RNA, 22 nt, Artificial Sequence
  Guide RNA
ucuauaggcguucucaggcucg

SEQ ID NO: 32805 - RNA, 22 nt, Artificial Sequence
  Guide RNA
ucuggcaguuucuauaggcguc

SEQ ID NO: 32806 - RNA, 22 nt, Artificial Sequence
  Guide RNA
ucuggcaguuucuauaggcguu

SEQ ID NO: 32807 - RNA, 22 nt, Artificial Sequence
  Guide RNA
ugagaacgccuauagaaacugc

SEQ ID NO: 32808 - RNA, 22 nt, Artificial Sequence
  Guide RNA
ugaggacgccuauagaaacugc

SEQ ID NO: 32809 - RNA, 22 nt, Artificial Sequence
  Guide RNA
ugcagaccgagccugagaacgc

SEQ ID NO: 32810 - RNA, 22 nt, Artificial Sequence
  Guide RNA
ugcagaccgagccugaggacgc

SEQ ID NO: 32811 - RNA, 22 nt, Artificial Sequence
  Guide RNA
uggcaguuucuauaggcguccu

SEQ ID NO: 32812 - RNA, 22 nt, Artificial Sequence
  Guide RNA
uggcaguuucuauaggcguucu

SEQ ID NO: 32813 - RNA, 22 nt, Artificial Sequence
  Guide RNA
uucuauaggcguccucaggcuc

SEQ ID NO: 32814 - RNA, 22 nt, Artificial Sequence
  Guide RNA
uucuauaggcguucucaggcuc

SEQ ID NO: 32815 - RNA, 22 nt, Artificial Sequence
  Guide RNA
uucucaggcucggucugcaagg

SEQ ID NO: 32816 - RNA, 22 nt, Artificial Sequence
  Guide RNA
uugcagaccgagccugagaacg

SEQ ID NO: 32817 - RNA, 22 nt, Artificial Sequence
  Guide RNA
uugcagaccgagccugaggacg

SEQ ID NO: 32818 - RNA, 22 nt, Artificial Sequence
  Guide RNA
uuucuauaggcguccucaggcu

SEQ ID NO: 32819 - RNA, 22 nt, Artificial Sequence
  Guide RNA
uuucuauaggcguucucaggcu

SEQ ID NO: 32820 - RNA, 20 nt, Artificial Sequence
  Guide RNA
aaauacauuucacacacaca

SEQ ID NO: 32821 - RNA, 20 nt, Artificial Sequence
  Guide RNA
aaauccauuucacacacaca

SEQ ID NO: 32822 - RNA, 20 nt, Artificial Sequence
  Guide RNA
aauaaauccauuucacacac

SEQ ID NO: 32823 - RNA, 20 nt, Artificial Sequence
  Guide RNA
aauacauuucacacacacac

SEQ ID NO: 32824 - RNA, 20 nt, Artificial Sequence
  Guide RNA
aauccauuucacacacacac

SEQ ID NO: 32825 - RNA, 20 nt, Artificial Sequence
  Guide RNA
auaaauccauuucacacaca

SEQ ID NO: 32826 - RNA, 20 nt, Artificial Sequence
  Guide RNA
auacauuucacacacacaca

SEQ ID NO: 32827 - RNA, 20 nt, Artificial Sequence
  Guide RNA
auccauuucacacacacaca

SEQ ID NO: 32828 - RNA, 20 nt, Artificial Sequence
  Guide RNA
gugugugaaauggauuuauu

SEQ ID NO: 32829 - RNA, 20 nt, Artificial Sequence
  Guide RNA
gugugugugaaauggauuua

SEQ ID NO: 32830 - RNA, 20 nt, Artificial Sequence
  Guide RNA
gugugugugaaauguauuua

SEQ ID NO: 32831 - RNA, 20 nt, Artificial Sequence
  Guide RNA
gugugugugugaaauggauu

SEQ ID NO: 32832 - RNA, 20 nt, Artificial Sequence
  Guide RNA
gugugugugugaaauguauu

SEQ ID NO: 32833 - RNA, 20 nt, Artificial Sequence
  Guide RNA
gugugugugugugaaaugga

SEQ ID NO: 32834 - RNA, 20 nt, Artificial Sequence
  Guide RNA
gugugugugugugaaaugua

SEQ ID NO: 32835 - RNA, 20 nt, Artificial Sequence
  Guide RNA
gugugugugugugugaaaug

SEQ ID NO: 32836 - RNA, 20 nt, Artificial Sequence
  Guide RNA
uaaauacauuucacacacac

SEQ ID NO: 32837 - RNA, 20 nt, Artificial Sequence
  Guide RNA
uaaauccauuucacacacac

SEQ ID NO: 32838 - RNA, 20 nt, Artificial Sequence
  Guide RNA
ugugugugaaauggauuuau

SEQ ID NO: 32839 - RNA, 20 nt, Artificial Sequence
  Guide RNA
ugugugugugaaauggauuu

SEQ ID NO: 32840 - RNA, 20 nt, Artificial Sequence
  Guide RNA
ugugugugugaaauguauuu

SEQ ID NO: 32841 - RNA, 20 nt, Artificial Sequence
  Guide RNA
ugugugugugugaaauggau

SEQ ID NO: 32842 - RNA, 20 nt, Artificial Sequence
  Guide RNA
ugugugugugugaaauguau

SEQ ID NO: 32843 - RNA, 20 nt, Artificial Sequence
  Guide RNA
ugugugugugugugaaaugg

SEQ ID NO: 32844 - RNA, 20 nt, Artificial Sequence
  Guide RNA
ugugugugugugugaaaugu

SEQ ID NO: 32845 - RNA, 20 nt, Artificial Sequence
  Guide RNA
ugugugugugugugugaaau

SEQ ID NO: 32846 - RNA, 21 nt, Artificial Sequence
  Guide RNA
aaauacauuucacacacacac

SEQ ID NO: 32847 - RNA, 21 nt, Artificial Sequence
  Guide RNA
aaauccauuucacacacacac

SEQ ID NO: 32848 - RNA, 21 nt, Artificial Sequence
  Guide RNA
aauacauuucacacacacaca

SEQ ID NO: 32849 - RNA, 21 nt, Artificial Sequence
  Guide RNA
aauccauuucacacacacaca

SEQ ID NO: 32850 - RNA, 21 nt, Artificial Sequence
  Guide RNA
auaaauccauuucacacacac

SEQ ID NO: 32851 - RNA, 21 nt, Artificial Sequence
  Guide RNA
auacauuucacacacacacac

SEQ ID NO: 32852 - RNA, 21 nt, Artificial Sequence
  Guide RNA
auccauuucacacacacacac

SEQ ID NO: 32853 - RNA, 21 nt, Artificial Sequence
  Guide RNA
gugugugugaaauggauuuau

SEQ ID NO: 32854 - RNA, 21 nt, Artificial Sequence
  Guide RNA
gugugugugugaaauggauuu

SEQ ID NO: 32855 - RNA, 21 nt, Artificial Sequence
  Guide RNA
gugugugugugaaauguauuu

SEQ ID NO: 32856 - RNA, 21 nt, Artificial Sequence
  Guide RNA
gugugugugugugaaauggau

SEQ ID NO: 32857 - RNA, 21 nt, Artificial Sequence
  Guide RNA
gugugugugugugaaauguau

SEQ ID NO: 32858 - RNA, 21 nt, Artificial Sequence
  Guide RNA
gugugugugugugugaaaugg

SEQ ID NO: 32859 - RNA, 21 nt, Artificial Sequence
  Guide RNA
gugugugugugugugaaaugu

SEQ ID NO: 32860 - RNA, 21 nt, Artificial Sequence
  Guide RNA
gugugugugugugugugaaau

SEQ ID NO: 32861 - RNA, 21 nt, Artificial Sequence
  Guide RNA
uaaauccauuucacacacaca

SEQ ID NO: 32862 - RNA, 21 nt, Artificial Sequence
  Guide RNA
ugugugugugaaauggauuua

SEQ ID NO: 32863 - RNA, 21 nt, Artificial Sequence
  Guide RNA
ugugugugugugaaauggauu

SEQ ID NO: 32864 - RNA, 21 nt, Artificial Sequence
  Guide RNA
ugugugugugugaaauguauu

SEQ ID NO: 32865 - RNA, 21 nt, Artificial Sequence
  Guide RNA
ugugugugugugugaaaugga

SEQ ID NO: 32866 - RNA, 21 nt, Artificial Sequence
  Guide RNA
ugugugugugugugaaaugua

SEQ ID NO: 32867 - RNA, 21 nt, Artificial Sequence
  Guide RNA
ugugugugugugugugaaaug

SEQ ID NO: 32868 - RNA, 22 nt, Artificial Sequence
  Guide RNA
aaauacauuucacacacacaca

SEQ ID NO: 32869 - RNA, 22 nt, Artificial Sequence
  Guide RNA
aaauccauuucacacacacaca

SEQ ID NO: 32870 - RNA, 22 nt, Artificial Sequence
  Guide RNA
aauaaauccauuucacacacac

SEQ ID NO: 32871 - RNA, 22 nt, Artificial Sequence
  Guide RNA
aauacauuucacacacacacac

SEQ ID NO: 32872 - RNA, 22 nt, Artificial Sequence
  Guide RNA
aauccauuucacacacacacac

SEQ ID NO: 32873 - RNA, 22 nt, Artificial Sequence
  Guide RNA
auaaauccauuucacacacaca

SEQ ID NO: 32874 - RNA, 22 nt, Artificial Sequence
  Guide RNA
auacauuucacacacacacaca

SEQ ID NO: 32875 - RNA, 22 nt, Artificial Sequence
  Guide RNA
auccauuucacacacacacaca

SEQ ID NO: 32876 - RNA, 22 nt, Artificial Sequence
  Guide RNA
gugugugugaaauggauuuauu

SEQ ID NO: 32877 - RNA, 22 nt, Artificial Sequence
  Guide RNA
gugugugugugaaauggauuua

SEQ ID NO: 32878 - RNA, 22 nt, Artificial Sequence
  Guide RNA
gugugugugugaaauguauuua

SEQ ID NO: 32879 - RNA, 22 nt, Artificial Sequence
  Guide RNA
gugugugugugugaaauggauu

SEQ ID NO: 32880 - RNA, 22 nt, Artificial Sequence
  Guide RNA
gugugugugugugaaauguauu

SEQ ID NO: 32881 - RNA, 22 nt, Artificial Sequence
  Guide RNA
gugugugugugugugaaaugga

SEQ ID NO: 32882 - RNA, 22 nt, Artificial Sequence
  Guide RNA
gugugugugugugugaaaugua

SEQ ID NO: 32883 - RNA, 22 nt, Artificial Sequence
  Guide RNA
gugugugugugugugugaaaug

SEQ ID NO: 32884 - RNA, 22 nt, Artificial Sequence
  Guide RNA
uaaauacauuucacacacacac

SEQ ID NO: 32885 - RNA, 22 nt, Artificial Sequence
  Guide RNA
uaaauccauuucacacacacac

SEQ ID NO: 32886 - RNA, 22 nt, Artificial Sequence
  Guide RNA
ugugugugugaaauggauuuau

SEQ ID NO: 32887 - RNA, 22 nt, Artificial Sequence
  Guide RNA
ugugugugugugaaauggauuu

SEQ ID NO: 32888 - RNA, 22 nt, Artificial Sequence
  Guide RNA
ugugugugugugaaauguauuu

SEQ ID NO: 32889 - RNA, 22 nt, Artificial Sequence
  Guide RNA
ugugugugugugugaaauggau

SEQ ID NO: 32890 - RNA, 22 nt, Artificial Sequence
  Guide RNA
ugugugugugugugaaauguau

SEQ ID NO: 32891 - RNA, 22 nt, Artificial Sequence
  Guide RNA
ugugugugugugugugaaaugg

SEQ ID NO: 32892 - RNA, 22 nt, Artificial Sequence
  Guide RNA
ugugugugugugugugaaaugu

SEQ ID NO: 32893 - RNA, 22 nt, Artificial Sequence
  Guide RNA
ugugugugugugugugugaaau

SEQ ID NO: 32894 - RNA, 20 nt, Artificial Sequence
  Guide RNA
acaucucugacugguccugc

SEQ ID NO: 32895 - RNA, 20 nt, Artificial Sequence
  Guide RNA
accagucagagaguggggca

SEQ ID NO: 32896 - RNA, 20 nt, Artificial Sequence
  Guide RNA
accagucagagauguggggc

SEQ ID NO: 32897 - RNA, 20 nt, Artificial Sequence
  Guide RNA
acucucugacugguccugcc

SEQ ID NO: 32898 - RNA, 20 nt, Artificial Sequence
  Guide RNA
agagaguggggcagaggggc

SEQ ID NO: 32899 - RNA, 20 nt, Artificial Sequence
  Guide RNA
agagauguggggcagagggg

SEQ ID NO: 32900 - RNA, 20 nt, Artificial Sequence
  Guide RNA
agaguggggcagaggggcag

SEQ ID NO: 32901 - RNA, 20 nt, Artificial Sequence
  Guide RNA
agauguggggcagaggggca

SEQ ID NO: 32902 - RNA, 20 nt, Artificial Sequence
  Guide RNA
aggaccagucagagaguggg

SEQ ID NO: 32903 - RNA, 20 nt, Artificial Sequence
  Guide RNA
aggaccagucagagaugugg

SEQ ID NO: 32904 - RNA, 20 nt, Artificial Sequence
  Guide RNA
agucagagaguggggcagag

SEQ ID NO: 32905 - RNA, 20 nt, Artificial Sequence
  Guide RNA
agucagagauguggggcaga

SEQ ID NO: 32906 - RNA, 20 nt, Artificial Sequence
  Guide RNA
aucucugacugguccugccg

SEQ ID NO: 32907 - RNA, 20 nt, Artificial Sequence
  Guide RNA
cacaucucugacugguccug

SEQ ID NO: 32908 - RNA, 20 nt, Artificial Sequence
  Guide RNA
cacucucugacugguccugc

SEQ ID NO: 32909 - RNA, 20 nt, Artificial Sequence
  Guide RNA
cagagaguggggcagagggg

SEQ ID NO: 32910 - RNA, 20 nt, Artificial Sequence
  Guide RNA
cagagauguggggcagaggg

SEQ ID NO: 32911 - RNA, 20 nt, Artificial Sequence
  Guide RNA
caggaccagucagagagugg

SEQ ID NO: 32912 - RNA, 20 nt, Artificial Sequence
  Guide RNA
caggaccagucagagaugug

SEQ ID NO: 32913 - RNA, 20 nt, Artificial Sequence
  Guide RNA
cagucagagaguggggcaga

SEQ ID NO: 32914 - RNA, 20 nt, Artificial Sequence
  Guide RNA
cagucagagauguggggcag

SEQ ID NO: 32915 - RNA, 20 nt, Artificial Sequence
  Guide RNA
caucucugacugguccugcc

SEQ ID NO: 32916 - RNA, 20 nt, Artificial Sequence
  Guide RNA
ccacaucucugacugguccu

SEQ ID NO: 32917 - RNA, 20 nt, Artificial Sequence
  Guide RNA
ccacucucugacugguccug

SEQ ID NO: 32918 - RNA, 20 nt, Artificial Sequence
  Guide RNA
ccagucagagaguggggcag

SEQ ID NO: 32919 - RNA, 20 nt, Artificial Sequence
  Guide RNA
ccagucagagauguggggca

SEQ ID NO: 32920 - RNA, 20 nt, Artificial Sequence
  Guide RNA
cccacaucucugacuggucc

SEQ ID NO: 32921 - RNA, 20 nt, Artificial Sequence
  Guide RNA
cccacucucugacugguccu

SEQ ID NO: 32922 - RNA, 20 nt, Artificial Sequence
  Guide RNA
ccccacaucucugacugguc

SEQ ID NO: 32923 - RNA, 20 nt, Artificial Sequence
  Guide RNA
ccccacucucugacuggucc

SEQ ID NO: 32924 - RNA, 20 nt, Artificial Sequence
  Guide RNA
ccccucugccccacaucucu

SEQ ID NO: 32925 - RNA, 20 nt, Artificial Sequence
  Guide RNA
ccccucugccccacucucug

SEQ ID NO: 32926 - RNA, 20 nt, Artificial Sequence
  Guide RNA
cccucugccccacaucucug

SEQ ID NO: 32927 - RNA, 20 nt, Artificial Sequence
  Guide RNA
cccucugccccacucucuga

SEQ ID NO: 32928 - RNA, 20 nt, Artificial Sequence
  Guide RNA
ccuccugccccucugcccca

SEQ ID NO: 32929 - RNA, 20 nt, Artificial Sequence
  Guide RNA
ccucugccccacaucucuga

SEQ ID NO: 32930 - RNA, 20 nt, Artificial Sequence
  Guide RNA
ccucugccccacucucugac

SEQ ID NO: 32931 - RNA, 20 nt, Artificial Sequence
  Guide RNA
ccugccccucugccccacau

SEQ ID NO: 32932 - RNA, 20 nt, Artificial Sequence
  Guide RNA
ccugccccucugccccacuc

SEQ ID NO: 32933 - RNA, 20 nt, Artificial Sequence
  Guide RNA
cggcaggaccagucagagag

SEQ ID NO: 32934 - RNA, 20 nt, Artificial Sequence
  Guide RNA
cggcaggaccagucagagau

SEQ ID NO: 32935 - RNA, 20 nt, Artificial Sequence
  Guide RNA
cuccuccugccccucugccc

SEQ ID NO: 32936 - RNA, 20 nt, Artificial Sequence
  Guide RNA
cuccugccccucugccccac

SEQ ID NO: 32937 - RNA, 20 nt, Artificial Sequence
  Guide RNA
cucggcaggaccagucagag

SEQ ID NO: 32938 - RNA, 20 nt, Artificial Sequence
  Guide RNA
cucucugacugguccugccg

SEQ ID NO: 32939 - RNA, 20 nt, Artificial Sequence
  Guide RNA
cucugccccacaucucugac

SEQ ID NO: 32940 - RNA, 20 nt, Artificial Sequence
  Guide RNA
cucugccccacucucugacu

SEQ ID NO: 32941 - RNA, 20 nt, Artificial Sequence
  Guide RNA
cugccccacaucucugacug

SEQ ID NO: 32942 - RNA, 20 nt, Artificial Sequence
  Guide RNA
cugccccacucucugacugg

SEQ ID NO: 32943 - RNA, 20 nt, Artificial Sequence
  Guide RNA
cugccccucugccccacauc

SEQ ID NO: 32944 - RNA, 20 nt, Artificial Sequence
  Guide RNA
cugccccucugccccacucu

SEQ ID NO: 32945 - RNA, 20 nt, Artificial Sequence
  Guide RNA
gaccagucagagaguggggc

SEQ ID NO: 32946 - RNA, 20 nt, Artificial Sequence
  Guide RNA
gaccagucagagaugugggg

SEQ ID NO: 32947 - RNA, 20 nt, Artificial Sequence
  Guide RNA
gagaguggggcagaggggca

SEQ ID NO: 32948 - RNA, 20 nt, Artificial Sequence
  Guide RNA
gagauguggggcagaggggc

SEQ ID NO: 32949 - RNA, 20 nt, Artificial Sequence
  Guide RNA
gaguggggcagaggggcagg

SEQ ID NO: 32950 - RNA, 20 nt, Artificial Sequence
  Guide RNA
gauguggggcagaggggcag

SEQ ID NO: 32951 - RNA, 20 nt, Artificial Sequence
  Guide RNA
gcaggaccagucagagagug

SEQ ID NO: 32952 - RNA, 20 nt, Artificial Sequence
  Guide RNA
gcaggaccagucagagaugu

SEQ ID NO: 32953 - RNA, 20 nt, Artificial Sequence
  Guide RNA
gccccacaucucugacuggu

SEQ ID NO: 32954 - RNA, 20 nt, Artificial Sequence
  Guide RNA
gccccacucucugacugguc

SEQ ID NO: 32955 - RNA, 20 nt, Artificial Sequence
  Guide RNA
gccccucugccccacaucuc

SEQ ID NO: 32956 - RNA, 20 nt, Artificial Sequence
  Guide RNA
gccccucugccccacucucu

SEQ ID NO: 32957 - RNA, 20 nt, Artificial Sequence
  Guide RNA
ggaccagucagagagugggg

SEQ ID NO: 32958 - RNA, 20 nt, Artificial Sequence
  Guide RNA
ggaccagucagagauguggg

SEQ ID NO: 32959 - RNA, 20 nt, Artificial Sequence
  Guide RNA
ggcaggaccagucagagagu

SEQ ID NO: 32960 - RNA, 20 nt, Artificial Sequence
  Guide RNA
ggcaggaccagucagagaug

SEQ ID NO: 32961 - RNA, 20 nt, Artificial Sequence
  Guide RNA
gucagagaguggggcagagg

SEQ ID NO: 32962 - RNA, 20 nt, Artificial Sequence
  Guide RNA
gucagagauguggggcagag

SEQ ID NO: 32963 - RNA, 20 nt, Artificial Sequence
  Guide RNA
gucucggcaggaccagucag

SEQ ID NO: 32964 - RNA, 20 nt, Artificial Sequence
  Guide RNA
ucagagaguggggcagaggg

SEQ ID NO: 32965 - RNA, 20 nt, Artificial Sequence
  Guide RNA
ucagagauguggggcagagg

SEQ ID NO: 32966 - RNA, 20 nt, Artificial Sequence
  Guide RNA
uccuccugccccucugcccc

SEQ ID NO: 32967 - RNA, 20 nt, Artificial Sequence
  Guide RNA
uccugccccucugccccaca

SEQ ID NO: 32968 - RNA, 20 nt, Artificial Sequence
  Guide RNA
uccugccccucugccccacu

SEQ ID NO: 32969 - RNA, 20 nt, Artificial Sequence
  Guide RNA
ucggcaggaccagucagaga

SEQ ID NO: 32970 - RNA, 20 nt, Artificial Sequence
  Guide RNA
ucucggcaggaccagucaga

SEQ ID NO: 32971 - RNA, 20 nt, Artificial Sequence
  Guide RNA
ucugccccacaucucugacu

SEQ ID NO: 32972 - RNA, 20 nt, Artificial Sequence
  Guide RNA
ucugccccacucucugacug

SEQ ID NO: 32973 - RNA, 20 nt, Artificial Sequence
  Guide RNA
ugccccacaucucugacugg

SEQ ID NO: 32974 - RNA, 20 nt, Artificial Sequence
  Guide RNA
ugccccacucucugacuggu

SEQ ID NO: 32975 - RNA, 20 nt, Artificial Sequence
  Guide RNA
ugccccucugccccacaucu

SEQ ID NO: 32976 - RNA, 20 nt, Artificial Sequence
  Guide RNA
ugccccucugccccacucuc

SEQ ID NO: 32977 - RNA, 20 nt, Artificial Sequence
  Guide RNA
ugucucggcaggaccaguca

SEQ ID NO: 32978 - RNA, 21 nt, Artificial Sequence
  Guide RNA
acaucucugacugguccugcc

SEQ ID NO: 32979 - RNA, 21 nt, Artificial Sequence
  Guide RNA
accagucagagaguggggcag

SEQ ID NO: 32980 - RNA, 21 nt, Artificial Sequence
  Guide RNA
accagucagagauguggggca

SEQ ID NO: 32981 - RNA, 21 nt, Artificial Sequence
  Guide RNA
acucucugacugguccugccg

SEQ ID NO: 32982 - RNA, 21 nt, Artificial Sequence
  Guide RNA
agagaguggggcagaggggca

SEQ ID NO: 32983 - RNA, 21 nt, Artificial Sequence
  Guide RNA
agagauguggggcagaggggc

SEQ ID NO: 32984 - RNA, 21 nt, Artificial Sequence
  Guide RNA
agaguggggcagaggggcagg

SEQ ID NO: 32985 - RNA, 21 nt, Artificial Sequence
  Guide RNA
agauguggggcagaggggcag

SEQ ID NO: 32986 - RNA, 21 nt, Artificial Sequence
  Guide RNA
aggaccagucagagagugggg

SEQ ID NO: 32987 - RNA, 21 nt, Artificial Sequence
  Guide RNA
aggaccagucagagauguggg

SEQ ID NO: 32988 - RNA, 21 nt, Artificial Sequence
  Guide RNA
agucagagaguggggcagagg

SEQ ID NO: 32989 - RNA, 21 nt, Artificial Sequence
  Guide RNA
agucagagauguggggcagag

SEQ ID NO: 32990 - RNA, 21 nt, Artificial Sequence
  Guide RNA
aucucugacugguccugccga

SEQ ID NO: 32991 - RNA, 21 nt, Artificial Sequence
  Guide RNA
cacaucucugacugguccugc

SEQ ID NO: 32992 - RNA, 21 nt, Artificial Sequence
  Guide RNA
cacucucugacugguccugcc

SEQ ID NO: 32993 - RNA, 21 nt, Artificial Sequence
  Guide RNA
cagagaguggggcagaggggc

SEQ ID NO: 32994 - RNA, 21 nt, Artificial Sequence
  Guide RNA
cagagauguggggcagagggg

SEQ ID NO: 32995 - RNA, 21 nt, Artificial Sequence
  Guide RNA
caggaccagucagagaguggg

SEQ ID NO: 32996 - RNA, 21 nt, Artificial Sequence
  Guide RNA
caggaccagucagagaugugg

SEQ ID NO: 32997 - RNA, 21 nt, Artificial Sequence
  Guide RNA
cagucagagaguggggcagag

SEQ ID NO: 32998 - RNA, 21 nt, Artificial Sequence
  Guide RNA
cagucagagauguggggcaga

SEQ ID NO: 32999 - RNA, 21 nt, Artificial Sequence
  Guide RNA
caucucugacugguccugccg

SEQ ID NO: 33000 - RNA, 21 nt, Artificial Sequence
  Guide RNA
ccacaucucugacugguccug

SEQ ID NO: 33001 - RNA, 21 nt, Artificial Sequence
  Guide RNA
ccacucucugacugguccugc

SEQ ID NO: 33002 - RNA, 21 nt, Artificial Sequence
  Guide RNA
ccagucagagaguggggcaga

SEQ ID NO: 33003 - RNA, 21 nt, Artificial Sequence
  Guide RNA
ccagucagagauguggggcag

SEQ ID NO: 33004 - RNA, 21 nt, Artificial Sequence
  Guide RNA
cccacaucucugacugguccu

SEQ ID NO: 33005 - RNA, 21 nt, Artificial Sequence
  Guide RNA
cccacucucugacugguccug

SEQ ID NO: 33006 - RNA, 21 nt, Artificial Sequence
  Guide RNA
ccccacaucucugacuggucc

SEQ ID NO: 33007 - RNA, 21 nt, Artificial Sequence
  Guide RNA
ccccacucucugacugguccu

SEQ ID NO: 33008 - RNA, 21 nt, Artificial Sequence
  Guide RNA
ccccucugccccacaucucug

SEQ ID NO: 33009 - RNA, 21 nt, Artificial Sequence
  Guide RNA
ccccucugccccacucucuga

SEQ ID NO: 33010 - RNA, 21 nt, Artificial Sequence
  Guide RNA
cccucugccccacaucucuga

SEQ ID NO: 33011 - RNA, 21 nt, Artificial Sequence
  Guide RNA
cccucugccccacucucugac

SEQ ID NO: 33012 - RNA, 21 nt, Artificial Sequence
  Guide RNA
ccuccugccccucugccccac

SEQ ID NO: 33013 - RNA, 21 nt, Artificial Sequence
  Guide RNA
ccucugccccacaucucugac

SEQ ID NO: 33014 - RNA, 21 nt, Artificial Sequence
  Guide RNA
ccucugccccacucucugacu

SEQ ID NO: 33015 - RNA, 21 nt, Artificial Sequence
  Guide RNA
ccugccccucugccccacauc

SEQ ID NO: 33016 - RNA, 21 nt, Artificial Sequence
  Guide RNA
ccugccccucugccccacucu

SEQ ID NO: 33017 - RNA, 21 nt, Artificial Sequence
  Guide RNA
cggcaggaccagucagagagu

SEQ ID NO: 33018 - RNA, 21 nt, Artificial Sequence
  Guide RNA
cggcaggaccagucagagaug

SEQ ID NO: 33019 - RNA, 21 nt, Artificial Sequence
  Guide RNA
cuccuccugccccucugcccc

SEQ ID NO: 33020 - RNA, 21 nt, Artificial Sequence
  Guide RNA
cuccugccccucugccccaca

SEQ ID NO: 33021 - RNA, 21 nt, Artificial Sequence
  Guide RNA
cuccugccccucugccccacu

SEQ ID NO: 33022 - RNA, 21 nt, Artificial Sequence
  Guide RNA
cucggcaggaccagucagaga

SEQ ID NO: 33023 - RNA, 21 nt, Artificial Sequence
  Guide RNA
cucucugacugguccugccga

SEQ ID NO: 33024 - RNA, 21 nt, Artificial Sequence
  Guide RNA
cucugccccacaucucugacu

SEQ ID NO: 33025 - RNA, 21 nt, Artificial Sequence
  Guide RNA
cucugccccacucucugacug

SEQ ID NO: 33026 - RNA, 21 nt, Artificial Sequence
  Guide RNA
cugccccacaucucugacugg

SEQ ID NO: 33027 - RNA, 21 nt, Artificial Sequence
  Guide RNA
cugccccacucucugacuggu

SEQ ID NO: 33028 - RNA, 21 nt, Artificial Sequence
  Guide RNA
cugccccucugccccacaucu

SEQ ID NO: 33029 - RNA, 21 nt, Artificial Sequence
  Guide RNA
cugccccucugccccacucuc

SEQ ID NO: 33030 - RNA, 21 nt, Artificial Sequence
  Guide RNA
gaccagucagagaguggggca

SEQ ID NO: 33031 - RNA, 21 nt, Artificial Sequence
  Guide RNA
gaccagucagagauguggggc

SEQ ID NO: 33032 - RNA, 21 nt, Artificial Sequence
  Guide RNA
gagaguggggcagaggggcag

SEQ ID NO: 33033 - RNA, 21 nt, Artificial Sequence
  Guide RNA
gagauguggggcagaggggca

SEQ ID NO: 33034 - RNA, 21 nt, Artificial Sequence
  Guide RNA
gaguggggcagaggggcagga

SEQ ID NO: 33035 - RNA, 21 nt, Artificial Sequence
  Guide RNA
gauguggggcagaggggcagg

SEQ ID NO: 33036 - RNA, 21 nt, Artificial Sequence
  Guide RNA
gcaggaccagucagagagugg

SEQ ID NO: 33037 - RNA, 21 nt, Artificial Sequence
  Guide RNA
gcaggaccagucagagaugug

SEQ ID NO: 33038 - RNA, 21 nt, Artificial Sequence
  Guide RNA
gccccacaucucugacugguc

SEQ ID NO: 33039 - RNA, 21 nt, Artificial Sequence
  Guide RNA
gccccacucucugacuggucc

SEQ ID NO: 33040 - RNA, 21 nt, Artificial Sequence
  Guide RNA
gccccucugccccacaucucu

SEQ ID NO: 33041 - RNA, 21 nt, Artificial Sequence
  Guide RNA
gccccucugccccacucucug

SEQ ID NO: 33042 - RNA, 21 nt, Artificial Sequence
  Guide RNA
ggaccagucagagaguggggc

SEQ ID NO: 33043 - RNA, 21 nt, Artificial Sequence
  Guide RNA
ggaccagucagagaugugggg

SEQ ID NO: 33044 - RNA, 21 nt, Artificial Sequence
  Guide RNA
ggcaggaccagucagagagug

SEQ ID NO: 33045 - RNA, 21 nt, Artificial Sequence
  Guide RNA
ggcaggaccagucagagaugu

SEQ ID NO: 33046 - RNA, 21 nt, Artificial Sequence
  Guide RNA
gucagagaguggggcagaggg

SEQ ID NO: 33047 - RNA, 21 nt, Artificial Sequence
  Guide RNA
gucagagauguggggcagagg

SEQ ID NO: 33048 - RNA, 21 nt, Artificial Sequence
  Guide RNA
gucucggcaggaccagucaga

SEQ ID NO: 33049 - RNA, 21 nt, Artificial Sequence
  Guide RNA
gugucucggcaggaccaguca

SEQ ID NO: 33050 - RNA, 21 nt, Artificial Sequence
  Guide RNA
ucagagaguggggcagagggg

SEQ ID NO: 33051 - RNA, 21 nt, Artificial Sequence
  Guide RNA
ucagagauguggggcagaggg

SEQ ID NO: 33052 - RNA, 21 nt, Artificial Sequence
  Guide RNA
uccuccugccccucugcccca

SEQ ID NO: 33053 - RNA, 21 nt, Artificial Sequence
  Guide RNA
uccugccccucugccccacau

SEQ ID NO: 33054 - RNA, 21 nt, Artificial Sequence
  Guide RNA
uccugccccucugccccacuc

SEQ ID NO: 33055 - RNA, 21 nt, Artificial Sequence
  Guide RNA
ucggcaggaccagucagagag

SEQ ID NO: 33056 - RNA, 21 nt, Artificial Sequence
  Guide RNA
ucggcaggaccagucagagau

SEQ ID NO: 33057 - RNA, 21 nt, Artificial Sequence
  Guide RNA
ucuccuccugccccucugccc

SEQ ID NO: 33058 - RNA, 21 nt, Artificial Sequence
  Guide RNA
ucucggcaggaccagucagag

SEQ ID NO: 33059 - RNA, 21 nt, Artificial Sequence
  Guide RNA
ucugccccacaucucugacug

SEQ ID NO: 33060 - RNA, 21 nt, Artificial Sequence
  Guide RNA
ucugccccacucucugacugg

SEQ ID NO: 33061 - RNA, 21 nt, Artificial Sequence
  Guide RNA
ugccccacaucucugacuggu

SEQ ID NO: 33062 - RNA, 21 nt, Artificial Sequence
  Guide RNA
ugccccacucucugacugguc

SEQ ID NO: 33063 - RNA, 21 nt, Artificial Sequence
  Guide RNA
ugccccucugccccacaucuc

SEQ ID NO: 33064 - RNA, 21 nt, Artificial Sequence
  Guide RNA
ugccccucugccccacucucu

SEQ ID NO: 33065 - RNA, 21 nt, Artificial Sequence
  Guide RNA
ugucucggcaggaccagucag

SEQ ID NO: 33066 - RNA, 22 nt, Artificial Sequence
  Guide RNA
acaucucugacugguccugccg

SEQ ID NO: 33067 - RNA, 22 nt, Artificial Sequence
  Guide RNA
accagucagagaguggggcaga

SEQ ID NO: 33068 - RNA, 22 nt, Artificial Sequence
  Guide RNA
accagucagagauguggggcag

SEQ ID NO: 33069 - RNA, 22 nt, Artificial Sequence
  Guide RNA
acucucugacugguccugccga

SEQ ID NO: 33070 - RNA, 22 nt, Artificial Sequence
  Guide RNA
agagaguggggcagaggggcag

SEQ ID NO: 33071 - RNA, 22 nt, Artificial Sequence
  Guide RNA
agagauguggggcagaggggca

SEQ ID NO: 33072 - RNA, 22 nt, Artificial Sequence
  Guide RNA
agaguggggcagaggggcagga

SEQ ID NO: 33073 - RNA, 22 nt, Artificial Sequence
  Guide RNA
agauguggggcagaggggcagg

SEQ ID NO: 33074 - RNA, 22 nt, Artificial Sequence
  Guide RNA
aggaccagucagagaguggggc

SEQ ID NO: 33075 - RNA, 22 nt, Artificial Sequence
  Guide RNA
aggaccagucagagaugugggg

SEQ ID NO: 33076 - RNA, 22 nt, Artificial Sequence
  Guide RNA
agucagagaguggggcagaggg

SEQ ID NO: 33077 - RNA, 22 nt, Artificial Sequence
  Guide RNA
agucagagauguggggcagagg

SEQ ID NO: 33078 - RNA, 22 nt, Artificial Sequence
  Guide RNA
agugucucggcaggaccaguca

SEQ ID NO: 33079 - RNA, 22 nt, Artificial Sequence
  Guide RNA
aucucugacugguccugccgag

SEQ ID NO: 33080 - RNA, 22 nt, Artificial Sequence
  Guide RNA
cacaucucugacugguccugcc

SEQ ID NO: 33081 - RNA, 22 nt, Artificial Sequence
  Guide RNA
cacucucugacugguccugccg

SEQ ID NO: 33082 - RNA, 22 nt, Artificial Sequence
  Guide RNA
cagagaguggggcagaggggca

SEQ ID NO: 33083 - RNA, 22 nt, Artificial Sequence
  Guide RNA
cagagauguggggcagaggggc

SEQ ID NO: 33084 - RNA, 22 nt, Artificial Sequence
  Guide RNA
caggaccagucagagagugggg

SEQ ID NO: 33085 - RNA, 22 nt, Artificial Sequence
  Guide RNA
caggaccagucagagauguggg

SEQ ID NO: 33086 - RNA, 22 nt, Artificial Sequence
  Guide RNA
cagucagagaguggggcagagg

SEQ ID NO: 33087 - RNA, 22 nt, Artificial Sequence
  Guide RNA
cagucagagauguggggcagag

SEQ ID NO: 33088 - RNA, 22 nt, Artificial Sequence
  Guide RNA
caucucugacugguccugccga

SEQ ID NO: 33089 - RNA, 22 nt, Artificial Sequence
  Guide RNA
ccacaucucugacugguccugc

SEQ ID NO: 33090 - RNA, 22 nt, Artificial Sequence
  Guide RNA
ccacucucugacugguccugcc

SEQ ID NO: 33091 - RNA, 22 nt, Artificial Sequence
  Guide RNA
ccagucagagaguggggcagag

SEQ ID NO: 33092 - RNA, 22 nt, Artificial Sequence
  Guide RNA
ccagucagagauguggggcaga

SEQ ID NO: 33093 - RNA, 22 nt, Artificial Sequence
  Guide RNA
cccacaucucugacugguccug

SEQ ID NO: 33094 - RNA, 22 nt, Artificial Sequence
  Guide RNA
cccacucucugacugguccugc

SEQ ID NO: 33095 - RNA, 22 nt, Artificial Sequence
  Guide RNA
ccccacaucucugacugguccu

SEQ ID NO: 33096 - RNA, 22 nt, Artificial Sequence
  Guide RNA
ccccacucucugacugguccug

SEQ ID NO: 33097 - RNA, 22 nt, Artificial Sequence
  Guide RNA
ccccucugccccacaucucuga

SEQ ID NO: 33098 - RNA, 22 nt, Artificial Sequence
  Guide RNA
ccccucugccccacucucugac

SEQ ID NO: 33099 - RNA, 22 nt, Artificial Sequence
  Guide RNA
cccucugccccacaucucugac

SEQ ID NO: 33100 - RNA, 22 nt, Artificial Sequence
  Guide RNA
cccucugccccacucucugacu

SEQ ID NO: 33101 - RNA, 22 nt, Artificial Sequence
  Guide RNA
ccuccugccccucugccccaca

SEQ ID NO: 33102 - RNA, 22 nt, Artificial Sequence
  Guide RNA
ccuccugccccucugccccacu

SEQ ID NO: 33103 - RNA, 22 nt, Artificial Sequence
  Guide RNA
ccucugccccacaucucugacu

SEQ ID NO: 33104 - RNA, 22 nt, Artificial Sequence
  Guide RNA
ccucugccccacucucugacug

SEQ ID NO: 33105 - RNA, 22 nt, Artificial Sequence
  Guide RNA
ccugccccucugccccacaucu

SEQ ID NO: 33106 - RNA, 22 nt, Artificial Sequence
  Guide RNA
ccugccccucugccccacucuc

SEQ ID NO: 33107 - RNA, 22 nt, Artificial Sequence
  Guide RNA
cggcaggaccagucagagagug

SEQ ID NO: 33108 - RNA, 22 nt, Artificial Sequence
  Guide RNA
cggcaggaccagucagagaugu

SEQ ID NO: 33109 - RNA, 22 nt, Artificial Sequence
  Guide RNA
cuccuccugccccucugcccca

SEQ ID NO: 33110 - RNA, 22 nt, Artificial Sequence
  Guide RNA
cuccugccccucugccccacau

SEQ ID NO: 33111 - RNA, 22 nt, Artificial Sequence
  Guide RNA
cuccugccccucugccccacuc

SEQ ID NO: 33112 - RNA, 22 nt, Artificial Sequence
  Guide RNA
cucggcaggaccagucagagag

SEQ ID NO: 33113 - RNA, 22 nt, Artificial Sequence
  Guide RNA
cucggcaggaccagucagagau

SEQ ID NO: 33114 - RNA, 22 nt, Artificial Sequence
  Guide RNA
cucuccuccugccccucugccc

SEQ ID NO: 33115 - RNA, 22 nt, Artificial Sequence
  Guide RNA
cucucugacugguccugccgag

SEQ ID NO: 33116 - RNA, 22 nt, Artificial Sequence
  Guide RNA
cucugccccacaucucugacug

SEQ ID NO: 33117 - RNA, 22 nt, Artificial Sequence
  Guide RNA
cucugccccacucucugacugg

SEQ ID NO: 33118 - RNA, 22 nt, Artificial Sequence
  Guide RNA
cugccccacaucucugacuggu

SEQ ID NO: 33119 - RNA, 22 nt, Artificial Sequence
  Guide RNA
cugccccacucucugacugguc

SEQ ID NO: 33120 - RNA, 22 nt, Artificial Sequence
  Guide RNA
cugccccucugccccacaucuc

SEQ ID NO: 33121 - RNA, 22 nt, Artificial Sequence
  Guide RNA
cugccccucugccccacucucu

SEQ ID NO: 33122 - RNA, 22 nt, Artificial Sequence
  Guide RNA
gaccagucagagaguggggcag

SEQ ID NO: 33123 - RNA, 22 nt, Artificial Sequence
  Guide RNA
gaccagucagagauguggggca

SEQ ID NO: 33124 - RNA, 22 nt, Artificial Sequence
  Guide RNA
gagaguggggcagaggggcagg

SEQ ID NO: 33125 - RNA, 22 nt, Artificial Sequence
  Guide RNA
gagauguggggcagaggggcag

SEQ ID NO: 33126 - RNA, 22 nt, Artificial Sequence
  Guide RNA
gaguggggcagaggggcaggag

SEQ ID NO: 33127 - RNA, 22 nt, Artificial Sequence
  Guide RNA
gauguggggcagaggggcagga

SEQ ID NO: 33128 - RNA, 22 nt, Artificial Sequence
  Guide RNA
gcaggaccagucagagaguggg

SEQ ID NO: 33129 - RNA, 22 nt, Artificial Sequence
  Guide RNA
gcaggaccagucagagaugugg

SEQ ID NO: 33130 - RNA, 22 nt, Artificial Sequence
  Guide RNA
gccccacaucucugacuggucc

SEQ ID NO: 33131 - RNA, 22 nt, Artificial Sequence
  Guide RNA
gccccacucucugacugguccu

SEQ ID NO: 33132 - RNA, 22 nt, Artificial Sequence
  Guide RNA
gccccucugccccacaucucug

SEQ ID NO: 33133 - RNA, 22 nt, Artificial Sequence
  Guide RNA
gccccucugccccacucucuga

SEQ ID NO: 33134 - RNA, 22 nt, Artificial Sequence
  Guide RNA
ggaccagucagagaguggggca

SEQ ID NO: 33135 - RNA, 22 nt, Artificial Sequence
  Guide RNA
ggaccagucagagauguggggc

SEQ ID NO: 33136 - RNA, 22 nt, Artificial Sequence
  Guide RNA
ggcaggaccagucagagagugg

SEQ ID NO: 33137 - RNA, 22 nt, Artificial Sequence
  Guide RNA
ggcaggaccagucagagaugug

SEQ ID NO: 33138 - RNA, 22 nt, Artificial Sequence
  Guide RNA
gucagagaguggggcagagggg

SEQ ID NO: 33139 - RNA, 22 nt, Artificial Sequence
  Guide RNA
gucagagauguggggcagaggg

SEQ ID NO: 33140 - RNA, 22 nt, Artificial Sequence
  Guide RNA
gucucggcaggaccagucagag

SEQ ID NO: 33141 - RNA, 22 nt, Artificial Sequence
  Guide RNA
gugucucggcaggaccagucag

SEQ ID NO: 33142 - RNA, 22 nt, Artificial Sequence
  Guide RNA
ucagagaguggggcagaggggc

SEQ ID NO: 33143 - RNA, 22 nt, Artificial Sequence
  Guide RNA
ucagagauguggggcagagggg

SEQ ID NO: 33144 - RNA, 22 nt, Artificial Sequence
  Guide RNA
uccuccugccccucugccccac

SEQ ID NO: 33145 - RNA, 22 nt, Artificial Sequence
  Guide RNA
uccugccccucugccccacauc

SEQ ID NO: 33146 - RNA, 22 nt, Artificial Sequence
  Guide RNA
uccugccccucugccccacucu

SEQ ID NO: 33147 - RNA, 22 nt, Artificial Sequence
  Guide RNA
ucggcaggaccagucagagagu

SEQ ID NO: 33148 - RNA, 22 nt, Artificial Sequence
  Guide RNA
ucggcaggaccagucagagaug

SEQ ID NO: 33149 - RNA, 22 nt, Artificial Sequence
  Guide RNA
ucuccuccugccccucugcccc

SEQ ID NO: 33150 - RNA, 22 nt, Artificial Sequence
  Guide RNA
ucucggcaggaccagucagaga

SEQ ID NO: 33151 - RNA, 22 nt, Artificial Sequence
  Guide RNA
ucugccccacaucucugacugg

SEQ ID NO: 33152 - RNA, 22 nt, Artificial Sequence
  Guide RNA
ucugccccacucucugacuggu

SEQ ID NO: 33153 - RNA, 22 nt, Artificial Sequence
  Guide RNA
ugccccacaucucugacugguc

SEQ ID NO: 33154 - RNA, 22 nt, Artificial Sequence
  Guide RNA
ugccccacucucugacuggucc

SEQ ID NO: 33155 - RNA, 22 nt, Artificial Sequence
  Guide RNA
ugccccucugccccacaucucu

SEQ ID NO: 33156 - RNA, 22 nt, Artificial Sequence
  Guide RNA
ugccccucugccccacucucug

SEQ ID NO: 33157 - RNA, 22 nt, Artificial Sequence
  Guide RNA
ugucucggcaggaccagucaga

SEQ ID NO: 33158 - RNA, 20 nt, Artificial Sequence
  Guide RNA
aaaaggauaguguuugcauc

SEQ ID NO: 33159 - RNA, 20 nt, Artificial Sequence
  Guide RNA
aaaggauaguguuugcaucu

SEQ ID NO: 33160 - RNA, 20 nt, Artificial Sequence
  Guide RNA
aaggauaguguuugcaucua

SEQ ID NO: 33161 - RNA, 20 nt, Artificial Sequence
  Guide RNA
aaggauaguguuugcaucug

SEQ ID NO: 33162 - RNA, 20 nt, Artificial Sequence
  Guide RNA
aggauaguguuugcaucuag

SEQ ID NO: 33163 - RNA, 20 nt, Artificial Sequence
  Guide RNA
aggauaguguuugcaucugg

SEQ ID NO: 33164 - RNA, 20 nt, Artificial Sequence
  Guide RNA
aggcaugucucuaguccucc

SEQ ID NO: 33165 - RNA, 20 nt, Artificial Sequence
  Guide RNA
aggcaugucucuaguccucu

SEQ ID NO: 33166 - RNA, 20 nt, Artificial Sequence
  Guide RNA
aguccuccagaugcaaacac

SEQ ID NO: 33167 - RNA, 20 nt, Artificial Sequence
  Guide RNA
aguccucuagaugcaaacac

SEQ ID NO: 33168 - RNA, 20 nt, Artificial Sequence
  Guide RNA
aguguuugcaucuagaggac

SEQ ID NO: 33169 - RNA, 20 nt, Artificial Sequence
  Guide RNA
aguguuugcaucuggaggac

SEQ ID NO: 33170 - RNA, 20 nt, Artificial Sequence
  Guide RNA
auaguguuugcaucuagagg

SEQ ID NO: 33171 - RNA, 20 nt, Artificial Sequence
  Guide RNA
auaguguuugcaucuggagg

SEQ ID NO: 33172 - RNA, 20 nt, Artificial Sequence
  Guide RNA
aucuagaggacuagagacau

SEQ ID NO: 33173 - RNA, 20 nt, Artificial Sequence
  Guide RNA
aucuggaggacuagagacau

SEQ ID NO: 33174 - RNA, 20 nt, Artificial Sequence
  Guide RNA
augucucuaguccuccagau

SEQ ID NO: 33175 - RNA, 20 nt, Artificial Sequence
  Guide RNA
augucucuaguccucuagau

SEQ ID NO: 33176 - RNA, 20 nt, Artificial Sequence
  Guide RNA
caggcaugucucuaguccuc

SEQ ID NO: 33177 - RNA, 20 nt, Artificial Sequence
  Guide RNA
caucuagaggacuagagaca

SEQ ID NO: 33178 - RNA, 20 nt, Artificial Sequence
  Guide RNA
caucuggaggacuagagaca

SEQ ID NO: 33179 - RNA, 20 nt, Artificial Sequence
  Guide RNA
caugucucuaguccuccaga

SEQ ID NO: 33180 - RNA, 20 nt, Artificial Sequence
  Guide RNA
caugucucuaguccucuaga

SEQ ID NO: 33181 - RNA, 20 nt, Artificial Sequence
  Guide RNA
ccagaugcaaacacuauccu

SEQ ID NO: 33182 - RNA, 20 nt, Artificial Sequence
  Guide RNA
ccuccagaugcaaacacuau

SEQ ID NO: 33183 - RNA, 20 nt, Artificial Sequence
  Guide RNA
ccucuagaugcaaacacuau

SEQ ID NO: 33184 - RNA, 20 nt, Artificial Sequence
  Guide RNA
cuagaggacuagagacaugc

SEQ ID NO: 33185 - RNA, 20 nt, Artificial Sequence
  Guide RNA
cuagaugcaaacacuauccu

SEQ ID NO: 33186 - RNA, 20 nt, Artificial Sequence
  Guide RNA
cuaguccuccagaugcaaac

SEQ ID NO: 33187 - RNA, 20 nt, Artificial Sequence
  Guide RNA
cuaguccucuagaugcaaac

SEQ ID NO: 33188 - RNA, 20 nt, Artificial Sequence
  Guide RNA
cuccagaugcaaacacuauc

SEQ ID NO: 33189 - RNA, 20 nt, Artificial Sequence
  Guide RNA
cucuagaugcaaacacuauc

SEQ ID NO: 33190 - RNA, 20 nt, Artificial Sequence
  Guide RNA
cucuaguccuccagaugcaa

SEQ ID NO: 33191 - RNA, 20 nt, Artificial Sequence
  Guide RNA
cucuaguccucuagaugcaa

SEQ ID NO: 33192 - RNA, 20 nt, Artificial Sequence
  Guide RNA
cuggaggacuagagacaugc

SEQ ID NO: 33193 - RNA, 20 nt, Artificial Sequence
  Guide RNA
gauaguguuugcaucuagag

SEQ ID NO: 33194 - RNA, 20 nt, Artificial Sequence
  Guide RNA
gauaguguuugcaucuggag

SEQ ID NO: 33195 - RNA, 20 nt, Artificial Sequence
  Guide RNA
gcaggcaugucucuaguccu

SEQ ID NO: 33196 - RNA, 20 nt, Artificial Sequence
  Guide RNA
gcaucuagaggacuagagac

SEQ ID NO: 33197 - RNA, 20 nt, Artificial Sequence
  Guide RNA
gcaucuggaggacuagagac

SEQ ID NO: 33198 - RNA, 20 nt, Artificial Sequence
  Guide RNA
gcaugucucuaguccuccag

SEQ ID NO: 33199 - RNA, 20 nt, Artificial Sequence
  Guide RNA
gcaugucucuaguccucuag

SEQ ID NO: 33200 - RNA, 20 nt, Artificial Sequence
  Guide RNA
ggauaguguuugcaucuaga

SEQ ID NO: 33201 - RNA, 20 nt, Artificial Sequence
  Guide RNA
ggauaguguuugcaucugga

SEQ ID NO: 33202 - RNA, 20 nt, Artificial Sequence
  Guide RNA
ggcaugucucuaguccucca

SEQ ID NO: 33203 - RNA, 20 nt, Artificial Sequence
  Guide RNA
ggcaugucucuaguccucua

SEQ ID NO: 33204 - RNA, 20 nt, Artificial Sequence
  Guide RNA
guaaaaggauaguguuugca

SEQ ID NO: 33205 - RNA, 20 nt, Artificial Sequence
  Guide RNA
guccuccagaugcaaacacu

SEQ ID NO: 33206 - RNA, 20 nt, Artificial Sequence
  Guide RNA
guccucuagaugcaaacacu

SEQ ID NO: 33207 - RNA, 20 nt, Artificial Sequence
  Guide RNA
gucucuaguccuccagaugc

SEQ ID NO: 33208 - RNA, 20 nt, Artificial Sequence
  Guide RNA
gucucuaguccucuagaugc

SEQ ID NO: 33209 - RNA, 20 nt, Artificial Sequence
  Guide RNA
gugcaggcaugucucuaguc

SEQ ID NO: 33210 - RNA, 20 nt, Artificial Sequence
  Guide RNA
guguuugcaucuagaggacu

SEQ ID NO: 33211 - RNA, 20 nt, Artificial Sequence
  Guide RNA
guguuugcaucuggaggacu

SEQ ID NO: 33212 - RNA, 20 nt, Artificial Sequence
  Guide RNA
guuugcaucuagaggacuag

SEQ ID NO: 33213 - RNA, 20 nt, Artificial Sequence
  Guide RNA
guuugcaucuggaggacuag

SEQ ID NO: 33214 - RNA, 20 nt, Artificial Sequence
  Guide RNA
uaaaaggauaguguuugcau

SEQ ID NO: 33215 - RNA, 20 nt, Artificial Sequence
  Guide RNA
uagaggacuagagacaugcc

SEQ ID NO: 33216 - RNA, 20 nt, Artificial Sequence
  Guide RNA
uaguccuccagaugcaaaca

SEQ ID NO: 33217 - RNA, 20 nt, Artificial Sequence
  Guide RNA
uaguccucuagaugcaaaca

SEQ ID NO: 33218 - RNA, 20 nt, Artificial Sequence
  Guide RNA
uaguguuugcaucuagagga

SEQ ID NO: 33219 - RNA, 20 nt, Artificial Sequence
  Guide RNA
uaguguuugcaucuggagga

SEQ ID NO: 33220 - RNA, 20 nt, Artificial Sequence
  Guide RNA
uccagaugcaaacacuaucc

SEQ ID NO: 33221 - RNA, 20 nt, Artificial Sequence
  Guide RNA
uccuccagaugcaaacacua

SEQ ID NO: 33222 - RNA, 20 nt, Artificial Sequence
  Guide RNA
uccucuagaugcaaacacua

SEQ ID NO: 33223 - RNA, 20 nt, Artificial Sequence
  Guide RNA
ucuagaggacuagagacaug

SEQ ID NO: 33224 - RNA, 20 nt, Artificial Sequence
  Guide RNA
ucuagaugcaaacacuaucc

SEQ ID NO: 33225 - RNA, 20 nt, Artificial Sequence
  Guide RNA
ucuaguccuccagaugcaaa

SEQ ID NO: 33226 - RNA, 20 nt, Artificial Sequence
  Guide RNA
ucuaguccucuagaugcaaa

SEQ ID NO: 33227 - RNA, 20 nt, Artificial Sequence
  Guide RNA
ucucuaguccuccagaugca

SEQ ID NO: 33228 - RNA, 20 nt, Artificial Sequence
  Guide RNA
ucucuaguccucuagaugca

SEQ ID NO: 33229 - RNA, 20 nt, Artificial Sequence
  Guide RNA
ucuggaggacuagagacaug

SEQ ID NO: 33230 - RNA, 20 nt, Artificial Sequence
  Guide RNA
ugcaggcaugucucuagucc

SEQ ID NO: 33231 - RNA, 20 nt, Artificial Sequence
  Guide RNA
ugcaucuagaggacuagaga

SEQ ID NO: 33232 - RNA, 20 nt, Artificial Sequence
  Guide RNA
ugcaucuggaggacuagaga

SEQ ID NO: 33233 - RNA, 20 nt, Artificial Sequence
  Guide RNA
uggaggacuagagacaugcc

SEQ ID NO: 33234 - RNA, 20 nt, Artificial Sequence
  Guide RNA
ugucucuaguccuccagaug

SEQ ID NO: 33235 - RNA, 20 nt, Artificial Sequence
  Guide RNA
ugucucuaguccucuagaug

SEQ ID NO: 33236 - RNA, 20 nt, Artificial Sequence
  Guide RNA
uguuugcaucuagaggacua

SEQ ID NO: 33237 - RNA, 20 nt, Artificial Sequence
  Guide RNA
uguuugcaucuggaggacua

SEQ ID NO: 33238 - RNA, 20 nt, Artificial Sequence
  Guide RNA
uugcaucuagaggacuagag

SEQ ID NO: 33239 - RNA, 20 nt, Artificial Sequence
  Guide RNA
uugcaucuggaggacuagag

SEQ ID NO: 33240 - RNA, 20 nt, Artificial Sequence
  Guide RNA
uuugcaucuagaggacuaga

SEQ ID NO: 33241 - RNA, 20 nt, Artificial Sequence
  Guide RNA
uuugcaucuggaggacuaga

SEQ ID NO: 33242 - RNA, 21 nt, Artificial Sequence
  Guide RNA
aaaaggauaguguuugcaucu

SEQ ID NO: 33243 - RNA, 21 nt, Artificial Sequence
  Guide RNA
aaaggauaguguuugcaucua

SEQ ID NO: 33244 - RNA, 21 nt, Artificial Sequence
  Guide RNA
aaaggauaguguuugcaucug

SEQ ID NO: 33245 - RNA, 21 nt, Artificial Sequence
  Guide RNA
aaggauaguguuugcaucuag

SEQ ID NO: 33246 - RNA, 21 nt, Artificial Sequence
  Guide RNA
aaggauaguguuugcaucugg

SEQ ID NO: 33247 - RNA, 21 nt, Artificial Sequence
  Guide RNA
aggauaguguuugcaucuaga

SEQ ID NO: 33248 - RNA, 21 nt, Artificial Sequence
  Guide RNA
aggauaguguuugcaucugga

SEQ ID NO: 33249 - RNA, 21 nt, Artificial Sequence
  Guide RNA
aggcaugucucuaguccucca

SEQ ID NO: 33250 - RNA, 21 nt, Artificial Sequence
  Guide RNA
aggcaugucucuaguccucua

SEQ ID NO: 33251 - RNA, 21 nt, Artificial Sequence
  Guide RNA
aguccuccagaugcaaacacu

SEQ ID NO: 33252 - RNA, 21 nt, Artificial Sequence
  Guide RNA
aguccucuagaugcaaacacu

SEQ ID NO: 33253 - RNA, 21 nt, Artificial Sequence
  Guide RNA
aguguuugcaucuagaggacu

SEQ ID NO: 33254 - RNA, 21 nt, Artificial Sequence
  Guide RNA
aguguuugcaucuggaggacu

SEQ ID NO: 33255 - RNA, 21 nt, Artificial Sequence
  Guide RNA
auaguguuugcaucuagagga

SEQ ID NO: 33256 - RNA, 21 nt, Artificial Sequence
  Guide RNA
auaguguuugcaucuggagga

SEQ ID NO: 33257 - RNA, 21 nt, Artificial Sequence
  Guide RNA
aucuagaggacuagagacaug

SEQ ID NO: 33258 - RNA, 21 nt, Artificial Sequence
  Guide RNA
aucuggaggacuagagacaug

SEQ ID NO: 33259 - RNA, 21 nt, Artificial Sequence
  Guide RNA
augucucuaguccuccagaug

SEQ ID NO: 33260 - RNA, 21 nt, Artificial Sequence
  Guide RNA
augucucuaguccucuagaug

SEQ ID NO: 33261 - RNA, 21 nt, Artificial Sequence
  Guide RNA
caggcaugucucuaguccucc

SEQ ID NO: 33262 - RNA, 21 nt, Artificial Sequence
  Guide RNA
caggcaugucucuaguccucu

SEQ ID NO: 33263 - RNA, 21 nt, Artificial Sequence
  Guide RNA
caucuagaggacuagagacau

SEQ ID NO: 33264 - RNA, 21 nt, Artificial Sequence
  Guide RNA
caucuggaggacuagagacau

SEQ ID NO: 33265 - RNA, 21 nt, Artificial Sequence
  Guide RNA
caugucucuaguccuccagau

SEQ ID NO: 33266 - RNA, 21 nt, Artificial Sequence
  Guide RNA
caugucucuaguccucuagau

SEQ ID NO: 33267 - RNA, 21 nt, Artificial Sequence
  Guide RNA
ccagaugcaaacacuauccuu

SEQ ID NO: 33268 - RNA, 21 nt, Artificial Sequence
  Guide RNA
ccuccagaugcaaacacuauc

SEQ ID NO: 33269 - RNA, 21 nt, Artificial Sequence
  Guide RNA
ccucuagaugcaaacacuauc

SEQ ID NO: 33270 - RNA, 21 nt, Artificial Sequence
  Guide RNA
cuagaggacuagagacaugcc

SEQ ID NO: 33271 - RNA, 21 nt, Artificial Sequence
  Guide RNA
cuagaugcaaacacuauccuu

SEQ ID NO: 33272 - RNA, 21 nt, Artificial Sequence
  Guide RNA
cuaguccuccagaugcaaaca

SEQ ID NO: 33273 - RNA, 21 nt, Artificial Sequence
  Guide RNA
cuaguccucuagaugcaaaca

SEQ ID NO: 33274 - RNA, 21 nt, Artificial Sequence
  Guide RNA
cuccagaugcaaacacuaucc

SEQ ID NO: 33275 - RNA, 21 nt, Artificial Sequence
  Guide RNA
cucuagaugcaaacacuaucc

SEQ ID NO: 33276 - RNA, 21 nt, Artificial Sequence
  Guide RNA
cucuaguccuccagaugcaaa

SEQ ID NO: 33277 - RNA, 21 nt, Artificial Sequence
  Guide RNA
cucuaguccucuagaugcaaa

SEQ ID NO: 33278 - RNA, 21 nt, Artificial Sequence
  Guide RNA
cuggaggacuagagacaugcc

SEQ ID NO: 33279 - RNA, 21 nt, Artificial Sequence
  Guide RNA
gauaguguuugcaucuagagg

SEQ ID NO: 33280 - RNA, 21 nt, Artificial Sequence
  Guide RNA
gauaguguuugcaucuggagg

SEQ ID NO: 33281 - RNA, 21 nt, Artificial Sequence
  Guide RNA
gcaggcaugucucuaguccuc

SEQ ID NO: 33282 - RNA, 21 nt, Artificial Sequence
  Guide RNA
gcaucuagaggacuagagaca

SEQ ID NO: 33283 - RNA, 21 nt, Artificial Sequence
  Guide RNA
gcaucuggaggacuagagaca

SEQ ID NO: 33284 - RNA, 21 nt, Artificial Sequence
  Guide RNA
gcaugucucuaguccuccaga

SEQ ID NO: 33285 - RNA, 21 nt, Artificial Sequence
  Guide RNA
gcaugucucuaguccucuaga

SEQ ID NO: 33286 - RNA, 21 nt, Artificial Sequence
  Guide RNA
ggauaguguuugcaucuagag

SEQ ID NO: 33287 - RNA, 21 nt, Artificial Sequence
  Guide RNA
ggauaguguuugcaucuggag

SEQ ID NO: 33288 - RNA, 21 nt, Artificial Sequence
  Guide RNA
ggcaugucucuaguccuccag

SEQ ID NO: 33289 - RNA, 21 nt, Artificial Sequence
  Guide RNA
ggcaugucucuaguccucuag

SEQ ID NO: 33290 - RNA, 21 nt, Artificial Sequence
  Guide RNA
guaaaaggauaguguuugcau

SEQ ID NO: 33291 - RNA, 21 nt, Artificial Sequence
  Guide RNA
guccuccagaugcaaacacua

SEQ ID NO: 33292 - RNA, 21 nt, Artificial Sequence
  Guide RNA
guccucuagaugcaaacacua

SEQ ID NO: 33293 - RNA, 21 nt, Artificial Sequence
  Guide RNA
gucucuaguccuccagaugca

SEQ ID NO: 33294 - RNA, 21 nt, Artificial Sequence
  Guide RNA
gucucuaguccucuagaugca

SEQ ID NO: 33295 - RNA, 21 nt, Artificial Sequence
  Guide RNA
gugcaggcaugucucuagucc

SEQ ID NO: 33296 - RNA, 21 nt, Artificial Sequence
  Guide RNA
guguuugcaucuagaggacua

SEQ ID NO: 33297 - RNA, 21 nt, Artificial Sequence
  Guide RNA
guguuugcaucuggaggacua

SEQ ID NO: 33298 - RNA, 21 nt, Artificial Sequence
  Guide RNA
guuugcaucuagaggacuaga

SEQ ID NO: 33299 - RNA, 21 nt, Artificial Sequence
  Guide RNA
guuugcaucuggaggacuaga

SEQ ID NO: 33300 - RNA, 21 nt, Artificial Sequence
  Guide RNA
uaaaaggauaguguuugcauc

SEQ ID NO: 33301 - RNA, 21 nt, Artificial Sequence
  Guide RNA
uagaggacuagagacaugccu

SEQ ID NO: 33302 - RNA, 21 nt, Artificial Sequence
  Guide RNA
uaguccuccagaugcaaacac

SEQ ID NO: 33303 - RNA, 21 nt, Artificial Sequence
  Guide RNA
uaguccucuagaugcaaacac

SEQ ID NO: 33304 - RNA, 21 nt, Artificial Sequence
  Guide RNA
uaguguuugcaucuagaggac

SEQ ID NO: 33305 - RNA, 21 nt, Artificial Sequence
  Guide RNA
uaguguuugcaucuggaggac

SEQ ID NO: 33306 - RNA, 21 nt, Artificial Sequence
  Guide RNA
uccagaugcaaacacuauccu

SEQ ID NO: 33307 - RNA, 21 nt, Artificial Sequence
  Guide RNA
uccuccagaugcaaacacuau

SEQ ID NO: 33308 - RNA, 21 nt, Artificial Sequence
  Guide RNA
uccucuagaugcaaacacuau

SEQ ID NO: 33309 - RNA, 21 nt, Artificial Sequence
  Guide RNA
ucuagaggacuagagacaugc

SEQ ID NO: 33310 - RNA, 21 nt, Artificial Sequence
  Guide RNA
ucuagaugcaaacacuauccu

SEQ ID NO: 33311 - RNA, 21 nt, Artificial Sequence
  Guide RNA
ucuaguccuccagaugcaaac

SEQ ID NO: 33312 - RNA, 21 nt, Artificial Sequence
  Guide RNA
ucuaguccucuagaugcaaac

SEQ ID NO: 33313 - RNA, 21 nt, Artificial Sequence
  Guide RNA
ucucuaguccuccagaugcaa

SEQ ID NO: 33314 - RNA, 21 nt, Artificial Sequence
  Guide RNA
ucucuaguccucuagaugcaa

SEQ ID NO: 33315 - RNA, 21 nt, Artificial Sequence
  Guide RNA
ucuggaggacuagagacaugc

SEQ ID NO: 33316 - RNA, 21 nt, Artificial Sequence
  Guide RNA
ugcaggcaugucucuaguccu

SEQ ID NO: 33317 - RNA, 21 nt, Artificial Sequence
  Guide RNA
ugcaucuagaggacuagagac

SEQ ID NO: 33318 - RNA, 21 nt, Artificial Sequence
  Guide RNA
ugcaucuggaggacuagagac

SEQ ID NO: 33319 - RNA, 21 nt, Artificial Sequence
  Guide RNA
uggaggacuagagacaugccu

SEQ ID NO: 33320 - RNA, 21 nt, Artificial Sequence
  Guide RNA
uguaaaaggauaguguuugca

SEQ ID NO: 33321 - RNA, 21 nt, Artificial Sequence
  Guide RNA
ugucucuaguccuccagaugc

SEQ ID NO: 33322 - RNA, 21 nt, Artificial Sequence
  Guide RNA
ugucucuaguccucuagaugc

SEQ ID NO: 33323 - RNA, 21 nt, Artificial Sequence
  Guide RNA
ugugcaggcaugucucuaguc

SEQ ID NO: 33324 - RNA, 21 nt, Artificial Sequence
  Guide RNA
uguuugcaucuagaggacuag

SEQ ID NO: 33325 - RNA, 21 nt, Artificial Sequence
  Guide RNA
uguuugcaucuggaggacuag

SEQ ID NO: 33326 - RNA, 21 nt, Artificial Sequence
  Guide RNA
uugcaucuagaggacuagaga

SEQ ID NO: 33327 - RNA, 21 nt, Artificial Sequence
  Guide RNA
uugcaucuggaggacuagaga

SEQ ID NO: 33328 - RNA, 21 nt, Artificial Sequence
  Guide RNA
uuugcaucuagaggacuagag

SEQ ID NO: 33329 - RNA, 21 nt, Artificial Sequence
  Guide RNA
uuugcaucuggaggacuagag

SEQ ID NO: 33330 - RNA, 22 nt, Artificial Sequence
  Guide RNA
aaaaggauaguguuugcaucua

SEQ ID NO: 33331 - RNA, 22 nt, Artificial Sequence
  Guide RNA
aaaaggauaguguuugcaucug

SEQ ID NO: 33332 - RNA, 22 nt, Artificial Sequence
  Guide RNA
aaaggauaguguuugcaucuag

SEQ ID NO: 33333 - RNA, 22 nt, Artificial Sequence
  Guide RNA
aaaggauaguguuugcaucugg

SEQ ID NO: 33334 - RNA, 22 nt, Artificial Sequence
  Guide RNA
aaggauaguguuugcaucuaga

SEQ ID NO: 33335 - RNA, 22 nt, Artificial Sequence
  Guide RNA
aaggauaguguuugcaucugga

SEQ ID NO: 33336 - RNA, 22 nt, Artificial Sequence
  Guide RNA
aggauaguguuugcaucuagag

SEQ ID NO: 33337 - RNA, 22 nt, Artificial Sequence
  Guide RNA
aggauaguguuugcaucuggag

SEQ ID NO: 33338 - RNA, 22 nt, Artificial Sequence
  Guide RNA
aggcaugucucuaguccuccag

SEQ ID NO: 33339 - RNA, 22 nt, Artificial Sequence
  Guide RNA
aggcaugucucuaguccucuag

SEQ ID NO: 33340 - RNA, 22 nt, Artificial Sequence
  Guide RNA
aguccuccagaugcaaacacua

SEQ ID NO: 33341 - RNA, 22 nt, Artificial Sequence
  Guide RNA
aguccucuagaugcaaacacua

SEQ ID NO: 33342 - RNA, 22 nt, Artificial Sequence
  Guide RNA
aguguuugcaucuagaggacua

SEQ ID NO: 33343 - RNA, 22 nt, Artificial Sequence
  Guide RNA
aguguuugcaucuggaggacua

SEQ ID NO: 33344 - RNA, 22 nt, Artificial Sequence
  Guide RNA
auaguguuugcaucuagaggac

SEQ ID NO: 33345 - RNA, 22 nt, Artificial Sequence
  Guide RNA
auaguguuugcaucuggaggac

SEQ ID NO: 33346 - RNA, 22 nt, Artificial Sequence
  Guide RNA
aucuagaggacuagagacaugc

SEQ ID NO: 33347 - RNA, 22 nt, Artificial Sequence
  Guide RNA
aucuggaggacuagagacaugc

SEQ ID NO: 33348 - RNA, 22 nt, Artificial Sequence
  Guide RNA
augucucuaguccuccagaugc

SEQ ID NO: 33349 - RNA, 22 nt, Artificial Sequence
  Guide RNA
augucucuaguccucuagaugc

SEQ ID NO: 33350 - RNA, 22 nt, Artificial Sequence
  Guide RNA
augugcaggcaugucucuaguc

SEQ ID NO: 33351 - RNA, 22 nt, Artificial Sequence
  Guide RNA
caggcaugucucuaguccucca

SEQ ID NO: 33352 - RNA, 22 nt, Artificial Sequence
  Guide RNA
caggcaugucucuaguccucua

SEQ ID NO: 33353 - RNA, 22 nt, Artificial Sequence
  Guide RNA
caucuagaggacuagagacaug

SEQ ID NO: 33354 - RNA, 22 nt, Artificial Sequence
  Guide RNA
caucuggaggacuagagacaug

SEQ ID NO: 33355 - RNA, 22 nt, Artificial Sequence
  Guide RNA
caugucucuaguccuccagaug

SEQ ID NO: 33356 - RNA, 22 nt, Artificial Sequence
  Guide RNA
caugucucuaguccucuagaug

SEQ ID NO: 33357 - RNA, 22 nt, Artificial Sequence
  Guide RNA
ccagaugcaaacacuauccuuu

SEQ ID NO: 33358 - RNA, 22 nt, Artificial Sequence
  Guide RNA
ccuccagaugcaaacacuaucc

SEQ ID NO: 33359 - RNA, 22 nt, Artificial Sequence
  Guide RNA
ccucuagaugcaaacacuaucc

SEQ ID NO: 33360 - RNA, 22 nt, Artificial Sequence
  Guide RNA
cuagaggacuagagacaugccu

SEQ ID NO: 33361 - RNA, 22 nt, Artificial Sequence
  Guide RNA
cuagaugcaaacacuauccuuu

SEQ ID NO: 33362 - RNA, 22 nt, Artificial Sequence
  Guide RNA
cuaguccuccagaugcaaacac

SEQ ID NO: 33363 - RNA, 22 nt, Artificial Sequence
  Guide RNA
cuaguccucuagaugcaaacac

SEQ ID NO: 33364 - RNA, 22 nt, Artificial Sequence
  Guide RNA
cuccagaugcaaacacuauccu

SEQ ID NO: 33365 - RNA, 22 nt, Artificial Sequence
  Guide RNA
cucuagaugcaaacacuauccu

SEQ ID NO: 33366 - RNA, 22 nt, Artificial Sequence
  Guide RNA
cucuaguccuccagaugcaaac

SEQ ID NO: 33367 - RNA, 22 nt, Artificial Sequence
  Guide RNA
cucuaguccucuagaugcaaac

SEQ ID NO: 33368 - RNA, 22 nt, Artificial Sequence
  Guide RNA
cuggaggacuagagacaugccu

SEQ ID NO: 33369 - RNA, 22 nt, Artificial Sequence
  Guide RNA
cuguaaaaggauaguguuugca

SEQ ID NO: 33370 - RNA, 22 nt, Artificial Sequence
  Guide RNA
gauaguguuugcaucuagagga

SEQ ID NO: 33371 - RNA, 22 nt, Artificial Sequence
  Guide RNA
gauaguguuugcaucuggagga

SEQ ID NO: 33372 - RNA, 22 nt, Artificial Sequence
  Guide RNA
gcaggcaugucucuaguccucc

SEQ ID NO: 33373 - RNA, 22 nt, Artificial Sequence
  Guide RNA
gcaggcaugucucuaguccucu

SEQ ID NO: 33374 - RNA, 22 nt, Artificial Sequence
  Guide RNA
gcaucuagaggacuagagacau

SEQ ID NO: 33375 - RNA, 22 nt, Artificial Sequence
  Guide RNA
gcaucuggaggacuagagacau

SEQ ID NO: 33376 - RNA, 22 nt, Artificial Sequence
  Guide RNA
gcaugucucuaguccuccagau

SEQ ID NO: 33377 - RNA, 22 nt, Artificial Sequence
  Guide RNA
gcaugucucuaguccucuagau

SEQ ID NO: 33378 - RNA, 22 nt, Artificial Sequence
  Guide RNA
ggauaguguuugcaucuagagg

SEQ ID NO: 33379 - RNA, 22 nt, Artificial Sequence
  Guide RNA
ggauaguguuugcaucuggagg

SEQ ID NO: 33380 - RNA, 22 nt, Artificial Sequence
  Guide RNA
ggcaugucucuaguccuccaga

SEQ ID NO: 33381 - RNA, 22 nt, Artificial Sequence
  Guide RNA
ggcaugucucuaguccucuaga

(The sequence listing continues in the following parts.)

1. A method for modifying in a cell a mutant allele of the signal transducer and activator of transcription 1 (STAT1) gene having a mutation associated with chronic mucocutaneous candidiasis (CMC), the method comprising
introducing to the cell a composition comprising:
a CRISPR nuclease or a sequence encoding the CRISPR nuclease; and
a first RNA molecule comprising a guide sequence portion having 17-25 nucleotides or a nucleotide sequence encoding the same,
wherein a complex of the CRISPR nuclease and the first RNA molecule affects a double strand break in the mutant allele of the STAT1 gene.

2. The method of claim 1, wherein the first RNA molecule targets the CRISPR nuclease to the mutation associated with CMC.

3. The method of claim 2, wherein the mutation associated with CMC is any one of 2:190969075_T_C, 2:190969230_G_A, 2:190969443_T_C, 2:190969771_T_G, 2:190969782_C_G, 2:190970341_A_G, 2:190975830_A_G, 2:190975860_G_T, 2:190976881_T_C, 2:190976971_G_T, 2:190976990_T_C, 2:190978930_A_G, 2:190978964_C_A, 2:190978967_GCT_G, 2:190978972_C_T, 2:190978985_T_C, 2:190979759_C_T, 2:190979816_G_A, 2:190979824_C_G, 2:190980614_C_T, 2:190980623_A_C, 2:190982415_T_C, 2:190983651_C_T, 2:190983657_C_T, 2:190983699_C_A, 2:190984307_T_C, 2:190984316_G_T, 2:190984360_G_C, 2:190985612_C_T, 2:190985626_G_C, 2:190985634_G_A, 2:190985634_G_C, 2:190985663_A_G, 2:190985665_A_G, 2:190986906_A_C, 2:190986907_T_C, 2:190986913_T_C, 2:190986913_T_G, 2:190986921_G_A, 2:190986924_C_T, 2:190987045_AC_TA, 2:190989622_A_G, 2:190989649_T_C, 2:190989659_C_A, 2:190989660_A_C, 2:190991241_T_G, 2:190991258_T_A, 2:190991295_A_G, 2:190991307_C_G, 2:190991325_A_C, 2:190995071_G_A, 2:190995129_G_T, 2:190995139_T_C, 2:190995143_T_C, 2:190995148_T_A, 2:190995151_T_C, 2:190995173_T_C, 2:190995184_C_T, 2:190995185_G_A, 2:190995185_G_C, 2:190995193_T_G, 2:190995205_G_A, 2:190995209_C_T, 2:190997889_G_A, 2:190997890_G_GC, 2:190997919_C_T, 2:190997927_C_T, 2:190998244_C_T, 2:190998246_T_C, 2:190998247_C_A, 2:190999630_G_T, 2:190999647_A_G, 2:190999649_T_A, 2:190999659_A_T, 2:190999673_T_C, 2:190999674_C_G, 2:190999689_T_G, 2:191001113_CTCTT_C, 2:191001124_T_A, 2:191001129_A_T, 2:191001156_G_A, 2:191007651_T_A, 2:191007665_G_C, 2:191009043_C_T, 2:191009050_T_C, 2:191009915_AT_A, 2:191013689_A_T, 2:191014155_G_C, and 2:191014182_G_A, or wherein the guide sequence portion of the first RNA molecule comprises 17-25 contiguous nucleotides containing nucleotides in the sequence set forth in any one of SEQ ID NOs 1-37365 which targets a mutation associated with CMC.

4. (canceled)

5. The method of claim 1, further comprising introduction of a donor DNA molecule for homology directed repair (HDR), alteration, or replacement of a desired sequence of the STAT1 allele.

6. The method of claim 1, wherein the first RNA molecule targets the CRISPR nuclease to a SNP position of the mutant allele.

7. The method of claim 6, wherein the SNP position is any one of rs10199181, rs11682932, rs11692579, rs12693590, rs1914408, rs2066795, rs2280235, rs41375144, rs41430444, rs62179911, rs73979324, 2:190961761_C_T, 2:190963870_A_G, 2:190977033_G_A, 2:190995803_C_T, 2:191017537_C_T, rs12693591, rs11386507, rs398105121, rs3215260, rs112292924, rs11889555, rs12693589, rs13029247, rs55658633, rs13005843, rs5837215, rs13029532, rs59420375, rs73064614, rs7562024, 2:191021099_T_C, 2:191021367_T_C, rs11688154, rs12693588, rs13010343, rs3088307, rs36234022, rs6752638, rs6755660, 2:190963477_A_T, 2:190963479_C_A, 2:190985840_T_C, rs1400657, rs6718902, 2:190971704_T_TTC, rs10437, rs11887698, rs2066802, rs34997637, rs7558921, 2:190961656_A_G, 2:190972045_T_C, 2:190973115_T_C, rs11885069, rs12987796, rs17817076, rs2030171, rs36116009, rs4853537, 2:191015776_C_G, rs41454245, rs760275441, rs1491049196, rs11677408, rs12464143, rs151232124, rs796493321, rs41474144, rs10173099, rs11693463, rs16833157, rs2280234, rs4853455, 2:190966079_A_C, rs7597768, rs36014758, 2:190964627_C_G, rs36077929, rs16833172, 2:190972908_C_T, rs3755312, 2:191018047_C_G, rs16833177, rs2280232, rs13395505, rs10208033, rs12468579, rs2066806, rs4327257, rs1168, rs6711082, rs1547550, rs16833146, rs3771300, rs7575823, rs10195683, rs34230248, rs45528632, rs45467700, 2:190989913_C_A, rs11904548, rs67960489, 2:191005594_G_A, rs6751855, 2:190974738_G_A, rs7576984, rs71403203, rs4853532, rs6745710, rs397814979, rs2066797, 2:190961689_G_GTTT, 2:190961689_G_GTTTT, 2:190961689_G_GT, rs113477796, rs7565237, rs1467198, rs762997161, rs10190333, rs1491128973, rs72330702, 2:190971836_C_G, 2:191015242_G_GTT, 2:191015242_G_GT, rs60976990, 2:190991701_G_T, and 2:190988561_G_A, or wherein the guide sequence portion of the first RNA molecule comprises 17-25 contiguous nucleotides containing nucleotides in the sequence set forth in any one of SEQ ID NOs 1-37365 which targets a SNP position of the mutant allele.

8. (canceled)

9. The method of claim 6, wherein the SNP position is in Exon 3 of STAT1.

10. (canceled)

11. The method of claim 6, wherein the SNP position contains a heterozygous SNP.

12. The method of claim 1, further comprising introduction of a second RNA molecule comprising a guide sequence portion capable of complexing with a CRISPR nuclease, wherein the complex of the second RNA molecule and CRISPR nuclease affects a second double strand break in the STAT1 gene.

13. The method of claim 12, wherein the second RNA molecule is a non-discriminatory gRNA that targets both a functional STAT1 allele and the mutant STAT1 allele.

14. The method of claim 12, wherein the second RNA molecule targets a STAT1 intron.

15. The method of claim 12, wherein a STAT1 exon is excised by the first and second RNA molecules, and wherein the exon is selected from the group consisting of Exon 3, 4, 7, 8, 9, 14, 18, 19, 20, and 21.

16. The method of claim 12, wherein the guide sequence portion of the second RNA molecule comprises 17-25 contiguous nucleotides containing nucleotides in the sequence set forth in any one of SEQ ID NOs 1-37365 other than the sequence of the first RNA molecule.

17. A modified cell obtained by the method of claim 1.

18. A composition comprising a first RNA molecule comprising a guide sequence portion having 17-25 contiguous nucleotides containing nucleotides in the sequence set forth in any one of SEQ ID NOs 1-37365, and/or a CRISPR nuclease.

19. (canceled)

20. The composition of claim 19, further comprising a second RNA molecule comprising a guide sequence portion.

21. The composition of claim 20, wherein the 17-25 nucleotides of the guide sequence portion of the second RNA molecule is a different sequence from the sequence of the guide sequence portion of the first RNA molecule, or wherein the guide sequence portion of the second RNA molecule comprises 17-25 contiguous nucleotides containing nucleotides in the sequence set forth in any one of SEQ ID NOs 1-37365 other than the sequence of the first RNA molecule.

22. (canceled)

23. A method for inactivating a mutant STAT1 allele in a cell, the method comprising delivering to the cell the composition of claim 19.

24. A method for treating CMC, the method comprising delivering to a cell of a subject having CMC the composition of claim 19.

25-28. (canceled)

29. A kit for inactivating a mutant STAT1 allele in a cell, comprising the RNA molecule of the composition of claim 18, a CRISPR nuclease, and/or a tracrRNA molecule; and instructions for delivering the RNA molecule; CRISPR nuclease, and/or the tracrRNA to the cell, or a kit for treating CMC in a subject, comprising the RNA molecule of the composition claim 18, a CRISPR nuclease, and/or a tracrRNA molecule; and instructions for delivering the RNA molecule; CRISPR nuclease, and/or the tracrRNA to a cell of a subject having or at risk of having CMC.

30. (canceled)
